United States Patent Application Publication US 2025/0084491 A1 - sequence listing, part 31

SEQ ID NO: 588568 - DNA, 75 bp, synthetic construct
  source 1..75: mol_type = other DNA
cagcgtggtgaaggtgacccgtacaccgacagacccggtgctgtaccggagcggagacacgacgcctcttcccgg

SEQ ID NO: 588569 - DNA, 75 bp, synthetic construct
  source 1..75: mol_type = other DNA
gattcgagcaggtattcaccaggtaacaatccgcaaaccgtcagaaactgtagaaatcatcgactcaagcgccct

SEQ ID NO: 588570 - DNA, 75 bp, synthetic construct
  source 1..75: mol_type = other DNA
ggtttatgtatcagtgacagatgttcttaccccagcacaggtaaaacaacgtcaggatgaggaaaaacgcctcca

SEQ ID NO: 588571 - DNA, 75 bp, synthetic construct
  source 1..75: mol_type = other DNA
cgcgcaccggccgctggcattagacgatgaccttgatgcagaatttacctggcgagagcctcgccgggtatcaaa

SEQ ID NO: 588572 - DNA, 75 bp, synthetic construct
  source 1..75: mol_type = other DNA
tgataatgcaccgataccaattcttggctcgaccgtagggtcgacttcaacaacgggtggtaccacagagtcaat

SEQ ID NO: 588573 - DNA, 75 bp, synthetic construct
  source 1..75: mol_type = other DNA
gatgctgcattgagttctgctatggaaagcaggaagaagaaagaagataagaaaaggagcgctgaaaataaatta

SEQ ID NO: 588574 - DNA, 75 bp, synthetic construct
  source 1..75: mol_type = other DNA
acctgtcagttcattacctctcgataaggcaacagtaaacgtaaatgttcgtgttgttgatgatgtaaaagacga

SEQ ID NO: 588575 - DNA, 75 bp, synthetic construct
  source 1..75: mol_type = other DNA
gaaaaagtctcaaaagatcctgaacttagtaaaaatctaagtccgagtaataaatctggtgtttcaaagggttac

SEQ ID NO: 588576 - DNA, 75 bp, synthetic construct
  source 1..75: mol_type = other DNA
ccgacagacccggtgctgtaccgctcagacagtaacagcccgttgcctgcagcgctgataatccggcatgcagaa

SEQ ID NO: 588577 - DNA, 75 bp, synthetic construct
  source 1..75: mol_type = other DNA
cggtattttctacatttccgctattttattttgcaatggttgttgctggtttgtcgtatataacttttgcagtaa

SEQ ID NO: 588578 - DNA, 75 bp, synthetic construct
  source 1..75: mol_type = other DNA
tccggcttttgattacagcgattgtcatttccccggtaattatctggtcgtgggatacggtaaaagaaaccacgg

SEQ ID NO: 588579 - DNA, 75 bp, synthetic construct
  source 1..75: mol_type = other DNA
ttttactccggtgtgctcctgtttattctgtatttttgtttttctgccctgactggcctgcagaaagatgatgaa

SEQ ID NO: 588580 - DNA, 75 bp, synthetic construct
  source 1..75: mol_type = other DNA
tattagcaatgacatttcaaaaaagctaaaagaacatctggttgattattttaggaataagctgggtaatttaaa

SEQ ID NO: 588581 - DNA, 75 bp, synthetic construct
  source 1..75: mol_type = other DNA
tttatttcaaacggaaattctataaaaatgaaatcacaaaaaaaatttgggataaggggcgtgagttatatataa

SEQ ID NO: 588582 - DNA, 75 bp, synthetic construct
  source 1..75: mol_type = other DNA
cgccgccccacccattccagtagtacctgaagaaaaaccaatgcctaaccctcttaaaatgtacgcggtcgatgc

SEQ ID NO: 588583 - DNA, 75 bp, synthetic construct
  source 1..75: mol_type = other DNA
gccgagccggatttaatcattcaggcgttcaatgagtaccaacttttgtgcgccctgcgggaagggccatttggc

SEQ ID NO: 588584 - DNA, 75 bp, synthetic construct
  source 1..75: mol_type = other DNA
tgactgccagcgtcagcgaacttaaaaacgatccggtggccaccgccagtgccggcggcggctacccggtcgcga

SEQ ID NO: 588585 - DNA, 75 bp, synthetic construct
  source 1..75: mol_type = other DNA
aggttgagttaagaacggatgcgccggcagaactggaagtgccggtcagttacaggggaaacctgcagatagccc

SEQ ID NO: 588586 - DNA, 75 bp, synthetic construct
  source 1..75: mol_type = other DNA
ttgcccgtaatgacagcgcacttgggttgtttaatggcgatatcggtattgcgctggatcgcgggcaggggacgc

SEQ ID NO: 588587 - DNA, 75 bp, synthetic construct
  source 1..75: mol_type = other DNA
atgaaagtcatattcacgtcgaaccgtttcattaattttcttatccggcttttgattacagcgattgttattttc

SEQ ID NO: 588588 - DNA, 75 bp, synthetic construct
  source 1..75: mol_type = other DNA
tgtatttttgtttttctgccctgactgacctgcagaaacctgatgaaagaaaaagtgatgaaaggaatgaagatg

SEQ ID NO: 588589 - DNA, 75 bp, synthetic construct
  source 1..75: mol_type = other DNA
gaacggataccgaagtggggaaaactgtcgccagctgcgcgcttttacaagccgcaaaggcagcaggctaccgga

SEQ ID NO: 588590 - DNA, 75 bp, synthetic construct
  source 1..75: mol_type = other DNA
tgaattggatatgccgttggccatcgtcaggcttgatactctggtttcttcatatcttggtgaaactgctgctaa

SEQ ID NO: 588591 - DNA, 75 bp, synthetic construct
  source 1..75: mol_type = other DNA
tacccaatacgacaccgtgtacggcgggtataaaaacagggagagtgagggcgtttattttgtgcccttcatgac

SEQ ID NO: 588592 - DNA, 75 bp, synthetic construct
  source 1..75: mol_type = other DNA
gctttaaatgcctttatagataagggtgattatctgaataatttatatgttaataaaacacgcacggcagctgaa

SEQ ID NO: 588593 - DNA, 75 bp, synthetic construct
  source 1..75: mol_type = other DNA
atcaaggaacgtctcataccgttcctcgatgggcaggttatcaagaaagtcgatctcactactcgttcaatcgaa

SEQ ID NO: 588594 - DNA, 75 bp, synthetic construct
  source 1..75: mol_type = other DNA
cggatgcatcaaatctgaatcttatgcaccacaagggcacgtcgaatgcacaactgggcacatttggtgcgtttg

SEQ ID NO: 588595 - DNA, 75 bp, synthetic construct
  source 1..75: mol_type = other DNA
gttgtgtggggcatgctctgcatgttgccaaaaagctgctgccgtttatgcctgcgaatgcgggtatccttcttg

SEQ ID NO: 588596 - DNA, 75 bp, synthetic construct
  source 1..75: mol_type = other DNA
tcatctgatccggcggctccagcaatacaagctattaatgccttcatggataaaggaaatcatctacaagattta

SEQ ID NO: 588597 - DNA, 75 bp, synthetic construct
  source 1..75: mol_type = other DNA
gatcttgtgcaatatttcaatggattatataaggaaaaaattaaggcggaaaacataggtaaaacggtaagtagt

SEQ ID NO: 588598 - DNA, 75 bp, synthetic construct
  source 1..75: mol_type = other DNA
tggatgttaaggatagtgaacaaattatattactaaaccaggcgctcgatcatgctaataatgcccaaaaattac

SEQ ID NO: 588599 - DNA, 75 bp, synthetic construct
  source 1..75: mol_type = other DNA
actgaaagacatgctgatcggtgatgaggaagcaacagggaaaaaagccctgaaactgaccaaacaggaaggcaa

SEQ ID NO: 588600 - DNA, 75 bp, synthetic construct
  source 1..75: mol_type = other DNA
atggagaaaataagaggaattaatatcctccacgttcctgaaatcctggaggatattaatgtcatcaaaacatta

SEQ ID NO: 588601 - DNA, 75 bp, synthetic construct
  source 1..75: mol_type = other DNA
agcgtaggaatgagatcctgcgttctcaagttattagtggtctacaggcgtcagaggagctggcaaaacttctta

SEQ ID NO: 588602 - DNA, 75 bp, synthetic construct
  source 1..75: mol_type = other DNA
agcatccggggctgtttagtgcgatggtgaatcagttcagaacggagcttgccggtctggcatcacagagcacag

SEQ ID NO: 588603 - DNA, 75 bp, synthetic construct
  source 1..75: mol_type = other DNA
ctggattatgttcgcctggcatttgatgaatttgacgaactggctggcgaccgtgcgtatgcagacgataaagcg

SEQ ID NO: 588604 - DNA, 75 bp, synthetic construct
  source 1..75: mol_type = other DNA
ggatttcaggttttagaggtataaaggaaattgaggttgagctaggacgtattgccgttttgttaggtacaaaca

SEQ ID NO: 588605 - DNA, 75 bp, synthetic construct
  source 1..75: mol_type = other DNA
tcttcgcaatacgatgcggtgtatggtgcatacaagacgaaatccgcaaaaaaaatcttctttgtgccgtttatg

SEQ ID NO: 588606 - DNA, 75 bp, synthetic construct
  source 1..75: mol_type = other DNA
accaaatcgtaaatactttggttcaggatgcggtatcacttggtacaaattcgtccccgatcagtactctggttt

SEQ ID NO: 588607 - DNA, 75 bp, synthetic construct
  source 1..75: mol_type = other DNA
tatgcaaaagcaatcacagataatctgattaaattgccgaaagaaaaatttcctcagaagatagttgaactattc

SEQ ID NO: 588608 - DNA, 75 bp, synthetic construct
  source 1..75: mol_type = other DNA
atgaatattctgatagataaagttcgtatatctgggtttagaggaatatcaaatgttgagataactctcccaaga

SEQ ID NO: 588609 - DNA, 75 bp, synthetic construct
  source 1..75: mol_type = other DNA
ttaattatttctggcgttcggagaccacttattatccagtggggagtggggcagtttgggggaagtctgggggat

SEQ ID NO: 588610 - DNA, 75 bp, synthetic construct
  source 1..75: mol_type = other DNA
agataagaaaccacattgccgcacaggatcctcatacccagtatgcacagaaacataatccgacatttaccggag

SEQ ID NO: 588611 - DNA, 75 bp, synthetic construct
  source 1..75: mol_type = other DNA
ttgattgatacgaaatatggtcgctatgtttttaaagtctttgctccgaaaacgaaaaggaatgaacgtttttta

SEQ ID NO: 588612 - DNA, 75 bp, synthetic construct
  source 1..75: mol_type = other DNA
ctaaccctaaaaatattctgcttgcagtggtctggatgcagggcgagtttgatttgaaacagggtgcatacgcca

SEQ ID NO: 588613 - DNA, 75 bp, synthetic construct
  source 1..75: mol_type = other DNA
tggaaaaacagccgggtaaactgacctcctggaagatgttccgtactgttgcggtggaggaggcaaaaaatcttc

SEQ ID NO: 588614 - DNA, 75 bp, synthetic construct
  source 1..75: mol_type = other DNA
tggcgaggggctgccgctgccggatacgtatgatcgtcctgacccgcgtattaagcaactggcgcgtcgcagcac

SEQ ID NO: 588615 - DNA, 75 bp, synthetic construct
  source 1..75: mol_type = other DNA
cagtccggacgccggtatatcggtatcgagctgcttgaacagtatcaccgtgccggacagcaacggctggctgcc

SEQ ID NO: 588616 - DNA, 75 bp, synthetic construct
  source 1..75: mol_type = other DNA
caccgtgccggacagcaacggctggccgccgtccatcgggccatgcagcagggggccgcgaatgattactggttt

SEQ ID NO: 588617 - DNA, 75 bp, synthetic construct
  source 1..75: mol_type = other DNA
caccgtgccggacagcaacgcctggccgccgtgcatcgggccatgcagcagggggccgcgaatgattactggttt

SEQ ID NO: 588618 - DNA, 75 bp, synthetic construct
  source 1..75: mol_type = other DNA
aatagcgaaagacacttctaccaataaaggcaaagcgaagcagacactgaactttaaagcctggctggtcggcgc

SEQ ID NO: 588619 - DNA, 75 bp, synthetic construct
  source 1..75: mol_type = other DNA
gaccgtaatctggaaaggcttacatactgtatgttctgtgggcgtcgttttcttgtcattcctgtttcctctgtg

SEQ ID NO: 588620 - DNA, 75 bp, synthetic construct
  source 1..75: mol_type = other DNA
ggcgttgagctggagactgaacgttttgagcagacggttcgggaagtacaggatttagtcagccagaacggatga

SEQ ID NO: 588621 - DNA, 75 bp, synthetic construct
  source 1..75: mol_type = other DNA
tgatatgtggattaaaaacaaactttctttacagatggagaaattagaagacggttgggatttggtatgcagtaa

SEQ ID NO: 588622 - DNA, 75 bp, synthetic construct
  source 1..75: mol_type = other DNA
aatgatatcacggatagtaatgcgagagccgatgcggcgagactccttacagaagatgctgtgaaagagtattgg

SEQ ID NO: 588623 - DNA, 75 bp, synthetic construct
  source 1..75: mol_type = other DNA
agccgaaaagcagcattgatccaaataagttagctgtgcgccctgctggtgtatcacctgagcaatacaatgctt

SEQ ID NO: 588624 - DNA, 75 bp, synthetic construct
  source 1..75: mol_type = other DNA
caccgtgccggacagcaacgtctggccgccgtacaacgggccatgcagcagggggccgcgaatgattactggttt

SEQ ID NO: 588625 - DNA, 75 bp, synthetic construct
  source 1..75: mol_type = other DNA
caccgtgccggacagcaacgactggccgccgttcaacgggccatgcagcagggggccgcgaatgattactggttt

SEQ ID NO: 588626 - DNA, 75 bp, synthetic construct
  source 1..75: mol_type = other DNA
gagcagtcgtccgggagacctggttgcagatttttttatgggttcaggttcaacggtaaaagcggcgatggcact

SEQ ID NO: 588627 - DNA, 75 bp, synthetic construct
  source 1..75: mol_type = other DNA
gtgcttatttttgtatttctggtgatattctatgggattattattttacatgatattccctacctgattgctaaa

SEQ ID NO: 588628 - DNA, 75 bp, synthetic construct
  source 1..75: mol_type = other DNA
ctttgcctgataaccacgagttactcgctaaagaatggcgggagtctgctgatctctcggcctgcatatcggtga

SEQ ID NO: 588629 - DNA, 75 bp, synthetic construct
  source 1..75: mol_type = other DNA
acctgctgcggggtggcctgacccgtgggaacaaaaaacagacagaaacgggattcacaaatcccgtaaatgagc

SEQ ID NO: 588630 - DNA, 75 bp, synthetic construct
  source 1..75: mol_type = other DNA
ggacgatttgctttacctgccgcagctcaacaagcaccagatacagacgctggccaccatgacggcggcgatgtt

SEQ ID NO: 588631 - DNA, 75 bp, synthetic construct
  source 1..75: mol_type = other DNA
aggcacgcggtgcggtggatgaagccatggcctcgctgcgtctgctgccgtcctatctgcgtgatccgcttatcc

SEQ ID NO: 588632 - DNA, 75 bp, synthetic construct
  source 1..75: mol_type = other DNA
atgaaccgcagccagctattgatccggacgacttcgcgaacttcagccagttgccaaaaaccggactgcaacgcg

SEQ ID NO: 588633 - DNA, 75 bp, synthetic construct
  source 1..75: mol_type = other DNA
atggccgagagcgtggagcgcgccatcggctgggcgcgccttcatcgggtccgccagttccagttctttggcatc

SEQ ID NO: 588634 - DNA, 75 bp, synthetic construct
  source 1..75: mol_type = other DNA
cgggtcatgtggtcttctttgataatcagtcaaaactgctcatttctggcgacgttattttcaaaggcggagtag

SEQ ID NO: 588635 - DNA, 75 bp, synthetic construct
  source 1..75: mol_type = other DNA
ttaaagcatggttagtgggtgaatcgactgcggtaacgccaacaccggcaccgtttgaaacgctgacgacgttcc

SEQ ID NO: 588636 - DNA, 75 bp, synthetic construct
  source 1..75: mol_type = other DNA
tcaaagcctggttagtcggtgcgacgggtacgcctgacctgggtggttttgaagcgaataccactttccagatta

SEQ ID NO: 588637 - DNA, 75 bp, synthetic construct
  source 1..75: mol_type = other DNA
gcacacacaaagaatctgtgaaacaaccgaacgcgcctgccacaaagctgacctactgcgaagaggagtaaagag

SEQ ID NO: 588638 - DNA, 75 bp, synthetic construct
  source 1..75: mol_type = other DNA
gtggatggcatcgacccgaaaacgggcaagccacgcgttgaccacgaaaccggaaaatcaatggccgagagcgtg

SEQ ID NO: 588639 - DNA, 75 bp, synthetic construct
  source 1..75: mol_type = other DNA
agcaagggtaaagacaagcaaacgctgaactttaaagcctggctggtgggtgaaaccgatgcgccggatctcggc

SEQ ID NO: 588640 - DNA, 75 bp, synthetic construct
  source 1..75: mol_type = other DNA
taaaatagccgttcgtcaaccaggcgtatcaccggaacaattcaatgcatattcatcacgcagtttcaaaataaa

SEQ ID NO: 588641 - DNA, 75 bp, synthetic construct
  source 1..75: mol_type = other DNA
ggcgtctgattcgcgtgaatcagggcggtaaatttcgttactgcataccgggcgctgatttaccggcagagccgg

SEQ ID NO: 588642 - DNA, 75 bp, synthetic construct
  source 1..75: mol_type = other DNA
actgcatgccgggcgataagttaccagcagagccgaaatccgtgccggtaacggaaaatgatggtaaagcctttc

SEQ ID NO: 588643 - DNA, 75 bp, synthetic construct
  source 1..75: mol_type = other DNA
tgcgccgcgctgcgggagctgaacaagcaccgggatattgttcgacatattttcgattcctccagccgtattgtg

SEQ ID NO: 588644 - DNA, 75 bp, synthetic construct
  source 1..75: mol_type = other DNA
gcagtcacagccgtcgttcaccagaaagcatccggatgggctgattttaccatcgctgcatgtggctaaccgcga

SEQ ID NO: 588645 - DNA, 75 bp, synthetic construct
  source 1..75: mol_type = other DNA
aagtagcttcaacgctggcaatggcaatcagcaaggggcggctggcacgcgttaatcagaacggtaaatttcgtt

SEQ ID NO: 588646 - DNA, 75 bp, synthetic construct
  source 1..75: mol_type = other DNA
aattacttcccgccgggcgaactcatcgctggcaacggcaatcagcaaaggtcgtctgattcgcgttaatcagga

SEQ ID NO: 588647 - DNA, 75 bp, synthetic construct
  source 1..75: mol_type = other DNA
atggagactgtttttgacgcactgaaagcgatgggaaaagctacgtcggtagagctggctgcgcgacttgatatc

SEQ ID NO: 588648 - DNA, 75 bp, synthetic construct
  source 1..75: mol_type = other DNA
aagcaatgggaaaagccacgtcggtagaactggctacgcgacttgatatcagtcgagaagaagtgctgaacgagc

SEQ ID NO: 588649 - DNA, 75 bp, synthetic construct
  source 1..75: mol_type = other DNA
tttctggctggcgaaggtgaatccggggtaaccgaagagcagccagcacaatctgaagtaccggatgtgctaacc

SEQ ID NO: 588650 - DNA, 75 bp, synthetic construct
  source 1..75: mol_type = other DNA
gtcgcgaaaatttcggagagcgatttaaaagcgacgattgagcaacgtggaccacaaacggcggatgaactggcc

SEQ ID NO: 588651 - DNA, 75 bp, synthetic construct
  source 1..75: mol_type = other DNA
tgcgccgcgctgcgggagctgaacaaacaccgggatattgtccgacagattgtcgattcatccggtcgtattgtg

SEQ ID NO: 588652 - DNA, 75 bp, synthetic construct
  source 1..75: mol_type = other DNA
agtacaggaggctgcaacacaggaagaaattaaaacagatactgtagcgaacattgtgcagtcgttgccatcgtt

SEQ ID NO: 588653 - DNA, 75 bp, synthetic construct
  source 1..75: mol_type = other DNA
aaccgcaacggggcggctggcacgcgttaatcagaacggtaaatttcgttactgcatgccgggcgataatttacc

SEQ ID NO: 588654 - DNA, 75 bp, synthetic construct
  source 1..75: mol_type = other DNA
tcaccggcagccagcgtgtattgctgctcgctgacggtgaacgttgtgacggactggccccgtaccgtctgatat

SEQ ID NO: 588655 - DNA, 75 bp, synthetic construct
  source 1..75: mol_type = other DNA
ttttaccccgcgaaaacgtctcagccagttaaccacacagacgggctttatccgtgcccttccgcacttcagctg

SEQ ID NO: 588656 - DNA, 75 bp, synthetic construct
  source 1..75: mol_type = other DNA
gccccgatggctgatttcagcagcgccactattacttccggtagtctgcctccgggaaaccatacactttactcc

SEQ ID NO: 588657 - DNA, 75 bp, synthetic construct
  source 1..75: mol_type = other DNA
agatattcaatggcagattaattctttatttataaacctgttttttaagcgagtcgttacatttgagacgcggga

SEQ ID NO: 588658 - DNA, 75 bp, synthetic construct
  source 1..75: mol_type = other DNA
actagatggccatcttgtcagttcgcttctgggcggttcgggggagtcaccctgccttatctggcagggagaatc

SEQ ID NO: 588659 - DNA, 75 bp, synthetic construct
  source 1..75: mol_type = other DNA
cggctgatgtacctggaccttgaatatcgtcagggccggtgccgtctgctgtccggcagccgtcagcgggaactg

SEQ ID NO: 588660 - DNA, 75 bp, synthetic construct
  source 1..75: mol_type = other DNA
gctttttctgcttctgccggaggaatatggcccagcctttccagcaatcgtcgattgttataccagtccacccac

SEQ ID NO: 588661 - DNA, 75 bp, synthetic construct
  source 1..75: mol_type = other DNA
tttctggctggcgaaggtgaatccggggtaaccgaagagcagccagcacagtctgaagtaccggatgtgctgacc

SEQ ID NO: 588662 - DNA, 75 bp, synthetic construct
  source 1..75: mol_type = other DNA
ggcgaaaagtgatgttcagaagtgggagcgagtctgtgccgcgctgcgggaactgaacaaacacagggatattct

SEQ ID NO: 588663 - DNA, 75 bp, synthetic construct
  source 1..75: mol_type = other DNA
cgctggtttggtggcagtacatctgccgccgctgactcggtggccggtatggtggaaagcgtccgggaaagcctg

SEQ ID NO: 588664 - DNA, 75 bp, synthetic construct
  source 1..75: mol_type = other DNA
atggtgacaacgctgcggacagctatgtgcgccagacgcgcccgctgctggcccgtctttcctgttacagcagtc

SEQ ID NO: 588665 - DNA, 75 bp, synthetic construct
  source 1..75: mol_type = other DNA
agaactggctgcgcgacttgatatcagtcgtgaagaggttctcaacgagctgtgggaactcaaaagaaatggcgt

SEQ ID NO: 588666 - DNA, 75 bp, synthetic construct
  source 1..75: mol_type = other DNA
aagagtttatggtgctgtatctgaaccagcagaaccagttgattgcccacgaaaccctgtttgccggttctatta

SEQ ID NO: 588667 - DNA, 75 bp, synthetic construct
  source 1..75: mol_type = other DNA
ttgacacccagacaacgatgaccactaccttcaccggtaacgcgtcttctaccaacagcggcaattactacacca

SEQ ID NO: 588668 - DNA, 75 bp, synthetic construct
  source 1..75: mol_type = other DNA
tatttgatactcaggaaacaatgaccactacctttactggtaccgtttcttctgcaaatagcggcaattattaca

SEQ ID NO: 588669 - DNA, 75 bp, synthetic construct
  source 1..75: mol_type = other DNA
agctgattgccggtgaaaccctcttcaccggtaccatcaaccgcacggaagtccatccccgggaagtgattaaac

SEQ ID NO: 588670 - DNA, 75 bp, synthetic construct
  source 1..75: mol_type = other DNA
ctcttcaccggcaccatcaaccgcacggaagtccatccccgggaagtgattaaatgcgccctgtatcacaatgcc

SEQ ID NO: 588671 - DNA, 75 bp, synthetic construct
  source 1..75: mol_type = other DNA
atggaatgtataaaatgtaaaatgtcagaagcaaacaaagagtcgggattgtgtgatgcctgtgaaaatgaggag

SEQ ID NO: 588672 - DNA, 75 bp, synthetic construct
  source 1..75: mol_type = other DNA
gcgtggccttcacctccacgcatgcggcacgggaatggctgattctgaacatggcgggactggagcgtgaagaat

SEQ ID NO: 588673 - DNA, 75 bp, synthetic construct
  source 1..75: mol_type = other DNA
attatccttccgaggatgataagaagaatggttgtatttaattatacgaagataaataaacaattagagaaagtg

SEQ ID NO: 588674 - DNA, 75 bp, synthetic construct
  source 1..75: mol_type = other DNA
taccgactacacccgttaagcggcgatcgcgatggaatttgggcgatatctgtctcgggcaactggcgaatcaca

SEQ ID NO: 588675 - DNA, 75 bp, synthetic construct
  source 1..75: mol_type = other DNA
atgagtaagtttgtaaaaacagctattgctgcaacaatggtaatgggtgcgttcgcttctacttcaacaatcgcc

SEQ ID NO: 588676 - DNA, 75 bp, synthetic construct
  source 1..75: mol_type = other DNA
tatgaggggatctctcaggactcagtgtgttctatcgttccggacgatcacaaactggaagttgatatgggtgat

SEQ ID NO: 588677 - DNA, 75 bp, synthetic construct
  source 1..75: mol_type = other DNA
cgtgcggcacgagaatggctgattctgaacatggcgggactggagcgtgaagagttccgggtgctgtatctgaac

SEQ ID NO: 588678 - DNA, 75 bp, synthetic construct
  source 1..75: mol_type = other DNA
gaaagtaaaaccattcttagcgcccatttgtcgctgattcaggatgaagagtttgcggggaatatccgtcgtctg

SEQ ID NO: 588679 - DNA, 75 bp, synthetic construct
  source 1..75: mol_type = other DNA
ctgcgctttggcgatccgggcgtgcgtctgtttgaaaccagcgaaaacggtctggattacttcaccagcgtaccg

SEQ ID NO: 588680 - DNA, 75 bp, synthetic construct
  source 1..75: mol_type = other DNA
cggtacggtaattaataatgaaggtcgcgcccaacgtttcttccaggtttacgatccggcttattacgacagcaa

SEQ ID NO: 588681 - DNA, 75 bp, synthetic construct
  source 1..75: mol_type = other DNA
taaatgggatatgcagtttgcgccgagcatctgccagcaatgttccatcggctgtaacatcagccccggcgagcg

SEQ ID NO: 588682 - DNA, 75 bp, synthetic construct
  source 1..75: mol_type = other DNA
gaaaaaatgcgtgaagaacctgcgccgattctggtgaccaacggcacgatgctggaatatatgatggttcgctag

SEQ ID NO: 588683 - DNA, 75 bp, synthetic construct
  source 1..75: mol_type = other DNA
gcgccgattctggtgaccaacggcacgatgctggaatatatgatggttcgccaggtcgacgccccgattatccag

SEQ ID NO: 588684 - DNA, 75 bp, synthetic construct
  source 1..75: mol_type = other DNA
ggcctggtggatatccgggtgccggaccatctgatagtcggtggcaaccaggttttctcctttgccgaacatggt

SEQ ID NO: 588685 - DNA, 75 bp, synthetic construct
  source 1..75: mol_type = other DNA
accacaatgccgctgccgtggtactggcacacaatcacccgtccggcgaagtcacacccagtaaggctgaccggc

SEQ ID NO: 588686 - DNA, 75 bp, synthetic construct
  source 1..75: mol_type = other DNA
aataacggtcaatttttcagcgcaaggctggcggattagcagcctcagggagcaaattttacctcgttggtatca

SEQ ID NO: 588687 - DNA, 75 bp, synthetic construct
  source 1..75: mol_type = other DNA
gaatttgcggggagctgggtggcgaaagccgctatctgccgctactgcttgggctgggtctggatgagttaagta

SEQ ID NO: 588688 - DNA, 75 bp, synthetic construct
  source 1..75: mol_type = other DNA
gttactacaaagattacgctgacggtacagatctgggcgtttacggtgcgcacgacaacgtctacttcggtcgcc

SEQ ID NO: 588689 - DNA, 75 bp, synthetic construct
  source 1..75: mol_type = other DNA
atgttaacgattcaatttctctgtcctttgccaaatggtctacatgctcgtccggcgtgggagcttaaagagcag

SEQ ID NO: 588690 - DNA, 75 bp, synthetic construct
  source 1..75: mol_type = other DNA
gaatcagctgattgcgggtgaaaccctcttcaccggcaccatcaaccgcacggaagttcatccccgggaggtgat

SEQ ID NO: 588691 - DNA, 75 bp, synthetic construct
  source 1..75: mol_type = other DNA
tgcgtgaaggcgcgatcttactggttgtgctggctggcgtgataatcctgctggatgtctggcgttctccgcaga

SEQ ID NO: 588692 - DNA, 75 bp, synthetic construct
  source 1..75: mol_type = other DNA
atgaaggcttatgcctggcagcggattcctttgcaaacaatatccataatttattatgcgcagttgttgtattac

SEQ ID NO: 588693 - DNA, 75 bp, synthetic construct
  source 1..75: mol_type = other DNA
acacttggcagcgaaattctgaattttgcatgtgaatatgcaaaagctgctgccgaaaaagaattagcacaataa

SEQ ID NO: 588694 - DNA, 75 bp, synthetic construct
  source 1..75: mol_type = other DNA
atgcggaaaaaatcaaacaggaagttgatgccagcggcctgacgctaatgcagatcctgctgacgcatggtcacc

SEQ ID NO: 588695 - DNA, 75 bp, synthetic construct
  source 1..75: mol_type = other DNA
cttgatgactggttaaagcagaaggggctaaaaaatcaggctctcggagctacccggacttttgttgtatgtagg

SEQ ID NO: 588696 - DNA, 75 bp, synthetic construct
  source 1..75: mol_type = other DNA
aaaactttagcgaccaggaccggattgacctgcaaaagatctggccggaatattccccttcctctttacaggttg

SEQ ID NO: 588697 - DNA, 75 bp, synthetic construct
  source 1..75: mol_type = other DNA
gcaatggctgaactcactgtggcaggaaaaagaccaacttctgacgtcgttgatgtcatcacagcggcaggacaa

SEQ ID NO: 588698 - DNA, 75 bp, synthetic construct
  source 1..75: mol_type = other DNA
tcccctcgcacccagcttcagcggtgaacaccatgagaaccatactggagatgatgcttgatagtcttgatgtac

SEQ ID NO: 588699 - DNA, 75 bp, synthetic construct
  source 1..75: mol_type = other DNA
cagaagtacagaagcgcactggctatagcaaagcatggctttatcgcctgatgagccagcagcgctttcccgccg

SEQ ID NO: 588700 - DNA, 75 bp, synthetic construct
  source 1..75: mol_type = other DNA
tatgacgcactgacaacagacaaagaccggaggaacgaaccggacacggagctgctgccgggcgcaatccttcgc

SEQ ID NO: 588701 - DNA, 75 bp, synthetic construct
  source 1..75: mol_type = other DNA
acaatataatgcttctgcatgttgtttatatggatataatggttttagaataaatgaagaggctattgtaaaatc

SEQ ID NO: 588702 - DNA, 75 bp, synthetic construct
  source 1..75: mol_type = other DNA
atgtcagagttattcaataggcaaggacgagaccttcttcttgaactattattttctgctatgccattggagtgg

SEQ ID NO: 588703 - DNA, 75 bp, synthetic construct
  source 1..75: mol_type = other DNA
ttcttattcttagaaagcccggatgtaactattcatattgaacggataaacaacgtgtatgcacccaaaaaggag

SEQ ID NO: 588704 - DNA, 75 bp, synthetic construct
  source 1..75: mol_type = other DNA
caatcatacagaagctacaggtaaccttcggcgcaatatgccagaccccattcctgtaattatacttgcacgcct

SEQ ID NO: 588705 - DNA, 75 bp, synthetic construct
  source 1..75: mol_type = other DNA
tttatggtggaaatagaaaatatcataagacctgaaatatttccgacatcaatttacccgcctttttcactttca

SEQ ID NO: 588706 - DNA, 75 bp, synthetic construct
  source 1..75: mol_type = other DNA
aaacctgaaaggttgcacatttaaagcgatcaatgatggcgaagtgtacgtcagcggttctaagcatgaagaaac

SEQ ID NO: 588707 - DNA, 75 bp, synthetic construct
  source 1..75: mol_type = other DNA
ggagtggtgccgtgaaattattcatgaaattgcgcaagaagaaaaactctcgttctcgatggcgctgattcctgc

SEQ ID NO: 588708 - DNA, 75 bp, synthetic construct
  source 1..75: mol_type = other DNA
gcgccactcagggtgaacagggctttaactcacaggggcaggccgagattccgcgcattgtctgggaggagttgg

SEQ ID NO: 588709 - DNA, 75 bp, synthetic construct
  source 1..75: mol_type = other DNA
tcttgaaatgtttgctctggtggcattcattaaactgtatacaggaaaaggttttgaattcataaaaaacatgtg

SEQ ID NO: 588710 - DNA, 75 bp, synthetic construct
  source 1..75: mol_type = other DNA
gataattttcctgaattaatagaaatatacaattcatgctttagtgaaaatatattgttgtatgatgttcaggat

SEQ ID NO: 588711 - DNA, 75 bp, synthetic construct
  source 1..75: mol_type = other DNA
aaaataaatcttggtttgatataaacgatgaagtgtatcgttcgttaagattcaaatatccatcattgatgatcg

SEQ ID NO: 588712 - DNA, 75 bp, synthetic construct
  source 1..75: mol_type = other DNA
gtttacagaattacgccagtcaggcactttttctgttaactatagccctcacatgatcaatctaataagggccag

SEQ ID NO: 588713 - DNA, 75 bp, synthetic construct
  source 1..75: mol_type = other DNA
ggtgcgattgttgtttcagaaggttattcgaaaagaacaaataagatagtcagccaatctcattttgcgtttaga

SEQ ID NO: 588714 - DNA, 75 bp, synthetic construct
  source 1..75: mol_type = other DNA
aggctgttgaagtgctcttagaacatctgaaaaagcgtgatgttcagcttcgtgacgttaaccgaaccaccgtta

SEQ ID NO: 588715 - DNA, 75 bp, synthetic construct
  source 1..75: mol_type = other DNA
gtgggggggttggacgaggtaagttaaaaccagttacagaagaccggatcgcacttctcttgggtcatgagcgcg

SEQ ID NO: 588716 - DNA, 75 bp, synthetic construct
  source 1..75: mol_type = other DNA
tagttttagatccatgcggaaactatctggtaaggattaccgttccagcttacatgcgctcgctttttggcaaca

SEQ ID NO: 588717 - DNA, 75 bp, synthetic construct
  source 1..75: mol_type = other DNA
ccccgtcgcagttaatcaacagcattgatatgctccgggctcgcagggcgaccggcctgatgacccggaacaatt

SEQ ID NO: 588718 - DNA, 75 bp, synthetic construct
  source 1..75: mol_type = other DNA
caggaagccgatcgccggaaaggcaaaaagagctggcaggcggaacgctatgcacgcggaaccctgcgcaaaata

SEQ ID NO: 588719 - DNA, 75 bp, synthetic construct
  source 1..75: mol_type = other DNA
tggcgcgaccgatggcgaactgaccatggatgtaacgctgaaggcgtatcagatgctggcccgcatggcgttaca

SEQ ID NO: 588720 - DNA, 75 bp, synthetic construct
  source 1..75: mol_type = other DNA
atctggcagacactgctcacccgactgttggaccagcattacggcctcacactgaatgacacaccgttcgctgat

SEQ ID NO: 588721 - DNA, 75 bp, synthetic construct
  source 1..75: mol_type = other DNA
atggcctcacactgaatgacacaccgtttgccgatgaacgtgtaattgagcagcatattgaggcaggcatttcac

SEQ ID NO: 588722 - DNA, 75 bp, synthetic construct
  source 1..75: mol_type = other DNA
accggcctgatgacccggaacaattacagaatggtaaataacattacccaaggcaagcatccggaggcaaaacga

SEQ ID NO: 588723 - DNA, 75 bp, synthetic construct
  source 1..75: mol_type = other DNA
gcgttctccgcaacgccgctgggcaacctgattaataaaagcctggacgcacaggaaaaacaggacaaaaccatc

SEQ ID NO: 588724 - DNA, 75 bp, synthetic construct
  source 1..75: mol_type = other DNA
ggtgtatcagatgctggcccgcatggcgttacatctgcacaccgtgccgccgtattatgacgcactgacaacaga

SEQ ID NO: 588725 - DNA, 75 bp, synthetic construct
  source 1..75: mol_type = other DNA
agccgctggctgacaccgggttatcgctcccttgccggacgcgaacgcctggacgatttgctttacctgccgcag

SEQ ID NO: 588726 - DNA, 75 bp, synthetic construct
  source 1..75: mol_type = other DNA
actgaacgcgcccaccgcaaagcagacctgctgcggggtggcctgaccagtggaaacaaaaacagacagaaacgg

SEQ ID NO: 588727 - DNA, 75 bp, synthetic construct
  source 1..75: mol_type = other DNA
caactgaaatcaggtacaacccgctcgcacactacgtggacatgctcaggaatatcggcgtggaggctttacccg

SEQ ID NO: 588728 - DNA, 75 bp, synthetic construct
  source 1..75: mol_type = other DNA
ggcgtatcagatgctggcccgcatggcgttacacctgcacgccatgcctccacattatgacgcactgacaacaga

SEQ ID NO: 588729 - DNA, 75 bp, synthetic construct
  source 1..75: mol_type = other DNA
atgaacacattacccgacacacacgtacggaaggcatcgcgctgcccgtctcccgtcaccatctggcagacactg

SEQ ID NO: 588730 - DNA, 75 bp, synthetic construct
  source 1..75: mol_type = other DNA
tcccgtcaccatctggcagacactgctcatccgtctgctggaccagcactatggccttacactgaatgacacacc

SEQ ID NO: 588731 - DNA, 75 bp, synthetic construct
  source 1..75: mol_type = other DNA
tacgggaggcatcgcgttgcccgtctcccgtcaccatctggcagacactgctcacccgactgctggaccagcact

SEQ ID NO: 588732 - DNA, 75 bp, synthetic construct
  source 1..75: mol_type = other DNA
atgaaaacattacccgacacacacatacgggaggcatcgcactgcccgtctcccgtcaccatctggcagacactg

SEQ ID NO: 588733 - DNA, 75 bp, synthetic construct
  source 1..75: mol_type = other DNA
atgtcagtggttctgacacgatgagcttcggatacgccaaaaacacctatactgcggttggtacaaataataata

SEQ ID NO: 588734 - DNA, 75 bp, synthetic construct
  source 1..75: mol_type = other DNA
cggtgcagtattacagccggattatcatgaatccgccgttcagccacgggcaggatatccggcatatcctgcggg

SEQ ID NO: 588735 - DNA, 75 bp, synthetic construct
  source 1..75: mol_type = other DNA
ccctcggctcctgtggttacgtttatctggctgtttatccgacaccggcagcgcccgcaaccaccgtataacacc

SEQ ID NO: 588736 - DNA, 75 bp, synthetic construct
  source 1..75: mol_type = other DNA
gctcgccgggcaacaggcctgatgacccgcgacaattacataacggtaaataacattaccctggggaagcatccg

SEQ ID NO: 588737 - DNA, 75 bp, synthetic construct
  source 1..75: mol_type = other DNA
ggcatttcactgtgtgatgcggtgaattttctcgtggaaaaatacgcgctggtgcgtaccgaccagccgggattc

SEQ ID NO: 588738 - DNA, 75 bp, synthetic construct
  source 1..75: mol_type = other DNA
tgtgtgatgcggtgaattttctcgtggaaaaatacgcgctggtgctaccgaccagccgggattcagcacttgtcc

SEQ ID NO: 588739 - DNA, 75 bp, synthetic construct
  source 1..75: mol_type = other DNA
cgatatcctccgggctcgcagggcgaccggcctgatgacccgcgacaattacagaacggtaaataacattatcct

SEQ ID NO: 588740 - DNA, 75 bp, synthetic construct
  source 1..75: mol_type = other DNA
cccgctctcagttaataaacagtattgatatcctccgggctcgccgggcaaccggcctgatgacccgcgacaatt

SEQ ID NO: 588741 - DNA, 75 bp, synthetic construct
  source 1..75: mol_type = other DNA
tgtgtgatgcggtgaactttctcgtggaaaaatacgcgctggtacgaactgaccagccaggattcagcgcctgta

SEQ ID NO: 588742 - DNA, 75 bp, synthetic construct
  source 1..75: mol_type = other DNA
acaggaaaaacaggacaaagccatcacactggcaggagacgccagaaaacaggcacgcggcgcggtggatgaagc

SEQ ID NO: 588743 - DNA, 75 bp, synthetic construct
  source 1..75: mol_type = other DNA
cctccgggctcgctgggcgactggcctgatgaccagcgacaattacagaacggtaaataacattaccctgggtaa

SEQ ID NO: 588744 - DNA, 75 bp, synthetic construct
  source 1..75: mol_type = other DNA
atacgcgctggtgcgtaccgaccagccgggattcagcgcctgtacccggtctcagttaataaacaggatagatat

SEQ ID NO: 588745 - DNA, 75 bp, synthetic construct
  source 1..75: mol_type = other DNA
atacgcgctggtgcgtaccgaccagccgggattcagcgcctgtacccggtctcagttaataaacagaatggatat

SEQ ID NO: 588746 - DNA, 75 bp, synthetic construct
  source 1..75: mol_type = other DNA
tagtgaaggatatcgacggtgaagtgaccacgctggagaaatatgccggtaatgtactgttgattgtcaatgtcg

SEQ ID NO: 588747 - DNA, 75 bp, synthetic construct
  source 1..75: mol_type = other DNA
aattccactctgtctttaagtggaaaagatacaaaagtacatattgatatgtatgacggcaaaaacatcacggga

SEQ ID NO: 588748 - DNA, 75 bp, synthetic construct
  source 1..75: mol_type = other DNA
cctccgggctcgccgggctactggcctgatgagcagcgacaattacagaacggtaaataacattaccctgggtaa

SEQ ID NO: 588749 - DNA, 75 bp, synthetic construct
  source 1..75: mol_type = other DNA
atacgcgctggtgcgtaccgaccagccgggattcagcgcctgtacccgatctcagttaataaacagaatagatat

SEQ ID NO: 588750 - DNA, 75 bp, synthetic construct
  source 1..75: mol_type = other DNA
aaatctggcccaagcagatcagcttgttgtcaataaatcgttgtctggtaaaaacaaccttctgttagtcgactt

SEQ ID NO: 588751 - DNA, 75 bp, synthetic construct
  source 1..75: mol_type = other DNA
acggcctcacactgaatgacacaccgttcgccgatgaacgtgtgattgagcagcatattgaagcagggatttcac

SEQ ID NO: 588752 - DNA, 75 bp, synthetic construct
  source 1..75: mol_type = other DNA
atacgcgctggtgcgtaccgaccagccgggattcagcgcctgtacccgctctcagttaataaacagcatagatat

SEQ ID NO: 588753 - DNA, 75 bp, synthetic construct
  source 1..75: mol_type = other DNA
atacgcgctggtgcgtaccgaccagccgggattcagcgcctgtacccgctctcagttaataaacagaatcgatat

SEQ ID NO: 588754 - DNA, 75 bp, synthetic construct
  source 1..75: mol_type = other DNA
atacgcgctggtgcgtaccgaccagccgggattcagcgcctgtacccgttctcagttaataaacagaattgatat

SEQ ID NO: 588755 - DNA, 75 bp, synthetic construct
  source 1..75: mol_type = other DNA
ctcacccggttactggaccagcactacggcctcacactgaatgacacacagttcgctgatgaacgtgtgattgag

SEQ ID NO: 588756 - DNA, 75 bp, synthetic construct
  source 1..75: mol_type = other DNA
catggatgtaacgctgaaggcgtatcagatgctggcccgcatggcgttacacctgcacaccatgcctccacatta

SEQ ID NO: 588757 - DNA, 75 bp, synthetic construct
  source 1..75: mol_type = other DNA
ccgggctcgcagggcaaccggcctgatgacccggaacaattacagaatggtaaataacattacccagggcaagca

SEQ ID NO: 588758 - DNA, 75 bp, synthetic construct
  source 1..75: mol_type = other DNA
ttcaggcaataactgggtcgtcaccactcgggacttcctcggccaacagtcgcaaaatgattttgacaaaaccat

SEQ ID NO: 588759 - DNA, 75 bp, synthetic construct
  source 1..75: mol_type = other DNA
gattacctggttaacacgttttttgcggcggtccgcaaaaaactgaaccgcgacggcctgcgctggtatggcatc

SEQ ID NO: 588760 - DNA, 75 bp, synthetic construct
  source 1..75: mol_type = other DNA
agacgctggctgacaccgggttatcgctccgttgccgggcgtgaacgcctggatgatttactttacctgccgcag

SEQ ID NO: 588761 - DNA, 75 bp, synthetic construct
  source 1..75: mol_type = other DNA
agcccgtggcgacaaagcggtgtttctgactgtcacctgcccgtcaaaataccacgccacaacagagaacggtca

SEQ ID NO: 588762 - DNA, 75 bp, synthetic construct
  source 1..75: mol_type = other DNA
tcatttttgatgctgggcatcattacacagtcactggtaataataaaaccttcaaaggtgccgggctggatattg

SEQ ID NO: 588763 - DNA, 75 bp, synthetic construct
  source 1..75: mol_type = other DNA
ctcacccggttactggaccagcactacggcctcacactgaatgacacaccgtttgcggatgaacgtgtgattgag

SEQ ID NO: 588764 - DNA, 75 bp, synthetic construct
  source 1..75: mol_type = other DNA
ctcacccggttactggaccagcactacggcctcacactgaatgacacaccgttagctgatgaacgtgtgattgag

SEQ ID NO: 588765 - DNA, 75 bp, synthetic construct
  source 1..75: mol_type = other DNA
gtggacgtaaaagaaaatgcctccctgaccctgacggggacaccctctgcacagaaacaggagtattactcccct

SEQ ID NO: 588766 - DNA, 75 bp, synthetic construct
  source 1..75: mol_type = other DNA
atgaaaacattacccgatacacacgtacgggaggtatcgcgctgcccgtctcccgtaaccatctggcagacactg

SEQ ID NO: 588767 - DNA, 75 bp, synthetic construct
  source 1..75: mol_type = other DNA
tgtgtgatgcggtgaactctctcgttgaaaaatacgcgctggtacgaactgaccagccgggattcagcgcaggag

SEQ ID NO: 588768 - DNA, 75 bp, synthetic construct
  source 1..75: mol_type = other DNA
acctgaagcgccggatgtggtaaccgaagaggtcgctccaaaagttaccgcagacatgatgattgagtttatcgg

SEQ ID NO: 588769 - DNA, 75 bp, synthetic construct
  source 1..75: mol_type = other DNA
taatttaccagcagagccgaaagccgcgctggtaacggaaaatgatggtaaggcctttcctcagccagcaggtgc

SEQ ID NO: 588770 - DNA, 75 bp, synthetic construct
  source 1..75: mol_type = other DNA
gcttccacgttggcggtcgtaacagcaacggggcgcctggcacgcgtaaatcagaacggtaaatttcgttactgc

SEQ ID NO: 588771 - DNA, 75 bp, synthetic construct
  source 1..75: mol_type = other DNA
tctgattcgcgtaaaccagaacggtaaaattcgttactgcataccaggtgataatttaccagcagagccgaaagt

SEQ ID NO: 588772 - DNA, 75 bp, synthetic construct
  source 1..75: mol_type = other DNA
tgaactggctacgctgttcggtacaacatcccgcaaagttgcttcaacgctggcaatggcaatcagcaaaggtcg

SEQ ID NO: 588773 - DNA, 75 bp, synthetic construct
  source 1..75: mol_type = other DNA
aaaacggaaagtgtggcggtcacagtgcagtcacagccgtcgttcaccagaaagcatccggatggtctgatttta

SEQ ID NO: 588774 - DNA, 75 bp, synthetic construct
  source 1..75: mol_type = other DNA
ttggtgttacatcttcaatgactcattcaggcaataactgggtcgtcaccactcgggacttcctcagccaacagt

SEQ ID NO: 588775 - DNA, 75 bp, synthetic construct
  source 1..75: mol_type = other DNA
taatgaacggtaccggttcggcagatggtggttacagcgataactacactcacgttcagattggtgccgacagaa

SEQ ID NO: 588776 - DNA, 75 bp, synthetic construct
  source 1..75: mol_type = other DNA
ctacggggccattatcaccaataacagtgagaaaaaatcaacggtaacactcgaccttcagacattaaaagccag

SEQ ID NO: 588777 - DNA, 75 bp, synthetic construct
  source 1..75: mol_type = other DNA
ggggaggtcgaacaaaaagttaccgcagacatgatgattgagtttatcggtcaggatggggctaaaacgtgtgag

SEQ ID NO: 588778 - DNA, 75 bp, synthetic construct
  source 1..75: mol_type = other DNA
gcctttcctcagccagcaggtgctgcgttaccagtccgggaagccgcaacacaggaagaaattaaaacagaaact

SEQ ID NO: 588779 - DNA, 75 bp, synthetic construct
  source 1..75: mol_type = other DNA
taatttaccagcagatccgaaagccgcgccggtaacggaaagtgatggtaaggcctttcctcagccagcaggtgc

SEQ ID NO: 588780 - DNA, 75 bp, synthetic construct
  source 1..75: mol_type = other DNA
aaagcctttcctcagccagccggtgttgcgttaccggtacagaaagatgcaacacaggaagatattaaaacagaa

SEQ ID NO: 588781 - DNA, 75 bp, synthetic construct
  source 1..75: mol_type = other DNA
taacggaaactgctggtaaagcctttcctcagacagcaggtgttgcgttaccagtccgggaagcggaaacacagg

SEQ ID NO: 588782 - DNA, 75 bp, synthetic construct
  source 1..75: mol_type = other DNA
tgcgccgcgctgcgggagctgaacaagcatcgggatattgttcgacagattactgatttttcccgccgtgttgca

SEQ ID NO: 588783 - DNA, 75 bp, synthetic construct
  source 1..75: mol_type = other DNA
actgcatgccgggcggtaatttaccagcagagccgaaagcggcatcggtagcggaaactgatggtaaagcctttc

SEQ ID NO: 588784 - DNA, 75 bp, synthetic construct
  source 1..75: mol_type = other DNA
tgtgggaactgaaaagaaatggcgtcgttgataaaactggtcacacctggtttctggctggcgaaggtgaatccg

SEQ ID NO: 588785 - DNA, 75 bp, synthetic construct
  source 1..75: mol_type = other DNA
aatttcgttactgcatgccaggcgagaatttaccagcagaactgaaagccgcatcggtagcggaaactgatggta

SEQ ID NO: 588786 - DNA, 75 bp, synthetic construct
  source 1..75: mol_type = other DNA
tgttgataaaagcgtatacacctggcgtgtggctggcgaaggtgaatccggggtaaccgaagagcagtcagcaca

SEQ ID NO: 588787 - DNA, 75 bp, synthetic construct
  source 1..75: mol_type = other DNA
accacaaacggcggatgaactggctacgctgttcggtacaacatcccgcaaagttgcttcaacgctggcaatggc

SEQ ID NO: 588788 - DNA, 75 bp, synthetic construct
  source 1..75: mol_type = other DNA
aatcagtaaaggtcgtctgattcgcgttaatcagaacggtaaatttcgttactgcatgccgggcgataatttacc

SEQ ID NO: 588789 - DNA, 75 bp, synthetic construct
  source 1..75: mol_type = other DNA
acattgtgcagtcgttgccatcgtacaccgaaacacaagcggatgacctggttttgccatcgctgcatatggcaa

SEQ ID NO: 588790 - DNA, 75 bp, synthetic construct
  source 1..75: mol_type = other DNA
tatcagcaaagggcgtctgattcgcgtcaatcagaatggtaaatttcgctactgcatgccgggcaataatttacc

SEQ ID NO: 588791 - DNA, 75 bp, synthetic construct
  source 1..75: mol_type = other DNA
atggagaccgtttttgacgcactgaaagcgatgggaaaagccacgtcggtagagctggctgcgcgacttgatatc

SEQ ID NO: 588792 - DNA, 75 bp, synthetic construct
  source 1..75: mol_type = other DNA
ttgaacaacgcggaccacaaacggctgatgagctggctacattgtttggtaccacatcacgcaaagtggcttcaa

SEQ ID NO: 588793 - DNA, 75 bp, synthetic construct
  source 1..75: mol_type = other DNA
atggagaccgtttttgacgcactgaaagcgatgggaaaagccacgtcggtagaactggctacgcgacttgatatc

SEQ ID NO: 588794 - DNA, 75 bp, synthetic construct
  source 1..75: mol_type = other DNA
gccatgataatttgtggctgtatggcacgattaaacaagaataatcaggacttgcacgatttgttggtagattat

SEQ ID NO: 588795 - DNA, 75 bp, synthetic construct
  source 1..75: mol_type = other DNA
aaagcggaaggtgttgttgaaggcatgttgatgatgctggatgtgaagctggagatggatcggtatgttgagcgc

SEQ ID NO: 588796 - DNA, 75 bp, synthetic construct
  source 1..75: mol_type = other DNA
tccgttaatcagggggccgggtatctgcagtttgccggcgattacaaggtgtctgccctgaacggccagacatgg

SEQ ID NO: 588797 - DNA, 75 bp, synthetic construct
  source 1..75: mol_type = other DNA
gccatgataatttgtggctgtatggcacgattaaacaagaataatcagtatttgcacaatttgttggtggattat

SEQ ID NO: 588798 - DNA, 75 bp, synthetic construct
  source 1..75: mol_type = other DNA
tgatgggcttattggtaaaagactttataaagcagaaggtattattgaaggaatgcttatggctctgaatgtcag

SEQ ID NO: 588799 - DNA, 75 bp, synthetic construct
  source 1..75: mol_type = other DNA
caatgttgtgacgatgacgcgatgatcatttgcgggtgcatggcccgtctgaaaaagaacaacagcgatttgcat

SEQ ID NO: 588800 - DNA, 75 bp, synthetic construct
  source 1..75: mol_type = other DNA
gattcgggataccgcgccgggggccatgtgtgatgcggtggagataaacagcgggctggtccggtatctgcggga

SEQ ID NO: 588801 - DNA, 75 bp, synthetic construct
  source 1..75: mol_type = other DNA
gtccgcgaggagctgccgcgcggcacgtttgcttatacccgtgttccgacgatgattattcgtctgcgtgcctga

SEQ ID NO: 588802 - DNA, 75 bp, synthetic construct
  source 1..75: mol_type = other DNA
cgacgcagtattacagccgtattattatgaattcgccgttcagcaacgggcaggatatccggcatatcctgcggg

SEQ ID NO: 588803 - DNA, 75 bp, synthetic construct
  source 1..75: mol_type = other DNA
taccgcgccgggggccatgtgtgatgcggtggaaatcaacagcgggctggtccggtatctgcgggaaaattttaa

SEQ ID NO: 588804 - DNA, 75 bp, synthetic construct
  source 1..75: mol_type = other DNA
tctgtctcaacgggccacgccagcaggagaagctgttaccgttttctgacatccgcgaggagctgccgcgcggca

SEQ ID NO: 588805 - DNA, 75 bp, synthetic construct
  source 1..75: mol_type = other DNA
atgcacagtcagttaaaagaacgtatcaggctgacgcgcgcaaggctggataacgctgcgccggttgctgaaatc

SEQ ID NO: 588806 - DNA, 75 bp, synthetic construct
  source 1..75: mol_type = other DNA
tacctgtattggtaagcgtctgcagaaagcagagggggtgattgatggtatgttgatgattcttgatgtccgact

SEQ ID NO: 588807 - DNA, 75 bp, synthetic construct
  source 1..75: mol_type = other DNA
atctgctgaacgacatgatccaatcgctgattctggcgatttatcctctgctccagtctgaattttctctgacat

SEQ ID NO: 588808 - DNA, 75 bp, synthetic construct
  source 1..75: mol_type = other DNA
cagcaccgaatgaataaaggaaaacccaaagcgacgattatcaatccactgccgcgcaataaagttgtactggcg

SEQ ID NO: 588809 - DNA, 75 bp, synthetic construct
  source 1..75: mol_type = other DNA
cgtctgcctgtcatggggtgttaatcattaccgtgataacgccatcgcctacaaagaacagcgcgacaaaaatgc

SEQ ID NO: 588810 - DNA, 75 bp, synthetic construct
  source 1..75: mol_type = other DNA
cgctgccatcgtttactgcaacgcgagaagatgatttgattttgccatcgctgcatatggcaaatcgcgaactgc

SEQ ID NO: 588811 - DNA, 75 bp, synthetic construct
  source 1..75: mol_type = other DNA
ctcagccagcaggtgttgcgttaccagtacaggaagttgcaacacaggaatatattaaaacagaaactgtggctg

SEQ ID NO: 588812 - DNA, 75 bp, synthetic construct
  source 1..75: mol_type = other DNA
ctgcaaccggtggtcggctactggaccgataaatatccgatgccgtggtcgttgccgattggcatgtgctttacc

SEQ ID NO: 588813 - DNA, 75 bp, synthetic construct
  source 1..75: mol_type = other DNA
agcgttggggggcatgggtggcaaataatcatgaggatgtcacctggtcatcgattgcagccggattcaagggac

SEQ ID NO: 588814 - DNA, 75 bp, synthetic construct
  source 1..75: mol_type = other DNA
atggttatttgtggttgcatggctcgtctgaaaaagagcaacaatgacttgcatgatttgctggtggattattac

SEQ ID NO: 588815 - DNA, 75 bp, synthetic construct
  source 1..75: mol_type = other DNA
gctgtgacgatgatgcgatggtgatatgcgggtgcatagcccgcctttaccggaacaatcgcgatctgcatgact

SEQ ID NO: 588816 - DNA, 75 bp, synthetic construct
  source 1..75: mol_type = other DNA
actgaaactcgatgctgcaacattccatctgtctagaaacggtcagatgcagggagatattaacgccaccaacgg

SEQ ID NO: 588817 - DNA, 75 bp, synthetic construct
  source 1..75: mol_type = other DNA
gcaatgataatttgtggctgtatggcccggttgaacaagaaaaatcaggatttgcacgatttgttggtggattat

SEQ ID NO: 588818 - DNA, 75 bp, synthetic construct
  source 1..75: mol_type = other DNA
aacgttggggggcatgggtggcaaataatcacgaggatgtcacctggtcgtctattgctgcagggtttaaaggac

SEQ ID NO: 588819 - DNA, 75 bp, synthetic construct
  source 1..75: mol_type = other DNA
gataaaaaaacttcgacaaacaaagcaactggaacagataggaagaattgactctctggtcaagaatgtcaataa

SEQ ID NO: 588820 - DNA, 75 bp, synthetic construct
  source 1..75: mol_type = other DNA
ctggcaaagaactacgcggccagaagcatgtatgtccagttaatcaacgagttcaacctctttatcaatggtaag

SEQ ID NO: 588821 - DNA, 75 bp, synthetic construct
  source 1..75: mol_type = other DNA
tttcctgatgcagttccagtcggatattctcggcacccgcgttgagcgcccggaagttcgcgaagtgactgcatt

SEQ ID NO: 588822 - DNA, 75 bp, synthetic construct
  source 1..75: mol_type = other DNA
gcgcgatgagatgaagttgattaacgacgcctacgattccgaatactttgccacgaaagtgcaaaacaccaacgg

SEQ ID NO: 588823 - DNA, 75 bp, synthetic construct
  source 1..75: mol_type = other DNA
cgtcttccgtcttccttcttacctgaagaggatcagggtgtctttctgaccatgattcagttacccgctggcgcg

SEQ ID NO: 588824 - DNA, 75 bp, synthetic construct
  source 1..75: mol_type = other DNA
ggattgtcggcgtgctgctggcggcgacactctttaatcaaaaaaatgacgtctactttatggtgggcttgctaa

SEQ ID NO: 588825 - DNA, 75 bp, synthetic construct
  source 1..75: mol_type = other DNA
agtggcgcgcaaaacgcagtcggtatcggggtaatgggcggaatggtctctgcaacgttgctggcaatcttcttc

SEQ ID NO: 588826 - DNA, 75 bp, synthetic construct
  source 1..75: mol_type = other DNA
agcagttctggcaggctgcgagcgcattgcctacacgccaattccctttgcctacaccctgattttgcatcgtac

SEQ ID NO: 588827 - DNA, 75 bp, synthetic construct
  source 1..75: mol_type = other DNA
atggacggacaaatatcaattgttcgaccaggagcatgtgacgatcgcgagatacgactgattattcgtctggcg

SEQ ID NO: 588828 - DNA, 75 bp, synthetic construct
  source 1..75: mol_type = other DNA
ttactcctgaaaatctcgcattagcgttaacaggaaagtcagacctaccagtagacataaagctgcgaaatattg

SEQ ID NO: 588829 - DNA, 75 bp, synthetic construct
  source 1..75: mol_type = other DNA
tggcgggggcatccattcagtggctgcgtgatgaaatgaagttgattagcgacgccgacgattccgaatattttg

SEQ ID NO: 588830 - DNA, 75 bp, synthetic construct
  source 1..75: mol_type = other DNA
acaccaacgcatcccgtactatgttgttcaacatccatactctggactgggacgacaaaatgctcgacgcgctgg

SEQ ID NO: 588831 - DNA, 75 bp, synthetic construct
  source 1..75: mol_type = other DNA
cagggccgtgtccatgtgaccgattacaccaacgcctctcgtaccatgttgttcaacatccataccctggactgg

SEQ ID NO: 588832 - DNA, 75 bp, synthetic construct
  source 1..75: mol_type = other DNA
ctgggggggggagaaggtcttcatcctgctggagcgcctgatccgtgagccaaaacgctaccaggatctgctgga

SEQ ID NO: 588833 - DNA, 75 bp, synthetic construct
  source 1..75: mol_type = other DNA
atgtcaaaacgaacattcgcggtgatattaaccttgttgtgtagcttctgtattggccaggcgcttgcaggagga

SEQ ID NO: 588834 - DNA, 75 bp, synthetic construct
  source 1..75: mol_type = other DNA
tatcgcgcccggagaacataaacagttaccacttcctgcatctggcggaaagaacgtgaaatgggctgcaatcaa

SEQ ID NO: 588835 - DNA, 75 bp, synthetic construct
  source 1..75: mol_type = other DNA
gtcattcgtcgcggtctaccattttcctcgggcaaaacgaaattccggcaatcgtcaaaccctttatcgatcggc

SEQ ID NO: 588836 - DNA, 75 bp, synthetic construct
  source 1..75: mol_type = other DNA
tatgtgggggtcgcctcagaaaacggaatctatggtcactcccgtttttgcaacaccgattttgacgagaagtcg

SEQ ID NO: 588837 - DNA, 75 bp, synthetic construct
  source 1..75: mol_type = other DNA
gtcgcctcagaaaacggaatctatggtcactcccgtttttgcaacaccgattttgacgacaagttggcttgcttg

SEQ ID NO: 588838 - DNA, 75 bp, synthetic construct
  source 1..75: mol_type = other DNA
aagccctcaacatcagcaaaatcgaatcttttgtcgcagtcaccactattttcctcgggaaaatgagatcccggc

SEQ ID NO: 588839 - DNA, 75 bp, synthetic construct
  source 1..75: mol_type = other DNA
ctggattacgtggtgggcttgatgatgagcgtggcgcgctaactttaaagtatgtggagcttgcaaatgcaattg

SEQ ID NO: 588840 - DNA, 75 bp, synthetic construct
  source 1..75: mol_type = other DNA
gcaataaattgctgtttaaaggaagttttaagcatatagaaatcaaatgccctcgttgtaaacgttacattgtca

SEQ ID NO: 588841 - DNA, 75 bp, synthetic construct
  source 1..75: mol_type = other DNA
gtcgatgaaacgacatcttatccaccagaaaccgccaaactgccgcatattggttactggaaacaactcagcagc

SEQ ID NO: 588842 - DNA, 75 bp, synthetic construct
  source 1..75: mol_type = other DNA
ttgcgtttacaagcaaaaattatgggcaggatgcgggtgttgagatttccccaactttacgagctggtaactctg

SEQ ID NO: 588843 - DNA, 75 bp, synthetic construct
  source 1..75: mol_type = other DNA
gatgcttgcagctgacggaccgcgttacaaagcgatcggcaatagtatggcgataccagtaatgcgctggattgg

SEQ ID NO: 588844 - DNA, 75 bp, synthetic construct
  source 1..75: mol_type = other DNA
aagaaaatgcagtcgtagctttttcctgcaaagattatggacaagatgtttctattgaatgttctccgactttac

SEQ ID NO: 588845 - DNA, 75 bp, synthetic construct
  source 1..75: mol_type = other DNA
gaccgggagcatgtgacgatcgcgagatacgaatgattattcgtctggcaatagggaaaacaataactgctctca

SEQ ID NO: 588846 - DNA, 75 bp, synthetic construct
  source 1..75: mol_type = other DNA
agcaagtctcttcatatcatcagtctggacagactggaggcttcagcaaaagatgtgatgacggaagctgcgtat

SEQ ID NO: 588847 - DNA, 75 bp, synthetic construct
  source 1..75: mol_type = other DNA
agtgggtattttaaccattggtttaattggctggctattggatacgctattttatcgctcattggtgctgctatt

SEQ ID NO: 588848 - DNA, 75 bp, synthetic construct
  source 1..75: mol_type = other DNA
acactcgtgatggactgcgtcgcgtcagtacagcccataaggaattggccattagcctgaatctttcacctttac

SEQ ID NO: 588849 - DNA, 75 bp, synthetic construct
  source 1..75: mol_type = other DNA
tcaccaatcagtatctgttggtgaagataatgttggacaattaatccaggcaattttttcatttaaaagattgaa

SEQ ID NO: 588850 - DNA, 75 bp, synthetic construct
  source 1..75: mol_type = other DNA
atatttagctttacaaaggactttaccaaaaaccctgagactgatttaacacaatataaaacattaacaaatggc

SEQ ID NO: 588851 - DNA, 75 bp, synthetic construct
  source 1..75: mol_type = other DNA
attttaacgcggatgctggtgtgacccgaagtttactggagcgtgcaaaagcggcaggctattcagccattatta

SEQ ID NO: 588852 - DNA, 75 bp, synthetic construct
  source 1..75: mol_type = other DNA
gaagactcatctgatgatgcagcgcaggctgttgcagcaaattcaaaagcacgaggtaaatctaaatacgatcat

SEQ ID NO: 588853 - DNA, 75 bp, synthetic construct
  source 1..75: mol_type = other DNA
aaataaagcagtaggcgcatattcaggttttgttggctatatgctaatgaacatgagtattaattattatctcac

SEQ ID NO: 588854 - DNA, 75 bp, synthetic construct
  source 1..75: mol_type = other DNA
gcgtggccttcacctccacgcatgcagcacgggaatggctgattctgaacatggcgggactggagcgtgaagagt

SEQ ID NO: 588855 - DNA, 75 bp, synthetic construct
  source 1..75: mol_type = other DNA
gtgagtcgagcattgatcgccgtagtattagcatttccattaattacactggctaacccgcattatcatccggac

SEQ ID NO: 588856 - DNA, 75 bp, synthetic construct
  source 1..75: mol_type = other DNA
gtggaggtgaacgtaccgccagaagtgttcagttcaggcgggcagtcagcgcagccctgtactcagtgctgcgtt

SEQ ID NO: 588857 - DNA, 75 bp, synthetic construct
  source 1..75: mol_type = other DNA
cgtccagccgacgcaggcagaactgacggcgcatccgctgccgcgttcattaagccgcctgaacccggatttact

SEQ ID NO: 588858 - DNA, 75 bp, synthetic construct
  source 1..75: mol_type = other DNA
gcattgcccggctggtgaagcctatcgactggcagtcagagatgggtgatgtggaactggtgatcatgctgacgc

SEQ ID NO: 588859 - DNA, 75 bp, synthetic construct
  source 1..75: mol_type = other DNA
gctgtcacccctgcaggataggttcagggaggtaaacgactggctcggtatggaggtcatcaggttcaaagagta

SEQ ID NO: 588860 - DNA, 75 bp, synthetic construct
  source 1..75: mol_type = other DNA
ggaagccattaatacaaaagatattcccggttttttgttaacaacaccagacaagccctcaatattattcatgat

SEQ ID NO: 588861 - DNA, 75 bp, synthetic construct
  source 1..75: mol_type = other DNA
gaaggatgagtttaccggcatcaaagacgccacccgcgacgacctgctagccgcgcaccgtgtgccgcccgttct

SEQ ID NO: 588862 - DNA, 75 bp, synthetic construct
  source 1..75: mol_type = other DNA
atgaacggacaaatatcaattgttcgaccaggagcatgtgacgatagcgagatacgcatgattattcgtctggcg

SEQ ID NO: 588863 - DNA, 75 bp, synthetic construct
  source 1..75: mol_type = other DNA
atggggaaaacaataactgctctcattactccagaaaatctcgcattagcattaacaggaaagtcagacctgcca

SEQ ID NO: 588864 - DNA, 75 bp, synthetic construct
  source 1..75: mol_type = other DNA
tttaaagaactgaacgactggctggggctggaggttattcgcttcaaaaagtaccgccttgccgacgacgattca

SEQ ID NO: 588865 - DNA, 75 bp, synthetic construct
  source 1..75: mol_type = other DNA
ttcgccgtcaaaaacacctactacaaggagtcggtggatgacagcgatgtgacagaaatcgacctgctgaacttc

SEQ ID NO: 588866 - DNA, 75 bp, synthetic construct
  source 1..75: mol_type = other DNA
ggaaaccagaattccggcaatgaaatttagtgaatgggatcaatttcgatggtggttaaactatctgcaaggata

SEQ ID NO: 588867 - DNA, 75 bp, synthetic construct
  source 1..75: mol_type = other DNA
gggaagtggccatacgggaaattgagcaacagcaggcaaccgaaatcgccagccaggccagagccattgccgtgg

SEQ ID NO: 588868 - DNA, 75 bp, synthetic construct
  source 1..75: mol_type = other DNA
gttgcgccagccgatcttgaaccaccgcaagccgttcagccgccgccggaacccgtggtagaacccgaaccggaa

SEQ ID NO: 588869 - DNA, 75 bp, synthetic construct
  source 1..75: mol_type = other DNA
agttcacgctgtttgtgaacggcaaaaacaaaatcggcacggtgacaggcgtcactctgcccaagctgacccgaa

SEQ ID NO: 588870 - DNA, 75 bp, synthetic construct
  source 1..75: mol_type = other DNA
ctgcggcgacgaaccagatccagcataaaaaccaaacttcagccgaagcattcagcttcggtgatcccgttcctg

SEQ ID NO: 588871 - DNA, 75 bp, synthetic construct
  source 1..75: mol_type = other DNA
ggctgggcgacggcatttaaagcaccttctctgttgcaacttagccctgactggacgagcaattcctgccgtggc

SEQ ID NO: 588872 - DNA, 75 bp, synthetic construct
  source 1..75: mol_type = other DNA
tagtataggtgattatactttttcatccgatggtctcaagctgttacatggtgatactctgattaatgatttaac

SEQ ID NO: 588873 - DNA, 75 bp, synthetic construct
  source 1..75: mol_type = other DNA
ttgactttgccagaggattactgcctatcaaattttgaagaacgattactagactcgctaaatatacgagccatc

SEQ ID NO: 588874 - DNA, 75 bp, synthetic construct
  source 1..75: mol_type = other DNA
ttattgctgatggcagacacgcttgcccgcacgctggtacagccagcagaaatgcccgtgggattattaaccagc

SEQ ID NO: 588875 - DNA, 75 bp, synthetic construct
  source 1..75: mol_type = other DNA
gggctttgacctcgggtcgtgaggaattaacccgccaggtaggccgttacaaaaacaagaaatttatgcagggta

SEQ ID NO: 588876 - DNA, 75 bp, synthetic construct
  source 1..75: mol_type = other DNA
aattttagttactcttttgtattattgttatccttatatgaatgatattccaaataatataatagagttttatcg

SEQ ID NO: 588877 - DNA, 75 bp, synthetic construct
  source 1..75: mol_type = other DNA
acaaacgacttctcgacacccttgttgctgccggatatgagcatgacaaagcccgtgacctcatccagaaacagg

SEQ ID NO: 588878 - DNA, 75 bp, synthetic construct
  source 1..75: mol_type = other DNA
ctaattctcaagaaagattaggtgtaaatgctgtcgcagaagctatagctaaaattggccagatttggcgtgaaa

SEQ ID NO: 588879 - DNA, 75 bp, synthetic construct
  source 1..75: mol_type = other DNA
ctatccgcgtgaccgtgtccttcgacggttgttcaaactcaacaatgagtttcagcgcaacagaataatccggag

SEQ ID NO: 588880 - DNA, 75 bp, synthetic construct
  source 1..75: mol_type = other DNA
tgaagccagtaagcaccgttcaaccgcgcgaaaccactgacgcgccggtaacgaacacccgggcggcaaaaacaa

SEQ ID NO: 588881 - DNA, 75 bp, synthetic construct
  source 1..75: mol_type = other DNA
ttccatgaagtgattgcgcaaaccgggcgtttcaaggtgtatcgcgccattatgacccgccaggcgaagaaaggt

SEQ ID NO: 588882 - DNA, 75 bp, synthetic construct
  source 1..75: mol_type = other DNA
gatttaccaggcaagacgcattcgtctcgcccgtaaatacctgaacggaaaaaaaccggaagaaggggcggaacc

SEQ ID NO: 588883 - DNA, 75 bp, synthetic construct
  source 1..75: mol_type = other DNA
cgcgctttttttaaaatcaacgcctttaaaaaacaccatcgttttaatccgggtaaaacattcgatatgcgaaag

SEQ ID NO: 588884 - DNA, 75 bp, synthetic construct
  source 1..75: mol_type = other DNA
cgcttgctactaaattttctcttttctatcgccgttctaattatactgccctggtatacgcatctggggatcaaa

SEQ ID NO: 588885 - DNA, 75 bp, synthetic construct
  source 1..75: mol_type = other DNA
cgaacaactggtttccctcatttatctgatgacagagcaactggatggagtggtgcaacgctgccatgacgacct

SEQ ID NO: 588886 - DNA, 75 bp, synthetic construct
  source 1..75: mol_type = other DNA
aggcactaacgacatgggccaaccagcatggattccgacactgcttgaaagccagtccactcgcattggtgccgt

SEQ ID NO: 588887 - DNA, 75 bp, synthetic construct
  source 1..75: mol_type = other DNA
gccatcgaaatagacctgttacagatgaacgatgaaacggcgattcctccaaagattctccctgatcgccattat

SEQ ID NO: 588888 - DNA, 75 bp, synthetic construct
  source 1..75: mol_type = other DNA
tgatttaccgctggatgccatctgcaacgctattgaaattgacctgttacagatgaacgatgaaacagaaattcc

SEQ ID NO: 588889 - DNA, 75 bp, synthetic construct
  source 1..75: mol_type = other DNA
attgcctatacgccaattccctttgcctacaccctgattttgcatcgtaccgtttatctgttttgtatcatgctg

SEQ ID NO: 588890 - DNA, 75 bp, synthetic construct
  source 1..75: mol_type = other DNA
aaaccagcaacatcattcatggcggtgaaacgaactatattcgtgccacggttagcctgtatgtttcgctgtaca

SEQ ID NO: 588891 - DNA, 75 bp, synthetic construct
  source 1..75: mol_type = other DNA
ccgcactatgtctggcagcaggaaccccagtttattcctttgccgctgacccgtgcgaagttgttctttgtatgt

SEQ ID NO: 588892 - DNA, 75 bp, synthetic construct
  source 1..75: mol_type = other DNA
ccgttgctgtatgtgcccgtattgccgtatcgagtgacggcgtaagttcggaagaaaagcagaaaatgatgggct

SEQ ID NO: 588893 - DNA, 75 bp, synthetic construct
  source 1..75: mol_type = other DNA
ctgatgtaggcggctggcattacgccccggctggtctgtctcgggcaatcattgatcgccagaacatcaccagac

SEQ ID NO: 588894 - DNA, 75 bp, synthetic construct
  source 1..75: mol_type = other DNA
atttccaactatcgaggaaagaatggctccaggaacaagccagtcttacatcatcaaaaatgacagtcataatca

SEQ ID NO: 588895 - DNA, 75 bp, synthetic construct
  source 1..75: mol_type = other DNA
tgttgttgtcctgatcgggatggtagcgaatatcttcctgcaactgcctgccctgcatctggcgatcagcgcggt

SEQ ID NO: 588896 - DNA, 75 bp, synthetic construct
  source 1..75: mol_type = other DNA
tgcaaaactggaagtaaaaaatctttcccatccttcgctttttaaagaggtcagtttcgctgtgcgtccggggga

SEQ ID NO: 588897 - DNA, 75 bp, synthetic construct
  source 1..75: mol_type = other DNA
ttcgcgggcgctacaaagtggcagcacaggatcagggggaatttgagcagatctaccgccgcctgtaccacgttc

SEQ ID NO: 588898 - DNA, 75 bp, synthetic construct
  source 1..75: mol_type = other DNA
acgttaccaggatctgctggaatttctctggctctgtttttctctgggatttcgcgggcgctacaaagtggcagc

SEQ ID NO: 588899 - DNA, 75 bp, synthetic construct
  source 1..75: mol_type = other DNA
tgcataaactgcgcggcgatgcgcctttcccgctgttacaccaggaccaaaaaacccagggcgggcgttatcagt

SEQ ID NO: 588900 - DNA, 75 bp, synthetic construct
  source 1..75: mol_type = other DNA
atatgtcagatatacatttggtaagaagtataattacggacccaaatgttaattactataaaggaaatttgtaca

SEQ ID NO: 588901 - DNA, 75 bp, synthetic construct
  source 1..75: mol_type = other DNA
cattcagactcagctgccgccgctggcaccggcactggcgcagcgtccgggcaacctgaaaccgctgacgcctgg

SEQ ID NO: 588902 - DNA, 75 bp, synthetic construct
  source 1..75: mol_type = other DNA
tcaaagcaaaacagtacgccaccacctacatcaacatcgtcggcaaactgttcaacgaatgcgctgacttccgtc

SEQ ID NO: 588903 - DNA, 75 bp, synthetic construct
  source 1..75: mol_type = other DNA
gctggttccaggctcctgccaatgccgttgaaggtctgttcttccccggatttggcgttgacgacgccgcttctg

SEQ ID NO: 588904 - DNA, 75 bp, synthetic construct
  source 1..75: mol_type = other DNA
aaaacgcattttacactctggtccaccgattgcctgggaagatatgtgtggtccggtaaaaggggcgattattgg

SEQ ID NO: 588905 - DNA, 75 bp, synthetic construct
  source 1..75: mol_type = other DNA
tgaaggtcgtgaacgcggggctacacagttttgctgacaatattcaacatgcaggagggcatgctatatccctca

SEQ ID NO: 588906 - DNA, 75 bp, synthetic construct
  source 1..75: mol_type = other DNA
tagcgtagaggacgccgcggctgatctgggagatagcgccattactgaaaccgcaggcgtgggcggctttgcgat

SEQ ID NO: 588907 - DNA, 75 bp, synthetic construct
  source 1..75: mol_type = other DNA
gagggtaaagaggtgcatatcgagggctatacgccggaagataaaaataaaaacagtgccggagcacgcctccgg

SEQ ID NO: 588908 - DNA, 75 bp, synthetic construct
  source 1..75: mol_type = other DNA
atgagcagaacgattttttgtactttcctgcaacgtgaagcagaaggtcaggattttcagctgtcccccggcgag

SEQ ID NO: 588909 - DNA, 75 bp, synthetic construct
  source 1..75: mol_type = other DNA
cggcaatagttttatcgctcaacgatgttacacgcggaaaactcgatgaaatcgatgccacgggttatggcatcc

SEQ ID NO: 588910 - DNA, 75 bp, synthetic construct
  source 1..75: mol_type = other DNA
ggacagaaccacgcgtgaagtggtgcttacagatgcagggcagcagttggctttgcgtcttgagcgactgctgga

SEQ ID NO: 588911 - DNA, 75 bp, synthetic construct
  source 1..75: mol_type = other DNA
gtcaaggttaagtttgacgttacaccggatggccgggtggataacgtacaaattctttccgccaaacctgcgaat

SEQ ID NO: 588912 - DNA, 75 bp, synthetic construct
  source 1..75: mol_type = other DNA
tccctcatggattttttcgaccaactatacccgcgccggcggttacgaggcgacaaaacgcatgcttgagcacca

SEQ ID NO: 588913 - DNA, 75 bp, synthetic construct
  source 1..75: mol_type = other DNA
gggggccgggcgttccgatgtgatgaaggcgctatttggcctcgtttcgtatcacgggactgtgttgattgatgg

SEQ ID NO: 588914 - DNA, 75 bp, synthetic construct
  source 1..75: mol_type = other DNA
gtcgatggcacataggcaactggtagaaattgccaaagccttaagctatgcagcggatgtcgtgattatggatga

SEQ ID NO: 588915 - DNA, 75 bp, synthetic construct
  source 1..75: mol_type = other DNA
gaaaaatatttggccagcacgtcttggggaaaaaccggatgaaaatgttcctgcaaaactggaagtaaaaaatct

SEQ ID NO: 588916 - DNA, 75 bp, synthetic construct
  source 1..75: mol_type = other DNA
atgtcagaattaaaaattgccgttagccgttcttgcccggattgtttttcaactcatcgcacatgcgtgaatatt

SEQ ID NO: 588917 - DNA, 75 bp, synthetic construct
  source 1..75: mol_type = other DNA
tggtacgcttcgaaaaactgcttgagtccgacgcgccattatcagaagtactgccttccatctacaaacagcatg

SEQ ID NO: 588918 - DNA, 75 bp, synthetic construct
  source 1..75: mol_type = other DNA
ttatgtcaatcagggtaacagcgcgtttgattgccccggtcatcagggcggcgaatttttccgtcgccatccggc

SEQ ID NO: 588919 - DNA, 75 bp, synthetic construct
  source 1..75: mol_type = other DNA
ttgccgcactggatatcaacgccaaaatgcatgaaggtgtcagcggtcgtaatatgtggatggattgtgtggtaa

SEQ ID NO: 588920 - DNA, 75 bp, synthetic construct
  source 1..75: mol_type = other DNA
ctgccttctatttacaaacagcacgaagaacgttacgccggttataccttgcgtcagctctgtcaggaaatgcat

SEQ ID NO: 588921 - DNA, 75 bp, synthetic construct
  source 1..75: mol_type = other DNA
gatggcaaaccgtggcaatcttatccgaccagagaaatcgccaatgacctgcgtttcttccagtttgtcccggga

SEQ ID NO: 588922 - DNA, 75 bp, synthetic construct
  source 1..75: mol_type = other DNA
agcgagaaaaaattaaagggcagattgttgatctcgtacgccagagcgggcgcgagacgttacgacaactggaag

SEQ ID NO: 588923 - DNA, 75 bp, synthetic construct
  source 1..75: mol_type = other DNA
gcaggagattgaagcattacttaccgcgtttacgccagaagaggacgttcgcccattgttagcgttggagaatat

SEQ ID NO: 588924 - DNA, 75 bp, synthetic construct
  source 1..75: mol_type = other DNA
tacgggttattcccgtctgaacaggcgcgtaaggactggcaaaacgcccgcaaaaaactctcgagggcaaaggtg

SEQ ID NO: 588925 - DNA, 75 bp, synthetic construct
  source 1..75: mol_type = other DNA
agcgggaagaactgaagacgcgaattgtggaactcgtgcatcaggacggtcgggtcacgattcggcagttgtccg

SEQ ID NO: 588926 - DNA, 75 bp, synthetic construct
  source 1..75: mol_type = other DNA
gttgccagtggtgatgtatacaactctggctacgggttatttccgtctgaacaggctcgtaaagactggcaaaac

SEQ ID NO: 588927 - DNA, 75 bp, synthetic construct
  source 1..75: mol_type = other DNA
ggcgtctgaacataatctgtcgcgagtgcctgaagagagaagttatgcagcgtgtactcgcgttctaccatggaa

SEQ ID NO: 588928 - DNA, 75 bp, synthetic construct
  source 1..75: mol_type = other DNA
cggatatcgcggacaccggcacagacgccacgctgccgtttccggatgccctgttacggcggttgccgcgtcagt

SEQ ID NO: 588929 - DNA, 75 bp, synthetic construct
  source 1..75: mol_type = other DNA
agtggattgcacaatccggcgtacaggagcgcagtcagcgactctgttacctgctgaaagccgaaagcctgatgc

SEQ ID NO: 588930 - DNA, 75 bp, synthetic construct
  source 1..75: mol_type = other DNA
gtgccgtaacagcgaaacgatgcagcgtgtgctggcattctggcgggggagtgcagagggattgatgttctcccc

SEQ ID NO: 588931 - DNA, 75 bp, synthetic construct
  source 1..75: mol_type = other DNA
ctgcaccagttttatgccgttccggcggaggaatttatcaccaaagcccgtcacctgtcggtgctgaaagacgat

SEQ ID NO: 588932 - DNA, 75 bp, synthetic construct
  source 1..75: mol_type = other DNA
ggcccgcctgaaagacggctcgacaaaagtgctggtggacgcactggtgaacatccgggcaaaaccgggctggct

SEQ ID NO: 588933 - DNA, 75 bp, synthetic construct
  source 1..75: mol_type = other DNA
ctgctgaaagctgaaagcctgatgcagtggctgaatcttaatgtgctgacggcactgaacggcccggaggcgaaa

SEQ ID NO: 588934 - DNA, 75 bp, synthetic construct
  source 1..75: mol_type = other DNA
ggcgtatgaacataatctgtcgtgagtgccggaagagcgaagctatgcagcgtgtgctggcgttttatcagggga

SEQ ID NO: 588935 - DNA, 75 bp, synthetic construct
  source 1..75: mol_type = other DNA
cgagtgccggaagagtgaagctatgcagcgtgtactggctttctatcagggtaattttcaggaggcggtactgtg

SEQ ID NO: 588936 - DNA, 75 bp, synthetic construct
  source 1..75: mol_type = other DNA
gcggccagtggtgatgtctggctctgtgattgcggggtatttccatcagagcaggcgtatcgcgtatggcgtaag

SEQ ID NO: 588937 - DNA, 75 bp, synthetic construct
  source 1..75: mol_type = other DNA
ctgaatataatctgtcgcgagtgccggaagagcgaagctatgcagcgtgtactggcattttatcaaggaaatgtt

SEQ ID NO: 588938 - DNA, 75 bp, synthetic construct
  source 1..75: mol_type = other DNA
aactgaaagagggtaacctcttcgccgaacagtgcccgtcgcgcgaggtgttgaaacacgtcaccagtcgttggg

SEQ ID NO: 588939 - DNA, 75 bp, synthetic construct
  source 1..75: mol_type = other DNA
cacgtcaccagccgttgggggtgttgattctggtggcgctacgcgaaggtactcatcgctttagcgacctgcggc

SEQ ID NO: 588940 - DNA, 75 bp, synthetic construct
  source 1..75: mol_type = other DNA
ctggcttgtggcgatttatacatgcccggtaaatacggtgtttttacatcagaacaggtgtatcgcgtatggcgt

SEQ ID NO: 588941 - DNA, 75 bp, synthetic construct
  source 1..75: mol_type = other DNA
gagtgccggaagagtgaagttatgcagcgcatattgtcgttttatcagggggatgttcggtatttattgaagtga

SEQ ID NO: 588942 - DNA, 75 bp, synthetic construct
  source 1..75: mol_type = other DNA
gtggcaaaagtatttacacaagaagagcgggaaaaaattaagaggcaggttgttgaactcgtgcgcctgagcggg

SEQ ID NO: 588943 - DNA, 75 bp, synthetic construct
  source 1..75: mol_type = other DNA
gcgacaagccgattatcttccgcacaatggacatcggcggcgataaaagcattccttacctcaacattccccagg

SEQ ID NO: 588944 - DNA, 75 bp, synthetic construct
  source 1..75: mol_type = other DNA
gtggcaaaagtatttacacaggaagagcgagaaaaaattaaagggcaggttgttgaactcgtacgccagagtggg

SEQ ID NO: 588945 - DNA, 75 bp, synthetic construct
  source 1..75: mol_type = other DNA
tgttgagctggtacgccagagtgggcgcgagacgttaaggcaactggaggccaagacaggggcgacaagatatct

SEQ ID NO: 588946 - DNA, 75 bp, synthetic construct
  source 1..75: mol_type = other DNA
ccagacggagaaatacgccgctacgacaggagccagaacataatctgccgcgagtgccggaagagtgaggttatg

SEQ ID NO: 588947 - DNA, 75 bp, synthetic construct
  source 1..75: mol_type = other DNA
gtagccagtggcgatgtatacaactccggctgcggattattcccgtctgaacaggcgcgtaaggactggcaaaat

SEQ ID NO: 588948 - DNA, 75 bp, synthetic construct
  source 1..75: mol_type = other DNA
accctcttcaccggcaccatcaaccgcacggaagtccatccccgggaagtgattaaatgcgccctgtatcacaat

SEQ ID NO: 588949 - DNA, 75 bp, synthetic construct
  source 1..75: mol_type = other DNA
cgggaacaattttaaaaaagcttgagaatgtgctgaaaaggccgagcaatccatcggctaaactgcgggatttgc

SEQ ID NO: 588950 - DNA, 75 bp, synthetic construct
  source 1..75: mol_type = other DNA
ctggtgggaagaggaagatggcacctgcctgattttaaaagccgaaatcataaaaacagatgaggaagaaaacgc

SEQ ID NO: 588951 - DNA, 75 bp, synthetic construct
  source 1..75: mol_type = other DNA
tacaatattttttggttttgttggtgataagattggtgtaaaaaaaacctttgtagtcggtctaataacttcatt

SEQ ID NO: 588952 - DNA, 75 bp, synthetic construct
  source 1..75: mol_type = other DNA
aaaatcttcaatctaaagccagtgcttttttagtcagtggtttttctgttgggaatattatcgctgcacaaataa

SEQ ID NO: 588953 - DNA, 75 bp, synthetic construct
  source 1..75: mol_type = other DNA
agaaaagtaaatcgaaagcaacatcagggcgcaaaaagccgactacaaaagcgacggccagaaaagccacgaaaa

SEQ ID NO: 588954 - DNA, 75 bp, synthetic construct
  source 1..75: mol_type = other DNA
tatttcaagcaattaccggataattaccaggcaaaatttgagttaaatttaatgagtaagttctcaaattttatt

SEQ ID NO: 588955 - DNA, 75 bp, synthetic construct
  source 1..75: mol_type = other DNA
ttcgaacaattgattaacgtcaactttctccctcatgacaggacgtcattttgtgaatgcaatcgttttccataa

SEQ ID NO: 588956 - DNA, 75 bp, synthetic construct
  source 1..75: mol_type = other DNA
atgagcaagttctcaaattttattataaataaaccattttcagcgataaatactgcggcacgtcacattttttca

SEQ ID NO: 588957 - DNA, 75 bp, synthetic construct
  source 1..75: mol_type = other DNA
ctggcttacgcgcaattcgctttgcgaactgcgtctgaaagacggtacacgggaagtttcggccctgatggacta

SEQ ID NO: 588958 - DNA, 75 bp, synthetic construct
  source 1..75: mol_type = other DNA
ctggcttacgcgcaattcgctctgcgaactgaggctaaaagacggtacacgggaagtgtcggctgtgatggacta

SEQ ID NO: 588959 - DNA, 75 bp, synthetic construct
  source 1..75: mol_type = other DNA
cttacccgcttaaatgcaaggagaagaaggccatgaaactgccgaaccaacccgttgttttgtgcgtattgatag

SEQ ID NO: 588960 - DNA, 75 bp, synthetic construct
  source 1..75: mol_type = other DNA
cagcaaaagtaaaaagacaacgcagaagcctgcaacacgaaaaatcaccgcgtcgcagaaggcgaagcgcggtta

SEQ ID NO: 588961 - DNA, 75 bp, synthetic construct
  source 1..75: mol_type = other DNA
gcgtctgaacataatctgtctcgagtgccggaagagcgaagttatgcagcgcgtactggcgttttatcaggggaa

SEQ ID NO: 588962 - DNA, 75 bp, synthetic construct
  source 1..75: mol_type = other DNA
ttcctcggctatcgcgcggtacgtatttacccggaatttgctggcctgttccgcactcaactgcgggccattttg

SEQ ID NO: 588963 - DNA, 75 bp, synthetic construct
  source 1..75: mol_type = other DNA
gtggcaaaagtttttacacaagaagagcgggaaaaaattaaagggcaggttgttgaccttgtacgccggagtggg

SEQ ID NO: 588964 - DNA, 75 bp, synthetic construct
  source 1..75: mol_type = other DNA
gacggagaaatacgccgctacgacaggcgtatgaacataatctgtcgcgagtgccggaagagcgaagttatgcag

SEQ ID NO: 588965 - DNA, 75 bp, synthetic construct
  source 1..75: mol_type = other DNA
gacggagaaatacgtcgttacgacagacatcataatataatttgtagtgagtgccgtaaaagcgaagttatgcag

SEQ ID NO: 588966 - DNA, 75 bp, synthetic construct
  source 1..75: mol_type = other DNA
aattagctatcaggcttcaattatcgctggcattcgcatcaaaggagaggaccatggaaataaaaccagaagatg

SEQ ID NO: 588967 - DNA, 75 bp, synthetic construct
  source 1..75: mol_type = other DNA
atttgtcgctgattcaggatgatgaatttgcaggcaatatccgtcgcctgatggcagaacagcatcaggggctgg

SEQ ID NO: 588968 - DNA, 75 bp, synthetic construct
  source 1..75: mol_type = other DNA
gatgagcgttctggccagagagctggttgccagtggcgaagtatacaattctggctacgggttattcccgtctga

SEQ ID NO: 588969 - DNA, 75 bp, synthetic construct
  source 1..75: mol_type = other DNA
tctgccagcgattatctgcgcgagcgggtcagcgacattcgcgatatcagcgaacagttgctgcatatcacctgg

SEQ ID NO: 588970 - DNA, 75 bp, synthetic construct
  source 1..75: mol_type = other DNA
gccgcctaaacataatctgtcgcgagtgccggaaaagcaaggttatgcagcgtgtgctggcgttttatcagggta

SEQ ID NO: 588971 - DNA, 75 bp, synthetic construct
  source 1..75: mol_type = other DNA
gtcgtctgaacataatctgtcgcgagtgccggaagagtgaagttatgcagcgcatactggcattttatcagggat

SEQ ID NO: 588972 - DNA, 75 bp, synthetic construct
  source 1..75: mol_type = other DNA
gacggagaaatacgccgctatgacaggcaattgaacataatttgtagtgagtgccgtaacagtgaagtgatgcag

SEQ ID NO: 588973 - DNA, 75 bp, synthetic construct
  source 1..75: mol_type = other DNA
cggaagttcatccccgggaagtgattaaacgcgccctgtatcacaatgccgcagccgtggtgctggcacacaatc

SEQ ID NO: 588974 - DNA, 75 bp, synthetic construct
  source 1..75: mol_type = other DNA
gaagatttaaccccaagccagtttttgagcctcgatttaaaaaatcttgcgggcatgattctggagaaaaccggg

SEQ ID NO: 588975 - DNA, 75 bp, synthetic construct
  source 1..75: mol_type = other DNA
atgcaacagctttcctttctgcccggggagatgacacccggtgagcgcagcctcattcagcgggccctgaaaacc

SEQ ID NO: 588976 - DNA, 75 bp, synthetic construct
  source 1..75: mol_type = other DNA
tggatatccgggtgccggaccatctgatagtcggtggcaaccaggttttctcctttgcggaacacggtctgcttt

SEQ ID NO: 588977 - DNA, 75 bp, synthetic construct
  source 1..75: mol_type = other DNA
ttcatgaacccggtgtggccttcacctccacccgtgcagcacgggaatggctgattctgaacatggcgggactgg

SEQ ID NO: 588978 - DNA, 75 bp, synthetic construct
  source 1..75: mol_type = other DNA
cagtggatccgtcattccagtatcagcattgcccggctggcgaaaccgattgactggcagtcagaaatgggcgaa

SEQ ID NO: 588979 - DNA, 75 bp, synthetic construct
  source 1..75: mol_type = other DNA
gaagtgattaaacgcgccctgtaccacaatgccgctgccgtggtgctggcgcacaatcacccgtccggtgaagtc

SEQ ID NO: 588980 - DNA, 75 bp, synthetic construct
  source 1..75: mol_type = other DNA
caaggcagaccgccttatcacggaacgtctggtacaggcactggccctggtggatatccgggtaccggaccatct

SEQ ID NO: 588981 - DNA, 75 bp, synthetic construct
  source 1..75: mol_type = other DNA
ctcttcaccggcactatcaaccgtacggaagtccatccccgggaagtgattaaacgcgccctataccacaatgcc

SEQ ID NO: 588982 - DNA, 75 bp, synthetic construct
  source 1..75: mol_type = other DNA
accctcttcaccggcaccatcaaccgcacggaagtccatccccgggaagtgattaaacgcgccctgtaccacaat

SEQ ID NO: 588983 - DNA, 75 bp, synthetic construct
  source 1..75: mol_type = other DNA
gagagatgacgcccggcgagcgcagtctcattctgcgggccctgaaaaccctggaacgccatcttcatgaacccg

SEQ ID NO: 588984 - DNA, 75 bp, synthetic construct
  source 1..75: mol_type = other DNA
ccgaggtgcatccccgggaggtggtcaaacgtgctctgcacttcaacgcggcggcggtgatactcgcgcacaacc

SEQ ID NO: 588985 - DNA, 75 bp, synthetic construct
  source 1..75: mol_type = other DNA
cacaatcacccgtccggtgaagtcacacccagtaaggcagaccggcttatcaccgaacgtctggtacaggcactg

SEQ ID NO: 588986 - DNA, 75 bp, synthetic construct
  source 1..75: mol_type = other DNA
atgattgtgcgcatactgctgctgtttatcgctctgttcacctttggtgcgcaggctatcaaggaaagctatgcc

SEQ ID NO: 588987 - DNA, 75 bp, synthetic construct
  source 1..75: mol_type = other DNA
ctgattgccgaaagcgcgcgctatgctgacgattattcctgggtggaagtcgccattaatccgcgcgcccgtttt

SEQ ID NO: 588988 - DNA, 75 bp, synthetic construct
  source 1..75: mol_type = other DNA
gtggtgctggcacacaatcacccgtccggtgaagtcacacccagcaaggcagaccgccttatcacggaacgtctg

SEQ ID NO: 588989 - DNA, 75 bp, synthetic construct
  source 1..75: mol_type = other DNA
atacctggtggtatgacgttaataaagcggccaaactgcctcagccagacaacagggagaatagatgggcgctta

SEQ ID NO: 588990 - DNA, 75 bp, synthetic construct
  source 1..75: mol_type = other DNA
ttcttaacgaagcaggctgggtgctgaaaggtcagcaacgcgttaatgccactacgggtcagccgctcagctctg

SEQ ID NO: 588991 - DNA, 75 bp, synthetic construct
  source 1..75: mol_type = other DNA
ttatcgctctgttcacctttggtgcgcaggcgcaggctatcaaggaaagctatgcctttgccgtgctgggcgaac

SEQ ID NO: 588992 - DNA, 75 bp, synthetic construct
  source 1..75: mol_type = other DNA
ctagaccgccatcttcatgaacccggtgtggccttcacctccacccgtgcagcacgggaatggctgattctgaac

SEQ ID NO: 588993 - DNA, 75 bp, synthetic construct
  source 1..75: mol_type = other DNA
ggaatggctgattctgaacatggcgggactggagcgtgaagagttccgggtgctgtatctgaacaaccagaatca

SEQ ID NO: 588994 - DNA, 75 bp, synthetic construct
  source 1..75: mol_type = other DNA
gcagccgtggtgctggcacacaatcacccgtccggtgaagtcactcccagtaaggcagaccgccttatcacggaa

SEQ ID NO: 588995 - DNA, 75 bp, synthetic construct
  source 1..75: mol_type = other DNA
gctgccgtggtgctggcgcacaatcatccgtccggtgaagtcacacccagtaaggcagaccggcttattacggaa

SEQ ID NO: 588996 - DNA, 75 bp, synthetic construct
  source 1..75: mol_type = other DNA
gaagtcacacccagcaaggcagaccgccttatcacggaacgtctggtacaggcactggccctggtggatatccgg

SEQ ID NO: 588997 - DNA, 75 bp, synthetic construct
  source 1..75: mol_type = other DNA
tacaggcactggccctggtggatatccgggtgccggaccatctgataatcggtggcagccaggttttctcctttg

SEQ ID NO: 588998 - DNA, 75 bp, synthetic construct
  source 1..75: mol_type = other DNA
cggaagtccatccccgggaagtgattaaacgtgccctgtatcacaatgccgcagccgtggtgctggcacacaatc

SEQ ID NO: 588999 - DNA, 75 bp, synthetic construct
  source 1..75: mol_type = other DNA
aaggtagcgagatatctctacatttctgtttccacattgcatcgccgtctggcaagcgagggagtaagttttcaa

SEQ ID NO: 589000 - DNA, 75 bp, synthetic construct
  source 1..75: mol_type = other DNA
tacaagccggggttaagtctctatatggtggcagagcgaagatctcaagcattaacactgatagcttcattgcgt

SEQ ID NO: 589001 - DNA, 75 bp, synthetic construct
  source 1..75: mol_type = other DNA
gggaactaaaccaagatgtaacccgagccaaaagagcgacctgtaatggacctgtattcatcacagatcgtggta

SEQ ID NO: 589002 - DNA, 75 bp, synthetic construct
  source 1..75: mol_type = other DNA
ccggactacatcaaagagttttggaacgtggtgaactgggacgaagctgcggcgcgtttcgcggcgaaaaaataa

SEQ ID NO: 589003 - DNA, 75 bp, synthetic construct
  source 1..75: mol_type = other DNA
caagaaaaccgtactgcgcaataacgctggcggtcacgctaaccacagcctgttctggaaaggtctgaaaaaagg

SEQ ID NO: 589004 - DNA, 75 bp, synthetic construct
  source 1..75: mol_type = other DNA
gctggaaagtctgccagagttcgccaatctgtcggttgaagagttgattaccaaactggaacagctgccagcaga

SEQ ID NO: 589005 - DNA, 75 bp, synthetic construct
  source 1..75: mol_type = other DNA
atggctaaagaagttgcaaaagaaaatgatgctaaactgcatccagtagcagcgtttatcacaaacagcattaac

SEQ ID NO: 589006 - DNA, 75 bp, synthetic construct
  source 1..75: mol_type = other DNA
cgttcctttgatgcaatatttctatgataacgatctggttgatttcttctcgtcgctgggtcgtcctgtattcct

SEQ ID NO: 589007 - DNA, 75 bp, synthetic construct
  source 1..75: mol_type = other DNA
gataaccaggacatacttttcaaaaaattcggcgatagcacacttgcgaatgagcttgtaacccgtgcaccggag

SEQ ID NO: 589008 - DNA, 75 bp, synthetic construct
  source 1..75: mol_type = other DNA
gggaactgaaccaggatgtgacacgggccaaacgggcgacctgtaacggtcctgtgtttatcactgaccggggta

SEQ ID NO: 589009 - DNA, 75 bp, synthetic construct
  source 1..75: mol_type = other DNA
agtaaggctgaccgccttattacggaacgtctggtacaggcactgaccctggtggatatccgggtgccggaccat

SEQ ID NO: 589010 - DNA, 75 bp, synthetic construct
  source 1..75: mol_type = other DNA
cgctacagcaacatgaaagagttgcgtattcagagccggggcgatccgatacgggcatttttcgcttttgacccg

SEQ ID NO: 589011 - DNA, 75 bp, synthetic construct
  source 1..75: mol_type = other DNA
atgcgccagcagggcgcagaaaaagcctcttttgacaccattgtcgccagcggctggcgtggggcgctgccgcac

SEQ ID NO: 589012 - DNA, 75 bp, synthetic construct
  source 1..75: mol_type = other DNA
catgttgcagcagattgttaccactgcgcatcagcggggcaaatgggtaggcatttgcggtgaactgggcggtga

SEQ ID NO: 589013 - DNA, 75 bp, synthetic construct
  source 1..75: mol_type = other DNA
tggatatccgggtaccggaccatctgatagtcggtggcagccaggttttctcctttgccgaacacggtctgcttt

SEQ ID NO: 589014 - DNA, 75 bp, synthetic construct
  source 1..75: mol_type = other DNA
ggagtttagtctccaggatttccggggcggttcacttagcaatgggcgttctactttcgttaggagtgaatcatg

SEQ ID NO: 589015 - DNA, 75 bp, synthetic construct
  source 1..75: mol_type = other DNA
ctgccgtggtactggcacacaatcacccgtccggtgaagtcacacccagtaaggcagaccggcttatcaccgaac

SEQ ID NO: 589016 - DNA, 75 bp, synthetic construct
  source 1..75: mol_type = other DNA
gcgcgatgacgcccggcgagcgcaacctcattcagcgggccctgaaaaccctggaccgccatcttcatgaacccg

SEQ ID NO: 589017 - DNA, 75 bp, synthetic construct
  source 1..75: mol_type = other DNA
taaacgcgccctgtaccacaatgccgctgccgtggtgctggcacacaatcacccgtccggtgaagtcacacccag

SEQ ID NO: 589018 - DNA, 75 bp, synthetic construct
  source 1..75: mol_type = other DNA
gtgatcgataccgttgggcatctgtgtgattacattctgtttgattccgcgtgggtcggttatgaacaatttatc

SEQ ID NO: 589019 - DNA, 75 bp, synthetic construct
  source 1..75: mol_type = other DNA
atgctgaatatgatagccactgaaacagcagctaatacgacagcagcaatagccggtgctacaggtaatgccagt

SEQ ID NO: 589020 - DNA, 75 bp, synthetic construct
  source 1..75: mol_type = other DNA
tctctgttgcgttgttgctggtaggtctatggaatgcaacgttattactcagcgaaaaaggcttttatgggctgg

SEQ ID NO: 589021 - DNA, 75 bp, synthetic construct
  source 1..75: mol_type = other DNA
tacctcagaatcctgagttaatatattgttgggagcaactaaaaacatctgtttcccgaggcttctcaactaaaa

SEQ ID NO: 589022 - DNA, 75 bp, synthetic construct
  source 1..75: mol_type = other DNA
cgtgatgttcgcactggacccgacggttatttatacgttctcaccgacgagtccagtggggaattacttaaagtt

SEQ ID NO: 589023 - DNA, 75 bp, synthetic construct
  source 1..75: mol_type = other DNA
gtgattacattctgtttgattccgcgtgggtcggttatgaacaatttatcccgatgatggcggatagctcgccgc

SEQ ID NO: 589024 - DNA, 75 bp, synthetic construct
  source 1..75: mol_type = other DNA
tgctgacgctgtttaccacgccagtgatttatctgctattcgaccgcctggcattgtggaccaaaagccgctttg

SEQ ID NO: 589025 - DNA, 75 bp, synthetic construct
  source 1..75: mol_type = other DNA
ggcgctcagcaccctgctgcttagtgtgctgctgtgggtgttcattccgaaaggcttcttcccggtgcaggacaa

SEQ ID NO: 589026 - DNA, 75 bp, synthetic construct
  source 1..75: mol_type = other DNA
gcagtgcaaagtctgacctcatttgttggcgttgatggcactaacccgtcgctgaacagtgcgcgtttgcagatc

SEQ ID NO: 589027 - DNA, 75 bp, synthetic construct
  source 1..75: mol_type = other DNA
caccattctctcgacgttgccaacggcaggggtcggcgcactgctggcgttgctgattgccggtagcgaactgga

SEQ ID NO: 589028 - DNA, 75 bp, synthetic construct
  source 1..75: mol_type = other DNA
gctgaacagtgcacgtttgcagatcaacctcaaaccactggatgaacgtgatgatcgggtacaaaaagtgattgc

SEQ ID NO: 589029 - DNA, 75 bp, synthetic construct
  source 1..75: mol_type = other DNA
tgtgatcgccattatcggcattattttgctgatcggtattgtgaagaaaaacgccatcatgatgatcgacttcgc

SEQ ID NO: 589030 - DNA, 75 bp, synthetic construct
  source 1..75: mol_type = other DNA
atgacattgcccgtctggtgattggtattgctgcccgtaacaacgagcattcgagaagatcgtcgtcaaactctc

SEQ ID NO: 589031 - DNA, 75 bp, synthetic construct
  source 1..75: mol_type = other DNA
gatgggcgcaggcgtgctgcgtaagaaaattcaggatgcaggtctgtcgcagatttctgttactaacagcgcgat

SEQ ID NO: 589032 - DNA, 75 bp, synthetic construct
  source 1..75: mol_type = other DNA
aacgtgctgatatacgcggcctgttcagccagtttttttgcatggctgaccggttcaccgttcatccttagtgaa

SEQ ID NO: 589033 - DNA, 75 bp, synthetic construct
  source 1..75: mol_type = other DNA
caggcgattgccgccctcggactgaccagcgaaaccgtgcgcaccgccattaccggcgcgaacgttaactcagcg

SEQ ID NO: 589034 - DNA, 75 bp, synthetic construct
  source 1..75: mol_type = other DNA
ccccaggcctcgcggcgctggataccattcgcctgaccagcagcgacggcggcgtggtgccgctaagctcaattg

SEQ ID NO: 589035 - DNA, 75 bp, synthetic construct
  source 1..75: mol_type = other DNA
ccagatgcaatccgccgaagagtatcgccagctaattattgcctaccagaacggcgcgccgattcgtcttggtga

SEQ ID NO: 589036 - DNA, 75 bp, synthetic construct
  source 1..75: mol_type = other DNA
tactcaggtcagccgccccagtaccagtttaccttgcaggccacctcactggatgcgctcagtacctgggtgcca

SEQ ID NO: 589037 - DNA, 75 bp, synthetic construct
  source 1..75: mol_type = other DNA
gtcatgaatgcacgtctggagcaacttgataaagcggccacgccggtggaaaaaatctgggacgatgttaaaacc

SEQ ID NO: 589038 - DNA, 75 bp, synthetic construct
  source 1..75: mol_type = other DNA
gctgtcagatacggcaaatgcactggctgaaaatgcccggaatgccggtgaactgggacgatttatgtcggtggc

SEQ ID NO: 589039 - DNA, 75 bp, synthetic construct
  source 1..75: mol_type = other DNA
cccggtgctaacattatctccaccgccgacagcatccggcagatgctgccacagctcaccgagagtctgccgaaa

SEQ ID NO: 589040 - DNA, 75 bp, synthetic construct
  source 1..75: mol_type = other DNA
tccattgcggaacgggatgcgcgtatacgccagggggaaatggggtatatcaggcgttcgcgtgcaacaggcgtc

SEQ ID NO: 589041 - DNA, 75 bp, synthetic construct
  source 1..75: mol_type = other DNA
gcgaccgggggatttacggggacggggggtaaatatgaacctgcggggattgttcatcgcggggagtttgtcttc

SEQ ID NO: 589042 - DNA, 75 bp, synthetic construct
  source 1..75: mol_type = other DNA
gaagagctgacaggtaaaaagcatacatcaccgaaaacgcgctctgccggggagagggaagaggagcaggcaaga

SEQ ID NO: 589043 - DNA, 75 bp, synthetic construct
  source 1..75: mol_type = other DNA
ccagatgcaatcggcagaagagtatcgtcagctaatcatcgcctaccagaacggcgcaccaattcgtcttggcga

SEQ ID NO: 589044 - DNA, 75 bp, synthetic construct
  source 1..75: mol_type = other DNA
cgcggatgtgattttgcaggatccggcagtgcaaagtttgacctcatttgttggcgttgatggcactaacccgtc

SEQ ID NO: 589045 - DNA, 75 bp, synthetic construct
  source 1..75: mol_type = other DNA
tccactatttatactcaggctaaccagtatcgcgtagtgctggagcacaacaccgaaattaccccgggcctcgcg

SEQ ID NO: 589046 - DNA, 75 bp, synthetic construct
  source 1..75: mol_type = other DNA
ccaacatccgcgcatcggtcgacgatacccagtttgaactgatgatggctatcgcgctggtagtcatgattatct

SEQ ID NO: 589047 - DNA, 75 bp, synthetic construct
  source 1..75: mol_type = other DNA
acccgccggtttacagcaaagtgaccccggcagatccgccaatcatgacgctcgctgtcacctcaaccgccatgc

SEQ ID NO: 589048 - DNA, 75 bp, synthetic construct
  source 1..75: mol_type = other DNA
aggcctgtttgctgcgttttcgtccgatcctgatgaccactctggcggcactgcttggcgcgctgccgctgatgt

SEQ ID NO: 589049 - DNA, 75 bp, synthetic construct
  source 1..75: mol_type = other DNA
gtagtttaggcatgctgtgggtagaaaacgccgccactctgctggtattgcgttttgtacaggctgttggggtct

SEQ ID NO: 589050 - DNA, 75 bp, synthetic construct
  source 1..75: mol_type = other DNA
tgtgagtgcaatgaaagatgatgtcgcagatgttaaagcaagtgccgatcatgccaacgcgaatgctaataccgc

SEQ ID NO: 589051 - DNA, 75 bp, synthetic construct
  source 1..75: mol_type = other DNA
tgacttgatgatggtgtcagcgggagcgggaacgtacaacggtgaatctgcggtgtctgtaggaacatcttttaa

SEQ ID NO: 589052 - DNA, 75 bp, synthetic construct
  source 1..75: mol_type = other DNA
aagtctgagacaagattccgcacaaacgcagcaacagttaagcaacacgcaaaaacgggtcgcagataacagcca

SEQ ID NO: 589053 - DNA, 75 bp, synthetic construct
  source 1..75: mol_type = other DNA
ctctccggtgccgtgagcgacaacaaaaaccagattgaaaaaaacagctcctctattgctgaacagcaggaacag

SEQ ID NO: 589054 - DNA, 75 bp, synthetic construct
  source 1..75: mol_type = other DNA
caacatcaccgaccaaaaccaggctgatcgcgacgcggcgcaagataccgcaattcagaacgcacacaatatcgc

SEQ ID NO: 589055 - DNA, 75 bp, synthetic construct
  source 1..75: mol_type = other DNA
aatcgcttcatgattcggacaggtaatacagaagccgcgcaagattacctgttttctcatggatatatggaccca

SEQ ID NO: 589056 - DNA, 75 bp, synthetic construct
  source 1..75: mol_type = other DNA
gagcacgacggctttttcgggcgagggcagatttatattgatgtgcgttcgccatcgggtatatctgcctggact

SEQ ID NO: 589057 - DNA, 75 bp, synthetic construct
  source 1..75: mol_type = other DNA
ccgtacccgtgataaccgcgggctgctgatgctggacaagacgaacgaagagtttttccagttcaacactcccct

SEQ ID NO: 589058 - DNA, 75 bp, synthetic construct
  source 1..75: mol_type = other DNA
acgctccccgaaaacagtgagtgtagattcaatctgtcaatgcaacacccctttcaattatctctttcggtgttt

SEQ ID NO: 589059 - DNA, 75 bp, synthetic construct
  source 1..75: mol_type = other DNA
gcgcacactatcaggaaatggttaacgccagactgagcgcacaaaatgatgcaaatgcgcgtactgctgcagaac

SEQ ID NO: 589060 - DNA, 75 bp, synthetic construct
  source 1..75: mol_type = other DNA
cgcaaatgaccctgacagcccataccactcactggacctaagcgatgacatcgaaatcgaagacgactacgaaga

SEQ ID NO: 589061 - DNA, 75 bp, synthetic construct
  source 1..75: mol_type = other DNA
tcagtgtcgtgataaccgcggggcgttcgctatcaataatgataaggaaaagccggagaccgtggagttcgtcag

SEQ ID NO: 589062 - DNA, 75 bp, synthetic construct
  source 1..75: mol_type = other DNA
gtcaattcaggatgcccagcactctgctaactgggcttcgcttaaagccgatgacgcgcaccatgccattatggt

SEQ ID NO: 589063 - DNA, 75 bp, synthetic construct
  source 1..75: mol_type = other DNA
catatgctttcacgtatgccatccagtgaattcagtgctgtgggggatgtgatttcactctccaccgaagaaatc

SEQ ID NO: 589064 - DNA, 75 bp, synthetic construct
  source 1..75: mol_type = other DNA
atctgcacagcgacgatcgcaccgacatcgcggcgatggcaaccatcagcaccatctcacagcccctgcgcggtg

SEQ ID NO: 589065 - DNA, 75 bp, synthetic construct
  source 1..75: mol_type = other DNA
attgagcaaatcggaatgacgccagatacgtaccgggaatttttcagagagcgtctgaactactggagaggggtg

SEQ ID NO: 589066 - DNA, 75 bp, synthetic construct
  source 1..75: mol_type = other DNA
tccggccctggctcctctgttaggaagctggctgctggtccatttttcctggcaggcgattttcgccaccctgtt

SEQ ID NO: 589067 - DNA, 75 bp, synthetic construct
  source 1..75: mol_type = other DNA
ggcctgggctatatgatgcaacgtcgcgaagaacctgactgtcagcctcatggcagcaccgaagctgctcataga

SEQ ID NO: 589068 - DNA, 75 bp, synthetic construct
  source 1..75: mol_type = other DNA
atgccctcggattcatcattgctgcattgctaaacgcgtattctgatttaccccatgatttgaaaattggtctac

SEQ ID NO: 589069 - DNA, 75 bp, synthetic construct
  source 1..75: mol_type = other DNA
tttaatgctggaattcatacggtaattaaagcgggagtctctgcggatacacaatctgatttcggcgcgggtgtc

SEQ ID NO: 589070 - DNA, 75 bp, synthetic construct
  source 1..75: mol_type = other DNA
gatgtgcagactgccgcccgatatcagagcatgattgacgccagacagacagccgctgccaatgcgcaacaggaa

SEQ ID NO: 589071 - DNA, 75 bp, synthetic construct
  source 1..75: mol_type = other DNA
ggtcgatttttagaaaggacaggaaatagcgcagccgcacaaaattatctgattgcgcatgattaccagacaacg

SEQ ID NO: 589072 - DNA, 75 bp, synthetic construct
  source 1..75: mol_type = other DNA
cgcccggcttaccacacaaccgcgccaaatggccccaggaataccagcttaaagagcactacgacatgcgagcgg

SEQ ID NO: 589073 - DNA, 75 bp, synthetic construct
  source 1..75: mol_type = other DNA
acccaatgcagacgactcaaatctttttgcgctggatgcgggtggcgctacaggcgttgggctgaaaatcaaaac

SEQ ID NO: 589074 - DNA, 75 bp, synthetic construct
  source 1..75: mol_type = other DNA
tgataaagcccacgccctttctcttagtctcagacagtatcgccggaagctggcaaaagccagggcgtatgttgt

SEQ ID NO: 589075 - DNA, 75 bp, synthetic construct
  source 1..75: mol_type = other DNA
taattaatacttataacgatctacttattacaaaaggcacactcgatcgcaacattgaagatatcaaggctggaa

SEQ ID NO: 589076 - DNA, 75 bp, synthetic construct
  source 1..75: mol_type = other DNA
gcgaatggcgccggataacggcagtgaagtgtggttaaaactggaaggcaataacccggcaggttcggtgaaaga

SEQ ID NO: 589077 - DNA, 75 bp, synthetic construct
  source 1..75: mol_type = other DNA
gcaatacgcctctggtgaagttgcagcgaatggggccgaataacggcagtgaagtgtggttaaaactggaaggca

SEQ ID NO: 589078 - DNA, 75 bp, synthetic construct
  source 1..75: mol_type = other DNA
tgctggttggcacctgcgggaatgatgcctgcgatgccattccggtaacggaaaaaatctggcccacagagcagg

SEQ ID NO: 589079 - DNA, 75 bp, synthetic construct
  source 1..75: mol_type = other DNA
catgtatgcaggtgcaggaacgcttacaaaaacgctatcccggtgaagttttttattgcgaagaggtattacgaa

SEQ ID NO: 589080 - DNA, 75 bp, synthetic construct
  source 1..75: mol_type = other DNA
aaaacataatgaaaatattcataataaaatacaaagaataaaagacgagttcaaggaatactcccgtgtagccat

SEQ ID NO: 589081 - DNA, 75 bp, synthetic construct
  source 1..75: mol_type = other DNA
atgaataatttcccgctacagatttttattgataccgacgccgctatgatgattcaggctttcactgatgtaggt

SEQ ID NO: 589082 - DNA, 75 bp, synthetic construct
  source 1..75: mol_type = other DNA
atgagagaattaaacttcccgctacagattttcgttgatagcgacaccgctctgatggtgcaaagcttcattgat

SEQ ID NO: 589083 - DNA, 75 bp, synthetic construct
  source 1..75: mol_type = other DNA
atgaacaattacccaatgcaaattatggttgatagcgacaccgctctgatggtgcaaagcttcattgatgcaggt

SEQ ID NO: 589084 - DNA, 75 bp, synthetic construct
  source 1..75: mol_type = other DNA
ggtttatgcgcgagcaatccagagcggtgacgattgttggcctgcagccggaagagggcagcagtattccgggga

SEQ ID NO: 589085 - DNA, 75 bp, synthetic construct
  source 1..75: mol_type = other DNA
gcaatacgccgctggtgaaattgcagcgaatggggccggataacggcagtgaagtgtggctaaaactggaaggca

SEQ ID NO: 589086 - DNA, 75 bp, synthetic construct
  source 1..75: mol_type = other DNA
ttattgataccgacactgctatgatgattcaggctttcagtgatgtaggtgtggcaattgactttgacaggctgt

SEQ ID NO: 589087 - DNA, 75 bp, synthetic construct
  source 1..75: mol_type = other DNA
tgataagttgcgtgataaagaatttaaaaactttgacgatttccggaagaaattctgggaagaagtgtcaaaaga

SEQ ID NO: 589088 - DNA, 75 bp, synthetic construct
  source 1..75: mol_type = other DNA
gttaccgaacgaaacgctggcgaagctggtcgggccgatgatcacttatctcctgccgctgctgatcggttatac

SEQ ID NO: 589089 - DNA, 75 bp, synthetic construct
  source 1..75: mol_type = other DNA
cggatattcgtggataacgggagtattgcctccacactggcgacgtcgctgtcattcgaaaagcgttacacgctc

SEQ ID NO: 589090 - DNA, 75 bp, synthetic construct
  source 1..75: mol_type = other DNA
aatgtcattgtgaccgactttaccggtgattttgacctgctcatcgtgccggtgctggcgtggctgcgggaaaat

SEQ ID NO: 589091 - DNA, 75 bp, synthetic construct
  source 1..75: mol_type = other DNA
gggcgctgactgatgccgtcacggtgctgaaaaccagtcccgagatgctgcggatattcgttgataacgggagta

SEQ ID NO: 589092 - DNA, 75 bp, synthetic construct
  source 1..75: mol_type = other DNA
acagctttgacgattctaacgccaacctgtttaagctcggcgcggagaacatcttcctcggtcgcaaagcggcaa

SEQ ID NO: 589093 - DNA, 75 bp, synthetic construct
  source 1..75: mol_type = other DNA
agacgatattgaagcggctgcgcgtcgtgttcaggagatgaaagctgaatcaaaaggcgctactccactgtctgc

SEQ ID NO: 589094 - DNA, 75 bp, synthetic construct
  source 1..75: mol_type = other DNA
gagaacatcccggagccgccaccgccggagccagtgacgcgccctgtcgagatgtggagtaatggcgaactggtg

SEQ ID NO: 589095 - DNA, 75 bp, synthetic construct
  source 1..75: mol_type = other DNA
atgcagtttgactggagtgccatctggccagccattccgcttctgattgaaggtgccaaaatgaccctgtggatc

SEQ ID NO: 589096 - DNA, 75 bp, synthetic construct
  source 1..75: mol_type = other DNA
gtctgtgatatcagcctgaacctgcaactgacggagcgtgtgctggtcagcactgacggtagtgtgtcgagtgtt

SEQ ID NO: 589097 - DNA, 75 bp, synthetic construct
  source 1..75: mol_type = other DNA
tggttgccactggggccagctccatgtcatgggagtaccgctacaccctgaacgtggtaattgaagatttcagcg

SEQ ID NO: 589098 - DNA, 75 bp, synthetic construct
  source 1..75: mol_type = other DNA
aacgtggtgattgaggatttcagcggcgaccagaatctgctgatggccccggttttgctgtggctgcgtgataac

SEQ ID NO: 589099 - DNA, 75 bp, synthetic construct
  source 1..75: mol_type = other DNA
cacgctcaatgtcattgtgaccgactttaccggtgattttgacctgctcatcgtgccggtgctggcgtggctgcg

SEQ ID NO: 589100 - DNA, 75 bp, synthetic construct
  source 1..75: mol_type = other DNA
attgaaactggcgacccgcattttatgtttcctgttaccgactcaaacatgaagcgtcttattatcgaacagaca

SEQ ID NO: 589101 - DNA, 75 bp, synthetic construct
  source 1..75: mol_type = other DNA
atgaaagggctgaatctgccggtgaaaaagaaaaacggcctgcgggtgacgcctgctgatcagatagacattatc

SEQ ID NO: 589102 - DNA, 75 bp, synthetic construct
  source 1..75: mol_type = other DNA
ctgcgcgcacgttgggccgtccggtagatatcgcctccttggcgtcatgcggaacaagcttccggcccactgttt

SEQ ID NO: 589103 - DNA, 75 bp, synthetic construct
  source 1..75: mol_type = other DNA
atcaccggagcactggcgggaacggcaaataaaaccctgctggcatgggcgaagaaacatcagattgcggccgta

SEQ ID NO: 589104 - DNA, 75 bp, synthetic construct
  source 1..75: mol_type = other DNA
ctactcgggtttgggtttcgagcgagtgccgcaggagcgagacatcagttgcgctcgtatgtatctaacgccagc

SEQ ID NO: 589105 - DNA, 75 bp, synthetic construct
  source 1..75: mol_type = other DNA
aaattcagccgaattttgccaataccggcaaatgctatctcgttggtctggctgtgaccgatgacccggcaagcc

SEQ ID NO: 589106 - DNA, 75 bp, synthetic construct
  source 1..75: mol_type = other DNA
ttcgtatcggcgtcgagggtgatacctgcgacgggcgcattatcagcgccagtgatattcaggaaatggccgaca

SEQ ID NO: 589107 - DNA, 75 bp, synthetic construct
  source 1..75: mol_type = other DNA
aaactccttcatgatgattcataaaccatttggctttacgggcggtgatgcggaggacatgcgcacctatgccga

SEQ ID NO: 589108 - DNA, 75 bp, synthetic construct
  source 1..75: mol_type = other DNA
gcgcggctatgcggaaggggggtatgtgggtggtgccggaagtccggcgcagatgcggcgggcggaaggtattaa

SEQ ID NO: 589109 - DNA, 75 bp, synthetic construct
  source 1..75: mol_type = other DNA
cggtgtatgacatggcccgcaagggggcgcaggatgaactccggctgcagttgcgtgatggcggtatgttatcag

SEQ ID NO: 589110 - DNA, 75 bp, synthetic construct
  source 1..75: mol_type = other DNA
gcgtgcaacaggcgtcagcaaaggtccggggcagcagtaagccgtcaggagcgcagcgtcggctgaagagctgac

SEQ ID NO: 589111 - DNA, 75 bp, synthetic construct
  source 1..75: mol_type = other DNA
gcgtgcaacaggcgtcagcaaaggtccggggcagcagtaagccgtcaggatcgctgcgtcggctgaagagctgac

SEQ ID NO: 589112 - DNA, 75 bp, synthetic construct
  source 1..75: mol_type = other DNA
gcgtgcaacaggcgtcagcaaaggtccggggcagcagtaagccgtcaggaacgcggcgtcggctgaagagctgac

SEQ ID NO: 589113 - DNA, 75 bp, synthetic construct
  source 1..75: mol_type = other DNA
tattctgatttaccccatgatttgaaaattggtctacgttccttatcaaattcagcagcaatctactcgggtttg

SEQ ID NO: 589114 - DNA, 75 bp, synthetic construct
  source 1..75: mol_type = other DNA
aacaaatacagtatttccccagagcaatttttgaaaggtgctgtgacaatcctgtacagcgataatattttggtt

SEQ ID NO: 589115 - DNA, 75 bp, synthetic construct
  source 1..75: mol_type = other DNA
tgtgggcgatgtcagtgatttttgtcatctgcgtaggcgtagtgatgtgggcagaagttcagggtaatcctcatc

SEQ ID NO: 589116 - DNA, 75 bp, synthetic construct
  source 1..75: mol_type = other DNA
accgtgttgctggttggcgcactgacctttatccctgccctggcgcttggtccggtggcggaatatctctcctga

SEQ ID NO: 589117 - DNA, 75 bp, synthetic construct
  source 1..75: mol_type = other DNA
gtggagtttaacgagcctcgaatgatgttaccaattacagacagtaatatgaaaagattggttattgagcaaacg

SEQ ID NO: 589118 - DNA, 75 bp, synthetic construct
  source 1..75: mol_type = other DNA
aacaaatacagtatttccccagagcaatttttgaaaggtgctgtgacaatcctgtacgctgacaatattttggtt

SEQ ID NO: 589119 - DNA, 75 bp, synthetic construct
  source 1..75: mol_type = other DNA
atgaacaacttcccattacaaattttcgttgataacgacaccgctctgatgattcaggctttcactgattccggt

SEQ ID NO: 589120 - DNA, 75 bp, synthetic construct
  source 1..75: mol_type = other DNA
ccgctgtcgctgaacatgtgcaggaaaaactgagcgccactgagcagcgcctcgctgagataggaaactgtcctt

SEQ ID NO: 589121 - DNA, 75 bp, synthetic construct
  source 1..75: mol_type = other DNA
ataaaaccgaaagcaccgcgcagccacgccgcaagctctctaccggtggcggtggcgatgagctgctgaccgact

SEQ ID NO: 589122 - DNA, 75 bp, synthetic construct
  source 1..75: mol_type = other DNA
ttcgtccaccgacaaaccagtaaaattaaaatttcatcaatacgcacgcgctacattactgtcaaatcgtggaag

SEQ ID NO: 589123 - DNA, 75 bp, synthetic construct
  source 1..75: mol_type = other DNA
atggctgcgcaagggttcttactgatcgccacgtttttactggtgttcatggtgctggcacgtcctttaggcagc

SEQ ID NO: 589124 - DNA, 75 bp, synthetic construct
  source 1..75: mol_type = other DNA
ttgccacgtttttactggtgttaatggtgctggcgcgccctttgggcagtgggctggcgcggctgattaatgata

SEQ ID NO: 589125 - DNA, 75 bp, synthetic construct
  source 1..75: mol_type = other DNA
tatcaggcggtgaataccgttgaaggagcgaaacagctgttaccaatgggtccggtggcttctcaggaagcgatc

SEQ ID NO: 589126 - DNA, 75 bp, synthetic construct
  source 1..75: mol_type = other DNA
ggctttatttattggtagagataataaagtgctctttttcgagaatgtcaatgacgctattaaaacttattcaaa

SEQ ID NO: 589127 - DNA, 75 bp, synthetic construct
  source 1..75: mol_type = other DNA
aatcttataaaacccccaaaggcagacattacgtatttagagatttgaatatagaattgccttcaggaaagagta

SEQ ID NO: 589128 - DNA, 75 bp, synthetic construct
  source 1..75: mol_type = other DNA
gcggttatacgcgaagcaagaagaactgaaagagaaaattgagtttgttgaagaatttgccgaactcggcaagta

SEQ ID NO: 589129 - DNA, 75 bp, synthetic construct
  source 1..75: mol_type = other DNA
cttggtattcttgcgaacgcgtattcaattatccatacttgggggcttactcacgtaatttacgaagaaccgctc

SEQ ID NO: 589130 - DNA, 75 bp, synthetic construct
  source 1..75: mol_type = other DNA
caagcgtcgcatcaggcattgtgcgccaactgccggatgcggcgtgaacgccttatccggcctacggttcggcac

SEQ ID NO: 589131 - DNA, 75 bp, synthetic construct
  source 1..75: mol_type = other DNA
aggttagtctgaaagcggtatatggcattaataaaaccttgcccgttgagtataaaaacgcaacagtgattacgt

SEQ ID NO: 589132 - DNA, 75 bp, synthetic construct
  source 1..75: mol_type = other DNA
atgattaagattgaaaatttgacgaagtcatatcgcacgccagtgggtcgacattatgtctttaaggatttaaat

SEQ ID NO: 589133 - DNA, 75 bp, synthetic construct
  source 1..75: mol_type = other DNA
gataacgcggttagttttcatgaggatgttcaggaggggatagaggagtatcgtgtaaaacaaacctgcaaatag

SEQ ID NO: 589134 - DNA, 75 bp, synthetic construct
  source 1..75: mol_type = other DNA
atgattaagattgagaatttgacgaagtcatatcgcacgccaacgggtcgacattatgtctttaaggatttaaac

SEQ ID NO: 589135 - DNA, 75 bp, synthetic construct
  source 1..75: mol_type = other DNA
atgattaagattgaaaatttgacgaagtcatatcgcacgccagcgggtcgacattatgtctttaaggatttaaac

SEQ ID NO: 589136 - DNA, 75 bp, synthetic construct
  source 1..75: mol_type = other DNA
tttctaatggtgtcgcatagtttgaactcattaaaagcatactgtgatatcgcactgtatgttggaaggaataat

SEQ ID NO: 589137 - DNA, 75 bp, synthetic construct
  source 1..75: mol_type = other DNA
agttgatctcagtgccaactaccatgaagggcaatacacctcagcagggatctctttacagggcggggcaacgtt

SEQ ID NO: 589138 - DNA, 75 bp, synthetic construct
  source 1..75: mol_type = other DNA
caagtttatcgacgaacgtgaagatattgctgcgtacatccgtggtctgccagtaaatgaagcattaaacgaaaa

SEQ ID NO: 589139 - DNA, 75 bp, synthetic construct
  source 1..75: mol_type = other DNA
ttttcatcttaggctccatccttgtcaccagtagtattttacttagttcattttcttcccgccttggcattccga

SEQ ID NO: 589140 - DNA, 75 bp, synthetic construct
  source 1..75: mol_type = other DNA
agcagttgttaggcgcggcaccggttgtcggtgaccaggtagagtttgccggaatgatctggacggtggccgaga

SEQ ID NO: 589141 - DNA, 75 bp, synthetic construct
  source 1..75: mol_type = other DNA
ggtggttccgccagtgggacgtccggtgtcacgcgttggcctggatattcatccggaaaatccgtgggagcagtt

SEQ ID NO: 589142 - DNA, 75 bp, synthetic construct
  source 1..75: mol_type = other DNA
agggctgtatcgtcacggggagaaattgccgtcggtgcgcagcttaagtcaggagcacggcgtcagcatcagtac

SEQ ID NO: 589143 - DNA, 75 bp, synthetic construct
  source 1..75: mol_type = other DNA
gtaatacaactcatacagccagcaattgacgtattaaaaaatcaggcgacattaaccaggcttggtaaacaatat

SEQ ID NO: 589144 - DNA, 75 bp, synthetic construct
  source 1..75: mol_type = other DNA
gcagcaatgatccgatggcggtctttctgacaattaccttgattgcgatgatccagcagcatgaaagcactatta

SEQ ID NO: 589145 - DNA, 75 bp, synthetic construct
  source 1..75: mol_type = other DNA
ctggcaccatcaccattgctacctgtttaaagtccccgccacgcgaacagatttttggctggagaagataggtaa

SEQ ID NO: 589146 - DNA, 75 bp, synthetic construct
  source 1..75: mol_type = other DNA
ccatcgcattagcgagttcgacctgtactaccaggatgtgcaaaagcgcatcaaggatcagcagtatcccaacag

SEQ ID NO: 589147 - DNA, 75 bp, synthetic construct
  source 1..75: mol_type = other DNA
aaggatgtacaacagattcaggaagacttgccgcaagagaaagaagataaccagcaagaccccgatggcaagaag

SEQ ID NO: 589148 - DNA, 75 bp, synthetic construct
  source 1..75: mol_type = other DNA
gcaacaatttggtctgggcattgtaataggtcttggcggcggttatttactactgcaaatgatcaaccgcatcgc

SEQ ID NO: 589149 - DNA, 75 bp, synthetic construct
  source 1..75: mol_type = other DNA
tttttgctttaaccacggcgctggaaggcagcggtattctggctgtttatctgtgcggttttctgctgggtaatc

SEQ ID NO: 589150 - DNA, 75 bp, synthetic construct
  source 1..75: mol_type = other DNA
cgtctggaagagtggatctgcggcgaaggtgccagcgcgcagatcgacacgcaggggatacatttactcgcttga

SEQ ID NO: 589151 - DNA, 75 bp, synthetic construct
  source 1..75: mol_type = other DNA
tttttaatggtttctcatagtttaaattctttgaaagagtattgcgatgtggttatatatattaaaagttttaat

SEQ ID NO: 589152 - DNA, 75 bp, synthetic construct
  source 1..75: mol_type = other DNA
catcggcagcaagccagacagcagctaaagcaagtgaagacgcagccagagagtatgcaagtcaggcagcagagc

SEQ ID NO: 589153 - DNA, 75 bp, synthetic construct
  source 1..75: mol_type = other DNA
aatggtaaaatatttggagttacagcaacatcgtaccggtttggtgggcagaccgcagcaggaacgcgtcatttg

SEQ ID NO: 589154 - DNA, 75 bp, synthetic construct
  source 1..75: mol_type = other DNA
atgtttgtctcatcacctgtcgaactgctggtgatgcgggtgctcatcggcattgttatcggcgcggattatccc

SEQ ID NO: 589155 - DNA, 75 bp, synthetic construct
  source 1..75: mol_type = other DNA
ccggtggaaatcaaaccggtgattcaggaacagacgcaacaggtcacgcccggtgcagcgccaattgctatctcc

SEQ ID NO: 589156 - DNA, 75 bp, synthetic construct
  source 1..75: mol_type = other DNA
cgctgcaaggcggagccacgttaacggctcacggtggcgcgttgcatcgtactcaaaacatgggcggtacgcgcc

SEQ ID NO: 589157 - DNA, 75 bp, synthetic construct
  source 1..75: mol_type = other DNA
ccatgtgtcgctggtcgaaatcctgatcccattctgtgtgatggcgattgccaatggcgcgatctacccgattgt

SEQ ID NO: 589158 - DNA, 75 bp, synthetic construct
  source 1..75: mol_type = other DNA
ttgacgaaccgcgatttgagcgcgatggcttattgattgaaggacagaggacaaattatctgaggaactcaaata

SEQ ID NO: 589159 - DNA, 75 bp, synthetic construct
  source 1..75: mol_type = other DNA
gagtatcaggcaaaattccctggcgatccactctcagtattaagagagatattaattcatgttcttgaatccacg

SEQ ID NO: 589160 - DNA, 75 bp, synthetic construct
  source 1..75: mol_type = other DNA
atccaatattggtgaactagagcttgagtatcaggcaaaattccctggcgatcgatccactctcagtattaagag

SEQ ID NO: 589161 - DNA, 75 bp, synthetic construct
  source 1..75: mol_type = other DNA
atatgacgatccgcgggcagagaatgggattatttgttcagatttctctcttttctgaatcaatattattgacta

SEQ ID NO: 589162 - DNA, 75 bp, synthetic construct
  source 1..75: mol_type = other DNA
ttgcgcaaagggcgagtgaaagagtgcgaagagatgatgatcaaattgtttggcgaaccggtggttttcgatgaa

SEQ ID NO: 589163 - DNA, 75 bp, synthetic construct
  source 1..75: mol_type = other DNA
gcgttgggttacatgatgcaacgttgtgaagaagttggctgccagaatcatggcaatgccgaagtcgctcatagc

SEQ ID NO: 589164 - DNA, 75 bp, synthetic construct
  source 1..75: mol_type = other DNA
aaaaggcgcggtggggcctgccactccgctggaaatcaaaccggtgattcaggaacagacgcagcagctcactcc

SEQ ID NO: 589165 - DNA, 75 bp, synthetic construct
  source 1..75: mol_type = other DNA
atggaggcagtgtgggttgccggatgcagcagttatgaaacaagcggcgtaatacatctgttaaagggctgtggt

SEQ ID NO: 589166 - DNA, 75 bp, synthetic construct
  source 1..75: mol_type = other DNA
ggcggcagccgtattctggtcgataccggcggcgtcgctgatgtccccatcggcggctacaactctccggtctac

SEQ ID NO: 589167 - DNA, 75 bp, synthetic construct
  source 1..75: mol_type = other DNA
accgtaacgcagcaaggtcgcgttatttatgagtcacaggttcctgctggcccgttccatattcaggatatcaac

SEQ ID NO: 589168 - DNA, 75 bp, synthetic construct
  source 1..75: mol_type = other DNA
gtggttagttttcatgaggatgttcaggaagggatagaagagtataaaaaattaaaatattatatattggacgat

SEQ ID NO: 589169 - DNA, 75 bp, synthetic construct
  source 1..75: mol_type = other DNA
ggccattgtgtttaaagatgataatgcagttagttttcatgaggatgttcaggaggggatagaggagtataaaaa

SEQ ID NO: 589170 - DNA, 75 bp, synthetic construct
  source 1..75: mol_type = other DNA
atgattaagattgagaatttgacgaagtcatatcgcacgccaacggggcgacactatgtgtttaaggatttaaac

SEQ ID NO: 589171 - DNA, 75 bp, synthetic construct
  source 1..75: mol_type = other DNA
aagaacagaagtatccagatttcgccaagagactaaacgagttaatgacaaacaagggaatttctgtcacccaac

SEQ ID NO: 589172 - DNA, 75 bp, synthetic construct
  source 1..75: mol_type = other DNA
tgacaacagcgcagacaaaggcgtctatatctccttaagtatgccgtggagtgatagcagcgttgtgagttacaa

SEQ ID NO: 589173 - DNA, 75 bp, synthetic construct
  source 1..75: mol_type = other DNA
tgacgacagtgctgacaaaggcgtctacatctccttaagtatgccgtggggcgatagcagcgttgtgagttacaa

SEQ ID NO: 589174 - DNA, 75 bp, synthetic construct
  source 1..75: mol_type = other DNA
gccatgacggctcgctggcgaaagtcgacttaagcgctaactaccatgaaggcgagtatcagtcagcggggctct

SEQ ID NO: 589175 - DNA, 75 bp, synthetic construct
  source 1..75: mol_type = other DNA
cggtaactatggcagtgggtcagacagcagtcaggtggggtatttcagccgcgttgatgatgcaacgcattatca

SEQ ID NO: 589176 - DNA, 75 bp, synthetic construct
  source 1..75: mol_type = other DNA
gggagcatccgcaatatgagcgtttccctgaccggataccgttacgaatatgacaatagtgccgataaaggcatc

SEQ ID NO: 589177 - DNA, 75 bp, synthetic construct
  source 1..75: mol_type = other DNA
tggtggacaaggctatcagccaggcggtcggtttttagtggcttttaaccgccgtgggtatttctcgacaaaatc

SEQ ID NO: 589178 - DNA, 75 bp, synthetic construct
  source 1..75: mol_type = other DNA
ggtgaaaacatctatttcacatattgcggaggaatgacgttgtcgaacagaatatacctagatgttaaaagtgga

SEQ ID NO: 589179 - DNA, 75 bp, synthetic construct
  source 1..75: mol_type = other DNA
aactgtacgtccggcaccctttttccttttttcacatagccaggtttccggcaatcagagggggagggtacgcca

SEQ ID NO: 589180 - DNA, 75 bp, synthetic construct
  source 1..75: mol_type = other DNA
caaaacaaaggcgaccacggaagggtcgccaatggagataaaggaaatcaagcgcatcaccaactatgccatgag

SEQ ID NO: 589181 - DNA, 75 bp, synthetic construct
  source 1..75: mol_type = other DNA
cagcattgcaatattcaccgttaccgctgccactgagcgcgaagcacgtgcacagctgccgcacgcacatctgat

SEQ ID NO: 589182 - DNA, 75 bp, synthetic construct
  source 1..75: mol_type = other DNA
aaattgcgcagtgctctcgcctgtttcttttacttgctccatagcctcaacaacttcatgcggggcgcgagcctg

SEQ ID NO: 589183 - DNA, 75 bp, synthetic construct
  source 1..75: mol_type = other DNA
ccgccgatgacatcatcatcaccagcggctgccataactcgatgtcgctggcgttaatggcggtgtgtaaaccgg

SEQ ID NO: 589184 - DNA, 75 bp, synthetic construct
  source 1..75: mol_type = other DNA
tctgcgcatcaactgcgctttgccgctcagcgaaacctatcgcgaagcactaaagcaaattggcgatgccgtgta

SEQ ID NO: 589185 - DNA, 75 bp, synthetic construct
  source 1..75: mol_type = other DNA
gggaccctccctcacgctgggacgatggtatttctgggctgattgccgactacagcctcaatgcgcaaactcgcc

SEQ ID NO: 589186 - DNA, 75 bp, synthetic construct
  source 1..75: mol_type = other DNA
ggagtgggatattgcgcctggtgatcagatcctcgtcagccttgccggtcagggtattcctcgcattgatgatgt

SEQ ID NO: 589187 - DNA, 75 bp, synthetic construct
  source 1..75: mol_type = other DNA
atattggttccgtcaggcgctggcaggagtgggatattgcgcctggtgatcagatcctcgtcagccttgccggtc

SEQ ID NO: 589188 - DNA, 75 bp, synthetic construct
  source 1..75: mol_type = other DNA
acgcatcaactgcgctttgccgctcagcgaaacctatcgcgaagcactaaagcaaattggcgaggccgtgtatcg

SEQ ID NO: 589189 - DNA, 75 bp, synthetic construct
  source 1..75: mol_type = other DNA
tgaacaatatcctgacttgaagtgtttagatcgtgatatttcttcacgaatcaaacaagttgtagagtcttttat

SEQ ID NO: 589190 - DNA, 75 bp, synthetic construct
  source 1..75: mol_type = other DNA
tgtcatgagcaacaccacccgcgcagagcgtctggacgatggttcttatcggctggtggggcataaatggttttt

SEQ ID NO: 589191 - DNA, 75 bp, synthetic construct
  source 1..75: mol_type = other DNA
ttcagcttgaagggcaaacggcgttgctgtttcgtcttgcgcgagcgtgggaccggcgtgccgatgccaaagaag

SEQ ID NO: 589192 - DNA, 75 bp, synthetic construct
  source 1..75: mol_type = other DNA
ctcggtgccacaaagcgacgcgcatctggtgctggcgcagaccacgggcggtttgtcctgcttttttgtgccgag

SEQ ID NO: 589193 - DNA, 75 bp, synthetic construct
  source 1..75: mol_type = other DNA
atataaaaacagtattaatggaggcgtcatgaactacgagattaagcaggaagataaacgtaccgttgcaggttt

SEQ ID NO: 589194 - DNA, 75 bp, synthetic construct
  source 1..75: mol_type = other DNA
gtggtgatgctaggtggtatcgtggcagagcgcgaccgggcacatctgaccatcccttttgtaatggatatgctg

SEQ ID NO: 589195 - DNA, 75 bp, synthetic construct
  source 1..75: mol_type = other DNA
agaagccactgatattgattaataactatattggcgatccaaaactcgacactttatttaatcaattaaccgccg

SEQ ID NO: 589196 - DNA, 75 bp, synthetic construct
  source 1..75: mol_type = other DNA
cgacgattttcttgatgaacttgaacagtttattttgcaacaggtgtctgatgtggatatttctggcctggccgt

SEQ ID NO: 589197 - DNA, 75 bp, synthetic construct
  source 1..75: mol_type = other DNA
accacacgatatttacagccagacatgttattgaagacatgaagagtatcaggatacttagagctggtggtgagg

SEQ ID NO: 589198 - DNA, 75 bp, synthetic construct
  source 1..75: mol_type = other DNA
tcaaacaagttgtagagtcttttatgaagaaattctgtaaaatcgatgatatggaaccatcaacggcacagaata

SEQ ID NO: 589199 - DNA, 75 bp, synthetic construct
  source 1..75: mol_type = other DNA
ttattccggtatcacctggcattattggcggatatgaaacgggcattgtcagcgcacgcgcactgcataaagcgc

SEQ ID NO: 589200 - DNA, 75 bp, synthetic construct
  source 1..75: mol_type = other DNA
atgaacgaccagcaaatcgaaaaagaaatcgttgagaaaggcaaaacggcaccgcgtgtaacacccgagaaaatt

SEQ ID NO: 589201 - DNA, 75 bp, synthetic construct
  source 1..75: mol_type = other DNA
atctcgccagcaaacagctcttgagtacatcattaccgtgaacatggcgaaagaactggcgatggtcgaacgcac

SEQ ID NO: 589202 - DNA, 75 bp, synthetic construct
  source 1..75: mol_type = other DNA
gatggctggtcgctctacggtggcgcgctggcagatgaacactaccagtcggcggcgatgggggtggggcgcgac

SEQ ID NO: 589203 - DNA, 75 bp, synthetic construct
  source 1..75: mol_type = other DNA
tttataaaaaaattggaggaatgaaatctgaactttttgtggattatattgatgttgaatggtctcttagagcaa

SEQ ID NO: 589204 - DNA, 75 bp, synthetic construct
  source 1..75: mol_type = other DNA
ataacccagatattgagtgcctcaggcagcaacttttatcagtacgcaagcaggttgatttatgtgtaattgttg

SEQ ID NO: 589205 - DNA, 75 bp, synthetic construct
  source 1..75: mol_type = other DNA
gtttatggattatctgtcaccgctgaaacaacaacgtattcgtcagaaagttgaaaaactggatcgtctgaaagc

SEQ ID NO: 589206 - DNA, 75 bp, synthetic construct
  source 1..75: mol_type = other DNA
gtgacgcggatatagaaaacagcacaacacatcttaccgggcaatcagtcggggacgcgcttattcgttacgccg

SEQ ID NO: 589207 - DNA, 75 bp, synthetic construct
  source 1..75: mol_type = other DNA
ttgagattccgggtgttgcgactaccgcatcaccaagctctgaagtcggtcgcttctttgaaacccagtcatcaa

SEQ ID NO: 589208 - DNA, 75 bp, synthetic construct
  source 1..75: mol_type = other DNA
gatgccaggaaacgcgtagtacaaagcccggatgtgatcccggctgattccgaagccggacgtgcggcactggct

SEQ ID NO: 589209 - DNA, 75 bp, synthetic construct
  source 1..75: mol_type = other DNA
gggaatattttccctgcgaaatctgtattacgcgcccgaaaggcggatttttactgtggatcgaattgcctgaac

SEQ ID NO: 589210 - DNA, 75 bp, synthetic construct
  source 1..75: mol_type = other DNA
ctttaatgtgccgtccacgcaaatggcggcggcaacgtttgtgctggaaggtcactatcatcgccatatccggcg

SEQ ID NO: 589211 - DNA, 75 bp, synthetic construct
  source 1..75: mol_type = other DNA
gatgcggcagatctatcagcgcaatttggcgctttatacctgctggatacgggaatattttccctgcgaaatctg

SEQ ID NO: 589212 - DNA, 75 bp, synthetic construct
  source 1..75: mol_type = other DNA
gctttgccgctcagcgaaacctatcgcgaagcactgaagcaaattggcgaggccgtgtatcaggcaatggaatga

SEQ ID NO: 589213 - DNA, 75 bp, synthetic construct
  source 1..75: mol_type = other DNA
acgcgtctgcaaacgctcaacgacgagcgagaaatgcaggctgaacgcgtggaagcaacgcgcttcacccagcgc

SEQ ID NO: 589214 - DNA, 75 bp, synthetic construct
  source 1..75: mol_type = other DNA
agccgcgttcgggttattttgtcgcacaacgtaaagcccagccgccagtaccgccaatgacgcgtccggtgcagc

SEQ ID NO: 589215 - DNA, 75 bp, synthetic construct
  source 1..75: mol_type = other DNA
accggggccattggtattgacagccaggagcgtctgactgaagaactggtccgcgtcgagggtgagcgcagccgg

SEQ ID NO: 589216 - DNA, 75 bp, synthetic construct
  source 1..75: mol_type = other DNA
tgataaaaagctgcgccccctgaacgtaaatatttcacaggaggcatatgacaaactgagaaaattatccataaa

SEQ ID NO: 589217 - DNA, 75 bp, synthetic construct
  source 1..75: mol_type = other DNA
gttttgcatggacagtattctgggttatttttcttttacattattttccaaaagttttctttattctcgatcgtc

SEQ ID NO: 589218 - DNA, 75 bp, synthetic construct
  source 1..75: mol_type = other DNA
tccgcaggttaataataaaaatagtgtgtcggcaaaaattagcgttgcagaattaactggcgctgaatttatgct

SEQ ID NO: 589219 - DNA, 75 bp, synthetic construct
  source 1..75: mol_type = other DNA
tgacagcgcatacggcaaaggaaaactggacggcaactcctttcgcgtgagctatgccaaagactttgacgaact

SEQ ID NO: 589220 - DNA, 75 bp, synthetic construct
  source 1..75: mol_type = other DNA
agagatgaagaatgagctgcgttatcttcgcgcagaaaatgcatatctgaaagccatgcaggagcatctcctgga

SEQ ID NO: 589221 - DNA, 75 bp, synthetic construct
  source 1..75: mol_type = other DNA
aagtttaaaagcgcctgggctacccaaaaaaacagaataaaaaatagggttgataaaaagctgggtgatgctgcc

SEQ ID NO: 589222 - DNA, 75 bp, synthetic construct
  source 1..75: mol_type = other DNA
aaattcgttacggaaacgcttaaattaaccattcccgaagagaaattagcggttctgaaaacacaggaaagtttg

SEQ ID NO: 589223 - DNA, 75 bp, synthetic construct
  source 1..75: mol_type = other DNA
gtgagcatatcacctctgttcaggtggccaaattcagtaaaccacttcaactgggcggcgcaaattctcggcctg

SEQ ID NO: 589224 - DNA, 75 bp, synthetic construct
  source 1..75: mol_type = other DNA
atccgcatatgacggtctacgacaacatggcgtttggcctgaagatgcaaaaaatcgccaaagaggtgattgatg

SEQ ID NO: 589225 - DNA, 75 bp, synthetic construct
  source 1..75: mol_type = other DNA
atggcgacgcggattgtgattatgaaggatgggattgttcagcaggtcggtgcgccgaaaacggtttataaccaa

SEQ ID NO: 589226 - DNA, 75 bp, synthetic construct
  source 1..75: mol_type = other DNA
aaattcgttacggaaacgcttaaattaaccattcccgaagagaaattagcggttctgaaaaacaggaaagtttgc

SEQ ID NO: 589227 - DNA, 75 bp, synthetic construct
  source 1..75: mol_type = other DNA
gatttattggatcaccagcgatgaattttattcgcggcacgatcgatggcgataaattcgttacggaaacgctta

SEQ ID NO: 589228 - DNA, 75 bp, synthetic construct
  source 1..75: mol_type = other DNA
aagaatatcccggaacctccgccgccggagccggtcactcgcccgatggagctttatatcaatggcgaactggtg

SEQ ID NO: 589229 - DNA, 75 bp, synthetic construct
  source 1..75: mol_type = other DNA
aggcacttcttcgggggattattcgtccgccacgggcgcgttttgatttttatcaggcgcgatcagcctggtcac

SEQ ID NO: 589230 - DNA, 75 bp, synthetic construct
  source 1..75: mol_type = other DNA
agcgatggaagccaacgtatcacgacggcaaaactggccgcctctgtcggcgtttccgaagcggcactgtatcgc

SEQ ID NO: 589231 - DNA, 75 bp, synthetic construct
  source 1..75: mol_type = other DNA
gcgctgatgggcgaggattatcaggacattttccgccagcaggtcagggaatctgcagagcggcaaaaagccgga

SEQ ID NO: 589232 - DNA, 75 bp, synthetic construct
  source 1..75: mol_type = other DNA
gaagggaaacgcacgttcacggaatttatccgtgaaggtgtgggcgttcatgcgtttaacggcgaaatctttgtg

SEQ ID NO: 589233 - DNA, 75 bp, synthetic construct
  source 1..75: mol_type = other DNA
tgctgtggaaattcataaagaccatatcgtcgggcatatgtttcgtctgagttatcgccccaactggcgctggct

SEQ ID NO: 589234 - DNA, 75 bp, synthetic construct
  source 1..75: mol_type = other DNA
gttcagaacgatgactggcctggctacggtgtcagtaactggacacggattgcggcgacgctgccctccgggcgg

SEQ ID NO: 589235 - DNA, 75 bp, synthetic construct
  source 1..75: mol_type = other DNA
cgcagctgtttcgtacgcgttttaaagccgtgagtccgaaacgggtggacacgccaggatacggtttggggaacc

SEQ ID NO: 589236 - DNA, 75 bp, synthetic construct
  source 1..75: mol_type = other DNA
attgacgggctcaaggaggtccaggaatcggtgatgcgtattgattccggactgagcacgtatgagaaagagctg

SEQ ID NO: 589237 - DNA, 75 bp, synthetic construct
  source 1..75: mol_type = other DNA
aaaattccgcaccttttccccggtgatgatctgaaactgcagaccgcgcaggattcagacaatggattttcggcg

SEQ ID NO: 589238 - DNA, 75 bp, synthetic construct
  source 1..75: mol_type = other DNA
ctggttggggatgcgggagaccgcgacaaaaagttttgtcgatgaggtggaggcggcctggtcagaatacgcaga

SEQ ID NO: 589239 - DNA, 75 bp, synthetic construct
  source 1..75: mol_type = other DNA
atgggcagcctttacggcaaggcatgggatattctggtggtggttccgggttcggtgggcaaatggcagaatggc

SEQ ID NO: 589240 - DNA, 75 bp, synthetic construct
  source 1..75: mol_type = other DNA
cgccccatctggataaaggacacgtttcagcagcagatccgacagacaacgggagaaaaaggcgatgcgtcgtaa

SEQ ID NO: 589241 - DNA, 75 bp, synthetic construct
  source 1..75: mol_type = other DNA
ggctaatgcggttgccctgcataaggatcacattgtcgggcatatgtttctgatcagctaccgtccgaactggcg

SEQ ID NO: 589242 - DNA, 75 bp, synthetic construct
  source 1..75: mol_type = other DNA
taacgatctcggcgagccggagtggttattttcgcgcgcactgggtgttgatatcccactgacatcacttcatat

SEQ ID NO: 589243 - DNA, 75 bp, synthetic construct
  source 1..75: mol_type = other DNA
taacgatctcggcgagccggagtggatattttcgcgcgcgctgggtgtcgatatcccgctgacggtaatgactcc

SEQ ID NO: 589244 - DNA, 75 bp, synthetic construct
  source 1..75: mol_type = other DNA
gctacggaatcatccggcagacattacggtttatatcgatggtgttgcggcttcaatggcttcggttgtcgcaat

SEQ ID NO: 589245 - DNA, 75 bp, synthetic construct
  source 1..75: mol_type = other DNA
ccagcataaaggcaacgtcgcgccggttgttcctgatgacataaagcctgtcattcaggagcagacgcaacaggt

SEQ ID NO: 589246 - DNA, 75 bp, synthetic construct
  source 1..75: mol_type = other DNA
ggataaagacaccgcttatggcaaaggttcgctggacggtaactccttccgtgtgagttattccaaagactttga

SEQ ID NO: 589247 - DNA, 75 bp, synthetic construct
  source 1..75: mol_type = other DNA
ttgccgatgttccggtggaaggtaacggggctgctgtttataccaatatgtttggtaaagccgtcgtttctgacg

SEQ ID NO: 589248 - DNA, 75 bp, synthetic construct
  source 1..75: mol_type = other DNA
tgatcagctaccgtccgaactggcgctggctggggatgcgggagactgcggcaaaaagttttgtcgatgaggtgg

SEQ ID NO: 589249 - DNA, 75 bp, synthetic construct
  source 1..75: mol_type = other DNA
atgaaacgaacgcctgtcctgattgatgtgaacggcgttccgcttcgtgagagcctcagctacaacgggggcggt

SEQ ID NO: 589250 - DNA, 75 bp, synthetic construct
  source 1..75: mol_type = other DNA
cgtctggggaatgcccgggcagatgatctggtacgcaataacggtatcgcggccaatgcagtggccctgcataag

SEQ ID NO: 589251 - DNA, 75 bp, synthetic construct
  source 1..75: mol_type = other DNA
aacggcacttacagcgcccagcgtcaggagctggttgaatctactgatggctacctgatcctgcaggactggttt

SEQ ID NO: 589252 - DNA, 75 bp, synthetic construct
  source 1..75: mol_type = other DNA
ggatcgccccaatcctaatcttgaaacttttcgtaatggtcagttgcgtgccgtggcggcgggcagtcgtctgag

SEQ ID NO: 589253 - DNA, 75 bp, synthetic construct
  source 1..75: mol_type = other DNA
atccaggcttatgaggccgtaaaaacgacgcggacacacaaagcccggcgggaaaaccgaactgccgaccagtta

SEQ ID NO: 589254 - DNA, 75 bp, synthetic construct
  source 1..75: mol_type = other DNA
acaggatcgcctgcaagggcgcatcaaccagctgttcgagcgtattgaagcgcagctgcgtcaggtattgcgtga

SEQ ID NO: 589255 - DNA, 75 bp, synthetic construct
  source 1..75: mol_type = other DNA
tggtaaacagcgtgagttccagccttacattgaagcgaattggatcaacaacagcaaagtctacgccgtgaagat

SEQ ID NO: 589256 - DNA, 75 bp, synthetic construct
  source 1..75: mol_type = other DNA
gtgacggcctctgttgagggtgggtatacctttgaagcgggaacatttagcggcagcgaagggacgctgaatacc

SEQ ID NO: 589257 - DNA, 75 bp, synthetic construct
  source 1..75: mol_type = other DNA
cctggtgtttgacaccgaccccgccaatgataaaggaggcaccagtgccgaagccaaagaaccgggcgcgccacc

SEQ ID NO: 589258 - DNA, 75 bp, synthetic construct
  source 1..75: mol_type = other DNA
ggaagtgcatatcactccgggcattatctatgacgatttgcgcaagggtgaggatatcggcatggtcaaatccga

SEQ ID NO: 589259 - DNA, 75 bp, synthetic construct
  source 1..75: mol_type = other DNA
atacctttgaagcgggaacatttagaggcagcgaagggacgctgaatacctggtacgtccagccacaggcgcaaa

SEQ ID NO: 589260 - DNA, 75 bp, synthetic construct
  source 1..75: mol_type = other DNA
tggtaaacagcgtgagttccagccttacattgaagcgaactggatcaacaatagcaaagtctacgccgtgaagat

SEQ ID NO: 589261 - DNA, 75 bp, synthetic construct
  source 1..75: mol_type = other DNA
cagatgcagttaaaggcgtagaggatgcctgccacgctgccacgctgccatgcttcagcgtcagagggaaggcaa

SEQ ID NO: 589262 - DNA, 75 bp, synthetic construct
  source 1..75: mol_type = other DNA
tgaaaatctcaagcagaaattagtggaatgcaatcgctataactactgcgcagatgcagttaaaggcgtagagga

SEQ ID NO: 589263 - DNA, 75 bp, synthetic construct
  source 1..75: mol_type = other DNA
attgcagaggtgagaggctggaactcctgccgcgcctccatgcttcatggtgccgaacctgtaagccaaacttac

SEQ ID NO: 589264 - DNA, 75 bp, synthetic construct
  source 1..75: mol_type = other DNA
cacatccagaaactacaacggaacgtacagtgcccagcggcaggagcttgtcgagtcaaccgacggatatctgat

SEQ ID NO: 589265 - DNA, 75 bp, synthetic construct
  source 1..75: mol_type = other DNA
tttgtagaagtgaactggctgcataacagtaaggatttcagcaccagtatggatggcgtgtccgtcactcaggat

SEQ ID NO: 589266 - DNA, 75 bp, synthetic construct
  source 1..75: mol_type = other DNA
gggggccagcaaagagtttatatccaggtagtattacccactggatgccactgccagcagcaccgcagcaggagg

SEQ ID NO: 589267 - DNA, 75 bp, synthetic construct
  source 1..75: mol_type = other DNA
acgcaacatattctggtccggtcatgccgtggattgatcctgtcaaggaagctgaagcctggaaaatccagattc

SEQ ID NO: 589268 - DNA, 75 bp, synthetic construct
  source 1..75: mol_type = other DNA
ccaccggcggcgaaaatattgatgacattgatgatatcaagctctttgtctatgaagagagctacggtatcagta

SEQ ID NO: 589269 - DNA, 75 bp, synthetic construct
  source 1..75: mol_type = other DNA
tcgaatcggtactgttgccagcctatgcgcagaaaaccggaaaaaccaccgatgaaattgccgccatgctggcgg

SEQ ID NO: 589270 - DNA, 75 bp, synthetic construct
  source 1..75: mol_type = other DNA
cgctccattcggcagaaggaaacatcaacgggcaacagattaatgcattccgtacttccttttatgaacgtatta

SEQ ID NO: 589271 - DNA, 75 bp, synthetic construct
  source 1..75: mol_type = other DNA
gcctcgtcttgatgataacagccagaccaccttctacctggctgcgtccaaaggctccgatacgattgaagtggc

SEQ ID NO: 589272 - DNA, 75 bp, synthetic construct
  source 1..75: mol_type = other DNA
gaagggaaacgcacgtttacggaatttatccgtgaaggtgtgggtgttcatgcgtttaacggcgaaatctttgtg

SEQ ID NO: 589273 - DNA, 75 bp, synthetic construct
  source 1..75: mol_type = other DNA
gaagggaaacgcacgtttactgaatttatccgtgaaggtgtgggggttcatgcgtttaacggcgaaatctttgtg

SEQ ID NO: 589274 - DNA, 75 bp, synthetic construct
  source 1..75: mol_type = other DNA
cacttcattcgacagaaggcgtctgtggtcaacagattcagacattctgtacttccttttatgaacttattactg

SEQ ID NO: 589275 - DNA, 75 bp, synthetic construct
  source 1..75: mol_type = other DNA
ggcgtggaagatcgcggcgtgatgacggcgtttatgcaggcgctggggtttacggcacaacagggcggctgggag

SEQ ID NO: 589276 - DNA, 75 bp, synthetic construct
  source 1..75: mol_type = other DNA
aacttcagcgtgaggttgaacaggctgaggcccaactgaaacaacgcgaacaggacagcgatcgctacagtgggc

SEQ ID NO: 589277 - DNA, 75 bp, synthetic construct
  source 1..75: mol_type = other DNA
ggttcagcaacattcaaggggatcaaatcgtgcaaataaccgaaaccgtactttcagagccggtggaaatccggc

SEQ ID NO: 589278 - DNA, 75 bp, synthetic construct
  source 1..75: mol_type = other DNA
attggcgatctagtgtatgacgtgctgacaaaaaatccgaaactgtcagacggtaaggcgttgttccatgccgat

SEQ ID NO: 589279 - DNA, 75 bp, synthetic construct
  source 1..75: mol_type = other DNA
gtgcaaataaccgaagcattagtttcagagccgggagacatccggcgttttattcagcaggcggtggaccactgg

SEQ ID NO: 589280 - DNA, 75 bp, synthetic construct
  source 1..75: mol_type = other DNA
cccacccggacacctggaaactggtcagacgtaagccggaaaacgaagaccgcacggacgagggttttgacgttg

SEQ ID NO: 589281 - DNA, 75 bp, synthetic construct
  source 1..75: mol_type = other DNA
ccgcaacacgtacctggtccgcaccgcatacgaaactgccgaagaggccaacgactacggcgaattcccgcaacg

SEQ ID NO: 589282 - DNA, 75 bp, synthetic construct
  source 1..75: mol_type = other DNA
ccgctttttcgccgccgtccgcagggccatcaacaaggccgggctgggctggtacggcgtgcgcacagtggagcc

SEQ ID NO: 589283 - DNA, 75 bp, synthetic construct
  source 1..75: mol_type = other DNA
gccacctcgcagatctctggcgggaggaattactgcgtgccgccggaagagtatcgcgcaaggcatccccctaca

SEQ ID NO: 589284 - DNA, 75 bp, synthetic construct
  source 1..75: mol_type = other DNA
cgtacccgtggaacgccccgctgcaagttatcgatcctgaaacgttcggcagagcgcaaccaaccgcattacgcc

SEQ ID NO: 589285 - DNA, 75 bp, synthetic construct
  source 1..75: mol_type = other DNA
aggcaccacagcgcctcgataatgaagacattgacgccatactggccgccgctgatgtgggatgttttgccacct

SEQ ID NO: 589286 - DNA, 75 bp, synthetic construct
  source 1..75: mol_type = other DNA
ggcgttgtcaccatcagcgttgcagagtgcggcaatcgggtacgcattgcggtgcgggataccgggcacgcatcg

SEQ ID NO: 589287 - DNA, 75 bp, synthetic construct
  source 1..75: mol_type = other DNA
gcacctggtccggtgtgccggtggaaggctcactggttaatgtacgtattattgcggtgatgtccggcgggattt

SEQ ID NO: 589288 - DNA, 75 bp, synthetic construct
  source 1..75: mol_type = other DNA
ttggtgacaagctgacggttatctatgatattgatgaagaggtgaattgctgcattcccagcctgctgatccagc

SEQ ID NO: 589289 - DNA, 75 bp, synthetic construct
  source 1..75: mol_type = other DNA
gcgttcgccttcctgacgggcggattgtgcactgggatgaaaaatcacgaagcctggtggcagcagatcaaccgg

SEQ ID NO: 589290 - DNA, 75 bp, synthetic construct
  source 1..75: mol_type = other DNA
aaacgccattgcctgggcgagtctccaccgcatccggcagttccagttcttcggtatcccgccccgccaggtatg

SEQ ID NO: 589291 - DNA, 75 bp, synthetic construct
  source 1..75: mol_type = other DNA
ggtgactccgcgttcttcgtaacagtgacctgcccttcccgctttcacagcgtgaacgaggacggcagcctgaac

SEQ ID NO: 589292 - DNA, 75 bp, synthetic construct
  source 1..75: mol_type = other DNA
cagatggagcgcaaccccgcatcaccgaagcgcctggaccatgacgacattgacgccattctggccgccgctgac

SEQ ID NO: 589293 - DNA, 75 bp, synthetic construct
  source 1..75: mol_type = other DNA
taatggcgaggtcgttctgcagaattccgttaatcagggagctgggtatctgcagtttgccggcgattacagggt

SEQ ID NO: 589294 - DNA, 75 bp, synthetic construct
  source 1..75: mol_type = other DNA
gaaacgctgtttaatgcccccaaacatgcggtaacgcgcagcctggtttccgctcatctcgccctctacggtatg

SEQ ID NO: 589295 - DNA, 75 bp, synthetic construct
  source 1..75: mol_type = other DNA
taagattgtcgaacagggcgatgtcgaaacgctgtttaacgcaccgcaacatccggtgacgcgcagcctggtttc

SEQ ID NO: 589296 - DNA, 75 bp, synthetic construct
  source 1..75: mol_type = other DNA
cagacactgctcacccgactgctggaccagcactatggcctcacgctgaatgacacaccgttcgctgatgaacgt

SEQ ID NO: 589297 - DNA, 75 bp, synthetic construct
  source 1..75: mol_type = other DNA
tttaatcccgcgaatggacctctggctaattatctgaatatgggggacagcggctcccccctgtttgcttatgat

SEQ ID NO: 589298 - DNA, 75 bp, synthetic construct
  source 1..75: mol_type = other DNA
gttccgtgagtgtgacctcacagaatgctgtttttgaccgtgcaggcagctttgtcaacagttctctgtctctcg

SEQ ID NO: 589299 - DNA, 75 bp, synthetic construct
  source 1..75: mol_type = other DNA
tgaatggatgcgctcactgaaacggcacgaacgccgggcgctgatgcgttcgcttcgtgacaaacaggcaaaaaa

SEQ ID NO: 589300 - DNA, 75 bp, synthetic construct
  source 1..75: mol_type = other DNA
cgctgatgccgggtgttttgccacctacattgagaaacagggcggcgtacttgttccacgcaaagactacctgat

SEQ ID NO: 589301 - DNA, 75 bp, synthetic construct
  source 1..75: mol_type = other DNA
ttcgcctgacctgtgcggaatggtggaaacgcaaactgtggctgttacgttgcgagtggagagaagaacaactcc

SEQ ID NO: 589302 - DNA, 75 bp, synthetic construct
  source 1..75: mol_type = other DNA
ggcattctgcccgctggcgttcgccagacggcgggggaaattttggccgatggcaaaccggtttctccctgcgcc

SEQ ID NO: 589303 - DNA, 75 bp, synthetic construct
  source 1..75: mol_type = other DNA
cgtccgacagttgtgctttctgactcacagcaagttaatccggataatatttcgtggggataccgtggaggacgt

SEQ ID NO: 589304 - DNA, 75 bp, synthetic construct
  source 1..75: mol_type = other DNA
aatcagcacggaaaaaacggatgatgccacaaaatgggtgctgacaggatatcagactaccgctgatgccggagc

SEQ ID NO: 589305 - DNA, 75 bp, synthetic construct
  source 1..75: mol_type = other DNA
cggcctggcgcactggttgcagacgttaacccgtcacgagcggaaacagctcatcagacagcttaaaaatcagcc

SEQ ID NO: 589306 - DNA, 75 bp, synthetic construct
  source 1..75: mol_type = other DNA
gctgctcagccagacgagtgtttgccatccgcgggccagtgtcacagttgatgaagcatgttcgcaagtggcgga

SEQ ID NO: 589307 - DNA, 75 bp, synthetic construct
  source 1..75: mol_type = other DNA
gcaacggtcagtgcagagatcccttatcagatattccgcgactttgccgagaataaaggtcagtttacgccgggg

SEQ ID NO: 589308 - DNA, 75 bp, synthetic construct
  source 1..75: mol_type = other DNA
atgcctgaccattctctttttcgattacggatacttccgtggtgcattgcattagcaatgtcggggagttatagc

SEQ ID NO: 589309 - DNA, 75 bp, synthetic construct
  source 1..75: mol_type = other DNA
tcagaggaggcagtatgccgcaattaactgcaacggaagccgccgtgcaggagaaccagcgagtgatggggatcc

SEQ ID NO: 589310 - DNA, 75 bp, synthetic construct
  source 1..75: mol_type = other DNA
cgaacagttgtcccgtgattactcgaaggtcagttattcaagtgcccgcgcctccgccaatgagtcgtggcgcta

SEQ ID NO: 589311 - DNA, 75 bp, synthetic construct
  source 1..75: mol_type = other DNA
atccggccagtatgttgcgttaaaaacagttgtccagtccctgatgccactggttattgcaacaatcacccggtg

SEQ ID NO: 589312 - DNA, 75 bp, synthetic construct
  source 1..75: mol_type = other DNA
cgtggccggtgttccggtggaaggaaacggtgcggcggtttacaccaatatgttcggtaaggccgtggtggcaga

SEQ ID NO: 589313 - DNA, 75 bp, synthetic construct
  source 1..75: mol_type = other DNA
aatggcgcggcggtttacaccaatatgttcggtaaggccgtggtggcagacgtcaacaactactaccgcaaccag

SEQ ID NO: 589314 - DNA, 75 bp, synthetic construct
  source 1..75: mol_type = other DNA
ctactacgcctggcgagccttaccgtcgctaaaagccaaacttggccttggcgaagactacctgaattctgatat

SEQ ID NO: 589315 - DNA, 75 bp, synthetic construct
  source 1..75: mol_type = other DNA
ccaggttcgctataagatcatgatgggacgtccgcaagagtggggccaccatgtcgaggggggatttttctctgg

SEQ ID NO: 589316 - DNA, 75 bp, synthetic construct
  source 1..75: mol_type = other DNA
aaaggcatgtacatttcgctcagtatgccgtggggcgacaacagtaccgttagctataacggtaactatggcagt

SEQ ID NO: 589317 - DNA, 75 bp, synthetic construct
  source 1..75: mol_type = other DNA
cggaaaacgccgaagccacccagtccgtggtgcaggccacgcttaccgaaggggccattggctaccgtaagttct

SEQ ID NO: 589318 - DNA, 75 bp, synthetic construct
  source 1..75: mol_type = other DNA
acgccaggacacggtatggggaaccactttctgcgggccggggttgaggtcgatcggtatgggcgggcgattgcg

SEQ ID NO: 589319 - DNA, 75 bp, synthetic construct
  source 1..75: mol_type = other DNA
tcggtatcccgccccgacaggtatggcgtgaactccgccgccttgccggacaaatggagcgtaaccccgcatcac

SEQ ID NO: 589320 - DNA, 75 bp, synthetic construct
  source 1..75: mol_type = other DNA
aaatcaaggcacatctgcgtgttgaccatgacgcggatgatgagatgctgatggacaaggttcgtcaggctaccg

SEQ ID NO: 589321 - DNA, 75 bp, synthetic construct
  source 1..75: mol_type = other DNA
aagaactgattcagggggaactccccttttctgtatctgttctgatttacgatttgcgttgtccgacggtgttat

SEQ ID NO: 589322 - DNA, 75 bp, synthetic construct
  source 1..75: mol_type = other DNA
tttgaccttcagggcggccctgccgccccttggactcgtggcaataactgtcccggtgacgaaaaaacagccgga

SEQ ID NO: 589323 - DNA, 75 bp, synthetic construct
  source 1..75: mol_type = other DNA
agacccggtagcccgtgcctttgccacactgaaggcgcttcccgtttatctgcgagaacctctgagccgccacct

SEQ ID NO: 589324 - DNA, 75 bp, synthetic construct
  source 1..75: mol_type = other DNA
acgactacggcgaattcccgcaacgcatttacggcgtccgcgccccgtcactcggggagcgctacaccatatgca

SEQ ID NO: 589325 - DNA, 75 bp, synthetic construct
  source 1..75: mol_type = other DNA
gtattacgctggttgcgggaacaacatgaaggagcaacaattcgatgcctgttgctgctcagccagacgagtatt

SEQ ID NO: 589326 - DNA, 75 bp, synthetic construct
  source 1..75: mol_type = other DNA
atgcgctgaacctgcagacggcgcaggattcagacaatggattttcggcacttgaacaggcgctgctgcgatata

SEQ ID NO: 589327 - DNA, 75 bp, synthetic construct
  source 1..75: mol_type = other DNA
gggaaccgttttctgcgggccggtgtggaggtcgatcgatatggccgtgccgttgcgtaccatatctgtgaggat

SEQ ID NO: 589328 - DNA, 75 bp, synthetic construct
  source 1..75: mol_type = other DNA
aagacctcgtgcagggggaactgccgttttctgtgtccgtgctgatttacgatttgcgttgcccgacggtgttat

SEQ ID NO: 589329 - DNA, 75 bp, synthetic construct
  source 1..75: mol_type = other DNA
tgtacttccttttaccggcaggtacacgaacgtattgctgaacgtaatcacacggccagtccatcatcgccgttg

SEQ ID NO: 589330 - DNA, 75 bp, synthetic construct
  source 1..75: mol_type = other DNA
gttgctgctcagtcagacgagcatttgccatccgcgagccagcgtcacagttgatgaacaatgttcgcaagtggt

SEQ ID NO: 589331 - DNA, 75 bp, synthetic construct
  source 1..75: mol_type = other DNA
ttgaagtaatggggataaagtcagcgatgacgatccgcattaccacaccgaccacctccactggtggtggaacaa

SEQ ID NO: 589332 - DNA, 75 bp, synthetic construct
  source 1..75: mol_type = other DNA
tatccagcactgccagcgtggcgcttaccgtggataacaccatggtgatggccacagtggattacgtggatgaca

SEQ ID NO: 589333 - DNA, 75 bp, synthetic construct
  source 1..75: mol_type = other DNA
acagtacagggcggggtaattcgctgggcgacaggaaactatgacgctcaggaagaattatcactcagctccgct

SEQ ID NO: 589334 - DNA, 75 bp, synthetic construct
  source 1..75: mol_type = other DNA
gatgtgcctgcagcttcactgacggtaaaaggtaccgtgcaactcagcagcgccactaacagcacgtcagaaacg

SEQ ID NO: 589335 - DNA, 75 bp, synthetic construct
  source 1..75: mol_type = other DNA
actgctgctgatgttggggcgttgtcattatctggaggtcaattgaatggtgcactgggcatcggaacatccagt

SEQ ID NO: 589336 - DNA, 75 bp, synthetic construct
  source 1..75: mol_type = other DNA
ttcagtgggattataccagtaacgccagcgtaacgattcatacatcaccaacttatacagcgaataaaccaacag

SEQ ID NO: 589337 - DNA, 75 bp, synthetic construct
  source 1..75: mol_type = other DNA
cgtctgcttcaaaagatgaggcgaccagacaagcgtcagcagcgaaaggtagtgccacgacagcaacaacgaaag

SEQ ID NO: 589338 - DNA, 75 bp, synthetic construct
  source 1..75: mol_type = other DNA
agcgaggtctgcttctgcagcaaaaacctctgaaacaaatgcaaagacttcagcagacaatgctgcttcctctaa

SEQ ID NO: 589339 - DNA, 75 bp, synthetic construct
  source 1..75: mol_type = other DNA
tcaacaagtgccgggcaggcctcagccagtgccaccgccgccggaaaatcggcagaaagcgccgcatcatccgct

SEQ ID NO: 589340 - DNA, 75 bp, synthetic construct
  source 1..75: mol_type = other DNA
gctaacgcaaaatataccgctcaggacgcaacgacggcacgaaaagggatagttcagctcagtagcgccactaac

SEQ ID NO: 589341 - DNA, 75 bp, synthetic construct
  source 1..75: mol_type = other DNA
atggcaaatctacccgaaaccccgcagtgggaaaacggcatctaccagattgaggtctctgaccccgttctgggc

SEQ ID NO: 589342 - DNA, 75 bp, synthetic construct
  source 1..75: mol_type = other DNA
gtacgctgaatgattttctcggtgccatgacggaggatgatgcccgtccggaggcattgcgacgttttgaactga

SEQ ID NO: 589343 - DNA, 75 bp, synthetic construct
  source 1..75: mol_type = other DNA
aaggtggcgggaaagtgggtgttacaaacacaaacggcggtaacggaggtgtgccgagtactggcgatatccgca

SEQ ID NO: 589344 - DNA, 75 bp, synthetic construct
  source 1..75: mol_type = other DNA
tggccaccagccaggatcacaaacgcgtaggcgataaagataccgggccgaacaccggcggaatgggtgcttact

SEQ ID NO: 589345 - DNA, 75 bp, synthetic construct
  source 1..75: mol_type = other DNA
gcttatgccttaatgaccgatatccactgggacgactgcttctgccggaaagatatcggctggcgcgctatcgaa

SEQ ID NO: 589346 - DNA, 75 bp, synthetic construct
  source 1..75: mol_type = other DNA
cgtaggcgataaagataccgggccgaacacgggcggaatgggcgcttactctcctgcgccggtagtgacagatga

SEQ ID NO: 589347 - DNA, 75 bp, synthetic construct
  source 1..75: mol_type = other DNA
acaggccattagagagcttcctgactttggcggatatctatttgccgccccgccagcgccggtagtgccggaaga

SEQ ID NO: 589348 - DNA, 75 bp, synthetic construct
  source 1..75: mol_type = other DNA
aatattctggcgctcgtcgacatcattgagtatgtcgacaacgcaaccccaataaaagtagaggacatgcttgct

SEQ ID NO: 589349 - DNA, 75 bp, synthetic construct
  source 1..75: mol_type = other DNA
cgtgcacgacatgctggcaggcaacgcttttggcgacgcgggtcatcgtattgttatcgaagagttcctcgacgg

SEQ ID NO: 589350 - DNA, 75 bp, synthetic construct
  source 1..75: mol_type = other DNA
gcttttggcgacgcgggtcatcgcatcgttatcgaagagttcctcgatggcgaagaagcgagctttatcgtgatg

SEQ ID NO: 589351 - DNA, 75 bp, synthetic construct
  source 1..75: mol_type = other DNA
tacaggaaacggtaaatcaggcttctggcgcattacagaaaaaccagaacggcgcagatattccgggaaaagata

SEQ ID NO: 589352 - DNA, 75 bp, synthetic construct
  source 1..75: mol_type = other DNA
aaaacaacctgccgacgccacactgaccgcactggcaggccttgccactgcggcagacaaactaccgtattttac

SEQ ID NO: 589353 - DNA, 75 bp, synthetic construct
  source 1..75: mol_type = other DNA
aacaccggcggaatgggggcttactctcctgcgccggtagtgaccgatgaagttcatcagcgcaccatggaacgt

SEQ ID NO: 589354 - DNA, 75 bp, synthetic construct
  source 1..75: mol_type = other DNA
cggcccaaccgcaggtgctgcacaactggaaggttctaaagcattcaccaaagactttctggcccgccataacat

SEQ ID NO: 589355 - DNA, 75 bp, synthetic construct
  source 1..75: mol_type = other DNA
gtggacggtgagcatgtgctgccgatggccaccagccaggatcacaaacgcgtaggcgataaagataccgggccg

SEQ ID NO: 589356 - DNA, 75 bp, synthetic construct
  source 1..75: mol_type = other DNA
tatcagtggtgcatcgacattaatcctccacttcaatatgaatgcggggagttgccctgctgtacagttccgcgt

SEQ ID NO: 589357 - DNA, 75 bp, synthetic construct
  source 1..75: mol_type = other DNA
acccattggcgcacacacccacacgctcgcactgggttcacatggtcacggcctgaccattaaccccaccggtaa

SEQ ID NO: 589358 - DNA, 75 bp, synthetic construct
  source 1..75: mol_type = other DNA
catcaacggcgtggcatttaacggtacagcaaacatcaccatttcggcggggtcgattgggtcgtatacaaaagc

SEQ ID NO: 589359 - DNA, 75 bp, synthetic construct
  source 1..75: mol_type = other DNA
agcgctatcgagtaatatcgatcttttcccgtctgatatttttcggttggccgaagggattggtaatgcagcaaa

SEQ ID NO: 589360 - DNA, 75 bp, synthetic construct
  source 1..75: mol_type = other DNA
tcaatgcaaatggtcgtatcggtgttcactctatacagagcatcagttatagcgaaaatcatatacagggcattt

SEQ ID NO: 589361 - DNA, 75 bp, synthetic construct
  source 1..75: mol_type = other DNA
ttcaggaatgcgcgtcattcctccccgaaaactactcacatctcactaagcagtcaggtccgaaaaaaaatacat

SEQ ID NO: 589362 - DNA, 75 bp, synthetic construct
  source 1..75: mol_type = other DNA
gctgaacaaagccagcggtacgctggccatgattgttcatgcaccggaacagcagaagctgaaaaccgcagaagg

SEQ ID NO: 589363 - DNA, 75 bp, synthetic construct
  source 1..75: mol_type = other DNA
cccggatatgcgtggctggacaatcaagggaaaacctgccagcggtcgtgcggtattgtcacaggaacaggacgg

SEQ ID NO: 589364 - DNA, 75 bp, synthetic construct
  source 1..75: mol_type = other DNA
tggtaccgcacttacacggacaaaaacaaacccacaccacaggacatcggcgcactgcctgcaagtgagttgtta

SEQ ID NO: 589365 - DNA, 75 bp, synthetic construct
  source 1..75: mol_type = other DNA
aaaaacgacctcatccttcaattacggcacaaaaacaacaaacagcgcggggccgttcagcgcaacaatatcatt

SEQ ID NO: 589366 - DNA, 75 bp, synthetic construct
  source 1..75: mol_type = other DNA
attattcaactgagcagcgccaccgacagcgagtcggaagccgtcgccgcgacgccgaaagcagttaaggcggct

SEQ ID NO: 589367 - DNA, 75 bp, synthetic construct
  source 1..75: mol_type = other DNA
cgtttgaacactggaaagcgcagcagggtgcgaccggcgagccggtgttactggatgaatttgtgtttgcgaatg

SEQ ID NO: 589368 - DNA, 75 bp, synthetic construct
  source 1..75: mol_type = other DNA
cactgatacgggctatggtgatatctgccttggaggctgccttatcgaagtatcaggcgacatcaacggggggat

SEQ ID NO: 589369 - DNA, 75 bp, synthetic construct
  source 1..75: mol_type = other DNA
ctggggtgttacagcgaagcagtttatcagtgatctgaatgcactgggcgatatcacccacattaatctccatat

SEQ ID NO: 589370 - DNA, 75 bp, synthetic construct
  source 1..75: mol_type = other DNA
aatgatgccgacagcgatactgattcatatatgtggtttgaaacaggtgacaacggcaatgaatatttcaaatgg

SEQ ID NO: 589371 - DNA, 75 bp, synthetic construct
  source 1..75: mol_type = other DNA
cttggcacgaataacgcgttgggtgggaactctattgttcttggtgataacgacaccggatttaaacaaaatggc

SEQ ID NO: 589372 - DNA, 75 bp, synthetic construct
  source 1..75: mol_type = other DNA
gacttcaaaacagcgtatcgcgtggggatgggcggttttggttctctgcgccaggttcgtgagggggcggagtat

SEQ ID NO: 589373 - DNA, 75 bp, synthetic construct
  source 1..75: mol_type = other DNA
gatgcatccagtaaaggtgcacaaaaatatgactggtgggcttatgtatcagctcgtccgcgtaatattgcattt

SEQ ID NO: 589374 - DNA, 75 bp, synthetic construct
  source 1..75: mol_type = other DNA
agtgcgggaagtcacccggcggcgcggcgtagggcaatatctgctggaagaggtgctgcgtaacaatcctggcgt

SEQ ID NO: 589375 - DNA, 75 bp, synthetic construct
  source 1..75: mol_type = other DNA
aactaattgatacaactcaggcaaggccaattcagtattgcattaatgggacttggtataacgtggggagtattt

SEQ ID NO: 589376 - DNA, 75 bp, synthetic construct
  source 1..75: mol_type = other DNA
caccactgatggtatcgccacgaaagtgcgtattgatgctggcgtggcgccgctggactatcgcggcatgaccaa

SEQ ID NO: 589377 - DNA, 75 bp, synthetic construct
  source 1..75: mol_type = other DNA
attacctgaagcccgcggtgatttcattcgtatctgggatgacgggcgaggtgcagacggtggtcgcgaattatt

SEQ ID NO: 589378 - DNA, 75 bp, synthetic construct
  source 1..75: mol_type = other DNA
tcaaagtaggtatcgcttttgctactgctgattctgttataaccgttggaaacccagctaatcctaaagcaggaa

SEQ ID NO: 589379 - DNA, 75 bp, synthetic construct
  source 1..75: mol_type = other DNA
tatgatcacgcagccatacaacagtgccccgcgtgataccacagtgacaatccctgcaccggcggtaacagaacc

SEQ ID NO: 589380 - DNA, 75 bp, synthetic construct
  source 1..75: mol_type = other DNA
cgactcaatccttgcctggattcgaaatactgactgggcgaagattggatttaaaaatgatgccgacagcgatac

SEQ ID NO: 589381 - DNA, 75 bp, synthetic construct
  source 1..75: mol_type = other DNA
ttaccgagcagatgcagcagaaaaaaccaaatccgccaatcaaaaatgaagctgataacggtctgcgcaatacgc

SEQ ID NO: 589382 - DNA, 75 bp, synthetic construct
  source 1..75: mol_type = other DNA
tagctacgtttttattggtgctgatggtactggcgcgtcctttaggtagcgggctggcgcggctgattaatgaca

SEQ ID NO: 589383 - DNA, 75 bp, synthetic construct
  source 1..75: mol_type = other DNA
tttcggtgaatttcgatagatctctggttgaaccgctaatatgctccgcacgctatacaggaagcacctttcggc

SEQ ID NO: 589384 - DNA, 75 bp, synthetic construct
  source 1..75: mol_type = other DNA
gctggaagcagagccggtggcaaagattatagctcattacccattaggagttgacgtaggcaaacaaaagttcgt

SEQ ID NO: 589385 - DNA, 75 bp, synthetic construct
  source 1..75: mol_type = other DNA
ggcgtctctgaccatgagatgaactggaagcaatatctctgtgccattctcggcctgaacatgctggggctggcg

SEQ ID NO: 589386 - DNA, 75 bp, synthetic construct
  source 1..75: mol_type = other DNA
tgctgtttgtcctgctggcggtgtttattgccgggctgatgattggtcgtacgccggaatatctgggtaaaaaaa

SEQ ID NO: 589387 - DNA, 75 bp, synthetic construct
  source 1..75: mol_type = other DNA
tctcaggaagcgatcaagatgctcggtactaacggcggtggcttctttaatgccaactcgtcgcatccgtttgaa

SEQ ID NO: 589388 - DNA, 75 bp, synthetic construct
  source 1..75: mol_type = other DNA
aattccggtaatggtcatgtatgaagacggtgagatgtggtctgcaatgtggaatggcaatcgctgggatgatgg

SEQ ID NO: 589389 - DNA, 75 bp, synthetic construct
  source 1..75: mol_type = other DNA
tggaaggcaaccttcacgcaaattaaccatgaatgtaatacgttcacccttatgaattctgacaaagcagaaatc

SEQ ID NO: 589390 - DNA, 75 bp, synthetic construct
  source 1..75: mol_type = other DNA
tacatcctcttggttcaggacgcagagccaaacttcgatgtaaatggcaactctccgggaactccggatagttgg

SEQ ID NO: 589391 - DNA, 75 bp, synthetic construct
  source 1..75: mol_type = other DNA
aagaaagatcgcgaggctgatttgcgctggattcatggcgtaatagttcaggctgcgtggtttgtaaaggcatca

SEQ ID NO: 589392 - DNA, 75 bp, synthetic construct
  source 1..75: mol_type = other DNA
ttcagggtagccaacctgtaagccaaacttacaagttgccagttaatacaccttgccaagatgcgccagcccata

SEQ ID NO: 589393 - DNA, 75 bp, synthetic construct
  source 1..75: mol_type = other DNA
taatgatggttggataattcctggtgcgtcgtggaaaccgtcacactggatgccgctaccagaaccgccgcagga

SEQ ID NO: 589394 - DNA, 75 bp, synthetic construct
  source 1..75: mol_type = other DNA
gaaccagaacgtgcttatttcggtgaatttcgatagctctctggttgaaccgctaatatgctccgcacgctatac

SEQ ID NO: 589395 - DNA, 75 bp, synthetic construct
  source 1..75: mol_type = other DNA
aggttggcctcttgcgtatagtgattatgctgaaggatggaacgattgccgcgaagccatgcttcagggtaaatc

SEQ ID NO: 589396 - DNA, 75 bp, synthetic construct
  source 1..75: mol_type = other DNA
gaatatccggatccgcactcagttacgcactggagtgaaatgccagcagcaccgcagcaggaggttaaccgtggc

SEQ ID NO: 589397 - DNA, 75 bp, synthetic construct
  source 1..75: mol_type = other DNA
gacggtgatggcgaagacctgtatctcaaggaggtaacccactggatgccgctgccagaaccgccgcaggaagtt

SEQ ID NO: 589398 - DNA, 75 bp, synthetic construct
  source 1..75: mol_type = other DNA
cttatgtggcggacaacggcgacgtgatgtttgacgtcccgaccgatccaacttatggcgtgctgtcgcgtcagg

SEQ ID NO: 589399 - DNA, 75 bp, synthetic construct
  source 1..75: mol_type = other DNA
ttcctgcaaagcggcgcgcaggcagacgacagcgaagtggctgagattgaagcgttaattcaacagcgtctggat

SEQ ID NO: 589400 - DNA, 75 bp, synthetic construct
  source 1..75: mol_type = other DNA
atacgtggagttgagcgacggcactttatcgtggttagggaacgccttgtactggatgccgttaccagaaccgcc

SEQ ID NO: 589401 - DNA, 75 bp, synthetic construct
  source 1..75: mol_type = other DNA
taatcgaagaagccaaattaaaaatagcgattgcgaaatgctactccaattcagggatggcacgggtagagggcg

SEQ ID NO: 589402 - DNA, 75 bp, synthetic construct
  source 1..75: mol_type = other DNA
cgatattgtccgcaatggtgatgaatttttcgaaacacagagtcgcaatgtaaccgactggatgccgctgccaga

SEQ ID NO: 589403 - DNA, 75 bp, synthetic construct
  source 1..75: mol_type = other DNA
tgggaatgcggtgaaaacataatcctgtttaaccctgacacagttgaagcatacgcaaaacgtgcggaaatatca

SEQ ID NO: 589404 - DNA, 75 bp, synthetic construct
  source 1..75: mol_type = other DNA
cacagaaaattattgaagcagccgatgaggttattagtgcgctggccggaactaatgaggatgttcaccctggta

SEQ ID NO: 589405 - DNA, 75 bp, synthetic construct
  source 1..75: mol_type = other DNA
ctgcctggtggatttacaattaaggaaacacaagaactttacgaagatttggttcgaagccacataagccaggct

SEQ ID NO: 589406 - DNA, 75 bp, synthetic construct
  source 1..75: mol_type = other DNA
gaagcagaagcgccaagtctgcctggtggtttcacaattaaagaagcaaaagaattacataagaatctggttaaa

SEQ ID NO: 589407 - DNA, 75 bp, synthetic construct
  source 1..75: mol_type = other DNA
acttgccagaattaatcgaaggcatggaagtttccattgatataagcacttgtgatgctgatttaggtaatcgct

SEQ ID NO: 589408 - DNA, 75 bp, synthetic construct
  source 1..75: mol_type = other DNA
ggcgaggagaagcaacgattaagccgggcaatggtgttgagcaggtaacacactggatgccgctaccagaaccgc

SEQ ID NO: 589409 - DNA, 75 bp, synthetic construct
  source 1..75: mol_type = other DNA
gccgcccctccagcgccgatagtgccggaagaaatgtattggcaggatgcgccagttgaaggcagcagcaaagcg

SEQ ID NO: 589410 - DNA, 75 bp, synthetic construct
  source 1..75: mol_type = other DNA
aattcgtacaggccattagagagcttcctgactttggcggatatctatttgccgcccctccagcgccgatagtgc

SEQ ID NO: 589411 - DNA, 75 bp, synthetic construct
  source 1..75: mol_type = other DNA
gccgggaaattattctgggctttaacggatgaaagcaataaagagcaagcggacgttattcctgtttatactgcc

SEQ ID NO: 589412 - DNA, 75 bp, synthetic construct
  source 1..75: mol_type = other DNA
ttgggggaacactggattctctgcgcgtgcgggaagtcacccgacgtcgcggcgtggggcaatatctactggaag

SEQ ID NO: 589413 - DNA, 75 bp, synthetic construct
  source 1..75: mol_type = other DNA
tttgcgctggattcatggcgtaatagttcaggccgcgtggtttgtaaaagcatcactggagcagaccgcgctatc

SEQ ID NO: 589414 - DNA, 75 bp, synthetic construct
  source 1..75: mol_type = other DNA
gtggtactgcaaagtgcacgcagcgtggcggtcggggtgatgctgggtatcgatccggcgcaaaaagatccacta

SEQ ID NO: 589415 - DNA, 75 bp, synthetic construct
  source 1..75: mol_type = other DNA
tttgagcgcgagctgcaaaacaacatccttggcctgatgccacaggcgatcctctcttcggagcagggctctctt

SEQ ID NO: 589416 - DNA, 75 bp, synthetic construct
  source 1..75: mol_type = other DNA
cgtgcgggaagtcacccgccgtcgcggtgtggggcaatatctgctggaagaggttttgcgtaacaatcctggcgt

SEQ ID NO: 589417 - DNA, 75 bp, synthetic construct
  source 1..75: mol_type = other DNA
tggataatacctggtgcgtcgtggataccatcacactggatgcctctaccagaaccgccgcaggaggtgcgccaa

SEQ ID NO: 589418 - DNA, 75 bp, synthetic construct
  source 1..75: mol_type = other DNA
tggcaattatgagtacgataatattatctatgttgaaaagaaaattaatacattaggtgcggtagtaacatatgc

SEQ ID NO: 589419 - DNA, 75 bp, synthetic construct
  source 1..75: mol_type = other DNA
ggtgatgaatttttcgaaacacagagccgcaatgtaaccgactggatgccgttaccagaaccgccgcaggaggtg

SEQ ID NO: 589420 - DNA, 75 bp, synthetic construct
  source 1..75: mol_type = other DNA
gagccgctaatatgctccgcacgctataccggaagcacctttcggcgcggagatgcaacgattaagccgggtaat

SEQ ID NO: 589421 - DNA, 75 bp, synthetic construct
  source 1..75: mol_type = other DNA
gccccacattacccccagacagatggttcagtaaaactggctgcaggttggcttattgatcagtgccagcttaaa

SEQ ID NO: 589422 - DNA, 75 bp, synthetic construct
  source 1..75: mol_type = other DNA
attatgttgactgcgttgaactgacgacaggcaagcaagtgcgcttaacagctaaagagtgtcgttttggttatc

SEQ ID NO: 589423 - DNA, 75 bp, synthetic construct
  source 1..75: mol_type = other DNA
acaaatggtgggcagttactgacgatgtggaagaaccggcatcgaaagtaacccactggatgccgctaccggaac

SEQ ID NO: 589424 - DNA, 75 bp, synthetic construct
  source 1..75: mol_type = other DNA
gcctcttgcgtatgcttacaaagagcttacgcctgagattatgcgcaaccatttagctgtattcgagcgatatgg

SEQ ID NO: 589425 - DNA, 75 bp, synthetic construct
  source 1..75: mol_type = other DNA
gttgagcgacggcactttatcgtggttagggaacgccttgtactggatgccgctaccagaaccgccgcaggaggt

SEQ ID NO: 589426 - DNA, 75 bp, synthetic construct
  source 1..75: mol_type = other DNA
atttaatgtctggcttgagcccgaagttcgctttattggtgcatcaggtgaagttagcgcagtggagacgatttc

SEQ ID NO: 589427 - DNA, 75 bp, synthetic construct
  source 1..75: mol_type = other DNA
gttatcaaagggctggtatgttcagccgctatatatggctcagccagtgtcggtggtgccggatggtcttccgtc

SEQ ID NO: 589428 - DNA, 75 bp, synthetic construct
  source 1..75: mol_type = other DNA
ccgagggagcactggattccctgcgcgtgcgggaagtcacccgccgtcgcggtgtggggcaatatctgctggaag

SEQ ID NO: 589429 - DNA, 75 bp, synthetic construct
  source 1..75: mol_type = other DNA
acttacaacttaccagaattaatcgaaggcatggaagtttccattgatgtaagcacttgtgatgctgatttaggt

SEQ ID NO: 589430 - DNA, 75 bp, synthetic construct
  source 1..75: mol_type = other DNA
tttaaataatggcatagtcggctttgatgaaggctggaacgcctgccgcgccgccatgcttcatggtgccaaacc

SEQ ID NO: 589431 - DNA, 75 bp, synthetic construct
  source 1..75: mol_type = other DNA
attgagcgccgtgcttatgaaattgctctggcatcgctggaagaggagccggtggcatggctgcattcagacaat

SEQ ID NO: 589432 - DNA, 75 bp, synthetic construct
  source 1..75: mol_type = other DNA
tgattaaagaaatcaaagagtgcataggcagcttggacgtgcgagacaatattgagcaccgagcttatgaaatag

SEQ ID NO: 589433 - DNA, 75 bp, synthetic construct
  source 1..75: mol_type = other DNA
atgattgttcgcccacaacaacactggttgcgccgtatttttgtctggcacggttcagtattatccaaaatatcc

SEQ ID NO: 589434 - DNA, 75 bp, synthetic construct
  source 1..75: mol_type = other DNA
gatctatctgttaaatcagcgcagctgctggaaggccaatttatcgggcgtttattgcgggaaagtaaacgtaac

SEQ ID NO: 589435 - DNA, 75 bp, synthetic construct
  source 1..75: mol_type = other DNA
ggataccacctgttatatggtggcggcgggggagtgtggtaacaaaaacatcgggcaaagccgtatcattgatcc

SEQ ID NO: 589436 - DNA, 75 bp, synthetic construct
  source 1..75: mol_type = other DNA
atttatggcgacaagctcatgttatgtattatattactgagcaaaaacggctggaggagcagctggaacatgctg

SEQ ID NO: 589437 - DNA, 75 bp, synthetic construct
  source 1..75: mol_type = other DNA
tgttcttccggctactgaaccgtcgatatgaaaaagcgagcatcatactgacgtcaaacaaagggctcgcagact

SEQ ID NO: 589438 - DNA, 75 bp, synthetic construct
  source 1..75: mol_type = other DNA
agcgaaacaggaaaaccggctggagcgtcagctacagcaactgagttatgcccgggtgttgatcctggatgaaat

SEQ ID NO: 589439 - DNA, 75 bp, synthetic construct
  source 1..75: mol_type = other DNA
cgcgggtgttgatcctggacgaaataggctatctgccgatgaacagagaggaagccagtctgttcttccgcttgc

SEQ ID NO: 589440 - DNA, 75 bp, synthetic construct
  source 1..75: mol_type = other DNA
tcgtccgggaactggcaggtctggcgttcctggagcgcagcgaatacgtgatcctgctgggacctccgggtgtag

SEQ ID NO: 589441 - DNA, 75 bp, synthetic construct
  source 1..75: mol_type = other DNA
cccgggtgttgatcctggatgaaataggttatctgccgatgaacagagaggaagccagcctgttcttccggctac

SEQ ID NO: 589442 - DNA, 75 bp, synthetic construct
  source 1..75: mol_type = other DNA
agatgaacacgtttcttacaacgccggttacaccaacgttcacgagctgatcccatggcgtacgctctctggtcg

SEQ ID NO: 589443 - DNA, 75 bp, synthetic construct
  source 1..75: mol_type = other DNA
tggacttattaaccagtcctgtctggatcgtttcaccctttgaagaacaattaatttatgccaatagtgcagcgc

SEQ ID NO: 589444 - DNA, 75 bp, synthetic construct
  source 1..75: mol_type = other DNA
tggacttattaaccagtcctgtctggattgtttcgcccttcgaggaacagttaatttatgccaatagtgcagcac

SEQ ID NO: 589445 - DNA, 75 bp, synthetic construct
  source 1..75: mol_type = other DNA
gcaaacttatgccgggccaattgagatttacggcgacaggttaatgttatgcatcgtacatgatattacagagca

SEQ ID NO: 589446 - DNA, 75 bp, synthetic construct
  source 1..75: mol_type = other DNA
ctaatgtcggttacagtcggagtggtgacagcagccagatttattacggaatgagtggtgggattattgctcatg

SEQ ID NO: 589447 - DNA, 75 bp, synthetic construct
  source 1..75: mol_type = other DNA
ttgcagatggcacccgtcacagcgggcaatcggttaaatccgtctacagcaaatccttctaccagacaggaacca

SEQ ID NO: 589448 - DNA, 75 bp, synthetic construct
  source 1..75: mol_type = other DNA
cggtggtgcttgttaaagcgcctggcgcaaaagatgcaaaagtcgaaaaccagacgggggtgcgtaccgactggc

SEQ ID NO: 589449 - DNA, 75 bp, synthetic construct
  source 1..75: mol_type = other DNA
cccttgcagataatgttgaactggatgaaaccgtgatcactgtcatcccaactcacggtgctattgccagagcaa

SEQ ID NO: 589450 - DNA, 75 bp, synthetic construct
  source 1..75: mol_type = other DNA
tcactgtcatcccaactcacggtgctattgccagagcaacatttaatgcacaaatcggcgggaaagtattaatga

SEQ ID NO: 589451 - DNA, 75 bp, synthetic construct
  source 1..75: mol_type = other DNA
gaccggaattcataccgactggcgtggctatgccatattaccatttgcgacagaatatagagaaaatcgtgtcgc

SEQ ID NO: 589452 - DNA, 75 bp, synthetic construct
  source 1..75: mol_type = other DNA
aacgccagttacagtatgtcaaacgatttgaaaggcggcatgaccaacctatcaggggtttatggcactctgctg

SEQ ID NO: 589453 - DNA, 75 bp, synthetic construct
  source 1..75: mol_type = other DNA
gatcaggttaatcatactgtggcgggtggcgataaagccgatgcgtggactgccgggttaaaatatgatgctaac

SEQ ID NO: 589454 - DNA, 75 bp, synthetic construct
  source 1..75: mol_type = other DNA
caggtttatctgactggacttccacagtcagggcaattacaggtttcatggggcaaagataaaaactcaaactga

SEQ ID NO: 589455 - DNA, 75 bp, synthetic construct
  source 1..75: mol_type = other DNA
aacgcgaattcccttgcagataatgttgaactggatgaaaccgtagtcactgtcatcccaactcacggtgctatt

SEQ ID NO: 589456 - DNA, 75 bp, synthetic construct
  source 1..75: mol_type = other DNA
gcatcacctttggacagccgctgggcgacacaatggttctggttaaggctcctggcgctgataatgtcaaaatag

SEQ ID NO: 589457 - DNA, 75 bp, synthetic construct
  source 1..75: mol_type = other DNA
ttggatttaaaggcgaaacacaaattaacgatcaactcactggctatggtcagtgggaatacaatattcaggcaa

SEQ ID NO: 589458 - DNA, 75 bp, synthetic construct
  source 1..75: mol_type = other DNA
accgatatgctgcctgaatttggcggtgactcttataccaatgcagacaactttatgactggtcgagccaatggc

SEQ ID NO: 589459 - DNA, 75 bp, synthetic construct
  source 1..75: mol_type = other DNA
ggttaaaagagaaacgtaaagctggagtgctggccaaaaacacaacgccaatcagtgatgatgaaatggtgaaaa

SEQ ID NO: 589460 - DNA, 75 bp, synthetic construct
  source 1..75: mol_type = other DNA
gtggccaaattgtgcgaccagtggctggcaccgaaacaaggcactgatagcgccctggcgatggcaatgggccat

SEQ ID NO: 589461 - DNA, 75 bp, synthetic construct
  source 1..75: mol_type = other DNA
atgagtaaacttttggatcgctttcgctacttcaaacaaaagggcgatacctttgccgatggtcacggacaggtg

SEQ ID NO: 589462 - DNA, 75 bp, synthetic construct
  source 1..75: mol_type = other DNA
tggcggtgatttcgctggtggtgggcggtattggtgtaatgaatattatgctggtgtcagtgaccgagcggacgc

SEQ ID NO: 589463 - DNA, 75 bp, synthetic construct
  source 1..75: mol_type = other DNA
cgacactgacgatgccactaccaaagcgtttctcgacgaagtggatcagctaagtcagcagaatatttcgatgga

SEQ ID NO: 589464 - DNA, 75 bp, synthetic construct
  source 1..75: mol_type = other DNA
aaactgatgcagactcgcgtgcgtaacctgctggcacaaccggcagcggggacaacggaagctaaacctgcacct

SEQ ID NO: 589465 - DNA, 75 bp, synthetic construct
  source 1..75: mol_type = other DNA
gtcaacatgacgctgttgcaggcgtggccttcccctactttggcggcattgaaaatccgcattttcgcagcgtaa

SEQ ID NO: 589466 - DNA, 75 bp, synthetic construct
  source 1..75: mol_type = other DNA
gatttcttcacctggaacatggacggcgtcttgaaaaccgtcgaaaagaccacacgtactttacaacggttcctg

SEQ ID NO: 589467 - DNA, 75 bp, synthetic construct
  source 1..75: mol_type = other DNA
gcatcagaagtgattctggcgctggcaccggaaaccaacggccatgttgcagtcaaagcgtggcaggcgctgggc

SEQ ID NO: 589468 - DNA, 75 bp, synthetic construct
  source 1..75: mol_type = other DNA
cggcaccatgaccggatatgcaggcggagttcagcgaaaagagtggttattgcgccacgaaggttatcttttgct

SEQ ID NO: 589469 - DNA, 75 bp, synthetic construct
  source 1..75: mol_type = other DNA
gttgtcgctgcgccacggcaaaaaggatttcttcacctggaacatggacggtgtcttgaaaacggtcgaaaagac

SEQ ID NO: 589470 - DNA, 75 bp, synthetic construct
  source 1..75: mol_type = other DNA
cagcgccaacggcgtaagcggggactattttaatgtttatggtatgagtttcagcgaagggaacacctttaatca

SEQ ID NO: 589471 - DNA, 75 bp, synthetic construct
  source 1..75: mol_type = other DNA
cattatgctggtgtcagtgaccgagcgaacgcgggaaattggcattcgcatggctgtaggggcgcgagccagcga

SEQ ID NO: 589472 - DNA, 75 bp, synthetic construct
  source 1..75: mol_type = other DNA
cacctgcacctgcaccgcaagctgatactccggcagccgcgccgcaagctgatactccggcagccgcgccgcaag

SEQ ID NO: 589473 - DNA, 75 bp, synthetic construct
  source 1..75: mol_type = other DNA
gagcagacatttgccaccattgcaccttacacccttgaagaaacctacgaagtgctggacgccatcgcccgtgaa

SEQ ID NO: 589474 - DNA, 75 bp, synthetic construct
  source 1..75: mol_type = other DNA
gattttgacgatcttcgcggtgaactgggcgatctgctattccaggtggtgttttacgcgcaaatggctcaggaa

SEQ ID NO: 589475 - DNA, 75 bp, synthetic construct
  source 1..75: mol_type = other DNA
cgtcgttatggacagtttatcagactgcaataatgatctttataagacgcttgaatcaatcgcaagagaatctca

SEQ ID NO: 589476 - DNA, 75 bp, synthetic construct
  source 1..75: mol_type = other DNA
gtcgcctgaaaatggagcatctgagttatcacgttgaaaacctgctggaacaggctgctaaaaaagagctgaact

SEQ ID NO: 589477 - DNA, 75 bp, synthetic construct
  source 1..75: mol_type = other DNA
ttacgcctgtgtcgtcagcgattgatgcgtaaattacgcgcgaataagccaacatcatcagatgaaccggagcaa

SEQ ID NO: 589478 - DNA, 75 bp, synthetic construct
  source 1..75: mol_type = other DNA
gtgatgtacgaagcgcggcaggctgttgtcgaccaggctaaactggaggaggaaatgggtgacctgctgtttgcc

SEQ ID NO: 589479 - DNA, 75 bp, synthetic construct
  source 1..75: mol_type = other DNA
ggcatcatcctcaagctgaatcagctttctaatcaggttgataacctgcgtctggccgataatgatagcgacggt

SEQ ID NO: 589480 - DNA, 75 bp, synthetic construct
  source 1..75: mol_type = other DNA
ataccgcattgattctcagcgcggtggctatcgctattgctctggcggcgggcgtcggtttgtatggctggggta

SEQ ID NO: 589481 - DNA, 75 bp, synthetic construct
  source 1..75: mol_type = other DNA
aaacctgcacctgcacctgcacctgcacctgcacctgcacctgcacctgcacctgcacctgcacctgcacctgca

SEQ ID NO: 589482 - DNA, 75 bp, synthetic construct
  source 1..75: mol_type = other DNA
actccatgataatcgggtttggcgtggctgcaggaatcagggtttacatcgcctgggaatcattaattaatctgg

SEQ ID NO: 589483 - DNA, 75 bp, synthetic construct
  source 1..75: mol_type = other DNA
agagccaaaaagccgagctggaaagcatcataaaacaacaggctacgcagttagagcaagcaaatcgtcagcaag

SEQ ID NO: 589484 - DNA, 75 bp, synthetic construct
  source 1..75: mol_type = other DNA
cagaactttatggacaacttcattacgattcgccgtcgtgatgacaccgccgtaccactgttagcgccgaatcag

SEQ ID NO: 589485 - DNA, 75 bp, synthetic construct
  source 1..75: mol_type = other DNA
atgagaaaaaagaaacgatcccatgttggaccagtgaagatgagtatggtctctcagttcgagttggtgcagttc

SEQ ID NO: 589486 - DNA, 75 bp, synthetic construct
  source 1..75: mol_type = other DNA
gcattcatggtatggcgagcgatggggacgattattttgcgaatcgctggcgacacgtggcgtaacgattaccag

SEQ ID NO: 589487 - DNA, 75 bp, synthetic construct
  source 1..75: mol_type = other DNA
tacattgcggcaggcacaacgctttctttcatttccgcgaaagagtatcgaaagctcactttgttggttggagca

SEQ ID NO: 589488 - DNA, 75 bp, synthetic construct
  source 1..75: mol_type = other DNA
tcaaattgttacaggaccgtagtgacctgacgttgctaaccaactcggcggaagcgattcatgttctggctcagt

SEQ ID NO: 589489 - DNA, 75 bp, synthetic construct
  source 1..75: mol_type = other DNA
aacttcttcgccaccgctgggggcgtctgcgcttatatcgtttccccggttctgttttgaccgattaccgaatac

SEQ ID NO: 589490 - DNA, 75 bp, synthetic construct
  source 1..75: mol_type = other DNA
gcgcttatatcgtttccccggttctgttttgaccgattaccggatactgaaaaattacgccaaaacgctgacagt

SEQ ID NO: 589491 - DNA, 75 bp, synthetic construct
  source 1..75: mol_type = other DNA
atgaataaagcatttgaacgatgggtccaccagcgttacggcaatcactatgacctgacgcgagatggtgacggt

SEQ ID NO: 589492 - DNA, 75 bp, synthetic construct
  source 1..75: mol_type = other DNA
atgagcggaacctatagttttattgacgtctcggcatccctgacgggcccaaccggcagtatcgatctgggctac

SEQ ID NO: 589493 - DNA, 75 bp, synthetic construct
  source 1..75: mol_type = other DNA
tctctgcatccctgacgggcccgaccggcagtatcgatctgggttacggctcggcgaactccgaagaggggatca

SEQ ID NO: 589494 - DNA, 75 bp, synthetic construct
  source 1..75: mol_type = other DNA
atggtcgatacagaaatttggctgcgtctgatgggcatcagcagcttgtacggcgatgatatggttcgtatcgct

SEQ ID NO: 589495 - DNA, 75 bp, synthetic construct
  source 1..75: mol_type = other DNA
tcgccatgcccgactggctaccagtttgcttgaacatggtggggcacttgtctcggaatttcccctcgatgttcc

SEQ ID NO: 589496 - DNA, 75 bp, synthetic construct
  source 1..75: mol_type = other DNA
atgaataaagcatttgaacgatggatacgccagcgttacggcaatcgctatgatctgacgcgagatgttgacggt

SEQ ID NO: 589497 - DNA, 75 bp, synthetic construct
  source 1..75: mol_type = other DNA
tcgccgtaaagcggcaggacttcccgcatttaccgtcatgtcatgtgacaacatgccagaaaacggtcatgttat

SEQ ID NO: 589498 - DNA, 75 bp, synthetic construct
  source 1..75: mol_type = other DNA
ctatttgttgagctggacggtaatgccgctgctgtttttctctgtcgccaaaggcaaattacccacctatattct

SEQ ID NO: 589499 - DNA, 75 bp, synthetic construct
  source 1..75: mol_type = other DNA
gctggcatccggcgactggattgtgccccatctgttagggctacgttatttcgaaaaacccattgccggatactg

SEQ ID NO: 589500 - DNA, 75 bp, synthetic construct
  source 1..75: mol_type = other DNA
atgtttgagtttaatatggcagaacttcttctccaccgctgggggcgtctgcgcttatatcgttcccccggttct

SEQ ID NO: 589501 - DNA, 75 bp, synthetic construct
  source 1..75: mol_type = other DNA
cattctttgcgtttattgccgtctattatctgttgccgatcaacattcgcctgctctggcaacctgatgaaacgc

SEQ ID NO: 589502 - DNA, 75 bp, synthetic construct
  source 1..75: mol_type = other DNA
tggaaaaaccgcaagcattccgcaaccgtctatttgttgagctggacgataatgccgctgctgtttttctccgtc

SEQ ID NO: 589503 - DNA, 75 bp, synthetic construct
  source 1..75: mol_type = other DNA
ttgccgcaggtctggcatggagcctgcaacgcgatgacatcatcatgtatcgccagacaggtgagttgaaatacg

SEQ ID NO: 589504 - DNA, 75 bp, synthetic construct
  source 1..75: mol_type = other DNA
agcaaattgccgatttacaacagcaagataatctttataccgttgcggaaatgtcggccgatgcgtggacggctc

SEQ ID NO: 589505 - DNA, 75 bp, synthetic construct
  source 1..75: mol_type = other DNA
atgcgtggaccgctcgcgtcgttggcgtcgtgaaaaaggcgctgcacgtacaaattgatggcttagaagccgtgc

SEQ ID NO: 589506 - DNA, 75 bp, synthetic construct
  source 1..75: mol_type = other DNA
ggcatctggaacatgacagcacgttcgatctgttggcgctgggtgtcgctggttggatgcgttatgttggcggtg

SEQ ID NO: 589507 - DNA, 75 bp, synthetic construct
  source 1..75: mol_type = other DNA
aacacctccgccttcgctggatgcgcctgcggttgtaccggttttccggttctgtcgtgactgattaccgaatac

SEQ ID NO: 589508 - DNA, 75 bp, synthetic construct
  source 1..75: mol_type = other DNA
agctcagaaaactttcgttgtgaatggtgtgctcggatatgaagcgcaactggttaatgccgtaatcagtactcg

SEQ ID NO: 589509 - DNA, 75 bp, synthetic construct
  source 1..75: mol_type = other DNA
gtcttcgccgccgctgggtgcgcctgcgcttatatcgttttcctagttctgttttgaccgattaccggatactga

SEQ ID NO: 589510 - DNA, 75 bp, synthetic construct
  source 1..75: mol_type = other DNA
agcaagatgccggggaaaactggatcagtgctttccgtgaacgtattgagcaggcacaaagcaccggagaaacaa

SEQ ID NO: 589511 - DNA, 75 bp, synthetic construct
  source 1..75: mol_type = other DNA
cgttcgcgtccgtttgctgctggatgacaataatactcccggtcttgatgatattttacgcttgctcgatagtca

SEQ ID NO: 589512 - DNA, 75 bp, synthetic construct
  source 1..75: mol_type = other DNA
cgacgatcgcagcattcagcgtctgttgcaggaagtggattccgaatcgctgttgatcgcgctgaaaggggccga

SEQ ID NO: 589513 - DNA, 75 bp, synthetic construct
  source 1..75: mol_type = other DNA
aacattatgggccgatgatcctcgtcagcagcttgcctatctggcactcaaacgctgggcgcgcctttattgccc

SEQ ID NO: 589514 - DNA, 75 bp, synthetic construct
  source 1..75: mol_type = other DNA
cacgatcgcggtataactggtaattccggcgcaagccttcatgctaaaacattcagtgtcgatggcaaaatagtg

SEQ ID NO: 589515 - DNA, 75 bp, synthetic construct
  source 1..75: mol_type = other DNA
ggggaagagctccttttttctgatttagatgtcatggctataggtccggtcgtagaggacgttgcggatgatttt

SEQ ID NO: 589516 - DNA, 75 bp, synthetic construct
  source 1..75: mol_type = other DNA
cttgcttgacagtcatccacgcattgaagtccggctttttaatcctttctcgtttcgcttgctgcgtccgcttgg

SEQ ID NO: 589517 - DNA, 75 bp, synthetic construct
  source 1..75: mol_type = other DNA
cgatcccaccggtacacccaccatctgttacggccataccggcccggatgtgaaaccgggtatgaccctgacaga

SEQ ID NO: 589518 - DNA, 75 bp, synthetic construct
  source 1..75: mol_type = other DNA
gcttacccgtggtcagacggtggcgctggcctcctggattttctgggccggtggaacgaactttcgcaactccac

SEQ ID NO: 589519 - DNA, 75 bp, synthetic construct
  source 1..75: mol_type = other DNA
tggggcaatgataaaaactcaaactgtattgtcgagtacaagcttcctgaagtttctcctggtaccttactgaac

SEQ ID NO: 589520 - DNA, 75 bp, synthetic construct
  source 1..75: mol_type = other DNA
actgcgcgcgcagaatctgaatgtgcatctgattggtcgggcaacgaaaaccaaaatcgagctggatcaagatta

SEQ ID NO: 589521 - DNA, 75 bp, synthetic construct
  source 1..75: mol_type = other DNA
cagatgcccgcgtcctgtaagcagtatatccgctggatttattcgaagggggtgaaactccccggtcttgaggcc

SEQ ID NO: 589522 - DNA, 75 bp, synthetic construct
  source 1..75: mol_type = other DNA
tgttacggccataccggcccggatgtgaaaccggggatgacaaaaactgatgaagagtgtctggagctgctggaa

SEQ ID NO: 589523 - DNA, 75 bp, synthetic construct
  source 1..75: mol_type = other DNA
tttagcatcgatggtaaaacggtgtttatcggctctttcaatttcgatccgcgttcaacattgctcaatactgaa

SEQ ID NO: 589524 - DNA, 75 bp, synthetic construct
  source 1..75: mol_type = other DNA
tatctgaaactcgcgcgcaccaatgcggcgacggccttaaccagcaaactttcgcagcaatctaccgttcaccag

SEQ ID NO: 589525 - DNA, 75 bp, synthetic construct
  source 1..75: mol_type = other DNA
gggcgaaggtcaaaaataccagttccctggaaaccattgaaggcgtcgggccaaaacgtcggcaaatgttgttga

SEQ ID NO: 589526 - DNA, 75 bp, synthetic construct
  source 1..75: mol_type = other DNA
ggtaaggacgatcaggtcattacccaattgatttctcgcatggaaaaggccagtcagaatctggagtttgaagag

SEQ ID NO: 589527 - DNA, 75 bp, synthetic construct
  source 1..75: mol_type = other DNA
ataaaagcggcacggtaaccgtcaacctgctgaagacctcgccgacaaacaaaaagctgtcgctggcgtacaacg

SEQ ID NO: 589528 - DNA, 75 bp, synthetic construct
  source 1..75: mol_type = other DNA
cggcacgcagtgttgcgttccagaaacaaccggataatgccaacgctaaaaccggtaatacgatgccgtgggtgt

SEQ ID NO: 589529 - DNA, 75 bp, synthetic construct
  source 1..75: mol_type = other DNA
ccgacaaataaaaaattgtcgctggcgtataacgcacagagccagtcttctgccacatgggggaataacgttatc

SEQ ID NO: 589530 - DNA, 75 bp, synthetic construct
  source 1..75: mol_type = other DNA
atgcgtgttgagatctgtatcgctaaagaaaaaatcagcaaaatgccaaaaggttctgttcctgccctgcaacag

SEQ ID NO: 589531 - DNA, 75 bp, synthetic construct
  source 1..75: mol_type = other DNA
gctcatcagtcgcttcgcaccacacaaagtcctggccgcctacgcattaatcgctatggcactgtgcctgatctc

SEQ ID NO: 589532 - DNA, 75 bp, synthetic construct
  source 1..75: mol_type = other DNA
gcaccactgataaagatttagctaaaacttttgttcaggaaactctgaaagatacctgggagtctgctgacgagt

SEQ ID NO: 589533 - DNA, 75 bp, synthetic construct
  source 1..75: mol_type = other DNA
attcgccagtgtgaaaatagcgtttatcgcaaccgctcgcgtccgtgtctgcaatatcagatagggcgctgtctg

SEQ ID NO: 589534 - DNA, 75 bp, synthetic construct
  source 1..75: mol_type = other DNA
aacacaactacatcaaactctatcagccgcgttacaacgttttgctacgcgatgataaatcttatccttttatct

SEQ ID NO: 589535 - DNA, 75 bp, synthetic construct
  source 1..75: mol_type = other DNA
gaagctctgctgctggaacacaactacatcaaactctatcagccgcgttacaacgttctgttacgcgatgataaa

SEQ ID NO: 589536 - DNA, 75 bp, synthetic construct
  source 1..75: mol_type = other DNA
cccggtgagtggatgtcgctggtcggtctgaatgccgatgattttccgccagccaatgaaccggtacttgcgaag

SEQ ID NO: 589537 - DNA, 75 bp, synthetic construct
  source 1..75: mol_type = other DNA
ggattaccccacaacatttttcgctatttgaaaaactggaatatgaattcccggacaggcatataactctgtggt

SEQ ID NO: 589538 - DNA, 75 bp, synthetic construct
  source 1..75: mol_type = other DNA
atgaaaagaagtgaaatcaggaaagcactggaagcatggtttgatgtggaacgctatgaggcgatagagaaactc

SEQ ID NO: 589539 - DNA, 75 bp, synthetic construct
  source 1..75: mol_type = other DNA
gaccggcactgacaaggttcagatgcttagcctccaccagcttagtgaaaaggcggcaaagaccatgctggcctt

SEQ ID NO: 589540 - DNA, 75 bp, synthetic construct
  source 1..75: mol_type = other DNA
gacgaatgcgagctatctgaaatcgcttgaagattacatgatggaaaacaatcacttgaaagactcccccctgtt

SEQ ID NO: 589541 - DNA, 75 bp, synthetic construct
  source 1..75: mol_type = other DNA
gtgcgggagcttcaggaagaagtcgggattacgccacaacgtttttcgctgtttgaaaagctggaatatcagttc

SEQ ID NO: 589542 - DNA, 75 bp, synthetic construct
  source 1..75: mol_type = other DNA
tttcacgcattactgtcgatattcatctggaagaagcatcaaccgaagagatcattgaacatctgaaagtgctga

SEQ ID NO: 589543 - DNA, 75 bp, synthetic construct
  source 1..75: mol_type = other DNA
gtgatgagcttagaggcatgaagcacagactatctttaagcgagtctgtgaaaatcgcccgcaatgttcgctcac

SEQ ID NO: 589544 - DNA, 75 bp, synthetic construct
  source 1..75: mol_type = other DNA
gtgaggaattaaaaaaattgcgacttactttaagtaagtcacaaaatcccatctctcccaaaacccgctccctca

SEQ ID NO: 589545 - DNA, 75 bp, synthetic construct
  source 1..75: mol_type = other DNA
accttacagcagttttatgttgaggttgagcggcgcatcttggcttacagaatgttgttgagcaggaacaccata

SEQ ID NO: 589546 - DNA, 75 bp, synthetic construct
  source 1..75: mol_type = other DNA
gcgaaaacgctggcattaaccgaagccacgcctgagctttccgcgttaagtgaatccgaatttctgtccgagtat

SEQ ID NO: 589547 - DNA, 75 bp, synthetic construct
  source 1..75: mol_type = other DNA
tatcgctttggtaaaagcacattcaggaaaatcattgaataccgccttatacccatgatggatctcattttctgg

SEQ ID NO: 589548 - DNA, 75 bp, synthetic construct
  source 1..75: mol_type = other DNA
ttttcagaatattaatgagggtaatactaatataaaagatgcaattcttaattcattaatacacaatgtacaatc

SEQ ID NO: 589549 - DNA, 75 bp, synthetic construct
  source 1..75: mol_type = other DNA
taaggtggccggagccgtggatgttgatgtggggggaaccctgactgaaaagattgctgcattacgtaaatcggt

SEQ ID NO: 589550 - DNA, 75 bp, synthetic construct
  source 1..75: mol_type = other DNA
agaccgatcagaccatcagcgaaacatcgatggcgcggacggttaaagccgatacggaacagcgtgatttggtca

SEQ ID NO: 589551 - DNA, 75 bp, synthetic construct
  source 1..75: mol_type = other DNA
acctttcaacggatgaagttcacctggcggatgccagcctggtgctggagctgaacagctgcggccggggattta

SEQ ID NO: 589552 - DNA, 75 bp, synthetic construct
  source 1..75: mol_type = other DNA
gcattcagagccagtaaaaagcggtaactttgccgatcccttccggccacgttacgccgtggacgtgcaactgct

SEQ ID NO: 589553 - DNA, 75 bp, synthetic construct
  source 1..75: mol_type = other DNA
ggtggatgccagcctggtactggagctgaacagctgcggccggggcttcatcaccgcagagacaacaaccgatta

SEQ ID NO: 589554 - DNA, 75 bp, synthetic construct
  source 1..75: mol_type = other DNA
aaccaatgccggagcatttacccagacggcgacaaaggccggacagacccggagcaagtaccagaacatcattgc

SEQ ID NO: 589555 - DNA, 75 bp, synthetic construct
  source 1..75: mol_type = other DNA
aagcgatgctggtgaaaatgggctttgaaggtgccgtgatccaaagtgtcaatctggaaacgggtgtgattcaga

SEQ ID NO: 589556 - DNA, 75 bp, synthetic construct
  source 1..75: mol_type = other DNA
cagactgtttatgtttttgatgaatggcaagccagatctcttacagataatattgagtatatagatatcggtatt

SEQ ID NO: 589557 - DNA, 75 bp, synthetic construct
  source 1..75: mol_type = other DNA
ttgtctggagattcagggggccagtctaaaaaggaacagcttaatattaccgcatggaaagatctcagtaagtac

SEQ ID NO: 589558 - DNA, 75 bp, synthetic construct
  source 1..75: mol_type = other DNA
ttacgggagaacggcatcctgatagcgtccggtggacgtaaaaatgtgccgttccagcaatacatcaacgccggg

SEQ ID NO: 589559 - DNA, 75 bp, synthetic construct
  source 1..75: mol_type = other DNA
aaaaaccagttcgcaacaatgatttcattgccagagttaaggatgagcttgaaggagaaacctacgaaattttcg

SEQ ID NO: 589560 - DNA, 75 bp, synthetic construct
  source 1..75: mol_type = other DNA
tacatggactgtacctgttgcatttttctttttagtattgctggctggtatagtattcaatattggcaggaagag

SEQ ID NO: 589561 - DNA, 75 bp, synthetic construct
  source 1..75: mol_type = other DNA
ctctggaacggtttaaattttatctggagcaacacggctggctcgttgcccgtaaagaacaactggtggaaaggc

SEQ ID NO: 589562 - DNA, 75 bp, synthetic construct
  source 1..75: mol_type = other DNA
acgcgggtgccattatggtgctgttcgtgttcgtggtgatgatgctcaacctgggcggttcggaaatcgaacagg

SEQ ID NO: 589563 - DNA, 75 bp, synthetic construct
  source 1..75: mol_type = other DNA
aggatctggaaattgtggtgccggttagcccgtgggaagcggcgctgggtgctaaagtcaccgttccaacactga

SEQ ID NO: 589564 - DNA, 75 bp, synthetic construct
  source 1..75: mol_type = other DNA
ctgaaaggccaggggacgccgggcgaaaacggcggtccaaatggcgatttgtggctggtgattcatattgcgcca

SEQ ID NO: 589565 - DNA, 75 bp, synthetic construct
  source 1..75: mol_type = other DNA
gggctgtggcgtcaccaccggcattggcgcagtacacaacaccgctaaagttcaacctggtgattccgttgccgt

SEQ ID NO: 589566 - DNA, 75 bp, synthetic construct
  source 1..75: mol_type = other DNA
ccgcaaggggcagtaattacagttagcacaaatcgagggatcgctcatcttcgttatagacgtttgagcaaccgc

SEQ ID NO: 589567 - DNA, 75 bp, synthetic construct
  source 1..75: mol_type = other DNA
tggtaccggggcggtgctggaactggccacgcttcaggcgctggaagcacagcgctttagtgtaccgatgtggta

SEQ ID NO: 589568 - DNA, 75 bp, synthetic construct
  source 1..75: mol_type = other DNA
cgggccgccgcgtgctggcctatggagaagcaaagcgcggcaaatatggtgcggagatgatccacccggaatacc

SEQ ID NO: 589569 - DNA, 75 bp, synthetic construct
  source 1..75: mol_type = other DNA
agcgcctggcgcgacatattcacgaacgttacccacaacaagcaaaagccctgatagaacgctggatgccggaga

SEQ ID NO: 589570 - DNA, 75 bp, synthetic construct
  source 1..75: mol_type = other DNA
gtcaggcgtactgggtgtgcacactcattgaagagtcagagttactggaagcgcaggcggcggaagctacctggg

SEQ ID NO: 589571 - DNA, 75 bp, synthetic construct
  source 1..75: mol_type = other DNA
tgcacaacgttttcatgcccagccgctgagcgccaatgacgcgctgaaaaataaactcctcgccgccttaccgtt

SEQ ID NO: 589572 - DNA, 75 bp, synthetic construct
  source 1..75: mol_type = other DNA
gcgcaggcagcggaagctacctgggaagagttgagattggcgttgccggaactgaacgttggcctggtacatggg

SEQ ID NO: 589573 - DNA, 75 bp, synthetic construct
  source 1..75: mol_type = other DNA
agtactgaactgcaatatctccttcggcggtcgccggatgatgacctgtcagattagcgacggttccggcattct

SEQ ID NO: 589574 - DNA, 75 bp, synthetic construct
  source 1..75: mol_type = other DNA
atacctttgagtgcatcggcaacgtcaatgtgatgcgcgcggcgttggaaagtgctcaccgtggctggggtcagt

SEQ ID NO: 589575 - DNA, 75 bp, synthetic construct
  source 1..75: mol_type = other DNA
ccggacgcgccattatccccgccaatatcaatcatccggaatctgagccaatgatcattggtcgcaactttctgg

SEQ ID NO: 589576 - DNA, 75 bp, synthetic construct
  source 1..75: mol_type = other DNA
gcgcagacctccaaaatttgaaaatctctttaagggattttcaaacgatcgccccaaatgtccgaaagctcatcc

SEQ ID NO: 589577 - DNA, 75 bp, synthetic construct
  source 1..75: mol_type = other DNA
tctggaacggtttaaattttatctggagcaatacggctggatcgttgcccgtaaagagcaactggtggaacgact

SEQ ID NO: 589578 - DNA, 75 bp, synthetic construct
  source 1..75: mol_type = other DNA
ccatcatcaggaaaatttcctctatcaacacttccgcgaaatttgtgaaatctgtgccgcttatgacgtttcgct

SEQ ID NO: 589579 - DNA, 75 bp, synthetic construct
  source 1..75: mol_type = other DNA
gcgtcttgacgccaaaacgcgccaaagcaggccgccgcgtcacacagctgcactacgcccgccggggcatcatca

SEQ ID NO: 589580 - DNA, 75 bp, synthetic construct
  source 1..75: mol_type = other DNA
gcgtattaacgccaaaacgcgccaaagcaggccaccgcgtcacacaattgcactacgcccgtcaaggcatcatca

SEQ ID NO: 589581 - DNA, 75 bp, synthetic construct
  source 1..75: mol_type = other DNA
ctttgattatcttcctggcgattgccgcggcgttgctatggcaactggcgcgtaatgctgaaggagacgatccga

SEQ ID NO: 589582 - DNA, 75 bp, synthetic construct
  source 1..75: mol_type = other DNA
ccggcatcgtggatgaatacgcagaaaagatggttaagtttgccggtatcgttcgcgatggatacgaagaacacc

SEQ ID NO: 589583 - DNA, 75 bp, synthetic construct
  source 1..75: mol_type = other DNA
gcataccatgagtctggatgaaattaatgacgcctttgaattaatgcatgaaggcaaatccattcgcaccgtcat

SEQ ID NO: 589584 - DNA, 75 bp, synthetic construct
  source 1..75: mol_type = other DNA
tgggcgacctggtgtccgacctgccgcgcggaacatcaatatctgaatcagctttctgcgcagggcatccgcgta

SEQ ID NO: 589585 - DNA, 75 bp, synthetic construct
  source 1..75: mol_type = other DNA
atgaagcgcaaagtattgttaattcctttgattatcttcctggcgattgccgcagcattgctgtggcagctggcg

SEQ ID NO: 589586 - DNA, 75 bp, synthetic construct
  source 1..75: mol_type = other DNA
agagctgggcaatccttacgcgctaagcctgtttgatggcgacggcatgttagggctggatctcggtgtctatgg

SEQ ID NO: 589587 - DNA, 75 bp, synthetic construct
  source 1..75: mol_type = other DNA
aaatactggctatacgatgaataaagccagcaaagatttgagttatgttgggggttatgccagctatgaatcacc

SEQ ID NO: 589588 - DNA, 75 bp, synthetic construct
  source 1..75: mol_type = other DNA
accgacggtggttttgtattgcatagcggcggcctgaccttcagcaatgacagttttagcgactccgatacactg

SEQ ID NO: 589589 - DNA, 75 bp, synthetic construct
  source 1..75: mol_type = other DNA
ttgaaattgaaggaaaaaaaaaacgcacaagcctgtatcacacttaagaatttattgcagtttcatataaattct

SEQ ID NO: 589590 - DNA, 75 bp, synthetic construct
  source 1..75: mol_type = other DNA
tcattaccggatgcgtgcggagttccgcatctggcacgatggcgatgacctgtaccacatcattttcgatcaaca

SEQ ID NO: 589591 - DNA, 75 bp, synthetic construct
  source 1..75: mol_type = other DNA
ccgcaaggggcggtaattaccgttagcacaaatagggggatcgctcatcttcgttatagacgtttgagcaaccgc

SEQ ID NO: 589592 - DNA, 75 bp, synthetic construct
  source 1..75: mol_type = other DNA
agaattatcaaaactatgttgatccttcattgtgggaagacggtattaacgccgccatgctgtcttacaacatca

SEQ ID NO: 589593 - DNA, 75 bp, synthetic construct
  source 1..75: mol_type = other DNA
gcagaatgcatctaatattgatctcagccggtacagtgaaggtaaccccgctataccgggtgtttacgacgtcag

SEQ ID NO: 589594 - DNA, 75 bp, synthetic construct
  source 1..75: mol_type = other DNA
ccgggttgttaggtcttggtctgaatacctcagtcggtgcgttttctttcgatgtaactcactccaatgttagta

SEQ ID NO: 589595 - DNA, 75 bp, synthetic construct
  source 1..75: mol_type = other DNA
aacctgtcagttgtcttgcccattatcaacaaaatgcagagccagaaaaaatagcacaaacgcttattatcaatg

SEQ ID NO: 589596 - DNA, 75 bp, synthetic construct
  source 1..75: mol_type = other DNA
agatatttatgatgagcaaggcaatgtcattggtaatgttggacagggtggacaagcatttgttcgtggtattga

SEQ ID NO: 589597 - DNA, 75 bp, synthetic construct
  source 1..75: mol_type = other DNA
gtcagttatagcgtaaatactggctatacgatgaataaagccagcaaagatttgagttatgttgggggttatgcc

SEQ ID NO: 589598 - DNA, 75 bp, synthetic construct
  source 1..75: mol_type = other DNA
gagtcttatacgacgggcgaaacctttgattccgtcagtatccgaggcattcgtttatacagtgacagccgcatg

SEQ ID NO: 589599 - DNA, 75 bp, synthetic construct
  source 1..75: mol_type = other DNA
atgaatcaaatcgaccgtttgctcaccatcatgcagcgcctgcgcgacctggaaaacggctgcccgtgggataaa

SEQ ID NO: 589600 - DNA, 75 bp, synthetic construct
  source 1..75: mol_type = other DNA
tccgcctccatgccgagttccgcccggatcagggggcgaaaatcctcgaaactctggcagaaatcaagaaactgg

SEQ ID NO: 589601 - DNA, 75 bp, synthetic construct
  source 1..75: mol_type = other DNA
tcgcttactacagcgaaaaacagaaacagcacctctacagcatcagcgacgaacaactgcgtccgtacttcccgg

SEQ ID NO: 589602 - DNA, 75 bp, synthetic construct
  source 1..75: mol_type = other DNA
cgtaccgcgacctgcgcgatggcgatcattacgccacgctgaacacggcgcagaagaaagcggttgataacgccc

SEQ ID NO: 589603 - DNA, 75 bp, synthetic construct
  source 1..75: mol_type = other DNA
attattgatacccttcctaccgccacaggaggcacgccatttcagcgcgaagtctggaaaacactgcgcactatc

SEQ ID NO: 589604 - DNA, 75 bp, synthetic construct
  source 1..75: mol_type = other DNA
agtgtggaaaacattgcgcacaataccctgcggccaggtgatgcattacggtcaacttgccgaacaactggggcg

SEQ ID NO: 589605 - DNA, 75 bp, synthetic construct
  source 1..75: mol_type = other DNA
gcggccaccgttcttatcatcgtgagtgctatcgcatggatcgctcatatgctcccggcgagctgggcggttcgt

SEQ ID NO: 589606 - DNA, 75 bp, synthetic construct
  source 1..75: mol_type = other DNA
tgatgtactcatccatcggataacccagccgacccttcagcaacaacgattacaacttactccgattctgatgga

SEQ ID NO: 589607 - DNA, 75 bp, synthetic construct
  source 1..75: mol_type = other DNA
tcaaccagttaatgacggcaatgattgcgggtgtgcgtaataatcccgctctgcgcaacaagctgttccagattg

SEQ ID NO: 589608 - DNA, 75 bp, synthetic construct
  source 1..75: mol_type = other DNA
tatggatggacgaagaacccgtgccgatgaataaggacctggtcgccaccctgacagaattgtgtgaaagtgaaa

SEQ ID NO: 589609 - DNA, 75 bp, synthetic construct
  source 1..75: mol_type = other DNA
ggctggaccaaactcgttaccgacgaagcggagctggcggggatgccagaaagcgcgctggctgcggcaaaagcc

SEQ ID NO: 589610 - DNA, 75 bp, synthetic construct
  source 1..75: mol_type = other DNA
tcattacgccacgctgaacacggcgcagaagaaagcggttgataacgcactgcgcgacttcgaactctctggcat

SEQ ID NO: 589611 - DNA, 75 bp, synthetic construct
  source 1..75: mol_type = other DNA
ttgatgtctggcatccggatgtccgtttcttcgaactgtatgacgagaacaacgaactgcgcggcagcttctacc

SEQ ID NO: 589612 - DNA, 75 bp, synthetic construct
  source 1..75: mol_type = other DNA
aactcctggggacagaacaccgtgattcaggtttccagaatattgacactcagctaaacagcgattttaaaggta

SEQ ID NO: 589613 - DNA, 75 bp, synthetic construct
  source 1..75: mol_type = other DNA
ctatgaaggtggtatcaaggcgtttgtcgagtatctgaacaagaacaaaacgccaatccacccgaatatcttcta

SEQ ID NO: 589614 - DNA, 75 bp, synthetic construct
  source 1..75: mol_type = other DNA
gcgccaccggtgacgatgcgcgtgaaggcctgattgcggtcgtttccgtgaaagtaccggacccgaaattctcct

SEQ ID NO: 589615 - DNA, 75 bp, synthetic construct
  source 1..75: mol_type = other DNA
gtgactcttacaccaaagctgacaactatatgaccggtcgtgcaaacggcgtggcgacctaccgtaatacagatt

SEQ ID NO: 589616 - DNA, 75 bp, synthetic construct
  source 1..75: mol_type = other DNA
tgttcgagccgattgttcgcgtgcgtacccacggcgtggatactgactatccgctggatcacgagtttatcaccg

SEQ ID NO: 589617 - DNA, 75 bp, synthetic construct
  source 1..75: mol_type = other DNA
gatgcgattgctgccgaccagttgttcaccacgctgatgggcgacgccgttgaaccgcgccgtgcgtttattgaa

SEQ ID NO: 589618 - DNA, 75 bp, synthetic construct
  source 1..75: mol_type = other DNA
ttccgaactgtaccttgtggaaggggactctgcgggcggctctgcaaaacaggggcgtaaccgcaagaaccaggc

SEQ ID NO: 589619 - DNA, 75 bp, synthetic construct
  source 1..75: mol_type = other DNA
gaagcgccaagcgaggatgtttcagggggggatattgccgatccattccgcccacgctatgccgtggatctctag

SEQ ID NO: 589620 - DNA, 75 bp, synthetic construct
  source 1..75: mol_type = other DNA
gctacgcggtgaatctccagctgcttgacgagaacggcaacccggcagcggatacgcccgtttataacgccgttc

SEQ ID NO: 589621 - DNA, 75 bp, synthetic construct
  source 1..75: mol_type = other DNA
cgctgccggtaccaatggccgggaatgattcaggtatgtttcagttcccgcctgaagggacgctggttgaggtcg

SEQ ID NO: 589622 - DNA, 75 bp, synthetic construct
  source 1..75: mol_type = other DNA
aatcaacctgcttgatgacgatgataacttctactcagcaaacggtatttctaccgatgatatcgttgctttagg

SEQ ID NO: 589623 - DNA, 75 bp, synthetic construct
  source 1..75: mol_type = other DNA
gcacctctggtgcgacgaaaaaagcactggcatcccgatgtgctgaaagagattcgacgcctcaggacagagctg

SEQ ID NO: 589624 - DNA, 75 bp, synthetic construct
  source 1..75: mol_type = other DNA
ccggtcgatatcccggcagagttcagccagggtgctgctggcggtaattccatgacgctgccggtgatccagagt

SEQ ID NO: 589625 - DNA, 75 bp, synthetic construct
  source 1..75: mol_type = other DNA
gattctgccgttgaagggtaaaatcctcaacgtcgagaaagcccgtttcgataagatgctggcttcccaggaagt

SEQ ID NO: 589626 - DNA, 75 bp, synthetic construct
  source 1..75: mol_type = other DNA
caaaatggctatggcgcaacccgtctgaggattgtgaatcgctccgtgggaaccgtggtcgggttaatcattgca

SEQ ID NO: 589627 - DNA, 75 bp, synthetic construct
  source 1..75: mol_type = other DNA
gttgccagcctgatgggcaccgcgctgcatttgccgaaatcctattggatattaatgacggtattgttggtgacg

SEQ ID NO: 589628 - DNA, 75 bp, synthetic construct
  source 1..75: mol_type = other DNA
ccaacggctgcgagcgtatggccatgacgctgtcgggctataacggcggtctgggctgggtacagcgggacaaga

SEQ ID NO: 589629 - DNA, 75 bp, synthetic construct
  source 1..75: mol_type = other DNA
cgcatgaaaaatcaggttacggtcagtattaaccaaccgctgaaatttgagaaaaaagattacggctccttttat

SEQ ID NO: 589630 - DNA, 75 bp, synthetic construct
  source 1..75: mol_type = other DNA
ggcaattgccttaatttgacggaaattatccctcaggcttctgttcgttatgacgttaacgagcaacgtctggat

SEQ ID NO: 589631 - DNA, 75 bp, synthetic construct
  source 1..75: mol_type = other DNA
ctgcaaaaaatcgcccgccaacacccggataatccggttgggcaattctgctactggcatttcagccgcatcgct

SEQ ID NO: 589632 - DNA, 75 bp, synthetic construct
  source 1..75: mol_type = other DNA
gtcatggacccgtctggcatttgccggactgaaatttgcagattacggttctttcgattacggacgtaattatgg

SEQ ID NO: 589633 - DNA, 75 bp, synthetic construct
  source 1..75: mol_type = other DNA
acaaaatcaacctgctggacgacaaccgcttcacccgtgacgctggcatcaacactgatgacatcgtagctctgg

SEQ ID NO: 589634 - DNA, 75 bp, synthetic construct
  source 1..75: mol_type = other DNA
cttaaccctgcaatatcaagggaaaaacgaaaaccgcgatgttaaaaagcaaaacggcgatggcttcggcacgtc

SEQ ID NO: 589635 - DNA, 75 bp, synthetic construct
  source 1..75: mol_type = other DNA
ttattctgttcgcctttggtctgggcgtaaccgccatcagacacggagaaccacgtaacgataaatacagcttct

SEQ ID NO: 589636 - DNA, 75 bp, synthetic construct
  source 1..75: mol_type = other DNA
tgattattttcgttcttttcccgcttaacgcctctgaaccgccgcgagcctctctggcatggcgaaacgaactaa

SEQ ID NO: 589637 - DNA, 75 bp, synthetic construct
  source 1..75: mol_type = other DNA
gaaaatcgtcactacccgaagatgatcctctatcaacatgccgcccgctacttactctggggacaggcaagctgt

SEQ ID NO: 589638 - DNA, 75 bp, synthetic construct
  source 1..75: mol_type = other DNA
ccgcatctgttggggttgcgttatttcgaaaagccgattgccggatactggatcaacagtattgggcaatggttg

SEQ ID NO: 589639 - DNA, 75 bp, synthetic construct
  source 1..75: mol_type = other DNA
gggcaggtatcaccatctaactatagtaattttgattcccgttatgtacgcgatatccggcttgggactcgagtt

SEQ ID NO: 589640 - DNA, 75 bp, synthetic construct
  source 1..75: mol_type = other DNA
tatgacctggctaacgggaaatataccgcacaggacgctaccacagcgcgaaaaggtcttgtccagctcagtagt

SEQ ID NO: 589641 - DNA, 75 bp, synthetic construct
  source 1..75: mol_type = other DNA
tcagtgctaatggtctgcgcattgcttatggcaattatggattctttatcaggaatgatggcagcagcacttatt

SEQ ID NO: 589642 - DNA, 75 bp, synthetic construct
  source 1..75: mol_type = other DNA
acggtactaaaacgaccagttcatttgattacggcacaaaaaccacaaatagcgcaggagctcattcacacaata

SEQ ID NO: 589643 - DNA, 75 bp, synthetic construct
  source 1..75: mol_type = other DNA
gctgcgttaggtactggtaccacgtcgagcgcaggagggcatgctcacaatgtatatatcggtgcccataaccac

SEQ ID NO: 589644 - DNA, 75 bp, synthetic construct
  source 1..75: mol_type = other DNA
taccgggcttggtattgtcggtgaagtcgatggtgatgaccccgcagtattcagaccaatacaaaaatacatcaa

SEQ ID NO: 589645 - DNA, 75 bp, synthetic construct
  source 1..75: mol_type = other DNA
gatattccgggaaaggatactttcacgaaaaatattggtgcctgtcgtgcttatagcggcgctttgagcaccgaa

SEQ ID NO: 589646 - DNA, 75 bp, synthetic construct
  source 1..75: mol_type = other DNA
agagcacgttgggttacccccttttgcgatgggcatcgtttttgctctggttacactggctgcagctgtcattat

SEQ ID NO: 589647 - DNA, 75 bp, synthetic construct
  source 1..75: mol_type = other DNA
tttacccatttcctgaaaggaatggggacagcatttaccggcgtggtgggcttactggtggccgcaggtgtgttt

SEQ ID NO: 589648 - DNA, 75 bp, synthetic construct
  source 1..75: mol_type = other DNA
ggtgcatttaatcatccgtactggatgtgcaaaggctcctggtcatatgcaaataacaaaatcattacggatacc

SEQ ID NO: 589649 - DNA, 75 bp, synthetic construct
  source 1..75: mol_type = other DNA
tgaccattcgtgtgaccactccgagtacatcaagcagtggtggtaccaccagtgcgcaattcacgtatatcaatc

SEQ ID NO: 589650 - DNA, 75 bp, synthetic construct
  source 1..75: mol_type = other DNA
tctatacgtcaaaagattcagttcccggcgtcaatgctaaaggggatcaggatacctctggtaatgcggctacag

SEQ ID NO: 589651 - DNA, 75 bp, synthetic construct
  source 1..75: mol_type = other DNA
tatgatcttgctaacgggaaatataccgcgcaggatgccaccacagcgcgaaaaggccttgtccagctcagtagc

SEQ ID NO: 589652 - DNA, 75 bp, synthetic construct
  source 1..75: mol_type = other DNA
ctttaataaaggcgaaacagcgatgaccatcaacggcccgtgggcatggtccaacatcgacaccagtaaagtgaa

SEQ ID NO: 589653 - DNA, 75 bp, synthetic construct
  source 1..75: mol_type = other DNA
acattattttctgggcgcacgaccgctttggcggctatgcccaatctggcctgttggctgaaatctccccagaca

SEQ ID NO: 589654 - DNA, 75 bp, synthetic construct
  source 1..75: mol_type = other DNA
tggataacgctggcgcgaaagcgggtctgaccttcctggttgatctgattaaaaacaaacacatgaatgcagaca

SEQ ID NO: 589655 - DNA, 75 bp, synthetic construct
  source 1..75: mol_type = other DNA
aggtcccgcattcctgcggagtgtatagagaaaatagaagccattcttaaggagcttgagaaaccaggagtctga

SEQ ID NO: 589656 - DNA, 75 bp, synthetic construct
  source 1..75: mol_type = other DNA
ttaccgaagatgctctggatgatctcataccttcatttttactgaccggtcagcagactccagctttcggccgcc

SEQ ID NO: 589657 - DNA, 75 bp, synthetic construct
  source 1..75: mol_type = other DNA
gaaaggtaagagcgcgctgatgttcaacctgcaagaaccatacttcacctggccgctgattgcggctgacggggg

SEQ ID NO: 589658 - DNA, 75 bp, synthetic construct
  source 1..75: mol_type = other DNA
gctgtatgcgaaaggactgacctgcgaagccgataccctgggctcctgtggttacgtttatctggctgtttatcc

SEQ ID NO: 589659 - DNA, 75 bp, synthetic construct
  source 1..75: mol_type = other DNA
gcatttccgcattttatcagcaagatggaatccatgctgaccactggtgaaatgaatcctcgccacgcccactgc

SEQ ID NO: 589660 - DNA, 75 bp, synthetic construct
  source 1..75: mol_type = other DNA
tgcgccatcctgtatcacaacggctttacctgcgaagccgatactcttggtagttgcggctacgtatacatcgcc

SEQ ID NO: 589661 - DNA, 75 bp, synthetic construct
  source 1..75: mol_type = other DNA
atgagcaacatcacttggggcctgcagcgcaatatcacgccgtgcctgggagcccgccttgtgcaggaggggaac

SEQ ID NO: 589662 - DNA, 75 bp, synthetic construct
  source 1..75: mol_type = other DNA
atgagcaacatcacatgggggctgcagcgggatatcacgccacgcctgggagcccgtctggtgcaggaggggaac

SEQ ID NO: 589663 - DNA, 75 bp, synthetic construct
  source 1..75: mol_type = other DNA
cgactgcattatctggctgaccgggccagcatcaccggcaagttcagtgacatcgaatgccggaagctggatgaa

SEQ ID NO: 589664 - DNA, 75 bp, synthetic construct
  source 1..75: mol_type = other DNA
ggatctcagcggcggcaattccagcatcaaagaaaactacatggtcgtgaccaatgtttttttccctgaggcaga

SEQ ID NO: 589665 - DNA, 75 bp, synthetic construct
  source 1..75: mol_type = other DNA
taccgtctcgatgctctcggcatttgccattgtctggtttcgttttccgctgcgtaacctcttcttctggatgat

SEQ ID NO: 589666 - DNA, 75 bp, synthetic construct
  source 1..75: mol_type = other DNA
tgccgcgccgatgacgctcatccccggcacacatctgctggaaaatatccacaacatctgggttaacggggtagg

SEQ ID NO: 589667 - DNA, 75 bp, synthetic construct
  source 1..75: mol_type = other DNA
aatatatcaattgaatgtttatttaggttcagaaagaaactacaaactaaacttaattaaggctttcatcattaa

SEQ ID NO: 589668 - DNA, 75 bp, synthetic construct
  source 1..75: mol_type = other DNA
tattgtttaaccatatacctgcttatgttctggctctgtgcgtaaacgttctggttaccactccggttttcgctg

SEQ ID NO: 589669 - DNA, 75 bp, synthetic construct
  source 1..75: mol_type = other DNA
gcagttgcctccgtgaaatttcgctaaaaacggaaagtagcgatcttttggctgtcctgatgttacgaggttccg

SEQ ID NO: 589670 - DNA, 75 bp, synthetic construct
  source 1..75: mol_type = other DNA
atgtttaacaaattaaaggccatttgcagccgcgcatctgcttatattctggctccgttagtaagtgttgtcagt

SEQ ID NO: 589671 - DNA, 75 bp, synthetic construct
  source 1..75: mol_type = other DNA
atgtacgagattcatattaaattgcgtaatgtgattacgggagaagaagaaaacttccacacgatacgtaaatat

SEQ ID NO: 589672 - DNA, 75 bp, synthetic construct
  source 1..75: mol_type = other DNA
acgctatcaggtatacggaagaaattgcgccgaaatatcaattgccagaagaagaactcacagcatcagtggtaa

SEQ ID NO: 589673 - DNA, 75 bp, synthetic construct
  source 1..75: mol_type = other DNA
gggtcgtgctgccctttgcctccatttcaccagccgcctttgccgaaatagataaaggcggtgtgttgaatgaag

SEQ ID NO: 589674 - DNA, 75 bp, synthetic construct
  source 1..75: mol_type = other DNA
ctatcgatacaattgatgacaaagccatatatcaattgaatgtttatttaggttcagcgagaaactacaagctaa

SEQ ID NO: 589675 - DNA, 75 bp, synthetic construct
  source 1..75: mol_type = other DNA
gatattttattgcagcatcctaaaattcacgatgcctgtgtggttgcaatgtccgatgaacgtttaggtgaacga

SEQ ID NO: 589676 - DNA, 75 bp, synthetic construct
  source 1..75: mol_type = other DNA
aagatattattgtccgcggcggcgaaaatattagcagccgtgaagtggaagatattttattgcagcatcctaaaa

SEQ ID NO: 589677 - DNA, 75 bp, synthetic construct
  source 1..75: mol_type = other DNA
ctgtcgcagtgcggctacatcatcattggcggcattttaattggcggaggcagtgaaatcggcgctctgctgatg

SEQ ID NO: 589678 - DNA, 75 bp, synthetic construct
  source 1..75: mol_type = other DNA
agtggtgttgcttcagcttatctaccaaatccaacaagagatgtatttaggtgagcgggatcgtcgcaagattgt

SEQ ID NO: 589679 - DNA, 75 bp, synthetic construct
  source 1..75: mol_type = other DNA
atcatgagtgtgtccctttatgactcgggcagtaattacaactgttgcatagcggcgcaatcggggtcgggtaag

SEQ ID NO: 589680 - DNA, 75 bp, synthetic construct
  source 1..75: mol_type = other DNA
gaggcagataaaccacttcgagagcaagtgttggattatgaccgagctatcaaggtggatagccaaggtctgatg

SEQ ID NO: 589681 - DNA, 75 bp, synthetic construct
  source 1..75: mol_type = other DNA
tgaatcagaaagacgagcaaatcgccagcctgtcagcaaatgcctatgacccgacgaagcatatccctctgacgg

SEQ ID NO: 589682 - DNA, 75 bp, synthetic construct
  source 1..75: mol_type = other DNA
accacgcccggcagatgccaagacgtttctcgcagccgcatctcaggggggcggtcttggcatcttgggtgactt

SEQ ID NO: 589683 - DNA, 75 bp, synthetic construct
  source 1..75: mol_type = other DNA
tcgctgacgaatgcgctgctacgtaacgggaagggggctttccttggtgctgcaaacctctttgtctgggcgact

SEQ ID NO: 589684 - DNA, 75 bp, synthetic construct
  source 1..75: mol_type = other DNA
gaaattctttcctccatcggcgtttattccgacacgatgacgcaagagatcatccgtcgcatgtccggcgacgac

SEQ ID NO: 589685 - DNA, 75 bp, synthetic construct
  source 1..75: mol_type = other DNA
gcgaaatgaccgtcaatgcagctgccgggcgcaagctgtctgatgacgaaatggaatctttggtgcgtgacatga

SEQ ID NO: 589686 - DNA, 75 bp, synthetic construct
  source 1..75: mol_type = other DNA
acctgcgctggatgctcaatctgccaaccgcctcaacgaaagaagagattatggctgagctgcaaaaaatcatca

SEQ ID NO: 589687 - DNA, 75 bp, synthetic construct
  source 1..75: mol_type = other DNA
ctgacgaatgcgctgctgcgtaacggaaaaggtgcattcttgggggcggcaaacctgttcgtctgggcaaccatg

SEQ ID NO: 589688 - DNA, 75 bp, synthetic construct
  source 1..75: mol_type = other DNA
ggccagaacttcatgcaggcgctgaccggcgcgatgaaggggcgcttttcccgctacaccagtgatgagcagaag

SEQ ID NO: 589689 - DNA, 75 bp, synthetic construct
  source 1..75: mol_type = other DNA
aacgagcaattcggaactggcagcctgcgtgaggcagtattcggcggactgaacagcgcggcgcgcactacgggc

SEQ ID NO: 589690 - DNA, 75 bp, synthetic construct
  source 1..75: mol_type = other DNA
ttgaaaaatcttctaacccacacatgggactgtctaactggattaaaaaactgaccgaaagccaaaaaaaattcg

SEQ ID NO: 589691 - DNA, 75 bp, synthetic construct
  source 1..75: mol_type = other DNA
gatgctgtcattgcatatcatgaaggtattatgagaaacaatacatataccaaagactattattatagaatcgga

SEQ ID NO: 589692 - DNA, 75 bp, synthetic construct
  source 1..75: mol_type = other DNA
acagaaaaaaacttaaatatgaaagcaggattaatactttagagtcagcaatttctaattcatgcataaattatg

SEQ ID NO: 589693 - DNA, 75 bp, synthetic construct
  source 1..75: mol_type = other DNA
ctgcgccacaagctgttccagattgattacctcaccacgctgagcaatcaggcggtcgtttccctgctgtaccat

SEQ ID NO: 589694 - DNA, 75 bp, synthetic construct
  source 1..75: mol_type = other DNA
atatcaaaggctcatattttctgtgcaatggaaaacaagttgggataatggcaagaaggtcttatcctctctcat

SEQ ID NO: 589695 - DNA, 75 bp, synthetic construct
  source 1..75: mol_type = other DNA
attatgctggtgcagtagaatttatctccccggagttaaagaagtttttcaacaatgatcgctgggaaatatcta

SEQ ID NO: 589696 - DNA, 75 bp, synthetic construct
  source 1..75: mol_type = other DNA
ttgtgaaagtaaatggtctgcaaggcggttcgcaggctgaaagtgagcagggactggtggtgactcctcaaggga

SEQ ID NO: 589697 - DNA, 75 bp, synthetic construct
  source 1..75: mol_type = other DNA
ctataaaatgacctatatgcagcggggaaattatgtggtggtcatcaaccctctcttctggagtgaagtgatgtc

SEQ ID NO: 589698 - DNA, 75 bp, synthetic construct
  source 1..75: mol_type = other DNA
tttacaaattaattttagctaatggcagtgaaattgtaaaccctactattgatggactttctgtagaatttaaag

SEQ ID NO: 589699 - DNA, 75 bp, synthetic construct
  source 1..75: mol_type = other DNA
atgggaattatcaacaggcatgtaattttttttcgtaaaatagagatttttggaacaccgtatggggctcctgat

SEQ ID NO: 589700 - DNA, 75 bp, synthetic construct
  source 1..75: mol_type = other DNA
agagctgactgttttgtcctctcttcaaatcatgaagggcaacctatggttcttttcgaagcaatgattctagat

SEQ ID NO: 589701 - DNA, 75 bp, synthetic construct
  source 1..75: mol_type = other DNA
atgttgttaactaagttagctaaaaaaatatgccaatccaaagaatatattaacggaatttctctatacaaaaaa

SEQ ID NO: 589702 - DNA, 75 bp, synthetic construct
  source 1..75: mol_type = other DNA
atctggaaacattaagccagacgcacaaggtcgaacgtctggctctgtttgatcagttcccctacacgcaccata

SEQ ID NO: 589703 - DNA, 75 bp, synthetic construct
  source 1..75: mol_type = other DNA
catatggactggaaagaaggtggaggaataccggctttataatgactattggcgtaaacgtctggaagggcggga

SEQ ID NO: 589704 - DNA, 75 bp, synthetic construct
  source 1..75: mol_type = other DNA
gagaaggcaaaagccagagcctggcactgctgatgatcaacaacgacggcagtgtgctggattgctggcataacg

SEQ ID NO: 589705 - DNA, 75 bp, synthetic construct
  source 1..75: mol_type = other DNA
ttattgacggaatcaagaggtgtattactttttacgacattatcactgctattggccagttttaaattacataaa

SEQ ID NO: 589706 - DNA, 75 bp, synthetic construct
  source 1..75: mol_type = other DNA
tcaggcaaaccaataaattacagacaatatgtatttgataacgaacgttattgtaatttgctgcctataaatgat

SEQ ID NO: 589707 - DNA, 75 bp, synthetic construct
  source 1..75: mol_type = other DNA
ttaacctgcgggataaataccgcggccagatcctgttctggggatgggggatgggttttctgtgctttatctact

SEQ ID NO: 589708 - DNA, 75 bp, synthetic construct
  source 1..75: mol_type = other DNA
atgtggctcgtgacattgccggagatcattacaaataacagtacccgccaggaggaaaatctgatcgtcattctg

SEQ ID NO: 589709 - DNA, 75 bp, synthetic construct
  source 1..75: mol_type = other DNA
cgcgaagtggtgaaacactccagaagcggggaatccattatcaaggaagagagggtgaaggaactatgtcagcat

SEQ ID NO: 589710 - DNA, 75 bp, synthetic construct
  source 1..75: mol_type = other DNA
gcggagcaacgcagtcaggttatctgacgctgaatctgcctgaaatgtgggaagtgtcgggttataaccgtgtcg

SEQ ID NO: 589711 - DNA, 75 bp, synthetic construct
  source 1..75: mol_type = other DNA
gagcgatgacgcaccggcgacaggctcaggtggtttaacgattacggatgtgatggctgcgcaggggatggtgca

SEQ ID NO: 589712 - DNA, 75 bp, synthetic construct
  source 1..75: mol_type = other DNA
ttttatactgactccagtttcataaagaaattgctacaccaccaccaagtatcggttttagatggtgtgacgtca

SEQ ID NO: 589713 - DNA, 75 bp, synthetic construct
  source 1..75: mol_type = other DNA
taaaattgcatagaaatggatggcgtgagtcgatacttaaatcctctaaagtatcgctgagcgcaaaattatgtt

SEQ ID NO: 589714 - DNA, 75 bp, synthetic construct
  source 1..75: mol_type = other DNA
acgaaatattgttcaactgcagcccgtagcgtcggtgcggcattcgacggacaaaacggacagtatcgttacatg

SEQ ID NO: 589715 - DNA, 75 bp, synthetic construct
  source 1..75: mol_type = other DNA
tccaaataatacaataataggaacgggatcattattgtcgaaaagtttgttgatgagaatactattattgcgggt

SEQ ID NO: 589716 - DNA, 75 bp, synthetic construct
  source 1..75: mol_type = other DNA
tgagagcaatggcagcagagctacagaagcggcgcgaagctgatagcgcagaaccagttgcttatattttcaaac

SEQ ID NO: 589717 - DNA, 75 bp, synthetic construct
  source 1..75: mol_type = other DNA
ttctggaaatggcctgtaaagctgctgaagatgttattctcgaccgacgggtgtttaattttaatgacaggcaat

SEQ ID NO: 589718 - DNA, 75 bp, synthetic construct
  source 1..75: mol_type = other DNA
atgaagagttcatcgaaatgcttgatgctccggttgctgatgagcctgccatcgaaaaattgctggcaaggaaac

SEQ ID NO: 589719 - DNA, 75 bp, synthetic construct
  source 1..75: mol_type = other DNA
ttaaaaacaactacccaccaaacatccccaacactcaggtcggcgtatatggcgactggtttaatgatggcaatc

SEQ ID NO: 589720 - DNA, 75 bp, synthetic construct
  source 1..75: mol_type = other DNA
tggcagaagccaatcatccgcaaacaggtgactggttgtacgacgacccaatcgatcttgccagggcgattcgca

SEQ ID NO: 589721 - DNA, 75 bp, synthetic construct
  source 1..75: mol_type = other DNA
atgtggaatggcaatcgctgggatgatggcaccgaatatccggatccgcactcagttacgcactggcgtgaaatg

SEQ ID NO: 589722 - DNA, 75 bp, synthetic construct
  source 1..75: mol_type = other DNA
ttttacgccaataataacattatccctaggttatatgtttggtagggttgaggcatcgcatgcggccaacaaaga

SEQ ID NO: 589723 - DNA, 75 bp, synthetic construct
  source 1..75: mol_type = other DNA
ctatttcaaaagggcaacgagcggaaaaaatgaaaaatttccctttgttcaggaacaagttaagtcagacggaaa

SEQ ID NO: 589724 - DNA, 75 bp, synthetic construct
  source 1..75: mol_type = other DNA
ttgaggtgctccggggtgatagtgttgagaagacctctcgggtatggtcaggtaatgaacgtgaccaggagctgc

SEQ ID NO: 589725 - DNA, 75 bp, synthetic construct
  source 1..75: mol_type = other DNA
aactgggtaatggtgatattgcgcgcggtacggtgctggcatttgaagcgggcgtactggatgtgccgtttgcgc

SEQ ID NO: 589726 - DNA, 75 bp, synthetic construct
  source 1..75: mol_type = other DNA
gtatcaaccgcgaaccatttggcccactgactggaacgctgatcccgccatttatctcgcactctgttgcgatta

SEQ ID NO: 589727 - DNA, 75 bp, synthetic construct
  source 1..75: mol_type = other DNA
gaactggacgaacggattggttatttcggacgaacgcaccggcttacgccggttttacatctgtactacatgtaa

SEQ ID NO: 589728 - DNA, 75 bp, synthetic construct
  source 1..75: mol_type = other DNA
ctggcgtccagattgtttcccttaaaaaagcgatgaagcatagtgataagcttttcgtcttacgagtcccggatc

SEQ ID NO: 589729 - DNA, 75 bp, synthetic construct
  source 1..75: mol_type = other DNA
caagttgacggcacaagtgactacctcaaggatggagaatggcctattgataatgggattattgaagtctacgcc

SEQ ID NO: 589730 - DNA, 75 bp, synthetic construct
  source 1..75: mol_type = other DNA
atggcaactctccggtaactccggatggttggataagctgtagtgagcgaatgccccctcaagatgattggattt

SEQ ID NO: 589731 - DNA, 75 bp, synthetic construct
  source 1..75: mol_type = other DNA
cagaattaatcgaaggcatggaggtttccattgatgtaagcacttgtgatgcggatttaggtaatcgctatttcg

SEQ ID NO: 589732 - DNA, 75 bp, synthetic construct
  source 1..75: mol_type = other DNA
ctggcattggggaaatcccccgaagtgtcgttggcggatgccagggcacgccgggatgaggctcgtaagctttta

SEQ ID NO: 589733 - DNA, 75 bp, synthetic construct
  source 1..75: mol_type = other DNA
gcggagattgattgtaagccagtccgggattttgttgccaaggctaatccggctaccgtgctggcactactggat

SEQ ID NO: 589734 - DNA, 75 bp, synthetic construct
  source 1..75: mol_type = other DNA
atggcactgaatatccggatccgcactcagttacgcactggcgtgaaatgccagcagcaccgcagcaggaggtga

SEQ ID NO: 589735 - DNA, 75 bp, synthetic construct
  source 1..75: mol_type = other DNA
tgtctctgcgtttaagccagaaacgcagttagagtatgtcgggcacttgaagccagggatttatattaaagcgag

SEQ ID NO: 589736 - DNA, 75 bp, synthetic construct
  source 1..75: mol_type = other DNA
gcctgcttctcccctgctttcttttactttcggcctgtaccgttgatatcagccagccagactcctctgccacag

SEQ ID NO: 589737 - DNA, 75 bp, synthetic construct
  source 1..75: mol_type = other DNA
aatttgtcactgatgcatttgccaaagccgggcatccgcttaccctggcgcaatcgggctggattagccctgccg

SEQ ID NO: 589738 - DNA, 75 bp, synthetic construct
  source 1..75: mol_type = other DNA
atggcgaaaagcatggtcaatcagttcgataagctggtggcgcttttaggcattgaaccgttgcttgagcgttta

SEQ ID NO: 589739 - DNA, 75 bp, synthetic construct
  source 1..75: mol_type = other DNA
cgccatcagtgggctgacacgtccgcaaaaagggcggattgtcctcaatggtcgggtactaaatgacgccgataa

SEQ ID NO: 589740 - DNA, 75 bp, synthetic construct
  source 1..75: mol_type = other DNA
cctccatctggcagacagagtgatggtgctggaaaacggtcaggtaaaagcctttggcgctctggaagaggtatg

SEQ ID NO: 589741 - DNA, 75 bp, synthetic construct
  source 1..75: mol_type = other DNA
tggtccgcaaggtatccgtgaatttgttgagacagcgttacgcattagtggctcgtggactgattatccactgga

SEQ ID NO: 589742 - DNA, 75 bp, synthetic construct
  source 1..75: mol_type = other DNA
gatgacaaaggatgccagcatttattacgcgagtgtcggtcgattttcccggcaacagagctggcggaagatttc

SEQ ID NO: 589743 - DNA, 75 bp, synthetic construct
  source 1..75: mol_type = other DNA
ttggcagacaaacgcagcaaaatgctcacgatgtgggtgaccgaagatgagcaccgccgtctgctggagcgctgc

SEQ ID NO: 589744 - DNA, 75 bp, synthetic construct
  source 1..75: mol_type = other DNA
tgagcctggcgaattggcgaaagtgttcgcggtgatggcagatgatgaagagatgcagaatgtaacgctgatcgg

SEQ ID NO: 589745 - DNA, 75 bp, synthetic construct
  source 1..75: mol_type = other DNA
tattccgcgagagcctttacccgctggcacttatcgtgttgactggcgcgcggtttcttcagatacgcaccctat

SEQ ID NO: 589746 - DNA, 75 bp, synthetic construct
  source 1..75: mol_type = other DNA
tacacaacaccagatgttgcacacggcatttaacccaggaaaactggacaggatttttataagccatcttcatgg

SEQ ID NO: 589747 - DNA, 75 bp, synthetic construct
  source 1..75: mol_type = other DNA
acagcctgccgcgctggcggaactgaccgaagtactcaatggccttctcgacggtcagaatctcaaacgcagcaa

SEQ ID NO: 589748 - DNA, 75 bp, synthetic construct
  source 1..75: mol_type = other DNA
cctgctggaagatattctcgaaactcgcaataccgccagcggtattgaaacgctcaactttatggagccgcagag

SEQ ID NO: 589749 - DNA, 75 bp, synthetic construct
  source 1..75: mol_type = other DNA
ttcaaacacctctcccagcgcgaagtgcaaaccctgagtgcggcgatggcaaacgtcacgcagatctccaataag

SEQ ID NO: 589750 - DNA, 75 bp, synthetic construct
  source 1..75: mol_type = other DNA
agacgagcaccgccgacttctggagcgctgtgagggtaaacaactcgcggcctggatgcgccagatatgcctgga

SEQ ID NO: 589751 - DNA, 75 bp, synthetic construct
  source 1..75: mol_type = other DNA
atgaccatgattacggattcactggccgtcgttttacaacgtcgtgactgggaaaaccctggcgttacccaactt

SEQ ID NO: 589752 - DNA, 75 bp, synthetic construct
  source 1..75: mol_type = other DNA
tggtgcatctgaagcgcgcgcaggccgccgatattctggcgttgttcgatgaacgtctgcgccacgacgtgatgt

SEQ ID NO: 589753 - DNA, 75 bp, synthetic construct
  source 1..75: mol_type = other DNA
ttacgtcaggatctcaattcctatatggcttcgtaatgcatttggtggaagaaaaactctcgtccgtagtctgaa

SEQ ID NO: 589754 - DNA, 75 bp, synthetic construct
  source 1..75: mol_type = other DNA
ctgatgccattctatttcaggaaggagtgtccgttaaactcaggctacctcagtaaggctaaatacgccaaaaca

SEQ ID NO: 589755 - DNA, 75 bp, synthetic construct
  source 1..75: mol_type = other DNA
cactccattggtgttatctcttcgtgaaaagcctcacaatggctttttgttctatcacgccagcattacagagcg

SEQ ID NO: 589756 - DNA, 75 bp, synthetic construct
  source 1..75: mol_type = other DNA
ctgagacacggagtagcacagcttcttgatcgaaatcaaattccagaagacaggatcgcccttctcctgggccat

SEQ ID NO: 589757 - DNA, 75 bp, synthetic construct
  source 1..75: mol_type = other DNA
gtcgttcgcggaggctgaactgccgcccgggcagcgggagcagatcatggccagctttgagcgggttctgatgcc

SEQ ID NO: 589758 - DNA, 75 bp, synthetic construct
  source 1..75: mol_type = other DNA
tgattacctgctgggaagggagcgtaaccgggaaggggcaacggtgcttcagggtaatccggaagaagtccggga

SEQ ID NO: 589759 - DNA, 75 bp, synthetic construct
  source 1..75: mol_type = other DNA
ggagggggggcggaatctcaggctaaagggggcgctgtatgagcaatcttttacaaatgggaacagacttcgaga

SEQ ID NO: 589760 - DNA, 75 bp, synthetic construct
  source 1..75: mol_type = other DNA
aatatagccgtaatactgaaaaacgtttctttgtgctgggttatgccgttaataaacgcgggttaaccaaacatg

SEQ ID NO: 589761 - DNA, 75 bp, synthetic construct
  source 1..75: mol_type = other DNA
cgagaacaggctctgatgattcttgaaggtgattattggtatgggcctcgttttgaccaggtggcgcaattttcc

SEQ ID NO: 589762 - DNA, 75 bp, synthetic construct
  source 1..75: mol_type = other DNA
tatattagtgcattagcccagatttgggatcttgctcgtaaccgctaccacgatgcaccacaagataacccttgg

SEQ ID NO: 589763 - DNA, 75 bp, synthetic construct
  source 1..75: mol_type = other DNA
cgaaacgcggtagtgaaggggaggccgtattgctccgcgcattgaactgcagccagggtcagcgttatctcgagc

SEQ ID NO: 589764 - DNA, 75 bp, synthetic construct
  source 1..75: mol_type = other DNA
tggaaaaacgcggtaaagatggcgaactggtgatgctgacagcactgaactgtacacagggggagcgttatctgg

SEQ ID NO: 589765 - DNA, 75 bp, synthetic construct
  source 1..75: mol_type = other DNA
atgaaatcctgggaaaagaggggggctacgtcagtcaccctgacgatacaggtggtgcaacgaagtggggcataa

SEQ ID NO: 589766 - DNA, 75 bp, synthetic construct
  source 1..75: mol_type = other DNA
agagcgtcatcctgctaatgaccattggcgaagatcgggcggctgaggtattcaaacacctctcccagcgcgaag

SEQ ID NO: 589767 - DNA, 75 bp, synthetic construct
  source 1..75: mol_type = other DNA
cctggatcgcgggcagtgaacgcgcatgcttattttcctggtatctgttgatgcagtttatccagaataacaggg

SEQ ID NO: 589768 - DNA, 75 bp, synthetic construct
  source 1..75: mol_type = other DNA
tcaagattggaccggctggaaagcaggaaagtggcattacaaagcgatactccggtaaaaaaagaaaaaagtgcg

SEQ ID NO: 589769 - DNA, 75 bp, synthetic construct
  source 1..75: mol_type = other DNA
gacgcagaaaccagggcgcagctcaaagaattatcgagggtcagaagactcagtaccggcgaaatgctgcatgac

SEQ ID NO: 589770 - DNA, 75 bp, synthetic construct
  source 1..75: mol_type = other DNA
aactgatttggatgagccagactcggaacctatcgtgctaaaacagaagtacgttcggggtaaaacggataatat

SEQ ID NO: 589771 - DNA, 75 bp, synthetic construct
  source 1..75: mol_type = other DNA
aacgaggtcaacaacctgaacaaacgtatgggtgacctgcgtgacatcaacggcgaagccggtgcatgggcacgc

SEQ ID NO: 589772 - DNA, 75 bp, synthetic construct
  source 1..75: mol_type = other DNA
aacatttagccacaatgttgatatgaccaatcaacaggaagtaaccattgaaaacggtaaacttgccggcatcgg

SEQ ID NO: 589773 - DNA, 75 bp, synthetic construct
  source 1..75: mol_type = other DNA
gagacagcgaataacaaaaatacttaatgagtccgatacaagacgggttgcagaagagattaaatttcggattca

SEQ ID NO: 589774 - DNA, 75 bp, synthetic construct
  source 1..75: mol_type = other DNA
attcaatatcttcaggatgaagaacaaaagagagttttaagtgagttggtaaatgtcctgatttcaaaaagataa

SEQ ID NO: 589775 - DNA, 75 bp, synthetic construct
  source 1..75: mol_type = other DNA
ggtcgtcttgccgtggggactggcgatagcgcaacgagagcctgatttctggcattactttttctggattgagca

SEQ ID NO: 589776 - DNA, 75 bp, synthetic construct
  source 1..75: mol_type = other DNA
gtattactcttattatcttggagagcgtaatatctccgtactgccccttaatgtttatgatcccccggaacgttt

SEQ ID NO: 589777 - DNA, 75 bp, synthetic construct
  source 1..75: mol_type = other DNA
gtgttgcccccggacaatcagaacaggttgagtcctttgttctgcagcttattgccgaacaggagcgggtttggg

SEQ ID NO: 589778 - DNA, 75 bp, synthetic construct
  source 1..75: mol_type = other DNA
aagaatacagaactgtccatctttaaggagcgagaaggaggtggagtcctggttaaatgaactgttttttgctgt

SEQ ID NO: 589779 - DNA, 75 bp, synthetic construct
  source 1..75: mol_type = other DNA
ccgggcttaagcgcggcgatgaaagataacctcgaatttattaatacccacccgaatctggtcggattcctgatg

SEQ ID NO: 589780 - DNA, 75 bp, synthetic construct
  source 1..75: mol_type = other DNA
tgcgatgacaacacacaggattatcccacgaaaactgatctgggcggcctcagtcatttactggtatcaacggag

SEQ ID NO: 589781 - DNA, 75 bp, synthetic construct
  source 1..75: mol_type = other DNA
gataatccagaccaaagacagatggatgcgggcatttaaatcaaagagtcctttcagttacctcctcccggagaa

SEQ ID NO: 589782 - DNA, 75 bp, synthetic construct
  source 1..75: mol_type = other DNA
tgacgtagaaaccagggcgcagctcaaagaattatcgagggtcagaagactcagtaccggcgaaatgctgcatga

SEQ ID NO: 589783 - DNA, 75 bp, synthetic construct
  source 1..75: mol_type = other DNA
aaagcgtcatcctactgatgaccattggcgaagaccgggcggcagaggtgttcaagcacctctcccagcgcgaag

SEQ ID NO: 589784 - DNA, 75 bp, synthetic construct
  source 1..75: mol_type = other DNA
tcctgttcgagaatctggtggatgtcgacgatcgcagcattcagcgtctgttgcaggaagtggattccgaatcgc

SEQ ID NO: 589785 - DNA, 75 bp, synthetic construct
  source 1..75: mol_type = other DNA
gaaaaagaaatgggcatatacagggaccgcaaaacagcacatgatcatttatatcgccaggatggtaaaaaatct

SEQ ID NO: 589786 - DNA, 75 bp, synthetic construct
  source 1..75: mol_type = other DNA
tatatggcaaaacgctggagcgaaaaattccacggccagcgcgatatccaggcacaactgatgtcccatcttgac

SEQ ID NO: 589787 - DNA, 75 bp, synthetic construct
  source 1..75: mol_type = other DNA
tgtttaacgggctggtcaaagcgatgaacgccgcgccgccggagagtgaagaaaaactcgcggtgctgcgcgtaa

SEQ ID NO: 589788 - DNA, 75 bp, synthetic construct
  source 1..75: mol_type = other DNA
cgctttagcgtggacggtggcgcgatgacctaccgtgtgcataccgacacggaagataacccgttcagcggtggg

SEQ ID NO: 589789 - DNA, 75 bp, synthetic construct
  source 1..75: mol_type = other DNA
atgtcatttaaatatcgggacagtcccctttattaccggactgcgcgggaggctttgcgccttgagcagatcggc

SEQ ID NO: 589790 - DNA, 75 bp, synthetic construct
  source 1..75: mol_type = other DNA
cactttattacagggctgcaagggaggctttgcgacttgaacaatccggcgaatatgaccgggcagcgaaggtct

SEQ ID NO: 589791 - DNA, 75 bp, synthetic construct
  source 1..75: mol_type = other DNA
cattattcgcgaagatattattgcgcaactggaaactgcgcagaaaatccgtgacatcttcttcagcaaacagaa

SEQ ID NO: 589792 - DNA, 75 bp, synthetic construct
  source 1..75: mol_type = other DNA
tctggcccgcaaaacaatctgcttttcacgctcaattgagctacatgaaaaggttatcggggccttaattgaaaa

SEQ ID NO: 589793 - DNA, 75 bp, synthetic construct
  source 1..75: mol_type = other DNA
atgataacgagcgacgactggggaagttatgccagagaagtcgcgaaggaaaagcatctgaccggcaaactattc

SEQ ID NO: 589794 - DNA, 75 bp, synthetic construct
  source 1..75: mol_type = other DNA
agcactggagcttcgttggcagcaaggcgcaacaacactggctctggtacgcgtacaacacaaaaacgggtggtg

SEQ ID NO: 589795 - DNA, 75 bp, synthetic construct
  source 1..75: mol_type = other DNA
gcgtacaacaccaaaacaggcggtgtaccggcctacacttttggtccccgaaccgatcaaacgtgccgggagcta

SEQ ID NO: 589796 - DNA, 75 bp, synthetic construct
  source 1..75: mol_type = other DNA
gtggcgcttatctgtgaacttgatgagcagtggagcttcgttggcagcaaggcgcaacaaccctggctctggtac

SEQ ID NO: 589797 - DNA, 75 bp, synthetic construct
  source 1..75: mol_type = other DNA
cgaaaaagtgatcggagcgtttatcgaaaaacatatgtttgaaccgccccggaaatcctggagactaaactccct

SEQ ID NO: 589798 - DNA, 75 bp, synthetic construct
  source 1..75: mol_type = other DNA
aaaatcgacttcgaaggggattacaaaagctccattaacccaaatctgaacaacattttgggtaacatgggctta

SEQ ID NO: 589799 - DNA, 75 bp, synthetic construct
  source 1..75: mol_type = other DNA
ccgtgacgcatatcgtatcgcgttgggcacaacctactattacgataaaaactggcccttccgtaccggtatcgc

SEQ ID NO: 589800 - DNA, 75 bp, synthetic construct
  source 1..75: mol_type = other DNA
ccggacattctgatttaaccggtcagagtgcaaatgctaaaaatatcgcaccgacagcgtgggtacctaacctgc

SEQ ID NO: 589801 - DNA, 75 bp, synthetic construct
  source 1..75: mol_type = other DNA
ctgggaatgccagtacatacccatcctgatgcacaattcgctggcgcaattggcgcagcggtgattggtcagcgg

SEQ ID NO: 589802 - DNA, 75 bp, synthetic construct
  source 1..75: mol_type = other DNA
ctgaaaatgccagtatatacgcatccagatgcacaatttgcaggcgctatcggcgcggcgttaatgggtcaacga

SEQ ID NO: 589803 - DNA, 75 bp, synthetic construct
  source 1..75: mol_type = other DNA
atttcgtagcacctattaacgatcagtttggttggggggcttctattacctcaaactatggtctggccacggagt

SEQ ID NO: 589804 - DNA, 75 bp, synthetic construct
  source 1..75: mol_type = other DNA
taccggcctacacttttggtccccgaaccgatcaaacgtgccgggagctactggcactgcttacacccttcaaca

SEQ ID NO: 589805 - DNA, 75 bp, synthetic construct
  source 1..75: mol_type = other DNA
agcaatggagctttgtcggcagtaaagcccggcagcactggctctggtacgcatacaacaccagaacaggcggtg

SEQ ID NO: 589806 - DNA, 75 bp, synthetic construct
  source 1..75: mol_type = other DNA
cgatcgtggaagcggctggcctgaaagtgggcgacatcgttaaaaccaccgtgtttgtgaaagatctgaacgact

SEQ ID NO: 589807 - DNA, 75 bp, synthetic construct
  source 1..75: mol_type = other DNA
atgcaccggcagctatcggtccttacgtgcagggcgttgatctgggcaatatgattatcacttccggtcagatcc

SEQ ID NO: 589808 - DNA, 75 bp, synthetic construct
  source 1..75: mol_type = other DNA
agaaacggcccagactttgcgacgtcaatcatcgactcgttgagaatgatcggtgctcaagccggtggccttccg

SEQ ID NO: 589809 - DNA, 75 bp, synthetic construct
  source 1..75: mol_type = other DNA
cgggccacggaatgatgagacctgtcgggaactgttagccctgttgactccgttctgtatcggcatggtgaccag

SEQ ID NO: 589810 - DNA, 75 bp, synthetic construct
  source 1..75: mol_type = other DNA
ctggcgctgctcgcgccgtttaatatcggcatgataaccagcgatgactggggcagttatgccagagaagtgccg

SEQ ID NO: 589811 - DNA, 75 bp, synthetic construct
  source 1..75: mol_type = other DNA
gactgatgaaacctgtcgtgaattgctggcgctgcttaccccttttaccatcggtatgttgaccactgacgaatg

SEQ ID NO: 589812 - DNA, 75 bp, synthetic construct
  source 1..75: mol_type = other DNA
gcaaaaccatctgttcctcgcgctttgtggaacttcatgaaaaagtcatcggtgcttttatcgaaaaatatatgt

SEQ ID NO: 589813 - DNA, 75 bp, synthetic construct
  source 1..75: mol_type = other DNA
tattcacccaacgcattgagcgtaataatctgacgctacgcacccgcattaagcggttggctcgtaaaacaatct

SEQ ID NO: 589814 - DNA, 75 bp, synthetic construct
  source 1..75: mol_type = other DNA
cgatcgtcgaagccgctggcctgaaagtgggcgacatcgttaaaaccaccgtgtttgtgaaagatctgaacgact

SEQ ID NO: 589815 - DNA, 75 bp, synthetic construct
  source 1..75: mol_type = other DNA
cgtcagtcgctggataacgtaaaagcaatcgtcgaagccgctggcctgaaagtgggcgacatcgttaaaactacc

SEQ ID NO: 589816 - DNA, 75 bp, synthetic construct
  source 1..75: mol_type = other DNA
tttttactcagcgtattgagcgcaataacctgacactgagaacccgaatcaaacggctggcccgcaaaacgctct

SEQ ID NO: 589817 - DNA, 75 bp, synthetic construct
  source 1..75: mol_type = other DNA
agtgtccttatgtggctgaatatagataaagcgcgaaggtattgtcaggataataataaaaagatgatatattct

SEQ ID NO: 589818 - DNA, 75 bp, synthetic construct
  source 1..75: mol_type = other DNA
gctgtgggttgaacaccgggacaaggggcggctggaactgaattttctggtaccgaacacggaactgctgaccgg

SEQ ID NO: 589819 - DNA, 75 bp, synthetic construct
  source 1..75: mol_type = other DNA
acgaacggctgatacaggaacgcgaacatgagttatccctggagcgtgagcgccagctggaaatacaggaacgca

SEQ ID NO: 589820 - DNA, 75 bp, synthetic construct
  source 1..75: mol_type = other DNA
gacgtgttaaagctggcagggaatacgggcatgaggttgctggggatagtctttctcctgtttaccgcgagtggc

SEQ ID NO: 589821 - DNA, 75 bp, synthetic construct
  source 1..75: mol_type = other DNA
cttgataacagccaggaagagttaacacacccagtattgaaaaaattgcaacagtctctacagggacgtgggagg

SEQ ID NO: 589822 - DNA, 75 bp, synthetic construct
  source 1..75: mol_type = other DNA
ttcagcgagcacgagaagtctgtcagagcggaactgagcgaaagcgggaagagaatcagcgccgccatccgcgcc

SEQ ID NO: 589823 - DNA, 75 bp, synthetic construct
  source 1..75: mol_type = other DNA
cggggcttactggccctcgcctcgtcaggggagcttaaaacgcgtcaggacgtcactgaggcgctggaaagcgca

SEQ ID NO: 589824 - DNA, 75 bp, synthetic construct
  source 1..75: mol_type = other DNA
tccctgataacctgccggaaacgaaacaggcgcttgctgagagcgttacacgaggcctggaggtgctttaccatt

SEQ ID NO: 589825 - DNA, 75 bp, synthetic construct
  source 1..75: mol_type = other DNA
gggcatacgagcagcgacagcacgaaaaagcgctggcggaagcccgttcccgtcagcggagctataacggtccga

SEQ ID NO: 589826 - DNA, 75 bp, synthetic construct
  source 1..75: mol_type = other DNA
cattcagcgagcacgagaagtctgtaaaagcggaactgagcgcaagcgcgaagagaatcagcgacgccatcagcg

SEQ ID NO: 589827 - DNA, 75 bp, synthetic construct
  source 1..75: mol_type = other DNA
agcgagcggacagaacgcttgagccagttatacagcgagaacaggagataagggacgaacggctgatacaggagc

SEQ ID NO: 589828 - DNA, 75 bp, synthetic construct
  source 1..75: mol_type = other DNA
gggacgctctggtatcttggcgggatgatacaggcgaacctggaagaaatcaggaagcagaacgagaatctggag

SEQ ID NO: 589829 - DNA, 75 bp, synthetic construct
  source 1..75: mol_type = other DNA
atgtgtgatttcacaataatgctcctctccatccttggcggggtgcattcgtttctgaatggggttcgtgaaaaa

SEQ ID NO: 589830 - DNA, 75 bp, synthetic construct
  source 1..75: mol_type = other DNA
actaaaatttgaaaagcgtaagaccacgcatcgcactcaccaagcctacaaaaatatcaatatcggacccaacga

SEQ ID NO: 589831 - DNA, 75 bp, synthetic construct
  source 1..75: mol_type = other DNA
aggccgaccgtgaagagatccagcgccatatcactgaacagtacctcagtgactataccgccacctggcgtgccg

SEQ ID NO: 589832 - DNA, 75 bp, synthetic construct
  source 1..75: mol_type = other DNA
ctgacattatttacacgccggaaagcatccggggtgtggaataccatccgctgatcacaccgcgagtgggcaacc

SEQ ID NO: 589833 - DNA, 75 bp, synthetic construct
  source 1..75: mol_type = other DNA
taatccgcgcgccacacaggatgcctcactggattcgtttgaacgtttctttaaaccggatggcattctggacaa

SEQ ID NO: 589834 - DNA, 75 bp, synthetic construct
  source 1..75: mol_type = other DNA
gcgctgacgctctccggcaaactggatgataaggcgagggaagcggcgataaatgagatggattaccgcctgtta

SEQ ID NO: 589835 - DNA, 75 bp, synthetic construct
  source 1..75: mol_type = other DNA
acgcagtccgccgcccgccagtacgggctgggcaacagctcgctggcgacctggcccctggtggaaacaacgccg

SEQ ID NO: 589836 - DNA, 75 bp, synthetic construct
  source 1..75: mol_type = other DNA
gtggtatatggtcattggtcctgcgggtagcggcaaaagcacgctgctgcgcgagggctttccgtctgacattat

SEQ ID NO: 589837 - DNA, 75 bp, synthetic construct
  source 1..75: mol_type = other DNA
aacgtgcgcaggcgattgccgaagttcggtgtttctctaaaggatgtctgcgcgatggattcagaatgaagccag

SEQ ID NO: 589838 - DNA, 75 bp, synthetic construct
  source 1..75: mol_type = other DNA
atataattacttggctgaatcaaattcagaatctattaactattttagcataaaccctgtgctatacaaagatat

SEQ ID NO: 589839 - DNA, 75 bp, synthetic construct
  source 1..75: mol_type = other DNA
tcttgctcaaaaaacgccctgggtaagctccgagtctataattaccgcgcttcgcttatctgaagccaagaattc

SEQ ID NO: 589840 - DNA, 75 bp, synthetic construct
  source 1..75: mol_type = other DNA
cgccagccgctcaacggcctgatcctgacgctcgatcttcccgatctgctgacggcggataaatcccgccgtgag

SEQ ID NO: 589841 - DNA, 75 bp, synthetic construct
  source 1..75: mol_type = other DNA
cctggctgctggcgctggcatggatttttctgctggtgtggatctggtggcaaggtccgaaatggacgctctatg

SEQ ID NO: 589842 - DNA, 75 bp, synthetic construct
  source 1..75: mol_type = other DNA
gttttgatgtcaagttttgttaatgctattactgcaggaatgggtaattacttaattaataaaagtaatttagaa

SEQ ID NO: 589843 - DNA, 75 bp, synthetic construct
  source 1..75: mol_type = other DNA
tccgccgcgtcaacgagcgcattccggtggcttacctgaccaacaaagcctggttctgcggtcatgaattttacg

SEQ ID NO: 589844 - DNA, 75 bp, synthetic construct
  source 1..75: mol_type = other DNA
ataacggcggcgacggtgtgtttatgctcaccaaagcgcagcttgttgcggcgcgggaacattttggaatttata

SEQ ID NO: 589845 - DNA, 75 bp, synthetic construct
  source 1..75: mol_type = other DNA
gcgttaggtgtagggcgcgttttccgttcgtggatcaaggggcgcattgaagaatacggcttcacggaaggcgtg

SEQ ID NO: 589846 - DNA, 75 bp, synthetic construct
  source 1..75: mol_type = other DNA
atatgaaaattacagtccttaatcagcgatataaaaaacattttggttatcctcatattctgatgggtgatgtaa

SEQ ID NO: 589847 - DNA, 75 bp, synthetic construct
  source 1..75: mol_type = other DNA
ttacttcctcaattcgcgctataccttcatgaactctgtctttaatgtcgcgacggtccctggtgggacagatac

SEQ ID NO: 589848 - DNA, 75 bp, synthetic construct
  source 1..75: mol_type = other DNA
tgctggcggcctctttctggccggtacaggcgcttgtcgcgaatgaccagtttaaccaggggatgcagcagggga

SEQ ID NO: 589849 - DNA, 75 bp, synthetic construct
  source 1..75: mol_type = other DNA
ggctacagcagctttgtgagaatttgctaaacaaccaagggtatctgccaacattggataatctagcggataaaa

SEQ ID NO: 589850 - DNA, 75 bp, synthetic construct
  source 1..75: mol_type = other DNA
accgacccgaagggctggaagtgccgattgttcgtaaatggtaatgtccatatttcagttgagtgtgaaagcctg

SEQ ID NO: 589851 - DNA, 75 bp, synthetic construct
  source 1..75: mol_type = other DNA
cacctgtggaaggtcaatcagttgcgactgcatcagaagatcaaagccactttacggggaacgttaatctgacaa

SEQ ID NO: 589852 - DNA, 75 bp, synthetic construct
  source 1..75: mol_type = other DNA
ccccaaatttggggaaaagcccgaatggcgaggcttacagcaagattaagcactctggcagacccggtaaagact

SEQ ID NO: 589853 - DNA, 75 bp, synthetic construct
  source 1..75: mol_type = other DNA
atggaatatgagcagcgcaaaggagaactcacccgcctgtcgcaacgctggctcgctaaacgtctggaggtaaac

SEQ ID NO: 589854 - DNA, 75 bp, synthetic construct
  source 1..75: mol_type = other DNA
caatatcacgttaattgatatgggtatgggatatgacctgcgtaaagccgagctaatccgcctctctcagcgctg

SEQ ID NO: 589855 - DNA, 75 bp, synthetic construct
  source 1..75: mol_type = other DNA
cagaccaaaataaatgggttttgttagccgttctcaattcatacgcaggagtcaatggcaatactaactggtaca

SEQ ID NO: 589856 - DNA, 75 bp, synthetic construct
  source 1..75: mol_type = other DNA
ctggaaaatctggtgatcacactggccgacgatatgacaaaagcttccctgaaaagcatcacgctgagcggcgga

SEQ ID NO: 589857 - DNA, 75 bp, synthetic construct
  source 1..75: mol_type = other DNA
cagcaaaatcatgcaaaaaaatggcggcgggtttcaataactgctgtaaggattctggctggggacaggatatcg

SEQ ID NO: 589858 - DNA, 75 bp, synthetic construct
  source 1..75: mol_type = other DNA
tattacggaatccattcttaatactcctgcaagcaacaaaccatcgcttgatgcaccgtttatttccgagggact

SEQ ID NO: 589859 - DNA, 75 bp, synthetic construct
  source 1..75: mol_type = other DNA
ttcaacccaaagaattagattggttaataaatactgtactgcaaaacctagcgaagtcatatagcaagttcgcta

SEQ ID NO: 589860 - DNA, 75 bp, synthetic construct
  source 1..75: mol_type = other DNA
ctagtattttaagagcaaaagatgaggagtctttagctatttttgtaggggctggtgtttcaaaatcctctgaaa

SEQ ID NO: 589861 - DNA, 75 bp, synthetic construct
  source 1..75: mol_type = other DNA
tggctccttttacaatacaatgtacgttccaatttaagttggatgaagctcgtagaacttatctatgccgataat

SEQ ID NO: 589862 - DNA, 75 bp, synthetic construct
  source 1..75: mol_type = other DNA
agatagtgcgacgacgataacctctacagataccacgcttaatcagctcagccgtttcacccaatcttctttgtc

SEQ ID NO: 589863 - DNA, 75 bp, synthetic construct
  source 1..75: mol_type = other DNA
tgcctggcaggcaaacaagcagtcggtggttaagtcgctcactttgaatggttcaacactgagctttaatcgttt

SEQ ID NO: 589864 - DNA, 75 bp, synthetic construct
  source 1..75: mol_type = other DNA
tactctggtgctaaacgacgacaaacaaattaatccggataatatcaaatggggctatcatggcggcaagctcga

SEQ ID NO: 589865 - DNA, 75 bp, synthetic construct
  source 1..75: mol_type = other DNA
cagtcagcaggtgacctactcttgtgagcgtaaaaaagaaggtaacggtcagatttgcggcggggaattcttctg

SEQ ID NO: 589866 - DNA, 75 bp, synthetic construct
  source 1..75: mol_type = other DNA
gaaaaagaatgggtgccacgtgtggaatggtctgaaagctgcccgttcagtaaaacggaaggcgcgatgaccggc

SEQ ID NO: 589867 - DNA, 75 bp, synthetic construct
  source 1..75: mol_type = other DNA
cctggaacgatgtattccgcccaaagctgggagcttagcgggcaagacacgagcttaaatgttggcgcgggtggg

SEQ ID NO: 589868 - DNA, 75 bp, synthetic construct
  source 1..75: mol_type = other DNA
gaataccctctggctggcagctgtctcttatacacaaatccccacccggggatttgtgatgtctgtcagtctgct

SEQ ID NO: 589869 - DNA, 75 bp, synthetic construct
  source 1..75: mol_type = other DNA
tctcgatgatcgtggtaatgacagcattatccgtgaagtacagtgtctggctacaagtcatgatggtattcactt

SEQ ID NO: 589870 - DNA, 75 bp, synthetic construct
  source 1..75: mol_type = other DNA
agtctgcccttgaaaaactttgcgcacgtcgtggtaatgcctggtacccgatttttcatctggctccacctgccg

SEQ ID NO: 589871 - DNA, 75 bp, synthetic construct
  source 1..75: mol_type = other DNA
agtacgctgagtcccggcaggcttgcggggatcttacgtaatgcagccgatggtcatgcgcgtgatttcttcatc

SEQ ID NO: 589872 - DNA, 75 bp, synthetic construct
  source 1..75: mol_type = other DNA
ctcccggctggttttgacaaactggaaggcgaaatcaaatggaacagcttttaccgcgatgcgatgctgtctgcc

SEQ ID NO: 589873 - DNA, 75 bp, synthetic construct
  source 1..75: mol_type = other DNA
cgatggtgaaacgctgcttgaacttgattatatggcgaatatttttcgggttaacggcgtggatcaattaagtac

SEQ ID NO: 589874 - DNA, 75 bp, synthetic construct
  source 1..75: mol_type = other DNA
aacccggatttttccagtgcctttagctgcacctatatcaagcaggtggtggacggcgagacgctgctggaactg

SEQ ID NO: 589875 - DNA, 75 bp, synthetic construct
  source 1..75: mol_type = other DNA
ggtatcgaaccggtggtggtggccgccagtgatgacgatgctgacgtgcaactggcggacgccatccgtgcactg

SEQ ID NO: 589876 - DNA, 75 bp, synthetic construct
  source 1..75: mol_type = other DNA
atcgcgtattgatggtttccagccatactcaggatgggctgaaaccgctggaagaggcgttgaccgggcgcatca

SEQ ID NO: 589877 - DNA, 75 bp, synthetic construct
  source 1..75: mol_type = other DNA
tggcacctggagccggaacaaatcactcagggctttgtcgaattccatgactacttaggtctgtgtaaatatcgc

SEQ ID NO: 589878 - DNA, 75 bp, synthetic construct
  source 1..75: mol_type = other DNA
ttgatgactttctgaaacgtctgcctgagcttcaggaaacgctgaacgcggacgactttgccctgcaactggcgg

SEQ ID NO: 589879 - DNA, 75 bp, synthetic construct
  source 1..75: mol_type = other DNA
aaccggtgaggaagacacactgaaaaaagaggcgctcaacgaagcacaggcccgtccgcgtcatgccggtgtgcg

SEQ ID NO: 589880 - DNA, 75 bp, synthetic construct
  source 1..75: mol_type = other DNA
aaattcattgttcaccagccgcgcctgaaatccggtctgccgctgcgtaacggtctggcccgtctggtggcggtg

SEQ ID NO: 589881 - DNA, 75 bp, synthetic construct
  source 1..75: mol_type = other DNA
tcatcgtgcaaattgcgcctggcggtccggtcgaccaggccatcgccgccattgagtttggtaatgccggagtat

SEQ ID NO: 589882 - DNA, 75 bp, synthetic construct
  source 1..75: mol_type = other DNA
gggacacccggttattcatgctgccagcagccaggccgtggcaaataagcttaagacgttcggcgataattccgt

SEQ ID NO: 589883 - DNA, 75 bp, synthetic construct
  source 1..75: mol_type = other DNA
tttactatgcatgactttgatatggctcgctttattatgcaggatgaagttagcgaggtttatgttaaaggcaat

SEQ ID NO: 589884 - DNA, 75 bp, synthetic construct
  source 1..75: mol_type = other DNA
gtgaagatgcattattggcgcagcgtattgccattgctgcaaaacaatcattaaaaagtggactgccagtgaaga

SEQ ID NO: 589885 - DNA, 75 bp, synthetic construct
  source 1..75: mol_type = other DNA
gttaaccagtcgctgaacgggaaaaataactcgctggttgttgtcccgacggtttctgctgccagagaagcaact

SEQ ID NO: 589886 - DNA, 75 bp, synthetic construct
  source 1..75: mol_type = other DNA
gatgctgacgctccggtcatttcacaacgaaataaaggcgatattcactggtcatatgatgaaacaacgggtatc

SEQ ID NO: 589887 - DNA, 75 bp, synthetic construct
  source 1..75: mol_type = other DNA
acgacaaccactactcggcaacggaagtgtcgatgtcggagcaggattacagctcgcgctcctggtatctgggga

SEQ ID NO: 589888 - DNA, 75 bp, synthetic construct
  source 1..75: mol_type = other DNA
ttgtgctgcaacaggaacaccaccagcggcgggaaaacgaaaaggcgtaccaatggacgaagccaaacaagttac

SEQ ID NO: 589889 - DNA, 75 bp, synthetic construct
  source 1..75: mol_type = other DNA
ggggccttcggtgtgatgtaatgcctcgctttagtgcaaggctggtacagaaaaacaaccggctgcattatttag

SEQ ID NO: 589890 - DNA, 75 bp, synthetic construct
  source 1..75: mol_type = other DNA
ttcgtcgccagcgtggaagagggtggatgtcggtccagaaaatgtggccagaggaccagcttgaactggcgctga

SEQ ID NO: 589891 - DNA, 75 bp, synthetic construct
  source 1..75: mol_type = other DNA
aaaaacaaaaaaaaccttattaagtttattccaatttcaataatcaaaattttattccctgaacgtttaagaaga

SEQ ID NO: 589892 - DNA, 75 bp, synthetic construct
  source 1..75: mol_type = other DNA
gtttactacgagcggtttaccaaggctggtctgaacaataatatcaattatagtacactgaaatttactctcggc

SEQ ID NO: 589893 - DNA, 75 bp, synthetic construct
  source 1..75: mol_type = other DNA
gcgcaggagagcaggccggagggaacagacagcctgtacatctacagggacccggggagttatgaaccgctggcg

SEQ ID NO: 589894 - DNA, 75 bp, synthetic construct
  source 1..75: mol_type = other DNA
ggtgcatgtggcgctacgcccggaaaaatcatgctttgcgaggaacctcccgctgacggttataactttgcggta

SEQ ID NO: 589895 - DNA, 75 bp, synthetic construct
  source 1..75: mol_type = other DNA
ttcgtctgaaaagtgggcagatgattagcgcccagctacaaaacgcccatcgtcatcgtaaagggttaccgacct

SEQ ID NO: 589896 - DNA, 75 bp, synthetic construct
  source 1..75: mol_type = other DNA
gctgaaattcgcgaaaaacagatggctggctaattacagccgttccatcacgtttaccacaggcgggaaatgctc

SEQ ID NO: 589897 - DNA, 75 bp, synthetic construct
  source 1..75: mol_type = other DNA
gcgctattcccccatatgaccgtggagcaaaacattgcttttggtctgaaacaagacaagttaccaaaagcggaa

SEQ ID NO: 589898 - DNA, 75 bp, synthetic construct
  source 1..75: mol_type = other DNA
gggaaatttgtccagattggcgaaccggaagagatctatgagcatccgaccacccgctacagcgccgaatttatt

SEQ ID NO: 589899 - DNA, 75 bp, synthetic construct
  source 1..75: mol_type = other DNA
ctataaaggcgaaatcttcgcgctgctgggcgcatccggctgtggcaagtccacgctgctgcgtatgctggcagg

SEQ ID NO: 589900 - DNA, 75 bp, synthetic construct
  source 1..75: mol_type = other DNA
gccaggtgttccaacaggatgaccgaatgaaacagatgctttccactgccatgcgagacaaaaaatatgtcgcgg

SEQ ID NO: 589901 - DNA, 75 bp, synthetic construct
  source 1..75: mol_type = other DNA
gtggatgatggctacgtcgaactgagtgtgacaccaggcttctgcgttggattgcccgtcaccgaaatcagcgat

SEQ ID NO: 589902 - DNA, 75 bp, synthetic construct
  source 1..75: mol_type = other DNA
tttacctcggtttcggtatcggtagcatttgtggttcgattatcgcctcactgtttggcggcttctatgtgacct

SEQ ID NO: 589903 - DNA, 75 bp, synthetic construct
  source 1..75: mol_type = other DNA
cggtgttgaaatcggtattcgtcgtctggaagcgcgcccgacagccgatctgtgcatcgactgcaaaacgctggc

SEQ ID NO: 589904 - DNA, 75 bp, synthetic construct
  source 1..75: mol_type = other DNA
aagatttcggctactgcgaatcctgcggtgtggaaatcggtattcgtcgtctggaagcgcgtccaacagctgatt

SEQ ID NO: 589905 - DNA, 75 bp, synthetic construct
  source 1..75: mol_type = other DNA
tcgtggtctccggatattaccgatccaggaaaatcaaatgcggcctatcagcgagattaccagacaatttacgat

SEQ ID NO: 589906 - DNA, 75 bp, synthetic construct
  source 1..75: mol_type = other DNA
cgtcatcgtaaagggctgccgacctggggcgatgaagtccgtttatgttgggaagtggacagttgtgtggtgctg

SEQ ID NO: 589907 - DNA, 75 bp, synthetic construct
  source 1..75: mol_type = other DNA
ggtgcggaatgcgaaaacaggcgtctgggaagattatgttcctggcatgactattttcgagaacccagtcaaatt

SEQ ID NO: 589908 - DNA, 75 bp, synthetic construct
  source 1..75: mol_type = other DNA
atacattccggtatcatctgtctcatcgtattcgccggatggttgggaatgaaaatacatcatcgccatatcagc

SEQ ID NO: 589909 - DNA, 75 bp, synthetic construct
  source 1..75: mol_type = other DNA
ggagaaccgcataaaccgggatgcgttgttagcgagccaggtgagattaaaaaggttgtggtgaaggttaaggct

SEQ ID NO: 589910 - DNA, 75 bp, synthetic construct
  source 1..75: mol_type = other DNA
tgccggatacataccggtatcatctgtctcatcgtattcgccggctggttgggaatgaaaagacatcatcgccat

SEQ ID NO: 589911 - DNA, 75 bp, synthetic construct
  source 1..75: mol_type = other DNA
tgccggatacataccggtatcatctgtctcatcgtattcgccggttgtttgggagtgaaaagacatcatcgccat

SEQ ID NO: 589912 - DNA, 75 bp, synthetic construct
  source 1..75: mol_type = other DNA
tgccggatacataccggtatcatctgtctcatcgtattcgccggttgattgggattgaaaagacatcatcgccat

SEQ ID NO: 589913 - DNA, 75 bp, synthetic construct
  source 1..75: mol_type = other DNA
tttatcttgccacgctcggtggcgcgaaatctctggggcttgacgatctgatcggcaactttataccaggcaaag

SEQ ID NO: 589914 - DNA, 75 bp, synthetic construct
  source 1..75: mol_type = other DNA
taacggtgccgaatatataatgacattgcgaggcagtggatttgaatacgaagaaattcccataacaataaatga

SEQ ID NO: 589915 - DNA, 75 bp, synthetic construct
  source 1..75: mol_type = other DNA
acagaagattgtatgcctgggatattttgcagaaaaaacagtctgacataccgaaaaggattaaaggttatattc

SEQ ID NO: 589916 - DNA, 75 bp, synthetic construct
  source 1..75: mol_type = other DNA
cgacaatatttttatgaatgtcatgacgtttaacactcaatcgcccgtcgagaaaaaagcggaattgcacgagca

SEQ ID NO: 589917 - DNA, 75 bp, synthetic construct
  source 1..75: mol_type = other DNA
tcgcaccgacttcatctcccggacagatggcaatggcgcaacgcctgaaagaagagtttcccgatacgtggatac

SEQ ID NO: 589918 - DNA, 75 bp, synthetic construct
  source 1..75: mol_type = other DNA
cagtacgaggcagttttattgatgtcacccgtacagtcgataacccggaagagatttcctctgcgctgcgtttta

SEQ ID NO: 589919 - DNA, 75 bp, synthetic construct
  source 1..75: mol_type = other DNA
gactcatctctgctttcgctattggttcttatggacttggtagtctgggtttcaaatttatcgatacgcaactgt

SEQ ID NO: 589920 - DNA, 75 bp, synthetic construct
  source 1..75: mol_type = other DNA
tgacaagaaataccaatcagcaaaagttattatcgagtgtgaaggttatcgctttggtgggagcgcaacaaaact

SEQ ID NO: 589921 - DNA, 75 bp, synthetic construct
  source 1..75: mol_type = other DNA
aagcctgttcagcgattattgctaaatgacctgaacgttaatgcagcaaagaaagcgctttcaaaattacaggac

SEQ ID NO: 589922 - DNA, 75 bp, synthetic construct
  source 1..75: mol_type = other DNA
aagacgctgaaaaaagtggaagacgaagatttcggctactgcgaatcctgcggtgttgaaattggtattcgccgt

SEQ ID NO: 589923 - DNA, 75 bp, synthetic construct
  source 1..75: mol_type = other DNA
ggtagcggttgctatcgtgcggagcgcaaaagaatgcttattgcaccgctggtggcggttgccactggagaacga

SEQ ID NO: 589924 - DNA, 75 bp, synthetic construct
  source 1..75: mol_type = other DNA
ttttgatgttattgcatccctgaaagaaggtgattcgtcggtttgtgaagatgttcgtatcgaaaagaaagaaac

SEQ ID NO: 589925 - DNA, 75 bp, synthetic construct
  source 1..75: mol_type = other DNA
atgatttgaacgtcaacgctgccaaaaaagcgctggaaaaattgcaggacggcaattcagagaagtttacgcgcc

SEQ ID NO: 589926 - DNA, 75 bp, synthetic construct
  source 1..75: mol_type = other DNA
accgaagggctggcagggcaaggaattgctgtctctggtgcgctggcggtgcttaccagtctgactatctcccgt

SEQ ID NO: 589927 - DNA, 75 bp, synthetic construct
  source 1..75: mol_type = other DNA
tgtatcgattgtctaataaattttatattcaaaataagtcactcttaaaattatatcctaaagcaatttattcag

SEQ ID NO: 589928 - DNA, 75 bp, synthetic construct
  source 1..75: mol_type = other DNA
tcttcgggataccgcccacggcgcggggatcgcgttgtttatgacggacaacaatggacggtcacacggcatgaa

SEQ ID NO: 589929 - DNA, 75 bp, synthetic construct
  source 1..75: mol_type = other DNA
gggcaggctgcatgacgctggcgcgcgagctatcagagagcaatggcaaacttctacaacgcccggtacacgaag

SEQ ID NO: 589930 - DNA, 75 bp, synthetic construct
  source 1..75: mol_type = other DNA
tactgaacttgataacgggcatgacttttatgcaccacaaagctttttagcgaaggatggtcggcgtattgttat

SEQ ID NO: 589931 - DNA, 75 bp, synthetic construct
  source 1..75: mol_type = other DNA
ggacaccagtaataaagtctctaccttgtcgccgaaaaacgttacggtcctgaactaccagctgaaacaagtgac

SEQ ID NO: 589932 - DNA, 75 bp, synthetic construct
  source 1..75: mol_type = other DNA
aaatcattttttggtatcgttttaaaaaaacaaaaaaaattatatatgtacagattaatcggtttctggacggga

SEQ ID NO: 589933 - DNA, 75 bp, synthetic construct
  source 1..75: mol_type = other DNA
atgacaccttcaaactatcagcgtacccgctggctgacactcattggtactatcattacccagtttgcattgggt

SEQ ID NO: 589934 - DNA, 75 bp, synthetic construct
  source 1..75: mol_type = other DNA
ctgctgattctgtcattggcgctatctacgacgattcgccagccagagcagaaagtattgcgtgaggcgcatggc

SEQ ID NO: 589935 - DNA, 75 bp, synthetic construct
  source 1..75: mol_type = other DNA
tttccatcgccaacctttcaggtcgtctggtgctgggcattctgtctgacaaaatcgcccgtatccgtgttatca

SEQ ID NO: 589936 - DNA, 75 bp, synthetic construct
  source 1..75: mol_type = other DNA
cggcatgcggactgcaggcagagaaaactggccgattttctctgcactggagggataatacaaggtctgatatcc

SEQ ID NO: 589937 - DNA, 75 bp, synthetic construct
  source 1..75: mol_type = other DNA
ttgctgattctttcgctggcgctttcaacgaccattcgccagcctgaattcagaacgtttcgtgaggtacatggt

SEQ ID NO: 589938 - DNA, 75 bp, synthetic construct
  source 1..75: mol_type = other DNA
taagttgcaggaacgttttggcgtaaaacgcgtcactatggcgtccggcattttactggggctgggtttcttcct

SEQ ID NO: 589939 - DNA, 75 bp, synthetic construct
  source 1..75: mol_type = other DNA
gctacaacaagttacagatccctgtacagagcagtctggcgcgttatgctgactggctgaaagattttaaacagg

SEQ ID NO: 589940 - DNA, 75 bp, synthetic construct
  source 1..75: mol_type = other DNA
atgaaaaggaatttattatcttccgctattatagtcgccatcatggccctcggtctcacgggttgtgatgataaa

SEQ ID NO: 589941 - DNA, 75 bp, synthetic construct
  source 1..75: mol_type = other DNA
ggaattacaacttccgatgggaaacctaacgctaggtacggaagataacgatattgtttactttccccttgaaca

SEQ ID NO: 589942 - DNA, 75 bp, synthetic construct
  source 1..75: mol_type = other DNA
tggtcggtctggcggatggcgcgggttacctgctgacgctctctaactgcgtgaagtggttcccggagcgtaaag

SEQ ID NO: 589943 - DNA, 75 bp, synthetic construct
  source 1..75: mol_type = other DNA
agttggatggtagaagcctcttacccggcggcattaaacgaatacaatgaaatggtcggcgattataaccgtctg

SEQ ID NO: 589944 - DNA, 75 bp, synthetic construct
  source 1..75: mol_type = other DNA
tcaactactactctctggcagtcatgatttcagcgaaacaaattaataacctgatatcgcaagataagtttgatg

SEQ ID NO: 589945 - DNA, 75 bp, synthetic construct
  source 1..75: mol_type = other DNA
ctctggcagacacagggcacaacggatgcacagggccgtgccaccacgacgtgggaaagtaccacgcccggaaca

SEQ ID NO: 589946 - DNA, 75 bp, synthetic construct
  source 1..75: mol_type = other DNA
cagaactgcgtcaggccggcgggaaggttatcagcaacaccggcaaccggattacgctgcagttacccgcctggt

SEQ ID NO: 589947 - DNA, 75 bp, synthetic construct
  source 1..75: mol_type = other DNA
ctggactgcatcctcaccggccgtaagcatcaatggcaatgtcatgaccgtgaagagcaatccggcaggtgtcac

SEQ ID NO: 589948 - DNA, 75 bp, synthetic construct
  source 1..75: mol_type = other DNA
tacgccccaaccggcataattacctatttatccaaacatgtaatcgataaaattaaagatatcggtgatatcacc

SEQ ID NO: 589949 - DNA, 75 bp, synthetic construct
  source 1..75: mol_type = other DNA
atgacaaaattacaacttaagtaccgggagttaaaaattatctcggtaatcgctgctagtgaaaatatcagccat

SEQ ID NO: 589950 - DNA, 75 bp, synthetic construct
  source 1..75: mol_type = other DNA
aacttactaccgggcattttatctgccacagagcgtggtcagtgaactgtccgggccaggtggttattacgcctg

SEQ ID NO: 589951 - DNA, 75 bp, synthetic construct
  source 1..75: mol_type = other DNA
gaataccgcaaacagacgctgattaccctgcagctgccaccggatgtgtacggtgcagagctgacgaccgtcacc

SEQ ID NO: 589952 - DNA, 75 bp, synthetic construct
  source 1..75: mol_type = other DNA
gtcagcagtacacggctcccgccattacagtcatgcctgccctgacggtcagcagcatcactggcatcgatgcca

SEQ ID NO: 589953 - DNA, 75 bp, synthetic construct
  source 1..75: mol_type = other DNA
tttcagcccaacagggcacaaccagtgcacagggcgaagccacggtaacactgaccagcacgcaggccggacagg

SEQ ID NO: 589954 - DNA, 75 bp, synthetic construct
  source 1..75: mol_type = other DNA
accgttatcagtggtaatggtgtgaaaagtaccattgcgtatcttttccccggcggtaaggaaggtctgttgaca

SEQ ID NO: 589955 - DNA, 75 bp, synthetic construct
  source 1..75: mol_type = other DNA
ccctgaatgtgcgtgacgcggcaggtcagcccgtgaaggacaaagccgtgcagtggagcaccgacctgggtacac

SEQ ID NO: 589956 - DNA, 75 bp, synthetic construct
  source 1..75: mol_type = other DNA
ctgacaccacaggtaaacgcaaaatacgggctgtcccgtatcgagcttgacgacgcagaactgcgtcaggctggc

SEQ ID NO: 589957 - DNA, 75 bp, synthetic construct
  source 1..75: mol_type = other DNA
tttaaataccttggtattgataacgtctcattcaaccacgacggtacattttcacctgttggcgaatactcatct

SEQ ID NO: 589958 - DNA, 75 bp, synthetic construct
  source 1..75: mol_type = other DNA
gccatcacagtgtgcaaaaatgctgggccgcactgctggcctccgtcattttgttattaccggccaatctactgc

SEQ ID NO: 589959 - DNA, 75 bp, synthetic construct
  source 1..75: mol_type = other DNA
ttacttctcctgtatgtctcaaaataagacagatttggagcagattgcaacgttatttgatattgatggaaatgt

SEQ ID NO: 589960 - DNA, 75 bp, synthetic construct
  source 1..75: mol_type = other DNA
tgacatcattctgattgatgccagctggcatggacatgtatcaggctgctggaaaacggtatttgtatttactgc

SEQ ID NO: 589961 - DNA, 75 bp, synthetic construct
  source 1..75: mol_type = other DNA
tctataaaggtacaggattatgcccatatccaggcgggtgtcggcttgttctcttttgtggcgttggtgatttta

SEQ ID NO: 589962 - DNA, 75 bp, synthetic construct
  source 1..75: mol_type = other DNA
gataaattctcatcaaagtgcctattgtccgcgctgtcaggcaaaaattcgtgacgggcgcgactggtcgctaac

SEQ ID NO: 589963 - DNA, 75 bp, synthetic construct
  source 1..75: mol_type = other DNA
gttttattttggcgcagcggtaattttgactattcttgctgtggaatggctggacagccgcttactttgggatgc

SEQ ID NO: 589964 - DNA, 75 bp, synthetic construct
  source 1..75: mol_type = other DNA
aacataagcaacacaaataataatattcttatatccattaatttagatagctcaacaatttttgatgttagtgag

SEQ ID NO: 589965 - DNA, 75 bp, synthetic construct
  source 1..75: mol_type = other DNA
gaggttgattttggggatatagctgttacggatgtggcaaatgagcgtaaccgacgggtaaaacaaatacctgtt

SEQ ID NO: 589966 - DNA, 75 bp, synthetic construct
  source 1..75: mol_type = other DNA
tagaatctggtctttcaggaaaagatagtgcaacctttacctttacggccataccctataaagaagggaattcag

SEQ ID NO: 589967 - DNA, 75 bp, synthetic construct
  source 1..75: mol_type = other DNA
aatttcctggacattccgtgcaccggcaggttgtgtgctttctggtattaacgttcaggaaactggctcacattc

SEQ ID NO: 589968 - DNA, 75 bp, synthetic construct
  source 1..75: mol_type = other DNA
gttcactattaatctgcggacgggtgaaatatccatgtcgcataaagtgtctgttggtggcggctctcaggtgaa

SEQ ID NO: 589969 - DNA, 75 bp, synthetic construct
  source 1..75: mol_type = other DNA
ccgtttttacgttctgcgcccgccaggaacatgcgtcttatacagacggtaacggcttccgacactttgtcgcgc

SEQ ID NO: 589970 - DNA, 75 bp, synthetic construct
  source 1..75: mol_type = other DNA
cctggacgcccttgaatcagagctttaccgcaatctgcgccccctatatccaaaaacggtaattcgcatccgcaa

SEQ ID NO: 589971 - DNA, 75 bp, synthetic construct
  source 1..75: mol_type = other DNA
atatcactccgctgactgccgatcacatttctttgcgttgccatcaaaacgccaccgctgaacgctggcgtcgcg

SEQ ID NO: 589972 - DNA, 75 bp, synthetic construct
  source 1..75: mol_type = other DNA
gtcagaaaatatgatcaatggcagaccgatttgtctgtttaaattgcatgaaccggtacaggttgcgcactggca

SEQ ID NO: 589973 - DNA, 75 bp, synthetic construct
  source 1..75: mol_type = other DNA
atactgatattcttcctgcatattcagatgaagtgtcacagataataaataaaaaagtgatggagatatgttttt

SEQ ID NO: 589974 - DNA, 75 bp, synthetic construct
  source 1..75: mol_type = other DNA
agtggcgtaaaacttgatgaagataagcagcaggtaatggaaataatgcagcaggtctgggaggacgatagctgg

SEQ ID NO: 589975 - DNA, 75 bp, synthetic construct
  source 1..75: mol_type = other DNA
attatcgattggtcgccggacgggggaatatccgtggtagcgaaggtccgcgcaatgcggtagctactgggctcc

SEQ ID NO: 589976 - DNA, 75 bp, synthetic construct
  source 1..75: mol_type = other DNA
gatctcagttaaaaccagttcgccaaaaggtgagcatgagcgattaccgaatccgacgctggcggtcaccgatgg

SEQ ID NO: 589977 - DNA, 75 bp, synthetic construct
  source 1..75: mol_type = other DNA
gcggatgatgacatcatagaacaattgttagttgagacgagtccgcaaaaaatcattgatctctttagtcagtat

SEQ ID NO: 589978 - DNA, 75 bp, synthetic construct
  source 1..75: mol_type = other DNA
gcagatgatgacatcatagcgcaattgctggttgagacgagcccgcaaaaaatcattgatctctttagtcagtat

SEQ ID NO: 589979 - DNA, 75 bp, synthetic construct
  source 1..75: mol_type = other DNA
gcattgctggcgggctgtgctcacgattcgccctgcgttccggtttatgacgatcaggggcgtctggttcacacc

SEQ ID NO: 589980 - DNA, 75 bp, synthetic construct
  source 1..75: mol_type = other DNA
acctctcaaagtttgataattaatgagctgttaaatggagttaatagaaataccattccatttcagaaaataagt

SEQ ID NO: 589981 - DNA, 75 bp, synthetic construct
  source 1..75: mol_type = other DNA
tgtgatattaaaaatacaacacatacaaaatgaaacagtagattttaatgaaacaagagagagggtaaaggaact

SEQ ID NO: 589982 - DNA, 75 bp, synthetic construct
  source 1..75: mol_type = other DNA
tacagctcgctagtaaagcagaaaaactcaacagaagatgttgttttgataggaaaaatgatttcagatgaagtt

SEQ ID NO: 589983 - DNA, 75 bp, synthetic construct
  source 1..75: mol_type = other DNA
aggtagctctaacggtgtggaactaaccggactgcaactggatgaagaaagaaaacaagtgatgaaaattatgca

SEQ ID NO: 589984 - DNA, 75 bp, synthetic construct
  source 1..75: mol_type = other DNA
accggcatactttaatgatgctcagcgtcaggcaaccaaagacgcaggccgtatcgctggtctggaagtaaaacg

SEQ ID NO: 589985 - DNA, 75 bp, synthetic construct
  source 1..75: mol_type = other DNA
aaaagcgaaaatcgaactgtcttccgctcagcagaccgacgttaacctgccgtacatcactgcagacgcgaccgg

SEQ ID NO: 589986 - DNA, 75 bp, synthetic construct
  source 1..75: mol_type = other DNA
aagcaggttgaagaagcaggcgacaaactgccggctgacgacaaaactgctatcgagtctgcgctgactgcactg

SEQ ID NO: 589987 - DNA, 75 bp, synthetic construct
  source 1..75: mol_type = other DNA
agcctcttttttatcttcggtcatctttatctttgcaccacggggcgtacgccacacgaaacctttaaaagcatg

SEQ ID NO: 589988 - DNA, 75 bp, synthetic construct
  source 1..75: mol_type = other DNA
tcttcggccatctctatctttgcacgacgggacgcacaccgggcgaaaccttcaaatgtatggtagatggttatc

SEQ ID NO: 589989 - DNA, 75 bp, synthetic construct
  source 1..75: mol_type = other DNA
tcttcggtcatctttatctttgcaccacggggcgtacgccacacgaaacctttaaaagcatggcgatggctatca

SEQ ID NO: 589990 - DNA, 75 bp, synthetic construct
  source 1..75: mol_type = other DNA
aagagcagaagattagccagtctaccctggacgctcttgaatccgagctttaccgcaatctgcgccctctgtatc

SEQ ID NO: 589991 - DNA, 75 bp, synthetic construct
  source 1..75: mol_type = other DNA
accggactgcaactggacgaagaaagaaaacgagtgatgaaaattatgcagaaggtgtgggaagacgacagctgg

SEQ ID NO: 589992 - DNA, 75 bp, synthetic construct
  source 1..75: mol_type = other DNA
tttgacgttacaccggatggtcgcgtggataacgtacaaattctttccgccaaacccgcaaacatgtttgagcgc

SEQ ID NO: 589993 - DNA, 75 bp, synthetic construct
  source 1..75: mol_type = other DNA
ttgaagatctggttaaccgttccatcgagccgctgaaagttgcactgcaggacgctggcctgtccgtatctgata

SEQ ID NO: 589994 - DNA, 75 bp, synthetic construct
  source 1..75: mol_type = other DNA
aacaaatctctgggtcagttcaacctagatggtatcaacccggcaccgcgcggcatgccgcagatcgaagttacc

SEQ ID NO: 589995 - DNA, 75 bp, synthetic construct
  source 1..75: mol_type = other DNA
accggactgcaactggacgaagaaagaaaacaagtgatgaaaattatgcagaaggtctgggaggacgacagctgg

SEQ ID NO: 589996 - DNA, 75 bp, synthetic construct
  source 1..75: mol_type = other DNA
accaccgtgctggggcaatggtggtttccctggcaggccaacggttcgttgattcgtgaaggtgatacggtgcgg

SEQ ID NO: 589997 - DNA, 75 bp, synthetic construct
  source 1..75: mol_type = other DNA
gattgggtgaaaagtgattgtgaagttatttatctgcctcgaacaccatctatatcgactactgaaattatagaa

SEQ ID NO: 589998 - DNA, 75 bp, synthetic construct
  source 1..75: mol_type = other DNA
ggctcggcattaatcgggcagaattttaccggcaacggctattttcatggccgcccatcggcaacggcagaaatg

SEQ ID NO: 589999 - DNA, 75 bp, synthetic construct
  source 1..75: mol_type = other DNA
ccttataatccacaggcttctggcgggagcaatctggcagtcagtaacccggagctggataaacagatagccgca

SEQ ID NO: 590000 - DNA, 75 bp, synthetic construct
  source 1..75: mol_type = other DNA
acccggatgccagcacgagcgttccggttgaactggtgacggcatcggcaagcgggctggacaataatatcaccc

SEQ ID NO: 590001 - DNA, 75 bp, synthetic construct
  source 1..75: mol_type = other DNA
tataaccaaactgatcgtttaaaaataattagttcaatgaaatgtgttgatgaggttttcattgaggaatctttg

SEQ ID NO: 590002 - DNA, 75 bp, synthetic construct
  source 1..75: mol_type = other DNA
gtttatttacccaggagcatctgctgactcaccatcccatgctggaggggattttgctgtctgagtgcgtgcgtt

SEQ ID NO: 590003 - DNA, 75 bp, synthetic construct
  source 1..75: mol_type = other DNA
agaatatatatcaccatcataccctgacggtcgggagttttacttttccgggagaaggcgacgttattgcgattg

SEQ ID NO: 590004 - DNA, 69 bp, synthetic construct
  source 1..69: mol_type = other DNA
atgtacgcatggcgcctcccgctaagttctgcaatgatcaaacagaactcactacgtgcccttaaaact

SEQ ID NO: 590005 - DNA, 75 bp, synthetic construct
  source 1..75: mol_type = other DNA
cgacatttctctttttgttactgattactggcggcgtttacccgctgctgaccaccgcgctggggcaatggtggt

SEQ ID NO: 590006 - DNA, 75 bp, synthetic construct
  source 1..75: mol_type = other DNA
tgcgggtacgcatcccgcaagacttgaaagacacactggaaaaaatttccagagaaaacgacagaacactaaccg

SEQ ID NO: 590007 - DNA, 75 bp, synthetic construct
  source 1..75: mol_type = other DNA
agcggtagcgagctgcgtctgaagctggtctggctatgctggtacgatttgatgctgggtaattgccttgatgac

SEQ ID NO: 590008 - DNA, 75 bp, synthetic construct
  source 1..75: mol_type = other DNA
tatgccatcaccccgcgctttgcccctacctcgacaacggagttgctggaggccgtgcagcgcctgcggactgag

SEQ ID NO: 590009 - DNA, 75 bp, synthetic construct
  source 1..75: mol_type = other DNA
ctacgcactttgcatcgtcagctaaaacagcaaaccggtttgactccccagcgttaccttaaccgtttacggttg

SEQ ID NO: 590010 - DNA, 75 bp, synthetic construct
  source 1..75: mol_type = other DNA
atggtagtgtccgctattgccagtatacctcagctgcaccggggcgaccgtgtcagcgacgttgccagaacgctc

SEQ ID NO: 590011 - DNA, 75 bp, synthetic construct
  source 1..75: mol_type = other DNA
agaacgaaaaatactatctggccggcgcactgcacagtggcacgggtaaagtcagctacgtgggcggcaacagca

SEQ ID NO: 590012 - DNA, 75 bp, synthetic construct
  source 1..75: mol_type = other DNA
cagatggatatctaccgcaatatcggttatcgcgtattgatggtttccagccatactcaggatgggctaaaaccg

SEQ ID NO: 590013 - DNA, 75 bp, synthetic construct
  source 1..75: mol_type = other DNA
tgaagaaatcgggcgcaagattgctcgccagaatgctgtaaacaaaatctggatgcttgaaggttacttgctgaa

SEQ ID NO: 590014 - DNA, 75 bp, synthetic construct
  source 1..75: mol_type = other DNA
cgcatatcgctgcgggttcagcgacagtaaccacttttcgacgctgtttcgccgtgagtttaactggtcaccgcg

SEQ ID NO: 590015 - DNA, 75 bp, synthetic construct
  source 1..75: mol_type = other DNA
gcaactgttgaaaaaggttcgtcactttatggataccgttagcccattccccggagggaaacatgggctggctaa

SEQ ID NO: 590016 - DNA, 75 bp, synthetic construct
  source 1..75: mol_type = other DNA
gaaccgaacgacgcctgatgcagaaaactatccataaaacaaaggacaaaaaccacacccgccggctcaccgcca

SEQ ID NO: 590017 - DNA, 75 bp, synthetic construct
  source 1..75: mol_type = other DNA
gtggcgaacgacgcctgatgcagaaagctattcataaaacgcgtgataaaaatcatgcccgcagactcacggcca

SEQ ID NO: 590018 - DNA, 75 bp, synthetic construct
  source 1..75: mol_type = other DNA
tcagagtgcttgttgtctttaaactgttcggtcgtacatggacgcttgaccttaaggataatgaccacacagacc

SEQ ID NO: 590019 - DNA, 75 bp, synthetic construct
  source 1..75: mol_type = other DNA
tcttcaatcgctctgtaacgagttaagcggactcttcaggtcaactataaggtcaggtactgttttgtgtcagga

SEQ ID NO: 590020 - DNA, 75 bp, synthetic construct
  source 1..75: mol_type = other DNA
atggtaaatctccctcctgagctggggtcacctgatgtatgggctggtggaggtgtggggttggctgcaggccta

SEQ ID NO: 590021 - DNA, 75 bp, synthetic construct
  source 1..75: mol_type = other DNA
cttcgtcggccaaccggctgctcgaccggctcgaatatctgcaacgcatcgatctccccgaggatctgcttgccg

SEQ ID NO: 590022 - DNA, 75 bp, synthetic construct
  source 1..75: mol_type = other DNA
ggctgcggctatgtgaaatcgaaagattactggcgtctgggtgccatcttcggggtcatttacatcgccatgttg

SEQ ID NO: 590023 - DNA, 75 bp, synthetic construct
  source 1..75: mol_type = other DNA
tcaccaaacgcaacggtgattgtactggttctggtgttctactttgcgcactacctgtttgccagcctgtctgcg

SEQ ID NO: 590024 - DNA, 75 bp, synthetic construct
  source 1..75: mol_type = other DNA
gaactaaaaaccatgggtgcgctgacacgcagagagtggacgctgattggtcttgtattgctcagcttaggtttg

SEQ ID NO: 590025 - DNA, 75 bp, synthetic construct
  source 1..75: mol_type = other DNA
gttgtaccgtggaaagacattacccgctacaacagcgcctggaacacactggtcaacctggcaacgctggttgtt

SEQ ID NO: 590026 - DNA, 75 bp, synthetic construct
  source 1..75: mol_type = other DNA
ggtcaacctggcaacgctggttgttatggcgaatggcctgacccgttctggctttatcgactggttcgccaacac

SEQ ID NO: 590027 - DNA, 75 bp, synthetic construct
  source 1..75: mol_type = other DNA
atcgccctgtttctggtgaaattcatggggaaacgcacgctgacattgggttatgcgattgtcattatcgacatt

SEQ ID NO: 590028 - DNA, 75 bp, synthetic construct
  source 1..75: mol_type = other DNA
gaccatcatggatgcgattaacgccgcgggcggtctgaccgcagatgcagactggcgcaacgtggtgctcaccca

SEQ ID NO: 590029 - DNA, 75 bp, synthetic construct
  source 1..75: mol_type = other DNA
ccaggtacgcaacgagattacagcgcgtctggattcagtcattgaaagcccgcaagtcgatgtcagcgtcgcggc

SEQ ID NO: 590030 - DNA, 75 bp, synthetic construct
  source 1..75: mol_type = other DNA
cagggcgattatcacgcaggaggccggagataaacgatatctgcgtatcagtgaaaatcttgctgatgtgaaaga

SEQ ID NO: 590031 - DNA, 75 bp, synthetic construct
  source 1..75: mol_type = other DNA
acagaagagtccttaaaaaatgcaatggagcagacaggatttcagaatgaaacagtaataagaaaagacaactgg

SEQ ID NO: 590032 - DNA, 75 bp, synthetic construct
  source 1..75: mol_type = other DNA
cggtactgacattagctgttctgtctttaacagcatgtacccttgttcctggtcagaatttatcgaccagtaata

SEQ ID NO: 590033 - DNA, 75 bp, synthetic construct
  source 1..75: mol_type = other DNA
ggttatgtcgcaggctaacccggagcttgagcagcaaattgcagactatgaataccgtattggccccggtgatgt

SEQ ID NO: 590034 - DNA, 75 bp, synthetic construct
  source 1..75: mol_type = other DNA
ggtcaacctggcaacgctggttgttatggcgaacggtttgacccgctctggttttatcgactggttcgctagcac

SEQ ID NO: 590035 - DNA, 75 bp, synthetic construct
  source 1..75: mol_type = other DNA
atgaaaattttactggctgcgttgacgtcatcttttatgctggttggctgtacgcctcgcattgaagtcgctgca

SEQ ID NO: 590036 - DNA, 75 bp, synthetic construct
  source 1..75: mol_type = other DNA
aaaggaaaatattcaatatcaaaaatatgataattttagtttccagttgtttgagtatgacaccgataacattga

SEQ ID NO: 590037 - DNA, 75 bp, synthetic construct
  source 1..75: mol_type = other DNA
accaaatacgcgaaagttgacggcaccaaaccggttgctgaagttcgcgctgatctggaaaaaatcctcggctaa

SEQ ID NO: 590038 - DNA, 75 bp, synthetic construct
  source 1..75: mol_type = other DNA
ccgtatccatggcgttcgcgatacgcaggctattgaagaatgggtaaaagagttctcggaaatcgggcagcattt

SEQ ID NO: 590039 - DNA, 75 bp, synthetic construct
  source 1..75: mol_type = other DNA
tcgtatccatggggtgcgtgatacccagtttatcgaggagtgggtgaaggaattctccgaaatcggtcagcatta

SEQ ID NO: 590040 - DNA, 75 bp, synthetic construct
  source 1..75: mol_type = other DNA
attatggtttcacatgatatgaaaaatctacgacaacaatgcgatatgggcatcttgttacgtgatggtaaatta

SEQ ID NO: 590041 - DNA, 75 bp, synthetic construct
  source 1..75: mol_type = other DNA
ataaatggctggcgaagattgctaccaaagtgatgcaggcgtttccaggcgctttccctaatgcggaagtggtgg

SEQ ID NO: 590042 - DNA, 75 bp, synthetic construct
  source 1..75: mol_type = other DNA
gggcgcacgcattcttaatcagacaatgccgcaggttgctgcaaaactgggtgattcagtcactatctggcatca

SEQ ID NO: 590043 - DNA, 75 bp, synthetic construct
  source 1..75: mol_type = other DNA
catgagtacgcacctggaaggcttctcaccgaatgctacagtaatcgtcctcgtactggtgttctacttcgcgca

SEQ ID NO: 590044 - DNA, 75 bp, synthetic construct
  source 1..75: mol_type = other DNA
tactactccaaagaagcggaagcgggtaacaccaaatacgcgaaagttgacggcaccaagccggttgctgaagtt

SEQ ID NO: 590045 - DNA, 75 bp, synthetic construct
  source 1..75: mol_type = other DNA
caggtggtctggccgcgtggtcgttaggcattccggttgtgcttcatgaacaaaacggtattgcgggcttaacca

SEQ ID NO: 590046 - DNA, 75 bp, synthetic construct
  source 1..75: mol_type = other DNA
gtcagccgaagtccatcaaagagacgctggaaggcgtgaaggatggcgagggcaatgtcgtggtgcacggtattt

SEQ ID NO: 590047 - DNA, 75 bp, synthetic construct
  source 1..75: mol_type = other DNA
tgccggatacataccggtatcatctgtctcatcgtattcgccgggtgcttgggaatgaaaagacatcatcgccat

SEQ ID NO: 590048 - DNA, 75 bp, synthetic construct
  source 1..75: mol_type = other DNA
atgaataatcatgattatgcgggggcgattatgcgaaataaacgtgatattgaagacctggcatttgaagccctg

SEQ ID NO: 590049 - DNA, 75 bp, synthetic construct
  source 1..75: mol_type = other DNA
ttgccagcaacggattaagagagaaggataaagaaattgtttctatgatgattcaggaaatgagcgaggaaaaaa

SEQ ID NO: 590050 - DNA, 75 bp, synthetic construct
  source 1..75: mol_type = other DNA
gaaagaggtggtggtatctcgcggcgaactggtggagattggcggcgcgtttcgtattcccgatgttatgcgtca

SEQ ID NO: 590051 - DNA, 75 bp, synthetic construct
  source 1..75: mol_type = other DNA
ttccgcgcagcgctgaaacaacgtccggacgcctacgattacgcatggcttgccgacgcgctggacagactgcac

SEQ ID NO: 590052 - DNA, 75 bp, synthetic construct
  source 1..75: mol_type = other DNA
tgccgacgcgctggacagactgcacaaaccagaagaagctgcagcgatgcgccgcgacggtttgatgctgacctt

SEQ ID NO: 590053 - DNA, 75 bp, synthetic construct
  source 1..75: mol_type = other DNA
aagcacgcgccaaccaacatctggaacgcgcagcggagctggccggcaatgacaccattccggtagaaatcaccc

SEQ ID NO: 590054 - DNA, 75 bp, synthetic construct
  source 1..75: mol_type = other DNA
gaatatcatgcccgggggcgggctgcgacaggcgaacgtatcttgcgggaacggtacgaaaagttccggtgccgc

SEQ ID NO: 590055 - DNA, 75 bp, synthetic construct
  source 1..75: mol_type = other DNA
gtagcaaacgcacctttactcagcccttctcctctgtcgtgcagatgcaacgtccaggtgttggccgttgggata

SEQ ID NO: 590056 - DNA, 75 bp, synthetic construct
  source 1..75: mol_type = other DNA
tcgctgtatatgtctaccacctggaccgattattgggctggaagtaatagccgtactgattataacctcggctac

SEQ ID NO: 590057 - DNA, 75 bp, synthetic construct
  source 1..75: mol_type = other DNA
ccaatgccgcaggagttgattgcggcgggcgtcagtctggtgagcttctccggcgacaagttgttaggcgggccg

SEQ ID NO: 590058 - DNA, 75 bp, synthetic construct
  source 1..75: mol_type = other DNA
taaagaggtggtggtatctcgcggcgaactggtggagattggcggcgcgtttcgtattcctgacgtaatgcgtca

SEQ ID NO: 590059 - DNA, 75 bp, synthetic construct
  source 1..75: mol_type = other DNA
gtgatcctgctggatttcctgcccaaagagttaggttttgatatgaacatgcatatcctctcttttgcgccaggt

SEQ ID NO: 590060 - DNA, 75 bp, synthetic construct
  source 1..75: mol_type = other DNA
tccggaagtattacgtctggcggaacaggcgtatatccgcacaggtgcatggagttcgctgctggatatcatccc

SEQ ID NO: 590061 - DNA, 75 bp, synthetic construct
  source 1..75: mol_type = other DNA
tcatcggcttttccgctggtggatattaccgtggtgccggatgacgagattatgcaacatcgcaaaatggcgctg

SEQ ID NO: 590062 - DNA, 75 bp, synthetic construct
  source 1..75: mol_type = other DNA
attgctcaggagatgctggaaaaaggatttgaccacgaagtcatcctgacgctgacccgactttcaccagacgat

SEQ ID NO: 590063 - DNA, 75 bp, synthetic construct
  source 1..75: mol_type = other DNA
aactcagggctggaaagtaaaaaaccgacgcaaagtcggtttttttacgtcctgattcagacctcctttcaaatg

SEQ ID NO: 590064 - DNA, 75 bp, synthetic construct
  source 1..75: mol_type = other DNA
tatatttatgtagtgatagagcaccaaagtaagccagaggaattaatggcttttcgcatgatgcgctattccatt

SEQ ID NO: 590065 - DNA, 75 bp, synthetic construct
  source 1..75: mol_type = other DNA
aaagtaagccggaagaattaatggcttttcgcatgatgcgctattccatcgcggcgatgcaaaaccatctggatg

SEQ ID NO: 590066 - DNA, 75 bp, synthetic construct
  source 1..75: mol_type = other DNA
attgctcaggagatgctggatagaggtttagacagagagttagttatgatggtgacccgactttcaccagacgat

SEQ ID NO: 590067 - DNA, 75 bp, synthetic construct
  source 1..75: mol_type = other DNA
ggcggcaaacggcagctatggcgagctggcagacaagggagagcgccgcaacgaccagcacatgacactctgggg

SEQ ID NO: 590068 - DNA, 75 bp, synthetic construct
  source 1..75: mol_type = other DNA
tggccgggtcgcctgatgaaccagctgcgcatctttgcggtgctgaaccagttcaggctgaacagcagcagtgat

SEQ ID NO: 590069 - DNA, 75 bp, synthetic construct
  source 1..75: mol_type = other DNA
ttgtggccgggaacgcttatgaaccagttgcgcatcttcgcgctgcttaaccagtttcgcctgcaggctgaatca

SEQ ID NO: 590070 - DNA, 75 bp, synthetic construct
  source 1..75: mol_type = other DNA
cacaactggctgagggtaatttcagaaccacatcagttaattcgtacccattgccgccacagccaaatttaatgc

SEQ ID NO: 590071 - DNA, 75 bp, synthetic construct
  source 1..75: mol_type = other DNA
atgactactaaagctactcgcggtcgccctgcccgttttaacgctgaacagatggctgatattgcctacgcttac

SEQ ID NO: 590072 - DNA, 75 bp, synthetic construct
  source 1..75: mol_type = other DNA
cgacaaatctccgtgtgccactgttctacgtcgaagtggacaactcgatggcgaacagcgccacggagacacagc

SEQ ID NO: 590073 - DNA, 75 bp, synthetic construct
  source 1..75: mol_type = other DNA
aaccgatcagggacgtgccgcagttctcgagattgccagtgacgcgggcaaaccaataccttttgccgccgaagt

SEQ ID NO: 590074 - DNA, 75 bp, synthetic construct
  source 1..75: mol_type = other DNA
tcagggttaggcggtatttccgcttcggcctcggccacttcggataacagccaacagtactccatctccaccgat

SEQ ID NO: 590075 - DNA, 75 bp, synthetic construct
  source 1..75: mol_type = other DNA
aaaaaccagtttaccgtgagtattaaccagccattgaatatcgcctatgaagattacggttcgctgtttatttcc

SEQ ID NO: 590076 - DNA, 75 bp, synthetic construct
  source 1..75: mol_type = other DNA
agttgaatatgaacagttccggtagcaatgaaagcggccaggtgaactatagcgtcaacacaggttatagcatgg

SEQ ID NO: 590077 - DNA, 75 bp, synthetic construct
  source 1..75: mol_type = other DNA
ccagcagtactccatctccaccgatggcggctttgtattacacagtggtggtttaacgttcactaacaacagttt

SEQ ID NO: 590078 - DNA, 75 bp, synthetic construct
  source 1..75: mol_type = other DNA
tagtgacagcgtctatggcgcatttaactcgggtatcaatttaggagcctggcacttccgtgcgcgcggtaacta

SEQ ID NO: 590079 - DNA, 75 bp, synthetic construct
  source 1..75: mol_type = other DNA
cgaacaatagccgcactgaatataatgttggttacagtaaaagcgtttcgtggggcagcttcagcgtcaacctgc

SEQ ID NO: 590080 - DNA, 75 bp, synthetic construct
  source 1..75: mol_type = other DNA
acgccggcagggttcggcgccgatctcgaggtgaccatcaccgaatcggacggttcaaagcgtacgtttagtcag

SEQ ID NO: 590081 - DNA, 75 bp, synthetic construct
  source 1..75: mol_type = other DNA
caaccgttaaaattcaaagagatagattatggttctttttatctgaacggtagctggacagattactggggcgga

SEQ ID NO: 590082 - DNA, 75 bp, synthetic construct
  source 1..75: mol_type = other DNA
tgttggcggtaattttgatatccagaacagctatatgcagcgcgagctgccatttattcgttctcaacttgtggt

SEQ ID NO: 590083 - DNA, 75 bp, synthetic construct
  source 1..75: mol_type = other DNA
cagtaacgacagttttaccgactctgacacgttggcgctgatcaacgcccccggtgcaaagggcgcgcgcattaa

SEQ ID NO: 590084 - DNA, 75 bp, synthetic construct
  source 1..75: mol_type = other DNA
gcccgtgccgtttgcttccgatattaccgacgataaagggacctctatcgggactgtcggccagggcagtcaggc

SEQ ID NO: 590085 - DNA, 75 bp, synthetic construct
  source 1..75: mol_type = other DNA
caatgcctcgggctacagccaggataatcgctggagttacagcgtgaatactgcctataacgtgcagaaaaacag

SEQ ID NO: 590086 - DNA, 75 bp, synthetic construct
  source 1..75: mol_type = other DNA
ttgccgtccctcgtcagggcgctgttgtcttcgccgattttgaaaccgtccaggggcaatcggcaatcatgaata

SEQ ID NO: 590087 - DNA, 75 bp, synthetic construct
  source 1..75: mol_type = other DNA
aagtaaaacatccggaacaggacctggaacctaaaaatatgcgtaactattcacgcatgaaaaatcaggttacgg

SEQ ID NO: 590088 - DNA, 75 bp, synthetic construct
  source 1..75: mol_type = other DNA
atcgctatttgcagcgcgacctggcctctttgcgttcacagttaatagtgggtgagtcatacacaactggggaaa

SEQ ID NO: 590089 - DNA, 75 bp, synthetic construct
  source 1..75: mol_type = other DNA
ttattgcaatttcacattaatcagcctgatataaaagacgagaatgccatccttcttcaacgagaagaagagcta

SEQ ID NO: 590090 - DNA, 75 bp, synthetic construct
  source 1..75: mol_type = other DNA
atggcgaacagtgtcaccaacattcctaaaaaaacgctacttgcggtctgctgtgcgcttatatatagcaactat

SEQ ID NO: 590091 - DNA, 75 bp, synthetic construct
  source 1..75: mol_type = other DNA
cagatataaatgccgagaattccatccttctacagcgcgaaggcgaactcggagattgtctagatttggcgaata

SEQ ID NO: 590092 - DNA, 75 bp, synthetic construct
  source 1..75: mol_type = other DNA
tgacagctttagcgactcagacactctggccgttgtacaagcgccaggagctaaaggggcgcgtattaactatgg

SEQ ID NO: 590093 - DNA, 75 bp, synthetic construct
  source 1..75: mol_type = other DNA
cgccgaagtttatcaggatgaaattacgatcggcagtatgggacagggggggctggcatttgtacgcggtattaa

SEQ ID NO: 590094 - DNA, 75 bp, synthetic construct
  source 1..75: mol_type = other DNA
aaaagtaccagtaccaccacagtacctcgtagtggctctattattcttgccagttttgaaactgatcagggtcgt

SEQ ID NO: 590095 - DNA, 75 bp, synthetic construct
  source 1..75: mol_type = other DNA
ctggatatcaaaaaatcgattgaacaggcagaagtcagctatgacggcggtgaacagcatctggagatctcggtt

SEQ ID NO: 590096 - DNA, 75 bp, synthetic construct
  source 1..75: mol_type = other DNA
cgctgaggtttatcaggatgaaattatgattggcagcatgggacaaggtggtcagtcatttgtacgcggtattaa

SEQ ID NO: 590097 - DNA, 75 bp, synthetic construct
  source 1..75: mol_type = other DNA
agttaaacgtcagtagttcgggtaacagcgaagataatctcatcgggtacagcgtgaatacgggttataacctcg

SEQ ID NO: 590098 - DNA, 75 bp, synthetic construct
  source 1..75: mol_type = other DNA
ctgcttctgctagcaccgataacagacaacaatactctgtctctaccgatggtggttttgtacttcacagtggcg

SEQ ID NO: 590099 - DNA, 75 bp, synthetic construct
  source 1..75: mol_type = other DNA
cctaaccctaatgctaaatggcagcattacaaggaaatcggaataacaagaaaggaatttagaaagcttaaatct

SEQ ID NO: 590100 - DNA, 75 bp, synthetic construct
  source 1..75: mol_type = other DNA
gcaaacgacaattcgcgtattgttacctaaccctaatgctaaatggcagcattacaaggaaatcggaataacaag

SEQ ID NO: 590101 - DNA, 75 bp, synthetic construct
  source 1..75: mol_type = other DNA
gcttatgataatgcaattctcgttgaatccggctttagcgctgcgggatatgtgctgcttcgcgccacggatgaa

SEQ ID NO: 590102 - DNA, 75 bp, synthetic construct
  source 1..75: mol_type = other DNA
agtaatccaaatgactggattccaatttttattaaagagaacgcccgtaatcataaattacgtgaggttgagcat

SEQ ID NO: 590103 - DNA, 75 bp, synthetic construct
  source 1..75: mol_type = other DNA
gcagttgatgccgtcatggaactaccgcgcgagactcgtcgtttcagtaacgttcttgagtcgattgctgcttca

SEQ ID NO: 590104 - DNA, 75 bp, synthetic construct
  source 1..75: mol_type = other DNA
aaagcattaacaaaaaaagtctggaagaaaaaattccccgctatagttatcccgtaacagactcgatcaatatgg

SEQ ID NO: 590105 - DNA, 75 bp, synthetic construct
  source 1..75: mol_type = other DNA
aatgttcggccactttccgcaccatcgagtcggttgacggtgtgatacgtgccgcaccggagaaaaccgaccccg

SEQ ID NO: 590106 - DNA, 75 bp, synthetic construct
  source 1..75: mol_type = other DNA
gtgctgccgttgcatttgctcccggtaaaccgctggaaatcgttgaaattgacgttgcaccaccgaaaaaaaggt

SEQ ID NO: 590107 - DNA, 75 bp, synthetic construct
  source 1..75: mol_type = other DNA
gcataccatgagcctggatgaaattaatgacgccttcgacctgatgcatgaaggtaaatccattcgaaccgtaat

SEQ ID NO: 590108 - DNA, 75 bp, synthetic construct
  source 1..75: mol_type = other DNA
accctgcggctgaaatccttttagcggttttattcttctataaagatttaatgaaaataaacccgcgcaagaaag

SEQ ID NO: 590109 - DNA, 75 bp, synthetic construct
  source 1..75: mol_type = other DNA
tagtaacgtgcttgaaatgattgctgcatctcctttacgtaaccgcctcatggagttttccgcctatgcgaatgg

SEQ ID NO: 590110 - DNA, 75 bp, synthetic construct
  source 1..75: mol_type = other DNA
atgatgcgctgccctttctgtcgcacagcggcccacgttcgcaccagccgctatatgtctgacagcgtcaaagag

SEQ ID NO: 590111 - DNA, 75 bp, synthetic construct
  source 1..75: mol_type = other DNA
ctgaggtgttagaagggatggaagttccgccagtgttactgtcgggcaaccatgccgagatacgtcgctggcgtt

SEQ ID NO: 590112 - DNA, 75 bp, synthetic construct
  source 1..75: mol_type = other DNA
cgattacggggtaactggccgggcagtgaaaaatggcctgctgagcatccagagctggagtccacgtgacttcac

SEQ ID NO: 590113 - DNA, 75 bp, synthetic construct
  source 1..75: mol_type = other DNA
cgattacggggtaactggccgggcagttaaaaatggcctgctgagcatccagagttggagtcctcgcgacttcac

SEQ ID NO: 590114 - DNA, 75 bp, synthetic construct
  source 1..75: mol_type = other DNA
atgagtaagattaaaaattggcccgttccggtgagtccggtcggtgcaagagttaagtttatccgatctgagatt

SEQ ID NO: 590115 - DNA, 75 bp, synthetic construct
  source 1..75: mol_type = other DNA
taaacaagtggcattgatggcgccgacagaactgctggcagagcagcacgccaataacttccgcaactggtttga

SEQ ID NO: 590116 - DNA, 75 bp, synthetic construct
  source 1..75: mol_type = other DNA
ccgtaccgacatcattgaccgcgtgcgccacgcctgcatgactgaaggtcgtcaggcgtactgggtttgtacgtt

SEQ ID NO: 590117 - DNA, 75 bp, synthetic construct
  source 1..75: mol_type = other DNA
cgattacggggtaactggccgggcagttaaaaatggcctgctgagcatccagagctggagtcctcgtgacttcac

SEQ ID NO: 590118 - DNA, 75 bp, synthetic construct
  source 1..75: mol_type = other DNA
gaagaaggtatgggtttcctcaacgtgatgtacaactttgagatggaacgtctgatcaacgccgcccgcagcacc

SEQ ID NO: 590119 - DNA, 75 bp, synthetic construct
  source 1..75: mol_type = other DNA
gaagtgtcaaaatgcggtgctccggcatttttgatcaccaacggtcaatgtattcacagtatgcgccgtttcggt

SEQ ID NO: 590120 - DNA, 75 bp, synthetic construct
  source 1..75: mol_type = other DNA
gtatctgtcactggagcccgcaacgacaaggataaagaacgtatccagtctctgctggaagaaatctggcaggac

SEQ ID NO: 590121 - DNA, 75 bp, synthetic construct
  source 1..75: mol_type = other DNA
gaagtgtcaaaatgcggtgctccggcgtttttgattaccaacggtcagtgtattcacagcatgcgccgtttcggt

SEQ ID NO: 590122 - DNA, 75 bp, synthetic construct
  source 1..75: mol_type = other DNA
atgccgcccgctatgccaaccagcgtatcgcttttggtaaacccattggtcataaccagatgatccaggaaaaac

SEQ ID NO: 590123 - DNA, 75 bp, synthetic construct
  source 1..75: mol_type = other DNA
tggcgctgatggcgattaagatcgacaacatgcgcaacatggtgctgaaagtggcatggcaagccgatcagcatc

SEQ ID NO: 590124 - DNA, 75 bp, synthetic construct
  source 1..75: mol_type = other DNA
tgaatacaccgtggtagcggaagtgtctctggccaaaattaatccagaagcaaaccatgaacacgtctgcctgct

SEQ ID NO: 590125 - DNA, 75 bp, synthetic construct
  source 1..75: mol_type = other DNA
ctcaacaatcgccaactggattgccgctccgtttaacggtttgttagcagagcagttagaagcccgactgactgg

SEQ ID NO: 590126 - DNA, 75 bp, synthetic construct
  source 1..75: mol_type = other DNA
attgttttcgcggtggtactgatcacgttgggaaaatatctcttcccggccaaacccgttgtcgcgccagttatt

SEQ ID NO: 590127 - DNA, 75 bp, synthetic construct
  source 1..75: mol_type = other DNA
gcatggtgacggttgccgaacatcaaaatgttccttccggcatcgccgccgtagtggttgcaaccgtgcccctct

SEQ ID NO: 590128 - DNA, 75 bp, synthetic construct
  source 1..75: mol_type = other DNA
cgcaggcttcgaacgcatctttaagcgtcttggggtgggagaggtaaaaaccctggaacgacagctgcagcatga

SEQ ID NO: 590129 - DNA, 75 bp, synthetic construct
  source 1..75: mol_type = other DNA
gcagagcctttacttaacctgctggcttatcagcgcaatatcacccgatttaaaggtgagccggtttcgttattt

SEQ ID NO: 590130 - DNA, 75 bp, synthetic construct
  source 1..75: mol_type = other DNA
gctcgctgaaactgccctcctggatggacaggggggaacccgacaagctgctgcgggccgcgcaggcgttctggt

SEQ ID NO: 590131 - DNA, 75 bp, synthetic construct
  source 1..75: mol_type = other DNA
atgcagacaaaacagcgtcttgatataccgctgaacctgaaatccgtcagtgattccggggagtttgaaggttac

SEQ ID NO: 590132 - DNA, 75 bp, synthetic construct
  source 1..75: mol_type = other DNA
tcgtataaagactctaatggcaacaaacagcagatcaaccgtactgacgtgaaagagatggtcgaactggatcag

SEQ ID NO: 590133 - DNA, 75 bp, synthetic construct
  source 1..75: mol_type = other DNA
gatagaggtttagaccgagagttagttatgatggtgacccgactttcaccagacgatcttatcgcgcaaagccac

SEQ ID NO: 590134 - DNA, 75 bp, synthetic construct
  source 1..75: mol_type = other DNA
cgctacgtccgctgctcaatgccgcgctgattggcctgttattgctggctgtcggtaatggcatggtgacggttg

SEQ ID NO: 590135 - DNA, 75 bp, synthetic construct
  source 1..75: mol_type = other DNA
ttatatgtatttaatccgtaatgtcagtccggctctcgccaccagctacgcctacgttaacccggtggtcgcggt

SEQ ID NO: 590136 - DNA, 75 bp, synthetic construct
  source 1..75: mol_type = other DNA
gggttatagctcactttcacagcgtgatgttgatgaagtgagtaccgcactggatgcactgaaaaacatcaaatt

SEQ ID NO: 590137 - DNA, 75 bp, synthetic construct
  source 1..75: mol_type = other DNA
ttccgttgagggatttatcaacatctttgaacggctgggcattggatatgtggagctgcgggagcgtcagccggg

SEQ ID NO: 590138 - DNA, 75 bp, synthetic construct
  source 1..75: mol_type = other DNA
tcgctgcaccatgcgcagttgaccgaatcagtgaatccgtataacccgaacgcccaggcgatgtaccatcaactg

SEQ ID NO: 590139 - DNA, 75 bp, synthetic construct
  source 1..75: mol_type = other DNA
gatcaccaatcaggggctgattatttccgccaatgagatcttctggatgtcagccgggatattcctcgtcctgct

SEQ ID NO: 590140 - DNA, 75 bp, synthetic construct
  source 1..75: mol_type = other DNA
aggcttccggctggattgcccagcagatcaccaatcaggggctgattatttccgccaatgagatcttctggatgt

SEQ ID NO: 590141 - DNA, 75 bp, synthetic construct
  source 1..75: mol_type = other DNA
agttgttgcaggaggtctacggttacacggcaacgtgggcaggtctggcctctgcgccggtagggattattccgg

SEQ ID NO: 590142 - DNA, 75 bp, synthetic construct
  source 1..75: mol_type = other DNA
tgggaactgacggacgataacccgatagttgacctgtcgttgtttaagtcgcgcaactttaccattggctgcttg

SEQ ID NO: 590143 - DNA, 75 bp, synthetic construct
  source 1..75: mol_type = other DNA
ggaacgtgggtaattacctctttcggggtggcgaatgccatctcgatcccccttaccggctggctggcaaagcgt

SEQ ID NO: 590144 - DNA, 75 bp, synthetic construct
  source 1..75: mol_type = other DNA
ggatatttggtttcgaatcggcatcgaccggaattattattttcggcatgctgaccgcgatgatcgcattggtcg

SEQ ID NO: 590145 - DNA, 75 bp, synthetic construct
  source 1..75: mol_type = other DNA
gcattactgaatctgctggcttatgaccgggatatcacccgctttgatggtgaaccgttgaccctgtttcgcaaa

SEQ ID NO: 590146 - DNA, 75 bp, synthetic construct
  source 1..75: mol_type = other DNA
accgggatatcacccgctttgatggtgaaccgttgaccctgtttcgcaaacgcgtggcttttgccttcgtgaatg

SEQ ID NO: 590147 - DNA, 75 bp, synthetic construct
  source 1..75: mol_type = other DNA
acggtatgttctttgccctggcggctaacgaccgtgcagcttttgaaaaccttcttgaatggacgcaaaacaatc

SEQ ID NO: 590148 - DNA, 75 bp, synthetic construct
  source 1..75: mol_type = other DNA
taagatcgttgggcgacattcatgaggtggagagagttactcgctcactcagtcactcgcaagactgcgaaaaaa

SEQ ID NO: 590149 - DNA, 75 bp, synthetic construct
  source 1..75: mol_type = other DNA
atgttcgagacgatgtacgcagaaaaaggtattggcctggcggcaacccaggttgatatccatcaacgtatcatt

SEQ ID NO: 590150 - DNA, 75 bp, synthetic construct
  source 1..75: mol_type = other DNA
tccctataaccagatcggctcttttatgaaagaactacgtgaacgaagcggcgtttctcctcgtgcgcttgagtt

SEQ ID NO: 590151 - DNA, 75 bp, synthetic construct
  source 1..75: mol_type = other DNA
aggatatcgccctgctgcgtgcgaaagtgggcatggtgttccagaaaccgacgccgttcccgatgtccatctacg

SEQ ID NO: 590152 - DNA, 75 bp, synthetic construct
  source 1..75: mol_type = other DNA
cgggccgtccggctgcggtaaatcgacgctgctgcgtaccttcaacaaaatgtttgaactgtatccggagcagcg

SEQ ID NO: 590153 - DNA, 75 bp, synthetic construct
  source 1..75: mol_type = other DNA
ccctccgctgctatagtgcagtcggcttctgacgttcagtgcagccgtcttctgaaaacgacaatggaggtggta

SEQ ID NO: 590154 - DNA, 75 bp, synthetic construct
  source 1..75: mol_type = other DNA
acttggtttattgagcactttgaactccaaaatattacaatattggtgtactttttaggcgggcacacgtattca

SEQ ID NO: 590155 - DNA, 75 bp, synthetic construct
  source 1..75: mol_type = other DNA
accagcgtgggacgttatggcctaaacgggttgcgttgatggatgactggtcggggtattgctttgccaacgttt

SEQ ID NO: 590156 - DNA, 75 bp, synthetic construct
  source 1..75: mol_type = other DNA
ggcattttacggcagcattatgggactcagattttcgttcaaactgaacgatatccaccatgccgtacataaccc

SEQ ID NO: 590157 - DNA, 75 bp, synthetic construct
  source 1..75: mol_type = other DNA
ggtggcatatgattgtttcaatatcctttatccagatataaatatagaatcacattatatttactcatcacgtcg

SEQ ID NO: 590158 - DNA, 75 bp, synthetic construct
  source 1..75: mol_type = other DNA
tctcaagatgttaaaataaagtctgaacccccagttaagaatataaataatacaataagtactaaacaaaataaa

SEQ ID NO: 590159 - DNA, 75 bp, synthetic construct
  source 1..75: mol_type = other DNA
ggtaaaggcacagtccagcagtatcgttctctgaaccgtatctacgatcagatgttacgtcctgaatggccggcg

SEQ ID NO: 590160 - DNA, 75 bp, synthetic construct
  source 1..75: mol_type = other DNA
gcgaatatggcccatccacaaatgttaatggccgcaggacatgcattgtatattaaaccttttacctacaatcgc

SEQ ID NO: 590161 - DNA, 75 bp, synthetic construct
  source 1..75: mol_type = other DNA
atgggtattaagggaatgtggaaagaccttagcacttcaccggtgaacacgctggtaagatggcaggaacaacgc

SEQ ID NO: 590162 - DNA, 75 bp, synthetic construct
  source 1..75: mol_type = other DNA
gcgggtggcgttaatggatgattgggcggggtattgtgcgaatagaataatagctaatatgcttaggaaatgtat

SEQ ID NO: 590163 - DNA, 75 bp, synthetic construct
  source 1..75: mol_type = other DNA
tggaaacaccaatctatggttatgtgtggctgaacatggaaacggcgcatcagcttgagttgctatcgaatctga

SEQ ID NO: 590164 - DNA, 75 bp, synthetic construct
  source 1..75: mol_type = other DNA
tcgcgccttcgaacgtattggcggtacggtgttgggttcgattttaggtcttatcgctctgcaactggagttaat

SEQ ID NO: 590165 - DNA, 75 bp, synthetic construct
  source 1..75: mol_type = other DNA
agccatctgcaaaaactcctgaccgatgccgtgaaaatgcgagggctgattgcaccagccagcaaagaaacccgc

SEQ ID NO: 590166 - DNA, 75 bp, synthetic construct
  source 1..75: mol_type = other DNA
aaattaaacttgaagtacgcttattacttcatgaaaaccattgagaataattacaaaatccctgaggcaggcata

SEQ ID NO: 590167 - DNA, 75 bp, synthetic construct
  source 1..75: mol_type = other DNA
aggtctcccgcgtgaaatcgagttgcgccagaaacaatacgagtactatcgtgatttactgttcagtttcccgaa

SEQ ID NO: 590168 - DNA, 75 bp, synthetic construct
  source 1..75: mol_type = other DNA
aatgggaaaccccaagttaatgagtcatcaggttgaaaatatacctgtaccagtcccctgcccggataatccgga

SEQ ID NO: 590169 - DNA, 75 bp, synthetic construct
  source 1..75: mol_type = other DNA
gtcacgtctgatatcaacgttccacgtatcccctccatgaaagccattctcggtgcaggcaaaaaaccggtgaac

SEQ ID NO: 590170 - DNA, 75 bp, synthetic construct
  source 1..75: mol_type = other DNA
agctgcaagccagcttgcaacagatgacgatgagatagccgcgctgaccgttggcggttcgttattgcagaactc

SEQ ID NO: 590171 - DNA, 75 bp, synthetic construct
  source 1..75: mol_type = other DNA
cacatcattctcgataacgattcgccggaggccattgccgagctggcggaacatctgaagaaagccctgaactga

SEQ ID NO: 590172 - DNA, 75 bp, synthetic construct
  source 1..75: mol_type = other DNA
ggcagcctgagttcacagataaaacactctccaggaaacccggggcggttcagttggggtcgattttaggtctta

SEQ ID NO: 590173 - DNA, 75 bp, synthetic construct
  source 1..75: mol_type = other DNA
gaccgatgccgtgaaaatgcgtgggctgattgcgcccgccagcaaagaaacccgtattccaaaatcgatatatga

SEQ ID NO: 590174 - DNA, 75 bp, synthetic construct
  source 1..75: mol_type = other DNA
gatgcaggtactggccgatgaatatcagcagcgcctgcgcgtcaactgcattaacccaggcggtacgcgcaccgc

SEQ ID NO: 590175 - DNA, 75 bp, synthetic construct
  source 1..75: mol_type = other DNA
tggaatttttatacaaaccagttataacaatcggagatcataagaaagattatacgtcggtgatgcacgaaattt

SEQ ID NO: 590176 - DNA, 75 bp, synthetic construct
  source 1..75: mol_type = other DNA
atgaactcggaatcagtacgcatttatctcgttgctgcgatgggagccaatcgggttattggcaatggtcctaat

SEQ ID NO: 590177 - DNA, 75 bp, synthetic construct
  source 1..75: mol_type = other DNA
tatctccattatgtatgaacggccacggatcggtctggcggtgattgtcaaaactattaacggtcttggcaccta

SEQ ID NO: 590178 - DNA, 75 bp, synthetic construct
  source 1..75: mol_type = other DNA
accgggtttgccacgctgattgtctactgggtgccgatagtgtgggggcataattacgttgcttttatgctggca

SEQ ID NO: 590179 - DNA, 75 bp, synthetic construct
  source 1..75: mol_type = other DNA
cataatgccgttgaaaacggtgtctgacagcatttactggttcaatacgcattacagcccaccggaaaaaagtgt

SEQ ID NO: 590180 - DNA, 75 bp, synthetic construct
  source 1..75: mol_type = other DNA
tcttttttggggattacgccgctatacaggtgtggtgcggtgatgtgacctatatctggacgggtaagcgccggg

SEQ ID NO: 590181 - DNA, 75 bp, synthetic construct
  source 1..75: mol_type = other DNA
gagggagattctgcagggggttctgccaaacaggcaagagacagaagatttcaagccatccttcccttaaaagga

SEQ ID NO: 590182 - DNA, 75 bp, synthetic construct
  source 1..75: mol_type = other DNA
cggaatgccggtagtgacaacgaatgtggaggtgcacgataacctgacgggaacaacccgcaaagtgccggcata

SEQ ID NO: 590183 - DNA, 75 bp, synthetic construct
  source 1..75: mol_type = other DNA
gtcggcagacagaggccgggccagaagaacggctgcggattgccctgttgaatgtggattacgtcaccagttttg

SEQ ID NO: 590184 - DNA, 75 bp, synthetic construct
  source 1..75: mol_type = other DNA
cggataaatacagttttactgaactgaatgaacgtccacaccttcgccggcagtggcaggatgttctggaggagt

SEQ ID NO: 590185 - DNA, 75 bp, synthetic construct
  source 1..75: mol_type = other DNA
gttcatcagcagctcgtcgccgtgaacgtttaaaggcgcaagccattgcacagggtgttgaagctcgtgaagagg

SEQ ID NO: 590186 - DNA, 75 bp, synthetic construct
  source 1..75: mol_type = other DNA
gttgcgcccgtcagtccggcatattacaccgtaggttttcgggtttatgacaaagccgggaactggacagaaaca

SEQ ID NO: 590187 - DNA, 75 bp, synthetic construct
  source 1..75: mol_type = other DNA
agaaaaatgtggtgttcaacgataaacgctttggctgcgtgtacagcctgaaggccagtctttgtggtgtgcttc

SEQ ID NO: 590188 - DNA, 75 bp, synthetic construct
  source 1..75: mol_type = other DNA
ctttatcatccacccccttatcatccagcatttgtgattctgaatggtattttggtgctgatgttcttgaactgc

SEQ ID NO: 590189 - DNA, 75 bp, synthetic construct
  source 1..75: mol_type = other DNA
atgtgctcgaatggattgaagaaaacttatatatcaatccagatattaatttaattgcaaaaatatcaggatata

SEQ ID NO: 590190 - DNA, 75 bp, synthetic construct
  source 1..75: mol_type = other DNA
atgaggatccagacggaagttatgaggcatttagtgtcaaaatacctaaacttgaacgagagaaagttggggtat

SEQ ID NO: 590191 - DNA, 75 bp, synthetic construct
  source 1..75: mol_type = other DNA
agtctgcgctggagcgtgttgagatagtgaaaggtccatattccgtactgtacggttcacaggcaattggcggta

SEQ ID NO: 590192 - DNA, 75 bp, synthetic construct
  source 1..75: mol_type = other DNA
tgtgattgaacgagccgtatttggattgttcttgagggatggaaaaaagaataagtatattgggaatagagaaat

SEQ ID NO: 590193 - DNA, 75 bp, synthetic construct
  source 1..75: mol_type = other DNA
actggcagtccggagccaaatccgcatgggcagattatgttgattctgcttcagatgcttatggccagatgaagt

SEQ ID NO: 590194 - DNA, 75 bp, synthetic construct
  source 1..75: mol_type = other DNA
aaaaagctgatgaaatctggaacctgcgtaaaggtgaccgatatgtcaatgatgaggctcgcgcccgattctgga

SEQ ID NO: 590195 - DNA, 75 bp, synthetic construct
  source 1..75: mol_type = other DNA
gactggaagcaagaatcagcacagaactgcatgctatgctgaaacgcgctgcagaaatccagggacgcactatga

SEQ ID NO: 590196 - DNA, 75 bp, synthetic construct
  source 1..75: mol_type = other DNA
ggatggacgtctgccgaataccaactatcgtaacaatagtcagggtgtatggttgggttataactccgaaaacca

SEQ ID NO: 590197 - DNA, 75 bp, synthetic construct
  source 1..75: mol_type = other DNA
gctgcaatccgtggcaactggcagaaggcccggaatctcccgtctggcacagacttctcgcatttctgaaacgct

SEQ ID NO: 590198 - DNA, 75 bp, synthetic construct
  source 1..75: mol_type = other DNA
gcgtatgagcagaccatccagcgccaatttgccaacgaagtaaaaacgacacagcctgttcccagtccgatgatt

SEQ ID NO: 590199 - DNA, 75 bp, synthetic construct
  source 1..75: mol_type = other DNA
aaaaattagattttcagcacgaggccaggatattaaacggcgtatggcttattaccgctttaggtttggtggcaa

SEQ ID NO: 590200 - DNA, 75 bp, synthetic construct
  source 1..75: mol_type = other DNA
tctattactattttatcggcttctttgggatacttgccgcgatagctataacgcttgtctggcaaaggcatacgc

SEQ ID NO: 590201 - DNA, 75 bp, synthetic construct
  source 1..75: mol_type = other DNA
ggcacaaattgccgccgctacgtccactgcttaatgccgcgcttattggcctgttactgctggctgtcggtaacg

SEQ ID NO: 590202 - DNA, 75 bp, synthetic construct
  source 1..75: mol_type = other DNA
aatgatcgcatcgatgattgcgggtttgctgcttcatagcctgcttctccttgcctttcggcacgtaagaggcta

SEQ ID NO: 590203 - DNA, 75 bp, synthetic construct
  source 1..75: mol_type = other DNA
atcgagctaagttcctggagttaagagaagaaaccgggatcaccataaaagaatattgcgagcagcatgacctca

SEQ ID NO: 590204 - DNA, 75 bp, synthetic construct
  source 1..75: mol_type = other DNA
agcacgaatgtgtattgagtaccttgtcaatgaaaaaaatattatcagaaagaataacacaggtaaaaaggtgta

SEQ ID NO: 590205 - DNA, 75 bp, synthetic construct
  source 1..75: mol_type = other DNA
gatagattcgatatttccattcctatcaatattctgctggatgtcagaacccctgtgcaattaatggaaacacta

SEQ ID NO: 590206 - DNA, 75 bp, synthetic construct
  source 1..75: mol_type = other DNA
aagcactattcaccatcccgacggcagcgtacagctccgccctcgcaaacatcaagcccctgccagagcaacgga

SEQ ID NO: 590207 - DNA, 75 bp, synthetic construct
  source 1..75: mol_type = other DNA
caagccggagtacgataaaaccatctctacgtcaattgtactcaatgcactgaacgcgctcggcgtcagcgccga

SEQ ID NO: 590208 - DNA, 75 bp, synthetic construct
  source 1..75: mol_type = other DNA
ccgtggaaagagtgtaatacccggcggatggaagaagataacgtccgcctggcgcggcgcagtagcggtggcggc

SEQ ID NO: 590209 - DNA, 75 bp, synthetic construct
  source 1..75: mol_type = other DNA
gtgaaaaccgccgaaggcgaccgcaaagtctcaggctcggcctatcgcgaaaccaaagatcgtggcttccaccac

SEQ ID NO: 590210 - DNA, 75 bp, synthetic construct
  source 1..75: mol_type = other DNA
acatgaacgattttatcagtaggttggcagcgatatatcagtccgaacaaaagctgcgacagggtgatgaaaaac

SEQ ID NO: 590211 - DNA, 75 bp, synthetic construct
  source 1..75: mol_type = other DNA
acatgaatgattttatcagtaggttggcagctatttatcagtccgaacaaaagctgcgacagggggatgaaaagc

SEQ ID NO: 590212 - DNA, 75 bp, synthetic construct
  source 1..75: mol_type = other DNA
tcgcaggtaaagacaacaaaaaaaagcaccaaatcacctgaaaaaaaacgggcaggaagagcaacaaaaaagcag

SEQ ID NO: 590213 - DNA, 75 bp, synthetic construct
  source 1..75: mol_type = other DNA
gttcgagcacgtctttctttatttattgttttctatagtggtcaatggtagtacagatattacgattaatgatga

SEQ ID NO: 590214 - DNA, 75 bp, synthetic construct
  source 1..75: mol_type = other DNA
acaccgaaatccccaacgacaaaacctatgagggccagagctaccgtatttcgtggaacaaatattttgcaccga

SEQ ID NO: 590215 - DNA, 75 bp, synthetic construct
  source 1..75: mol_type = other DNA
aggcccctttgctatcgatgatttgtcgccagccggatttggtgccgatctcgaagtcacggtcaccgagtctga

SEQ ID NO: 590216 - DNA, 75 bp, synthetic construct
  source 1..75: mol_type = other DNA
acctcggtacgccgcagctgaaagcatctacgtcgattaacgtcccggacccgacgccgtttgtatcttatttct

SEQ ID NO: 590217 - DNA, 75 bp, synthetic construct
  source 1..75: mol_type = other DNA
ttgccgttatttttgcctgcatttatggccatgctgccaatgcggcagaaagtattgaatacgatcccagcttcc

SEQ ID NO: 590218 - DNA, 75 bp, synthetic construct
  source 1..75: mol_type = other DNA
aataagccgaccagcaacctgtccatcgagtttattgaaatagcgaatagccgtagcgccaaaccctgtatttct

SEQ ID NO: 590219 - DNA, 75 bp, synthetic construct
  source 1..75: mol_type = other DNA
atgacgacgcctttcaacggcacaaaatttcccctttctccactcgcctgtctggtggcatgcagtctgctgccc

SEQ ID NO: 590220 - DNA, 75 bp, synthetic construct
  source 1..75: mol_type = other DNA
attgtggtgcgcaagctgatggattcagcaggggccagcggcaaaatcacctgccacacccaacagaaagaagcc

SEQ ID NO: 590221 - DNA, 75 bp, synthetic construct
  source 1..75: mol_type = other DNA
aggcaccgaagccgaatattcatggtaatcctcgctgccagaatattgtgcgctatgaaatgttcaaaaagctgg

SEQ ID NO: 590222 - DNA, 75 bp, synthetic construct
  source 1..75: mol_type = other DNA
ttgttttctatagtggtcaatggtagtacagatattacgattaatgatgaagtacgaatgtgtattgagcagctt

SEQ ID NO: 590223 - DNA, 75 bp, synthetic construct
  source 1..75: mol_type = other DNA
aagctcttatgcctgagattttttcttccgatgattccatccaggctaatttgcaaggtatttcgcagcaaacct

SEQ ID NO: 590224 - DNA, 75 bp, synthetic construct
  source 1..75: mol_type = other DNA
gtctgtaagcggcatggtctggaacaaaccattgccgatacgctggggccgggcggtattatgcgcgcgctacgt

SEQ ID NO: 590225 - DNA, 75 bp, synthetic construct
  source 1..75: mol_type = other DNA
tacgctgcgttaccgttgcgcaggtatcaaccatatggcgttttacctggaactggagcgcaaaaccgccgacgg

SEQ ID NO: 590226 - DNA, 75 bp, synthetic construct
  source 1..75: mol_type = other DNA
agtgcgaagcgctgttggttgacttcccggaacaggaaaaagagctacgggagttatcggcatggatggcggggg

SEQ ID NO: 590227 - DNA, 75 bp, synthetic construct
  source 1..75: mol_type = other DNA
ctgcgacatggaagcctaccggaactgtagccgcaccttcagataagccttcttctcctgttggcgatggcggtg

SEQ ID NO: 590228 - DNA, 75 bp, synthetic construct
  source 1..75: mol_type = other DNA
agggtgatggtactgtttgcgctgcaacatggaagcctacaggtgctgtagctgacccctctgataaaccctcaa

SEQ ID NO: 590229 - DNA, 75 bp, synthetic construct
  source 1..75: mol_type = other DNA
tttactggcgattgtacttacagcgattcaccagggcagaaggataaatattggtctttaacggcttatattgtt

SEQ ID NO: 590230 - DNA, 75 bp, synthetic construct
  source 1..75: mol_type = other DNA
ccatcgtgccggacgcaaatgcgacccccccggaaaccaccgtgactgaacaaacgtccggcgaaggtactaacg

SEQ ID NO: 590231 - DNA, 75 bp, synthetic construct
  source 1..75: mol_type = other DNA
acggccggtatgggcgagctctactattcaatgcctcacgttgtggaacacctgaacagcctggccgatgcctac

SEQ ID NO: 590232 - DNA, 75 bp, synthetic construct
  source 1..75: mol_type = other DNA
tggtgatactggaggaggtgatacaggcggtggtaactcaggtggcggtaactcaggtggtaatggctcaagtat

SEQ ID NO: 590233 - DNA, 75 bp, synthetic construct
  source 1..75: mol_type = other DNA
gtgaaagaaggctttgacagcgctgaggcggaacagcaactcacgcgtttactttcactgcgccacggtaagaag

SEQ ID NO: 590234 - DNA, 75 bp, synthetic construct
  source 1..75: mol_type = other DNA
gtggctgaattccattactgtaagggtgaaagaaggctttgacagcgccgaagctgaacagcagctcactcgttt

SEQ ID NO: 590235 - DNA, 75 bp, synthetic construct
  source 1..75: mol_type = other DNA
tggaagaccgtacagagtattacccggcacagctttcgggtggccagcaacagcgcgtcagcatcgcgcgggcat

SEQ ID NO: 590236 - DNA, 75 bp, synthetic construct
  source 1..75: mol_type = other DNA
ccgctgtcctcatttctcctttttcacatgctgagtcatgggaaagcattactaaatccacttatcaaagttctg

SEQ ID NO: 590237 - DNA, 75 bp, synthetic construct
  source 1..75: mol_type = other DNA
gcatctttgtgcagcatcgctacaaccaatatctttgaaaagtctcgaaggggaaattagtacagagcagcaatg

SEQ ID NO: 590238 - DNA, 75 bp, synthetic construct
  source 1..75: mol_type = other DNA
tggctgtaggtgcgcgagcaagcgatgttttgcaacagtttttgatcgaagccgtactggtttgcctggttggtg

SEQ ID NO: 590239 - DNA, 75 bp, synthetic construct
  source 1..75: mol_type = other DNA
gcaagggaaacgttattgccatagcgatatgaatcgaatgtttggcggtcgttggcagctatttgctgaaagcgg

SEQ ID NO: 590240 - DNA, 75 bp, synthetic construct
  source 1..75: mol_type = other DNA
aaggagttccccgtcgggctacggtctctgttaatacgggaatacggcgacgatacagcgcatgatgtgtcaggc

SEQ ID NO: 590241 - DNA, 75 bp, synthetic construct
  source 1..75: mol_type = other DNA
ggttttttaccgccttacttgaccatcacatcaatcaaatgatggcacgctattcctgcctgcgggccttacgca

SEQ ID NO: 590242 - DNA, 75 bp, synthetic construct
  source 1..75: mol_type = other DNA
ctggttgaaattgaggggtgccgggcaaatcccagtattgctctgttgtgccgcctggccgtcgcgatgggggtt

SEQ ID NO: 590243 - DNA, 75 bp, synthetic construct
  source 1..75: mol_type = other DNA
acgccagacttgccaaacttcgccgaaacctttgcccgccagagtagctgggaatggaacttcggtcaggctccg

SEQ ID NO: 590244 - DNA, 75 bp, synthetic construct
  source 1..75: mol_type = other DNA
tgtctgtaccgcgcggatatgctgcaacaggagtgcgaagcgctgctggttgacttcccggaacaggaaaaagag

SEQ ID NO: 590245 - DNA, 75 bp, synthetic construct
  source 1..75: mol_type = other DNA
gctggagtgctatcagcgcttccaggcgcgggccagcactgcgaccgaaaccagcgtcaaaccggacgcttgtga

SEQ ID NO: 590246 - DNA, 75 bp, synthetic construct
  source 1..75: mol_type = other DNA
cgcaaagctgccgtcgaagcggctattgcacgcgccaaagcacgcaagctggaacagcaacaggctaatgcagaa

SEQ ID NO: 590247 - DNA, 75 bp, synthetic construct
  source 1..75: mol_type = other DNA
agcgtttgaatcaaaccccgccagtggttgtggttgacttcgctaaagtggcatcggcatatcctgccggtgcct

SEQ ID NO: 590248 - DNA, 75 bp, synthetic construct
  source 1..75: mol_type = other DNA
aagctggaacagcaacaggctaatgcagagccagaagaacagattgatccgcgcaaagcggcagttgctgcggct

SEQ ID NO: 590249 - DNA, 75 bp, synthetic construct
  source 1..75: mol_type = other DNA
tacagaaagtgagatccctgaattgtgggaaggtgaaaaaggcgggaaagcaagattgctcgcaggttccggtgg

SEQ ID NO: 590250 - DNA, 75 bp, synthetic construct
  source 1..75: mol_type = other DNA
cgcaaattcaagctggatggttgaagactctttcccgagagcgttacgcgagtacaacgaaatggttgatgacta

SEQ ID NO: 590251 - DNA, 75 bp, synthetic construct
  source 1..75: mol_type = other DNA
gactggctgaaagattttaaacaggggccaacgggtaaagagagccttgtttatggcatctacggcattagtgaa

SEQ ID NO: 590252 - DNA, 75 bp, synthetic construct
  source 1..75: mol_type = other DNA
gcctgggtaaagcaacggcggatctgatgtacgagtattatggtattaccgtacagcgtatacgctggggtaaaa

SEQ ID NO: 590253 - DNA, 75 bp, synthetic construct
  source 1..75: mol_type = other DNA
atggccagaagttgcgtaacggacccacgttggcgcgagctggtggcgctatatcgttatgactggattgctgcc

SEQ ID NO: 590254 - DNA, 75 bp, synthetic construct
  source 1..75: mol_type = other DNA
tactgcgataatactgaatagtgaagaatctccgcttgtagatgcaaaatttatacgagcaaaacttgcggagta

SEQ ID NO: 590255 - DNA, 75 bp, synthetic construct
  source 1..75: mol_type = other DNA
ggcgcaccagagacatttgacgttgcgaaactgacggaaaatctgcgccaggtcgtggaaggggattgtacgtgg

SEQ ID NO: 590256 - DNA, 75 bp, synthetic construct
  source 1..75: mol_type = other DNA
ggtacgcgcagggcgttacaggaaagtgtctgcggcattttatagacccggcgaagcgaacaacccggcaggaat

SEQ ID NO: 590257 - DNA, 75 bp, synthetic construct
  source 1..75: mol_type = other DNA
gttaatccgtccgacatcccgaccctgaaggggtacaccgcccgcctggtggatcagaaatggctgcgtctcgcg

SEQ ID NO: 590258 - DNA, 75 bp, synthetic construct
  source 1..75: mol_type = other DNA
caaagatgcgcctgtcgtgtgggtccatgacggtgaacgcgatcacccgactattgctctggtaaaccgcgcaat

SEQ ID NO: 590259 - DNA, 75 bp, synthetic construct
  source 1..75: mol_type = other DNA
cgctggcacttgagctcaatcctgaccatttgcgtaaatggatacggttgtataagctggaacttcagggtattg

SEQ ID NO: 590260 - DNA, 75 bp, synthetic construct
  source 1..75: mol_type = other DNA
ggaagctgtcgcgctaatcacacggctgaaagtaaagtggccagtgcgggttctttgtcatttattcggtattca

SEQ ID NO: 590261 - DNA, 75 bp, synthetic construct
  source 1..75: mol_type = other DNA
cacgttggcgcgagcttgtggcgctatatcgttatgactggattgcggccgctgatgtgttgtttgggaagacac

SEQ ID NO: 590262 - DNA, 75 bp, synthetic construct
  source 1..75: mol_type = other DNA
ggcgggcgcgattctattgagtacatggtcaaggtgcttggtcagttcccacgagaaattaacggctatttgctt

SEQ ID NO: 590263 - DNA, 75 bp, synthetic construct
  source 1..75: mol_type = other DNA
caagcaggagaacgccgggtaatggcatttatgcgtctggctggcggtcatgcggttgatttcagcgatcataaa

SEQ ID NO: 590264 - DNA, 75 bp, synthetic construct
  source 1..75: mol_type = other DNA
agaagtggcgccagcttgcgcaattttgtgatttctcgatctttatcaaagctcccgcatctgcgttgcgggagc

SEQ ID NO: 590265 - DNA, 75 bp, synthetic construct
  source 1..75: mol_type = other DNA
aggagaggagcatggaaatataggggcaaatccaaccctcgtaatcaggttaattttctttatgagccatcggaa

SEQ ID NO: 590266 - DNA, 75 bp, synthetic construct
  source 1..75: mol_type = other DNA
tacaagattaagctccggtcttcaggctatcgccttgaaccgccccggaaatcctggagactaaactccctgaga

SEQ ID NO: 590267 - DNA, 75 bp, synthetic construct
  source 1..75: mol_type = other DNA
tacaaaatcaagctccgtgcatccggttatcgcttggtctatcaggttcgcgatcaaaccattacggtattcgtg

SEQ ID NO: 590268 - DNA, 75 bp, synthetic construct
  source 1..75: mol_type = other DNA
cgtgcggcagagcatcgcagaaagctactttccggcgaggttgacgatacggcttataaccgtcgtatggctgag

SEQ ID NO: 590269 - DNA, 75 bp, synthetic construct
  source 1..75: mol_type = other DNA
gagtcgtcttcagcgatttctttctaagatccagtacgactggagcctgcgggattatatcggtcgtaaagtgtt

SEQ ID NO: 590270 - DNA, 75 bp, synthetic construct
  source 1..75: mol_type = other DNA
agctacatctggcccggacgggagacgaactgaaggcaaggactcttgacgctgtcctgaccctctgtaacctgc

SEQ ID NO: 590271 - DNA, 75 bp, synthetic construct
  source 1..75: mol_type = other DNA
gctaatgattatttgcgtgcaacctttttggagatgtttggggacccagttcgcaatccccaaaattggaaatta

SEQ ID NO: 590272 - DNA, 75 bp, synthetic construct
  source 1..75: mol_type = other DNA
tcagtaacgaaatcttccgcgttccggcgcgccgccagcgcaagcccgcggttaagccgtccgaaatcccgacta

SEQ ID NO: 590273 - DNA, 75 bp, synthetic construct
  source 1..75: mol_type = other DNA
ccaatgtcgagcgtgtgctgatgaatagccgtcaggccaatctgatagtagagatgactgaagaaggccggtatc

SEQ ID NO: 590274 - DNA, 75 bp, synthetic construct
  source 1..75: mol_type = other DNA
acaattggtggcggaatggttgagcggaaggtgattgaagagtcacttcaggcattgcaggaacgtaagccgtga

SEQ ID NO: 590275 - DNA, 75 bp, synthetic construct
  source 1..75: mol_type = other DNA
caagcggtaacaccacggttaaggcgaccttcggtaaggactccagtgttgttaaatgggttgttctggctgaag

SEQ ID NO: 590276 - DNA, 75 bp, synthetic construct
  source 1..75: mol_type = other DNA
gattttttgcgtgctaattttcttaagctgtttggcgatcccattagcaatccaaaaaattgggaattgagaaaa

SEQ ID NO: 590277 - DNA, 75 bp, synthetic construct
  source 1..75: mol_type = other DNA
atcgtcctagactcgcttgatactattgcgaaaaatgaaatcgcttatgcgcttgaaaattatgatacagcctag

SEQ ID NO: 590278 - DNA, 75 bp, synthetic construct
  source 1..75: mol_type = other DNA
tggccgtgagacgacaattaataacgcacaaagcggtgtaattaacgtttacgcagataactcctgggctttcgg

SEQ ID NO: 590279 - DNA, 75 bp, synthetic construct
  source 1..75: mol_type = other DNA
atgtctataaccgtgcatcgggtagcattattaccgacctgttaatgttaacgagtggtaactcgttttttaacg

SEQ ID NO: 590280 - DNA, 75 bp, synthetic construct
  source 1..75: mol_type = other DNA
tatcactggtgatagcgccactgtaatcaacaaaggcaatataactgtcacggataaagattcggttggtgtact

SEQ ID NO: 590281 - DNA, 75 bp, synthetic construct
  source 1..75: mol_type = other DNA
gtttttgcatcctgatcccaagttacgccatttttatagacgacaggattgtgtttaaccggggtatcgccacca

SEQ ID NO: 590282 - DNA, 75 bp, synthetic construct
  source 1..75: mol_type = other DNA
acgcggaaaatggtcaggcattctataacgatggcactgggcttattatcaactatggcacaatttgtacctttg

SEQ ID NO: 590283 - DNA, 75 bp, synthetic construct
  source 1..75: mol_type = other DNA
ggtaccatgagcgttgacggagagaattccactggctcgaaaattgtcggtgacggtgccaccatcaaacaggaa

SEQ ID NO: 590284 - DNA, 75 bp, synthetic construct
  source 1..75: mol_type = other DNA
agtaataccggtgatctcgaggcccgtttgcagaagaacgggagtgttcgtttccgtgaccgtcggacgggagag

SEQ ID NO: 590285 - DNA, 75 bp, synthetic construct
  source 1..75: mol_type = other DNA
gcatgtggtcctgaatcattaatcagggcagccgggcaaattgattgctcgcgtaattttctcaatccaccatat

SEQ ID NO: 590286 - DNA, 75 bp, synthetic construct
  source 1..75: mol_type = other DNA
gcgtgtggcccggaatcattaatcagggctgcaggccaaattgattgctcccgtaactttctcaatcctccgtac

SEQ ID NO: 590287 - DNA, 75 bp, synthetic construct
  source 1..75: mol_type = other DNA
atgaccgggatgtggcagcctgatcactcaggcaaaatactctccaggaaaaccggagcggttcatagcgctaat

SEQ ID NO: 590288 - DNA, 75 bp, synthetic construct
  source 1..75: mol_type = other DNA
gttactgggatcagtattgattgacgtattaattccatcgctgggcaataccgtttatctggtcacgatcatcgg

SEQ ID NO: 590289 - DNA, 75 bp, synthetic construct
  source 1..75: mol_type = other DNA
ataagtgtgtttatatatgtggtattaatcgttctgtcatatatttcaggtcacttcatatctattctatcatcc

SEQ ID NO: 590290 - DNA, 75 bp, synthetic construct
  source 1..75: mol_type = other DNA
gaatttgagatgcctggggaggagctgaagcgcaagcagaagatcatgaataccgttgatgtgaaaatgcttttc

SEQ ID NO: 590291 - DNA, 75 bp, synthetic construct
  source 1..75: mol_type = other DNA
ctttgcagctcaacctatcagtaatacccagttcaaattattaaattcaacatcatcatcagccgttatttacgc

SEQ ID NO: 590292 - DNA, 75 bp, synthetic construct
  source 1..75: mol_type = other DNA
cctatcagtaatactcagttcaaattattaaattcaacatcatcaccagccgttatttacgctcgatggattgca

SEQ ID NO: 590293 - DNA, 75 bp, synthetic construct
  source 1..75: mol_type = other DNA
ataatccgacatttaccggagaaccaaaagcggcgacacctcccgcaggaaataacaccacgcggattgcgacta

SEQ ID NO: 590294 - DNA, 75 bp, synthetic construct
  source 1..75: mol_type = other DNA
atgaaatttgaacgccatcatgaaatattgaaacgactcagtaaattcggttctgtaaaagtatccgatctgtcc

SEQ ID NO: 590295 - DNA, 75 bp, synthetic construct
  source 1..75: mol_type = other DNA
ctgaacgttttcgtcaaccttttggggtcttttgctatgaccgcactggctttctggctgttttccgcctcaacc

SEQ ID NO: 590296 - DNA, 75 bp, synthetic construct
  source 1..75: mol_type = other DNA
actggtttgccggtctctgtggagcgatggtggtattttctgaaggcgcatcagccaacgcactcggggtcgcaa

SEQ ID NO: 590297 - DNA, 75 bp, synthetic construct
  source 1..75: mol_type = other DNA
aacacaagatgcgttggctaaaaaagctggggtcaccagagttgcaatcagtaaagccgagcaaggccttacaaa

SEQ ID NO: 590298 - DNA, 75 bp, synthetic construct
  source 1..75: mol_type = other DNA
gtacgtttgcagagaaggttgaaaaaacactctcacgtctggtcacttcttcaaatgttaaaaaacatcccgtga

SEQ ID NO: 590299 - DNA, 75 bp, synthetic construct
  source 1..75: mol_type = other DNA
tgctgtgcatcttgtatggctatcgtgcctggaaaaacggccgtttctggtataccggtgcggccattgcctcag

SEQ ID NO: 590300 - DNA, 75 bp, synthetic construct
  source 1..75: mol_type = other DNA
ttgtccttgagaggttccttaaagagtacaagcgcacaaaaatgggatcgcatacctggaaaacatcgcagcatg

SEQ ID NO: 590301 - DNA, 75 bp, synthetic construct
  source 1..75: mol_type = other DNA
gatttcattccctctcatgggactgacgccacctctgtttgatctcccgtggtatgagaatgtttctgaaatttt

SEQ ID NO: 590302 - DNA, 75 bp, synthetic construct
  source 1..75: mol_type = other DNA
cttttgctcttgagaaattccttaaggagcacaagaaaaagctatcattgcaaacctgggaacgaaccgaatctg

SEQ ID NO: 590303 - DNA, 75 bp, synthetic construct
  source 1..75: mol_type = other DNA
aatgtttacggtgaaaccaagttagcaggagaaaaagcattacaagagcattgtgcgaagcaccttattttccgg

SEQ ID NO: 590304 - DNA, 75 bp, synthetic construct
  source 1..75: mol_type = other DNA
gcgtgttggcggtactggagatggtggcatcgatggtgtgatatcgcttgataaacttggcctggagaaagttta

SEQ ID NO: 590305 - DNA, 75 bp, synthetic construct
  source 1..75: mol_type = other DNA
gcaacatattgcgatcgttgatgcgatccggcgtcacgatcccgacgaagccgatcgcgcattgcaatcgcatct

SEQ ID NO: 590306 - DNA, 75 bp, synthetic construct
  source 1..75: mol_type = other DNA
cgcgcaaagcaggcattccccttgcactcaacaagctcaacgcagtaccaacaacagtctatcctacaccagctc

SEQ ID NO: 590307 - DNA, 75 bp, synthetic construct
  source 1..75: mol_type = other DNA
ggctgattgcaccgctcatgccattcgcgtagcagtagacaaaccagaagttgctggtttgtaccatctggttgc

SEQ ID NO: 590308 - DNA, 75 bp, synthetic construct
  source 1..75: mol_type = other DNA
caggagaaaaagcattacaagagcattgtgcgaagcaccttattttccggaccagctgggtctatgcaggtaaag

SEQ ID NO: 590309 - DNA, 75 bp, synthetic construct
  source 1..75: mol_type = other DNA
tgattccattcctattttgtgcattaccggtcaggctccgcgcgcccgtctgcataaagaagatttccaggccgt

SEQ ID NO: 590310 - DNA, 75 bp, synthetic construct
  source 1..75: mol_type = other DNA
ccatgtgctggtcaacaacgctggtaatgactccaacttattgatagtgttttatgttcagataatgcccgatga

SEQ ID NO: 590311 - DNA, 75 bp, synthetic construct
  source 1..75: mol_type = other DNA
tctattccgcttctgctgattccattcctattctgtgtattaccggccaggctccgcgcgcccgtctgcataaag

SEQ ID NO: 590312 - DNA, 75 bp, synthetic construct
  source 1..75: mol_type = other DNA
ctcgcgtccttctgcggacaccatcatcggcgagctttccggcatggcaaaagattttctttcccatcctggcgg

SEQ ID NO: 590313 - DNA, 75 bp, synthetic construct
  source 1..75: mol_type = other DNA
ttcggtgcgtgaagcgctggcggcgttaaagcgcaaaggtttggtacaaattaataacggcgaacgcgctcgcgt

SEQ ID NO: 590314 - DNA, 75 bp, synthetic construct
  source 1..75: mol_type = other DNA
cgggcgaccttcggtgcgtgaagcgctggcagcattaaaacgaaaaggtctggtgcaaataaacaatggagaacg

SEQ ID NO: 590315 - DNA, 75 bp, synthetic construct
  source 1..75: mol_type = other DNA
gcgcttgtcttgcctgactggcaggttggcgtgaaacgaatgcttaacgaattatttacgactacagcaatttaa

SEQ ID NO: 590316 - DNA, 75 bp, synthetic construct
  source 1..75: mol_type = other DNA
accagctgggtatatgcaggtaaaggaaataactttgccaaaacaatgttacgtctggcaaaagagcgcgaagaa

SEQ ID NO: 590317 - DNA, 75 bp, synthetic construct
  source 1..75: mol_type = other DNA
tcagagaagagctaagggcgacgggcaaccaacagagccgacatacatcacaaacggcgcattaatcgccgcaat

SEQ ID NO: 590318 - DNA, 75 bp, synthetic construct
  source 1..75: mol_type = other DNA
tacggaaaaattccagcatagttttggtctaacgctgccttcctgggagaagggagttagacgcatgctggaaga

SEQ ID NO: 590319 - DNA, 75 bp, synthetic construct
  source 1..75: mol_type = other DNA
ccggagaaaaagcattacaaaaacattgtcctaagcaccttattttccggaccagctgggtctatgcaggcaaag

SEQ ID NO: 590320 - DNA, 75 bp, synthetic construct
  source 1..75: mol_type = other DNA
agacaaagcagaatcagaaccggagtttgcacaattacttaacgcgacaagtgtcgaagcgattgcgaaagcagc

SEQ ID NO: 590321 - DNA, 75 bp, synthetic construct
  source 1..75: mol_type = other DNA
cgttcaccactacaaaaggagagattaatgactattgctgaacggctacggcaggaaggacatcaaattggctgg

SEQ ID NO: 590322 - DNA, 75 bp, synthetic construct
  source 1..75: mol_type = other DNA
ccggagaaaaggcgttacaggaatattgcgcgaagcatcttattttccggaccagctgggtctatgcaggaaaag

SEQ ID NO: 590323 - DNA, 75 bp, synthetic construct
  source 1..75: mol_type = other DNA
ttgctggtttgtaccatctggttgctggtggtacaacaacctggcacgattatgccgctctggtatttgaagaag

SEQ ID NO: 590324 - DNA, 75 bp, synthetic construct
  source 1..75: mol_type = other DNA
gcaatgcggcgatacctcccgtttcacccgttttattcaggagattgccgaacgttcaccactacaaaaggagag

SEQ ID NO: 590325 - DNA, 75 bp, synthetic construct
  source 1..75: mol_type = other DNA
caggctgggcgcatgaccgtttaaaacgtgccgggttgtcgcaaagtttgtcgcgtggcaaatggtgcctgactc

SEQ ID NO: 590326 - DNA, 75 bp, synthetic construct
  source 1..75: mol_type = other DNA
ggagaaagtttatgttcaggcaaaacgttggcagaacactgtaggcaggccagaattacaggcattttacggcgc

SEQ ID NO: 590327 - DNA, 75 bp, synthetic construct
  source 1..75: mol_type = other DNA
tctggaaggcatcgcgcagaccgtgcgtaccgtccgccccgacgttgtggtgaatgccgccgcgcacacggcagt

SEQ ID NO: 590328 - DNA, 75 bp, synthetic construct
  source 1..75: mol_type = other DNA
gcgcgtttgatatggattactgcgtacagctcgcgttcgaaaatattaactccagtgaagtgaacggttacggcg

SEQ ID NO: 590329 - DNA, 75 bp, synthetic construct
  source 1..75: mol_type = other DNA
cggtcacggtgaagagatttggcctgtggtgaaaccggtgtacgaaaaaatggcggacattgtcgcacggcatat

SEQ ID NO: 590330 - DNA, 75 bp, synthetic construct
  source 1..75: mol_type = other DNA
aattgaagatatttcttctactgacagccaggctgcgcacaacctggcgctgagtattgatgaacgcctgcaggc

SEQ ID NO: 590331 - DNA, 75 bp, synthetic construct
  source 1..75: mol_type = other DNA
tcccggaatccattgtccgcactgtggtgcatatgatggaaagcgtggcgctaccgggcggcggcggcgtgaagg

SEQ ID NO: 590332 - DNA, 75 bp, synthetic construct
  source 1..75: mol_type = other DNA
ggatattggcggcggcactaccggaattgccatcgtgaaaaagggcaaggtgacttattcagcggatgaagcgac

SEQ ID NO: 590333 - DNA, 75 bp, synthetic construct
  source 1..75: mol_type = other DNA
tgggcgagagaaagcggaggggctatatgcaaaatgtattgcagaccgcgctctttcaggcgttcgataccctga

SEQ ID NO: 590334 - DNA, 75 bp, synthetic construct
  source 1..75: mol_type = other DNA
tggctggcgggcggctcctgtatgcaaccgggcgtggcggaactgtttcgcaaacaattcccggcgttacaggtg

SEQ ID NO: 590335 - DNA, 75 bp, synthetic construct
  source 1..75: mol_type = other DNA
accctgaccggggtattacagaagtcgagtaacgtcggtgtttccaagctggcgttagcgatgctgtcctcagcg

SEQ ID NO: 590336 - DNA, 75 bp, synthetic construct
  source 1..75: mol_type = other DNA
tttatttaacgtattaaataccattggccggttagcttttcttgaagatgcgcagcgtaccgaaacaatggtgca

SEQ ID NO: 590337 - DNA, 75 bp, synthetic construct
  source 1..75: mol_type = other DNA
tttttgatcctgcaaccgctggtggaaaacttctttaactacgtagtggagccaagggatagcaatagtcatctg

SEQ ID NO: 590338 - DNA, 75 bp, synthetic construct
  source 1..75: mol_type = other DNA
cggcgccgtttccgcgcccggcctttggtgccatcatgggcggcgtattgcgtaccatgaacatcgagccggatg

SEQ ID NO: 590339 - DNA, 75 bp, synthetic construct
  source 1..75: mol_type = other DNA
gctcacctcatcggctttactaacgtcgatagccaggggattgagggcgttgagaagagtttcgataaatggctt

SEQ ID NO: 590340 - DNA, 75 bp, synthetic construct
  source 1..75: mol_type = other DNA
agcgtggttacaggttatctccccggacatgttggtgaaagagggcgatatgcgctctcttcgcgttcagcaagt

SEQ ID NO: 590341 - DNA, 75 bp, synthetic construct
  source 1..75: mol_type = other DNA
gttcttgacgggctacagtgggatggctcgatgtttactgatgatgaatatcagttcgttattcatgacgccacg

SEQ ID NO: 590342 - DNA, 75 bp, synthetic construct
  source 1..75: mol_type = other DNA
gtagagaaatacaccgaagggcgcaaaatcgttcatatcgatattgagccgacgcaaattggccgcgtgctgtgt

SEQ ID NO: 590343 - DNA, 75 bp, synthetic construct
  source 1..75: mol_type = other DNA
tttctggccctcatggtaccggcaacatgttgaagtgctatggaccacgctcaatcagttcaataacaccggtct

SEQ ID NO: 590344 - DNA, 75 bp, synthetic construct
  source 1..75: mol_type = other DNA
cgatatccggatttttataacgaagagattttcagggaggtgcacgaagagactgagtccacatttaaagagctt

SEQ ID NO: 590345 - DNA, 75 bp, synthetic construct
  source 1..75: mol_type = other DNA
gcacaaatgctgcatgtctttaaagaccgccactggatcaactgtgggcaggctggtccgttaggctggacgatt

SEQ ID NO: 590346 - DNA, 75 bp, synthetic construct
  source 1..75: mol_type = other DNA
tccggtcctgcgggcacggacatgatcaccgcgctctattctgcttctgctgattccattcctattctgtgtatt

SEQ ID NO: 590347 - DNA, 75 bp, synthetic construct
  source 1..75: mol_type = other DNA
ttcaacattccgtacatccatgtactggtcaataacgcttatctggggctgattcgccagtcgcagcgcgcgttt

SEQ ID NO: 590348 - DNA, 75 bp, synthetic construct
  source 1..75: mol_type = other DNA
gcagatccaggcgttgccttattccacgatgtatttacgccttaatgaagggcaacgaatctttgtggtactggg

SEQ ID NO: 590349 - DNA, 75 bp, synthetic construct
  source 1..75: mol_type = other DNA
atgtgctgtgtaatgtctggcaggaagaggtgacttccacgctgccagaaaaacagtggcaaaacacattctggg

SEQ ID NO: 590350 - DNA, 75 bp, synthetic construct
  source 1..75: mol_type = other DNA
aaaaaatacattaggtatgcttgaaatattggggcgaggttcgtggagtaaattgaaagagctgccgtatataaa

SEQ ID NO: 590351 - DNA, 75 bp, synthetic construct
  source 1..75: mol_type = other DNA
gttactggtgccgtgtataatctcactaaaaccaacaacctgatggcggaccctgagggttccttcttctcggtt

SEQ ID NO: 590352 - DNA, 75 bp, synthetic construct
  source 1..75: mol_type = other DNA
ataaacgtgatgacaaacagtttacctggcgtggtggtgttaactacctgtttgataatggtgtaacaccttact

SEQ ID NO: 590353 - DNA, 75 bp, synthetic construct
  source 1..75: mol_type = other DNA
gggctccaacgtggcgctgcatgttaacaacctgttcgatcgtgaatacgtcgccagctgctttaacacttatgg

SEQ ID NO: 590354 - DNA, 75 bp, synthetic construct
  source 1..75: mol_type = other DNA
ccctggagaaagtggcggagatcgagcgacatatcgaagaactgcaatccatgcgcaaccagctgttggcgctgg

SEQ ID NO: 590355 - DNA, 75 bp, synthetic construct
  source 1..75: mol_type = other DNA
atgaataacatgctgatgcaacgtattgttgacgaagtggtttttcgccttaaacaacgtgcgggaaaaacactc

SEQ ID NO: 590356 - DNA, 75 bp, synthetic construct
  source 1..75: mol_type = other DNA
cattgtttcttgggatcaactcactggtctattacgtgattattggctggcttccggcgatcctcatcagtcacg

SEQ ID NO: 590357 - DNA, 75 bp, synthetic construct
  source 1..75: mol_type = other DNA
cgaatgcctgccccggtgatgacagcgccgactgcccgattatcgaaaatctctccggctgctgtcatcatcggg

SEQ ID NO: 590358 - DNA, 75 bp, synthetic construct
  source 1..75: mol_type = other DNA
ttaccggcctgaccagcaaagcaatccgcttctatgaagagaaggggctggtgacgccgccgatgcgtagcgaaa

SEQ ID NO: 590359 - DNA, 75 bp, synthetic construct
  source 1..75: mol_type = other DNA
cgaatgcctgccctggcgatgacagcgccgactgcccgattatcgaaaatctctccggctgctgtaatgccagtc

SEQ ID NO: 590360 - DNA, 75 bp, synthetic construct
  source 1..75: mol_type = other DNA
ggcaatgcactacggtcatggctggatcatgggtgaggatggtaaacgctggcatccgtgccgttcacaagatga

SEQ ID NO: 590361 - DNA, 75 bp, synthetic construct
  source 1..75: mol_type = other DNA
atatctttcgcgcacaggcaaccagttttattgcgatggtgaacaaattgcgcatgccatgttgcgcgatacaaa

SEQ ID NO: 590362 - DNA, 75 bp, synthetic construct
  source 1..75: mol_type = other DNA
ccgccgaagtcgtcaggctttttaattgttcgtattgtccactttattattaaagggattaaacatgtcacgcga

SEQ ID NO: 590363 - DNA, 75 bp, synthetic construct
  source 1..75: mol_type = other DNA
gattttgctcaccagatcaaagggcagggaagcagcagtattcagggctttaagccacaggagagtatccccggc

SEQ ID NO: 590364 - DNA, 75 bp, synthetic construct
  source 1..75: mol_type = other DNA
ggactgcggccatgacaggtcattatgagaatacgacagaaataaaacagattgtgattgaatcttccgcgattc

SEQ ID NO: 590365 - DNA, 75 bp, synthetic construct
  source 1..75: mol_type = other DNA
gcgggttctgattttgcccgtcagattcaggggcagggtacaggcagtattcagggctttaagccacaggagagt

SEQ ID NO: 590366 - DNA, 75 bp, synthetic construct
  source 1..75: mol_type = other DNA
gaaagcggatcggcaaaaagccatcagcgatatcgtggcgctggagaacgcgctggatatgtaccgactggataa

SEQ ID NO: 590367 - DNA, 75 bp, synthetic construct
  source 1..75: mol_type = other DNA
cctgaactcaactggcagatcccgcaatccacttatctggcctggcttgatctacgtccgttgaatattgacgac

SEQ ID NO: 590368 - DNA, 75 bp, synthetic construct
  source 1..75: mol_type = other DNA
agggtcgtggctttgttcgtctcaatgccggatgcccgcgttcaaaactggaaaaaggtattgccggtttgatta

SEQ ID NO: 590369 - DNA, 75 bp, synthetic construct
  source 1..75: mol_type = other DNA
acgacaacgcattgcaaagagccctgattgagcaagaaaaagtggcgattatgccaggatatacctatggtgaag

SEQ ID NO: 590370 - DNA, 75 bp, synthetic construct
  source 1..75: mol_type = other DNA
tccacggttaaggcgaccttcggtaaggactccagtgttgttaaatgggtcgttctggctgaagttctggtcggt

SEQ ID NO: 590371 - DNA, 75 bp, synthetic construct
  source 1..75: mol_type = other DNA
caatggagtggtcgctcgggggcttcccggattcggttatctgggagctttacgccgcaaccggtgtggatgccg

SEQ ID NO: 590372 - DNA, 75 bp, synthetic construct
  source 1..75: mol_type = other DNA
cacacccgcctatgacgcattttacaaggccattgaaggtaaccagcgcacagtaatgcccgttgctttagagaa

SEQ ID NO: 590373 - DNA, 75 bp, synthetic construct
  source 1..75: mol_type = other DNA
atggcactaccccgcaaactcaaatatctgaacatgttcaatgacggcctgagctacatgggcgttgttgaatcc

SEQ ID NO: 590374 - DNA, 75 bp, synthetic construct
  source 1..75: mol_type = other DNA
gcgattgggcaatctgaattatttagcgccctgattgtggaagacaaactgtttttgtcggagctggcgggcaaa

SEQ ID NO: 590375 - DNA, 75 bp, synthetic construct
  source 1..75: mol_type = other DNA
ggtgctctatgaggttgatgtggtcaacatgattgaaatcgttgacggtgtggacctgatggaagcgcaccgtaa

SEQ ID NO: 590376 - DNA, 75 bp, synthetic construct
  source 1..75: mol_type = other DNA
ttatcgaggcgctgaatcagcgcctgatgcacggcgtatttggctacagccgctggaaaaacgatgagtttctcg

SEQ ID NO: 590377 - DNA, 75 bp, synthetic construct
  source 1..75: mol_type = other DNA
aaggccgtggctttgttcgtctcaatgccggatgccctcgttcgaaactggaaaaaggtgtcgccggattaatta

SEQ ID NO: 590378 - DNA, 75 bp, synthetic construct
  source 1..75: mol_type = other DNA
ctgaatatgcttcgcctggttcgtgcagtgatcccggttgctgttttgatgatgttgttccctgagttagctatg

SEQ ID NO: 590379 - DNA, 75 bp, synthetic construct
  source 1..75: mol_type = other DNA
attgctgtctgaattgaccacggggaaacggagaaagtcaaaatgtatgcagcggaaagtgaagtggattatcag

SEQ ID NO: 590380 - DNA, 75 bp, synthetic construct
  source 1..75: mol_type = other DNA
ggtgaaccgggctgacagcattgtgggaaataccgggcagcagtgcagtgcgcaggagataaaccgcagtgaatt

SEQ ID NO: 590381 - DNA, 75 bp, synthetic construct
  source 1..75: mol_type = other DNA
acagagcggtaagagcagtgactttggtgcggccgtatcacaactggccgctctggccgcagcaggtaaggatgt

SEQ ID NO: 590382 - DNA, 75 bp, synthetic construct
  source 1..75: mol_type = other DNA
gaatgacacgagcaccgtgaaaacgtttgttatctcccatgaacagttccgtttctggcgggaaggaaagcgtat

SEQ ID NO: 590383 - DNA, 75 bp, synthetic construct
  source 1..75: mol_type = other DNA
ggaaaggcgaaggacaacaaactgacggtgagtgtgggtgagttctgctcccggaaagtgctgggtgtctgtctg

SEQ ID NO: 590384 - DNA, 75 bp, synthetic construct
  source 1..75: mol_type = other DNA
gtcctgactgtcgggggattacggttgatgagctgcagaaaattcagttcgacagactggatttcactaacttct

SEQ ID NO: 590385 - DNA, 75 bp, synthetic construct
  source 1..75: mol_type = other DNA
tgtcggctcatgcagggctatatttccttaactcccgttacgactttatgaacacagcctttaatgtgcaactgg

SEQ ID NO: 590386 - DNA, 75 bp, synthetic construct
  source 1..75: mol_type = other DNA
tagtctttctttcggtgttccttggactaatcgctctactcagtgctatcaaaaatggttctgatgaattggcgg

SEQ ID NO: 590387 - DNA, 75 bp, synthetic construct
  source 1..75: mol_type = other DNA
agtgggttgaactggacactgtcgggccgaatggaccggtgaaagcgacattccttgtgcacagcgttctgtata

SEQ ID NO: 590388 - DNA, 75 bp, synthetic construct
  source 1..75: mol_type = other DNA
atacaccctgcagttctggctgctgagtaacggaaaggtcatgacggaaaaagacgggctctgtaacccctttcc

SEQ ID NO: 590389 - DNA, 75 bp, synthetic construct
  source 1..75: mol_type = other DNA
gccctgaacggggtggatgtccgtgctttcaccggtcaggcgaaattttgtaagaaggctgcagccggatacagc

SEQ ID NO: 590390 - DNA, 75 bp, synthetic construct
  source 1..75: mol_type = other DNA
gctaaagcatcagatatggtgagcaaagctgatctggaggaactcccgagtttatcaaccggtgaagctttggtg

SEQ ID NO: 590391 - DNA, 75 bp, synthetic construct
  source 1..75: mol_type = other DNA
ctttggcgatggtgtaaccgagcttgagcttttgcccggtgcgaatgtaactggtgagaatatgtttgctcaggt

SEQ ID NO: 590392 - DNA, 75 bp, synthetic construct
  source 1..75: mol_type = other DNA
actggaaatacacggatgaatatcgtgaggtgacgataccgcactcacagttccggttcagtatgaacgggctga

SEQ ID NO: 590393 - DNA, 75 bp, synthetic construct
  source 1..75: mol_type = other DNA
ttactcgtcgagagggtacatcaaacgcctgccgaaagatccatggggcaatgattatcaatatctgagtcctgg

SEQ ID NO: 590394 - DNA, 75 bp, synthetic construct
  source 1..75: mol_type = other DNA
catctgtcgcagtctgaacacagcggtccgccgtggaaagcctgcctcatcgataaggtctttaaactgtattgt

SEQ ID NO: 590395 - DNA, 75 bp, synthetic construct
  source 1..75: mol_type = other DNA
tgccgggcagcgacccggagacgaacggtgatttaagtgccgatatccggcagcttgagaacgcgctggcgcgct

SEQ ID NO: 590396 - DNA, 75 bp, synthetic construct
  source 1..75: mol_type = other DNA
attgctggcagaactatctacgaaaaaacgggggaacaaatggctattgaaggcgctgcagcaactgttccatta

SEQ ID NO: 590397 - DNA, 75 bp, synthetic construct
  source 1..75: mol_type = other DNA
cgtctttgctcgttaagcaaagccccggcatgcactgcggccacggctggattattggtaaagacggcaagcgct

SEQ ID NO: 590398 - DNA, 75 bp, synthetic construct
  source 1..75: mol_type = other DNA
ggcatttattgtgacgctgaatgtgcgcaatggcacagggaagagcaggccgcaaaacagcgtaaatatggcatg

SEQ ID NO: 590399 - DNA, 75 bp, synthetic construct
  source 1..75: mol_type = other DNA
ggcaagatggtagacggtccggttatcgatcgtgcccgtctggtgctctcccgtgcagaactttccggcatccgc

SEQ ID NO: 590400 - DNA, 75 bp, synthetic construct
  source 1..75: mol_type = other DNA
agtgccgatatccggcagcttgagaacgcgctggcacgctgtgccagccaggtaaaaatgattaaacactgtcag

SEQ ID NO: 590401 - DNA, 75 bp, synthetic construct
  source 1..75: mol_type = other DNA
agtgcgcgttttattccgatgagggaacctgtctgcatgagtacgccacgtactcctgcgagtcaaaaacatccg

SEQ ID NO: 590402 - DNA, 75 bp, synthetic construct
  source 1..75: mol_type = other DNA
acggtgatttaagtgccgatatccggcagcttgagaacgcgctggcgcgctgtgccagccaggtaaaaatgatta

SEQ ID NO: 590403 - DNA, 75 bp, synthetic construct
  source 1..75: mol_type = other DNA
atgccgggcagtgacccggagacgaacggcgatttaagtgctgatatccggcagcttgagaacgcgctggcacgc

SEQ ID NO: 590404 - DNA, 75 bp, synthetic construct
  source 1..75: mol_type = other DNA
gctttgacggcaaatcgctgatcaacccgcgtcagattgatctgctgcacaacctctacgcaccgacccagaaag

SEQ ID NO: 590405 - DNA, 75 bp, synthetic construct
  source 1..75: mol_type = other DNA
cactgcgcgtttcaccactctgtacggttgctctgtacttgttcctgaatatacgggcatcgttattgccgggca

SEQ ID NO: 590406 - DNA, 75 bp, synthetic construct
  source 1..75: mol_type = other DNA
tcctgaaattcaagttcaatctttattaaaaagtttacactccttcattaaaaaatataattttgttttcattgg

SEQ ID NO: 590407 - DNA, 75 bp, synthetic construct
  source 1..75: mol_type = other DNA
atgacgaatttattaggcattcaatcactaaaatgagttcattacatctggcctcaacgcatgaatacagaaaaa

SEQ ID NO: 590408 - DNA, 75 bp, synthetic construct
  source 1..75: mol_type = other DNA
cgacaggggactattacggtatctgcatctggcttgcaggttggtgatgcgttcaccattgccggtgtgaattcc

SEQ ID NO: 590409 - DNA, 75 bp, synthetic construct
  source 1..75: mol_type = other DNA
ccgggcaaccgcaggtattccgtgttctggctgttagcggaactaccgtaacaatttctccaaagattctccctg

SEQ ID NO: 590410 - DNA, 75 bp, synthetic construct
  source 1..75: mol_type = other DNA
cagtaactatctccccgaaaattctgccgcctgacaacgcggatgtcgccagccgtccatatgcaaacgttgatg

SEQ ID NO: 590411 - DNA, 75 bp, synthetic construct
  source 1..75: mol_type = other DNA
aagagatgactgaacgcgagcagcgtgaacttaaaacactgctggatcgggcgcggattgcgcatggtcgcgtgt

SEQ ID NO: 590412 - DNA, 75 bp, synthetic construct
  source 1..75: mol_type = other DNA
gggcttttgcgcctgttaaaaagaaatcatcttttttctctaaactgaacctgcttcgcctggttcgtgctgtga

SEQ ID NO: 590413 - DNA, 75 bp, synthetic construct
  source 1..75: mol_type = other DNA
ttaaatcggcgtccaccggtagcactctcggcgaagaactctggaacgcatcggctgacgttgatgcaatgatgc

SEQ ID NO: 590414 - DNA, 75 bp, synthetic construct
  source 1..75: mol_type = other DNA
atcagcgtgcggatgaattaccttcctgctaacgccgcatttgccagcacgctgaaaaaccccaaactcggctat

SEQ ID NO: 590415 - DNA, 75 bp, synthetic construct
  source 1..75: mol_type = other DNA
cgacgaaatgcctgcgtggttgaggttcaactaccgaaaaaacagcgtcttgttcgggtgattgaaaagggctta

SEQ ID NO: 590416 - DNA, 75 bp, synthetic construct
  source 1..75: mol_type = other DNA
aaagcgggacttggctggacaggtaagcactcacttatcctcaatcgcgaagccggctcgttcttctttttaggc

SEQ ID NO: 590417 - DNA, 75 bp, synthetic construct
  source 1..75: mol_type = other DNA
catctgggttgcaggttggcgatgcgttcaccattgctggcgtgaattctgtacaccagatcaccaaagacacca

SEQ ID NO: 590418 - DNA, 75 bp, synthetic construct
  source 1..75: mol_type = other DNA
aaatcgaatagatagaacttattataatccttattataaagaaaatagtgccgagatagctatgtctagtataat

SEQ ID NO: 590419 - DNA, 75 bp, synthetic construct
  source 1..75: mol_type = other DNA
cattgaacgtaatgccatcaatgccgtgaaagcggtgaacgctgcacggatggcgatacggcgtacttctgctcc

SEQ ID NO: 590420 - DNA, 75 bp, synthetic construct
  source 1..75: mol_type = other DNA
ttgcccgtatctggcaagtgatgcatgacggtattgaacgtgggatgaacactgaaggcgtgctgcctggtccgc

SEQ ID NO: 590421 - DNA, 75 bp, synthetic construct
  source 1..75: mol_type = other DNA
ttgaggccatcacagacactaccgggcagtggaatggcggtaaatttgactggattagtgacagtgattcccgta

SEQ ID NO: 590422 - DNA, 75 bp, synthetic construct
  source 1..75: mol_type = other DNA
aggatctgctgaccgccctcgcctgtaacgcccgtggtgaagcgcaggaagctgatgctcaccgcagccgccgct

SEQ ID NO: 590423 - DNA, 75 bp, synthetic construct
  source 1..75: mol_type = other DNA
tagtttcttagattggattagtgataacaaaaatcgcattaaaaagttttatgatattcctaaagtcactactct

SEQ ID NO: 590424 - DNA, 75 bp, synthetic construct
  source 1..75: mol_type = other DNA
gagccatattgtggtcgatctgtatgggtcgttgtcactgacgggcaaaggccatgccacggatgtcgccattat

SEQ ID NO: 590425 - DNA, 75 bp, synthetic construct
  source 1..75: mol_type = other DNA
attgccaacagaataaaaacagattcattccatcaattaaacctgaagagtatctcgcattaaataaatattcgc

SEQ ID NO: 590426 - DNA, 75 bp, synthetic construct
  source 1..75: mol_type = other DNA
gaaaccttgacagtatcaaatcaacctgaacacaaggttgaagcgaaagattcaaatggcatgcctgttgataac

SEQ ID NO: 590427 - DNA, 75 bp, synthetic construct
  source 1..75: mol_type = other DNA
gctgcgccgcttgctgctttctagtgacaatatctctaacgatccaatgaatgtgatcgactggatcaatatgtt

SEQ ID NO: 590428 - DNA, 75 bp, synthetic construct
  source 1..75: mol_type = other DNA
ggcagaaagaactcttaagcaaaacctattattctgtcggcggcggttttattgttgaagacgaacacttcggcc

SEQ ID NO: 590429 - DNA, 75 bp, synthetic construct
  source 1..75: mol_type = other DNA
atggagcataaccttgggctgacctgcgatccggttgccggacaggtacaaatcccgtgcattgaacgtaatgcc

SEQ ID NO: 590430 - DNA, 75 bp, synthetic construct
  source 1..75: mol_type = other DNA
caagtatatctcaattatctcctgctggaatacaggctttgcaggatgcagccaggagcgaaggcgaaataagag

SEQ ID NO: 590431 - DNA, 75 bp, synthetic construct
  source 1..75: mol_type = other DNA
gatgaccaaaaacgtcaagttcctggccggttttgccatcatctctgtatttattgctgtgggtatgaccgtcgt

SEQ ID NO: 590432 - DNA, 75 bp, synthetic construct
  source 1..75: mol_type = other DNA
cagctatcagggcgtcgcaaagtccgtcacgctgccaaaactgacccgtaagctcgaaaactatcgcggtgcggg

SEQ ID NO: 590433 - DNA, 75 bp, synthetic construct
  source 1..75: mol_type = other DNA
tacgccgcaaccggcgtggatgccgtaccgattcgttttgcaggctcttaccagcgcgacgataccggcgaaacg

SEQ ID NO: 590434 - DNA, 75 bp, synthetic construct
  source 1..75: mol_type = other DNA
taccgattcgttttgctggctcttaccagcgcgacgatacaggcgaaacggtggccgtcgaggtggtcatgcgtg

SEQ ID NO: 590435 - DNA, 75 bp, synthetic construct
  source 1..75: mol_type = other DNA
cagctatcagggcgtcgcgaagtccgtcacgctaccaaaactgacccgtaagctcgaaaactatcgcggtgcggg

SEQ ID NO: 590436 - DNA, 75 bp, synthetic construct
  source 1..75: mol_type = other DNA
atctgaacatgtttaacgacggccttagctacatgggcgttgttgaatccgtgacgctgccgaagctgacccgca

SEQ ID NO: 590437 - DNA, 75 bp, synthetic construct
  source 1..75: mol_type = other DNA
cgctggagaaggtggcggagatcgagcgacatatcgaagaactgcaatccatgcgcgaccagttactggagctgg

SEQ ID NO: 590438 - DNA, 75 bp, synthetic construct
  source 1..75: mol_type = other DNA
ggggtgacaaatgattccgtattcgaaagtcgagtctctggcagcgtgccggatgactgcacaacaaatcgctga

SEQ ID NO: 590439 - DNA, 75 bp, synthetic construct
  source 1..75: mol_type = other DNA
ggttgggtgtaaatactacatccagcttgatgacgactatcacgagtttcagtttcgggtagatcgcaactatga

SEQ ID NO: 590440 - DNA, 75 bp, synthetic construct
  source 1..75: mol_type = other DNA
taatgaatgtctttctgaacggctacagctatcagggcgttgcaaagtccgtcacgctgccaaaactgacccgta

SEQ ID NO: 590441 - DNA, 75 bp, synthetic construct
  source 1..75: mol_type = other DNA
tgatggccgggggtaacgccaccgtcaaggccaccttcggtaaagactccagtgcggtgaaatgggtgattctgg

SEQ ID NO: 590442 - DNA, 75 bp, synthetic construct
  source 1..75: mol_type = other DNA
accaaagtgaccagtaccaacagctacgcgaagctgactatcaatggtgaggtgctctatgaagtggaccttatc

SEQ ID NO: 590443 - DNA, 75 bp, synthetic construct
  source 1..75: mol_type = other DNA
acgcgaagctgactattaatggtgaggtgctctatgaagtggaccttatcaacatggtggaaattgtggacggtg

SEQ ID NO: 590444 - DNA, 75 bp, synthetic construct
  source 1..75: mol_type = other DNA
agaaaatgaaggataaccccgccgtcgcgctgacccgcgtgccggggctgatgagcggactgggcaacgtgtccg

SEQ ID NO: 590445 - DNA, 75 bp, synthetic construct
  source 1..75: mol_type = other DNA
atggcaaaagcagaatctacgcattatcttaatgcgccaccgattccgcgaacaaaagagcaagtattaaaagaa

SEQ ID NO: 590446 - DNA, 75 bp, synthetic construct
  source 1..75: mol_type = other DNA
ctgtactggacggggtctccggtcagctggggtcggcaacaaccgtgctgacccacatttcaccgacattaagta

SEQ ID NO: 590447 - DNA, 75 bp, synthetic construct
  source 1..75: mol_type = other DNA
gtggattgttggataggttattgaggcgtgagtatcgaatggaaggaagggccgaggctctggaacggcaattaa

SEQ ID NO: 590448 - DNA, 75 bp, synthetic construct
  source 1..75: mol_type = other DNA
aaattacaacatccagagccgacttggtttccgcacctttattcgtactcaggagtaacagtaaagattttgctg

SEQ ID NO: 590449 - DNA, 75 bp, synthetic construct
  source 1..75: mol_type = other DNA
ctggtggtgccgcacgtgatgcgtttcttctttggcccactgcaccgaactttgctgatcgccagcgcgctggca

SEQ ID NO: 590450 - DNA, 75 bp, synthetic construct
  source 1..75: mol_type = other DNA
gaaaatcatgattatatcgtaacgttttccaaaactggaaagcgtaaaaatgttctttgtaaggactaccacctc

SEQ ID NO: 590451 - DNA, 75 bp, synthetic construct
  source 1..75: mol_type = other DNA
acgaattgcagactatgaattcgttgaaaatcaggattatatcgtaacgttttccaaaactggaaagcgtaaaaa

SEQ ID NO: 590452 - DNA, 75 bp, synthetic construct
  source 1..75: mol_type = other DNA
cagggggcaggtcaggacctgatggccggggggaacgccaccgtcaaggccaccttcggtaaagactccagtgcg

SEQ ID NO: 590453 - DNA, 75 bp, synthetic construct
  source 1..75: mol_type = other DNA
gaacttttttgaagtctgaatactggctgaacaaactacctaaggatattaacattccagccattgatctatcct

SEQ ID NO: 590454 - DNA, 75 bp, synthetic construct
  source 1..75: mol_type = other DNA
actggatgcatttattgaaactgaactttcatctgcggttaatggtaataacaatgccaaactcctttcttcttt

SEQ ID NO: 590455 - DNA, 75 bp, synthetic construct
  source 1..75: mol_type = other DNA
atgttcgagaaaatgaaaaacaatgtaacccgtgtaccggggaatttaaaaaaacttaaccaataccaaaaagac

SEQ ID NO: 590456 - DNA, 75 bp, synthetic construct
  source 1..75: mol_type = other DNA
ggctgattgcaccgctcatgccattcgcgtggcagtaaacaaaccagaagttgctggtttgtaccatctggttgc

SEQ ID NO: 590457 - DNA, 75 bp, synthetic construct
  source 1..75: mol_type = other DNA
ccagaaacaggccggagacagggatgagacctccgtgacggccggactggcgacagaactgctcggaaagcaggg

SEQ ID NO: 590458 - DNA, 75 bp, synthetic construct
  source 1..75: mol_type = other DNA
acaaagctgtacgatgagctgcacaatgtgcggggtattgatttcattctgcaggcgctggaaaccaacgacagg

SEQ ID NO: 590459 - DNA, 75 bp, synthetic construct
  source 1..75: mol_type = other DNA
ctggccgagagcggcctgcgggaaatgcatgacgaagactggtggcgtctctgtacctggtacgacgtgcgggat

SEQ ID NO: 590460 - DNA, 75 bp, synthetic construct
  source 1..75: mol_type = other DNA
tcaagtacgataacacgaacagcggcagaaacacgtccacggaatatttcatttaattacattgtgagagcagca

SEQ ID NO: 590461 - DNA, 75 bp, synthetic construct
  source 1..75: mol_type = other DNA
gcagaacagcagccagattattgccgaacaggtgatcccagaaaacgagggcggttggtggatacgtgaagtggg

SEQ ID NO: 590462 - DNA, 75 bp, synthetic construct
  source 1..75: mol_type = other DNA
atgtacggcgagccgtactggtgtgaagatgcttactacaagttgaccctcgcccaggttgaaaagctggaagaa

SEQ ID NO: 590463 - DNA, 75 bp, synthetic construct
  source 1..75: mol_type = other DNA
tcaaacagagtgcgaaggagttcgcgaaatacaaccagctgtatccggaccagttcctgccactgcagcgcgaca

SEQ ID NO: 590464 - DNA, 75 bp, synthetic construct
  source 1..75: mol_type = other DNA
ctgcaggtggaaaaccattcctcctggcaccgtctgtttgtggacccgttaagccgcgccatgtacagctctgac

SEQ ID NO: 590465 - DNA, 75 bp, synthetic construct
  source 1..75: mol_type = other DNA
tggccaaagagaacagagcacgtattgatgacgtggtggatttcctgaaaaacgccagtgacagcgagcagtatg

SEQ ID NO: 590466 - DNA, 75 bp, synthetic construct
  source 1..75: mol_type = other DNA
gctgggccagatccagctggttcgcgataacctgccggaagacaggaaagatgaggcggtgggcatcgtactgaa

SEQ ID NO: 590467 - DNA, 75 bp, synthetic construct
  source 1..75: mol_type = other DNA
gttattcgtcagggccgcgatattcttcacgcctgggatgccacctggaactcggcgcaggcgctggataacgca

SEQ ID NO: 590468 - DNA, 75 bp, synthetic construct
  source 1..75: mol_type = other DNA
caccagcacgccacacatttacgcggccggcgactgcacggaccagccacaattcgtctatgtggcggcagcggc

SEQ ID NO: 590469 - DNA, 75 bp, synthetic construct
  source 1..75: mol_type = other DNA
cgggatgatgcgaaaatggtggtgctggagctgggcggactggaagaccgtccgtcactgctggttgcggtgatg

SEQ ID NO: 590470 - DNA, 75 bp, synthetic construct
  source 1..75: mol_type = other DNA
cgactggtgcatgtgtggagcgcgccgtttgagtactttactcgtcggtatcagattgtgcgttcgcggcgttaa

SEQ ID NO: 590471 - DNA, 75 bp, synthetic construct
  source 1..75: mol_type = other DNA
atactcatcaggggcagatattcagagtcagtgattatcgtacaaaagaaataccagcatcagaagttatgggta

SEQ ID NO: 590472 - DNA, 75 bp, synthetic construct
  source 1..75: mol_type = other DNA
tcactggttcaatagggaaaattcagctttttaaagatttagttaccagtggtccatttcgtcataacggtaata

SEQ ID NO: 590473 - DNA, 75 bp, synthetic construct
  source 1..75: mol_type = other DNA
ctgccgtcagaggcaaaacaaccaaagccgccgaaggaatgctcaccaacatgctcggagatattgcagcagaag

SEQ ID NO: 590474 - DNA, 75 bp, synthetic construct
  source 1..75: mol_type = other DNA
ttccgccactccgccaacaggctggctgaaatgcaacggtgcggctttttctgctgaagaatacccggaactggc

SEQ ID NO: 590475 - DNA, 75 bp, synthetic construct
  source 1..75: mol_type = other DNA
atatggagccaactactggatgttcagcccgatgtacagagcatctgatctgagtaataccggttttgcattcat

SEQ ID NO: 590476 - DNA, 75 bp, synthetic construct
  source 1..75: mol_type = other DNA
ctgacggtaaaaggcactgtgcaactcagcagcgccactaacagcacgtcagaaacgcaggctgccacaccaaaa

SEQ ID NO: 590477 - DNA, 75 bp, synthetic construct
  source 1..75: mol_type = other DNA
gtcacaataacgggcggcggtggcggagggggcggctgcaaggctatatccaataatgaaacgtttttcggtgct

SEQ ID NO: 590478 - DNA, 75 bp, synthetic construct
  source 1..75: mol_type = other DNA
gctggttgcggtgatgttcagccttatcatttacatcgagaaccggatgtaccgcacgccgcgtaccctcaagaa

SEQ ID NO: 590479 - DNA, 75 bp, synthetic construct
  source 1..75: mol_type = other DNA
ctgtactcggcattctggaagtgttgaggcggtttgatggtgttaatgtatggcagcgttatacaactgccggaa

SEQ ID NO: 590480 - DNA, 75 bp, synthetic construct
  source 1..75: mol_type = other DNA
attcaaagtaataaaaccataaatattacggggcgtgttaatccctcggattacggtaactttgattcccgctat

SEQ ID NO: 590481 - DNA, 75 bp, synthetic construct
  source 1..75: mol_type = other DNA
attcctgacggttagctggttgttgagtggtgaatggttagcaggaaagagtaaggctgaaccttcacgttcgta

SEQ ID NO: 590482 - DNA, 75 bp, synthetic construct
  source 1..75: mol_type = other DNA
ttgaatacgggctgcgtgagttctcctggtcaggtgaacaggctgaacggtttaacgccattacccgggcctatt

SEQ ID NO: 590483 - DNA, 75 bp, synthetic construct
  source 1..75: mol_type = other DNA
acctcgacctggagtccggtgaagtatgggtgatgggtaaaggcagcaaagaacgtcgtttgccgattggtcgca

SEQ ID NO: 590484 - DNA, 75 bp, synthetic construct
  source 1..75: mol_type = other DNA
atcattccacctggtgtccagcaagctgatcggtgatcagcttgaccggggcctgtctgagttccgctggcaggg

SEQ ID NO: 590485 - DNA, 75 bp, synthetic construct
  source 1..75: mol_type = other DNA
atatgggggatggctacaaatcgttctgcgagaacgtgggtggtacataccttgacggcaagtcgctcaaattca

SEQ ID NO: 590486 - DNA, 75 bp, synthetic construct
  source 1..75: mol_type = other DNA
cggagtgccgttctgcatccatctgaagtccagccagcttgttggtgacagaattgaatacgggctgcgtgagtt

SEQ ID NO: 590487 - DNA, 75 bp, synthetic construct
  source 1..75: mol_type = other DNA
ttgctgtacgcagtcgccgtaaagggctgggagctgcaagtctggcgttacggctttctgcgctacgtagctttt

SEQ ID NO: 590488 - DNA, 75 bp, synthetic construct
  source 1..75: mol_type = other DNA
aacgctacctacgttatctgagcgtggagcgtcagcttagcccgataaccctgcttaactaccagcgtcagcttg

SEQ ID NO: 590489 - DNA, 75 bp, synthetic construct
  source 1..75: mol_type = other DNA
tgaggttcgtgtcggcaaatttgatgagctgcatcagcgctgtgttgaccagcgtatcggtatcgatgtgcgtcc

SEQ ID NO: 590490 - DNA, 75 bp, synthetic construct
  source 1..75: mol_type = other DNA
catacaaaatcatccttaaacagtctgccaaagagtttgccaagtacaaccagctttaccccgaccagttcacgc

SEQ ID NO: 590491 - DNA, 75 bp, synthetic construct
  source 1..75: mol_type = other DNA
gcacgcgctgcctgggggaactcgtcgtacaaggccattctgaagcagtcagccaaagagtttgccaagtataac

SEQ ID NO: 590492 - DNA, 75 bp, synthetic construct
  source 1..75: mol_type = other DNA
ggacgggatgggcaacaccaactacaacatggcggtcaccggcacatcaggtgcaggtaagaccggtctggtaca

SEQ ID NO: 590493 - DNA, 75 bp, synthetic construct
  source 1..75: mol_type = other DNA
cggcacagcagcagttcaacagcccgacggggttgccgctgaccctgcgggactaccgtctgtatatctcttact

SEQ ID NO: 590494 - DNA, 75 bp, synthetic construct
  source 1..75: mol_type = other DNA
agaacctgacaaatgctttccgtatgccggatggcgcatcggagatgacgcgcaatctggccagcctggactttc

SEQ ID NO: 590495 - DNA, 75 bp, synthetic construct
  source 1..75: mol_type = other DNA
acatgggggacggctacaaatcgttctgtgagaacgtgggtggcacctaccttgacggtaagtcactcaaattta

SEQ ID NO: 590496 - DNA, 75 bp, synthetic construct
  source 1..75: mol_type = other DNA
tatcgatattttcttccgggggatgaataacaccaactacaacatggcggtctgtggcacctccggggccggtaa

SEQ ID NO: 590497 - DNA, 75 bp, synthetic construct
  source 1..75: mol_type = other DNA
gtgaacaggctgaacggtttaacgccattacccgtgcctattatatgaaagcggcagcgacacagttcccgctgc

SEQ ID NO: 590498 - DNA, 75 bp, synthetic construct
  source 1..75: mol_type = other DNA
attctggaaatggaaaacctggtgaaaatcatccgggcgtcgttacagggggccagtatcaccacacaggcggtg

SEQ ID NO: 590499 - DNA, 75 bp, synthetic construct
  source 1..75: mol_type = other DNA
catgcgtacaagcgtggaacacatctacgccgcaggcgactgcaccgaccagccgcagttcgtctatgtggcggc

SEQ ID NO: 590500 - DNA, 75 bp, synthetic construct
  source 1..75: mol_type = other DNA
agcgaaggtgacgatcctggctcgcagcacgctgttcttccgcgaagacccagctataggcgaagccgtcacggc

SEQ ID NO: 590501 - DNA, 75 bp, synthetic construct
  source 1..75: mol_type = other DNA
tgatagtcgcacgctaacgctggacaacgtgccgcgcgcgcgcgctcgccaacttcgacacgcgcggcttcatca

SEQ ID NO: 590502 - DNA, 75 bp, synthetic construct
  source 1..75: mol_type = other DNA
cacgctgacgctcgacaacgtgccgcgtgcgctcgccaacttcgatacccgcggcttcatcaagctggtcatcga

SEQ ID NO: 590503 - DNA, 75 bp, synthetic construct
  source 1..75: mol_type = other DNA
cgcgacggctgctaaaaatttccctgaagacggtgcagtcggtgtactggaggtattcaatggcggtaatttttc

SEQ ID NO: 590504 - DNA, 75 bp, synthetic construct
  source 1..75: mol_type = other DNA
cgatggcagcggcgctgaaggccgtcgagcaaggcgcacgtgtcacggctgatcgagcgcggcaccatcggcggc

SEQ ID NO: 590505 - DNA, 75 bp, synthetic construct
  source 1..75: mol_type = other DNA
cgtcgcgacctgggttaatggcaatgaaagcgggcagttgattgaaacttgtgccgggttgctggacaacgacga

SEQ ID NO: 590506 - DNA, 75 bp, synthetic construct
  source 1..75: mol_type = other DNA
aagacaaaattctctccgataactatttcaccctgcacaacattacttatgatctcacgcgcaaagatggcgaag

SEQ ID NO: 590507 - DNA, 75 bp, synthetic construct
  source 1..75: mol_type = other DNA
cctacctaacgatggtcgagggcttgaagctcgcggcgcagaccttcagcaaggacgtgaagcaactgtcctgct

SEQ ID NO: 590508 - DNA, 75 bp, synthetic construct
  source 1..75: mol_type = other DNA
atgagttccaccgcctgcaactggatatcagcaacctgcggggagaaatcaaagaactggggccatccatccgcc

SEQ ID NO: 590509 - DNA, 75 bp, synthetic construct
  source 1..75: mol_type = other DNA
aacgtgaagagtttgattcactccgttcccgcgtgtcggtgatggaaagccaggtacaccatttacccgaccgtg

SEQ ID NO: 590510 - DNA, 75 bp, synthetic construct
  source 1..75: mol_type = other DNA
cgaaagatgctggctacactgcagttatctctcaccgttctggcgaaactgaagatgctaccatcgctgacctgg

SEQ ID NO: 590511 - DNA, 75 bp, synthetic construct
  source 1..75: mol_type = other DNA
aggcactgttgcaaagttagcgatgaggcagccttttgtcttattcaaaggccttacatttcaaaaactctgctt

SEQ ID NO: 590512 - DNA, 75 bp, synthetic construct
  source 1..75: mol_type = other DNA
cggtgatggccagccccaacggtaacctggatgaagtgcatgaggggctgttgctgcaggcggtcagggcatcat

SEQ ID NO: 590513 - DNA, 75 bp, synthetic construct
  source 1..75: mol_type = other DNA
cggagtaccgttctgcatccatctgatgtccagccagctggttggtgacagaattgaatacggactgcgtgagtt

SEQ ID NO: 590514 - DNA, 75 bp, synthetic construct
  source 1..75: mol_type = other DNA
gactggaagaccgtccgtccctgcttgttgcggtgatgttctcccttattatctacatcgagaacaggatgtacc

SEQ ID NO: 590515 - DNA, 75 bp, synthetic construct
  source 1..75: mol_type = other DNA
gtccgtcactgctggttgcggtgatgttcagccttatcatttacatcgagaaccggatgtaccgcacgccgcgta

SEQ ID NO: 590516 - DNA, 75 bp, synthetic construct
  source 1..75: mol_type = other DNA
ataatgcttgaatccggagttcctcttgcagacatcatgcgctttaccgggctgtcagaagaagagttggctgcg

SEQ ID NO: 590517 - DNA, 75 bp, synthetic construct
  source 1..75: mol_type = other DNA
gaccgtgttgctaaatacaaccagttgattcgtatcgaagaagctctgggcgaaaaagcaccgtacaacggtcgt

SEQ ID NO: 590518 - DNA, 75 bp, synthetic construct
  source 1..75: mol_type = other DNA
taacgccaaagctgctgccgccgctaaaggcatgccgctgtatgagcacatcgctgaactgaacggcactccggg

SEQ ID NO: 590519 - DNA, 75 bp, synthetic construct
  source 1..75: mol_type = other DNA
gtttccgctgccggaggggatgaatctgcccctgaccctgcggcattaccgggtattcttctcgtactgttctcc

SEQ ID NO: 590520 - DNA, 75 bp, synthetic construct
  source 1..75: mol_type = other DNA
aacgttattttgcactctgatagccagtatctgaaaaacggcatgacacagtggatgaaatggtggaaacgcaat

SEQ ID NO: 590521 - DNA, 75 bp, synthetic construct
  source 1..75: mol_type = other DNA
ttaaagggataaataattatccggataagattactgttactgtggcactggaaattggtgggtatccgtcactct

SEQ ID NO: 590522 - DNA, 75 bp, synthetic construct
  source 1..75: mol_type = other DNA
gaagtccaggtatcctctgttccattcccgtaagcatcgaaatagacacaaatacgataaccggtgaactcgtta

SEQ ID NO: 590523 - DNA, 75 bp, synthetic construct
  source 1..75: mol_type = other DNA
cgccctgcccgctgccgcacaagccgcagaaaacctgaaaaatgacaaagttgcgattgtcggattcagtacgcc

SEQ ID NO: 590524 - DNA, 75 bp, synthetic construct
  source 1..75: mol_type = other DNA
ataatttcagtgagctggaatgggagtgtaaccggccatcctttgttgtatccggtgatgccgggaaaataacca

SEQ ID NO: 590525 - DNA, 75 bp, synthetic construct
  source 1..75: mol_type = other DNA
gtcattgtaatgcctttggttttatttgtatattattacgcaaagtttattttaacattgtggatgggggctgag

SEQ ID NO: 590526 - DNA, 75 bp, synthetic construct
  source 1..75: mol_type = other DNA
atgggctgctcatgttgaggatgggattgcggcattgagaaatcataaaagtttaattagcttattaaatgctat

SEQ ID NO: 590527 - DNA, 75 bp, synthetic construct
  source 1..75: mol_type = other DNA
gtcgtcagactgaagagcagcttaaaagattgaaagggtatacagggatcacacctaacgtcgctgcccgattgg

SEQ ID NO: 590528 - DNA, 75 bp, synthetic construct
  source 1..75: mol_type = other DNA
tggaagccgaacccgaagccaacctggcactcatttctgtaccgggagactacgccgccgccgaagcaattaaag

SEQ ID NO: 590529 - DNA, 75 bp, synthetic construct
  source 1..75: mol_type = other DNA
tcgcgtctggtacacatctggagcgtaccggtggagtatctgacacgtaagtaccagctggtgcgcgctcgtcac

SEQ ID NO: 590530 - DNA, 75 bp, synthetic construct
  source 1..75: mol_type = other DNA
aatcgccacttacccggggcgtgaaaaggtcaacgaaccggtaaaaaatgcgcctgatgatgtgcagagcgcgat

SEQ ID NO: 590531 - DNA, 75 bp, synthetic construct
  source 1..75: mol_type = other DNA
ggatgctccagcgtgatgtcccataccggggggaaagaaggaacgtatcctgcacccgcgccagcgcaaccatga

SEQ ID NO: 590532 - DNA, 75 bp, synthetic construct
  source 1..75: mol_type = other DNA
cagtgcgctcgcgcgttgaaaaaagcgaagccaacgcacaagccaccaatgcggttattccaccggccagaatgc

SEQ ID NO: 590533 - DNA, 75 bp, synthetic construct
  source 1..75: mol_type = other DNA
atgtgttggttgcgactgcggcagcaaaacagtctggtgacagaaaagattctgtttatgcttgaaggtgccatt

SEQ ID NO: 590534 - DNA, 75 bp, synthetic construct
  source 1..75: mol_type = other DNA
agacatgcttattcgtttttccggtaacttcttatcattggttgatacgggtataaaccaactaaggattgtcga

SEQ ID NO: 590535 - DNA, 75 bp, synthetic construct
  source 1..75: mol_type = other DNA
tgtagctggtcttctcacataccttggtttgggagaaggctcagcattacctgttggggtgcctgttccgtggcc

SEQ ID NO: 590536 - DNA, 75 bp, synthetic construct
  source 1..75: mol_type = other DNA
tgtagctggtcttctcgcataccttggtttgggagaaggtgctccagctattggcgttccgttcttctggccgtc

SEQ ID NO: 590537 - DNA, 75 bp, synthetic construct
  source 1..75: mol_type = other DNA
cgcttactaatttgagtggaaaggatgtggctggtcttctcgcataccttggtttgggagaagcggcaaaacgga

SEQ ID NO: 590538 - DNA, 75 bp, synthetic construct
  source 1..75: mol_type = other DNA
ttagtggctgaggagcgccgcgcagcgctgaatatgctgtatatcgacccgcagaacaacagccagattattgct

SEQ ID NO: 590539 - DNA, 75 bp, synthetic construct
  source 1..75: mol_type = other DNA
taaaaccagcactcagggagttcttgattaccttggtttgggagaaggctctgcattaccggttggggtgcctgt

SEQ ID NO: 590540 - DNA, 75 bp, synthetic construct
  source 1..75: mol_type = other DNA
attgtacccaagtatctattgtgatggtgcatttggcgtcactgttgagaatgtgtcacaaactttaggattaac

SEQ ID NO: 590541 - DNA, 75 bp, synthetic construct
  source 1..75: mol_type = other DNA
tatgtggatgataaggcactggagctgaaggtgtatgtggatgacctgatggcaaaacaccttgccgcagcggac

SEQ ID NO: 590542 - DNA, 75 bp, synthetic construct
  source 1..75: mol_type = other DNA
gcaatgtggcgatacctcccgtttcacccgctttattcaggagattgccgaacgttcaccactacaaaaggagag

SEQ ID NO: 590543 - DNA, 75 bp, synthetic construct
  source 1..75: mol_type = other DNA
ggttcaggctggcgaaaaatgccagatggttcaattgaacagtggggacgaattagttttcctggtgaacacggg

SEQ ID NO: 590544 - DNA, 75 bp, synthetic construct
  source 1..75: mol_type = other DNA
aaagtcctacgtttaccgggacacccaaagcgccaacgccagcgacggggaataacaccacgcaggttgcgacca

SEQ ID NO: 590545 - DNA, 75 bp, synthetic construct
  source 1..75: mol_type = other DNA
catctaaaatcgttcctgttgccactgaaaaccggccgcgcaacgtcgcatttaacttcattgtgagggctgcat

SEQ ID NO: 590546 - DNA, 75 bp, synthetic construct
  source 1..75: mol_type = other DNA
ttgaagatgttaacgaaaaacgcactgatgtttttacatctgtgccgctggtctttcgtgtggagccctcatcca

SEQ ID NO: 590547 - DNA, 75 bp, synthetic construct
  source 1..75: mol_type = other DNA
ggaggtgatggtcaaatgcccggaactggcattacgcgaagtccaggcactgaccgacaagcaaaaggccatcgc

SEQ ID NO: 590548 - DNA, 75 bp, synthetic construct
  source 1..75: mol_type = other DNA
aacattttccacgatcttacaattttatccctgatgatattgataatgcacctgtattatttgcagctgtaacac

SEQ ID NO: 590549 - DNA, 75 bp, synthetic construct
  source 1..75: mol_type = other DNA
cagatggcattgcccgagcgtattatcgaggccgcaggtactgccaacgccagacagggtaagcgaactggcgtc

SEQ ID NO: 590550 - DNA, 75 bp, synthetic construct
  source 1..75: mol_type = other DNA
cagaagaaacaatacttaatgcaggaaaagaaagattacggttgcaaattaacgggaccgctgtaccagaaaacg

SEQ ID NO: 590551 - DNA, 75 bp, synthetic construct
  source 1..75: mol_type = other DNA
tggcgcatcttagtggcgcagagagcttttcggcttaagcgggagcaaatgcgccttgatttctatcgaaagtaa

SEQ ID NO: 590552 - DNA, 75 bp, synthetic construct
  source 1..75: mol_type = other DNA
atgcgtatcgcgagttttcagcctggtggcatgaaaaacacgcgaacgatgcgggaatgctggcggcactgcctt

SEQ ID NO: 590553 - DNA, 75 bp, synthetic construct
  source 1..75: mol_type = other DNA
cgagcaaacaaaggaatacccaaagatgtggctctgagtttccagacgtactgctcaaaaaatgcagacaaggaa

SEQ ID NO: 590554 - DNA, 75 bp, synthetic construct
  source 1..75: mol_type = other DNA
gggattctgccccggctgggtgtggagcatcacacggggatacctggtaacccgcaggggcgcggggtaatagaa

SEQ ID NO: 590555 - DNA, 75 bp, synthetic construct
  source 1..75: mol_type = other DNA
cttccctggctggttcaggcgtgggttgaggatattagcgaaaaacgcactaatgcttttgcatctgtgccgctg

SEQ ID NO: 590556 - DNA, 75 bp, synthetic construct
  source 1..75: mol_type = other DNA
tgccatctggaacggtaataaggttgatgcgttcccgaaagctgttatcgaacagcagcaggagaaacgcgccag

SEQ ID NO: 590557 - DNA, 75 bp, synthetic construct
  source 1..75: mol_type = other DNA
gttaatgcggtatgggtcggggatggtcactgtatgaaaatgactgcgtttaacccactgaccggcaatattttc

SEQ ID NO: 590558 - DNA, 75 bp, synthetic construct
  source 1..75: mol_type = other DNA
atgttttattcagccaatgagctggccggtcttcctggtttgcccggtacagttcagggggtgcgctggacgctc

SEQ ID NO: 590559 - DNA, 75 bp, synthetic construct
  source 1..75: mol_type = other DNA
atgaacaaagaaattttggctgtagttgaagccgtatccaatgaaaaggcgctacctcgcgagaagattttcgaa

SEQ ID NO: 590560 - DNA, 75 bp, synthetic construct
  source 1..75: mol_type = other DNA
catattggtatttcggtgttttcaaagtgctaatgcaaaaaattttcccgagaaaagtgtttaatataattaagt

SEQ ID NO: 590561 - DNA, 75 bp, synthetic construct
  source 1..75: mol_type = other DNA
ccgatagtgaattagtgatgcttgggacgaatgttaaattttacgacacaaatcacaattatttatttgatacta

SEQ ID NO: 590562 - DNA, 75 bp, synthetic construct
  source 1..75: mol_type = other DNA
gcggctcgcgacccgggttctcgtgcgaaaatcgcggtgaaaaccaacgataaacgtatcgatccggtaggtgct

SEQ ID NO: 590563 - DNA, 75 bp, synthetic construct
  source 1..75: mol_type = other DNA
gctgccgcgtgaaaacttccgccctggcgaccgcgttcgtggcgtgctctattccgttcgcccggaagcgcgtgg

SEQ ID NO: 590564 - DNA, 75 bp, synthetic construct
  source 1..75: mol_type = other DNA
gggttgaccgacgaaaaagccggagcactgattatggttgcccgtaatatttgctggttcggtgacgaagcgtaa

SEQ ID NO: 590565 - DNA, 75 bp, synthetic construct
  source 1..75: mol_type = other DNA
ttatggtgacgcttccgtacacacattgctggagcgcatgaacatgatatcaccagacgcaaaggttaaatcact

SEQ ID NO: 590566 - DNA, 75 bp, synthetic construct
  source 1..75: mol_type = other DNA
atctgaagaagaacaggggccaaaactcgcggggaaccaactggtaatgtttgtttccagcagcatgcctcttac

SEQ ID NO: 590567 - DNA, 75 bp, synthetic construct
  source 1..75: mol_type = other DNA
tatcgtccccgatgccaatgccctgcccgctgccgcacaagccgcagaaaacctgaaaaatgacaaagttgcgat

SEQ ID NO: 590568 - DNA, 75 bp, synthetic construct
  source 1..75: mol_type = other DNA
aggcacctggttgtgaagaacgtttctgcccgtggctgcttcgcatcatcaatggtattcatacccgctcagaaa

SEQ ID NO: 590569 - DNA, 75 bp, synthetic construct
  source 1..75: mol_type = other DNA
tgttttgggggatcaatgcgatgttcggccctctggtgttggacctttttgccgacgacagcaacgcgaagagcc

SEQ ID NO: 590570 - DNA, 75 bp, synthetic construct
  source 1..75: mol_type = other DNA
ccagcaagtctcaacctgtaactgccacacctcctgcagctgataagccagaagcagagttgccactcacccaga

SEQ ID NO: 590571 - DNA, 75 bp, synthetic construct
  source 1..75: mol_type = other DNA
ttgaagccgtctccaatgaaaaggcgctgcctcgcgagaaaattttcgaagcgttggaaagcgcgttggctacag

SEQ ID NO: 590572 - DNA, 75 bp, synthetic construct
  source 1..75: mol_type = other DNA
atgcagcaccaagaattaacaaaatggctgattttttctcatcaacagcatctggagtaaaacataaacctttga

SEQ ID NO: 590573 - DNA, 75 bp, synthetic construct
  source 1..75: mol_type = other DNA
ttgagaggcttgcgaaagtcgcagcggtaataactaaccttgtgctctcactttctatattgggattggtctatt

SEQ ID NO: 590574 - DNA, 75 bp, synthetic construct
  source 1..75: mol_type = other DNA
caggatatgccgttctggcaggttatcgcggaagccagtatggcggcaagggaggccggtcacgctgtccgtgag

SEQ ID NO: 590575 - DNA, 75 bp, synthetic construct
  source 1..75: mol_type = other DNA
tataaatttattaccgaaagccgcaattcctatggaatatgtatatgaaaagctcccgcgaaatatatcatggta

SEQ ID NO: 590576 - DNA, 75 bp, synthetic construct
  source 1..75: mol_type = other DNA
cgcttattttatttgcactccatttttcctgttagaggaaagactaaaaaattcaaatcttaaacaatttaatca

SEQ ID NO: 590577 - DNA, 75 bp, synthetic construct
  source 1..75: mol_type = other DNA
tataatgttgcttcctgaggcagccatacctatggagtatgtttattttaaggttccaaccagaataacaggagt

SEQ ID NO: 590578 - DNA, 75 bp, synthetic construct
  source 1..75: mol_type = other DNA
aaaaaaaatgggcggagcgtgatgctgccgaattatctcaagaggtaaatgtccaatttgctgctcgaataattg

SEQ ID NO: 590579 - DNA, 75 bp, synthetic construct
  source 1..75: mol_type = other DNA
ggtggtattttttatcgttctgctcgtgacggttacggattcgaggctgactggtctgagttttataccacaacg

SEQ ID NO: 590580 - DNA, 75 bp, synthetic construct
  source 1..75: mol_type = other DNA
cagaaatacagccgccagcgggaacgtgaggcagaacgacgggaactggaataccagacatgttttgctcaggcg

SEQ ID NO: 590581 - DNA, 75 bp, synthetic construct
  source 1..75: mol_type = other DNA
atcagcgtgcggatgaattatctgcctgccaacgccgcgtttgccagcacgctgaaaaatcccaaactcggctat

SEQ ID NO: 590582 - DNA, 75 bp, synthetic construct
  source 1..75: mol_type = other DNA
cgaacgctacatcgcaggagtgacttgtcaacagatctatgaatctttaagagataaggtaatgactccaactta

SEQ ID NO: 590583 - DNA, 75 bp, synthetic construct
  source 1..75: mol_type = other DNA
ctcctgtggctggctgccgtggataaactgattgaaagttttggggaagtctgtgttcttcccctgccatccgat

SEQ ID NO: 590584 - DNA, 75 bp, synthetic construct
  source 1..75: mol_type = other DNA
catcgcgccggatgccaacgcccttcctgctgctgcccaggctgctgagaacctgaaaaacaccagcgtggcgat

SEQ ID NO: 590585 - DNA, 75 bp, synthetic construct
  source 1..75: mol_type = other DNA
tatatcgatactcatgtacacggcggtgcgggcgttgatgtgatggatgatgcgccggatgcgctcgacaagctg

SEQ ID NO: 590586 - DNA, 75 bp, synthetic construct
  source 1..75: mol_type = other DNA
ccgctgagagcgcccgagctgcgctggaatcggcaaaagctcaggtttctgcttctaaagccgctatagaggcgg

SEQ ID NO: 590587 - DNA, 75 bp, synthetic construct
  source 1..75: mol_type = other DNA
cgagctgggcagcaacgttactatggatgcaaaaaccttttatgcacttgctcaaaccaacggtttatgtgttaa

SEQ ID NO: 590588 - DNA, 75 bp, synthetic construct
  source 1..75: mol_type = other DNA
tggtgttctgggatcgcttaaaccgggcaaacgcgccagcgtcgttgcgctggatagcgggctgcatgtgcaaca

SEQ ID NO: 590589 - DNA, 75 bp, synthetic construct
  source 1..75: mol_type = other DNA
ataccttgcgcgtggtggcgctggcaccggaaaaaacgggcgcgttacaagccattcgtcatcttaaacagcaga

SEQ ID NO: 590590 - DNA, 75 bp, synthetic construct
  source 1..75: mol_type = other DNA
ggcctggtgcattgctataacgggatgacaggtttacatcaccgcgaaccgggaatggttggcgcgggattaacg

SEQ ID NO: 590591 - DNA, 75 bp, synthetic construct
  source 1..75: mol_type = other DNA
aatgtttacggtgaaaccaagttagccggagaaaaagcgttacaggaacattgcgcgaagcatcttattttccgg

SEQ ID NO: 590592 - DNA, 75 bp, synthetic construct
  source 1..75: mol_type = other DNA
accagctgggtctatgcaggtaaaggaaataacttcgccaaaacgatgttacgtctggcaaaagagcgtgaagaa

SEQ ID NO: 590593 - DNA, 75 bp, synthetic construct
  source 1..75: mol_type = other DNA
aaatgaagttggagcctgggttattcattactccactgattacgtcttccctggaaatggcgatacgccatggct

SEQ ID NO: 590594 - DNA, 75 bp, synthetic construct
  source 1..75: mol_type = other DNA
gaaataacttcgccaaaacgatgttgcgtctggcaaaagagcgtgaagaattagccgttattaatgatcagtttg

SEQ ID NO: 590595 - DNA, 75 bp, synthetic construct
  source 1..75: mol_type = other DNA
ttcgcacaattacttaacgcgacaagcgtcgaagcgattgcaaaagcagctaatgaagtcggagcctgggttata

SEQ ID NO: 590596 - DNA, 75 bp, synthetic construct
  source 1..75: mol_type = other DNA
accagctgggtatacgcaggtaaaggaaataacttcgccaaaacgatgttgcgtctggcaaaagagcgcgaagaa

SEQ ID NO: 590597 - DNA, 75 bp, synthetic construct
  source 1..75: mol_type = other DNA
aacatgtgcgtgaagtgatcgccagcctcaatcaacgcgatacgccgctgacgttaccgctggacattcgcggca

SEQ ID NO: 590598 - DNA, 75 bp, synthetic construct
  source 1..75: mol_type = other DNA
tgctccagcgcaaagccagcaaaccgggacaggggttaggcaaaaccaccggctggatccatcgcaccaccctgc

SEQ ID NO: 590599 - DNA, 75 bp, synthetic construct
  source 1..75: mol_type = other DNA
attaaatgcgaaagagctggaagtgtataacgattacgataatgccaatctgtttaacgatcatgtggtggccag

SEQ ID NO: 590600 - DNA, 75 bp, synthetic construct
  source 1..75: mol_type = other DNA
gattggtgagtcgacacagcgtgaacgcatgagcttatacgggtatccgcgtgaaacgacgccggagctggatgc

SEQ ID NO: 590601 - DNA, 75 bp, synthetic construct
  source 1..75: mol_type = other DNA
cgtcatgccacacgctggtggataacggcttattggacaagtaccgggacgaaacttctctaaagctggccttta

SEQ ID NO: 590602 - DNA, 75 bp, synthetic construct
  source 1..75: mol_type = other DNA
ttctctaaagctggcctttaggctgaccgacgatggcagggaacgtgcaggagagatataccgaaaacggctgga

SEQ ID NO: 590603 - DNA, 75 bp, synthetic construct
  source 1..75: mol_type = other DNA
gccaaacagatccccggcaaagaggagttttacgaaacgctgcgctattaccgccggatgatcgaagtgacgggc

SEQ ID NO: 590604 - DNA, 75 bp, synthetic construct
  source 1..75: mol_type = other DNA
gggggatttgcgcgatattgctgggcgatgatgacgcgacactaatcagcgagttgcagcagatgtttcccgctg

SEQ ID NO: 590605 - DNA, 75 bp, synthetic construct
  source 1..75: mol_type = other DNA
acgatcaacgctggcaatctgtcctggcccgcgacccgcacgccgacggcaaattcgttttcgccgtgcgtacca

SEQ ID NO: 590606 - DNA, 75 bp, synthetic construct
  source 1..75: mol_type = other DNA
cgggtatcttttgccgaccgtcttgccgtgccagacatgccttgcgggaaaacgtctccttctacgtaaatgcca

SEQ ID NO: 590607 - DNA, 75 bp, synthetic construct
  source 1..75: mol_type = other DNA
ttattcagtaccctgtggatcattccgatactgcttttccctgataaaattaaaattattgcagctcttgttggt

SEQ ID NO: 590608 - DNA, 75 bp, synthetic construct
  source 1..75: mol_type = other DNA
ccagagaggctggtgaatatttcagccagtatttcagccttaaactgttgcttatctcgctggtatatactgcgg

SEQ ID NO: 590609 - DNA, 75 bp, synthetic construct
  source 1..75: mol_type = other DNA
ttattcagttgtctgtggttgatcccggtgtttctctatcctgatcggataaaaataattgcagctgttgtcggt

SEQ ID NO: 590610 - DNA, 75 bp, synthetic construct
  source 1..75: mol_type = other DNA
cctcgcgcagtcgcgccatcgacttttacgctctgggaatgtacctgcccaaccctgatcccattctcaaggctc

SEQ ID NO: 590611 - DNA, 75 bp, synthetic construct
  source 1..75: mol_type = other DNA
tgaaattctggctccgctttgccgaaaagtttggctccccgtgggtgatcggtaagcacccgaggggtgcaaatg

SEQ ID NO: 590612 - DNA, 75 bp, synthetic construct
  source 1..75: mol_type = other DNA
ctcttggcggtaattcgattgttttgggtgataatgacacgggctttaaacaaaatggtgatggtaatctggatg

SEQ ID NO: 590613 - DNA, 75 bp, synthetic construct
  source 1..75: mol_type = other DNA
ccaacggtacgctggatgaagtccaccacagcctgctgctgcgcggggttcaggaggcctgggaagcgcacaggg

SEQ ID NO: 590614 - DNA, 75 bp, synthetic construct
  source 1..75: mol_type = other DNA
ccgtgaatctgctgccggtggtggccgacaaccggctgtgtcaggggggactgctgacaccgtcctaccgtaacc

SEQ ID NO: 590615 - DNA, 75 bp, synthetic construct
  source 1..75: mol_type = other DNA
ccgccgtggaaatgtttatgttcgctgtctttcggcctcgtgggatgcagagaacccacagtgggagccgtggtc

SEQ ID NO: 590616 - DNA, 75 bp, synthetic construct
  source 1..75: mol_type = other DNA
gcagtgagatctccattgcattactcggtcagaaccagactaccgaagcgaacagtaaccgggcctccgcgcagg

SEQ ID NO: 590617 - DNA, 75 bp, synthetic construct
  source 1..75: mol_type = other DNA
gcgcagggacgggatatccgtatctaccgggaactgcgcaccgacccgctggtcgggggctgtatccgcagacgt

SEQ ID NO: 590618 - DNA, 75 bp, synthetic construct
  source 1..75: mol_type = other DNA
gcaaatcgtgggccgtgaccgatgttgtgggcaagcccccggaatggtttcagttcgatatggaaaaccgcctgc

SEQ ID NO: 590619 - DNA, 75 bp, synthetic construct
  source 1..75: mol_type = other DNA
ccgatgagttcgtggcgttcgccgaacccaaaaaatcactgaccgcgcagattgcctcccgcagccgcgccatcg

SEQ ID NO: 590620 - DNA, 75 bp, synthetic construct
  source 1..75: mol_type = other DNA
ccgcgatgcggatgcggacatcattcaggcggcagtgaatcaggtcatcagaacggtggtcaccctgaacttcgg

SEQ ID NO: 590621 - DNA, 75 bp, synthetic construct
  source 1..75: mol_type = other DNA
ccgaggcgattgatgccgatattcaggctcagcagcagcttgacgacgcgctggacattctgatgaacggaggcg

SEQ ID NO: 590622 - DNA, 75 bp, synthetic construct
  source 1..75: mol_type = other DNA
ccgccccaaccagttcagcgagctggagcgcagcgttatctccaaattcggggatgccaaagaccagtggttctc

SEQ ID NO: 590623 - DNA, 75 bp, synthetic construct
  source 1..75: mol_type = other DNA
tcagttcacggatttacaggatcaggtcatcgctaacctgttcaaactatatccgtgggaatttatgctgcgcga

SEQ ID NO: 590624 - DNA, 75 bp, synthetic construct
  source 1..75: mol_type = other DNA
ccaccagccgtcgctttattcacgtcttgatctggcgtgggacggtacaggcgaacctaagttactggaaaataa

SEQ ID NO: 590625 - DNA, 75 bp, synthetic construct
  source 1..75: mol_type = other DNA
acctgccgggctgagagtattcaggctgtgaatctgctgccggtagtggccgacaaccgtctgtgtcaggggggg

SEQ ID NO: 590626 - DNA, 75 bp, synthetic construct
  source 1..75: mol_type = other DNA
aggacagcgatgaatatgctgattccccgacaatccggggccgtctggacgagatgataatcctgctcgatcagt

SEQ ID NO: 590627 - DNA, 75 bp, synthetic construct
  source 1..75: mol_type = other DNA
ctcacctgctgtcgggatacggaggaagatcgcggcaccattcaatatttacaggattgcgctaacgaagctgaa

SEQ ID NO: 590628 - DNA, 75 bp, synthetic construct
  source 1..75: mol_type = other DNA
gtcaccgccgaactgcaccagatgtgcctgaaagtggtggaaaaagtgatcgccaacgatgagctgatgaccaaa

SEQ ID NO: 590629 - DNA, 75 bp, synthetic construct
  source 1..75: mol_type = other DNA
ccaacccgcccgaaagccatttggggctttaacggcactgaacgccccggcgctgtttacctggcagcggctctg

SEQ ID NO: 590630 - DNA, 75 bp, synthetic construct
  source 1..75: mol_type = other DNA
atccgcgacatgatgcaaggcaacagcaaactggccgatatcggtcgcgtggaagaatcacttggctacaacgcc

SEQ ID NO: 590631 - DNA, 75 bp, synthetic construct
  source 1..75: mol_type = other DNA
cgtaaagaggggctgagtattcatgaggcggtgtggcagctggcgtggaagaagtcagggccggagatggcttcg

SEQ ID NO: 590632 - DNA, 75 bp, synthetic construct
  source 1..75: mol_type = other DNA
atggaacatcagatattaacctgacgccgaaaaatattggtgcatttgcttcaggaaaaacaggagacaccgttg

SEQ ID NO: 590633 - DNA, 75 bp, synthetic construct
  source 1..75: mol_type = other DNA
gctaaccacggggttctgaccatcggccacgttggcgcagactttatcactctcgcctccatgctgcgtatcccg

SEQ ID NO: 590634 - DNA, 75 bp, synthetic construct
  source 1..75: mol_type = other DNA
gacgatgaagccacactgggaaatctctcagcaagaggctgacgcttgcctcgccgctaccgaatggtgcccggc

SEQ ID NO: 590635 - DNA, 75 bp, synthetic construct
  source 1..75: mol_type = other DNA
gcccgcaaggtgcccgccgacgcgccgaccgagttcatcaagccgcgctggcagaagctggtcatgaccgacacc

SEQ ID NO: 590636 - DNA, 75 bp, synthetic construct
  source 1..75: mol_type = other DNA
tgctgttgggtatcagtccacgggatggacttattcaggggatcttgatgatcttttaaagcctggtatttatag

SEQ ID NO: 590637 - DNA, 75 bp, synthetic construct
  source 1..75: mol_type = other DNA
gccagtgggcgtgccgtattgtcacaggaacaggacgggattaaatcgcatactcacagtgccagtgcgtcaaat

SEQ ID NO: 590638 - DNA, 75 bp, synthetic construct
  source 1..75: mol_type = other DNA
tgtggctggaggatgcccggcgcagcggcattattccgcgtgatgccgatcagtacaatgctattcaggaacgcc

SEQ ID NO: 590639 - DNA, 75 bp, synthetic construct
  source 1..75: mol_type = other DNA
cgcgcaacgcgctggcccgcgccgtgttcttcaaccgcctgggggaaatccgcgaccgcagcttcgagcagcagc

SEQ ID NO: 590640 - DNA, 75 bp, synthetic construct
  source 1..75: mol_type = other DNA
cgaccgagttcatcaagccgcgctggcagaagctggtgatgaccgacaccggcatcgaccggcgctactacgaac

SEQ ID NO: 590641 - DNA, 75 bp, synthetic construct
  source 1..75: mol_type = other DNA
attacaagcgggactcgaccattaagcacgtcaattgacctgaattctttaggtggcgcggaacacctgggaata

SEQ ID NO: 590642 - DNA, 75 bp, synthetic construct
  source 1..75: mol_type = other DNA
acgcggcacgtcgtatcgaagaaacgcagaaagaaaaaatggcctctgtatcctccggaatgcagctgccgcctg

SEQ ID NO: 590643 - DNA, 75 bp, synthetic construct
  source 1..75: mol_type = other DNA
ttgcgatctgtcgacagtttcctggcatggaaaaacggtatcaggacttcattaagatggaggtcagtaaagcat

SEQ ID NO: 590644 - DNA, 75 bp, synthetic construct
  source 1..75: mol_type = other DNA
tcggtttgggcgtcggcggtgtactgaccgatcttgatgataatgtcatccagcgtgcatttaagctgtacccgc

SEQ ID NO: 590645 - DNA, 75 bp, synthetic construct
  source 1..75: mol_type = other DNA
ttgaagatgtcatctcatccatttgtgcaagtgcaggttatgaagctgtgtttaataatgtaaaagggatgacaa

SEQ ID NO: 590646 - DNA, 75 bp, synthetic construct
  source 1..75: mol_type = other DNA
atgtttggtaaaggcggtctgggcaacctgatgaagcaggcccagcagatgcaagaaaaaatgcagcagatgcag

SEQ ID NO: 590647 - DNA, 75 bp, synthetic construct
  source 1..75: mol_type = other DNA
gtgggctggagaatcagagttatcgcgccagcgggctgacattactgacagcagcgatcacgttgtggaacacgg

SEQ ID NO: 590648 - DNA, 75 bp, synthetic construct
  source 1..75: mol_type = other DNA
ctgaccaagatggcggagtcttgccccggcacgacctacgccaagctggcttggctgcaagcctggcacatccgc

SEQ ID NO: 590649 - DNA, 75 bp, synthetic construct
  source 1..75: mol_type = other DNA
ctcaagcaggccagcgaattgccgctggccgtggccaccgactgcaaccggtacctgaacgaccggctgacgctg

SEQ ID NO: 590650 - DNA, 75 bp, synthetic construct
  source 1..75: mol_type = other DNA
actacgaactgtgcgcgctgtcggagatgaagaacgcgttgcgttccggcgacatctgggtgcaggggtcgcgcc

SEQ ID NO: 590651 - DNA, 75 bp, synthetic construct
  source 1..75: mol_type = other DNA
cacccgccacttcacacacctgaagaccagcgacacggccaaggacaaaaccttgctgttgacgacgatcctggc

SEQ ID NO: 590652 - DNA, 75 bp, synthetic construct
  source 1..75: mol_type = other DNA
aaagctatgccacgctacgccgctacgcgccgcagttcctgggcgtgctcaaattgcgggctgcgcccgccgcca

SEQ ID NO: 590653 - DNA, 75 bp, synthetic construct
  source 1..75: mol_type = other DNA
aagcgtggcaggcgctcgacctgccttctggcatcgagcggtcggtgcaccagaaccgcctgctcaagatcgccc

SEQ ID NO: 590654 - DNA, 75 bp, synthetic construct
  source 1..75: mol_type = other DNA
gtgggcagatgacgcccaaagacctcggtaagttcgagccgcagcgccgctacgcgaccctggccgccgtggtgc

SEQ ID NO: 590655 - DNA, 75 bp, synthetic construct
  source 1..75: mol_type = other DNA
cggcgggtctaccgcgccctggtcgaaccactcacggactcgcatcgggccaagctggacgagctgttgaagctc

SEQ ID NO: 590656 - DNA, 75 bp, synthetic construct
  source 1..75: mol_type = other DNA
ccgacctctcgatcatccgacagcggcgcgggccagccaatcggctgggcttcgcggtgcagctactgttacctg

SEQ ID NO: 590657 - DNA, 75 bp, synthetic construct
  source 1..75: mol_type = other DNA
cgctacctgttaagggatgtcaggacgttacagttacagcaaatgaaacttatcggattcgcaccggaagagaac

SEQ ID NO: 590658 - DNA, 75 bp, synthetic construct
  source 1..75: mol_type = other DNA
agtcgtattgagaatgagttccctattctatgggagtttttccccatctttgagatcaaagctgcatctgagcgt

SEQ ID NO: 590659 - DNA, 75 bp, synthetic construct
  source 1..75: mol_type = other DNA
ggctacacgtaagcgtactgaggggcgaacagagatacaacttaaagcggaaggggtacctccggcatttattac

SEQ ID NO: 590660 - DNA, 75 bp, synthetic construct
  source 1..75: mol_type = other DNA
gaacatgctctaaacagaacagtaagtcatgataatatattttcatcgttactggggttatggaatgtaaatact

SEQ ID NO: 590661 - DNA, 75 bp, synthetic construct
  source 1..75: mol_type = other DNA
gtcatgataatatattttcatcgttactggggttatggaatgtaaatacttcagtttataataaagaagatgata

SEQ ID NO: 590662 - DNA, 75 bp, synthetic construct
  source 1..75: mol_type = other DNA
tgttttcagatatgaagcgaaaagagttcaattcccgcaaagcggtaaattcggaaaatgtactggatattctgt

SEQ ID NO: 590663 - DNA, 75 bp, synthetic construct
  source 1..75: mol_type = other DNA
aaagtcaccaaagcaccggggagtgagttttatatcttcagtgacggcggaaatacgcgctatcagatcctctct

SEQ ID NO: 590664 - DNA, 75 bp, synthetic construct
  source 1..75: mol_type = other DNA
atccctgcgttcaacattgaaaaaaatcacactgcttttttctgaacatccatctgagtatcctgatgcagaaca

SEQ ID NO: 590665 - DNA, 75 bp, synthetic construct
  source 1..75: mol_type = other DNA
gtgatcgaaatcattcaggaatactggaaatcattgttgtggaccgacggctaccgtttcactggcgtcgcgatc

SEQ ID NO: 590666 - DNA, 75 bp, synthetic construct
  source 1..75: mol_type = other DNA
caaaagcggctgcggcggtccgtaaaatcacgattgaagcaaaccagaccgctgattttgaagataatgacttca

SEQ ID NO: 590667 - DNA, 75 bp, synthetic construct
  source 1..75: mol_type = other DNA
atgattcagtatctgaacgtctttttttacgatatctacccgtacttgtgtggcacggtttttatcctcggaagc

SEQ ID NO: 590668 - DNA, 75 bp, synthetic construct
  source 1..75: mol_type = other DNA
cgtcctgaaatcattgctgctatcgcggaagcgcgtgaacatggcgacctgaaagagaatgctgaatatcacgct

SEQ ID NO: 590669 - DNA, 75 bp, synthetic construct
  source 1..75: mol_type = other DNA
tgcggttgatgcaggcgtgctgacggaatgtaacggtttttatgatattccgcgtccccgcccggtgcagccggt

SEQ ID NO: 590670 - DNA, 75 bp, synthetic construct
  source 1..75: mol_type = other DNA
gtgtcagcacattattacgggcttacggacgcctgacctgcggagttctggctgaaaaaatgaagatgcctccct

SEQ ID NO: 590671 - DNA, 75 bp, synthetic construct
  source 1..75: mol_type = other DNA
atgtttagacgcaatcttattacctctgccatcttattaatgacgccgttagccttttctgcacaatcattagct

SEQ ID NO: 590672 - DNA, 75 bp, synthetic construct
  source 1..75: mol_type = other DNA
ggtcaataaaggccggcgcagtacaaaaccggaatggtctgtaccggtggacagtgaggatgaaacaacaacggc

SEQ ID NO: 590673 - DNA, 75 bp, synthetic construct
  source 1..75: mol_type = other DNA
gatgaatgcacaaaaggcaggataccaaccagaacattatattataaggggccaactaaacagccagaatgagat

SEQ ID NO: 590674 - DNA, 75 bp, synthetic construct
  source 1..75: mol_type = other DNA
aatgtttttctaagtttaaatctgaaatagaaaacaaccctgaatattacattaaggttgacaatgtaacggtgg

SEQ ID NO: 590675 - DNA, 75 bp, synthetic construct
  source 1..75: mol_type = other DNA
tggcgaatacgtttattactttcacaaccaggtgcgtgattggcgattgtgtcacgcgcactttaagcacgaaat

SEQ ID NO: 590676 - DNA, 75 bp, synthetic construct
  source 1..75: mol_type = other DNA
gtgtttccacaccctcggctaccacctccattgtcgttttcagaagacggctgcactgaacgtcagaagccgact

SEQ ID NO: 590677 - DNA, 75 bp, synthetic construct
  source 1..75: mol_type = other DNA
gagcgggatttccttgcagcacacgcagcaactggtgctcggttcattggcgttcatggtggtgttcctccattg

SEQ ID NO: 590678 - DNA, 75 bp, synthetic construct
  source 1..75: mol_type = other DNA
ccccttccggcgtgaaggcggcatcgagcgggatttccttgcagcacacgcagcaactggtgctcggttcattgg

SEQ ID NO: 590679 - DNA, 75 bp, synthetic construct
  source 1..75: mol_type = other DNA
atcagcgtcaccatatgctgttcgccaccctctggaataccggaatgcgtattggcgaagcccggatgctgacac

SEQ ID NO: 590680 - DNA, 75 bp, synthetic construct
  source 1..75: mol_type = other DNA
tgtttatcgtgttcagattgttcggtcgtgaatggtcgtttgacctcaaggacagaggccatgaagacaaccata

SEQ ID NO: 590681 - DNA, 75 bp, synthetic construct
  source 1..75: mol_type = other DNA
ggtggtcccacttgaggccgcagtgcaacttgatgacgttcttattcttgaggggctaaagctgaaggtatccag

SEQ ID NO: 590682 - DNA, 75 bp, synthetic construct
  source 1..75: mol_type = other DNA
agttgaacctaaggccgggcaggttgtaccggctctcgcacacattgggcaaaacgaagcggaattatcccgctc

SEQ ID NO: 590683 - DNA, 75 bp, synthetic construct
  source 1..75: mol_type = other DNA
gacgttttggcacaacgcatgagattgccagcctggtggtatggctttgttcggagggcgcaaattacaccaccg

SEQ ID NO: 590684 - DNA, 75 bp, synthetic construct
  source 1..75: mol_type = other DNA
caacggctggggcgtattgatgtgctggtgaataatgcgggtgcaatgaccaaagcgccgtttcttgatatggct

SEQ ID NO: 590685 - DNA, 75 bp, synthetic construct
  source 1..75: mol_type = other DNA
gctgttgatgatgccgcgtggtgttccttccgccgctcattgccctggctggaaggcaatgccattccggcactg

SEQ ID NO: 590686 - DNA, 75 bp, synthetic construct
  source 1..75: mol_type = other DNA
tggataacttcattatggatgtgcagggtagcgggtatatcgactttggtgatggcagtccgcttaactttttca

SEQ ID NO: 590687 - DNA, 75 bp, synthetic construct
  source 1..75: mol_type = other DNA
atcgaccgtggcgaagtgaaaaaagaagatatgtcgatgcaggcgattcgtcactggggcgaaacacacagtgaa

SEQ ID NO: 590688 - DNA, 75 bp, synthetic construct
  source 1..75: mol_type = other DNA
gcgagtttcagtatccgatttaccgtatgccaccaaaacgtggtcgtttgccgtctcgtgcggagatctacgcgg

SEQ ID NO: 590689 - DNA, 75 bp, synthetic construct
  source 1..75: mol_type = other DNA
agctggtgggatgggcgcaaagcatcgtcactttccagggcggcgcatcgacgcatcttgatggcgtagcttata

SEQ ID NO: 590690 - DNA, 75 bp, synthetic construct
  source 1..75: mol_type = other DNA
atgcttgccgcctgctcttccaaaccaaccgatcgcggacagcaatataaagacgggaaatttacccagcctttc

SEQ ID NO: 590691 - DNA, 75 bp, synthetic construct
  source 1..75: mol_type = other DNA
gggcgagttccagtatccgatttaccgtatgccgccaaaacgtggtcgtctgccgtctcgtgcggagatctacgc

SEQ ID NO: 590692 - DNA, 75 bp, synthetic construct
  source 1..75: mol_type = other DNA
gtgaggggcttggtccggtcggtggtgcggcggcgatctattcattaagcggactgctgttaatattcaccgttg

SEQ ID NO: 590693 - DNA, 75 bp, synthetic construct
  source 1..75: mol_type = other DNA
ccagcctgacaattctctttgccattctgtttaatggtcagaaaaccaactggctgattgtacctggattattat

SEQ ID NO: 590694 - DNA, 75 bp, synthetic construct
  source 1..75: mol_type = other DNA
ctgtactttcctcagcgcttgcagccgtgctgctcagcgccccgctgtcgttctcgttctggcaaggcgcgctaa

SEQ ID NO: 590695 - DNA, 75 bp, synthetic construct
  source 1..75: mol_type = other DNA
ccccgcgtccgtggatgcgcactatactccgctcgcgttttcatgcaaccttttttttaccccgatcacggattt

SEQ ID NO: 590696 - DNA, 75 bp, synthetic construct
  source 1..75: mol_type = other DNA
gtggttaagtggtattcctcaggtagggtcgtatctttttattttttaatacctgttgttttgactaaagtcagt

SEQ ID NO: 590697 - DNA, 75 bp, synthetic construct
  source 1..75: mol_type = other DNA
ttgccgccatcctgctcaacgcaccgctatcattttcattctggcaaggcgcactgatggtctgtggcggctccc

SEQ ID NO: 590698 - DNA, 75 bp, synthetic construct
  source 1..75: mol_type = other DNA
gccctgaaactggcagaagaggccgctgaactggcggccagtgccgcccgcaacctgaacggacagggcagcgaa

SEQ ID NO: 590699 - DNA, 75 bp, synthetic construct
  source 1..75: mol_type = other DNA
aacggtaaaagtgatgtttactggtacaacacaacttcctgcagaccgggaaagtgttttctggtttaacgtact

SEQ ID NO: 590700 - DNA, 75 bp, synthetic construct
  source 1..75: mol_type = other DNA
tccgcgccgtcgccggtcaggcgaacctgctggataaagatgggcagatcatcgacggcgggaaagcactgacca

SEQ ID NO: 590701 - DNA, 75 bp, synthetic construct
  source 1..75: mol_type = other DNA
gtgattaaaaacccacttgatggtctgcccgtcgcgctgggggatttcacgacctttccggtgatgatgtcgttg

SEQ ID NO: 590702 - DNA, 75 bp, synthetic construct
  source 1..75: mol_type = other DNA
gacgtggtattgaccaacatatgctggcaacactgcgtgatgctgttctcggggattttcgccccgacttaacgc

SEQ ID NO: 590703 - DNA, 75 bp, synthetic construct
  source 1..75: mol_type = other DNA
cggcacctgggtgattggcgatcgtcacgatctctctactcaggcgtatcagggggggggacgtggtattgatca

SEQ ID NO: 590704 - DNA, 75 bp, synthetic construct
  source 1..75: mol_type = other DNA
ttgagcaagagtctttcgatttctttaatcgcacccgcgcccgctatctggaactggctgcacaagataaaagta

SEQ ID NO: 590705 - DNA, 75 bp, synthetic construct
  source 1..75: mol_type = other DNA
ctgctgggattcacctgttacgcctcacgcgggctgtactgggcctgccctggcgaagcgagaacaccgtcttac

SEQ ID NO: 590706 - DNA, 75 bp, synthetic construct
  source 1..75: mol_type = other DNA
gtaaagtgaaatcccctacccgcgtggtccaaatcctttccatcatcggtttgctggcgttgacagccctgctcg

SEQ ID NO: 590707 - DNA, 75 bp, synthetic construct
  source 1..75: mol_type = other DNA
aaaatgattacttccgcgatgatcattaccggattactgggtctgttaatggcaacgtatccaccgctgtgggta

SEQ ID NO: 590708 - DNA, 75 bp, synthetic construct
  source 1..75: mol_type = other DNA
tgttcctgctgctcattgccgctaatggtgtcggtctggtgattaaaaacccgcttgatggtctgcccgttgcgc

SEQ ID NO: 590709 - DNA, 75 bp, synthetic construct
  source 1..75: mol_type = other DNA
tcagcaccacctggtattgcagcatggtgatttttggtgtcttcaccatctacgccattctgagttactccacca

SEQ ID NO: 590710 - DNA, 75 bp, synthetic construct
  source 1..75: mol_type = other DNA
cttggcggcattatcaccacctacagtaaagtgaaatcccctacccgcgtgattcaaatcctttccatcatcggt

SEQ ID NO: 590711 - DNA, 75 bp, synthetic construct
  source 1..75: mol_type = other DNA
cgctcccggcgcgggtcaccagcacggtgaagaacgatatctatgcccatatcgacaaggacgggcgctaccggg

SEQ ID NO: 590712 - DNA, 75 bp, synthetic construct
  source 1..75: mol_type = other DNA
cccaggacaaggcgcagggtcaggtcagagagatggccgacattatcagcgaactgaacggtctgagcgataaaa

SEQ ID NO: 590713 - DNA, 75 bp, synthetic construct
  source 1..75: mol_type = other DNA
acaggtgatgcagtacggtgaggacgacctgacgtttatttcacgcctgctgtcggaagtgggtatctggttccg

SEQ ID NO: 590714 - DNA, 75 bp, synthetic construct
  source 1..75: mol_type = other DNA
gacacctacggcctgcacctgccgctgctggcaggaacggaagtcagcatcgcctttgaggaaggcaacccggac

SEQ ID NO: 590715 - DNA, 75 bp, synthetic construct
  source 1..75: mol_type = other DNA
tcagtatcgcctttgaggaaggcaacccggaccgaccttatattgcaggcgtaaaacacgactcggcacacactg

SEQ ID NO: 590716 - DNA, 75 bp, synthetic construct
  source 1..75: mol_type = other DNA
cctcggtcatctggtggatgccgggaaacagcagcgcggggaaggttttgaactgcgtaccgatctgtggggtgc

SEQ ID NO: 590717 - DNA, 75 bp, synthetic construct
  source 1..75: mol_type = other DNA
cgccatctaccagaaacagacggtgccgcaaatcgtcgaaaaaatcctgcgcgagcgccatcagatgcgcggtca

SEQ ID NO: 590718 - DNA, 75 bp, synthetic construct
  source 1..75: mol_type = other DNA
tggccgccgtgaaaaacctccagataaatgcgggaaacaacgccgatatcggcgttgtgaagaatatgtttatcg

SEQ ID NO: 590719 - DNA, 75 bp, synthetic construct
  source 1..75: mol_type = other DNA
tggccgctgtgaaaaacctccagataaatgcgggaaacaacgccgatatcggcgtcgtgaagaatatgtttatcg

SEQ ID NO: 590720 - DNA, 75 bp, synthetic construct
  source 1..75: mol_type = other DNA
cgccatctaccagaagcagacggtgccgcaaatcgtcgaaaaaatcctgcgcgagcgccatcaaatgcgcggtca

SEQ ID NO: 590721 - DNA, 75 bp, synthetic construct
  source 1..75: mol_type = other DNA
cgccatctaccagaaccagacggtgccgcaaatcgtcgaaaaaatcctgcgcgagcgacatcacatgcgcggtca

SEQ ID NO: 590722 - DNA, 75 bp, synthetic construct
  source 1..75: mol_type = other DNA
cgccatctaccagaatcagacggtgccgcaaatcgtcgaaaaaatcctgcgcgagcgccatcatatgcgcggtca

SEQ ID NO: 590723 - DNA, 75 bp, synthetic construct
  source 1..75: mol_type = other DNA
atacgcaggacaaggcgcagggtcaggtgcgcgaaatggctccggcgatggcaatactggatggcgcacagtcac

SEQ ID NO: 590724 - DNA, 75 bp, synthetic construct
  source 1..75: mol_type = other DNA
ggtgagcctgagtgggcagaatcgcatttagctgcatgggctgagatttttcagacgtttggcgctaagcctaaa

SEQ ID NO: 590725 - DNA, 75 bp, synthetic construct
  source 1..75: mol_type = other DNA
ggcgacgacgcgcctgcggtgttccgcaagggcgtgctgattaccggcgtgacggccagcgcggcgcgtgaccgc

SEQ ID NO: 590726 - DNA, 75 bp, synthetic construct
  source 1..75: mol_type = other DNA
cctgcaaagtccggtggatgtgctgacctttgaaggccgcgaacaactgagtaccccgttccgctacgatatcca

SEQ ID NO: 590727 - DNA, 75 bp, synthetic construct
  source 1..75: mol_type = other DNA
gctggcacagcgcgagttcatggaaaaagcacagcagattcaggtggtattgggtgcgcaggcgggtggcaaaac

SEQ ID NO: 590728 - DNA, 75 bp, synthetic construct
  source 1..75: mol_type = other DNA
ccgcatgtacctgatgcgtggatcgatatcgaaaaaaccgatccttatgatggtcaggtagggatagtgggttat

SEQ ID NO: 590729 - DNA, 75 bp, synthetic construct
  source 1..75: mol_type = other DNA
acccaccgtttggcgttgactggaaaaagattgataccgttattcgcaacgagcataaaaaaggctacgacggtc

SEQ ID NO: 590730 - DNA, 75 bp, synthetic construct
  source 1..75: mol_type = other DNA
gaacgcaggaaatcacgctgacatcggtgttgtgaagaatatgtttatcggtgtgggtcaggcgctgagcgtgtt

SEQ ID NO: 590731 - DNA, 75 bp, synthetic construct
  source 1..75: mol_type = other DNA
cggcgcttatcccacgtcccgtaatggccggcacgctcccggcacgggtcaccagcacggtgaaaaacgacacct

SEQ ID NO: 590732 - DNA, 75 bp, synthetic construct
  source 1..75: mol_type = other DNA
ggcaacccggaccgaccttatattgcaggcgtaaaacacgactcggcacacactgaccatgtgaccattcagaac

SEQ ID NO: 590733 - DNA, 75 bp, synthetic construct
  source 1..75: mol_type = other DNA
tggaaaaaagcgtcaccacgcgggactacaactaccgcaccgccacagcggagatgatgactgagcagcatgacg

SEQ ID NO: 590734 - DNA, 75 bp, synthetic construct
  source 1..75: mol_type = other DNA
gctggatgacgagcgcggcaaagagcatatcaaggtcagtaccgaatatggcggcaagagccagctaaacctcgg

SEQ ID NO: 590735 - DNA, 75 bp, synthetic construct
  source 1..75: mol_type = other DNA
agaacgccatctaccagaaccagacggtgccgcaaatcgtcgaaaaaatcctgcgcgagcggcaccagatgcgcg

SEQ ID NO: 590736 - DNA, 75 bp, synthetic construct
  source 1..75: mol_type = other DNA
gatgcacgcgccgaaaggggtggcggtcgccagcggcgagcacctgcaactggccgcggtgaaaaacctccagat

SEQ ID NO: 590737 - DNA, 75 bp, synthetic construct
  source 1..75: mol_type = other DNA
ccggaagacccgatcagcgaaatgatccgtgcgcaaattaataacatcgcgcataaacatattgtgctgcattaa

SEQ ID NO: 590738 - DNA, 75 bp, synthetic construct
  source 1..75: mol_type = other DNA
cgcggcgtttatcgtctttccgatgcattatggctggaccaggtgttaaagaatcgacagggcagtgcggtatca

SEQ ID NO: 590739 - DNA, 75 bp, synthetic construct
  source 1..75: mol_type = other DNA
atggaatcagacggggcttgaattaggctggtttaagcaacagaacaaaactcagcagggggtaacgctaaatga

SEQ ID NO: 590740 - DNA, 75 bp, synthetic construct
  source 1..75: mol_type = other DNA
ttacgcaccagcgaggccttattacagttcaacccggaagatccgtatgaaattcgcgatcgtgggttgatttac

SEQ ID NO: 590741 - DNA, 75 bp, synthetic construct
  source 1..75: mol_type = other DNA
aaatcggcagggcagtgcggtatcattaggcgccgttttggtgtgggtcgctaatcgtctcgatttgccgctgat

SEQ ID NO: 590742 - DNA, 75 bp, synthetic construct
  source 1..75: mol_type = other DNA
gccggtaattttcccaacgcagcttatattgcgcattgaatgcccggacggtgaaatctggctgattaacccttt

SEQ ID NO: 590743 - DNA, 75 bp, synthetic construct
  source 1..75: mol_type = other DNA
ggtctgattattcagtggggtattgtcagtggagcatcaaactatacggtgacttacccggtaacattcccaaat

SEQ ID NO: 590744 - DNA, 75 bp, synthetic construct
  source 1..75: mol_type = other DNA
agcggcaaaacggaatgtaggtaacgagcaaaaccaaattccggatatggcggcgtttgccagttcactttcatc

SEQ ID NO: 590745 - DNA, 75 bp, synthetic construct
  source 1..75: mol_type = other DNA
aggaaaacataatacagcaatgcacttgtactgtttctattattctggcgatttcaataaaggtacttgctcgcg

SEQ ID NO: 590746 - DNA, 75 bp, synthetic construct
  source 1..75: mol_type = other DNA
tttgctttctttaccacttacaagaaccatggcctctgaactgaggcgagtggaaaaccgactggctgaaattac

SEQ ID NO: 590747 - DNA, 75 bp, synthetic construct
  source 1..75: mol_type = other DNA
gttgttcacaaaaattcagattacttgatgatgtccgaaaataatgatgactggatcattaccaccattcatcct

SEQ ID NO: 590748 - DNA, 75 bp, synthetic construct
  source 1..75: mol_type = other DNA
ggctgagtgattaccaactaacggaaaaagattatcttatcctggaacattttaaaaatattgaattttcaggct

SEQ ID NO: 590749 - DNA, 75 bp, synthetic construct
  source 1..75: mol_type = other DNA
gctggatgtgaaagttggcgacatcgttattttcaacgatggctacggtgtgaaatctgagaagatcgacaatga

SEQ ID NO: 590750 - DNA, 75 bp, synthetic construct
  source 1..75: mol_type = other DNA
ctgaataaggcattatcagaactggcagaggcgggaatcgtgttgtctgccccgaagggcgtgggggtagtgagt

SEQ ID NO: 590751 - DNA, 75 bp, synthetic construct
  source 1..75: mol_type = other DNA
gaaaaaagcgtcaccacgcgggactacaactaccgcaccgccacagcagagatgatgacagagcagcatgacgcc

SEQ ID NO: 590752 - DNA, 75 bp, synthetic construct
  source 1..75: mol_type = other DNA
gtaccgatctgtggggtgcagtacgggcaaagaaaggcatctttatcagcgccgacgcgcaggataaggcgcagg

SEQ ID NO: 590753 - DNA, 75 bp, synthetic construct
  source 1..75: mol_type = other DNA
gatgcacgccccgaaaggagtggcggtcgccagcggcgagcacctgcaactggccgcagtgaaaaacctccagat

SEQ ID NO: 590754 - DNA, 75 bp, synthetic construct
  source 1..75: mol_type = other DNA
gatgcacgcaccgaaaggcgtggcggtcgccagcggcgagcacctgcaactggccgcagtgaaaaacctccagat

SEQ ID NO: 590755 - DNA, 75 bp, synthetic construct
  source 1..75: mol_type = other DNA
gatgcacgcaccgaaaggagtggcggtcgccagcggcgagcacctgcaactggccgccgtgaaaaacctccagat

SEQ ID NO: 590756 - DNA, 75 bp, synthetic construct
  source 1..75: mol_type = other DNA
ggcgacgacgcgccagcggtgttccgcaagggtgtgctgattaccggcgtgacggccagcgcggcccgtgaccgc

SEQ ID NO: 590757 - DNA, 75 bp, synthetic construct
  source 1..75: mol_type = other DNA
gcctcaccggaacctttccggcttgccgctgattctacgattgctttttaccgtcagcacccggcaatcttcctc

SEQ ID NO: 590758 - DNA, 75 bp, synthetic construct
  source 1..75: mol_type = other DNA
tcaaattgcaggggagaaattatctattaagtatttatcctgcatggcatacacgtcttttccctgagtcaaaac

SEQ ID NO: 590759 - DNA, 75 bp, synthetic construct
  source 1..75: mol_type = other DNA
ggcaccgccggtgcagggaatgccggtgcaggctgccctgcgcaccctgtatggcgtcattaccggctttaaaca

SEQ ID NO: 590760 - DNA, 75 bp, synthetic construct
  source 1..75: mol_type = other DNA
accacgcacaccacaagctcaaaattcgcggcctgaaaagcccggtggacgtgctgacgtttacgggccgggaac

SEQ ID NO: 590761 - DNA, 75 bp, synthetic construct
  source 1..75: mol_type = other DNA
tcacagatgaagtcgctgtccactgatgcgcagacggcgaatgccgatccggcagatctgtcatcacagatagcg

SEQ ID NO: 590762 - DNA, 75 bp, synthetic construct
  source 1..75: mol_type = other DNA
catcaggaaaaacattggtttcaaattgcgcgttatcacgaagtcacctgtcactctgtctggcgctcagataag

SEQ ID NO: 590763 - DNA, 75 bp, synthetic construct
  source 1..75: mol_type = other DNA
gcttacgtgggcgttatgcgtggtcaaaagacggcactgattcatggtttatcactgaccttgaagacgaatcgc

SEQ ID NO: 590764 - DNA, 75 bp, synthetic construct
  source 1..75: mol_type = other DNA
ttaaggctgataactcgcgtgtgttcgactttgaggtcgagtcatcaacgggcgttgctcagtacgctgacaggc

SEQ ID NO: 590765 - DNA, 75 bp, synthetic construct
  source 1..75: mol_type = other DNA
agacgtcagcggtacggtgtcgttacatttaacagacgttccctggaagcaggcactacaaactgtagtgaaaag

SEQ ID NO: 590766 - DNA, 75 bp, synthetic construct
  source 1..75: mol_type = other DNA
acgacaaacgcgttttgtggaagaaagtagggcgcatcaggaaaaacattggcttcaaattgcgcgttatcacga

SEQ ID NO: 590767 - DNA, 75 bp, synthetic construct
  source 1..75: mol_type = other DNA
tggtgccgctttgtatgtcgcacagccatcgctgatggtgcagaaaggtattgccggaacttactgcaaaacgcc

SEQ ID NO: 590768 - DNA, 75 bp, synthetic construct
  source 1..75: mol_type = other DNA
ctgtaggcgttaatggtcaactggtcgagtatcgttatgatggcacggttaaaaccgtctcaaactggcctacag

SEQ ID NO: 590769 - DNA, 75 bp, synthetic construct
  source 1..75: mol_type = other DNA
catgagctgctgattatccaccttcctcgccatgttctcgtgtacgacgcatcttcaagcgccaatggtccgcaa

SEQ ID NO: 590770 - DNA, 75 bp, synthetic construct
  source 1..75: mol_type = other DNA
tctggcaattttaggcgcgctgctggcaggtactgcgacattaagtccttttgcgacggcggcggcgttacgaat

SEQ ID NO: 590771 - DNA, 75 bp, synthetic construct
  source 1..75: mol_type = other DNA
ctgctgatgaactggctgatggcgtgatggagtctctgcgatttgatgcgcatgagttgctgattatccaccttc

SEQ ID NO: 590772 - DNA, 75 bp, synthetic construct
  source 1..75: mol_type = other DNA
cgcgcggcgtcgagtacaacatggcgcagaatgctgtctatcgtgtgtgtggcggcaagctctacaaaggcgaaa

SEQ ID NO: 590773 - DNA, 75 bp, synthetic construct
  source 1..75: mol_type = other DNA
agtcgggcgcatcaggaaaaatgttggcttcaaacttcgcgttatcacgaagtcacctgtaactctgtctggctg

SEQ ID NO: 590774 - DNA, 75 bp, synthetic construct
  source 1..75: mol_type = other DNA
caaaagcggagaaacgttggcgctgggcggcatttttacccgtaaaaataaatcgggtcaggatagcgtaccgtt

SEQ ID NO: 590775 - DNA, 75 bp, synthetic construct
  source 1..75: mol_type = other DNA
aagaaatcctgaacagcagcggatatcttcgctcattcccgggcattgccaaacgttctgatgtgaatggtgtat

SEQ ID NO: 590776 - DNA, 75 bp, synthetic construct
  source 1..75: mol_type = other DNA
ccatcgctgatggtgcagaaaggcattgccggaacctactgcaaaacgccgtttgctgactcgtatgcgttcatc

SEQ ID NO: 590777 - DNA, 75 bp, synthetic construct
  source 1..75: mol_type = other DNA
cgtgatacaatctcagtaaataaaaactcctgtaccgtgagaaaaatcacaacatttaactcgattgaagttcgt

SEQ ID NO: 590778 - DNA, 75 bp, synthetic construct
  source 1..75: mol_type = other DNA
tgatggcacggttaaaaccgtctcaaactggcctgcagacagcgggtttacgcagtatgagttaggttctgttcg

SEQ ID NO: 590779 - DNA, 75 bp, synthetic construct
  source 1..75: mol_type = other DNA
tttggttcatcgacgattgaatatttctccctgactggcgcaaccaccgttggtgccgctttgtatgtcgcacaa

SEQ ID NO: 590780 - DNA, 75 bp, synthetic construct
  source 1..75: mol_type = other DNA
aacatggcgagacttcatcgtctgctttggttcatcgacgattgaatatttttccctgacaggtgcaaccactgt

SEQ ID NO: 590781 - DNA, 75 bp, synthetic construct
  source 1..75: mol_type = other DNA
ttgtgtaatgaaaaaaataagttttttatttttacagcactattttgctgcagtgcacaagctgccccgtcctct

SEQ ID NO: 590782 - DNA, 75 bp, synthetic construct
  source 1..75: mol_type = other DNA
gaaattgtcggtttaggcgtagttgaaccgcgtgagattcaggaaacgacctgggtgtttgacgaccatgccgcc

SEQ ID NO: 590783 - DNA, 75 bp, synthetic construct
  source 1..75: mol_type = other DNA
aaaagcgccggactgataacgcggcaggaaggcaacattctctcagtgcattccattgcctggcagaatgacaat

SEQ ID NO: 590784 - DNA, 75 bp, synthetic construct
  source 1..75: mol_type = other DNA
agtcttaccggaaaacgtcgggaacgagttcgtttgttacttgatattcaggatggcaatcaatcgactaaccaa

SEQ ID NO: 590785 - DNA, 75 bp, synthetic construct
  source 1..75: mol_type = other DNA
cgctgatccacgtcttaatgcggttgttgtaaaagaccgtgaaataactatggatatatatcagcaattaatttc

SEQ ID NO: 590786 - DNA, 75 bp, synthetic construct
  source 1..75: mol_type = other DNA
ttaaatgcaggacaaggtacgattgcctttaatagctctaccgcacaggctaatatcagctcttctgtgataagt

SEQ ID NO: 590787 - DNA, 75 bp, synthetic construct
  source 1..75: mol_type = other DNA
aggatcgctttgcaggaacagttggatacttccttgctgtatctgaataaagaaaaagccgctgactggcttctt

SEQ ID NO: 590788 - DNA, 75 bp, synthetic construct
  source 1..75: mol_type = other DNA
tctgtttaatggtcagaaaaccaactggctgattgtacctggattattattagccctggtcggtgtctgctgggt

SEQ ID NO: 590789 - DNA, 75 bp, synthetic construct
  source 1..75: mol_type = other DNA
agcggcgctgggagtgggacgctccgggcttatcagggaggcccagggctggtccctgcgccgtacccgtgtcag

SEQ ID NO: 590790 - DNA, 75 bp, synthetic construct
  source 1..75: mol_type = other DNA
gtgacggcggcacagatgcagaagcagtatgaggaaatccgtcgtgagatggatgttctgaacaaacagcgtggt

SEQ ID NO: 590791 - DNA, 75 bp, synthetic construct
  source 1..75: mol_type = other DNA
aggaagtgcacgatatttcggtagcgatcggtatcgatcctgacagcgacgatctgagccagcttcgttatggca

SEQ ID NO: 590792 - DNA, 75 bp, synthetic construct
  source 1..75: mol_type = other DNA
ggactggtgcaaagcagtcgggtgctggcgctacgtcgtcaccggctggttgtccgccgccaggaggaaatccat

SEQ ID NO: 590793 - DNA, 75 bp, synthetic construct
  source 1..75: mol_type = other DNA
gtgcgggcgggttcgttctctgtattccgctgttaccgttggccggctgggtgatcctgccgaccggggcactga

SEQ ID NO: 590794 - DNA, 75 bp, synthetic construct
  source 1..75: mol_type = other DNA
ttaccgggaatgtttgttcgcgctcgtgtcgatgaaggcgtgatggaagacgctattctcgcgccgcaacagggc

SEQ ID NO: 590795 - DNA, 75 bp, synthetic construct
  source 1..75: mol_type = other DNA
ttatcaggctgcatggaatgaagcccgggcagcattacaacaagcacaggcactggtagccgattgccagaaagc

SEQ ID NO: 590796 - DNA, 75 bp, synthetic construct
  source 1..75: mol_type = other DNA
cgcaccagtgcggcactcagtgctgaagtacgtccgcaggttgggggaattatccagaaacgcttgtttaaggaa

SEQ ID NO: 590797 - DNA, 75 bp, synthetic construct
  source 1..75: mol_type = other DNA
cagcgaaaaaggccgtctggaactgactgaagtggctgtggatgagtctaccggttcggtgacattacgggcgat

SEQ ID NO: 590798 - DNA, 75 bp, synthetic construct
  source 1..75: mol_type = other DNA
tttccccaatccacaacagcagttattaccgggaatgtttgttcgcgctcgtgtcgatgaaggcgtgatggaaga

SEQ ID NO: 590799 - DNA, 75 bp, synthetic construct
  source 1..75: mol_type = other DNA
tggcaatgctgctcttatcgggttgtgataatacgcatacgcaaagtaacaattcatccccgtcagaaacagaag

SEQ ID NO: 590800 - DNA, 75 bp, synthetic construct
  source 1..75: mol_type = other DNA
gtcagggcctgttggacgcgatgcgtgagttctgtgaatatcgcaacattctgccgcgcggcgtgaagctgtcgg

SEQ ID NO: 590801 - DNA, 75 bp, synthetic construct
  source 1..75: mol_type = other DNA
cccgtgctgccggtaatgttgttggtggtgtgcttggtgcattcagcccgattggcagtgagacgtcggaaacac

SEQ ID NO: 590802 - DNA, 75 bp, synthetic construct
  source 1..75: mol_type = other DNA
tggaaattaacaaggtggcttctgtatatggtacggaaaacgggaaaaagctgaaaggcatggaaatggctggat

SEQ ID NO: 590803 - DNA, 75 bp, synthetic construct
  source 1..75: mol_type = other DNA
gcagtttggtaattatgtggaaggtccgcgtcgtcaggctgatttgaaccgggcttatgactcgctgcatgacct

SEQ ID NO: 590804 - DNA, 75 bp, synthetic construct
  source 1..75: mol_type = other DNA
ttacggcagggtgcacgcgttctatcgtccggataaacgtgaaattgtcctggtggcggataacatccctgacgg

SEQ ID NO: 590805 - DNA, 75 bp, synthetic construct
  source 1..75: mol_type = other DNA
gcagaccggtacttcaccaccaaaaagaacggcaaaacgtactacatcaaactccatgatccgcgcctgatgcgt

SEQ ID NO: 590806 - DNA, 75 bp, synthetic construct
  source 1..75: mol_type = other DNA
ctgaagagtatggaaatggctggcttaacattatacaggagagaaaaactaaaccctgatggttctctgtacaga

SEQ ID NO: 590807 - DNA, 75 bp, synthetic construct
  source 1..75: mol_type = other DNA
ccagatgcaggataaattccaggtgctgaaagctgttcaggagaatatccgtaaaactggcggaaaaatagacga

SEQ ID NO: 590808 - DNA, 75 bp, synthetic construct
  source 1..75: mol_type = other DNA
cagccggacggcatcatcggtatcgggacatggcgagacttcatcgtctgctttggttcatcgacgattgaatat

SEQ ID NO: 590809 - DNA, 75 bp, synthetic construct
  source 1..75: mol_type = other DNA
gatctgagccagcttcgttatggcaaaatctgtatcctcgcggatgcggactctgatggtctgcacattgccacg

SEQ ID NO: 590810 - DNA, 75 bp, synthetic construct
  source 1..75: mol_type = other DNA
gtatcgtagcgatattccggcgaagacgaaacacaatacggcaggctggggggagagcataaaaaaagtacgaca

SEQ ID NO: 590811 - DNA, 75 bp, synthetic construct
  source 1..75: mol_type = other DNA
cgcttcgtgatagcaaggggcgcgacctctttttctcggaaagccgggatgagttactgaaaaaggcgaaagcat

SEQ ID NO: 590812 - DNA, 75 bp, synthetic construct
  source 1..75: mol_type = other DNA
aggcagaagcacgcagacagaccggggataatcgccagaccataaccgatgttccggatactgaggtgccggtgc

SEQ ID NO: 590813 - DNA, 75 bp, synthetic construct
  source 1..75: mol_type = other DNA
aagcgcaaaaatatattgaacaattcaatgcgcttctattggatagggaaagtttagatcccttcactgaaaaga

SEQ ID NO: 590814 - DNA, 75 bp, synthetic construct
  source 1..75: mol_type = other DNA
acttcttcaagagttgtgctttggcgtactgcgtacgctttcacagttagactggctgattaataagttaatggc

SEQ ID NO: 590815 - DNA, 75 bp, synthetic construct
  source 1..75: mol_type = other DNA
aaaaagtttccgataaagataaagctcttctccaggagttatgctttggcgtactgcgtacgctctcacagttag

SEQ ID NO: 590816 - DNA, 75 bp, synthetic construct
  source 1..75: mol_type = other DNA
gggctgacctgcgatccggttgccggacaggtacaaatcccgtgcattgaacgtaatgccattaatgccgtgaaa

SEQ ID NO: 590817 - DNA, 75 bp, synthetic construct
  source 1..75: mol_type = other DNA
gtcagtcttggcacgcgtatcaggaatacaagaagcataaagagcagttggaaaaattgtcgatggagttggaag

SEQ ID NO: 590818 - DNA, 75 bp, synthetic construct
  source 1..75: mol_type = other DNA
tgaggttcagtcaattcaggcgggttttgattgggatgccgggcaagtgatgatttttccatcacagccactgac

SEQ ID NO: 590819 - DNA, 75 bp, synthetic construct
  source 1..75: mol_type = other DNA
cattccacctcatgctgcgctggctgaaacggttgaaggcgctatcgcaattaagcgtccgcaacttaaagggtt

SEQ ID NO: 590820 - DNA, 75 bp, synthetic construct
  source 1..75: mol_type = other DNA
tcccctggcgtgaacttggcgttgatgtagtcctcgactgcaccggcgtatatggctcccgcgagcatggtgaag

SEQ ID NO: 590821 - DNA, 75 bp, synthetic construct
  source 1..75: mol_type = other DNA
tgcatgaaactattgaagccgttcgcagtgttgcggataactccagtggaattgccggatggcatttgaatggcg

SEQ ID NO: 590822 - DNA, 75 bp, synthetic construct
  source 1..75: mol_type = other DNA
acaggaacaccagagcaacctggtaagcaaaatctgccaggctccgaagaaggcgacggcttcttttacgctaag

SEQ ID NO: 590823 - DNA, 75 bp, synthetic construct
  source 1..75: mol_type = other DNA
atccggatattaaatggttacgccgcgatcgcgatatcccagaactcgcgcagttgcagtctgaaattctcgacg

SEQ ID NO: 590824 - DNA, 75 bp, synthetic construct
  source 1..75: mol_type = other DNA
agcagtggcaatccatcgtcgaagccaataaccagcgtccgccaatgtggctgcgcgttaatcgtacgcatcatt

SEQ ID NO: 590825 - DNA, 75 bp, synthetic construct
  source 1..75: mol_type = other DNA
ctgtggaaatgatgttttggacagcttgtcctgtggatgatgataattgttttgatgctattattaatgcatcaa

SEQ ID NO: 590826 - DNA, 75 bp, synthetic construct
  source 1..75: mol_type = other DNA
cttcatcccgcctgatgctgaccatcgggctttgttttttggtcgctctgatggaaggactggatcttcaggcgg

SEQ ID NO: 590827 - DNA, 75 bp, synthetic construct
  source 1..75: mol_type = other DNA
tgcaaatgggggcggcaagcgggacgttactggccgggaaaatgctggcattaggcactggcacggtcggcgtaa

SEQ ID NO: 590828 - DNA, 75 bp, synthetic construct
  source 1..75: mol_type = other DNA
atgaacgaatatcagtttgtgcttccgtacccaccgtcggtgaatacctactggcgaagacggggaagccaatac

SEQ ID NO: 590829 - DNA, 75 bp, synthetic construct
  source 1..75: mol_type = other DNA
aagggtaggggtgatggcggcttctgcgccgggcattttgctggcaggcctggcggtatttattctgatgagccg

SEQ ID NO: 590830 - DNA, 75 bp, synthetic construct
  source 1..75: mol_type = other DNA
gggcggcatgctggccgaccgctatggccgcaagcgtattctcattgcctctgtggcgctgttcggcctgttctc

SEQ ID NO: 590831 - DNA, 75 bp, synthetic construct
  source 1..75: mol_type = other DNA
ttgcgccagaaacggcaaccgcgacgctgctgctgtggttgtgttatttcttcactctgctggtggtctacatgt

SEQ ID NO: 590832 - DNA, 75 bp, synthetic construct
  source 1..75: mol_type = other DNA
gatctaccgtcgttcgcgcggcgtgtttatctcttaccagaaccgccacaatatggacgacatcctgcaaaacgt

SEQ ID NO: 590833 - DNA, 75 bp, synthetic construct
  source 1..75: mol_type = other DNA
ggtggtgctggatgtcggaacgaacaaccaacagctgcttaacgatccgctgtatatgggctggcgtaatccgcg

SEQ ID NO: 590834 - DNA, 75 bp, synthetic construct
  source 1..75: mol_type = other DNA
gctgcagtttgaagatttcgcacagaaaaacgcgatgccgctgctgaaccgttatcgcaatgaaatatgttcctt

SEQ ID NO: 590835 - DNA, 75 bp, synthetic construct
  source 1..75: mol_type = other DNA
atgaacgaatatcagtttgtgcttccatatccgccgtcggtgaatacctactggcgaagaaggggaagccaatat

SEQ ID NO: 590836 - DNA, 75 bp, synthetic construct
  source 1..75: mol_type = other DNA
caaaagcggctgcggcaatccgtaaaatcacgattgaagcaaaccagaccgctgattttgaagataatgacttca

SEQ ID NO: 590837 - DNA, 75 bp, synthetic construct
  source 1..75: mol_type = other DNA
ttccagaccaaactggtgcagaaacgcgaaaacctcagtgactgggataccgacagcgatgtgctgtcactgctg

SEQ ID NO: 590838 - DNA, 75 bp, synthetic construct
  source 1..75: mol_type = other DNA
gtgagctagtgaggcttaaatatgcgacggacgccctgctgcattgtgcggaacagcttcgcaaaggaggcaacc

SEQ ID NO: 590839 - DNA, 75 bp, synthetic construct
  source 1..75: mol_type = other DNA
ccgcaattcatcatgccgcaacagccgcaactgatgcagtatatcgtgctcggcgtcaccactattgtggtcgat

SEQ ID NO: 590840 - DNA, 75 bp, synthetic construct
  source 1..75: mol_type = other DNA
aacgttcaccgaaacacaaggagagtttaatgactattgcggaaagattgcggcaagagggggaacaatccaaag

SEQ ID NO: 590841 - DNA, 75 bp, synthetic construct
  source 1..75: mol_type = other DNA
tttacgccaaccggacacggcacgcgattttcttgcgtttcatttaccggcacccattcacgcgctctgtgatat

SEQ ID NO: 590842 - DNA, 75 bp, synthetic construct
  source 1..75: mol_type = other DNA
tgcggtgggtgtcgatgatgtgaagcaagcggatgagatggtgaagctggcgacggcggtggcgcatctgattgg

SEQ ID NO: 590843 - DNA, 75 bp, synthetic construct
  source 1..75: mol_type = other DNA
gcaacattactcccacccgcaaggcgagcattcctgaaggtgtgtggactaagtgtgatagctgcggtcaggttt

SEQ ID NO: 590844 - DNA, 75 bp, synthetic construct
  source 1..75: mol_type = other DNA
gaaaccggcgaaaaagatgcgctggtggtgatgaaaggcactctgtatggaatgccggttgtcgctgcggcattc

SEQ ID NO: 590845 - DNA, 75 bp, synthetic construct
  source 1..75: mol_type = other DNA
tggtgccgctttgtatgtcgcccagccatcgttgatggtgcaaaaaggaatcgccggaacctactgcaaaacgcc

SEQ ID NO: 590846 - DNA, 75 bp, synthetic construct
  source 1..75: mol_type = other DNA
acgacaaacgcgttttgtggaagcgagttgggcgcatcaggaaaaatgtcggcttcaaattgcgcgttattacga

SEQ ID NO: 590847 - DNA, 75 bp, synthetic construct
  source 1..75: mol_type = other DNA
ggtggaaagttgtataagggcgaaagcgaggtcggtgacgtcgccggaagtggtcgcgtatcaatggctcatggt

SEQ ID NO: 590848 - DNA, 75 bp, synthetic construct
  source 1..75: mol_type = other DNA
gattgcggcaggagggggaacaatccaaagccttgcatatagccaaaataatgcttgaatccggagtccctcttg

SEQ ID NO: 590849 - DNA, 75 bp, synthetic construct
  source 1..75: mol_type = other DNA
aacgattttatcgacggtgtggccgaacgttcaccgaaacacaaggagagtttaatgactattgcggaaagattg

SEQ ID NO: 590850 - DNA, 75 bp, synthetic construct
  source 1..75: mol_type = other DNA
gatggagtctctgcgatttgatgcgcatgagttgctgattatccatcttgcgcgccatgttctcgtgtacgacgc

SEQ ID NO: 590851 - DNA, 75 bp, synthetic construct
  source 1..75: mol_type = other DNA
aaagattttgaagaaggcgtgtggttgagcgagctttcggacgccattgaaaccagcaaaggcatcctgtctgtg

SEQ ID NO: 590852 - DNA, 75 bp, synthetic construct
  source 1..75: mol_type = other DNA
gggatggtcctggcgatgcagagcgctttccctgcgaagggatggcggctgcgtatttggtacaatgaaaccatt

SEQ ID NO: 590853 - DNA, 75 bp, synthetic construct
  source 1..75: mol_type = other DNA
ggcgtatatggctcccgcgagcatggcgaagcacatattgccgccggggccaaaaaagtgctcttttcacatcct

SEQ ID NO: 590854 - DNA, 75 bp, synthetic construct
  source 1..75: mol_type = other DNA
acttcgtgcggaacaccgcatcgtttctaatgcttcctgtaccacgaattgcataattcccgtcatcaaattgtt

SEQ ID NO: 590855 - DNA, 75 bp, synthetic construct
  source 1..75: mol_type = other DNA
tgatatatcaccgttaactcaatgtgagcccggtgatgtaactgtcaatcattttattggatataaacaaatgga

SEQ ID NO: 590856 - DNA, 75 bp, synthetic construct
  source 1..75: mol_type = other DNA
gatgtacgctactgagtatcttattaaagatgaatgtggatatcttcccacgcagaagttgcttaatgaggtaat

SEQ ID NO: 590857 - DNA, 75 bp, synthetic construct
  source 1..75: mol_type = other DNA
caacaaaccgtagaaatctacagctggctggcttgtggcgcgggtttcattgatgttagcttatgccaaaacctg

SEQ ID NO: 590858 - DNA, 75 bp, synthetic construct
  source 1..75: mol_type = other DNA
gctggtcgccacctctgaactcgaaatggaacggatgcgcgcgttgtgggaacgcacggcggcaaacggtatcga

SEQ ID NO: 590859 - DNA, 75 bp, synthetic construct
  source 1..75: mol_type = other DNA
aggcaaaattcttgacgatctgtgtgcgaatcagctgcaaccgctgctgttgaagacgctgctaaaccgcgttga

SEQ ID NO: 590860 - DNA, 75 bp, synthetic construct
  source 1..75: mol_type = other DNA
cactatttccgccacccgctggcgcgtcgcccgatgcgctttgccgcgccgccgagcaaaaacgtcagcaaagat

SEQ ID NO: 590861 - DNA, 75 bp, synthetic construct
  source 1..75: mol_type = other DNA
aatattgcccgtctgtatgaaagtagactatccgtacagaatatagaacgtctgggcaacacaaataaaattcgg

SEQ ID NO: 590862 - DNA, 75 bp, synthetic construct
  source 1..75: mol_type = other DNA
agcaaaaaatacagacctataagcggaaaagtaataaagaactttttcttaacattgcgccatcattgataggtt

SEQ ID NO: 590863 - DNA, 75 bp, synthetic construct
  source 1..75: mol_type = other DNA
aattctgtacaggagtcccggctgaatgtttacatggcggggaatcgtaatattgaaaggtataagagtggtttg

SEQ ID NO: 590864 - DNA, 75 bp, synthetic construct
  source 1..75: mol_type = other DNA
aacctgtgcggcaaaatgcgtaaatcgctgggttccaagcgcaacctgatgggcgaagacgatatcaaactgatc

SEQ ID NO: 590865 - DNA, 75 bp, synthetic construct
  source 1..75: mol_type = other DNA
tcagtaatttgttacttgaggaacggatgcgggttgctgtaaatatgttatgttcccggcatggatatggacagg

SEQ ID NO: 590866 - DNA, 75 bp, synthetic construct
  source 1..75: mol_type = other DNA
tgaagagctgcatctatttgtttgtatgcgttctaacgatgcctttatggggctgcctcatgatgtatttgcgtt

SEQ ID NO: 590867 - DNA, 75 bp, synthetic construct
  source 1..75: mol_type = other DNA
tacagcttttcgatgcctcagacttggtgccctcaaaaactgaacagcgagaatacgtagatattccttgtacaa

SEQ ID NO: 590868 - DNA, 75 bp, synthetic construct
  source 1..75: mol_type = other DNA
cacctgctattgctataaagatgctgaggaaattgaatcaattgcgctttttaaagctatgcatctcatggactg

SEQ ID NO: 590869 - DNA, 75 bp, synthetic construct
  source 1..75: mol_type = other DNA
ttaaagcctgatgaatgtgaggctttcaggcaaaaaattagagcatttctccaaagaaatatttcggcagagggt

SEQ ID NO: 590870 - DNA, 75 bp, synthetic construct
  source 1..75: mol_type = other DNA
gcaaataattccagcagatataaaatccaatctttatgtcgagttgcccattcctcatggaatgaggttcaataa

SEQ ID NO: 590871 - DNA, 75 bp, synthetic construct
  source 1..75: mol_type = other DNA
ccgcgacaaggtgattcagtatcaggaagagtgcgatgatgttctctacgaatactggacgaagggcgttgctgt

SEQ ID NO: 590872 - DNA, 75 bp, synthetic construct
  source 1..75: mol_type = other DNA
cgacaaggtaatccagtatcaggaagagtgcgacgatgttctctatgaatactggacgaagggttttgtcgttaa

SEQ ID NO: 590873 - DNA, 75 bp, synthetic construct
  source 1..75: mol_type = other DNA
ccgcgacaaggtaatccagtatcaggaagagtgtgacgatgtgctctatgaatactggactaaaggttttgtcgt

SEQ ID NO: 590874 - DNA, 75 bp, synthetic construct
  source 1..75: mol_type = other DNA
atgctgtaccctaaaaaagcaactagaaacgaacttaaaaattaccttgaaaatttaggttttaaaaggtgtaaa

SEQ ID NO: 590875 - DNA, 75 bp, synthetic construct
  source 1..75: mol_type = other DNA
caaaaattcgcacgttgataaacgaagcgaatctgctgattggttttgtcctggctgatacaggcaaagggaaaa

SEQ ID NO: 590876 - DNA, 75 bp, synthetic construct
  source 1..75: mol_type = other DNA
tgcgtggtcgaaatgaccattcagctaccaggggacacccagcgtcgtcctgttgcctgtcttgctctgcggaaa

SEQ ID NO: 590877 - DNA, 75 bp, synthetic construct
  source 1..75: mol_type = other DNA
ataccatcccggaaaacctttcagcccagttggccaacatgctacttccggataccaatccttatccgttcagac

SEQ ID NO: 590878 - DNA, 75 bp, synthetic construct
  source 1..75: mol_type = other DNA
ccttctatcctgaaagaggccgtaacgctggcttctccagcggcacgtattgtattgatgggtttctccagtgaa

SEQ ID NO: 590879 - DNA, 75 bp, synthetic construct
  source 1..75: mol_type = other DNA
gtggtaacggacaaggcagttccatgatcatgaaaatgaaagtggaccagtttttaacccagtcgaacatcgacc

SEQ ID NO: 590880 - DNA, 75 bp, synthetic construct
  source 1..75: mol_type = other DNA
atatctgggctgtttcaaataaggttaaaagtgaatggaatgagctttacaatattaattcacataaaattaaag

SEQ ID NO: 590881 - DNA, 75 bp, synthetic construct
  source 1..75: mol_type = other DNA
cctgatgtgcggtattagcacattgatacctcagtatctggtggctgttaatcttggcgcagaactcccggcttt

SEQ ID NO: 590882 - DNA, 75 bp, synthetic construct
  source 1..75: mol_type = other DNA
ttacagccgtatcgacggtgcaactgggggtcgtttgcgggagagggcgaaatcctacgctaaggctttggccaa

SEQ ID NO: 590883 - DNA, 75 bp, synthetic construct
  source 1..75: mol_type = other DNA
atggcaattttagcaatcattgcagttatcgccctgggtgggtacgcctgcgggtttattaaagcccgtgagctg

SEQ ID NO: 590884 - DNA, 75 bp, synthetic construct
  source 1..75: mol_type = other DNA
ttacccagcggtcagacaacctcgcttacgcgttatcaaagtatcgataataaatccggacagacacaagatgat

SEQ ID NO: 590885 - DNA, 75 bp, synthetic construct
  source 1..75: mol_type = other DNA
atgacattgcagaacgtcaattggcatctcaagcagccgctgagtatgagcaaaacagacaatccacaataagtg

SEQ ID NO: 590886 - DNA, 75 bp, synthetic construct
  source 1..75: mol_type = other DNA
tatgatttaacggtgtttcataaacggattaccgaacttctgacacaaaacaaaatgagactttccagtaccgga

SEQ ID NO: 590887 - DNA, 75 bp, synthetic construct
  source 1..75: mol_type = other DNA
catcttaatagctcatggcaatatgaaatgttattttcaaacagtcatgaaaaaaaaacctaatcgattgtccgg

SEQ ID NO: 590888 - DNA, 75 bp, synthetic construct
  source 1..75: mol_type = other DNA
atggttcaggagggcaaggtggggtggaaagggttgttgcccaacaatgtaacattcttaaaaatttgggggtta

SEQ ID NO: 590889 - DNA, 75 bp, synthetic construct
  source 1..75: mol_type = other DNA
tgcttgaagtcttactggcgatgagtattttcgccactgttgcgctggctttaatgagcagcatgcaagggcaac

SEQ ID NO: 590890 - DNA, 75 bp, synthetic construct
  source 1..75: mol_type = other DNA
caaagctggacttcaatgactttattgatgcaatggcagggctggtttgcgcggtattcatcgtcctgacttgta

SEQ ID NO: 590891 - DNA, 75 bp, synthetic construct
  source 1..75: mol_type = other DNA
atctctctgcctttacagggtcttacagttccacactggcggtgagtcgttacggaattaatctgggagccagtg

SEQ ID NO: 590892 - DNA, 75 bp, synthetic construct
  source 1..75: mol_type = other DNA
tggcagttatcgcataccttttataacgattcattcagccataaagaacttggcgtgaccgtcggtggtctgaac

SEQ ID NO: 590893 - DNA, 75 bp, synthetic construct
  source 1..75: mol_type = other DNA
ttgaaaataactatcttcgccagacttctgcgcaaagtatttctgaaaccgtacagcttagcgcgtctcgcgctt

SEQ ID NO: 590894 - DNA, 75 bp, synthetic construct
  source 1..75: mol_type = other DNA
cagtgaaagaaaaactatcgcagcccttagctcgccacggtgaactggcttgtggttttgtacgtactgattcag

SEQ ID NO: 590895 - DNA, 75 bp, synthetic construct
  source 1..75: mol_type = other DNA
gacagcaggagtatatcgaggtttattttgcagggaaaagtctcggtaaatattatgcgatggttaatcttgata

SEQ ID NO: 590896 - DNA, 75 bp, synthetic construct
  source 1..75: mol_type = other DNA
aaaccagacgcaaagccagcagggtacgccggtaatgatcctgctttcgcgcaattctcgtgttgatgcttatcg

SEQ ID NO: 590897 - DNA, 75 bp, synthetic construct
  source 1..75: mol_type = other DNA
tgcggttatgtacgtactgactcagggtgtggttttctgaataccgatacgctggaaataatctataatgatgaa

SEQ ID NO: 590898 - DNA, 75 bp, synthetic construct
  source 1..75: mol_type = other DNA
atgaatggttatttaacctctatggcaggtctgctacaggtattactgttgttctgggggggggggggggctggt

SEQ ID NO: 590899 - DNA, 75 bp, synthetic construct
  source 1..75: mol_type = other DNA
gatatcagaggtggataatgaactttatcttcgtctggtggcaaatggctgtggagggttgttctctaaggactg

SEQ ID NO: 590900 - DNA, 75 bp, synthetic construct
  source 1..75: mol_type = other DNA
gtacgcctgccattacatccgcaatatgagctctacgcagggctggcgaatgccgatgatgtgagtgctttcgag

SEQ ID NO: 590901 - DNA, 75 bp, synthetic construct
  source 1..75: mol_type = other DNA
tgatcctggcgagtctcagcccggcaaaggcagcattaactaaaattcccgctgggtttgaggttattgcgcagg

SEQ ID NO: 590902 - DNA, 75 bp, synthetic construct
  source 1..75: mol_type = other DNA
aaatgtctacgctaccgtatctgatagttatgaccgtaagaatcatgatcatctttcggcctttacgggcactta

SEQ ID NO: 590903 - DNA, 75 bp, synthetic construct
  source 1..75: mol_type = other DNA
tgatcctggcgagtctcagcccggcagaggcggcattaaccaaaatccccgcagggtttgaggttattgctcagg

SEQ ID NO: 590904 - DNA, 75 bp, synthetic construct
  source 1..75: mol_type = other DNA
cgctatctcgatcattggcttaatttttgatcctgcagtcaaataccacggtctggtggcaatgccgagtttgac

SEQ ID NO: 590905 - DNA, 75 bp, synthetic construct
  source 1..75: mol_type = other DNA
tctggcggatgcagaaaaggggaattgatccgtttaaagtagagaaaacccctcccgccgtagacgaaaggggtt

SEQ ID NO: 590906 - DNA, 75 bp, synthetic construct
  source 1..75: mol_type = other DNA
gacgaacgtcgcttcaaaaagcagctttcggtctatagcgccgttattggcgtacatttttttcttctgggcacc

SEQ ID NO: 590907 - DNA, 75 bp, synthetic construct
  source 1..75: mol_type = other DNA
tgccgcgtacccggcgggatcttgttggtgattattgcaatttcgatcatcggcttaatctttgacccagcggtg

SEQ ID NO: 590908 - DNA, 75 bp, synthetic construct
  source 1..75: mol_type = other DNA
atatcgttaccggtattatgctgggctttgtgacgctggttgtaggtcgcgtctttgctcgcgaatggcaaaaac

SEQ ID NO: 590909 - DNA, 75 bp, synthetic construct
  source 1..75: mol_type = other DNA
tgctactgattgccgctaacggcgttggtatggttatcaaaaacccgattgaaggcttgccggtggcgctcggtg

SEQ ID NO: 590910 - DNA, 75 bp, synthetic construct
  source 1..75: mol_type = other DNA
gtgcggagttcccgattgtgccaggtgaaacgggcggtcgtttaaatccttcagaaattcgcgatgccctgacgg

SEQ ID NO: 590911 - DNA, 75 bp, synthetic construct
  source 1..75: mol_type = other DNA
taatgaacaacttttggggtcgttttacctcaatagcggttcgcaatttattgataccaattcctttccgccagg

SEQ ID NO: 590912 - DNA, 75 bp, synthetic construct
  source 1..75: mol_type = other DNA
tacatcagcaagacattaatttgctggtacaggacgattaccaatcgttgtcaattcaaggtaatggtgcgcagg

SEQ ID NO: 590913 - DNA, 75 bp, synthetic construct
  source 1..75: mol_type = other DNA
atgctgactgacgcgcagcgtgaaaccattttttcccgctggccaggtcctgtcacctttgtctttcccgcgcct

SEQ ID NO: 590914 - DNA, 75 bp, synthetic construct
  source 1..75: mol_type = other DNA
gctttgtgccaggcttatggtaaaccgctggtttctaccagtgccaacttgagtggattgccgccttgtcgaaca

SEQ ID NO: 590915 - DNA, 75 bp, synthetic construct
  source 1..75: mol_type = other DNA
gcgcggcgttcccggttgtgcctggtgaaacgggggggcgtttaaatccttcagaaatccgcgatgccctgacgg

SEQ ID NO: 590916 - DNA, 75 bp, synthetic construct
  source 1..75: mol_type = other DNA
acgagacacagtattacggtggtgtgactgccggtggggatggcgggctgaagaataacggcaccacggaatggg

SEQ ID NO: 590917 - DNA, 75 bp, synthetic construct
  source 1..75: mol_type = other DNA
tctgtggcggtgatgtcttctgcctcgatggcgaatgtgataaggcgcagagcggaaaaagcagtgattttggtg

SEQ ID NO: 590918 - DNA, 75 bp, synthetic construct
  source 1..75: mol_type = other DNA
tcagaactttaagccgcaggagagcattcctggttataacgccagcccggatgagacaaagtattacggtggcgt

SEQ ID NO: 590919 - DNA, 75 bp, synthetic construct
  source 1..75: mol_type = other DNA
tcgaccacgtaaaagtagcggaaggtttaggttgtaaagcaattcgcgttttcaaaccggaagatattgcaccag

SEQ ID NO: 590920 - DNA, 75 bp, synthetic construct
  source 1..75: mol_type = other DNA
gtcagcaaaatggcggttacagttcgtgaagcggcgctggtgcctcgtgtgctgcaacaggcgtttcacctgatg

SEQ ID NO: 590921 - DNA, 75 bp, synthetic construct
  source 1..75: mol_type = other DNA
cacagagtcatttatgaacaagccgaaagacattctgtcaccggatgcgccatttattcagactggccgggatgt

SEQ ID NO: 590922 - DNA, 75 bp, synthetic construct
  source 1..75: mol_type = other DNA
agcagtgcagtgcgcagcagataaaccgcagtgagttcacaaactatacctgtgagcgggacacgatggtggagg

SEQ ID NO: 590923 - DNA, 75 bp, synthetic construct
  source 1..75: mol_type = other DNA
atgaaacgtcttctgccattgttgctggggctggcagtcagtgtggcacaggctgacagcaacagtgattaccgg

SEQ ID NO: 590924 - DNA, 75 bp, synthetic construct
  source 1..75: mol_type = other DNA
gggctttctcagggatgggaattattaggaacaacaggcttcgtcgccttttgcagtttttatgccgcaggcggc

SEQ ID NO: 590925 - DNA, 75 bp, synthetic construct
  source 1..75: mol_type = other DNA
ttgcctcccgcacgggaatggtgacaggaaagtctatgaatcgcttgtcagtggtgcttccacctttacgctgaa

SEQ ID NO: 590926 - DNA, 75 bp, synthetic construct
  source 1..75: mol_type = other DNA
tggcagactttcttcgcgaggggcatttctggcggcatctgaagaaaatgcgtcagcattatgctcaacgtcggc

SEQ ID NO: 590927 - DNA, 75 bp, synthetic construct
  source 1..75: mol_type = other DNA
gaatatcgtgaggtgacgataccgcactcacagttccggttcagtatgaacggtctgaaactggtgttcagtgtc

SEQ ID NO: 590928 - DNA, 75 bp, synthetic construct
  source 1..75: mol_type = other DNA
gtactgggaaccccactgagctggaatgccaaatactcagcagatgcctcatttacaccagtacagaaaacactg

SEQ ID NO: 590929 - DNA, 75 bp, synthetic construct
  source 1..75: mol_type = other DNA
atgaatacagatgaaaacatggtattttatctgacaaactccgatcttgtttatagctatgcacacaaaatagta

SEQ ID NO: 590930 - DNA, 75 bp, synthetic construct
  source 1..75: mol_type = other DNA
ttcatagcatcagttaaaccaagaacagaaagccaagtaagacaaatacctgatagcaaaataaaagaattcttt

SEQ ID NO: 590931 - DNA, 75 bp, synthetic construct
  source 1..75: mol_type = other DNA
agttaaaagacaaacattacgttgaacttttctggaacaaagtttattacttttgggttttctttgaacatacag

SEQ ID NO: 590932 - DNA, 75 bp, synthetic construct
  source 1..75: mol_type = other DNA
cgtcctgggtggtgtcacttggcggattagcatcatatggcgcgatctttactggattatggacctgcagaatga

SEQ ID NO: 590933 - DNA, 75 bp, synthetic construct
  source 1..75: mol_type = other DNA
tgcgatgacaacacacaggattatcccacgaaaactgacctgggcgggcgcagtcatttgctggtatcaacggag

SEQ ID NO: 590934 - DNA, 75 bp, synthetic construct
  source 1..75: mol_type = other DNA
attcctctcgtcaccggcgctgacctgctggcgcagtacgcctatatgggcctcggatttaagctggtggtggtc

SEQ ID NO: 590935 - DNA, 75 bp, synthetic construct
  source 1..75: mol_type = other DNA
cgccttttactccgaagaaggtgcctgtctgcatgaatatgccacgtactcctgtgagtcaaaaacatccgggaa

SEQ ID NO: 590936 - DNA, 75 bp, synthetic construct
  source 1..75: mol_type = other DNA
tgagtgtgggcgagttctgttcgaaaaaggtgctgggcgtctgcctgcagaaaaagcgcagctactgccagtttg

SEQ ID NO: 590937 - DNA, 75 bp, synthetic construct
  source 1..75: mol_type = other DNA
gtgtttgctgacagcaacagtgattaccgggctggttctgattttgctcaccagatcaaaggacagggaagcagc

SEQ ID NO: 590938 - DNA, 75 bp, synthetic construct
  source 1..75: mol_type = other DNA
aaggaagatgtgggatagtcatttaattattaaaccattagcaaaaattgcaggcgttacgagaaaattaactac

SEQ ID NO: 590939 - DNA, 75 bp, synthetic construct
  source 1..75: mol_type = other DNA
atgcacagtctggtacctctcttccgaaaaataaaacagtacaggcaagttattatcgtaacgcataacgctaac

SEQ ID NO: 590940 - DNA, 75 bp, synthetic construct
  source 1..75: mol_type = other DNA
ggctcatcagtgatgaaattaagaaaatgctgagactgacaccaattcatgaggcgggtgatacagttgcacaac

SEQ ID NO: 590941 - DNA, 75 bp, synthetic construct
  source 1..75: mol_type = other DNA
gtagtggtctggcaagggcgtttctggttactgtcatttattcccggtggctttctcggcatgacgctgtttttt

SEQ ID NO: 590942 - DNA, 75 bp, synthetic construct
  source 1..75: mol_type = other DNA
aacgttgattcgctggtgaaatcgttcctcggcaccaaacagcacggcattatcgagttttgcctgctggtgttc

SEQ ID NO: 590943 - DNA, 75 bp, synthetic construct
  source 1..75: mol_type = other DNA
tagaagcaaatttaaattatcccgtcggctccagttttaacaccatcaccaaagatttaatcggtaacacctgga

SEQ ID NO: 590944 - DNA, 75 bp, synthetic construct
  source 1..75: mol_type = other DNA
tgattcgctggtaaaatcgttcctcggcaccaaacagcatggcattattgagttttgcctgctggtgttctcaaa

SEQ ID NO: 590945 - DNA, 75 bp, synthetic construct
  source 1..75: mol_type = other DNA
cgctactgccgacgcgcatcaggcaacgcgcattgatgcggagttgtcgatggctgtattaagggaatatagaga

SEQ ID NO: 590946 - DNA, 75 bp, synthetic construct
  source 1..75: mol_type = other DNA
gtggcgcagggctggctgattcggcgggggcaggcaggtacctttgtcagtgatcagatacgtccacaaaaatcc

SEQ ID NO: 590947 - DNA, 75 bp, synthetic construct
  source 1..75: mol_type = other DNA
gatccactctggctggctgctgcaaacacatctggcgcaaccggtggcaagatgatttctccccagagtattgct

SEQ ID NO: 590948 - DNA, 75 bp, synthetic construct
  source 1..75: mol_type = other DNA
gcgaaatgttctggccggtgtcagtgatgataaacgtatccaggtacttcttatctcatggtgttttggcggatt

SEQ ID NO: 590949 - DNA, 75 bp, synthetic construct
  source 1..75: mol_type = other DNA
ccctgtcatgcctgttaaacgtatttgtcagtacggtaaaacagctcaaaaactccattattgctatttctgcaa

SEQ ID NO: 590950 - DNA, 75 bp, synthetic construct
  source 1..75: mol_type = other DNA
atcacgtcattgttcctcgggctgaagattatctcctttgtcattgtgtttggctctttcttcttccaggtcgat

SEQ ID NO: 590951 - DNA, 75 bp, synthetic construct
  source 1..75: mol_type = other DNA
gggatgtttgctttacctgttgaccttgccggagcctggtttttttggggcgcttttattcttattatcgcctgg

SEQ ID NO: 590952 - DNA, 75 bp, synthetic construct
  source 1..75: mol_type = other DNA
cctggaacattatcagcggtattaccgttgccttcgttctctatatcctcacttatgcctatatctctgctaatg

SEQ ID NO: 590953 - DNA, 75 bp, synthetic construct
  source 1..75: mol_type = other DNA
gcaacgcgcattgatgcggagctgtcgatgatggcattgcgggaatatagagaaaagtttccggcatggcaggat

SEQ ID NO: 590954 - DNA, 75 bp, synthetic construct
  source 1..75: mol_type = other DNA
aataattcctctgacggtttcggtaaggcggtctcagcacttgctgcggtaacggctgccgcaaaagatgtggcc

SEQ ID NO: 590955 - DNA, 75 bp, synthetic construct
  source 1..75: mol_type = other DNA
tttttaacccaatcaaacattgaccacacggtaaatagctgcgcggttggcgaatacaaaagcgagttgagcggc

SEQ ID NO: 590956 - DNA, 75 bp, synthetic construct
  source 1..75: mol_type = other DNA
atgctctctcctgctgactttggcccgaaactgctggaagtgatcaaagagcatttcccgcaggacgtgaagtaa

SEQ ID NO: 590957 - DNA, 75 bp, synthetic construct
  source 1..75: mol_type = other DNA
ccacacaggaccctttgctcaatactcaaatcacttttatgaacaccacggtgaacgtcacctggacggcatcgg

SEQ ID NO: 590958 - DNA, 75 bp, synthetic construct
  source 1..75: mol_type = other DNA
gcgggaacggcaattgtaccggtacgctggataacgtcatctttaaccagttagtcggggggagttctcgtttca

SEQ ID NO: 590959 - DNA, 75 bp, synthetic construct
  source 1..75: mol_type = other DNA
gagatcacgatacctcattctcagtttcgcttcagtcgggatggtaaaaaactggtgttcagttttacgtcccct

SEQ ID NO: 590960 - DNA, 75 bp, synthetic construct
  source 1..75: mol_type = other DNA
gttacccgacatctggcaaacgctgcccggactgtggctctcacgacaccattccctgggccgatggctggatgt

SEQ ID NO: 590961 - DNA, 75 bp, synthetic construct
  source 1..75: mol_type = other DNA
atgctgatggctatgactatggccttggtctgccgctgatcgccatgattacggtggtgctgctctcgacgattt

SEQ ID NO: 590962 - DNA, 75 bp, synthetic construct
  source 1..75: mol_type = other DNA
cccgcgctctctgcactggcaggctttgctgacggctcgcgctattgaaaatcaggcgtatgtggcgggatgtaa

SEQ ID NO: 590963 - DNA, 75 bp, synthetic construct
  source 1..75: mol_type = other DNA
atccccagctataacgcgaatccggacgagacaaaatattacggtggcgtgactgccggcggggatggcggcctg

SEQ ID NO: 590964 - DNA, 75 bp, synthetic construct
  source 1..75: mol_type = other DNA
accgatgatgattctgccagcaatcaacactgacgcgagcaaacatgagaaagaacagataagtcgtactgttca

SEQ ID NO: 590965 - DNA, 75 bp, synthetic construct
  source 1..75: mol_type = other DNA
aggcgggaatgctgctggtggatcaggcgcgtaccgtgctgcgtgaggtgaaagtccttaaagagatggcaagcc

SEQ ID NO: 590966 - DNA, 75 bp, synthetic construct
  source 1..75: mol_type = other DNA
atctggtggatgccgggaaacagcagcgcggggaaggttttgaactgcgtaccgatctgtggggcgcggtgcggg

SEQ ID NO: 590967 - DNA, 75 bp, synthetic construct
  source 1..75: mol_type = other DNA
tgccctgcgcaccctgcacggcgtcattaccggctttaaacatctctcatcgtcacaggacgaagcccgttacga

SEQ ID NO: 590968 - DNA, 75 bp, synthetic construct
  source 1..75: mol_type = other DNA
attttaatagcaattccaaacaaacaattgatgtcagattattgaatcaaaatatagatatgattttgggaggcg

SEQ ID NO: 590969 - DNA, 75 bp, synthetic construct
  source 1..75: mol_type = other DNA
gccggtacagggaatgccggtgcaggcccccctgcgcaccctgtacggggtcattaccggttttaaacatctctc

SEQ ID NO: 590970 - DNA, 75 bp, synthetic construct
  source 1..75: mol_type = other DNA
taaaggcgcagtatcggtacaggcgcagcacgatctgatggagttactggcgaaaaaatcgatagagatcgtcag

SEQ ID NO: 590971 - DNA, 75 bp, synthetic construct
  source 1..75: mol_type = other DNA
cacgcgggactacaactaccgcaccgccacagcggagatgatgacagagcagcatgacgccaccgggggcgataa

SEQ ID NO: 590972 - DNA, 75 bp, synthetic construct
  source 1..75: mol_type = other DNA
aacggcgagcgtaactcccagaagtcactagcagaatggattgaagactgggccgactatcttgtgggctttgat

SEQ ID NO: 590973 - DNA, 75 bp, synthetic construct
  source 1..75: mol_type = other DNA
gctaacgggaaatatactgcgcaggatgccagcacgacgcgaaaaggccttgtccagctcagtagcgccaccaac

SEQ ID NO: 590974 - DNA, 75 bp, synthetic construct
  source 1..75: mol_type = other DNA
atgaagccgggtccttttttcatccaggacaatacctttatcgatgctgataatatgcgtgccgtcagtgtactt

SEQ ID NO: 590975 - DNA, 75 bp, synthetic construct
  source 1..75: mol_type = other DNA
gaagtacggctggagccgcgtatggcgctgctggcccgcagttgccagaacgccatttaccagaaccagacagtg

SEQ ID NO: 590976 - DNA, 75 bp, synthetic construct
  source 1..75: mol_type = other DNA
atgattctaggcaatgattacgttgatttgatccctctgttccagacacacagcacgcgtaacttcctgctctct

SEQ ID NO: 590977 - DNA, 75 bp, synthetic construct
  source 1..75: mol_type = other DNA
taaaactgatgatgtgttaattgagtggggcaagctgtttaacgtatcagctatgaaagccactgtgaacgcttc

SEQ ID NO: 590978 - DNA, 75 bp, synthetic construct
  source 1..75: mol_type = other DNA
catcagccattgaatgccaatacaagcgcagcgctgaaatacccggagaattttgcgggtacactggttgtgctt

SEQ ID NO: 590979 - DNA, 75 bp, synthetic construct
  source 1..75: mol_type = other DNA
ctgcgtatgcaaaaacgctgcatccttttttctacacaccgcaacctgaaaacaaggttgaggatatatatcggt

SEQ ID NO: 590980 - DNA, 75 bp, synthetic construct
  source 1..75: mol_type = other DNA
atgttattcagaaagaagtgcctttttatggcgctgatattcattgctggcagcgccggcgccggctttattgca

SEQ ID NO: 590981 - DNA, 75 bp, synthetic construct
  source 1..75: mol_type = other DNA
cggttaaggcggtgaatgataatgcgaatggtcgcgtcccgtctgagcgaaaagttaacggacattcgctggccg

SEQ ID NO: 590982 - DNA, 75 bp, synthetic construct
  source 1..75: mol_type = other DNA
tgaaaacgtggactggaataatcagcccacaggagatgactgatccgcttcagactgctttcgttgctccgtcag

SEQ ID NO: 590983 - DNA, 75 bp, synthetic construct
  source 1..75: mol_type = other DNA
cagcgagccgccggactggtcgttccaaagcccgcgcgtgattatccgccatcaggatggcagggcatcgccaat

SEQ ID NO: 590984 - DNA, 75 bp, synthetic construct
  source 1..75: mol_type = other DNA
tatccggcgacacgcgtaccgaaaactggttcaactcaccagaggtcgggaataccggttccggtaccgccgggc

SEQ ID NO: 590985 - DNA, 75 bp, synthetic construct
  source 1..75: mol_type = other DNA
acacgggcataccatcaccgttaacgctacgggtaacgcagaaaacaccgtaaaaaacatcgcatttaactatat

SEQ ID NO: 590986 - DNA, 75 bp, synthetic construct
  source 1..75: mol_type = other DNA
tcacacagtaaatattggcgcacacactcatacggtaggaattggcgcacacacacactccgttgcgataggttc

SEQ ID NO: 590987 - DNA, 75 bp, synthetic construct
  source 1..75: mol_type = other DNA
aaccacgaatagcgccggggatcattcacacaatattcctgttggcaacactggcgctggtaatggtgtttcggc

SEQ ID NO: 590988 - DNA, 75 bp, synthetic construct
  source 1..75: mol_type = other DNA
gtcacaccattacgatcgccgcgtcgggtaatgcagaaaacaccatcaaaaacatcgcctttaactatatcgtga

SEQ ID NO: 590989 - DNA, 75 bp, synthetic construct
  source 1..75: mol_type = other DNA
gttacggtggtgactccatcgggggtaaacaacgcgtacaggtatcaggaaccaaccaggtgtcaagctctgcgg

SEQ ID NO: 590990 - DNA, 75 bp, synthetic construct
  source 1..75: mol_type = other DNA
attggtgctcacagccattccattgcgattggcgcgcatagtcataccgtcactgtaagtgccacaggtaattca

SEQ ID NO: 590991 - DNA, 75 bp, synthetic construct
  source 1..75: mol_type = other DNA
ttgggtacgaaaaccacatcttcgtttgattacggtactaaatcaacgaataacacaggtgcacatacccacaat

SEQ ID NO: 590992 - DNA, 75 bp, synthetic construct
  source 1..75: mol_type = other DNA
gcaacgtaatctggcggtgctgaaagataaaaatccggcgaagtatgtggcggcggtgaataagctagagagggt

SEQ ID NO: 590993 - DNA, 75 bp, synthetic construct
  source 1..75: mol_type = other DNA
tctgccgcatgtggcgaaggagtcctgtttcgcgttgaaaggcggcaccgcaatcaatttgtttgtgcaggattt

SEQ ID NO: 590994 - DNA, 75 bp, synthetic construct
  source 1..75: mol_type = other DNA
ctggaatcgcttctgtcagtaacgactttgctgccgcaggcgttgaagtcacatcttacggatctggatcgcgag

SEQ ID NO: 590995 - DNA, 75 bp, synthetic construct
  source 1..75: mol_type = other DNA
taatggccgcttctgcaccgggtattcttgttgctgggttggcggtgtttattttgatgagtcggagatcaagaa

SEQ ID NO: 590996 - DNA, 75 bp, synthetic construct
  source 1..75: mol_type = other DNA
tttgcgctttcgctatgggcgccgctggcagcgtaaggtgcgactcctgctggtgatgggggatccggatgtggt

SEQ ID NO: 590997 - DNA, 75 bp, synthetic construct
  source 1..75: mol_type = other DNA
ttcggaccggaaggtaccgtgaaaggtgtggacgaagcgttttccacactggcgttacacctgcagaaagcagga

SEQ ID NO: 590998 - DNA, 75 bp, synthetic construct
  source 1..75: mol_type = other DNA
aaccggcggctttctctcctccggcatggagttcgtccacaaacaaaaccccaatgccgtgatgcgcgcgtttgg

SEQ ID NO: 590999 - DNA, 75 bp, synthetic construct
  source 1..75: mol_type = other DNA
aaggtcaggacgtcagccgcattaagctgggtaacaccctctctaacgaccagttaccgctggatcaattcgact

SEQ ID NO: 591000 - DNA, 75 bp, synthetic construct
  source 1..75: mol_type = other DNA
gcctgaccattgagcgcccgctgcggttatctgcacaggtgactgatgaagcgattgcgactctgcgctttgcgc

SEQ ID NO: 591001 - DNA, 75 bp, synthetic construct
  source 1..75: mol_type = other DNA
ctttgctgccgcaggcgttgaagtcacatcttacggatctggatcgcgagttcttgctcagttttaagcaaaaca

SEQ ID NO: 591002 - DNA, 75 bp, synthetic construct
  source 1..75: mol_type = other DNA
tcaaccgctgtacggtgcgtttgagtaccacggaaaggttgtggaatttgagccggatggcgacctgcgtgataa

SEQ ID NO: 591003 - DNA, 75 bp, synthetic construct
  source 1..75: mol_type = other DNA
atgcgtaaatcgctgggatcaaaacgtaatattctcggggaggaggatattggtttaatcacccgcacgtttggc

SEQ ID NO: 591004 - DNA, 75 bp, synthetic construct
  source 1..75: mol_type = other DNA
aacagccgtggcggtagggcgtctgggggctatgagcggtccgttactggccgggaaaatgctggcattaggcac

SEQ ID NO: 591005 - DNA, 75 bp, synthetic construct
  source 1..75: mol_type = other DNA
cgcctgaagcgcaggtaccgccgcaacatgctccgcgtccaacgcagccggtgcagcaacccgtgcagcagcctg

SEQ ID NO: 591006 - DNA, 75 bp, synthetic construct
  source 1..75: mol_type = other DNA
tcttatggtgatgaactgcaaaacttcaagctgatgctgcaatctgcgcagcatatcgctgatgaagtcggtggc

SEQ ID NO: 591007 - DNA, 75 bp, synthetic construct
  source 1..75: mol_type = other DNA
gaaatgatttggcgggggtggaattttgaaaaaggggccgcctactggctcaaccgctacatcgaattctatggc

SEQ ID NO: 591008 - DNA, 75 bp, synthetic construct
  source 1..75: mol_type = other DNA
gcggcgattccgtggccttctgattcagtgcctacaggctatgccgttatgcaggggcagacttttgataaaaca

SEQ ID NO: 591009 - DNA, 75 bp, synthetic construct
  source 1..75: mol_type = other DNA
acatttacgcggaatatgttgctaaacaccacattgctttccagcgtactaaagaaagcgtgctggctgcttccc

SEQ ID NO: 591010 - DNA, 75 bp, synthetic construct
  source 1..75: mol_type = other DNA
cctgtagacgatgcaaacgtggtgtttaatgtgcgttctctgctgcctggtgtaactactttcaccattccagga

SEQ ID NO: 591011 - DNA, 75 bp, synthetic construct
  source 1..75: mol_type = other DNA
atgaacaaatccgatgaaatgattcaggaactacccgatggggtattcacccgcgagtgtgctgaaaccgttgtt

SEQ ID NO: 591012 - DNA, 75 bp, synthetic construct
  source 1..75: mol_type = other DNA
tggggcatgcggtgcaggctttccatttaactaacgacacactgggcgcgtttatgcgtgataacgactttgaca

SEQ ID NO: 591013 - DNA, 75 bp, synthetic construct
  source 1..75: mol_type = other DNA
gccgccgtgctgatgttagtgtttaaagatccgattctcggtctggtagccggtattcagctttctgcgaacgat

SEQ ID NO: 591014 - DNA, 75 bp, synthetic construct
  source 1..75: mol_type = other DNA
taccagatgacaccttcaccagagcacaggctgaagcagtggcggcacagtttgaaaatgtcgccatcgaagacg

SEQ ID NO: 591015 - DNA, 75 bp, synthetic construct
  source 1..75: mol_type = other DNA
acctgtagacgtacaaggccgcagagtgcagggaacggactacgagcaaaccgttaccgacctgtacaccgaata

SEQ ID NO: 591016 - DNA, 75 bp, synthetic construct
  source 1..75: mol_type = other DNA
ttaccacgttatgcacgaaaacagcgcattaccagtgaaccatgcgttaggtatgcaggtgaagatcaccatcac

SEQ ID NO: 591017 - DNA, 75 bp, synthetic construct
  source 1..75: mol_type = other DNA
tgcatggttaacctgggcttcagcctgccggcttttggtaaaacggcacagggaacggcgaaaaaagatgagaag

SEQ ID NO: 591018 - DNA, 75 bp, synthetic construct
  source 1..75: mol_type = other DNA
gacggacgtcagccgttcgcctggctgtatggtcaatctggggggcttcagtatcaatctcggcaagaccggtat

SEQ ID NO: 591019 - DNA, 75 bp, synthetic construct
  source 1..75: mol_type = other DNA
gtgccctgatgttgtgggggtacagcctcagtgcggctgctgatccctcctgtgagggccggtttgttaacccga

SEQ ID NO: 591020 - DNA, 75 bp, synthetic construct
  source 1..75: mol_type = other DNA
gaccgacgtcagccgatcacctggctgcatggtgaatctggggggattcagtatcaatctcggtaaaacagggat

SEQ ID NO: 591021 - DNA, 75 bp, synthetic construct
  source 1..75: mol_type = other DNA
ggaaaaaatccgcccaacacaaagaaaaacttcggctacctgatgtggcgtaaacgtaactgtgtattcctgtaa

SEQ ID NO: 591022 - DNA, 75 bp, synthetic construct
  source 1..75: mol_type = other DNA
cctgcgcagcagatgcgattgccagcgcctttaatatgcctctcgatgttctgttctggtgtgccggttcgcagg

SEQ ID NO: 591023 - DNA, 75 bp, synthetic construct
  source 1..75: mol_type = other DNA
atgaaaaaatttgctttactggcgggcctgtttgttttcgcaccaatgacctgggcgcaggactacaatattaaa

SEQ ID NO: 591024 - DNA, 75 bp, synthetic construct
  source 1..75: mol_type = other DNA
actgactccatgagcagcgttttctctggcctggtgggtgcagctccggcagcggtatacatcgagtctgcggcg

SEQ ID NO: 591025 - DNA, 75 bp, synthetic construct
  source 1..75: mol_type = other DNA
cattgagcgatgaaaacggcaattcactgattggcagcctggacattatgggcgcgctgaatcctgtagtcctgc

SEQ ID NO: 591026 - DNA, 75 bp, synthetic construct
  source 1..75: mol_type = other DNA
aaatccatgcccttatttctgctcagggtgttaatgaaattatcagtaagattggtgccgatgctgtggcattgc

SEQ ID NO: 591027 - DNA, 75 bp, synthetic construct
  source 1..75: mol_type = other DNA
aggctggggtatggatgcctttaatcactccaacccatttgagagccatgtcatctatgtgcgtgactaccgcaa

SEQ ID NO: 591028 - DNA, 75 bp, synthetic construct
  source 1..75: mol_type = other DNA
atcaaatccgtgccaccgcgcatgtggagtgccgtaaagatgccgaggtgatcgacgaaatcccgatggcgtata

SEQ ID NO: 591029 - DNA, 75 bp, synthetic construct
  source 1..75: mol_type = other DNA
ctgaccacgatcctgaatccggaagccgtactgtttgccaacccgatcgctcagggggcctgtgcggccgatgcc

SEQ ID NO: 591030 - DNA, 75 bp, synthetic construct
  source 1..75: mol_type = other DNA
gtatggcggttgcaaagaggaaacagcgctgtaattatggaccctgtggcgggtgatattggtctgattgcgata

SEQ ID NO: 591031 - DNA, 75 bp, synthetic construct
  source 1..75: mol_type = other DNA
aaactggcctcggggccacagccggacaccagtaaccctgcgtctcccatccagatatgctcttatggcgtgtta

SEQ ID NO: 591032 - DNA, 75 bp, synthetic construct
  source 1..75: mol_type = other DNA
aatggctgggtgagcaatgaatccagtccgctgcagtcatccctgctggtcagtgaacggatggcgtttaagctc

SEQ ID NO: 591033 - DNA, 75 bp, synthetic construct
  source 1..75: mol_type = other DNA
atgccgcactttatcgttgaatgcagtgacaacatccgtgaagaagccgacctgccggggctgttcgccaaagtg

SEQ ID NO: 591034 - DNA, 75 bp, synthetic construct
  source 1..75: mol_type = other DNA
acgtcataaactcagcgcggatttactggtgacgcaacatggtgaaggttatttcttagccgctgatgtgtgctg

SEQ ID NO: 591035 - DNA, 75 bp, synthetic construct
  source 1..75: mol_type = other DNA
tgcgacaaagacacatcactggtaagaaaaaatcgtaaagaatcagtacctggaagcaaaagacgacacagtaaa

SEQ ID NO: 591036 - DNA, 75 bp, synthetic construct
  source 1..75: mol_type = other DNA
ggtacaaatacccgctcacctactggctgaacattatcacgtcgatgggctgcctgcagggtggcgacctggata

SEQ ID NO: 591037 - DNA, 75 bp, synthetic construct
  source 1..75: mol_type = other DNA
gacggatgtcacccggtcgccgggatgtatggtcaatctgggaatgacgatcccggaactgggaaaaaccggaca

SEQ ID NO: 591038 - DNA, 75 bp, synthetic construct
  source 1..75: mol_type = other DNA
ttcgcagggcagcatgtaccccttcaacggctgggtgagcaatgaatccagcccgctacagtcctccctgctggt

SEQ ID NO: 591039 - DNA, 75 bp, synthetic construct
  source 1..75: mol_type = other DNA
ggccgactaccttgtgggctttgatgctaatggtgacgccattcaggcaacaaaagcggctgcggctgtccgtaa

SEQ ID NO: 591040 - DNA, 75 bp, synthetic construct
  source 1..75: mol_type = other DNA
gatgagaagcaggtgaacggggcgttctatcacgttcactggtacaaatacccgctgacgtactggctgaacatc

SEQ ID NO: 591041 - DNA, 75 bp, synthetic construct
  source 1..75: mol_type = other DNA
gacggatgtcacccggtcaccgggatgcatggttaacctgggcttcagcctgccggcttttggtaaaacggcaca

SEQ ID NO: 591042 - DNA, 75 bp, synthetic construct
  source 1..75: mol_type = other DNA
aggctgtaacaccgctcgcggattcggtgaagatatcaaacatctcggcaactctatttcccgcgcagccagcta

SEQ ID NO: 591043 - DNA, 75 bp, synthetic construct
  source 1..75: mol_type = other DNA
aatgtggaacaatctcgttcaggcctttaaaatcctggtgtttaacccggagggattatcgccggggcagttagc

SEQ ID NO: 591044 - DNA, 75 bp, synthetic construct
  source 1..75: mol_type = other DNA
gatttcctgtctggtggaggcgatgacaacggctggtggcgtgacaacgttcaccgtcacggagccgctggactg

SEQ ID NO: 591045 - DNA, 75 bp, synthetic construct
  source 1..75: mol_type = other DNA
atcctacgaaaatgcgcgtccagatgctgctgtgtctcggtgtcggtgaactgatttataccaatggtgatatcc

SEQ ID NO: 591046 - DNA, 75 bp, synthetic construct
  source 1..75: mol_type = other DNA
ggatcatgctggttggtggcggtaatatcggtgcagggctggcgcgtcgtctggaaaaagattacagcgttaaac

SEQ ID NO: 591047 - DNA, 75 bp, synthetic construct
  source 1..75: mol_type = other DNA
tgacagaaaaggaaaagaaacgtctgataagtctgagaaaaaaagctgatgcagatactgagcgtatggaaaggg

SEQ ID NO: 591048 - DNA, 75 bp, synthetic construct
  source 1..75: mol_type = other DNA
aatgtggaacaatctcgttcaggcctttaaagtcctggtatttaacccggagggattatcgccggggcagttagc

SEQ ID NO: 591049 - DNA, 75 bp, synthetic construct
  source 1..75: mol_type = other DNA
acatttgctaatcaacctaattattacgttgttaataattctgaatgcgagtacagtgcgattgatatgttttta

SEQ ID NO: 591050 - DNA, 75 bp, synthetic construct
  source 1..75: mol_type = other DNA
gcatgaacacggttccatcacaattcaccaatggctgattaaaaaagtagaaggctataagcctgatatgaggca

SEQ ID NO: 591051 - DNA, 75 bp, synthetic construct
  source 1..75: mol_type = other DNA
cgcgataacatgtactggcagtcattgcgaggacgtttgttgtcacggccagcatcgtatactggcgtcaccaca

SEQ ID NO: 591052 - DNA, 75 bp, synthetic construct
  source 1..75: mol_type = other DNA
atttaccgtgccgtccgacgatgattttgatggtgtcgacgtgacgtacatcaacggcgtcacctgggcggagga

SEQ ID NO: 591053 - DNA, 75 bp, synthetic construct
  source 1..75: mol_type = other DNA
caactccaccgaagtgggcgggacgtcatccggcaccgggctggatatggcccagacgtcgccggacgcagacga

SEQ ID NO: 591054 - DNA, 75 bp, synthetic construct
  source 1..75: mol_type = other DNA
tacccgccaggcgcggacgtttccggtgatgagcgcagcgaaaactgggtcaactccaccgaagtgggcgggacg

SEQ ID NO: 591055 - DNA, 75 bp, synthetic construct
  source 1..75: mol_type = other DNA
agactatcacttatttaagtgatactggttgtctggagattcagggggccagtctagggggccagtctaccgctt

SEQ ID NO: 591056 - DNA, 75 bp, synthetic construct
  source 1..75: mol_type = other DNA
ggcgggtctgaaagccagttccgaatggttcccggcaaaagagcgttccattgcagtaggttattttaacgttgg

SEQ ID NO: 591057 - DNA, 75 bp, synthetic construct
  source 1..75: mol_type = other DNA
tatgtcgcgattatgctgctgtgtatcggtggttttgctcaccaggcactgtctggcgcgctgattacgctctct

SEQ ID NO: 591058 - DNA, 75 bp, synthetic construct
  source 1..75: mol_type = other DNA
gatgtctgcatggctggcaagtacgctgtttgcgctggttgttggtgctctggctgacaccatcggcttcagccc

SEQ ID NO: 591059 - DNA, 75 bp, synthetic construct
  source 1..75: mol_type = other DNA
tattcagctggaggcggtgcaggaagaaatggctaacgaatttcgtgatctgcttgttgagaaattcaaggacag

SEQ ID NO: 591060 - DNA, 75 bp, synthetic construct
  source 1..75: mol_type = other DNA
tcgcagtaggctactttaacgtaggttcttcgattggtgcgatgattgcgccgccgctggtggtatgggcaatcg

SEQ ID NO: 591061 - DNA, 75 bp, synthetic construct
  source 1..75: mol_type = other DNA
tgatgcatagctggcagatggcatttatcatctctggtgcactgagcttcatctgggcgatggcatggctgattt

SEQ ID NO: 591062 - DNA, 75 bp, synthetic construct
  source 1..75: mol_type = other DNA
ttcattggcatcatactgaatgatcaatcgatagaacctccacgtcttatattctgcgaatcttcacgtgttggt

SEQ ID NO: 591063 - DNA, 75 bp, synthetic construct
  source 1..75: mol_type = other DNA
ctgtcggtgcgcttgatgcgcttggattatccgcaaaaaaattagccggtgagtcacctgataaacaacttctcg

SEQ ID NO: 591064 - DNA, 75 bp, synthetic construct
  source 1..75: mol_type = other DNA
catcagatcaagaactgttggccgaagaacatattgatcaagttgatctgttcatcgccgtcaccaacgatgacg

SEQ ID NO: 591065 - DNA, 75 bp, synthetic construct
  source 1..75: mol_type = other DNA
gtgccgcggaagcagcgatgattccggcgggtctgaaagccagctccgaatggttcccggcgaaagagcgttcca

SEQ ID NO: 591066 - DNA, 75 bp, synthetic construct
  source 1..75: mol_type = other DNA
gtgcggtgctgatgattggcccaggtatgatcggtctgttcaccaatccatatgtggcgattatgctgctgtgta

SEQ ID NO: 591067 - DNA, 75 bp, synthetic construct
  source 1..75: mol_type = other DNA
caactctgatggaagagttaaacatctccacccaacagtattcctatatcatcgcagcctattctgctgcttata

SEQ ID NO: 591068 - DNA, 75 bp, synthetic construct
  source 1..75: mol_type = other DNA
cgcattgtcagaaaagtactccattacggttaaaagtgccggagaggaaggcaataaacgttattttattgcgtc

SEQ ID NO: 591069 - DNA, 75 bp, synthetic construct
  source 1..75: mol_type = other DNA
tttcatattgttttcggaaaaaaagacttgaataaagatatttttatttggctaacagaattaccacatattcac

SEQ ID NO: 591070 - DNA, 75 bp, synthetic construct
  source 1..75: mol_type = other DNA
tctctgcaaccgtagacagtctggaaaaacatttctctaaaggcatgactgttccccagttctgccgtgcgctga

SEQ ID NO: 591071 - DNA, 75 bp, synthetic construct
  source 1..75: mol_type = other DNA
gttatggagcaacaccaatccgtattcgccagaatcattcccgaaacgaagaacgattcgttgttggaaagcatt

SEQ ID NO: 591072 - DNA, 75 bp, synthetic construct
  source 1..75: mol_type = other DNA
tgcactgaaacaccgtcgcgcgaaagcagcggcccgtaagcgcgccaaccgcctgaagaaattaccagtagacca

SEQ ID NO: 591073 - DNA, 75 bp, synthetic construct
  source 1..75: mol_type = other DNA
actggagccagctgccgaccgaagaccagatccgtttctgggaagagtacgaagctggtagagcgacgtctttcc

SEQ ID NO: 591074 - DNA, 75 bp, synthetic construct
  source 1..75: mol_type = other DNA
acggccgcctggatatctggtgggataaccgttccgacttcaacgccaacggcgaaaaagcggtcttcttcggtg

SEQ ID NO: 591075 - DNA, 75 bp, synthetic construct
  source 1..75: mol_type = other DNA
ccgtattgaacgtatcgaacagactcagcgtaacgacgcgcacaaattaattgaagagtgcatgattctggcgaa

SEQ ID NO: 591076 - DNA, 75 bp, synthetic construct
  source 1..75: mol_type = other DNA
agaactgcacattgaaggcgaagagcagcttgaaggcctgcgtcgccgcctgcgtgcgatggagcgcgatggtca

SEQ ID NO: 591077 - DNA, 75 bp, synthetic construct
  source 1..75: mol_type = other DNA
atcgctctgcgtacccatgaaattccgtacatctggccgcaggctgttgagcaacaggttgccgggctgaaagaa

SEQ ID NO: 591078 - DNA, 75 bp, synthetic construct
  source 1..75: mol_type = other DNA
gaataatctgatggtcattgatggtattgaagttcgtcgtgatgcttatgggcgttacagcctgaacgatctgca

SEQ ID NO: 591079 - DNA, 75 bp, synthetic construct
  source 1..75: mol_type = other DNA
gcgaagctgaaaaatacgcgaatcccatccctagccgggaatttatcctcgaacatttaaccaaacgtgaaaaac

SEQ ID NO: 591080 - DNA, 75 bp, synthetic construct
  source 1..75: mol_type = other DNA
tttcgtcgaaaggtcgcctgaccggctataaattctacgaagcggtgatgagctctcatgcgcgtctgacttaca

SEQ ID NO: 591081 - DNA, 75 bp, synthetic construct
  source 1..75: mol_type = other DNA
gcagtacactggagtcagttagcacccgaagagcagatccgtttctgggaagactatgaagcgggaagggcgacc

SEQ ID NO: 591082 - DNA, 75 bp, synthetic construct
  source 1..75: mol_type = other DNA
aaagaaatcagcccgaaagacagcaaaggaaaggttatccccgaactcgaggtgacggtctcccggctttcccgt

SEQ ID NO: 591083 - DNA, 75 bp, synthetic construct
  source 1..75: mol_type = other DNA
gtggctgaaagatacaatccacaaagacactggagtcaacttcctccagaagagcagattcgtttctgggaagct

SEQ ID NO: 591084 - DNA, 75 bp, synthetic construct
  source 1..75: mol_type = other DNA
atggtgattaaaaatacccgtccaggccactgggctcagttgcctcccgaagagcaaatccgtttctgggaagaa

SEQ ID NO: 591085 - DNA, 75 bp, synthetic construct
  source 1..75: mol_type = other DNA
gactcaaatcagctacgcctgaacaatacgatttactgccagatttattgaagcaatttttgttcagtgaggcag

SEQ ID NO: 591086 - DNA, 75 bp, synthetic construct
  source 1..75: mol_type = other DNA
gtcgcaaaaagtgcagggtggggaattggggcttaatgatatcctcgccacggatattgtgctgactattcgtca

SEQ ID NO: 591087 - DNA, 75 bp, synthetic construct
  source 1..75: mol_type = other DNA
cgtggacatggttaaacttcacgaacagcagcagaagcggctgcgtgaaagtgaaatccgccagcagctcatccg

SEQ ID NO: 591088 - DNA, 75 bp, synthetic construct
  source 1..75: mol_type = other DNA
agcccccgaagagcagatccgtttctgggaagactatgaagcgggaagggcgacctctttcctggttgaaccgga

SEQ ID NO: 591089 - DNA, 75 bp, synthetic construct
  source 1..75: mol_type = other DNA
tttggtgtgctgggtgtatcagaagaaacgatgtgggaccgtgaaacccgtcagcgtctgccgcgttatgtctgg

SEQ ID NO: 591090 - DNA, 75 bp, synthetic construct
  source 1..75: mol_type = other DNA
agcttcagtgatgcgggcacacataccgtaggcatgagtgtttcccgtctggccagagaaatcagcccgaaagac

SEQ ID NO: 591091 - DNA, 75 bp, synthetic construct
  source 1..75: mol_type = other DNA
aacgctggtatctgcagcgcagccaggatgcgctgaaacaccgtcgggcaaaagctgcagcccgcaagcgtgcta

SEQ ID NO: 591092 - DNA, 75 bp, synthetic construct
  source 1..75: mol_type = other DNA
gatatctccgtacatgcggccagaaaacgctggtatctgcagcgcagcctggatgcgctgaaacaccgtcgtgca

SEQ ID NO: 591093 - DNA, 75 bp, synthetic construct
  source 1..75: mol_type = other DNA
tccaccaaacccaaatgcgaaaatccgacctggtatcgtcctgcgcgctataaggcgctgagcgggcagctcggg

SEQ ID NO: 591094 - DNA, 75 bp, synthetic construct
  source 1..75: mol_type = other DNA
aactggtcactgtgcggaaaagatcctcacccagagtggagaaagatgtcagtagatgagtatcagaaatttgga

SEQ ID NO: 591095 - DNA, 75 bp, synthetic construct
  source 1..75: mol_type = other DNA
tggttcataaccccggttatgacttcaacgatgcaagcctggtcccggcaagcagctactggggcgcactggtag

SEQ ID NO: 591096 - DNA, 75 bp, synthetic construct
  source 1..75: mol_type = other DNA
tatggttaaagaaggtctttttgaccgtttcccctgcgatgtgattttcggtatgcacaatatgccgggtctgcc

SEQ ID NO: 591097 - DNA, 75 bp, synthetic construct
  source 1..75: mol_type = other DNA
ggctaacgtcattcctgacagtgctgagatgaaaatcagcgtccgctctcttagccgcgatacccgacaacttct

SEQ ID NO: 591098 - DNA, 75 bp, synthetic construct
  source 1..75: mol_type = other DNA
gggtaacggcagatcagcaggagcctgcgtggacaatcggtggcagctatcaggcagtacgcttgattcagtttc

SEQ ID NO: 591099 - DNA, 75 bp, synthetic construct
  source 1..75: mol_type = other DNA
ctgctaccaacacgatctggaaaaaggcttcctgacagtacaaaaaaggctcaatggcgaagcgctggaggaata

SEQ ID NO: 591100 - DNA, 75 bp, synthetic construct
  source 1..75: mol_type = other DNA
tgcggcgcgtagtaaaggcaaagagacgccgattaatttgctgggcttcaaagacggtaccgccaatcctgacag

SEQ ID NO: 591101 - DNA, 75 bp, synthetic construct
  source 1..75: mol_type = other DNA
ggaaagtctgatcaaaaatggcgaagagtggatgtcgccattgctgaaatatcgtgatctgctggcgcttaccac

SEQ ID NO: 591102 - DNA, 75 bp, synthetic construct
  source 1..75: mol_type = other DNA
atctggccgagtacgaagattttattaatcaggagctattcgccgggcgtcctctggctgaatatgttgctgaag

SEQ ID NO: 591103 - DNA, 75 bp, synthetic construct
  source 1..75: mol_type = other DNA
ggataagacagcagatgctgttattcagagtacccctcttggcttagttgcatcaacattagtcaataaagcgaa

SEQ ID NO: 591104 - DNA, 75 bp, synthetic construct
  source 1..75: mol_type = other DNA
ctgatgaaatcattcatggaaatgatctccgtggaatggatgatttttacattaagacaacgagttttgaatgcc

SEQ ID NO: 591105 - DNA, 75 bp, synthetic construct
  source 1..75: mol_type = other DNA
tgaacttcaggttttacagcgcagaattgtcgatgccagcgaatcctctgtattggtcggcgaggaaaacgaacg

SEQ ID NO: 591106 - DNA, 75 bp, synthetic construct
  source 1..75: mol_type = other DNA
ccgtggtcaccaaagataaagcgatggagagcctgatcaagaatggcgaagaatggatgtctccgctgctgaaat

SEQ ID NO: 591107 - DNA, 75 bp, synthetic construct
  source 1..75: mol_type = other DNA
atccccgcacgccagagagtgagtccagcctgatgctgcgtcgtggctacagttattcactgggcgtcaccaact

SEQ ID NO: 591108 - DNA, 75 bp, synthetic construct
  source 1..75: mol_type = other DNA
tgacccacgtccaaaagctggcgtcataagcataaacgcagcgcgtaacgcgcgtaaaaagccctccgacacgat

SEQ ID NO: 591109 - DNA, 75 bp, synthetic construct
  source 1..75: mol_type = other DNA
aatctggcgctggttatcgcggcctgtgtgacgttcaccggggcgctgtgttacttctttattgtcaaagatcgg

SEQ ID NO: 591110 - DNA, 75 bp, synthetic construct
  source 1..75: mol_type = other DNA
aaaagaacgcggcacggcgctggggatccttaactcatctaccgttatcggtcaggccatcgcgccccctgttct

SEQ ID NO: 591111 - DNA, 75 bp, synthetic construct
  source 1..75: mol_type = other DNA
gttcttcgtcgggataatgctgattcaaactggcaaggttgcagtaatcgaccaaaagcaggatggcggaatatg

SEQ ID NO: 591112 - DNA, 75 bp, synthetic construct
  source 1..75: mol_type = other DNA
tggcagccatcaattatatggttgaaacagtggagaaaacgccgcaactgaagggcaagctgaccatcagccacg

SEQ ID NO: 591113 - DNA, 75 bp, synthetic construct
  source 1..75: mol_type = other DNA
gagcagaaaatgctgccggaactgcaaccgtacacgcaggaacgggcggaaaaactgatcgatttattgcagtcg

SEQ ID NO: 591114 - DNA, 75 bp, synthetic construct
  source 1..75: mol_type = other DNA
atgcagtatgaagatgaaaacggcgtgaatgaaccgtcacgccgacgtttactgaaagggattggcgcgctggcg

SEQ ID NO: 591115 - DNA, 75 bp, synthetic construct
  source 1..75: mol_type = other DNA
ggaatacgttaaacccatcggcggcggttatttttttgcgctgccgggggtgaaggacgcgagcgattatcttgg

SEQ ID NO: 591116 - DNA, 75 bp, synthetic construct
  source 1..75: mol_type = other DNA
atttccgatcacgcggcgcgtagtaaaggcaaagagacgccgattaatttgctgggtttcaaagacggcactgcc

SEQ ID NO: 591117 - DNA, 75 bp, synthetic construct
  source 1..75: mol_type = other DNA
ttgcgggtaataaaccgcaacggattcgccgtattcagacggtggcgctggttttattatttatggcgggaatcg

SEQ ID NO: 591118 - DNA, 75 bp, synthetic construct
  source 1..75: mol_type = other DNA
ccggaggttgaagcatggctgagagataaggcgtcgccatggggaatatatctgacttctgagtcatccatgcgt

SEQ ID NO: 591119 - DNA, 75 bp, synthetic construct
  source 1..75: mol_type = other DNA
acttcttctgcaggcgctcatacgcactctgtatcgggtactgctgcaagcgcaggtgcacacgcacatactgtc

SEQ ID NO: 591120 - DNA, 75 bp, synthetic construct
  source 1..75: mol_type = other DNA
atgaaagatttaactttgaagtttcatgacaaactgcagtttaaggccttcctgtcatctcttgactgggcggag

SEQ ID NO: 591121 - DNA, 75 bp, synthetic construct
  source 1..75: mol_type = other DNA
ttccgcgcttatctctacctgacggtttccgaactgctgctgttcaccgtactgacgccgctctacatcacgctg

SEQ ID NO: 591122 - DNA, 75 bp, synthetic construct
  source 1..75: mol_type = other DNA
aaaggaatttctcctgatattgttcatgcttatcttgatgggaaatatcctactcaatacggcttaggaaaatat

SEQ ID NO: 591123 - DNA, 75 bp, synthetic construct
  source 1..75: mol_type = other DNA
atgaaagatttaactttgaagtttcatgacaaactgcagtttaaggccttcctgtcatctcttgtctgggtggaa

SEQ ID NO: 591124 - DNA, 75 bp, synthetic construct
  source 1..75: mol_type = other DNA
atgaaagatttaactttgaagtttcatgacaaactgcagtttaaggccttcctgtcatctcttgtctgggaggat

SEQ ID NO: 591125 - DNA, 75 bp, synthetic construct
  source 1..75: mol_type = other DNA
atgaaagatttaactttgaagtttcatgacaaactgcagtttaaggccttcctgtcatctcttgactggggggac

SEQ ID NO: 591126 - DNA, 75 bp, synthetic construct
  source 1..75: mol_type = other DNA
ctcgccctgtaggcaagtttattcggatatatgtggatgggagcgtttatgaagagttgagaaaaatagccaaga

SEQ ID NO: 591127 - DNA, 75 bp, synthetic construct
  source 1..75: mol_type = other DNA
ggcatcgctggaagcagagccgatagcgtggcgatatcgctacgtgaaaaaaggtgttatggactctcaggggga

SEQ ID NO: 591128 - DNA, 75 bp, synthetic construct
  source 1..75: mol_type = other DNA
atgaaaatgactgaattaacaaaagaacaattaatcgaagaagccaaattaaaaatagcgattacgaaatgccac

SEQ ID NO: 591129 - DNA, 75 bp, synthetic construct
  source 1..75: mol_type = other DNA
tacgcgaacacttcgggaaaccagtaattattaacagtgggaaccgttgtccgactcataacaagaatgtaggcg

SEQ ID NO: 591130 - DNA, 75 bp, synthetic construct
  source 1..75: mol_type = other DNA
ttatgcacagattgtagctgatgccaccagcggagaagatgggcctgatacttacaaatggagtgttgggatcgc

SEQ ID NO: 591131 - DNA, 75 bp, synthetic construct
  source 1..75: mol_type = other DNA
gatcgtcgacgttttgtcgtcaaattttatcgccctgaacgttggacagccgatcaaatcctcgaagaacatcaa

SEQ ID NO: 591132 - DNA, 75 bp, synthetic construct
  source 1..75: mol_type = other DNA
gaattcttggattttccagactatcaggtcagagagttgcctgcattttttgtgaaagtatctgttgctacagct

SEQ ID NO: 591133 - DNA, 75 bp, synthetic construct
  source 1..75: mol_type = other DNA
ccgtcaggcggaaatcctcaaagccgaaggtgaaaaacagtcgcaaatcctgaaagcggaaggtgaacgtcagtc

SEQ ID NO: 591134 - DNA, 75 bp, synthetic construct
  source 1..75: mol_type = other DNA
aggctggctgcgcaccgctggcgttgtggcaggcggcaacgcaaaaaacgtcttgccgacagattcgctgttacc

SEQ ID NO: 591135 - DNA, 75 bp, synthetic construct
  source 1..75: mol_type = other DNA
ccgtcacaaaagaatggctgcgggcacattgtgacgatgtggaagtgatccccctgtgccgtatgcatgacggtc

SEQ ID NO: 591136 - DNA, 75 bp, synthetic construct
  source 1..75: mol_type = other DNA
ggctggctgaaatgtaacggtgcagcattttcttctgaaatgtaccccaaactggcaaaagcctaccccactaat

SEQ ID NO: 591137 - DNA, 75 bp, synthetic construct
  source 1..75: mol_type = other DNA
acattgtgacgatgtggaagtgatccccctgtgccgtatgcatgacggtcccgttttccgggaacaccatattaa

SEQ ID NO: 591138 - DNA, 75 bp, synthetic construct
  source 1..75: mol_type = other DNA
tcgcaatgcacgtccgggttatctggagcacttctgggcgctggtaaactgggaattcgtagcgaaaaatctcgc

SEQ ID NO: 591139 - DNA, 75 bp, synthetic construct
  source 1..75: mol_type = other DNA
ttctttactgggcagcgacgccggtgagctggccggagccgggaaaacaggcgttaccgtgcaaagcagcctcga

SEQ ID NO: 591140 - DNA, 75 bp, synthetic construct
  source 1..75: mol_type = other DNA
ttctttactgggcagcgatgctggcgaactggccggtgccgggaaaaccggcgttatcgtacaaagcagccttga

SEQ ID NO: 591141 - DNA, 75 bp, synthetic construct
  source 1..75: mol_type = other DNA
gcgttaccgtacaaagcagtctggatgcggtaaaagatgattttgatgtgtttattgattttacccgtccggaag

SEQ ID NO: 591142 - DNA, 75 bp, synthetic construct
  source 1..75: mol_type = other DNA
tttgatttatgagaaagagttacttagttacaaaataccattaagctcgcgaattacaaaaatttacattatatc

SEQ ID NO: 591143 - DNA, 75 bp, synthetic construct
  source 1..75: mol_type = other DNA
tattaccaccacgctgtatctgaccagtatttgcagaaacggaaaatatgatcagtatgcaaaaaaaggccgcag

SEQ ID NO: 591144 - DNA, 75 bp, synthetic construct
  source 1..75: mol_type = other DNA
gcgcggcgctggagcgcgaaggatcttctttactgggcagcgatgcgggcgaactggccggagccgggaaaacag

SEQ ID NO: 591145 - DNA, 75 bp, synthetic construct
  source 1..75: mol_type = other DNA
cgaagattaaatcattcatcaatggcttcctgagcgacccggcgcacgataatcaatctttagacagtctgcttg

SEQ ID NO: 591146 - DNA, 75 bp, synthetic construct
  source 1..75: mol_type = other DNA
gcagctggtggccgccgctcctaaagtcgattttgccgaccgggtatcagtggctaatggaatcctgattgggaa

SEQ ID NO: 591147 - DNA, 75 bp, synthetic construct
  source 1..75: mol_type = other DNA
taaaatcccatggcacaagggctgggcgctcttttgaggtcataaccatgacctacaaacaagccctgcgagttg

SEQ ID NO: 591148 - DNA, 75 bp, synthetic construct
  source 1..75: mol_type = other DNA
ctgctgaccgaacaggtgcgttttggtgtgctgggtgtgtcggaagaaacaatgtgggaccgtgaaacccgccag

SEQ ID NO: 591149 - DNA, 75 bp, synthetic construct
  source 1..75: mol_type = other DNA
agttaactatacgcgtaatgctgatcgctttgaggaaggtaaacattactttctactaactggttcaaaattaag

SEQ ID NO: 591150 - DNA, 75 bp, synthetic construct
  source 1..75: mol_type = other DNA
tgaaagcaactaacgttaaatcagaaaaaatttatgcaccttcagttcaggaatcggaactggtggttgttcaga

SEQ ID NO: 591151 - DNA, 75 bp, synthetic construct
  source 1..75: mol_type = other DNA
aagaaatgattgaggcaattgaacagcacacatcctgtatcagtaccagggatataccgggtgttattgccaact

SEQ ID NO: 591152 - DNA, 75 bp, synthetic construct
  source 1..75: mol_type = other DNA
ggcagcaacgcaggaacaactcgatttattacctgaattgttaaagcagtttttgtccagcccggcggtaaacga

SEQ ID NO: 591153 - DNA, 75 bp, synthetic construct
  source 1..75: mol_type = other DNA
cggatattgtgctgactattcgtcagcgactttttgccgaggcagaggccaaagaattagcggttcgcgattttg

SEQ ID NO: 591154 - DNA, 75 bp, synthetic construct
  source 1..75: mol_type = other DNA
cggggaattggggcttaatgatgtcctcgcaacggacattgtgctgaccattcgtcagcgactttttgccgaggc

SEQ ID NO: 591155 - DNA, 75 bp, synthetic construct
  source 1..75: mol_type = other DNA
gctcattcgggaaggtgttctgcgtgaggatgaagatatctccgtacatgcggccagaaaacgctggtatctgca

SEQ ID NO: 591156 - DNA, 75 bp, synthetic construct
  source 1..75: mol_type = other DNA
aggtctgaagaatacatcatataacgccgtacactggagtcagctgtcccccgaagaccagatccgtttctggga

SEQ ID NO: 591157 - DNA, 75 bp, synthetic construct
  source 1..75: mol_type = other DNA
ttattacctgaattgttaaagcagtttttgtccagcccggcggtaaacgagcgtacggatgatgataaaacgttg

SEQ ID NO: 591158 - DNA, 75 bp, synthetic construct
  source 1..75: mol_type = other DNA
ctacttccgacaaaaagaacagcaaccggtcgcaatcccccaaacattaccagaagccctacgcctggctgccga

SEQ ID NO: 591159 - DNA, 75 bp, synthetic construct
  source 1..75: mol_type = other DNA
aagtgaagccggactgtaaattaccgggtaaggtgatggactacctgaagcgaaacggactgataagcgcggagg

SEQ ID NO: 591160 - DNA, 75 bp, synthetic construct
  source 1..75: mol_type = other DNA
aagcgactggtcagccaactgaaaaaagctaagccggactgcaaattaccggagaaggcgatggactacctgaag

SEQ ID NO: 591161 - DNA, 75 bp, synthetic construct
  source 1..75: mol_type = other DNA
tttggtgtgctgggtgtttcagaggaaaccctgtgggaccgtgaaacccgccagcgtctgccacggtacgtctgg

SEQ ID NO: 591162 - DNA, 75 bp, synthetic construct
  source 1..75: mol_type = other DNA
acctgcaatagcagcaccaacagtaccaagaggactagtaaacgcagtgcgtttctatgaactggtaaagagtga

SEQ ID NO: 591163 - DNA, 75 bp, synthetic construct
  source 1..75: mol_type = other DNA
aagaactaattaaagaaatcagagagcgaattggcagcttggacgtgcgagataatattgagcgccgggcttatg

SEQ ID NO: 591164 - DNA, 75 bp, synthetic construct
  source 1..75: mol_type = other DNA
cgcaaaacgtgcggagatatcacctaaaccactattcgtcgctccacctgtgccggtagtgcctgaaggactggt

SEQ ID NO: 591165 - DNA, 75 bp, synthetic construct
  source 1..75: mol_type = other DNA
cgacctggtatcgtcctgcgcgctataaggcgctgagcgggcagctcgggtatgcctataaccgtctggtgaaaa

SEQ ID NO: 591166 - DNA, 75 bp, synthetic construct
  source 1..75: mol_type = other DNA
agtcgaaaccggagcatggaaagacgctgttgactgggtgctcaaagaggcctgccaggttgtaaacgctgacat

SEQ ID NO: 591167 - DNA, 75 bp, synthetic construct
  source 1..75: mol_type = other DNA
tggacttactcaccagtcctgtctggattgtttcgccctttgaggaacagttaatttatgccaatagcgcggcgc

SEQ ID NO: 591168 - DNA, 75 bp, synthetic construct
  source 1..75: mol_type = other DNA
tggtcagcttcagtgatgccggcacacacactgtggggatgagtgtcactcgcctggctaaagaaatcagtccga

SEQ ID NO: 591169 - DNA, 75 bp, synthetic construct
  source 1..75: mol_type = other DNA
gtggcaggtctgaagaatactccatataacgcagtacactggagtcagttagcacccgaagagcagatccgtttc

SEQ ID NO: 591170 - DNA, 75 bp, synthetic construct
  source 1..75: mol_type = other DNA
ggggatgagcgtttcccgcctggctaaagaaatcagcccgaaagacagcaaaggaaaggttattccggaactgga

SEQ ID NO: 591171 - DNA, 75 bp, synthetic construct
  source 1..75: mol_type = other DNA
cgcgtagccattcatcgcggtcaaatgccgggacacaagacgcgcacaaacccggaagatgaaaactcagacgga

SEQ ID NO: 591172 - DNA, 75 bp, synthetic construct
  source 1..75: mol_type = other DNA
gctgcacggcgaagcaaaccagaatgccgaagaagggacggttgatcttgagttccacggtgaagaaggggatta

SEQ ID NO: 591173 - DNA, 75 bp, synthetic construct
  source 1..75: mol_type = other DNA
aagaaaaatcgaaatgcagcatgaagagtttcagaaaatgacagagcgtgagcaagtacctttattgaaatcgcc

SEQ ID NO: 591174 - DNA, 75 bp, synthetic construct
  source 1..75: mol_type = other DNA
gagctggaagtgggtatgggtaaagttggtatgccgctgcgtgtcgccgtaaccggtgcggggcagtctccggca

SEQ ID NO: 591175 - DNA, 75 bp, synthetic construct
  source 1..75: mol_type = other DNA
ggcaaacaaagaagactgccagaccatcaatggaaagcgggtttacacaggaagaaagtcaaaactggagcaaca

SEQ ID NO: 591176 - DNA, 75 bp, synthetic construct
  source 1..75: mol_type = other DNA
agctaataaagaagactgccagaccattaacggtaagcgagtttatacaggcagaagttcaaagctggagcgact

SEQ ID NO: 591177 - DNA, 75 bp, synthetic construct
  source 1..75: mol_type = other DNA
ttgggtttacaatcaactttctctaataaaagatggtgggggcgaaaaggattttttagatgcatttgcgaagca

SEQ ID NO: 591178 - DNA, 75 bp, synthetic construct
  source 1..75: mol_type = other DNA
gtccgactttgcgccaggctggcgttgcgatatggatggctatccccagtattttcctgattgtgttaattatgg

SEQ ID NO: 591179 - DNA, 75 bp, synthetic construct
  source 1..75: mol_type = other DNA
gtacgtcgcggttatccaaaaccagaacgcccgactttacgccaggctggcgttgcgatatggatggctatcccc

SEQ ID NO: 591180 - DNA, 75 bp, synthetic construct
  source 1..75: mol_type = other DNA
gctgcacggagaggctaaccataatgccgaagaaggcacggcagatcttgaattccacggcgaagagggagggta

SEQ ID NO: 591181 - DNA, 75 bp, synthetic construct
  source 1..75: mol_type = other DNA
ccttacgttaagggcacgtttaaagtgcccaaaaactttccggtcgacaaaattaccacctcagaccagatgacg

SEQ ID NO: 591182 - DNA, 75 bp, synthetic construct
  source 1..75: mol_type = other DNA
agcttggcctatatgatagaattcatgcgtttattattgtttttgaatttgaaaattgcattggtattatcaaaa

SEQ ID NO: 591183 - DNA, 75 bp, synthetic construct
  source 1..75: mol_type = other DNA
ttggtatgccgctgcgtgtcgccgtaaccggtgcggggcagtctccggcactggatgttaccgttcacgcaatcg

SEQ ID NO: 591184 - DNA, 75 bp, synthetic construct
  source 1..75: mol_type = other DNA
gatgacgtgcgttggcagtacggtacaccaccgcagggtaacgccaactttgcctggatgcagcacatgatccac

SEQ ID NO: 591185 - DNA, 75 bp, synthetic construct
  source 1..75: mol_type = other DNA
attttaacttcggtaaacagaacgccgatacgttcctgaacgatcagcacccggatttacgtgccgattttgtta

SEQ ID NO: 591186 - DNA, 75 bp, synthetic construct
  source 1..75: mol_type = other DNA
cggcaacggtaaagtccaccgcaaaggccaggtgctgtttatcgacgcccgccagattggttatatgaaagaccg

SEQ ID NO: 591187 - DNA, 75 bp, synthetic construct
  source 1..75: mol_type = other DNA
accgaagaaactgtaatcgaataccgggagattctccgccgtgaaaaaacctgtgatctgcctgttcctgctgat

SEQ ID NO: 591188 - DNA, 75 bp, synthetic construct
  source 1..75: mol_type = other DNA
gctaaaagatcaactagaggatagtgcaagactggaggcacaaattaaagcaaattttggggggctgggttatga

SEQ ID NO: 591189 - DNA, 75 bp, synthetic construct
  source 1..75: mol_type = other DNA
atcaaaaagattgccaatactttccatgcctggcagacagataaagattatgaagatgaggccggtttctgtttt

SEQ ID NO: 591190 - DNA, 75 bp, synthetic construct
  source 1..75: mol_type = other DNA
agtcgaggattactacaccgaaaagaacatcttctgggtccctaaagctgctcgctgggacacgctaaaaacgaa

SEQ ID NO: 591191 - DNA, 75 bp, synthetic construct
  source 1..75: mol_type = other DNA
aaccggtgcggggcagtctccagcactggatgttaccgttcacgcaattggtaagacccgcagtatcgagcgtat

SEQ ID NO: 591192 - DNA, 75 bp, synthetic construct
  source 1..75: mol_type = other DNA
ctggatgttaccgttcacgcaatcggtaagacccgcagtatcgagcgtatcaacaaagcgctggcttttattgct

SEQ ID NO: 591193 - DNA, 75 bp, synthetic construct
  source 1..75: mol_type = other DNA
gcaactgaaagatcagttggaagagagcgcgaacctggaagcacagattaaggcgaatctgggggggctgggtta

SEQ ID NO: 591194 - DNA, 75 bp, synthetic construct
  source 1..75: mol_type = other DNA
tgtacgaatatttcctcggtcagttcgcgctggcggaaggtaagcagggcggccagtattacacgccaaaaagta

SEQ ID NO: 591195 - DNA, 75 bp, synthetic construct
  source 1..75: mol_type = other DNA
aggatgtgaagctgcgctccgtctcctggctggtggacaacgcgctggatgaaatcgaaaaaaccaacccgaaac

SEQ ID NO: 591196 - DNA, 75 bp, synthetic construct
  source 1..75: mol_type = other DNA
tgcgtgcttctatttataacgccatgccgctggaaggcgttaaagcgctgacagatttcatggttgaattcgaac

SEQ ID NO: 591197 - DNA, 75 bp, synthetic construct
  source 1..75: mol_type = other DNA
tcgtatcgatgccttcgcaactcttcactatggctcgttcttttaaagccgtagctaatggaaagatttatatcg

SEQ ID NO: 591198 - DNA, 75 bp, synthetic construct
  source 1..75: mol_type = other DNA
ttatttagcacactagccatacctgatggatgtgttattaacggttctggatacactcaaaccaccttgaaacaa

SEQ ID NO: 591199 - DNA, 75 bp, synthetic construct
  source 1..75: mol_type = other DNA
ttatgatgcgtatggtgcgcagcagttctattttccgaatgtgctgaagtatgaccctgatcaacttgagaatag

SEQ ID NO: 591200 - DNA, 75 bp, synthetic construct
  source 1..75: mol_type = other DNA
tggtggcactgttccgccctggtccgttgcaatcagggatggtggataactttatcgaccgtaaacatggtcgcg

SEQ ID NO: 591201 - DNA, 75 bp, synthetic construct
  source 1..75: mol_type = other DNA
ctccgtcagtctctggaaccccaccgctctgggacaattccagtacatctctactatcagagggcggatgcacgc

SEQ ID NO: 591202 - DNA, 75 bp, synthetic construct
  source 1..75: mol_type = other DNA
ctccgtcagtctctggaccccaccgctctgggacaattccagtacatctctactatcagagggcggatgcacgcg

SEQ ID NO: 591203 - DNA, 75 bp, synthetic construct
  source 1..75: mol_type = other DNA
gcttccaccgttgcatcctttggcgcttcccgcaaaaggcggtgaagcgatggtgagtcgtgcagctactgtgcc

SEQ ID NO: 591204 - DNA, 75 bp, synthetic construct
  source 1..75: mol_type = other DNA
cagcagagcttccaccgttgcatcctttggcgcttcccgcaaaaggcggtgaagcgatggtgagtcgtgcagcta

SEQ ID NO: 591205 - DNA, 75 bp, synthetic construct
  source 1..75: mol_type = other DNA
gcagagatcgggcgtgttgcagcaggtgcggtaggtgctctgctcagtccgataggtcttgtggttactgcactg

SEQ ID NO: 591206 - DNA, 75 bp, synthetic construct
  source 1..75: mol_type = other DNA
aaagacataagcatccctcataaattcctttacaagccagatttcagacaaatacagttaacgatagatgatagg

SEQ ID NO: 591207 - DNA, 75 bp, synthetic construct
  source 1..75: mol_type = other DNA
tcaggacgcatacggcgcccagcagttttattttgaggacgtggcgaagtatgatccagatcagctagagcaacg

SEQ ID NO: 591208 - DNA, 75 bp, synthetic construct
  source 1..75: mol_type = other DNA
ctctcagaacgacagtggttttttgttccagtacgcccaggattaccacggaccggcaatctcaatcagcctgcc

SEQ ID NO: 591209 - DNA, 75 bp, synthetic construct
  source 1..75: mol_type = other DNA
gtggatgagtgctggcggatgggccttaaaatcctgccgccagatataaactccggtctttaccatttccacgtc

SEQ ID NO: 591210 - DNA, 75 bp, synthetic construct
  source 1..75: mol_type = other DNA
tgccgcttatatgcattactgcccaaatgagaccatcgatggtatcgccatcgacgaaacgccagactttggtaa

SEQ ID NO: 591211 - DNA, 75 bp, synthetic construct
  source 1..75: mol_type = other DNA
ctgtatggggtgattgataacagcgatttctaccgcaatgacgtggcgaaagctaaccgttcgcggatgaacgtg

SEQ ID NO: 591212 - DNA, 75 bp, synthetic construct
  source 1..75: mol_type = other DNA
atggtcttcgcgcagttaagccaatgagtgaatggcaactctctgataatgctgcttatatgcattactgcccga

SEQ ID NO: 591213 - DNA, 75 bp, synthetic construct
  source 1..75: mol_type = other DNA
tgcgtgaatggcaactctctgataatgctgcttatatgcattattgcccgaatgaaaccatcgatggtatcgcca

SEQ ID NO: 591214 - DNA, 75 bp, synthetic construct
  source 1..75: mol_type = other DNA
ccgttccagttggcggacagtgcgcttgacaaattgttccttgaagagtcttttgctgcggggctgcatgccctg

SEQ ID NO: 591215 - DNA, 75 bp, synthetic construct
  source 1..75: mol_type = other DNA
ctggattattccatccttaacgataacgactcaatgtttaacacgccgccgacatttgcctggtacctgtccggt

SEQ ID NO: 591216 - DNA, 75 bp, synthetic construct
  source 1..75: mol_type = other DNA
tacttcctgccacagttcccgaccggggacatgagcactgaagattatctggtcaagcgcgcaaaagaagggctg

SEQ ID NO: 591217 - DNA, 75 bp, synthetic construct
  source 1..75: mol_type = other DNA
ggcgtgtctctccgagcgatcgtttattaaacgatctccgtggcctcattggttcggagcagggggaactggagt

SEQ ID NO: 591218 - DNA, 75 bp, synthetic construct
  source 1..75: mol_type = other DNA
ttaaaatcctgccgccagatataaactccggtctttaccatttccacgtcaacgatgacggggaaatcgtgtatg

SEQ ID NO: 591219 - DNA, 75 bp, synthetic construct
  source 1..75: mol_type = other DNA
tataacgccatgccgctggaaggcgttaaagcgctgacagacttcatgattgagttcgaacgccgtcacggctaa

SEQ ID NO: 591220 - DNA, 75 bp, synthetic construct
  source 1..75: mol_type = other DNA
atgaacaaagaaaatgtcattaccctggacaatccggtcaaacgtggtgagcaggttatcgaacaggtctcgctg

SEQ ID NO: 591221 - DNA, 75 bp, synthetic construct
  source 1..75: mol_type = other DNA
atcgatatggatatacataagaagaacaggtatgcgagttatgatcttagaaggaaaatcgaaatgcagcatgaa

SEQ ID NO: 591222 - DNA, 75 bp, synthetic construct
  source 1..75: mol_type = other DNA
cgtccatttccaggtggggagtattaacttgagcaccagtatcggtgtagcgcattcaaatgaatgtaccaccgt

SEQ ID NO: 591223 - DNA, 75 bp, synthetic construct
  source 1..75: mol_type = other DNA
ttgtggagaaagaagccattattaataaccattttgaacgcgtcctggatggcgggcttttcttttcggctgccg

SEQ ID NO: 591224 - DNA, 75 bp, synthetic construct
  source 1..75: mol_type = other DNA
actcggtttcaccttcttatttgtatgatgttggtccttatctgatttccagtgatgagtgtattcaggttaagg

SEQ ID NO: 591225 - DNA, 75 bp, synthetic construct
  source 1..75: mol_type = other DNA
gtacaacaaggtgtatggcctggaaaaaacagaaattacaggtttcagcgtcgaagatggggagaatgggaaggt

SEQ ID NO: 591226 - DNA, 75 bp, synthetic construct
  source 1..75: mol_type = other DNA
ttctaaaagaaatcgttcatttccaggtgggaagcattaatttaagcaccagtatcggtgtagcgcattcaaatg

SEQ ID NO: 591227 - DNA, 75 bp, synthetic construct
  source 1..75: mol_type = other DNA
tattgatactgcttttgcggtggcgaatattgcggaatatcgacgcagtgtggcaattgatctcatcaacacatt

SEQ ID NO: 591228 - DNA, 75 bp, synthetic construct
  source 1..75: mol_type = other DNA
atgtccagaatcaataagttcgtacttacagtcagtctgctgatttttatcatgatttcagcagttgcctgcggg

SEQ ID NO: 591229 - DNA, 75 bp, synthetic construct
  source 1..75: mol_type = other DNA
acagaaagcgaattatgttgaaaaggaaatccaagaagttagtaaaattataaatcatattgttagttattatct

SEQ ID NO: 591230 - DNA, 75 bp, synthetic construct
  source 1..75: mol_type = other DNA
cctgacgcagctttgcgaacgactggctccggaaggttacatatcacaatgggggaaaacgatccatcgtgttcg

SEQ ID NO: 591231 - DNA, 75 bp, synthetic construct
  source 1..75: mol_type = other DNA
gggtgtatggcctgaaacagtccgttattgatactgcttttgcggtggcaaatattgctgaatatcggcgtagtg

SEQ ID NO: 591232 - DNA, 75 bp, synthetic construct
  source 1..75: mol_type = other DNA
atcgggtgccagttgcctctatctggtacgcagagtgctgagagatcccctcataatttccccaaaacgtaacca

SEQ ID NO: 591233 - DNA, 75 bp, synthetic construct
  source 1..75: mol_type = other DNA
cttatttaccgaccggtttgtacgtttttgcttataagaaagatatttattttcaggtctgcgcgctgataattt

SEQ ID NO: 591234 - DNA, 75 bp, synthetic construct
  source 1..75: mol_type = other DNA
aagagatgaaacgtgcggcagcccagagcgcagcgctggcaggtcttttccagccgtacagtgtgggtaaattca

SEQ ID NO: 591235 - DNA, 75 bp, synthetic construct
  source 1..75: mol_type = other DNA
atggaaagaaaaaacgccaacattgacgatgttataaggacagttgaaaccgccagcgcaaaagagctggaagag

SEQ ID NO: 591236 - DNA, 75 bp, synthetic construct
  source 1..75: mol_type = other DNA
ggctatgagtatcgtcgtgatgacgatatggcgttatggagttctgctgatttgacttattccattacatacgag

SEQ ID NO: 591237 - DNA, 75 bp, synthetic construct
  source 1..75: mol_type = other DNA
tctgttgactggcaggtggtagcaaatggtgatgtcagcgttgaactgcgtgatgcggatcaacaggtggttgca

SEQ ID NO: 591238 - DNA, 75 bp, synthetic construct
  source 1..75: mol_type = other DNA
tgcgccatcagtagaccctattgttgacgcaatgaaacggcttaatttaggggacgtttctcgtgtagttcagga

SEQ ID NO: 591239 - DNA, 75 bp, synthetic construct
  source 1..75: mol_type = other DNA
acactaaagactcggcgaaaggccagggaactgtcgtaaaggtcagcacgcctcaaccgggcgttatgcgcacgg

SEQ ID NO: 591240 - DNA, 75 bp, synthetic construct
  source 1..75: mol_type = other DNA
agtacgcgatcaaggtcaatactcatcgtgctcgctatttaggtggtgaaatctatacacctggagcaggagcac

SEQ ID NO: 591241 - DNA, 75 bp, synthetic construct
  source 1..75: mol_type = other DNA
cagctgcttatgttgatggttctgctatttatggtaccgctataggtaattacgcaaaagtggatgaaaatgcaa

SEQ ID NO: 591242 - DNA, 75 bp, synthetic construct
  source 1..75: mol_type = other DNA
ttgggaagttattctcatgtggatggttcatccgtttatggcgtggcattaggggacagctctgttgtgggtgaa

SEQ ID NO: 591243 - DNA, 75 bp, synthetic construct
  source 1..75: mol_type = other DNA
agacagcagcgaaagcaggtgtggcagcgagtgatggcgatgtgtcctacaacgtaggtgtgaactttgagtttt

SEQ ID NO: 591244 - DNA, 75 bp, synthetic construct
  source 1..75: mol_type = other DNA
cccgtgaaatcaaaaaactcgacggtctgtgggcattcagtctggatcgcgaaaactgtggaattgatcagcgtt

SEQ ID NO: 591245 - DNA, 75 bp, synthetic construct
  source 1..75: mol_type = other DNA
aattcacgcacaacccgtgacaatgaggtttatatcggttatgaagcagagccgggtaaggcttataaaacccgg

SEQ ID NO: 591246 - DNA, 75 bp, synthetic construct
  source 1..75: mol_type = other DNA
ttctatcatcttctctgggtgggcttctgcttgggatcagctcaggtgttttagctcaggagttacctcctatca

SEQ ID NO: 591247 - DNA, 75 bp, synthetic construct
  source 1..75: mol_type = other DNA
gagagggcttcaaacctgaaattgaggatcatatggatactcaaaaggtgtttgaagagtttaatgagattacgc

SEQ ID NO: 591248 - DNA, 75 bp, synthetic construct
  source 1..75: mol_type = other DNA
ggatcgggcgaccaagtacgccattttgctgatctcgctaacttttatggccttctttgtctttgaaacattaac

SEQ ID NO: 591249 - DNA, 75 bp, synthetic construct
  source 1..75: mol_type = other DNA
cgtggcattggcgtggtgaaatcgcctgaacttaacggaacggcgttgactattgaacccggcaccgggttagag

SEQ ID NO: 591250 - DNA, 75 bp, synthetic construct
  source 1..75: mol_type = other DNA
ccggccaggtctggcacagtgatttaacgctgaaagccgattttgacgtttcgcgtcttagcgaactcaacgcgc

SEQ ID NO: 591251 - DNA, 75 bp, synthetic construct
  source 1..75: mol_type = other DNA
atccccgggtggatttgacgggatctgtaacccgggatgacaggcagataggtgtcaatctgtcctgggacctgt

SEQ ID NO: 591252 - DNA, 75 bp, synthetic construct
  source 1..75: mol_type = other DNA
gcaggcctctgccagagttgtggacttttatcgtcttcagttcagggtggcaagaaaaacactgattgaattact

SEQ ID NO: 591253 - DNA, 75 bp, synthetic construct
  source 1..75: mol_type = other DNA
atcattataaaatggaagaaacaggagaggagacaattcgctcgtttgtttcattatatcttgatgcactcaggg

SEQ ID NO: 591254 - DNA, 75 bp, synthetic construct
  source 1..75: mol_type = other DNA
tggctgattttgcgaagacacctcaggaaaataaccctgcctggcttgccggcagggcggatattgagagtaaga

SEQ ID NO: 591255 - DNA, 75 bp, synthetic construct
  source 1..75: mol_type = other DNA
ctctgcttaataaaaataattttaacgtatatgagtgtatgaatatattcaattttgcgtggcggcagatgaaaa

SEQ ID NO: 591256 - DNA, 75 bp, synthetic construct
  source 1..75: mol_type = other DNA
ccacagcagcggcagttttacctccaacggcgtcaccgtccatacccacacgcacacaggcgtagagcgcggcgg

SEQ ID NO: 591257 - DNA, 75 bp, synthetic construct
  source 1..75: mol_type = other DNA
ccggtcaggtctggcacagtgatttaacgctaaaagccgatttcgatgtttcgcgtcttagcgaactcaatgcgc

SEQ ID NO: 591258 - DNA, 75 bp, synthetic construct
  source 1..75: mol_type = other DNA
tcgcgtcttagcaaactcaatgcgccaaatatcaccttaggcaagccatttattgtgattggcgtcggggatgcg

SEQ ID NO: 591259 - DNA, 75 bp, synthetic construct
  source 1..75: mol_type = other DNA
gcagaacctgaagctgaatatggccctgaatttaagcggtaccggcgatctttctgtggtgcctggcgggcgtaa

SEQ ID NO: 591260 - DNA, 75 bp, synthetic construct
  source 1..75: mol_type = other DNA
taacaaataaaaacagtgttgcattaggagctaattcacgcacaacccgtgacaatgaggtttatatcggttatg

SEQ ID NO: 591261 - DNA, 75 bp, synthetic construct
  source 1..75: mol_type = other DNA
ttagaacagcgccggctgttaatccgcgttcgaaatatcgacgacctggagaaaatttataaacttcttgtttcc

SEQ ID NO: 591262 - DNA, 75 bp, synthetic construct
  source 1..75: mol_type = other DNA
cttcgcgatctacgatcagttcatcatgccccgccgtaacggccccaccctgctggcaattcctttgctccggcg

SEQ ID NO: 591263 - DNA, 75 bp, synthetic construct
  source 1..75: mol_type = other DNA
ccctgtctggtcgtactgaccgtattgatgcagcagttggtgccattgatggccgtgtcacccgtaacacgcaat

SEQ ID NO: 591264 - DNA, 75 bp, synthetic construct
  source 1..75: mol_type = other DNA
gcaccaatgacgctttccgtgcagttagccgctactgggatcgcattacgcgtccggaacagctaatgagcgcct

SEQ ID NO: 591265 - DNA, 75 bp, synthetic construct
  source 1..75: mol_type = other DNA
atgacaatcacggaactggtactgattctgttcatcgccgcactgcttgcttttgcgatatacgatcagttcatc

SEQ ID NO: 591266 - DNA, 75 bp, synthetic construct
  source 1..75: mol_type = other DNA
ggaagatggcgtgttggtgatgcaattagaacagcgccggctgttaatccgcgttcgaaatatcgacgatctgga

SEQ ID NO: 591267 - DNA, 75 bp, synthetic construct
  source 1..75: mol_type = other DNA
agaaatcactccagagttaaaagctccggttaatagccaccaggggacatctgattctaaaactgaatccgatgc

SEQ ID NO: 591268 - DNA, 75 bp, synthetic construct
  source 1..75: mol_type = other DNA
ctgaatcaggtttattaaaaaaactgtcaaaagtagctgaaggcataggtaacccttcagagactcgtgccgtcg

SEQ ID NO: 591269 - DNA, 75 bp, synthetic construct
  source 1..75: mol_type = other DNA
gcgccaacgcacaggaaaaaccggcattcaggaaaacagcaacaggaattgcggcaaccgcgttttatattgtgg

SEQ ID NO: 591270 - DNA, 75 bp, synthetic construct
  source 1..75: mol_type = other DNA
gttgacgcaatgaaacggcttaatttaggggacgtttctcgtgtagttcaggaagatgttgctcaacaggaacag

SEQ ID NO: 591271 - DNA, 75 bp, synthetic construct
  source 1..75: mol_type = other DNA
aacagaggatgttaaagcacagcggttagaaacggtcaaactcgctcgtgatttgaaaggggaacgcgttgcaac

SEQ ID NO: 591272 - DNA, 75 bp, synthetic construct
  source 1..75: mol_type = other DNA
ggacacggcgaaagatagcaataaaacagttaaagaaactgcgaatcagattatcaatgcaaatgccgtagaaac

SEQ ID NO: 591273 - DNA, 75 bp, synthetic construct
  source 1..75: mol_type = other DNA
atgccagttagctgttacctctgcattttcttaaacgttggtttgggagaaggctctgcattacctgttggtgtg

SEQ ID NO: 591274 - DNA, 75 bp, synthetic construct
  source 1..75: mol_type = other DNA
ccgtgactggagcaaccctccccagtgggcaagagggcaggatgctgatgcgggtgcttcggcagacagacgttc

SEQ ID NO: 591275 - DNA, 75 bp, synthetic construct
  source 1..75: mol_type = other DNA
gagttgacctacgaggaacgcggtgctgacgggaaatggcgcaagccgggaaaagggaataacgaagcatttgac

SEQ ID NO: 591276 - DNA, 75 bp, synthetic construct
  source 1..75: mol_type = other DNA
atcacttcctggacagtcattaccgccgtggctggaatgtcaacgtctccagggggatggataacgccacacatg

SEQ ID NO: 591277 - DNA, 75 bp, synthetic construct
  source 1..75: mol_type = other DNA
cgtggctcgtcttcccgcaggagcgttctggtgaaacggtatccccggaactgacggccggggcagaaaaacgcc

SEQ ID NO: 591278 - DNA, 75 bp, synthetic construct
  source 1..75: mol_type = other DNA
ctgccggaaaggaaagaaaaacgccgtcaccggaaggaaaaactgcgcacagagcgggcagaggataatccgtgg

SEQ ID NO: 591279 - DNA, 75 bp, synthetic construct
  source 1..75: mol_type = other DNA
taagaaaaaacactgccgggatcatcagagcaccgcgccgaatgcctgtagcggaagccgtacataaatatatgc

SEQ ID NO: 591280 - DNA, 75 bp, synthetic construct
  source 1..75: mol_type = other DNA
agtatctgctgagcctggtccccgactgcccgtggcagcatattgtgttcacgttaccctgccagtactggtccc

SEQ ID NO: 591281 - DNA, 75 bp, synthetic construct
  source 1..75: mol_type = other DNA
gatattcacggtgatccacacatgggggcgtgaccagcagtggcatccgcatatccatttatcgacaactgccgg

SEQ ID NO: 591282 - DNA, 75 bp, synthetic construct
  source 1..75: mol_type = other DNA
tactgtcacgaaaatacccggagctggtgataccggatgcgctggcagttgaaggaagcagcagacgggactgga

SEQ ID NO: 591283 - DNA, 75 bp, synthetic construct
  source 1..75: mol_type = other DNA
tacggggctgaagcggggctaccgtccggcagagctggtcatgatgcatgagccactggcacgacagcgggtgtg

SEQ ID NO: 591284 - DNA, 75 bp, synthetic construct
  source 1..75: mol_type = other DNA
gccgccaggcagatgtggtgccggggatattcacggtcatccacacatggggacgtgaccagcagtggcatccgc

SEQ ID NO: 591285 - DNA, 75 bp, synthetic construct
  source 1..75: mol_type = other DNA
gtttatggaaaggttctcatggcatgtggcagataaggggttccgtatggtgaggtattacgggttcctgagccc

SEQ ID NO: 591286 - DNA, 75 bp, synthetic construct
  source 1..75: mol_type = other DNA
acaacagcaaactgacgcccgccgccagttgaatgaaattgagcgccgactggggacactcacgggaaatagtcc

SEQ ID NO: 591287 - DNA, 75 bp, synthetic construct
  source 1..75: mol_type = other DNA
attggcgcaccgctggtcgctattctcgccgcagcggtgggttatctggcaacggcgcaagctctgctggcaagg

SEQ ID NO: 591288 - DNA, 75 bp, synthetic construct
  source 1..75: mol_type = other DNA
tggtcagaaatccattccgctttcggcttcctcgaaaatatttcgctgtgggatgtcacttccacggtacagggc

SEQ ID NO: 591289 - DNA, 75 bp, synthetic construct
  source 1..75: mol_type = other DNA
gatgatgttcgataacctcgacgaccgtgaattctccggttcgctgggacggctttgctttatcctcatttgcgg

SEQ ID NO: 591290 - DNA, 75 bp, synthetic construct
  source 1..75: mol_type = other DNA
ctgacggccggggcagaaaaacgccgtcgtcggaagaaaaaactgcggacggagcgtgcggaagataatccatgg

SEQ ID NO: 591291 - DNA, 75 bp, synthetic construct
  source 1..75: mol_type = other DNA
catcacgcagtcattgcgcggtgacagcgacggggagagccagcgaattgatccggccagctaccgttcctggcg

SEQ ID NO: 591292 - DNA, 75 bp, synthetic construct
  source 1..75: mol_type = other DNA
ccgacgctctccgggatctaccagccgcaacttaatagccaactttgcaacggatgtggagcatgtgcagccagt

SEQ ID NO: 591293 - DNA, 75 bp, synthetic construct
  source 1..75: mol_type = other DNA
ctgatgagcattgggcttatcgtgccactgattatggcgctgatgatgtttgataatctcgacgaccgcgagttt

SEQ ID NO: 591294 - DNA, 75 bp, synthetic construct
  source 1..75: mol_type = other DNA
gcactcagcgtgagttgctgaactcattgttgcagggtggcgacacgctactgctggaactgaccaagctgaaag

SEQ ID NO: 591295 - DNA, 75 bp, synthetic construct
  source 1..75: mol_type = other DNA
actatcggcggcgttgaatcagcaagcgcagcggatggatctcgtcgcctcacagcagcgtcaggctgccagcca

SEQ ID NO: 591296 - DNA, 75 bp, synthetic construct
  source 1..75: mol_type = other DNA
atcaccaaatatctattgatgctgattggcgggctggtaggtttctcgatgattggtattgagtggtcgaaatta

SEQ ID NO: 591297 - DNA, 75 bp, synthetic construct
  source 1..75: mol_type = other DNA
atatgccattcccgcccttccagatgcgtctggaaagcctcaacggtaaacaaacggggagaacgctgacgtctg

SEQ ID NO: 591298 - DNA, 75 bp, synthetic construct
  source 1..75: mol_type = other DNA
ggtttctcgtgggatgcgctactacctgatgagcattgggcttatcgtaccgctgattatggcgttgatgatgtt

SEQ ID NO: 591299 - DNA, 75 bp, synthetic construct
  source 1..75: mol_type = other DNA
ttacggagctgaagcgggactaccgtctgacagagctggtcctgatgcatgagccactggcgcaacagcgggtgt

SEQ ID NO: 591300 - DNA, 75 bp, synthetic construct
  source 1..75: mol_type = other DNA
cgttacaacagccaccgcacaaaacgggaagaatacctggcgatgagttcatggaaaggttctcgtggcatgtgg

SEQ ID NO: 591301 - DNA, 75 bp, synthetic construct
  source 1..75: mol_type = other DNA
aaacgccggttgctggaagaagtggtgtacgtcataacagaaacagtgagaaaaacggcgaggcaaatcaccttg

SEQ ID NO: 591302 - DNA, 75 bp, synthetic construct
  source 1..75: mol_type = other DNA
taccgcgcttcgtgctctgctgttaagccgcaagaatccgtttggcgatatcaaatcggatggcacggtgaaaac

SEQ ID NO: 591303 - DNA, 75 bp, synthetic construct
  source 1..75: mol_type = other DNA
tgcaggtcaggatgaaattggtctgcgttacaacagccaccggacaaaacgggaagaatacctggtgatgagtgg

SEQ ID NO: 591304 - DNA, 75 bp, synthetic construct
  source 1..75: mol_type = other DNA
tcctgagtccggtgaagcgccggttactggaagaggtggtgtacgccataacggagacagtgagaaaaacagcga

SEQ ID NO: 591305 - DNA, 75 bp, synthetic construct
  source 1..75: mol_type = other DNA
acgggactggaatgtcaacgtatcccgggtgatggataacgccacacatgtggcggtgtacttcggctcttacct

SEQ ID NO: 591306 - DNA, 75 bp, synthetic construct
  source 1..75: mol_type = other DNA
ttttcataaacgttggtttgggagaaggctctgcattacctgttggtgtccctgttccgtggccttccgccactc

SEQ ID NO: 591307 - DNA, 75 bp, synthetic construct
  source 1..75: mol_type = other DNA
ttttcataaacgttggtttgggagaaggttcagcattacctgttggtgcgcctgttccgtggccttcagagacac

SEQ ID NO: 591308 - DNA, 75 bp, synthetic construct
  source 1..75: mol_type = other DNA
ccgttggtgtgcctgttccatggccctcagccacaccaccaacgggctggctgaaatgtaacggtgcagcatttt

SEQ ID NO: 591309 - DNA, 75 bp, synthetic construct
  source 1..75: mol_type = other DNA
attcgcggttgggatgatgggcgcggggtggatgctggccgcgctttgcttaattggcagccacacacaattttg

SEQ ID NO: 591310 - DNA, 75 bp, synthetic construct
  source 1..75: mol_type = other DNA
ggcccttagaaacaccaccaacgggctggctgaaatgcaatggagcagcattttcttctgaaatgtatcccaaac

SEQ ID NO: 591311 - DNA, 75 bp, synthetic construct
  source 1..75: mol_type = other DNA
gatttgcgcggtgagtttatccgtggatgggatgacggacgaaagattgacaccgggcgtgccctgctaagcagc

SEQ ID NO: 591312 - DNA, 75 bp, synthetic construct
  source 1..75: mol_type = other DNA
tggcatgtggcggataagggggttccgtatggtgaggtactacggtttcctgagtccggtgaagcgccggttact

SEQ ID NO: 591313 - DNA, 75 bp, synthetic construct
  source 1..75: mol_type = other DNA
aaggaagcagtaaacgggaatggaatcgtttcctggacagtcattaccgacggggcaggaatgtcaacgtatcaa

SEQ ID NO: 591314 - DNA, 75 bp, synthetic construct
  source 1..75: mol_type = other DNA
gactgaagaggggctaccgtctggcagagctggtcgggatgcatgagccactggcgcgacagcgggtgtgcggct

SEQ ID NO: 591315 - DNA, 75 bp, synthetic construct
  source 1..75: mol_type = other DNA
gacgggactggaatcgcttcctggacagtcattaccggcggggctggaatgtcaacgtatcccgggtgatggata

SEQ ID NO: 591316 - DNA, 75 bp, synthetic construct
  source 1..75: mol_type = other DNA
gcgcaggcttgccccgaatcgctattttctccgcgccacaccagggcctgggatttgcagttcaccattggggac

SEQ ID NO: 591317 - DNA, 75 bp, synthetic construct
  source 1..75: mol_type = other DNA
gtatggtgaggtactacggtttcctgagtccggtgaagcgccgcttactggaagaagtgggtaagcgtctcatct

SEQ ID NO: 591318 - DNA, 75 bp, synthetic construct
  source 1..75: mol_type = other DNA
cgttacaacagtcaccgtacaaaacgggaagaatatctgttgatgagtggagatgagttcatggaaaggttctcc

SEQ ID NO: 591319 - DNA, 75 bp, synthetic construct
  source 1..75: mol_type = other DNA
gcgcaggcttgccccgaatcgctattttctccgcgccacaccagggcctgggatttgctgttcaccatcggggag

SEQ ID NO: 591320 - DNA, 75 bp, synthetic construct
  source 1..75: mol_type = other DNA
tgcggggtgaaggctggcgcacagtggatacagtatctgctgagcctggtccccgactgcccgtggcagcatatt

SEQ ID NO: 591321 - DNA, 75 bp, synthetic construct
  source 1..75: mol_type = other DNA
atacgcccgtaaggtgatgagcatgtggcgctaccggataacgcggctactgtcccggaaatacccggagctggt

SEQ ID NO: 591322 - DNA, 75 bp, synthetic construct
  source 1..75: mol_type = other DNA
cgatgagtttatggaaaggttctcctggcatgtggcggataagggtttccgtatggtgaggtactacggtttcct

SEQ ID NO: 591323 - DNA, 75 bp, synthetic construct
  source 1..75: mol_type = other DNA
gcatactcactggtcgctggcgcaaagccagtaacggtatccgtccgccctggtccggtgatgaatctcattttc

SEQ ID NO: 591324 - DNA, 75 bp, synthetic construct
  source 1..75: mol_type = other DNA
aggatgaaatcggtctgcgttacaacagtcaccgtacaaaacgggaagaatacctgttgatgagtggagatgagt

SEQ ID NO: 591325 - DNA, 75 bp, synthetic construct
  source 1..75: mol_type = other DNA
ataacaatttcgcatggagcattggggccggtgttcgctatgacgtaaccccggatatcgctcttgacctcagct

SEQ ID NO: 591326 - DNA, 75 bp, synthetic construct
  source 1..75: mol_type = other DNA
aagtataacgtagataaagacagctggtcaggcggttactggcgtgatgacctgaagaatgaggtgtcagtcaac

SEQ ID NO: 591327 - DNA, 75 bp, synthetic construct
  source 1..75: mol_type = other DNA
tggatgcaggtgacagcagtgtgagttacaaggacgagtggggcgataaatataaatcagaggctgatgttaaaa

SEQ ID NO: 591328 - DNA, 75 bp, synthetic construct
  source 1..75: mol_type = other DNA
aaatactctagtaaagagataacgacagaactgaacaataaagcgacattaagttattcggtatattataagttg

SEQ ID NO: 591329 - DNA, 75 bp, synthetic construct
  source 1..75: mol_type = other DNA
atgacttcagaaacagcagtgcattcactccatgggtgtctgttggactgggttatgcacggatacatcataagg

SEQ ID NO: 591330 - DNA, 75 bp, synthetic construct
  source 1..75: mol_type = other DNA
ggttatgcacgggtacatcataaggcgacatatactgatacctcctggaatgaatctggcgagataagtgatatt

SEQ ID NO: 591331 - DNA, 75 bp, synthetic construct
  source 1..75: mol_type = other DNA
cgttttgtggttcaggtaacaggctatggtagtcgcggcgagcgatggatagttgatcgttacaacatcacgcag

SEQ ID NO: 591332 - DNA, 75 bp, synthetic construct
  source 1..75: mol_type = other DNA
gtctgatgtgtccgcactgtcgcgggctgattgccccggagcagaaacgcgaactgaataaccaggggatctggc

SEQ ID NO: 591333 - DNA, 75 bp, synthetic construct
  source 1..75: mol_type = other DNA
accggcagaagtgcccgccgtgccagggccagcggtgatgttgccctgtggctggtgcagaccgatgcgtttaag

SEQ ID NO: 591334 - DNA, 75 bp, synthetic construct
  source 1..75: mol_type = other DNA
ttgtcacgctcaggctctgctgataactttgcatggagccttggcgcaggtgtccgctatgacgtcaccccggat

SEQ ID NO: 591335 - DNA, 75 bp, synthetic construct
  source 1..75: mol_type = other DNA
attcggtgccggccttgcggtgggctatgatttttatcagcattacaatgttcctgtgcgcacggaagtggaatt

SEQ ID NO: 591336 - DNA, 75 bp, synthetic construct
  source 1..75: mol_type = other DNA
gcatttccctgactggctggggggctggttttacgacgaactgacgtatgaagagcggagcagtgacgggaaatg

SEQ ID NO: 591337 - DNA, 75 bp, synthetic construct
  source 1..75: mol_type = other DNA
cgaggtgttacagcaggaaggagcattagtaaactggaaaaataatcccgacggtacgcgtagcccctatgaaat

SEQ ID NO: 591338 - DNA, 75 bp, synthetic construct
  source 1..75: mol_type = other DNA
atggtttctgttccccatacggtgaatgacttcatttccagaagtgctttgttttttaatcgcagtggaagtgac

SEQ ID NO: 591339 - DNA, 75 bp, synthetic construct
  source 1..75: mol_type = other DNA
gtcgaaaatcgacaatatgctctctggcagcacctcttcgctggcaacgcaaatgcaggatttcttcaccagcct

SEQ ID NO: 591340 - DNA, 75 bp, synthetic construct
  source 1..75: mol_type = other DNA
ctgtactggagaatactaaaaaccagggtaacagcgcgattagcgccacagtgaccgatggctctgccgtgctgg

SEQ ID NO: 591341 - DNA, 75 bp, synthetic construct
  source 1..75: mol_type = other DNA
tgtggtcgccggacacctgcccggtgcacctgctgccttatctcgcctgggcattttccgttgaccgctgggatc

SEQ ID NO: 591342 - DNA, 75 bp, synthetic construct
  source 1..75: mol_type = other DNA
attcaggaaattccgggggatattttcgcagcggcggcaacttatgacggtgaagtaattaccatttatccaggc

SEQ ID NO: 591343 - DNA, 75 bp, synthetic construct
  source 1..75: mol_type = other DNA
agcggcaaccgtccttttagccgcattaatgagtatgggcggcgcagtcggtgttgccgccagtctggcgaccgc

SEQ ID NO: 591344 - DNA, 75 bp, synthetic construct
  source 1..75: mol_type = other DNA
ggttatttgccagcccggagcgcgatattgctgccagtcacggaaacaccgtattcatataccatgttgatgatg

SEQ ID NO: 591345 - DNA, 75 bp, synthetic construct
  source 1..75: mol_type = other DNA
cattccgttagtccaagcgcgctgaacgggcagggaagggttaaagagctgattgatgcaattccacccgaggaa

SEQ ID NO: 591346 - DNA, 75 bp, synthetic construct
  source 1..75: mol_type = other DNA
gcagtgatgtcgaatgcgggcataccttcgtctgtacgatgaccttttcccataccctcagccccggcgcccgct

SEQ ID NO: 591347 - DNA, 75 bp, synthetic construct
  source 1..75: mol_type = other DNA
gatctgcaaagcaacagtaaaacggtgggcggtgcgaaatcctttaacgacgcttatgcctcgttagtgagtgat

SEQ ID NO: 591348 - DNA, 75 bp, synthetic construct
  source 1..75: mol_type = other DNA
cgtcaacatggatgtattaatcactgacgaagcgaaaatcgccatggcgagcgaagaagatgtgggtgatagcga

SEQ ID NO: 591349 - DNA, 75 bp, synthetic construct
  source 1..75: mol_type = other DNA
ctggcgttggcatttgctgaggctttcaatacccaacataacaagggatttgatgccaatggtaaggaagggggg

SEQ ID NO: 591350 - DNA, 75 bp, synthetic construct
  source 1..75: mol_type = other DNA
aagcgcctcagtccttcccgtaatgacaacaacgtccacgataaaatgtttcttgacggctccttcctgaagatt

SEQ ID NO: 591351 - DNA, 75 bp, synthetic construct
  source 1..75: mol_type = other DNA
cagcgttacctaaaaaaaagcgattgagtaaagtcaagttgattatcctaaagagattatgggtttcagatgatt

SEQ ID NO: 591352 - DNA, 75 bp, synthetic construct
  source 1..75: mol_type = other DNA
cgctggtcagtggcgacggttgaggatgacgtgctgacagactgggttatgcaggacaccccggaggcatcatga

SEQ ID NO: 591353 - DNA, 75 bp, synthetic construct
  source 1..75: mol_type = other DNA
ccggaacaggtcgccgccacgggcgctgcacggcagacggtaaaccttacggctgacgtcatgaagcgcctcagt

SEQ ID NO: 591354 - DNA, 75 bp, synthetic construct
  source 1..75: mol_type = other DNA
agttacattatcttgggctactactgcctctcttcacaacttcatcatgggctgcggagcaaaattcatctgtcc

SEQ ID NO: 591355 - DNA, 75 bp, synthetic construct
  source 1..75: mol_type = other DNA
agagaagagcatgtgagggatgtactgaagattgttacacatgctcatgggcatttcctgaaaaatttgggataa

SEQ ID NO: 591356 - DNA, 75 bp, synthetic construct
  source 1..75: mol_type = other DNA
agagaagagcatgtgagggatgcactgatgattgttacacatgctcatgggcattccctgaaaagttcgggataa

SEQ ID NO: 591357 - DNA, 75 bp, synthetic construct
  source 1..75: mol_type = other DNA
caggttacgggttacggaagtatgggtgagcgctggataattgaccgttacaacatacggtattcgctgcgctgt

SEQ ID NO: 591358 - DNA, 75 bp, synthetic construct
  source 1..75: mol_type = other DNA
agcgtaaaagtgaattgctcgagcagcgtgccgaggatgttccaaaacgttcggtaccggacggcgtgcagtttc

SEQ ID NO: 591359 - DNA, 75 bp, synthetic construct
  source 1..75: mol_type = other DNA
ttctgcatgggtacgagaaaattcagtggcctgatgcgccggagtgggcgtgccgggaaacctggctggagtgtg

SEQ ID NO: 591360 - DNA, 75 bp, synthetic construct
  source 1..75: mol_type = other DNA
gacaccggcgaactgcacggcagacagctgacgccgcgccggttgcgcacgatatttgataccaacattcagtcg

SEQ ID NO: 591361 - DNA, 75 bp, synthetic construct
  source 1..75: mol_type = other DNA
gcgacaacgggatgcgttttcataacggtaaccttccgctgcatgaaaacggtatgcaaatccacgcctataacg

SEQ ID NO: 591362 - DNA, 75 bp, synthetic construct
  source 1..75: mol_type = other DNA
tatgggtcttgcaggtaacgaacctgccaccgtggatatcgacagtattcccggttttattcgcgacgtagaaga

SEQ ID NO: 591363 - DNA, 75 bp, synthetic construct
  source 1..75: mol_type = other DNA
agttgaataatgacaactttgcccaggaaaaacggcggctgattatgagttttcaagctctgcctcctgggtcga

SEQ ID NO: 591364 - DNA, 75 bp, synthetic construct
  source 1..75: mol_type = other DNA
gcacaactggccctggtcattgatcgccatccggaccgcagtcgttatatacggcatctgccagatgaggcacga

SEQ ID NO: 591365 - DNA, 75 bp, synthetic construct
  source 1..75: mol_type = other DNA
caggtgggcttgaagctgctgtagcctgttcacttcaggctgaaggttttgatatcgcggtcatcaatcccagac

SEQ ID NO: 591366 - DNA, 75 bp, synthetic construct
  source 1..75: mol_type = other DNA
atgacaactcaggtccgcaaaaatgtcatggatatgtttatcgatggtgcgcgccgtggctttactatcgccacg

SEQ ID NO: 591367 - DNA, 75 bp, synthetic construct
  source 1..75: mol_type = other DNA
agataaacttgacgccgccatgctagcacaactggccctggtcattgatcgccatccggaccgcagtcgttatat

SEQ ID NO: 591368 - DNA, 75 bp, synthetic construct
  source 1..75: mol_type = other DNA
cgcttgctatggcgggcggattttcagcccaggctctggctgataggggtaaaacaggcttttatgtgaccggta

SEQ ID NO: 591369 - DNA, 75 bp, synthetic construct
  source 1..75: mol_type = other DNA
ctgcgctttatatggctgcgcttgtcgcgaccagatttaatcccgtaataaaagatttttatacgcgactcatta

SEQ ID NO: 591370 - DNA, 75 bp, synthetic construct
  source 1..75: mol_type = other DNA
atcaggccgataagcgcctgattgttatcaagcagccgattggcgtcaccgcggctatcacgccgtggaacttcc

SEQ ID NO: 591371 - DNA, 75 bp, synthetic construct
  source 1..75: mol_type = other DNA
gtcaccatcgggccgctgatcgatgaaaaagcagtagcaaaagtggaagagcatattgccgatgcgctggagaaa

SEQ ID NO: 591372 - DNA, 75 bp, synthetic construct
  source 1..75: mol_type = other DNA
ctgttcacttcaggctgaaggttttgatatcgcggtcatcaatcccagacaggccaggaatttctctcgtgctat

SEQ ID NO: 591373 - DNA, 75 bp, synthetic construct
  source 1..75: mol_type = other DNA
atgacaggctccggaagacggttgtggcgcacgtattcggtgaacgcactctggccacactggagcgtcttctga

SEQ ID NO: 591374 - DNA, 75 bp, synthetic construct
  source 1..75: mol_type = other DNA
tcaaatcggatggcacggtgaaaacggctctcgaaaaccttggtttgggagaaggctctgcattacccgttggtg

SEQ ID NO: 591375 - DNA, 75 bp, synthetic construct
  source 1..75: mol_type = other DNA
aaaagagcatctggtagaagttatcattcagacaacagcggttccgctggaggctcagatagcggcggatttagc

SEQ ID NO: 591376 - DNA, 75 bp, synthetic construct
  source 1..75: mol_type = other DNA
aggctcagatagcggcggatttagcggcgggggggggttcttttgggggggggggggcgtccggccgctggtaac

SEQ ID NO: 591377 - DNA, 75 bp, synthetic construct
  source 1..75: mol_type = other DNA
tccgccaacaggctggctgaaatgcaacggtgccgctttttctgctgaagaatacccggaactggcaaaggctta

SEQ ID NO: 591378 - DNA, 75 bp, synthetic construct
  source 1..75: mol_type = other DNA
ggaggagtggaattacacacccaccaagggcagctcttcagagttagtgattatcgtacaaaagaaataccagca

SEQ ID NO: 591379 - DNA, 75 bp, synthetic construct
  source 1..75: mol_type = other DNA
agccgcaataatccgtttggtgatatcaaatcggacggcactgtgcaaacggctctcgaaaaccttggtttggga

SEQ ID NO: 591380 - DNA, 75 bp, synthetic construct
  source 1..75: mol_type = other DNA
agacgtacttagttcagggccatttagtcaacatgggcaagtattatctacaggtctaaaggaagccgcaattat

SEQ ID NO: 591381 - DNA, 75 bp, synthetic construct
  source 1..75: mol_type = other DNA
ggcatttttacaggctgaagcgcgtgaacgttccgccgaagcagaagcccgcgccaccaaaatggtatcggaagc

SEQ ID NO: 591382 - DNA, 75 bp, synthetic construct
  source 1..75: mol_type = other DNA
aggctggctaaaatgcaacggagcagctttttctgctgaagaatacccagaactggcaaaggcttacccgacaaa

SEQ ID NO: 591383 - DNA, 75 bp, synthetic construct
  source 1..75: mol_type = other DNA
gtgtttgattacacatttgataccagcggtttgattccggcatcaccagaacttcgtccgcgtaatattgcattt

SEQ ID NO: 591384 - DNA, 75 bp, synthetic construct
  source 1..75: mol_type = other DNA
attacctgatttacgcggtgagtttattcgtggctgggatgacggacgtggagtggataacggaaggggattatt

SEQ ID NO: 591385 - DNA, 75 bp, synthetic construct
  source 1..75: mol_type = other DNA
ggccttcagccactccgccaacaggctggctgaaatgcaacggagcagctttttctgctgaagaatacccggaac

SEQ ID NO: 591386 - DNA, 75 bp, synthetic construct
  source 1..75: mol_type = other DNA
tctcatttgatgccagtcgcgtagttccaactgcaccagaaaaccgtccacgcagtatcgcatttaacttcatcg

SEQ ID NO: 591387 - DNA, 75 bp, synthetic construct
  source 1..75: mol_type = other DNA
gatggcgcgatggaaaaatccctcgacaccatgttccagattgcgctggactatgacaaaggcgtcgatattcac

SEQ ID NO: 591388 - DNA, 75 bp, synthetic construct
  source 1..75: mol_type = other DNA
tcgtcacctgatgcactgaacacgctgaacgaactggctgcggcgctgggcaatgacccgaattttgcgaccacc

SEQ ID NO: 591389 - DNA, 75 bp, synthetic construct
  source 1..75: mol_type = other DNA
aggtgctccagctattggcgttccgttcttctggccgtccgcagcaatgccagataccgtaatcgatagctggtc

SEQ ID NO: 591390 - DNA, 75 bp, synthetic construct
  source 1..75: mol_type = other DNA
ctacgacaaaggcgtcgatattcacctgcacgaaaccactccgtcgggcgtggcagccatcaattatatggttga

SEQ ID NO: 591391 - DNA, 75 bp, synthetic construct
  source 1..75: mol_type = other DNA
tgctgctggaaaccggttttgactacgaaaatggcgtggcggtgcagacccgcacggcgcgccagaccgtggaga

SEQ ID NO: 591392 - DNA, 75 bp, synthetic construct
  source 1..75: mol_type = other DNA
cacgacaaaggcgtaaaagttatgaccggcaccgacagcgttatcgaccactggtcgccttacggcctgggcgac

SEQ ID NO: 591393 - DNA, 75 bp, synthetic construct
  source 1..75: mol_type = other DNA
gctgacctgtgaagccgacaccctcggctcctgtggttacgtttatctggctgtttatccgacgcccgaaacgaa

SEQ ID NO: 591394 - DNA, 75 bp, synthetic construct
  source 1..75: mol_type = other DNA
agtcattatcataatattcggtcatgggacgcgtgggataacacggtattggtgccaaatgacagagggggggat

SEQ ID NO: 591395 - DNA, 75 bp, synthetic construct
  source 1..75: mol_type = other DNA
cctgttccgtggccttccgccactccgccaacaggctggctgaaatgcaacggtgccgctttttctgctgaagaa

SEQ ID NO: 591396 - DNA, 75 bp, synthetic construct
  source 1..75: mol_type = other DNA
ccgcaagaatccgtttggcgatatcaaatcggatggcactgtgcaaacgggctctcgaaaatccttggtttggga

SEQ ID NO: 591397 - DNA, 75 bp, synthetic construct
  source 1..75: mol_type = other DNA
gccagcctggagaaggggcggcacgaccagctgcttaccgcgcttcgtgcgctgctgttaagccgcaagaatccg

SEQ ID NO: 591398 - DNA, 75 bp, synthetic construct
  source 1..75: mol_type = other DNA
gtggccctcagccactccgccaacaggctggctaaaatgcaacggagcagctttttctgctgaagaatacccgga

SEQ ID NO: 591399 - DNA, 75 bp, synthetic construct
  source 1..75: mol_type = other DNA
tttaaaacatataaacagtccgtagctaatttaggtactgctggcttagaaacccgccctcgtaatattgcattt

SEQ ID NO: 591400 - DNA, 75 bp, synthetic construct
  source 1..75: mol_type = other DNA
aggctctgcattgcctgttggtgtaccggttccgtggcccaccgccacaccgccagaaggctggttaaagtgcaa

SEQ ID NO: 591401 - DNA, 75 bp, synthetic construct
  source 1..75: mol_type = other DNA
ccggagatatcagttcgctcggctctacacaatacggatttggtgacgctttaacctctaatcaactgggggtca

SEQ ID NO: 591402 - DNA, 75 bp, synthetic construct
  source 1..75: mol_type = other DNA
accctgtgctggcgaaagtgtttccttcgctggtattacctgaagcccgcggtgatttcattcgtatctgggatg

SEQ ID NO: 591403 - DNA, 75 bp, synthetic construct
  source 1..75: mol_type = other DNA
aatgctggaaaagcaccgtcatcctgttgtcgccaacgatgggtatgactcaaaagaggaatgggaactggcgac

SEQ ID NO: 591404 - DNA, 75 bp, synthetic construct
  source 1..75: mol_type = other DNA
tttttggatatgaccacggggccaaataataatactgtcggcgcatttacctcttcaacattgacaccaaatctc

SEQ ID NO: 591405 - DNA, 75 bp, synthetic construct
  source 1..75: mol_type = other DNA
gtaacggcgcagcattttcttctgaaaagtacccaaaactggcaaaggcttaccccaccaataaattaccagact

SEQ ID NO: 591406 - DNA, 75 bp, synthetic construct
  source 1..75: mol_type = other DNA
tatcaagcagccgattggcgtgaccgccgccattaccccgtggaacttcccggcggcgatgattacccgtaaagc

SEQ ID NO: 591407 - DNA, 75 bp, synthetic construct
  source 1..75: mol_type = other DNA
taatgaccagtccgtgtcgggtacagtggccgttaaccccgtcgatacccgtccacgcaacattgcatttaacta

SEQ ID NO: 591408 - DNA, 75 bp, synthetic construct
  source 1..75: mol_type = other DNA
gcaacacaggaagatattaaaacagaaactgtggcggacattgtgcagtcgctgccatcgtttactgcaacgcga

SEQ ID NO: 591409 - DNA, 75 bp, synthetic construct
  source 1..75: mol_type = other DNA
atccgggagtatgccccgcaggcccatgaactccatcgtatcgcggatatcctgcaggcagtacagaagcgtaac

SEQ ID NO: 591410 - DNA, 75 bp, synthetic construct
  source 1..75: mol_type = other DNA
ttttcttaaacgttggtttgggagaaggttcggcattacctgttggtgtacctgttccatggccttcagccattc

SEQ ID NO: 591411 - DNA, 75 bp, synthetic construct
  source 1..75: mol_type = other DNA
acgccgggcaaacctgcgtctgcgccaaccgcctgtatgtgcagaacggcgtgtatgaccgctttgccgaaaaat

SEQ ID NO: 591412 - DNA, 75 bp, synthetic construct
  source 1..75: mol_type = other DNA
ctgttggtgtgcctgttccgtggccttccgccactccgccgacaggctggctgaaatgcaacggagcagcttttt

SEQ ID NO: 591413 - DNA, 75 bp, synthetic construct
  source 1..75: mol_type = other DNA
ttcaggaggcaattttttgcggattatggcgagtgcgcagacgtcgcggagagcagttactggaagaccgtctgg

SEQ ID NO: 591414 - DNA, 75 bp, synthetic construct
  source 1..75: mol_type = other DNA
caccgattgacggtctgatgaatggattaccgctggcccatgaattgctggcgcatatgcgtaaccccgacgcgc

SEQ ID NO: 591415 - DNA, 75 bp, synthetic construct
  source 1..75: mol_type = other DNA
gcgtatgtgcgtaatcctgaggcgcagccacatagtattaacctgacgcagttgcctgtcagcgaggctgacagg

SEQ ID NO: 591416 - DNA, 75 bp, synthetic construct
  source 1..75: mol_type = other DNA
gattcttcgttagttgcaagaaccgcgaacgaaaaccgaccgcgcaacatcgcatttaactacattgtaagggcg

SEQ ID NO: 591417 - DNA, 75 bp, synthetic construct
  source 1..75: mol_type = other DNA
gagataccggcgacaccggcggaaatgaaacgcgcccccgcaacattgcatttaactacatcgtgagggctgcat

SEQ ID NO: 591418 - DNA, 75 bp, synthetic construct
  source 1..75: mol_type = other DNA
ccggaagatttggctgattctgcgcagcggttgggcgaggtgtgtcagtggctggtggaaaacgagcaacagtga

SEQ ID NO: 591419 - DNA, 75 bp, synthetic construct
  source 1..75: mol_type = other DNA
gcctgttggtgtaccggttccatggcccaccgccacaccgccagcaggctggttaaagtgcgacgggcgcgcctt

SEQ ID NO: 591420 - DNA, 75 bp, synthetic construct
  source 1..75: mol_type = other DNA
caaagcgagtaacattcgatgcttccagagttgttccaactgcaaacgaaaaccgacctcgtaacattgccttta

SEQ ID NO: 591421 - DNA, 75 bp, synthetic construct
  source 1..75: mol_type = other DNA
tcttcccgatttgcgcggtgagtttatccgtggatgggacgacgggcgcaaagttgatacaggacgtaagttgct

SEQ ID NO: 591422 - DNA, 75 bp, synthetic construct
  source 1..75: mol_type = other DNA
ggcccaccgccacaccgccagaaggctggttaaagtgcgacgggcgcgcctttacaaaagaacaatatcctgttc

SEQ ID NO: 591423 - DNA, 75 bp, synthetic construct
  source 1..75: mol_type = other DNA
cggtgaatttattcgtggctgggatgatgggcgtagtgcggatgcggggagaacaatattatccgctcagggcga

SEQ ID NO: 591424 - DNA, 75 bp, synthetic construct
  source 1..75: mol_type = other DNA
tcattgctaagtggtcaggctgcaacatttattcgtacagctttgcaggattattacggttacgatctgaatact

SEQ ID NO: 591425 - DNA, 75 bp, synthetic construct
  source 1..75: mol_type = other DNA
aattacgacggtccacaggggaaaacggagctactcacactgcttgccggaatgctgcgcgagaagttgggttgg

SEQ ID NO: 591426 - DNA, 75 bp, synthetic construct
  source 1..75: mol_type = other DNA
tggaagatctgaacgacggtttacgcacgcctggcgcgattatgctcggcggcggtaatccggcgcagatcccgg

SEQ ID NO: 591427 - DNA, 75 bp, synthetic construct
  source 1..75: mol_type = other DNA
ttgcaggataaagcaccgctcactcttcaacagagcgatttgcaccccagcaaatgtagcgttattgttaccttc

SEQ ID NO: 591428 - DNA, 75 bp, synthetic construct
  source 1..75: mol_type = other DNA
ggtgagtttattcgtggctgggatgacgggcgcggtattgatgcaggacgtgttttattgagcattcagacaggg

SEQ ID NO: 591429 - DNA, 75 bp, synthetic construct
  source 1..75: mol_type = other DNA
atacaggagggagtttgattccatcaccaacgcttcattcacgaggaagtattggtaacacaggtggtagtgaaa

SEQ ID NO: 591430 - DNA, 75 bp, synthetic construct
  source 1..75: mol_type = other DNA
actgcctgttggtgtgcctgttccatggcccaccgccacaccgccagcaggctggttaaagtgcgacgggcgcac

SEQ ID NO: 591431 - DNA, 75 bp, synthetic construct
  source 1..75: mol_type = other DNA
ttttcataaacgttggtttgggagaaggctctgcattacccgtaggtgtgcctgttccgtggccttcagtcacac

SEQ ID NO: 591432 - DNA, 75 bp, synthetic construct
  source 1..75: mol_type = other DNA
agaaggcgcggcacgaccagctgcttaccgcgcttcgtgcgctgctgttaagccgcaagaatccgtttggtgata

SEQ ID NO: 591433 - DNA, 75 bp, synthetic construct
  source 1..75: mol_type = other DNA
cggcatctatccttgaacataaccatgaaatgcatggatggaccgggaacccactcatggctagtgatgtttatt

SEQ ID NO: 591434 - DNA, 75 bp, synthetic construct
  source 1..75: mol_type = other DNA
tcagttaccggcggcaatggcgaaagtttcccgtcaaggtgttccggttgcaggcgtggcggtatcaattgctat

SEQ ID NO: 591435 - DNA, 75 bp, synthetic construct
  source 1..75: mol_type = other DNA
ccgctatcggcgtttacgttcagttctggttcccggagatggcgcagtggatacccgcgttgattgctgttgcgc

SEQ ID NO: 591436 - DNA, 75 bp, synthetic construct
  source 1..75: mol_type = other DNA
tggaacaaacagtcgcgcaaaagccgaattaaacggagcattctttaacataacccgcccccgcaatatcgcgtt

SEQ ID NO: 591437 - DNA, 75 bp, synthetic construct
  source 1..75: mol_type = other DNA
tgcaattcagaatattgttggttcttttgggcgtacccagctttttagagacgtacttagttcagggccatttag

SEQ ID NO: 591438 - DNA, 75 bp, synthetic construct
  source 1..75: mol_type = other DNA
tctaagtaccagtattgtcggcgcaactgaaacccgcccccgtaacattgcgtttaattacatcgtaagggcggc

SEQ ID NO: 591439 - DNA, 75 bp, synthetic construct
  source 1..75: mol_type = other DNA
ggcgcgaaattctctgccactgattatcctgtgctggcgaaagtatttccttcgctggtattacctgaagcccgc

SEQ ID NO: 591440 - DNA, 75 bp, synthetic construct
  source 1..75: mol_type = other DNA
ctgttggcgtacctgttccgtggccctcagccactccgccaacaggctggctaaaatgcaacggagcagcttttt

SEQ ID NO: 591441 - DNA, 75 bp, synthetic construct
  source 1..75: mol_type = other DNA
caatcacaaaaagcggctttcgtggtttttccagcgtagcgactgccgcaaatcctgtatcgggctgttatgttg

SEQ ID NO: 591442 - DNA, 75 bp, synthetic construct
  source 1..75: mol_type = other DNA
taagaacggttttacccgtggtaacccccagaccggcacacctgccaccgatctggatgatgactactttgatat

SEQ ID NO: 591443 - DNA, 75 bp, synthetic construct
  source 1..75: mol_type = other DNA
gtggtgttgttgcggcaacgactaaacctgcaggtgcgaatgaaacgcgcccacgaaatgtcgcttttaactata

SEQ ID NO: 591444 - DNA, 75 bp, synthetic construct
  source 1..75: mol_type = other DNA
aaagcgccggggaaacgatgacgaatatcgttaatgcggttacgcgcgtcaccgacattatgggggaaattgctt

SEQ ID NO: 591445 - DNA, 75 bp, synthetic construct
  source 1..75: mol_type = other DNA
tatgccggtacacgtgaaattgcagcgggtaataccgatctttcatcacgcactgaacagcaggcatccgcgctg

SEQ ID NO: 591446 - DNA, 75 bp, synthetic construct
  source 1..75: mol_type = other DNA
tggacgcagtgaaatgggcgagctggcacagagcgtttcgcatatgcagcgttccttgaccgacacagttactca

SEQ ID NO: 591447 - DNA, 75 bp, synthetic construct
  source 1..75: mol_type = other DNA
acaatacgcttaccaatttgagtggaaaggatgtagctggtcttctcacataccttggtttgggagaaggctctg

SEQ ID NO: 591448 - DNA, 75 bp, synthetic construct
  source 1..75: mol_type = other DNA
gtgccttgctaagtcttcagaatggaggagtggaatcacacacccaccaagggcagctcttcagagttagtgatt

SEQ ID NO: 591449 - DNA, 75 bp, synthetic construct
  source 1..75: mol_type = other DNA
tgaagccgcgcgtgcgggtgaacagggccgtggttttgccgtggtggcgggcgaagtgcgtaatcttgccagtcg

SEQ ID NO: 591450 - DNA, 75 bp, synthetic construct
  source 1..75: mol_type = other DNA
cgccaacaggctggctgaaatgcaacggtgccgctttttctgctgaagaatacccgcaactggcaaaggcttatc

SEQ ID NO: 591451 - DNA, 75 bp, synthetic construct
  source 1..75: mol_type = other DNA
aaagtgtttccttcgctggtattacctgaagcccgcggtgatttcattcgtatctgggatgatggtcgtggtgta

SEQ ID NO: 591452 - DNA, 75 bp, synthetic construct
  source 1..75: mol_type = other DNA
tgggatgatgggcgcgggattgatgtcggacgtaccctactttcagggcaatcacacacaattatggatcatgca

SEQ ID NO: 591453 - DNA, 75 bp, synthetic construct
  source 1..75: mol_type = other DNA
gatgatggtagtggcaccgctgcggcttttaatgtaccaggcggcaccgaaacacgcccacgtaacattgcattc

SEQ ID NO: 591454 - DNA, 75 bp, synthetic construct
  source 1..75: mol_type = other DNA
cttggtttaggggaaggctcggcactgcccgttggtgtacctattccatggccctcagccacaccgccaacgggg

SEQ ID NO: 591455 - DNA, 75 bp, synthetic construct
  source 1..75: mol_type = other DNA
cacgcgctttattgagcattcaaaccgggatgttggaaaaacaccgccatattgttgtagctaacgatggatatg

SEQ ID NO: 591456 - DNA, 75 bp, synthetic construct
  source 1..75: mol_type = other DNA
aacaaagataactaaccaccacggcaatggcggtaatgctgatgatatttcggctggtgtctccggttcacctcc

SEQ ID NO: 591457 - DNA, 75 bp, synthetic construct
  source 1..75: mol_type = other DNA
agcgaataacaccatgaaaatcactgacccgcactactatctcgacaacgtgttgctggaaaccggttttgatta

SEQ ID NO: 591458 - DNA, 75 bp, synthetic construct
  source 1..75: mol_type = other DNA
aacggtagagaaaacgccacagctgaagggcaagctgaccatcagtcacgcctttgcgctggcaacgctcaacga

SEQ ID NO: 591459 - DNA, 75 bp, synthetic construct
  source 1..75: mol_type = other DNA
gccgagaaccgcaacgttccataaagggcaactggtggggggagtgtggcaggttgatgcgcatttgaaacgcct

SEQ ID NO: 591460 - DNA, 75 bp, synthetic construct
  source 1..75: mol_type = other DNA
cgatattcacctgcacgaaaccactccggcaggcgtggcagccatcaattatatggttgaaacggtagagaaaac

SEQ ID NO: 591461 - DNA, 75 bp, synthetic construct
  source 1..75: mol_type = other DNA
ccgccgaggcggtggcgcgtatctcgccgcgcacggcgacgttccataaaggacaactggtatgggggagtgtga

SEQ ID NO: 591462 - DNA, 75 bp, synthetic construct
  source 1..75: mol_type = other DNA
ccgccgaggcggtggcgcgtatctcgccgagaacggcaacgttccataaagggcaactggtgtgggggagtgtgg

SEQ ID NO: 591463 - DNA, 75 bp, synthetic construct
  source 1..75: mol_type = other DNA
cagatgggggaacacaagcgatgcaggattgccagcccctaattatggaacttttaaaacatataaacagtccgt

SEQ ID NO: 591464 - DNA, 75 bp, synthetic construct
  source 1..75: mol_type = other DNA
ggatacggggagggcaatattatccgctcagggcgatgccatacgtaatatctatggtgagttcaagactgtaaa

SEQ ID NO: 591465 - DNA, 75 bp, synthetic construct
  source 1..75: mol_type = other DNA
ttgctttaagtgggtcattttttaatataactcgtccacgcaatattgcttttaacttcattgtaagagcagcat

SEQ ID NO: 591466 - DNA, 75 bp, synthetic construct
  source 1..75: mol_type = other DNA
gctgggatgacggacgtggtgtggatgccgggcgacaattattatcttcacagggggatgcaataagaaatattg

SEQ ID NO: 591467 - DNA, 75 bp, synthetic construct
  source 1..75: mol_type = other DNA
ccgccaacaggctggctgaaatgcaacggagcagctttttctgctgaagaatacccggaactggcaaaggcttac

SEQ ID NO: 591468 - DNA, 75 bp, synthetic construct
  source 1..75: mol_type = other DNA
ttgacaatgaatggtgttacttcttatttcggtgtccgtccacgcaacatcgcatttaactacattgtgagggct

SEQ ID NO: 591469 - DNA, 75 bp, synthetic construct
  source 1..75: mol_type = other DNA
ttttcataaacgttggtttgggagaaggttcggcattacctgttggtgtccctgttccatggccttcagccactc

SEQ ID NO: 591470 - DNA, 75 bp, synthetic construct
  source 1..75: mol_type = other DNA
cgacaaataaattgcctgatttacgtggtgagtttattcgtggctgggatgacgggcgtggtattgatgctgtac

SEQ ID NO: 591471 - DNA, 75 bp, synthetic construct
  source 1..75: mol_type = other DNA
atccgtttggcgatatcaaatcagatggcacggtgaaaacggctctcgaaaaccttggtttgggagaaggttcgg

SEQ ID NO: 591472 - DNA, 75 bp, synthetic construct
  source 1..75: mol_type = other DNA
ttgggagaaggctctgcattacctgttggtgtccctgttccgtggccttcagccactccgccaacaggctggctg

SEQ ID NO: 591473 - DNA, 75 bp, synthetic construct
  source 1..75: mol_type = other DNA
cccggttttgttgaattgctgggatcggggtttgctgttgaatacctgagccgcaagaatccgtttggcgatatc

SEQ ID NO: 591474 - DNA, 75 bp, synthetic construct
  source 1..75: mol_type = other DNA
cccgagcggaaaattacctgatttacgcggtgaatttattcgtggctgggatgacgggcgcggtgtggatacagg

SEQ ID NO: 591475 - DNA, 75 bp, synthetic construct
  source 1..75: mol_type = other DNA
taccgcgcttcgtgcgctgctgttaagccgcaaaaatccgtttggcgatatcaaatcggacggcacggtgaaaac

SEQ ID NO: 591476 - DNA, 75 bp, synthetic construct
  source 1..75: mol_type = other DNA
ataacctccatgttgcatgggttcgctcaggagatgacgggaagacctggacaacgccggaatggcttacagatt

SEQ ID NO: 591477 - DNA, 75 bp, synthetic construct
  source 1..75: mol_type = other DNA
atgacatcagacaatatcgctgaatatgttggtgagaataatcaatttactgagaagcctgtaactgaatccccc

SEQ ID NO: 591478 - DNA, 75 bp, synthetic construct
  source 1..75: mol_type = other DNA
gcgctgcgacgccattatgatttacccgcgctttttaagcgtggatgagattgatgacatcattgacgcacacag

SEQ ID NO: 591479 - DNA, 75 bp, synthetic construct
  source 1..75: mol_type = other DNA
atgtctgctggtctaacaagtgaatcattaaatcagtggcttagcgttagttctcttgctgcggtgatagcagga

SEQ ID NO: 591480 - DNA, 75 bp, synthetic construct
  source 1..75: mol_type = other DNA
aatgcagaaataattttagatattgatactccggacgactttattacagcgaaggaaaggtatactgaaatttag

SEQ ID NO: 591481 - DNA, 75 bp, synthetic construct
  source 1..75: mol_type = other DNA
agaacttcaattagcaatcactcaggccagtgccaccggagcgctcgcaactaccaaaaaaggtgcacttaccgc

SEQ ID NO: 591482 - DNA, 75 bp, synthetic construct
  source 1..75: mol_type = other DNA
tgaaaattaaacaggaagaatttgtttcaagggattttgtctacggagccactcctaacagaacgcttcctactt

SEQ ID NO: 591483 - DNA, 75 bp, synthetic construct
  source 1..75: mol_type = other DNA
agacaactggctgtactacattttcggtggggaagactttctaaacccatggagcataggggataacaacagaaa

SEQ ID NO: 591484 - DNA, 75 bp, synthetic construct
  source 1..75: mol_type = other DNA
aacggacagattgccaagtttgtaactgtgcaaggccattccatggctgtatatgatgcgtatggttcgcagcag

SEQ ID NO: 591485 - DNA, 75 bp, synthetic construct
  source 1..75: mol_type = other DNA
catagcgccgaagaagagcgccaggcgattcagtatctgctggatctgcgctgcgacgccattatgatttacccg

SEQ ID NO: 591486 - DNA, 75 bp, synthetic construct
  source 1..75: mol_type = other DNA
atgatgacgacgatgctggaagtggcgaagcgcgccggggtttcaaaagcgaccgtttcccgcgtgctttcaggt

SEQ ID NO: 591487 - DNA, 75 bp, synthetic construct
  source 1..75: mol_type = other DNA
ccggcgctctccagcgtaaaaattccggtgactgagatgattcaggaaattattggacggctgatttttatgctc

SEQ ID NO: 591488 - DNA, 75 bp, synthetic construct
  source 1..75: mol_type = other DNA
ctacaaaccggcagcatcaattcttatcggcatagctagcctgattccaaccatcacgcaggactcattcgagaa

SEQ ID NO: 591489 - DNA, 75 bp, synthetic construct
  source 1..75: mol_type = other DNA
gttcctcctgaggttgctttgggggctttggctggggcggtaatttttgttacctctgcggtagagtatcccatt

SEQ ID NO: 591490 - DNA, 75 bp, synthetic construct
  source 1..75: mol_type = other DNA
gcattggcatctggctctatcaccattccgataatccacgcgagttaattccggggagaaaagacgatggtaact

SEQ ID NO: 591491 - DNA, 75 bp, synthetic construct
  source 1..75: mol_type = other DNA
ctacaaaccagcagcatcaattcttatcggcatagccagcctgatacctaccatcacgcaggactctttcgagaa

SEQ ID NO: 591492 - DNA, 75 bp, synthetic construct
  source 1..75: mol_type = other DNA
cgtggtggtcggcgggatgaacgccaccggggccagcggttccagcgtaacggttaatacgccaaccgccgggtt

SEQ ID NO: 591493 - DNA, 75 bp, synthetic construct
  source 1..75: mol_type = other DNA
gataaatcatttcatcagttactggaaataaaaagtgccgggcatggcggaaataaacattatcagaaactcctg

SEQ ID NO: 591494 - DNA, 75 bp, synthetic construct
  source 1..75: mol_type = other DNA
ctctcttgctgcagttatcgtaggcgttccgccagaggtggcgctcggtgctcttgctggtgcggtaatttttgt

SEQ ID NO: 591495 - DNA, 75 bp, synthetic construct
  source 1..75: mol_type = other DNA
ctttaaatcagtggcttagtatgggatctcttgtagcagtcattgctggagttcctcctgaggtggctttggggg

SEQ ID NO: 591496 - DNA, 75 bp, synthetic construct
  source 1..75: mol_type = other DNA
tacctctgccgttgagtatccaatacgccgccgggttctcctgtcgatgctcagctttctctgtgggcttctctt

SEQ ID NO: 591497 - DNA, 75 bp, synthetic construct
  source 1..75: mol_type = other DNA
atggcaaccacgctgacaacggagtcacttaatcaggggcttagccttggtgcgctggcttccgttgttgccggg

SEQ ID NO: 591498 - DNA, 75 bp, synthetic construct
  source 1..75: mol_type = other DNA
cgccgccgggttctcctgtcgatgctcagcttcctctgcgggcttctattctacaaaccaactgcatcaatcctt

SEQ ID NO: 591499 - DNA, 75 bp, synthetic construct
  source 1..75: mol_type = other DNA
ttttcaggcacaggcggtgaacgtcaccgtggcctatcaaacctccgctgaaccggcgaaagtggctcaggctga

SEQ ID NO: 591500 - DNA, 75 bp, synthetic construct
  source 1..75: mol_type = other DNA
ctttaaatcagtggcttagtatgggttcgctcgcagcggtaatcgcaggtgtcccgccagaagtggcgttggggt

SEQ ID NO: 591501 - DNA, 75 bp, synthetic construct
  source 1..75: mol_type = other DNA
aaatgctcggcctgctgcaccgcattgcgatggtacagctttcgcctgctgcgcttggcaatgacatggctgcca

SEQ ID NO: 591502 - DNA, 75 bp, synthetic construct
  source 1..75: mol_type = other DNA
gatttggctaaacccgtaaaggggcgcaatttaataacaaatgaaatcattgagaaggtatcagaatgctacttt

SEQ ID NO: 591503 - DNA, 75 bp, synthetic construct
  source 1..75: mol_type = other DNA
aagggttgttagatgcggtaataggtctaccagataggttgcttcttggtacagggataccatgcgctattttga

SEQ ID NO: 591504 - DNA, 75 bp, synthetic construct
  source 1..75: mol_type = other DNA
caaaaccttccggatgaacgctgctcaggtactgcatgataaatatatgatctggtgcggagagcagctatggtc

SEQ ID NO: 591505 - DNA, 75 bp, synthetic construct
  source 1..75: mol_type = other DNA
aataccgtaatacaaacaactcaataggctacaccttccgctattacgcaacacaaatgaacgctgacaagaata

SEQ ID NO: 591506 - DNA, 75 bp, synthetic construct
  source 1..75: mol_type = other DNA
acggtgatgcaattacaggtcatgaaaaatgtccgtatgatctcgccgcaggaaaccgaagtggcaagtgtgatg

SEQ ID NO: 591507 - DNA, 75 bp, synthetic construct
  source 1..75: mol_type = other DNA
ccttactaatgcggctgcgcagcaacaagtctctgtaaatacttatattattgaaacgctaaatgagcgtttgaa

SEQ ID NO: 591508 - DNA, 75 bp, synthetic construct
  source 1..75: mol_type = other DNA
cctctttggtctggtattatgggtaaaaataagctggcagacgtttataaacggctgtatttactggtggtgtac

SEQ ID NO: 591509 - DNA, 75 bp, synthetic construct
  source 1..75: mol_type = other DNA
cctcattggtctgttattatgggtaaaaataagctggcagacgtttataaacggctgtatttactggtggtgtac

SEQ ID NO: 591510 - DNA, 75 bp, synthetic construct
  source 1..75: mol_type = other DNA
tctccttggtctggtattatgggtaaaaataagctggcagacgtttataaacggctgtatttactggtggtgtac

SEQ ID NO: 591511 - DNA, 75 bp, synthetic construct
  source 1..75: mol_type = other DNA
ctctgaaatatcaggcacgaccgaaggtcgctccggagtttattccgcgtgacatcaacccggaaatggagaacc

SEQ ID NO: 591512 - DNA, 75 bp, synthetic construct
  source 1..75: mol_type = other DNA
aaaactttcgctgaaatatcaggcacgtccaaaggttgctccggagtttattccgcgtgagatcaacccggaaat

SEQ ID NO: 591513 - DNA, 75 bp, synthetic construct
  source 1..75: mol_type = other DNA
aaatcgctcaaaaacagccgctgaccctgctctactcggcaaaaaataccacgcaaaaccatgcactggtcctgg

SEQ ID NO: 591514 - DNA, 75 bp, synthetic construct
  source 1..75: mol_type = other DNA
acgcccggaagactctggcagccagacagtgatgcaatcgcaggtcatgaaaaatgtccgcatgatctcgccgca

SEQ ID NO: 591515 - DNA, 75 bp, synthetic construct
  source 1..75: mol_type = other DNA
aaatgctcggtctgttgcaccgcattgcgatggtgcagctttcacctgccgcgctcggcaacgatatggcggcta

SEQ ID NO: 591516 - DNA, 75 bp, synthetic construct
  source 1..75: mol_type = other DNA
aaacgaggattgttggtggcgtgcgtgaagatgtatttgaagtggatgatgacgcgactcctgaggaaatagaaa

SEQ ID NO: 591517 - DNA, 75 bp, synthetic construct
  source 1..75: mol_type = other DNA
gctgaaatcggttgccggagcggctttcagtatggggattctggatgctgacagactgacgcgcatacgttcagt

SEQ ID NO: 591518 - DNA, 75 bp, synthetic construct
  source 1..75: mol_type = other DNA
cgggcgctgcaactgctggcgcgcgccgctgaaggcagcctgcgagacgcgttaagtctgactgaccaggcgatt

SEQ ID NO: 591519 - DNA, 75 bp, synthetic construct
  source 1..75: mol_type = other DNA
cccaggcggtcagttcgatgctcggtacgctcgacgacgatcaggcgctgtcgctggtagaagcgatggtggaag

SEQ ID NO: 591520 - DNA, 75 bp, synthetic construct
  source 1..75: mol_type = other DNA
ggagcaaccaaagcaaaaaagagtgaaccggcagccgctacccgcgcgcggccggtgaataacgctgcgctggaa

SEQ ID NO: 591521 - DNA, 75 bp, synthetic construct
  source 1..75: mol_type = other DNA
atttttctctggtcgcgtgtgggccggtgatagcgcaccagaaaacagagaaatagccgtctggcggcaatgctt

SEQ ID NO: 591522 - DNA, 75 bp, synthetic construct
  source 1..75: mol_type = other DNA
atgcatttatggtaacgcgggacaatatgacgtcagaaacacaaaaactggttgaatggtttttaacgccgcagg

SEQ ID NO: 591523 - DNA, 75 bp, synthetic construct
  source 1..75: mol_type = other DNA
aataccgtaatacaaacaacgcaataggctacaccttccgctattacgcaacacaaatgaatgccgataaaaata

SEQ ID NO: 591524 - DNA, 75 bp, synthetic construct
  source 1..75: mol_type = other DNA
caccattaatggcgttaaaatcggaacacacaaacacgatacccctcacggcatatccggcctgccgcataatta

SEQ ID NO: 591525 - DNA, 75 bp, synthetic construct
  source 1..75: mol_type = other DNA
tttccacacttgggaatatctggagaactctcgtacccccgatgcatataacaggattgttaaaggtgatgccga

SEQ ID NO: 591526 - DNA, 75 bp, synthetic construct
  source 1..75: mol_type = other DNA
ctgacgccgctgcgtggcaaaccgcaaattcagtttacgcaaaactggccgcgaatcgatggtgccacggcggcg

SEQ ID NO: 591527 - DNA, 75 bp, synthetic construct
  source 1..75: mol_type = other DNA
cgcgaacggcaggcgcttgcgcgtgtaacgcgggcgcgtgagcggtattcgcgcgcgcaggaaaccgcgggaaaa

SEQ ID NO: 591528 - DNA, 75 bp, synthetic construct
  source 1..75: mol_type = other DNA
cttgagcgtttcatccgcacgaaagaggaagtgaacaaggaagccgtcctggcggagccggatgctgtgaaaggc

SEQ ID NO: 591529 - DNA, 75 bp, synthetic construct
  source 1..75: mol_type = other DNA
tgtaaaaccaaccgtgatgagctgacgaacggcggcaaaaccaaaactgccaatctgaccaccggaacggtgtca

SEQ ID NO: 591530 - DNA, 75 bp, synthetic construct
  source 1..75: mol_type = other DNA
caattaccaactggcgcacggttggcggtaacgatcaggagatccagacctggcaacgcccggaagactctggta

SEQ ID NO: 591531 - DNA, 75 bp, synthetic construct
  source 1..75: mol_type = other DNA
gtggtgttcatttcatccttcccaggtcagtaaagaagttttccttaaacagatactggcaattaaggacgcagg

SEQ ID NO: 591532 - DNA, 75 bp, synthetic construct
  source 1..75: mol_type = other DNA
gtggtgttcgtttcatccttcccaggcaagtaaagaagttttccttaaacagttactggcaattaaggacacggg

SEQ ID NO: 591533 - DNA, 75 bp, synthetic construct
  source 1..75: mol_type = other DNA
tcaccggcaggcgtggtgtcaaatgcccgttattgttagcggacaggaaaaccaggccattactcacagtataac

SEQ ID NO: 591534 - DNA, 75 bp, synthetic construct
  source 1..75: mol_type = other DNA
atggttaaacgtgttacaaaattaaaggccgcagccgagtctgcaccgcagacccgcgaagaagtcagccgcgat

SEQ ID NO: 591535 - DNA, 75 bp, synthetic construct
  source 1..75: mol_type = other DNA
gaaggtgtgattgaaatgctgcgccgtatgggccttgagcgttttatccgcacgaaagaggaagtgaacaaggaa

SEQ ID NO: 591536 - DNA, 75 bp, synthetic construct
  source 1..75: mol_type = other DNA
gagaggcgctgcggctggaaacggcgatgaatgatgaagtggcagaaatcaccgcccgttatacgccgcagattg

SEQ ID NO: 591537 - DNA, 75 bp, synthetic construct
  source 1..75: mol_type = other DNA
aaaaccttaaaaaagaaatcaaagtgctttttaaggggattcaggactggtgtaaaaccaaccgcgatgagctga

SEQ ID NO: 591538 - DNA, 75 bp, synthetic construct
  source 1..75: mol_type = other DNA
tcaccggcaggcgtggtgtcaaatgcccgttattgttagcggaaacgaaaaacaggccattactcacagtataac

SEQ ID NO: 591539 - DNA, 75 bp, synthetic construct
  source 1..75: mol_type = other DNA
gccggtgatagcgcgccagaaaacagagaaatagccgtctggcggcaatgcttttttctcttacccgcgctatta

SEQ ID NO: 591540 - DNA, 75 bp, synthetic construct
  source 1..75: mol_type = other DNA
cccgctttaatggtactggcaaccggtgcgggcagcgtgatcgcgtcacacgtaaacgaccctggcttctggcta

SEQ ID NO: 591541 - DNA, 75 bp, synthetic construct
  source 1..75: mol_type = other DNA
aaaggacgtgcgccggattgaatccgcttttggcggaaaaacgaacgaatggctgggtttatacctagagcggat

SEQ ID NO: 591542 - DNA, 75 bp, synthetic construct
  source 1..75: mol_type = other DNA
gagttaatacaacaatgctggccaggaagagttgtatctccgacatctcttcccgtggcaataaaacatatcagg

SEQ ID NO: 591543 - DNA, 75 bp, synthetic construct
  source 1..75: mol_type = other DNA
ttacggatctgacgcatcagtacacaaaaggtaccgattatctggttagtgattttactgatagtgtggatataa

SEQ ID NO: 591544 - DNA, 75 bp, synthetic construct
  source 1..75: mol_type = other DNA
catcatttttttcagtggagaccgcaatcatgaacgaatgatccagtgcgccagactggcacttatcgacagcga

SEQ ID NO: 591545 - DNA, 75 bp, synthetic construct
  source 1..75: mol_type = other DNA
ttgagctgatgccggccagcgattttacggtcagagatgaaagaaagaaaattcaactgcgccaactgactggta

SEQ ID NO: 591546 - DNA, 75 bp, synthetic construct
  source 1..75: mol_type = other DNA
tgacctcgctgataatgacttttttcggcatccccatactggcgcaatttttggcggcggttgttgctatgctgg

SEQ ID NO: 591547 - DNA, 75 bp, synthetic construct
  source 1..75: mol_type = other DNA
cctcgctggtgatgactttttttggcatccccatactgacgcaatttttggcggcggttgtcgctatgctgggtg

SEQ ID NO: 591548 - DNA, 75 bp, synthetic construct
  source 1..75: mol_type = other DNA
tacgacgtcagaaacacaaaaattggtggaatggtttttaacgccacaaggacagagtctggtggaagatgtggg

SEQ ID NO: 591549 - DNA, 75 bp, synthetic construct
  source 1..75: mol_type = other DNA
acaggtcatgaaaaaagtccgcatgatctcgccgcaggaaacggaagtggcaagcgtgatggagggaatgattaa

SEQ ID NO: 591550 - DNA, 75 bp, synthetic construct
  source 1..75: mol_type = other DNA
tcagtggcgactactggtggatagtcattattcccgttggggcgcatatcagtttttcgctgggatatgcctggc

SEQ ID NO: 591551 - DNA, 75 bp, synthetic construct
  source 1..75: mol_type = other DNA
acgcccggaagactctggcagccagacggtgatgcaatcacaggtcatgaaaaatgtccgcatgatctcgccgca

SEQ ID NO: 591552 - DNA, 75 bp, synthetic construct
  source 1..75: mol_type = other DNA
cttacaggccaacttgtttgcggttctgcgcgacattctcttcgtctacgggcaaatccataacaccgttcgttt

SEQ ID NO: 591553 - DNA, 75 bp, synthetic construct
  source 1..75: mol_type = other DNA
atggaaataacaaaaaataaaaatgcaactataaaaaaacagtcatcagtcggctgcttttcaatgtttacctta

SEQ ID NO: 591554 - DNA, 75 bp, synthetic construct
  source 1..75: mol_type = other DNA
gtgggacgcataattgatcttgacggaaaacctttctcctttgacccggagatgcagagtgccgcgctggatatt

SEQ ID NO: 591555 - DNA, 75 bp, synthetic construct
  source 1..75: mol_type = other DNA
aagccatcttccgtgtccggcagagcagtaatgaacccgcgcagatcaacagggaaacaccgccggaaaaacagg

SEQ ID NO: 591556 - DNA, 75 bp, synthetic construct
  source 1..75: mol_type = other DNA
ttccgtcgagatagaaaatgcagaaataattttagatattgatactccggacgactttattacagcgcaaaaaag

SEQ ID NO: 591557 - DNA, 75 bp, synthetic construct
  source 1..75: mol_type = other DNA
ggcaccaatggccttgtgcgcacgcttatctggccttttatttttaaaaactattccgtgcgtgattttgcagag

SEQ ID NO: 591558 - DNA, 75 bp, synthetic construct
  source 1..75: mol_type = other DNA
tcattttctattacctttattcctgcattccttacaaacaggcaggaacttatatccaggggacttcttgttcca

SEQ ID NO: 591559 - DNA, 75 bp, synthetic construct
  source 1..75: mol_type = other DNA
atgcaaaactggataaagacggtgatgatcgccgtaagcctggtgctgcccggcgtggcgctggcgcaatcgctg

SEQ ID NO: 591560 - DNA, 75 bp, synthetic construct
  source 1..75: mol_type = other DNA
atgcaaaactggataaaggccgcagttatcgccgtgagcctggcgttacccggcgtggcgctggcgcaatcgctg

SEQ ID NO: 591561 - DNA, 75 bp, synthetic construct
  source 1..75: mol_type = other DNA
ccgaataaaatcgacccgaaggtgaaaaacgtcgccgcggtggcggtgagtgccacgttgccgccaatgtactcg

SEQ ID NO: 591562 - DNA, 75 bp, synthetic construct
  source 1..75: mol_type = other DNA
ggcatttctgccttaacccggatgatttgagcgaactgcggctgcgtgacggcagccatgccggggtggcgtttc

SEQ ID NO: 591563 - DNA, 75 bp, synthetic construct
  source 1..75: mol_type = other DNA
gccggacgacattatgtcgattttacaggcgctgcatgaagcgggcgcgctggatgccgacctggaggtgatctg

SEQ ID NO: 591564 - DNA, 75 bp, synthetic construct
  source 1..75: mol_type = other DNA
tttcgtcgattggcgatgcgaaaagtattcgcggcggcactttattgcttacgcagttgcacggcgcggatggcg

SEQ ID NO: 591565 - DNA, 75 bp, synthetic construct
  source 1..75: mol_type = other DNA
tgatccctggataagggagcagaccggtattccgcagcccacgcccggtgaagccatcttccgtgtccgtcagag

SEQ ID NO: 591566 - DNA, 75 bp, synthetic construct
  source 1..75: mol_type = other DNA
attgccggtattaaggtgaataaaggcgctgaaagtttttatgtcgagccttttgaacaggacgccggactgaac

SEQ ID NO: 591567 - DNA, 75 bp, synthetic construct
  source 1..75: mol_type = other DNA
gctacgccgcagctcacccgcgtgaggaagtttgcggcctggtgataaataacgaatatttttacccgtgcgcta

SEQ ID NO: 591568 - DNA, 75 bp, synthetic construct
  source 1..75: mol_type = other DNA
cggttattgatatgccgagtggcaggggaagcgtcactctggagtttaaggttttccataaaggcaatcagtggg

SEQ ID NO: 591569 - DNA, 75 bp, synthetic construct
  source 1..75: mol_type = other DNA
aaagaagtcggcattcgcgccattgaagagttcgggccttacaaaatcaacggcgataaagaaattatgcgtcgt

SEQ ID NO: 591570 - DNA, 75 bp, synthetic construct
  source 1..75: mol_type = other DNA
catcattgatgacgcggctgaagtggcccggcagatgaaaaaggcgatgccgttggtgaaagaaaatcgccgcga

SEQ ID NO: 591571 - DNA, 75 bp, synthetic construct
  source 1..75: mol_type = other DNA
aagagtttggtccttacaaaatcaacggcgataaagagattatgcgtcgtatggacgacctgctacagggttttg

SEQ ID NO: 591572 - DNA, 75 bp, synthetic construct
  source 1..75: mol_type = other DNA
gcgatgccgatatggagaagctggctaaatggaagccagaaaatgtggtggtagagcaatccccggccatcccgc

SEQ ID NO: 591573 - DNA, 75 bp, synthetic construct
  source 1..75: mol_type = other DNA
gcagctgaataaaaaacagcaacaaacgcaagtccagaccgaagagaaaaaactggttcaggaaaaagagaaaaa

SEQ ID NO: 591574 - DNA, 75 bp, synthetic construct
  source 1..75: mol_type = other DNA
cgaatcaagcgcaatgatgacggaagtattgtgctggataaggataataacccggaaaaagagatcgtccagctg

SEQ ID NO: 591575 - DNA, 75 bp, synthetic construct
  source 1..75: mol_type = other DNA
tattgggtgcatccttgatgccgatactgacaaaggacagaaacatccaattatggatggtaagaagcatcggat

SEQ ID NO: 591576 - DNA, 75 bp, synthetic construct
  source 1..75: mol_type = other DNA
atcggtgatgagcgtgtccccggaacgggattttcatccgataatgaatggcaaagcaatgctcttaaaaccgct

SEQ ID NO: 591577 - DNA, 75 bp, synthetic construct
  source 1..75: mol_type = other DNA
ggtcggcagtcgcataaccgttcaggggttcatttcatgccataaggcaaagaacggactgagcaaaatggtttt

SEQ ID NO: 591578 - DNA, 75 bp, synthetic construct
  source 1..75: mol_type = other DNA
gggtatggatggctggcagatcttacaaacgttaagaacggcaaagcaaacccctgttatttgccttactgcaag

SEQ ID NO: 591579 - DNA, 75 bp, synthetic construct
  source 1..75: mol_type = other DNA
gtgacacaagccacaacattgagcgaaatccccacatctacgcccgcctccgacgctctatctaaagccctgaaa

SEQ ID NO: 591580 - DNA, 75 bp, synthetic construct
  source 1..75: mol_type = other DNA
aggtgattagtccgctacacagccacctgacacgcctgattgccgcctggaccggctgcgacgccaacgataccc

SEQ ID NO: 591581 - DNA, 75 bp, synthetic construct
  source 1..75: mol_type = other DNA
agcaccataccggacatcacgagcttgacagtttcagaaggatgtttgtttgtattatgttgtcagccatatggt

SEQ ID NO: 591582 - DNA, 75 bp, synthetic construct
  source 1..75: mol_type = other DNA
taacgacctagctgacgagattatcaatgctggtcttgccgattctgaatgcgtcggatgctttgaagcggggga

SEQ ID NO: 591583 - DNA, 75 bp, synthetic construct
  source 1..75: mol_type = other DNA
atggataagccggaaccagtggcgaaagtgtgctatgcacaaatggtgaaacagttcctgagtcgtgacccgttc

SEQ ID NO: 591584 - DNA, 75 bp, synthetic construct
  source 1..75: mol_type = other DNA
gtatgctgcacgatatgacgggggcggatagcagcgtttctaaatgctattttactcgcgccaaaagcggtgtat

SEQ ID NO: 591585 - DNA, 75 bp, synthetic construct
  source 1..75: mol_type = other DNA
gtatgctgcacgatatgacgggagcggatagcagcgtttctaaatgctactttactcgcgccaaaagcggcgtat

SEQ ID NO: 591586 - DNA, 75 bp, synthetic construct
  source 1..75: mol_type = other DNA
cccgcagcagcgaacagaaaaccagggttaaccagcagacacagacaggaaccagttcaacgtctgacaacgaac

SEQ ID NO: 591587 - DNA, 75 bp, synthetic construct
  source 1..75: mol_type = other DNA
acaggtgattagtccgctacacagccaccttacgcgcctgattgccgcctggaccggctgtgacgccaacgatac

SEQ ID NO: 591588 - DNA, 75 bp, synthetic construct
  source 1..75: mol_type = other DNA
atctcccgtgagcagctctctcccacggcggcctaccatctggtgcatgaacaggtgattagtccgctacacagc

SEQ ID NO: 591589 - DNA, 75 bp, synthetic construct
  source 1..75: mol_type = other DNA
tgagcaaggtcaggcttatgcgcaatttgtcgccagcaccgccgaatgctgtggtgagggaggaattaaagcctg

SEQ ID NO: 591590 - DNA, 75 bp, synthetic construct
  source 1..75: mol_type = other DNA
cgcagcaatggttgtttcaatagttgcggccgcattaccggacgttacgagcttcgacaggttcagaagaatatt

SEQ ID NO: 591591 - DNA, 75 bp, synthetic construct
  source 1..75: mol_type = other DNA
taatttactcatgggctggtgttgggcagccttttagttttatttgtgagtgtccggatacttataaaacggaaa

SEQ ID NO: 591592 - DNA, 75 bp, synthetic construct
  source 1..75: mol_type = other DNA
tgtgccatttggtgaatttccctcttcagcatttaaaaacagacaagggcagatgccggaaggcgcaacggaaca

SEQ ID NO: 591593 - DNA, 75 bp, synthetic construct
  source 1..75: mol_type = other DNA
agcaggcgctggaaataacagaatgcaataaagttattactacgccctatatgggcggtgcaggtttactttcct

SEQ ID NO: 591594 - DNA, 75 bp, synthetic construct
  source 1..75: mol_type = other DNA
ccgatggcgaacgctgggataacctggcctggcattactacggcgatgcactggcttatgaacgcattatcgcag

SEQ ID NO: 591595 - DNA, 75 bp, synthetic construct
  source 1..75: mol_type = other DNA
acggagagcgctgggattctctggcatggcagtactacggcgacccactgggctatccccggataattgccgcca

SEQ ID NO: 591596 - DNA, 75 bp, synthetic construct
  source 1..75: mol_type = other DNA
ataaacagtgagcaatactaccggttaaccgatgagctggaagtaatgaccatgattcaaggtccaagcgtgttt

SEQ ID NO: 591597 - DNA, 75 bp, synthetic construct
  source 1..75: mol_type = other DNA
tataatgattatgacaatgctaacctgtataacgatcatgtggttgccagcctgattaaagactttaaagcagca

SEQ ID NO: 591598 - DNA, 75 bp, synthetic construct
  source 1..75: mol_type = other DNA
gaaacaggcgggttataaaaccttctggatcaccaaccagcagacgatgaccgcccgcaataccatgctgacggt

SEQ ID NO: 591599 - DNA, 75 bp, synthetic construct
  source 1..75: mol_type = other DNA
cgcagcaatggttgttccaatggttattggctcattaccgaacgttacgagcttcgacgggttcagaagaatatt

SEQ ID NO: 591600 - DNA, 75 bp, synthetic construct
  source 1..75: mol_type = other DNA
taaccatggatggcatgaaagaaacgtttgaactagatctagtacttttttcctatgcttctatgtatccccact

SEQ ID NO: 591601 - DNA, 75 bp, synthetic construct
  source 1..75: mol_type = other DNA
tgtgtggtgcaattatgaatcagggcgcagcaatggttgttccaatggctattggctcattaccgaacgttacga

SEQ ID NO: 591602 - DNA, 75 bp, synthetic construct
  source 1..75: mol_type = other DNA
cactatcagtaagttggagtcattaccaaattttaatcagcgagtcagcttgggaagaaatgacctgcttattcg

SEQ ID NO: 591603 - DNA, 75 bp, synthetic construct
  source 1..75: mol_type = other DNA
agcggtgaatatgcgacagggtgttttctccggcagtgtcgacgtcacggagcaacaggggaaaatgaactggca

SEQ ID NO: 591604 - DNA, 75 bp, synthetic construct
  source 1..75: mol_type = other DNA
gccttgtggaaggatgcagtgatgattttgatccttctgatattattagggttccggatcttacttacaacaaag

SEQ ID NO: 591605 - DNA, 75 bp, synthetic construct
  source 1..75: mol_type = other DNA
ggaatgacgatagaggacagggatagttatatcagggatcttttttttctgcattcattgaaagtaaaaattgag

SEQ ID NO: 591606 - DNA, 75 bp, synthetic construct
  source 1..75: mol_type = other DNA
attttcactaaaaaccagttattaagaataaaggcagaaaataatgaaataccagtcggtaatatggggattatg

SEQ ID NO: 591607 - DNA, 75 bp, synthetic construct
  source 1..75: mol_type = other DNA
tggatcccattggtaccagatcagaacaatattttgccttactccgctcgtttgaagtcaactcagaagtccgtc

SEQ ID NO: 591608 - DNA, 75 bp, synthetic construct
  source 1..75: mol_type = other DNA
ccgacctcgcccgtgctgctcagtccatcgtcaaaggcgcttctttcgataacaacatcatttgtgccgacgaaa

SEQ ID NO: 591609 - DNA, 75 bp, synthetic construct
  source 1..75: mol_type = other DNA
agattagagcgctggcagatgatgacccacgccgccagcggtacgtcgagctattggcgcaggctggccgcatga

SEQ ID NO: 591610 - DNA, 75 bp, synthetic construct
  source 1..75: mol_type = other DNA
accaactggggcactaagtcgctggcgattctcgatatgccgtttaccgctgtgatggacacgcttttactgccg

SEQ ID NO: 591611 - DNA, 75 bp, synthetic construct
  source 1..75: mol_type = other DNA
tttggtggtattagtggtgaagttaggagtcgaacagagggaaccgaaccacagcgcagcactcagaatgcaagc

SEQ ID NO: 591612 - DNA, 75 bp, synthetic construct
  source 1..75: mol_type = other DNA
atgaatacgagtaccaggtacttgatgcgttaagtaaaaagcataatcgcagcaaattgaatatgatccgccatg

SEQ ID NO: 591613 - DNA, 75 bp, synthetic construct
  source 1..75: mol_type = other DNA
atggccaaatcaaaccagaaggttgcaattatgaaaagtgataagttcatagcgtgctgttttgttgaagtgcct

SEQ ID NO: 591614 - DNA, 75 bp, synthetic construct
  source 1..75: mol_type = other DNA
gctgttttgttgaagtccctaacgatgatgttttctgcaattatgaatttaaagacagtttaggcagatctcatg

SEQ ID NO: 591615 - DNA, 75 bp, synthetic construct
  source 1..75: mol_type = other DNA
cggtgcgctcgcgcgtggaaaaaagcgaagccgatgcgcaagccatcaatgccgtcattccaccagccagaatgc

SEQ ID NO: 591616 - DNA, 75 bp, synthetic construct
  source 1..75: mol_type = other DNA
ccactggtaccagaacagaacaatattttgccttactccgctcgtctgaagtcaactcagaagtccgtcaatccg

SEQ ID NO: 591617 - DNA, 75 bp, synthetic construct
  source 1..75: mol_type = other DNA
cttacgcggcttccgggataagcaggctgaactgaaactctacgctcggcattacaccgtggaaaattgcactga

SEQ ID NO: 591618 - DNA, 75 bp, synthetic construct
  source 1..75: mol_type = other DNA
atgctaaacccggatgagcgggtgatcatagcaaagcgcccgcttaaaaaatgtgagtcctggattgaggatatc

SEQ ID NO: 591619 - DNA, 75 bp, synthetic construct
  source 1..75: mol_type = other DNA
taacgccaaagctgctgctgccgctaaagggatgcctctgtatgagcacatcgctgaactgaacggcactccggg

SEQ ID NO: 591620 - DNA, 75 bp, synthetic construct
  source 1..75: mol_type = other DNA
tggtgtatcaggcggaggaatatgaagatccgaaggtgatactgaaacgattaaaagatctggaaaaagagattc

SEQ ID NO: 591621 - DNA, 75 bp, synthetic construct
  source 1..75: mol_type = other DNA
aatttcacctgtcaggaaagcacttgcggtcgtcaacaagatgttctcgacagtattaaagcttctggtcagacc

SEQ ID NO: 591622 - DNA, 75 bp, synthetic construct
  source 1..75: mol_type = other DNA
ccctatatcagtgatgtaccagatgttcaatgtgatctgaacacgacaaatgacttcaccgtacaatttacggcg

SEQ ID NO: 591623 - DNA, 75 bp, synthetic construct
  source 1..75: mol_type = other DNA
acgcaatcctggctgtatctctggctaacgccaaagctgctgcagctgctaaaggtatgccgctgtacgagcaca

SEQ ID NO: 591624 - DNA, 75 bp, synthetic construct
  source 1..75: mol_type = other DNA
ctaaagatcaggctggcattgacaagatcatgatcgacctggacggcaccgaaaacaaatccaaattcggcgcga

SEQ ID NO: 591625 - DNA, 75 bp, synthetic construct
  source 1..75: mol_type = other DNA
ttttgccttactccgctcgtctgaagtcaactcagaagtccgtcaatccgggactggtgagggcttcggcaacct

SEQ ID NO: 591626 - DNA, 75 bp, synthetic construct
  source 1..75: mol_type = other DNA
atcctgaaagaaggtatcgaaaaaggcatcgctaactctatcctgattaaattcaaccagatcggctctctgacc

SEQ ID NO: 591627 - DNA, 75 bp, synthetic construct
  source 1..75: mol_type = other DNA
gaccgcgttgctaaatacaaccagctaattcgtatcgaagaagctctaggcgaaaaagcaccgtacaacggtcgt

SEQ ID NO: 591628 - DNA, 75 bp, synthetic construct
  source 1..75: mol_type = other DNA
aaaggtatgccgctgtacgagcacatcgctgaactgaacggtactccgggcaaatactctatgccggttccgatg

SEQ ID NO: 591629 - DNA, 75 bp, synthetic construct
  source 1..75: mol_type = other DNA
agattttacagtcgcttgaactctcaatgacgctatgcgacgcaaaaaatgcctcgccagaagcaacagaacagc

SEQ ID NO: 591630 - DNA, 75 bp, synthetic construct
  source 1..75: mol_type = other DNA
aggttgtttccggagaagacgtgactcaggctgaacagccgcaacagccggtgtctcctgccatcaacgataaga

SEQ ID NO: 591631 - DNA, 75 bp, synthetic construct
  source 1..75: mol_type = other DNA
cggggccggtaagtcggaagttatccgacgtctggccaactacgcccgtaagcgtggcgacatggtggtgattta

SEQ ID NO: 591632 - DNA, 75 bp, synthetic construct
  source 1..75: mol_type = other DNA
tatttatgataagggctgcacttttgttgaagacttctacgacgaatcgcgggaccaggtgcttaacgcaaagga

SEQ ID NO: 591633 - DNA, 75 bp, synthetic construct
  source 1..75: mol_type = other DNA
tcgggcgtaccggtcgccagcagagtgaggatgaaatcatcggggggcgcgccctcagtgagtcaccaaaagaag

SEQ ID NO: 591634 - DNA, 75 bp, synthetic construct
  source 1..75: mol_type = other DNA
tgtgctgaccaactatgtcaaggcaatgcgatacctgcagggtatcgatcgtccgggacgggagaaattcaccat

SEQ ID NO: 591635 - DNA, 75 bp, synthetic construct
  source 1..75: mol_type = other DNA
gcctggcgttctttggcccatttatcggtgccatcgcgcgatcggttggtggtgctatttccgataaattcggcg

SEQ ID NO: 591636 - DNA, 75 bp, synthetic construct
  source 1..75: mol_type = other DNA
atgaataaggaagaacaatatcttctttttgcgctttttgcgctttctgcgcccatggaaatacttaatcagggt

SEQ ID NO: 591637 - DNA, 75 bp, synthetic construct
  source 1..75: mol_type = other DNA
atgaataaggaagaacaatatcttctttttgcgctttctacgcccatggaaatacttaatcagggttgcaaaccc

SEQ ID NO: 591638 - DNA, 75 bp, synthetic construct
  source 1..75: mol_type = other DNA
tcgtgcgtgaagagcatttgtggtcggtagcgcgttatatgccgggaagtttaggcgaactggacagcctgggct

SEQ ID NO: 591639 - DNA, 75 bp, synthetic construct
  source 1..75: mol_type = other DNA
tctggttttatgggtaaaaataagctggcagacgtttgtgaacggctgtatttactggtggtgtaccacgctgga

SEQ ID NO: 591640 - DNA, 75 bp, synthetic construct
  source 1..75: mol_type = other DNA
atgtccactggtacaaatacccgctgacatactggctgaacattattacctcgatgggctgcctgcagggcggtg

SEQ ID NO: 591641 - DNA, 75 bp, synthetic construct
  source 1..75: mol_type = other DNA
gagatccagtattacggcaaaaccttccggatgaacgcggctcaggtactgcatgataaatatatgatctggtgc

SEQ ID NO: 591642 - DNA, 75 bp, synthetic construct
  source 1..75: mol_type = other DNA
tgcttattgatggattaagttttggcacatttggttttcatccgcacgaaggttttgaggatgaattaattttat

SEQ ID NO: 591643 - DNA, 75 bp, synthetic construct
  source 1..75: mol_type = other DNA
aagaggacccgttctggcagggttcaggacgtaccatttttgcggaagcggcgtacctgatgcgtaatgacccca

SEQ ID NO: 591644 - DNA, 75 bp, synthetic construct
  source 1..75: mol_type = other DNA
actccttggtctgttattatgggtaaaaataagctggcagacgtttataaacggctgtatttactggtggtgtac

SEQ ID NO: 591645 - DNA, 75 bp, synthetic construct
  source 1..75: mol_type = other DNA
tggatgcggggtgtccgggaagatcagaaaaacggctggctgtttatctcgtcgaatgccgacacccatgcctcc

SEQ ID NO: 591646 - DNA, 75 bp, synthetic construct
  source 1..75: mol_type = other DNA
acggcaaaaccttccggatgaacgctgctcaggtactgcatgataaatatatgatttggtgcggagagcagctat

SEQ ID NO: 591647 - DNA, 75 bp, synthetic construct
  source 1..75: mol_type = other DNA
gctgttatgtgtttggtatccagtcctatgcccagctggaagatatctacggtgagaaagcggcggccacgctgt

SEQ ID NO: 591648 - DNA, 75 bp, synthetic construct
  source 1..75: mol_type = other DNA
ttatttttttctggatactcgttggtctggttttatgggtaaaaataagctggcagacgtttgtgaacggctgta

SEQ ID NO: 591649 - DNA, 75 bp, synthetic construct
  source 1..75: mol_type = other DNA
tccagttagcaggtgcaggtgttgaaggtgctgttgggctccgtttgggaaacggaaaatattgtacgttaagat

SEQ ID NO: 591650 - DNA, 75 bp, synthetic construct
  source 1..75: mol_type = other DNA
tattccgcgtgacatcaacccggaaatggagaaccgcctgagtgccgtacttgccgcaagggaagcagaaggtcg

SEQ ID NO: 591651 - DNA, 75 bp, synthetic construct
  source 1..75: mol_type = other DNA
ctgaaatatcagacacgaccgaaggtcgctccggagtttattccgcgtgacatcaacccggaaatggagaaccgt

SEQ ID NO: 591652 - DNA, 75 bp, synthetic construct
  source 1..75: mol_type = other DNA
cgcaacagccgcaacagccgcaacagccggtgtctcctgccatcaacgataagaagtcagattcaggtgtgaatg

SEQ ID NO: 591653 - DNA, 75 bp, synthetic construct
  source 1..75: mol_type = other DNA
cgggagagagttgatttacatccagtttgttgagcaaaccgccatgtgctgcggagaggccggaatcaaagcgtg

SEQ ID NO: 591654 - DNA, 75 bp, synthetic construct
  source 1..75: mol_type = other DNA
gcaagtgcgggcatcggcaacctgacgttgctcgactttgacaccgtttcgttctcgaatctgcaacgtcagaca

SEQ ID NO: 591655 - DNA, 75 bp, synthetic construct
  source 1..75: mol_type = other DNA
tcaaactgctggcaggttatggcaaaccggccagcgggaaaatcgtcatgtacgatgcgatgacctgccagtttc

SEQ ID NO: 591656 - DNA, 75 bp, synthetic construct
  source 1..75: mol_type = other DNA
tgttgcgctacaaccggcaaatcattctgcgcggttttgattttgacggtcaggaggcgctaaaagattctcgtg

SEQ ID NO: 591657 - DNA, 75 bp, synthetic construct
  source 1..75: mol_type = other DNA
aagatattgaccgcgaccgtgagcagctggtcggtgagcttgtggagatggtgattgctgcctccgcctcactgc

SEQ ID NO: 591658 - DNA, 75 bp, synthetic construct
  source 1..75: mol_type = other DNA
gctggtcggtgagattgtcgaactggtgattgctgcctccgcctcgctgcgtgatttgaaactgcgcgcgtttgg

SEQ ID NO: 591659 - DNA, 75 bp, synthetic construct
  source 1..75: mol_type = other DNA
gaaggcaacattaacacagggcgcgttctggccctgcgtcgcctcgaaattgaggacgaacgctggaataacgcc

SEQ ID NO: 591660 - DNA, 75 bp, synthetic construct
  source 1..75: mol_type = other DNA
cactagaccctaatgagcttgagcgtggatttaacgaaggcgtgttcaccgctgcaaaactttacccggcaaacg

SEQ ID NO: 591661 - DNA, 75 bp, synthetic construct
  source 1..75: mol_type = other DNA
gtacttgagcgcatggaaaaaatcggtatgccgctactggtgcatggtgaagtgacacatgcagatatcgacatt

SEQ ID NO: 591662 - DNA, 75 bp, synthetic construct
  source 1..75: mol_type = other DNA
gctgccctccggggtgttgttactgatcccggttattgaggctgaagatgcccgcacagaagaggatattgcccc

SEQ ID NO: 591663 - DNA, 75 bp, synthetic construct
  source 1..75: mol_type = other DNA
atggcggaactcagcgatcaggagatgctgcgctacaaccggcaaatcattctgcgcggctttgattttgacggt

SEQ ID NO: 591664 - DNA, 75 bp, synthetic construct
  source 1..75: mol_type = other DNA
gcaagcgccggtgtcggcaacctgacgctgctcgacttcgacacggtttcgctctcgaatctgcaacgccagacg

SEQ ID NO: 591665 - DNA, 75 bp, synthetic construct
  source 1..75: mol_type = other DNA
aatacgataatagtaacttctattatcgctgtgatatttttagggtttatcggaggcgggggagtgtttctgctt

SEQ ID NO: 591666 - DNA, 75 bp, synthetic construct
  source 1..75: mol_type = other DNA
aatagggcgagacagcgttggtgccgtaacgttattacccgaaaatgaaacttttttggcgacagcaaaggtgct

SEQ ID NO: 591667 - DNA, 75 bp, synthetic construct
  source 1..75: mol_type = other DNA
gataatgagtattactgtctgctgctggcgaaagaacttgttgagattgcatggacggttaagccgagaatacgg

SEQ ID NO: 591668 - DNA, 75 bp, synthetic construct
  source 1..75: mol_type = other DNA
atgagttttgaggatagcgaaaaaacggccagggtaaccttacagcagcattacaattttgtaatgaaccaggct

SEQ ID NO: 591669 - DNA, 75 bp, synthetic construct
  source 1..75: mol_type = other DNA
ttacaattttgtaatgaaccaggctgtttctataacatatgatttatggcatattattttcatgaagattctact

SEQ ID NO: 591670 - DNA, 75 bp, synthetic construct
  source 1..75: mol_type = other DNA
cgatagcgccgggagccggatgtttgaagagctggtggcaggaagcaatcgtttctatgccacgcttccctggca

SEQ ID NO: 591671 - DNA, 75 bp, synthetic construct
  source 1..75: mol_type = other DNA
tggcatcgatcttcccctgatgagtggaaaacattaattgctggcggctccgaacgcgggttgatttatacccaa

SEQ ID NO: 591672 - DNA, 75 bp, synthetic construct
  source 1..75: mol_type = other DNA
tggcatcgctcttcccctgaagagtggaaagcattaattgctggtggctcggagagagggttgatttatacccaa

SEQ ID NO: 591673 - DNA, 75 bp, synthetic construct
  source 1..75: mol_type = other DNA
gttatacctgcattgcccgcaagccgcgctgtggctcctgcattattgaagatctttgtgaatacaaagagaaag

SEQ ID NO: 591674 - DNA, 75 bp, synthetic construct
  source 1..75: mol_type = other DNA
aatggcgaggttccggaagatcgtgctgcgcttgaagccctgcccggcgtaggtcgtaaaacagccaacgtcgta

SEQ ID NO: 591675 - DNA, 75 bp, synthetic construct
  source 1..75: mol_type = other DNA
tgattccggcagcactggataacgtgaagacttcattaccgacagattttccggagaacgtggtgacggcagttg

SEQ ID NO: 591676 - DNA, 75 bp, synthetic construct
  source 1..75: mol_type = other DNA
tgatcattctggatattatgcttccgggtatggatggctggcagatcttacaaacgttaagaacagcaaagcaaa

SEQ ID NO: 591677 - DNA, 75 bp, synthetic construct
  source 1..75: mol_type = other DNA
gttatacctgcatagctcgtaagcctcgctgtggctcctgcattattgaagatctttgtgaatacaaagaaaagg

SEQ ID NO: 591678 - DNA, 75 bp, synthetic construct
  source 1..75: mol_type = other DNA
actgcaaagctctatccggtggcgaatacgcctgccgcaatgctcgaattgggggttgacggtgtaaaaacgtac

SEQ ID NO: 591679 - DNA, 75 bp, synthetic construct
  source 1..75: mol_type = other DNA
gcagtaagggaagtatcaatgcccgttttgaggccgtggataccatccaggaggcgctgaccacgcaggtactgg

SEQ ID NO: 591680 - DNA, 75 bp, synthetic construct
  source 1..75: mol_type = other DNA
cgccagacgcaggttaatgaaccaggaacggtggtcgccagtaaacaatcagcgcctttgcacgatctgcttaag

SEQ ID NO: 591681 - DNA, 75 bp, synthetic construct
  source 1..75: mol_type = other DNA
tgccgatggttcagggctttcgcggcataacctgattgcccccgccaccatgatgcaggtgctgcaatacattgc

SEQ ID NO: 591682 - DNA, 75 bp, synthetic construct
  source 1..75: mol_type = other DNA
cctggaacatggcgggccgggtcggacgccgtgcgtcagatcctgcgccagcaagccggtgtcgatattggaaac

SEQ ID NO: 591683 - DNA, 75 bp, synthetic construct
  source 1..75: mol_type = other DNA
tgcagcctgaagctgttagcgaaccggaagttattgcagagccggaatctatagttgaagaagcgccagcgccgg

SEQ ID NO: 591684 - DNA, 75 bp, synthetic construct
  source 1..75: mol_type = other DNA
ggtaagccaggccaaactgttccatgaagcagtcggcttaaccggcatcacgttaacgaaactggacggcacggc

SEQ ID NO: 591685 - DNA, 75 bp, synthetic construct
  source 1..75: mol_type = other DNA
ctgtgtatggtgtgcgagatgacggtttcgtcgaaaggccgcctgacgggctacaaattctacgaagcggtgatg

SEQ ID NO: 591686 - DNA, 75 bp, synthetic construct
  source 1..75: mol_type = other DNA
ttgaccaggtagggcaacgcctgatgggggaatccagcggccagacttatcgcctgggcgatcgcgtggaagttc

SEQ ID NO: 591687 - DNA, 75 bp, synthetic construct
  source 1..75: mol_type = other DNA
gctggtcaccattgatggcgaagacgcccgtgactttgacgatgcagtttactgcgagaaaaaacgcggcggcgg

SEQ ID NO: 591688 - DNA, 75 bp, synthetic construct
  source 1..75: mol_type = other DNA
ttatcgcctgcttacctggctacgaaacaatcggtacatgggctccggcattattgcttcttgctcgtttattcc

SEQ ID NO: 591689 - DNA, 75 bp, synthetic construct
  source 1..75: mol_type = other DNA
ctcccccgtggttctgccgaagcgcaatactgcgagctggatgtggtgccaggcgacctgaaccgctttacgctg

SEQ ID NO: 591690 - DNA, 75 bp, synthetic construct
  source 1..75: mol_type = other DNA
cgcatggctgaaagttggcgaagatgaagctgacagcgcactgttcaaccgtatccagcgcaacggtaaggtcgc

SEQ ID NO: 591691 - DNA, 75 bp, synthetic construct
  source 1..75: mol_type = other DNA
agaatagcggcatttagctttggcattttacttgttattctttttataataatcgcaatatttatacctaatcca

SEQ ID NO: 591692 - DNA, 75 bp, synthetic construct
  source 1..75: mol_type = other DNA
cctacagaagagctgcctcagacacatactgaagcagaggcggaaactttcgctgccgacgtcgttcaagtcact

SEQ ID NO: 591693 - DNA, 75 bp, synthetic construct
  source 1..75: mol_type = other DNA
acttaaaggtttttgacggggctaaattttctctcgattttgtcaggttttatctgaatggtccgtcaacggtta

SEQ ID NO: 591694 - DNA, 75 bp, synthetic construct
  source 1..75: mol_type = other DNA
cccgtcacggacagggtgtggtggctgaccagcgcttatgcccagtggtcaccggaccgtcttcatggtgtggaa

SEQ ID NO: 591695 - DNA, 75 bp, synthetic construct
  source 1..75: mol_type = other DNA
gtgagggatggtcggtggtgacactgacggcatcgccggaatggcctgtcacagggagcgtgggcatcgacaaca

SEQ ID NO: 591696 - DNA, 75 bp, synthetic construct
  source 1..75: mol_type = other DNA
tttttcctttccggaacgatttaactttattgatgtgaaatttgactccggaattgagttatgctcaggggattc

SEQ ID NO: 591697 - DNA, 75 bp, synthetic construct
  source 1..75: mol_type = other DNA
tatctgaatggtccggcaacggttactggtagaatatatacattactttgcgatgaagtcgataatattgtgtta

SEQ ID NO: 591698 - DNA, 75 bp, synthetic construct
  source 1..75: mol_type = other DNA
cagaaaaataatgatatattatatggtgtaaaaactgatatatcaggtgcaggattttatgagggtgaagtaacg

SEQ ID NO: 591699 - DNA, 75 bp, synthetic construct
  source 1..75: mol_type = other DNA
ctcatcgccgatgtgggcgtggaaaccacgcgcaaaatcatcaccaatctgactgacggcgcgacccgcaaacag

SEQ ID NO: 591700 - DNA, 75 bp, synthetic construct
  source 1..75: mol_type = other DNA
cctgttccgcggtaaaaaaatcgacgatgatctgtttgaggagctggaagaacagctgttgatcgccgatgtggg

SEQ ID NO: 591701 - DNA, 75 bp, synthetic construct
  source 1..75: mol_type = other DNA
atactgaggccgaggcggaaacttttgctgccgacgttgtggaagtcactgaacaggttgctgaaagtgaaaaag

SEQ ID NO: 591702 - DNA, 75 bp, synthetic construct
  source 1..75: mol_type = other DNA
acttttcggtgtcacatgatgcgaggaattttgccgccggtgtcagtctgccgtatggctataccctggtggatt

SEQ ID NO: 591703 - DNA, 75 bp, synthetic construct
  source 1..75: mol_type = other DNA
atgtacatagcgttaacgctgtgccatgaagcaacagcgaggagtgtagtcgcaaatggcgaaagaaaaaaaacg

SEQ ID NO: 591704 - DNA, 75 bp, synthetic construct
  source 1..75: mol_type = other DNA
agaagaagcggctaaagaagaaatcaccgacgaagagccggaggcacaggcgctggctgccgaagcggcagaaga

SEQ ID NO: 591705 - DNA, 75 bp, synthetic construct
  source 1..75: mol_type = other DNA
agcgttgtcgctgaaatcaataggaatggaaacagccttcttctggtatgtgaccttgatggccgtggtggcgtt

SEQ ID NO: 591706 - DNA, 75 bp, synthetic construct
  source 1..75: mol_type = other DNA
tttgaccggtaataccatcgtcattaaacccagtgaatttacgccaaacaatgcgattgcattcgccaaaatcgt

SEQ ID NO: 591707 - DNA, 75 bp, synthetic construct
  source 1..75: mol_type = other DNA
ttatctcaaaaaatcacggagattatcgagggtatttataaccgaaaggtggacagaagttcatttaactattca

SEQ ID NO: 591708 - DNA, 75 bp, synthetic construct
  source 1..75: mol_type = other DNA
tgtggcgctggttatctgtctggtcaccttttttgtgactacctggattctgggacgtcagggtaaacagcagag

SEQ ID NO: 591709 - DNA, 75 bp, synthetic construct
  source 1..75: mol_type = other DNA
cagagatatgcgattaacacttttgcgcacccggacggttacgcccgctggcagcgcgccgtggatatggcggcg

SEQ ID NO: 591710 - DNA, 75 bp, synthetic construct
  source 1..75: mol_type = other DNA
cggcgcaactgggtgccgacgcgttgatccttgccgatctcgccatgctggaatacgccgccgagcgttacccac

SEQ ID NO: 591711 - DNA, 75 bp, synthetic construct
  source 1..75: mol_type = other DNA
gctcgttacaattctttccttattaatttttcagatggatttcaagatactgaacttcaaatgcataaatggatt

SEQ ID NO: 591712 - DNA, 75 bp, synthetic construct
  source 1..75: mol_type = other DNA
aacttctgtctgcacggcacggtcggggccggtaagtcggaagttatccgtcgtctggccaactacgcccgtcag

SEQ ID NO: 591713 - DNA, 75 bp, synthetic construct
  source 1..75: mol_type = other DNA
agcggcggccacgctgtttgacgtcatgaacacccgtgcctttttccgttctcccagccataagattgcagagtt

SEQ ID NO: 591714 - DNA, 75 bp, synthetic construct
  source 1..75: mol_type = other DNA
atgatcatcgaaaaagtcatgaacaataattgtgtacaggcatcgatgaatggacaggaggttatcatttctggg

SEQ ID NO: 591715 - DNA, 75 bp, synthetic construct
  source 1..75: mol_type = other DNA
gttgtctcctggattctggggcatcaggggaaacagcagagtgaaaatgaggtgaccggcgggcgtcagctgacg

SEQ ID NO: 591716 - DNA, 75 bp, synthetic construct
  source 1..75: mol_type = other DNA
gtggatatggccgcttatgaggcatggcaacaggaaaatcatccggacatccagcagcagatgcagcgtcgttaa

SEQ ID NO: 591717 - DNA, 75 bp, synthetic construct
  source 1..75: mol_type = other DNA
gccaatattattttctactgtctgtttattttattctggcttctcgttggcctggtcctgtggatgaaaataagc

SEQ ID NO: 591718 - DNA, 75 bp, synthetic construct
  source 1..75: mol_type = other DNA
tgctatctgtcgtcgtatctgacgggtgagtcgcccaacactgtgggtgcgtgttctccggcccgtttcgtgcgc

SEQ ID NO: 591719 - DNA, 75 bp, synthetic construct
  source 1..75: mol_type = other DNA
attgaatattaatataaacaaaggaaaggtcgggagaatattgcggatgttaggaagtgagaacctattaactgt

SEQ ID NO: 591720 - DNA, 75 bp, synthetic construct
  source 1..75: mol_type = other DNA
attcgaatgttgtcgcatttaattttagtcatttattaaacgagtaccgtaaaaataacgggttgcttcctgata

SEQ ID NO: 591721 - DNA, 75 bp, synthetic construct
  source 1..75: mol_type = other DNA
attgagtattaatataaatcaaggaaaagttggtagaatattgcggatgttagggagtgagaattttttaactgt

SEQ ID NO: 591722 - DNA, 75 bp, synthetic construct
  source 1..75: mol_type = other DNA
tctggcagccatttttaccgttccgattctttcagcattgcagaacgtttcctctccttatgccgcttttggtct

SEQ ID NO: 591723 - DNA, 75 bp, synthetic construct
  source 1..75: mol_type = other DNA
tttgcgttaggagctgtgttagctgttgtggcgttgtggttacgccgtcaattggatgaaacttcacaacaagaa

SEQ ID NO: 591724 - DNA, 75 bp, synthetic construct
  source 1..75: mol_type = other DNA
tcgtttcggtggtacaaacaaccgtgtttgatgcgtatattgccggtctggctccctcggggcgcagaggtatca

SEQ ID NO: 591725 - DNA, 75 bp, synthetic construct
  source 1..75: mol_type = other DNA
gatgaccaggatatcactatcgataactatgaattcactactgactatctggagaatgccaccagtggtgaaaaa

SEQ ID NO: 591726 - DNA, 75 bp, synthetic construct
  source 1..75: mol_type = other DNA
gcaggttatccgacgctgtgtaaagggcgttatctggtggacggcgagcgctatcacgcgctggaagaaccaacc

SEQ ID NO: 591727 - DNA, 75 bp, synthetic construct
  source 1..75: mol_type = other DNA
cgaccgttatcaggacggcgaaaacgcaggttatccgacgctgtgtaaagggcgttatctggtggacggcgagcg

SEQ ID NO: 591728 - DNA, 75 bp, synthetic construct
  source 1..75: mol_type = other DNA
gtagatctaaatagtaaaagattatcgtattgtctgaagtcagtaagggaaatggctataagagatataatacct

SEQ ID NO: 591729 - DNA, 75 bp, synthetic construct
  source 1..75: mol_type = other DNA
tgagaatgccgccagcggtgaaaaagtggtggaagagacgctggttagccacctgctgaagtcaaactgcctgat

SEQ ID NO: 591730 - DNA, 75 bp, synthetic construct
  source 1..75: mol_type = other DNA
gtttacgctcgttatacccgtcgtggcggtctggacattaacccctggcgtagcaatagtgactttgtcccatcg

SEQ ID NO: 591731 - DNA, 75 bp, synthetic construct
  source 1..75: mol_type = other DNA
tatacagcgtaagggaagggcgttagaaaagtcggaaatccgggcactgatccaggccgctaaacagcatccgca

SEQ ID NO: 591732 - DNA, 75 bp, synthetic construct
  source 1..75: mol_type = other DNA
gagcgccgaagccgttgccgcgcaaatgccggatctgattttaattagcgcaaccggcggggattcggcgctggc

SEQ ID NO: 591733 - DNA, 75 bp, synthetic construct
  source 1..75: mol_type = other DNA
gtgagactcgccccgctctaccgcaacgcccttctattaacaggacttttgctttcaggaatagccgcagtgcag

SEQ ID NO: 591734 - DNA, 75 bp, synthetic construct
  source 1..75: mol_type = other DNA
tactggaataagtgaaacaattgaacacaataaaacaggttatttggcaaatgcatttgatacattagacttatc

SEQ ID NO: 591735 - DNA, 75 bp, synthetic construct
  source 1..75: mol_type = other DNA
cttcctcatcgaaagaaaagcgttcttaccgaaaaggtaagccgatgtcggcgagtgaaagacagcttgccgcga

SEQ ID NO: 591736 - DNA, 75 bp, synthetic construct
  source 1..75: mol_type = other DNA
gaacaacttaactacgccgccgttgccaaagtgcgcgcggcactgctggatgacggttacgccgtgtcatcggtc

SEQ ID NO: 591737 - DNA, 75 bp, synthetic construct
  source 1..75: mol_type = other DNA
caggagaaaatcaggtaccggatatgaacagctttggtaactcattgaccgccaatggataccagaaattacctg

SEQ ID NO: 591738 - DNA, 75 bp, synthetic construct
  source 1..75: mol_type = other DNA
acacattagccaaatggttaagcgcgatcctccccgtagtcattgttgggctggtgggattgtttgcggtgatgg

SEQ ID NO: 591739 - DNA, 75 bp, synthetic construct
  source 1..75: mol_type = other DNA
atgcaacgttcaaaagacaccttagccaaatggttaagcgcgatcctccccgtggtcattgttgggctggtggga

SEQ ID NO: 591740 - DNA, 75 bp, synthetic construct
  source 1..75: mol_type = other DNA
ctacacccgttagtaccggtcttggttttagcttaatgggttcccagccatcaggtagcaatacaacttattgtc

SEQ ID NO: 591741 - DNA, 75 bp, synthetic construct
  source 1..75: mol_type = other DNA
cgcattatcagtggacgcttccctataccattccctaatcaaccgcttgtttcagtcagtgtcatgtctgatgcc

SEQ ID NO: 591742 - DNA, 75 bp, synthetic construct
  source 1..75: mol_type = other DNA
tcattcccgattccatttacacagacaccgggcattgtaattgtgtgcgatggtggtttcgggggcgggaatatg

SEQ ID NO: 591743 - DNA, 75 bp, synthetic construct
  source 1..75: mol_type = other DNA
gtgagctggctgcgtgacatgttaggcgagtcgttaattcaggatgccagggcgcaggatctttcaccggaagat

SEQ ID NO: 591744 - DNA, 75 bp, synthetic construct
  source 1..75: mol_type = other DNA
ttgccctattggcaatcccctttttcatctttgccggaacgctgatgaacagcggcggtattgcgatacgtttga

SEQ ID NO: 591745 - DNA, 75 bp, synthetic construct
  source 1..75: mol_type = other DNA
acatcaacgactacggcggacgtccggttctgcagttcagctgcagcggagaccgttgtacggcggtgaagaaat

SEQ ID NO: 591746 - DNA, 75 bp, synthetic construct
  source 1..75: mol_type = other DNA
gttaacacccgattcacacagataaaaagcaacaccgtatattctgctgcaacccaaacgggtgtttgccagggt

SEQ ID NO: 591747 - DNA, 75 bp, synthetic construct
  source 1..75: mol_type = other DNA
cggtgaaaacgggccggaaattgttaacggcccggcaaacgtgaccagccggagaaatacagctgcactggctgc

SEQ ID NO: 591748 - DNA, 75 bp, synthetic construct
  source 1..75: mol_type = other DNA
gggatgtatgacagcggcggctatatcccgcgcgggcagtttggcatcgtcggtgaaaacgggccggaaattgtt

SEQ ID NO: 591749 - DNA, 75 bp, synthetic construct
  source 1..75: mol_type = other DNA
gtttcctggttgctggagaagctcggcattgtcagtaaagaggccgcaaaggcaaaactgccggaaagcgtgacg

SEQ ID NO: 591750 - DNA, 75 bp, synthetic construct
  source 1..75: mol_type = other DNA
ggcggagattgtcagtgctgtgacccgcgtgacggacattatgggcgaaatagcttctgcttctgatgagcagag

SEQ ID NO: 591751 - DNA, 75 bp, synthetic construct
  source 1..75: mol_type = other DNA
ggagaagtgcgtaatctggcccagcgtagcgctcaggcggctcgtgaaattaaaagccttattgaagactcggtg

SEQ ID NO: 591752 - DNA, 75 bp, synthetic construct
  source 1..75: mol_type = other DNA
actgatgtaatcctgaaaaaatcgtatgaagtgatgcatggggaattggggaatgcggattcgatccagagctgg

SEQ ID NO: 591753 - DNA, 75 bp, synthetic construct
  source 1..75: mol_type = other DNA
ttctgatgcgattggctgtcgatagctataacgctaatttcagtgagcatcctaatccattagatcgtatccctt

SEQ ID NO: 591754 - DNA, 75 bp, synthetic construct
  source 1..75: mol_type = other DNA
ggcttcacctgtctgcgtatttccattgcctgggcgcgaattttccctcagggcgacgaagccgaaccgaatgaa

SEQ ID NO: 591755 - DNA, 75 bp, synthetic construct
  source 1..75: mol_type = other DNA
tgtttgatgaaatggcgcaggcggggatcaagggtaatgactccaacttattgatagtgttttatgttcagataa

SEQ ID NO: 591756 - DNA, 75 bp, synthetic construct
  source 1..75: mol_type = other DNA
gggagaagcgcatcaattggcgcaggtgatggcgaaagaagccgaccgtttaaaccgcgtggtaagcgagctgct

SEQ ID NO: 591757 - DNA, 75 bp, synthetic construct
  source 1..75: mol_type = other DNA
aagcatcggcgccaccactggtgtaaaaacagaaagctggtcgaacaattgctggaagaatacgaaggataatga

SEQ ID NO: 591758 - DNA, 75 bp, synthetic construct
  source 1..75: mol_type = other DNA
tatggtttccggtcagtacgcattcaggatccgtaccttatctcaggtggtacgctatttttccctcctcccctg

SEQ ID NO: 591759 - DNA, 75 bp, synthetic construct
  source 1..75: mol_type = other DNA
gctgtggggtggtgctgccgggctcagcaccaccagtgactatgtttccggttcgttcactgccgggctgcctct

SEQ ID NO: 591760 - DNA, 75 bp, synthetic construct
  source 1..75: mol_type = other DNA
acattttcaatgtctatactttttttggggtcaatcacactgtcatggtactacgtataccaagataaaaaccta

SEQ ID NO: 591761 - DNA, 75 bp, synthetic construct
  source 1..75: mol_type = other DNA
aggaaagatggctaccacttgaattattcatcatcagaaaaactagggtttgaatatattaagaaatatggaaac

SEQ ID NO: 591762 - DNA, 75 bp, synthetic construct
  source 1..75: mol_type = other DNA
ttttttgtaatatctggttttctaattacaactattattgatagggagataagagaggagttattttcatataga

SEQ ID NO: 591763 - DNA, 75 bp, synthetic construct
  source 1..75: mol_type = other DNA
tattcctgcttgttgtactgacttgggggaccacatggctggctatgcgaatagccgctgaaactatccccccag

SEQ ID NO: 591764 - DNA, 75 bp, synthetic construct
  source 1..75: mol_type = other DNA
gttcgttcactgccggactgcctcttgtttacccggactggcttgcccctgaccatctcacggtttactggcgcg

SEQ ID NO: 591765 - DNA, 75 bp, synthetic construct
  source 1..75: mol_type = other DNA
gctttgaaccgcccatcaagaatgttgccggctatgacattaaaaggaatgaactggagaattatttcgcagtta

SEQ ID NO: 591766 - DNA, 75 bp, synthetic construct
  source 1..75: mol_type = other DNA
gcagcagccgtaaactcacttcattttctgtcgggctgaatcacacccacaagtttctgggggggtcggaacact

SEQ ID NO: 591767 - DNA, 75 bp, synthetic construct
  source 1..75: mol_type = other DNA
cagggaatcattgcgcttgtttcagccgtaatcatccatgccataatatatactcaatgcaagaaaagaagctgt

SEQ ID NO: 591768 - DNA, 75 bp, synthetic construct
  source 1..75: mol_type = other DNA
cacttcagcaaaaggccagtgcctttcaggcttcacttgtattccttatttttcctctaattgcggtaagcctgg

SEQ ID NO: 591769 - DNA, 75 bp, synthetic construct
  source 1..75: mol_type = other DNA
ttgatgcggacggcgaggccgtacgtgtggaaatcgtcaatggagtaaaaggcgttcgcagcctgatcgatagct

SEQ ID NO: 591770 - DNA, 75 bp, synthetic construct
  source 1..75: mol_type = other DNA
ggttccggcaagtcaggcaatccaggtgatggagctgattgagctgggcattgaatccgccaaacatcgcgcgac

SEQ ID NO: 591771 - DNA, 75 bp, synthetic construct
  source 1..75: mol_type = other DNA
tgaaaaatggcgaacgtttgccgcaggaagattggggctatgatatgcgtgacggcgtacttacccgtgttgaag

SEQ ID NO: 591772 - DNA, 75 bp, synthetic construct
  source 1..75: mol_type = other DNA
aggaagaaaaatcccttggggcttataccaagtcgggcgatgcgctgattgctggcgttattttgccgacgcaac

SEQ ID NO: 591773 - DNA, 75 bp, synthetic construct
  source 1..75: mol_type = other DNA
actgtattcttcactgctttatcagcaaatgagcgcctggtgcagctatcacaccttcgaaggcgctgctgcgtt

SEQ ID NO: 591774 - DNA, 75 bp, synthetic construct
  source 1..75: mol_type = other DNA
aagtactttcagtccggttttcactttcccttacgttattttgtctatatcgggatcaccgccattgtgcgcttg

SEQ ID NO: 591775 - DNA, 75 bp, synthetic construct
  source 1..75: mol_type = other DNA
tggatgtgttgatctactcggctgcgatcctgttactggtgatcactctgtggttgtgtaattcgaaacggctga

SEQ ID NO: 591776 - DNA, 75 bp, synthetic construct
  source 1..75: mol_type = other DNA
tgcggtgatttatacgggtggaacgctggaagagttgctatcgattctaaaagaaatcgttcatttccaggtggg

SEQ ID NO: 591777 - DNA, 75 bp, synthetic construct
  source 1..75: mol_type = other DNA
atttatactggcggaacgctggaagagttgctatcgattctaaaagaaatcgtccatttccaggtggggagtatt

SEQ ID NO: 591778 - DNA, 75 bp, synthetic construct
  source 1..75: mol_type = other DNA
aatcagtttacagcagcgtattccaggagtgagtattcagggggccggtcaggcagacgagttatggcagaagct

SEQ ID NO: 591779 - DNA, 75 bp, synthetic construct
  source 1..75: mol_type = other DNA
ttgcgccgcagaacggctggagcatcaggagtttgttttaacatataaagcatttgattacagtacaagcgcagt

SEQ ID NO: 591780 - DNA, 75 bp, synthetic construct
  source 1..75: mol_type = other DNA
ttgtagcgcagagcggctggggcataaagagtttgttctgacctataaagccttcgattattcaccagtagcttg

SEQ ID NO: 591781 - DNA, 75 bp, synthetic construct
  source 1..75: mol_type = other DNA
tgaacgtttgaaaatgctggcggatgagcggctgtataagagtaagaaaaacggcagggcgcagattagctggca

SEQ ID NO: 591782 - DNA, 75 bp, synthetic construct
  source 1..75: mol_type = other DNA
tcttgctgttaacaggcgttcgcactaaaaacatccgccacatgcggtgggaagatgtcgatgtgtgcgcggcta

SEQ ID NO: 591783 - DNA, 75 bp, synthetic construct
  source 1..75: mol_type = other DNA
gaccgcaatcatcagggccgtccggtcacagccttaaaagccgccgcgcacattgccgccattcttgcccgcgcc

SEQ ID NO: 591784 - DNA, 75 bp, synthetic construct
  source 1..75: mol_type = other DNA
accaccagcggcgatgaaaatattaaccgccattcgcccggacgacgccagcggatacgtattcaccagcaaagg

SEQ ID NO: 591785 - DNA, 75 bp, synthetic construct
  source 1..75: mol_type = other DNA
tcgctgaaatgacaaaagtgagtgcttacgaacttataacccgcctgacgtcaagggtggcgatgaaatacgtcg

SEQ ID NO: 591786 - DNA, 75 bp, synthetic construct
  source 1..75: mol_type = other DNA
aacgaagaacagcttgctgcgctggaagaggccaatctggaggagccagttaccgtctggatgaaactcgacacc

SEQ ID NO: 591787 - DNA, 75 bp, synthetic construct
  source 1..75: mol_type = other DNA
ccgcagtcgcattttgattgggtgcgcccaggcatcattctttatggcgtgtcaccgctggaagatggctccacc

SEQ ID NO: 591788 - DNA, 75 bp, synthetic construct
  source 1..75: mol_type = other DNA
gcttgcccgccgcttttgtgggttccgttgcgtgctggggaataagcgcatgggtgttgattatatgctggatga

SEQ ID NO: 591789 - DNA, 75 bp, synthetic construct
  source 1..75: mol_type = other DNA
ttggtgcgctggtggtggtgttgattggtgtattggcaaaaacgaaaaattactatattgccgggctgattccgc

SEQ ID NO: 591790 - DNA, 75 bp, synthetic construct
  source 1..75: mol_type = other DNA
tttgcccttaccactaaaggtacgcccgcacatagcgccgtaagttatcaggatggcgattatctgatgttcggc

SEQ ID NO: 591791 - DNA, 75 bp, synthetic construct
  source 1..75: mol_type = other DNA
atgcagccaacgcggttgtttattatccgatgagtgctcgactggtcgtcgaaaaaaataaaaccgtaagcaatg

SEQ ID NO: 591792 - DNA, 75 bp, synthetic construct
  source 1..75: mol_type = other DNA
cgagccacatgcgaaggtactgctaatgacggtgcggggttcgcaaatggatccacagccgcagataaagcaagt

SEQ ID NO: 591793 - DNA, 75 bp, synthetic construct
  source 1..75: mol_type = other DNA
atgacatttaaaaatttacgttatggattatccagcagtgtcgttttggctgcctcattgttcagcgtaccctct

SEQ ID NO: 591794 - DNA, 75 bp, synthetic construct
  source 1..75: mol_type = other DNA
tggcgtagtcgcgatgggttatggcgatggttatccgcgcgccgcgccgtccggtacgccagtgctggtgaacgg

SEQ ID NO: 591795 - DNA, 75 bp, synthetic construct
  source 1..75: mol_type = other DNA
caataaagataatataaaagtgagttacagcctaaaaataaaccagacaacaccaggcatacttgttaactgtga

SEQ ID NO: 591796 - DNA, 75 bp, synthetic construct
  source 1..75: mol_type = other DNA
gaaatgacgaaagtgagcgcttacgaacttatcacgcgcctgacttcaagggtcgcgatgaaatacgtggattaa

SEQ ID NO: 591797 - DNA, 75 bp, synthetic construct
  source 1..75: mol_type = other DNA
atgcggtgcaaccgagaaacagctcgatatctttaacactttttgcgaaggcaagccgggccagcgctcgattgc

SEQ ID NO: 591798 - DNA, 75 bp, synthetic construct
  source 1..75: mol_type = other DNA
tatacctgaccaggaactggtcattgtatccgaacggtggtaatgactccaacttattggtagtgttttatgttc

SEQ ID NO: 591799 - DNA, 75 bp, synthetic construct
  source 1..75: mol_type = other DNA
tatacctgaccaggaactggtcattgtatccgaacggtgatggctgtgtaactatggatttgcccctatatttcc

SEQ ID NO: 591800 - DNA, 75 bp, synthetic construct
  source 1..75: mol_type = other DNA
gtatccgaacggtgatggctgtgtaactataagctcaccagaaataaaaaataaataccctgctgccattgtaag

SEQ ID NO: 591801 - DNA, 75 bp, synthetic construct
  source 1..75: mol_type = other DNA
gcaaacctggtcaacgttccattgccgcgtcgggtggcattctgctgtggccacagtcgcattttgactgggtgc

SEQ ID NO: 591802 - DNA, 75 bp, synthetic construct
  source 1..75: mol_type = other DNA
cgccagccggtgaacattgttagtcacttcgcccgtgccgatgaaccgcaaagcggcgcgactgaaaagcagctc

SEQ ID NO: 591803 - DNA, 75 bp, synthetic construct
  source 1..75: mol_type = other DNA
gatggttatccgcgcgccgcgccgtccggtacgccagtgctggtgaacggtcgcgaagtaccgattgtcgggcgc

SEQ ID NO: 591804 - DNA, 75 bp, synthetic construct
  source 1..75: mol_type = other DNA
acaggcgcaggacaaagccggggacccggtcattttatggggcgaaggtttgcccgtagaacgtatcgctgaaat

SEQ ID NO: 591805 - DNA, 75 bp, synthetic construct
  source 1..75: mol_type = other DNA
ggcgaaggtttgcccgtagaacgtatcgctgaaatgacaaaagtgagcgcttacgaacttatcacgcgcctgact

SEQ ID NO: 591806 - DNA, 75 bp, synthetic construct
  source 1..75: mol_type = other DNA
ccgcgaagtgccaatcgtcgggcgagttgcgatggatatgatctgcgtagacttaggcccagaggcgcaggataa

SEQ ID NO: 591807 - DNA, 75 bp, synthetic construct
  source 1..75: mol_type = other DNA
ccggacagccgcagcatgaacctgtccaatgcggtgtcagttgtggtgtatgaagcctggcggcagctgggatat

SEQ ID NO: 591808 - DNA, 75 bp, synthetic construct
  source 1..75: mol_type = other DNA
tcccccgaagattacgcagcggcagaagactgggggacggtggtagccattgttcacagccatcctgacgcgacg

SEQ ID NO: 591809 - DNA, 75 bp, synthetic construct
  source 1..75: mol_type = other DNA
tccggcagacccactgtatcgagctccacgattaccgggtggattatccctggtgggaaaacgactacccggaca

SEQ ID NO: 591810 - DNA, 75 bp, synthetic construct
  source 1..75: mol_type = other DNA
ctggcatattgtgagctggccagagggggatttacgtaccattcagccacgcggggagctgccattgctggagcg

SEQ ID NO: 591811 - DNA, 75 bp, synthetic construct
  source 1..75: mol_type = other DNA
acccagttcaacgtcaacgtgctgaccggctctgacggcgtactgcgtggcgcttccggcggtcactgcgatact

SEQ ID NO: 591812 - DNA, 75 bp, synthetic construct
  source 1..75: mol_type = other DNA
ccatcacgctttccgtggcggtgacctgaccgtcaatatggtgatggacgtcatcgcgaagatgggctttaaaaa

SEQ ID NO: 591813 - DNA, 75 bp, synthetic construct
  source 1..75: mol_type = other DNA
ccacgattaccgggttgattatccctggtgggaaaacgaatatccggacaacttctatcaggattgctggtatga

SEQ ID NO: 591814 - DNA, 75 bp, synthetic construct
  source 1..75: mol_type = other DNA
tatcaccctgcctctccatgcgcgcttctatcaatatgcgccgactaccagtaccggtgaagtggagtcgcacct

SEQ ID NO: 591815 - DNA, 75 bp, synthetic construct
  source 1..75: mol_type = other DNA
ctgttctgttaatagctcatcgaccagaaacaatagcatccgcagacagagttctgtatctgagagatggtcact

SEQ ID NO: 591816 - DNA, 75 bp, synthetic construct
  source 1..75: mol_type = other DNA
ctgtacagtccggaaatgacgctgatagccgtactggcagccattatctacggtgtgctgagggcgttgtggtat

SEQ ID NO: 591817 - DNA, 75 bp, synthetic construct
  source 1..75: mol_type = other DNA
aaagtggcaatattgcagcgcaaggcgttggtgtacaggtgctggacagcaacataaacccgctgcagttcaaaa

SEQ ID NO: 591818 - DNA, 75 bp, synthetic construct
  source 1..75: mol_type = other DNA
ggacgatgagcgctcccggcggggcaagctatcgctgtacttccggcaccaaccgctttgcggcgaagatcgtgt

SEQ ID NO: 591819 - DNA, 75 bp, synthetic construct
  source 1..75: mol_type = other DNA
gaataatcaggagacccgctacatcaccataccgctgcacgcgcgtttttatcagtatggcccgacgaccagcac

SEQ ID NO: 591820 - DNA, 75 bp, synthetic construct
  source 1..75: mol_type = other DNA
ccgcatttatacctccggtctgcgcggcccgctggcggaagaaatctcccggggcctgctggctgaaccggtaca

SEQ ID NO: 591821 - DNA, 75 bp, synthetic construct
  source 1..75: mol_type = other DNA
gtggtcgcaaaagataaaactgtcacagatgtcaccgcaggtgatttcactgctcctgcaacatttactgtgact

SEQ ID NO: 591822 - DNA, 75 bp, synthetic construct
  source 1..75: mol_type = other DNA
gatgacaatgatcagcctatttctgttattgcatttggggatgcttacattcctgaaattgatgccaaaacaaaa

SEQ ID NO: 591823 - DNA, 75 bp, synthetic construct
  source 1..75: mol_type = other DNA
gttgatgataatgatcaaaccatttctgtcgttgcttttggcgatgtttatatttctgaaatcaatgcaaaaaca

SEQ ID NO: 591824 - DNA, 75 bp, synthetic construct
  source 1..75: mol_type = other DNA
catcatccgtctttgcgctaataccggctttcgtctgcatatcatcgaaccgatgggatttgcctgggacgataa

SEQ ID NO: 591825 - DNA, 75 bp, synthetic construct
  source 1..75: mol_type = other DNA
taaagaaaaagaactttatgaacgaccactgaaagaatttatcaataaaaagataagagaaagtggattatccga

SEQ ID NO: 591826 - DNA, 75 bp, synthetic construct
  source 1..75: mol_type = other DNA
atttatcatcgtggtcgtgacgcgcaggccagcgggcaacagtggggcgaggccgatctggcacgcatgaaagcg

SEQ ID NO: 591827 - DNA, 75 bp, synthetic construct
  source 1..75: mol_type = other DNA
tgccttatccgcataatccggcaagcattgagcaagatcaggttgatctgatcgtcaaagttgatcgcgttggcg

SEQ ID NO: 591828 - DNA, 75 bp, synthetic construct
  source 1..75: mol_type = other DNA
gtgaaccacagccgattgaattcaccgaccgcgtcgttgccgttgtgcgttaccgcgatggctcggtgatcgatg

SEQ ID NO: 591829 - DNA, 75 bp, synthetic construct
  source 1..75: mol_type = other DNA
gttaacccggcacgtccggagctggcagaacgtctgcaggaagcggggatcaaagtggtttctattgagtggctg

SEQ ID NO: 591830 - DNA, 75 bp, synthetic construct
  source 1..75: mol_type = other DNA
caccgcgcagtttttgaaagagcagggcaaagtccccgccgtggcgaatgattacagccagtacgttacctcgcg

SEQ ID NO: 591831 - DNA, 75 bp, synthetic construct
  source 1..75: mol_type = other DNA
cacccactacagcctgctggcggcgctgaaacactggggaattaaaccagggcaagtggagattgtgaacctgca

SEQ ID NO: 591832 - DNA, 75 bp, synthetic construct
  source 1..75: mol_type = other DNA
atggcaatttcatcgcgtaacacacttcttgccgcactggcattcatcgcttttcaggcgcaggcggtgaacgtc

SEQ ID NO: 591833 - DNA, 75 bp, synthetic construct
  source 1..75: mol_type = other DNA
gatttggcggtggtcgcggcgcattgtggattgagcgaaaaacaggttgttgaattgcactcctccgtggaatac

SEQ ID NO: 591834 - DNA, 75 bp, synthetic construct
  source 1..75: mol_type = other DNA
tgacccgacccgtgacgagcctatcttattacgtcctggagacagcgtgcgctttgtgccgcagaaggagggagt

SEQ ID NO: 591835 - DNA, 75 bp, synthetic construct
  source 1..75: mol_type = other DNA
gcgccaattgaattaattagcgtcgctgtatctcgcgtcgccgttgaattacgtacccgcgtcgagtcgtggcca

SEQ ID NO: 591836 - DNA, 75 bp, synthetic construct
  source 1..75: mol_type = other DNA
accgagaagcgattgcaaaagcactggagtctcttaataaagatcaaatggctaaacagttaaaaattttggtaa

SEQ ID NO: 591837 - DNA, 75 bp, synthetic construct
  source 1..75: mol_type = other DNA
acaatgcgctaaatgaaatttgtggtgggtacgaatacattcaatctgccgatagttacagttggcatgatgtaa

SEQ ID NO: 591838 - DNA, 75 bp, synthetic construct
  source 1..75: mol_type = other DNA
aaattatattccactgccaggcaggtaaacgcaccagtaataacgccgataaattagcagcgattgccgcccccg

SEQ ID NO: 591839 - DNA, 75 bp, synthetic construct
  source 1..75: mol_type = other DNA
acaaccttccggcggcggcacgttagtaagtattagctttcgctctgcggagggtgaggaaagtcagcttatttg

SEQ ID NO: 591840 - DNA, 75 bp, synthetic construct
  source 1..75: mol_type = other DNA
cgctgaacgcaaaatgctgctggtggtggcgatttccctggctggcggcatcggtattttcacgctggtcttttt

SEQ ID NO: 591841 - DNA, 75 bp, synthetic construct
  source 1..75: mol_type = other DNA
gattagcgaagggcaaccaaacccggaattgccgatgcagattttaccggtgacaatgcaagagacggtttacgg

SEQ ID NO: 591842 - DNA, 75 bp, synthetic construct
  source 1..75: mol_type = other DNA
gtggcgctggactgtctgaagcgtcatcgtgtggacgtcaatatcctgaccgtagtgaacaacgtgacggcacaa

SEQ ID NO: 591843 - DNA, 75 bp, synthetic construct
  source 1..75: mol_type = other DNA
gatgaccaggatatcgctatcgataactatgaattcaccactgactatcttgagaatgccaccagcggcgagaaa

SEQ ID NO: 591844 - DNA, 75 bp, synthetic construct
  source 1..75: mol_type = other DNA
tcaccgctatgttggcaacgaactcgaagccgaacgttataagctgaaggaaagtcaggctcataaatttgcggg

SEQ ID NO: 591845 - DNA, 75 bp, synthetic construct
  source 1..75: mol_type = other DNA
ttttctgacgaaggttttgtcggatatgtgaatgcattacaggcatctaacattctggagacgatcaagaaagag

SEQ ID NO: 591846 - DNA, 75 bp, synthetic construct
  source 1..75: mol_type = other DNA
agaagggggcaagatccagcagctggctgaagtcgaagtggcttttactgcggactatatcgattacatggcgga

SEQ ID NO: 591847 - DNA, 75 bp, synthetic construct
  source 1..75: mol_type = other DNA
attactggccctctatgatgaccaggttcacgactcccgcgcctggtttatgcaaagttcgctgggtggacgtga

SEQ ID NO: 591848 - DNA, 75 bp, synthetic construct
  source 1..75: mol_type = other DNA
tgataaagaggcccaagcgcgcgaagaacaaatggaaaatatcgaaaaagagcgggtgaacaagcagaaaggcaa

SEQ ID NO: 591849 - DNA, 75 bp, synthetic construct
  source 1..75: mol_type = other DNA
tcatgaaattgaaaggtatttgtacgccacttttaaatatgaattgattttggaagaaaaactatatctctctat

SEQ ID NO: 591850 - DNA, 75 bp, synthetic construct
  source 1..75: mol_type = other DNA
gtggtcgggtgtgatggcaccggtaaatccacactgaccactgacctggtgaaatcgctgcaacaacactggcaa

SEQ ID NO: 591851 - DNA, 75 bp, synthetic construct
  source 1..75: mol_type = other DNA
acttctcacagctcagggcaatcaaagctctggacatacgaagaagagaggtaaattaccttctgatgcagtcag

SEQ ID NO: 591852 - DNA, 75 bp, synthetic construct
  source 1..75: mol_type = other DNA
gggcattctctcttattgccggttggtacaaaccacagtttaagagggaatatcagacggtccactatgagaatg

SEQ ID NO: 591853 - DNA, 75 bp, synthetic construct
  source 1..75: mol_type = other DNA
tgacctgcccttcccgctttcacagcgtaaacgaggacggcagcctgaacccgaaatacaacggtgccaccgtgc

SEQ ID NO: 591854 - DNA, 75 bp, synthetic construct
  source 1..75: mol_type = other DNA
cgccttgatgaattactcatgctgccacaactcaaccgtgatcaaattcagcgccttgccacactaacggcggcg

SEQ ID NO: 591855 - DNA, 75 bp, synthetic construct
  source 1..75: mol_type = other DNA
agcaactccctgatgagacgcagtttcccggcctgattaaatgctgccgccacttcgtcgctgcgcatgaacagc

SEQ ID NO: 591856 - DNA, 75 bp, synthetic construct
  source 1..75: mol_type = other DNA
cttagctatgctattgacccaacccaaaatggactgaatgagaaggtggcaaaagagcacattcctcttatgcgt

SEQ ID NO: 591857 - DNA, 75 bp, synthetic construct
  source 1..75: mol_type = other DNA
gggcattctctcttattgccggttggtacaaaccacagtttaagagggaatatcaggcgatccactatgagaatg

SEQ ID NO: 591858 - DNA, 75 bp, synthetic construct
  source 1..75: mol_type = other DNA
ttgaaatagatgctgatggcgcacctgtggcatatcacatacgtgaagcacatatcggtgactggtggagtggcg

SEQ ID NO: 591859 - DNA, 75 bp, synthetic construct
  source 1..75: mol_type = other DNA
agccagcgggcaacagtggggcgaagccgatctggcacgcatgaaggcgctttccgatatcggccttgagctttc

SEQ ID NO: 591860 - DNA, 75 bp, synthetic construct
  source 1..75: mol_type = other DNA
aataactcacgagcaatcgtcaataatactgctttgctgattcgtcagaatgctggatcactggaacacttcgga

SEQ ID NO: 591861 - DNA, 75 bp, synthetic construct
  source 1..75: mol_type = other DNA
ccatgaggattaccagattgttggcaatcagcgcctggactactccgatcgcgtcacggtggcgcgtttgctggg

SEQ ID NO: 591862 - DNA, 75 bp, synthetic construct
  source 1..75: mol_type = other DNA
agggcttggcgcggtgaaagccttgcgtgaacagtgcccggacaaaatcatcgtcgctgactggaaggtcgctga

SEQ ID NO: 591863 - DNA, 75 bp, synthetic construct
  source 1..75: mol_type = other DNA
agcgctggcaggcgcggtaaatccggcgcaggtcgccgctgatttccatgcgcaaattgatgccatctggggagg

SEQ ID NO: 591864 - DNA, 75 bp, synthetic construct
  source 1..75: mol_type = other DNA
agcactggcaggcgcggcaaatccggcacaggtggctgcagatttccatgcgcaaattgatgctatctggggagg

SEQ ID NO: 591865 - DNA, 75 bp, synthetic construct
  source 1..75: mol_type = other DNA
cagttcgtcaatcggctgggtgaagcgatgcaggcggttcaatttggtaaccccgctgaacgcaacgacattgcg

SEQ ID NO: 591866 - DNA, 75 bp, synthetic construct
  source 1..75: mol_type = other DNA
aaacctagtgaatttacgccaaacaatgcgattgcattcgccaaaatcgtcgatgaaataggccttccgcgcggc

SEQ ID NO: 591867 - DNA, 75 bp, synthetic construct
  source 1..75: mol_type = other DNA
gtgagaagatcatggcgactgcggcgaaaaacatcaccaaagtgtgtctggaattgggggtaaagcaccagctat

SEQ ID NO: 591868 - DNA, 75 bp, synthetic construct
  source 1..75: mol_type = other DNA
aagttggggcgatggcgaaattgaaagtcatctgatgggcgcttttaacgtcagtaacttgctgctggcgctggc

SEQ ID NO: 591869 - DNA, 75 bp, synthetic construct
  source 1..75: mol_type = other DNA
ctcacactccggatgcgctggaaaaagccttgcaggctgcgcgcctgcactgtgcgggtaagctgtggtgcgtct

SEQ ID NO: 591870 - DNA, 75 bp, synthetic construct
  source 1..75: mol_type = other DNA
gcgatcgacgtgaactatcacgacagcggtgcgacgattcgctttagctcaagttggggcgatggcgaaattgaa

SEQ ID NO: 591871 - DNA, 75 bp, synthetic construct
  source 1..75: mol_type = other DNA
cgacgccgctcacagacgatccgcgatttttacaggccaccgaagccgtggtcctgacgcgagtcgatgattacc

SEQ ID NO: 591872 - DNA, 75 bp, synthetic construct
  source 1..75: mol_type = other DNA
gtttttacgcatcatttcagtatgtgacgttgatcggcgggcaactgctagctctactggttgtcgtggttttac

SEQ ID NO: 591873 - DNA, 75 bp, synthetic construct
  source 1..75: mol_type = other DNA
ctgtcatatgcggtcgccaatgctatatttggtggttcggcggagtacgtagcgttgtcgctgaaatcaatagga

SEQ ID NO: 591874 - DNA, 75 bp, synthetic construct
  source 1..75: mol_type = other DNA
ttcgcgttaggggctgtgttagctgttgtggcgttgtggttacgtcgtcagttagatgaaacttcacaacaagaa

SEQ ID NO: 591875 - DNA, 75 bp, synthetic construct
  source 1..75: mol_type = other DNA
ataatgatcgccgtttgacgctgcagaatggcgcccgtatgccgatcctttatccaggggagagaataacaacgg

SEQ ID NO: 591876 - DNA, 75 bp, synthetic construct
  source 1..75: mol_type = other DNA
cagggttgtccccacagcaggtcacccaggactggtctgacgttaactacagttctgcacgctcctcgttgctgg

SEQ ID NO: 591877 - DNA, 75 bp, synthetic construct
  source 1..75: mol_type = other DNA
ccccatcatgaaacccgattaccgtgttctcagaatgatcaccggaaacaaggcgtttgatgcgtcctgggcgga

SEQ ID NO: 591878 - DNA, 75 bp, synthetic construct
  source 1..75: mol_type = other DNA
aaaacgctggaatcaagcggagcgatacggatagaacgccgtgggcgtaatggcagttatctggtggaaatggat

SEQ ID NO: 591879 - DNA, 75 bp, synthetic construct
  source 1..75: mol_type = other DNA
caccagttgatttgccgtaaaggcgagtccgcaaacgtgaagcgcgtggggctggataaccgttcggcagatcag

SEQ ID NO: 591880 - DNA, 75 bp, synthetic construct
  source 1..75: mol_type = other DNA
tggcagttatctggtggaaatggataacaaagcgctgctgagtcatgtggatatcaataacgttgtgtgtgccat

SEQ ID NO: 591881 - DNA, 75 bp, synthetic construct
  source 1..75: mol_type = other DNA
gttctgttcactctacttcgcccacatcttcttcccttccgggaacacgacgacccaactactgcaaacagcagg

SEQ ID NO: 591882 - DNA, 75 bp, synthetic construct
  source 1..75: mol_type = other DNA
aaaatgaaaaactgcgtcaggaacggttagccgttaacccgtatgcagactttgaagaaaccgactggatcgaac

SEQ ID NO: 591883 - DNA, 75 bp, synthetic construct
  source 1..75: mol_type = other DNA
aaggcgtcgtcatcacgacgctggcccgttatttgttgggtgaaaaatgcggtaatcgactgaaaaccatagatg

SEQ ID NO: 591884 - DNA, 75 bp, synthetic construct
  source 1..75: mol_type = other DNA
ttacgaatacaaatatttattttacatttgcgatgcagcaaaaagtcctgtatttgctattcagattgaagaaaa

SEQ ID NO: 591885 - DNA, 75 bp, synthetic construct
  source 1..75: mol_type = other DNA
gcgaaataaagcgtcagatggtcgcgctgcaagcaacccagcaagcagaaacccaggatgtgatggagcaacagg

SEQ ID NO: 591886 - DNA, 75 bp, synthetic construct
  source 1..75: mol_type = other DNA
cagcagctattggtagaacaacaggccttggaaaggggacgtctcgccgagcgcattactgcacaacataacagc

SEQ ID NO: 591887 - DNA, 75 bp, synthetic construct
  source 1..75: mol_type = other DNA
caggtgctcgaaagttctacgttggaattcatggtagttttggtgcaaaaattagtgcatatcataccggatgtg

SEQ ID NO: 591888 - DNA, 75 bp, synthetic construct
  source 1..75: mol_type = other DNA
cggatacaacattttaaaagctattttggaaatagagttttcaccaccgacagtggttagcttttgtagtttagg

SEQ ID NO: 591889 - DNA, 75 bp, synthetic construct
  source 1..75: mol_type = other DNA
ttaatttctatccgtattcaggtgctcgaaagttctacgttggaattcatggtagctttggtgcaaaaattagtg

SEQ ID NO: 591890 - DNA, 75 bp, synthetic construct
  source 1..75: mol_type = other DNA
cggagaaagcccgacaggatgcaaccgtcacagctgaggacagaaaggccactgcggaagatgtgacaagcacag

SEQ ID NO: 591891 - DNA, 75 bp, synthetic construct
  source 1..75: mol_type = other DNA
tatcgccgtcagcgggagatgaaagaggagctgagcagtctggatgatttggcttcaattcgggcgtttgacgtt

SEQ ID NO: 591892 - DNA, 75 bp, synthetic construct
  source 1..75: mol_type = other DNA
gttctgccgggcgtgtacagcgttcgcctgacacagagcgcacaacgcctttcagaaatcggtgtcattcgcgtt

SEQ ID NO: 591893 - DNA, 75 bp, synthetic construct
  source 1..75: mol_type = other DNA
tgcagtagatacttggggtggcgatgagcatgcaggccagtatggtgaagaggtttatcggcaggtctctgaaca

SEQ ID NO: 591894 - DNA, 75 bp, synthetic construct
  source 1..75: mol_type = other DNA
ttcagaaatcggtgtcatccgcgtttatgaagattcaacggacggttcgctgaatgattttctgggcgcaactaa

SEQ ID NO: 591895 - DNA, 75 bp, synthetic construct
  source 1..75: mol_type = other DNA
agcatccccacaatttttcattacgggatgttcagagcattcattaccggggtcatattgcgccctgtccggggt

SEQ ID NO: 591896 - DNA, 75 bp, synthetic construct
  source 1..75: mol_type = other DNA
tgtacgccataacggagacagtgagaaaaacggcgaggcaaatcacaaggagagggatgtatcagcagtgactga

SEQ ID NO: 591897 - DNA, 75 bp, synthetic construct
  source 1..75: mol_type = other DNA
aactttggataattcatctgaatcaacttaaatcatctgttgaaatcttacctacggcattacaaaaatcgctaa

SEQ ID NO: 591898 - DNA, 75 bp, synthetic construct
  source 1..75: mol_type = other DNA
gaaaaaggaattagccactttattaccgaacatattgtgccattctatgaacgtcgctggggtggtttttttgcg

SEQ ID NO: 591899 - DNA, 75 bp, synthetic construct
  source 1..75: mol_type = other DNA
tgagcgaaaaatacatctttatcactgtgaccaccggggcctgccgctggcgcttatcagtgaagacggcaatac

SEQ ID NO: 591900 - DNA, 75 bp, synthetic construct
  source 1..75: mol_type = other DNA
gtttcaggacgtggcctattaccgcagctcgccatgcttcaacggcagcggcggatgcacgccggccgaaaaggc

SEQ ID NO: 591901 - DNA, 75 bp, synthetic construct
  source 1..75: mol_type = other DNA
tattcaagcaatacgaaaataattatttactaaaaaacccctttactggtgaaacagtaaaattaagacacccct

SEQ ID NO: 591902 - DNA, 75 bp, synthetic construct
  source 1..75: mol_type = other DNA
gaaacccctggtacgaggttgtttggctctatgaccgtgaatttgaaggtcgtcaatttccgcttgtttaccttg

SEQ ID NO: 591903 - DNA, 75 bp, synthetic construct
  source 1..75: mol_type = other DNA
gtgtttattggttttgattacggtacagcaaactgttcagtggcggtcatgcgtgacggtaaaccgcacttgcta

SEQ ID NO: 591904 - DNA, 75 bp, synthetic construct
  source 1..75: mol_type = other DNA
ctgcgggaaaccttgcttgagcactactcaccggatgaagtgcatgaagcagtgccagagtatgaaaccagctga

SEQ ID NO: 591905 - DNA, 75 bp, synthetic construct
  source 1..75: mol_type = other DNA
tgttgccggaacgtggtgaaaacctctatcaccaggaagtgctgacgctaaaacaacagcttgaacagcaggtgc

SEQ ID NO: 591906 - DNA, 75 bp, synthetic construct
  source 1..75: mol_type = other DNA
caatccagcgacggaaaagttggttggcgtgttgattatgatcctgaaaaaggcacacacatcaatatatgggat

SEQ ID NO: 591907 - DNA, 75 bp, synthetic construct
  source 1..75: mol_type = other DNA
ccagcgtgatgacttttctgaggatagtcacgcaaacgatccgaagttggttaatgatgactacgtgccagcgcc

SEQ ID NO: 591908 - DNA, 75 bp, synthetic construct
  source 1..75: mol_type = other DNA
ccaacgcgatgacttttctgaggatagccatgccaacgatccgaagttggttggtgatgattacgtcccccaggc

SEQ ID NO: 591909 - DNA, 75 bp, synthetic construct
  source 1..75: mol_type = other DNA
gaaccccaccaggggtaattcaaatttcgaggtaatgcttgagatggtggtgggggaaggattattcgtcgcttc

SEQ ID NO: 591910 - DNA, 75 bp, synthetic construct
  source 1..75: mol_type = other DNA
ggtatggcgaaggattggacaaaaccaccatataactaaggtcgtacatcaactcgccaatctttacgggctttg

SEQ ID NO: 591911 - DNA, 75 bp, synthetic construct
  source 1..75: mol_type = other DNA
cctggtttatcatatcagtatggtttccccccaggcactggaagccagacgtaaggtcatcaaagagacgctcct

SEQ ID NO: 591912 - DNA, 75 bp, synthetic construct
  source 1..75: mol_type = other DNA
caccgggggatgggggccagataatgaagaaaaagcccgtcatcaggaggttcagcaacaacgatttgatgaact

SEQ ID NO: 591913 - DNA, 75 bp, synthetic construct
  source 1..75: mol_type = other DNA
agagatgtttatgatatcgagaggttttattgtgatgaggattatttatcggaaggtaatatttcttgcgaatat

SEQ ID NO: 591914 - DNA, 75 bp, synthetic construct
  source 1..75: mol_type = other DNA
ccttatcttgcagaaaacaggctcggaatcagaaaaagtatcatttcccaagagattactaaatgcggaggggaa

SEQ ID NO: 591915 - DNA, 75 bp, synthetic construct
  source 1..75: mol_type = other DNA
agaagagatgtttatgatatcgagcggttttattgtgatgaggattgttcattagaagataatatttcttgcgaa

SEQ ID NO: 591916 - DNA, 75 bp, synthetic construct
  source 1..75: mol_type = other DNA
gtcatgctcagtaacggcgagcggcacagtgtaaccggtgaacaggcagaagagactaaggggcttcgtccactc

SEQ ID NO: 591917 - DNA, 75 bp, synthetic construct
  source 1..75: mol_type = other DNA
cgatctcaaatatagatccattaggattagaaacactaaaatgcattaagccactgcattcaatgggcggaactg

SEQ ID NO: 591918 - DNA, 75 bp, synthetic construct
  source 1..75: mol_type = other DNA
acccgcgctgtgatgcgccttgtcagttgccgccgtagtggtcgccgttctcactggggtgagcgtggcgcgtga

SEQ ID NO: 591919 - DNA, 75 bp, synthetic construct
  source 1..75: mol_type = other DNA
tggcaggcatcgcgagcagctattgaactggatatcgactggcccgaatcgaatgacgacctttggaaagatggt

SEQ ID NO: 591920 - DNA, 75 bp, synthetic construct
  source 1..75: mol_type = other DNA
agagcacctaacagaccagatatggcatacagggcaacgcgcagcatcgccagcggaccggatgccagtactcgc

SEQ ID NO: 591921 - DNA, 75 bp, synthetic construct
  source 1..75: mol_type = other DNA
ccattgaaagatatgaagattttatgtcttcaattgacaactactatgggcgtaagaaatttgaaggtatcaagt

SEQ ID NO: 591922 - DNA, 75 bp, synthetic construct
  source 1..75: mol_type = other DNA
gatttcagcccctgctgtctccgacaccgttcagtccgtcaccggctccaccacaaaactggtcaccggcgaccg

SEQ ID NO: 591923 - DNA, 75 bp, synthetic construct
  source 1..75: mol_type = other DNA
aagctaaagagtggttggataaaccttctcgtgctttatcttataaaaagcctatcgagttaatatcttctgaat

SEQ ID NO: 591924 - DNA, 75 bp, synthetic construct
  source 1..75: mol_type = other DNA
tccgctggaatcacctgggtgtatgacacatccgtaactctctacgactggctccctgcttttcgaatcaacgtt

SEQ ID NO: 591925 - DNA, 75 bp, synthetic construct
  source 1..75: mol_type = other DNA
tggtgcgagagggtgtgtacgatcttccgctggaatcacctgggtgtatgacacatccgtaactctctacgactg

SEQ ID NO: 591926 - DNA, 75 bp, synthetic construct
  source 1..75: mol_type = other DNA
aattaaaaaaaataaatcaggaaaacatgtgaaatacactgtttctggaaaagtagacgatgttttaaaagtaat

SEQ ID NO: 591927 - DNA, 75 bp, synthetic construct
  source 1..75: mol_type = other DNA
cctctgttacggtaattaaaaccctgatggatgcactgattgacatctctgttatcgcagatatggcgcataaac

SEQ ID NO: 591928 - DNA, 75 bp, synthetic construct
  source 1..75: mol_type = other DNA
gtggagttttacagttatggcgatataaaatactgtttactatcaaaaataaatgaattgattgatgagcaaatt

SEQ ID NO: 591929 - DNA, 75 bp, synthetic construct
  source 1..75: mol_type = other DNA
gccggtaatatgatggggagcggtattgcattattacctgcgaacctagcaagtatcggtggtattgctatctga

SEQ ID NO: 591930 - DNA, 75 bp, synthetic construct
  source 1..75: mol_type = other DNA
tcagtttctggagcaaatgttacagtaaataatacttgccatcttgataacttccctgaatcgacattaactgga

SEQ ID NO: 591931 - DNA, 75 bp, synthetic construct
  source 1..75: mol_type = other DNA
aaggcttctctataaacatgcacatccaaatattgtgcaagttcagtatgctgctcaatgtgagagcaatatcta

SEQ ID NO: 591932 - DNA, 75 bp, synthetic construct
  source 1..75: mol_type = other DNA
cagcgtatacgaacctggcgctggatacgacaacgatcaacacctctggtctggccaattacggatttagctaca

SEQ ID NO: 591933 - DNA, 75 bp, synthetic construct
  source 1..75: mol_type = other DNA
gtaaaacatattcggtgtatctcgcaggtcctttctttactcttgcacagatgtggttaattgaacaagttcgcc

SEQ ID NO: 591934 - DNA, 75 bp, synthetic construct
  source 1..75: mol_type = other DNA
gagttctgacgctagttggaggctcttaccatgaaatctgccagcaccctggctaccacgatattttcggttctg

SEQ ID NO: 591935 - DNA, 75 bp, synthetic construct
  source 1..75: mol_type = other DNA
tcaattgttgaacagccgctcggtttttatcaacaaacactattctcgattatcatttgtatctctgtttttctc

SEQ ID NO: 591936 - DNA, 75 bp, synthetic construct
  source 1..75: mol_type = other DNA
aaaacgatgggctggtttattgccgataaaaaactatcgatgctgcaaacaccacatcattttttctctcccgat

SEQ ID NO: 591937 - DNA, 75 bp, synthetic construct
  source 1..75: mol_type = other DNA
cgaacgagttaggtatttactatgtcgcaagagaaacacatgaacatgctaaggccggaaatataaataatgcgc

SEQ ID NO: 591938 - DNA, 75 bp, synthetic construct
  source 1..75: mol_type = other DNA
tcggcgaaaaagccgctgaaaacttacaatcattacaaggctacgatcccagcgaatttacattcgctaacggtg

SEQ ID NO: 591939 - DNA, 75 bp, synthetic construct
  source 1..75: mol_type = other DNA
tccccagagttaacaaggaaatatctcggcgaaaaagccgctgaaaacttacaatcattacaaggctacgatccc

SEQ ID NO: 591940 - DNA, 75 bp, synthetic construct
  source 1..75: mol_type = other DNA
gttttcgcactattttttcgaccgcttctgtcgctgacgcctgcgatcagatcctgggcaaaacgatgttcctgc

SEQ ID NO: 591941 - DNA, 75 bp, synthetic construct
  source 1..75: mol_type = other DNA
aaaatattttctccttactacgtcgcgttaatccgcctcctgattgtcttcggagccaggacggtagaactgagg

SEQ ID NO: 591942 - DNA, 75 bp, synthetic construct
  source 1..75: mol_type = other DNA
gcgggtgagctggggagaggcttatgctcggctctggccaaagcaggggctaatctattgttggttgacatcaaa

SEQ ID NO: 591943 - DNA, 75 bp, synthetic construct
  source 1..75: mol_type = other DNA
aggagaacccacatcacctgtatcagccataccgcctgccggggcagcagcatgatgaggagtcagggctttatt

SEQ ID NO: 591944 - DNA, 75 bp, synthetic construct
  source 1..75: mol_type = other DNA
actcaaaaagcatggacatagtcgctgacaatatcagcaaactcaaagaactatttccggaggtatttaccgaag

SEQ ID NO: 591945 - DNA, 75 bp, synthetic construct
  source 1..75: mol_type = other DNA
aaatctctttatcgaaggcgataacctcgaagtactcaagctactgcaaaagagctatcacaaaaaagtcaaaat

SEQ ID NO: 591946 - DNA, 75 bp, synthetic construct
  source 1..75: mol_type = other DNA
gtggttggaccttgggtacggactggcagtaacccgagccttcgtgtctatgacctccagcgccaccgtgcagtc

SEQ ID NO: 591947 - DNA, 75 bp, synthetic construct
  source 1..75: mol_type = other DNA
caatcaaaccaccacaaagatgttatttatgtgtcgtgagtgatgtcttgtttacattatgttctattcgtcatt

SEQ ID NO: 591948 - DNA, 75 bp, synthetic construct
  source 1..75: mol_type = other DNA
gagtcacaaacacgaacggtggtaacggcggtgtgccaagtactggcggtatcaacatcattggtggaaatggag

SEQ ID NO: 591949 - DNA, 75 bp, synthetic construct
  source 1..75: mol_type = other DNA
acctgacgatatggcagggcgatgaagtacagcgccgggtgaaaggtatggtgacctggtttgaactgggggaga

SEQ ID NO: 591950 - DNA, 75 bp, synthetic construct
  source 1..75: mol_type = other DNA
ggcaggaaggtaaattagaaggtttgcagcaaggtaaattggagggtctgcagaaaggtaaattagaaggtttgc

SEQ ID NO: 591951 - DNA, 75 bp, synthetic construct
  source 1..75: mol_type = other DNA
cggtaaaggcagcatatgacctcgctaacgggaaatataccgcacaggatgccaccactgcgcgaaaaggtcttg

SEQ ID NO: 591952 - DNA, 75 bp, synthetic construct
  source 1..75: mol_type = other DNA
cagtagcgccaccaacagcgattctgaaacgcttgcggcaacgccaaaggcggttaagacagcgtatgaccttgc

SEQ ID NO: 591953 - DNA, 75 bp, synthetic construct
  source 1..75: mol_type = other DNA
acgatgccggttatagcggaaccagtatgacaggcgggaaaggtgccgctgggatttgtattatcgaggagtttg

SEQ ID NO: 591954 - DNA, 75 bp, synthetic construct
  source 1..75: mol_type = other DNA
acctggatatcgatgcccgctggtgtcttgtccacgcgacacatgcggatgagaaagaagtggcccgcatggcgc

SEQ ID NO: 591955 - DNA, 75 bp, synthetic construct
  source 1..75: mol_type = other DNA
tttattcaggacgctgacacctatttgcgccagcaggcgattatccgccagcagataacgggcaaagtactgcaa

SEQ ID NO: 591956 - DNA, 75 bp, synthetic construct
  source 1..75: mol_type = other DNA
aacgccggaccaggtcggtattatcgcccgccagttgtatatcgagatgctcaaagggggttatacccaggtcgc

SEQ ID NO: 591957 - DNA, 75 bp, synthetic construct
  source 1..75: mol_type = other DNA
ctgtttgtaagttttacccccgcagcgagcaaatcagcgctaaaggcaatgcgtcgggaaatcaaagcgacaggg

SEQ ID NO: 591958 - DNA, 75 bp, synthetic construct
  source 1..75: mol_type = other DNA
aaactgattgacaccgggttctgtatttttgccctcagtaagctggcaatggcgttatccagtacgcttgattcc

SEQ ID NO: 591959 - DNA, 75 bp, synthetic construct
  source 1..75: mol_type = other DNA
tgcttattgcatctattatcggaaacatacttttagtttttttaaatattcaagtgttcaaccaaaaacactcct

SEQ ID NO: 591960 - DNA, 75 bp, synthetic construct
  source 1..75: mol_type = other DNA
aaaatccgttttttttgatgaggtctttccagtcatttatggtgtgttatctaaagagtatgatttcatatccga

SEQ ID NO: 591961 - DNA, 75 bp, synthetic construct
  source 1..75: mol_type = other DNA
agcgagacatctaactgttattctgcaagggttagggctacagcttaatgcttctaaaacttcacttactgaaga

SEQ ID NO: 591962 - DNA, 75 bp, synthetic construct
  source 1..75: mol_type = other DNA
cagatactggatttttgccatctgttactgcgggaagctcgcgcctcccgccctcctcatcagactcagccgccg

SEQ ID NO: 591963 - DNA, 75 bp, synthetic construct
  source 1..75: mol_type = other DNA
cggctggaaaagtctctacgcgctgatcatgctggcggggttatggctgtttctgccaaaacgaaaaacgccgga

SEQ ID NO: 591964 - DNA, 75 bp, synthetic construct
  source 1..75: mol_type = other DNA
agcagcaatggcgctttatattgacatcagcgccattgcaggacaggtaagagttatcagagcggtaactaagcg

SEQ ID NO: 591965 - DNA, 75 bp, synthetic construct
  source 1..75: mol_type = other DNA
cggccattgatggcctgaaggagaatctacgtaacggcgagcatgtgaaaatcatgctgcatctggccgaaggga

SEQ ID NO: 591966 - DNA, 75 bp, synthetic construct
  source 1..75: mol_type = other DNA
acggactgatactcaacgacaacggcgggcggagcattcactttgagccgctgctgccgggggaggcggtgtaca

SEQ ID NO: 591967 - DNA, 75 bp, synthetic construct
  source 1..75: mol_type = other DNA
gtgttgcttagagatttggggacttccgctgctattattcaacggcgaaatttaacggaaggtgtaaaaaatacc

SEQ ID NO: 591968 - DNA, 75 bp, synthetic construct
  source 1..75: mol_type = other DNA
ggcgccgttgtttatttattagcctctctcactctttccgcaactcttagaaaatttgtgctatcaaagattaaa

SEQ ID NO: 591969 - DNA, 75 bp, synthetic construct
  source 1..75: mol_type = other DNA
ttcgggctctagtgtgatatccagtatctatcatcagccgaaattaactttagtattgatgttgcttagttttac

SEQ ID NO: 591970 - DNA, 75 bp, synthetic construct
  source 1..75: mol_type = other DNA
gtcggattatctggaagcatgccgagaatcttatgcaccgccttatacaattggtaaaaataagtttatcccata

SEQ ID NO: 591971 - DNA, 75 bp, synthetic construct
  source 1..75: mol_type = other DNA
agtctcaattcaagaaaatctccattatagaagtttcatcatctacagtttctgtgatcgtcgctattgtattgg

SEQ ID NO: 591972 - DNA, 75 bp, synthetic construct
  source 1..75: mol_type = other DNA
actctattacgggacttgggaacttccgctgcaataatacagagaaaagagttaaccccaaatttggttaacacc

SEQ ID NO: 591973 - DNA, 75 bp, synthetic construct
  source 1..75: mol_type = other DNA
atcgaaatagaaagaaaaaatatggtaagattgcttgatgaacgtattgataaagtttacggttcattgctagga

SEQ ID NO: 591974 - DNA, 75 bp, synthetic construct
  source 1..75: mol_type = other DNA
gcctttcgtgcgttacttgcctctgatagcgaacgttttctgccctccgcctggcagcgattcattcagcaatta

SEQ ID NO: 591975 - DNA, 75 bp, synthetic construct
  source 1..75: mol_type = other DNA
ctcagcctgcccgcagacaccggctacccggacccgcgcggggaactggacccggaagccgaccccggcctgctg

SEQ ID NO: 591976 - DNA, 75 bp, synthetic construct
  source 1..75: mol_type = other DNA
gaactggacccggaagccgcccccggcctgctgtatgcgggacagtggcaggatacggaatccgggctgtgctat

SEQ ID NO: 591977 - DNA, 75 bp, synthetic construct
  source 1..75: mol_type = other DNA
gcccggtcgtggcgggaagctgaacctgataatgaagatgcgcgttattatgaatacgcgcaacgcgtctattgt

SEQ ID NO: 591978 - DNA, 75 bp, synthetic construct
  source 1..75: mol_type = other DNA
aagcattaattattcgtcgattattaattcaggcggcgaattttaccgagaagcaaactgttgaaccggagccgc

SEQ ID NO: 591979 - DNA, 75 bp, synthetic construct
  source 1..75: mol_type = other DNA
ggctgtctgggcatcattaaaattattttctatatttttatctttgctggtttgatagggaaaatactccatctg

SEQ ID NO: 591980 - DNA, 75 bp, synthetic construct
  source 1..75: mol_type = other DNA
gccggaaacacgcagtatgactatgacgccgcaggccggatggtcagccgcaccagacaccgtgacggctaccga

SEQ ID NO: 591981 - DNA, 75 bp, synthetic construct
  source 1..75: mol_type = other DNA
cggcctgctgtatgcgggacagtggcaggatacggaatccgggctgtgctataaccggttccggtattacgagcc

SEQ ID NO: 591982 - DNA, 75 bp, synthetic construct
  source 1..75: mol_type = other DNA
accgtctggcgaccggggcagaccagcctgtgggggctggcactcagcctgcccgcagacaccggctacccggac

SEQ ID NO: 591983 - DNA, 75 bp, synthetic construct
  source 1..75: mol_type = other DNA
ttgcggaaatccgggaataccgcgatgataaactgtacagcgtacggcacctggtgtttaacggctttgagctga

SEQ ID NO: 591984 - DNA, 75 bp, synthetic construct
  source 1..75: mol_type = other DNA
acccgcgcggggaactggacccggaagccgaccccggcctgctgtatgcaggacagtggcaggatgcggaatccg

SEQ ID NO: 591985 - DNA, 75 bp, synthetic construct
  source 1..75: mol_type = other DNA
agttcagggcttagcggcatcccggcgtttgtcggtctggcgttgctttcctctttcttatgcatgtttatcgcc

SEQ ID NO: 591986 - DNA, 75 bp, synthetic construct
  source 1..75: mol_type = other DNA
cggcagaatccgcggcaacgcgcgccgagactgcggcaaaacgggcggaggatattgcgtctgccgtggcgcttg

SEQ ID NO: 591987 - DNA, 75 bp, synthetic construct
  source 1..75: mol_type = other DNA
tctgcaccctgaacgaaaccagctcagtgatcaaaaaacgccaggagatcggccggggcttgcgtatctgtgtaa

SEQ ID NO: 591988 - DNA, 75 bp, synthetic construct
  source 1..75: mol_type = other DNA
ttacaaccccgactgggcggtgctgatcgaaaaggacggaaaagaaaagctctatttcgttgtcgaaaccaaaag

SEQ ID NO: 591989 - DNA, 75 bp, synthetic construct
  source 1..75: mol_type = other DNA
cgccatcccgaccgaggcgctacgccagttgatgtcgtgggattggccgggcaacgtgcgcgagctggaaaacgt

SEQ ID NO: 591990 - DNA, 75 bp, synthetic construct
  source 1..75: mol_type = other DNA
tttacatctaaatgtccgacaaagccgtttactgccgacgctaaatgaagattcagcgcttcgcagttcaatggc

SEQ ID NO: 591991 - DNA, 75 bp, synthetic construct
  source 1..75: mol_type = other DNA
ctgcaaaggttatcgactcggcaacgaagaagcgctggcgggggaacacgcggcacatttgcttctaattctgga

SEQ ID NO: 591992 - DNA, 75 bp, synthetic construct
  source 1..75: mol_type = other DNA
ggttatgagagattagtttctacacctgaacgaatggaagcacaagctaaattaccagagctggctaaagagtct

SEQ ID NO: 591993 - DNA, 75 bp, synthetic construct
  source 1..75: mol_type = other DNA
gaacaactcactaacggatattttcaaaggttctgaagatggtttacaggacttcacaagaagcttgaccaatct

SEQ ID NO: 591994 - DNA, 75 bp, synthetic construct
  source 1..75: mol_type = other DNA
gtcaggtgatgtctgaggagttgaaggggcaattatctgaagctttaccgggtgctactcaggcatttgcaaagg

SEQ ID NO: 591995 - DNA, 75 bp, synthetic construct
  source 1..75: mol_type = other DNA
ccaatctggattatcagcgtgatgcgattgagtcagtaacgggcgtattcgccggccaggaaatctgccagacca

SEQ ID NO: 591996 - DNA, 75 bp, synthetic construct
  source 1..75: mol_type = other DNA
acaatacagctgaaaaatggcctagctccttcggagacttttgactccaaagacggtattcacttaacggtggag

SEQ ID NO: 591997 - DNA, 75 bp, synthetic construct
  source 1..75: mol_type = other DNA
atggcaactggtattaataaatcagaaaaattatcaatcgattcattgctggcagattcagctaaaagtgaacca

SEQ ID NO: 591998 - DNA, 75 bp, synthetic construct
  source 1..75: mol_type = other DNA
ccttaactatatccagtattcagattacgttcacctgctgcatttcgtcagcagtattggtgagtataaaatata

SEQ ID NO: 591999 - DNA, 75 bp, synthetic construct
  source 1..75: mol_type = other DNA
ttaatcatgaacttaacctgaagtttgacatactaccacgccacatcaggtattgggcttcgcatttgcactaca

SEQ ID NO: 592000 - DNA, 75 bp, synthetic construct
  source 1..75: mol_type = other DNA
cccggacgcgcaggatctaatggatgaaacgtcgttgagtttgcagcagcagatgaagcctggcggtgccttata

SEQ ID NO: 592001 - DNA, 75 bp, synthetic construct
  source 1..75: mol_type = other DNA
gactgggagtgcggtatctgcgaagtacctgccaatcagattgtaccgctggcggatgcgcttcattgcgatcca

SEQ ID NO: 592002 - DNA, 75 bp, synthetic construct
  source 1..75: mol_type = other DNA
cctataaacatgggtattcttatccggaaagtacaaaaaactttatcaaagataaaaaatatccctatggcaact

SEQ ID NO: 592003 - DNA, 75 bp, synthetic construct
  source 1..75: mol_type = other DNA
gccgctgttgtaaattcagttaagaaatatggtttgttgttgatttatgcaattgctaacaccccggcaagaatt

SEQ ID NO: 592004 - DNA, 75 bp, synthetic construct
  source 1..75: mol_type = other DNA
tgcgccaatgagtgtcactcaagctgataattttcttgaaactataaataaatattatggcacaaagccgacgaa

SEQ ID NO: 592005 - DNA, 75 bp, synthetic construct
  source 1..75: mol_type = other DNA
cacgcacgcgctgtcaaaccgttactgcgctgctgtcttcagctatctcgccgaagatctggcagaactgcaaag

SEQ ID NO: 592006 - DNA, 75 bp, synthetic construct
  source 1..75: mol_type = other DNA
cccgcgctgagcgtcttcacatccgcactgaaatcaaccgcagactccatcgggctgcatctgtcaccttcatca

SEQ ID NO: 592007 - DNA, 75 bp, synthetic construct
  source 1..75: mol_type = other DNA
caggcgttattgtctgccatctttgaggtgaacaccgcactgaccggtgtgaaatcccgctacgtagtgcaggga

SEQ ID NO: 592008 - DNA, 75 bp, synthetic construct
  source 1..75: mol_type = other DNA
cgatgaagacatcataatccagtgggagagcggagagtatgaaccaaccatcagtatgcttatcccgctggcaaa

SEQ ID NO: 592009 - DNA, 75 bp, synthetic construct
  source 1..75: mol_type = other DNA
atatctagaaagctatcgtcagcaatgcttttacagaacaaaaattctgcaatcaacaaccgtcttcgcacccaa

SEQ ID NO: 592010 - DNA, 75 bp, synthetic construct
  source 1..75: mol_type = other DNA
atggcaaaccgcaaacaacagcgcgcatacgctgcacgtcgtcacatccagactgaaatcgatcgcagactcacc

SEQ ID NO: 592011 - DNA, 75 bp, synthetic construct
  source 1..75: mol_type = other DNA
tacgatgggtcttgaagggtcagaagagttatttaaaaaccttacaggttatgctcgtttaatgggtcgttcaga

SEQ ID NO: 592012 - DNA, 75 bp, synthetic construct
  source 1..75: mol_type = other DNA
gtcgcgttacagaaccagactgttgaatattacttcgcgctggaacgttgctgccgttaccatcctgactatgtc

SEQ ID NO: 592013 - DNA, 75 bp, synthetic construct
  source 1..75: mol_type = other DNA
acgaaagtaaaactcgagccggaggatgaagatgtcgatgagccaacacctgaaaaccatgaagaaaaaaatgat

SEQ ID NO: 592014 - DNA, 75 bp, synthetic construct
  source 1..75: mol_type = other DNA
tatttcgcgttattagtgatggttatcgaagcgcggagcatggtagatgcgcaaggtcaaccgctgaaatatgtt

SEQ ID NO: 592015 - DNA, 75 bp, synthetic construct
  source 1..75: mol_type = other DNA
taagaccatatctgaaaaatctaaatccactccaacttgccgctgattgcattgaaacagtaaataaaataaaag

SEQ ID NO: 592016 - DNA, 75 bp, synthetic construct
  source 1..75: mol_type = other DNA
gaggtacaaaatagatgctggactttccgaatcctatacatgctatttattaagtaagggaaagatcataagacc

SEQ ID NO: 592017 - DNA, 75 bp, synthetic construct
  source 1..75: mol_type = other DNA
ataaattgttgggtattctactgttgattatttgtgctgtcatcgctgatgcagaaggttgggaagatatagagt

SEQ ID NO: 592018 - DNA, 75 bp, synthetic construct
  source 1..75: mol_type = other DNA
agcctgaaggtgtttgactgtaatggtaacccgtgggacaaagacaatttaccgacgctgctcaaagccgtcgag

SEQ ID NO: 592019 - DNA, 75 bp, synthetic construct
  source 1..75: mol_type = other DNA
aaattcagctggggtgatgccccctggcagatcgttgaccttagtatcgcgggcaaagtgaacatacaggtggac

SEQ ID NO: 592020 - DNA, 75 bp, synthetic construct
  source 1..75: mol_type = other DNA
atggccagcattaaagacatccgcccattcgcccccggcattcccccatcttccgttaacccaggcgtacgacgc

SEQ ID NO: 592021 - DNA, 75 bp, synthetic construct
  source 1..75: mol_type = other DNA
atgctcgatcttagcaaccttggactgacttcactccctgaaaatttgcctccacatctgattgaatttaactgc

SEQ ID NO: 592022 - DNA, 75 bp, synthetic construct
  source 1..75: mol_type = other DNA
tttgcctccacatctgattgaattttactgcagtaaaaacgtgttgaccgcgttaccgaaggtgatgccaaagtg

SEQ ID NO: 592023 - DNA, 75 bp, synthetic construct
  source 1..75: mol_type = other DNA
tggcagcctgagttcacagataaaacactctccaggaaaaccggggcggttcagaccgctttaccggaggtaatg

SEQ ID NO: 592024 - DNA, 75 bp, synthetic construct
  source 1..75: mol_type = other DNA
cctgcgccgggaagcctgtattttcaacgttttggcggtttgaatattgaacaggaggcgatatgccaatttacc

SEQ ID NO: 592025 - DNA, 75 bp, synthetic construct
  source 1..75: mol_type = other DNA
gaatccgaaaactgcgcgcagccaggtcattggcgcaatgactatgggcatgggcgcggcactgatggaggagct

SEQ ID NO: 592026 - DNA, 75 bp, synthetic construct
  source 1..75: mol_type = other DNA
catttgtaacttcgcgtttttttctgggctaattgacgctcaattctgggtggggagcgcgcagccaaaaagccc

SEQ ID NO: 592027 - DNA, 75 bp, synthetic construct
  source 1..75: mol_type = other DNA
aacggcggtacagcaaagcgaattactctacgccggggcaaatcgtcataccggcctgcggctcgccacgcttga

SEQ ID NO: 592028 - DNA, 75 bp, synthetic construct
  source 1..75: mol_type = other DNA
acttccagcatccagaattaaacaacattaatcaagattcagcattaacgagtgcagatatccaaagcctgagag

SEQ ID NO: 592029 - DNA, 75 bp, synthetic construct
  source 1..75: mol_type = other DNA
tgagaagcgacgccctgcgggcgcccctcgccccccgagcgggaaaacgcccgtttaaagtgatccccccccgcc

SEQ ID NO: 592030 - DNA, 75 bp, synthetic construct
  source 1..75: mol_type = other DNA
aataacaccacgcaccgccccgccacccttcagcacttgcgtatcggtgccgaccagagcgggaaaatcaccgct

SEQ ID NO: 592031 - DNA, 75 bp, synthetic construct
  source 1..75: mol_type = other DNA
tgcgttgcgtaaggagctggaatactgggaaaaacgttgggatgccgtaaaccatcgtagcggaacattcaaact

SEQ ID NO: 592032 - DNA, 75 bp, synthetic construct
  source 1..75: mol_type = other DNA
taaccttaaggattcggtttctcagggggcgggttccctgacgtttcgtgataattacacagtaacaacctctaa

SEQ ID NO: 592033 - DNA, 72 bp, synthetic construct
  source 1..72: mol_type = other DNA
gagactgtttttttgatcgttttcacaaaaatggaagtccacagtcttgacagggaaaatgcagcggcgtag

SEQ ID NO: 592034 - DNA, 75 bp, synthetic construct
  source 1..75: mol_type = other DNA
atggagccgctttaaaagtaacgacttacgatttgacggtgagcggtacgaatagtgaaggggcattctccatcc

SEQ ID NO: 592035 - DNA, 75 bp, synthetic construct
  source 1..75: mol_type = other DNA
ttatgtggggcaggctaataatacaaccattaacgggggcagacagacaattcatgacgggggtatttccacagg

SEQ ID NO: 592036 - DNA, 75 bp, synthetic construct
  source 1..75: mol_type = other DNA
tattcagggcgtggaaaccgaactgaaaattccgttcaacgatgaatggaaactgtcactcaactacacctacaa

SEQ ID NO: 592037 - DNA, 75 bp, synthetic construct
  source 1..75: mol_type = other DNA
gagccgaacggcacctgatgcagaaaactatccataaaacaaatgacaaaaaccatgcccggcggctcaccgcaa

SEQ ID NO: 592038 - DNA, 75 bp, synthetic construct
  source 1..75: mol_type = other DNA
tgtagccctcaacaacgagaaaatgaccctgacatgggagcgccttaccgccacgggtagccctgtttccaaatc

SEQ ID NO: 592039 - DNA, 75 bp, synthetic construct
  source 1..75: mol_type = other DNA
caataacagaaatcgaaattgcctacggtggagaggcatacgcagataatcagatcgacgcgaaaacattaggcg

SEQ ID NO: 592040 - DNA, 75 bp, synthetic construct
  source 1..75: mol_type = other DNA
aaaagctcgttacaaactctacgatccgcaatgaaatgagtaaattggtacacactcctctgcaaactgaaaaaa

SEQ ID NO: 592041 - DNA, 75 bp, synthetic construct
  source 1..75: mol_type = other DNA
gcgacacggtccgccatctgcccgaatcttttgaaatcccctggaacccgaacacccgtaccgaggtgagcaccc

SEQ ID NO: 592042 - DNA, 75 bp, synthetic construct
  source 1..75: mol_type = other DNA
gcgaattatcaatttaatatattttttagtaatgctttcgagactgatgttaaaaaatatcttggcaaatcagaa

SEQ ID NO: 592043 - DNA, 75 bp, synthetic construct
  source 1..75: mol_type = other DNA
aatgatgagttgctagcggaaaatattccatcagcgaattatcaatttaatatattttttagtaatgctttcgag

SEQ ID NO: 592044 - DNA, 75 bp, synthetic construct
  source 1..75: mol_type = other DNA
gaaatacctgatgcagaccggcggcctggattatcaaaaaatcgtacgcctcgaaaatccgtgctgggatgccag

SEQ ID NO: 592045 - DNA, 75 bp, synthetic construct
  source 1..75: mol_type = other DNA
gatgacattgaagtttttattgataaaattaacgaatgtgaggttgtaatttcatcgtcacttcatggattaatt

SEQ ID NO: 592046 - DNA, 75 bp, synthetic construct
  source 1..75: mol_type = other DNA
gcgctggggtgtcaccccctaaaaggtgaacgtaaaggtgagttttccgtagaggttaacggaaactggagggtg

SEQ ID NO: 592047 - DNA, 75 bp, synthetic construct
  source 1..75: mol_type = other DNA
gacgaggtgaaattgctgccattcgtaaagagcagttccgtaaagatgaggagacggggcgttattacattttta

SEQ ID NO: 592048 - DNA, 75 bp, synthetic construct
  source 1..75: mol_type = other DNA
ataatcgaatggctcaaagggcgtaaaatcagctccattgtcgtcgatgaacaaaaagatacagcagaaatcgaa

SEQ ID NO: 592049 - DNA, 75 bp, synthetic construct
  source 1..75: mol_type = other DNA
tccccagcggcactagattaggtgccgctcccatttccagctcagaagatgagcctccttcatctgaagtatcca

SEQ ID NO: 592050 - DNA, 75 bp, synthetic construct
  source 1..75: mol_type = other DNA
aaaaacagaagttacgctgcgtgccaggctctctgttgtgctgtttttaatgagtgcggttgtgattgtattgtt

SEQ ID NO: 592051 - DNA, 75 bp, synthetic construct
  source 1..75: mol_type = other DNA
attcttattattctttctgttgtattagctgcagcatcattacaggcagcagggggactggatttactggttaaa

SEQ ID NO: 592052 - DNA, 75 bp, synthetic construct
  source 1..75: mol_type = other DNA
ggtgtttatcagtatggtcctgctgaacacttcacccacattatatctgacaaaccttccccaaaagataaatat

SEQ ID NO: 592053 - DNA, 75 bp, synthetic construct
  source 1..75: mol_type = other DNA
tcgaaaacattatttctgatatttttaaagagaccagattaaaaataagtaaggacgatcctgttttaagcataa

SEQ ID NO: 592054 - DNA, 75 bp, synthetic construct
  source 1..75: mol_type = other DNA
gattaacgacgagagcgtaaaggtatatcgctggcgccgcgcagtttacagcatctcgcgggcccttctgatcga

SEQ ID NO: 592055 - DNA, 75 bp, synthetic construct
  source 1..75: mol_type = other DNA
ggattggtggtggattagatatacataaaaatgcaactgtcacatggaaagttaatggacagaaaaatgataatt

SEQ ID NO: 592056 - DNA, 75 bp, synthetic construct
  source 1..75: mol_type = other DNA
ggtaataaattcgatgagaaaagatatacacaatttataagaattggttcaggttcacaaataattacagaaagc

SEQ ID NO: 592057 - DNA, 75 bp, synthetic construct
  source 1..75: mol_type = other DNA
attattgcattttaaaaatgactttattacacaaagagaaatgcttaaaaatggattgattgataagtttgagtt

SEQ ID NO: 592058 - DNA, 75 bp, synthetic construct
  source 1..75: mol_type = other DNA
gccgtttatctgctatatcttcacctttatgtccggcaccggccacgtggtatatagcctgctgccggtgatctc

SEQ ID NO: 592059 - DNA, 75 bp, synthetic construct
  source 1..75: mol_type = other DNA
tccttatcgccctgatgtttggcgctcgtatcggcggcgtatttttaggtatggttggcggtcttggcgtcggcg

SEQ ID NO: 592060 - DNA, 75 bp, synthetic construct
  source 1..75: mol_type = other DNA
ttcctgcaaatcgcaaaattaaaggccgcgcccttacacgcatcgatcaagaacagaaaatgatcaattctggtc

SEQ ID NO: 592061 - DNA, 75 bp, synthetic construct
  source 1..75: mol_type = other DNA
attgttagcgtcatgggcgatgatgcctgggcgctgatcaaccagctggtttccgcagatgtctccatcattcgt

SEQ ID NO: 592062 - DNA, 75 bp, synthetic construct
  source 1..75: mol_type = other DNA
aaggtattctggacacgcggttgtcagagctggaaaaaaatggcggggcagcccttgccgttcttgatgcacaac

SEQ ID NO: 592063 - DNA, 75 bp, synthetic construct
  source 1..75: mol_type = other DNA
cagcgggaacgctgggctgacttacagaataagcatcttgaacggtatcagcatatcgaccgcgttgatgcgcgt

SEQ ID NO: 592064 - DNA, 75 bp, synthetic construct
  source 1..75: mol_type = other DNA
tgggatgaagggatcaacgcgctattactgggatattcatttagcggggctaacagtattcatagcagcgcagac

SEQ ID NO: 592065 - DNA, 75 bp, synthetic construct
  source 1..75: mol_type = other DNA
tgaatctgccgaaaacgagccagaacaattgggatttattgaggttgaagagtgtgttgaggttaatgatgaatt

SEQ ID NO: 592066 - DNA, 75 bp, synthetic construct
  source 1..75: mol_type = other DNA
ccagatgatggctgtgtttccggccacaggcattgccaccagagaaggtggaaatctaacgcttaataaagagtc

SEQ ID NO: 592067 - DNA, 75 bp, synthetic construct
  source 1..75: mol_type = other DNA
caaaacaccagaaggcacaatcaaagcgtgcgccgaccaaacctcgcttcacgctggagggtaaggatgaatcgt

SEQ ID NO: 592068 - DNA, 75 bp, synthetic construct
  source 1..75: mol_type = other DNA
tttcaggagtgcttataatgttgagaaatattttcagatagctctgaatgaagagattctaatagatataaataa

SEQ ID NO: 592069 - DNA, 75 bp, synthetic construct
  source 1..75: mol_type = other DNA
gcaggtggtattggtggtggaatgagcacacatgatatgaatgcgcaagggaaaccggcatttatgagtagtgat

SEQ ID NO: 592070 - DNA, 75 bp, synthetic construct
  source 1..75: mol_type = other DNA
ttatttcaactgagtttataataatggcgagattttactttttgattaagaaaacaaataaattaaataatttaa

SEQ ID NO: 592071 - DNA, 75 bp, synthetic construct
  source 1..75: mol_type = other DNA
atgatggtattgaacgcgatccgcagcagttttttaaacgtgccaacagcaaatcaccagagcgggggggcgcaa

SEQ ID NO: 592072 - DNA, 75 bp, synthetic construct
  source 1..75: mol_type = other DNA
acgtgaccgatcccgaaacgtttaatgctctgttactcaacgggcttgccagcctgttacatcaccgtgaagccg

SEQ ID NO: 592073 - DNA, 75 bp, synthetic construct
  source 1..75: mol_type = other DNA
caggtttaaagtgggatattatatcaaattggattgaaaaatctgaagagcccattattatggcgtatgatataa

SEQ ID NO: 592074 - DNA, 75 bp, synthetic construct
  source 1..75: mol_type = other DNA
taaagccacaatttcaacaagtgttatcattaggtaatgataaattagtttacataagcaaaggaaaatcggagg

SEQ ID NO: 592075 - DNA, 75 bp, synthetic construct
  source 1..75: mol_type = other DNA
cgccggagctggagaaccgcacccaggaaattgctgaaatttcccgttccctgaaagcgctggggaaggagctgg

SEQ ID NO: 592076 - DNA, 75 bp, synthetic construct
  source 1..75: mol_type = other DNA
acttcttcattacaggcgttatcagagagtgtgcaatttgcagtgcgctgcgatgaactcattcttgacgatcgt

SEQ ID NO: 592077 - DNA, 75 bp, synthetic construct
  source 1..75: mol_type = other DNA
taaatctggcctgaccgttaacgccgacaaagagaagtcagagcagcgcgctgcggtgaaagccaagttcggcat

SEQ ID NO: 592078 - DNA, 75 bp, synthetic construct
  source 1..75: mol_type = other DNA
attgccctgaccctgctggaaaaggattacgcctggtctgatatcagcggctacgaaattcaaactgcccacgga

SEQ ID NO: 592079 - DNA, 75 bp, synthetic construct
  source 1..75: mol_type = other DNA
ctaatatggtaagattcatcacctctgctgaagaggcattaattgaaatattaaacactattatgctagagcgaa

SEQ ID NO: 592080 - DNA, 75 bp, synthetic construct
  source 1..75: mol_type = other DNA
gcaggtgcccatcagaagggtggcaaacctttctccccggattcttttgttgtcgttgaggtgggcgcggaggct

SEQ ID NO: 592081 - DNA, 75 bp, synthetic construct
  source 1..75: mol_type = other DNA
atttaagtctgtcaccaacaaatcatcaggacagaataaaccttatcatcgcatttatggatgagcttattttcc

SEQ ID NO: 592082 - DNA, 75 bp, synthetic construct
  source 1..75: mol_type = other DNA
acactccacaacatggatgatattgagctaaaatacatgtgtggctatatcaatgaaagcctgcatgacggtatt

SEQ ID NO: 592083 - DNA, 75 bp, synthetic construct
  source 1..75: mol_type = other DNA
acagtggattgtggtttgttgccgcgctgctggtgattggtgcggggattatctgggcgattccaatgcagtcct

SEQ ID NO: 592084 - DNA, 75 bp, synthetic construct
  source 1..75: mol_type = other DNA
tttccatgtcgggtaatttttatctgaatcaggcccagaacgccctgcgtgatgcctatgacaatgacacggtgt

SEQ ID NO: 592085 - DNA, 75 bp, synthetic construct
  source 1..75: mol_type = other DNA
actgcggtatttcagaccgtaatgaatacaggagaggtgtcagtgggaagtacggataagtcgtctcccacggac

SEQ ID NO: 592086 - DNA, 75 bp, synthetic construct
  source 1..75: mol_type = other DNA
acagtacgtctgaaacgctcgccgcaacgccgaaagcggtaaaggccgcatatgaccttgctaacgggaaatata

SEQ ID NO: 592087 - DNA, 75 bp, synthetic construct
  source 1..75: mol_type = other DNA
tagcgttacgaatctaagggctatgattggcagctatcgcaagcaatacactggtattagtataatatacccata

SEQ ID NO: 592088 - DNA, 75 bp, synthetic construct
  source 1..75: mol_type = other DNA
acgaaaaccgtatcgctctggacattagcggaatcgaaaatgatgtagaaatgaaatctaccagtgcaattgccg

SEQ ID NO: 592089 - DNA, 75 bp, synthetic construct
  source 1..75: mol_type = other DNA
atgagagatgtatctaatggagtttattttgataagctgattcttgttgaggatgttttagctaaagcttatgtt

SEQ ID NO: 592090 - DNA, 75 bp, synthetic construct
  source 1..75: mol_type = other DNA
gagtgttgcttttcaatatttttaaattattattagtatcaacttttttattatcagatatagtatatgcaaatg

SEQ ID NO: 592091 - DNA, 75 bp, synthetic construct
  source 1..75: mol_type = other DNA
ttacaaaaaggcactagccgatttacaatccttattagttaatctgcataacattatgcctggtgatgatgtaaa

SEQ ID NO: 592092 - DNA, 75 bp, synthetic construct
  source 1..75: mol_type = other DNA
atgacagcacagatagcagcttacgggcggctggtggagacagacaaggaacggcatcaggttacgatgcgacgg

SEQ ID NO: 592093 - DNA, 75 bp, synthetic construct
  source 1..75: mol_type = other DNA
ggcaggggttcaggcaccacgctggagaaccattttgcggtgatcccggcagacagaacatggcgaccacagccg

SEQ ID NO: 592094 - DNA, 75 bp, synthetic construct
  source 1..75: mol_type = other DNA
gttatcggtgacgttacgggcaatattcctcgtggttggctggaaacaccgaaacgtatggctgagcgaggagta

SEQ ID NO: 592095 - DNA, 75 bp, synthetic construct
  source 1..75: mol_type = other DNA
atcagtgtaaagaatctattgagtatgattctgatagtcatcaaattatagacatttatgtaatgcctcccaata

SEQ ID NO: 592096 - DNA, 75 bp, synthetic construct
  source 1..75: mol_type = other DNA
gattattgctatattgggcaatattcttttatcggatccaacacaaagattggaaattttgctatattttcagat

SEQ ID NO: 592097 - DNA, 75 bp, synthetic construct
  source 1..75: mol_type = other DNA
cgtcatcactctcatctttgctggctatgtatattcgaactggcaaaaagagaaatatagggatgacgcatacac

SEQ ID NO: 592098 - DNA, 75 bp, synthetic construct
  source 1..75: mol_type = other DNA
aataattcacttaaatcaaaagaatacttaacatttggtcttccaatagtgaaatctcatcgagatcattctatt

SEQ ID NO: 592099 - DNA, 75 bp, synthetic construct
  source 1..75: mol_type = other DNA
aaatgttgttgctcatgctgataacttatcaccccgggtaaatattggtctgtctgagtattccggaaaccgaat

SEQ ID NO: 592100 - DNA, 75 bp, synthetic construct
  source 1..75: mol_type = other DNA
ccaataaatttcttgagatagatagtaccactcttgctggatatgattttagcgggatgaatctacatcgtgcca

SEQ ID NO: 592101 - DNA, 75 bp, synthetic construct
  source 1..75: mol_type = other DNA
cggcgtgaaaccggatgagattgtcgccatcggtgaaaaactgtacgccgccggattccgcctgattgagattcc

SEQ ID NO: 592102 - DNA, 75 bp, synthetic construct
  source 1..75: mol_type = other DNA
agaaagattccagtacttagggaaggtatcaaatgaaaaactaaatatattatataattcggcttattgcttaat

SEQ ID NO: 592103 - DNA, 75 bp, synthetic construct
  source 1..75: mol_type = other DNA
cctggcgtgatggcctgtaccggaacgcgccgaacaaagagagcgccgacgaggaatacggctgtattcccaaaa

SEQ ID NO: 592104 - DNA, 75 bp, synthetic construct
  source 1..75: mol_type = other DNA
ccagcgcgggatatcccgattctgcgttttgaagccccggacgattttgaatcgctgacaccacaaatgcgccac

SEQ ID NO: 592105 - DNA, 75 bp, synthetic construct
  source 1..75: mol_type = other DNA
tgaaaattttaaagcaatagataatcatgggaaagatataataaatggaaaaggattgtctaatgtttgcaaaat

SEQ ID NO: 592106 - DNA, 75 bp, synthetic construct
  source 1..75: mol_type = other DNA
tttgaaaatacatccgacaatcatgataaaactatgggtgatatgaatactctattattccgtataaatattact

SEQ ID NO: 592107 - DNA, 75 bp, synthetic construct
  source 1..75: mol_type = other DNA
ttcagcttgtatcgacagtatataatttaaatcgacagtgttttagctctatggatatgatgggtgattttacat

SEQ ID NO: 592108 - DNA, 75 bp, synthetic construct
  source 1..75: mol_type = other DNA
ttacgaacggaaataaaacaaaaaggcttcaatatgcaaaaaaaatctataagatctatacagatttaaatataa

SEQ ID NO: 592109 - DNA, 75 bp, synthetic construct
  source 1..75: mol_type = other DNA
cacggtccacgatttcacatatgaattgtatatgaaaggacttcggcgcaatgttcatagcttacaaaaaagatg

SEQ ID NO: 592110 - DNA, 75 bp, synthetic construct
  source 1..75: mol_type = other DNA
ttttgatttgtgtttccaacaacacagcaaaggatttaatggaatattgtggtgttgatgaaaaaaaaataagag

SEQ ID NO: 592111 - DNA, 75 bp, synthetic construct
  source 1..75: mol_type = other DNA
tatacgatctgcaaacgcatggaggagtatctgtctatttttctgaaatattaaaacgagcgatacaggatcctg

SEQ ID NO: 592112 - DNA, 75 bp, synthetic construct
  source 1..75: mol_type = other DNA
gtttgcaggaactggcagtgattctggggcgtgaagcagatatttcaggttcaaaagccgatcttgagcaacgcc

SEQ ID NO: 592113 - DNA, 75 bp, synthetic construct
  source 1..75: mol_type = other DNA
taccttgaaatgcatggtctcgtttctacacccttcgtacgcagcgataccatggatggcgttgattttatcttc

SEQ ID NO: 592114 - DNA, 75 bp, synthetic construct
  source 1..75: mol_type = other DNA
ataaaagtaacatttgcagcagagctctttgatacacaaaacagtaataaaaaacaaaataaaaaaccatggaag

SEQ ID NO: 592115 - DNA, 75 bp, synthetic construct
  source 1..75: mol_type = other DNA
tcttctgcagagtgtgaaatttacctcaacacggattttgacttacattttttgaaaaatgaaatttgtgaggct

SEQ ID NO: 592116 - DNA, 75 bp, synthetic construct
  source 1..75: mol_type = other DNA
taccgttttaaccatgaagaagaatattacccttctcatcgttttatgcttgttgttgatatgaagacagtaatg

SEQ ID NO: 592117 - DNA, 75 bp, synthetic construct
  source 1..75: mol_type = other DNA
cagaccacgaatcggtaaaacctgaagggctgtttgatcggctgatccagttttctattcataacgcaatctggg

SEQ ID NO: 592118 - DNA, 75 bp, synthetic construct
  source 1..75: mol_type = other DNA
gatctaattattaacctgactcatgaacataggattttgctggatgataaaattcaacttgaagctgatctgaac

SEQ ID NO: 592119 - DNA, 75 bp, synthetic construct
  source 1..75: mol_type = other DNA
tctgcgtcaccgtgcccgcgaatgcggaatgcaccatccggaccattaaatatttcgaccgcccgttttctgccg

SEQ ID NO: 592120 - DNA, 75 bp, synthetic construct
  source 1..75: mol_type = other DNA
ttcttgttaatatatataaggcgcaaggaattaatatagcatattgcattagctatgttatgtattttttaataa

SEQ ID NO: 592121 - DNA, 75 bp, synthetic construct
  source 1..75: mol_type = other DNA
ggtgagaatgtgattatacggcagaacacgaccattggcgaaaaggaatctgacagcagagagaattatatagtt

SEQ ID NO: 592122 - DNA, 75 bp, synthetic construct
  source 1..75: mol_type = other DNA
tggccaatgagatgtttatctccggaaacaaaaaacaaaggaaatgtgcgataaagataaaaaatgcacttatgg

SEQ ID NO: 592123 - DNA, 75 bp, synthetic construct
  source 1..75: mol_type = other DNA
agaactggcaaaggatatcaggagcagaccatgtatcgaggaaagacgcaatgactggcagagatggatggcgtt

SEQ ID NO: 592124 - DNA, 75 bp, synthetic construct
  source 1..75: mol_type = other DNA
gaaaaaagaattatcacagatgatgtttcagaatgaccgtgaattcatttataatgtctctggttttgataattt

SEQ ID NO: 592125 - DNA, 75 bp, synthetic construct
  source 1..75: mol_type = other DNA
cggcatagaacttaaaccatatgatgtgatggataaggatgctatcaaagagcgcatggacatgtacgaggcttt

SEQ ID NO: 592126 - DNA, 75 bp, synthetic construct
  source 1..75: mol_type = other DNA
tacgctaccgctacgatgacgcgcacagtgagttaccggcgacgacaacggatgcgacgggcagcacccggcaga

SEQ ID NO: 592127 - DNA, 75 bp, synthetic construct
  source 1..75: mol_type = other DNA
ttattgaacttttcacatcgggttcaaccggacaaccaaaacaaattgcaaaacctgttatcagccttgatcaag

SEQ ID NO: 592128 - DNA, 75 bp, synthetic construct
  source 1..75: mol_type = other DNA
ctcacccggtagcatgaatttcatgctaccagcctaccgacgccaatacaagggactgagcattatttatccaca

SEQ ID NO: 592129 - DNA, 75 bp, synthetic construct
  source 1..75: mol_type = other DNA
acaagtcgcgacacaatccttcacctttgccgctatagcgccagaggcttatatcgagctgtttacctccggttc

SEQ ID NO: 592130 - DNA, 75 bp, synthetic construct
  source 1..75: mol_type = other DNA
aaagacctggctgagctttcctacaaatcggcgaaagaagcgctgcaagaaaagaaatttgggcaggtggccccg

SEQ ID NO: 592131 - DNA, 75 bp, synthetic construct
  source 1..75: mol_type = other DNA
aaagcgttcaaacacgccacggtttccgtcaactggcagcatcaacttagtgcttcagaaaataatgaagacgat

SEQ ID NO: 592132 - DNA, 75 bp, synthetic construct
  source 1..75: mol_type = other DNA
gacctgagcgcacgtcttgatcgcgatgtacgccttgataacgatgccaactgttttgccctttcagaagcctag

SEQ ID NO: 592133 - DNA, 75 bp, synthetic construct
  source 1..75: mol_type = other DNA
cccataaaccgtttattgtgttcatcaccgcgtggaaagaacatgcggtagaagcgtttgaactggaggcgtttg

SEQ ID NO: 592134 - DNA, 75 bp, synthetic construct
  source 1..75: mol_type = other DNA
aaattattccttatgcaggtggtactcacccggtagcaaaaggtgcccagttcgcgccggacgagtggatctatc

SEQ ID NO: 592135 - DNA, 75 bp, synthetic construct
  source 1..75: mol_type = other DNA
gaaaatgcttttttttccaaggttactgagaggaagttattgcattgtaggaatagctcctttcgatataatgat

SEQ ID NO: 592136 - DNA, 75 bp, synthetic construct
  source 1..75: mol_type = other DNA
ggagtgaccttttcaccgtggactatcaatgacactttcgccatcgcaaaaatggataacaatattgcaggtgtc

SEQ ID NO: 592137 - DNA, 75 bp, synthetic construct
  source 1..75: mol_type = other DNA
cctggcctatcagtattaccggtcaaaaaccgaccgaagggccgtttagcgcgctggggtatttacgcgtcgatt

SEQ ID NO: 592138 - DNA, 75 bp, synthetic construct
  source 1..75: mol_type = other DNA
tgagcatgcacggtatagttgccatggcataccacggtagcatcgaggctgaaggttttgagaacagcaatgctt

SEQ ID NO: 592139 - DNA, 75 bp, synthetic construct
  source 1..75: mol_type = other DNA
gaaggcaaaacgcagtatgcgtatgacaaatccggcaggctgacgggtatcttcagcccggacggcatatcacag

SEQ ID NO: 592140 - DNA, 75 bp, synthetic construct
  source 1..75: mol_type = other DNA
tttaaaggttattcgtccctttattaacatggtggagatccccagacaggtgatgtttaccgtgtatgtgacatc

SEQ ID NO: 592141 - DNA, 75 bp, synthetic construct
  source 1..75: mol_type = other DNA
atgagtctggttgatagtgtgatggatattcagttccccccgcaaaattatattcggatgggaacagatcctaac

SEQ ID NO: 592142 - DNA, 75 bp, synthetic construct
  source 1..75: mol_type = other DNA
gcggcagccaatgtcacacttcgcgcctggcctatcagtattaccggtcaaaaaccgaccgaagggccgtttagc

SEQ ID NO: 592143 - DNA, 75 bp, synthetic construct
  source 1..75: mol_type = other DNA
tgctaaagcaacgttatcatccctggtgcctgcggttaattccgctacctcttcgataccttcattgctgaagat

SEQ ID NO: 592144 - DNA, 75 bp, synthetic construct
  source 1..75: mol_type = other DNA
atcgctgaagattacggagaatatggtgcatccgggaggattcgaacctccgaccgctcggttcgtagccgagta

SEQ ID NO: 592145 - DNA, 75 bp, synthetic construct
  source 1..75: mol_type = other DNA
cactgcattacatgaacaaaaacttcgtctatcttttaatgataaaaaaccaatggatgatattggtgaactttc

SEQ ID NO: 592146 - DNA, 75 bp, synthetic construct
  source 1..75: mol_type = other DNA
aaatccctacgggcgatctggatacagccgtgaaatatggtgaacgcgtggcgacaattactgcgcgcttaaaat

SEQ ID NO: 592147 - DNA, 75 bp, synthetic construct
  source 1..75: mol_type = other DNA
gaaagtagtgaagggatacgactaaaaccatcagacacgattgtctccgacagactccatgaagcccaacacaat

SEQ ID NO: 592148 - DNA, 75 bp, synthetic construct
  source 1..75: mol_type = other DNA
gccagtactgggcagtgttacggtgaataacaatacgacaacgcaatccgttgaatatcgttccagcggtgtttt

SEQ ID NO: 592149 - DNA, 75 bp, synthetic construct
  source 1..75: mol_type = other DNA
atgtgcaggaaatatgcacatgttgtggacgccctgcaagggaatttcccgtatgcaacagacccggcaggaaac

SEQ ID NO: 592150 - DNA, 75 bp, synthetic construct
  source 1..75: mol_type = other DNA
tttctaatgccagtacaacacagccttatgattacgatttaagtgcgcggatgattatcgccgatggaagaacgg

SEQ ID NO: 592151 - DNA, 75 bp, synthetic construct
  source 1..75: mol_type = other DNA
gcgagtacgacatccgcctctttaaccgtaaacagtaacctgactatgggtacctgtagtgcgaagatactggat

SEQ ID NO: 592152 - DNA, 75 bp, synthetic construct
  source 1..75: mol_type = other DNA
gtttactgacgctagcgcagcaaccagaacggctgtggaagtatggactacagatacaccggaaagcaatggcag

SEQ ID NO: 592153 - DNA, 75 bp, synthetic construct
  source 1..75: mol_type = other DNA
atggtgcattagtgtcacgacaggtatttgaaatatctaaagtctgtcgaagacatataattaataactggttcc

SEQ ID NO: 592154 - DNA, 75 bp, synthetic construct
  source 1..75: mol_type = other DNA
agatttaagaattctggttattgaccttgatccgcaatcttcagcaacgatgtttttaagccataaacactctat

SEQ ID NO: 592155 - DNA, 75 bp, synthetic construct
  source 1..75: mol_type = other DNA
atgaaattaaaagtcatcgctacactgattgctactgttgccgtgggtgccagcgttagcaacaatctcacttat

SEQ ID NO: 592156 - DNA, 75 bp, synthetic construct
  source 1..75: mol_type = other DNA
atggtctttgcggcacactatccgctatgataggtccagataaatttgattctatagatagcaccgcatatgacg

SEQ ID NO: 592157 - DNA, 75 bp, synthetic construct
  source 1..75: mol_type = other DNA
atatctattaagaagcgcatcgattggtggtttaaacctcaaccctaacaattatattgttaggatggttgcatt

SEQ ID NO: 592158 - DNA, 75 bp, synthetic construct
  source 1..75: mol_type = other DNA
tctggcacgttatccacggaccttgcaagaggactgcgaaaagctgaacaaacgtaaagtggatctagttttcgc

SEQ ID NO: 592159 - DNA, 75 bp, synthetic construct
  source 1..75: mol_type = other DNA
tgaactcggtgcaaaaagcaaagtgcaacagtttaaaattcgctttagcaattgctctggccttccccaaaacag

SEQ ID NO: 592160 - DNA, 75 bp, synthetic construct
  source 1..75: mol_type = other DNA
cgtgagctggattatctggctgatcgcaaaatggttgatctggagaaaaaaccctccggcgactggtttgccgac

SEQ ID NO: 592161 - DNA, 75 bp, synthetic construct
  source 1..75: mol_type = other DNA
tcatggtgcagatagtcatggagaatattgggacgaaatattttcaggtaaagatgagaaaatagttaaaagtaa

SEQ ID NO: 592162 - DNA, 75 bp, synthetic construct
  source 1..75: mol_type = other DNA
aaccattaaactggatgttggttatggtaaatcaggttctgtcggagtaaacactggtagtgttaaatccagtat

SEQ ID NO: 592163 - DNA, 75 bp, synthetic construct
  source 1..75: mol_type = other DNA
cgttgggcggactgctgtgtctgtttgatcctcgctatcgtaagcgcgtgagtccgcaaaaaactgcgccggagg

SEQ ID NO: 592164 - DNA, 75 bp, synthetic construct
  source 1..75: mol_type = other DNA
tgcctgatgcgacgctcgcgcgtcttatcaggccgcctctcatctgtataaatttcgaactacacttaactggct

SEQ ID NO: 592165 - DNA, 75 bp, synthetic construct
  source 1..75: mol_type = other DNA
ctccgtaggccggataaggcgtttacgccgcatccggcaacagtgccgactgcctgatgcgacgctcgcgcgtct

SEQ ID NO: 592166 - DNA, 75 bp, synthetic construct
  source 1..75: mol_type = other DNA
caattttcagaatcgaaccaaatttgatcaaagctatcgcacttgttgaaagtaatttaaaaaatgatagcatcg

SEQ ID NO: 592167 - DNA, 75 bp, synthetic construct
  source 1..75: mol_type = other DNA
gttggggcattcttcacctgaatctacccgacattatgtcgaaattacaccgacgaggttggtaatgactccaac

SEQ ID NO: 592168 - DNA, 75 bp, synthetic construct
  source 1..75: mol_type = other DNA
cgtatctgtctgatagatgtacccgttagcaagacttacgcggcattcacaaagccagttgaccctattatcggg

SEQ ID NO: 592169 - DNA, 75 bp, synthetic construct
  source 1..75: mol_type = other DNA
atgatggctgacaatattatcccggcaccaaagcgccataccggtattgcagcggcgcgacgtgcagcaaagaaa

SEQ ID NO: 592170 - DNA, 75 bp, synthetic construct
  source 1..75: mol_type = other DNA
gtcgccgaatttaacgccttcaaacatctgacggaagaaatgcgccgtaaattgctggatatttcccgcacatcg

SEQ ID NO: 592171 - DNA, 69 bp, synthetic construct
  source 1..69: mol_type = other DNA
aagcatggttcccaggttgatttattttcgtttcttgatcacgcctttgcaaccggcgtgctcgggtaa

SEQ ID NO: 592172 - DNA, 75 bp, synthetic construct
  source 1..75: mol_type = other DNA
tgaaccgcttcaaaaacatgagcgatgaggagatcaccgccatggagaagcgcgcgcagcaggatgcgcgcatgt

SEQ ID NO: 592173 - DNA, 75 bp, synthetic construct
  source 1..75: mol_type = other DNA
ctggtgagaagccgtttgacccgcgggacaacatcatggctggcgcccgagttttttcctgggcgatgcagagcg

SEQ ID NO: 592174 - DNA, 75 bp, synthetic construct
  source 1..75: mol_type = other DNA
ctgcgcgatgctaatggcaaaccatattatctcggagaagattataaatttgatatcaatgcgcccgcgcccgaa

SEQ ID NO: 592175 - DNA, 75 bp, synthetic construct
  source 1..75: mol_type = other DNA
atgttcagaatcgaaccaaatttgattaaagctatcgctcttgttgaaagcaatctaaaaaaggatagcataggc

SEQ ID NO: 592176 - DNA, 75 bp, synthetic construct
  source 1..75: mol_type = other DNA
agagaaaccgtcaggatggtgacgattctcttgatactgagccaagttttgctgctaaagcctttagcagtgttg

SEQ ID NO: 592177 - DNA, 75 bp, synthetic construct
  source 1..75: mol_type = other DNA
cctaaagttgagaagaaacgtcaagaattgctgacttctcatgccgttgatgtaattaatgtccttgccgctcca

SEQ ID NO: 592178 - DNA, 75 bp, synthetic construct
  source 1..75: mol_type = other DNA
caggatgctttaactgagcttccctggaccaagcccccagccctagtaccagaagaatggcctttactatcagaa

SEQ ID NO: 592179 - DNA, 75 bp, synthetic construct
  source 1..75: mol_type = other DNA
gtgaaaatcccgctgtccggaccgctgacacaggcatttgaagatgcccgcgaccgcatcattgctgcggaaatg

SEQ ID NO: 592180 - DNA, 75 bp, synthetic construct
  source 1..75: mol_type = other DNA
aggcaggccagaggcgtgacggcgaccgaagctgcggatgagcttgcccgctccgtttcacccttcattgacggt

SEQ ID NO: 592181 - DNA, 75 bp, synthetic construct
  source 1..75: mol_type = other DNA
atgagccatctgagccatctgcgaacgtttcttgaggcctatcgctctggctccttttcaaaggcggcagaacta

SEQ ID NO: 592182 - DNA, 75 bp, synthetic construct
  source 1..75: mol_type = other DNA
catttcaatcggaaattcttccagatagtattctgtatatcatgcttaagaaattaactaatgtgtcctgtgatc

SEQ ID NO: 592183 - DNA, 75 bp, synthetic construct
  source 1..75: mol_type = other DNA
gcagactttttctcactctactgaaatgccaaggttggatgctttagatcccgtgttactagattattttttgat

SEQ ID NO: 592184 - DNA, 69 bp, synthetic construct
  source 1..69: mol_type = other DNA
atgaatgctattccttatttcgactatagcctggcacccttctggccatcttatcagaacaaagtcatc

SEQ ID NO: 592185 - DNA, 75 bp, synthetic construct
  source 1..75: mol_type = other DNA
agacagacgtcagatccagtcccgaattgattctactcggatgtatgccaagcaatcaggtaattttgaaaacga

SEQ ID NO: 592186 - DNA, 75 bp, synthetic construct
  source 1..75: mol_type = other DNA
cctgctcgatttgatctaagccaaatgactattatctttgatcgtacagatcgtcccgtacctatgagtcgaact

SEQ ID NO: 592187 - DNA, 75 bp, synthetic construct
  source 1..75: mol_type = other DNA
aaatgcaggatcagtctggcaacgatatgcagtcgcggcagaaatggttttataagctgaacgttcagtataatt

SEQ ID NO: 592188 - DNA, 75 bp, synthetic construct
  source 1..75: mol_type = other DNA
ggcaactgttgttaccgcttattatttttgccctgaccgcgttagtcgcaaaatgggtaggttatgtcagacaag

SEQ ID NO: 592189 - DNA, 75 bp, synthetic construct
  source 1..75: mol_type = other DNA
atccgagggaatcaagtacggcgcgggtgaaaatgctgcaacgttcctgtcatcagtatcttccaactatttgct

SEQ ID NO: 592190 - DNA, 75 bp, synthetic construct
  source 1..75: mol_type = other DNA
cggatgaacagttcaaagccatgatgcgccgtttcttcgataaatgggtcgaacagtttcagagcattgagcaaa

SEQ ID NO: 592191 - DNA, 75 bp, synthetic construct
  source 1..75: mol_type = other DNA
ggccatcgcggttaatcggcagggaaaaattgttgcccgcgcctcaacgcctaatgccagcgatatcgcgatgga

SEQ ID NO: 592192 - DNA, 75 bp, synthetic construct
  source 1..75: mol_type = other DNA
ccattacgcccaattgaaatcgaagatattgatgatatatatggtgatgacgaggggaatggttcgtgtaatata

SEQ ID NO: 592193 - DNA, 75 bp, synthetic construct
  source 1..75: mol_type = other DNA
tcgtcatctgtctgttatttctgtcgttgaagtctgcgcttgccctgaactgctactttggttcatccggtggct

SEQ ID NO: 592194 - DNA, 75 bp, synthetic construct
  source 1..75: mol_type = other DNA
tctcgcttgttgctttacccttttttgccagtgcaactggaacgggaactgcaacaattaacgtttccgcagatg

SEQ ID NO: 592195 - DNA, 75 bp, synthetic construct
  source 1..75: mol_type = other DNA
tcaaaattgcaccaggcattcatataaacataggtaaaacaggcattactagcgcatcaattggtaaggctggtg

SEQ ID NO: 592196 - DNA, 75 bp, synthetic construct
  source 1..75: mol_type = other DNA
tgatactctgactaaaccaacatcagaatttagaaagataatgccgtctgatggccatacaccaaaaattcagat

SEQ ID NO: 592197 - DNA, 75 bp, synthetic construct
  source 1..75: mol_type = other DNA
agatcaagcgcgtggagcatcgcgggcaggtggtggaatacatcgaggtggcgcgggaagacatcgccctggcca

SEQ ID NO: 592198 - DNA, 75 bp, synthetic construct
  source 1..75: mol_type = other DNA
cgcttccgtctgtggcgggacggattactggcactcctggcgggccaccgggaatgcgctggaaggaattgccag

SEQ ID NO: 592199 - DNA, 75 bp, synthetic construct
  source 1..75: mol_type = other DNA
agaatcatttgccctttggtgttatggattctcatcttatattccgcttaaaagttattcgcccgtttattaata

SEQ ID NO: 592200 - DNA, 75 bp, synthetic construct
  source 1..75: mol_type = other DNA
ccggatatccatgaaaaattcatggagcacctgacaaaacgggtgaagcgcagaaataaatccggccgcagcacc

SEQ ID NO: 592201 - DNA, 75 bp, synthetic construct
  source 1..75: mol_type = other DNA
agaccagtacgcgacgctggcggaaatgatcggcaaatgtgacgaagtgatgtacctgaagaaaaaacgaaagac

SEQ ID NO: 592202 - DNA, 75 bp, synthetic construct
  source 1..75: mol_type = other DNA
tactgttagtttttatactacacttaatacaattttagttggtgctattgctggccctgcaacagcaggttactt

SEQ ID NO: 592203 - DNA, 75 bp, synthetic construct
  source 1..75: mol_type = other DNA
gacctgaccaccgtcattgccccggacggcagcagaacgggacacagtacgatgcgtggggaaaagccatctgta

SEQ ID NO: 592204 - DNA, 75 bp, synthetic construct
  source 1..75: mol_type = other DNA
aaatactcaatgcgcatttatgaatggctgctaaaagaactaacacaaagaaaaacacataaagccaatatttca

SEQ ID NO: 592205 - DNA, 75 bp, synthetic construct
  source 1..75: mol_type = other DNA
gggcagaactccatgctgcaggaaaccatcacccgactctcgggtcttgaaatccatgaaccgatggtcatctgt

SEQ ID NO: 592206 - DNA, 75 bp, synthetic construct
  source 1..75: mol_type = other DNA
tcaggtcccggtggccctgataagcctgctggatcgcgagcgccagtggctcctcgcctgccagggcgtcggcgt

SEQ ID NO: 592207 - DNA, 75 bp, synthetic construct
  source 1..75: mol_type = other DNA
gatgccatccataaggtttttgaagagttcatggctgctaattcagaattgctggctcttgttgaggaatacaac

SEQ ID NO: 592208 - DNA, 75 bp, synthetic construct
  source 1..75: mol_type = other DNA
catgagacaacacacgcctacaacgaacaggggctggcaaaccgcgtcacgccggacagcctgccgccggtggag

SEQ ID NO: 592209 - DNA, 75 bp, synthetic construct
  source 1..75: mol_type = other DNA
gaacggcgaaccggcagagcagtggcagtatgatgaccacggctggctgacagacatcagccacctgagcgaagg

SEQ ID NO: 592210 - DNA, 75 bp, synthetic construct
  source 1..75: mol_type = other DNA
cccctgcgcaacggacgatgccaccggcagccggaaaaccatgacgtggagccgttacggtcagttgctgagctt

SEQ ID NO: 592211 - DNA, 75 bp, synthetic construct
  source 1..75: mol_type = other DNA
gttgcggcggaaaaatagctggcagacagccgccgcgaaggcatttttgcacatggcgttggaggaatgcgcggt

SEQ ID NO: 592212 - DNA, 75 bp, synthetic construct
  source 1..75: mol_type = other DNA
ttcactttttagttggatgttttcaaacgattttgcaagtagcagtgttgtttttttcttattgggtgtgctagg

SEQ ID NO: 592213 - DNA, 75 bp, synthetic construct
  source 1..75: mol_type = other DNA
agatgcaatgactgtgaatagagttaggacatccgtgaatttatctgttaacaaaataaaaaatgaattaaagtt

SEQ ID NO: 592214 - DNA, 75 bp, synthetic construct
  source 1..75: mol_type = other DNA
gggctggtcatacgcgccgggcgcggcgtaccgcccggacttagccaaataccagggcgtgctcgcgccgctggc

SEQ ID NO: 592215 - DNA, 75 bp, synthetic construct
  source 1..75: mol_type = other DNA
gggctgaaaatcacggcctccggcgatgcgctgggggaaacgatgaaactgatatcgatgcaaaccggagaattg

SEQ ID NO: 592216 - DNA, 75 bp, synthetic construct
  source 1..75: mol_type = other DNA
gatgggaggagagctatgcggcactgagacgctggcactctcagggagaagcgtttgtttgcggttttctggcga

SEQ ID NO: 592217 - DNA, 75 bp, synthetic construct
  source 1..75: mol_type = other DNA
ttacttccacgggaagaagctggactccttcttcccggagatcccggtgctgttcaccgtaacccggaccaacga

SEQ ID NO: 592218 - DNA, 75 bp, synthetic construct
  source 1..75: mol_type = other DNA
aaagggtatagcttcacgtgggactgggaggagatgtggcaggatgcccatgcccgcgcctttaccgtcgccaaa

SEQ ID NO: 592219 - DNA, 75 bp, synthetic construct
  source 1..75: mol_type = other DNA
cgctgaagcgcaggggatggtggggaccgcgtgacacgactgacccggtaacgggtgagccggtcaccattcagc

SEQ ID NO: 592220 - DNA, 75 bp, synthetic construct
  source 1..75: mol_type = other DNA
acagcacatctgaaacactggctgcaacgccaaaagcggtaaaggctgcatacgacctggctaatggaagacaac

SEQ ID NO: 592221 - DNA, 75 bp, synthetic construct
  source 1..75: mol_type = other DNA
gtggccaagaccaacggggagaatcaaaaggagatggtctatgggggccaggtaaagcaagtaatgatacaaaag

SEQ ID NO: 592222 - DNA, 75 bp, synthetic construct
  source 1..75: mol_type = other DNA
aacgacaacggcgaactcatccgcatcagcagcccgcgccagacccggagttacagctacagcaccaccggcagg

SEQ ID NO: 592223 - DNA, 75 bp, synthetic construct
  source 1..75: mol_type = other DNA
tttactcagttaagcagtgcaaccaacagcgcgtctgaaacactggctgcaacgccgaaagcggtaaaggccgcg

SEQ ID NO: 592224 - DNA, 75 bp, synthetic construct
  source 1..75: mol_type = other DNA
tttatgttgaaataggtaattacgccacaggtgttaatattcagtgggattataccagtaacgccagcgtaacga

SEQ ID NO: 592225 - DNA, 75 bp, synthetic construct
  source 1..75: mol_type = other DNA
ctgcaacgccaaaagcggtcaaggcggcgtatgacctggctaacgggaaatataccgcccagaacgccaccacga

SEQ ID NO: 592226 - DNA, 75 bp, synthetic construct
  source 1..75: mol_type = other DNA
ataaaagccatgagagactatcttgtgttaggaaaaaaaagaaaggaggtttgcgaacagcacaacgtgagcaat

SEQ ID NO: 592227 - DNA, 75 bp, synthetic construct
  source 1..75: mol_type = other DNA
atcgtatgtcacggggcaccttcgatgctgtcacaatagctcattttgtcagtgcgataatctctgattgtgaag

SEQ ID NO: 592228 - DNA, 75 bp, synthetic construct
  source 1..75: mol_type = other DNA
tataaaatcagttcttgaattaagggaaaatgatggtgaagaaaatgataaagatgtgttaacggggttttctat

SEQ ID NO: 592229 - DNA, 75 bp, synthetic construct
  source 1..75: mol_type = other DNA
tagctactgatagcgaaccagttgtattggagtttttcaagcaacttaagttttttggtggatggtactatttgt

SEQ ID NO: 592230 - DNA, 75 bp, synthetic construct
  source 1..75: mol_type = other DNA
ggcagaatgtcaagtgctaagtctaaaccattagagttgttaaatccaggagatgcaatgactgtgaatagagtt

SEQ ID NO: 592231 - DNA, 75 bp, synthetic construct
  source 1..75: mol_type = other DNA
cttgcacctttgatgtaaacaaaccgattcaaattatatctaaaagatatttcaaagcgcttgtcggttttttgt

SEQ ID NO: 592232 - DNA, 75 bp, synthetic construct
  source 1..75: mol_type = other DNA
atggcttcatttacatctcttggcgttggttcgaatctgccgctggatacattgctaaacaacctgaccatcgct

SEQ ID NO: 592233 - DNA, 75 bp, synthetic construct
  source 1..75: mol_type = other DNA
tatgagggcgaacagctgtatcttaatgagttaggatatgtttatggtaatgaagaaaaaacaaatgaaattgta

SEQ ID NO: 592234 - DNA, 75 bp, synthetic construct
  source 1..75: mol_type = other DNA
ggaagccagcaattgtgagattaatcagggcggcgtttttatgctggccgggaaagccagtgatacgttgtgctt

SEQ ID NO: 592235 - DNA, 75 bp, synthetic construct
  source 1..75: mol_type = other DNA
tatgcaatgagagattatctggtggcaggtcatccgagaaaaactgtatgtgaaaggcacaatgtgagtaatgga

SEQ ID NO: 592236 - DNA, 75 bp, synthetic construct
  source 1..75: mol_type = other DNA
tggggaacggtatggaagttgagccgtggctgaaggcggctgtgcgcaaagaatttgtcgatgataaccgggtga

SEQ ID NO: 592237 - DNA, 75 bp, synthetic construct
  source 1..75: mol_type = other DNA
gctgggcaataccggcggtttcgttgatcttgggacctatgagtatgtcctgaaaagtgacggcaacagcaactg

SEQ ID NO: 592238 - DNA, 75 bp, synthetic construct
  source 1..75: mol_type = other DNA
ggtaaaaaggtccgtacgaccgtcagccggaaagccgtttccgcaggcgaccgcgtaaaccgtcagttcgtggca

SEQ ID NO: 592239 - DNA, 75 bp, synthetic construct
  source 1..75: mol_type = other DNA
cgccgtcgtggcggtggatttggtttagtgaccgcctgtgctgcgggtgggcttggcgcagcaatggttctggag

SEQ ID NO: 592240 - DNA, 75 bp, synthetic construct
  source 1..75: mol_type = other DNA
gtgcactgctgaaacagtatggtaaccgcgttgcttcatccgcgatatcgcagtcggcgtcacaggttgcccgtg

SEQ ID NO: 592241 - DNA, 75 bp, synthetic construct
  source 1..75: mol_type = other DNA
cattatctgaacggcgaactaccgatgaagaaaacatgggatgggctgtttacccataacactgagctcgcgaat

SEQ ID NO: 592242 - DNA, 75 bp, synthetic construct
  source 1..75: mol_type = other DNA
attttgattaatggtgaatattataaaacttataaatcatgcttttatggaaatggttttatagtgccaaaaact

SEQ ID NO: 592243 - DNA, 75 bp, synthetic construct
  source 1..75: mol_type = other DNA
cttttgaagagcaggccttgcgcttcattggtaaagaattatacgaagcgttcttcaaaggctacaccataaaac

SEQ ID NO: 592244 - DNA, 75 bp, synthetic construct
  source 1..75: mol_type = other DNA
gtgatcctgatgaccgaatcgcgggcgaaagaattagggctggtaccgctggggtatctgcgcagttacgcattt

SEQ ID NO: 592245 - DNA, 75 bp, synthetic construct
  source 1..75: mol_type = other DNA
gacgtctgctttatgtgaaactgtttttgaaccttttgttgtccctgattatgttcgcccgacatcatgggacga

SEQ ID NO: 592246 - DNA, 75 bp, synthetic construct
  source 1..75: mol_type = other DNA
cactatttacagtgcatactatgcagctggcttggaagcgaatacttctatcaatattaaattaaaagcccctac

SEQ ID NO: 592247 - DNA, 75 bp, synthetic construct
  source 1..75: mol_type = other DNA
gttggctctaaggtttctgacttagatgtggtagtcaataaggggatcacagacgttaatattcccctgaagaaa

SEQ ID NO: 592248 - DNA, 75 bp, synthetic construct
  source 1..75: mol_type = other DNA
tcaaccctgaaaacctgccagttattgctggtgtagaaatttcaactgatatggttgggcgctttaatctgaatg

SEQ ID NO: 592249 - DNA, 75 bp, synthetic construct
  source 1..75: mol_type = other DNA
aactacctatgaagaaaacatgggatgggcaatttacccataacactgagctcgcgaatcttttacaggagagca

SEQ ID NO: 592250 - DNA, 75 bp, synthetic construct
  source 1..75: mol_type = other DNA
cagtccatcgatgatgaagataaaaccgaatataaggattacttaggttcgggacgtaagcctttgctggtcaat

SEQ ID NO: 592251 - DNA, 75 bp, synthetic construct
  source 1..75: mol_type = other DNA
ccgtgaaatagaactacgccagaagcagtacgagtactatcgtgatttactgttcagtttcccaaaacctgaaac

SEQ ID NO: 592252 - DNA, 75 bp, synthetic construct
  source 1..75: mol_type = other DNA
gctttcagaagccgatcttctgatttttgcttatcagaatactggggagtctgctagcggggcggtacgttatgg

SEQ ID NO: 592253 - DNA, 75 bp, synthetic construct
  source 1..75: mol_type = other DNA
tactaaatttattaaagaatcattgttctctgatatcaatgcattagatgcaagttgctcatcactagagtttgg

SEQ ID NO: 592254 - DNA, 75 bp, synthetic construct
  source 1..75: mol_type = other DNA
aacaaatttcagagagagcaaggctcaacgctgaagctttacttaaaaaagttgatgaagagacaacgaaaaaat

SEQ ID NO: 592255 - DNA, 75 bp, synthetic construct
  source 1..75: mol_type = other DNA
cttaaatatactattccatttgtttgtgttgccgcggttctcattttcgcttttcgcgatctgataataacgctc

SEQ ID NO: 592256 - DNA, 75 bp, synthetic construct
  source 1..75: mol_type = other DNA
ttaaatacctggcgtgttggaatgaataatttttctcgtaatgccgaggggcaggataatacaagaaatatcctc

SEQ ID NO: 592257 - DNA, 75 bp, synthetic construct
  source 1..75: mol_type = other DNA
ctgtaccaggcgggggcaggcgcaccgagccgggctgtggctgattaaaacggaactgctggaaacgcagaccgt

SEQ ID NO: 592258 - DNA, 75 bp, synthetic construct
  source 1..75: mol_type = other DNA
acgcgtgacggcactcaggggttggatgatcaggaaaccatcattctcgcggtctattgttctttcctggcgttg

SEQ ID NO: 592259 - DNA, 75 bp, synthetic construct
  source 1..75: mol_type = other DNA
gctgagcttaacatgcgtaaaaaacagtacaactactatcgcgaccagttgttaagttttaaagagggtgaggtt

SEQ ID NO: 592260 - DNA, 75 bp, synthetic construct
  source 1..75: mol_type = other DNA
ttttgaagagggtggggttgagtggaagacattgggtgagattgtgaagatgcgtgcagggcagcatatttcggc

SEQ ID NO: 592261 - DNA, 75 bp, synthetic construct
  source 1..75: mol_type = other DNA
acattttaacagtctaaaaacgctactttttgaaacctttggagaaaatgcaccatcattgctatcaggagttta

SEQ ID NO: 592262 - DNA, 75 bp, synthetic construct
  source 1..75: mol_type = other DNA
tttgtgagtcggtattcttgctattaatctctattgattctttctttaaaaaaagtaacaccggtgaacttaacg

SEQ ID NO: 592263 - DNA, 75 bp, synthetic construct
  source 1..75: mol_type = other DNA
tgttctatcaggtattttttgtcgtgcctcagcgtgtggccctgctcggtgaagatgaaaagtgggactcggtcg

SEQ ID NO: 592264 - DNA, 75 bp, synthetic construct
  source 1..75: mol_type = other DNA
ctgtggctgcatctgctgcagtatctggttctgcgatggcgtggactgcaaacggcactggtggttctgttgagc

SEQ ID NO: 592265 - DNA, 75 bp, synthetic construct
  source 1..75: mol_type = other DNA
cgcaattatttaatgtattaaaaggagaaatgagtttagttgggccacgacctattattaccgccgaattagaaa

SEQ ID NO: 592266 - DNA, 75 bp, synthetic construct
  source 1..75: mol_type = other DNA
atgaagttatgatttttcgtgtccaacaaaaccttgcaaagtggtcctcaaggattatcaaacgtctcttcgata

SEQ ID NO: 592267 - DNA, 75 bp, synthetic construct
  source 1..75: mol_type = other DNA
agaagatttacttagcaaagatatacaagccaagcaagaatgggaagctacgtttaaattaaaaaatgatccacg

SEQ ID NO: 592268 - DNA, 75 bp, synthetic construct
  source 1..75: mol_type = other DNA
atgacacaaccccatctgaaagctgtcgcgcgtttcgtacgtgaccttctggactacgacgaacagctgatcaag

SEQ ID NO: 592269 - DNA, 75 bp, synthetic construct
  source 1..75: mol_type = other DNA
cattgaagatactccgcaatatcgactcaaactcgtgaacggccctgacgctgacagtgacaaggtaaaaacagt

SEQ ID NO: 592270 - DNA, 75 bp, synthetic construct
  source 1..75: mol_type = other DNA
tttattcactaagaatttggttcctgcttgcaaatgtaatactttcaaaagtactactatagctaattctgcagg

SEQ ID NO: 592271 - DNA, 75 bp, synthetic construct
  source 1..75: mol_type = other DNA
ttacattaaacttcttttttcagaaaacggtgatttaatttcgctatatgataaaagatatggtaaagaatacat

SEQ ID NO: 592272 - DNA, 75 bp, synthetic construct
  source 1..75: mol_type = other DNA
cctgacacaggacagtccacgcgttgatgtccaaacttttattgattggcacgaacctaatgtttctctcaaagt

SEQ ID NO: 592273 - DNA, 75 bp, synthetic construct
  source 1..75: mol_type = other DNA
cacaactttttaatgttcttaaaggtgaaatgagtttagttgggcccagaccaattatcactgctgaacttgcga

SEQ ID NO: 592274 - DNA, 75 bp, synthetic construct
  source 1..75: mol_type = other DNA
tgtgatagagatagctgttatgacctttgcaacatggtcgttttctagagttctgtggataataacatggagtag

SEQ ID NO: 592275 - DNA, 75 bp, synthetic construct
  source 1..75: mol_type = other DNA
tcgtcagtttatctctggcaatttctgactttgtaagtctttcttgctcgatctatatcgcttctgcattattac

SEQ ID NO: 592276 - DNA, 75 bp, synthetic construct
  source 1..75: mol_type = other DNA
ggactgtggcaggtaagtgggcgcagtgatgtggattatgatacacgtgtatatctggatgcttggtatgtaaag

SEQ ID NO: 592277 - DNA, 75 bp, synthetic construct
  source 1..75: mol_type = other DNA
agccgacgtcattatctctaaccgaatggcagaagagcttaaggatgtggcagataaggtatacacccgcgatct

SEQ ID NO: 592278 - DNA, 75 bp, synthetic construct
  source 1..75: mol_type = other DNA
cagctttggcagcatggcaggcagtaatgccgcatatgaactgaccagcacatacacccccgcaggccagttaca

SEQ ID NO: 592279 - DNA, 75 bp, synthetic construct
  source 1..75: mol_type = other DNA
atatcacccaggatccgatagggttgaaggggggaataaatctatacacgtatccactggcaccaatacgttaca

SEQ ID NO: 592280 - DNA, 75 bp, synthetic construct
  source 1..75: mol_type = other DNA
gctgacctacggcagcggttatctggcgggcatgaagcttggcgacacgccgctgctggagtacacgcgcgaccg

SEQ ID NO: 592281 - DNA, 75 bp, synthetic construct
  source 1..75: mol_type = other DNA
accagacccgttatgaatacgaccgcttcggccagatgacggcggtccaccgcgaggaaggcatcagcctttacc

SEQ ID NO: 592282 - DNA, 75 bp, synthetic construct
  source 1..75: mol_type = other DNA
gacccgctgggtcgccggacagggaaacgggtgtggcgtcgcgagcgtgacctgacgggatggatgtcgctgtcg

SEQ ID NO: 592283 - DNA, 75 bp, synthetic construct
  source 1..75: mol_type = other DNA
tacaacaaattgaccctatgggattattgcagacttgggatgatgccagatctggagcatgtacggggggagttt

SEQ ID NO: 592284 - DNA, 75 bp, synthetic construct
  source 1..75: mol_type = other DNA
acgctgtattactgacgagaagacggtttataatctcaacacgcaccatgcaaatggtgacaaacttcctctacc

SEQ ID NO: 592285 - DNA, 75 bp, synthetic construct
  source 1..75: mol_type = other DNA
atgtggttgctcttaaaaaacaggcaaaaaatactgaaatcattttatcaatttctcgcgttcaccgatcccctt

SEQ ID NO: 592286 - DNA, 75 bp, synthetic construct
  source 1..75: mol_type = other DNA
ttgcttatccggcagcaattactctggcgcggctgggggatgctgaaataacaacgacatcactctcggtgaatg

SEQ ID NO: 592287 - DNA, 75 bp, synthetic construct
  source 1..75: mol_type = other DNA
gacatcagccacctgagcgaaggccaccgtgtcgctgtccactacggctacgacgataagggccgcctgaccggc

SEQ ID NO: 592288 - DNA, 75 bp, synthetic construct
  source 1..75: mol_type = other DNA
aactttgttgtcctgaaccttaatatggtcaatctgaccatgaaaaaaacgctaccacttttaatggccaaatgg

SEQ ID NO: 592289 - DNA, 75 bp, synthetic construct
  source 1..75: mol_type = other DNA
aagcagtattaaggatcggtgaggttcgtgaagtatcgggcagaacactcagtgtgcttgtcgataaaaataaaa

SEQ ID NO: 592290 - DNA, 75 bp, synthetic construct
  source 1..75: mol_type = other DNA
aggtgccgggcacaatgaaaattatttcagcagaaataccagtgcctaaagaagatgaagttttgattaaagtag

SEQ ID NO: 592291 - DNA, 75 bp, synthetic construct
  source 1..75: mol_type = other DNA
ggataccggcttccggtaagtttcgtcggctgaggccagctaaagtagagaggtcaaaaaatagccttaacgtac

SEQ ID NO: 592292 - DNA, 75 bp, synthetic construct
  source 1..75: mol_type = other DNA
gagtggcagttgccggaacagggttcacgccgatgctggaagaagcggtgaaagtgaatacggagcaactggtga

SEQ ID NO: 592293 - DNA, 75 bp, synthetic construct
  source 1..75: mol_type = other DNA
gaaccacacaggctcaaccaaagcccggtgtaaatgtctgcatagtaaaaaaagaaataactaataaattcaatg

SEQ ID NO: 592294 - DNA, 75 bp, synthetic construct
  source 1..75: mol_type = other DNA
ggattgctgctcaatatttaagaatgtctaccgagcatcagaaatattcgccggagaaccagcgggaatatatcg

SEQ ID NO: 592295 - DNA, 75 bp, synthetic construct
  source 1..75: mol_type = other DNA
aagaaattggcctgggtcaggtcatgaatgcgccgggacggttgtggctgtgggaagccgagtgcgcaaatttaa

SEQ ID NO: 592296 - DNA, 75 bp, synthetic construct
  source 1..75: mol_type = other DNA
aacacctggtacactggtgctaaactgggctggtcccagtaccatgacactggtttcatcaacaacaatggcccg

SEQ ID NO: 592297 - DNA, 75 bp, synthetic construct
  source 1..75: mol_type = other DNA
caatcgtacaaccccgtgctggcttgcaaacctatatggcgcaggtctatggctggatgacagttggcctgttgc

SEQ ID NO: 592298 - DNA, 75 bp, synthetic construct
  source 1..75: mol_type = other DNA
gtgagtgaggaaagccgccgctggctggcatcgtgcggcctgacggtggcgcagatgcaaagccagatggacccg

SEQ ID NO: 592299 - DNA, 75 bp, synthetic construct
  source 1..75: mol_type = other DNA
atgaagcataaaccacaactgataaatgtcgtggcactggccgtcatgctggcctgcagctctgtggccagtgca

SEQ ID NO: 592300 - DNA, 75 bp, synthetic construct
  source 1..75: mol_type = other DNA
aatgtaccagcggggatgaagaccaacagccgggagtggcggttgcaggaaccgggttcacgccgatgctggaag

SEQ ID NO: 592301 - DNA, 75 bp, synthetic construct
  source 1..75: mol_type = other DNA
tgatatcgcagccagcaacgcgcagcaatatgcagaaacttggggtggatctcgggtggagcagtgatctgatgt

SEQ ID NO: 592302 - DNA, 75 bp, synthetic construct
  source 1..75: mol_type = other DNA
aatcctcagtacaaaacgaaaaagcagactgtattccagaaaattggggcgtttatcgaaaaatttaaaggggtt

SEQ ID NO: 592303 - DNA, 75 bp, synthetic construct
  source 1..75: mol_type = other DNA
aaaaatacggtattgcgctgcctacggcagaaagcgtgctgacggaacaatccttctcccagtttgcgttatcca

SEQ ID NO: 592304 - DNA, 75 bp, synthetic construct
  source 1..75: mol_type = other DNA
cagctcagtctataatgaatgcgaccttttcaaccgagcatgggttttttgtaaaacgctttagccacggtggaa

SEQ ID NO: 592305 - DNA, 75 bp, synthetic construct
  source 1..75: mol_type = other DNA
ttcttcttgacaattgcgctaaattagaattgatctccgactcaatttataaaaaactcacccatattttaatta

SEQ ID NO: 592306 - DNA, 75 bp, synthetic construct
  source 1..75: mol_type = other DNA
tccggtgcgctacttatcgtcgttgtcgtaggtcgttccgttagcctgcatcgccagcaaattaaagagtggctg

SEQ ID NO: 592307 - DNA, 75 bp, synthetic construct
  source 1..75: mol_type = other DNA
aaacacttcctcagccccggctgtatctggtggaggagcgcactgaagaacagacagaagccgcgcctttaccgg

SEQ ID NO: 592308 - DNA, 75 bp, synthetic construct
  source 1..75: mol_type = other DNA
ttctcaggaagcaaatgagtttcttgaaatatctacttttatttatgagaatgatttcttgagagaaaagattga

SEQ ID NO: 592309 - DNA, 75 bp, synthetic construct
  source 1..75: mol_type = other DNA
cacagggaaatatgactggttaacccctgaatcgatcggcgttaatgatgtcacgcccgcagatgaaagtacctg

SEQ ID NO: 592310 - DNA, 75 bp, synthetic construct
  source 1..75: mol_type = other DNA
cggaagcgtatctgcgccatatcctgagcgtactgccggaatggccttccaaccgagttgacgaactcctgccat

SEQ ID NO: 592311 - DNA, 75 bp, synthetic construct
  source 1..75: mol_type = other DNA
tcgcaggccagaatcaggcttacagggaactaagaagaataagagataatattcatagtgaaatatacttcaaac

SEQ ID NO: 592312 - DNA, 75 bp, synthetic construct
  source 1..75: mol_type = other DNA
acgacaataaagatagagtaaaaaaactaattcttgatttacagaaacaatttggtgaaaaccgcatttcaatta

SEQ ID NO: 592313 - DNA, 75 bp, synthetic construct
  source 1..75: mol_type = other DNA
tgaaaactgggaagggagggtaatgttacaaagatatctcgaattaaaaatgaaagatcatcttagtttgcaatc

SEQ ID NO: 592314 - DNA, 75 bp, synthetic construct
  source 1..75: mol_type = other DNA
acagatactcatctggcgctataccgtgctttcccggatattggaggtatcgttcatacccattcccgacacgcc

SEQ ID NO: 592315 - DNA, 75 bp, synthetic construct
  source 1..75: mol_type = other DNA
aactctgaaaagctggcagaaaagatttgcaggtggatcaaagagaccggacgcggccccgatgccgttatgtat

SEQ ID NO: 592316 - DNA, 75 bp, synthetic construct
  source 1..75: mol_type = other DNA
atgccgtgatggtattggtgctggcaatggtgacctatattccgcaaatcagtatggcattgccaagagcactgg

SEQ ID NO: 592317 - DNA, 75 bp, synthetic construct
  source 1..75: mol_type = other DNA
atatttttaccggttgtcaccgaactgggcatggacccgattcactttggtattgtcatggtgctgaacatgtgt

SEQ ID NO: 592318 - DNA, 75 bp, synthetic construct
  source 1..75: mol_type = other DNA
gtaagcagcgtttcaaagatgttccgttggttgacctgctaggccgtgaggataaaaccgattgtctagatgttg

SEQ ID NO: 592319 - DNA, 75 bp, synthetic construct
  source 1..75: mol_type = other DNA
gagggatatctatcgggaccagtacggagaacttggcgagagtcttaccgatgctctggctagtgaaccgctgag

SEQ ID NO: 592320 - DNA, 75 bp, synthetic construct
  source 1..75: mol_type = other DNA
gctgtacgtaatgatctgatcaaaaagaatatgactgaggggctggaacttaaggttccccagcgtaaagcctct

SEQ ID NO: 592321 - DNA, 75 bp, synthetic construct
  source 1..75: mol_type = other DNA
attcagaccaatggcaacagcatactctgaaagataaacattacgctaatctattaacgatgctggatctcaaag

SEQ ID NO: 592322 - DNA, 75 bp, synthetic construct
  source 1..75: mol_type = other DNA
ctattaacgatgctggatctcaaagaggccagtgaaagtgataagtctaaaatatttttctgtctgtctgccgta

SEQ ID NO: 592323 - DNA, 75 bp, synthetic construct
  source 1..75: mol_type = other DNA
tttgcaaatatttctcacagtaatgtctttaacggtattcctgatgcgtcaaaaattttaaaacgttatgcattt

SEQ ID NO: 592324 - DNA, 75 bp, synthetic construct
  source 1..75: mol_type = other DNA
tgattctcgatttgcttaacactatttctgacaacccaataataatcctgcttattatcaatattatcctgttga

SEQ ID NO: 592325 - DNA, 75 bp, synthetic construct
  source 1..75: mol_type = other DNA
tcaacaaagacgatggcgataaccataccaatgtcgccattgcccggcatatgtacgagagtgccctgcatattc

SEQ ID NO: 592326 - DNA, 75 bp, synthetic construct
  source 1..75: mol_type = other DNA
aaggcaagaactattcaattgaagaatgggttttagcatttaagaaagcaacatatattgtaacagactcctttc

SEQ ID NO: 592327 - DNA, 75 bp, synthetic construct
  source 1..75: mol_type = other DNA
aagctggtagaagcccgcagaagcgctttaggtgatgatgctatggtgtttgacggtcttcgtcttatgaagaat

SEQ ID NO: 592328 - DNA, 75 bp, synthetic construct
  source 1..75: mol_type = other DNA
cacagctcagggtctataacttacgaccgttacgcgaaagaggtcgaggtagatagactggttaatgtgatggct

SEQ ID NO: 592329 - DNA, 75 bp, synthetic construct
  source 1..75: mol_type = other DNA
caggtgcgagacttaacgaggtggcccaacttcaggtcaaagacgtcagggctactgaggccgggaacgtctaca

SEQ ID NO: 592330 - DNA, 75 bp, synthetic construct
  source 1..75: mol_type = other DNA
ccgccttaggatgaagactactggtcgcctgaccgcttcgcttccttctcacaaccgttataaactagcgtcagt

SEQ ID NO: 592331 - DNA, 75 bp, synthetic construct
  source 1..75: mol_type = other DNA
ttcacgcgcgaccacctgcaccgtgaagtgctcagaagccaggggcgactgagcacgcggcagctttacgacccc

SEQ ID NO: 592332 - DNA, 75 bp, synthetic construct
  source 1..75: mol_type = other DNA
atcagtacgatgaactcagcaaccggactgccaccacctttccggacggcagaacgcagcgccatctgtactacg

SEQ ID NO: 592333 - DNA, 75 bp, synthetic construct
  source 1..75: mol_type = other DNA
atgctcaactcaagaacctacctttatcagcgtaacggtgtcttttacatccgtcttaggatgaagaccactggt

SEQ ID NO: 592334 - DNA, 75 bp, synthetic construct
  source 1..75: mol_type = other DNA
tgaagtcctccagcagataccgaagaaccgcaagcaacgctttaaggatatgccgctgtctgacctgctgaaccg

SEQ ID NO: 592335 - DNA, 75 bp, synthetic construct
  source 1..75: mol_type = other DNA
taatgctatggtattcgatggcctcaagctgatgaagaacggctacggtgagcaggtgagcaaatggtttaacag

SEQ ID NO: 592336 - DNA, 75 bp, synthetic construct
  source 1..75: mol_type = other DNA
atcagcgtaacggtgtcttttacatccgccttaggatgaagaccactggtcgcctgaccgcttcgcttccttctc

SEQ ID NO: 592337 - DNA, 75 bp, synthetic construct
  source 1..75: mol_type = other DNA
ttatcaagatggctgctgtctttaagtgggcggtacgtaacgacctgatagctaagaacctgaccgaaggtcttg

SEQ ID NO: 592338 - DNA, 75 bp, synthetic construct
  source 1..75: mol_type = other DNA
tgaagtcctccagcagctaccgaagaaccgcaagcaacgctttaagtctatgccgctgtctgacttgctgaaccg

SEQ ID NO: 592339 - DNA, 75 bp, synthetic construct
  source 1..75: mol_type = other DNA
tgcagacaaccctaacgcctcttatgaggagctacgggagcacctgaagaccattgtcgagtgggaacttagtgt

SEQ ID NO: 592340 - DNA, 75 bp, synthetic construct
  source 1..75: mol_type = other DNA
ccatatgaccaacgggaaaatattgtgatcgctgttggacgatttacagagcaaaagaattttaatgagttgatt

SEQ ID NO: 592341 - DNA, 75 bp, synthetic construct
  source 1..75: mol_type = other DNA
atcggctgttggtctatcggtatctgccaggttgatgaagatgtgccaatcccacaatgggaaacatcgttcagc

SEQ ID NO: 592342 - DNA, 75 bp, synthetic construct
  source 1..75: mol_type = other DNA
atctggtcatttttgcgttagcacaggccgtgattctgctgctgctaaccccgctttttacgggtatttcccggc

SEQ ID NO: 592343 - DNA, 75 bp, synthetic construct
  source 1..75: mol_type = other DNA
cacgacctttccgcaagctgtcgctccggtaaacaatgactttgcaggtcagcataatatttatattgtcagtca

SEQ ID NO: 592344 - DNA, 75 bp, synthetic construct
  source 1..75: mol_type = other DNA
tagtctgtttgttgctttgtagttgcacgacctttccgcaagctgtcgctccggtaaacaatgactttgcaggtc

SEQ ID NO: 592345 - DNA, 75 bp, synthetic construct
  source 1..75: mol_type = other DNA
ttcctggcggtctcttttaagttatttccttggaagaacaatgagaatccttccggtgttcgcaatagctgttct

SEQ ID NO: 592346 - DNA, 75 bp, synthetic construct
  source 1..75: mol_type = other DNA
attggccgggcaacgtgcgcgagctggaaaacgtgattgagcgggcggtactgttgactcgtggtaacagtctga

SEQ ID NO: 592347 - DNA, 75 bp, synthetic construct
  source 1..75: mol_type = other DNA
gtttgaagaaatcgctaaagcagcgtcgcatcgtggttacttcgcagtggtcgcgacttgtggagacgatcccca

SEQ ID NO: 592348 - DNA, 75 bp, synthetic construct
  source 1..75: mol_type = other DNA
tgtcctgcggtgtacttgtgatggtaatgagtggtttattagatgccgcagaaattacgttgataagtcacaaaa

SEQ ID NO: 592349 - DNA, 75 bp, synthetic construct
  source 1..75: mol_type = other DNA
aacttattgaactgcatgttctcaaaagcaacttctattaccgctaccatgatgatggcagcgatgtgacggcaa

SEQ ID NO: 592350 - DNA, 75 bp, synthetic construct
  source 1..75: mol_type = other DNA
gttgtttctcgatgaaattggcgatctgccgttagaacttcagcctaaattgctgcgcgtattgcaggagcggga

SEQ ID NO: 592351 - DNA, 75 bp, synthetic construct
  source 1..75: mol_type = other DNA
cacactgtttaactggctggcacgcattatcaccccggttctgcaatcatggctcaatgatgaagaacaacaggt

SEQ ID NO: 592352 - DNA, 75 bp, synthetic construct
  source 1..75: mol_type = other DNA
tggcgctatttatgacacagaccaacagtctgctgaaatgcgccgacgtgaacgcgaggaaccgcagtccaagaa

SEQ ID NO: 592353 - DNA, 75 bp, synthetic construct
  source 1..75: mol_type = other DNA
ttaacatcttcgcaggcaatcttgggtattagaccaaaagattgtttaaattatgagtttttatatttctatctt

SEQ ID NO: 592354 - DNA, 75 bp, synthetic construct
  source 1..75: mol_type = other DNA
aagaagagaaaaaagccctgatgcagcagttattgaccgggaaacgccgtgtcaaagtagaatcggaagaaaccg

SEQ ID NO: 592355 - DNA, 75 bp, synthetic construct
  source 1..75: mol_type = other DNA
aaaactcgcctgcctgaagggtgagaaaaaagccctgatgcaacagctgctgaccggtaagcgtcgggtggttgt

SEQ ID NO: 592356 - DNA, 75 bp, synthetic construct
  source 1..75: mol_type = other DNA
acaccgaaatctccacactggagaaaaagctcgcctgcctgaaagacgagaagaaagccttgatgcagcaactgc

SEQ ID NO: 592357 - DNA, 75 bp, synthetic construct
  source 1..75: mol_type = other DNA
gctcgtaatacttgcgggatcaagtataaataatttaaaaggttcagatattgaatcaataaatattgatgctcc

SEQ ID NO: 592358 - DNA, 75 bp, synthetic construct
  source 1..75: mol_type = other DNA
cagcagaaaaaagccctgatgcagcaattgcttaccgggaaaaagcgcttgggattgcccgctggtagctatgaa

SEQ ID NO: 592359 - DNA, 75 bp, synthetic construct
  source 1..75: mol_type = other DNA
aaagctgatgaagtacatatatttatttcagctcaggcatcctttgttgttcgtcttggctctctttaccaagag

SEQ ID NO: 592360 - DNA, 75 bp, synthetic construct
  source 1..75: mol_type = other DNA
tcgtcttggctctctttaccaggaggggttacacggtgtaatctatgtctggcattggaactctataaaaaatga

SEQ ID NO: 592361 - DNA, 75 bp, synthetic construct
  source 1..75: mol_type = other DNA
caccatcaacgacgcgccagcgttaatagatcttgtacagcaaggtattgggccagctaaatcgatgggatgtgg

SEQ ID NO: 592362 - DNA, 75 bp, synthetic construct
  source 1..75: mol_type = other DNA
acttccttatcctgagattgaagaacaacaaaaaatcgccacagtcctgtcagctgccgacgacgaaatcgccac

SEQ ID NO: 592363 - DNA, 75 bp, synthetic construct
  source 1..75: mol_type = other DNA
cggttagtgcaagtggtgcttacgcaggatatatatcttaccataactacaaaatttgggcttctgattgctccg

SEQ ID NO: 592364 - DNA, 75 bp, synthetic construct
  source 1..75: mol_type = other DNA
ttcccttcgtgacttgaataaacgagatattgcattaatccgggcgtatgggtttgaaaatacagacccacaagc

SEQ ID NO: 592365 - DNA, 75 bp, synthetic construct
  source 1..75: mol_type = other DNA
atgtctgtatggaatcacgtaattcatataaaaaaaatagatgagatttcatctttgtcagagtcaaaggaacac

SEQ ID NO: 592366 - DNA, 75 bp, synthetic construct
  source 1..75: mol_type = other DNA
ttataaaaaggttaaagaacgtgtaagtaatataagtaagagttattcatactctgttgttagtaaaagagatac

SEQ ID NO: 592367 - DNA, 75 bp, synthetic construct
  source 1..75: mol_type = other DNA
atggtagagcaaaccctgaaggaagtagtgaaagcgatgtgcaaggcgtaccccggaggccgtcaggctatggct

SEQ ID NO: 592368 - DNA, 75 bp, synthetic construct
  source 1..75: mol_type = other DNA
agcggaagatctgtcgcgtgaagcgtcgtttgctcagggattgcgggcgatgattggcggtatcttaaccgcatc

SEQ ID NO: 592369 - DNA, 75 bp, synthetic construct
  source 1..75: mol_type = other DNA
gacgatggatatttgtctttctatcactcagacagaatgcctaagtctgattttatcagtaaagtcaaacacata

SEQ ID NO: 592370 - DNA, 75 bp, synthetic construct
  source 1..75: mol_type = other DNA
gacaatggatatttgtctttctatcattcagacagaatgcctaagtcagatattacaagtaaagtcaaacacata

SEQ ID NO: 592371 - DNA, 75 bp, synthetic construct
  source 1..75: mol_type = other DNA
ataaatgcgtgaacgataaatatgtcatgcagcatataataaaaactggaaataattttcagatttgctcttact

SEQ ID NO: 592372 - DNA, 75 bp, synthetic construct
  source 1..75: mol_type = other DNA
ctgcttctatcgccagtactttcgtcgttactgccgggatgttcggcgcaatgagcctgtacggttacaccacga

SEQ ID NO: 592373 - DNA, 75 bp, synthetic construct
  source 1..75: mol_type = other DNA
ttttaagcggatctacagcatcagctttttggtacaaacttcctggtggcatggtggtgatggggggtaatgcat

SEQ ID NO: 592374 - DNA, 75 bp, synthetic construct
  source 1..75: mol_type = other DNA
gtgcttaagttacaggatcctggattcgggaccagacggtactcagacgacgcttacctacaaaccaaatatgcc

SEQ ID NO: 592375 - DNA, 75 bp, synthetic construct
  source 1..75: mol_type = other DNA
cgccgcaactgaatgctcgaggcgcagacgctttactgatgaactcgcagaggcgctagcaacgattattgaaaa

SEQ ID NO: 592376 - DNA, 75 bp, synthetic construct
  source 1..75: mol_type = other DNA
cagcttttacttcgcggccctcgtcaacatcaactcacgtctgaaggacaaaaactgctggggtatgcccgaagg

SEQ ID NO: 592377 - DNA, 75 bp, synthetic construct
  source 1..75: mol_type = other DNA
atgtctagcggaaacacaaacaacaaatcagcaaagaaaaacattcgattcccgcacgagcttatagatgggatt

SEQ ID NO: 592378 - DNA, 75 bp, synthetic construct
  source 1..75: mol_type = other DNA
gttatcaaaatcaaccgtttcagtaacgatgttcgcacttggatgaatgacggcacggctgtaaaaggagattat

SEQ ID NO: 592379 - DNA, 75 bp, synthetic construct
  source 1..75: mol_type = other DNA
cttttgtaaaattaaactttcattctgggttaatattattaatgcggcgttgggcgtgctctgttatttcctgcc

SEQ ID NO: 592380 - DNA, 75 bp, synthetic construct
  source 1..75: mol_type = other DNA
agtgaaatcctggctgaccgggtgagtgaggaaagccgccgctggctggcatcgtgcggcctgacggtggagcag

SEQ ID NO: 592381 - DNA, 75 bp, synthetic construct
  source 1..75: mol_type = other DNA
tttgtatatcaaataggaattactggagtgcttcttggaacgctgattccctttgttttattgacttttatacca

SEQ ID NO: 592382 - DNA, 75 bp, synthetic construct
  source 1..75: mol_type = other DNA
taggacgtttatctagggaggaacacgttctaaatgaaatattaaaaagtaaaaatttattcaatgaagcggaaa

SEQ ID NO: 592383 - DNA, 75 bp, synthetic construct
  source 1..75: mol_type = other DNA
ggaacgcgaataccaaatcagcgaataacattctcctgactaggctggattcagcctacaaatctggacaagaac

SEQ ID NO: 592384 - DNA, 75 bp, synthetic construct
  source 1..75: mol_type = other DNA
acagcaaccggtggtcagggcggcggtgaagtgtatgtcggtggcggctggcagggtaaggacagcaacatccgt

SEQ ID NO: 592385 - DNA, 75 bp, synthetic construct
  source 1..75: mol_type = other DNA
tcacgtagttaacgacattccgaagccgccaactcgcgagccggagaagacacttgaacagaaactaatggaatg

SEQ ID NO: 592386 - DNA, 75 bp, synthetic construct
  source 1..75: mol_type = other DNA
ctcgctgtaatattttacaaaataataaattgcaaacagcagaaatttacaaagaatcacaacaaaccgcgaaac

SEQ ID NO: 592387 - DNA, 75 bp, synthetic construct
  source 1..75: mol_type = other DNA
cctcacactcagctaagttgatgtctgacaaagaaattaacaaccgaagtgacttgaagaatttttcaaaggtct

SEQ ID NO: 592388 - DNA, 75 bp, synthetic construct
  source 1..75: mol_type = other DNA
gtgcgattgtttagtgtaattccgatccttatggggatggtgttaattccattatggccagcatactcatcagca

SEQ ID NO: 592389 - DNA, 75 bp, synthetic construct
  source 1..75: mol_type = other DNA
tattcattattctgctgacatttttctggaaaaaagcagagctagtaaatgacagccagatcagagttaatttcg

SEQ ID NO: 592390 - DNA, 75 bp, synthetic construct
  source 1..75: mol_type = other DNA
tctgtggttcatgcggttcctgcaatacgattccgtttgggaaacacggtcctgtcagccagcggaaaaaatgtc

SEQ ID NO: 592391 - DNA, 75 bp, synthetic construct
  source 1..75: mol_type = other DNA
aaacgccttctttatttcggcgaataatgacaaaactcgcggcctttgcacctggcatctttcttattggctaca

SEQ ID NO: 592392 - DNA, 75 bp, synthetic construct
  source 1..75: mol_type = other DNA
ccgttaaatgagatttttgtgcatggacgaaactcagttattttctggagtaaaatatttaatatacttaacgat

SEQ ID NO: 592393 - DNA, 75 bp, synthetic construct
  source 1..75: mol_type = other DNA
agatgacgcgttttcccaacgactcgctggatgcggcgttatgtcatggtgatgtgttgctacaaatttgcgcca

SEQ ID NO: 592394 - DNA, 75 bp, synthetic construct
  source 1..75: mol_type = other DNA
gaacgaagccgggcgcacccgtgtcacgctggcgtatggcgcaccgggaaacgttcagccaccgattgaacaatg

SEQ ID NO: 592395 - DNA, 75 bp, synthetic construct
  source 1..75: mol_type = other DNA
atggctgactattttgaaatacgtgctgattacaatcagcacaccatcacgatttatcaggcttacaatgatgca

SEQ ID NO: 592396 - DNA, 75 bp, synthetic construct
  source 1..75: mol_type = other DNA
aggagcgcgcatttcagcagtggctgcgcagccctaactatctcaaccgtggtctgaactggtttcggatgaata

SEQ ID NO: 592397 - DNA, 75 bp, synthetic construct
  source 1..75: mol_type = other DNA
aacaggctgacggcccgtaacattactcttaccggggaaagtacgagtgggaatgccatcaaccttacagacact

SEQ ID NO: 592398 - DNA, 75 bp, synthetic construct
  source 1..75: mol_type = other DNA
tgattgatgtcaacattattaacacggataaaactattcagcaatctatagatgctggagttaaaaaatattttt

SEQ ID NO: 592399 - DNA, 75 bp, synthetic construct
  source 1..75: mol_type = other DNA
caaggtaaatggccttgcctgctaacaaaaagtgatacaacaggtgagaaagactttgaggagttttttacagag

SEQ ID NO: 592400 - DNA, 75 bp, synthetic construct
  source 1..75: mol_type = other DNA
tggctgacggataccggaaacaaaactgcggaaaaggccgacgcagaggtgaagacaggggcgtttattcagaac

SEQ ID NO: 592401 - DNA, 75 bp, synthetic construct
  source 1..75: mol_type = other DNA
gtcaggtccagaagtgggagcgtatctgcgccgcgctacgggagctgaataaacaccgggacgttgtccggcaga

SEQ ID NO: 592402 - DNA, 75 bp, synthetic construct
  source 1..75: mol_type = other DNA
ggatttcacgctaaacagccttcttcccggtgaaaaaaagttggcggaagaatttgcagtatcccggatgaccat

SEQ ID NO: 592403 - DNA, 75 bp, synthetic construct
  source 1..75: mol_type = other DNA
cgagtcccctatagactacatttataatataataaaaaactatattataagtgatccatttttttgcaattatga

SEQ ID NO: 592404 - DNA, 69 bp, synthetic construct
  source 1..69: mol_type = other DNA
atgattccatggttacctctgctttttgaacgcatgtcacgtaacttcttaatgtgttctgccgtttcg

SEQ ID NO: 592405 - DNA, 75 bp, synthetic construct
  source 1..75: mol_type = other DNA
aatccgcaacgcgcagtatcatgacagctaaagatctagcatatctaattaaatttgatgggaattataaagatg

SEQ ID NO: 592406 - DNA, 75 bp, synthetic construct
  source 1..75: mol_type = other DNA
ggatgtggtatttggccgaaagatggttattgggtattgctgggtaattgaataccgacagcgtaaggggttgca

SEQ ID NO: 592407 - DNA, 75 bp, synthetic construct
  source 1..75: mol_type = other DNA
gtgttttcaacatcgacatcgaggtctgtgaacactgcggtggccaagtcaaagtgattgcaagcattgaagacc

SEQ ID NO: 592408 - DNA, 75 bp, synthetic construct
  source 1..75: mol_type = other DNA
gtctgccggtgcgattacgggtggaattgcaggcggtgtcatcactgtggcgattctgctcattcgcgcaaaact

SEQ ID NO: 592409 - DNA, 75 bp, synthetic construct
  source 1..75: mol_type = other DNA
catcctgactatgagcgcctcattcaaatagccgatgaagctctgtatatcgccaaaagacgaggtagaaaccgt

SEQ ID NO: 592410 - DNA, 75 bp, synthetic construct
  source 1..75: mol_type = other DNA
cggggcacaaacctcggcggaacacattaaaccggatgtggtgattgtgctggataccgctgtcgcaggtgatgt

SEQ ID NO: 592411 - DNA, 75 bp, synthetic construct
  source 1..75: mol_type = other DNA
tctggctgaaaagcgaagcgttgatgtgggcagtcacctacatcggcgtgattgtctttgtcggattgacggcgt

SEQ ID NO: 592412 - DNA, 75 bp, synthetic construct
  source 1..75: mol_type = other DNA
ttttagcagcattagtccaatatagtgctgatcctgcatttcaatatatcgacggaattgacatccgaaaacaac

SEQ ID NO: 592413 - DNA, 75 bp, synthetic construct
  source 1..75: mol_type = other DNA
caacacagacgcaaccaaaaggtgtcatcactggcgtcataaaaggaaaagcatattttaagtcatggtcaccaa

SEQ ID NO: 592414 - DNA, 75 bp, synthetic construct
  source 1..75: mol_type = other DNA
aagaaagaggaaaacagaaggaatcatgtaaaaaataaaaacttcatgaaattaatgggtaaagaaattggtggg

SEQ ID NO: 592415 - DNA, 75 bp, synthetic construct
  source 1..75: mol_type = other DNA
cctgtacgcgtgcaagacgatgccttctcgttgattataataagaccggagccaaaaagagtatcgaaactggaa

SEQ ID NO: 592416 - DNA, 75 bp, synthetic construct
  source 1..75: mol_type = other DNA
cttaataccctctctggtcaggtcataactgaaaccagagcccgaacagaaggtgatgcaacagcgctggctgca

SEQ ID NO: 592417 - DNA, 75 bp, synthetic construct
  source 1..75: mol_type = other DNA
cagcgccgagtcggctatgtcctcccttgaagggctggccggtttcatgcgtagcaatccgggggcggaaggctt

SEQ ID NO: 592418 - DNA, 75 bp, synthetic construct
  source 1..75: mol_type = other DNA
actggatggggccattgttcaataagctggagtctctttatcagctgcctgctggcttgttgaaaagcgtggcga

SEQ ID NO: 592419 - DNA, 75 bp, synthetic construct
  source 1..75: mol_type = other DNA
tatcgggtgacccctcccagtttgcgcaatcagtcaaacgtccacaggccacagcccagggcaaagtattgctcg

SEQ ID NO: 592420 - DNA, 75 bp, synthetic construct
  source 1..75: mol_type = other DNA
ttattttacccataatgaggtcacaaaatataccattggcactgttggaaatttaccactggaacacgccattag

SEQ ID NO: 592421 - DNA, 75 bp, synthetic construct
  source 1..75: mol_type = other DNA
acgccggtaacccatgggcaccaggtgaagttgctaaagcactgggtttaggtaaagtgccaattttttctacat

SEQ ID NO: 592422 - DNA, 75 bp, synthetic construct
  source 1..75: mol_type = other DNA
atggcaacgggcaggcttgtgggtagtgacacgttctgatccagaatatccatggagattaaaacatcggcttaa

SEQ ID NO: 592423 - DNA, 75 bp, synthetic construct
  source 1..75: mol_type = other DNA
gctggtggtcttgctggttcgctggacagcctgcggcggcgcatcctcgacaacttcccgaagattgaagagacg

SEQ ID NO: 592424 - DNA, 75 bp, synthetic construct
  source 1..75: mol_type = other DNA
tctctcattacacttaactcatacggtgaaatggactgaatctctcgatacatattctgaatatgccaaccccgg

SEQ ID NO: 592425 - DNA, 75 bp, synthetic construct
  source 1..75: mol_type = other DNA
ctccaacgtccagcccgacatccccggcggcggtactcttgctgatcgcaacaataaccccgggaacattcgccc

SEQ ID NO: 592426 - DNA, 75 bp, synthetic construct
  source 1..75: mol_type = other DNA
aagagatgaaataaaaaaccgtcagcaggctgctaatggttatcttgaaaaaatctcagacgggattgccaaaat

SEQ ID NO: 592427 - DNA, 75 bp, synthetic construct
  source 1..75: mol_type = other DNA
aatcatctttggactataccaaaaggaacattggtgatgctcttgctacggttggcatcaaaaccgaccttgggc

SEQ ID NO: 592428 - DNA, 75 bp, synthetic construct
  source 1..75: mol_type = other DNA
cctgcaatagaaaaggcgaaaaaggcaattctctggctgcgcgataagcttctggggctgaaagattctgttggt

SEQ ID NO: 592429 - DNA, 75 bp, synthetic construct
  source 1..75: mol_type = other DNA
tttctctccggcagactgcgggaaaaaatcgaggatgagtttcccgaaatcaccgttccgctgattaaccgtcag

SEQ ID NO: 592430 - DNA, 75 bp, synthetic construct
  source 1..75: mol_type = other DNA
ttaatcttactcaggaaacactttttagctccaaatctcatggtaaatatgcgcttttcccaatttttactgcga

SEQ ID NO: 592431 - DNA, 75 bp, synthetic construct
  source 1..75: mol_type = other DNA
ggctgattgataaaaataacaatttttttatccaacttatcgatcaggccttacgatcaacggatgatatgatca

SEQ ID NO: 592432 - DNA, 75 bp, synthetic construct
  source 1..75: mol_type = other DNA
actcaggatccgattgggctgaaggggggatggaatttttatcagtatccgctgaatccggttcagtatatagat

SEQ ID NO: 592433 - DNA, 75 bp, synthetic construct
  source 1..75: mol_type = other DNA
acctacgctgaccagaaagaaaccgccatcaataaccgtactgacggattactgatgaccgaacgccaggcacgc

SEQ ID NO: 592434 - DNA, 75 bp, synthetic construct
  source 1..75: mol_type = other DNA
tgtggccgcaggcattcagtataaaacatcacgtaataccaatatacgcctcaacatctcctgggactcatctca

SEQ ID NO: 592435 - DNA, 75 bp, synthetic construct
  source 1..75: mol_type = other DNA
atgctctaaaaaaaatcattaaacgaattattttagcgctttttttttgtagaaaagaaaataatatttatttca

SEQ ID NO: 592436 - DNA, 75 bp, synthetic construct
  source 1..75: mol_type = other DNA
ttcttggcgcattaaccctgtatctggacttcatcaacctgttcctgatgttgttgcggatttttggcaaccgcc

SEQ ID NO: 592437 - DNA, 75 bp, synthetic construct
  source 1..75: mol_type = other DNA
atgccttacgagtttttgatgccgcagcacgccatttaagtttcactcgcgcagcagaagagctttttgtgaccc

SEQ ID NO: 592438 - DNA, 75 bp, synthetic construct
  source 1..75: mol_type = other DNA
tgcgatattccccgcgatgcacaggtgatgaatgccccccacagggatagtcaccctgaagaaagttatctgata

SEQ ID NO: 592439 - DNA, 75 bp, synthetic construct
  source 1..75: mol_type = other DNA
aaagcttactctggcagcctcaaaattgcgggtgcggtagctcctgctctgctgactaatgcaatctgcgcttac

SEQ ID NO: 592440 - DNA, 75 bp, synthetic construct
  source 1..75: mol_type = other DNA
aagatatcttcttccacgtcatgaggcatttagagctatattactgggtactgagttgacttatagcgagtcaac

SEQ ID NO: 592441 - DNA, 75 bp, synthetic construct
  source 1..75: mol_type = other DNA
attgggctggcggggggatggaatctgtataattacccactgaatccgataataaggatggatcctttgggtttg

SEQ ID NO: 592442 - DNA, 75 bp, synthetic construct
  source 1..75: mol_type = other DNA
ttggacataaaataacagaagaattagagtcatcagagcatgaatatatatttagaggattaagaaaaggcataa

SEQ ID NO: 592443 - DNA, 75 bp, synthetic construct
  source 1..75: mol_type = other DNA
ttatcagtatccgttgaatccggtatctggtttcgatccattagggttaaaagtgtcttttcagggagatgaaag

SEQ ID NO: 592444 - DNA, 75 bp, synthetic construct
  source 1..75: mol_type = other DNA
actgctgagggattagccaagagaatcagagctaatccacgctataaaaagggaatgtctgtttggttattctca

SEQ ID NO: 592445 - DNA, 75 bp, synthetic construct
  source 1..75: mol_type = other DNA
atatcttagcaatgaactcatatttcttgagagaggaattaatatatcagtaaggttgcaaaagaagaaatcctc

SEQ ID NO: 592446 - DNA, 75 bp, synthetic construct
  source 1..75: mol_type = other DNA
gctggcagtgaatcagtatatacgtattcagatgcatcatttgatggaactaatatcacactatctggtatttct

SEQ ID NO: 592447 - DNA, 75 bp, synthetic construct
  source 1..75: mol_type = other DNA
gttttaaagaattgtctgggcttgatcttactaaacaacagtttgcagatttttgtttatacagcgagtttggtc

SEQ ID NO: 592448 - DNA, 75 bp, synthetic construct
  source 1..75: mol_type = other DNA
gcttaatattttggctggcggtaatgcctccttaaccactattactaccagcgtcattggcggtaatgaggattc

SEQ ID NO: 592449 - DNA, 75 bp, synthetic construct
  source 1..75: mol_type = other DNA
actctataatggatatttcggtaatggcgcagtcaatatttccaataatggactaattaataacaaagaatattc

SEQ ID NO: 592450 - DNA, 75 bp, synthetic construct
  source 1..75: mol_type = other DNA
ggcagtaatggccaggttgtcgttgaaaagggtggcgagtggctaataaaaataacgattcctcaattgaatttc

SEQ ID NO: 592451 - DNA, 75 bp, synthetic construct
  source 1..75: mol_type = other DNA
atcggaaccctgaatgtgcaggatcaagactctgtcatcacggtacgcagactctataatgaatatttcggtaat

SEQ ID NO: 592452 - DNA, 75 bp, synthetic construct
  source 1..75: mol_type = other DNA
accggcaatgaagggattgtggcgcatgatgttgagcagtcgattgccaacctgtgtgcgttagcaagccattcg

SEQ ID NO: 592453 - DNA, 75 bp, synthetic construct
  source 1..75: mol_type = other DNA
gttcaatagtcgccattttaggatatcaagcgaacagtaatggtaaggttgtcgttgaaaagggtggcgagtggc

SEQ ID NO: 592454 - DNA, 75 bp, synthetic construct
  source 1..75: mol_type = other DNA
tatctagcttgatatatttgatttcaaaaattgaggataatgaaaaaataatagaatcaatttatatatcatctg

SEQ ID NO: 592455 - DNA, 75 bp, synthetic construct
  source 1..75: mol_type = other DNA
gccggagacaacggaatcggagctgcatgagcttatccgtccacggctgcgcgaccacttccagccagcactgct

SEQ ID NO: 592456 - DNA, 75 bp, synthetic construct
  source 1..75: mol_type = other DNA
cgctgattatcgccgctggcgaaggtcgcagttgtgccatggaggcgctcaggttcgccaaagcggggagctttg

SEQ ID NO: 592457 - DNA, 75 bp, synthetic construct
  source 1..75: mol_type = other DNA
gctcaccatatgcaaaccaaattgatcgaacaggatgctggtgaggcccgacagccaatgacattaattatggta

SEQ ID NO: 592458 - DNA, 75 bp, synthetic construct
  source 1..75: mol_type = other DNA
atgaattttccgggcaacacccaattcacggactgccgccactggcggaggccaaccctgaaatgacgttcctgg

SEQ ID NO: 592459 - DNA, 75 bp, synthetic construct
  source 1..75: mol_type = other DNA
gcatgatgaggatggtattgtgatagcgtttgatggaatcaatagcgattatccgcaggaaagcatatatggaca

SEQ ID NO: 592460 - DNA, 75 bp, synthetic construct
  source 1..75: mol_type = other DNA
cacatcggttgatgaacgtgtgtacgatgccctgacatcagcctgcctgctgccggatacgggcgcccggaatgt

SEQ ID NO: 592461 - DNA, 75 bp, synthetic construct
  source 1..75: mol_type = other DNA
atgcagcggctacacataggctgtgctttcttacaggcactggattttcaaaggctgtttctgatgataaagccc

SEQ ID NO: 592462 - DNA, 75 bp, synthetic construct
  source 1..75: mol_type = other DNA
gcgatcaactggtcgtcaacaacaacgccactggcaattttaaaatctttgttcaggataccggcgtcagccctc

SEQ ID NO: 592463 - DNA, 75 bp, synthetic construct
  source 1..75: mol_type = other DNA
attcagcagtacgttaagcggacatctcggggtggggtatagccatggtgccggtgtggaatccccgtggaacgc

SEQ ID NO: 592464 - DNA, 75 bp, synthetic construct
  source 1..75: mol_type = other DNA
tgggtattattgttaatgccggccattcaagaagtttatgctatgaagcattaaattatgcgaaatcaggtgatt

SEQ ID NO: 592465 - DNA, 75 bp, synthetic construct
  source 1..75: mol_type = other DNA
aagaattaaataatccagagcatgacagttacgcaatttgtgaaaagagtcacggcagagaagaaatccgtattc

SEQ ID NO: 592466 - DNA, 75 bp, synthetic construct
  source 1..75: mol_type = other DNA
agaaagtctaactcaacttttgattattccatgcttcccgaatccaatgaaatcaaggttggcaagacaatgatt

SEQ ID NO: 592467 - DNA, 75 bp, synthetic construct
  source 1..75: mol_type = other DNA
ttttttctccggctgacaaggaattatctaaaaataaagctatttcgagttaccttggtacacctaaaggttcat

SEQ ID NO: 592468 - DNA, 75 bp, synthetic construct
  source 1..75: mol_type = other DNA
gcgaacgccagacggtggagaacccggagacgggggaactgctgtggcagcatgagacgaaacacgcatacaacg

SEQ ID NO: 592469 - DNA, 75 bp, synthetic construct
  source 1..75: mol_type = other DNA
agcgtcacgcgcagcgggtatgacccggtggggcggcttacggcgcagacggacgcggcgggacggcggacagag

SEQ ID NO: 592470 - DNA, 75 bp, synthetic construct
  source 1..75: mol_type = other DNA
tgatgtctgctacaactttaccaacgtaaaattgttcggtctgaatgccggggcgagttatggaccgctggcgag

SEQ ID NO: 592471 - DNA, 75 bp, synthetic construct
  source 1..75: mol_type = other DNA
gaatgaagatttcgatcgctattaccgccagacgcttttagcggtcaaaaacaatacgctctcaccgcgcaccgg

SEQ ID NO: 592472 - DNA, 75 bp, synthetic construct
  source 1..75: mol_type = other DNA
cagcagcccggtaaccggtggcagcatccttggtgacaagacacgtatgaccgaactggctcgtgccgatgcggc

SEQ ID NO: 592473 - DNA, 75 bp, synthetic construct
  source 1..75: mol_type = other DNA
taccggggccggatggtggcgcaccgccgcgcgggccggccggaaatccgttaccgttacgacagcgacgggcgg

SEQ ID NO: 592474 - DNA, 75 bp, synthetic construct
  source 1..75: mol_type = other DNA
aaagctggtaactggactgagacatcgcaccgttctggtattgatcgtaccgtccccagctacattcaacatcag

SEQ ID NO: 592475 - DNA, 75 bp, synthetic construct
  source 1..75: mol_type = other DNA
actgaaaacgacaataaaagcggaaaaaacatctaccgaacaacccgtgttagccataccgtcttcagccactgg

SEQ ID NO: 592476 - DNA, 75 bp, synthetic construct
  source 1..75: mol_type = other DNA
aatgcaggaacgaacgcctataagctaactattcccgatattcgtctcgatcaattgcgtgctaaaggtgccgag

SEQ ID NO: 592477 - DNA, 75 bp, synthetic construct
  source 1..75: mol_type = other DNA
aatacaagagttaaattagtcatcaataaaattaagttgaaaaataaatatattagattattgctttatcttttt

SEQ ID NO: 592478 - DNA, 75 bp, synthetic construct
  source 1..75: mol_type = other DNA
ctatttcagctgattcacttgcaaatggcggtgctgaaaaaattgcatgtaatcttgcaaatatattaagcgatg

SEQ ID NO: 592479 - DNA, 75 bp, synthetic construct
  source 1..75: mol_type = other DNA
atggagcgagacccaacaaaccgcctacgcccgatccaagtaaattgccggacatagcgaaacaattaagactgc

SEQ ID NO: 592480 - DNA, 75 bp, synthetic construct
  source 1..75: mol_type = other DNA
tgtggtaacgccctgcgactgggcgttaccggcacacccggcgcggggaaaagtacctttcttgaagcctttggc

SEQ ID NO: 592481 - DNA, 75 bp, synthetic construct
  source 1..75: mol_type = other DNA
accggcgagcgccagacggtgcataacccggagacgggggaactgctctggctgcatgagacaaaacacgcctac

SEQ ID NO: 592482 - DNA, 75 bp, synthetic construct
  source 1..75: mol_type = other DNA
cttacgatgataaataccggggccggatggtggcgcaccgttacgcaggcaggccggagatgcgttaccgctatg

SEQ ID NO: 592483 - DNA, 75 bp, synthetic construct
  source 1..75: mol_type = other DNA
gtgacgtggtacggctgggacggcgaccggctgacgacggtacagaccgacaccacgcgtatccagacggtatac

SEQ ID NO: 592484 - DNA, 75 bp, synthetic construct
  source 1..75: mol_type = other DNA
agccgggcgtggctggcgcagtgcgggctgacggtggagcggctggcggcacagatagagccggtttatttacct

SEQ ID NO: 592485 - DNA, 75 bp, synthetic construct
  source 1..75: mol_type = other DNA
tatcgaaacagagaatggtgagctgcagaaagcgcagcgccgcagcctggcggagaagttgcagcaggaaggaag

SEQ ID NO: 592486 - DNA, 75 bp, synthetic construct
  source 1..75: mol_type = other DNA
gggaaacgggtgtggcgtcgcgagcgtgatctgacaggatggatgtcgctgtcgcgtaaaccggaggtgacgtgg

SEQ ID NO: 592487 - DNA, 75 bp, synthetic construct
  source 1..75: mol_type = other DNA
ctggatactaaattctcttaccaattatgcctcaaaatgttttatcttaaaattaagttattctgttattgtatt

SEQ ID NO: 592488 - DNA, 75 bp, synthetic construct
  source 1..75: mol_type = other DNA
ctgtacttaataaacaagaactcttctatttaaaatcaagatacaaagaaatgaagaaacttgctaataagcatg

SEQ ID NO: 592489 - DNA, 75 bp, synthetic construct
  source 1..75: mol_type = other DNA
cgcgtcatcaggcactaagtacgcagctgcttgatgccattatgccgtactgcggtaacgccctgcgactgggcg

SEQ ID NO: 592490 - DNA, 75 bp, synthetic construct
  source 1..75: mol_type = other DNA
atgagcggaaaaccggcagcacgtcagggcgatgccacaatgaaaggtggcccgatagtccaggggtcggcaggc

SEQ ID NO: 592491 - DNA, 75 bp, synthetic construct
  source 1..75: mol_type = other DNA
cagttaacctcagccaccgggcctgacggactggaaatgcgccggaaatatgatgagtacgggcgtctgacgcag

SEQ ID NO: 592492 - DNA, 75 bp, synthetic construct
  source 1..75: mol_type = other DNA
attcgcggatggcagcatcacccgaagtaaatttgactatatggggcgactccagtcacagacggatgcagcagg

SEQ ID NO: 592493 - DNA, 75 bp, synthetic construct
  source 1..75: mol_type = other DNA
aactcaatgataaggatctgattattttacctaagaaactggtaaagccaatgcaagtacttatggatggcgatt

SEQ ID NO: 592494 - DNA, 75 bp, synthetic construct
  source 1..75: mol_type = other DNA
ttctggcgaaggtgtttttgtctttaatcatactaataacagtgatgccggctaccaggtcgatatgctgattac

SEQ ID NO: 592495 - DNA, 75 bp, synthetic construct
  source 1..75: mol_type = other DNA
atcagcaacattgccgcctcaggggtcggcaagcagtatgtggatgcgtcatgtcggagggcacgaacgttcaag

SEQ ID NO: 592496 - DNA, 75 bp, synthetic construct
  source 1..75: mol_type = other DNA
gaaggtggagaagtttacttaggtgtttttgagcctgctgtaggaacgctaaacattggtgctgctcacggtgag

SEQ ID NO: 592497 - DNA, 75 bp, synthetic construct
  source 1..75: mol_type = other DNA
gacgaataacggcacgctgaatgtcgaaggtggagaagtttacttaggtgtttttgagcctgctgtaggaacgct

SEQ ID NO: 592498 - DNA, 75 bp, synthetic construct
  source 1..75: mol_type = other DNA
acggcctctgttgagggtgggtatacctttgaagcgggaacatttagcggcagcgaagggacgctgaatacctgg

SEQ ID NO: 592499 - DNA, 75 bp, synthetic construct
  source 1..75: mol_type = other DNA
cgacaagatgtttggctttacccatgcaacagggactgaattcgccggtgttgcccaactgaaagacagtacctt

SEQ ID NO: 592500 - DNA, 75 bp, synthetic construct
  source 1..75: mol_type = other DNA
gatttcggttttgtggatattgacttctggaacaaaactcagcatcgattcctgagattagtgcgccaaattgaa

SEQ ID NO: 592501 - DNA, 75 bp, synthetic construct
  source 1..75: mol_type = other DNA
gcctatggggatttggctatgatttcgacaacatgaaagcccgctgttggtacgaacaccgtttcccgctgctgc

SEQ ID NO: 592502 - DNA, 75 bp, synthetic construct
  source 1..75: mol_type = other DNA
tatcgacttctggaacaaaactcagcatcgctttctgaggttagtgcgccaaattgaagaaggtcaggatgcgga

SEQ ID NO: 592503 - DNA, 75 bp, synthetic construct
  source 1..75: mol_type = other DNA
ttgtcgttgaaaagggtggcgagtggctaataaaaaataacgattcctcaattgaatttcaaattggtaatcaag

SEQ ID NO: 592504 - DNA, 75 bp, synthetic construct
  source 1..75: mol_type = other DNA
ttcttggaagcgcataaaatgcgcgtccaagctgacggtaaagccgcaaacttcaggaaagaaaaagaggtttac

SEQ ID NO: 592505 - DNA, 75 bp, synthetic construct
  source 1..75: mol_type = other DNA
gcattccggccaggcacccggcggcatggtgggcatcactgcgctggatgccgcgcagttgttccgtgaggcaat

SEQ ID NO: 592506 - DNA, 75 bp, synthetic construct
  source 1..75: mol_type = other DNA
agccgcaatacacagagtccctgcgagttcaggattcggcaaccagtatgtggatgcgacatgtcggggggcatg

SEQ ID NO: 592507 - DNA, 75 bp, synthetic construct
  source 1..75: mol_type = other DNA
ttgctggcgcacaggagaagacagcactgctcagaataggcaatgactggtgcattccgaaaggaataacgccga

SEQ ID NO: 592508 - DNA, 75 bp, synthetic construct
  source 1..75: mol_type = other DNA
gtctggggggacactgcgtgtcgctaaaaccacaatcggcgaatcggcggcaacctggagaatggcggcacggtt

SEQ ID NO: 592509 - DNA, 75 bp, synthetic construct
  source 1..75: mol_type = other DNA
gcggatcatggcgtttttgatggggtccagcgaggcgcttcgcgatcgttatgattttattaaattccaggtctt

SEQ ID NO: 592510 - DNA, 75 bp, synthetic construct
  source 1..75: mol_type = other DNA
atgcgaacaaaggcctggcgcagaacatggtgtcccagggcggcggctggtatgacatgtggaactacgtgaacg

SEQ ID NO: 592511 - DNA, 75 bp, synthetic construct
  source 1..75: mol_type = other DNA
cggaactgcgcgtcttcgcctcttacctgaatgactccgagaaaggacaatccttcgaagacggcaccgcaaata

SEQ ID NO: 592512 - DNA, 75 bp, synthetic construct
  source 1..75: mol_type = other DNA
ctgggccaacggtggcgaagtgttggtgctcaactttgaagacggttgctcgacgaccaacatcatcaagaagat

SEQ ID NO: 592513 - DNA, 75 bp, synthetic construct
  source 1..75: mol_type = other DNA
tggttgtctggagattcagggggccagtctagtatcggcacactgaacctgatggatgcgacatcatcgttcgat

SEQ ID NO: 592514 - DNA, 75 bp, synthetic construct
  source 1..75: mol_type = other DNA
ccggaaagacggaacacgcattgaaacggaaggcgacggaaacgtgcaaacgcgacttggggtgaaaacctacct

SEQ ID NO: 592515 - DNA, 75 bp, synthetic construct
  source 1..75: mol_type = other DNA
attaataacaaagaatattcattggtgggcgttcaggacggttcccacggtgtcgtcaacgtgaccgataaaggg

SEQ ID NO: 592516 - DNA, 75 bp, synthetic construct
  source 1..75: mol_type = other DNA
attacggataagggttacgtcacgagttcaatagtcgccattttaggctatcaggcgggcagtaatggccaggtt

SEQ ID NO: 592517 - DNA, 75 bp, synthetic construct
  source 1..75: mol_type = other DNA
cagataccgaagctgcggctggctgcgcaaacagcttcacggattctaagtctgttacggagtgcattgaaagaa

SEQ ID NO: 592518 - DNA, 75 bp, synthetic construct
  source 1..75: mol_type = other DNA
actaccactacgacagccagcaccggctggtgttcgacacgcggatacagcaaggggagccacaggtcgagagcc

SEQ ID NO: 592519 - DNA, 75 bp, synthetic construct
  source 1..75: mol_type = other DNA
actaccactacgacagccagcaccggctggtgttctacacgcggatacagcaaggggagccactggtcgagagcc

SEQ ID NO: 592520 - DNA, 75 bp, synthetic construct
  source 1..75: mol_type = other DNA
actaccactacgacagccagcaccggctggtgttcaacacgcggatacagcaaggggagccacgggtcgagagcc

SEQ ID NO: 592521 - DNA, 75 bp, synthetic construct
  source 1..75: mol_type = other DNA
ggaccgcctgcaccgggaaactgcgcgcagctttggtaacggaacgggcagtacagccgcatatgaactgaccag

SEQ ID NO: 592522 - DNA, 75 bp, synthetic construct
  source 1..75: mol_type = other DNA
acgcagggcgggctgacgcgcagtatggagtatgacgcggcaggacgtgtcaccacgctgaccaacgagaacggc

SEQ ID NO: 592523 - DNA, 75 bp, synthetic construct
  source 1..75: mol_type = other DNA
ccggacagtacactcacagtgtggccggataaccgcatcgcggaggatgcgcactatgtctaccgccacgatgaa

SEQ ID NO: 592524 - DNA, 75 bp, synthetic construct
  source 1..75: mol_type = other DNA
gacagcctgcaccgcctggtccattacatccgtatccaatatgaggagccgctggtcgagagccgatacctttac

SEQ ID NO: 592525 - DNA, 75 bp, synthetic construct
  source 1..75: mol_type = other DNA
agcgaagacggcaatacggcgtggagcgcggaatatgatgaatggggcaaccagcttaatgaggagaacccgcat

SEQ ID NO: 592526 - DNA, 75 bp, synthetic construct
  source 1..75: mol_type = other DNA
aggagtcggggctggattataaccgtcaccggtactacgatccgttgcaggggcggtatatcacccaggacccga

SEQ ID NO: 592527 - DNA, 75 bp, synthetic construct
  source 1..75: mol_type = other DNA
actaccactacgacagccagcaccgcctggtgttccacacgcggatacagcaaggggagccacaggtcgagagcc

SEQ ID NO: 592528 - DNA, 75 bp, synthetic construct
  source 1..75: mol_type = other DNA
actaccactacgacagccagcaccgcctggtgttcaacacgcggatacagcaaggggagccaccggtcgagagcc

SEQ ID NO: 592529 - DNA, 75 bp, synthetic construct
  source 1..75: mol_type = other DNA
actaccactacgacagccagcaccgactggtgttcaacacgcggatacagcaaggggagccacaggtcgagagcc

SEQ ID NO: 592530 - DNA, 75 bp, synthetic construct
  source 1..75: mol_type = other DNA
agacggcaatacggcgtggcgcggggagtatgatgaatggggcaaccagcttaatgaggagaacccgcatcatgt

SEQ ID NO: 592531 - DNA, 75 bp, synthetic construct
  source 1..75: mol_type = other DNA
tggatacgcatcccatcatcaggatgtccattgaagtccttttagaaaaacatgacaatctgcaaattgtgttaa

SEQ ID NO: 592532 - DNA, 75 bp, synthetic construct
  source 1..75: mol_type = other DNA
tccggtttgtcatacaccgttggcccagggaaaaaatctggaaaagctacatcggaagaggaattttcagaacag

SEQ ID NO: 592533 - DNA, 75 bp, synthetic construct
  source 1..75: mol_type = other DNA
acctgcaccagccataccgtctgccggggcagcagcatgatgaggaatcagggctgtactataaccggaaccggt

SEQ ID NO: 592534 - DNA, 75 bp, synthetic construct
  source 1..75: mol_type = other DNA
gaaggtcaggatgcggacgaattactcggcaaatggcaaaaggaaatttggttattcgcgcgtcaggattttgac

SEQ ID NO: 592535 - DNA, 75 bp, synthetic construct
  source 1..75: mol_type = other DNA
aagccgcctgccaggtagcgcacgcatttggtgtcagtgaaacgattgtcgaagatgattttttcaccgccgttg

SEQ ID NO: 592536 - DNA, 75 bp, synthetic construct
  source 1..75: mol_type = other DNA
ggacgggccattcaggctggtgccagtggtttcgtcagtaaatgtcatgatcaaaatgacattttccatgctgta

SEQ ID NO: 592537 - DNA, 75 bp, synthetic construct
  source 1..75: mol_type = other DNA
agtcagcaattcagtaggtgtaacggttggcggcggagttgggggggcattttgcgtatacttatgtagtggatg

SEQ ID NO: 592538 - DNA, 75 bp, synthetic construct
  source 1..75: mol_type = other DNA
caccactaccactacgacagccagcaccggctggtgttttacacgcggatacagcatgaggagccactggtcgag

SEQ ID NO: 592539 - DNA, 75 bp, synthetic construct
  source 1..75: mol_type = other DNA
gcttgaccgcctgatacagcagcgcggctttgacgggcggacgcagcgttaccgttatgacctgaccgggaaact

SEQ ID NO: 592540 - DNA, 75 bp, synthetic construct
  source 1..75: mol_type = other DNA
atgatgaatggggcaaccagcttaatgaggagaacccgcatcacctgcaccagccgtaccggctgccggggcagc

SEQ ID NO: 592541 - DNA, 75 bp, synthetic construct
  source 1..75: mol_type = other DNA
tgacaggctgaccactgtacagacccaacagacaagaatccagacggtataccagccgggaagcttcacgccgct

SEQ ID NO: 592542 - DNA, 75 bp, synthetic construct
  source 1..75: mol_type = other DNA
gggcacggctggctgacagacatcagccatctcagcgaaggccaccgggtggcggtgcattacggctatgacgat

SEQ ID NO: 592543 - DNA, 75 bp, synthetic construct
  source 1..75: mol_type = other DNA
catccttactatctgggggtgaaaagcaacgcgtcgcactagccagagcattaataaaaaagccccaaatattat

SEQ ID NO: 592544 - DNA, 75 bp, synthetic construct
  source 1..75: mol_type = other DNA
acaaaaaaggttcaaagattttatactgaaaaatcttgaagaaaattatttcaatgaaacagagagatatccaat

SEQ ID NO: 592545 - DNA, 75 bp, synthetic construct
  source 1..75: mol_type = other DNA
acgacaaaaaccagatgctgtacagcatgaaggtccccccgccgctgtggcgtgccggtctgcgccagaacttcc

SEQ ID NO: 592546 - DNA, 75 bp, synthetic construct
  source 1..75: mol_type = other DNA
agactgttggaactctataatcaactcccaaacgaagaagaacaacagaacatgttgcggatcgtatctctacgg

SEQ ID NO: 592547 - DNA, 75 bp, synthetic construct
  source 1..75: mol_type = other DNA
cttctggccgcggcagttcttcgtgatgttctatgccgtgcacctggcggtactgggtattgtcgtctcaatgtg

SEQ ID NO: 592548 - DNA, 75 bp, synthetic construct
  source 1..75: mol_type = other DNA
atgtctattaagcaaaatttatttgccgcattatttctttgcactctcacaggacacgcatttgcagcaaccgag

SEQ ID NO: 592549 - DNA, 75 bp, synthetic construct
  source 1..75: mol_type = other DNA
attgtcgggatctgcacagccattttcgttgccagcgtattgtggttaagttcgttagccgccagtcgtatgacc

SEQ ID NO: 592550 - DNA, 75 bp, synthetic construct
  source 1..75: mol_type = other DNA
ccgaaaaggaacgcctgtatgatatgcaacttaaaaatctgcagtcactgttagatatgaaggagttactcggcg

SEQ ID NO: 592551 - DNA, 75 bp, synthetic construct
  source 1..75: mol_type = other DNA
attagatatgaaaaaaacaaaagtgctgaatgtcgaatcattgttatcgctaatcctaaacccgacaaggcaatc

SEQ ID NO: 592552 - DNA, 75 bp, synthetic construct
  source 1..75: mol_type = other DNA
tcccgtgagttttgtgtccagtacggtgagactgattacgatttcctgtgccggatggcggcggaggaaggcatc

SEQ ID NO: 592553 - DNA, 75 bp, synthetic construct
  source 1..75: mol_type = other DNA
agctggttaataagttacacgatgtggcaatcaaatatcacggaacgcagcaattacgggcgcatattgcaaaaa

SEQ ID NO: 592554 - DNA, 75 bp, synthetic construct
  source 1..75: mol_type = other DNA
catcgttaatctccgcttttatgccaaattttattaaaaataaaaactttgagtttgacattaaggtttatttta

SEQ ID NO: 592555 - DNA, 75 bp, synthetic construct
  source 1..75: mol_type = other DNA
gggaaaaactccgcacttaagctagctgatgcgcttggtgtgaatttagcctgggttttggggcaggatataggg

SEQ ID NO: 592556 - DNA, 75 bp, synthetic construct
  source 1..75: mol_type = other DNA
ttttgaaattgagctgcaaaagccaaagaaaggcccacttcccggtgattatcacattggctatgacacaggtgc

SEQ ID NO: 592557 - DNA, 75 bp, synthetic construct
  source 1..75: mol_type = other DNA
ggacaagtttacttttctcgagacaatcgaataaccaaaagctttaaactcgacaaaagacgaaggaaggggatt

SEQ ID NO: 592558 - DNA, 75 bp, synthetic construct
  source 1..75: mol_type = other DNA
aagaataataaaacttcagtgttgttaatcattattatcctcgcaatgatccttggcgtggttaaaattcaggtc

SEQ ID NO: 592559 - DNA, 75 bp, synthetic construct
  source 1..75: mol_type = other DNA
tgatgttgcagttactgagtcgtacaaacccatctggaactggaaaatatcgcaatacaatgtatctgatattaa

SEQ ID NO: 592560 - DNA, 75 bp, synthetic construct
  source 1..75: mol_type = other DNA
atcgggcatgcgtgttcatatcctacgcaggaataatagttatcagtttattgtgacaattaatggaaaaaatta

SEQ ID NO: 592561 - DNA, 75 bp, synthetic construct
  source 1..75: mol_type = other DNA
aaattgatgattggcaaatagaacgtttccaacaatctattcgagatgacaaaatatcatttaccatacaaacga

SEQ ID NO: 592562 - DNA, 75 bp, synthetic construct
  source 1..75: mol_type = other DNA
tccgcaggccgtcaagccggtaacccgctgaacgacctgtccgaacaactgaccaccgtcatgaccaagttgtca

SEQ ID NO: 592563 - DNA, 75 bp, synthetic construct
  source 1..75: mol_type = other DNA
ttatttacgtcagcagaatttgtcactgattttgcaggcagtggtcgtgaatatctttttgggctggctgtgacg

SEQ ID NO: 592564 - DNA, 75 bp, synthetic construct
  source 1..75: mol_type = other DNA
ttggactggcgatgggcgatgcagacctatcgcggtgacgctgtagatggaatactggatataacgttaaagctg

SEQ ID NO: 592565 - DNA, 75 bp, synthetic construct
  source 1..75: mol_type = other DNA
tttgccgcagattgatgccctgcgtaatggatgcgtgttggtgatcgctctcctggttctgctgcgtttgttggt

SEQ ID NO: 592566 - DNA, 75 bp, synthetic construct
  source 1..75: mol_type = other DNA
acatagatttgtgtaattgcctgattttgatatgttcaatccagcatcaaatgaaggttaatttatggacgaaaa

SEQ ID NO: 592567 - DNA, 75 bp, synthetic construct
  source 1..75: mol_type = other DNA
cagggtttttgagttactccggtaatgtcgtcttagcaaagctggtaagcaatggaggtgatgctgccaacttac

SEQ ID NO: 592568 - DNA, 75 bp, synthetic construct
  source 1..75: mol_type = other DNA
ataccttttattaaagcagatagcattgataattggtatatgcatgattggtggtttattatgatcgcaagttta

SEQ ID NO: 592569 - DNA, 75 bp, synthetic construct
  source 1..75: mol_type = other DNA
aaatactacgtcgagtgaatgaattgcagccaaaggattctagaattcaggctgcatcattacctcatctctcag

SEQ ID NO: 592570 - DNA, 75 bp, synthetic construct
  source 1..75: mol_type = other DNA
aagggattatttaaaaagtgaaatcgaattggcacgcttgaaaattaagtgttttccaaataaaaaagcaaaaat

SEQ ID NO: 592571 - DNA, 75 bp, synthetic construct
  source 1..75: mol_type = other DNA
catcattacatggaagattataatttatggctaaggtgcattgctaatggtgccatatgttctaatattgataat

SEQ ID NO: 592572 - DNA, 75 bp, synthetic construct
  source 1..75: mol_type = other DNA
cgagggtttcccctcaccctaaccctctccccggtggggcgaggggactgaccgagcacgttgatagcatttgta

SEQ ID NO: 592573 - DNA, 75 bp, synthetic construct
  source 1..75: mol_type = other DNA
atgttggcgaatgttggcttagtgcccagggttccctctcaccctaaccctctccccggtggggcgaggggactg

SEQ ID NO: 592574 - DNA, 75 bp, synthetic construct
  source 1..75: mol_type = other DNA
accatggggctaaattcctggaagatagctcctaacgaacgtggtgataaaaaaggtgtcccagggcttagttgt

SEQ ID NO: 592575 - DNA, 75 bp, synthetic construct
  source 1..75: mol_type = other DNA
ggttatcaacatcatttccttatggaggattataacctttggcttagagttattgctaaaggatataaagtatgt

SEQ ID NO: 592576 - DNA, 75 bp, synthetic construct
  source 1..75: mol_type = other DNA
tattttcgggagctggtggagacgcgggagcgactggtgagagacgctgatgattttgtcgcagtggcaatcgcc

SEQ ID NO: 592577 - DNA, 75 bp, synthetic construct
  source 1..75: mol_type = other DNA
aaccgcatcgcagaggatgcgcactatgtttaccactatgatgaatacggcagactgacggagaagacggacctt

SEQ ID NO: 592578 - DNA, 75 bp, synthetic construct
  source 1..75: mol_type = other DNA
cacgatttgatggaggattataacctttggatacgaatgttgagtaaaggttttaaagcatctaatttagatggt

SEQ ID NO: 592579 - DNA, 75 bp, synthetic construct
  source 1..75: mol_type = other DNA
cttacgcagcagcgtccgcgacagcgtctgccgcattattcaaagcgatattcagcattactggaatctgcgaat

SEQ ID NO: 592580 - DNA, 75 bp, synthetic construct
  source 1..75: mol_type = other DNA
taacgtcattgaactctcaacgttaaatcacgtattaatcacccacatcaaccgcaacatcatcaacgattatct

SEQ ID NO: 592581 - DNA, 75 bp, synthetic construct
  source 1..75: mol_type = other DNA
tttggacaaggctgggatcaacaccgtttccgcttctcgacaaaaggtgagttattacctgactggggccaggaa

SEQ ID NO: 592582 - DNA, 75 bp, synthetic construct
  source 1..75: mol_type = other DNA
gaaatcagtgatgcagataaaaacattatcaagaagatattaacagaaatatctaaaatgccagaagatagtatt

SEQ ID NO: 592583 - DNA, 75 bp, synthetic construct
  source 1..75: mol_type = other DNA
ggcgtcagaacataatctgtcgcgagtgccggaagagtgaagctatgcagcgtgtactggctttctatcagggta

SEQ ID NO: 592584 - DNA, 75 bp, synthetic construct
  source 1..75: mol_type = other DNA
gatatacaaaaaaagctagtcatctagattataaaattattgatgattttggcgggagaagtgatgattttagaa

SEQ ID NO: 592585 - DNA, 75 bp, synthetic construct
  source 1..75: mol_type = other DNA
gggaacggaaaggcggtggcctactgttctgaagtgctgatggggctggagatgatgcgccgtcaggttgcatcc

SEQ ID NO: 592586 - DNA, 75 bp, synthetic construct
  source 1..75: mol_type = other DNA
ctctatacttatactcacttttttctcttcttctgtgttgatatctattactggtgaaacttgtttttacaaatt

SEQ ID NO: 592587 - DNA, 75 bp, synthetic construct
  source 1..75: mol_type = other DNA
ggaaagcaaaattattatatttcattctttttctgagtttccttaatgctgttttgaggttatcagaggatggat

SEQ ID NO: 592588 - DNA, 75 bp, synthetic construct
  source 1..75: mol_type = other DNA
aagcgttggttcatgagaagtttggcgatggcattatcagtgcgattaacttcaaactcgacgtcaagaaagtgg

SEQ ID NO: 592589 - DNA, 75 bp, synthetic construct
  source 1..75: mol_type = other DNA
atgaacatgttctttgactggtggttcgccacatcaccccgcctccgccagctttgctgggcagtctggttgctg

SEQ ID NO: 592590 - DNA, 75 bp, synthetic construct
  source 1..75: mol_type = other DNA
gccggcggaggcggagaatgatgccacagtgaacagcaggggaaaaagagctctggtattcatgactgacctctg

SEQ ID NO: 592591 - DNA, 75 bp, synthetic construct
  source 1..75: mol_type = other DNA
tgatggcgctcgaaatcgcgatcgacgaactggcggaaaaagcgggcatcgatcccgtcgagtttcgcatcctga

SEQ ID NO: 592592 - DNA, 75 bp, synthetic construct
  source 1..75: mol_type = other DNA
tggcatggatatttcaagggaaaataccccgatcttatatcagttgttaacacaagtactacaggatagccatga

SEQ ID NO: 592593 - DNA, 75 bp, synthetic construct
  source 1..75: mol_type = other DNA
atgtgaatgtgatacgtggcttcaatgtgttgagcatcttaaacaatattttgattgggagtatgataattacat

SEQ ID NO: 592594 - DNA, 75 bp, synthetic construct
  source 1..75: mol_type = other DNA
aaagacaacgaatgttactgacagtatcagggatgctaacggcgtcctgcgcgtacagattggaaaactgacagg

SEQ ID NO: 592595 - DNA, 75 bp, synthetic construct
  source 1..75: mol_type = other DNA
aaaagggatattaatggcttccgtgcttcaaacggaaattgcttcaatccttgcaacaacccggcggacgcaaag

SEQ ID NO: 592596 - DNA, 75 bp, synthetic construct
  source 1..75: mol_type = other DNA
ataaattagattttcagcacgatgccaggatattaaacggtatatggctcattaccgctttaggtttggtggcaa

SEQ ID NO: 592597 - DNA, 75 bp, synthetic construct
  source 1..75: mol_type = other DNA
atgacacaagaagaaaaagtaatgttccttatgcgcctggctgtggaaacctttaacgcccattaccaggtgtcc

SEQ ID NO: 592598 - DNA, 75 bp, synthetic construct
  source 1..75: mol_type = other DNA
atggtagtgtccgctattgccagtacacctcacaatgcgaaagtggcgacaaacaacctgaaactgggaaccttt

SEQ ID NO: 592599 - DNA, 75 bp, synthetic construct
  source 1..75: mol_type = other DNA
gacagacattaccagaggtgcgacttacccggtactgatagacagcattgcggtggaagtgaacagcacagacac

SEQ ID NO: 592600 - DNA, 75 bp, synthetic construct
  source 1..75: mol_type = other DNA
cgtccagcctttgggccacctctgcgttgacccatcttaccggccgcaccggtgaagttccaaaaccgattggac

SEQ ID NO: 592601 - DNA, 75 bp, synthetic construct
  source 1..75: mol_type = other DNA
atcccttcgaactatgatccaatagcgcggacttatagcggaacatgggacggcacgtttaaatggggctggacg

SEQ ID NO: 592602 - DNA, 75 bp, synthetic construct
  source 1..75: mol_type = other DNA
gcggcaaaggtggcagcaatcagacccgaacgcctgttgaggcaccggacagcattcagtccattgccagggcaa

SEQ ID NO: 592603 - DNA, 75 bp, synthetic construct
  source 1..75: mol_type = other DNA
tgcgcaatccacaggtcgccgccatgcttaagaataagcatctgacgattacggagtttatcgcccagcgtatgc

SEQ ID NO: 592604 - DNA, 75 bp, synthetic construct
  source 1..75: mol_type = other DNA
tattctcgatgactcaaatttcgctcagataaaaatgactgacggaactctaaattcatgttccgctatgcatgt

SEQ ID NO: 592605 - DNA, 75 bp, synthetic construct
  source 1..75: mol_type = other DNA
aataaatgtgacgatagaattacgagaagagtttaccttagtaaagaaaaggaagtgtccattaaggtggtatat

SEQ ID NO: 592606 - DNA, 75 bp, synthetic construct
  source 1..75: mol_type = other DNA
actgaatgaatcaaaaacaagaactgccgctatagaaagtgcattattagtatatattttcggctttgatattaa

SEQ ID NO: 592607 - DNA, 75 bp, synthetic construct
  source 1..75: mol_type = other DNA
gttcatcctatagcgctgatattggagggggagtattgctttcccggcatggggtaacgttaggacaggaaataa

SEQ ID NO: 592608 - DNA, 75 bp, synthetic construct
  source 1..75: mol_type = other DNA
taatgattcccagacgtctgaaagacaactctccgctgataagaggtatagccaaaacccaagctcgtgttgaag

SEQ ID NO: 592609 - DNA, 75 bp, synthetic construct
  source 1..75: mol_type = other DNA
gcgtacaagtttcaaatatttatgaggcctatgcggtaggattaagtttaagccttggctcctttggagcattat

SEQ ID NO: 592610 - DNA, 75 bp, synthetic construct
  source 1..75: mol_type = other DNA
cattatggctgcgaatgctttatcaattaaaagaggccgttaaagacagaaccataaacaatcgctatttgaact

SEQ ID NO: 592611 - DNA, 75 bp, synthetic construct
  source 1..75: mol_type = other DNA
tattttaagtcttcccgataaatttcaagaaagatcttataagcaattaagagcttatgaagtggtatgttcgtt

SEQ ID NO: 592612 - DNA, 75 bp, synthetic construct
  source 1..75: mol_type = other DNA
cgtagcgcatcaggcaattatgtattgccatcagcagtctaaggcggattatgagtccgcctttgctttaagttt

SEQ ID NO: 592613 - DNA, 75 bp, synthetic construct
  source 1..75: mol_type = other DNA
tgacacaggcatcacaacaggctctgggccgtgtggtgaacgaccttccgttatccctgcataacgatatcgcca

SEQ ID NO: 592614 - DNA, 75 bp, synthetic construct
  source 1..75: mol_type = other DNA
agatatctggtctggcacagtggtctgacacaggcatcacaacaggctctgggccgtgtggtgaacgaccttccg

SEQ ID NO: 592615 - DNA, 75 bp, synthetic construct
  source 1..75: mol_type = other DNA
agtttgttataccgcaagtaatgctgagcgttttaagtatatttggttaaaaaaaggtctaaaggttaacaatta

SEQ ID NO: 592616 - DNA, 75 bp, synthetic construct
  source 1..75: mol_type = other DNA
ggagcagggaattggacaacggcacaattgattgaatggctggattctcaaggggcattcaatcacccatactgg

SEQ ID NO: 592617 - DNA, 75 bp, synthetic construct
  source 1..75: mol_type = other DNA
gacctgaccgccgtcattgccccggacggcagcagaaacgggacacagtacgatgcgtggggaaaggccatctgt

SEQ ID NO: 592618 - DNA, 75 bp, synthetic construct
  source 1..75: mol_type = other DNA
accgttacgacagcgacgggcgggtgacagaacagctaaacccggcaggcttaagttacacgtatcagtatgaga

SEQ ID NO: 592619 - DNA, 75 bp, synthetic construct
  source 1..75: mol_type = other DNA
atcctgacttaattaagttaaatgttaacagggaaaatattggagcgaatgcaaacttgcttcaagccataaaaa

SEQ ID NO: 592620 - DNA, 75 bp, synthetic construct
  source 1..75: mol_type = other DNA
tgaaaataaaaacctaaaaagcatcgaaaaaattactgttatactcggtagcgcgtgtccgcatcgggaggaaat

SEQ ID NO: 592621 - DNA, 75 bp, synthetic construct
  source 1..75: mol_type = other DNA
ggggaatcagtttgtggaatactttggtgaggcgctgttccgtgccgacttgtgcaacaccggtttatctggaaa

SEQ ID NO: 592622 - DNA, 75 bp, synthetic construct
  source 1..75: mol_type = other DNA
atagacgctactggctatgacattcctgttttattgcaacggaaaatgaagaacgtataccagcagaatatcttt

SEQ ID NO: 592623 - DNA, 75 bp, synthetic construct
  source 1..75: mol_type = other DNA
ttaatctgtctgcgactcaaataggtctacttagcagttgtatgctgatcgcctacggtattagtaaaggggtaa

SEQ ID NO: 592624 - DNA, 75 bp, synthetic construct
  source 1..75: mol_type = other DNA
ttaccatccgggaatggatgaagggccaggccgataaatcgaaaaatggctggctctttattacctccgacgaac

SEQ ID NO: 592625 - DNA, 75 bp, synthetic construct
  source 1..75: mol_type = other DNA
tactcaagccactgagtatgaaaggtaatctcaccgccgaaaaaattgaaaacaccggaaatatcattgagtgtg

SEQ ID NO: 592626 - DNA, 75 bp, synthetic construct
  source 1..75: mol_type = other DNA
cgtctgtctgccgtgtggctgacgcacgacccggaatacccggagaatttacctgccgcgccgctggtgcgctat

SEQ ID NO: 592627 - DNA, 75 bp, synthetic construct
  source 1..75: mol_type = other DNA
tttcggaactcggcgtggtattcctgatgtttatcatcggtcttgagttgaatccctccaaactttggcaactgc

SEQ ID NO: 592628 - DNA, 75 bp, synthetic construct
  source 1..75: mol_type = other DNA
ttggttctttgtgctctcgttaacgtggcgcttggatttagttttgctttctggatgtttgcgggacttgttgtt

SEQ ID NO: 592629 - DNA, 75 bp, synthetic construct
  source 1..75: mol_type = other DNA
cttaaatatatatacggagttaattatatttgccggcgcgaaacagaataatgtggcactgccagtaaacgcttt

SEQ ID NO: 592630 - DNA, 75 bp, synthetic construct
  source 1..75: mol_type = other DNA
atgatttcgagaatttaattcaggaagcatttgcatccgttcgcttgagatctcacttactcctccatgaaagcc

SEQ ID NO: 592631 - DNA, 75 bp, synthetic construct
  source 1..75: mol_type = other DNA
gaaccaccggtaatggaagaaattgtcgactacttcaaagactcaaaaatcccggtttacatagtgtttattacc

SEQ ID NO: 592632 - DNA, 75 bp, synthetic construct
  source 1..75: mol_type = other DNA
cggtgacgaactggctaaggtgtatgcgatgcttgatgaagagatgaaagccgttgcgatagtgggaatgtatag

SEQ ID NO: 592633 - DNA, 75 bp, synthetic construct
  source 1..75: mol_type = other DNA
acgcagatcgcaaatacagcctttgttaaggcagctataactgcacttatcaacggtgcgcctggtacactggat

SEQ ID NO: 592634 - DNA, 75 bp, synthetic construct
  source 1..75: mol_type = other DNA
atggtgcttttaatgcaaaggcatggatagcgcgttgtgcttgggcgtatgcaaatagtgcatccataccagaca

SEQ ID NO: 592635 - DNA, 75 bp, synthetic construct
  source 1..75: mol_type = other DNA
gcaaagtgattgatagcttcggtgactggtcaccacagactgaacatccagctatcgctattcagcgcaaagagc

SEQ ID NO: 592636 - DNA, 75 bp, synthetic construct
  source 1..75: mol_type = other DNA
taaaaccgatgatgaactggctacggaaattatcagtctgctgggcggccaacaaaatatctcttccgtcgcatc

SEQ ID NO: 592637 - DNA, 75 bp, synthetic construct
  source 1..75: mol_type = other DNA
aaaaaaatacagaaaactgtattgctcttattgattatgagaactgcagtaacctgacagaaatccccttaaata

SEQ ID NO: 592638 - DNA, 75 bp, synthetic construct
  source 1..75: mol_type = other DNA
ccatgaagcagtaagagtcacactccggcatgtcagagaagtctcccggaacaatgttgattttcatcttgtact

SEQ ID NO: 592639 - DNA, 75 bp, synthetic construct
  source 1..75: mol_type = other DNA
tttctgttctaccatgccagcatcaccgaacgtgcagacggcaagcgctcaacgtggcatacacagcgatttaca

SEQ ID NO: 592640 - DNA, 75 bp, synthetic construct
  source 1..75: mol_type = other DNA
aaaatgaatcaatgtcttttgccatttgcacggtcttatcattatattgcgatttcatatacgaaatagcatatg

SEQ ID NO: 592641 - DNA, 75 bp, synthetic construct
  source 1..75: mol_type = other DNA
aaatgatgatgaatgtatctataaatacatgcataaaactaatcatacgacctaaacacattggaggtgtgacta

SEQ ID NO: 592642 - DNA, 75 bp, synthetic construct
  source 1..75: mol_type = other DNA
gcgatcgagggggaggcggcggaggaagttgaggttctggggcgagtgacgttcttcatcaacagtgcgctgcag

SEQ ID NO: 592643 - DNA, 75 bp, synthetic construct
  source 1..75: mol_type = other DNA
attaccaggagcagcgcatgacgatagatgttatctgcggtgtagataacaactgccgggttattgaaacttcat

SEQ ID NO: 592644 - DNA, 75 bp, synthetic construct
  source 1..75: mol_type = other DNA
actacacggaacagcgattaacggttaactcgatctgcaatgttggtccaaatacgctcgtcttcgagcaatctt

SEQ ID NO: 592645 - DNA, 75 bp, synthetic construct
  source 1..75: mol_type = other DNA
aaccggcgtgaggtgctgcatacagagggcggggccgggctgaaagcgggtggtgaaaaaagaactggcggacgg

SEQ ID NO: 592646 - DNA, 75 bp, synthetic construct
  source 1..75: mol_type = other DNA
ggttacagccgcagcgagtcactctggctggtgcgcggcggcgtggcgaaactggatgaaggtcaccggctggcc

SEQ ID NO: 592647 - DNA, 75 bp, synthetic construct
  source 1..75: mol_type = other DNA
aggatttacaagattggtactggaaagagaagatgacatatgagtatcacaaagaacgtaaaacaactataagct

SEQ ID NO: 592648 - DNA, 75 bp, synthetic construct
  source 1..75: mol_type = other DNA
gagctaatgcaactgttattggagcaataactattggttcaagagttagaataggaagcaatgtttgctgttata

SEQ ID NO: 592649 - DNA, 75 bp, synthetic construct
  source 1..75: mol_type = other DNA
atattaaaacaaatattgtggcttttaaccggattaacaagattggtcattaatataataacgggcattgatatt

SEQ ID NO: 592650 - DNA, 75 bp, synthetic construct
  source 1..75: mol_type = other DNA
gcgatcgaaggggaggaggcggaggaagttgaggtgctggggcgcgtgacgttcttcatcaacagcgcgctacag

SEQ ID NO: 592651 - DNA, 75 bp, synthetic construct
  source 1..75: mol_type = other DNA
ctggacgatgttactgtcatcggggtcgtgacgtttactatctgcgatgttcgttctgataattctattatttaa

SEQ ID NO: 592652 - DNA, 75 bp, synthetic construct
  source 1..75: mol_type = other DNA
acgtcgtagtgttaggaatcgtgacattcgttattaaccggatatggaaggatgatgatgattatccagtaatat

SEQ ID NO: 592653 - DNA, 75 bp, synthetic construct
  source 1..75: mol_type = other DNA
actatgtggagggacggttaaccgtcgataagctatgcagcatcggccctaatactcgggtcgtacagactgaaa

SEQ ID NO: 592654 - DNA, 75 bp, synthetic construct
  source 1..75: mol_type = other DNA
tggcgctgacaaactgtcagtgccggattcttatccgtgtccggcgcacgaccacacgctgtcacgagaggtctc

SEQ ID NO: 592655 - DNA, 75 bp, synthetic construct
  source 1..75: mol_type = other DNA
ctgatatttgtatttatgctacagcatgcggacatgcaggaattggtggtgggataaatgcggctatcacatatt

SEQ ID NO: 592656 - DNA, 75 bp, synthetic construct
  source 1..75: mol_type = other DNA
cgactgttccggctaccagacccgttatgaccatgaccgcttcgggcagatgacggcggtgcaccgcgaggaagg

SEQ ID NO: 592657 - DNA, 75 bp, synthetic construct
  source 1..75: mol_type = other DNA
cgccggacggggaaacgggtgtggcgtcgcgggcgtgacctgacgggatggatgtcgctgtcgcggaaaccggag

SEQ ID NO: 592658 - DNA, 75 bp, synthetic construct
  source 1..75: mol_type = other DNA
ggaagaggcccgcacctcttcgctatcttcttctgacagttcccgccctctctcagcctcaccgttccccgacac

SEQ ID NO: 592659 - DNA, 75 bp, synthetic construct
  source 1..75: mol_type = other DNA
tatggcagcggttacctggcgggaatgaagctgggcgggacgccgctggtcgagttcacgcgggacaggctgcac

SEQ ID NO: 592660 - DNA, 75 bp, synthetic construct
  source 1..75: mol_type = other DNA
gcttcacaccgctcatccgcatcgaaacagacaacggcgagcgggagaaaacgcagcggcggagcctggcggaga

SEQ ID NO: 592661 - DNA, 75 bp, synthetic construct
  source 1..75: mol_type = other DNA
ggacagaggcacgattgccggttcggtgcatgttgacgctgtaaacaatggtggcgaaggcgacggtatacaggc

SEQ ID NO: 592662 - DNA, 75 bp, synthetic construct
  source 1..75: mol_type = other DNA
atatcgataccacggctaagtataaatctgatggtcgtaaactggctaaaggcagttatagcgacaatgtacgcc

SEQ ID NO: 592663 - DNA, 75 bp, synthetic construct
  source 1..75: mol_type = other DNA
atttaaattcatcaaacaaaaatggcagttgcagcgtgacatgaataagagccggaaaatctttcaacaacaatt

SEQ ID NO: 592664 - DNA, 75 bp, synthetic construct
  source 1..75: mol_type = other DNA
gttatatatagagtgattcgatttataccttcacttgcgccacctctttggtggtcaatacctgcaaacgttgtt

SEQ ID NO: 592665 - DNA, 75 bp, synthetic construct
  source 1..75: mol_type = other DNA
gcgaaaagttcatctttatcactgtgaccaccggggactgccgctggcgctcatcagcgaagacggcaatacggc

SEQ ID NO: 592666 - DNA, 75 bp, synthetic construct
  source 1..75: mol_type = other DNA
ggtcaagtggcaaagcctggtgaagataagaaagcaatgaagcttggtgttggcggtcaatacggctcattaaca

SEQ ID NO: 592667 - DNA, 75 bp, synthetic construct
  source 1..75: mol_type = other DNA
acgctggaagaccagagcgccaccattcagcagatacagcgcgtgcagaaggacacaaatgatgaccttgctgca

SEQ ID NO: 592668 - DNA, 75 bp, synthetic construct
  source 1..75: mol_type = other DNA
tagccgtgaaagtgcgcacattctggtggattcgcgctattacgcggaggtggaagctcgtacgcaaggctacca

SEQ ID NO: 592669 - DNA, 75 bp, synthetic construct
  source 1..75: mol_type = other DNA
tagccgtgaaagtgcgcacattctggtggactcgcgctattacgcggatgtagaagcccgcacgcaaggctacca

SEQ ID NO: 592670 - DNA, 75 bp, synthetic construct
  source 1..75: mol_type = other DNA
gctgccgcacggcaaggccagcgacaaagtggttgtagcgggcgagtttgtcacactcgatttcggtgcgctgta

SEQ ID NO: 592671 - DNA, 75 bp, synthetic construct
  source 1..75: mol_type = other DNA
ttcatctgttatctgacctttggtcagatacattccatgaaagattgccactggttccagttggtggtgacgctg

SEQ ID NO: 592672 - DNA, 75 bp, synthetic construct
  source 1..75: mol_type = other DNA
ggtttggagtcgtcatcgttataacggaatggtggactggagagatactccggcagtgatcggcacaccattgca

SEQ ID NO: 592673 - DNA, 75 bp, synthetic construct
  source 1..75: mol_type = other DNA
gttttggtgtggggagataatgctgttgtcagctacccaagtcgaaatggattacttttcattccacttggaact

SEQ ID NO: 592674 - DNA, 75 bp, synthetic construct
  source 1..75: mol_type = other DNA
aaaaatcaccacaaactcggtcatcgataaccgtgcaaacctgaattatcttctgactcattcctgtctggacta

SEQ ID NO: 592675 - DNA, 75 bp, synthetic construct
  source 1..75: mol_type = other DNA
ctatacgcatcaagctaaatctcttttttatgataaagttatatggaaacaagacttcctattcaattctgtcta

SEQ ID NO: 592676 - DNA, 75 bp, synthetic construct
  source 1..75: mol_type = other DNA
ggacataacgaagaagactacgatgatgatgttatttcatttttcatccattgctatcatattagagattggatc

SEQ ID NO: 592677 - DNA, 75 bp, synthetic construct
  source 1..75: mol_type = other DNA
gaccggcaggggaatgacgtcagcaccatgcgcgtggatattggcgcgcgctcgtatgacgaagtgatgcaggcg

SEQ ID NO: 592678 - DNA, 75 bp, synthetic construct
  source 1..75: mol_type = other DNA
tggatccactctggctggctgccgctaacacatctggcgcaacaggcggcaaaatgatttctcctcagagtattg

SEQ ID NO: 592679 - DNA, 75 bp, synthetic construct
  source 1..75: mol_type = other DNA
aattttaggcctgctcgtcctgaccggctgggccgggatagtgtttagccgccgggcaatccctgcggtacctga

SEQ ID NO: 592680 - DNA, 75 bp, synthetic construct
  source 1..75: mol_type = other DNA
tgtatggcagcattggcgtaagtggtatggatgaggatgcaattcgccagcgtgacatcgtcgtcgccacgcctg

SEQ ID NO: 592681 - DNA, 75 bp, synthetic construct
  source 1..75: mol_type = other DNA
gcctgggtattgattaacgaaaatctcgttgatcaaccttttctcgataaatactgcgtcggctatgacgaaaaa

SEQ ID NO: 592682 - DNA, 75 bp, synthetic construct
  source 1..75: mol_type = other DNA
gcagcgatgagtacggcaaccatcaggtacgcgcctgtttgcgcggtcgctccatccgccggcgtattaatcatc

SEQ ID NO: 592683 - DNA, 75 bp, synthetic construct
  source 1..75: mol_type = other DNA
aagaaaatgtcccacaggtacagatagagttgctgcttatcatactcacggtgcagatagtcatggcgattatgt

SEQ ID NO: 592684 - DNA, 75 bp, synthetic construct
  source 1..75: mol_type = other DNA
gttcctgaaacgactgtttgcggtgagcatcacgtcatccggcaatcctccggcattttccctgacgccggacgg

SEQ ID NO: 592685 - DNA, 75 bp, synthetic construct
  source 1..75: mol_type = other DNA
accatacagcagatacagcgcgtgcagaaggacacaaatgatgaccttgctgcactttacatgctgaaggtacag

SEQ ID NO: 592686 - DNA, 75 bp, synthetic construct
  source 1..75: mol_type = other DNA
cgtaagccagatgttttcttatttgatgagccactatctaaccttgatgcgaaacttcgtgtttcaatgcgagtc

SEQ ID NO: 592687 - DNA, 75 bp, synthetic construct
  source 1..75: mol_type = other DNA
gaatccgaaaactgcacgcagccaggtcattggcgcgatgactatgggcatgggcgcggcactgatggaggagct

SEQ ID NO: 592688 - DNA, 75 bp, synthetic construct
  source 1..75: mol_type = other DNA
gacaaagacgagcactggcataagccagagcaggcgtttctcaccgatgaccaccggaccattctgcgcttcgcc

SEQ ID NO: 592689 - DNA, 75 bp, synthetic construct
  source 1..75: mol_type = other DNA
cccctgccccagccgtaccgtctgccagggcagcagcatgatgaggagtcggggctgtactataaccgtcaccgg

SEQ ID NO: 592690 - DNA, 75 bp, synthetic construct
  source 1..75: mol_type = other DNA
taacgacgaatcacgggctgcctatcgcaccgcgctgtttactcggagccgttatatctgggcgaattcgactgc

SEQ ID NO: 592691 - DNA, 75 bp, synthetic construct
  source 1..75: mol_type = other DNA
catgatttatgttacacacgatcaaattgaagcattgaccctcggtgatcgtatttgtgtgcttaatcaggggcg

SEQ ID NO: 592692 - DNA, 75 bp, synthetic construct
  source 1..75: mol_type = other DNA
aaatatagatagcccttatgttacaggcttgcatactgtaactgttgacaacagttttcgccctacgttgacgta

SEQ ID NO: 592693 - DNA, 75 bp, synthetic construct
  source 1..75: mol_type = other DNA
cggaaacggtaatgaacaaaatttcgcgcttgaatttaaaagcctgaaggattttgaacccgaacaggtagcaaa

SEQ ID NO: 592694 - DNA, 75 bp, synthetic construct
  source 1..75: mol_type = other DNA
ggccagcagcgctgacgggaaaggtgatgcgctgataacagtgaagcagccttaccagggggcaacttctctttc

SEQ ID NO: 592695 - DNA, 75 bp, synthetic construct
  source 1..75: mol_type = other DNA
ccagtttggttctgtcttcgcggttacaatgattaactgcgcgatggatggatcaaatatttcattaagcgccgg

SEQ ID NO: 592696 - DNA, 75 bp, synthetic construct
  source 1..75: mol_type = other DNA
gcaaacgatggtatctatgaccggaaaagatcctggtatatggtccccatcgggatcaatcgaaaaggtactaac

SEQ ID NO: 592697 - DNA, 75 bp, synthetic construct
  source 1..75: mol_type = other DNA
aaataatggattgtattaatatcagtcttaccgaacctgggatcaatgagaaataccgagttatccagaaagata

SEQ ID NO: 592698 - DNA, 75 bp, synthetic construct
  source 1..75: mol_type = other DNA
aaatggaatgggaagcaagtaccgatggttatcttcgtggttattatatctactaccgtaagtctggtgcacaaa

SEQ ID NO: 592699 - DNA, 75 bp, synthetic construct
  source 1..75: mol_type = other DNA
atgaaaaatacttttaataaaatatataaaaaagaatcacctgaaagcttgttaagaacacattgcatcagtgtt

SEQ ID NO: 592700 - DNA, 75 bp, synthetic construct
  source 1..75: mol_type = other DNA
ctggaacatagcgatgtcgtggtgctgtggagtgctaacccactcaatacgctgaaaattgcgtggaatgcatcc

SEQ ID NO: 592701 - DNA, 75 bp, synthetic construct
  source 1..75: mol_type = other DNA
tgcgtgatgctttaactaaacttgaaaaccagatccatgatctggatgtgaaaattgaaaaaatcattaccattc

SEQ ID NO: 592702 - DNA, 75 bp, synthetic construct
  source 1..75: mol_type = other DNA
gacgcttatatcgatccgctgccaccactcgctcagcttgaaggcagcattatcggcattcaaaacgggaagcct

SEQ ID NO: 592703 - DNA, 75 bp, synthetic construct
  source 1..75: mol_type = other DNA
gaaacactgcaaagcgatgctgacaaccttgcagatttgcaaacgcaggcaaccggcgcacaagggcaaatggaa

SEQ ID NO: 592704 - DNA, 75 bp, synthetic construct
  source 1..75: mol_type = other DNA
tgatgacttgtttcaattaattttaaaagaagttacaagtgctaaactcatagaagatgacactgaaatgtggta

SEQ ID NO: 592705 - DNA, 75 bp, synthetic construct
  source 1..75: mol_type = other DNA
ccagaacagccagaatatggtggccagctggaacagttttgatatcggcaaggggaacacggttcagttttacca

SEQ ID NO: 592706 - DNA, 75 bp, synthetic construct
  source 1..75: mol_type = other DNA
tttttattactccgtttgtagcaaaaaatctaagcagtgacaatataaaatatagtcttaatattatacaatact

SEQ ID NO: 592707 - DNA, 75 bp, synthetic construct
  source 1..75: mol_type = other DNA
acaggatgtttgctccggactgctgtcaacgggctgcaaacctcgtttcggagagaatgagcagctggattatgg

SEQ ID NO: 592708 - DNA, 75 bp, synthetic construct
  source 1..75: mol_type = other DNA
tgtggcgaacctggacagctcgatctcagcgctctgtctggcgtatgacgatctgctgcaggcgaaagtgagtat

SEQ ID NO: 592709 - DNA, 75 bp, synthetic construct
  source 1..75: mol_type = other DNA
atccagagaagatgtttggtcgtgagcgtaaatttattcccgtccagttacgttcctccggtgacgggcaagcgg

SEQ ID NO: 592710 - DNA, 75 bp, synthetic construct
  source 1..75: mol_type = other DNA
ctcggcaacatgccggcgcctatcctgactgaggagggccgtctggtcttccggcttcagttcatgtgtgtctac

SEQ ID NO: 592711 - DNA, 75 bp, synthetic construct
  source 1..75: mol_type = other DNA
tccggcgtcgcttacaaagagcgcctgaacatgccggttgtcgccgaagtggtggccagagagcagcctgaacac

SEQ ID NO: 592712 - DNA, 75 bp, synthetic construct
  source 1..75: mol_type = other DNA
actgagacgactcaatcgccgccgcacacgcaatttgcacccaccgctgcgggctctgcggtcagcaataccagt

SEQ ID NO: 592713 - DNA, 75 bp, synthetic construct
  source 1..75: mol_type = other DNA
acgccgttcatcggtgttccggtaggcattttcgtggggatttatgtctttgccaaagtcgttcgtctgatttca

SEQ ID NO: 592714 - DNA, 75 bp, synthetic construct
  source 1..75: mol_type = other DNA
tatcaataaacaagccgacggtgaaaaagtgattcaggtgccaatcgatctctataccaaaacggaagacggtaa

SEQ ID NO: 592715 - DNA, 75 bp, synthetic construct
  source 1..75: mol_type = other DNA
atcgaagggctaggcttgctaaggccgtggaaaagttgggtggtcgttgcgcgagttgcggatccgaatattcgc

SEQ ID NO: 592716 - DNA, 75 bp, synthetic construct
  source 1..75: mol_type = other DNA
tgggctgagcggaaaagagcgcatgtggaccacgccgcgctttacgctggactttaccccgggtatcggtgggag

SEQ ID NO: 592717 - DNA, 75 bp, synthetic construct
  source 1..75: mol_type = other DNA
aatggaataacgtcgtggatggcggggtgatgctgatgtgggataaacgcccctacgacggtaaacgtgagcgga

SEQ ID NO: 592718 - DNA, 75 bp, synthetic construct
  source 1..75: mol_type = other DNA
gttcaaagctgaagctgtcagaacggttcttgaaaatcaactttcgatcagtgaaggcgcttcccgattatctct

SEQ ID NO: 592719 - DNA, 75 bp, synthetic construct
  source 1..75: mol_type = other DNA
tccgtaaggacagatgcagcaagtgcatgcgcgggtgtgagatgcgcggcatggtggctaattttggcggtttcc

SEQ ID NO: 592720 - DNA, 75 bp, synthetic construct
  source 1..75: mol_type = other DNA
attcataactgggagatccctccgggtttattctttgtttgccgttcaacaactgatgcgacaaatggaagatgt

SEQ ID NO: 592721 - DNA, 75 bp, synthetic construct
  source 1..75: mol_type = other DNA
tttgcaggggagcgtggatgggttatcaggaaggaatatgtcgagaatgcttccggggcttcccttgaacgtcct

SEQ ID NO: 592722 - DNA, 75 bp, synthetic construct
  source 1..75: mol_type = other DNA
acttcatatatatggcgtcggaacttgtgaagagtttcttagagataaaataaatcagtataaactaaataatat

SEQ ID NO: 592723 - DNA, 75 bp, synthetic construct
  source 1..75: mol_type = other DNA
aagattctcagaaacagaactaaatacattaccaaacgaaatgaaaaatttcttgatatttttgaacaaaactca

SEQ ID NO: 592724 - DNA, 75 bp, synthetic construct
  source 1..75: mol_type = other DNA
cccgttatgaagcgccaccgcgttctgctaatgctgaagcccttcgtcagctgactgatgttgcagatactgatg

SEQ ID NO: 592725 - DNA, 75 bp, synthetic construct
  source 1..75: mol_type = other DNA
cgacaccaagagatattgccgctatgctcaatcaactggcaagagagggaaacgtggagaaagttgtatcgccat

SEQ ID NO: 592726 - DNA, 75 bp, synthetic construct
  source 1..75: mol_type = other DNA
ttaaagagaaagggcaatatccgatgaataaagtcgcgaccgatgatatcgggtttgcgatttatcaggtggatt

SEQ ID NO: 592727 - DNA, 75 bp, synthetic construct
  source 1..75: mol_type = other DNA
cgacgtcgttgccatggactcagctgaagatgtctatcgcaccgcgcttgaacagagcggcgtggatatctccgg

SEQ ID NO: 592728 - DNA, 75 bp, synthetic construct
  source 1..75: mol_type = other DNA
gaaaacatgctacaaaacacagttgcacctgccgcatatatatgggaccagacaaacacaacaatcaacaagctc

SEQ ID NO: 592729 - DNA, 75 bp, synthetic construct
  source 1..75: mol_type = other DNA
tggcacaggtgcaggccgataaagaagcccaacaaatagtagccgatcaaaaagtattagctggacagaatacac

SEQ ID NO: 592730 - DNA, 75 bp, synthetic construct
  source 1..75: mol_type = other DNA
ataaggataaaagacgcacaactaatgctgatcgttgtgtcgttctctgcgaacccggaggaacgccacttttta

SEQ ID NO: 592731 - DNA, 75 bp, synthetic construct
  source 1..75: mol_type = other DNA
gtggtgacattttcatcgacttaccggaggcgcagccatgagcgatttatcgaagaaggcgcgcaggttgccacg

SEQ ID NO: 592732 - DNA, 75 bp, synthetic construct
  source 1..75: mol_type = other DNA
aggattcagtaatgcgccgctgcaaacctcagttgaagtgtacaacttcatcaagtcaaagaccattgcctatgc

SEQ ID NO: 592733 - DNA, 75 bp, synthetic construct
  source 1..75: mol_type = other DNA
ggtaaaaaacgcgcattgattttcgaccattccggtacggttcatcggctgggcttccccgaggatatcgagtat

SEQ ID NO: 592734 - DNA, 75 bp, synthetic construct
  source 1..75: mol_type = other DNA
ttgtatactgtgcttctcgcaattccaatattaattattatggtgttttttggtaagtttgtaatctataaattg

SEQ ID NO: 592735 - DNA, 75 bp, synthetic construct
  source 1..75: mol_type = other DNA
tatagcccaaggcgacatactccttagtattgcaggaaatatcgaggatgaaaaatattgggcggaatgtatgtt

SEQ ID NO: 592736 - DNA, 75 bp, synthetic construct
  source 1..75: mol_type = other DNA
ttttttttcgagtagaactacgtttcctgcattaatgcttaagaagactagcgcgaaggttttgctggcccctcg

SEQ ID NO: 592737 - DNA, 75 bp, synthetic construct
  source 1..75: mol_type = other DNA
atccaatggttgcgccaacatccatcagtcatgctgtgggtaaaagcaaagcttgggcaagggtattccggttga

SEQ ID NO: 592738 - DNA, 75 bp, synthetic construct
  source 1..75: mol_type = other DNA
tggaagtggacggcctgccaccggacgcgtttgcggtggtctcctttcatctgaaccagtcattctcttcgctct

SEQ ID NO: 592739 - DNA, 75 bp, synthetic construct
  source 1..75: mol_type = other DNA
ctgtttcccggtgaggacggttacagccgcagcgaatcactctggctggtgcgcggcggtgtggcgaaactggat

SEQ ID NO: 592740 - DNA, 75 bp, synthetic construct
  source 1..75: mol_type = other DNA
actcggttacctgctgggtgcaaaagcctgcgctccggcgttaatcgccagtgaaggcagcatgattttcacact

SEQ ID NO: 592741 - DNA, 75 bp, synthetic construct
  source 1..75: mol_type = other DNA
ttatcgtctcccattacagttaagattgagtgtaaggatggttattattttattaatttctccggagataaatca

SEQ ID NO: 592742 - DNA, 75 bp, synthetic construct
  source 1..75: mol_type = other DNA
caacctcgacggtcatatcacggcgctatgcctgcaatttaaagacatggttaatgccaaagtgagcattatcga

SEQ ID NO: 592743 - DNA, 75 bp, synthetic construct
  source 1..75: mol_type = other DNA
agatttataaaacaagatgtaactcatctttcaggaaatgatgtagcaaagtatctggctggcggcgattacacc

SEQ ID NO: 592744 - DNA, 75 bp, synthetic construct
  source 1..75: mol_type = other DNA
tatgtttttgttgaagaacaagaaaagtttgttataagaagtattggaaaaatgataggtaatgctgtgccagtt

SEQ ID NO: 592745 - DNA, 75 bp, synthetic construct
  source 1..75: mol_type = other DNA
acaaccttgaaggccatggatataatgtttattataagatcgttttttgcccagattatggaatgccgcaaactc

SEQ ID NO: 592746 - DNA, 75 bp, synthetic construct
  source 1..75: mol_type = other DNA
ctgagcctgattatgaatcagccttcggctatccgttactgaggccagaacttgaagcaccactaggattacgga

SEQ ID NO: 592747 - DNA, 75 bp, synthetic construct
  source 1..75: mol_type = other DNA
tttgtggtgctggcggtcttacacatggcctaagacaggccggattaaatgtagtcgctggtattgatatagaga

SEQ ID NO: 592748 - DNA, 75 bp, synthetic construct
  source 1..75: mol_type = other DNA
ctcgtcaattctaagccctataaacttaaagcggattcaatattcaaaacctggcggttcttggctggattggcc

SEQ ID NO: 592749 - DNA, 75 bp, synthetic construct
  source 1..75: mol_type = other DNA
gtaaagactgccgtgggcgtggtgttgccattcatcgtgaagagtcagaaaaacggggtatgcctgttatcaggg

SEQ ID NO: 592750 - DNA, 75 bp, synthetic construct
  source 1..75: mol_type = other DNA
atgaaactggaagatttaccgaaatactactccccaaaatccccttgcctgaccgatgcatcggcctcaacgtca

SEQ ID NO: 592751 - DNA, 75 bp, synthetic construct
  source 1..75: mol_type = other DNA
ccgatattgatgatgcgctaaaaaataaaattcagcaatcaattaatgccttacatcaacatggcatggtttctg

SEQ ID NO: 592752 - DNA, 75 bp, synthetic construct
  source 1..75: mol_type = other DNA
gcttttcttgggaagatgggtatcagcaacaatgaccgggagagggcgattgagttgctggcccattacgcgctg

SEQ ID NO: 592753 - DNA, 75 bp, synthetic construct
  source 1..75: mol_type = other DNA
ccgttttacgaccggctgatcaccaaattcgacatggaagaagcgtgggccgaatcgcaactgcgagcaataact

SEQ ID NO: 592754 - DNA, 75 bp, synthetic construct
  source 1..75: mol_type = other DNA
accacttcgccaaatcgacgctgattagcgactctccgcgcgctacggcctccgactcgctgaccggaacggaca

SEQ ID NO: 592755 - DNA, 75 bp, synthetic construct
  source 1..75: mol_type = other DNA
cttcccggcttgtaggtcaactgttacgggtccggttatgggacgatcgtctgagccgttacgttggcagcagcg

SEQ ID NO: 592756 - DNA, 75 bp, synthetic construct
  source 1..75: mol_type = other DNA
gctggattccctccccgccattgataaaccgctggaggaagaatgggcattacgtaaaacggatctaccaggaaa

SEQ ID NO: 592757 - DNA, 75 bp, synthetic construct
  source 1..75: mol_type = other DNA
ccgcacgttgcacaaggctgttttttccgcgaacgctgccctctggcaacccacggatgtgaagtccggcaatca

SEQ ID NO: 592758 - DNA, 75 bp, synthetic construct
  source 1..75: mol_type = other DNA
tcaggctgcggcaaaagcaccctcgcacagcttttaatgggtatgctgcaaccgagccacgggcagtacatccgt

SEQ ID NO: 592759 - DNA, 75 bp, synthetic construct
  source 1..75: mol_type = other DNA
atccgcatcacatcattgatcatggcctgggaggtatgggaacaaaggctgatgatttgtttgttattccgctgt

SEQ ID NO: 592760 - DNA, 75 bp, synthetic construct
  source 1..75: mol_type = other DNA
ctggcaacccacggatgtgaagtccggcaatcattaacaataagggaggacggacgtgagatccggtgctggcgg

SEQ ID NO: 592761 - DNA, 75 bp, synthetic construct
  source 1..75: mol_type = other DNA
ctctggatagctaagcgtagtagtgaacaacagcggcgagcgttggcagaggagctggctgtgcaggtgggtatt

SEQ ID NO: 592762 - DNA, 75 bp, synthetic construct
  source 1..75: mol_type = other DNA
tttcgccacacacagaggtttcatgcctctgttattgaaatgtataaattccattacacttaaggtcggatatat

SEQ ID NO: 592763 - DNA, 75 bp, synthetic construct
  source 1..75: mol_type = other DNA
tgccggaaaaaggttcttttttcagaaaaacgacgttctgttgacagatgatgtcagtaaatcccttttcctgca

SEQ ID NO: 592764 - DNA, 75 bp, synthetic construct
  source 1..75: mol_type = other DNA
cgtcgtatcgacttccgacatgtgatcgacagtctggcaaaaaagcccggtgcgttctgccatgcaacgctgaga

SEQ ID NO: 592765 - DNA, 75 bp, synthetic construct
  source 1..75: mol_type = other DNA
agtcagatgcctggctttccagccttaagcacgatcatgaaatggcagatcgagttcccatcactgaaagaggcc

SEQ ID NO: 592766 - DNA, 75 bp, synthetic construct
  source 1..75: mol_type = other DNA
gcgcggtggtaaggcagcacagccggacggccatacgctggcgcggctgtgggcgtcgctgccgccggatatccg

SEQ ID NO: 592767 - DNA, 75 bp, synthetic construct
  source 1..75: mol_type = other DNA
ccagacgcagctgcagcagtatgaaaacatgctcaaaaatacagtcgcacctgcagcctatatctgggatcaggc

SEQ ID NO: 592768 - DNA, 75 bp, synthetic construct
  source 1..75: mol_type = other DNA
ttgagcttgaaatggtggatgatctggccttgctactggacgattatcctggggatatgcgttcgttttttcagt

SEQ ID NO: 592769 - DNA, 75 bp, synthetic construct
  source 1..75: mol_type = other DNA
ccggtatagttcgcaaacttggatataatacacgaagagtcgcagtggctggatctatgcctgttgggttcaatt

SEQ ID NO: 592770 - DNA, 75 bp, synthetic construct
  source 1..75: mol_type = other DNA
ttttattttttattcagtggtacttgctcgttgatattggtttttttgtatgtcgctcagttatcagattgatct

SEQ ID NO: 592771 - DNA, 75 bp, synthetic construct
  source 1..75: mol_type = other DNA
ctttaattcaaggttatatgcttcgtcataaggttaaacctggtattaccggtttggcgcaaattaatgggtggc

SEQ ID NO: 592772 - DNA, 75 bp, synthetic construct
  source 1..75: mol_type = other DNA
gagctaatgccaatgcttcgattatatcaatagttcaacgtttttcagatatatccataatttttattggcctct

SEQ ID NO: 592773 - DNA, 75 bp, synthetic construct
  source 1..75: mol_type = other DNA
ctgtcgctcataatgaacaatataggtcactgattgaaggctatatgttacggcataaggtgaaaccaggaatta

SEQ ID NO: 592774 - DNA, 75 bp, synthetic construct
  source 1..75: mol_type = other DNA
atttacaatgatacgccattaccagataatatgggaattaattatgcgggtgatttcactcagttagttgaagac

SEQ ID NO: 592775 - DNA, 75 bp, synthetic construct
  source 1..75: mol_type = other DNA
aactttcaagattttgtttcttgaaatagtccccggttttaaatacgacacggtaatcgccagtagtcgcagttt

SEQ ID NO: 592776 - DNA, 75 bp, synthetic construct
  source 1..75: mol_type = other DNA
tcaaattaatccctttgattatgggcttaatttgtatcgctttaggtggctttgtgctggaaagttcagggcaaa

SEQ ID NO: 592777 - DNA, 75 bp, synthetic construct
  source 1..75: mol_type = other DNA
ttgcgtatgtgatgctgatgtcagtgggtcagcaggctggcgcggtatccggtgcttttggtcatgccttctcca

SEQ ID NO: 592778 - DNA, 75 bp, synthetic construct
  source 1..75: mol_type = other DNA
tttttatagatcatggagaggtgttaatttttcaacggagtttattttaatattaaaaaactggactttaagttc

SEQ ID NO: 592779 - DNA, 75 bp, synthetic construct
  source 1..75: mol_type = other DNA
tgccagttgttcctctatttgattctcctttgaatggcatcaatatggtattcaaacggcttgaggatattttgg

SEQ ID NO: 592780 - DNA, 75 bp, synthetic construct
  source 1..75: mol_type = other DNA
cacctcatattggctacgtaattaaaacagaaaataaagaaaccccattcactgtagttgatatcgacggtctat

SEQ ID NO: 592781 - DNA, 75 bp, synthetic construct
  source 1..75: mol_type = other DNA
tcaagcaactaaacatgatcttagagttactaaagtaggaaaattcttgcgtagaacatctttagatgaattacc

SEQ ID NO: 592782 - DNA, 75 bp, synthetic construct
  source 1..75: mol_type = other DNA
tgctgctgatccccgatgtctttaccttcaacattctccattcacgtctcgaagagatgaacggcgttccggtgg

SEQ ID NO: 592783 - DNA, 75 bp, synthetic construct
  source 1..75: mol_type = other DNA
cgggcagcgacagaatttgctctgttgctacaaaactggacgttaagcgtgattttcagcgccggactggtggcg

SEQ ID NO: 592784 - DNA, 75 bp, synthetic construct
  source 1..75: mol_type = other DNA
gcaatcggcgctcaaagccgggttaagccacgatacacccgccgttaccatcaacctggtatgtggttccggtct

SEQ ID NO: 592785 - DNA, 75 bp, synthetic construct
  source 1..75: mol_type = other DNA
atgattaaattcccgactaaaaagcgcgttgatttgtataaaaatgctgtcagttctgagcaattacatctggat

SEQ ID NO: 592786 - DNA, 75 bp, synthetic construct
  source 1..75: mol_type = other DNA
tatgaagtctattcatacttggtagataattcacccagtgtcgaaaggaaagctctgcatgaacatattttattt

SEQ ID NO: 592787 - DNA, 75 bp, synthetic construct
  source 1..75: mol_type = other DNA
cacgtaaaaaggccaatgacgctgtatttaaggctcttgacgaacagcaggaaacactgcaaagcgatgctgaca

SEQ ID NO: 592788 - DNA, 75 bp, synthetic construct
  source 1..75: mol_type = other DNA
agtaaggaaggggcaacagaatggtgcgcagaatacgatgagtggggcaacctgctgaatgaagagaacccgcat

SEQ ID NO: 592789 - DNA, 75 bp, synthetic construct
  source 1..75: mol_type = other DNA
ataatgggctgattatttgtctcttgttaaatatgctgtatggtatatataatgatgatgatagactaacaggtt

SEQ ID NO: 592790 - DNA, 75 bp, synthetic construct
  source 1..75: mol_type = other DNA
aagcaaatggtatgcaaacaattccttttcttttaaagaatattttggacttacatggtgtaaaaaaaatagatt

SEQ ID NO: 592791 - DNA, 75 bp, synthetic construct
  source 1..75: mol_type = other DNA
gcaagcaacctttgggaaagcccggcgactatacaggttattgaccaacaaacattgcagaactccaccaattga

SEQ ID NO: 592792 - DNA, 75 bp, synthetic construct
  source 1..75: mol_type = other DNA
aaagctgaacagaacaactctgaggcacgtaaaaaggcgaacgacgccgtgtttaaggctctcgatcaacagcag

SEQ ID NO: 592793 - DNA, 75 bp, synthetic construct
  source 1..75: mol_type = other DNA
cggtatgcgtgacccttttaaaccgccggaagatctatgccggattagcgaagccggattagcgaacttagccag

SEQ ID NO: 592794 - DNA, 75 bp, synthetic construct
  source 1..75: mol_type = other DNA
ctggtgtactcctttgtgtgatacatccttctccagcattgaaaaatacgattctgattgctgggttcccgtcga

SEQ ID NO: 592795 - DNA, 75 bp, synthetic construct
  source 1..75: mol_type = other DNA
cagatttcatcgcggcatttcgccatccagtggtgctgaccggctcactggcagtcgcttttggtaacctgccaa

SEQ ID NO: 592796 - DNA, 75 bp, synthetic construct
  source 1..75: mol_type = other DNA
gcaggtatggcagcgtactattatttccactggcgatgatcatctacgatttttcagcttacctgacaacggacc

SEQ ID NO: 592797 - DNA, 75 bp, synthetic construct
  source 1..75: mol_type = other DNA
aaaacgacgagaagacggaagctattcagaagaatttaggtgatgcaccgccactgtctaacgaagggatgaaac

SEQ ID NO: 592798 - DNA, 75 bp, synthetic construct
  source 1..75: mol_type = other DNA
gattaagcgattatgtggattttacagcgagagcaagtcgggatagcttcttgaaatcattaacattaaccagct

SEQ ID NO: 592799 - DNA, 75 bp, synthetic construct
  source 1..75: mol_type = other DNA
taggctattgctttgataagagacaaagattcattcatgaaaccttatcattataccatgtttgtgattattttg

SEQ ID NO: 592800 - DNA, 75 bp, synthetic construct
  source 1..75: mol_type = other DNA
gggctgacggtggagcaactggccagacaggtggagccggaatacacaccggcgcgaaaagttcatttttaccac

SEQ ID NO: 592801 - DNA, 75 bp, synthetic construct
  source 1..75: mol_type = other DNA
cggggagtatgatgaatggggcaaccagcttaatgaggagaacccgcatcacctgcaccagccgtaccgtctgcc

SEQ ID NO: 592802 - DNA, 75 bp, synthetic construct
  source 1..75: mol_type = other DNA
actaagacatttggatcaacaatagctgacgtgataggtaaaaatcatgaggcggcaggggatagacaaggtcag

SEQ ID NO: 592803 - DNA, 75 bp, synthetic construct
  source 1..75: mol_type = other DNA
aactgggaagtttcgttgtcgcgtcctacctcggtctgctgattatgtttgctgtgcatggcattctgctgggca

SEQ ID NO: 592804 - DNA, 75 bp, synthetic construct
  source 1..75: mol_type = other DNA
acgccaaaaccgagcttaacgctaccctgacacaggggctggatgatctgagccggttccaggtggtgacgttca

SEQ ID NO: 592805 - DNA, 75 bp, synthetic construct
  source 1..75: mol_type = other DNA
gcgtctctgtttatctttctgagatcgccacgccaggcaataaaggcttttacaccagttggcaatcggccagcc

SEQ ID NO: 592806 - DNA, 75 bp, synthetic construct
  source 1..75: mol_type = other DNA
gcaatacagcgactgcgactgtcaaagcatccgaagttgggattcaatgggggcaggggaatataaaacaaggaa

SEQ ID NO: 592807 - DNA, 75 bp, synthetic construct
  source 1..75: mol_type = other DNA
gctgatccgccagcgcgtgtatacccataatgctcgtctggccgaacgttttcgtattgaccgcgtgctgctggc

SEQ ID NO: 592808 - DNA, 75 bp, synthetic construct
  source 1..75: mol_type = other DNA
accctgggcagcaccctgaataaactggcgtcggtgatgacgctcactcgcgctactgccgacattcctgttgaa

SEQ ID NO: 592809 - DNA, 75 bp, synthetic construct
  source 1..75: mol_type = other DNA
ggcaccggttttggcaacctggcgataccgcgtgtgggtcaggaggtgatagtggacttcctcaacggcgatccg

SEQ ID NO: 592810 - DNA, 75 bp, synthetic construct
  source 1..75: mol_type = other DNA
gggtaaaaaaagcctgtacaaaatgtgactgcatcgttgaagcaccggcaccatcccgtccgatagagcgtggta

SEQ ID NO: 592811 - DNA, 75 bp, synthetic construct
  source 1..75: mol_type = other DNA
gcctggcggagaagatgcagcaggaagggagcgaggacgggcacggcgtggtatttccggctgaactggtgcggc

SEQ ID NO: 592812 - DNA, 75 bp, synthetic construct
  source 1..75: mol_type = other DNA
acagcatggcgagccactggtcgagagccgctacctctacgacccgctgggacggcgaatggcgaaacgggtgtg

SEQ ID NO: 592813 - DNA, 75 bp, synthetic construct
  source 1..75: mol_type = other DNA
ccaggaaggccagcaccaggattaccagcgcacacagtatgaagtgtatgactggccggggcgtttcaaaaatgc

SEQ ID NO: 592814 - DNA, 75 bp, synthetic construct
  source 1..75: mol_type = other DNA
ggatggcggcggaggaaggcatcttcttttatgaggagcacgcgcagaaaagtaccgaccagagtctggttctgt

SEQ ID NO: 592815 - DNA, 75 bp, synthetic construct
  source 1..75: mol_type = other DNA
ccaatgaatgggtttgtgaaagcgttcttatcgcaattaccgggctcaaacctggcacaattctccgagcccgga

SEQ ID NO: 592816 - DNA, 75 bp, synthetic construct
  source 1..75: mol_type = other DNA
gtgaccaaggactacacctttaaacgacccggctggccagggcgttttgatcaggaaggccagtaccaggattac

SEQ ID NO: 592817 - DNA, 75 bp, synthetic construct
  source 1..75: mol_type = other DNA
gagcagccgcaggcggtgccgggaaggcggggagcagggacggcgctggagaaccattttgcggtgatcccggca

SEQ ID NO: 592818 - DNA, 75 bp, synthetic construct
  source 1..75: mol_type = other DNA
gctggccaacggtacggttgctctgtcctgcaccaatttcaatctttatgccgcccagagaggacaaattaccgc

SEQ ID NO: 592819 - DNA, 75 bp, synthetic construct
  source 1..75: mol_type = other DNA
tgccgccgcaggttccgcttggcgctaacctggaagaaacggcacagaactatatggcgctgccagctgacttcc

SEQ ID NO: 592820 - DNA, 75 bp, synthetic construct
  source 1..75: mol_type = other DNA
ctaccggtatgatgataccggtcgggtgacggagcaggtcaacccggagggactggactaccgctttgagtacgg

SEQ ID NO: 592821 - DNA, 75 bp, synthetic construct
  source 1..75: mol_type = other DNA
attttgatttcaactggatcgggctggcaaataaggcaacgggtacactggcgatgattattcacgccccgaccc

SEQ ID NO: 592822 - DNA, 75 bp, synthetic construct
  source 1..75: mol_type = other DNA
cctgaaaaaataggctctgcgacaacgttatatgcaaatacttcacgcgtcggctggattatcgccggctctgtt

SEQ ID NO: 592823 - DNA, 75 bp, synthetic construct
  source 1..75: mol_type = other DNA
gccgcgttcaattccgcggtcgagttattgccgttgcatgaggctgaacccgcagcacaggaaattccccaacct

SEQ ID NO: 592824 - DNA, 75 bp, synthetic construct
  source 1..75: mol_type = other DNA
agagattgcgtgtgcccttctgcctatggacttcaaccacttcgagatcccgggcagcattcttcgtcgcgctaa

SEQ ID NO: 592825 - DNA, 75 bp, synthetic construct
  source 1..75: mol_type = other DNA
aggcatgcattaaagagtacaacgccaccctgccgccgccggttaaaaccagcggcagccgtgacgcgctgctgg

SEQ ID NO: 592826 - DNA, 75 bp, synthetic construct
  source 1..75: mol_type = other DNA
gcaacgtgattcgtttcctgtatccgctgaccatcccggatgcgcaattcgatgcggcaatgaaaattttgcagg

SEQ ID NO: 592827 - DNA, 75 bp, synthetic construct
  source 1..75: mol_type = other DNA
ggtcatgccagcgtcaccaccacccagcagtacgatcgccgcggagaagcgcgcctgcgcacggcccgtgaccgt

SEQ ID NO: 592828 - DNA, 75 bp, synthetic construct
  source 1..75: mol_type = other DNA
ccgagctgctcccgcccccggtggtcattccgccagatgaggatgtcctgccggtgctgtcaggtggtaatgccc

SEQ ID NO: 592829 - DNA, 75 bp, synthetic construct
  source 1..75: mol_type = other DNA
accatatggggaatgcgccctttaatccggaaaccggcattcttgatattgattatgatctgaaagataagcgga

SEQ ID NO: 592830 - DNA, 75 bp, synthetic construct
  source 1..75: mol_type = other DNA
gtatcgtatgcggatggggacaggtccacagggagcaataaagcgcgaactgttttctgataaggaaagtctgtg

SEQ ID NO: 592831 - DNA, 75 bp, synthetic construct
  source 1..75: mol_type = other DNA
ccattcatcagtggggcggtacacccgatatggccccccgcccggcaggcgttcctgcgcgtccttatatggggc

SEQ ID NO: 592832 - DNA, 75 bp, synthetic construct
  source 1..75: mol_type = other DNA
tactcaaaaccggttcgcaccgatttccctgtttacaacgatctacctgaagaaagcaccgtggattacacctgg

SEQ ID NO: 592833 - DNA, 75 bp, synthetic construct
  source 1..75: mol_type = other DNA
ccaatgccgatggtggatatgtcaccgaccgcggcgaaggtgcgcatcacacgctggacacactggatctggaga

SEQ ID NO: 592834 - DNA, 75 bp, synthetic construct
  source 1..75: mol_type = other DNA
ctcagtgctggacatgggaaacctggtacatgcgctggcgttgcagccagaacagctcgatgaagaatttagcgt

SEQ ID NO: 592835 - DNA, 75 bp, synthetic construct
  source 1..75: mol_type = other DNA
acgtatcgcgccggaaaatattcatctaactcctgtcgctcacctggagtttgttaaccggaccatgactgctgc

SEQ ID NO: 592836 - DNA, 75 bp, synthetic construct
  source 1..75: mol_type = other DNA
ccctgaaggcgcattcacaacggccgcgaccctgcgcgcctttatcgatgagcacaatgccagcctgccggcgct

SEQ ID NO: 592837 - DNA, 75 bp, synthetic construct
  source 1..75: mol_type = other DNA
cgccttcatgtcgggctggattaaagccgatgaccgcaaccagctggttgaagactggaagagcggcaagcttcc

SEQ ID NO: 592838 - DNA, 75 bp, synthetic construct
  source 1..75: mol_type = other DNA
ctgctgcaggccaaaaatgacgttgcggatattggcgacctcagtctgcatgctgagtggaaactggtgcaggcc

SEQ ID NO: 592839 - DNA, 75 bp, synthetic construct
  source 1..75: mol_type = other DNA
tatcccgcttacttcgagcctgggcgctatgaaggtctgccgaacgaggtttatcacgcagcgaacgggatcagc

SEQ ID NO: 592840 - DNA, 75 bp, synthetic construct
  source 1..75: mol_type = other DNA
gtccgcgtgcgtcctgaccttgagatcgacttggacggggtacgcatcggtgccgaccttaaaaccatcagcatg

SEQ ID NO: 592841 - DNA, 75 bp, synthetic construct
  source 1..75: mol_type = other DNA
gcgcctcagcggatacatcagtgccaatctgactgaaagcgatcatggaaaaccaacagccgaaacgttggctgc

SEQ ID NO: 592842 - DNA, 75 bp, synthetic construct
  source 1..75: mol_type = other DNA
agcacgatatccataaagtcgtgaatgccgttaagaaagccttccctgtcgacggtaaaaaaccggaactggcaa

SEQ ID NO: 592843 - DNA, 75 bp, synthetic construct
  source 1..75: mol_type = other DNA
gacgccgatactgaagacagcaccgcagaagaatctcagcagtcagagcagccgaacctgatcgtcgttgccacc

SEQ ID NO: 592844 - DNA, 75 bp, synthetic construct
  source 1..75: mol_type = other DNA
catcgaaaccggccgtggtaaggactacgccaaacctattcgcactgatttcccggtgtacaacgacctgccaga

SEQ ID NO: 592845 - DNA, 75 bp, synthetic construct
  source 1..75: mol_type = other DNA
taaatgtcaggcactgaaaatgatggtcgaagagatccgcaaagacgaacagctctacttcatcgatatgtcttc

SEQ ID NO: 592846 - DNA, 75 bp, synthetic construct
  source 1..75: mol_type = other DNA
cccaacgctgcttctgactgactatgattcgattaataactcacattgtcctggcattaatacagattattttcg

SEQ ID NO: 592847 - DNA, 75 bp, synthetic construct
  source 1..75: mol_type = other DNA
tttctgataatgatggcagaggagcatactgccgcgcggtatcagaattgttaacctttacctcttacggttgtg

SEQ ID NO: 592848 - DNA, 75 bp, synthetic construct
  source 1..75: mol_type = other DNA
agcttgctgaaaggctgggaaaagtggcagggtcacttactagtcttgcattggccatttgtgtgttaattatga

SEQ ID NO: 592849 - DNA, 75 bp, synthetic construct
  source 1..75: mol_type = other DNA
gtgcaggtgggtattcgtccggagtatctcgaccgcctgcctcatgcgttctccggcgggcagcggcaacgcatc

SEQ ID NO: 592850 - DNA, 75 bp, synthetic construct
  source 1..75: mol_type = other DNA
cagaacctgctaaatccgaaaccaagcccaccgattcactggcgtcgatcactgacgtgtacgcggcactcattg

SEQ ID NO: 592851 - DNA, 75 bp, synthetic construct
  source 1..75: mol_type = other DNA
ccacgaagttgtaatctctgatgtcgcaaaaatcagagcagcagagcgggctatcgctaagaaggcaccgttcca

SEQ ID NO: 592852 - DNA, 75 bp, synthetic construct
  source 1..75: mol_type = other DNA
aagctacacgacattgtggtacaggtgaataccagtagccgtgagccaattgattctacatgccgtttccagtat

SEQ ID NO: 592853 - DNA, 75 bp, synthetic construct
  source 1..75: mol_type = other DNA
gactcttgttgactatagtagcactgataactcgttttgccctgggataaatacgacgctgtttcgatgcgcata

SEQ ID NO: 592854 - DNA, 75 bp, synthetic construct
  source 1..75: mol_type = other DNA
ctcctggagtgaaaattatgtcagccataataaggcgttacgaattcagtccacggggtcaacagtgaccaccac

SEQ ID NO: 592855 - DNA, 75 bp, synthetic construct
  source 1..75: mol_type = other DNA
cgggttcagctccaactttggtactgactgactttgatacaattaataactcaaattgccctggcatagatacga

SEQ ID NO: 592856 - DNA, 75 bp, synthetic construct
  source 1..75: mol_type = other DNA
ttcttacaccagtgggtgctgcaatcggcgttcttttctgtatgtgggttgaacgtaaggggcttcttgcatgga

SEQ ID NO: 592857 - DNA, 75 bp, synthetic construct
  source 1..75: mol_type = other DNA
gtggcattgaacagcgactatttctccaaagccaatattgaactggaaaacaccgtcatcaacctggtaccaacg

SEQ ID NO: 592858 - DNA, 75 bp, synthetic construct
  source 1..75: mol_type = other DNA
gcacgggcgattaaagcgggcgatggcgacttgctgatcgccggtggtgtggaatcaatgtcacgggcaccgttt

SEQ ID NO: 592859 - DNA, 75 bp, synthetic construct
  source 1..75: mol_type = other DNA
gaattcgtacgccaattggccgctatggtggggcattatcaggtgttcgggctgacgatctggctgctatccctt

SEQ ID NO: 592860 - DNA, 75 bp, synthetic construct
  source 1..75: mol_type = other DNA
gcccgcctggcactggctgccagccatgagctgcatcggcgtaacggtcgttacgcattgtgcaccatgtgcatc

SEQ ID NO: 592861 - DNA, 75 bp, synthetic construct
  source 1..75: mol_type = other DNA
acgtcaacgcctactacggaagagagataccaagaagcgaagagcttgggctcgaacccaacaaactttaccggc

SEQ ID NO: 592862 - DNA, 75 bp, synthetic construct
  source 1..75: mol_type = other DNA
tattaatccaaacactattccatcgggaatcaacagacctgtttttgataagtggaaagagcagtattggcggca

SEQ ID NO: 592863 - DNA, 75 bp, synthetic construct
  source 1..75: mol_type = other DNA
ctgaacctattgattttaatggaaataaagtttatcagagaaacgatctttttgacccctataaggtatcatcat

SEQ ID NO: 592864 - DNA, 75 bp, synthetic construct
  source 1..75: mol_type = other DNA
cgaaatgaagttaaacaacttttctattgtgatataactcctcatacttatgccattcatcactggcaacaaagt

SEQ ID NO: 592865 - DNA, 75 bp, synthetic construct
  source 1..75: mol_type = other DNA
acagacttaacaagcaaaataatcaaagcgtatgacttcggaactcgagcggttaatgttaaatatcattttcaa

SEQ ID NO: 592866 - DNA, 75 bp, synthetic construct
  source 1..75: mol_type = other DNA
atgattatgaattgttcctctgcgacgatgctaatcaaaaaagtgctggagtgcttttccatctattgcgatgat

SEQ ID NO: 592867 - DNA, 75 bp, synthetic construct
  source 1..75: mol_type = other DNA
cgggctggacgcactggggttcgccgcacgggcgattaaagcgggcgatggcgatttgctgatcgccggtggcgt

SEQ ID NO: 592868 - DNA, 75 bp, synthetic construct
  source 1..75: mol_type = other DNA
gttatgggcaaggcagccagtgcattttctcgtcaggctgagatgtttgataccactattggctggcgatttgtg

SEQ ID NO: 592869 - DNA, 75 bp, synthetic construct
  source 1..75: mol_type = other DNA
cgaacgggaatatatttatacacaattaacacaacttcttactgataaaaaacatggactccgtgagattccttt

SEQ ID NO: 592870 - DNA, 75 bp, synthetic construct
  source 1..75: mol_type = other DNA
ctgctccccgctgaaatcgcggaactggaagcattagcgctggatcagaaccgttcgatgtccagcatggcaaga

SEQ ID NO: 592871 - DNA, 75 bp, synthetic construct
  source 1..75: mol_type = other DNA
gaaaagttcacctttatcactgcgaccaccggggactgccgctggcgctcatcagcgaagacggcaatacgatgt

SEQ ID NO: 592872 - DNA, 75 bp, synthetic construct
  source 1..75: mol_type = other DNA
atgcacaattaaatacaacaaagagaggacaagaaataacaaaaccgttagaagattcgaaagatgtatataata

SEQ ID NO: 592873 - DNA, 75 bp, synthetic construct
  source 1..75: mol_type = other DNA
cgccgatgtcagaacggcgcagatcgcggatctggtggtcattaaggacggctcagtggctgacggcgcgacggc

SEQ ID NO: 592874 - DNA, 75 bp, synthetic construct
  source 1..75: mol_type = other DNA
aagatccccgccactggcgggttttttgtgcccaaaaaacggcacagaacattaaacgcgctggtggttgcgaat

SEQ ID NO: 592875 - DNA, 75 bp, synthetic construct
  source 1..75: mol_type = other DNA
attgagaatcagtacaccttcccgattaccgcgaaatatgtccgcgtgaaggaggaagcactacagcctggagaa

SEQ ID NO: 592876 - DNA, 75 bp, synthetic construct
  source 1..75: mol_type = other DNA
agttcgttcggaccgttatggacagctgaaaaactggggcggaaactgggggaatatcagcctgtaccgacagat

SEQ ID NO: 592877 - DNA, 75 bp, synthetic construct
  source 1..75: mol_type = other DNA
tgacgcaggacggctcagtggctgatggttcgacggcgaatacgctgcgggtgaaggtcaccgatgcgttcggga

SEQ ID NO: 592878 - DNA, 75 bp, synthetic construct
  source 1..75: mol_type = other DNA
cttcaaatgattacagtattagtggcgatgccgccagcgcacaaattgtcgcgatgcaagtgacaacgggtaacc

SEQ ID NO: 592879 - DNA, 75 bp, synthetic construct
  source 1..75: mol_type = other DNA
gttcaagttgctgaaggcatgcctggacgcagggcatgacccggttgacgtgatcaacaccagtatcgccaacgg

SEQ ID NO: 592880 - DNA, 75 bp, synthetic construct
  source 1..75: mol_type = other DNA
tagccgggcagacggtcagcgtgttggcggacaacggcgcaacgactgccccgacggtcatcacagagccggacg

SEQ ID NO: 592881 - DNA, 75 bp, synthetic construct
  source 1..75: mol_type = other DNA
gctcagtggctgacggcgcgacggcgaatacgctgcaggtgaaggtcactgatgctaacggtaatgcgcttgccg

SEQ ID NO: 592882 - DNA, 75 bp, synthetic construct
  source 1..75: mol_type = other DNA
atggccggcgatgctcacgcaatggcaattgctcagggccagtactcagccacaacggctcgcaaccttgaaacc

SEQ ID NO: 592883 - DNA, 75 bp, synthetic construct
  source 1..75: mol_type = other DNA
cgcctttattgctcaaaccggccatgagagcgcgggtttcagtcggctcagtgaaaatctctattactcagatgc

SEQ ID NO: 592884 - DNA, 75 bp, synthetic construct
  source 1..75: mol_type = other DNA
gcaggcttcgataagtttcaattacaagggtaactggaaagtgtctggcgtaaagagcattactcaagatgggtt

SEQ ID NO: 592885 - DNA, 75 bp, synthetic construct
  source 1..75: mol_type = other DNA
tagcaggagcgtaccaacccaaagcagtaaacctagacaattctgctcctgaaggcgttgaggttgtgcgaccaa

SEQ ID NO: 592886 - DNA, 75 bp, synthetic construct
  source 1..75: mol_type = other DNA
tcaaacacaccaaaaagccttaactaaagattacttccgctggttatacaccgctataacgagaacttctggcat

SEQ ID NO: 592887 - DNA, 75 bp, synthetic construct
  source 1..75: mol_type = other DNA
ggctatagaacatgggtggcagctaatgatcgtggacttaaatataacgggaaagtcattgctcaaatggatggg

SEQ ID NO: 592888 - DNA, 75 bp, synthetic construct
  source 1..75: mol_type = other DNA
atgaatttgacagcaatgaatcttgtgaatgcgatagccaacctgcccaaaaacaggcagtttgattatgtgaat

SEQ ID NO: 592889 - DNA, 75 bp, synthetic construct
  source 1..75: mol_type = other DNA
tattagtggttttttgattaccagcattttgctaaaagaatgcagcaatggaacatttacattctctggatttta

SEQ ID NO: 592890 - DNA, 75 bp, synthetic construct
  source 1..75: mol_type = other DNA
atgacgaactgaaaaaagacgcctatcaggcctttgaaaaactgaatctgtcgccttcagacgcacttcgtctgt

SEQ ID NO: 592891 - DNA, 75 bp, synthetic construct
  source 1..75: mol_type = other DNA
ggtcgggtgcatggttcagaaacatgtatgatcaaactgctaccgccacacctataatgggtgatgctgccaact

SEQ ID NO: 592892 - DNA, 75 bp, synthetic construct
  source 1..75: mol_type = other DNA
gaaagcggtggttttaacactgttagcgagaatctctattactccgacgctgagcgtgttgcccgtatttttaaa

SEQ ID NO: 592893 - DNA, 75 bp, synthetic construct
  source 1..75: mol_type = other DNA
acatcagccctgaactcgctcaatttggtaaaagtgccgagctgtattaccatgatgataagcaggtagcactag

SEQ ID NO: 592894 - DNA, 75 bp, synthetic construct
  source 1..75: mol_type = other DNA
cgctacaagatgaatactctcaacaactaaatattttaacagaaaaaaatccctgttgtagcatatcgaatttat

SEQ ID NO: 592895 - DNA, 75 bp, synthetic construct
  source 1..75: mol_type = other DNA
agttatgctatctgatataaaggaaatcctcggtaaagataaacttgaagacatattaagttggtcaggtttttt

SEQ ID NO: 592896 - DNA, 75 bp, synthetic construct
  source 1..75: mol_type = other DNA
ggctgttgcgtcatgtcaaatcctgccagtggcctcatggtgactatcatcacagtgaaatcgtcatacatcgtt

SEQ ID NO: 592897 - DNA, 75 bp, synthetic construct
  source 1..75: mol_type = other DNA
aaaaccactcattttctgcagtctgggaaaagtgctaccaaaaagagacggtagtaaaaaaattgattttcaaac

SEQ ID NO: 592898 - DNA, 75 bp, synthetic construct
  source 1..75: mol_type = other DNA
tcaggcgtgggaagtgttcgaaaaactggaagactgctatttcagcccgggcaaagcggaacagcacccgcagat

SEQ ID NO: 592899 - DNA, 75 bp, synthetic construct
  source 1..75: mol_type = other DNA
cacccgcaagggaaatatgcccgccgtctatcgccggttttgagcgcccgaccaccctctcaaaaggggtgaatt

SEQ ID NO: 592900 - DNA, 75 bp, synthetic construct
  source 1..75: mol_type = other DNA
taaacgtatgacgctgcgccaggcgttgttgaacctcgaggcagaatccaaaatcttccgtaaggatcgtaaagg

SEQ ID NO: 592901 - DNA, 75 bp, synthetic construct
  source 1..75: mol_type = other DNA
ttcccgagacgctcgcgccactgattgcagtgacgccatcaactgaactctatcgcatcaccggctggggggcgc

SEQ ID NO: 592902 - DNA, 75 bp, synthetic construct
  source 1..75: mol_type = other DNA
gctttcagcgggctgcaattgagcaagggcgggagccttcctgggggtttaccgagaaaagccgtaccagagata

SEQ ID NO: 592903 - DNA, 75 bp, synthetic construct
  source 1..75: mol_type = other DNA
cctcggtagaagctatcacggataccgtataccgtgttcgaatcgtgccagatgcggccttttcattccgtgcag

SEQ ID NO: 592904 - DNA, 75 bp, synthetic construct
  source 1..75: mol_type = other DNA
gacgcggccttttcttttcgtgctggtcagtatttgatggtagtgatggatgagcgcgacaaacgtccgttctca

SEQ ID NO: 592905 - DNA, 75 bp, synthetic construct
  source 1..75: mol_type = other DNA
cggacttaacagggcaacgcttgaaaagctggtggagtcctatcgggagctggatgaagcgctggcgatgagggg

SEQ ID NO: 592906 - DNA, 75 bp, synthetic construct
  source 1..75: mol_type = other DNA
atggcctcgacgccggatgaaaaaggtttcattgagctgcatataggtgcttctgaaatcaatctttacgcaaaa

SEQ ID NO: 592907 - DNA, 75 bp, synthetic construct
  source 1..75: mol_type = other DNA
gctggcagagcatgatatctatattgccggacgttttgagatggcgaaaatcgcccgtgatctgttttgcagtga

SEQ ID NO: 592908 - DNA, 75 bp, synthetic construct
  source 1..75: mol_type = other DNA
gagcttgaggcgctttcgctgaagcatcctggtctgcaagtggtgccggtggttgaacaaccggaagcgggctgg

SEQ ID NO: 592909 - DNA, 75 bp, synthetic construct
  source 1..75: mol_type = other DNA
caggcgtgggaagtgttcgaaaaactggaagactgctatttcagccagggaaaaacaacacaaaccgaacagcac

SEQ ID NO: 592910 - DNA, 75 bp, synthetic construct
  source 1..75: mol_type = other DNA
aatccggtagtggacgaacgtgaagtgaccacgcgcaagagcttcccaacgcagccacacccgcacggcacgctg

SEQ ID NO: 592911 - DNA, 75 bp, synthetic construct
  source 1..75: mol_type = other DNA
cggaacactctgtttcgatatgacgctgagtgcgcaaaaggccattacagagctgggatatcgcccgcgcttttc

SEQ ID NO: 592912 - DNA, 75 bp, synthetic construct
  source 1..75: mol_type = other DNA
agtgacccacactctggcacaggcggcaggcgggctgaatattccccggtttatccatatctccacgcctgcggt

SEQ ID NO: 592913 - DNA, 75 bp, synthetic construct
  source 1..75: mol_type = other DNA
aatcacgagaacatggcttcatctgcatacaagcataaaaataataaagtgctctacgagttattaaaatacgag

SEQ ID NO: 592914 - DNA, 75 bp, synthetic construct
  source 1..75: mol_type = other DNA
gcataaaaataataaagtgctctacgagttattaaatacgagagacatgatcttgaatgagttgcacaaacatgt

SEQ ID NO: 592915 - DNA, 75 bp, synthetic construct
  source 1..75: mol_type = other DNA
taactgaatctgttcaaaaaagtattgtagagaaatcaatctgctcggttgtacctagtatcagcaagatatggg

SEQ ID NO: 592916 - DNA, 75 bp, synthetic construct
  source 1..75: mol_type = other DNA
tgagcaggttgccacaataccggaaaagcagtggcatgcttttgttctggccgtaacagaaaccttctggcagtt

SEQ ID NO: 592917 - DNA, 75 bp, synthetic construct
  source 1..75: mol_type = other DNA
acttctgttgaaggcaagcaggagcactacttcaccacacgtcttactgatgcgacgattgtggacatgaacctg

SEQ ID NO: 592918 - DNA, 75 bp, synthetic construct
  source 1..75: mol_type = other DNA
catgctcgtctggatggaaaaagcacaacaactcagtaagcagctataccccgtcatgagagaactgaactctga

SEQ ID NO: 592919 - DNA, 75 bp, synthetic construct
  source 1..75: mol_type = other DNA
agaaacataagacacgcacctaatataagagaggagcaaattaaaaggatgaataacgacaacaataaggatgga

SEQ ID NO: 592920 - DNA, 75 bp, synthetic construct
  source 1..75: mol_type = other DNA
gggttcggcggagactggcgggtgcgccagcagctgcctgtcggagtcgggcctgacgaccggatgccgccaggc

SEQ ID NO: 592921 - DNA, 75 bp, synthetic construct
  source 1..75: mol_type = other DNA
aaatccggttgtcagtattcgatattattatgaactgcgttccttgccgtgcattgaggatattctggcaataca

SEQ ID NO: 592922 - DNA, 75 bp, synthetic construct
  source 1..75: mol_type = other DNA
aaggaatgtagggcgctttcagattggaaaacacttttttaagatcgaaggtgaagagttacgtgaattgaagca

SEQ ID NO: 592923 - DNA, 75 bp, synthetic construct
  source 1..75: mol_type = other DNA
acaaaaatcaggccgggagtcttgattcatatctgaaacgttatcaggacgtgaattactaccgctcatcaccgt

SEQ ID NO: 592924 - DNA, 75 bp, synthetic construct
  source 1..75: mol_type = other DNA
aaactgaaagagctggataacttatccgcgctggctgtggtgaaagacagccgttccgccatgtcagccgtatac

SEQ ID NO: 592925 - DNA, 75 bp, synthetic construct
  source 1..75: mol_type = other DNA
accattcgcgaagttgtcgagcgccctgtgccgatggcaatgatggcggatcgctacttcaccaccaaaaaggac

SEQ ID NO: 592926 - DNA, 75 bp, synthetic construct
  source 1..75: mol_type = other DNA
atcagcgcagttaacaacgttcaggctgtgactaaacaaatccagcagtaccagacgcagctgcagcagtatgaa

SEQ ID NO: 592927 - DNA, 75 bp, synthetic construct
  source 1..75: mol_type = other DNA
tcccgcgacactgtacggaaggcaaccaatggcgtgaaacatgtggtgccaatggatgttatcgagagactcccg

SEQ ID NO: 592928 - DNA, 75 bp, synthetic construct
  source 1..75: mol_type = other DNA
gtgacctgaaggtccgcgtggtgaagtcacagaaagaggctgaagcgctggcgggtgaatcgttcgacggttacg

SEQ ID NO: 592929 - DNA, 75 bp, synthetic construct
  source 1..75: mol_type = other DNA
taacgatgacattcagggcaccgcggcggtaacagtcggcacactgatcgcagccagccgcgcggcaggtggtca

SEQ ID NO: 592930 - DNA, 75 bp, synthetic construct
  source 1..75: mol_type = other DNA
tggaagaacgccgtaacttcaacctggtggggttactgccggaagtggtcgaaaccatcgaagaacaagcggaac

SEQ ID NO: 592931 - DNA, 75 bp, synthetic construct
  source 1..75: mol_type = other DNA
gcgtggcggtgaaaacctctgccgaagccctgcaacaggccattgacgataatttctggcgagcggaatatcgcg

SEQ ID NO: 592932 - DNA, 75 bp, synthetic construct
  source 1..75: mol_type = other DNA
tggcaggtattcactgatgacagaccggatacaatgcgtgtgattgcagagcgcaaggaccaggaaactggtgaa

SEQ ID NO: 592933 - DNA, 75 bp, synthetic construct
  source 1..75: mol_type = other DNA
gaagtgcaggcccgtcttgcccgtggcaacgcgccgacggcggaagaactggtgcgttcccagatggctgaaggt

SEQ ID NO: 592934 - DNA, 75 bp, synthetic construct
  source 1..75: mol_type = other DNA
tgataataaatcagatcttgaactggttaagcgtgcgaaaacatcgacaattattgcaaaaaataaacatgtgta

SEQ ID NO: 592935 - DNA, 75 bp, synthetic construct
  source 1..75: mol_type = other DNA
tcaggctgatttgaaccgggcttatgactcgctgcatgaccttgcggaagtactgaatgtaccgacaaaagcgct

SEQ ID NO: 592936 - DNA, 75 bp, synthetic construct
  source 1..75: mol_type = other DNA
tcgtcattatgaaatcgatgttcgggggcaaggccggtgagtactggagtattcctctgccttacgggtacaacg

SEQ ID NO: 592937 - DNA, 75 bp, synthetic construct
  source 1..75: mol_type = other DNA
tgcctggcagaacgcctaccgttactacgttcccctgaaaggtcaggatgttgacggtgtggtgtcactgccccg

SEQ ID NO: 592938 - DNA, 75 bp, synthetic construct
  source 1..75: mol_type = other DNA
attgtcctggtggcggataacatccctgacgggcggaccgttcgcgagaagctgcgtcacgagattatccaccat

SEQ ID NO: 592939 - DNA, 75 bp, synthetic construct
  source 1..75: mol_type = other DNA
caattcgtatacagcagaatcaccatgaaaataaatctcggtttattgagggaaagcacttctttaaagctgttg

SEQ ID NO: 592940 - DNA, 75 bp, synthetic construct
  source 1..75: mol_type = other DNA
gatgacagaataacctttgacgtgtaccggcataaggccagtggcgacatttttatcggttatggcaaaaacagg

SEQ ID NO: 592941 - DNA, 75 bp, synthetic construct
  source 1..75: mol_type = other DNA
ctgggcgatgtattgccaacaatgggtaaaggtttcgcccagtccgtccggggaacaggggaaatggcccgtgga

SEQ ID NO: 592942 - DNA, 75 bp, synthetic construct
  source 1..75: mol_type = other DNA
tgccctcccgttacgcggatacctggcaactgttacgcactctgccaccctcacagatggacaaggcttctgctt

SEQ ID NO: 592943 - DNA, 75 bp, synthetic construct
  source 1..75: mol_type = other DNA
tcccttccggaactggcacagcaggcagaagcacgcagacagaccggggataatcgccagaccataaccgatgtt

SEQ ID NO: 592944 - DNA, 75 bp, synthetic construct
  source 1..75: mol_type = other DNA
gtggggttgatatgccacagcctgaatcactccctcgtatggttcgtgactcccttccggaactggcacagcagg

SEQ ID NO: 592945 - DNA, 75 bp, synthetic construct
  source 1..75: mol_type = other DNA
cgaaacactgggtaaaacgctggaagacagggattatttcacgcagccgctgagcaaagtgttcccgaaaccgga

SEQ ID NO: 592946 - DNA, 75 bp, synthetic construct
  source 1..75: mol_type = other DNA
gcaagatgtcgccgggggcgcagcgggcgctgaatacaccgatgactgaaggatatgatgattctgcggtctggg

SEQ ID NO: 592947 - DNA, 75 bp, synthetic construct
  source 1..75: mol_type = other DNA
gcaataaggacaataaggggactaacctctttttctcggaaagcagggatgaattactgacaaaggcgaaagtct

SEQ ID NO: 592948 - DNA, 75 bp, synthetic construct
  source 1..75: mol_type = other DNA
atgagatggtgaagctggcgacggcggtggcgcatctgattggtcgctcaaatttcgatgcgatgagcggtcagt

SEQ ID NO: 592949 - DNA, 75 bp, synthetic construct
  source 1..75: mol_type = other DNA
gacgataaatttgcttaatgccctggtttggctggcgatcaatctggttaatcgattaagggaaagactcgtcag

SEQ ID NO: 592950 - DNA, 75 bp, synthetic construct
  source 1..75: mol_type = other DNA
tacctgacaacgcgaggttttttacccttcgcaccagaggcagacttctgggtcggcaaacataaactcccgcaa

SEQ ID NO: 592951 - DNA, 75 bp, synthetic construct
  source 1..75: mol_type = other DNA
tgagcgagctttcggacgccattgaaaccagtaaaggcattctttctgtacccgttcccgttggcaaattcctgt

SEQ ID NO: 592952 - DNA, 75 bp, synthetic construct
  source 1..75: mol_type = other DNA
ccggatctgcgccgtgaactgatgcgtcagcgtggctatttcgcttacgccactaaccactaccagacgcatcag

SEQ ID NO: 592953 - DNA, 75 bp, synthetic construct
  source 1..75: mol_type = other DNA
cgccagccgcaccgcgtgatggagttgcataacgacggcacctacgttgaagaaatcaccgactatgtgctgatg

SEQ ID NO: 592954 - DNA, 75 bp, synthetic construct
  source 1..75: mol_type = other DNA
cagactgcctgatatgttctgtattgacagacagggatatgtcatcgaggaagatattccactgtcgctggtcta

SEQ ID NO: 592955 - DNA, 75 bp, synthetic construct
  source 1..75: mol_type = other DNA
cactctgtctccatgattgcacaaaagtgtggctacaacagcacgtcatatttcatctcagcttttaaggattat

SEQ ID NO: 592956 - DNA, 75 bp, synthetic construct
  source 1..75: mol_type = other DNA
tatgggatgacaccattacactattatgataatgccgtaagtgaaatggctgaaaataaacagcaagacccctta

SEQ ID NO: 592957 - DNA, 75 bp, synthetic construct
  source 1..75: mol_type = other DNA
tatctgactgacaatattattatggctaacgcgcttgtctattctcatggcgaagatgtttatagttatgaaagt

SEQ ID NO: 592958 - DNA, 75 bp, synthetic construct
  source 1..75: mol_type = other DNA
gatccacagtttgccgggcagaccaaagagcgtctctcttcgcgtcagtgcgcggcattcgtttcgggcgtggtg

SEQ ID NO: 592959 - DNA, 75 bp, synthetic construct
  source 1..75: mol_type = other DNA
gcacgcaaggcgttaaacacatggaatagacaagagcaatttaaagtaaagttagagtttaaaagagctttactt

SEQ ID NO: 592960 - DNA, 75 bp, synthetic construct
  source 1..75: mol_type = other DNA
tacaaaattaaacttcgtgcatcgggatttcgtcttgtttatcaggtgattgacgatatgttaattattgcggtt

SEQ ID NO: 592961 - DNA, 75 bp, synthetic construct
  source 1..75: mol_type = other DNA
tataaagatgaagagaagaaaaagtatacgccagcgacagtgaatcatagcgtaagtaccaatgatcaagggtat

SEQ ID NO: 592962 - DNA, 75 bp, synthetic construct
  source 1..75: mol_type = other DNA
acctaaatcatgggcaattggttctctgggccgctttggtaacgaatactccggctggtttgatttgcagttaaa

SEQ ID NO: 592963 - DNA, 75 bp, synthetic construct
  source 1..75: mol_type = other DNA
agttacaacggctactaccgttctggttggggaacagcctctcatggttcacctaaatcatgggcaattggttct

SEQ ID NO: 592964 - DNA, 75 bp, synthetic construct
  source 1..75: mol_type = other DNA
gcttccggctggtttatcaggttattgacgctgaattaattatcgctgttgtagctgtaggtaaacgtgaacgta

SEQ ID NO: 592965 - DNA, 75 bp, synthetic construct
  source 1..75: mol_type = other DNA
ggcaaaaactggataaggcaattcagcagcagtttgctaaaaagctaaagaagtgcagtgaaaatccacatatcc

SEQ ID NO: 592966 - DNA, 75 bp, synthetic construct
  source 1..75: mol_type = other DNA
gctgttgttgctattgggaaacgtgaacgtagtgatgtttataatcttgccagccgagtaggcagcctggcggct

SEQ ID NO: 592967 - DNA, 75 bp, synthetic construct
  source 1..75: mol_type = other DNA
tacaaaattaaacttcgtgcgtctggcttccgcctggtttatcaggtgattgatgatcaattagttatcgctgtt

SEQ ID NO: 592968 - DNA, 75 bp, synthetic construct
  source 1..75: mol_type = other DNA
gctggaagcggtgcaggaagaaatggctaacgaatttcgtgatctgcttgttgagaaattcaaagacagcaaagt

SEQ ID NO: 592969 - DNA, 75 bp, synthetic construct
  source 1..75: mol_type = other DNA
gtgcgctttccactgccagcatcgatgactttacccgttattctaaagatcttgcagatgaaggcacccgctgct

SEQ ID NO: 592970 - DNA, 75 bp, synthetic construct
  source 1..75: mol_type = other DNA
tattacgcacgctggcaacttacttagctacctggacgcgtgattacgaaacggtttatcgctatggcggcgaag

SEQ ID NO: 592971 - DNA, 75 bp, synthetic construct
  source 1..75: mol_type = other DNA
acgatccgtagcaatatggatgttttgacgggattgccgggtcgtcgggttcttgatgaatccttcgatcatcag

SEQ ID NO: 592972 - DNA, 75 bp, synthetic construct
  source 1..75: mol_type = other DNA
tacaaaataaaacttcgcgcatctggttttcgcttggtttatcaggtgattgaaaatcaattaattatcgctgtt

SEQ ID NO: 592973 - DNA, 75 bp, synthetic construct
  source 1..75: mol_type = other DNA
aggtttattacgcgctgacggaagaagaaaaagagggcgtgcttgagcagttaaaacgcaaaaaaggcaagccta

SEQ ID NO: 592974 - DNA, 75 bp, synthetic construct
  source 1..75: mol_type = other DNA
gtcagtctgatgtctaacatccgcgttgatttgatggcatatctgttcggtgatttattggctgtaacaccggaa

SEQ ID NO: 592975 - DNA, 75 bp, synthetic construct
  source 1..75: mol_type = other DNA
tgttttggtggggatggtggcagtgactggcggtttaaccttttccgcattttacgatacacctgcaggcccgtc

SEQ ID NO: 592976 - DNA, 75 bp, synthetic construct
  source 1..75: mol_type = other DNA
tgaaatttgtcggcgcgttgattattacctcgctgctgattattcctgcggctactgcacgtcgttttgcccgca

SEQ ID NO: 592977 - DNA, 75 bp, synthetic construct
  source 1..75: mol_type = other DNA
gattgatgtgaacctgaccgccgcattcgagttaagctacgaagcggcaaaaattatgatcccgcagaaaagcgg

SEQ ID NO: 592978 - DNA, 75 bp, synthetic construct
  source 1..75: mol_type = other DNA
aaattattgaaaaacagggcgttgaagttgattttatgcaggtggatatcaccgcagaaggcgcgccacagaaga

SEQ ID NO: 592979 - DNA, 75 bp, synthetic construct
  source 1..75: mol_type = other DNA
ataagctggcagacgtttgtgaacggctgtatttactggtggtgtaccacgctggaaggcatgcgggatttaatc

SEQ ID NO: 592980 - DNA, 75 bp, synthetic construct
  source 1..75: mol_type = other DNA
atgtctctaaagaaacgtttactaaggaaaagtttgatagctatgttaaatctgtgttttcaaaaataagctttt

SEQ ID NO: 592981 - DNA, 75 bp, synthetic construct
  source 1..75: mol_type = other DNA
ggctaaattcctggaagatagctcctaacgaacgtgtgataaaaaaggtgtcccagggcttagttgttttcaacc

SEQ ID NO: 592982 - DNA, 75 bp, synthetic construct
  source 1..75: mol_type = other DNA
caacaatttgataatggtgttatggggctaaattccaggatggcagtgtttgatgaaaataaaaaaataataggt

SEQ ID NO: 592983 - DNA, 75 bp, synthetic construct
  source 1..75: mol_type = other DNA
tttactgggagtcgcgtttggtttgttactggatgtgaatcctttctatgcggtgattgcggttacgctgctgct

SEQ ID NO: 592984 - DNA, 75 bp, synthetic construct
  source 1..75: mol_type = other DNA
ggctaaattccacgaagaaagtacttgataaaaataacaaaataatttattcctcagggcttagttgttttcaat

SEQ ID NO: 592985 - DNA, 75 bp, synthetic construct
  source 1..75: mol_type = other DNA
tcatggggtcggggtagatcagaatcaacaatttgataatggtgttatggggctaaattccacgaagaaagtact

SEQ ID NO: 592986 - DNA, 75 bp, synthetic construct
  source 1..75: mol_type = other DNA
ttgccatggcgctggccaaagctggtgcaaatatctttattccaagcttcgttaaagataacggcgaaacaaagg

SEQ ID NO: 592987 - DNA, 75 bp, synthetic construct
  source 1..75: mol_type = other DNA
ctggccggatgaagccttctttgacagcccgcgcttctctgtttcccgtcttacacatgtgctgaaagccaaagc

SEQ ID NO: 592988 - DNA, 75 bp, synthetic construct
  source 1..75: mol_type = other DNA
gaaactacgcttgatccgaatactcgccgtctggtgcagttaaccattgatgatgaagacgatcagcgtactgac

SEQ ID NO: 592989 - DNA, 75 bp, synthetic construct
  source 1..75: mol_type = other DNA
gcggagaactgctgaccgaaagctacgtcaacctgatccctacgatgcagggcggtacgcacgttaacggtttgc

SEQ ID NO: 592990 - DNA, 75 bp, synthetic construct
  source 1..75: mol_type = other DNA
gcggtaaatggcctgccgacgctgccggaaaaaccgtttatcggcaatttttctggcgataccgaagcggtggac

SEQ ID NO: 592991 - DNA, 75 bp, synthetic construct
  source 1..75: mol_type = other DNA
ggtggttaacgccctgtcgaagcgcgtagaagttaacgtacgccgcgatggtcagatctataacatcgcctttga

SEQ ID NO: 592992 - DNA, 75 bp, synthetic construct
  source 1..75: mol_type = other DNA
acttccgcacgctggtgaaacacggtcacgtttacgtcgctctgccaccgttgtatcgaatcgatctgggcaagg

SEQ ID NO: 592993 - DNA, 75 bp, synthetic construct
  source 1..75: mol_type = other DNA
tggggcgatacacaggatttaatgggcgcagccgtattcctcgcaagcccggcatcgaattatgtgaatggtcat

SEQ ID NO: 592994 - DNA, 75 bp, synthetic construct
  source 1..75: mol_type = other DNA
acgaagcggcaaaaattatgatcccgcagaaaagcggtaaaatcattaatatctgttcattgttctcttacttag

SEQ ID NO: 592995 - DNA, 75 bp, synthetic construct
  source 1..75: mol_type = other DNA
aggtgctggacttcggtcgtgccgactgggacccgatgattgatgtgaacctgaccgccgcattcgagttaagct

SEQ ID NO: 592996 - DNA, 75 bp, synthetic construct
  source 1..75: mol_type = other DNA
gctaatggtgacgccattcaggcaacaaaagcggctgcggcggtccgtaaaatcacgattgaagcaaaccagacc

SEQ ID NO: 592997 - DNA, 75 bp, synthetic construct
  source 1..75: mol_type = other DNA
tcttccgacgaagtgctggcctcgcaggaagtgcatgatatttcggtagcgatcggtatcgatcctgacagcgac

SEQ ID NO: 592998 - DNA, 75 bp, synthetic construct
  source 1..75: mol_type = other DNA
aggtaaaacagcaattgttaccggcgggaatagcggtttaggccaggcatttgccatggcgttggccaaagctgg

SEQ ID NO: 592999 - DNA, 75 bp, synthetic construct
  source 1..75: mol_type = other DNA
agtgctgggaaatacggcatcaccggggaccatcccgaaacgactggagcatctgcggggtgctctggaagttgt

SEQ ID NO: 593000 - DNA, 75 bp, synthetic construct
  source 1..75: mol_type = other DNA
aaccactctggagagtcagattcagactcaggcagcagattttgataatcgtatctatcagatggaactgcaacg

SEQ ID NO: 593001 - DNA, 75 bp, synthetic construct
  source 1..75: mol_type = other DNA
tatcagacaaaagggctgattaataaagatcagttaactaaccaggtggcattatattatcagcaacaaaacaat

SEQ ID NO: 593002 - DNA, 75 bp, synthetic construct
  source 1..75: mol_type = other DNA
gcccgcggcgcgaacggcgaggtggattcgctgatcgccaacacccgcgtgaaatattttgagtcgattgaagac

SEQ ID NO: 593003 - DNA, 75 bp, synthetic construct
  source 1..75: mol_type = other DNA
cgctggaaagttatctggaaaatacaccaggcttcctgctggccaacgcggaatacccggaaacgtgggaagccc

SEQ ID NO: 593004 - DNA, 75 bp, synthetic construct
  source 1..75: mol_type = other DNA
taagcgcgcccgcggcgaactgcttttgtcacagcgcactattcagaaaaacatgtcgctgccggcaatggccgc

SEQ ID NO: 593005 - DNA, 75 bp, synthetic construct
  source 1..75: mol_type = other DNA
attaagcgtcaccgaaccggcgacggtcggggagattgcgcagaatacgtacctttcacgcgagcgctgccagtt

SEQ ID NO: 593006 - DNA, 75 bp, synthetic construct
  source 1..75: mol_type = other DNA
tgcgtacctgaaacgatatcaggatgttaactactacaggacatcaccttgctttaacagcaatgttgaatgtac

SEQ ID NO: 593007 - DNA, 75 bp, synthetic construct
  source 1..75: mol_type = other DNA
ctaaattcatttactttgtctaaaacttctcaaagttacacattaactttcccggtagttctcagtccgctttta

SEQ ID NO: 593008 - DNA, 75 bp, synthetic construct
  source 1..75: mol_type = other DNA
gtgatgctggcaccgaagtcaacgcagatggtgaaatcaggaacatacaacacaccatacctgagttacatcaat

SEQ ID NO: 593009 - DNA, 75 bp, synthetic construct
  source 1..75: mol_type = other DNA
cgattgcgcgggcaaagggaaaactgcggggaaaacaacctaagctgtctgaaaagcagcaaaaagagttgtgcc

SEQ ID NO: 593010 - DNA, 75 bp, synthetic construct
  source 1..75: mol_type = other DNA
gtcagggagacacgctggttgtaccgaaacttgatcgcctggcgcgttcggtacccgatgccagggaaatagccg

SEQ ID NO: 593011 - DNA, 75 bp, synthetic construct
  source 1..75: mol_type = other DNA
tccctgtaatcgatggtactaatgtggtgcagaccacaatcagcgcagtcaacaacgttcaggctgtggctaaac

SEQ ID NO: 593012 - DNA, 75 bp, synthetic construct
  source 1..75: mol_type = other DNA
ttctttccgtaatgagtcaatccgagttagggcggcgattagggaaaaaaccacaaacggtaagcctctggttca

SEQ ID NO: 593013 - DNA, 75 bp, synthetic construct
  source 1..75: mol_type = other DNA
gttctcaaagcggcgctggcgatgtacaacagccaggatgaaaacataaagaatcactggttgcttgagtctgca

SEQ ID NO: 593014 - DNA, 75 bp, synthetic construct
  source 1..75: mol_type = other DNA
atctccggcgctaccagagcgcctgtagtgggtaaaccaaagttgatgaatttcagactgccagcgtactttgag

SEQ ID NO: 593015 - DNA, 75 bp, synthetic construct
  source 1..75: mol_type = other DNA
tacgagttttacggcagcaagttaccagtattcatcatcaggctaccacacactgtcggatgtgttggaaacata

SEQ ID NO: 593016 - DNA, 75 bp, synthetic construct
  source 1..75: mol_type = other DNA
tgccgttcaaattcagggactcgttattcgtgtgctggacggtgatactctggagatattacaggcccggcaccc

SEQ ID NO: 593017 - DNA, 75 bp, synthetic construct
  source 1..75: mol_type = other DNA
agcactcgccgtgctcaacaaaaagcccgaggcactcggcggtaatgaaacgctgggcgataagattatcagtgc

SEQ ID NO: 593018 - DNA, 75 bp, synthetic construct
  source 1..75: mol_type = other DNA
ctgattttatgctgactccgacgcgccagtacccgcaacccgtggtgatcctgaaaacactcaagcaacgtataa

SEQ ID NO: 593019 - DNA, 75 bp, synthetic construct
  source 1..75: mol_type = other DNA
ttatgaggtttataactacgttgataagccagacctgaacatgaaccagttggttgctgaagttgaacaaagtct

SEQ ID NO: 593020 - DNA, 75 bp, synthetic construct
  source 1..75: mol_type = other DNA
atttgcctgtatgtctctatggaacgtgtaggtgcgcgcgaccaaggcgacctgagcgaattcatcttagatcga

SEQ ID NO: 593021 - DNA, 75 bp, synthetic construct
  source 1..75: mol_type = other DNA
atctgtctgtatatcctgatggagaaagttggagcacgagatcagggtgaactgatggacttcattctggacaga

SEQ ID NO: 593022 - DNA, 75 bp, synthetic construct
  source 1..75: mol_type = other DNA
atcaaattaaaggcgtgatcagtaaaaaacagctcgggccggagtttcagcgccagctattaatgtgcctgtatg

SEQ ID NO: 593023 - DNA, 75 bp, synthetic construct
  source 1..75: mol_type = other DNA
tcacaaagtcaggttgcaaagcttctgaatctctctgtgagaacggttagccgtcactggacaaagacactgtaa

SEQ ID NO: 593024 - DNA, 75 bp, synthetic construct
  source 1..75: mol_type = other DNA
aaaatataaaggcgataacgctgctgtggctgcttccctgcgctcctggtatgagaactggaataaacaaagcgc

SEQ ID NO: 593025 - DNA, 75 bp, synthetic construct
  source 1..75: mol_type = other DNA
atgaccgatattaacgatgtaatcaagaccattgatgaacttattgatggcggcgtactgacgcagtatgccatc

SEQ ID NO: 593026 - DNA, 75 bp, synthetic construct
  source 1..75: mol_type = other DNA
cgattatgattttgatactacctggattgaacttcagttggctcatgttgataaaaattcaattagaggagcgta

SEQ ID NO: 593027 - DNA, 75 bp, synthetic construct
  source 1..75: mol_type = other DNA
ctcagcaatacccagcccaacctgttggttgtgccgggcgaccgtattgtggcggtggacagtgcgcaggggacg

SEQ ID NO: 593028 - DNA, 75 bp, synthetic construct
  source 1..75: mol_type = other DNA
ttcatccctgaataaaagtcacataaaagcggcttttaaggaggcttacagcaaccctaagttgctgaactggca

SEQ ID NO: 593029 - DNA, 75 bp, synthetic construct
  source 1..75: mol_type = other DNA
cttcaactggatttggggctcggggacagccgtagctttcctattttccctgctgtatccggccttacaggcaga

SEQ ID NO: 593030 - DNA, 75 bp, synthetic construct
  source 1..75: mol_type = other DNA
ccgtgcgcagcgcgatgactggctgaagaaagagatacagcgcgaatacgatgaaaatcacaaggtatacggtgt

SEQ ID NO: 593031 - DNA, 75 bp, synthetic construct
  source 1..75: mol_type = other DNA
catcctattcagtcggcggaaccaaggttatcggtgctcgtcagacaggatggacagcggcaaccggaacggcac

SEQ ID NO: 593032 - DNA, 75 bp, synthetic construct
  source 1..75: mol_type = other DNA
cccacagcaacatctggcggactacagaggtatcctgcaggccgatgcatatgcgggttacaatgctctttacga

SEQ ID NO: 593033 - DNA, 75 bp, synthetic construct
  source 1..75: mol_type = other DNA
ccgcctgccgccgccgacgcctgcaatgctggaatatttgccgccggagcgggagccattgttacagaaaaggcc

SEQ ID NO: 593034 - DNA, 75 bp, synthetic construct
  source 1..75: mol_type = other DNA
attgttagtttgggccaagtgcgtacagctaaactagccaatgatgccgacaaaagtgcaccggttggatttgat

SEQ ID NO: 593035 - DNA, 75 bp, synthetic construct
  source 1..75: mol_type = other DNA
cagccctgaccctgggtgttgcgacaagtgcgtctgctgctaccacggttaatggtggtactgttcattttaagg

SEQ ID NO: 593036 - DNA, 75 bp, synthetic construct
  source 1..75: mol_type = other DNA
tgtcttcgcccggtaacggcagcggtactattcgccaccagccaccacgtaaatcataaattatggcgtattgca

SEQ ID NO: 593037 - DNA, 75 bp, synthetic construct
  source 1..75: mol_type = other DNA
agctgagctagttgataaaacttgctataaagacaggcaaggggcttatgacattgctctaactctcgctcagtg

SEQ ID NO: 593038 - DNA, 75 bp, synthetic construct
  source 1..75: mol_type = other DNA
tatgtgtctgctgttttcttttgtttagtgcattttatgctccggtgggtattatctacgggaagattaacggca

SEQ ID NO: 593039 - DNA, 75 bp, synthetic construct
  source 1..75: mol_type = other DNA
tcaggttcatcaggactataaaggtgaacctggctggactgagattccttcctatactcgttttgtcgaagagtt

SEQ ID NO: 593040 - DNA, 75 bp, synthetic construct
  source 1..75: mol_type = other DNA
gccggatatgagacgtggtggatatcaaatcagggctctttagggcgacatgatacgctgatttctgtcatcgcc

SEQ ID NO: 593041 - DNA, 75 bp, synthetic construct
  source 1..75: mol_type = other DNA
atgtacttaaaactagcaattgtaaataatagcggaaacgtagggaaatcgaccattggtcaaactttattgaaa

SEQ ID NO: 593042 - DNA, 75 bp, synthetic construct
  source 1..75: mol_type = other DNA
agctgagttagttgataaaacttgctataaagacaggcaagggtcttatgacattgttctgacactcgctcagta

SEQ ID NO: 593043 - DNA, 75 bp, synthetic construct
  source 1..75: mol_type = other DNA
gaagagttttttgccacttcaggttcaacaatacgttcatgacctgctggtacacattgatcgtattgaagataa

SEQ ID NO: 593044 - DNA, 75 bp, synthetic construct
  source 1..75: mol_type = other DNA
gctaaatttgtatctccttatcgcatggctggtaaatcaggcaaaaatgacgcaaataatgctcaggctatctgt

SEQ ID NO: 593045 - DNA, 75 bp, synthetic construct
  source 1..75: mol_type = other DNA
acccatacaggataagcgaaaactcgctggcttttcatagaaaagtaccttcatacttagagagaattgaatgtt

SEQ ID NO: 593046 - DNA, 75 bp, synthetic construct
  source 1..75: mol_type = other DNA
agccagggtttattgtggatggtcaacaacgtactgctgctttgcgggatgcggaaatcgactcgtttatgatgc

SEQ ID NO: 593047 - DNA, 75 bp, synthetic construct
  source 1..75: mol_type = other DNA
agcgcaacgattaccttataatgggggcgatctctgtctgaaccctgaactgaatatttatttgcgtgagagtga

SEQ ID NO: 593048 - DNA, 75 bp, synthetic construct
  source 1..75: mol_type = other DNA
gcagaaagtgcttgtgcattatggggagaaggaagcgtgatctgccaactgagcgatcggtacgccaatgtcttt

SEQ ID NO: 593049 - DNA, 75 bp, synthetic construct
  source 1..75: mol_type = other DNA
atgatcctgacattcgtaaaagcatattggaaacagctgcttatcgtgttgatgcttgctgctctgttcatcgtc

SEQ ID NO: 593050 - DNA, 75 bp, synthetic construct
  source 1..75: mol_type = other DNA
actggaaacagttggttatcatggcgatgcttgctgttctggtcatatcaggagttgtagcctggaatgcacacg

SEQ ID NO: 593051 - DNA, 75 bp, synthetic construct
  source 1..75: mol_type = other DNA
agacaccggagttttgcttgccgacgtgttcagcaaatctctcgagagaaacagacaactggcagagtatgctga

SEQ ID NO: 593052 - DNA, 75 bp, synthetic construct
  source 1..75: mol_type = other DNA
cctgaaggttactttgaatgggaggctcaatatcgaaaaaatcataacttggcagaagaaagcttcgagtttaat

SEQ ID NO: 593053 - DNA, 75 bp, synthetic construct
  source 1..75: mol_type = other DNA
gccagcaaccaggctaaccagctcctgcaaatccgtagcttgctgattgctcagcagaatgccgttggcactcga

SEQ ID NO: 593054 - DNA, 75 bp, synthetic construct
  source 1..75: mol_type = other DNA
accggaaacagttggttgtcatggcgatgcttgctgttctggtcatatcaggagttgttgcctggaatgtgcatg

SEQ ID NO: 593055 - DNA, 75 bp, synthetic construct
  source 1..75: mol_type = other DNA
acgtgtttattcctctgcgacctttgagcaactgctgacgcaggtttgccagacatggccacaacatccccgcaa

SEQ ID NO: 593056 - DNA, 75 bp, synthetic construct
  source 1..75: mol_type = other DNA
aactatcaggttttattgcaggcggtgaacggtcaggcgcgaatttccagccagacggtgaggaatttattgggt

SEQ ID NO: 593057 - DNA, 75 bp, synthetic construct
  source 1..75: mol_type = other DNA
ctagaaaacattaatcagcagcgcgcgcaaatggcggtgcagcaggaaaaagcgcggcagttgatcgacggcatg

SEQ ID NO: 593058 - DNA, 75 bp, synthetic construct
  source 1..75: mol_type = other DNA
aaggcaattgtggcaaccggtagtccgttcacaccagtggaatgtaatggagagcaaaaagttatttctcagtgc

SEQ ID NO: 593059 - DNA, 75 bp, synthetic construct
  source 1..75: mol_type = other DNA
aatcaaagccacaacacttactgtcacgaacggtgcaatagtgatccacacccaacgcctgaaatcagatccagg

SEQ ID NO: 593060 - DNA, 75 bp, synthetic construct
  source 1..75: mol_type = other DNA
accgatattacgctggcgacccgtagtaatccagaaactaaccagcgtgttcttgatcatattccggcaaaccgt

SEQ ID NO: 593061 - DNA, 75 bp, synthetic construct
  source 1..75: mol_type = other DNA
aagctatttttttcttctgttcttttcaataatttaaaaatagaaagctataatgatgtgaccttttatagtcat

SEQ ID NO: 593062 - DNA, 75 bp, synthetic construct
  source 1..75: mol_type = other DNA
atggtttcagagccgtcaccacaaaacacatccttaaataagcactctgcacactggtttacactgacaccggac

SEQ ID NO: 593063 - DNA, 75 bp, synthetic construct
  source 1..75: mol_type = other DNA
cagaagcaggagccattccggcagaggaatggctccgggagtgtgatgcagcgtccaggctccggtgcgtcagtg

SEQ ID NO: 593064 - DNA, 75 bp, synthetic construct
  source 1..75: mol_type = other DNA
atgacacggcggaaggccgtgcgcgtaaccgccgtgttgaaatcagtctggtaccgcaggccgatgcctgtcgtc

SEQ ID NO: 593065 - DNA, 75 bp, synthetic construct
  source 1..75: mol_type = other DNA
caaaaccgaaatcgacaaacacatctacctgcgtaacatccaggacactaacgaaaccctcttctaccgtctggt

SEQ ID NO: 593066 - DNA, 75 bp, synthetic construct
  source 1..75: mol_type = other DNA
gctgggacattgacgatctgtgcgtggcgctggagaaagagaaaatctttctgcgcaacccggtcacggtgccct

SEQ ID NO: 593067 - DNA, 75 bp, synthetic construct
  source 1..75: mol_type = other DNA
cggcaccgggttactggtcggacgcataccagccggaccagctgctgtgcggaccgcttcaggtggtcacaaaaa

SEQ ID NO: 593068 - DNA, 75 bp, synthetic construct
  source 1..75: mol_type = other DNA
tcttcctgaaaacgcccagactgcgcggcctgctggcactcaacatggccgtagcggcagcgagtgcaatggtta

SEQ ID NO: 593069 - DNA, 75 bp, synthetic construct
  source 1..75: mol_type = other DNA
taagagatatcaccgaacgtgttggatggaagctcacaaaaaaaattgtgggggaaccacttggtgtcacatcag

SEQ ID NO: 593070 - DNA, 75 bp, synthetic construct
  source 1..75: mol_type = other DNA
ttgattcgattatatttattgttgaaaaaatattggattctgttaagtcctgtgaagagaaaagaagagcgagat

SEQ ID NO: 593071 - DNA, 75 bp, synthetic construct
  source 1..75: mol_type = other DNA
cctggtggatattaaggcaaaagcaggctggctgattgtggtcagtggccacacggacaataccggtgacccgca

SEQ ID NO: 593072 - DNA, 75 bp, synthetic construct
  source 1..75: mol_type = other DNA
actcagatgcgtggttcgaacccggtcaggcataccgggaaacagcatcgggatggtatcttcgtgtggatacgc

SEQ ID NO: 593073 - DNA, 75 bp, synthetic construct
  source 1..75: mol_type = other DNA
actgttgtggcaacattgtcgctggtcaccgccgtacttatctggcgtcctgagcatgaagtgtacgctcaggtt

SEQ ID NO: 593074 - DNA, 75 bp, synthetic construct
  source 1..75: mol_type = other DNA
ccggcggcgcggtggaccgccagttgcaaccggtgttgcagggggaagcgcgggtgacctttcgctcaccggatc

SEQ ID NO: 593075 - DNA, 75 bp, synthetic construct
  source 1..75: mol_type = other DNA
aaataggaaaaacttggcgcgtccgttatgataagtcctttgagctaacagggactagttttgctgcaggttatc

SEQ ID NO: 593076 - DNA, 75 bp, synthetic construct
  source 1..75: mol_type = other DNA
tggaatccaagtaagtgaacattatcagggtaatgcattgggattaggtttgtcattgggaggcttcgggtctat

SEQ ID NO: 593077 - DNA, 75 bp, synthetic construct
  source 1..75: mol_type = other DNA
tcacaacgaaaacaggctgcgtcgaactacactgaaccttactcagcctctcggggtttttgggtctgtaagtct

SEQ ID NO: 593078 - DNA, 75 bp, synthetic construct
  source 1..75: mol_type = other DNA
cgctggacacgacgcactcccgggggcagcagaagggacatgattatgagaccggtgacacctggcgtatccgtt

SEQ ID NO: 593079 - DNA, 75 bp, synthetic construct
  source 1..75: mol_type = other DNA
agcttttacggtagccgtgatgagttccgtcataaccgacagaagcaggattctttcggcatgtcatatggaacg

SEQ ID NO: 593080 - DNA, 75 bp, synthetic construct
  source 1..75: mol_type = other DNA
caggaatagctggagcgtcagttggtggctggcctggagtcagtactgatttccgtggatatacattggtaggac

SEQ ID NO: 593081 - DNA, 75 bp, synthetic construct
  source 1..75: mol_type = other DNA
tacggcacctacggtgaactgacggggatgtacagttacagccgcagcatgcgtcagatgagtgccgggatatcc

SEQ ID NO: 593082 - DNA, 75 bp, synthetic construct
  source 1..75: mol_type = other DNA
atctgatacacagccagacaatagcacctggagccttttctctgacatcacttcctatgacaggatctgggggag

SEQ ID NO: 593083 - DNA, 75 bp, synthetic construct
  source 1..75: mol_type = other DNA
aagtcttcaggacaatcaggtaaatgggaaagttcatatattcgtgctgaacgagggctgaataggataaaaagt

SEQ ID NO: 593084 - DNA, 75 bp, synthetic construct
  source 1..75: mol_type = other DNA
gggaagtgtacagctacttatgaactgccggataagagaaatattgcaaatatatataattcatctgtaacttgc

SEQ ID NO: 593085 - DNA, 75 bp, synthetic construct
  source 1..75: mol_type = other DNA
tcagttttttactgttccttatacaacaccagtaatatccctacgcgaaggatacctgaaatatagtatagtggg

SEQ ID NO: 593086 - DNA, 75 bp, synthetic construct
  source 1..75: mol_type = other DNA
tgttcttaccagttgcttagctaaagatatgctggcgtattatggcgtcaaaattgatgattatcctaatctttt

SEQ ID NO: 593087 - DNA, 75 bp, synthetic construct
  source 1..75: mol_type = other DNA
cccttctggctgtgtgcttttttactgtgggcttttttgtctttggcccgcaaatgctgattggacttgcggcag

SEQ ID NO: 593088 - DNA, 75 bp, synthetic construct
  source 1..75: mol_type = other DNA
atgctggacaaacgcaccgcgctttccggcggtgcggtggaccgccagttgcagccagtgttgcagggggaagcg

SEQ ID NO: 593089 - DNA, 75 bp, synthetic construct
  source 1..75: mol_type = other DNA
caacgccgggcagtatcagacgcggctgaccaacgccctgcgccgcgtgggcgtgcagctgcatcagcaagcgga

SEQ ID NO: 593090 - DNA, 75 bp, synthetic construct
  source 1..75: mol_type = other DNA
cgcccgcagcgttacagcgtgcagcttaacgaccagctcaccacgttgcagcaggcggatcactatctcgggcaa

SEQ ID NO: 593091 - DNA, 75 bp, synthetic construct
  source 1..75: mol_type = other DNA
accgtttagctcaaagcctgcaacagggcggtgcggggatctctcatacgttagaaagcattaatcagcagcgtg

SEQ ID NO: 593092 - DNA, 75 bp, synthetic construct
  source 1..75: mol_type = other DNA
cgggtgacctttcactcgccggatctggcgaatctggtacacaatcccacgccgggaacgcgcatgttcagtgtc

SEQ ID NO: 593093 - DNA, 75 bp, synthetic construct
  source 1..75: mol_type = other DNA
gggcggggcggggatttctcagacgttagaaaacattaatcagcagcgcgcgaagatggctgtgcagcaggaaaa

SEQ ID NO: 593094 - DNA, 75 bp, synthetic construct
  source 1..75: mol_type = other DNA
ctggtcatcagtgcactgaccgataaggggttacggtatgcagggtatggtgttgccgtaaatcacgatgcagac

SEQ ID NO: 593095 - DNA, 75 bp, synthetic construct
  source 1..75: mol_type = other DNA
agtcagacggcatttgaaaaacagtggcagcagtggggggcatccggccttgcagctctcagagtccagttgctt

SEQ ID NO: 593096 - DNA, 75 bp, synthetic construct
  source 1..75: mol_type = other DNA
cgccactgggctattgaacgtggtgtttgcctttggcgaatcacttacgcttctgcttgtggtctggacactgaa

SEQ ID NO: 593097 - DNA, 75 bp, synthetic construct
  source 1..75: mol_type = other DNA
aagagctggtgatccccggtaaagaactggcgacaggggtgaactacttctcgacggtcatgactattaaagtga

SEQ ID NO: 593098 - DNA, 75 bp, synthetic construct
  source 1..75: mol_type = other DNA
gcggaaaaactcacaacttgcgcgggagttcgaactcgccatcccccgtgaactggcgcaggatgccgcacggga

SEQ ID NO: 593099 - DNA, 75 bp, synthetic construct
  source 1..75: mol_type = other DNA
ttttcgtccggtttttcccgtattcccctgatgcaatgggcggcaccggaataccgtagtgagcagggaaaaatc

SEQ ID NO: 593100 - DNA, 75 bp, synthetic construct
  source 1..75: mol_type = other DNA
atgaacaccataatccttaatgaaaaatgtccgttatctcaatatattcccgtaactccctatgccccggatcta

SEQ ID NO: 593101 - DNA, 75 bp, synthetic construct
  source 1..75: mol_type = other DNA
gccttgagacaagcactctccgggagttatttcaggaactgagcgacggatataagggaatttatggtcaggata

SEQ ID NO: 593102 - DNA, 75 bp, synthetic construct
  source 1..75: mol_type = other DNA
gcgcaggtgctggacaaaatggcctacctgacgatatggcagggcgatgaagtacagcgccgggggaaaggcgtg

SEQ ID NO: 593103 - DNA, 75 bp, synthetic construct
  source 1..75: mol_type = other DNA
cgagttgagtgaaaagctgatatcattaattcatgataaagagaaaatttcttggttaggtttgaatgctaaaaa

SEQ ID NO: 593104 - DNA, 75 bp, synthetic construct
  source 1..75: mol_type = other DNA
cgcaacatattcccgggcgcatggctgggtaataagcccgacgatggcgtcgccgtaaagcggaacaccgacgaa

SEQ ID NO: 593105 - DNA, 75 bp, synthetic construct
  source 1..75: mol_type = other DNA
cccgttaacaggtaagaaaatcgatctcggtatcatcgatgacccgataaaaaacgccaaagaagcactcagccc

SEQ ID NO: 593106 - DNA, 75 bp, synthetic construct
  source 1..75: mol_type = other DNA
ggcaggccgtcggtggcgcttccgtgggtggttttcagtctgatttcatcggtgtcggcggacgtgatgggcggg

SEQ ID NO: 593107 - DNA, 75 bp, synthetic construct
  source 1..75: mol_type = other DNA
gcgcagtatcagcttcagcgggccgtgggcgcagttccgcctgttcggggccggacaactgaccggagtacagga

SEQ ID NO: 593108 - DNA, 75 bp, synthetic construct
  source 1..75: mol_type = other DNA
gccctgtaacgttatgtgagcccgagacgggcgtttttatgaagaattctctaagttcagatgtgtgctcactat

SEQ ID NO: 593109 - DNA, 75 bp, synthetic construct
  source 1..75: mol_type = other DNA
aagaacggaagcagggaatatctttttttgtctgggaattcatcgttcgtgtccatctatatagatgggcgcgat

SEQ ID NO: 593110 - DNA, 75 bp, synthetic construct
  source 1..75: mol_type = other DNA
tgcaaacgccaacagccaccagggaaagcgaggacgaagaacaacgccagatgcggatcagaattctacacgcca

SEQ ID NO: 593111 - DNA, 75 bp, synthetic construct
  source 1..75: mol_type = other DNA
gcctcaacccatccggcagagcgggaagcacgaatcccggatgacaactctgaggacaatcatcataatgacaac

SEQ ID NO: 593112 - DNA, 75 bp, synthetic construct
  source 1..75: mol_type = other DNA
ttctcatgaattgacagtcttttctttgcatctaaaacagaatctatggattgacaatgaatgtgatatgtttat

SEQ ID NO: 593113 - DNA, 75 bp, synthetic construct
  source 1..75: mol_type = other DNA
ttttcttgatgacgacgattatgtcgataacatgatgttggagcgcatgtacgcacgtgctagcgatatacaagc

SEQ ID NO: 593114 - DNA, 75 bp, synthetic construct
  source 1..75: mol_type = other DNA
aaaatcagcccaaatcgggaaccaactcccgtaatggctattccacgaaaaccgtcaccactaccgacgggccga

SEQ ID NO: 593115 - DNA, 75 bp, synthetic construct
  source 1..75: mol_type = other DNA
tatcgctcaccattattcttttagacattcatcctatgaagctgccgcaaagttggtggtgggaactgaagttgc

SEQ ID NO: 593116 - DNA, 75 bp, synthetic construct
  source 1..75: mol_type = other DNA
gaggcggaatgtcagataaacttgaaaggcgaattgagcgactcgaaggtgatttatcgctaacaagaaacgacc

SEQ ID NO: 593117 - DNA, 75 bp, synthetic construct
  source 1..75: mol_type = other DNA
agaccccattgggctggcggggggatggaacctgtataattacccactgaatccgataataaggatggatccttt

SEQ ID NO: 593118 - DNA, 75 bp, synthetic construct
  source 1..75: mol_type = other DNA
tcatggccatatcgctgcacgctggcgcttgttaatgcatttcatcgctgcagctatagggcttttttatctagg

SEQ ID NO: 593119 - DNA, 75 bp, synthetic construct
  source 1..75: mol_type = other DNA
attgactatcttttctttgcatctaaaacagaacttatggattaatgatgaatgtgacatgttcatgctgcatga

SEQ ID NO: 593120 - DNA, 75 bp, synthetic construct
  source 1..75: mol_type = other DNA
atcaatttaatcttggatcttcagtttctagatgttatattgttccaattatatctgaacattatccatctttaa

SEQ ID NO: 593121 - DNA, 75 bp, synthetic construct
  source 1..75: mol_type = other DNA
tttggctgctttgcatacggcaatgttttcggctgaaaaggatggtgattacgacaattcgatgataaaagaaag

SEQ ID NO: 593122 - DNA, 75 bp, synthetic construct
  source 1..75: mol_type = other DNA
tattgaagctagaaagggaaatgggaatgctatacaaaaagattttcaaggtgctatacaagatgcttatgatca

SEQ ID NO: 593123 - DNA, 75 bp, synthetic construct
  source 1..75: mol_type = other DNA
tcgaagtattttctgagttggagtcactgtgtacatctcatggttttattcattgtttagcattattaagctgca

SEQ ID NO: 593124 - DNA, 75 bp, synthetic construct
  source 1..75: mol_type = other DNA
tgttatgactcaagcgaaacagcccgggagaaatgaaccatgtttttgtgggagtggtaaaaaatataaaaaatg

SEQ ID NO: 593125 - DNA, 75 bp, synthetic construct
  source 1..75: mol_type = other DNA
aattgttaaaacgacatataatgttaaaaaaggaaaaaaagtaatgcttactttaaaaaagtcaaatggtgatgc

SEQ ID NO: 593126 - DNA, 75 bp, synthetic construct
  source 1..75: mol_type = other DNA
gagagagccgggagcgttcagattcagacggcaatacgtttgcttatattaacggcattaaggaccgcagaactg

SEQ ID NO: 593127 - DNA, 75 bp, synthetic construct
  source 1..75: mol_type = other DNA
gccgggagcgtccagattcagacggcaatacgtttgctcatattgagcgctctaaggacggtggaactgcgtaaa

SEQ ID NO: 593128 - DNA, 75 bp, synthetic construct
  source 1..75: mol_type = other DNA
taatgagtccggcagatactcaccagactggatcgaaatccaactggcccacgttccgaaaggtgtgcgcggcgt

SEQ ID NO: 593129 - DNA, 75 bp, synthetic construct
  source 1..75: mol_type = other DNA
gagcggatggagtgagagctatacaaagcaggtcagatcggcactggagaaagatgtttaccccgtgctgggtaa

SEQ ID NO: 593130 - DNA, 75 bp, synthetic construct
  source 1..75: mol_type = other DNA
ggacaagccctacaaactcacagattcacaaacgccaggccttttcttgctggtccatcccaatgggtcaaaata

SEQ ID NO: 593131 - DNA, 75 bp, synthetic construct
  source 1..75: mol_type = other DNA
ggacaagccctacaaactcaccgattcacagacacctggcctgtttttgctggtccatcccaatggcagcaaata

SEQ ID NO: 593132 - DNA, 75 bp, synthetic construct
  source 1..75: mol_type = other DNA
ttataaccaggctgcctacctgaagcaacggcgagcaatgatgcaggattacgccgacgctattgattcaatatt

SEQ ID NO: 593133 - DNA, 75 bp, synthetic construct
  source 1..75: mol_type = other DNA
gccattctacaaagcgcttgatagagccgggaccgttcagattcagacagcaatacgtttgcttatcctcacggc

SEQ ID NO: 593134 - DNA, 75 bp, synthetic construct
  source 1..75: mol_type = other DNA
gggtgtatccgctgattagcctcaaggaagcccgcaaacgcgccacagagagccgtttactgatagcccagggaa

SEQ ID NO: 593135 - DNA, 75 bp, synthetic construct
  source 1..75: mol_type = other DNA
agccactttcagccagtgccatccttaaagccctggagcgtatcggatacaagtcgatagccacgggccacggct

SEQ ID NO: 593136 - DNA, 75 bp, synthetic construct
  source 1..75: mol_type = other DNA
ggttgcagatctggacacggcactgaaagcccgccgaccagggcacaatgcatggctgcaaattaacgaaattcc

SEQ ID NO: 593137 - DNA, 75 bp, synthetic construct
  source 1..75: mol_type = other DNA
ggaattgacccaatggaagaagcgcgcaaggagaaagccattgatgcgctcaacatggcggcaagttttaagacg

SEQ ID NO: 593138 - DNA, 75 bp, synthetic construct
  source 1..75: mol_type = other DNA
ggcggaccaccttttcaacggcattgaatgaaagcggcaggtactcaccagactggatcgaaatccaattagccc

SEQ ID NO: 593139 - DNA, 75 bp, synthetic construct
  source 1..75: mol_type = other DNA
cgagagtttacaacgcattgttaaaggcgatgtcgatgcggtgatctggaacgtggtggcggaaaacgaactgac

SEQ ID NO: 593140 - DNA, 75 bp, synthetic construct
  source 1..75: mol_type = other DNA
ttctgaaggaaactggtattcagataggccagaagttaacaacaagtgcaattaaaagtataagtaaggagatta

SEQ ID NO: 593141 - DNA, 75 bp, synthetic construct
  source 1..75: mol_type = other DNA
aataagcatgctaacaccaatataaatgtggatgtttgcagaaacatgttagtacgggcgaagaaaaatactact

SEQ ID NO: 593142 - DNA, 75 bp, synthetic construct
  source 1..75: mol_type = other DNA
attaatttgattgttgggcggtgttcaatatttttaggaataccagcctcttactttattgtattcgtaaaaaat

SEQ ID NO: 593143 - DNA, 75 bp, synthetic construct
  source 1..75: mol_type = other DNA
caacgatcggcaaaacagtctgaataatatcgccgcaaccggtggcgaaaacggcaaggtttttgcactacgtca

SEQ ID NO: 593144 - DNA, 75 bp, synthetic construct
  source 1..75: mol_type = other DNA
gcgcaggatagccgactgcgtgaagagctggtgatgcatctgattcaggctgaggagagtacgccagcattaacc

SEQ ID NO: 593145 - DNA, 75 bp, synthetic construct
  source 1..75: mol_type = other DNA
tctgggacgcttgtgcatcttcggggatgaagctatccagcgtggcaatcatggcgcgcctggctgacttcagca

SEQ ID NO: 593146 - DNA, 75 bp, synthetic construct
  source 1..75: mol_type = other DNA
ccgtgaaggtgcgcgtaatctcggtgaagtacgtaccggggttgaggcgaaagtaaataacaaccttagcctgtg

SEQ ID NO: 593147 - DNA, 75 bp, synthetic construct
  source 1..75: mol_type = other DNA
aagtcgatcgccactggtcatggttggagaaccaccttttcaacagcgttgaatgaaagcggcagggatagccct

SEQ ID NO: 593148 - DNA, 75 bp, synthetic construct
  source 1..75: mol_type = other DNA
tattgatatgcaaggttggcagaggttttctttcttttctaaccgaagggaagaaaagcaaggggaactcgaaga

SEQ ID NO: 593149 - DNA, 75 bp, synthetic construct
  source 1..75: mol_type = other DNA
gcttaagagaagtatatatgatatttgcctgaatataattattgatatgcaaggttggcagaggttttctttctt

SEQ ID NO: 593150 - DNA, 75 bp, synthetic construct
  source 1..75: mol_type = other DNA
atagaattatcattatggataatcgatattgataaatctgaattaaataaccttggcgttaattggcaaggaacg

SEQ ID NO: 593151 - DNA, 75 bp, synthetic construct
  source 1..75: mol_type = other DNA
caccatcaccgttaacgctgctggtaatgcggaaaacaccgtcaaaaacatcgcatttaactatattgtgaggct

SEQ ID NO: 593152 - DNA, 75 bp, synthetic construct
  source 1..75: mol_type = other DNA
atacccatagtttaagtggcagcacgaatgcagctggtaatcacagccatagagatggccgtcgatttaacccca

SEQ ID NO: 593153 - DNA, 75 bp, synthetic construct
  source 1..75: mol_type = other DNA
acatcgtcgtttgattacggaaccaaatccacgaataacaccggggcgcatacccatagtattagcgggaccgca

SEQ ID NO: 593154 - DNA, 75 bp, synthetic construct
  source 1..75: mol_type = other DNA
taagcttgattctatgttaaacgagttgattgatggctcttataattcctgcgctcgatacttcaaagcagtacg

SEQ ID NO: 593155 - DNA, 75 bp, synthetic construct
  source 1..75: mol_type = other DNA
caagaggataaaaaaagctatcaacgatagctgtatcccataccttcttcgtcagaaaaaggatgcttctgtaaa

SEQ ID NO: 593156 - DNA, 75 bp, synthetic construct
  source 1..75: mol_type = other DNA
aaggatcccatcagagagaatacagtgaatatggtcgacgtattcttgaaaagaaaactgctttaatgaaaataa

SEQ ID NO: 593157 - DNA, 75 bp, synthetic construct
  source 1..75: mol_type = other DNA
gaagtggcgcgcggaacaagccgttcgccggagatatggccgggacggcgaattgtgctgacggggcatccgcag

SEQ ID NO: 593158 - DNA, 75 bp, synthetic construct
  source 1..75: mol_type = other DNA
ttcattgcgggagttaatccaggaacacttgacgggtaatgactccaacttattgatagtgttttatgttcagat

SEQ ID NO: 593159 - DNA, 75 bp, synthetic construct
  source 1..75: mol_type = other DNA
gactggtggcgctggcgaccacgccaagccatgcctgggttgcgccgaaaggggggggcaaacctctttttggta

SEQ ID NO: 593160 - DNA, 75 bp, synthetic construct
  source 1..75: mol_type = other DNA
gcgcttacaatgtcacccgctctggcgacagctatattctggttaacttctataccggagtcggaagttgccgga

SEQ ID NO: 593161 - DNA, 75 bp, synthetic construct
  source 1..75: mol_type = other DNA
caaatggggtatctggattaattatagcttttcaaaataggaattttgaggcaataaaaacttatatgggaataa

SEQ ID NO: 593162 - DNA, 75 bp, synthetic construct
  source 1..75: mol_type = other DNA
gcatacggagaactcctggaaacttctggacttaaccttgataaaacggtagaactactaactgcggaaggaatg

SEQ ID NO: 593163 - DNA, 75 bp, synthetic construct
  source 1..75: mol_type = other DNA
aaatcagatagaaaagaaaaagaattcccaagaattaaacttaatggtcaatgttatttcccggggcgccccaaa

SEQ ID NO: 593164 - DNA, 75 bp, synthetic construct
  source 1..75: mol_type = other DNA
agcagcacaggatgcacgggcgcgtaacagtgaatatgttgccgcagcaaaagattatttatcttcccgctttgg

SEQ ID NO: 593165 - DNA, 75 bp, synthetic construct
  source 1..75: mol_type = other DNA
aacagcacagaatgcacgggatcgcaacagagaattagccgtagcagcaaaagattatttatcttcccgctttgg

SEQ ID NO: 593166 - DNA, 75 bp, synthetic construct
  source 1..75: mol_type = other DNA
aaacacacagcgagttgtgtgaactggcctgtcggtttctcaacaatcacgggttcaaggtggtgttcagtgatc

SEQ ID NO: 593167 - DNA, 75 bp, synthetic construct
  source 1..75: mol_type = other DNA
caaaactttagagcatataaaaacagaatgggcaatgtttctcgataatgatatttatttcataaataatccact

SEQ ID NO: 593168 - DNA, 75 bp, synthetic construct
  source 1..75: mol_type = other DNA
aatgggactcatttgttaattgcattgaggctcatgctgctttcgatcttgaaattattaaagagaaaaatagcc

SEQ ID NO: 593169 - DNA, 75 bp, synthetic construct
  source 1..75: mol_type = other DNA
atgagcgacctatcattaacccagccaaagctaaaagaatgtccgttttgcggcggtaatgctcgtctgtgggtt

SEQ ID NO: 593170 - DNA, 75 bp, synthetic construct
  source 1..75: mol_type = other DNA
gtggcaagtatgatggagggaatgattaaagtcgttgccgaataccgtaatacaaacaacgcaataggttacacc

SEQ ID NO: 593171 - DNA, 75 bp, synthetic construct
  source 1..75: mol_type = other DNA
atgattactcgtattcctcgtagttctttctctgcaaatattaataatacagcccagacaaatgaacaccaaacc

SEQ ID NO: 593172 - DNA, 75 bp, synthetic construct
  source 1..75: mol_type = other DNA
ttacgataattaataaaaacgaaaacacgacacttactcaaaccattgccccaatatttgaagaatacctaatgg

SEQ ID NO: 593173 - DNA, 75 bp, synthetic construct
  source 1..75: mol_type = other DNA
caagtcactgtcatttgcgaaagaatgtctcgcattgtaggcgcaccatctggtcgggattgcgtatttacgcat

SEQ ID NO: 593174 - DNA, 75 bp, synthetic construct
  source 1..75: mol_type = other DNA
atatcatcagtgggacaacaacatcaatgtgtctaattccactgtaacttcagtgacctgctccccgttgattag

SEQ ID NO: 593175 - DNA, 75 bp, synthetic construct
  source 1..75: mol_type = other DNA
acgccgataaaaatataaaactgctagcgattaacggtattgcaccgactgccgaaaacattcgcaacggcaaat

SEQ ID NO: 593176 - DNA, 75 bp, synthetic construct
  source 1..75: mol_type = other DNA
cgactgctggggattgttgacacgctgcgaaaagggaaagtctctgccgatgctctgccgacagtggaatctcag

SEQ ID NO: 593177 - DNA, 75 bp, synthetic construct
  source 1..75: mol_type = other DNA
agttttaatacacaggattgcctgtgggtaaggccagtatccggtgatccgaacgtggaaattaccggagcgggt

SEQ ID NO: 593178 - DNA, 75 bp, synthetic construct
  source 1..75: mol_type = other DNA
cgctgaaaacaaactcaatgagattgccatcaaagaatcagaagcactggtggacagcgccattgagtcggggaa

SEQ ID NO: 593179 - DNA, 75 bp, synthetic construct
  source 1..75: mol_type = other DNA
gccggtctttacgggactgaatgccccctttgactggtcattcatcaattactacttccataaatatacggggaa

SEQ ID NO: 593180 - DNA, 75 bp, synthetic construct
  source 1..75: mol_type = other DNA
actggcgaagaacccgaaaaaccgcctgcttgctgtggtgtggatgcagggcgagtttgatattgatgcgaagcc

SEQ ID NO: 593181 - DNA, 75 bp, synthetic construct
  source 1..75: mol_type = other DNA
atgacgtccaaatgggttcaactatcatcaatgcccggaaactttactgttaaagtttccggtggtacagcggca

SEQ ID NO: 593182 - DNA, 75 bp, synthetic construct
  source 1..75: mol_type = other DNA
acccggatattccaggtattggctattatggtgccataagtcgcgattcgactaactggacatcaaacgacaggg

SEQ ID NO: 593183 - DNA, 66 bp, synthetic construct
  source 1..66: mol_type = other DNA
gctatctttacgacccgctgggccgcagggtggcaaaacgggtgtggcgacgtgaacgggacctga

SEQ ID NO: 593184 - DNA, 75 bp, synthetic construct
  source 1..75: mol_type = other DNA
tcagtcggaagaagtattttgggtaaaacatgggatcttacgttcaacagaccttcgtgacagtatggatgagca

SEQ ID NO: 593185 - DNA, 75 bp, synthetic construct
  source 1..75: mol_type = other DNA
gcggaggtcgcttgtttaagagagattgaaacacaactgtcacgccccgaagccgttgactcaaaactgaacaca

SEQ ID NO: 593186 - DNA, 75 bp, synthetic construct
  source 1..75: mol_type = other DNA
aataacccagcagacgcatggcctgtaatcgcaaaacatcagatcagcatatgtgcatacgaaagaaataatcct

SEQ ID NO: 593187 - DNA, 75 bp, synthetic construct
  source 1..75: mol_type = other DNA
tattgaaagcacaggattatacaagggctttacaggattggttggataagaatccaacagcatctccaggggatc

SEQ ID NO: 593188 - DNA, 75 bp, synthetic construct
  source 1..75: mol_type = other DNA
atgattcgcaaggatacaaattagcatccagcaaaaaaaatccatcgttatatttagatggggaatatacagcgc

SEQ ID NO: 593189 - DNA, 75 bp, synthetic construct
  source 1..75: mol_type = other DNA
aacgtggcgtaacagtgccgctacctggacatctgcggaccgggccagccatttcagtgcctgggcgcgccgggg

SEQ ID NO: 593190 - DNA, 75 bp, synthetic construct
  source 1..75: mol_type = other DNA
caggctcgattttctcggcttccggcaaataccgtaattgtctgcgcatcaactgcgctttgccgctcagcgaaa

SEQ ID NO: 593191 - DNA, 75 bp, synthetic construct
  source 1..75: mol_type = other DNA
caggttttcctcccgcagctgtgtttgttgccacctgtctggtcgcgggcttcggctcgttgctgatggggttgt

SEQ ID NO: 593192 - DNA, 75 bp, synthetic construct
  source 1..75: mol_type = other DNA
agagccgcgttgagctgtggattgccaaatcctctgcggagagtaacacctttgcgtttaactggctctatgagc

SEQ ID NO: 593193 - DNA, 75 bp, synthetic construct
  source 1..75: mol_type = other DNA
cgcatctggttctgatgactgatggtgtttccgatcgtaagcgtcgtctgagtaccgtctggtcccgaatccagg

SEQ ID NO: 593194 - DNA, 75 bp, synthetic construct
  source 1..75: mol_type = other DNA
cagtgcccgaattgtcattgcatcggataataccatcgcggatgttcgtgcaggtcaattctccaccaacgctat

SEQ ID NO: 593195 - DNA, 75 bp, synthetic construct
  source 1..75: mol_type = other DNA
atggcggcggcaacgtttgtgctggaaggtcactatcatcgccatatccggcggatgcggcagatctatcagcgc

SEQ ID NO: 593196 - DNA, 75 bp, synthetic construct
  source 1..75: mol_type = other DNA
tgtcaaatgctatagatatgttgagtggaaatgaaactgtacctttcatgactatccataaaagtaaaggtttag

SEQ ID NO: 593197 - DNA, 75 bp, synthetic construct
  source 1..75: mol_type = other DNA
cttttatgcaacattagaggagtaagtaaaagaggtgatgttactcgtttagaaaaagagttaagtaatttcatc

SEQ ID NO: 593198 - DNA, 75 bp, synthetic construct
  source 1..75: mol_type = other DNA
agtaggaactttcccggtggacaaactccgcgtaacggatatcacaaaaaatgcaacttacccggtgctgattga

SEQ ID NO: 593199 - DNA, 75 bp, synthetic construct
  source 1..75: mol_type = other DNA
acagcctgcattctctgcaagaggtgtcgttcagcagcctcggttttactgagcgctatcacttgcaggagtggc

SEQ ID NO: 593200 - DNA, 75 bp, synthetic construct
  source 1..75: mol_type = other DNA
tccctttattgcgccactgaatatggcgttgaaagagatatccaacgtaccggaagaagcggacgatcctgagac

SEQ ID NO: 593201 - DNA, 75 bp, synthetic construct
  source 1..75: mol_type = other DNA
tgcacgctgtacaacaatatcagcccgtcaacagaccactggcttagtgccggttcgggtatcagcgcactttct

SEQ ID NO: 593202 - DNA, 75 bp, synthetic construct
  source 1..75: mol_type = other DNA
gccacacggctgaaacgcgaacgcgacagcctgatcaaaaaattcagcgaactgcgtagctatgacgaccgcctg

SEQ ID NO: 593203 - DNA, 75 bp, synthetic construct
  source 1..75: mol_type = other DNA
gaagataaccttcgcccaacaattttatgcttactaaactccaaactaagctataatataatcaatatcatcaat

SEQ ID NO: 593204 - DNA, 75 bp, synthetic construct
  source 1..75: mol_type = other DNA
aattggttcaatcacttatttaagtaaaaacattgaaacccttaaaaaaaatgttattgctggttttaacgtgac

SEQ ID NO: 593205 - DNA, 75 bp, synthetic construct
  source 1..75: mol_type = other DNA
tgtaaccactggaataataaaaaacctaccattaatatcttgccctacaatcgaaaacctcgttaacgaggcaat

SEQ ID NO: 593206 - DNA, 75 bp, synthetic construct
  source 1..75: mol_type = other DNA
tacgatttcagtctgaaacattatccgaattgatttcatactccatcggttgcatgatgggccgctactccctcg

SEQ ID NO: 593207 - DNA, 75 bp, synthetic construct
  source 1..75: mol_type = other DNA
cgacgatggcgttaaggttaactacggcaagtttggcgatctgctggcagatgtcaaagccatcaccggcaatgc

SEQ ID NO: 593208 - DNA, 75 bp, synthetic construct
  source 1..75: mol_type = other DNA
cgtcattggtggtggcttatcgaatttcccggcaatcacaacgcaactggcggacaggctgcctcgtcatctctt

SEQ ID NO: 593209 - DNA, 75 bp, synthetic construct
  source 1..75: mol_type = other DNA
tcatgatggggttggatttcccgttacgccgctgcggctgtggtcagcatggctgcattgaaaattatctgtctg

SEQ ID NO: 593210 - DNA, 75 bp, synthetic construct
  source 1..75: mol_type = other DNA
tcctcaccaataccggtggcggtaacaacatgtccttcctgatcgctctggcgctgacggtggtgatttatctgt

SEQ ID NO: 593211 - DNA, 75 bp, synthetic construct
  source 1..75: mol_type = other DNA
tttgaggaaaatagcacggaaattattgattcggtcaggaatgaaaccattgatgctggttttgttcattttccc

SEQ ID NO: 593212 - DNA, 75 bp, synthetic construct
  source 1..75: mol_type = other DNA
tctgcgcgccattaatcgggaagttaacgcagtaaaagagatagccgagcaggaaaagcagaaccctcaaagaac

SEQ ID NO: 593213 - DNA, 75 bp, synthetic construct
  source 1..75: mol_type = other DNA
gttaccgcccaaccatgctctggcaaaaaacagcactattacagtggaagagttaatgggtgaaccattaattat

SEQ ID NO: 593214 - DNA, 75 bp, synthetic construct
  source 1..75: mol_type = other DNA
ttattgattctgctgctgctccagtcggtggtacctctctttctcttacctgcattgaccgacatttacccggat

SEQ ID NO: 593215 - DNA, 75 bp, synthetic construct
  source 1..75: mol_type = other DNA
cgccatttttgatgttatctgctgggtgctgattgccgtagtaaccgttggtatctgcatgtttattgaatgggt

SEQ ID NO: 593216 - DNA, 75 bp, synthetic construct
  source 1..75: mol_type = other DNA
tttaccagacagggtcttggcgtagatgaatctacatatagagaagcttataggctttatttgatagatacatca

SEQ ID NO: 593217 - DNA, 75 bp, synthetic construct
  source 1..75: mol_type = other DNA
gcgttttatcacgctggaaagttaccccgtaaaagcgtcatgctgacctttgatgacggctggctggataactgg

SEQ ID NO: 593218 - DNA, 75 bp, synthetic construct
  source 1..75: mol_type = other DNA
caacaatggttcttttctgataaacatgacaaaattgatgaatatctgtcgattaggaaagatattgttaaccaa

SEQ ID NO: 593219 - DNA, 75 bp, synthetic construct
  source 1..75: mol_type = other DNA
cggcaccgccattgcggttttattagtgggatatttgcaacaaggtttgcaaatggcaggagtgccaaatcaggt

SEQ ID NO: 593220 - DNA, 75 bp, synthetic construct
  source 1..75: mol_type = other DNA
gcgggatcgatatttcgtttggttcgaccatcggcctctgcgccattgcattgggcgtactgtttcaaagtggtg

SEQ ID NO: 593221 - DNA, 75 bp, synthetic construct
  source 1..75: mol_type = other DNA
tattaatgtatcatcatgtcagtcattgcccagggctggttacactttctcccgagacattccggaaacaaatga

SEQ ID NO: 593222 - DNA, 75 bp, synthetic construct
  source 1..75: mol_type = other DNA
caatctaattttcagccgatcactagaagcgaacttaatatctcccctgaagagaaaattattttttatgctggg

SEQ ID NO: 593223 - DNA, 75 bp, synthetic construct
  source 1..75: mol_type = other DNA
ctgcgcgaaattatcgatgtgaaaaagtgggaaataaatcaggctgccgggcgttatatccgctcgcatgaggag

SEQ ID NO: 593224 - DNA, 75 bp, synthetic construct
  source 1..75: mol_type = other DNA
gctgaaaatgcccggaattttgttttctcaaaatatagctgggaacatgtaactcagtgctttgaagcacaaatg

SEQ ID NO: 593225 - DNA, 75 bp, synthetic construct
  source 1..75: mol_type = other DNA
aggatatcaccagataaaggttgcctgatgcttatggaggcttttaatcagctgaataagatacaagataacctc

SEQ ID NO: 593226 - DNA, 75 bp, synthetic construct
  source 1..75: mol_type = other DNA
tcacaaactaatatagcagatttaaggaaaaaacttaatattggcacaaatgatatcgtgctattatttgcagga

SEQ ID NO: 593227 - DNA, 75 bp, synthetic construct
  source 1..75: mol_type = other DNA
ccaggtttcaggtggtaatcggtcagagtatctgcggcgctgccttgaagctggcccaggtgatctggagtccgg

SEQ ID NO: 593228 - DNA, 75 bp, synthetic construct
  source 1..75: mol_type = other DNA
aaatcagccggaatgatgactgaatcgttattcatcgattatattgatgttgaatggtcatatcgtatgcgttcg

SEQ ID NO: 593229 - DNA, 75 bp, synthetic construct
  source 1..75: mol_type = other DNA
ggatagcgtcttacaagacaatggaattaacagtttcttttttgaatttgagaaattagttagtgaagaaaaatt

SEQ ID NO: 593230 - DNA, 75 bp, synthetic construct
  source 1..75: mol_type = other DNA
caatttgcaaaggagctggaaattgctgtcgcaggaaatatcattctggatgatgttgatgctgaactggaggcc

SEQ ID NO: 593231 - DNA, 75 bp, synthetic construct
  source 1..75: mol_type = other DNA
ttctggaagaaacctaccagccgcatgttctgacgggggtcatggcgcaaaatacgccgcaaacgaaagatgtta

SEQ ID NO: 593232 - DNA, 75 bp, synthetic construct
  source 1..75: mol_type = other DNA
gcagccctgacgatcgtcttgagcaagcgttaaaagagttactggaaaacttgttgcaggtttctccagcgcgtt

SEQ ID NO: 593233 - DNA, 75 bp, synthetic construct
  source 1..75: mol_type = other DNA
agttaaaacagcagccagatgctgtcgatcttgatccaagaccaacagcaccgaaccaggaagagctggcaaaaa

SEQ ID NO: 593234 - DNA, 75 bp, synthetic construct
  source 1..75: mol_type = other DNA
cctgatgattctcaacaattagatattaatgagcaatttgttattgatttacacaaatgttgggtagaaatcaac

SEQ ID NO: 593235 - DNA, 75 bp, synthetic construct
  source 1..75: mol_type = other DNA
ttagtaagttgtatttcaccaaactaaaaaaagatgttatttgtccagggaagttagatgaggagcacttttggc

SEQ ID NO: 593236 - DNA, 75 bp, synthetic construct
  source 1..75: mol_type = other DNA
taatattattattagcggcatattgatttacggccttttctcctgccgggactgggatttgtcggggcagggctg

SEQ ID NO: 593237 - DNA, 75 bp, synthetic construct
  source 1..75: mol_type = other DNA
tccccgcgcacgtcactgaatatctgaacaaggtactgactgaaaccgatcatgccaaccctgatccggaaatcg

SEQ ID NO: 593238 - DNA, 75 bp, synthetic construct
  source 1..75: mol_type = other DNA
agacactaaatggaagcgtattggtcgtcatcccgaagatgccaggcatggcatatcgcaggctgatgtctacca

SEQ ID NO: 593239 - DNA, 75 bp, synthetic construct
  source 1..75: mol_type = other DNA
acgtcgcgcgccgacggaataaaccgaataaattcggtttatccccgctggcgcggggaacactcgtcagggcac

SEQ ID NO: 593240 - DNA, 75 bp, synthetic construct
  source 1..75: mol_type = other DNA
aacgtaaagtggatttagttttcgccccttcggtaaaagagatctacccgaacggtacagaaacccacacctatg

SEQ ID NO: 593241 - DNA, 75 bp, synthetic construct
  source 1..75: mol_type = other DNA
gaattgatatcattgctgactactgagttcacaataggacattttctggatattaaagcatgtaatgagagcctg

SEQ ID NO: 593242 - DNA, 75 bp, synthetic construct
  source 1..75: mol_type = other DNA
cgaagtagttaccgtgaccgatgagaacactggtgaaatctctgagaaagtcaagctgggcactaaggcactggc

SEQ ID NO: 593243 - DNA, 75 bp, synthetic construct
  source 1..75: mol_type = other DNA
gccgtttctcccgtgaagaaagcagcacaattcgcggcttgttctttgattactctcattctgatattggttttg

SEQ ID NO: 593244 - DNA, 75 bp, synthetic construct
  source 1..75: mol_type = other DNA
ctaatagtgctttgcagctacccacggtggagcatgtctacgctcttctgaaagcaaattgtaaacctgaccgct

SEQ ID NO: 593245 - DNA, 75 bp, synthetic construct
  source 1..75: mol_type = other DNA
agcaggaaaaacataacccgaccagaacgctgcgcatcggctgctttcccagcgcctgcgcgtgtattttaccgg

SEQ ID NO: 593246 - DNA, 75 bp, synthetic construct
  source 1..75: mol_type = other DNA
acggaccgcatcccgacgggtgtgatacggacggacgacgagcggacccaccactaccactacgacagccagcac

SEQ ID NO: 593247 - DNA, 75 bp, synthetic construct
  source 1..75: mol_type = other DNA
acctgaaccttgaaagcgatagcgaaaacggaaagaaactaaaaaacgcccaatcccgccgcaagattccggttc

SEQ ID NO: 593248 - DNA, 75 bp, synthetic construct
  source 1..75: mol_type = other DNA
ttggtattatatcttacaaccgctctgaataccttgagaaatgtttaaaaagcatatataactctaatatcaatg

SEQ ID NO: 593249 - DNA, 75 bp, synthetic construct
  source 1..75: mol_type = other DNA
ttctgctgcaggccatcgccattaaagaaagccgtctgaacacccgtgccatcggttataaccggaacaaagccg

SEQ ID NO: 593250 - DNA, 75 bp, synthetic construct
  source 1..75: mol_type = other DNA
atggattttgctgaactttctgaagcagtatccacacactatcccagccacaagggggggattatgacgatagca

SEQ ID NO: 593251 - DNA, 75 bp, synthetic construct
  source 1..75: mol_type = other DNA
cgtttgcgtgtcttgtattggtgatagtgtgttgttggtcatgttactgccctgtaaagcaatgcgccgtagtac

SEQ ID NO: 593252 - DNA, 75 bp, synthetic construct
  source 1..75: mol_type = other DNA
aaccgctttagttactccccttctgaattagattaccctagacgttttatattagttgggcggttactagaggaa

SEQ ID NO: 593253 - DNA, 75 bp, synthetic construct
  source 1..75: mol_type = other DNA
ttcgtgcgccttctgcagggaaaattgcagaaattgttgagaagacaggaagttttgttaacgcgggtgatacca

SEQ ID NO: 593254 - DNA, 75 bp, synthetic construct
  source 1..75: mol_type = other DNA
cgctgaattacagctattccaataatatatggcaaaacgatcgggatcatttacttgcttttacgcttaatgttc

SEQ ID NO: 593255 - DNA, 75 bp, synthetic construct
  source 1..75: mol_type = other DNA
ggtctgttatttttaacatactatctcttcttttttttctttttccattgaaaagaaatagagttatttttaatt

SEQ ID NO: 593256 - DNA, 75 bp, synthetic construct
  source 1..75: mol_type = other DNA
ataatcatggcaatgttattttgcaactaggctgtgtgaaaaagttaagtaaaaaatacaatgttatcattacag

SEQ ID NO: 593257 - DNA, 75 bp, synthetic construct
  source 1..75: mol_type = other DNA
ttttgctgcgcataataatcggcgtttgttttcaaaacatttcatgtggcaccttcagagcattatacgatattg

SEQ ID NO: 593258 - DNA, 75 bp, synthetic construct
  source 1..75: mol_type = other DNA
tatgaacggataggcggatttgatgaacattattttatgtattgtgaagacttggatttatgtcgtcgtattcat

SEQ ID NO: 593259 - DNA, 75 bp, synthetic construct
  source 1..75: mol_type = other DNA
tttatggcgatacctattcctatttttcgacggtggtatcacaggttcaagttaacaagtatgcaatatctgact

SEQ ID NO: 593260 - DNA, 75 bp, synthetic construct
  source 1..75: mol_type = other DNA
gtgacggataaagagcggcagctttcacagtgtgccagtgagttctacgagttcttacaggaaaaggcggagagt

SEQ ID NO: 593261 - DNA, 75 bp, synthetic construct
  source 1..75: mol_type = other DNA
accttttatcatcgggagtacggcagaaccgaaaagcaaaaactgcattttgttttcatgcccagggtgtgtaac

SEQ ID NO: 593262 - DNA, 75 bp, synthetic construct
  source 1..75: mol_type = other DNA
cgatgaaaattcgcgtaggaaatccgttgcgaaaactggttctgattaagctggctgataatgccagcgatcagg

SEQ ID NO: 593263 - DNA, 75 bp, synthetic construct
  source 1..75: mol_type = other DNA
aacggttcgcaactggcacagaaagaaaaagaatattgctctaagcaatgcgctgaatacgaccagatggcgcac

SEQ ID NO: 593264 - DNA, 75 bp, synthetic construct
  source 1..75: mol_type = other DNA
aaagcatcaacacataacagtatttttgattatcaggatggatacgcagatgaagaagattttactcgttgctgg

SEQ ID NO: 593265 - DNA, 75 bp, synthetic construct
  source 1..75: mol_type = other DNA
tgctgatgacctgaaggaactgctggcagaatggcagcattactataactgggaacgtcctcatagcgctcacaa

SEQ ID NO: 593266 - DNA, 75 bp, synthetic construct
  source 1..75: mol_type = other DNA
catattgttccattgccacgacaggccgttgcgctattgcaggaccagtacaccagatcaggccatttcgaatac

SEQ ID NO: 593267 - DNA, 75 bp, synthetic construct
  source 1..75: mol_type = other DNA
ttgagcaagacaccactgacagcaaaggccatagaggccgcacaaccgcaggacaagccatataaactcaccgat

SEQ ID NO: 593268 - DNA, 75 bp, synthetic construct
  source 1..75: mol_type = other DNA
aggctccggacgtgcgcagacctgccgcatggttattattctcagtaacgtggcgtccgttgagctgagtattga

SEQ ID NO: 593269 - DNA, 75 bp, synthetic construct
  source 1..75: mol_type = other DNA
cagcagcttgataaaatcgaaaaagcacattctgaaataagtgaatcagatgaggattacgagcaaccagatatt

SEQ ID NO: 593270 - DNA, 75 bp, synthetic construct
  source 1..75: mol_type = other DNA
ttcacgaacagcaacctgcgactcttgataaagagcagctcatctttatgagtgagtttattgcacaaattcctg

SEQ ID NO: 593271 - DNA, 75 bp, synthetic construct
  source 1..75: mol_type = other DNA
ggagatccgatatgttgccagcttatgatcaagcccgacagcgtcatgatttgcctttgctggcaagtgcaatac

SEQ ID NO: 593272 - DNA, 75 bp, synthetic construct
  source 1..75: mol_type = other DNA
aaaacgttgtgatattgaatcgtatatccagacatacacgactgtttcagcaacggatgcctataaaaaccggac

SEQ ID NO: 593273 - DNA, 75 bp, synthetic construct
  source 1..75: mol_type = other DNA
tggacttattcaggggatcttgatgaccttttaaagcctggtatttatagcgttacgaaacaggccacaaatgca

SEQ ID NO: 593274 - DNA, 75 bp, synthetic construct
  source 1..75: mol_type = other DNA
gcagaatggcagcattactataactgggaacgtcctcatagcgctcacaacggtaaaactccgatggaacactac

SEQ ID NO: 593275 - DNA, 75 bp, synthetic construct
  source 1..75: mol_type = other DNA
attaagtacaaatacggcggtatacgtggtgtttgaggcgttgccggggtttggtatccctaaaggatttgttgt

SEQ ID NO: 593276 - DNA, 75 bp, synthetic construct
  source 1..75: mol_type = other DNA
ctgttggctcaatagttgaggtgaaaaaacgttgtgatattgaatcgtatatccagacatatacgactgtttcag

SEQ ID NO: 593277 - DNA, 75 bp, synthetic construct
  source 1..75: mol_type = other DNA
tgctgttgggtatcagtccacgggatggacttattcaggggatcttgatgaccttttaaagcctggtatttatag

SEQ ID NO: 593278 - DNA, 75 bp, synthetic construct
  source 1..75: mol_type = other DNA
ccgtacgctggtaaatgaagcgaatatgctgattgattttgtcctggctgatacaggcaaagggaaaataacaaa

SEQ ID NO: 593279 - DNA, 75 bp, synthetic construct
  source 1..75: mol_type = other DNA
cagcaattttggtgaaaaattaaatgctgattatctgtatcactatctttcatcaaaaaaggtgaaaaattattg

SEQ ID NO: 593280 - DNA, 75 bp, synthetic construct
  source 1..75: mol_type = other DNA
cctcccgcgtgaaatcgagttgcgccagaaacaatacgagtactatcgtgatttactgttcagttttcccaaacc

SEQ ID NO: 593281 - DNA, 75 bp, synthetic construct
  source 1..75: mol_type = other DNA
aggaaaagtgggaatttataaaaaaggaacaaaatgttatcttaaccaacgggttgggaaattcatacccaaaga

SEQ ID NO: 593282 - DNA, 75 bp, synthetic construct
  source 1..75: mol_type = other DNA
gaaaagaaaatacgatataaaataattgaacagccttcgctacagaaaaaatttggaagggtactgttcccgttg

SEQ ID NO: 593283 - DNA, 75 bp, synthetic construct
  source 1..75: mol_type = other DNA
gttgatcactgtttcagaaaatccttttagtggcatgctggttaagcaggaaaaaagacggaagaaaacgctgac

SEQ ID NO: 593284 - DNA, 75 bp, synthetic construct
  source 1..75: mol_type = other DNA
aatgcattgatgtcaaaactactcatcccaattccctgcccggataatccggaaaaatccctcgccatccagtct

SEQ ID NO: 593285 - DNA, 75 bp, synthetic construct
  source 1..75: mol_type = other DNA
ccaggaactgctgatcgcagacaacagcgccacaggtagggtcgatgtgttcagcgaagaaggcatacaggccag

SEQ ID NO: 593286 - DNA, 75 bp, synthetic construct
  source 1..75: mol_type = other DNA
tgaccaaggcgcgttctgtctcaaggtacttgagccagttccgaatcgtgcgggtgctaacctccagatggtcag

SEQ ID NO: 593287 - DNA, 75 bp, synthetic construct
  source 1..75: mol_type = other DNA
tattcatgttattttattgtttctttgtttggtcctgagtttctttatttttttgataaaacagcattgcttata

SEQ ID NO: 593288 - DNA, 75 bp, synthetic construct
  source 1..75: mol_type = other DNA
tggtcgtggccgcgctgaaagataaaacggctgccgccgatcgtgtgtattccccgcgtgactgggcaacttcgc

SEQ ID NO: 593289 - DNA, 75 bp, synthetic construct
  source 1..75: mol_type = other DNA
aagcgcaacctatggacaaacaggaaacaaggttgcagccggaaccgtccagtcagtcattggtgtcacttttat

SEQ ID NO: 593290 - DNA, 75 bp, synthetic construct
  source 1..75: mol_type = other DNA
ccttcgcgagcaggtggagcgcgcggtgatcaacagctacgaactgacgcggaatattcagaaatacgcggaagt

SEQ ID NO: 593291 - DNA, 75 bp, synthetic construct
  source 1..75: mol_type = other DNA
taatgacaccaaagaccagctggagcggcgaatcgcccgtctggaaacgggcatggcctgggcagaagagccgcc

SEQ ID NO: 593292 - DNA, 75 bp, synthetic construct
  source 1..75: mol_type = other DNA
atcatcgaagggcattaaatgatgagattctttctattataagtaaagaaccaagttcaggaataaaaaataaac

SEQ ID NO: 593293 - DNA, 75 bp, synthetic construct
  source 1..75: mol_type = other DNA
acggcgctgacacttgccaccgttgccgcactgctaacaggtggtggcgcagccggtgctgcaagtgtcgcgctg

SEQ ID NO: 593294 - DNA, 75 bp, synthetic construct
  source 1..75: mol_type = other DNA
ccaccagccacattaatcagtctcatcacagcgatgcggttgctgtcgacctgcgtttaatcaactgcgacctgg

SEQ ID NO: 593295 - DNA, 75 bp, synthetic construct
  source 1..75: mol_type = other DNA
atgcagagaggatagtggatggatttcgtagtgacatgaacattaaaaagttagttaagctgatgaaaaaaatat

SEQ ID NO: 593296 - DNA, 75 bp, synthetic construct
  source 1..75: mol_type = other DNA
ggttattaaagacttaaaaaaagatctggcagtatatggagcactacttgatagcaatgcaagtggactaaaacc

SEQ ID NO: 593297 - DNA, 75 bp, synthetic construct
  source 1..75: mol_type = other DNA
attcgtgcaaataataattttcttgccacacataaaggaagtaaagtaactgatttcgtaataaagagacaagaa

SEQ ID NO: 593298 - DNA, 75 bp, synthetic construct
  source 1..75: mol_type = other DNA
agcgttgccactccgcgcgccccattttttgccggaatccgctttggcgacgcgcccaccgcgctggcgcccgag

SEQ ID NO: 593299 - DNA, 75 bp, synthetic construct
  source 1..75: mol_type = other DNA
atgggaaataatttgttatcagcaaaagcgacactccctgtttatgatcgtaataacctggccccaagaattatt

SEQ ID NO: 593300 - DNA, 75 bp, synthetic construct
  source 1..75: mol_type = other DNA
caaacgcgcgaccgccgcaaaggcattcagccgccgacaacctggatttttaatgacaccaaagaccagctggaa

SEQ ID NO: 593301 - DNA, 75 bp, synthetic construct
  source 1..75: mol_type = other DNA
cgaaattgtcacaagcacaggctgaacagcttgaacaggcttatcaggctgcaaccggtgggaaagccgcgacta

SEQ ID NO: 593302 - DNA, 75 bp, synthetic construct
  source 1..75: mol_type = other DNA
ccttccggcgtgcactattaggtgggccattttacgttactaatatcgtgcccaccgttctagagtattgtcagg

SEQ ID NO: 593303 - DNA, 75 bp, synthetic construct
  source 1..75: mol_type = other DNA
catatgaacgttattaatactatttttaacgcattacccactctgtttaatacgtttaaattcgataaaaaaata

SEQ ID NO: 593304 - DNA, 75 bp, synthetic construct
  source 1..75: mol_type = other DNA
taaagcgttagagcatataaaaacagaatgggctatgtttcttgataatgatatttattttataaacaacccgtt

SEQ ID NO: 593305 - DNA, 75 bp, synthetic construct
  source 1..75: mol_type = other DNA
gctgaatgcagacaagctgatcacgccggaagagaaggcgcagctggaaacggcgaagcagaatgctgacaccct

SEQ ID NO: 593306 - DNA, 75 bp, synthetic construct
  source 1..75: mol_type = other DNA
ataggtggagagggctttgacacgatatctttggacaatactacagtaacaagtgctatgttctctggttttgag

SEQ ID NO: 593307 - DNA, 75 bp, synthetic construct
  source 1..75: mol_type = other DNA
gtctatgcccgactcggtgagcggttacgcatcgccgcgatggtcgatattggctatgacggaaatgaattgcgc

SEQ ID NO: 593308 - DNA, 75 bp, synthetic construct
  source 1..75: mol_type = other DNA
tggacgggatcacggtaccggcggtgacggatgcgaacgacgatggtgtggctgatgacaaggctgccgaggtcg

SEQ ID NO: 593309 - DNA, 75 bp, synthetic construct
  source 1..75: mol_type = other DNA
gtaccggaagtgaacgatcagaacggcaacggcaagccggatgcacaggatgcggcagcggcagtggcattttac

SEQ ID NO: 593310 - DNA, 75 bp, synthetic construct
  source 1..75: mol_type = other DNA
gttcaggtgcatccgtggatgtacaaaacttcgactgggagaatttaagtagtgccaatgatggtgatgttaaat

SEQ ID NO: 593311 - DNA, 75 bp, synthetic construct
  source 1..75: mol_type = other DNA
atgaggttgtcaccatcggcggcgtgcggtgtttctacgtcagtaaatcaaaaacaaaggcgggtataaggtatg

SEQ ID NO: 593312 - DNA, 75 bp, synthetic construct
  source 1..75: mol_type = other DNA
cattaccgcgcccgtaactactccagcagaacgagggaaaccagcatcacccaaattgacagacgtcagtaaaga

SEQ ID NO: 593313 - DNA, 75 bp, synthetic construct
  source 1..75: mol_type = other DNA
ccagtgctttcactccttgcgcggtcacttcatcacctgcttagaccgggcaggcgtaccagaacagcgcatagg

SEQ ID NO: 593314 - DNA, 75 bp, synthetic construct
  source 1..75: mol_type = other DNA
tgtgcggtggtatttactcccccggtgatgaaacggcggactgttataagttctgccaggcactacttgccaaac

SEQ ID NO: 593315 - DNA, 75 bp, synthetic construct
  source 1..75: mol_type = other DNA
agatcgtagcggccagctttccgcaactgcaaggtatcgatgaggccgaattatggacgggtatgcgtccatcca

SEQ ID NO: 593316 - DNA, 75 bp, synthetic construct
  source 1..75: mol_type = other DNA
cgcaatttcaacaggctttatcacgcgaagagtgtgttcatcttgaacctgcactaaaacatattggtcattccc

SEQ ID NO: 593317 - DNA, 75 bp, synthetic construct
  source 1..75: mol_type = other DNA
ttggttggcgtgttgattatgatcctgaaaaaggcacacacatcaatatatgggattactcacagggtaaaggcc

SEQ ID NO: 593318 - DNA, 75 bp, synthetic construct
  source 1..75: mol_type = other DNA
ccgccaaatgtgaaaacgacccggcatttcgtgagcgttacctacgcgcccaggttaaaccgctggcagtcgtgc

SEQ ID NO: 593319 - DNA, 75 bp, synthetic construct
  source 1..75: mol_type = other DNA
ttatataatcagcaaaacatcaaaaaactcaataattttcaatatgcctaaaattggtaaggaattcagtttatc

SEQ ID NO: 593320 - DNA, 75 bp, synthetic construct
  source 1..75: mol_type = other DNA
gcaagatgtatatctccccaaaaaacaaacacactacatcattctatttcactgcaaaagaattagctcaagtga

SEQ ID NO: 593321 - DNA, 75 bp, synthetic construct
  source 1..75: mol_type = other DNA
aagatgaatctcttgtaagtaagcattacataaactatatggcaataccagaaagtgatggagtttttacatggc

SEQ ID NO: 593322 - DNA, 75 bp, synthetic construct
  source 1..75: mol_type = other DNA
cgacaggccattatcgacgccgttgacctattgctactacacccggaagcggttggccctatctatgatttggtg

SEQ ID NO: 593323 - DNA, 75 bp, synthetic construct
  source 1..75: mol_type = other DNA
agaccaaatgcgaaagcgaaccggtattccgcgaacgctacctacgcgcccaggtcaaaccactggctgaatttc

SEQ ID NO: 593324 - DNA, 75 bp, synthetic construct
  source 1..75: mol_type = other DNA
acttgtcgttacgctgctcaaggttttgctgatttttgtactggcctcaatcgcagaaaacacgctggcacgcgg

SEQ ID NO: 593325 - DNA, 75 bp, synthetic construct
  source 1..75: mol_type = other DNA
gccagtgaaccggttaaagccgcaatggaaatagcttacctgtgtgcagcgagggtatccgatgtactgaagatg

SEQ ID NO: 593326 - DNA, 75 bp, synthetic construct
  source 1..75: mol_type = other DNA
accggaaacagcaccgcatcagcagcagtgggagcacagagcgggaagaatgctgttgagaataactacttgagc

SEQ ID NO: 593327 - DNA, 75 bp, synthetic construct
  source 1..75: mol_type = other DNA
atggtgcccgtcgctggctggaaagaaactcaggtgagtgatatggatttcgacacaatcatggaaaaggcttat

SEQ ID NO: 593328 - DNA, 75 bp, synthetic construct
  source 1..75: mol_type = other DNA
tagatcgaatggttacagttacgtgtggaaaccagaaggaagtacaagaactatagggctaggaagagtgcggaa

SEQ ID NO: 593329 - DNA, 75 bp, synthetic construct
  source 1..75: mol_type = other DNA
aacgccaggaagttgcgccgacatcttcaggtctgatgttccgcctgatgccgtgggtattaatcagcagcatgc

SEQ ID NO: 593330 - DNA, 75 bp, synthetic construct
  source 1..75: mol_type = other DNA
aagctttcaggacatatagcaagggagcagggatgaaagaactatgggagtatgtggagttggtcagttatccgt

SEQ ID NO: 593331 - DNA, 75 bp, synthetic construct
  source 1..75: mol_type = other DNA
cctaataaagtcgtaccaagaacgcggaagaagttcgacgagttttatctcccctgtagcaatagctatatcatt

SEQ ID NO: 593332 - DNA, 75 bp, synthetic construct
  source 1..75: mol_type = other DNA
taactaaaaaaaataatgagcatctttttgatctgatcaatttagcatcttaccgggaagaaataaaacaacttg

SEQ ID NO: 593333 - DNA, 75 bp, synthetic construct
  source 1..75: mol_type = other DNA
atcgcacacctacagacagacaaaaaaggattcaaaagcgagaggtttataatcttattatagaagccttcttca

SEQ ID NO: 593334 - DNA, 75 bp, synthetic construct
  source 1..75: mol_type = other DNA
ggtcagtcctatccgttgtcgctcgctatcaagaccctcattccgggctacctgtcaggcttacctgaagtggca

SEQ ID NO: 593335 - DNA, 75 bp, synthetic construct
  source 1..75: mol_type = other DNA
atgtattactacaccgatgtcgtcgggctgtctgtgggtttggtcggcgttgttgctcaaatcagggaactatcc

SEQ ID NO: 593336 - DNA, 75 bp, synthetic construct
  source 1..75: mol_type = other DNA
tatcaataagttggagtcattaccaaaatgagttagaaaacagtgaggacggtgcgggtcaaataggctttcaac

SEQ ID NO: 593337 - DNA, 75 bp, synthetic construct
  source 1..75: mol_type = other DNA
ttgcactaccaagcagtgattatcggaaatggtacttcctgaccttgatttatacaggtgctcgacgtggtgaaa

SEQ ID NO: 593338 - DNA, 75 bp, synthetic construct
  source 1..75: mol_type = other DNA
tagaggacatgtattgaaagcacaggattatacaagggctttacaggattggttggataagaatccaacagcatc

SEQ ID NO: 593339 - DNA, 75 bp, synthetic construct
  source 1..75: mol_type = other DNA
taccacgcgggtcccggcgtcagtaagtctcagctcgatgacattgctgatactccggcactgtatttgtggcgt

SEQ ID NO: 593340 - DNA, 75 bp, synthetic construct
  source 1..75: mol_type = other DNA
actcatgggagaatccttacataaaattttggataggattgttggtgatagcactgtttcccagattaataaaga

SEQ ID NO: 593341 - DNA, 75 bp, synthetic construct
  source 1..75: mol_type = other DNA
agtttttaattcctataggccaaaaccatgaaggaaagatttccctttctgtatttaagtcgaaggttatatctt

SEQ ID NO: 593342 - DNA, 75 bp, synthetic construct
  source 1..75: mol_type = other DNA
aacattagataaaatagctaggactataactgttgatgactcaacaaatcctgcaaccaaatcgataataagtga

SEQ ID NO: 593343 - DNA, 75 bp, synthetic construct
  source 1..75: mol_type = other DNA
tttaatgacttagggaaagcggcggcgatctcggtggtgctcttcatcattattttcgctgtcattctgctgacc

SEQ ID NO: 593344 - DNA, 75 bp, synthetic construct
  source 1..75: mol_type = other DNA
tgatggctctcagcccccgtttggtgccagtgtaaccagtgaaaaaggccgggagctgggcatggtggccgacga

SEQ ID NO: 593345 - DNA, 75 bp, synthetic construct
  source 1..75: mol_type = other DNA
ctgatgaatatctggaaacacggtttatcaagcccacccgcgaactgataacccaggtaattcaccatttttgct

SEQ ID NO: 593346 - DNA, 75 bp, synthetic construct
  source 1..75: mol_type = other DNA
ctgaccgcccgtgaccgtgtgcatctggcgaatatcatgcgcaaaatccgcgtgatgccagacgtgattaaagtc

SEQ ID NO: 593347 - DNA, 75 bp, synthetic construct
  source 1..75: mol_type = other DNA
atgctcgtcacatatagatcgcctcttacggatctgtcaggcatcctcaacgcacccgcacttaacccgcttcgg

SEQ ID NO: 593348 - DNA, 75 bp, synthetic construct
  source 1..75: mol_type = other DNA
actgtcatccttcattacagtttatttttgtgtaaaaagctttgatagagattatacgttagtatctattatatt

SEQ ID NO: 593349 - DNA, 75 bp, synthetic construct
  source 1..75: mol_type = other DNA
tatttcgaatagcggattaggcatcatgccatataaaagcatactaaatactaaaatagtaggtatatatgacta

SEQ ID NO: 593350 - DNA, 75 bp, synthetic construct
  source 1..75: mol_type = other DNA
ggcaaatagactcgatcctgaacccatcagtcccaaatttgtcccagtcaaaaaataaggaaggtactaatgatg

SEQ ID NO: 593351 - DNA, 75 bp, synthetic construct
  source 1..75: mol_type = other DNA
ctgcagcttgtactccaatactaagcaacggcggagtggatttgcccctatatttccagacacctgttatcactt

SEQ ID NO: 593352 - DNA, 75 bp, synthetic construct
  source 1..75: mol_type = other DNA
cgaaggtgagttaggtgaactgcttttatacgcttttcttgaaacaggactaaatgctccgaaattactttccaa

SEQ ID NO: 593353 - DNA, 75 bp, synthetic construct
  source 1..75: mol_type = other DNA
cgatagagcagttatctgagaaagaagctttacgtctaacattgtatcaatccgtggcgaagcttatccgtgctt

SEQ ID NO: 593354 - DNA, 75 bp, synthetic construct
  source 1..75: mol_type = other DNA
gaatacggctatattgtagactataaagaccttttccgctcattggaaaaaacagttcaggactacaccgcagaa

SEQ ID NO: 593355 - DNA, 75 bp, synthetic construct
  source 1..75: mol_type = other DNA
caacatgcttgatcgtcacctggctcagatatgcaataaacagcgactgctggaattgatccacgactttatcgt

SEQ ID NO: 593356 - DNA, 75 bp, synthetic construct
  source 1..75: mol_type = other DNA
ctggtgtttttatacttctatttattcctctacttgctacagtccaaagttttactattgcaattaaaccagcat

SEQ ID NO: 593357 - DNA, 75 bp, synthetic construct
  source 1..75: mol_type = other DNA
aattgccctgatattcgcaatacgaaaattattgatataatatcagaattaaaagattataatttgaatgtcgat

SEQ ID NO: 593358 - DNA, 75 bp, synthetic construct
  source 1..75: mol_type = other DNA
cgttatataaaggttcaaacaactgacctgaaaattactgcacgtgacaaagtaaaacaatcccgactcccgaat

SEQ ID NO: 593359 - DNA, 75 bp, synthetic construct
  source 1..75: mol_type = other DNA
agttagcgcatacggagtcatatcagtggcgtattgatagtggaatgatcccgcaaaaattcagcgttcagggac

SEQ ID NO: 593360 - DNA, 75 bp, synthetic construct
  source 1..75: mol_type = other DNA
tgtttatgaaccttgcctaaaaattgctactcttgacgatgttaatgtcggtgaagatgtgggtattttaggttt

SEQ ID NO: 593361 - DNA, 75 bp, synthetic construct
  source 1..75: mol_type = other DNA
ttgttggcgtgcttaatgcaggtttggttagttttttaggaacaggtttttttatttctaaggataaaataatta

SEQ ID NO: 593362 - DNA, 75 bp, synthetic construct
  source 1..75: mol_type = other DNA
gcatgggtgccgtcgctggcggcgaagaaacgcggtggcccgacgctgcgcgataccggtgcgctggcgcggtca

SEQ ID NO: 593363 - DNA, 75 bp, synthetic construct
  source 1..75: mol_type = other DNA
cctaatgatataaactttttaaggaatatcggtaaaatttatctcgaccaaggtgttccaaatgttcctgatatg

SEQ ID NO: 593364 - DNA, 75 bp, synthetic construct
  source 1..75: mol_type = other DNA
acctattccacaatcaataattgatacagccaggaaatctggtgtagtgattcgtgatataaatggtaaggtgta

SEQ ID NO: 593365 - DNA, 75 bp, synthetic construct
  source 1..75: mol_type = other DNA
catggaataattagaaatgatggtgttatttatgatttgaaatacatcattgaccctaacttagtagatattcgt

SEQ ID NO: 593366 - DNA, 75 bp, synthetic construct
  source 1..75: mol_type = other DNA
ggccgccgcgcaagccgtgctgaagaacaattactgaccttacagctcatcacttttttacgaaacggaattgat

SEQ ID NO: 593367 - DNA, 75 bp, synthetic construct
  source 1..75: mol_type = other DNA
cttggtgaagatagagattaccgaggccccgacggagcggttgagggcgaacttcgttttcatggggtaaatggt

SEQ ID NO: 593368 - DNA, 75 bp, synthetic construct
  source 1..75: mol_type = other DNA
atgacttggctcagtaatgtactcattgaagtactcattgaagtactcgcaactataatttatatgtttgtgcta

SEQ ID NO: 593369 - DNA, 75 bp, synthetic construct
  source 1..75: mol_type = other DNA
actgtacagcgtaaggcacctggtgtttaacggctttgagctgataagccagcagttcagccgggtacggcagcc

SEQ ID NO: 593370 - DNA, 75 bp, synthetic construct
  source 1..75: mol_type = other DNA
gataaaatcagaggctgcattcaataaatacataaacatgataaataaaagactagaattaacaggtagtaaatt

SEQ ID NO: 593371 - DNA, 75 bp, synthetic construct
  source 1..75: mol_type = other DNA
tatcaggcgtcaccagccgggaagattacggacgggaaacacagcgggagtaccggcttgaccggaacggccagg

SEQ ID NO: 593372 - DNA, 75 bp, synthetic construct
  source 1..75: mol_type = other DNA
ggccacgccagcgtcaccaccacccagcagtacgatcgccgcggggaagagcgtctgcgcgccgcccgggatcgc

SEQ ID NO: 593373 - DNA, 75 bp, synthetic construct
  source 1..75: mol_type = other DNA
ttcatgcattacttgagaaaagaacttttaattggatatggagaaaaatatcagcgcccgaccgaaagtatgatg

SEQ ID NO: 593374 - DNA, 75 bp, synthetic construct
  source 1..75: mol_type = other DNA
gcgatcgtgcgacgcgtgaaaaactgtttattgcgggctggacgcgagcggaaaaaaatgatgccaatgataccc

SEQ ID NO: 593375 - DNA, 75 bp, synthetic construct
  source 1..75: mol_type = other DNA
ttcatgcagacccgctggagtttgagaaaaagtacggctctcagattgagttaatttttcgttttcttgatcacg

SEQ ID NO: 593376 - DNA, 75 bp, synthetic construct
  source 1..75: mol_type = other DNA
ttgttgggggctataaagatctgaagaaagctatagcggagtgtaacaaatctacagcccaaatatttattttag

SEQ ID NO: 593377 - DNA, 75 bp, synthetic construct
  source 1..75: mol_type = other DNA
atgaagaaattagatgttcacagtggtatcgagttgatcaaaacagctttacgtatgggtgtttgcactatataa

SEQ ID NO: 593378 - DNA, 75 bp, synthetic construct
  source 1..75: mol_type = other DNA
atgctggtgggaattaccgaaccgctggaatttaccttcctgttcatttcaccgttgctgtttgcggtacacgcc

SEQ ID NO: 593379 - DNA, 75 bp, synthetic construct
  source 1..75: mol_type = other DNA
gtgccggggcgcaaaccctttctgaacaacggctgtgtcgggtactgaatatcgacatcggcggtggcaccgcga

SEQ ID NO: 593380 - DNA, 75 bp, synthetic construct
  source 1..75: mol_type = other DNA
catcaccggtgaaagcgcgaaaacccgcaatgctcgcccggcggtgatggcgctctctcagtcgctgggcgattt

SEQ ID NO: 593381 - DNA, 75 bp, synthetic construct
  source 1..75: mol_type = other DNA
tggtgccgataataggagtcgaacctacgaccttcgcattacgaatctgtagcaccaatcataactatctgtttt

SEQ ID NO: 593382 - DNA, 75 bp, synthetic construct
  source 1..75: mol_type = other DNA
agcagagatattattagaaaataaagaaattaatatgccttttttattttcttgggctaatgaaccttggacacg

SEQ ID NO: 593383 - DNA, 75 bp, synthetic construct
  source 1..75: mol_type = other DNA
actcactataacagcacactattcggtgggtatcagtttagtaaaaattattttaacttatctactggtataggc

SEQ ID NO: 593384 - DNA, 75 bp, synthetic construct
  source 1..75: mol_type = other DNA
cttttatcgcgatctgtttcggtcatcagattctgtgcaccatcttggggtacccgatagttgcgctgacgttac

SEQ ID NO: 593385 - DNA, 75 bp, synthetic construct
  source 1..75: mol_type = other DNA
gatggtaagcttatgacacagcactctatccgttttcctgtcgcttttccggttgctgctctgaatgctcaggtg

SEQ ID NO: 593386 - DNA, 75 bp, synthetic construct
  source 1..75: mol_type = other DNA
ataacgaaatattgaaaacaatggaaaaacgagctagccgctctaaaattactacgctcttatttttatatattt

SEQ ID NO: 593387 - DNA, 75 bp, synthetic construct
  source 1..75: mol_type = other DNA
ccgctgccggagacatatgaccgtccggacccgcgtattaagcagctggcgcgccgcagtacggtgacaccgggc

SEQ ID NO: 593388 - DNA, 75 bp, synthetic construct
  source 1..75: mol_type = other DNA
agacgcatcccctgatgcaatctcaacgctggatatttgcctgcctgaaacattacaggctttacccgaagatga

SEQ ID NO: 593389 - DNA, 75 bp, synthetic construct
  source 1..75: mol_type = other DNA
gctgtatgagcgtgttctggcggcagcatgaaggcgaattttctcgctttctgatatcgaagacaggcgatagcg

SEQ ID NO: 593390 - DNA, 75 bp, synthetic construct
  source 1..75: mol_type = other DNA
cgggccagaaagcacctgaaagaagcgatgacagaactctgccggattgaggcggatgacacgtcttccgtctgc

SEQ ID NO: 593391 - DNA, 75 bp, synthetic construct
  source 1..75: mol_type = other DNA
gtgggtttttacaacacgttcaccggactggcgaccagcaatacgttagccagcgagtatggtgagattcgcgtc

SEQ ID NO: 593392 - DNA, 75 bp, synthetic construct
  source 1..75: mol_type = other DNA
gaacgacaaggggttgatgctactgatccccgtcattatcgacgtgatggcgcgggataacgagaaagtggcgag

SEQ ID NO: 593393 - DNA, 75 bp, synthetic construct
  source 1..75: mol_type = other DNA
ggtggatatatcaatatacacaaatgtagaagatgattattttttttcttatttttccctaacaatcgatgatgg

SEQ ID NO: 593394 - DNA, 75 bp, synthetic construct
  source 1..75: mol_type = other DNA
taaaaacatcaaataacaattttgatatagtaaggctcattcttgcgttagttgttgttttctcacatataagag

SEQ ID NO: 593395 - DNA, 75 bp, synthetic construct
  source 1..75: mol_type = other DNA
atgaaagttcttattggtaatatcaatattcgtaatcatcatatgcttcttgaattagctggaattgcaggattt

SEQ ID NO: 593396 - DNA, 75 bp, synthetic construct
  source 1..75: mol_type = other DNA
accgtagcggaggctcaaacattagtgctcgtggatgatgaagccacgacgggaaaaacgttcctcaatcttctc

SEQ ID NO: 593397 - DNA, 75 bp, synthetic construct
  source 1..75: mol_type = other DNA
tggctctaaggaaattgttaaagaattccatatatatcatagtgttgcgattgaatgtggtggcgaaatttatga

SEQ ID NO: 593398 - DNA, 75 bp, synthetic construct
  source 1..75: mol_type = other DNA
aaaagatggctgcttctggtgatgggcgtgttttccgctcaagattaaaaaatacagaagagctagaactggacg

SEQ ID NO: 593399 - DNA, 75 bp, synthetic construct
  source 1..75: mol_type = other DNA
tttagcaatagaactttgccgaaaagcagatttccatcgcttacttaccgcacttaaagaggcaaaagatgatat

SEQ ID NO: 593400 - DNA, 75 bp, synthetic construct
  source 1..75: mol_type = other DNA
agacagaccactggcgataaaagcagccagtatacctttcatccgacagtttcatctgttcatcaacaaaaacag

SEQ ID NO: 593401 - DNA, 75 bp, synthetic construct
  source 1..75: mol_type = other DNA
gtgaccgaggaattactgcagtctttaaaaaaaacagcgttatccggagatgaagaaagcattgagttactgcat

SEQ ID NO: 593402 - DNA, 75 bp, synthetic construct
  source 1..75: mol_type = other DNA
tacttgttcgcccatttgttattgcagggttcatactgccgatatgtttgcagcgtaaatttttaataagtgtgc

SEQ ID NO: 593403 - DNA, 75 bp, synthetic construct
  source 1..75: mol_type = other DNA
agtatcctttttcgttatattattttttatctctcacctttccgttgttgaatatttaaaggaaggcggaattcg

SEQ ID NO: 593404 - DNA, 75 bp, synthetic construct
  source 1..75: mol_type = other DNA
ttgctgccggtgttttccggtcatgcgtcggattcggataaaacggatattattgtggtgctgcaggccagacgg

SEQ ID NO: 593405 - DNA, 75 bp, synthetic construct
  source 1..75: mol_type = other DNA
atggggtgtaaatctgcgaaagatcgcactatatccatagtccttggcaactcgatgttgcaaacactccttgaa

SEQ ID NO: 593406 - DNA, 75 bp, synthetic construct
  source 1..75: mol_type = other DNA
gatggaatacatcagtcaggtgaaaaaaatggaactacctgcgattaaaaacaaagctgaatttgacgacattaa

SEQ ID NO: 593407 - DNA, 75 bp, synthetic construct
  source 1..75: mol_type = other DNA
ttcgcaccttccttagctaagaacagagtaccgctttaccacattatggatgttgcaaaacaaatggagaataat

SEQ ID NO: 593408 - DNA, 75 bp, synthetic construct
  source 1..75: mol_type = other DNA
attgggaaatagcagaaactacgatgcgttttggtaaaaatgggaatgaccctttaagcatactttctcatgata

SEQ ID NO: 593409 - DNA, 75 bp, synthetic construct
  source 1..75: mol_type = other DNA
cggcctttagttagcgagttagcgcaatcagcccgagtatttcccttttttgcggctgttggaagacatattgag

SEQ ID NO: 593410 - DNA, 75 bp, synthetic construct
  source 1..75: mol_type = other DNA
tatggaaatctgatggccatgctgactattatgaaaggcataccgctagcgtataatacagacatgagcgaggat

SEQ ID NO: 593411 - DNA, 75 bp, synthetic construct
  source 1..75: mol_type = other DNA
gactgcaatggtcatccccaatattggtgcttttattgcctggggtttttattactgcgttatttattcccaccg

SEQ ID NO: 593412 - DNA, 75 bp, synthetic construct
  source 1..75: mol_type = other DNA
atggagatcgcccaggcaaggcgtaacgaactgattgaaaaaatccttatgcagtcagaaggaagggagctgaac

SEQ ID NO: 593413 - DNA, 75 bp, synthetic construct
  source 1..75: mol_type = other DNA
gccaagactacgaccttatcgcagcacagaaacaaatgaaaaagatggttgatgacaaagcagccgatattctta

SEQ ID NO: 593414 - DNA, 75 bp, synthetic construct
  source 1..75: mol_type = other DNA
ccaagcgctggctggcggcgaaaaagcagaggtggctgagtatgaaggcccagcaggaaaatatttctgagaact

SEQ ID NO: 593415 - DNA, 75 bp, synthetic construct
  source 1..75: mol_type = other DNA
agctggagcagaacaggaaaaaccggtgctgtcctgtgacatccgtcagggaggaatgttgatgctgcataaccg

SEQ ID NO: 593416 - DNA, 75 bp, synthetic construct
  source 1..75: mol_type = other DNA
gtcgctaacgatgatattcaacagaaattaatgggtattaccgcagaaacctacggcggtaatgctgccaactta

SEQ ID NO: 593417 - DNA, 75 bp, synthetic construct
  source 1..75: mol_type = other DNA
gggtggataatacccttgtgctgccctgcacgccgttcggcacatccgttcactacaatgcctatccactggcgg

SEQ ID NO: 593418 - DNA, 75 bp, synthetic construct
  source 1..75: mol_type = other DNA
gaaaaagtgaatgaaatcttggattcactgccggaagttattcgccctattatttcccaggccgctgatgaatta

SEQ ID NO: 593419 - DNA, 75 bp, synthetic construct
  source 1..75: mol_type = other DNA
atgatcaaacctctgggccgctggtcgttaatcatggaaatcgatgaaggctttgcagttggtatgtcgccagcc

SEQ ID NO: 593420 - DNA, 75 bp, synthetic construct
  source 1..75: mol_type = other DNA
aggcattaggggtgtcaggcgcttcgcgcaacggcacgcgccgcgccatcacgccggaacattaccagcaggtga

SEQ ID NO: 593421 - DNA, 75 bp, synthetic construct
  source 1..75: mol_type = other DNA
gctgatttgttcaggcgtggccttttattctctctatatcaatgtcggagatgtattcttttactggtatatgcc

SEQ ID NO: 593422 - DNA, 75 bp, synthetic construct
  source 1..75: mol_type = other DNA
agattgttttggcaaggggaaggttttggccatgaattattccccgtgacaaacaaatataatgcttggagatgg

SEQ ID NO: 593423 - DNA, 75 bp, synthetic construct
  source 1..75: mol_type = other DNA
gaagagccgctttgactccgttgctgaacaaaccggaatgtttgccggtgatggtggcttcgacatcacagtggg

SEQ ID NO: 593424 - DNA, 75 bp, synthetic construct
  source 1..75: mol_type = other DNA
ggcagtatcgacaacctgaatgcggggctgataagcgcgggcggtagcctggacctgagcgccatcggggatatc

SEQ ID NO: 593425 - DNA, 75 bp, synthetic construct
  source 1..75: mol_type = other DNA
tgccacggaaagtgattatcactacagtgaatcaggggaaacccgcaaccgtctcctcagccatcagaccacccg

SEQ ID NO: 593426 - DNA, 75 bp, synthetic construct
  source 1..75: mol_type = other DNA
gcgaaagagcaattccgctctgacgcccgcttctttgaacattgtcttgaggaagttttctcgcaaacagaatgg

SEQ ID NO: 593427 - DNA, 75 bp, synthetic construct
  source 1..75: mol_type = other DNA
gggcgatatatcactcaggatccgattggactgaaggggggatggaacctgtatggatatcaattgaatccgata

SEQ ID NO: 593428 - DNA, 75 bp, synthetic construct
  source 1..75: mol_type = other DNA
taggcatgtcaccagccgaactcagtgccgagcaacttttaagcaaactatggctatgggatggaaaagcagagc

SEQ ID NO: 593429 - DNA, 75 bp, synthetic construct
  source 1..75: mol_type = other DNA
gcgacggccaacaacagtggcaataccaccgttgatggtcagggttcgaccgggactgaaatcgcgggtaataac

SEQ ID NO: 593430 - DNA, 75 bp, synthetic construct
  source 1..75: mol_type = other DNA
aacaaattccaccggctgtttgtgatggcacaactatactggaatttggcatgattaacgggcagttaaagttat

SEQ ID NO: 593431 - DNA, 75 bp, synthetic construct
  source 1..75: mol_type = other DNA
ctgaatattggttcgcaggctaatgaacaaattccaccggctgtttgtgatggcacaactatactggaatttggc

SEQ ID NO: 593432 - DNA, 75 bp, synthetic construct
  source 1..75: mol_type = other DNA
cggcggcaccgggtaatcctaccgctatcgatacccactggatttggcaggagggcgattgtcgcctgaccaaaa

SEQ ID NO: 593433 - DNA, 75 bp, synthetic construct
  source 1..75: mol_type = other DNA
ttagaacgctgctgggtagcgacagaaccacttgatattcggcatgcttgctggttactgaataatttgcatagc

SEQ ID NO: 593434 - DNA, 75 bp, synthetic construct
  source 1..75: mol_type = other DNA
ccgctacagattgcactaaacaaggctaaacagattcagcaagagatggaatcagcagatcaaggagagattgca

SEQ ID NO: 593435 - DNA, 75 bp, synthetic construct
  source 1..75: mol_type = other DNA
aatcggctttggaagctggataacagttagcaatattattagccctattatgacatatatggatcgttttattct

SEQ ID NO: 593436 - DNA, 75 bp, synthetic construct
  source 1..75: mol_type = other DNA
cgccgctgcgcaaactgtgtgatttaacgacgcttaaactggaaccaaacagttttattgatgaagacctgcggc

SEQ ID NO: 593437 - DNA, 75 bp, synthetic construct
  source 1..75: mol_type = other DNA
aagcacgcctaacgattcattcgaccatgttgtgggtaacgttccgttcggcggtcgtgataacacacgcaacat

SEQ ID NO: 593438 - DNA, 75 bp, synthetic construct
  source 1..75: mol_type = other DNA
gatctaaatggtgtacatgtttatggctgtaaatcaaactatcattatgcctctgcagatgtatctatttcttat

SEQ ID NO: 593439 - DNA, 75 bp, synthetic construct
  source 1..75: mol_type = other DNA
ttaataagttgtttagcttacatcatttagataaagaagaaggaaaaatcattacagagccttgggagctagaat

SEQ ID NO: 593440 - DNA, 75 bp, synthetic construct
  source 1..75: mol_type = other DNA
aagaaaacttaaaacaagcggaggcggtatacgataaacttcattctataaccagaaagttaaagtgggagatta

SEQ ID NO: 593441 - DNA, 75 bp, synthetic construct
  source 1..75: mol_type = other DNA
tttatcaggctctactggctgaggccaaaaggcaggacaagcccctggcacggctctgtaatgaaatcttggaga

SEQ ID NO: 593442 - DNA, 75 bp, synthetic construct
  source 1..75: mol_type = other DNA
gacatctgcatcttttacccgcactctgtgtttcagaggtattttccggcatttcgttcacttcagtcgcagcac

SEQ ID NO: 593443 - DNA, 75 bp, synthetic construct
  source 1..75: mol_type = other DNA
tcagcgcaatacgatggctcacgagttccttgctaattttgcggtcacacagcagcttttagacggagctgcact

SEQ ID NO: 593444 - DNA, 75 bp, synthetic construct
  source 1..75: mol_type = other DNA
atgctagttcactgccgtacaggcagcttagaaaaatcgcacagttgcgcacggtcagggtcaggagttcactgc

SEQ ID NO: 593445 - DNA, 75 bp, synthetic construct
  source 1..75: mol_type = other DNA
gggttattagagtttttttaatcatagccatcttatcacctttatacgtctacttgacaaaaaattcaagttcgt

SEQ ID NO: 593446 - DNA, 75 bp, synthetic construct
  source 1..75: mol_type = other DNA
gttcttctaataaattcagatataaatgaatttattaagagaaacaatgatcttatggcttgtcaggtcgaaatt

SEQ ID NO: 593447 - DNA, 75 bp, synthetic construct
  source 1..75: mol_type = other DNA
tatgctgtccagtctcggatttgtcagtggcaatcgctcccgcttcacggcctatcaggggtatctggcgaacgg

SEQ ID NO: 593448 - DNA, 75 bp, synthetic construct
  source 1..75: mol_type = other DNA
tatgattgataccgagcgtttcgagcgtcggatcaacggcgtgaatgttctcgccggcctgtcggcaaaagtgcg

SEQ ID NO: 593449 - DNA, 75 bp, synthetic construct
  source 1..75: mol_type = other DNA
tgccaagactggtctaatgattctttagaaacatgtaagatgaagtgctccggaaataacattggacgttttatt

SEQ ID NO: 593450 - DNA, 75 bp, synthetic construct
  source 1..75: mol_type = other DNA
aagacaaaacccgtcttgcatttgcaggcctgaaatttggtgattacggctcaatcgattacggtcgtaactacg

SEQ ID NO: 593451 - DNA, 75 bp, synthetic construct
  source 1..75: mol_type = other DNA
atattcaactgccatcgcaatggcaggatcagtcgatgcaggtcctggtatccacggataacagtggcatcaacc

SEQ ID NO: 593452 - DNA, 75 bp, synthetic construct
  source 1..75: mol_type = other DNA
tgaaggtcagggggaaaatggcgatattggtcccctgcgcccgttcaccattaatttgcggacgggtgaaatatc

SEQ ID NO: 593453 - DNA, 75 bp, synthetic construct
  source 1..75: mol_type = other DNA
ataatcttcaggtttacagtaaagagcagtcagatcaacgctatgttcatcgggaaggcgataccttgtccggtg

SEQ ID NO: 593454 - DNA, 75 bp, synthetic construct
  source 1..75: mol_type = other DNA
tcaatatttccatatgaaaaacatgggaaattattatcgcatatttttgatgatgtgctatttccagcaatatcc

SEQ ID NO: 593455 - DNA, 75 bp, synthetic construct
  source 1..75: mol_type = other DNA
caggtggaaaccctgcaggggatgatcaccagtatcacgccggatgcacgtccggcaacatcacaggcagaggct

SEQ ID NO: 593456 - DNA, 75 bp, synthetic construct
  source 1..75: mol_type = other DNA
gttattaccgccaggctgtcgatggactggagaccatctgcattattccggagcagtttgtacggcgcattaacg

SEQ ID NO: 593457 - DNA, 75 bp, synthetic construct
  source 1..75: mol_type = other DNA
tgaccgtattgatcctgctcgcgggcaaatagccccagctctcgcacactgtgggccgagcgaaacaacgtctac

SEQ ID NO: 593458 - DNA, 75 bp, synthetic construct
  source 1..75: mol_type = other DNA
caatacagggagtactggcgattcgatctcgcaaacactcttacagcgtcgctacggcgttttatggggttttgt

SEQ ID NO: 593459 - DNA, 75 bp, synthetic construct
  source 1..75: mol_type = other DNA
tatcggattcgcaccggaagagaacaaatcagcatcggaagatttgctctaaatggaaagcgtgcaagctgggtt

SEQ ID NO: 593460 - DNA, 75 bp, synthetic construct
  source 1..75: mol_type = other DNA
agtgagatttgtcaggcaaaatccatcggcagggttgtcgttagtggctccgcgctggagggatgattgttggga

SEQ ID NO: 593461 - DNA, 75 bp, synthetic construct
  source 1..75: mol_type = other DNA
ggcacagacgaaatactcttccgtctgagtaaacaccatcatttatatgagaaaaagaaaacaaaagaggggtga

SEQ ID NO: 593462 - DNA, 75 bp, synthetic construct
  source 1..75: mol_type = other DNA
atatcaaagccctggaaaacgaactggatggcttcaccttcgaagacaataaagacgaccagtttgctgtcggtg

SEQ ID NO: 593463 - DNA, 75 bp, synthetic construct
  source 1..75: mol_type = other DNA
gccagtacatgctgcaaatgcatgcacagatgatgtgcaccgggcggaaatggtgtgatttcgttagtttcgatg

SEQ ID NO: 593464 - DNA, 75 bp, synthetic construct
  source 1..75: mol_type = other DNA
tacttacaatcaagcagtggcgcgaaacatacggacctggtagcaacgttgtactgccagcagaagaagcggaag

SEQ ID NO: 593465 - DNA, 75 bp, synthetic construct
  source 1..75: mol_type = other DNA
atggcgtcaggatcatggttttgttccgggcagtatccttaccctgcatggcgatctggcacgcagtattaccac

SEQ ID NO: 593466 - DNA, 75 bp, synthetic construct
  source 1..75: mol_type = other DNA
atgcttcatggtgccgaacctgtaagccaaacttacaagttgcctcccctgtcatccaacgaagtaaacgacgcg

SEQ ID NO: 593467 - DNA, 75 bp, synthetic construct
  source 1..75: mol_type = other DNA
atattacacaagaccccattgggctggaggggggatggaacctgtataattacccactgaatccgataataagga

SEQ ID NO: 593468 - DNA, 75 bp, synthetic construct
  source 1..75: mol_type = other DNA
attatggagcataagtccggggtagcccgttctgtatggacagcccgtcttaatggttgccagattatctggcgt

SEQ ID NO: 593469 - DNA, 75 bp, synthetic construct
  source 1..75: mol_type = other DNA
tgctgacaatcaaacagtggcgcgaaacatacggaccgggtagcaacgttgtactgccagcagaagaagcggaag

SEQ ID NO: 593470 - DNA, 75 bp, synthetic construct
  source 1..75: mol_type = other DNA
gatgatattattctgcgtattacggcaacggcgatctgtggctctgacctccatctttatcgaggcaaaataccc

SEQ ID NO: 593471 - DNA, 75 bp, synthetic construct
  source 1..75: mol_type = other DNA
taacaatgtctggatgatcaccattaccccatcctgtgccagtgttctggaatgcctgactgaactggcttatga

SEQ ID NO: 593472 - DNA, 75 bp, synthetic construct
  source 1..75: mol_type = other DNA
atgaatatttccgatattcgcgcaggactgcgcacgcttgtagaaagtgaaaaagcgacttatgcacaaattgca

SEQ ID NO: 593473 - DNA, 75 bp, synthetic construct
  source 1..75: mol_type = other DNA
atgggaatcctctcacttaaggcagcgattaaggtcaagcgataccgctcttacagaggagaggtagggcaaacc

SEQ ID NO: 593474 - DNA, 75 bp, synthetic construct
  source 1..75: mol_type = other DNA
aacgattgcagtgccgctgcaaactggttcctgtttctcaattacgccagcgcatcctgtaagcatgacagcgcc

SEQ ID NO: 593475 - DNA, 75 bp, synthetic construct
  source 1..75: mol_type = other DNA
gcacaggtactgaagtgctggcttgacgattatcttgctgccgcagacctgccggaattgcctggttttgttcaa

SEQ ID NO: 593476 - DNA, 75 bp, synthetic construct
  source 1..75: mol_type = other DNA
cctgcgtgaggcttacgaagaactggatcaggatgtggatgttcaggaacagttgggtataaggagagcgaaatc

SEQ ID NO: 593477 - DNA, 75 bp, synthetic construct
  source 1..75: mol_type = other DNA
cacatcacgttcaggtagaaaatgttcccgatccgggcgttgaacaggcagatgatattattctgcgtattacgg

SEQ ID NO: 593478 - DNA, 75 bp, synthetic construct
  source 1..75: mol_type = other DNA
tcaggtctggtgaatgcgatgccgggggggaacaatatgatcgtcaggagtggttttcgaggtaaaggacagcca

SEQ ID NO: 593479 - DNA, 75 bp, synthetic construct
  source 1..75: mol_type = other DNA
atggcgatatttttggtcatgaatttatggggggaagtcgttgaaaccggaaaggacgtaaaaaatttgcaaaaa

SEQ ID NO: 593480 - DNA, 75 bp, synthetic construct
  source 1..75: mol_type = other DNA
cacaggcagcacagcttgcgacagacggtatctcagggatggtgaataacatcacggagatgctgaacggaaata

SEQ ID NO: 593481 - DNA, 75 bp, synthetic construct
  source 1..75: mol_type = other DNA
aagcaccctggcaaccagatgaggcgacgttgaatggcatcattcatactcaactgggtaaaggcgaaattaccg

SEQ ID NO: 593482 - DNA, 75 bp, synthetic construct
  source 1..75: mol_type = other DNA
gggttacagaaaagaactcagaaggggtaaaaacaccagatgtagacctggatgcattaattgacaccatttata

SEQ ID NO: 593483 - DNA, 75 bp, synthetic construct
  source 1..75: mol_type = other DNA
atgttatgttttttgatttatatcactctccccttcattcagcttgtctatttcatttcctctgaaaagaaacta

SEQ ID NO: 593484 - DNA, 75 bp, synthetic construct
  source 1..75: mol_type = other DNA
gaagcgattaaatggttcgagttagccgctaaacacggtgacagagaagctccgttagcgctggggagtatctac

SEQ ID NO: 593485 - DNA, 75 bp, synthetic construct
  source 1..75: mol_type = other DNA
taagtggaaaaaaatatctggaaggaagtctcactgctgttgctgccggagaggatgtcgttcctgcctcagaac

SEQ ID NO: 593486 - DNA, 75 bp, synthetic construct
  source 1..75: mol_type = other DNA
caggcgcaatggacgaacacggcagggcaaaagaaaacaccgggaaagcacacggcgaacaggccgctgccgccg

SEQ ID NO: 593487 - DNA, 75 bp, synthetic construct
  source 1..75: mol_type = other DNA
tttaagctgggtaagcactcaggccggtacccgtcagtatgcagacctgccgggaagctgggggctgatacgtct

SEQ ID NO: 593488 - DNA, 75 bp, synthetic construct
  source 1..75: mol_type = other DNA
aaattgtggctttgaataattcgattgttgtgagcgaaaatatgttcactcaaaaaacttcttggaacacaatac

SEQ ID NO: 593489 - DNA, 75 bp, synthetic construct
  source 1..75: mol_type = other DNA
cagcgttatggcagctgatgataatgctatcacggatggcaaagtaacatttaatggtaaagttattgctccctg

SEQ ID NO: 593490 - DNA, 75 bp, synthetic construct
  source 1..75: mol_type = other DNA
ccatcgcatggagaaaacgggtgattgataaagcaatcatcgttctaggggcgttaattgcgctgctggaactga

SEQ ID NO: 593491 - DNA, 75 bp, synthetic construct
  source 1..75: mol_type = other DNA
gcgaatgatattctgttgagtggcgccgcaaacacacaaaaaacaacgggcaggaacagcagcagtggcggtggc

SEQ ID NO: 593492 - DNA, 75 bp, synthetic construct
  source 1..75: mol_type = other DNA
ccatcaataatgcggttaccagtgcacaggagacgaaggagagcagtgacagccgtctgaaagccctgcaggcca

SEQ ID NO: 593493 - DNA, 75 bp, synthetic construct
  source 1..75: mol_type = other DNA
gctgcatccgggcgtcatggtggccgccgtggacgccggaaacttaaccccagtggcgctggcgctgcgtgggcg

SEQ ID NO: 593494 - DNA, 75 bp, synthetic construct
  source 1..75: mol_type = other DNA
gatcgcctcaagggcataatcagcgaggacaccatcaaccttgagcgcaaaggcattgacccggaacccatgccg

SEQ ID NO: 593495 - DNA, 75 bp, synthetic construct
  source 1..75: mol_type = other DNA
ggctatgttgcccgtgaatatggcaggcaatgcaggggagagcaccgatagcggtctgtatccggcgttcatcgg

SEQ ID NO: 593496 - DNA, 75 bp, synthetic construct
  source 1..75: mol_type = other DNA
gcctgagctggcaggcgcaggacggtcgtatgctgaattacacactgcgaactgaagcgggggaagggccgcttg

SEQ ID NO: 593497 - DNA, 75 bp, synthetic construct
  source 1..75: mol_type = other DNA
aaacgataaggtcgcgacgaagccgtttttccataggctccgcccccctgacaagcatcacaaaatctgacgctc

SEQ ID NO: 593498 - DNA, 75 bp, synthetic construct
  source 1..75: mol_type = other DNA
gatgccaaggagaagctaaacagggaaacgataaggtcgcgacgaagccgtttttccataggctccgcccccctg

SEQ ID NO: 593499 - DNA, 75 bp, synthetic construct
  source 1..75: mol_type = other DNA
cccataaattagacgcaataacaggtgaacatttaaagtctacaattgaatcatacgtaaatgaaggtatggaag

SEQ ID NO: 593500 - DNA, 75 bp, synthetic construct
  source 1..75: mol_type = other DNA
gatcaaagataatttaaccatcatgcgatggatttatgaacagaaggacatgctggaatttgaaataaatatttc

SEQ ID NO: 593501 - DNA, 75 bp, synthetic construct
  source 1..75: mol_type = other DNA
aatgctccagataagcatatcaaagcaagattaaaatcctcttatttcgacattttaatttatcttaaaacagga

SEQ ID NO: 593502 - DNA, 75 bp, synthetic construct
  source 1..75: mol_type = other DNA
ggcattttccgctgtgcgttttagcgttcatggtattaatcgctcagatatccaccttttcctcagatttttttc

SEQ ID NO: 593503 - DNA, 75 bp, synthetic construct
  source 1..75: mol_type = other DNA
acccggactttatccgcgccctgaaccgcctgcgcgacgtggctgacaccgcctttgccagcggagatgccggaa

SEQ ID NO: 593504 - DNA, 75 bp, synthetic construct
  source 1..75: mol_type = other DNA
atcagaaaatgctggcacgggtggcacatcagtttgcggatatgcgtctgacggatatgactggtgatacagatg

SEQ ID NO: 593505 - DNA, 75 bp, synthetic construct
  source 1..75: mol_type = other DNA
atgacccgctacaggggaggtatattacacaagaccccattgggctggaggggggatggaacctgtaccaatatc

SEQ ID NO: 593506 - DNA, 75 bp, synthetic construct
  source 1..75: mol_type = other DNA
gaagacggcaatacggcgtggcgcggggagtatgatgaatggggcaaccagcttaatgaagagaacccgtattac

SEQ ID NO: 593507 - DNA, 75 bp, synthetic construct
  source 1..75: mol_type = other DNA
gatattgtcgtatatcaaaaaaggcgatgcccaaatggcttcagagttaatgcgagttcatttactggaaaagaa

SEQ ID NO: 593508 - DNA, 75 bp, synthetic construct
  source 1..75: mol_type = other DNA
gatgctaagtacggaagaatttaaccgcttgcgcgacgcggtgccggaaaaggtcagcgaatgggggctgacgcc

SEQ ID NO: 593509 - DNA, 75 bp, synthetic construct
  source 1..75: mol_type = other DNA
atgaccacctttacccaaaaagaactgattaaagaaatcaaagaacgcatcagcagcctcgacgtgcgagacgat

SEQ ID NO: 593510 - DNA, 75 bp, synthetic construct
  source 1..75: mol_type = other DNA
atgaccacctttacccaaaaagaactgattaaagaaattaaagagcgcatcagcagcctcgacgttcgagacgat

SEQ ID NO: 593511 - DNA, 75 bp, synthetic construct
  source 1..75: mol_type = other DNA
atgaccacctttacccaaaaagaactgattaaagaaattaaagatcgcatcagcagcctcgacgtacgagacgat

SEQ ID NO: 593512 - DNA, 75 bp, synthetic construct
  source 1..75: mol_type = other DNA
cagctcctgcaactgtttggcgtccataccgaagagtggggctattttaaaattatccatctggaaggatcgcca

SEQ ID NO: 593513 - DNA, 75 bp, synthetic construct
  source 1..75: mol_type = other DNA
tggcggcgttctttaccggcattcctcagttctcgctgcatgcctggttctttgccatcgccactgccattggtt

SEQ ID NO: 593514 - DNA, 75 bp, synthetic construct
  source 1..75: mol_type = other DNA
atgaccacctttacccaaaaagaactgattaaagaaatgaaagaacgcatcagcagcctcgacgtccgagacgat

SEQ ID NO: 593515 - DNA, 75 bp, synthetic construct
  source 1..75: mol_type = other DNA
tggtttactcacgccacctcagaacgcgtcgactggagcgcaccatcagtgggcgatcccgttactgttgtttct

SEQ ID NO: 593516 - DNA, 75 bp, synthetic construct
  source 1..75: mol_type = other DNA
ttttcttatcctcgggtattaggtcacgaaatttgtggcgttgttgagcaaacaggaagcgcatgtctgcgggta

SEQ ID NO: 593517 - DNA, 75 bp, synthetic construct
  source 1..75: mol_type = other DNA
caaagaggtgctaagagttcacatcaagactctccagcaattgcgtgaaatttcagtctcacatagagacattgc

SEQ ID NO: 593518 - DNA, 75 bp, synthetic construct
  source 1..75: mol_type = other DNA
ggtaatgcccgcacatggtggaaaccatcggaaggtgagcaggtggtgctactgagtttgggcggcaatctggaa

SEQ ID NO: 593519 - DNA, 75 bp, synthetic construct
  source 1..75: mol_type = other DNA
aatattcggacgtgcagacgttactattaatagcgaaaatgttgtcaatattcacggtggaaaattaattaacgc

SEQ ID NO: 593520 - DNA, 75 bp, synthetic construct
  source 1..75: mol_type = other DNA
ccccatgatcatgtcactgcatactgtgacggggctacgatgacgtataacacaaaaaatcacactctgacatgg

SEQ ID NO: 593521 - DNA, 75 bp, synthetic construct
  source 1..75: mol_type = other DNA
tttgctatcgccaccgccatcggctcatggtttggtgcgcgctttaccctactgccgatgttccgcatcccggta

SEQ ID NO: 593522 - DNA, 75 bp, synthetic construct
  source 1..75: mol_type = other DNA
atcctggcgagcactggcaaattgtcgggccaaatggcgcaggaaaatcgacgttattaaacctgatcacgggcg

SEQ ID NO: 593523 - DNA, 75 bp, synthetic construct
  source 1..75: mol_type = other DNA
gcaactggcgcagcagttcggtattaccgccctcctcgaccgacgctttaaatacctttccactggcgagacgcg

SEQ ID NO: 593524 - DNA, 75 bp, synthetic construct
  source 1..75: mol_type = other DNA
gggcgcatgttgttgttgctgatattgattgtcaacgtcgccagcacgttgtgggtaatctggatattaatgcct

SEQ ID NO: 593525 - DNA, 75 bp, synthetic construct
  source 1..75: mol_type = other DNA
cgcgcattgtgctgaacaatggcgtggtttcttataacgatcgccccattcttaataaccttagctggcaggtga

SEQ ID NO: 593526 - DNA, 75 bp, synthetic construct
  source 1..75: mol_type = other DNA
cgtcacgccttacccgccaacgaaccgcgcattgtgctgaacaatggcgtggtttcttataacgatcgccccatt

SEQ ID NO: 593527 - DNA, 75 bp, synthetic construct
  source 1..75: mol_type = other DNA
agcggaataacaccgatatgctcggccctggcgaagatgacaccgggcgtaccacggctgagatcattcaggatg

SEQ ID NO: 593528 - DNA, 75 bp, synthetic construct
  source 1..75: mol_type = other DNA
tgagcaggtggtggtgctgagcatgggcggcaatctggaaaccgcgtttgcgctgcccgccatctattcgaatca

SEQ ID NO: 593529 - DNA, 75 bp, synthetic construct
  source 1..75: mol_type = other DNA
aaccagtgagtttgtgctggaggctgaccgcacgcgtattaacagcgaagtagtgatcaatggtggcgttaccca

SEQ ID NO: 593530 - DNA, 75 bp, synthetic construct
  source 1..75: mol_type = other DNA
gctgcgttaatgttggttatcggctgggagaaacgcttcttccgccgtgcggcgccgcagactgctaaggagatc

SEQ ID NO: 593531 - DNA, 75 bp, synthetic construct
  source 1..75: mol_type = other DNA
atgcgacgggaaataaagcttcaatgagtcaggatgtaaatcttattcgtcatggcggcaaaattgttttcatcg

SEQ ID NO: 593532 - DNA, 75 bp, synthetic construct
  source 1..75: mol_type = other DNA
ggatattcccacaccagcagataatgaagtgctgttaaaaatcaaagctgtgggtatttgtggtactgatattca

SEQ ID NO: 593533 - DNA, 75 bp, synthetic construct
  source 1..75: mol_type = other DNA
acaaatgctgagtacctggtacgtaaattcgacgcgcttgaagctaaatgtgcggcactggaaaacaaaataata

SEQ ID NO: 593534 - DNA, 75 bp, synthetic construct
  source 1..75: mol_type = other DNA
gtttttcttggaagcgtgcgattgacaaagaggtgctaagagttcacatcaagactctccagcaattgcgtgaaa

SEQ ID NO: 593535 - DNA, 75 bp, synthetic construct
  source 1..75: mol_type = other DNA
aaaggcttccgtgccgcagtgatcgaagcaatgacgaagtgtatggaaaaatcagaaaaacttagcaagtcctga

SEQ ID NO: 593536 - DNA, 75 bp, synthetic construct
  source 1..75: mol_type = other DNA
gagcgtggagagcttgttgatgtgctgtggggggaactggaatggtcttccccgacagatgatgatgagctgccg

SEQ ID NO: 593537 - DNA, 75 bp, synthetic construct
  source 1..75: mol_type = other DNA
ggccgggcacgggacgggcgcttttaccgctcccggctggcatcggtgacagtgtacgccagcccgtcgcccttt

SEQ ID NO: 593538 - DNA, 75 bp, synthetic construct
  source 1..75: mol_type = other DNA
agctttctcagcatgaagttaacagcaaacacccgtatggcaaaaagctctttctgaggctgaaccacggacagt

SEQ ID NO: 593539 - DNA, 75 bp, synthetic construct
  source 1..75: mol_type = other DNA
aagcgatggccgacgccgcggtgctgggtggaatgccacgcgcacaggcctataaatttgcagctcaggccgtaa

SEQ ID NO: 593540 - DNA, 75 bp, synthetic construct
  source 1..75: mol_type = other DNA
ggtggtctctatcgccgcaggcgtcaccctcgaccagcttgcccgggcgctgggccatgaccggaaaattatccg

SEQ ID NO: 593541 - DNA, 75 bp, synthetic construct
  source 1..75: mol_type = other DNA
gaatgtaacacggtagtgagtgagcgtgttggcgtgacgtttcacggtgtagctgatggcaaaaacccggatgta

SEQ ID NO: 593542 - DNA, 75 bp, synthetic construct
  source 1..75: mol_type = other DNA
caaatatcgtgctaccgggcgtcgggtgactggcggcatggctaatgcccaggcctggttctccttaacctatca

SEQ ID NO: 593543 - DNA, 75 bp, synthetic construct
  source 1..75: mol_type = other DNA
ggggcatcaaatcaatggtcattgagaccgctgacaatatcaccctgaaaaccagtgagtttgtactggaggctg

SEQ ID NO: 593544 - DNA, 75 bp, synthetic construct
  source 1..75: mol_type = other DNA
gaacggtgttccttctgcatatcactggtataccgaacagtatggagtgaagtggcctgtggggtatgaggtgaa

SEQ ID NO: 593545 - DNA, 75 bp, synthetic construct
  source 1..75: mol_type = other DNA
taaacggctttaacggtggtgttctgaacggtgttccttctgcatatcactggtataccgaacagtatgatgtga

SEQ ID NO: 593546 - DNA, 75 bp, synthetic construct
  source 1..75: mol_type = other DNA
gagagctcgttgatgtgctgtggggggaactggaatggtcttccccgacagatgacgatgagctgccggaagtca

SEQ ID NO: 593547 - DNA, 75 bp, synthetic construct
  source 1..75: mol_type = other DNA
gtgcgtgacgcgctgaactctggttctgcggggacggaagatgaagtgtctacgcctgcggcagataacgctatc

SEQ ID NO: 593548 - DNA, 75 bp, synthetic construct
  source 1..75: mol_type = other DNA
ttccaacggagtcgtggttgacgaccatgagcatactggcgtcctgaaaggcggcgatacaaccggaggcccggt

SEQ ID NO: 593549 - DNA, 75 bp, synthetic construct
  source 1..75: mol_type = other DNA
agtgcggcgtggagtatgtgctgtgcgtgcgtttcgacaggcgttttgcggcgctgacggcgcaaaactttatca

SEQ ID NO: 593550 - DNA, 75 bp, synthetic construct
  source 1..75: mol_type = other DNA
cagtgaactggacccggttaatcatggtgatttgattaccagcatggggcagttacaacgtaacgcccgtgattt

SEQ ID NO: 593551 - DNA, 75 bp, synthetic construct
  source 1..75: mol_type = other DNA
tggagaaaatatatatgctgaaaaaattgacaatggatatatagagaatgcggattcaagcataaaaatgaagat

SEQ ID NO: 593552 - DNA, 75 bp, synthetic construct
  source 1..75: mol_type = other DNA
aggggctgcctgacggctcctttacccgcgaacaggccgaagccgttgccgcacagtaccggaacgtctttatcg

SEQ ID NO: 593553 - DNA, 75 bp, synthetic construct
  source 1..75: mol_type = other DNA
ggcgtacctggaattttgaggacggtgccgggtactggatgaaccatgtcatccgtgatttcgggattcttaagt

SEQ ID NO: 593554 - DNA, 75 bp, synthetic construct
  source 1..75: mol_type = other DNA
ggggcatcaaatcaatggtcattgagaccgctgacaatatcaccatgaaaaccagtgagtttgtcctggaggctg

SEQ ID NO: 593555 - DNA, 75 bp, synthetic construct
  source 1..75: mol_type = other DNA
tcgagactaaaggtctgactgcagcaatagaagctgctgatgcgatggtcaaatcagccaatgtcgtgctcattg

SEQ ID NO: 593556 - DNA, 75 bp, synthetic construct
  source 1..75: mol_type = other DNA
tgtcggcgaagtgaaagccgtacacgttatcccccgcccacataccgatgtcgaaaaaatcttaccaaagggaat

SEQ ID NO: 593557 - DNA, 75 bp, synthetic construct
  source 1..75: mol_type = other DNA
aagagccggatgccgccagcttcgattatatctgccaggccttgcgtcaactggcattagaagcgaaaggcgaaa

SEQ ID NO: 593558 - DNA, 75 bp, synthetic construct
  source 1..75: mol_type = other DNA
aagactgtgccgggtactggatgaaccggtacatcacggaagcaggcaatcgtaaacaagagagatgccggacgg

SEQ ID NO: 593559 - DNA, 75 bp, synthetic construct
  source 1..75: mol_type = other DNA
cggacgcttgcgtgacagagcatcctgacggcggctggtttgaatatgaacccgccaccgggcgctggtatgtca

SEQ ID NO: 593560 - DNA, 75 bp, synthetic construct
  source 1..75: mol_type = other DNA
atcaattagttataaagttactacgatctaccaggattgctaaaggcctgacccaggctcaactggctaaggcgc

SEQ ID NO: 593561 - DNA, 75 bp, synthetic construct
  source 1..75: mol_type = other DNA
cacaggatacctcactgtggctcgacgacttcggctccggctacgcgggaattaacgctattcgcggttatcact

SEQ ID NO: 593562 - DNA, 75 bp, synthetic construct
  source 1..75: mol_type = other DNA
tagcctgtctatctctccagaaaacttcttccgctatgccaatacgggattgcgcgagagcatattcatggagca

SEQ ID NO: 593563 - DNA, 75 bp, synthetic construct
  source 1..75: mol_type = other DNA
aacaacacgctttctgctctcacgcgtctgcgttcactgatctcacgtaacccgtttgctccgcgagaaattgag

SEQ ID NO: 593564 - DNA, 75 bp, synthetic construct
  source 1..75: mol_type = other DNA
tgagggtcgccggattaaagaaatccgcgagattcagggttatgaaaacggggaatatatttcccagctcattgc

SEQ ID NO: 593565 - DNA, 75 bp, synthetic construct
  source 1..75: mol_type = other DNA
aggccgactacatttgtcaggctatctctgcacataaaaacatccttgtaatcgggggaaccggtagcgggaaaa

SEQ ID NO: 593566 - DNA, 75 bp, synthetic construct
  source 1..75: mol_type = other DNA
cgcaactattaacaattttgatgtcgaagagttatttgttaaacaaaatcgtcaccctaaagtgatcaatgtcat

SEQ ID NO: 593567 - DNA, 75 bp, synthetic construct
  source 1..75: mol_type = other DNA
aacaagggttaaacccatacgactggaaacctttttcaactatcggccctggtgtgcgagagattcgtactcgcg

SEQ ID NO: 593568 - DNA, 75 bp, synthetic construct
  source 1..75: mol_type = other DNA
gtcagtcagcctgcgccagcagacatgacagtatctccggaaccggtaaaagcgccgccgacaataaagcgtccg

SEQ ID NO: 593569 - DNA, 75 bp, synthetic construct
  source 1..75: mol_type = other DNA
gatttttttgatgtcaacgacctgcctgaattgtcgctttcaagaattgtgcctgagcagattgctgtcagcctg

SEQ ID NO: 593570 - DNA, 75 bp, synthetic construct
  source 1..75: mol_type = other DNA
gtcgcatatcagccggatggagcaggcgctggaatacctgctgccctgcatccccgaagtgctatacgccgggat

SEQ ID NO: 593571 - DNA, 75 bp, synthetic construct
  source 1..75: mol_type = other DNA
cgagcgggtacaggatgagctgctggggctgatgagtcaggagctgaacgtcgattacaacctgctgttgctgga

SEQ ID NO: 593572 - DNA, 75 bp, synthetic construct
  source 1..75: mol_type = other DNA
aataataatatgcgttattttattgcagtcattatagttatcctttcaggcttaatgttgtttataacactaagg

SEQ ID NO: 593573 - DNA, 75 bp, synthetic construct
  source 1..75: mol_type = other DNA
atgaacaggaaaggttaacaggaggtgtttttcgttatgtgttgataaagttttataatgcttttaaggagaatt

SEQ ID NO: 593574 - DNA, 75 bp, synthetic construct
  source 1..75: mol_type = other DNA
gagcgagatgacgttttacaggccgtattcgacaaaggcacatcaaaatttcagctaacttatgatgacagagcg

SEQ ID NO: 593575 - DNA, 75 bp, synthetic construct
  source 1..75: mol_type = other DNA
tgcgccttatcaccaacctaatccgcaccggaactgtaacggaagtggaccgggacaactggctgtgccgggtga

SEQ ID NO: 593576 - DNA, 75 bp, synthetic construct
  source 1..75: mol_type = other DNA
atgaagtttatcgctaactggcaaagtctgccatcactatctcttccggagtcagtaatgagtctgttgaaaaca

SEQ ID NO: 593577 - DNA, 75 bp, synthetic construct
  source 1..75: mol_type = other DNA
cgtaacggtgggcgagcgggcgcagcaggcggaccgggtgcattacgcagcatgttgggcaatatgccagtgctc

SEQ ID NO: 593578 - DNA, 75 bp, synthetic construct
  source 1..75: mol_type = other DNA
cgttattggctggacgaatctctgcaatttgaacgtggtttgcatgagatcgctaatgcgctctcggcagatatt

SEQ ID NO: 593579 - DNA, 75 bp, synthetic construct
  source 1..75: mol_type = other DNA
cctttaaaaacgagttgctgtacttcatcagcgaaccccataattaacttaaggacggtaaagaacgagcagaac

SEQ ID NO: 593580 - DNA, 75 bp, synthetic construct
  source 1..75: mol_type = other DNA
gagccgtttattccgaaatctggcgcgcgcgtaatgtcgctgctggagccgaccaagaagatgtccaagtctgac

SEQ ID NO: 593581 - DNA, 75 bp, synthetic construct
  source 1..75: mol_type = other DNA
attatagggtttgtaatatgtatgagctttttaaacgtgtatgcagatacaattgcactatatttgccaaatgaa

SEQ ID NO: 593582 - DNA, 75 bp, synthetic construct
  source 1..75: mol_type = other DNA
gatacctatatagttaattctgaagaaattatggcgttggatatacctcccctgaaacgttacgaatattatctt

SEQ ID NO: 593583 - DNA, 75 bp, synthetic construct
  source 1..75: mol_type = other DNA
tattgatttctgtcaggaacagggcgtagtcagatttgagcaaaaacttaaatcccggtatctgcaacgtaacca

SEQ ID NO: 593584 - DNA, 75 bp, synthetic construct
  source 1..75: mol_type = other DNA
ccttcttgatcttaaattgcctgtttttacaaaatgcactcgtttaatgcccggtcagtctaaagaaaccgaaaa

SEQ ID NO: 593585 - DNA, 75 bp, synthetic construct
  source 1..75: mol_type = other DNA
gttatacgccggctactgaactacgtgcgtgcccggggcgatatggccatcatttacgatcgctcctgtgagttc

SEQ ID NO: 593586 - DNA, 75 bp, synthetic construct
  source 1..75: mol_type = other DNA
ctgggtattgaagttgtcgatgtgcgaattaagcagatcaacctgccgaccgaagtgtctgaagcgatctacaac

SEQ ID NO: 593587 - DNA, 75 bp, synthetic construct
  source 1..75: mol_type = other DNA
cgcaccacgctgaagatgcgcctgcctgtattacccatcgccttgagttcgtgtcggacggtgacctttatcgct

SEQ ID NO: 593588 - DNA, 75 bp, synthetic construct
  source 1..75: mol_type = other DNA
caaagcccttttgtgccaggcactgatgtctgctcctgatttattgattcttgatgaaccgttcgatggccttga

SEQ ID NO: 593589 - DNA, 75 bp, synthetic construct
  source 1..75: mol_type = other DNA
acttgccagaagataataacgctcgccgcttattgtatgctttctgcgtaaccgctggtttcatgttaatagagg

SEQ ID NO: 593590 - DNA, 75 bp, synthetic construct
  source 1..75: mol_type = other DNA
atggcgcactcacactcacactcacacacgtcctcacacctgccagaagataataatgctcgtcgcttgttgtat

SEQ ID NO: 593591 - DNA, 75 bp, synthetic construct
  source 1..75: mol_type = other DNA
tgctttctttctggttgctgcatcgtggcagtgaagagaaaaatctcaatgtacgcgcggcagcgttgcatgtcc

SEQ ID NO: 593592 - DNA, 75 bp, synthetic construct
  source 1..75: mol_type = other DNA
cgcaccatgctgaagatgcgccggcttgtattacccatcgtctggagttcgtgccggacggtggcctctatcatt

SEQ ID NO: 593593 - DNA, 75 bp, synthetic construct
  source 1..75: mol_type = other DNA
ggcagcggtgaaaccatctgggacatcaagaaacatattggttacgtcagtagtagtttgcatctggattaccgt

SEQ ID NO: 593594 - DNA, 75 bp, synthetic construct
  source 1..75: mol_type = other DNA
acgttattaagcctgattactggcgatcatccgcaaggttacagcaacgatttgacgcttttcggacgacgtcgc

SEQ ID NO: 593595 - DNA, 75 bp, synthetic construct
  source 1..75: mol_type = other DNA
atgtcatcgttgcaaattttgcaaggcacgtttcgtcttggcgacacaaaaacgctgcaattgcctcggctaacg

SEQ ID NO: 593596 - DNA, 75 bp, synthetic construct
  source 1..75: mol_type = other DNA
gcctgtattacccatcgtctggagttcgtgccggacggtgacctctatcgttatgcgcttaccaaaataaattga

SEQ ID NO: 593597 - DNA, 75 bp, synthetic construct
  source 1..75: mol_type = other DNA
caatcgcttcgatgagatcccggaatttgtccagtttgccggtgtgctggcggattgcacgttagcggaaactgg

SEQ ID NO: 593598 - DNA, 75 bp, synthetic construct
  source 1..75: mol_type = other DNA
tgaatgaattacttgaaggtgcaccggtatcgctggatatcgctcgagtaggcagcctggcggctgcggcttgtt

SEQ ID NO: 593599 - DNA, 75 bp, synthetic construct
  source 1..75: mol_type = other DNA
aaaatgtaacaaccgagttaataaagcttggatacgaccaaaacgcggctatgactggcgctgacatggcggtgg

SEQ ID NO: 593600 - DNA, 75 bp, synthetic construct
  source 1..75: mol_type = other DNA
caagatgttgtggttattgactcatgccctcaatcaaacgtttcagaaattattcttggtggcaatggtaccggg

SEQ ID NO: 593601 - DNA, 75 bp, synthetic construct
  source 1..75: mol_type = other DNA
aactcacaagatgatatcattgaagcttggcagaaatcttttagctctcctttatgtcaatttgataaatattat

SEQ ID NO: 593602 - DNA, 75 bp, synthetic construct
  source 1..75: mol_type = other DNA
gttttcggtattcagtcctatgcccagctggaagacatctatggcgttaagcctgccgccacgctctttgacgta

SEQ ID NO: 593603 - DNA, 75 bp, synthetic construct
  source 1..75: mol_type = other DNA
ttttcaaaatcctatctgatgagacccgtctgggtatcgtactgctgctcagagagatgggagagctatgcgtgt

SEQ ID NO: 593604 - DNA, 75 bp, synthetic construct
  source 1..75: mol_type = other DNA
acaggacgacgtacaggccatcgcccgtaagctggcatcagctaactgctctggtagcggcaaagctgtttgtat

SEQ ID NO: 593605 - DNA, 75 bp, synthetic construct
  source 1..75: mol_type = other DNA
gtaaagatactagtgaagacagaactagaagactattttacgtcacatgtagccgagcacaaaaaagcctcgcca

SEQ ID NO: 593606 - DNA, 75 bp, synthetic construct
  source 1..75: mol_type = other DNA
agctgggcgggggagcagttaaagaaaccaaacgttccgcccaggacaacattcagggctggaaggatgcgaatg

SEQ ID NO: 593607 - DNA, 75 bp, synthetic construct
  source 1..75: mol_type = other DNA
gcttggcatgtttattttaatgcttattacagctttcgtttcgatgatagctgaagtaatgattctattgctgag

SEQ ID NO: 593608 - DNA, 75 bp, synthetic construct
  source 1..75: mol_type = other DNA
taaagactctctaaatcattcagaagtcattaaactcggatcttattttctagataaaaaatatactatgcagaa

SEQ ID NO: 593609 - DNA, 75 bp, synthetic construct
  source 1..75: mol_type = other DNA
ccttattaaaaagagaacatcttttaaaaaatacaaataatgcctcaccacttacacagatcagaagctctcttg

SEQ ID NO: 593610 - DNA, 75 bp, synthetic construct
  source 1..75: mol_type = other DNA
atgactatcaaacaaactgaggaaatattagattctaatatacataattacttaacgggcactcaaaagcatagt

SEQ ID NO: 593611 - DNA, 75 bp, synthetic construct
  source 1..75: mol_type = other DNA
ttattttatgtggcgctgatgtggcgcaggccgtcgatgacaaaaacaaatatatgcctttttttgaatatatga

SEQ ID NO: 593612 - DNA, 75 bp, synthetic construct
  source 1..75: mol_type = other DNA
catcaaccctacttcggcgcggaatacatctattccgatgcgtggactgaacgccataaccagtctgaatcctat

SEQ ID NO: 593613 - DNA, 75 bp, synthetic construct
  source 1..75: mol_type = other DNA
gaacccagcgaatgagtccgatgccagtagtgcaaccaatattagcgggatgtcacaggggtattatcttgatgt

SEQ ID NO: 593614 - DNA, 75 bp, synthetic construct
  source 1..75: mol_type = other DNA
cgttaccgccggtttatcgcgccgccagtctgatatcacccgcgcggattatgtttcgaatgacggcattgtcgc

SEQ ID NO: 593615 - DNA, 75 bp, synthetic construct
  source 1..75: mol_type = other DNA
cgggattataataccagcaccttccccgagtctgaccgcgaaatgggcaacaaatcttatggcctggcatgggat

SEQ ID NO: 593616 - DNA, 75 bp, synthetic construct
  source 1..75: mol_type = other DNA
ataactttggctttaccgccggtttatcacgccgccagtctgatatcacccgcgcggattatgtttcgaatgaca

SEQ ID NO: 593617 - DNA, 75 bp, synthetic construct
  source 1..75: mol_type = other DNA
caccaagtagaaaggttttacttacccttgacgaggaaacgaataaattattgcttggagccagagaacgtagtg

SEQ ID NO: 593618 - DNA, 75 bp, synthetic construct
  source 1..75: mol_type = other DNA
tgatcggtgaagcgactgcagaacgtatcaaacacgaaatcggttctgcttatccgggcgatgaagtccgtgaaa

SEQ ID NO: 593619 - DNA, 75 bp, synthetic construct
  source 1..75: mol_type = other DNA
cctcttctgtacgtattggcggtgaccgcttcgacgaagcgatcatcaactacgttcgtcgtaactacggttctc

SEQ ID NO: 593620 - DNA, 75 bp, synthetic construct
  source 1..75: mol_type = other DNA
ttaccaagttttaccggagcattccaagacagtactgtctgggctggaaaacgctttgatcgcgacaattttgat

SEQ ID NO: 593621 - DNA, 75 bp, synthetic construct
  source 1..75: mol_type = other DNA
tgatgccgcttccagtagcaaaagtgggccgtatctgactcccgcaggtgaaactggtggagctgttggccgtct

SEQ ID NO: 593622 - DNA, 75 bp, synthetic construct
  source 1..75: mol_type = other DNA
cgctacccaaagtttaaccggacaagtaatgtttatggtaagtctctggttaagtatctgactatgcgtctggat

SEQ ID NO: 593623 - DNA, 75 bp, synthetic construct
  source 1..75: mol_type = other DNA
tacacactgtatatggcggatcgcattagctggcgtaatgtgtcattaatgcccggcgctgagagatcccctcat

SEQ ID NO: 593624 - DNA, 75 bp, synthetic construct
  source 1..75: mol_type = other DNA
ttaatcgtaaaggatctggatatcagatttattaccaaattcatggaatggctggtgtagatttatacaataatg

SEQ ID NO: 593625 - DNA, 75 bp, synthetic construct
  source 1..75: mol_type = other DNA
atgatgtgggaattacaacaacgggtatcagaagctccacgcactcaggcctacgataactggctcatggatata

SEQ ID NO: 593626 - DNA, 75 bp, synthetic construct
  source 1..75: mol_type = other DNA
gatattggtaaaaaaatatctttcaggaagtgttttttccaacttcagacaagacactattataccagaagcatt

SEQ ID NO: 593627 - DNA, 75 bp, synthetic construct
  source 1..75: mol_type = other DNA
gaatatccagttaggagatggcgttctgaatctggcagacattgttgcggaatacgcccgtattcaaaaggaaga

SEQ ID NO: 593628 - DNA, 75 bp, synthetic construct
  source 1..75: mol_type = other DNA
ggtgaacctactgttccggtaaatatctcagatctaagtatcccaccctattcacgtctgtatctgatttttgaa

SEQ ID NO: 593629 - DNA, 75 bp, synthetic construct
  source 1..75: mol_type = other DNA
ccgtttactgggtgacgtactccggatcttaccagataatggtaactgggtggggattttccggagtggtcatac

SEQ ID NO: 593630 - DNA, 75 bp, synthetic construct
  source 1..75: mol_type = other DNA
attcaactggggatctcatcatgtgatgttcaacgctggcaggatgtttatccagaagaaaacaacagaccggat

SEQ ID NO: 593631 - DNA, 75 bp, synthetic construct
  source 1..75: mol_type = other DNA
aatacactagtaggcacagttgctggaaaagacagtctaatcggtaatgataatgacaacaccttccataccagc

SEQ ID NO: 593632 - DNA, 75 bp, synthetic construct
  source 1..75: mol_type = other DNA
gtatagctattcaaaatatagataaaatagtttttagtgggcagctccttgacagactacataacgaaggatatg

SEQ ID NO: 593633 - DNA, 75 bp, synthetic construct
  source 1..75: mol_type = other DNA
accttgccagtaaaaacactttatgatattggcgcttctcttgatggtcgtcgtatcaccaccgcccccacccag

SEQ ID NO: 593634 - DNA, 75 bp, synthetic construct
  source 1..75: mol_type = other DNA
tgttaataagcaaagtctggatgaggtaaattatgagggaattacagataaagataaagatattataaagaaaat

SEQ ID NO: 593635 - DNA, 75 bp, synthetic construct
  source 1..75: mol_type = other DNA
aggacgttgtatggggatagccttactttatctccgcacagaaaatactgaacattatggcattctgcaggaaaa

SEQ ID NO: 593636 - DNA, 75 bp, synthetic construct
  source 1..75: mol_type = other DNA
aacagctttatgcgtccaagcccgcgtgttctggtttgtgtgccggttggtgctacccaggttgagcgccgtgct

SEQ ID NO: 593637 - DNA, 75 bp, synthetic construct
  source 1..75: mol_type = other DNA
ggcggcagatatttcattatcccgtccggtttcatcttctgatgaatacgacagattatgccttacgtatgatgt

SEQ ID NO: 593638 - DNA, 75 bp, synthetic construct
  source 1..75: mol_type = other DNA
tgtgtccgtggaaaggccgtctgtgagctttcagaagatatggggctgtccggttatttcatcgtactcacaacg

SEQ ID NO: 593639 - DNA, 75 bp, synthetic construct
  source 1..75: mol_type = other DNA
ttcaggccatctccggctttgatttctcccccgtttatgccacttatcatgagcgttacggcgatgagggattgc

SEQ ID NO: 593640 - DNA, 75 bp, synthetic construct
  source 1..75: mol_type = other DNA
cgaatccgcaacaagcgccacgcgctgaacagtacgacacgcgaaaaaccatcaagcaaactcaggctgggttgc

SEQ ID NO: 593641 - DNA, 75 bp, synthetic construct
  source 1..75: mol_type = other DNA
caaaaaggtgagttgcgccgcgacgaacgcaatctgatgtggaacgtcgatccctatttacagacgcagtggcag

SEQ ID NO: 593642 - DNA, 75 bp, synthetic construct
  source 1..75: mol_type = other DNA
agcccgccttcgtctttttcagtttttcgggctgccttctgtgactgcttaccgccagttgcggcgcttcaggat

SEQ ID NO: 593643 - DNA, 75 bp, synthetic construct
  source 1..75: mol_type = other DNA
ctgatgttatcccgccgaaaaatgctttcactcgcggccttactcaggatgccgagggggctttgctcgggacag

SEQ ID NO: 593644 - DNA, 75 bp, synthetic construct
  source 1..75: mol_type = other DNA
gtcagaagcggcagcagctatgaatctgtgtttatttcgtcggcttcacgacaccgcacgacgcgctcccgcgcg

SEQ ID NO: 593645 - DNA, 75 bp, synthetic construct
  source 1..75: mol_type = other DNA
catggcctgtgatgcaggcgatttccggacctatatcctgctgaacggcggtttcttctgttctgaacgtctgct

SEQ ID NO: 593646 - DNA, 75 bp, synthetic construct
  source 1..75: mol_type = other DNA
attagcgatgccttacgtcaggggagagtcgtgctgcgccaggggcgctggcatgcgatggagcagactgtgacc

SEQ ID NO: 593647 - DNA, 75 bp, synthetic construct
  source 1..75: mol_type = other DNA
gtttacagcaaaccgccggtgaacattcgcgcgcgttttgacgatcgcggcgatctgagctttatgcaacgtgaa

SEQ ID NO: 593648 - DNA, 75 bp, synthetic construct
  source 1..75: mol_type = other DNA
aagcaggaacaccagcctatgaaagagcgctaaataatgctgcaaatgccgtcaggccgctgtttgctactgagg

SEQ ID NO: 593649 - DNA, 75 bp, synthetic construct
  source 1..75: mol_type = other DNA
gaaattgttgtcgatagcagtagcggtgggcgtacgacttacaaaaatgccggaaagacccgtcgtcaaggtgct

SEQ ID NO: 593650 - DNA, 75 bp, synthetic construct
  source 1..75: mol_type = other DNA
gaccagtgagatgctggtgaaattgctcgaccaggggaccgtgaagttaaacgatccgctaagtaaatatgctcc

SEQ ID NO: 593651 - DNA, 75 bp, synthetic construct
  source 1..75: mol_type = other DNA
gcgatatgatgcgctggatgcagcagtatttatcgtctgatttttatcaacgcagcaatcaggcagatcgtatgc

SEQ ID NO: 593652 - DNA, 75 bp, synthetic construct
  source 1..75: mol_type = other DNA
gctttaaaaacatgagcgatggtatcaatgatctggtaaccgaactgagcgggaataaaccgctggtcatccccg

SEQ ID NO: 593653 - DNA, 75 bp, synthetic construct
  source 1..75: mol_type = other DNA
agaaccgatggctgccgcaattggtgctggcctgccggtttctgaagcgaccggttctatggtggttgatatcgg

SEQ ID NO: 593654 - DNA, 75 bp, synthetic construct
  source 1..75: mol_type = other DNA
tcgaagttcgtggccgtaaccttgcagaaggtgttccacgcggttttaccctgaactccaacgaaatcctcgaag

SEQ ID NO: 593655 - DNA, 75 bp, synthetic construct
  source 1..75: mol_type = other DNA
cagaagacaggtggtggtggcggtttcattacctatatggcgatgatcccgcagaagaatattggcgcgtttgtg

SEQ ID NO: 593656 - DNA, 75 bp, synthetic construct
  source 1..75: mol_type = other DNA
ttgaaacgtagtctgcttttttctgccgtgctgtgtgcggcgttattgacctccgtccatgcggcgcagccgatc

SEQ ID NO: 593657 - DNA, 75 bp, synthetic construct
  source 1..75: mol_type = other DNA
ggcatgccggagtacgggcaaaaaggtgagttgcgtcgcgacgaacgcaatctgatgtggaacgtcgatccctat

SEQ ID NO: 593658 - DNA, 75 bp, synthetic construct
  source 1..75: mol_type = other DNA
tctttaggttacgtaccagaagaaggctggtatgccggtacagaagcgcgatatatgggcgatattatggctgat

SEQ ID NO: 593659 - DNA, 75 bp, synthetic construct
  source 1..75: mol_type = other DNA
cgcagtaaccaggcggatcgtatgcagacgctgatttatcaacgcgcgcagtttacgaaagtgatcggcatggat

SEQ ID NO: 593660 - DNA, 75 bp, synthetic construct
  source 1..75: mol_type = other DNA
aagccttatacgcagttgtttgaagagcagatcactcgtccgttggggatgaaagacaccacctacacgccatcg

SEQ ID NO: 593661 - DNA, 75 bp, synthetic construct
  source 1..75: mol_type = other DNA
agatgcactggcgaatgcgtccggcaagccttatacccagttgtttgaagagcagattacccgtccattggggat

SEQ ID NO: 593662 - DNA, 75 bp, synthetic construct
  source 1..75: mol_type = other DNA
gacccggcagtaaacgccattgctcacgccattctgggcggtgcagtggcggcaatgcagggtaataatattgct

SEQ ID NO: 593663 - DNA, 75 bp, synthetic construct
  source 1..75: mol_type = other DNA
atcggaccgtattcgcgaaaacttccgcaaaatccgtcgcggtacaccttacgaaatctttaacgtgtcactgac

SEQ ID NO: 593664 - DNA, 75 bp, synthetic construct
  source 1..75: mol_type = other DNA
gcgactggcggcaggggtggttatcgcgctggcgcacgacgttatcattacgctgggtattttgtcgttattcca

SEQ ID NO: 593665 - DNA, 75 bp, synthetic construct
  source 1..75: mol_type = other DNA
gcggcaatatggcaggcgcgctggcaggtgcttcagcgccggagctggcgaacatcatcggtcatcacgcgggta

SEQ ID NO: 593666 - DNA, 75 bp, synthetic construct
  source 1..75: mol_type = other DNA
atggcaccggcagtgaaattcagcggggtatccaggccgcgacagccgcgcttcagggactggcgggggataatt

SEQ ID NO: 593667 - DNA, 75 bp, synthetic construct
  source 1..75: mol_type = other DNA
agcagacgataagtacgctggcaactgtgtcagcagggctggccggcggtctaaccggaaacagcaccgcatcag

SEQ ID NO: 593668 - DNA, 75 bp, synthetic construct
  source 1..75: mol_type = other DNA
actggctggtgataatgaccatccggaaacgattgatttactggaagctagtcctgttctggttgaagggaaaaa

SEQ ID NO: 593669 - DNA, 75 bp, synthetic construct
  source 1..75: mol_type = other DNA
actctggaggcggtttcccgggaaaatggtattcaactggcgatttcattatgtgatgttcaacgctggcaggct

SEQ ID NO: 593670 - DNA, 75 bp, synthetic construct
  source 1..75: mol_type = other DNA
atgattaaacttcaggataatttcttcaactattgcattgtcaaaggtgttacagagattaatgatgagttacga

SEQ ID NO: 593671 - DNA, 75 bp, synthetic construct
  source 1..75: mol_type = other DNA
tcggtccgagcgtgggggcagaccttgcgcaaaccggtgcgatggcgttgatggcagcgctgctgtctatcctcg

SEQ ID NO: 593672 - DNA, 75 bp, synthetic construct
  source 1..75: mol_type = other DNA
agagcagaagcagacgataagtacgctggcaaccgtttcagcagggctggccggcggtcttaccggaaacagcac

SEQ ID NO: 593673 - DNA, 75 bp, synthetic construct
  source 1..75: mol_type = other DNA
gaagaaaattatgcttcccgatttattagtctgatgtgtgaaaaagaaccggagctgaaaatagcgcagcaactg

SEQ ID NO: 593674 - DNA, 75 bp, synthetic construct
  source 1..75: mol_type = other DNA
tcctggaactgctggagatattggcggttctataggatctgagctaggtggaaaagtaacagataaagtatctga

SEQ ID NO: 593675 - DNA, 75 bp, synthetic construct
  source 1..75: mol_type = other DNA
ggatgtcgaactggcgcatatgtacatcgacaacgctaccatgcagctgattaaagatccgtcgcagtttgacgt

SEQ ID NO: 593676 - DNA, 75 bp, synthetic construct
  source 1..75: mol_type = other DNA
tcctctattttatggcgggagatcgttaacgagatcgccattgaatatccggatgtcgaactggcgcatatgtac

SEQ ID NO: 593677 - DNA, 75 bp, synthetic construct
  source 1..75: mol_type = other DNA
ttcgcaccggagatttagcccgtggcgctgccgccgttagtaccgatgaaatgggcgatatcattgcccgctatg

SEQ ID NO: 593678 - DNA, 75 bp, synthetic construct
  source 1..75: mol_type = other DNA
tacgctacatttcgtcgccaaatatcgttctaccggacgcagcgttacaggcggtgtggctaatgcccaggcctg

SEQ ID NO: 593679 - DNA, 75 bp, synthetic construct
  source 1..75: mol_type = other DNA
atgttccacatcacgcagattggcgtggtgctgctaacgctcacgctttgcactggcctgttctacatgcacaac

SEQ ID NO: 593680 - DNA, 75 bp, synthetic construct
  source 1..75: mol_type = other DNA
tctacctgaaaggattgggggtaaagcccgatagtcgaatggcaatccagtggtataaacaagctgcggaaaaag

SEQ ID NO: 593681 - DNA, 75 bp, synthetic construct
  source 1..75: mol_type = other DNA
aaggctatgtggaggtgcgtaaaggttcaggtattcacgtggtttccaaccagccgcgtcatcagcaggcggcgg

SEQ ID NO: 593682 - DNA, 75 bp, synthetic construct
  source 1..75: mol_type = other DNA
tgtatcaacagctcgccgctgacctgaaagagcgcatcgagcaaggcgtctatctggtgggagataaactgcccg

SEQ ID NO: 593683 - DNA, 75 bp, synthetic construct
  source 1..75: mol_type = other DNA
ccggtgccgcctgccagaaagcaatgaatgagagggatgctgtagggctggctttggcaacaggtactgtggcac

SEQ ID NO: 593684 - DNA, 75 bp, synthetic construct
  source 1..75: mol_type = other DNA
tattgccgggagacggaattggtccggaagtaatgacccaggcgctgaaagtgctggatgccgtgcgcaaccgct

SEQ ID NO: 593685 - DNA, 75 bp, synthetic construct
  source 1..75: mol_type = other DNA
gaaacgcaggaagaagaccgtgacgggcgcaatgtggcgggggatgtgtgggcctgggcaaatgaccagaaccac

SEQ ID NO: 593686 - DNA, 75 bp, synthetic construct
  source 1..75: mol_type = other DNA
taaacaggacatcatgaaactgatggccatccaggagcaggcacgcggcgaacaatgcttccgcgattccgagtg

SEQ ID NO: 593687 - DNA, 75 bp, synthetic construct
  source 1..75: mol_type = other DNA
taaaaggctttcttgcgagtaatccacatacaaaaataaatattctttatagcaataagactgagcataatattt

SEQ ID NO: 593688 - DNA, 75 bp, synthetic construct
  source 1..75: mol_type = other DNA
tgctaccgggcctgtggccgctattggtatgggagctcccgctattgcccgcaatgtggcactgaaagaagagcg

SEQ ID NO: 593689 - DNA, 75 bp, synthetic construct
  source 1..75: mol_type = other DNA
caccgttgacgcaaaaaccggatcaggcgcggcgtcgttttcgtctcgggatgctggtctttttcggcatgctgg

SEQ ID NO: 593690 - DNA, 75 bp, synthetic construct
  source 1..75: mol_type = other DNA
acccaatacctgccgaacttctcaccgatgacggtcgcgatgctgcgggcgttgccggcgggtttattgctcgtg

SEQ ID NO: 593691 - DNA, 75 bp, synthetic construct
  source 1..75: mol_type = other DNA
ttattatctttgggttgatgaaaatgcttttggtgcggcaaaatttaccagtatattaaaacaaattgcttttga

SEQ ID NO: 593692 - DNA, 75 bp, synthetic construct
  source 1..75: mol_type = other DNA
gcctgagttttatcgtcatcatgcacagcgatggttcgaaatggctaaaggatatggaagccagaatattgattt

SEQ ID NO: 593693 - DNA, 75 bp, synthetic construct
  source 1..75: mol_type = other DNA
gctgaaaacaccagacggtgaggtgccggtaatgaccatcacccataagggggtaaacaccctggtaggtacagt

SEQ ID NO: 593694 - DNA, 75 bp, synthetic construct
  source 1..75: mol_type = other DNA
attatacagaggccgagtttttacagttggttactgtaatttataatgcagataccgctagtgaagaagaacaag

SEQ ID NO: 593695 - DNA, 75 bp, synthetic construct
  source 1..75: mol_type = other DNA
ggggcatcaaatcaatggtcattgagaccgctgacaagatcaccctgaaaaccagtgagtttgttctggaggctg

SEQ ID NO: 593696 - DNA, 75 bp, synthetic construct
  source 1..75: mol_type = other DNA
gctgatatcggaagtgggcgtttcaaccttcaaattcgagatggagaaacattgcataccacttctgtggaagta

SEQ ID NO: 593697 - DNA, 75 bp, synthetic construct
  source 1..75: mol_type = other DNA
accggtacagtaacgagcctgacggcgctctcggacgacgtcgctggcgttgttgcgcgtgacgtcgtccaggtt

SEQ ID NO: 593698 - DNA, 75 bp, synthetic construct
  source 1..75: mol_type = other DNA
gaagaggatgacaataaattagtgagagagtttgagcgattaactgagcacccagatggttcagatctgatttat

SEQ ID NO: 593699 - DNA, 75 bp, synthetic construct
  source 1..75: mol_type = other DNA
atgagtattttgtttcatttgattatcgtgatggtgattggtgatcaaatattctcaggagagatgaaggtggag

SEQ ID NO: 593700 - DNA, 75 bp, synthetic construct
  source 1..75: mol_type = other DNA
acaaataaatatcttttacagtgataaaactgagcatactctttttataaaggaattattctccttcgcggttat

SEQ ID NO: 593701 - DNA, 75 bp, synthetic construct
  source 1..75: mol_type = other DNA
tcactcgagtccacgaaagcggatcagcagaatttcggggcgtggctgcggggatggaagctgatgctgcggcta

SEQ ID NO: 593702 - DNA, 75 bp, synthetic construct
  source 1..75: mol_type = other DNA
tcactcgagtccacgaaagcggatcagcagaatttcggtgcgtggcggcggggatggaagctgatgctgcggcta

SEQ ID NO: 593703 - DNA, 75 bp, synthetic construct
  source 1..75: mol_type = other DNA
aaatagcgcagcaactggcactcgagttctaccgtattctgaaaacccaaaataaatcacagctaagtagctggt

SEQ ID NO: 593704 - DNA, 75 bp, synthetic construct
  source 1..75: mol_type = other DNA
agatgaatgatgatatagccaaaaggtcattgttttcattgcaagttcaaatagccgaaaaaattcggaggatga

SEQ ID NO: 593705 - DNA, 75 bp, synthetic construct
  source 1..75: mol_type = other DNA
tcccgggtaagccgctggttgatgccctggataataatcaggggtgaagaaaattatgcttcccgatttattagt

SEQ ID NO: 593706 - DNA, 75 bp, synthetic construct
  source 1..75: mol_type = other DNA
tcactcgagtccacgaaagcggatcagcagaatttcggggcgtggcggcggggatggaagctgatgctgctgcta

SEQ ID NO: 593707 - DNA, 75 bp, synthetic construct
  source 1..75: mol_type = other DNA
attctctccacttactattttggcatcactggcaccttttgggctgtcacaggtgaatttacccgttggggcggt

SEQ ID NO: 593708 - DNA, 75 bp, synthetic construct
  source 1..75: mol_type = other DNA
gtgccctttatttcccgttttctctatcgacccctttcggtctaccgcctgccgggcggggtcgcggcgacggta

SEQ ID NO: 593709 - DNA, 75 bp, synthetic construct
  source 1..75: mol_type = other DNA
ttgccggcgggtttattgctcgtgatgatcgtccgacagattccaacgggaatctggtggatgcgcatcttcatc

SEQ ID NO: 593710 - DNA, 75 bp, synthetic construct
  source 1..75: mol_type = other DNA
ggggcatcaaatcaatggtcattgagaccgctgacaagatcaccttgaaaaccagtgagtttgtcctggaggctg

SEQ ID NO: 593711 - DNA, 75 bp, synthetic construct
  source 1..75: mol_type = other DNA
ctggttgatgccctggagaataaccagggatgaagaaaattatgcttcccgatttattagtctgatgtgtgaaaa

SEQ ID NO: 593712 - DNA, 75 bp, synthetic construct
  source 1..75: mol_type = other DNA
aaaccggctggatgtaccgcgcggtagaaggccaggtgcactactggtgggtcggtctgggcaacgtgatcggct

SEQ ID NO: 593713 - DNA, 75 bp, synthetic construct
  source 1..75: mol_type = other DNA
cgttaatcgagaagaaagtggtcgcccaaactctctttgaacccgtctggattggctggaatgaacagaccgcag

SEQ ID NO: 593714 - DNA, 75 bp, synthetic construct
  source 1..75: mol_type = other DNA
gccagcgttaaaggaatgaatgaacctgctgatggcgcaatgaatctcgttaaaaccagtaatggttggaaagcc

SEQ ID NO: 593715 - DNA, 75 bp, synthetic construct
  source 1..75: mol_type = other DNA
gccgctattgtcgcgctggaggcgttaaaagaacattgcgaagtcattttgagtaccgacagccagtatgtccgc

SEQ ID NO: 593716 - DNA, 75 bp, synthetic construct
  source 1..75: mol_type = other DNA
tctctgggtggaggataccggagagacggattttgaccgcttccgcgatgcctggctgggaaccgctgacagtga

SEQ ID NO: 593717 - DNA, 75 bp, synthetic construct
  source 1..75: mol_type = other DNA
cttgttagtcattaccgcattatgtgtttgcgaaagaatggggctgcgttaattaattttgtggatggtcgagtg

SEQ ID NO: 593718 - DNA, 75 bp, synthetic construct
  source 1..75: mol_type = other DNA
ttgagacccgactgactatggccaccgacattggcatacagcacaaccgccacggccacgagtccatttacaccc

SEQ ID NO: 593719 - DNA, 75 bp, synthetic construct
  source 1..75: mol_type = other DNA
aagtgtttcatatgtcccttcctgctacatgctgacgggcggatctgttccacttatctccggaaaagccgtcaa

SEQ ID NO: 593720 - DNA, 75 bp, synthetic construct
  source 1..75: mol_type = other DNA
ggtaaataccatcatcgcacttttcaaagataccagcctggtgatcatcatcgggttgttcgatcttttcagtag

SEQ ID NO: 593721 - DNA, 75 bp, synthetic construct
  source 1..75: mol_type = other DNA
gtgagcaagattgactaccaggaattggctgctgctaacgcttttctggcggatgttcgggcaggggcgtttaac

SEQ ID NO: 593722 - DNA, 75 bp, synthetic construct
  source 1..75: mol_type = other DNA
gcctcaggttgatagaaatatcgcctggggcttttgtccatctggaacctcgcgaatgcttaacgccagacagcc

SEQ ID NO: 593723 - DNA, 75 bp, synthetic construct
  source 1..75: mol_type = other DNA
ggctgcgcaagttggaacattattggtatgggtgggggaagcgggcgttcgtgtttatgcttctggtcagcctgg

SEQ ID NO: 593724 - DNA, 75 bp, synthetic construct
  source 1..75: mol_type = other DNA
aatacttccgcatcgcggtcgctatattgcggtctgggcggtgatttacccactggttgtctggtggctgatgta

SEQ ID NO: 593725 - DNA, 75 bp, synthetic construct
  source 1..75: mol_type = other DNA
gcggtcgctatattgcggtctgggcggtgatttacccactggttgtctggtggctgatgtatggcgggtttcttg

SEQ ID NO: 593726 - DNA, 75 bp, synthetic construct
  source 1..75: mol_type = other DNA
atccatagtggcaaaccgctttcatttgtttatgacatagccgatatcattaaatttgattcggttgtgccaaag

SEQ ID NO: 593727 - DNA, 75 bp, synthetic construct
  source 1..75: mol_type = other DNA
gcaagtcgctgatgaactgggtatcggcattgctaccctctatcgtaagattaaaaaatatgagttgttaagcgt

SEQ ID NO: 593728 - DNA, 75 bp, synthetic construct
  source 1..75: mol_type = other DNA
aggttgagatcgttgatgaaaacttgtgtcgcgtcgccggaacgggcgcgtatgggaagtttcttggtcgccagt

SEQ ID NO: 593729 - DNA, 75 bp, synthetic construct
  source 1..75: mol_type = other DNA
ggaaaccaaaaccgaaaaggttgtgacacagtctcgcttcgatcccctttgtgaaggttgtgacagtaaagaaaa

SEQ ID NO: 593730 - DNA, 75 bp, synthetic construct
  source 1..75: mol_type = other DNA
ggatgccgaggccgcgtttggccagtttgtgacggcaaatctgcagcccactggtgctgtctggctgatgtccag

SEQ ID NO: 593731 - DNA, 75 bp, synthetic construct
  source 1..75: mol_type = other DNA
gccatccgtgcggagcgctggatcaactggcgtcgtcgccgtaccgcggcggtggcggtgatcaccggagtgaac

SEQ ID NO: 593732 - DNA, 75 bp, synthetic construct
  source 1..75: mol_type = other DNA
gggccgacaactatttttaatggcgtttcaccaatcgcataccagtttttctgtagcaaatgcacctgatgaacc

SEQ ID NO: 593733 - DNA, 75 bp, synthetic construct
  source 1..75: mol_type = other DNA
ggcaaaataccgggcaggctccaataatcatgaaggtgtactggatgtgatcgataaagttcttaaacacgaagc

SEQ ID NO: 593734 - DNA, 75 bp, synthetic construct
  source 1..75: mol_type = other DNA
ctaatgaaattgcctttgtggcagaaaacggcggttgggttgtaagcgaaggcaaagatgtttttaatggcgagc

SEQ ID NO: 593735 - DNA, 75 bp, synthetic construct
  source 1..75: mol_type = other DNA
tttttagtgaagatggcctctacactgcgcgcgttgagaatggctctattgtcagtcactgccgtattaaatgtt

SEQ ID NO: 593736 - DNA, 75 bp, synthetic construct
  source 1..75: mol_type = other DNA
gaaagcggaactgggaaagaagttgtcgcccgtgctatccataagttgagtgggcggcggaacaagccctttatt

SEQ ID NO: 593737 - DNA, 75 bp, synthetic construct
  source 1..75: mol_type = other DNA
gcagaacgccgaaaatgcgcgccaggccagccatctggcgttaagtgcttccgaaacggcgcaacgcggcggcaa

SEQ ID NO: 593738 - DNA, 75 bp, synthetic construct
  source 1..75: mol_type = other DNA
catgaaaacggtggcggaaatgtattatcaccgtctggaatacgtcgataactttgacaacttagaagatatttt

SEQ ID NO: 593739 - DNA, 75 bp, synthetic construct
  source 1..75: mol_type = other DNA
ataatcaatacacatataatcatatcagatatgatttttatcattaattatgaaataatatctgatattatcaat

SEQ ID NO: 593740 - DNA, 75 bp, synthetic construct
  source 1..75: mol_type = other DNA
gccgaggcccgcgataccctgtatttcaacgccttcaccgaagacctattccactggaacaatgatctggtaggc

SEQ ID NO: 593741 - DNA, 75 bp, synthetic construct
  source 1..75: mol_type = other DNA
actgggttacgtcggcgtccttgctgcaatgatcatggcaagcctttccggttctgccgttgccgatactgctgc

SEQ ID NO: 593742 - DNA, 75 bp, synthetic construct
  source 1..75: mol_type = other DNA
aactggtaggccacaggccaggcggtctgggttacgtgggcgtgctggcagcgatgatcatggcaagcctgtccg

SEQ ID NO: 593743 - DNA, 75 bp, synthetic construct
  source 1..75: mol_type = other DNA
ggtttagctgtaatgcatggtaagacacgtcgcggcgggcttgtttttgaccttgccgatctgattaaagatgct

SEQ ID NO: 593744 - DNA, 75 bp, synthetic construct
  source 1..75: mol_type = other DNA
ggtttagcggtaatgcacggtaaaacacgtcgcggtgggcttgtttttgaccttgccgatctgattaaagatgcc

SEQ ID NO: 593745 - DNA, 75 bp, synthetic construct
  source 1..75: mol_type = other DNA
caaacgcgccaatatttattatctggaaaaatgccgggtgcaggtgaatggtgggcgagtggaatatgttaccag

SEQ ID NO: 593746 - DNA, 75 bp, synthetic construct
  source 1..75: mol_type = other DNA
gatacattgtatttcaatgctttcaccgaagatctcttccactggaacaacgatctggtaggtgatgaagatcga

SEQ ID NO: 593747 - DNA, 75 bp, synthetic construct
  source 1..75: mol_type = other DNA
attaaggaagggcgtctagctcttgacgagatatcaattggtgatgaagtcatattgcgcaatgaagataccaat

SEQ ID NO: 593748 - DNA, 75 bp, synthetic construct
  source 1..75: mol_type = other DNA
ggaagcacgccagcaatccccggctggctgcgtgatggtattcgctgcccgtattcgtcaggaggtgtgccatgc

SEQ ID NO: 593749 - DNA, 75 bp, synthetic construct
  source 1..75: mol_type = other DNA
gggcggtattatcgcggccattattccgccatctattccactcattatcttcggtgtctccagtgggttatccat

SEQ ID NO: 593750 - DNA, 75 bp, synthetic construct
  source 1..75: mol_type = other DNA
cgctgatggttacctggtggtggcaggcaaaacgactgaatttaccttgtcagccgaaagcctcactgcgggaag

SEQ ID NO: 593751 - DNA, 75 bp, synthetic construct
  source 1..75: mol_type = other DNA
atggttttattcatgttgttagcattatttatttttatcccggagctaattactgctcctcttaaatggatgagt

SEQ ID NO: 593752 - DNA, 75 bp, synthetic construct
  source 1..75: mol_type = other DNA
atgacaaaccattcaaatgtgaagtacgcaaaagatgtttacttttttcatggtatcctgctcaaaactaaggag

SEQ ID NO: 593753 - DNA, 75 bp, synthetic construct
  source 1..75: mol_type = other DNA
ggcgcaggggatataaccgaactgcccagaaaatacatgacgctggatactggtgttcgcttcttcgataacgcg

SEQ ID NO: 593754 - DNA, 75 bp, synthetic construct
  source 1..75: mol_type = other DNA
ggttttgcttttggccgactctctttcagccagcagcaaacagaccagccaacctccatcgccagcacccacttt

SEQ ID NO: 593755 - DNA, 75 bp, synthetic construct
  source 1..75: mol_type = other DNA
ttcagctttctgctcaggtaacaccatggcttcagccgttcattggctacagcaaatccatgcgcgccccgaaca

SEQ ID NO: 593756 - DNA, 75 bp, synthetic construct
  source 1..75: mol_type = other DNA
atgctgcgccaggcccgttccgttggcctgaaaacccagtttatggggccggaaggtgtgggtaatgcgtcgttg

SEQ ID NO: 593757 - DNA, 75 bp, synthetic construct
  source 1..75: mol_type = other DNA
gccacttcaggtaacccctgcgaaggaaaactcaccgatcaatttggccaaatacattatttgctactggagcct

SEQ ID NO: 593758 - DNA, 75 bp, synthetic construct
  source 1..75: mol_type = other DNA
tgccgcagatcccaacgattatcgatctctatggtacttacgagtacaaccgcaacctgacactgaaactttcgg

SEQ ID NO: 593759 - DNA, 75 bp, synthetic construct
  source 1..75: mol_type = other DNA
gaaaactcaccgatcaattcggtcaaacacactatttattactggaacctgaagaaggtaatttttttaataaag

SEQ ID NO: 593760 - DNA, 75 bp, synthetic construct
  source 1..75: mol_type = other DNA
atcgcaggtaataaagtgagggtgatcaaggatgaaaaacatttaaagaggctaataaaactcaacgataagtat

SEQ ID NO: 593761 - DNA, 75 bp, synthetic construct
  source 1..75: mol_type = other DNA
ggaacagttttaatgtcgaaaaccatttctggttatgggaatatggattcaaccaaagcttttgttggaaaagta

SEQ ID NO: 593762 - DNA, 75 bp, synthetic construct
  source 1..75: mol_type = other DNA
cgaatttaacagcttcgaactttccgctcgaacctatgaaaataaatttacacgtcgtgatataaccagtgacga

SEQ ID NO: 593763 - DNA, 75 bp, synthetic construct
  source 1..75: mol_type = other DNA
gagacaaagtattaattatttgccgactttctgcaacgcgatatttggcgaaaaaaaaaacctggccccaaatac

SEQ ID NO: 593764 - DNA, 75 bp, synthetic construct
  source 1..75: mol_type = other DNA
aaatttagcctttatgactctatagaaccgatcatctgcgaccgctggccgcaggcaaaaatatatcgcctggca

SEQ ID NO: 593765 - DNA, 75 bp, synthetic construct
  source 1..75: mol_type = other DNA
aatgggtcatcgaacgacagactgaaaatgaacccctgacgtatctgatggatcagtatgtgcttctggcatacc

SEQ ID NO: 593766 - DNA, 75 bp, synthetic construct
  source 1..75: mol_type = other DNA
agcgtgttcgtcgtcatcatactgagccatgacgggcgtcttaagggcatcctgtcattgctgagcaggcaacac

SEQ ID NO: 593767 - DNA, 75 bp, synthetic construct
  source 1..75: mol_type = other DNA
gcatgtttgtggcggaactctctgaagcatttaacggcatttcccagcgcctgatcccaggtgcggttctggcga

SEQ ID NO: 593768 - DNA, 75 bp, synthetic construct
  source 1..75: mol_type = other DNA
gtcgtgcaactggcgttgagctggagactgaacgttttgagcagacggtcagggaagttcaggatttagtcagtc

SEQ ID NO: 593769 - DNA, 75 bp, synthetic construct
  source 1..75: mol_type = other DNA
agctggtcagcacatacagtgagctgaaccggcagtatatggaactgctgagtgaatataaaaatttgcggcggt

SEQ ID NO: 593770 - DNA, 75 bp, synthetic construct
  source 1..75: mol_type = other DNA
aaataaactgatcagcctcttccgtcagtttggtggcacggagttgcgcctcaaactggtctggctttgtagtgg

SEQ ID NO: 593771 - DNA, 75 bp, synthetic construct
  source 1..75: mol_type = other DNA
aagacaaagagatggatatctggatcaataaccggcaggctgaaaaccctgcgctgaccattatgatggacgagt

SEQ ID NO: 593772 - DNA, 75 bp, synthetic construct
  source 1..75: mol_type = other DNA
tctgctggttcatcatccgatgctggaaggcattctgctgtctgaatgtgaacgtctgaaacatcattctctggc

SEQ ID NO: 593773 - DNA, 75 bp, synthetic construct
  source 1..75: mol_type = other DNA
acgagctgctccatgaaaactaccagaaatggctgaccggcttcacccggcacgccgtatcatggggcgtgtgtc

SEQ ID NO: 593774 - DNA, 75 bp, synthetic construct
  source 1..75: mol_type = other DNA
tggtctggctgtgctggtacgatttgatgctggggaattgccttgatgactggaccgacaacctcaggttcaata

SEQ ID NO: 593775 - DNA, 75 bp, synthetic construct
  source 1..75: mol_type = other DNA
cgctctattcgatcacggattggcatcgaagtccgatcagcgattcgcatccattcgatcaaccgggaacttaac

SEQ ID NO: 593776 - DNA, 75 bp, synthetic construct
  source 1..75: mol_type = other DNA
tatgttcttcgctggccgcgcgctgcgcgcagaagacagaagaagatgcagaaaaacaactggcagaacagtctg

SEQ ID NO: 593777 - DNA, 75 bp, synthetic construct
  source 1..75: mol_type = other DNA
cgtaccgcgtctggcgggtgctaaaagtggcggtatttttcaggcagtgctgggggcggcgttgattgcggttgc

SEQ ID NO: 593778 - DNA, 75 bp, synthetic construct
  source 1..75: mol_type = other DNA
tatttttctgtatcggctgctgttccgtatacggatgtctggatgtataagcctgtacagtattatccgggcaaa

SEQ ID NO: 593779 - DNA, 75 bp, synthetic construct
  source 1..75: mol_type = other DNA
tgtgctgaaccatattatctgggcgaagccgtccggacgctggaacgggtgcaacaaggaaagcctgcgggcgta

SEQ ID NO: 593780 - DNA, 75 bp, synthetic construct
  source 1..75: mol_type = other DNA
tctttacggcgttgttacaaaagccgcatggtcgcgatactacgctggtggcgcttggcggcggcgtagtgggcg

SEQ ID NO: 593781 - DNA, 75 bp, synthetic construct
  source 1..75: mol_type = other DNA
tatgcggcaggggccagtatgatcctgggcggtgtggcgcagatgctggcccccaaacccagaaccccccgaaca

SEQ ID NO: 593782 - DNA, 75 bp, synthetic construct
  source 1..75: mol_type = other DNA
tggccccgctgatttcttactttcgtgatgcgcgtgcagccctggggataacggcaaaacagattgcagaggcca

SEQ ID NO: 593783 - DNA, 75 bp, synthetic construct
  source 1..75: mol_type = other DNA
tggcaggcaaagtgcactggacggtctatatcctgcaaaccggtttctccttcgcggtggcgatcttcatcatca

SEQ ID NO: 593784 - DNA, 75 bp, synthetic construct
  source 1..75: mol_type = other DNA
tggatcgcttataaaattgcgccttacctgggaaaaaaagaggaaagcgttgaagatctcaaactgccgggctgg

SEQ ID NO: 593785 - DNA, 75 bp, synthetic construct
  source 1..75: mol_type = other DNA
agcgttgaagacctcaaactgccaggctggctgaatattttccacgacaacatcgtctccacggcgattgtgatg

SEQ ID NO: 593786 - DNA, 75 bp, synthetic construct
  source 1..75: mol_type = other DNA
ctcagggcgtgcgcatgtttgtggcggagctctctgaagcattcaacggtatctcccagcgcctgatcccgggtg

SEQ ID NO: 593787 - DNA, 75 bp, synthetic construct
  source 1..75: mol_type = other DNA
taccatcgaacgtatgggcgatgcctatagctgggtgggctacgcggtgttgctggcactggcgctgaacatctg

SEQ ID NO: 593788 - DNA, 75 bp, synthetic construct
  source 1..75: mol_type = other DNA
ttcggtatcgataccgtgcaggcgatggcaggcaaagtgaactgggtggtgtacatcctgcaaaccggtttctcc

SEQ ID NO: 593789 - DNA, 75 bp, synthetic construct
  source 1..75: mol_type = other DNA
ggcgcagggcagatgactgcagtggtaccacagtgcctttaccgactgatttacggaagtcagcatccagagcca

SEQ ID NO: 593790 - DNA, 75 bp, synthetic construct
  source 1..75: mol_type = other DNA
tctgatggccggatggatatcattcaatggtgaaaaacctgagatcgccattgttccccagagcctgcaccggat

SEQ ID NO: 593791 - DNA, 75 bp, synthetic construct
  source 1..75: mol_type = other DNA
ccgaaacggcgcaacgcggcggcaaagtggtggataacgtggtgcagactatgcgcgatatctccaccagttcgc

SEQ ID NO: 593792 - DNA, 75 bp, synthetic construct
  source 1..75: mol_type = other DNA
tttgtggcagcaaacctgcagcccaccggtgcggtctggctgatgtccagcaccaatgccctggcactgtccatg

SEQ ID NO: 593793 - DNA, 75 bp, synthetic construct
  source 1..75: mol_type = other DNA
agccttgaagactggaaagagaacctgaaacggaaatcagaaaaagagctggaggaatggatcatcaaccgtcag

SEQ ID NO: 593794 - DNA, 75 bp, synthetic construct
  source 1..75: mol_type = other DNA
tagaacttgaatttgctgacctgctcgcactctcttctactgaactggttgaagaaatctacttcgcctggcgtc

SEQ ID NO: 593795 - DNA, 75 bp, synthetic construct
  source 1..75: mol_type = other DNA
tctgctggttcatcatccgatgctggaaggcattctgctgtctgagtgcacgcgcctgcataaaaaatcactggc

SEQ ID NO: 593796 - DNA, 75 bp, synthetic construct
  source 1..75: mol_type = other DNA
gttgagcagggcgcgccggatgagttttttgcacatccgaaatcggaacgcacgcaggcgtttttatcgcaggta

SEQ ID NO: 593797 - DNA, 75 bp, synthetic construct
  source 1..75: mol_type = other DNA
gagtacgaattgccgaacatgcacagaagtttcccggacagatatccggtggtcagcagcaacgcgttgccatag

SEQ ID NO: 593798 - DNA, 75 bp, synthetic construct
  source 1..75: mol_type = other DNA
gcattttctgcgctgggaactgatggaggtgtctgccgtcaccgtgcccgcgaatgcggaatgcaccatccggac

SEQ ID NO: 593799 - DNA, 75 bp, synthetic construct
  source 1..75: mol_type = other DNA
catccgcagggtagtgttgaagagtttcgccaggtctgcgactgccgcaaaccacatccggggatgcttttgtca

SEQ ID NO: 593800 - DNA, 75 bp, synthetic construct
  source 1..75: mol_type = other DNA
tcgatctggatggtatctattattgcccgcatcatccgcagggtagtgttgaagagtttcgccaggtctgcgatt

SEQ ID NO: 593801 - DNA, 75 bp, synthetic construct
  source 1..75: mol_type = other DNA
atgatctggcagcctgagttcacagataaaacactctccaggaaacccggggcggttcaattccatgttttgaaa

SEQ ID NO: 593802 - DNA, 75 bp, synthetic construct
  source 1..75: mol_type = other DNA
tggtcgtcgtctatggcgcgcgtccacagatcgacgcgaatctggcggcgcatcatcacgaaccgctgtaccaca

SEQ ID NO: 593803 - DNA, 75 bp, synthetic construct
  source 1..75: mol_type = other DNA
ttattaattattcaactcgtttctgcgggccaccgggttagcgcattacgcgctattggcgcaagtgcgccggta

SEQ ID NO: 593804 - DNA, 75 bp, synthetic construct
  source 1..75: mol_type = other DNA
gcagtagcgggctgttcgatctggtacaaaatatgtcccccgagcagcagcaaattttgctccgcgcgtcagccg

SEQ ID NO: 593805 - DNA, 75 bp, synthetic construct
  source 1..75: mol_type = other DNA
ggaaatcagaaaaagagctggaggaatggatcatcgaccgtcagacgcagaacgcagcactgacggatctgatgg

SEQ ID NO: 593806 - DNA, 75 bp, synthetic construct
  source 1..75: mol_type = other DNA
atgaaacaacagtatcagacccgttacgaactgctccacgaaaactaccagaaatggctgaccggcttcacccga

SEQ ID NO: 593807 - DNA, 75 bp, synthetic construct
  source 1..75: mol_type = other DNA
tggtgaatttatgcaccagcgaacatctgctggttcatcatccgatgctggaagggatcctgctgtctgaatgtg

SEQ ID NO: 593808 - DNA, 75 bp, synthetic construct
  source 1..75: mol_type = other DNA
aattggcgctgtactggcgaacaccttgagcaacctgatttcagccgtattgctcatctatctgttccgtctgta

SEQ ID NO: 593809 - DNA, 75 bp, synthetic construct
  source 1..75: mol_type = other DNA
atgatgttctccacgccgtgcgaaccgtatgaagttaatccgattctggaacgtgctatggaccgtattctgatc

SEQ ID NO: 593810 - DNA, 75 bp, synthetic construct
  source 1..75: mol_type = other DNA
ttgctgcacagcctcggcatccgtctggtcgtggtctatggagcgcgcccgcagatcgatgcgaatctggcagcg

SEQ ID NO: 593811 - DNA, 75 bp, synthetic construct
  source 1..75: mol_type = other DNA
aacgctggagctggtgaagcaggctgcgggaacattgcaactggatataaccgctcgcctgtcaatgagcctcaa

SEQ ID NO: 593812 - DNA, 75 bp, synthetic construct
  source 1..75: mol_type = other DNA
gcggaacattatcaggggccgtatcgtccgaaagatgccgggtatgaggcgaagggcagggcactgaaacagcat

SEQ ID NO: 593813 - DNA, 75 bp, synthetic construct
  source 1..75: mol_type = other DNA
cattctctggcaaacaaactgatcagcctcttccgtcagtttggcggcacggagttacgtctcaaactggtctag

SEQ ID NO: 593814 - DNA, 75 bp, synthetic construct
  source 1..75: mol_type = other DNA
tctgacgcccgggtgggtgtcattcaatggtgaaaaaccgaagattgccatcgtaccccagagtctgcaccggct

SEQ ID NO: 593815 - DNA, 75 bp, synthetic construct
  source 1..75: mol_type = other DNA
ttatgatcatatcgtacgtgtccgtgagggaggagatggtaattctgacaatgtacagttgacacacccttactg

SEQ ID NO: 593816 - DNA, 75 bp, synthetic construct
  source 1..75: mol_type = other DNA
ttttgtgatcgatggtggtcatcgtttaagtgcgttacgtgcttgggttgaagatgattatggcgacggtcatat

SEQ ID NO: 593817 - DNA, 75 bp, synthetic construct
  source 1..75: mol_type = other DNA
agaccttgagaaacgcgccaatgagtttgaccggttcatggacgcaatggacacagcaaaagaggctctggttgc

SEQ ID NO: 593818 - DNA, 75 bp, synthetic construct
  source 1..75: mol_type = other DNA
ttcacacgaaaccaaatggtaaaaattgaacgtcaggccattattgaggcctggcaagaatgggaggcataccag

SEQ ID NO: 593819 - DNA, 75 bp, synthetic construct
  source 1..75: mol_type = other DNA
agtgggaatgccttcggctcccggagaaccaagcatcgatttgggcagtttggcaggccttccatgcgaaatagc

SEQ ID NO: 593820 - DNA, 75 bp, synthetic construct
  source 1..75: mol_type = other DNA
gtggaagtgattaagggagcggacgtaaatgtcccggatgcagtatttgcctggatgttggatggtaaaggcgga

SEQ ID NO: 593821 - DNA, 75 bp, synthetic construct
  source 1..75: mol_type = other DNA
cgaagccctgttacaacagcagcttcagacgcagtggcaaaccacctggcaacagcattttgccaccgcgccctg

SEQ ID NO: 593822 - DNA, 75 bp, synthetic construct
  source 1..75: mol_type = other DNA
gtccgcaaggtgtggaaaaacgagattcgcctgagcctgatgctgacagagccagaaagctgcgaagcggtgctc

SEQ ID NO: 593823 - DNA, 75 bp, synthetic construct
  source 1..75: mol_type = other DNA
ggatgttccggtaggccgtacttctgcaaatgccattaccggtactctgctactgctggctggcggcactgctga

SEQ ID NO: 593824 - DNA, 75 bp, synthetic construct
  source 1..75: mol_type = other DNA
tgccgctcttgctgctggcactcctgtagatctggagtctttgtttaacggagagctggcctctgccatgttcgc

SEQ ID NO: 593825 - DNA, 75 bp, synthetic construct
  source 1..75: mol_type = other DNA
ttcccgggctattatctgtattatacctgtcgtctgaaatcctctgcggcatttaatatcattgtcgaatcacta

SEQ ID NO: 593826 - DNA, 75 bp, synthetic construct
  source 1..75: mol_type = other DNA
aaaaaggcacgctacaggcacagttcgcccagctcccgcccgtgccacagctggcgcgccagttgatgacgctgc

SEQ ID NO: 593827 - DNA, 75 bp, synthetic construct
  source 1..75: mol_type = other DNA
cgctgggccctgcagacggccgaacgcatcggccacaacaaggctgccgtggccctggcgaacaaactggtgagg

SEQ ID NO: 593828 - DNA, 75 bp, synthetic construct
  source 1..75: mol_type = other DNA
cttggcgatcttcgaccctggcgcaaatcagctataaccagcaatttggcgagaatatctggaaggcgcaatcag

SEQ ID NO: 593829 - DNA, 75 bp, synthetic construct
  source 1..75: mol_type = other DNA
cttaggctggcgtgttgactcccggcttggcgatctccgaccctgggcgcaaatcagctataaccagcaatttgg

SEQ ID NO: 593830 - DNA, 75 bp, synthetic construct
  source 1..75: mol_type = other DNA
acgatattttgtcgcaacgtattcaaagtagccaaagggcgctgggactggaagtcaatctggcggaagaaactc

SEQ ID NO: 593831 - DNA, 75 bp, synthetic construct
  source 1..75: mol_type = other DNA
tcttagggatattttgcatatgtctgaggtttcgattagaaaaaaacttgaaaaagaaaacaataactttaatgc

SEQ ID NO: 593832 - DNA, 75 bp, synthetic construct
  source 1..75: mol_type = other DNA
ctttccagaatccatgaaattgaacctcttgtttattcactatcagtttcaacagatatcacttttacagaaaaa

SEQ ID NO: 593833 - DNA, 75 bp, synthetic construct
  source 1..75: mol_type = other DNA
gacagcaatgcaacgctgaccgatccgttactacatgccagcgtcagtacgttaggctggcgggttgattcccgg

SEQ ID NO: 593834 - DNA, 75 bp, synthetic construct
  source 1..75: mol_type = other DNA
agcacggcgacagtagcggaatgcgtggcgctgcctggcttgctatgcgcaacggagaagccaatgaaacgttca

SEQ ID NO: 593835 - DNA, 75 bp, synthetic construct
  source 1..75: mol_type = other DNA
aagagtttcaggactacgcgtgggtaaaacctgaagatctggtgcattatgatttgaatgtcgccacccgaaaaa

SEQ ID NO: 593836 - DNA, 75 bp, synthetic construct
  source 1..75: mol_type = other DNA
actttaccgatgccgcaggcgatgactacaccgtctcgctgatcccgcaaggtagttcgtccgtcgggcctggcc

SEQ ID NO: 593837 - DNA, 75 bp, synthetic construct
  source 1..75: mol_type = other DNA
atgtacaacgatagaactgagcctgcaataacagcattgcttaatgatgagacgccttcctctatccataaatta

SEQ ID NO: 593838 - DNA, 75 bp, synthetic construct
  source 1..75: mol_type = other DNA
cttcacgacggccaacccttggggagctgctggacgctgaggtcgatagccgttacatcctttctccaaagctct

SEQ ID NO: 593839 - DNA, 75 bp, synthetic construct
  source 1..75: mol_type = other DNA
gtacatgaagcggatatccatactgcacagaagttggcagaaacgctaaatgtaccattggcatatttctatgtc

SEQ ID NO: 593840 - DNA, 75 bp, synthetic construct
  source 1..75: mol_type = other DNA
caaaggcgcgactcccgccgccaacccggcgcaggccgctaaagatgccgaatttatcattaccatgttgccgaa

SEQ ID NO: 593841 - DNA, 75 bp, synthetic construct
  source 1..75: mol_type = other DNA
ggagagtgcagcccagagcgcggcactggccggtcttttccagccatacagtgttggaaaatttaacgcgacagc

SEQ ID NO: 593842 - DNA, 75 bp, synthetic construct
  source 1..75: mol_type = other DNA
aacccatccgtctggccgtgaaggggctgagccgcgaaaagtcgccgctggatctgcacggtattgccctgcatg

SEQ ID NO: 593843 - DNA, 75 bp, synthetic construct
  source 1..75: mol_type = other DNA
ggatggccgtttcaccggcactggcgcggtggcagaaacgaacgtagagcagctgatccgcctgatggtcgggcg

SEQ ID NO: 593844 - DNA, 75 bp, synthetic construct
  source 1..75: mol_type = other DNA
agcagtacgtgatgaactgaaggcagagggagacagtctgcgtggtgagataggtggtgtatacagagatgcccg

SEQ ID NO: 593845 - DNA, 75 bp, synthetic construct
  source 1..75: mol_type = other DNA
gcggtgagataggcggtgtatacagagatgcccgtgctcatactgacagtcaggttacagcagtacgtgatgaac

SEQ ID NO: 593846 - DNA, 75 bp, synthetic construct
  source 1..75: mol_type = other DNA
atcttctcttgctcttcaggatgaaataaaagaaaaagcggatgaaacagttcaggtttcccgggcttatacaga

SEQ ID NO: 593847 - DNA, 75 bp, synthetic construct
  source 1..75: mol_type = other DNA
agccaccatcttccagtgagtttggtttctcgcggttgggcgatctggaacaagtctttgcggtagcgcctcatc

SEQ ID NO: 593848 - DNA, 75 bp, synthetic construct
  source 1..75: mol_type = other DNA
cgccgctcattgaagtcttttatcaacatcacagcgtaacgcgcctgaagtttatcaatggcgtgctcggtggtt

SEQ ID NO: 593849 - DNA, 75 bp, synthetic construct
  source 1..75: mol_type = other DNA
agagaaagggcgggaaatactccacactgttcatgaactggaaaaacaggcgatcaaacttcatgaaggctggga

SEQ ID NO: 593850 - DNA, 75 bp, synthetic construct
  source 1..75: mol_type = other DNA
cttgcgggcgcgcagccgcaaacgcgcggggagatctggttcaacggcgaaacgctgccggtagatgactccccg

SEQ ID NO: 593851 - DNA, 75 bp, synthetic construct
  source 1..75: mol_type = other DNA
gtgctgtttgatatggcgaaaaagggcgtggcggtgatcgtgatctcctccgatctgcctgaagtgatggcggtg

SEQ ID NO: 593852 - DNA, 75 bp, synthetic construct
  source 1..75: mol_type = other DNA
caaaaactctgatggcagcacgcacagaggggtaagtctggatatacgttcaaccggaataaagaagaaagataa

SEQ ID NO: 593853 - DNA, 75 bp, synthetic construct
  source 1..75: mol_type = other DNA
tggtgagataggtggtgtatacagagatgcccgtgctcatactgacagtcaggtcacagcagtacgtgatgaact

SEQ ID NO: 593854 - DNA, 75 bp, synthetic construct
  source 1..75: mol_type = other DNA
cgcaccgttctctgttctcccaacatcctgaactgcgccgtgctggtgataaccgccgacgctgggctgacttag

SEQ ID NO: 593855 - DNA, 75 bp, synthetic construct
  source 1..75: mol_type = other DNA
aacgtggttggaataagcacggatattttattagcagcagcgatacacaccataaagtcagccgtaatttggtct

SEQ ID NO: 593856 - DNA, 75 bp, synthetic construct
  source 1..75: mol_type = other DNA
atgcgttatccctggagcgtgagcgccagccggaaatacaggagcgcacactggatggcccttcgctgggatggt

SEQ ID NO: 593857 - DNA, 75 bp, synthetic construct
  source 1..75: mol_type = other DNA
ccaggcgcgcgcagcgggtcgcggtcgccaggactggtccgccattctggaacaggtccgtgtcagtgccgggat

SEQ ID NO: 593858 - DNA, 75 bp, synthetic construct
  source 1..75: mol_type = other DNA
atgaagagtatggaaatccggtcatcggaaatcaccaccagcgccagcaacacgctgacgggttacgttgttcgc

SEQ ID NO: 593859 - DNA, 75 bp, synthetic construct
  source 1..75: mol_type = other DNA
ctttgaactgaccccaccggataccagcacagggcgggacgttatcgaactggttaaacgtggtgatatatccgg

SEQ ID NO: 593860 - DNA, 75 bp, synthetic construct
  source 1..75: mol_type = other DNA
cataaatcatctggggtactgaatgcagaccgaaggtaccgggaagctgtagtaaatatgtatcagcacgatgag

SEQ ID NO: 593861 - DNA, 75 bp, synthetic construct
  source 1..75: mol_type = other DNA
atgtatctgcatcttgtgccacgtattcttcaccatatgaaaaacaagtgtactctcatgtccatgtctgtccct

SEQ ID NO: 593862 - DNA, 75 bp, synthetic construct
  source 1..75: mol_type = other DNA
ataaaagaaaaagcggatgaaacagttcaggtttcccgggcttatacagataaaagtgtacgggatgtccgtaaa

SEQ ID NO: 593863 - DNA, 75 bp, synthetic construct
  source 1..75: mol_type = other DNA
aaaattcgtattgccgggagtgacgggatgccgaggtggggagatattccaccaccaacccatgcagaaattatt

SEQ ID NO: 593864 - DNA, 75 bp, synthetic construct
  source 1..75: mol_type = other DNA
tgaggaactggcgcaatataatttgtggctggattatctggacgcactggaactggtcgctacttccagtacgcc

SEQ ID NO: 593865 - DNA, 75 bp, synthetic construct
  source 1..75: mol_type = other DNA
tgaaggctacgatttttccgaagaggttagccgttacctaaaaggattatgcgcggaaaataaggctattcataa

SEQ ID NO: 593866 - DNA, 75 bp, synthetic construct
  source 1..75: mol_type = other DNA
ctgtctggcccagttctggcgggtgttaaaacctgccggaagcctttacctgttctgtgggcatcgcctggcatc

SEQ ID NO: 593867 - DNA, 75 bp, synthetic construct
  source 1..75: mol_type = other DNA
ctcatccgctgctcctcgcgctggaagacaccaccaccattaacttcagtcacagtacggcatctgatgacctgg

SEQ ID NO: 593868 - DNA, 75 bp, synthetic construct
  source 1..75: mol_type = other DNA
tataatttgaaacgacctcattcgagtctggacaaaatgactccagatgagttttactatgaccagctaccacaa

SEQ ID NO: 593869 - DNA, 75 bp, synthetic construct
  source 1..75: mol_type = other DNA
cctcgttggtggcaatttcgctatcggtatcgtggtgtttgtcattctcgtgatcatcaactttatggtcattac

SEQ ID NO: 593870 - DNA, 75 bp, synthetic construct
  source 1..75: mol_type = other DNA
cgacagagtggaaactgctgtgggttaagctggaaggaaaaccgcttccgtcacagacgccgacactgaaatggg

SEQ ID NO: 593871 - DNA, 75 bp, synthetic construct
  source 1..75: mol_type = other DNA
acgcccgatattacgccatacatagaatatgactacctggaccgtcagggtgtttacaacggcagagataattta

SEQ ID NO: 593872 - DNA, 75 bp, synthetic construct
  source 1..75: mol_type = other DNA
tacattcctggtaacacaaatgtatgaagggcgtcagcgcggttcccgcctgttatttaccgactccttcttcag

SEQ ID NO: 593873 - DNA, 75 bp, synthetic construct
  source 1..75: mol_type = other DNA
ctatcttcctcaacgcctggctgatggaaatcgtcccgttgaaaacgcagttacgttttggctttctcctgatgg

SEQ ID NO: 593874 - DNA, 75 bp, synthetic construct
  source 1..75: mol_type = other DNA
caccagacgcccacattggcactgttgcaaagttagcgatgaggcagccttttgtcttattcaaaggccttacat

SEQ ID NO: 593875 - DNA, 75 bp, synthetic construct
  source 1..75: mol_type = other DNA
ttggcatagccgcaaggtacttgcgcatagagtatcgattagtatggaggttacattttgcatagaaacattaaa

SEQ ID NO: 593876 - DNA, 75 bp, synthetic construct
  source 1..75: mol_type = other DNA
ctgcatcgggctggtgtatgtcgctatttttattctgaccttcggctgtgagttcccggcactgggcaaacatgc

SEQ ID NO: 593877 - DNA, 75 bp, synthetic construct
  source 1..75: mol_type = other DNA
tacgttcctggttacacaaatgtatgaagggcgtcagcgcggttctcgcttgctgtttaccgactccttcttcag

SEQ ID NO: 593878 - DNA, 75 bp, synthetic construct
  source 1..75: mol_type = other DNA
ctcgctttctgcgccgcagtctgccgcagttagtggtgttgtcgaatctggagctttctgataaccggcatattc

SEQ ID NO: 593879 - DNA, 75 bp, synthetic construct
  source 1..75: mol_type = other DNA
ggaagcgcgccagcaatctcctgatggttgcgtgatggtattcgccgcccgtattcgtcaggaggtacgccatgt

SEQ ID NO: 593880 - DNA, 75 bp, synthetic construct
  source 1..75: mol_type = other DNA
aaaaacgttgtccgcactgatacgggcagaaaaaaccgcagagaaagcagccgcagcaaaagccagagtaacggc

SEQ ID NO: 593881 - DNA, 75 bp, synthetic construct
  source 1..75: mol_type = other DNA
ccaggagatgccaaagctgacggaagatctcgttcctggcgtcgtcacgctcaccacactgcaggtaatgactcc

SEQ ID NO: 593882 - DNA, 75 bp, synthetic construct
  source 1..75: mol_type = other DNA
ttcacatcgaggccaccagcgaacaggaagcacgccagcaatctcctgatggctgtgtgatggtattcgccgccc

SEQ ID NO: 593883 - DNA, 75 bp, synthetic construct
  source 1..75: mol_type = other DNA
aagggcggaagtcctacacctggcgttttctggcgctgagcgccatcggtcgcaacgtcattcacatcaaagcta

SEQ ID NO: 593884 - DNA, 75 bp, synthetic construct
  source 1..75: mol_type = other DNA
ggaagcccgccagcaatccccggctggctgtgtgatggtattcgccgctcgtattcgtcaggaggtgcgccatga

SEQ ID NO: 593885 - DNA, 75 bp, synthetic construct
  source 1..75: mol_type = other DNA
attcagggatataccgtggttgaggccagcacggtggtcgcaacgcatcttaaccacctcattagccaacatgcc

SEQ ID NO: 593886 - DNA, 75 bp, synthetic construct
  source 1..75: mol_type = other DNA
gtcggcgtgctgcaacatggcatgagcatgggccatgcggcagaaagttatacgctgttgaccatcggtgatggc

SEQ ID NO: 593887 - DNA, 75 bp, synthetic construct
  source 1..75: mol_type = other DNA
tgggccgtattcgtagtattcgtaagaaatttgctcaggaaatgggcttcttgccgccggtggtgcacattcgcg

SEQ ID NO: 593888 - DNA, 75 bp, synthetic construct
  source 1..75: mol_type = other DNA
cggggcgctggctggcgattaaccctggaaccgctgccgggacgttacctgggcgaccgtcgatccggcatttgg

SEQ ID NO: 593889 - DNA, 75 bp, synthetic construct
  source 1..75: mol_type = other DNA
atgagtaatctggccgcgatgctgcgcctgcccgcattcatactcgacctgttgtttaccttcaatattgccttg

SEQ ID NO: 593890 - DNA, 75 bp, synthetic construct
  source 1..75: mol_type = other DNA
gaaccacgcgctgcgaccattattgtctcgcttcctgcgccgcagcttgccgcagttagtggtgctgtcgaatct

SEQ ID NO: 593891 - DNA, 75 bp, synthetic construct
  source 1..75: mol_type = other DNA
aaacgccgactatatcgactatctgccagtgaatatgctggctacacccaaagaaatcctgaacagcagcggata

SEQ ID NO: 593892 - DNA, 75 bp, synthetic construct
  source 1..75: mol_type = other DNA
cgatggcggtaaagtgattactgatgctgaaggcaaagcgaaagtcacgctgaaaggtacaaaagcaggcgctca

SEQ ID NO: 593893 - DNA, 75 bp, synthetic construct
  source 1..75: mol_type = other DNA
atttacgcggtgagtttattcgtggctgggatgacgggcgcggtattgatgcaggacgtgttttattgagtattc

SEQ ID NO: 593894 - DNA, 75 bp, synthetic construct
  source 1..75: mol_type = other DNA
acatataaacagtccgtagctaatttaggtactgctggcttagaaacccgccctcgtaatattgcatttaattat

SEQ ID NO: 593895 - DNA, 75 bp, synthetic construct
  source 1..75: mol_type = other DNA
cgtgcgaaaaaccggcagaaatgttgcagcagataatcagcgcaagcagtcgtccgggagacctggttgcagatt

SEQ ID NO: 593896 - DNA, 75 bp, synthetic construct
  source 1..75: mol_type = other DNA
atggcaaattgagcgaatccatcggttcaaaatgcgccgctccatcaggtcaaaatgacacgatggaagaggtca

SEQ ID NO: 593897 - DNA, 75 bp, synthetic construct
  source 1..75: mol_type = other DNA
acggtgactgcatcgttccataacggcgtcacaatacagacacagacaaccgtgaaggttactggcaacccaagc

SEQ ID NO: 593898 - DNA, 75 bp, synthetic construct
  source 1..75: mol_type = other DNA
tttttacgatgtttgtggatggtgaaaacgaagtgggtaaagtgacatccgtcacacagccaaaactgacgcgca

SEQ ID NO: 593899 - DNA, 75 bp, synthetic construct
  source 1..75: mol_type = other DNA
cctggaaaccaccgttaacactgctcacggcatcgttaaaaagggtgtaccaatcaagaaaatttgcatggtgtt

SEQ ID NO: 593900 - DNA, 75 bp, synthetic construct
  source 1..75: mol_type = other DNA
accagagcatccaggccggtcttgcggatgtggatgccggtcgcgtgatgagtcactcggacatggtggattttg

SEQ ID NO: 593901 - DNA, 75 bp, synthetic construct
  source 1..75: mol_type = other DNA
accagtcaatacagaacggagttatctggggggaatgaaacccgcccacgtaacattgccttcaattatattgtg

SEQ ID NO: 593902 - DNA, 75 bp, synthetic construct
  source 1..75: mol_type = other DNA
agtgttaatgattcaggaaggccagtgttgggtcatcgacgatgtgcgctacttaggcggtagcgttcatgccac

SEQ ID NO: 593903 - DNA, 75 bp, synthetic construct
  source 1..75: mol_type = other DNA
atgaagtgctaatgattcaggaaggccagtgttgggtgattgacgatgtgcgctacttaggcggcagcgttcatg

SEQ ID NO: 593904 - DNA, 75 bp, synthetic construct
  source 1..75: mol_type = other DNA
tgcatttgttctacaataccatatgacgcccgatattacgccatacatagaatatgactacctggaccgtcaggg

SEQ ID NO: 593905 - DNA, 75 bp, synthetic construct
  source 1..75: mol_type = other DNA
gagtttgaagagtgggggaatccgcaggatccgcaatattacgagtacatgaaaagctacagcccgtatgacaac

SEQ ID NO: 593906 - DNA, 75 bp, synthetic construct
  source 1..75: mol_type = other DNA
tactggtaacgaccggtttgcacgattctcaggtgcaatattgggaaccggcaaaatgggtcgctaaattgcgcg

SEQ ID NO: 593907 - DNA, 75 bp, synthetic construct
  source 1..75: mol_type = other DNA
tctaccatcgcaaacattttcgcaaaggacacaacccgttgctggtgtatggctatggttcttacggcgcaagta

SEQ ID NO: 593908 - DNA, 75 bp, synthetic construct
  source 1..75: mol_type = other DNA
agaaaatagttacggtcatcgggtgatggcctcgcaacaagccttgcaggatcgcatattaaaggaaatcatcga

SEQ ID NO: 593909 - DNA, 75 bp, synthetic construct
  source 1..75: mol_type = other DNA
ggactttttattatgtgcgtaagcatccggtaactctgctgccttatcaggtctggcggcacgccatcgggactc

SEQ ID NO: 593910 - DNA, 75 bp, synthetic construct
  source 1..75: mol_type = other DNA
taatcaacgcccggaattgttccacggcgttatcgcccaggtaccgtttgttgatgttgtaacaacaatgcttga

SEQ ID NO: 593911 - DNA, 75 bp, synthetic construct
  source 1..75: mol_type = other DNA
actcaaagtcagtgagggatggcaaaatggatggtgggcaagtatggaaagtaatacctggaataccattcatga

SEQ ID NO: 593912 - DNA, 75 bp, synthetic construct
  source 1..75: mol_type = other DNA
gatgatcctgccaattgccctgttaaccgcaggcctgttaggcacgctgtttgtggtaattaaaaaaaaatacgg

SEQ ID NO: 593913 - DNA, 75 bp, synthetic construct
  source 1..75: mol_type = other DNA
gttaggtaataccaaaacggtgaaaggctggctggcgcagcttccggctaaatatcatcaacgcgccacctgtat

SEQ ID NO: 593914 - DNA, 75 bp, synthetic construct
  source 1..75: mol_type = other DNA
agcgcgggttaaccagtttgcgccaaattaaccgcaagacccgggaagtcattggtattgcctttgatgatccag

SEQ ID NO: 593915 - DNA, 75 bp, synthetic construct
  source 1..75: mol_type = other DNA
tagtcattcatctggccagcgccaccaccagtgaagttcgcctgctggacgcggaaatggccgatgccgagccgt

SEQ ID NO: 593916 - DNA, 75 bp, synthetic construct
  source 1..75: mol_type = other DNA
tccgacagacggatttagatggcaacagggcgcgtaatgatcagcatcagtttgatggttatgtgacatacaaaa

SEQ ID NO: 593917 - DNA, 75 bp, synthetic construct
  source 1..75: mol_type = other DNA
acattgcaaccattagaatgcccgaagaattgatgcttaaattggctgacttcattcgcgaccagcatgacaaag

SEQ ID NO: 593918 - DNA, 75 bp, synthetic construct
  source 1..75: mol_type = other DNA
caccggcaaacaaacaatcacccagctctatgaggcgctgcgttctcaagggcaccaggatcttgcagagaaagt

SEQ ID NO: 593919 - DNA, 75 bp, synthetic construct
  source 1..75: mol_type = other DNA
atttgcaatcatcgatgcagtaaatggtgaagagtatctttctggtttggccgaatgtttccacctgcctgaagc

SEQ ID NO: 593920 - DNA, 75 bp, synthetic construct
  source 1..75: mol_type = other DNA
gatccttttcctgatgttaatttatataataatatgaaatcaagtttttttgtaaggtttggtggaacatcccat

SEQ ID NO: 593921 - DNA, 75 bp, synthetic construct
  source 1..75: mol_type = other DNA
atgaacgtgagtaaatatgtcgctatattttcctttgtttttattcagttaatcagcgttggtaaagtttttgct

SEQ ID NO: 593922 - DNA, 75 bp, synthetic construct
  source 1..75: mol_type = other DNA
cggcctgtatgcaatggcatttaaggattcatggaataaatgggagcccattgctggatacggttgggaaagcac

SEQ ID NO: 593923 - DNA, 75 bp, synthetic construct
  source 1..75: mol_type = other DNA
tgaagccagcctgactgtgctcgcagaaatgcagcaacaaggtctggtgaaacatattggcctgagcaacgtgac

SEQ ID NO: 593924 - DNA, 75 bp, synthetic construct
  source 1..75: mol_type = other DNA
atggtccgcacgtcaccaatcagattatccgcgaagcgctttatccttactctgacgacctgacaattgtcacta

SEQ ID NO: 593925 - DNA, 75 bp, synthetic construct
  source 1..75: mol_type = other DNA
gatcctcagagtccttggcagcggggaacaaatgagaatacaaatgggctaattcggcagtacttgaaccgcccc

SEQ ID NO: 593926 - DNA, 75 bp, synthetic construct
  source 1..75: mol_type = other DNA
tctgtctcagtaaatcaggctcttaccgacaaattcctgagtttaccgtcagaactcagaaaatcactgacatgg

SEQ ID NO: 593927 - DNA, 75 bp, synthetic construct
  source 1..75: mol_type = other DNA
ataacagacgctctctgggacattgggagggcgatttagtctcaggtacaaaaaactctcatatagccacacttg

SEQ ID NO: 593928 - DNA, 75 bp, synthetic construct
  source 1..75: mol_type = other DNA
gttgcagcgagcctgggtgcaacaccaatgcaggtggcgctggcgtggctgttacaacgttcaccgaatattttg

SEQ ID NO: 593929 - DNA, 75 bp, synthetic construct
  source 1..75: mol_type = other DNA
tctatggatatcgcccatgggctggtggggaaaacggccattcatcctgatcagattagtgtgatagaggaggcg

SEQ ID NO: 593930 - DNA, 75 bp, synthetic construct
  source 1..75: mol_type = other DNA
tgtataaaatatgccattctcgcatttttagctttattaccttttctcgctgttgctggttatattatcttcgat

SEQ ID NO: 593931 - DNA, 75 bp, synthetic construct
  source 1..75: mol_type = other DNA
ataccagtttcggtatacatcgtttcaaggtgaaattagatactacgtattgtataaaatatgccattctcgcat

SEQ ID NO: 593932 - DNA, 75 bp, synthetic construct
  source 1..75: mol_type = other DNA
tgatggtgagcttacactgaatctcatgaatgagtcgtttgtggggtatgtgactattcctatggatgcccgtat

SEQ ID NO: 593933 - DNA, 75 bp, synthetic construct
  source 1..75: mol_type = other DNA
gccgtttacacgaagccaatattcccgtcattctctgtagcagtaaaacttcagcggaaatgctgtacttgcaaa

SEQ ID NO: 593934 - DNA, 75 bp, synthetic construct
  source 1..75: mol_type = other DNA
ttcatctgcttcagccagatcctgatgcagaagcccaaaaactgctgaatgtggttatttctgaacggaagaata

SEQ ID NO: 593935 - DNA, 75 bp, synthetic construct
  source 1..75: mol_type = other DNA
tggaaatgcaacgtaaaatgataatcgcgcagttaatctattattttgggattgctgttagcaccagttatttaa

SEQ ID NO: 593936 - DNA, 75 bp, synthetic construct
  source 1..75: mol_type = other DNA
ggcccgcgtgattttgccctgaccgcgcccgtatgtgagcatattgacgatcatgccgttatggccagagagctg

SEQ ID NO: 593937 - DNA, 75 bp, synthetic construct
  source 1..75: mol_type = other DNA
aactcccccgttgccgatgaggaatggtggcaggatttccgggctgcaatgctggaacttcaggaacatcgtcgg

SEQ ID NO: 593938 - DNA, 75 bp, synthetic construct
  source 1..75: mol_type = other DNA
gactgaacttcaggagcgccgcagggctggtagcgcagagccagtagtacacacaggagagcaaaacgatgaaaa

SEQ ID NO: 593939 - DNA, 75 bp, synthetic construct
  source 1..75: mol_type = other DNA
gccgcgagacaggaaaaattatcgccacaacaaagggccagcgagcagccgctgaacacctggttaaagccatcc

SEQ ID NO: 593940 - DNA, 75 bp, synthetic construct
  source 1..75: mol_type = other DNA
cagcagcatcaaaaaccattggcttcgactatccgtgcgtagtcggttttcagggtaatcagcgtattattatcg

SEQ ID NO: 593941 - DNA, 75 bp, synthetic construct
  source 1..75: mol_type = other DNA
ggacagagcccggttttacgggttacataacgagcaaagcgctgatggaatcagattacttactataacccagca

SEQ ID NO: 593942 - DNA, 75 bp, synthetic construct
  source 1..75: mol_type = other DNA
tcggtctggttgacggtctgaactttgctgttcagtaccagggcaaaaacggcagcgtaagcggcgaaggcatga

SEQ ID NO: 593943 - DNA, 75 bp, synthetic construct
  source 1..75: mol_type = other DNA
tacccgttccgccgctgcttgaatctcgccgtgggcaaccgctgtttatgactgtacaacgtgcgcactggtcat

SEQ ID NO: 593944 - DNA, 75 bp, synthetic construct
  source 1..75: mol_type = other DNA
gcacttcccgttctactttaatagccagacgctggaaatggcggatcgcggttccatcgggcaactgttggttaa

SEQ ID NO: 593945 - DNA, 75 bp, synthetic construct
  source 1..75: mol_type = other DNA
ttatatattacaatagaaaaggtaatagcgataatgaattcttttatttgctagacttgctttctaattatcaaa

SEQ ID NO: 593946 - DNA, 75 bp, synthetic construct
  source 1..75: mol_type = other DNA
ctatcgataaaatggcctctcttgggcttatatttccggcgattactgcagcaatagtggtccttgtcgaaatcg

SEQ ID NO: 593947 - DNA, 75 bp, synthetic construct
  source 1..75: mol_type = other DNA
ggttaaataaagaatggacggatgttcgaggagataacactcagaaaaaaacaaaatatacatcagaaataattt

SEQ ID NO: 593948 - DNA, 75 bp, synthetic construct
  source 1..75: mol_type = other DNA
atattcacggcaggctgatggcgggatcgctggacagccagagcagttgcccgtgtaaggctcggtttattgcgt

SEQ ID NO: 593949 - DNA, 75 bp, synthetic construct
  source 1..75: mol_type = other DNA
tgcatccggcaacgttgctacccgcagtacgcagcgatatcccggtctttgtcggctccagcaaagacccacgcg

SEQ ID NO: 593950 - DNA, 75 bp, synthetic construct
  source 1..75: mol_type = other DNA
aaccgaaaatccaccgctgttccgtgcactggctctgcgccgtaaacaaacgctattaaccctgcacagcctgaa

SEQ ID NO: 593951 - DNA, 75 bp, synthetic construct
  source 1..75: mol_type = other DNA
ttatcggtagcgaaaataaaggtcgtacaacgacgcttggccgtggaggcagcgattatacggcagccttgctgg

SEQ ID NO: 593952 - DNA, 75 bp, synthetic construct
  source 1..75: mol_type = other DNA
tgaaaaataccttcctgcaactattgaagttttgttatcaccatttatgattattaaacatggtcctgtttataa

SEQ ID NO: 593953 - DNA, 75 bp, synthetic construct
  source 1..75: mol_type = other DNA
accgggctactgccgctggttactgacagcctgccgatgcgcctgctgccaactgaaattatggccggttcgccg

SEQ ID NO: 593954 - DNA, 75 bp, synthetic construct
  source 1..75: mol_type = other DNA
caccacctccgaagtgagcgtggcgttgacacttgataccaccggttccacctccactggcgatacattgctgac

SEQ ID NO: 593955 - DNA, 75 bp, synthetic construct
  source 1..75: mol_type = other DNA
cacgggatatggaccgggtcacctgcggcagatatccgggaatgtttattattgtgggcggcgttcctgaaacag

SEQ ID NO: 593956 - DNA, 75 bp, synthetic construct
  source 1..75: mol_type = other DNA
gacaaccagttcactcgtgacgctggcatcaacactgataacatcgtagctctgggtctggtttaccagttctaa

SEQ ID NO: 593957 - DNA, 75 bp, synthetic construct
  source 1..75: mol_type = other DNA
ctgaaattccaggatgtgggttctttcgactacggtcgtaactacggcgttgtttatgacgtaacttcctggacc

SEQ ID NO: 593958 - DNA, 75 bp, synthetic construct
  source 1..75: mol_type = other DNA
cagggcaacgctccggaaagcgaaaacaactcctggacccgtgtggcatttgctggtctgaaattccaggacatc

SEQ ID NO: 593959 - DNA, 75 bp, synthetic construct
  source 1..75: mol_type = other DNA
tgtacggtaaagtagacggcctgcactatttctctgacaacaagtcagaagacggcgaccagacctatgtacgtc

SEQ ID NO: 593960 - DNA, 75 bp, synthetic construct
  source 1..75: mol_type = other DNA
ttggtttcaaaggcgaaactcaggttactgaccagctgaccggttacggccagtgggaatatcagatccagggca

SEQ ID NO: 593961 - DNA, 75 bp, synthetic construct
  source 1..75: mol_type = other DNA
gatggcgataagacctacatgcgtcttggcttcaaaggtgaaactcaggttactgatcaactgaccggttatggt

SEQ ID NO: 593962 - DNA, 75 bp, synthetic construct
  source 1..75: mol_type = other DNA
gcggtactggcgaccaatgctctgaaagatgcctgcggatttactaacccgattcaggcaactcacgaagaaatt

SEQ ID NO: 593963 - DNA, 75 bp, synthetic construct
  source 1..75: mol_type = other DNA
tgcgtctgaaatgacccgtttctgcattatcactgacgaagcgcgccacatcaaaatggcgattgtggataaaca

SEQ ID NO: 593964 - DNA, 75 bp, synthetic construct
  source 1..75: mol_type = other DNA
gaaagccgtgaccatgattgcggaatatttgccattggtcgttgaggatggcaacaatgaaaaagcgcgtgaggc

SEQ ID NO: 593965 - DNA, 75 bp, synthetic construct
  source 1..75: mol_type = other DNA
gatcttgggctacccgacgaagatggtctgtccttaatccgccgctggcgcagtaatgatgtttcgctacctatt

SEQ ID NO: 593966 - DNA, 75 bp, synthetic construct
  source 1..75: mol_type = other DNA
gcagcaacgttaaagcgcgtgaagcaatggcctacgctcagttcctcgcgggtatggcgttcaacaatgcctctc

SEQ ID NO: 593967 - DNA, 75 bp, synthetic construct
  source 1..75: mol_type = other DNA
ggaaggcgcagaagcgtgtatcaatgccatccgtgaactggcgaagaaagtgaatatcccggcaggcctgcgtga

SEQ ID NO: 593968 - DNA, 75 bp, synthetic construct
  source 1..75: mol_type = other DNA
tgacgtacatcaatccgtctcacgggcgttttcaccggctggacaaaatgttgtcctttgatgatgaacagcagg

SEQ ID NO: 593969 - DNA, 75 bp, synthetic construct
  source 1..75: mol_type = other DNA
ggagggaagaaggatttttacgaacgcagtgaggagtctgtcggatactgggtgggggtgatccgtcgtgccgtt

SEQ ID NO: 593970 - DNA, 75 bp, synthetic construct
  source 1..75: mol_type = other DNA
atttattccctgttcccgctgtataatgcactgtaccgggaagattttaagcccacaaggcagcccagaacgaag

SEQ ID NO: 593971 - DNA, 75 bp, synthetic construct
  source 1..75: mol_type = other DNA
tgtttgaacgttatacggcatggctgaaacagtcgcgtcagtatgacagtaatctgctcagccatcagtacctgc

SEQ ID NO: 593972 - DNA, 75 bp, synthetic construct
  source 1..75: mol_type = other DNA
ggtgcagaatattgactttctgtcgctgacggagtttctggaaaccctgcgcattccggaaggccgggaagtgac

SEQ ID NO: 593973 - DNA, 75 bp, synthetic construct
  source 1..75: mol_type = other DNA
cggttactgttttcactgtatcgctatcagggggaaacagtctgccttgtactggaatatattcgcaatcatgcc

SEQ ID NO: 593974 - DNA, 75 bp, synthetic construct
  source 1..75: mol_type = other DNA
atgttcaggtcactgtttctggcggccgccctgatggcatttaccccgcttgcggcaaacgcaggtgaaatcacc

SEQ ID NO: 593975 - DNA, 75 bp, synthetic construct
  source 1..75: mol_type = other DNA
gatgttgacgctgagaatcatgaagcatatccgggacatttgaatgagattaaacggattctgagttttgctatt

SEQ ID NO: 593976 - DNA, 75 bp, synthetic construct
  source 1..75: mol_type = other DNA
ctggcggttctgttcacaggctttaactttaacgcagaagcggctaccgtaaaacaagctcttagttgtaaccca

SEQ ID NO: 593977 - DNA, 75 bp, synthetic construct
  source 1..75: mol_type = other DNA
tatcttgttgaacagcaggtggagcatcctctgtggagtctgcttgcgctcacgcatcaggaagagcctctgaat

SEQ ID NO: 593978 - DNA, 75 bp, synthetic construct
  source 1..75: mol_type = other DNA
ctttctgagactgaatcatgggcagtatattcttaatccggggcttaaaatcagacagggtgacgtgtggtgtgc

SEQ ID NO: 593979 - DNA, 75 bp, synthetic construct
  source 1..75: mol_type = other DNA
gaccgtgactactggcatcgcaattatgaatggcgtaaaaaccgctggtggcgtcatgataatggctaccatcgt

SEQ ID NO: 593980 - DNA, 75 bp, synthetic construct
  source 1..75: mol_type = other DNA
tgaatccagagatcatcccgggctataaaaaatttgcacaggccattgcggctgataactttgttcaggctgatg

SEQ ID NO: 593981 - DNA, 75 bp, synthetic construct
  source 1..75: mol_type = other DNA
catctgaagcaccagaaattatccaaatttggaaaaattccgttgatgcaacacacgattttcttacagcccatg

SEQ ID NO: 593982 - DNA, 75 bp, synthetic construct
  source 1..75: mol_type = other DNA
cggttcaggccagcggtggcgcaacgactaccgtaccttcaacttcaccaacccaggtgaatccgtcttcggcag

SEQ ID NO: 593983 - DNA, 75 bp, synthetic construct
  source 1..75: mol_type = other DNA
tctggtaccgtttggatccgtcagaaagtcgcattgccgcccgacgcggtgctgaccgtgacactttctgacgca

SEQ ID NO: 593984 - DNA, 75 bp, synthetic construct
  source 1..75: mol_type = other DNA
atgcgttcatttttttacaccatatgcagaagcaaacagcaagaaagcattacagatcatcactcacttactgag

SEQ ID NO: 593985 - DNA, 75 bp, synthetic construct
  source 1..75: mol_type = other DNA
agcttctgcgccaaaagttgacggtgagatcaaggtctcttttgtgaattcgcctccgggtatgcgggttatgga

SEQ ID NO: 593986 - DNA, 75 bp, synthetic construct
  source 1..75: mol_type = other DNA
cccggcagaaaacattctgggtggtgtgggtaaagcgacagcttatcttgcggtacaactgaaaaaaacaccgga

SEQ ID NO: 593987 - DNA, 75 bp, synthetic construct
  source 1..75: mol_type = other DNA
tgcagtcacagccgggggagcgaaatcccgcccggcagcaaatgctgcccaacaccaacggcgggatgttaaaca

SEQ ID NO: 593988 - DNA, 75 bp, synthetic construct
  source 1..75: mol_type = other DNA
ccgcactgacaggagcctggggagagctgattgttgaggatgtgacctttaaggatttgacggatgaacacgacg

SEQ ID NO: 593989 - DNA, 75 bp, synthetic construct
  source 1..75: mol_type = other DNA
ggccattaacgacgatgacagcgccgatatcctgctggaaatcccggtatgggaacgcgtgattgtacgccgcaa

SEQ ID NO: 593990 - DNA, 75 bp, synthetic construct
  source 1..75: mol_type = other DNA
gtgaatgagatttactacctgacgttacgtgaacgttattcaccaaaaccagcgcctaaatgctctgtttgtggc

SEQ ID NO: 593991 - DNA, 75 bp, synthetic construct
  source 1..75: mol_type = other DNA
cgtggaatgtcgaatttttgtgcagtaaattcggaattgaaaatctgggttttttaacactgactttccgtgatc

SEQ ID NO: 593992 - DNA, 75 bp, synthetic construct
  source 1..75: mol_type = other DNA
gcaaccgtaatccggatagttcgttgaatcagcagcatatgctgccggagaggagaaacggcgacatgctgaatc

SEQ ID NO: 593993 - DNA, 75 bp, synthetic construct
  source 1..75: mol_type = other DNA
agcgctcagctgcgacccaaacgcccgggctgaacaacctggagcgtgtccaacaacgtatgcgtattttcatga

SEQ ID NO: 593994 - DNA, 75 bp, synthetic construct
  source 1..75: mol_type = other DNA
gtcagccagcggttaacgccgggcacttgggatgacgaaccgcagccgtttattggcgggctgatttctgagcag

SEQ ID NO: 593995 - DNA, 75 bp, synthetic construct
  source 1..75: mol_type = other DNA
aatgggatgacgaaccgcagccgtttattggcgggctgatatcagatcaggccgcgcagcaggtggtgacggcct

SEQ ID NO: 593996 - DNA, 75 bp, synthetic construct
  source 1..75: mol_type = other DNA
gcgatgggtggacgaaccctgcttgcgccgcgcttattacaagcagggacatcgttgctgacgccggggatcatt

SEQ ID NO: 593997 - DNA, 75 bp, synthetic construct
  source 1..75: mol_type = other DNA
tgctggcaggcaacacaattatctttaaacccagtgagctgacaccgtggagcagcgaagcggtaatgcgcttat

SEQ ID NO: 593998 - DNA, 75 bp, synthetic construct
  source 1..75: mol_type = other DNA
ggcgttatgacacctttgatgaggcgattaagatggcgaataacactcgctttggcctctcttgcgggctggtgt

SEQ ID NO: 593999 - DNA, 75 bp, synthetic construct
  source 1..75: mol_type = other DNA
catcgccccagcgcctggtatgccgcagattattgtgcctggccgatggcgagcctggagtcggactcgttaacg

SEQ ID NO: 594000 - DNA, 75 bp, synthetic construct
  source 1..75: mol_type = other DNA
cgtgctgaacctggtgcagggcgggcgtgaaacgggtcaggcgctgagtgcgctggaggatctcgacggcttgct

SEQ ID NO: 594001 - DNA, 75 bp, synthetic construct
  source 1..75: mol_type = other DNA
ctttgccgcactgctggaaagcaataaaggcgaattaaccgcgattattgccagagaaaccggtaagccgcgctg

SEQ ID NO: 594002 - DNA, 75 bp, synthetic construct
  source 1..75: mol_type = other DNA
atgccgctgtccatctgaccattcagtcggcgtttgtcacagccgggcaacgctgcacctgcgcccgccgtttat

SEQ ID NO: 594003 - DNA, 75 bp, synthetic construct
  source 1..75: mol_type = other DNA
tgctgaaaagcggggcgcagggcgatgcatttcttgctcgtctggttgccgtcagccagcgattaacgccgggca

SEQ ID NO: 594004 - DNA, 75 bp, synthetic construct
  source 1..75: mol_type = other DNA
ccgatgccgctcaggtcgggcaggcttgtcgggcagcccgtgcggcgtttccgcgctgggcgcggctctcatttg

SEQ ID NO: 594005 - DNA, 75 bp, synthetic construct
  source 1..75: mol_type = other DNA
atgactttatggattaacggtgactgggtaacgggccagggcgcattgcgtgtgaagcgtaatccggtatcggga

SEQ ID NO: 594006 - DNA, 75 bp, synthetic construct
  source 1..75: mol_type = other DNA
gagcctggagtcggattcgttaacgctgcccgcgacacttaaccccgggctggatttttccgatgaggtggtgcg

SEQ ID NO: 594007 - DNA, 75 bp, synthetic construct
  source 1..75: mol_type = other DNA
tattggttcagagtctggtagaggcctgttccgggacaaacacccaggtttacgccactggcgtgcgttcgcgaa

SEQ ID NO: 594008 - DNA, 75 bp, synthetic construct
  source 1..75: mol_type = other DNA
gtcgctgcgtctggtttatcaggatccgatgggcaactatttccattcgttgatgaccaccgcgccgctcacggg

SEQ ID NO: 594009 - DNA, 75 bp, synthetic construct
  source 1..75: mol_type = other DNA
agtatgaccgtctgcaaattagccgtctgatcccgttattgcgttactggccgcaggaaaatctggccgttcagg

SEQ ID NO: 594010 - DNA, 75 bp, synthetic construct
  source 1..75: mol_type = other DNA
gcgcgagcgtgaacagctacgacagagagagcttgagtaccaggaagacatgcagcaagccgtggacatggcaaa

SEQ ID NO: 594011 - DNA, 75 bp, synthetic construct
  source 1..75: mol_type = other DNA
tgcttatgagtagtttgattttgtcaggatgtgggccggtatctgagaataaggaaagtcagcaacaacaaccca

SEQ ID NO: 594012 - DNA, 75 bp, synthetic construct
  source 1..75: mol_type = other DNA
ctggctaaagcaaaagatgcctggtcttgcccggatggcgtaacacggtatatggatgtgagatacagggataag

SEQ ID NO: 594013 - DNA, 75 bp, synthetic construct
  source 1..75: mol_type = other DNA
ggatgcgtaaggtctgcctgggggcaccgccatcgaaaacgtcaggtcttccgacactggcaccgccgctgttgc

SEQ ID NO: 594014 - DNA, 75 bp, synthetic construct
  source 1..75: mol_type = other DNA
tgctcacgatacgggttacggatgaggaacatgcgcggctgctggcacgttgtgagggaaaacaacttgcgtcat

SEQ ID NO: 594015 - DNA, 75 bp, synthetic construct
  source 1..75: mol_type = other DNA
ggcaaatcgcgcacctggtggaaaccgtctgtgggtgagcaggttgtgctgttcagccttggcggcaatctggaa

SEQ ID NO: 594016 - DNA, 75 bp, synthetic construct
  source 1..75: mol_type = other DNA
tcgcgacgatatgatccacattggtatctgcgcttggcgtagtggtcaggataccgagcaggtaatggaacatgc

SEQ ID NO: 594017 - DNA, 75 bp, synthetic construct
  source 1..75: mol_type = other DNA
tgttggttcagagcatggtagaagcgtgttccgggaccaacacccaggtttacgctactggcgtacgttcgcgaa

SEQ ID NO: 594018 - DNA, 75 bp, synthetic construct
  source 1..75: mol_type = other DNA
atgcgacaattctgcatcggtttactggcacaatcctcttatcagcttgtcgaagtacaagcctcgctggaggag

SEQ ID NO: 594019 - DNA, 75 bp, synthetic construct
  source 1..75: mol_type = other DNA
tggctgcaacttattctgaaactcagaatatgacagtcttcggtgatgaccatatcgcaaacaaagcgaaaaact

SEQ ID NO: 594020 - DNA, 75 bp, synthetic construct
  source 1..75: mol_type = other DNA
ctatgcaaaatctgaccgtactgatgggcaggtatcctatgctaaagacagccctctgaatgcctctggtaaaac

SEQ ID NO: 594021 - DNA, 75 bp, synthetic construct
  source 1..75: mol_type = other DNA
gtgatcgaggcggtggataacgtcaccttcaaaaccggggagtttatcgtggaagccgacaccacccgtattaac

SEQ ID NO: 594022 - DNA, 75 bp, synthetic construct
  source 1..75: mol_type = other DNA
cctgctgaaagacaaccagtttacacgtgatgccggcatcaataccgatgatattgttgcggtaggtctggtcta

SEQ ID NO: 594023 - DNA, 75 bp, synthetic construct
  source 1..75: mol_type = other DNA
gcaaaagcacggtcattatcattacggagccagtgaggtaccgccgcccagcggactggggcgtcctcgcacggt

SEQ ID NO: 594024 - DNA, 75 bp, synthetic construct
  source 1..75: mol_type = other DNA
atcaaaacacgggcagacttactacggggccagcgaggtaccccccgccagtggactgggcagaccgcgagggct

SEQ ID NO: 594025 - DNA, 75 bp, synthetic construct
  source 1..75: mol_type = other DNA
tgccggacgggccgtgagccggattgggtagacgcggtttactgcctgcaaacacagtgggaaaagcctgttcgg

SEQ ID NO: 594026 - DNA, 75 bp, synthetic construct
  source 1..75: mol_type = other DNA
gtaatggacacccttattttcagtatcttgatcaaagcggtatagaaacaggtacgggaaagcggcaaatcatac

SEQ ID NO: 594027 - DNA, 75 bp, synthetic construct
  source 1..75: mol_type = other DNA
cgggatggtttgctgccttcgaacaatctgcaacatttatcacgctgtatacatcggggcttaccgtagatgtaa

SEQ ID NO: 594028 - DNA, 75 bp, synthetic construct
  source 1..75: mol_type = other DNA
acggtggctggtttgaatacgaacccgctaccgggcgctggtatgtcaggggaatcaaatccatggtcattgaag

SEQ ID NO: 594029 - DNA, 75 bp, synthetic construct
  source 1..75: mol_type = other DNA
attcgaatcagttcgcgccaccgtcgacgtcggcggacgcctgcgtgacagaacatccagacggtggctggtttg

SEQ ID NO: 594030 - DNA, 75 bp, synthetic construct
  source 1..75: mol_type = other DNA
atccgtaacgtttgtcacgctgtatacctctggcctcaccgtcgatgtaataccattcacgacaaaactgaacat

SEQ ID NO: 594031 - DNA, 75 bp, synthetic construct
  source 1..75: mol_type = other DNA
tttgccacctaccgtaacaccgacttttttggccttgttgatggtcttaattttgccgtgcagtatcagggcgaa

SEQ ID NO: 594032 - DNA, 75 bp, synthetic construct
  source 1..75: mol_type = other DNA
ccatcgaaattcaagctcaacaaatcaagaacgaccgcgtaactatgcggttcgagcctcgttttgttgagtacg

SEQ ID NO: 594033 - DNA, 75 bp, synthetic construct
  source 1..75: mol_type = other DNA
taaccaaaatggcaagaagcattatcatctggctttatttttcaatcaggaggcttatgcctatcccggaacata

SEQ ID NO: 594034 - DNA, 75 bp, synthetic construct
  source 1..75: mol_type = other DNA
gtcaagagagtttggtgaggtaaagggtaagaagcattatcatattgcattgatgcttaataatgatgcgtactt

SEQ ID NO: 594035 - DNA, 75 bp, synthetic construct
  source 1..75: mol_type = other DNA
aaaggtgataaagaacgctggagtatcagcggtgatgttcacgaaattaaaaatcttcctgtaatcctctatagc

SEQ ID NO: 594036 - DNA, 75 bp, synthetic construct
  source 1..75: mol_type = other DNA
tgaccgatgaatttgagattgaaagtggctgtgaggcttctggcttcattaaaggtgataaagaacgctggagca

SEQ ID NO: 594037 - DNA, 75 bp, synthetic construct
  source 1..75: mol_type = other DNA
gcttcttctaatgaagatcgtagcgaacgcacctatgagttcgctctcaagatttcaaactacgcgccagtgctg

SEQ ID NO: 594038 - DNA, 75 bp, synthetic construct
  source 1..75: mol_type = other DNA
ggttcagcggatcacggaaagctgccatattcctgtacggatcacacctgatgtactgacatacctgaatacatc

SEQ ID NO: 594039 - DNA, 75 bp, synthetic construct
  source 1..75: mol_type = other DNA
gtcccttgcctttctgcagtccaaagggaaaaaactgggaagcatcaatggccgcaattatgacaaccaggatgt

SEQ ID NO: 594040 - DNA, 75 bp, synthetic construct
  source 1..75: mol_type = other DNA
caacctgggctgggcaaacaaagcccagaaccttgaactggtggcccagtaccagtttgattttggtctgcgccc

SEQ ID NO: 594041 - DNA, 75 bp, synthetic construct
  source 1..75: mol_type = other DNA
tgatgattatggaagcatggataagaacgctgagtctcaatgtcacatctgactatcagaaacattatacgctgg

SEQ ID NO: 594042 - DNA, 75 bp, synthetic construct
  source 1..75: mol_type = other DNA
agccacgcaagcaccttaaaatcaccatcatacactaaatcagtaagttggcagcattacccccgctttggtaac

SEQ ID NO: 594043 - DNA, 75 bp, synthetic construct
  source 1..75: mol_type = other DNA
caagcggcatggttccccttgccgccattggcgcatctgacacgccatcatcccgtctgccgggaaataccgcag

SEQ ID NO: 594044 - DNA, 75 bp, synthetic construct
  source 1..75: mol_type = other DNA
aaccgaaatcatgcgccttatcaccaatctgatccgcactggtgtagtcaccgaagtggaccgggagaactggct

SEQ ID NO: 594045 - DNA, 75 bp, synthetic construct
  source 1..75: mol_type = other DNA
caatgcccgactgaggttgctatctcagaccgaagggaaaaagaactgtcagatctcggattcattccactggtt

SEQ ID NO: 594046 - DNA, 75 bp, synthetic construct
  source 1..75: mol_type = other DNA
tgggggacttctatttcgataatacacctcaggatattgatttgctggagcatatttcccatgtggctgccagcg

SEQ ID NO: 594047 - DNA, 75 bp, synthetic construct
  source 1..75: mol_type = other DNA
gagtacccggacgggggatggtttgagtatgaacccgccaccggacgatggcatgtcaggggcatcaaatccatg

SEQ ID NO: 594048 - DNA, 75 bp, synthetic construct
  source 1..75: mol_type = other DNA
tcagacatatctgcaaaactggatcatgcaatatgttgtggcatcagataacgccggtcaggagacaaaggctcg

SEQ ID NO: 594049 - DNA, 75 bp, synthetic construct
  source 1..75: mol_type = other DNA
atgtctgagcagcttagtctgattatgcatgcaactgagtttcagaaaatagagtcagcatggacggggctttat

SEQ ID NO: 594050 - DNA, 75 bp, synthetic construct
  source 1..75: mol_type = other DNA
ctatgaaagcgagtatggaacttttgggggaacaccgtattctgcttttgtgggtgacttctatttcgataatac

SEQ ID NO: 594051 - DNA, 75 bp, synthetic construct
  source 1..75: mol_type = other DNA
tctttgcatttgtcagctgcgtactacttactgttattaaccataatttttatgcactactggcaataccgttaa

SEQ ID NO: 594052 - DNA, 75 bp, synthetic construct
  source 1..75: mol_type = other DNA
acatcttctctttgctttattagtttttgctggatatggagcaatagttgaattttggtggcctgcggtggctat

SEQ ID NO: 594053 - DNA, 75 bp, synthetic construct
  source 1..75: mol_type = other DNA
gcccctacaaatattattggctaccatactttatcaggatattccgttattattcctcctgtttgcagggaatat

SEQ ID NO: 594054 - DNA, 75 bp, synthetic construct
  source 1..75: mol_type = other DNA
ggtggaaaacaaagaacaggcagtagcgagacgtgcagcctcgagtattaaaaaaatccgggcaatgttggtagc

SEQ ID NO: 594055 - DNA, 75 bp, synthetic construct
  source 1..75: mol_type = other DNA
aatcattacccgcatataactatacttcgcacacaggagagcatgtattacagtgccctacagaaatagcaatat

SEQ ID NO: 594056 - DNA, 75 bp, synthetic construct
  source 1..75: mol_type = other DNA
tggcattgagtttattaattattttaatgccggggttatgtttattaataccagcgaatggaaaaaaaataatat

SEQ ID NO: 594057 - DNA, 75 bp, synthetic construct
  source 1..75: mol_type = other DNA
gtcggatagttgatgcttttgagcaatatggttggtgtgcagcaattcgtggtgtggaaggtggcggtttagtta

SEQ ID NO: 594058 - DNA, 75 bp, synthetic construct
  source 1..75: mol_type = other DNA
tgttcctgtagaagcaggtgtaacgacaatcatcgttcttgaagctaattacgaacatggagtgaaaaccagcca

SEQ ID NO: 594059 - DNA, 75 bp, synthetic construct
  source 1..75: mol_type = other DNA
gtgtccatcggtaacggcgtaaaagttggcggtggtattactggtaatttgacgggaaacgcagatactgccaca

SEQ ID NO: 594060 - DNA, 75 bp, synthetic construct
  source 1..75: mol_type = other DNA
cattgaagatgataaacaacacgtcgtttttaaccgcgataacgcaagtgaaaagctaaatattacgttgatgtc

SEQ ID NO: 594061 - DNA, 75 bp, synthetic construct
  source 1..75: mol_type = other DNA
actgcaagagcgtaccttgattcatacggcacagcgattcacaactacgcaggggataaccttgctaatgggctg

SEQ ID NO: 594062 - DNA, 75 bp, synthetic construct
  source 1..75: mol_type = other DNA
aagattcaattcccggcgtcaatgccaaagggaatcaggacacctctggtaatgcggatacagcgaccaagttgc

SEQ ID NO: 594063 - DNA, 75 bp, synthetic construct
  source 1..75: mol_type = other DNA
cattaacgggtgtccctactgcgccgaccgccgcacagggcacaaataatacgcagattgctacgaccgcttatg

SEQ ID NO: 594064 - DNA, 75 bp, synthetic construct
  source 1..75: mol_type = other DNA
tggcgttacccagggcggcggtgcaatgagttctaacggaatcgtggttgatacgcatcagcatacaggcgtcct

SEQ ID NO: 594065 - DNA, 75 bp, synthetic construct
  source 1..75: mol_type = other DNA
gattaaacctcattttcagcttgagggcttaagcatgtcattgcgtcttgtcgctgatttaccatcaagtgtaag

SEQ ID NO: 594066 - DNA, 75 bp, synthetic construct
  source 1..75: mol_type = other DNA
gattaaaccccattttcaacttgagggcttaagcatgtcattgcgtcttgttgctgatttaccatcaagtgtaag

SEQ ID NO: 594067 - DNA, 75 bp, synthetic construct
  source 1..75: mol_type = other DNA
ccgaagaggtggcatcatggctgggtgcccgttatcgcgggaaaacaccacgtttcacccagaattattcgtcac

SEQ ID NO: 594068 - DNA, 75 bp, synthetic construct
  source 1..75: mol_type = other DNA
acgctgtcactgaattacacctggacccgaagtgaacaacgtgatggtgataacaaaggtgcgccgctgagttat

SEQ ID NO: 594069 - DNA, 75 bp, synthetic construct
  source 1..75: mol_type = other DNA
cgggaatgcatgccaacgtggcgagtggcattatgactgccgcattgtttgtattcatgcttattcaaccactca

SEQ ID NO: 594070 - DNA, 75 bp, synthetic construct
  source 1..75: mol_type = other DNA
atgctttaatttgtggtcaagggagaatagaggctcttgttgcattaggtgaaactattattccagcaattataa

SEQ ID NO: 594071 - DNA, 75 bp, synthetic construct
  source 1..75: mol_type = other DNA
ctattatcaagaaatgtgtaagcctcacgtatgggatattaaagaacgcgtgaaaggcggggtaattgaggacgt

SEQ ID NO: 594072 - DNA, 75 bp, synthetic construct
  source 1..75: mol_type = other DNA
gctcgacagttataaaatctgtaaatattccggcggcttagggccaaaacagcgtcagggcgatttcaaaagccc

SEQ ID NO: 594073 - DNA, 75 bp, synthetic construct
  source 1..75: mol_type = other DNA
aatcacattgataccagcgacttttatggtccacacgttaccaatcagattatccgcgaagcgttacatccttat

SEQ ID NO: 594074 - DNA, 75 bp, synthetic construct
  source 1..75: mol_type = other DNA
aagcagaactgctggctgaacgattaggcgcacgtcttgccggatgtcgtgtcgtcggttccgtattgccgcagc

SEQ ID NO: 594075 - DNA, 75 bp, synthetic construct
  source 1..75: mol_type = other DNA
tgcggggtttctgataacgccgcgacgtttgccgaaaaactggacgctctgctggtgctggtggtcaatgcggcc

SEQ ID NO: 594076 - DNA, 75 bp, synthetic construct
  source 1..75: mol_type = other DNA
caacctgccaaagatagaacagaaaggtagcgtcggtgtgttctggcgcaataacgaaacgccttcttatgcttt

SEQ ID NO: 594077 - DNA, 75 bp, synthetic construct
  source 1..75: mol_type = other DNA
tggcgaaatacgccaccctcagctggaatgatcttgccaactggcgctggatcgtctggccgacgggtaccccca

SEQ ID NO: 594078 - DNA, 75 bp, synthetic construct
  source 1..75: mol_type = other DNA
tggagaatctgctctattttatgcagaacacgcgtaaacggcttgaaccccagccgaagagtaacgccgagaaca

SEQ ID NO: 594079 - DNA, 75 bp, synthetic construct
  source 1..75: mol_type = other DNA
attgatgagatattccagttcgttactggtgcgctggtgtttggtcaaccgagcgtgcaggtgagcatttaccct

SEQ ID NO: 594080 - DNA, 75 bp, synthetic construct
  source 1..75: mol_type = other DNA
gaaaattgttgtttccgggtgttcgcccgacgcgtggaatggcgaatatactgctaccgtcacggatgaaaaaac

SEQ ID NO: 594081 - DNA, 75 bp, synthetic construct
  source 1..75: mol_type = other DNA
gtgattttacacgtgaaatgcttgatgtttgcatgctgatcctatggggaggtaatactataaacaatacaaatc

SEQ ID NO: 594082 - DNA, 75 bp, synthetic construct
  source 1..75: mol_type = other DNA
cgcgttatgatgggggatggtcatggcccgacggaaggatcgattgaggccagcctgacagtgctggcggagatg

SEQ ID NO: 594083 - DNA, 75 bp, synthetic construct
  source 1..75: mol_type = other DNA
tatatggcgttgtcgatggccgatattttcattgccattggtacttccgggcatgtttatccggcggctgggttt

SEQ ID NO: 594084 - DNA, 75 bp, synthetic construct
  source 1..75: mol_type = other DNA
atcctgaactggtacaggcattttataacgcccgtcgccgtcaactacagcagccagaaattcaacctaacgctg

SEQ ID NO: 594085 - DNA, 75 bp, synthetic construct
  source 1..75: mol_type = other DNA
tttgccgagaaatattacggcccggcaagccaggtggtgcctgagtttgttgaaaagttgctgaagggattataa

SEQ ID NO: 594086 - DNA, 75 bp, synthetic construct
  source 1..75: mol_type = other DNA
tttgttgaaatcctgcgcgaacgcgatgtccaggcgcagtggtttgatgtgcgtaaagtgatgcgcaccaacgac

SEQ ID NO: 594087 - DNA, 75 bp, synthetic construct
  source 1..75: mol_type = other DNA
tctggataccctgtgcgaactgaacgtaatggaacaggtatataacctgggtcactccaccattatgcaatcagc

SEQ ID NO: 594088 - DNA, 75 bp, synthetic construct
  source 1..75: mol_type = other DNA
gcatgtttatccggcggctgggtttgttcacgaagcgaaactgcatggcgcgcacaccgtggaactgaatcttga

SEQ ID NO: 594089 - DNA, 75 bp, synthetic construct
  source 1..75: mol_type = other DNA
acacccttcctgtcaatgcaacatacgcttcagagacaacagttgacacacaaaaattctctgacatcctctact

SEQ ID NO: 594090 - DNA, 75 bp, synthetic construct
  source 1..75: mol_type = other DNA
gtatgaggattatactgattaaatccaccctgtcgcgaaaaatggcctacgttattgccagacgtaataaaacct

SEQ ID NO: 594091 - DNA, 75 bp, synthetic construct
  source 1..75: mol_type = other DNA
cgcatttacgggagaatatggctgctgaaaaattgcatctttctgagaaagtgttgtctacgttggatggtattt

SEQ ID NO: 594092 - DNA, 75 bp, synthetic construct
  source 1..75: mol_type = other DNA
aagatgcgtgtgggtttactaacccgattcaggcaactcacgaagagattgtggcaatttatcgcgctgcgatgt

SEQ ID NO: 594093 - DNA, 75 bp, synthetic construct
  source 1..75: mol_type = other DNA
ggcctctgaaatgacccgtttctgcatcatcactgacgaagcgcgtcacatcaaaatggcgattgttgataaaca

SEQ ID NO: 594094 - DNA, 75 bp, synthetic construct
  source 1..75: mol_type = other DNA
atactcttcctgtcaatgcaacatacgcttcagagacaacagttgacacacaaaaattctctgacatcctctact

SEQ ID NO: 594095 - DNA, 75 bp, synthetic construct
  source 1..75: mol_type = other DNA
aaagagggactaaccctttcctatatcaaaaatgtcatctggcaggcggagcggggactggggcaggaaacaccc

SEQ ID NO: 594096 - DNA, 75 bp, synthetic construct
  source 1..75: mol_type = other DNA
tccggtgaatgcgggttctgttgatatgctcgaccaactgggtcaggtttcgccagggcatcgggtatggctgcg

SEQ ID NO: 594097 - DNA, 75 bp, synthetic construct
  source 1..75: mol_type = other DNA
ggatttacaggctatttctgcgggcggtgggctttctgttccttatcaacagggtgaagaggcggttgataccga

SEQ ID NO: 594098 - DNA, 75 bp, synthetic construct
  source 1..75: mol_type = other DNA
ttcatattttgcgcttaatgcgcgaacagggcgtgaaagtggattccgtctcattgggggaaatcgaacgcgcgt

SEQ ID NO: 594099 - DNA, 75 bp, synthetic construct
  source 1..75: mol_type = other DNA
agaatgacgagaagcgtgaggagttccgctggatccagtatcgggcacagtacgctaaaggtgaggccaaggctc

SEQ ID NO: 594100 - DNA, 75 bp, synthetic construct
  source 1..75: mol_type = other DNA
gcacattaaggccacaaattaccgaattaatgatgtcggcagatatcgttcgtgtagacctgctccatggtgata

SEQ ID NO: 594101 - DNA, 75 bp, synthetic construct
  source 1..75: mol_type = other DNA
gtttcagagtctgtgtgatgccggatgtgtatccgactcgtaggcctgataagacgcgcaatgaactgaacccca

SEQ ID NO: 594102 - DNA, 75 bp, synthetic construct
  source 1..75: mol_type = other DNA
agctgcgcgttcgtttgccctggcaaatgctgacgttgtcatgcttgttggtgcacgactgaattggttactggc

SEQ ID NO: 594103 - DNA, 75 bp, synthetic construct
  source 1..75: mol_type = other DNA
agcgttattgccatgcccgaagtcagtcactagtgcaatttcgctgttagcaaaagcagaacggccattaattat

SEQ ID NO: 594104 - DNA, 75 bp, synthetic construct
  source 1..75: mol_type = other DNA
tactggcacacggtaaaaaaggatgggcggcagatacacagtttattcaactggatattgaaccgcaggaaattg

SEQ ID NO: 594105 - DNA, 75 bp, synthetic construct
  source 1..75: mol_type = other DNA
ttcatattttgcgcttaatgcgtgagcagggcgtgaaagtggattccgtctcgttaggcgaaatagagcgtgcgt

SEQ ID NO: 594106 - DNA, 75 bp, synthetic construct
  source 1..75: mol_type = other DNA
gccgatgttattgatcaggcgacgctcgagcgcgttagcgaactgcaaattccggtgaatgctggctctattgat

SEQ ID NO: 594107 - DNA, 75 bp, synthetic construct
  source 1..75: mol_type = other DNA
cgatgttgttgatcccgtgcgtttcgtttgccggtttgctgggcagcagtagctcgaccacgccagtgagcaaag

SEQ ID NO: 594108 - DNA, 75 bp, synthetic construct
  source 1..75: mol_type = other DNA
tatagctacatcgccaatatgccgaaatcggaatatgacgaggcgtggcgacaggaaaacgtgacggagtattaa

SEQ ID NO: 594109 - DNA, 75 bp, synthetic construct
  source 1..75: mol_type = other DNA
tactgaaatgctggactggtttaactcccgaaccggcaatattctgcgtcagcaaatctcctttgcggaatccga

SEQ ID NO: 594110 - DNA, 75 bp, synthetic construct
  source 1..75: mol_type = other DNA
ctttcctatatcaaaaatgtcatctggcaggcggagcggggactggggcaggaaacacccgttgagtctctgttg

SEQ ID NO: 594111 - DNA, 75 bp, synthetic construct
  source 1..75: mol_type = other DNA
ggtagaccacggcgtaatgctgccagaaaacacgattgagtcggcgtcgatgaacgtcagtaccaacctgttaca

SEQ ID NO: 594112 - DNA, 75 bp, synthetic construct
  source 1..75: mol_type = other DNA
ccggcaatattctgcgtcagcaaatctcctttgcggaatccgacctaccactgatctaccgcacagagcgggcat

SEQ ID NO: 594113 - DNA, 75 bp, synthetic construct
  source 1..75: mol_type = other DNA
gcatattcgcctgcctgagtttatgctaaaagctgtcggttttgagccgcaggatgccatgctgccctggccgaa

SEQ ID NO: 594114 - DNA, 75 bp, synthetic construct
  source 1..75: mol_type = other DNA
ctcccctgcccgacctgcctgagatgaaagtggaagtgcgcagtctgacagagaatcccccacaggccagtgtga

SEQ ID NO: 594115 - DNA, 75 bp, synthetic construct
  source 1..75: mol_type = other DNA
tcaaaacgttaaacagggatctaataaaaccctgtgttgacgaactgaacaaaaaaagcgacctggctgtaacgg

SEQ ID NO: 594116 - DNA, 75 bp, synthetic construct
  source 1..75: mol_type = other DNA
agcgacctggctgtaacggttgagacgatcaaaaaggggcgcacggttgtagccctgcattttcgcttcaaggaa

SEQ ID NO: 594117 - DNA, 75 bp, synthetic construct
  source 1..75: mol_type = other DNA
ctacaagggcaatttactagagttgtaatcaagaatatatctagattatcaagaagttacagtataaggatatac

SEQ ID NO: 594118 - DNA, 75 bp, synthetic construct
  source 1..75: mol_type = other DNA
atggatttgaatgataaaaatggtgagcttgctttttttaaagaatggaggaatgatttagaacataaactgtta

SEQ ID NO: 594119 - DNA, 75 bp, synthetic construct
  source 1..75: mol_type = other DNA
ttgatttaaaaccagatagaggacatatatactttcataacttctggcggattagtgatgaaaaaagaaagctta

SEQ ID NO: 594120 - DNA, 75 bp, synthetic construct
  source 1..75: mol_type = other DNA
cgaacgcgttggttgaagctagctacaaactaaccttgcaggagcaacgcttgcttttgctttgtattagccgat

SEQ ID NO: 594121 - DNA, 75 bp, synthetic construct
  source 1..75: mol_type = other DNA
tgatgacaatgatacaggggatatcagttcgctgggttctgcaaactatggattcggtgacagtcttacctccaa

SEQ ID NO: 594122 - DNA, 75 bp, synthetic construct
  source 1..75: mol_type = other DNA
atgagttttcttttgccgtgtggtggaattatgaataatatagatttattaaaaactataacaaactacaaaaaa

SEQ ID NO: 594123 - DNA, 75 bp, synthetic construct
  source 1..75: mol_type = other DNA
ctggacatgggtactgcgctgcactgcctgctgcttgagccggatgaattcgataagcgttttgtgaaagagccg

SEQ ID NO: 594124 - DNA, 75 bp, synthetic construct
  source 1..75: mol_type = other DNA
tgggctcaacaactgaatactgcttctgcgctgaccctgaataagtttcagaacaagtcctacttcttcggcgtt

SEQ ID NO: 594125 - DNA, 75 bp, synthetic construct
  source 1..75: mol_type = other DNA
ttaaccgctgggtgaaatcgcagacggccgcgcagaacggcggcgaaggtgtggcaaactggcagtggctggagc

SEQ ID NO: 594126 - DNA, 75 bp, synthetic construct
  source 1..75: mol_type = other DNA
tggcagtggctggaacaacaccccgcgctggcctctgatgtgctggagcgtctcaaacgctggcaccgccgcaag

SEQ ID NO: 594127 - DNA, 75 bp, synthetic construct
  source 1..75: mol_type = other DNA
ttgaaacgtagtctgcttttttctgccgtgctgtatgcggcgtcattgacctccgtccatgcggctcagccgatc

SEQ ID NO: 594128 - DNA, 75 bp, synthetic construct
  source 1..75: mol_type = other DNA
gctgctcagtatcagggtaaaaatgaccgcactgacgtaactgaagctaacggtgatggtttcggtttctccact

SEQ ID NO: 594129 - DNA, 75 bp, synthetic construct
  source 1..75: mol_type = other DNA
ttttatcccaacattgaaagataagataggtgctatattgataggtttatctttctccatgaatatcgtagcgat

SEQ ID NO: 594130 - DNA, 75 bp, synthetic construct
  source 1..75: mol_type = other DNA
atatgagctgataatcgcacattttgttattggggtttcgctccgtacaattgcaaagaagcggaaatgctcaga

SEQ ID NO: 594131 - DNA, 75 bp, synthetic construct
  source 1..75: mol_type = other DNA
ttacaatggccaaatctcagggatattattaggtttacttaaaagcccttcaattcaagaaagaatcaaatattt

SEQ ID NO: 594132 - DNA, 75 bp, synthetic construct
  source 1..75: mol_type = other DNA
atcaggacctggttgaatatattgatgtaggtgcaacctattacttcataaagcgcgcaaaatcatttgataccg

SEQ ID NO: 594133 - DNA, 75 bp, synthetic construct
  source 1..75: mol_type = other DNA
tgaagtatgggcagctggtctgaaatatgatgcgaacaacatctatctggctaccacctattctgaaacccagaa

SEQ ID NO: 594134 - DNA, 75 bp, synthetic construct
  source 1..75: mol_type = other DNA
gctggatgtgctggggatgtcagcgcgtacagtgatgagttatgagcgcgtttgcaggctgtatgaagaatcctc

SEQ ID NO: 594135 - DNA, 75 bp, synthetic construct
  source 1..75: mol_type = other DNA
atcgcatcaaagatgacgatgtgcgtcacgatggtcgtcacgcccacgattatgactatgtccaccgcgttcgtg

SEQ ID NO: 594136 - DNA, 75 bp, synthetic construct
  source 1..75: mol_type = other DNA
ataaagcctttttgaatgaacttgcccgtctggtcggtcattcacacctgctcaccgatcccgcaaaaacggccc

SEQ ID NO: 594137 - DNA, 75 bp, synthetic construct
  source 1..75: mol_type = other DNA
tgaataaatacaaacaagaaaaaaaacgcttcgccaccattaccgcttacgactacagcttcgccaaactgtttg

SEQ ID NO: 594138 - DNA, 75 bp, synthetic construct
  source 1..75: mol_type = other DNA
atggcgatgcagtcgacaaattattaactctgacggtatacccctccatctccgcggaaaacgcaaaacagcaca

SEQ ID NO: 594139 - DNA, 75 bp, synthetic construct
  source 1..75: mol_type = other DNA
gcgagaacgatccgaccaacagcatgaatccggggatcggtaaaaccagtaaacggaaaaactggcaggaagtgg

SEQ ID NO: 594140 - DNA, 75 bp, synthetic construct
  source 1..75: mol_type = other DNA
accaacagcatgaatccggggatcggtaaaaccagtaaacggaaaaactggcaggaagtgggtaagcgtaaactg

SEQ ID NO: 594141 - DNA, 75 bp, synthetic construct
  source 1..75: mol_type = other DNA
gtaccgccgtcagcctttacaccaccacccaaagtggattccgccgtcgtgcgcctggttcctcatgcaacgatg

SEQ ID NO: 594142 - DNA, 75 bp, synthetic construct
  source 1..75: mol_type = other DNA
atgaatcgcgcttccctgattaccttaatacatgtcgcaaaacgcgatctacagcttgaccgggagacctataca

SEQ ID NO: 594143 - DNA, 75 bp, synthetic construct
  source 1..75: mol_type = other DNA
aatgctggatgtgctggggatgtcagcgcgtacagtgataagttatgagcgcgtttgcaggctgtatgaaaaatc

SEQ ID NO: 594144 - DNA, 75 bp, synthetic construct
  source 1..75: mol_type = other DNA
tgcagaaatgcaagcaggacaaaaaacgtttcgcgaccatcaccgcttacgactatagcttcgcaaaactgtttg

SEQ ID NO: 594145 - DNA, 75 bp, synthetic construct
  source 1..75: mol_type = other DNA
tgcagaaatgcaaacaggacaaaaaacgcttcgcgacaataaccgcttacgactacagcttcgctaaattgtttg

SEQ ID NO: 594146 - DNA, 75 bp, synthetic construct
  source 1..75: mol_type = other DNA
ctttaaccagcgtcgtaaaaccattcgtaacagcctcggcaacctgtttagcgtcgaggtgttaacaggaatggg

SEQ ID NO: 594147 - DNA, 75 bp, synthetic construct
  source 1..75: mol_type = other DNA
ggcggcgaccatctcatccggttcctttcgtaccgacggcatgatcgtgattccgtgcagtatgaaaacactcgc

SEQ ID NO: 594148 - DNA, 75 bp, synthetic construct
  source 1..75: mol_type = other DNA
ctggttgctggcgacgatgggcaacatccctcgtccggagtttatcggcatcgccgagaagggcggtaacattga

SEQ ID NO: 594149 - DNA, 75 bp, synthetic construct
  source 1..75: mol_type = other DNA
ttgcactgctggtagcgttcgtggtgtggttgagtacgaaagctgtcagccggatgacagcaattgtgctggggg

SEQ ID NO: 594150 - DNA, 75 bp, synthetic construct
  source 1..75: mol_type = other DNA
cttcgcggagatgtcgctgaacgtccctgcacgggcagctggatttggttttgcactgctggtagcgttcgtggt

SEQ ID NO: 594151 - DNA, 75 bp, synthetic construct
  source 1..75: mol_type = other DNA
gtaacgcttggtctgttcgattatctggcagatctgtttggtttcgacgactcggctctgggtcgctttaaaacg

SEQ ID NO: 594152 - DNA, 75 bp, synthetic construct
  source 1..75: mol_type = other DNA
gcaaaggctggaatgtcgtcaacggtatctctattgcctttgtgctatacattctgacctacgcctatatttctg

SEQ ID NO: 594153 - DNA, 75 bp, synthetic construct
  source 1..75: mol_type = other DNA
cgaaagtcattactttcttcctcaccttcggtagcctgctggggcatgtgcagcctgcgacattgttcaacgtcg

SEQ ID NO: 594154 - DNA, 75 bp, synthetic construct
  source 1..75: mol_type = other DNA
ttgccccgcagtacaacatcgagatcaataacgatggcacgaacgggcagataggtccggctgccctgaaggtgg

SEQ ID NO: 594155 - DNA, 75 bp, synthetic construct
  source 1..75: mol_type = other DNA
gcctgcgcccgcattggcgcggtgcattcggtgattttcggcggcttctcgccggaagccgttgccgggcgcatt

SEQ ID NO: 594156 - DNA, 75 bp, synthetic construct
  source 1..75: mol_type = other DNA
ggcaagccgagcgaacacctcattaaagacttattcgccgacggcgttcttgttgctgttaatccgattggctac

SEQ ID NO: 594157 - DNA, 75 bp, synthetic construct
  source 1..75: mol_type = other DNA
gagctcttttccagagaagataaacccctatccggagagagttatatacgtcagcatgttgaaatttttctttca

SEQ ID NO: 594158 - DNA, 75 bp, synthetic construct
  source 1..75: mol_type = other DNA
ttaagacaggtgtaatgtacgaaatattaaacgttttgagtgaaccgccccgggtttcctggagagtgttttatc

SEQ ID NO: 594159 - DNA, 75 bp, synthetic construct
  source 1..75: mol_type = other DNA
caataacgatggcacgaacgggcagataggtccggctgccctgaaggtggtttatgacctcgggaaaaaagcggc

SEQ ID NO: 594160 - DNA, 75 bp, synthetic construct
  source 1..75: mol_type = other DNA
gtggttgagcaccaaagccgtcagccggatgacggcgattgtgctgggggcgaaagttattaccttcttcctcac

SEQ ID NO: 594161 - DNA, 75 bp, synthetic construct
  source 1..75: mol_type = other DNA
tggcacaattaggaaggaattgcagactgccatggggtttgttgacggctgtttagcaatgttagcttatagtat

SEQ ID NO: 594162 - DNA, 75 bp, synthetic construct
  source 1..75: mol_type = other DNA
gtgcgcatcccgctcaatgagcgggaacggattcaggtagacgagccttacatcctgatcgtgccctcttacggc

SEQ ID NO: 594163 - DNA, 75 bp, synthetic construct
  source 1..75: mol_type = other DNA
ggttatataactatgcatgcagtgactccggtattgaactggttgggatcgcaaaaaaaccaggaagggtcaggt

SEQ ID NO: 594164 - DNA, 75 bp, synthetic construct
  source 1..75: mol_type = other DNA
ggtgctggtgccgcgtgaaatgccgcttagcaccatccatctcgaaaatatgctcgcactttcgcgcatgggcgt

SEQ ID NO: 594165 - DNA, 75 bp, synthetic construct
  source 1..75: mol_type = other DNA
aaaaagacgtgatggctcagcgccagacttttgctcagaaagcgcaggcttttgagcaggatcgcgcacgtcgtt

SEQ ID NO: 594166 - DNA, 75 bp, synthetic construct
  source 1..75: mol_type = other DNA
cgcaatggcccaccctgcggcgaggtggatgctggaagcaccaggtcactatgaagcgtcgatgtactggaatga

SEQ ID NO: 594167 - DNA, 75 bp, synthetic construct
  source 1..75: mol_type = other DNA
tgtccacaggaaacctgcgcagccattgaacgactgattgcaatactcgccaacccagacgaactgaaggggtgc

SEQ ID NO: 594168 - DNA, 75 bp, synthetic construct
  source 1..75: mol_type = other DNA
atggcaacactaaccactacccaaacatcaccgtcgctgcttggcggcgtggtgattatcggtggcaccattatt

SEQ ID NO: 594169 - DNA, 75 bp, synthetic construct
  source 1..75: mol_type = other DNA
gtgctgaacagtcgtagtctggatctgctactggtcgtgttctcaaactttgcggtagcgagttcgttcctcggc

SEQ ID NO: 594170 - DNA, 75 bp, synthetic construct
  source 1..75: mol_type = other DNA
gcgtgtttagtcattctccctttaaagtacggttaatactgctctctatgttgtgcgatatggtcaacaacaaac

SEQ ID NO: 594171 - DNA, 75 bp, synthetic construct
  source 1..75: mol_type = other DNA
tccccggaggaaacctgttcatccattgaacgactgattgcaatactcgccaacccagacgaactgaaggggtgc

SEQ ID NO: 594172 - DNA, 75 bp, synthetic construct
  source 1..75: mol_type = other DNA
gaaagagaagcactcctccccgctggaaacctgttcagccattgaacgactgattgcaacgctcacgaacaacac

SEQ ID NO: 594173 - DNA, 75 bp, synthetic construct
  source 1..75: mol_type = other DNA
caagatgcagacgtttgaacagggactgattgatgtctaccggaaattgtcatgggattacagaaccaataatcc

SEQ ID NO: 594174 - DNA, 75 bp, synthetic construct
  source 1..75: mol_type = other DNA
atattttacggtgcgtggctaccagaaagggaccgtacacattgtctttaagcgtcctgaccttgttgaaaaact

SEQ ID NO: 594175 - DNA, 75 bp, synthetic construct
  source 1..75: mol_type = other DNA
atgagcgacacctgtcctgaaatcaccctggacaatgtactggcaacttttcgctatctgaatgccagcaagatg

SEQ ID NO: 594176 - DNA, 75 bp, synthetic construct
  source 1..75: mol_type = other DNA
gatctaaccttaccaggaatggatggtcgcgatattttgcgcgagtggcggaataaaggccagcgtgaaccagta

SEQ ID NO: 594177 - DNA, 75 bp, synthetic construct
  source 1..75: mol_type = other DNA
catgggattacagaagcaataatccctgtcgtctgggcaagagaatcattattgaaaacctgctgtaccgctgga

SEQ ID NO: 594178 - DNA, 75 bp, synthetic construct
  source 1..75: mol_type = other DNA
gaacagcatcggggcgcagtatggtgaatatctcgggaacggcgacaatatcggtgagttgtttgaaggggaata

SEQ ID NO: 594179 - DNA, 75 bp, synthetic construct
  source 1..75: mol_type = other DNA
gagtgctggcgacctcgtttggctactcttcggtatttcttgctggggcgatatcggcggtgctggggattatcg

SEQ ID NO: 594180 - DNA, 75 bp, synthetic construct
  source 1..75: mol_type = other DNA
tttggcggcgtaaaagtggcgattgtctctctgctggtggaaacgataggcttgttgttgctctggcaggcgccg

SEQ ID NO: 594181 - DNA, 75 bp, synthetic construct
  source 1..75: mol_type = other DNA
accatggtcgggattgccgtcggcattcagtttctggctacggtgctgacgcgtggctatgccgggcgactggcc

SEQ ID NO: 594182 - DNA, 75 bp, synthetic construct
  source 1..75: mol_type = other DNA
gtccgctgacaatatcaccgtgaaaaccagtgagtttgtactggaggctgaccgcacgcggattaacagcgaagt

SEQ ID NO: 594183 - DNA, 75 bp, synthetic construct
  source 1..75: mol_type = other DNA
gcccgctgacaatatcaccttgaaaaccagtgagtttgtactggaggctgaccgcacgcgaattaacagcgaagt

SEQ ID NO: 594184 - DNA, 75 bp, synthetic construct
  source 1..75: mol_type = other DNA
gttcgcggcaccgcactgggcggttacgccgcgtttcaggatatcgccctcggcgtctccgggccgctggcggga

SEQ ID NO: 594185 - DNA, 75 bp, synthetic construct
  source 1..75: mol_type = other DNA
gaaaaactgtatacctgggacgaagaagtcaccagtaatgccgtcgaagtacatgtgcatcatctgcgacgcaag

SEQ ID NO: 594186 - DNA, 75 bp, synthetic construct
  source 1..75: mol_type = other DNA
atgaaaccaaccacgattgcttcattgcagaaatgcaagcaggataaaaagcgttttgcgaccatcaccgcttac

SEQ ID NO: 594187 - DNA, 75 bp, synthetic construct
  source 1..75: mol_type = other DNA
gcgactgtcatgcgtgctggggccaacatggtcaaaattgaaggcggcgagtggctggtagaaaccgtacaaatg

SEQ ID NO: 594188 - DNA, 75 bp, synthetic construct
  source 1..75: mol_type = other DNA
atgaaaccaaccactattgcttcattgcaaaaatgcaaacaagaaaaaaaacgtttcgcgaccatcactgcttac

SEQ ID NO: 594189 - DNA, 75 bp, synthetic construct
  source 1..75: mol_type = other DNA
tctgcccgttcattctgtgatgccgtcagccgtgccgcctgctggcagaaagcaacgcgccttcgcctgttccag

SEQ ID NO: 594190 - DNA, 75 bp, synthetic construct
  source 1..75: mol_type = other DNA
gtgaactgtccgaagatatggggctgtccggctacttcatcgtgctcaccacgccgtcacgttttcacccgacga

SEQ ID NO: 594191 - DNA, 75 bp, synthetic construct
  source 1..75: mol_type = other DNA
ccggtcctccggtgtctttgatgcgtttaatgagctggtctgtacgctggaagatgcgcataacgcctctgtttc

SEQ ID NO: 594192 - DNA, 75 bp, synthetic construct
  source 1..75: mol_type = other DNA
gaccgctgacaatatcaccgtgaaaaccagtgagtttgtactggaggctgaccgcacgcgtattaacagcgaagt

SEQ ID NO: 594193 - DNA, 75 bp, synthetic construct
  source 1..75: mol_type = other DNA
caaagcctgcttacatccttgcgtaacctacgtgaagaattagcaaaccctgcaactgatttggatgttacgttt

SEQ ID NO: 594194 - DNA, 75 bp, synthetic construct
  source 1..75: mol_type = other DNA
ccacaaacgacagaaggtagggtgtttgcggaggcattgccttacctggctactgttggcgttggcggcgcttca

SEQ ID NO: 594195 - DNA, 75 bp, synthetic construct
  source 1..75: mol_type = other DNA
atgtgccgtcatcgcgtgatgctggtgttaagttatcaacgactttgtgccaccgcccagcctacggaaaaaaaa

SEQ ID NO: 594196 - DNA, 75 bp, synthetic construct
  source 1..75: mol_type = other DNA
cctgctcttagtgaagatggaaagaacgctatgcgtgctgcttatatcagcaagattgcagaaaaagcaggagac

SEQ ID NO: 594197 - DNA, 75 bp, synthetic construct
  source 1..75: mol_type = other DNA
cgcgaaagccgcaactgatgccgtggagagggcaatgggggcagatttgaggaataacgcagcgcggtatttggg

SEQ ID NO: 594198 - DNA, 75 bp, synthetic construct
  source 1..75: mol_type = other DNA
atgactgctgtaagccaaaccgaaacacgatcttctgccaatttttcgctcttccgcatcgcttttgcggttttt

SEQ ID NO: 594199 - DNA, 75 bp, synthetic construct
  source 1..75: mol_type = other DNA
ggaaatggtggcccagggggggacaggcagtgaaaccatcgtcagggatactgttgccaaatggcgtaaaggctg

SEQ ID NO: 594200 - DNA, 75 bp, synthetic construct
  source 1..75: mol_type = other DNA
gggaaacgggctgcaacggcagagggtctccgttgcagtgctgatactctccttcgcagggttatcaataccccg

SEQ ID NO: 594201 - DNA, 75 bp, synthetic construct
  source 1..75: mol_type = other DNA
atcgtcagggatgctgttgccaaatggcgtaaaggctggatcccaccggttactactgccgcaagacttccttca

SEQ ID NO: 594202 - DNA, 75 bp, synthetic construct
  source 1..75: mol_type = other DNA
cagcagaatttcggcgcgtggcggcggggatggaagctgatgctgcagctatatgtgaggcaatcagtagtcgct

SEQ ID NO: 594203 - DNA, 75 bp, synthetic construct
  source 1..75: mol_type = other DNA
atgatgtacagacatatgcctctgatacgtcttgttgtcagagagttatcactgaagaaatcacctgagccagaa

SEQ ID NO: 594204 - DNA, 75 bp, synthetic construct
  source 1..75: mol_type = other DNA
aaggtcatgtaaatcgcctgaagatgctaaaacgccagatgtatggtagagccggatttgaactactcaggcaga

SEQ ID NO: 594205 - DNA, 75 bp, synthetic construct
  source 1..75: mol_type = other DNA
tctgttcatagttgtcgtcggcgccggatacagcatctaccctgctcaggacatacgctatggcttgtattttcc

SEQ ID NO: 594206 - DNA, 75 bp, synthetic construct
  source 1..75: mol_type = other DNA
cgttacaaaatttacagcgtcaactgggattaatagccggaggtgaggccgggaaacgggcagcaacggcactgg

SEQ ID NO: 594207 - DNA, 75 bp, synthetic construct
  source 1..75: mol_type = other DNA
atgggcaacgcaatgcagtctcttaagacacttctacagttaccttgcagatggcgatgcagtcgacaaattatt

SEQ ID NO: 594208 - DNA, 75 bp, synthetic construct
  source 1..75: mol_type = other DNA
gcgttacaaaatttacaacgtcaactgggattaatagctggaggtgaggctggaaaacgggctgcaacggcagcg

SEQ ID NO: 594209 - DNA, 75 bp, synthetic construct
  source 1..75: mol_type = other DNA
atgggcaacgcaatgcactctcttaaaacacttctacagttaccttgcggatggcgatgcagtcgacaaattatt

SEQ ID NO: 594210 - DNA, 75 bp, synthetic construct
  source 1..75: mol_type = other DNA
acagcagcacgtgaaggtgcacctcaggccagacaggtggccgatcgatggcacctgctaaaaaatattggcgat

SEQ ID NO: 594211 - DNA, 75 bp, synthetic construct
  source 1..75: mol_type = other DNA
tacggcagtattagccactgtgggactacggcattagccgtggtatctcgtcaaccgattggcattgatatagaa

SEQ ID NO: 594212 - DNA, 75 bp, synthetic construct
  source 1..75: mol_type = other DNA
tgacccagggctttaagatggggaatgccgagatcgagccgccgaaatcgatctctacggctaccgcagtgactg

SEQ ID NO: 594213 - DNA, 75 bp, synthetic construct
  source 1..75: mol_type = other DNA
gatgacccgtatcgctcgtcttgagggcgtgaaagcgcgcgtggctccaatcctttatatggaaggtgcctgcgg

SEQ ID NO: 594214 - DNA, 75 bp, synthetic construct
  source 1..75: mol_type = other DNA
ccaacccagcgcgacctgctggccgggatcgtggctaaacactatgcacgtcagcacctgctgccgcgtgacgtg

SEQ ID NO: 594215 - DNA, 75 bp, synthetic construct
  source 1..75: mol_type = other DNA
gtcccctcgtcctgcttcccggccgtgatcagcgtacgctggcgacctggttcagaaaatatccggaaatacagg

SEQ ID NO: 594216 - DNA, 75 bp, synthetic construct
  source 1..75: mol_type = other DNA
aaaagagcaacgagaaagtggtaattataacgccagccggatatggcgggaaatggtggcccggggatttacagg

SEQ ID NO: 594217 - DNA, 75 bp, synthetic construct
  source 1..75: mol_type = other DNA
ccaaatggcgtaaaggctggatcccaccggttactactgccgccagacttccttcagtgtcccgggtaagccggt

SEQ ID NO: 594218 - DNA, 75 bp, synthetic construct
  source 1..75: mol_type = other DNA
agttaccttgcggatggcgatgcagtcgacaaattattagctctgacggtatcaccctccatctccacggaaaac

SEQ ID NO: 594219 - DNA, 75 bp, synthetic construct
  source 1..75: mol_type = other DNA
gtgcctgcagcatcgctccgtcgtccggaacgcctaaaacaacaaacccgcaaaaaacggcatcagcgttggaca

SEQ ID NO: 594220 - DNA, 75 bp, synthetic construct
  source 1..75: mol_type = other DNA
atgtcagattatgtccaacatttggggtgcagttcaaacgccttatccggcctacaaaaatcttgccaattcaat

SEQ ID NO: 594221 - DNA, 75 bp, synthetic construct
  source 1..75: mol_type = other DNA
gattggtctggaaaatgaactgactgcggaagacgtggcgagcgccgatatggtgattctgaccaaagatatcgg

SEQ ID NO: 594222 - DNA, 75 bp, synthetic construct
  source 1..75: mol_type = other DNA
ggcaagaccatcgtgcgcgtcaacatcagcgacgcggtaaaacgcgctgacgccattatgagcaaaattgaagct

SEQ ID NO: 594223 - DNA, 75 bp, synthetic construct
  source 1..75: mol_type = other DNA
gacttccttcagtgtcccgggtaagccgctggttgatgccctggagaataatcaggggtgaagaaaattatgctt

SEQ ID NO: 594224 - DNA, 75 bp, synthetic construct
  source 1..75: mol_type = other DNA
ccgttgtgggtcgcggttaatgagcgggatcagccggttgggtttatgttgttaagtgggcagcatatggatgcg

SEQ ID NO: 594225 - DNA, 75 bp, synthetic construct
  source 1..75: mol_type = other DNA
ttgggccgttggtggagatataagtggatcacttttcatccgtcgttgacagcagagtatcgggccgagctggaa

SEQ ID NO: 594226 - DNA, 75 bp, synthetic construct
  source 1..75: mol_type = other DNA
gaactgacaaccaatgttaatgagcaaaatgagcaggcggtggggttctataagaagatgggctttaaggtttca

SEQ ID NO: 594227 - DNA, 75 bp, synthetic construct
  source 1..75: mol_type = other DNA
gcttaatcgtgctatcaatgatgcggagtcggtactggggacaacccgccgccgtcgcccgctgggagtgaggtt

SEQ ID NO: 594228 - DNA, 75 bp, synthetic construct
  source 1..75: mol_type = other DNA
tttttgatatggatggcacaatcctggatacagaacccacgcaccgtaaagcgtggcgtgaagtattaggacgct

SEQ ID NO: 594229 - DNA, 75 bp, synthetic construct
  source 1..75: mol_type = other DNA
aaacacagtccactcctgtacagaataacaaacgatatgaataggtctggtttattatcaagtgagtcagcgaaa

SEQ ID NO: 594230 - DNA, 75 bp, synthetic construct
  source 1..75: mol_type = other DNA
aactgaatgtggtggtaaatccgaaagcgctgttcgatgtgcaaatcaaacgtattcacgaatacaaacgtcaat

SEQ ID NO: 594231 - DNA, 75 bp, synthetic construct
  source 1..75: mol_type = other DNA
caaccagggtgactacttcgcggcagtggaagataaaaaccactccgagaacgtatctcgcgtactgtatccgga

SEQ ID NO: 594232 - DNA, 75 bp, synthetic construct
  source 1..75: mol_type = other DNA
gcgttcaaccgcagcagttgcccgattactgggggcttgccggaataagcagttcaaaggtaccgggtgttgcgg

SEQ ID NO: 594233 - DNA, 75 bp, synthetic construct
  source 1..75: mol_type = other DNA
gaaaacgctggcagcagaacagcaaaatggtgtgctgaaagtcgtgatcagtcgcggtagtggcgggcgagggta

SEQ ID NO: 594234 - DNA, 75 bp, synthetic construct
  source 1..75: mol_type = other DNA
accatggtcggcattgccgtcgggattcagtttctggctacggtgctgacgcgtggctatgccgggcgactggcc

SEQ ID NO: 594235 - DNA, 75 bp, synthetic construct
  source 1..75: mol_type = other DNA
tgtcctggggagtaggtctggtaggtccgactcgttcagggaaggtcatgtcatggaacgggatggcaatttatg

SEQ ID NO: 594236 - DNA, 75 bp, synthetic construct
  source 1..75: mol_type = other DNA
accatggtcgggattgctgtcggtgtgcagtttctggcaacagtgttgacgcgcggatatgccggaaaacttgct

SEQ ID NO: 594237 - DNA, 75 bp, synthetic construct
  source 1..75: mol_type = other DNA
ggggtttgatgcctggctggaccagcgctgggatacgccgggcattcttgccggcgtgacgttttcattgcctgc

SEQ ID NO: 594238 - DNA, 75 bp, synthetic construct
  source 1..75: mol_type = other DNA
aggacgtaatggttattccggcgagaaatgattcaccggatttgagatggcaggagccggagtgggatgtggcaa

SEQ ID NO: 594239 - DNA, 75 bp, synthetic construct
  source 1..75: mol_type = other DNA
tatctggaaaccaggcggttacgccgcgtttcaggatatcgccctcggcgtctccgggccgctggcgggaatgct

SEQ ID NO: 594240 - DNA, 75 bp, synthetic construct
  source 1..75: mol_type = other DNA
cagttatcacaaatggctacctgccggttcgttaaaatatgcaatgaccgatgcctggaatgtctatctggcagc

SEQ ID NO: 594241 - DNA, 75 bp, synthetic construct
  source 1..75: mol_type = other DNA
gacttaatgatgcctgctgcggaacagcccatagcagcgtttattgctcaattctcgaagctcttgagcaaggtg

SEQ ID NO: 594242 - DNA, 75 bp, synthetic construct
  source 1..75: mol_type = other DNA
cgctctcatcttgagcagacaaacgctgatgaggcgttggtccttgacagcgaagggtgggttacggaatgctgt

SEQ ID NO: 594243 - DNA, 75 bp, synthetic construct
  source 1..75: mol_type = other DNA
tcgcttcttatcttgggtgggaatcattacggcacgatacctggccgacagaacgaaaattcaatatctggttgt

SEQ ID NO: 594244 - DNA, 75 bp, synthetic construct
  source 1..75: mol_type = other DNA
atgaagagtggaagccgggacaggttccaaatactgagcgattcctgccattcatcagccagcgcaatactgtgt

SEQ ID NO: 594245 - DNA, 75 bp, synthetic construct
  source 1..75: mol_type = other DNA
ttatggcgcggtgatgaaaattgatcctgctgatcccgactggcctgatcgtgactattttgtattgtcaaaagg

SEQ ID NO: 594246 - DNA, 75 bp, synthetic construct
  source 1..75: mol_type = other DNA
aaaattctgccgcgccatttgcagattatctttgaaatcaacgactatttcctgaaaaccttgcaggagcagtat

SEQ ID NO: 594247 - DNA, 75 bp, synthetic construct
  source 1..75: mol_type = other DNA
gacaacgtcgaagccgcaggctttgtctcgcacctcaaactcccgcactacgtcgatttccaggccgaactggag

SEQ ID NO: 594248 - DNA, 75 bp, synthetic construct
  source 1..75: mol_type = other DNA
tttacccctgctcacgttcttcccgtttgcagcagttaatgcgcggcgacgaaggctatttgctggcgctggcct

SEQ ID NO: 594249 - DNA, 75 bp, synthetic construct
  source 1..75: mol_type = other DNA
tggcggcgctggcgctgaaacaggccagcggcgataacgtcgaagcgattttcctgctgcgcgcctaccgcacca

SEQ ID NO: 594250 - DNA, 75 bp, synthetic construct
  source 1..75: mol_type = other DNA
attctttcacctggaacctctaccagtacttttgtgaactgggggccgacgtgttggttaagcgcaacgatgcgt

SEQ ID NO: 594251 - DNA, 75 bp, synthetic construct
  source 1..75: mol_type = other DNA
gtatttttgcgaactgggagctgatgtgctggttaagcgtaacgatgcgttgacgttggcagatatcgacgccct

SEQ ID NO: 594252 - DNA, 75 bp, synthetic construct
  source 1..75: mol_type = other DNA
agtgggatctggaaggggtgcagttccatccagaaagtattcttagcgaacaaggacatcaactgctggctaatt

SEQ ID NO: 594253 - DNA, 75 bp, synthetic construct
  source 1..75: mol_type = other DNA
tggtgacactttaagctctaatcaatggggggccataaatggcaaaaagtggatatttgatgcatccagtaaagg

SEQ ID NO: 594254 - DNA, 75 bp, synthetic construct
  source 1..75: mol_type = other DNA
cactggttatctttaccgtattgggccaatgcgtcgtaggcgcgctgattattagcggaatcggctggttcgcca

SEQ ID NO: 594255 - DNA, 75 bp, synthetic construct
  source 1..75: mol_type = other DNA
agagcaacgtttactcagacaattgattcatcatgaaatgaaccggcaggacacgcttgtcattccagatctaag

SEQ ID NO: 594256 - DNA, 75 bp, synthetic construct
  source 1..75: mol_type = other DNA
ataaagacattcctggcggccagctgcttggcccgacctacgactacacccatcgcctgctcgatttcaccctgc

SEQ ID NO: 594257 - DNA, 75 bp, synthetic construct
  source 1..75: mol_type = other DNA
gtgttcggcatgagcgagcgcaaagcgatggcaatggcgctggtcgatcgtgcgttgcaggctccggagtacggc

SEQ ID NO: 594258 - DNA, 75 bp, synthetic construct
  source 1..75: mol_type = other DNA
gcttggccctacctacgactacacccatcgcctgctcgatttcaccctgttggcaaacggtgaagcaccaacgct

SEQ ID NO: 594259 - DNA, 75 bp, synthetic construct
  source 1..75: mol_type = other DNA
atgcggggggctgagtacgtcatcatcagtaagggagcactgcatggccgcgatgcgctggaactggtatttgaa

SEQ ID NO: 594260 - DNA, 75 bp, synthetic construct
  source 1..75: mol_type = other DNA
cgtattcacgaatacaaacgtcaattgatgaatgtgttgcacgtgattacccgctataaccgcatcaaggccgac

SEQ ID NO: 594261 - DNA, 75 bp, synthetic construct
  source 1..75: mol_type = other DNA
tgacccgggcctcggtaacggtggcctgggacgtctggcggcttgcttcctcgattctctggcgacgttagggtt

SEQ ID NO: 594262 - DNA, 75 bp, synthetic construct
  source 1..75: mol_type = other DNA
gctgactttgcgaaaatcttcccgggacgtttcaccaatgtcaccaacggcgtgacgccacgtcgctggctggcg

SEQ ID NO: 594263 - DNA, 75 bp, synthetic construct
  source 1..75: mol_type = other DNA
aagaaaacgcgctggattgaaaccgaagagattctggccgtggcttacgaccaaatcatcccaggttatgatact

SEQ ID NO: 594264 - DNA, 75 bp, synthetic construct
  source 1..75: mol_type = other DNA
tatgactatggtatgttcaaacagaacatcgttaacggcagtcagaaagagtctccggactactggctggagtac

SEQ ID NO: 594265 - DNA, 75 bp, synthetic construct
  source 1..75: mol_type = other DNA
gatcaacttcggcgatcactaccaggtactggcggattatcgcagctatgtcgattgtcaggataaagtcgacga

SEQ ID NO: 594266 - DNA, 75 bp, synthetic construct
  source 1..75: mol_type = other DNA
aaccgcattaagtttaataaagaaattgatattgaatgttatgttaataaagaaattgctgcatttgatgcaatg

SEQ ID NO: 594267 - DNA, 75 bp, synthetic construct
  source 1..75: mol_type = other DNA
gatgacggacgaggtattgatgcaggacgagagatactttcatttcaggaaggcactatcgtctccggttttgat

SEQ ID NO: 594268 - DNA, 75 bp, synthetic construct
  source 1..75: mol_type = other DNA
gagcatcgatcattgatgaatcgaacggacgtcgtgtgcggatggcctggctggcggttgtggtgagccacaaag

SEQ ID NO: 594269 - DNA, 75 bp, synthetic construct
  source 1..75: mol_type = other DNA
attcacgaagtttgcggatgaaaatccccgggttattcgcggcgtcgtcgggcttgctgccggtcttgcgattct

SEQ ID NO: 594270 - DNA, 75 bp, synthetic construct
  source 1..75: mol_type = other DNA
ttacttatgtatttcctataataatagcgggactattggctaaagaaggtcaaatattagtcatcgatagcccag

SEQ ID NO: 594271 - DNA, 75 bp, synthetic construct
  source 1..75: mol_type = other DNA
aaattgcgtcacttcggtggtctgacgtagatttcaaatggtcaagcatgaggattaaagacaagatcgaaggcg

SEQ ID NO: 594272 - DNA, 75 bp, synthetic construct
  source 1..75: mol_type = other DNA
ctgtatgcgggaaaaacccttcgcatgaccattggcaacattaacgattggaggattgatgatgcgagggccgaa

SEQ ID NO: 594273 - DNA, 75 bp, synthetic construct
  source 1..75: mol_type = other DNA
aacacaacgtgatcgtcgacgtgaaaaaggttgcagacatggatcgctttgctcgtcacatcgaggaattccgct

SEQ ID NO: 594274 - DNA, 75 bp, synthetic construct
  source 1..75: mol_type = other DNA
tgaatattgccgcgtacctgtccccaaaaagccagatgcggcgctatgcctcaagattgagcgtgtacgtcgcaa

SEQ ID NO: 594275 - DNA, 75 bp, synthetic construct
  source 1..75: mol_type = other DNA
caggaaattgttgggatttatggttctttagaagaagcccagctaaaaaaggccgagcttgaagaaaaattaaag

SEQ ID NO: 594276 - DNA, 75 bp, synthetic construct
  source 1..75: mol_type = other DNA
ggaggtctggataaacttgaggggatgtttggttttattgatcaagttgataagtttaacaatataaagaaaaaa

SEQ ID NO: 594277 - DNA, 75 bp, synthetic construct
  source 1..75: mol_type = other DNA
tattgatcagcaactgttctcaccaatcattcattttgtcctacaggcatcggaacacgcccagctgtcgttgtt

SEQ ID NO: 594278 - DNA, 75 bp, synthetic construct
  source 1..75: mol_type = other DNA
tgtggtctcttcccgccctgaagataccgacttgcaagacgatagccatatcgacaaacattacaaagttgttct

SEQ ID NO: 594279 - DNA, 75 bp, synthetic construct
  source 1..75: mol_type = other DNA
aaaggcttatccggcaaataaattgcctgatttacgtggtgagtttattcgcggctgggatgacgggcgcggggt

SEQ ID NO: 594280 - DNA, 75 bp, synthetic construct
  source 1..75: mol_type = other DNA
atgatgccacacggcaaaccgtggtatgccgcgcatattgaacaactgggttatcacaaaggcattgatttactg

SEQ ID NO: 594281 - DNA, 75 bp, synthetic construct
  source 1..75: mol_type = other DNA
ggacgatttatatcaacgaagcgaaagcggcaatggaaagtggcgctatcacgttgaagcaatacgagctgctgg

SEQ ID NO: 594282 - DNA, 75 bp, synthetic construct
  source 1..75: mol_type = other DNA
tgctggctggctgcttgtcgcggaatttattttcactctggcgatggctctgaaatgctatccgctgctccccgg

SEQ ID NO: 594283 - DNA, 75 bp, synthetic construct
  source 1..75: mol_type = other DNA
aaaaagccagatgcggcgctatgcctcaagattgagcgtgtacgtcgcaatgcacgggatggtcgctataagttg

SEQ ID NO: 594284 - DNA, 75 bp, synthetic construct
  source 1..75: mol_type = other DNA
aagcatcctcactggcttctctgcgtcagcctcagcgagataaagacggtcaaatcattaaagggtctgtatggg

SEQ ID NO: 594285 - DNA, 75 bp, synthetic construct
  source 1..75: mol_type = other DNA
atttgatgcagagacattagatccacgctggatggatgtactggaaaaaagttgttatcacaaaaataagagtgt

SEQ ID NO: 594286 - DNA, 75 bp, synthetic construct
  source 1..75: mol_type = other DNA
gcgaattgctggccgagtttttgtcccgcaacccacatcaaaaattcactcagccaggggagtttatcgggccat

SEQ ID NO: 594287 - DNA, 75 bp, synthetic construct
  source 1..75: mol_type = other DNA
agcatttgaaccgttagttgacctgtatatcgatatagtgtgtaaaccattcggggcactacacaataaaattaa

SEQ ID NO: 594288 - DNA, 75 bp, synthetic construct
  source 1..75: mol_type = other DNA
gcttggaatgaacaagttgtcggctccgggataaaaacaccgcctggtcagtatggtttgcaaagttacggcgat

SEQ ID NO: 594289 - DNA, 75 bp, synthetic construct
  source 1..75: mol_type = other DNA
ctattacgctggtgtgatggcgaaaaaaggcgtgatatcaggcgaaattgacactgatatctggaaacaggctgt

SEQ ID NO: 594290 - DNA, 75 bp, synthetic construct
  source 1..75: mol_type = other DNA
gggattgataccgtcaacgacatcattaaccgctgggcgccgccgtctgacaataacaacaccgacacctatatc

SEQ ID NO: 594291 - DNA, 75 bp, synthetic construct
  source 1..75: mol_type = other DNA
aacgtgttagtgataactgaggcatacggtaattctgatgacattccgtatagattcacgatgaatcaattccgc

SEQ ID NO: 594292 - DNA, 75 bp, synthetic construct
  source 1..75: mol_type = other DNA
cgtcgtacactgctaaaccttgaggcccgtggagagttcccggagcgtgtgcaggttacggaagggcgtaaggcc

SEQ ID NO: 594293 - DNA, 75 bp, synthetic construct
  source 1..75: mol_type = other DNA
ggcatgagataagccaactcaatgcctatgaagaaggtcagttccaggcgactctggcgaacaacggaaaactgg

SEQ ID NO: 594294 - DNA, 75 bp, synthetic construct
  source 1..75: mol_type = other DNA
ggtatttgctgaaagatgatggaactcctgtcgttatcgatctcacacaacagcgccagaggttctcagggggga

SEQ ID NO: 594295 - DNA, 75 bp, synthetic construct
  source 1..75: mol_type = other DNA
ggtgaaactggtgaaggatatgcagcgcgcgcccaaacctatgatgccgttgtctctgctgccagtactgttctt

SEQ ID NO: 594296 - DNA, 75 bp, synthetic construct
  source 1..75: mol_type = other DNA
ctgtatttgcctgacacaaaattcattctttcagatgaaccgggaacgcttgcatggtatccggctaacagcaca

SEQ ID NO: 594297 - DNA, 75 bp, synthetic construct
  source 1..75: mol_type = other DNA
tgaagcgtcagcgcaggtcggttccattgttaactgtatgttcaaccgtgactgcatgacgcatacccatatcaa

SEQ ID NO: 594298 - DNA, 75 bp, synthetic construct
  source 1..75: mol_type = other DNA
ctgtggtgtaactacgggcagctacatcgagatttttcgtattgctacagcaaaggcgtgttcaaacgcgttctg

SEQ ID NO: 594299 - DNA, 75 bp, synthetic construct
  source 1..75: mol_type = other DNA
cctataaatccgtttttgacttaggtccggcggcagagaaatacacagtaaaaatgagcggctgccactcttgcc

SEQ ID NO: 594300 - DNA, 75 bp, synthetic construct
  source 1..75: mol_type = other DNA
gtggctggattatctggatgcactggagctggttgatacctccagtgcgccagatattgaatggcctacgcctcc

SEQ ID NO: 594301 - DNA, 75 bp, synthetic construct
  source 1..75: mol_type = other DNA
gaaaacttgagctcatgcgtgatagcgcaatggctcatccggcggcacgctggatgttggaagcacctggttact

SEQ ID NO: 594302 - DNA, 75 bp, synthetic construct
  source 1..75: mol_type = other DNA
ctggatatgggaaccgcattgcactgtctgcttctggagcctggagagttcgacaaacgcttcattgtttcaccg

SEQ ID NO: 594303 - DNA, 75 bp, synthetic construct
  source 1..75: mol_type = other DNA
cgcccatatggggggattttttgccgcgcaaatgaaattcgccggatacgacgtcattattattgaaggtaaagc

SEQ ID NO: 594304 - DNA, 75 bp, synthetic construct
  source 1..75: mol_type = other DNA
cgaaggagcaatgagggttactggtcagccgcatggttttttctttcttgccgtgagcgaaagcattgattgtgg

SEQ ID NO: 594305 - DNA, 75 bp, synthetic construct
  source 1..75: mol_type = other DNA
catgaacagtaaacaatggcctggtaaagccgctattggtcgtctgaaaggtgacgaactggcgcaatataattt

SEQ ID NO: 594306 - DNA, 75 bp, synthetic construct
  source 1..75: mol_type = other DNA
cttaggtccggcggcagagaaatacacggtaaaaatgagcggctgccactcttgcccaattcgttgtatgaccca

SEQ ID NO: 594307 - DNA, 75 bp, synthetic construct
  source 1..75: mol_type = other DNA
tgcccagcacaggtggtaacacttgtgtagcaaactttgtccataccaccatcttcccgaacggtccgaaagatt

SEQ ID NO: 594308 - DNA, 75 bp, synthetic construct
  source 1..75: mol_type = other DNA
taccaccatcttcccgaacggtccgaaagattttgaagataaagacgatggtcgtgtgattggtaacctggttgg

SEQ ID NO: 594309 - DNA, 75 bp, synthetic construct
  source 1..75: mol_type = other DNA
aaaatccgtattgccggaaatgatgggctgcctgcgtgggcagatattcctccacccacgcatgaagagcttatt

SEQ ID NO: 594310 - DNA, 75 bp, synthetic construct
  source 1..75: mol_type = other DNA
atgttcagcatgtgtagaagtagaagcgtgtcgtcatcctgaacagtgccatcatgaccactctattcaggtgaa

SEQ ID NO: 594311 - DNA, 75 bp, synthetic construct
  source 1..75: mol_type = other DNA
gcaagccacgcagtgaaatgggtgtgacttgtgttggtcgccagaaaacgaagggcaaatccatcgcattaatct

SEQ ID NO: 594312 - DNA, 75 bp, synthetic construct
  source 1..75: mol_type = other DNA
atgatttttggacatatcgcgcagcctgacccgtgccgtttgcctgccgccattgaaaaggcgctcgattttctg

SEQ ID NO: 594313 - DNA, 75 bp, synthetic construct
  source 1..75: mol_type = other DNA
caggctggacacctacaagagtacgtgaccttttattaaaggagtctctaattggtgttgcttacggagtcagtg

SEQ ID NO: 594314 - DNA, 75 bp, synthetic construct
  source 1..75: mol_type = other DNA
atgaggaaggtttacagttacattcgcttttcgtcaacgaaacaagcttttggtgatagtcatcgaagacagagt

SEQ ID NO: 594315 - DNA, 75 bp, synthetic construct
  source 1..75: mol_type = other DNA
ttataaaaattgttactttactatccatgatatgtcattgtacgcacatcccaagtggttccgtttgttatatcg

SEQ ID NO: 594316 - DNA, 75 bp, synthetic construct
  source 1..75: mol_type = other DNA
cggaaaatgctttttatgctgttaatttaaaaaacacttatgaagtaaatggaacatggcctgctaatgcattag

SEQ ID NO: 594317 - DNA, 75 bp, synthetic construct
  source 1..75: mol_type = other DNA
atggtttttttaccgatttaaataaagcaccttcagatgctgttgagataaccacggatgaatggctgtcactac

SEQ ID NO: 594318 - DNA, 75 bp, synthetic construct
  source 1..75: mol_type = other DNA
acgaactggagcaatataatttgtggctggattacctggacgcactggagctggtcaatgcttccagtgcgccag

SEQ ID NO: 594319 - DNA, 75 bp, synthetic construct
  source 1..75: mol_type = other DNA
aaagagtatcaggactattgtatcttgttgacgctttgctgctaccactggatagctgatgtatttactgtctat

SEQ ID NO: 594320 - DNA, 75 bp, synthetic construct
  source 1..75: mol_type = other DNA
atattgccaatgatcttctgaaaaggagtgtagatcatttttcagtagagcatgaaaatgttatcaactgcttta

SEQ ID NO: 594321 - DNA, 75 bp, synthetic construct
  source 1..75: mol_type = other DNA
atgtattcccagatcctgccagacatgctgattaattttgcccttattaacatcacagacagaaagaacgagggt

SEQ ID NO: 594322 - DNA, 75 bp, synthetic construct
  source 1..75: mol_type = other DNA
tgacggtgcgttttttaactggctggaagaaaatctggatgcgttgttgcgtctggacggtccggcaatggcgta

SEQ ID NO: 594323 - DNA, 75 bp, synthetic construct
  source 1..75: mol_type = other DNA
tacgcagcattttgtcgcgccctgatacgctgcattgcagttacgaagaattttgtgaaacctggccgcaggtgg

SEQ ID NO: 594324 - DNA, 75 bp, synthetic construct
  source 1..75: mol_type = other DNA
ttgtggcaagcgcagactcaacgtgcgtcttattacgcgtcgcgtgaaaaagacacccccattaaatatgaagac

SEQ ID NO: 594325 - DNA, 75 bp, synthetic construct
  source 1..75: mol_type = other DNA
aagcgcacgagctgtatcagaaacacgggcttggcgcgcgtgacgatgcgatgggaatgcagtacctgatccccg

SEQ ID NO: 594326 - DNA, 75 bp, synthetic construct
  source 1..75: mol_type = other DNA
ctgacatggatggcatcttttggaacggttgcccgcatcggagttgaatgtaccggttcttacggcgctggcttg

SEQ ID NO: 594327 - DNA, 75 bp, synthetic construct
  source 1..75: mol_type = other DNA
tttatcgtatttcattaaagtcccttgcccgacgctatctcgagttacatgacgaaatcgctgatttggatgtca

SEQ ID NO: 594328 - DNA, 75 bp, synthetic construct
  source 1..75: mol_type = other DNA
gcagagtcgctctccagattatccattccaatattatctctgccccggatgaattacgtgaacagctcagaaata

SEQ ID NO: 594329 - DNA, 75 bp, synthetic construct
  source 1..75: mol_type = other DNA
gacagtgatgcgttcagcgggaagacaaaatccgtggggggcggtctgtatgcttcagcactgtttaactccggt

SEQ ID NO: 594330 - DNA, 75 bp, synthetic construct
  source 1..75: mol_type = other DNA
tggataagtttgttgttgaaactgcaggtgcaacggaacacgttgattttggtttatctgcagcagaggcacttg

SEQ ID NO: 594331 - DNA, 75 bp, synthetic construct
  source 1..75: mol_type = other DNA
attgccctgtcactcagggacttattgctgtatcagaattagcatcccgggtatcctctaaaaccggtcgaaaac

SEQ ID NO: 594332 - DNA, 75 bp, synthetic construct
  source 1..75: mol_type = other DNA
tacctgaaagggtcgctggcttatgcagaagatccgtgtggtgcggagcaaggtttctccgggcgtgaagtgatg

SEQ ID NO: 594333 - DNA, 75 bp, synthetic construct
  source 1..75: mol_type = other DNA
cgccggagaatggcgcggataatacctggatgcctgttctgacatacatgacagaaggctacgatttaaccggtg

SEQ ID NO: 594334 - DNA, 75 bp, synthetic construct
  source 1..75: mol_type = other DNA
atacggaattcccagctcaggcttcaggggcatgccacaacacatgcgattttccgcgatggtcctcaattctgc

SEQ ID NO: 594335 - DNA, 75 bp, synthetic construct
  source 1..75: mol_type = other DNA
agcgaattggtgttgagtgcacaggtacctatggttccggtttgcttcgttattttcagaacgccgggttagaag

SEQ ID NO: 594336 - DNA, 75 bp, synthetic construct
  source 1..75: mol_type = other DNA
ggggaacaaaaatcacagaccgattactggcaggatttgacagaaggcttctccgtgattgttgtgctcagcaat

SEQ ID NO: 594337 - DNA, 75 bp, synthetic construct
  source 1..75: mol_type = other DNA
tgtggtaccgggtgatgactctccgggagaaaacaaaagccagaccgactactggcaggagctgaaagagggctt

SEQ ID NO: 594338 - DNA, 75 bp, synthetic construct
  source 1..75: mol_type = other DNA
aagcaattaccgccacgattgactggataaaagagaacggtttttcactcatcaaagccggtgtgaatccggaaa

SEQ ID NO: 594339 - DNA, 75 bp, synthetic construct
  source 1..75: mol_type = other DNA
catcttactggagacaacaaacgaatagcaattctatgtctttcgacgggtgccagatggggagaagcaactaaa

SEQ ID NO: 594340 - DNA, 75 bp, synthetic construct
  source 1..75: mol_type = other DNA
ggctggatcagtgtctgacgcaattctggcgggtactgaaacctgccggaagtctctacctgttctgtggtcatc

SEQ ID NO: 594341 - DNA, 75 bp, synthetic construct
  source 1..75: mol_type = other DNA
tttttctcccgactatctggcagatgccatgaggtttaacccgatagctaacatagcattcactgaacaaaaaga

SEQ ID NO: 594342 - DNA, 75 bp, synthetic construct
  source 1..75: mol_type = other DNA
atgaaagataaacttttggtcatttttattctaataatttcattaattctatgctcttgcgataaaaaagatgaa

SEQ ID NO: 594343 - DNA, 75 bp, synthetic construct
  source 1..75: mol_type = other DNA
gattgtttatcgacgcaagataataaattagatgaacataaatacgataaatgtgctctacggagtaataataat

SEQ ID NO: 594344 - DNA, 75 bp, synthetic construct
  source 1..75: mol_type = other DNA
gtagatcagaacaataaagttctggggacccagtttttctccacaacacggcaaggttaccggcagatgctggca

SEQ ID NO: 594345 - DNA, 75 bp, synthetic construct
  source 1..75: mol_type = other DNA
cgattgactggataaaagagaacggtttttcactcatcaaagccggtgtgaatccggaaaataccctttcaaaaa

SEQ ID NO: 594346 - DNA, 75 bp, synthetic construct
  source 1..75: mol_type = other DNA
gattgtttatcgacgccagagaataaattgaacgaacataactacgataaatgtgccctgcgtggcaataacaat

SEQ ID NO: 594347 - DNA, 75 bp, synthetic construct
  source 1..75: mol_type = other DNA
atgctcttgcgataaaaaagatgaagattgtttatcgacgccagagaataaattgaacgaacataactacgataa

SEQ ID NO: 594348 - DNA, 75 bp, synthetic construct
  source 1..75: mol_type = other DNA
aagccagcggctcagataacaccctgaacgtcagttttatgaagaacccgactccggggcagtcactgaatatcc

SEQ ID NO: 594349 - DNA, 75 bp, synthetic construct
  source 1..75: mol_type = other DNA
tacaacgtgaactgttgttactggttaacctgaaacgccagtctgcccatacgccactgcgtgcgttgtttgata

SEQ ID NO: 594350 - DNA, 75 bp, synthetic construct
  source 1..75: mol_type = other DNA
tcagtcggtgtgggcagagctggaagggctatccctcctgttatgccataaaccactggcagacgtttttatcga

SEQ ID NO: 594351 - DNA, 75 bp, synthetic construct
  source 1..75: mol_type = other DNA
tcagtcagtgtgggcagagctggaagggttatctcttctgttgtgccataaacccctggcggacgtatttatcga

SEQ ID NO: 594352 - DNA, 75 bp, synthetic construct
  source 1..75: mol_type = other DNA
gccaccgatgctttcctgactgaaattgaatgcaaagcaatccgaaagttcattaacagcattgagcacatcctg

SEQ ID NO: 594353 - DNA, 75 bp, synthetic construct
  source 1..75: mol_type = other DNA
actggaaacggcgttgcgtgagtgtcgttctgctggaatcacgattgataaccttgaggccaagtgcgcgaagat

SEQ ID NO: 594354 - DNA, 75 bp, synthetic construct
  source 1..75: mol_type = other DNA
ggaagatgatgttactgaaaccccagccaccgacgctttcctggctgaaattgaaacgcgaaggaatccgcaagt

SEQ ID NO: 594355 - DNA, 75 bp, synthetic construct
  source 1..75: mol_type = other DNA
gtgattacagcaaccagcatctggtaccgatgaaacaagtggtgccgccgcgtggtgaagcgcgtaatgatttcg

SEQ ID NO: 594356 - DNA, 75 bp, synthetic construct
  source 1..75: mol_type = other DNA
cgatgcggtggataaaatccctgttgcccgcattgttgaagcactggaaaaccctggtggcgcatatcaacacaa

SEQ ID NO: 594357 - DNA, 75 bp, synthetic construct
  source 1..75: mol_type = other DNA
tgtcaccattcacccagaggatgcgcgggcgcgcggcatacaagatggcgatacagttcgtgtgtggaactcgcg

SEQ ID NO: 594358 - DNA, 75 bp, synthetic construct
  source 1..75: mol_type = other DNA
caacgtgaactgctgctgttggttaacctgaaacgccagtctgcccatacaccattacgcacattgtttgataaa

SEQ ID NO: 594359 - DNA, 75 bp, synthetic construct
  source 1..75: mol_type = other DNA
gatcaatgaacaacttctcacgcttaccggactgctgcatgacgatcttctgttgatcgtgcgcggtaataaatt

SEQ ID NO: 594360 - DNA, 75 bp, synthetic construct
  source 1..75: mol_type = other DNA
ccacctatgttgattacaaaatcaacctgctggacaacgacgacgacttctacaaagaaaacggcatcgctaccg

SEQ ID NO: 594361 - DNA, 75 bp, synthetic construct
  source 1..75: mol_type = other DNA
tgggtaaatccttctctggtaaggactggaaagtgacagcccgtgccggtctgggctaccagttcgacctgctgg

SEQ ID NO: 594362 - DNA, 75 bp, synthetic construct
  source 1..75: mol_type = other DNA
agatcgcggcaactgatgttggtaccattatcaccaatacttctgataaaacagcgaccctttccctacaaaacc

SEQ ID NO: 594363 - DNA, 75 bp, synthetic construct
  source 1..75: mol_type = other DNA
gattgatttttgatgagggacaacattattcggttattgggaaagataaagcctataaaggggcgggtgttgaga

SEQ ID NO: 594364 - DNA, 75 bp, synthetic construct
  source 1..75: mol_type = other DNA
gacagcggttccggattttacttgtatgataatcagaaaaaaaaatgggtcattttggggacactgacaggtaaa

SEQ ID NO: 594365 - DNA, 75 bp, synthetic construct
  source 1..75: mol_type = other DNA
gaacgtcagtatgaataatggcctgtggcagctgaccggagattccgacatcaacagtctgacgacccgtaacag

SEQ ID NO: 594366 - DNA, 75 bp, synthetic construct
  source 1..75: mol_type = other DNA
ctgataaccggtatatgcctgtactggcatataatgccaaaggctatgatttaaccggcaacaatgccacgctgg

SEQ ID NO: 594367 - DNA, 75 bp, synthetic construct
  source 1..75: mol_type = other DNA
tttactcaggatatcagcctcaacaatcagaatatgaccatcaataataaaaatatggcagttaacggtaaaaca

SEQ ID NO: 594368 - DNA, 75 bp, synthetic construct
  source 1..75: mol_type = other DNA
gctggtaataatacagcagtggaaaaaaataataataactataaagatctaagttttagtggtggtggaagtatt

SEQ ID NO: 594369 - DNA, 75 bp, synthetic construct
  source 1..75: mol_type = other DNA
cggcgttatttttccgtatcggcagctgttccttatacggatgtctggacgcataaacccgtgcagttttatccg

SEQ ID NO: 594370 - DNA, 75 bp, synthetic construct
  source 1..75: mol_type = other DNA
tgccaaaagctacactgttcgtagtatgccgtttttccggttcgttgcagattcagcctgaagctccgatgtcta

SEQ ID NO: 594371 - DNA, 75 bp, synthetic construct
  source 1..75: mol_type = other DNA
gacagtgatgcgttcagcgggaagacaaaatccgtgggggaggtctgtatgcttcagcactgtttaactccggtg

SEQ ID NO: 594372 - DNA, 75 bp, synthetic construct
  source 1..75: mol_type = other DNA
gcctgtgcagcacagatggacacccgaaatttctggatccgtgattatcttgatctggcacagaataaaggtgca

SEQ ID NO: 594373 - DNA, 75 bp, synthetic construct
  source 1..75: mol_type = other DNA
ttttatctaaatatttctttggacatgaagatgctagcgcttctgatgtggggatgcaatgctttgatacggtga

SEQ ID NO: 594374 - DNA, 75 bp, synthetic construct
  source 1..75: mol_type = other DNA
attccgtcaggaagttttgcgaaagccatgctgattgaaggggcggatgccaatgcctctgtcaccggtaatgaa

SEQ ID NO: 594375 - DNA, 75 bp, synthetic construct
  source 1..75: mol_type = other DNA
aatggttaaagagtttgaactagacttacccagtataagagaacaacaaaaaatcgccgccgtcctgtccgctgc

SEQ ID NO: 594376 - DNA, 75 bp, synthetic construct
  source 1..75: mol_type = other DNA
ggcgtcgtgcaattggtgtcgagctggaggctgaacgttttgagcagaccgcaagagatgtacagaattcaatca

SEQ ID NO: 594377 - DNA, 75 bp, synthetic construct
  source 1..75: mol_type = other DNA
gatgaccagcgccgtattgagaagctggggcaggataatgctgcacttgcagagcaggtaaaagccctgggcgcg

SEQ ID NO: 594378 - DNA, 75 bp, synthetic construct
  source 1..75: mol_type = other DNA
ctcagtgactactacatcaaacgtgctgagcagtatcacccggtgataccgattggtgcgggcaatgaagtgacg

SEQ ID NO: 594379 - DNA, 75 bp, synthetic construct
  source 1..75: mol_type = other DNA
gatgaccagcgtcgtattgaaaagctgggacaggacaatgctgcactggcagagcaggtgaaagccctgggtgca

SEQ ID NO: 594380 - DNA, 75 bp, synthetic construct
  source 1..75: mol_type = other DNA
aaaggtcaggtactgctgacactggatgatacccgaagctcagccatgttgagggaaagtgaagcccgggtgaat

SEQ ID NO: 594381 - DNA, 75 bp, synthetic construct
  source 1..75: mol_type = other DNA
cgtccgggagatctggttgcagattttttcatggggtcgggttcgacggtcagggaagttcaggatttagtcagt

SEQ ID NO: 594382 - DNA, 75 bp, synthetic construct
  source 1..75: mol_type = other DNA
cacttatgctgctggctggctgtgccgaagttgaaaattataacaatgttgtgaaagcgcccgcgccagactggc

SEQ ID NO: 594383 - DNA, 75 bp, synthetic construct
  source 1..75: mol_type = other DNA
cgatcgttttaaacacattaacgatctctatgggcattctaaaggtgatgaggtgttatgcgcccttgcccgcac

SEQ ID NO: 594384 - DNA, 75 bp, synthetic construct
  source 1..75: mol_type = other DNA
aaccgctgggagaaagcatctctgaacaactggatatcatcaacaccgcgttcagggtaatcgaaacggttcgcc

SEQ ID NO: 594385 - DNA, 75 bp, synthetic construct
  source 1..75: mol_type = other DNA
acgtttgtgatctgggcatggaacagcccgctggatgaagtgacgcgtggacagggaagtattatccccggcagt

SEQ ID NO: 594386 - DNA, 75 bp, synthetic construct
  source 1..75: mol_type = other DNA
cgccgcagggcagcgttgctgttccaccgccgacggcgttttatccaggtaatggtgtcacgccaccaccgcagg

SEQ ID NO: 594387 - DNA, 75 bp, synthetic construct
  source 1..75: mol_type = other DNA
tattaagtttcagacatggcagctggtggttcagtacggaacgccagccttgaccaacaataatccgcagcaatt

SEQ ID NO: 594388 - DNA, 75 bp, synthetic construct
  source 1..75: mol_type = other DNA
tcgttagcaccgacattaaggacttttctccgtcgccatttattggtctataacggagtcggagaaaaattccaa

SEQ ID NO: 594389 - DNA, 75 bp, synthetic construct
  source 1..75: mol_type = other DNA
gtaacaactctgtatatatgttttgaacttactacactcaaaaaatcatgtggtgactattgggagcattatttt

SEQ ID NO: 594390 - DNA, 75 bp, synthetic construct
  source 1..75: mol_type = other DNA
gctattttttattaaaaaaagggcagtttgcttacaataaaagttactctaatggttatccgatgggtgcaataa

SEQ ID NO: 594391 - DNA, 75 bp, synthetic construct
  source 1..75: mol_type = other DNA
agttgcctgccctgacagtgtagtagcgattcaaccatataaacatgtagccgatgtttactggctaaaaaaata

SEQ ID NO: 594392 - DNA, 75 bp, synthetic construct
  source 1..75: mol_type = other DNA
atcgaaattatttcagagagttacgactaaaaacaatggaaaaagcaacaatgttgtaaccatttctggacaaca

SEQ ID NO: 594393 - DNA, 75 bp, synthetic construct
  source 1..75: mol_type = other DNA
tgcagcccaattaaatattagcataagcgatcttcgaagtatggttgtgtactatccgtgtattgaagaacaaca

SEQ ID NO: 594394 - DNA, 75 bp, synthetic construct
  source 1..75: mol_type = other DNA
agagggtaacccggaaagcccggtgccgaatcctccctcggcagaaagccacctgaacggttttaacaccgacca

SEQ ID NO: 594395 - DNA, 75 bp, synthetic construct
  source 1..75: mol_type = other DNA
gtgacggcagcgcagatgcagaagcagaagcagaagcagaagcagaagcagaagaagcagaagcagaagcagaag

SEQ ID NO: 594396 - DNA, 75 bp, synthetic construct
  source 1..75: mol_type = other DNA
gtgacggaaaagctgctcgccaatagtcagcggcagaaaaaagcgctgatgcagcaattgcttaccgggaataaa

SEQ ID NO: 594397 - DNA, 75 bp, synthetic construct
  source 1..75: mol_type = other DNA
tattagcataagcgatcttcgaagtatggttgtgtactatccgtgtattgaagaacaacaaaaaattgccgccgt

SEQ ID NO: 594398 - DNA, 75 bp, synthetic construct
  source 1..75: mol_type = other DNA
atggaaagtggattgctacaactgaaaaatatctgactgaattaggattgaacagttcatccgcaagaatatatc

SEQ ID NO: 594399 - DNA, 75 bp, synthetic construct
  source 1..75: mol_type = other DNA
atggcatgacgatggaacgcgtggatcgaccaacggctgaatgtgctgctgtgctggaaaaagcgccgttgccga

SEQ ID NO: 594400 - DNA, 75 bp, synthetic construct
  source 1..75: mol_type = other DNA
tgacgaccggggcacgacgaccgaattacgggttggcccggcagatgcttatctccctgagccagtcaccgccag

SEQ ID NO: 594401 - DNA, 75 bp, synthetic construct
  source 1..75: mol_type = other DNA
cgcggtggagccaggcacggttctcaatgaaggtggcacggtgtttaccgtttcactaacgcgtccggtgtgggt

SEQ ID NO: 594402 - DNA, 75 bp, synthetic construct
  source 1..75: mol_type = other DNA
cgctcctcgcgcgaccaggcgcaggccacgctgaaatcagcacaggataaattgcgtcagtaccgttccggtaac

SEQ ID NO: 594403 - DNA, 75 bp, synthetic construct
  source 1..75: mol_type = other DNA
cagcgcgatctgaacggggcgcggcgctttctgctgctggagtgtacggaactgggcgaatgtaggcagagtcac

SEQ ID NO: 594404 - DNA, 75 bp, synthetic construct
  source 1..75: mol_type = other DNA
gtccactattctctcaggaatttcaggatctgccagacggtgctgagacgacgcttacgcctgatcacggtgaaa

SEQ ID NO: 594405 - DNA, 75 bp, synthetic construct
  source 1..75: mol_type = other DNA
gcccaaccagcgggtgattgtctttgatccggtctgtggttttgacaataccgaactgcttgtctcggaagtcac

SEQ ID NO: 594406 - DNA, 75 bp, synthetic construct
  source 1..75: mol_type = other DNA
atgcgctcgtcgttttatcaacaacagtggaatgatatgaaggtactggttaccggcgccaccagcggtttaggt

SEQ ID NO: 594407 - DNA, 75 bp, synthetic construct
  source 1..75: mol_type = other DNA
tgatacgctgtggcactgctccagctttacctctccctgggggacacaacaggctttcgatctggctaacgttcg

SEQ ID NO: 594408 - DNA, 75 bp, synthetic construct
  source 1..75: mol_type = other DNA
cgcgcaggaagagctaggttatcagccagtccttaccctggatgaaggtatcgagaaaactgccgcctggctgcg

SEQ ID NO: 594409 - DNA, 75 bp, synthetic construct
  source 1..75: mol_type = other DNA
tgcgcaggcgcttgctgcgcctttcggcattgaggtggtgaacaacggtgcgccgtcgggtgttattcctgacgt

SEQ ID NO: 594410 - DNA, 75 bp, synthetic construct
  source 1..75: mol_type = other DNA
aacagccgatctggttgactgctctgctttgccactccagcagagcggaaaaaacctgctcagaatcgtcagtga

SEQ ID NO: 594411 - DNA, 75 bp, synthetic construct
  source 1..75: mol_type = other DNA
cactacggcgtctccaagttgaattttgactttacgctggatattacgcgtgcacaggaagagttaggttatcag

SEQ ID NO: 594412 - DNA, 75 bp, synthetic construct
  source 1..75: mol_type = other DNA
tcaaacgttcagaaaataaaaaaatggcggaaatcgcccaattcctgcatgaaaatgatttgagcgttgacacca

SEQ ID NO: 594413 - DNA, 75 bp, synthetic construct
  source 1..75: mol_type = other DNA
gtcagcaagattgccagaaacgcatcagcacggcgattaacgaagtggtacttcatcctggcaaagtggcgcata

SEQ ID NO: 594414 - DNA, 75 bp, synthetic construct
  source 1..75: mol_type = other DNA
ccgattcaggaaggtgaagatgtcctgattcgtcgctgtgattaccatctgaatctgattcatccgaaagattac

SEQ ID NO: 594415 - DNA, 75 bp, synthetic construct
  source 1..75: mol_type = other DNA
ttgcgatatccatgaagcatatcggtttatctgcaataacgcggtcaaaaaagtggttctcaaagtcaccatcga

SEQ ID NO: 594416 - DNA, 75 bp, synthetic construct
  source 1..75: mol_type = other DNA
tttaaaaatttaatgcgtttttctcctgatgtttctttatgcttaacggaacttgtgacgttgaataataaggtc

SEQ ID NO: 594417 - DNA, 75 bp, synthetic construct
  source 1..75: mol_type = other DNA
aaagaaaggcaaatttttgaacccaagagatctttgaaaggaattcaaaaaaaaataaataaagagatttttgag

SEQ ID NO: 594418 - DNA, 75 bp, synthetic construct
  source 1..75: mol_type = other DNA
tgccaatgttcccgcatacactctcggcgcgcccgctggtcattaacagcagcagcacaattcgcctgcgctttt

SEQ ID NO: 594419 - DNA, 75 bp, synthetic construct
  source 1..75: mol_type = other DNA
ccccggtgatttcgccgtctttatgcctgaggaacctcaccaggcgctgtgcgcgattggcgcggctacgtcagt

SEQ ID NO: 594420 - DNA, 75 bp, synthetic construct
  source 1..75: mol_type = other DNA
gagtgttcgttatcggcgttatccaccagagaggacggtcgctggcaacctgaaggatgtcggtggttctgcacg

SEQ ID NO: 594421 - DNA, 75 bp, synthetic construct
  source 1..75: mol_type = other DNA
gcccgagggctgggataaccagtggaagggcgatgatgattacctgaaatggctggaccagtgtctggcgcagtt

SEQ ID NO: 594422 - DNA, 75 bp, synthetic construct
  source 1..75: mol_type = other DNA
ttgtgatatccatgaagcgtatcgatttatctgtaataacgcggtcaaaaaagtcgttctcaaagtcaccatcga

SEQ ID NO: 594423 - DNA, 75 bp, synthetic construct
  source 1..75: mol_type = other DNA
ccagaaactgataatcctgccgtacaacttttaatggttggtgaagatagtgattatgatgaagaagacgatcaa

SEQ ID NO: 594424 - DNA, 75 bp, synthetic construct
  source 1..75: mol_type = other DNA
ctgtaacatctcacgctaaaatgattgaagttaccagcttgatactgaatggtaaagagcctactggaaaagaag

SEQ ID NO: 594425 - DNA, 75 bp, synthetic construct
  source 1..75: mol_type = other DNA
cggggattgcgatgcttgctgcaagtgtggcaggtaatctcgctgcaggaggggaagtaaagactgtggacctga

SEQ ID NO: 594426 - DNA, 75 bp, synthetic construct
  source 1..75: mol_type = other DNA
gtattcgggttcaaaaaagtagtgatcactcaatactcgacttaacgtctggttcatggttgccgtttaattttt

SEQ ID NO: 594427 - DNA, 75 bp, synthetic construct
  source 1..75: mol_type = other DNA
gtgttgatgatctgcggatgcagcttaaaggctccaccaccgtgattaacggggaaacggtcattgcgacgcaaa

SEQ ID NO: 594428 - DNA, 75 bp, synthetic construct
  source 1..75: mol_type = other DNA
gacgatctcgcaaacctttttggggtgaaaaaaattctcgttaaggacgaatcaaaacgattcggtctgaacgca

SEQ ID NO: 594429 - DNA, 75 bp, synthetic construct
  source 1..75: mol_type = other DNA
ggttatcagcactgaaggcgacaccgacgtgaagcactaccgcgaagttgtctgggaaggcaaacacgctgtagc

SEQ ID NO: 594430 - DNA, 75 bp, synthetic construct
  source 1..75: mol_type = other DNA
taagtattcgtctgttttgattgatgacagtacacgcccacgtagatttcagatccactctctgaatcctgaatt

SEQ ID NO: 594431 - DNA, 75 bp, synthetic construct
  source 1..75: mol_type = other DNA
aaatcggttgcgatggtcttgcgggtgctcgttgatgccccgccgccctgtacggtaactggtgcgagcgtggag

SEQ ID NO: 594432 - DNA, 75 bp, synthetic construct
  source 1..75: mol_type = other DNA
tgatcaacaggatcgatggtaccaattaccaacaggatgcgaaatacaccctcaactgcggtaataaagtcagcg

SEQ ID NO: 594433 - DNA, 75 bp, synthetic construct
  source 1..75: mol_type = other DNA
agtttgtagtgggcgcagggttgttgctattcagttgctgtagtttcactgttatggctgacagtaagcccgtgg

SEQ ID NO: 594434 - DNA, 75 bp, synthetic construct
  source 1..75: mol_type = other DNA
tctcaaagcggtgccggtaaaacagagcggagtgcagcttacgccagcggaatttaacgccagtatgacgatggt

SEQ ID NO: 594435 - DNA, 75 bp, synthetic construct
  source 1..75: mol_type = other DNA
ctggatgcaggcattgccgggtttggcatccgtatcgaaaacgccgccgataactccctgttttccattggtgaa

SEQ ID NO: 594436 - DNA, 75 bp, synthetic construct
  source 1..75: mol_type = other DNA
caccacggtgaacggtgaaactgtgctggatgcaggcattgccgggtttggcatccgtatcgaaaacgccgccga

SEQ ID NO: 594437 - DNA, 75 bp, synthetic construct
  source 1..75: mol_type = other DNA
gttgacgccattctgaacctcggtgccgagtgcatcgtcacagatatgaactatgacgataccgttcgcctgacc

SEQ ID NO: 594438 - DNA, 75 bp, synthetic construct
  source 1..75: mol_type = other DNA
acccacacatcaccggagcttggcatgagacctcaggagttaattaatcagagactgctagttgattgcgatcta

SEQ ID NO: 594439 - DNA, 75 bp, synthetic construct
  source 1..75: mol_type = other DNA
gggcctttgttccttgaaagagcggcacaggtcagtgagaaacagttcgctcagacgatagctgaagcagcaagg

SEQ ID NO: 594440 - DNA, 75 bp, synthetic construct
  source 1..75: mol_type = other DNA
ttttgaaggccgcgtagcaacgtcgctgcgtgagcatatcaaattacacaacatggaagagttgtttggtgaagt

SEQ ID NO: 594441 - DNA, 75 bp, synthetic construct
  source 1..75: mol_type = other DNA
gtcgggcaggacgtgaaaatggcaataagatctttaataagtctcgtggacgtctgaatacaacactgggcattc

SEQ ID NO: 594442 - DNA, 75 bp, synthetic construct
  source 1..75: mol_type = other DNA
ctgggagggcgcacttgatgagcttatatcatttggacttgtaattggaagaggaagtaaggggcaaatatatga

SEQ ID NO: 594443 - DNA, 75 bp, synthetic construct
  source 1..75: mol_type = other DNA
tcaaaactgagtgcatgcaaaagggattgatagagtcttttaatgacttatctgatttcaaagaaaaagtccgta

SEQ ID NO: 594444 - DNA, 75 bp, synthetic construct
  source 1..75: mol_type = other DNA
ctatgctaagtacatggagctgggtaaataccgactcggttatctttctcgaatgaagaacgtgacaaacccacc

SEQ ID NO: 594445 - DNA, 75 bp, synthetic construct
  source 1..75: mol_type = other DNA
gacagtacgaacgaaagcgtgaaaataactggtcagtgctggaagcagctgaattcatcgaggcgcatggcggga

SEQ ID NO: 594446 - DNA, 75 bp, synthetic construct
  source 1..75: mol_type = other DNA
actaccgcgaagttgtctgggaaggcaaacacgctgtagcaccttactcaccctattggaactactccctgcaaa

SEQ ID NO: 594447 - DNA, 75 bp, synthetic construct
  source 1..75: mol_type = other DNA
ttcgtgttaatgatggtccattcgctgacttcaacggtgttgttgaagaggtggattacgagaagtctcgcctga

SEQ ID NO: 594448 - DNA, 75 bp, synthetic construct
  source 1..75: mol_type = other DNA
tgacttcaacggcgtcgttgaagaggtggattacgagaagtctcgtctgaaagtctctgtttctatcttcggtcg

SEQ ID NO: 594449 - DNA, 75 bp, synthetic construct
  source 1..75: mol_type = other DNA
atgtctgaagctcctaaaaagcgctggtacgtcgttcaggcgttttccggttttgaaggccgcgtagcaacgtcg

SEQ ID NO: 594450 - DNA, 75 bp, synthetic construct
  source 1..75: mol_type = other DNA
tatgtgcgtgggacgtttaagaatccgcaggctggtgtgaaggccgggtcgttgattgcccgtggcgctgttgcg

SEQ ID NO: 594451 - DNA, 75 bp, synthetic construct
  source 1..75: mol_type = other DNA
ccagctggtattaccgggacggcgaagtactgccggtgcccgttgattacccacgattatcagaaaaacaacgcc

SEQ ID NO: 594452 - DNA, 75 bp, synthetic construct
  source 1..75: mol_type = other DNA
gcgatggatttcaacattatcactgataaaacctcatataacgccattgaatggcccgtctctccggaagcctct

SEQ ID NO: 594453 - DNA, 75 bp, synthetic construct
  source 1..75: mol_type = other DNA
attaccctgaagagatgccttatggagaaggtattcagtatttccgcagtgaagacgggcaggatttttatgagt

SEQ ID NO: 594454 - DNA, 75 bp, synthetic construct
  source 1..75: mol_type = other DNA
ccgcaaagtggcgcagacccaatgccagtggcaattggggtattgtttcagctgtgcgttgggacaaactgagaa

SEQ ID NO: 594455 - DNA, 75 bp, synthetic construct
  source 1..75: mol_type = other DNA
gccgctgatgatactgccaacatcacgcaacaaccggacgcaaatgtagatattgactggcagggacaggcattt

SEQ ID NO: 594456 - DNA, 75 bp, synthetic construct
  source 1..75: mol_type = other DNA
ccagctggtattaccgggatggcgaagtactgccagttcctgttgattattcgaaactggcagaaaagcaacgtc

SEQ ID NO: 594457 - DNA, 75 bp, synthetic construct
  source 1..75: mol_type = other DNA
ggatatgatattgtcagagaacaaccaatgctagtgaaacagatcgatgtgaatacaatcgagagttttatattt

SEQ ID NO: 594458 - DNA, 75 bp, synthetic construct
  source 1..75: mol_type = other DNA
tatttttttacgattcatcaacgactgtcgatttcgatggaatgtcgtattttattaggcaaacttttaaaaaga

SEQ ID NO: 594459 - DNA, 75 bp, synthetic construct
  source 1..75: mol_type = other DNA
ttcaacgtgattccactggcaccgggtcatgcctacgggatgtttatggaacgttttaacgatttatcggagtta

SEQ ID NO: 594460 - DNA, 75 bp, synthetic construct
  source 1..75: mol_type = other DNA
cccagctttgatacggttcctgaatacaggaaaggtcaatcgcagttaaaagcatatagtccccaacatcaaagc

SEQ ID NO: 594461 - DNA, 75 bp, synthetic construct
  source 1..75: mol_type = other DNA
tcatcacaacgttcttaaaacaacaaggcgtatcagtcaatgttattggtattgctataaaggacaaaaataatt

SEQ ID NO: 594462 - DNA, 75 bp, synthetic construct
  source 1..75: mol_type = other DNA
aaaatggcacttttaactctcgtttcttttcgaaagaaacggttgaaaaaagcaaagaaatcaagctggcagccg

SEQ ID NO: 594463 - DNA, 75 bp, synthetic construct
  source 1..75: mol_type = other DNA
atgaaaaagaccttgagaatacagtttggcgagcgggtaaaagaactgcgtatagccaccggaatgagccaggaa

SEQ ID NO: 594464 - DNA, 75 bp, synthetic construct
  source 1..75: mol_type = other DNA
ggggaaatgaacggtgacgcggaactacgcggtagcggtaactcggtggcagcacttttaggcaacagtaacggc

SEQ ID NO: 594465 - DNA, 75 bp, synthetic construct
  source 1..75: mol_type = other DNA
gcattgcggcgaatattcatctggaaggcgataaaaagccgatgcaggggcgggcagatattcaggctcgtcgac

SEQ ID NO: 594466 - DNA, 75 bp, synthetic construct
  source 1..75: mol_type = other DNA
aacggtgaaccgctcacgggtacgggaaaaataggcggtatgctggcgctgcgtggcgaagggacgccgtttccg

SEQ ID NO: 594467 - DNA, 75 bp, synthetic construct
  source 1..75: mol_type = other DNA
tacattgtcggtgcgatatttggtgatgatgaggtgcgggtgaactgcgcggcggcgaatctggatattgccaac

SEQ ID NO: 594468 - DNA, 75 bp, synthetic construct
  source 1..75: mol_type = other DNA
ctgcggcggcattactggcgttgatatcaccttcagaaggtgaagctaatcagtgccggatgattttgtcgcaga

SEQ ID NO: 594469 - DNA, 75 bp, synthetic construct
  source 1..75: mol_type = other DNA
ggcgctgctgggaaatagtaatggcaacctgaaactgttgatgaatgacgggctggtgagccgtaacctgatgga

SEQ ID NO: 594470 - DNA, 75 bp, synthetic construct
  source 1..75: mol_type = other DNA
ggccttacagtggtcaaagctgcacattcagtgcatgaaaaagaccttgagaatacagtttggcgagcgggtaaa

SEQ ID NO: 594471 - DNA, 75 bp, synthetic construct
  source 1..75: mol_type = other DNA
gcagaattgaacgtggtggctctaatgcgtctctggatgcgattgaggtgctggctaacgctctgagcgttgagc

SEQ ID NO: 594472 - DNA, 75 bp, synthetic construct
  source 1..75: mol_type = other DNA
ttggacaacgtgttaaggctctacgtatagccgccggaatgagccaggaagcgtttgctgatcggtgtggatttg

SEQ ID NO: 594473 - DNA, 75 bp, synthetic construct
  source 1..75: mol_type = other DNA
tacaagcgtcatcaatggtgaaactgtgcttaatacaggtattgatgggtttggtattcgtattcaaaacgctac

SEQ ID NO: 594474 - DNA, 75 bp, synthetic construct
  source 1..75: mol_type = other DNA
tcagccagtgggctacaccctgaactgctcaaacagtgtcagcgacgacctgcaaatgcagcttcaggccaccac

SEQ ID NO: 594475 - DNA, 75 bp, synthetic construct
  source 1..75: mol_type = other DNA
gtgggtttgctcgtagttacatgagtcgtattgaacgtggtggctccaacgcgtctcttgatgcgattgaggtgc

SEQ ID NO: 594476 - DNA, 75 bp, synthetic construct
  source 1..75: mol_type = other DNA
caacctgaagcccggacagacactggtgctgaacggttttcagagtctgtataacgaagcaaaccggcagggcac

SEQ ID NO: 594477 - DNA, 75 bp, synthetic construct
  source 1..75: mol_type = other DNA
acctccatccagacgccgaccacggatgtccgttcgctgacccagcgtgccaacctgaagcccggacagacgctg

SEQ ID NO: 594478 - DNA, 75 bp, synthetic construct
  source 1..75: mol_type = other DNA
atactttcagttgagcgtcgtgatgccgttcagggggcaatacttcgatcttggctggaacaacacgtattgcct

SEQ ID NO: 594479 - DNA, 75 bp, synthetic construct
  source 1..75: mol_type = other DNA
agctgttctgcaatatcagttcgacttcggtctgcgtccatccatcggttactcctattctaaagcactggacgt

SEQ ID NO: 594480 - DNA, 75 bp, synthetic construct
  source 1..75: mol_type = other DNA
gtacggtgaaacccgcaacatgaccgttttggctaatgatcattttgcaaataaaacccaaaactttgaagctgt

SEQ ID NO: 594481 - DNA, 75 bp, synthetic construct
  source 1..75: mol_type = other DNA
tgtctaccgcatcacgttccgggacacaaaacagataggtatcgactggaaggcggtgtacagcgcggcaaaagg

SEQ ID NO: 594482 - DNA, 75 bp, synthetic construct
  source 1..75: mol_type = other DNA
gttccgccatcggctgaaagtcatcttaacggctttaatactgaccagatgctgaagcagctgggcaacctgaat

SEQ ID NO: 594483 - DNA, 75 bp, synthetic construct
  source 1..75: mol_type = other DNA
cacccggtgataccgattggtgcgggcaacgaagtgaccgtggtgttccaggacggcttccagctgaaaaccgtg

SEQ ID NO: 594484 - DNA, 75 bp, synthetic construct
  source 1..75: mol_type = other DNA
atgtcctgaaaatgggtattggtggtggtacatcgaaagctgcacagacgctcagtgactactacatcaaacgtg

SEQ ID NO: 594485 - DNA, 75 bp, synthetic construct
  source 1..75: mol_type = other DNA
cgttgtgacacgcaacgagtgtgatttcatgccgacgggtgtacagatcatcaatccctggacacctgtcactgc

SEQ ID NO: 594486 - DNA, 75 bp, synthetic construct
  source 1..75: mol_type = other DNA
tgccgaatccgccatccgcagagagtcacctgaatggtctgaataccgaccagatgctgaagcagctgggcgacc

SEQ ID NO: 594487 - DNA, 75 bp, synthetic construct
  source 1..75: mol_type = other DNA
acccatcggggcgggtaatgaagtgaccgtggtgttccaggacggtttccagctgaaaaccgtggaagagatggc

SEQ ID NO: 594488 - DNA, 75 bp, synthetic construct
  source 1..75: mol_type = other DNA
gcatggacatttggtgcaaaatacgacgccaacaatgtttatcttgcaatgggtgatgctgccaacttactgatt

SEQ ID NO: 594489 - DNA, 75 bp, synthetic construct
  source 1..75: mol_type = other DNA
tgtggagtgctaacccactcaatacgctgaaaattgcgtggaatgcatccgatgagcaggggctttcttactttt

SEQ ID NO: 594490 - DNA, 75 bp, synthetic construct
  source 1..75: mol_type = other DNA
ttccaatggtgcgcaaaggctttctcgcgtcaccggaaaacccgcaaggcattcgtgggcaggatgaatttgttc

SEQ ID NO: 594491 - DNA, 75 bp, synthetic construct
  source 1..75: mol_type = other DNA
atgtgctgaccaaagacttcccaagctcgcggctgggtaatggttgtgcgggtaacacggcgctggcgtggctgg

SEQ ID NO: 594492 - DNA, 75 bp, synthetic construct
  source 1..75: mol_type = other DNA
tctgccgcgatccgcaggctcatccgttaaaaaccgccagcggtaagattgaaatattctcgcagcgcattgcgg

SEQ ID NO: 594493 - DNA, 75 bp, synthetic construct
  source 1..75: mol_type = other DNA
gcagcagaccagctggccgctggtgctgcaacatagcgatgtggtggtgctgtggagtgctaaccctctaaatac

SEQ ID NO: 594494 - DNA, 75 bp, synthetic construct
  source 1..75: mol_type = other DNA
aagccaaccagttaattgagatgccggaaaacccggacagcgagcggtttattcgcttcgccgattttcgccgcg

SEQ ID NO: 594495 - DNA, 75 bp, synthetic construct
  source 1..75: mol_type = other DNA
aataaccaaacagttaaaggttatggtgatggtaatcataattatggtaacaattacgcgggtggtggcactgca

SEQ ID NO: 594496 - DNA, 75 bp, synthetic construct
  source 1..75: mol_type = other DNA
tgtatatttagcagcaatgtatgcagagactcgcaatatgaccgcttatggtagcagcgactctcattcagccga

SEQ ID NO: 594497 - DNA, 75 bp, synthetic construct
  source 1..75: mol_type = other DNA
gcctgcgcccgtccatcgcttacctgcaatctaaaggtaaggatttaggcggttgggctcatgacggcaacggcg

SEQ ID NO: 594498 - DNA, 75 bp, synthetic construct
  source 1..75: mol_type = other DNA
tctcattcaccatcagcataaacgcattcgtgaggcttatggtccggcatcgatttttgccggttcctacggttg

SEQ ID NO: 594499 - DNA, 75 bp, synthetic construct
  source 1..75: mol_type = other DNA
aattcggtggtgacacttggactcaaacagatgtgttcatgactggtcgcaccactggtgttgcaacttatcgta

SEQ ID NO: 594500 - DNA, 75 bp, synthetic construct
  source 1..75: mol_type = other DNA
ggtgtttggggtgatcaggacctggttgaatatgttgatgtaggtgcaacctattacttcaacaaaaatatgtcc

SEQ ID NO: 594501 - DNA, 75 bp, synthetic construct
  source 1..75: mol_type = other DNA
gcatggggcgcgggatttgttgacggtatcggtcagggaatggagcgcgcttcccagccggctgtcgggctgggt

SEQ ID NO: 594502 - DNA, 75 bp, synthetic construct
  source 1..75: mol_type = other DNA
atgggcgtcattttgatgagcctgaatatggcctcgctggagacactttggcagactaatgccgcgggtgtctcg

SEQ ID NO: 594503 - DNA, 75 bp, synthetic construct
  source 1..75: mol_type = other DNA
caggggattttgggttacgtggtgcgctgggtggagcaggggattggttgttcaaaagtacccgatattcacaac

SEQ ID NO: 594504 - DNA, 75 bp, synthetic construct
  source 1..75: mol_type = other DNA
gctccatgcgctacactaccatcaaaccaacgtacagagcgtgcaagccaacattgccaacacagagttcaatgc

SEQ ID NO: 594505 - DNA, 75 bp, synthetic construct
  source 1..75: mol_type = other DNA
gttgtgagttaatcaacactgattgcctggaatttatccagaccttatcggaaaactctgtcgatcttatagtca

SEQ ID NO: 594506 - DNA, 75 bp, synthetic construct
  source 1..75: mol_type = other DNA
tcccagtttgatggaagcttttccacgctcacctgggacagccaatattttaattaaagcatttgtttccagcgg

SEQ ID NO: 594507 - DNA, 75 bp, synthetic construct
  source 1..75: mol_type = other DNA
gcagactaatgccgcgggtgtctcgatagttatctcatcgctgggcattggtcgattaagtgtcttgctttttgc

SEQ ID NO: 594508 - DNA, 75 bp, synthetic construct
  source 1..75: mol_type = other DNA
cgtcagttgctggcagaacgcgatcgcattcaggcggcgcttgatgagtggcatcgcagcaatccggggccggta

SEQ ID NO: 594509 - DNA, 75 bp, synthetic construct
  source 1..75: mol_type = other DNA
atgagtcaaaccataacccagggccgtttacgcattgacgccaattttaaacgttttgtggatgaagaagtttta

SEQ ID NO: 594510 - DNA, 75 bp, synthetic construct
  source 1..75: mol_type = other DNA
gtacagtattatccgggtaagcatccctgcgaaaaaccggcggatatgttgcgtcagataatttctgccagcagt

SEQ ID NO: 594511 - DNA, 75 bp, synthetic construct
  source 1..75: mol_type = other DNA
atgaaatgcattcggtgatggaagctggcccgatgctgcgtaaaaatcagatgaaatcgacgccttggatcaaag

SEQ ID NO: 594512 - DNA, 75 bp, synthetic construct
  source 1..75: mol_type = other DNA
ggtgcaggcgtcgctggagaatatggcgaaagtggttgatcagcaaaacgctggcgatccggcttatcgtccgat

SEQ ID NO: 594513 - DNA, 75 bp, synthetic construct
  source 1..75: mol_type = other DNA
gtaaaaaccagatgaaatcgacgccgtggatcaaagcctacgagcgtaataacgtgctttccggtctgttctgtg

SEQ ID NO: 594514 - DNA, 75 bp, synthetic construct
  source 1..75: mol_type = other DNA
agctgtatgcaatatatccggtatactttctggcttgtcatttttcaaaaaaaatcctttacaaatactaaaaga

SEQ ID NO: 594515 - DNA, 75 bp, synthetic construct
  source 1..75: mol_type = other DNA
acaacactgtacccctgtcatttgctgatggctatccttaccttcttgctaacgaagcctcgttacgtgatctcc

SEQ ID NO: 594516 - DNA, 75 bp, synthetic construct
  source 1..75: mol_type = other DNA
agcttctcgaaggcgaagtcaccccgctgaaaaaatcagctatgagcgacgatggaacaattctttgctgtagtt

SEQ ID NO: 594517 - DNA, 75 bp, synthetic construct
  source 1..75: mol_type = other DNA
cggggaaaaaacggcatcaagggcgaggtggtgatgcgaaacggcaaaatcctcggctgggcatggggcgcggga

SEQ ID NO: 594518 - DNA, 75 bp, synthetic construct
  source 1..75: mol_type = other DNA
gtctggcgcacttctggcgggtattaaagcccgagggaagcatttacctgttctgtgggcatcgcctggcatccg

SEQ ID NO: 594519 - DNA, 75 bp, synthetic construct
  source 1..75: mol_type = other DNA
gatgtcagtggtctggccttcgatcgcatctttatgatcacagaacctgacggtacgtttattaccgctcgccag

SEQ ID NO: 594520 - DNA, 75 bp, synthetic construct
  source 1..75: mol_type = other DNA
atgaggtggaaatcctggcgacagcaccggcaaaagtctacggtgcggccgcaacggacgatactttccctgcgc

SEQ ID NO: 594521 - DNA, 75 bp, synthetic construct
  source 1..75: mol_type = other DNA
ctgcgggcgcgggcaccgacacgttacccggtgtaccgtaccagattttgccgctaaaaagcggcgagaaaacct

SEQ ID NO: 594522 - DNA, 75 bp, synthetic construct
  source 1..75: mol_type = other DNA
ccagcgaacaatttattgcctccacgtttcatgctcgcagtcaggtgctgttacccgatgacaacgataaattgc

SEQ ID NO: 594523 - DNA, 75 bp, synthetic construct
  source 1..75: mol_type = other DNA
gacgtagtgctggtggacttgcccccggacgatctgcgccagcgactgaaagaaggcaaagtctatattgccggg

SEQ ID NO: 594524 - DNA, 75 bp, synthetic construct
  source 1..75: mol_type = other DNA
ggcattgagaaagcctcttccacaaccgtgggcgttggcgccactgccagtatgagcgccggtgaaatcggtcag

SEQ ID NO: 594525 - DNA, 75 bp, synthetic construct
  source 1..75: mol_type = other DNA
acaatacgggcagcgaaaaactggtccgggcggcagcacgactggcgtcaagactgggaagcgtctggcacgcgg

SEQ ID NO: 594526 - DNA, 75 bp, synthetic construct
  source 1..75: mol_type = other DNA
atctacaactggatgtctgggataacggccccggtcttccaccaggccaggagcagacgatatttgataagtttg

SEQ ID NO: 594527 - DNA, 75 bp, synthetic construct
  source 1..75: mol_type = other DNA
ttaactcagaaataggtcgagctaggatgaaaggcctcgaagttggttcgactattctgcatatcaacacaaaag

SEQ ID NO: 594528 - DNA, 75 bp, synthetic construct
  source 1..75: mol_type = other DNA
atgggcacgcagcattccaattatcgttatatccgctatagtcctcttgcttgttattaataaccgcaacaatac

SEQ ID NO: 594529 - DNA, 75 bp, synthetic construct
  source 1..75: mol_type = other DNA
ggattggactcagtgatgtaatcatatgggcacgcagcattccaattatcgttatatccgctatagtcctcttgc

SEQ ID NO: 594530 - DNA, 75 bp, synthetic construct
  source 1..75: mol_type = other DNA
taattgcattcgtcgataacacattcagcataaagatgtataacatcactgctataacttgcttattggcgctaa

SEQ ID NO: 594531 - DNA, 75 bp, synthetic construct
  source 1..75: mol_type = other DNA
cagcaacctcaccatctggaaaggctctgtgtcgctgaaggaagatccggcgggcaactacattcactacggggt

SEQ ID NO: 594532 - DNA, 75 bp, synthetic construct
  source 1..75: mol_type = other DNA
aagctgttcccgttctttggctttaccgccgagaatattgtggcaaaagcgcataaggtgctgggagtgaaaggt

SEQ ID NO: 594533 - DNA, 75 bp, synthetic construct
  source 1..75: mol_type = other DNA
ctttctatattttttataggattgcttgatttaatttggtattctttatttaaagtagataactcaccatttcgt

SEQ ID NO: 594534 - DNA, 75 bp, synthetic construct
  source 1..75: mol_type = other DNA
ctggtccctgcagtcacgctgcattatttgcagaacctgcttgagcactcccgccaggacgcggcagctcgtcaa

SEQ ID NO: 594535 - DNA, 75 bp, synthetic construct
  source 1..75: mol_type = other DNA
caagtgtatagtcagcctggccacgcatattgggtggttgagtacgagggtgaagtggtcggcggcggtgggatt

SEQ ID NO: 594536 - DNA, 75 bp, synthetic construct
  source 1..75: mol_type = other DNA
agaaatgggtttcaaacgctgctatctggaaacgaccgcttttttgaaagaagcgattggtttgtatgaacattt

SEQ ID NO: 594537 - DNA, 75 bp, synthetic construct
  source 1..75: mol_type = other DNA
atgggcacgcagcattccaattatcgttatatccgccatagttctcttactcgttattaataatcgcaacaatac

SEQ ID NO: 594538 - DNA, 75 bp, synthetic construct
  source 1..75: mol_type = other DNA
actccgcgacacccttctccccaaacttctctcgggtgaaattaccctgccggaagcagaacaggcagtcagtga

SEQ ID NO: 594539 - DNA, 75 bp, synthetic construct
  source 1..75: mol_type = other DNA
tgataatggggatgtcgtcttctcatggtcaggttcgttgatggtggatatttggtgcggcggcaaagcagctct

SEQ ID NO: 594540 - DNA, 75 bp, synthetic construct
  source 1..75: mol_type = other DNA
tcagtgggatgcgaaagaagccggtcaggcgaaagagtctgcatggaacgagaagtttgcggcttacgcgaaagc

SEQ ID NO: 594541 - DNA, 75 bp, synthetic construct
  source 1..75: mol_type = other DNA
gggcgtattgatgtgctggtgaataatgcgggcgcaatgaccaaagcgccgtttcttgatatggctttcgattag

SEQ ID NO: 594542 - DNA, 75 bp, synthetic construct
  source 1..75: mol_type = other DNA
cgttttatccaacaactggataatggcgatatcatccctgacgccggggccaaacgtatcaccagccttggggca

SEQ ID NO: 594543 - DNA, 75 bp, synthetic construct
  source 1..75: mol_type = other DNA
aagcagcctttaaccgggtattagtttcacgcggcgttgacagcgaaaccgccgatgcctgtgcagaaatgtttg

SEQ ID NO: 594544 - DNA, 75 bp, synthetic construct
  source 1..75: mol_type = other DNA
atgaaaattagaactgatggtagttttccattgtatgaaaatctaaaaaaaatggattataagaaagaaaatagt

SEQ ID NO: 594545 - DNA, 75 bp, synthetic construct
  source 1..75: mol_type = other DNA
tgagattttgaatgcaaatttatggtttgcagagaatggtggaccatatctgtgctatgaggcaggagcacaatc

SEQ ID NO: 594546 - DNA, 75 bp, synthetic construct
  source 1..75: mol_type = other DNA
atgtcatcaagatctgaacttttattagaaagatttgcagaaaaaattggtattggatctatttcatttaatgaa

SEQ ID NO: 594547 - DNA, 75 bp, synthetic construct
  source 1..75: mol_type = other DNA
atgctggtgaagatgacgttagcaaaagctatgcttgtctgacaccggaactggtggcgcagtttggtttaaaag

SEQ ID NO: 594548 - DNA, 75 bp, synthetic construct
  source 1..75: mol_type = other DNA
ctcacatgcgtggcaatccttattttactggtgctcttcccgcaattagtgctctttcctttagcccttatgacc

SEQ ID NO: 594549 - DNA, 75 bp, synthetic construct
  source 1..75: mol_type = other DNA
acagtattgaatgtaatttgtggtattggaaaaatgggtatggatgaactggtcaaaggtatttggccgttctta

SEQ ID NO: 594550 - DNA, 75 bp, synthetic construct
  source 1..75: mol_type = other DNA
gttaccggtcgatggcggctttgacgatgaaggcaacctcaccaaagaacctggtgtaatcgagaaaaatcgccg

SEQ ID NO: 594551 - DNA, 75 bp, synthetic construct
  source 1..75: mol_type = other DNA
aacttatgcctgcctgacacctgagttagtggcggcgctggggctgaaagaagggatagcaaaaagggtaatgac

SEQ ID NO: 594552 - DNA, 75 bp, synthetic construct
  source 1..75: mol_type = other DNA
gtcttaccgctgataaaggctacaccgtcgccgatcccaatctcgacgaattgtatcaagtgtatagtcagccca

SEQ ID NO: 594553 - DNA, 75 bp, synthetic construct
  source 1..75: mol_type = other DNA
aacacctcttggaaagatattggctggaaatatctctgataatgagtatttcgtggatgaagctgatatgttcaa

SEQ ID NO: 594554 - DNA, 75 bp, synthetic construct
  source 1..75: mol_type = other DNA
ccccttgataagcagaatagaacaagaacaaaaaaataataattacataagaggatatcatgaattacttgcatt

SEQ ID NO: 594555 - DNA, 75 bp, synthetic construct
  source 1..75: mol_type = other DNA
aataaaataaacatcaggctatcaaggtctctccctgaagaacatgcagctccagctataaatcagaacactctc

SEQ ID NO: 594556 - DNA, 75 bp, synthetic construct
  source 1..75: mol_type = other DNA
ccactcaggtcagataccggaaaccggggaaaattttcattttcccctcaaaagatcgtagacactgccccactg

SEQ ID NO: 594557 - DNA, 75 bp, synthetic construct
  source 1..75: mol_type = other DNA
tgccttagcaggaactagcagtatactgaaccacgcagttgtcgaaaaatctacagatgtatgtagctacataca

SEQ ID NO: 594558 - DNA, 75 bp, synthetic construct
  source 1..75: mol_type = other DNA
ttgtttattgccgttgatgaaaaaggatatctaatcgtcccacaaaaagaaacatcagagatagaaatatctcca

SEQ ID NO: 594559 - DNA, 75 bp, synthetic construct
  source 1..75: mol_type = other DNA
ttaaatatcttacaagaggcagtatcagtgaaagtggttggatcattccccaaaatgcccccgtagaaccagtag

SEQ ID NO: 594560 - DNA, 75 bp, synthetic construct
  source 1..75: mol_type = other DNA
acttatgcatataataaaaaagaagataacataagcgaattgtttattgccgttgatgaaaaaggatatctaatc

SEQ ID NO: 594561 - DNA, 75 bp, synthetic construct
  source 1..75: mol_type = other DNA
gatgttgaggcaggaatgacagaagtgacattatgtagaggaactattgcatctcaggctgaaaacattgtttca

SEQ ID NO: 594562 - DNA, 75 bp, synthetic construct
  source 1..75: mol_type = other DNA
ggattattactaacgtcaaacatgtcaggaactttaagtaataattataatcaacacaacaccaataagaatcta

SEQ ID NO: 594563 - DNA, 75 bp, synthetic construct
  source 1..75: mol_type = other DNA
caaaaacaatgtgcttttgataaaaaagcaagaaatgaaaaacattacaatttaaatatttatgatatatttttt

SEQ ID NO: 594564 - DNA, 75 bp, synthetic construct
  source 1..75: mol_type = other DNA
ggcagtatcagtgaaagtggttggatcattccccaaaatgcccccgtagaaccagtaggattaattgacaggaca

SEQ ID NO: 594565 - DNA, 75 bp, synthetic construct
  source 1..75: mol_type = other DNA
tcactataaaaaaatcgcacttaatggactattacttgcctcaggaatatttaaaccattaaacaacaactacaa

SEQ ID NO: 594566 - DNA, 75 bp, synthetic construct
  source 1..75: mol_type = other DNA
tcatatcagccgttatccaatgagatgcccaacaaaataaaatacaataatagagagttagaattaacaaaagaa

SEQ ID NO: 594567 - DNA, 75 bp, synthetic construct
  source 1..75: mol_type = other DNA
ggcggcggtatggtggaagccgaccatattctggctgctattgaagcgcgtttcctgcaaaccggacaccctcgc

SEQ ID NO: 594568 - DNA, 75 bp, synthetic construct
  source 1..75: mol_type = other DNA
tgattttttagataagattatatctgatgtctcacttaagcagatgtttatagatgctctggaatctgataaatc

SEQ ID NO: 594569 - DNA, 75 bp, synthetic construct
  source 1..75: mol_type = other DNA
gcggctcagtttcttgatcaattactccctaaaacagcgggagtgtcttccccagaacaagtgttgattgaagaa

SEQ ID NO: 594570 - DNA, 75 bp, synthetic construct
  source 1..75: mol_type = other DNA
gccagccccagcgggttggcatgaacagcagtgtggctgtgacgctggaaggtgataccggaaaggtctatctgc

SEQ ID NO: 594571 - DNA, 75 bp, synthetic construct
  source 1..75: mol_type = other DNA
cttccaggttctctgaaagaactggtattgaatggatgtacagagcttaaatcaataaactgtttacccctcaac

SEQ ID NO: 594572 - DNA, 75 bp, synthetic construct
  source 1..75: mol_type = other DNA
gtattggcgatcgcgactgcaaaggcactaaccgttttgcgcacgcagagatgctcaaacgcattattgccgggc

SEQ ID NO: 594573 - DNA, 75 bp, synthetic construct
  source 1..75: mol_type = other DNA
ttgtccttatgccattgtcgttctttgaaacatatagaaggagcctttcctgagacgctcaggaattccgtatat

SEQ ID NO: 594574 - DNA, 75 bp, synthetic construct
  source 1..75: mol_type = other DNA
cgaggaactattgcctctcaggctgaaaacattgtttcttatagtactgcaggggggccgagattgcaaacccaa

SEQ ID NO: 594575 - DNA, 75 bp, synthetic construct
  source 1..75: mol_type = other DNA
atacttgcgcgagatataatcgtgcaccccctgccatttcatttagactatgcgccccccaaaaaaggtgagctc

SEQ ID NO: 594576 - DNA, 75 bp, synthetic construct
  source 1..75: mol_type = other DNA
ctcatgaaaagagactaacagtaaatatgaataatattaatcaatcggaaaacattaatattcagttaaataaag

SEQ ID NO: 594577 - DNA, 75 bp, synthetic construct
  source 1..75: mol_type = other DNA
aaacgtcaatgttgatgtcgtatccaagttagcaagtcttctttcaacatcggttacaaaactggtttcaatgca

SEQ ID NO: 594578 - DNA, 75 bp, synthetic construct
  source 1..75: mol_type = other DNA
gtggctgtaacctgtcaggtgcatctttgaaaaacacatctttcaagaattctgttctggaggagtgtgatttat

SEQ ID NO: 594579 - DNA, 75 bp, synthetic construct
  source 1..75: mol_type = other DNA
tggattgcgaaccgggtaaaacaactgcccagttgaccatgggttctgcaagctacgcgaacaccagcggcaccc

SEQ ID NO: 594580 - DNA, 75 bp, synthetic construct
  source 1..75: mol_type = other DNA
atgaaaaaagcacttctcgcagccgctttagtaatggcttctggttccgccctggctgtagatggtggtcatatc

SEQ ID NO: 594581 - DNA, 75 bp, synthetic construct
  source 1..75: mol_type = other DNA
cgtatttaacgcatcttacgttaaagcaccgaacagcccggctgtaactgctggtcatgtaaccactaacgcgct

SEQ ID NO: 594582 - DNA, 75 bp, synthetic construct
  source 1..75: mol_type = other DNA
cgtgcgtgaccgttctgaagaggcgctggcccggtgggtaaaacgggaaaccggcgtcagtgcgttacgctggct

SEQ ID NO: 594583 - DNA, 75 bp, synthetic construct
  source 1..75: mol_type = other DNA
tcgtgaccgttcagaaaatgcattagcgggtggatcaagcgggaaacgggcatcagcgccctgcgctggctcata

SEQ ID NO: 594584 - DNA, 75 bp, synthetic construct
  source 1..75: mol_type = other DNA
gattaaacaggtccatatgaatgacgcctctaacgtacagttattgaaattagatgcagacggtgatggtcaata

SEQ ID NO: 594585 - DNA, 75 bp, synthetic construct
  source 1..75: mol_type = other DNA
gagccacattctttacaaagaaataattaaactaaataaaagattgagcgagattgaaaataaaacatcttccgg

SEQ ID NO: 594586 - DNA, 75 bp, synthetic construct
  source 1..75: mol_type = other DNA
actacagtttctattgagaaagatagactgcagaatctttccgattcaaagctaacaactatgatatcagaaatt

SEQ ID NO: 594587 - DNA, 75 bp, synthetic construct
  source 1..75: mol_type = other DNA
tttacattataaaaaaatatggatttattatagttgttgccataatcatggtttcacctgtgatgaattttgtgc

SEQ ID NO: 594588 - DNA, 75 bp, synthetic construct
  source 1..75: mol_type = other DNA
gtttaacgcctcttatgttaaagcaccgaacagcccggcggttactgaaggccatgtaacaaccaacgcactgta

SEQ ID NO: 594589 - DNA, 75 bp, synthetic construct
  source 1..75: mol_type = other DNA
ctgccgaaagagttcatgatttctgttgagtgtgatccaggtgctccgaagaatgctgagttgactatgggttct

SEQ ID NO: 594590 - DNA, 75 bp, synthetic construct
  source 1..75: mol_type = other DNA
gttcaatgcttcctatgtaaaagcaccgaacagccaggatgttacttctggccacgtaaccactaacgcactgta

SEQ ID NO: 594591 - DNA, 75 bp, synthetic construct
  source 1..75: mol_type = other DNA
gctcaatactgaacaggcaagcagtgttattgagaaactgaagaagtggcagcgcagagctgcgggagtaaaaca

SEQ ID NO: 594592 - DNA, 75 bp, synthetic construct
  source 1..75: mol_type = other DNA
tattacatgaccaacgcagtgaaggccgaaggcggcaccggcgatgcgatctctggttttgaaggcagcgtaccg

SEQ ID NO: 594593 - DNA, 75 bp, synthetic construct
  source 1..75: mol_type = other DNA
gacggtgagtgtcgggtaaacggcgtgcggctaacggaaaccgagtttgccagcgatccaaaaaccccggtaatg

SEQ ID NO: 594594 - DNA, 75 bp, synthetic construct
  source 1..75: mol_type = other DNA
tggcgaacttacccggcaagttctgcttcgcacaatgcccgatgcgctttatctctctggtggtgatgtcgcaat

SEQ ID NO: 594595 - DNA, 75 bp, synthetic construct
  source 1..75: mol_type = other DNA
gcggcacgtcgcatcaacccggagatgaaagtcggttgtatgctggcaatggtgccactttatccttactcctgt

SEQ ID NO: 594596 - DNA, 75 bp, synthetic construct
  source 1..75: mol_type = other DNA
cactttgcgaactgtatgagcgttatcagaggccgctgtttattgtcgaaaacggttttggcgcttacgacaaag

SEQ ID NO: 594597 - DNA, 75 bp, synthetic construct
  source 1..75: mol_type = other DNA
cggtgacttacgatggcgtggacctgatgggctacacaccgtggggctgcatcgactgtgtatctttcaccaccg

SEQ ID NO: 594598 - DNA, 75 bp, synthetic construct
  source 1..75: mol_type = other DNA
caatactgaacaggcaagcagtgttattgagaaactgaagaagtggcagcgcagagctgcgggagtaaaacatga

SEQ ID NO: 594599 - DNA, 75 bp, synthetic construct
  source 1..75: mol_type = other DNA
gctcagcaatgagcaggcaagtagcgtgattgagaaactgaagaagtggcagcgcagagctgcgggagtgaagca

SEQ ID NO: 594600 - DNA, 75 bp, synthetic construct
  source 1..75: mol_type = other DNA
catcgtccgtgacagttcagagcaggcgctggcgctgtgggttaaacgggaaaccggaatcagcgcgttacgctg

SEQ ID NO: 594601 - DNA, 75 bp, synthetic construct
  source 1..75: mol_type = other DNA
gcgggtttcgcattacgggaaaggtggcgcactgcgttccgtatgggcactttctcggcggcgactggtcccgtc

SEQ ID NO: 594602 - DNA, 75 bp, synthetic construct
  source 1..75: mol_type = other DNA
gacctctaccagaccggtgtcgatgcgctgattgttcaggatatggggattctggaacttgatattccgccgatt

SEQ ID NO: 594603 - DNA, 75 bp, synthetic construct
  source 1..75: mol_type = other DNA
cacacaactaaactgcgtgcttgagtccatgaaaaggaaaggctttcgcgttaagcctgccggaaaagccagctc

SEQ ID NO: 594604 - DNA, 75 bp, synthetic construct
  source 1..75: mol_type = other DNA
gatttgagttttcctgcggaacaaaaatcacttattgcgctggcaaataaagccgttagcggtagcggagttggc

SEQ ID NO: 594605 - DNA, 75 bp, synthetic construct
  source 1..75: mol_type = other DNA
acaatcgtattaaacttatctatcgaccacataatttgaatgtacctaagaaagtcgatgatgcttataaagctt

SEQ ID NO: 594606 - DNA, 75 bp, synthetic construct
  source 1..75: mol_type = other DNA
agatacgtcacgtcccgatccgttatttaatcctctgaaaacgggcgtttgccagctggataaggcgaacgtgac

SEQ ID NO: 594607 - DNA, 75 bp, synthetic construct
  source 1..75: mol_type = other DNA
cgcagggcatgtgttcgttggccggttttacgcaaatcgtgaatgaagcacgcataccagcgtgcgctctccatc

SEQ ID NO: 594608 - DNA, 75 bp, synthetic construct
  source 1..75: mol_type = other DNA
cggtcatgacgcggcatccatcaaacgcgctgtagaagaagcgcgcgctgtgactgacaaaccgtctctgctgat

SEQ ID NO: 594609 - DNA, 75 bp, synthetic construct
  source 1..75: mol_type = other DNA
caaacatcgcgcgcggtggttatgtgctgaaagactgcgccggtcagccggaactgattttcatcgctaccggtt

SEQ ID NO: 594610 - DNA, 75 bp, synthetic construct
  source 1..75: mol_type = other DNA
ccttcggtgaatctgctccggcagagcaactgtttgaagagtttggtttcaccgttgacaacgttgttgcgaaag

SEQ ID NO: 594611 - DNA, 75 bp, synthetic construct
  source 1..75: mol_type = other DNA
tgatgcgcgtaaatcactgggaataacgtcaaaacagatagcggaagccaccggaaagaaaaacatggcttcgca

SEQ ID NO: 594612 - DNA, 75 bp, synthetic construct
  source 1..75: mol_type = other DNA
caggcgaaagaatccgcatggaacgagaaattcgctgcttacgcgaaagcttatccgcaggaagccgctgaattt

SEQ ID NO: 594613 - DNA, 75 bp, synthetic construct
  source 1..75: mol_type = other DNA
attgcaaccaatgattccgctcatggtgttgatgtttccattctggaaccgttaaaacttactgatagtgtttta

SEQ ID NO: 594614 - DNA, 75 bp, synthetic construct
  source 1..75: mol_type = other DNA
tgaccccgaacatgtctacatggcgtccgtgtgaccaggttgaatctgcagtagcgtggaaatacggtgttgagc

SEQ ID NO: 594615 - DNA, 75 bp, synthetic construct
  source 1..75: mol_type = other DNA
atgccggagccggggtggggaaggatcaccgattcacaccagtggaacaccttgctaagtctacataacgcgcaa

SEQ ID NO: 594616 - DNA, 75 bp, synthetic construct
  source 1..75: mol_type = other DNA
gttgagcaggtcgcttcactgcgcgtgaccccgaacatgtctacatggcgtccgtgtgaccaggttgaatctgca

SEQ ID NO: 594617 - DNA, 75 bp, synthetic construct
  source 1..75: mol_type = other DNA
caaagtcatcgggcattatctgaacataaaacactatcagtaagttggagtcattaccttggtcgcgatgttaat

SEQ ID NO: 594618 - DNA, 75 bp, synthetic construct
  source 1..75: mol_type = other DNA
ggctgagaatctgacatcattaacactttccaatggtgccagggttattctggcaaaatccgcgggtgaagagca

SEQ ID NO: 594619 - DNA, 75 bp, synthetic construct
  source 1..75: mol_type = other DNA
ctggctgaaaaatgcggttgatcagcaagctgaacgtgatttacgtatgctgaccagtcgcctggcatccagctc

SEQ ID NO: 594620 - DNA, 75 bp, synthetic construct
  source 1..75: mol_type = other DNA
cgggtgaagagcaaaagctacaaattattgccgtatctaataaaggcgatttaagtttccctgcgcagcaaaaat

SEQ ID NO: 594621 - DNA, 75 bp, synthetic construct
  source 1..75: mol_type = other DNA
acggtagataatgttaacactacggttaaacaatatctttctcatccggtgaatacctttaccggagtattacta

SEQ ID NO: 594622 - DNA, 75 bp, synthetic construct
  source 1..75: mol_type = other DNA
ttaaataatacgccgttcttgtcgccggaagagacatatcaactttcgaaacgtctgtggcagcaaattaccgtg

SEQ ID NO: 594623 - DNA, 75 bp, synthetic construct
  source 1..75: mol_type = other DNA
aacgtttcattaaccggtgcggtgagtctggcatcaatgctgacggagatatttctcctgcagcaggcacaggga

SEQ ID NO: 594624 - DNA, 75 bp, synthetic construct
  source 1..75: mol_type = other DNA
caggaacgtactgaagagcagctggcaaacatcgcgcgcggtggttatgtgctgaaagactgtgctggtcagccg

SEQ ID NO: 594625 - DNA, 75 bp, synthetic construct
  source 1..75: mol_type = other DNA
tgatttcctgaaacacaacccgcagaatccgtcttgggctgaccgtgaccgcttcgtgctgtccaacggccacgg

SEQ ID NO: 594626 - DNA, 75 bp, synthetic construct
  source 1..75: mol_type = other DNA
cacctggcctggctggccggtgaaactgggttggctgacaccacgaggcggtgagctgatctcttatctcggaca

SEQ ID NO: 594627 - DNA, 75 bp, synthetic construct
  source 1..75: mol_type = other DNA
atcatgacagcgttgacgccccatccaccgcaaaaacaggcgtatggtgtgacattacccacttcagtgctgttt

SEQ ID NO: 594628 - DNA, 75 bp, synthetic construct
  source 1..75: mol_type = other DNA
gcctcgcatcaatgctgacggagatatttctcctgcaacaagcacagggaatgccggagccggggtggggaagga

SEQ ID NO: 594629 - DNA, 75 bp, synthetic construct
  source 1..75: mol_type = other DNA
gctccatcgtccttgctttcccggataacaacgaaaaagcggtcagtggcgcacaccagaaactgtgtcctacct

SEQ ID NO: 594630 - DNA, 75 bp, synthetic construct
  source 1..75: mol_type = other DNA
gcggcgtaaagaaggcggggaagcacgtgaatatcaaaacaccactttcgaatatgaacgcccggcatcaacggc

SEQ ID NO: 594631 - DNA, 75 bp, synthetic construct
  source 1..75: mol_type = other DNA
aattaggtatttgctcagaaagtttggtttatcataaaataggtgcaagtactgatgggggaaagagcatgatgg

SEQ ID NO: 594632 - DNA, 75 bp, synthetic construct
  source 1..75: mol_type = other DNA
tccgcttaccatcacatgaaattaatccttttcgggcaacgctcttgctgattttgttgatatgtgccgttctgg

SEQ ID NO: 594633 - DNA, 75 bp, synthetic construct
  source 1..75: mol_type = other DNA
tcatgattcggggcatattctcaatccgctgctggcagaaggccaggtacacggcgggatgggaatgggcattgg

SEQ ID NO: 594634 - DNA, 75 bp, synthetic construct
  source 1..75: mol_type = other DNA
tgccattgctaaggttaccgggcgggcacgatatacagatgattatgttatggcaggcatgtgttacgcaaaata

SEQ ID NO: 594635 - DNA, 75 bp, synthetic construct
  source 1..75: mol_type = other DNA
caaatgaggccaatgaccactcgtctttaacccctagtgaggttaggcgattagtgcctatagtcaaatccaaga

SEQ ID NO: 594636 - DNA, 75 bp, synthetic construct
  source 1..75: mol_type = other DNA
aggtataaagtctggttttaagaatattctatgtaatagattaaaacagttcaaaaaatataagcaaaatgggag

SEQ ID NO: 594637 - DNA, 75 bp, synthetic construct
  source 1..75: mol_type = other DNA
tattatcgagttacaatggggaaaaatatattggagagcaattggactcaataataaaatgctatagagatttcg

SEQ ID NO: 594638 - DNA, 75 bp, synthetic construct
  source 1..75: mol_type = other DNA
ccggtgaaaggcaaagagaacgcagacagcaccctcaatcgcttgaagatggcgggtcatacaaactgtattcga

SEQ ID NO: 594639 - DNA, 75 bp, synthetic construct
  source 1..75: mol_type = other DNA
gtggtcattggcccggtgaaaggcaaagagaacgcagacagcaccctcaatcgcttgaagatggcgggtcataca

SEQ ID NO: 594640 - DNA, 75 bp, synthetic construct
  source 1..75: mol_type = other DNA
tccttgctggtagagcgttcaagtatttaactggtgttaatgaaagtatttttgaaaataaaatgaaaaagtttt

SEQ ID NO: 594641 - DNA, 75 bp, synthetic construct
  source 1..75: mol_type = other DNA
aacgtatttacagcgcagggttgccggagtgtcttgaaaaaggccggaaaatctttgaatgggaaaaacgccgtg

SEQ ID NO: 594642 - DNA, 75 bp, synthetic construct
  source 1..75: mol_type = other DNA
agaaatacagggttttctatgaagacgccattgctgaattgttcaaagaagaggcgagggctgataacgaaatta

SEQ ID NO: 594643 - DNA, 75 bp, synthetic construct
  source 1..75: mol_type = other DNA
taaccatcaaccgcatcctcaacgttcatgattcggctggcagaaggtcaggtacacggcggaatggggatgggc

SEQ ID NO: 594644 - DNA, 75 bp, synthetic construct
  source 1..75: mol_type = other DNA
ccgatgatcaggctccggctgaacagtcgctacggcgtaatctcacaaaccgacatattcagcttattgccattg

SEQ ID NO: 594645 - DNA, 75 bp, synthetic construct
  source 1..75: mol_type = other DNA
acggcggaatgggaatgggcattggctgggcgctatttgaagagatgatcatcgatgctaaaagcggcgtggtcc

SEQ ID NO: 594646 - DNA, 75 bp, synthetic construct
  source 1..75: mol_type = other DNA
agccaatggcggcattcctgaccagcaagcttggcggcattccggtgaaagtttcccttagccgtgaagagtgtt

SEQ ID NO: 594647 - DNA, 75 bp, synthetic construct
  source 1..75: mol_type = other DNA
ccggtaagccgatcaacatggtggaagaaataccgtgctttctatgaagacgccattgctgaattgttcaaagaa

SEQ ID NO: 594648 - DNA, 75 bp, synthetic construct
  source 1..75: mol_type = other DNA
gggcagctctctgccgaaagctccatcaaaaccaccactaacccaccggcgtttggctgtacctttgttgatctg

SEQ ID NO: 594649 - DNA, 75 bp, synthetic construct
  source 1..75: mol_type = other DNA
ccggcagtatacggaactgctgagagaatataaaaatttgcggcggtatttcggtgtgactgtgcaggtgccgta

SEQ ID NO: 594650 - DNA, 75 bp, synthetic construct
  source 1..75: mol_type = other DNA
atttcttatggggcggcgcagttgccgctcatcaggtcgaaggcggctggaacaaaggcggcaaagggccgagca

SEQ ID NO: 594651 - DNA, 75 bp, synthetic construct
  source 1..75: mol_type = other DNA
gtagtcccggagaaaagcccgtttgttgaactgtttgtgttggtaggtttgcctgcggctgccagcgtgatcaac

SEQ ID NO: 594652 - DNA, 75 bp, synthetic construct
  source 1..75: mol_type = other DNA
acaaatcttttagtgacttcgcttccgatttactggggccatgggcgggatatttcactggctggacctactggt

SEQ ID NO: 594653 - DNA, 75 bp, synthetic construct
  source 1..75: mol_type = other DNA
tggtttcgctggaagactacccgctcggcatctggttctttaatgaagcagggcatcaggacggtatctttgtgg

SEQ ID NO: 594654 - DNA, 75 bp, synthetic construct
  source 1..75: mol_type = other DNA
cgcataacagcatgctggtggagctgttccgtcagtcctggcagtggcgggaaaacaatccaatgtggatccagt

SEQ ID NO: 594655 - DNA, 75 bp, synthetic construct
  source 1..75: mol_type = other DNA
gtgaaacccaacgactgggacaatcagtggaaagaggacgaagattaccttaagtggctggaccactgtctggcc

SEQ ID NO: 594656 - DNA, 75 bp, synthetic construct
  source 1..75: mol_type = other DNA
tctacgtcttcgcgctgattgtgattatgtccgtgacgccgtggagttcggtagtcccggagaaaagcccgtttg

SEQ ID NO: 594657 - DNA, 75 bp, synthetic construct
  source 1..75: mol_type = other DNA
attccagatagcggttttcgctttcgtggggattgagctggtaggtacaacagctgcggaaaccaaagatccgga

SEQ ID NO: 594658 - DNA, 75 bp, synthetic construct
  source 1..75: mol_type = other DNA
tgagcagcagggaacgcggccggtgctgattgtcacaccggcggcctttaatcgcgtgacccgactgcctgttgt

SEQ ID NO: 594659 - DNA, 75 bp, synthetic construct
  source 1..75: mol_type = other DNA
ttgaggtcccgtggaacgaacaaacgccggcacagcgtcagcaaacgctgcaacgccagcgtcaggcgcagcagt

SEQ ID NO: 594660 - DNA, 75 bp, synthetic construct
  source 1..75: mol_type = other DNA
tgaatcactggggataacgtccaaacagatagcggaagccaccggaaagaaaaacatggtgtcgcactggtttgg

SEQ ID NO: 594661 - DNA, 75 bp, synthetic construct
  source 1..75: mol_type = other DNA
ttgtttaaattatgagtttttatatttctatcttacatcattaaaagaaaaaataaaactgcaaggccagcaagg

SEQ ID NO: 594662 - DNA, 75 bp, synthetic construct
  source 1..75: mol_type = other DNA
cgaaatcaacggttgaagagtattatggcgggaatatcccatgggtatctatttctgatatgacatctaatggaa

SEQ ID NO: 594663 - DNA, 75 bp, synthetic construct
  source 1..75: mol_type = other DNA
tgagaatgggacaaggttttctgaaacttggaaattatatgccttatcgaaattatttcagagagttacgactaa

SEQ ID NO: 594664 - DNA, 75 bp, synthetic construct
  source 1..75: mol_type = other DNA
atggtagatcaggtaaaagtcgttgccgatgatcagtctccggctgaacagtcgctacggcgcaatctcacaaac

SEQ ID NO: 594665 - DNA, 75 bp, synthetic construct
  source 1..75: mol_type = other DNA
agaaagcctgcatagaaaaacaggaactgccgccagtacgcttaaaaacacaatcatattcgctgcgtctggaat

SEQ ID NO: 594666 - DNA, 75 bp, synthetic construct
  source 1..75: mol_type = other DNA
ttaccggatattgttgtcggagatgtaaaggccttgcactgtcaagaacatcgcggcgtctgtctcaggaagtca

SEQ ID NO: 594667 - DNA, 75 bp, synthetic construct
  source 1..75: mol_type = other DNA
ataatcccgatctggagttttacctggtcaccgtccccgatggcaaattaagcccacgactggcggcactgaaac

SEQ ID NO: 594668 - DNA, 75 bp, synthetic construct
  source 1..75: mol_type = other DNA
aatgcgtcggtcaataacctgtttgataccaaatatgcctacagtgaagggtttattgaagaaggtcgcaatttc

SEQ ID NO: 594669 - DNA, 75 bp, synthetic construct
  source 1..75: mol_type = other DNA
gtgagtgatgccatcctctcgcacaatatcgatgccgataccattcaaaatcagaacagcggcacggtggattac

SEQ ID NO: 594670 - DNA, 75 bp, synthetic construct
  source 1..75: mol_type = other DNA
gaacgctataccacgtccaaacctgcgtataaccagatagcgattgttaacccgcagctcaagccggaacgcgcg

SEQ ID NO: 594671 - DNA, 75 bp, synthetic construct
  source 1..75: mol_type = other DNA
cggggtgccggtatctatgttcttgatagctcaggcagccacaacacagacagttcggatgccaacgtctgtaat

SEQ ID NO: 594672 - DNA, 75 bp, synthetic construct
  source 1..75: mol_type = other DNA
gaacgctataccacgtccaaaccggcgtataaccagatagccattgttaatccacaacttaagccagaacgcgct

SEQ ID NO: 594673 - DNA, 75 bp, synthetic construct
  source 1..75: mol_type = other DNA
aaaagtcacgctactggcagtggccggagtatgacaaagaaagtttttactatcagggaaccacacagctaaacg

SEQ ID NO: 594674 - DNA, 75 bp, synthetic construct
  source 1..75: mol_type = other DNA
tacgcgttatgccgcggacttaagctatctgccgctaatgcgggaactggaaaaacgttatgaagggaaactacg

SEQ ID NO: 594675 - DNA, 75 bp, synthetic construct
  source 1..75: mol_type = other DNA
ctaaaagagacccggcagatgacgaaacatttacgtcgccgaccgggccatatgacagcggagcattactggtaa

SEQ ID NO: 594676 - DNA, 75 bp, synthetic construct
  source 1..75: mol_type = other DNA
tatggatgctggcaaccggtacagcgattggcccttatttatcgattctgcaactgggcaaagatttagatcgct

SEQ ID NO: 594677 - DNA, 75 bp, synthetic construct
  source 1..75: mol_type = other DNA
tatttcactggctggacttattggttctgctgggtggttaccggtatggcggacgtggttgccatcacggcttat

SEQ ID NO: 594678 - DNA, 75 bp, synthetic construct
  source 1..75: mol_type = other DNA
tttgcccgcactgccggctttgcggtgtcgttggatggtgttggcatacgtaccacaggtgttgtgcgttgcgat

SEQ ID NO: 594679 - DNA, 75 bp, synthetic construct
  source 1..75: mol_type = other DNA
aaaaacgctacgaggggaaactgcgcattcagacggtggtcagtcgggaaacggctgcgggttcgctcactgggc

SEQ ID NO: 594680 - DNA, 75 bp, synthetic construct
  source 1..75: mol_type = other DNA
ggcagcagcgaaagcggtgacatgcagttccatctcgccattgccgaagcaacgcataacagcatgctggtggag

SEQ ID NO: 594681 - DNA, 75 bp, synthetic construct
  source 1..75: mol_type = other DNA
tcaaaggactggtagaagtgcgtcggggcgccggtatttatgttctcgacagttcaaccagccacactgccgaca

SEQ ID NO: 594682 - DNA, 75 bp, synthetic construct
  source 1..75: mol_type = other DNA
tcaaagggctggtagaagtgcggcgcggtgccggtatttatgttcttgatagctcaggcagccagaacacagaca

SEQ ID NO: 594683 - DNA, 75 bp, synthetic construct
  source 1..75: mol_type = other DNA
gtatttctcgatcagaaccataaaggccacgctttcaacactggtgcatgagatggttcatcagtggcaattcca

SEQ ID NO: 594684 - DNA, 75 bp, synthetic construct
  source 1..75: mol_type = other DNA
atatcaacctttgggggaaaccgggtattgtggtgtactgcggcggggagcattgcgaaaaggcacagctggtag

SEQ ID NO: 594685 - DNA, 75 bp, synthetic construct
  source 1..75: mol_type = other DNA
gttccgtcagtcctggcagtggcgggaaaacaatccgatgtggatccagttgcacagccatctggatgacagcct

SEQ ID NO: 594686 - DNA, 75 bp, synthetic construct
  source 1..75: mol_type = other DNA
agcgttacgttattgcgctggtgatagtcattgccgggttggttgcattgtggaaaattctcaatgcgccggtgc

SEQ ID NO: 594687 - DNA, 75 bp, synthetic construct
  source 1..75: mol_type = other DNA
ggtaaaagcgcaggtttctgaagcggatgtaatccacctgaagccggggcaaaaagcctggtttacggtgcttgg

SEQ ID NO: 594688 - DNA, 75 bp, synthetic construct
  source 1..75: mol_type = other DNA
atgaaaaagcggaaaaccgtgaagaagcgttacgttattgcgctggtgatagtcatcgccggactgattacgtta

SEQ ID NO: 594689 - DNA, 75 bp, synthetic construct
  source 1..75: mol_type = other DNA
taacatgaggcgtaaggcttcactcactgataaggaactaccccagcttaaagatattgacctgacaactaaagc

SEQ ID NO: 594690 - DNA, 75 bp, synthetic construct
  source 1..75: mol_type = other DNA
caagagattcttggtaagaaccgtataggccgtacacctgaaccgccccgggtttcctggagagtgttttatctg

SEQ ID NO: 594691 - DNA, 75 bp, synthetic construct
  source 1..75: mol_type = other DNA
tggacagcggcaaccggaacggcactcctcggcgcattcaacgctaaccagtcatacactgtcggcactacgtac

SEQ ID NO: 594692 - DNA, 75 bp, synthetic construct
  source 1..75: mol_type = other DNA
actacatcatcaccggcggcgcttttgaccgggcgtgtgatgaactgttaacgcgcaattttcagctgtcctgga

SEQ ID NO: 594693 - DNA, 75 bp, synthetic construct
  source 1..75: mol_type = other DNA
actgtaatggccgcagggtttccatctctgaccggagatcataaagtcatttatgtagcagcggatcgacatgta

SEQ ID NO: 594694 - DNA, 75 bp, synthetic construct
  source 1..75: mol_type = other DNA
ggagttaacaccatcatgcgtgaatatccaaatggcgaaacaacacacctcactgtaatggctgcagggtttcca

SEQ ID NO: 594695 - DNA, 75 bp, synthetic construct
  source 1..75: mol_type = other DNA
gacaacaataggcacgttaccagcatcacaacgtaatgaccgccccgctataccgaactactacgaaggtgttgt

SEQ ID NO: 594696 - DNA, 75 bp, synthetic construct
  source 1..75: mol_type = other DNA
atcgaaatctatcttcactcagccctgcatcaagaagtggacttcatttattaggttctatctggaacatagtaa

SEQ ID NO: 594697 - DNA, 75 bp, synthetic construct
  source 1..75: mol_type = other DNA
aattatacatataataaaaaagaatataatataagcgaattgtttattgccgctgatgaaaaaggaaatctcatc

SEQ ID NO: 594698 - DNA, 75 bp, synthetic construct
  source 1..75: mol_type = other DNA
taatgatcaaatatctaaaataacacaaaaacaatacacttttgatgaagtagcaagaaatgaaaaaaaatacaa

SEQ ID NO: 594699 - DNA, 75 bp, synthetic construct
  source 1..75: mol_type = other DNA
gtgatgttccaccgttgaagcgtaaaccgtttgataagtggatgcttgaaaattttctaggaatgattgacgtgg

SEQ ID NO: 594700 - DNA, 75 bp, synthetic construct
  source 1..75: mol_type = other DNA
atgaatcgcatcttaggcaacgggttagagattcacacgctacaagatggtcttatctacacaaaggatgcttta

SEQ ID NO: 594701 - DNA, 75 bp, synthetic construct
  source 1..75: mol_type = other DNA
tttaggaatctcaatcattcagcgggttaaaagctacctagcgcatcaggagagtaagcagaagtctttccgtgt

SEQ ID NO: 594702 - DNA, 75 bp, synthetic construct
  source 1..75: mol_type = other DNA
atgaaccgcatcttaggcaacgggatagagattcacacattgcaagatggccttatctacacaaaggatgcttta

SEQ ID NO: 594703 - DNA, 75 bp, synthetic construct
  source 1..75: mol_type = other DNA
atgttagcccgtattgagtctggggagtttccagaaggtacgattttgcttgttgagagtatcgaccgtataggc

SEQ ID NO: 594704 - DNA, 75 bp, synthetic construct
  source 1..75: mol_type = other DNA
ccgctaaatgatggaacatctatctttgaaattgctgaaaaagagctactagaaatagacgcttatcaactgtag

SEQ ID NO: 594705 - DNA, 75 bp, synthetic construct
  source 1..75: mol_type = other DNA
tgagtataaaagagcaaacgttaatgacgccttacctacagtttgaccgcaaccagtgggcagctctgcgtgatt

SEQ ID NO: 594706 - DNA, 75 bp, synthetic construct
  source 1..75: mol_type = other DNA
gtgaagaagcgttacgttattgcgatggtgatagtcatcgccgggctgattacgttatggagaattcttaacgca

SEQ ID NO: 594707 - DNA, 75 bp, synthetic construct
  source 1..75: mol_type = other DNA
ttcagaaaacaggctgatgctgctgagcagagtctgagccgacaggcgctggctgcacaaaaagccgggatatca

SEQ ID NO: 594708 - DNA, 75 bp, synthetic construct
  source 1..75: mol_type = other DNA
ttattgatttgagtctggatgcggcccggtttgatgaacagatggcccgggtacaccgtcatttttccagtctgg

SEQ ID NO: 594709 - DNA, 75 bp, synthetic construct
  source 1..75: mol_type = other DNA
agcctttacctgttctgtggacatcgcctggcatctgatattgagatcatgatgcgtgaacgtttcaacgtgctt

SEQ ID NO: 594710 - DNA, 75 bp, synthetic construct
  source 1..75: mol_type = other DNA
tgtgggcgaggcctggacccgcgccacagagcaggaaaaacgccgccagggcaacaccacagagctgctggtgac

SEQ ID NO: 594711 - DNA, 75 bp, synthetic construct
  source 1..75: mol_type = other DNA
cgccgctgtacttcgcgttccgtatcatggtggcgtgtggcttcctgctgctggcaattattgcgctctccttct

SEQ ID NO: 594712 - DNA, 75 bp, synthetic construct
  source 1..75: mol_type = other DNA
gttgggcgcaacgccggtgatggtggacgttgatcgcgatacgctgatgatcacgcctgaagcgatcgaagcggc

SEQ ID NO: 594713 - DNA, 75 bp, synthetic construct
  source 1..75: mol_type = other DNA
ccacgcactaaagccatcattccggtgcattatgccggtgcgccagcagatattgacgccattcgcgccattggc

SEQ ID NO: 594714 - DNA, 75 bp, synthetic construct
  source 1..75: mol_type = other DNA
ggctcacaaccggtccgaagaatcaggcgcttgagcaagccttttgccagttgacgggaaatcagcatgccatcg

SEQ ID NO: 594715 - DNA, 75 bp, synthetic construct
  source 1..75: mol_type = other DNA
cattacgccacgcactaaagccatcattccggtgcattatgccggtgcgccagcagatattgacgccattcgcgc

SEQ ID NO: 594716 - DNA, 75 bp, synthetic construct
  source 1..75: mol_type = other DNA
ttttcgtttcacgccatcaaaaatattacctgcgcggaaggcggcctgattgttaccgataatgaaagcctcgcc

SEQ ID NO: 594717 - DNA, 75 bp, synthetic construct
  source 1..75: mol_type = other DNA
gcccatcaatgggtacggaagaactcaccgcagtaaaagacgttctcgaatcaggatggataaccactggcccga

SEQ ID NO: 594718 - DNA, 75 bp, synthetic construct
  source 1..75: mol_type = other DNA
cacaggacaactggctttctcactgatcatgatcgtagggctttacaccctgttcttaatcgccgaagtctacct

SEQ ID NO: 594719 - DNA, 75 bp, synthetic construct
  source 1..75: mol_type = other DNA
cggtaatcatccaagctacgcggctcgatacatcagtccttccacgcaatatcttctcgcagtcgtatctgcttt

SEQ ID NO: 594720 - DNA, 75 bp, synthetic construct
  source 1..75: mol_type = other DNA
tccaggctatagccaatgctctaattgctgagcgtcggcgcactaaggctttggaagacgccttgcgtgcacatg

SEQ ID NO: 594721 - DNA, 75 bp, synthetic construct
  source 1..75: mol_type = other DNA
gattcaaaccacgctggtcaataacgctgtgagcaagccactgtttgatatggcaaaaggagatacaccttttga

SEQ ID NO: 594722 - DNA, 75 bp, synthetic construct
  source 1..75: mol_type = other DNA
gtacgatatgcaccgtctggtgaagtttgtttccgatttgaaatcgggcgtgccaaacgttactgctccggttta

SEQ ID NO: 594723 - DNA, 75 bp, synthetic construct
  source 1..75: mol_type = other DNA
ggcttttacagacccggattcctattttcataactacgcgaaattaactaaagaagaagcgattaagactgccat

SEQ ID NO: 594724 - DNA, 75 bp, synthetic construct
  source 1..75: mol_type = other DNA
ctggatgtcagactaaccacggctgaaggagaaatagtcactttacaggctgacgtcagcgctcttgatggccgg

SEQ ID NO: 594725 - DNA, 75 bp, synthetic construct
  source 1..75: mol_type = other DNA
ctggctgagctgccgagcaccttttaccgcatcggattcgatcggcttcgtggacgactccaactgtcatcacac

SEQ ID NO: 594726 - DNA, 75 bp, synthetic construct
  source 1..75: mol_type = other DNA
ggctaccggtctgactatggagttccagttcgggactaactggtcttactattcccactatgtaggggatatctt

SEQ ID NO: 594727 - DNA, 75 bp, synthetic construct
  source 1..75: mol_type = other DNA
tgggctatcggtgaagtgctgccgacagctgtggcgaactcgtcactgaccgcaggcgatctcatcttctcaatg

SEQ ID NO: 594728 - DNA, 75 bp, synthetic construct
  source 1..75: mol_type = other DNA
gacacaggtagcaaaactggaaggttatcaagaagataaagctaaaaaactggcacagcagcaagttgaaggcgc

SEQ ID NO: 594729 - DNA, 75 bp, synthetic construct
  source 1..75: mol_type = other DNA
cggtcgatatggcaaccgaactgatgactcaggtggcgaagctggaaggctatcaggaagatcaagctaaaaagc

SEQ ID NO: 594730 - DNA, 75 bp, synthetic construct
  source 1..75: mol_type = other DNA
atggctacaatcctcccccctgattatgatttactgtccattcctttcagttctgccaccgatttaactgacctg

SEQ ID NO: 594731 - DNA, 75 bp, synthetic construct
  source 1..75: mol_type = other DNA
cgacttactatgtttgtgagcaacgtctcacgcagttcgaaaagatttcgcaccagttcacctttttctggatga

SEQ ID NO: 594732 - DNA, 75 bp, synthetic construct
  source 1..75: mol_type = other DNA
gtcatctcagtaactgagagttttagttttggggttctttctcctgcgccgggtgggcgcatgtcaaaactacag

SEQ ID NO: 594733 - DNA, 75 bp, synthetic construct
  source 1..75: mol_type = other DNA
gtatttatatggcggtagctcatacctttatgaaaaatccataagggatgtggctacccaagcaatactgttggg

SEQ ID NO: 594734 - DNA, 75 bp, synthetic construct
  source 1..75: mol_type = other DNA
atggctttccggctattaccggagaaggtaatccactggttgtcgggtacaccaaaggcgcttcaggcgttgtct

SEQ ID NO: 594735 - DNA, 75 bp, synthetic construct
  source 1..75: mol_type = other DNA
ggagacgggtaaaaatccggatgatatcggccatattatttcttcttttgaatcacttaaacttcaccggatcat

SEQ ID NO: 594736 - DNA, 75 bp, synthetic construct
  source 1..75: mol_type = other DNA
cctgatggtcggattgttcatcgcgttcttcatccccatagcgctcgatccggttgtcattccgataacaatgat

SEQ ID NO: 594737 - DNA, 75 bp, synthetic construct
  source 1..75: mol_type = other DNA
cagagataaacttggaaataacaacttaacgaatgtaatcacaataatgtctaaatatagacaagataggaatgt

SEQ ID NO: 594738 - DNA, 75 bp, synthetic construct
  source 1..75: mol_type = other DNA
tcgaattagtaatgacaaagatcaggagcaagttcataaaatggtacctgataatttgcgaggattactccgtga

SEQ ID NO: 594739 - DNA, 75 bp, synthetic construct
  source 1..75: mol_type = other DNA
tgagcattattccggtggtgcaacatgggatatccgaaagccgtatatagataaagttctggttattaattcctc

SEQ ID NO: 594740 - DNA, 75 bp, synthetic construct
  source 1..75: mol_type = other DNA
caatagcatttacacgtttacctacgtcacgaaatcgaaacattgcccgtacagcaaaagcttcgacacgactga

SEQ ID NO: 594741 - DNA, 75 bp, synthetic construct
  source 1..75: mol_type = other DNA
atcggtattcatgaacaccagttacagccgctacatcccgggtgattccaatggtgcgctgattaatttctgtcg

SEQ ID NO: 594742 - DNA, 75 bp, synthetic construct
  source 1..75: mol_type = other DNA
tttcccacttaaaaagctcagtatcaatccagttggtacattgagagttgatagaaaaaacgaaggtttcaggtt

SEQ ID NO: 594743 - DNA, 75 bp, synthetic construct
  source 1..75: mol_type = other DNA
catttcagggctcgaatttatggtgaaaaactgaatccgctgagtgataacaaaacattaattacgttatcccat

SEQ ID NO: 594744 - DNA, 75 bp, synthetic construct
  source 1..75: mol_type = other DNA
cgtgacctggcgcgtggccacctcatcaacaaaggtgaagcaatcggtgttatcgcggcacagtccatcggtgaa

SEQ ID NO: 594745 - DNA, 75 bp, synthetic construct
  source 1..75: mol_type = other DNA
ttcgacgcgaagatgggtgcggaagcaatccaggctctactgaagagcatggatctggagcaagagtgcgaacag

SEQ ID NO: 594746 - DNA, 75 bp, synthetic construct
  source 1..75: mol_type = other DNA
tatcgcggcacagtccatcggtgaaccgggtacacagctgaccatgcgtacgttccatatcggtggtgcggcatc

SEQ ID NO: 594747 - DNA, 75 bp, synthetic construct
  source 1..75: mol_type = other DNA
taacgcgggtagctccgacttcctggaaggcgaacaggttgaatactctcgcgtcaagatcgcaaaccgcgaact

SEQ ID NO: 594748 - DNA, 75 bp, synthetic construct
  source 1..75: mol_type = other DNA
actccgaaaccaagcgtaaaaaactgaccaagcgtatcaaactgctggaagcgttcgttcagtctggtaacaaac

SEQ ID NO: 594749 - DNA, 75 bp, synthetic construct
  source 1..75: mol_type = other DNA
caggtgaaaaataaaggtagcatcaagctcagcaacgtgaagtcggttgtgaactccagcggtaaactggttatc

SEQ ID NO: 594750 - DNA, 75 bp, synthetic construct
  source 1..75: mol_type = other DNA
atatacggtatcattgtcggcatcccgacctttattctttgcggcccggtattgaataaattctgtcagcgcatt

SEQ ID NO: 594751 - DNA, 75 bp, synthetic construct
  source 1..75: mol_type = other DNA
cgtggtatgtatcgttatcgcgttaatgtttctttatacctttgtggggatatgcgcgggatttggcggcggttt

SEQ ID NO: 594752 - DNA, 75 bp, synthetic construct
  source 1..75: mol_type = other DNA
aaaaactgaatccgctgagtgataacaaaacattaattacgttatcccataaaaaaatcaatggttacatgatta

SEQ ID NO: 594753 - DNA, 75 bp, synthetic construct
  source 1..75: mol_type = other DNA
cacgaaatcatctccgaggcagaagcagaagttgctgaaattcaggagcagttccagtctggtctggtaactgcg

SEQ ID NO: 594754 - DNA, 75 bp, synthetic construct
  source 1..75: mol_type = other DNA
taatttccgacggtccggaagcgccgcatgacattctgcgtctgcgtggtgttcatgctgtgactcgttacatcg

SEQ ID NO: 594755 - DNA, 75 bp, synthetic construct
  source 1..75: mol_type = other DNA
acgtaacgaaaaacgtatgctgcaggaagcggtagacgccctgctggataacggtcgtcgtggtcgtgcgatcac

SEQ ID NO: 594756 - DNA, 75 bp, synthetic construct
  source 1..75: mol_type = other DNA
gttggtcacctggtcttcaccaaaaactacacatcgaaggccgcatatgtgggctatcgccacgaatgcgcctac

SEQ ID NO: 594757 - DNA, 75 bp, synthetic construct
  source 1..75: mol_type = other DNA
ctttcgtgatgcgcgtgctgctctggggataacggcaaaacagattgcagatgccacaggaaagaaaaacatggt

SEQ ID NO: 594758 - DNA, 75 bp, synthetic construct
  source 1..75: mol_type = other DNA
ccgtgccgggcagcaacgccttgccgccgtacaacgggccatgcagcagggggccgcgaatgatgactggtttat

SEQ ID NO: 594759 - DNA, 75 bp, synthetic construct
  source 1..75: mol_type = other DNA
cccgccccgccgtatctcgtcggtttccgtgaccgttccgggcgcaccatcgccggcgataaaaccgatgaatgg

SEQ ID NO: 594760 - DNA, 75 bp, synthetic construct
  source 1..75: mol_type = other DNA
gcatcgatgttatggcgcgtatccctgataacgccattgatttcatattaaccgacccgccttacctggtgggct

SEQ ID NO: 594761 - DNA, 75 bp, synthetic construct
  source 1..75: mol_type = other DNA
cgtgccggacagcaacgactggccgccgtgcaacgggccatgcagcagggggccgcgaatgataactggtttgaa

SEQ ID NO: 594762 - DNA, 75 bp, synthetic construct
  source 1..75: mol_type = other DNA
accagcctgcaaccactgattgagagcttcacacatccgaacgcaattgtgctggacccgtttgcaggcagcggc

SEQ ID NO: 594763 - DNA, 75 bp, synthetic construct
  source 1..75: mol_type = other DNA
ggaactgcagagtgaatataagcatctgcggcggtattttggcgtgacggcgcaggtgccgtacacggatgtgtg

SEQ ID NO: 594764 - DNA, 75 bp, synthetic construct
  source 1..75: mol_type = other DNA
ctgcaaccggcctgtaatgagatgtaccgcgtactcaaaaaagacgcgctgatggtgagcttctatggctggaac

SEQ ID NO: 594765 - DNA, 75 bp, synthetic construct
  source 1..75: mol_type = other DNA
agggcaccttgtgttcaccaaaaactacacatccaaatctgcgtatgtcgcgtaccgtcacgaatgcgcctatat

SEQ ID NO: 594766 - DNA, 75 bp, synthetic construct
  source 1..75: mol_type = other DNA
ccgacccgccgtacctcgtcggttttcgtgaccgtcaggggcgtaccattgccggcgataaaaccgacgaatggc

SEQ ID NO: 594767 - DNA, 75 bp, synthetic construct
  source 1..75: mol_type = other DNA
cggaaacgactattaaacaggatgacactgattgatacagggtatgaatggcggttttttgctccgtttccggta

SEQ ID NO: 594768 - DNA, 75 bp, synthetic construct
  source 1..75: mol_type = other DNA
tgccggcgataaaaccgacgaatggctgcaacctgcctgtaatgagatgtaccgcgtactcaaaaaagacgcgtt

SEQ ID NO: 594769 - DNA, 75 bp, synthetic construct
  source 1..75: mol_type = other DNA
cgtattgaccgctttatggcagcctggaaacgcgccggattcagcgttgtagggcaccttgtgttcaccaaaagc

SEQ ID NO: 594770 - DNA, 75 bp, synthetic construct
  source 1..75: mol_type = other DNA
cgtaccgtcacgaatgcgcctatatcctggcaaaaggccgtccacgtctgccacaaaacccgctgccggacgtgc

SEQ ID NO: 594771 - DNA, 75 bp, synthetic construct
  source 1..75: mol_type = other DNA
actgacccgccatacctcgtcggttttcgtgaccgacaggggcgtaccatcgccggcgataaaaccgatgaatgg

SEQ ID NO: 594772 - DNA, 75 bp, synthetic construct
  source 1..75: mol_type = other DNA
tccgtgaccgttccggacgcaccattgccggtgacgttaacgatgactggctgcaacctgccagcaatgagatgt

SEQ ID NO: 594773 - DNA, 75 bp, synthetic construct
  source 1..75: mol_type = other DNA
attactattagtacattccatatttgcattttgctcacagcatctatttttttattaacaaactctttttttatt

SEQ ID NO: 594774 - DNA, 75 bp, synthetic construct
  source 1..75: mol_type = other DNA
aaataaccaaagagaaaaacctttgggatgtttacttgctctgcaaacggattactattagtacattccatattt

SEQ ID NO: 594775 - DNA, 75 bp, synthetic construct
  source 1..75: mol_type = other DNA
tccacctgcgtggccgccgccgaagccagccgccgctatatcgggattgagatgcttgagcagtaccacgccgcc

SEQ ID NO: 594776 - DNA, 75 bp, synthetic construct
  source 1..75: mol_type = other DNA
cgcgttaatggtgagcttctatggctggaaccgcgtcgatcgctttatggctgcctggaaaaatgcgggattcag

SEQ ID NO: 594777 - DNA, 75 bp, synthetic construct
  source 1..75: mol_type = other DNA
cgggcatctggtattcaccaaaacttactcgtccaaatcggcctatgtcggttatcgccatgaatgtgcctatat

SEQ ID NO: 594778 - DNA, 75 bp, synthetic construct
  source 1..75: mol_type = other DNA
tccgcgtactcaaaaaagatgcgctgatggtcagcttctacggctggaaccgcgtcgatcgctttatggccgcct

SEQ ID NO: 594779 - DNA, 75 bp, synthetic construct
  source 1..75: mol_type = other DNA
gctaccgccacgaatgcgcctacatccttgcaaaaggtcgtccgtccctgccgcaaaacccgttgaatgacgtga

SEQ ID NO: 594780 - DNA, 75 bp, synthetic construct
  source 1..75: mol_type = other DNA
gatggtcagcttctacggctggaaccgtgtcgatcgctttatggccgcctggaaaaatgcgggattcagcgttgt

SEQ ID NO: 594781 - DNA, 75 bp, synthetic construct
  source 1..75: mol_type = other DNA
cgccggcgataaaaccgatgaatggctgcaaccagcctgtaatgaaatgtaccgcgtactcaaaaaagacgcgct

SEQ ID NO: 594782 - DNA, 75 bp, synthetic construct
  source 1..75: mol_type = other DNA
gtacagcgcgcaactataacggcacttacagcgcccagcgtcaggagctggttgaatccactgatggctacctga

SEQ ID NO: 594783 - DNA, 75 bp, synthetic construct
  source 1..75: mol_type = other DNA
gttagagtcctacaaatatcaattaaataacggcgggcgtgacgacgttaattacaacttttattctgaagaaat

SEQ ID NO: 594784 - DNA, 75 bp, synthetic construct
  source 1..75: mol_type = other DNA
atgagcatggttaaacataaacgagggacctcctctacactcgatgtgcagcatgaggccgaactgaaggcgctg

SEQ ID NO: 594785 - DNA, 75 bp, synthetic construct
  source 1..75: mol_type = other DNA
tcgtcgaaagcgccggggaaactatggcggagattgtcagcgccgtgacccgcgtgaccgatatcatgggcgaaa

SEQ ID NO: 594786 - DNA, 75 bp, synthetic construct
  source 1..75: mol_type = other DNA
attgccttccagaccaatattctggctttgaacgcggcggttgaagcagcgcgtgcgggtgagcaagggcgcggt

SEQ ID NO: 594787 - DNA, 75 bp, synthetic construct
  source 1..75: mol_type = other DNA
cggtgaaccgcgccgctcccgtatcgccagtttcttggatgtagggtacatttcttacctgtttgtatgttctgg

SEQ ID NO: 594788 - DNA, 75 bp, synthetic construct
  source 1..75: mol_type = other DNA
gaaggagcgcatcctgaaagcggtttcgatgaagatttccagatggaacagcaggccaatgctgaatttattgct

SEQ ID NO: 594789 - DNA, 75 bp, synthetic construct
  source 1..75: mol_type = other DNA
cccttcgatcagcgaattaatgcgcttaacgattttatgaagcacttttcgccagatatcgcgctggcactgctg

SEQ ID NO: 594790 - DNA, 75 bp, synthetic construct
  source 1..75: mol_type = other DNA
tccaactgccgtaaggtactgttgtgatgaagcatacagaaattgggtcgataacggcgctaaatcgaacatatc

SEQ ID NO: 594791 - DNA, 75 bp, synthetic construct
  source 1..75: mol_type = other DNA
gttagcattagctcaatgggattctcatttgggggcggcatccctgttactccaactgctgtaatgtattgttgc

SEQ ID NO: 594792 - DNA, 75 bp, synthetic construct
  source 1..75: mol_type = other DNA
gatcctggcgaaactgaacgaagaccgcggtcctgcggtggtgattgaagccattggcctggataaaaccatcga

SEQ ID NO: 594793 - DNA, 75 bp, synthetic construct
  source 1..75: mol_type = other DNA
gaagcgttggcggtaaaaacggtgacgccggttgtgccgcgtaaagcggtagtggctgatggcggggataactgg

SEQ ID NO: 594794 - DNA, 75 bp, synthetic construct
  source 1..75: mol_type = other DNA
gttttagaacgcgctcaaccacttcccaaaccaccgcctgaaatattggagggaggattatttaaagtaaaaatg

SEQ ID NO: 594795 - DNA, 75 bp, synthetic construct
  source 1..75: mol_type = other DNA
ataactaggaagaaaaagtcatccgatggagaaaagaaaaagacacgtccacctcgtaagataaaggctcaaacc

SEQ ID NO: 594796 - DNA, 75 bp, synthetic construct
  source 1..75: mol_type = other DNA
atccaaccaccacctgatggtgatggcgagggtgatgctgatgaggagaacaatggcacgtcgggtaaaaataat

SEQ ID NO: 594797 - DNA, 75 bp, synthetic construct
  source 1..75: mol_type = other DNA
atggaatttaccgcaattatcataaccctcaagctgttgcgttaaaaaatctctatgggcaaatcggtaactatg

SEQ ID NO: 594798 - DNA, 75 bp, synthetic construct
  source 1..75: mol_type = other DNA
gaaaaatttggctataaggattgcccggcacacccaacctggcttgcgcctgatgagtggaagggtaccgccgac

SEQ ID NO: 594799 - DNA, 75 bp, synthetic construct
  source 1..75: mol_type = other DNA
ggcagaagagaaacatcagcggggagaactggaaaagccccaccaccagctggtggatacgtatacgtcactgaa

SEQ ID NO: 594800 - DNA, 75 bp, synthetic construct
  source 1..75: mol_type = other DNA
gtaaaaaccgtgacgccagctacgccgcgtaaaatggccgtggcagatagcggggagaactgggaaacgttttaa

SEQ ID NO: 594801 - DNA, 75 bp, synthetic construct
  source 1..75: mol_type = other DNA
atggatcagaacaatattggcagcggttcgaccgtcgccgagctgatgcagagtgccactatttcgctgaaacaa

SEQ ID NO: 594802 - DNA, 75 bp, synthetic construct
  source 1..75: mol_type = other DNA
gccagccatctggcgttaagtgcttctgaaacggcgcaacgcggcggcaaagtggtggataacgtggtgcagact

SEQ ID NO: 594803 - DNA, 75 bp, synthetic construct
  source 1..75: mol_type = other DNA
ggcaaagtggatgttggctctacgctggtcgaaagtgccggggaaacgatggcggagattgtcagcgccgtgacc

SEQ ID NO: 594804 - DNA, 75 bp, synthetic construct
  source 1..75: mol_type = other DNA
ggtggacggttccaatgaagtgggtcaactggcagagagtttgcgtcatatgcaaagtgagctggtacgtaccgt

SEQ ID NO: 594805 - DNA, 75 bp, synthetic construct
  source 1..75: mol_type = other DNA
cgcggcggcaaagtggtagataacgtggtgcagactatgcgcgatatctccaccagttcgcagaaaatcgccgat

SEQ ID NO: 594806 - DNA, 75 bp, synthetic construct
  source 1..75: mol_type = other DNA
gtgagcaagattgactatcaggcactgcgtgaggcggcagaaaaagcaacgtgtggcgagtggtcgctcgaatat

SEQ ID NO: 594807 - DNA, 75 bp, synthetic construct
  source 1..75: mol_type = other DNA
ttggtggagcaggtgtctacggtgtaaacttcacactaaataataatggtagtatttgggggggagatggatata

SEQ ID NO: 594808 - DNA, 75 bp, synthetic construct
  source 1..75: mol_type = other DNA
agtggccgtacccgtgtcgctgttactcaggccggtggtactggtgcagagacacttaatgggattgaagtgatt

SEQ ID NO: 594809 - DNA, 75 bp, synthetic construct
  source 1..75: mol_type = other DNA
atatgccgggtaatatactgactgtcggagggaattacactggcagaaatggacttattctcctccagacagaaa

SEQ ID NO: 594810 - DNA, 75 bp, synthetic construct
  source 1..75: mol_type = other DNA
tgtggatgagagttctcaactgactgcatcagcaacagagaacctgggcaccgcatccgtaaacaacagcggaac

SEQ ID NO: 594811 - DNA, 75 bp, synthetic construct
  source 1..75: mol_type = other DNA
ttgaagggcagataaatgaccgtctgaatctgtggggtaatgtgggtgttcaggctggtgacaaggggtacagcg

SEQ ID NO: 594812 - DNA, 75 bp, synthetic construct
  source 1..75: mol_type = other DNA
atgaaaaatgcatcactaaagaaaaacagtatgaataagaatatacgaattttacaatttctggtcagtataatt

SEQ ID NO: 594813 - DNA, 75 bp, synthetic construct
  source 1..75: mol_type = other DNA
caacggaagtaaagacatggttacaggcacgcggcagccacgttaatgagtcatatctcggtgttgcacgcccga

SEQ ID NO: 594814 - DNA, 75 bp, synthetic construct
  source 1..75: mol_type = other DNA
cgtcgtgcgattggtgttgagctggagaccggacgttttgagcagacagtcagggaagttcaggatttaatcgtt

SEQ ID NO: 594815 - DNA, 75 bp, synthetic construct
  source 1..75: mol_type = other DNA
gacccagactaaagtacgccgtgagcgtatgggtcacatcgaactggcttccccgactgcgcacatctggttcct

SEQ ID NO: 594816 - DNA, 75 bp, synthetic construct
  source 1..75: mol_type = other DNA
cattccgggctgatgcaggcattcaacttggagaacatggataccataatacatctgccatgttgagtgtgaaat

SEQ ID NO: 594817 - DNA, 75 bp, synthetic construct
  source 1..75: mol_type = other DNA
ttcagccgcagcttcaggttgtccggatgaatgtaaaatcagacaaatatcatgaaagtaacggaaccagtattg

SEQ ID NO: 594818 - DNA, 75 bp, synthetic construct
  source 1..75: mol_type = other DNA
aggggattaacagcactaactggtatctgattagcagaaaagacattcctgtaccacaacctgaagctgtaccgg

SEQ ID NO: 594819 - DNA, 75 bp, synthetic construct
  source 1..75: mol_type = other DNA
cgaaaggccacacgctggcggcagaggtaccaggcgtaaaaatgggcggactgaacagcctgtgtgcccagtata

SEQ ID NO: 594820 - DNA, 75 bp, synthetic construct
  source 1..75: mol_type = other DNA
acagcgattcgactgcggcgaggaagcgttaaatctctttctgacgacacatctggttcgtcaacatcgcaataa

SEQ ID NO: 594821 - DNA, 75 bp, synthetic construct
  source 1..75: mol_type = other DNA
aattctgcgagcgtatatcctttgtcgcaacactccagaacgtcaggtgctgggatattacacattatgcggcag

SEQ ID NO: 594822 - DNA, 75 bp, synthetic construct
  source 1..75: mol_type = other DNA
acaacagcaggcgctggagcaacagcaggcagaacttcagatgcgcgaaatgacaggccgggtggctaaactgga

SEQ ID NO: 594823 - DNA, 75 bp, synthetic construct
  source 1..75: mol_type = other DNA
gaggcttcgcgttgagctggaaggcaaagacagcaaaatagccaatcttaccgccgaacgcgatgctcttcgtga

SEQ ID NO: 594824 - DNA, 75 bp, synthetic construct
  source 1..75: mol_type = other DNA
agcagcatgcttcatcgaacagattttcacgatgattaccaaacggtaatggcatacaaagtttctgaagtcatc

SEQ ID NO: 594825 - DNA, 75 bp, synthetic construct
  source 1..75: mol_type = other DNA
tggatatcttcccatttgcagaattgaaggagcgcatcctgaaagcggtttcgatgaagatttccaaatggaaca

SEQ ID NO: 594826 - DNA, 75 bp, synthetic construct
  source 1..75: mol_type = other DNA
agtaccagtcatgggatcaccagcagaacgaatggcttcagcgtgagcgccgtcgtgtacttcttcaggtggtct

SEQ ID NO: 594827 - DNA, 75 bp, synthetic construct
  source 1..75: mol_type = other DNA
caaggggtattccagtgcggcagatgttccggggccgtcgtgtgaaggggttaacgctctgactgagtcttacaa

SEQ ID NO: 594828 - DNA, 75 bp, synthetic construct
  source 1..75: mol_type = other DNA
gcggcaagccggtgacggtgacgccaacagtgatcaccaacggcgtggcgttctggcccgatctcgatctggcgg

SEQ ID NO: 594829 - DNA, 75 bp, synthetic construct
  source 1..75: mol_type = other DNA
cctcaggtgcaggctgttgtgctcgacctgtgggttaatcttctggatgtgccgcagaaacaggagtttgttgag

SEQ ID NO: 594830 - DNA, 75 bp, synthetic construct
  source 1..75: mol_type = other DNA
acaccaaaatcaccggatgagatgaccccggaagagcagcaggccgctcagcagcaacaggcccaggagcagcaa

SEQ ID NO: 594831 - DNA, 75 bp, synthetic construct
  source 1..75: mol_type = other DNA
gggggccacaacccttgccgaaatcaacgataactaccagtttgcctgtcagcaggttggcaggctgctgctctc

SEQ ID NO: 594832 - DNA, 75 bp, synthetic construct
  source 1..75: mol_type = other DNA
ggtgaaatgcgcgtggggtcccgggtggtatctcaggagatcagcactgcagatgaaggcgatggtggtcaggtt

SEQ ID NO: 594833 - DNA, 75 bp, synthetic construct
  source 1..75: mol_type = other DNA
ggtgaaatgcgcgtgggctcccgcgtggtatctcaggagatcagcactgcagatgaaggcgatggtggtcaggtt

SEQ ID NO: 594834 - DNA, 75 bp, synthetic construct
  source 1..75: mol_type = other DNA
ggtgaaatgcgcgtgggttcccgggtggtatctcaggagatcagcactgcagaggaaggcgatggtggtcaggtt

SEQ ID NO: 594835 - DNA, 75 bp, synthetic construct
  source 1..75: mol_type = other DNA
agccaggacgcccacggcagccagtacagataacggcaaacagaacacctatttctcgtcactggataacatggt

SEQ ID NO: 594836 - DNA, 75 bp, synthetic construct
  source 1..75: mol_type = other DNA
ggaaccccgcaggctggctgggtgccgcggctttatcgggcatgtatgcggcaggagccagtatgatcctgggcg

SEQ ID NO: 594837 - DNA, 75 bp, synthetic construct
  source 1..75: mol_type = other DNA
tgcccgtcttaatgagccgctggcaaatggtgccgtgatccacatcgtgccgcgtctggcgggggctaaaagtgg

SEQ ID NO: 594838 - DNA, 75 bp, synthetic construct
  source 1..75: mol_type = other DNA
cacagatgctggcaccgaaagcgagtaccgcaacaacgaccagcacggataacggtaagcagaacacgtatttct

SEQ ID NO: 594839 - DNA, 75 bp, synthetic construct
  source 1..75: mol_type = other DNA
acccgactgcatgagccactgagcccgggggatgtcattcatctggtaccccggactgaaggagccaaaagtggc

SEQ ID NO: 594840 - DNA, 75 bp, synthetic construct
  source 1..75: mol_type = other DNA
ggtgaaatgcgcgtgggttcccgcgtggtatctcaggagatcagcactgcagacgaaggcgatggtggtcaggtt

SEQ ID NO: 594841 - DNA, 75 bp, synthetic construct
  source 1..75: mol_type = other DNA
ggtgaaatgcgcgtgggttcccgagtggtatctcaggagatcagcactgcagaagaaggcgatggtggtcaggtt

SEQ ID NO: 594842 - DNA, 75 bp, synthetic construct
  source 1..75: mol_type = other DNA
ggtgaaatgcgcgtgggatcccgagtggtatctcaggagatcagcactgcagatgaaggcgatggtggtcaggtt

SEQ ID NO: 594843 - DNA, 75 bp, synthetic construct
  source 1..75: mol_type = other DNA
gtgaaaacggggtccgaagccatccgggcgctggccatgcagatcccggcgtttcgtcagaaactgaatgagggc

SEQ ID NO: 594844 - DNA, 75 bp, synthetic construct
  source 1..75: mol_type = other DNA
agctcgtcttaatgaaccgctggcgaatggagcagtgatccacatcgtgccgcgtctggcaggagccaaaagtgg

SEQ ID NO: 594845 - DNA, 75 bp, synthetic construct
  source 1..75: mol_type = other DNA
cccctgacgaagtttgattttgaatccatcaccttcagtcatgcgaaggtgtcggccattgcggtactgacggaa

SEQ ID NO: 594846 - DNA, 75 bp, synthetic construct
  source 1..75: mol_type = other DNA
cgcgcctggcgggggctaaaagtggcggcgtatttcaggctgtgctgggggcggcgctgattgcggtggcatggt

SEQ ID NO: 594847 - DNA, 75 bp, synthetic construct
  source 1..75: mol_type = other DNA
acaggccggtaacgggaatgtggccacggtggcttcagcgccggtgatccgtgtggagcagaaactggataaggg

SEQ ID NO: 594848 - DNA, 75 bp, synthetic construct
  source 1..75: mol_type = other DNA
gtgatgcaggtgaaacggaattatcagtccgtcttaatgagccgctggcaaatggtgccgtgatccacatcgtgc

SEQ ID NO: 594849 - DNA, 75 bp, synthetic construct
  source 1..75: mol_type = other DNA
atggtgacatcctggagccggagggggcggagttcggcagtgcgatcccgtttctctggcagcatgaccattccc

SEQ ID NO: 594850 - DNA, 75 bp, synthetic construct
  source 1..75: mol_type = other DNA
gtccggtggtgctgccggctgggtgggtgagggtaaggccagacccctgacgaagtttgattttgaatccatcac

SEQ ID NO: 594851 - DNA, 75 bp, synthetic construct
  source 1..75: mol_type = other DNA
ctgcatcatgtcctgaaatcggcagtgggcgcggggaccaccacggatccgcagtgggcaggcagcctgtctgaa

SEQ ID NO: 594852 - DNA, 75 bp, synthetic construct
  source 1..75: mol_type = other DNA
tggggttcagccctggcagccggtggtttttctgccaccacgatgctgttttcactgggggccagcatgattctg

SEQ ID NO: 594853 - DNA, 75 bp, synthetic construct
  source 1..75: mol_type = other DNA
cagtgacattctcttttcaatgggtgcggcgatgacgcttggcggtgttgcacagatgctggcaccgaaagcgag

SEQ ID NO: 594854 - DNA, 75 bp, synthetic construct
  source 1..75: mol_type = other DNA
ggtatgttttcgccgcgctgatctactggatcttctgtttcagcatgtcgcgctatagcctgaaccgccccggaa

SEQ ID NO: 594855 - DNA, 75 bp, synthetic construct
  source 1..75: mol_type = other DNA
aaaagcagcattatcgctgggacggcatgcaataggtgtggagcaggaagaagagagatttaaccagactgtaag

SEQ ID NO: 594856 - DNA, 75 bp, synthetic construct
  source 1..75: mol_type = other DNA
agggtattaggtgttgagcttgagtcagaacgttttgagcagacagtgaaagaggtaagtggtcaggggtatatt

SEQ ID NO: 594857 - DNA, 75 bp, synthetic construct
  source 1..75: mol_type = other DNA
attggcgttgagctggagaccgggcgttttgagcagacggtgagggaagttcaggatttagtcagtcagaacgga

SEQ ID NO: 594858 - DNA, 75 bp, synthetic construct
  source 1..75: mol_type = other DNA
ccgctgatttcttactttcgtgatgcgcgcgctgccctggggataacggcaaaacagatagtggatgccacagga

SEQ ID NO: 594859 - DNA, 75 bp, synthetic construct
  source 1..75: mol_type = other DNA
tttttatggggtcaggctcaacaataaaagcggcactttcactgggacgctgtgcgattggcgtggagctggaag

SEQ ID NO: 594860 - DNA, 75 bp, synthetic construct
  source 1..75: mol_type = other DNA
gaagagaatatggatgcgttacttcgtctggatggtccagcaatggcgtactgcattcgccgttgttgtgagctg

SEQ ID NO: 594861 - DNA, 75 bp, synthetic construct
  source 1..75: mol_type = other DNA
tggcatcgaacttaatgaagatatccgcaatattgagcgcgtccggcaggaagtgggaatggtctttcagcattt

SEQ ID NO: 594862 - DNA, 75 bp, synthetic construct
  source 1..75: mol_type = other DNA
atgacaaaagtattgctgtctcagccctcgcgcccagcgagccataactcaagccgcgcgatggtgtgggtgcga

SEQ ID NO: 594863 - DNA, 75 bp, synthetic construct
  source 1..75: mol_type = other DNA
aacccgatgccggtgccttacggtgaaatgctggttggctcccggcgaatctcccaggacatcagtacccgtgat

SEQ ID NO: 594864 - DNA, 75 bp, synthetic construct
  source 1..75: mol_type = other DNA
cggctgggacaatcagtggaaaggggacgaagattaccttaagtggctggaccactgtctggcccagttctggcg

SEQ ID NO: 594865 - DNA, 75 bp, synthetic construct
  source 1..75: mol_type = other DNA
gtgagcctaccagagttacgcttactgatccatgaaaatactgtaaaaataaacagtgttgatttaatcaacgct

SEQ ID NO: 594866 - DNA, 75 bp, synthetic construct
  source 1..75: mol_type = other DNA
gcggctgtatcgggtatgtatgcagcaggggccagtatgatcctgggtggtgtggcgcagatgctggcaccgaaa

SEQ ID NO: 594867 - DNA, 75 bp, synthetic construct
  source 1..75: mol_type = other DNA
tctccgtatcagtctccgtgccttataccgatgtctggacgcataaacccgttcagttctacccgggtaaacatc

SEQ ID NO: 594868 - DNA, 75 bp, synthetic construct
  source 1..75: mol_type = other DNA
gttcagttctacccgggtaaacatccgtgtgagaaaccggcggatatgctccggcaaataatcaatgccagtagt

SEQ ID NO: 594869 - DNA, 75 bp, synthetic construct
  source 1..75: mol_type = other DNA
gcctcggcacaagtttccgcctggctgattaccattgctgaactgccgatgatggtttctgatttactgcaaccg

SEQ ID NO: 594870 - DNA, 75 bp, synthetic construct
  source 1..75: mol_type = other DNA
ctggttttatattcactattggttgtttttatatttattccggaactcatcaccgctcctctgaaatggattaac

SEQ ID NO: 594871 - DNA, 75 bp, synthetic construct
  source 1..75: mol_type = other DNA
ttgggggctgccgcaattacaggaatgtatggtgcgggggccagtatggtgctcggtggtgtggcgcagatgctg

SEQ ID NO: 594872 - DNA, 75 bp, synthetic construct
  source 1..75: mol_type = other DNA
catggcacaaacgctggtgaacggagccgacagcttctccctgctggcgattccgttctttgtgctggcgggtga

SEQ ID NO: 594873 - DNA, 75 bp, synthetic construct
  source 1..75: mol_type = other DNA
cgacggtattaattcttaccccggtattaatgcctttagggaaggtgcgaataagcggggaaattcttctcggct

SEQ ID NO: 594874 - DNA, 75 bp, synthetic construct
  source 1..75: mol_type = other DNA
tggcgtcaccgggcatggcacgcatctgcctttacggggattttcaacgatttggccgccgcatcgaccttcgag

SEQ ID NO: 594875 - DNA, 75 bp, synthetic construct
  source 1..75: mol_type = other DNA
cgcggctgtatcgggtatgtatgcggcaggggccagtatgatcctgggcggagtggcgcagatgctggcaccgaa

SEQ ID NO: 594876 - DNA, 75 bp, synthetic construct
  source 1..75: mol_type = other DNA
ggtgaaatgcgcgtggggtcacgtgtggtatctcaggtgatcagcacggcagacgaaggggatggtggtcaggtt

SEQ ID NO: 594877 - DNA, 75 bp, synthetic construct
  source 1..75: mol_type = other DNA
ggcgttgagctggagactgaacgttttgagcagacggtcagggaagttcaggatttagtcagtcagaacggatga

SEQ ID NO: 594878 - DNA, 75 bp, synthetic construct
  source 1..75: mol_type = other DNA
gctatcgccacgaatgcgcctatatcctggcaaaaggccgtccacgtctgccacaaaacccgctgccggacgtgc

SEQ ID NO: 594879 - DNA, 75 bp, synthetic construct
  source 1..75: mol_type = other DNA
atggtgccgtgatccacattgtgccgcgtctggcgggagctaaaagtggcggtgtttttcaggcagtgctgggtg

SEQ ID NO: 594880 - DNA, 75 bp, synthetic construct
  source 1..75: mol_type = other DNA
ctgcctttacggggatttgcaacgatttggccgccgcatcgaacttcgtgtgaaaacgggggcagaagccatccg

SEQ ID NO: 594881 - DNA, 75 bp, synthetic construct
  source 1..75: mol_type = other DNA
tgcgcgtgggatcacgtgtggtatctcaggagatcagcacagcagatgaaggtgatggtggtcaggttgtggtga

SEQ ID NO: 594882 - DNA, 75 bp, synthetic construct
  source 1..75: mol_type = other DNA
gccttatggtgaaatgctggttggttcacgacggatatcccaggacatcagtacccgtgatgagggcggagacgg

SEQ ID NO: 594883 - DNA, 75 bp, synthetic construct
  source 1..75: mol_type = other DNA
gccatcgtgggctctttcttcactgccggggcatcaatggcgttatggggttcagccctggcagccggtggtttt

SEQ ID NO: 594884 - DNA, 75 bp, synthetic construct
  source 1..75: mol_type = other DNA
tgcccgggtggcagaagagaaacatcagcggggtgaactggaaaagccacatcaccaactggtcagcacatacag

SEQ ID NO: 594885 - DNA, 75 bp, synthetic construct
  source 1..75: mol_type = other DNA
tgacggacccgccatatctcgtcggttttcgtgaccgttccgggcgcaccatcgccggcgataaaaccgatgaat

SEQ ID NO: 594886 - DNA, 75 bp, synthetic construct
  source 1..75: mol_type = other DNA
tgactgacccgccatatctcgtcggtttgcgtgaccgttccgggcgcaccatcgccggcgataaaaccgatgaat

SEQ ID NO: 594887 - DNA, 75 bp, synthetic construct
  source 1..75: mol_type = other DNA
tcaccgacccgccatatctcgtcggttttcgtgaccgttccgggcgcaccatcgccggcgataaaaccgatgaat

SEQ ID NO: 594888 - DNA, 75 bp, synthetic construct
  source 1..75: mol_type = other DNA
ggacagcaacgtctggctgccgtacagcgggccatgcagcagggggccgcaaatgatgactgtttatgccggagg

SEQ ID NO: 594889 - DNA, 75 bp, synthetic construct
  source 1..75: mol_type = other DNA
cgtgccggacagcaacgactggccgccgtgcaacgggccatgcagcagggggccgtgaatgataactggtttgtg

SEQ ID NO: 594890 - DNA, 75 bp, synthetic construct
  source 1..75: mol_type = other DNA
ccggacgccggtatatcggtatcgagctgcttgagcagtatcaccgtgccggacagcaacgactggctgccgtac

SEQ ID NO: 594891 - DNA, 75 bp, synthetic construct
  source 1..75: mol_type = other DNA
ttacagacccgccatatctcgtcggtttgcgtgaccgttccgggcgcaccatcgccggcgataaaaccgatgaat

SEQ ID NO: 594892 - DNA, 75 bp, synthetic construct
  source 1..75: mol_type = other DNA
taactgacccgccatatctcgtcggtttacgtgaccgttccgggcgcaccatcgccggcgataaaaccgatgaat

SEQ ID NO: 594893 - DNA, 75 bp, synthetic construct
  source 1..75: mol_type = other DNA
taacagacccgccatatctcgtcggttttcgtgaccgttccgggcgcaccatcgccggcgataaaaccgatgaat

SEQ ID NO: 594894 - DNA, 75 bp, synthetic construct
  source 1..75: mol_type = other DNA
tcactgacccgccatatctcgtcggtttccgtgaccgttccgggcgcaccatcgccggcgataaaaccgatgaat

SEQ ID NO: 594895 - DNA, 75 bp, synthetic construct
  source 1..75: mol_type = other DNA
ttacggacccgccatatctcgtcggtttacgtgaccgttccgggcgcaccatcgccggcgataaaaccgatgaat

SEQ ID NO: 594896 - DNA, 75 bp, synthetic construct
  source 1..75: mol_type = other DNA
ttactgacccgccatatctcgtcggttttcgtgaccgttccgggcgcaccatcgccggcgataaaaccgatgaat

SEQ ID NO: 594897 - DNA, 75 bp, synthetic construct
  source 1..75: mol_type = other DNA
ctgcctttacggggatttccaacgatttggccgccgcatcgagcttcgtgtgaaaacgggggcagaagcaatccg

SEQ ID NO: 594898 - DNA, 75 bp, synthetic construct
  source 1..75: mol_type = other DNA
gttatgcctgttctgtatggtgaaatgcgcgtgggttcacgtgtggtatctcaggagagcagcacggcagatgaa

SEQ ID NO: 594899 - DNA, 75 bp, synthetic construct
  source 1..75: mol_type = other DNA
cagctggcgaccgattctaactacctggaagtctgttacattctgctgaatggtgaaaaaccgacccaggaacag

SEQ ID NO: 594900 - DNA, 75 bp, synthetic construct
  source 1..75: mol_type = other DNA
ccctcaacggggacacagctgttgaactggatgtgctgaaaggcacgctgggtcaagatgttattgatatccgta

SEQ ID NO: 594901 - DNA, 75 bp, synthetic construct
  source 1..75: mol_type = other DNA
gtttcgtcagaaactgagtgacggctggtatcaggtacggattgccgggcgtgatgcaggtgaaaccgaattatc

SEQ ID NO: 594902 - DNA, 75 bp, synthetic construct
  source 1..75: mol_type = other DNA
tggtatcaggtgcgcattgccgggcgtgatgcaggcgaaaacgaattatcagcccgtcttaatgagccgctgaaa

SEQ ID NO: 594903 - DNA, 75 bp, synthetic construct
  source 1..75: mol_type = other DNA
ggggaaatgcgtgtggggtcgcgggtggtatctcaggagatcagcacagcagatgaaggtgatggtggtcaggtt

SEQ ID NO: 594904 - DNA, 75 bp, synthetic construct
  source 1..75: mol_type = other DNA
gtgatgcaggtgaaaccgaattatctgcccgtcttaatgagccgctggcaaatggtgccgtgatccacatcgtgc

SEQ ID NO: 594905 - DNA, 75 bp, synthetic construct
  source 1..75: mol_type = other DNA
gggcgctggccacacagctaccggcgtttcgtcagaaactgaatgagggctggtatcagatacggattgccgggc

SEQ ID NO: 594906 - DNA, 75 bp, synthetic construct
  source 1..75: mol_type = other DNA
gtgaaaacgggggctgaagccatccgggcactggccacgcagatccccgcatttcgacagaaactgaatgagggc

SEQ ID NO: 594907 - DNA, 75 bp, synthetic construct
  source 1..75: mol_type = other DNA
ctgcctttacggggatttccaacgatttggccgccgcatcgaacttcgtgtgaaaacgggggcagaagcgatccg

SEQ ID NO: 594908 - DNA, 75 bp, synthetic construct
  source 1..75: mol_type = other DNA
ctgcctttacggggattttcaacgatttggccgccgcatcgatcttcgtgtgaaaacgggggcagaagccatccg

SEQ ID NO: 594909 - DNA, 75 bp, synthetic construct
  source 1..75: mol_type = other DNA
tatttttcgtcactggacaatatgattgcccagggtaacccgatgccggtgccttacggggaaatgctggttggt

SEQ ID NO: 594910 - DNA, 75 bp, synthetic construct
  source 1..75: mol_type = other DNA
gagctggaaaagccgcaccaccagctggtcagcacatacagtgaactgaaccggcaatatgccagcctgcaggag

SEQ ID NO: 594911 - DNA, 75 bp, synthetic construct
  source 1..75: mol_type = other DNA
tacggatgtctggacgcacaagcctgtgcagtattatccaggcaaacatccctgtgaaaaaccggcagatatgtt

SEQ ID NO: 594912 - DNA, 75 bp, synthetic construct
  source 1..75: mol_type = other DNA
tgaaaacgggggccgaagccatccgggcgctggccacgcagcttccgtcgtttcgccagaaactgaatgagggct

SEQ ID NO: 594913 - DNA, 75 bp, synthetic construct
  source 1..75: mol_type = other DNA
gtgaactggtgaatctgtaccgggtggtaaagcatcacctggaagaatttgtccgccagttcaaatgggcgctgg

SEQ ID NO: 594914 - DNA, 75 bp, synthetic construct
  source 1..75: mol_type = other DNA
tttctgtatcggctgctgttccgtatacggatgtctggatgtataagcctgtacagtattacctcggcaaacatc

SEQ ID NO: 594915 - DNA, 75 bp, synthetic construct
  source 1..75: mol_type = other DNA
gtgtgttgaacgggatgtacgtcgctcagatggtgataccaaaggagactggcgtcctctggtattcctgatgac

SEQ ID NO: 594916 - DNA, 75 bp, synthetic construct
  source 1..75: mol_type = other DNA
aaaggttgcgcacctgatggaagtccgccctgagtatttaattggtgctgacgtgagttgcctgctgaacatcag

SEQ ID NO: 594917 - DNA, 75 bp, synthetic construct
  source 1..75: mol_type = other DNA
ctttctgttgccgttgatgataaatcaacacagacgcccttagcacttgttaacagtatcctgctatctgatgca

SEQ ID NO: 594918 - DNA, 75 bp, synthetic construct
  source 1..75: mol_type = other DNA
gatttatttcccgcagcgcccaccccgtccacagggtgaggtttaccgccgttacgatccacgtattcgcaggat

SEQ ID NO: 594919 - DNA, 75 bp, synthetic construct
  source 1..75: mol_type = other DNA
ttgctgtgtggcttaccgggtatgggcaaagatcgctatatcagtaaacagtgccagggaattgacgttatcagc

SEQ ID NO: 594920 - DNA, 75 bp, synthetic construct
  source 1..75: mol_type = other DNA
atggctagcgaacacagtactgatgtgcaggcatttatcggggagctggacggcggcgtatttgaaaccaaaatc

SEQ ID NO: 594921 - DNA, 75 bp, synthetic construct
  source 1..75: mol_type = other DNA
gtgtgttgctaatccggacgtgcaggtcgttatttctgatggcctgtcaactgatgcgatcaccgtgaactacga

SEQ ID NO: 594922 - DNA, 75 bp, synthetic construct
  source 1..75: mol_type = other DNA
ctgcgtgctggatttaggttctgctgaagcgaaggcgtggattggcgttgaaaatccgcatcgcgcagacgtatt

SEQ ID NO: 594923 - DNA, 75 bp, synthetic construct
  source 1..75: mol_type = other DNA
caacaatcccagacggatctaccgtgctgatcacaccatgctcaagtaacattagagaactggtgggaaaaataa

SEQ ID NO: 594924 - DNA, 75 bp, synthetic construct
  source 1..75: mol_type = other DNA
agcgtggcgtggcagaaagggagtgatgattttgcccagacggcagggtttttgtcgatgacagtgaaatggtaa

SEQ ID NO: 594925 - DNA, 75 bp, synthetic construct
  source 1..75: mol_type = other DNA
aaaaaatggcggctatgcggcaaaggagcgcgagcttaaacagcatgtgatgtctccgctgatttcttactttcg

SEQ ID NO: 594926 - DNA, 75 bp, synthetic construct
  source 1..75: mol_type = other DNA
ctcggcgtaaagaatatttttataaaagacgagtccagacgtttcggcctgaatgcttttaaagtccttggtggt

SEQ ID NO: 594927 - DNA, 75 bp, synthetic construct
  source 1..75: mol_type = other DNA
atgtgagttgcttgttgaacattagcggccgattacagcgtgaagggcagaaggtcaaagtgatgcatattgctg

SEQ ID NO: 594928 - DNA, 75 bp, synthetic construct
  source 1..75: mol_type = other DNA
acggtaaaaaactgtccaaacgtcacggggcggtcagcgtaatgcagtatcgtgatgacggttatttgccagaag

SEQ ID NO: 594929 - DNA, 75 bp, synthetic construct
  source 1..75: mol_type = other DNA
atgccgctgcgtgtcgccgtaaccggtgcggggcagtctccggcgctggatgttaccgttcacgcaatcggtaag

SEQ ID NO: 594930 - DNA, 75 bp, synthetic construct
  source 1..75: mol_type = other DNA
tggactgctgagaacgtccatcacgccattcaggcaacggcggatgagctggaagtcggaatgggtaaagtcggt

SEQ ID NO: 594931 - DNA, 75 bp, synthetic construct
  source 1..75: mol_type = other DNA
cacgtttctatgatcaacggcgatgacggtaaaaaactgtccaaacgccacggtgcggtcagcgtaatgcagtat

SEQ ID NO: 594932 - DNA, 75 bp, synthetic construct
  source 1..75: mol_type = other DNA
gctgacgtgagttgcctgctgaacatcagtgggcgattacaacgggaagggcagaaagtcaaagtgatgcatatt

SEQ ID NO: 594933 - DNA, 75 bp, synthetic construct
  source 1..75: mol_type = other DNA
gagtggataccaccacgttcggcaaacttgcctggctggtgccgttctatttgtggcggcgggcgaaaacccttg

SEQ ID NO: 594934 - DNA, 75 bp, synthetic construct
  source 1..75: mol_type = other DNA
atgaactggcattatgagaaaaatggcgtgcgtcatgacaatgtgaccgaagccgacataaccgaacgcattcag

SEQ ID NO: 594935 - DNA, 75 bp, synthetic construct
  source 1..75: mol_type = other DNA
cccgtaacggcccgcagctggctgatctggtgaaactgttgggcgaacgctgcaagacgctgaaagagatggcac

SEQ ID NO: 594936 - DNA, 75 bp, synthetic construct
  source 1..75: mol_type = other DNA
gcgaaaaaacatctgcgcccagtagcgcgtcagccgctggaagtggttcgtgacaaactgactgcgattactgac

SEQ ID NO: 594937 - DNA, 75 bp, synthetic construct
  source 1..75: mol_type = other DNA
gatggttccccaacctataacttctgtgtggtggttgacgactgggatatggaaatcacccatgttatccgtggc

SEQ ID NO: 594938 - DNA, 75 bp, synthetic construct
  source 1..75: mol_type = other DNA
gctggcctggctggttccgttttatctgtggcgtcgggcaaaagccctcggacagaaaccggcttacttctgggt

SEQ ID NO: 594939 - DNA, 75 bp, synthetic construct
  source 1..75: mol_type = other DNA
ttgtacgcagcgtgatggcgtcaatgggacaagcggcccccgcgccgtcagaagcaaagtgcaccaccaccacct

SEQ ID NO: 594940 - DNA, 75 bp, synthetic construct
  source 1..75: mol_type = other DNA
catagtttttgcgccaaaataccgaagacaagtgttctacagagagaagtgtagagcaacaggcagtattttgag

SEQ ID NO: 594941 - DNA, 75 bp, synthetic construct
  source 1..75: mol_type = other DNA
cggattcttgaagctgagtgctgtgcagatcatatccatatgcttgtggagatcccgcccaaaatgagcgtatcc

SEQ ID NO: 594942 - DNA, 75 bp, synthetic construct
  source 1..75: mol_type = other DNA
ggctggttgttggcagtgctgaaaaaactgtcaccggcattacgcacgctgtggctggtggtgacgatgattctc

SEQ ID NO: 594943 - DNA, 75 bp, synthetic construct
  source 1..75: mol_type = other DNA
gcggcggcgattaccgctttgctatcggtagcgccggaagttgtacgctggtgctgcaaacggtgctgcccgcgc

SEQ ID NO: 594944 - DNA, 75 bp, synthetic construct
  source 1..75: mol_type = other DNA
ccgaggtggttgcggcacagttggtgaaagaggtgaaacgctacctggcaagcccggcggcagtgggggaatatc

SEQ ID NO: 594945 - DNA, 75 bp, synthetic construct
  source 1..75: mol_type = other DNA
tgctgaccaatatcgcggtggtggagcgttttttgtcggtgcggtttagtttgattgaagcagatggcgtaacgc

SEQ ID NO: 594946 - DNA, 75 bp, synthetic construct
  source 1..75: mol_type = other DNA
acggaaagcctggcgctgaccattgaccgcgtgatcccttactggaatgaaactattctgccgcgtatgaagagc

SEQ ID NO: 594947 - DNA, 75 bp, synthetic construct
  source 1..75: mol_type = other DNA
agctttgactttgcttacacctctgtgctgaaacgcgctatccataccctgtggaatgtgctggacgaactggat

SEQ ID NO: 594948 - DNA, 75 bp, synthetic construct
  source 1..75: mol_type = other DNA
atacaatctcggactcaattgggtacagaaacggagtatgggggagtcaggggagggaagaaaagctgcgtgatt

SEQ ID NO: 594949 - DNA, 75 bp, synthetic construct
  source 1..75: mol_type = other DNA
acaccgatgggcttcttcctgaccatgtttatgggtggcccgctgctgggatatctgttactgcgtctggcgggg

SEQ ID NO: 594950 - DNA, 75 bp, synthetic construct
  source 1..75: mol_type = other DNA
ctcaaccgggtaggggcttcagcactcagtaacgaaatcgccagcggttcgatcttttttgccgtaggcggcatc

SEQ ID NO: 594951 - DNA, 75 bp, synthetic construct
  source 1..75: mol_type = other DNA
cgactggcgtgccgctggtgtatgagttcgacgagaatttcaaaccgctgaaacgctattatctgggtaatgctg

SEQ ID NO: 594952 - DNA, 75 bp, synthetic construct
  source 1..75: mol_type = other DNA
ttatctgccgggtgctggaaccgctgctggcgcggatggggattcagcagcaaacaacgctgttgcgccacggtt

SEQ ID NO: 594953 - DNA, 75 bp, synthetic construct
  source 1..75: mol_type = other DNA
ataaagcaccagcttgaagatgataaaatgggggagcagttatcgattccatatccgggcagcccgtttacgggc

SEQ ID NO: 594954 - DNA, 75 bp, synthetic construct
  source 1..75: mol_type = other DNA
agacaggtgttctacagagagaagcgtagagcaataggcagtattttgagaaagctgtgtgagtggaaaagcgta

SEQ ID NO: 594955 - DNA, 75 bp, synthetic construct
  source 1..75: mol_type = other DNA
aagccatgcaggagcatctcctggaaaaaagcgccaggagctggagaaagaacgaaagtcatccggagcctgagg

SEQ ID NO: 594956 - DNA, 75 bp, synthetic construct
  source 1..75: mol_type = other DNA
gcagggcttgctggaagtccgctctgaaattagcgacaaaaatctctacctgactcgtccggatatgggccgccg

SEQ ID NO: 594957 - DNA, 75 bp, synthetic construct
  source 1..75: mol_type = other DNA
ttgcgcgctggatttaggttccgctgaagcgaaggcatggattggcgtggaaaatccgcatcgcgcagacgtatt

SEQ ID NO: 594958 - DNA, 75 bp, synthetic construct
  source 1..75: mol_type = other DNA
acgcacgtttatgtcgttcagtggtgtggaaaatcagtggaatcgcgaatggttggcgcgattaaccgttgcgcc

SEQ ID NO: 594959 - DNA, 75 bp, synthetic construct
  source 1..75: mol_type = other DNA
ttacgagcagtttggtgatttgaaattcaaatacaggaacagagagttctggtgcagagggtactacgtcgatac

SEQ ID NO: 594960 - DNA, 75 bp, synthetic construct
  source 1..75: mol_type = other DNA
cagcttgaagaggataaaatgggagagcagttatcgattccctatccgggcagcccgtttgcgggccgtaagtaa

SEQ ID NO: 594961 - DNA, 75 bp, synthetic construct
  source 1..75: mol_type = other DNA
tgctgaccaatatcgcggtggtggagcgtttcttgccggtacggtttactctggctgaaacagatgacgtaacgc

SEQ ID NO: 594962 - DNA, 75 bp, synthetic construct
  source 1..75: mol_type = other DNA
tgttctgcgggaagttgtccgggaagcccgggccgaaatccgcagcatggcggatgccctggcaaaaatccggaa

SEQ ID NO: 594963 - DNA, 75 bp, synthetic construct
  source 1..75: mol_type = other DNA
acacccgatggaactgtgaatatcacatagtttttgcgccaaaataccgaagacaggtgttctacagagagaagc

SEQ ID NO: 594964 - DNA, 75 bp, synthetic construct
  source 1..75: mol_type = other DNA
cagcttgaagaggataaaatgggggagcagttatcgattccctatccgggcagcccgtttacgggccgtaagtaa

SEQ ID NO: 594965 - DNA, 75 bp, synthetic construct
  source 1..75: mol_type = other DNA
gcaaaattgatgacgcagcagctgaaaagctcagtaaaacagcgcaggcaactccgctcccaaaagacccgaccc

SEQ ID NO: 594966 - DNA, 75 bp, synthetic construct
  source 1..75: mol_type = other DNA
gcaaaattgaggacgcagcagctgaaaaactcagtaaaacagcgcaggtaactccgctcccaaaagacccgaccc

SEQ ID NO: 594967 - DNA, 75 bp, synthetic construct
  source 1..75: mol_type = other DNA
ccgcgttagtggtaatcgatttacaggaaggcatcctgccttttgctggtggtccgcatactgccgaggaagtgg

SEQ ID NO: 594968 - DNA, 75 bp, synthetic construct
  source 1..75: mol_type = other DNA
ttattgcctggtgccatgaacatggctatctcgatgacagccgatttgttgcgcgctttatcgccagccgtagcc

SEQ ID NO: 594969 - DNA, 75 bp, synthetic construct
  source 1..75: mol_type = other DNA
gactctgagaaacagatggcctctgttgcaagaaaacgtcttacacacaaagagataaaagtttttgtcaaaaat

SEQ ID NO: 594970 - DNA, 75 bp, synthetic construct
  source 1..75: mol_type = other DNA
ggcagggcactgaaacagcatgtgatggctccgctgattgcttactttcgtgatgcgcgtgctgccctggggata

SEQ ID NO: 594971 - DNA, 75 bp, synthetic construct
  source 1..75: mol_type = other DNA
tacagtcgctgtttgcccgggtggcagaagagaaacatcagcgcggtgaactggaaaagccccaccaccagctgg

SEQ ID NO: 594972 - DNA, 75 bp, synthetic construct
  source 1..75: mol_type = other DNA
gtaaaattgatgcagcagcagctgaaaaaatcagtaaaacagcacaggcaccgtcatccccaaacgatccgaccc

SEQ ID NO: 594973 - DNA, 75 bp, synthetic construct
  source 1..75: mol_type = other DNA
catcacgtgccgccacgctggggcgtgatattgtccccagccagattatcagtgcattgtccgtttccggggtgt

SEQ ID NO: 594974 - DNA, 75 bp, synthetic construct
  source 1..75: mol_type = other DNA
aataacagtatcaaccatatctacccgcgcatcgcccgtgtgcgtagcgtggaagagatcctcaacgcgttatga

SEQ ID NO: 594975 - DNA, 75 bp, synthetic construct
  source 1..75: mol_type = other DNA
aaccgacagcgatatcgaaatcatcaaacgtcaatggggtgcgttttacggtacggatctggagttgcaattacg

SEQ ID NO: 594976 - DNA, 75 bp, synthetic construct
  source 1..75: mol_type = other DNA
ctgcgctggtggtaattgacttacaagaaggcatcttaccttttgccggtggtcctcatactgccgatgaggtgg

SEQ ID NO: 594977 - DNA, 75 bp, synthetic construct
  source 1..75: mol_type = other DNA
gcgcgctttatcgccagccgtagccgcaaaggttatggacctgcacgtattcgtcaggaactgaatcagaaaggt

SEQ ID NO: 594978 - DNA, 75 bp, synthetic construct
  source 1..75: mol_type = other DNA
ctgggatgatgagaaattacagcgtcgtcttgcttctcgcctcgatcgctgggtaagtctgatgcgaatgcacgg

SEQ ID NO: 594979 - DNA, 75 bp, synthetic construct
  source 1..75: mol_type = other DNA
ttatcgccgcacgcaccaacgataataaatggctgacgcgggagcaaacttctggcgtgcagcaacaaatccgcc

SEQ ID NO: 594980 - DNA, 75 bp, synthetic construct
  source 1..75: mol_type = other DNA
gggataaaagtctccggcgatcgtcacgaatatctcattcctttcaatcaattactggcaattcactgcaagcgc

SEQ ID NO: 594981 - DNA, 75 bp, synthetic construct
  source 1..75: mol_type = other DNA
tattctgttaccgcatggcggcagtgcgctggtcgatatgacctactatgaaaatgccgtgcacgccatgtggct

SEQ ID NO: 594982 - DNA, 75 bp, synthetic construct
  source 1..75: mol_type = other DNA
cttcctcatcaggcaccaagcgtacataccggaaaggtaaccctgttccggccagagagaggcaaagagcttctt

SEQ ID NO: 594983 - DNA, 75 bp, synthetic construct
  source 1..75: mol_type = other DNA
gtgaggtggcgaatcggtttattcagcagaacccgagccagttgaaaaagccgctaaacagtttaatcgctggcg

SEQ ID NO: 594984 - DNA, 75 bp, synthetic construct
  source 1..75: mol_type = other DNA
gaaaacgtctggcacagcacccttacgatcgggcggtgatcctcaatgccgggattaaagtctccggcgatcgcc

SEQ ID NO: 594985 - DNA, 75 bp, synthetic construct
  source 1..75: mol_type = other DNA
atttcccgcgaagcgacagaaaaagcgatgcgtgaatgtgacatcgactggtgcgcactggcgcgcgatcaggcg

SEQ ID NO: 594986 - DNA, 75 bp, synthetic construct
  source 1..75: mol_type = other DNA
tcgtcaggaactgaatcagaaaggtatttcccgcgaagcgacagaaaaagcgatgcgtgaatgtgacatcgactg

SEQ ID NO: 594987 - DNA, 75 bp, synthetic construct
  source 1..75: mol_type = other DNA
gcaaattttattgctggcgtttggtcgcaaagccgctgaagagatggacgagcgtattcgagaacgactacatac

SEQ ID NO: 594988 - DNA, 75 bp, synthetic construct
  source 1..75: mol_type = other DNA
gcgtctgcacggcaccgaatgggctgagacacagcgttttcaccatcatcttgatgctcactggcggcggtggag

SEQ ID NO: 594989 - DNA, 75 bp, synthetic construct
  source 1..75: mol_type = other DNA
aggcggtcggctgcagcataatcaggcatataccgaagccatgcttaacgaacatgcggacttttttcgtcaggt

SEQ ID NO: 594990 - DNA, 75 bp, synthetic construct
  source 1..75: mol_type = other DNA
cacgctccagttctccgtggatgaggaactggccattgatgtgctgattccggcaggtacccgcgtcagcgcttc

SEQ ID NO: 594991 - DNA, 75 bp, synthetic construct
  source 1..75: mol_type = other DNA
aacacctgagtgtactgtaaaaagaagtgactacagagccacttttggtagaactcaacccatagatattgacta

SEQ ID NO: 594992 - DNA, 75 bp, synthetic construct
  source 1..75: mol_type = other DNA
gaatggtgcggtttaaagcaggcgcgacggcggatctcggcgttagcgtgcgtccgcgctggccgctggcggagt

SEQ ID NO: 594993 - DNA, 75 bp, synthetic construct
  source 1..75: mol_type = other DNA
ctgccgggcgctttgtcttcccgcgcccgatgaccgaccgtccggggctggatttcagcttttctggtctgaaaa

SEQ ID NO: 594994 - DNA, 75 bp, synthetic construct
  source 1..75: mol_type = other DNA
agccatctacaatcaagtaatagcgatgttgttgctgctgcggctataagtattgcagcgacagagatgaaaacc

SEQ ID NO: 594995 - DNA, 75 bp, synthetic construct
  source 1..75: mol_type = other DNA
ctttatatggtgttctttccgactgggcgcaacagagcggatggactgtattatggcatgcaaattataactata

SEQ ID NO: 594996 - DNA, 75 bp, synthetic construct
  source 1..75: mol_type = other DNA
gtcttttggtatcctgttttactcaggcacaagaaagtgtaaataaaagcaagaaaattttttcaggggacacaa

SEQ ID NO: 594997 - DNA, 75 bp, synthetic construct
  source 1..75: mol_type = other DNA
accagatgcttcgtgcagcacaaaacaaagcagtaatagccagatttattggtgattcaaaaatgtggcttgaag

SEQ ID NO: 594998 - DNA, 75 bp, synthetic construct
  source 1..75: mol_type = other DNA
tgttacggttcacgcaattggcaaagcacgcagcattgagcgcatcaataaagcgctggcatttattgctgaacg

SEQ ID NO: 594999 - DNA, 75 bp, synthetic construct
  source 1..75: mol_type = other DNA
atcttcacccgtgaagaaatgatcaaatacttcaccctgaacgcggttagcaaatctgccagtgcgtttaacaca

SEQ ID NO: 595000 - DNA, 75 bp, synthetic construct
  source 1..75: mol_type = other DNA
tttaacggcaaaagacattgatgctgtggcctataccgcaggccctggattagtcggcgcgctgctggttggcgc

SEQ ID NO: 595001 - DNA, 75 bp, synthetic construct
  source 1..75: mol_type = other DNA
gaatggtgcggtttaaagcaggcgcgacggcggatctcggcgttagcgtgcgtccgcgctggccactggcagagt

SEQ ID NO: 595002 - DNA, 75 bp, synthetic construct
  source 1..75: mol_type = other DNA
ggcaccgacgaccagacgcgtgctgatatcgcccgcgcctttgaagatgcggtggtcgatacgttgatgattaag

SEQ ID NO: 595003 - DNA, 75 bp, synthetic construct
  source 1..75: mol_type = other DNA
atcggtttaccgtaaatctaccttcctgctggattcgctgggtaaacaaattctgccggactggctgaccattga

SEQ ID NO: 595004 - DNA, 75 bp, synthetic construct
  source 1..75: mol_type = other DNA
atgtttagcataagaacccaactaccgattagcagcaccgtatcagttccgacaaaacaatctcaatccatccca

SEQ ID NO: 595005 - DNA, 75 bp, synthetic construct
  source 1..75: mol_type = other DNA
agattacgatctatcgtgatcaggatgccaggtctgtaaaagatgccgctaacagcgccatacagaactgggtgg

SEQ ID NO: 595006 - DNA, 75 bp, synthetic construct
  source 1..75: mol_type = other DNA
agcagacaatacaacgaaattaatgccattgatgattttttgactgatcgagctggtgttgagtcattttattgg

SEQ ID NO: 595007 - DNA, 75 bp, synthetic construct
  source 1..75: mol_type = other DNA
cggcaggtacccgcgtcagcgcttccgacagcattatttttgcaaccgatacggacgtagtgctgaaagccggat

SEQ ID NO: 595008 - DNA, 75 bp, synthetic construct
  source 1..75: mol_type = other DNA
caggtggattacaccattgaagccaggattacgatctatcgtgatcaggatgcaaggtcggtaaaggacaacgct

SEQ ID NO: 595009 - DNA, 75 bp, synthetic construct
  source 1..75: mol_type = other DNA
atggcgctgacagaacccgactttattgaacgtgatgccgacaaaatcacggcagaaatgattgcacagtacgaa

SEQ ID NO: 595010 - DNA, 75 bp, synthetic construct
  source 1..75: mol_type = other DNA
aaaggtagcgcatcatccaccgatttaagcccgcaggctattgcccgcaccgtacaggcggcgctggatattgcc

SEQ ID NO: 595011 - DNA, 75 bp, synthetic construct
  source 1..75: mol_type = other DNA
ttaccggtgattattcccgtggtgcagcgggcttctgggtagagaatggcgaaattcagtatccggttagcgaaa

SEQ ID NO: 595012 - DNA, 75 bp, synthetic construct
  source 1..75: mol_type = other DNA
caggcgtggcagacaaagaactgctggcttttgatgcaccggatcttgacttgttccacccagcggaagtttccc

SEQ ID NO: 595013 - DNA, 75 bp, synthetic construct
  source 1..75: mol_type = other DNA
attaaaaacggaaaaattgccgttcctgatgcgcccggtctgggcgtggaactggactgggaacaggtacaaaag

SEQ ID NO: 595014 - DNA, 75 bp, synthetic construct
  source 1..75: mol_type = other DNA
atttcgatatctctctggcgatgtttacccatgtgggcgcggcggcaccgggtaatcctaccgctatcgataccc

SEQ ID NO: 595015 - DNA, 75 bp, synthetic construct
  source 1..75: mol_type = other DNA
aacgccagagtgggtcggggccgactgtgctcgccgtactttatcgcgcctgtcaccgcgtaaactctccaccat

SEQ ID NO: 595016 - DNA, 75 bp, synthetic construct
  source 1..75: mol_type = other DNA
ctcaaccttctctgtatagtattattgcttgtgtgttctttcataagtgcaggaccagtatatgctttttatgaa

SEQ ID NO: 595017 - DNA, 75 bp, synthetic construct
  source 1..75: mol_type = other DNA
cagaaattgaatcactaggcatcggtgagctaattaaagttgtttttgtgtttgttttatttgttatagtttcat

SEQ ID NO: 595018 - DNA, 75 bp, synthetic construct
  source 1..75: mol_type = other DNA
gttgatgcaataccattaataattttgggggcaggaatagagtctaaaaaaataatgcgcatgggaagaatagtt

SEQ ID NO: 595019 - DNA, 75 bp, synthetic construct
  source 1..75: mol_type = other DNA
gtagggcgataggcagtattttgagaaagctgtgtgagtggaaaagcgtacggattctggaagcagagtgccgcg

SEQ ID NO: 595020 - DNA, 75 bp, synthetic construct
  source 1..75: mol_type = other DNA
acggtatcggttagcggtaactggttcgaaggggaactgtccgcagaagctaccggtatcgtgctgaccctgttc

SEQ ID NO: 595021 - DNA, 75 bp, synthetic construct
  source 1..75: mol_type = other DNA
tcatcatggtcaagatagtccaaatgaaaaatattttgatggtagcaatcctctctacaataaattctataacta

SEQ ID NO: 595022 - DNA, 75 bp, synthetic construct
  source 1..75: mol_type = other DNA
tgccaatggtgggcgtcgatccggcgctggtactttgttatcgcgatgaatataaactggcgctgggcgaggagc

SEQ ID NO: 595023 - DNA, 75 bp, synthetic construct
  source 1..75: mol_type = other DNA
ctatcgggcgtatctataaaacggtttatcaacgctgccgccagcagcggcagttaattatcgacaagttcccca

SEQ ID NO: 595024 - DNA, 75 bp, synthetic construct
  source 1..75: mol_type = other DNA
cagtgccccatcaaaattgatgtgccggagtttcgctctcgttttctgcagctctatcacacccgttatttacgc

SEQ ID NO: 595025 - DNA, 75 bp, synthetic construct
  source 1..75: mol_type = other DNA
taatgaatatcccgggcatgcagcaacttacatcaaccaaatcctttgtcggtgatgtagtcggaacctgcaacc

SEQ ID NO: 595026 - DNA, 75 bp, synthetic construct
  source 1..75: mol_type = other DNA
tcggctggcaggtatgcagtgagctggcaggtgttgagcgtatttatgcgatgcgcaaaaaagctgtcggcctgc

SEQ ID NO: 595027 - DNA, 75 bp, synthetic construct
  source 1..75: mol_type = other DNA
gctcgggatctatgagttatcctggcatcaggcgatgcagcgactgccgcgtaaccgctgtctggcgaccggata

SEQ ID NO: 595028 - DNA, 75 bp, synthetic construct
  source 1..75: mol_type = other DNA
attttgagaaagctgtgtgagtggaaaagtgtacggattctggaagctgaatgctgtgcagatcatatccatatg

SEQ ID NO: 595029 - DNA, 75 bp, synthetic construct
  source 1..75: mol_type = other DNA
ctggctgaacctgcaggatattccgccggctctggagggcagcggtattgcagtggcactgcgcacgaagctgaa

SEQ ID NO: 595030 - DNA, 75 bp, synthetic construct
  source 1..75: mol_type = other DNA
acaggcctgggtggataatatcgtggagaaagacacccgtccgacctttgtggtaacgccgtccttcttcaaggt

SEQ ID NO: 595031 - DNA, 75 bp, synthetic construct
  source 1..75: mol_type = other DNA
accacgccgtacatttttgcgattggcagcctgctggacggaaacgggaagaaaattgccacggataatgagaca

SEQ ID NO: 595032 - DNA, 75 bp, synthetic construct
  source 1..75: mol_type = other DNA
ccaagcttgggtggacaatatcgtggagaaggacacccgtccgacttttgttgtgacaccgtctttctttaaggt

SEQ ID NO: 595033 - DNA, 75 bp, synthetic construct
  source 1..75: mol_type = other DNA
cagtggcgctgcgcacgaagctgaagctgttctatcgtccgaaggccctgctggaggggcgcaagggggctgaag

SEQ ID NO: 595034 - DNA, 75 bp, synthetic construct
  source 1..75: mol_type = other DNA
cagtggcgctgcgcacgaaactgaaactgttctatcgcccgaaggcactgcttgaaggtcgcaagggggcagaag

SEQ ID NO: 595035 - DNA, 75 bp, synthetic construct
  source 1..75: mol_type = other DNA
ctggataaaaatggtaagcctgtggaaataatggtgtgtgatgttcaggaactgcattttttcgttccaaagaat

SEQ ID NO: 595036 - DNA, 75 bp, synthetic construct
  source 1..75: mol_type = other DNA
atgctcccttttttgtgggaaaaatttatgaagctctacatcgctaactgctcacgtcagccgcacacgttcaac

SEQ ID NO: 595037 - DNA, 75 bp, synthetic construct
  source 1..75: mol_type = other DNA
catagtatttgcgccaaaataccgaagacaggtgttctacagagagaagcgtagagcaagaggcggtattttgag

SEQ ID NO: 595038 - DNA, 75 bp, synthetic construct
  source 1..75: mol_type = other DNA
ggacaattaaccagaaaaaaacgtcagcgtcttccggggagaaggtatctgattcgtcggataatttgcctgata

SEQ ID NO: 595039 - DNA, 75 bp, synthetic construct
  source 1..75: mol_type = other DNA
attttcttgatcaagagttgctctcctggtggatgacagaagagaactttcatcaagttattgatcattttctgg

SEQ ID NO: 595040 - DNA, 75 bp, synthetic construct
  source 1..75: mol_type = other DNA
ggcggtgtacatagaaagcagagaacaggcacgcatacaatttttgcaacagtacaaaatgccaaatgagacaca

SEQ ID NO: 595041 - DNA, 75 bp, synthetic construct
  source 1..75: mol_type = other DNA
gcggtgaagcgtggtatttctttggtcactgtactgaagtcactgctttgcccggcgcgcctgcccagtgggccg

SEQ ID NO: 595042 - DNA, 75 bp, synthetic construct
  source 1..75: mol_type = other DNA
atatgcattgcatatggacattacccgaaagcgatgatgatttttcctcccgctggcgggagattaaaaagcagt

SEQ ID NO: 595043 - DNA, 75 bp, synthetic construct
  source 1..75: mol_type = other DNA
aagctgtaggcggacaaaccgcagcggcacgcctatgtggtctgtcgaatgttgctattcacaagtgggtaaaga

SEQ ID NO: 595044 - DNA, 75 bp, synthetic construct
  source 1..75: mol_type = other DNA
cgctggcgggaaattaaaaagcaatttacccatgcttgtggattgaaaaatatctggcaaccgcgtttttgggag

SEQ ID NO: 595045 - DNA, 75 bp, synthetic construct
  source 1..75: mol_type = other DNA
tgctggcagtaaatgttgtacacgacgcttcgcacgatgcgtttctgcgcggtaaaaaggccaatgtctggctta

SEQ ID NO: 595046 - DNA, 75 bp, synthetic construct
  source 1..75: mol_type = other DNA
gtggggactgtatttattgtggtatctggcgatgatgttttgcgctatgttgctggcagtaaatgttgtacacga

SEQ ID NO: 595047 - DNA, 75 bp, synthetic construct
  source 1..75: mol_type = other DNA
ggtacgaaagtttatctggcgaaatcaggcgatcatcggtatgccgacggatgggcattcaccaaaatggcggtg

SEQ ID NO: 595048 - DNA, 75 bp, synthetic construct
  source 1..75: mol_type = other DNA
ttccatggattggtggcaaacgccgccttgcaaaacacatcctgccgctgtttccggcgcatgaatgttatgtgg

SEQ ID NO: 595049 - DNA, 75 bp, synthetic construct
  source 1..75: mol_type = other DNA
tcagccgtcagatctacaaatggctgcagatcaccccggaagaaacactgacggatatccagcgtgcggcacggt

SEQ ID NO: 595050 - DNA, 75 bp, synthetic construct
  source 1..75: mol_type = other DNA
gaacggaaggctatggtgtagatttccctataggtaactatgtccacatggcggagctggcgcggagcatcaaag

SEQ ID NO: 595051 - DNA, 75 bp, synthetic construct
  source 1..75: mol_type = other DNA
cgaaagcgatgatgatttttcctctcgctggcgggagattaaaaaacagttcacccatgcttgtggattgcaaaa

SEQ ID NO: 595052 - DNA, 75 bp, synthetic construct
  source 1..75: mol_type = other DNA
atatgcactgtatctggacattacctgaaagcgatgatgatttttcctctcgctggcgggagattaaaaaacagt

SEQ ID NO: 595053 - DNA, 75 bp, synthetic construct
  source 1..75: mol_type = other DNA
acaagagccagttcattaattataagagtgaaccactggctgcaacacaatacagtgtagctgcaaagattttca

SEQ ID NO: 595054 - DNA, 75 bp, synthetic construct
  source 1..75: mol_type = other DNA
agcagaaggggctggattaccagttactgacgttatcggatttgttggggctacagcagcaatttttacggcgaa

SEQ ID NO: 595055 - DNA, 75 bp, synthetic construct
  source 1..75: mol_type = other DNA
gcaattcatattcttaaagccgcagccatgcccgtaggcgttgccgggtttgatatcaacagtagctgtgtgagc

SEQ ID NO: 595056 - DNA, 75 bp, synthetic construct
  source 1..75: mol_type = other DNA
ctggctgcggagaaaggggtaacgtctgcacaaatcgcactggcatggctgttagcacaaaagccgtggattgtt

SEQ ID NO: 595057 - DNA, 75 bp, synthetic construct
  source 1..75: mol_type = other DNA
cgattaagccgggaaccactttcggcaaagatgattaccgcagcaccgtaccgcgtttcgcagcacaagccattg

SEQ ID NO: 595058 - DNA, 75 bp, synthetic construct
  source 1..75: mol_type = other DNA
cgtagtcaggtaaaacgggttgaaggcacgggggtacgccatcctgtgcaggctttactggagattattaaatga

SEQ ID NO: 595059 - DNA, 75 bp, synthetic construct
  source 1..75: mol_type = other DNA
gtcgtttcacagcggataaacctgtaatgttgattggcacggctgcggggttaacgctggctggcatggtgcttt

SEQ ID NO: 595060 - DNA, 75 bp, synthetic construct
  source 1..75: mol_type = other DNA
attgtcgagcagggcaatggtcgcagcgggattatcgccagtctgattgaaatgtatcccgaaggcagcgaactg

SEQ ID NO: 595061 - DNA, 75 bp, synthetic construct
  source 1..75: mol_type = other DNA
tcctcaacaatcgctcacttcgcaaagcctctgaagaggtagcagcggaaatggcggcgcaaccctgcccaggtg

SEQ ID NO: 595062 - DNA, 75 bp, synthetic construct
  source 1..75: mol_type = other DNA
cactcggagtcatcgggccgctgattgccgccaaatatgatataccggtcgtgatgcaaaccgtaggcttcggcc

SEQ ID NO: 595063 - DNA, 75 bp, synthetic construct
  source 1..75: mol_type = other DNA
acctgcatggctgggctactggctgggcgggattaatttgcatcttacccatcatctgtttcctcactggcacca

SEQ ID NO: 595064 - DNA, 75 bp, synthetic construct
  source 1..75: mol_type = other DNA
taccgcagcaccgtaccgcgtttcgctgcacaagccattgaagccaatgaaaaactggtcacgttgttgggtgag

SEQ ID NO: 595065 - DNA, 75 bp, synthetic construct
  source 1..75: mol_type = other DNA
agcctgagcaggaaattctgccgttgctggaggagctgggaattggttttgtgccattcagcccattaggtaaag

SEQ ID NO: 595066 - DNA, 75 bp, synthetic construct
  source 1..75: mol_type = other DNA
cacaaaccattcgtcgtgcacatgcggtacaacctgtcaccgccctgcaaagcgaatattccatgtggtggcgtg

SEQ ID NO: 595067 - DNA, 75 bp, synthetic construct
  source 1..75: mol_type = other DNA
agcagttacaaactattctgtttgaaaaacagggaattaagccgctgaagaaaacgccgggtggcgcgccgtcaa

SEQ ID NO: 595068 - DNA, 75 bp, synthetic construct
  source 1..75: mol_type = other DNA
acagcctcgataacatctcagccaatctggttgggctttcttttgctatcgagccgggcgtagcggcatatgttc

SEQ ID NO: 595069 - DNA, 75 bp, synthetic construct
  source 1..75: mol_type = other DNA
cgtaccgggtgtaggtgaaaaaactgcgcaggcactgctacaaggtcttggtgggctggatacgctgtatgccga

SEQ ID NO: 595070 - DNA, 75 bp, synthetic construct
  source 1..75: mol_type = other DNA
tcaaacgctggactgctgatgtagaggcgggcaaatggttacaggccaaagggtctaaacctgccgcgaagccgc

SEQ ID NO: 595071 - DNA, 75 bp, synthetic construct
  source 1..75: mol_type = other DNA
catcaactgatggaaaactgtactcgtctggatgtgccgttgctggtggaagtcggtagcggcgaaaactgggat

SEQ ID NO: 595072 - DNA, 75 bp, synthetic construct
  source 1..75: mol_type = other DNA
tctcgatgtggtggcgaagaagatccatcaactgatggaaaactgtactcgtctggatgtgccgttgctggtgga

SEQ ID NO: 595073 - DNA, 75 bp, synthetic construct
  source 1..75: mol_type = other DNA
tcatcgggaatactttgcccgccacgatgcgcgacagggcaaaaagtcgcatccgtttgttgccgtcaactgcgg

SEQ ID NO: 595074 - DNA, 75 bp, synthetic construct
  source 1..75: mol_type = other DNA
gggcgttcaccggctcgcgacgtggaggtcgcgccgggctgttcgaaattgcccacggcggtacgctgtttctgg

SEQ ID NO: 595075 - DNA, 75 bp, synthetic construct
  source 1..75: mol_type = other DNA
atgggcattggctttatcgcctctatgcttcatcttggttcaccgatgcgcgcttttaactcgctcaatcgggta

SEQ ID NO: 595076 - DNA, 75 bp, synthetic construct
  source 1..75: mol_type = other DNA
aggaaaccagtgttgcagacgaagcgccagaagtgacggcaacggtgatttcttatgacaactacgtcaccatcc

SEQ ID NO: 595077 - DNA, 75 bp, synthetic construct
  source 1..75: mol_type = other DNA
gttctgcataatcattctgaagagctcactctacgtctggcggagctggaaaagaaagcgcatgaaattgcaggt

SEQ ID NO: 595078 - DNA, 75 bp, synthetic construct
  source 1..75: mol_type = other DNA
catacaacggtacacccggcaggattttccagttgtcagccccgtgctgattcgtaagcgtcgtctcagcaccgt

SEQ ID NO: 595079 - DNA, 75 bp, synthetic construct
  source 1..75: mol_type = other DNA
tttgaaaacatcgaaatgcctttggtgccggtgctttcgcgcattgaacgtaacggtgtgaagatcgatccgaaa

SEQ ID NO: 595080 - DNA, 75 bp, synthetic construct
  source 1..75: mol_type = other DNA
actggatcacatcaatagtcgcagaagtggtttcccgctatccggtagatggcgtgcagtttgacgactatttct

SEQ ID NO: 595081 - DNA, 75 bp, synthetic construct
  source 1..75: mol_type = other DNA
cgacaagctggatcatctgcaacgtctcggcataaatacggtctttttccaggtaaagcccgatggcactgccct

SEQ ID NO: 595082 - DNA, 75 bp, synthetic construct
  source 1..75: mol_type = other DNA
caatcgtcgcaacccatgcgtggtatctggctggccactgtgtctcgcctcgactggcccccggtttcctcggtt

SEQ ID NO: 595083 - DNA, 75 bp, synthetic construct
  source 1..75: mol_type = other DNA
attctaccttcgactgggttttatacagttaaaggaagaaaactgtaattcgctcttctacccgacaaaatctat

SEQ ID NO: 595084 - DNA, 75 bp, synthetic construct
  source 1..75: mol_type = other DNA
cagatacccgtggagctgctgcctatgatgaatcctatgcggatacccgccgttgggtcgaacaaggtttactgg

SEQ ID NO: 595085 - DNA, 75 bp, synthetic construct
  source 1..75: mol_type = other DNA
acgcaacaatacccagcagttaatcgcgaaagtatcgcataccataaaaagcctgaagcctgaggtcgaatttgg

SEQ ID NO: 595086 - DNA, 75 bp, synthetic construct
  source 1..75: mol_type = other DNA
atccctttgctgaaggagaataatcagcggacgcgcttttttgacgccgatgagatcagaaggatcctcgacgct

SEQ ID NO: 595087 - DNA, 75 bp, synthetic construct
  source 1..75: mol_type = other DNA
cgcgcagcgacatctctctatcgatttatttgctctcgccctgaataagcgcaagcaattacttcttagtatagt

SEQ ID NO: 595088 - DNA, 75 bp, synthetic construct
  source 1..75: mol_type = other DNA
ccaggccgagcaaccgcgtgtgcgtatgattatgcaggtacacgatgaactggtgtttgaagttcataaagatga

SEQ ID NO: 595089 - DNA, 75 bp, synthetic construct
  source 1..75: mol_type = other DNA
aattcgcgctcaaaagaccagcggcgctcgttgcactggctcttttactgtgtagttgtaagacaacaccgccaa

SEQ ID NO: 595090 - DNA, 75 bp, synthetic construct
  source 1..75: mol_type = other DNA
aaattagcggcacaatcttgttccgcgaagactatctgaataaaccacaaacccagcaagccgttagttacctgc

SEQ ID NO: 595091 - DNA, 75 bp, synthetic construct
  source 1..75: mol_type = other DNA
gcctttctcgcggagcgccgcgcgttatgacgtactggcaaaatggtgggcagatgtggtcaaaccgaccaaaac

SEQ ID NO: 595092 - DNA, 75 bp, synthetic construct
  source 1..75: mol_type = other DNA
agcgtctgggcttaaaaatcccggatgatatcgcgattgctggtttccacggccacgatattggtcaggtgatgg

SEQ ID NO: 595093 - DNA, 75 bp, synthetic construct
  source 1..75: mol_type = other DNA
caagaacgggcggttttacccttaaaattctgggcgtaaacaaccttaagacgatgatccgtgaaatgattaacc

SEQ ID NO: 595094 - DNA, 75 bp, synthetic construct
  source 1..75: mol_type = other DNA
gccagcattgcggacacaaacacgtaatggaatggagtagagtattctttgattggcatgtaatcaatggtaaat

SEQ ID NO: 595095 - DNA, 75 bp, synthetic construct
  source 1..75: mol_type = other DNA
cagttgggtaaaactcttgtgctaaacggtattatctttcacaggatcgccagtaaccctactaatatcggtgtt

SEQ ID NO: 595096 - DNA, 75 bp, synthetic construct
  source 1..75: mol_type = other DNA
gatcaccgcagcttttacgatcataactgtgaacgatatgaatcccctgtatgggatagattaatcaacttccat

SEQ ID NO: 595097 - DNA, 75 bp, synthetic construct
  source 1..75: mol_type = other DNA
gcgcagaaactaccatcttaggtgtagcgaaagataaggtttacattctggatcaccgcagcttttacgatcata

SEQ ID NO: 595098 - DNA, 75 bp, synthetic construct
  source 1..75: mol_type = other DNA
aaagctaaattctatacccgatccggtcaacgaatcccgatgctatctgctttcgtggactcatcgaacggacga

SEQ ID NO: 595099 - DNA, 75 bp, synthetic construct
  source 1..75: mol_type = other DNA
ggaccattaaccagaaaaaggctgcagtcccttccggccagaaggcatctgattcgccggttaatccgtctgata

SEQ ID NO: 595100 - DNA, 75 bp, synthetic construct
  source 1..75: mol_type = other DNA
taagcctaatgggcagcaaacgctgagggttattaaggcttcggaccatgtgccacaggataaagagtctgttta

SEQ ID NO: 595101 - DNA, 75 bp, synthetic construct
  source 1..75: mol_type = other DNA
atgaatatgatgcgtattttttatatcggattgtcaggtgtggggatgatgttctcatcaatggcgtctggacat

SEQ ID NO: 595102 - DNA, 75 bp, synthetic construct
  source 1..75: mol_type = other DNA
aatatttcgccataccttgcataattatttttatactctcgtgtttatcagcggcatggtctgcattaaagggaa

SEQ ID NO: 595103 - DNA, 75 bp, synthetic construct
  source 1..75: mol_type = other DNA
atgatgacctgtcagagtgcggtggcttccctggcggcagaccagacccgctatatctttcgcggggacagggat

SEQ ID NO: 595104 - DNA, 75 bp, synthetic construct
  source 1..75: mol_type = other DNA
aaggtatcagcctgcagagccgccctgatggtcgtaccatgctggtgaacaccacgccatacatctatgccattg

SEQ ID NO: 595105 - DNA, 75 bp, synthetic construct
  source 1..75: mol_type = other DNA
aaactaagccaatcacacgaccgcaacgtcaaaacatcgtcagacctccaaatagaggccgtagttgggtaacat

SEQ ID NO: 595106 - DNA, 75 bp, synthetic construct
  source 1..75: mol_type = other DNA
gccactacgtgcgtttaactcactgaatcgaatcggatcttcgggcttgagtaacgagattgctgccggttcatt

SEQ ID NO: 595107 - DNA, 75 bp, synthetic construct
  source 1..75: mol_type = other DNA
gccaaatcctgaaacacttgataaaaattttctatatcatttcttgcaaaaggaattggataaaattcatgctac

SEQ ID NO: 595108 - DNA, 75 bp, synthetic construct
  source 1..75: mol_type = other DNA
atgatgaaatcattttgcatgattgcaatgacgatatgggctgggacatcttctttgatcaggattatttaatgt

SEQ ID NO: 595109 - DNA, 75 bp, synthetic construct
  source 1..75: mol_type = other DNA
ccgtcggttttgataactttgaagcggcacgccagatgaccaccgccattattgctcgcgggcatcgccacattg

SEQ ID NO: 595110 - DNA, 75 bp, synthetic construct
  source 1..75: mol_type = other DNA
cgtgttctgtaccaacgatgacctggccgttggcgcggcatttgaatgtcagcgcctggggctgaaaatccctga

SEQ ID NO: 595111 - DNA, 75 bp, synthetic construct
  source 1..75: mol_type = other DNA
ttgtctctggcgtctattcactcatccgtgcaacaagccagcgcactggtaccagattacgcctccttacaggtc

SEQ ID NO: 595112 - DNA, 75 bp, synthetic construct
  source 1..75: mol_type = other DNA
aacgcatggacagaaggagagcggatcagggcggtggctgctggtgaatggcgagtaacgagagaaagtgaagta

SEQ ID NO: 595113 - DNA, 75 bp, synthetic construct
  source 1..75: mol_type = other DNA
cgcaaaatatatcactccaccgcctaaactccttccgtctgaatggtgcgaagcgaatatggtgctggtagatgg

SEQ ID NO: 595114 - DNA, 75 bp, synthetic construct
  source 1..75: mol_type = other DNA
aaacagatgtttctatcgagaatatccctgatgacgtgattttcttgtgtgcgggtactgaccagcaattagatc

SEQ ID NO: 595115 - DNA, 75 bp, synthetic construct
  source 1..75: mol_type = other DNA
tacataacaactacaggcacagaatacctgctggtgtatctgatcttgtcgaacaacctctttatataatagtag

SEQ ID NO: 595116 - DNA, 75 bp, synthetic construct
  source 1..75: mol_type = other DNA
gcatcagcccggcgtatacccttccggtggtgctggatgtcggaacgaacaaccaacagctgcttaacgctgtat

SEQ ID NO: 595117 - DNA, 75 bp, synthetic construct
  source 1..75: mol_type = other DNA
atgcagttaataacaccagtcagattcagctacgaaatggtggtttctggtatttcatgagtttgaactctcctt

SEQ ID NO: 595118 - DNA, 75 bp, synthetic construct
  source 1..75: mol_type = other DNA
atccacggattttttcagttaggtggtatcagtgaggctgcgcgatcggcgctacgggatgttgcctggagagcg

SEQ ID NO: 595119 - DNA, 75 bp, synthetic construct
  source 1..75: mol_type = other DNA
cgagtctatgactcttgcagactgcctggattactgggaagaaaactacgttaaggcaacgctcaggcccaatac

SEQ ID NO: 595120 - DNA, 75 bp, synthetic construct
  source 1..75: mol_type = other DNA
aaggcaggtgctaagtcaactaaggtcagcaataagttggtgcatgcggcgtcagttgatagatagttgcgcaat

SEQ ID NO: 595121 - DNA, 75 bp, synthetic construct
  source 1..75: mol_type = other DNA
tgttccagattccgcaaattgccgccagctggggtagcggtatcagcgccggagttgctgacgccgcacgctcta

SEQ ID NO: 595122 - DNA, 75 bp, synthetic construct
  source 1..75: mol_type = other DNA
catgacaacgtacaatgatgttcttttccctggagaagacataaacaaaccgatcagcatcgctgcagctaaccg

SEQ ID NO: 595123 - DNA, 75 bp, synthetic construct
  source 1..75: mol_type = other DNA
tccggcatcttctatcacggttaagcaatgggttgacctgcttaccgaagaagaaaaagataatccacgccgagc

SEQ ID NO: 595124 - DNA, 75 bp, synthetic construct
  source 1..75: mol_type = other DNA
gcagggacggcggatgtggtcgcttctgccgcgcaggtggtgagtagctggggctttagcattacaccagatacg

SEQ ID NO: 595125 - DNA, 75 bp, synthetic construct
  source 1..75: mol_type = other DNA
gttaaagccaggtgcgtattttcatgaaaggagatcactcaataaccccctgtgtcagcatagttgtcgcctcaa

SEQ ID NO: 595126 - DNA, 75 bp, synthetic construct
  source 1..75: mol_type = other DNA
ctcaagctggtgatcaactccgggaacggcgcagcgggtcccgtagtggacgccattgaagcccgctttaaagcc

SEQ ID NO: 595127 - DNA, 75 bp, synthetic construct
  source 1..75: mol_type = other DNA
agcttttgccatgcgctaccgcagcgttggcatttaatgtctgtaatgctgagtgcagcgtcgtgtctggattgg

SEQ ID NO: 595128 - DNA, 75 bp, synthetic construct
  source 1..75: mol_type = other DNA
ccgcaatcgcgggtgattaccggcaacctgatgatgcccggatttactgcgcctaaattgctatgggttcagcgg

SEQ ID NO: 595129 - DNA, 75 bp, synthetic construct
  source 1..75: mol_type = other DNA
atggcgttggtatttatctcactacctggtttaatgaattcatcaccaccgggccacatggtgtggtgttggcaa

SEQ ID NO: 595130 - DNA, 75 bp, synthetic construct
  source 1..75: mol_type = other DNA
acagcctaagctcgctgattaaagagtatctatctatagcccttatcctgagctttgcgacggcaggcggctggt

SEQ ID NO: 595131 - DNA, 75 bp, synthetic construct
  source 1..75: mol_type = other DNA
cagctcacaaggaagctctggccgctgaatgtattgctgagcagaagggcaaccgtggcttctgggtcttcgtta

SEQ ID NO: 595132 - DNA, 75 bp, synthetic construct
  source 1..75: mol_type = other DNA
tcttccatccacatgacaaaacaccatttatgatctgtattataaacaaagttgaagatacagaacttggattga

SEQ ID NO: 595133 - DNA, 75 bp, synthetic construct
  source 1..75: mol_type = other DNA
gttgcgataaagacaggttaaagaatatttatattctcttggtttcagaactcacgcagatgagtgaagaaacta

SEQ ID NO: 595134 - DNA, 75 bp, synthetic construct
  source 1..75: mol_type = other DNA
gactttgcttgctacagggtatggggcacaggcgtatgatacagaaggaacgtgcatctggctgcagaaacacct

SEQ ID NO: 595135 - DNA, 75 bp, synthetic construct
  source 1..75: mol_type = other DNA
agaaggatctggcgcaagagatcgccaacgtgaagtccacggtcaaccaggtgaaagatgccgaaggcgtcacct

SEQ ID NO: 595136 - DNA, 75 bp, synthetic construct
  source 1..75: mol_type = other DNA
gtgaagggaaccgaaggtgtcactttcaaaagcaaagcagagtttgaagctgcggtggccgaaagcatcaacaag

SEQ ID NO: 595137 - DNA, 75 bp, synthetic construct
  source 1..75: mol_type = other DNA
acaaaaaaattttggacattttttccgataatgcatttttgtccatgatgaatgaacgacagggcagggaaagtc

SEQ ID NO: 595138 - DNA, 75 bp, synthetic construct
  source 1..75: mol_type = other DNA
gatatagagatagatgctttgcaaattaatattaatgaaatttcgccagtattaacggttactgtggctaaattg

SEQ ID NO: 595139 - DNA, 75 bp, synthetic construct
  source 1..75: mol_type = other DNA
ataaccagttttcttgatttcaacggatatcttaatattgatatcgccagtccaggaaagaaaattaatgagtcg

SEQ ID NO: 595140 - DNA, 75 bp, synthetic construct
  source 1..75: mol_type = other DNA
aattaactcttgaaaacggcaacaacatttgtgtcaataattatagtcattatctgttatcagaatctgtaagtc

SEQ ID NO: 595141 - DNA, 75 bp, synthetic construct
  source 1..75: mol_type = other DNA
cccgtcgcaggggatgttgtccagttttgtcccgacggatagccagattatcggccaggtatataagtgccagaa

SEQ ID NO: 595142 - DNA, 75 bp, synthetic construct
  source 1..75: mol_type = other DNA
aaagacacgtttgtgtctgtcccgaagagtgtttctgaaatacagggcacgacagcgatgtatgcacgtaataaa

SEQ ID NO: 595143 - DNA, 75 bp, synthetic construct
  source 1..75: mol_type = other DNA
atgaacgctaccggctcacaaaagcgcaggaactgaaaaatgcccgtgaagacggagtagtgctggaaactgaac

SEQ ID NO: 595144 - DNA, 75 bp, synthetic construct
  source 1..75: mol_type = other DNA
cagccattggtctggcagccgttatgtcacaatccgctatggcggagaacctgaagctcggtttcctggtgaagc

SEQ ID NO: 595145 - DNA, 75 bp, synthetic construct
  source 1..75: mol_type = other DNA
ccctccggtaaacaggaatattacagggagaaattgagcagactgcatattaaccgggagcagcaccattttttt

SEQ ID NO: 595146 - DNA, 75 bp, synthetic construct
  source 1..75: mol_type = other DNA
gcctgaatgttgacggtatcaaaaccggtcacactgacaaagcaggttacaatcttgtcgcttccgcgacagaag

SEQ ID NO: 595147 - DNA, 75 bp, synthetic construct
  source 1..75: mol_type = other DNA
cgtggtagcctgggagtatctggtggaagattatgatcgcattcgcaatgacattgaagctgtgctgccagagtt

SEQ ID NO: 595148 - DNA, 75 bp, synthetic construct
  source 1..75: mol_type = other DNA
agcctatgctgtcggttacgaaagcttatcccatttccgacgggaatatttgcggatgtttggagagcgaacgta

SEQ ID NO: 595149 - DNA, 75 bp, synthetic construct
  source 1..75: mol_type = other DNA
ctaaaattggcgaacgtcagcccaggaactgtataaagagatgcagaaacgtggctgggatgtcaaagaaagcgc

SEQ ID NO: 595150 - DNA, 75 bp, synthetic construct
  source 1..75: mol_type = other DNA
gcatccacacttgtatgttgacctgcgtgatcgtcgccaacccgaccatcggttcatcataccagaagatggcgt

SEQ ID NO: 595151 - DNA, 75 bp, synthetic construct
  source 1..75: mol_type = other DNA
agttggcaaagtgactggcgtcttagcgaagaagaagccgtggcggcccgggtatgcaacctggagaatatctgc

SEQ ID NO: 595152 - DNA, 75 bp, synthetic construct
  source 1..75: mol_type = other DNA
ctttcatgaagagttaagcgagcggcgaccaggccgcgtgccgcagaccgtgcaactctgggtaggctgcctgct

SEQ ID NO: 595153 - DNA, 75 bp, synthetic construct
  source 1..75: mol_type = other DNA
gtggtgttgcaggaaatcccggaaggtaacttcttcggtaaaatcattgattacattaaattaatgttccatcgc

SEQ ID NO: 595154 - DNA, 75 bp, synthetic construct
  source 1..75: mol_type = other DNA
tttggcccggtgtacgacctggtggaaattcgcgatcgcgccctgggtatcatcattggtaccgtggtgtccgcg

SEQ ID NO: 595155 - DNA, 75 bp, synthetic construct
  source 1..75: mol_type = other DNA
tatcagtggtcaggctgctggcgttctttcatgaagaactaagcgagcgacgaccaggccgcgtgccgcagacag

SEQ ID NO: 595156 - DNA, 75 bp, synthetic construct
  source 1..75: mol_type = other DNA
tggcttcactgaggatgaccagtatcacttggcatccgttcttgaacatcgatcatctgaaggtcatccggtcat

SEQ ID NO: 595157 - DNA, 75 bp, synthetic construct
  source 1..75: mol_type = other DNA
tttcgcttactgcgacagcggcatgatcccgtggctgctggtcgccgaactggtgtgcctgaaagagaaaacgct

SEQ ID NO: 595158 - DNA, 75 bp, synthetic construct
  source 1..75: mol_type = other DNA
tgtttctaacagtgacacatccctgattcgttcgctgtatcgcaatttcactcactactacatcaaggcaaaacg

SEQ ID NO: 595159 - DNA, 75 bp, synthetic construct
  source 1..75: mol_type = other DNA
ggagcgcgctgctgggtgggatttgatccttcgtgtggcgtggatagttctgctgtgtacgaggtgcgcgtatga

SEQ ID NO: 595160 - DNA, 75 bp, synthetic construct
  source 1..75: mol_type = other DNA
gcgcagcgggaaaaagatatcgaaaacgaaaagctccgcaaagaactggaagatttgcgtgcggctgcagaatca

SEQ ID NO: 595161 - DNA, 75 bp, synthetic construct
  source 1..75: mol_type = other DNA
aatgcccgcgaagaagggctggtactggaaacggaattgtttaccttcattctgcaacgtgtggcacaggagatt

SEQ ID NO: 595162 - DNA, 75 bp, synthetic construct
  source 1..75: mol_type = other DNA
ggggcgcgctgctgggtggaatttgatccttcgcgtggcatggatagttctgccatgtacggagtgcgtgcatga

SEQ ID NO: 595163 - DNA, 75 bp, synthetic construct
  source 1..75: mol_type = other DNA
tgaaacggggagcgaaaatgattgccatcaatcctctgcaggagcgtggcctggagcgatttaccgcaccacaga

SEQ ID NO: 595164 - DNA, 75 bp, synthetic construct
  source 1..75: mol_type = other DNA
gaaataaaacctccatcatgccggaactgattaagcatcttcctgctggcacgcgactggttgaacctttcgcgg

SEQ ID NO: 595165 - DNA, 75 bp, synthetic construct
  source 1..75: mol_type = other DNA
atgagcaccatcttgaaatgggcgggaaataaaaccgccgtaatgtccgaactgaaaaaacaccttcctgctggc

SEQ ID NO: 595166 - DNA, 75 bp, synthetic construct
  source 1..75: mol_type = other DNA
cagcatcggtgtggcagctggcgagggtaaatcagcaacagaaatcattgctgtttccgggccgcgctgctggat

SEQ ID NO: 595167 - DNA, 75 bp, synthetic construct
  source 1..75: mol_type = other DNA
tgaaaaagaacttcgcacatttgcagaaaaagcccagcgagcgacgtttatctgcgccagctttgatgaaacgct

SEQ ID NO: 595168 - DNA, 75 bp, synthetic construct
  source 1..75: mol_type = other DNA
cagcatcggtgtagcagctggtgagagtaaatcttcaacagaaatcatcgctgtttccgggccgcgctgctgggt

SEQ ID NO: 595169 - DNA, 75 bp, synthetic construct
  source 1..75: mol_type = other DNA
cgtagttgagcaggttccggctaagtatcagtatgacctggacggcgaaacccgttactggacggggcgaggccg

SEQ ID NO: 595170 - DNA, 75 bp, synthetic construct
  source 1..75: mol_type = other DNA
aatcaccaccctgcgcggtgagcttaaggccaccaatgccaccctgaaatccgtctctcatcagaacgaactgct

SEQ ID NO: 595171 - DNA, 75 bp, synthetic construct
  source 1..75: mol_type = other DNA
gctgaagccgcgactgctgaaggggaaactatccataatatgccattcgtggtcactgcgcaggacgttctttgc

SEQ ID NO: 595172 - DNA, 75 bp, synthetic construct
  source 1..75: mol_type = other DNA
agtatccaggcgagcaatatcttaatgagctgatcaccaacatagagtttgcggcaagggcaccagttgaagtcg

SEQ ID NO: 595173 - DNA, 75 bp, synthetic construct
  source 1..75: mol_type = other DNA
gaaaatccgtggtttttgatgccagccataacgtgtttgactacaaagtattacgaaagaactttaatgagcctc

SEQ ID NO: 595174 - DNA, 75 bp, synthetic construct
  source 1..75: mol_type = other DNA
acaattatcagcaaagaaccaacatatcccgtaacggggcaaacatatggctatccagaaaactgaattgtcaca

SEQ ID NO: 595175 - DNA, 75 bp, synthetic construct
  source 1..75: mol_type = other DNA
actgatgacggtcgtgaccagttcgaatcgcttatcaggtttcacgcggatgataaaaaccatgaagcattattg

SEQ ID NO: 595176 - DNA, 75 bp, synthetic construct
  source 1..75: mol_type = other DNA
gttctgaacgctgatttggtgaacgaccgtacctgggatacttccaagtccaactccgacgcttggggcttcggt

SEQ ID NO: 595177 - DNA, 75 bp, synthetic construct
  source 1..75: mol_type = other DNA
ttgaccacttcaaacaacgtctttgttgatggtagcttgagctactctcacttcaacaacgacctgtctgcaacc

SEQ ID NO: 595178 - DNA, 75 bp, synthetic construct
  source 1..75: mol_type = other DNA
tgcttccacagatgcgccaaccagttctctggcagtaatttacaccccggaaggccagtttagcgaatatctgtt

SEQ ID NO: 595179 - DNA, 75 bp, synthetic construct
  source 1..75: mol_type = other DNA
ggtaacccaccattatattcgtgcggtcttagtgcgctgtaatatccaacgatatagtccgttattgcgtgagct

SEQ ID NO: 595180 - DNA, 75 bp, synthetic construct
  source 1..75: mol_type = other DNA
gcctgggtgtttacccttccggctgcggtactgctttccggcgggctgtactggctctccttgcagttcctgtaa

SEQ ID NO: 595181 - DNA, 75 bp, synthetic construct
  source 1..75: mol_type = other DNA
agtaagttttggcgaaaaccggaactggaaggttatggatggtaaagatgccggaacagtgaaatttgttaatgt

SEQ ID NO: 595182 - DNA, 75 bp, synthetic construct
  source 1..75: mol_type = other DNA
tgctttattgaaccggatgtgccagtggccttaaatggcgacccgatgcgtttacagcaggtcatctccaacctg

SEQ ID NO: 595183 - DNA, 75 bp, synthetic construct
  source 1..75: mol_type = other DNA
ctaacgctctgccgttaacggacaaagcggtcagcgataacgacgatatgatgattctggtcgtggatgatcatc

SEQ ID NO: 595184 - DNA, 75 bp, synthetic construct
  source 1..75: mol_type = other DNA
ccgattgttccgcaatgagtaacacctggcgaggctctctggagtcattggcgtggtttatgcgctactggcgcg

SEQ ID NO: 595185 - DNA, 75 bp, synthetic construct
  source 1..75: mol_type = other DNA
ccataacccgatggattataacggcatgaaactggtgcgcgaaggggctcgcccgatcagcggtgataccggact

SEQ ID NO: 595186 - DNA, 75 bp, synthetic construct
  source 1..75: mol_type = other DNA
cagttattaaccggctgggggcctgtttttataattggtgatgatcctttttctctgcgctggatgagtgaacat

SEQ ID NO: 595187 - DNA, 75 bp, synthetic construct
  source 1..75: mol_type = other DNA
cttacgatgttcgcggcaagctaggtgaggagctgaatgaagacattgcgtggcgcatcggccgcgcgtatggcg

SEQ ID NO: 595188 - DNA, 75 bp, synthetic construct
  source 1..75: mol_type = other DNA
cttacgttgatcacctgttcggttatatcaacgtcaaaaacctcacgccgctcaagctggtgatcaactccggga

SEQ ID NO: 595189 - DNA, 75 bp, synthetic construct
  source 1..75: mol_type = other DNA
gaaatcgctttctgggaccgagtgaaaaatcttaacccgccggaagctaccagcgtaagcgatgtatcgctgatg

SEQ ID NO: 595190 - DNA, 75 bp, synthetic construct
  source 1..75: mol_type = other DNA
tcgcgggaccctgcgtcagatttcggtgctgaaggagtacgtcgaccacctgatgggctacgtggacctggcgaa

SEQ ID NO: 595191 - DNA, 75 bp, synthetic construct
  source 1..75: mol_type = other DNA
tgagacattctgggtggatcgtgtttctccggatgacgggggcagttgctatctctggctcaaccgtgggcaacc

SEQ ID NO: 595192 - DNA, 75 bp, synthetic construct
  source 1..75: mol_type = other DNA
gttatgaactgggtgtagatgcaggttataccttcacctacagcgaagatcaggctctgactccgtacttcaaac

SEQ ID NO: 595193 - DNA, 75 bp, synthetic construct
  source 1..75: mol_type = other DNA
gcgattcactattttatgttgtcgccctacagcgtggtgatggacgttaaaatgctcgatttctttcgtcatatg

SEQ ID NO: 595194 - DNA, 75 bp, synthetic construct
  source 1..75: mol_type = other DNA
ggagtatggcaaagcccggtgccggaggaattgtaccaacgcttaattccgcaatcgccaatgattggtcactaa

SEQ ID NO: 595195 - DNA, 75 bp, synthetic construct
  source 1..75: mol_type = other DNA
cattcagcgagtccacgggagccagtcaggattcggctcgctggggagtgggtaagccgttatatcaggatctgc

SEQ ID NO: 595196 - DNA, 75 bp, synthetic construct
  source 1..75: mol_type = other DNA
agaaaggtttcgacgaaggttttaaagaaggttttaagaaaggtgcgcttgaagtggcgcgggaagcagcctgcc

SEQ ID NO: 595197 - DNA, 75 bp, synthetic construct
  source 1..75: mol_type = other DNA
atgacgattgcagaacgtcttatacagaaaggtttcgacgagggttttaaacaaggttttaaacaaggttttaaa

SEQ ID NO: 595198 - DNA, 75 bp, synthetic construct
  source 1..75: mol_type = other DNA
gtgcgctattacgaaacggcaggtagtacgacatttgtcaccagaccgggaggtatcgaaggctggctaccgatt

SEQ ID NO: 595199 - DNA, 75 bp, synthetic construct
  source 1..75: mol_type = other DNA
aagatgaagtttactaacccgtaccaattcaaaacaaaaggacaaatggttagtgaatgcaaagataagaatata

SEQ ID NO: 595200 - DNA, 75 bp, synthetic construct
  source 1..75: mol_type = other DNA
ttaaggtcgagtgcaatcaacaaatctttgcggataaaattttactgcaacgaatgttatcgaatcttattgtta

SEQ ID NO: 595201 - DNA, 75 bp, synthetic construct
  source 1..75: mol_type = other DNA
aaaaagataaaaacataactacttttgttgaaaaaataattgtttatctcaatgaatttatcgggcttaagaatt

SEQ ID NO: 595202 - DNA, 75 bp, synthetic construct
  source 1..75: mol_type = other DNA
acatacctgagcaagcagggatattactggttccttgttgcagaggaggtgccgcctttactgttggagctgaag

SEQ ID NO: 595203 - DNA, 75 bp, synthetic construct
  source 1..75: mol_type = other DNA
gcctacggtgaaggtattcccctgccagatacactcgacaaacccgagtcccgtgtaaaacaactggctcgtcga

SEQ ID NO: 595204 - DNA, 75 bp, synthetic construct
  source 1..75: mol_type = other DNA
ctttcagtaattttaagcaagtgtttatggaagggctaaatgaggtcgaaaactacttattgagtgagggcattg

SEQ ID NO: 595205 - DNA, 75 bp, synthetic construct
  source 1..75: mol_type = other DNA
gtacgtggtgcactgtttcccggattattaagaggcggtattgctgccattatgtggtttggcctgcaatgttac

SEQ ID NO: 595206 - DNA, 75 bp, synthetic construct
  source 1..75: mol_type = other DNA
tgccactccggctgacggttctcagccgaaagagttccattgtcatcctgcaaacacttttgatgccattgaccg

SEQ ID NO: 595207 - DNA, 75 bp, synthetic construct
  source 1..75: mol_type = other DNA
gtgcatctctgatacctccgcgaagctggcgaaactgccaggcgtcagtaaagaagaccagaacctgctgaaaaa

SEQ ID NO: 595208 - DNA, 75 bp, synthetic construct
  source 1..75: mol_type = other DNA
agtaatggatacggcgatggacagtgacgatcagaacagtattgctattgcccatgttccaactggagcgcaggc

SEQ ID NO: 595209 - DNA, 75 bp, synthetic construct
  source 1..75: mol_type = other DNA
cattccggaagatcgcaaaaagaaaaaaggcaaacgtaagccgccattctggacgcgtattgcgctgattgtttc

SEQ ID NO: 595210 - DNA, 75 bp, synthetic construct
  source 1..75: mol_type = other DNA
ctgctgcgtcgctactggagcgggacgaaaaagcgtgaccgtattcaccgcattccggaagatcgcaaaaagaaa

SEQ ID NO: 595211 - DNA, 75 bp, synthetic construct
  source 1..75: mol_type = other DNA
cgctgcgggcgtggcgttttcgcacggcgcgaacgacgggcagaaagggatcggcctggtaatgctggtactggt

SEQ ID NO: 595212 - DNA, 75 bp, synthetic construct
  source 1..75: mol_type = other DNA
cgagtcaaaagtcccacttaactaaagctagtaataaacaggtaagcagtaaacaagagtattctcgcaatagtg

SEQ ID NO: 595213 - DNA, 75 bp, synthetic construct
  source 1..75: mol_type = other DNA
ttagcgaagacgcacacaacaacagcgagtcaaaagtcccacttaactaaagctagtaataaacaggtaagcagt

SEQ ID NO: 595214 - DNA, 75 bp, synthetic construct
  source 1..75: mol_type = other DNA
gcggtcgccggggtatgtattattgccggagccagtattcattacggcgctgacacctggaacgtgctggatatt

SEQ ID NO: 595215 - DNA, 75 bp, synthetic construct
  source 1..75: mol_type = other DNA
tcagcagatgcctcagcctccggctcctaattaccctcagcaaaactttccaagctaccccggctacgggtatgg

SEQ ID NO: 595216 - DNA, 75 bp, synthetic construct
  source 1..75: mol_type = other DNA
gacaatggtcacctgcagagcgtgcgcgtttgcaagatatcgccaaacgctacaaggtgaagtggtctggtaata

SEQ ID NO: 595217 - DNA, 75 bp, synthetic construct
  source 1..75: mol_type = other DNA
tctgtcaaagaatcggtgagcgcctatgtcactaacctgaatacgcacccggcttactcttcgttccgtaaatcg

SEQ ID NO: 595218 - DNA, 75 bp, synthetic construct
  source 1..75: mol_type = other DNA
tgcagccgagctttaaatcggtgaccggcaaaggcggcatcaaagtgattgatggcagcagcgtcaagtttggtc

SEQ ID NO: 595219 - DNA, 75 bp, synthetic construct
  source 1..75: mol_type = other DNA
cgcgccagcattattaccccggaagcccgcgaagtggcggacttgctggggtttaccatcaccgaatgcactgaa

SEQ ID NO: 595220 - DNA, 75 bp, synthetic construct
  source 1..75: mol_type = other DNA
tctgtttggctcggcgaaagatcatgaggcgggcaatgagattcttgccgctttgaataccgagcagcaggcatg

SEQ ID NO: 595221 - DNA, 75 bp, synthetic construct
  source 1..75: mol_type = other DNA
cgaaaccatgatcgccaaagcgggcgatgtgatgtttatcccgaaaggctccagcatcgaatttggtacgacatc

SEQ ID NO: 595222 - DNA, 75 bp, synthetic construct
  source 1..75: mol_type = other DNA
cgtgccagcattattaccccggaagcgcgagaagtggcggccctgctgggggttaccatcatcgagtgcgatgaa

SEQ ID NO: 595223 - DNA, 75 bp, synthetic construct
  source 1..75: mol_type = other DNA
gctgatggaaaaagtgatgaaggaaaaacagtcgctggagcagggtgcaatgcagccgagcttcaaatcggtgac

SEQ ID NO: 595224 - DNA, 75 bp, synthetic construct
  source 1..75: mol_type = other DNA
aacgaggcgcgagtgtcgtggcactcagtcatgacgccgcatttacccggcgtcatttttcccgtgttatccgtc

SEQ ID NO: 595225 - DNA, 75 bp, synthetic construct
  source 1..75: mol_type = other DNA
atgccgtggcaaccattaaggcgatgcacagagccgggctgtaataagcgcgtgaagtccggcaagtgtgaagaa

SEQ ID NO: 595226 - DNA, 75 bp, synthetic construct
  source 1..75: mol_type = other DNA
tttctgcaccatgacggaatcctggtatccgatcgccattatgatcatggcatattcagtaattggtttaatctc

SEQ ID NO: 595227 - DNA, 75 bp, synthetic construct
  source 1..75: mol_type = other DNA
cgacgccgcagagggttatcaccagagcctggtcgacattacgccacaactcgtgctggaagaactcaacacgct

SEQ ID NO: 595228 - DNA, 75 bp, synthetic construct
  source 1..75: mol_type = other DNA
cgatgccgcagaagggtatcaccagagtctgatcgacattacgccacagcgcgtgctggaagaactcaacgcact

SEQ ID NO: 595229 - DNA, 75 bp, synthetic construct
  source 1..75: mol_type = other DNA
cgtcatttttcccgtgttatccgtctggaagacggcactgtgaaagaggtcaatctgccagacgatattcgccgc

SEQ ID NO: 595230 - DNA, 75 bp, synthetic construct
  source 1..75: mol_type = other DNA
aagcactgagtgctgattttaatatagtagaggggctggctcagcaggaagctctgggcattttaaataagtacc

SEQ ID NO: 595231 - DNA, 75 bp, synthetic construct
  source 1..75: mol_type = other DNA
aaaacatcccgaataaattaggcgagttagatttcattacagctggtgtagaaagtgattttcctaacttaatta

SEQ ID NO: 595232 - DNA, 75 bp, synthetic construct
  source 1..75: mol_type = other DNA
accaagaaaatatttgctccagaaaaatcatgatgcagcccaggctctttacttaagaaatcatgggatatcctt

SEQ ID NO: 595233 - DNA, 75 bp, synthetic construct
  source 1..75: mol_type = other DNA
cgctgcgggcgtggcgttttcgcacggcgcgaacgacggacaaaaagggatcggcctggtaatgctggtactggt

SEQ ID NO: 595234 - DNA, 75 bp, synthetic construct
  source 1..75: mol_type = other DNA
atgaaacttttaaaagtagcagcaattgcagcaatcgtattctccggtagcgctctggcaggtgttgttcctcag

SEQ ID NO: 595235 - DNA, 75 bp, synthetic construct
  source 1..75: mol_type = other DNA
ccagagaagtggcattctggattaaaagcccggatcgagtgggaagtagacccgacccccttgaacctattgcaa

SEQ ID NO: 595236 - DNA, 75 bp, synthetic construct
  source 1..75: mol_type = other DNA
ttggtgtgagagcgatttttaaatatttttcgctaatggttttatttgcagtgtcaggctgttcaatgacgagaa

SEQ ID NO: 595237 - DNA, 75 bp, synthetic construct
  source 1..75: mol_type = other DNA
ctgcaaaaggacaaggtcatgcaacaagaatgggggcttccctgtaccgtaacaccacgcttcactgctcgactg

SEQ ID NO: 595238 - DNA, 75 bp, synthetic construct
  source 1..75: mol_type = other DNA
catcaaattaactgaagacctgaaggatcagaacggtgtgctgttcgcccggaaagggcaggtgcttaatccgct

SEQ ID NO: 595239 - DNA, 75 bp, synthetic construct
  source 1..75: mol_type = other DNA
tcgccgcctgcctgttatcgccgctgactcaggcggctgatctcggtacctggggggatttatggcccgtccggg

SEQ ID NO: 595240 - DNA, 75 bp, synthetic construct
  source 1..75: mol_type = other DNA
tcatttcatttgaaagtaaaaagaaaaataaagaaactcttgatgcattttttgaaataataaacactaatataa

SEQ ID NO: 595241 - DNA, 75 bp, synthetic construct
  source 1..75: mol_type = other DNA
ctggtgagtgcgttacgcctggccgtgaactgagcaaaggcggcgaaggtgcggtttatgatatcgaggagtttg

SEQ ID NO: 595242 - DNA, 75 bp, synthetic construct
  source 1..75: mol_type = other DNA
ttaatgtcgctcagaaagttgtggatattcaggccgatatggcagcaaaaaggatttatatagaaataaaagata

SEQ ID NO: 595243 - DNA, 75 bp, synthetic construct
  source 1..75: mol_type = other DNA
cagaaatgttcggcagtaaaaaccgctttacccggatggctatttctaaagaaattggtggtcttatcgcttccg

SEQ ID NO: 595244 - DNA, 75 bp, synthetic construct
  source 1..75: mol_type = other DNA
tagccacggtaaaacggtgtatcactcccccggtgcgccggatatccgcgagtttacgcgtgacgccatacccga

SEQ ID NO: 595245 - DNA, 75 bp, synthetic construct
  source 1..75: mol_type = other DNA
ctggaagacattgtcagtggttattccaacgtgttgatttccctggcagatagccacggaaaaacggtgtatcac

SEQ ID NO: 595246 - DNA, 75 bp, synthetic construct
  source 1..75: mol_type = other DNA
agtttacgcgtgacgccatacccgataaagacgcgcagggcggcgaggtgtatctcctttccggcccgacgatga

SEQ ID NO: 595247 - DNA, 75 bp, synthetic construct
  source 1..75: mol_type = other DNA
cgcgaatggcgaaaatggtcagcgatatgctgtttctcgctcaggccgataacaaccagctaatccccgaaaaga

SEQ ID NO: 595248 - DNA, 75 bp, synthetic construct
  source 1..75: mol_type = other DNA
agggtgctgcaggtggttggggtgctgttaaatccgtagcgaatgcagtacgtaagcagatggatatacgccagg

SEQ ID NO: 595249 - DNA, 75 bp, synthetic construct
  source 1..75: mol_type = other DNA
atgccaaaatccgtaattattcccgctggcagcagcgcaccgctggcccccttcgttcccggcacgctggctgat

SEQ ID NO: 595250 - DNA, 75 bp, synthetic construct
  source 1..75: mol_type = other DNA
ttttgccgagcaggatattaatgatttaaaagaaattagcgccacacttgaacgggtacttaatcaccctgacga

SEQ ID NO: 595251 - DNA, 75 bp, synthetic construct
  source 1..75: mol_type = other DNA
gcggcgtttttcgcctttgcctggatcatgatccactcggtaaaagtgcattttgccgagcaggatattaatgat

SEQ ID NO: 595252 - DNA, 75 bp, synthetic construct
  source 1..75: mol_type = other DNA
aaagagagagtcgatatcgtctgtttgtggatgtccagagtgacattattgacacgcccgggcgacggatggtga

SEQ ID NO: 595253 - DNA, 75 bp, synthetic construct
  source 1..75: mol_type = other DNA
cgtggaacagcattttagccgcgaggcgctggcggtggatcgcaccgatggcatcagcatgacctttgccgactg

SEQ ID NO: 595254 - DNA, 75 bp, synthetic construct
  source 1..75: mol_type = other DNA
ggcgtggtgtatgtctccggtacgctggcttttgatcaacacaataacgtgctgtttgccgatgacccaaaggcg

SEQ ID NO: 595255 - DNA, 75 bp, synthetic construct
  source 1..75: mol_type = other DNA
catccaggctgcctgggcggttgattatccgctaccaccaaccggaagccgactggttgggcaaaatcaaacgta

SEQ ID NO: 595256 - DNA, 75 bp, synthetic construct
  source 1..75: mol_type = other DNA
cggctatctggtttgtgtggatgactaaactcgaatgggcgataggtgcagtggtgttggtaattatcagtctgc

SEQ ID NO: 595257 - DNA, 75 bp, synthetic construct
  source 1..75: mol_type = other DNA
atgctggcgtttacctggatcgcgctgcgatttatccatttcacctcgctgatgctggtctttggcttcgcaatg

SEQ ID NO: 595258 - DNA, 75 bp, synthetic construct
  source 1..75: mol_type = other DNA
gccctcgttacgctaaccgtcgctctgatgcaaccagggaacatgccacgtttgttgtttgtgctaactaccgcg

SEQ ID NO: 595259 - DNA, 75 bp, synthetic construct
  source 1..75: mol_type = other DNA
gtctggatcggggatggcggaaggtgttggcctgcagatcctggacagtaataacaatgttatagcatttgatac

SEQ ID NO: 595260 - DNA, 75 bp, synthetic construct
  source 1..75: mol_type = other DNA
atcatcaaaggacaatcacaaagttatatttctgagaaatacggtttatcacgcagtcaatactacaagattaaa

SEQ ID NO: 595261 - DNA, 75 bp, synthetic construct
  source 1..75: mol_type = other DNA
tttccgtatcacgactgcctggttaacttgctcgataccccggggcacgaagacttctcggaagatacctatcgt

SEQ ID NO: 595262 - DNA, 75 bp, synthetic construct
  source 1..75: mol_type = other DNA
aaagagaaagccgctaccgtctgttcgtcgacgtgcagagtgacattattgacaccccgggacgccggatggtga

SEQ ID NO: 595263 - DNA, 75 bp, synthetic construct
  source 1..75: mol_type = other DNA
gttaaccttgcagagctgcgcctttattattatccgccgggagaaaatatcgtgcaggtttatccgataggtatt

SEQ ID NO: 595264 - DNA, 75 bp, synthetic construct
  source 1..75: mol_type = other DNA
aaagggcgctggcgacgtcaggccattcatgcactgatgcgattctcctggtgtgggcattttgcggtgattggc

SEQ ID NO: 595265 - DNA, 75 bp, synthetic construct
  source 1..75: mol_type = other DNA
gacacgcgacattaaacgaaggattaacggcgaaaatccatcagacgaatcacgccgtacatctgagctgtgcgg

SEQ ID NO: 595266 - DNA, 75 bp, synthetic construct
  source 1..75: mol_type = other DNA
atgatcgagcgtattgaggatgtctttacccgccagtccaatttctcagcggatatcgctcacgaaattcgcaca

SEQ ID NO: 595267 - DNA, 75 bp, synthetic construct
  source 1..75: mol_type = other DNA
caacggcggcggcaattcttggctggatcttcggtgaatgggcgctgcgtggtaagccttcactgctgggggcgt

SEQ ID NO: 595268 - DNA, 75 bp, synthetic construct
  source 1..75: mol_type = other DNA
gcggcaaaaacgtgctgtcgatgctgacgcaggtgacggtgacgtttgcactggtctgtattctctgggtggttt

SEQ ID NO: 595269 - DNA, 75 bp, synthetic construct
  source 1..75: mol_type = other DNA
ctggtttgtattttgtgggtggtgtatggctactcgctggcgtttggcgaggggaacaacttttttggcaacatt

SEQ ID NO: 595270 - DNA, 75 bp, synthetic construct
  source 1..75: mol_type = other DNA
tgggcggcgtgggcttcgctgaaggtgtgacgatgggccatcagttgctggtacagctggaaagcattgccatta

SEQ ID NO: 595271 - DNA, 75 bp, synthetic construct
  source 1..75: mol_type = other DNA
cgatcgtctggtccggtgtggtggcatttatcggctacaaactggcggatctgacggttggcctgcgtgtgccgg

SEQ ID NO: 595272 - DNA, 75 bp, synthetic construct
  source 1..75: mol_type = other DNA
gggcacggcgaatgaaatcgcggcactggcatttgtgaatactgtggtcgcaacggcggcggcaattcttggctg

SEQ ID NO: 595273 - DNA, 75 bp, synthetic construct
  source 1..75: mol_type = other DNA
ctcaggactggatgagggggctaaacaaaaaagaacgcttcttatctgccacatggaagggaacaaaagaaatac

SEQ ID NO: 595274 - DNA, 75 bp, synthetic construct
  source 1..75: mol_type = other DNA
tagtcggtatagtaatgttaaccggatgtgggccagaagagttaactccagaacagaaacaggaagtagctgctc

SEQ ID NO: 595275 - DNA, 75 bp, synthetic construct
  source 1..75: mol_type = other DNA
gagcacggggagcgaagaggatgcagctaacgaactggttcacgctatcaaagctgctgttaatcggttccttac

SEQ ID NO: 595276 - DNA, 75 bp, synthetic construct
  source 1..75: mol_type = other DNA
ggcttgcttcactggcgatgctgccgggactggtaatggctgcacctgcggtggccgataaagccgacaatgcgt

SEQ ID NO: 595277 - DNA, 75 bp, synthetic construct
  source 1..75: mol_type = other DNA
ggcaacagggctgcgttttggtcaggcgggtaactccggggttaattcagactttccttgcaggctatttagtgc

SEQ ID NO: 595278 - DNA, 75 bp, synthetic construct
  source 1..75: mol_type = other DNA
attggtcgccggatcccgtatattattatgaatacctctgcgattgtgctggcatggccaatgctttctatcatc

SEQ ID NO: 595279 - DNA, 75 bp, synthetic construct
  source 1..75: mol_type = other DNA
gcgatgtcttcggtgtgcacggcgtttgcggtattgtcggctgtatcatgaccgggatttttgccgccagttcgc

SEQ ID NO: 595280 - DNA, 75 bp, synthetic construct
  source 1..75: mol_type = other DNA
gagcgggacgaaaaagcgtgaccgtattcaccgcattccggaagatcgcaaaaagaaaaaaggcaaacgtaaacc

SEQ ID NO: 595281 - DNA, 75 bp, synthetic construct
  source 1..75: mol_type = other DNA
taatcttattgcactcacgccagacggtaaacgtagctcacgccgcatggatagattaaaagtggtcatttaccc

SEQ ID NO: 595282 - DNA, 75 bp, synthetic construct
  source 1..75: mol_type = other DNA
cgttgccaggggcactcgcctcacagggaaaagcagcggtacaggccggtgaagttctgcccccgaccacattct

SEQ ID NO: 595283 - DNA, 75 bp, synthetic construct
  source 1..75: mol_type = other DNA
tccttcacgcctgggatgccacctggaattcggcgcaggcgctggataacgcactacagccgttctcctcaaata

SEQ ID NO: 595284 - DNA, 75 bp, synthetic construct
  source 1..75: mol_type = other DNA
atgagcgcgctcaactccctgccattaccggtggtcaggctgctggcgttctttcatgaagagttaagcgagcgg

SEQ ID NO: 595285 - DNA, 75 bp, synthetic construct
  source 1..75: mol_type = other DNA
ggtgtggatcatcatggcggtagcactggcgctcggcattggcaccatgattggctggcgtcgtgtagcgatgac

SEQ ID NO: 595286 - DNA, 75 bp, synthetic construct
  source 1..75: mol_type = other DNA
acagatgtaaaaattaaattatcaacaccaaaaacacctaattataataatagtcatttttcagttaatcttggg

SEQ ID NO: 595287 - DNA, 75 bp, synthetic construct
  source 1..75: mol_type = other DNA
acttcaacctctggctgtataacgactggttcatcgatccggatgacggaaccgaaaaaccgatgctggatgacg

SEQ ID NO: 595288 - DNA, 75 bp, synthetic construct
  source 1..75: mol_type = other DNA
gttcatgaacgacagtttcattcgtgagaacgccatcaacatgcccgccctgaacccgaccagcaacgtggtgaa

SEQ ID NO: 595289 - DNA, 75 bp, synthetic construct
  source 1..75: mol_type = other DNA
cgtccgggaatgatggatagtcaggaattcagtctgccggataccgggccgaaaaagccccgtttcccgtggatt

SEQ ID NO: 595290 - DNA, 75 bp, synthetic construct
  source 1..75: mol_type = other DNA
gagtgccggtgaaatcggtcaggcaggggtcggtggcggagtcagttctgcggccaaaacactctctgattacta

SEQ ID NO: 595291 - DNA, 75 bp, synthetic construct
  source 1..75: mol_type = other DNA
cctgcgccggatatgaccggggtggtcaatcagtcctttgacaataaagtccagcgttccgccattgcggaagcc

SEQ ID NO: 595292 - DNA, 75 bp, synthetic construct
  source 1..75: mol_type = other DNA
ggttcagtatcctgatggaacataagaagctgatgaacgtccgttacagccgggatagcagcaacgattacgcat

SEQ ID NO: 595293 - DNA, 75 bp, synthetic construct
  source 1..75: mol_type = other DNA
tgattatggcttattcggctataggtttaatttctgcgctgaaaatgccagaagttaaagaccgtgatttaagtg

SEQ ID NO: 595294 - DNA, 75 bp, synthetic construct
  source 1..75: mol_type = other DNA
atggcgttaattctggcaatgggaacctacggtgcaggttatgtggcgcgtattgtcggagcatttattttcggc

SEQ ID NO: 595295 - DNA, 75 bp, synthetic construct
  source 1..75: mol_type = other DNA
atgacaatagaaaaacacgaaagaagcactaaggatttggtgaaagcagcggtatcgggatggctgggcactgcg

SEQ ID NO: 595296 - DNA, 75 bp, synthetic construct
  source 1..75: mol_type = other DNA
cgaagggttattaccgctcgataccttcgcccgctttagccagaatccggcttaccacacccaactgtcacagcc

SEQ ID NO: 595297 - DNA, 75 bp, synthetic construct
  source 1..75: mol_type = other DNA
ggcacagcaaggattagccgacaagccgctgattgataaagagatcggcgaagtgctggcgacccatgacgaaac

SEQ ID NO: 595298 - DNA, 75 bp, synthetic construct
  source 1..75: mol_type = other DNA
aagtgctggcgacacacgacgaaacacaacgtcaggcactgtatcgcgacattctgacccgtctgcatgacgagg

SEQ ID NO: 595299 - DNA, 75 bp, synthetic construct
  source 1..75: mol_type = other DNA
atgaagaaaaaaattgaatcctaccagggggctgccggtggttggggtgctgttaaatccgtagcgaatgcagta

SEQ ID NO: 595300 - DNA, 75 bp, synthetic construct
  source 1..75: mol_type = other DNA
gttgatcaaactgcatctaactctagcgtaaacgttactcaggttggttttggcaacaacgcgaccgctcatcag

SEQ ID NO: 595301 - DNA, 75 bp, synthetic construct
  source 1..75: mol_type = other DNA
gcggtaataatagcggcccaaattcagagctgaacatttaccagtacggtggcggtaactctgcacttgctctgc

SEQ ID NO: 595302 - DNA, 75 bp, synthetic construct
  source 1..75: mol_type = other DNA
ggttaacgacagcaaccaaccgacagcaaaacctgcacctgctggtagcatgttccagagcaaatccttctggct

SEQ ID NO: 595303 - DNA, 75 bp, synthetic construct
  source 1..75: mol_type = other DNA
tattgtcggagcatttattttcggcaaaatgggcgacagaatcgggcgtaaaaaagtgctctttattaccatcac

SEQ ID NO: 595304 - DNA, 75 bp, synthetic construct
  source 1..75: mol_type = other DNA
taaaagcacttcgccatttaatggctgagcaaagctgggcacttaaagagatagcttcattcgcagcgatacgtg

SEQ ID NO: 595305 - DNA, 75 bp, synthetic construct
  source 1..75: mol_type = other DNA
tgtcacgctgatcggcgaagaagagagcagtatctatgctcgtcaacgcgacggtcgttttggcatgattttcca

SEQ ID NO: 595306 - DNA, 75 bp, synthetic construct
  source 1..75: mol_type = other DNA
tacgcgccgcgctgtatcgtcgtgccgtggcctgtgcatggctgaccctgtgcgaacgccagcaccgctacccac

SEQ ID NO: 595307 - DNA, 75 bp, synthetic construct
  source 1..75: mol_type = other DNA
cgtggcctgtgcatggctgacggtgtgcgaatgccagcaccgctacccgcacctcaccctcgacgcgctggaaag

SEQ ID NO: 595308 - DNA, 75 bp, synthetic construct
  source 1..75: mol_type = other DNA
aaagtttgcatctggagttaagcgaagacgtattagctgaaattgaagcggtgcatcaggtttatacttatccgg

SEQ ID NO: 595309 - DNA, 75 bp, synthetic construct
  source 1..75: mol_type = other DNA
ggcacttatgagattggagaactgccaaaggctttcgatctggcagaactgaccagtcaattttgcaccatcaac

SEQ ID NO: 595310 - DNA, 75 bp, synthetic construct
  source 1..75: mol_type = other DNA
attaacaaaggctctcgatttttaatcagcaaggccgttttcggtaccagttcactggttactaagaaaggagat

SEQ ID NO: 595311 - DNA, 75 bp, synthetic construct
  source 1..75: mol_type = other DNA
ggaccactcaaagccacgccgtcgctgtcctttctcgggctggccgtgatggatgagctttgcgcccgtcatatc

SEQ ID NO: 595312 - DNA, 75 bp, synthetic construct
  source 1..75: mol_type = other DNA
cttaccatacccaactgtcacagccgatcgaaaccgtgatgctggcgctcaatactgccaaagcccccaccaacg

SEQ ID NO: 595313 - DNA, 75 bp, synthetic construct
  source 1..75: mol_type = other DNA
ggtgatcccgtggctggcaaaaagctggactcattctgaagatggcaaaacctggaccttcaccctgcgtgatga

SEQ ID NO: 595314 - DNA, 75 bp, synthetic construct
  source 1..75: mol_type = other DNA
tttgatgcagaggcggcggcagaaaacttccgcgcagtgctcgataaccgtcaacgtcacgcctggctggagctg

SEQ ID NO: 595315 - DNA, 75 bp, synthetic construct
  source 1..75: mol_type = other DNA
cgcacgtaatacgctctttagtcggttcacccgctatagcggtgagcaaacgcaaaaagccgtcgcggcgtatgt

SEQ ID NO: 595316 - DNA, 75 bp, synthetic construct
  source 1..75: mol_type = other DNA
gatatcaatgagccagacggaccaacgaatctttccgcatgggtaaggcttaagaacaaagaattacctccttca

SEQ ID NO: 595317 - DNA, 75 bp, synthetic construct
  source 1..75: mol_type = other DNA
gcaaaccagattgttgatgttaaagcactcagtaaaacagagctgcaaatcaccctgaaaagcgcctactatcct

SEQ ID NO: 595318 - DNA, 75 bp, synthetic construct
  source 1..75: mol_type = other DNA
ccgtctggctggcattggcaatcgtgctggaaatcgttgctaatgtctttttgaaattttctgacggctttcgtc

SEQ ID NO: 595319 - DNA, 75 bp, synthetic construct
  source 1..75: mol_type = other DNA
gctgaaagtgtaccgggcgctgctgaccgaaggcgtttccctgcgcgatatcgtcaccatcgccaccgtgctggt

SEQ ID NO: 595320 - DNA, 75 bp, synthetic construct
  source 1..75: mol_type = other DNA
aacggcgatatcgcccacgacgtgcgccaccagcttctggcaagcccgtcggtgctctacaccgccaccgggatt

SEQ ID NO: 595321 - DNA, 75 bp, synthetic construct
  source 1..75: mol_type = other DNA
tggacccgaatatgctcaaccagttccagagtacgatgccacaggtgaaagagcagatgaaagcggcggggaaag

SEQ ID NO: 595322 - DNA, 75 bp, synthetic construct
  source 1..75: mol_type = other DNA
cacctgaagtgacgaatttcatcaaatcaaaactgatcgccttcgcgaaacgtaaagagaaacaaggggaagccg

SEQ ID NO: 595323 - DNA, 75 bp, synthetic construct
  source 1..75: mol_type = other DNA
caccagcgggttcagaaggtcactgaaaacgcacaaacaacgattgatttatctcaggaacgtgatgaacgacgt

SEQ ID NO: 595324 - DNA, 75 bp, synthetic construct
  source 1..75: mol_type = other DNA
gggatttgacagcgatgttcgctgcctgatctacgcccgtccgaccaaatcagaaatccgctggttgcagtgcat

SEQ ID NO: 595325 - DNA, 75 bp, synthetic construct
  source 1..75: mol_type = other DNA
gccttcgtcagcctgaaaccgtgggaagagcgtagtggcgacgaaaacagcgcggaagcggtcatccatcgcgca

SEQ ID NO: 595326 - DNA, 75 bp, synthetic construct
  source 1..75: mol_type = other DNA
gccagctattgttgaactgggcacggcaacgggtttcgactttgagttaattgatcaggctgggctgggtcacga

SEQ ID NO: 595327 - DNA, 75 bp, synthetic construct
  source 1..75: mol_type = other DNA
agcataataagctttttctgcttctgccggtgggatatggcccagcctttccagcaatcgtcgattgttatacca

SEQ ID NO: 595328 - DNA, 75 bp, synthetic construct
  source 1..75: mol_type = other DNA
gatgccggtgacctggatccagcctgcgcagaaagcgaaggcgctgaatatggggtatcaggtgatcgacagcgc

SEQ ID NO: 595329 - DNA, 75 bp, synthetic construct
  source 1..75: mol_type = other DNA
ctttaatcaaaaaaatgacgtttactttatggtgggtttgttaacgacaattggcttgtcggccaaaaacgccat

SEQ ID NO: 595330 - DNA, 75 bp, synthetic construct
  source 1..75: mol_type = other DNA
ggatgatctccgcaacattgctggctatcttctttgtacctgtattctttgtagttattcgccgttgcttcaaag

SEQ ID NO: 595331 - DNA, 75 bp, synthetic construct
  source 1..75: mol_type = other DNA
cggcgacggactggtggcgcaaatcccttccctgctgctctccaccgcggcggcgattatcgtcacccgcgtcag

SEQ ID NO: 595332 - DNA, 75 bp, synthetic construct
  source 1..75: mol_type = other DNA
ttctgttctgctggaagatggcgacgtcatcaatattccggagaaaacatcgctggttatggttcatggcgaggt

SEQ ID NO: 595333 - DNA, 75 bp, synthetic construct
  source 1..75: mol_type = other DNA
taccagtccaacgtcaacgtctacgcctccttattacaggcgcagccagtaaaagtgtacgtgaccggctttgtg

SEQ ID NO: 595334 - DNA, 75 bp, synthetic construct
  source 1..75: mol_type = other DNA
taagtggttcaaaaatccaattccgccgaaaaacctgaacatgaatttcgaactgtcagacgaaatgaaagcact

SEQ ID NO: 595335 - DNA, 75 bp, synthetic construct
  source 1..75: mol_type = other DNA
agcaatgtattaaagctgtttccttttgctatggtgatgtgctctgtggtgtggttttatttttgccctgaatat

SEQ ID NO: 595336 - DNA, 75 bp, synthetic construct
  source 1..75: mol_type = other DNA
aaaaacagctgctcaaagggctggtacagctttccgaagagggcgcggtgcaggtgttccgtccgatctccaaca

SEQ ID NO: 595337 - DNA, 75 bp, synthetic construct
  source 1..75: mol_type = other DNA
accgataagctcaaccagaaatcattaatgccctattcagaaattggcccgtttgaactgttgcaggcgcgtcag

SEQ ID NO: 595338 - DNA, 75 bp, synthetic construct
  source 1..75: mol_type = other DNA
tgattctggcgatcaacctgatcggcggcgtctgtattgggatcttcaaatacaacctgagcgccgatgctgcct

SEQ ID NO: 595339 - DNA, 75 bp, synthetic construct
  source 1..75: mol_type = other DNA
ggcgattgacgccgatcttaacgccgggttgatcaaccaggcgcaggcgcaaacccggcgtaaagatgttgccag

SEQ ID NO: 595340 - DNA, 75 bp, synthetic construct
  source 1..75: mol_type = other DNA
accaccttaatgcgcctgacgcttaacgtcgcctctacgcgcgtggtgctgttgcacgggcatctcggcgcgggc

SEQ ID NO: 595341 - DNA, 75 bp, synthetic construct
  source 1..75: mol_type = other DNA
gctgcatttgatgaaaaagatgtaatgagtccagtatctggacgtcctggttcatttgttctttcattcaaggca

SEQ ID NO: 595342 - DNA, 75 bp, synthetic construct
  source 1..75: mol_type = other DNA
tgtttcagctcttggtcagcaattggttgaatctgactatgataagagactaagaatcgctgcacgcggttttga

SEQ ID NO: 595343 - DNA, 75 bp, synthetic construct
  source 1..75: mol_type = other DNA
acggtgatagtgataagttcgaggaactggacagacattttcacaacatcattgcagaggctacgcaaaatcggg

SEQ ID NO: 595344 - DNA, 75 bp, synthetic construct
  source 1..75: mol_type = other DNA
atgtgcaacactgctcaaacccgtctctgctgagcatcacgaaaataagggcggtttcttcggctggtttaatac

SEQ ID NO: 595345 - DNA, 75 bp, synthetic construct
  source 1..75: mol_type = other DNA
agcgaatactatccgatcagttctgcgccaggccgtatgttgcaaaatggcgataccttaatcgtgagcactgac

SEQ ID NO: 595346 - DNA, 75 bp, synthetic construct
  source 1..75: mol_type = other DNA
ccggtgacgctggatgtcataaaacagacgctgacgatgtatgccgaaagagtcaggaaagcgcggaaatcatcg

SEQ ID NO: 595347 - DNA, 75 bp, synthetic construct
  source 1..75: mol_type = other DNA
cggtatggatagctgtctgtcgaagcccgtgacgctggatgtcataaaacagacgctgacgatgtatgccgagag

SEQ ID NO: 595348 - DNA, 75 bp, synthetic construct
  source 1..75: mol_type = other DNA
ggcttcagaaccattcaccacagacaccggaatcgttgatcgctttttctccctcgaatcaaatcctcgtcgtga

SEQ ID NO: 595349 - DNA, 75 bp, synthetic construct
  source 1..75: mol_type = other DNA
tttcgctttaaggtttttcatcgtgatggcgaaccttgcgaacgctgtggcggcatcattgagaaaaccacgctg

SEQ ID NO: 595350 - DNA, 75 bp, synthetic construct
  source 1..75: mol_type = other DNA
cactgaagcaggccatgcagggacaggatgttgtgtatgccaaccttacgggggaagatttagatattcaggcaa

SEQ ID NO: 595351 - DNA, 75 bp, synthetic construct
  source 1..75: mol_type = other DNA
tcctcgctggatgcaggaacgctcctggtttggctatacggaagggttccgggagctggtgctgaagaaaaatct

SEQ ID NO: 595352 - DNA, 75 bp, synthetic construct
  source 1..75: mol_type = other DNA
tccttcggtgcaaataaccacgctgcgtgtttcgatttgctgtcgtcactgaaccgtcacctctgttttgcaacc

SEQ ID NO: 595353 - DNA, 75 bp, synthetic construct
  source 1..75: mol_type = other DNA
gaagtatacaaggacgcgaaaggtgagagccgaacaatgtatcgtctcgaccgtaagcatacttttattctggtc

SEQ ID NO: 595354 - DNA, 75 bp, synthetic construct
  source 1..75: mol_type = other DNA
accgtgagccatgagctgcgcacaccgctgtatggcattattggtaacctggatctattgcaaaccaaagagtta

SEQ ID NO: 595355 - DNA, 75 bp, synthetic construct
  source 1..75: mol_type = other DNA
tactcggtacctgttgatcaggtgctggaacgcattcgtatgctgatcctcaatgcgattttgctgaatgtgatt

SEQ ID NO: 595356 - DNA, 75 bp, synthetic construct
  source 1..75: mol_type = other DNA
atgttcgcgcggatggcgattatctctctatccgtgttcgcgataccggcgtggggataccggcgaaagaagtgg

SEQ ID NO: 595357 - DNA, 75 bp, synthetic construct
  source 1..75: mol_type = other DNA
aacccgcgtctccgtggccctgctctcgcttctgcttatcctgtttcccaccttcatcagcgacacagaagacat

SEQ ID NO: 595358 - DNA, 75 bp, synthetic construct
  source 1..75: mol_type = other DNA
attgggataaccggattccagtgattgttatgcccaaggcatcgctggacaacaaagagctgggagaatggctga

SEQ ID NO: 595359 - DNA, 75 bp, synthetic construct
  source 1..75: mol_type = other DNA
gtaaagatctggatgatacaacactgcatctgcccgggggctctgttggctcaggcggttctgtccctgttcagc

SEQ ID NO: 595360 - DNA, 75 bp, synthetic construct
  source 1..75: mol_type = other DNA
gacaccatgttgcttgatgccgcaaccaatagccgtagcgtggccgacctcatcgaacagctgaaagaaccagcc

SEQ ID NO: 595361 - DNA, 75 bp, synthetic construct
  source 1..75: mol_type = other DNA
tttgattgttgagttcgctaaagatctcatggagaaagagggtaaaggtgttgttgaagcgacactaatggcagt

SEQ ID NO: 595362 - DNA, 75 bp, synthetic construct
  source 1..75: mol_type = other DNA
aactggcggaattacagccattcttcccgcagggaatgaaggttctttacccttatgacaccacgcctttcgtcc

SEQ ID NO: 595363 - DNA, 75 bp, synthetic construct
  source 1..75: mol_type = other DNA
taatggcctggaagacaccgcgcagtttaaactggaagttgaccaggaaaaggcgcaggcattaggtgtttcact

SEQ ID NO: 595364 - DNA, 75 bp, synthetic construct
  source 1..75: mol_type = other DNA
ttgcgcagacacttggtcgccagccaaaggctgatgagctgaaaaatattgaagatcgtatcaaagaagctgtgc

SEQ ID NO: 595365 - DNA, 75 bp, synthetic construct
  source 1..75: mol_type = other DNA
gaggaaaaaatacctgagtatgcgaacgcggtgatgaaagccgctggcatgatgtctgaaaagttatgcggtata

SEQ ID NO: 595366 - DNA, 75 bp, synthetic construct
  source 1..75: mol_type = other DNA
gtctggatttttatgcaaccagtaagttatcggtatttttcaaaaattttcaaagagtttaaggatataataaca

SEQ ID NO: 595367 - DNA, 75 bp, synthetic construct
  source 1..75: mol_type = other DNA
gtctgatattgcttcactgataaaaactcatgtggatgaattcctgcgtttgagtcatatctcaggctccgagca

SEQ ID NO: 595368 - DNA, 75 bp, synthetic construct
  source 1..75: mol_type = other DNA
tgcgaagacccggcagtgcaactacaccctggatacgcgttggatattgccagattaacaaatgcattcagcaat

SEQ ID NO: 595369 - DNA, 75 bp, synthetic construct
  source 1..75: mol_type = other DNA
cctgcaatcatcatccagggatttgggcgtcgttaaagcctttggtccggacgccgaaagaaacttttccctggt

SEQ ID NO: 595370 - DNA, 75 bp, synthetic construct
  source 1..75: mol_type = other DNA
gcttaacccgtgggaacgggcaatcccgtctccggtctggttgatgcatagcgaccgggccggttatgaaacgct

SEQ ID NO: 595371 - DNA, 75 bp, synthetic construct
  source 1..75: mol_type = other DNA
gcttaacccgtgggaacgggcaatcccttctccggtctggttgatgcatagcgatcgtgttggctatgaaacgct

SEQ ID NO: 595372 - DNA, 75 bp, synthetic construct
  source 1..75: mol_type = other DNA
ttggcgctggcctggcgctgctgtggtttagccgttttcaaaaaaccgggtaagttttttattagcattgggtgg

SEQ ID NO: 595373 - DNA, 75 bp, synthetic construct
  source 1..75: mol_type = other DNA
cgatcgttgaagtgatggggctctgtgcgcagttcacctcgggggcacagtgtggcagcgaagttcagggggttt

SEQ ID NO: 595374 - DNA, 75 bp, synthetic construct
  source 1..75: mol_type = other DNA
tcttttttcagcaggaagggctaaatccgctgccagccccggcgaatcagttggccatcgactcgccgcttaatc

SEQ ID NO: 595375 - DNA, 75 bp, synthetic construct
  source 1..75: mol_type = other DNA
gcttaatccgtgggaacgggcaatcccgtctccagtttggttgatgcatagcgatcgtgctggctatgaaacgct

SEQ ID NO: 595376 - DNA, 75 bp, synthetic construct
  source 1..75: mol_type = other DNA
ttgggaaaagcatacgaccagatgaccttttagcgcgcgtcggcggcgaagagtttggcgtcttgctgacggaca

SEQ ID NO: 595377 - DNA, 75 bp, synthetic construct
  source 1..75: mol_type = other DNA
atgccgcccttgccggggtggacagtacgattgttgaagtgatgggcatcagtgcgcagttcacctcgggggcac

SEQ ID NO: 595378 - DNA, 75 bp, synthetic construct
  source 1..75: mol_type = other DNA
atgcgtgattttcagaatgcctttgatgctgcccttgccggggtggacagcacgattgttgaagtgatggggatc

SEQ ID NO: 595379 - DNA, 75 bp, synthetic construct
  source 1..75: mol_type = other DNA
gcggacggatacggtgcgtgccgtgcggcgtggtgacacgctgaccattaacggcgagatgttctgggtggaccg

SEQ ID NO: 595380 - DNA, 75 bp, synthetic construct
  source 1..75: mol_type = other DNA
tggcggcctgcccgggaatgaccgtggagaatgcccgggctgtgctggctgcgggatcaggtaaggcagaaccgg

SEQ ID NO: 595381 - DNA, 75 bp, synthetic construct
  source 1..75: mol_type = other DNA
ctaattgtttatattttaacataaaaggcaacattaaaaaagaaaacattatatctgaagctattttagatatag

SEQ ID NO: 595382 - DNA, 75 bp, synthetic construct
  source 1..75: mol_type = other DNA
gatactgttgagtttgttatcagcgttcctgaaaaaagagtcgaggattacggtgatatagtcagaaaagagttc

SEQ ID NO: 595383 - DNA, 75 bp, synthetic construct
  source 1..75: mol_type = other DNA
atacccgcaccctgccacggtacgcgaatgcactgaaattcgcctgtcgtatgctcaggagtggctgaccgcgga

SEQ ID NO: 595384 - DNA, 75 bp, synthetic construct
  source 1..75: mol_type = other DNA
tagaccttacaaacttctccggaaggattttctttctggcagatcctcatggacattactctgcgctgtgcaact

SEQ ID NO: 595385 - DNA, 75 bp, synthetic construct
  source 1..75: mol_type = other DNA
ttgaaagagccaaaaaggatattagcaacgcaacagggattgatagctcagccataacaataagcatcaagatct

SEQ ID NO: 595386 - DNA, 75 bp, synthetic construct
  source 1..75: mol_type = other DNA
aaagcattattagcccgcattgaatctatccgtctacaagcgggtaaagcaatgggcttaggtgatgtcagtaat

SEQ ID NO: 595387 - DNA, 75 bp, synthetic construct
  source 1..75: mol_type = other DNA
cctgtgcttatttctccagcgcagaaaggcggggcaattaatgtgcgttattttatgccgcattcttgccatcgc

SEQ ID NO: 595388 - DNA, 75 bp, synthetic construct
  source 1..75: mol_type = other DNA
catgagcaacgtgtcgataccacgcctaactgcggcaatatgctgtctggcgttggcgcattcgccattgaaaat

SEQ ID NO: 595389 - DNA, 75 bp, synthetic construct
  source 1..75: mol_type = other DNA
tgcttattggtggtttgattttgacaggatgcggacaggagcctgatgataaggaaaacccgcagcaccaatcca

SEQ ID NO: 595390 - DNA, 75 bp, synthetic construct
  source 1..75: mol_type = other DNA
ctggtctttcttatcgacacttctggttcaatgatttctgatgaacgtttgccacttatccagtcttcgttgaaa

SEQ ID NO: 595391 - DNA, 75 bp, synthetic construct
  source 1..75: mol_type = other DNA
aagaagttattttacttgtgggtaaaataactcgcgacccccttagaaataatatgatgaatcaattcttcgaat

SEQ ID NO: 595392 - DNA, 75 bp, synthetic construct
  source 1..75: mol_type = other DNA
gcagtaaaagacctagaacacggcacagcattcctgatcgccaaaattaccgggtgttttaaaagccctgattac

SEQ ID NO: 595393 - DNA, 75 bp, synthetic construct
  source 1..75: mol_type = other DNA
actttaacgttggtattgacgatccaaaatcgattgaatcaatggtcaaaaaacagcgggagtccggtgttactc

SEQ ID NO: 595394 - DNA, 75 bp, synthetic construct
  source 1..75: mol_type = other DNA
cctccgccagacgctgtgcgggtggaggagatagtcaattatttcccgtctgactgggatatcaaagacaaacaa

SEQ ID NO: 595395 - DNA, 75 bp, synthetic construct
  source 1..75: mol_type = other DNA
atggtgagacgttctgggtggatcgtgtttctccggatgacgggggcagttgttatctctggctgaaccgtgggc

SEQ ID NO: 595396 - DNA, 75 bp, synthetic construct
  source 1..75: mol_type = other DNA
ctatctccaacgatgcatggtttggtaagtctattggtccatggcagcacttccagatggcgcgaatgcgtgcgc

SEQ ID NO: 595397 - DNA, 75 bp, synthetic construct
  source 1..75: mol_type = other DNA
cggccatttgctacgagatcattctcggcgagcaggtgcgcgataacttccgtccggataccgactatctgctga

SEQ ID NO: 595398 - DNA, 75 bp, synthetic construct
  source 1..75: mol_type = other DNA
gctacgatacctacaacaccatcatcacactgggtaaaggtgcaccgtacagctacgaatcagccgatcgctata

SEQ ID NO: 595399 - DNA, 75 bp, synthetic construct
  source 1..75: mol_type = other DNA
tggagctggcgcgcccattgctgcgtagtaccaacaacggcattacggcggtgattggtccgcagggtgagattc

SEQ ID NO: 595400 - DNA, 75 bp, synthetic construct
  source 1..75: mol_type = other DNA
cacgtaccggcaactggccactgtgggtgctgacggcgctgtttggttttgctgctgtgctgatgagtctgcgtc

SEQ ID NO: 595401 - DNA, 75 bp, synthetic construct
  source 1..75: mol_type = other DNA
tggagttggcgcgcccgctactgcgcagcaccaataacggcattacggcggtgattggcccgcagggtgagattc

SEQ ID NO: 595402 - DNA, 75 bp, synthetic construct
  source 1..75: mol_type = other DNA
ggcaatcagtttgaagcgttgccggcagaagttcgccaggacatgcagcagcggattgatgcggcacaccggatg

SEQ ID NO: 595403 - DNA, 75 bp, synthetic construct
  source 1..75: mol_type = other DNA
tttatgccaggtacagaaaccacggcggagaccacgaccacagaacaaaccgcggccacgactacggtcgcgcag

SEQ ID NO: 595404 - DNA, 75 bp, synthetic construct
  source 1..75: mol_type = other DNA
attctgacagtggtgagcgttgttttctcgtatctttcgtcagataagtttatgtctgttaagcgcaggaaatga

SEQ ID NO: 595405 - DNA, 75 bp, synthetic construct
  source 1..75: mol_type = other DNA
gtcggcgataaccgatctggaaattaatcagcaaccgttcctcaaagcactggacggtgagttgcgtgataaagg

SEQ ID NO: 595406 - DNA, 75 bp, synthetic construct
  source 1..75: mol_type = other DNA
tgaccgagtttctgcgcggttgggtgctgactggcttcccgtggttacagttcggctatagccagattgatggcc

SEQ ID NO: 595407 - DNA, 75 bp, synthetic construct
  source 1..75: mol_type = other DNA
tggacgtgtcgggctgatctgctgccctatctggcgtgggccttctccgttgatcgctgggatgaggcctggccg

SEQ ID NO: 595408 - DNA, 75 bp, synthetic construct
  source 1..75: mol_type = other DNA
atgaaaaatcaaggaagaaacaagaaaggaagtaaagataattggtgcgaggggggggacttgaacccccacgtc

SEQ ID NO: 595409 - DNA, 75 bp, synthetic construct
  source 1..75: mol_type = other DNA
gtacaacgcctttatggtcaagtttacgggacttacaaaattgactttcgtattgatttaactgataaaggtaat

SEQ ID NO: 595410 - DNA, 75 bp, synthetic construct
  source 1..75: mol_type = other DNA
agtggcggtttgcgccaggctggtcatgggatatcaatggcaacgtgatccgttccgaattcaccaatgacagtg

SEQ ID NO: 595411 - DNA, 75 bp, synthetic construct
  source 1..75: mol_type = other DNA
tttacagaaaaaagaagtctgataaaaagaaatattaaccttgcaggtaataagaaaccaatatgggagaatcag

SEQ ID NO: 595412 - DNA, 75 bp, synthetic construct
  source 1..75: mol_type = other DNA
gcgctactggatattccgcgtctttcttacgctacgcgggggcaggtggatgagaataaacatcatggcgcgctg

SEQ ID NO: 595413 - DNA, 75 bp, synthetic construct
  source 1..75: mol_type = other DNA
cttacgctacgcgggggcaggtggatgagaataagcatcatggggcgctgtttcgctttaaggtttttcatcgtg

SEQ ID NO: 595414 - DNA, 75 bp, synthetic construct
  source 1..75: mol_type = other DNA
aaaactgcaaactgccgacaaaacgattctgctttatagcgcctccgatattgagatgttgacggcagaacaatt

SEQ ID NO: 595415 - DNA, 75 bp, synthetic construct
  source 1..75: mol_type = other DNA
ggtgttgcggctggcattttaccgacactgcatgaagtgtttacaggtcaaccgttaccaaagctttctttgaat

SEQ ID NO: 595416 - DNA, 75 bp, synthetic construct
  source 1..75: mol_type = other DNA
cgggcgtaaacaaaaagctaagggtttactcttcgagtaatggaaaatggcttagaatcgccgctaggccgctaa

SEQ ID NO: 595417 - DNA, 75 bp, synthetic construct
  source 1..75: mol_type = other DNA
ctgggatgactccgtaaatcctttttacatcaattctgcaggtgagctggtttttgacagtgtggatccgttttg

SEQ ID NO: 595418 - DNA, 75 bp, synthetic construct
  source 1..75: mol_type = other DNA
atataatctttataagatagggggcactgaaaaattaccatatgctgtttcactgcttatgggagaaaaaatatt

SEQ ID NO: 595419 - DNA, 75 bp, synthetic construct
  source 1..75: mol_type = other DNA
ctaaatctgatggaaaattttatctaaagaaaataaatgatgactccaaagaacttgtatacactttgtcacttc

SEQ ID NO: 595420 - DNA, 75 bp, synthetic construct
  source 1..75: mol_type = other DNA
cttagaatcgctgctaggccgctaaagcacatatcattaaatatgctggtattcgttatcatactggctcagtta

SEQ ID NO: 595421 - DNA, 75 bp, synthetic construct
  source 1..75: mol_type = other DNA
ttcattcacgtcctgccagctgacgcggaggcagatgcctgggtgaaagcggttctggccgcgcaggtggtgtgc

SEQ ID NO: 595422 - DNA, 75 bp, synthetic construct
  source 1..75: mol_type = other DNA
atgcagttgtatttcatttatgaccgtaggcaattttcaaactgtatacttagtttggcttttctaagttgtttg

SEQ ID NO: 595423 - DNA, 75 bp, synthetic construct
  source 1..75: mol_type = other DNA
catcggccaaaaaaacgccttattgcgtcatgattatggatatcgaccacttcaaaaaagtcaacgacacctggg

SEQ ID NO: 595424 - DNA, 75 bp, synthetic construct
  source 1..75: mol_type = other DNA
accaggtaaatcagctgctgggtgaaaccacggaagtggagcgcacgctgctgtttatcggcacgggaaccaaaa

SEQ ID NO: 595425 - DNA, 75 bp, synthetic construct
  source 1..75: mol_type = other DNA
tatgttgccgttctgccggaagccggcaagggcaaagaagcgacgccagcctgccaggcatggcagaacgccata

SEQ ID NO: 595426 - DNA, 75 bp, synthetic construct
  source 1..75: mol_type = other DNA
cactgcgtgaaatgtccactgcagccagcattaacggtgtgtcatttccgggtgaagtgaagccgccgcaggatg

SEQ ID NO: 595427 - DNA, 75 bp, synthetic construct
  source 1..75: mol_type = other DNA
acgctgcagattgcgctgcagacgcgcatcaagctgttctggcgaccaaaggcgctggaaaacgtcagcatgaaa

SEQ ID NO: 595428 - DNA, 75 bp, synthetic construct
  source 1..75: mol_type = other DNA
cgctggcttgaattgcagttgcgtatgctgctggagcaggtagaacaatttgaaaatatcgttggcttcttctgg

SEQ ID NO: 595429 - DNA, 75 bp, synthetic construct
  source 1..75: mol_type = other DNA
ggcgcgcgcatgccgctgatcttccgttgtgaagggaacacctgcaaggtggatgaagatcaaagcagcaagggc

SEQ ID NO: 595430 - DNA, 75 bp, synthetic construct
  source 1..75: mol_type = other DNA
agcctcatatgttaccataatgattttcatgtggttaaccttgctttcggttaatctatactttaatggtttacg

SEQ ID NO: 595431 - DNA, 75 bp, synthetic construct
  source 1..75: mol_type = other DNA
aataacgacccgaaaatgccgtatctggcacaaagctggatggaagacgagcagggtaacaagatcagctcgccg

SEQ ID NO: 595432 - DNA, 75 bp, synthetic construct
  source 1..75: mol_type = other DNA
atgacgaatctattttctgccaaaacggtcgcaaccacgcttgcgttactgataactgccaccagcttgcaagcc

SEQ ID NO: 595433 - DNA, 75 bp, synthetic construct
  source 1..75: mol_type = other DNA
gtgatgtgaccattgtctggaaaaacaaaaaggcggtggatatttacattgtggtacgcacctgggaagtgccgc

SEQ ID NO: 595434 - DNA, 75 bp, synthetic construct
  source 1..75: mol_type = other DNA
gcgtgaaggtgggttatcaggcgttactgtggtctttccgcttatggcaatggcgcgacaaaacgcggtcgcacc

SEQ ID NO: 595435 - DNA, 75 bp, synthetic construct
  source 1..75: mol_type = other DNA
aacgtatgaagcattgcgcgtttgccatgcggtacgtaaagagccggatattattacccgccagcagatgattgc

SEQ ID NO: 595436 - DNA, 75 bp, synthetic construct
  source 1..75: mol_type = other DNA
aatagacaagggaataaaaaccttaattatcaacgccactatattaaaatcacgcgtctgctggaaaaattaaat

SEQ ID NO: 595437 - DNA, 75 bp, synthetic construct
  source 1..75: mol_type = other DNA
acgtgaagatggagagtgtgccggtgctgacatacgtcaacgactatggcgcacggatgccgctctttttcacct

SEQ ID NO: 595438 - DNA, 75 bp, synthetic construct
  source 1..75: mol_type = other DNA
ggcagcaacggtaagtttttctgctcaggcgtcagtaacgcccgatcgtactcgcctgatttttaatgaaagcga

SEQ ID NO: 595439 - DNA, 75 bp, synthetic construct
  source 1..75: mol_type = other DNA
cgatgcggatgatgaagtttatcctaccatgtacgaaacgctgatgactatggcgttagaggatgatctcgacgt

SEQ ID NO: 595440 - DNA, 75 bp, synthetic construct
  source 1..75: mol_type = other DNA
gactttgacaagctgctgggaactgaagaaagtcccctgaaaactgacctgcaggccgcgatgcgtaatgctggc

SEQ ID NO: 595441 - DNA, 75 bp, synthetic construct
  source 1..75: mol_type = other DNA
tggcactggcgcggtgctggaactggcaacgcttcaggcactggaggcgcagcgcttcagcgtgccgatgtggta

SEQ ID NO: 595442 - DNA, 75 bp, synthetic construct
  source 1..75: mol_type = other DNA
accaggtaaaccagctactgggcgaaaccaatgaggtggaacgcgcggtgctgtttatcggtacgggaaccaaaa

SEQ ID NO: 595443 - DNA, 75 bp, synthetic construct
  source 1..75: mol_type = other DNA
attatcaacgtcactatattaagattacccgcctgctggagaaattaaatcgaaattatgccgacaaaattacga

SEQ ID NO: 595444 - DNA, 75 bp, synthetic construct
  source 1..75: mol_type = other DNA
ctgctctggaaatcattattattaacgatggttcaacggataattctgttgaaatagcaaagcattacgcagaaa

SEQ ID NO: 595445 - DNA, 75 bp, synthetic construct
  source 1..75: mol_type = other DNA
gaatctttaattacgcaaacctggactgctctggaaatcattattattaacgatggttcaacggataattctgtt

SEQ ID NO: 595446 - DNA, 75 bp, synthetic construct
  source 1..75: mol_type = other DNA
gcacccgtctggtgtttaacgaaagcgataaatcgatcagcgtgacgttgcgtaacaacaacgaaaagctgcctt

SEQ ID NO: 595447 - DNA, 75 bp, synthetic construct
  source 1..75: mol_type = other DNA
aactgtgggcggggatgcagtctgagtatgatctctggcaggcattgcaaaagacacagcctgttatccggccac

SEQ ID NO: 595448 - DNA, 75 bp, synthetic construct
  source 1..75: mol_type = other DNA
gcgctgctgctgaagacccgcgctgaactgtgggcggggatgcagtctgagtatgatctctggcaggcattgcaa

SEQ ID NO: 595449 - DNA, 75 bp, synthetic construct
  source 1..75: mol_type = other DNA
aaaattgtccgtcgcggatcccggtcgataaattaattcaggtacatacggtggaatgtaccggatgtatgacct

SEQ ID NO: 595450 - DNA, 75 bp, synthetic construct
  source 1..75: mol_type = other DNA
tgcggtcatcaaacacggcgcggatatgggcattgcctttgatggcgattttgaccgctgtttcctgtttgacga

SEQ ID NO: 595451 - DNA, 75 bp, synthetic construct
  source 1..75: mol_type = other DNA
atacccgcgctgagctatgggcggggatgcagtctgaatatgatctctggcaggcatcgcaaaagccacggcctg

SEQ ID NO: 595452 - DNA, 75 bp, synthetic construct
  source 1..75: mol_type = other DNA
agacccgcgctgaactgtgggcggggatgcagtctgagtatgatctctggctggcgtcgcaaaagccgcgacctg

SEQ ID NO: 595453 - DNA, 75 bp, synthetic construct
  source 1..75: mol_type = other DNA
tataaaaacgaagaaggtgtcggcaaggcgctgaaaaatgccgcacttgccagagaagagttgttcattacaacc

SEQ ID NO: 595454 - DNA, 75 bp, synthetic construct
  source 1..75: mol_type = other DNA
cgaagcatggaagggaatgatcgagctgcaaaaagaggggttaatcaaaagcatcggcgtctgtaacttccagat

SEQ ID NO: 595455 - DNA, 75 bp, synthetic construct
  source 1..75: mol_type = other DNA
cctgaaaaaactccagcttgattatatcgacctctacttaatgcactggcccgttcccgctatcgaccattatgt

SEQ ID NO: 595456 - DNA, 75 bp, synthetic construct
  source 1..75: mol_type = other DNA
ggcagcggcggccaggtacgacgggcggtaaattaccgtggaatgactggcgcaatgccacaacatggcgtaaag

SEQ ID NO: 595457 - DNA, 75 bp, synthetic construct
  source 1..75: mol_type = other DNA
ccttccccgctggctggatattcctctgcgcggcgtgaagtatttgctgttgagtttttttctctatatcgcgtt

SEQ ID NO: 595458 - DNA, 75 bp, synthetic construct
  source 1..75: mol_type = other DNA
cgataaattaatccaggttagaacggtggaatgtaccggctgtatgacctgcatcgagtcatgcccggtcgcctc

SEQ ID NO: 595459 - DNA, 75 bp, synthetic construct
  source 1..75: mol_type = other DNA
aacaactaatggcattaatagctatggtgcttatgctaatgggaaaaaagcatatattaatttagattatgtggc

SEQ ID NO: 595460 - DNA, 75 bp, synthetic construct
  source 1..75: mol_type = other DNA
cgacactggcaacggttgctgccggcctggccggtggtctggtgggagactcaggtgcttcagcggtagccggcg

SEQ ID NO: 595461 - DNA, 75 bp, synthetic construct
  source 1..75: mol_type = other DNA
ttggatcttgtaggtaatttaggagcggactctaagccagttatcggacgtttggaagtcagcgctggtaatggg

SEQ ID NO: 595462 - DNA, 75 bp, synthetic construct
  source 1..75: mol_type = other DNA
ccgtcttggccgcgacaccgccgacatgatccaactgataaaagagtttgatgctcagggtgtcgcggttcggtt

SEQ ID NO: 595463 - DNA, 75 bp, synthetic construct
  source 1..75: mol_type = other DNA
ccctattacgtgattatcagcaatgccagcacgcagaaaaatggtaatccggcagccgggtttacgccgctggtc

SEQ ID NO: 595464 - DNA, 75 bp, synthetic construct
  source 1..75: mol_type = other DNA
ggtgctgaccttcgtcaacgactacggtgcgcggatgccgctgttcttcaaatgtaatggtaatagctgccaggt

SEQ ID NO: 595465 - DNA, 75 bp, synthetic construct
  source 1..75: mol_type = other DNA
gttttcatgcgcatgtggttttctggatcgatcgtcagagggttaaaaaaatatatccctttgcggagcggatag

SEQ ID NO: 595466 - DNA, 75 bp, synthetic construct
  source 1..75: mol_type = other DNA
acaagagttagtggatagcgcgctggcccatcgtattccccgcattatttttaccagctcaacgtctgtctatgg

SEQ ID NO: 595467 - DNA, 75 bp, synthetic construct
  source 1..75: mol_type = other DNA
ggtaatggtgattgtgcggaaagctatttctctgtgctggaagcaaatacagttttgttggcaaagttactgaag

SEQ ID NO: 595468 - DNA, 75 bp, synthetic construct
  source 1..75: mol_type = other DNA
ggtgcttatgctaatgggaaaaaagcatatattaatttagattatgtggcacttgaaactgtggctgatggaagt

SEQ ID NO: 595469 - DNA, 75 bp, synthetic construct
  source 1..75: mol_type = other DNA
gacgggatcagtaccgacggtgatatggggcaaatggtggtcaccatcctgtcggctgtggcacaggctgaacgc

SEQ ID NO: 595470 - DNA, 75 bp, synthetic construct
  source 1..75: mol_type = other DNA
caggagcaacagaaattgcccgtcagttaagtatagcccgctctacggtttataaaattctggaagaagggaagg

SEQ ID NO: 595471 - DNA, 75 bp, synthetic construct
  source 1..75: mol_type = other DNA
ttatgttcgaacttgctcataaagagtttaatgatgttcaaacgtttaatatagcctctggggttaatacttcgg

SEQ ID NO: 595472 - DNA, 75 bp, synthetic construct
  source 1..75: mol_type = other DNA
gtttattatcggtgaagagtttatcggtggtgatgattgtgctctggttcttggtgataatatcttttacggtca

SEQ ID NO: 595473 - DNA, 75 bp, synthetic construct
  source 1..75: mol_type = other DNA
cgagtccagatggtcttgcgcaggcatttatcatcggtgaagagtttatcggtggtgatgattgtgctttggttc

SEQ ID NO: 595474 - DNA, 75 bp, synthetic construct
  source 1..75: mol_type = other DNA
aaacagctattacctatttatgataagccgatgatctattacccgctctctacactgatgttggcgggtattcgc

SEQ ID NO: 595475 - DNA, 75 bp, synthetic construct
  source 1..75: mol_type = other DNA
tagctggcggatcaggtactcgtctttatcctgtgactatggcagtgagtaaacaactcctgcctatttatgata

SEQ ID NO: 595476 - DNA, 75 bp, synthetic construct
  source 1..75: mol_type = other DNA
gcaggtgaaagtattagctgaatcattgaagaaaaatgcttatggtaagtatctgctgaaaatgattaaaggtta

SEQ ID NO: 595477 - DNA, 75 bp, synthetic construct
  source 1..75: mol_type = other DNA
atgaaaacgcgtaaaggtattattttagcgggtggttctggcactcgtctttatcctgtaactatggctgtaagt

SEQ ID NO: 595478 - DNA, 75 bp, synthetic construct
  source 1..75: mol_type = other DNA
aactgctgatgttactttcctggctttacctgttagtacaactggaaaagtgcctgcggcaggtcgttataatgc

SEQ ID NO: 595479 - DNA, 75 bp, synthetic construct
  source 1..75: mol_type = other DNA
tgattatgaaatttacttcagtgctgtctctggaatagatccgtctggtgccagtggtgatcatcaagggagtga

SEQ ID NO: 595480 - DNA, 75 bp, synthetic construct
  source 1..75: mol_type = other DNA
cgccgggtggaatggtgtcaggggcatttgactgcgctgacattattgcccgtatgcgcgatatcaaacccatct

SEQ ID NO: 595481 - DNA, 75 bp, synthetic construct
  source 1..75: mol_type = other DNA
tgagtatctaactcccggttgtatggaggaggagcatttcttattgttgatggagatatccccaatatgtagcaa

SEQ ID NO: 595482 - DNA, 75 bp, synthetic construct
  source 1..75: mol_type = other DNA
gtccgaagattaactctaatgagttgtacccagggggggtagatgaaaagcatttccttttattggtatcaattg

SEQ ID NO: 595483 - DNA, 75 bp, synthetic construct
  source 1..75: mol_type = other DNA
atacctaacggtaagtattaataagataaataacttacatcgttctttgataagaatattaagatactacgtttg

SEQ ID NO: 595484 - DNA, 75 bp, synthetic construct
  source 1..75: mol_type = other DNA
ccaggatttacaggcagctctgaggacagcgataaaacggatattatcgtcgtgcttcaggctcaccgtgtgctg

SEQ ID NO: 595485 - DNA, 75 bp, synthetic construct
  source 1..75: mol_type = other DNA
ttcgccaaatagggttatcccaagcgggtattgctcgcttgattgggttgccacagcaggttgtatgtcgatggg

SEQ ID NO: 595486 - DNA, 75 bp, synthetic construct
  source 1..75: mol_type = other DNA
aactccgtcctgatatttatcctaacccaacagacggcttacctgctgagtttcagactagcacacagctagcga

SEQ ID NO: 595487 - DNA, 75 bp, synthetic construct
  source 1..75: mol_type = other DNA
aattgggaaattactccccacgaacttcgccctgacatttatcccaacccaacagatggactaccttgtgaaaat

SEQ ID NO: 595488 - DNA, 75 bp, synthetic construct
  source 1..75: mol_type = other DNA
gttataactttcgcttcaacgctaagggactggaggtcttcggtagacctgagacgattgacaagatgaaaggca

SEQ ID NO: 595489 - DNA, 75 bp, synthetic construct
  source 1..75: mol_type = other DNA
gctgttcccgaacgccgtaagctggcagaaagggatggatgctgacgactacatcaaaaaatgcggcggcctgac

SEQ ID NO: 595490 - DNA, 75 bp, synthetic construct
  source 1..75: mol_type = other DNA
catcggccttggcgacaccattcaggtgcgtctgtggggcgctttccagtatgacggcgtgctgaccgttgaccc

SEQ ID NO: 595491 - DNA, 75 bp, synthetic construct
  source 1..75: mol_type = other DNA
acaagtgcaagtgttagctgaatcgctaaagaaaaatgcttatgggcagtatttattaaagatggttgaaggtta

SEQ ID NO: 595492 - DNA, 75 bp, synthetic construct
  source 1..75: mol_type = other DNA
tggctggtggttcgggtacgcgtctttatccggtaacgatggcggttagtaaacaattgctgcctatctatgata

SEQ ID NO: 595493 - DNA, 75 bp, synthetic construct
  source 1..75: mol_type = other DNA
gccttgaagaaaaaccgttagagccaaaaagcaattatgctgtaaccggactttatttctatgacaatgacgttg

SEQ ID NO: 595494 - DNA, 75 bp, synthetic construct
  source 1..75: mol_type = other DNA
gtttcctgtccggaagaaattgcttaccgtaaagggtttattgatgctgagcaggtgaaagtattagctgaaccg

SEQ ID NO: 595495 - DNA, 75 bp, synthetic construct
  source 1..75: mol_type = other DNA
cgatctgccgaagttaatggatgccgctgttaacaaagaaagtggtgcaacggtatttgcctatcacgttaatga

SEQ ID NO: 595496 - DNA, 75 bp, synthetic construct
  source 1..75: mol_type = other DNA
gctgttaacaaagaaagtggtgcaacggtatttgcctatcacgttaatgatcctgaacgctatggtgtcgttgag

SEQ ID NO: 595497 - DNA, 75 bp, synthetic construct
  source 1..75: mol_type = other DNA
ctatcctaatggcttcatttgccgcaaacgcgtctgtattaccggaaactcctgtaccatttaaaagtggtaccg

SEQ ID NO: 595498 - DNA, 75 bp, synthetic construct
  source 1..75: mol_type = other DNA
tgcgtatcgatcacgtgattcactatagtgataagtccgcggtagacgacttacgttacgccctcagctacctgg

SEQ ID NO: 595499 - DNA, 75 bp, synthetic construct
  source 1..75: mol_type = other DNA
tgcgtatcgatcacgtgattcactatagtgataagtctgcggtagacgacttacgttacgcccttagctacctgg

SEQ ID NO: 595500 - DNA, 75 bp, synthetic construct
  source 1..75: mol_type = other DNA
ctaaacaggatcagaaagaacacggtattattctgatgcgtagcagacttcccgaaaaaagtaatcgcggccgac

SEQ ID NO: 595501 - DNA, 75 bp, synthetic construct
  source 1..75: mol_type = other DNA
tcctgtaagcacagtatgtgtattgaaatataccgtttacttagcgaaacccagacgatgttagcaggatattac

SEQ ID NO: 595502 - DNA, 75 bp, synthetic construct
  source 1..75: mol_type = other DNA
tgcggaagtgtcctttattgagggggtgtacacgacgcaagagatggtcgatgagctatctattagcgatacgat

SEQ ID NO: 595503 - DNA, 75 bp, synthetic construct
  source 1..75: mol_type = other DNA
attcggtgagttcttcctgacatcaagggggctggtcgttgttgatcagaacaagctatatcgctcatatggaga

SEQ ID NO: 595504 - DNA, 75 bp, synthetic construct
  source 1..75: mol_type = other DNA
tctctataatggcctggcaagtgagttgaaatggcgcgatgatacaacactcattaaccggacagcgcagatcaa

SEQ ID NO: 595505 - DNA, 75 bp, synthetic construct
  source 1..75: mol_type = other DNA
gctcggatgccgctctttttcacctgcaacggcaatagttgccaggttgatgaagagcagagccgcaaaggctga

SEQ ID NO: 595506 - DNA, 75 bp, synthetic construct
  source 1..75: mol_type = other DNA
ggcgcacggatgccactctttttccgctgtgacggcaacacatgccaggtggataaagttcaaagtctcaaggga

SEQ ID NO: 595507 - DNA, 75 bp, synthetic construct
  source 1..75: mol_type = other DNA
tccaggcaactgggagatatctggaggcggagcacggaaggggatggttattttcacctgtgccgggctaaagat

SEQ ID NO: 595508 - DNA, 75 bp, synthetic construct
  source 1..75: mol_type = other DNA
ccaaacgatgctggcgggatattactgggtaatggaatatacgtcaaacaagggacatcatattcattttatcgg

SEQ ID NO: 595509 - DNA, 75 bp, synthetic construct
  source 1..75: mol_type = other DNA
agtgatgacatgttaaataacatacctgctagtgagacaatcagcgcagctggcatttacagaagcattattaat

SEQ ID NO: 595510 - DNA, 75 bp, synthetic construct
  source 1..75: mol_type = other DNA
atgtataatgccaatcccaattacaaaatggatttcgtgattctgaaagatgtgaatgaacacatggagggtttg

SEQ ID NO: 595511 - DNA, 75 bp, synthetic construct
  source 1..75: mol_type = other DNA
tgctgccatactcttccactccatttagtgtaccgaataacctttatttaattggtaccatgaacactgctgatc

SEQ ID NO: 595512 - DNA, 75 bp, synthetic construct
  source 1..75: mol_type = other DNA
gatgaaataaatcggggtaatatttcaaaaatttttggtgaactaattacccttattgaaccatctaaacgggct

SEQ ID NO: 595513 - DNA, 75 bp, synthetic construct
  source 1..75: mol_type = other DNA
atatcgtactattgagcttgctgtacaaatttgtgatccgatcgcttactccctgcaggagggtaaggatgagag

SEQ ID NO: 595514 - DNA, 75 bp, synthetic construct
  source 1..75: mol_type = other DNA
cagcgcctccggcatgggcaatgatgccaccgtcgaactctctccagttgctggacgaaacgttctcggtatccg

SEQ ID NO: 595515 - DNA, 75 bp, synthetic construct
  source 1..75: mol_type = other DNA
catgttggtgtgccatttaagttagttgaaaaccgggctgagtcagctcagacggcagatgtgacttttctgtct

SEQ ID NO: 595516 - DNA, 75 bp, synthetic construct
  source 1..75: mol_type = other DNA
taattcgcctgggacagtattaccctcgcaggactggaaaatagggcattataaggcttattgtaattctctgga

SEQ ID NO: 595517 - DNA, 75 bp, synthetic construct
  source 1..75: mol_type = other DNA
ccctgcaggagggtaaggatgagagtgaaaaacgtcgcgagttgaaaaagatttatgatcagcttatcaaagata

SEQ ID NO: 595518 - DNA, 75 bp, synthetic construct
  source 1..75: mol_type = other DNA
ctgcatccacaaccgccctgtttgaacgcatcatggcgaaccattcaccggcagcggtacagggtggcgtgccac

SEQ ID NO: 595519 - DNA, 75 bp, synthetic construct
  source 1..75: mol_type = other DNA
atgttttgcgaagaaaaagtagctcaaatggctgcatacctacttcttaagcgaggtgggcgcatggcatatctg

SEQ ID NO: 595520 - DNA, 75 bp, synthetic construct
  source 1..75: mol_type = other DNA
aaaaatgctatcggtttagttggaagcgaaagtgctttacaagaaaatgagcaagaagatgatgttataagttcg

SEQ ID NO: 595521 - DNA, 75 bp, synthetic construct
  source 1..75: mol_type = other DNA
tgtacgcagtatccttaactatttaattaatcaacgttatctgcctctgaatactcagagcgtagcttcagaaaa

SEQ ID NO: 595522 - DNA, 75 bp, synthetic construct
  source 1..75: mol_type = other DNA
tgatcttaaagaaacgctaaatcgtgcgctgggtgatgatatcgaccctattgagctgaatatgtcactttggca

SEQ ID NO: 595523 - DNA, 75 bp, synthetic construct
  source 1..75: mol_type = other DNA
tgattcagcctaccttgattacggaatatccggcagaagtttccccgctggcgcgacgtaacgatgttaacccgg

SEQ ID NO: 595524 - DNA, 75 bp, synthetic construct
  source 1..75: mol_type = other DNA
gcgtatgaccggcaatctgagtcggcgcttttatgaatggctggctgcgcagtacggttttaccgtcaggctgac

SEQ ID NO: 595525 - DNA, 75 bp, synthetic construct
  source 1..75: mol_type = other DNA
gatcgctatcgaggggtattcggtcaacgagatgtggtctttatgagtgctaaacaagctaaaatttgccgtgta

SEQ ID NO: 595526 - DNA, 75 bp, synthetic construct
  source 1..75: mol_type = other DNA
aaaaatatcgtccagaaaccgatatggccgacctggataattttgatgctgctaaagcattagctgaatctatcg

SEQ ID NO: 595527 - DNA, 75 bp, synthetic construct
  source 1..75: mol_type = other DNA
tgattcagcctaccttgattacggaatatccggcagaagtgtccccgctggcgcgtcgtaaagatgttaacccgg

SEQ ID NO: 595528 - DNA, 75 bp, synthetic construct
  source 1..75: mol_type = other DNA
tgattcagcctaccttgattacggaatatccggcagaagtctccccgctggcgcgccgtaatgatgttaacccgg

SEQ ID NO: 595529 - DNA, 75 bp, synthetic construct
  source 1..75: mol_type = other DNA
atggatattcagtgtactcttgctaacacctttcctaatgaacatccggaagccttatttcggttacgtcagcgg

SEQ ID NO: 595530 - DNA, 75 bp, synthetic construct
  source 1..75: mol_type = other DNA
tttctaatcggaatgtccacaggcatggcaggagctactattagcttaccgctaatatttgctgttgggtatgtt

SEQ ID NO: 595531 - DNA, 75 bp, synthetic construct
  source 1..75: mol_type = other DNA
tttgttgttggcttttggtttatcggcgttgatcggtatgtcaacaggcatggcgggggctactatcagcctacc

SEQ ID NO: 595532 - DNA, 75 bp, synthetic construct
  source 1..75: mol_type = other DNA
tcgaacagcatccagaactgcgtgcgctcttgctggcaaccgcgcccgcaaaactggttgagcatacggaaaacg

SEQ ID NO: 595533 - DNA, 75 bp, synthetic construct
  source 1..75: mol_type = other DNA
gagtttacgccagcgctttacgctaatactcaggagattttgctggagagggatattcagcgtactcttgctaac

SEQ ID NO: 595534 - DNA, 75 bp, synthetic construct
  source 1..75: mol_type = other DNA
gaaaaatttattgtagatggcaactgcattcaactgattggtattggtaatgagcagggagagtttgatttttac

SEQ ID NO: 595535 - DNA, 75 bp, synthetic construct
  source 1..75: mol_type = other DNA
ttaaacgacgcagaagatcaggctgaacgtttccaggaacaggttaacgctaaagctgcaggtgacgacgaagcc

SEQ ID NO: 595536 - DNA, 75 bp, synthetic construct
  source 1..75: mol_type = other DNA
tgaacatttcatggcgaatcattcaccggcagcggtgcggggtggcgtgtcacagacgtcagcagacggtgatgc

SEQ ID NO: 595537 - DNA, 75 bp, synthetic construct
  source 1..75: mol_type = other DNA
ttcagacacagtcagcaggtgctcatacccactcgctgtctggtactgcagcaagttctggcgcacatgcacata

SEQ ID NO: 595538 - DNA, 75 bp, synthetic construct
  source 1..75: mol_type = other DNA
atgccggaccttcactccgtgatcagattatggccctggatgaggcaaaaggggctgaggcgcaggctgaacaac

SEQ ID NO: 595539 - DNA, 75 bp, synthetic construct
  source 1..75: mol_type = other DNA
ggttcgagctagtcttctggcctttcattacgatatacgctttcactgatgctatgcgcattaacatcatgcggg

SEQ ID NO: 595540 - DNA, 75 bp, synthetic construct
  source 1..75: mol_type = other DNA
gcaggagaaccagcgagtgatggggatcctgacgtgtcaggaagcgaaaggacgtgaacagcttgccacgatgct

SEQ ID NO: 595541 - DNA, 75 bp, synthetic construct
  source 1..75: mol_type = other DNA
tgaacagcttgccacgatgctggcaggacaacagggcatgagcgttgaacaggcccgggcgattctggccgcggc

SEQ ID NO: 595542 - DNA, 75 bp, synthetic construct
  source 1..75: mol_type = other DNA
gacgatgatttcacccgtggcaaaccgcatccaatgatcgacccgactctgcgcaatcaacgtctgctcaacgaa

SEQ ID NO: 595543 - DNA, 75 bp, synthetic construct
  source 1..75: mol_type = other DNA
ctgctggccgcgcgtaaggccatcgccgactggacggcagagcgcgagcgccatctggggcgggatatcgtcccc

SEQ ID NO: 595544 - DNA, 75 bp, synthetic construct
  source 1..75: mol_type = other DNA
gctaaagcattagctgaatctatcggtattacggtagagaaaagctgggggctgggacgtattgtcacggagatc

SEQ ID NO: 595545 - DNA, 75 bp, synthetic construct
  source 1..75: mol_type = other DNA
gcctctggacgcaacagcggcagaaacatctggggcaggacattgtgccaaaccagataatcaaagtgttacagg

SEQ ID NO: 595546 - DNA, 75 bp, synthetic construct
  source 1..75: mol_type = other DNA
cttgtacgcatcgccattcaggaagcggcgaaacagaacctggtcgcgtattcccgcgcgccaatgctggattat

SEQ ID NO: 595547 - DNA, 75 bp, synthetic construct
  source 1..75: mol_type = other DNA
ccaaggctcattgataacgattttatattgaaagcattaaaggcatttcataaacaaatggattttatgaaagat

SEQ ID NO: 595548 - DNA, 75 bp, synthetic construct
  source 1..75: mol_type = other DNA
aataattgcggttgttgggtttatagctggtaaggcgatattctctgataatgttgtgtttaggcgaaagatata

SEQ ID NO: 595549 - DNA, 75 bp, synthetic construct
  source 1..75: mol_type = other DNA
tcgatgaagatttccaaatggaacagcaggccaatgctgaattcatagcagaggccaatccggctactgtgctgg

SEQ ID NO: 595550 - DNA, 75 bp, synthetic construct
  source 1..75: mol_type = other DNA
aatttgagtccttgataacgccacacattgtgctggcgctgctggatgaacgggaaagaaaccagcaatacatca

SEQ ID NO: 595551 - DNA, 75 bp, synthetic construct
  source 1..75: mol_type = other DNA
cctgggcggcgatgtgcgcctgaccagcgagacgttaaagctggcgctggcgaaaggactgcaggatgcgggggt

SEQ ID NO: 595552 - DNA, 75 bp, synthetic construct
  source 1..75: mol_type = other DNA
tgcgtgctaaggcagaaaaagcaacgtgtggtgtgtggtcgctagaatatggagaggagagatttgatgctggtg

SEQ ID NO: 595553 - DNA, 75 bp, synthetic construct
  source 1..75: mol_type = other DNA
tgacgaaaagcttatggagcttcacaagtggttttgggaacaaagtaaagccgagcgcgccgctggcattggcgt

SEQ ID NO: 595554 - DNA, 75 bp, synthetic construct
  source 1..75: mol_type = other DNA
agcgagaatgcatacatccgcaaccggtacaaagaactggacctattaatcgggaaaaacattctggtcatgcag

SEQ ID NO: 595555 - DNA, 75 bp, synthetic construct
  source 1..75: mol_type = other DNA
cacatctgattcagcctacctttattactgaatatccggcagaagtgtcgccgctggcccgccgtaatgaggtta

SEQ ID NO: 595556 - DNA, 75 bp, synthetic construct
  source 1..75: mol_type = other DNA
ctggcgcaggatattctcggtaagacggaagtaacctacggcgacgtgacgctggacttcggtaagccgtttgaa

SEQ ID NO: 595557 - DNA, 75 bp, synthetic construct
  source 1..75: mol_type = other DNA
atggttatgctgttcaccaacagccacactatccgtgacgtgattctgttcccggcgatgcgtccggtaaaataa

SEQ ID NO: 595558 - DNA, 75 bp, synthetic construct
  source 1..75: mol_type = other DNA
ttatggcgcttcacaagtggttttgggaacaaagtgaagccgagcgcgccgctggcattcgcatcaaaggagagt

SEQ ID NO: 595559 - DNA, 75 bp, synthetic construct
  source 1..75: mol_type = other DNA
cacatctgattcagcctaccttgattactgaatatccggcagaagtttcgccgctggcccgccgtaatgaggtta

SEQ ID NO: 595560 - DNA, 75 bp, synthetic construct
  source 1..75: mol_type = other DNA
cacatctgattcagcctaccttcattactgaatatccggcagaagtctctccgctggcccgccgtaatgaggtta

SEQ ID NO: 595561 - DNA, 75 bp, synthetic construct
  source 1..75: mol_type = other DNA
gttaacccagctaccatgctggcactgctggatgaacgggaagcccaaaacaagtgtatcgcagaactggaaaaa

SEQ ID NO: 595562 - DNA, 75 bp, synthetic construct
  source 1..75: mol_type = other DNA
agttgatctggaagccgcagagaagcgcaacgcaaaattacaaagcgagaatgcatacatccgcaaccggtacaa

SEQ ID NO: 595563 - DNA, 75 bp, synthetic construct
  source 1..75: mol_type = other DNA
ctgatgatgatttgttaagtgaacaggaacttaaagattacggtgtggatattgatgcgctcaatgccttcaaat

SEQ ID NO: 595564 - DNA, 75 bp, synthetic construct
  source 1..75: mol_type = other DNA
agcgaaaccttaaaactggcgctggcgaaaggtttacaggatgcgggcgtcgatgtgctggatatcggtatgtcc

SEQ ID NO: 595565 - DNA, 75 bp, synthetic construct
  source 1..75: mol_type = other DNA
atttcgtttgcctgatcctgccgttaactgatgagacgcatcatctgtttggcgcagaacaattcgccaaaatga

SEQ ID NO: 595566 - DNA, 75 bp, synthetic construct
  source 1..75: mol_type = other DNA
taacaggagtttttgtttgtcaaaaatggaaaggagaacccggtggcgtgattgcagaatgtcacgttaactgcc

SEQ ID NO: 595567 - DNA, 75 bp, synthetic construct
  source 1..75: mol_type = other DNA
gatagttcccctctcaatcatcgttctcactttactgtttatgattcaaaaacatggcactgctatggtcggtaa

SEQ ID NO: 595568 - DNA, 75 bp, synthetic construct
  source 1..75: mol_type = other DNA
caaaggagctgacaagtgaagaagatgatttttgtcgcggcattgttggtgaatatccaacaagtgcatgcttca

SEQ ID NO: 595569 - DNA, 75 bp, synthetic construct
  source 1..75: mol_type = other DNA
accgaaccggtggtgcggttgaatgttgaatcaaaagccaacgttgagttactcgaaagcagggtttctataata

SEQ ID NO: 595570 - DNA, 75 bp, synthetic construct
  source 1..75: mol_type = other DNA
cttgctgctgcaacgtaatgcgctgcgggcaccggatcaatttgaaatcccgccaaacagagttatcgaactggg

SEQ ID NO: 595571 - DNA, 75 bp, synthetic construct
  source 1..75: mol_type = other DNA
cgggattgcggtgaccggaacgatggttctgacctctattctttcgaccaccgtggcgcgccacaattggcactg

SEQ ID NO: 595572 - DNA, 75 bp, synthetic construct
  source 1..75: mol_type = other DNA
caatacgtcggcgcgaaccacatcaatgctggtgattatggggctaatcggcggcagctttttctatggtgaagt

SEQ ID NO: 595573 - DNA, 75 bp, synthetic construct
  source 1..75: mol_type = other DNA
cctacgacatccgcggcaagctcggtgaagagctgaatgaagacatcgcgtggcgcattggccgcgcttacggtg

SEQ ID NO: 595574 - DNA, 75 bp, synthetic construct
  source 1..75: mol_type = other DNA
gccgatcgacgaagaataacatcatacagggtagcggtaaggagtggtcaaaacaggatcgtgacacgttcgacc

SEQ ID NO: 595575 - DNA, 75 bp, synthetic construct
  source 1..75: mol_type = other DNA
tcggaactggaaaccgcgctgaaagacctgggctccgtagtctcttttaagggttattacggtgatctggctatt

SEQ ID NO: 595576 - DNA, 75 bp, synthetic construct
  source 1..75: mol_type = other DNA
ctgaaggaaataacattgagcaggccgacggtaaaaaatggtctgagcaggaccgtgatacgtttgatccgacgc

SEQ ID NO: 595577 - DNA, 75 bp, synthetic construct
  source 1..75: mol_type = other DNA
ccgaaacacgaatttaattaccagcaggcggttgagcgtcttcccggtgaagatccggctcagctgaacgacccg

SEQ ID NO: 595578 - DNA, 75 bp, synthetic construct
  source 1..75: mol_type = other DNA
aatgtcagtgtttatcagcgtgcatggtatgcggccacgtctggtgttgatcggcgcggggcatgttaaccgggc

SEQ ID NO: 595579 - DNA, 75 bp, synthetic construct
  source 1..75: mol_type = other DNA
aataatcaggatcgtgaagccctcgataaactcattgaacagcccattgcatggctgggtttgctggcaagtcgc

SEQ ID NO: 595580 - DNA, 75 bp, synthetic construct
  source 1..75: mol_type = other DNA
cggtgaaatgacagttgaaggtgttactgctcatttggcttcgacccctgcggaggcgatgaaactgactgagcg

SEQ ID NO: 595581 - DNA, 75 bp, synthetic construct
  source 1..75: mol_type = other DNA
attgaaacaaatcgcgggcactggcttggtcaagtcatttattccggttgtgcgcaggagaacaccggcgttccc

SEQ ID NO: 595582 - DNA, 75 bp, synthetic construct
  source 1..75: mol_type = other DNA
acttttcccgccagcaaccacgcttctacatgccgattcgtttggtgcagcggtagaggcgctggaaattcgacc

SEQ ID NO: 595583 - DNA, 75 bp, synthetic construct
  source 1..75: mol_type = other DNA
tctgcctgagggctcgctggtcctggggaatacggcagcagagggcattcgttgctatggtgccattcaggatgc

SEQ ID NO: 595584 - DNA, 75 bp, synthetic construct
  source 1..75: mol_type = other DNA
cgcgcaggatgcctgggtgccctatgtcagcctgacggcaaaatacccgataggagagcacgtagtattgatggc

SEQ ID NO: 595585 - DNA, 75 bp, synthetic construct
  source 1..75: mol_type = other DNA
atgttaattaaccgcaatattgtggcgttatttgcgttgccttttatggcaagcgcaactgcttctgaattatcc

SEQ ID NO: 595586 - DNA, 75 bp, synthetic construct
  source 1..75: mol_type = other DNA
gaatataagaggaaaataccaagtgtctctgttatatatagagtcaaaaacggatctgaatatatagaggcatct

SEQ ID NO: 595587 - DNA, 75 bp, synthetic construct
  source 1..75: mol_type = other DNA
gctaaaaaaaatagatgtgcaagttttaacggattttttacaatatattgaggtttatattcaaatacactttag

SEQ ID NO: 595588 - DNA, 75 bp, synthetic construct
  source 1..75: mol_type = other DNA
taagtagtcgtttttttaatgccggttatactgtgccaaaatatcaactgccactacatgggcaaactgtttttt

SEQ ID NO: 595589 - DNA, 75 bp, synthetic construct
  source 1..75: mol_type = other DNA
tttctgtggtactcctgaagaatataatcttttattatcccaaccatataaatttgtgaaaaaatatgaagagaa

SEQ ID NO: 595590 - DNA, 75 bp, synthetic construct
  source 1..75: mol_type = other DNA
gtggaagaaatgcaggcggtgaatgccgtgctgtatggcaaatacaccatggaaggagaccagttcgagaaaatt

SEQ ID NO: 595591 - DNA, 75 bp, synthetic construct
  source 1..75: mol_type = other DNA
gcctcttcccgttatccgaaacactggctgaccgtgggcgatccggcccgtgaatttaccatgacgcagtccgca

SEQ ID NO: 595592 - DNA, 75 bp, synthetic construct
  source 1..75: mol_type = other DNA
gggaatacccaagcggaaggtgttcgttgctatggggccattcaggataaccaggcgctgaatgaagggatcacc

SEQ ID NO: 595593 - DNA, 75 bp, synthetic construct
  source 1..75: mol_type = other DNA
agttaattttatcttttcattactatctttttactatttcctttttatctgcgaaaaacgataagaagtactcca

SEQ ID NO: 595594 - DNA, 75 bp, synthetic construct
  source 1..75: mol_type = other DNA
ccgatggattataacggcatgaagctggttcgcgagggggctcgcccgatcagcggcgataccggactgcgcgat

SEQ ID NO: 595595 - DNA, 75 bp, synthetic construct
  source 1..75: mol_type = other DNA
gcaggcgttgtccgaaggtgtggtggcttcttcccgttacccgaaacactggctgaccgtgggcgatccggcccg

SEQ ID NO: 595596 - DNA, 75 bp, synthetic construct
  source 1..75: mol_type = other DNA
aactcgaagagcaaaattgtccgtttgcgatggcgcaaattgttgatagccgaggctcgactccccgccattctg

SEQ ID NO: 595597 - DNA, 75 bp, synthetic construct
  source 1..75: mol_type = other DNA
tgtcgcgacgacacccgcaatgcggtcatcaaacacggcgcggatatgggcattgcctttgatggcgattttgac

SEQ ID NO: 595598 - DNA, 75 bp, synthetic construct
  source 1..75: mol_type = other DNA
tcattcacgacccgcgcctgacgtggaacacggtggacatcgtgacccgcaacggcggccagccggtgatgtcga

SEQ ID NO: 595599 - DNA, 75 bp, synthetic construct
  source 1..75: mol_type = other DNA
catcgaggtgacggcgagccataacccgatgaactacaacggcatgaagctggtgcgcgagaacgcgaagcccat

SEQ ID NO: 595600 - DNA, 75 bp, synthetic construct
  source 1..75: mol_type = other DNA
gaggcgaaaggccgagaacagctggcggcaacgctggctgcgatgccggatatgacggtggaaaaagcccgcccg

SEQ ID NO: 595601 - DNA, 75 bp, synthetic construct
  source 1..75: mol_type = other DNA
tgcgtatcattaccgataacctcaaacaggaagagcacgcgattgtccaggtggaagaaatacaggcggtaaatg

SEQ ID NO: 595602 - DNA, 75 bp, synthetic construct
  source 1..75: mol_type = other DNA
cggtggtggacgccatcgaagcccgctttaaagccctcggcgcacctgtggaattaatcaaagtacacaacacac

SEQ ID NO: 595603 - DNA, 75 bp, synthetic construct
  source 1..75: mol_type = other DNA
gttgctatggagccattaaggatgcacaggcgttgtctgaaggagtggtggcttcttcccgttacccgaaacact

SEQ ID NO: 595604 - DNA, 75 bp, synthetic construct
  source 1..75: mol_type = other DNA
ggggtattacggtgatctggccattgtggtggcgaaaacgtcttatgtggcagaggacggtaccgaaaaacgtta

SEQ ID NO: 595605 - DNA, 75 bp, synthetic construct
  source 1..75: mol_type = other DNA
aaatattgtcgacggttccctgccgctggcagtattgaaagacagtattataaagacagcaggaggagagcggga

SEQ ID NO: 595606 - DNA, 75 bp, synthetic construct
  source 1..75: mol_type = other DNA
cgtgaattcaccatgacgcagtccgcaccgctgatggtgctgccggatccggatgagtttgtggtggtacaggtg

SEQ ID NO: 595607 - DNA, 75 bp, synthetic construct
  source 1..75: mol_type = other DNA
agcggcggccagccggtgatgtcgaagacggggcatgcgttcatcaaggagcggatgcgccaggaagacgccatc

SEQ ID NO: 595608 - DNA, 75 bp, synthetic construct
  source 1..75: mol_type = other DNA
gaaaaacgctgggcgaactggtgcgcgaccggatggctgcgtttccggcaagcggtgagatcaacagcaaactgg

SEQ ID NO: 595609 - DNA, 75 bp, synthetic construct
  source 1..75: mol_type = other DNA
gtgctgtatggcaaatacacgatggaaggagaccagttcgagaaaattgaggtcgattttggcaggtcgacgaag

SEQ ID NO: 595610 - DNA, 75 bp, synthetic construct
  source 1..75: mol_type = other DNA
gtggcgaaaacgtcttatgtggcagaggacggtaccgaaaaacgttatctgccggagggcatgctggtgttgggg

SEQ ID NO: 595611 - DNA, 75 bp, synthetic construct
  source 1..75: mol_type = other DNA
tgggcgcagtggtgtccttcaaggggtattacggcgatctggccattgtggtggcgaaaacgtcttatgtggcag

SEQ ID NO: 595612 - DNA, 75 bp, synthetic construct
  source 1..75: mol_type = other DNA
accgtgggcgatccgtcctgtgaattcaccatgacgcagtccgctccgctgatggtgctgccggatccggatgag

SEQ ID NO: 595613 - DNA, 75 bp, synthetic construct
  source 1..75: mol_type = other DNA
agaataacatcatacagggtagcggtaaggagtggtcaaaacaggatcgtgacacgttcgacccgacatatgata

SEQ ID NO: 595614 - DNA, 75 bp, synthetic construct
  source 1..75: mol_type = other DNA
ttgtttacgacccgccagttactcggttataccgaacaaaaagtgaaattccgtgcgctgtttctggagctgttt

SEQ ID NO: 595615 - DNA, 75 bp, synthetic construct
  source 1..75: mol_type = other DNA
gcgcagaacccgcagcaggcgcggcttatccgtaccgcgcgcgaagtgaacgacaacaaacctttctgggttatc

SEQ ID NO: 595616 - DNA, 75 bp, synthetic construct
  source 1..75: mol_type = other DNA
aaatgtgtaagctcaccgaaaacagcttccgcgatgtgaatatcgcttttgctaatgaattgtcgctgatttgtg

SEQ ID NO: 595617 - DNA, 75 bp, synthetic construct
  source 1..75: mol_type = other DNA
tcctaacccgctactgccggaatgccgcgacgacacccgcaatgcggtcatcaaacacggcgcggatatgggcat

SEQ ID NO: 595618 - DNA, 75 bp, synthetic construct
  source 1..75: mol_type = other DNA
attgattcgtctggccaatcgtcaccctcgcgtcaatattctgcagcctggtccgggcgtgggcggtcactgcat

SEQ ID NO: 595619 - DNA, 75 bp, synthetic construct
  source 1..75: mol_type = other DNA
accgagaagatggcagaatggttagcagagatgcgtccggatctcactttcccgcagcaggtgggcgagcaggcg

SEQ ID NO: 595620 - DNA, 75 bp, synthetic construct
  source 1..75: mol_type = other DNA
caacgccgtttaaaggcgatcatgagccagatatggcttacgtcgaatcggctgcccgctccattgcgccagtgc

SEQ ID NO: 595621 - DNA, 75 bp, synthetic construct
  source 1..75: mol_type = other DNA
gtctgaatgccatctggccacgcatcattgccctggtggttcaacccggcgtcgaattcgatcacaccaacgtta

SEQ ID NO: 595622 - DNA, 75 bp, synthetic construct
  source 1..75: mol_type = other DNA
tgtttgtcagctcgccgactcgttgaatttcccgcaggatgcgttgattctgggtggtgaccatctggggccaaa

SEQ ID NO: 595623 - DNA, 75 bp, synthetic construct
  source 1..75: mol_type = other DNA
caacccggcgtcgaattcgatcacaccaacgttattgattatcagcccgccaaagcgagcgccttaagccagatg

SEQ ID NO: 595624 - DNA, 75 bp, synthetic construct
  source 1..75: mol_type = other DNA
gaaacagttttgttcttttttttgtgagtacataaaaagagatgatattagtatagatatcgccttggatgtgct

SEQ ID NO: 595625 - DNA, 75 bp, synthetic construct
  source 1..75: mol_type = other DNA
gcaaacgaaattcgcctgatgtgtgtgcaggatggtcgtactcacaaacaaatctgcgagatgtacagccgcgtc

SEQ ID NO: 595626 - DNA, 75 bp, synthetic construct
  source 1..75: mol_type = other DNA
ttgcgaagcttcaggcagcggcattttctcaactgtcagattctgacccgtcaaaatctgacgcatcaaaatctg

SEQ ID NO: 595627 - DNA, 75 bp, synthetic construct
  source 1..75: mol_type = other DNA
agcgccctcagccagccactggcgcggattctggaacaggtgcaactggccctggataacgcccaggaaaaaccg

SEQ ID NO: 595628 - DNA, 75 bp, synthetic construct
  source 1..75: mol_type = other DNA
agctaacgcccaggcgcaggggatcctcgaacgtgcggcgaagcgtgccgggttcaaggatgtggtattccagta

SEQ ID NO: 595629 - DNA, 75 bp, synthetic construct
  source 1..75: mol_type = other DNA
cggtggtacgactgactgttctttactgctaatggggccacagtggcgttcgcgcctcgatcgtgaagccagcct

SEQ ID NO: 595630 - DNA, 75 bp, synthetic construct
  source 1..75: mol_type = other DNA
cgttgattctgggtggtgaccatctggggccaaaccgctggcaaaacctgccggccgctcaggcaatggccaatg

SEQ ID NO: 595631 - DNA, 75 bp, synthetic construct
  source 1..75: mol_type = other DNA
cggaaacccgcgcctcactgccgtttatcagcgatgaactggctacgctgattagccagcaagggctggaaagcg

SEQ ID NO: 595632 - DNA, 75 bp, synthetic construct
  source 1..75: mol_type = other DNA
attgcaggctgctgccttttctcacctgtcagattctgacgcatcaaaatctgatgcctcaaaaaccgacgcgtc

SEQ ID NO: 595633 - DNA, 75 bp, synthetic construct
  source 1..75: mol_type = other DNA
ggcatgggtggcgaaaccgaaaaaggcatcgccctgccgattctgccgtggtggaatgcggttgccatcaacgac

SEQ ID NO: 595634 - DNA, 75 bp, synthetic construct
  source 1..75: mol_type = other DNA
atggtgagacagcacaaagagggcaaaacaaatgggatttatgccgtttgttccgcacatccgctggtgctggaa

SEQ ID NO: 595635 - DNA, 75 bp, synthetic construct
  source 1..75: mol_type = other DNA
cgttgattttgggtggcgatcatcttggccctaaccgctggcaaaacttgcctgccgctcaggcaatggctaatg

SEQ ID NO: 595636 - DNA, 75 bp, synthetic construct
  source 1..75: mol_type = other DNA
cggacagccagattgatgacgctttcgctcatctggttcgtaatctggcggattcaccaattccgctaccgctca

SEQ ID NO: 595637 - DNA, 75 bp, synthetic construct
  source 1..75: mol_type = other DNA
gaaaccatgtacgaaacaggtaaagacatgaatgccaagtaccgcgaaacatctcgcggcggcctggcgatgaaa

SEQ ID NO: 595638 - DNA, 75 bp, synthetic construct
  source 1..75: mol_type = other DNA
cgccattattatgggcctggcgggtaacctgccggataccgtggatatcgattccatccctggttttattcagga

SEQ ID NO: 595639 - DNA, 75 bp, synthetic construct
  source 1..75: mol_type = other DNA
ctccggcgagctgcaaccgacgccacgggaactcattatcaaccatattcaggacatcctggcgcagtaccacac

SEQ ID NO: 595640 - DNA, 75 bp, synthetic construct
  source 1..75: mol_type = other DNA
tatttgccaaataactattatatagttatagcaaactcaatgttttttattttttctttcattggtggaattggt

SEQ ID NO: 595641 - DNA, 75 bp, synthetic construct
  source 1..75: mol_type = other DNA
ctatggggaatggtgacgggttccgtttctttactgggaggcgctatcggggcgctgttcagtccggttggtctt

SEQ ID NO: 595642 - DNA, 75 bp, synthetic construct
  source 1..75: mol_type = other DNA
cgggggcaaaatgcgcccgatggaggatgtgctggccgacctttataaagccacccgcaaatacggggaagttga

SEQ ID NO: 595643 - DNA, 75 bp, synthetic construct
  source 1..75: mol_type = other DNA
tcggatcgcgtgcgttattactggccagaccggcagattgatgatgctttcgcccacctggtccgcaacctggca

SEQ ID NO: 595644 - DNA, 75 bp, synthetic construct
  source 1..75: mol_type = other DNA
caccatccgcgtgcaggaaaccctgaccttcgggccagagctgcagattgccaaagacctgatagacgagtgcgt

SEQ ID NO: 595645 - DNA, 75 bp, synthetic construct
  source 1..75: mol_type = other DNA
cgataactttttatgcaatagcaatgcagttatttgatgatcaatatcttacatggttatcaaactggatattgc

SEQ ID NO: 595646 - DNA, 75 bp, synthetic construct
  source 1..75: mol_type = other DNA
cgaaaaacgcgaagacccgtacttcaaagccagttacgacaacgtggactacagccagatcccggcaggattcag

SEQ ID NO: 595647 - DNA, 75 bp, synthetic construct
  source 1..75: mol_type = other DNA
ctgaatcgtggcagcgctgcgggtgatgcaaacacgggtaatgtggggggcggaaacctggcggaacaagcatta

SEQ ID NO: 595648 - DNA, 75 bp, synthetic construct
  source 1..75: mol_type = other DNA
gttaaaaaaattgttcaaatgcttaaaatgcaagaacgctctgaatatttatcacatcgcgaggaatttcggcct

SEQ ID NO: 595649 - DNA, 75 bp, synthetic construct
  source 1..75: mol_type = other DNA
cgcagcgtatagtcttgagaatccgggcataatccctcttaatcttattgaagtcagttcaggggattatttggg

SEQ ID NO: 595650 - DNA, 75 bp, synthetic construct
  source 1..75: mol_type = other DNA
accgaacccgcactgctttaatgctgggcatcagtcgccgtgcattgatgtataaactccaggaatacggtatcg

SEQ ID NO: 595651 - DNA, 75 bp, synthetic construct
  source 1..75: mol_type = other DNA
taaggtggccaggttgtgtgtggatgcgggctggctgaaagccggtgaggacgggcggacacaaaacagcatacg

SEQ ID NO: 595652 - DNA, 75 bp, synthetic construct
  source 1..75: mol_type = other DNA
tggcgggctaccggcaatgcgctggaaggaacggcgagccgtcgcaatgatgcgaccctgatgctcgatgagatc

SEQ ID NO: 595653 - DNA, 75 bp, synthetic construct
  source 1..75: mol_type = other DNA
caggttgagcgattaggcagcaaccgacaaattaaactcaattttcgcctgattgcctgcaccaataaaaacctt

SEQ ID NO: 595654 - DNA, 75 bp, synthetic construct
  source 1..75: mol_type = other DNA
aaaatatattcacaccgtagcctttggtgaaaatgaaagcgcaccctatgtcggcgtgaactgcgcggcgatccc

SEQ ID NO: 595655 - DNA, 75 bp, synthetic construct
  source 1..75: mol_type = other DNA
atgagtaattctttgttacctccatcagccagctttttcatgcgttgtgccgaagctgtcggatctcgcattaca

SEQ ID NO: 595656 - DNA, 75 bp, synthetic construct
  source 1..75: mol_type = other DNA
aatgccccattacgcaccgctggctcaagtcagcggtagtatcgaccttaacggtaccattttacctgagtaccg

SEQ ID NO: 595657 - DNA, 75 bp, synthetic construct
  source 1..75: mol_type = other DNA
gtgcgatggatcatgacaccgcatatgttgaggcggtcggatcggtgaacacctgtgaagtactgaaatatctgg

SEQ ID NO: 595658 - DNA, 75 bp, synthetic construct
  source 1..75: mol_type = other DNA
cgaagccggtattgcaccgcaaacaccaggtgggccattcctggcctggcgttttcggccagaaaatcaggatgc

SEQ ID NO: 595659 - DNA, 75 bp, synthetic construct
  source 1..75: mol_type = other DNA
gaatgtggctaaaacgatagggaaaaggttgtacggtatcctgaacgccatgcgccatggcgtatcaaacggaaa

SEQ ID NO: 595660 - DNA, 75 bp, synthetic construct
  source 1..75: mol_type = other DNA
ccgtcggggcaggaaaaacaacgctttttaatgcgttgcagggaaattattcccttgccagaaaaacgcaggctg

SEQ ID NO: 595661 - DNA, 75 bp, synthetic construct
  source 1..75: mol_type = other DNA
atgaaacgaattgcgtttgtgggtaccgtcggggcaggaaaaacaacgttatttaatgcgttgcaggggaattat

SEQ ID NO: 595662 - DNA, 75 bp, synthetic construct
  source 1..75: mol_type = other DNA
accctgtcggtggtggcgaaaacccgccgtaacctggaagcggatgtgacgctgttctgcgatgtcctgtgtgat

SEQ ID NO: 595663 - DNA, 75 bp, synthetic construct
  source 1..75: mol_type = other DNA
ctgttatcacagataaactgaagcacaccaaaattaacctgattctcatggaagctaccggtggccttgaagcag

SEQ ID NO: 595664 - DNA, 75 bp, synthetic construct
  source 1..75: mol_type = other DNA
tgggagggagcaacggttgtattacgggaaccttctgcagaagcctggttgcgctggcaggagatcgttaaagca

SEQ ID NO: 595665 - DNA, 75 bp, synthetic construct
  source 1..75: mol_type = other DNA
tgaacaggtgattgccgtgtatggcccggtgcatgcccggcttcttcgccagtctctggaactgatcagtgatgc

SEQ ID NO: 595666 - DNA, 75 bp, synthetic construct
  source 1..75: mol_type = other DNA
tgcgatgtcctgtgtgatacggacctgcaacgggtgttcactccggacgaccgtgagcaggtgctggccgtctat

SEQ ID NO: 595667 - DNA, 75 bp, synthetic construct
  source 1..75: mol_type = other DNA
aggccgagcgtaatgacatggtggaatactttggcgagcatctggatggctttgtctttacgcaaaacggttggg

SEQ ID NO: 595668 - DNA, 75 bp, synthetic construct
  source 1..75: mol_type = other DNA
ctcgacacgattactgcgctgcctgttcaggggctgcatgtggaccttgtacatggtaaagatgacgttgctgaa

SEQ ID NO: 595669 - DNA, 75 bp, synthetic construct
  source 1..75: mol_type = other DNA
gcctcatcttctgactttaatggcgctcagggtgcagcaatattggcgcatcaacgttttttgccacagtcctgt

SEQ ID NO: 595670 - DNA, 75 bp, synthetic construct
  source 1..75: mol_type = other DNA
aagcgcgcggtattcgtgatgcaaccagcgccacgacaacaacctccctcggtggtttgtttaaatccagtcaga

SEQ ID NO: 595671 - DNA, 75 bp, synthetic construct
  source 1..75: mol_type = other DNA
acagtgcgcgatatcactctgaccagcacctgtgaacaccactttgtcaccattgatggcaaagcgacggtggct

SEQ ID NO: 595672 - DNA, 75 bp, synthetic construct
  source 1..75: mol_type = other DNA
ggatatgtcgctgtggccgtcggtggatatctttgtcccgacttacaacgaagatctcaacgtggtgaaaaatac

SEQ ID NO: 595673 - DNA, 75 bp, synthetic construct
  source 1..75: mol_type = other DNA
acccacttaccggtaaagggctgaagttcgcgcaacggctgtgctatgtcaacgccatgttccactttttgtcgg

SEQ ID NO: 595674 - DNA, 75 bp, synthetic construct
  source 1..75: mol_type = other DNA
tctcttgccgttatatctggtggcgttacacctccacgctgaactgggatgatccggtcagtctggtgtgcggtt

SEQ ID NO: 595675 - DNA, 75 bp, synthetic construct
  source 1..75: mol_type = other DNA
ttactgcgcgtggatgcaggcagttggtacagcaaagcgtttaaaggcgagccgttgcctttgctttcgcaggtg

SEQ ID NO: 595676 - DNA, 75 bp, synthetic construct
  source 1..75: mol_type = other DNA
ggcgaccgaaagtctgtcggcgcatatcggtcagcgtattcgctgggcgcgtgggatggtgcaaatcttccgtct

SEQ ID NO: 595677 - DNA, 75 bp, synthetic construct
  source 1..75: mol_type = other DNA
taacgtcaccgccaaaggtggactggtggaagaagagtacgtcgactgggtgatctcgcggccctacatcttcct

SEQ ID NO: 595678 - DNA, 75 bp, synthetic construct
  source 1..75: mol_type = other DNA
acgggcgtgatttccgatcttggtgggccaactgccaacatgtatatgttgcgctgcaaatcgccacgcgctgaa

SEQ ID NO: 595679 - DNA, 75 bp, synthetic construct
  source 1..75: mol_type = other DNA
ccgtcgccgttggctaactccaccaccatgtattacaccgggaaaaacccgctggcgaagattgattataaaagt

SEQ ID NO: 595680 - DNA, 75 bp, synthetic construct
  source 1..75: mol_type = other DNA
gatgaagatatggtgaatctggcgctgtggctgaaaaagcatcgcttccgtctcgaccaggtacagaacttctac

SEQ ID NO: 595681 - DNA, 75 bp, synthetic construct
  source 1..75: mol_type = other DNA
gggaagctggccaccttgcgtcttggtttcgacattcttacccggtcaatgaatgtcatcagggtgttgcctgcg

SEQ ID NO: 595682 - DNA, 75 bp, synthetic construct
  source 1..75: mol_type = other DNA
ctggatgtcccggcacaagttagtgaaaaaaatttaaccccgccgccgggtaacagcagtggcaaccttgagtaa

SEQ ID NO: 595683 - DNA, 75 bp, synthetic construct
  source 1..75: mol_type = other DNA
caagcttcgggatggcgatttgcggtcgtatgctggaagcgcagggctttcgtgtcgggatcattgcccaaccgg

SEQ ID NO: 595684 - DNA, 75 bp, synthetic construct
  source 1..75: mol_type = other DNA
tcgtcgcccatcgtggcggcggtaaactggccccggagaacaccctggcagcaatcgacgtcggggcaaaatacg

SEQ ID NO: 595685 - DNA, 75 bp, synthetic construct
  source 1..75: mol_type = other DNA
gctgcgtctgctgaccaaagcactgcgtccgctgccggataaattccacggcttgcaggatcaggaagcgcgcta

SEQ ID NO: 595686 - DNA, 75 bp, synthetic construct
  source 1..75: mol_type = other DNA
tgtggcctgaaaacgcgcggctggccagaaacccgcgccgcgctggcgaacatggtgcaggcggcgcagaatttg

SEQ ID NO: 595687 - DNA, 75 bp, synthetic construct
  source 1..75: mol_type = other DNA
tggaaacgcgtcttgatgcagaagtgaaaagctggtttgccttcgccctgcaaaaatgtcatgaactggcactgc

SEQ ID NO: 595688 - DNA, 75 bp, synthetic construct
  source 1..75: mol_type = other DNA
tctgggtcgtatcgtcactgagatcttcgacgaagtggcagaagcgaatctgattcaaccgaccttcattactga

SEQ ID NO: 595689 - DNA, 75 bp, synthetic construct
  source 1..75: mol_type = other DNA
aaatcaccgatcgctttgaattctttattggcggtcgtgagattggtaacggctttagcgaactgaacgatgcag

SEQ ID NO: 595690 - DNA, 75 bp, synthetic construct
  source 1..75: mol_type = other DNA
gcgcgtcgtaacgacgtcaacccggaaatcaccgatcgctttgaattctttattggcggtcgtgagattggtaac

SEQ ID NO: 595691 - DNA, 75 bp, synthetic construct
  source 1..75: mol_type = other DNA
tatcgacaccctgttccgtattggtcgtggacgtgcgccgactggcgaacctgcggcggcagcggaaatgaccaa

SEQ ID NO: 595692 - DNA, 75 bp, synthetic construct
  source 1..75: mol_type = other DNA
accccagcgcgcggcagagctgctacgctggggcgtggattgcatctgtaccgatgctattgacgtgataggtcc

SEQ ID NO: 595693 - DNA, 75 bp, synthetic construct
  source 1..75: mol_type = other DNA
gccgctgctgtcatcgtttgagattgatgctttagaagccgcgcaacaggcagcaccggaactgccgcgtggttt

SEQ ID NO: 595694 - DNA, 75 bp, synthetic construct
  source 1..75: mol_type = other DNA
ctattttgaaggcgtaacgccaaacctcgacacgattactgcgctgcctgttcaggggctgcatgtggaccttgt

SEQ ID NO: 595695 - DNA, 75 bp, synthetic construct
  source 1..75: mol_type = other DNA
caaaaatgccatgaactggcactgctgcgcgatgcgctgaacagtggtgacacggcagctctggcagagtggagc

SEQ ID NO: 595696 - DNA, 75 bp, synthetic construct
  source 1..75: mol_type = other DNA
ccggcactgcgcgaaggtttaccgctgcgtcgcagcgactgggatgcctatctccagtggggcgtggaggctttc

SEQ ID NO: 595697 - DNA, 75 bp, synthetic construct
  source 1..75: mol_type = other DNA
agacgcctgctacggcaaaaaaagcgtcgtctacgcaatctcgcctgcagaatgctggtgcgaagaaacgcccta

SEQ ID NO: 595698 - DNA, 75 bp, synthetic construct
  source 1..75: mol_type = other DNA
ggcggtatggaccttggcgagacggcagatattggctcaaatatcctgacgcagttcggcctctccgctgaccag

SEQ ID NO: 595699 - DNA, 75 bp, synthetic construct
  source 1..75: mol_type = other DNA
gacgcgaatcgacaaaaacagcccgcagtttaaggcgctgcgtgagcaggcgttaaaacttggctctgaaacgca

SEQ ID NO: 595700 - DNA, 75 bp, synthetic construct
  source 1..75: mol_type = other DNA
tgccgctgcgcgtccgttcatcacccaccataacgcgctggatctcgacatgtacctgcgtatcgcgccggaact

SEQ ID NO: 595701 - DNA, 75 bp, synthetic construct
  source 1..75: mol_type = other DNA
ggcggttctcatctggaaatactgggaacccatcaaggcgttttatgcaggggtgttcagtgggattatggaacg

SEQ ID NO: 595702 - DNA, 75 bp, synthetic construct
  source 1..75: mol_type = other DNA
cgcagtggctcacgcgggtggtatcaaaggtgacggcgctggcgcaggcccatccggcactgacgcgccagctac

SEQ ID NO: 595703 - DNA, 75 bp, synthetic construct
  source 1..75: mol_type = other DNA
aactggcgaaactgattggcgaaatggtcagggcagaaatggaacggcgcgcccgtgccgggcgtggcagttttt

SEQ ID NO: 595704 - DNA, 75 bp, synthetic construct
  source 1..75: mol_type = other DNA
gcgcgcgcaggaaacagcgggaaaactgaaaacaggtggtgcgctggcaattggtgcggcaacggcgggcggcta

SEQ ID NO: 595705 - DNA, 75 bp, synthetic construct
  source 1..75: mol_type = other DNA
ggtagccagcgccattggttctctttataagatgaacgcgtcgatttctggtgccgaagtcggctgccagggtga

SEQ ID NO: 595706 - DNA, 75 bp, synthetic construct
  source 1..75: mol_type = other DNA
ggtaaagatatgaacgccaagtaccgcgaaacctctcgcggcggcctggcaatgaagatcgttgcctgcgattaa

SEQ ID NO: 595707 - DNA, 75 bp, synthetic construct
  source 1..75: mol_type = other DNA
gacgacgaagcgatgttctacgatgaagattacgtcaccgcactggaacatggcttaccgccgacagcaggtctg

SEQ ID NO: 595708 - DNA, 75 bp, synthetic construct
  source 1..75: mol_type = other DNA
gtctctggttattggggtgcttcacgggaagctggctacgttacgtctcggtttttctctcctgacaggatcaat

SEQ ID NO: 595709 - DNA, 75 bp, synthetic construct
  source 1..75: mol_type = other DNA
attgctgctgcgtttgtggctgcggcagttctcatctggaaatactgggaacccatcaaggcgttttatgccggg

SEQ ID NO: 595710 - DNA, 75 bp, synthetic construct
  source 1..75: mol_type = other DNA
ggggccaccgtcgcgacgttgccggttatgctgcgggtctggagctgttcgaccgtcgtctgccggagctgatgt

SEQ ID NO: 595711 - DNA, 75 bp, synthetic construct
  source 1..75: mol_type = other DNA
caggacgtcaccgaatatctgcaacagttgctggagcgtgagcgcgaggcgattgttgaacgcgatgaagtaggc

SEQ ID NO: 595712 - DNA, 75 bp, synthetic construct
  source 1..75: mol_type = other DNA
cattattcgcaaaaccattcagcgcgaacagaaccgtatccgtatgctcaaccagggtttgcagaacgtatcgtt

SEQ ID NO: 595713 - DNA, 75 bp, synthetic construct
  source 1..75: mol_type = other DNA
cgttagccttgaagacgcgccgtacttctctgcgctatatggcccgtctcgtcacgcgatcgtcgtgccggatct

SEQ ID NO: 595714 - DNA, 75 bp, synthetic construct
  source 1..75: mol_type = other DNA
agagcacaacggtgccgaaggcgatctggaagcggattatcaggcagccagcgatcacctgaacctggtgcaaac

SEQ ID NO: 595715 - DNA, 75 bp, synthetic construct
  source 1..75: mol_type = other DNA
aagaactgtgccatctgccggacttaaccgccgacagcgccgccgaatggctggaaaccttccaggcgaaagagc

SEQ ID NO: 595716 - DNA, 75 bp, synthetic construct
  source 1..75: mol_type = other DNA
cgatggaaggcgtgcagtttaaacagttcaactccattaccgattaccactcgctgatgttcgatctgggcatca

SEQ ID NO: 595717 - DNA, 75 bp, synthetic construct
  source 1..75: mol_type = other DNA
aaactgaccatgcgtgaagcgatcaagaaatatcgcccggaaactgacatggcggatctggacaacttcgactct

SEQ ID NO: 595718 - DNA, 75 bp, synthetic construct
  source 1..75: mol_type = other DNA
aacttcgttgacttcgactcttcctggggccaccgccgcgacgtcgccggttatgctgcgggtctggaactgttc

SEQ ID NO: 595719 - DNA, 75 bp, synthetic construct
  source 1..75: mol_type = other DNA
accggtctggacgcgctgtttgacgccaccattaaagagatgaaggaagcaggtgataacaccatcgtcttcact

SEQ ID NO: 595720 - DNA, 75 bp, synthetic construct
  source 1..75: mol_type = other DNA
gacgagctggtcacgacgctttctggcggtaacggggcgggtaaatccaccaccatggcggcgttcgttacggcg

SEQ ID NO: 595721 - DNA, 75 bp, synthetic construct
  source 1..75: mol_type = other DNA
gtggcgagagaaaatctggagcgtctgcgggtgctgctcgatgaggcacgaatcaacctgctggagcgtcgttat

SEQ ID NO: 595722 - DNA, 75 bp, synthetic construct
  source 1..75: mol_type = other DNA
agtgacggattactatctgaagaacgagaaagcaaacgttgaaagtgtctttacggttaacggctttagcttcag

SEQ ID NO: 595723 - DNA, 75 bp, synthetic construct
  source 1..75: mol_type = other DNA
aaatgatagatatatattagacattctcattgattacccgggtataagaacgttaattcctgaaccaaaatattc

SEQ ID NO: 595724 - DNA, 75 bp, synthetic construct
  source 1..75: mol_type = other DNA
agacatggcccattttagggggtatatgtcaatgaatagcttacaatatgcaggtgtgagagaaaccgaattact

SEQ ID NO: 595725 - DNA, 75 bp, synthetic construct
  source 1..75: mol_type = other DNA
aactagaaataatcagaaacataataagagagtcgttactgggaaatgcggcaattattgcgctgatatatgcag

SEQ ID NO: 595726 - DNA, 75 bp, synthetic construct
  source 1..75: mol_type = other DNA
cttcgctgatttatttatgacagttctgttatttatagcaattatcgttgttgtgatatggatatttttaatcac

SEQ ID NO: 595727 - DNA, 75 bp, synthetic construct
  source 1..75: mol_type = other DNA
ccccagtaaaaattgcgaattcattctataccaaaaaaaaattggaagaccaaataaattataaaaaaataaaaa

SEQ ID NO: 595728 - DNA, 75 bp, synthetic construct
  source 1..75: mol_type = other DNA
ttcaaaggcgaactgaaccgccccgggtttcctggagagtgttttatctgtgaactcaggctgccagatcatcgt

SEQ ID NO: 595729 - DNA, 75 bp, synthetic construct
  source 1..75: mol_type = other DNA
gtgcccgcagtgacagaggatactcttgcgaaaatcgaacaacttaccggtgtgcgcgatcctgctggcgttgcc

SEQ ID NO: 595730 - DNA, 75 bp, synthetic construct
  source 1..75: mol_type = other DNA
aatgccttccctgactatcttgtaataagtttattaagtatcgcagcaggcatcgttgtattatggttattttca

SEQ ID NO: 595731 - DNA, 75 bp, synthetic construct
  source 1..75: mol_type = other DNA
attctcgttatcagcgacgcgacgaaagcaatccgtaaaatgaacggatacacctacacgctcagggaaaacggg

SEQ ID NO: 595732 - DNA, 75 bp, synthetic construct
  source 1..75: mol_type = other DNA
gcaattattgcgctgatatatgcagcatcacattcattaccggtcaatgctttccctgactatcttgtaataagt

SEQ ID NO: 595733 - DNA, 75 bp, synthetic construct
  source 1..75: mol_type = other DNA
cagcggtgataccggactgcgcgacgtccagcgtctggcagaagctaacgactttcctcccgtcgatgaaaccaa

SEQ ID NO: 595734 - DNA, 75 bp, synthetic construct
  source 1..75: mol_type = other DNA
tgaaaccgaaggcgaacgcatcgggcaaattaacgccctttcggtcattgaatttccgggtcatccgcgcgcttt

SEQ ID NO: 595735 - DNA, 75 bp, synthetic construct
  source 1..75: mol_type = other DNA
ctggcacaaagcagaccatgagaagatagacgctataacatttgagtcctaccaatcgatctgttcattgccatg

SEQ ID NO: 595736 - DNA, 75 bp, synthetic construct
  source 1..75: mol_type = other DNA
cataagccgtttaatccacaaaccttcagcaatgcgttgacccatttttcaatgttagcggtattagtgtttggt

SEQ ID NO: 595737 - DNA, 75 bp, synthetic construct
  source 1..75: mol_type = other DNA
gaaaggaaagggttattggaagatgcaaaaaaaatggcccaaatggcatatagtctatcccctgaaagtgaaaca

SEQ ID NO: 595738 - DNA, 75 bp, synthetic construct
  source 1..75: mol_type = other DNA
tgcatggtcgcctgtccgtacaacgtgccgaagtacgactacaacaacccgtttggtgcgctgcataagtgcgag

SEQ ID NO: 595739 - DNA, 75 bp, synthetic construct
  source 1..75: mol_type = other DNA
ttggcatcgacggtattagcctgaccgtcggcgaagtcacgccaacgcgtttttgcgtccatttaattccggaaa

SEQ ID NO: 595740 - DNA, 75 bp, synthetic construct
  source 1..75: mol_type = other DNA
aactataaaacatccaaatagcgttgtttatgatcatactatgataggtagtggcgctattatttctccctttgt

SEQ ID NO: 595741 - DNA, 75 bp, synthetic construct
  source 1..75: mol_type = other DNA
gcagcagcgtgaatggcgcgaaggtttcctcgctgaacgtatgcaggatgagatccttcaggagcaaatcctgat

SEQ ID NO: 595742 - DNA, 75 bp, synthetic construct
  source 1..75: mol_type = other DNA
gtcagtaagccagtggtgtcgctgggtgacatttaccgccagacataatcacttacctgcaccgggagcggatgc

SEQ ID NO: 595743 - DNA, 75 bp, synthetic construct
  source 1..75: mol_type = other DNA
ataattttgcgactttaacgcaggttgtcgctgccgactgggtagaagcggaacaactctttggctgcctgcgcc

SEQ ID NO: 595744 - DNA, 75 bp, synthetic construct
  source 1..75: mol_type = other DNA
gctgcagctacacatcctaaaattaaattattacaatttaaattaataccttaccctggtatgaataaggcaatt

SEQ ID NO: 595745 - DNA, 75 bp, synthetic construct
  source 1..75: mol_type = other DNA
ggtggtttaaatgagaaaatcgaaggcttctttgctatttgccagcaacgtgagttaacggggaaacaaggtgtc

SEQ ID NO: 595746 - DNA, 75 bp, synthetic construct
  source 1..75: mol_type = other DNA
ttaccgatatcgaacgcaaggccgagcttggcggcaacatacacgctaaagggatgatgatcatgcaggcgttcc

SEQ ID NO: 595747 - DNA, 75 bp, synthetic construct
  source 1..75: mol_type = other DNA
gttctatggttcttggcggcattcatgttcaatttagtaaaaattatgctgtgcagttcggaggccgcaattccg

SEQ ID NO: 595748 - DNA, 75 bp, synthetic construct
  source 1..75: mol_type = other DNA
ggcaccgaagagatttatttcgccacgttccatctcggcgtggatggcggcatcgaagttacagccagccataat

SEQ ID NO: 595749 - DNA, 75 bp, synthetic construct
  source 1..75: mol_type = other DNA
ataagccggtggtttgcagaaggttatgtcctgcatctgctgattattgccgtcattgtttatgggctgcagact

SEQ ID NO: 595750 - DNA, 75 bp, synthetic construct
  source 1..75: mol_type = other DNA
ggcaccgaagagatttatttcgccacgttccatctcggcgtggatggcggcatcgaagttactgccagccataaa

SEQ ID NO: 595751 - DNA, 75 bp, synthetic construct
  source 1..75: mol_type = other DNA
ggcaccgaagagatctatttcgccacgttccatctcggcgtggatggcggcatcgaagttaccgccagccataac

SEQ ID NO: 595752 - DNA, 75 bp, synthetic construct
  source 1..75: mol_type = other DNA
ggcaccgaagagatttatttcgccacgttccatctcggcgtggatggcggcatagaagttactgccagccataac

SEQ ID NO: 595753 - DNA, 75 bp, synthetic construct
  source 1..75: mol_type = other DNA
ggcaccgaagagatttatttcgccacgttccatctcggcgtggatggcggcatagaagttaccgccagccataat

SEQ ID NO: 595754 - DNA, 75 bp, synthetic construct
  source 1..75: mol_type = other DNA
cgggcaacctgtcagtaaaactgactgcaacatgggaaggaaaatctccagagtattggatcagttggcgacgtt

SEQ ID NO: 595755 - DNA, 75 bp, synthetic construct
  source 1..75: mol_type = other DNA
aggcaaaggttgatgatgatatttctgctgcaatacgtagtgagcaggaggcccgagcaagcggggactctgcgt

SEQ ID NO: 595756 - DNA, 75 bp, synthetic construct
  source 1..75: mol_type = other DNA
ttcaaaagctctgtcgtcagcggaaacgcctgttttgaacggtgtctggacaattacagaaccagatctcgaacc

SEQ ID NO: 595757 - DNA, 75 bp, synthetic construct
  source 1..75: mol_type = other DNA
accgtgaactggtcgcgtcactgagcgaacgcctgcgcaatggcgaacgtgatatcgacgcactggtggaacagg

SEQ ID NO: 595758 - DNA, 75 bp, synthetic construct
  source 1..75: mol_type = other DNA
agaatggacgctacgacttccaactgtatgcggtttcattcaacggtaaaaaaacagagattatcagtaccgttt

SEQ ID NO: 595759 - DNA, 75 bp, synthetic construct
  source 1..75: mol_type = other DNA
agatagcaaatggcgactcaacatttgtagatgtggtcgctgaaggggaaaaaagcgttggcattaagctaacag

SEQ ID NO: 595760 - DNA, 75 bp, synthetic construct
  source 1..75: mol_type = other DNA
ttgctggcgggattattgatgctgacggatttcgcctggcaggcggcggttgtcggtggcattggccttgcgatg

SEQ ID NO: 595761 - DNA, 75 bp, synthetic construct
  source 1..75: mol_type = other DNA
ccgttctgctcaggttcagactccggcaggcctgacggatactgagtccgaatgtcgttatcagatgagtgccca

SEQ ID NO: 595762 - DNA, 75 bp, synthetic construct
  source 1..75: mol_type = other DNA
tatgccagcagcactttccgcatttgcatattcttgcgcgagcgcgcgagcgcgcggacgtgtggaagcgcatga

SEQ ID NO: 595763 - DNA, 75 bp, synthetic construct
  source 1..75: mol_type = other DNA
cgagccggaagacaccatgaagctggtggaaatatgccagcagcactttccgcatttgcatattcttgcgcgagc

SEQ ID NO: 595764 - DNA, 75 bp, synthetic construct
  source 1..75: mol_type = other DNA
ttgttcacttttgttgccggtggcgtggtttgtgttggaacatcgctggtcgatttatttaaccgttttctgttc

SEQ ID NO: 595765 - DNA, 75 bp, synthetic construct
  source 1..75: mol_type = other DNA
gtgtttctctgtggtattggcgtgattggagtgcaatttttgattgcagcagggtggttaccagaagtggggtga

SEQ ID NO: 595766 - DNA, 75 bp, synthetic construct
  source 1..75: mol_type = other DNA
tgtctgcaatcccggtgatttttacgtcgtttggttttcacggtagcgtgccgagtattgtcagctatatggatg

SEQ ID NO: 595767 - DNA, 75 bp, synthetic construct
  source 1..75: mol_type = other DNA
cgctggggctgtcgatggcgctcggtacgtttattgcgggcgtgctgctggcggaaagtgaatatcgccatgaac

SEQ ID NO: 595768 - DNA, 75 bp, synthetic construct
  source 1..75: mol_type = other DNA
ttcgactggatgaaggtcggtatgaaggtgctggcgtttgtcggcatgctgattggcgggcgctatttgttacgt

SEQ ID NO: 595769 - DNA, 75 bp, synthetic construct
  source 1..75: mol_type = other DNA
tatgccagcagcactttccgcatttacatattcttgcgcgagcgcgcgagcgcgcggacgtgtggaggcgcatga

SEQ ID NO: 595770 - DNA, 75 bp, synthetic construct
  source 1..75: mol_type = other DNA
tggatacaaagtttattacggcgacgccacgcaggtcgatcttttacgttctgcgggagcagaggccgctgagtc

SEQ ID NO: 595771 - DNA, 75 bp, synthetic construct
  source 1..75: mol_type = other DNA
gtggataaatggctatcccgccagttcaacaccccggaagaagaggatgaaaaaccgtgggtaaacgatgataaa

SEQ ID NO: 595772 - DNA, 75 bp, synthetic construct
  source 1..75: mol_type = other DNA
acgatgataaaccgcaggtcattgtcgtgggctttgggcgttttggtcaggtgattggtcgtttgctgatggcaa

SEQ ID NO: 595773 - DNA, 75 bp, synthetic construct
  source 1..75: mol_type = other DNA
agttttgtcactccccataagtcctgtgatgagtcatgatgaggtagaatatgttatcaatgtattgaatcgata

SEQ ID NO: 595774 - DNA, 75 bp, synthetic construct
  source 1..75: mol_type = other DNA
cgccagtatggtcgccagttaaatatcgtgcttgcactgttgctggtctattgcgcggtacgcattttctattaa

SEQ ID NO: 595775 - DNA, 75 bp, synthetic construct
  source 1..75: mol_type = other DNA
gggcatctgtttcagcgattgtttcgccagtatggtcgccagttaaatatcgtgctggcgctgctgctgatctag

SEQ ID NO: 595776 - DNA, 75 bp, synthetic construct
  source 1..75: mol_type = other DNA
ccacaacgaagttctaagtatcccaatcggaccaacaatgactaatgaagaaatatctaaagtcattgaagcatg

SEQ ID NO: 595777 - DNA, 75 bp, synthetic construct
  source 1..75: mol_type = other DNA
aaaatggtattcaaacattgatccattaccctattcctcctcataaacaacaggcatacagccaatataaacaac

SEQ ID NO: 595778 - DNA, 75 bp, synthetic construct
  source 1..75: mol_type = other DNA
gccggggcttggggaaatgcagccgggtttagtttttatccaggaaaaaacttaggtgcaataggtgatgctggt

SEQ ID NO: 595779 - DNA, 75 bp, synthetic construct
  source 1..75: mol_type = other DNA
gattatttcaattacgcagaataacttagttcctatattagttgagccagactctcaaacttttaatcttaccta

SEQ ID NO: 595780 - DNA, 75 bp, synthetic construct
  source 1..75: mol_type = other DNA
tagctagaaagtatactgcagaaattagcaataaatacatgtcattaccttcatacactgacgatttatcacatg

SEQ ID NO: 595781 - DNA, 75 bp, synthetic construct
  source 1..75: mol_type = other DNA
ttcatctatatggccaaatgtcaccgatgaaagcgataatggaaatcgctaatgaatataatttgttagtattag

SEQ ID NO: 595782 - DNA, 75 bp, synthetic construct
  source 1..75: mol_type = other DNA
gacggacttcagacaaaaccaatcagtttttgggccagctttgctttgcagtttgtgaacgtcaaaatcattttg

SEQ ID NO: 595783 - DNA, 75 bp, synthetic construct
  source 1..75: mol_type = other DNA
ccaatcagcttttgggccagctttgctttgcagtttgtgaacgtcaaaatcattttgtacggtgttacggcactg

SEQ ID NO: 595784 - DNA, 75 bp, synthetic construct
  source 1..75: mol_type = other DNA
tttggacttacaccctgattaccgctatgacgccaggaccgaacaatattctcgcccttagctctgctacgtcgc

SEQ ID NO: 595785 - DNA, 75 bp, synthetic construct
  source 1..75: mol_type = other DNA
agcgcttggcgatgctggtgctatcaccactaatgatgaggagttatacaaggttattaaggcgcttagaaacta

SEQ ID NO: 595786 - DNA, 75 bp, synthetic construct
  source 1..75: mol_type = other DNA
gccttgcgattgtgaagtcaatcgtggaagcacatcacggaagagtgcaggtggaatcagacgtacgctccacgc

SEQ ID NO: 595787 - DNA, 75 bp, synthetic construct
  source 1..75: mol_type = other DNA
attcatgtcacttgcaaccacagtgaaggagagcaagttacagaggcgcatgtacacgcagcaggcgtaaatgta

SEQ ID NO: 595788 - DNA, 75 bp, synthetic construct
  source 1..75: mol_type = other DNA
aaggagagcaagttacagagacgcatgtacacgcagaaagctctctggtatcgccattgaaccgccccggaaatc

SEQ ID NO: 595789 - DNA, 75 bp, synthetic construct
  source 1..75: mol_type = other DNA
caaattcgcgaaagcgctgccattatcgcccatacgcaaaaacgtctgcttccgccaccggtgacccgccctgtg

SEQ ID NO: 595790 - DNA, 75 bp, synthetic construct
  source 1..75: mol_type = other DNA
ttctgccgtcattactcagcagctgtacggcatttaatgccacgcctgttcctgacaccacacctccggctctgg

SEQ ID NO: 595791 - DNA, 75 bp, synthetic construct
  source 1..75: mol_type = other DNA
aaatatcacaaaattgttattccactgccctttttaccattaactttgccacttcacccatccatgcagaaaata

SEQ ID NO: 595792 - DNA, 75 bp, synthetic construct
  source 1..75: mol_type = other DNA
gttaagcattgtatcggggtcgcaaatggccttgatgcgttagttttggttttaaaagcatggaagttaatgaat

SEQ ID NO: 595793 - DNA, 75 bp, synthetic construct
  source 1..75: mol_type = other DNA
tgcatttgtatggacaaatatctccaatggcagaaataatggagattgcggcagagtttggtttattggttttag

SEQ ID NO: 595794 - DNA, 75 bp, synthetic construct
  source 1..75: mol_type = other DNA
ttgctcaatattacattgattcaataataaatcctttagtccaattgccgaaatcatgcagtaattatgatgaaa

SEQ ID NO: 595795 - DNA, 75 bp, synthetic construct
  source 1..75: mol_type = other DNA
tgatgaaatattatcacttccaattggtagctttttatctattgaagatgctgactatatagtatcattaatgcg

SEQ ID NO: 595796 - DNA, 75 bp, synthetic construct
  source 1..75: mol_type = other DNA
agcggatatactaaatgcaataactaaagttgttgattcggggtggtatattcaaggtgaagaagtcagaaattt

SEQ ID NO: 595797 - DNA, 75 bp, synthetic construct
  source 1..75: mol_type = other DNA
cagatgtatggtaagtttttaaaatataaaactgatattgataatgattctctaatgaaagccagaggtgataaa

SEQ ID NO: 595798 - DNA, 75 bp, synthetic construct
  source 1..75: mol_type = other DNA
acagcgggttcaaagaatttgtgcgcctgcatcgtgccaatagccatgcgccggaagccgtagtggaaggggcgt

SEQ ID NO: 595799 - DNA, 75 bp, synthetic construct
  source 1..75: mol_type = other DNA
atcccgaagtctttagctgggcagctacacaagttgttaccgcgatggaagcaacgcataaactgggtggtgaaa

SEQ ID NO: 595800 - DNA, 75 bp, synthetic construct
  source 1..75: mol_type = other DNA
atgcaagcctattttgaccagctcgatcgcgttcgttatgaaggtccgaaatcctctaacccgttagcattccgt

SEQ ID NO: 595801 - DNA, 75 bp, synthetic construct
  source 1..75: mol_type = other DNA
accttctgctggaacggggcggacatgtttggtgtgggggcgtttaatcgtccgtggcagcagcctggtgaggca

SEQ ID NO: 595802 - DNA, 75 bp, synthetic construct
  source 1..75: mol_type = other DNA
ttaaaactctaatttctaaagagagaaagtcgcattttattacgccatttgctttggtttataaaacattttgtg

SEQ ID NO: 595803 - DNA, 75 bp, synthetic construct
  source 1..75: mol_type = other DNA
tatttgagacccgccttaaacccactgtcgacatcgatccggcagcagctgcagtacacggtatcagtgacgatg

SEQ ID NO: 595804 - DNA, 75 bp, synthetic construct
  source 1..75: mol_type = other DNA
aaatacggcgtatggcggctggctgactgcgtcccgatgcgggcgaaacgcccacagacagaaaaacagcggcag

SEQ ID NO: 595805 - DNA, 75 bp, synthetic construct
  source 1..75: mol_type = other DNA
atgcccatcatcgaagctgcttgtgcgatatacaacaacatgggcgaacttgctgccagtaatattgttctaccg

SEQ ID NO: 595806 - DNA, 75 bp, synthetic construct
  source 1..75: mol_type = other DNA
aacgacaaactgtcgccgtataccaataacatcattcaggtgtggaccagcggcactggcgtcaacaaagaccag

SEQ ID NO: 595807 - DNA, 75 bp, synthetic construct
  source 1..75: mol_type = other DNA
cgactcgaccttgtgcgtaggctgccaggcttgcgtcaccaagtgtcaggatatcaatttccctgaacgtaaccc

SEQ ID NO: 595808 - DNA, 75 bp, synthetic construct
  source 1..75: mol_type = other DNA
ccgccttactggttatgggaaactggtatcataccagtaatattaatcagtcaatatcaaattcagaagaggggc

SEQ ID NO: 595809 - DNA, 75 bp, synthetic construct
  source 1..75: mol_type = other DNA
gcgcaaacctgccgacagataaactggctaataaaattgatgttgtgcgccgggcgattacgttgaatcaaccaa

SEQ ID NO: 595810 - DNA, 75 bp, synthetic construct
  source 1..75: mol_type = other DNA
ggtattggcgcaaatctgccgacagataaactggcaaacaaagttgatgttgttcgtcgggcaattacgttgaat

SEQ ID NO: 595811 - DNA, 75 bp, synthetic construct
  source 1..75: mol_type = other DNA
caacagtcaatattaaaacaaatagaaaaatatagtgatttcccttatgttgttaattattatagaaataggctt

SEQ ID NO: 595812 - DNA, 75 bp, synthetic construct
  source 1..75: mol_type = other DNA
cccttcagtgccttacgctaatctcggcctgaaaccgcgccagtacgatccgcagaaagcgaaagcgttgctgga

SEQ ID NO: 595813 - DNA, 75 bp, synthetic construct
  source 1..75: mol_type = other DNA
tttagataagggtttaacccctgttttattgttgagcaataaagagcaaataaaaagaaccattaattcatatac

SEQ ID NO: 595814 - DNA, 75 bp, synthetic construct
  source 1..75: mol_type = other DNA
cttaggcaatttcctaaaaaatactttcgtcatcggctatgaattgtctgagcaaacaaaaagcatattggataa

SEQ ID NO: 595815 - DNA, 75 bp, synthetic construct
  source 1..75: mol_type = other DNA
agtcatttctttacctataagtccggtaatgagtgaagatgatgtcaattatgtaatcaaagtggtcaatgatta

SEQ ID NO: 595816 - DNA, 75 bp, synthetic construct
  source 1..75: mol_type = other DNA
gtgtctcatcgttcagaatttcagcacgtaatgactgaaatacgtaataaccctgtaaaatttctggaagagcat

SEQ ID NO: 595817 - DNA, 75 bp, synthetic construct
  source 1..75: mol_type = other DNA
atagtgaatcctggctcgaacttaaagccagaaatcattcatgatctaaaagattccgcagcacagttaatggcg

SEQ ID NO: 595818 - DNA, 75 bp, synthetic construct
  source 1..75: mol_type = other DNA
gctgtcatatatatttctctctttcgccgtgaaaaaaatagcacttggcgtggcttatgctctgtgggaaggtat

SEQ ID NO: 595819 - DNA, 75 bp, synthetic construct
  source 1..75: mol_type = other DNA
atggctggtagtgattatattctgtttacaggtatgcgtgatactgatagtccggaacgttttgatgcgcctgca

SEQ ID NO: 595820 - DNA, 75 bp, synthetic construct
  source 1..75: mol_type = other DNA
acttattacgggtgaaaaaagcgcatccggtgctgttaatcgccgtcacgttcgtgctttccatcgtttgttccg

SEQ ID NO: 595821 - DNA, 75 bp, synthetic construct
  source 1..75: mol_type = other DNA
tccacgagccgataaaatgagcggtgagtatgtcagttcggaagtcgtcaactggctggataacaaaaaggacag

SEQ ID NO: 595822 - DNA, 75 bp, synthetic construct
  source 1..75: mol_type = other DNA
aaaatccagacattgaaaaacaaatgtatggtaagttcttaaaatataaagccgatattgataatgattcattaa

SEQ ID NO: 595823 - DNA, 75 bp, synthetic construct
  source 1..75: mol_type = other DNA
ggttcctgtccttgagaacaaagcgctaaaacgtgaaaagccattaatcttcggaattgacatgccattccagga

SEQ ID NO: 595824 - DNA, 75 bp, synthetic construct
  source 1..75: mol_type = other DNA
acagatgagaaaatgttgcaacttggtcaagaggcagcggcaattggttattccaatgcaataaaaaatggatta

SEQ ID NO: 595825 - DNA, 75 bp, synthetic construct
  source 1..75: mol_type = other DNA
atggcggagcctcgatcggattatcctttggcccgtatttcccgggattaataaattcaaatgataacgattatt

SEQ ID NO: 595826 - DNA, 75 bp, synthetic construct
  source 1..75: mol_type = other DNA
tcgatatcaccagtgttgatgtacaaaatcaacagcaggtgaaagatgcgatggtgagttacttcatggcaacgc

SEQ ID NO: 595827 - DNA, 75 bp, synthetic construct
  source 1..75: mol_type = other DNA
atgcaggtgttagctatctgacggatggaactatagatcctacaacagcgattatcggtggttgggttaatgtga

SEQ ID NO: 595828 - DNA, 75 bp, synthetic construct
  source 1..75: mol_type = other DNA
ctggcaaacttcatagggcacaatgctggaattaatgataacgatgcagcgaaagccattgctcatgccattctc

SEQ ID NO: 595829 - DNA, 75 bp, synthetic construct
  source 1..75: mol_type = other DNA
aaataacccacagccgaataaagtttatcatgtagatggtgataaaatttataaaactgatgctcaggcaaggcc

SEQ ID NO: 595830 - DNA, 75 bp, synthetic construct
  source 1..75: mol_type = other DNA
gctattcatgcgacaccagaagagattgctaaggcggtcgctgaacgtaaagcccgagaggaagcattgattaaa

SEQ ID NO: 595831 - DNA, 75 bp, synthetic construct
  source 1..75: mol_type = other DNA
tcgatgtcacgcacagcacgacggaacagcatctggtggtggacagaacccatccgctggattatgaggtgttct

SEQ ID NO: 595832 - DNA, 75 bp, synthetic construct
  source 1..75: mol_type = other DNA
ccgctggcgtggaatgtgtttcacggccataacctgctacatgaatattttacctgtccggaacgcttctttttt

SEQ ID NO: 595833 - DNA, 75 bp, synthetic construct
  source 1..75: mol_type = other DNA
gaagtgatcgcgtcagccattgcaaaaagcctctacccggacgtagatccgtcgaaactgacagaagatcagaag

SEQ ID NO: 595834 - DNA, 75 bp, synthetic construct
  source 1..75: mol_type = other DNA
tcatgcgggactcgatgccggcacgctgaataacagtggtgctgttcagggggcttccctgacgctcggcagtac

SEQ ID NO: 595835 - DNA, 75 bp, synthetic construct
  source 1..75: mol_type = other DNA
cagcggagataccggactgcgcgaggtccagcgtctggcagaagctaacgactttccccccgtcgatgaaaccaa

SEQ ID NO: 595836 - DNA, 75 bp, synthetic construct
  source 1..75: mol_type = other DNA
ctggtggaagtagcgcatcgtctggcgatgggcgagccaattagcgaaatccgcgatgtgcgtaataccgcaatt

SEQ ID NO: 595837 - DNA, 75 bp, synthetic construct
  source 1..75: mol_type = other DNA
cagtcttaatggtggtaatacaggttttgtacacagcgatttggtaacgggatttcgtaatggtcacctcattct

SEQ ID NO: 595838 - DNA, 75 bp, synthetic construct
  source 1..75: mol_type = other DNA
ggccatgtttgtattaattaacaacgtttttctaagctttggggaggggtcgttttttttattccttaggtattc

SEQ ID NO: 595839 - DNA, 75 bp, synthetic construct
  source 1..75: mol_type = other DNA
cagcggagataccggactgcgcgatgtccagcgtctggcagaagcaaacgactttccccccgtcgatgaaaccaa

SEQ ID NO: 595840 - DNA, 75 bp, synthetic construct
  source 1..75: mol_type = other DNA
tgctgaaagaagcggattttgaatacctgcttacgcagagcttttcctgcctctctgaatcctccgctaaaacgt

SEQ ID NO: 595841 - DNA, 75 bp, synthetic construct
  source 1..75: mol_type = other DNA
atgagagctgccaccgctactaagccaaaaaaaattgatgctttccgtaaggagccatcggtaaataaaaagtat

SEQ ID NO: 595842 - DNA, 75 bp, synthetic construct
  source 1..75: mol_type = other DNA
tgcccattgaacgtaagccctggtcactcagtgctaatggtggtgaggttataactgctaatggctacacgcgat

SEQ ID NO: 595843 - DNA, 75 bp, synthetic construct
  source 1..75: mol_type = other DNA
ccgcgatgtgcgtaatactgcgattatcgtaaaagaggcgttgctaggctggagcggcgtggattccacccgtct

SEQ ID NO: 595844 - DNA, 75 bp, synthetic construct
  source 1..75: mol_type = other DNA
gatgtttggtaacggtgagcgtccgctggtggaagtggcgcatcgtctggcgatgggcgagccgattagtgaaat

SEQ ID NO: 595845 - DNA, 75 bp, synthetic construct
  source 1..75: mol_type = other DNA
cgatgggcgagccgattagtgaaatccgcgatgtacgtaataccgcgattatcgtgaaagaagcgctacctggct

SEQ ID NO: 595846 - DNA, 75 bp, synthetic construct
  source 1..75: mol_type = other DNA
aatccgaaaattccgtacaggaagaaatcattggtaatctgttacccgcaaatgttatatcaagtaagatgtttg

SEQ ID NO: 595847 - DNA, 75 bp, synthetic construct
  source 1..75: mol_type = other DNA
tttcacgttggctactgacccgaccgcaatttctgattctcgacgagccaacgcgcggaattgatgttggtgccc

SEQ ID NO: 595848 - DNA, 75 bp, synthetic construct
  source 1..75: mol_type = other DNA
tttcgctgtttttcattccgttggcgcattcaaccacgccgaactgcgcaacggaaaagagcaacaccgtcatcg

SEQ ID NO: 595849 - DNA, 75 bp, synthetic construct
  source 1..75: mol_type = other DNA
ggcgcaactccatcccgacccggaagaaggtgatctggcaaaggggttcaccgtaccgcgcagcactgccttttt

SEQ ID NO: 595850 - DNA, 75 bp, synthetic construct
  source 1..75: mol_type = other DNA
cagcggtgataccggactgcgcgaagtccagcgtctggcagaagccaacgactttccccccgtcgatgaaaccaa

SEQ ID NO: 595851 - DNA, 75 bp, synthetic construct
  source 1..75: mol_type = other DNA
ttttgccactttccacctgggcgtagatggtggtattgaagtacccgcgagccataacccgatggattacaacgg

SEQ ID NO: 595852 - DNA, 75 bp, synthetic construct
  source 1..75: mol_type = other DNA
tgcgcgatgtacagcgtctggctgaagccaatgattttgcgcctgtcgatcaatcccgtcgcggaagttataagc

SEQ ID NO: 595853 - DNA, 75 bp, synthetic construct
  source 1..75: mol_type = other DNA
ggacgggatgtgaacatggctgcggagtccacaggcgcaggtgaccacgacagcactttcagcatgaagacggtt

SEQ ID NO: 595854 - DNA, 75 bp, synthetic construct
  source 1..75: mol_type = other DNA
atggtgatatcctggccggcaacagtctgtgggtacagaaggacagcagcggaacggcaaacagcgaaatcatta

SEQ ID NO: 595855 - DNA, 75 bp, synthetic construct
  source 1..75: mol_type = other DNA
gctggatgcagggaaaaacattgatattaccggggcaacggtctcgtccggtggagaccttggaatgtctgcggg

SEQ ID NO: 595856 - DNA, 75 bp, synthetic construct
  source 1..75: mol_type = other DNA
gcgttgatcggcccaatttgtggcgcaattttacttgtggttggcgcctggctggtggccagacgctcattttaa

SEQ ID NO: 595857 - DNA, 75 bp, synthetic construct
  source 1..75: mol_type = other DNA
aaccaaagacgcgattaatgaatggattgattccttagaagtgtattccggtagcaataaaatcaatccttattg

SEQ ID NO: 595858 - DNA, 75 bp, synthetic construct
  source 1..75: mol_type = other DNA
cgaataagactgtttacgcatgaaaacaccctaccaattggactattaaaaacgttgggtgtctttgttaaaaat

SEQ ID NO: 595859 - DNA, 75 bp, synthetic construct
  source 1..75: mol_type = other DNA
cgcgaatatggttactccaccttctgagtatggtatcgccatgtataacccggacggtgagatgatttatcatgg

SEQ ID NO: 595860 - DNA, 75 bp, synthetic construct
  source 1..75: mol_type = other DNA
accagttgatatcaagtttgagaaggatcttggatatccatgcgcaattatgcctgcactggttggatattataa

SEQ ID NO: 595861 - DNA, 75 bp, synthetic construct
  source 1..75: mol_type = other DNA
aataaagggacaatgtctacatctaaaggttctgtttttcaaacatcaatcccatcaaacaaatcatgctttttc

SEQ ID NO: 595862 - DNA, 75 bp, synthetic construct
  source 1..75: mol_type = other DNA
cacggttactgccggacgggatatcacctcagttgcgactgctgtaacggcaaagggcgatatccgtgtgaatgc

SEQ ID NO: 595863 - DNA, 75 bp, synthetic construct
  source 1..75: mol_type = other DNA
tatgatggcctaaagcgggtctatagtgcaagagcggacgatgacatgattactatcagcggcatggagggataa

SEQ ID NO: 595864 - DNA, 75 bp, synthetic construct
  source 1..75: mol_type = other DNA
ttggccgcttcctgcagatggtggtggagcacaagcataagattggctttggcggcacgctgcttatcgagccga

SEQ ID NO: 595865 - DNA, 75 bp, synthetic construct
  source 1..75: mol_type = other DNA
ttaatgtcctgaagcaacatttatccattcttcctaggcatataaccagtatggtgctggaacatatacgccaga

SEQ ID NO: 595866 - DNA, 75 bp, synthetic construct
  source 1..75: mol_type = other DNA
tttcgcccgctctaccacacccgcaataatgatgaaggcaatcatgggcgttatttttccctgcgccgggagccg

SEQ ID NO: 595867 - DNA, 75 bp, synthetic construct
  source 1..75: mol_type = other DNA
ggcacaactacatcccgatccggaagaaggtgatttggcgaagggattcaccgtcccacgcaacactgccttttt

SEQ ID NO: 595868 - DNA, 75 bp, synthetic construct
  source 1..75: mol_type = other DNA
gttatcagcagcgctttaattttcatctggatgcgacacacagctttgctccccggcaatcagctattgatgctt

SEQ ID NO: 595869 - DNA, 75 bp, synthetic construct
  source 1..75: mol_type = other DNA
ctggatgtccatatagtttcagagttcaaccgaaaccatgtgcttgggcgtcctacagtttactgtgtggtggat

SEQ ID NO: 595870 - DNA, 75 bp, synthetic construct
  source 1..75: mol_type = other DNA
catcaaattgtcaggggaacgaatcctggtgttacgactgtttatgcttttgcgaatatggttactcaaccttct

SEQ ID NO: 595871 - DNA, 75 bp, synthetic construct
  source 1..75: mol_type = other DNA
gcagatactggctggcggtctgaatccggcagtggcacagcttataaaacaggctaccggtgacaaccgggaagc

SEQ ID NO: 595872 - DNA, 75 bp, synthetic construct
  source 1..75: mol_type = other DNA
atacgcaacgggctgggagtgctcagagaagggctggagaatgcagctaccgcaatatggcactggtttttctaa

SEQ ID NO: 595873 - DNA, 75 bp, synthetic construct
  source 1..75: mol_type = other DNA
tcaggttttagagcacaacagctctatttttgatggactggctggtcaaacacctctgctagtggagtcagggct

SEQ ID NO: 595874 - DNA, 75 bp, synthetic construct
  source 1..75: mol_type = other DNA
gtgaccgaggggaattcatctgtaataagccggaagagcttgcggtcccattgatagggcatctgagcattgctc

SEQ ID NO: 595875 - DNA, 75 bp, synthetic construct
  source 1..75: mol_type = other DNA
atgcccccgtgtcttttttcacaggggctggatatggcaacaaaagaagaaaatcagaaacgtcttcgtgaactg

SEQ ID NO: 595876 - DNA, 75 bp, synthetic construct
  source 1..75: mol_type = other DNA
gtggtgttgacgatgaaacaggtgggcctgttgagcatgttgatgctggcagagtaattctgatgcccccctcag

SEQ ID NO: 595877 - DNA, 75 bp, synthetic construct
  source 1..75: mol_type = other DNA
tctggtgtgggatggcgaaggccagacgacgctgatgcaaactatccaggaacgtatcgcgcaagcatcgcaaca

SEQ ID NO: 595878 - DNA, 75 bp, synthetic construct
  source 1..75: mol_type = other DNA
ttacctgcagaactgcgtaaaacgttgacctatgaccgtggacgtgagatgtcagaacataaaatactcgaagaa

SEQ ID NO: 595879 - DNA, 75 bp, synthetic construct
  source 1..75: mol_type = other DNA
aagcttatgcttatggcgtattcattttccagaggtgaattcatcatgaagataaatgacaaagttgtcgttcat

SEQ ID NO: 595880 - DNA, 75 bp, synthetic construct
  source 1..75: mol_type = other DNA
atgctggcagagtaattctgatgcccccctcagtggcaaaagacatggtcaagagtggaatggccgtttatgcgt

SEQ ID NO: 595881 - DNA, 75 bp, synthetic construct
  source 1..75: mol_type = other DNA
cgcaccgtcgccggtgatgaacgcagcgcccgccgttcccttgtccgtgactatgtgctctcccttgctgcccgt

SEQ ID NO: 595882 - DNA, 75 bp, synthetic construct
  source 1..75: mol_type = other DNA
aggacgccagagaacgccttctggccatcacccaacttcagaacagtccggaagctgaacatatcgagtacctgg

SEQ ID NO: 595883 - DNA, 75 bp, synthetic construct
  source 1..75: mol_type = other DNA
gctgacagagaaactcactgcgctgagaggcctgaatgttttcagcctgcaggaacagcagaacgttcgggaggt

SEQ ID NO: 595884 - DNA, 75 bp, synthetic construct
  source 1..75: mol_type = other DNA
tcatcatctctttgcgtacactgctggcgcaacctctgctgtggatgcggctgaaaaatatcgttaaccgcgagc

SEQ ID NO: 595885 - DNA, 75 bp, synthetic construct
  source 1..75: mol_type = other DNA
tcagtttggacgcgcccagccagtcggtggcctgaatgagaaaattgaaggtttcttcgctatctgccaacagcg

SEQ ID NO: 595886 - DNA, 75 bp, synthetic construct
  source 1..75: mol_type = other DNA
cacactcgagcttcatcctcttttatgctggcgaaggcgccggaagagcccgagtacctgagtctcattgccgat

SEQ ID NO: 595887 - DNA, 75 bp, synthetic construct
  source 1..75: mol_type = other DNA
acaggtccgaggattggcttttacttgtttgactgattttactaagccagaaccgggtgatgctgccaacttact

SEQ ID NO: 595888 - DNA, 75 bp, synthetic construct
  source 1..75: mol_type = other DNA
gccaaaataggcaactttattcagtccaacgattactcaagcgggatgacggggtggcatattaataaaaacggg

SEQ ID NO: 595889 - DNA, 75 bp, synthetic construct
  source 1..75: mol_type = other DNA
gcaaggtggaagaggctcttaaggaggttgaaaactcaaatgccgcattaattcagttgaaggaaactgtttcag

SEQ ID NO: 595890 - DNA, 75 bp, synthetic construct
  source 1..75: mol_type = other DNA
cgtcgacgcaatcaacaagcagatggaagaaagcctgaaaagccttgatgacaaatttactgagaccgatcaacg

SEQ ID NO: 595891 - DNA, 75 bp, synthetic construct
  source 1..75: mol_type = other DNA
tgcaacctgtcaggtcggtccttaatttctccgcgctgcagcgcgatgttatccggatggtggcgtttgtggcga

SEQ ID NO: 595892 - DNA, 75 bp, synthetic construct
  source 1..75: mol_type = other DNA
attttatatgggttaaatagaaaaaatgatgctgtaaaggccctggagaactgtatggatgatgaaacaagtcag

SEQ ID NO: 595893 - DNA, 75 bp, synthetic construct
  source 1..75: mol_type = other DNA
tggatacagcgaaactgatcgcagagtctgcaagcaccacctttacacatgctggtcttggggatagcgaaacgt

SEQ ID NO: 595894 - DNA, 75 bp, synthetic construct
  source 1..75: mol_type = other DNA
ggaccaccttacattcaataccaggctggaaacagtaaggctcgaaatcaacgagttaattatttgctgggggat

SEQ ID NO: 595895 - DNA, 75 bp, synthetic construct
  source 1..75: mol_type = other DNA
aattatcggaagtctggaagctattcggtgatatgcctgacgatacgacactgaatgttgaattaacggcccttt

SEQ ID NO: 595896 - DNA, 75 bp, synthetic construct
  source 1..75: mol_type = other DNA
taaatacctctcgcgcagaagttatttggatctctcttgaaaaagtgttgtttgagaactggcatacttcgagag

SEQ ID NO: 595897 - DNA, 75 bp, synthetic construct
  source 1..75: mol_type = other DNA
ggctcaccgagttggtttatggcttttgtataccgccagaatggagtcggatgtaattacatttactgccggttt

SEQ ID NO: 595898 - DNA, 75 bp, synthetic construct
  source 1..75: mol_type = other DNA
taaaaacaaaaacaggtaaagacattgcagcggcagtagcagttgaaaccaaagcaagaattgacgctaatgatg

SEQ ID NO: 595899 - DNA, 75 bp, synthetic construct
  source 1..75: mol_type = other DNA
atcttggtgttagtgtcaaaaccctcgctcgctatcgccagaatggtaatggccctgcttatatccagtatcaag

SEQ ID NO: 595900 - DNA, 75 bp, synthetic construct
  source 1..75: mol_type = other DNA
attttgacgggtacgtcagcggcggtagccagcatctcagctatggagaacggaacgcctttgcgattgtgttat

SEQ ID NO: 595901 - DNA, 75 bp, synthetic construct
  source 1..75: mol_type = other DNA
aaacgttggcgcggcaaccaccattgccgtactggttgccagccaattaattggtggtttggtattggatatttt

SEQ ID NO: 595902 - DNA, 75 bp, synthetic construct
  source 1..75: mol_type = other DNA
tctattttatggtttaaacaaggtatggcggggtttggcgaactggtgtccagcgtgcgctggtggacacttata

SEQ ID NO: 595903 - DNA, 75 bp, synthetic construct
  source 1..75: mol_type = other DNA
tcttcgccagtatcagcggatatcagaatgtgggagcggcgacaactattgcagtactggtcgccagccagctaa

SEQ ID NO: 595904 - DNA, 75 bp, synthetic construct
  source 1..75: mol_type = other DNA
aacctcatacgcttcagcgtaacggtgttttttacgcctacctcagattgtctgataatcaatttttccgttgct

SEQ ID NO: 595905 - DNA, 75 bp, synthetic construct
  source 1..75: mol_type = other DNA
catgaacattcaggtcataaggaaactcagacttatacgggcagaatgcggatttccgacttgatttcggtgata

SEQ ID NO: 595906 - DNA, 75 bp, synthetic construct
  source 1..75: mol_type = other DNA
tatttgattgaacgcgtacatgcaggattgctgggtgctctagggaaggtgcgaataagcaggtcatttcttccc

SEQ ID NO: 595907 - DNA, 75 bp, synthetic construct
  source 1..75: mol_type = other DNA
gactgtgcctctgaccgtgagctgattacatggaacgatgatcttaatacgttgattaaatccttcgggactgac

SEQ ID NO: 595908 - DNA, 75 bp, synthetic construct
  source 1..75: mol_type = other DNA
tgcggtgtagttggcggtactatcagcctggcctctgaggccgcatattatgcaaaactgccgggaaaccagaaa

SEQ ID NO: 595909 - DNA, 75 bp, synthetic construct
  source 1..75: mol_type = other DNA
cgctcgatatgctgacgtccagagagttcgtgatgggctaccatcatggaaccgtgcatgtctgggataatgacc

SEQ ID NO: 595910 - DNA, 75 bp, synthetic construct
  source 1..75: mol_type = other DNA
aagaagagaacgcccgactcaagaagctgctcgccgaagccatgctggataaggaggcgcttcaggtggctcttg

SEQ ID NO: 595911 - DNA, 75 bp, synthetic construct
  source 1..75: mol_type = other DNA
cgtaactgcaccctgttcgacaaaacccgcaagtgggcataccgtgccatccgtcagggctggcctgagtatgaa

SEQ ID NO: 595912 - DNA, 75 bp, synthetic construct
  source 1..75: mol_type = other DNA
gctggctttttgataatggtgaagatgcgttagatctcgatgctcatgatattttcggcttcgacctgacggagt

SEQ ID NO: 595913 - DNA, 75 bp, synthetic construct
  source 1..75: mol_type = other DNA
gcttttgcagtatgtggaagctattccaggcgaagcacgtgttgagcggttgaacaatgaaaagcctacgccgat

SEQ ID NO: 595914 - DNA, 75 bp, synthetic construct
  source 1..75: mol_type = other DNA
ctctccacgcagaatgtcccggcggcccgggaggggcgctggtcacatgcagggggattcggggacctgacgttg

SEQ ID NO: 595915 - DNA, 75 bp, synthetic construct
  source 1..75: mol_type = other DNA
gaaagtagatactaatcttctatcatacgataccttaatgaaggcgtggcctttatgggagtataaaaagttaca

SEQ ID NO: 595916 - DNA, 75 bp, synthetic construct
  source 1..75: mol_type = other DNA
ttaatgaagtcataattatggagcaggttaagccgtttgtagctcataagattgtgtactttgatgaaccggtat

SEQ ID NO: 595917 - DNA, 75 bp, synthetic construct
  source 1..75: mol_type = other DNA
cctaaccgctatcatcagactggtggaaaacctcggtaattacctgacggagagcgccagagaacgccttctggc

SEQ ID NO: 595918 - DNA, 75 bp, synthetic construct
  source 1..75: mol_type = other DNA
catcaccgataaaacgcagcttgaatggcgagaagttttccaggacctcaatcatcacggggtttatcacagcgg

SEQ ID NO: 595919 - DNA, 75 bp, synthetic construct
  source 1..75: mol_type = other DNA
aagctcagcaactggcggcagtgattgccggtggtctgttacctgagggggctgcagcctggcttgcgacggtgc

SEQ ID NO: 595920 - DNA, 75 bp, synthetic construct
  source 1..75: mol_type = other DNA
attctttgaatttcctgagccggattatcatggcaatgcaaagctaatcacggatgaagaaattaaggaaagtgg

SEQ ID NO: 595921 - DNA, 75 bp, synthetic construct
  source 1..75: mol_type = other DNA
atcgcagctttgaaagtttcggatatccgtctggatgacgatagccagcggtactacattatgatccaagacagt

SEQ ID NO: 595922 - DNA, 75 bp, synthetic construct
  source 1..75: mol_type = other DNA
cgctgcaaatcatacggtgcttctgcttcagtatatagatgcatactctgcattttggcagaaggatatttcccg

SEQ ID NO: 595923 - DNA, 75 bp, synthetic construct
  source 1..75: mol_type = other DNA
caatctgttctttagtcagttggtaagggtcaacacacaaactctgcctgagcatgataaaactttaaaatatca

SEQ ID NO: 595924 - DNA, 75 bp, synthetic construct
  source 1..75: mol_type = other DNA
cctgagatcttgattggtaaagttgcaaaaggaagatacaaggggaaataccttaagtttgctggacaacagttt

SEQ ID NO: 595925 - DNA, 75 bp, synthetic construct
  source 1..75: mol_type = other DNA
gaaagtagatactaatcttctctcatacgataccttaatcaaggcgtggcctttatgggagtataaaaaattaca

SEQ ID NO: 595926 - DNA, 75 bp, synthetic construct
  source 1..75: mol_type = other DNA
cagcaccagtgatttctctcatatcctggctggtggtgctgaaaagtcggtgctgactggctggcagaacagcgg

SEQ ID NO: 595927 - DNA, 75 bp, synthetic construct
  source 1..75: mol_type = other DNA
tgcgcattatcaacaaagcccagaagcagaaaaaatagcacaatctattattctgaatggaattcggtgtcagat

SEQ ID NO: 595928 - DNA, 75 bp, synthetic construct
  source 1..75: mol_type = other DNA
gacgacggtaaacctgtcacttgccttgctcattaccagcagagcgcagcaccagaaaaaatagcgcaaactatt

SEQ ID NO: 595929 - DNA, 75 bp, synthetic construct
  source 1..75: mol_type = other DNA
cgcaacccgcagaccggtaaagagatcaccatcgctgctgctaaagtaccgagcttccgtgcaggtaaagcactg

SEQ ID NO: 595930 - DNA, 75 bp, synthetic construct
  source 1..75: mol_type = other DNA
cttagatgaaaaactggacgcatcaccatttaccggaaatgtagtgattcttgatgctcctcttcgtgaatgggc

SEQ ID NO: 595931 - DNA, 75 bp, synthetic construct
  source 1..75: mol_type = other DNA
tgtaatatgaccaccagtcttatcctgccgcaaaccaccgacgccagtggattttatggcgcgacggtgaccagc

SEQ ID NO: 595932 - DNA, 75 bp, synthetic construct
  source 1..75: mol_type = other DNA
ttgcgcattatcaacaaagttcagaagcagaaaaaatagcgcaatctattattctgaatggaattcggtgtcaga

SEQ ID NO: 595933 - DNA, 75 bp, synthetic construct
  source 1..75: mol_type = other DNA
acgcctgcatttatcaaaggtgtcactaacctgcgcggcgttattgtgccgattgtcgatttacgcattaagttc

SEQ ID NO: 595934 - DNA, 75 bp, synthetic construct
  source 1..75: mol_type = other DNA
atgccatttaaaaaactctccagacgcaacttcctgacggcaagttctgtgcttgccttcctccatacgcctttc

SEQ ID NO: 595935 - DNA, 75 bp, synthetic construct
  source 1..75: mol_type = other DNA
atgccatttaaaaaactctcccgacgcaccttcctgacggcaagttctgtgcttgccttcctccatacgcctttc

SEQ ID NO: 595936 - DNA, 75 bp, synthetic construct
  source 1..75: mol_type = other DNA
aattgaatacgaaaaagattattgtctttatgcacccacggcagagacggtacgtgcatatgctagcgctttgaa

SEQ ID NO: 595937 - DNA, 75 bp, synthetic construct
  source 1..75: mol_type = other DNA
acaattttggttgctgtaatgaactggatggtcataagcatgctatatcacgtagttgatgaagagctttctctg

SEQ ID NO: 595938 - DNA, 75 bp, synthetic construct
  source 1..75: mol_type = other DNA
atgaccggtatgacaaatgtaacaaaactggccagcgaaccgtcaggccaggaatttctggtatttacccttggt

SEQ ID NO: 595939 - DNA, 75 bp, synthetic construct
  source 1..75: mol_type = other DNA
gagatcgggaagactataaagcattcttgaatgaaattaattgggaagataacgaagtattgcaagatcaactcc

SEQ ID NO: 595940 - DNA, 75 bp, synthetic construct
  source 1..75: mol_type = other DNA
ttatggcgggcaagtgacacaatgttaaccgcttgccaaaacgtcactccgcttcttcaggtagcagaacaccgc

SEQ ID NO: 595941 - DNA, 75 bp, synthetic construct
  source 1..75: mol_type = other DNA
acggcacatataaaaattcagccgtggcaggatgataagtggggtcgagtattgccgtatttgcgtcaaatctgt

SEQ ID NO: 595942 - DNA, 75 bp, synthetic construct
  source 1..75: mol_type = other DNA
gcgcgatgaaagtatttttaatcttttacatcatttgtgtgctgctgacctggctggtttatggtcggcggaagt

SEQ ID NO: 595943 - DNA, 75 bp, synthetic construct
  source 1..75: mol_type = other DNA
gcacactctgtttatgcacctgacgctggtgccgtacatggcagcgtctggtgaagtcaaaaccaaaccgactca

SEQ ID NO: 595944 - DNA, 75 bp, synthetic construct
  source 1..75: mol_type = other DNA
cggtacagtaggtgatatcgaatccttgccgttcctcgaagcgattcgccagatggctgttgaaattggccgtga

SEQ ID NO: 595945 - DNA, 75 bp, synthetic construct
  source 1..75: mol_type = other DNA
aaacaaaattccatcctattaaccacaacaacaatatctggcttactgccgttgagattgctcaagctctcggat

SEQ ID NO: 595946 - DNA, 75 bp, synthetic construct
  source 1..75: mol_type = other DNA
aatatgggattaggttttggggctactgcatcgtcattcggagtgcttaatgacattgcaaaatatttaatgtgc

SEQ ID NO: 595947 - DNA, 75 bp, synthetic construct
  source 1..75: mol_type = other DNA
ctggtgaacgagttgcgggatattgcggttcagtaccacggagcgcagcaattgcgggagaaaattgccagagca

SEQ ID NO: 595948 - DNA, 75 bp, synthetic construct
  source 1..75: mol_type = other DNA
gacgaaccaatttatcaacgacgcgacggttattttgtaaatattagaatcttagatgaaaaactggacgcatca

SEQ ID NO: 595949 - DNA, 75 bp, synthetic construct
  source 1..75: mol_type = other DNA
tccttaccttaccgggcacaggctccggtaatttcatcgccttttacgccgtatttatggggctgtttctgactg

SEQ ID NO: 595950 - DNA, 75 bp, synthetic construct
  source 1..75: mol_type = other DNA
ccaaacaaggcagtgcattagggattaatggcgggctgggaaatttaggcgtcagcgtgatgcaactggttgcac

SEQ ID NO: 595951 - DNA, 75 bp, synthetic construct
  source 1..75: mol_type = other DNA
gggtcgatgagcccccgcatctgctgttgtggagcgcagatgagttggccccgatgcttttggggctaacgatag

SEQ ID NO: 595952 - DNA, 75 bp, synthetic construct
  source 1..75: mol_type = other DNA
caggtcaccagcctgagcggcgggcgtatgttgcgcctcaccggcgcaggtattgccgaagaacggatgatcgcc

SEQ ID NO: 595953 - DNA, 75 bp, synthetic construct
  source 1..75: mol_type = other DNA
cgccaccatgatggcgtcgaaagccattaaaccggtgtatgacgtgtttaaagaggcggggattaactttgatga

SEQ ID NO: 595954 - DNA, 75 bp, synthetic construct
  source 1..75: mol_type = other DNA
cgtccgccggggggctatacccggtgcaaacctacgtgtacctgcatccagacaagatcgaagagggagtatccg

SEQ ID NO: 595955 - DNA, 75 bp, synthetic construct
  source 1..75: mol_type = other DNA
atgccgtataaaacgaaaagcgatctgccggaaagcgtaaagcacgtgcttccgtctcatgcccaggatatctat

SEQ ID NO: 595956 - DNA, 75 bp, synthetic construct
  source 1..75: mol_type = other DNA
ggctgggtatccggcttccgccattaccctttatgccgttctggcaggtcacggtgctgacggggggcttatggg

SEQ ID NO: 595957 - DNA, 75 bp, synthetic construct
  source 1..75: mol_type = other DNA
gggccattgccctgatggacagcaaaaagatgtggcggagcaattatgcccctcctcttctgtgtattctctggc

SEQ ID NO: 595958 - DNA, 75 bp, synthetic construct
  source 1..75: mol_type = other DNA
cggcacagatgcggtgctggagttcaacaagccggagcaggtgaaacacatcgccatgctcgaagagatgaacaa

SEQ ID NO: 595959 - DNA, 75 bp, synthetic construct
  source 1..75: mol_type = other DNA
atgggtaaactcacgggcaagacagcactgattacgggcgcatcgcaaggcattggtgaaggaattgccagaacc

SEQ ID NO: 595960 - DNA, 75 bp, synthetic construct
  source 1..75: mol_type = other DNA
ggtcgtggtcatcgctgtacggcggttgtcgccgatgtgcgtgacccggcgtcggtagccgcagctatcaagcgc

SEQ ID NO: 595961 - DNA, 75 bp, synthetic construct
  source 1..75: mol_type = other DNA
gcgtacgccttaacgaaagcggcgattgttggcctgactaaatcgctggcggtggagtacgcgcagtctggtatt

SEQ ID NO: 595962 - DNA, 75 bp, synthetic construct
  source 1..75: mol_type = other DNA
accgtcccatgcccaggatatctataaagaggcattcaacagcgcctgggatcaatataaagataaagaagatcg

SEQ ID NO: 595963 - DNA, 75 bp, synthetic construct
  source 1..75: mol_type = other DNA
tcaatataaaaggcgtatggaacgtcacgaaggcggtgctgccggagatgattgcccgcaaagatggccgcattg

SEQ ID NO: 595964 - DNA, 75 bp, synthetic construct
  source 1..75: mol_type = other DNA
tggcgtcggatgagtccagctatttaacgggtacacagaatgtgatcgatggcggcagcacactgccagagacgg

SEQ ID NO: 595965 - DNA, 75 bp, synthetic construct
  source 1..75: mol_type = other DNA
atgacgggcaaagaggcaattatttattacctggggacgcataagagcttctgtgcgcaggacgttgccgcggta

SEQ ID NO: 595966 - DNA, 75 bp, synthetic construct
  source 1..75: mol_type = other DNA
aaatagccgatcttggctgtggcccaggcaatagcaccgccctgctacatcaacgctggccaacggctaaaatta

SEQ ID NO: 595967 - DNA, 75 bp, synthetic construct
  source 1..75: mol_type = other DNA
gttgatatctggcgaaccacctactatcaccagatgccatcgcaccaggcgattattgactgggtgacagccacc

SEQ ID NO: 595968 - DNA, 75 bp, synthetic construct
  source 1..75: mol_type = other DNA
gattgccgaagcgcgcagtgctttgccagactgccagtttgtggaagcagatatccgcaactggcaaccggaaca

SEQ ID NO: 595969 - DNA, 75 bp, synthetic construct
  source 1..75: mol_type = other DNA
gaaatagcctgccggcttcgggatataggctggccgccggaacggattcaggagtcacgggactttccggtgaag

SEQ ID NO: 595970 - DNA, 75 bp, synthetic construct
  source 1..75: mol_type = other DNA
atgacgattgcagaacgtcttatacagaaaggtttcgacgagggttttaaacaaggggctcttgaagtggcgcgg

SEQ ID NO: 595971 - DNA, 75 bp, synthetic construct
  source 1..75: mol_type = other DNA
gcttcctgtcggcaggcgctacgcttgccgccatcccactgctacacaaccccgctgtacgcgcgctggggcgta

SEQ ID NO: 595972 - DNA, 75 bp, synthetic construct
  source 1..75: mol_type = other DNA
aaagatgtggcggagcaattatgcccctcctcttctgcgtattctatggcggctgggtatccggcttccgccatt

SEQ ID NO: 595973 - DNA, 75 bp, synthetic construct
  source 1..75: mol_type = other DNA
cgcaagtctgatgatcgcaaaactgttgtactggctttttgaaagtgccggactcattcataaacgcacaaaatc

SEQ ID NO: 595974 - DNA, 75 bp, synthetic construct
  source 1..75: mol_type = other DNA
caactactttacctgggaagtgctgaataaccactccggtctggcgatctcgcctacgcttattggttcactggt

SEQ ID NO: 595975 - DNA, 75 bp, synthetic construct
  source 1..75: mol_type = other DNA
aaaaagggcaaagctccgtcgatatcgacagggttaatcaccatattgttaatgtggaaaagattaactttagat

SEQ ID NO: 595976 - DNA, 75 bp, synthetic construct
  source 1..75: mol_type = other DNA
taacacccaccttgcttataaattgcgcggcatccaaatctctgccgggaatgctgtttcctttgtggcactgac

SEQ ID NO: 595977 - DNA, 75 bp, synthetic construct
  source 1..75: mol_type = other DNA
acctccattcctgcatcgtgacaggccggcagccactgcgccacttccagcggatcgccctcccggcgtaccacc

SEQ ID NO: 595978 - DNA, 75 bp, synthetic construct
  source 1..75: mol_type = other DNA
gctggcgcattaatgtctcgcgcgccagtaaagcagaagtcattcttgctactgtaagggggatcgttcgaggag

SEQ ID NO: 595979 - DNA, 75 bp, synthetic construct
  source 1..75: mol_type = other DNA
ctttggtttccggggtagggtggcatctcctgaaatcacacaactttatataggtaagaaaattcctgatgatct

SEQ ID NO: 595980 - DNA, 75 bp, synthetic construct
  source 1..75: mol_type = other DNA
actttgaggcaacacaaagttctcgctatggttttgaaggtcgagaagccccacctgaaatagcaaatctttatc

SEQ ID NO: 595981 - DNA, 75 bp, synthetic construct
  source 1..75: mol_type = other DNA
ctatgatgaatccagtgattccctgtgctggtctgatggggagtcagtcacgataaataccgacgactacggcaa

SEQ ID NO: 595982 - DNA, 75 bp, synthetic construct
  source 1..75: mol_type = other DNA
ctgatgaaaagacggcgtacgaagttgaagcagcacttattgatgcctaccctgggttaacgaatatcatgaatg

SEQ ID NO: 595983 - DNA, 75 bp, synthetic construct
  source 1..75: mol_type = other DNA
ccacctaaaatagcaaacctttatcttgggaaaaaaataccagatgaattaagaaaaaaaggagctatgtctcca

SEQ ID NO: 595984 - DNA, 75 bp, synthetic construct
  source 1..75: mol_type = other DNA
ggaagagatcgcagagcaactggataagccagttgatgacgtcagccgtatgcttcgtcttaacgagcgcattac

SEQ ID NO: 595985 - DNA, 75 bp, synthetic construct
  source 1..75: mol_type = other DNA
gtgtgctggacgcgactcagctttacctgtgagattggttattcaccactgttaacggccgaagaagaagtttat

SEQ ID NO: 595986 - DNA, 75 bp, synthetic construct
  source 1..75: mol_type = other DNA
tctccggacgtcctgcttacagccccgggggcttttgtcggcagttcgctgacagtacatgatggaggtcacctt

SEQ ID NO: 595987 - DNA, 75 bp, synthetic construct
  source 1..75: mol_type = other DNA
gtatggcattgtgcctacaaaaccagaaaccggatatggatatattctgcgtggtgatttattaagttcaactga

SEQ ID NO: 595988 - DNA, 75 bp, synthetic construct
  source 1..75: mol_type = other DNA
tgaagctgcacttattgatgcctaccctgggttaacgaatatcatgaatggtgctggcagcaatgaattcggcgc

SEQ ID NO: 595989 - DNA, 75 bp, synthetic construct
  source 1..75: mol_type = other DNA
acctgttagacgctgattacatggcatacatgctaaaatatgactccactcacggccgtttcgacggtaccgttg

SEQ ID NO: 595990 - DNA, 75 bp, synthetic construct
  source 1..75: mol_type = other DNA
aataatgtaactacggtagccagctatctgcagttgcatgggattattcaggtactgtattaccgtgatggtgct

SEQ ID NO: 595991 - DNA, 75 bp, synthetic construct
  source 1..75: mol_type = other DNA
ggtaaaacgaagtcagtgggtgcgggtctgtatgcttcagccctgtttgattccggggcctatatcgacctgatt

SEQ ID NO: 595992 - DNA, 75 bp, synthetic construct
  source 1..75: mol_type = other DNA
tggccctgagcatgaaagacaaggattataacccactgattggtcgtaccggtgttgacgtgggaagaagcttct

SEQ ID NO: 595993 - DNA, 75 bp, synthetic construct
  source 1..75: mol_type = other DNA
ccggggcttattttgacctgattggtaaatacctccatcacgataatgagtacacggcgagttttgcgtctcttg

SEQ ID NO: 595994 - DNA, 75 bp, synthetic construct
  source 1..75: mol_type = other DNA
acgaaacctgctaccgaacacgtctggttttacgaaatggccgctgatggctactcgttggacgataagcgtagt

SEQ ID NO: 595995 - DNA, 75 bp, synthetic construct
  source 1..75: mol_type = other DNA
gaagttggcgacatagacgaagcagagttggccattgtgcagaatggtattgtgaaggagttgctagagttgaaa

SEQ ID NO: 595996 - DNA, 75 bp, synthetic construct
  source 1..75: mol_type = other DNA
caggccgatgctgagtggacgaatgaagaatacacctccaggtttgaaggtacctggattccacctgaggagcgc

SEQ ID NO: 595997 - DNA, 75 bp, synthetic construct
  source 1..75: mol_type = other DNA
atgctgggggaagcgggtggggcgcgcaataatttgcagcacgttgccgggatcaccgaagcggcgaaagaaacc

SEQ ID NO: 595998 - DNA, 75 bp, synthetic construct
  source 1..75: mol_type = other DNA
gatcaccgaagcggcgaaagaaacccagccggaagcgtatattgtcggcgaacattttggcgatgcacggcaatg

SEQ ID NO: 595999 - DNA, 75 bp, synthetic construct
  source 1..75: mol_type = other DNA
acagtattgtccgccactggctgaaagcgccgtggaatatggatggctggcggctggatgtggtgcatatgctgg

SEQ ID NO: 596000 - DNA, 75 bp, synthetic construct
  source 1..75: mol_type = other DNA
gggcaatatcttcaagcaataatttcaatcgtcagatcattaacaaatctgatgagacagaagatattatagaga

SEQ ID NO: 596001 - DNA, 75 bp, synthetic construct
  source 1..75: mol_type = other DNA
cagccaggcgcgttgattgaaaacgaagaacaggcgctggcgcaaacgttggagatggtgcaacacggcagagtc

SEQ ID NO: 596002 - DNA, 75 bp, synthetic construct
  source 1..75: mol_type = other DNA
gcatggcgatggagagcacgcactggcgttcgcccgccgactacgctctacatttgccgaaaaggggattgttgt

SEQ ID NO: 596003 - DNA, 75 bp, synthetic construct
  source 1..75: mol_type = other DNA
caacggccagacccgcttctatattctgaaatctgccagctatggtaacaccctgtgggggaacagcctgaatga

SEQ ID NO: 596004 - DNA, 75 bp, synthetic construct
  source 1..75: mol_type = other DNA
gcacggtcagaaaggaaatgatcttaatgcaggtaaaaacctggtgttcagtggacagaacggagcaattctcct

SEQ ID NO: 596005 - DNA, 75 bp, synthetic construct
  source 1..75: mol_type = other DNA
gtttgttggcactgacaaaaacaaagccattcagataataaaagaccgcattctggctgaacgggcaaaacagcc

SEQ ID NO: 596006 - DNA, 75 bp, synthetic construct
  source 1..75: mol_type = other DNA
acttgttggccgcctggataaggttccttttgccgatttcagtagtgcaagcacgagtggttttgccactcttgt

SEQ ID NO: 596007 - DNA, 75 bp, synthetic construct
  source 1..75: mol_type = other DNA
tgcaacagtggctgcatgtattaataatatgggattaggttttggggctactgcggtagtgactccaacttactg

SEQ ID NO: 596008 - DNA, 75 bp, synthetic construct
  source 1..75: mol_type = other DNA
cccgggtcacggggttcagccgggtgacaccgacgctgcatgtcgacaccactggcggcagtacgaagtggattc

SEQ ID NO: 596009 - DNA, 75 bp, synthetic construct
  source 1..75: mol_type = other DNA
tgtctgattatggtgcggtcattgcaaacaaggccgcaaataaatcccaccttacgctgaatttgtctacggcaa

SEQ ID NO: 596010 - DNA, 75 bp, synthetic construct
  source 1..75: mol_type = other DNA
atggggcgcggtggtgctgcattacgtcaacctggttatatccatgtgctgggcgacggtaatgtcagcgcaacg

SEQ ID NO: 596011 - DNA, 75 bp, synthetic construct
  source 1..75: mol_type = other DNA
tgaaccaaacccgtactattcgtttgccgattcacatcgtaaaggagctgaacgtttacctgcgaaccgcacgtg

SEQ ID NO: 596012 - DNA, 75 bp, synthetic construct
  source 1..75: mol_type = other DNA
ctgccggatgcttataaatcagtgatcgaagcactgaaacacggtgggctgaagaatcgtgtcagcgtcaacatc

SEQ ID NO: 596013 - DNA, 75 bp, synthetic construct
  source 1..75: mol_type = other DNA
tttgattccggtgcctatatcgacctgattggcaagtatgttcaccatgataatgagtacactgcaacctttgcc

SEQ ID NO: 596014 - DNA, 75 bp, synthetic construct
  source 1..75: mol_type = other DNA
aacggcagcgcccctgtttccctgacccagaaagactgggaaaaccgcgagttcacactgaaaacgctgtcgctg

SEQ ID NO: 596015 - DNA, 75 bp, synthetic construct
  source 1..75: mol_type = other DNA
accagtcaggctgtaactgacgcagatcgccgcattgtgcgcgagtccgtgcgtccctattcagtggtgaaccca

SEQ ID NO: 596016 - DNA, 75 bp, synthetic construct
  source 1..75: mol_type = other DNA
gttatctcgaaaggcaccggaccttcactgctaaggatgtggccacagagtgcggcatgaccatcaactgcatca

SEQ ID NO: 596017 - DNA, 75 bp, synthetic construct
  source 1..75: mol_type = other DNA
caaacccgggaaatacctttgataaaaaccagggacctcttgccagttatggacagattggagacagtggttcgc

SEQ ID NO: 596018 - DNA, 75 bp, synthetic construct
  source 1..75: mol_type = other DNA
gaatattactggaacagcggtatgttcctgttccgcgccggacgctatctcgaagaactgaaaaaatatcgcccg

SEQ ID NO: 596019 - DNA, 75 bp, synthetic construct
  source 1..75: mol_type = other DNA
aacgggttaccgctatcacctgacagaggaaacgttcattgagccgcaggctgaactggtttacggcgccgtgtc

SEQ ID NO: 596020 - DNA, 75 bp, synthetic construct
  source 1..75: mol_type = other DNA
gatcctggccgggcgggcaaaacaacccgttatctttcatggtcagctgtccgggaatatggatgtcgccattcc

SEQ ID NO: 596021 - DNA, 75 bp, synthetic construct
  source 1..75: mol_type = other DNA
ggagatgcccgtcaggtcaatccggataacatttcatggggataccggggaggtaagcttgaccttaatggtaat

SEQ ID NO: 596022 - DNA, 75 bp, synthetic construct
  source 1..75: mol_type = other DNA
atctgccgcctgaacggcgtggagtgcgaaagcccggtggtgatttgcaatgagcagcaccgctttattgtcgcg

SEQ ID NO: 596023 - DNA, 75 bp, synthetic construct
  source 1..75: mol_type = other DNA
gccaatggtacgtaaagatgacatcacttctgatgacatctacgcggtagtggaagccggtgcgctggcgggcgt

SEQ ID NO: 596024 - DNA, 75 bp, synthetic construct
  source 1..75: mol_type = other DNA
gaacaactggtaaacatgtacccggcggcaaaaatcacctgcgcactggataatgaccggaaatcagctacagaa

SEQ ID NO: 596025 - DNA, 75 bp, synthetic construct
  source 1..75: mol_type = other DNA
agcgccgtaaccagcggcgatttcgtcggtgcctgctttgttatcggtgagctgaaaggggcgcaaaacatcgct

SEQ ID NO: 596026 - DNA, 75 bp, synthetic construct
  source 1..75: mol_type = other DNA
tgctgtctctgaacttgcccgcagggtaataaaaaagacatgccgaagattaacgcatattcttctggctggcat

SEQ ID NO: 596027 - DNA, 75 bp, synthetic construct
  source 1..75: mol_type = other DNA
gacagcaaggccaccgccctttcgccaaaactgcctgacgctaaagataaagataaagataaagaagaaagcgtc

SEQ ID NO: 596028 - DNA, 75 bp, synthetic construct
  source 1..75: mol_type = other DNA
aactcatggttgattgatggcggtacccccattgacgacgtgatgcgcgtgctggatatcgatgagtttccgcag

SEQ ID NO: 596029 - DNA, 75 bp, synthetic construct
  source 1..75: mol_type = other DNA
atatcgttcctctcagtcgacaggcgatgattttgttagagcagcttaagcagattagtggtgataaagaggtgc

SEQ ID NO: 596030 - DNA, 75 bp, synthetic construct
  source 1..75: mol_type = other DNA
atgacacggattgcagtcgagctttccttactaacttttgtgcgttccagtgagttgcgtttcgctcgctgggat

SEQ ID NO: 596031 - DNA, 75 bp, synthetic construct
  source 1..75: mol_type = other DNA
ctgcagctctccagatgtcgccgcggcttcaggaatgacgcatacctgcatcaaccaggctgcaaatatcctggc

SEQ ID NO: 596032 - DNA, 75 bp, synthetic construct
  source 1..75: mol_type = other DNA
cggtgcgctatcgacaaccaaagagcgacattaccctgctttaccttctagccggttccctgagtttcttgcacg

SEQ ID NO: 596033 - DNA, 75 bp, synthetic construct
  source 1..75: mol_type = other DNA
aacaacgcattgcgtgcgatgggatatgacactaaaaccgaagtctgtgggcatgggtttaggacgatggctcga

SEQ ID NO: 596034 - DNA, 75 bp, synthetic construct
  source 1..75: mol_type = other DNA
ctcttagtgcagggtatagatccgaaaactgaacagaaacaagctcaggccgaaaattcgggggcatatactttc

SEQ ID NO: 596035 - DNA, 75 bp, synthetic construct
  source 1..75: mol_type = other DNA
agaagtggtctgcatcacatagcgctcgtgtattgaaaagcctagaagataatctctttgctgccatcggtaagc

SEQ ID NO: 596036 - DNA, 75 bp, synthetic construct
  source 1..75: mol_type = other DNA
tcgtgacgaagctcgtaagctcttagctaacggcgttgatcccagtgaaaataagaaagttattaaggtagagca

SEQ ID NO: 596037 - DNA, 75 bp, synthetic construct
  source 1..75: mol_type = other DNA
gagtgagaacacggtgaacaaggctctacgagtgatgggctatgacacgaaaacggaagtttgtgggcatggttt

SEQ ID NO: 596038 - DNA, 75 bp, synthetic construct
  source 1..75: mol_type = other DNA
ctactgtgacgcttgctcaggccagagcaaagcgcgacgaagctaaaaagctattggtgcagggcattgatccaa

SEQ ID NO: 596039 - DNA, 75 bp, synthetic construct
  source 1..75: mol_type = other DNA
aatcgaaggtgtgcgttactcctatcgcgggatgaagatgaaagaggaacatattgttccattgagcactcaggc

SEQ ID NO: 596040 - DNA, 75 bp, synthetic construct
  source 1..75: mol_type = other DNA
gttaagtcattcagaacgaaataatgttagggctgcctatattcatacttctgaacatttggaggagcgtcgctt

SEQ ID NO: 596041 - DNA, 75 bp, synthetic construct
  source 1..75: mol_type = other DNA
ctgttagtgcagggcattgacccaaaagccgaacagaaagaagctcaggccgagaattcgggggcatatactttc

SEQ ID NO: 596042 - DNA, 75 bp, synthetic construct
  source 1..75: mol_type = other DNA
gatggctttgttagagcaacttaagcagattagtggtgataaagagctgctgttcccaggggatcacgacgcggc

SEQ ID NO: 596043 - DNA, 75 bp, synthetic construct
  source 1..75: mol_type = other DNA
tcatcgatcgcgcgttcttcgctatcttgagctttatattttccctcatatcggttcgtccgacattcgccagct

SEQ ID NO: 596044 - DNA, 75 bp, synthetic construct
  source 1..75: mol_type = other DNA
cgacattaccccgctttaccctctagccggttccctgagtttcttgcacgtcttgctgcatatcgtggccgtgta

SEQ ID NO: 596045 - DNA, 75 bp, synthetic construct
  source 1..75: mol_type = other DNA
aagccgaacagaaagaagctcaggctgagaattctggggcatatactttcgaaactatcgctcgtgaatggcatg

SEQ ID NO: 596046 - DNA, 75 bp, synthetic construct
  source 1..75: mol_type = other DNA
cggtgcgctatcgacaaccaaagcacgacattaccccgctttaccatccagccggttccctgagtttcttgctcg

SEQ ID NO: 596047 - DNA, 75 bp, synthetic construct
  source 1..75: mol_type = other DNA
gcgttcgcgtgtttcatgattatctgcgcgagaagcaccagcagcgcgactgctatgaagcattacttgaattag

SEQ ID NO: 596048 - DNA, 75 bp, synthetic construct
  source 1..75: mol_type = other DNA
ctgaatatcttgaagaaagaagattaatgctgcaatggtgggctgattacattgatgctaacaagaatggaacta

SEQ ID NO: 596049 - DNA, 75 bp, synthetic construct
  source 1..75: mol_type = other DNA
tgagctacgtttcgctcgctgggatgaattcgacttcgataaatctctatggcgtatacctgcaaaacgcgagga

SEQ ID NO: 596050 - DNA, 75 bp, synthetic construct
  source 1..75: mol_type = other DNA
gatcgcctcgcttttggtgtttggccgaccgtgacgcttgctgaagctagaacgaggagggatgaagcgaaaaag

SEQ ID NO: 596051 - DNA, 75 bp, synthetic construct
  source 1..75: mol_type = other DNA
ggtggtaaggtgattgccaccacgcaaccggcacaaaccaccgtgtatctggagcagccggaagccatcgattac

SEQ ID NO: 596052 - DNA, 75 bp, synthetic construct
  source 1..75: mol_type = other DNA
ggaagtcgcgccgtggattgatctgcaaattgtcgccttccctcaggaagggattttgtcgtatcccaacggtga

SEQ ID NO: 596053 - DNA, 75 bp, synthetic construct
  source 1..75: mol_type = other DNA
tttctggtgctctgcctgcgggctggcgtaagcgcgatgatgtggcttttatcggggacggaccgtgctttattg

SEQ ID NO: 596054 - DNA, 75 bp, synthetic construct
  source 1..75: mol_type = other DNA
ggtaaggttgagatttcattccctgggcaagtgccggacaacggaaaagattacggttatttgtatgtacaacaa

SEQ ID NO: 596055 - DNA, 75 bp, synthetic construct
  source 1..75: mol_type = other DNA
ccatcgctggcggtgctggcgaaagtcgcggcagtattgcatgtcgatagtgaaatcatggattatcttgtcgcg

SEQ ID NO: 596056 - DNA, 75 bp, synthetic construct
  source 1..75: mol_type = other DNA
ttcgttactcagtccgctgggcgtgctggcagtacagatgccagataactggctggagccgacccatgtgctcat

SEQ ID NO: 596057 - DNA, 75 bp, synthetic construct
  source 1..75: mol_type = other DNA
gggagcaggcccgttttctggatatcaatcatgacctggtgattggtgtgtttgacaagctggaagagcgggtga

SEQ ID NO: 596058 - DNA, 75 bp, synthetic construct
  source 1..75: mol_type = other DNA
cggcgacgcggtacgttttaacgattttatcgacggcgttgccgaacgttcaccgaaacacaaggagagtttaat

SEQ ID NO: 596059 - DNA, 75 bp, synthetic construct
  source 1..75: mol_type = other DNA
ttggcaatacagatgccagataactggctagagccaacccatgtgctcatgcgcgaagtcgcctgggaacaaaat

SEQ ID NO: 596060 - DNA, 75 bp, synthetic construct
  source 1..75: mol_type = other DNA
atggcaatcgaatagagccgtgtgctgcattggcaaagtctcttgagcgtgatgctgaatgctcagtaagaaaag

SEQ ID NO: 596061 - DNA, 75 bp, synthetic construct
  source 1..75: mol_type = other DNA
ttggtgatgttgcgttccggtgagttttctaaatcaccaattcgagtttcattttgcccgttctgtggtgaaagt

SEQ ID NO: 596062 - DNA, 75 bp, synthetic construct
  source 1..75: mol_type = other DNA
ccatgaattaattcattcacaagacctgatcatgctgcggtctggtgaattttctaaatcgcctattcgagtttc

SEQ ID NO: 596063 - DNA, 75 bp, synthetic construct
  source 1..75: mol_type = other DNA
ctgatcatgctgcggtctggtgaattttcaaatcgcctattcgagtttcattttgcccgttctgtggtgaaagtc

SEQ ID NO: 596064 - DNA, 75 bp, synthetic construct
  source 1..75: mol_type = other DNA
ttttccttggtcgtgataaagggcgccttcaaataattaatgaattagctgatagattaacaaagctaggatgta

SEQ ID NO: 596065 - DNA, 75 bp, synthetic construct
  source 1..75: mol_type = other DNA
aaatgctaatataattgttgatataactaaagaaaaccaatctggctggactcttcgtatacttgaggcactatt

SEQ ID NO: 596066 - DNA, 75 bp, synthetic construct
  source 1..75: mol_type = other DNA
gatcctgcaggactgttttattggcgcggtaacccgtccggtgtaccggacatggctgaatatggtggttgcggc

SEQ ID NO: 596067 - DNA, 75 bp, synthetic construct
  source 1..75: mol_type = other DNA
ggctggtagtgtcgtcagcgttgatgctgacggtgcagtggagtgggaaacagtaaaacggttgactgttcgcgg

SEQ ID NO: 596068 - DNA, 75 bp, synthetic construct
  source 1..75: mol_type = other DNA
aacctacattctaccgacatcgtaaagaattgctgtcttttgggatagatattaatttttattgtgaatcccctg

SEQ ID NO: 596069 - DNA, 75 bp, synthetic construct
  source 1..75: mol_type = other DNA
agggagaatagaaatgaatcaaaataccatattaactgatgaaaaaataattaatctcccaagaaaaatacagtc

SEQ ID NO: 596070 - DNA, 75 bp, synthetic construct
  source 1..75: mol_type = other DNA
cgatctgttggatcagacggggaaggccgggcaactcatctttatattgacggaaatccgtcaaaatttcttcag

SEQ ID NO: 596071 - DNA, 75 bp, synthetic construct
  source 1..75: mol_type = other DNA
atcggcaggtcatggaagggcaatttaagatctcgcgcatcgatatcaattacatgtattcattgtcaacattag

SEQ ID NO: 596072 - DNA, 75 bp, synthetic construct
  source 1..75: mol_type = other DNA
tatatgtattcattgtcaacattagaaaatgtccgcgcatggctatatgccgcagaatttaaagctaaaactcgc

SEQ ID NO: 596073 - DNA, 75 bp, synthetic construct
  source 1..75: mol_type = other DNA
gtcaacgacaaaggaggaaacagtgccggaactgaacgacagtatcagcgcgacaccgaaagccagcatgaagaa

SEQ ID NO: 596074 - DNA, 75 bp, synthetic construct
  source 1..75: mol_type = other DNA
gaaacggtctggaacggacggcgggagtgccattctggcttgaggcgatggagccggattttgttcccatgcgca

SEQ ID NO: 596075 - DNA, 75 bp, synthetic construct
  source 1..75: mol_type = other DNA
gcctcagccattacgaaaaaacggggaaatggcggctgagctggctgcggatatccgccggttgtgggctgaatg

SEQ ID NO: 596076 - DNA, 75 bp, synthetic construct
  source 1..75: mol_type = other DNA
atgtccgcacaagctcacgtcagagaaagcgaaagctcatctggttcattcatctcctggcagttccttgtctgg

SEQ ID NO: 596077 - DNA, 75 bp, synthetic construct
  source 1..75: mol_type = other DNA
tgctggcagccgtgtttaccgccgttctgtccggggtgttgtggcacaggctggacagcacccgccacgataacc

SEQ ID NO: 596078 - DNA, 75 bp, synthetic construct
  source 1..75: mol_type = other DNA
aaaactatagatcatgcgacttccagttattgcaagctctcttctgaaggagtttatatacaaaaggaatataaa

SEQ ID NO: 596079 - DNA, 75 bp, synthetic construct
  source 1..75: mol_type = other DNA
tctgttgtactttggggactgggtgcctcgctgggcttcccgctgaccatttctgccgccagcgataccggcccc

SEQ ID NO: 596080 - DNA, 75 bp, synthetic construct
  source 1..75: mol_type = other DNA
ataaaacggttttgcctatgatgcacggcttttatagcctgggcacgctggcaggcgctggtgtcgggatggcgt

SEQ ID NO: 596081 - DNA, 75 bp, synthetic construct
  source 1..75: mol_type = other DNA
tcagaagatcgtcgcatcgcgctggacctacgcatcaaacagctagatgcagaaattaaagaagcgcgtaaaacc

SEQ ID NO: 596082 - DNA, 75 bp, synthetic construct
  source 1..75: mol_type = other DNA
gcgcgttgatcgggatgatgatattaagtctggcgctctggctgacatcgcccgtgctctttgccgttggtcttg

SEQ ID NO: 596083 - DNA, 75 bp, synthetic construct
  source 1..75: mol_type = other DNA
gtacgcctgctatccgcgatattctttctgtttcgatcgctgaaatgggcggagtcctctttggtctgtcgatcg

SEQ ID NO: 596084 - DNA, 75 bp, synthetic construct
  source 1..75: mol_type = other DNA
cagcgattcgcgacattctttctgtttcgatcgctgaaatgggcggtgtactctttggcttgtcgatcggttcga

SEQ ID NO: 596085 - DNA, 75 bp, synthetic construct
  source 1..75: mol_type = other DNA
gagaatgaaacccgccgttcattattcgagcattttgatattgatgtggtccgcaatctgaaaacccgacgtaca

SEQ ID NO: 596086 - DNA, 75 bp, synthetic construct
  source 1..75: mol_type = other DNA
cgtcttcatttttttcgaaaaagaacactgtaacaacgtttttattgttaattacagtagcgttatattcttcct

SEQ ID NO: 596087 - DNA, 75 bp, synthetic construct
  source 1..75: mol_type = other DNA
attacccgctggcagggaaaatcagatgtttttgatgcaaatcataacgtgtttgactataacgtattgcgaaag

SEQ ID NO: 596088 - DNA, 75 bp, synthetic construct
  source 1..75: mol_type = other DNA
atcagggatacggaaagcaactgattgatatagccctacatgagggaaaagacctttccacattgccggtttgtc

SEQ ID NO: 596089 - DNA, 75 bp, synthetic construct
  source 1..75: mol_type = other DNA
aaccgtttcccgtctgcttcgtttaccgttatcagagataacatctattgaagaacaaccgttgctgcctgcctt

SEQ ID NO: 596090 - DNA, 75 bp, synthetic construct
  source 1..75: mol_type = other DNA
gattttcaacgttctgagacgggttttcgttcaagaggaaagtattttgacgtcaactggcccatagcagatgaa

SEQ ID NO: 596091 - DNA, 75 bp, synthetic construct
  source 1..75: mol_type = other DNA
atagagtcattgcataccctgaaacaagtgcatcgttcaggcaaatcatttcgttcttatgtttttccttgtgat

SEQ ID NO: 596092 - DNA, 75 bp, synthetic construct
  source 1..75: mol_type = other DNA
acaggcgctacagtaaccagcataaatcaggctgcggctaaaatggcgcgggcaggaatcttggtcattgatggt

SEQ ID NO: 596093 - DNA, 75 bp, synthetic construct
  source 1..75: mol_type = other DNA
aatacttgagaggaagactgttcttaaacgtgtctatgacaaggtctgtggtgtgattgatacctttatcaacgg

SEQ ID NO: 596094 - DNA, 75 bp, synthetic construct
  source 1..75: mol_type = other DNA
gcagcaggagcagaagaaaaagatcatggatattgtcgacagcgacgtcacgctgcgtagtaaacgtgagcttat

SEQ ID NO: 596095 - DNA, 75 bp, synthetic construct
  source 1..75: mol_type = other DNA
ctgccggatgcatacaaatccgtgatcgaagcactgaaacacggtgggctgaagaatcgtgtcagcgtcaacatc

SEQ ID NO: 596096 - DNA, 75 bp, synthetic construct
  source 1..75: mol_type = other DNA
ggcgctgatccgtaccgatcgtctttcctgccataaaaacgggcatgtgattgatatgccttttaaaggccatgt

SEQ ID NO: 596097 - DNA, 75 bp, synthetic construct
  source 1..75: mol_type = other DNA
tatgcaggaaaatatgagttccgacagaaatgcagtaaaaaaaaggagtctcgcactcctctccagaaaactcca

SEQ ID NO: 596098 - DNA, 75 bp, synthetic construct
  source 1..75: mol_type = other DNA
attcaggttgccggtttgagtcggcttcattgtggttactggccacgctatgcgccaataataccaggagtcaat

SEQ ID NO: 596099 - DNA, 75 bp, synthetic construct
  source 1..75: mol_type = other DNA
tagaaacgcagctggtggaacaactggttggcatgcactacgagcgggtgaatgtcaccgatgaaaccagtatga

SEQ ID NO: 596100 - DNA, 75 bp, synthetic construct
  source 1..75: mol_type = other DNA
agcgacccgtcccctatgcagttccgtctgaccggcctggtcagaatgcccaatgacaaaacctatgacctgacc

SEQ ID NO: 596101 - DNA, 75 bp, synthetic construct
  source 1..75: mol_type = other DNA
ccggtcatcccggtaggggcaggaacggaagtgacggtggtattccaggaaggtttccagctgaagtacacggat

SEQ ID NO: 596102 - DNA, 75 bp, synthetic construct
  source 1..75: mol_type = other DNA
ccgttggcattatctgctgatactgtgctgcatcatgatgttcgccattaccccgataatattatcaacatggcg

SEQ ID NO: 596103 - DNA, 75 bp, synthetic construct
  source 1..75: mol_type = other DNA
cgagttacgtttcgcgcgttgggatgagttcgatttcgataaatctctctggcgagtgcctgcaaaacgagaaga

SEQ ID NO: 596104 - DNA, 75 bp, synthetic construct
  source 1..75: mol_type = other DNA
ctgagcatttggatgagcgtcgtttgatggtgcagtggtgggcagattttctatattccaataaatcacgttcta

SEQ ID NO: 596105 - DNA, 75 bp, synthetic construct
  source 1..75: mol_type = other DNA
gatggttcagtggtgggctgattatcttgatgctaatttgcatacgaaaattacaccgttcgattttgctaaaaa

SEQ ID NO: 596106 - DNA, 75 bp, synthetic construct
  source 1..75: mol_type = other DNA
ttttcccgggggatcatgacgcaactaaggttatgagtgaaaacacagtgaatagcgcattgcgtgcgatgggat

SEQ ID NO: 596107 - DNA, 75 bp, synthetic construct
  source 1..75: mol_type = other DNA
aagtcgaacagaaagaagttcaggccgagaattcgggggcatatacattcgaaaccattgctcgtgaatggcacg

SEQ ID NO: 596108 - DNA, 75 bp, synthetic construct
  source 1..75: mol_type = other DNA
taaggtcatgagtgaaaacacggtgaatggcgcattgcgtgccatgggttatgacacgaaaaccgaagtttgcgg

SEQ ID NO: 596109 - DNA, 75 bp, synthetic construct
  source 1..75: mol_type = other DNA
aaaagtaatgagtgaaaatgggtcttccccgatcatggtgggaaggctcagaacgccatattcagctttccgtag

SEQ ID NO: 596110 - DNA, 75 bp, synthetic construct
  source 1..75: mol_type = other DNA
ccagcaataagcgttggagtgaggaacatcgggcacgggttcttcgctatctagagctttatatctttccctata

SEQ ID NO: 596111 - DNA, 75 bp, synthetic construct
  source 1..75: mol_type = other DNA
gtacgtgcagcttatattcatacatctgaacatttagatgagcgacgactgatgattcaatggtgggcggattac

SEQ ID NO: 596112 - DNA, 75 bp, synthetic construct
  source 1..75: mol_type = other DNA
ccttgctaacttttgtgcgttccagtgagttacgtttcgcgcgttggaacgagtttgacttcgataaatcccttt

SEQ ID NO: 596113 - DNA, 75 bp, synthetic construct
  source 1..75: mol_type = other DNA
ggctgttttacctgacgcgaggccgcgccaggctttacgccacgctagctaatggtcgcgtgtcgctgatcgatt

SEQ ID NO: 596114 - DNA, 75 bp, synthetic construct
  source 1..75: mol_type = other DNA
ggacaatacccggaattcgtaagcctattcccggcgtaaaacactctgagcgtgggatgaagatgaaaactgaac

SEQ ID NO: 596115 - DNA, 75 bp, synthetic construct
  source 1..75: mol_type = other DNA
gtcacccgaaggtgacaaagttagcctgtacatttttaagtcacaaaagatgaatgtcaagttattcaacatcga

SEQ ID NO: 596116 - DNA, 75 bp, synthetic construct
  source 1..75: mol_type = other DNA
gaacacaacacggcggcgtgctggtgaaggcgtggtggaaaactgcagtaccgtggggcatttattcagcaactg

SEQ ID NO: 596117 - DNA, 75 bp, synthetic construct
  source 1..75: mol_type = other DNA
ggtagctcgctggcattaacgggttcgccagtcggcgcaatgaaagtatttttgattttctatatcgcctgcgtg

SEQ ID NO: 596118 - DNA, 75 bp, synthetic construct
  source 1..75: mol_type = other DNA
atgacaggcaaagaggtaattcttcactacctgaaaacgcaccggactttctgcgcgccggatgtagctgcggca

SEQ ID NO: 596119 - DNA, 75 bp, synthetic construct
  source 1..75: mol_type = other DNA
tcagcgggaagcggtcaccgaaacggcggcagcattgggctttatctcagcgattggcgcagttggcggcttttt

SEQ ID NO: 596120 - DNA, 75 bp, synthetic construct
  source 1..75: mol_type = other DNA
ggtagaccaacaaacaccattgggcgtattggaacatcttctcgtcaggcccccaatgtcggcaccacgaatggc

SEQ ID NO: 596121 - DNA, 75 bp, synthetic construct
  source 1..75: mol_type = other DNA
gggaggttttttaaatgcctttgtttctcctcctgccgatacattcgctggctcattaaatggtattgcgggact

SEQ ID NO: 596122 - DNA, 75 bp, synthetic construct
  source 1..75: mol_type = other DNA
gcaatctgaacagcctcgatacccgcatggtgccacagaccagcgcatgggcggtaaaccgtgtggcggcaaaga

SEQ ID NO: 596123 - DNA, 75 bp, synthetic construct
  source 1..75: mol_type = other DNA
ggggcaacctgccagccattaagctgggggcggctcaggtcaggctggcgcggcgtggcggaaagctacggtacc

SEQ ID NO: 596124 - DNA, 75 bp, synthetic construct
  source 1..75: mol_type = other DNA
gttcattcacgacggtttattaattaaaagcaagaaagggtatctcattaaaggtgatgctgccaacttactgat

SEQ ID NO: 596125 - DNA, 75 bp, synthetic construct
  source 1..75: mol_type = other DNA
ttttccggggggcatttgttcagcaactggcgaatggccgctggcatgttctgaggcgtcttcctgaagcgcgtt

SEQ ID NO: 596126 - DNA, 75 bp, synthetic construct
  source 1..75: mol_type = other DNA
atgtatgcccgtatccggattaaccggggcaacctgccagccattaagctcggggcggctcaggtcaggctggcg

SEQ ID NO: 596127 - DNA, 75 bp, synthetic construct
  source 1..75: mol_type = other DNA
ccgcgaccgcatcattgctgcggaaatgccgaaacagctggggtatgccctgaaacagcaactgaggatacattt

SEQ ID NO: 596128 - DNA, 75 bp, synthetic construct
  source 1..75: mol_type = other DNA
ctgtggcactggtggctttctgctgggtgcctatcaatacatcgttacccagttggctatcaacgctggtaccaa

SEQ ID NO: 596129 - DNA, 75 bp, synthetic construct
  source 1..75: mol_type = other DNA
tgaaacgctggtaacagacgctttctttttgaatagaaaattagacaaactgcatgatgcaaatatttttgaagt

SEQ ID NO: 596130 - DNA, 75 bp, synthetic construct
  source 1..75: mol_type = other DNA
tttttaaataaaaaattagacaaactgcatgatgcaaatatttttgaggttataaagcataaggaaaacatcgtt

SEQ ID NO: 596131 - DNA, 75 bp, synthetic construct
  source 1..75: mol_type = other DNA
tgcgttgagggattttctggttctgggttatacccgaagggaggcctgtgaacgacatgaggtttctcagggata

SEQ ID NO: 596132 - DNA, 75 bp, synthetic construct
  source 1..75: mol_type = other DNA
gctgatatggaagtggaattgcttggcgcggaactggttgcagaatacaaaataacagaatcggaagacggggga

SEQ ID NO: 596133 - DNA, 75 bp, synthetic construct
  source 1..75: mol_type = other DNA
ggtgatactgatgtcgaattacttggcgctgaactgtttgcggaatacaaaatgactgaaggggtagaaggggga

SEQ ID NO: 596134 - DNA, 75 bp, synthetic construct
  source 1..75: mol_type = other DNA
tttaatgcagaccatcttgaagacccggatagaattaaaagcctagtttttgcctatctgatgttccagggtatc

SEQ ID NO: 596135 - DNA, 75 bp, synthetic construct
  source 1..75: mol_type = other DNA
gaagagcaagaactgattttacaacggcgcgaaggtaagtgggaaatcgctgattttatccacccgaacagcggc

SEQ ID NO: 596136 - DNA, 75 bp, synthetic construct
  source 1..75: mol_type = other DNA
accagaagaacaggttgatccgcgcaaagccgccgtcgaagctgctattgcccgtgccaaagcacgcaagctgga

SEQ ID NO: 596137 - DNA, 75 bp, synthetic construct
  source 1..75: mol_type = other DNA
tggaacagcaacaggctaacgcagaaccagaagaacaggttgatccgcgcaaagccgccgtcgaagctgctattg

SEQ ID NO: 596138 - DNA, 75 bp, synthetic construct
  source 1..75: mol_type = other DNA
taggaagtctttcaacattcctgtttattgcagaaaaggcaggatatgacgttattgcaccagcagatgaagatg

SEQ ID NO: 596139 - DNA, 75 bp, synthetic construct
  source 1..75: mol_type = other DNA
aaaagcaaccatcctacatacacgccatagaaaaaataaaggagaaattaattgccgagtataacatacaaaaag

SEQ ID NO: 596140 - DNA, 75 bp, synthetic construct
  source 1..75: mol_type = other DNA
gcagcaacaaggcgttctggaaactggcgatctggaagaggcgctgaatgcggcgcaagccatcggcgatgaccg

SEQ ID NO: 596141 - DNA, 75 bp, synthetic construct
  source 1..75: mol_type = other DNA
ttttccgtggcactattccagaaagtgaaaaatacggcgaatttagtggaatgcctggcgcatgtttccgtgtag

SEQ ID NO: 596142 - DNA, 75 bp, synthetic construct
  source 1..75: mol_type = other DNA
ttatcaccacaggcacaggcagtgaaagagttgttaatgtcagtgattagttctccagtgatggaaaaaaggcag

SEQ ID NO: 596143 - DNA, 75 bp, synthetic construct
  source 1..75: mol_type = other DNA
cgtgttgatgaggctttttccttacggcgactcacggcaaaagtcattggtgaaattgagtctattgccacgctt

SEQ ID NO: 596144 - DNA, 75 bp, synthetic construct
  source 1..75: mol_type = other DNA
tgcgcgggcaattttacgtcagtgtgaacaggcccaactggcggtgcataatgtaggtcagacattgtcaggtca

SEQ ID NO: 596145 - DNA, 75 bp, synthetic construct
  source 1..75: mol_type = other DNA
gttatgtgactgtcaggcgttagcaaaccgcgactatcggcaattatccggtggtgaacaacagcgcgtgcaatt

SEQ ID NO: 596146 - DNA, 75 bp, synthetic construct
  source 1..75: mol_type = other DNA
attcccggaaattgttatttatctccatgaaaatagcggtgctgtgctcaacgaaaaactgataagccaccaact

SEQ ID NO: 596147 - DNA, 75 bp, synthetic construct
  source 1..75: mol_type = other DNA
acgttggtcaggcattatcggggcaagtctcgattggctttgcgccaggaaccgctgcgtcatccatcaccatgc

SEQ ID NO: 596148 - DNA, 75 bp, synthetic construct
  source 1..75: mol_type = other DNA
gtgacccggttgcgggtcaggttcaggtgccgtgcattgaacgtaacgccattgcctctgtgaaagcgatcaatg

SEQ ID NO: 596149 - DNA, 75 bp, synthetic construct
  source 1..75: mol_type = other DNA
atggagcacaacctcggtctgacgtgtgacccggtcgccggacaggtccaggtgccatgcatcgagcgtaacgcc

SEQ ID NO: 596150 - DNA, 75 bp, synthetic construct
  source 1..75: mol_type = other DNA
aacaggtaaagatatgaacgccaagtaccgcgaaacctctcgcggcggcctggcaatgaagatcgttgcctgcga

SEQ ID NO: 596151 - DNA, 75 bp, synthetic construct
  source 1..75: mol_type = other DNA
tagcgcaaatgaacctcttccttcccggcgattacagtgcagtaagacttcgtgtcgatgaggctttttccctac

SEQ ID NO: 596152 - DNA, 75 bp, synthetic construct
  source 1..75: mol_type = other DNA
atcgccgcgtcatctatcaccatgcccttattacaggcggttcgcgccgaatttccagaggtggttatctatcta

SEQ ID NO: 596153 - DNA, 75 bp, synthetic construct
  source 1..75: mol_type = other DNA
actccgacccgctttggcaatatgtcagggcagatgcgtaccttcctggatcagactggcggcctgtgggcttcc

SEQ ID NO: 596154 - DNA, 75 bp, synthetic construct
  source 1..75: mol_type = other DNA
aggctaatgcggagccagaagaacagattgatccgcgcaaagctgccgtcgaagcggctattgcacgcgccaaag

SEQ ID NO: 596155 - DNA, 75 bp, synthetic construct
  source 1..75: mol_type = other DNA
atgaaatcgcggttaacttcaatcacatggaagaggtagccgcagcacaccggcagcgtattccgttcacattaa

SEQ ID NO: 596156 - DNA, 75 bp, synthetic construct
  source 1..75: mol_type = other DNA
aaacgttaccagaccacagaagataacccccatgcagtagctgaggcgtatctgcgcgaggccagagggctggag

SEQ ID NO: 596157 - DNA, 75 bp, synthetic construct
  source 1..75: mol_type = other DNA
tgtggccgtgaaaataaatgcggtaaggaggtcgcagtcaaagagctgtattccgatatttttgaggactggtca

SEQ ID NO: 596158 - DNA, 75 bp, synthetic construct
  source 1..75: mol_type = other DNA
cccggatgtgttttcatcatggtcagatcgctatatcagtacgaaagatgaaccatacgcagcggcggcagctta

SEQ ID NO: 596159 - DNA, 75 bp, synthetic construct
  source 1..75: mol_type = other DNA
atcggcgttcgtggcgttaagaccaacaataacaacacctacgacccggattttaagggtgctatcgtgattgca

SEQ ID NO: 596160 - DNA, 75 bp, synthetic construct
  source 1..75: mol_type = other DNA
aagcggtaccaggacacccctgaaaccccacatgccgctgctgaggcgtacctgcgtgaggcgcgggggctggat

SEQ ID NO: 596161 - DNA, 75 bp, synthetic construct
  source 1..75: mol_type = other DNA
gatcacgcgctgctggtggtggcttgcgatgacggtgtgatggcgcagacccgtgagcatctggcgattttgcag

SEQ ID NO: 596162 - DNA, 75 bp, synthetic construct
  source 1..75: mol_type = other DNA
tgcgttatctgttcatctggaacgcggcgcggttaaccttgccgatttcgcctgggcacggcagctcaacggcga

SEQ ID NO: 596163 - DNA, 75 bp, synthetic construct
  source 1..75: mol_type = other DNA
gcgatgacggcgtgatggcacagacccgtgagcatctggcgattttgcagctgaccggtaacccgatgctgacag

SEQ ID NO: 596164 - DNA, 75 bp, synthetic construct
  source 1..75: mol_type = other DNA
tacgagatctggcaaaagagacggggaccgacgaacaggcaatgcgtctgacgctacggcaggctgcgcagcagg

SEQ ID NO: 596165 - DNA, 75 bp, synthetic construct
  source 1..75: mol_type = other DNA
tcgtgagcatctggcgattttacagcttacgggtaatccaatgcttaccgtggcgttgaccaaggccgatcgcgt

SEQ ID NO: 596166 - DNA, 75 bp, synthetic construct
  source 1..75: mol_type = other DNA
actggccgcagccggatggtcgcgtgcctggttttatcgacgtacccggtcatgaaaagtttctttccaacatgc

SEQ ID NO: 596167 - DNA, 75 bp, synthetic construct
  source 1..75: mol_type = other DNA
atcgcgaaatgattgagttgctcggagccggacgttcccgacctttgacaggccgcaaaaccattcgtagtgagg

SEQ ID NO: 596168 - DNA, 75 bp, synthetic construct
  source 1..75: mol_type = other DNA
gatcgcagagcaactggataagccagttgatgacgtcagccgtatgcttcgtcttaacgagcgcattacctcggt

SEQ ID NO: 596169 - DNA, 75 bp, synthetic construct
  source 1..75: mol_type = other DNA
tcagccgtatgcttcgtcttaacgaacgcattacctcggtagacaccccgttgggcggtgattccgaaaaagcgt

SEQ ID NO: 596170 - DNA, 75 bp, synthetic construct
  source 1..75: mol_type = other DNA
actgtaaatagtgctggtggctggactatttctgatattccgctcgacttcaagttaagtgatgcacagcatttt

SEQ ID NO: 596171 - DNA, 75 bp, synthetic construct
  source 1..75: mol_type = other DNA
ccatgaatttatgaataacggtcagtctggcccacatcaggccatggccgaagcgcatcgtcgcatgctcagtgc

SEQ ID NO: 596172 - DNA, 75 bp, synthetic construct
  source 1..75: mol_type = other DNA
tgtggatgcgtcacgaagggggacataaccgctggagtgatggtacaggtcagctgaaaacacagggtaaccgtt

SEQ ID NO: 596173 - DNA, 75 bp, synthetic construct
  source 1..75: mol_type = other DNA
aggcgcttatgattacatgctggggcgtggacagggaaacaacagcggtaactggtatctgaccagtggaaaaaa

SEQ ID NO: 596174 - DNA, 75 bp, synthetic construct
  source 1..75: mol_type = other DNA
caggatgggcaggccacccgtcagcagatgatattcagtaatgaaacccgccggcttgaggaagcccggaagagc

SEQ ID NO: 596175 - DNA, 75 bp, synthetic construct
  source 1..75: mol_type = other DNA
ataaggacaagaagatcggcagtcaggatgactatctgaaacactatttcgatggtggcaaaatcaataagctag

SEQ ID NO: 596176 - DNA, 75 bp, synthetic construct
  source 1..75: mol_type = other DNA
atctctggctggcttttggcgaaaagggaattattaccctggctttctggctgggttcgctgttcagtgaacaaa

SEQ ID NO: 596177 - DNA, 75 bp, synthetic construct
  source 1..75: mol_type = other DNA
gttatcacgatcgtgaggctctattcaccgaagcccttcaaaagttcgaccagattcgcaaacgtgagaaggaag

SEQ ID NO: 596178 - DNA, 75 bp, synthetic construct
  source 1..75: mol_type = other DNA
aactattatttgctcctgttatggctcatttcataatgaacttcagagacatgaataaatgggttatcaggtttg

SEQ ID NO: 596179 - DNA, 75 bp, synthetic construct
  source 1..75: mol_type = other DNA
gcgcgggccaccacatccagcctgtcttccggttcagggatttcaaaaaccgccgtgaaggagcgtttcaccaca

SEQ ID NO: 596180 - DNA, 75 bp, synthetic construct
  source 1..75: mol_type = other DNA
atgctgacgaaatatgcccttgtggcagtcatagtgctgtgtttgacggtactgggatttacgcttctggtcggc

SEQ ID NO: 596181 - DNA, 75 bp, synthetic construct
  source 1..75: mol_type = other DNA
cttagtctgaagctgtcatcagagaatcaacgctggctttacgaactgtgctttgcttttgacggtattccactt

SEQ ID NO: 596182 - DNA, 75 bp, synthetic construct
  source 1..75: mol_type = other DNA
cttgagatactgcccaagattggtaaaaacctcacgcttgcgagtgcgcgagaaacattcattacgatgctaagt

SEQ ID NO: 596183 - DNA, 75 bp, synthetic construct
  source 1..75: mol_type = other DNA
tatggggattacgcttgtggtcggcgctgggtgtcgcattctttggctgggcctttatcaccagcctacaggcca

SEQ ID NO: 596184 - DNA, 75 bp, synthetic construct
  source 1..75: mol_type = other DNA
agttccaggcggcgctacagcatccttatgtgcttatcggcctggccatcgtttttactttgctggcgatgtcga

SEQ ID NO: 596185 - DNA, 75 bp, synthetic construct
  source 1..75: mol_type = other DNA
atgctgacgaaatatgcccttgtggcagtcatagtgctgtgtttgacggtcctgggatttacgcttctggtcgga

SEQ ID NO: 596186 - DNA, 75 bp, synthetic construct
  source 1..75: mol_type = other DNA
gatgcaatggtggtctgattatctggatgtgtgccgcgaggggtatgttgcgccctggatatatgccaaacaaca

SEQ ID NO: 596187 - DNA, 75 bp, synthetic construct
  source 1..75: mol_type = other DNA
gcaacttaaagccctcttccaaacccataaaactgtctgattcacacggtctgtatttgctggtcaatcccggcg

SEQ ID NO: 596188 - DNA, 75 bp, synthetic construct
  source 1..75: mol_type = other DNA
gccaatgagtgaaaacaccaccaaccgggcgctgcgtctgatggggtatgatacgaaaactgaaatctgcgggca

SEQ ID NO: 596189 - DNA, 75 bp, synthetic construct
  source 1..75: mol_type = other DNA
actttaaaattatgggttgtgccataccggataatggcaaaacgtggtgagaggatgatgtgggcaagtgatgtg

SEQ ID NO: 596190 - DNA, 75 bp, synthetic construct
  source 1..75: mol_type = other DNA
ttgctgcatcggctgcaactattattgcaatggcgggtgataaaattattatcccatctaattctatgatgatga

SEQ ID NO: 596191 - DNA, 75 bp, synthetic construct
  source 1..75: mol_type = other DNA
aatgctggtaaagacgagggcgttaaatcagaacgcgagcgcattgaaacaatcgagaatagcgtgattccaggt

SEQ ID NO: 596192 - DNA, 75 bp, synthetic construct
  source 1..75: mol_type = other DNA
aatttgtccccgcggatcaagcctttgcttttgattttcagcaaaaccaacatgaccttaatctgacctggcaga

SEQ ID NO: 596193 - DNA, 75 bp, synthetic construct
  source 1..75: mol_type = other DNA
tccattatggggccgttctattgcccggcggatggcacagtttatatcgatctctccttctatgatgacatgaaa

SEQ ID NO: 596194 - DNA, 75 bp, synthetic construct
  source 1..75: mol_type = other DNA
acaatatatcaatggctgttgcctcaattggtaacctgatgtggtatgcgtcagaaaatgaggaatatgacgaaa

SEQ ID NO: 596195 - DNA, 75 bp, synthetic construct
  source 1..75: mol_type = other DNA
ctggtagttgccgctgccggattacagttccaggcggcgctacagcacccttacgtgctcattggcctcgccatc

SEQ ID NO: 596196 - DNA, 75 bp, synthetic construct
  source 1..75: mol_type = other DNA
tattccgctgcggatggggctactgacaatatatcaatggctgttgcgtcaattggtagcctgatgtggcatgcg

SEQ ID NO: 596197 - DNA, 75 bp, synthetic construct
  source 1..75: mol_type = other DNA
cggtgattctggcaaccacggaagacacttggggacagcaattcgagaagatgggtaaaacctatcagcaaccga

SEQ ID NO: 596198 - DNA, 75 bp, synthetic construct
  source 1..75: mol_type = other DNA
cggcggatggcacggtttatatcgatctctccttctatgatgacatgaaagacaaacttggcgcggatggcgatt

SEQ ID NO: 596199 - DNA, 75 bp, synthetic construct
  source 1..75: mol_type = other DNA
aattaccgtctttggtaaccgcctgctgccgaaaagcggcccgtggatggaacaagtcaaaaccgcgtttggttt

SEQ ID NO: 596200 - DNA, 75 bp, synthetic construct
  source 1..75: mol_type = other DNA
gcactgccggtcttcctgctggagcgagtgattggtgatgtatggggattacgcttgtggtcggcgctgggtgtc

SEQ ID NO: 596201 - DNA, 75 bp, synthetic construct
  source 1..75: mol_type = other DNA
gttagcgtgcgcccacttcaggattgggcatttggtgcaacgcataccgcgcaaactcagacgcatctcaacttt

SEQ ID NO: 596202 - DNA, 75 bp, synthetic construct
  source 1..75: mol_type = other DNA
tgtttggcttgtttaccctgcaactcccctcttcgctgcaaacacgtctcacgctgatgagcaatcgccaacagg

SEQ ID NO: 596203 - DNA, 75 bp, synthetic construct
  source 1..75: mol_type = other DNA
aaaaaaatcaaaacagtagatgagttaaatcaggcgctcgttgcagccaaaggcaaaccggtaatgctagatctc

SEQ ID NO: 596204 - DNA, 75 bp, synthetic construct
  source 1..75: mol_type = other DNA
ctctccaccaccagagcattgttgctgacctttatttatgtgcaagggatggcgctgacctacacggcgctgggt

SEQ ID NO: 596205 - DNA, 75 bp, synthetic construct
  source 1..75: mol_type = other DNA
ggcgcaaaaatgcgtactccgcatatcgtgccgctctcccgccaggcgattgccattctgaaacagatacaggaa

SEQ ID NO: 596206 - DNA, 75 bp, synthetic construct
  source 1..75: mol_type = other DNA
gacgggcaaacgctggagttaaccggcactgagtttaccctgctctatttgctggcacagcatctgggtcaggtg

SEQ ID NO: 596207 - DNA, 75 bp, synthetic construct
  source 1..75: mol_type = other DNA
gggaacaggcgcttgatcttctggacgacagcattgatttacttttgcttgatgtaatgatgccgaagaaaaatg

SEQ ID NO: 596208 - DNA, 75 bp, synthetic construct
  source 1..75: mol_type = other DNA
ccgtatgaactgcgcgtatctgactatgacggttacaaccagtttgtcgttcaccgttcaccgcagccgctgatg

SEQ ID NO: 596209 - DNA, 75 bp, synthetic construct
  source 1..75: mol_type = other DNA
ccggaattgtttttggatttacacggtctgacgcagctgcaggccaagcaggaactgggcgcgttgattgccgcc

SEQ ID NO: 596210 - DNA, 75 bp, synthetic construct
  source 1..75: mol_type = other DNA
caggctgatgccagccattatttctcagatgagtttcagccgttactgaataccgaaggcccagtgaaatatgtc

SEQ ID NO: 596211 - DNA, 75 bp, synthetic construct
  source 1..75: mol_type = other DNA
tgccagatcgtaaagacggtcatccgtggtttaaaacgttgcgtggtcgcggctatctgatggtctccgcttcat

SEQ ID NO: 596212 - DNA, 75 bp, synthetic construct
  source 1..75: mol_type = other DNA
gcggtgaacaacagcgtgtacaattggcgcgcctgctggtgcaactctgggaacccactccctcgccgaaatggt

SEQ ID NO: 596213 - DNA, 75 bp, synthetic construct
  source 1..75: mol_type = other DNA
gctgcttcgccagctaaccggctatcttcaacctgatagcggcgaatgccggttgtttaataagccattaaatga

SEQ ID NO: 596214 - DNA, 75 bp, synthetic construct
  source 1..75: mol_type = other DNA
ttgacacaacaggcgctgacaatgctctatggcgcggatattaccgtgttaaaagatcctgccaaccactcacca

SEQ ID NO: 596215 - DNA, 75 bp, synthetic construct
  source 1..75: mol_type = other DNA
ccgctgatgtctccggcgtggtcaccggatggctctaaactggcatatgtcaccttcgaaagcggtcgttccgcg

SEQ ID NO: 596216 - DNA, 75 bp, synthetic construct
  source 1..75: mol_type = other DNA
gtacgtaatggatttggcttctggtcagatccgccaggtgactgatggtcgcagtaacaataccgaaccgacctg

SEQ ID NO: 596217 - DNA, 75 bp, synthetic construct
  source 1..75: mol_type = other DNA
aaaatgattcgcgtcgccgttcaggagtatattatttaaatgcttataaagatgcatatgtacaatataatagag

SEQ ID NO: 596218 - DNA, 75 bp, synthetic construct
  source 1..75: mol_type = other DNA
aagcaggacacgattgtccatcgtccacaacgaaagaaagtcagcgaagtgccggtcaagcggttgattcaggag

SEQ ID NO: 596219 - DNA, 75 bp, synthetic construct
  source 1..75: mol_type = other DNA
atgatgactaaaacccaaataaataaattaataaaaatgatgaatgatttagactatccatttgaagcaccgctc

SEQ ID NO: 596220 - DNA, 75 bp, synthetic construct
  source 1..75: mol_type = other DNA
ggaatgatttatccacatatccagaggcccgatccagtaaacagatccatgaatgatcaacaaaggatccattaa

SEQ ID NO: 596221 - DNA, 75 bp, synthetic construct
  source 1..75: mol_type = other DNA
cgatagaaaccagtggattaatggttattacaacgtttatcaacctcacacgaacaacgatggtttaccgccttg

SEQ ID NO: 596222 - DNA, 75 bp, synthetic construct
  source 1..75: mol_type = other DNA
gtcagtcttggcgcatacccgcttgtctcactggcagaagccaggcaacagcgcgacggtatccgtaagttactg

SEQ ID NO: 596223 - DNA, 75 bp, synthetic construct
  source 1..75: mol_type = other DNA
gtgatgcagtggaacgtcagatgagtcatcaggagcgtaatggtgtacgtgctgcttacattcataaagcagaac

SEQ ID NO: 596224 - DNA, 75 bp, synthetic construct
  source 1..75: mol_type = other DNA
atcgttgcccgcagcccttatctggtgctttttagtcgtcttggtaattattcacagcagtggctggatgaatcg

SEQ ID NO: 596225 - DNA, 75 bp, synthetic construct
  source 1..75: mol_type = other DNA
ttcaccggagttgtttctcgatttacacggtctgacgcaactacaggcaaaacaggaattaggcgcgttgattgc

SEQ ID NO: 596226 - DNA, 75 bp, synthetic construct
  source 1..75: mol_type = other DNA
catgtgatggcatttcaccaggcaccaaaagagtatggtggcgatgcggctttgttggtgctgattgaagtggaa

SEQ ID NO: 596227 - DNA, 75 bp, synthetic construct
  source 1..75: mol_type = other DNA
atgaaaaagaaatcatcacttagcgaggaggaccaggcgctgttccgccagttgatggcggggacccgccagata

SEQ ID NO: 596228 - DNA, 75 bp, synthetic construct
  source 1..75: mol_type = other DNA
atgtttccggggaagtctttctttagcgcgcatgaggtgtccacctgcaaaataagtgggtgcttaagttacagg

SEQ ID NO: 596229 - DNA, 75 bp, synthetic construct
  source 1..75: mol_type = other DNA
atggatgatcaaatagttgaatgtcccacctgtggaaatgaagccccggagtatctgaaagagtgcccacattgt

SEQ ID NO: 596230 - DNA, 75 bp, synthetic construct
  source 1..75: mol_type = other DNA
ggtggaggtgcgcggtgtggcaaataacgccgacaacgttagacagggcagcacggtaaaaggttttgttgccgg

SEQ ID NO: 596231 - DNA, 75 bp, synthetic construct
  source 1..75: mol_type = other DNA
gggcgcgaggcgctggagaaaaaaggctggtggcgcagtcaccgttggttagtgttacgtcgcctttgtcagttc

SEQ ID NO: 596232 - DNA, 75 bp, synthetic construct
  source 1..75: mol_type = other DNA
attgcatgacgtgcggtcgctgcgcggatgtctgttctgaggatgtatttacaataactacacgatggagttcgg

SEQ ID NO: 596233 - DNA, 75 bp, synthetic construct
  source 1..75: mol_type = other DNA
caccgtgctctacgccctggcaggaaagcgattattttgcagctgggtctgcccgctgaacccgattaccgactt

SEQ ID NO: 596234 - DNA, 75 bp, synthetic construct
  source 1..75: mol_type = other DNA
gttttcccgacagggaaaattttggtcgcagcgccatgcagctgccgccagaaaccgtttacgcccagacgctgt

SEQ ID NO: 596235 - DNA, 75 bp, synthetic construct
  source 1..75: mol_type = other DNA
tatggcctggtaacgcgcgaggaagtgtttgccgatcgcggttatcaggcagacggttcgctggtgccgcgaagc

SEQ ID NO: 596236 - DNA, 75 bp, synthetic construct
  source 1..75: mol_type = other DNA
gcatggcgatggagaacacgcactggcgttcgcccgccgactacgagctacatttgctgaaaaggggattgttgt

SEQ ID NO: 596237 - DNA, 75 bp, synthetic construct
  source 1..75: mol_type = other DNA
tcattcagcaggccggtaactccgtgctggcaaaagctaaccaggtaccgcagcaggttctgtctctgctgcagg

SEQ ID NO: 596238 - DNA, 75 bp, synthetic construct
  source 1..75: mol_type = other DNA
gcgtgaacgtactggcgaaagacggttcaatgaaaattcaggttggtgcgaatgacggccagactatcacgattg

SEQ ID NO: 596239 - DNA, 75 bp, synthetic construct
  source 1..75: mol_type = other DNA
gcagctactgttggggcacaggcttatgttaactctacaggtaaactgaccactgaaaccaccagtgcaggcact

SEQ ID NO: 596240 - DNA, 75 bp, synthetic construct
  source 1..75: mol_type = other DNA
ggcgcgaggcgctggagaaaaaaggctggtggcgcagtcaccgttggctggtgttacgtcgcctttgtcagttct

SEQ ID NO: 596241 - DNA, 75 bp, synthetic construct
  source 1..75: mol_type = other DNA
gctctctgtttgtatttgcatttctcatgaaatattgcattagcaatgaacttgtcggtaatgaaagtgcatgcg

SEQ ID NO: 596242 - DNA, 75 bp, synthetic construct
  source 1..75: mol_type = other DNA
gcagtgatcagtgctgatgcacttctttccgctagtaaagcgactgggtttacttctggcgcttataccgtaggt

SEQ ID NO: 596243 - DNA, 75 bp, synthetic construct
  source 1..75: mol_type = other DNA
tatacaaccaggcggcgaaagaggcacaactggcagacgccatcgccagagcggtatacgcttgcgatccggcat

SEQ ID NO: 596244 - DNA, 75 bp, synthetic construct
  source 1..75: mol_type = other DNA
agccagtaccgtaccttccctgtgtcacgaacggtgcaatagtgatccacacccaacgcctgaaatcagatccag

SEQ ID NO: 596245 - DNA, 75 bp, synthetic construct
  source 1..75: mol_type = other DNA
ccgctgggatgtccagaatattatggatgccctgggttatccgcgctatagagattactaccagagccgaacaat

SEQ ID NO: 596246 - DNA, 75 bp, synthetic construct
  source 1..75: mol_type = other DNA
atgatcgaatgggacccacaaggttcgattggaagcagcatgattcaaagtgtctcagaagatgatgtcttcctt

SEQ ID NO: 596247 - DNA, 75 bp, synthetic construct
  source 1..75: mol_type = other DNA
gtttgtcgatcaagaatttgcccaaattaagcatgtcctgcacggtattagcctgctgggacaatgtccggacag

SEQ ID NO: 596248 - DNA, 75 bp, synthetic construct
  source 1..75: mol_type = other DNA
tcttgcgcgaaggtttccacgttgtcacgccgaacaaaaaggccaacacctcgtcgatggattactaccatctgt

SEQ ID NO: 596249 - DNA, 75 bp, synthetic construct
  source 1..75: mol_type = other DNA
ttattttaatgttatccatgcctgctatttctgctgaacattctgatatgaagatgggtgacatggggtcatccg

SEQ ID NO: 596250 - DNA, 75 bp, synthetic construct
  source 1..75: mol_type = other DNA
agcaggtatcgtcgaattcgctcaggcactttccgcacgcggtgtggaactgctatctacaggaggcactgcccg

SEQ ID NO: 596251 - DNA, 75 bp, synthetic construct
  source 1..75: mol_type = other DNA
cgtgaagaccctgcatccgaaagtacatggtggcattctgggccgtcgcggccaggacgatgccattatggaaga

SEQ ID NO: 596252 - DNA, 75 bp, synthetic construct
  source 1..75: mol_type = other DNA
ttccggcccgcagccagaaagcctactaccgccagaacaaggatggttcagtgggtaaccggttcgttaaaaaat

SEQ ID NO: 596253 - DNA, 75 bp, synthetic construct
  source 1..75: mol_type = other DNA
cgtgacctgcgtaatccagccgggtgggtccatccgtgatgaagaagtgattgccgctgccgatgaacacggtat

SEQ ID NO: 596254 - DNA, 75 bp, synthetic construct
  source 1..75: mol_type = other DNA
gcccgtgaaggttgctcgctggaagatgcggttgagaacatcgatatcggcggcccgaccatggtgcgctccgcc

SEQ ID NO: 596255 - DNA, 75 bp, synthetic construct
  source 1..75: mol_type = other DNA
cggtcagtggggcgagcgtgttccgggtcttgatttcaaacgcgtgaacggcggtctgctggttcaggatcgcga

SEQ ID NO: 596256 - DNA, 75 bp, synthetic construct
  source 1..75: mol_type = other DNA
gcttaacaaagccacagcagcaaacgtgtttgcaaaccttgcagatggtgctgttgttgatactagcatttccaa

SEQ ID NO: 596257 - DNA, 75 bp, synthetic construct
  source 1..75: mol_type = other DNA
atctgaagaaaattgactcagatacgctggggctgagtgggtttaatgtgaatggtggcggggctgtggctaata

SEQ ID NO: 596258 - DNA, 75 bp, synthetic construct
  source 1..75: mol_type = other DNA
aacggcaaaggtactattgctaacaaagcggcaaccattagtgatctggcggcgacgggggcgaatgttactaac

SEQ ID NO: 596259 - DNA, 75 bp, synthetic construct
  source 1..75: mol_type = other DNA
gctaaccgttttacttctaacattaaaggtctgactcaagctgcacgtaacgccaacgacggtatctccgttgca

SEQ ID NO: 596260 - DNA, 75 bp, synthetic construct
  source 1..75: mol_type = other DNA
aaatcaacaacaacttacagcgtattcgtgagctgacggttcaggcttctaccgggactaactccgattctgacc

SEQ ID NO: 596261 - DNA, 75 bp, synthetic construct
  source 1..75: mol_type = other DNA
tggatgatgctctggctaaagttgatgcactgcgttccgatctgggtgctgtgcagaaccgtttcgattctacta

SEQ ID NO: 596262 - DNA, 75 bp, synthetic construct
  source 1..75: mol_type = other DNA
atcgaagatgctgactatgcgaccgaagtatctaacatgtctcgtgcacagatcctgcaacaagcaggtacttct

SEQ ID NO: 596263 - DNA, 75 bp, synthetic construct
  source 1..75: mol_type = other DNA
gtctttatttttgccgcactactgaaaaaaatggtccggcccatctgggctaatgtatttaactctgcactggca

SEQ ID NO: 596264 - DNA, 75 bp, synthetic construct
  source 1..75: mol_type = other DNA
gcgacgctggcgcaaccgccgcagtcgttccgggcgctgacacccggttacgcgcatccggtatcaaccagcgcg

SEQ ID NO: 596265 - DNA, 75 bp, synthetic construct
  source 1..75: mol_type = other DNA
aagtgagctatgagcctcctagaattattctggaacgtctgattcaagctgaagttggcgacatagacgaagcag

SEQ ID NO: 596266 - DNA, 75 bp, synthetic construct
  source 1..75: mol_type = other DNA
tactaaatataaaccgactatcggcgcgacagttaacttgaattctgcaggtaaattgaccactgataccaccag

SEQ ID NO: 596267 - DNA, 75 bp, synthetic construct
  source 1..75: mol_type = other DNA
ctgcattattactggcggcaagtctctttatgacaggctgcgtatctggctacggcaattactccagcgccagca

SEQ ID NO: 596268 - DNA, 75 bp, synthetic construct
  source 1..75: mol_type = other DNA
gtttcggtcatgtcagagtttttcccaaaaagcaaagccaaagtcaccagtatttatatgatgatgggtggactg

SEQ ID NO: 596269 - DNA, 75 bp, synthetic construct
  source 1..75: mol_type = other DNA
ctgctgcatctaaagctgacttggtagctgctaatgcaacagtggtcggcaacaaatatactgtgagtgcgggtt

SEQ ID NO: 596270 - DNA, 75 bp, synthetic construct
  source 1..75: mol_type = other DNA
atgactgataagtctcatcagtgcgtcattgtaggcatcgccggcgcatcggcttcaggtaaaagtcttattgct

SEQ ID NO: 596271 - DNA, 75 bp, synthetic construct
  source 1..75: mol_type = other DNA
tctccatttttgttgataccccgctggatatctgcctgatgcgccgcatcaagcgcgatgttaacgagcgcgggc

SEQ ID NO: 596272 - DNA, 75 bp, synthetic construct
  source 1..75: mol_type = other DNA
atgactgatcagtctcatcagtgcgtcattatcggtattgctggcgcatcggcttccggcaagagtctcattgcc

SEQ ID NO: 596273 - DNA, 75 bp, synthetic construct
  source 1..75: mol_type = other DNA
gcgtgaacgtactggcaaaagatggttccatgaaaattcaggttggcgcgaatgatggccagaccatcactatcg

SEQ ID NO: 596274 - DNA, 75 bp, synthetic construct
  source 1..75: mol_type = other DNA
agcagtacgccgacatcatcgtaccgcgtggcggcaaaaaccgcatcgctatcgatattctgaaagcgaaaatta

SEQ ID NO: 596275 - DNA, 75 bp, synthetic construct
  source 1..75: mol_type = other DNA
cggcaacgctattcgactggtatcaggcggatgaaatccctataattgccgcgtttggcgcttcgtcgccccttc

SEQ ID NO: 596276 - DNA, 75 bp, synthetic construct
  source 1..75: mol_type = other DNA
caattatagccactgctaacgcctgttcactggtgatggcgtgggtggcgactcagtatccaccgggtattgcta

SEQ ID NO: 596277 - DNA, 75 bp, synthetic construct
  source 1..75: mol_type = other DNA
ggtgctaactgttgccgcgttcagcattactatgccggagattttctggtcgataagtaatttccagtccgtcgc

SEQ ID NO: 596278 - DNA, 75 bp, synthetic construct
  source 1..75: mol_type = other DNA
cacatctgatactgtagatttttacctacaggatgatggttcagtgactaacggcagcggtaaggcagtttataa

SEQ ID NO: 596279 - DNA, 75 bp, synthetic construct
  source 1..75: mol_type = other DNA
agtaccctttatcgtgaattacgtgagcaagtcggtgatgaacacatcggcgtaattcccgaagactgctattac

SEQ ID NO: 596280 - DNA, 75 bp, synthetic construct
  source 1..75: mol_type = other DNA
atcctttggctgctatcgataaagcactgtctcaggttgactcgttgcgttctaacctaggtgcaattcaaaatc

SEQ ID NO: 596281 - DNA, 75 bp, synthetic construct
  source 1..75: mol_type = other DNA
ggatatgactattcaggttggtgcaaacgacggcgaaacaattactattaaactgcaggaaattaattccgacac

SEQ ID NO: 596282 - DNA, 75 bp, synthetic construct
  source 1..75: mol_type = other DNA
aacgaccgcgatattttaatttccgaccacgtaatagaacgcatcaactgtactaatggcaaaatcaactggggt

SEQ ID NO: 596283 - DNA, 75 bp, synthetic construct
  source 1..75: mol_type = other DNA
gcgttaacatcaatgactacaattccaaagactggatagcctcgtttaaacaggctttcagcgaagggcaaacgg

SEQ ID NO: 596284 - DNA, 75 bp, synthetic construct
  source 1..75: mol_type = other DNA
atgcgctctcttttgttgcactcaccaatattgaaatgaaacacgcatcactggaactacataaccagccgcaac

SEQ ID NO: 596285 - DNA, 75 bp, synthetic construct
  source 1..75: mol_type = other DNA
atgctatctcctttgttgcacttaccaatattgaaatgaaacacgcatcactggaactacacaaccagccgcaac

SEQ ID NO: 596286 - DNA, 75 bp, synthetic construct
  source 1..75: mol_type = other DNA
aatgcaagaatccactgcgggtccagcattgaccatgaatttcgacctgcgaaaggacgttcgtggtgtctttat

SEQ ID NO: 596287 - DNA, 75 bp, synthetic construct
  source 1..75: mol_type = other DNA
aatgatcgcgacattttgatatccgaccatgtcatcgagcgcatcaactgtactaacggcaaaatcaactggggt

SEQ ID NO: 596288 - DNA, 75 bp, synthetic construct
  source 1..75: mol_type = other DNA
cgctattgaatggaacgtggcgattaacgacagtgatattttgatatccgaccatctcattgagcgcattaactg

SEQ ID NO: 596289 - DNA, 75 bp, synthetic construct
  source 1..75: mol_type = other DNA
aaagagggcaaagctccgtcgatatcgacagagttaatcaccatattgttaatgtggaaaagattaactttagat

SEQ ID NO: 596290 - DNA, 75 bp, synthetic construct
  source 1..75: mol_type = other DNA
gcgttaacattaacgactacaaccctcacgactggatcgcctcatttaaacaagccttcagcgaagggcaaacgg

SEQ ID NO: 596291 - DNA, 75 bp, synthetic construct
  source 1..75: mol_type = other DNA
aatgcgaagaacataacaccggattacagtaaaaaagcaggtattgataacgcaacgattgccatatatggctgt

SEQ ID NO: 596292 - DNA, 75 bp, synthetic construct
  source 1..75: mol_type = other DNA
taacacccatcttgcttataaattgcgcggtatccaaatctctgccgggaatgccgtctcctttgtggcactgac

SEQ ID NO: 596293 - DNA, 75 bp, synthetic construct
  source 1..75: mol_type = other DNA
ggatgtgcgcggctctgactgcatcatcaaagggttggcgatgagcggttttggcccggtaacgcagatttatat

SEQ ID NO: 596294 - DNA, 75 bp, synthetic construct
  source 1..75: mol_type = other DNA
aagcaaaacatttccagcaccgttaagcgaatctgggatttgtaccagaacaccactcttaaagccgagaacggc

SEQ ID NO: 596295 - DNA, 75 bp, synthetic construct
  source 1..75: mol_type = other DNA
aggggcggcagagttatccgaattgtaaaatttggtatcgtgcgccatctgttttctctgctggcgcagcaggtg

SEQ ID NO: 596296 - DNA, 75 bp, synthetic construct
  source 1..75: mol_type = other DNA
caagctatcataaagaatattttactgagttagatttatccaaaaaaataaacatattgtatggacaaaatggtt

SEQ ID NO: 596297 - DNA, 75 bp, synthetic construct
  source 1..75: mol_type = other DNA
atgtagttatccctaatacaatgagaaacatcttagaatattactttgcatttgttcataaaactaacgagttac

SEQ ID NO: 596298 - DNA, 75 bp, synthetic construct
  source 1..75: mol_type = other DNA
tggcaattcagattctggaatattttgaccgcattggctttacgcgtcgtcgtggaaatgatcatttattgcgcg

SEQ ID NO: 596299 - DNA, 75 bp, synthetic construct
  source 1..75: mol_type = other DNA
acaataaagcatatgctattgggaattcgttaatgcaagttgtatcgtttattgtagataataatcttactacta

SEQ ID NO: 596300 - DNA, 75 bp, synthetic construct
  source 1..75: mol_type = other DNA
tcaggtgttcaggctgacgtgcgaattgtaaaccaggatgctcagaaaaaacaaaacccgccgaagcgggttatg

SEQ ID NO: 596301 - DNA, 75 bp, synthetic construct
  source 1..75: mol_type = other DNA
ccatatcagaaacaataaaacgaataaaagtattcgtccctcatgttatagcagagggaattgaaaatgacgtgt

SEQ ID NO: 596302 - DNA, 75 bp, synthetic construct
  source 1..75: mol_type = other DNA
acttattgcaatggaggttttaagcaggtttaaatttaataatggtatgcaagctcctaccataaagatactaaa

SEQ ID NO: 596303 - DNA, 75 bp, synthetic construct
  source 1..75: mol_type = other DNA
aaacagaatatttcaagtacagcaaaacgtatctgggatctttatcaaagcaccacgcttcatactgaagatggc

SEQ ID NO: 596304 - DNA, 75 bp, synthetic construct
  source 1..75: mol_type = other DNA
aagaaaaactagtcttgctcacatttcttcccttgagaaaatgctaaaaagtaacattgagttaattaataacaa

SEQ ID NO: 596305 - DNA, 75 bp, synthetic construct
  source 1..75: mol_type = other DNA
agaataaaagaaaccttttcacaaaggtgaagtcttctattagattatctaatatagatttaaatcaattattaa

SEQ ID NO: 596306 - DNA, 75 bp, synthetic construct
  source 1..75: mol_type = other DNA
gaattaaataccataaaagaacaaggagataacaatagcaaaaagatcaaagagctacgcgatcaaatatctaac

SEQ ID NO: 596307 - DNA, 75 bp, synthetic construct
  source 1..75: mol_type = other DNA
aagtcgcgattaccgcacaaagcggcgcacgcctggggctggatgaaggcaaagaagtattggttctgttgaagg

SEQ ID NO: 596308 - DNA, 75 bp, synthetic construct
  source 1..75: mol_type = other DNA
gtagtgggcgatggtatgcgtacgttgcgtggcatctcagcgaaattttttgctgcgctggcgcgcgctaatatc

SEQ ID NO: 596309 - DNA, 75 bp, synthetic construct
  source 1..75: mol_type = other DNA
cgtaaattcctctatgacaccaacgtcggtgcgggattaccggtcattgagaatctgcaaaacctgctcaatgca

SEQ ID NO: 596310 - DNA, 75 bp, synthetic construct
  source 1..75: mol_type = other DNA
ttgggcgcttaattcgcctggtgaaagaatatcatctgctgaacccggtcattgttgactgcacctccagccagg

SEQ ID NO: 596311 - DNA, 75 bp, synthetic construct
  source 1..75: mol_type = other DNA
gtacaaactggtgcgagacactgacaaagttttccccgcccccgtaaattcggacctgggactgatgacctcttt

SEQ ID NO: 596312 - DNA, 75 bp, synthetic construct
  source 1..75: mol_type = other DNA
aaaaaatcctgatgccccgattatctcaataggtgcaatatttttcgatccgcaaaccggagatatgggaccgga

SEQ ID NO: 596313 - DNA, 75 bp, synthetic construct
  source 1..75: mol_type = other DNA
gtcacaacgttaccgttatcgatccggtcgaaaaactgctggcagtggggcattacctcgaatctaccgtcgata

SEQ ID NO: 596314 - DNA, 75 bp, synthetic construct
  source 1..75: mol_type = other DNA
gcgcggatacggtgcgggtaatgacgttacagctgccggtgtctttgccgatctgctacgcaccctctcatggaa

SEQ ID NO: 596315 - DNA, 75 bp, synthetic construct
  source 1..75: mol_type = other DNA
tatcttcggcaagttagatgaaggtatgagcttctctgaagcgaccacgctggcgcgggaaatgggttataccga

SEQ ID NO: 596316 - DNA, 75 bp, synthetic construct
  source 1..75: mol_type = other DNA
cgtcgatggattactaccatctgttgcgtcatgcggcggaaaaatcgcggcgtaaattcctctatgacaccaacg

SEQ ID NO: 596317 - DNA, 75 bp, synthetic construct
  source 1..75: mol_type = other DNA
tgctgagtccacccgccgtattgcggcaagtcgtattccggctgatcacatggtgctgatggcaggcttcaccgc

SEQ ID NO: 596318 - DNA, 75 bp, synthetic construct
  source 1..75: mol_type = other DNA
gcattctttctggttcgctttcttatatcttcggcaagttagacgaaggcatgagtttctccgaggcgaccacgc

SEQ ID NO: 596319 - DNA, 75 bp, synthetic construct
  source 1..75: mol_type = other DNA
attgaaaaaaccattagcggccaggatgctttacccaatatcagcgatgccgaacgtatttttgccgaacttctg

SEQ ID NO: 596320 - DNA, 75 bp, synthetic construct
  source 1..75: mol_type = other DNA
aggcattcactcacgcaacaacacgccgtatcagcccggcagaattcgacaagttcatttccacctggatgaaga

SEQ ID NO: 596321 - DNA, 75 bp, synthetic construct
  source 1..75: mol_type = other DNA
tatcagctataaaagcgcctgggatgccattaacgagatgaatcagttaagtgagcatattctggtcgagcgcgc

SEQ ID NO: 596322 - DNA, 75 bp, synthetic construct
  source 1..75: mol_type = other DNA
cagcaggcgctggatactgccgttgagcgtgggaaccagttactgcgccgctttgagaaatcgacgaagtcttaa

SEQ ID NO: 596323 - DNA, 75 bp, synthetic construct
  source 1..75: mol_type = other DNA
cagcaggcgctggataccgccgttgagcgtgggaaccagttactgcgccgctttgagcagtctacgaagtcttaa

SEQ ID NO: 596324 - DNA, 75 bp, synthetic construct
  source 1..75: mol_type = other DNA
aaagaagtgttgatattgctaaaagcgccgtgggtaggcattactcaggacgaagcggtcgcgcaaaacgctgac

SEQ ID NO: 596325 - DNA, 75 bp, synthetic construct
  source 1..75: mol_type = other DNA
aagtcgcaattaccgcacaaagcggcgcgcgtctggggctggatgaaggcaaagaagtgttgatattgctaaaag

SEQ ID NO: 596326 - DNA, 75 bp, synthetic construct
  source 1..75: mol_type = other DNA
gcgatgctgactcgctatggccaacgactgattcagctttacgatctgctcgcccagatccagcaaaaagccttt

SEQ ID NO: 596327 - DNA, 75 bp, synthetic construct
  source 1..75: mol_type = other DNA
aacaaactcaccgagaacattattctcgaaccggcagggcgtaacactgcacctgccattgcgctggcggcgctg

SEQ ID NO: 596328 - DNA, 75 bp, synthetic construct
  source 1..75: mol_type = other DNA
cattgttaatgacctgccgcctgaaggtgtgtttgataccgaattctgcaaccgctatgaaaaaggcggagaaga

SEQ ID NO: 596329 - DNA, 75 bp, synthetic construct
  source 1..75: mol_type = other DNA
gtcacctggattattcccgcgcgatagtagttgcgtccgtgaaagaagcaccaattggtatcgaggctactcccc

SEQ ID NO: 596330 - DNA, 75 bp, synthetic construct
  source 1..75: mol_type = other DNA
ccggtaagaagacaccgcagcaggcactggataccgccgttgagcgtgggaaccagttactgcgccgctttgagc

SEQ ID NO: 596331 - DNA, 75 bp, synthetic construct
  source 1..75: mol_type = other DNA
gaagggcgatttcagctacgtcgggcgtaaggatgaatccaccgagaagttctataacggtgattgcgcgatgac

SEQ ID NO: 596332 - DNA, 75 bp, synthetic construct
  source 1..75: mol_type = other DNA
ttaatgaagatgatggagcgataagttattatgttcaatgcccactcaattggagacaagaggataaggatcgtg

SEQ ID NO: 596333 - DNA, 75 bp, synthetic construct
  source 1..75: mol_type = other DNA
ttggtacatcccgactaatgggtttaagcactgatgagattaacgggattctaaaagctttcgagcagatggcga

SEQ ID NO: 596334 - DNA, 75 bp, synthetic construct
  source 1..75: mol_type = other DNA
tatcgttttcgacccggttacaggtcgggaagttccggcagaacggacttgtatcaatgaacttgttgaagctct

SEQ ID NO: 596335 - DNA, 75 bp, synthetic construct
  source 1..75: mol_type = other DNA
cacaatttgcttcatttggtgcatctgcaaagaatacgatgggtcttgaagggtcagaagagttatttaaaaacc

SEQ ID NO: 596336 - DNA, 75 bp, synthetic construct
  source 1..75: mol_type = other DNA
tgatgaaagaaccacatcgcatattaatcgtatgcaggaagataccttgattagctcagcttacccagaggaata

SEQ ID NO: 596337 - DNA, 75 bp, synthetic construct
  source 1..75: mol_type = other DNA
ttaatgttcgatggttcacaggaaggtttaacagactttacaaggtcactgactaatttacttaattcactaggt

SEQ ID NO: 596338 - DNA, 75 bp, synthetic construct
  source 1..75: mol_type = other DNA
acgattagctaccgagtgcagggattctttgacagagtgacccttgcttacagagaattaaatgacactcaaaaa

SEQ ID NO: 596339 - DNA, 75 bp, synthetic construct
  source 1..75: mol_type = other DNA
tgccggaagataaagtgatgcaggtgagcgcgatggcggaccagatgctgctggacgcgaaaaatccgcaaagcg

SEQ ID NO: 596340 - DNA, 75 bp, synthetic construct
  source 1..75: mol_type = other DNA
cgtagcgtggctgatggtcgtcatgatcggcttcaacctttttttctcgccgctggttccgttgaccgacgcgct

SEQ ID NO: 596341 - DNA, 75 bp, synthetic construct
  source 1..75: mol_type = other DNA
cgatgggcggaagtattgccatcatgaccgtcttcgccggtttcctgtatcaatatctggggcacggcgtgttct

SEQ ID NO: 596342 - DNA, 75 bp, synthetic construct
  source 1..75: mol_type = other DNA
ccgtaccggaaaacacccgcctgtttgaaatggtaaaaagaaaggagagtgaatatgagcgcatcggcactggtt

SEQ ID NO: 596343 - DNA, 75 bp, synthetic construct
  source 1..75: mol_type = other DNA
tggcgagctggcaaccagtatcaacaccattgcccgtgatgcgcatatggaagcgaatctggagatggagattgt

SEQ ID NO: 596344 - DNA, 75 bp, synthetic construct
  source 1..75: mol_type = other DNA
aacaaaattattattaccgggcataccgatgcgatggcttacaaaaacaatatctacaacaactggaacctttcg

SEQ ID NO: 596345 - DNA, 75 bp, synthetic construct
  source 1..75: mol_type = other DNA
ttagagaatgaaattggtatgatatgtgttcccagagaaaaaaactggctaagagaggtctcatcaggttcaatg

SEQ ID NO: 596346 - DNA, 75 bp, synthetic construct
  source 1..75: mol_type = other DNA
aagaggcgtgccagcgcgaaaccgcgtatcaggcgctggcggggcaggcggaaattgagctggcttttcataccc

SEQ ID NO: 596347 - DNA, 75 bp, synthetic construct
  source 1..75: mol_type = other DNA
ttgctggttacccctgtcggtgtcggacggctggcgactgttcccggaaacgaagtttcagacgtcagagcgtcg

SEQ ID NO: 596348 - DNA, 75 bp, synthetic construct
  source 1..75: mol_type = other DNA
gtagtgccaagcctgctggttggcctgctggtgagcgtgttccaggcggtgacgcagattaacgaacagaccctg

SEQ ID NO: 596349 - DNA, 75 bp, synthetic construct
  source 1..75: mol_type = other DNA
atgttgaccgtagacgtagccgccgacattgtcgccagcggcattaaagtggtgattttactggtttcggtactg

SEQ ID NO: 596350 - DNA, 75 bp, synthetic construct
  source 1..75: mol_type = other DNA
cgctggtggtgctgggcgtgtgcggcaaatggatgattatccagttgcatgatctctgcattcatctgtttaccc

SEQ ID NO: 596351 - DNA, 75 bp, synthetic construct
  source 1..75: mol_type = other DNA
aaaggaaagattcaggctgaagagctacgcggtcaattaggtgacagaatggcaggtgctttccagttatttgcc

SEQ ID NO: 596352 - DNA, 75 bp, synthetic construct
  source 1..75: mol_type = other DNA
ttatcgttgagctaggcttcagcgagaacgttattaagggattgcaaagagttgaaaaggcagctttgcagtcag

SEQ ID NO: 596353 - DNA, 75 bp, synthetic construct
  source 1..75: mol_type = other DNA
ctcagacggtacttgatgggaaagttatcgatgaaaggacagcatcacacatcaaccgtatgcaggaagataccc

SEQ ID NO: 596354 - DNA, 75 bp, synthetic construct
  source 1..75: mol_type = other DNA
gaaaattatgttgtttgatgagccaacgtcggcgctcgatcctgagatggtgaaagaggtgctggatacgatgat

SEQ ID NO: 596355 - DNA, 75 bp, synthetic construct
  source 1..75: mol_type = other DNA
ttgccagaagccttgggatgactacagaagaattagacaaggctatgaaagacggtaaagttctttctaaagatg

SEQ ID NO: 596356 - DNA, 75 bp, synthetic construct
  source 1..75: mol_type = other DNA
ggcaggtgctttccagttatttgccagaagccttgggatgactacagaagaattagacaaggccatgaaagacgg

SEQ ID NO: 596357 - DNA, 75 bp, synthetic construct
  source 1..75: mol_type = other DNA
ccggtaacgaagtatcgtggaccagtaatctctcctccggaaatgtgctcacagggattattgttcaggaaacgg

SEQ ID NO: 596358 - DNA, 75 bp, synthetic construct
  source 1..75: mol_type = other DNA
gtcgcagccacaacgcaactggtggtttcagtccttccggccagtgcgtcagataaatccttccgcgtagccagc

SEQ ID NO: 596359 - DNA, 75 bp, synthetic construct
  source 1..75: mol_type = other DNA
tttcaggtgatgttctctcaggataaatgcatcaactgcggcgactgcgtcaatgtatgccctgcggggatccac

SEQ ID NO: 596360 - DNA, 75 bp, synthetic construct
  source 1..75: mol_type = other DNA
tgatatcgacggcccatcaggcaacgtaaaaacacttgatgaaggtgtcacaaaaatgagtctggttcacatcgg

SEQ ID NO: 596361 - DNA, 75 bp, synthetic construct
  source 1..75: mol_type = other DNA
aggcgtgaagcagggcagtgtcagcattgtgggcatgacttctgacggcgattttgtggccgtggctgcggtggc

SEQ ID NO: 596362 - DNA, 75 bp, synthetic construct
  source 1..75: mol_type = other DNA
accggtctgtctgttgatgccgtcacgggaacagaggccgccgtttttgaaggtcagtccggcattgaggccggg

SEQ ID NO: 596363 - DNA, 75 bp, synthetic construct
  source 1..75: mol_type = other DNA
ttcatgaccacagcggcggcaaactttgccacgctgacagaatgggagattgccgaagcggaacaggttacaacc

SEQ ID NO: 596364 - DNA, 75 bp, synthetic construct
  source 1..75: mol_type = other DNA
ttgccacgctgaccgaacgggagattgctgaagcggaggaagtgacaacaatcaatattaagtccggagagcagg

SEQ ID NO: 596365 - DNA, 75 bp, synthetic construct
  source 1..75: mol_type = other DNA
atgacagcgaagcacacaaaaaaatcacaatcgcacgcccttgatttgacggaacactggttaagggtgtcgata

SEQ ID NO: 596366 - DNA, 75 bp, synthetic construct
  source 1..75: mol_type = other DNA
gctgctgaagacgaagccagtaaactattgcgtatcggtattgtgggttcggtaaaagcagggaaatctacattt

SEQ ID NO: 596367 - DNA, 75 bp, synthetic construct
  source 1..75: mol_type = other DNA
gattcgtctccagacggcatggagccttgaaaaagcggaaagagaagttgacgtatctcatctctcaacaaaata

SEQ ID NO: 596368 - DNA, 75 bp, synthetic construct
  source 1..75: mol_type = other DNA
ttgccagtggatggcaggcaaatttccttgctgaaataactcccgtgcctgttacggatatatcaggtcaggttg

SEQ ID NO: 596369 - DNA, 75 bp, synthetic construct
  source 1..75: mol_type = other DNA
tgatatcgacggtccatcaggcaacgttaaaacacttaacgaaggcgtcaaaaaaaatgtgcctggtgcatatcg

SEQ ID NO: 596370 - DNA, 75 bp, synthetic construct
  source 1..75: mol_type = other DNA
tcgatttgatatcgctactggatatcggaatgatttctattttattttcaggtcttgctgctatcaattcacaat

SEQ ID NO: 596371 - DNA, 75 bp, synthetic construct
  source 1..75: mol_type = other DNA
cgctaggaaagttaaacgtaaagtacaagaaagtaatatagaatatgatttagttattgaaaaatcagagattcc

SEQ ID NO: 596372 - DNA, 75 bp, synthetic construct
  source 1..75: mol_type = other DNA
acctgaattattgaaaacgataatagtgggtcctgttgacaatcaggaattggcctatgaatctttatctatgtt

SEQ ID NO: 596373 - DNA, 75 bp, synthetic construct
  source 1..75: mol_type = other DNA
tggatttattaaaagtgctacagccatcccccctaactcgcaggatttttatgatttgaggaataaatttaccga

SEQ ID NO: 596374 - DNA, 75 bp, synthetic construct
  source 1..75: mol_type = other DNA
aaaatcaaagaagacattataaataatgaagatctcacctcaccattgctgtccaattttgatgatagaaaaaat

SEQ ID NO: 596375 - DNA, 75 bp, synthetic construct
  source 1..75: mol_type = other DNA
tttgctcttcttaatattaaagtttttacttataaactatggatttatcgtatttatcgtaattacactgattga

SEQ ID NO: 596376 - DNA, 75 bp, synthetic construct
  source 1..75: mol_type = other DNA
gtaacgtcaatgccgttgcggcaatgagcgacatgattgccagcgcgcggcgttttgaaatgcagatgaaggtga

SEQ ID NO: 596377 - DNA, 75 bp, synthetic construct
  source 1..75: mol_type = other DNA
atgctaatgtatgcatacattaacattaatgatgaaggagaagaacaacaatggcagtcaacccacttatttttt

SEQ ID NO: 596378 - DNA, 75 bp, synthetic construct
  source 1..75: mol_type = other DNA
gattaccagttatgaagccactgttgtaactactgatgacattgttcacgaagttaatctggaaggaaagcgtat

SEQ ID NO: 596379 - DNA, 75 bp, synthetic construct
  source 1..75: mol_type = other DNA
aaccgtctggtggataaataccacctggataaactgaatgcatcctgttatctgccggcatccccgtatgtcagt

SEQ ID NO: 596380 - DNA, 75 bp, synthetic construct
  source 1..75: mol_type = other DNA
ccaattgctgtgccggaaggggcagaaatcactattgccgccgatggcactatttcggcgctgaatcccggcgat

SEQ ID NO: 596381 - DNA, 75 bp, synthetic construct
  source 1..75: mol_type = other DNA
cgttttgaaatgcagatgaaggtgatcagcagcgtcgatgataacgcaggccgtgccaaccaactgctgtcgatg

SEQ ID NO: 596382 - DNA, 75 bp, synthetic construct
  source 1..75: mol_type = other DNA
ggacgtgggcagtgggaagtgtatctgggcgtgaagaagataaatttaattgctatggcattcaggttgtgagag

SEQ ID NO: 596383 - DNA, 75 bp, synthetic construct
  source 1..75: mol_type = other DNA
ctttgccaaagatgcaatgaaactggatattggattatcagagtcggcattcgctctcggtgcaggaatattttt

SEQ ID NO: 596384 - DNA, 75 bp, synthetic construct
  source 1..75: mol_type = other DNA
cctgctgggcgactggatctctttctggctgggctggcgttttaaaaagccattgcatcgctggtcatttctgaa

SEQ ID NO: 596385 - DNA, 75 bp, synthetic construct
  source 1..75: mol_type = other DNA
ggacgtgggcggtgggaagtgtgtcgggtcgtgaagaagataaatttaattgctacggcattccagtagtgaaag

SEQ ID NO: 596386 - DNA, 75 bp, synthetic construct
  source 1..75: mol_type = other DNA
catgtgcattcccataatcttgccagcaatgccatcgccatttttcatcatgatgatgccggctatcagtcagag

SEQ ID NO: 596387 - DNA, 75 bp, synthetic construct
  source 1..75: mol_type = other DNA
gtttggcgaggtggtatcagcagcggcagacgcacgggtatttgtcgaaggccgctggcagtttgatgatgataa

SEQ ID NO: 596388 - DNA, 75 bp, synthetic construct
  source 1..75: mol_type = other DNA
ttgtgcttgttgcccttggcgttatgaatcgtaaatgtatcattgaagacggtgaatttgctgtagcagttgttt

SEQ ID NO: 596389 - DNA, 75 bp, synthetic construct
  source 1..75: mol_type = other DNA
atgattgcttttattcttgttgtgtttgcgcttattgcacttggcgttatgaaccgtaaatgtatcattggtgat

SEQ ID NO: 596390 - DNA, 75 bp, synthetic construct
  source 1..75: mol_type = other DNA
ggcgattcttagtgcggtattggatctggatatcgaagggatcgtgctgaaacaaggtgcaccgaccgatctgcc

SEQ ID NO: 596391 - DNA, 75 bp, synthetic construct
  source 1..75: mol_type = other DNA
atctcccggtggcaaaatttattacgccgaatattatcggctgcttgctgtggccaccgttttacttcctgccgg

SEQ ID NO: 596392 - DNA, 75 bp, synthetic construct
  source 1..75: mol_type = other DNA
cagctccatcagcaaaaggggatgataagtttatcaccaccgactatttgcaacagtgccatgctgcacggcctg

SEQ ID NO: 596393 - DNA, 75 bp, synthetic construct
  source 1..75: mol_type = other DNA
tcccggaatgctggctgaaacggacgagtacatggccggaggtaaacgaccggcccgtgtttacagggtggtgaa

SEQ ID NO: 596394 - DNA, 75 bp, synthetic construct
  source 1..75: mol_type = other DNA
gccgctggcagtttgatgatgataaactcaatacactacatcacttaggtgctggcacgtttgttaccagcggca

SEQ ID NO: 596395 - DNA, 75 bp, synthetic construct
  source 1..75: mol_type = other DNA
cgcggcagaagcgttcaagctcatcaagcagcaggttaacgtgccgctggtagccgacatccacttcgactatcg

SEQ ID NO: 596396 - DNA, 75 bp, synthetic construct
  source 1..75: mol_type = other DNA
atgcctgggatcgtttgtttaggtgatgccacgactcatggtggtaaggtgattaccgcaacttcaaccctgttt

SEQ ID NO: 596397 - DNA, 75 bp, synthetic construct
  source 1..75: mol_type = other DNA
gcaccgaactgactgatgagatgatcaaagcgcaggtgcttgccctgcttgaaaaacatcaactgcgttatacgg

SEQ ID NO: 596398 - DNA, 75 bp, synthetic construct
  source 1..75: mol_type = other DNA
agtaaaatccgccattggtttaggtctgctgctgtctgaaggcatcggcgacacgctgcgcgtatcgctggcggc

SEQ ID NO: 596399 - DNA, 75 bp, synthetic construct
  source 1..75: mol_type = other DNA
aaaagatctgcaagaaaagtatggcgaaccgacgccgcaggcgttgctggaatccgccatgcgtcatgttgatca

SEQ ID NO: 596400 - DNA, 75 bp, synthetic construct
  source 1..75: mol_type = other DNA
acacactgcgcgtctcgctggcggctgatccggtcgaagagatcaaagtcggttttgatattttgaaatcgctgc

SEQ ID NO: 596401 - DNA, 75 bp, synthetic construct
  source 1..75: mol_type = other DNA
cgcgcctactggcacgaatggcttaactggccgtcgatatttgccaataccggtttctttcgcccggacgaagca

SEQ ID NO: 596402 - DNA, 75 bp, synthetic construct
  source 1..75: mol_type = other DNA
tgcatcatgccagccgtctgttaaaccacggccctacagttttgataaccagtttcgatgatcaatctcagcggc

SEQ ID NO: 596403 - DNA, 75 bp, synthetic construct
  source 1..75: mol_type = other DNA
atttggcgaagtggtatcagcagcggcagacgcacgggtatttgtcgaaggccgctggcagtttgatgatgataa

SEQ ID NO: 596404 - DNA, 75 bp, synthetic construct
  source 1..75: mol_type = other DNA
tgaatgggatcagggcaatgaatttttcccagcgaccagtatgcagattgccaatattcaggcagggaccggcag

SEQ ID NO: 596405 - DNA, 75 bp, synthetic construct
  source 1..75: mol_type = other DNA
cgacgtggtgccgcctggcgacgccgatcgttggatcaatccgccgtttgaacccaccattcgtgatggcatgtt

SEQ ID NO: 596406 - DNA, 75 bp, synthetic construct
  source 1..75: mol_type = other DNA
atgcaccggggccagcccgagtgaattccgtgccggttgtgaagaaaaagtgaatgatgtagccgtcaagttgtc

SEQ ID NO: 596407 - DNA, 75 bp, synthetic construct
  source 1..75: mol_type = other DNA
tgaaacaggaattttccggcacacctgatgatgcggttgatgcgctttcgtcaatatctgaaattatgcgggtgg

SEQ ID NO: 596408 - DNA, 75 bp, synthetic construct
  source 1..75: mol_type = other DNA
gtgctaccggcaaaactggcgtatgtatcgccacgtctggtccgggcgcaaccaacctgataaccgggcttgcgg

SEQ ID NO: 596409 - DNA, 75 bp, synthetic construct
  source 1..75: mol_type = other DNA
gggcagcaccagatgtgggctgcccagcacatcgcccacactcgcccggaaaatttcatcacctccagcggctta

SEQ ID NO: 596410 - DNA, 75 bp, synthetic construct
  source 1..75: mol_type = other DNA
ctcttgggctcggagatgtttataaacgacagcatttaaaccgtctttcgcctccctttcctgtttccgatacta

SEQ ID NO: 596411 - DNA, 75 bp, synthetic construct
  source 1..75: mol_type = other DNA
cggcggttggcgcacaagtcgcgcgaccgaacgatactgtcgtttgtatctccggtgacggttctttcatgatga

SEQ ID NO: 596412 - DNA, 75 bp, synthetic construct
  source 1..75: mol_type = other DNA
cacggcaccaaagcggcgaacttcgcggtgcaggaatgtgatctgctgatcgccgtgggtgcacgttttgatgac

SEQ ID NO: 596413 - DNA, 75 bp, synthetic construct
  source 1..75: mol_type = other DNA
ggattgcgttgtgaccacagatgtggggcagcatcagatgtgggccgcgcagcacatcgcacacactcgcccgga

SEQ ID NO: 596414 - DNA, 75 bp, synthetic construct
  source 1..75: mol_type = other DNA
tggctgcctgcccgggaatgacagtggagagcgcccgggctgtgctggctgcgggatcaggtaaggcagaaccgg

SEQ ID NO: 596415 - DNA, 75 bp, synthetic construct
  source 1..75: mol_type = other DNA
atggaccgcattattcaatcaccgggtaaatacatccagggcgcagatgtgattaatcgtctgggcgaatacctg

SEQ ID NO: 596416 - DNA, 75 bp, synthetic construct
  source 1..75: mol_type = other DNA
aatcgaaaccgtagctgcacttagccatgcggtaggtttgccaataactctcgctcaactggatattaaagaaga

SEQ ID NO: 596417 - DNA, 75 bp, synthetic construct
  source 1..75: mol_type = other DNA
ccggtctgggcactgtgcaatgacacggcctgctctgcagccatgctgctggcgtcggcctgctcccgacggctg

SEQ ID NO: 596418 - DNA, 75 bp, synthetic construct
  source 1..75: mol_type = other DNA
cctgtgtcgcacaaatagctcgtgagaacggaatcaacgataacctgctatttaactggcaacatctctggcgta

SEQ ID NO: 596419 - DNA, 75 bp, synthetic construct
  source 1..75: mol_type = other DNA
tggcatgcggcctttttccggaatgacaggttatgacggcattgtcgcctgtcttcagcaggcaatgtcggatac

SEQ ID NO: 596420 - DNA, 75 bp, synthetic construct
  source 1..75: mol_type = other DNA
tgggcgcagtagaagcagattatccgtactatctgggcatgctggggatgcacggcaccaaagcggcgaacttcg

SEQ ID NO: 596421 - DNA, 75 bp, synthetic construct
  source 1..75: mol_type = other DNA
gccagtatgggttatagcgtgcggattggaagtgtcggctttaacagtcacattggcagctccggtgaacgcgca

SEQ ID NO: 596422 - DNA, 75 bp, synthetic construct
  source 1..75: mol_type = other DNA
acgggcgtggtcgactcaattattctcgggccagggggaagcgccgcactggcatatcatgacggcgaaagagtt

SEQ ID NO: 596423 - DNA, 75 bp, synthetic construct
  source 1..75: mol_type = other DNA
gggagtggtgtatcggggcagtaatgtaccgatggtttctacgtcgcttccctgaggggggaagttatgccgata

SEQ ID NO: 596424 - DNA, 75 bp, synthetic construct
  source 1..75: mol_type = other DNA
atcacgaccgcccctggtgggggctgccctgcaccgtgacgccctgtttcggggcacgtctggtgcaggagggta

SEQ ID NO: 596425 - DNA, 75 bp, synthetic construct
  source 1..75: mol_type = other DNA
ctttctgcgcatgccaataagtttccggcgcagctttccggtggtcagcagcagcgtgtagcgattgcccgcgca

SEQ ID NO: 596426 - DNA, 75 bp, synthetic construct
  source 1..75: mol_type = other DNA
gtccgtcaggttctggtaaatcgacgctgattaaaaccgtcaacggtctcgaaccagtgcagcaaggtgaaatca

SEQ ID NO: 596427 - DNA, 75 bp, synthetic construct
  source 1..75: mol_type = other DNA
tggttctgccggccggaactctcaggctgaaaggtgaactgacgccggcgttattacagacacttatccgcgaaa

SEQ ID NO: 596428 - DNA, 75 bp, synthetic construct
  source 1..75: mol_type = other DNA
gaacggaatcaacgtaagcgccccatctgcgacgtcttgtgaaaattgtcctgtctggcaacaatcgcgcccatc

SEQ ID NO: 596429 - DNA, 75 bp, synthetic construct
  source 1..75: mol_type = other DNA
tttctgcgcagactggtgtcagcaaaaccgccatttttttctctggtgaggcgatttcaccaggtattcactgac

SEQ ID NO: 596430 - DNA, 75 bp, synthetic construct
  source 1..75: mol_type = other DNA
aatgatattctgtcgttaatgccgaaccttttgggtttttcactgggtggttttgctatgtggattgctattgga

SEQ ID NO: 596431 - DNA, 75 bp, synthetic construct
  source 1..75: mol_type = other DNA
cgatacccttcagccccgacagtgactcagcctgtgaaaacagagaaaatccgccggaaccgattttcaccggag

SEQ ID NO: 596432 - DNA, 75 bp, synthetic construct
  source 1..75: mol_type = other DNA
atgatctggcagcctgagttcacagataaaacactctccaggaaacccggggcggttcaatttgacgagtcactg

SEQ ID NO: 596433 - DNA, 75 bp, synthetic construct
  source 1..75: mol_type = other DNA
ggatcaccgacaagctgattatcgacgccaccacgcctgtcgccccggacaaccgtggtcactacagccagccgg

SEQ ID NO: 596434 - DNA, 75 bp, synthetic construct
  source 1..75: mol_type = other DNA
agggccgtttggtgagtttaccgggcactactccggcgggcgtaacatgaccgtggtgcgtatcgataaagtctc

SEQ ID NO: 596435 - DNA, 75 bp, synthetic construct
  source 1..75: mol_type = other DNA
agatggtgattatggtcgatgaagacgttgatccgttcaacctgcctcaggtgatgtgggcgctctcctcgaaag

SEQ ID NO: 596436 - DNA, 75 bp, synthetic construct
  source 1..75: mol_type = other DNA
tgttgatattatcaatgcaaatacgaatctgagtgttacctatgaaggtattaagtccggcagaaagatcgagtc

SEQ ID NO: 596437 - DNA, 75 bp, synthetic construct
  source 1..75: mol_type = other DNA
aggagcaggttcattcagagatacagctaacggaaaagcggtatcagcagttgggcctggaggtggcggtgctgg

SEQ ID NO: 596438 - DNA, 75 bp, synthetic construct
  source 1..75: mol_type = other DNA
tttgacaatattcgcggctttaccgatgcccgcgtggcgatgaacaccatcggttcctggcagaaccacgcgatt

SEQ ID NO: 596439 - DNA, 75 bp, synthetic construct
  source 1..75: mol_type = other DNA
cggtttgaatcattgcgccagcaggcgaccgttcactacatggactgggcaccgtcaaccttcagcgaaacgcag

SEQ ID NO: 596440 - DNA, 75 bp, synthetic construct
  source 1..75: mol_type = other DNA
tagccaagatgacatctaaagataagcttgagcttgcggttggcttggtcgtcatcaccttagttatctgggcag

SEQ ID NO: 596441 - DNA, 75 bp, synthetic construct
  source 1..75: mol_type = other DNA
aaacccggaacgtaacgtgccgattgcagttcttggcggtactttaggtgcggcggtgatttatatcgtctccac

SEQ ID NO: 596442 - DNA, 75 bp, synthetic construct
  source 1..75: mol_type = other DNA
gaaatggcaggcgcgctgcgtgaaagcccgtacccgatcgccaccgccccgctgactggttttgatgtgccgtag

SEQ ID NO: 596443 - DNA, 75 bp, synthetic construct
  source 1..75: mol_type = other DNA
aaagctcgtacccgatcgccaccgcgccattgactggctttgatgtgccgtggggttctgaagtgatcctcgaag

SEQ ID NO: 596444 - DNA, 75 bp, synthetic construct
  source 1..75: mol_type = other DNA
gcgagacgtactgccaactcttctgaactggttggaagaatatgacgttaaggtatctgcctccttgtggccaga

SEQ ID NO: 596445 - DNA, 75 bp, synthetic construct
  source 1..75: mol_type = other DNA
cgacagatcctataaccattgaatggatgaaggagcgaaccggccttacagggaaatatccagtatataaggatt

SEQ ID NO: 596446 - DNA, 75 bp, synthetic construct
  source 1..75: mol_type = other DNA
ccattgttcttccgaccattggccttgtcggttgcgatcgcgttgaaccaggtaatgttggcattaaggtaaata

SEQ ID NO: 596447 - DNA, 75 bp, synthetic construct
  source 1..75: mol_type = other DNA
ggcgctgtttgtctggttgttaacgttgcatcctgcggcgagtgggcgtgtttacgcggcttatggtggcgttta

SEQ ID NO: 596448 - DNA, 75 bp, synthetic construct
  source 1..75: mol_type = other DNA
tgtgcgctgcagttgttacagctttcggagctaatgctgcaacttacaaccgtgaaggtgaaacgacacagacta

SEQ ID NO: 596449 - DNA, 75 bp, synthetic construct
  source 1..75: mol_type = other DNA
aaccctgcaacgcgaacaggaagtcaagcaacgcgaagcagaagccaacatgttgcgcgcagaagctgccggaca

SEQ ID NO: 596450 - DNA, 75 bp, synthetic construct
  source 1..75: mol_type = other DNA
tcttcccgaccttcaaacaaatgaagacctacgatgagccgttcagctttcagatgagtgacggcacaaccatcg

SEQ ID NO: 596451 - DNA, 75 bp, synthetic construct
  source 1..75: mol_type = other DNA
cctgcgccagaagatcgcagatgcactcaaccgactggccagcaaaatgaccaccgacaaatttatcgacggcgg

SEQ ID NO: 596452 - DNA, 75 bp, synthetic construct
  source 1..75: mol_type = other DNA
ttttacaggcgcttgatgaccacggccagttactgaaaatcagcgaagaagtgaacgccgagccggatctggcag

SEQ ID NO: 596453 - DNA, 75 bp, synthetic construct
  source 1..75: mol_type = other DNA
tgggttcttgattttcagattgaagataactttaaagatatcgatacaagtcaagctaaaataataaaaaaagaa

SEQ ID NO: 596454 - DNA, 75 bp, synthetic construct
  source 1..75: mol_type = other DNA
actttgaagacttacttctggggaagtttttagatcccatacatggagtgattcgaataactaagctagaaaaaa

SEQ ID NO: 596455 - DNA, 75 bp, synthetic construct
  source 1..75: mol_type = other DNA
tgtttagaggctgaacagagtgaagacaaaacaataaaagcttgtttgttaaggaatgattctaaatggcatccg

SEQ ID NO: 596456 - DNA, 75 bp, synthetic construct
  source 1..75: mol_type = other DNA
tttgtttttctctgagttttaatgccagcgctgacagtgaatggacggggtccaaaaaagatggcatgtattcag

SEQ ID NO: 596457 - DNA, 75 bp, synthetic construct
  source 1..75: mol_type = other DNA
agggccgttcggtgagtttaccgggcactactccggcgggcgtaacatgaccgtggtgcgcatcgataaagtctc

SEQ ID NO: 596458 - DNA, 75 bp, synthetic construct
  source 1..75: mol_type = other DNA
taatctgtggctggattacctggacgcactggaaatggtcgatacctccagtgctccagatattgaatggcctac

SEQ ID NO: 596459 - DNA, 75 bp, synthetic construct
  source 1..75: mol_type = other DNA
aggcctttttgcatcaacattcgaaatttgcttctgaccggtcagccaaaagtacgctctactcccgactctata

SEQ ID NO: 596460 - DNA, 75 bp, synthetic construct
  source 1..75: mol_type = other DNA
gagcaactggttggtcaattactggaagcaatgggctacgagcaggtcgaagtgaccaaagcctcaggcgacaaa

SEQ ID NO: 596461 - DNA, 75 bp, synthetic construct
  source 1..75: mol_type = other DNA
tcactctcgatttgcagcgtaagccaatcaaaaacctgcatatcagcgtactgcctccggatggccgagtgagag

SEQ ID NO: 596462 - DNA, 75 bp, synthetic construct
  source 1..75: mol_type = other DNA
caaaaagggcaccattcgtgagggctatgccggatatcgccaactgaaagcgaaaaccggtttgtcagatgataa

SEQ ID NO: 596463 - DNA, 75 bp, synthetic construct
  source 1..75: mol_type = other DNA
agctgttcgccaacaaagacgtcttgagcaggtggaagagaaagtcacccacgttactgaaactgtcgaacaaat

SEQ ID NO: 596464 - DNA, 75 bp, synthetic construct
  source 1..75: mol_type = other DNA
gtacgctcatcactaccggaaaatttgcggcgaaatgtgcagaagcggcactctttccaggggctgcgcccatta

SEQ ID NO: 596465 - DNA, 75 bp, synthetic construct
  source 1..75: mol_type = other DNA
aatcgattggactgaagcgaaggttacagatgtttcgcatgactttattttcaactatagagcttttggggaaga

SEQ ID NO: 596466 - DNA, 75 bp, synthetic construct
  source 1..75: mol_type = other DNA
tttaaaaagatgccggaatccatccgaaacatgattactccgccacgcaacagtgccccgcgtgataccacagtg

SEQ ID NO: 596467 - DNA, 75 bp, synthetic construct
  source 1..75: mol_type = other DNA
ggtgtggcctggaaggtccgcattgatgctggcgttgctgctctggattatcgcggaatggtcagagcgatttct

SEQ ID NO: 596468 - DNA, 75 bp, synthetic construct
  source 1..75: mol_type = other DNA
aaacggcactttcgattttgaatgtggttctaccaccaacaacgtcgaacgccaaaaacaggcggctttctctga

SEQ ID NO: 596469 - DNA, 75 bp, synthetic construct
  source 1..75: mol_type = other DNA
ccaaagatcacggtgactctttccgcaccctggaaagcggtcgtgccgttgcctttatgatggatgatgctctgc

SEQ ID NO: 596470 - DNA, 75 bp, synthetic construct
  source 1..75: mol_type = other DNA
caatcctggccctggcactttccgcaggactggcacaggcagaagatgccgccccggcagcaggcagcactctgg

SEQ ID NO: 596471 - DNA, 75 bp, synthetic construct
  source 1..75: mol_type = other DNA
atgccggcccctcactccgtgatcagattatggctctggatgaggcaaaaggggctgaggcgcaggctgaaaaac

SEQ ID NO: 596472 - DNA, 75 bp, synthetic construct
  source 1..75: mol_type = other DNA
tgaacaggtgattgccgtgtatggcccggtgcatgcccgacttcttcgccagtctctggaactgatcagtggtgc

SEQ ID NO: 596473 - DNA, 75 bp, synthetic construct
  source 1..75: mol_type = other DNA
tgctggcgctcaggatggggcgcacattgtcagagttacgccgggaaatgtccgcatcagaaatcatgatgtggg

SEQ ID NO: 596474 - DNA, 75 bp, synthetic construct
  source 1..75: mol_type = other DNA
atgagtgaagcagaaccacgaggtactcgctggtatcacccgaaaatgggcctgtttcaggcgctgggctggcag

SEQ ID NO: 596475 - DNA, 75 bp, synthetic construct
  source 1..75: mol_type = other DNA
cgctttccagccagataacctttaatacgacccagcaaggcgacatgtacaccattatccctgaagtcaccctga

SEQ ID NO: 596476 - DNA, 75 bp, synthetic construct
  source 1..75: mol_type = other DNA
gggtgaaaatagttgttactgtttctgatggacagtctgaaccgccccgggaatcctggagactaaacttcctga

SEQ ID NO: 596477 - DNA, 75 bp, synthetic construct
  source 1..75: mol_type = other DNA
cactttccagtcagataacctttaatacgacccagcaaggggatgtgtataccattattcctgaagtcactctta

SEQ ID NO: 596478 - DNA, 75 bp, synthetic construct
  source 1..75: mol_type = other DNA
tcatcggcaacgtgtatttcggctgggttatgcatcggtatggtgccgacacatttcgccaaaccgtggcttaat

SEQ ID NO: 596479 - DNA, 75 bp, synthetic construct
  source 1..75: mol_type = other DNA
ccttccgtgatatggggatgttgagctggagttgtgttgttgcccgtcatcatccgcttgcgtcaatgaatgggc

SEQ ID NO: 596480 - DNA, 75 bp, synthetic construct
  source 1..75: mol_type = other DNA
ttgttgatgcggtagcgcgtaatggtagttttagcgccgcggcccaggagttgcatcgcgttccttctgcggtca

SEQ ID NO: 596481 - DNA, 75 bp, synthetic construct
  source 1..75: mol_type = other DNA
atggttgccgcgatggctcttgaagcagttcgtcagcaaaaacgcctcgacaagatggaagaaaaagttagccac

SEQ ID NO: 596482 - DNA, 75 bp, synthetic construct
  source 1..75: mol_type = other DNA
ccgtggctaactttggtggtgcgcgcattaccgggcaaatcagtagcattactgtgtggggggtcattattccgg

SEQ ID NO: 596483 - DNA, 75 bp, synthetic construct
  source 1..75: mol_type = other DNA
cattaccgggcaaatcagtagcattactgtgtggggggtcattattccggtcgtcggtctgtgcattatcggctg

SEQ ID NO: 596484 - DNA, 75 bp, synthetic construct
  source 1..75: mol_type = other DNA
ggtgctgaccaaaagtgcgtccgatacgctgtatcaatactttggtcagcatggggataaagtggtgcagccgct

SEQ ID NO: 596485 - DNA, 75 bp, synthetic construct
  source 1..75: mol_type = other DNA
tcaatactttggtcagcatggggataaagtggtgcagccgctggtgcaaaagctggataagcagcaggtgctttc

SEQ ID NO: 596486 - DNA, 75 bp, synthetic construct
  source 1..75: mol_type = other DNA
ccgccgtttttgaaggtcagtccggcattgatgccgggctggcggatgaattagtcaatgcgtcggatgccatca

SEQ ID NO: 596487 - DNA, 75 bp, synthetic construct
  source 1..75: mol_type = other DNA
atgcaggggatgcgcaaggcagatatcatcaggcgtctggaaaatgaactgggggaaacggcagaggatgtgtga

SEQ ID NO: 596488 - DNA, 75 bp, synthetic construct
  source 1..75: mol_type = other DNA
attgttaaacgcatacaactctctgccgaccatggcgatttacagttaagcggtgcatcggtttatttcaaagcc

SEQ ID NO: 596489 - DNA, 75 bp, synthetic construct
  source 1..75: mol_type = other DNA
attattaccgggcataccgatgcgatggcctacaaaaacaatatctacaacaactggaacctttcgggtgaccgc

SEQ ID NO: 596490 - DNA, 75 bp, synthetic construct
  source 1..75: mol_type = other DNA
atgtttcctattcgttttaaacgtccggcgttgctctgtatggcgatgctgacggttgttctgagcggctgcggg

SEQ ID NO: 596491 - DNA, 75 bp, synthetic construct
  source 1..75: mol_type = other DNA
accatagttttttaattgtctgcttcagcatccatttccagcgtgaaatcattctgcattccctcatattgcggc

SEQ ID NO: 596492 - DNA, 75 bp, synthetic construct
  source 1..75: mol_type = other DNA
atgaaacagcctcaaataccggtgaagatgctgacaacactcacgattttgatggtatttctctgtgttggcagt

SEQ ID NO: 596493 - DNA, 75 bp, synthetic construct
  source 1..75: mol_type = other DNA
gcattaccaatcctgaggaaattgatcgttacagcctccggcaggaagccaataacgatattttgaaaatctatt

SEQ ID NO: 596494 - DNA, 75 bp, synthetic construct
  source 1..75: mol_type = other DNA
ccacgtcagcgcaaaacggtggttgcagatggtgtgggtcagggctataaagaagttcaggagatcagcccgaat

SEQ ID NO: 596495 - DNA, 75 bp, synthetic construct
  source 1..75: mol_type = other DNA
cgaagttgatctaaaacgtaaaatcctcgacgatttacgccatcttgaatcggtagtaaccaataagatcagcga

SEQ ID NO: 596496 - DNA, 75 bp, synthetic construct
  source 1..75: mol_type = other DNA
cgggcaaccggcgcattgagattatggtgctgaccaaaagtgcgtccgatacgctgtatcaatactttggtcagc

SEQ ID NO: 596497 - DNA, 75 bp, synthetic construct
  source 1..75: mol_type = other DNA
ctgacagagcgggagattgccgaagcggaacaggtaacaaccatcaacgttaaaaccggagaggtgaaatcatga

SEQ ID NO: 596498 - DNA, 75 bp, synthetic construct
  source 1..75: mol_type = other DNA
atgaccagaaaaaccagagataagacagcaccaaaatatcgcgcattagacatgacagagcacgccttaaaggtg

SEQ ID NO: 596499 - DNA, 75 bp, synthetic construct
  source 1..75: mol_type = other DNA
gatcatggcactggatgaggcaaaaggggctgaggcgcaggctgaacagctggctgcctgcccgggaatgacagt

SEQ ID NO: 596500 - DNA, 75 bp, synthetic construct
  source 1..75: mol_type = other DNA
gataagcgcattcatgaccacggcggcggcaaactttgccacgctgacagaacgggagattgccgaagcggaaca

SEQ ID NO: 596501 - DNA, 75 bp, synthetic construct
  source 1..75: mol_type = other DNA
gagctttccttaacggtggcaatcaaagcgatagaccgccacacgcgggaaggatacgcgaaggaacatcccgaa

SEQ ID NO: 596502 - DNA, 75 bp, synthetic construct
  source 1..75: mol_type = other DNA
cacgacggcggcaaattttgccacgctgacagagcgggagattgccgaagcggaacaggtaacaacaatcaacgt

SEQ ID NO: 596503 - DNA, 75 bp, synthetic construct
  source 1..75: mol_type = other DNA
gaggttcgtcaggacatgcagcagcgtattgatgcggcgcaccggatgtttgccgaaaaagtggcgatgtatact

SEQ ID NO: 596504 - DNA, 75 bp, synthetic construct
  source 1..75: mol_type = other DNA
atgaccggctgggaactgcgaatatggcgaaaaagcatgctctggtcacgcgaaaaagcggccagagaatttggc

SEQ ID NO: 596505 - DNA, 75 bp, synthetic construct
  source 1..75: mol_type = other DNA
aaaacctgccaccgtggcggtgccggaagagacggagaaaaaagcgcgcgacgtcaacgagaaaacggcgctgct

SEQ ID NO: 596506 - DNA, 75 bp, synthetic construct
  source 1..75: mol_type = other DNA
atcagaagaaaccacataaccgcgccattgaccttacagagcactggctgaggatggcgataaaaatcatcgacc

SEQ ID NO: 596507 - DNA, 75 bp, synthetic construct
  source 1..75: mol_type = other DNA
gctcagcctggtgctggatgaacatcgcgaagacgccagttgcctctcctgccacttcaacccgatggaacgcca

SEQ ID NO: 596508 - DNA, 75 bp, synthetic construct
  source 1..75: mol_type = other DNA
acaggctatgacggcattgtcgcctgtcttcagcaggcaatggcagatagccaggtgcggggcgtactgctggac

SEQ ID NO: 596509 - DNA, 75 bp, synthetic construct
  source 1..75: mol_type = other DNA
gcaaaaagtgatggatttaaactcaccccgggtcaaccgaacacagctggtcgagtcgattaatttggcgaaact

SEQ ID NO: 596510 - DNA, 75 bp, synthetic construct
  source 1..75: mol_type = other DNA
atgaaaaaagttattcctgctttagcccttgttctgctgaccaccggacttgtcggttgcgatcgcgttgagcct

SEQ ID NO: 596511 - DNA, 75 bp, synthetic construct
  source 1..75: mol_type = other DNA
caaggttgatccatccaaagttaccacagtctttcagacctaccgcaaaggcgtggacgacattaccgacaccga

SEQ ID NO: 596512 - DNA, 75 bp, synthetic construct
  source 1..75: mol_type = other DNA
gaaccccggtgttatggacttggaagcgatcaacaaatggaacggtacattaccgcagtatatgaccagtaatac

SEQ ID NO: 596513 - DNA, 75 bp, synthetic construct
  source 1..75: mol_type = other DNA
tgaccgtttttcttataacgggtgagccgcagaatgtgattaccggaatttatgacagtaagtcatcctgcattc

SEQ ID NO: 596514 - DNA, 75 bp, synthetic construct
  source 1..75: mol_type = other DNA
ctggataatgccttcaacaagcttgccatgaatggcaaaggagtgccgctttcaggcagaactgtcagtctttat

SEQ ID NO: 596515 - DNA, 75 bp, synthetic construct
  source 1..75: mol_type = other DNA
tccatatcctctgcattccgtgcccccacaatggcagaaatgtacagggatgatgtacatttttaccgcaagggt

SEQ ID NO: 596516 - DNA, 75 bp, synthetic construct
  source 1..75: mol_type = other DNA
cggactggtcgttgtgcacccaatgaccgcgctgggccgcgaaatgggcctgcaagagatgacagggttctctaa

SEQ ID NO: 596517 - DNA, 75 bp, synthetic construct
  source 1..75: mol_type = other DNA
cgcctgcgcgaagttcacagccagaaactcagtaaggaagcacagaagctgatgaagatgccgttccagcgcgcg

SEQ ID NO: 596518 - DNA, 75 bp, synthetic construct
  source 1..75: mol_type = other DNA
tgtcggctgcgatcgcgttgaacccggtaatgttggcatcaaagtaaataaactgggcgacgataaaggcgtcgg

SEQ ID NO: 596519 - DNA, 75 bp, synthetic construct
  source 1..75: mol_type = other DNA
ctacaaagttgatccatccaaagttaccacagtgtttcagacctaccgcaaaggcgtggatgacattaccgacac

SEQ ID NO: 596520 - DNA, 75 bp, synthetic construct
  source 1..75: mol_type = other DNA
gcactcaaccgactggccagcaaaatgaccaccgacaaatttatcgacggcgggaaatctgaactactggatgca

SEQ ID NO: 596521 - DNA, 75 bp, synthetic construct
  source 1..75: mol_type = other DNA
cttaaagacattcaggcagagatgacacctatcggtattcaggtaatgagcctctcatatgtgggtaagccggag

SEQ ID NO: 596522 - DNA, 75 bp, synthetic construct
  source 1..75: mol_type = other DNA
atgcgctggtgaatcggagtgtcgacagacatctccgactggccgtaaccgggcttagccgcagcgggaaaacgg

SEQ ID NO: 596523 - DNA, 75 bp, synthetic construct
  source 1..75: mol_type = other DNA
ttattttaaacccgagcagcgtcaggcgctgtttgaacgcattcatgccagcggagcgcaaatcgtcaccgttgc

SEQ ID NO: 596524 - DNA, 75 bp, synthetic construct
  source 1..75: mol_type = other DNA
aggcaagagacgagcaaaaaatttccggtgaatgtctcccgataaacaaagtatcgctgtacctgaataacgaaa

SEQ ID NO: 596525 - DNA, 75 bp, synthetic construct
  source 1..75: mol_type = other DNA
tgacagtttttcttataacgggtgagccacagaatgtgattaccggaatttatgccagtaaagaatcatgcctcc

SEQ ID NO: 596526 - DNA, 75 bp, synthetic construct
  source 1..75: mol_type = other DNA
atgaaaaagcctcaaataccggtaaaaatgctggtaacactcgcgattttgatggtatttgtctgtgtcggcagt

SEQ ID NO: 596527 - DNA, 75 bp, synthetic construct
  source 1..75: mol_type = other DNA
aggcaagagacgaacaaaaaatccccggtgaatgcctcccggtaaaaaaagtatcgctgaacctgaataacgaaa

SEQ ID NO: 596528 - DNA, 75 bp, synthetic construct
  source 1..75: mol_type = other DNA
tgccattaatgccgaaaaaatgctgaccattgaagataacgctgaggtcagggagttaattaacgctgccgaatt

SEQ ID NO: 596529 - DNA, 75 bp, synthetic construct
  source 1..75: mol_type = other DNA
cgcttgccgctgttaagcgcggtgcgtgaagagcgcctgctgggtgtgaagcgtattcctcaacgtgattttggc

SEQ ID NO: 596530 - DNA, 75 bp, synthetic construct
  source 1..75: mol_type = other DNA
agctggtcgcggcagatgacgggcttgcttaatggtcagcgtggcgagtggtcggcaaaatggcggatgatgtgc

SEQ ID NO: 596531 - DNA, 75 bp, synthetic construct
  source 1..75: mol_type = other DNA
atgaagcgacttaaaaatgaactcaatgcgctggtgaatcggggtgtcgacagacatctgcgcctcgctgtaacc

SEQ ID NO: 596532 - DNA, 75 bp, synthetic construct
  source 1..75: mol_type = other DNA
gtgacttcagcgtttgcactggtgatgaccgtttttcttataacgggtgagccacaaaatgtgattaccggaatt

SEQ ID NO: 596533 - DNA, 75 bp, synthetic construct
  source 1..75: mol_type = other DNA
cagatgtcgatgcctggggcgagtctaaactggcgcaggccgataagcacaccaatgccggaatgttgcgcgagc

SEQ ID NO: 596534 - DNA, 75 bp, synthetic construct
  source 1..75: mol_type = other DNA
cgcttgccgctgttaagcgcggtgcgtgaagagcgcctgctgggtgtgaagcgtattccacagcgcgattttggc

SEQ ID NO: 596535 - DNA, 75 bp, synthetic construct
  source 1..75: mol_type = other DNA
acacgctgcgcgtatcgctggcggccgatccggtcgaagagatcaaagtcggtttcgatattttgaaatcgctgc

SEQ ID NO: 596536 - DNA, 75 bp, synthetic construct
  source 1..75: mol_type = other DNA
ttgatatggacggcgtcatcattgattcggaagggttatggcgtgaggcacaaaagggagcactggcaaggtggg

SEQ ID NO: 596537 - DNA, 75 bp, synthetic construct
  source 1..75: mol_type = other DNA
acagaggtgaaaataagcactttaattatttatccaactgtccaatacctgttttggttttgctttgtaagcctg

SEQ ID NO: 596538 - DNA, 75 bp, synthetic construct
  source 1..75: mol_type = other DNA
gtagcgatgtggtgttggtgtccggtattcaccatggcgaaccagaaatagttggtcgttatgacagcctcggca

SEQ ID NO: 596539 - DNA, 75 bp, synthetic construct
  source 1..75: mol_type = other DNA
cagccagacgccagagatgaaaggcgtttattcgcgcgtgcgactgaacagcgaaatcagccgcaaagagatgct

SEQ ID NO: 596540 - DNA, 75 bp, synthetic construct
  source 1..75: mol_type = other DNA
acccgcactgttggaaagtgagattcgccgcctgatcactacgttgattgccgggacgggcgaagcgatgccagg

SEQ ID NO: 596541 - DNA, 75 bp, synthetic construct
  source 1..75: mol_type = other DNA
ctggatgagattgcccaaacctggtgtgaatattgtcatttacacattgaacccgcactgttggaaagtgagatt

SEQ ID NO: 596542 - DNA, 75 bp, synthetic construct
  source 1..75: mol_type = other DNA
ttgttaataacacaataggacatttaattgataactggatagcttataatactgctttgctgaatttttactata

SEQ ID NO: 596543 - DNA, 75 bp, synthetic construct
  source 1..75: mol_type = other DNA
tgcctgcggaaaaaattctccgtaccgccaaagaagtgaatgctgatttgattggcctttcggggcttatcacgc

SEQ ID NO: 596544 - DNA, 75 bp, synthetic construct
  source 1..75: mol_type = other DNA
aaacaggcggtggcctatctcgaaccgtttattgaagccagcaaagagcagggtaaaaccaacggcaagatggtg

SEQ ID NO: 596545 - DNA, 75 bp, synthetic construct
  source 1..75: mol_type = other DNA
tgcaaagagcggagcattgccggcggcgctgcagggggaactgtagcgaaagacagcggtgtagtcattaaatga

SEQ ID NO: 596546 - DNA, 75 bp, synthetic construct
  source 1..75: mol_type = other DNA
aaattatccggaccagatgagaagttattttaccaaagccgtcgactatatcgaaagtgttgcaacatttattac

SEQ ID NO: 596547 - DNA, 75 bp, synthetic construct
  source 1..75: mol_type = other DNA
acaaaaaatcttgtggagaaattacagtcagtactaaagataccgctaaatatatgctcttttcaagaatgtata

SEQ ID NO: 596548 - DNA, 75 bp, synthetic construct
  source 1..75: mol_type = other DNA
ccgttgatcggtcagttgagtaccacccgtgaagatatggcgaccttctctaatccgacgtacaccctgccgttc

SEQ ID NO: 596549 - DNA, 75 bp, synthetic construct
  source 1..75: mol_type = other DNA
tcacattgctctttccacagagtttaccggcgggcgatggcgggttgtctctggggcagggggttattgttgcgg

SEQ ID NO: 596550 - DNA, 75 bp, synthetic construct
  source 1..75: mol_type = other DNA
acagagtttaccggcgggtgatggcggtttgtctctggggcagggggttattgctgcggcgcgttggttagcggg

SEQ ID NO: 596551 - DNA, 75 bp, synthetic construct
  source 1..75: mol_type = other DNA
tcgctgatttcacattgctctttccacagagtttaccggcgggtgatggcggtttgtctctggggcagggggtta

SEQ ID NO: 596552 - DNA, 75 bp, synthetic construct
  source 1..75: mol_type = other DNA
aaaacatactctcctttgatgacgtatatattgatagctttgaagattttaatttgattattggtagaaataact

SEQ ID NO: 596553 - DNA, 75 bp, synthetic construct
  source 1..75: mol_type = other DNA
gctgaactggcaggctccggttaatcaacgtgcgtgggcgtttcatgatgcgctggcgcagggggggccgcgttg

SEQ ID NO: 596554 - DNA, 75 bp, synthetic construct
  source 1..75: mol_type = other DNA
gctgggctgtgcgccagccacgttaagttatgaaggtgaagcggcttgtgctctggaggcgctggcgacttcgtg

SEQ ID NO: 596555 - DNA, 75 bp, synthetic construct
  source 1..75: mol_type = other DNA
ttaatgagctgggtaacagtatcaccctctggcgtcgtgacggaccggtaatgatttcttttgatgatctgtgga

SEQ ID NO: 596556 - DNA, 75 bp, synthetic construct
  source 1..75: mol_type = other DNA
atttggatggtggggggatacctggcctgcggttcagaatgatcgcacggggtcgcgtctgtatctgttgcgacg

SEQ ID NO: 596557 - DNA, 75 bp, synthetic construct
  source 1..75: mol_type = other DNA
cgctgacacttgccattaccatttaccagcgtgacggcaatattcacaacattatttttgatgatatctggagtg

SEQ ID NO: 596558 - DNA, 75 bp, synthetic construct
  source 1..75: mol_type = other DNA
tatgcaggcagcaggtcatcaataaagccatccagcttgaacagaccgacgaaatccagaaacaggtaagccaga

SEQ ID NO: 596559 - DNA, 75 bp, synthetic construct
  source 1..75: mol_type = other DNA
ggaatgactacggataatatgccgtcgctggtggcagagccgatagtaagagagcttggcgagtatattttttcg

SEQ ID NO: 596560 - DNA, 75 bp, synthetic construct
  source 1..75: mol_type = other DNA
cctcctggacgaaacggtgatgagccgtaagcctgaaaaaagcggggaaggcggggagccggacgttgacgaagg

SEQ ID NO: 596561 - DNA, 75 bp, synthetic construct
  source 1..75: mol_type = other DNA
tgaaagagggcgtcgacgcttttatccatcacgcgaaattgttgcgtcgttacggtgcggcagtggtggtaatgg

SEQ ID NO: 596562 - DNA, 75 bp, synthetic construct
  source 1..75: mol_type = other DNA
tctggcggaagtgattgagccgcggtataccgagttgctcaacctggtcaacgaagagatattgcagctacagga

SEQ ID NO: 596563 - DNA, 75 bp, synthetic construct
  source 1..75: mol_type = other DNA
gtgtttcatacgcaagtgcgtatcggcgcgccgctgaacattaccggtttaacggattatgctcaggagccgtat

SEQ ID NO: 596564 - DNA, 75 bp, synthetic construct
  source 1..75: mol_type = other DNA
aacacggcagcgcgtgggcgttgctggaagggctgaaaaagcagttcgatcctaacggcattatgaatacgggta

SEQ ID NO: 596565 - DNA, 75 bp, synthetic construct
  source 1..75: mol_type = other DNA
gtatggtggcggaacgaaagaggatgcagctgaagcaatgaatgagatgttggccagcggcgctttttcctggga

SEQ ID NO: 596566 - DNA, 75 bp, synthetic construct
  source 1..75: mol_type = other DNA
gatcactctaacctatggtactgtctcaacgctgcactatatggttcaggcgttctgccagccgggcgatagcgt

SEQ ID NO: 596567 - DNA, 75 bp, synthetic construct
  source 1..75: mol_type = other DNA
ggttaatcattttgcccgcaacgctggagtcattattgaagatggcagccattatgtgcaaaacggtgaaaacta

SEQ ID NO: 596568 - DNA, 75 bp, synthetic construct
  source 1..75: mol_type = other DNA
gcgttgctggaaggctgaaaaagcagttcgatcctaatggcattatgaatacgggtactatctatccgattgaaa

SEQ ID NO: 596569 - DNA, 75 bp, synthetic construct
  source 1..75: mol_type = other DNA
accaccacggtatcggtaaacatcgcgttcactggagcaaactggaacacggcagcgcgtgggcgttgctggaag

SEQ ID NO: 596570 - DNA, 75 bp, synthetic construct
  source 1..75: mol_type = other DNA
gatggtgaagaaggcgcttatgcgatgggctatatggatgggcgtgacaaaacggtaattgtagtaatgaaagct

SEQ ID NO: 596571 - DNA, 75 bp, synthetic construct
  source 1..75: mol_type = other DNA
acgtgtgcagatcctcaaaaccggcaacatgggctttaccaccgaagtgtccggctgctggagctgcatccacga

SEQ ID NO: 596572 - DNA, 75 bp, synthetic construct
  source 1..75: mol_type = other DNA
ttctccgcagtcaaaaccgctggcacagatgggcggcctggtggcgactcgcagtatcggacagttcaccacact

SEQ ID NO: 596573 - DNA, 75 bp, synthetic construct
  source 1..75: mol_type = other DNA
gacattcgtcacatcatcatcggcaacgaaggcgcattgtgctatatcactgaagtcactgtgaaaatctttaaa

SEQ ID NO: 596574 - DNA, 75 bp, synthetic construct
  source 1..75: mol_type = other DNA
gaagcgatgaccgcagcggctctgacatgggccgggatcaaaatcctgaccgggggtaaacccggtggcaagact

SEQ ID NO: 596575 - DNA, 75 bp, synthetic construct
  source 1..75: mol_type = other DNA
atcgccaccgtgaagggcgacgtccacgacatcggtaaaaatatcgttggtgtggtgctgcaatgtaacaactac

SEQ ID NO: 596576 - DNA, 75 bp, synthetic construct
  source 1..75: mol_type = other DNA
tctactacgctattcgcaatggcatggatatggggatcgtcaacgctgggcaactggcgatttacgacgacctgc

SEQ ID NO: 596577 - DNA, 75 bp, synthetic construct
  source 1..75: mol_type = other DNA
tatcggcgcgtgtgaagacatcaaacgcgaactgccgcacgcgctgatttccggcggcgtttccaacgtttcctt

SEQ ID NO: 596578 - DNA, 75 bp, synthetic construct
  source 1..75: mol_type = other DNA
aaaaggtctgaagtgtatccagggcaaaggcattgttaactctatctcgatgaaagagggcgtcgacgcttttat

SEQ ID NO: 596579 - DNA, 75 bp, synthetic construct
  source 1..75: mol_type = other DNA
ctctgcgccacgccgaagcgctgactttcggccttaactgtgcgctggggccagacgaactgcgccagtacgtgc

SEQ ID NO: 596580 - DNA, 75 bp, synthetic construct
  source 1..75: mol_type = other DNA
cggaaattcccgtagcctgccgtttgtccggcctggagccgctgaacattggcgacgatagcctgtttgtgaacg

SEQ ID NO: 596581 - DNA, 75 bp, synthetic construct
  source 1..75: mol_type = other DNA
tttttcaaagccttcgcgtttggattcgtcatctggcttgtcgtacaccgcctgcttcgtggctggatctacgcc

SEQ ID NO: 596582 - DNA, 75 bp, synthetic construct
  source 1..75: mol_type = other DNA
cggctattgcacgcgccaaagcgcgcaagctggaacagcaacaacaggctaatgcggaaccagaagaacaggttg

SEQ ID NO: 596583 - DNA, 75 bp, synthetic construct
  source 1..75: mol_type = other DNA
cgcagggctggtcttgagcagatgaaaagcagcatccgtaacgcagtgacctatggtggcggcacgaaagaggat

SEQ ID NO: 596584 - DNA, 75 bp, synthetic construct
  source 1..75: mol_type = other DNA
ccacgctacgttgctggtgttctcggcccaaccaatcgcacagcatctatttctccggatgtaaacgatccggca

SEQ ID NO: 596585 - DNA, 75 bp, synthetic construct
  source 1..75: mol_type = other DNA
cttctggcttcgcattagcctgttgctgctccagcttgcgtgctttggcgcgggcgatagcggcttcaactgcgg

SEQ ID NO: 596586 - DNA, 75 bp, synthetic construct
  source 1..75: mol_type = other DNA
gctaatgcggaaccagaagaacaggttgatccacgcaaagccgccgtcgaagcggctattgcccgtgccaaagca

SEQ ID NO: 596587 - DNA, 75 bp, synthetic construct
  source 1..75: mol_type = other DNA
gcgcaaattccggtgaccttacccacctgggatgaagtgattggtcgggatgtgaaagcagaagattttaacggt

SEQ ID NO: 596588 - DNA, 75 bp, synthetic construct
  source 1..75: mol_type = other DNA
atcaccatgcctggcaagcccatagcggtaactgggatcggcaaacaatgatcgacgatattgcacgcggccttc

SEQ ID NO: 596589 - DNA, 75 bp, synthetic construct
  source 1..75: mol_type = other DNA
gtgagcaagattgactatcaggcactgcgtgccaaggcagagaaagcaacgtgtggcgagtggtcgctcgaatat

SEQ ID NO: 596590 - DNA, 75 bp, synthetic construct
  source 1..75: mol_type = other DNA
tgtgaatttgctcgcgtgctcaatgtaccagagtgctatttctacacggttgatgatgattttgctcaggcagtg

SEQ ID NO: 596591 - DNA, 75 bp, synthetic construct
  source 1..75: mol_type = other DNA
gatcgctatgggttacgggctggttatcttaggccgtggcgtaactggcttgaagaacggaatggacggattgtg

SEQ ID NO: 596592 - DNA, 75 bp, synthetic construct
  source 1..75: mol_type = other DNA
ttatcagagacgttgccgctcggacaagttgttcgcggaaatattgccggacgtgaaggctggctgggttgccaa

SEQ ID NO: 596593 - DNA, 75 bp, synthetic construct
  source 1..75: mol_type = other DNA
gcaacaaggaagaagcgcccgtccagattgaaatcacgaaagaagagatcgcccgcatcgtccaggaagtagaaa

SEQ ID NO: 596594 - DNA, 75 bp, synthetic construct
  source 1..75: mol_type = other DNA
ggtatgccaacgcgttcgacgatccttaaatggttcagagatgtgccggagttttcggacatgtatgtacgcgcg

SEQ ID NO: 596595 - DNA, 75 bp, synthetic construct
  source 1..75: mol_type = other DNA
atggcccgcactaaaaaggcaaatgctgacgataaaaagccagcagctagaaaggtgggccgtccgcatggttat

SEQ ID NO: 596596 - DNA, 75 bp, synthetic construct
  source 1..75: mol_type = other DNA
ccgtggttgacagaattgctgatttagaagctaaacagccatcgccagtagtaccggaaggactggttaaagcag

SEQ ID NO: 596597 - DNA, 75 bp, synthetic construct
  source 1..75: mol_type = other DNA
gttctcggacatgtacatgcgcgcgaaggagatcggttttgaggtattggctgatgagattatcgacatagccga

SEQ ID NO: 596598 - DNA, 75 bp, synthetic construct
  source 1..75: mol_type = other DNA
ttaaatggttcagagacgtgccagagttctcggacatgtacatacgcgcgaaagagatcggttttgaggtattag

SEQ ID NO: 596599 - DNA, 75 bp, synthetic construct
  source 1..75: mol_type = other DNA
gggtaaaaattcggtgaccgtgtacccaataggtattggtcagttaggtggtgatacgctgacaccaacgatgga

SEQ ID NO: 596600 - DNA, 75 bp, synthetic construct
  source 1..75: mol_type = other DNA
atgacgcccgtggaatatattttaaaagagaataaaaattgcaatatgtggtggacccatacaccttgttgtaat

SEQ ID NO: 596601 - DNA, 75 bp, synthetic construct
  source 1..75: mol_type = other DNA
cgaggctacgggctaatctcactcaggagcaactgggcgttcgcgctggcatcgccgaagatacggcctgttccc

SEQ ID NO: 596602 - DNA, 75 bp, synthetic construct
  source 1..75: mol_type = other DNA
cgtcggctttctcgctctgttacaggctaaccccggcgttgatccttacgtaccgcgcgcgggtagcgtgttaac

SEQ ID NO: 596603 - DNA, 75 bp, synthetic construct
  source 1..75: mol_type = other DNA
tttctaaatcacctattcgagtctcattttgcccattctgtggtgaaagtctgaaaacgtgggaagcggaggcaa

SEQ ID NO: 596604 - DNA, 75 bp, synthetic construct
  source 1..75: mol_type = other DNA
tcgggttcctggttcacttggtcatgtgaacgtcctggcgaatatgatgtttggttccatttctggttcagccgt

SEQ ID NO: 596605 - DNA, 75 bp, synthetic construct
  source 1..75: mol_type = other DNA
gactaccgtttctgacaagcgtgcaaacccaacctggacgccaacggcaaacatccgcgcgcggtataaggcaca

SEQ ID NO: 596606 - DNA, 75 bp, synthetic construct
  source 1..75: mol_type = other DNA
gacggtggttcgctggaagccatcgccaaaaaatataacgtcggtttcctggcgctgttacaggccaaccctggc

SEQ ID NO: 596607 - DNA, 75 bp, synthetic construct
  source 1..75: mol_type = other DNA
tccgccgtcatcaagtgagcccacaaactctgaaaatcctggataaaaaaaatccccgcgacacggcatgtcgcg

SEQ ID NO: 596608 - DNA, 75 bp, synthetic construct
  source 1..75: mol_type = other DNA
gggtaaaaattcggtaaccgtgtatcccatcggcattggtcagttgggtggtgacacgctgacgccaacaatggt

SEQ ID NO: 596609 - DNA, 75 bp, synthetic construct
  source 1..75: mol_type = other DNA
tctggcggcctatggcggcgtttatttgcttcacggtacgaacgccgatttcggcattggcatgcgggtaagttc

SEQ ID NO: 596610 - DNA, 75 bp, synthetic construct
  source 1..75: mol_type = other DNA
ctatggcggcgtttatttgcttcacggtacaaacgccgatttcggcattggtatgcgggtaagttccggctgtat

SEQ ID NO: 596611 - DNA, 75 bp, synthetic construct
  source 1..75: mol_type = other DNA
gctgatgaaatcatcgatctggctgatgccgcagagaacgcagataaggaccaattgcgccgccatcaactgatg

SEQ ID NO: 596612 - DNA, 75 bp, synthetic construct
  source 1..75: mol_type = other DNA
taatgaagaagattttgcccgctcccacccagccggggcactgggcgctcgcttgctgaacaaagtgcatcatct

SEQ ID NO: 596613 - DNA, 75 bp, synthetic construct
  source 1..75: mol_type = other DNA
atgagtgaagcactactgaacgcgggacgtcagacgttaatgctggagttgcaggaagcaagccgtttaccggaa

SEQ ID NO: 596614 - DNA, 75 bp, synthetic construct
  source 1..75: mol_type = other DNA
gccagaaacacgctacggcagcatgaagagcatcagtttgcaacgaattcaaccgctgactgagcaacttaatct

SEQ ID NO: 596615 - DNA, 75 bp, synthetic construct
  source 1..75: mol_type = other DNA
ccggtggtagatgaaaacggtaaactcgccggcgcgattaacctgcaggatttctatcaggccgggattatttaa

SEQ ID NO: 596616 - DNA, 75 bp, synthetic construct
  source 1..75: mol_type = other DNA
cgctcgcttgctgaacaaagtgcatcatctgatgcgccgtgatgacgctatcccgcaggtggcgttaaccgccag

SEQ ID NO: 596617 - DNA, 75 bp, synthetic construct
  source 1..75: mol_type = other DNA
gctcccacccagccggggcactgggcgctcgcttgctgaataaagtgcatcatctgatgcgccgtgacgatgcca

SEQ ID NO: 596618 - DNA, 75 bp, synthetic construct
  source 1..75: mol_type = other DNA
cggtgatgccgggaaatcttttttaaaaacaagtgtttttattaaccctctacagaataacaacaacttcaaagg

SEQ ID NO: 596619 - DNA, 75 bp, synthetic construct
  source 1..75: mol_type = other DNA
actcaatatcatggtctacgaaagataaaaaacttttatccctaattaaaattatcttcccttttttttatatag

SEQ ID NO: 596620 - DNA, 75 bp, synthetic construct
  source 1..75: mol_type = other DNA
aagctagactttttttcagtgagtatattcttttcgtagaaggttccactgaaatggaagtcttccaaaatagtt

SEQ ID NO: 596621 - DNA, 75 bp, synthetic construct
  source 1..75: mol_type = other DNA
cggttcctggagaacggtctcagtacagaagggacaatgggcaagatggttatccaaatccttgctgctgtagct

SEQ ID NO: 596622 - DNA, 75 bp, synthetic construct
  source 1..75: mol_type = other DNA
ctgttacaaaaaggggatcgccatccggttcctggagaacggtctcagtacagaagggacaatgggcaagatggt

SEQ ID NO: 596623 - DNA, 75 bp, synthetic construct
  source 1..75: mol_type = other DNA
aacaggtatctctcgatcgacgtacttcaggttaaaaagaacaataaaaaatgatgctaaaattgcaacgtttta

SEQ ID NO: 596624 - DNA, 75 bp, synthetic construct
  source 1..75: mol_type = other DNA
atatatgatccttcgttgcgttataggttttgtatttaatgggggatatgaagaacgatattttatggttttatt

SEQ ID NO: 596625 - DNA, 75 bp, synthetic construct
  source 1..75: mol_type = other DNA
gcgtgtcggtgcgcttcgctgccacagtcaggcattcaccatcaaattgaaaaaagatgtgtcgattccaaccgt

SEQ ID NO: 596626 - DNA, 75 bp, synthetic construct
  source 1..75: mol_type = other DNA
atggtcatgtggccgatgaactggcgactccgtcctctgctattctcgagatcgaacgcaaagtcacgaccttaa

SEQ ID NO: 596627 - DNA, 75 bp, synthetic construct
  source 1..75: mol_type = other DNA
tgcgtgaagcggcagaaaaagcaacgtgtggtgagtggtcgctcgaatatggagagagccgatttgatggtgatg

SEQ ID NO: 596628 - DNA, 75 bp, synthetic construct
  source 1..75: mol_type = other DNA
ttgactgggtattaaaggaagcatgtcaggctgttcattggtgccgacagatatcagcccttcaggaacaggaga

SEQ ID NO: 596629 - DNA, 75 bp, synthetic construct
  source 1..75: mol_type = other DNA
cgccagtcgaaaccggagcatggaaagacgctgttgactgggtgctcaaagaggcttgccaggctgtaaacattg

SEQ ID NO: 596630 - DNA, 75 bp, synthetic construct
  source 1..75: mol_type = other DNA
agggcttcgaaaactggttgctgaacttgaggagacaaaatcaaaactcaacgagcagcgtgaatattacgaagg

SEQ ID NO: 596631 - DNA, 75 bp, synthetic construct
  source 1..75: mol_type = other DNA
atggtgaacctcgggatcagcgatatcaacaccaaagatctattcaactttcgctttcagaacagtcagtgttga

SEQ ID NO: 596632 - DNA, 75 bp, synthetic construct
  source 1..75: mol_type = other DNA
ttatctcggatgggggtaagcgtattgctgaactggagaaaagcgaagagcaactcattaacgagcgtgaccatg

SEQ ID NO: 596633 - DNA, 75 bp, synthetic construct
  source 1..75: mol_type = other DNA
gagcagcgtgagtattacgaaggtgttatctcggatgggggtaagcgtattgctgaactggagaaaagcgaagag

SEQ ID NO: 596634 - DNA, 75 bp, synthetic construct
  source 1..75: mol_type = other DNA
ttatctcggatgggagtaaacgtattgctgaactggagaaaagcgaagagcaactcattaacgagcgtgaccatg

SEQ ID NO: 596635 - DNA, 75 bp, synthetic construct
  source 1..75: mol_type = other DNA
caactcatcaacgagcgtgaccatgctgaggctgctttggctgatatgtattttgcagcaaccggggataggccg

SEQ ID NO: 596636 - DNA, 75 bp, synthetic construct
  source 1..75: mol_type = other DNA
gctgatgatggcattaggcgggctgttgtgtttgcttgatcctcgctatcgcaagcgcgtcaatccgcaaaaaac

SEQ ID NO: 596637 - DNA, 75 bp, synthetic construct
  source 1..75: mol_type = other DNA
tggtgctgtctctgctgttgccgtggctgcttgaaagcaaaatcgtggcgatgacggtactcggcctggcaatgg

SEQ ID NO: 596638 - DNA, 75 bp, synthetic construct
  source 1..75: mol_type = other DNA
ccgtggacgctggcggcgtggattttcctgacgctcggcattgtgctcggttccgcatgggcctattacgaactc

SEQ ID NO: 596639 - DNA, 75 bp, synthetic construct
  source 1..75: mol_type = other DNA
caccatgtttacctggctgatggtgccgtttgcgctactgcttggtgtcggtcctctggtgcgctggggacgcga

SEQ ID NO: 596640 - DNA, 75 bp, synthetic construct
  source 1..75: mol_type = other DNA
cctctggtgcgctgggggcgcgatcgcccacgtaaaatccgcaatttattgattatcgccttcatctcaacgctg

SEQ ID NO: 596641 - DNA, 75 bp, synthetic construct
  source 1..75: mol_type = other DNA
gcgaccttaacccactgttgcaggatccggggttaatcttccatccgccgctgctctatatggggtatgtcggtt

SEQ ID NO: 596642 - DNA, 75 bp, synthetic construct
  source 1..75: mol_type = other DNA
atgttgtcatctttactgataacaataaaattcgtgactataaaaccggaattgttcctcagtttggcgaactta

SEQ ID NO: 596643 - DNA, 75 bp, synthetic construct
  source 1..75: mol_type = other DNA
agaaagagtaaatcaggagaagtatcaaatgttgtagccagggtgctcaatgatacaaatgtcgggctggaacgt

SEQ ID NO: 596644 - DNA, 75 bp, synthetic construct
  source 1..75: mol_type = other DNA
gccattcacctgtttaagcccctgtcgccgggggcatagacagccacaacctgccgcactgactgtccagggtaa

SEQ ID NO: 596645 - DNA, 75 bp, synthetic construct
  source 1..75: mol_type = other DNA
tgctgtgcctggcgctgggaattgcgctgctgctgtccgtgtatccgctatggggcgtggcgcgcggagatgcgc

SEQ ID NO: 596646 - DNA, 75 bp, synthetic construct
  source 1..75: mol_type = other DNA
tcgcccacgtaaaatccgcaatttattgattatcgccttcatctctacgctggtgctgtctctgctgttgccgtg

SEQ ID NO: 596647 - DNA, 75 bp, synthetic construct
  source 1..75: mol_type = other DNA
atgccgtggctggtgggtactgcgctgatgcactcgctggcggtgactgaacaacgtgccagcttcaaagcgtgg

SEQ ID NO: 596648 - DNA, 75 bp, synthetic construct
  source 1..75: mol_type = other DNA
gctggcgcatttctggtgctgatcaatgcgttcgtggtgaacgacttcaccgtcacctacgtggccagcaactct

SEQ ID NO: 596649 - DNA, 75 bp, synthetic construct
  source 1..75: mol_type = other DNA
cgccgctggaagtgtttattgccgccgcggataaactgggctggcagcatgggaccgatctctatgcgttaatgg

SEQ ID NO: 596650 - DNA, 75 bp, synthetic construct
  source 1..75: mol_type = other DNA
tgcggataagcttggttggcagcacggaaccgatctctacgcactgatggacgccgccgacgatttagtgcgtcc

SEQ ID NO: 596651 - DNA, 75 bp, synthetic construct
  source 1..75: mol_type = other DNA
gaccacgccggagaatctcgcaaagcaggcaaagctgatggaaggctacggtgcgacctgtatttatgtggtgga

SEQ ID NO: 596652 - DNA, 75 bp, synthetic construct
  source 1..75: mol_type = other DNA
gtcggcaccaaagacattgccgagcagttagtcgcgcagtctgtcgcaggcaaaatcgtcgcactggaaaatatg

SEQ ID NO: 596653 - DNA, 75 bp, synthetic construct
  source 1..75: mol_type = other DNA
cgcttacaacagatccgtgaagaactggcattgctgcatattccacccgagaagatcacccgccttgccgcctgt

SEQ ID NO: 596654 - DNA, 75 bp, synthetic construct
  source 1..75: mol_type = other DNA
ttcgtgtggcaacgcactgtaccgaagctgatgtttccgcccagcatattcagtatgcccgcgagctcggaatgg

SEQ ID NO: 596655 - DNA, 75 bp, synthetic construct
  source 1..75: mol_type = other DNA
atgctatttgttattattttaaggtgtattttattattttttctaagttaggagtaaagattaaatatataaatt

SEQ ID NO: 596656 - DNA, 75 bp, synthetic construct
  source 1..75: mol_type = other DNA
aaattataaaaatgcctaactcagacgaagcctgtaaaataggattgttggtgggcagttgttttgctcatccaa

SEQ ID NO: 596657 - DNA, 75 bp, synthetic construct
  source 1..75: mol_type = other DNA
aatacttttctacagggccgaatatgaaaaatactttgatagtttaaaaataggtgatgaagccttaaatattaa

SEQ ID NO: 596658 - DNA, 75 bp, synthetic construct
  source 1..75: mol_type = other DNA
ctttcgtccgcagaaggttctctggcaagggattttttgcccattgcttgccgatattgttctcattgtcgggct

SEQ ID NO: 596659 - DNA, 75 bp, synthetic construct
  source 1..75: mol_type = other DNA
tcgatacggccctaaataccggtctggcacttcttggttggctttacatcatgtcccgtacctggcgatggctgg

SEQ ID NO: 596660 - DNA, 75 bp, synthetic construct
  source 1..75: mol_type = other DNA
atgaaaacaatcagactatggcgcggcaatagccgacttgatggtgagtacatccgcgtgattgaagatgttaat

SEQ ID NO: 596661 - DNA, 75 bp, synthetic construct
  source 1..75: mol_type = other DNA
aacgattaagtgaattcggatggcgatactctgccatccgtaatttttactccacttcctgccagtttttccgtt

SEQ ID NO: 596662 - DNA, 75 bp, synthetic construct
  source 1..75: mol_type = other DNA
attgccattcgtggtctgctggcaatgggagaaaaccgtaaccgtcgtgtgtggtttttctgtgatgagttaccc

SEQ ID NO: 596663 - DNA, 75 bp, synthetic construct
  source 1..75: mol_type = other DNA
atgagcaagttccctagtcatgaaatggataggttcaatatcaggcttcctgcaggaatgcgggatgctatagct

SEQ ID NO: 596664 - DNA, 75 bp, synthetic construct
  source 1..75: mol_type = other DNA
acgacaagttcaacctccgttttcctgacggaatgcgagatgctatagctgaacgagccaaacgaaacgggcgct

SEQ ID NO: 596665 - DNA, 75 bp, synthetic construct
  source 1..75: mol_type = other DNA
gccgctggcagtttgatgatgataagctcaatacgttgcatcatttaggtgctggcacgtttgttaccagcggca

SEQ ID NO: 596666 - DNA, 75 bp, synthetic construct
  source 1..75: mol_type = other DNA
aggaacaacaaaattctttcaagtggctggcggcattgctggaagaaaattatgctgacaaaactaccatttcgg

SEQ ID NO: 596667 - DNA, 75 bp, synthetic construct
  source 1..75: mol_type = other DNA
atgcccccgtgtcttttttcacagggggctgatatggcaacaaaagaagaaaatcagaaacatcttcgtcaactg

SEQ ID NO: 596668 - DNA, 75 bp, synthetic construct
  source 1..75: mol_type = other DNA
tagaagatattgaatcggacgttcgctatgtgggagatggccttattgaactagctcaacgcttagccgttatca

SEQ ID NO: 596669 - DNA, 75 bp, synthetic construct
  source 1..75: mol_type = other DNA
tagaagatattgaatctgatgttcgctatgtaggagacggacttgttgaactagctcaacgcttaggcgctacta

SEQ ID NO: 596670 - DNA, 75 bp, synthetic construct
  source 1..75: mol_type = other DNA
tctcgatcgcctgaactttgatcagttcaaagtcagcgtgaaagcgtctgacgtcttcctggccgtggagtctta

SEQ ID NO: 596671 - DNA, 75 bp, synthetic construct
  source 1..75: mol_type = other DNA
cagatatgggagctatcaaactggatagaagatattgaatcggacgttcgctatgtaggggatggccttgttgaa

SEQ ID NO: 596672 - DNA, 75 bp, synthetic construct
  source 1..75: mol_type = other DNA
tagaagatattgaatctgacgttcgctatgtaggggatggacttatcgaactcgcacaacgcttaggcgctgcta

SEQ ID NO: 596673 - DNA, 75 bp, synthetic construct
  source 1..75: mol_type = other DNA
cagatatgggagctatcaaactggatagaagatattgaatctgatgttcgctatgtaggagatggacttgttgaa

SEQ ID NO: 596674 - DNA, 75 bp, synthetic construct
  source 1..75: mol_type = other DNA
gacatggaccagggagttgattgaacgtaacggtaaatttggcatcgttatcccgggcgttgcagcaactaactg

SEQ ID NO: 596675 - DNA, 75 bp, synthetic construct
  source 1..75: mol_type = other DNA
atgtcggaaacaataggctccagtggttttggaatcagtattgcccccccctcactcttccggacaaaaaacagt

SEQ ID NO: 596676 - DNA, 75 bp, synthetic construct
  source 1..75: mol_type = other DNA
gtcatgattatgtggcgttgctggttgatgtacagaggacgctgatgaaaggcgatactcccccgggatacgtct

SEQ ID NO: 596677 - DNA, 75 bp, synthetic construct
  source 1..75: mol_type = other DNA
gccatgattatgtggcgttgctggttgatgtacagaggacgctgatgaaaggcgatattcccccgggatacgtct

SEQ ID NO: 596678 - DNA, 75 bp, synthetic construct
  source 1..75: mol_type = other DNA
ctgtgccggcagcagcgttgagctataaaaacaaaaagccgcccaaatggcggcggggcagacggcacagaacga

SEQ ID NO: 596679 - DNA, 75 bp, synthetic construct
  source 1..75: mol_type = other DNA
gacgtcattacgtacagaactgaaccgggatattcaggcccgtctggttcagacggaggaaaccgcagagcgaac

SEQ ID NO: 596680 - DNA, 75 bp, synthetic construct
  source 1..75: mol_type = other DNA
ggccgtatgtgccgggtttcatttcagtttgttgagagcggggaactgtcatttccggtcgccggagccgcaacc

SEQ ID NO: 596681 - DNA, 75 bp, synthetic construct
  source 1..75: mol_type = other DNA
agggcgcgatgaagataagtttaactgttacggcattcctgtcgtgaaaggtccggtgctgggtttaccgttggt

SEQ ID NO: 596682 - DNA, 75 bp, synthetic construct
  source 1..75: mol_type = other DNA
agtttcgatgagcaatcccagcggcgtaacattatggctgcagcctggtcaatgccggtggagtttgaacctcca

SEQ ID NO: 596683 - DNA, 75 bp, synthetic construct
  source 1..75: mol_type = other DNA
ccgctggcagtttgatgatgataagctcaatacgttgcatcatttaggtgctgggacgtttgttaccagcggcaa

SEQ ID NO: 596684 - DNA, 75 bp, synthetic construct
  source 1..75: mol_type = other DNA
ctgatgctacggatgatgttaaagcggtccgtgtgcggaaatgcctgcatgtgatggggtattgcccggagacag

SEQ ID NO: 596685 - DNA, 75 bp, synthetic construct
  source 1..75: mol_type = other DNA
ctggttgtgctggcggctatggcgcagtggcaaagtaaccgatcgcttaagccattatttgtcgcgtggtcatct

SEQ ID NO: 596686 - DNA, 75 bp, synthetic construct
  source 1..75: mol_type = other DNA
ttactcaatcgaccgcgtattctctgatggctgttgtgctggtggcttttctggagtcgctggcgctggtcggtc

SEQ ID NO: 596687 - DNA, 75 bp, synthetic construct
  source 1..75: mol_type = other DNA
aaatggaatgcgaaaaccgtaaatcgaagaataatgatagtagtgcaaaattttgctatgtgaaagatttacagt

SEQ ID NO: 596688 - DNA, 75 bp, synthetic construct
  source 1..75: mol_type = other DNA
taggaataatgatagtagtgcaaaattttgctatataaaagatttgcagttttatgttcagtattttcctgagct

SEQ ID NO: 596689 - DNA, 75 bp, synthetic construct
  source 1..75: mol_type = other DNA
actctatgacaacggtggcccaggtctggatcttaagcgcgattgcaaatggttgtaccaccagaggaactccag

SEQ ID NO: 596690 - DNA, 75 bp, synthetic construct
  source 1..75: mol_type = other DNA
tctcgatggatggcgtgattgccaacctgaaaggcgtttgcgatttggcagatatttacgatgcgctggtgatgg

SEQ ID NO: 596691 - DNA, 75 bp, synthetic construct
  source 1..75: mol_type = other DNA
agcgcgtgaagccggtgcgcgtcatgtgctgattgccaccgatggtgtgttctcaatggacggcgtgattgccaa

SEQ ID NO: 596692 - DNA, 75 bp, synthetic construct
  source 1..75: mol_type = other DNA
tgtgcgtctgtgtaaagccaaacgctatcgttatgccaacaacgatatgcaggagctggaagcacgtctgaaaga

SEQ ID NO: 596693 - DNA, 75 bp, synthetic construct
  source 1..75: mol_type = other DNA
gaaatgttaattttatacttcctgtaattcaagagtggaatcaaaagaacaaaaatggtgaaacgactcgattat

SEQ ID NO: 596694 - DNA, 75 bp, synthetic construct
  source 1..75: mol_type = other DNA
ttaaggctagcgaatttaatagggacagcattaatgaactattcggtgggtatggcttagaaaatttctctaatg

SEQ ID NO: 596695 - DNA, 75 bp, synthetic construct
  source 1..75: mol_type = other DNA
aggtctcatcacgactattatccagaaagtccatatcagactcctatatattggttactacaatcacagttcaaa

SEQ ID NO: 596696 - DNA, 75 bp, synthetic construct
  source 1..75: mol_type = other DNA
gattggcctgaaatacacccacggttttacgcgtcttacgccaagcattatcactattgcggcgatgatcgtcag

SEQ ID NO: 596697 - DNA, 75 bp, synthetic construct
  source 1..75: mol_type = other DNA
ttttaccaaagagcaattgattgcccatattcgtgaacgtaaggaagcgcgccagagaatgttggatacggtaac

SEQ ID NO: 596698 - DNA, 75 bp, synthetic construct
  source 1..75: mol_type = other DNA
tatatgtaatcggttatggtgttcatatcgaggcactcaggtatcaacctacctgctttcatcaattcatatggc

SEQ ID NO: 596699 - DNA, 75 bp, synthetic construct
  source 1..75: mol_type = other DNA
atggagagttatgttttttcaccgtccgcgaatatgttttatccggtatccctgcgtgccgtttatgaggccgcc

SEQ ID NO: 596700 - DNA, 75 bp, synthetic construct
  source 1..75: mol_type = other DNA
cggcaatgtggaaaatggtaaaccaacgcttgtgaatggcgatatcatctttttcaacagccttcgccataagtc

SEQ ID NO: 596701 - DNA, 75 bp, synthetic construct
  source 1..75: mol_type = other DNA
gaacgtggtgcgaatcaggtagtgatgggtgagcgtgaaattgcccgtactatgctggaactgctggaaacgcca

SEQ ID NO: 596702 - DNA, 75 bp, synthetic construct
  source 1..75: mol_type = other DNA
atcggttggttgattgtggaagacctggtgatggtcctgacactggtattgctacccgcggtagcaggaattatg

SEQ ID NO: 596703 - DNA, 75 bp, synthetic construct
  source 1..75: mol_type = other DNA
cgcaccgtgaaggcatgggcgcgcgagtcaccgccagccatactacggcaatgcattcctataacggagcgtata

SEQ ID NO: 596704 - DNA, 75 bp, synthetic construct
  source 1..75: mol_type = other DNA
ttgttaggttttattattacagcaattgcactacttgcatcattgcttgataaaccgttacttaaaaacatgcaa

SEQ ID NO: 596705 - DNA, 75 bp, synthetic construct
  source 1..75: mol_type = other DNA
agtcgttggcacctaatgatcctcatgacttacagcgttataagcaggtctacagaaagatgtgcaacagtgagg

SEQ ID NO: 596706 - DNA, 75 bp, synthetic construct
  source 1..75: mol_type = other DNA
aactggcagagctgggcgttattttgctgatgttcggcgtcggtttgcatttttcgctcaaggatttgatggcgg

SEQ ID NO: 596707 - DNA, 75 bp, synthetic construct
  source 1..75: mol_type = other DNA
ttatgaagcaggcgagattgtggcgtctgcccgcgcgaaaaacccggatattgagattatcgcccgcgcccatta

SEQ ID NO: 596708 - DNA, 75 bp, synthetic construct
  source 1..75: mol_type = other DNA
ttttgcagcggatgctgcaccggcgggcatgaagcggggcgtcggtacggaaaaaatgccggtctgggtgccggt

SEQ ID NO: 596709 - DNA, 75 bp, synthetic construct
  source 1..75: mol_type = other DNA
ggcgagcgtgaaatcgcccgtactatgctggaactgctggaaacgccaccggcgggtgaggtggtgacggggtaa

SEQ ID NO: 596710 - DNA, 75 bp, synthetic construct
  source 1..75: mol_type = other DNA
ttttcgctcaaggatttgatggcggtaaaggccatcgccattcccggcgcgatcgcccagatagccgtggcgacg

SEQ ID NO: 596711 - DNA, 75 bp, synthetic construct
  source 1..75: mol_type = other DNA
acgctggaagaagctatcgaagaagagaagcagatcccggtggatatttgcaaccatgcgctactggtgggctac

SEQ ID NO: 596712 - DNA, 75 bp, synthetic construct
  source 1..75: mol_type = other DNA
aatatcagagttaaccccatacagtcgccaaatgatgattaaacaaggttctggcgctgttatggtttcattagc

SEQ ID NO: 596713 - DNA, 75 bp, synthetic construct
  source 1..75: mol_type = other DNA
tgctggggccggggctggttaacggcgcgctggcgctggcgttaaccacctggcccgcttatgcgcgtcaggcgc

SEQ ID NO: 596714 - DNA, 75 bp, synthetic construct
  source 1..75: mol_type = other DNA
gtttgcgtcattcacccgccgcgttctgcggtttgataattatcctgttattgatgctaattgcgctcttcgcgc

SEQ ID NO: 596715 - DNA, 75 bp, synthetic construct
  source 1..75: mol_type = other DNA
gaacgacggagggattagtgtacttaatcgtggatatgacccaacgaaaaacaaatggagcgagagcgaaggtaa

SEQ ID NO: 596716 - DNA, 75 bp, synthetic construct
  source 1..75: mol_type = other DNA
ggtgctctacaccgctaccggaattatgttcgtactggcggtagtgccgggaatgccacatctgccgtttttgct

SEQ ID NO: 596717 - DNA, 75 bp, synthetic construct
  source 1..75: mol_type = other DNA
atgatgcatcggttaagcagttttcacaggattcagacactcagatggagaaaggacaaattatcttcaagttgg

SEQ ID NO: 596718 - DNA, 75 bp, synthetic construct
  source 1..75: mol_type = other DNA
aaccggttcgaacgtggtctggaacaggtcagcgctacttatggaaaacggaacgacggagggattcgtgtactt

SEQ ID NO: 596719 - DNA, 75 bp, synthetic construct
  source 1..75: mol_type = other DNA
aactacgtggttcgcagcgcctgctgctggaactgatccgtctccacgccccggtgacgcgggctgaactggcac

SEQ ID NO: 596720 - DNA, 75 bp, synthetic construct
  source 1..75: mol_type = other DNA
ggaaatgagcattaaaagcattttgaaggatttgtccgtcagcgctgatgttgatcacgtcgacctgggctccgc

SEQ ID NO: 596721 - DNA, 75 bp, synthetic construct
  source 1..75: mol_type = other DNA
gcgtttagattgttcgccggggcgttggtgtgtctgcgggctgttttgtgcggtggtgagcgtgtgagggcgtga

SEQ ID NO: 596722 - DNA, 75 bp, synthetic construct
  source 1..75: mol_type = other DNA
ggtttattgctgatgtgggccgtctgtgctggtgtgattcacggcgtgggctttcgtccgcagaaggttctttgg

SEQ ID NO: 596723 - DNA, 75 bp, synthetic construct
  source 1..75: mol_type = other DNA
ggtttattgctgatgtgggccgtgtgcgccggcgttattcacggtgtggggttccgtccgcagaaggttctttgg

SEQ ID NO: 596724 - DNA, 75 bp, synthetic construct
  source 1..75: mol_type = other DNA
gaagttagctgcctcttcgatgggagcacagagtgcgtcatgcggcgcggcgatgctcccgttgtataaggtgat

SEQ ID NO: 596725 - DNA, 75 bp, synthetic construct
  source 1..75: mol_type = other DNA
cagttgctgaaagtgtaccgggcgctgctgaccgaaggcgtttccctgcgcgatatcgtcaccatcgccaccgtg

SEQ ID NO: 596726 - DNA, 75 bp, synthetic construct
  source 1..75: mol_type = other DNA
gcggaaaagtatcctgaacaagatgtcaatgatcctcaagtatgggagcctgcatttattgaagtgatgaagcaa

SEQ ID NO: 596727 - DNA, 75 bp, synthetic construct
  source 1..75: mol_type = other DNA
ccagggcataaaacgacaattgctatgactggggcaggtaaaacaacggttgagagccttgaattagtgtttttt

SEQ ID NO: 596728 - DNA, 75 bp, synthetic construct
  source 1..75: mol_type = other DNA
cctcgaaacactgacccgaaccatcaccgaaaccagcgagcaacaggtcagttgggaaaccattccgctgatcga

SEQ ID NO: 596729 - DNA, 75 bp, synthetic construct
  source 1..75: mol_type = other DNA
tcaccgggcactgaacgttaaatattattctattgagccgggtgtttatactggtattcagttattccaactccc

SEQ ID NO: 596730 - DNA, 75 bp, synthetic construct
  source 1..75: mol_type = other DNA
aggaaggtattgccagtatggtggagttactatccatatgccaggaaatgctcagtgattacagcgttgcggtca

SEQ ID NO: 596731 - DNA, 75 bp, synthetic construct
  source 1..75: mol_type = other DNA
tattctcaccggagagtaaaaaagtgccctggttagggcaccatgtacatcctaatgtatgtacattaggtaatt

SEQ ID NO: 596732 - DNA, 75 bp, synthetic construct
  source 1..75: mol_type = other DNA
atgctttcacgctcggatttactgacgctgttgacaatcaactttatcgtcgtcaccaaaggggccgagcgtatt

SEQ ID NO: 596733 - DNA, 75 bp, synthetic construct
  source 1..75: mol_type = other DNA
cgcagttgcataatcgtttgtcgtcgatggcaccgcgcctggcagaagacttaagcgcggcgctgaattacagcc

SEQ ID NO: 596734 - DNA, 75 bp, synthetic construct
  source 1..75: mol_type = other DNA
cgacaacggcgatatcgcccatgacgtgcgccaccagctgctggcaagcccgtcggtgctctacaccgccaccgg

SEQ ID NO: 596735 - DNA, 75 bp, synthetic construct
  source 1..75: mol_type = other DNA
atgtttgtgctggcggtggtgccggggatgccgcacctgccgtttttgctgttcagcgccctgcttggctttacc

SEQ ID NO: 596736 - DNA, 75 bp, synthetic construct
  source 1..75: mol_type = other DNA
aggcggcggaggcggaagagaaaagcctcgaaacgctgacccgcaccatcaccgaaaccagcgagcaacaggtca

SEQ ID NO: 596737 - DNA, 75 bp, synthetic construct
  source 1..75: mol_type = other DNA
cgaatatgctcaaccagttccagagcacgatgccgcaggtgaaagagcagatgaaagcggcggggaaagacccgg

SEQ ID NO: 596738 - DNA, 75 bp, synthetic construct
  source 1..75: mol_type = other DNA
ccgttcgatactggatcagggctggtatgaaatgcgccgccagcttgagtacaagcagctctggcgtggcggtca

SEQ ID NO: 596739 - DNA, 75 bp, synthetic construct
  source 1..75: mol_type = other DNA
cctgtaaacagttttcagaaaaaccagaagacgctggcgagacttcagcgacagttaagccgcaaggtcaaattc

SEQ ID NO: 596740 - DNA, 75 bp, synthetic construct
  source 1..75: mol_type = other DNA
tcacaaagtcaattcagatgccaggtatgtggatatacagcgaacgccgatgtaaacggcgctcgtaacatttta

SEQ ID NO: 596741 - DNA, 75 bp, synthetic construct
  source 1..75: mol_type = other DNA
caggtactggcgatacctccggcatacacaagccagcgttgtgtctgttgtggtcatacggcgaaagaaaaccgt

SEQ ID NO: 596742 - DNA, 75 bp, synthetic construct
  source 1..75: mol_type = other DNA
tttgaaggtcagcaacatgtcaaagtcagcagcgggtacggtcagccagccggggcgcaatgtccgggcaaaatc

SEQ ID NO: 596743 - DNA, 75 bp, synthetic construct
  source 1..75: mol_type = other DNA
aagtatcaactccggttcacccttcagcatcaatggtcgggctggatgctggcgtggctaaactcgccacgctgt

SEQ ID NO: 596744 - DNA, 75 bp, synthetic construct
  source 1..75: mol_type = other DNA
gcggcgtgctgttgctgaagcgtcgtctgttcagcccacgcgtgcgtgcaaccactaccggagcggatatcctga

SEQ ID NO: 596745 - DNA, 75 bp, synthetic construct
  source 1..75: mol_type = other DNA
ttagcggcggggcacgccgttcttgcctgtggagggatggtgcagtcaggccgctcgttgaagcaggaacccacc

SEQ ID NO: 596746 - DNA, 75 bp, synthetic construct
  source 1..75: mol_type = other DNA
acacaagccagcgttgcacgtgctgtggtcatacagcgaaagaaaatcgcctgtcacaaagtcaattcagatgcc

SEQ ID NO: 596747 - DNA, 75 bp, synthetic construct
  source 1..75: mol_type = other DNA
tgccgaaacttggctggatgcgctaccggaatagccgtcaggtcacgggtgttgtgaaaaatgtcacggtcagcc

SEQ ID NO: 596748 - DNA, 75 bp, synthetic construct
  source 1..75: mol_type = other DNA
ctgatggtcaaaggcgtgaataaaaagcagcggcatgcaatggcgcaagaggcgcttgagaaagtggcgttgggg

SEQ ID NO: 596749 - DNA, 75 bp, synthetic construct
  source 1..75: mol_type = other DNA
tgaaacgccgcctgttcagcccgcgcgtgcgtgcaacgactaccggggcggacatcctgatcctgtcgctgctcg

SEQ ID NO: 596750 - DNA, 75 bp, synthetic construct
  source 1..75: mol_type = other DNA
ctaaaagacacgccatcacagccgttgcagcagtcgctcaaagatctggagcgcggctacaagaatttcttccag

SEQ ID NO: 596751 - DNA, 75 bp, synthetic construct
  source 1..75: mol_type = other DNA
aagactgggtcatgtgctggacgttgcccgccaggtccagaaaaaaagggataataatcgatcccagtcgatacc

SEQ ID NO: 596752 - DNA, 75 bp, synthetic construct
  source 1..75: mol_type = other DNA
ctgaatgtgaagaacacgcttgccggtgatggcgctgaagagagcatcagcctgacttttcgcaatatgaacgac

SEQ ID NO: 596753 - DNA, 75 bp, synthetic construct
  source 1..75: mol_type = other DNA
gcggcccatgcgccgtttatttcgcatccggtcgagttttgtcacctgctggtggcgttgaagcagagggtgtag

SEQ ID NO: 596754 - DNA, 75 bp, synthetic construct
  source 1..75: mol_type = other DNA
atcatcctttgcactggcgacatgggctttggcgcttgcaaaacttacgacctggaagtatggatcccggcacag

SEQ ID NO: 596755 - DNA, 75 bp, synthetic construct
  source 1..75: mol_type = other DNA
agatgaccgcccatacaccgtgcttccgttctgaagctggttcttatggtcgtgacactcgcggcctgatccgta

SEQ ID NO: 596756 - DNA, 75 bp, synthetic construct
  source 1..75: mol_type = other DNA
gggccatgcgctgccttaatattactcctttgtgtgctgaaaccagccaggcaaaaggccgcgttgaacgtgctc

SEQ ID NO: 596757 - DNA, 75 bp, synthetic construct
  source 1..75: mol_type = other DNA
aagtaaattcagatgccaggtatgtggatatacagcgaacgccgatgtaaatggcgctcgtaacattttagcggc

SEQ ID NO: 596758 - DNA, 75 bp, synthetic construct
  source 1..75: mol_type = other DNA
cgggaacgataagtcatccgggtcgcaatgtccgggcaaaatcaggtttaaaccgttcgatactggatcagggct

SEQ ID NO: 596759 - DNA, 75 bp, synthetic construct
  source 1..75: mol_type = other DNA
agtcatgcggcaaatggtacgttagcatccagacggaatacgaagtgcctgaacaggttcataaggcagcgtcaa

SEQ ID NO: 596760 - DNA, 75 bp, synthetic construct
  source 1..75: mol_type = other DNA
aagctcgatcaggaaaacagccgtatttttctgccgaaactgggctggatgcgctaccggaatagccgtcaggtc

SEQ ID NO: 596761 - DNA, 75 bp, synthetic construct
  source 1..75: mol_type = other DNA
ttagcggcgggacacgccgttcttgcctgtggagagatggtgcagtcaggccgctcgttgaagcaggaacccacc

SEQ ID NO: 596762 - DNA, 75 bp, synthetic construct
  source 1..75: mol_type = other DNA
ggctggatgcgctaccggaacagccgtcaggtcacgggtgttgtgaaaaatgtcactgtcagccagtcctgcggt

SEQ ID NO: 596763 - DNA, 75 bp, synthetic construct
  source 1..75: mol_type = other DNA
gatgctggcgtggctaaactcgccacgctgtcagatggcacagtctttgagcctgtaaacagttttcagaaaaac

SEQ ID NO: 596764 - DNA, 75 bp, synthetic construct
  source 1..75: mol_type = other DNA
caccaggccagcgatacggaggtgggcagcaacgggacgctggatgtgcacaacggaggagtgctccgtggcacg

SEQ ID NO: 596765 - DNA, 75 bp, synthetic construct
  source 1..75: mol_type = other DNA
aagcgattaacgccctgcaggaaacctttaccgttagcgagcgcagtaaagagagcgggatgctggaactcacca

SEQ ID NO: 596766 - DNA, 75 bp, synthetic construct
  source 1..75: mol_type = other DNA
aaaacggccactatacgctggaaggtgaagagttcaccgtcaatggtatggtcggccagcgtctggaaaaagatg

SEQ ID NO: 596767 - DNA, 75 bp, synthetic construct
  source 1..75: mol_type = other DNA
agtgctgtcctgagcggcactaacggtaaaggcaccttcagcattgccggtggcagtgccgtcaatatgttgctg

SEQ ID NO: 596768 - DNA, 75 bp, synthetic construct
  source 1..75: mol_type = other DNA
tatctccgtagtacggcattccgggcagaatcaaaggatatcagtctggataatggtatgaaggcgaaagcaggg

SEQ ID NO: 596769 - DNA, 75 bp, synthetic construct
  source 1..75: mol_type = other DNA
tgacatgacggttaaaggcgcctctgtctggcatctcggtggtgactccactgtcggtgcattaacgctggataa

SEQ ID NO: 596770 - DNA, 75 bp, synthetic construct
  source 1..75: mol_type = other DNA
ggtgagtcatgaattttcggacaacaacaaagttcgtatcaatgacagctatgacttcaggaacgacatctccgg

SEQ ID NO: 596771 - DNA, 75 bp, synthetic construct
  source 1..75: mol_type = other DNA
aaaacactggtctggaaccagtatctgctggtgcgccgcttcaggtagtgcaaaccggtggcggtgatgccgcgt

SEQ ID NO: 596772 - DNA, 75 bp, synthetic construct
  source 1..75: mol_type = other DNA
cgatggatgcccttcaggctaaggctaatgtaacgacacagtcaggcaccaccctgacgctggataacgggagcg

SEQ ID NO: 596773 - DNA, 75 bp, synthetic construct
  source 1..75: mol_type = other DNA
atgatggagtcggcgaataatgtcctgatgattaccggtgcgacgcctgacagcggtaaaacattcgtcagttca

SEQ ID NO: 596774 - DNA, 75 bp, synthetic construct
  source 1..75: mol_type = other DNA
tgcaattacttaaccgccagcaggagttgagtatttcgaaatccagtgccattggtaacgtgcggattatcgacc

SEQ ID NO: 596775 - DNA, 75 bp, synthetic construct
  source 1..75: mol_type = other DNA
ttgcaacagaatatcgctcgccaggcggcgcaggattcacaaagccttgaattcttacagcgccagttacctgaa

SEQ ID NO: 596776 - DNA, 75 bp, synthetic construct
  source 1..75: mol_type = other DNA
acgcattctttccagggtgaggttggtgttaatttagggatggaccttgatgttggtaaaacaaaaataaggccc

SEQ ID NO: 596777 - DNA, 75 bp, synthetic construct
  source 1..75: mol_type = other DNA
tgaacgaccggacttgttagaaaaatattataatgaaagattaattcgtttctcgataaaagacactgatggtaa

SEQ ID NO: 596778 - DNA, 75 bp, synthetic construct
  source 1..75: mol_type = other DNA
attgatagtaaaaaacagtccttttatcatgaagaacataatactgttgtaaattcatttaacttacaaggtaat

SEQ ID NO: 596779 - DNA, 75 bp, synthetic construct
  source 1..75: mol_type = other DNA
aatactatctgaacaaggaaaatactgactggtacctgaaagctgacagtagtcagccaggaacagataatccag

SEQ ID NO: 596780 - DNA, 75 bp, synthetic construct
  source 1..75: mol_type = other DNA
cattaagtaatagacagattaaaacccttcttcaaatcagttttgtgagagggttttctaataaaatccataaaa

SEQ ID NO: 596781 - DNA, 75 bp, synthetic construct
  source 1..75: mol_type = other DNA
ataagcaaaactatttctaagaataaagatgtatattatgttgatacgctttcttataaattgattttaaggaag

SEQ ID NO: 596782 - DNA, 75 bp, synthetic construct
  source 1..75: mol_type = other DNA
ccactgaaagaatttatcaataaaaagataagagaaagtggattatccgaaatggattttaaaagaacaataagt

SEQ ID NO: 596783 - DNA, 75 bp, synthetic construct
  source 1..75: mol_type = other DNA
tatggcgatagtcgtggggatttttctttgctggcgactgcgcgatcgcccgcaggcattaggtttaccggcggt

SEQ ID NO: 596784 - DNA, 75 bp, synthetic construct
  source 1..75: mol_type = other DNA
aaatgcgcgttattttatggggatggggcttattgcgactggcatcatcaacattctgtttggattttccacttc

SEQ ID NO: 596785 - DNA, 75 bp, synthetic construct
  source 1..75: mol_type = other DNA
ctggggatgggaagaaaggtggaaatctgatagtggctgactctgtctggaaattatccggagactctactatta

SEQ ID NO: 596786 - DNA, 75 bp, synthetic construct
  source 1..75: mol_type = other DNA
gtgacatgacggttaaaggcgcctctgtctggcatctcgatggtgactccactgtcggtgcattaacactggata

SEQ ID NO: 596787 - DNA, 75 bp, synthetic construct
  source 1..75: mol_type = other DNA
tatgcaacctggtttaacaatgacggttactatgtggatggcgttatcaaagttaaccgtttcaggaacgaactg

SEQ ID NO: 596788 - DNA, 75 bp, synthetic construct
  source 1..75: mol_type = other DNA
gaggcggcaggggcggcgacggggtttgtcggcttgtttgcttatctgggggcgtcgcttgctggttggccgctg

SEQ ID NO: 596789 - DNA, 75 bp, synthetic construct
  source 1..75: mol_type = other DNA
caggtgcttgctgttccgccagcgtatacaagccagcgttgcgcgtgctgtggtcatacagcgaaagagaatcgc

SEQ ID NO: 596790 - DNA, 75 bp, synthetic construct
  source 1..75: mol_type = other DNA
caggtgcttgctgttccgccagcgtatacaagccagcgttgcgcgtcctgtggtcatacagcgaaagacaatcgc

SEQ ID NO: 596791 - DNA, 75 bp, synthetic construct
  source 1..75: mol_type = other DNA
caggtgcttgctgttccgccagcgtatacaagccagcgttgcgcgtactgtggtcatacagcgaaagaaaatcgc

SEQ ID NO: 596792 - DNA, 75 bp, synthetic construct
  source 1..75: mol_type = other DNA
ccacataccttccggcacagctatatcatgcacatgctctatcaccgccagccccggaaggttattcaggcgctg

SEQ ID NO: 596793 - DNA, 75 bp, synthetic construct
  source 1..75: mol_type = other DNA
caggtgcttgctgttccgccagcgtagacaagccagcgttgcgcgttctgtggtcatacagcgaaagagaatcgc

SEQ ID NO: 596794 - DNA, 75 bp, synthetic construct
  source 1..75: mol_type = other DNA
caggtgcttgctgttccgccagcgtacacaagccagcgttgcgcgttctgtggtcatacagcgaaagacaatcgc

SEQ ID NO: 596795 - DNA, 75 bp, synthetic construct
  source 1..75: mol_type = other DNA
tcatgcacatgctctatcaccgccagccccggaaggttattcaggcgctggccggtcacaaggatccgcgctcga

SEQ ID NO: 596796 - DNA, 75 bp, synthetic construct
  source 1..75: mol_type = other DNA
ctggatggtctgcgcccttttgtgcgggtgctgtcggagaaagtgcgcctggtgccgctgacggatgtcagtttt

SEQ ID NO: 596797 - DNA, 75 bp, synthetic construct
  source 1..75: mol_type = other DNA
cgcgatagatcagggcgtctattacccgttggggatgcaacaggcttcagttaacggtaaatccatcttctttat

SEQ ID NO: 596798 - DNA, 75 bp, synthetic construct
  source 1..75: mol_type = other DNA
caggtgcttgctgttccgccagcgtaaacaagccagcgttgcgcgttctgtggtcatacagcgaaagaaaatcgc

SEQ ID NO: 596799 - DNA, 75 bp, synthetic construct
  source 1..75: mol_type = other DNA
gatccgtatcggtgaagcccggacactcaccccggaatccttcgacctggatggtctgcgcccttttgtgcgggt

SEQ ID NO: 596800 - DNA, 75 bp, synthetic construct
  source 1..75: mol_type = other DNA
gtgcgtcagatggaaagctggatggtcaccacccgcccccgccggcgtgagccgttatggccggtcacggatgag

SEQ ID NO: 596801 - DNA, 75 bp, synthetic construct
  source 1..75: mol_type = other DNA
gctggtcacagggatccacgttcgatggaggtctatacacgggtgtttgcgctggatatggctgccacgctggca

SEQ ID NO: 596802 - DNA, 75 bp, synthetic construct
  source 1..75: mol_type = other DNA
attggcgaagcccggatgctgacgccggaatcatttgatctggatggtgtaagaccgtttgtgcggatcctgtcc

SEQ ID NO: 596803 - DNA, 75 bp, synthetic construct
  source 1..75: mol_type = other DNA
accattatgggccgtgaccgacgaaaccatgcgcaactggctgaagcaggctgtcagacgggccgaagctgacgg

SEQ ID NO: 596804 - DNA, 75 bp, synthetic construct
  source 1..75: mol_type = other DNA
cggcgaactcatccgcatcagcagcccgcgacagacccggagttacagctacagcgactccggcaggctgaccgg

SEQ ID NO: 596805 - DNA, 75 bp, synthetic construct
  source 1..75: mol_type = other DNA
acgacagtcagcaccggctggtgcactacacgcggacacaatatgcagagccgctggtcgaaagtcgctatcttt

SEQ ID NO: 596806 - DNA, 75 bp, synthetic construct
  source 1..75: mol_type = other DNA
cagcgccgcagcctggcggagaagctgcagcaggaagggagcgaggacgggcacggcgtggtatttccggctgaa

SEQ ID NO: 596807 - DNA, 75 bp, synthetic construct
  source 1..75: mol_type = other DNA
tcatgcacatgctctatcaccgccagccacggaaggttattcaggccctggtcggacacaaggatccgcgctcga

SEQ ID NO: 596808 - DNA, 75 bp, synthetic construct
  source 1..75: mol_type = other DNA
gctcatccgcctgccgggtcagcagtatgatgaggagtccggcctctattacaaccgccaccgctattatgaccc

SEQ ID NO: 596809 - DNA, 75 bp, synthetic construct
  source 1..75: mol_type = other DNA
gatggttgcctgctgccggactggtatggcggagagccgcgccgacactgcgtatccgtgacccacacaaagaag

SEQ ID NO: 596810 - DNA, 75 bp, synthetic construct
  source 1..75: mol_type = other DNA
attatgggctgtgaccgacgaaaccatgcgcaactggctgaagcaggctgtcagacgggccgaagctgacggggt

SEQ ID NO: 596811 - DNA, 75 bp, synthetic construct
  source 1..75: mol_type = other DNA
gacgaacgcggctggctgacacaaatcagccatctcagcgaaggccaccgggtgacggtgcattacgggtatgat

SEQ ID NO: 596812 - DNA, 75 bp, synthetic construct
  source 1..75: mol_type = other DNA
atgcttccatacatccaacctattctattgatccgctgggcttaattgataaacctgctccagtattcaatcgag

SEQ ID NO: 596813 - DNA, 75 bp, synthetic construct
  source 1..75: mol_type = other DNA
gaccggcaaacttatccgcagcgaggatgaggggctggtcacccactggcactatgacgaagcagaccgcatcac

SEQ ID NO: 596814 - DNA, 75 bp, synthetic construct
  source 1..75: mol_type = other DNA
ctatattggcgatccaaaactcgacactttatttaatcaatcccgaattcaagtccgaagtgcgacactctccaa

SEQ ID NO: 596815 - DNA, 75 bp, synthetic construct
  source 1..75: mol_type = other DNA
cgaagcgggatcgctggtgattgaaaaactctccgaatgccagaaagtctgctttgtcccgcgcggcagtcagat

SEQ ID NO: 596816 - DNA, 75 bp, synthetic construct
  source 1..75: mol_type = other DNA
gcggaagtcgacgccgccattgcctgcgcacgagaaaatcaggtggtgctgtttgaggcatttaaaaccgccagc

SEQ ID NO: 596817 - DNA, 75 bp, synthetic construct
  source 1..75: mol_type = other DNA
gcagtcagtcgtatcaccgccaaactgctgaccgagatccgccgccagaccggggtgatttttccggcagatagc

SEQ ID NO: 596818 - DNA, 75 bp, synthetic construct
  source 1..75: mol_type = other DNA
tttaatcgatctggtaggccaaccgcggctggcaaacagctggtggcctggtgcggtgattagcgaagagctggc

SEQ ID NO: 596819 - DNA, 75 bp, synthetic construct
  source 1..75: mol_type = other DNA
gtccacggtcacgttgttcgggcttatcagccgtcctggcaagcagccattcactccaggtcgcgacgtggcgag

SEQ ID NO: 596820 - DNA, 75 bp, synthetic construct
  source 1..75: mol_type = other DNA
aacagggcgcagattccagcgccgacgatgccgctgcgattaacgccttacgccagcaaattcaggcgttgaaag

SEQ ID NO: 596821 - DNA, 75 bp, synthetic construct
  source 1..75: mol_type = other DNA
ccatatcaacgttgtggaagccgatcacttcaaacagttcctgcgtcggattaagcgtgccggcctcgatatccg

SEQ ID NO: 596822 - DNA, 75 bp, synthetic construct
  source 1..75: mol_type = other DNA
ttccgccatatcaacattgcggaagccgatcacttcaaacagttcctgcgtcagattaagcgtgccggcctcgat

SEQ ID NO: 596823 - DNA, 75 bp, synthetic construct
  source 1..75: mol_type = other DNA
ctggcttcaaaagttcagaatgtcctgaaggatgcccccttctttgatcacctgtttattacagcgggggtacca

SEQ ID NO: 596824 - DNA, 75 bp, synthetic construct
  source 1..75: mol_type = other DNA
atcaccgccaaactgctgactgagatccgccgccagactggggtgatttttccggcagatagcgtaaaactataa

SEQ ID NO: 596825 - DNA, 75 bp, synthetic construct
  source 1..75: mol_type = other DNA
ttagccacaaaattcatgtgatttgcgagaagccgctggcatcgaatctggcggaagtggatgccgccattgcct

SEQ ID NO: 596826 - DNA, 75 bp, synthetic construct
  source 1..75: mol_type = other DNA
tggatatcggcttttactgcctggcgtcggcggtggcgttatttggtgagccgaaaagcgtgcaggcaaccgcca

SEQ ID NO: 596827 - DNA, 75 bp, synthetic construct
  source 1..75: mol_type = other DNA
tgattttgagcgtgggagcgtcatcggtctttgcggcgggcaccgtcaaggtgttcagcaatggcagcagtgagg

SEQ ID NO: 596828 - DNA, 75 bp, synthetic construct
  source 1..75: mol_type = other DNA
gaggaggtggcacttgccgcgctgcgcctgcgcgatgccggtgagcctgtcgacctcgcattactgctgaccacc

SEQ ID NO: 596829 - DNA, 75 bp, synthetic construct
  source 1..75: mol_type = other DNA
cgctggcacagtttcagcgcgcgatgcagctcgaccgcaatgccggtgtgcgcaaagagattgagcgactggagc

SEQ ID NO: 596830 - DNA, 75 bp, synthetic construct
  source 1..75: mol_type = other DNA
ggccgtggtgcgcaggatgacattgtcatgaccgtcatgctgtggcgtctcgatgccggtgacattgctggcgcg

SEQ ID NO: 596831 - DNA, 75 bp, synthetic construct
  source 1..75: mol_type = other DNA
aaacgcggcgcagtcatgggcggaatagggacaattggtgtaatcgtcggcgcagagattccgatgttccttggc

SEQ ID NO: 596832 - DNA, 75 bp, synthetic construct
  source 1..75: mol_type = other DNA
aaaattgtcggcccaatgattacctatttattaccggtgatgattggttctaccggtggtcacctggtcggcggt

SEQ ID NO: 596833 - DNA, 75 bp, synthetic construct
  source 1..75: mol_type = other DNA
aggttcaggcttttgggggctttttgaccgctatggtcattcccaatatcggtgcttttattgcctggggtttta

SEQ ID NO: 596834 - DNA, 75 bp, synthetic construct
  source 1..75: mol_type = other DNA
aggcgctgggtgaactgccaaatcagttaatcggtgaactgccgaatattcaggtctttggcgcagtaggggata

SEQ ID NO: 596835 - DNA, 75 bp, synthetic construct
  source 1..75: mol_type = other DNA
ccgtgtcgttcaatagtgcgccgctggaatggtggctctcccttcccattattgtcatttatcctctgctgtttg

SEQ ID NO: 596836 - DNA, 75 bp, synthetic construct
  source 1..75: mol_type = other DNA
gtttgttgcaggtctggtgctgatggtggtttcctgccttgtcaccctggaactgaccggtattacggtgtcgct

SEQ ID NO: 596837 - DNA, 75 bp, synthetic construct
  source 1..75: mol_type = other DNA
ccatgactacgccaaagtgatggacaaagagcagcttatcgatcgtaaagcggttgccacggtcatcagcaacgt

SEQ ID NO: 596838 - DNA, 75 bp, synthetic construct
  source 1..75: mol_type = other DNA
ctggcagcagctgctggacgttgcacagaaactgaatgacccggcgaataaaaaatacggtattgcgctgcctac

SEQ ID NO: 596839 - DNA, 75 bp, synthetic construct
  source 1..75: mol_type = other DNA
tggtatcgcaaagatgtgctggcaaaagcggggctggaggagccgaaaaactggcagcaactgctggatgtcgcg

SEQ ID NO: 596840 - DNA, 75 bp, synthetic construct
  source 1..75: mol_type = other DNA
catgatgagctggcgcaacaaagcggctggtatcgcgatatgtatcgctatcaacaactggaggcggcgctcgac

SEQ ID NO: 596841 - DNA, 75 bp, synthetic construct
  source 1..75: mol_type = other DNA
tcgtttcgacccgaccatctatatcgcgattggtatggcgaacttgctggcgattggcggcggtagttggatggt

SEQ ID NO: 596842 - DNA, 75 bp, synthetic construct
  source 1..75: mol_type = other DNA
atgaagggcattaatttagttaaaatcaaattaacattttctgatacatacctagtgacatttttccgtatccgt

SEQ ID NO: 596843 - DNA, 75 bp, synthetic construct
  source 1..75: mol_type = other DNA
tcgccagtcggcgctatttgccgcagatgccgaggacactggcaagaaaaatatgcgtgtggcacgtattgatgc

SEQ ID NO: 596844 - DNA, 75 bp, synthetic construct
  source 1..75: mol_type = other DNA
gatgccgaagataccggcaagaaaaacatgcgtgtggcacgtattgatgcccgttttgatccgaccatttacatc

SEQ ID NO: 596845 - DNA, 75 bp, synthetic construct
  source 1..75: mol_type = other DNA
gtggcgaacaacatcgcgctgggttgcccgaatgccacccagcaagagattgagcatgtcgcgcggttagccagc

SEQ ID NO: 596846 - DNA, 75 bp, synthetic construct
  source 1..75: mol_type = other DNA
gcaaaagagatcctcaacgaaatgggatatacccacgttgagaacgccggtggtcttaaagacattgcgatgccg

SEQ ID NO: 596847 - DNA, 75 bp, synthetic construct
  source 1..75: mol_type = other DNA
atgtttaaaaaaggcttacttgcgctgacgctggcgttttcactgcctgtttttgctgctgaacactggatcgat

SEQ ID NO: 596848 - DNA, 75 bp, synthetic construct
  source 1..75: mol_type = other DNA
acaggcccacgtcttcaaacagtacatcatcgactttgccaaagaagtggaggtggagctgaaaggcgatccgat

SEQ ID NO: 596849 - DNA, 75 bp, synthetic construct
  source 1..75: mol_type = other DNA
atgagtaagctgatgtcacgcctggaatggacatggcgactggttatgaccgggttgtgttttgccctgtttggt

SEQ ID NO: 596850 - DNA, 75 bp, synthetic construct
  source 1..75: mol_type = other DNA
ttaccccgctgccaacagcgactggcacagggtgacactatcctgattttccccgaaggcacacgaacgaagccc

SEQ ID NO: 596851 - DNA, 75 bp, synthetic construct
  source 1..75: mol_type = other DNA
agctgatgtcacgtctggagtggacctggcgactggtcatgaccgggttatgttttgtcctgtttggtctcggcg

SEQ ID NO: 596852 - DNA, 75 bp, synthetic construct
  source 1..75: mol_type = other DNA
caatatgcttggtgtcatttaatttatatgcaactgatcttgtctattcggcaaatcaaaatggtaacacagttt

SEQ ID NO: 596853 - DNA, 75 bp, synthetic construct
  source 1..75: mol_type = other DNA
caaataaccatcaatagttaccgcaagtgtgagcgtgttggagagaaaaatatcaataataatctgcaagatctc

SEQ ID NO: 596854 - DNA, 75 bp, synthetic construct
  source 1..75: mol_type = other DNA
tgcaatttatccaccactccctgtttatcgatcgccaacaagggaatcaaatgattttactttgccacaaacgtg

SEQ ID NO: 596855 - DNA, 75 bp, synthetic construct
  source 1..75: mol_type = other DNA
tctcatggaggagtgtgagaaactgagtcagagtcagtcatttagtgatgcagaacagcgacatgcgtttgaaca

SEQ ID NO: 596856 - DNA, 75 bp, synthetic construct
  source 1..75: mol_type = other DNA
tctgaaagataaaggggggaacacgctggcgatgggtaatatgacggtggctgcatttggcgacagcgatgccac

SEQ ID NO: 596857 - DNA, 75 bp, synthetic construct
  source 1..75: mol_type = other DNA
taaggtacgcgctggcaatctcgattatctcgagatatgtaatttattccgcgatcctgactcctttaccgatcc

SEQ ID NO: 596858 - DNA, 75 bp, synthetic construct
  source 1..75: mol_type = other DNA
tgctgctgcgtttattaaccggcacgcacaataaagtaattgggcttagcgccaccagcggttttagccacacca

SEQ ID NO: 596859 - DNA, 75 bp, synthetic construct
  source 1..75: mol_type = other DNA
ggagtcttaatagctcagttgtgtaaatctcatgatacacctgatgagagtgtattttttctttttcagcattgg

SEQ ID NO: 596860 - DNA, 75 bp, synthetic construct
  source 1..75: mol_type = other DNA
tgcccttgggttatcattatttgtatcacagggaagtttaagtcctgccccatataatccagtccatgcaccgtc

SEQ ID NO: 596861 - DNA, 75 bp, synthetic construct
  source 1..75: mol_type = other DNA
cgattattgacagtcagacaggaaatgaaaaaaaacgtatagagctcgaatcaggcccgggaatggtcactttta

SEQ ID NO: 596862 - DNA, 75 bp, synthetic construct
  source 1..75: mol_type = other DNA
cgttcgctcaattaccatgtctcacaaattgatcgctgtgaagagcagttaaaaaagctgacaacatacggttct

SEQ ID NO: 596863 - DNA, 75 bp, synthetic construct
  source 1..75: mol_type = other DNA
caaataatcataaatagttaccgtaattatgagcgtgttggcgagaaaattatcaataataatctgcaagatctc

SEQ ID NO: 596864 - DNA, 75 bp, synthetic construct
  source 1..75: mol_type = other DNA
ttccggaaattaataaaactattgagcaaatgctggtaaaaggaaaatggcaggaggcgcttgatttctggatta

SEQ ID NO: 596865 - DNA, 75 bp, synthetic construct
  source 1..75: mol_type = other DNA
cggcaaccgcccgacctatgaggccagccgcagcgaagaagccagccacgccgatctggcctgggcaacaatgca

SEQ ID NO: 596866 - DNA, 75 bp, synthetic construct
  source 1..75: mol_type = other DNA
gatgaagctatgagtattcaagctttgtcaagcaatttctgtcgattagtctgtgtatatgactacataaaaaat

SEQ ID NO: 596867 - DNA, 75 bp, synthetic construct
  source 1..75: mol_type = other DNA
tcgtctggagtttgacgccggacacaccgacatagcgcagtcatttatggcaatccgtcgcgcaaccaccgccag

SEQ ID NO: 596868 - DNA, 75 bp, synthetic construct
  source 1..75: mol_type = other DNA
agccgcagcgaagaagccagccacgcagatttggcctgggcaacgatgcacgcactgtttaacgaaccgctgcag

SEQ ID NO: 596869 - DNA, 75 bp, synthetic construct
  source 1..75: mol_type = other DNA
cacgaaatttccctttttgcgaaagcaaatattgatggaatcattaccacaaactgggatgtttttctagaaact

SEQ ID NO: 596870 - DNA, 75 bp, synthetic construct
  source 1..75: mol_type = other DNA
ctctcaggtggagtactatcacgattaaaaattactccagtaagttttcaatcccaaggatgggataaacgacgt

SEQ ID NO: 596871 - DNA, 75 bp, synthetic construct
  source 1..75: mol_type = other DNA
aagctatgaatactcaggtgttgtcaagtaatttttgcaaactagtgtgtatttatgattatatcaaaaatagtc

SEQ ID NO: 596872 - DNA, 75 bp, synthetic construct
  source 1..75: mol_type = other DNA
tacgcagaacggcgacagtgccggatgcgtggtggtggcaccgccagcagtgccgggcggcaagttccgcattct

SEQ ID NO: 596873 - DNA, 75 bp, synthetic construct
  source 1..75: mol_type = other DNA
ttgcgcatggagtacagcccggacgaataccagaacctgctgatgtgcgagtttgtgggcgctgttgcaaatagt

SEQ ID NO: 596874 - DNA, 75 bp, synthetic construct
  source 1..75: mol_type = other DNA
tgtcacttgctgatatggccgaagccgtgctgcgacaggcacctgataaagccatttggttaggctggagtctgg

SEQ ID NO: 596875 - DNA, 75 bp, synthetic construct
  source 1..75: mol_type = other DNA
accggcgtcggtcacggggtttacgagaacgtgaaagcgttttttccagccgtccgggagtttgtctacaacccc

SEQ ID NO: 596876 - DNA, 75 bp, synthetic construct
  source 1..75: mol_type = other DNA
aggcccgcgccgtcagcctgaaaagaatgttttcaccaatgaacagattgagaagctggaagaaatcttccattc

SEQ ID NO: 596877 - DNA, 75 bp, synthetic construct
  source 1..75: mol_type = other DNA
atgaacaccacactgacacccgcagatctcgatccccgtcggcaggccatgctgctctactttcagggataccgc

SEQ ID NO: 596878 - DNA, 75 bp, synthetic construct
  source 1..75: mol_type = other DNA
tactaactatgtttatagagaggcccgttattttcttaggctactctttaacagatgaacatatagctgaaatcc

SEQ ID NO: 596879 - DNA, 75 bp, synthetic construct
  source 1..75: mol_type = other DNA
ggatcggttatgacccggcgaaaggtacgcagaatggcgacagtgccggatgtgtggtggtggcaccgccagccg

SEQ ID NO: 596880 - DNA, 75 bp, synthetic construct
  source 1..75: mol_type = other DNA
ttctatctttagacactaatttaactatgtcgccaacttttttaggaacatccttaataatgtttggtagttggt

SEQ ID NO: 596881 - DNA, 75 bp, synthetic construct
  source 1..75: mol_type = other DNA
aacgatcgcatcattggcggtatggacgaagccagtaccgcagcggcgacgcaggtttataagatgttcgttaaa

SEQ ID NO: 596882 - DNA, 75 bp, synthetic construct
  source 1..75: mol_type = other DNA
cctaacggtgccactctttacttcctcggcaccaatgcccgcactgcccagagttatcacggcaacctgtatctg

SEQ ID NO: 596883 - DNA, 75 bp, synthetic construct
  source 1..75: mol_type = other DNA
aataccagaacctgctgatgtgtgagttcgtggacgatctagcgtccgtattcccactcagcgaactacaggcgt

SEQ ID NO: 596884 - DNA, 75 bp, synthetic construct
  source 1..75: mol_type = other DNA
gcccgtgaagccctgattgacgccctactgacaggacgcaaccagattttcctttctgccagtaaggcacaggct

SEQ ID NO: 596885 - DNA, 75 bp, synthetic construct
  source 1..75: mol_type = other DNA
tccggcaatacgcatttatgtgttctgtcagtcatccggctggcaggtaatgagaacgcaggaacagaaggagga

SEQ ID NO: 596886 - DNA, 75 bp, synthetic construct
  source 1..75: mol_type = other DNA
gatgaagctatgaatactcaggtgttgtcaagtaatttttgcaaactagtgtgtatttatgattatatcaaaaat

SEQ ID NO: 596887 - DNA, 75 bp, synthetic construct
  source 1..75: mol_type = other DNA
ctctcaggtggcgttttatctcgattaaaaatcactcctattagttttcagtctcaaggatgggataaacgacgc

SEQ ID NO: 596888 - DNA, 75 bp, synthetic construct
  source 1..75: mol_type = other DNA
ctgttgtcggcctaagaaacccaaagattgcttgtttgggattggcatttaaaccggatattgatgacctacggg

SEQ ID NO: 596889 - DNA, 75 bp, synthetic construct
  source 1..75: mol_type = other DNA
tagcggaatatcttgcagcggaagtttcagagcgggatgatggcgatggatcttatctaatgctcacagcatcgt

SEQ ID NO: 596890 - DNA, 75 bp, synthetic construct
  source 1..75: mol_type = other DNA
tgtgttctgtcagtcatccggctggcaggtaatgaaaaagcaggaacagaaggaggaaaacaccggaaaacgtca

SEQ ID NO: 596891 - DNA, 75 bp, synthetic construct
  source 1..75: mol_type = other DNA
agcgccactgacacaaccgttaacagtggtggacgtcagaatgtttacatcgacggaaatgtcacagaaacgact

SEQ ID NO: 596892 - DNA, 75 bp, synthetic construct
  source 1..75: mol_type = other DNA
aacagtggtggtatccaggctgtctccagcggcggtgttgctacgagcaccctcgttaacagcggagggagccaa

SEQ ID NO: 596893 - DNA, 75 bp, synthetic construct
  source 1..75: mol_type = other DNA
cggtgtgctggctaccactgatgacagccaccccgcaaacgagacttatgcttacctgattgggcgcatgtttga

SEQ ID NO: 596894 - DNA, 75 bp, synthetic construct
  source 1..75: mol_type = other DNA
actatctgaacaaggaaaatactgactggtacctgaaagctgacagtagtcagccaggaacagataacccgggaa

SEQ ID NO: 596895 - DNA, 75 bp, synthetic construct
  source 1..75: mol_type = other DNA
agggcgattacagccagaacggtttcggcggtagcctcgaagcgggcagaaccttcagtctgaatgagaatgcat

SEQ ID NO: 596896 - DNA, 75 bp, synthetic construct
  source 1..75: mol_type = other DNA
tatgctgaatgtcgcgggcaatgccagcggtaactttgtgctggatatcaaaaacaccggtctggagccagtatc

SEQ ID NO: 596897 - DNA, 75 bp, synthetic construct
  source 1..75: mol_type = other DNA
gcatgtttacgtcgacggtaatatcaccaaaacaactattacaagcggtggcatgctgcaggtggaggccggtgg

SEQ ID NO: 596898 - DNA, 75 bp, synthetic construct
  source 1..75: mol_type = other DNA
gggcttcagattgtatccagcggagcaagtgccacaaatacaaccattgttgacttcgggaagcagcatgtcagc

SEQ ID NO: 596899 - DNA, 75 bp, synthetic construct
  source 1..75: mol_type = other DNA
acgctggtacatgaagcggctcacactacattccacgttttaagtgatgtcggtgtcgtagcgactacagaacca

SEQ ID NO: 596900 - DNA, 75 bp, synthetic construct
  source 1..75: mol_type = other DNA
ctgacggggaacgttgcgggagacaacaccggtgcaggtgatatggcggttaaaggtgcgtctgtctggcatctc

SEQ ID NO: 596901 - DNA, 75 bp, synthetic construct
  source 1..75: mol_type = other DNA
ctgcgaccttcgcaggcaccctgacggggaccggcaccctgacgcaggaaggcggtggcacccgcttcagcggcc

SEQ ID NO: 596902 - DNA, 75 bp, synthetic construct
  source 1..75: mol_type = other DNA
accaaaacaactattacaagcggtggcatgctgcaggtggaggctggtggctcagcctctttggttacccagaac

SEQ ID NO: 596903 - DNA, 75 bp, synthetic construct
  source 1..75: mol_type = other DNA
gaggccggtggttcagcctctaaggttatccagaacagtggcggtgctgtcatcaccaataccagtgcagccgtg

SEQ ID NO: 596904 - DNA, 75 bp, synthetic construct
  source 1..75: mol_type = other DNA
tactgcatgtatccagcggcggtagtgtcactggcaccatcgttaataacggtggccgcgagaatatcaattcag

SEQ ID NO: 596905 - DNA, 75 bp, synthetic construct
  source 1..75: mol_type = other DNA
caagtgccacaaatacaaccattgttgacttcgggaagcagcatgtcagcggcggaagtgccacgaacaccacta

SEQ ID NO: 596906 - DNA, 75 bp, synthetic construct
  source 1..75: mol_type = other DNA
ctgtgaagccttatctgacagcggcagtgagtcatgagttttcggacaagaataaagtcaggataaacaacagtt

SEQ ID NO: 596907 - DNA, 75 bp, synthetic construct
  source 1..75: mol_type = other DNA
atggcggttaaaggtgcttctgtctggcatctcgatggtgactccactgtcggcgcattaacgctggataacggg

SEQ ID NO: 596908 - DNA, 75 bp, synthetic construct
  source 1..75: mol_type = other DNA
tatcgccattgctacttctattaatagcggcggtcgccagtatgtcagaatcggcggcagtgccacggacaccgt

SEQ ID NO: 596909 - DNA, 75 bp, synthetic construct
  source 1..75: mol_type = other DNA
aatatgctgctggagaacgatggctacctgacggtttacagtggtcatcaggccagcgatacaaccgttggcagc

SEQ ID NO: 596910 - DNA, 75 bp, synthetic construct
  source 1..75: mol_type = other DNA
cgctgcgcgagaaaatcagcgcgctggatgaaaaattactggcgttactggcagagcggcgtgaactggctgtcg

SEQ ID NO: 596911 - DNA, 75 bp, synthetic construct
  source 1..75: mol_type = other DNA
gtgcactggttgaagcgttgctggtactgcgcaatcacagtctgattatgacccgtctggaatcacgcccgattc

SEQ ID NO: 596912 - DNA, 75 bp, synthetic construct
  source 1..75: mol_type = other DNA
cgacgtttacgatctgctgcaacataccagcttgtcgattgttggcgagatgacgttaactatcgaccattgttt

SEQ ID NO: 596913 - DNA, 75 bp, synthetic construct
  source 1..75: mol_type = other DNA
acagtggtaagattgtaagtgatgagataactctttcaattacaaacaacggacatttgcatttccttaacaaca

SEQ ID NO: 596914 - DNA, 75 bp, synthetic construct
  source 1..75: mol_type = other DNA
ccaggttccggcgaaaacgacgttgttaatggcgaccggacaacaagctggtgcgctggttgaagcgttgctggt

SEQ ID NO: 596915 - DNA, 75 bp, synthetic construct
  source 1..75: mol_type = other DNA
gtgcactggtagaagcattgctggtactgcgtaaccataatctgattatgacccgtctggaatcacgcccgattc

SEQ ID NO: 596916 - DNA, 75 bp, synthetic construct
  source 1..75: mol_type = other DNA
actgatgcagcagaacaggcagttgagcaggcagaggagccgaaagaagagaaaaaaccagccaagaaaggcaaa

SEQ ID NO: 596917 - DNA, 75 bp, synthetic construct
  source 1..75: mol_type = other DNA
tcgatgcctgcccggacaacttgttgcgcctgtcatttaacgttgattttacccaccgtcagggctgggccagag

SEQ ID NO: 596918 - DNA, 75 bp, synthetic construct
  source 1..75: mol_type = other DNA
ggtcagttatccattgaagaacaagaaaatccacagcactggcaaacccggctgagcgatatttgctccggctta

SEQ ID NO: 596919 - DNA, 75 bp, synthetic construct
  source 1..75: mol_type = other DNA
ataccgcagtgatgcgctggcggcagaagaaatattgacgctggcaaactggtgtctgttgaactattccgggct

SEQ ID NO: 596920 - DNA, 75 bp, synthetic construct
  source 1..75: mol_type = other DNA
atgtctgtaacacgtataagagtgaaagaacgcgacgctattattcagtcacttaagtcaggtgtaacgccaagg

SEQ ID NO: 596921 - DNA, 75 bp, synthetic construct
  source 1..75: mol_type = other DNA
tgacaatcagcgccgatttatccccggacaggcgcatccacgcgacgggtgggcaggcgcgtaacctctactccg

SEQ ID NO: 596922 - DNA, 75 bp, synthetic construct
  source 1..75: mol_type = other DNA
gtatcaggatattgagcgtatcgctgatggcggcgcaggattccggctgattattggggaatatggctcaggtaa

SEQ ID NO: 596923 - DNA, 75 bp, synthetic construct
  source 1..75: mol_type = other DNA
tcacttttgcaggccatgaagatatcagcgtactggttcgcacgtcgcaaatccctgaaatgactcgagagaatg

SEQ ID NO: 596924 - DNA, 75 bp, synthetic construct
  source 1..75: mol_type = other DNA
caaatcttccggggttaacgctgtaacaaaagctgctacaacaattgaaatgttggactgcaaaatctacagtga

SEQ ID NO: 596925 - DNA, 75 bp, synthetic construct
  source 1..75: mol_type = other DNA
agagcgtaatggttaccagattgacctgccactgtccgttttcgacccgcagtattaccaaccgctgcaagtcac

SEQ ID NO: 596926 - DNA, 75 bp, synthetic construct
  source 1..75: mol_type = other DNA
tgccaactgccatatccgactgcatcagcaagcgctgccggatggcgcacatattttgattaatgacttccgtat

SEQ ID NO: 596927 - DNA, 75 bp, synthetic construct
  source 1..75: mol_type = other DNA
gatgtagataagctgggcgctcttgaggagcgtcgtaaagtattgcaggtcaaaacggaaaacctgcaagcggag

SEQ ID NO: 596928 - DNA, 75 bp, synthetic construct
  source 1..75: mol_type = other DNA
ttttatttccggttccatgaaacgttttgatggtaaacctgttggtcctttacttcctggaaaggagaaactgta

SEQ ID NO: 596929 - DNA, 75 bp, synthetic construct
  source 1..75: mol_type = other DNA
ttatatattggtcgtcatctgacgaaaaaatctgtggcgtcaatattatcgactggcgagaaatgcgtgtccgcg

SEQ ID NO: 596930 - DNA, 75 bp, synthetic construct
  source 1..75: mol_type = other DNA
caggtcaacggcaacaggattatcgccgatgtgggccacgacctgctgataagcagccagcaggacaccagtaag

SEQ ID NO: 596931 - DNA, 75 bp, synthetic construct
  source 1..75: mol_type = other DNA
cgcgaatgatattctgttgagtggcgccgcaaacacacaaaaaacaacgggcaggaacagcagcagtggcggtgg

SEQ ID NO: 596932 - DNA, 75 bp, synthetic construct
  source 1..75: mol_type = other DNA
ctacgttccacgttttaagcgatgttggcgtcgtggcgaccactgatccaagccatccggcgaacgagacttatg

SEQ ID NO: 596933 - DNA, 75 bp, synthetic construct
  source 1..75: mol_type = other DNA
ctcacaaggatcagtgagtggcactatacaagcgatggttcaactctttctgttgtgacatttacagagccattg

SEQ ID NO: 596934 - DNA, 75 bp, synthetic construct
  source 1..75: mol_type = other DNA
tcaacggtaaactcgctgctgtgcgtatggatgagttcaagtatcacgtcctgattcagcaaccttacgcttata

SEQ ID NO: 596935 - DNA, 75 bp, synthetic construct
  source 1..75: mol_type = other DNA
ttggggctaagtaccataccgttttcagcacagtatcctgatggtagcgaaatgatgaagctggtgggttgggcg

SEQ ID NO: 596936 - DNA, 75 bp, synthetic construct
  source 1..75: mol_type = other DNA
cccaaacgcatattatcgaccgccgtcagcgtcaccggaaccctgctggcgattgatgcgccgcttgtcgccagc

SEQ ID NO: 596937 - DNA, 75 bp, synthetic construct
  source 1..75: mol_type = other DNA
gccacagcggtaaatggtcagttctttggtcagtggcaggacatcgctaaagtcaaaaaggtcgggaaggtgtgg

SEQ ID NO: 596938 - DNA, 75 bp, synthetic construct
  source 1..75: mol_type = other DNA
aaaaagtcatggtgcagccaatcagcgagcttttgcggtcgcgattgaacaggctgtgcaggcggtgcagcgaca

SEQ ID NO: 596939 - DNA, 75 bp, synthetic construct
  source 1..75: mol_type = other DNA
tggatagtggggttgcctccgcgccgttcgtggatgccgtgaacaattacatcaatacgcaaggccatcacggac

SEQ ID NO: 596940 - DNA, 75 bp, synthetic construct
  source 1..75: mol_type = other DNA
atgtttatcccgtcgatgggcgtgtcgatgttcgcgggatacagaagatgtggattggcaacgcaaaaccctcca

SEQ ID NO: 596941 - DNA, 75 bp, synthetic construct
  source 1..75: mol_type = other DNA
tcagtttgatgcggtgggcaggcttaaggcacagacagatacggcaggcaggacaacagagtacagcccggatgt

SEQ ID NO: 596942 - DNA, 75 bp, synthetic construct
  source 1..75: mol_type = other DNA
cagttggtgaggtctggggagtaggacgcagactgacggaaaagctgaatgcgctgggtattaacacagcactgc

SEQ ID NO: 596943 - DNA, 75 bp, synthetic construct
  source 1..75: mol_type = other DNA
tggagcactgcatggacctggaggacttcggccggcagctgcgacagcacgtgtatgactgtacccgtctgacca

SEQ ID NO: 596944 - DNA, 75 bp, synthetic construct
  source 1..75: mol_type = other DNA
acgaaagatacccggaaaaaatatacgcgttctccagcaactatgaactttatgcatccatgtcggcgcgcgtga

SEQ ID NO: 596945 - DNA, 75 bp, synthetic construct
  source 1..75: mol_type = other DNA
gccccccaaacagcagatagtctgcagcaggaactttggggaacgtgtcacaacttatgaagccatgcgacaggc

SEQ ID NO: 596946 - DNA, 75 bp, synthetic construct
  source 1..75: mol_type = other DNA
gccacgcgtggagcagtacagtattgacgagatgtttctggatatccgcggaatagaccgctgcatcgattatga

SEQ ID NO: 596947 - DNA, 75 bp, synthetic construct
  source 1..75: mol_type = other DNA
gcttctatgccagctgtgaacgtgttttccgcccggatttgaaaggaaagccgatagtcgtcctgagcaacaacg

SEQ ID NO: 596948 - DNA, 75 bp, synthetic construct
  source 1..75: mol_type = other DNA
tcagtggggtgctggcgctgtcgcccgaaaatccacgcagaacggcaaaattactcagcctgcagccggtggaag

SEQ ID NO: 596949 - DNA, 75 bp, synthetic construct
  source 1..75: mol_type = other DNA
gtcgttacctatgatgttgccaataattcctatgccagcagttttgccagtttctcagatgccagtaacacgatg

SEQ ID NO: 596950 - DNA, 75 bp, synthetic construct
  source 1..75: mol_type = other DNA
atcctgcgtccgggcgaggagaaaaagctgcgtcgctctctcaataaagaaaccacggcactggggatccttgct

SEQ ID NO: 596951 - DNA, 75 bp, synthetic construct
  source 1..75: mol_type = other DNA
ggacacccgggacatcattgcggccgccacaacggctctggagcgtatctggaaggacgggcaccggtatgccaa

SEQ ID NO: 596952 - DNA, 75 bp, synthetic construct
  source 1..75: mol_type = other DNA
ccggtctggggaaagtatggtttgcgggacgaggtatcgcacctgagtggcaaatgaaacgggagatgctttcac

SEQ ID NO: 596953 - DNA, 75 bp, synthetic construct
  source 1..75: mol_type = other DNA
aaggtgctcgacggcatcaaccattccggcctggggaaagtctggtttgcggggcggggaattgctgacctgctc

SEQ ID NO: 596954 - DNA, 75 bp, synthetic construct
  source 1..75: mol_type = other DNA
aaaggcaggctgtatgctgaacgatttcgctcctgacggggtttcgctgttgaacctgttcgatgatactcagct

SEQ ID NO: 596955 - DNA, 75 bp, synthetic construct
  source 1..75: mol_type = other DNA
tgtgctttaccagtgatgcacgtcgagcgtgggactggcgaaacgggctcaaagttgtggtcgtattgactgtgg

SEQ ID NO: 596956 - DNA, 75 bp, synthetic construct
  source 1..75: mol_type = other DNA
acaccaaccgggatatgtctttacgcaacatgctcgtccccgctcttttgttctacgtgatgatgacggccatgt

SEQ ID NO: 596957 - DNA, 75 bp, synthetic construct
  source 1..75: mol_type = other DNA
agatagacacaagttaccagtttgatatattgaatgataatcaaactattctcagtgatgcttataacgagacaa

SEQ ID NO: 596958 - DNA, 75 bp, synthetic construct
  source 1..75: mol_type = other DNA
ccggtggcgtaggtatcggcggcgtgctggagccattgcaggcgaacccgaccattattgaagataactgcttca

SEQ ID NO: 596959 - DNA, 75 bp, synthetic construct
  source 1..75: mol_type = other DNA
gtgaattcactctataccgctgaaggtgtaatggataaacactcgctggataaacactcgctgtggcagcgttat

SEQ ID NO: 596960 - DNA, 75 bp, synthetic construct
  source 1..75: mol_type = other DNA
tgcgaatctgaaaggtgagcttaaatctgatacagctcacctgaaagagcagctcaaatcagacattaacagcct

SEQ ID NO: 596961 - DNA, 75 bp, synthetic construct
  source 1..75: mol_type = other DNA
ggcaaattcttccgtaacgtccagcttgatcctgcggctaacttaggcatcgtaaaagtcgacagcgacggcgcg

SEQ ID NO: 596962 - DNA, 75 bp, synthetic construct
  source 1..75: mol_type = other DNA
cacaacgagggtaagctgaccgatgctgatatcagcgcggccgcaaaagccgtgaagttcgatgcgaaaacagcc

SEQ ID NO: 596963 - DNA, 75 bp, synthetic construct
  source 1..75: mol_type = other DNA
gcttctatgcctcctgcgagaaagtttttcgacctgacctgcgggacaggcccgttgttgtactgagcaacaatg

SEQ ID NO: 596964 - DNA, 75 bp, synthetic construct
  source 1..75: mol_type = other DNA
cactggcttaatatttacccatacaagtaccaatgcagagctgagcggcagctattatggcgatactaaaagcta

SEQ ID NO: 596965 - DNA, 75 bp, synthetic construct
  source 1..75: mol_type = other DNA
taactttactcgcacttagcgccactgccgtctcacacgctgaagaaacgcgctatgtttctgatgaactgaata

SEQ ID NO: 596966 - DNA, 75 bp, synthetic construct
  source 1..75: mol_type = other DNA
tcgcatcaggcattgattgccggatgcggcatgagtgccttatccggcctacagatcgtacatccggcaacaggc

SEQ ID NO: 596967 - DNA, 75 bp, synthetic construct
  source 1..75: mol_type = other DNA
tctgcttatccgcagtgggcagaatatttatttaaatggcgttcaccttacggcgaatgcagactcatttgagat

SEQ ID NO: 596968 - DNA, 75 bp, synthetic construct
  source 1..75: mol_type = other DNA
gatcagtatctcaacagaggcggacatgctgtcagacaggtttatggggcgattcagccttattacaccgtggcg

SEQ ID NO: 596969 - DNA, 75 bp, synthetic construct
  source 1..75: mol_type = other DNA
tacaaatttatgacagaagcgcaggcattgttacatggcgaccttcattcaggctcaatcatggtgaccgacacg

SEQ ID NO: 596970 - DNA, 75 bp, synthetic construct
  source 1..75: mol_type = other DNA
aaaagcaatgaagcaaatcctcggcgagcaatcgcagtttatcgccatcgattttccggaaacctcaagcaccgc

SEQ ID NO: 596971 - DNA, 75 bp, synthetic construct
  source 1..75: mol_type = other DNA
atgtctgatggtaaaacaaagggcggaacaaccgcttcacgagcgggggccctacagtcctctgttaatatcctg

SEQ ID NO: 596972 - DNA, 75 bp, synthetic construct
  source 1..75: mol_type = other DNA
atcatcagcatgcctcaggtcattgcccgggccggtctggcaacccgggatgcggagcgtgataatccctgggcg

SEQ ID NO: 596973 - DNA, 75 bp, synthetic construct
  source 1..75: mol_type = other DNA
aagaagtccgggccggcgcattgcactcctcgctgtccattctgttacacacccattatgccatccgcctgtggg

SEQ ID NO: 596974 - DNA, 75 bp, synthetic construct
  source 1..75: mol_type = other DNA
tcagtggaaacgactcgtaagaacgcttcgtcagtgggacaacttctgggttcatgcggccagaaaaagacatct

SEQ ID NO: 596975 - DNA, 75 bp, synthetic construct
  source 1..75: mol_type = other DNA
aaagatgaaaaacagttgcgtcaggtgctggcgttcgtcgcccaggatatgcgttcacagattaatgcctgcttt

SEQ ID NO: 596976 - DNA, 75 bp, synthetic construct
  source 1..75: mol_type = other DNA
agaaatacgctaaagctcgtcagttatttttagactctgatttttgcgataataataataaaccatttatttggg

SEQ ID NO: 596977 - DNA, 75 bp, synthetic construct
  source 1..75: mol_type = other DNA
atgagtcagcgcggtttcacaatactggagatgatgctgatccttttgttgatgggcatcactgcagggctggta

SEQ ID NO: 596978 - DNA, 75 bp, synthetic construct
  source 1..75: mol_type = other DNA
cttattgaagcgtgcaaacaatccgaaggtgcacagattgaagctgatgaattgtctgatctgattatcgtgatc

SEQ ID NO: 596979 - DNA, 75 bp, synthetic construct
  source 1..75: mol_type = other DNA
accagacgaaaaacgtcaaaaaatcaccatccataacccgcatagccacccgggggattattaacatttttgttc

SEQ ID NO: 596980 - DNA, 75 bp, synthetic construct
  source 1..75: mol_type = other DNA
atgccgcaggcgataaaacgtgccggggggatttaccgggattcactggcggataatccctatgccgatgaagcg

SEQ ID NO: 596981 - DNA, 75 bp, synthetic construct
  source 1..75: mol_type = other DNA
ccgggagtgcagctttgcattacctgccaggaaatagcagagctgaaaggcaaacattacaacggaggtgctgta

SEQ ID NO: 596982 - DNA, 75 bp, synthetic construct
  source 1..75: mol_type = other DNA
atggccgacgcaatggattttgcacaacagcgtgagcaggaagaccgcgagcgccacatcaacaacgcgcgcagc

SEQ ID NO: 596983 - DNA, 75 bp, synthetic construct
  source 1..75: mol_type = other DNA
agcagcgcgttgaagaagaacgccagcgccatatccgtgctgcccgtgccagaacgccgggcgtgtctcgtgtgc

SEQ ID NO: 596984 - DNA, 75 bp, synthetic construct
  source 1..75: mol_type = other DNA
tgataactcatttaatggcggcaaacaacatgtttactttatccgccaattacggtcaaagagcgtgcaaattat

SEQ ID NO: 596985 - DNA, 75 bp, synthetic construct
  source 1..75: mol_type = other DNA
atgacggcgaatttattcctgccccgcgcaatgaggcgacaaaatgaagggtcaaataatcaagttgcactcatc

SEQ ID NO: 596986 - DNA, 75 bp, synthetic construct
  source 1..75: mol_type = other DNA
tccgccagcacgacgccgcgccattccgggagtgcagttttgcattacctgtcaggaaatcgcagaactgaaagg

SEQ ID NO: 596987 - DNA, 75 bp, synthetic construct
  source 1..75: mol_type = other DNA
gaccttaatggcgctgggtatgttgccaaaagcgcatccgctgtcgctgggtatgctggggatgcacggcgtgcg

SEQ ID NO: 596988 - DNA, 75 bp, synthetic construct
  source 1..75: mol_type = other DNA
gtatgacgaactggtcatgaaagcgtttcatgcttttcactacgggctgatttcgcgggtgcagcggaacagcat

SEQ ID NO: 596989 - DNA, 75 bp, synthetic construct
  source 1..75: mol_type = other DNA
cctgatgctgagattatggatgggcagttgcgatcatcattttctcctccgctgaagaaaaagaagaataaatag

SEQ ID NO: 596990 - DNA, 75 bp, synthetic construct
  source 1..75: mol_type = other DNA
gcggaaattgctttcgatgatgacatagatttttatctcaagaatggttatctttctactgaaagcaatattcga

SEQ ID NO: 596991 - DNA, 75 bp, synthetic construct
  source 1..75: mol_type = other DNA
cagggcattaagattgtgacgggcattccgggcggttctatcctgcctgtttacgatgccttaagccaaagcacg

SEQ ID NO: 596992 - DNA, 75 bp, synthetic construct
  source 1..75: mol_type = other DNA
tccgccagcacgacgccgcgccattccgggtgtgcagctttgcattacctgtcaggaaatcgcagagctgaaagg

SEQ ID NO: 596993 - DNA, 75 bp, synthetic construct
  source 1..75: mol_type = other DNA
agagtagtggaagaaaaaggtgtttcagaagtaatagaaaatttagatggtgttttctgtatcctaatttatcat

SEQ ID NO: 596994 - DNA, 75 bp, synthetic construct
  source 1..75: mol_type = other DNA
atttctgatatcaaatttttgaatccagatatgacattcagtctaaatataaaaatggcagaacattatctgtca

SEQ ID NO: 596995 - DNA, 75 bp, synthetic construct
  source 1..75: mol_type = other DNA
gatccgcaatggtctggcgtttaatcagtttgaagtatttaacgatgagcttggtaagccacggctgcgactgtg

SEQ ID NO: 596996 - DNA, 75 bp, synthetic construct
  source 1..75: mol_type = other DNA
gacaaattccccggtgaaaatggaagacgagcaacgagaagccctttcactatggttggctgaacagaaagatgt

SEQ ID NO: 596997 - DNA, 75 bp, synthetic construct
  source 1..75: mol_type = other DNA
taaaaacgggctgcagcgtaaagtcctcgacaaggaaaatctggcgtgggatgaggatctaacaaagcactgtct

SEQ ID NO: 596998 - DNA, 75 bp, synthetic construct
  source 1..75: mol_type = other DNA
tggcgacatgccaaaggatatgcagggattttatctcactgttaagcagcttaccgattctggcatggcgtccga

SEQ ID NO: 596999 - DNA, 75 bp, synthetic construct
  source 1..75: mol_type = other DNA
gtcggcatggggatgtcggcttgatgagccggaacataatatttaccagaaacagggaaaaggcgtggtgtacct

SEQ ID NO: 597000 - DNA, 75 bp, synthetic construct
  source 1..75: mol_type = other DNA
ttgtttgttggcttttttagttccgtcagcgtggggatgctcgctcggtgagcctgatcataatatttaccagaa

SEQ ID NO: 597001 - DNA, 75 bp, synthetic construct
  source 1..75: mol_type = other DNA
aaagaaccgccgttaaacgaccttaccaccgattatattgatcagggcgcatgggcctggtatccaaattatgct

SEQ ID NO: 597002 - DNA, 75 bp, synthetic construct
  source 1..75: mol_type = other DNA
cgagtcttccgggccgcttatcctgatggattatcgtgttcccgatgagcatgaggctcaccttggcgatagccc

SEQ ID NO: 597003 - DNA, 75 bp, synthetic construct
  source 1..75: mol_type = other DNA
atgctctatcgcaatgtggtttgtttgttgtcttgttcgttgtttttatcgtcggcatggggatgtcggcttgat

SEQ ID NO: 597004 - DNA, 75 bp, synthetic construct
  source 1..75: mol_type = other DNA
tagcccgtacacggaccaaaatcataatcaatggcgaacagcttacagccgacccagagacatttactgtcgtgc

SEQ ID NO: 597005 - DNA, 75 bp, synthetic construct
  source 1..75: mol_type = other DNA
atggcggttgaaattaaatacgtagtcattcgtgagggcgaagagaagatgtcgtttaccagcaaaaaggaagcc

SEQ ID NO: 597006 - DNA, 75 bp, synthetic construct
  source 1..75: mol_type = other DNA
agattggcgcagtgctggaagtcggtgaatcgcgagtcagtcagttacatagccaggcgattaaacggttacgca

SEQ ID NO: 597007 - DNA, 75 bp, synthetic construct
  source 1..75: mol_type = other DNA
acttttctcttatgatgagtggcgcgaagagcacggtgatagcattgaactggttactgacgatcatcagcggga

SEQ ID NO: 597008 - DNA, 75 bp, synthetic construct
  source 1..75: mol_type = other DNA
gtgaattcactctataccgctgaaggtgtaatggataaatactcgctgtggcagcgttatgtcccgctggtgcgt

SEQ ID NO: 597009 - DNA, 75 bp, synthetic construct
  source 1..75: mol_type = other DNA
gctggcaggccgtggtggaacgctggttagcatttctggtgacacaacggcgactgaagcccgctgctgaaggtt

SEQ ID NO: 597010 - DNA, 75 bp, synthetic construct
  source 1..75: mol_type = other DNA
atttttgacgctcccggacgagcgctggtatcgcaccggcgatctcggctgctactggccagatggcacaatcga

SEQ ID NO: 597011 - DNA, 75 bp, synthetic construct
  source 1..75: mol_type = other DNA
caatgcgcagagcgctcaccgcgcgtatgccctgagcactctcagccacacattgcggcggacgagagcaccgtc

SEQ ID NO: 597012 - DNA, 75 bp, synthetic construct
  source 1..75: mol_type = other DNA
accgcagtcagcagccagagtaccgcactgcctccccgtccgctccttcaggccacacagctgcccgcactggtt

SEQ ID NO: 597013 - DNA, 75 bp, synthetic construct
  source 1..75: mol_type = other DNA
cccgacaacaacagcgacgcccacaaccgcagtcagcagccagagtaccgcactgcctccccgtccgctccttca

SEQ ID NO: 597014 - DNA, 75 bp, synthetic construct
  source 1..75: mol_type = other DNA
cacaccgatgtctgcactgattatgaccggtaaacccggtccgtcatccgtcgtttatttacgtgaagcacgtca

SEQ ID NO: 597015 - DNA, 75 bp, synthetic construct
  source 1..75: mol_type = other DNA
acacattatggtcgtagagcgcgattatccggcgacttacgaacgctttacctctatcggcccgctgatggagaa

SEQ ID NO: 597016 - DNA, 75 bp, synthetic construct
  source 1..75: mol_type = other DNA
ttctcaatgggcagagcaaagcacgttacggtaaatcccatgaaatcgccgtgaaactggggctgaaatcaacag

SEQ ID NO: 597017 - DNA, 75 bp, synthetic construct
  source 1..75: mol_type = other DNA
ttcgcactctataccccggctgaaaaaccgctgtatgcccggaccagcacagcacaatgtctgctgcgggtgaca

SEQ ID NO: 597018 - DNA, 75 bp, synthetic construct
  source 1..75: mol_type = other DNA
gatttatctcatggaaatgtatcatttgctgagattgggaaaaatgtttcatatcaggatttagagaatatttca

SEQ ID NO: 597019 - DNA, 75 bp, synthetic construct
  source 1..75: mol_type = other DNA
gcccaaacgatccggtttctttagctgatgtccgtcaggcgggcgcaactggcgtggttaccgcgttgcaccata

SEQ ID NO: 597020 - DNA, 75 bp, synthetic construct
  source 1..75: mol_type = other DNA
gttttaaacaacaaaatcaaacacctttatattgtcgatgaaaaccttgcctcttttccttttttcaaggacaaa

SEQ ID NO: 597021 - DNA, 75 bp, synthetic construct
  source 1..75: mol_type = other DNA
gaatgtagagtactgaataataaaataaaacatctgaacatagtagattctggtttagaagttttccctcccttc

SEQ ID NO: 597022 - DNA, 75 bp, synthetic construct
  source 1..75: mol_type = other DNA
agcaatgcgggtgggatgcaggtcattacaggacggtagccgccgccggacaccttcgcttcaacgaggataatt

SEQ ID NO: 597023 - DNA, 75 bp, synthetic construct
  source 1..75: mol_type = other DNA
cgaagacaaagcgcgtctgacccgtaacatcattgccggtctgccaggtgcggaagaagggtataccctcgacca

SEQ ID NO: 597024 - DNA, 75 bp, synthetic construct
  source 1..75: mol_type = other DNA
gttccgtaaacacctggagctgtacaaagatatcgacaaagcgaagctgcgcgaaaactttgccgtcttcctgaa

SEQ ID NO: 597025 - DNA, 75 bp, synthetic construct
  source 1..75: mol_type = other DNA
tatctgacgggaagcgtattgactggaggtctggtgctctctctggcttcaattgcttcgaaaagtattattcct

SEQ ID NO: 597026 - DNA, 75 bp, synthetic construct
  source 1..75: mol_type = other DNA
cgaagacaaagcgcgtctgacccgtaacatcattgccggtctgccgggcgcggaagaagggtacaccctcgacca

SEQ ID NO: 597027 - DNA, 75 bp, synthetic construct
  source 1..75: mol_type = other DNA
cagcggcttatttgaaagcggcattgcgagtagcaccattggataacagcatgaaagagaaaaaagaattgtatg

SEQ ID NO: 597028 - DNA, 75 bp, synthetic construct
  source 1..75: mol_type = other DNA
tatctcaaaaagaaaataaaaatttaaatgaagttaaaacgccttacaaatgggatacaatcaaaagtaaattcc

SEQ ID NO: 597029 - DNA, 75 bp, synthetic construct
  source 1..75: mol_type = other DNA
ttcgggagtgattcttctgggtatcgcattggtattcacattcaatgcacttgtggcaatgatgcagtttattgc

SEQ ID NO: 597030 - DNA, 75 bp, synthetic construct
  source 1..75: mol_type = other DNA
attgtcctggggatcggtattcctggtatatcggcaacatggtttgttccagcaaacgcttttatattttctctt

SEQ ID NO: 597031 - DNA, 75 bp, synthetic construct
  source 1..75: mol_type = other DNA
cattttgtcgctggctggcaaatggttttctgttcaaacgcgacgatcggcaacaaaaagatctctacattgaat

SEQ ID NO: 597032 - DNA, 75 bp, synthetic construct
  source 1..75: mol_type = other DNA
ggcctttccatggcgtcttcggcagcggtccgacgctggacgaagcgtttggcctgatcgataccgcagaaaaat

SEQ ID NO: 597033 - DNA, 75 bp, synthetic construct
  source 1..75: mol_type = other DNA
ccacgccaccaacctgatcgccctcacctatgtactggaaaacgacaccgcggtctttactcgccaactgtggga

SEQ ID NO: 597034 - DNA, 75 bp, synthetic construct
  source 1..75: mol_type = other DNA
tacgccgtttattgtcaccggctccggcaaattcttccgtaacgtccagcttgatcctgcagctaacttaggcgt

SEQ ID NO: 597035 - DNA, 75 bp, synthetic construct
  source 1..75: mol_type = other DNA
ctaaagacgcatttggaatgcgcggtaaaaacgagtttagtaaaaataataaagaacgcggaagcaacgaaaaaa

SEQ ID NO: 597036 - DNA, 75 bp, synthetic construct
  source 1..75: mol_type = other DNA
gccagcccatgcctttactggcaaatacaccgtttattgtcaccggctccggcaaattcttccgcaacgtccagc

SEQ ID NO: 597037 - DNA, 75 bp, synthetic construct
  source 1..75: mol_type = other DNA
tcgatcccgccgcaaatttaggcgtcgtgaaggtcgacagcgacggtgcgggctaccatattctctgggggctaa

SEQ ID NO: 597038 - DNA, 75 bp, synthetic construct
  source 1..75: mol_type = other DNA
gcacgaattaacaagatcaaacttccggcaacgaagatccagttattacaaaaattactggaaaaagcgatcagc

SEQ ID NO: 597039 - DNA, 75 bp, synthetic construct
  source 1..75: mol_type = other DNA
ctttatgatttactgggcacaaaagaatatcgtaaagagctggataagcagttcaaaaacgctaaatcgaatttc

SEQ ID NO: 597040 - DNA, 75 bp, synthetic construct
  source 1..75: mol_type = other DNA
tgtaaacgctatcgccgggatattccgcaactgtttatctacaacgcgctctgcattattagcgatggcgtaaat

SEQ ID NO: 597041 - DNA, 75 bp, synthetic construct
  source 1..75: mol_type = other DNA
caccgatgcctggctgaaaggctgggacgagcgcaacggcggcaacctgacgctgcgcctggatgacgccgatat

SEQ ID NO: 597042 - DNA, 75 bp, synthetic construct
  source 1..75: mol_type = other DNA
agtggtcgcccaggaccagtagtcgttgatttaccgaaagatattcttaatccggcgaacaaattaccctatgtc

SEQ ID NO: 597043 - DNA, 75 bp, synthetic construct
  source 1..75: mol_type = other DNA
atgggcaaattaggtgaaaacgttccgcttcttatcgataaagccgtagatttcatggcatcgagccaggcgttc

SEQ ID NO: 597044 - DNA, 75 bp, synthetic construct
  source 1..75: mol_type = other DNA
ctaatattgaataatccgggactagcattagatataacaatgatagcttctcgtggaaatgttgcagacacaggg

SEQ ID NO: 597045 - DNA, 75 bp, synthetic construct
  source 1..75: mol_type = other DNA
gtgacgtccggccatccggtcaatccgctgctcggtgcaaaggtccttcccggtgaaaccgacatcgccctgccc

SEQ ID NO: 597046 - DNA, 75 bp, synthetic construct
  source 1..75: mol_type = other DNA
caccgactgttccggttatgtaacccgttatgaccatgaccgttttggtcaggtgacggcggtgcaccgcgagga

SEQ ID NO: 597047 - DNA, 75 bp, synthetic construct
  source 1..75: mol_type = other DNA
tgaactgaccgtcacgcaggtacccgacgaacagcgtatcgatttctggcctcagcactttggcactatcccgca

SEQ ID NO: 597048 - DNA, 75 bp, synthetic construct
  source 1..75: mol_type = other DNA
ccatgcctgccgtacagaatgtgacgcgatgaccgcacactattaccgcctgcgggagtatgccatgcaacatcc

SEQ ID NO: 597049 - DNA, 75 bp, synthetic construct
  source 1..75: mol_type = other DNA
cgtatcgcccgtgacgcgcactatctttaccggtatgaccgtcacggcaggctgacagagaaaaccgacctcatc

SEQ ID NO: 597050 - DNA, 75 bp, synthetic construct
  source 1..75: mol_type = other DNA
agaaacgctcgctgaggctggggggctggacgttctgggtgtgggcgatctgaatacccgtatccgtgcgaccgt

SEQ ID NO: 597051 - DNA, 75 bp, synthetic construct
  source 1..75: mol_type = other DNA
cccgcctgaacgtgccggaacgcctgtggcacctggcaccatcgaccttctccggcggcgaacagcagcgcgtca

SEQ ID NO: 597052 - DNA, 75 bp, synthetic construct
  source 1..75: mol_type = other DNA
gaagccaaaacccgtggcgcagccatcgtaggcatcttccatgacgaagctgtacgtaatgacgtcgccgaccgc

SEQ ID NO: 597053 - DNA, 75 bp, synthetic construct
  source 1..75: mol_type = other DNA
ccgccaccgctattatgacccgctgcaggggcgatatatcactcaggatccgattggactgaaggggggatggaa

SEQ ID NO: 597054 - DNA, 75 bp, synthetic construct
  source 1..75: mol_type = other DNA
gtgtgacggtatgactggacactattatcgcttacgcgactacgcgctaaaccatccggaatgcagcgccattat

SEQ ID NO: 597055 - DNA, 75 bp, synthetic construct
  source 1..75: mol_type = other DNA
cggctgtgtgccgattaccgcggtggtatctggcgcttttcgacgctcagcaacggcggcgcttttatggctccg

SEQ ID NO: 597056 - DNA, 75 bp, synthetic construct
  source 1..75: mol_type = other DNA
cattgttcaacagcatgaacggcaatggcgcagagcttaccagtgaagctgcagggatggtcgcctgtctgatgg

SEQ ID NO: 597057 - DNA, 75 bp, synthetic construct
  source 1..75: mol_type = other DNA
tgccggtatcaacgccgacggcatgtattgccctgaatgcggtacggttcactggccggatggcgttattccgcc

SEQ ID NO: 597058 - DNA, 75 bp, synthetic construct
  source 1..75: mol_type = other DNA
aaaaagcatctgcaaaaagctctgctgcttggcctggtgaccggtaaagaagaaccggcggaaatcgtcaatacc

SEQ ID NO: 597059 - DNA, 75 bp, synthetic construct
  source 1..75: mol_type = other DNA
accctatgcctcacccagaaaggtgtcgggagaaccgaagggaaaagtaccggtcgaacgctgacgacctctcct

SEQ ID NO: 597060 - DNA, 75 bp, synthetic construct
  source 1..75: mol_type = other DNA
gaaaaatgccactgaaacgcaatggcttaaagattccccctcacagccattgcaacagtcactgaaagaccttga

SEQ ID NO: 597061 - DNA, 75 bp, synthetic construct
  source 1..75: mol_type = other DNA
cgcagggcgttaagctcgatcaggaaaacagccgtatttttctgccgaaactgggctggatgcgctaccggaata

SEQ ID NO: 597062 - DNA, 75 bp, synthetic construct
  source 1..75: mol_type = other DNA
aacgtaaatccacctctcaaagaagcaaacttccccgctatgtcgtgaagcttcacgaagatgatttttttgacg

SEQ ID NO: 597063 - DNA, 75 bp, synthetic construct
  source 1..75: mol_type = other DNA
gaaacgaaaatcgccgcccatctggcgggcgttggcattggttttttgccaaaatcactttgccagtcaatgatc

SEQ ID NO: 597064 - DNA, 75 bp, synthetic construct
  source 1..75: mol_type = other DNA
gaataccggagtggcgctgtttttccgcacgactcgcagcgtgacgttgacagcggctggcgagcatctactttc

SEQ ID NO: 597065 - DNA, 75 bp, synthetic construct
  source 1..75: mol_type = other DNA
atgacggttcattattaccgtctgcgggattacgccctgcaacatccggaatacgacgccattatgcgcatcatt

SEQ ID NO: 597066 - DNA, 75 bp, synthetic construct
  source 1..75: mol_type = other DNA
agtctttttattctggcatatggatgttattttcttcttttcattcctccgctctggctatatctgagaaccaga

SEQ ID NO: 597067 - DNA, 75 bp, synthetic construct
  source 1..75: mol_type = other DNA
agttctgcgctttgataattttgacgatgccgttgagtgctgcgctgacctgggtattccgttctttctggatgc

SEQ ID NO: 597068 - DNA, 75 bp, synthetic construct
  source 1..75: mol_type = other DNA
ctggaaagtatgcccagcgagttacaacaggtgaatgatggcgtggaacgccaggtgaatatcgtcatcaacaac

SEQ ID NO: 597069 - DNA, 75 bp, synthetic construct
  source 1..75: mol_type = other DNA
ggtttctcatcacagtaacaacgccggtggcagtaccagcagtaactaccatcatggtagcagcgcgcagaatac

SEQ ID NO: 597070 - DNA, 75 bp, synthetic construct
  source 1..75: mol_type = other DNA
cgaaaatccgccacaacttcccacaggccattgctgtagagatggaagcgacggcaatcgcccatgtctgccaca

SEQ ID NO: 597071 - DNA, 75 bp, synthetic construct
  source 1..75: mol_type = other DNA
cacgcacgcactatcaaaccgttactgcgctgctgtcttcagctatctcgccgaagatctggcagaactgcaaag

SEQ ID NO: 597072 - DNA, 75 bp, synthetic construct
  source 1..75: mol_type = other DNA
atgctgggcattaataattctcccattactctggctatatctgagaaccagagcgaaaaaaagaaagtccagcag

SEQ ID NO: 597073 - DNA, 75 bp, synthetic construct
  source 1..75: mol_type = other DNA
gcgcaaggtcagcttcttgctggtcaggctgaattgcagaaagcgcagaacgaacaggcagccattcaggttaaa

SEQ ID NO: 597074 - DNA, 75 bp, synthetic construct
  source 1..75: mol_type = other DNA
cgttcctgccgatggtcagtctgaaaaacaaaaacggagatattactgcgcaggctcaggtcagcagttatacac

SEQ ID NO: 597075 - DNA, 75 bp, synthetic construct
  source 1..75: mol_type = other DNA
tggaagaagaagttacgctgctgcgtgacaaaatcgaaaaccgtcaaactatcagtctcggcggttgcgaaatct

SEQ ID NO: 597076 - DNA, 75 bp, synthetic construct
  source 1..75: mol_type = other DNA
ggcgacccggcagagcagtggcagtatgatgagcacgggtggttaaccaccctcagccataccagtgaaggccac

SEQ ID NO: 597077 - DNA, 75 bp, synthetic construct
  source 1..75: mol_type = other DNA
acggatgcgacgggcagcacccggcagatgacgtggagccgctacgggcagttgctggcgttcactgactgctcg

SEQ ID NO: 597078 - DNA, 75 bp, synthetic construct
  source 1..75: mol_type = other DNA
cacacagcgttatcaccacgacctgaccggcaaacttatccgcagcgaggatgaggggctggtcacccactggta

SEQ ID NO: 597079 - DNA, 75 bp, synthetic construct
  source 1..75: mol_type = other DNA
cggccccggctggaaagcgccttctgatatccgcttacagctacgcgatgatgcactggtactcaacgacaacgg

SEQ ID NO: 597080 - DNA, 75 bp, synthetic construct
  source 1..75: mol_type = other DNA
atgcgtatccgctgaatccggtgaatggtattgatccattagggttaagtcctgcagatgtagcgttaatgcgaa

SEQ ID NO: 597081 - DNA, 75 bp, synthetic construct
  source 1..75: mol_type = other DNA
atcccgtatgcgaccgacccttcgggaaaccgcctgccggacccggagctgcacccggacagcacgctcacggcg

SEQ ID NO: 597082 - DNA, 75 bp, synthetic construct
  source 1..75: mol_type = other DNA
aggcacagggccatgcgcagcgcatggacatcagcagcatcctgcaaaaatcaactcagcaacaaccacagcagt

SEQ ID NO: 597083 - DNA, 75 bp, synthetic construct
  source 1..75: mol_type = other DNA
gttagtcaggccaatatgacgggggaagaactccccgctacgcttactccaggacaacaggtgatggtttcctgg

SEQ ID NO: 597084 - DNA, 75 bp, synthetic construct
  source 1..75: mol_type = other DNA
aagaactacccgccacgttcacgcctggtcaacaggtgatggtttcctggtcccgcgatgtgatggtgcctctgg

SEQ ID NO: 597085 - DNA, 75 bp, synthetic construct
  source 1..75: mol_type = other DNA
gcgataaaagatggtgagttcttttcaatgctggggccgtccggctccggcaaaaccacctgtctgcggctaatc

SEQ ID NO: 597086 - DNA, 75 bp, synthetic construct
  source 1..75: mol_type = other DNA
tgaatggggcaacctgctgaatgaagagaacccgcaccagctgcagcagctcatccgcctgccggggcagcagta

SEQ ID NO: 597087 - DNA, 75 bp, synthetic construct
  source 1..75: mol_type = other DNA
caagaccaacggggagaatcaaaaggagatggtctatgggggccaggtaaagcaagtaatgatacaaaagaagct

SEQ ID NO: 597088 - DNA, 75 bp, synthetic construct
  source 1..75: mol_type = other DNA
gaagccgggctgaagcgggtggtgaaaaaggaacacgcggacggcagcgtcacgcagagtcagtttgatgcggtg

SEQ ID NO: 597089 - DNA, 75 bp, synthetic construct
  source 1..75: mol_type = other DNA
cccgcgctgagcgtcttcacatccgcagcgaaatcaaccgcagacttttccgcgcaacacgcgtcgcgcaaatca

SEQ ID NO: 597090 - DNA, 75 bp, synthetic construct
  source 1..75: mol_type = other DNA
tttctcgtgatgacactggtactcagtatgactggtcaacgcctgacgccatctatgttggacgttactacgaag

SEQ ID NO: 597091 - DNA, 75 bp, synthetic construct
  source 1..75: mol_type = other DNA
gcctttctcgtgatgacactggcactcaatatgactggtcaacgccagatgccatctatgttggacgctactacg

SEQ ID NO: 597092 - DNA, 75 bp, synthetic construct
  source 1..75: mol_type = other DNA
gtgagtcaggccaatatgacaggcgaagaactgcccgccacgctcacgcccggacaacaggtgatggtttcctgg

SEQ ID NO: 597093 - DNA, 75 bp, synthetic construct
  source 1..75: mol_type = other DNA
ttggcatcacctttattttcgtcacccacgatcagggcgaggcattatcgatgtccgatcgtgttgcggtattca

SEQ ID NO: 597094 - DNA, 75 bp, synthetic construct
  source 1..75: mol_type = other DNA
atggcacgatccaggcggtgcagtatcagggcgcggcgacccgttttgaactgacactgagcggcggtgaaaaac

SEQ ID NO: 597095 - DNA, 75 bp, synthetic construct
  source 1..75: mol_type = other DNA
atccacatcgccgctataacccgctcaccgggcaatggattctggtttcaccgcaccgcgctaagcgcccctggc

SEQ ID NO: 597096 - DNA, 75 bp, synthetic construct
  source 1..75: mol_type = other DNA
atgacgcaatttaatcccgttgatcatccacatcgccgctataacccgctcaccgggcaatggattctggtttca

SEQ ID NO: 597097 - DNA, 75 bp, synthetic construct
  source 1..75: mol_type = other DNA
cgacagaaggtattgattatgggcactcgatggtcgtgtggccgtcaacaggactgatttcgggtggtgatgtga

SEQ ID NO: 597098 - DNA, 75 bp, synthetic construct
  source 1..75: mol_type = other DNA
aaccggtcgcccctgccgaaggtattgcccgcgccgttcaggccggtattccgctggcacgcgtcaccctcagct

SEQ ID NO: 597099 - DNA, 75 bp, synthetic construct
  source 1..75: mol_type = other DNA
ggaatcccgcgttggcggtttgctcggcggtaaacctggcgtcaccgtgttccacatgggcgacagcaaaaaggc

SEQ ID NO: 597100 - DNA, 75 bp, synthetic construct
  source 1..75: mol_type = other DNA
atggtgaattaccgtcttatatcactggcgctaacattggatgcagcaatctctacatccaatgtgaataaccat

SEQ ID NO: 597101 - DNA, 75 bp, synthetic construct
  source 1..75: mol_type = other DNA
gtgctggctacgagtgggtcattgagaacgtcgataaagacaataacgaagatcgtattgtctcgttctgtggtc

SEQ ID NO: 597102 - DNA, 75 bp, synthetic construct
  source 1..75: mol_type = other DNA
ctggggtgagcgactgctggatacctcaattcagatgttgcgcaacgtgccgcatctggcgctgatcccgctggt

SEQ ID NO: 597103 - DNA, 75 bp, synthetic construct
  source 1..75: mol_type = other DNA
ggggcaaatccaggcagcatctggcgatcagttcctggcgggcgctgattggcttttcaattggcggatcgctgg

SEQ ID NO: 597104 - DNA, 75 bp, synthetic construct
  source 1..75: mol_type = other DNA
ctacttcacaactgatgatggttataggatcatctcggcacgttttggtgtcccccgaacccaggtcaggacatg

SEQ ID NO: 597105 - DNA, 75 bp, synthetic construct
  source 1..75: mol_type = other DNA
ctagtatgctttgtatacgaccctgaaggttgggtgactaaccctaaaggtgtgatagacgatcttgaggggaaa

SEQ ID NO: 597106 - DNA, 75 bp, synthetic construct
  source 1..75: mol_type = other DNA
ctctgtactccagaaatttgaatatatccaccaaaaatggtgcaggcattgaaagctataactttgtgaccacag

SEQ ID NO: 597107 - DNA, 75 bp, synthetic construct
  source 1..75: mol_type = other DNA
aatcccgcgttggcggtttgctcggcggtaaacctggcgtcaccgtgttccacatgggcgacagtaaaaaggcgt

SEQ ID NO: 597108 - DNA, 75 bp, synthetic construct
  source 1..75: mol_type = other DNA
tcagcatcagatgtggaccgcgcaagcttatccgctcaatcgcccacgccagtggctgacctccggcgggctggg

SEQ ID NO: 597109 - DNA, 75 bp, synthetic construct
  source 1..75: mol_type = other DNA
gcgatatcagatgtggtgatgtggttaatttgccggaggggctttattcgggcgccgcgtcgatagtgatggcta

SEQ ID NO: 597110 - DNA, 75 bp, synthetic construct
  source 1..75: mol_type = other DNA
gcgatatcaggtgtggtgatgtggttaaattgccggaggggctttactccggcgctgcgtcgattgtgatggcta

SEQ ID NO: 597111 - DNA, 75 bp, synthetic construct
  source 1..75: mol_type = other DNA
gaacctaaattcagtgacataattcagatagctaaaattactggtgcagacttgaacacccttgcttatggctat

SEQ ID NO: 597112 - DNA, 75 bp, synthetic construct
  source 1..75: mol_type = other DNA
agccatatgaatcaggcgataaagaatgcgtggttcagcaggcagggtctgatatcactgctggaacagcagagg

SEQ ID NO: 597113 - DNA, 75 bp, synthetic construct
  source 1..75: mol_type = other DNA
gagccaagatttaattcgtgagttgttctccatcaacagacctattacaaatccaagaaatattttccagattgt

SEQ ID NO: 597114 - DNA, 75 bp, synthetic construct
  source 1..75: mol_type = other DNA
ggttcagcggggagatccatgttcatctgcataatgtcgttacccaggatccgcgaactcttgcccggatgattg

SEQ ID NO: 597115 - DNA, 75 bp, synthetic construct
  source 1..75: mol_type = other DNA
tacagacggcgacgcagtggacagccagaatgcgggagtgggtacagaaaaatcctgaactggtcaggggactgc

SEQ ID NO: 597116 - DNA, 75 bp, synthetic construct
  source 1..75: mol_type = other DNA
gacgtgtctggtgtggcggaccggatggggcaaaccctgcgtgacaatctgagtggtgatgtggcgcggcttacc

SEQ ID NO: 597117 - DNA, 75 bp, synthetic construct
  source 1..75: mol_type = other DNA
gcgttttcccgtgcccgccagcaggtgacctcgactgaaaacagcctgaacgaggcgcgtgcgcgacttcagcgc

SEQ ID NO: 597118 - DNA, 75 bp, synthetic construct
  source 1..75: mol_type = other DNA
cccaattgctggcgtggctgaatgaacgttacccgtttacccagtttcacatctcccggcaaatctatatgggcg

SEQ ID NO: 597119 - DNA, 75 bp, synthetic construct
  source 1..75: mol_type = other DNA
ggcaaagcggtagaagatattgtgaccttgtttacccagcgcaggccggaaatcagcggatttttagaaattttc

SEQ ID NO: 597120 - DNA, 75 bp, synthetic construct
  source 1..75: mol_type = other DNA
tattgcgcgttgccccctggtttttaccggtgggcatcgtggcggtgtggcaactggcctcctcggttggctggc

SEQ ID NO: 597121 - DNA, 75 bp, synthetic construct
  source 1..75: mol_type = other DNA
cggcagcgtcacgcagagtcagtttgacgccgtgggcaggctcagggcacagacggatgccgcaggcaggacaac

SEQ ID NO: 597122 - DNA, 75 bp, synthetic construct
  source 1..75: mol_type = other DNA
atccattctgtagctgatgagattaatatcccaggcgttttcacaatcggggggcatggtacccccacatctatt

SEQ ID NO: 597123 - DNA, 75 bp, synthetic construct
  source 1..75: mol_type = other DNA
gtatgccacggacccggcaggtaaccgcctgcccgacccggagctgcacccggacagcaccctcagcatgtggcc

SEQ ID NO: 597124 - DNA, 75 bp, synthetic construct
  source 1..75: mol_type = other DNA
gaaaggccgcctgaccggtgagcgccagacggtgcatcacccgcagacggaagcactgctctggcagcatgagac

SEQ ID NO: 597125 - DNA, 75 bp, synthetic construct
  source 1..75: mol_type = other DNA
gccgcagcgagtcactgtggctggtgcgcggcagcgtggcgaaactggatgaaggtcaccggctggccgcactct

SEQ ID NO: 597126 - DNA, 75 bp, synthetic construct
  source 1..75: mol_type = other DNA
aacaggtgcgcagctttacttacgatgataaataccggggccggatggtggcgcaccgtcacacgggccggccgg

SEQ ID NO: 597127 - DNA, 75 bp, synthetic construct
  source 1..75: mol_type = other DNA
gagcaaggtaagtctctgtggccacctgtatggcacagtgatgagatccctgatgcactagaggattttggttat

SEQ ID NO: 597128 - DNA, 75 bp, synthetic construct
  source 1..75: mol_type = other DNA
cccgctgtacggagcgggaatttgcgaccattcttgccggtatcagcgccggtggcaccgttcactggccggatg

SEQ ID NO: 597129 - DNA, 75 bp, synthetic construct
  source 1..75: mol_type = other DNA
atggcaaactaaagtcgcgggtgaagcactttctcgcccggtggtcagcgacggtctggtgttaatccacaccag

SEQ ID NO: 597130 - DNA, 75 bp, synthetic construct
  source 1..75: mol_type = other DNA
ggacggaaccgtccgcttttcctgataccctgccgggttacaccgaatatggccgggacaacggcatccgtctgt

SEQ ID NO: 597131 - DNA, 75 bp, synthetic construct
  source 1..75: mol_type = other DNA
gttgagtgctgcgcagacctgaatattcccttctttgtggatgccggaaacaaaaagctggtcttctggtttgta

SEQ ID NO: 597132 - DNA, 75 bp, synthetic construct
  source 1..75: mol_type = other DNA
atggcccgttcagctaaaccccgtaaacgaaaacccgctcttcaaagaagcaaacttccccgctatgtcgtgaag

SEQ ID NO: 597133 - DNA, 75 bp, synthetic construct
  source 1..75: mol_type = other DNA
cgcatcaccatcaccgacagcctgaaccgccgtgaagtgctgcacacgcagggcgaagccgggctgaagcgggtg

SEQ ID NO: 597134 - DNA, 75 bp, synthetic construct
  source 1..75: mol_type = other DNA
ggcaggcgctgccggaagacctgcgcataagtccgcatcgttatctggcgacgaacagtccgcaggggccgtggt

SEQ ID NO: 597135 - DNA, 75 bp, synthetic construct
  source 1..75: mol_type = other DNA
ggcaggcgctgccggaagaccttcgcttaagtccgcatcgttatctggcgacgaacagtccgcaggggccgtggt

SEQ ID NO: 597136 - DNA, 75 bp, synthetic construct
  source 1..75: mol_type = other DNA
ggcaggcgctgccggaagacctacgcgtaagtccgcatcgttatctggcgacgaacagtccgcaggggccgtggt

SEQ ID NO: 597137 - DNA, 75 bp, synthetic construct
  source 1..75: mol_type = other DNA
acgctctcagccagcggcgaattgtggcagcatctggcgatcagctcctggcgggcgctgattggtttttcaatt

SEQ ID NO: 597138 - DNA, 75 bp, synthetic construct
  source 1..75: mol_type = other DNA
atcagcgccggcggtatgtactgcccggagtgtggcacggttcactggccggacggagtcgccccgcccttctga

SEQ ID NO: 597139 - DNA, 75 bp, synthetic construct
  source 1..75: mol_type = other DNA
tgggcggaactggtgaaagaagcggtccagatatatgggggaatccgttctatcatcaatatctttgtgtcccag

SEQ ID NO: 597140 - DNA, 75 bp, synthetic construct
  source 1..75: mol_type = other DNA
gccgcgcggcgaactggcggcggtgtatgaccgcagcaatacacaggtgcgcagctttacttacgatgataaata

SEQ ID NO: 597141 - DNA, 75 bp, synthetic construct
  source 1..75: mol_type = other DNA
tgctgcgcagacctgaatattccattctttgtggatgcgggaaacaaaaagctggtcttcttgtttgtacgtgtt

SEQ ID NO: 597142 - DNA, 75 bp, synthetic construct
  source 1..75: mol_type = other DNA
cgcagaatacgatgaatggggtaaccagctgaatgaagagaacccgcaccagctgcagcagctcatccgcctgcc

SEQ ID NO: 597143 - DNA, 75 bp, synthetic construct
  source 1..75: mol_type = other DNA
ggcaggcgctgccggaagaactccgcctaagtccgcatcgttatctggcgacgaacagtccgcaggggccgtggt

SEQ ID NO: 597144 - DNA, 75 bp, synthetic construct
  source 1..75: mol_type = other DNA
tgccaccggcagccggaaaaccatgacgtggagccgttacggtcagttgctgagcttcaccgactgttccggtta

SEQ ID NO: 597145 - DNA, 75 bp, synthetic construct
  source 1..75: mol_type = other DNA
caggtgcgcagctttacttacgatgataaataccggggccggatggtggcgcaccgtcacacgggccggccggaa

SEQ ID NO: 597146 - DNA, 75 bp, synthetic construct
  source 1..75: mol_type = other DNA
caggaggcgaggcagcgttacatccgtaattcgatggaagcctggcgcaataatgaggcgaataaacccaaatcc

SEQ ID NO: 597147 - DNA, 75 bp, synthetic construct
  source 1..75: mol_type = other DNA
ggcagcacagctggcgacagaggggatctcaggactggtgaataacatcacggagatgctgaacgggaacaaagt

SEQ ID NO: 597148 - DNA, 75 bp, synthetic construct
  source 1..75: mol_type = other DNA
atgccgaatcggatgcgcagcgtgcggactggcagaaaggcttgcaggaggggctcagtaactgggtggacaatg

SEQ ID NO: 597149 - DNA, 75 bp, synthetic construct
  source 1..75: mol_type = other DNA
aaagatctgaaggcaatggcggatgacggaaaactgacagcggataaagtggtccccgcgttaatcagccagctg

SEQ ID NO: 597150 - DNA, 75 bp, synthetic construct
  source 1..75: mol_type = other DNA
tcagtctcagtatcagaccggggatatcagtgaggatttttacagacaggcacgggcacagaacgcgcagtatct

SEQ ID NO: 597151 - DNA, 75 bp, synthetic construct
  source 1..75: mol_type = other DNA
cgtaacgcgaccctgattgaccagcaaaaaatccgggaacagttgcgatcccgggaagagacactgaagaatgag

SEQ ID NO: 597152 - DNA, 75 bp, synthetic construct
  source 1..75: mol_type = other DNA
gcatgggcgtggcccgtaaagatctgaaggcgatggcggacgacggcaaactgacggcggataaagtcgtgcccg

SEQ ID NO: 597153 - DNA, 75 bp, synthetic construct
  source 1..75: mol_type = other DNA
cgaaatgaagccagtgacggtgaccattaccgcggtggatgccgatacggcaaagggcgaggaggcgatgaaata

SEQ ID NO: 597154 - DNA, 75 bp, synthetic construct
  source 1..75: mol_type = other DNA
aatattgaggtgattggcaactatgcgctggcggacggcaaagccaaacaaacgtataaagttacggtgactgat

SEQ ID NO: 597155 - DNA, 75 bp, synthetic construct
  source 1..75: mol_type = other DNA
cggggtggaaaatcagagacggaaaaagcggaagacagtttttcccggctgctgaagcagcagaaagagcaactg

SEQ ID NO: 597156 - DNA, 75 bp, synthetic construct
  source 1..75: mol_type = other DNA
acttgcactggccagaaatagcagtgcggaggcgctggccacacagaatgccgtcgcaaaacgccgggccatgat

SEQ ID NO: 597157 - DNA, 75 bp, synthetic construct
  source 1..75: mol_type = other DNA
acagcttgcgacggagggtatctcagggatggtgaataacatcacggagatgctgaacggaaataaagtggaatg

SEQ ID NO: 597158 - DNA, 75 bp, synthetic construct
  source 1..75: mol_type = other DNA
aatgcaaaaggcggcgtgtatacctcggcaaacctgagtgcgtacagcaacagtattgtggatacgcccacgtac

SEQ ID NO: 597159 - DNA, 75 bp, synthetic construct
  source 1..75: mol_type = other DNA
gccagctagcctggtccggcgctgttttacttctggtcggcacactgttgctggcctggtccgcggttcgccagc

SEQ ID NO: 597160 - DNA, 75 bp, synthetic construct
  source 1..75: mol_type = other DNA
gacgtacgccgtactcagcctgtttttttgcgatccggatatgcatccggcggatttcagcctgttcgctccgga

SEQ ID NO: 597161 - DNA, 75 bp, synthetic construct
  source 1..75: mol_type = other DNA
atggggagacctgactggcgcgccatgcttgccgggatgacatccaccgaatatgccgactggcaccgtttttac

SEQ ID NO: 597162 - DNA, 75 bp, synthetic construct
  source 1..75: mol_type = other DNA
cccagctggatatgcatttttccgggctgacgtacgccgtactcagcctgtttttttgcgatccggatatgcatc

SEQ ID NO: 597163 - DNA, 75 bp, synthetic construct
  source 1..75: mol_type = other DNA
cggttcggaggggacggagggcgcgatatttcaccttctgcggatgtggtggatgtcagcgaggatgatgttgca

SEQ ID NO: 597164 - DNA, 75 bp, synthetic construct
  source 1..75: mol_type = other DNA
gtcagctaacctggtcaggcgcagctcttttattactggtcggcacgatgatgctggcatggtcagcggttcgcc

SEQ ID NO: 597165 - DNA, 75 bp, synthetic construct
  source 1..75: mol_type = other DNA
accatgattgaaggcgtgcgtaatctggtcgaacattgcggtatcgcactggatgaagtgctgcgtatggcgacg

SEQ ID NO: 597166 - DNA, 75 bp, synthetic construct
  source 1..75: mol_type = other DNA
tgcactggatgacgcccgtcaccaggcaaaatacgttacagctacgatacaaaaactgatcccgagtcaggctga

SEQ ID NO: 597167 - DNA, 75 bp, synthetic construct
  source 1..75: mol_type = other DNA
ttgccaatggcgatattggttttaacttcactgacggcaatctgattaagaaaatctttgtcgataaaatcacgc

SEQ ID NO: 597168 - DNA, 75 bp, synthetic construct
  source 1..75: mol_type = other DNA
tggcggatgtcatggtggatgatgccgcattaatgatggcttcagcggggattccgggaggtgtggagatatgtc

SEQ ID NO: 597169 - DNA, 75 bp, synthetic construct
  source 1..75: mol_type = other DNA
tttctctggcgacatcgccaaagctatcgccgctggcgcaagcgcggtaatggtgggttccatgctggcaggtac

SEQ ID NO: 597170 - DNA, 75 bp, synthetic construct
  source 1..75: mol_type = other DNA
gtgaaccgggcctggcgggcgcgatcctcgacgaagctgacatttattgcggtattatcgctgatggcctgcatg

SEQ ID NO: 597171 - DNA, 75 bp, synthetic construct
  source 1..75: mol_type = other DNA
aaccctgaccgtcgtggacagctatggtaacccgttgcaggggcaagaagttacgctgactttaccgcagggtgt

SEQ ID NO: 597172 - DNA, 75 bp, synthetic construct
  source 1..75: mol_type = other DNA
attgatgcagacatgatgtcttctatgccgccatcattaaaagcggcaaccgggattgatgcactcacacatgcg

SEQ ID NO: 597173 - DNA, 75 bp, synthetic construct
  source 1..75: mol_type = other DNA
ctattgctgttccaactacagcggggactgcggcagaagtgaccattaactatgtcatcacagatgtggagaata

SEQ ID NO: 597174 - DNA, 75 bp, synthetic construct
  source 1..75: mol_type = other DNA
cgtgtgggggtggcgtttcacggtgtcgcggatggtaaaaatccggatggctttccgtgggagaggggccaggga

SEQ ID NO: 597175 - DNA, 75 bp, synthetic construct
  source 1..75: mol_type = other DNA
gcaggtcgcaacttattgctcgacctatgccgggtggaaaaggcccggcgcagttcgtgtatggggtaatggtat

SEQ ID NO: 597176 - DNA, 75 bp, synthetic construct
  source 1..75: mol_type = other DNA
tgtaccgggtggaaaagcgaaggtggaatattgctatgcagtgaatgtaccaggtgacagggaaattgtaaccca

SEQ ID NO: 597177 - DNA, 75 bp, synthetic construct
  source 1..75: mol_type = other DNA
aacacaacgtgttatctacctccgcgaaggctatgagcatgagtgcttcagcccgctcgaacagtttcgtcgtaa

SEQ ID NO: 597178 - DNA, 75 bp, synthetic construct
  source 1..75: mol_type = other DNA
acgactggcacgggtcaaccgctacagccagaccggcaacgaggcagaccttaatccgaacgtcgctaaccgcaa

SEQ ID NO: 597179 - DNA, 75 bp, synthetic construct
  source 1..75: mol_type = other DNA
gtcacaccgtggcgacagctccggatgcgtggtactggcaccgccggtggtggccggtggcaaattcaggatcct

SEQ ID NO: 597180 - DNA, 75 bp, synthetic construct
  source 1..75: mol_type = other DNA
ggcgctgctgtactggcagggattttccgtgccgcagattgccgccatgttgcagatgaaacgcccgacagtgca

SEQ ID NO: 597181 - DNA, 75 bp, synthetic construct
  source 1..75: mol_type = other DNA
tcttgcgcgtggcctgctctgccctgacgggcagtaccgccagatcgtcaccgtggaggatgcagtgcgcggcgg

SEQ ID NO: 597182 - DNA, 75 bp, synthetic construct
  source 1..75: mol_type = other DNA
ccagcctgacccatagtgcctatccgttctggtccggtgcgctgtttaaccggggccgcgccaaagcggacaagg

SEQ ID NO: 597183 - DNA, 75 bp, synthetic construct
  source 1..75: mol_type = other DNA
aggcaaaagacgttatccgtcgtggctgtctggaatatgacgtcagcgcccgacatcaccagctcgtttatggct

SEQ ID NO: 597184 - DNA, 75 bp, synthetic construct
  source 1..75: mol_type = other DNA
gtggtactggcaccgccggtggtggccggtggcaaattcagaatacttgagcgtcaccagtggaaaggcatggac

SEQ ID NO: 597185 - DNA, 75 bp, synthetic construct
  source 1..75: mol_type = other DNA
tatgtctggtgcaatttttcttgatatcaaacaggcgttgcgtttttgtcgcgtcaggcaatacatcgcgtgcga

SEQ ID NO: 597186 - DNA, 75 bp, synthetic construct
  source 1..75: mol_type = other DNA
tggctgaaaatctggacccccgcaggcaaataaaacttgctgccgaaaaaactatgcaaccagtgaccgtaaggg

SEQ ID NO: 597187 - DNA, 75 bp, synthetic construct
  source 1..75: mol_type = other DNA
aaaaacttcgttccctgcttgggcgcaggagtgagaggcaggaaaccatcgctgatggtaacgggctttcggtac

SEQ ID NO: 597188 - DNA, 75 bp, synthetic construct
  source 1..75: mol_type = other DNA
aatcgatgcaatggagttcctcatcaataaactggcgatgaccaagaccaatgacgatttcttcgagatgatgaa

SEQ ID NO: 597189 - DNA, 75 bp, synthetic construct
  source 1..75: mol_type = other DNA
acgttatcattctgctcgactccatcactcgtctggcgcgcgcttacaacaccgttgttccggcgtcaggtaaag

SEQ ID NO: 597190 - DNA, 75 bp, synthetic construct
  source 1..75: mol_type = other DNA
ggtgatggcgtactggagatattgcaggatggatttggttttctccgttccgcagacagctcctacctcgccggt

SEQ ID NO: 597191 - DNA, 75 bp, synthetic construct
  source 1..75: mol_type = other DNA
tctacctccgtgaaggctatgagcatgagtgcttcagtccgctcgaacagtttcgtcgtaaattcagggaaatag

SEQ ID NO: 597192 - DNA, 75 bp, synthetic construct
  source 1..75: mol_type = other DNA
acccgtcacaccgtggcgacagtgccggatgcgtggtgctggcaccgccggtggtggccggtggcaaattcagaa

SEQ ID NO: 597193 - DNA, 75 bp, synthetic construct
  source 1..75: mol_type = other DNA
ctctgtgcggacggccagtggcggcagattgtcaccattgaggacgcgctgaaaggcggctgcacgctgttcgac

SEQ ID NO: 597194 - DNA, 75 bp, synthetic construct
  source 1..75: mol_type = other DNA
acaccgttcgcctcgtgatgtgttgacggttttatgccggattgctgctgaccgcatcgacccggctttagctcg

SEQ ID NO: 597195 - DNA, 75 bp, synthetic construct
  source 1..75: mol_type = other DNA
cggtgttgtgtttttcactgatattcagggaacagttatgtgaactgaatattcacaggggaaatacagtggtgc

SEQ ID NO: 597196 - DNA, 75 bp, synthetic construct
  source 1..75: mol_type = other DNA
cggtgttgtgtttttcactgatattcagggaacggttatgtgagctgaatattcacaggggaaatacagtggtgc

SEQ ID NO: 597197 - DNA, 75 bp, synthetic construct
  source 1..75: mol_type = other DNA
tagaagctggcgatattatcccctgcgatggtgaagttattgaagggggtgcatcggtcgatgaaagcgccatca

SEQ ID NO: 597198 - DNA, 75 bp, synthetic construct
  source 1..75: mol_type = other DNA
gctgtggcgcagtctgcaaatggcgtatttgtgtctcttcctgacatcgaggatgtggacaacgccgatatcaac

SEQ ID NO: 597199 - DNA, 75 bp, synthetic construct
  source 1..75: mol_type = other DNA
tgcttgttacgtccatcatgctgtatcttccggctaatattttgcccatcatggtgacggatttattaggctcga

SEQ ID NO: 597200 - DNA, 75 bp, synthetic construct
  source 1..75: mol_type = other DNA
gctgaaagaagcggtgaaaaaattaaatccgcaggcgcaatggcgcaatccggtgatgtttatcgtctggatcgg

SEQ ID NO: 597201 - DNA, 75 bp, synthetic construct
  source 1..75: mol_type = other DNA
gcaggccaacagtctgaaaggggtgaaaaaaaccgcttttgctcgcaaactgcgcgaaccgaaatatggcgctgc

SEQ ID NO: 597202 - DNA, 75 bp, synthetic construct
  source 1..75: mol_type = other DNA
cgaaccagacgaaagcggcggcgaacaggcaatgaccgagcttttgggacgcggaaggaatttcactgcggtagc

SEQ ID NO: 597203 - DNA, 75 bp, synthetic construct
  source 1..75: mol_type = other DNA
tggcttaccatactggtaatttcttattaattggcaacggttatcacactgaacaaaaagagcgtcaggccattg

SEQ ID NO: 597204 - DNA, 75 bp, synthetic construct
  source 1..75: mol_type = other DNA
actttggtcctgttttttttataccttccagagcaatctcacgtcttgcaaaaacagcctgcgttttcatcagta

SEQ ID NO: 597205 - DNA, 75 bp, synthetic construct
  source 1..75: mol_type = other DNA
ggtgtttgtgccgctggtggtcattgatgacattgacaatggtgacattaatcagcggctgatggagtcaataga

SEQ ID NO: 597206 - DNA, 75 bp, synthetic construct
  source 1..75: mol_type = other DNA
ctgcgtaaaggcgatatcgtactggtagaagctggcgatattatcccctgcgatggtgaagtcattgaagggggc

SEQ ID NO: 597207 - DNA, 75 bp, synthetic construct
  source 1..75: mol_type = other DNA
tcaggcatcagagtttatccccgcgcagggcgtagaggaaaaaacgctggccgacgcagcacaactggattcgct

SEQ ID NO: 597208 - DNA, 75 bp, synthetic construct
  source 1..75: mol_type = other DNA
actgccggtgcctcctggcacaacgacatgttcactacagcactggatgttgacctgaccccggccagtggcttc

SEQ ID NO: 597209 - DNA, 75 bp, synthetic construct
  source 1..75: mol_type = other DNA
ccgccggacaaaaatggtcactgggcttcacaccaaaattccagcgtgttgacctgttcaactacaacgtgctgg

SEQ ID NO: 597210 - DNA, 75 bp, synthetic construct
  source 1..75: mol_type = other DNA
ctatctggaaagcattgcaaacagcaacggtcagaatgtggacaaaaaccgactgacctctcaggcatttgcccg

SEQ ID NO: 597211 - DNA, 75 bp, synthetic construct
  source 1..75: mol_type = other DNA
atgatggcagtgcgttcaccgccgggctgggtatctcaccatttgatgtcgtccatattgatgtggcgggtatag

SEQ ID NO: 597212 - DNA, 75 bp, synthetic construct
  source 1..75: mol_type = other DNA
gccgtttgcccttatgctcaagtcttacggaactgtcagcgtaaacggaaaagtaaacgatgcagacctggatta

SEQ ID NO: 597213 - DNA, 75 bp, synthetic construct
  source 1..75: mol_type = other DNA
gataaccagcatggcgtacaacaggcagcagcaaatcttaaacatcgtctgcaggaattccgcaatatcaatgca

SEQ ID NO: 597214 - DNA, 75 bp, synthetic construct
  source 1..75: mol_type = other DNA
ctggacgctgggtctggtcgcacaaaacctgatcccacgcagcattgagaccaaagaggtacatggtgtcactga

SEQ ID NO: 597215 - DNA, 75 bp, synthetic construct
  source 1..75: mol_type = other DNA
tgcgatgtccaaaggttcttctgaccgttacttccagagcgacaacgctgccgacaaactggtgccggaaggtat

SEQ ID NO: 597216 - DNA, 75 bp, synthetic construct
  source 1..75: mol_type = other DNA
atcgacagtcagagcaacgtgtcgcagactgctgcacgtctgaagacgcgacttcaggacttccgtcacacacat

SEQ ID NO: 597217 - DNA, 75 bp, synthetic construct
  source 1..75: mol_type = other DNA
ctgtttaactacaacgtaacggttcgtgattacgacaaagacgattttgacggtgacaagtatcacaacacgaaa

SEQ ID NO: 597218 - DNA, 75 bp, synthetic construct
  source 1..75: mol_type = other DNA
tgacctgaccccagccagtggcttcacatcagacagtaaacgtcagtttgctgccattggtgctgaatttaatgc

SEQ ID NO: 597219 - DNA, 75 bp, synthetic construct
  source 1..75: mol_type = other DNA
tgcctggtcctttggtatcacaccaaaataccagcgcgttgacctgtttaactacaacgtttccgtcagtaattt

SEQ ID NO: 597220 - DNA, 75 bp, synthetic construct
  source 1..75: mol_type = other DNA
tgttaaggacctctgggatcgtttcgacagcgccgtcgctaatcagtccggtgtcagcgaaagcgccgcggcact

SEQ ID NO: 597221 - DNA, 75 bp, synthetic construct
  source 1..75: mol_type = other DNA
acgttggttctttcgattacggccgtaactacggtgtggtttatgatgcactgggttacaccgatatgctgccag

SEQ ID NO: 597222 - DNA, 75 bp, synthetic construct
  source 1..75: mol_type = other DNA
attgtgcggagttataagtggtcctgttcgacataaacacacaggagaaactatcatccggaatttcgccatcat

SEQ ID NO: 597223 - DNA, 75 bp, synthetic construct
  source 1..75: mol_type = other DNA
cacagggtaaataacctacattatggaaaactggatcaaaacagcattgtgtgtagtgccattgttgctgataac

SEQ ID NO: 597224 - DNA, 75 bp, synthetic construct
  source 1..75: mol_type = other DNA
tggtcagatgaatatttatttggaattataaacagatgtcattcacgtggtttgttgaaaaacatgtcatccaga

SEQ ID NO: 597225 - DNA, 75 bp, synthetic construct
  source 1..75: mol_type = other DNA
aagccttcgatggcagcacttcatctaatcttggatatgccattgttaatacgcggtctttattggttgaaatca

SEQ ID NO: 597226 - DNA, 75 bp, synthetic construct
  source 1..75: mol_type = other DNA
acaacctggacttatattcaaagctccgcaactattcgtatcggtggtcagacaacgacaggacaacgtcattta

SEQ ID NO: 597227 - DNA, 75 bp, synthetic construct
  source 1..75: mol_type = other DNA
aaatacggttggtggttttgtccagtattctccggatacagggcagatggttacatcaggggattatctcgatgt

SEQ ID NO: 597228 - DNA, 75 bp, synthetic construct
  source 1..75: mol_type = other DNA
cggtttaccagcattcactttatgatattaatttttccaacctgaccttaatgctgagtaaggtttacacgctta

SEQ ID NO: 597229 - DNA, 75 bp, synthetic construct
  source 1..75: mol_type = other DNA
gtttattcaaacaactaagaaaagatagaagagttgagtttattcgtggttactttgaaactgagagggctcagc

SEQ ID NO: 597230 - DNA, 75 bp, synthetic construct
  source 1..75: mol_type = other DNA
accgcacgcattattttcaggatacccagctggatatgcattttttccgggctgatgtacgccgtactcagcctg

SEQ ID NO: 597231 - DNA, 75 bp, synthetic construct
  source 1..75: mol_type = other DNA
atatagatgctcttttgacatacatgaacgatgacatggagaatcttggtgaaacaataaaaaccgttacatttg

SEQ ID NO: 597232 - DNA, 75 bp, synthetic construct
  source 1..75: mol_type = other DNA
cacaaaccattcgtgtatttaattatcttgaagatacaaaagaatttatcggtagtggtgacgcttatataccac

SEQ ID NO: 597233 - DNA, 75 bp, synthetic construct
  source 1..75: mol_type = other DNA
ggtaaattatttaaatcgattgttatctgtaatgatttatcaaatgataaatatgaaaaattaatttgctcacta

SEQ ID NO: 597234 - DNA, 75 bp, synthetic construct
  source 1..75: mol_type = other DNA
cgattcaagcaagtgaagaaacttacataacctctgcaatacaatacgcaccaaaaaaaggtagtgtcgttgaat

SEQ ID NO: 597235 - DNA, 75 bp, synthetic construct
  source 1..75: mol_type = other DNA
ccgtcagtatctgcccaaccataacgccggtagctacgacgatccgcgctttaaactggtgatcgacgatggcgt

SEQ ID NO: 597236 - DNA, 75 bp, synthetic construct
  source 1..75: mol_type = other DNA
cggcgtctgctttttacagcaggaagaagccatcgacagccatcgcaaactcagccattacttcagcgacgttgg

SEQ ID NO: 597237 - DNA, 75 bp, synthetic construct
  source 1..75: mol_type = other DNA
tgctgcatgtcaggcaaactatatccgtgatgttcagggcgggactgtatcaccgtcatcctctgctgaactgac

SEQ ID NO: 597238 - DNA, 75 bp, synthetic construct
  source 1..75: mol_type = other DNA
atgacttcttcgttggtcgtgtacggcgttgctacctatcgtaactccaacttcttcggtctggttgacggcctg

SEQ ID NO: 597239 - DNA, 75 bp, synthetic construct
  source 1..75: mol_type = other DNA
aaatctaaagcgaaagacgtagaaggtatcggtgatgttgatctggtgaactactttgaagtgggcgcaacctac

SEQ ID NO: 597240 - DNA, 75 bp, synthetic construct
  source 1..75: mol_type = other DNA
tgctgcatgtcaggcaaattatatccgggatgttcagggcgggactgtatcaccgtcatcaacttctgaactgac

SEQ ID NO: 597241 - DNA, 75 bp, synthetic construct
  source 1..75: mol_type = other DNA
atggcaaaacttaccttacaagagcagttgctcaaagcaggattagtcaccagcaaaaaagcggcgaaggtggag

SEQ ID NO: 597242 - DNA, 75 bp, synthetic construct
  source 1..75: mol_type = other DNA
ttacattaacaaatcaggagttttaaccgtagctgatattaacgagccacgtttcgaacgcgaaggattattaat

SEQ ID NO: 597243 - DNA, 75 bp, synthetic construct
  source 1..75: mol_type = other DNA
ccgttagcggaaaaacagttactggagctggcactgaattcaatgccgcattatctatgattagagtgggttgca

SEQ ID NO: 597244 - DNA, 75 bp, synthetic construct
  source 1..75: mol_type = other DNA
tggtctgtctgatcccaacaactatcggcggcttgctgtcagctatcggcgtcgccgggatgagccggatgctgg

SEQ ID NO: 597245 - DNA, 75 bp, synthetic construct
  source 1..75: mol_type = other DNA
gttgacgttctgctgctggataaaaccggcaccatcacactcggtaaccgtcaggcatcggagtttatccctgcg

SEQ ID NO: 597246 - DNA, 75 bp, synthetic construct
  source 1..75: mol_type = other DNA
gatcggatgatcgcgatggtggaaggcgcacagcgacgtaaaacgccgaacgagattgccctgaccatcctgctg

SEQ ID NO: 597247 - DNA, 75 bp, synthetic construct
  source 1..75: mol_type = other DNA
agataatgaaggacgaacacgggcggcgctggcagagcagaaccggctgattgatgaacaggccagccgggtgaa

SEQ ID NO: 597248 - DNA, 75 bp, synthetic construct
  source 1..75: mol_type = other DNA
agagcgtgagctggccctgtcccgactgaagggggaggaaaaagagcgtgcccggctggggtatgcggcggatga

SEQ ID NO: 597249 - DNA, 75 bp, synthetic construct
  source 1..75: mol_type = other DNA
aggcggcaggcagtcttgtgcagctgattgaccagcgggtgcaggcggtgatgctgtccatgcgacgtgacggag

SEQ ID NO: 597250 - DNA, 75 bp, synthetic construct
  source 1..75: mol_type = other DNA
acccagttcagccaggcgctggcacagggggtgttgcgcggcgaggaatttaattcggtcaatgaaagtggggac

SEQ ID NO: 597251 - DNA, 75 bp, synthetic construct
  source 1..75: mol_type = other DNA
ccggggtggaaaatcagagacggaaaaagcggaagacagtttttcccggctactgaagcagcagaaagagcaact

SEQ ID NO: 597252 - DNA, 75 bp, synthetic construct
  source 1..75: mol_type = other DNA
tacagcaacagcattgtggatacgcccacgtactttgcctttgcaaaaggggccgggctgatgggggaagccgga

SEQ ID NO: 597253 - DNA, 75 bp, synthetic construct
  source 1..75: mol_type = other DNA
tcaaaatttcggcaaattcacagtcattccagtcggagctccagcgtgcttcccgtatgggcagtgaatattacc

SEQ ID NO: 597254 - DNA, 75 bp, synthetic construct
  source 1..75: mol_type = other DNA
tatcagtatgtgctggctaatccgggctggacgaccggtaacggcttcatgataaaccatctgacatcggtgaaa

SEQ ID NO: 597255 - DNA, 75 bp, synthetic construct
  source 1..75: mol_type = other DNA
agggggtgttgcgcggcgaggaatttaattcggtcaatgaaagtggggaccggatcattcgcgcactggctgcag

SEQ ID NO: 597256 - DNA, 75 bp, synthetic construct
  source 1..75: mol_type = other DNA
ctgaagccattatgcccctgacccgggcggcggatggctcgctgggcgtacgcgccgtgggcagtatgaacggca

SEQ ID NO: 597257 - DNA, 75 bp, synthetic construct
  source 1..75: mol_type = other DNA
aggtggaaaacgcctttatggcctgggtgggtggcgcgaatgaggccagcggggtgacaaaaacgctctccggca

SEQ ID NO: 597258 - DNA, 75 bp, synthetic construct
  source 1..75: mol_type = other DNA
cggatcatacgtgcactggctgcgggtatgggcgtggcccgtaaagaccttaaggcgatggcggacgacggcaaa

SEQ ID NO: 597259 - DNA, 75 bp, synthetic construct
  source 1..75: mol_type = other DNA
tggaatggcgcagctgggctgcatcaatcctgcaggaaatatcaaaagttcttatgaatgcggccattgtcaacg

SEQ ID NO: 597260 - DNA, 75 bp, synthetic construct
  source 1..75: mol_type = other DNA
cggctgcttcgttaactacaaccatccgcagttaggcaaagatttaattaaagtgctcaacgcaatgggtaccgg

SEQ ID NO: 597261 - DNA, 75 bp, synthetic construct
  source 1..75: mol_type = other DNA
acaccctggaattgttgcgcaaaatcccagggcttgagctaacagtgctggattcccagtgctgcggtattgcag

SEQ ID NO: 597262 - DNA, 75 bp, synthetic construct
  source 1..75: mol_type = other DNA
atgggtagcgtttccacgccgttcgcaccaatcgtcaacaccgctacctcgctgaaaccagtgcggcagctgctt

SEQ ID NO: 597263 - DNA, 75 bp, synthetic construct
  source 1..75: mol_type = other DNA
agcgcaacttcgggggacacagatagcaaccgccagggcgcgtgcggcggtttatcgtgcgcaacaggcggttgt

SEQ ID NO: 597264 - DNA, 75 bp, synthetic construct
  source 1..75: mol_type = other DNA
gaatgggagttgcccgtaaggatctgaaggccatggcggataacggaaagttgaccgccgataaggttgttcctg

SEQ ID NO: 597265 - DNA, 75 bp, synthetic construct
  source 1..75: mol_type = other DNA
atgaatgacaccagcttcgaaaactgcattaagtgcaccgtctgcaccaccgcctgcccggtgagccgggtgaat

SEQ ID NO: 597266 - DNA, 75 bp, synthetic construct
  source 1..75: mol_type = other DNA
aatgcagcactcatcgaccagaaaaagattcgtgagcagcttgctgcgtatgaaagcagcctggcggacagtaat

SEQ ID NO: 597267 - DNA, 75 bp, synthetic construct
  source 1..75: mol_type = other DNA
ttgaccgccgataaggttgttcctgcactgattagtcagcttggggcattacgtgatgaatatgcggcaatgcct

SEQ ID NO: 597268 - DNA, 75 bp, synthetic construct
  source 1..75: mol_type = other DNA
tgtaccacattgccattcagaatgacggcgctaacgggcagatagggccggaagcggcgggcacccttgtgcaac

SEQ ID NO: 597269 - DNA, 75 bp, synthetic construct
  source 1..75: mol_type = other DNA
acggttttaccgataaggcgcgtaaacaggcgattatcaacgtggaatcgatccgcgaagctgtcggagcgaaag

SEQ ID NO: 597270 - DNA, 75 bp, synthetic construct
  source 1..75: mol_type = other DNA
agccagtgcaaatctacagcatggaaatgtcgtcggagcagctactgctgcggctggtttctctgattggccgcg

SEQ ID NO: 597271 - DNA, 75 bp, synthetic construct
  source 1..75: mol_type = other DNA
gctgctcgacgattccgggatcctcaccccatccctgttacgcagccgggccaggcgatcgcttcgccagcatgg

SEQ ID NO: 597272 - DNA, 75 bp, synthetic construct
  source 1..75: mol_type = other DNA
atggcgacgttacgtgaactgattatcaaaatttcggcaaattctcagtcattccagtcggagttccagcgtgct

SEQ ID NO: 597273 - DNA, 75 bp, synthetic construct
  source 1..75: mol_type = other DNA
ttacccgtaatattgcggccagaacagcggcacagacaacgctgaatactgtcacgtcagtggggagtcgtctgt

SEQ ID NO: 597274 - DNA, 75 bp, synthetic construct
  source 1..75: mol_type = other DNA
tgagtgctacattaggtttgccgggaaggcagacagccttatggatgaacttatcgctcaggataagcatggcaa

SEQ ID NO: 597275 - DNA, 75 bp, synthetic construct
  source 1..75: mol_type = other DNA
ggcactggcggggcagaatacagagctggcgaagctgaaataccagactgcgcagggcgaactgaaaaccctgac

SEQ ID NO: 597276 - DNA, 75 bp, synthetic construct
  source 1..75: mol_type = other DNA
cgcagttactgggatatggtgaaggctcacggatgcgtgaacgactccaggaaatgtggagtatccggcatgagt

SEQ ID NO: 597277 - DNA, 75 bp, synthetic construct
  source 1..75: mol_type = other DNA
agggcgaattatcaaccctgtcagaagcgcagaaaaaaacgcttttgcagaatgcagcactcatcgaccagaaaa

SEQ ID NO: 597278 - DNA, 75 bp, synthetic construct
  source 1..75: mol_type = other DNA
tcagacagccagacagaattatatcaataactcactggatgcctggcgaaataaccaggcaaataaacccaaagc

SEQ ID NO: 597279 - DNA, 75 bp, synthetic construct
  source 1..75: mol_type = other DNA
cagagcgtgagctggccctgtcccgactgaatggggacgaaaaagagcggggccgactggggtatgcggcggatg

SEQ ID NO: 597280 - DNA, 75 bp, synthetic construct
  source 1..75: mol_type = other DNA
cagagcgtgagctggccctgtcccgactgaaaggggacgaaaaagagcggggccgtctggggtatgcggcggatg

SEQ ID NO: 597281 - DNA, 75 bp, synthetic construct
  source 1..75: mol_type = other DNA
cagagcgtgagctggccctgtcctgactgaacggggacgaaaaagagcggggccgactggggtatgcggcggatg

SEQ ID NO: 597282 - DNA, 75 bp, synthetic construct
  source 1..75: mol_type = other DNA
actgaacggggaggaaaaagagcgggcccgcctggggtatgcggcggatgaccttggttttgtgggggatccgta

SEQ ID NO: 597283 - DNA, 75 bp, synthetic construct
  source 1..75: mol_type = other DNA
actgaacggggaggaaaaagagcgggcccgtctggggtatgcggcggatgacctcggttttgtgggggatccgta

SEQ ID NO: 597284 - DNA, 75 bp, synthetic construct
  source 1..75: mol_type = other DNA
actgaatggggaggaaaaagagcgggcccgcctggggtatgcggcggatgacctcggttttgtgggggatccgta

SEQ ID NO: 597285 - DNA, 75 bp, synthetic construct
  source 1..75: mol_type = other DNA
gataccgaatatatgcaggaaaaccactgggatgaggaatccgcttcctttattccggtcgaaccagaatccgat

SEQ ID NO: 597286 - DNA, 75 bp, synthetic construct
  source 1..75: mol_type = other DNA
gaaagcggagaccggatcatacgtgcactggctgcgggtatgggcgtggcccgtaaagaccttaaggcgatggcg

SEQ ID NO: 597287 - DNA, 75 bp, synthetic construct
  source 1..75: mol_type = other DNA
gcaccatgcagaacggaggccgacagtccgctgctgcatcccgtgaaatgcggcgtgcactggcagaagtgacgg

SEQ ID NO: 597288 - DNA, 75 bp, synthetic construct
  source 1..75: mol_type = other DNA
aaggtggtgtttacacatcggcaaatctgagtgcttacagtaacaccattgtggatacgccgacgtactttgctt

SEQ ID NO: 597289 - DNA, 75 bp, synthetic construct
  source 1..75: mol_type = other DNA
tacagcaacagtattgtggatacgcccacgtactttgcctttgcaaaaggggcggggctgatgggggaggccggt

SEQ ID NO: 597290 - DNA, 75 bp, synthetic construct
  source 1..75: mol_type = other DNA
gccttttatgcccggtcggatgaacaacgtgcggactggcagaaagggctgcaggaggggctcagtaactgggtg

SEQ ID NO: 597291 - DNA, 75 bp, synthetic construct
  source 1..75: mol_type = other DNA
caacgttatatcagtaatgccctggaagcctggcgcaataacgaggcgaataaacccaaatcccggggtggaaaa

SEQ ID NO: 597292 - DNA, 75 bp, synthetic construct
  source 1..75: mol_type = other DNA
ggaccctgcagaatggcggacgtcaggctgctgcggcagccagggagcagcgacgtgccctggcagaactgaaca

SEQ ID NO: 597293 - DNA, 75 bp, synthetic construct
  source 1..75: mol_type = other DNA
tggcggcagcccgcgggacggagatgcagattgctgcagaagcccgtctggcggccacacaggaacgcctgaaca

SEQ ID NO: 597294 - DNA, 75 bp, synthetic construct
  source 1..75: mol_type = other DNA
gagcaatggcgagatagatgcgcgctcagccaggggactggtggatctgatcgacagcagggttgtgtcaattat

SEQ ID NO: 597295 - DNA, 75 bp, synthetic construct
  source 1..75: mol_type = other DNA
cgtgccgatgttgccgcacacattcatgaactggcaaacgcgccagcactcaataagcagatctacagtctgatt

SEQ ID NO: 597296 - DNA, 75 bp, synthetic construct
  source 1..75: mol_type = other DNA
agtaaggctgccgctgttgcacaggcaatcattaacacagagcttgccgccactaaggctatggctgagggcggg

SEQ ID NO: 597297 - DNA, 75 bp, synthetic construct
  source 1..75: mol_type = other DNA
cttaaggtgacggaggccatttccacagggctgaaaatctccggtgccagtacggcagaggcgggctcggtgatc

SEQ ID NO: 597298 - DNA, 75 bp, synthetic construct
  source 1..75: mol_type = other DNA
gtcctgtctggattggctacgacccgtcacacaccggcgacagtgccgggtgcgtcgtgctcgcgccgccggtgg

SEQ ID NO: 597299 - DNA, 75 bp, synthetic construct
  source 1..75: mol_type = other DNA
caagacgagccagaaacgaaacaatccgaaccagtagcgcaacaggaagaggaaaaagtctgtaccgcctgcggt

SEQ ID NO: 597300 - DNA, 75 bp, synthetic construct
  source 1..75: mol_type = other DNA
aaatcgacgtcagtcataacgcccttgccggaggtcttctctgtgcggacggccagtggcggcagattgtcacca

SEQ ID NO: 597301 - DNA, 75 bp, synthetic construct
  source 1..75: mol_type = other DNA
gaagaaaccgccccgttaaaccgggtcgagttcacgctcgaggcgcggctgattcagctctatgcaaagcccgac

SEQ ID NO: 597302 - DNA, 75 bp, synthetic construct
  source 1..75: mol_type = other DNA
ctgtctggaatatgacgtcagcgccaccgatatcaccagctcgtttatggctatccgcaagaccatgaccagcag

SEQ ID NO: 597303 - DNA, 75 bp, synthetic construct
  source 1..75: mol_type = other DNA
tccgccagctcaccgaaaaatacaacgtcgagtatatcggtatcgatgcgaccggcctcggtattggtgtcttcc

SEQ ID NO: 597304 - DNA, 75 bp, synthetic construct
  source 1..75: mol_type = other DNA
ggcgctgctgtactggcagggattttccgtgccgcagattgccgccatgttgcagatgaagcgcccgacggtgca

SEQ ID NO: 597305 - DNA, 75 bp, synthetic construct
  source 1..75: mol_type = other DNA
cggtatggctattcacaaaaaatggagacagacctatttttccacgccatccagcctgacacacagtgcttatcc

SEQ ID NO: 597306 - DNA, 75 bp, synthetic construct
  source 1..75: mol_type = other DNA
accgcatccgcgatatcctgaaatcccgccagattggcgcgacgttttatttttcccgcgaggcgctgctgcgcg

SEQ ID NO: 597307 - DNA, 75 bp, synthetic construct
  source 1..75: mol_type = other DNA
ttcccggtggcaagttccgcatccttgagcgtcaccagtggaaagggatggattttgcgacgcaggccgaggcta

SEQ ID NO: 597308 - DNA, 75 bp, synthetic construct
  source 1..75: mol_type = other DNA
gaatcggaacggaactaccaaaaagcggaacaaaacagcccaaatgcgttacaaaacgagccagaaacgaaacag

SEQ ID NO: 597309 - DNA, 75 bp, synthetic construct
  source 1..75: mol_type = other DNA
ttgacctgctgggacgccagattgaacgactggcgcgggtcaaccgctacagtcagaccggcaacgaggcagacc

SEQ ID NO: 597310 - DNA, 75 bp, synthetic construct
  source 1..75: mol_type = other DNA
tacgcagaacggcgacagtgccggatgcgtggttgtggctccgccagccgtgccgggcggtaagttccgtattct

SEQ ID NO: 597311 - DNA, 75 bp, synthetic construct
  source 1..75: mol_type = other DNA
catgtgtgaatttgttgacgacaaggcatcggtgttcccgttcgaggagctgcaacgctgcatggtcgacacgtt

SEQ ID NO: 597312 - DNA, 75 bp, synthetic construct
  source 1..75: mol_type = other DNA
ttatcgacgaaaactccggtgaattttttgttcaggtctggggtaacggtgcaactttcgacaacgtgattttac

SEQ ID NO: 597313 - DNA, 75 bp, synthetic construct
  source 1..75: mol_type = other DNA
gacgggcagtaccgccagatagtcactgtggaagatgcggtgcgcggcggatgtaacctgttcgaccttgaccag

SEQ ID NO: 597314 - DNA, 75 bp, synthetic construct
  source 1..75: mol_type = other DNA
ttttacatgacccgcgacgacaggcgcgtctgttgttctggcagggattttccgtgccacaaatcgccgacacgc

SEQ ID NO: 597315 - DNA, 75 bp, synthetic construct
  source 1..75: mol_type = other DNA
tgtttatgaactgtttgtcgcgggcaaaggtaaaacgtttgaagctaaaccaaaaccggatgcggagatcgcctc

SEQ ID NO: 597316 - DNA, 75 bp, synthetic construct
  source 1..75: mol_type = other DNA
acaacgtgacttatatcggtatcgactcaaccggcgttggtcacggggtttacgagaacgtgaaagcattctttc

SEQ ID NO: 597317 - DNA, 75 bp, synthetic construct
  source 1..75: mol_type = other DNA
aggctgaagttcaggaagatgattcggaggaaatggaaggcgctgaacatccgaacaatgagaatgctggtaacg

SEQ ID NO: 597318 - DNA, 75 bp, synthetic construct
  source 1..75: mol_type = other DNA
tcacctgtcggtcgaccttgaaacgatgggaacaaatcctgatgcgccaatcaactctattggcggtaaattttt

SEQ ID NO: 597319 - DNA, 75 bp, synthetic construct
  source 1..75: mol_type = other DNA
catgtgtgaatttgttgacgacaaggcatcggtgttcccgttcgaggagttgcaacgctgcatggtcgacacgct

SEQ ID NO: 597320 - DNA, 75 bp, synthetic construct
  source 1..75: mol_type = other DNA
cagcacaaactgatccagtggagacggcggaatccaattctcaaaaaaatgaaatcctggtggaagctgaaccat

SEQ ID NO: 597321 - DNA, 75 bp, synthetic construct
  source 1..75: mol_type = other DNA
acctgctggcgcgccagtcggagcgccatgcgcggatcggcaagtttaacaacggcggcaacgaagccgacttaa

SEQ ID NO: 597322 - DNA, 75 bp, synthetic construct
  source 1..75: mol_type = other DNA
cgacagacctatttttccacgccatccagcctgacccacagtgcttatccgttctggtccggcgcgttgttcaac

SEQ ID NO: 597323 - DNA, 75 bp, synthetic construct
  source 1..75: mol_type = other DNA
ttgagcagtctttcgaatatcagttgcactggtatcgcgccgggcttgagcaccgcatccgcgatatcctgaaat

SEQ ID NO: 597324 - DNA, 75 bp, synthetic construct
  source 1..75: mol_type = other DNA
gtagctataccacgttacagcgtgttgcggggatcagtcgtacggggatgcagataaatcgccattcgctgacta

SEQ ID NO: 597325 - DNA, 75 bp, synthetic construct
  source 1..75: mol_type = other DNA
tgttgatcaaaataatttatatgtggctggatttgttaatacagcaacaaatactttctacagattttcagattt

SEQ ID NO: 597326 - DNA, 75 bp, synthetic construct
  source 1..75: mol_type = other DNA
aataaacaatattttatgggaaagtaatactgcagcagcttttctgaatcgaaaatctcagtctttatatgacac

SEQ ID NO: 597327 - DNA, 75 bp, synthetic construct
  source 1..75: mol_type = other DNA
caaaggggagcgcaaaaagccgaaaaagaattttttcagcgacgaggctatcgagaaactggaggaattattttt

SEQ ID NO: 597328 - DNA, 75 bp, synthetic construct
  source 1..75: mol_type = other DNA
caagaaacggaacagaacgaccagaaagcggaacaaaacagcccaaatgcgttacaaaacgagccagaaacgaaa

SEQ ID NO: 597329 - DNA, 75 bp, synthetic construct
  source 1..75: mol_type = other DNA
cactaacccggtgaacaccactgtggctatcgctgcagaagtgctgaaaaaagccggtgtttatgacaaaaacaa

SEQ ID NO: 597330 - DNA, 75 bp, synthetic construct
  source 1..75: mol_type = other DNA
ttgccgggctggaagagcgacgggtggcgttgatccgccaacaggcggcagaacaaaacaaagcgtatcagtccc

SEQ ID NO: 597331 - DNA, 75 bp, synthetic construct
  source 1..75: mol_type = other DNA
gacacagatagcaaccgccagggcgcgtgcggcggtatatcgtgcgcaacaggcggttgtggctgccagaggaac

SEQ ID NO: 597332 - DNA, 75 bp, synthetic construct
  source 1..75: mol_type = other DNA
atggtctggtttcaaatatttctgaggcactggccggaaacgttgtggactggagaaactgggggagttcgatcc

SEQ ID NO: 597333 - DNA, 75 bp, synthetic construct
  source 1..75: mol_type = other DNA
cgtacaacactggatgatctcagtgggcgttcttatgtaatgactgctgaagatgttgatcttacattgaactgg

SEQ ID NO: 597334 - DNA, 75 bp, synthetic construct
  source 1..75: mol_type = other DNA
cggccaggaagctcacgcccggatggatacgctgaagaggaaggatggcctgctgggaaccgactggcaggacgg

SEQ ID NO: 597335 - DNA, 75 bp, synthetic construct
  source 1..75: mol_type = other DNA
tattctcccgtgtatcacatcagtattcagaataaagggagcaatggcgagatagatacgcagtcagccaggggg

SEQ ID NO: 597336 - DNA, 75 bp, synthetic construct
  source 1..75: mol_type = other DNA
atttttatcagccagtaaaacgcaggcttacgtgttccgcgaatacatcatccagtttgcgcgattggtcgacgt

SEQ ID NO: 597337 - DNA, 75 bp, synthetic construct
  source 1..75: mol_type = other DNA
cggtatggctattcacaagaaatggcggcagacctatttttccacaccatccagtcttacccacagtgcttatcc

SEQ ID NO: 597338 - DNA, 75 bp, synthetic construct
  source 1..75: mol_type = other DNA
tgacgaagtcggtgcctactacacggaccgcattgcagtggaggccacccaggtacgttcactggagttctccct

SEQ ID NO: 597339 - DNA, 75 bp, synthetic construct
  source 1..75: mol_type = other DNA
gggagcatatgacgctggaaggtatggcaaaactctattgccgtgggcttgatgaccagtggccggaagaagcca

SEQ ID NO: 597340 - DNA, 75 bp, synthetic construct
  source 1..75: mol_type = other DNA
aatggaaccggatacaactgaacatggccagaacgcgcagtcgctggatgctcagtcgcaggtgagttccgctaa

SEQ ID NO: 597341 - DNA, 75 bp, synthetic construct
  source 1..75: mol_type = other DNA
tgcaacgctgcatggtcgacacgctggaagaatgggaagactatgcgccgtttgtcgcaaatccgttcggctcac

SEQ ID NO: 597342 - DNA, 75 bp, synthetic construct
  source 1..75: mol_type = other DNA
cggtatggctattcacaagaaatggcgacaaacctatttttccacgccatccagcctgacccacagtgcttatcc

SEQ ID NO: 597343 - DNA, 75 bp, synthetic construct
  source 1..75: mol_type = other DNA
ttcgaggagctgcaacgctgcatggtcgacacgctggaagaatgggaagactatgcgccgtttgccgcaaatccg

SEQ ID NO: 597344 - DNA, 75 bp, synthetic construct
  source 1..75: mol_type = other DNA
caggaattgttgcaggaagacatggcaacattcgacggccatatcgttgaagcgttgatgaaaatgccagaagtt

SEQ ID NO: 597345 - DNA, 75 bp, synthetic construct
  source 1..75: mol_type = other DNA
aggacgccctgaaaggtggctgcacattgttcgacattgagcagctcaaacgcgaaaacagcgccgacgatttta

SEQ ID NO: 597346 - DNA, 75 bp, synthetic construct
  source 1..75: mol_type = other DNA
ccgatctcgcctgggcaaccatgcacgtattaatcaatgagccgttaaccgccgccaccggtgagcagtcatcca

SEQ ID NO: 597347 - DNA, 75 bp, synthetic construct
  source 1..75: mol_type = other DNA
ggcgcgttctgttcgcgccgtgaatgaagatagtcaaccagaatgtcagataactggcgacaggcccgttataaa

SEQ ID NO: 597348 - DNA, 75 bp, synthetic construct
  source 1..75: mol_type = other DNA
gaagatagtcaaccagaatgtcagataactggcgacaggacccgttataaaaataaacaatacattatgggaaag

SEQ ID NO: 597349 - DNA, 75 bp, synthetic construct
  source 1..75: mol_type = other DNA
ctgggatgccttcgaccgcgcggtcgacagcaattacggtgttgaccaggcagcggcaaacctgagacagcgcct

SEQ ID NO: 597350 - DNA, 75 bp, synthetic construct
  source 1..75: mol_type = other DNA
aaggtaagctggatatgctgattgaaccgattatccaggaacatcaggccgaccaacttgcggcgttgtccgagc

SEQ ID NO: 597351 - DNA, 75 bp, synthetic construct
  source 1..75: mol_type = other DNA
aaggtaagctggatatgctgattgagccaattgtccaggaacatcaggccgaccaactggcggcattgtctgagc

SEQ ID NO: 597352 - DNA, 75 bp, synthetic construct
  source 1..75: mol_type = other DNA
caacccggcagatttgcgcattgatactttccgctcttcaggggcaggggggcagcacgttaacaccaccgattc

SEQ ID NO: 597353 - DNA, 75 bp, synthetic construct
  source 1..75: mol_type = other DNA
gcgcaaaccatcgctgaccaggaacgttttcgcgcattatctcgtgaatatgcgcagttaagtgatgtttcgcgc

SEQ ID NO: 597354 - DNA, 75 bp, synthetic construct
  source 1..75: mol_type = other DNA
atgaacgttcacagcataaaaacaaagcgaaggcgctttcagtgctcggtgctcgcatccatgcggcggaaatgg

SEQ ID NO: 597355 - DNA, 75 bp, synthetic construct
  source 1..75: mol_type = other DNA
gcagggtcgtattcatacttctgcttgtaccgttgcggtaatgccagaactgcctgatgcagaactgccggacat

SEQ ID NO: 597356 - DNA, 75 bp, synthetic construct
  source 1..75: mol_type = other DNA
agctgtgcgcatggatcaggcgtcggccgagcagacgaccaagctgtccattgccaagatggattgcccgaccga

SEQ ID NO: 597357 - DNA, 75 bp, synthetic construct
  source 1..75: mol_type = other DNA
gacggggttgccttgctcgacgtggccgaattcaacgcgctgcccggtcggggtgtgcaaggccaaatcaacggt

SEQ ID NO: 597358 - DNA, 75 bp, synthetic construct
  source 1..75: mol_type = other DNA
taaagcgtttgacgagtcaattgaaatcggcgtaatggtggaaacaccggctgccgcaacaattgcacgtcattt

SEQ ID NO: 597359 - DNA, 75 bp, synthetic construct
  source 1..75: mol_type = other DNA
agcccggtggctgtcagtgaacagggcgaggcactgccgcaggcgcaagccacggcaataatggcggggatccag

SEQ ID NO: 597360 - DNA, 75 bp, synthetic construct
  source 1..75: mol_type = other DNA
taacgacacccctaccctcgatagggcatgtgaaagaatgattccttatgcaaggtactcagtaccgcttttggt

SEQ ID NO: 597361 - DNA, 75 bp, synthetic construct
  source 1..75: mol_type = other DNA
atgtaaatcgcctgaagatgctgaaacgccagatgtatggtcgagcaggatttgaactactcaggcagagggtaa

SEQ ID NO: 597362 - DNA, 75 bp, synthetic construct
  source 1..75: mol_type = other DNA
atgaacacaacaaaaagcagatatccttcctggtgggcatattatcaccttgcccgcaatgcttatttcttatta

SEQ ID NO: 597363 - DNA, 75 bp, synthetic construct
  source 1..75: mol_type = other DNA
cgcaatggatccgcaggagtttgcccgcttcagtcaggtctggcaggaaaacgggctggatcacaactggctgcc

SEQ ID NO: 597364 - DNA, 75 bp, synthetic construct
  source 1..75: mol_type = other DNA
ctgatggcaacactgatggagtgcgacgaaaacaatcagccgctggcaggcgcatatatagaccgctccgggctg

SEQ ID NO: 597365 - DNA, 75 bp, synthetic construct
  source 1..75: mol_type = other DNA
gtgctgaacccggtaaaactgacctggcctgatctggatggcggcagccgcatgctgccgaattaccttgaggat

SEQ ID NO: 597366 - DNA, 75 bp, synthetic construct
  source 1..75: mol_type = other DNA
tcattggtcttggcgcggcgctggagtatgtttcggcgctggggcttaataacatagccgagtatgaacagaatc

SEQ ID NO: 597367 - DNA, 75 bp, synthetic construct
  source 1..75: mol_type = other DNA
gcttcgctgtttatcaatgcccgttccgcggaagaattggtgtttgtccgcggcaccacggaaggcattaacctg

SEQ ID NO: 597368 - DNA, 75 bp, synthetic construct
  source 1..75: mol_type = other DNA
cgcgcgagtttatggttgttggcaaggacgacggcttaagtgatagctgtccggcgctttctgtgcaatttttcc

SEQ ID NO: 597369 - DNA, 75 bp, synthetic construct
  source 1..75: mol_type = other DNA
atggcagcagaagtaccgttcctggccgccactcataaagcattcccgcgcatttttgcgcgccagaacgcacaa

SEQ ID NO: 597370 - DNA, 75 bp, synthetic construct
  source 1..75: mol_type = other DNA
atggcggcagaagttccgttcctggctgccactcataaagcattcccacgcatttttgcgcgccagaacgcacaa

SEQ ID NO: 597371 - DNA, 75 bp, synthetic construct
  source 1..75: mol_type = other DNA
ggcgggtggttttactctgccaaccacggtcatgccatttattctgcgtaatgtccgtttgcaaggggtggattc

SEQ ID NO: 597372 - DNA, 75 bp, synthetic construct
  source 1..75: mol_type = other DNA
tggcgggagaatccgtgccgctggctgaaaccggatgaaagtccggttctgatggcaacactgatggagtgcgac

SEQ ID NO: 597373 - DNA, 75 bp, synthetic construct
  source 1..75: mol_type = other DNA
gcggcccatgcgccgtttatttcacatccggacgagttttgtcatctgctggtggcgttgaagcagagggtgtag

SEQ ID NO: 597374 - DNA, 75 bp, synthetic construct
  source 1..75: mol_type = other DNA
ttgctgacgcatcaggtgaaaaagtgtgtccagagcggcatcaaagtgctgggactggcggcgctcgatagcagc

SEQ ID NO: 597375 - DNA, 75 bp, synthetic construct
  source 1..75: mol_type = other DNA
gacgcagctgctcatgaagttatcgaaggtcaggcttctgccctggaagaactggatgatgaatacctgaaagaa

SEQ ID NO: 597376 - DNA, 75 bp, synthetic construct
  source 1..75: mol_type = other DNA
atgcgtttcggcgccaccggcccgaaagcctcaccgcgtcatattgcgctggttgacgcgttctgcgcccgcctc

SEQ ID NO: 597377 - DNA, 75 bp, synthetic construct
  source 1..75: mol_type = other DNA
atgctatagctgcaggggccattctggtgaccaataatacgcgagagtttgagcgggtgccaaatttggtattag

SEQ ID NO: 597378 - DNA, 75 bp, synthetic construct
  source 1..75: mol_type = other DNA
catgcagttcgaccgcggctacctgagcccgtacttcgtcaacaaccagcagtcgatgtcggccgacctggatga

SEQ ID NO: 597379 - DNA, 75 bp, synthetic construct
  source 1..75: mol_type = other DNA
acgcggccaccgtatagtggtctcggccatcacctactctgaaatgcgcttcggggctaccggcccaaaggcctc

SEQ ID NO: 597380 - DNA, 75 bp, synthetic construct
  source 1..75: mol_type = other DNA
caatattaggtacattaagtattagctacgccagatactcctcccctaatatctatatgataacatatggatgtt

SEQ ID NO: 597381 - DNA, 75 bp, synthetic construct
  source 1..75: mol_type = other DNA
gatgccattctgccctgggaccgcgctgccgtggacgccaccacggagattaaaatggcactgcggctggccggg

SEQ ID NO: 597382 - DNA, 75 bp, synthetic construct
  source 1..75: mol_type = other DNA
gactgggaacatccggaaaataaccagttccattttactgaagaatttacggtattgcggtcaggcggtgttgaa

SEQ ID NO: 597383 - DNA, 75 bp, synthetic construct
  source 1..75: mol_type = other DNA
gaatttgaagaacaggttgaagcccgtaagctcagcgatatcccggatgcactggcggtaaacaagcatgctcag

SEQ ID NO: 597384 - DNA, 75 bp, synthetic construct
  source 1..75: mol_type = other DNA
cgccattgctaaaagaagataagaccaccaataaattcgggccgattgtccacgcttataccatgcagcgagcgg

SEQ ID NO: 597385 - DNA, 75 bp, synthetic construct
  source 1..75: mol_type = other DNA
tattgaagcgaaaagcccggctggtcatggcaagaaagggccaaccattgacgaggggatatcccagagtatccg

SEQ ID NO: 597386 - DNA, 75 bp, synthetic construct
  source 1..75: mol_type = other DNA
tggtgttatctggcataccacgggttccggcaaatcttacaccatggtgttcctcagtaaggcgctgattctaca

SEQ ID NO: 597387 - DNA, 75 bp, synthetic construct
  source 1..75: mol_type = other DNA
gataaactgctcaccgggtttgatgaaccgaagaataccgtgctgtatatcgacaaaccgcttaaatcccataat

SEQ ID NO: 597388 - DNA, 75 bp, synthetic construct
  source 1..75: mol_type = other DNA
atgaagaagacctatatgctcgacacctgtatctgctcgttcatcatgcgcgagcagccagaagctgtgctgaat

SEQ ID NO: 597389 - DNA, 75 bp, synthetic construct
  source 1..75: mol_type = other DNA
ttgataatttttcttcaggaggaagacctgtcattcttttctacattaaaaacagctttgtctttgaaggagaaa

SEQ ID NO: 597390 - DNA, 75 bp, synthetic construct
  source 1..75: mol_type = other DNA
cttgatcaggctgttaaggagcgcgataagtcaatcattgatcttaaccagaccattgagacgatgaataaagcg

SEQ ID NO: 597391 - DNA, 75 bp, synthetic construct
  source 1..75: mol_type = other DNA
cggcgggtaatgttcgccagcgtattcctgctgacactcagcggttgctccgggagtcgatcagcgaatttaacg

SEQ ID NO: 597392 - DNA, 75 bp, synthetic construct
  source 1..75: mol_type = other DNA
gtgccgcaaacagtatatgtggcccctacgccagctccggcttaccgtccacatccatatgttcgccacctcgcc

SEQ ID NO: 597393 - DNA, 75 bp, synthetic construct
  source 1..75: mol_type = other DNA
gtttgaagaaaactcaggtcaacagtttgaggggatgagaaataaggcaagagcaattaataaagggaatagatt

SEQ ID NO: 597394 - DNA, 75 bp, synthetic construct
  source 1..75: mol_type = other DNA
acctgatggggagagggggcaaattattttacctcctgccgcagaggacggtactatttcatttactattcgtaa

SEQ ID NO: 597395 - DNA, 75 bp, synthetic construct
  source 1..75: mol_type = other DNA
gcaggagttaccagtgaaattacattactggaaattcccggcgtgcttttttctgaggactacgccagcctcggc

SEQ ID NO: 597396 - DNA, 75 bp, synthetic construct
  source 1..75: mol_type = other DNA
atgtccccggtgtggcacaacgttaccgtggcgtgggatgcccctcggcagcgtcccaccgcctatgcgttggct

SEQ ID NO: 597397 - DNA, 75 bp, synthetic construct
  source 1..75: mol_type = other DNA
acgtcaggggctacgctcctgctcatgttgtacagccattcttcctgccgatgttccagtgtgcccacgttgtgg

SEQ ID NO: 597398 - DNA, 75 bp, synthetic construct
  source 1..75: mol_type = other DNA
atctacacaacgttaattcctgatgatcatgtgattttatctatcgaggcattcattgaataccttgaaaggctc

SEQ ID NO: 597399 - DNA, 75 bp, synthetic construct
  source 1..75: mol_type = other DNA
tgtcatcttattatggagtgaaggctcttatcccgtcgctgcggttatcttcctggccagtattatggtgccaac

SEQ ID NO: 597400 - DNA, 75 bp, synthetic construct
  source 1..75: mol_type = other DNA
gctggtgcgtatgggaggtttaatgagtatttatccggcaatgggtgcattaatgtttgctttagtcgtcataat

SEQ ID NO: 597401 - DNA, 75 bp, synthetic construct
  source 1..75: mol_type = other DNA
tttctgcaaagaaattagaagggctgataggtcttccaaaatcctctagcgcgatctctcgtaaagcaaggttag

SEQ ID NO: 597402 - DNA, 75 bp, synthetic construct
  source 1..75: mol_type = other DNA
tgtttctgaaaacccttgccgaaggtgtggcgatgttcaatgccagaacaggccgtgaaacagaaatgtgcgggg

SEQ ID NO: 597403 - DNA, 75 bp, synthetic construct
  source 1..75: mol_type = other DNA
cacgctgccggcaccagggatttcacccgcagtcaattcgcagcaactgttgaccggcagcttcaacggcaaaac

SEQ ID NO: 597404 - DNA, 75 bp, synthetic construct
  source 1..75: mol_type = other DNA
agatgcgttagcaatcaccggaaaaggaaaaatcatccgtaattttccgatgattcctggtatcgactttgccgg

SEQ ID NO: 597405 - DNA, 75 bp, synthetic construct
  source 1..75: mol_type = other DNA
cagccgtattctccctcgcgatgagtttgccgaatcccgtcctctggaaaaacaactctgggctggggcaattga

SEQ ID NO: 597406 - DNA, 75 bp, synthetic construct
  source 1..75: mol_type = other DNA
gagatctgcgaagcgcaatcaccttctcggaaaccctcgcgaaatttcgcagtcgcgacgccagagaccgagggt

SEQ ID NO: 597407 - DNA, 75 bp, synthetic construct
  source 1..75: mol_type = other DNA
agaccccctcaagcacccgcagtcattctacagtaaaaccccgcgctttcaatttcccgtatgtccggaaaactg

SEQ ID NO: 597408 - DNA, 75 bp, synthetic construct
  source 1..75: mol_type = other DNA
ccatctccgggccttcatcaagactgacagaagatcgttttgtcagtcagggtgagctggtcagagacaccgccc

SEQ ID NO: 597409 - DNA, 75 bp, synthetic construct
  source 1..75: mol_type = other DNA
ctttggtttctgaagtcaatacctacatcaatacccatcagtggcctggcaaagcggcgattggtcgtctgaaaa

SEQ ID NO: 597410 - DNA, 75 bp, synthetic construct
  source 1..75: mol_type = other DNA
ggaaaacgcgtgccaatcagcattgagcagcatgtctttaaataccacatcaccattcaatacttaggtgactga

SEQ ID NO: 597411 - DNA, 75 bp, synthetic construct
  source 1..75: mol_type = other DNA
gccagtgggggttggtgatgtgacgagtggtttactgctggtgaaactgttacagggtgtgacacttcaacaggc

SEQ ID NO: 597412 - DNA, 75 bp, synthetic construct
  source 1..75: mol_type = other DNA
caatgcaggaatatgaactgcaggtggttgccgcgcaagatcgtatagccaaaccggaacactatttcagcgcaa

SEQ ID NO: 597413 - DNA, 75 bp, synthetic construct
  source 1..75: mol_type = other DNA
atgcaggcgttacttttagaacagcaggacggtaaaaccctcgcatctgtacagactctggacgcaagtcgcctg

SEQ ID NO: 597414 - DNA, 75 bp, synthetic construct
  source 1..75: mol_type = other DNA
acttcgccaaagaagtcgaggtggagctgaaaggcgatccgatggtgcttcctaacggagccacgctttacttcc

SEQ ID NO: 597415 - DNA, 75 bp, synthetic construct
  source 1..75: mol_type = other DNA
ggatcggttatgacccgtcaaaaggtacgcaaaacggcgacagcgccgggtgcgtggtggtggcaccgccagccg

SEQ ID NO: 597416 - DNA, 75 bp, synthetic construct
  source 1..75: mol_type = other DNA
atggaaaaaacggtggaaacgaagagcgaagatgagtttgctcagtcagccaatgcggttaaggcgatgaaacaa

SEQ ID NO: 597417 - DNA, 75 bp, synthetic construct
  source 1..75: mol_type = other DNA
ccgatctggcatgggcaaccatgcacgcactgtttaacgaaccgctgcagggcgagtccgccaataccagcaata

SEQ ID NO: 597418 - DNA, 75 bp, synthetic construct
  source 1..75: mol_type = other DNA
cccaacggggccacactgtatttcctcggcaccaatgcccgcacggctcagagttaccacggcaacctgtatctg

SEQ ID NO: 597419 - DNA, 75 bp, synthetic construct
  source 1..75: mol_type = other DNA
acctgctggcgcgccagtcggagcgccacgcgcggatcggcaagtttaacaatggcggcaacgaagccgacttaa

SEQ ID NO: 597420 - DNA, 75 bp, synthetic construct
  source 1..75: mol_type = other DNA
caagcaacacaacaatctctgaaaggtgatgatcgtaataagtttatgagtgcctgcctcaagaaagccgcctga

SEQ ID NO: 597421 - DNA, 75 bp, synthetic construct
  source 1..75: mol_type = other DNA
ctgggtccagcgagccttgcggcggaacttcacgcgatcggcaatggcgctgactacgtccgcacccacgcgcct

SEQ ID NO: 597422 - DNA, 75 bp, synthetic construct
  source 1..75: mol_type = other DNA
cgctgaaatcccgatgttccttggctcgatgattatggggccgctcggtggtctggtgattaaatatatcgacaa

SEQ ID NO: 597423 - DNA, 75 bp, synthetic construct
  source 1..75: mol_type = other DNA
atctttgcttacctggcactgacgccgaaaggctcgttcctggcgacaattgccggtgttacggtaggtccctgg

SEQ ID NO: 597424 - DNA, 75 bp, synthetic construct
  source 1..75: mol_type = other DNA
cggcgcaggcgttgaaaggggatgctcgtaagacctacatgagtgattgcctgaagaacagcaagtctgcgcctg

SEQ ID NO: 597425 - DNA, 75 bp, synthetic construct
  source 1..75: mol_type = other DNA
cgcgacacgctacccggcgggctggcaatgtatcacccggaatggcatcagggcgtggttggtattctggcttcg

SEQ ID NO: 597426 - DNA, 75 bp, synthetic construct
  source 1..75: mol_type = other DNA
tgtttgtgatgctgcgtcagtcgccggaaggacgcacactcttttctcagcttttacatctaatgaatcgctatt

SEQ ID NO: 597427 - DNA, 75 bp, synthetic construct
  source 1..75: mol_type = other DNA
accaaaaatcctgcgccagattgagcgtcttccctggctgcgtttcgaactggtggagcatatccgtctgccgaa

SEQ ID NO: 597428 - DNA, 75 bp, synthetic construct
  source 1..75: mol_type = other DNA
ttgacaaaggcttttttaattcccgttttcaaatgcaaatgacattcgataacggtgcacccgatctcaatatca

SEQ ID NO: 597429 - DNA, 75 bp, synthetic construct
  source 1..75: mol_type = other DNA
ctacgcttcttgccctacgtcagcagccggaaattttgcgtcagattgaccgtcttccctggctgcgtttcgaac

SEQ ID NO: 597430 - DNA, 75 bp, synthetic construct
  source 1..75: mol_type = other DNA
ttgcagtgtgagcgcgtttatacctggcagccgatttaccagacttccggacgattgatggccgtggagctttta

SEQ ID NO: 597431 - DNA, 75 bp, synthetic construct
  source 1..75: mol_type = other DNA
ttgcaatgtgagcgagcttacacctggcagccgatttaccagacttccgggcgattgatggccgtggagctttta

SEQ ID NO: 597432 - DNA, 75 bp, synthetic construct
  source 1..75: mol_type = other DNA
caaagaagccttgttgcaggagatgccgccgtgggaagggggcggttctatgatcgccaccgtcagcctgagtga

SEQ ID NO: 597433 - DNA, 75 bp, synthetic construct
  source 1..75: mol_type = other DNA
atgactttttccgttgagaaggttcgggccgattttccggtgctctcgcgtgaggtgaacggtttgccgctggct

SEQ ID NO: 597434 - DNA, 75 bp, synthetic construct
  source 1..75: mol_type = other DNA
aaactgtatggtcccaccgggattggcattctgtatgtaaaagaagccttattgcaggagatgccgccgtgggaa

SEQ ID NO: 597435 - DNA, 75 bp, synthetic construct
  source 1..75: mol_type = other DNA
atgtcatcccagcactggcagcggcaaaagtgaacttagtgaataatgaactgacacaaccgctatttatcgccg

SEQ ID NO: 597436 - DNA, 75 bp, synthetic construct
  source 1..75: mol_type = other DNA
cgatttttacgtgttttccgggcataaactgtatggccccaccgtgattagacttgagataaatgacagggaata

SEQ ID NO: 597437 - DNA, 75 bp, synthetic construct
  source 1..75: mol_type = other DNA
ctggccatgtataacacccatgaagaagtggatcgtctggtaactggattgcaacgtattcatcgtctactgggg

SEQ ID NO: 597438 - DNA, 75 bp, synthetic construct
  source 1..75: mol_type = other DNA
cgcatgaaccacgactggattttgtgcggctggaacagatccgtcagcaagtggagattccgctggtgttgcatg

SEQ ID NO: 597439 - DNA, 75 bp, synthetic construct
  source 1..75: mol_type = other DNA
aactcgatgcgctaaaccagacgcgaaaagagatcgaacaaggaatgcaagttgaagccctgaccctgtgcgaga

SEQ ID NO: 597440 - DNA, 75 bp, synthetic construct
  source 1..75: mol_type = other DNA
ctggatctggtcgcgctggggacagtggcggacgtcgtgccgctggacgctaataatcgcattctgacctggcag

SEQ ID NO: 597441 - DNA, 75 bp, synthetic construct
  source 1..75: mol_type = other DNA
ggcgatcctttaaaaggatatccagcttggactggcaaagtatcgccatcgtggaaagtgcctgatcattacgaa

SEQ ID NO: 597442 - DNA, 75 bp, synthetic construct
  source 1..75: mol_type = other DNA
accgtttcgaagacggttacggcttaagtcctgaagtggtcgatcaagctcatgcgcgtggtgcgcagttgattg

SEQ ID NO: 597443 - DNA, 75 bp, synthetic construct
  source 1..75: mol_type = other DNA
tctggccaatgagcttgatgcgttaaaccagacacgtaaagagatcgaacagggaatgcaggtcgaagcattgac

SEQ ID NO: 597444 - DNA, 75 bp, synthetic construct
  source 1..75: mol_type = other DNA
agggatggtttgatgagcgtggcatcgcaatccccaatttggcggaattgctggatctggtcgctctggggactg

SEQ ID NO: 597445 - DNA, 75 bp, synthetic construct
  source 1..75: mol_type = other DNA
cgtgctgcgacaggcaccagataaagccatttggttaggctggagtctgggcgggctggtggcaagccagattgc

SEQ ID NO: 597446 - DNA, 75 bp, synthetic construct
  source 1..75: mol_type = other DNA
atgaaaaaaggcaccgttcttaattctgatatttcttcggtgatctcccgtctgggacataccgatacgttggtg

SEQ ID NO: 597447 - DNA, 75 bp, synthetic construct
  source 1..75: mol_type = other DNA
ccgggtacttatcgttatggcggcgtgggaagtttgatttcgttagtacaatcgctggctcgcgagtacaaccta

SEQ ID NO: 597448 - DNA, 75 bp, synthetic construct
  source 1..75: mol_type = other DNA
tagttactcttgctaagagcataaaggataaaggttgggttgttattgtaaaacaacatcctttggaagagtcta

SEQ ID NO: 597449 - DNA, 75 bp, synthetic construct
  source 1..75: mol_type = other DNA
tgaagattttgaggcattgaacagattagccaatagagctaataagttttctcgttctcgagattattataatca

SEQ ID NO: 597450 - DNA, 75 bp, synthetic construct
  source 1..75: mol_type = other DNA
ctgcagtatcgcgggcagttcgatgtagttcgccctgtagtacgcaagctcgtttctgagatgagacagaatcct

SEQ ID NO: 597451 - DNA, 75 bp, synthetic construct
  source 1..75: mol_type = other DNA
tcgctggtgacaaggagtgctacgaaggagtggtaaggctgacgaaagacggtcagcgccttcgtaacatgatca

SEQ ID NO: 597452 - DNA, 75 bp, synthetic construct
  source 1..75: mol_type = other DNA
gatagccggagagcatattccaatcgttccagtgtatggcgaatggtcattcgctggtgacaaggagtgctacga

SEQ ID NO: 597453 - DNA, 75 bp, synthetic construct
  source 1..75: mol_type = other DNA
gcaggtgcgggtaacgaagagcgtgttgatgcgctggttgccgcaggtgttgatgttctgctgatcgactcctct

SEQ ID NO: 597454 - DNA, 75 bp, synthetic construct
  source 1..75: mol_type = other DNA
gttgatggggatgtatcgtactgatatgcgccataacacggcaaagattgccgttaacgttggcgttcgtgagca

SEQ ID NO: 597455 - DNA, 75 bp, synthetic construct
  source 1..75: mol_type = other DNA
cagaatccgaacgacacatggctgtttccgtgggtatcgaatgatgtcgtctacgtcgctgagtattacgaggta

SEQ ID NO: 597456 - DNA, 75 bp, synthetic construct
  source 1..75: mol_type = other DNA
cctcttgctgtatggcataactattctgcagggccggatactgccgaagattattatacaacatactcaccatta

SEQ ID NO: 597457 - DNA, 75 bp, synthetic construct
  source 1..75: mol_type = other DNA
tgtggtgaaataatctggatgcatcccgaaaaccggccttatctgcgcgcgctttatgcagcaattctcgcaaat

SEQ ID NO: 597458 - DNA, 75 bp, synthetic construct
  source 1..75: mol_type = other DNA
gcaactggggcagctcattatctgcttctacatcacctgtattctgttcgtagtactggtactgggttccattgc

SEQ ID NO: 597459 - DNA, 75 bp, synthetic construct
  source 1..75: mol_type = other DNA
aggtaaaaaagtattattcatagatactgatatgcgtaaaggatatacacacaaactttttaataaaaataatga

SEQ ID NO: 597460 - DNA, 75 bp, synthetic construct
  source 1..75: mol_type = other DNA
acggcattccacgcctgatgcacgcagatcagaagatcgatatcgccggtgcatctatgactttctctatgttcg

SEQ ID NO: 597461 - DNA, 75 bp, synthetic construct
  source 1..75: mol_type = other DNA
tgcagcaaccttcgaagaatgcgttgcgaaactgcgtattctggctggtgacgtagacgttgataaattcctggc

SEQ ID NO: 597462 - DNA, 75 bp, synthetic construct
  source 1..75: mol_type = other DNA
actcaacgccgcgaagattgcagaaatcttcaacaatatggacctcgacaagcaggcagaattgcgtgagtacct

SEQ ID NO: 597463 - DNA, 75 bp, synthetic construct
  source 1..75: mol_type = other DNA
caaaaccacgaaaaaaattaaattcatggtgacaagcccggactttgtcgcgattgacggcgtgccgtacctgtc

SEQ ID NO: 597464 - DNA, 75 bp, synthetic construct
  source 1..75: mol_type = other DNA
gcggatgtggaagtcgaagtcgattcccagagctttaaaaagtttaccgccgttgcccgtgccgcaggttcctgg

SEQ ID NO: 597465 - DNA, 75 bp, synthetic construct
  source 1..75: mol_type = other DNA
ggggttttcccgccctgtcgaaaaaagcgcatttctttaattcaggggaagccatatcgctatgcggtaaatgga

SEQ ID NO: 597466 - DNA, 75 bp, synthetic construct
  source 1..75: mol_type = other DNA
taagcattgacaccgagagcgcagatctgaccacgcacaaaatcaagtacgtggtggcaagccctgactttgtgc

SEQ ID NO: 597467 - DNA, 75 bp, synthetic construct
  source 1..75: mol_type = other DNA
gcggcgcgtttgatatcaactacgacgggatcatgatccacgtggaaagcgccacagtcaccatcaccgacaaca

SEQ ID NO: 597468 - DNA, 75 bp, synthetic construct
  source 1..75: mol_type = other DNA
atggtgacaagcccggactttgtcgcgattgacggcgtgccgtacctgtcagcccgtgacactcgagatctgaaa

SEQ ID NO: 597469 - DNA, 75 bp, synthetic construct
  source 1..75: mol_type = other DNA
gcgctaatcctgatgctgccgatgtgttgatggggatgtatcgtactgatatgcgccataacacggcaaaaattg

SEQ ID NO: 597470 - DNA, 75 bp, synthetic construct
  source 1..75: mol_type = other DNA
gcgctaatcctgatgctgccgatgtgttgatgggaatgtatcgtactgatatgcgccataacacggcaaagattg

SEQ ID NO: 597471 - DNA, 75 bp, synthetic construct
  source 1..75: mol_type = other DNA
tctaccgcgacccgctgacaggtgagccggtcagctatttccagcaggatatcaaagacgtcatcgacgacctgg

SEQ ID NO: 597472 - DNA, 75 bp, synthetic construct
  source 1..75: mol_type = other DNA
ttcgcccggtggtcaggaaactggtcgcagagatgcgccggaaccctatcgacgttctcttccgaccaaaagacg

SEQ ID NO: 597473 - DNA, 75 bp, synthetic construct
  source 1..75: mol_type = other DNA
tgagccagtcagctattaccagcaggatatcaaagacgtcatcgacgacctggctaatcgtggattcattaaggt

SEQ ID NO: 597474 - DNA, 75 bp, synthetic construct
  source 1..75: mol_type = other DNA
aacgcttacatgcttgaggctgccaccaacgcagtgaaagaggtggctagtcttggcgtggatgcgcaggcagca

SEQ ID NO: 597475 - DNA, 75 bp, synthetic construct
  source 1..75: mol_type = other DNA
tatttccggatacctggtttggcccattactgggggagtttgaagaagtgcttgatgcatacgacactgatgaaa

SEQ ID NO: 597476 - DNA, 75 bp, synthetic construct
  source 1..75: mol_type = other DNA
ctaaaaggtaatgctttcactctggtgctgcgcgatgtaagcaaccgtgacgatgttgaacaacgtctcatcgat

SEQ ID NO: 597477 - DNA, 75 bp, synthetic construct
  source 1..75: mol_type = other DNA
cgtgccgggtaaagagatgcccgatttgagcgctttccaactggaaggttgccaggtgctggagtatgcgcggca

SEQ ID NO: 597478 - DNA, 75 bp, synthetic construct
  source 1..75: mol_type = other DNA
ccaacgcctggagggttcatatatctattatccgcaccgcaatgtgtcacccgccctacgagcggttatcgatac

SEQ ID NO: 597479 - DNA, 75 bp, synthetic construct
  source 1..75: mol_type = other DNA
tgcgtgagccgaaatatggcgctgcggcggacaaagttcccgccgatcaactgcgtaaaggcgatatcgtactgg

SEQ ID NO: 597480 - DNA, 75 bp, synthetic construct
  source 1..75: mol_type = other DNA
cgtagaaatccgtttctggcttccggcgggaagttttgcgaccagcgttgtcagggaacttatcaacacaacagg

SEQ ID NO: 597481 - DNA, 75 bp, synthetic construct
  source 1..75: mol_type = other DNA
aaaagttgaagccgcgcgcagagcgatgttgctgtatccgcaacaattaagctggaattggtgggatgacgtcac

SEQ ID NO: 597482 - DNA, 75 bp, synthetic construct
  source 1..75: mol_type = other DNA
attacagaatctggcgggagcggtctggcatcagcatccggagatggcattgattcgttcagttctgaaaacagc

SEQ ID NO: 597483 - DNA, 75 bp, synthetic construct
  source 1..75: mol_type = other DNA
aacctggcggagctgcgtcaggcaattgaaactgccgtgccgcacgggcgtactaccgggcgttgtaaacgtgat

SEQ ID NO: 597484 - DNA, 75 bp, synthetic construct
  source 1..75: mol_type = other DNA
aatgagccgtactaaagcgaaaaaactgtcagcgtggaagatcaaattcgtgccaccgcgcatgtggaatgccgt

SEQ ID NO: 597485 - DNA, 75 bp, synthetic construct
  source 1..75: mol_type = other DNA
atggcgaaacgggaaaactataacgatctctatctgtttatgaaggtcgtgcgagaagggagttttaccgccgcc

SEQ ID NO: 597486 - DNA, 75 bp, synthetic construct
  source 1..75: mol_type = other DNA
aacgtctgcagggcacagaggctcagcaactggcagcggtgatggccgggcagttgttgccggagggggcgacag

SEQ ID NO: 597487 - DNA, 75 bp, synthetic construct
  source 1..75: mol_type = other DNA
tactgagacaaccgccccggaggttgcacaccagtcagaacgtctgcctgaaggtttttatatgccccggactgc

SEQ ID NO: 597488 - DNA, 75 bp, synthetic construct
  source 1..75: mol_type = other DNA
gctgatccacgcactgccgggctgacagagcaactggcaaagggatatgtggatctgcttgatggtctgccgttt

SEQ ID NO: 597489 - DNA, 75 bp, synthetic construct
  source 1..75: mol_type = other DNA
tcgcttctccggcgacatcgccaaagctatcgccgctggcgcaagcgcggtgatggtaggttccatgctggcggg

SEQ ID NO: 597490 - DNA, 75 bp, synthetic construct
  source 1..75: mol_type = other DNA
gaaatgtcgaaatatggcaggtaactatgtctggccctggatattgccgttttcagcggcaggaatgaaacacac

SEQ ID NO: 597491 - DNA, 75 bp, synthetic construct
  source 1..75: mol_type = other DNA
agacgctttctgagaaaattgtacagaaatgcagaaatattaacggtgaatatgtctggccccgacaggcgccgg

SEQ ID NO: 597492 - DNA, 75 bp, synthetic construct
  source 1..75: mol_type = other DNA
gaaatgcagaaatattaacggtgaatatgtctggccctggatattgccgttttcagcggcaggaatgaaaaacac

SEQ ID NO: 597493 - DNA, 75 bp, synthetic construct
  source 1..75: mol_type = other DNA
ctattatgcaacatatcacccattatggagagaacatccagaagtattgctgtttataaactggctatacaatca

SEQ ID NO: 597494 - DNA, 75 bp, synthetic construct
  source 1..75: mol_type = other DNA
atgactggcaaattacgctttgaagtgaacgataaccagggctgtttcatatttccggaaacctggtttggctcg

SEQ ID NO: 597495 - DNA, 75 bp, synthetic construct
  source 1..75: mol_type = other DNA
aacgtatcatgataaaaatgatgggaatgtcaatgctgaaaaatggtatgagtttcaaactaaaattataaaagg

SEQ ID NO: 597496 - DNA, 75 bp, synthetic construct
  source 1..75: mol_type = other DNA
atgagcacacgtaagaaaaaaacgacggtttctgacgaggccgtgatgaatgctatccgggatgcacttgaagac

SEQ ID NO: 597497 - DNA, 75 bp, synthetic construct
  source 1..75: mol_type = other DNA
tgtctgtcgatgacttccagcgtctgtcgctggctacagagatgcacgacatggctgtggcggcatcgctgacgc

SEQ ID NO: 597498 - DNA, 75 bp, synthetic construct
  source 1..75: mol_type = other DNA
tgtggtgactgatccgcagactgttctgccaaccacgacgctgcgcgaagtgaaagaactgaccgagcgtaacgg

SEQ ID NO: 597499 - DNA, 75 bp, synthetic construct
  source 1..75: mol_type = other DNA
ggtttagataacgaaacgatttcaaacattcacgataaaattttaaaaagaacactgtatgataaaaatgatggg

SEQ ID NO: 597500 - DNA, 75 bp, synthetic construct
  source 1..75: mol_type = other DNA
tagctttattaattttgctaaagcatatatgttgcatgtgcattcattcaataaatctaagacgaaacactcaac

SEQ ID NO: 597501 - DNA, 75 bp, synthetic construct
  source 1..75: mol_type = other DNA
caagcgtaaactgcgtttaggggcgctgaaaggcaacgcctttaccctggtgctgcgagaagtgagcaatcgcga

SEQ ID NO: 597502 - DNA, 75 bp, synthetic construct
  source 1..75: mol_type = other DNA
atgattgagtttgataatctcacttacctccacggtaaaccgcaaggcaccgggctgctgaaagccaatccggaa

SEQ ID NO: 597503 - DNA, 75 bp, synthetic construct
  source 1..75: mol_type = other DNA
ttccgggtgacggatgaggcgacccggtgctggctggaagagtttttatcgtggcatggtggttaccgtgccttt

SEQ ID NO: 597504 - DNA, 75 bp, synthetic construct
  source 1..75: mol_type = other DNA
atgtcggtgctggcagatggtgtgctggtggcgatggcgctggttgtgctccgacctttactgcgcaaatctgaa

SEQ ID NO: 597505 - DNA, 75 bp, synthetic construct
  source 1..75: mol_type = other DNA
agaaaaacacagttcttacgggctgtgtttcatttacactaatgatggcattttcgaaccaatcatttgccatga

SEQ ID NO: 597506 - DNA, 75 bp, synthetic construct
  source 1..75: mol_type = other DNA
tacatgcctttggcggtgaaggcccaattatcattggtggcgtacgcattccttacgaaaaaggattgctggcgc

SEQ ID NO: 597507 - DNA, 75 bp, synthetic construct
  source 1..75: mol_type = other DNA
agccatcacggacacaccactgacggaaagagagaagcagttcattaacagcacttccattcccatcctgtcctg

SEQ ID NO: 597508 - DNA, 75 bp, synthetic construct
  source 1..75: mol_type = other DNA
gcgtggcgtcgctgtggggggaaagtcagcagaacgtctgtcagtctgttgccggccagaataacgtgttttcgg

SEQ ID NO: 597509 - DNA, 75 bp, synthetic construct
  source 1..75: mol_type = other DNA
attatggcgtttgtgaagcagacaatggccaacgcggcggggtattttttcgacctcgcgctcgaaaccacggtg

SEQ ID NO: 597510 - DNA, 75 bp, synthetic construct
  source 1..75: mol_type = other DNA
cgcaatgtccaaaggttcctctgaccgttatttccagagcgataacgctgccgacaaactggtgccggaaggtat

SEQ ID NO: 597511 - DNA, 75 bp, synthetic construct
  source 1..75: mol_type = other DNA
aacaatgtaagagtgggagtgacgggcactggctggcaatgtctagcaacggcaggcatttcggctgagggtaaa

SEQ ID NO: 597512 - DNA, 75 bp, synthetic construct
  source 1..75: mol_type = other DNA
ctacgccgtaccggcgtttaacatccacaacgccgaaacgatccaggcgatcctcgaagtgtgcagcgaaatgcg

SEQ ID NO: 597513 - DNA, 75 bp, synthetic construct
  source 1..75: mol_type = other DNA
aaaacccgccagaatgaacatccgcacctccctgttgaaagtcgtcgtcaggccaaaggtacccgcttcctgtgg

SEQ ID NO: 597514 - DNA, 75 bp, synthetic construct
  source 1..75: mol_type = other DNA
caccaataaatttggcccgatcgtccatgcttataccatgcaacgggcggtggaagatcaggccgttacaccgct

SEQ ID NO: 597515 - DNA, 75 bp, synthetic construct
  source 1..75: mol_type = other DNA
aatgagttttgtgagacggggtgcgccttcctgaaagccttactgagaacccggctgagacttaaaagaaccgac

SEQ ID NO: 597516 - DNA, 75 bp, synthetic construct
  source 1..75: mol_type = other DNA
cccacatccgtatgttcgtcaccttgccagcgtaggcgaagggatggttatcgaacatcaaatcgacgaccatca

SEQ ID NO: 597517 - DNA, 75 bp, synthetic construct
  source 1..75: mol_type = other DNA
atgaaccagacgtacacaccaaaattccaggaagaatacagcgccaaaattccggcgctgacgttattgaccagc

SEQ ID NO: 597518 - DNA, 75 bp, synthetic construct
  source 1..75: mol_type = other DNA
gactgggaacatccggaaaataaccagttccattttaccgaagaatttacggtattgcggtcaggcggtgtcgaa

SEQ ID NO: 597519 - DNA, 75 bp, synthetic construct
  source 1..75: mol_type = other DNA
aaagatattgacgggctgtacagcgccatgagctctgaatacaagcgcctgccgcatctgtataaccagctgtgg

SEQ ID NO: 597520 - DNA, 75 bp, synthetic construct
  source 1..75: mol_type = other DNA
atgcgtaaatattatcccctctttaagaaaagcactgtcctcaagggctgtgttttattcacatttataatggca

SEQ ID NO: 597521 - DNA, 75 bp, synthetic construct
  source 1..75: mol_type = other DNA
tgcgtcatcgcgtctcgaatggaaatgcggaggcgctgaacagcaagatcagactgctgaggataaaggccaggg

SEQ ID NO: 597522 - DNA, 75 bp, synthetic construct
  source 1..75: mol_type = other DNA
gggctatataagagcagcgcgcatccacttacccagcgcggttgagaaaatcgcctttgaccgcttccatgtggc

SEQ ID NO: 597523 - DNA, 75 bp, synthetic construct
  source 1..75: mol_type = other DNA
agtgcaacgaatgtttagatcattggctaagggccggacacgccgaaaggctgaacgaaacagaaaatcaaaaat

SEQ ID NO: 597524 - DNA, 75 bp, synthetic construct
  source 1..75: mol_type = other DNA
cccgcgttatgtgcccggagcatggctgccagactctgcctgtaccgtgggcaggttccggcagtcggtacactc

SEQ ID NO: 597525 - DNA, 75 bp, synthetic construct
  source 1..75: mol_type = other DNA
atgcgtaaatattatcccctctttaagaaaagcaccgtccttaagggcggtgttttattcacacttataatggca

SEQ ID NO: 597526 - DNA, 75 bp, synthetic construct
  source 1..75: mol_type = other DNA
gttttcaactacatcgttgaaggtgataaagcttacatcagggttaagccagaaccgcctaagctaccgcgtagg

SEQ ID NO: 597527 - DNA, 75 bp, synthetic construct
  source 1..75: mol_type = other DNA
tctactctatgttgcgcgcaatatggcggcatcttttgctacggtgcatgaacatgggcacgtcgtgggtgacgt

SEQ ID NO: 597528 - DNA, 75 bp, synthetic construct
  source 1..75: mol_type = other DNA
tggagacggatattgcccatttccgttatgcctacgcgtcagacaaccagcgacgtggtttaaaaccgccgccac

SEQ ID NO: 597529 - DNA, 75 bp, synthetic construct
  source 1..75: mol_type = other DNA
tgcagcgattccgccttcatgctccagcacggaccatgccgttgatggaaccgttacgtcaggcggcagaaaaac

SEQ ID NO: 597530 - DNA, 75 bp, synthetic construct
  source 1..75: mol_type = other DNA
ctgactgcccgtggtgtgcgctggataatcaaggcgttatctattttattgatctcggtgaagaggtcattacca

SEQ ID NO: 597531 - DNA, 75 bp, synthetic construct
  source 1..75: mol_type = other DNA
aatgaccgccaaacgacatcggctggaatcggcgttgactgtcggcgcgacagagttgcagcgattccgccttca

SEQ ID NO: 597532 - DNA, 75 bp, synthetic construct
  source 1..75: mol_type = other DNA
atctgacccaggcggttatcgactggaaagcgagctgtgaacgccgttttgtgttcaggccgaacgaagcggtaa

SEQ ID NO: 597533 - DNA, 75 bp, synthetic construct
  source 1..75: mol_type = other DNA
ccatcgatatctggtcagatttggtctgcccgtggtgctggattgctaaaaaaagatttgaacagggtctgaatc

SEQ ID NO: 597534 - DNA, 75 bp, synthetic construct
  source 1..75: mol_type = other DNA
aagcagaatattttgctgaaaaatgacgttggccaacgcgggcagataacacgaaatcctgcgaactggcaaaat

SEQ ID NO: 597535 - DNA, 75 bp, synthetic construct
  source 1..75: mol_type = other DNA
cgcgctggcgtgctggggtatcgacagataagcagaatattttgctgaaaaataaggcatggccacgcgggcgga

SEQ ID NO: 597536 - DNA, 75 bp, synthetic construct
  source 1..75: mol_type = other DNA
ctacaggtgaattgaccactcttggccgtgaactgggcaaaggtggtgaaggcgcggtttatgatatcgaggagt

SEQ ID NO: 597537 - DNA, 75 bp, synthetic construct
  source 1..75: mol_type = other DNA
catgtttcagcaggcattcacggaaagtggcgtggcaaccgggcgtccgacggcaaaagcgtgggtagcggcact

SEQ ID NO: 597538 - DNA, 75 bp, synthetic construct
  source 1..75: mol_type = other DNA
cgcactgtcagcgttatcgctgttgctttgcggccttcaggcagaaccgcgttatatcattttggttcctgtgct

SEQ ID NO: 597539 - DNA, 75 bp, synthetic construct
  source 1..75: mol_type = other DNA
atgatctatagcccggcacatcgtcgtcaacgttaccctcattgtgcgtgggattttctactctatgttgcgcgc

SEQ ID NO: 597540 - DNA, 75 bp, synthetic construct
  source 1..75: mol_type = other DNA
cacggcgctcattggggcctgggttctttttatcattacagccatcagggaccggaagtgaccctgatcaccgcg

SEQ ID NO: 597541 - DNA, 75 bp, synthetic construct
  source 1..75: mol_type = other DNA
ggttctgaaaacgctcaatgagaagagcaatgcgctggtttttgaagcgaaggataagaaagatccagagccgaa

SEQ ID NO: 597542 - DNA, 75 bp, synthetic construct
  source 1..75: mol_type = other DNA
gttgatctgacgtcggcgggaatgcgtgtagagatgggctcgttgacaacattgctcagcggcggtgtcagcttt

SEQ ID NO: 597543 - DNA, 75 bp, synthetic construct
  source 1..75: mol_type = other DNA
ctgggcttgtcagcggtggcgctacagtagccgacaataaagtgataacacaaggcaatcagcttattgaaggta

SEQ ID NO: 597544 - DNA, 75 bp, synthetic construct
  source 1..75: mol_type = other DNA
ctctgcggtcgatcaccgactggcagaactgacaatgaacaagctttacgatcgtattcccgcttcagtctggaa

SEQ ID NO: 597545 - DNA, 75 bp, synthetic construct
  source 1..75: mol_type = other DNA
ttgcgagaactgcaaccggtgctgaaaacgctcaacgagaagagtaacgcgctggtatttgaagcgaaggacaaa

SEQ ID NO: 597546 - DNA, 75 bp, synthetic construct
  source 1..75: mol_type = other DNA
caccgactggcagaactaaccatgaacaaactttacgatcgcgttccggcttctgtctggaaatatgtcacctga

SEQ ID NO: 597547 - DNA, 75 bp, synthetic construct
  source 1..75: mol_type = other DNA
tggagaaggatattgctcatttccgttatgcctatgcatcagacaatcagcgacgtggcttaaaaccgccgccac

SEQ ID NO: 597548 - DNA, 75 bp, synthetic construct
  source 1..75: mol_type = other DNA
caaccgactggcaggccgcttccttcaggcctgttacggcgcgaatacatcattctgcttgagatcgcactgtca

SEQ ID NO: 597549 - DNA, 75 bp, synthetic construct
  source 1..75: mol_type = other DNA
ctcagattggtcgagaaggaattagcggtctggggacattgctttctggggtttatatcgaactgcagccagggg

SEQ ID NO: 597550 - DNA, 75 bp, synthetic construct
  source 1..75: mol_type = other DNA
ccgggagctccggtagaattccggggtattcgcctgggtaccgtaagcaaagtgccattctttgcgccgaatatg

SEQ ID NO: 597551 - DNA, 75 bp, synthetic construct
  source 1..75: mol_type = other DNA
tacgcaaaaacgcaatatcagctatcaactgttcatcaatgcaccttatgaccgactggtgaccagcaatgttcg

SEQ ID NO: 597552 - DNA, 75 bp, synthetic construct
  source 1..75: mol_type = other DNA
ggcactggtggcgtttcaaaaaacctttaatttgcgcctcgaccaacgtagctacattaccgaagaagacgcgcg

SEQ ID NO: 597553 - DNA, 75 bp, synthetic construct
  source 1..75: mol_type = other DNA
tcgcccgcttcaggccggcgcctttaactacaccctgaaccgtgacagcgatgaagactggtacctgcgcagtga

SEQ ID NO: 597554 - DNA, 75 bp, synthetic construct
  source 1..75: mol_type = other DNA
aggggaacaggctgcaggccggtgcctttaactactccctcaaccgggacagtgatgagagctggtatctgcgca

SEQ ID NO: 597555 - DNA, 75 bp, synthetic construct
  source 1..75: mol_type = other DNA
agccgtcaacctgaatgaaggcacgctgacgctgaacgacagtaccgtcaccacggatgtcattgctcagcgcgg

SEQ ID NO: 597556 - DNA, 75 bp, synthetic construct
  source 1..75: mol_type = other DNA
accctgcgcgacagtgcaaaacaccgtgtgcgtgaactgccggtgaactggtgggtacagccttctgttatccgc

SEQ ID NO: 597557 - DNA, 75 bp, synthetic construct
  source 1..75: mol_type = other DNA
ggtgaactggtgggtacagccttctgttatccgcaccttcagctcccggggagacatgagcatgggtacagccgc

SEQ ID NO: 597558 - DNA, 75 bp, synthetic construct
  source 1..75: mol_type = other DNA
ccaggataacgccggttatgtgaagttcgggcatggcagtacacaacatgtgcgtgccggcttccgtctgggcag

SEQ ID NO: 597559 - DNA, 75 bp, synthetic construct
  source 1..75: mol_type = other DNA
ccatcagtaccggtctggagtacggaccggacaatgaggccaataccggcgggcaatgggtacaggatggcggaa

SEQ ID NO: 597560 - DNA, 75 bp, synthetic construct
  source 1..75: mol_type = other DNA
acaacggcggtattgcccgtggggccacgccggaaagcagcggcagctatggcttcgtccgtctggagggtgacc

SEQ ID NO: 597561 - DNA, 75 bp, synthetic construct
  source 1..75: mol_type = other DNA
ctgacagtattgtacaggcaggtgaaaccgtgaacggcggaacactggaaaatcatgacaaccagattgtcctcg

SEQ ID NO: 597562 - DNA, 75 bp, synthetic construct
  source 1..75: mol_type = other DNA
aacgataccctgaccatccgtgaaggcgatgcactcctgcagggaggctctctcaccggtaacggcagcgtggaa

SEQ ID NO: 597563 - DNA, 75 bp, synthetic construct
  source 1..75: mol_type = other DNA
acctgcaggccggactggaagcccgtatccgggaaaatatcaccctgggcgttcagggcggttatgcccacagcg

SEQ ID NO: 597564 - DNA, 75 bp, synthetic construct
  source 1..75: mol_type = other DNA
ggtgaactggtgggtacagccttctgttatccgcaccttcagctcccggggtgacatgagcatggggacagccgc

SEQ ID NO: 597565 - DNA, 75 bp, synthetic construct
  source 1..75: mol_type = other DNA
gccgccaccaccgtatccatggggaatggcggtgtactgctggccgattccggtgccgctgtcagtggtactcgg

SEQ ID NO: 597566 - DNA, 75 bp, synthetic construct
  source 1..75: mol_type = other DNA
gcgtcgatactaatcacgccgaacgcgataaacatcttcgcagtgcagatttcctcaataccgcaaaatatccac

SEQ ID NO: 597567 - DNA, 75 bp, synthetic construct
  source 1..75: mol_type = other DNA
ggaaaacactggtggatgacggcggtaccctggcagtgtctgccggtggtaaggcgacaagtgtcaccataacat

SEQ ID NO: 597568 - DNA, 75 bp, synthetic construct
  source 1..75: mol_type = other DNA
tcaccctgggcgttcaggccggttatgcccacagcatcaacggcagcagcgctgaaggctatagcggtcaggcca

SEQ ID NO: 597569 - DNA, 75 bp, synthetic construct
  source 1..75: mol_type = other DNA
acttccgcgcccggggctggggctggctgggttcgctggaaaccggtctgcccttcagtatcactgacaacctga

SEQ ID NO: 597570 - DNA, 75 bp, synthetic construct
  source 1..75: mol_type = other DNA
cgaactggatattaccggcgatctgacgctgaatggtgtaaccaaacccgtcacgctggaagcgaaattaattgg

SEQ ID NO: 597571 - DNA, 75 bp, synthetic construct
  source 1..75: mol_type = other DNA
tccggcgcagtggcaaccgacacggttgtgaataccggcgcggaagggggaccggatgcggaaaatggtgatacc

SEQ ID NO: 597572 - DNA, 75 bp, synthetic construct
  source 1..75: mol_type = other DNA
acttccgcgcacggggccggggctggctgggctcactggaaaccggtctgcccttcagtatcactgacaacctga

SEQ ID NO: 597573 - DNA, 75 bp, synthetic construct
  source 1..75: mol_type = other DNA
cgccaggttggcattcttttccaggatgcgctgttatttgaccagttcagcgtcgggcaaaatttactgctggcg

SEQ ID NO: 597574 - DNA, 75 bp, synthetic construct
  source 1..75: mol_type = other DNA
cgtcattaatgagaagggctggcaggtcgtcaaacccggcgcagtggcaacagacaccgttgtgaataccggcgc

SEQ ID NO: 597575 - DNA, 75 bp, synthetic construct
  source 1..75: mol_type = other DNA
gtctggcactgttgtaaacagtgacggctggcagattgtcaaaaacgggggtgtggccgggaataccaccgttaa

SEQ ID NO: 597576 - DNA, 75 bp, synthetic construct
  source 1..75: mol_type = other DNA
tcactgacgacaggagtgtatggtgctgcaggccattcttccgttgatgttaagaatgatgacggctcccgtgcc

SEQ ID NO: 597577 - DNA, 75 bp, synthetic construct
  source 1..75: mol_type = other DNA
aactgaccaccaataacctcaccggtcagggtggcaccatcaatatgcgtgttcgccttgatggcagcaatgcct

SEQ ID NO: 597578 - DNA, 75 bp, synthetic construct
  source 1..75: mol_type = other DNA
acaaaccgcctgggagcattctccgttgtggagggtaaggctgataatgtcgtactggaaaatggtggacgtctg

SEQ ID NO: 597579 - DNA, 75 bp, synthetic construct
  source 1..75: mol_type = other DNA
gtattgcccgtggagccacgccggaaagcagcggcagctatggcttcgtccgtctggagggtgacctgctgagaa

SEQ ID NO: 597580 - DNA, 75 bp, synthetic construct
  source 1..75: mol_type = other DNA
atgagtaaacccgctatcacgctttggtcagatgcccactttttctccccttatgtgttatccgcctgggtggcg

SEQ ID NO: 597581 - DNA, 75 bp, synthetic construct
  source 1..75: mol_type = other DNA
atgagggtgcgatagccacaggaaccgtcattaatgataagggctggcaggtcgtcaaacccggcgcagtggcaa

SEQ ID NO: 597582 - DNA, 75 bp, synthetic construct
  source 1..75: mol_type = other DNA
aggacgcaaaaatattatcctcagcagtcaaccgggtacggacgatcgcgttacgtgggtgaaatcggttgatga

SEQ ID NO: 597583 - DNA, 75 bp, synthetic construct
  source 1..75: mol_type = other DNA
tgaacaacgataccctgaccatccgtgaaggcgatgcactcctgcagggaggctctctcaccggtaacggcagcg

SEQ ID NO: 597584 - DNA, 75 bp, synthetic construct
  source 1..75: mol_type = other DNA
cggcggtattgcccgtggggccacgccggaaagcagcggcagctatggcttcgtccgtctggagagtgacctgct

SEQ ID NO: 597585 - DNA, 75 bp, synthetic construct
  source 1..75: mol_type = other DNA
gttaacgcaggggagattcgctttgataatcagacgacacaggatgccgtgctgagccgtgctgttgcaaaaggc

SEQ ID NO: 597586 - DNA, 75 bp, synthetic construct
  source 1..75: mol_type = other DNA
tacgtttgcctaaaaggcctttgctgacaaatgtgaattttaccgtcagaaaaggtgacattgtcacgttaatgg

SEQ ID NO: 597587 - DNA, 75 bp, synthetic construct
  source 1..75: mol_type = other DNA
acaggcaatggactatgaccggattctggcaggctcccgcagccatcagaccggtgtaaacggtgaaaataacag

SEQ ID NO: 597588 - DNA, 75 bp, synthetic construct
  source 1..75: mol_type = other DNA
caataacgacttccgcgcccggggccggggctggctgggctcactggaaaccggtctgcccttcagtatcactga

SEQ ID NO: 597589 - DNA, 75 bp, synthetic construct
  source 1..75: mol_type = other DNA
gaaatctttctcgccgcctgtgccgggctgggcgtgcctccacaggcctgcattggcattgaagatgcgcaggcg

SEQ ID NO: 597590 - DNA, 75 bp, synthetic construct
  source 1..75: mol_type = other DNA
ctggcttctgtctccctgaatgcgccgacgattttagcggcgctggagctgcgcgagtttttcaccttctgcgcg

SEQ ID NO: 597591 - DNA, 75 bp, synthetic construct
  source 1..75: mol_type = other DNA
cgtcattaatgataagggctggcaggtcgtcaagcccggtacagtggcaacggataccgttgttaataccggggc

SEQ ID NO: 597592 - DNA, 75 bp, synthetic construct
  source 1..75: mol_type = other DNA
aactgccggtgaactggtgggtacagccttccgttatccgcaccttcagctcccggggtgatatgcgtgtgggga

SEQ ID NO: 597593 - DNA, 75 bp, synthetic construct
  source 1..75: mol_type = other DNA
cgggcatggcagtgcacagcatgtgcgtgccggtttccgtctgggcagccacaacgatatgacctttggtgaagg

SEQ ID NO: 597594 - DNA, 75 bp, synthetic construct
  source 1..75: mol_type = other DNA
aggcttaaccggggcgcaattattgttgccctcaacggactccctgacctggccgcggttatcggccttctggca

SEQ ID NO: 597595 - DNA, 75 bp, synthetic construct
  source 1..75: mol_type = other DNA
ttgctggcagatctccgtgcacagcagattccggttgggctggcttctgtctccctgaatgcgccgacgatttta

SEQ ID NO: 597596 - DNA, 75 bp, synthetic construct
  source 1..75: mol_type = other DNA
cgcgcatctgcatttccaggcgtggcagcagattgccgctgaaattggcatcagcattgatgcgcagtttaacga

SEQ ID NO: 597597 - DNA, 75 bp, synthetic construct
  source 1..75: mol_type = other DNA
ggggcgcaattattgttgccctcaacggaatcactcacctggccgcggttatcggccttctggcaaaacgtatag

SEQ ID NO: 597598 - DNA, 75 bp, synthetic construct
  source 1..75: mol_type = other DNA
gggcttaaccggggcgcaattgctgttgccctcaacggaatctctcacatggccgcggttatcggccttctggca

SEQ ID NO: 597599 - DNA, 75 bp, synthetic construct
  source 1..75: mol_type = other DNA
atctggatggtgtaatcaccgataccgcgcatctgcatttcaaggcgtggcagcagattgccgctgaaattggca

SEQ ID NO: 597600 - DNA, 75 bp, synthetic construct
  source 1..75: mol_type = other DNA
gggcaccctggtggtggcttccgaactggcccgctcacggggaaaaggcgccggtgtggcggttgctctgtctct

SEQ ID NO: 597601 - DNA, 75 bp, synthetic construct
  source 1..75: mol_type = other DNA
gctgacacaggcaatggactatgaccggattctggcaggctcacgcagccatcagaccggtgtaaacggtgaaaa

SEQ ID NO: 597602 - DNA, 75 bp, synthetic construct
  source 1..75: mol_type = other DNA
aacgctggatgtccgcaacggtggtgccgccaccaccgtatccatggggaatggcggggtactgctggccgattc

SEQ ID NO: 597603 - DNA, 75 bp, synthetic construct
  source 1..75: mol_type = other DNA
catgctgacgctggcggaagaagaacgtgctcatgatgaatgtgccgaccttatgagcgagctggcagctgatta

SEQ ID NO: 597604 - DNA, 75 bp, synthetic construct
  source 1..75: mol_type = other DNA
cctccggactgactgttttgtgcgcaacattcattcccgtaaccctttcgatgtgatccgcgctgatgtggtgct

SEQ ID NO: 597605 - DNA, 75 bp, synthetic construct
  source 1..75: mol_type = other DNA
gtgcgtgaattaccggtgaactggtgggtacagccttctgttatccgcaccttcagctcccggggagatatgcgt

SEQ ID NO: 597606 - DNA, 75 bp, synthetic construct
  source 1..75: mol_type = other DNA
cggaaaaaccatcctgaatctggtgaacgccggcaacagtggtacggggctggcgaccaccggtaagggtattca

SEQ ID NO: 597607 - DNA, 75 bp, synthetic construct
  source 1..75: mol_type = other DNA
gaggcacaggctaaccggggatgtggcctgcattacgaaatttatgaatcccgcctgttaggggcggcaatgcgt

SEQ ID NO: 597608 - DNA, 75 bp, synthetic construct
  source 1..75: mol_type = other DNA
tcaccctgggcgttcaggcgggttatggccacagcgtcagcggcagcagcgctgaaggatataacggtcaggcca

SEQ ID NO: 597609 - DNA, 75 bp, synthetic construct
  source 1..75: mol_type = other DNA
tcaccctgggcgttcaggccggttatgaccacagcgtcagcggcagcagcgctgaagggtataacggtcaggcca

SEQ ID NO: 597610 - DNA, 75 bp, synthetic construct
  source 1..75: mol_type = other DNA
tcaccctgggcgttcaggcaggttatgcccacagcgtcagcggcagcagcgctgaagggtataacggtcaggcca

SEQ ID NO: 597611 - DNA, 75 bp, synthetic construct
  source 1..75: mol_type = other DNA
gcagtaccgcgcatatcacggcaaaggacaacgcctggctgtactcactgtcacatcagacgaatgacactggcg

SEQ ID NO: 597612 - DNA, 75 bp, synthetic construct
  source 1..75: mol_type = other DNA
atgcgtcctgatgcgcgtctggtgtgggcgaccaaagggctggaagcagaaaccggacgtctgttacaggacgtg

SEQ ID NO: 597613 - DNA, 75 bp, synthetic construct
  source 1..75: mol_type = other DNA
gcgcaggagaagattggtcaggtggttgaaggctaccgcaatacgaaagaagtccgcgagttggcacatcgcttc

SEQ ID NO: 597614 - DNA, 75 bp, synthetic construct
  source 1..75: mol_type = other DNA
agaaatggccacgaggttgtcctctggggccatgaccctgaacatatcgcgacgcttgaacgcgaccgctgtaac

SEQ ID NO: 597615 - DNA, 75 bp, synthetic construct
  source 1..75: mol_type = other DNA
tcgggttgtgcctgcattttctcaggttttacctgtagaagagtggcaaggggccggacgactaatgtaccatct

SEQ ID NO: 597616 - DNA, 75 bp, synthetic construct
  source 1..75: mol_type = other DNA
atcgggcagctcgttgtccttggccaggcgggtgacggtggccaactgctcgtccagcagctgcaaacgctcttc

SEQ ID NO: 597617 - DNA, 75 bp, synthetic construct
  source 1..75: mol_type = other DNA
gccgcgtttcttcccgatgtgccttttcccgatacgctccatcttgaaagcgatctcgccactgcgctggcagcc

SEQ ID NO: 597618 - DNA, 75 bp, synthetic construct
  source 1..75: mol_type = other DNA
gttggctgctattgaatgcgcatcgataccaacattaaaagaattaaggaaaattagcacagaaggtacagcaaa

SEQ ID NO: 597619 - DNA, 75 bp, synthetic construct
  source 1..75: mol_type = other DNA
acatgttgggatcattatcaaagaccacaataacatctggttcagaaatgcatcgtcattagcgaaaaatagaaa

SEQ ID NO: 597620 - DNA, 75 bp, synthetic construct
  source 1..75: mol_type = other DNA
atggcacgtcactggacctgcaggccggactggaagcccgtgtccgggaaaatatcaccctgggcgttcaggccg

SEQ ID NO: 597621 - DNA, 75 bp, synthetic construct
  source 1..75: mol_type = other DNA
atacgccttgataacggcgcttttagcgactggatgaaagcattaaagaaagacactccggtagactggagtaag

SEQ ID NO: 597622 - DNA, 75 bp, synthetic construct
  source 1..75: mol_type = other DNA
gtatcaccgtaaaacaagtgcccgtggaagaagacgcctataacaccaaagtcattaccctttcacgtagcggtt

SEQ ID NO: 597623 - DNA, 75 bp, synthetic construct
  source 1..75: mol_type = other DNA
cttccatttagcatttgtgcagctaaaagccgatcaggcactggataaggccggaaaaattatcatggctgatgt

SEQ ID NO: 597624 - DNA, 75 bp, synthetic construct
  source 1..75: mol_type = other DNA
cgaaaaaggggatagtacagctcagcagtgcgaccaacagcacttccgagtcactggcggcaacgccaaaagcgg

SEQ ID NO: 597625 - DNA, 75 bp, synthetic construct
  source 1..75: mol_type = other DNA
ggtgattaatggtggtcaggcaaccggcaaaacctggcttgcgtttacaaatgtcggaaacagcaacctcggggt

SEQ ID NO: 597626 - DNA, 75 bp, synthetic construct
  source 1..75: mol_type = other DNA
acatccggtcaggccagcggactgctgctggaaaatggcggcagctttacggttaatgccgggggacaggccagc

SEQ ID NO: 597627 - DNA, 75 bp, synthetic construct
  source 1..75: mol_type = other DNA
ggcagcctgagttcacagataaaacactctccaggaaacccggggcggttcacggtgaaaataacagcgtccgtc

SEQ ID NO: 597628 - DNA, 75 bp, synthetic construct
  source 1..75: mol_type = other DNA
agaggttaccgtcaaagatcggctattactcatcaacaccgtacccgtacgcagcaatggcgttatcatcggagc

SEQ ID NO: 597629 - DNA, 75 bp, synthetic construct
  source 1..75: mol_type = other DNA
cagcaccacggcaatcttaatggtcagtgctgttttgttctcggtgctgctagtggtccatctgatttatttctc

SEQ ID NO: 597630 - DNA, 75 bp, synthetic construct
  source 1..75: mol_type = other DNA
tttaactacaccctgaaccgtgacagcgatgaagactggtacctgcgcagtgaaaatgcttatcgtgctgaagtc

SEQ ID NO: 597631 - DNA, 75 bp, synthetic construct
  source 1..75: mol_type = other DNA
gaagtctgagtggcagaacacagctcagtaaaggtgccagcatggtactgaatggcgatgtggtcagtaccggcg

SEQ ID NO: 597632 - DNA, 75 bp, synthetic construct
  source 1..75: mol_type = other DNA
atgcgtgtggggacttccactgcaggcagcgggatgacgttctctccctcacagaatggcacatcactggacctg

SEQ ID NO: 597633 - DNA, 75 bp, synthetic construct
  source 1..75: mol_type = other DNA
ggccggcgcctttaactacaccctgaaccgccccggttttcctggagagtgttttatctgtgaactcaggctgcc

SEQ ID NO: 597634 - DNA, 75 bp, synthetic construct
  source 1..75: mol_type = other DNA
catgtgcgtgccggcttccgtctgggcagccaccacgatatgaactttggtaaaggcacctcatcccgtgacacc

SEQ ID NO: 597635 - DNA, 75 bp, synthetic construct
  source 1..75: mol_type = other DNA
aacaacggcggtattgcccgtggagccacgccggaaagcagcggcagctatggcttcgtccgtctggagggtgac

SEQ ID NO: 597636 - DNA, 75 bp, synthetic construct
  source 1..75: mol_type = other DNA
ttactgatcaacaccgttccggtgcgcagtaatggcattatcatcggagccatctctaccttcagagacaaaaca

SEQ ID NO: 597637 - DNA, 75 bp, synthetic construct
  source 1..75: mol_type = other DNA
gaagcgaatttgtttgatatggcgatgaatcatctttcccggcttcctctgaaggatagtccggtattcattggt

SEQ ID NO: 597638 - DNA, 75 bp, synthetic construct
  source 1..75: mol_type = other DNA
caagattattttgtcagagagtgcaactgaggtcatcgatgatttcatagcaaatattgataattatgataaatt

SEQ ID NO: 597639 - DNA, 75 bp, synthetic construct
  source 1..75: mol_type = other DNA
actgacaaatcatgacaaccagattgttctcggtacggccaacggaatgaccatcagtagcggtctggagtatgg

SEQ ID NO: 597640 - DNA, 75 bp, synthetic construct
  source 1..75: mol_type = other DNA
tgagtgaactgcctgtgaactggtgggtacagccttctgttatccgcaccttcagctcccggggagacatgagca

SEQ ID NO: 597641 - DNA, 75 bp, synthetic construct
  source 1..75: mol_type = other DNA
ccaccaaagaatcttccgaaagatgggggaaaaccacgtccctgcgcactgatggcttcgtgcgcaatattcatt

SEQ ID NO: 597642 - DNA, 75 bp, synthetic construct
  source 1..75: mol_type = other DNA
gctgctgcacgaaaggggctttttctgacgatggaagaaaccaagctggcacgggaagcgaaagatgctctgatg

SEQ ID NO: 597643 - DNA, 75 bp, synthetic construct
  source 1..75: mol_type = other DNA
cagccaacaaaacgactgtcaccagtggtggtcttcagagagtgaaccccggtggaagtgtcctcagacacggtt

SEQ ID NO: 597644 - DNA, 75 bp, synthetic construct
  source 1..75: mol_type = other DNA
gtctgcccttcagtatcactgacaacctgatgctggagccacaactgcagtatacctggcagggactttccctgg

SEQ ID NO: 597645 - DNA, 75 bp, synthetic construct
  source 1..75: mol_type = other DNA
gcgtaacattgcactaccgtcacggctggctgcattgtgaagttaacgatgacggtccagggatcgcgcctgaaa

SEQ ID NO: 597646 - DNA, 75 bp, synthetic construct
  source 1..75: mol_type = other DNA
ctgcgcgacagtgcaaaacacagtgtgagtgaattgccggtgaactggtgggtacagccttctgctatccgcacc

SEQ ID NO: 597647 - DNA, 75 bp, synthetic construct
  source 1..75: mol_type = other DNA
tgtggcacagggaacccgccacagtatgaaagcgtcatcgggcaataacgacttccgcgcacggggccggggctg

SEQ ID NO: 597648 - DNA, 75 bp, synthetic construct
  source 1..75: mol_type = other DNA
atgtctgtcgttttttccactcgcgcgagatggcgaggcaaacgccctctgctcgcgctgttgcaagggctgttt

SEQ ID NO: 597649 - DNA, 75 bp, synthetic construct
  source 1..75: mol_type = other DNA
atagcaaaacggttattgttgatgagatcactcgtaatgcacagtttccacttaaggcaagagctatcacggtga

SEQ ID NO: 597650 - DNA, 75 bp, synthetic construct
  source 1..75: mol_type = other DNA
atattcagcaagctcaaggacgcattactgttaaaaatacggggaattgtgtggggatgttaatggatattgttt

SEQ ID NO: 597651 - DNA, 75 bp, synthetic construct
  source 1..75: mol_type = other DNA
gttcagggcgacgacgcgcctgcggtattccgcaagggcgtgctgattaccggcgtgacggccagcgcggcgcgt

SEQ ID NO: 597652 - DNA, 75 bp, synthetic construct
  source 1..75: mol_type = other DNA
ctgacggtgccgcaaatcgtcgaaaaaatcctgcgcgagcggcaccagatgcgcggtcaggacttcgtgtttaac

SEQ ID NO: 597653 - DNA, 75 bp, synthetic construct
  source 1..75: mol_type = other DNA
atgatatttatcaattcaccattgttccccgcagcggatttgcactgtttgatacctggctttcgggcgatcgtg

SEQ ID NO: 597654 - DNA, 75 bp, synthetic construct
  source 1..75: mol_type = other DNA
atcttaatggatatggcgtgccgtttgattataccaaagccttaagcctttttgagcaagctaacttagctggag

SEQ ID NO: 597655 - DNA, 75 bp, synthetic construct
  source 1..75: mol_type = other DNA
gcatactgtggggccaatgaatgccggaaaaagttttattgatcggctggaaagtagcggcttattaaccgcgac

SEQ ID NO: 597656 - DNA, 75 bp, synthetic construct
  source 1..75: mol_type = other DNA
taatcttgtacagtctttgcaaaaaagagaatatatagtgaagaatgcttatgatcatgcaaagttattgtcttc

SEQ ID NO: 597657 - DNA, 75 bp, synthetic construct
  source 1..75: mol_type = other DNA
ggcaccgcccgtgcagggaatgccggtgcagactgccctgcgcaccctgcacggcgtcattaccagctttaaaca

SEQ ID NO: 597658 - DNA, 75 bp, synthetic construct
  source 1..75: mol_type = other DNA
aaaaacgaatacccggcccgtgaacaggtgatgcagtacggtgaggacgacctgacgtttgtctcacgcctgctg

SEQ ID NO: 597659 - DNA, 75 bp, synthetic construct
  source 1..75: mol_type = other DNA
aacaacaatcagacgataaattatactcaggcttttgaatggttaacaaaatcagcagccagtggtaactctcgc

SEQ ID NO: 597660 - DNA, 75 bp, synthetic construct
  source 1..75: mol_type = other DNA
cagtttaccagtaccgataaagccatcacgccggagttggtgctgatgcaggacggcgcattcagcctgacggca

SEQ ID NO: 597661 - DNA, 75 bp, synthetic construct
  source 1..75: mol_type = other DNA
ggaaagcagcggcagctatggcttcgtccgcctggagggtgacctgatgagaacagaggttgccggtatgtctgt

SEQ ID NO: 597662 - DNA, 75 bp, synthetic construct
  source 1..75: mol_type = other DNA
cctggatgtccgcagtggtggcacagccaccaccgtctccatgcgtgcaggaagtgtgcttctcgctgactcggg

SEQ ID NO: 597663 - DNA, 75 bp, synthetic construct
  source 1..75: mol_type = other DNA
agtgaattaccggtgaactggtgggtacagccttccgttatccgcaccttcagctcccggggtgatatgcgtgtg

SEQ ID NO: 597664 - DNA, 75 bp, synthetic construct
  source 1..75: mol_type = other DNA
atacttaccctttccgggaagacggtgaacaacgataccctgaccatccgtgaaggcgatgcactcctgcaggga

SEQ ID NO: 597665 - DNA, 75 bp, synthetic construct
  source 1..75: mol_type = other DNA
aactgaaggaacggcaaataccactgtggtttatgccggcggcgaccagactgtacatggtcacgcactggatac

SEQ ID NO: 597666 - DNA, 75 bp, synthetic construct
  source 1..75: mol_type = other DNA
ccgcgcataccaccatcaaccagaaaggaaagctgcaggtgaatgccggcggtaaagcgtctgatgtcacccaga

SEQ ID NO: 597667 - DNA, 75 bp, synthetic construct
  source 1..75: mol_type = other DNA
tcaagaattgcgtttcgcacgctgggaggatatcgattttgagacaaaattatgggagatcccggcagaagtaat

SEQ ID NO: 597668 - DNA, 75 bp, synthetic construct
  source 1..75: mol_type = other DNA
aaccggcaaaacctggcttgcgtttacaaatgtcggaaacagtaacctcggggtggcaacctccggacagggtat

SEQ ID NO: 597669 - DNA, 75 bp, synthetic construct
  source 1..75: mol_type = other DNA
ttaatggccttcttcctcgaatccacctttgtcgggctgttcttcttcggctggcaacggctgaataaataccag

SEQ ID NO: 597670 - DNA, 75 bp, synthetic construct
  source 1..75: mol_type = other DNA
ccggaaccatcgtcaacaccggtgcagaaggtggtccggattctgaaaatgtgtccaccggtcagatggtcgggg

SEQ ID NO: 597671 - DNA, 75 bp, synthetic construct
  source 1..75: mol_type = other DNA
ctttctattggcgtataccccgatgtaactctagccgacgctcgcgaaaaacgcagtgaagctaggaaaatcctc

SEQ ID NO: 597672 - DNA, 75 bp, synthetic construct
  source 1..75: mol_type = other DNA
tggaagcccgtgtccgggaaaacatcaccctgggcgttcaggcaggttatgtccacagcgtcagcggcagcagcg

SEQ ID NO: 597673 - DNA, 75 bp, synthetic construct
  source 1..75: mol_type = other DNA
ggtgaaaatgccgtagatattttagctgtgcaggaggcaggttctccgccatcaacggctgtagatacaggtaga

SEQ ID NO: 597674 - DNA, 75 bp, synthetic construct
  source 1..75: mol_type = other DNA
gcggtctgaaaatgcgcggcaacttacgcagcaagaatgccgagctgattgaaaaggttagaacatcctatgaaa

SEQ ID NO: 597675 - DNA, 75 bp, synthetic construct
  source 1..75: mol_type = other DNA
cgccggtgcatgacgcacggctgtacgctcgtgaatgtgtatatcacagacatgaaaaccgttgaaattccgaaa

SEQ ID NO: 597676 - DNA, 75 bp, synthetic construct
  source 1..75: mol_type = other DNA
tcatggaaagaaaaacaactacaaggtaaaattattgacagtgaatgtaatttacctatccatttttctggtgta

SEQ ID NO: 597677 - DNA, 75 bp, synthetic construct
  source 1..75: mol_type = other DNA
catcttcgttccatcttggaatggaatttgtaaaaaaacgccacaggcatcaggaatataagaaggtgtctgtgg

SEQ ID NO: 597678 - DNA, 75 bp, synthetic construct
  source 1..75: mol_type = other DNA
tgctgaacggcagtgaacatgtgacggtaaggtttttgcaggcgctggcgcagcggctgtcacagcacgagggca

SEQ ID NO: 597679 - DNA, 75 bp, synthetic construct
  source 1..75: mol_type = other DNA
accttcggcgttggcccggcggggacgggtaaaacctacctggcagtggctgcggcagttgatgccctggagcgt

SEQ ID NO: 597680 - DNA, 75 bp, synthetic construct
  source 1..75: mol_type = other DNA
gcccacggaaggaggaatgcagcctgaaacggatgaagttaaggttaagtttcttctaggtggtttttgtgagga

SEQ ID NO: 597681 - DNA, 75 bp, synthetic construct
  source 1..75: mol_type = other DNA
cgcttgcaactggcccgtcagttcttgtcggaggatacggcggttgagcggttgctgaagtggaaaacgccgcag

SEQ ID NO: 597682 - DNA, 75 bp, synthetic construct
  source 1..75: mol_type = other DNA
tggcgctgatgaccattacattaatccggcatggtcgtatacgttcagcctggcagacttcgtcggcgacaaggg

SEQ ID NO: 597683 - DNA, 75 bp, synthetic construct
  source 1..75: mol_type = other DNA
tcgtggattcatttatcgataactgcattctctcctgcgtcgatgaaccggcttacggtggtatcgtgcagtgcg

SEQ ID NO: 597684 - DNA, 75 bp, synthetic construct
  source 1..75: mol_type = other DNA
ctcaaaactgaaaatatcgattggaagatcgcccagattggcaagatgaaattcgaattagtggagaatgtataa

SEQ ID NO: 597685 - DNA, 75 bp, synthetic construct
  source 1..75: mol_type = other DNA
gtgaatttgttctcaaaactgaaaacatcgattggaagatcgcccagattggcaagatgaaattcgaattagtgg

SEQ ID NO: 597686 - DNA, 75 bp, synthetic construct
  source 1..75: mol_type = other DNA
atttcgtcaacgtcattcagggcgatgcaacgctaaatcaggcgttaattaaggataagcgtactgataacctct

SEQ ID NO: 597687 - DNA, 75 bp, synthetic construct
  source 1..75: mol_type = other DNA
tgataccgagcatgagcgcaaacaactcaacaacaaagattttgaagcagaaatcgctctaaaaaaacgatacgg

SEQ ID NO: 597688 - DNA, 75 bp, synthetic construct
  source 1..75: mol_type = other DNA
cgatgggatggataaaaggagcatatgttaaataccgtcacttacgaacagataaaagcctattggaatttttga

SEQ ID NO: 597689 - DNA, 75 bp, synthetic construct
  source 1..75: mol_type = other DNA
tcggggatatgttagttaccataagtgtattgaacgattgatttcagtgtattgtttagataataggatttttta

SEQ ID NO: 597690 - DNA, 75 bp, synthetic construct
  source 1..75: mol_type = other DNA
actactcaatgcaggaaatcagcgtcttaaagtgttgacaatcgcttattgtaaaaataatagcaaagataatag

SEQ ID NO: 597691 - DNA, 75 bp, synthetic construct
  source 1..75: mol_type = other DNA
aagtctggctctgcgtcaacaaaatgaatcggtggtcaggctgatgcagcagcaattgcagcagactgtgatgac

SEQ ID NO: 597692 - DNA, 75 bp, synthetic construct
  source 1..75: mol_type = other DNA
cgtggttaaaattatcgaacgcgacctgctgccgaaatacctgagcatcgacggcgtggtcgacttgaaccacct

SEQ ID NO: 597693 - DNA, 75 bp, synthetic construct
  source 1..75: mol_type = other DNA
tccgtataaccttgataacgcgggcaaaggcgatattcagggaatacataacaacaacgtgggccgcacttattc

SEQ ID NO: 597694 - DNA, 75 bp, synthetic construct
  source 1..75: mol_type = other DNA
acaaggtcagcaaagaagatattcagggcattcatcaaggtaatgtaaataaatcctatagcgaagagaaccaga

SEQ ID NO: 597695 - DNA, 75 bp, synthetic construct
  source 1..75: mol_type = other DNA
cgaacgccgggtcgtttacgatttcgtcaacgtcattcagggcgatgcaacgctaaatcaggcgttaattaaaga

SEQ ID NO: 597696 - DNA, 75 bp, synthetic construct
  source 1..75: mol_type = other DNA
gtatttctattggtaggtatattaataaatgcagcagaagaactacgttctactactgaatcggtcacgactatc

SEQ ID NO: 597697 - DNA, 75 bp, synthetic construct
  source 1..75: mol_type = other DNA
ggctccatgtctgaagaacaattttttttactgataggtatttcttctattcacagtgacagggttattctcgct

SEQ ID NO: 597698 - DNA, 75 bp, synthetic construct
  source 1..75: mol_type = other DNA
tgtgaagagcgagccagaaaagacagatgtatggcgattcagtagccaatttgattttccacatataaatgaaaa

SEQ ID NO: 597699 - DNA, 75 bp, synthetic construct
  source 1..75: mol_type = other DNA
aaccgtgacagcgatgaagactggtacctgcgcagtgaaaatgcctatcgttctgaagtcccccggtatgcctcc

SEQ ID NO: 597700 - DNA, 75 bp, synthetic construct
  source 1..75: mol_type = other DNA
gtgagggagttcctggtcgctgtatgaattatgtacaattgatgggtattgttgatgcacctggttcttgtattg

SEQ ID NO: 597701 - DNA, 75 bp, synthetic construct
  source 1..75: mol_type = other DNA
agaagtccccctgtatgcctccatgctgacacaggcaatggactatgaccggattctggcaggctcccgcagcca

SEQ ID NO: 597702 - DNA, 75 bp, synthetic construct
  source 1..75: mol_type = other DNA
aaccgtgacagcgatgaagactggtacctgcgcagtgaacatgcttatcgttctgaagtccccctgtatgcctcc

SEQ ID NO: 597703 - DNA, 75 bp, synthetic construct
  source 1..75: mol_type = other DNA
aaccgtgacagcgatgaagactggtacctgcgcagtgaacatgcatatcgttctgaagtcccccggtatgcctcc

SEQ ID NO: 597704 - DNA, 75 bp, synthetic construct
  source 1..75: mol_type = other DNA
aaccgtgacagcgatgaagactggtacctgcgcagtgaaaatgcgtatcgttctgaagtccccccgtatgcctcc

SEQ ID NO: 597705 - DNA, 75 bp, synthetic construct
  source 1..75: mol_type = other DNA
agccacaacgatatgacctttggtgaaggcacctcatccgtgcccccctgcgtgacagtgcaaaacacagtgtgc

SEQ ID NO: 597706 - DNA, 75 bp, synthetic construct
  source 1..75: mol_type = other DNA
ccggggcctttaactactccctcaaccgggacagtgatgagagctggtatctgcgcagtgaaaatgcttatcgtg

SEQ ID NO: 597707 - DNA, 75 bp, synthetic construct
  source 1..75: mol_type = other DNA
atttgcgctggcacaaattgagcaggaactcatcgctccagaaaatcgtagccgttgtctggcggtgattgaaga

SEQ ID NO: 597708 - DNA, 75 bp, synthetic construct
  source 1..75: mol_type = other DNA
tagttatgcttaccggtgtacgaacccaagagatgcgctttgctacatgggatgaggttgatcttgaaaaaggta

SEQ ID NO: 597709 - DNA, 75 bp, synthetic construct
  source 1..75: mol_type = other DNA
ggtctggcgaccaccggtaagggtattcaggtggttgaggccattaacggtgccaccacggaggaaggggctttt

SEQ ID NO: 597710 - DNA, 75 bp, synthetic construct
  source 1..75: mol_type = other DNA
aaccgtgacagcgatgaagactggtacctgcgcagtgaacatgcgtatcgttctgaagtcccccagtatgcctcc

SEQ ID NO: 597711 - DNA, 75 bp, synthetic construct
  source 1..75: mol_type = other DNA
ctggctgggttcgctggaaaccggtctgcccttcagtatcactgacaatctgatgctggagccgcaactgcagta

SEQ ID NO: 597712 - DNA, 75 bp, synthetic construct
  source 1..75: mol_type = other DNA
tagtttccatgcctaatcaattgttcacaatgtcaagaacatttaaatcagtatcgaatggaagcatttatatcg

SEQ ID NO: 597713 - DNA, 75 bp, synthetic construct
  source 1..75: mol_type = other DNA
atgttgtcaatttgtttggcagaaggtgagggcgttctttgtcgttgtatgagctgcgtacaattgatgcgtatt

SEQ ID NO: 597714 - DNA, 75 bp, synthetic construct
  source 1..75: mol_type = other DNA
gtgaaggcacctcatcccgtgacaccctgcgtgacagtgcaaaacacagtgtgcgtgaactgccggtgaactggt

SEQ ID NO: 597715 - DNA, 75 bp, synthetic construct
  source 1..75: mol_type = other DNA
gatcgattatcagaatgaatatcgcaataacctcaacagcgatatgagtgccgggatgaccagcaaccgctggat

SEQ ID NO: 597716 - DNA, 75 bp, synthetic construct
  source 1..75: mol_type = other DNA
gcgtgggaaggcttccggtactgtccttaacggcggtgatcaatggatacatgcaggcggcagggcatccggaac

SEQ ID NO: 597717 - DNA, 75 bp, synthetic construct
  source 1..75: mol_type = other DNA
tgggaaatggcatggcagataacgtcgttctggaaaatggcggtcgtctggatgtactggagagccattcagcct

SEQ ID NO: 597718 - DNA, 75 bp, synthetic construct
  source 1..75: mol_type = other DNA
aaccgtgacagcgatgaagactggtacctgcgcagtgaagatgcctatcgttctgaagtcccccagtatgcctcc

SEQ ID NO: 597719 - DNA, 75 bp, synthetic construct
  source 1..75: mol_type = other DNA
aaccgtgacagcgatgaagactggtacctgcgcagtgaagatgcatatcgttctgaagtccccccgtatgcctcc

SEQ ID NO: 597720 - DNA, 75 bp, synthetic construct
  source 1..75: mol_type = other DNA
tggtttatgccggcggcgaccagacggtacacgggcatgcgctggataccacactgaatggcggtaaccagtatg

SEQ ID NO: 597721 - DNA, 75 bp, synthetic construct
  source 1..75: mol_type = other DNA
atgttcagtctgttctgcccatccgttggttatcgaagcggcctggcatttgatcgcaacagcacgcgcaaagtg

SEQ ID NO: 597722 - DNA, 75 bp, synthetic construct
  source 1..75: mol_type = other DNA
accaccacgctgaataacggtgccacgcttaccctttccgggaaaacggtaaataacgataccctgaccatccgt

SEQ ID NO: 597723 - DNA, 75 bp, synthetic construct
  source 1..75: mol_type = other DNA
acgccggaaagcagcggcagctatggcttcgtccgtctggagggtgacctgctgagaacagaggttgccggtatg

SEQ ID NO: 597724 - DNA, 75 bp, synthetic construct
  source 1..75: mol_type = other DNA
gaagttcgggcatggcagtgcacaacatgtgcgtgccggcttccgtctgggcagccacaacgatatgacctttgg

SEQ ID NO: 597725 - DNA, 75 bp, synthetic construct
  source 1..75: mol_type = other DNA
tatcaccctgggcgttcagggcggttatgcccacagcgtcagcggcagcagcgctgaaggttataacggtcaggc

SEQ ID NO: 597726 - DNA, 75 bp, synthetic construct
  source 1..75: mol_type = other DNA
gaaatgcaactagctcatgttgataaaaatagcattaggggaacatataatcatgctcaatatttagagaaaaga

SEQ ID NO: 597727 - DNA, 75 bp, synthetic construct
  source 1..75: mol_type = other DNA
ggcagccacaacgatatgagctttggtgaaggcacctcatcccgtgacaccctgcgcgacagtgcaaaacacagt

SEQ ID NO: 597728 - DNA, 75 bp, synthetic construct
  source 1..75: mol_type = other DNA
aatgggttacgattcgtattgtattgaaatgcaactagcccatgttgataaaaatattattagagggacttataa

SEQ ID NO: 597729 - DNA, 75 bp, synthetic construct
  source 1..75: mol_type = other DNA
tccgtgacggcggggggcagagcctgaacggactggcggtgaacaccacgctgaataacagaggcgagcagtggg

SEQ ID NO: 597730 - DNA, 75 bp, synthetic construct
  source 1..75: mol_type = other DNA
ttgctctgagtcgcccgcttcaggccggagcctttaactacaccctgaaccgtgacagcgatgaagactggtacc

SEQ ID NO: 597731 - DNA, 75 bp, synthetic construct
  source 1..75: mol_type = other DNA
accagctagtgattaatggtggtcaggcaaccggcaaaacctggcttgcgtttacaaatgtcggaaacagtaacc

SEQ ID NO: 597732 - DNA, 75 bp, synthetic construct
  source 1..75: mol_type = other DNA
gtgcctttaactactccctcaaccgggacagtgatgagagctggtatctgcgcagtgaaaatgcttatcgtgctg

SEQ ID NO: 597733 - DNA, 75 bp, synthetic construct
  source 1..75: mol_type = other DNA
gtgccgctgtcagtggtacccggagcgacggaaaggcattcagtatcggaggtggtcaggcggatgccctgatgc

SEQ ID NO: 597734 - DNA, 75 bp, synthetic construct
  source 1..75: mol_type = other DNA
gcggttaccagtatgtgcacaaggacggacttgcgctgaacacggtaattaacgaggggggctggcaggttgtta

SEQ ID NO: 597735 - DNA, 75 bp, synthetic construct
  source 1..75: mol_type = other DNA
atccaccaccatcaacaaaaatgggcggcaggttatctggtcttcaggggtggcccgggataccctcatttacgc

SEQ ID NO: 597736 - DNA, 75 bp, synthetic construct
  source 1..75: mol_type = other DNA
atgaaaacgttaattgcccggcataaagctggtgaacatatcggcatatgttcagtctgttctgcacatccgttg

SEQ ID NO: 597737 - DNA, 75 bp, synthetic construct
  source 1..75: mol_type = other DNA
aacacgcgtgattgccatcgtggtgcagccgggcgtggaatttgatcacagcaatattatccattatcagccgca

SEQ ID NO: 597738 - DNA, 75 bp, synthetic construct
  source 1..75: mol_type = other DNA
gttatcgaagcggcgctggcatttgatcgcaacagcacgcgcaaagtgctgattgaagcaacgtcaaaccaggtc

SEQ ID NO: 597739 - DNA, 75 bp, synthetic construct
  source 1..75: mol_type = other DNA
ggtgaacgccggcaacagtgcgtcagggatggcgaccaccggtaagggtattcaggtggtggaagccattaacgg

SEQ ID NO: 597740 - DNA, 75 bp, synthetic construct
  source 1..75: mol_type = other DNA
ggtacagccacgaatgtcaccctgaagcaggacggcgcactggttaccagtacggctgcaaccgttaccggcata

SEQ ID NO: 597741 - DNA, 75 bp, synthetic construct
  source 1..75: mol_type = other DNA
attctggcaggctcccgcagccatcagaccggtgtaaacggtgaaaataacagcgtccgtctcagcattcagggc

SEQ ID NO: 597742 - DNA, 75 bp, synthetic construct
  source 1..75: mol_type = other DNA
ataatcactaaaaatgcaaccaagattgtgatgcttacaggtgttcgaacacaagagatgcgctttgctacatgg

SEQ ID NO: 597743 - DNA, 75 bp, synthetic construct
  source 1..75: mol_type = other DNA
ggttatgcccacagcgtcagcggcagcagcgctgaagggtataacggtcaggccacgctgaatgtgaccttctga

SEQ ID NO: 597744 - DNA, 75 bp, synthetic construct
  source 1..75: mol_type = other DNA
agtagtcggatgtggtttcttgctgtcattatcagccttgcttaatgcaggtataccttctccggaagctatacg

SEQ ID NO: 597745 - DNA, 75 bp, synthetic construct
  source 1..75: mol_type = other DNA
gctggacccgacgctgtggatgtggaccgttaacctgatttatctggctttggcgattgttctcaacctttggga

SEQ ID NO: 597746 - DNA, 75 bp, synthetic construct
  source 1..75: mol_type = other DNA
agtgaaattacggtaatgcatgcctgcggtctgagcaaagcggttctggtgaaagcggcaatgatccttgcggta

SEQ ID NO: 597747 - DNA, 75 bp, synthetic construct
  source 1..75: mol_type = other DNA
tgaaatcgaacggcggtaaaggtaagctggacccgacgctgtggatgtggaccgtaaacctgatttatctggctt

SEQ ID NO: 597748 - DNA, 75 bp, synthetic construct
  source 1..75: mol_type = other DNA
gttttgacattttttgtttacggaatgagtacaaaagacattgcttactacaaaggggtaagtgtccaggccgta

SEQ ID NO: 597749 - DNA, 75 bp, synthetic construct
  source 1..75: mol_type = other DNA
accccgtggcgatgcccatactggctaccgtcggaggattgatcatcggcagttttttgaatgtggtgatttggc

SEQ ID NO: 597750 - DNA, 75 bp, synthetic construct
  source 1..75: mol_type = other DNA
tggcgattgttctcaacctttgggacaccgtgccggtccgccgcctgcgcgccagtttttcgcgtaaaggagcgg

SEQ ID NO: 597751 - DNA, 75 bp, synthetic construct
  source 1..75: mol_type = other DNA
gttcaagaagagctataaatcttgcaaaggtaaaaacttataacgatataattgatttggcaaatgttgattatg

SEQ ID NO: 597752 - DNA, 75 bp, synthetic construct
  source 1..75: mol_type = other DNA
ctgatatagcaaatgggcgatggatgctcagtatcgacggggatcatgatgtctatgacgttgcaaggatcccgg

SEQ ID NO: 597753 - DNA, 75 bp, synthetic construct
  source 1..75: mol_type = other DNA
ttgtctaataaaactgctgagtttgaatgcaatatttcagatatcaagcctgtcgggtctgtagttcttacattg

SEQ ID NO: 597754 - DNA, 75 bp, synthetic construct
  source 1..75: mol_type = other DNA
ggatgcggcgcgagcgccttatccgacctacggttcaggcctgtaggcatgataagacgcgtcagcgtcgcatca

SEQ ID NO: 597755 - DNA, 75 bp, synthetic construct
  source 1..75: mol_type = other DNA
tttccagagatggattaagagagaatgataaagaaattgtttctatgatgattcaggaaatgaacaatgaacgag

SEQ ID NO: 597756 - DNA, 75 bp, synthetic construct
  source 1..75: mol_type = other DNA
cttccaatagcaaaaaaatcggtggttactacttaataactttcaggcctgcgattgatcgagttgtgaataatt

SEQ ID NO: 597757 - DNA, 75 bp, synthetic construct
  source 1..75: mol_type = other DNA
agcatagtggtacagcttattggagtggcaagcggtggataggtattgatgggttcaaaattgggtatgcaaagg

SEQ ID NO: 597758 - DNA, 75 bp, synthetic construct
  source 1..75: mol_type = other DNA
atcccgtttttagttggctgcttcatttttgcagtggtggcgctatggctgcactggcgacatcgccgccagtaa

SEQ ID NO: 597759 - DNA, 75 bp, synthetic construct
  source 1..75: mol_type = other DNA
tgatgtcatcatcgagtctgcccactcgcgtttcccggtgatcagcgaggataaagatcacattgaagggattct

SEQ ID NO: 597760 - DNA, 75 bp, synthetic construct
  source 1..75: mol_type = other DNA
atcttccgtaaactgacaatggatcgcgtgaaagcagaagggggttctgacgaacgtgcgatgcgtgaagcggca

SEQ ID NO: 597761 - DNA, 75 bp, synthetic construct
  source 1..75: mol_type = other DNA
acatcagtagctctgggtatgaagctgtttgtaactcatattacagtaacagccattactatctcgaaggtgcaa

SEQ ID NO: 597762 - DNA, 75 bp, synthetic construct
  source 1..75: mol_type = other DNA
gtctatgagcgtttaatgcaggttcaggatacaggccgcccacgagtggaaatcggcttaggtgtcggcaccatt

SEQ ID NO: 597763 - DNA, 75 bp, synthetic construct
  source 1..75: mol_type = other DNA
ggaaagcccgaaaatcacccgcaacctgactacggcctggtttgcgaagcgcgtagacgaacggcgggcgcgttg

SEQ ID NO: 597764 - DNA, 75 bp, synthetic construct
  source 1..75: mol_type = other DNA
aatctcgttgctggaagcatggaaaaagtatcgggtattgctgaaccgtgttgatacgtcaactgcacaggatat

SEQ ID NO: 597765 - DNA, 75 bp, synthetic construct
  source 1..75: mol_type = other DNA
cggtaaaaaatatgaatatattccggcgcttaatgctacaccggaacatatcgaaatgatggctaatctggttgc

SEQ ID NO: 597766 - DNA, 75 bp, synthetic construct
  source 1..75: mol_type = other DNA
tggcttctttatcccgaaagcgttcggtagctcactggcattaacgggttcgccagtcggtgcaatgaaagtatt

SEQ ID NO: 597767 - DNA, 75 bp, synthetic construct
  source 1..75: mol_type = other DNA
gtatggatgctgttcagtgctgttgcggtaaacttaccaaaagtcggctttaattttacgaccgatcagctcttt

SEQ ID NO: 597768 - DNA, 75 bp, synthetic construct
  source 1..75: mol_type = other DNA
caaataagtctgctgagtttgaatgcaacattaccgacattacgcctgccggggttgtagttttcacattggaaa

SEQ ID NO: 597769 - DNA, 75 bp, synthetic construct
  source 1..75: mol_type = other DNA
aacatgacgctggaaaatccttcaccagagctgctcacggtgttgatccgtgaactgaccgggaggggaagatga

SEQ ID NO: 597770 - DNA, 75 bp, synthetic construct
  source 1..75: mol_type = other DNA
attgcgccgttttatccacttccactcagaccagagtcagtgccagttcctgcaaggtggaattccgtcacggta

SEQ ID NO: 597771 - DNA, 75 bp, synthetic construct
  source 1..75: mol_type = other DNA
gtgtttcgcggcgtcttccggtaacgacctcttctgacactggcgttgaattattacctgtagaaataacgccgg

SEQ ID NO: 597772 - DNA, 75 bp, synthetic construct
  source 1..75: mol_type = other DNA
cgcatgcgctctaacaaagcgatgatcggcagaaataatctgcgcggcattgtcggtgcactgaagaaaggtgaa

SEQ ID NO: 597773 - DNA, 75 bp, synthetic construct
  source 1..75: mol_type = other DNA
cccgtaaaaaccttgaactttgcttcccgcagcattcatctgaagaacgcgagaagatgattgccgaaaactttc

SEQ ID NO: 597774 - DNA, 75 bp, synthetic construct
  source 1..75: mol_type = other DNA
gagcgtcagggcaaaacaccaaaaacctctccgataacaccagaacaaatcgaaatacgtgagctgaggaaaaag

SEQ ID NO: 597775 - DNA, 75 bp, synthetic construct
  source 1..75: mol_type = other DNA
aagcgacttttgatcaggcgataacttctagtactaagtggacagctccattgaacatttctgttacttataact

SEQ ID NO: 597776 - DNA, 75 bp, synthetic construct
  source 1..75: mol_type = other DNA
tctgtaaggtcgagttccgtcacggtaacatgacgccggaaaatccttcaccagagctgctcacggtgttgatcc

SEQ ID NO: 597777 - DNA, 75 bp, synthetic construct
  source 1..75: mol_type = other DNA
attttcaaatggctcagactatggcggagcgaagggcgtgtttcgcggcgtcttctggtaacgacttcttctgac

SEQ ID NO: 597778 - DNA, 75 bp, synthetic construct
  source 1..75: mol_type = other DNA
acctgtagaaataacgccggatgagcagaaagaacctgtggcggccattgcgccgtctttatccacttccactca

SEQ ID NO: 597779 - DNA, 75 bp, synthetic construct
  source 1..75: mol_type = other DNA
taacatgacgctggaaaatccatcgccagagctgctcacggtgttgatccgtgagctgaccgggaggggaagatg

SEQ ID NO: 597780 - DNA, 75 bp, synthetic construct
  source 1..75: mol_type = other DNA
gacctcttctgacactggcgttgaattattacctgtagaaataacgccggatgagcagaaagaacctgtggtggc

SEQ ID NO: 597781 - DNA, 75 bp, synthetic construct
  source 1..75: mol_type = other DNA
aagttttaaagagaatcctcgataagaactttgagcgctgctctatttgcaggaaaccattccctggaccgtgcc

SEQ ID NO: 597782 - DNA, 75 bp, synthetic construct
  source 1..75: mol_type = other DNA
tggtggcggaaagaactggaagctaactaatatagacttctaccattataaatttgcgctcccatcgtgtccatt

SEQ ID NO: 597783 - DNA, 75 bp, synthetic construct
  source 1..75: mol_type = other DNA
tctttccgctaaacaccaagctaaaaacgccacatacactcaggtattaactgaagatgcgacggttttggtacc

SEQ ID NO: 597784 - DNA, 75 bp, synthetic construct
  source 1..75: mol_type = other DNA
taattcgtaaaggcgaaaaaatcacgctggcgaatgaagagggtgtaaccattcaggtaggtaatagcaaaggca

SEQ ID NO: 597785 - DNA, 75 bp, synthetic construct
  source 1..75: mol_type = other DNA
caaataagtctgctgagtttgaatgcaacattacagacattactcctgccggggctgtagttttcacattggaaa

SEQ ID NO: 597786 - DNA, 75 bp, synthetic construct
  source 1..75: mol_type = other DNA
atgaacatggcccagaattgggaagcaccgtttactggtatgtccatggggtctgtttctggcgctctggggggg

SEQ ID NO: 597787 - DNA, 75 bp, synthetic construct
  source 1..75: mol_type = other DNA
actttagcttcaagtaatgtttggtcaaatatgattgctggaagtaaaaacctaaccggcattaccacatctaaa

SEQ ID NO: 597788 - DNA, 75 bp, synthetic construct
  source 1..75: mol_type = other DNA
gcccgtttatctggggacgaagccgcattatctcaaatgaccgtgaaagggaatactttcgcctatgagtcatta

SEQ ID NO: 597789 - DNA, 75 bp, synthetic construct
  source 1..75: mol_type = other DNA
gattttgccgagggtaaatataccatcgtaaccactttggaagatgaactggtatcaatgcaggaattaactgtt

SEQ ID NO: 597790 - DNA, 75 bp, synthetic construct
  source 1..75: mol_type = other DNA
tttaatcccgttgatattgtcaatgaagatggaaagaatattatgtttgtcgttagcaacaatgaaaaaatacaa

SEQ ID NO: 597791 - DNA, 75 bp, synthetic construct
  source 1..75: mol_type = other DNA
attacgaaaaacaactcgtaaaactgattcagcaagaacgccgcaaagctgggaattactcaccgatcacaccga

SEQ ID NO: 597792 - DNA, 75 bp, synthetic construct
  source 1..75: mol_type = other DNA
cctagtaccatggggtagatgtattgatattttaatttgtgaacaaggtgaggaatctaaatacaaaaatggtgt

SEQ ID NO: 597793 - DNA, 75 bp, synthetic construct
  source 1..75: mol_type = other DNA
ggtgttctccagcaattgaagactgattatgaacgtcagttatctaaattaattcaagccgaacgacgtaaacag

SEQ ID NO: 597794 - DNA, 75 bp, synthetic construct
  source 1..75: mol_type = other DNA
gatgtaaggattatggcagaaaaagccggattaaagtcactaacaatatacgaagaagcgacaggtaacgtcctc

SEQ ID NO: 597795 - DNA, 75 bp, synthetic construct
  source 1..75: mol_type = other DNA
taggttttctgatactaaccagggggtcagaccttcacaattagctgattttaacaaaccgactctaattaacga

SEQ ID NO: 597796 - DNA, 75 bp, synthetic construct
  source 1..75: mol_type = other DNA
cggcacgataaatgccggcacactgcagatatcggcacagagcctgtcaaatcataaaggcagcctgattcagac

SEQ ID NO: 597797 - DNA, 75 bp, synthetic construct
  source 1..75: mol_type = other DNA
gcagcttacttgcgtgtatatgcttcagaaatggaaaaggagtacggtacagcggtggcacaggagcttgttacc

SEQ ID NO: 597798 - DNA, 75 bp, synthetic construct
  source 1..75: mol_type = other DNA
ataagtcattagcgacagccaatgagcttatcaggctggaaaatgccgataagcgtagcgatgcgctggtatcaa

SEQ ID NO: 597799 - DNA, 75 bp, synthetic construct
  source 1..75: mol_type = other DNA
cgaagaagcgacaggtaacgtcctcttttggcagcaaggaatgaaaaaaattgagaacagagggcctgcaaaatg

SEQ ID NO: 597800 - DNA, 75 bp, synthetic construct
  source 1..75: mol_type = other DNA
tgaaacggacccgcgttttacgaaccagaagacgtggctgggcagtgattacatgcagaaggcgttttctcagaa

SEQ ID NO: 597801 - DNA, 75 bp, synthetic construct
  source 1..75: mol_type = other DNA
ttgcctcctggaatcagtatgctgatgccaataatctcaccccggaacagaagcaggcaggactggataaactta

SEQ ID NO: 597802 - DNA, 75 bp, synthetic construct
  source 1..75: mol_type = other DNA
tcagcctccaccgggacgggcaggataaaaacacagcagactgtcagcaatatggagggacgaatggagtctgcc

SEQ ID NO: 597803 - DNA, 75 bp, synthetic construct
  source 1..75: mol_type = other DNA
accggcgccgtggataaccagcagggaagtctgcttgccagccgtgacatcctgattaatacacaggcgctgaat

SEQ ID NO: 597804 - DNA, 75 bp, synthetic construct
  source 1..75: mol_type = other DNA
gtgcggggcgttgtagataacgtttctggtctgattcgcagtggttctgccattacgctgaacgccctgcagttt

SEQ ID NO: 597805 - DNA, 75 bp, synthetic construct
  source 1..75: mol_type = other DNA
catgttactgacaaaggcacatcaacatattactaccgcatcaaaaagaaagggacggacaaacagggggaaagc

SEQ ID NO: 597806 - DNA, 75 bp, synthetic construct
  source 1..75: mol_type = other DNA
aaagccggtgtactgaataatcacagtgccactattgaagctgccggttccctgacactgagtgccgggcaaatc

SEQ ID NO: 597807 - DNA, 75 bp, synthetic construct
  source 1..75: mol_type = other DNA
tagaaagcattaagcaattcggctggactaatccagtgctgattgatgaaaagggcgaaattattgcgggtcacg

SEQ ID NO: 597808 - DNA, 75 bp, synthetic construct
  source 1..75: mol_type = other DNA
gactaatccagtgctgattgatgaaaagggcgaaattattgctggtcacggtcgcgttatggcggctgaagtgct

SEQ ID NO: 597809 - DNA, 75 bp, synthetic construct
  source 1..75: mol_type = other DNA
caaaatggattctgttccggtcattgttctgtctggcctgacggatgagcagaaaaaggcgtaccgcctggcaga

SEQ ID NO: 597810 - DNA, 75 bp, synthetic construct
  source 1..75: mol_type = other DNA
tgcgccagcacatccataatgacgcgcattacgccagcctgatggcggttattcgtgaaaaggaagaaacactga

SEQ ID NO: 597811 - DNA, 75 bp, synthetic construct
  source 1..75: mol_type = other DNA
tatccgcgaagcctgcggagttaatgcgactttcatcgcggacggggtgccacagtttgctctggttaatgggct

SEQ ID NO: 597812 - DNA, 75 bp, synthetic construct
  source 1..75: mol_type = other DNA
aacaacgagtgatccgcgcgctggcgggtttttcgggttacgggcgggtgatggttgtcggtggcggggcggaga

SEQ ID NO: 597813 - DNA, 75 bp, synthetic construct
  source 1..75: mol_type = other DNA
gtatgcagttgcttccggtcgagtgaatgtggccggaatgacgccagataacatggcgccgctgtgcgaagcgat

SEQ ID NO: 597814 - DNA, 75 bp, synthetic construct
  source 1..75: mol_type = other DNA
taccagcgttaagcgtgtgtgggtgagtaacccaagctggccgaaccataagagcgtctttaactctgcaggtct

SEQ ID NO: 597815 - DNA, 75 bp, synthetic construct
  source 1..75: mol_type = other DNA
aagagctgaccgatatgcgccagcgcattcagcgtatgcgtcagttgttcgttaatacgttgcaggagaaaggtg

SEQ ID NO: 597816 - DNA, 75 bp, synthetic construct
  source 1..75: mol_type = other DNA
atcgcccgttacaagaactgtctccgtatgcacacaatgccaggacacacagccctgagcaggtggcacaactgg

SEQ ID NO: 597817 - DNA, 75 bp, synthetic construct
  source 1..75: mol_type = other DNA
ttcctactctaaaaactttggtctgtacaacgagcgtgtaggcgcatgtacgctggttgctgcggacagtgaaac

SEQ ID NO: 597818 - DNA, 75 bp, synthetic construct
  source 1..75: mol_type = other DNA
ctgccgacccaattctgggtctggccgatctgtttcgtgccgatgaacgtcccggcaaaattaaccttgggattg

SEQ ID NO: 597819 - DNA, 75 bp, synthetic construct
  source 1..75: mol_type = other DNA
cgccagggaagtctgatcgccagccgtgacgtccgtattaacacacagacgctgagtaacgataacgggctgatt

SEQ ID NO: 597820 - DNA, 75 bp, synthetic construct
  source 1..75: mol_type = other DNA
cagccatgtcacgctttctcccctgaagccacagggaacggatgtacagacaggacaggccggaaatgtggatgc

SEQ ID NO: 597821 - DNA, 75 bp, synthetic construct
  source 1..75: mol_type = other DNA
ggttgcaggcggcctgctgagcattccgtcaggaagcgtggaaaatgtcagtgtcagtggcgagcggcatgttac

SEQ ID NO: 597822 - DNA, 75 bp, synthetic construct
  source 1..75: mol_type = other DNA
tcaggtaagacgactgttgagaataactttctgggagcgacatcttctgacaaactggataaagccattgagaaa

SEQ ID NO: 597823 - DNA, 75 bp, synthetic construct
  source 1..75: mol_type = other DNA
ccggcgtacagtcgggaaagacaacggttgagaataatgcgctcaggaaggacaagatctttgacattaatccaa

SEQ ID NO: 597824 - DNA, 75 bp, synthetic construct
  source 1..75: mol_type = other DNA
atatgacgtcacaggcggcatcgctgtcagctcagaaaggcctggccctgatggcgggtcatgacgtgacgctga

SEQ ID NO: 597825 - DNA, 75 bp, synthetic construct
  source 1..75: mol_type = other DNA
tcgccgggcgatatgacgctgaaaagtaacacagcgttcagcaacagtggtcagactattgcgaacggaaacctt

SEQ ID NO: 597826 - DNA, 75 bp, synthetic construct
  source 1..75: mol_type = other DNA
tacccggttatttgcaagccgagcaaggtttcagtctggcgaaaaccggttgggtggcggcgattcctttcctcg

SEQ ID NO: 597827 - DNA, 75 bp, synthetic construct
  source 1..75: mol_type = other DNA
tggcggacgatgttcgttatcatcggcgtggcagggattctggttgggatctgttggtacgcgtggtatcgcaac

SEQ ID NO: 597828 - DNA, 75 bp, synthetic construct
  source 1..75: mol_type = other DNA
aaaaaaggctacgacctggcgaagacgcgtaaaacggctattgtctgcggtttgatgatgtcggcattaggcacg

SEQ ID NO: 597829 - DNA, 75 bp, synthetic construct
  source 1..75: mol_type = other DNA
ctgaatgcactgcagtttatcaatcgccacacgcagaataccggccaggggctggaagcgcagacaatacacatc

SEQ ID NO: 597830 - DNA, 75 bp, synthetic construct
  source 1..75: mol_type = other DNA
ctgacacactgagcaaccgtaacagtggtgaccggggcggggttatcagtcagggcccggtgacactgaatgccg

SEQ ID NO: 597831 - DNA, 75 bp, synthetic construct
  source 1..75: mol_type = other DNA
ggcaaccagaaagagaataacaatgccgtgggcatcagcctctcttacggcagccagtcttcgaaatcagaacag

SEQ ID NO: 597832 - DNA, 75 bp, synthetic construct
  source 1..75: mol_type = other DNA
gtgtcagtgggtaaagctgcggtcggtggagttacttccgctgctgtgaacggtggttttcaatggtatggattg

SEQ ID NO: 597833 - DNA, 75 bp, synthetic construct
  source 1..75: mol_type = other DNA
aggatacgcagatacagagtgatggtgtattcacccatacaggctctgtggcatcacgtcgcaacacccggattc

SEQ ID NO: 597834 - DNA, 75 bp, synthetic construct
  source 1..75: mol_type = other DNA
aaataccagcaggcgatacaggctgcaacggcagcggtacagggactggccggcggtaatctgagtgcagccctg

SEQ ID NO: 597835 - DNA, 75 bp, synthetic construct
  source 1..75: mol_type = other DNA
cctcaaacgtcgggacttggtgaaacgcttcctttcaagtgtgtctcttcttattctggaagaggcgcatgagtc

SEQ ID NO: 597836 - DNA, 75 bp, synthetic construct
  source 1..75: mol_type = other DNA
accggggagtgcccaggctatgtggttacttggtgccgggacaaatgccgggatgcagtatgcagatagtggtga

SEQ ID NO: 597837 - DNA, 75 bp, synthetic construct
  source 1..75: mol_type = other DNA
tacgacgaaagtgtttgaaagccagaatctgacggataaacagatccacaattacgcacaacagctggcaggaga

SEQ ID NO: 597838 - DNA, 75 bp, synthetic construct
  source 1..75: mol_type = other DNA
gttagtgttgttgcgccacctgtattgaatccagttttgggtactaattctggttttgttagtgatgttattggt

SEQ ID NO: 597839 - DNA, 75 bp, synthetic construct
  source 1..75: mol_type = other DNA
cagtcggtaagttgctcagatatgccaaaaattcacggactcattcagatgagcaagttgaacagttggtgaaca

SEQ ID NO: 597840 - DNA, 75 bp, synthetic construct
  source 1..75: mol_type = other DNA
cgtcgggcggtaaaccggatatcagtgaactgtacgacgatacgaaaactcaggagctgatcagccggatacgtt

SEQ ID NO: 597841 - DNA, 75 bp, synthetic construct
  source 1..75: mol_type = other DNA
gcgcattaggcggactggctgggctgctggtcgcaaataaatcagcacggaaacttcttatatttgctcctcaat

SEQ ID NO: 597842 - DNA, 75 bp, synthetic construct
  source 1..75: mol_type = other DNA
aacaacgcgtgatccgcgcgctggcgggtttttcgggttacgggcgggtgatggttgtcggtggaggggcggaga

SEQ ID NO: 597843 - DNA, 75 bp, synthetic construct
  source 1..75: mol_type = other DNA
aaaatagagataccgacgcaaaaattgggacgctacatgcaacaatgactgctatggctgtggctggtattgctg

SEQ ID NO: 597844 - DNA, 75 bp, synthetic construct
  source 1..75: mol_type = other DNA
ctgcggagttaatgcgactttcatcgcggacggggtgccacaatttgctctggttaatgggctgtacgcaatgaa

SEQ ID NO: 597845 - DNA, 75 bp, synthetic construct
  source 1..75: mol_type = other DNA
gcgcgagctgaccaggaaggctggaaccctgggttcacggaaaaaatggttggatgggcaaaaaaaatggagaca

SEQ ID NO: 597846 - DNA, 75 bp, synthetic construct
  source 1..75: mol_type = other DNA
atgcctgctgtaatagataaagccctggatttcattggtgccatggatgtatcagcgccaacaccaagttcgatg

SEQ ID NO: 597847 - DNA, 75 bp, synthetic construct
  source 1..75: mol_type = other DNA
aaccccgcaggtcattttcaaatgagtttaaacttcaagtggttaaactggctttacaaccaagggtttctgttg

SEQ ID NO: 597848 - DNA, 75 bp, synthetic construct
  source 1..75: mol_type = other DNA
gaaggcgcgatggaaagtattcttccgaagatcgctggcgccgtttccggcctcagtgatgatgatgtgaatgcg

SEQ ID NO: 597849 - DNA, 75 bp, synthetic construct
  source 1..75: mol_type = other DNA
atggaattcgaaattaaaggcgtgaaatatcgcacggcaaaactcagcgtttttgaccagctgaaagtgacccgc

SEQ ID NO: 597850 - DNA, 75 bp, synthetic construct
  source 1..75: mol_type = other DNA
atggaacaaaaaacattatccgcagaaccccgccgatcattttcaaatgattttaaacttcaaatggttaaactg

SEQ ID NO: 597851 - DNA, 75 bp, synthetic construct
  source 1..75: mol_type = other DNA
catcagcaatatgcgcggaataaggcactcttggcgtttatgatctgtggtgtggagcaggcgtatatccgtgag

SEQ ID NO: 597852 - DNA, 75 bp, synthetic construct
  source 1..75: mol_type = other DNA
atggacatgcattcaggaacctttaacccacaagatttcgcctggcaaggcttaacgctgacacccgcagcggcg

SEQ ID NO: 597853 - DNA, 75 bp, synthetic construct
  source 1..75: mol_type = other DNA
ggagattgctctttataaaatcttaaagcacttaaagatggagaagaaaacctctgttgatgcgacaattgcaca

SEQ ID NO: 597854 - DNA, 75 bp, synthetic construct
  source 1..75: mol_type = other DNA
ttgattcagcgtcgtgatttagtagggtgtgctctcgaactatacaaggccatcgatgaaaacttcgatttttaa

SEQ ID NO: 597855 - DNA, 75 bp, synthetic construct
  source 1..75: mol_type = other DNA
tgtctggcggtcagcgagcgcgcgttgctctgctacgcgcccttctcgcccagccaaaagcgttactcctggatg

SEQ ID NO: 597856 - DNA, 75 bp, synthetic construct
  source 1..75: mol_type = other DNA
tctgcatgctcgatcacgatggagtagtggcaacgggcgctctttcactgccggactggcggggtttcacgatga

SEQ ID NO: 597857 - DNA, 75 bp, synthetic construct
  source 1..75: mol_type = other DNA
cagtaccgggtgccgattgccctcgccagcgatttaaatcccggcacctcgccggtgttgtccctgcgtctgatg

SEQ ID NO: 597858 - DNA, 75 bp, synthetic construct
  source 1..75: mol_type = other DNA
atgacagaacgcgttgaggccgtctcatatattgatgccgtaaatcgtctggatgccggggattatgacgataaa

SEQ ID NO: 597859 - DNA, 75 bp, synthetic construct
  source 1..75: mol_type = other DNA
ttgttatgccgatcttccatgaaataatccctatcaatatgaatacattgaaactggaagtcagtcgctcgacga

SEQ ID NO: 597860 - DNA, 75 bp, synthetic construct
  source 1..75: mol_type = other DNA
ttctttgtgcgcgtaaaaccttcagttgaaggaattgccaccgcagctcagacgctggggcaacgcactctgtcg

SEQ ID NO: 597861 - DNA, 75 bp, synthetic construct
  source 1..75: mol_type = other DNA
atgaaaacaaagaccggatgtatgctcctggtaagcctgatgctcaccgccagcgaaaccacgctggcggcggat

SEQ ID NO: 597862 - DNA, 75 bp, synthetic construct
  source 1..75: mol_type = other DNA
taacctcaattttaatgcctggttgcaggcgaaaagcggtcgtgaagtgacttctggtgacttcaccgccagcct

SEQ ID NO: 597863 - DNA, 75 bp, synthetic construct
  source 1..75: mol_type = other DNA
gatggtgcgcggtcagtccgatcgtgtaccggtggtttttcgcctgaaagattgccgtgggccagcgcagtacag

SEQ ID NO: 597864 - DNA, 75 bp, synthetic construct
  source 1..75: mol_type = other DNA
ttctttgtacgggtaaaaccgtcagtagaaggcatcgccactgcggcccagacgctggggcaacgcaccctgtcg

SEQ ID NO: 597865 - DNA, 75 bp, synthetic construct
  source 1..75: mol_type = other DNA
tgcagaagtccttatccttattcactctgctggcttgatgaatttgccgagcctgctatagcccgcaaaatatat

SEQ ID NO: 597866 - DNA, 75 bp, synthetic construct
  source 1..75: mol_type = other DNA
tctgctggcttgatgaatttgccgagcctgctatagcccgcaaaatatattcatcagcgtttccggtgatgctgt

SEQ ID NO: 597867 - DNA, 75 bp, synthetic construct
  source 1..75: mol_type = other DNA
ggaaccaatgaagtctatcgacggtattaagattattcaggtcgatggtctgaaccgtggtggtaccgcagggga

SEQ ID NO: 597868 - DNA, 75 bp, synthetic construct
  source 1..75: mol_type = other DNA
gtcgcgcttcggcagagcaagcatttgttcgtactggtttaggtgggcaaaaagtggtaatgagcggtggcgcaa

SEQ ID NO: 597869 - DNA, 75 bp, synthetic construct
  source 1..75: mol_type = other DNA
cagccgcactctcttaccgcacacaggcaccgctgattgactccttgctcaatgaaattggcgtttcaggcggct

SEQ ID NO: 597870 - DNA, 75 bp, synthetic construct
  source 1..75: mol_type = other DNA
ctggggatctcagcgttcaaagaaggaaacagaccttcactcggtgacatgctttctgctatcgagcaaggagca

SEQ ID NO: 597871 - DNA, 75 bp, synthetic construct
  source 1..75: mol_type = other DNA
gacgacagcattcagaacctgaaaaccacctggctgatatccggggtgacctggacggatggcgcacaggggcgg

SEQ ID NO: 597872 - DNA, 75 bp, synthetic construct
  source 1..75: mol_type = other DNA
cactggtatcaccggtactgtcgccgctcactgcgtgcagacttcaggacgctggtccgcttagtgaatccgtaa

SEQ ID NO: 597873 - DNA, 75 bp, synthetic construct
  source 1..75: mol_type = other DNA
ccgggcgaaacgttttatcgtctggtgcctgacgcgtcaaagcgcgcacagtctgcggggcaaaacaatcgataa

SEQ ID NO: 597874 - DNA, 75 bp, synthetic construct
  source 1..75: mol_type = other DNA
tctatctcggggccgattacggggaggtcggcggtaacagcactactcagagtgatttaaccggacaacatctgg

SEQ ID NO: 597875 - DNA, 75 bp, synthetic construct
  source 1..75: mol_type = other DNA
agtgtgcgcggttttgacggcgaacgtacgctcagtgcctcaaatggctggctggtacagaacacgttctcctgg

SEQ ID NO: 597876 - DNA, 75 bp, synthetic construct
  source 1..75: mol_type = other DNA
gcgactggcactactatgcgttcgccattggtctcattttcattcttaacggtgtggtgggtttgctgggatttg

SEQ ID NO: 597877 - DNA, 75 bp, synthetic construct
  source 1..75: mol_type = other DNA
cgcagcaggcgtcactaagtcgcagattgcaaaaacgctgggaaaatcacctgcctttgtcacgcaacacgccgc

SEQ ID NO: 597878 - DNA, 75 bp, synthetic construct
  source 1..75: mol_type = other DNA
gccttgatactgttggcgacctttctaacttcttagatcctgatgtggggagtgatggtaaaccgctgatgctgg

SEQ ID NO: 597879 - DNA, 75 bp, synthetic construct
  source 1..75: mol_type = other DNA
acaggccataaaaaaaaccgttaaagtaaaaaatgaacactgtaaattcattatgtatttgtgggattcggtcaa

SEQ ID NO: 597880 - DNA, 75 bp, synthetic construct
  source 1..75: mol_type = other DNA
tgtgccatcaggaaagggaaaacagcctgtttcctggaaacagactcgcagggaagcatcaaggacttcattgag

SEQ ID NO: 597881 - DNA, 75 bp, synthetic construct
  source 1..75: mol_type = other DNA
gggtgtacatgaatacaacgacaaacgaggaaacaaagcccgtggtgaaattgaattactgttaaaagaaactga

SEQ ID NO: 597882 - DNA, 75 bp, synthetic construct
  source 1..75: mol_type = other DNA
aaactggccgcccgttttgattatgtgttcgtcgatacgcctggtatgaaatccccggcattcgtaaaagcactt

SEQ ID NO: 597883 - DNA, 75 bp, synthetic construct
  source 1..75: mol_type = other DNA
cgtcaccaaaggggccgagcgtatttccgaggtttctgcccgctttaccttagacgcgatgcccggcaaacagat

SEQ ID NO: 597884 - DNA, 75 bp, synthetic construct
  source 1..75: mol_type = other DNA
cgaagctatcgaacagggacagatagaacaaggctcaaccatcattattgaatcgctagaccgattaagtcgaag

SEQ ID NO: 597885 - DNA, 75 bp, synthetic construct
  source 1..75: mol_type = other DNA
ggccttcttcctcgaatccacctttgtcgggctgttcttcttcggctggcaacggctgaataaataccagcacct

SEQ ID NO: 597886 - DNA, 75 bp, synthetic construct
  source 1..75: mol_type = other DNA
ccgggtggtttatgaccgagtttggtcgtcagccgtgggcgatacaggacatcttaccgacatactccgcgcact

SEQ ID NO: 597887 - DNA, 75 bp, synthetic construct
  source 1..75: mol_type = other DNA
aagcactcttgcggaggtgcgttagtcagaaaattccatgttgttactggtaaaacgtatcaataccatgtttgt

SEQ ID NO: 597888 - DNA, 75 bp, synthetic construct
  source 1..75: mol_type = other DNA
agtaaaaagaatcatcgagttacgacaaaaaggacttggtacaaataaaattgctaaaatattgaatgaagaagg

SEQ ID NO: 597889 - DNA, 75 bp, synthetic construct
  source 1..75: mol_type = other DNA
ttctcagagttttatttgggatggcaataatattaccttcgtttctgacaccaaaaaattactagaactagtaaa

SEQ ID NO: 597890 - DNA, 75 bp, synthetic construct
  source 1..75: mol_type = other DNA
caggtggccaaatttactgtgccactacataatcagaagatggggctgagtccgattatgcaacatgccgaaaca

SEQ ID NO: 597891 - DNA, 75 bp, synthetic construct
  source 1..75: mol_type = other DNA
ctcagatgccgctgcatgttatgcggaaaaccaataacaaggttgaagctgcccgcgatcaccctgtgttttacc

SEQ ID NO: 597892 - DNA, 75 bp, synthetic construct
  source 1..75: mol_type = other DNA
gaagctgaaccggtcgatgattgccgggatatttaatgtaccggcgcacatgattaacgatctcgaaaaagcaac

SEQ ID NO: 597893 - DNA, 75 bp, synthetic construct
  source 1..75: mol_type = other DNA
aatatgtggcagcgggcggtgacagcgcttcgcagccaggaaaataaaaccatgttgctgcctgcgcaactggat

SEQ ID NO: 597894 - DNA, 75 bp, synthetic construct
  source 1..75: mol_type = other DNA
acgttcgtttcaaccttacaggattgctccgcgggactccacaggagcgtgcgcagttttatcactttgccatta

SEQ ID NO: 597895 - DNA, 75 bp, synthetic construct
  source 1..75: mol_type = other DNA
gaaaaagtggcgatcaaatcccgcgcgccgattctgcttaacggtccaaccggcgcgggcaagtcatttctggcg

SEQ ID NO: 597896 - DNA, 75 bp, synthetic construct
  source 1..75: mol_type = other DNA
ttttctgcgggttttgccatgctggcgaaaactcagttcccggatgtgaatattctgcgcctggcgttctttggc

SEQ ID NO: 597897 - DNA, 75 bp, synthetic construct
  source 1..75: mol_type = other DNA
ttaggaaacttaggtgtaagtgtgatgcagctggttgcaccgctggtcatttttgtacccgtatttgcctttctc

SEQ ID NO: 597898 - DNA, 75 bp, synthetic construct
  source 1..75: mol_type = other DNA
ggatatttatcgttatcgctttgctatgcggttttgcaggtgcgaactttgcttcgagcatgggcaatatcagtt

SEQ ID NO: 597899 - DNA, 75 bp, synthetic construct
  source 1..75: mol_type = other DNA
atggcaaagctcaccgacaaacaagagctgtttgcccgtgagtacctgaaagatttaaacgccactcaggcagct

SEQ ID NO: 597900 - DNA, 75 bp, synthetic construct
  source 1..75: mol_type = other DNA
ctgacatcctagaggacgatttaagtattaagcctctgtctgcgtggccggaatcgtggcgtcggtacctgagtg

SEQ ID NO: 597901 - DNA, 75 bp, synthetic construct
  source 1..75: mol_type = other DNA
ctgctctcgctgcagctcacggattatgacccgctggcgtccaccctctccatccggcgtatcaagggagggctg

SEQ ID NO: 597902 - DNA, 75 bp, synthetic construct
  source 1..75: mol_type = other DNA
cggggttgatatggcgctgttaagaagcccggccagacggatgaagcttgccgctgaactggccgcaaaagacca

SEQ ID NO: 597903 - DNA, 75 bp, synthetic construct
  source 1..75: mol_type = other DNA
gtcagccctgtatcatttcgatatggagcaggagccggttctgtccgtaacgggcatgaatcgcccggtcataac

SEQ ID NO: 597904 - DNA, 75 bp, synthetic construct
  source 1..75: mol_type = other DNA
gaagaaattgaacaagaacaggtcgctcctggcacatttgcgatgtggtggcttggctgcaccgggatctggtta

SEQ ID NO: 597905 - DNA, 75 bp, synthetic construct
  source 1..75: mol_type = other DNA
tcgccgctgtgcgtactgggatatgttccgtgagtttgagtccattccggattttgacagtgcagcaagcacgct

SEQ ID NO: 597906 - DNA, 75 bp, synthetic construct
  source 1..75: mol_type = other DNA
agtaacctggtggaagagaaggtggaaaagactgccatctccatccgcagtgtgctgactaactacgtcaaggca

SEQ ID NO: 597907 - DNA, 75 bp, synthetic construct
  source 1..75: mol_type = other DNA
cgcatgacgatgcctttaccgcttacgccagtgcggaatgggttcaggctgtcaatgcggttcccgtcgccctca

SEQ ID NO: 597908 - DNA, 75 bp, synthetic construct
  source 1..75: mol_type = other DNA
ttcccgctttaaagttgccagattgatcgatgaggcgatcgaacaggattacgtgaggtttatcttccctaagca

SEQ ID NO: 597909 - DNA, 75 bp, synthetic construct
  source 1..75: mol_type = other DNA
atgagcagaaagaacctgtggcggccattgcgccgtctttatccacttccactcagaccagagtcagtgccagct

SEQ ID NO: 597910 - DNA, 75 bp, synthetic construct
  source 1..75: mol_type = other DNA
aaagcttaatggtaaccccttttagctatgcaaatacgcagtttaaaaatgttccgtcaacttttcaggtgggtt

SEQ ID NO: 597911 - DNA, 75 bp, synthetic construct
  source 1..75: mol_type = other DNA
acgtcgccatttcgctgaactggcggtgaagcaggagtttcagcgggttgaagcggaactggcatttcagcggga

SEQ ID NO: 597912 - DNA, 75 bp, synthetic construct
  source 1..75: mol_type = other DNA
cccagattgcacgagaaaatggcgttaatgataatgttattttcaaatggctcagactctggcaaaacgaagggc

SEQ ID NO: 597913 - DNA, 75 bp, synthetic construct
  source 1..75: mol_type = other DNA
tgaaaaatgcagatggtactgaagcgggttccgtgagagtgaatgcatcttatgctggggctgtggttgaaaaga

SEQ ID NO: 597914 - DNA, 75 bp, synthetic construct
  source 1..75: mol_type = other DNA
gtctggccgaaacatcatgaacaaagtccagctgcgcgtaactttcgtattcatctgctgaatgctctcaggtga

SEQ ID NO: 597915 - DNA, 75 bp, synthetic construct
  source 1..75: mol_type = other DNA
tcaagaaatgaggttcccaaatgcgagtggatacctgagtacatgccgggaacattgattgaatggtcattagtt

SEQ ID NO: 597916 - DNA, 75 bp, synthetic construct
  source 1..75: mol_type = other DNA
acgtattctggcgcagttggctgctggcttcatgggcggtaaccgtgacgaaggtgaagagagcaacggcaaccc

SEQ ID NO: 597917 - DNA, 75 bp, synthetic construct
  source 1..75: mol_type = other DNA
atgtttgctgatgacatgatcaatggaaaagagaatgacgaaacagaaaaaaacagccgctggcagggttacgat

SEQ ID NO: 597918 - DNA, 75 bp, synthetic construct
  source 1..75: mol_type = other DNA
aggagtatgcccgttttgaggcgctgatgaaagggcggcgcggtattcagtctcccggactggatcccctgacga

SEQ ID NO: 597919 - DNA, 75 bp, synthetic construct
  source 1..75: mol_type = other DNA
tctgcatgattcgccgcgccagcgaagagttgctggcggtaaacgatgagataacccatcactatgagcagttgc

SEQ ID NO: 597920 - DNA, 75 bp, synthetic construct
  source 1..75: mol_type = other DNA
cgtgaacttctccagcgtcagcggatctgcatgattcgccgcgccagcgaggatctgctggcggtaaacgacgag

SEQ ID NO: 597921 - DNA, 75 bp, synthetic construct
  source 1..75: mol_type = other DNA
agcgttgcatcgtggtcaaaccaggcgatgtggtaaaagtgaaagacattgaaattcatgcccttgacgcgttcg

SEQ ID NO: 597922 - DNA, 75 bp, synthetic construct
  source 1..75: mol_type = other DNA
ttccgggcctggatccaggcgaaaagcggtcgcgatgtgacgatcggtgaattcactgccagcctgaccgctacc

SEQ ID NO: 597923 - DNA, 75 bp, synthetic construct
  source 1..75: mol_type = other DNA
atgaataaatcaatgattcagtccggtggttacgtcctgttagcggggctgatattggcaatgagtagcacgtta

SEQ ID NO: 597924 - DNA, 75 bp, synthetic construct
  source 1..75: mol_type = other DNA
ttaatgtcaaagtaacgttgacaggaacagaagatagtgctctaggctttctggcctttgactcctcgtcatcag

SEQ ID NO: 597925 - DNA, 75 bp, synthetic construct
  source 1..75: mol_type = other DNA
aatcgtcaccattatgtcagcatagtgacaacgaaatggaaacgaaacgagaatgttccgtcgttattccagatg

SEQ ID NO: 597926 - DNA, 75 bp, synthetic construct
  source 1..75: mol_type = other DNA
tcaaggttgtttgaccgtttttatcgggtggatccgtccagacaacgaaaaggagaaggcagcggcatcggcctt

SEQ ID NO: 597927 - DNA, 75 bp, synthetic construct
  source 1..75: mol_type = other DNA
ctgatcattcgaatcgctgtccgtcaggggcacctgccccttcgtaatgtcagcaatgccattaaaaacatcacc

SEQ ID NO: 597928 - DNA, 75 bp, synthetic construct
  source 1..75: mol_type = other DNA
atacttccggggcaaaatttacgctaagtaatggcgacaataacatcaatttcaatgcctggttacaggcaaaaa

SEQ ID NO: 597929 - DNA, 75 bp, synthetic construct
  source 1..75: mol_type = other DNA
ctactggcggaagtgcatttccctaccgtcagcaatcgggatttagtctcagtcggccagtccgaccgtgtaccg

SEQ ID NO: 597930 - DNA, 75 bp, synthetic construct
  source 1..75: mol_type = other DNA
gcgcgcaggggatagggattggcatggaaaagtctgacggtacttgggtgccgcttaatgacacaactggcgcga

SEQ ID NO: 597931 - DNA, 75 bp, synthetic construct
  source 1..75: mol_type = other DNA
cactttcccaccattgccgccagcgatttaatgaacctcgggcagtcagagcgagtaccgttagtatttcaattg

SEQ ID NO: 597932 - DNA, 75 bp, synthetic construct
  source 1..75: mol_type = other DNA
ccaatcaacaatacaacaggcgtcacgctcccgctgaatcagggaaataacagcctaaattttaatacctggtta

SEQ ID NO: 597933 - DNA, 75 bp, synthetic construct
  source 1..75: mol_type = other DNA
atgaagacaggacgcatttattcgttcggctacgcgctgttagcggggctgctgttgaccggtggcacttgtgcc

SEQ ID NO: 597934 - DNA, 75 bp, synthetic construct
  source 1..75: mol_type = other DNA
ctacaggcaaaaagcgggcgggatgtgacgatgggtgactttacggcctccctcactgcgacgtttgagtatatt

SEQ ID NO: 597935 - DNA, 75 bp, synthetic construct
  source 1..75: mol_type = other DNA
gcgtccagaggtttactcgcagaactgatgttcatgctgtatggcattggcgaattgccggaaatcgtcaccctg

SEQ ID NO: 597936 - DNA, 75 bp, synthetic construct
  source 1..75: mol_type = other DNA
cagaagcaacgcctgacggcgtaaacatcatgtaccgcagcaacgatggcatgacagaacgcgttgagaccgtct

SEQ ID NO: 597937 - DNA, 75 bp, synthetic construct
  source 1..75: mol_type = other DNA
agtatttaacacgcatactaaatcatcagcgttgaagcccggttatttctgggaattaactaaggaggctgtctg

SEQ ID NO: 597938 - DNA, 75 bp, synthetic construct
  source 1..75: mol_type = other DNA
gattcccactactctaactactatgcaaaacatggtaatgagcatcagatcgacgtggctttaggttcatacggc

SEQ ID NO: 597939 - DNA, 75 bp, synthetic construct
  source 1..75: mol_type = other DNA
gcgcgatggcgggcgtcggcgcggttctgctggtgatcaccatctggttgctcaaccaggcttcggacatcctgt

SEQ ID NO: 597940 - DNA, 75 bp, synthetic construct
  source 1..75: mol_type = other DNA
gcggcttttgaagctgaacgtcgtcgtgaagcagagcagacgcgaattctggctgaacgacagattcaggaaaca

SEQ ID NO: 597941 - DNA, 75 bp, synthetic construct
  source 1..75: mol_type = other DNA
taaatgcacagggcggtgcatttgcccagtccaaagcacaggaaaaacagaaagttgaaacgctgttaaaagaaa

SEQ ID NO: 597942 - DNA, 75 bp, synthetic construct
  source 1..75: mol_type = other DNA
ctttctcactcgctctgcggctgaccttttttatcagcctgtccacgatactggcttttatcgccttcacctggt

SEQ ID NO: 597943 - DNA, 75 bp, synthetic construct
  source 1..75: mol_type = other DNA
tgaaaaaaaatctgattgcgatcgctgtcgtgataagtctgctaattattctgatcattcgcattgctgtccgtc

SEQ ID NO: 597944 - DNA, 75 bp, synthetic construct
  source 1..75: mol_type = other DNA
tattgggcctggatctgatatccaaactgcgtaatgacttaatgattttcgttaagcgccaacaatccagccagt

SEQ ID NO: 597945 - DNA, 75 bp, synthetic construct
  source 1..75: mol_type = other DNA
tttcttttcttcgtgctgatgtgtctcttgcggatatcgggttttcgtcgtcggcctcaggaactgtcaacgcag

SEQ ID NO: 597946 - DNA, 75 bp, synthetic construct
  source 1..75: mol_type = other DNA
ttattgaggtttgtgtagttttaatttcatcattattttttatatatatatcttcatatatattacatttaagca

SEQ ID NO: 597947 - DNA, 75 bp, synthetic construct
  source 1..75: mol_type = other DNA
atcgcggctttgcgactctattgccgaagcagtaggtgtgcctggcggcgtcaaataccagttcgtgtcccagcc

SEQ ID NO: 597948 - DNA, 75 bp, synthetic construct
  source 1..75: mol_type = other DNA
atgcataaccacgaaattcagaccattgctatatttagtgcccagtataaaaacatcgaagatgctgaaaatgca

SEQ ID NO: 597949 - DNA, 75 bp, synthetic construct
  source 1..75: mol_type = other DNA
tcacccgtccagttctgcaagccgatgaagatcttggcttcttacctggtgatatcgcagaaaagtttgctccct

SEQ ID NO: 597950 - DNA, 75 bp, synthetic construct
  source 1..75: mol_type = other DNA
acagattgacaaaagggccgctgagaaaatcagcgccagtcagtcagccggaagcaaacccgaagagccgctcat

SEQ ID NO: 597951 - DNA, 75 bp, synthetic construct
  source 1..75: mol_type = other DNA
atgacatttctaaaccagttaatgctgtacttctgtacggtggtctgtgtgctgtatctcctttcgggtgggtac

SEQ ID NO: 597952 - DNA, 75 bp, synthetic construct
  source 1..75: mol_type = other DNA
ctgcacagcgacgacagcgatgtgcgcatccgctactttacgccaacggttgaagtgccgatttgcggtcacgcg

SEQ ID NO: 597953 - DNA, 75 bp, synthetic construct
  source 1..75: mol_type = other DNA
gggatcgtccggttcggtaaagaggactgcgtacgttcggcactttgccaacgtacgctgcatgcatacagttaa

SEQ ID NO: 597954 - DNA, 75 bp, synthetic construct
  source 1..75: mol_type = other DNA
atgcttttacctcacaaccgtttcgcggcaattctgccggtgttgttttccccgccgataatcttagcgaagcgc

SEQ ID NO: 597955 - DNA, 75 bp, synthetic construct
  source 1..75: mol_type = other DNA
agtaacggaaaggtcatgacggaaaaagacgggctctgtaacccctttcccccgaactgtattgaatcggctcat

SEQ ID NO: 597956 - DNA, 75 bp, synthetic construct
  source 1..75: mol_type = other DNA
tcgcggagttttctcctccggtagtcatctcgtcactttgcattttcaacctcatcctttcttttcatgtgttac

SEQ ID NO: 597957 - DNA, 75 bp, synthetic construct
  source 1..75: mol_type = other DNA
taagcagcgtgaagaagaatcggtcacctcgcttgtgcagatgagcggcgtagaagccattggtatggcccgcga

SEQ ID NO: 597958 - DNA, 75 bp, synthetic construct
  source 1..75: mol_type = other DNA
ttttagataatcaacgcgccaccactcgcggagatttctcctccggtagtcatctcgtcactttgcattttcaac

SEQ ID NO: 597959 - DNA, 75 bp, synthetic construct
  source 1..75: mol_type = other DNA
cattctggatgaactgctgggcgcaccggcagctccggagccggaaggcatcgcgggtgaggggagtgcttcaga

SEQ ID NO: 597960 - DNA, 75 bp, synthetic construct
  source 1..75: mol_type = other DNA
cgcagaggttctggcatcctggctggtaaagcatacagagtttgacggtgcacctgtcgacgcactgtgtgcagt

SEQ ID NO: 597961 - DNA, 75 bp, synthetic construct
  source 1..75: mol_type = other DNA
tgggtacagggcagtgcgcgatttctggtgcaggcagattgataaaagggccgctgagaaaatcagcgccagtca

SEQ ID NO: 597962 - DNA, 75 bp, synthetic construct
  source 1..75: mol_type = other DNA
ggatgccattctggatgaactgctgggcgcaccgactgttccggagccggaaggcattgcggatgacagtgctgt

SEQ ID NO: 597963 - DNA, 75 bp, synthetic construct
  source 1..75: mol_type = other DNA
aaaaaagggattcgtgggtggagtcgccgcacggataaccgcagggctttttctgcggttattgatgtcgctgta

SEQ ID NO: 597964 - DNA, 75 bp, synthetic construct
  source 1..75: mol_type = other DNA
aatgtaagcgcccttacattgttccatataccaacgatactcattgccctcggtgtagattgtcgtcaacggcat

SEQ ID NO: 597965 - DNA, 75 bp, synthetic construct
  source 1..75: mol_type = other DNA
attggggagctagaaacttgtgcgaaatgtaagcgtccttacattgttccatataccaacgatactcattgccct

SEQ ID NO: 597966 - DNA, 75 bp, synthetic construct
  source 1..75: mol_type = other DNA
actttcttaacaacacctttcaacgagaaaaccgccagaatcttgaggcgcgtcttgatgctgaagtggatgcca

SEQ ID NO: 597967 - DNA, 75 bp, synthetic construct
  source 1..75: mol_type = other DNA
gcgctctgaagaagtcagaagcgcactgaaacagcaactccgccagaatcttgaggcgcgtcttgatgctgaagt

SEQ ID NO: 597968 - DNA, 75 bp, synthetic construct
  source 1..75: mol_type = other DNA
ccggcagctccggagccggaaggcatcgcgggtgaggggagtgcttcagatagcggtgaccccacaccggacagc

SEQ ID NO: 597969 - DNA, 75 bp, synthetic construct
  source 1..75: mol_type = other DNA
caaagcacgaaggtgggtattatttctccggtgctgctaccggattatgtggcacttttccccgagctgaccacc

SEQ ID NO: 597970 - DNA, 75 bp, synthetic construct
  source 1..75: mol_type = other DNA
gcgctctgaagaagtcagaagcgcactgaaacagcaacttcgtcagaatcttgaggcgcgtcttgatgctgaagt

SEQ ID NO: 597971 - DNA, 75 bp, synthetic construct
  source 1..75: mol_type = other DNA
gtgactatcgaaaagcacaacgatgattatcgtatttcgctggaacaaggtacgccgggctttgaaccgccgctg

SEQ ID NO: 597972 - DNA, 75 bp, synthetic construct
  source 1..75: mol_type = other DNA
gaaagaggtcaacggtaaaccgtgtaacgtggttgagttacaaggcaccgttggggcgagcgttgccatcgaccg

SEQ ID NO: 597973 - DNA, 75 bp, synthetic construct
  source 1..75: mol_type = other DNA
atgggtcaaccatgacaatcaacacacagggaaccgctcattctggcgctactactagtttgtggggtaactcta

SEQ ID NO: 597974 - DNA, 75 bp, synthetic construct
  source 1..75: mol_type = other DNA
cgaccgcatccgtaaaatgaacggctacacatacacgcttaaagaaaacggtatgccctatgctggtgtcattgc

SEQ ID NO: 597975 - DNA, 75 bp, synthetic construct
  source 1..75: mol_type = other DNA
gagaaattccgtggtgtgcgcctgtatgtcagtgaaaaccagttgaaaattaccgccaacaacccggaacaggaa

SEQ ID NO: 597976 - DNA, 75 bp, synthetic construct
  source 1..75: mol_type = other DNA
gcttattaagtttgactgcacagacacattacaaatcaaatatgctaatcatgggtcaaccatgacattaaacac

SEQ ID NO: 597977 - DNA, 75 bp, synthetic construct
  source 1..75: mol_type = other DNA
acgggtcgaccatgacattaaacacacagggaaccgcttatgctggtgttactgctaaattgtggggcaactcta

SEQ ID NO: 597978 - DNA, 75 bp, synthetic construct
  source 1..75: mol_type = other DNA
gtcagacgacagaataacagcactggaagaagaaaacgcagaattaagacaaagattatctgcaattgaggtggc

SEQ ID NO: 597979 - DNA, 75 bp, synthetic construct
  source 1..75: mol_type = other DNA
acattacaaatcaaatacgctaatcatgggtcaaccatgacattaaacacgcaaggtacggcgtattctggtgtg

SEQ ID NO: 597980 - DNA, 75 bp, synthetic construct
  source 1..75: mol_type = other DNA
ggatgatggcgggctttttttgttttatgcacaaaggaacccagataaaacctatcagcttgagataaacgggcc

SEQ ID NO: 597981 - DNA, 75 bp, synthetic construct
  source 1..75: mol_type = other DNA
gctgggccttcagcattgacgatgtcgcaaagcaagctcaatccttagccgggaaaggctatgaggcacctaaaa

SEQ ID NO: 597982 - DNA, 75 bp, synthetic construct
  source 1..75: mol_type = other DNA
gtcgaatttaccctgccgcaggcgacgatgaagcgtctgattgaagcgacccagttttcgatggcgcatcaggac

SEQ ID NO: 597983 - DNA, 75 bp, synthetic construct
  source 1..75: mol_type = other DNA
tatgcacaaaggaacccagataaaacctatcagcttgagataaacgggtcatgcaaggctacatcattcgaccag

SEQ ID NO: 597984 - DNA, 75 bp, synthetic construct
  source 1..75: mol_type = other DNA
gcttatagtgacatatataccagaaaaaatattgatggtactaaagatacaatgacgaggatcgtcacacataac

SEQ ID NO: 597985 - DNA, 75 bp, synthetic construct
  source 1..75: mol_type = other DNA
tgctgatggtggcgcgtatatgttctatgcgcagaaaaataccgataacacctatatgttaagcgttaatggtgc

SEQ ID NO: 597986 - DNA, 75 bp, synthetic construct
  source 1..75: mol_type = other DNA
aggcttgctgacagcacaacaggcactggagaaatttaatggcgataagacagcagcggcgaattatttaggtat

SEQ ID NO: 597987 - DNA, 75 bp, synthetic construct
  source 1..75: mol_type = other DNA
cggaaagctttttgaaaatgtctctggcggcactctctgtccctttttctgccgcattacgtcagggattagaga

SEQ ID NO: 597988 - DNA, 75 bp, synthetic construct
  source 1..75: mol_type = other DNA
tgttttatcggctgagtattttgcgtctacaactgccgccgctacgcgagcgggtggcggatattctgccgctgg

SEQ ID NO: 597989 - DNA, 75 bp, synthetic construct
  source 1..75: mol_type = other DNA
gctgacgctgaccaaatccaccctttatctgcctgataccgcaaaagaagagttagagaagaagaaaaatatggg

SEQ ID NO: 597990 - DNA, 75 bp, synthetic construct
  source 1..75: mol_type = other DNA
tgcttgaccgttccatcgatgtgaaagacaaatctctctatatgaccaccgtcactgccgacaacatcctcgaag

SEQ ID NO: 597991 - DNA, 75 bp, synthetic construct
  source 1..75: mol_type = other DNA
cggaaagctttttgaaagtgtctctggcggcgctctccgccccgttttctgccgcattacgccaggggttacagg

SEQ ID NO: 597992 - DNA, 75 bp, synthetic construct
  source 1..75: mol_type = other DNA
gagctactgactatcgcagaagttaaccagaacgttccggcgaatccgccgaaaaccttgcaggaagcgctgcaa

SEQ ID NO: 597993 - DNA, 75 bp, synthetic construct
  source 1..75: mol_type = other DNA
cgaagtagtgaaagcgaatccaggaatgccaaccatcctgctgcgtgctaaagcgttccgtcacgcctgtgaaac

SEQ ID NO: 597994 - DNA, 75 bp, synthetic construct
  source 1..75: mol_type = other DNA
ggcaatcaaacagcaattggaagagaaaacccgctcactgggcagcgccgttagccgcagtggtatggatgaagt

SEQ ID NO: 597995 - DNA, 75 bp, synthetic construct
  source 1..75: mol_type = other DNA
cctgcaactgccgccactgcgcgagcgggtagcggatattttgccgctggcagagcgctttttgaaagtgtcgct

SEQ ID NO: 597996 - DNA, 75 bp, synthetic construct
  source 1..75: mol_type = other DNA
aaactaattgatgcgcgtactggacaattcgcactaacggagcttttgaacgaagctaaacagcgcattgttgaa

SEQ ID NO: 597997 - DNA, 75 bp, synthetic construct
  source 1..75: mol_type = other DNA
tgatgtggatgtccagcgaactgggagcgaaatattttgcgggttatcagccatttatcaacctgactgtcggtg

SEQ ID NO: 597998 - DNA, 75 bp, synthetic construct
  source 1..75: mol_type = other DNA
ctgactattgatatgccgtcggtgggcttttcttcaaaatggaagctcacccaggactccagcctgttgcatcag

SEQ ID NO: 597999 - DNA, 75 bp, synthetic construct
  source 1..75: mol_type = other DNA
tgctgctggccccgggatccgtcagtgaaatgcagagctatattccggaaaaccgctgttaccgtgcacccctgg

SEQ ID NO: 598000 - DNA, 75 bp, synthetic construct
  source 1..75: mol_type = other DNA
cgccgcatccaggccctgtcgccgcagcggggttactccacgcagacatcggctggctaaccatcatcggtattg

SEQ ID NO: 598001 - DNA, 75 bp, synthetic construct
  source 1..75: mol_type = other DNA
cgtgattttacgccgttcatatgaacggcaggggatcccctgcccgtggcgttacaccaatgatcgcgatgtaag

SEQ ID NO: 598002 - DNA, 75 bp, synthetic construct
  source 1..75: mol_type = other DNA
actgacaaagttttccctaatcctggcaattcaggcctggggctaatgactgcttttttcgaagcatacctgggc

SEQ ID NO: 598003 - DNA, 75 bp, synthetic construct
  source 1..75: mol_type = other DNA
caaaaaaattatcggttgcaatatcacgcggtgttgtcgcaatggacgatgccggatttgacgaagaggatttta

SEQ ID NO: 598004 - DNA, 75 bp, synthetic construct
  source 1..75: mol_type = other DNA
gaagcgattctggcggacttgcctccggtgcgcgaaacccagggtaagccgaaaatcgcggtggtggcgcatgac

SEQ ID NO: 598005 - DNA, 75 bp, synthetic construct
  source 1..75: mol_type = other DNA
cgaaaaggtgaaaaaccacaaaccggatgtcactctggtctggacgctgcacgatcactggagcgttaccggacg

SEQ ID NO: 598006 - DNA, 75 bp, synthetic construct
  source 1..75: mol_type = other DNA
gtggcgtgattttgagttttcagaaggtttttatgaagaacttgagaaacatttgaaagagttgtcagtagatta

SEQ ID NO: 598007 - DNA, 75 bp, synthetic construct
  source 1..75: mol_type = other DNA
cgctggtactggcgttctggttattagccttacgtcgcggctggagcctgcaacacaccagcgatattatgggct

SEQ ID NO: 598008 - DNA, 75 bp, synthetic construct
  source 1..75: mol_type = other DNA
tgcggcctttggtttccgttttggtgctaacgtcgctgtacgtctggcttaccttgaatcgccgcgtctgaaagc

SEQ ID NO: 598009 - DNA, 75 bp, synthetic construct
  source 1..75: mol_type = other DNA
acgaccactggagtgtcaccggacgctgcgcctttaccgacggttgtgaaggctggaaaacgggctgtcagaaat

SEQ ID NO: 598010 - DNA, 75 bp, synthetic construct
  source 1..75: mol_type = other DNA
ggagaacactggcggcaatcagcatcatgccagcgatagtgaaactggcgaggcgtcagatcccttaattaaggt

SEQ ID NO: 598011 - DNA, 75 bp, synthetic construct
  source 1..75: mol_type = other DNA
ggatcaagacaccttctatgatggccgtgaccgcaacatcaacaaacgtggttatctgatgggtatccgcgaaac

SEQ ID NO: 598012 - DNA, 75 bp, synthetic construct
  source 1..75: mol_type = other DNA
cgtcatcagggcgtagtgaagattggtcgtgataagcaagtgaaatggatccttgcgccatcgaaaggctgggaa

SEQ ID NO: 598013 - DNA, 75 bp, synthetic construct
  source 1..75: mol_type = other DNA
caaagaagtgaaagtggaaatcgacgtgctgtcagataaacccaatcagactcactatcgtgcactgttagtccg

SEQ ID NO: 598014 - DNA, 75 bp, synthetic construct
  source 1..75: mol_type = other DNA
cagttagccgccttgtttcaggatgattcggagccgttaagcgagattcgtacccgctgtgagacactgttacag

SEQ ID NO: 598015 - DNA, 75 bp, synthetic construct
  source 1..75: mol_type = other DNA
ccgatcgtgacgggttgtgcctgttcgccaaacgtctcgagcggggccgcttcgtgtggccggtgtcccgcgaag

SEQ ID NO: 598016 - DNA, 75 bp, synthetic construct
  source 1..75: mol_type = other DNA
ccgtgcagatcgatgtctgggcaacggtacctgatgatgctgatggtattcgcgagcaggcgcttgatgcggtaa

SEQ ID NO: 598017 - DNA, 75 bp, synthetic construct
  source 1..75: mol_type = other DNA
tgaagagaatcaggctgcaactcaggaaaatgatccggaggaaatggaaggcgctgaacatccgaacaatgagaa

SEQ ID NO: 598018 - DNA, 75 bp, synthetic construct
  source 1..75: mol_type = other DNA
cggtcgaccttgaaacgatgggaacaaatcctgatgcgccaatcaactctattggcggtaaattttttgatccgg

SEQ ID NO: 598019 - DNA, 75 bp, synthetic construct
  source 1..75: mol_type = other DNA
agcacttcgcgcaaccccgggtattctggactattcccgcgccgctatttttgcacttatccgaagcgcacaccc

SEQ ID NO: 598020 - DNA, 75 bp, synthetic construct
  source 1..75: mol_type = other DNA
ggatcaagacactttctacgatggtcgtgaccgcgatatcaacaagcgtggttatctgatgggtatccgcgaaac

SEQ ID NO: 598021 - DNA, 75 bp, synthetic construct
  source 1..75: mol_type = other DNA
caacataccaggaaatattcgatggagagaatcagcctgaagttcaggaaaatgatccggaggaaatggaaggca

SEQ ID NO: 598022 - DNA, 75 bp, synthetic construct
  source 1..75: mol_type = other DNA
ttgaccgctacccgaagcttaaagaaggttattacgtttgtgtcgatggtaaatgcccttacggtgatcagattg

SEQ ID NO: 598023 - DNA, 75 bp, synthetic construct
  source 1..75: mol_type = other DNA
gctggtgcgtttagtggcgctggtgcaaatggggatcgcctggggcaacctgttactggcgttgatgaaaggctt

SEQ ID NO: 598024 - DNA, 75 bp, synthetic construct
  source 1..75: mol_type = other DNA
tgctgaacaacgcacggaacgtctgctttccgatcgccaatgggcgcagcgttttcgctcagaaccattaacggc

SEQ ID NO: 598025 - DNA, 75 bp, synthetic construct
  source 1..75: mol_type = other DNA
cttctctcgccgtccagcctgatttacgtgctaaccttagcgcccgcacatttgcgttttattatttatgtggtg

SEQ ID NO: 598026 - DNA, 75 bp, synthetic construct
  source 1..75: mol_type = other DNA
ggtggttcggcggcgattagcgtcgatggatttgatgatgtcaccgacttactgcgtaaaaccctggttagttac

SEQ ID NO: 598027 - DNA, 75 bp, synthetic construct
  source 1..75: mol_type = other DNA
cccatgaagctattgagattttgaaaaacgatggtgtcatcaccggtggccgtgtcactgaaatggctgttgaaa

SEQ ID NO: 598028 - DNA, 75 bp, synthetic construct
  source 1..75: mol_type = other DNA
gtggacggtagtgcggaactggacggtgatgaggggacacttgctggcatggtggcgttactggtgcttaataaa

SEQ ID NO: 598029 - DNA, 75 bp, synthetic construct
  source 1..75: mol_type = other DNA
atgatcctgcacgcgaaggaaaaacacggcaagccaggtttaccctggctggtttttctgcacggtttttccggt

SEQ ID NO: 598030 - DNA, 75 bp, synthetic construct
  source 1..75: mol_type = other DNA
atggatttgatgatgtcaccggcttattgtgtaaaacgctggttagttacaacatccttaacttctggctggtgg

SEQ ID NO: 598031 - DNA, 75 bp, synthetic construct
  source 1..75: mol_type = other DNA
actgcgtaaaacccttgttagttacaacatacttaactgctggctggtggggtactcgctcggtggacgcgtggc

SEQ ID NO: 598032 - DNA, 75 bp, synthetic construct
  source 1..75: mol_type = other DNA
tgaggtgccgatttgcggacacgcgactgtggcagcgcactatgtacgatcgaaagtgttaggtttggggaattg

SEQ ID NO: 598033 - DNA, 75 bp, synthetic construct
  source 1..75: mol_type = other DNA
aaggcgggcatccggggttgcaaaatgctgaacaacgcgcggaacgtcagcgttccgatcgccaatgggcgcagc

SEQ ID NO: 598034 - DNA, 75 bp, synthetic construct
  source 1..75: mol_type = other DNA
gttgtatgttgatctcccaggtcacggtggttcggcggcgattagcgtcgatggatttgatgatgtcaccgactt

SEQ ID NO: 598035 - DNA, 75 bp, synthetic construct
  source 1..75: mol_type = other DNA
gttttcgcacagaaccattaacggcggtctttgccgactggtatcaacaaccggtttttgcctcgctcaacgacg

SEQ ID NO: 598036 - DNA, 75 bp, synthetic construct
  source 1..75: mol_type = other DNA
cccatgaggccattgaaattctgaaaaatgacggcgtcatcacgggtggcagtgtcacaaaaacgacagttgaag

SEQ ID NO: 598037 - DNA, 75 bp, synthetic construct
  source 1..75: mol_type = other DNA
aacacgaaaccaacggaagaagaaattgatcagtttgctcatgatgctggtttaaaaaacaaggaagaaaaatcg

SEQ ID NO: 598038 - DNA, 75 bp, synthetic construct
  source 1..75: mol_type = other DNA
ttctgtgcgtctgtaaataaacacgacccagagagtgtggcaaagaaaattgcagaaacgacagtgcaaaacatc

SEQ ID NO: 598039 - DNA, 75 bp, synthetic construct
  source 1..75: mol_type = other DNA
aactgtaacatatttgcccgctgatgcaggaagacgtgatggtacaaaacttccgactggtgctgttcaaggccg

SEQ ID NO: 598040 - DNA, 75 bp, synthetic construct
  source 1..75: mol_type = other DNA
tccctgcgcatggtgcactgggcgcggcgcaggcatatatggcaacttatatcgtctatttttctctttgttgtg

SEQ ID NO: 598041 - DNA, 75 bp, synthetic construct
  source 1..75: mol_type = other DNA
ggcagtggcggcggcgagttttaccgtctggttgctgcgtgattttgctatctggctgctgttgtcgaataaatt

SEQ ID NO: 598042 - DNA, 75 bp, synthetic construct
  source 1..75: mol_type = other DNA
caatccaggagattgcagtacacacactacgtcaacgtctgaacgaacttgcattggaatcggtaacgaaaaaag

SEQ ID NO: 598043 - DNA, 75 bp, synthetic construct
  source 1..75: mol_type = other DNA
aaaacttcccgccgttaccgcgctggccatctcaaataaagcagtgcaactcgaaccgctggagattcgggattt

SEQ ID NO: 598044 - DNA, 75 bp, synthetic construct
  source 1..75: mol_type = other DNA
cgcataaataccggattgaagccaccatcctgaagcctggtggtgcaccggtatcctgggtgcgttttcagaaca

SEQ ID NO: 598045 - DNA, 75 bp, synthetic construct
  source 1..75: mol_type = other DNA
gaagccggtaaatcattcaccgttaaagtcggggttactcaattttcatgtaaggaaaatccacctgcacctgga

SEQ ID NO: 598046 - DNA, 75 bp, synthetic construct
  source 1..75: mol_type = other DNA
ccgtggcgctaccacaacgatcgcgatgtacacacaattgttgagctggggaaagccatagacttcgatgccaga

SEQ ID NO: 598047 - DNA, 75 bp, synthetic construct
  source 1..75: mol_type = other DNA
ccggtaacacacgtttcacgggaagaacttcgggcattgcatagtgcactggatgaagaactccctacggttaca

SEQ ID NO: 598048 - DNA, 75 bp, synthetic construct
  source 1..75: mol_type = other DNA
tttaccgatgaaatctcgttagatgttgctctccggctattcatagaatttatcgaaaaaaactccggcgggtgt

SEQ ID NO: 598049 - DNA, 75 bp, synthetic construct
  source 1..75: mol_type = other DNA
accggcgtggcctgttcggtgtgccccggcggggtgacgtccggccatccggtcaatccgctgctcggtgcaaag

SEQ ID NO: 598050 - DNA, 75 bp, synthetic construct
  source 1..75: mol_type = other DNA
atggtctttgcggcacactatccgctatgataggtccagataaatttgattcggtgatgcttccaattagtagaa

SEQ ID NO: 598051 - DNA, 75 bp, synthetic construct
  source 1..75: mol_type = other DNA
ctgacagacatcagccatatcagcgaagggcaccgggtggcggtgcattatgggtatgataataaaggccgcctg

SEQ ID NO: 598052 - DNA, 75 bp, synthetic construct
  source 1..75: mol_type = other DNA
attggcggcgtggtgctggcggttaacattccagggctgaagtctggcgaactggtgctggatggtaaaaccctc

SEQ ID NO: 598053 - DNA, 75 bp, synthetic construct
  source 1..75: mol_type = other DNA
tatgttgacctcgcgtccggaaattcgtttctacgccacgtatatcaaagccctggaaaacgaactggatggctt

SEQ ID NO: 598054 - DNA, 75 bp, synthetic construct
  source 1..75: mol_type = other DNA
ctccacggacaataccgaagcggtcatggcggaagtcaaacgcaaatggggcgaccgctttattgccgtcacgca

SEQ ID NO: 598055 - DNA, 75 bp, synthetic construct
  source 1..75: mol_type = other DNA
ccggcaaacttatccgcagcgaggatgaggggctggtcacccactggcactatgacgaagcagaccgcctcacgc

SEQ ID NO: 598056 - DNA, 75 bp, synthetic construct
  source 1..75: mol_type = other DNA
tttagaggattaagaaaaggcataaaccaaacatgctacgatgatactgaatatagtttttacattgatattgat

SEQ ID NO: 598057 - DNA, 75 bp, synthetic construct
  source 1..75: mol_type = other DNA
acgatacagaacgacaggagccgcatccagacgatttatcagccggggagcttcacaccactcatcagagttgaa

SEQ ID NO: 598058 - DNA, 75 bp, synthetic construct
  source 1..75: mol_type = other DNA
ggaacgacaacggcgaactcatccgcatcagcagcccgcgccagacccggagttacagctacagcgacaccggca

SEQ ID NO: 598059 - DNA, 75 bp, synthetic construct
  source 1..75: mol_type = other DNA
actcggcgacacaccgctggtggagtacacccgcgaccgcctgcaccgggaaacgctgcgcagcttcggccgtta

SEQ ID NO: 598060 - DNA, 75 bp, synthetic construct
  source 1..75: mol_type = other DNA
gctcggtgcaaaggtccttcccggtgaaaccgacatcgccctgcccgccccgctgccgttcatcctctcccgcac

SEQ ID NO: 598061 - DNA, 75 bp, synthetic construct
  source 1..75: mol_type = other DNA
gacataacatctactgatgagcttcttgagtttttgaatgctgtagccaaagaatcaactgttgaaatttcatat

SEQ ID NO: 598062 - DNA, 75 bp, synthetic construct
  source 1..75: mol_type = other DNA
gccagcttgatgcactaattcgccagtttgacccgctatccgctggctgcccgccgctggagttcatgcaggtac

SEQ ID NO: 598063 - DNA, 75 bp, synthetic construct
  source 1..75: mol_type = other DNA
tggcgcgtcaccagttattcaggtttgcagcagcgtggtcatggtatcgctcaggatctgatgccacggctggat

SEQ ID NO: 598064 - DNA, 75 bp, synthetic construct
  source 1..75: mol_type = other DNA
agcagtggcgcgacgcagtgggtgaactggatgcgctgatcgaatcttctggtattgatcgacgcaagtttaacc

SEQ ID NO: 598065 - DNA, 75 bp, synthetic construct
  source 1..75: mol_type = other DNA
ccgcaacaagggatttacacaacccgacccaacgccgggttgattgacctgatggatgagatgtttgccggtatg

SEQ ID NO: 598066 - DNA, 75 bp, synthetic construct
  source 1..75: mol_type = other DNA
acaggtggagatggagttttacctgccgattagtgaaccgctcatcgccagccagcttgatgcactaattcgcca

SEQ ID NO: 598067 - DNA, 75 bp, synthetic construct
  source 1..75: mol_type = other DNA
ggtattgatcgacgcaagtttaaccgtagcaatcaggctaaatggatcgacaagatcagcgcctgggcagaagaa

SEQ ID NO: 598068 - DNA, 75 bp, synthetic construct
  source 1..75: mol_type = other DNA
attgagtttaatcatcttattgctgaacatgccgttcatgatgaaaaactgattaaccatactgtctgtattctg

SEQ ID NO: 598069 - DNA, 75 bp, synthetic construct
  source 1..75: mol_type = other DNA
tctcaggtgcaattggtggaaaaaagcaccaaagcggtaaacgaagcacaagacaatgtgctcaagttgttgatt

SEQ ID NO: 598070 - DNA, 75 bp, synthetic construct
  source 1..75: mol_type = other DNA
attaatgtaaaaggcgatccaaatagatataattcttcattgactgcgtcaatgctttttggtatggcagagctt

SEQ ID NO: 598071 - DNA, 75 bp, synthetic construct
  source 1..75: mol_type = other DNA
cagctgattgaagatgagtctctgctacgctaccaggcctgcgccgatttctggcgtcgccactgctacccgctg

SEQ ID NO: 598072 - DNA, 75 bp, synthetic construct
  source 1..75: mol_type = other DNA
atgatgagtagcttcatcatgaccctttccttatttaaggccccttcctcgggaggggctttcccgtttcagcgt

SEQ ID NO: 598073 - DNA, 75 bp, synthetic construct
  source 1..75: mol_type = other DNA
acccaccacctgcgatggtcgcggcctccatcctggagcgccgtggcgacacagcagcccttacccggctacagg

SEQ ID NO: 598074 - DNA, 75 bp, synthetic construct
  source 1..75: mol_type = other DNA
ggtgcgcattggtgcccccaccggcgtggcctgttcggtgtgccccggcggagtgacgtccggccatccggtcaa

SEQ ID NO: 598075 - DNA, 75 bp, synthetic construct
  source 1..75: mol_type = other DNA
gtactggcacaaaaatcatgggatcagcgcggtaaattctctacagcattcaatccctgccttcctgccccattt

SEQ ID NO: 598076 - DNA, 75 bp, synthetic construct
  source 1..75: mol_type = other DNA
cgtaaagtcctcgacaaggaaaatctggcgtgggatgaagatttaacaaagtcactgtctggatttttctctgct

SEQ ID NO: 598077 - DNA, 75 bp, synthetic construct
  source 1..75: mol_type = other DNA
cctgggatcagcgaggaaagttttccaccgagtttaacccctgcattgccgtaccatttggtcccagggatacgc

SEQ ID NO: 598078 - DNA, 75 bp, synthetic construct
  source 1..75: mol_type = other DNA
gccgggaatgcttcagcggtgaccgtgatgccgtgcgtcggaaggcgacggcttatgcattgcagacgttgtggc

SEQ ID NO: 598079 - DNA, 75 bp, synthetic construct
  source 1..75: mol_type = other DNA
gaaagcccgtggcgcaaccgtaacaactgctgagtcttgtaccggcggttgggtagcgaaagtgattaccgatat

SEQ ID NO: 598080 - DNA, 75 bp, synthetic construct
  source 1..75: mol_type = other DNA
gtttgaatctgacggaccgctgatcttactggataaccgctctccggatgaacgcgaagcccatcttaatgacca

SEQ ID NO: 598081 - DNA, 75 bp, synthetic construct
  source 1..75: mol_type = other DNA
aatgccaggaataatggattctatgttgccggtatctataaagaaaaggcgtccggtgcaagagctgaccgcccg

SEQ ID NO: 598082 - DNA, 75 bp, synthetic construct
  source 1..75: mol_type = other DNA
tttcgcgatatcagcctcgagtttgatcacctggcgaatatcacccctattcagcttggctttgaaaaagcagtg

SEQ ID NO: 598083 - DNA, 75 bp, synthetic construct
  source 1..75: mol_type = other DNA
tttaatttgcgcctcgatcaacgtagctacattaccgaggaagacgcacgcgggcagattaacgagctaaaagct

SEQ ID NO: 598084 - DNA, 75 bp, synthetic construct
  source 1..75: mol_type = other DNA
cttgtatatcaatgggcatcgcctcgctgaccccgagagtttccgtgtgctggcgcagaagtcctgggatcagcg

SEQ ID NO: 598085 - DNA, 75 bp, synthetic construct
  source 1..75: mol_type = other DNA
gatgttccgccacataaattccgaagctctaacatgcaaggtgaatcgcgttatttgcatccgctgaaccattgc

SEQ ID NO: 598086 - DNA, 75 bp, synthetic construct
  source 1..75: mol_type = other DNA
ctcaatccggtgtcgcgaaggtcgttctggaatctgttcaggatatgttactcaaagttgccctacagttggcaa

SEQ ID NO: 598087 - DNA, 75 bp, synthetic construct
  source 1..75: mol_type = other DNA
taagcgagcaggtagggcaggcgctgaaagcccgtggcgcaatcgtaacaaccgctgagtcttgtaccggcggct

SEQ ID NO: 598088 - DNA, 75 bp, synthetic construct
  source 1..75: mol_type = other DNA
tttgtattgttggcacccatacgctgcgtcaggcgttgaatgctactgactttttgaaacgcgcggaaaaggtca

SEQ ID NO: 598089 - DNA, 75 bp, synthetic construct
  source 1..75: mol_type = other DNA
catgtacgaacagtggcgggaacagcagccgaagctggcgcatccgcaactggaagcgttactacgctgggcggc

SEQ ID NO: 598090 - DNA, 75 bp, synthetic construct
  source 1..75: mol_type = other DNA
cggtcatcgtgcatcacggttatttctggaaaggtgaatctccggtgattcgcggcatgaaacgccgtcgtttaa

SEQ ID NO: 598091 - DNA, 75 bp, synthetic construct
  source 1..75: mol_type = other DNA
gaaatggcttgcgtggcattcgaaaccattcgcggctcagatgtaatggacgccgtatctgagttggaggatgaa

SEQ ID NO: 598092 - DNA, 75 bp, synthetic construct
  source 1..75: mol_type = other DNA
gctcgacgatctgccgcgctttacgctgtttaagaagaagcagtttctgcccttaatccagctattgcgccttgg

SEQ ID NO: 598093 - DNA, 75 bp, synthetic construct
  source 1..75: mol_type = other DNA
acgggataattaccccggaacgtctggaaaaactggtaaaagaagttttacgtcaccgtaatttcgcatcgctga

SEQ ID NO: 598094 - DNA, 75 bp, synthetic construct
  source 1..75: mol_type = other DNA
ttgattggtagcgaactggcgatggatttttgtcgggcaggcaaagcggtcacgctaatcgacaacgctgccagt

SEQ ID NO: 598095 - DNA, 75 bp, synthetic construct
  source 1..75: mol_type = other DNA
gataccgatcagttacgtgcctttgtggtcagtgaagatcggatgaaagaggcgtttggattgttgaaaacgtta

SEQ ID NO: 598096 - DNA, 75 bp, synthetic construct
  source 1..75: mol_type = other DNA
attctggcgtcattaatgccaccggaagtaagcagccgcttgcagcatcggttgacggagatgggcgttcatctg

SEQ ID NO: 598097 - DNA, 75 bp, synthetic construct
  source 1..75: mol_type = other DNA
ccaccggactgcgcccggaaaccgccctggcacgacgtgccgggctgacgattaatcgcggcgtttgcgtcgata

SEQ ID NO: 598098 - DNA, 75 bp, synthetic construct
  source 1..75: mol_type = other DNA
tcctccagccgattcaacttagcgcgatggtgctggcaaaaaatcttctcggcaataacacgccgctgaaactcc

SEQ ID NO: 598099 - DNA, 75 bp, synthetic construct
  source 1..75: mol_type = other DNA
gttgacggagatgggtgttcatctgctgttgaaatctcagttgcaggggctggaaaaaacagattctggcattct

SEQ ID NO: 598100 - DNA, 75 bp, synthetic construct
  source 1..75: mol_type = other DNA
cctgttgtgcgttaccaggcgatacgctggaaaatgtcgcatctgcctgtcactggatgaaacaagccggagaac

SEQ ID NO: 598101 - DNA, 75 bp, synthetic construct
  source 1..75: mol_type = other DNA
gccgccgtttttgtctggaacttctgtctcataagccaaccgccatacgtggtaatgcttcggaaatcatggcat

SEQ ID NO: 598102 - DNA, 75 bp, synthetic construct
  source 1..75: mol_type = other DNA
cgtcgtggtcacaggcgaggtggattatgttaccgatgggcatcgtatcgttggcattcacggtggcgatccgct

SEQ ID NO: 598103 - DNA, 75 bp, synthetic construct
  source 1..75: mol_type = other DNA
atggatctgcgccgttttattacgcttaaaaccgtggtggaagagggttcctttttgcgagcttcgcaaaaattg

SEQ ID NO: 598104 - DNA, 75 bp, synthetic construct
  source 1..75: mol_type = other DNA
atgctcactgttcacgtggcggtaccgccgcatccaggccctgtcgccgcagcggggttactccacgcagacatc

SEQ ID NO: 598105 - DNA, 75 bp, synthetic construct
  source 1..75: mol_type = other DNA
gtctacagaagttaatttacggttttttgcgctcgatgtggctgccagctaccaagtccagtttacactggatac

SEQ ID NO: 598106 - DNA, 75 bp, synthetic construct
  source 1..75: mol_type = other DNA
ttgatgtatcacctgctggtgctgttgcaggatcagaacctagacctgacgacggtgattgagaatttacgcaaa

SEQ ID NO: 598107 - DNA, 75 bp, synthetic construct
  source 1..75: mol_type = other DNA
ttgatgtatcacctgctggtgctgttgcaggatcaggatctggatttaacaacggtgattgagaacctgcgtaaa

SEQ ID NO: 598108 - DNA, 75 bp, synthetic construct
  source 1..75: mol_type = other DNA
ttgatgtatcacctgctggtgctgttgcaggatcaggggctggatctcggagaagtgattgataatctgaagaat

SEQ ID NO: 598109 - DNA, 75 bp, synthetic construct
  source 1..75: mol_type = other DNA
cagccacgcgcacaggcgatgcgtgccgccgttgagcaagcaaaacgctctcaaacaccctggacgcttgatcca

SEQ ID NO: 598110 - DNA, 75 bp, synthetic construct
  source 1..75: mol_type = other DNA
gtgattgaaacggaagaggccagtcaatttgcgtccattgccaatgccttgttgattaacgtcggcacgttgaca

SEQ ID NO: 598111 - DNA, 75 bp, synthetic construct
  source 1..75: mol_type = other DNA
tatgttaccgatggttgtcgcaccgttggcattcatggcggtgacccgttaatggccagagtggtaggaactggc

SEQ ID NO: 598112 - DNA, 75 bp, synthetic construct
  source 1..75: mol_type = other DNA
gcgaaggaaaaaagctgctgccgcacatttatgaactcaccagagtgatggatacgctacgcgaggctgccaaaa

SEQ ID NO: 598113 - DNA, 75 bp, synthetic construct
  source 1..75: mol_type = other DNA
tgaccgccatcagcaaacagattggctgcaatggcttcttccccttccagctccgcccgggtaaaaatgaaaccg

SEQ ID NO: 598114 - DNA, 75 bp, synthetic construct
  source 1..75: mol_type = other DNA
atccagacggcgggagtggattagatggagaagaaggtgaacggtattacactgtagattattctggtgttactg

SEQ ID NO: 598115 - DNA, 75 bp, synthetic construct
  source 1..75: mol_type = other DNA
cacgcgctctggcagaagctggttgcagcgcggttaaagtcggtatcggccctggttctatctgtacgactcgta

SEQ ID NO: 598116 - DNA, 75 bp, synthetic construct
  source 1..75: mol_type = other DNA
ggtcgattttaccggcgcagagatgaaaaaactgccagaggataccccggtcacagcgcaaaccagcattggtga

SEQ ID NO: 598117 - DNA, 75 bp, synthetic construct
  source 1..75: mol_type = other DNA
gcaggtcaggtttatggcctttctgcccgcggcctggcaattgataccgccttgccatcgggtgaagaatttcca

SEQ ID NO: 598118 - DNA, 75 bp, synthetic construct
  source 1..75: mol_type = other DNA
gctgggctttcagtattgatgatgtcgcaaagcaagctcaatccttagccgggaaaggctatgaggcgcccaaaa

SEQ ID NO: 598119 - DNA, 75 bp, synthetic construct
  source 1..75: mol_type = other DNA
gctggccgctctttttgccggtactgcttttatgttcagcttttatcggcggttgtgccgggtcaacgggcggtg

SEQ ID NO: 598120 - DNA, 75 bp, synthetic construct
  source 1..75: mol_type = other DNA
aactatccgcaggtcatcaaacatacgccgcggatgactgcaatggcgaatattgtcctgtttcgtctgtttaat

SEQ ID NO: 598121 - DNA, 75 bp, synthetic construct
  source 1..75: mol_type = other DNA
ctgaactgttacgtgatccgtgatgcgctattgaatgatgaggccgatgtcggggtttttttatcgcgtagggaa

SEQ ID NO: 598122 - DNA, 75 bp, synthetic construct
  source 1..75: mol_type = other DNA
ccgacaaactggtgccggaaggtatcgaaggtcgcgtggcctataaaggtcgcctgaaagagatcattcaccagc

SEQ ID NO: 598123 - DNA, 75 bp, synthetic construct
  source 1..75: mol_type = other DNA
gtaaattattagagatcccatttaacccggtgtatcggaattttgacaaaggtcttcaggaaatcaccgactgga

SEQ ID NO: 598124 - DNA, 75 bp, synthetic construct
  source 1..75: mol_type = other DNA
tccacttcatcatgaccctttccttatttatggccccttcctcgggaggggctttcccgtttcagcgtcccgctg

SEQ ID NO: 598125 - DNA, 75 bp, synthetic construct
  source 1..75: mol_type = other DNA
tggcagcgacggtacatgaccgctttgagctgaccaacgaggcatctgatttgatgtatcacctgctggtgctgt

SEQ ID NO: 598126 - DNA, 75 bp, synthetic construct
  source 1..75: mol_type = other DNA
actggcgaactcaccaaaagatcgcgctgaaaacctgatgattgtcgatttaatgcgtaatgatattggccgtgt

SEQ ID NO: 598127 - DNA, 75 bp, synthetic construct
  source 1..75: mol_type = other DNA
gaaaaaccagcaaatcgcgccgccgcaagagttccagctgacgtctgcctggcaatccaatatgacccgcgaaca

SEQ ID NO: 598128 - DNA, 75 bp, synthetic construct
  source 1..75: mol_type = other DNA
ttagcaagtgaacgagatgctacagaaacagtctataacctcttcgggcaacccacctggaaaaacttgtatctt

SEQ ID NO: 598129 - DNA, 75 bp, synthetic construct
  source 1..75: mol_type = other DNA
ggtttatcctgtgtgataatggtgaaatccagacccgcccgattaaaggcacgctaccacgcctgcccgatcccc

SEQ ID NO: 598130 - DNA, 75 bp, synthetic construct
  source 1..75: mol_type = other DNA
atgcttttacactccggctatgccgatcatccgtatagccgctttgatattgtggtcgccgagccgatttgcact

SEQ ID NO: 598131 - DNA, 75 bp, synthetic construct
  source 1..75: mol_type = other DNA
ctgagagatatcaaccttcctgatatggcggtaggtatctacgactgggcgttgattgtcgacaaccagcgccgg

SEQ ID NO: 598132 - DNA, 75 bp, synthetic construct
  source 1..75: mol_type = other DNA
tcgcgaagaagcgaagcaaattttaatcgagttgtatcgcgatcatgggtatacagatatccataacttctttaa

SEQ ID NO: 598133 - DNA, 75 bp, synthetic construct
  source 1..75: mol_type = other DNA
gtagcaatcaggctaaatggatcgacaagatcagcgcctgggcagaagaagagacaaacagttatcagttgccgg

SEQ ID NO: 598134 - DNA, 75 bp, synthetic construct
  source 1..75: mol_type = other DNA
cgcattgggaaccggtgttgaccgagtggatcatggctgttcttcaggcaccgctcaatgaaacgggagtcagcc

SEQ ID NO: 598135 - DNA, 75 bp, synthetic construct
  source 1..75: mol_type = other DNA
agcgaaagagattttaatcgagttgtatcgcgatcatgggtataccgatattcacaacttctttaagaagcatag

SEQ ID NO: 598136 - DNA, 75 bp, synthetic construct
  source 1..75: mol_type = other DNA
cggtcctatctatcggttgcagtggacaccgatcagggaagtgcttaaacagaagagattgaatcatgccattac

SEQ ID NO: 598137 - DNA, 75 bp, synthetic construct
  source 1..75: mol_type = other DNA
tacatactattcacggttgaagaagtacgggattaaggcagagttctttatgtcggttgacgatggagaactttt

SEQ ID NO: 598138 - DNA, 75 bp, synthetic construct
  source 1..75: mol_type = other DNA
atgtttgttcttattgctggcgttaacgtgcgcaatgattattttgttaatcgcatcgctgggatcgcggggtac

SEQ ID NO: 598139 - DNA, 75 bp, synthetic construct
  source 1..75: mol_type = other DNA
acaccgccaaactgtatgccagcggtaccaagcgcatcgcgcagaaagtgggcgaagaaggcgtggaaactgcgc

SEQ ID NO: 598140 - DNA, 75 bp, synthetic construct
  source 1..75: mol_type = other DNA
tgcttggctccccgatggtggcgctgatgattgcgctgatactggcattctggttgctggctttacgtcggggct

SEQ ID NO: 598141 - DNA, 75 bp, synthetic construct
  source 1..75: mol_type = other DNA
acgattattatcggccttggcgcaatgttagggcggatgatagagcattctggcggtgctgaatctctggccaac

SEQ ID NO: 598142 - DNA, 75 bp, synthetic construct
  source 1..75: mol_type = other DNA
gtcaccttcttctcgcgcactaaacagcgactgtggaccaaaggcgaaacgtcgggcaatttcctcaacgtagtg

SEQ ID NO: 598143 - DNA, 75 bp, synthetic construct
  source 1..75: mol_type = other DNA
ttgatgtatcacctgctggtgctgttacaggatcaggatctggatttaacgacggtgattgagaacctgcgtaaa

SEQ ID NO: 598144 - DNA, 75 bp, synthetic construct
  source 1..75: mol_type = other DNA
aactggactgggaaaaaaccgacgggatgatgccagtaattgtgcaacacgcggtatccggcgaagtgttaatgc

SEQ ID NO: 598145 - DNA, 75 bp, synthetic construct
  source 1..75: mol_type = other DNA
gggctaaacaggcgaacgacctggattatgccagcctgccggatagcgtcgttgaacaggttcgcgctgcgtgga

SEQ ID NO: 598146 - DNA, 75 bp, synthetic construct
  source 1..75: mol_type = other DNA
gctgagcgctttagtgccattgtaagtatcgccaaacaagatttacgtaccgaacaaggacgcaaacaaatttta

SEQ ID NO: 598147 - DNA, 75 bp, synthetic construct
  source 1..75: mol_type = other DNA
tggtgtagtacttgcgagcattttggctgagcgctttagtgccattgtaagtatcgccaaacaagatttacgtac

SEQ ID NO: 598148 - DNA, 75 bp, synthetic construct
  source 1..75: mol_type = other DNA
aaagtggcaactgaaagtgaagtgcgcaaagccatcagtgatggcatgagcacggtacaggcctttgaaaccttc

SEQ ID NO: 598149 - DNA, 75 bp, synthetic construct
  source 1..75: mol_type = other DNA
gacacgctgggctatatgcaccagtttgtttctccggcaatcaagccgctggatgtgaatacggtggtggcaggc

SEQ ID NO: 598150 - DNA, 75 bp, synthetic construct
  source 1..75: mol_type = other DNA
ttatgccagcctgccggatagcgtagttgaacaggttcgcgctgcgtggaagaccaatattaaagacagtagcgg

SEQ ID NO: 598151 - DNA, 75 bp, synthetic construct
  source 1..75: mol_type = other DNA
tttttcgctgagttcgcttcatgtttgacggaattacagacgcgtttacgcgaaagtctggctctgcgtcaacaa

SEQ ID NO: 598152 - DNA, 75 bp, synthetic construct
  source 1..75: mol_type = other DNA
ctttcaacggtgccggggttcgctatactgcccgtacgctgaaaatcggcattaatactgtcattcggactttaa

SEQ ID NO: 598153 - DNA, 75 bp, synthetic construct
  source 1..75: mol_type = other DNA
gatactgcccgtacgctgaaaatcggcattaatacagtcatccgaactttaaaaaactctcgccacgaagaataa

SEQ ID NO: 598154 - DNA, 75 bp, synthetic construct
  source 1..75: mol_type = other DNA
attaaagagcagatcaccgtaatggctttcaacggagccggaattcgtgataccgccagaacactgaaggtcggc

SEQ ID NO: 598155 - DNA, 75 bp, synthetic construct
  source 1..75: mol_type = other DNA
gttttacagagcgacagcaaaatcagtctgcgggtgggaggttcatttgtggtgatccattccggcggcgtggat

SEQ ID NO: 598156 - DNA, 75 bp, synthetic construct
  source 1..75: mol_type = other DNA
gaaaaatatgcaggtcgtggtgctgaacagcaaggataagcgggtcaactatgaccgggcggtcagcatcgggca

SEQ ID NO: 598157 - DNA, 75 bp, synthetic construct
  source 1..75: mol_type = other DNA
atgagtgaaaagcgtcatggcagagaagaaattcgtcttcacattgtctgcgatatccctgatgaacttattgat

SEQ ID NO: 598158 - DNA, 75 bp, synthetic construct
  source 1..75: mol_type = other DNA
gtttgccaccgctcagggggaggtgccggagctggtgctggttaacccgccgcgccgcggcattggtaaaccgct

SEQ ID NO: 598159 - DNA, 75 bp, synthetic construct
  source 1..75: mol_type = other DNA
gcggtatgatgctgcgctttgtactgcgctctgaaaccaagctggcgcaactgcgtaaggcgctgccgtggttac

SEQ ID NO: 598160 - DNA, 75 bp, synthetic construct
  source 1..75: mol_type = other DNA
gcgttccgaaaccaaactgacgcaattgcgtaatgcgttgccgtggctacaggaccaactacctcagcttaaggt

SEQ ID NO: 598161 - DNA, 75 bp, synthetic construct
  source 1..75: mol_type = other DNA
cacgaaaaacgcgttgagaaagcgctggtggttgatgatgaattccacctgattggcatgatcaccgtgaaagat

SEQ ID NO: 598162 - DNA, 75 bp, synthetic construct
  source 1..75: mol_type = other DNA
atggctaaactgaccaagcgcatgcgtgttatccgcgagaaagttgatgcaaccaaacagtacgacatcaacgaa

SEQ ID NO: 598163 - DNA, 75 bp, synthetic construct
  source 1..75: mol_type = other DNA
atgtgggatctgttctgcggcgtggggggctttggtttacactgcgcgacgcctgacatgcagttaaccgggatc

SEQ ID NO: 598164 - DNA, 75 bp, synthetic construct
  source 1..75: mol_type = other DNA
tgcgcccggtgatcctgaaagccgcagccgggagtggttcgatgtttgtggcgcattgcccgaaggaggataagt

SEQ ID NO: 598165 - DNA, 75 bp, synthetic construct
  source 1..75: mol_type = other DNA
cggtaagggacattcagacagacctttacgacaactcggaaggccgtgttgcgctgcccggtgcgtatggttacg

SEQ ID NO: 598166 - DNA, 75 bp, synthetic construct
  source 1..75: mol_type = other DNA
cacaaacgcgctggcaggcaaacagccgcttaatgacgtgttaacggctgtcagccagataacaccggaagaaaa

SEQ ID NO: 598167 - DNA, 75 bp, synthetic construct
  source 1..75: mol_type = other DNA
acagcgaacgcggcatttgtccgcaaactgctcgctgcactggttgactcgtcaccggaagccctggacacactg

SEQ ID NO: 598168 - DNA, 75 bp, synthetic construct
  source 1..75: mol_type = other DNA
ggcagcggcgctgggtaatgacccgaactttgcgacgacaatcacaaacgcgctggcaggcaaacagccgcttaa

SEQ ID NO: 598169 - DNA, 75 bp, synthetic construct
  source 1..75: mol_type = other DNA
gagcacctgctgttaacgcgctataacccaggccgcgtaagcagaggtgacatgctgagcatggaagatgtgctg

SEQ ID NO: 598170 - DNA, 75 bp, synthetic construct
  source 1..75: mol_type = other DNA
gcttgtagatatagaaatacgatgcggaattggttcaggcggtattgaatcagaaacaggccggtggataacttt

SEQ ID NO: 598171 - DNA, 75 bp, synthetic construct
  source 1..75: mol_type = other DNA
cagcacgacagaaaaaggtctggtgcaactctgtagtgatacggacaacgacagcgaggaactggctgccacgcc

SEQ ID NO: 598172 - DNA, 75 bp, synthetic construct
  source 1..75: mol_type = other DNA
cactgtctctgctgtcagagaagggccgcgcattactggcgcatgacacggctgaagccatgcgcacggagcttg

SEQ ID NO: 598173 - DNA, 75 bp, synthetic construct
  source 1..75: mol_type = other DNA
tctgcaggatgcaaaagatgaattgtttgagttagagaacctgatgcagttcaaccaaccgggaattgtggagcg

SEQ ID NO: 598174 - DNA, 75 bp, synthetic construct
  source 1..75: mol_type = other DNA
ctcacatttcgctggcgctaatgttgttgcttactattcagggccgtctgatatggtatctcgacttactttatt

SEQ ID NO: 598175 - DNA, 75 bp, synthetic construct
  source 1..75: mol_type = other DNA
aagaagagagcaaagttacttattttcggtctttaattctcgttttttgtttatctattgttttagcgttacctt

SEQ ID NO: 598176 - DNA, 75 bp, synthetic construct
  source 1..75: mol_type = other DNA
gctggatgaaggcgacctcaagcccgacgtggtgaaacgctttgaggaaatggtggcgcaggcgcagcagagcgc

SEQ ID NO: 598177 - DNA, 75 bp, synthetic construct
  source 1..75: mol_type = other DNA
attgagcgggtacagcttttcgatatgttcccgcacaccgcgcattatgaagtgctgacgctgttggtgaagcaa

SEQ ID NO: 598178 - DNA, 75 bp, synthetic construct
  source 1..75: mol_type = other DNA
ctgccggttttcgataaagaaaaaggcgctatcttcctgaaggaaatggaagtggtcgatgcgacggtacaaccg

SEQ ID NO: 598179 - DNA, 75 bp, synthetic construct
  source 1..75: mol_type = other DNA
gaccatgaaactgaagctgaaagcgctgcccgtgtttgataaagaaaaaggcgcgatcttcctgaaagagatgga

SEQ ID NO: 598180 - DNA, 75 bp, synthetic construct
  source 1..75: mol_type = other DNA
ctgcccgtgtttgataaagaaaaaggtgcgatcttcctgaaagagatggaagtggtcgatgcgacggtacaaccg

SEQ ID NO: 598181 - DNA, 75 bp, synthetic construct
  source 1..75: mol_type = other DNA
ttcgcccatatcaccaaaccggaatttcaggtgcgctggcgctggcagccaaatgacgtggcgatttgggataac

SEQ ID NO: 598182 - DNA, 75 bp, synthetic construct
  source 1..75: mol_type = other DNA
gaggcggttgcgaagcatcctccgctgctgcacccggtggtgcggacccatcctgtcacgggcaagcaggcgctg

SEQ ID NO: 598183 - DNA, 75 bp, synthetic construct
  source 1..75: mol_type = other DNA
agtcgcttgcgaaacataataatttctcaaaagatatcggtttgcccggcgtggctgacgcccatatagtgctga

SEQ ID NO: 598184 - DNA, 75 bp, synthetic construct
  source 1..75: mol_type = other DNA
aaaatttgttatgggtcatattaacgttatttgcactgggttttgttgaagattatattcggaataatacgattt

SEQ ID NO: 598185 - DNA, 75 bp, synthetic construct
  source 1..75: mol_type = other DNA
ctactggcaccgttttgcccctgaaagccgcatgatgcgtaaagtaaccgatgcgttacttgattatggtcacaa

SEQ ID NO: 598186 - DNA, 75 bp, synthetic construct
  source 1..75: mol_type = other DNA
gtctgcgtcgcggcgaagtcgttggcgcagtgagtattcaacaccaggcgctgcccagttgtcttgtagataaac

SEQ ID NO: 598187 - DNA, 75 bp, synthetic construct
  source 1..75: mol_type = other DNA
accggagacgccaatctggacatgaactccctgttcggtagtcagaaagcgaccatgaaactgaagctgaaagcg

SEQ ID NO: 598188 - DNA, 75 bp, synthetic construct
  source 1..75: mol_type = other DNA
agtcgcttgcgaaacataataatttctcaaaagatatcggtttacccggcgtggctgacgcccatattgttctga

SEQ ID NO: 598189 - DNA, 75 bp, synthetic construct
  source 1..75: mol_type = other DNA
attgacttcaagatcgattaccatgttagtgagttggctcgtcgttttggcgtggaatacgataaggattttgaa

SEQ ID NO: 598190 - DNA, 75 bp, synthetic construct
  source 1..75: mol_type = other DNA
tacccataacgataatccgccggataacgacaactggcataccgatgtgacatttattgaaacgccacccgcagg

SEQ ID NO: 598191 - DNA, 75 bp, synthetic construct
  source 1..75: mol_type = other DNA
ctgaatcaccacgaaactgcactgcgcgttaccgcagaacgcgccatgaatacccgtctcgaaggcggatgtcag

SEQ ID NO: 598192 - DNA, 75 bp, synthetic construct
  source 1..75: mol_type = other DNA
taacggcgaatacgatgccatcattcttgccgtagccggactaaaacgtttaggtctggagtcacgcattcgcgc

SEQ ID NO: 598193 - DNA, 75 bp, synthetic construct
  source 1..75: mol_type = other DNA
gccggttgaattcccgcaaggtctggggctggtcactatttgtgagcgtgaagatcctcgcgatgcctttgtgtc

SEQ ID NO: 598194 - DNA, 75 bp, synthetic construct
  source 1..75: mol_type = other DNA
tgaaagatgacccgatgtccggccacgtcttcatcttccggggacgcagcggcagtcaggtaaaactgctctggt

SEQ ID NO: 598195 - DNA, 75 bp, synthetic construct
  source 1..75: mol_type = other DNA
tggcaaagtgttccttacgcaggcgcagctggcgatgctgctggaaggtatcgactggcgacagcccaagcggct

SEQ ID NO: 598196 - DNA, 75 bp, synthetic construct
  source 1..75: mol_type = other DNA
tacccgtctcgaaggcggatgtcaggtgccaattggtagctacgccgagcttattgatggcgaaatctggctgcg

SEQ ID NO: 598197 - DNA, 75 bp, synthetic construct
  source 1..75: mol_type = other DNA
ccgtgcgcagcgcgatgactggctgaagaaagagatacagcgcgtaccttccgggaccaaaatttggctggttgc

SEQ ID NO: 598198 - DNA, 75 bp, synthetic construct
  source 1..75: mol_type = other DNA
ccgtcagctgttgagtgggctgcgcgcggagcatgatttccgtaaatcattcccggaatacaaataccgcaaaac

SEQ ID NO: 598199 - DNA, 75 bp, synthetic construct
  source 1..75: mol_type = other DNA
agcggtaaacaggcgctgtttgtgaatgaaggctttactacgcgaattgtcgatgtcagcgagaaagagagcgaa

SEQ ID NO: 598200 - DNA, 75 bp, synthetic construct
  source 1..75: mol_type = other DNA
ttcgcctggccgtcagcccgtgatggcaaagtgttccttacgcaggcgcagctggcgatgctgctgtcacgaacg

SEQ ID NO: 598201 - DNA, 75 bp, synthetic construct
  source 1..75: mol_type = other DNA
gggtactgtaacgccgaacgttgctgaagcggttaaaaacgctaaagctggccagattcgttaccgtaacgacaa

SEQ ID NO: 598202 - DNA, 75 bp, synthetic construct
  source 1..75: mol_type = other DNA
aaatttggctggttgccggtatcaccgatatgagaaatggcttcaacggcctggctgcaaaagtacaaacggcgc

SEQ ID NO: 598203 - DNA, 75 bp, synthetic construct
  source 1..75: mol_type = other DNA
tcgtagcttctggaaacggacccgtgccttctggactatggtcggattacgcataggtgagaatggtccttctta

SEQ ID NO: 598204 - DNA, 75 bp, synthetic construct
  source 1..75: mol_type = other DNA
gggcactggtggccaatcgctatctatttcgcctttatggctgcgattggactggtgaccactttctttgcacca

SEQ ID NO: 598205 - DNA, 75 bp, synthetic construct
  source 1..75: mol_type = other DNA
tcactattggattgatgggcatgtcgaccatgctaataggattaatccccagttacgcccagataggcgtctggg

SEQ ID NO: 598206 - DNA, 75 bp, synthetic construct
  source 1..75: mol_type = other DNA
atatttggaataaaataactgacgaggcgaagattcgatttaacataagcaaagttatatatctttgtgagtatc

SEQ ID NO: 598207 - DNA, 75 bp, synthetic construct
  source 1..75: mol_type = other DNA
tgatgatgctttaacattaaatgcaattggtactatttatgactgtattgtaaaatacacagtcgcatctgactt

SEQ ID NO: 598208 - DNA, 75 bp, synthetic construct
  source 1..75: mol_type = other DNA
caaaacacaattattaaaaaatcccaaagggtttagtatctattatattgatcagtttaagcgtgaaaccaacta

SEQ ID NO: 598209 - DNA, 75 bp, synthetic construct
  source 1..75: mol_type = other DNA
cagatctgggcctaaaggctcctatccttgaagcccttaacgatctgggttacgaaaaaccatctccaattcagg

SEQ ID NO: 598210 - DNA, 75 bp, synthetic construct
  source 1..75: mol_type = other DNA
ggcgaacgtcgtgaaggccgcgctccgcgtcgtgatgactctaccggtcgtcgtcgtttcggtggtgatgcgtaa

SEQ ID NO: 598211 - DNA, 75 bp, synthetic construct
  source 1..75: mol_type = other DNA
agtgggccgtgatgatggcgttgaagttcgtcatatcgttggtgcaattgccaacgaaggtgatattagcagccg

SEQ ID NO: 598212 - DNA, 75 bp, synthetic construct
  source 1..75: mol_type = other DNA
atgcgcggcgtaaatgtggttgctctgtacggtggccagcgttatgacgtgcaattacgcgccctgcgtcagggg

SEQ ID NO: 598213 - DNA, 75 bp, synthetic construct
  source 1..75: mol_type = other DNA
tttatgaaagagccgcaggaagtgcgtattcagtccagcgtgactacccgtcctgacatcagccagagctactgg

SEQ ID NO: 598214 - DNA, 75 bp, synthetic construct
  source 1..75: mol_type = other DNA
tggtggtgagcgtcgtggcggtggtcgtggtttcagtggcgagcgtcgagaaggcggtcgtaacttcagcggtga

SEQ ID NO: 598215 - DNA, 75 bp, synthetic construct
  source 1..75: mol_type = other DNA
aaattggcgtggtggcgatcggccttgagttaagccgcgtgacccaacagatcaatgacagtcgctggagcatta

SEQ ID NO: 598216 - DNA, 75 bp, synthetic construct
  source 1..75: mol_type = other DNA
tcacattcaataccactagatcaatctatttacatagaaggttcgtcaggaagtttttacacattttccattgca

SEQ ID NO: 598217 - DNA, 75 bp, synthetic construct
  source 1..75: mol_type = other DNA
ctacattatgagcaccggtaaatttacctacatccacaaatctcctcctcattcggcggtgtatattacctggcg

SEQ ID NO: 598218 - DNA, 75 bp, synthetic construct
  source 1..75: mol_type = other DNA
gaatttatgtcaaacctgaccttcccgaggcgtatcgacaatatttactgccgctgggcagggaattacccccaa

SEQ ID NO: 598219 - DNA, 75 bp, synthetic construct
  source 1..75: mol_type = other DNA
tgcgctctggtccgtattctgggttgtggttgcgatggcatttgccggtttcctctatatccaccacggtgctga

SEQ ID NO: 598220 - DNA, 75 bp, synthetic construct
  source 1..75: mol_type = other DNA
aaattgaatgaccttcatgccgggatgcagtggatcccattggtaccagaacagaacaatattttgccttactcc

SEQ ID NO: 598221 - DNA, 75 bp, synthetic construct
  source 1..75: mol_type = other DNA
aaatgatgaaagttatatagaaaaagaagatgcaatagttatagatcagacaatggcaaccaatgaagtaactga

SEQ ID NO: 598222 - DNA, 75 bp, synthetic construct
  source 1..75: mol_type = other DNA
cctaaacgacgtgcagctcttgagaagcaacgggaggctgatattagggatattacggctatgcgtgaccgactg

SEQ ID NO: 598223 - DNA, 75 bp, synthetic construct
  source 1..75: mol_type = other DNA
tgtaccagccgatattatcccagagagactcgttggtcgggctggtttcactaaaagccgaacgctgcttattcc

SEQ ID NO: 598224 - DNA, 75 bp, synthetic construct
  source 1..75: mol_type = other DNA
aagataaattcattgctaaaaactgcagaggaatcagcaccgcgcgctgatgctctcgctagtgaaatcgctgaa

SEQ ID NO: 598225 - DNA, 75 bp, synthetic construct
  source 1..75: mol_type = other DNA
cggtaaaaattgccgcgatctcgacagtgccattgctgccgcaaaaagtctgctttcagacacattaaaatgggt

SEQ ID NO: 598226 - DNA, 75 bp, synthetic construct
  source 1..75: mol_type = other DNA
aaccacgggctatatgggaacggcatcgcaaatcaaaatccttgccgagtggctgactgcgctacgcaaagacca

SEQ ID NO: 598227 - DNA, 75 bp, synthetic construct
  source 1..75: mol_type = other DNA
gaaaattgcaaccagggatttgcgagaaatggcagttgggcttgattatgtcctgtctacgcgtacaaaggctat

SEQ ID NO: 598228 - DNA, 75 bp, synthetic construct
  source 1..75: mol_type = other DNA
attgacatctgaacatgatgagtttaagaacagatggccttttctgaggagtgctaaagttgatgagtttggtgg

SEQ ID NO: 598229 - DNA, 75 bp, synthetic construct
  source 1..75: mol_type = other DNA
aagaacgggcagataatcttctgtgctttaatcaggacgggaatgcttcactgtctccgctgtcagaaaaagccc

SEQ ID NO: 598230 - DNA, 75 bp, synthetic construct
  source 1..75: mol_type = other DNA
aaaagcaggtggcgctccttgcatcatctaccacacaggatgcggcccgcgcagaacaggcggtcaaagatgccg

SEQ ID NO: 598231 - DNA, 75 bp, synthetic construct
  source 1..75: mol_type = other DNA
attataaccgttgcgcggtgtcatcagatggtggttttctggttggctgggaaaacctgaaggttgatgaggctt

SEQ ID NO: 598232 - DNA, 75 bp, synthetic construct
  source 1..75: mol_type = other DNA
acgccacaacttggcaatgcagcacagaaggatgcgcaggagaatatttacgaccgcaccgaaggccgtctggcg

SEQ ID NO: 598233 - DNA, 75 bp, synthetic construct
  source 1..75: mol_type = other DNA
ataagatagtccagaaagcggtcgataaactcgacgaagccgcaacgctgaccggtgaggcaaaagccagcgccg

SEQ ID NO: 598234 - DNA, 75 bp, synthetic construct
  source 1..75: mol_type = other DNA
tacagggtacactttcccggggcgttatatggcgctatccggggtcagggactctaaaggaataaccggtcgtat

SEQ ID NO: 598235 - DNA, 75 bp, synthetic construct
  source 1..75: mol_type = other DNA
tttttacggtattaacggccatatttattacaatcgctactggactaccggagatggttatctggttggctggga

SEQ ID NO: 598236 - DNA, 75 bp, synthetic construct
  source 1..75: mol_type = other DNA
tccccggaaacactggacacactgaacgagctggcagcggcgctgggcaacgaccctaattttgcgacgactgtc

SEQ ID NO: 598237 - DNA, 75 bp, synthetic construct
  source 1..75: mol_type = other DNA
ccccgatgaaggcgatttaaagccggatgtagtgaaacgctttgaggaaatggtggcgcaggcgcagcagagcgc

SEQ ID NO: 598238 - DNA, 75 bp, synthetic construct
  source 1..75: mol_type = other DNA
tgttattcagcgacagaacagagtttaaatcagggactgattttctccgctgggtaaaaacagcaaaacccggtc

SEQ ID NO: 598239 - DNA, 75 bp, synthetic construct
  source 1..75: mol_type = other DNA
cagttagcgatacagggacatacgtatccacaccgcaagtggcaattggtggtgccagtgcatacaactttcccg

SEQ ID NO: 598240 - DNA, 75 bp, synthetic construct
  source 1..75: mol_type = other DNA
cccggggcgttatgcggtcagtattgcggactcttccacgctgctggctggcaccacgaaatttaacggcatcat

SEQ ID NO: 598241 - DNA, 75 bp, synthetic construct
  source 1..75: mol_type = other DNA
tttgaggctcagaccggaagatatgacgtttatcttcggtcgtgtattgaaagagaatattgtgttggtgacatt

SEQ ID NO: 598242 - DNA, 75 bp, synthetic construct
  source 1..75: mol_type = other DNA
caaaagcaattccatgcagcaacaaggctcgcttattactgtcacgaaacacgcctggagacatgcgcacggagc

SEQ ID NO: 598243 - DNA, 75 bp, synthetic construct
  source 1..75: mol_type = other DNA
ggacaggcattcaccagagccgaagctctgtcatttaacggacaggctgatttcgttatatggctgcagacagtc

SEQ ID NO: 598244 - DNA, 75 bp, synthetic construct
  source 1..75: mol_type = other DNA
tgaaggacggagcgggtgagcctgtcgtaaactgtgcgattgaattgcgagccagaagaaccagtccgacagttg

SEQ ID NO: 598245 - DNA, 75 bp, synthetic construct
  source 1..75: mol_type = other DNA
gcaaggacaaactagttttgctgtaagatttactttttctgaaagtgagctagatgatgtctctgaggatttgag

SEQ ID NO: 598246 - DNA, 75 bp, synthetic construct
  source 1..75: mol_type = other DNA
aactctgtagtgatacggacaatgacagcgaagaactggcagccacaccgaaggccgtcaaaaccgtcatggacg

SEQ ID NO: 598247 - DNA, 75 bp, synthetic construct
  source 1..75: mol_type = other DNA
ctgacacaacgcgtaaattcaaaatgctgctgtgttttaaccagtattacgaaggtgagcacagtattcatcgcc

SEQ ID NO: 598248 - DNA, 75 bp, synthetic construct
  source 1..75: mol_type = other DNA
cagaaaaagcccggtcactgctggcacaggccacagtggaagccatgcgcacggagcttgagctgaaaagcgcgg

SEQ ID NO: 598249 - DNA, 75 bp, synthetic construct
  source 1..75: mol_type = other DNA
gcaaactgctcgctgcactggttgactcgtcaccggaagccctggacacgctgaacgagctggcagcggcgctgg

SEQ ID NO: 598250 - DNA, 75 bp, synthetic construct
  source 1..75: mol_type = other DNA
ttctgcacctgttaacggcggttctgctgaaatccacattaccgaagataaatttttacctggcacataccgtgg

SEQ ID NO: 598251 - DNA, 75 bp, synthetic construct
  source 1..75: mol_type = other DNA
tattacaaatatccggcagttggtgtgccgattatggcggcatatcagggggaaagttttggtgctgatgtgtct

SEQ ID NO: 598252 - DNA, 75 bp, synthetic construct
  source 1..75: mol_type = other DNA
ccgacgctctgacatttaacgggcaggccgattttgttgaatggctgaaaaaggccgccccggggcgttatgcgg

SEQ ID NO: 598253 - DNA, 75 bp, synthetic construct
  source 1..75: mol_type = other DNA
aaaactctctcctttattttggtgataactttaaagcaaaagcaattccatgcagcaacaaggctcgctcattac

SEQ ID NO: 598254 - DNA, 75 bp, synthetic construct
  source 1..75: mol_type = other DNA
gattagtaaaatcatagaactttctgggggatttgtaaaatgcttacctgttaacttaaaaaacataaatgaaat

SEQ ID NO: 598255 - DNA, 75 bp, synthetic construct
  source 1..75: mol_type = other DNA
tgtcataaccggtattgtcgcgtttctgatgtgtattcagccaaacagctgctgctttcatttgttccggggacg

SEQ ID NO: 598256 - DNA, 75 bp, synthetic construct
  source 1..75: mol_type = other DNA
gagcaaattatggcccgcttttttatgtccgtgtggagtggtgaaaatcatgatttagactttcttgatgccgcc

SEQ ID NO: 598257 - DNA, 75 bp, synthetic construct
  source 1..75: mol_type = other DNA
atgacaacaggcaaaggtaaatggaacgggctgcgcgacgcctcgtttcgtggtgttcccttctttctggtggat

SEQ ID NO: 598258 - DNA, 75 bp, synthetic construct
  source 1..75: mol_type = other DNA
cggcagcactgaatcagtggatggacaggctgaaccattttaaggagatggccggaaccattattgccacgccgg

SEQ ID NO: 598259 - DNA, 75 bp, synthetic construct
  source 1..75: mol_type = other DNA
atcgagtatgttgcgaatgtggatggcaggtcagggaaccattcaaatctccgaccaaatgaatatcaaagccaa

SEQ ID NO: 598260 - DNA, 75 bp, synthetic construct
  source 1..75: mol_type = other DNA
aagatatcgccgaacaggctggcgtctcaaaagcgaccgccagcctagtactgaacggtcgtggtaaggagctgc

SEQ ID NO: 598261 - DNA, 75 bp, synthetic construct
  source 1..75: mol_type = other DNA
tgatattcatggggcagaatggtcgggttgacctgaaggactcagtttcgcaaggggcgggttctctgacgttcc

SEQ ID NO: 598262 - DNA, 75 bp, synthetic construct
  source 1..75: mol_type = other DNA
ctctccctggtgacagaagactggtcaccaaaaacgctgacagtaaacaccctgtatgccagcagcatgcacatt

SEQ ID NO: 598263 - DNA, 75 bp, synthetic construct
  source 1..75: mol_type = other DNA
taacaagcctggttatatttttaacgctttctatggctctggcatcgaacaaggaaaaaccatcaagatcactct

SEQ ID NO: 598264 - DNA, 75 bp, synthetic construct
  source 1..75: mol_type = other DNA
tggtaacggcacggcgtttacgctggaagaaggcacatcagaagcggtgaaggatgcagaccgtagcgtgtttaa

SEQ ID NO: 598265 - DNA, 75 bp, synthetic construct
  source 1..75: mol_type = other DNA
acaccgattttggccttggtcgtaatgccacgctgaacaccatgcttgaggcaacagattcgacggttacactgg

SEQ ID NO: 598266 - DNA, 75 bp, synthetic construct
  source 1..75: mol_type = other DNA
gttgccaccggcgcactgccggaagatatcaccgtgaagcccggcagcgtggcagacggcgaacctggctttgct

SEQ ID NO: 598267 - DNA, 75 bp, synthetic construct
  source 1..75: mol_type = other DNA
gcgcttcatttgattacaacctgccgtgtattgctgaaaaaagcctgattgtcgtggcatcagtggcagattatt

SEQ ID NO: 598268 - DNA, 75 bp, synthetic construct
  source 1..75: mol_type = other DNA
ctggcgctgaaagtggaagacggcttgcaccacacggcaattatgcactcgcagaacgtctcacggctcaacctt

SEQ ID NO: 598269 - DNA, 75 bp, synthetic construct
  source 1..75: mol_type = other DNA
actttaaatacaattaaagatgttgaggatggtattattcagcctaaaaatattgaacatttaaccgcagaatta

SEQ ID NO: 598270 - DNA, 75 bp, synthetic construct
  source 1..75: mol_type = other DNA
aaagccgccgaggacatcatcaacggcgcttcatttgattacaacctgccgtgtattgctgaaaaaagcctgatt

SEQ ID NO: 598271 - DNA, 75 bp, synthetic construct
  source 1..75: mol_type = other DNA
ggcgggtattggcgtcggcggcgaaggctttacgacctttaccattgcaacaccgaccggagagggtacaacgtc

SEQ ID NO: 598272 - DNA, 75 bp, synthetic construct
  source 1..75: mol_type = other DNA
tgcccgcaaaagcgccgcgcctactgattgctgttgttgacgccgatgatagttgggttacttgtgaacaactga

SEQ ID NO: 598273 - DNA, 75 bp, synthetic construct
  source 1..75: mol_type = other DNA
ggatcatgaccggtatcctgctggcgattgcccgtattgctggtgaaaccgcgccgctgctgtttaccgcgctct

SEQ ID NO: 598274 - DNA, 75 bp, synthetic construct
  source 1..75: mol_type = other DNA
atggctatggttgaaatgcaaaccactgcggcgctggctgaatcccgccgtaaaatgcaggcgcgtcgccgcctc

SEQ ID NO: 598275 - DNA, 75 bp, synthetic construct
  source 1..75: mol_type = other DNA
tgaaaccgcctggacggatgataacggggccgttccggggcaacagcagattaacgcaaagctgttgggtaaaaa

SEQ ID NO: 598276 - DNA, 75 bp, synthetic construct
  source 1..75: mol_type = other DNA
ttgtgactatcttcgcaaaaccggctggtcgtccgctggttgatgactatgttgttgatatcccgcaagatacct

SEQ ID NO: 598277 - DNA, 75 bp, synthetic construct
  source 1..75: mol_type = other DNA
gttgttgatatcccgcaagatacctggattgaacagccgtgggatatgggcgtcgtattcgtcccgccaatctcc

SEQ ID NO: 598278 - DNA, 75 bp, synthetic construct
  source 1..75: mol_type = other DNA
gggattaaccaggtactgctcaaaatgaaatcctccggaatttgcggaagcgatgtccactatatctaccaccag

SEQ ID NO: 598279 - DNA, 75 bp, synthetic construct
  source 1..75: mol_type = other DNA
tgacgaaaagctccacactggattcgttcagaagcaaaggcgggacgctctcccttgtgacagacaactggtcgc

SEQ ID NO: 598280 - DNA, 75 bp, synthetic construct
  source 1..75: mol_type = other DNA
gcaaagtgttccttacgcaggcgcagctgttggaaggtatcgactggcgacagcctaagcggctgttgacctccc

SEQ ID NO: 598281 - DNA, 75 bp, synthetic construct
  source 1..75: mol_type = other DNA
tccggctcagttatctatgcttcttgaaggtatcaactggaagcacccgaaacgaacagaacgcgctggaatccg

SEQ ID NO: 598282 - DNA, 75 bp, synthetic construct
  source 1..75: mol_type = other DNA
tccggtaatgccgcagggcgcttgctggccttgcaatccaccgccgactgggggcgcgtggtttacatcggagaa

SEQ ID NO: 598283 - DNA, 75 bp, synthetic construct
  source 1..75: mol_type = other DNA
tgccggaacgtctggcgatggcgaaacagttaggagtgatggatcacggctatttagcgaccaccgaaggtctgc

SEQ ID NO: 598284 - DNA, 75 bp, synthetic construct
  source 1..75: mol_type = other DNA
acggcggattatcggctcctgggtgaccagtctgttccatatggaaaaatgcgcccacgatttaacggactggaa

SEQ ID NO: 598285 - DNA, 75 bp, synthetic construct
  source 1..75: mol_type = other DNA
gtatctggctggttgcaggtatcaccgatatgcgaaatggctttaacggcctggcatcaaaagttcagaacgttc

SEQ ID NO: 598286 - DNA, 75 bp, synthetic construct
  source 1..75: mol_type = other DNA
tctggaaatggtgctggcgattattggcaccatgaaagcagggaaatcaaccaccattaacgctattgttggcac

SEQ ID NO: 598287 - DNA, 75 bp, synthetic construct
  source 1..75: mol_type = other DNA
atggcgcagaacaccattagtcgcgactttacgctgcgttttgccgagctggaatccaccctttgcccgggtgtt

SEQ ID NO: 598288 - DNA, 75 bp, synthetic construct
  source 1..75: mol_type = other DNA
ttgagcatattccagtgattgaagtggagtttgtccatctggcggggctggagagttatcccgggcagttaacgt

SEQ ID NO: 598289 - DNA, 75 bp, synthetic construct
  source 1..75: mol_type = other DNA
cagtattacttgaccactacaaacggcctggcctcaaaagttcagaacgtcctgaaggatgacccgttctccgga

SEQ ID NO: 598290 - DNA, 75 bp, synthetic construct
  source 1..75: mol_type = other DNA
cgatagtctggctctgcgtcaacaaaatgaatccgtggtcaggatgatgcagcagcaattgcagcagaccgtgat

SEQ ID NO: 598291 - DNA, 75 bp, synthetic construct
  source 1..75: mol_type = other DNA
ttcgccatacgccgggacaaaaagaaccggtgctgcatttttcgcatgtcgcaccaatcgactgtttaatccaac

SEQ ID NO: 598292 - DNA, 75 bp, synthetic construct
  source 1..75: mol_type = other DNA
aatcgctgctcgtcctggtatggggaaaaccgaactggcgctgaagattgccgaaggcgttgcaagccgcgttat

SEQ ID NO: 598293 - DNA, 75 bp, synthetic construct
  source 1..75: mol_type = other DNA
gagggtacgctgacggtacagggtacaggtatcaatgagggaggtctgaaggtcggggatgggaaggttgttctg

SEQ ID NO: 598294 - DNA, 75 bp, synthetic construct
  source 1..75: mol_type = other DNA
cggcggatggtgatagtggtaacaaccgcgcggatgaatctggctccgctgtttccggaaagagctcagaggtta

SEQ ID NO: 598295 - DNA, 75 bp, synthetic construct
  source 1..75: mol_type = other DNA
gaagcaacagattcgacggttacactgggcgacaggcgggtctttattgacaaaaacgacggtaatggtacggac

SEQ ID NO: 598296 - DNA, 75 bp, synthetic construct
  source 1..75: mol_type = other DNA
aatgaaatccggaaaattgctgaggatggtgacaatggtaaccatcgcgcggatgaatctggctccgctgtttcc

SEQ ID NO: 598297 - DNA, 75 bp, synthetic construct
  source 1..75: mol_type = other DNA
tgacacagggaagcaccacatatgccatgcacgggcagcagggaaatgacctgaatgccggtaaaaatctgatat

SEQ ID NO: 598298 - DNA, 75 bp, synthetic construct
  source 1..75: mol_type = other DNA
aactggaaagtcaagccggaacaacagaatatcaggtatcaacggatgtcagtggtgatgtgacagatacaacct

SEQ ID NO: 598299 - DNA, 75 bp, synthetic construct
  source 1..75: mol_type = other DNA
attcgaaggtgaacgccataacgccctgcacgatgcacgttaccaggcgaaatacgtttcagccatctggcaaaa

SEQ ID NO: 598300 - DNA, 75 bp, synthetic construct
  source 1..75: mol_type = other DNA
ggatgaacgcggaagacctggtgataatcgctgctcgtcctggtatgggtaaaaccgaactggcgctgaagattg

SEQ ID NO: 598301 - DNA, 75 bp, synthetic construct
  source 1..75: mol_type = other DNA
ctaagtcagctttcgcgcgatgttgagaagcgaccaaacaaacgcccgacaaacgcagatttgcgtgattcagga

SEQ ID NO: 598302 - DNA, 75 bp, synthetic construct
  source 1..75: mol_type = other DNA
ttacttcatcctgaagcagagcacctatggttatttccccacggaccagagcagtaacgctacctgggagtttgt

SEQ ID NO: 598303 - DNA, 75 bp, synthetic construct
  source 1..75: mol_type = other DNA
cagacttaaaatcaagcgataatattatagttagagaacaattgaaaggcaatgacaataaaatatttgttaagc

SEQ ID NO: 598304 - DNA, 75 bp, synthetic construct
  source 1..75: mol_type = other DNA
tgaatgctgatgattacggggctaaaataataaataattctaataagacttcagatttgaatatttctcgctctg

SEQ ID NO: 598305 - DNA, 75 bp, synthetic construct
  source 1..75: mol_type = other DNA
ccgactcaggcgaaaggtgtgtacatcaagaaagttagcatctctaccaccatgggtgcaggtgttgcagttgac

SEQ ID NO: 598306 - DNA, 75 bp, synthetic construct
  source 1..75: mol_type = other DNA
gttatgtctgcgtgctggtgtggtgcgtgaggcgaaaaccgttgaccacatcattcctaaagcgcatggcggcac

SEQ ID NO: 598307 - DNA, 75 bp, synthetic construct
  source 1..75: mol_type = other DNA
taattttgagatgactggaactttgctggggcaggggcttcgtaaacgtaaaactcctcaggaaaaaattgacat

SEQ ID NO: 598308 - DNA, 75 bp, synthetic construct
  source 1..75: mol_type = other DNA
atgccgccacgaacaccaaaagcctgccgcgttcgcggttgccgcaataccactactgacccgtcaggctattgt

SEQ ID NO: 598309 - DNA, 75 bp, synthetic construct
  source 1..75: mol_type = other DNA
agcgaggcgaaaaccgtcgaccacatcatcccgaaagcgcatggcggaacagacgcagacagcaacctgcagagt

SEQ ID NO: 598310 - DNA, 75 bp, synthetic construct
  source 1..75: mol_type = other DNA
atgccaccacgaaccccaaaagcctgccgttttcgcggttgccgcaataccactactgatccgtcaggctattgc

SEQ ID NO: 598311 - DNA, 75 bp, synthetic construct
  source 1..75: mol_type = other DNA
tatgccgcccgcactgattcagtggcgcagcggcagccggaaaaaaccgcagccggaggctgctgctttaactca

SEQ ID NO: 598312 - DNA, 75 bp, synthetic construct
  source 1..75: mol_type = other DNA
attaaccgtctgatgtggatctggcgcggcattgacccacgtgaaatcctcgacgtccaggcgcgtattgtgatg

SEQ ID NO: 598313 - DNA, 75 bp, synthetic construct
  source 1..75: mol_type = other DNA
tgctggtgaaaccgcgccgctgctgtttaccgcgctctccaaccagttctggagcacggacatgatgcagccgat

SEQ ID NO: 598314 - DNA, 75 bp, synthetic construct
  source 1..75: mol_type = other DNA
ggttccaggcaaatatttgccaatgaagacaacgctggggctaaaaatgttggggtagttatattctccatttag

SEQ ID NO: 598315 - DNA, 75 bp, synthetic construct
  source 1..75: mol_type = other DNA
catcagcactaaacaattcatcctggaaatttagcacccgaatgcaaaaaatcgatccagcgctgaatgtcacct

SEQ ID NO: 598316 - DNA, 75 bp, synthetic construct
  source 1..75: mol_type = other DNA
ctgctgtggccgcaggagaacaggtcgttcctgcctctgaacttgctgccgccatgaagcagattaaagaactcc

SEQ ID NO: 598317 - DNA, 75 bp, synthetic construct
  source 1..75: mol_type = other DNA
tgggatgctatccgtgaacgtgtgctgaagcgtgacaaaggcctgtgtcagttatgtctgcgtgctggtgtggtg

SEQ ID NO: 598318 - DNA, 75 bp, synthetic construct
  source 1..75: mol_type = other DNA
gaaagccacaaaagcgaaggctggaaacaatacaagccaggacaatcccgtcaccagcgcggctatggttcgaag

SEQ ID NO: 598319 - DNA, 75 bp, synthetic construct
  source 1..75: mol_type = other DNA
aaagcctgccgtgctcgaggttgccgtaataccaccacagacccgtcaggctactgcgaaagccacaaaagcgaa

SEQ ID NO: 598320 - DNA, 75 bp, synthetic construct
  source 1..75: mol_type = other DNA
ttctaagtgggatgttatccgtgtgcgtgtgctgcaacgtgacaaaggcctgtgtcagttatgtctgcgtgctgg

SEQ ID NO: 598321 - DNA, 75 bp, synthetic construct
  source 1..75: mol_type = other DNA
ccagtacccagcctggtctgattaccggcggtaaagtcattggtgttgtgttctttattgtcgggcttgtttctc

SEQ ID NO: 598322 - DNA, 75 bp, synthetic construct
  source 1..75: mol_type = other DNA
tggtcaatggttgttggagcctgtctggtcggcctgaccgcatggatctcttctgttggttcaactgttggtgtt

SEQ ID NO: 598323 - DNA, 75 bp, synthetic construct
  source 1..75: mol_type = other DNA
tgatgaagacagcaaccttgagagcctgtgctggtcgtgtcacgcagcgaagaccgcgcgcgagcggctcaagtg

SEQ ID NO: 598324 - DNA, 75 bp, synthetic construct
  source 1..75: mol_type = other DNA
tcatccctaaagcgcatggcggctctgatgccgacagtaatctgcagagcctgtgctggccgtgtcataaggcga

SEQ ID NO: 598325 - DNA, 75 bp, synthetic construct
  source 1..75: mol_type = other DNA
tcaagaaagttagcatctctaccaccatgggtgcaggtgttgcagttgaccaggctggcctgagcgcttctgtaa

SEQ ID NO: 598326 - DNA, 75 bp, synthetic construct
  source 1..75: mol_type = other DNA
tgatgccgacagtaatctgcagagtctgtgctggctgtgtcataaggcgaagacggcccgtgaacggctgaagta

SEQ ID NO: 598327 - DNA, 75 bp, synthetic construct
  source 1..75: mol_type = other DNA
tgggaagtcatccgggagcggatacttaagcgcgacaaagcgctgtgtcagaaccaccttcgtcaggggatagtg

SEQ ID NO: 598328 - DNA, 75 bp, synthetic construct
  source 1..75: mol_type = other DNA
gatacgtcagtgggagagatctcagtaaaaaccggaaataacgccagaaatggtggaaaaaatagcctaaatagg

SEQ ID NO: 598329 - DNA, 75 bp, synthetic construct
  source 1..75: mol_type = other DNA
aaccggaatctctcgatgatatccttggcgatattctgaaaaaagagacaacgatggccactgttttaaatatgc

SEQ ID NO: 598330 - DNA, 75 bp, synthetic construct
  source 1..75: mol_type = other DNA
gtatgtcgctggcgctgttcactgaaatgacgccgccgcccaatacggaaggtggtggtctggcgaacgctctgg

SEQ ID NO: 598331 - DNA, 75 bp, synthetic construct
  source 1..75: mol_type = other DNA
atgaaaatagtgattgttggtggtgttgccggcggtgcatccgctgcagccagggctcgtcggttatcagaggat

SEQ ID NO: 598332 - DNA, 75 bp, synthetic construct
  source 1..75: mol_type = other DNA
tgttccccccttgcccggactacaggaagcgggtgtctttacactgcgaaatcttactgacatggatgctatcca

SEQ ID NO: 598333 - DNA, 75 bp, synthetic construct
  source 1..75: mol_type = other DNA
gcccagtgagtcggcacaaatgttccatttgttgcgcggtcaggtgttgcgtccgatgcgcaaaccgttagtggt

SEQ ID NO: 598334 - DNA, 75 bp, synthetic construct
  source 1..75: mol_type = other DNA
gatacggtcatctgtcatgtccgcgatgtgttacaacgggaaccgggcagttattgtttacttgatattcgttct

SEQ ID NO: 598335 - DNA, 75 bp, synthetic construct
  source 1..75: mol_type = other DNA
acgtccatgccgctgatcatgccagttactacccgggggcaacaatgatcagtctgaaactgctgttcagccccg

SEQ ID NO: 598336 - DNA, 75 bp, synthetic construct
  source 1..75: mol_type = other DNA
gcattgctgctgataatatgctcgatcgtcacagcctttaccatggcagtcaggggacatccatttgtaaggtat

SEQ ID NO: 598337 - DNA, 75 bp, synthetic construct
  source 1..75: mol_type = other DNA
tctgccgttacagcatatccgcgctggtcagacatctttcgatgtttatgattcggtgcttaatgaagaagcgct

SEQ ID NO: 598338 - DNA, 75 bp, synthetic construct
  source 1..75: mol_type = other DNA
ccgcgttgggcggcctcggcgtcaaccaaaccacgtttaacttatcgcagactcagggctacggcactggcggta

SEQ ID NO: 598339 - DNA, 75 bp, synthetic construct
  source 1..75: mol_type = other DNA
aatgacgccgccgcccaatacggaaggtggtggtctggcgaacgccctggcgggtagcgggctgttaattttgtg

SEQ ID NO: 598340 - DNA, 75 bp, synthetic construct
  source 1..75: mol_type = other DNA
aagagtgctccggcccttgtccgtcatagccatgcggcagaagaatggttaaaccgctatagcgatcccacttgg

SEQ ID NO: 598341 - DNA, 75 bp, synthetic construct
  source 1..75: mol_type = other DNA
gtggtgatgcccagtgagtcagcacaaatgttccatttgctgcgcggtcaggcattacgcccaatgcgcaaaccg

SEQ ID NO: 598342 - DNA, 75 bp, synthetic construct
  source 1..75: mol_type = other DNA
cgctacggtgaatgtctcgctcgtcgcggtctgttaagtcagacgcagcaagatgagatgattagccgctatcgc

SEQ ID NO: 598343 - DNA, 75 bp, synthetic construct
  source 1..75: mol_type = other DNA
atcttactgacatggatgctatcctggggtggattgagcaacatcacgtagctcacaccacgcttgtcggggggg

SEQ ID NO: 598344 - DNA, 75 bp, synthetic construct
  source 1..75: mol_type = other DNA
ttagtgcgtaccgtaccgccgcgcccgacggaacaagggcaaaaactgttggcgctactacgccaggtggagctg

SEQ ID NO: 598345 - DNA, 75 bp, synthetic construct
  source 1..75: mol_type = other DNA
gcccatccgcctcaacttgcaggtagaagatgaaacccgcactcaggaacgtctgcgtcgcggcgaagtggtcgg

SEQ ID NO: 598346 - DNA, 75 bp, synthetic construct
  source 1..75: mol_type = other DNA
ctggcgcggttgccatggctctggtttcttttggtgcaaatgcaaatcaggggcagggccaggtgaactttaaag

SEQ ID NO: 598347 - DNA, 75 bp, synthetic construct
  source 1..75: mol_type = other DNA
ggtaatgccgcaggtcgcttactggcactgcaatccaccgctgactggggacgcgtggtttacattggtgaaacc

SEQ ID NO: 598348 - DNA, 75 bp, synthetic construct
  source 1..75: mol_type = other DNA
atgactagtctaaaaactagtattaagattatcacttatttaagtgatattggttgtctggagattcagggggcc

SEQ ID NO: 598349 - DNA, 75 bp, synthetic construct
  source 1..75: mol_type = other DNA
agataaaaacaagtctattcctggcattattgtttgccacatccagccctgtatatgcaggactggatgtggata

SEQ ID NO: 598350 - DNA, 75 bp, synthetic construct
  source 1..75: mol_type = other DNA
actagggagttacaaagaagacgggacgggcctggcgtctctgatacgtgaagcctggctaagtgctttacaact

SEQ ID NO: 598351 - DNA, 75 bp, synthetic construct
  source 1..75: mol_type = other DNA
acgggattagccagcctgatacgtgaagcctggctgagcgctttgcaactaggcccttaccccgaataccgaacg

SEQ ID NO: 598352 - DNA, 75 bp, synthetic construct
  source 1..75: mol_type = other DNA
atgtgttacaacgggaaccgggcagttattgtttacttgatattcgctctcctgccgaactgaaacaatttggtg

SEQ ID NO: 598353 - DNA, 75 bp, synthetic construct
  source 1..75: mol_type = other DNA
gctttcactggcggtcaacgccgacagtctggcgacgtggttgcttcctgcactggctcctgtgttggctgattc

SEQ ID NO: 598354 - DNA, 75 bp, synthetic construct
  source 1..75: mol_type = other DNA
cccatcacggcgatagcgtccattctccatcgcgtttccggtgtgatcacctttgttgcagtgggcatcctgctg

SEQ ID NO: 598355 - DNA, 75 bp, synthetic construct
  source 1..75: mol_type = other DNA
ctgacgtttcggttaagttattttgcgaaggaacgcaccaaagattacaacagggaggaacgttcattcggatgt

SEQ ID NO: 598356 - DNA, 75 bp, synthetic construct
  source 1..75: mol_type = other DNA
gctcaaggctgacagctaatgagtatgtcgagatttaccatgcagccgaacctctccctatctggctgaggctgg

SEQ ID NO: 598357 - DNA, 75 bp, synthetic construct
  source 1..75: mol_type = other DNA
aatgggcgtctcgccaaataaagtctctctcgcacactcggatccgtcaggaaaagacgtggcgtatcagcggaa

SEQ ID NO: 598358 - DNA, 75 bp, synthetic construct
  source 1..75: mol_type = other DNA
gggtaaagagtttggattaggccgagacaggaggatagcaatcactgaagcaatacaggccaatattgagttact

SEQ ID NO: 598359 - DNA, 75 bp, synthetic construct
  source 1..75: mol_type = other DNA
gtctgaagtatggcttcaagccgtttatctggcaggtaggcggcaaatttacctggccgttggataaagacaact

SEQ ID NO: 598360 - DNA, 75 bp, synthetic construct
  source 1..75: mol_type = other DNA
ctcaatatctcattggctgatacactacagaaatgcagggaggccagcagcagtgaaacaataatcgcatcaaag

SEQ ID NO: 598361 - DNA, 75 bp, synthetic construct
  source 1..75: mol_type = other DNA
cagggcagagagtcggcgatttgtgcagaatgaaatggtcagacataaacgacaaccatcttcacattgaacaga

SEQ ID NO: 598362 - DNA, 75 bp, synthetic construct
  source 1..75: mol_type = other DNA
ttctcagagattcaagccgaaaagagcgcactaaatattatcgttgatggcgagggtgaagaaaaaattccccag

SEQ ID NO: 598363 - DNA, 75 bp, synthetic construct
  source 1..75: mol_type = other DNA
acacaatgcgccctgttgcatactggtttcgtaaagtcaatctactgactcagacctacacaggtgataactatc

SEQ ID NO: 598364 - DNA, 75 bp, synthetic construct
  source 1..75: mol_type = other DNA
tctcaaatcgaacggtaagcgcctttatgatcagggtcgtactctggctataaacaatgctgtaggtaagcgata

SEQ ID NO: 598365 - DNA, 75 bp, synthetic construct
  source 1..75: mol_type = other DNA
gccagcgtgatgtcgctgcacttgatgccagatactcgagggaattagccgatgcgagagctgaaaatgaaactc

SEQ ID NO: 598366 - DNA, 75 bp, synthetic construct
  source 1..75: mol_type = other DNA
ccttaaacaaatgtgggctaaaaatggcggtaatggctggggatttgttccagatgtttttctggcctatctggc

SEQ ID NO: 598367 - DNA, 75 bp, synthetic construct
  source 1..75: mol_type = other DNA
atgattaaagttctttttttcgcccaggtgcgcgagctggtggggaccgatgcaaccgacgttgccgcggatttt

SEQ ID NO: 598368 - DNA, 75 bp, synthetic construct
  source 1..75: mol_type = other DNA
tcgacgtggttgataacgaattatctatgtttgccactgacggaaagcgcgtggtgatcgccacatggacgcgca

SEQ ID NO: 598369 - DNA, 75 bp, synthetic construct
  source 1..75: mol_type = other DNA
tatggcccacaggctgaatggaatcaagaggctaaaataaaagcagatattctttttggtgcttcagagcaatct

SEQ ID NO: 598370 - DNA, 75 bp, synthetic construct
  source 1..75: mol_type = other DNA
acacggctatttgcagaatggctacaaaccgacgaagcagcgcctgcattcaaaaaatatggctggaccaggaaa

SEQ ID NO: 598371 - DNA, 75 bp, synthetic construct
  source 1..75: mol_type = other DNA
cgtacgtcaggatgcaaatgatgaaacacggctatttgcagaatggctacaaaccgacgaagcagcgcctgcatt

SEQ ID NO: 598372 - DNA, 75 bp, synthetic construct
  source 1..75: mol_type = other DNA
cagcttgttctcagccacgatgtcttccttaaacaaatgtgggctaaaaatggcggcaatggctgtaatgccgat

SEQ ID NO: 598373 - DNA, 75 bp, synthetic construct
  source 1..75: mol_type = other DNA
ttcctcatgaacatctgttcaacgatctttcctctgttgtggatgctccttgctatcctttttcacaacggcttg

SEQ ID NO: 598374 - DNA, 75 bp, synthetic construct
  source 1..75: mol_type = other DNA
gtaatacttccggcaccggcgtctgggaagatatcgccggacggaaggggaatatcgagactgtcgccgatatcc

SEQ ID NO: 598375 - DNA, 75 bp, synthetic construct
  source 1..75: mol_type = other DNA
cgtacgccaggatgcggatgctgaaacccgccagtttgctgcatggctgcattctgatgaagcagcaccagcatt

SEQ ID NO: 598376 - DNA, 75 bp, synthetic construct
  source 1..75: mol_type = other DNA
ggctacacgatgaatatctcccagcttgccagaatgaaggatgaaaagctggtagatagttacacgactgcatag

SEQ ID NO: 598377 - DNA, 75 bp, synthetic construct
  source 1..75: mol_type = other DNA
caaggctgcggagtggcttttctctgataaaggctacacgatgaatatctcccagcttgccagaatgaaggatga

SEQ ID NO: 598378 - DNA, 75 bp, synthetic construct
  source 1..75: mol_type = other DNA
ggctgcccattgtcgttcgataatggaacaaaaaatcgctgatctcgataaagaagtcgcagagcgcgaagccgc

SEQ ID NO: 598379 - DNA, 75 bp, synthetic construct
  source 1..75: mol_type = other DNA
gcaaatgatgaaacccgtcgatttgcagaatggctacaaaccgatgaagcggcgcctgcattcaaaaaatatggc

SEQ ID NO: 598380 - DNA, 75 bp, synthetic construct
  source 1..75: mol_type = other DNA
acccgccagtttgctgcatggctgcattctgatgaagcagcaccagcattcgaaaaatatggctgggtcaaaaag

SEQ ID NO: 598381 - DNA, 75 bp, synthetic construct
  source 1..75: mol_type = other DNA
agcgcacacgagttaaagcactgcaaaacaaattaattgaaacagtggtattgccaattttcgaagcatatctac

SEQ ID NO: 598382 - DNA, 75 bp, synthetic construct
  source 1..75: mol_type = other DNA
atatcctgcttgccaatggcgaactgaagccgattaaagactggcctaaggtgtggcgtacaacgctatcaggaa

SEQ ID NO: 598383 - DNA, 75 bp, synthetic construct
  source 1..75: mol_type = other DNA
atcgccgaactgaaagcgcaacgcaatgatcttgttggtattaatgcagaatatgtgcttaatcgccttattgaa

SEQ ID NO: 598384 - DNA, 75 bp, synthetic construct
  source 1..75: mol_type = other DNA
tttcccgccgctgagcataatctggcgcaacgtttgctgaccgcgcaaaaaagccattctgcccgccagctttta

SEQ ID NO: 598385 - DNA, 75 bp, synthetic construct
  source 1..75: mol_type = other DNA
ggcagcgctgccgggcaacgggttacgggaacggtcggaaaactggctgatgtcgggcgtgccgttggcgggtgg

SEQ ID NO: 598386 - DNA, 75 bp, synthetic construct
  source 1..75: mol_type = other DNA
aagtgactggcgccgatggaggaccagtcagaacagaaattaccaacttaacgccggagcaggctgcagaggcgt

SEQ ID NO: 598387 - DNA, 75 bp, synthetic construct
  source 1..75: mol_type = other DNA
ctgataaggttaaaaaccttgagttgcttgggcgccatgtttctgttcaggcgtttaaagacaacgtcaaaaatg

SEQ ID NO: 598388 - DNA, 75 bp, synthetic construct
  source 1..75: mol_type = other DNA
acagttgcgcggtagcggcgcaggtttatatcggcagcgaatatgaacatcagtcgatcaaaaatattattcagc

SEQ ID NO: 598389 - DNA, 75 bp, synthetic construct
  source 1..75: mol_type = other DNA
tggcaaaccggcgatatgtatcagggcctgggctgggaaatgctggactggccggtaaatcctgacagcatcatt

SEQ ID NO: 598390 - DNA, 75 bp, synthetic construct
  source 1..75: mol_type = other DNA
tagctttcgttccggcattaagcctgtcggtattttctgcagacgcatatgcagtagatacatctgcgaactcat

SEQ ID NO: 598391 - DNA, 75 bp, synthetic construct
  source 1..75: mol_type = other DNA
gccgcggcgacaggggaacccagcaagcagatctggcagtcgatgctggagctttctggtgtgaaagatggcgaa

SEQ ID NO: 598392 - DNA, 75 bp, synthetic construct
  source 1..75: mol_type = other DNA
cgaccgaccgtcctttattaccggcggagcacaatgcgctcaaacagctggtgaccaaacttgcggcggcaacgg

SEQ ID NO: 598393 - DNA, 75 bp, synthetic construct
  source 1..75: mol_type = other DNA
agctgcacggcactcgccgggtggttgctgccgttggccgcccctgtgtggcaatcggcccgccgcacatcggct

SEQ ID NO: 598394 - DNA, 75 bp, synthetic construct
  source 1..75: mol_type = other DNA
tcgcataaaggtggcaaacagcggcccctttgaagaaatcaagaacgagatgcgccgggtgcttaactggcacga

SEQ ID NO: 598395 - DNA, 75 bp, synthetic construct
  source 1..75: mol_type = other DNA
ccaagggttcgtggagcagggggctagtgctgttcaatctcatccttatgagggcgaaccatagtgttggagcag

SEQ ID NO: 598396 - DNA, 75 bp, synthetic construct
  source 1..75: mol_type = other DNA
gaacaagtcaaacctgaaaaagtgggctggttatgtttggaaattaatcaaatggggtattagactgtttgattt

SEQ ID NO: 598397 - DNA, 75 bp, synthetic construct
  source 1..75: mol_type = other DNA
ccgttggcgtatctgtgcggcatctatccctattcatcatggcccaccattgcggccaatatcatgatccttgtt

SEQ ID NO: 598398 - DNA, 75 bp, synthetic construct
  source 1..75: mol_type = other DNA
cgttttaaccaaagaaaacaatgagttaaatgtttctatcctgtctgctgataagtgcgactggtcgctcaaccg

SEQ ID NO: 598399 - DNA, 75 bp, synthetic construct
  source 1..75: mol_type = other DNA
aggcggtagaaactccagttaaaactaatcaccgccagcaacaacaaaaaatctttatcgacaaacaagtagaaa

SEQ ID NO: 598400 - DNA, 75 bp, synthetic construct
  source 1..75: mol_type = other DNA
tttaaagaaattgaggcagaaaaacacatgctaaatacatgcgtcgtgagtgagggtgagactgaaaaagaaaaa

SEQ ID NO: 598401 - DNA, 75 bp, synthetic construct
  source 1..75: mol_type = other DNA
atgtttacttattatcaggcagaaaattcaacagcagaacccgctctggttaatgccattgagcaaggccttcgg

SEQ ID NO: 598402 - DNA, 75 bp, synthetic construct
  source 1..75: mol_type = other DNA
ccgggccacagccgctggcattacctgcaccacgccctgttctggcattacccccacccggcgtaccggtaacgg

SEQ ID NO: 598403 - DNA, 75 bp, synthetic construct
  source 1..75: mol_type = other DNA
agcaaatcacagcggcggatgccaacctgctgaccggttacggtatcaacgtttatcaggcgctggcggatgcaa

SEQ ID NO: 598404 - DNA, 75 bp, synthetic construct
  source 1..75: mol_type = other DNA
gtggtactaaatgacccatcggcaactatcaatgcgttactctgcgctggggtagtgctgaccctgatgttttac

SEQ ID NO: 598405 - DNA, 75 bp, synthetic construct
  source 1..75: mol_type = other DNA
cggggccaacattattttcctgtctgtgctggtcgccgtcagaggcaacgtggcgcgcctggttgatcatctgag

SEQ ID NO: 598406 - DNA, 75 bp, synthetic construct
  source 1..75: mol_type = other DNA
acacagcatccgtcagggagcgatctaattttctaccctaaaagtcaaggagatgataagcctgaaaacatcctg

SEQ ID NO: 598407 - DNA, 75 bp, synthetic construct
  source 1..75: mol_type = other DNA
cggaagatgccaacgactacgccaccagctacctgtggaatgaggtgctactgccggacaatctgctgaaaattc

SEQ ID NO: 598408 - DNA, 75 bp, synthetic construct
  source 1..75: mol_type = other DNA
aaagagtattatcagaatgccgaactggtgcaggtatccgatcccaaccttgtttatgccattttccataagctg

SEQ ID NO: 598409 - DNA, 75 bp, synthetic construct
  source 1..75: mol_type = other DNA
ggtagtaaccagtagtcgcctcgaagcggtaaaatataagcaggcgtttgatagctatgtgcgggaaaaaggcta

SEQ ID NO: 598410 - DNA, 75 bp, synthetic construct
  source 1..75: mol_type = other DNA
cctcaatatgaaggtcaacggaataaacaatagcttacgtaacaaatcggtcagagtttactcactccgaggcgc

SEQ ID NO: 598411 - DNA, 75 bp, synthetic construct
  source 1..75: mol_type = other DNA
atttctacaacgagcccgacgagattttgggggctttccagccgtactaccagacagcagaactgacggatgtca

SEQ ID NO: 598412 - DNA, 75 bp, synthetic construct
  source 1..75: mol_type = other DNA
tcagctgaaagaagtgcttatgaccgaagaagcggatgacgatgtggagatgtcttcagaagatattctggatgc

SEQ ID NO: 598413 - DNA, 75 bp, synthetic construct
  source 1..75: mol_type = other DNA
aatgatcattttcatatcgcttctttcgaagggaacagaaatccagtgtggaggaaaacttcactggaggattta

SEQ ID NO: 598414 - DNA, 75 bp, synthetic construct
  source 1..75: mol_type = other DNA
tttctcatgcgctcaattattgaactattatcgtacgtcagtaacaaatgcaattgaacagatcagagaagctgc

SEQ ID NO: 598415 - DNA, 75 bp, synthetic construct
  source 1..75: mol_type = other DNA
gtgaaggttgtctttaatgtaaaaagtgatttcgataagatttttttaccactggagttttctggttttcatggg

SEQ ID NO: 598416 - DNA, 75 bp, synthetic construct
  source 1..75: mol_type = other DNA
attgctgaatgccgttcgcgtggagggaacagggcaaaagtaccttattcagcatagcgctggttccggtaaatc

SEQ ID NO: 598417 - DNA, 75 bp, synthetic construct
  source 1..75: mol_type = other DNA
aacaatcgcttgatgcggcaaaactacagtatatcaatgaccgccagccaaaaaccggaaataaaccagaaccac

SEQ ID NO: 598418 - DNA, 75 bp, synthetic construct
  source 1..75: mol_type = other DNA
atccagacttgcttgttcgctattgcgctaaccgtttacgagtagtacctgaactgatttattcgcccaatggtt

SEQ ID NO: 598419 - DNA, 75 bp, synthetic construct
  source 1..75: mol_type = other DNA
ttgaagcccaacggtggctagaccgtcaggcttcggtatcgaacaaatcctacgacggaaatatcgatatgaata

SEQ ID NO: 598420 - DNA, 75 bp, synthetic construct
  source 1..75: mol_type = other DNA
ggattgtaggagacgaacacaagctaagagtaggtccacatcaatttcacaactgtggagtttcaaattgcaata

SEQ ID NO: 598421 - DNA, 75 bp, synthetic construct
  source 1..75: mol_type = other DNA
atgagaacattagaagaagtaattgcagcccagtcacctgaaagtcaggctattatcaaagctatggcttataag

SEQ ID NO: 598422 - DNA, 75 bp, synthetic construct
  source 1..75: mol_type = other DNA
gaacaagatttacgcttacaggaagaaacgcctgactatacgctggatgcaagtaatgatattggtacggcaaaa

SEQ ID NO: 598423 - DNA, 75 bp, synthetic construct
  source 1..75: mol_type = other DNA
tggcccagcaaggcgaccggacggccgctagcgaagccgccgaacaacagtttgaagcgcgtaaaaacacacgcg

SEQ ID NO: 598424 - DNA, 75 bp, synthetic construct
  source 1..75: mol_type = other DNA
ggcactttcgagtctgaggacgcgcagcttgcccgcatggtttcccgttcgcagtcggccgctggccggatgcag

SEQ ID NO: 598425 - DNA, 75 bp, synthetic construct
  source 1..75: mol_type = other DNA
tcgacgttctatcagcagatgtacgagtacgccgaagcggtcaacacgcaactaaacaccgcgcagcagttgcag

SEQ ID NO: 598426 - DNA, 75 bp, synthetic construct
  source 1..75: mol_type = other DNA
atttttataacgatccggacgagatcctcggcgcattccagccctatttccagacggcggaactgaccgatgtca

SEQ ID NO: 598427 - DNA, 75 bp, synthetic construct
  source 1..75: mol_type = other DNA
atgagcaacgacattacaaaagagctcaacctgcaaaacgacatcatcgcccagatggtagaaaaaggctggatt

SEQ ID NO: 598428 - DNA, 75 bp, synthetic construct
  source 1..75: mol_type = other DNA
gtttttcgctgtgtcagtttaaaccggaacataatctcaacccggaaacgctggcgcgctatcagcagaatatct

SEQ ID NO: 598429 - DNA, 75 bp, synthetic construct
  source 1..75: mol_type = other DNA
cagatcgtcgagtacgatgacaaagatctggaaaaactgagcctgtttgcccgccatttgcgtccgctgctgcat

SEQ ID NO: 598430 - DNA, 75 bp, synthetic construct
  source 1..75: mol_type = other DNA
tcaacctgcaaaacgacatcatcgcccaaatggtgacaaaaggctggattgtcggcaaaggtgacggctacgacc

SEQ ID NO: 598431 - DNA, 75 bp, synthetic construct
  source 1..75: mol_type = other DNA
ctattcttggcgatttcctccaggcagttgataatgcagtaatggacagtaatgacgcccgacaagaatttatgt

SEQ ID NO: 598432 - DNA, 75 bp, synthetic construct
  source 1..75: mol_type = other DNA
gaaaacatggccatacagtcgcttcagtatgtcgcgactgggtgaagaactgcacctgcacttcccggcaattga

SEQ ID NO: 598433 - DNA, 75 bp, synthetic construct
  source 1..75: mol_type = other DNA
gtggctgagcggatgggaattgccccacaacagatgctgtttgtcggcgactcacgcaatgatattcaggcggca

SEQ ID NO: 598434 - DNA, 75 bp, synthetic construct
  source 1..75: mol_type = other DNA
aaaatgcatgacgccttattggattacatggacaaaattcgcgatccgttccgcagctaccaatggagcctgcgt

SEQ ID NO: 598435 - DNA, 75 bp, synthetic construct
  source 1..75: mol_type = other DNA
ccagtggtacgcgactatgacaccggcctaccgacacaaggggtgaaggtggaagagaaaaaacagaagttctga

SEQ ID NO: 598436 - DNA, 75 bp, synthetic construct
  source 1..75: mol_type = other DNA
cggaacaggccggagccggctttaaccttgcgccgggatattaccgcatccttccggtggcgattgatggtattg

SEQ ID NO: 598437 - DNA, 75 bp, synthetic construct
  source 1..75: mol_type = other DNA
ttgagaaatatcagttcagggccaggaatgagtctccacgactgatgcgtcagtgggctgatgtcatgtatgaat

SEQ ID NO: 598438 - DNA, 75 bp, synthetic construct
  source 1..75: mol_type = other DNA
tactatggcgaagttgctgaagaaggcacgtttttgttcccgcacgttgccgatacgctgggcgcattgcaggct

SEQ ID NO: 598439 - DNA, 75 bp, synthetic construct
  source 1..75: mol_type = other DNA
atccgtcgatttgctgaatggctacaaaccgacgaagcagcgcctgcattcaaaaaatatggctggaccaggaaa

SEQ ID NO: 598440 - DNA, 75 bp, synthetic construct
  source 1..75: mol_type = other DNA
tcagccattatatctacgtaagagtattcttctggtgaaaaaaggtaatccgaaaaatattagaggtcttgaaga

SEQ ID NO: 598441 - DNA, 75 bp, synthetic construct
  source 1..75: mol_type = other DNA
agggtgtctggctggaattcgacatgattggcctagacattaccttcccgaaagagggaatagcgccaggggtgc

SEQ ID NO: 598442 - DNA, 75 bp, synthetic construct
  source 1..75: mol_type = other DNA
taattccgcctatacctgttcaccggtttgtacaccagcgcgcgccgggctgtttaccggtatctacgctaacca

SEQ ID NO: 598443 - DNA, 75 bp, synthetic construct
  source 1..75: mol_type = other DNA
ccgcagttaccaatggagcctgcgtccgtggcgtaaagatgcacggccgcgctggatgggggcgtttcgtccacg

SEQ ID NO: 598444 - DNA, 75 bp, synthetic construct
  source 1..75: mol_type = other DNA
caatggcctaaacagcgtcgaagatttacaggcgaaccatatcgacgaaaccttcacctgggcgcaccgcatcag

SEQ ID NO: 598445 - DNA, 75 bp, synthetic construct
  source 1..75: mol_type = other DNA
cccgtggccgttgacggtatcagccatgtggccagtgaggaagactggctgaccgttccgggagctgatgaagaa

SEQ ID NO: 598446 - DNA, 75 bp, synthetic construct
  source 1..75: mol_type = other DNA
ggatctggcgaaagagtgcgatctggctggcgcgattaagtcgatgttctctggcgagaagattaaccgcaccga

SEQ ID NO: 598447 - DNA, 75 bp, synthetic construct
  source 1..75: mol_type = other DNA
cactgaaaaccgcgccgtactgcacgtagcgctgcgtaaccgtagcaataccccgattctggttgatggcaaaga

SEQ ID NO: 598448 - DNA, 75 bp, synthetic construct
  source 1..75: mol_type = other DNA
agatcgtgccgtgctgcacgtggcgctacgcaaccgtagcaatacgcctatcatcgttgacggcaaagatgtcat

SEQ ID NO: 598449 - DNA, 75 bp, synthetic construct
  source 1..75: mol_type = other DNA
ccatggcgacccgcgagcaggtaattatccccgcaggcacgcaaagcacccttattgatgtgatcgccaccgaca

SEQ ID NO: 598450 - DNA, 75 bp, synthetic construct
  source 1..75: mol_type = other DNA
acggtgtatgttgaaaacctttccaatatcagcaaaaacgatatcgacgccctgaaatcaggcactgaaaacctg

SEQ ID NO: 598451 - DNA, 75 bp, synthetic construct
  source 1..75: mol_type = other DNA
acatactgcgcgaaagcggaatgccggttgatgaacagaccgtacgtgacaccctgcaacaggtggcagatgatg

SEQ ID NO: 598452 - DNA, 75 bp, synthetic construct
  source 1..75: mol_type = other DNA
gacggtgaaagccgggacggttatccagacagaacgcattaacgggcgagtttatgagctggccaccactgagga

SEQ ID NO: 598453 - DNA, 75 bp, synthetic construct
  source 1..75: mol_type = other DNA
gtagtcaccgcctgggtcaaaaatctggcaaacctcagtgatgatgagaagaaagggctgaaggacgggatagaa

SEQ ID NO: 598454 - DNA, 75 bp, synthetic construct
  source 1..75: mol_type = other DNA
actgtctttttcgctgggtgatatcaccagcgaactgagtgtgccacgcctgaaatcgttaacggtgggtattga

SEQ ID NO: 598455 - DNA, 75 bp, synthetic construct
  source 1..75: mol_type = other DNA
aacacgttgcaaaacactttgcggcgctttccaccaatgccaaagccgttggtgagtttggtattgatactgcca

SEQ ID NO: 598456 - DNA, 75 bp, synthetic construct
  source 1..75: mol_type = other DNA
gattacgccaggggctaacgaggaaagcgacgacgagctgcgcgaccgcacccgcaaccagtttaatctggtggg

SEQ ID NO: 598457 - DNA, 75 bp, synthetic construct
  source 1..75: mol_type = other DNA
atatcgccgggcaggttaaagtcccgacggcacggctgaaactggcgctggaaagcgggttgctggtaacggcac

SEQ ID NO: 598458 - DNA, 75 bp, synthetic construct
  source 1..75: mol_type = other DNA
attttactgccgacgcggataatgctgccgggactgcagaacagatgtttatgtctgctttcagtagtatgggaa

SEQ ID NO: 598459 - DNA, 75 bp, synthetic construct
  source 1..75: mol_type = other DNA
ggagaagcgggacctgaagccattctgccactgcgtcgtggtgccgacggtaagctgggcgttgtggcggatatt

SEQ ID NO: 598460 - DNA, 75 bp, synthetic construct
  source 1..75: mol_type = other DNA
aacggtgccatgcgggcgtttcagaattttacggcagatgcggataatgcggcaggaactgctgagcagatgttt

SEQ ID NO: 598461 - DNA, 75 bp, synthetic construct
  source 1..75: mol_type = other DNA
gcggatattggggggtcaggtatggcgatgttttccccgcagtacaacatcgagatcaataacgatggcacgaac

SEQ ID NO: 598462 - DNA, 75 bp, synthetic construct
  source 1..75: mol_type = other DNA
actgcggttaatgatttcatggatagcgtccaccatatttggtgtccactattctctcaggaatttcaggatctg

SEQ ID NO: 598463 - DNA, 75 bp, synthetic construct
  source 1..75: mol_type = other DNA
gatgtttgccccgcagtacaacatcgagatcaataacgatggtacgaacgggcagataggtccggctgccctgaa

SEQ ID NO: 598464 - DNA, 75 bp, synthetic construct
  source 1..75: mol_type = other DNA
taccgtctccgaagtggaatcgacaagataaccgcgcaggttaactacctgcaggaatacatcaggacgcaatgc

SEQ ID NO: 598465 - DNA, 75 bp, synthetic construct
  source 1..75: mol_type = other DNA
atactctggttatctgcaccatcgtctgcctgtcgtgggcggtcaatcattaccgtgataacgccatcgcctaca

SEQ ID NO: 598466 - DNA, 75 bp, synthetic construct
  source 1..75: mol_type = other DNA
gattttaccgtggatgcagataatacggcaggaacagcagaacaggtgttctcgtcagccttcagcaacatggga

SEQ ID NO: 598467 - DNA, 75 bp, synthetic construct
  source 1..75: mol_type = other DNA
cattaagaaagaaacgcctgccacccgtaatgatgaggccacccggttattactgcagtacagccagcaacaggc

SEQ ID NO: 598468 - DNA, 75 bp, synthetic construct
  source 1..75: mol_type = other DNA
aataccgcgttcagcagcatgggcaacgggctggcgacgttctgcacgacaggtaaactgaatttcaaatctttt

SEQ ID NO: 598469 - DNA, 75 bp, synthetic construct
  source 1..75: mol_type = other DNA
gtaatggcatcacgcaacatgccatggcggggtcactggcgcaggtagtggggagcggtgcatttcacggtaacg

SEQ ID NO: 598470 - DNA, 75 bp, synthetic construct
  source 1..75: mol_type = other DNA
ggctaagcgtcgcatctaccagctagtgttttcagcgacggtagcagcgggagcattgacaatgctggcggcatg

SEQ ID NO: 598471 - DNA, 75 bp, synthetic construct
  source 1..75: mol_type = other DNA
tgagaccgctctgcgggttcttggtgcgctctggcagtataaaacggaatccatgcctgaacaggctgaacaaag

SEQ ID NO: 598472 - DNA, 75 bp, synthetic construct
  source 1..75: mol_type = other DNA
gatgcttgctgaaacaggttgatcgtgagaccgctctgcgggttcttggtgcgctctggcagtataaaacggaat

SEQ ID NO: 598473 - DNA, 75 bp, synthetic construct
  source 1..75: mol_type = other DNA
gacaaacatatcccctgacagaattactgcatgttctgggccttgcccgtagcagttatttttatcaccgggctg

SEQ ID NO: 598474 - DNA, 75 bp, synthetic construct
  source 1..75: mol_type = other DNA
cccgacagaaagtggcgtttatccgtcagcttaaagagcaggcaacccgccagaatctttcatcttctgagttgc

SEQ ID NO: 598475 - DNA, 75 bp, synthetic construct
  source 1..75: mol_type = other DNA
actccgatgagcaaaaacaggttgccggtgaacattatcttaaccacggctgctgcctggcgtttaccagcagag

SEQ ID NO: 598476 - DNA, 75 bp, synthetic construct
  source 1..75: mol_type = other DNA
acggcttttggtaaagggaagcgggttatctgtgtcagtggttatgatctttaccactcactgagtcatgggatc

SEQ ID NO: 598477 - DNA, 75 bp, synthetic construct
  source 1..75: mol_type = other DNA
catgcgggcgtttcagaatttcacggcagatgcggataatgcggcaggcactgcggagcagatgcttacagcggc

SEQ ID NO: 598478 - DNA, 75 bp, synthetic construct
  source 1..75: mol_type = other DNA
caacagccgcatccgtccatgcgcagacggtggagaagaacgcacaggctcatgaacgcatggcccgcgaggtgg

SEQ ID NO: 598479 - DNA, 75 bp, synthetic construct
  source 1..75: mol_type = other DNA
gatggtataacgagcggcgtataaaattatcgctgggtgccgtcagccccaaaatgtaccgccaacaatgcgggc

SEQ ID NO: 598480 - DNA, 75 bp, synthetic construct
  source 1..75: mol_type = other DNA
ttattcgctcaatgtcccgcaaaggatgttcacctgataatgcggcatgcgaaggctttttcggcagactgaaaa

SEQ ID NO: 598481 - DNA, 75 bp, synthetic construct
  source 1..75: mol_type = other DNA
gctgacggtaagctgggggttgtggcggatattgggggttcaggtatggcgatgttttccccgcagtacaacatc

SEQ ID NO: 598482 - DNA, 75 bp, synthetic construct
  source 1..75: mol_type = other DNA
gggttgtggcggatattggtggttcaggtatggcgatgtttgccccgcagtacaacatcgagatcaataacgatg

SEQ ID NO: 598483 - DNA, 75 bp, synthetic construct
  source 1..75: mol_type = other DNA
ataacccaacctgtgccgggtagcgcacaatcgataggcagtttttctaatggctgtatcgtcggcgctgacacg

SEQ ID NO: 598484 - DNA, 75 bp, synthetic construct
  source 1..75: mol_type = other DNA
gtggtgaccaatgatatcagacaaactcataacgctggcgaagggcctttgtttaatcgtcggtatttcattttc

SEQ ID NO: 598485 - DNA, 75 bp, synthetic construct
  source 1..75: mol_type = other DNA
atgggtggtatcccagttaattggtggcaattaaggggtagctatgtcagacaaactcataacgccggcaaaggt

SEQ ID NO: 598486 - DNA, 75 bp, synthetic construct
  source 1..75: mol_type = other DNA
gggcgcagcagccgctggtacaaaagtgaagtggagcagtggatgcagcagcgaatagaggagtcacggggggca

SEQ ID NO: 598487 - DNA, 75 bp, synthetic construct
  source 1..75: mol_type = other DNA
cagtttgccgaagaagtgcaaacagaaaatcgtctgcgttatctggtatgcctgacagtggcagacatttgcgcc

SEQ ID NO: 598488 - DNA, 75 bp, synthetic construct
  source 1..75: mol_type = other DNA
gggcggaattaaacgaatgtctgcatatattgtggcgcattcgctttgccctgcatctggtcgtcagccgttacg

SEQ ID NO: 598489 - DNA, 75 bp, synthetic construct
  source 1..75: mol_type = other DNA
tcgtgctgaaaatgccgacggtttggctggcaggtgttgtgaccttttgtatgtggtcaatttatatcggctttg

SEQ ID NO: 598490 - DNA, 75 bp, synthetic construct
  source 1..75: mol_type = other DNA
acagcgtattgctgcgtgccgacgatcccctgatcgacatgaactacatcaccagcttcactggtatgaccgaca

SEQ ID NO: 598491 - DNA, 75 bp, synthetic construct
  source 1..75: mol_type = other DNA
aaaggcttattcaccctgacgacgatcccttcagtggactctattctggtggcatgcatcgcgtatgcgattctc

SEQ ID NO: 598492 - DNA, 75 bp, synthetic construct
  source 1..75: mol_type = other DNA
tcaacatggactggaagttccactggcactgttagtggcggctggctgtgtcatttttgtcgcctctacggcatt

SEQ ID NO: 598493 - DNA, 75 bp, synthetic construct
  source 1..75: mol_type = other DNA
aggccatttccctaaacccatcaagctggggcgcagcagccgctggtacaaaagtgaagtggagcagtggatgca

SEQ ID NO: 598494 - DNA, 75 bp, synthetic construct
  source 1..75: mol_type = other DNA
atggggattggcactccatcccgcctggttgaagcattactggaatctggtgttcgcgacctgacattgatagcc

SEQ ID NO: 598495 - DNA, 75 bp, synthetic construct
  source 1..75: mol_type = other DNA
acagcgtattgctgcgtgtcgacgatccactgatcgacatgaactacatcaccagtttcaccggtatgacagata

SEQ ID NO: 598496 - DNA, 75 bp, synthetic construct
  source 1..75: mol_type = other DNA
tattcaggacccggaagtcatcaagcagtttgccgaagaagttcaaacggaaaatcgtctgcgctatctggtatg

SEQ ID NO: 598497 - DNA, 75 bp, synthetic construct
  source 1..75: mol_type = other DNA
ccctgctcttctcagcaacgctggaaggtgacgctattcaggattttgctgaacgtctactggaagatccagtgg

SEQ ID NO: 598498 - DNA, 75 bp, synthetic construct
  source 1..75: mol_type = other DNA
tgctgccagcgttgcagcaccagctcgatttcccgcgtaagaaatccggtccgccgcgtattttgatcctcaccc

SEQ ID NO: 598499 - DNA, 75 bp, synthetic construct
  source 1..75: mol_type = other DNA
gctatccgcagatcgtcatgaggttattcggtttggtctggagcaagtactgacacaaagtagctggcagccacc

SEQ ID NO: 598500 - DNA, 75 bp, synthetic construct
  source 1..75: mol_type = other DNA
atgaacaaaactgcgattgcgctgctggccctgcttgccagtagcaccagcctggcagcaacgccgtggcaaaaa

SEQ ID NO: 598501 - DNA, 75 bp, synthetic construct
  source 1..75: mol_type = other DNA
gctgcgcgaagcaggcatcaacaactgctatctcgaaggtgagatggtacaaggcaagcgtaacgaagcgattaa

SEQ ID NO: 598502 - DNA, 75 bp, synthetic construct
  source 1..75: mol_type = other DNA
tgaagagccgattaaagctcgtgtaattgatgagttacggccaaaaactcgcgcgccaagcgagaagcagagcgg

SEQ ID NO: 598503 - DNA, 75 bp, synthetic construct
  source 1..75: mol_type = other DNA
ggaagcaaagtctgttgcgtgagctctactttgccaccgaaaagcagctacgacgcggaatgcaaaacacgccgg

SEQ ID NO: 598504 - DNA, 75 bp, synthetic construct
  source 1..75: mol_type = other DNA
gccgagttagatcgacgcaacttaagcgttcacgacgcacaaatttttaccacccgcgacggtatggcgatggat

SEQ ID NO: 598505 - DNA, 75 bp, synthetic construct
  source 1..75: mol_type = other DNA
tggtcgcatatcgtcgggcagatgcagtttgatctgttccacgcctacacggtggatgaacatactatccgcgtg

SEQ ID NO: 598506 - DNA, 75 bp, synthetic construct
  source 1..75: mol_type = other DNA
agatatcaaaagcagccccggcggcttgcgtgatatccacaccctgcaatgggtcgcccgccgacatttcggtgc

SEQ ID NO: 598507 - DNA, 75 bp, synthetic construct
  source 1..75: mol_type = other DNA
accttcattgttcttgagccggatggcagcccgctgtccaccgatcgccatgacgttattcgttatggacttgag

SEQ ID NO: 598508 - DNA, 75 bp, synthetic construct
  source 1..75: mol_type = other DNA
atcctgcgaatgttctacaccatggtgcgcaatagtgcgatcaccggtatttactccactacactgcgccagtta

SEQ ID NO: 598509 - DNA, 75 bp, synthetic construct
  source 1..75: mol_type = other DNA
gggtgatgacagcggtaacgcaatcaacggtattaagacgcgtaccaataactctatcgcttccagccatattct

SEQ ID NO: 598510 - DNA, 75 bp, synthetic construct
  source 1..75: mol_type = other DNA
cggaccgcagatccgcaacgatacctaccttgagtacgaagcattcgctaaaaaagactggttcgacttctatgg

SEQ ID NO: 598511 - DNA, 75 bp, synthetic construct
  source 1..75: mol_type = other DNA
cacaaaggcggagttatcccgcgtggagatagtcgagctgctcagtcaggtgtcggaaaaatttcacaatatcgg

SEQ ID NO: 598512 - DNA, 75 bp, synthetic construct
  source 1..75: mol_type = other DNA
tgttactgaaaaaattggtttctctgtaaagttaacccgttgtggcagtgatgtcagtaatgccaatgtcacgtt

SEQ ID NO: 598513 - DNA, 75 bp, synthetic construct
  source 1..75: mol_type = other DNA
gcggtaaatacgcattactgctgcaacaggccagaaccgaagcacaggccgatgcagcgacgcgcttttcttctc

SEQ ID NO: 598514 - DNA, 75 bp, synthetic construct
  source 1..75: mol_type = other DNA
acgacggtggtcagtggaacgacgatgcagagctgaacttcggtaacggcaacttcaacgttcgctctaccggtt

SEQ ID NO: 598515 - DNA, 75 bp, synthetic construct
  source 1..75: mol_type = other DNA
ccctgtttgtgctggtctgtggctgcaacatggcgggtaaaaccttacgtcagcacagcctgaaccgcctgtggc

SEQ ID NO: 598516 - DNA, 75 bp, synthetic construct
  source 1..75: mol_type = other DNA
acgtctgcaggccgggcgttggtttgcgccagcgtatgcctttcatctgccgtgtattggttttttggccggtat

SEQ ID NO: 598517 - DNA, 75 bp, synthetic construct
  source 1..75: mol_type = other DNA
actggatagcaggcggaataaaggtattttcagacagccgtctggctgttgatcagaaaaccacgacaaagcttc

SEQ ID NO: 598518 - DNA, 75 bp, synthetic construct
  source 1..75: mol_type = other DNA
ctgcgaactctgcgaatatcgcaagccaacaggagcaggacgctgctaacgcatcagccagtgctctcccgattt

SEQ ID NO: 598519 - DNA, 75 bp, synthetic construct
  source 1..75: mol_type = other DNA
ctctatggaagtaccatctccgcaggcgggtatcgttaaagagatcaaagtctctgttggcgataaaactcagac

SEQ ID NO: 598520 - DNA, 75 bp, synthetic construct
  source 1..75: mol_type = other DNA
ggactcactgcggccagccctgtttgctgtctggctgttgctggtcgccctgcttaatgcccgtcacggtgatgt

SEQ ID NO: 598521 - DNA, 75 bp, synthetic construct
  source 1..75: mol_type = other DNA
tcgactgcgacggtacgctggtcgacagtgaagtcatttgctctcgcgcatatgtaacgatgtttcaggaatttg

SEQ ID NO: 598522 - DNA, 75 bp, synthetic construct
  source 1..75: mol_type = other DNA
ccgtcagttacgtgatgaggtggagaaaaaccgtaaacgtgcagatgcaggtattgcaggagcaatggcgatgac

SEQ ID NO: 598523 - DNA, 75 bp, synthetic construct
  source 1..75: mol_type = other DNA
gtgaggtcagtgccgacagaacggtgaaagatgagctttcgccggaagagcaggcatggaaattaaagggcgata

SEQ ID NO: 598524 - DNA, 75 bp, synthetic construct
  source 1..75: mol_type = other DNA
actggaaaaacggtgccatgcgggcgtttcagaattttacagagagtgcggataacgcggcaggtaccgctgagc

SEQ ID NO: 598525 - DNA, 75 bp, synthetic construct
  source 1..75: mol_type = other DNA
ttatgattacgcgaatgagacagcttattttgtaaacacaaaaaccaatcaaattctgtttagtgcagatggcga

SEQ ID NO: 598526 - DNA, 75 bp, synthetic construct
  source 1..75: mol_type = other DNA
cggctggtaatttattttttgcggagaacgccagccgtgttggttatcggaagcgttctccgtcatccttctgtc

SEQ ID NO: 598527 - DNA, 75 bp, synthetic construct
  source 1..75: mol_type = other DNA
actgaaaattctgctgtacgtttgaatgcttcatgggatacccagaacggttcaggtgttgctgcgggtatgtct

SEQ ID NO: 598528 - DNA, 75 bp, synthetic construct
  source 1..75: mol_type = other DNA
tcagcgataccataaatcagtttaagcggctgaaggatgatcctgtaaatgccgcgaaggctctggacaatgagc

SEQ ID NO: 598529 - DNA, 75 bp, synthetic construct
  source 1..75: mol_type = other DNA
atttgcaggatgcaaaagagcaggcagagcggaattatcaggagcaacagaaacgccgtaatgctgaaaatgctg

SEQ ID NO: 598530 - DNA, 75 bp, synthetic construct
  source 1..75: mol_type = other DNA
ctaaagggtgtttgataaatctatttggaattgcaaactcaactcaatatcattacctccagaataataaggttg

SEQ ID NO: 598531 - DNA, 75 bp, synthetic construct
  source 1..75: mol_type = other DNA
ctgtcaaagggattggtagtgcactggggatgggttctgttctcggcagcctttcccttaatgctgatggtggtg

SEQ ID NO: 598532 - DNA, 75 bp, synthetic construct
  source 1..75: mol_type = other DNA
agacagtcagcaggcattgccactgaaaagatgacagaagcgcataaacagcttctggctctgcagcagcgcatc

SEQ ID NO: 598533 - DNA, 75 bp, synthetic construct
  source 1..75: mol_type = other DNA
tgcagtacagtcagcaacaggcacaggtggaaggacagattgctgctgcaagacagtcagcaggcattgccactg

SEQ ID NO: 598534 - DNA, 75 bp, synthetic construct
  source 1..75: mol_type = other DNA
ttaagacgaattttcctgatgctgatttttggattgttcgtcgaggctctttaaaaaccgttggcgaaccttcct

SEQ ID NO: 598535 - DNA, 75 bp, synthetic construct
  source 1..75: mol_type = other DNA
gtgatggaccgcaacttcaagccgggcttccgtattgatctgcatattaaggatctggcaaatgcgctggatact

SEQ ID NO: 598536 - DNA, 75 bp, synthetic construct
  source 1..75: mol_type = other DNA
gtgggtctggtcgcctcgattccagcactgtgtggttttgcgggcgcgtgctgggaggtgtcttctcggattatc

SEQ ID NO: 598537 - DNA, 75 bp, synthetic construct
  source 1..75: mol_type = other DNA
ccgctgaatacgcaaaatattgatagtctggcggcggaaggtattcgctttaattccgcctacacctgttcaccg

SEQ ID NO: 598538 - DNA, 75 bp, synthetic construct
  source 1..75: mol_type = other DNA
agcatgctcatcaggaatcgccacacaaaaaccatccgggaactcgcgaatgagctggggcgctcgccatccacg

SEQ ID NO: 598539 - DNA, 75 bp, synthetic construct
  source 1..75: mol_type = other DNA
taaaggctttgagctattttattttttcacacgtggtttaattggtatttccattctttcttggctagcatatat

SEQ ID NO: 598540 - DNA, 75 bp, synthetic construct
  source 1..75: mol_type = other DNA
ctcggaagcgccatcattcccggcgaacgcccgtattgtcgccgcctggttcccgacgaaagaacgtggtactgc

SEQ ID NO: 598541 - DNA, 75 bp, synthetic construct
  source 1..75: mol_type = other DNA
gcgccattgagctttatttcaaatatggtaagaagctggctcccgtcgtacgcgaactgggatatccttcgaaaa

SEQ ID NO: 598542 - DNA, 75 bp, synthetic construct
  source 1..75: mol_type = other DNA
aagatcgctgatgccctgagacaaacatatcccctgacagaattactgcatgttctgggccttgcccgtagcagt

SEQ ID NO: 598543 - DNA, 75 bp, synthetic construct
  source 1..75: mol_type = other DNA
ccgagcaggcgctgacggagagcctgaaccgacaactgaatgagaatcgccgttactggcaacagcttgaagttg

SEQ ID NO: 598544 - DNA, 75 bp, synthetic construct
  source 1..75: mol_type = other DNA
ctggttcgatggggcgaactatcttagtgaactgacggaaaaagagattagcctgtggcgcaatggcctaaacag

SEQ ID NO: 598545 - DNA, 75 bp, synthetic construct
  source 1..75: mol_type = other DNA
ccagtggtacgcgactatgacaccggtttaccgacacaaggggtgaaggtggaagagaaaaaacagaagttctga

SEQ ID NO: 598546 - DNA, 75 bp, synthetic construct
  source 1..75: mol_type = other DNA
tggcatctcgatggacatgactatttcggcactggcgagtgtccgccggagtgggacgctgattactggttcgat

SEQ ID NO: 598547 - DNA, 75 bp, synthetic construct
  source 1..75: mol_type = other DNA
actccaccacagaaccagatacagcgatcacctggtggagctggtaactgaactgcgtgatgagaaggggatgac

SEQ ID NO: 598548 - DNA, 75 bp, synthetic construct
  source 1..75: mol_type = other DNA
ttcggggaaaacagaactccttttacataaattaaaagaggtttatttaaggaacccagatgctaaaattgcatt

SEQ ID NO: 598549 - DNA, 75 bp, synthetic construct
  source 1..75: mol_type = other DNA
cgacattaatgctgtttttatctctgaacgttaaggtagtagtcatcattaaccatattgccagtggcaacagag

SEQ ID NO: 598550 - DNA, 75 bp, synthetic construct
  source 1..75: mol_type = other DNA
ggtaccggtgcatcacagaagaatgtggaattcccttgacgcaggcatttattgcatcccgtctggcagtccttg

SEQ ID NO: 598551 - DNA, 75 bp, synthetic construct
  source 1..75: mol_type = other DNA
agtatgggaaccacgcgctacggggagcctttcgcttgttaacattcgtgtttcggacgttaaaagcatcgagct

SEQ ID NO: 598552 - DNA, 75 bp, synthetic construct
  source 1..75: mol_type = other DNA
tagaaaagataagagcaattgaatatacgaccgagcaggcaagaattttatttaatggaaggccacaggaaagcg

SEQ ID NO: 598553 - DNA, 75 bp, synthetic construct
  source 1..75: mol_type = other DNA
agttttttgattttatgcgagttgaaaaacaaattgaatgggggacgaaacttttttgttttaactcttgggggt

SEQ ID NO: 598554 - DNA, 75 bp, synthetic construct
  source 1..75: mol_type = other DNA
gctgctggatgtaaaacagcaggagcttcagaaacagacggcactcaacgatctgaagaaaaaaacaattcagct

SEQ ID NO: 598555 - DNA, 75 bp, synthetic construct
  source 1..75: mol_type = other DNA
tactccggcaaatcactggaagaatacaaagccgaacacccgtcgatcctgctgttgacatgggaagaagttgaa

SEQ ID NO: 598556 - DNA, 75 bp, synthetic construct
  source 1..75: mol_type = other DNA
ccgtcataaccctcttgaagctgaaacaatagcagcatggctggtggcacataaggatgatatagagcgccatta

SEQ ID NO: 598557 - DNA, 75 bp, synthetic construct
  source 1..75: mol_type = other DNA
cgtttgcaaaaggcgggggggtgatgggggaagcgggacctgaagccattctgccgctgcgtcgtggtgctgacg

SEQ ID NO: 598558 - DNA, 75 bp, synthetic construct
  source 1..75: mol_type = other DNA
acatcggcattcagcgatatgggaaacgggctggcaacctttgtcacgactggcagactcagtttcaaatccttc

SEQ ID NO: 598559 - DNA, 75 bp, synthetic construct
  source 1..75: mol_type = other DNA
gcgtgaggagcaggcgcaggccagggcgctggcggaggcgcaggataaagcggctgctgcgttttatcgtcagat

SEQ ID NO: 598560 - DNA, 75 bp, synthetic construct
  source 1..75: mol_type = other DNA
cgcagaacgtgcagcagctccagaagctgcgcgatctggtagccacacaaatcaccctgcaaggcaactacatgg

SEQ ID NO: 598561 - DNA, 75 bp, synthetic construct
  source 1..75: mol_type = other DNA
gcggcggcacccgataaaccgttataccagggatttatcaacggtcatgaaccgtgcgggcaaattgtggcgatg

SEQ ID NO: 598562 - DNA, 75 bp, synthetic construct
  source 1..75: mol_type = other DNA
aaattattgcagaaccaccggataagcgccgccgtgacctggacaatattctgaaagcgccgctggatgcgctga

SEQ ID NO: 598563 - DNA, 75 bp, synthetic construct
  source 1..75: mol_type = other DNA
aaattattgcagagccaccggataagcgccgtcgtgacctggacaatatcctgaaagcaccactggatgcgctga

SEQ ID NO: 598564 - DNA, 75 bp, synthetic construct
  source 1..75: mol_type = other DNA
tgaccattcccggattgtcatgtttcctggattcgaggaccaacaaggtgtactggaggtataagcaccctgtaa

SEQ ID NO: 598565 - DNA, 75 bp, synthetic construct
  source 1..75: mol_type = other DNA
caccctagatgatgtggtgtcatcctgccgcgattgcgttcttagtccgtggctattgcaccaccatcacgcgaa

SEQ ID NO: 598566 - DNA, 75 bp, synthetic construct
  source 1..75: mol_type = other DNA
agaacagggaattgataccaaaattttgctgggccattcgaatcaaaaaatgaccgatatttacaacgacgcacg

SEQ ID NO: 598567 - DNA, 75 bp, synthetic construct
  source 1..75: mol_type = other DNA
cgggactgcttatcgacgatgagcagtttgatgaagttaatattatgcgcggtcaggttattcccggtggtcggc

SEQ ID NO: 598568 - DNA, 75 bp, synthetic construct
  source 1..75: mol_type = other DNA
gtgcgcggtcagcttgttcctggtggccggttgggtgtgaagatttacgaaattacaggtgataacgatggcgcg

SEQ ID NO: 598569 - DNA, 75 bp, synthetic construct
  source 1..75: mol_type = other DNA
gtttgatgaaatcaatattgtacgtggtcggccagtatctggtggacgactggagataaaaattacagaggtggg

SEQ ID NO: 598570 - DNA, 75 bp, synthetic construct
  source 1..75: mol_type = other DNA
gcgccgctggatgcgctgatgcatgcggggttgctaatggacgatgagcagtttgatgaaatcaatattgtacgt

SEQ ID NO: 598571 - DNA, 75 bp, synthetic construct
  source 1..75: mol_type = other DNA
tccggaaggctggcgataaaggttatcacagagccgccggataagcgccgtcgtgatctggacaatatcctgaaa

SEQ ID NO: 598572 - DNA, 75 bp, synthetic construct
  source 1..75: mol_type = other DNA
accctccgacggtgaatacctactggcgtcgtcgtggcagcacatattttgtatcaaaagcaggggagcgttatc

SEQ ID NO: 598573 - DNA, 75 bp, synthetic construct
  source 1..75: mol_type = other DNA
gcaaggtatcgacacacaaattttgttgggccatagcagtaaagtaatgactgatcactacaacgacacgcgtgg

SEQ ID NO: 598574 - DNA, 75 bp, synthetic construct
  source 1..75: mol_type = other DNA
cctacgagatgccgtggcggcccaactatgaaaaaaatgctgtagcaggctggcttgccgcctccggcgcggctt

SEQ ID NO: 598575 - DNA, 75 bp, synthetic construct
  source 1..75: mol_type = other DNA
tgattgatgttttccgggaggcccagcaaacgggcgatgtcccgccaggctttaaccctgctgaatcggcaaaaa

SEQ ID NO: 598576 - DNA, 75 bp, synthetic construct
  source 1..75: mol_type = other DNA
aaaaattcaacaggaaagatatgagaacggagaaatcaagctcagcacgctgaaacaaaaagcggctcctctcag

SEQ ID NO: 598577 - DNA, 75 bp, synthetic construct
  source 1..75: mol_type = other DNA
gacttcgaacgtctgatggaaggcgctaagctgctgaaatgttcagagtttggtgatgcgatcatcaagaatatg

SEQ ID NO: 598578 - DNA, 75 bp, synthetic construct
  source 1..75: mol_type = other DNA
tggattgcagcttcttgtgctgctttggccgtagagcaagtcagcactatgccttcggaacccttctattggatg

SEQ ID NO: 598579 - DNA, 75 bp, synthetic construct
  source 1..75: mol_type = other DNA
ctccgccgattccttgaaggtggcgctgctggcttggtcatcaaggccgttcaggcttactcagagcgagttatg

SEQ ID NO: 598580 - DNA, 75 bp, synthetic construct
  source 1..75: mol_type = other DNA
gtaaccgatgcctgcattagttgggaaatgaccgatgccttgctgcgtgaaattcatcaggatctgaacgggcag

SEQ ID NO: 598581 - DNA, 75 bp, synthetic construct
  source 1..75: mol_type = other DNA
gtaaccgatgcctgcattagctgggaaatgaccgatgccttactgcgtgagatccatcaggatctgaacgggcag

SEQ ID NO: 598582 - DNA, 75 bp, synthetic construct
  source 1..75: mol_type = other DNA
tacacattaccgacgaacaggttctgatgaccccggaacagttgaaggcagcttttccattaagccagcatcaag

SEQ ID NO: 598583 - DNA, 75 bp, synthetic construct
  source 1..75: mol_type = other DNA
acgactgacctttgatgagtggatgatgatttataatgcagcggaaaaggatggttactttttacagcgtggtat

SEQ ID NO: 598584 - DNA, 75 bp, synthetic construct
  source 1..75: mol_type = other DNA
gctcagtctgcaggagaaaattattagtgataccggcggcgcatcaaccgtttccatttttctgaataattacag

SEQ ID NO: 598585 - DNA, 75 bp, synthetic construct
  source 1..75: mol_type = other DNA
cctgcgcggtggtaaagcgccaaactatagccctgcggatgttgcgcaatgtgaaaaagagatggaacaggcggg

SEQ ID NO: 598586 - DNA, 75 bp, synthetic construct
  source 1..75: mol_type = other DNA
gcgtcgtcgtgacctggacaatattctgaaagcaccactggatgcgctgacgcacgcggggttgttaatggacga

SEQ ID NO: 598587 - DNA, 75 bp, synthetic construct
  source 1..75: mol_type = other DNA
aatattgtacgtggccagccagtatctggtggacggctggagataagaattacagaggtgggtgtgcatgaataa

SEQ ID NO: 598588 - DNA, 75 bp, synthetic construct
  source 1..75: mol_type = other DNA
ctgaaggcaccactggatgcactgacgcatgctgggctgctcatagacgacgagctgaaccgccccggaaatcct

SEQ ID NO: 598589 - DNA, 75 bp, synthetic construct
  source 1..75: mol_type = other DNA
gtttgatgaaattaatattgtgcgcggtcagctcgttcctggtggtcggctgggcgtgaagatttacgaaattac

SEQ ID NO: 598590 - DNA, 75 bp, synthetic construct
  source 1..75: mol_type = other DNA
acccgccgacggtgaacacttactggcgacgtcgtggcagcacatattttatatctgaagccggtaagcgttatc

SEQ ID NO: 598591 - DNA, 75 bp, synthetic construct
  source 1..75: mol_type = other DNA
ggttccatcgaccgtttaatttaaacgaatggctgctgtatagcgtggagagcacgtcagcgtccagtgcccgcg

SEQ ID NO: 598592 - DNA, 75 bp, synthetic construct
  source 1..75: mol_type = other DNA
ggccttgtatgctgcaaaagagaccgtccctgaagagcggctggtacattcgtttcacagctactttcttcgccc

SEQ ID NO: 598593 - DNA, 75 bp, synthetic construct
  source 1..75: mol_type = other DNA
ccggcgttatataacggcgaagcggatgcggaaactcaggccatcgcacaagcgttgctggagaaatacggtcag

SEQ ID NO: 598594 - DNA, 75 bp, synthetic construct
  source 1..75: mol_type = other DNA
gggattagcgcctggcgcggggcaacgcgccttaacgacacctctattggcattgagctggaaaaccgtggctgg

SEQ ID NO: 598595 - DNA, 75 bp, synthetic construct
  source 1..75: mol_type = other DNA
tgcctggccggatgcatcgcgcgttagcttttatctggccgggcgcgcgccccacacgccggtagaaaccgcatc

SEQ ID NO: 598596 - DNA, 75 bp, synthetic construct
  source 1..75: mol_type = other DNA
gcaccactggatgcactgacacatgcggggttgcttatcgacgacgagcagtttgatgaaatcaatattgtgcgc

SEQ ID NO: 598597 - DNA, 75 bp, synthetic construct
  source 1..75: mol_type = other DNA
gcaccgcagcgcaaagacgatccggggccattatttccctggcagcaactggcgcagcaggggattggtgcctga

SEQ ID NO: 598598 - DNA, 75 bp, synthetic construct
  source 1..75: mol_type = other DNA
ccgacgttatataacggcgaagcggatgcagaaactctggcaattgcacaagcgttgctggagaaatacggtcag

SEQ ID NO: 598599 - DNA, 75 bp, synthetic construct
  source 1..75: mol_type = other DNA
aacctgagtcaggacgcggtaaatatggttcgcggttatatcagcgataattttggtaagaaatatctgccggaa

SEQ ID NO: 598600 - DNA, 75 bp, synthetic construct
  source 1..75: mol_type = other DNA
tccggaaggttggcaataaaaattattgcagaaccaccggataagcgccgccgtgatctggacaatattctgaaa

SEQ ID NO: 598601 - DNA, 75 bp, synthetic construct
  source 1..75: mol_type = other DNA
acccgccgacggtgaacacctactggcgacgtcgtggcagcacatattttgtgtcaaaagccggtgagcgttatc

SEQ ID NO: 598602 - DNA, 75 bp, synthetic construct
  source 1..75: mol_type = other DNA
aacctgtccggaaggctggtgataaagattattgcagagccaccggataaacgtcgtcgtgacctggacaatatc

SEQ ID NO: 598603 - DNA, 75 bp, synthetic construct
  source 1..75: mol_type = other DNA
tcctcggtaatgcaaagtcgccagcggatgtatctggttccgcccgttttttcgcaactgactgaacagcatcag

SEQ ID NO: 598604 - DNA, 75 bp, synthetic construct
  source 1..75: mol_type = other DNA
gaaccgggcatgaagttgcccgctgaacgccaactggcgatgcagctcggcgtgtcgcgcaattccctgcgcgag

SEQ ID NO: 598605 - DNA, 75 bp, synthetic construct
  source 1..75: mol_type = other DNA
cagacgaggttgccgatcgtgtgcgggcgctgattgatgaaaaaaacctggaagcgggcatgaagttgcccgctg

SEQ ID NO: 598606 - DNA, 75 bp, synthetic construct
  source 1..75: mol_type = other DNA
tggcgttgcaggtgactcatcagaacgacaaaccgttccgcccggtcaacaaagaacaaactcaggctgcggtaa

SEQ ID NO: 598607 - DNA, 75 bp, synthetic construct
  source 1..75: mol_type = other DNA
caacaagtatctgggtagtgactacgtggtgaaatccagtgtcggtcacatccgcgatttgccgaccagtggctc

SEQ ID NO: 598608 - DNA, 75 bp, synthetic construct
  source 1..75: mol_type = other DNA
attaaaggttatgacggcccgatcgttgagtgtgaaaaatgtggttctgaaatgcatctgaaaatggggcgtttc

SEQ ID NO: 598609 - DNA, 75 bp, synthetic construct
  source 1..75: mol_type = other DNA
atgcgccatgagtttattttaccttatccgccgacggtgaatacttactggcgacgtcatggcaatacgtatttc

SEQ ID NO: 598610 - DNA, 75 bp, synthetic construct
  source 1..75: mol_type = other DNA
ttggcggtgcagctgcgttactggcgcaagaatatgtcaaaagtctgcgttgcctggaatacccggagctgggta

SEQ ID NO: 598611 - DNA, 75 bp, synthetic construct
  source 1..75: mol_type = other DNA
tggaagccgtgtggatgatggaagttgaaaatctgcccgcattcattctggtggatgataaaggcaataatttct

SEQ ID NO: 598612 - DNA, 75 bp, synthetic construct
  source 1..75: mol_type = other DNA
gtcaccgtgatccacggctgttgtttgaaacactactaacattagccatcacgctgacgttaagctggctctcga

SEQ ID NO: 598613 - DNA, 75 bp, synthetic construct
  source 1..75: mol_type = other DNA
ggttatcctgctggtatcagacgacgatccgcttagagcatttctaatctgggtactttccgaatcaatcggcgc

SEQ ID NO: 598614 - DNA, 75 bp, synthetic construct
  source 1..75: mol_type = other DNA
ctttatatgggaaggacgtgtacatcgggtaggtgccagtgccgggattaccttgattgatgacaacaatcatca

SEQ ID NO: 598615 - DNA, 75 bp, synthetic construct
  source 1..75: mol_type = other DNA
catagcgaacaggcgatgatgtcactcgatgaacagtggcggatgatcaaagagaatcaactgatgatgatcgcc

SEQ ID NO: 598616 - DNA, 75 bp, synthetic construct
  source 1..75: mol_type = other DNA
tgccgtctcgctggtacgccacaccgatggcacgccgctctactttattgcgcagattgaagacataaacgatct

SEQ ID NO: 598617 - DNA, 75 bp, synthetic construct
  source 1..75: mol_type = other DNA
agcgccgtgcgcctgccacggatggaagcctttttgatcttcctcaccacagtgatgatggtgtcgctgatgatg

SEQ ID NO: 598618 - DNA, 75 bp, synthetic construct
  source 1..75: mol_type = other DNA
cactgctcattgtactcatgttactggcgctcatggctgctctggctgcagacatgacgatcagttttcacggcc

SEQ ID NO: 598619 - DNA, 75 bp, synthetic construct
  source 1..75: mol_type = other DNA
tatattgatgtcgatgactcaccacgctttcacggcgcagaagatagcttttaccaaagccagacgccgccccgg

SEQ ID NO: 598620 - DNA, 75 bp, synthetic construct
  source 1..75: mol_type = other DNA
tcaataacatcacggatgctgacgctcgggtcttattacaaaaaaggcccagggaaggctggctaaccacggatg

SEQ ID NO: 598621 - DNA, 75 bp, synthetic construct
  source 1..75: mol_type = other DNA
atattgcatgaatttttccagcaaacggcaaaatcggctgccgataaaggattaagcatcgccctccccttttcc

SEQ ID NO: 598622 - DNA, 75 bp, synthetic construct
  source 1..75: mol_type = other DNA
acctgaaagcacagaaaaacgcacaggaacggatcatcaaaaaaggcaaggctttattaaattctttcctgaaaa

SEQ ID NO: 598623 - DNA, 75 bp, synthetic construct
  source 1..75: mol_type = other DNA
ccgctgtcggtattttgcgccgatcccttcccccataaactgattcgtctctgttttgccaagaaggaatcgacg

SEQ ID NO: 598624 - DNA, 75 bp, synthetic construct
  source 1..75: mol_type = other DNA
cagcaaaagcggttgccagtaaaggcttaagcatcgccctccccctttccgttgccgggttaagcagcgccccgc

SEQ ID NO: 598625 - DNA, 75 bp, synthetic construct
  source 1..75: mol_type = other DNA
ggggtgaaaaccgtgggctgcggctcaacgggaaacgtgcccgaccgccaccacacccaacaggaggttgccggt

SEQ ID NO: 598626 - DNA, 75 bp, synthetic construct
  source 1..75: mol_type = other DNA
gacttcgtgaacagcggcggcgaacgctcacagggactggttaaccgtcgtactgattttcgggcatggtgctta

SEQ ID NO: 598627 - DNA, 75 bp, synthetic construct
  source 1..75: mol_type = other DNA
tcaatctgggctgttccggcctgatgtggtttaaggaccgcaacggaaagcgccagcgcaccaccatctggaaac

SEQ ID NO: 598628 - DNA, 75 bp, synthetic construct
  source 1..75: mol_type = other DNA
aggttgtttgccataaagataacgtgattctgaagcttggcagtctggatctggtcgatggtacgccggtggtag

SEQ ID NO: 598629 - DNA, 75 bp, synthetic construct
  source 1..75: mol_type = other DNA
agcacgcacaggcgcaccgctgggtggcgatgtgcgggagactgaccgattttgtcaacagtggcggacgccgct

SEQ ID NO: 598630 - DNA, 75 bp, synthetic construct
  source 1..75: mol_type = other DNA
ggagtaatgaccgtgggatgtggttcaacagggggcgtggagaaccgggtttacggagaaaaggaggtggcccgc

SEQ ID NO: 598631 - DNA, 75 bp, synthetic construct
  source 1..75: mol_type = other DNA
ccgacgggtattccacgaatttttccagcaggccgcaaaagcggttgccagtaaaggcataagcatcgccctccc

SEQ ID NO: 598632 - DNA, 75 bp, synthetic construct
  source 1..75: mol_type = other DNA
ttgtttaagccacactatctattgcgccatcgcgacccgcggttgctgtttgagacgctgttaacgttatccatc

SEQ ID NO: 598633 - DNA, 75 bp, synthetic construct
  source 1..75: mol_type = other DNA
acttagccatgctcttgaccgacgggtattccacgattttttccagcaggccgcaaaagcggttgccagtaaagg

SEQ ID NO: 598634 - DNA, 75 bp, synthetic construct
  source 1..75: mol_type = other DNA
gattgttatttaaaccacactatctgctgcgccatcgcaacccacggttgctttttgagtcgctgctcacgttag

SEQ ID NO: 598635 - DNA, 75 bp, synthetic construct
  source 1..75: mol_type = other DNA
cgacgtgcattacagtattacgccgttaagtactctggacggcagcaatataggctcggttctggtgattcagga

SEQ ID NO: 598636 - DNA, 75 bp, synthetic construct
  source 1..75: mol_type = other DNA
tatcaaaccaaactggcaggtgtggtacgactgcgtgttgccggaagatcgcgaacacgccgaaaaagtgattcg

SEQ ID NO: 598637 - DNA, 75 bp, synthetic construct
  source 1..75: mol_type = other DNA
gttacgccattgccgattgagtatgactattatcttgatcctaactttatgtataccgaaccctctcggggctta

SEQ ID NO: 598638 - DNA, 75 bp, synthetic construct
  source 1..75: mol_type = other DNA
gaacggctggctgacgaaggaggagcgtaaggtcggtgggcgtaatgaaagcaatatctaccgccttaatgtgga

SEQ ID NO: 598639 - DNA, 75 bp, synthetic construct
  source 1..75: mol_type = other DNA
gaaaaatgggacgaactggtcatccgcctggggcgttcgcctgtacagcgttgtgtgaatcacatttctgaaccg

SEQ ID NO: 598640 - DNA, 75 bp, synthetic construct
  source 1..75: mol_type = other DNA
cttgacagcaaaccgtctgtgctggcactgaacattcagcgcggcgacagcaccatctacctgttaatgcagtaa

SEQ ID NO: 598641 - DNA, 75 bp, synthetic construct
  source 1..75: mol_type = other DNA
atgaccctttatgaaatattaaaaactcaatttaaaaccaatgccgctattggccgcaggttcccaaagaaagga

SEQ ID NO: 598642 - DNA, 75 bp, synthetic construct
  source 1..75: mol_type = other DNA
gcgggttgtaaacttgtacgaacaggctgccagtgatgatggtgagattacgcgaccgaaagagcccaactggac

SEQ ID NO: 598643 - DNA, 75 bp, synthetic construct
  source 1..75: mol_type = other DNA
ttattaccgtctccgacgtggaatcgacaagataaccgcgcaggttaactacatgcaggaatacatcaggacgca

SEQ ID NO: 598644 - DNA, 75 bp, synthetic construct
  source 1..75: mol_type = other DNA
ggatgcgcatacctggaatgtaccgaagcgacagtggggtacccgtgaggatgtcgcctgtgcgcagtggatttg

SEQ ID NO: 598645 - DNA, 75 bp, synthetic construct
  source 1..75: mol_type = other DNA
aatcaacgccaagactgtaacctatgacttcgaacgtctgatggaaggcgctaaactgctgaaatgttcagaatt

SEQ ID NO: 598646 - DNA, 75 bp, synthetic construct
  source 1..75: mol_type = other DNA
tatggaaggcgcaatcaacgccaagaccgtaacctatgacttcgaacgtctgatggagggcgctaaactgctgaa

SEQ ID NO: 598647 - DNA, 75 bp, synthetic construct
  source 1..75: mol_type = other DNA
aatcggcaacccgttcggtctgggcgagacggtaacttccggtatcgtctctgcactgggacgtagcggcctgaa

SEQ ID NO: 598648 - DNA, 75 bp, synthetic construct
  source 1..75: mol_type = other DNA
tgaacgtattcgcagacttgcaccgacaggggtcgctccaccgtaccggacggtggaggagtggcgggaatggca

SEQ ID NO: 598649 - DNA, 75 bp, synthetic construct
  source 1..75: mol_type = other DNA
ttattaccgtctccgaggtggaatcgacaagataaccgcgcaggttaactacgtgcaggagtacatcaggacgca

SEQ ID NO: 598650 - DNA, 75 bp, synthetic construct
  source 1..75: mol_type = other DNA
tgtcttttcatctggaagcgattctcggggaggtggggattaaggatgtacgggcgttacgtatacttggggcaa

SEQ ID NO: 598651 - DNA, 75 bp, synthetic construct
  source 1..75: mol_type = other DNA
gaaactggcgcagggcgatgagctggataacagcccaaccggcacgctggtgcgctacgccgctgacggcatctg

SEQ ID NO: 598652 - DNA, 75 bp, synthetic construct
  source 1..75: mol_type = other DNA
cgtcaccgttacaaccacatcatacctgttttcgcttttatcttctgtcttcagaggtatcacactatgaaaatc

SEQ ID NO: 598653 - DNA, 75 bp, synthetic construct
  source 1..75: mol_type = other DNA
atgattatttcaattaaaaacaactgggaaaaagcaataaaattacatacacattatttaaataatttgatatgc

SEQ ID NO: 598654 - DNA, 75 bp, synthetic construct
  source 1..75: mol_type = other DNA
atcatcgatcaatggattgacgaggggctgttgccgcccctgatccatacttttcttccttatcgtgatgatgcc

SEQ ID NO: 598655 - DNA, 75 bp, synthetic construct
  source 1..75: mol_type = other DNA
tctgtatggtctggcaggttttggttatatcatcgtcgccacttatctgccgctgatggcgaaagatgcaggctc

SEQ ID NO: 598656 - DNA, 75 bp, synthetic construct
  source 1..75: mol_type = other DNA
gtgccggagcactttctgccattatattgcttgctctggcgctgctcatcccgtcgaataaacacattatcgcgc

SEQ ID NO: 598657 - DNA, 75 bp, synthetic construct
  source 1..75: mol_type = other DNA
gctcctgaccggtatcagtctgccagagcgcttgtgctgaaaatttatcaccagcacaaaggccgctatggttac

SEQ ID NO: 598658 - DNA, 75 bp, synthetic construct
  source 1..75: mol_type = other DNA
tggaagcgattctcggggaggtggggattaaggatgtacgggcgttacgtatacttggggcaaaaatgtgttggt

SEQ ID NO: 598659 - DNA, 75 bp, synthetic construct
  source 1..75: mol_type = other DNA
gcgcaatacccgggaaagactgaaagatttgcccaatatgtcttttcatctggaagcgattctcggggaggtggg

SEQ ID NO: 598660 - DNA, 75 bp, synthetic construct
  source 1..75: mol_type = other DNA
agtatattaagatttgacaaaagagaatataaaaaatatttgctcggtaaattatatttagatatatataataaa

SEQ ID NO: 598661 - DNA, 75 bp, synthetic construct
  source 1..75: mol_type = other DNA
aaaatgaagagttcattacttaccgggcattacttctgagtattgactttgttaaaaaactggtcacagaaatgt

SEQ ID NO: 598662 - DNA, 75 bp, synthetic construct
  source 1..75: mol_type = other DNA
tctcctgaaacgcaattttgatgcaaaacgccccaacgagaagtgggttacagatgtcactgaatttaaagtgaa

SEQ ID NO: 598663 - DNA, 75 bp, synthetic construct
  source 1..75: mol_type = other DNA
aaagcggtggaactgtctggacgtcttgaggtggcttctcgtctccaacaacgtaccacggccattatgcgttat

SEQ ID NO: 598664 - DNA, 75 bp, synthetic construct
  source 1..75: mol_type = other DNA
agcgaaatattgctgatcttaaaactagagacctgctagtcccaatcaaagcggtagagttgtcggggcgacttg

SEQ ID NO: 598665 - DNA, 75 bp, synthetic construct
  source 1..75: mol_type = other DNA
gtctgtgttgatggaaattaaagagatcagcggtgaccatgaacttgtgttcattggcgaccatgatttcagaaa

SEQ ID NO: 598666 - DNA, 75 bp, synthetic construct
  source 1..75: mol_type = other DNA
gttgcagtggtgggctgattatctggatgcgaatagaatggcggctatcactccatttgactatgcaaagattaa

SEQ ID NO: 598667 - DNA, 75 bp, synthetic construct
  source 1..75: mol_type = other DNA
ccacggcttccgtacaatggcttgtagttcgttaattgagtcagggctatggtcgaaggatgcggtcgaacgtca

SEQ ID NO: 598668 - DNA, 75 bp, synthetic construct
  source 1..75: mol_type = other DNA
ccatcccgcctgagcgagaaccgattcccggtgtgaaacattctcagcgaggttcaaagatgcgcacacctcatc

SEQ ID NO: 598669 - DNA, 75 bp, synthetic construct
  source 1..75: mol_type = other DNA
ttaacccgactggcggttgaactcacattgttagttttcatccgttcaagcgagttgcgttttgctcgctggtca

SEQ ID NO: 598670 - DNA, 75 bp, synthetic construct
  source 1..75: mol_type = other DNA
acggactactgcgattatgtgctttgccgtacagagcggcttaatcgactacaaccccgcgcaagagattgccgg

SEQ ID NO: 598671 - DNA, 75 bp, synthetic construct
  source 1..75: mol_type = other DNA
gaagataatctctttgctgctatcggtaagcggaacattgcagagcttaagactcgggatcttcttgtacccatc

SEQ ID NO: 598672 - DNA, 75 bp, synthetic construct
  source 1..75: mol_type = other DNA
gttgcaagggactggcatactgcctgtaaaaggaaatggtcagattcccacagtgaaagagttctaaaaagcatg

SEQ ID NO: 598673 - DNA, 75 bp, synthetic construct
  source 1..75: mol_type = other DNA
ttgtgggcgatcacgatccgcgtaaacctatgagtgaaaacacggtgaacaaggcgctgagagtgatgggttatg

SEQ ID NO: 598674 - DNA, 75 bp, synthetic construct
  source 1..75: mol_type = other DNA
atggctctgagtgatgtgaaggttcgttcggcaaagcctgaagcaaaagcctacaaactgactgacggtgatggc

SEQ ID NO: 598675 - DNA, 75 bp, synthetic construct
  source 1..75: mol_type = other DNA
gcgagaacccattattggcgtgcgttattccggccgcggggcaaaaatgcgaatgccgcatatcgtccccctctc

SEQ ID NO: 598676 - DNA, 75 bp, synthetic construct
  source 1..75: mol_type = other DNA
tgacattgttcattcgtgagaaaataagagaagattttctgagtgctgaagttggcgtaacggggtgtaactttg

SEQ ID NO: 598677 - DNA, 75 bp, synthetic construct
  source 1..75: mol_type = other DNA
gggcattacgccgaaagccgagcgacgggcgatcaagatgttcgcctatgccaatagccatccggggctgtggaa

SEQ ID NO: 598678 - DNA, 75 bp, synthetic construct
  source 1..75: mol_type = other DNA
ccgaatctgtttgcccgtaacgaacgcgtgatctgcctgttcgataccgaatttggcccaatggcgcagattctg

SEQ ID NO: 598679 - DNA, 75 bp, synthetic construct
  source 1..75: mol_type = other DNA
agtcgttattttcagcagagacgctgaaggtggtttataacagtgccggggtcattaccggcattagcagggtgg

SEQ ID NO: 598680 - DNA, 75 bp, synthetic construct
  source 1..75: mol_type = other DNA
gaagaaaaccgcaaagctgatatctccgggcgctggaagtttgacggggaaaacgtcgttgatactctgaccgcg

SEQ ID NO: 598681 - DNA, 75 bp, synthetic construct
  source 1..75: mol_type = other DNA
atctggagagatgcggggcaacgataagcggggcaatgatggtaaatattaaaaacttcatctggtatacgccgg

SEQ ID NO: 598682 - DNA, 75 bp, synthetic construct
  source 1..75: mol_type = other DNA
gctgcagtggtgggcagattatctggatgctaatcgggagaaggtggttagtccgttttattttgctaaaaaata

SEQ ID NO: 598683 - DNA, 75 bp, synthetic construct
  source 1..75: mol_type = other DNA
ggagtgatgacgcgatagagcgacagctgagccattcagaacgtaataacgtgcgtgcagcttatattcatactt

SEQ ID NO: 598684 - DNA, 75 bp, synthetic construct
  source 1..75: mol_type = other DNA
aatggttcaatggtgggctgactatctggatgcgaataagtccaaaagcattacaccttatgaatttgcgaaaag

SEQ ID NO: 598685 - DNA, 75 bp, synthetic construct
  source 1..75: mol_type = other DNA
tcaaaaatgcgtacaacgcatctagtgcctctttcaacgcaagcccttgcaattttaaagcagataaaacagttt

SEQ ID NO: 598686 - DNA, 75 bp, synthetic construct
  source 1..75: mol_type = other DNA
ggttcgaagatgcggactccacatcttgtacccttatctcgacaagctctcaccattctggaaaaatcaaaagca

SEQ ID NO: 598687 - DNA, 75 bp, synthetic construct
  source 1..75: mol_type = other DNA
tctctgattgagtcaggattgtggtcgagggatgcggtagagcggcagatgagccatcaggagcgtagctctgta

SEQ ID NO: 598688 - DNA, 75 bp, synthetic construct
  source 1..75: mol_type = other DNA
cgagggatgcggtagagcggcagatgagccatcaggaacgtagctctgtgcgggcggcttacatccataaggcgg

SEQ ID NO: 598689 - DNA, 75 bp, synthetic construct
  source 1..75: mol_type = other DNA
aagctggcaaacctcgccccctccctgatggagaagcttgcacaggacgaactgaccgttgagcagtgtcaggcg

SEQ ID NO: 598690 - DNA, 75 bp, synthetic construct
  source 1..75: mol_type = other DNA
tggccgccgattaactgccctgcaactgctggcgcaggaagggcgtctcgctgctgaccataccgttatggtgaa

SEQ ID NO: 598691 - DNA, 75 bp, synthetic construct
  source 1..75: mol_type = other DNA
gtgcgctccatcccctattccgtggacagcgttcgcggtctggccgactccatcgagacgctcggactgctgcag

SEQ ID NO: 598692 - DNA, 75 bp, synthetic construct
  source 1..75: mol_type = other DNA
actcgacgtggagcagtgtcaggcgctgagtctggagaacgatcccgtacgtcaggtagaaatttaccagcgtgt

SEQ ID NO: 598693 - DNA, 75 bp, synthetic construct
  source 1..75: mol_type = other DNA
accgccacggtgtcgccgcaggtggtcgccgactggcagcactcaacatgctggcagagcgtggcatccttccgg

SEQ ID NO: 598694 - DNA, 75 bp, synthetic construct
  source 1..75: mol_type = other DNA
tcagggcgtcggactgctgcagaatctggtcgtgcataccctgcctggtgagcgctacggtgtcgccgcaggtgg

SEQ ID NO: 598695 - DNA, 75 bp, synthetic construct
  source 1..75: mol_type = other DNA
catccggtggcgatgatgaaagccgtacaggcggtggttcaccataacgaaacggctgatcgggcatatgaactc

SEQ ID NO: 598696 - DNA, 75 bp, synthetic construct
  source 1..75: mol_type = other DNA
ctgaccatccggtggcgatgatgaaagccgtacaggcggtggttcaccataacgaaacggcaaccggaacaggca

SEQ ID NO: 598697 - DNA, 75 bp, synthetic construct
  source 1..75: mol_type = other DNA
atgtccggtacccattgttggtaatgactccaacttattgatagtgttttatgttcagataatgcccgatgactt

SEQ ID NO: 598698 - DNA, 75 bp, synthetic construct
  source 1..75: mol_type = other DNA
atcatctagtgatgatttcccggtcagtcgttcttcagacaaccaagaactcgctcatcacactgagctcatgaa

SEQ ID NO: 598699 - DNA, 75 bp, synthetic construct
  source 1..75: mol_type = other DNA
atttcaccctcagagagcggctgatgacgatgcagaagcaactggaaggggcacaggactatatccgcactcagt

SEQ ID NO: 598700 - DNA, 75 bp, synthetic construct
  source 1..75: mol_type = other DNA
tcgccttcccgtggtttcgttggcaccatagtttgcttgttcctctcgatcatcccttgacgcaaattacaccat

SEQ ID NO: 598701 - DNA, 75 bp, synthetic construct
  source 1..75: mol_type = other DNA
aagagtggtcaggcatggctgagtctgatgcaggagaaagcccgtctggaggcgctgttaccggatggctggaag

SEQ ID NO: 598702 - DNA, 75 bp, synthetic construct
  source 1..75: mol_type = other DNA
atggcttttggtgtttaccctgaaacttcgctggctgatgcccgtcaaaaaagagaagaggctaggaggctcgtt

SEQ ID NO: 598703 - DNA, 75 bp, synthetic construct
  source 1..75: mol_type = other DNA
acagtggtgggcagattttctggatgcaaacagagaacaatgtatcagcccgtttgaatatgcaaagattaacaa

SEQ ID NO: 598704 - DNA, 75 bp, synthetic construct
  source 1..75: mol_type = other DNA
cttttgcgacgtgtgttaagtaatatagatgtgataatgagtattaagtacttggatgaagaagatgctcgtttt

SEQ ID NO: 598705 - DNA, 75 bp, synthetic construct
  source 1..75: mol_type = other DNA
agaaggtgttaagcattctcagcgtggttcgaagatgcggacacctcatcttgttcctttatcgcggcaagcctt

SEQ ID NO: 598706 - DNA, 75 bp, synthetic construct
  source 1..75: mol_type = other DNA
ggaaggcgttaagcattctcatcgtggttcgaaggtgcggacgactcatattgtgcctttgtctcgtcaggcgct

SEQ ID NO: 598707 - DNA, 75 bp, synthetic construct
  source 1..75: mol_type = other DNA
atgagtggaaaccgtgagctgatcttcgttggtgatcacgatccgcgtaagccaatgagtgagaatacgcttaac

SEQ ID NO: 598708 - DNA, 75 bp, synthetic construct
  source 1..75: mol_type = other DNA
aagcgatggatgctaagagtctgacaattaaggcattgtcagagttgtcaaaaattccatatcgctcacttcaaa

SEQ ID NO: 598709 - DNA, 75 bp, synthetic construct
  source 1..75: mol_type = other DNA
aagctggcaaatcttgccccgtccctgatggaaaagctcgcgcaggacgacctgactgttgagcagtgtcaggcg

SEQ ID NO: 598710 - DNA, 75 bp, synthetic construct
  source 1..75: mol_type = other DNA
ccaggagggggacggtacggcagacggtgtgctggttgagcgtctgatgcatgaaaagctggagtctgccgcgct

SEQ ID NO: 598711 - DNA, 75 bp, synthetic construct
  source 1..75: mol_type = other DNA
agagggtgagagtaaggttattacctcagcgagtcttctgcgttcctgttttcgtatgaatccggacaggattct

SEQ ID NO: 598712 - DNA, 75 bp, synthetic construct
  source 1..75: mol_type = other DNA
tcatgcataaaggcagaataatcagtcctacaaagatatattatgcaaaaggtttttattacaaggaaattgcat

SEQ ID NO: 598713 - DNA, 75 bp, synthetic construct
  source 1..75: mol_type = other DNA
agtgcccatttgggtgtatcgatcgattggctacttaccggtaaagaacatattccatctaaagaaattgttgct

SEQ ID NO: 598714 - DNA, 75 bp, synthetic construct
  source 1..75: mol_type = other DNA
cgctacccgttacattttacaggtcgctcagagcaagaatgcgcggaaagttgtgaagtctaaatcgatggtgac

SEQ ID NO: 598715 - DNA, 75 bp, synthetic construct
  source 1..75: mol_type = other DNA
tctattttgcaaaaaccaaagaagatgctacccgctacattttacaggtcgcccagcgtaaaaatgcgcggaaag

SEQ ID NO: 598716 - DNA, 75 bp, synthetic construct
  source 1..75: mol_type = other DNA
gagtttattacttcgggtaagggattccgcttcagtcgcgcctcactcgcatcaccttttgttttttcagtcata

SEQ ID NO: 598717 - DNA, 75 bp, synthetic construct
  source 1..75: mol_type = other DNA
gttcgatgaaatcaatattgtgcgcggcctgcccgttcccggtggtcggttaggtgtgaagatttacgaaattac

SEQ ID NO: 598718 - DNA, 75 bp, synthetic construct
  source 1..75: mol_type = other DNA
atgcgcttagagtgtgttttaccttacccaccgacggtgaacacctactggcgtcgtcgtggcagcacatatttt

SEQ ID NO: 598719 - DNA, 75 bp, synthetic construct
  source 1..75: mol_type = other DNA
gccatcgtcgggtgatggctgaaaaaggagttacagcaaaagcggagcaaagggcgatcaaaatgttcgcttatg

SEQ ID NO: 598720 - DNA, 75 bp, synthetic construct
  source 1..75: mol_type = other DNA
caaactcttcaatttaaaagtttgatgctcaaagaattaaacttcgtaatgaattacgtgttcactcttgagact

SEQ ID NO: 598721 - DNA, 75 bp, synthetic construct
  source 1..75: mol_type = other DNA
ctgataatgagccgaaaaccgaagcacagccagagcaaccagaaccggctcagcccggaactgacagcaccatga

SEQ ID NO: 598722 - DNA, 75 bp, synthetic construct
  source 1..75: mol_type = other DNA
tgctcaaagaattaaactttgtaatgaattacgtgttcactcttgagacttggtattcatttttcgtcttgcgac

SEQ ID NO: 598723 - DNA, 75 bp, synthetic construct
  source 1..75: mol_type = other DNA
gggattatttcaccctcagagagcggctgatgacgatgcacaagcaactggaaggggcacaggactatatccgca

SEQ ID NO: 598724 - DNA, 75 bp, synthetic construct
  source 1..75: mol_type = other DNA
aggccagcaccgcctggcacgcagcaatgcgtgccacacaagccgataaagaaaagatacagctctgctttgaag

SEQ ID NO: 598725 - DNA, 75 bp, synthetic construct
  source 1..75: mol_type = other DNA
ccccaactggcagacaccgttacacgggattatttcaccctcagagagcggctgatgacgatgcacaagcaactg

SEQ ID NO: 598726 - DNA, 75 bp, synthetic construct
  source 1..75: mol_type = other DNA
tccggaaggctggcgataaagattattgcagagccaccggataagcgccgccgcgacctggacaatatcctgaag

SEQ ID NO: 598727 - DNA, 75 bp, synthetic construct
  source 1..75: mol_type = other DNA
gctaccgcacctttaacgaattctttgtccgtccgctgcgtgacgaagtacgcccaatcgataccgatccgaatg

SEQ ID NO: 598728 - DNA, 75 bp, synthetic construct
  source 1..75: mol_type = other DNA
caaaactggttatcgatctgttcgttaaatactacaaggtcgacatgaaagaggcgcaaaagccggacaccgcca

SEQ ID NO: 598729 - DNA, 75 bp, synthetic construct
  source 1..75: mol_type = other DNA
gcgctggcgaaactggtcagtgaaggtgtgcttcttagccgtcgcggcggcgggacgtttattcgctggcgccat

SEQ ID NO: 598730 - DNA, 75 bp, synthetic construct
  source 1..75: mol_type = other DNA
ttactggcgacgtcgtggcagcacatattttgtatcaaaagtcggtgagcgttatcgccgtgatgtggcgctaat

SEQ ID NO: 598731 - DNA, 75 bp, synthetic construct
  source 1..75: mol_type = other DNA
gcgcggtttcttcgatgtcctgcaatcctcagtgaagcatagccgtcagcggatgtatctggtgccaccggtttt

SEQ ID NO: 598732 - DNA, 75 bp, synthetic construct
  source 1..75: mol_type = other DNA
attctggaagctcgctacgccatagaagccagcaccgcgtggcatgcagcaatgcgcgccacgcctggcgaaaaa

SEQ ID NO: 598733 - DNA, 75 bp, synthetic construct
  source 1..75: mol_type = other DNA
gtttgatgaaatcaatattgtgcatggtctgcctgtttgcggtgggcgactgggtgtgaatatattcgtaataag

SEQ ID NO: 598734 - DNA, 75 bp, synthetic construct
  source 1..75: mol_type = other DNA
atgactgaacgcatagaatttgttttgccttacccgccgacggtaaacacctactggagacgtcatggcaatacg

SEQ ID NO: 598735 - DNA, 75 bp, synthetic construct
  source 1..75: mol_type = other DNA
gcaccgctggatgcgctgacgcatgcgggactgcttatcgacgacgagcagtttgatgaaattaatattgtgcgc

SEQ ID NO: 598736 - DNA, 75 bp, synthetic construct
  source 1..75: mol_type = other DNA
ctgtggaaatgctggacgcgttgcttggcgcgatatctcacggcgagatcccgttacgttggcggttgctggtga

SEQ ID NO: 598737 - DNA, 75 bp, synthetic construct
  source 1..75: mol_type = other DNA
gaggggccggaaacgcctgaagcgatgaccttattcatccggcaaaaaatccgcgaagatttcctcagtgctgaa

SEQ ID NO: 598738 - DNA, 75 bp, synthetic construct
  source 1..75: mol_type = other DNA
agacccgaattgtggcgcgctggattacatcatgcatgaagcccgcaaggttgattgtgagtttttgcagagtaa

SEQ ID NO: 598739 - DNA, 75 bp, synthetic construct
  source 1..75: mol_type = other DNA
gttggcagctgtttgctgaaagcggggaaacctgtcgggcgcgcgaactggaacagtgcctggaagatttttatg

SEQ ID NO: 598740 - DNA, 75 bp, synthetic construct
  source 1..75: mol_type = other DNA
cattttggcgcgctggcctgtacgctggaactcggcaaagcgttgccctttgggcaaaacgatcttcgccagttt

SEQ ID NO: 598741 - DNA, 75 bp, synthetic construct
  source 1..75: mol_type = other DNA
gaacagtgcctggaagatttttatgaccagggcaaggaatctattcgctggcaccttgatctacataccgcaatt

SEQ ID NO: 598742 - DNA, 75 bp, synthetic construct
  source 1..75: mol_type = other DNA
gtcgttgatactctgaccgcggagaaagcgcgcgggatgaagggtgatgaaataaacgcgtggcgtaatgcgatg

SEQ ID NO: 598743 - DNA, 75 bp, synthetic construct
  source 1..75: mol_type = other DNA
ggaaatccacgttcgccagcgcatgatgaagaaagagctggaaaagctgaccagtgcggatgagatactggcata

SEQ ID NO: 598744 - DNA, 75 bp, synthetic construct
  source 1..75: mol_type = other DNA
atgaagaaagagctggaaaagctgaccagtgcggatgagatactggcatacagggttggctggggtgatccgtaa

SEQ ID NO: 598745 - DNA, 75 bp, synthetic construct
  source 1..75: mol_type = other DNA
tatttctatggatggggtacttccttttactatggctttccatggtgggttgtcggggctggcgttgatgatgtg

SEQ ID NO: 598746 - DNA, 75 bp, synthetic construct
  source 1..75: mol_type = other DNA
aatcgtacaggagcgggagtatgaagttcgtcatacttaatagtggacatattgatgactttgaaattaatgaaa

SEQ ID NO: 598747 - DNA, 75 bp, synthetic construct
  source 1..75: mol_type = other DNA
aatcgtacagaagtgggagtacgaaattcgttatacttaatagcggacatattgatgattttgaaattaacattg

SEQ ID NO: 598748 - DNA, 75 bp, synthetic construct
  source 1..75: mol_type = other DNA
gcaccttgatctacataccgcaattcgtggctccttgcatccgcagttcggtgtattaccgcaacgcgacattcc

SEQ ID NO: 598749 - DNA, 75 bp, synthetic construct
  source 1..75: mol_type = other DNA
taccgttgttattctgcggcgcgatgctcaccgcctgcgatgacaaatcggcggaaaacgccgccgccatgacgc

SEQ ID NO: 598750 - DNA, 75 bp, synthetic construct
  source 1..75: mol_type = other DNA
tggggcgtgtggatcgcgtttgacctgttgatcggcaccggcttcgcctgtggcggctgggcgctggcgtgggcg

SEQ ID NO: 598751 - DNA, 75 bp, synthetic construct
  source 1..75: mol_type = other DNA
caaggtgatgttcttcatcatcgcgcttggtgcgctgctgccaactatgcaccagtcttcaatggggtcgctgat

SEQ ID NO: 598752 - DNA, 75 bp, synthetic construct
  source 1..75: mol_type = other DNA
taaccaaaggagaagcaaaaacgagcttattcccctggtatgtgtatccaccagtagaaaccttcgttgcccgga

SEQ ID NO: 598753 - DNA, 75 bp, synthetic construct
  source 1..75: mol_type = other DNA
ggattttctgcgtatgaaagaggaagtcgccagcggacaaatcaaacaggttcagggcagtacgccagtgcaact

SEQ ID NO: 598754 - DNA, 75 bp, synthetic construct
  source 1..75: mol_type = other DNA
gtaggcgtctggacgatcggttatggatggactcaacccgtcaacggcgtgccggttggcaagggcatgaccatt

SEQ ID NO: 598755 - DNA, 75 bp, synthetic construct
  source 1..75: mol_type = other DNA
attcagcttggtactgttacaccaaacggaactggtagtgaaattccttttgcactgaaggcttcttcagctgct

SEQ ID NO: 598756 - DNA, 75 bp, synthetic construct
  source 1..75: mol_type = other DNA
ttccgaaaagcgtaacgcctgcgggctgtcagattaaatttatcaaagaagaagttctcgattacttttataaac

SEQ ID NO: 598757 - DNA, 75 bp, synthetic construct
  source 1..75: mol_type = other DNA
tactggaagtcatagtagctctggttgtgtttgcgctggcaggaatggcgctgatgcaggcctcgacccagcagg

SEQ ID NO: 598758 - DNA, 75 bp, synthetic construct
  source 1..75: mol_type = other DNA
cgatggccgagcacttccgcgcccatccgacgtatgcagcggagctgcttgctgaagtctgccgcgaaggcaccc

SEQ ID NO: 598759 - DNA, 75 bp, synthetic construct
  source 1..75: mol_type = other DNA
acgcggaactcaccatcatccgccgtcaattgatcaacgtcgccgggttggcaccaaagggaagaaccgaaacgc

SEQ ID NO: 598760 - DNA, 75 bp, synthetic construct
  source 1..75: mol_type = other DNA
tgccggaacgccgctgattaatgatccgggctatcatctggtacgcacctgccgtgaagcaggtattcgcgtggt

SEQ ID NO: 598761 - DNA, 75 bp, synthetic construct
  source 1..75: mol_type = other DNA
gcgctgttacaggcagaactgccgctgaaaaaagcggcggcgctggccgcagaaattcacggcgtgaagaaaaat

SEQ ID NO: 598762 - DNA, 75 bp, synthetic construct
  source 1..75: mol_type = other DNA
acccgccgatgcactgcgcacactggcgctgttgcaggcagaactgcctctgaaaaaagcggcggcgctggcagc

SEQ ID NO: 598763 - DNA, 75 bp, synthetic construct
  source 1..75: mol_type = other DNA
ctggggagaggatgaggataagccggaggtggatccttttgcggctctggaagatgcactgtcattcgccgcaaa

SEQ ID NO: 598764 - DNA, 75 bp, synthetic construct
  source 1..75: mol_type = other DNA
atgtggatggagttcgacagggtatccccgctgggtgatgagcgcggggatatccgtaatgcgcagatcgtgaaa

SEQ ID NO: 598765 - DNA, 75 bp, synthetic construct
  source 1..75: mol_type = other DNA
ccataacgaacaacagaaagccgaaacgttactggcgaagctgcaggaagggcaaaacattgcgctggtgtccga

SEQ ID NO: 598766 - DNA, 75 bp, synthetic construct
  source 1..75: mol_type = other DNA
ttcatcctcagagagcggttgatgatgatgcagaagcaactggaaggggcacgggactatatccgcactcagtgc

SEQ ID NO: 598767 - DNA, 75 bp, synthetic construct
  source 1..75: mol_type = other DNA
atgctttccgcgtttaccgttattctgctggtggtctgtagtgcgctgtggctggcaacagaccattaccgtgat

SEQ ID NO: 598768 - DNA, 75 bp, synthetic construct
  source 1..75: mol_type = other DNA
cttattcaacttggtcttgataaagaaaatgtcttgataaagaaaaacgcgacatcactgaatctgttatcgcga

SEQ ID NO: 598769 - DNA, 75 bp, synthetic construct
  source 1..75: mol_type = other DNA
tgaaaaaagcggcggcgctggcagcagaaattcacggcgtgaagaaaaatgcgctgtataagtatgcgctggagc

SEQ ID NO: 598770 - DNA, 75 bp, synthetic construct
  source 1..75: mol_type = other DNA
tgtgggaacgctgatggccagtactatttccactgagcttggcgatgggaaacactacgccagcagtcgtgactt

SEQ ID NO: 598771 - DNA, 75 bp, synthetic construct
  source 1..75: mol_type = other DNA
agagatcaatcagccgggctacagctactggtacgaatgcacttcgcgccattttactctggctctcacgccgct

SEQ ID NO: 598772 - DNA, 75 bp, synthetic construct
  source 1..75: mol_type = other DNA
ggaaagatgcgctgcaagagctggaaagatggcaaggcgctgcctgtagcgaagcccatctcatggaaatgcgtc

SEQ ID NO: 598773 - DNA, 75 bp, synthetic construct
  source 1..75: mol_type = other DNA
atgcagatggagctaataagccgcaaggagttcgatagccgtgtaaccagcggtgaactcgacaacttgcaggct

SEQ ID NO: 598774 - DNA, 75 bp, synthetic construct
  source 1..75: mol_type = other DNA
tggatgtgctggaaggatatctggtcgatggcacgctcaaaaccgatacggtcaatctggcgactatcgccattg

SEQ ID NO: 598775 - DNA, 75 bp, synthetic construct
  source 1..75: mol_type = other DNA
cgcctcggaaaaaattccgcaactgctgcgagacatgatcaatcactaccaggttaaccccaaacagatcgctct

SEQ ID NO: 598776 - DNA, 75 bp, synthetic construct
  source 1..75: mol_type = other DNA
cagtcaccgcatcatcggctgcaggatgctatcgaaaatcgtgatatttgcgtgcactatcagccgattgtctcc

SEQ ID NO: 598777 - DNA, 75 bp, synthetic construct
  source 1..75: mol_type = other DNA
caggatgctatcgaaaatcgtgatatttgcgtgcactatcagccgattgtctccttagccaatggcaaaattgtc

SEQ ID NO: 598778 - DNA, 75 bp, synthetic construct
  source 1..75: mol_type = other DNA
ttcgaatttattaatgaactgccctataacgcggacaacggcgtggcgcaatttaacccgttaggaaaagtgccg

SEQ ID NO: 598779 - DNA, 75 bp, synthetic construct
  source 1..75: mol_type = other DNA
ctggggcgaggatgaggacaagccggaagcggatccttttgcgggactggaagacgcgctgagccttgctgcaca

SEQ ID NO: 598780 - DNA, 75 bp, synthetic construct
  source 1..75: mol_type = other DNA
ccccgctgggtgatgagcgcggggatatccgtaatgcacagatcgtgaaagcggttttcggggcgcaggggatga

SEQ ID NO: 598781 - DNA, 75 bp, synthetic construct
  source 1..75: mol_type = other DNA
gatgatattaatattaattggccatcatcattcgatatcattctatcaaagaaggatgaaaacgcgccgcgcttc

SEQ ID NO: 598782 - DNA, 75 bp, synthetic construct
  source 1..75: mol_type = other DNA
gtgaatttatctgctgagaataagcggcaattgtggatccctgagggatttgcacatggttttttagtgctgagt

SEQ ID NO: 598783 - DNA, 75 bp, synthetic construct
  source 1..75: mol_type = other DNA
gctccggcgatgttgccgcgcgatccgctggagtcgttgcgggtgcgcaaaattgaggcgctggcggatggcatt

SEQ ID NO: 598784 - DNA, 75 bp, synthetic construct
  source 1..75: mol_type = other DNA
caagcaaatttcctcagtgtatgaactgacaaaattaacgacagaacttgccagttattgcgctgatgtatccag

SEQ ID NO: 598785 - DNA, 75 bp, synthetic construct
  source 1..75: mol_type = other DNA
ttgatgcaaggaatctataccactcaggatggacgcagtgatgtggcaattagctgttgctgccaggtgagtggt

SEQ ID NO: 598786 - DNA, 75 bp, synthetic construct
  source 1..75: mol_type = other DNA
gaattacatctcaatccggcgttacctgagcagtggcaacagttgtctttccctctgttctggcagggctgtgaa

SEQ ID NO: 598787 - DNA, 75 bp, synthetic construct
  source 1..75: mol_type = other DNA
aacctcctgtctgatgtggtcaatttacttgttaaacgcgctgtatttcacaagcaaatctcctccgtggatgaa

SEQ ID NO: 598788 - DNA, 75 bp, synthetic construct
  source 1..75: mol_type = other DNA
cagaaattcagcccgacggcgttttgccgcaggatgattcgtttatggcgaaaccagcgattaatctggcgaaat

SEQ ID NO: 598789 - DNA, 75 bp, synthetic construct
  source 1..75: mol_type = other DNA
cgccagccgtcgctttgtttcggcagaccaactgccgctcattgcgctggaaatcactattactccactggacgc

SEQ ID NO: 598790 - DNA, 75 bp, synthetic construct
  source 1..75: mol_type = other DNA
tgttattgggccagacgaatataccgaacatgtcaataataacgccttcaccagctatatggcgtattacaacgt

SEQ ID NO: 598791 - DNA, 75 bp, synthetic construct
  source 1..75: mol_type = other DNA
tggtgaataccctggctgaactgggtatagaagcgcatcctcgggctgacgcgcctggtgtctatgttggggaaa

SEQ ID NO: 598792 - DNA, 75 bp, synthetic construct
  source 1..75: mol_type = other DNA
gcattgctggcgaatcaggttcgttctcaggatatctgcattactgcgcgtactaaacatgcttgtgaccgctac

SEQ ID NO: 598793 - DNA, 75 bp, synthetic construct
  source 1..75: mol_type = other DNA
ccgaagcgacaactaataatattgcaccgcgtttgctagaaaatattttagtgctactaaacaatcccgacttcg

SEQ ID NO: 598794 - DNA, 75 bp, synthetic construct
  source 1..75: mol_type = other DNA
tattcgtcgcggttgttcatttcacggtctggcattaaacgtcaatatggatctttctccatttttacgcattaa

SEQ ID NO: 598795 - DNA, 75 bp, synthetic construct
  source 1..75: mol_type = other DNA
atggctaaaatatcacaatggaagagcgacgcaacgcctgataatatttcgccacatttactgaaaaatatttta

SEQ ID NO: 598796 - DNA, 75 bp, synthetic construct
  source 1..75: mol_type = other DNA
gctcaattacatgctgccggagcagttctcagcggcatcgtgtcttgccaatctgcaattttatgaaccgcgcac

SEQ ID NO: 598797 - DNA, 75 bp, synthetic construct
  source 1..75: mol_type = other DNA
atgcgctggtgaatctcggcaacagtaaggactgggacgcactggtaaaacgcgctaacgctggaaaactcgacg

SEQ ID NO: 598798 - DNA, 75 bp, synthetic construct
  source 1..75: mol_type = other DNA
atgagcaccattgtaatttttatagctgctttgctggcctgctcactacttgcgggatggctgataaaagtgcgc

SEQ ID NO: 598799 - DNA, 75 bp, synthetic construct
  source 1..75: mol_type = other DNA
actggtcaacaaagcgacggcattgaccgaagcagttaaccgccagttacatccaaagccggaagatgaatctcg

SEQ ID NO: 598800 - DNA, 75 bp, synthetic construct
  source 1..75: mol_type = other DNA
taagcaaatctcctccgtggatgaactgacgaaattaacgacagaaatcgccagctattgcgctgatgaatttaa

SEQ ID NO: 598801 - DNA, 75 bp, synthetic construct
  source 1..75: mol_type = other DNA
gaagcgttgctgattgtcgcctccttcctgatgttctttttctgcctgattaccccggatgtatttgttccgtgg

SEQ ID NO: 598802 - DNA, 75 bp, synthetic construct
  source 1..75: mol_type = other DNA
catgacgaagttaaaaacttcccgctgcaacactggctacgcagtacgattatcgcagtgggttcgctgctggtg

SEQ ID NO: 598803 - DNA, 75 bp, synthetic construct
  source 1..75: mol_type = other DNA
gctatatggcccgctacaacgttcaacaggcgctgaatattgcccgccagttcggctgtagcgacgatgcgttta

SEQ ID NO: 598804 - DNA, 75 bp, synthetic construct
  source 1..75: mol_type = other DNA
cagcgcaggcggaacatcatctggttgccgatatcgcctgggcggttattcaatactggcaggtaacgggggatg

SEQ ID NO: 598805 - DNA, 75 bp, synthetic construct
  source 1..75: mol_type = other DNA
ggctacaaaggccatgttttctgggatacggaagtgttcctgctgccgttccatctgtttagcgaaccgacgatt

SEQ ID NO: 598806 - DNA, 75 bp, synthetic construct
  source 1..75: mol_type = other DNA
tccgtccacgcaggcgtcgattcgcggggaagagagtgagcaaatcgagctactcaatattcgcaaagaaacgca

SEQ ID NO: 598807 - DNA, 75 bp, synthetic construct
  source 1..75: mol_type = other DNA
aaagcaacaacgtcatgatgctgacacacgctatcacgcgttacggcatctctaccgacgatccgaataaatggc

SEQ ID NO: 598808 - DNA, 75 bp, synthetic construct
  source 1..75: mol_type = other DNA
gccgcgtagagtgggaacacgtcgttcccgcctggcagttcggtcaccagcgccagtgctggcaggacggtggac

SEQ ID NO: 598809 - DNA, 75 bp, synthetic construct
  source 1..75: mol_type = other DNA
aaagccggtgcctgccggtatgacacggaagggtatgtgacggagcatatttctcaggaggaggaagcgtatgcg

SEQ ID NO: 598810 - DNA, 75 bp, synthetic construct
  source 1..75: mol_type = other DNA
aacagtatgcgcaggcgcgcttggaaaaggtgcgcagacagaaccggatcaaggatgagctgcgggcgatcctgg

SEQ ID NO: 598811 - DNA, 75 bp, synthetic construct
  source 1..75: mol_type = other DNA
gcagagctgacagcaaaaaaagcgcaggccagacaggcgctgtccatttatctgaacctgccctcgctggatgag

SEQ ID NO: 598812 - DNA, 75 bp, synthetic construct
  source 1..75: mol_type = other DNA
gccccggcttctggcttgcggtatccgggacgtgttactggaagacgtggcgcagcggaatatcccgctctcgca

SEQ ID NO: 598813 - DNA, 75 bp, synthetic construct
  source 1..75: mol_type = other DNA
ttctggcgctgtgacgggtgtggttatctttggccgcaagaggatgattcgtcagaggcagaacacagcatgaca

SEQ ID NO: 598814 - DNA, 75 bp, synthetic construct
  source 1..75: mol_type = other DNA
taaaaaactgcgcagggcgctgaaggccattacccgttcagaaagctatcttggcgcaatgaaagccggtgcctg

SEQ ID NO: 598815 - DNA, 75 bp, synthetic construct
  source 1..75: mol_type = other DNA
aacaacacctgtccgcagccggaaaaccatcatcaatgtcaccacgccaccaaaatggaaggtgaaaaagcagaa

SEQ ID NO: 598816 - DNA, 75 bp, synthetic construct
  source 1..75: mol_type = other DNA
tttatcatccttacagtggtcaattagtcgataattataatcattatttgttcccatacttcactcctactgagg

SEQ ID NO: 598817 - DNA, 75 bp, synthetic construct
  source 1..75: mol_type = other DNA
ttatcttgggagttgtctacagatagaaaaatttcattaggggtgcttgccgtatctttgtatcctgatggtgaa

SEQ ID NO: 598818 - DNA, 75 bp, synthetic construct
  source 1..75: mol_type = other DNA
acggagcatatttctcaggaagaggaagcgtatgcttcagcgcgtctggcaaaaattcgtcgccagaaccggaga

SEQ ID NO: 598819 - DNA, 75 bp, synthetic construct
  source 1..75: mol_type = other DNA
aggccagacaggcgctgtccatttatctgacgctgccctcactggatgaggcggtgaacactctgaaaccctggt

SEQ ID NO: 598820 - DNA, 75 bp, synthetic construct
  source 1..75: mol_type = other DNA
gcagagctggcggcaaaaaaagcgcaggccagacaggcgctgtccatttatctgaacctgccctcgctggatgag

SEQ ID NO: 598821 - DNA, 75 bp, synthetic construct
  source 1..75: mol_type = other DNA
ggaaacaatcgagctaccattgtgtcgggattaaagtactggagaatgccatcaaaattcctaagctggcaccga

SEQ ID NO: 598822 - DNA, 75 bp, synthetic construct
  source 1..75: mol_type = other DNA
gacacggaagggtatgtgacggagcatatttctcaggaggaggaagcgtatgcggcagcgcgtctggataaaatc

SEQ ID NO: 598823 - DNA, 75 bp, synthetic construct
  source 1..75: mol_type = other DNA
catatttctcaggaggaggaagcgtatgcggcagcgcgtctggagaaaatccgtcgccagaaccggataaaggca

SEQ ID NO: 598824 - DNA, 75 bp, synthetic construct
  source 1..75: mol_type = other DNA
cgggacgtgttactggaagacgtggcgcagcggaatggaatatcccgctctcgcataaaaaactgcgcagggcgc

SEQ ID NO: 598825 - DNA, 75 bp, synthetic construct
  source 1..75: mol_type = other DNA
tggcataaaagtccttgatgctgcgataaaaataccgaaaatcttgccgattgaagcgcgtttacatcgtgaaat

SEQ ID NO: 598826 - DNA, 75 bp, synthetic construct
  source 1..75: mol_type = other DNA
tgcatatcaagaaacattcttaccagcggcaccgcgtaaatttaaacccgcgtaaagacctcaaaccactgcttg

SEQ ID NO: 598827 - DNA, 75 bp, synthetic construct
  source 1..75: mol_type = other DNA
taccgtgataatgccattacctacaaagcgcaacgcgataatgtgtcggaaaaactcaaccaggcgaccgcaatc

SEQ ID NO: 598828 - DNA, 75 bp, synthetic construct
  source 1..75: mol_type = other DNA
gccgagaaagcagcccgggaagcagagctggcggcaaaaaagcgcaggccagacaggcgctgtccatttatctga

SEQ ID NO: 598829 - DNA, 75 bp, synthetic construct
  source 1..75: mol_type = other DNA
atgttaagagcgacaaaagtacgcatctatccaaccactaaacaggctgagtatctcaacgcccagttcggcgcc

SEQ ID NO: 598830 - DNA, 75 bp, synthetic construct
  source 1..75: mol_type = other DNA
atggcattgcaacaggcggtaatcaatattgatgtggcattttccaacttttttaatccgaagctgaaagcgcgg

SEQ ID NO: 598831 - DNA, 75 bp, synthetic construct
  source 1..75: mol_type = other DNA
tgccgtcgcaggtaatggctgcgaagaaaaagaccagtgacctcgtgaacaggatgaaggctgcgttttcgggac

SEQ ID NO: 598832 - DNA, 75 bp, synthetic construct
  source 1..75: mol_type = other DNA
cgaagctggaagggctggccggtgacttctacacgctgacagcaccttcccgttaccactccatgcagcataacg

SEQ ID NO: 598833 - DNA, 75 bp, synthetic construct
  source 1..75: mol_type = other DNA
caaccgtcgccgcgaactcatgacgagaatgcgcggatttgaagatctggcgaagctggaagggctggccggtga

SEQ ID NO: 598834 - DNA, 75 bp, synthetic construct
  source 1..75: mol_type = other DNA
gcacagcggcggcgatttcacctcaaacggcatcacagtgcatacgcataagcacggtggcgttaaaggtggcag

SEQ ID NO: 598835 - DNA, 75 bp, synthetic construct
  source 1..75: mol_type = other DNA
gcctgatagaaggggcaaaaccggcaagccgacacctgaccgggctagctatcagcctgagcaccactgggcgcg

SEQ ID NO: 598836 - DNA, 75 bp, synthetic construct
  source 1..75: mol_type = other DNA
gagtggtggcagctcaacgaggagcccggcacattccgtcttgttgtcggcgtgctcgacagcggcatcactgat

SEQ ID NO: 598837 - DNA, 75 bp, synthetic construct
  source 1..75: mol_type = other DNA
gttggtttgattcgccgatcatcgctgaatatattgaattaatgaatgtcgctccggcgatgttgccgcgcgatc

SEQ ID NO: 598838 - DNA, 75 bp, synthetic construct
  source 1..75: mol_type = other DNA
agctgtggaacccggatacctgcccggcaaatctgctgccgtggctggcgtggtcattttcggttgaccgctggg

SEQ ID NO: 598839 - DNA, 75 bp, synthetic construct
  source 1..75: mol_type = other DNA
atcagtttaagtacaaccggcaacatttttgccggtgcgggatgctatcacggtgacgccctgacggtttatccc

SEQ ID NO: 598840 - DNA, 75 bp, synthetic construct
  source 1..75: mol_type = other DNA
ggtagtgaaggatgctttttatattcatcagtataaaggaaccaccagtgccgtgcggcgggtggtggaaccgtt

SEQ ID NO: 598841 - DNA, 75 bp, synthetic construct
  source 1..75: mol_type = other DNA
caggacaaagaacgctttgacggtgaaatttttgacctggatgtcgccatggaccgtgttgaaggagctgcgctg

SEQ ID NO: 598842 - DNA, 75 bp, synthetic construct
  source 1..75: mol_type = other DNA
tttttaccaaaatcattaggggattcatcagtgcctggcgtgaatcccgtggtgatattggtaaaggaatggaga

SEQ ID NO: 598843 - DNA, 75 bp, synthetic construct
  source 1..75: mol_type = other DNA
tgatttcgggagtacttatcctttctgtactgttgccagtaggcttaagcatctggctggcacatcaacaagtag

SEQ ID NO: 598844 - DNA, 75 bp, synthetic construct
  source 1..75: mol_type = other DNA
aatgtgtggataacctacaaaggaaagctaccaggaagaattactgattctctgaagactccaccgaaatggtaa

SEQ ID NO: 598845 - DNA, 75 bp, synthetic construct
  source 1..75: mol_type = other DNA
attgaaaaactggagtgctatatcgctgaattgaaaaaaagcatcccaacaaaaaatgaggtgcttgcagcagat

SEQ ID NO: 598846 - DNA, 75 bp, synthetic construct
  source 1..75: mol_type = other DNA
cgggattatttcatcctcagagaacggttgatgacaatgcagaagcagctggaaggggcgcaggactatatccgc

SEQ ID NO: 598847 - DNA, 75 bp, synthetic construct
  source 1..75: mol_type = other DNA
cccggcctcggccattcatttaattgataacctgagagtaaacgcaatgacagtgaaaatactacgccaattcta

SEQ ID NO: 598848 - DNA, 75 bp, synthetic construct
  source 1..75: mol_type = other DNA
tgagcaacatcatccgcaccgggatcatctctgaagttgatgagaagtcctggtgcgtgcgcgttcgcagcggcg

SEQ ID NO: 598849 - DNA, 75 bp, synthetic construct
  source 1..75: mol_type = other DNA
tggcggcaacccggaaaccgccatgataattggcagcctgtggagtgatgccattccggcccccggcaaaagcct

SEQ ID NO: 598850 - DNA, 75 bp, synthetic construct
  source 1..75: mol_type = other DNA
gcatccgtcagtgtgacactggatacgcctgtcgtggaatgcacagaccttctgagaacagcgacgcttgacgtc

SEQ ID NO: 598851 - DNA, 75 bp, synthetic construct
  source 1..75: mol_type = other DNA
cacatcaaacggtgtgacggtgcacacgcacaaacacagtggcgtgaagagcggcagcgacagcacaggaggccc

SEQ ID NO: 598852 - DNA, 75 bp, synthetic construct
  source 1..75: mol_type = other DNA
gcatccgtcagcgtgaaactggatacgcccgtcgtggaatgcacaaaccttctgaaaacagccgagattgacgtc

SEQ ID NO: 598853 - DNA, 75 bp, synthetic construct
  source 1..75: mol_type = other DNA
aatgtgtggctgccgccatcaccaggcgaacaggtggcaattgcctgcattggcggcaacccggaaaccgccatg

SEQ ID NO: 598854 - DNA, 75 bp, synthetic construct
  source 1..75: mol_type = other DNA
ttccagcctttgcgatacgaacgggatgttgagcaagccatcataaaggcaggcggaaaagtctcgtggcaggag

SEQ ID NO: 598855 - DNA, 75 bp, synthetic construct
  source 1..75: mol_type = other DNA
gtccatcagcacaaaggcaccatcagcgcattacgtcgggtggtcgagccgctcggctttctgattgaggtgcgc

SEQ ID NO: 598856 - DNA, 75 bp, synthetic construct
  source 1..75: mol_type = other DNA
gagccgccatctgacgggactggctatcagtttaagtacaaccggcaacatttttgccggtgcgggatgctatca

SEQ ID NO: 598857 - DNA, 75 bp, synthetic construct
  source 1..75: mol_type = other DNA
cggaagaacgtaagcgagaacttgttaagcaaaacttattggagaaagtcttccctgaaatccggcaccggacac

SEQ ID NO: 598858 - DNA, 75 bp, synthetic construct
  source 1..75: mol_type = other DNA
tgccagtcggttttatcgaacagcagcgctggagtcgggtcacggacacctaaggtgttaagcaccagcgaaaag

SEQ ID NO: 598859 - DNA, 75 bp, synthetic construct
  source 1..75: mol_type = other DNA
tcctctttgaatctttccttagcttcctgggattaggtacgcaagagccgttaagcagctggggtgcattgctga

SEQ ID NO: 598860 - DNA, 75 bp, synthetic construct
  source 1..75: mol_type = other DNA
accgtttccgtattctgaacaacaaaatcataaaccgggttactggctcggaatttgttttttatggattatggc

SEQ ID NO: 598861 - DNA, 75 bp, synthetic construct
  source 1..75: mol_type = other DNA
tgctgaagagctgccagcgtacctatcaggcggcactggagcgtgatgctgatatcgtctacgactcaatcggcg

SEQ ID NO: 598862 - DNA, 75 bp, synthetic construct
  source 1..75: mol_type = other DNA
gagtggaaggcgaaagaagacgaattgctgaagagctgccagcgtacctatcaggcggcactggagcgtgatgct

SEQ ID NO: 598863 - DNA, 75 bp, synthetic construct
  source 1..75: mol_type = other DNA
gatgacgtggcaataaagaataagaagtcacaagttaaaaaaacaaaaagatcagtttccggcggtgccggaacg

SEQ ID NO: 598864 - DNA, 75 bp, synthetic construct
  source 1..75: mol_type = other DNA
gtgtccactgcaaaccaaaaaccaactgaaagcgtcagtttgaacgctttcaaacaaccgaaggcgttctatctc

SEQ ID NO: 598865 - DNA, 75 bp, synthetic construct
  source 1..75: mol_type = other DNA
gaaaggtgctgcgcgtcgtaaaatgatcgttgccttcatcctgatgctcgaagccattatcttcttcgtgctgta

SEQ ID NO: 598866 - DNA, 75 bp, synthetic construct
  source 1..75: mol_type = other DNA
gaatttaatggacgtgagctgaaaggtgaagccgtcgccctatcaacaccggcaaacgtgaatgctcttctagga

SEQ ID NO: 598867 - DNA, 75 bp, synthetic construct
  source 1..75: mol_type = other DNA
atgagtctgatgggtttctgtactgcctgttccgtggatggtgtgcaaacccgcaattgtggtcacacgtcacgc

SEQ ID NO: 598868 - DNA, 75 bp, synthetic construct
  source 1..75: mol_type = other DNA
gtgtttggcagcggagcgtacagtaaaccagcacaagtcagcctggaatgtaaacattattcgctgaccagcgat

SEQ ID NO: 598869 - DNA, 75 bp, synthetic construct
  source 1..75: mol_type = other DNA
cgcgaaaacatgaatgcctcccgcatcaattatcagcgattcaatgctggcgctggtgtgaatgagccggactac

SEQ ID NO: 598870 - DNA, 75 bp, synthetic construct
  source 1..75: mol_type = other DNA
atgacttctactctgacatccaaaccgacgctgaatccggtcctgcgtagcttctggacgacgcaggcgcgtaac

SEQ ID NO: 598871 - DNA, 75 bp, synthetic construct
  source 1..75: mol_type = other DNA
tcgaagaaattaaatccctggaaggtatcagcgttttgtggcttgaagaagcccatgcactaacggaataccagt

SEQ ID NO: 598872 - DNA, 75 bp, synthetic construct
  source 1..75: mol_type = other DNA
ggatcgctgaggcaaaagcaaaggctgacaatctgcggttatccaaaaaacgcgctcaaaaacatgagttcaagc

SEQ ID NO: 598873 - DNA, 75 bp, synthetic construct
  source 1..75: mol_type = other DNA
cctgttccgccgcagatacgccggacaattttcaatgagacaacgatagagggaatgttaaaatattattccgac

SEQ ID NO: 598874 - DNA, 75 bp, synthetic construct
  source 1..75: mol_type = other DNA
agcttgaacttttcaactggataaaaagctattgcattgagaaggggatcctctgtatgaaaaaaaatgacattt

SEQ ID NO: 598875 - DNA, 75 bp, synthetic construct
  source 1..75: mol_type = other DNA
gtacagaaaaggaaatatgggagcaaaaacaaaaagcactggagtcaaaacttcataaagagattcgtgccggta

SEQ ID NO: 598876 - DNA, 75 bp, synthetic construct
  source 1..75: mol_type = other DNA
ccgtacctgtgcgactcattccagaggagcttgaacttttcaactggataaaaagctattgtattgagaagggga

SEQ ID NO: 598877 - DNA, 75 bp, synthetic construct
  source 1..75: mol_type = other DNA
atctggacggattattacaatgatgtggaatcgaagctggggggattggggcctttaagacattgccgggaatat

SEQ ID NO: 598878 - DNA, 75 bp, synthetic construct
  source 1..75: mol_type = other DNA
gagattcgtgccggtaaagattacaaggcaacagaatcagagcttgaaacgcatctgaataaacctcctgttccg

SEQ ID NO: 598879 - DNA, 75 bp, synthetic construct
  source 1..75: mol_type = other DNA
acgacgatcgggcgcaagagatactggatgcgctggaaaaaaaatatggcgcacttatccagtgccgggcagtga

SEQ ID NO: 598880 - DNA, 75 bp, synthetic construct
  source 1..75: mol_type = other DNA
accaaactcaaaaaattgacttcatggatcgctggggcaaaagcaaaggccgacaatctgcgtttatccaaaaaa

SEQ ID NO: 598881 - DNA, 75 bp, synthetic construct
  source 1..75: mol_type = other DNA
agtcacaagttaaaaaacaaaagatcagtttccggcggtgccggaacgaccagactcaaaaaattgacttcatgg

SEQ ID NO: 598882 - DNA, 75 bp, synthetic construct
  source 1..75: mol_type = other DNA
tgctggagccacgcaaggcgcggcttcgcaaatctgtacaaggccagcagggagccccgtgcagccatggcgctg

SEQ ID NO: 598883 - DNA, 75 bp, synthetic construct
  source 1..75: mol_type = other DNA
aatcaggttgacgtgtgcagacctggaaatttacgtgggcctgttaatctttactctctgattctggctgattcc

SEQ ID NO: 598884 - DNA, 75 bp, synthetic construct
  source 1..75: mol_type = other DNA
cttcatgccgccatgcaggcagaaaaaaccgcatatgaacagcgcatccgggagctggaggaggccctgaagctg

SEQ ID NO: 598885 - DNA, 75 bp, synthetic construct
  source 1..75: mol_type = other DNA
ttcctctcagcacagagcaacaggccgcatggcgggcggtggcggagacagaaaaacgccgccatcagggtaaca

SEQ ID NO: 598886 - DNA, 75 bp, synthetic construct
  source 1..75: mol_type = other DNA
tggactcgctggaaacggctatcggattccacatgcgcgactggtggcagccgacaaaagcaaacttcttcggac

SEQ ID NO: 598887 - DNA, 75 bp, synthetic construct
  source 1..75: mol_type = other DNA
cagccttaacggtgtccagacccgtgagtgtggtcacacgtcacgcagtccgcttgactcgctggaaaccgctat

SEQ ID NO: 598888 - DNA, 75 bp, synthetic construct
  source 1..75: mol_type = other DNA
cagccgacaaaagcgaacttcttcggacacctgaaaaagccacagattatcgcagccctgaatgaggccggatta

SEQ ID NO: 598889 - DNA, 75 bp, synthetic construct
  source 1..75: mol_type = other DNA
cgctgggtgcctggctggatgtgtgcaccgcatccacagacggatgccactgaacgcaccggtaacctggctgat

SEQ ID NO: 598890 - DNA, 75 bp, synthetic construct
  source 1..75: mol_type = other DNA
atcgtcgggatatgcaccctgccgaacagattgccggattccgtgcaatggcgcaggaaggcaaaacacctgcac

SEQ ID NO: 598891 - DNA, 75 bp, synthetic construct
  source 1..75: mol_type = other DNA
tgccggagccggaagcggtgctgacggaggcggaagaagaacgcctgaacgaactgatggcacgttacgacgcgc

SEQ ID NO: 598892 - DNA, 75 bp, synthetic construct
  source 1..75: mol_type = other DNA
tggcagtggcaggatatgccgttctggcaggttattgcggaagccagtcttgcagcaagagaggccggtcacgct

SEQ ID NO: 598893 - DNA, 75 bp, synthetic construct
  source 1..75: mol_type = other DNA
cgtagcagattacgccaaagaatttggtctggtctatcttgaaggcaaacagccgtggtccgtgccggttgatat

SEQ ID NO: 598894 - DNA, 75 bp, synthetic construct
  source 1..75: mol_type = other DNA
ggcgttgcgacatcggggctggaaatggcgcaaaacgctgcgcgtctgggctggaaagccgagaaagttgatgcg

SEQ ID NO: 598895 - DNA, 75 bp, synthetic construct
  source 1..75: mol_type = other DNA
aaaaactccaggctgttgcagagtaccttcgggaagccgagggctggggatggtgtgccggacgcatggaggccg

SEQ ID NO: 598896 - DNA, 75 bp, synthetic construct
  source 1..75: mol_type = other DNA
gacttacagcagatgctgaactcaattattaccgtctccgaggtggaatcgacaagataaccgcgcaggttaact

SEQ ID NO: 598897 - DNA, 75 bp, synthetic construct
  source 1..75: mol_type = other DNA
ttccgcgcaatggcgcaggaaggcaaaacacctgcacaaattggtgatttgctgggctattcaccccgccacgtt

SEQ ID NO: 598898 - DNA, 75 bp, synthetic construct
  source 1..75: mol_type = other DNA
agtctgccgctgctgacgaaaatgtcttccgaacgcacgctggcagtccaggcggcactgatgcagcaaccggac

SEQ ID NO: 598899 - DNA, 75 bp, synthetic construct
  source 1..75: mol_type = other DNA
taagggcgtcggactgctgcagaatctggtcgtgcataccctgcctggtgaccgttacgctgtcgccgcaggcgg

SEQ ID NO: 598900 - DNA, 75 bp, synthetic construct
  source 1..75: mol_type = other DNA
gattccgcaggagctggcgacagccgcatcaatgactgaaaacggtcatcgtcgggatatgcaccctgccgaaca

SEQ ID NO: 598901 - DNA, 75 bp, synthetic construct
  source 1..75: mol_type = other DNA
cattccgcaggagctggcgacagcggcatcaatgactgaaaacggtcatcgtcgggatatgcaccctgccgaaca

SEQ ID NO: 598902 - DNA, 75 bp, synthetic construct
  source 1..75: mol_type = other DNA
atgagcgcacgttcacgggcactggttcccctcagtgcagagcaacaggccgcatggcgggcggtggcagagacg

SEQ ID NO: 598903 - DNA, 75 bp, synthetic construct
  source 1..75: mol_type = other DNA
taagggcgttggcctgttgcagaatctggtcgtgcatactctgcctggtgaccgttacggtgtcgccgcaggtgg

SEQ ID NO: 598904 - DNA, 75 bp, synthetic construct
  source 1..75: mol_type = other DNA
gctgcatggcgaaggtcagggcgtggacgccggagatgcgtgccggaagtggcgtggtggtgtcctggcgttacg

SEQ ID NO: 598905 - DNA, 75 bp, synthetic construct
  source 1..75: mol_type = other DNA
gttaccggagggatggtcacgggacatgacgacgttcctgtcactcagtcaggaggtgctgttatccctgctcag

SEQ ID NO: 598906 - DNA, 75 bp, synthetic construct
  source 1..75: mol_type = other DNA
agtgggacgagcgttttccgtcactggccggaatggaacgctggcagtggcaggatatgccattctggcaggtca

SEQ ID NO: 598907 - DNA, 75 bp, synthetic construct
  source 1..75: mol_type = other DNA
cgatgcggctgaacatgcagagttccacatgaaagacaaccgctgggtgcctggctggatgtgtgcaccacatcc

SEQ ID NO: 598908 - DNA, 75 bp, synthetic construct
  source 1..75: mol_type = other DNA
tcgccgactggctgcactcaacatgctggcagagcgtggcatcattccggctgactggcctgtccgagtgaaggt

SEQ ID NO: 598909 - DNA, 75 bp, synthetic construct
  source 1..75: mol_type = other DNA
cttcagtggctgtatgccattgatgtgctgattgaaacacagggcgaggtctgcctccttccccttcccggtgat

SEQ ID NO: 598910 - DNA, 75 bp, synthetic construct
  source 1..75: mol_type = other DNA
agaacgcgaacgaactgatgacgcgttacgacgcgctggaaaaccagtgtgaggaatcgacctgctggaagcaga

SEQ ID NO: 598911 - DNA, 75 bp, synthetic construct
  source 1..75: mol_type = other DNA
acaatatcaccctgaaaatcgaccctgccgtagtgctggcaacccgcaagtatgtggatgacaaggtactggagc

SEQ ID NO: 598912 - DNA, 75 bp, synthetic construct
  source 1..75: mol_type = other DNA
gagaactacattgcccagcgccctgacgcagactttttcacgctgcaggtggatgcatatgccgacaccgtggat

SEQ ID NO: 598913 - DNA, 75 bp, synthetic construct
  source 1..75: mol_type = other DNA
tacgttgccgttaattgaacagatgatggcttgtcgcgaaacaatgaccagtgcggagtttcgccatcgcatggt

SEQ ID NO: 598914 - DNA, 75 bp, synthetic construct
  source 1..75: mol_type = other DNA
cgcatacatgggaaatccggagtgtatctcttcgttgtggtcacgggcgggtgagttcggactggagcagctgga

SEQ ID NO: 598915 - DNA, 75 bp, synthetic construct
  source 1..75: mol_type = other DNA
ttcgagaaacttgtccagctggtaaaacagaatggccacaacctggaatcagccttagctctcgttccgaaggca

SEQ ID NO: 598916 - DNA, 75 bp, synthetic construct
  source 1..75: mol_type = other DNA
gcacaaatgggatattcatcgattggtatagatctcaatcatgaattttgcgaatattctgcattaaacatggag

SEQ ID NO: 598917 - DNA, 75 bp, synthetic construct
  source 1..75: mol_type = other DNA
atgaaaacagcagctgcagcgaaaggccgctggcctgaaatattagagcacttcggcttgccgccgataacagga

SEQ ID NO: 598918 - DNA, 75 bp, synthetic construct
  source 1..75: mol_type = other DNA
cctgacacaggcgaagccatttaacgagatttgtaccgaaatagaccgcctgatcggtaatgattaccaacgggt

SEQ ID NO: 598919 - DNA, 75 bp, synthetic construct
  source 1..75: mol_type = other DNA
aaaaatcacttcaagggtgaatgcccggtatgcggtgcacgtggcaagttccgaattgacgaccgcgacggtgca

SEQ ID NO: 598920 - DNA, 75 bp, synthetic construct
  source 1..75: mol_type = other DNA
atgatgaccgggcgcaagagatactggacgcgctggaaaaaaaatacggagcgctggtccagtgctgtgcagtca

SEQ ID NO: 598921 - DNA, 75 bp, synthetic construct
  source 1..75: mol_type = other DNA
atttctggcgcggattaagctctaatatgctcagccgcatgatgtgcgatgctttgcatgaaacggactctggtg

SEQ ID NO: 598922 - DNA, 75 bp, synthetic construct
  source 1..75: mol_type = other DNA
tgctgctgccaacctgcacgcgaagaacgatctggagactgtatccgtccgctggcctgcacagggtgactttaa

SEQ ID NO: 598923 - DNA, 75 bp, synthetic construct
  source 1..75: mol_type = other DNA
acaacagaatgactgggaagctaccgatccggccttccgtgaagcaaacgtgcagggtaaaaacctgatcgaatg

SEQ ID NO: 598924 - DNA, 75 bp, synthetic construct
  source 1..75: mol_type = other DNA
agcaacggtcacgttctgcgggtttgcctggtcagcaccgaaagccagaaagttgtgtgtgaattactggggcgt

SEQ ID NO: 598925 - DNA, 75 bp, synthetic construct
  source 1..75: mol_type = other DNA
ggttgtctgccaggttcagggacgtactcataccctgagttatccactggcagtgtttcagtccggaaaaatgtt

SEQ ID NO: 598926 - DNA, 75 bp, synthetic construct
  source 1..75: mol_type = other DNA
tgtatcaccgatacaaccgttgcccccgtgtggggcagtggttcaccaccagcaacggtcacgttctgcgggttt

SEQ ID NO: 598927 - DNA, 75 bp, synthetic construct
  source 1..75: mol_type = other DNA
ctgattgtcggcatggtcatggatttaacgccgacggtattaattcttaccccggtattaatgcctttagttaaa

SEQ ID NO: 598928 - DNA, 75 bp, synthetic construct
  source 1..75: mol_type = other DNA
catggttttattcatgttgttagcattatttatttttataccggagctcattaccgctcctcttaaatggatgag

SEQ ID NO: 598929 - DNA, 75 bp, synthetic construct
  source 1..75: mol_type = other DNA
aactacaccattagctacccactggcggtgtttcagtccggaaaaatgtttaaacgcctgggaggtgccgtgtga

SEQ ID NO: 598930 - DNA, 75 bp, synthetic construct
  source 1..75: mol_type = other DNA
caacttgctggacgaaaatcttcagcgagcgggcttcggtgccgaagcgtggggcgaatatttgcgactatcggc

SEQ ID NO: 598931 - DNA, 75 bp, synthetic construct
  source 1..75: mol_type = other DNA
ggcgatacgcagatattaagtttgacgccgggcgcacaagccaacagcgcggagggctggacgctgatcatgcct

SEQ ID NO: 598932 - DNA, 75 bp, synthetic construct
  source 1..75: mol_type = other DNA
ttgggaagaaatgacctgcttattcgcaccttccctaacgcacaatctaccttcgagcaaaaagcggcaaatccc

SEQ ID NO: 598933 - DNA, 75 bp, synthetic construct
  source 1..75: mol_type = other DNA
gacagcttcgcttgagcaacgtatggcgcgcggttacgatctgaccgcccgaatgcgaatgccgttttaccaaca

SEQ ID NO: 598934 - DNA, 75 bp, synthetic construct
  source 1..75: mol_type = other DNA
agtcagtcgttgcgcggcagtcgctatgacaatccgcagcggaataatctgccggtcattgagtatcatcagcgt

SEQ ID NO: 598935 - DNA, 75 bp, synthetic construct
  source 1..75: mol_type = other DNA
ggtggaagataaccaggggcagcgtgtctcctccaatgagatcacgctaacgcttgtcgaaccgttcgacgcatt

SEQ ID NO: 598936 - DNA, 75 bp, synthetic construct
  source 1..75: mol_type = other DNA
ttgcaacagatgacagaggttctctttgctatctgcatcgtacgttgctggatggtgatcgcaaggcgaatgtag

SEQ ID NO: 598937 - DNA, 75 bp, synthetic construct
  source 1..75: mol_type = other DNA
atgcggccgcgctgaaaactcgtaaaagcaaaggcgaagtagatcgcgatgtactctatgagggctggaaaaacc

SEQ ID NO: 598938 - DNA, 75 bp, synthetic construct
  source 1..75: mol_type = other DNA
aatcccaggggcttacctgtgatcgcgtgttgttcaacatagataccaaatcgcttaccacttctaaggacgttt

SEQ ID NO: 598939 - DNA, 75 bp, synthetic construct
  source 1..75: mol_type = other DNA
atgcttgatataaccaccattacacgtcagaacgtcactagcgttgtcggctactactctgatgcaaaggatgat

SEQ ID NO: 598940 - DNA, 75 bp, synthetic construct
  source 1..75: mol_type = other DNA
gggtgctggatacaggtccggggaacctgctgaccgtggccgggagcgacggccagaaaatcagcttcagcccgc

SEQ ID NO: 598941 - DNA, 75 bp, synthetic construct
  source 1..75: mol_type = other DNA
gccgacgcaggaaaaagacaatgccaagcgtaaaggcaaaggtcatgacaaaaataacgacgagagagcatttac

SEQ ID NO: 598942 - DNA, 75 bp, synthetic construct
  source 1..75: mol_type = other DNA
aggatcacccgtaacgatgcgcatctggatttagcgaacggcgaccgttttaaggtaaaaggcgtccagagtggt

SEQ ID NO: 598943 - DNA, 75 bp, synthetic construct
  source 1..75: mol_type = other DNA
agttggcagcatcacctccaggctggattaaatactgcgttcgaagatatcaactggacgctcagctatagcctg

SEQ ID NO: 598944 - DNA, 75 bp, synthetic construct
  source 1..75: mol_type = other DNA
ggaaaatgctcactgtgtcgccaattatcaactgccaccagagagtcagcagcagttattaacccagctatcagc

SEQ ID NO: 598945 - DNA, 75 bp, synthetic construct
  source 1..75: mol_type = other DNA
gtggtgcttgttaaagcgcctggcgcaaaagatgcaaaagtcgaaaaccagacaggagtgcgtaccgactggcgg

SEQ ID NO: 598946 - DNA, 75 bp, synthetic construct
  source 1..75: mol_type = other DNA
aatcaactctgaaggtcggtgcttcagttatggccgaaactctgacgcgcaaagagtggatcgactcgctgacga

SEQ ID NO: 598947 - DNA, 75 bp, synthetic construct
  source 1..75: mol_type = other DNA
gaaccggcgcaaccttcacgctactggatcgcgtggactcgacacaggcggagcgccgcgacagccgttatttca

SEQ ID NO: 598948 - DNA, 75 bp, synthetic construct
  source 1..75: mol_type = other DNA
gaatcagcccggtttaaagagctgcttgtcggtgagatagataccttcacgcatatgcagcgacacgtgggtgat

SEQ ID NO: 598949 - DNA, 75 bp, synthetic construct
  source 1..75: mol_type = other DNA
ccaaagacgttttttacgttgggatttcccgcgcccgtcatgaagtcgagatcttcaccgatgacaaaaagcgtt

SEQ ID NO: 598950 - DNA, 75 bp, synthetic construct
  source 1..75: mol_type = other DNA
attctctcgttcatccaccaacaggatatcgcatcactggtgtccggcctgttatctcgcctgcgtggcggagga

SEQ ID NO: 598951 - DNA, 75 bp, synthetic construct
  source 1..75: mol_type = other DNA
gcacggctgcggcgctcggtggggcgacggtattcgggctgtttaccggaacggatttcgggattgtgtttggtg

SEQ ID NO: 598952 - DNA, 75 bp, synthetic construct
  source 1..75: mol_type = other DNA
gtcctgtcattcatccaccagcaggagattacatcactggtatccggtctgttctcccgtcagcgtggaggaggt

SEQ ID NO: 598953 - DNA, 75 bp, synthetic construct
  source 1..75: mol_type = other DNA
attctgtcgttcatccaccagcaggatatcgcatcactggtgtccggcctgttctcgcgcctgcggggcggagga

SEQ ID NO: 598954 - DNA, 75 bp, synthetic construct
  source 1..75: mol_type = other DNA
gtacggctgcggcgctcggcggggcgacagtattcgggctgtttaccggaacggatttcgggattgtgtttggtg

SEQ ID NO: 598955 - DNA, 75 bp, synthetic construct
  source 1..75: mol_type = other DNA
tggcgtgtggctgcacattttctggtgtcctttattgttggtgtgcttggggcccgtggtgtggccggttacatg

SEQ ID NO: 598956 - DNA, 75 bp, synthetic construct
  source 1..75: mol_type = other DNA
ggaactgattacggcgttgtatttggcgcatttgcaggggctgtattctatatagcaacagcagcagatctgagt

SEQ ID NO: 598957 - DNA, 75 bp, synthetic construct
  source 1..75: mol_type = other DNA
agagaaagcgtccactccggcacaacgccaacaagcgtctctggaagagcaaaacaacgatgcgttaagcccggc

SEQ ID NO: 598958 - DNA, 75 bp, synthetic construct
  source 1..75: mol_type = other DNA
atgatgtggtttaccacaactatttcgacgtcagcatggcggtttctacgccgcgcggcctggtgacgccggttc

SEQ ID NO: 598959 - DNA, 75 bp, synthetic construct
  source 1..75: mol_type = other DNA
gagcgcaattctgggtatgcacgctatcaaagatcgtccgatggcagtgaatggtcaggttgagatcctgccgat

SEQ ID NO: 598960 - DNA, 75 bp, synthetic construct
  source 1..75: mol_type = other DNA
actggtatcggtgatttcggtgaagattctgtcgttcatccaccagcaggatattgcatcactggtatcgcaaac

SEQ ID NO: 598961 - DNA, 75 bp, synthetic construct
  source 1..75: mol_type = other DNA
actggtatcggtggtgtcggtgaagattctgtcgttcatccaccagcaggatatcggttcactggtatccgggct

SEQ ID NO: 598962 - DNA, 75 bp, synthetic construct
  source 1..75: mol_type = other DNA
atgagtacgattttttatcagtctggcacgcagcatacggaaaaggccagcgaggctgaagaacagatctggttt

SEQ ID NO: 598963 - DNA, 75 bp, synthetic construct
  source 1..75: mol_type = other DNA
attcagtcggatatcgtgtaggtgatgcagcccgccgccgcgccatcaaaaaagcgctgggggatgatgaggagt

SEQ ID NO: 598964 - DNA, 75 bp, synthetic construct
  source 1..75: mol_type = other DNA
atttcaactacagcgttaccgggctggccaacttcgttcgtgctgggcgtctcacccaagggcaggctaatgcat

SEQ ID NO: 598965 - DNA, 75 bp, synthetic construct
  source 1..75: mol_type = other DNA
atggagattaaacaattccggcgcgcaactggtatcagcgaggctctggccgtacgctggttctcgcatataact

SEQ ID NO: 598966 - DNA, 75 bp, synthetic construct
  source 1..75: mol_type = other DNA
aatcagtgttgttagccctggctgctgaaaaagggcaggcatgggtagccaatgcaattactgaagaatatctgc

SEQ ID NO: 598967 - DNA, 75 bp, synthetic construct
  source 1..75: mol_type = other DNA
aatcagtgctgttagccctggcagctgaaaaagggcaggcatgggtagccagtgcaattactgaagaatatctgc

SEQ ID NO: 598968 - DNA, 75 bp, synthetic construct
  source 1..75: mol_type = other DNA
cgcagaaaacctatcgtgattctcgttggcaagaacgagatgagttatttcagggaatggttgccgaaggcattt

SEQ ID NO: 598969 - DNA, 75 bp, synthetic construct
  source 1..75: mol_type = other DNA
aaaagtggacctgctggagaatcctgagctgttgacgcaggacgaatacgcggcccgcagcgcggcgtggttctt

SEQ ID NO: 598970 - DNA, 75 bp, synthetic construct
  source 1..75: mol_type = other DNA
cccaataaatactgttttcctgtcaattaatggcacaattggaaatgtttccttttacaataatgagaagatcgt

SEQ ID NO: 598971 - DNA, 75 bp, synthetic construct
  source 1..75: mol_type = other DNA
atgaaaattcgcataatgctatttatattaatgatgatggttatgccagtgagctatgcagcatgttatagtgag

SEQ ID NO: 598972 - DNA, 75 bp, synthetic construct
  source 1..75: mol_type = other DNA
tgggtcgccgtgctggtgaaccaccattgccacttgagcgccagcgcgcgatcgcaaatctggtatacagcaaac

SEQ ID NO: 598973 - DNA, 75 bp, synthetic construct
  source 1..75: mol_type = other DNA
tctgcgatgaaagagtttggtatcagcaaagcagaagatcaggcaatgtttattgctcaggtcgggcatgagtct

SEQ ID NO: 598974 - DNA, 75 bp, synthetic construct
  source 1..75: mol_type = other DNA
ctgctggtattagcgaggcgctggccgctcgctggttctcgcatataacttctgcgatgaaagagtttggtatca

SEQ ID NO: 598975 - DNA, 75 bp, synthetic construct
  source 1..75: mol_type = other DNA
tggtgtggtgaccgttccgttctctggaatgcggtcgagaaagccgaacagcgccggaactcccagctggcaagg

SEQ ID NO: 598976 - DNA, 75 bp, synthetic construct
  source 1..75: mol_type = other DNA
cgtcgctacgagctgcggctggcaaaatcgctggcacatgtcgtgaatattctcgatccggatgtgattgtgctg

SEQ ID NO: 598977 - DNA, 75 bp, synthetic construct
  source 1..75: mol_type = other DNA
ttgtcttcggcggcgaatgtgaaacgccggtgcgtaaggcgaagcacggtgattccagcggcgtacgcggcgctg

SEQ ID NO: 598978 - DNA, 75 bp, synthetic construct
  source 1..75: mol_type = other DNA
catgtcgtgaatattctcgatccggatgtgattgtcctggggggcgggatgagcaatgtagaccgtttatatcaa

SEQ ID NO: 598979 - DNA, 75 bp, synthetic construct
  source 1..75: mol_type = other DNA
gtgaagaatgccaattcaacctggctcaacggtcagccattcgataaagacttaagcgcgcggttgcagcgggaa

SEQ ID NO: 598980 - DNA, 75 bp, synthetic construct
  source 1..75: mol_type = other DNA
gagcaggcaacagggcagcgcggaacggtaggtatgggcattcctggttcgatttcgccctacaccggcgtggtg

SEQ ID NO: 598981 - DNA, 75 bp, synthetic construct
  source 1..75: mol_type = other DNA
gaatgtgaaacgccggtacgtaaggcgaagcatggtgattcgagcggcgtacgcggtgccgcgtggttatggccg

SEQ ID NO: 598982 - DNA, 75 bp, synthetic construct
  source 1..75: mol_type = other DNA
cgctgaatctgctgttgtgcaaagggccggaggaaatgcttgtcggttttgtgcgcttggaggacgagctgcgtc

SEQ ID NO: 598983 - DNA, 75 bp, synthetic construct
  source 1..75: mol_type = other DNA
agcaggccattctcgaaaaggagatgaccggactcaaaaaagcacgccctgtcgcgtcccttctgtcagagattc

SEQ ID NO: 598984 - DNA, 75 bp, synthetic construct
  source 1..75: mol_type = other DNA
accatgcgaacagagcgcttgcgaacgccggctaccaggaagagatagaccatcgttcatacgagcgtcagggac

SEQ ID NO: 598985 - DNA, 75 bp, synthetic construct
  source 1..75: mol_type = other DNA
aaattatcagcctggttgaagaaagcgatccggagcggaactggcattgcgtcgctacgagctgcggctggcaaa

SEQ ID NO: 598986 - DNA, 75 bp, synthetic construct
  source 1..75: mol_type = other DNA
gtggggacacaatccgctaccgtggatggacgaagacgaactgcgttatcgcgaggaagtcccttgttattgcgg

SEQ ID NO: 598987 - DNA, 75 bp, synthetic construct
  source 1..75: mol_type = other DNA
catcatgacaggcttttggctgctgtccacaaaccggaagagatgccggattatctcttccgtcaactcggtttt

SEQ ID NO: 598988 - DNA, 75 bp, synthetic construct
  source 1..75: mol_type = other DNA
agagtccgaagcagatgatttctcctttgatctgttgaagaaacgtggcatcagtacccaggggctggttggtag

SEQ ID NO: 598989 - DNA, 75 bp, synthetic construct
  source 1..75: mol_type = other DNA
gcacccgttaatccttttcgatgccaatgaacccggcgaatttgcccgcgcggaagcgctgggtgggaagatcct

SEQ ID NO: 598990 - DNA, 75 bp, synthetic construct
  source 1..75: mol_type = other DNA
gcgcgagtgtgctcgtgaactctataacagatatgatgataaccgggtgccggatgaagaatatggggccatccc

SEQ ID NO: 598991 - DNA, 75 bp, synthetic construct
  source 1..75: mol_type = other DNA
ttctgagattttcagctcctggcgctataccggtgccagcctggaaagtgatgaccgcatgctgccgccaaaact

SEQ ID NO: 598992 - DNA, 75 bp, synthetic construct
  source 1..75: mol_type = other DNA
aattccggtttgggcagcaaacttcgtattgatggagtacggcactggcgcagtcatggcggttccgggtcacga

SEQ ID NO: 598993 - DNA, 75 bp, synthetic construct
  source 1..75: mol_type = other DNA
atctacattggtggtattgaacacgccattatgcacctgctctacttccgcttcttccacaaactgatgcgtgat

SEQ ID NO: 598994 - DNA, 75 bp, synthetic construct
  source 1..75: mol_type = other DNA
agaacgtgcagcagctactgaagccgttgcggaacgcagggtagagacaacaaaaggagccagggatgtacagca

SEQ ID NO: 598995 - DNA, 75 bp, synthetic construct
  source 1..75: mol_type = other DNA
acgcctgtccgtgccgtggggaaccggtacggccagctacagcggcagcatgagcaatgaccgttacaccaacac

SEQ ID NO: 598996 - DNA, 75 bp, synthetic construct
  source 1..75: mol_type = other DNA
agacaacagccatccgccgtttggtgccagcgtgacaaacgcgaaaggccgtgagctggggatggtggcagacag

SEQ ID NO: 598997 - DNA, 75 bp, synthetic construct
  source 1..75: mol_type = other DNA
agcgggcaggggacggacagtcagtttacctggagccgtttttacatgtaccgcgccatcccgcgctggcgcgca

SEQ ID NO: 598998 - DNA, 75 bp, synthetic construct
  source 1..75: mol_type = other DNA
ctgccggggaagtgtcctgggggatcagtaacacgtggtcgctttacggtggcggtatcgctgccggggattata

SEQ ID NO: 598999 - DNA, 75 bp, synthetic construct
  source 1..75: mol_type = other DNA
ggggaacccgcttgctggtcgatactgatggtgtcggaggcgtacctgtcgacggcggccgggtctccaccaacc

SEQ ID NO: 599000 - DNA, 75 bp, synthetic construct
  source 1..75: mol_type = other DNA
tatgccatcgattttaatacagatgttctggatgccgcagacaggcagaatattgatttttcgcggttctcccgg

SEQ ID NO: 599001 - DNA, 75 bp, synthetic construct
  source 1..75: mol_type = other DNA
ggacgaagtgcgcgccaaattatgcaaggcgtgtgcctttgcccgtcgtggcctgaccgatgcagacaacatggc

SEQ ID NO: 599002 - DNA, 75 bp, synthetic construct
  source 1..75: mol_type = other DNA
gcatggggaacaatgcccccggcgatggctggaattaccgtggccgcggacttatccagattaccggtttgaata

SEQ ID NO: 599003 - DNA, 75 bp, synthetic construct
  source 1..75: mol_type = other DNA
gcaaagcagaagatcaggcaatgtttattgctcaagtcgggcatgagtctgggggcttcaccaggttgcaggaga

SEQ ID NO: 599004 - DNA, 75 bp, synthetic construct
  source 1..75: mol_type = other DNA
atcgaaccactggacacactttgggaaattgtcgccaaccaggacattccggacgaagtgcgcgccaaattatgc

SEQ ID NO: 599005 - DNA, 75 bp, synthetic construct
  source 1..75: mol_type = other DNA
atttcaactacagtgtcagcggactggctaacttcgttcgggctgggcgtctcactcaggggcaggctaatgcac

SEQ ID NO: 599006 - DNA, 75 bp, synthetic construct
  source 1..75: mol_type = other DNA
atcaatggtggccggaacggcattgatgaccggcgcgcgcgatacatcactgccagtaaggtgctggcggtatga

SEQ ID NO: 599007 - DNA, 75 bp, synthetic construct
  source 1..75: mol_type = other DNA
actatcgtgattgcggaaacggtctgaagattgacctgctggagagccctgaactgctggcgcaggacgaatatg

SEQ ID NO: 599008 - DNA, 75 bp, synthetic construct
  source 1..75: mol_type = other DNA
tcattctcggcggttcgttcacccgcccggttccggcgcgtaagggcgacaccttccacgtcgattacggcaaca

SEQ ID NO: 599009 - DNA, 75 bp, synthetic construct
  source 1..75: mol_type = other DNA
gaacaggcaaaagccgcgcttaaacgccagctgctacccaattacgaggggtggattgaaggaacgctggaggga

SEQ ID NO: 599010 - DNA, 75 bp, synthetic construct
  source 1..75: mol_type = other DNA
cggtactgacgcaggctgggacggatgccgacgcggatttatccgcctttatcgaaccactggacacactttggg

SEQ ID NO: 599011 - DNA, 75 bp, synthetic construct
  source 1..75: mol_type = other DNA
aattgactgccgggattatccgctggcactgcgtatcggtgagtacgtcattcgtcaccggctggcactgccgga

SEQ ID NO: 599012 - DNA, 75 bp, synthetic construct
  source 1..75: mol_type = other DNA
tcgaacatcgcgaaagcggagctgaagaagcacctgataccgaattttgaaggctggatagacggcacgctggca

SEQ ID NO: 599013 - DNA, 75 bp, synthetic construct
  source 1..75: mol_type = other DNA
gcagcgcgaatgggttcgcctgaaaatcgccgaaggtcgcacgctgaaaggccacaaaatcggcctgacctcgaa

SEQ ID NO: 599014 - DNA, 75 bp, synthetic construct
  source 1..75: mol_type = other DNA
actggaaagtggctgatatctggacctggtatgcaaatcatcaaagtctctgcaacccactgtataacctaatgt

SEQ ID NO: 599015 - DNA, 75 bp, synthetic construct
  source 1..75: mol_type = other DNA
aagcactggaacaggggatcgacgcgatggtttcttcctggaaccgcgcggcaccaaacaccattccaaccgctg

SEQ ID NO: 599016 - DNA, 75 bp, synthetic construct
  source 1..75: mol_type = other DNA
gcttccgggtattacccgtgacgccatcatcaaactggcgaaagaactgggaattgaagtgcgtgagcaggtgct

SEQ ID NO: 599017 - DNA, 75 bp, synthetic construct
  source 1..75: mol_type = other DNA
tttaaaacaagacaagaacttgccgaccatctgaatgtatctaaaagcactatggcaaatagatatttgcgagac

SEQ ID NO: 599018 - DNA, 75 bp, synthetic construct
  source 1..75: mol_type = other DNA
agcaccaattgtcattcaagacgggttgatgacatacatttgtgatcaaaacattactgatgtattggatggaca

SEQ ID NO: 599019 - DNA, 75 bp, synthetic construct
  source 1..75: mol_type = other DNA
gccagaaaattgggaaaaaaaatctgcgttttgtttatcgactgggaagcacagttctcttgtaccatcgactat

SEQ ID NO: 599020 - DNA, 75 bp, synthetic construct
  source 1..75: mol_type = other DNA
cgtagcggcaaaaattgctgagcaagaaggtattgccgaagatggctatcgtctgatcatgaacaccaaccgcca

SEQ ID NO: 599021 - DNA, 75 bp, synthetic construct
  source 1..75: mol_type = other DNA
gtgaacgacgtgtcagctgagcatgagcaggcgctgggacgcatgatcaccgtagcggcaaaaattgctgagcaa

SEQ ID NO: 599022 - DNA, 75 bp, synthetic construct
  source 1..75: mol_type = other DNA
atgagccgcctgaacattatgccggtcaggatgaaattggcctgcgttacaacagccaccggacaaaacgagaag

SEQ ID NO: 599023 - DNA, 75 bp, synthetic construct
  source 1..75: mol_type = other DNA
caccagcgcctatatccgtccgctgatcttcgtaggtgatgttggcatgggcgttaaccctccagcgggatacac

SEQ ID NO: 599024 - DNA, 75 bp, synthetic construct
  source 1..75: mol_type = other DNA
ggaatcattttcacatttatctaaaggtaataaagctgaatttgcattagatatactttaccatgacgaaagcga

SEQ ID NO: 599025 - DNA, 75 bp, synthetic construct
  source 1..75: mol_type = other DNA
agaatttcagaaagttgaagtctgtccgcatagatattgcagaaaaaaccactctctttgttggtgctaacaata

SEQ ID NO: 599026 - DNA, 75 bp, synthetic construct
  source 1..75: mol_type = other DNA
cgtcatttttacccgctaatctttcagcaccaattgtcgttcaggatggtttagtgacatacatctgtgatcaga

SEQ ID NO: 599027 - DNA, 75 bp, synthetic construct
  source 1..75: mol_type = other DNA
tgacgcgctggattgcgagcctgaaaccacggatcgttttatgataaccgacgaagatggagaagatgctttcat

SEQ ID NO: 599028 - DNA, 75 bp, synthetic construct
  source 1..75: mol_type = other DNA
tcgaagacggatttcattacttaggtgattggcatacacataacgaagccgtagcaaccccatcaggaacggata

SEQ ID NO: 599029 - DNA, 75 bp, synthetic construct
  source 1..75: mol_type = other DNA
aagaaaatatttccaactgttatttatcagcagcagatgggaaaaaaatatatactttcaagtatatttcagata

SEQ ID NO: 599030 - DNA, 75 bp, synthetic construct
  source 1..75: mol_type = other DNA
atgttaaatacacaaaaaaacattaacgcggaaaaatataacgagtgggtgaaaaaattttctgagcagattttt

SEQ ID NO: 599031 - DNA, 75 bp, synthetic construct
  source 1..75: mol_type = other DNA
atgtcaaatattcagaaaaccattaacactgaaaaatataacgagtgggtgaaaaaattctctgagcagattctt

SEQ ID NO: 599032 - DNA, 75 bp, synthetic construct
  source 1..75: mol_type = other DNA
acactgaaaaatataacgagtgggtgaaaaaattctctgagcagattcttaaaataactggtgacgagaatgtgg

SEQ ID NO: 599033 - DNA, 75 bp, synthetic construct
  source 1..75: mol_type = other DNA
tggctgtatcgtcggcgctgacacgttgccgatacagtccgaacattatcaggtcatgcgtaccgatcagcgtcg

SEQ ID NO: 599034 - DNA, 75 bp, synthetic construct
  source 1..75: mol_type = other DNA
cctggcagcgacgccgtggcaaaaaataacccaacctgtgccgggtagcgcacaatcgataggcagtttttctaa

SEQ ID NO: 599035 - DNA, 75 bp, synthetic construct
  source 1..75: mol_type = other DNA
tattccgtcagacaaattactaggctacctaaaggtatgataaatatcagaagtaaagaaacttactttgaatgt

SEQ ID NO: 599036 - DNA, 75 bp, synthetic construct
  source 1..75: mol_type = other DNA
tagattttaaaatatgcatcagccaaagcatagtagatgagttattttctcaccgtcaaactcactgttttagta

SEQ ID NO: 599037 - DNA, 75 bp, synthetic construct
  source 1..75: mol_type = other DNA
gagttgaaaggtgatgttgaggaacaacatagaagagatttatttgaaaggatcaactcaggtgttaaaagatta

SEQ ID NO: 599038 - DNA, 75 bp, synthetic construct
  source 1..75: mol_type = other DNA
caccccccgtgctagatacgaagccatagcagtgggaactgctcttgccttaaaagccaatccacatctacaggc

SEQ ID NO: 599039 - DNA, 75 bp, synthetic construct
  source 1..75: mol_type = other DNA
gctttttaaagatttagttaccagtggtccatttcgtcataacggtaataactatctgacttctggattaacagt

SEQ ID NO: 599040 - DNA, 75 bp, synthetic construct
  source 1..75: mol_type = other DNA
ggtctgggctgcagaagacaacactccgggactggccgcccgcctcatcacactcacacacggctccggtctgct

SEQ ID NO: 599041 - DNA, 75 bp, synthetic construct
  source 1..75: mol_type = other DNA
caaatttcgcctcttccggatgatacatttagggagtccggaacaaaggtcaaaacagcccgccttgaaattgat

SEQ ID NO: 599042 - DNA, 75 bp, synthetic construct
  source 1..75: mol_type = other DNA
aggagtacttcgcactcaataaagatcgttacaaagcgatgtcagtggtcgccattgtcgagaaggtttttcggg

SEQ ID NO: 599043 - DNA, 75 bp, synthetic construct
  source 1..75: mol_type = other DNA
cagaaggcacgcatatcaccgtacgctggcagcgagtgccgcacggtgccgaatttagcgttgaagataacggac

SEQ ID NO: 599044 - DNA, 75 bp, synthetic construct
  source 1..75: mol_type = other DNA
aaggacatgcagggcaatactgtcagtaccgccggtctgaccctgccctcagccctgcagtccgcatcaggcacc

SEQ ID NO: 599045 - DNA, 75 bp, synthetic construct
  source 1..75: mol_type = other DNA
atgcactcagcggcggacgcctgtgggtctggtcaccagaaaacagcaccccggggctggcggcccgtctcacga

SEQ ID NO: 599046 - DNA, 75 bp, synthetic construct
  source 1..75: mol_type = other DNA
tgcagctgcacatgatgtcggcattcagccagtttgaacgagccttactgaaggaaaggcaggccgacggcatcg

SEQ ID NO: 599047 - DNA, 75 bp, synthetic construct
  source 1..75: mol_type = other DNA
acccagccgtgctatgacggtcagaacttcttcgacaaggagcatccggtatatccgaatgtggacggcacgggc

SEQ ID NO: 599048 - DNA, 75 bp, synthetic construct
  source 1..75: mol_type = other DNA
tgggtaagcgaaccattcagcaaatggaagcgcatggctactccatcgccaataaaacgtttgaaggcaccgtgg

SEQ ID NO: 599049 - DNA, 75 bp, synthetic construct
  source 1..75: mol_type = other DNA
aagctgcgttttcaaaaacagcagcatcatgcagcataccaatatacgccgcaagaatatgcagagagcttagca

SEQ ID NO: 599050 - DNA, 75 bp, synthetic construct
  source 1..75: mol_type = other DNA
cgtgggattttattatcaaaagcaaagtctgtcagggtggcgaccgtgataagactccctactcagtgaaacaaa

SEQ ID NO: 599051 - DNA, 75 bp, synthetic construct
  source 1..75: mol_type = other DNA
tcaggaagaggcattgtcaaaggcgggctttcagccggataaaatttgtgtcgagcacgccagtgcgaaaaacac

SEQ ID NO: 599052 - DNA, 75 bp, synthetic construct
  source 1..75: mol_type = other DNA
gggcggtattttctggtgtaacggactggcgcaacagattcttggcctgcgctggccggaagataacgggcagaa

SEQ ID NO: 599053 - DNA, 75 bp, synthetic construct
  source 1..75: mol_type = other DNA
agccattattactcacatgctgttgacgaaagtgaagctcgagccggtggaagaagatatcgacgagccagcacc

SEQ ID NO: 599054 - DNA, 75 bp, synthetic construct
  source 1..75: mol_type = other DNA
ttttcttaaacgttggtttgggagaaggctccgcgctaccggtgggcgtaccggttccgtggcctctcccgaacc

SEQ ID NO: 599055 - DNA, 75 bp, synthetic construct
  source 1..75: mol_type = other DNA
ttttcttaaacgttggtttgggagaaggctcagcattacccgttggtgtccctgttccctggccttctgtcacac

SEQ ID NO: 599056 - DNA, 75 bp, synthetic construct
  source 1..75: mol_type = other DNA
ccacagagcattaccagcattatcaaaatcagcttaacggtgctggtgataggttatgctctcggcaaaatcgcg

SEQ ID NO: 599057 - DNA, 75 bp, synthetic construct
  source 1..75: mol_type = other DNA
cacaagccgataatttattactgcagtggagtgcgcaacattgcccggattacttcgcgctgttagtgatggtta

SEQ ID NO: 599058 - DNA, 75 bp, synthetic construct
  source 1..75: mol_type = other DNA
gtggcaaacggaagaaccagaaagtgaagatgcccgatattaccagtgtgcgcaacagttgtactgcggcgaggg

SEQ ID NO: 599059 - DNA, 75 bp, synthetic construct
  source 1..75: mol_type = other DNA
gttcatgctaccgggctaatgaaacacgccagttcgctcggatgttgggacttgaatcgaagaacacggcggtgc

SEQ ID NO: 599060 - DNA, 75 bp, synthetic construct
  source 1..75: mol_type = other DNA
ggcacgcatatcaccgtacgctggcagcgagtgccgcacggtgccgaatttagcgttgaagataacggaccgggc

SEQ ID NO: 599061 - DNA, 75 bp, synthetic construct
  source 1..75: mol_type = other DNA
gaatttagcgttgaagataacggaccgggcattgcaccggagcatattccgcgcctgaccgagcgtttttatcgc

SEQ ID NO: 599062 - DNA, 75 bp, synthetic construct
  source 1..75: mol_type = other DNA
ccggaacgccaacagcccccacggcggcgcagtcggtcaacaatacacagattgccactacggcttttgtgaaat

SEQ ID NO: 599063 - DNA, 75 bp, synthetic construct
  source 1..75: mol_type = other DNA
ttcaatatgggaatcagtaggctcgtttaagggggcagtggtgcctttgaacccctcaacgaacaatagttattt

SEQ ID NO: 599064 - DNA, 75 bp, synthetic construct
  source 1..75: mol_type = other DNA
gtccggagagtaacaaaatagcagagagcttcgtgaaaacgataaagcgtgactacatcgtgttcatgcccaagc

SEQ ID NO: 599065 - DNA, 75 bp, synthetic construct
  source 1..75: mol_type = other DNA
ggttcggctatcaacgatatgcacccacgcaacggcgctgattacttcactcgtgtaacgctgacaatggccaaa

SEQ ID NO: 599066 - DNA, 75 bp, synthetic construct
  source 1..75: mol_type = other DNA
atgtgctgtgctacgtccgtgatgaaaatccgggcaaagcgggcttcgtaactggtgatgcagtcccggctgtcc

SEQ ID NO: 599067 - DNA, 75 bp, synthetic construct
  source 1..75: mol_type = other DNA
gatcctgcctgttcagttgggggcagctaccgctgatgcgtgtaccttcattccggttacgcgtgaccagtccga

SEQ ID NO: 599068 - DNA, 75 bp, synthetic construct
  source 1..75: mol_type = other DNA
ggctatccggcgattgccatttcagatgtcagccacatcacctgtgttggcaacgattttggctttaacgatatt

SEQ ID NO: 599069 - DNA, 75 bp, synthetic construct
  source 1..75: mol_type = other DNA
tgccgaccgcattcaggagatccacattaaagttatccatatcctgatccagttaattgaaaaagagatggttaa

SEQ ID NO: 599070 - DNA, 75 bp, synthetic construct
  source 1..75: mol_type = other DNA
gatcctgcctgttcagttgggggcagctaccgctgatgcgtgtacattcattccggttacgcgtgacaagtccga

SEQ ID NO: 599071 - DNA, 75 bp, synthetic construct
  source 1..75: mol_type = other DNA
ggttcacggatagcgggagagcgtgcggcccggataatgagtctgctggaaacggctaagctcaatggtctggag

SEQ ID NO: 599072 - DNA, 75 bp, synthetic construct
  source 1..75: mol_type = other DNA
tgaagaagacgaaaaagcgtcccgttcacgcccgatacgcaaacccttaccggctcatcttccacgggtggaaaa

SEQ ID NO: 599073 - DNA, 75 bp, synthetic construct
  source 1..75: mol_type = other DNA
acacgccgacgagaccgggctgcgtatcctggacacgaaaaaaggcggtaaatcacgttcgggttatctgtggtg

SEQ ID NO: 599074 - DNA, 75 bp, synthetic construct
  source 1..75: mol_type = other DNA
tatgggacgaaaggcctggttgttcgccggttcactgatggccggaaaccgcgcggcacagataatgagccttct

SEQ ID NO: 599075 - DNA, 75 bp, synthetic construct
  source 1..75: mol_type = other DNA
tggaagaaatgctgaaactggttcgtcaacagcgcttcggaaaaaaatgtggaacgctggctggtatgcaacgct

SEQ ID NO: 599076 - DNA, 75 bp, synthetic construct
  source 1..75: mol_type = other DNA
cggaaaaatgccggcacatatccttccgaaaagtgctgttgagccatcggtcatcgcacaggttgtcatcagcaa

SEQ ID NO: 599077 - DNA, 75 bp, synthetic construct
  source 1..75: mol_type = other DNA
tgccgaccgtattcaggaaattcacattaaagtgatccatattctgatccagttaatcgaaaaagagatggctaa

SEQ ID NO: 599078 - DNA, 75 bp, synthetic construct
  source 1..75: mol_type = other DNA
ggctacccggcgattgccatttcagatgtcagccacatcacctgtgttggcaatgattttggctttaacgatatt

SEQ ID NO: 599079 - DNA, 75 bp, synthetic construct
  source 1..75: mol_type = other DNA
agcacgatgaagcgggcgaactgctggaagtgatcaaacacaccaccaataacgtcacaccgccgccagaagcct

SEQ ID NO: 599080 - DNA, 75 bp, synthetic construct
  source 1..75: mol_type = other DNA
atacctgactatgctgcatgaagagctttccagccacatgatgaaagaagagcaaattctcttcccgatgatcaa

SEQ ID NO: 599081 - DNA, 75 bp, synthetic construct
  source 1..75: mol_type = other DNA
aaccgctgccgaactgactcgcgaagagaaaagcgccatttcccatcgtggtcaggcgttgaaactgctgctgga

SEQ ID NO: 599082 - DNA, 75 bp, synthetic construct
  source 1..75: mol_type = other DNA
tagcctggcgtgtcatatctcatcccgccagctaaaccacgtcgaagtagcagaactgctgcgtgtgaccgctga

SEQ ID NO: 599083 - DNA, 75 bp, synthetic construct
  source 1..75: mol_type = other DNA
tcccgccagctaacccacgtcgaagcggcagaactgcttcgtgtgactgctgaagcaatccagaacgaagcgtag

SEQ ID NO: 599084 - DNA, 75 bp, synthetic construct
  source 1..75: mol_type = other DNA
tagcctggcgtgtcatatcacatcccgccagctaacccacgtcgaagcggcagaactgcttcgtgtgactgctga

SEQ ID NO: 599085 - DNA, 75 bp, synthetic construct
  source 1..75: mol_type = other DNA
ttggtactgactcatccggtcgcgacctgcttgtgcgcgttgcgattggcgggcgtatctcactcatggtcggtg

SEQ ID NO: 599086 - DNA, 75 bp, synthetic construct
  source 1..75: mol_type = other DNA
aactgaacgaagcggcggaaacgctggctaactttttaaaagatgacgccaatattcacgccattcagcgcgcgg

SEQ ID NO: 599087 - DNA, 75 bp, synthetic construct
  source 1..75: mol_type = other DNA
cggcattaatgaactaattgatgacctgatggagcatatcagcctggaaaacaatgtgctgttcccgcgcgcgct

SEQ ID NO: 599088 - DNA, 75 bp, synthetic construct
  source 1..75: mol_type = other DNA
atgcgtaatattgaaaccctctcgactaaaagcggaccggatgacgcaggacttaatattttactgacagaggct

SEQ ID NO: 599089 - DNA, 75 bp, synthetic construct
  source 1..75: mol_type = other DNA
ctgaagcaatggcagctcgccttgatagcctggcgtgtcatatctcatcccgtcagctaaaccacgtggaagcgg

SEQ ID NO: 599090 - DNA, 75 bp, synthetic construct
  source 1..75: mol_type = other DNA
gcagaaatctcggcgcatctggacaaactgcttcctcagaccggggacgaagaaaaaacaacaacacgtcctgtt

SEQ ID NO: 599091 - DNA, 75 bp, synthetic construct
  source 1..75: mol_type = other DNA
atcaggagattgataattactgtcttcaaagaaatgaaaaaattactactgaagtgaagcaaagagtcttttctc

SEQ ID NO: 599092 - DNA, 75 bp, synthetic construct
  source 1..75: mol_type = other DNA
acctgagcagtatcaggcactgaacccgttctggatcatcattggtagtccgattctggccgctatctataacaa

SEQ ID NO: 599093 - DNA, 75 bp, synthetic construct
  source 1..75: mol_type = other DNA
ggtctgggtctggcaatggttgctcaactcgttccgcagcgtctgatgggcttcattatgggtagctggttcctg

SEQ ID NO: 599094 - DNA, 75 bp, synthetic construct
  source 1..75: mol_type = other DNA
tcacatgctgcgtatcctcgaccacggtgcgatctccatgggcgacaactgggacatgatgtacgtgggtatgta

SEQ ID NO: 599095 - DNA, 75 bp, synthetic construct
  source 1..75: mol_type = other DNA
cccgattgaatgctgggttaactcaagaacagttgggaatacttgttggcattgatgaatgctctgccagtgctc

SEQ ID NO: 599096 - DNA, 75 bp, synthetic construct
  source 1..75: mol_type = other DNA
tgctctttgtgatggtatgagccgggatgtaaaaaatcgtacatcagataccatagcaaacttgcttgcggacaa

SEQ ID NO: 599097 - DNA, 75 bp, synthetic construct
  source 1..75: mol_type = other DNA
ctttttgcaagaaaatggatgctcttagcggtggtatgagcagaaatgtaaagaatcggacatcagatagtatag

SEQ ID NO: 599098 - DNA, 75 bp, synthetic construct
  source 1..75: mol_type = other DNA
catttcgctgggattgccggaaatagtgcagaccgtcagcgcgttttacaacgggcaagacggcactcagccgcg

SEQ ID NO: 599099 - DNA, 75 bp, synthetic construct
  source 1..75: mol_type = other DNA
tgcagcagcagaccggcgcggcgaacctgaactatgactatgatgacgcacgcgggttggttcgacggccagcct

SEQ ID NO: 599100 - DNA, 75 bp, synthetic construct
  source 1..75: mol_type = other DNA
gccagtgggcgcgaaattcgcatctgacgccggtatcgtttctgtaggctggctggtagcaagctatggcctgca

SEQ ID NO: 599101 - DNA, 75 bp, synthetic construct
  source 1..75: mol_type = other DNA
gcgtgttcttgcagattggtgtcgccactgccgttattgctgtgctgatgctgctgaccgcgccgaaactgcatc

SEQ ID NO: 599102 - DNA, 75 bp, synthetic construct
  source 1..75: mol_type = other DNA
gggtatggcggctattgcggtcggtaacggcctgtttaaagctaacccgtcttctctgctttctacatgctatga

SEQ ID NO: 599103 - DNA, 75 bp, synthetic construct
  source 1..75: mol_type = other DNA
gtattcgcccgatgtataagtggacgccgatcatgagtaccctgatggaaatcggctacgacaacgttaaatctc

SEQ ID NO: 599104 - DNA, 75 bp, synthetic construct
  source 1..75: mol_type = other DNA
ccactaaacaaagcgattaactatatcctgaaccggcgcgatgaactgagctgcttcctgggggacggagccgtg

SEQ ID NO: 599105 - DNA, 75 bp, synthetic construct
  source 1..75: mol_type = other DNA
gttgtctgttttgactcgcagaccggacgggccctcagatatcctgaggcctggctgcagggctggcgtggtggc

SEQ ID NO: 599106 - DNA, 75 bp, synthetic construct
  source 1..75: mol_type = other DNA
agtattactgcctgtctatgcttccctatccttctggtcgactacacatgggccacgttcgcaactacaccatcg

SEQ ID NO: 599107 - DNA, 75 bp, synthetic construct
  source 1..75: mol_type = other DNA
ccgcagtacagttgcccctgttgccagaaggtgttcagtggtgaaatgccggctcacatcctcccgaaaagtgcc

SEQ ID NO: 599108 - DNA, 75 bp, synthetic construct
  source 1..75: mol_type = other DNA
caaccggcccccgactggcagacaccgctgaacgggattatttcatcctcagagaacggttgatgacaatgcaga

SEQ ID NO: 599109 - DNA, 75 bp, synthetic construct
  source 1..75: mol_type = other DNA
ttgatggtctccggttatattgttgtcgatactattatgattgaagggagagaacatcctcttgactacatgaga

SEQ ID NO: 599110 - DNA, 75 bp, synthetic construct
  source 1..75: mol_type = other DNA
aagtaaaagtgtccgggatagttatcagtgctgtggagaaaaaaatgactgaccagagtataggtttgttaataa

SEQ ID NO: 599111 - DNA, 75 bp, synthetic construct
  source 1..75: mol_type = other DNA
cgatgatcaaacaaggcatgggcagccaggcaatggggccaatcagcgtaatggaaagcgagcacgatgaagcgg

SEQ ID NO: 599112 - DNA, 75 bp, synthetic construct
  source 1..75: mol_type = other DNA
aaatgtttaaagtcgcaaatgggaaatacttagggagcattttgtatattgcttttgttgtcaaaaaattactat

SEQ ID NO: 599113 - DNA, 75 bp, synthetic construct
  source 1..75: mol_type = other DNA
agatcgtcctttttgcgcttcgtaagtttgctattgcttctaacgcatcgctgactgatgttgagccgcaatcaa

SEQ ID NO: 599114 - DNA, 75 bp, synthetic construct
  source 1..75: mol_type = other DNA
ttttccgagattgtctccctgctccagccggtcgcaggtgcacatccggcgattgctcactttttacaacagcct

SEQ ID NO: 599115 - DNA, 75 bp, synthetic construct
  source 1..75: mol_type = other DNA
tgccgatgcgcgcaaatcgacgccggaacagattgataaaatcgctcaggggcacgtctggacgggtcaggatgc

SEQ ID NO: 599116 - DNA, 75 bp, synthetic construct
  source 1..75: mol_type = other DNA
tgcttggcgccagttccgatcgtctgcaggaaaactcgctgtttgatatcgtgaacacgattcgtcaggctaaag

SEQ ID NO: 599117 - DNA, 75 bp, synthetic construct
  source 1..75: mol_type = other DNA
aaaagctctgaccaaagagttcggctggagtaagactgataaaaattatcgcgccatcagttattacgattacgc

SEQ ID NO: 599118 - DNA, 75 bp, synthetic construct
  source 1..75: mol_type = other DNA
aagcgaaagcgacaagctggcggcctttaacgatccgcaaaaccgttacgcgttttgcctgacctgcgccaacgt

SEQ ID NO: 599119 - DNA, 75 bp, synthetic construct
  source 1..75: mol_type = other DNA
tggcctcggtggcttcaaccgttaaaagcgaaagcgacaagctggcggcctttaacgatccgcaaaaccgttacg

SEQ ID NO: 599120 - DNA, 75 bp, synthetic construct
  source 1..75: mol_type = other DNA
gaaagctaacggcctggtcgatagcctcggtgatttcgatgatgcggtcgcaaaagcggcagaactggcaaaact

SEQ ID NO: 599121 - DNA, 75 bp, synthetic construct
  source 1..75: mol_type = other DNA
agtttcgatattcgtggccttactgatgaattttctgttgccgagaaactgtcattacttcaggcaccggactct

SEQ ID NO: 599122 - DNA, 75 bp, synthetic construct
  source 1..75: mol_type = other DNA
ttgaacgtgcttatcgcttcaaccacactcgtgaggtggtaaacctcatcaacaaatatctctttaaagaagaca

SEQ ID NO: 599123 - DNA, 75 bp, synthetic construct
  source 1..75: mol_type = other DNA
ctacgattctgaaggtggaaaccagccgttttatttgtcaccagacccgaaacaagctcagatgatcatcactac

SEQ ID NO: 599124 - DNA, 75 bp, synthetic construct
  source 1..75: mol_type = other DNA
catgtgttccgcgtgggtacgtataaatctgccgttgaaccgtttattcgtgatgatatgtcaccggcagcccgc

SEQ ID NO: 599125 - DNA, 75 bp, synthetic construct
  source 1..75: mol_type = other DNA
acgaccgcaatatcaccggtatcgtgatggatctgaaaaacttcgcaggcggcgaccagccgtctatgcagtaca

SEQ ID NO: 599126 - DNA, 75 bp, synthetic construct
  source 1..75: mol_type = other DNA
caaaaaatgatctaaatacccttgaaaataagtcagcacttacttatgatcgtggtgcagcccaagaaagcgggc

SEQ ID NO: 599127 - DNA, 75 bp, synthetic construct
  source 1..75: mol_type = other DNA
tgttaaaaggatatttgagttactaagtttcgataaatctaccggggtatttagatggaaagttcccactcaggg

SEQ ID NO: 599128 - DNA, 75 bp, synthetic construct
  source 1..75: mol_type = other DNA
gctgtccgtgccatgggggaacggaacgctcagttacaacggtggtatgagtaatgaccgttacaccaatacagt

SEQ ID NO: 599129 - DNA, 75 bp, synthetic construct
  source 1..75: mol_type = other DNA
tgccgcaggcctgtctgacaccagaagttgttcagcgtatagggctgacgccagcatcactggataaagtgacat

SEQ ID NO: 599130 - DNA, 75 bp, synthetic construct
  source 1..75: mol_type = other DNA
catcctcagagaacggttgatgacaatgcagaagcagctggaaggggcacaggactatatccgcactcagtgcct

SEQ ID NO: 599131 - DNA, 75 bp, synthetic construct
  source 1..75: mol_type = other DNA
acgcttcctggttaccgccgtcccgctgggataacggtattccgggactgttgttcgactacaacatcaacggca

SEQ ID NO: 599132 - DNA, 75 bp, synthetic construct
  source 1..75: mol_type = other DNA
agcgtaggtaaagcggtttatgtttccgctgtacaaatcgacacagcgaaaaaaacacaggcacaggtttataag

SEQ ID NO: 599133 - DNA, 75 bp, synthetic construct
  source 1..75: mol_type = other DNA
cgcgaaaaaatgcgccgcctttgcgggttctggcgtatccagccgctggcgcgataagcagggggaacgatggca

SEQ ID NO: 599134 - DNA, 75 bp, synthetic construct
  source 1..75: mol_type = other DNA
gtgggatatatcatgcccgggcaatatcaaatggaattaatagtgaatgggcaaggcgtttcgcccactgcgttt

SEQ ID NO: 599135 - DNA, 75 bp, synthetic construct
  source 1..75: mol_type = other DNA
gaccgaaatgagtgataccaacctgaccatcgttactgataaacggtcttataacatcgtgcttcactatatcgg

SEQ ID NO: 599136 - DNA, 75 bp, synthetic construct
  source 1..75: mol_type = other DNA
cactctccagcttacttatctctatccatttgaggatatgaaaaaggctaataaaacgctggaaagtaaccgcgt

SEQ ID NO: 599137 - DNA, 75 bp, synthetic construct
  source 1..75: mol_type = other DNA
caagatggggcaaacaactgcgtgatgagcgtcagggaaaaacaccaaaagcctatccgatgacgccagaacaaa

SEQ ID NO: 599138 - DNA, 75 bp, synthetic construct
  source 1..75: mol_type = other DNA
aactcttgaaagcgatgatcgcatgctgccgccaaaactccggggttatgctccacaggtatcaggggttgcgga

SEQ ID NO: 599139 - DNA, 75 bp, synthetic construct
  source 1..75: mol_type = other DNA
aacctcattggtttaacacaagaatcagtaaagaaagttacttactggaaagaaggacaatgtgctgattttagc

SEQ ID NO: 599140 - DNA, 75 bp, synthetic construct
  source 1..75: mol_type = other DNA
atggaattgaacgacaaacaaattaaggatctggtggcgcgacgccacccggaatacgaaaagaaaaaagaacat

SEQ ID NO: 599141 - DNA, 75 bp, synthetic construct
  source 1..75: mol_type = other DNA
aaaaaaggcaccaaagaggtggcagaagcctatctgaaatatctctactcgccagaaggtcaggagattgcagcc

SEQ ID NO: 599142 - DNA, 75 bp, synthetic construct
  source 1..75: mol_type = other DNA
ggcggcgaatgagctggggaaagataaattcgaaatcgttacgccgagtgagtctattcttgcagaaccaaccgt

SEQ ID NO: 599143 - DNA, 75 bp, synthetic construct
  source 1..75: mol_type = other DNA
aatggcaggtggcgcccgttacgacctgaaggggcaaccgtgcggagaggtgacaccacatgaacagaaagaggc

SEQ ID NO: 599144 - DNA, 75 bp, synthetic construct
  source 1..75: mol_type = other DNA
tcaatgctaaatactcccgtgataaagaatccgaagcagatgatttctcttttgatctgttgaagaaacgtggca

SEQ ID NO: 599145 - DNA, 75 bp, synthetic construct
  source 1..75: mol_type = other DNA
agcgacgtcaacgcatgggcgatggcgaacggttgtgttcgtgtctacagtggcctgatggacatgatgaacgac

SEQ ID NO: 599146 - DNA, 75 bp, synthetic construct
  source 1..75: mol_type = other DNA
ctttctatatattttcaatcacctattatattgcgtaaggttcacgtatcgaaacacaaagtaaatcttaagcca

SEQ ID NO: 599147 - DNA, 75 bp, synthetic construct
  source 1..75: mol_type = other DNA
caccgcctgcgtgtgccggtggtgacccgtggtgcaggcaccgggctttctggtggcgcgctgccgctggaaaaa

SEQ ID NO: 599148 - DNA, 75 bp, synthetic construct
  source 1..75: mol_type = other DNA
aagtgaccggtttaccagcaattgccgacgactctggtctggcggtagatgtgcttggcggtgcgcctgggattt

SEQ ID NO: 599149 - DNA, 75 bp, synthetic construct
  source 1..75: mol_type = other DNA
actggcggctttggttatgatccaatcttcttcgtaccttccgaagggaaaaccgctgccgaactgacccgcgaa

SEQ ID NO: 599150 - DNA, 75 bp, synthetic construct
  source 1..75: mol_type = other DNA
cgatctcccaggccgttgcgccgcataatctctactacgcaccggacccttcctcacaaatagcctgttcaattg

SEQ ID NO: 599151 - DNA, 75 bp, synthetic construct
  source 1..75: mol_type = other DNA
gggccggtcgcaaaaatgcgttcccggcggtaggacgaatctccccggattactactgcatggatggcaccatcc

SEQ ID NO: 599152 - DNA, 75 bp, synthetic construct
  source 1..75: mol_type = other DNA
gttggtgacatcatcgccaatggcattatccccggcgggctggagatgatggataacctgtcgatccgcgcggcg

SEQ ID NO: 599153 - DNA, 63 bp, synthetic construct
  source 1..63: mol_type = other DNA
atgttgcgggggctttatccctggtggcattggttgctggaaagagaaaacccccgcacgttg

SEQ ID NO: 599154 - DNA, 75 bp, synthetic construct
  source 1..75: mol_type = other DNA
aactcggtaccgcaagcgtgcgactttcccgcagaaaacgggacaagaaaggggccaacagcgttctgcgcatag

SEQ ID NO: 599155 - DNA, 75 bp, synthetic construct
  source 1..75: mol_type = other DNA
atttagacgtgccttatgtttttgatacggtaaaaccattggtacgtaatgtgtttagtgcctgtatttggatcc

SEQ ID NO: 599156 - DNA, 75 bp, synthetic construct
  source 1..75: mol_type = other DNA
gattagaagttgattatcattataatcctcctggaatccgtggtgaaccaagatacttggagggcgtggcacgtt

SEQ ID NO: 599157 - DNA, 75 bp, synthetic construct
  source 1..75: mol_type = other DNA
gggccacactggagaatataatttttcctgacacggggcgggcattctccgcggcactcctcaatgagccagtcg

SEQ ID NO: 599158 - DNA, 75 bp, synthetic construct
  source 1..75: mol_type = other DNA
gtgatgccagttccaagtggtattctggtaaacatacgcaaaatcattagtccttattttggctttgctacagat

SEQ ID NO: 599159 - DNA, 75 bp, synthetic construct
  source 1..75: mol_type = other DNA
attacccggcaccatttaataattctccgttttacggcggcattcaggaaacaacgaatgtcaggcttggggatg

SEQ ID NO: 599160 - DNA, 75 bp, synthetic construct
  source 1..75: mol_type = other DNA
cattggactggtatgctactgaaggggctataaggcgttttggattgccatttgggggtcggttccggctgaggg

SEQ ID NO: 599161 - DNA, 75 bp, synthetic construct
  source 1..75: mol_type = other DNA
tatcgaaatttaaaaagtgagttagtagagttaaataatgagctaacaagatgtctgaaattattttcggactca

SEQ ID NO: 599162 - DNA, 75 bp, synthetic construct
  source 1..75: mol_type = other DNA
atgaccaatctccggttcagttggacccacacagcgaagttggtgcatttaaagtcgttggacactgcgcatggg

SEQ ID NO: 599163 - DNA, 75 bp, synthetic construct
  source 1..75: mol_type = other DNA
agaggatattgagcaagtactgactcaggcgatggaagacaaaacccgtggctatggtggtcaggatattgttct

SEQ ID NO: 599164 - DNA, 75 bp, synthetic construct
  source 1..75: mol_type = other DNA
gccgggcattaaatacgctggaaatgatggcggatatggccgaagtcgatgacagcggtaagcgtgtcctgaaac

SEQ ID NO: 599165 - DNA, 75 bp, synthetic construct
  source 1..75: mol_type = other DNA
cttcaacaagagccagcaggatgcttttctaccgcatattgaagatggcaccatcactttcattggcgcgacgac

SEQ ID NO: 599166 - DNA, 75 bp, synthetic construct
  source 1..75: mol_type = other DNA
atatcaaaccgtatctcccctttgccgaatcgcttcccgatgccagtgccagctatgcgcaaagtgcgccagcgg

SEQ ID NO: 599167 - DNA, 75 bp, synthetic construct
  source 1..75: mol_type = other DNA
cagctgatatgaaaaaagttaaagcctggaacggacagtatttggacttcagtaaacctaggtcaatgagggttg

SEQ ID NO: 599168 - DNA, 75 bp, synthetic construct
  source 1..75: mol_type = other DNA
caactgatatgaaaaaagttaaagcctggaacggacagtacctggacttcagcagaccgagatcgatgagggttg

SEQ ID NO: 599169 - DNA, 75 bp, synthetic construct
  source 1..75: mol_type = other DNA
atccggaaggcacgctgtcaagctacatctatcctgcgatgtatggtgcctatggcttcacttattccgatgata

SEQ ID NO: 599170 - DNA, 75 bp, synthetic construct
  source 1..75: mol_type = other DNA
gtgtgcattatgcaaaatcacagcgtctcttagaaattaatcatgcgcacttgcagttaatggaatccttattgg

SEQ ID NO: 599171 - DNA, 75 bp, synthetic construct
  source 1..75: mol_type = other DNA
tgagtaaactcgatatcgggccgctgtatcgctattacaaacgtggagaaaaggggaattcgctggctgacttac

SEQ ID NO: 599172 - DNA, 75 bp, synthetic construct
  source 1..75: mol_type = other DNA
acagattgcagaggtttttttcacaaataacccccacgcacgggttagtgcggcggtggcacgtattaacgaaat

SEQ ID NO: 599173 - DNA, 75 bp, synthetic construct
  source 1..75: mol_type = other DNA
gccgaaactgcgcaaatggaaccctatcaacacactgttaaccgagttgagcaaatcacggccccggtcaacgat

SEQ ID NO: 599174 - DNA, 75 bp, synthetic construct
  source 1..75: mol_type = other DNA
agtctgggtaatgaatttagccatgaagtcggccacaactatgggctcggtcattttgtcggcggtttctcggga

SEQ ID NO: 599175 - DNA, 75 bp, synthetic construct
  source 1..75: mol_type = other DNA
agaagctcgtgatggtaataacaaacttctcggtacgttgaagctttctcctccttcggagctaccagatacctt

SEQ ID NO: 599176 - DNA, 75 bp, synthetic construct
  source 1..75: mol_type = other DNA
tttcacaatgtatactccgaattcatcggctatcatccagcgtttttttgaaaataaagctgtgttcgatagccg

SEQ ID NO: 599177 - DNA, 75 bp, synthetic construct
  source 1..75: mol_type = other DNA
gtgaactggagaataatcgaatcacttatgctcagcatatttggagtgctgaactgcctgcgcactggatcgtgc

SEQ ID NO: 599178 - DNA, 75 bp, synthetic construct
  source 1..75: mol_type = other DNA
gggtaacaccctgctgttcaaatatgtaaatggtcagtggttccgctccggtgagctggagaataaccgaatcgc

SEQ ID NO: 599179 - DNA, 75 bp, synthetic construct
  source 1..75: mol_type = other DNA
aatcaccggctacgatacagacgccggggggatcaggacgttttacaaggcagacatcggggactacctggaaat

SEQ ID NO: 599180 - DNA, 75 bp, synthetic construct
  source 1..75: mol_type = other DNA
cggttataccctgcgtcagttgtgtcaggaaatgcatgatttgtatccccgccacaacgtgaaacaactgcaaaa

SEQ ID NO: 599181 - DNA, 75 bp, synthetic construct
  source 1..75: mol_type = other DNA
gtgtctatatcgaagaacatgatggtcgtaagcaagtctggtgctatgtcatcaagccccgtgatgcgcaaagca

SEQ ID NO: 599182 - DNA, 75 bp, synthetic construct
  source 1..75: mol_type = other DNA
atattacaacttcaacacccggaaaccgccgtttgatgacgcccgtgtgcggcgggcgttgtatcttacggtcga

SEQ ID NO: 599183 - DNA, 75 bp, synthetic construct
  source 1..75: mol_type = other DNA
gaaggtgcgcttccttatcctccgggtgtgctgtgtgttgttccgggtgaaatctggggtggtgctgttctgcgt

SEQ ID NO: 599184 - DNA, 75 bp, synthetic construct
  source 1..75: mol_type = other DNA
ccggttataccctgcgtcagttgtgtcaggaaatgcatgatttgtatgcccgccacaacgtgaaacaactgcaaa

SEQ ID NO: 599185 - DNA, 75 bp, synthetic construct
  source 1..75: mol_type = other DNA
atggtcgtaagcaagtctggtgctatgtcatcaagccccgtgatgcgcaaagcaccctgttaaaaggggaaaaat

SEQ ID NO: 599186 - DNA, 75 bp, synthetic construct
  source 1..75: mol_type = other DNA
aaaatgcatgaaggtgtcagcggtcgtaatatgtggatggattgtgtggtaaatggcattaatgcccgcaaactg

SEQ ID NO: 599187 - DNA, 75 bp, synthetic construct
  source 1..75: mol_type = other DNA
aagccaactacgcctatttacgcggtgaagtggagctggttcgtctgccggatgcagaaggccgtatcgctgccg

SEQ ID NO: 599188 - DNA, 75 bp, synthetic construct
  source 1..75: mol_type = other DNA
gtgccatggtatttgatgtggtcgcgcagggcaaccagcctggatatgtaacggttaaccggttggttttgtccc

SEQ ID NO: 599189 - DNA, 75 bp, synthetic construct
  source 1..75: mol_type = other DNA
ggcgatagccttgtcttccgaatggaaaaaatggcttggcgcacaggtgacgctgcgcacgatggagtggaaaac

SEQ ID NO: 599190 - DNA, 75 bp, synthetic construct
  source 1..75: mol_type = other DNA
atattacaacttcaacacccggaaaccgccgtttgatgatgcccgtgtgcggcgggcattgtatcttacggttga

SEQ ID NO: 599191 - DNA, 75 bp, synthetic construct
  source 1..75: mol_type = other DNA
agtaagccagaacatatggtttacaacggtgcttttgttcttgataaatgggtagttaacgaaaagattacagcc

SEQ ID NO: 599192 - DNA, 75 bp, synthetic construct
  source 1..75: mol_type = other DNA
tgcaaagtcaaagaccggagccagcagcatgggcgatggagaaagcccaagacttacagcagatgctgaactcaa

SEQ ID NO: 599193 - DNA, 75 bp, synthetic construct
  source 1..75: mol_type = other DNA
acgatgagtgggggcgtggcgctggctacacttgcctggggaggacacgccgttatgcatgacggtctgcattac

SEQ ID NO: 599194 - DNA, 75 bp, synthetic construct
  source 1..75: mol_type = other DNA
ggtattgcctacggtccggaaatggcggcgaaagcgcaggcagacgccaaagcagcaattgacgaagttgttaca

SEQ ID NO: 599195 - DNA, 75 bp, synthetic construct
  source 1..75: mol_type = other DNA
tgatggtggttttcgcgcgcatcacaacgccctgatttatgccgctaatgaactggaaaatgcccaggctttcgg

SEQ ID NO: 599196 - DNA, 75 bp, synthetic construct
  source 1..75: mol_type = other DNA
ttaacccccttgttcaacagtgcctgggggggcatattgcttgctaaaacggctctgtttgttctgatgcttctg

SEQ ID NO: 599197 - DNA, 75 bp, synthetic construct
  source 1..75: mol_type = other DNA
atcctgctgatgcgcagaaacgcgcataatgcacagagcgtcagtgtgatatctgactctctggcaaaatttgca

SEQ ID NO: 599198 - DNA, 75 bp, synthetic construct
  source 1..75: mol_type = other DNA
gctgtactgatcggcatcctgctgacaggaatgaatatgctgctggtatccaatgccatgagcggggtgacagat

SEQ ID NO: 599199 - DNA, 75 bp, synthetic construct
  source 1..75: mol_type = other DNA
ggcgacggcttcgatctcaacgactttcttgagcagctgcgccagatgaaaaatatgggcggcatggctagcctg

SEQ ID NO: 599200 - DNA, 75 bp, synthetic construct
  source 1..75: mol_type = other DNA
tggccgtggacgcctcactgaagacaacgtaaaagatacgctgcgcgaagtgcgcatggcgttgctggaggcgga

SEQ ID NO: 599201 - DNA, 75 bp, synthetic construct
  source 1..75: mol_type = other DNA
aagcgttcaatgaagcgttaccgcttaccggcgtagtgttgactaaagtggacggcgatgcgcgtggcggtgcgg

SEQ ID NO: 599202 - DNA, 75 bp, synthetic construct
  source 1..75: mol_type = other DNA
atgatgacggaaacccacagtcgcgcagcgctcgggaagtgctggacgaagtgagcagagagaatgagcaggcag

SEQ ID NO: 599203 - DNA, 75 bp, synthetic construct
  source 1..75: mol_type = other DNA
acccgggaggaggcccgtcatctggaagcgttcctggcagagcacggtggctggaaggcatttttgtggaagcca

SEQ ID NO: 599204 - DNA, 75 bp, synthetic construct
  source 1..75: mol_type = other DNA
tggccgtggacgccttactgaagacaacgttaaagatacgctgcgcgaagtgcgcatggcgctgttggaggcgga

SEQ ID NO: 599205 - DNA, 75 bp, synthetic construct
  source 1..75: mol_type = other DNA
actccaggcacttcagtccgaaagcctgattaccacgggcgatccgctttcaggcattgcggctgtccggccatc

SEQ ID NO: 599206 - DNA, 75 bp, synthetic construct
  source 1..75: mol_type = other DNA
tgaaagcccacgacgttatcgttattgcggcaccgatgtataacttcaacatctcgactcagctgaaaaactatt

SEQ ID NO: 599207 - DNA, 75 bp, synthetic construct
  source 1..75: mol_type = other DNA
tgacgacgatgtggcggcaacgattaaatccgtgcgccagcagttactcaatctcaatatcactggtcgcttacc

SEQ ID NO: 599208 - DNA, 75 bp, synthetic construct
  source 1..75: mol_type = other DNA
gccacaaccgtctccgccagtccaggggtgaaatgtacatcccgcaaaactttttgcccaaaagcaggcaaaaac

SEQ ID NO: 599209 - DNA, 75 bp, synthetic construct
  source 1..75: mol_type = other DNA
atgaaaatagattacgatgaagtattaagtattctcacaacttttcaggatgctgaaacacctttccttacacta

SEQ ID NO: 599210 - DNA, 75 bp, synthetic construct
  source 1..75: mol_type = other DNA
acggaaggccaagtaagtagggcggagctacgaccccatgattgggagcttatttggcctgagtatgcgagcggc

SEQ ID NO: 599211 - DNA, 75 bp, synthetic construct
  source 1..75: mol_type = other DNA
cctgcccctgccatctgccgattctcgccgccgtgctggccgggacgaccgccggtgccttccttggcgagcatt

SEQ ID NO: 599212 - DNA, 75 bp, synthetic construct
  source 1..75: mol_type = other DNA
aggcaattgctattgatgctgttcttggggtggcgtttggtggtgtcggcagatttattaactctcgcggtgagg

SEQ ID NO: 599213 - DNA, 75 bp, synthetic construct
  source 1..75: mol_type = other DNA
cagaagacctatttacagtcaaaggcagtaatacgaacctccaaccactgattgatgaggttgggcgatcctaca

SEQ ID NO: 599214 - DNA, 75 bp, synthetic construct
  source 1..75: mol_type = other DNA
cccgctggaagataacccgctgcgcctgaacatggattacgccaccgcgctcgacgtaatgtttgccgaaggtaa

SEQ ID NO: 599215 - DNA, 75 bp, synthetic construct
  source 1..75: mol_type = other DNA
ttccggtcgcgccgcctctgtcgcgccgtggcctgcgctcccggcatcccggcaaaaggccgccgggatgtaagg

SEQ ID NO: 599216 - DNA, 75 bp, synthetic construct
  source 1..75: mol_type = other DNA
tactttccgctatacggagaacggtccggaaggcctggtcaccggtaaaaaagccatcgttatcaccagccgcgg

SEQ ID NO: 599217 - DNA, 75 bp, synthetic construct
  source 1..75: mol_type = other DNA
cattcctgggctttatcggcattaccgatgtgaaatttgtcttcgccgaagggatcgcgtacggcccggaaatgg

SEQ ID NO: 599218 - DNA, 75 bp, synthetic construct
  source 1..75: mol_type = other DNA
acattatacgaagcacttcgcacggttgatcgtctgcttcgtgggcaaagttttattaaacaggctgatttataa

SEQ ID NO: 599219 - DNA, 75 bp, synthetic construct
  source 1..75: mol_type = other DNA
cccatttaccggaaaccgcatttttgctctgagcaacggcgacaatcagtttggacaggatttcacattgtacga

SEQ ID NO: 599220 - DNA, 75 bp, synthetic construct
  source 1..75: mol_type = other DNA
tttttgacatgaagcaacagcgcaattcttcacaacagcgcttccgcaacggcgcagaacgccacgctaaccgct

SEQ ID NO: 599221 - DNA, 75 bp, synthetic construct
  source 1..75: mol_type = other DNA
attgcacgaagcattaagaacagcagaccgattaatcagcggtcgtagttttcagcatcctcaatatcgcaggtg

SEQ ID NO: 599222 - DNA, 75 bp, synthetic construct
  source 1..75: mol_type = other DNA
aaaaagcaggaatcgtggttcacagatgccagcgcaacccatttaccggaaaccgcatttttgcactgagcaacg

SEQ ID NO: 599223 - DNA, 75 bp, synthetic construct
  source 1..75: mol_type = other DNA
tggctgattaatgatgccggaattgtcattcaccggggcgcacgcaacccgattaccggaaatacctgttactcc

SEQ ID NO: 599224 - DNA, 75 bp, synthetic construct
  source 1..75: mol_type = other DNA
aggcttttgatgagaacgttaaccgtatccggcgagaacgtctgccaaaagaactgggctatgcgttgaaacaac

SEQ ID NO: 599225 - DNA, 75 bp, synthetic construct
  source 1..75: mol_type = other DNA
tatccggcgagaacgtctgccaaaagaactggcatccgcgctgaaacaacaactgaggattgcaataaaacgatg

SEQ ID NO: 599226 - DNA, 75 bp, synthetic construct
  source 1..75: mol_type = other DNA
taaaaacgccattccggcggcttcagcaatgacgattaaccgcgtggccacaacggcgattaatcagtcttcatc

SEQ ID NO: 599227 - DNA, 75 bp, synthetic construct
  source 1..75: mol_type = other DNA
actttaaaacctcagaactatctgggttaaatatggaaaaatctaacataagagactgttctttcactggatgta

SEQ ID NO: 599228 - DNA, 75 bp, synthetic construct
  source 1..75: mol_type = other DNA
ggacaggatttcacactgcacgaagccttgcgaactgccgaccgcttaatcgaggggcgcagctttcagcatacc

SEQ ID NO: 599229 - DNA, 75 bp, synthetic construct
  source 1..75: mol_type = other DNA
atgaaactacagcgcaattcttcacagccgcgcttccgcaacggtgcggaacgccacgctaaccgtttcgctacc

SEQ ID NO: 599230 - DNA, 75 bp, synthetic construct
  source 1..75: mol_type = other DNA
agtgcatcacgtagtaacagccgctataacctgaacgagacgcacgcaacaccagatgggcacgctgtaaaacaa

SEQ ID NO: 599231 - DNA, 75 bp, synthetic construct
  source 1..75: mol_type = other DNA
ttcgcggcgtaagcgtgatagcggcagctctggaagcgttctgaagatcgggaatttcagcttccctggcgcttt

SEQ ID NO: 599232 - DNA, 75 bp, synthetic construct
  source 1..75: mol_type = other DNA
gggcatttattcagcgattaaaaatggtcgctggcatgtcatgcagcgtgtggccgggaaaaaccgttaccccat

SEQ ID NO: 599233 - DNA, 75 bp, synthetic construct
  source 1..75: mol_type = other DNA
agggtgagccggaaactggtaaaggaacggtccagactgaaacgggccacggtcagaaatccgaatgccagaatt

SEQ ID NO: 599234 - DNA, 75 bp, synthetic construct
  source 1..75: mol_type = other DNA
atgaccattaaccgcgtggccacaacggcgattaatcagtcttcgtcacaggttgcccgggaaaccagggtgaga

SEQ ID NO: 599235 - DNA, 75 bp, synthetic construct
  source 1..75: mol_type = other DNA
atggaaaagaaactgggactgagcgcgctcactgcgctggtattaagctcaatgctgggcgcaggtgttttcagt

SEQ ID NO: 599236 - DNA, 75 bp, synthetic construct
  source 1..75: mol_type = other DNA
gggtctgtttgttgtgctggcgatgatgatgttcaaactggataccttcaagctcgacttcaccggacttgcact

SEQ ID NO: 599237 - DNA, 75 bp, synthetic construct
  source 1..75: mol_type = other DNA
agcagcgattccgcaacgggacggaacgccacgctaaccgcttcgctaccagtgcatcacgtagcagctctcgct

SEQ ID NO: 599238 - DNA, 75 bp, synthetic construct
  source 1..75: mol_type = other DNA
gatgagaatgttgaccgtatccggtgtgaacgactgcctaaagaactggcatccgcgctgaaacaacaactgagg

SEQ ID NO: 599239 - DNA, 75 bp, synthetic construct
  source 1..75: mol_type = other DNA
aataaacatgatgtcggcaaagcaacacttctggcggtactttccgcgctgggcgtttatttactggtaactctg

SEQ ID NO: 599240 - DNA, 75 bp, synthetic construct
  source 1..75: mol_type = other DNA
tccttgcagccactcataaagcattcccgcgcatttttgcgcgccagaacgcacaagctgcgccatccgcttcac

SEQ ID NO: 599241 - DNA, 75 bp, synthetic construct
  source 1..75: mol_type = other DNA
tggttaatatcttggatcatatcgtataaagatgacccacgagaccacagcggtatgaccgaagaagaactagaa

SEQ ID NO: 599242 - DNA, 75 bp, synthetic construct
  source 1..75: mol_type = other DNA
tatttaatttgtgatgagcaaattaaaaatgaaataagaaaggaaaacccagcaataaaaatatcgagaggaata

SEQ ID NO: 599243 - DNA, 75 bp, synthetic construct
  source 1..75: mol_type = other DNA
agtatttttttgcccgtctgctgcgccctgatacccagagctgctattgcacggcggtaaatcagtttacccact

SEQ ID NO: 599244 - DNA, 75 bp, synthetic construct
  source 1..75: mol_type = other DNA
tggatacaacgtgcagttgctcaatgaagtcaccggcgaaccgtgcggcgtcaatgagaaagggatgttggtggt

SEQ ID NO: 599245 - DNA, 75 bp, synthetic construct
  source 1..75: mol_type = other DNA
atggctacaacgtgcagttgctcaatgaagtcaccggcgaaccgtgcggcgtcaatgagaaagggatgctggtgg

SEQ ID NO: 599246 - DNA, 75 bp, synthetic construct
  source 1..75: mol_type = other DNA
gccgggcatcggctggggacgcgcgagattgaagagagtatctccagccatccggcgttgccgaagtggcggtgg

SEQ ID NO: 599247 - DNA, 75 bp, synthetic construct
  source 1..75: mol_type = other DNA
gcgccggacgggaccgcgtggacaccacgcagacgccgcgtaacccggatacaggaacgcattcgctttatctgg

SEQ ID NO: 599248 - DNA, 75 bp, synthetic construct
  source 1..75: mol_type = other DNA
cgtcattacctgctaaatgtgcgctgtatcaaaccggtgagctggaaccactatatgcgccatatgcgagccttg

SEQ ID NO: 599249 - DNA, 75 bp, synthetic construct
  source 1..75: mol_type = other DNA
gaacatgatggtcgtaagcaagtttggtgctatgtcatcaagcctcgtgatgcgcaaagcaccctgttgaaaggg

SEQ ID NO: 599250 - DNA, 75 bp, synthetic construct
  source 1..75: mol_type = other DNA
ctggctgtgcggttgcaatcgcaccaccggaaatgtacatcgatatggcgaagcgcgaagctgaaggcagccaca

SEQ ID NO: 599251 - DNA, 75 bp, synthetic construct
  source 1..75: mol_type = other DNA
tttaccgggatgacatcgaccgctttctggaaatacgcacccggcgcatcaaccaggacagcacaaagcgcgtcc

SEQ ID NO: 599252 - DNA, 75 bp, synthetic construct
  source 1..75: mol_type = other DNA
gagacaggctctttcaagacatacagtaatagcttatgcatatcagcagaaaaagagaactaaaggtgaaactgt

SEQ ID NO: 599253 - DNA, 75 bp, synthetic construct
  source 1..75: mol_type = other DNA
atgaccatcagaggccttgagcaggctgttgaaaacctcagacgcatcagcaaaacggcagtgcccggtgcctcc

SEQ ID NO: 599254 - DNA, 75 bp, synthetic construct
  source 1..75: mol_type = other DNA
aaccgcggtgatttacctgtcatcaaactggggatacggatcaccggaagtcgtcccaacagtacgctacgggcc

SEQ ID NO: 599255 - DNA, 75 bp, synthetic construct
  source 1..75: mol_type = other DNA
caattgacaatctgagccgggtccgtaaaaacgccattcctggtgcttcagcaatggccattaaccgcgtggcca

SEQ ID NO: 599256 - DNA, 75 bp, synthetic construct
  source 1..75: mol_type = other DNA
acactagactatatagactgtgatagtgaaatagaaagacaaatcctatcatccagaccaaacacgaaatttact

SEQ ID NO: 599257 - DNA, 75 bp, synthetic construct
  source 1..75: mol_type = other DNA
caacggcgattaatcagtcttcatcacaggttgcccgggagacaaaggtacgccggaaactggttaaggaacggt

SEQ ID NO: 599258 - DNA, 75 bp, synthetic construct
  source 1..75: mol_type = other DNA
aacctgggggatttgcccgtaatcaggctgggtaatgcgcgggttgttctgtcccgacgaaggcgacgtaaaaag

SEQ ID NO: 599259 - DNA, 75 bp, synthetic construct
  source 1..75: mol_type = other DNA
atgtattacgcatgccgctggcgggatgcatcgccgcccgtcgctgtttttggcattccgttgccgttcaccctg

SEQ ID NO: 599260 - DNA, 75 bp, synthetic construct
  source 1..75: mol_type = other DNA
ggttgggaaaacaatgtgaaatctattgatgctctgccacacattgaagctggctcaaacgcccgaaccagcgat

SEQ ID NO: 599261 - DNA, 75 bp, synthetic construct
  source 1..75: mol_type = other DNA
gccggaacctatgccgaaaaactggcggaaaagggatttgtcactattgcttatgacgcatcttatcaaggtgaa

SEQ ID NO: 599262 - DNA, 75 bp, synthetic construct
  source 1..75: mol_type = other DNA
cgcgtatttcctatgatgctggccccaaaaaataaaaacgctaaagtgaaaaaacaaaagacgactcagcaggtt

SEQ ID NO: 599263 - DNA, 75 bp, synthetic construct
  source 1..75: mol_type = other DNA
cccccgtcgtttggttttgcttctttcgtgatgatgtcatcattcggcgaatatctttcgtatgcataagtttat

SEQ ID NO: 599264 - DNA, 75 bp, synthetic construct
  source 1..75: mol_type = other DNA
ccggtgaatggtcgtattcataaatcagtgcttgataaacccggttttggcgtcgaactcaatcgtgactgcaat

SEQ ID NO: 599265 - DNA, 75 bp, synthetic construct
  source 1..75: mol_type = other DNA
aggaatatctctggtatgaaaaacaggtacagcgcaacggtgagacggagatccagaacgtcaaaatatgcaacc

SEQ ID NO: 599266 - DNA, 75 bp, synthetic construct
  source 1..75: mol_type = other DNA
aagggttcgccggatacccggcctccctgaccgggagcgtgcagcatatcagtggtaaggatttccctgccggtt

SEQ ID NO: 599267 - DNA, 75 bp, synthetic construct
  source 1..75: mol_type = other DNA
ctggtgatgggaatttcggaccgaatttacgtggtcaatcaggggacgccgctggcaaacggtacgccggagcaa

SEQ ID NO: 599268 - DNA, 75 bp, synthetic construct
  source 1..75: mol_type = other DNA
gaagatgctgacaaagaactggagatggtagaaatgttatacgaaatgagagaaaaagcggggttaacaaagtct

SEQ ID NO: 599269 - DNA, 75 bp, synthetic construct
  source 1..75: mol_type = other DNA
acggggaatcgtaatgctcattctcgctcttcgtcgagaaattctttccgcggtggtggcggttcttcaggaggc

SEQ ID NO: 599270 - DNA, 75 bp, synthetic construct
  source 1..75: mol_type = other DNA
tcaggacgatgtcatcattcggcgggtatcggtcgtttgttttagtttattgttagcaacaacctgcaagcagcg

SEQ ID NO: 599271 - DNA, 75 bp, synthetic construct
  source 1..75: mol_type = other DNA
tctcgttggcggaaatatcaggtatttactgaacgaacggtctaccagtctgttcagttaccagttgcacatggc

SEQ ID NO: 599272 - DNA, 75 bp, synthetic construct
  source 1..75: mol_type = other DNA
ccactctggtggctgatatgcgccaggcaatgagcaaactgaataatcaggcacggcttcgcgtctatacgactc

SEQ ID NO: 599273 - DNA, 75 bp, synthetic construct
  source 1..75: mol_type = other DNA
acgaagtaaaagaaaaacttctcaacactccagaagccatcaaaggatatgaagaggccgataaagagctggaga

SEQ ID NO: 599274 - DNA, 75 bp, synthetic construct
  source 1..75: mol_type = other DNA
agatcgcgggcacaccgccaatcaggaagatattgccgcgctggagcaggtacgcagtttctttaccgcgaatca

SEQ ID NO: 599275 - DNA, 75 bp, synthetic construct
  source 1..75: mol_type = other DNA
ccgtgcaggcgtttggcgggaaagccatcatgacgcgcaacgatcatgaatccggcaccgatcggctggtcgagg

SEQ ID NO: 599276 - DNA, 75 bp, synthetic construct
  source 1..75: mol_type = other DNA
tgcaaaactacagccagttaccggagtccatgccagagcaggcagaatcactggagcagctgcggttaatgagcg

SEQ ID NO: 599277 - DNA, 75 bp, synthetic construct
  source 1..75: mol_type = other DNA
acttggcgcaggcaaactagcacaggaattatcggcatggattgatgggcaattcaagttaccaaaacctaacat

SEQ ID NO: 599278 - DNA, 75 bp, synthetic construct
  source 1..75: mol_type = other DNA
gggcaggatttcaccctgcacgaagcattaagaacggcagaccggttaatcagcggtcgcagttttcagcacccg

SEQ ID NO: 599279 - DNA, 75 bp, synthetic construct
  source 1..75: mol_type = other DNA
aatacctgttactccctgactcgcggagatgagcagttcgggcaggatttcaccctgcacgaagcattaagaacg

SEQ ID NO: 599280 - DNA, 75 bp, synthetic construct
  source 1..75: mol_type = other DNA
atctggtcaccccggcgtccgcggaagatgaacaggtgtccggagaacgggtcatccgtaagcgtgcagtgagaa

SEQ ID NO: 599281 - DNA, 75 bp, synthetic construct
  source 1..75: mol_type = other DNA
agaaaacaccgggcgtattcaggcagagaaagccgccaaagcggtggatggctgggtaacgctccctccggtacg

SEQ ID NO: 599282 - DNA, 75 bp, synthetic construct
  source 1..75: mol_type = other DNA
gtatgaaaaacaggtacagcgcaacggtgaaacggaaatccagaacgtcaaaatatgcaacccgctgcgcgtaac

SEQ ID NO: 599283 - DNA, 75 bp, synthetic construct
  source 1..75: mol_type = other DNA
caaggctctggcggaacatctggagtgggccacgtccagctactacggttcgccgttcagggagtggctgaaagc

SEQ ID NO: 599284 - DNA, 75 bp, synthetic construct
  source 1..75: mol_type = other DNA
cagcttctttatggaagctatcaatggtggaaaatcgagtacccaggaatcggggatacgcccgtcacatttacg

SEQ ID NO: 599285 - DNA, 75 bp, synthetic construct
  source 1..75: mol_type = other DNA
ggtcgttccgctgggggttatcggtgcgttgctggctgccaccttccgtggcctgaccaatgacgtttacttcca

SEQ ID NO: 599286 - DNA, 75 bp, synthetic construct
  source 1..75: mol_type = other DNA
gttggccgggctgttacccgttttgctctggttgcgatggccggggagctggccacaaaagcgggcatcacagga

SEQ ID NO: 599287 - DNA, 75 bp, synthetic construct
  source 1..75: mol_type = other DNA
aacaaactgctttaactcaacaattacagactctcgagcagcaaaaccactttcaggttgccgtgttggtaacgc

SEQ ID NO: 599288 - DNA, 75 bp, synthetic construct
  source 1..75: mol_type = other DNA
gtttacttatccacgattctggcttagtcaaaacagttaattttaaatcccctaagtatgttggtgatccaatta

SEQ ID NO: 599289 - DNA, 75 bp, synthetic construct
  source 1..75: mol_type = other DNA
tacaaacacaaagcctaccagcttatgcgcgacgggcagatctcgagggaggactatgaatccatcagtcgttaa

SEQ ID NO: 599290 - DNA, 75 bp, synthetic construct
  source 1..75: mol_type = other DNA
caccccgaaatactgtatttctcagccatcagtgcagcactttctccgttctttgcctggtatttgcggtatcct

SEQ ID NO: 599291 - DNA, 75 bp, synthetic construct
  source 1..75: mol_type = other DNA
aacagcaggagccgctattctgtggagcactgacagagcagacagtcacatgggctaaggaaagtcagttcgcaa

SEQ ID NO: 599292 - DNA, 75 bp, synthetic construct
  source 1..75: mol_type = other DNA
aacagcaggagcagttattctgcggagcattgactgaacagacggtgacatgggctaaggaaagccagtttgcaa

SEQ ID NO: 599293 - DNA, 75 bp, synthetic construct
  source 1..75: mol_type = other DNA
tttgtagataatgatggtgttatggggggatatgatgttgaatattcttcgactatcaaatcgcaaataaacgta

SEQ ID NO: 599294 - DNA, 75 bp, synthetic construct
  source 1..75: mol_type = other DNA
aacagccaaactgagcaaatgagactgcttaaagatggcatggttgaagttctttctgctcatactgccacagca

SEQ ID NO: 599295 - DNA, 75 bp, synthetic construct
  source 1..75: mol_type = other DNA
atgaacattacgctcgcccgcattgatgaccgcctgatccacggccaggtcactaccgtctggtcgaaagtggct

SEQ ID NO: 599296 - DNA, 75 bp, synthetic construct
  source 1..75: mol_type = other DNA
tgcaataaacctgctgagcgcaaaaacaagatcttgtttatcaatggggttgaacatgttacccgcgagcgggct

SEQ ID NO: 599297 - DNA, 75 bp, synthetic construct
  source 1..75: mol_type = other DNA
gaatatcagcgtgatgaaaacggtatctggcacggtgaagaaaccgaagccgtactcaaacccgaactggttcat

SEQ ID NO: 599298 - DNA, 75 bp, synthetic construct
  source 1..75: mol_type = other DNA
atgacacaatatgacgcaaaactatataggaaaatggcaacgacgccagttaatgaaatatttatcaagaataaa

SEQ ID NO: 599299 - DNA, 75 bp, synthetic construct
  source 1..75: mol_type = other DNA
ggttggggtgttgaaaggcgtctcagatgctgacagagtagagtttaatggtatggcaaagatcgaattagataa

SEQ ID NO: 599300 - DNA, 75 bp, synthetic construct
  source 1..75: mol_type = other DNA
attgctgcatatcgccatggagtcaggggttatctcatggggtcaggcaaagcttgttcatgctaacgacaccta

SEQ ID NO: 599301 - DNA, 75 bp, synthetic construct
  source 1..75: mol_type = other DNA
gatgttattccggaaagcgttgcgcacaaggggctacgccttccggatgataagatccgctcggtcatgagggaa

SEQ ID NO: 599302 - DNA, 75 bp, synthetic construct
  source 1..75: mol_type = other DNA
tcgcccatcgtatggggattgtgctgttccgtcccggtacggaactgatgcacctcttcatgcgtggtcgcgttc

SEQ ID NO: 599303 - DNA, 75 bp, synthetic construct
  source 1..75: mol_type = other DNA
cacctcttcatgcgcggtcgcgtccttctcgaacctgaaccagaagaaatggcgtcattcagtacaggagctgtt

SEQ ID NO: 599304 - DNA, 75 bp, synthetic construct
  source 1..75: mol_type = other DNA
taatactccagaagctgtcaaagggtatgaagatgctgataaagaactggagatggtagaaatgttatacgaaat

SEQ ID NO: 599305 - DNA, 75 bp, synthetic construct
  source 1..75: mol_type = other DNA
tttctgtgacattggtatctacgctggtagggatcgaactcatatttagcgccgccagcctgttcagttttgcta

SEQ ID NO: 599306 - DNA, 75 bp, synthetic construct
  source 1..75: mol_type = other DNA
gaactggggattttcgccattgcggcgtttattgcaggattgttctgtgtcgcaggggttattcgcctgatgagt

SEQ ID NO: 599307 - DNA, 75 bp, synthetic construct
  source 1..75: mol_type = other DNA
atgaaagcattaatgttagaaaattacttggtattaaaggcaaaagacagcagaaataattttagtttaaatgac

SEQ ID NO: 599308 - DNA, 75 bp, synthetic construct
  source 1..75: mol_type = other DNA
catatgagttctaagagaataacccgtagggttcaggccgtttgcaagagagtaagtaaagataaaaataaaaaa

SEQ ID NO: 599309 - DNA, 75 bp, synthetic construct
  source 1..75: mol_type = other DNA
ataaaaaaactcgttgtttttaatcaagggaagttggacaaatttgactatggattactaaatagattttacaat

SEQ ID NO: 599310 - DNA, 75 bp, synthetic construct
  source 1..75: mol_type = other DNA
ataaaccgcaatcaattatgactatacaattatttgttgataaagatggttctattgatggtgaatttatctcag

SEQ ID NO: 599311 - DNA, 75 bp, synthetic construct
  source 1..75: mol_type = other DNA
atcgcaatcacagcttggtgatctgggcgagaaattagtcaattcgcaattcacccagcgccaggaagcagaagc

SEQ ID NO: 599312 - DNA, 75 bp, synthetic construct
  source 1..75: mol_type = other DNA
tgcgcaggtgaaagccctgagcgatcaggcatgtcaggagatggacagcaaggcgacgattgcgccagccaatag

SEQ ID NO: 599313 - DNA, 75 bp, synthetic construct
  source 1..75: mol_type = other DNA
ttaactggtttatgaacggcgtggagacggcaaacgaatgccgattaattacgcgcgggcggctggcgtttatca

SEQ ID NO: 599314 - DNA, 75 bp, synthetic construct
  source 1..75: mol_type = other DNA
atgttattgcccgctgacatttctgttagctggtttatgaacggcgtggagacggcaaacgaatgccgattaatc

SEQ ID NO: 599315 - DNA, 75 bp, synthetic construct
  source 1..75: mol_type = other DNA
ctaaacctttttttcagaaaaatatccagcatattaataaggcagatgacatcccacagacacaagaagagcgaa

SEQ ID NO: 599316 - DNA, 75 bp, synthetic construct
  source 1..75: mol_type = other DNA
ctggaggatatgtttgaagaggccgatatgtggctggtttctgagttcccgacagttcgccaggttgggctgtaa

SEQ ID NO: 599317 - DNA, 75 bp, synthetic construct
  source 1..75: mol_type = other DNA
gctacattttcgctgatgcagatgtcgctccagatccgggcgatgagcacggtttatcaaataacgctatcaata

SEQ ID NO: 599318 - DNA, 75 bp, synthetic construct
  source 1..75: mol_type = other DNA
atgaaaaatgattacggcggaagccatacgccaaaagaaataaaggacttatggcaaacgccaaaaccagttttt

SEQ ID NO: 599319 - DNA, 75 bp, synthetic construct
  source 1..75: mol_type = other DNA
tcaccggcgtcggcgtgctggcagccgtcagcggcaccgcagggcgcgtggtggcgaaaacgttgaatatcaatg

SEQ ID NO: 599320 - DNA, 75 bp, synthetic construct
  source 1..75: mol_type = other DNA
tatctgcagcgttattttctgcagtatcggtgcaggccacagataatcttcaatttagagggaatctgattattc

SEQ ID NO: 599321 - DNA, 75 bp, synthetic construct
  source 1..75: mol_type = other DNA
atctgcgcaggccacagataatcttcagtttagagggaatctgattattccaggttgtactatcaataatggcag

SEQ ID NO: 599322 - DNA, 75 bp, synthetic construct
  source 1..75: mol_type = other DNA
atttaccataatgaatggaatctccagtctattattcagaagacggataggatggctggtgaggcttatatgatt

SEQ ID NO: 599323 - DNA, 75 bp, synthetic construct
  source 1..75: mol_type = other DNA
caaagttctttgattgggggacaaatgaaaaccacaattggataaaaacagaagacttatttattactgtccttg

SEQ ID NO: 599324 - DNA, 75 bp, synthetic construct
  source 1..75: mol_type = other DNA
cgctacaagctggcgctgggaaccaagccgaagctgtaccgcgtaccgtttaaatacggggaggtgagccaatga

SEQ ID NO: 599325 - DNA, 75 bp, synthetic construct
  source 1..75: mol_type = other DNA
atgttcgttgaactggtttatgacaagcgaaatgtagaggggctcgaaggggccagagaaattattctggcagag

SEQ ID NO: 599326 - DNA, 75 bp, synthetic construct
  source 1..75: mol_type = other DNA
gccgttcggctgactggtcggttagtaacactggattaaccggatacattgaaggctataacgactgtttaaagg

SEQ ID NO: 599327 - DNA, 75 bp, synthetic construct
  source 1..75: mol_type = other DNA
ctaaaggccaggcgatggatttccatattgaaggtatcgcgttaagcaatattcgcaaagccgcgttatctatgc

SEQ ID NO: 599328 - DNA, 75 bp, synthetic construct
  source 1..75: mol_type = other DNA
tcgatcctggattattcgaccagttatatcgcctacaaggtctgctgggcacccgcaaaccggtgcaactgattt

SEQ ID NO: 599329 - DNA, 75 bp, synthetic construct
  source 1..75: mol_type = other DNA
tggtttctgccgacgtttatcgcccggcggcaatcaaacagcttgagacgctggcagagcaggtgggcgttgatt

SEQ ID NO: 599330 - DNA, 75 bp, synthetic construct
  source 1..75: mol_type = other DNA
gccgttcggctgaatggtcagtaagtaatacaggattaaccggatacatcgaaggctataacgactgtttacagg

SEQ ID NO: 599331 - DNA, 75 bp, synthetic construct
  source 1..75: mol_type = other DNA
tatttgcaaagctggttaatgacctgacattatctgcgcggttgtgtcgtgatacgcaacaattaagggcgtgga

SEQ ID NO: 599332 - DNA, 75 bp, synthetic construct
  source 1..75: mol_type = other DNA
caattcccaaccagtcctcggtggcgaaagcctggcaggaatttgatgagaacggaaggatgaagccgtcctcat

SEQ ID NO: 599333 - DNA, 75 bp, synthetic construct
  source 1..75: mol_type = other DNA
acccctgccggatgatgctccggacacgcatcctaaagtcaccgagctacgcggtctggtcagatggtgtgacgg

SEQ ID NO: 599334 - DNA, 75 bp, synthetic construct
  source 1..75: mol_type = other DNA
ctcgttgatcgctacagcgaacgaaaagagtctgcagaagaactttcccggcgggttaatcagagcaaaatttga

SEQ ID NO: 599335 - DNA, 75 bp, synthetic construct
  source 1..75: mol_type = other DNA
cggaaagcggccggccacgtcatcgacgaggccaccgatctttcatccatcgccattgctccccagccactacca

SEQ ID NO: 599336 - DNA, 75 bp, synthetic construct
  source 1..75: mol_type = other DNA
cggctggccgtcgaggaagcggcccggctgctgcaattctttggcgcagaaacacgcatcttcgacccgtccgat

SEQ ID NO: 599337 - DNA, 75 bp, synthetic construct
  source 1..75: mol_type = other DNA
aaaatatcgatccggccctcctggacgcgccgctgacggaagataagctgaaggccagagagataacgcatccgc

SEQ ID NO: 599338 - DNA, 75 bp, synthetic construct
  source 1..75: mol_type = other DNA
tctcaacagagggacgctgcccctgctgtcgcaggaccgtcacccaccgcttcattctggaagattcatggccat

SEQ ID NO: 599339 - DNA, 75 bp, synthetic construct
  source 1..75: mol_type = other DNA
atctgcatatcacattgtcatttgcagaaaatgaaatttcagaagaaactcttaaaaacgtgacttctgatttca

SEQ ID NO: 599340 - DNA, 75 bp, synthetic construct
  source 1..75: mol_type = other DNA
gttatgaggaaagcaaatcttctgcaatagaaaaatatgaaagcaattatttaaatggtgatggttttgatactg

SEQ ID NO: 599341 - DNA, 75 bp, synthetic construct
  source 1..75: mol_type = other DNA
gtgatgggcgtaagagcgcaacaaaaagaaaaaacccgacgttcgctggtggaagccgcatttagccagttaagc

SEQ ID NO: 599342 - DNA, 75 bp, synthetic construct
  source 1..75: mol_type = other DNA
ttgtgcgctgtagcggaactggctgatgcagagggtgtccggccatcggcaccgctgtccgatccggcaagtaat

SEQ ID NO: 599343 - DNA, 75 bp, synthetic construct
  source 1..75: mol_type = other DNA
agtctaaagcaatgcagcagactgaacaggaatcccagcaacaaacccaggttgataatgaaatcagcaaggcag

SEQ ID NO: 599344 - DNA, 75 bp, synthetic construct
  source 1..75: mol_type = other DNA
acaagaaagcaagattgtttatcgtgaccaaaaaacagagtcccccgtatttactgataagggtgattttgttgt

SEQ ID NO: 599345 - DNA, 75 bp, synthetic construct
  source 1..75: mol_type = other DNA
cttcaccggtgtgcgtatcggtattggtattgcacaagggctggcgcttggcgcggagctgccgatgattggcgt

SEQ ID NO: 599346 - DNA, 75 bp, synthetic construct
  source 1..75: mol_type = other DNA
agcggaagacgagccggctacgccgcctgcagctccgcacgacaccccgaacaacagtctgcgactgacagacga

SEQ ID NO: 599347 - DNA, 75 bp, synthetic construct
  source 1..75: mol_type = other DNA
cacgctctccctgaaaccgagccgccaggtgacactacgttttctgatccactgctgctgcatggtcgagcgtat

SEQ ID NO: 599348 - DNA, 75 bp, synthetic construct
  source 1..75: mol_type = other DNA
gcgaatgggcgaagtttactgggccgagtatcagcgcgatgaaaatggcgtctggcacggtgaagaaacagaagc

SEQ ID NO: 599349 - DNA, 75 bp, synthetic construct
  source 1..75: mol_type = other DNA
gcgaatgggcgaagtttactgggccgaatatcaacgtgatgaaaatggtgtctggcacggtgaagaaaccgaagc

SEQ ID NO: 599350 - DNA, 75 bp, synthetic construct
  source 1..75: mol_type = other DNA
gaatatcagcgtgatgaaaagggtatctggcacggtgaagaaaccgaagccgtactcaaacccgaactcgttcat

SEQ ID NO: 599351 - DNA, 75 bp, synthetic construct
  source 1..75: mol_type = other DNA
atgatttttagcaatcaaatccgctacagtggcaaagatggcatctatttccacttaagagataatgtagatgcc

SEQ ID NO: 599352 - DNA, 75 bp, synthetic construct
  source 1..75: mol_type = other DNA
tcagatgccgctaatgagcaagcttcaaaggtgcttagtaatgctggtacaggtagtactttgaagaagctttct

SEQ ID NO: 599353 - DNA, 75 bp, synthetic construct
  source 1..75: mol_type = other DNA
ataataagctagtagaaaacttcatcgacactctggaaaactggagagaccagaaacagattatttcggtcatct

SEQ ID NO: 599354 - DNA, 75 bp, synthetic construct
  source 1..75: mol_type = other DNA
gtaaagacggtatcaagattgatgattccattattacgagttttaaagcctctaaagatgttggaatttcaaacg

SEQ ID NO: 599355 - DNA, 75 bp, synthetic construct
  source 1..75: mol_type = other DNA
tggccccggtctcttccgatgcgctcatccgcctgcgccagggggatgagatccagctcggcgcactggcgctga

SEQ ID NO: 599356 - DNA, 75 bp, synthetic construct
  source 1..75: mol_type = other DNA
atggctgaggaaaaacagcaatcccgccaggcctcactgactttacaggtgatgaatggcaacgaactggaaagc

SEQ ID NO: 599357 - DNA, 75 bp, synthetic construct
  source 1..75: mol_type = other DNA
gcgtgctgatgtgcgtcatattaaccggctgcgaaacggcgaaaaaaatcagtgaggtgatcaaaaacccggata

SEQ ID NO: 599358 - DNA, 75 bp, synthetic construct
  source 1..75: mol_type = other DNA
gtcttcgtatccagctaacttttcaggaaatcaactttaaagctgttgtaggtcaaactgatatctcggctgcaa

SEQ ID NO: 599359 - DNA, 75 bp, synthetic construct
  source 1..75: mol_type = other DNA
gcgggtaacgtgactactgaacgcaataacgcacctatgctgatgtgtcaggaactgtacagttactcagcatct

SEQ ID NO: 599360 - DNA, 75 bp, synthetic construct
  source 1..75: mol_type = other DNA
ctggaaagaccgctaccacgaatgatggtggtgctaccagcaaaaagaatacagggaacactacaacgaatcttg

SEQ ID NO: 599361 - DNA, 75 bp, synthetic construct
  source 1..75: mol_type = other DNA
aaagagcacccagaacaattactattagtggtgtggttgtggttggtgaatccggtagtatccttatctcacgag

SEQ ID NO: 599362 - DNA, 75 bp, synthetic construct
  source 1..75: mol_type = other DNA
tctaaagatgttggtatttcaaatggtctaagaatccagctaacttttcaggaaatcaactttaaggctattgta

SEQ ID NO: 599363 - DNA, 75 bp, synthetic construct
  source 1..75: mol_type = other DNA
cgacactcttgaaagctggcgtgaccagaagcaaattatttcagtcatctgtaaagacggaattaaaattgacga

SEQ ID NO: 599364 - DNA, 75 bp, synthetic construct
  source 1..75: mol_type = other DNA
acgtatccggcgtgaacgcctgccagaagaactgtcatacgcgctgaaacaacaactgaggattgcgataaaacg

SEQ ID NO: 599365 - DNA, 75 bp, synthetic construct
  source 1..75: mol_type = other DNA
tgcattcgcattgcgccacaacctagtgcaactggcagaacgtgctggcatgaatgtgcagattctgcggaacaa

SEQ ID NO: 599366 - DNA, 75 bp, synthetic construct
  source 1..75: mol_type = other DNA
taaccgatctcactgaagacccaacactggttgatggatttctggctcagattcactgcctgccatgtataccgg

SEQ ID NO: 599367 - DNA, 75 bp, synthetic construct
  source 1..75: mol_type = other DNA
agcagtattaactctgtaacacgactgatggcgctggctgctgtttcattgcaggctcgtttacaggctaaccct

SEQ ID NO: 599368 - DNA, 75 bp, synthetic construct
  source 1..75: mol_type = other DNA
cacagagtgccggtcgcagactggcgacattagaacaaaagtggctcaggatgcaggcacagcaggagaatattt

SEQ ID NO: 599369 - DNA, 75 bp, synthetic construct
  source 1..75: mol_type = other DNA
aaagaaaaaacaccgtttcccacgtccctcccactggacccgagagtatactcacgagtgcgtggaaaaaataaa

SEQ ID NO: 599370 - DNA, 75 bp, synthetic construct
  source 1..75: mol_type = other DNA
ggtctcagaaacagaagcacagagtgctgttcaaagactggcgataatagaacaacggtggctcaggatgaagga

SEQ ID NO: 599371 - DNA, 75 bp, synthetic construct
  source 1..75: mol_type = other DNA
aaaccttgctggcgaatgacatcaacctgtatggctggcatctgccgttggatgcgcatccggaactgggcaata

SEQ ID NO: 599372 - DNA, 75 bp, synthetic construct
  source 1..75: mol_type = other DNA
ttacaggctaaccctgcgatggcaagtgcagttgataccgtaactggtctcggtgcttcattcggattgctgtga

SEQ ID NO: 599373 - DNA, 75 bp, synthetic construct
  source 1..75: mol_type = other DNA
atgtttgattaccaagtttccaaacatccacattttgatgaagcctgtcgtgcatttgcactgcgccacaatctg

SEQ ID NO: 599374 - DNA, 75 bp, synthetic construct
  source 1..75: mol_type = other DNA
gtgcaactggcagaacgtgcaggtatgaatgtgcagattctgcggaacaaactgaacccagctcaacctcattta

SEQ ID NO: 599375 - DNA, 75 bp, synthetic construct
  source 1..75: mol_type = other DNA
atccgcactttgatgactcctgtcggactttcgcgctgcgtcacaacatggcgaagctggcggaacgtgcaggaa

SEQ ID NO: 599376 - DNA, 75 bp, synthetic construct
  source 1..75: mol_type = other DNA
ttaatgaggttgcaaaagagaaacagccgcattacgtcatgagcgcaactgcagagatcggacgtgttgcagcag

SEQ ID NO: 599377 - DNA, 75 bp, synthetic construct
  source 1..75: mol_type = other DNA
atgggaaaacatcaggaagaaaggaaaataccaatcattgtggtgaaaaaacgtcgaactttttcggaaccttcc

SEQ ID NO: 599378 - DNA, 75 bp, synthetic construct
  source 1..75: mol_type = other DNA
atcgcctggcggttcgcttatcactcattatcagccgactgatggccggagaatctctgtcactaaagacactgt

SEQ ID NO: 599379 - DNA, 75 bp, synthetic construct
  source 1..75: mol_type = other DNA
aaagatcccaacgaaaaatgggcggtactggttaatgaatttggggaagtcggaattgatggtgctttgctcgcc

SEQ ID NO: 599380 - DNA, 75 bp, synthetic construct
  source 1..75: mol_type = other DNA
tcaataatgaaaacttccgtgaccagttggctgccgcagacatcattgtcgccaataaatccgaccgcgcgacgc

SEQ ID NO: 599381 - DNA, 75 bp, synthetic construct
  source 1..75: mol_type = other DNA
ttgtggtagttctgctgtttcttgtcgtgatggtggacttcagcagccggataatgtcagtgctggcagatggga

SEQ ID NO: 599382 - DNA, 75 bp, synthetic construct
  source 1..75: mol_type = other DNA
gaatctctgtcactaaaaacactgtcagatgaatttggtgttacagaacgtaccttacagcgcgattttcatcag

SEQ ID NO: 599383 - DNA, 75 bp, synthetic construct
  source 1..75: mol_type = other DNA
cattatcagccgactgatgaccggagaatctctgtcactaaaaacactgtcagatgaatttggcgttacagaacg

SEQ ID NO: 599384 - DNA, 75 bp, synthetic construct
  source 1..75: mol_type = other DNA
agcagttatattttcgcttttagtatttattttattaaagtacacacttaggactaaaagagtaaaacctttatg

SEQ ID NO: 599385 - DNA, 75 bp, synthetic construct
  source 1..75: mol_type = other DNA
tctgagctggcaaaggcgacagacgatttattttccctgtttcagcgcgcgtttcgtgatgtagcgcctgaaatg

SEQ ID NO: 599386 - DNA, 75 bp, synthetic construct
  source 1..75: mol_type = other DNA
ctttgccgcccaggtgataaaacgctttgagtctgccgttcaggactttgccgggaatgctgcgacaatacagcg

SEQ ID NO: 599387 - DNA, 75 bp, synthetic construct
  source 1..75: mol_type = other DNA
cggtaaaggtggttttaagcataagcacgctaacctgcgtcacattctgaccaaaaaagcgaccaaacgtaaacg

SEQ ID NO: 599388 - DNA, 75 bp, synthetic construct
  source 1..75: mol_type = other DNA
cgtcacctgcgtccaaaagccatggtttccaaaggagatctgggcctggtaatcgcgtgcctgccgtacgcataa

SEQ ID NO: 599389 - DNA, 75 bp, synthetic construct
  source 1..75: mol_type = other DNA
atgcttctctccatcgacagcaacgacgctaataccgcgtcaatgcacaaaaaaacaatcagcagcctgagcggc

SEQ ID NO: 599390 - DNA, 75 bp, synthetic construct
  source 1..75: mol_type = other DNA
atccacattttgatgaagcctgtcgagtattcgcactgcgccacaacctggtgcaactggcagaacgtgcaggca

SEQ ID NO: 599391 - DNA, 75 bp, synthetic construct
  source 1..75: mol_type = other DNA
tccgtcagtgacagtgcgaaggtttttgcctccgtcacacagatggcaatggacaacgccaccctgaacggtctg

SEQ ID NO: 599392 - DNA, 75 bp, synthetic construct
  source 1..75: mol_type = other DNA
gatgacgggctgataaccctgcaggatgcggaaggtaacacgcggctgatttcgccccgggaggcggtggctgaa

SEQ ID NO: 599393 - DNA, 75 bp, synthetic construct
  source 1..75: mol_type = other DNA
ccggacgtaaactgacgcaggcagaaacaaccagacttaacgctgtgctggattacattgacgcggtgacggcaa

SEQ ID NO: 599394 - DNA, 75 bp, synthetic construct
  source 1..75: mol_type = other DNA
gagacagtccggcacggtttattgctccggggcgcaaatatccgcagccgtatgtggcactgccggcgtttgacc

SEQ ID NO: 599395 - DNA, 75 bp, synthetic construct
  source 1..75: mol_type = other DNA
cagagcaggctgtcagggagattgccgggcaggaacgtgaccggactgccacttctgaacgggaaaccgcactgc

SEQ ID NO: 599396 - DNA, 75 bp, synthetic construct
  source 1..75: mol_type = other DNA
cggcaggcagaagaggccatccgtcgtgaaacggaacgcagggcggatgagattgtcagaaaaatggcagagaac

SEQ ID NO: 599397 - DNA, 75 bp, synthetic construct
  source 1..75: mol_type = other DNA
aatcacatctctgggtgattaccctgaaaatacaaccactatcgccccgttaacgccatatgataaatgggatgg

SEQ ID NO: 599398 - DNA, 75 bp, synthetic construct
  source 1..75: mol_type = other DNA
actgaggcacagcatagcgcagcagtcgaagcggcagaagcacagcgtcagtcactgattgatgctgcaatggct

SEQ ID NO: 599399 - DNA, 75 bp, synthetic construct
  source 1..75: mol_type = other DNA
atgaaaacgggttcgccacggaacctggcttcattaccgtttataactacaacggagaaacgcgggaatatattt

SEQ ID NO: 599400 - DNA, 75 bp, synthetic construct
  source 1..75: mol_type = other DNA
aattactgtttataactttgacgtcatgagtcgggagtatatttcagcttcaactgaatatcttgctgttggtgt

SEQ ID NO: 599401 - DNA, 75 bp, synthetic construct
  source 1..75: mol_type = other DNA
tttaaattcatgggaatatgtgccagatcatcgcggtgaaatcgtctatagcatcgaaacaggagaatcgaaaga

SEQ ID NO: 599402 - DNA, 75 bp, synthetic construct
  source 1..75: mol_type = other DNA
aaaaaaccggcttaacgctgtgctggattacattgacgcggtggcggcaacagataccagcaccgcgcctgatgt

SEQ ID NO: 599403 - DNA, 75 bp, synthetic construct
  source 1..75: mol_type = other DNA
ggcacagcggcaggctgaagaggccatccgtcgtgaaacggaacgccgtgcggatgagattgtcagaaaaatggc

SEQ ID NO: 599404 - DNA, 75 bp, synthetic construct
  source 1..75: mol_type = other DNA
aatatctttccacatcaactgaatatcttgcggttggcgtcggcatcccggcatgttcttgtttagatgcaccag

SEQ ID NO: 599405 - DNA, 75 bp, synthetic construct
  source 1..75: mol_type = other DNA
gcacagcatagcaccgcagtagaagcggcagaagcacagcgccagtcgctgattgatgctgcaatggcttccatc

SEQ ID NO: 599406 - DNA, 75 bp, synthetic construct
  source 1..75: mol_type = other DNA
gaaagtaaaaatctggccttcagccaggtggatctgttgacagaggcgaagtcgtttgctgcagaaggaaccagt

SEQ ID NO: 599407 - DNA, 75 bp, synthetic construct
  source 1..75: mol_type = other DNA
gcgcagtatccggtgatgtaaaaaccagtgcgggccgccgcgatgttatcaacagcatcaactctgtcacgcgcc

SEQ ID NO: 599408 - DNA, 75 bp, synthetic construct
  source 1..75: mol_type = other DNA
gctggtcgatggctttctggctcagattcattgtctgccatgtgtaccgattaatgaggtggcaaaagagaaact

SEQ ID NO: 599409 - DNA, 75 bp, synthetic construct
  source 1..75: mol_type = other DNA
gatgctcctggctcatacaaaactgggtatgcaatctgccgttctgcagattttaactcatgggaatatgtgcca

SEQ ID NO: 599410 - DNA, 75 bp, synthetic construct
  source 1..75: mol_type = other DNA
atggcccgggagcaggggcgggaggtgcagattatcgctgctgaccgtcgctcgcagatgaacctgaagcaggat

SEQ ID NO: 599411 - DNA, 75 bp, synthetic construct
  source 1..75: mol_type = other DNA
aagcgaaactggcagaagcgcagcagaaggcgatgctgaaaggtgaggcttttccggatattcccatgacactgt

SEQ ID NO: 599412 - DNA, 75 bp, synthetic construct
  source 1..75: mol_type = other DNA
acggacagtcagaaacggtgctgaccggtaatctggtgatggcactgtttaaccacgacaccagtcgcgatcagg

SEQ ID NO: 599413 - DNA, 75 bp, synthetic construct
  source 1..75: mol_type = other DNA
atgatgagtatcgcgcaggtcagatcggcaggcagtgccggtaactattatagcgacaaggataattactatgtg

SEQ ID NO: 599414 - DNA, 75 bp, synthetic construct
  source 1..75: mol_type = other DNA
cagttcgtggccctgcagggcagccgtaacggagagagcctgctggctgataatatgcaggatggtgtccggatt

SEQ ID NO: 599415 - DNA, 75 bp, synthetic construct
  source 1..75: mol_type = other DNA
ggcggtgatgtcagccgtgaacatgctgccggagagtgagcgtccccgtgtcgtggggctggggcccacgcaccg

SEQ ID NO: 599416 - DNA, 75 bp, synthetic construct
  source 1..75: mol_type = other DNA
gagtgggggttgcccgtaaggatctgaaggccatggcggataacggaaagttgaccgccgataaggttgttcctg

SEQ ID NO: 599417 - DNA, 75 bp, synthetic construct
  source 1..75: mol_type = other DNA
gctacatacggcggtcagtttacgcttacggcaatgtcgcttcctgaagcgtcagataatgaggaaaagacgcga

SEQ ID NO: 599418 - DNA, 75 bp, synthetic construct
  source 1..75: mol_type = other DNA
tgctccatttgtttgcgaagatggtgtagctgcggtagctgatgcactacaaattaaaagaaataatagagagcg

SEQ ID NO: 599419 - DNA, 75 bp, synthetic construct
  source 1..75: mol_type = other DNA
aacgcagattgccacggcgcgggcaagggcagccgtgtaccgtgcacagcaggcagtggcggcagcccgcgggac

SEQ ID NO: 599420 - DNA, 75 bp, synthetic construct
  source 1..75: mol_type = other DNA
cggggctgaaaatctccggtgccagtacggcagaggcgggctcggtgatcacccagttcagtcaggcgctggcgc

SEQ ID NO: 599421 - DNA, 75 bp, synthetic construct
  source 1..75: mol_type = other DNA
gaaaatccttacataaaacaattgaacgaaatcaggtgaaaacagcaaaaaaattgccaggaccagttccggcgc

SEQ ID NO: 599422 - DNA, 75 bp, synthetic construct
  source 1..75: mol_type = other DNA
ggtgtgcagcatatctcgctttttaacaatgcaacaattgcattgatcacagcattacaagccctaagaataaca

SEQ ID NO: 599423 - DNA, 75 bp, synthetic construct
  source 1..75: mol_type = other DNA
gcaagttattagggaatgtgaaaggcatatcattagcaaattttgataaactagctacgaaaaatttttcatact

SEQ ID NO: 599424 - DNA, 75 bp, synthetic construct
  source 1..75: mol_type = other DNA
catcttaaagaaaatggaatactctcgagaaaatatttttacccactaattagtaatatgccgatgtataagaga

SEQ ID NO: 599425 - DNA, 75 bp, synthetic construct
  source 1..75: mol_type = other DNA
cgattaattcacgaagaaaaataccgttgcatccgacattgatcaaacttggattaatccgctattgcgaagcat

SEQ ID NO: 599426 - DNA, 75 bp, synthetic construct
  source 1..75: mol_type = other DNA
actatctccgtgagtatgagagcttactaaggtcgatacctgcacgccgtgatttagctaaaatccgatataaaa

SEQ ID NO: 599427 - DNA, 75 bp, synthetic construct
  source 1..75: mol_type = other DNA
ccatgctgccgctgtatcccgacatcagcccggaaattattgcgattgctatcggttcaggtgcaattggctgca

SEQ ID NO: 599428 - DNA, 75 bp, synthetic construct
  source 1..75: mol_type = other DNA
tacgcagattgccacggcgcgggcaagggcagccgtgtaccgtgctcagcaggcagtggcggcagcccgcgggac

SEQ ID NO: 599429 - DNA, 75 bp, synthetic construct
  source 1..75: mol_type = other DNA
tgaacagaaatattgctgccagaagcgctgcccagaatgtgctgaacagtacaacggcggtgggctcacgtctga

SEQ ID NO: 599430 - DNA, 75 bp, synthetic construct
  source 1..75: mol_type = other DNA
tgaacagaaatattgctgccagaaccgccgcccagaatgagctgaacagtacaacggcggtgggctcacgtctga

SEQ ID NO: 599431 - DNA, 75 bp, synthetic construct
  source 1..75: mol_type = other DNA
atcatgtcggtgctggcggatggggggctggtctgcggcattgtggtattgctgtggccgatgatgaaaaaacag

SEQ ID NO: 599432 - DNA, 75 bp, synthetic construct
  source 1..75: mol_type = other DNA
cagagcgtgagctggccctgtcctgactgaaaggggacgaaaaagagcggggccgcctggggtatgcggcggatg

SEQ ID NO: 599433 - DNA, 75 bp, synthetic construct
  source 1..75: mol_type = other DNA
cagagcgtgagctggccctgtccagactgaacggggacgaaaaagagcggggccgtctggggtatgcggcggatg

SEQ ID NO: 599434 - DNA, 75 bp, synthetic construct
  source 1..75: mol_type = other DNA
cagagcgtgagctggccctgtccagactgaatggggacgaaaaagagcggggccgcctggggtatgcggcggatg

SEQ ID NO: 599435 - DNA, 75 bp, synthetic construct
  source 1..75: mol_type = other DNA
gacgcagattgccacggcgcgggcaagcgcagccgtgtaccgtgcccagcaggcagtggcggcagcccgcgggac

SEQ ID NO: 599436 - DNA, 75 bp, synthetic construct
  source 1..75: mol_type = other DNA
gacgcagattgccacggcgcgggcaagagcagccgtgtaccgtgcacagcaggcagtggcggcagcccgcgggac

SEQ ID NO: 599437 - DNA, 75 bp, synthetic construct
  source 1..75: mol_type = other DNA
cacgcagattgccacggcgcgggcaagggcagccgtgtaccgtgcccagcaggcagtggcggcagcccgcgggac

SEQ ID NO: 599438 - DNA, 75 bp, synthetic construct
  source 1..75: mol_type = other DNA
tgaacagaaatattgctgccagaatcgcggcccagaatgtgctgaacagtacaacggcggtgggctcacgtctga

SEQ ID NO: 599439 - DNA, 75 bp, synthetic construct
  source 1..75: mol_type = other DNA
tgaacagaaatattgctgccagaaacgccgcccagaatgcgctgaacagtacaacggcggtgggctcacgtctga

SEQ ID NO: 599440 - DNA, 75 bp, synthetic construct
  source 1..75: mol_type = other DNA
gacgcagattgccacggcgcgggcaagggcagccgtgtaccgtgcgcagcaggcagtggcggcagcccgcgggac

SEQ ID NO: 599441 - DNA, 75 bp, synthetic construct
  source 1..75: mol_type = other DNA
tcagaatattccggctgaaacgccgtatgcgccgggagaagaaattaagggagggtggcaataatgcttcgcatt

SEQ ID NO: 599442 - DNA, 75 bp, synthetic construct
  source 1..75: mol_type = other DNA
gcctggttagggccggcaattggtccacgcgcgttcgaagtgggggcggaggttcgcgaggcgtttatggcagta

SEQ ID NO: 599443 - DNA, 75 bp, synthetic construct
  source 1..75: mol_type = other DNA
aaattttcggcggcgaccgttgtacatatacggaaaatgagactttcttctcttatcgtcgcgacaagaccaccg

SEQ ID NO: 599444 - DNA, 75 bp, synthetic construct
  source 1..75: mol_type = other DNA
tgctgaaattatcaaacagactaccccggacggtgcgggacgtgtggccgcccatgccgtggtgaatgccgcact

SEQ ID NO: 599445 - DNA, 75 bp, synthetic construct
  source 1..75: mol_type = other DNA
gacgatgtggcgtaacaactattgcaatcacgatcagaggctagctctttttcgtgaatggagggaaagcaatgg

SEQ ID NO: 599446 - DNA, 75 bp, synthetic construct
  source 1..75: mol_type = other DNA
gaaaaaaacgcgtttcatcatttgggaaaattttgtcagagcaacgatatcgattccctattctccatggcaaat

SEQ ID NO: 599447 - DNA, 75 bp, synthetic construct
  source 1..75: mol_type = other DNA
gtggcggcagttgccgcccttgatgtgctacagcgaatgagtaaagagctattcaacactgaattaattttaaaa

SEQ ID NO: 599448 - DNA, 75 bp, synthetic construct
  source 1..75: mol_type = other DNA
gttggttaaaacgattgccgaattgaatatggcgcgtgagagtggtttgtatagcttgcttgagtttattggcaa

SEQ ID NO: 599449 - DNA, 75 bp, synthetic construct
  source 1..75: mol_type = other DNA
gattcttctggcctggttggtggcacttattctgcatgctgcagtgggctccgctacggtggcaatgatgggggc

SEQ ID NO: 599450 - DNA, 75 bp, synthetic construct
  source 1..75: mol_type = other DNA
gtatacgtcagcatatgagcatggggacgatgctcacacatacggaaaatggcttcggttctattgctaatattt

SEQ ID NO: 599451 - DNA, 75 bp, synthetic construct
  source 1..75: mol_type = other DNA
gaacatcagagtacagggctcagtaccggtggcagtgttgctggaaatttcctggggaacatggcaaacaatctg

SEQ ID NO: 599452 - DNA, 75 bp, synthetic construct
  source 1..75: mol_type = other DNA
tcagtaatgaaaaagaggttgttatttatgattaagtcggttattgccggtgcggtagctatggcagtggtgtct

SEQ ID NO: 599453 - DNA, 75 bp, synthetic construct
  source 1..75: mol_type = other DNA
tgctggccagcttcttcgtgggaacgatgatgggtatgggaccactggatatggtaaatgctattgaaagtggaa

SEQ ID NO: 599454 - DNA, 75 bp, synthetic construct
  source 1..75: mol_type = other DNA
agctaaatggtgtcttgataaattaccaagtgattgtcagattgtcggtgaagatggcaattattatctgattaa

SEQ ID NO: 599455 - DNA, 75 bp, synthetic construct
  source 1..75: mol_type = other DNA
atggcaatggacttacgcgatccgaatgtctggatatcgcacctgctggaaaatctgccggatgagaaactggcc

SEQ ID NO: 599456 - DNA, 75 bp, synthetic construct
  source 1..75: mol_type = other DNA
aacatgccggtgatcctcatctcgcattgcgcctgctggcgctgtatgtggagcattactgggcggtggccgcgc

SEQ ID NO: 599457 - DNA, 75 bp, synthetic construct
  source 1..75: mol_type = other DNA
gcgccagtcatacaggtgagtaatgaagatattcaggctgcgcggttgtgttttgatgagcaggggctggaagcc

SEQ ID NO: 599458 - DNA, 75 bp, synthetic construct
  source 1..75: mol_type = other DNA
attaatatacggaaatatcgggatattcctgttgaaacgccgtatgcgccgggagaacaaattaagggagggcag

SEQ ID NO: 599459 - DNA, 75 bp, synthetic construct
  source 1..75: mol_type = other DNA
cgcttgcggcagggtttcttgttacattttttctgtccccaatgttcgaattaatattcgggaatatcatgatat

SEQ ID NO: 599460 - DNA, 75 bp, synthetic construct
  source 1..75: mol_type = other DNA
cgatttacggcctgatcattaacgggatgaaagggttgtacacgcgcattggtcgtcactattttgctaatccgg

SEQ ID NO: 599461 - DNA, 75 bp, synthetic construct
  source 1..75: mol_type = other DNA
cgagccgtgaactgctccatcaacgcattgagcagcgttttcatcagatgttggcttcaggttttgaagcagaag

SEQ ID NO: 599462 - DNA, 75 bp, synthetic construct
  source 1..75: mol_type = other DNA
gaggatcaggttgcggcgctcaggcgacatctggtgttctttaataccacgcctgccgtgtgtggtccggtcatc

SEQ ID NO: 599463 - DNA, 75 bp, synthetic construct
  source 1..75: mol_type = other DNA
gaggatcaggttgcggcgctcaggcgacacctggtgttcttcaataccacgccagccgtatgtggcccggtcatc

SEQ ID NO: 599464 - DNA, 75 bp, synthetic construct
  source 1..75: mol_type = other DNA
agcgccgggggctggtcattctggcttcggagagtaaggattttcgtctgctggcacacctgctcagaaccctgc

SEQ ID NO: 599465 - DNA, 75 bp, synthetic construct
  source 1..75: mol_type = other DNA
ctgcgatatctggacatgctacccgaaggcgatccccgcgatcagtttcaccgccagtaccttgccgcacagttg

SEQ ID NO: 599466 - DNA, 75 bp, synthetic construct
  source 1..75: mol_type = other DNA
gtgtctggatatcacatctgctggaaagccttctggaagataaactggcatcggcgctgaaagatgacaacccgg

SEQ ID NO: 599467 - DNA, 75 bp, synthetic construct
  source 1..75: mol_type = other DNA
attaaggctatccaggaggaagaaaaaaaggttgcctgggctgtaacagatcgtggccttatctttggctggttc

SEQ ID NO: 599468 - DNA, 75 bp, synthetic construct
  source 1..75: mol_type = other DNA
ggcctctgacaggatccgggcggcggtcctccgtaaacagaatgaaatgcagcaacgctacggcatacaacagga

SEQ ID NO: 599469 - DNA, 75 bp, synthetic construct
  source 1..75: mol_type = other DNA
ggtcagggaatggatatccactttgaccggatgatgtggcggggcatgtttctgaaggtcaatgcatatgccctg

SEQ ID NO: 599470 - DNA, 75 bp, synthetic construct
  source 1..75: mol_type = other DNA
agtgttaggaggtgtgggcagtattggcacactttataaagatgccaacacgcaggttattcagggtaactatgg

SEQ ID NO: 599471 - DNA, 75 bp, synthetic construct
  source 1..75: mol_type = other DNA
cgtacagggatacagctgataccggcactgacccgcgtacctgccttcattgatacggaagtggactctgacaat

SEQ ID NO: 599472 - DNA, 75 bp, synthetic construct
  source 1..75: mol_type = other DNA
gtcagccctgctggttatggggggcgtgattatcatcgggggcggatacctgctgctcacctggctgtcccccga

SEQ ID NO: 599473 - DNA, 75 bp, synthetic construct
  source 1..75: mol_type = other DNA
gcgatgcccccaacctcgaaatattcgaatcgatttaccgggaaggaatgcggcctcatgaatggctcgatacct

SEQ ID NO: 599474 - DNA, 75 bp, synthetic construct
  source 1..75: mol_type = other DNA
attatgtgattacgcagtcttatacctgcatgtcacgcgaggaagcgaagaaggccatcaaacgcacccgccgtt

SEQ ID NO: 599475 - DNA, 75 bp, synthetic construct
  source 1..75: mol_type = other DNA
aacggtacgcaatatttccgggggctggaggttaaagagttctccgaagaaaccgccacggggatgatggactcc

SEQ ID NO: 599476 - DNA, 75 bp, synthetic construct
  source 1..75: mol_type = other DNA
tgataataaaggaaataaacaattatcagacaacgcatctaaaataataaacttattgggtatagagtatcagtc

SEQ ID NO: 599477 - DNA, 75 bp, synthetic construct
  source 1..75: mol_type = other DNA
acagaaccatacataatgatcgaaatatcgtaagtaactcaggaaactggaaaacatcttttttatgtaatcttg

SEQ ID NO: 599478 - DNA, 75 bp, synthetic construct
  source 1..75: mol_type = other DNA
ctcctcgcatattcatcagcatgtggttcgctcgcctaaaagcgatctgtactgcacatgggagttgatgggaac

SEQ ID NO: 599479 - DNA, 75 bp, synthetic construct
  source 1..75: mol_type = other DNA
ttattgccggtggtatggcggaaagaggaagtcagatattaacccgccaggcagaaagtgagccctataaacagg

SEQ ID NO: 599480 - DNA, 75 bp, synthetic construct
  source 1..75: mol_type = other DNA
gactgaaagaccgctgcgctatcgtcaggaatggcaaaaggtgcaggatatctacggcagtgacagtgaagatat

SEQ ID NO: 599481 - DNA, 75 bp, synthetic construct
  source 1..75: mol_type = other DNA
cttgagcgtgcgctgcgtgagcagtccggctcccggatacgacggatcctgcttcgtctgccatgtgaatatgac

SEQ ID NO: 599482 - DNA, 75 bp, synthetic construct
  source 1..75: mol_type = other DNA
caagagtatttcgacggccctgaactggatcggctgattctggatgcctggagcaacgtactgggcttcgcgtca

SEQ ID NO: 599483 - DNA, 75 bp, synthetic construct
  source 1..75: mol_type = other DNA
gcttcgtctgccgtgtgaatatgacaataccttcaacagcagaacgacctggtttggtatggattttatcgaaac

SEQ ID NO: 599484 - DNA, 75 bp, synthetic construct
  source 1..75: mol_type = other DNA
ctgattctggatgcctggagcaacgtactgggcttcgcatcaccgggtgaagcagcaccgtaccagaagcagatc

SEQ ID NO: 599485 - DNA, 75 bp, synthetic construct
  source 1..75: mol_type = other DNA
tcggcgcaggcaggcgtggacggagatgaccggcgatgccgggttgtcatcgctgccgccggaaacctaccgaca

SEQ ID NO: 599486 - DNA, 75 bp, synthetic construct
  source 1..75: mol_type = other DNA
tccgttaatggctggcagttcgcaacgtacattaccgactgtttctgaaggagcattaggttattgggctttaac

SEQ ID NO: 599487 - DNA, 75 bp, synthetic construct
  source 1..75: mol_type = other DNA
gtgattaagtcggttgaagccggacgaactgttaaagatgtctgtcgcgaggccggaatctctgaagccacctat

SEQ ID NO: 599488 - DNA, 75 bp, synthetic construct
  source 1..75: mol_type = other DNA
agtgcagcaagtggcggtacgcgcagcgttaccgaaacgcctcactatcgtgaactgttaagagcggataatgaa

SEQ ID NO: 599489 - DNA, 75 bp, synthetic construct
  source 1..75: mol_type = other DNA
gagtaacgtactgggcttcgcgtcaccgggtgaagcaaagcagtatcagaagcagatcacccggaatgtggtgct

SEQ ID NO: 599490 - DNA, 75 bp, synthetic construct
  source 1..75: mol_type = other DNA
cgtacggcgaaaacgacgatggtggtgggtaaacagcggatgccagaaagtcgctgctatttttatcaggatctg

SEQ ID NO: 599491 - DNA, 75 bp, synthetic construct
  source 1..75: mol_type = other DNA
attccattgggattgaaaaaataaacaagatttctacaggtgatattaaacttttgcaatgttcaaaatctgaat

SEQ ID NO: 599492 - DNA, 75 bp, synthetic construct
  source 1..75: mol_type = other DNA
ctgctgatgatgttccagcatctgatgcagaaataccggcgtcctgagtcgtttgcgccgggggcgacgaaaaag

SEQ ID NO: 599493 - DNA, 75 bp, synthetic construct
  source 1..75: mol_type = other DNA
tgagttcaaccggcgttgtcgctatctttattcccgtggtgttaagcgttgccatgcgtatgcaaacgtcgccgt

SEQ ID NO: 599494 - DNA, 75 bp, synthetic construct
  source 1..75: mol_type = other DNA
cgattgcgctggctgctgccaaaacgatgggggtgtcgccttatccattcgcgatggtcgtggcgatggcagcat

SEQ ID NO: 599495 - DNA, 75 bp, synthetic construct
  source 1..75: mol_type = other DNA
ttacgtgagcgttatggcgctaacgtcatcggtgttgaacgctggcggcgttttcgtcgcgttatcgtgaacgtt

SEQ ID NO: 599496 - DNA, 75 bp, synthetic construct
  source 1..75: mol_type = other DNA
tttagcgtaacccctattggcttggtcgtattggtacttggcattttatacatgctagtgatgcgctttatgcta

SEQ ID NO: 599497 - DNA, 75 bp, synthetic construct
  source 1..75: mol_type = other DNA
atggatgcggtcgctttgtttgttattgtcgcgtttgcattaagcggaacgctgacagtccccgaagtattttcc

SEQ ID NO: 599498 - DNA, 75 bp, synthetic construct
  source 1..75: mol_type = other DNA
gtgaagcatcgccagcacacagtcaggcacctcatgccattttttgcctggtgttgatggtagcgttaatgctta

SEQ ID NO: 599499 - DNA, 75 bp, synthetic construct
  source 1..75: mol_type = other DNA
ccatgaaaaatctggatgcaattgaccgccgtgccgttccccgggctgccgccacgacacttaaccgtgtggcgg

SEQ ID NO: 599500 - DNA, 75 bp, synthetic construct
  source 1..75: mol_type = other DNA
agctggggatcagaatgctggggcgtcgtccgaacagcatactcaaagccggtcagcatcgttatcagcgggcat

SEQ ID NO: 599501 - DNA, 75 bp, synthetic construct
  source 1..75: mol_type = other DNA
caaattgcaggatagcttttatgtgaacgtctcttgggatgcgctgaacaccgcatatagtgaacaccatgagtg

SEQ ID NO: 599502 - DNA, 75 bp, synthetic construct
  source 1..75: mol_type = other DNA
gctcaggaagaaggttttcctctgactgaaggcgtttttgtttcttatccggggccgaatttcgaaacggcggcg

SEQ ID NO: 599503 - DNA, 75 bp, synthetic construct
  source 1..75: mol_type = other DNA
gggccggggaattacagcttcagtgattttgtgaagctgggggttccgtttaccattattgtgatggcggtttgt

SEQ ID NO: 599504 - DNA, 75 bp, synthetic construct
  source 1..75: mol_type = other DNA
ttgagattcctttttggcctgtgactgtgtttatcgctttcttcgacgctacggcagagcagatcaatcgagcta

SEQ ID NO: 599505 - DNA, 75 bp, synthetic construct
  source 1..75: mol_type = other DNA
atggcaaggtccgattatgagattattaatctgtctctgaaacatgaactgaatgagtggctgacagagagaggt

SEQ ID NO: 599506 - DNA, 75 bp, synthetic construct
  source 1..75: mol_type = other DNA
tggggctgcaaaccttaagcgatccgcaaggcgtgcaacctatctacgcgcctgcaccagtggtgcgtgagtcgg

SEQ ID NO: 599507 - DNA, 75 bp, synthetic construct
  source 1..75: mol_type = other DNA
cccgaccggcggcgctgtggggggtcccgcttgtccccctgctgttcaccctgtgcatccttaccctggcggccg

SEQ ID NO: 599508 - DNA, 75 bp, synthetic construct
  source 1..75: mol_type = other DNA
tacgcgacgctctggaagcggcaggtctgaaagcagacagcgcggaagtttccatgatcccgtccaccaaagctg

SEQ ID NO: 599509 - DNA, 75 bp, synthetic construct
  source 1..75: mol_type = other DNA
atgattatggataatacaattaagcatgatgatgttgttgttatggtcaatggagaaagctcattcactcagggg

SEQ ID NO: 599510 - DNA, 75 bp, synthetic construct
  source 1..75: mol_type = other DNA
cgcgcctgatgatgccgctaagttttgccgggctgattagcggcatgatgacgctggtggcgacgccgcctaacc

SEQ ID NO: 599511 - DNA, 75 bp, synthetic construct
  source 1..75: mol_type = other DNA
aatgggcgtatcaccttatccgttcgcaatggtcgtggcgatggctgcatccgccgcttttatgacgccagtttc

SEQ ID NO: 599512 - DNA, 75 bp, synthetic construct
  source 1..75: mol_type = other DNA
ttttgcagtgagcaattgctggagccgatggttttgcgcggtgagtatttttccgatcaggctcttgatgtcggc

SEQ ID NO: 599513 - DNA, 75 bp, synthetic construct
  source 1..75: mol_type = other DNA
ctgcagaaactgaacgccagcattgccgtggaagggctggatgccaaaaaagtggcagccgattatctgaagcaa

SEQ ID NO: 599514 - DNA, 75 bp, synthetic construct
  source 1..75: mol_type = other DNA
ttaagctcggtcaggatcagttgctgtcactggccggtggcgacacggcggtgacgatcaaagccgctgcccagc

SEQ ID NO: 599515 - DNA, 75 bp, synthetic construct
  source 1..75: mol_type = other DNA
tgcgtcaggatgtggcagagaaaaataaactcacttcgcttgccgacctgagtcgttatctgcaagagggcggca

SEQ ID NO: 599516 - DNA, 75 bp, synthetic construct
  source 1..75: mol_type = other DNA
cggtatccctgcatattcctgtttagatgcccctggcacatacaaagctggttatgcaatctgccgatctgtaga

SEQ ID NO: 599517 - DNA, 75 bp, synthetic construct
  source 1..75: mol_type = other DNA
accttattgccgtacaggcgggaaacgtcatcgtttataactatgatggtgatacgcgggaatatatttccgaat

SEQ ID NO: 599518 - DNA, 75 bp, synthetic construct
  source 1..75: mol_type = other DNA
agtctgattcagctgaaattgcaggccggacgtaaactgacgcaggcagaaacaaccagccttaacgctgtgctg

SEQ ID NO: 599519 - DNA, 75 bp, synthetic construct
  source 1..75: mol_type = other DNA
ctggcaaaaacggagcgaatggggttaatccagaagcatgtacttgaatcacggacaatcaggatttcattatgg

SEQ ID NO: 599520 - DNA, 75 bp, synthetic construct
  source 1..75: mol_type = other DNA
aatgcaccaggtatacataaggcgggttatgctatctgtcgttctgtgaatttaaattcatgggaatatgtgcca

SEQ ID NO: 599521 - DNA, 75 bp, synthetic construct
  source 1..75: mol_type = other DNA
cccgcaagcagtggatttacgttttttatgttgtacccgatccacagaagaagcgtgcacttgaactgctgtttg

SEQ ID NO: 599522 - DNA, 75 bp, synthetic construct
  source 1..75: mol_type = other DNA
atgaataacgcagaattaaacagtgaattaattgccactatggcaggagaaattactgtttataactttgacgtc

SEQ ID NO: 599523 - DNA, 75 bp, synthetic construct
  source 1..75: mol_type = other DNA
gagtcgtcgatatcgatgacgcggtggcacgtcatctgcacggtgtgcggcaagggattaatctaccgttacggc

SEQ ID NO: 599524 - DNA, 75 bp, synthetic construct
  source 1..75: mol_type = other DNA
aaatggcgcaggatatcgtggcacgtaccatgcgcatcatcgatactaatatcaacgtaatggatgcccgcgggc

SEQ ID NO: 599525 - DNA, 75 bp, synthetic construct
  source 1..75: mol_type = other DNA
gagacaaaggaatatatttccgcatcaactgaatatcttgcggtaggtgttggtattccggcatattcttgttta

SEQ ID NO: 599526 - DNA, 75 bp, synthetic construct
  source 1..75: mol_type = other DNA
gacgcccctggtgcatataaggatggttatacaatttgccgctctgtggatttaaaatcatgggaatatgtgcca

SEQ ID NO: 599527 - DNA, 75 bp, synthetic construct
  source 1..75: mol_type = other DNA
caccgaaactcagcaccgcatggggatagcgcaaccgaacggtaacgccttccggttaaatggcggcaagaggca

SEQ ID NO: 599528 - DNA, 75 bp, synthetic construct
  source 1..75: mol_type = other DNA
agtctgattcaactgaaattacaggccggacggaagttgacgcaggcagaaaccacccgtcttaacgcagtgctg

SEQ ID NO: 599529 - DNA, 75 bp, synthetic construct
  source 1..75: mol_type = other DNA
gattacattgacgcggtgacggcaacagataccagcaccgcgcctgatgttatctggcctgaactgccggaggcg

SEQ ID NO: 599530 - DNA, 75 bp, synthetic construct
  source 1..75: mol_type = other DNA
agcttattgccacgaaggcggggaatatttccgtctataactatgatggtgaatcacgggaatatatttccacat

SEQ ID NO: 599531 - DNA, 75 bp, synthetic construct
  source 1..75: mol_type = other DNA
aatttatcgccacccaagcaggaaatattacggtttataactatgatggtgaaacacgggaatatattttcacat

SEQ ID NO: 599532 - DNA, 75 bp, synthetic construct
  source 1..75: mol_type = other DNA
gattacattgacgcggtgacggcaacagatacgagcaccgcgccggatgtcatctggcctgaactgccggaggcg

SEQ ID NO: 599533 - DNA, 75 bp, synthetic construct
  source 1..75: mol_type = other DNA
aatcacagctccgggtgattatcctgaaaatacaaccactatcgccccgttaacgccatacgataaatgggatgg

SEQ ID NO: 599534 - DNA, 75 bp, synthetic construct
  source 1..75: mol_type = other DNA
acttaacgctgtgctgggttacattgacgcggtgacggcaacagataccagcacagcgccggacgtcatctggcc

SEQ ID NO: 599535 - DNA, 75 bp, synthetic construct
  source 1..75: mol_type = other DNA
ccatcagcacgtcccgctggaagaacgccaccgtcgggtatttcgcatttatacccttgatgaattaaagcgctt

SEQ ID NO: 599536 - DNA, 75 bp, synthetic construct
  source 1..75: mol_type = other DNA
aatcacggcgctgggtgactacccgaaaaatacaaccattatcgccccgttaacaccatacgataaatgggatgg

SEQ ID NO: 599537 - DNA, 75 bp, synthetic construct
  source 1..75: mol_type = other DNA
gattacattgacgcggtgacagcaacagataccagcaccgcgccagatgtcgtctggcctgaactgccagaggcg

SEQ ID NO: 599538 - DNA, 75 bp, synthetic construct
  source 1..75: mol_type = other DNA
gatgcccctggcacacataaggcaggttatgctatctgccgttcgatggatttaaactcatgggaatatgtgcca

SEQ ID NO: 599539 - DNA, 75 bp, synthetic construct
  source 1..75: mol_type = other DNA
gcaccgaaacaggagaatcaaaagaaatcacagctccgggtgattaccctgaaaagacaaccactatcgccacgt

SEQ ID NO: 599540 - DNA, 75 bp, synthetic construct
  source 1..75: mol_type = other DNA
ccacctttctcagccagtatcaggtaaaacatcgcccggacgggttgatcatcttgcctggcagcaccgtgatcg

SEQ ID NO: 599541 - DNA, 75 bp, synthetic construct
  source 1..75: mol_type = other DNA
aaggtttacgcgttctgcttgttgaaggtaacgatccccaaggcactgcctctatgtatcacggctgggtgccgg

SEQ ID NO: 599542 - DNA, 75 bp, synthetic construct
  source 1..75: mol_type = other DNA
atttattctttctttaaacggaaaagagttgtcgggaaattacttctgtgcatttatattctttatatatcacac

SEQ ID NO: 599543 - DNA, 75 bp, synthetic construct
  source 1..75: mol_type = other DNA
cattattccttcctgtttggctctgcaccgcattgaaactgagctaatgggcaaatttgatgaaggtaaattgcc

SEQ ID NO: 599544 - DNA, 75 bp, synthetic construct
  source 1..75: mol_type = other DNA
agtgcataaacgctggctatgaaatgacgaaggctattgctattgcgcagtttaatgatgacagcccggatgcga

SEQ ID NO: 599545 - DNA, 75 bp, synthetic construct
  source 1..75: mol_type = other DNA
atgacggctgaaatgatgctggaacagtcgcggttgatgcacttgttggcgcaggatagccgtttgcgggaagaa

SEQ ID NO: 599546 - DNA, 75 bp, synthetic construct
  source 1..75: mol_type = other DNA
tctgattctttatattatactattatcagttatttatatattgataacaagacttaatctcacaaccacatatta

SEQ ID NO: 599547 - DNA, 75 bp, synthetic construct
  source 1..75: mol_type = other DNA
agctcacaggtgacggagtattttataatctccatagccacctttctttttctgtcagggttgtgtttgctcttc

SEQ ID NO: 599548 - DNA, 75 bp, synthetic construct
  source 1..75: mol_type = other DNA
aggatgtcgcgtcgtacctcaaactcaacgagcgtactgtctatcgcatggccacagcagcaaagatcccagcgt

SEQ ID NO: 599549 - DNA, 75 bp, synthetic construct
  source 1..75: mol_type = other DNA
cctgctcccgggtacggcggatcctgcttcgtctgccgtgggaacatgacaacgccttcagtgacagaaaaatct

SEQ ID NO: 599550 - DNA, 75 bp, synthetic construct
  source 1..75: mol_type = other DNA
ataccacgtggtgctgtgcgtcagacaggagtatttcgatggccctgaactggaccggttgattctggatgcctg

SEQ ID NO: 599551 - DNA, 75 bp, synthetic construct
  source 1..75: mol_type = other DNA
ccgttcgcttacttctgactaaatatagtctcactacagggaatcaatcacgatggatggaagaacaaataagaa

SEQ ID NO: 599552 - DNA, 75 bp, synthetic construct
  source 1..75: mol_type = other DNA
gtaggtaaaggccagataaaaatgagaacagtatttgaacaagcagcaaaccaacgttcaacattgaatgcatgg

SEQ ID NO: 599553 - DNA, 75 bp, synthetic construct
  source 1..75: mol_type = other DNA
gccgcctggcaaaataacctgccactgacgccagcagataaagtctccggttataacaacttctatgaattcggg

SEQ ID NO: 599554 - DNA, 75 bp, synthetic construct
  source 1..75: mol_type = other DNA
aatcacagctccgggtaattaccctgataatacaaccactatcgccccattaacgccatacgataaatgggatgg

SEQ ID NO: 599555 - DNA, 75 bp, synthetic construct
  source 1..75: mol_type = other DNA
ccggcgcatggcgaaacgcactttcaatctgggaacctgtttgtaatgagatttttgatcgtctgattaaaccac

SEQ ID NO: 599556 - DNA, 75 bp, synthetic construct
  source 1..75: mol_type = other DNA
gaccatcgcggtgaaatcatctatagcaccgaaacaggagaatcgaaagaaatcacagctccgggtgattatcct

SEQ ID NO: 599557 - DNA, 75 bp, synthetic construct
  source 1..75: mol_type = other DNA
tattaccgtttataactatgatggtgaaactcgggaatatatttccacttcaagtgaatatcttgccgttggtgt

SEQ ID NO: 599558 - DNA, 75 bp, synthetic construct
  source 1..75: mol_type = other DNA
attaatgttgtatgtgctgctgatgtgttgattgtccccacgcctgctgagttgttcgactacacttccgctctg

SEQ ID NO: 599559 - DNA, 75 bp, synthetic construct
  source 1..75: mol_type = other DNA
atggtccttaaaaatgttgtgcgcgaaacggatgaagtcggtaaaggtcagatccgtatgagaaccgtttttgaa

SEQ ID NO: 599560 - DNA, 75 bp, synthetic construct
  source 1..75: mol_type = other DNA
ttgaacaaattaatcatatgcgtgatgtgtttggtacgcgactgcgacgtgctgaagacgtatttccaccggtga

SEQ ID NO: 599561 - DNA, 75 bp, synthetic construct
  source 1..75: mol_type = other DNA
cgatgaatgggatggtgagaaatgggtgacagatactgaggcacagcatagcgccgcagtaggcgcggcagaaac

SEQ ID NO: 599562 - DNA, 75 bp, synthetic construct
  source 1..75: mol_type = other DNA
acccactgtattgcgtagatattatcaagacttataaacctgatttcacgccacgagtggcctttattttaggtt

SEQ ID NO: 599563 - DNA, 75 bp, synthetic construct
  source 1..75: mol_type = other DNA
aagatcatatcaacaccatgccaggtacgccgatggtgggtcttaacgatgatcgttttggagagcgtttcttct

SEQ ID NO: 599564 - DNA, 75 bp, synthetic construct
  source 1..75: mol_type = other DNA
aaatggcgcaggatatcgtggcacgtaccatgcgtatcatcgataccaatatcaacgtaatggatgcccgcgggc

SEQ ID NO: 599565 - DNA, 75 bp, synthetic construct
  source 1..75: mol_type = other DNA
cagagaatctgcgtaaatatggcgaactggtctgcatgacggctgaaatgatgctggaacagtcgcggttgatgc

SEQ ID NO: 599566 - DNA, 75 bp, synthetic construct
  source 1..75: mol_type = other DNA
gaccatcgcggagaaatcgtctataacaccgaaacgggagacgccaaagaaatcacaactccgggtgattacccc

SEQ ID NO: 599567 - DNA, 75 bp, synthetic construct
  source 1..75: mol_type = other DNA
cggctggtataagcgccgggctttctgcacgctggtttccgcacattgatgcggcaatgaaagagtttggcatta

SEQ ID NO: 599568 - DNA, 75 bp, synthetic construct
  source 1..75: mol_type = other DNA
gcagcagaaaaagcggctgctgaaaaggcagcagctgataagaaagcagcggcagaaaaagccgccgcagacaaa

SEQ ID NO: 599569 - DNA, 75 bp, synthetic construct
  source 1..75: mol_type = other DNA
tcccgcactttgtcaagctgcgttggcagcagctaaacttgcgaagatcccgaaaccaccaagccaggcagtata

SEQ ID NO: 599570 - DNA, 75 bp, synthetic construct
  source 1..75: mol_type = other DNA
gtaccaaaggttgttctgttgatataggtaccgtcatcgacaatgataactgcacacacatcgtatcccgttttt

SEQ ID NO: 599571 - DNA, 75 bp, synthetic construct
  source 1..75: mol_type = other DNA
acgcaggtgaaaaattataaaaaaccgcttaaagaaggatatctggggcctattgatacactgaatctgaatctc

SEQ ID NO: 599572 - DNA, 75 bp, synthetic construct
  source 1..75: mol_type = other DNA
ctatatatcatttgtacctgcagcagcaaaagaggcgatcgagcttggcctctcttttgatgaatatgaccctaa

SEQ ID NO: 599573 - DNA, 75 bp, synthetic construct
  source 1..75: mol_type = other DNA
ttcccctacagatgtattttttactaatttgatagagtctatgtcaaagttagctctacagggagaaaaaattgg

SEQ ID NO: 599574 - DNA, 75 bp, synthetic construct
  source 1..75: mol_type = other DNA
cgcaattaacgatccggagagactgcaacaggccgaccagtgtctggaacgggctgcctggctgcatccaaaaat

SEQ ID NO: 599575 - DNA, 75 bp, synthetic construct
  source 1..75: mol_type = other DNA
acgctggcaggcagaaaatcaggaagggatggctgaggtcgcccggtttattgaaatgaacggctcttttgccga

SEQ ID NO: 599576 - DNA, 75 bp, synthetic construct
  source 1..75: mol_type = other DNA
gtttgacgtgggctatctggataaggcgctggaatgggctgatatcgctattgcccagcaacaggccacgccgga

SEQ ID NO: 599577 - DNA, 75 bp, synthetic construct
  source 1..75: mol_type = other DNA
ctggctgtttgacaccggtcagtttgaacacgcgctgcagtgggcagatattgctatcgctcaggggcaacgaat

SEQ ID NO: 599578 - DNA, 75 bp, synthetic construct
  source 1..75: mol_type = other DNA
atcagttttgggtagagaaattagcattcacagccctttgagacgttattatttagcaagaaattctatttatat

SEQ ID NO: 599579 - DNA, 75 bp, synthetic construct
  source 1..75: mol_type = other DNA
ctgcggttatctccggttgcctgtcattaagcgggccgacgtttgcttcgtcaaaagggcctgtacttatccatt

SEQ ID NO: 599580 - DNA, 75 bp, synthetic construct
  source 1..75: mol_type = other DNA
ccgaaaccatcggtaagggcaagtttaaggggattctcccgctcgaccgctggatgatcgacccggtactgaccc

SEQ ID NO: 599581 - DNA, 75 bp, synthetic construct
  source 1..75: mol_type = other DNA
caagcaccaatgaccccgctgcgactcgaaaccattggcgagggcaagtttaagggcattctcccgctcgaccgc

SEQ ID NO: 599582 - DNA, 75 bp, synthetic construct
  source 1..75: mol_type = other DNA
ccgggtaagctcgttgcaggagaggcgtttacgtcttccggtgcggcggatactggacatcatgcatcgttcgga

SEQ ID NO: 599583 - DNA, 75 bp, synthetic construct
  source 1..75: mol_type = other DNA
tgtaccagcaaactttcgcgcttttttgccacccgcgaagaagcagagtcctttatgactaaactgaaagagctt

SEQ ID NO: 599584 - DNA, 75 bp, synthetic construct
  source 1..75: mol_type = other DNA
cagagcaatgaaggcatgacgctcatggactcgcgggataagttcgaaacccaccagtacagcttcagtggtctg

SEQ ID NO: 599585 - DNA, 75 bp, synthetic construct
  source 1..75: mol_type = other DNA
tctgcgtacctacaaagtgaaaaaactccgtgaacttattgcgctgggtggtcccgcgttcgaagcgctgctgaa

SEQ ID NO: 599586 - DNA, 75 bp, synthetic construct
  source 1..75: mol_type = other DNA
gagtttaaagaggatatcgcgggcgctgttggcattcctcttgtccgcctgttccgccagtcaccgaagggtttt

SEQ ID NO: 599587 - DNA, 75 bp, synthetic construct
  source 1..75: mol_type = other DNA
cagtcgattcgaaagcggacgatatgaccaaaaagggcgtgcggatcaccagtgagattgacccgaaacgtcgtg

SEQ ID NO: 599588 - DNA, 75 bp, synthetic construct
  source 1..75: mol_type = other DNA
agctcgaccgcatcaaagagggtcagttcaagggggtgatgtgcctcgaccgctggcaggtaaccccgagctatt

SEQ ID NO: 599589 - DNA, 75 bp, synthetic construct
  source 1..75: mol_type = other DNA
ttctattcttgcttttgtcgaacagggcgatcatgtgttgatgaccaacaccgcctatgaaccgagtcaggattt

SEQ ID NO: 599590 - DNA, 75 bp, synthetic construct
  source 1..75: mol_type = other DNA
tgaaagcagtctgaaagtggctgaatggctggcagaacatccccaagtagcgcgagttaaccaccctgctctgcc

SEQ ID NO: 599591 - DNA, 75 bp, synthetic construct
  source 1..75: mol_type = other DNA
gcgaaggtcagtttaacaacgtaccaccggagctgaacgatatgtgccgcatcatcagccatgtccaccagcatc

SEQ ID NO: 599592 - DNA, 75 bp, synthetic construct
  source 1..75: mol_type = other DNA
acgctggcaggctgaaaatcaggaagggatggccgaggttgcccggtttcttgaaatgaacggttcattcgccga

SEQ ID NO: 599593 - DNA, 75 bp, synthetic construct
  source 1..75: mol_type = other DNA
caggaatgcatattctgctcaagctggcctcgctggtagtgattctcgccggcattcacgcagcggcagatatca

SEQ ID NO: 599594 - DNA, 75 bp, synthetic construct
  source 1..75: mol_type = other DNA
ggcattcacgcagcggcagatatcattgtgcagctattactggcgctgttttttgccatcgtcctcaacccgctc

SEQ ID NO: 599595 - DNA, 75 bp, synthetic construct
  source 1..75: mol_type = other DNA
gcacagtccttaattataacattcataccgacatgattatcttctgtccggaagaatcagaggctcagaacgctg

SEQ ID NO: 599596 - DNA, 75 bp, synthetic construct
  source 1..75: mol_type = other DNA
tgtggtggtggttatgctgatcgcacttaccgcactggtcggtgtgctggcggcatcatttaatgaatttatctc

SEQ ID NO: 599597 - DNA, 75 bp, synthetic construct
  source 1..75: mol_type = other DNA
gtttttagttgtccatatggttatcggcaatattttagaaccacggatgatgggccatcgcctggggatgtccac

SEQ ID NO: 599598 - DNA, 75 bp, synthetic construct
  source 1..75: mol_type = other DNA
gtgcttttgctggtgatgaccgtagtttttatgctgtttgaagtgcgccacgtcccttacaaaatgcgttttgcg

SEQ ID NO: 599599 - DNA, 75 bp, synthetic construct
  source 1..75: mol_type = other DNA
gccttagcatcaaaaaatggcacatgtttggcgagaaaaagtctcaacgaaaaatggtgcttatcaagttgccat

SEQ ID NO: 599600 - DNA, 75 bp, synthetic construct
  source 1..75: mol_type = other DNA
atgaacagtaacctgaccaggatatgttaccgtggtgaaactggggaaagtgatctcagaacgttgatccttggc

SEQ ID NO: 599601 - DNA, 75 bp, synthetic construct
  source 1..75: mol_type = other DNA
ttattgatatcgaaattcgagcacgaaaatcagcccaagctaagggtaaagaagcagaagttgagcaagcggtac

SEQ ID NO: 599602 - DNA, 75 bp, synthetic construct
  source 1..75: mol_type = other DNA
tctaccaaaataattattgggctggaatcagatggggtgatcacctggttggaagggttatttttttctcctgcc

SEQ ID NO: 599603 - DNA, 75 bp, synthetic construct
  source 1..75: mol_type = other DNA
cttacgttgtttcttttgattatccatcatcttattactcagttttcttaaggttaaggtcgttaatgtatgata

SEQ ID NO: 599604 - DNA, 75 bp, synthetic construct
  source 1..75: mol_type = other DNA
aaggatcagttttagctcaaatggctgaaatacttgcacaaaattcgcgagcacttgctgacgcaatccataaac

SEQ ID NO: 599605 - DNA, 75 bp, synthetic construct
  source 1..75: mol_type = other DNA
taccgacatgattatcttctgtccggaagaatcagaggctgcggtttcagactgtctgccggtacattcctctcc

SEQ ID NO: 599606 - DNA, 75 bp, synthetic construct
  source 1..75: mol_type = other DNA
gataaatgaggatttgattctgccagccaccaacaaggaagccgcatcgaaatttgatgcagatgagcgtgatgg

SEQ ID NO: 599607 - DNA, 75 bp, synthetic construct
  source 1..75: mol_type = other DNA
tcaggataaaaaagtcaccctcaccaataaaccctgctcgaccgataacccgtgcgtctttatcgcgaagcaaga

SEQ ID NO: 599608 - DNA, 75 bp, synthetic construct
  source 1..75: mol_type = other DNA
ctggaatctcaagcaagaagctatctgcaagggcaaatcacctcatctgcacagtcttatatcgaaggtgcgctt

SEQ ID NO: 599609 - DNA, 75 bp, synthetic construct
  source 1..75: mol_type = other DNA
atgtttttagtatcattgttgagacgtattgcatttagttactacgattataaagcttataattttaatattgaa

SEQ ID NO: 599610 - DNA, 75 bp, synthetic construct
  source 1..75: mol_type = other DNA
gggtgaattgtcgccacgcgatcaggcgctggtgaccgatatgtgggaacacctgtttcagcaggcttcacagca

SEQ ID NO: 599611 - DNA, 75 bp, synthetic construct
  source 1..75: mol_type = other DNA
agagtctggaaaaagctattggcgcgggtgaattgtcgccgcgcgaccaggcgctggtaaccgatatgtgggaac

SEQ ID NO: 599612 - DNA, 75 bp, synthetic construct
  source 1..75: mol_type = other DNA
agatgcctggaatcaggcgaatcagaatggggcaatgggtgaccttacggctctgcagacgatatttagcaaagt

SEQ ID NO: 599613 - DNA, 75 bp, synthetic construct
  source 1..75: mol_type = other DNA
ttgcttatatcgaaaaagagggcaatgccctgatgcaggatctggaggaagaaggttatctggttggcctggaga

SEQ ID NO: 599614 - DNA, 75 bp, synthetic construct
  source 1..75: mol_type = other DNA
tcaggatattttcgactgggcggggcaactgcgtgaagttgatatttatcagggcgatacgccgttctgccactt

SEQ ID NO: 599615 - DNA, 75 bp, synthetic construct
  source 1..75: mol_type = other DNA
gtagggctggaaaaatgtaagtggacaatcaatgcgctaatcaatcatcactataagattgtcgtcgcctcttgg

SEQ ID NO: 599616 - DNA, 75 bp, synthetic construct
  source 1..75: mol_type = other DNA
atactctcaagtgtatattcagtatgggattgcgcaatgattgcctaataaaatttctgaaatatttctgtatcg

SEQ ID NO: 599617 - DNA, 75 bp, synthetic construct
  source 1..75: mol_type = other DNA
atgtcagatttggctatgaagattttgaaagggcaatcgactggcgatatcggcatcagtagcgcaactcttgcc

SEQ ID NO: 599618 - DNA, 75 bp, synthetic construct
  source 1..75: mol_type = other DNA
gaccgatgatgcgcgtattcagcgcctgcttaagcgcgcagtccatcgggcgattgataaggtcgatctttccgg

SEQ ID NO: 599619 - DNA, 75 bp, synthetic construct
  source 1..75: mol_type = other DNA
cagcaacatctctctatggggcagatcaacggcagccagttgcaatggattacagaacaaaaaagctcactgctg

SEQ ID NO: 599620 - DNA, 75 bp, synthetic construct
  source 1..75: mol_type = other DNA
ccactcatcttgagcttgagaaaaaccgtggttactggcgggcaaaatggtttgagcgtgatagttaccaactgt

SEQ ID NO: 599621 - DNA, 75 bp, synthetic construct
  source 1..75: mol_type = other DNA
tgaagcttttaaccgctatctcagtgaattgtggggggatttacgggaatggctgaaagcggatatcaacagtga

SEQ ID NO: 599622 - DNA, 75 bp, synthetic construct
  source 1..75: mol_type = other DNA
ccggaaatggcagcgcgagccgatgccgtaaaaagttatctgaaagaagatgaagcttttaacgtaagcggctcg

SEQ ID NO: 599623 - DNA, 75 bp, synthetic construct
  source 1..75: mol_type = other DNA
ccgtaaaaagctatctgaaagaagatgaagcttttaaccgctatctcagtgaattgtggggggatttgcgggaat

SEQ ID NO: 599624 - DNA, 75 bp, synthetic construct
  source 1..75: mol_type = other DNA
gcggtggtcggcattctgctggcagcctggctgtggctgggtaaacgtactctggtgacctccatcgccaacagt

SEQ ID NO: 599625 - DNA, 75 bp, synthetic construct
  source 1..75: mol_type = other DNA
ctgctgatcggtttctattacaccgatccgaagaatggcgcagcggcaatgaaagcgttcgtcgtgacccgtgtg

SEQ ID NO: 599626 - DNA, 75 bp, synthetic construct
  source 1..75: mol_type = other DNA
cgttgcagacatggcttgccgacgcgatggctggcccgacgcctgtctctgcgctgatccacgccgcaacgatgg

SEQ ID NO: 599627 - DNA, 75 bp, synthetic construct
  source 1..75: mol_type = other DNA
atgtatgcctcctggtatatgcgcggagaagagggctactctcgcttcttcgcttacaccaacttgttcatcgcc

SEQ ID NO: 599628 - DNA, 75 bp, synthetic construct
  source 1..75: mol_type = other DNA
gctggcgttctcccgtgggcgctggtctgaaaacgtctcggcgatcgtgggcgttggctctgtgggcctggcggc

SEQ ID NO: 599629 - DNA, 75 bp, synthetic construct
  source 1..75: mol_type = other DNA
gtgaagagggctactctcgcttcttcgcctacaccaacctgttcatcgccagcatggtggttctggttcttgccg

SEQ ID NO: 599630 - DNA, 75 bp, synthetic construct
  source 1..75: mol_type = other DNA
ccgttaactacacgccttgtggtcactgccgtcagtttatgaatgaactgaacagcggtctggatctgcgtattc

SEQ ID NO: 599631 - DNA, 75 bp, synthetic construct
  source 1..75: mol_type = other DNA
acccgcaacgggccttattatattctcgcgccgggcgtagcaatgccccatgcacgaccggaatgtggggcgctt

SEQ ID NO: 599632 - DNA, 75 bp, synthetic construct
  source 1..75: mol_type = other DNA
ccgcctccatcaatatgatgatgaccgaaatgaatgacagcagcggtcgctggagttatgcgcgccagttatacg

SEQ ID NO: 599633 - DNA, 75 bp, synthetic construct
  source 1..75: mol_type = other DNA
caccagcgcactgattctggagagcatgaccagaaacgatcgtcatcaggtgctgctcgatacgctgatcgcaca

SEQ ID NO: 599634 - DNA, 75 bp, synthetic construct
  source 1..75: mol_type = other DNA
gaaattcctgtcagcctcaattactacggctttggtgggggcgaagtgctgccagcgggcgtacagattgccgtg

SEQ ID NO: 599635 - DNA, 75 bp, synthetic construct
  source 1..75: mol_type = other DNA
catgcaggcacatgatatcagcgcaacaacgatggctgcattgctggccccctggaatatccgccctgccgtctt

SEQ ID NO: 599636 - DNA, 75 bp, synthetic construct
  source 1..75: mol_type = other DNA
agacagaaaaaaaacattaacaatgccattattcatcccgtgctctcgttatatccggtcaggatggataaggaa

SEQ ID NO: 599637 - DNA, 75 bp, synthetic construct
  source 1..75: mol_type = other DNA
gactcttaaaattggctgtttattgttgcttatagcaggagcgaccatttttattgccgatcgcgttatggtcaa

SEQ ID NO: 599638 - DNA, 75 bp, synthetic construct
  source 1..75: mol_type = other DNA
ggtattttggtgccaatatggaatttattggcgcgacaatgcagcaaaccgttcatgccgaacaaagtgctatca

SEQ ID NO: 599639 - DNA, 75 bp, synthetic construct
  source 1..75: mol_type = other DNA
gagcgcaacggggctggacgaagacgcgctggctttcgcactgctgccgctggcggcggcctgtgcccgcacgcc

SEQ ID NO: 599640 - DNA, 75 bp, synthetic construct
  source 1..75: mol_type = other DNA
attaaccgttgccagcggccagttcgatattatccgcagctcggttatctccatcaccgacgatcagcgtttgca

SEQ ID NO: 599641 - DNA, 75 bp, synthetic construct
  source 1..75: mol_type = other DNA
gcagaccctgctgtctcatggcgtggcaacggcgtatgtcgaaagcggggtgctgcgcattcagcgtgatgtcac

SEQ ID NO: 599642 - DNA, 75 bp, synthetic construct
  source 1..75: mol_type = other DNA
cggcatcgatgccatcgggtttaacgcaccagacctgaatatgaaacatggtttttatactcagctgcgggagaa

SEQ ID NO: 599643 - DNA, 75 bp, synthetic construct
  source 1..75: mol_type = other DNA
aaaagcgcaaccatccccacgccgacgctattcatacggcgggttgggtaagtctgtttaccctgcatgtaatct

SEQ ID NO: 599644 - DNA, 75 bp, synthetic construct
  source 1..75: mol_type = other DNA
ttactgctgcgatatcgcccgctatcacctggcgaccgattaccgtatcagctcagaagaaattcagatgcgcta

SEQ ID NO: 599645 - DNA, 75 bp, synthetic construct
  source 1..75: mol_type = other DNA
cagtgcccagattgatggctatctggtggggcgttaccggaccccgtggcctgacagcccggggattctggtggg

SEQ ID NO: 599646 - DNA, 75 bp, synthetic construct
  source 1..75: mol_type = other DNA
atgtcttacgccacaccggaacagttcatcagggcattcagtgaacgcgaggcacgcacactgacggatgaagac

SEQ ID NO: 599647 - DNA, 75 bp, synthetic construct
  source 1..75: mol_type = other DNA
ttctaacatttatctctggtgctgctttcgcggcaccagagataaatgttaagcaaaacgaatcgttacctgatt

SEQ ID NO: 599648 - DNA, 75 bp, synthetic construct
  source 1..75: mol_type = other DNA
gttgcatccgggcgaatcaatctgggccgcacgacgacgggggacgtggtgaaaagcggaaccggtgcgcggatg

SEQ ID NO: 599649 - DNA, 75 bp, synthetic construct
  source 1..75: mol_type = other DNA
atgtcttacgccacaccggaacagttcatcagggcgttcagtgaacgcgaggcgcgcacactgacggatgaagac

SEQ ID NO: 599650 - DNA, 75 bp, synthetic construct
  source 1..75: mol_type = other DNA
tcctcaaactggcggcctggggcggcgttgttttcctacattttcccatcctgataatcgccgcctatgcgttta

SEQ ID NO: 599651 - DNA, 75 bp, synthetic construct
  source 1..75: mol_type = other DNA
cttagaaaataaattaaagagtgtaatgcgaaattattcaaaatcgagcatttgctccaacaggcaaatgaaagc

SEQ ID NO: 599652 - DNA, 75 bp, synthetic construct
  source 1..75: mol_type = other DNA
aagcagaatccagagttgtactggcagatccttgcagaagcagccagcatcgcccagggtaaagagcagcagaag

SEQ ID NO: 599653 - DNA, 75 bp, synthetic construct
  source 1..75: mol_type = other DNA
gttgatgatttactcattgataatgctgctcgttatctgctgaaagactggaaaggggttggtgaactggttaat

SEQ ID NO: 599654 - DNA, 75 bp, synthetic construct
  source 1..75: mol_type = other DNA
gccagaacgagggatcgcgctgcttaagcagaatccggagtgtactggcagatccttgcagaagcagccagcatc

SEQ ID NO: 599655 - DNA, 75 bp, synthetic construct
  source 1..75: mol_type = other DNA
tcaccatcgtggtcggtcatgcgactttttgtgtagtggtggtgtttaacaatgtcatcgcccgttttcgccgca

SEQ ID NO: 599656 - DNA, 75 bp, synthetic construct
  source 1..75: mol_type = other DNA
ttggcgataacacggaccgcaacggtgatgctctgccagaagataatcttgcaccgcagctctacgacgctcagg

SEQ ID NO: 599657 - DNA, 75 bp, synthetic construct
  source 1..75: mol_type = other DNA
cagaacaagtcaaccataccgaagttcatctggttggcgcttatccggtaacgccaattaatatcgcgattgaac

SEQ ID NO: 599658 - DNA, 75 bp, synthetic construct
  source 1..75: mol_type = other DNA
ttattatgtatggtatatctcgtttgataaaagataatcgagctattgtttttataagtatattggttataataa

SEQ ID NO: 599659 - DNA, 75 bp, synthetic construct
  source 1..75: mol_type = other DNA
tcacgccgcagctttacgacgcgcaggacaaacgagtgacgttaaccttgctcgaccgacaacccctgcgttttt

SEQ ID NO: 599660 - DNA, 75 bp, synthetic construct
  source 1..75: mol_type = other DNA
gaccgaatttcccggctggagcatcaactcgccgccgagaaaaagactgactattccacgttcccggagatctaa

SEQ ID NO: 599661 - DNA, 75 bp, synthetic construct
  source 1..75: mol_type = other DNA
tcagcgtctgaaccgggtgacggataaagagcacgtagaaaaaggaatgatgagcgcccttcccgaaacggatat

SEQ ID NO: 599662 - DNA, 75 bp, synthetic construct
  source 1..75: mol_type = other DNA
atattttatgattatgactttacccgtggacatcgccgtttaggtttaggcgccgaagcctggacggattattta

SEQ ID NO: 599663 - DNA, 75 bp, synthetic construct
  source 1..75: mol_type = other DNA
actccgaagatttcgatttttatgaggagcgtcctgcgcgcggctgggatattcgcgccgaagcctggctacccg

SEQ ID NO: 599664 - DNA, 75 bp, synthetic construct
  source 1..75: mol_type = other DNA
gcgcgacgctaacaaagacggcgtgttccagctttctgagaagctcactgacgacgagatgaaacagtatgacta

SEQ ID NO: 599665 - DNA, 75 bp, synthetic construct
  source 1..75: mol_type = other DNA
gccgaacaagaaaaactcaatacctggcgagtacgtctggcgctggaagatgaaaagggcaaccgacagaactct

SEQ ID NO: 599666 - DNA, 75 bp, synthetic construct
  source 1..75: mol_type = other DNA
ggtggaaatcaccgttcagcaggaccgtaaaattgagttgattgttaataacatcgcgaacgtgccggaagagaa

SEQ ID NO: 599667 - DNA, 75 bp, synthetic construct
  source 1..75: mol_type = other DNA
ttaacgcgcttatcaaccaccactacaaaattgtcgctgcgtcatggcaggcgaaaaacaatgctgcccgcacgc

SEQ ID NO: 599668 - DNA, 75 bp, synthetic construct
  source 1..75: mol_type = other DNA
gtcatctgcatttttcgctgggagaggggaccgtttctgcgcgaagaatcgacagtttgcggcaaaaaacactaa

SEQ ID NO: 599669 - DNA, 75 bp, synthetic construct
  source 1..75: mol_type = other DNA
aacaggctggtcgtggtctggtaaacataccatttgacgtattacagggtggcgcaagtctgattaatgcaatca

SEQ ID NO: 599670 - DNA, 75 bp, synthetic construct
  source 1..75: mol_type = other DNA
agggttctctggaggaggtgttattggagcaatagtgggtggcgctgcaggtggagcaattgatgcaatagcaaa

SEQ ID NO: 599671 - DNA, 75 bp, synthetic construct
  source 1..75: mol_type = other DNA
cagcgggccggggggaaaccaactggcgggaaagtactggcgtagcgtgatcaccactggcgagccggaaagtgc

SEQ ID NO: 599672 - DNA, 75 bp, synthetic construct
  source 1..75: mol_type = other DNA
tcaccaccggcgagccggaaagtgcctatcgctatgacgcgttaaatcgttatccgatgagcgatgtcctgcggc

SEQ ID NO: 599673 - DNA, 75 bp, synthetic construct
  source 1..75: mol_type = other DNA
atgaccacgctgacagcacaacagattgcctgtgtttacgcctggctagcgcagttgttctcccgtgagctggac

SEQ ID NO: 599674 - DNA, 75 bp, synthetic construct
  source 1..75: mol_type = other DNA
gagagtgcagagtctgttttcgggcgtgatttggcaacagatgcactgattacgaatggagtaaaatcccttcaa

SEQ ID NO: 599675 - DNA, 75 bp, synthetic construct
  source 1..75: mol_type = other DNA
atcatcagcagtattggttttggcggcacctttatggggacgacctcgctggtgatgaccatcgcccgccagctt

SEQ ID NO: 599676 - DNA, 75 bp, synthetic construct
  source 1..75: mol_type = other DNA
caggttgttttggctggctgtgggcagccaaacggtggggagcattaccttgcctgaccgcgaatttgctggtgc

SEQ ID NO: 599677 - DNA, 75 bp, synthetic construct
  source 1..75: mol_type = other DNA
tcgatcgaccgacagacccttacgcgcaagccggtgaaacaattggtgggtatctcctgccaattggcacagcgg

SEQ ID NO: 599678 - DNA, 75 bp, synthetic construct
  source 1..75: mol_type = other DNA
gctgtcgtggttttctgcttttccttgagcaaattcaggtgctcaaccttgaaacccgtgaaatggtgatagagc

SEQ ID NO: 599679 - DNA, 75 bp, synthetic construct
  source 1..75: mol_type = other DNA
ccgcttactcctgaaatgaaacagtttgttcaggcaaacaatcaaggtggagtaacatttgatggcatgaaagca

SEQ ID NO: 599680 - DNA, 75 bp, synthetic construct
  source 1..75: mol_type = other DNA
cattatattgacgcaggtggcggcagtcgtggggcgcggatggttattgatccgcaaggcgaatgcctgccacaa

SEQ ID NO: 599681 - DNA, 75 bp, synthetic construct
  source 1..75: mol_type = other DNA
tcgtaatcctgaacctgtgccgggtgacctgccgttctcattagatcgactggacgacgacgttcgcgcgtatct

SEQ ID NO: 599682 - DNA, 75 bp, synthetic construct
  source 1..75: mol_type = other DNA
aatgccgggcaggtttttgctgttcgtctggcacgttttattggttgcacgcaaaagcggaatattgatggagat

SEQ ID NO: 599683 - DNA, 75 bp, synthetic construct
  source 1..75: mol_type = other DNA
gtcggggagcacgtattattctcgacagggatggaaattctattccgcaaacacgaaatggtttttgtgatgcct

SEQ ID NO: 599684 - DNA, 75 bp, synthetic construct
  source 1..75: mol_type = other DNA
ttgctacggcgaaacatatcctgcgcccattggtccgtcgcagtcggatttcggtggcgtaggattattacaaac

SEQ ID NO: 599685 - DNA, 75 bp, synthetic construct
  source 1..75: mol_type = other DNA
cagacttggcggctttgatgctatcaaacccgcttatatggctcaggtgcaattcagcatgtgggttacagacaa

SEQ ID NO: 599686 - DNA, 75 bp, synthetic construct
  source 1..75: mol_type = other DNA
acaccctgctggctgaagtttgtactggcgtggcaccggaagttaacgctaagtcgctcgcatggggaaagcaat

SEQ ID NO: 599687 - DNA, 75 bp, synthetic construct
  source 1..75: mol_type = other DNA
ccgggatgccgttgtcggttgtgagagaaaaaattcaggcacgaatgtctgaccatgcgggatttatttgccatg

SEQ ID NO: 599688 - DNA, 75 bp, synthetic construct
  source 1..75: mol_type = other DNA
acaaaagcgatctgttgaagatgatgtcgcacaactggcatctccggcactaaattcaatcagagagatcatcac

SEQ ID NO: 599689 - DNA, 75 bp, synthetic construct
  source 1..75: mol_type = other DNA
atgaaaaaaagacatctgcttagcttactggcgctgggcattagcacggcctgctacggcgaaacgtatcctgcg

SEQ ID NO: 599690 - DNA, 75 bp, synthetic construct
  source 1..75: mol_type = other DNA
tcttctgctcacagaacccgaaatcatgaccgacgaatccccggtggaatgcttatatctgtaaatgcacctgga

SEQ ID NO: 599691 - DNA, 75 bp, synthetic construct
  source 1..75: mol_type = other DNA
gaagaggcccgttacctggacatacccgacccggtaaaggttgcactcggcgaccttatctcgttcatcacctgg

SEQ ID NO: 599692 - DNA, 75 bp, synthetic construct
  source 1..75: mol_type = other DNA
atggaaagcttcgaaactgaaaaaatgctagatctttgtcttcattatgctttctacataaatatcttaataacg

SEQ ID NO: 599693 - DNA, 75 bp, synthetic construct
  source 1..75: mol_type = other DNA
tggttttgcgcaagtattcgtgctgaaagagggcgttgctggctgggctggcgaaaacttgcctctggtgcgcgg

SEQ ID NO: 599694 - DNA, 75 bp, synthetic construct
  source 1..75: mol_type = other DNA
ggggatattgcagtatttcatcatggctgggtactggacatctttgatgaacaagctcctcagtgtaaattgtac

SEQ ID NO: 599695 - DNA, 75 bp, synthetic construct
  source 1..75: mol_type = other DNA
aaagcctgatcgatgctaccccgccaggggttcaagaggacatcatcagcgaatccgcagaaaatacaaaggaac

SEQ ID NO: 599696 - DNA, 75 bp, synthetic construct
  source 1..75: mol_type = other DNA
ggatgatctgaaacttgagaatcaggcgctacagggacaattagagatccggaacagtactgttcaggagttaca

SEQ ID NO: 599697 - DNA, 75 bp, synthetic construct
  source 1..75: mol_type = other DNA
taggctttgtgacgctcatttacggcattggacaaatcctcggcccggcgctgaccagtatgctcggcaatggaa

SEQ ID NO: 599698 - DNA, 75 bp, synthetic construct
  source 1..75: mol_type = other DNA
gcacgggcggtgaatcaaacacagcagcgtgatgcttcccgatcccgcgcccagcaacgacttgtacgtcgtcac

SEQ ID NO: 599699 - DNA, 75 bp, synthetic construct
  source 1..75: mol_type = other DNA
ggtggagcgaccgagtgcgccatctggtcggtctactacccgataggtgaggtggaatcgacgtggaccagtatt

SEQ ID NO: 599700 - DNA, 75 bp, synthetic construct
  source 1..75: mol_type = other DNA
ttcacaaacgttgtggcaaggtgccggggcactttctgccataatattgcttgttctggcgctgctcattccgtc

SEQ ID NO: 599701 - DNA, 75 bp, synthetic construct
  source 1..75: mol_type = other DNA
gaataaacacgttatcccgccagcgccattggcaaaaatcgcgcaacaacccatgagctggtggttactggcgat

SEQ ID NO: 599702 - DNA, 75 bp, synthetic construct
  source 1..75: mol_type = other DNA
atcgctctgggtaatgaatatgtgctggcaggcctgcattttgccctctcttcacaaacgttgtggcaaggtgcc

SEQ ID NO: 599703 - DNA, 75 bp, synthetic construct
  source 1..75: mol_type = other DNA
ggtgatattgccgtgtttcaccatggttgggtacttgatatctttgatgaaaaagcaccacagtgtaaattgtat

SEQ ID NO: 599704 - DNA, 75 bp, synthetic construct
  source 1..75: mol_type = other DNA
ggcctgaacttactgctaaacagtggaacggaatcacgctattacatcttgcaacctacaccgctggcgggctgc

SEQ ID NO: 599705 - DNA, 75 bp, synthetic construct
  source 1..75: mol_type = other DNA
tcactgagaaaacgcttcaacaagggatacaactggcacaatctcgctactggcaaaccggcgatatgtatcagg

SEQ ID NO: 599706 - DNA, 75 bp, synthetic construct
  source 1..75: mol_type = other DNA
acaaaatactggcctgaacttaccgctaaacagtggaatgggatcacactattacatctcgcaacctacaccgct

SEQ ID NO: 599707 - DNA, 75 bp, synthetic construct
  source 1..75: mol_type = other DNA
aggcttttatcatacagatgtattaattcccggagaactgactcaggactccagaataatccataatgttgatag

SEQ ID NO: 599708 - DNA, 75 bp, synthetic construct
  source 1..75: mol_type = other DNA
tggtttagtgtggcagcacagcgtagcgatattcttgaatcagtgacactgtcacttaaagtggcgacactggcg

SEQ ID NO: 599709 - DNA, 75 bp, synthetic construct
  source 1..75: mol_type = other DNA
tgatttatcagggcaaaccttattactttacctggggctatgcggacgtagataaaaagcagcccgtcacgcagc

SEQ ID NO: 599710 - DNA, 75 bp, synthetic construct
  source 1..75: mol_type = other DNA
caacttcaacgaaccggcagatcatctggcgatttatcttgagttgttgagctatctgcatttttcactggggga

SEQ ID NO: 599711 - DNA, 75 bp, synthetic construct
  source 1..75: mol_type = other DNA
atgccactaaaaacgtttacctgcttggctttgatttcacaactaaagacggttttaccaacaaaatcccaacgg

SEQ ID NO: 599712 - DNA, 75 bp, synthetic construct
  source 1..75: mol_type = other DNA
gccggacatgattaagctgccgtcaacaatctctgagcataaagattacctggccgcggtcgctgcagacttcac

SEQ ID NO: 599713 - DNA, 75 bp, synthetic construct
  source 1..75: mol_type = other DNA
actctccgccccccaacagctcaacgatattgtgcatcgcacaatgactccgcttatagagcaacacaaaatccc

SEQ ID NO: 599714 - DNA, 75 bp, synthetic construct
  source 1..75: mol_type = other DNA
ggtatcgtgatgctggctaacaaaaattatcccaatcctgcgagagtcgctgccgcctggcagattctcaacgct

SEQ ID NO: 599715 - DNA, 75 bp, synthetic construct
  source 1..75: mol_type = other DNA
atgctcaaaacgacgctttgcaccttactgattaccgtctcttgctccactcttgccacgccccacagcgaacaa

SEQ ID NO: 599716 - DNA, 75 bp, synthetic construct
  source 1..75: mol_type = other DNA
ttgagaatagctggatagagataaaatttgaaccgtccgtgccggacggcaatacagaacgagtgggtttttctt

SEQ ID NO: 599717 - DNA, 75 bp, synthetic construct
  source 1..75: mol_type = other DNA
agattgctcgcgatcagcaaattcctttactgattagtggtggtatcggtcactcgacaacttttttgtatagcg

SEQ ID NO: 599718 - DNA, 75 bp, synthetic construct
  source 1..75: mol_type = other DNA
ctggattgaagaccagtcaacaaactgcggtgaaaacgcacgctttagcattgctctactgaatcaggccgtaga

SEQ ID NO: 599719 - DNA, 75 bp, synthetic construct
  source 1..75: mol_type = other DNA
atggcgaatgccaggcctatacctataacgtggtcatgaatgctgcctgcgagcggctcagtgaactagagatcc

SEQ ID NO: 599720 - DNA, 75 bp, synthetic construct
  source 1..75: mol_type = other DNA
tgcggcctttgccgacgcccgaaaacaacccgaactcaattgggatacttatacccagcttaaactagatcgttt

SEQ ID NO: 599721 - DNA, 75 bp, synthetic construct
  source 1..75: mol_type = other DNA
cagtgctgctgattttcctgttactattgaaagttgtgggactcctgtcacattcgccggtccgccgaaaagggc

SEQ ID NO: 599722 - DNA, 75 bp, synthetic construct
  source 1..75: mol_type = other DNA
ctttaagtaaaaaaggaccaaatatcgttgcttatgatatcattaatgagctaataaaacgtaatgatgtcgaaa

SEQ ID NO: 599723 - DNA, 75 bp, synthetic construct
  source 1..75: mol_type = other DNA
ccggcactggaaatcacgctcggtcagttaacggttgaatttgaacgcgacggctggtttgccctgacaggcgcg

SEQ ID NO: 599724 - DNA, 75 bp, synthetic construct
  source 1..75: mol_type = other DNA
cgctggaagaagcattgaaagcgcgtcatgatcagcaacgatacttcgaacagttagcgtggcggctgcacaatg

SEQ ID NO: 599725 - DNA, 75 bp, synthetic construct
  source 1..75: mol_type = other DNA
tggttaagctatccgggattcatcccccaactggagaatagggcgggcgctgttgcgtttgttaatcaactggaa

SEQ ID NO: 599726 - DNA, 75 bp, synthetic construct
  source 1..75: mol_type = other DNA
atgaacattaccccgtttccgacgctttcgacggcaaccatagatgccataaatgttatcggacagtggctggcg

SEQ ID NO: 599727 - DNA, 75 bp, synthetic construct
  source 1..75: mol_type = other DNA
acggcggagcagctggtaaagccgtaactggcaacgcgcctacatggactaaagctggggcaatttacggcgctc

SEQ ID NO: 599728 - DNA, 75 bp, synthetic construct
  source 1..75: mol_type = other DNA
aagctatctccccctgcttggatatgtcgaactaaaaatagaacacggccaacttagggtggttgataccgggat

SEQ ID NO: 599729 - DNA, 75 bp, synthetic construct
  source 1..75: mol_type = other DNA
atatatggggacgtcggcatgttctggttccgataaacagacactgtttaccgccgctaccgcgggcaacggcga

SEQ ID NO: 599730 - DNA, 75 bp, synthetic construct
  source 1..75: mol_type = other DNA
ggtgattaagctcctgcatcagtgcggagagaatggcgaagatcgcgtggctggagctattctcgcaactggttc

SEQ ID NO: 599731 - DNA, 75 bp, synthetic construct
  source 1..75: mol_type = other DNA
tggcaattgtgactgcgcccaatgtggtactggcaacgggcggaccgggcgagctttatcgcgacagtgtttatc

SEQ ID NO: 599732 - DNA, 75 bp, synthetic construct
  source 1..75: mol_type = other DNA
cgccccggaatctgtaaccggcgacaacgaactcgcagccgaagctgcaaaaactgatgacgagaaagccgcata

SEQ ID NO: 599733 - DNA, 75 bp, synthetic construct
  source 1..75: mol_type = other DNA
gcaaagaaggggaagtagcccaggccgccccggaatctgtaaccggcgacaacgaactcgcagccgaagctgcaa

SEQ ID NO: 599734 - DNA, 75 bp, synthetic construct
  source 1..75: mol_type = other DNA
aaccaatctgaccgaaagccagtttggtataggcacaccgcgcagcacgtttccgtggaatttgtccggcaccta

SEQ ID NO: 599735 - DNA, 75 bp, synthetic construct
  source 1..75: mol_type = other DNA
gcttatttctttgacgcattagccaaccagttccccgggtacaaactctggccgctggcatcgcttaaacattct

SEQ ID NO: 599736 - DNA, 75 bp, synthetic construct
  source 1..75: mol_type = other DNA
caccctggatatgctcaggagcggcgaaagcagtaaaagttcaatttttactaagcttgcccgattgatggttga

SEQ ID NO: 599737 - DNA, 75 bp, synthetic construct
  source 1..75: mol_type = other DNA
ctggcgcctgcaactgcgccgaacagcccggttcacaggacgttggcagaacgtattgaaacgctttgtcagcaa

SEQ ID NO: 599738 - DNA, 75 bp, synthetic construct
  source 1..75: mol_type = other DNA
cgctaccgcgggcaacggcgacaacttcaccaaactggcagaggcactggcgagcggtggggcgatggatcacga

SEQ ID NO: 599739 - DNA, 75 bp, synthetic construct
  source 1..75: mol_type = other DNA
gactaaagaaattattcgataaaagcttctatctctacgaccatacagcagatgtgctgcttaccacctataaca

SEQ ID NO: 599740 - DNA, 75 bp, synthetic construct
  source 1..75: mol_type = other DNA
aagtaatatccatctgcttgggtatgttgaactaaaaatagatcacggccaacttaggggggttgataccggggt

SEQ ID NO: 599741 - DNA, 75 bp, synthetic construct
  source 1..75: mol_type = other DNA
cactggaagaggcactgaaagcgcggcaagatcagcaacgttattttgaacaattagcgtggcggctgcacaatg

SEQ ID NO: 599742 - DNA, 75 bp, synthetic construct
  source 1..75: mol_type = other DNA
aaaaagatttttttgccagcgaacagcaggcggtcgctgttgctgaccgttatccgcaggatgtctttgccgaac

SEQ ID NO: 599743 - DNA, 75 bp, synthetic construct
  source 1..75: mol_type = other DNA
gagtgtgtcatgcgcaatatcttctccagcatagccgcctgttaatcagtgatatttcaaccgaatgtggctttg

SEQ ID NO: 599744 - DNA, 75 bp, synthetic construct
  source 1..75: mol_type = other DNA
gccggtagaagaagcgtatcgctatattcgcagcggcgtgttgaaacactatccgtcggttctgcattcggagga

SEQ ID NO: 599745 - DNA, 75 bp, synthetic construct
  source 1..75: mol_type = other DNA
atttcgccagcagactggaatgaccatcaatcaatatctgcggcaggtcagagtgaaccgccccgggaatcctgg

SEQ ID NO: 599746 - DNA, 75 bp, synthetic construct
  source 1..75: mol_type = other DNA
ctgaatcttgactggcagggggcgattccgggatttagcgccagcgcagggcaaccacactggcgcttaggtagc

SEQ ID NO: 599747 - DNA, 75 bp, synthetic construct
  source 1..75: mol_type = other DNA
tgcgccagcaatttcgccagcagaccgggatgactatcaatcaatatctgcggcaggtcagagtgtgtcatgcgc

SEQ ID NO: 599748 - DNA, 75 bp, synthetic construct
  source 1..75: mol_type = other DNA
ttagccaggcggaactgatggataacgcccgcgaactggcgcagcagctggttaacagcgccccgctggcgattg

SEQ ID NO: 599749 - DNA, 75 bp, synthetic construct
  source 1..75: mol_type = other DNA
gtacatcaaatcgctccccctcgaggcggctgacagggtgtacgacatccagaatcgggcgattgaagctgttgt

SEQ ID NO: 599750 - DNA, 75 bp, synthetic construct
  source 1..75: mol_type = other DNA
ggaaataccagcaggcgatacaggccgcaacggcagcggtacagggactggccggcggtaatctgagtgcagccc

SEQ ID NO: 599751 - DNA, 75 bp, synthetic construct
  source 1..75: mol_type = other DNA
ggtgggatctatctttttactgatgagaaaagcgctcttgcctatctggacaaacatacagcccgcctgaaacat

SEQ ID NO: 599752 - DNA, 75 bp, synthetic construct
  source 1..75: mol_type = other DNA
atgaaagcaggccagcgtttaacgcttaaacgcccgcagcacgggatgcgcagttatctggcggtcgcgggtggt

SEQ ID NO: 599753 - DNA, 75 bp, synthetic construct
  source 1..75: mol_type = other DNA
cctgcattattgaagccgacatgtatcatctggcgcaaatcccactcggacagcccattcattttgtccagtgtt

SEQ ID NO: 599754 - DNA, 75 bp, synthetic construct
  source 1..75: mol_type = other DNA
tgcctgcgctgcgtattgctaatctgctggtgggtaacgatgccaacgctcccgcactggaaatcacgctcggtc

SEQ ID NO: 599755 - DNA, 75 bp, synthetic construct
  source 1..75: mol_type = other DNA
ggaccggcattgacgtaaccactattcaacagggcgatgaggcgtggcaccggctgcgcctcggcgttatcactg

SEQ ID NO: 599756 - DNA, 75 bp, synthetic construct
  source 1..75: mol_type = other DNA
ccctgacggcctgtgcagtaacgggttcggccttgagcttaaatgccctttcacctcccgcgacttcatgaaatt

SEQ ID NO: 599757 - DNA, 75 bp, synthetic construct
  source 1..75: mol_type = other DNA
acgggcatgaagatgtcctacttccacactctactcgccgaggtgtgcaccggcgtcgcgccagaggttaacgcc

SEQ ID NO: 599758 - DNA, 75 bp, synthetic construct
  source 1..75: mol_type = other DNA
atggcccatttggcgacacaatggctgagcagcttaaaccgcttgctgagtcgattaatcaatcaggaacctggt

SEQ ID NO: 599759 - DNA, 75 bp, synthetic construct
  source 1..75: mol_type = other DNA
agttatgaaacggagcaatagacctatttcagaattgttggataaggccagtttatacaagaaatactggctttg

SEQ ID NO: 599760 - DNA, 75 bp, synthetic construct
  source 1..75: mol_type = other DNA
ttattaccgtctccgaagtggaatcgacaagataaccgcgcaggttaactacatgcaggactacatcaggacgca

SEQ ID NO: 599761 - DNA, 75 bp, synthetic construct
  source 1..75: mol_type = other DNA
tatctgaccggggagattcttgcagcactggctgactggttttatctcagtccggaatggctgaacggcagggtg

SEQ ID NO: 599762 - DNA, 75 bp, synthetic construct
  source 1..75: mol_type = other DNA
gatttgcgggagcgcctgcaatcctcatcgttcagcgatatgctgtccggcttcaaagataaagtgacatcatct

SEQ ID NO: 599763 - DNA, 75 bp, synthetic construct
  source 1..75: mol_type = other DNA
taaaacgcgcgcgtgcgcgcggcgagctggatcgtattgagcaagagtctttcgatttctttaatcgcacccgcg

SEQ ID NO: 599764 - DNA, 75 bp, synthetic construct
  source 1..75: mol_type = other DNA
taccaatcttgccagccataacaagtctgtgcaggattatctgaaagtgcttaaggaaaaaatgcgcagtaagta

SEQ ID NO: 599765 - DNA, 75 bp, synthetic construct
  source 1..75: mol_type = other DNA
catcgttcagcgatatgctgtccggcttcaaagataaggtcacatcatcccttaacagcgcggccagctccgtta

SEQ ID NO: 599766 - DNA, 75 bp, synthetic construct
  source 1..75: mol_type = other DNA
atgatgatgatctacggcatgtttgtttttgagctgcgcacgttgccgcatcagcagttacagcaaaacaaaagc

SEQ ID NO: 599767 - DNA, 75 bp, synthetic construct
  source 1..75: mol_type = other DNA
atggcgtcgggcagatttacggcatgtatgtcctgaccggaacgaatacgacccgttccgagtttgatcgctacg

SEQ ID NO: 599768 - DNA, 75 bp, synthetic construct
  source 1..75: mol_type = other DNA
tatcggggcaggcgatgatcgcatcgttctttctggtgtgctttatcctgaaattacaggtggcgaagtgtcgct

SEQ ID NO: 599769 - DNA, 75 bp, synthetic construct
  source 1..75: mol_type = other DNA
gtatgtactgactgaaacgaatacgacccgttccgagtttgatcgctacggcaaggcgaaaaagatagagttttc

SEQ ID NO: 599770 - DNA, 75 bp, synthetic construct
  source 1..75: mol_type = other DNA
ttatcctgaaattacaggtggcgaagtgtcgctgtcgctgctgaccacgcaggcatatacaggacgcccctggcc

SEQ ID NO: 599771 - DNA, 75 bp, synthetic construct
  source 1..75: mol_type = other DNA
gtgcagacctggaaacgccgacagcgtataacacctataccattaccggtttgccgccgggtgcgatagctacgc

SEQ ID NO: 599772 - DNA, 75 bp, synthetic construct
  source 1..75: mol_type = other DNA
gttcgccatcttgccgacagcaaattgcttatcaaagaagagacgatatttaccctgaagccagggaccggacgt

SEQ ID NO: 599773 - DNA, 75 bp, synthetic construct
  source 1..75: mol_type = other DNA
gatttgcgggagcgcctgcaatcctcatcgttcagtgatatgctgtccggcttcaaagataaggtcacatcatcc

SEQ ID NO: 599774 - DNA, 75 bp, synthetic construct
  source 1..75: mol_type = other DNA
atgagtcgaatagtaccatatacacacctgtatttgttgagagtattttaaaagttaatataccagttgatattt

SEQ ID NO: 599775 - DNA, 75 bp, synthetic construct
  source 1..75: mol_type = other DNA
gtgatgctgatgctgaccaccacggcgatcgacgttgacgaggagctgttaaaccgctgcctggtgctgacggtg

SEQ ID NO: 599776 - DNA, 75 bp, synthetic construct
  source 1..75: mol_type = other DNA
aagcgcgtggagcatcgcgggcaggtggtggaatacatcgaggtggcgcgggaagacatcgccctggccaaccgt

SEQ ID NO: 599777 - DNA, 75 bp, synthetic construct
  source 1..75: mol_type = other DNA
ggcttaagaccgcaggtatcatgcgcgagtccgggcatgaacacttcaccggatcgctggttgtgccggtgatcg

SEQ ID NO: 599778 - DNA, 75 bp, synthetic construct
  source 1..75: mol_type = other DNA
gagttaacgatcgcgtcaacgggtaaggacgacgccagcggtaacctggtcacgaaacagtacacggtaaaaggc

SEQ ID NO: 599779 - DNA, 75 bp, synthetic construct
  source 1..75: mol_type = other DNA
cagcgaaagaaaatcgcctgtcacaaagtaaattcagatgccaggtatgtggatatacagcgaacgccgatgtaa

SEQ ID NO: 599780 - DNA, 75 bp, synthetic construct
  source 1..75: mol_type = other DNA
gaaatgcgccgccagcttgcgtacaagcagctctggcgtggcggtcaggtgcttgctgttccgccagcgtataca

SEQ ID NO: 599781 - DNA, 75 bp, synthetic construct
  source 1..75: mol_type = other DNA
agttaaagaagtcgatgaattgatttccatttcagacagtgttggcaacgcccgcaatccacttatttccatcca

SEQ ID NO: 599782 - DNA, 75 bp, synthetic construct
  source 1..75: mol_type = other DNA
tgttgccaagtattacatcctggcgacgcctgcgctggcactgattcgagccaaagcattgggtaccaatccggt

SEQ ID NO: 599783 - DNA, 75 bp, synthetic construct
  source 1..75: mol_type = other DNA
caactggccaagctggccgtaaaagatttgcgtattgataccagaaactccgaaaccgggttaatacgatatagc

SEQ ID NO: 599784 - DNA, 75 bp, synthetic construct
  source 1..75: mol_type = other DNA
ggcgcaagatcgagcgtccacagcgtggcctgcccgcacacctgtatcttcccggcgctcacggcggcgtgtgga

SEQ ID NO: 599785 - DNA, 75 bp, synthetic construct
  source 1..75: mol_type = other DNA
tggagcatcgcgggcaggtggtagagtacatcgaggtgacgcgggaggatatcgcgctggccaaccatctggcac

SEQ ID NO: 599786 - DNA, 75 bp, synthetic construct
  source 1..75: mol_type = other DNA
gcccggtgatgctgatgctgaccaccacggcgatcgacgttgacgaggaactgttaaaccgttgcctggtgctga

SEQ ID NO: 599787 - DNA, 75 bp, synthetic construct
  source 1..75: mol_type = other DNA
tcgcgttaacggcacgctggttggtggttccatcgggctggtgttatatctgttgtcgcaaattccgtcattcct

SEQ ID NO: 599788 - DNA, 75 bp, synthetic construct
  source 1..75: mol_type = other DNA
gcaagaagctggcgaaaatgggcaacgtggcggccagtctcaagcacgcctaccgtgagcgtgagacgcccaacg

SEQ ID NO: 599789 - DNA, 75 bp, synthetic construct
  source 1..75: mol_type = other DNA
aaatggcttcctggctggttgagtggaaaaatgccactgaaacgcaatggcttaaagattcgcccagtcacagcc

SEQ ID NO: 599790 - DNA, 75 bp, synthetic construct
  source 1..75: mol_type = other DNA
tgcaacagtcactgaaagaccttgagcgggcttacaaaaaacttcttccagaagcgggctgcttttccccgattc

SEQ ID NO: 599791 - DNA, 75 bp, synthetic construct
  source 1..75: mol_type = other DNA
ctgaaatcccgggatgtggcggcactggatacgcgaaaatccaaacagcacgtcgatccggaagtcagaatggct

SEQ ID NO: 599792 - DNA, 75 bp, synthetic construct
  source 1..75: mol_type = other DNA
cttagaagctgttgaatatcttaaattttcagagataaagaatggtcggaaaataggtttccagatccataaacg

SEQ ID NO: 599793 - DNA, 75 bp, synthetic construct
  source 1..75: mol_type = other DNA
taaggttgatgggcaactgacgtgtagtccattgccagaaagaattgatgccgcgttatcagggtttgggatcgc

SEQ ID NO: 599794 - DNA, 75 bp, synthetic construct
  source 1..75: mol_type = other DNA
ctccgccaggcgggactggccgggggcgacagtccggcacggtttattgcaccggggcgcaaatatccgcagccg

SEQ ID NO: 599795 - DNA, 75 bp, synthetic construct
  source 1..75: mol_type = other DNA
cagtcacagccaggaagcgaaactggcagaagcgcagcagaaggcgatgctgaaaggcgaggcttttccggatgt

SEQ ID NO: 599796 - DNA, 75 bp, synthetic construct
  source 1..75: mol_type = other DNA
cggcaggacgccggaagcacgggagcagacgctgattgtcacgcacctgaatgaggaccggcgcgtactgaacag

SEQ ID NO: 599797 - DNA, 75 bp, synthetic construct
  source 1..75: mol_type = other DNA
cgtgaaagccggagaagagagcgtggcacaggtcagcggggtacgggaacaggccatactgacacaggccattcg

SEQ ID NO: 599798 - DNA, 75 bp, synthetic construct
  source 1..75: mol_type = other DNA
atgccggtgtgggtaagaccacacagttccgggcggtgatgtcagccgtgaacatgctgccggcgagtgagcgtc

SEQ ID NO: 599799 - DNA, 75 bp, synthetic construct
  source 1..75: mol_type = other DNA
cgggaaaaactgaaagagcaggttgaggcgctgggctatgaaactgaagtggttggtaagcacggtatgtgggaa

SEQ ID NO: 599800 - DNA, 75 bp, synthetic construct
  source 1..75: mol_type = other DNA
gaaagtaaaaacctggccttcagccatgtggacctgctgacagaggcgaagtcgtttgctgcagaaggaaccagt

SEQ ID NO: 599801 - DNA, 75 bp, synthetic construct
  source 1..75: mol_type = other DNA
atcggcaaagatctccagtttatccgcgttaacggcacgctggttgggggttgtatcgggttgatactgtatctt

SEQ ID NO: 599802 - DNA, 75 bp, synthetic construct
  source 1..75: mol_type = other DNA
atggtcatctcgaacaggccgcgcaccgcgtcgcgcctgagttttcggcattcctgacgcgacacattactgaca

SEQ ID NO: 599803 - DNA, 75 bp, synthetic construct
  source 1..75: mol_type = other DNA
gcgcaccgcgtcgcgccggagtttgcggcatttctgactcgccacatcagcgatacggtgaaaagctgggatgcg

SEQ ID NO: 599804 - DNA, 75 bp, synthetic construct
  source 1..75: mol_type = other DNA
aatgctggagagcatgaccaaaaacgatcgccatcaggtgctgctcgatacgttaattgcccagcttattgccct

SEQ ID NO: 599805 - DNA, 75 bp, synthetic construct
  source 1..75: mol_type = other DNA
ttgattcgacgtcatgaaccggcgttattgatcggtaactggtttagtcagccggagaacgcccgccgcgttggt

SEQ ID NO: 599806 - DNA, 75 bp, synthetic construct
  source 1..75: mol_type = other DNA
gcgttaacggcacgctggttgggggttgtatcgggttgatactgtatcttttatcgcaaatcccgaccttgttat

SEQ ID NO: 599807 - DNA, 75 bp, synthetic construct
  source 1..75: mol_type = other DNA
aacagcgtccagccgggggccggaaatggcgaaccggtcacggcagaggtactggcacagcggcaggctgaagag

SEQ ID NO: 599808 - DNA, 75 bp, synthetic construct
  source 1..75: mol_type = other DNA
atgccgggcgtaccggtggaggccttttccggacgctcacagactatccgggaggccgtcggggaggacgcctcg

SEQ ID NO: 599809 - DNA, 75 bp, synthetic construct
  source 1..75: mol_type = other DNA
tgaccgtcgctcgcagatgaacctgaagcaggatgaacggctgtccggtgagctgataaccggacgtcgtcagct

SEQ ID NO: 599810 - DNA, 75 bp, synthetic construct
  source 1..75: mol_type = other DNA
tctgacgcagttaattctttgcttgatgatatcagccgcgatcgcgcgcatcagatccgccatgcgtttgatcgc

SEQ ID NO: 599811 - DNA, 75 bp, synthetic construct
  source 1..75: mol_type = other DNA
gggatgacgggctgataaccctgcaggatgcggaaggtaacacgcggctgatttcgccccgggaggcggtggctg

SEQ ID NO: 599812 - DNA, 75 bp, synthetic construct
  source 1..75: mol_type = other DNA
tgaacggtctggcccgcagcggtcgtgatgtccggctgtattcctcactggatgaaacccgtactgcggaaaaac

SEQ ID NO: 599813 - DNA, 75 bp, synthetic construct
  source 1..75: mol_type = other DNA
ttaacaatattttatcagctatcgtaccgctggcattacctgccgaccgcatggctcatagcaagaaatctttgg

SEQ ID NO: 599814 - DNA, 75 bp, synthetic construct
  source 1..75: mol_type = other DNA
caacacaaaaccaataaagcatttggcttctctactcgcatgatcacctccggcgtatgtgaaggcgtgaaagac

SEQ ID NO: 599815 - DNA, 75 bp, synthetic construct
  source 1..75: mol_type = other DNA
tgcgcttcatcggacatatgggcgccatgcctgatattaaatcccaccagttttatccgtcgtcggcgcgactca

SEQ ID NO: 599816 - DNA, 75 bp, synthetic construct
  source 1..75: mol_type = other DNA
tttgcagtgcagtagcattattcgcattaccgacaaagcgttacgtgaagaactggtgacgctgaccggcgggta

SEQ ID NO: 599817 - DNA, 75 bp, synthetic construct
  source 1..75: mol_type = other DNA
tggtgaaaaaatcaaccgctgcgcccctggcggcgaagctgtaatgctaaaaattgccgaactgcttaatgtcga

SEQ ID NO: 599818 - DNA, 75 bp, synthetic construct
  source 1..75: mol_type = other DNA
aggggaaggggataccctcctggagcctaatattggccatgcggatttgcttaaatcattctccctgccggtgtg

SEQ ID NO: 599819 - DNA, 75 bp, synthetic construct
  source 1..75: mol_type = other DNA
aaatggacgatgccgttgaaggactggcgaatggcaatgagccgctttattatcgagttcggtgaccgccgggac

SEQ ID NO: 599820 - DNA, 75 bp, synthetic construct
  source 1..75: mol_type = other DNA
aggcggcgaccaagaaatggacgatgccgatccgcaactggaagccggccatgaaccgttttatgatcgaatttg

SEQ ID NO: 599821 - DNA, 75 bp, synthetic construct
  source 1..75: mol_type = other DNA
cgagcgcatcgcgaaggagggacgtaaatacggtgttggtttaatggtggttagccagaggccttctgatgtgag

SEQ ID NO: 599822 - DNA, 75 bp, synthetic construct
  source 1..75: mol_type = other DNA
aaaaagttcgccgtatctatggtgtgctggagcgtcagttccggaactactacaaagaagcagcacgtctgaaag

SEQ ID NO: 599823 - DNA, 75 bp, synthetic construct
  source 1..75: mol_type = other DNA
ccactcgtgcagaagcacgtcagctggttagccataaagcaattatggtaaacgatcgtgttgttaacatcgctt

SEQ ID NO: 599824 - DNA, 75 bp, synthetic construct
  source 1..75: mol_type = other DNA
cttttcaggcttacagtttgagtgatgcgcaggtgaaaaccctgagcgatcaggcatgtcaggatatggacagca

SEQ ID NO: 599825 - DNA, 75 bp, synthetic construct
  source 1..75: mol_type = other DNA
attaccgcagcaaagacctcaccccgaaaaaatccaggctgctggcggagacgatttctgcggtttatctcgatg

SEQ ID NO: 599826 - DNA, 75 bp, synthetic construct
  source 1..75: mol_type = other DNA
atgaaaattcgcgccttattggtagcaatgagcgtggcaacggtactgaccggttgccagaatatggactccagt

SEQ ID NO: 599827 - DNA, 75 bp, synthetic construct
  source 1..75: mol_type = other DNA
gcggtgatcggtcacgagatggggcacgtggcgttaggccatgtgaaaaaagggatgcaggtggcacttggtaca

SEQ ID NO: 599828 - DNA, 75 bp, synthetic construct
  source 1..75: mol_type = other DNA
gcgtatttctgcgtgccgataattccctgattgacatgaactatatcaccagtttcaccggcatgaccgataaat

SEQ ID NO: 599829 - DNA, 75 bp, synthetic construct
  source 1..75: mol_type = other DNA
ataaggttttgtttatcaacggggttgagtatgttacccgtgaacgtgcccatagtcgcctatctgatgatgatt

SEQ ID NO: 599830 - DNA, 75 bp, synthetic construct
  source 1..75: mol_type = other DNA
ttaaagaaaacctttataacctgtcaattccactgtatgtgcaagcacaaaacaacggtgaagtacataatattg

SEQ ID NO: 599831 - DNA, 75 bp, synthetic construct
  source 1..75: mol_type = other DNA
atgttgcgcaatctgctcgcccgtccgctgcgcttttccttatacgagactgagcgtcgattcacctgcaaacgg

SEQ ID NO: 599832 - DNA, 75 bp, synthetic construct
  source 1..75: mol_type = other DNA
ctcatccatcggataacccagccgacccttcagcaacaacgattacaacttactccgattctgatggaacgcggt

SEQ ID NO: 599833 - DNA, 75 bp, synthetic construct
  source 1..75: mol_type = other DNA
taccaggcgctatatcaggcagagttacaggttccgcaggatatcgcggtgattggctatgacgatatcgaactg

SEQ ID NO: 599834 - DNA, 75 bp, synthetic construct
  source 1..75: mol_type = other DNA
tatatcaggcagagttacaggttccgcaggatatcgcggtgattggctatgacgatatcgaactggcaagcttta

SEQ ID NO: 599835 - DNA, 75 bp, synthetic construct
  source 1..75: mol_type = other DNA
acggttattgttgatgagatcactcgtaatgcacagtttccacttaaggcaagagctatcacggtgaatggaaac

SEQ ID NO: 599836 - DNA, 75 bp, synthetic construct
  source 1..75: mol_type = other DNA
tgatgggcttacagtttggctttttgctcggtggttccatcgtggtggagaaagttttcaactggcccggacttg

SEQ ID NO: 599837 - DNA, 75 bp, synthetic construct
  source 1..75: mol_type = other DNA
ttaattcaggtattctccgttgaactgggctggctgcctaccgtgggagcagacagttggcagcactacatttta

SEQ ID NO: 599838 - DNA, 75 bp, synthetic construct
  source 1..75: mol_type = other DNA
cgggaaatgttgcagatggtgtaaatccaggtatcaaaattatcgacttttcagaagttccctcagatattttgc

SEQ ID NO: 599839 - DNA, 75 bp, synthetic construct
  source 1..75: mol_type = other DNA
tgtcgatattgttgaaggacgttttgatgccgggatacgtctgggtgaaactgtggataaagatatgattgcagt

SEQ ID NO: 599840 - DNA, 75 bp, synthetic construct
  source 1..75: mol_type = other DNA
cgaaggaaggaaaacgcagactcgccgacctgtaaaaaatgtcggggcggataactgcctggttatcagtaaacc

SEQ ID NO: 599841 - DNA, 75 bp, synthetic construct
  source 1..75: mol_type = other DNA
tacgccgccagcttgagtacaagcagctctggcgtggcggtcaggtgcttgctgttccgccagcgtatacaagcc

SEQ ID NO: 599842 - DNA, 75 bp, synthetic construct
  source 1..75: mol_type = other DNA
tgtcgatattgttgaagggcgttttgatgccgggatacgtctgggtgaaactgtagataaagatatgattgcagt

SEQ ID NO: 599843 - DNA, 75 bp, synthetic construct
  source 1..75: mol_type = other DNA
tgtcgatattgttgaaggccgttttgatgccgggatacgtctgggtgaaactgtggataacgatatgattgcagt

SEQ ID NO: 599844 - DNA, 75 bp, synthetic construct
  source 1..75: mol_type = other DNA
tgtcgatattgttgaaggtcgttttgatgccgggatacgtctgggtgaaactgttgataaagatatgattgcagt

SEQ ID NO: 599845 - DNA, 75 bp, synthetic construct
  source 1..75: mol_type = other DNA
cagcgttgcgcgtgctgtggtcatacagcgaaagaaaaccgcctgtcacaaagtaaattcagatgccaggtatgt

SEQ ID NO: 599846 - DNA, 75 bp, synthetic construct
  source 1..75: mol_type = other DNA
tggcggcggtgtcgcgcaaactggacaggccgctggcggtgctgatccagtcatcgagcgcggcgggtaagtcca

SEQ ID NO: 599847 - DNA, 75 bp, synthetic construct
  source 1..75: mol_type = other DNA
gcaatgaggcagcggtgaaactggcttcttccttagccgcttccgggatcgccacgttccgggtactgttcccgg

SEQ ID NO: 599848 - DNA, 75 bp, synthetic construct
  source 1..75: mol_type = other DNA
ggtttaaaccgttcgatactggatcagggctggtatgaaatgcgccgccagcttgaatacaagcagctctggagt

SEQ ID NO: 599849 - DNA, 75 bp, synthetic construct
  source 1..75: mol_type = other DNA
aaaatacagcgactgcattcctgtatcgcaaatatccgcagggactaccttcacaaagtcacaacgaccgtcagc

SEQ ID NO: 599850 - DNA, 75 bp, synthetic construct
  source 1..75: mol_type = other DNA
cttgagtacaagcagctctggcgtggcggtcaggtgcttgctgttccgccagcgtacacaagccagcgttgcgcg

SEQ ID NO: 599851 - DNA, 75 bp, synthetic construct
  source 1..75: mol_type = other DNA
tgtcgatattgttgaagggcgttttgatgccgggatacgtctgggtgaaactgtcgataacgatatgattgcagt

SEQ ID NO: 599852 - DNA, 75 bp, synthetic construct
  source 1..75: mol_type = other DNA
ggagcgcgtagtaaagaaactgataggcctggtatggctggcagggcaggaaattgccgcaaccagaaataatga

SEQ ID NO: 599853 - DNA, 75 bp, synthetic construct
  source 1..75: mol_type = other DNA
gctttgttaactctctttccgcaccactttatgtgctggaaacacgcagccgccgcagaccaatggcgccaataa

SEQ ID NO: 599854 - DNA, 75 bp, synthetic construct
  source 1..75: mol_type = other DNA
cgccgggatccgcctaggcgaaagcgtggataaggacatgattgcggtaagaattgggccggacatgagaatggc

SEQ ID NO: 599855 - DNA, 75 bp, synthetic construct
  source 1..75: mol_type = other DNA
atgaatttacaagaactggaatatacgcggattgaactgcgccgcgcgctggcggatttatcaggatcgacaaaa

SEQ ID NO: 599856 - DNA, 75 bp, synthetic construct
  source 1..75: mol_type = other DNA
atgaatcaacaagacctgaattttgtaagaatagaattgcgccgcgcgctacctgacctctctgggggaacaaaa

SEQ ID NO: 599857 - DNA, 75 bp, synthetic construct
  source 1..75: mol_type = other DNA
gccgcttttatccagcttgatgagtctgcgctggctatagctcttgaatactatgaggaagaagaagccctcaaa

SEQ ID NO: 599858 - DNA, 75 bp, synthetic construct
  source 1..75: mol_type = other DNA
ttctttccctggatattatctttactatcccagccgtaagcagcacccgcctgcttttgcgctgttgatcgatgc

SEQ ID NO: 599859 - DNA, 75 bp, synthetic construct
  source 1..75: mol_type = other DNA
agattggacctgatatgcggatggccgtggtgggagcaccggcgtattttgcggctaattccttaccagaaacgc

SEQ ID NO: 599860 - DNA, 75 bp, synthetic construct
  source 1..75: mol_type = other DNA
tgtcgatattgttgaagggcgttttgatgccgggatacgtctgggtgaaactgtggataaggatatgattgcagt

SEQ ID NO: 599861 - DNA, 75 bp, synthetic construct
  source 1..75: mol_type = other DNA
aactaccggatggaaagagtccccctaaagcagactgacagacatcacaaatccccgggtggggatttgtgtata

SEQ ID NO: 599862 - DNA, 75 bp, synthetic construct
  source 1..75: mol_type = other DNA
ttatttccccggatattacctttactaccaaagccgtaagcggcccccgcctgcttttgcgctgatgatcgatgc

SEQ ID NO: 599863 - DNA, 75 bp, synthetic construct
  source 1..75: mol_type = other DNA
cgggggagagaatcattgcctgccttgaaccgcgtattgacgagcttgaacaggaactggaatcacttattcaat

SEQ ID NO: 599864 - DNA, 75 bp, synthetic construct
  source 1..75: mol_type = other DNA
cgggattatttcaccctcagagagcggttgatgatgatgcagaagcagctggaaggggcacaggaatatatccgc

SEQ ID NO: 599865 - DNA, 75 bp, synthetic construct
  source 1..75: mol_type = other DNA
tattcttcgccatattctcgaaggtaaggaggcggtcacgccgctgatggagagagtacccggcgaactcatgga

SEQ ID NO: 599866 - DNA, 75 bp, synthetic construct
  source 1..75: mol_type = other DNA
aatcattaccccgtttctggcccggggattttttcccggtattctacgcctgtcatctggctgtgctgggcgttc

SEQ ID NO: 599867 - DNA, 75 bp, synthetic construct
  source 1..75: mol_type = other DNA
tgtccaggtcccgtgcgtgaagccaccggcaccgcccgcgtggataatgcaaccggcccccgactggcagacacc

SEQ ID NO: 599868 - DNA, 75 bp, synthetic construct
  source 1..75: mol_type = other DNA
gaaagtaaaaacctggccttcagcatggtggacctgctgacagaggcaaagtcgtttgctgcagaaggaaccggt

SEQ ID NO: 599869 - DNA, 75 bp, synthetic construct
  source 1..75: mol_type = other DNA
cggtggtttctgagcagataaaggcgcgtgccggtgagacattgctggaaagtgccatcagtcatcagaagtccg

SEQ ID NO: 599870 - DNA, 75 bp, synthetic construct
  source 1..75: mol_type = other DNA
atcgggctttctgctgccgatgccaattcgggtaatgactccaacttattgatagtgttttatgttcagataatg

SEQ ID NO: 599871 - DNA, 75 bp, synthetic construct
  source 1..75: mol_type = other DNA
ggcaaaacagagcaggctgtcagggaaattgccgggcaggagcgtgaccgggctgacataactgaacgggaagcc

SEQ ID NO: 599872 - DNA, 75 bp, synthetic construct
  source 1..75: mol_type = other DNA
cgcttgaaggcacggaaggtaaccggaaacagatggccggctttgagtcagcctacgtggccctgtcgcgtatga

SEQ ID NO: 599873 - DNA, 75 bp, synthetic construct
  source 1..75: mol_type = other DNA
tattaccgtctccgaagtggaatcgacaagataaccgcgcaggttaactatctgcaggaatacatcaggacgcaa

SEQ ID NO: 599874 - DNA, 75 bp, synthetic construct
  source 1..75: mol_type = other DNA
ttgccggattaagtgaacgaaaagtgcagtttacgtacacggacgtgctggccagaacggtcggtatactgccgc

SEQ ID NO: 599875 - DNA, 75 bp, synthetic construct
  source 1..75: mol_type = other DNA
aatcatcaatctcagttatacatgcagcaaaagagtggcaggatgctattgatttttcgatggcatcactgttag

SEQ ID NO: 599876 - DNA, 75 bp, synthetic construct
  source 1..75: mol_type = other DNA
atatctgaacgggaagccgcactgccggagagtgtactgcgtgaaccacaacgggtgcgggaagcggtccgggag

SEQ ID NO: 599877 - DNA, 75 bp, synthetic construct
  source 1..75: mol_type = other DNA
ccaacatgaccgtctggaagcggttatctttaccccaactgactggcacctgttacgcaaatgcccaagcccggt

SEQ ID NO: 599878 - DNA, 75 bp, synthetic construct
  source 1..75: mol_type = other DNA
gcgagtgaaacctttgccatcgcgcttgaaggcacggaaggtaaccggaaactgatggccggctttgagtcagcc

SEQ ID NO: 599879 - DNA, 75 bp, synthetic construct
  source 1..75: mol_type = other DNA
agggctatgccggtgtgggtaagaccacacagttccgggcggtgatgtcagccgtgaacatgctgccggagagtg

SEQ ID NO: 599880 - DNA, 75 bp, synthetic construct
  source 1..75: mol_type = other DNA
ccgctctgattatttgtatcatcgcctgcctgtcatgggctgctaatcattaccgtgataacgcaatcgcctaca

SEQ ID NO: 599881 - DNA, 75 bp, synthetic construct
  source 1..75: mol_type = other DNA
tgttacgcaaatgcccaagcccggtgtggatggtgaaagaccagccgtggccggaaggaggtaaggcgctggtgg

SEQ ID NO: 599882 - DNA, 75 bp, synthetic construct
  source 1..75: mol_type = other DNA
gacgcatgttgaaaaaggtctgccagaagaagtcattcctgaccttgccgaacatttacaggcagggattgtcgt

SEQ ID NO: 599883 - DNA, 75 bp, synthetic construct
  source 1..75: mol_type = other DNA
gctcaattttacttgatggcgcaatagtagaagatgatgtgatgattggtgcgggtagcctggtgaaccgccccg

SEQ ID NO: 599884 - DNA, 75 bp, synthetic construct
  source 1..75: mol_type = other DNA
aattgtcagaaaaatggcagagaacaaacctgacctgccggatggtaaaacagagcaggctgtcagggaaattgc

SEQ ID NO: 599885 - DNA, 75 bp, synthetic construct
  source 1..75: mol_type = other DNA
atcaaagacatgcagacccgtcagcgtgatgtcgctgcactggatgccaaatacaccggagaactggctgatgcg

SEQ ID NO: 599886 - DNA, 75 bp, synthetic construct
  source 1..75: mol_type = other DNA
cctgcggaatgcgcagggcgaaacgcaggtggtgcgtatttcttccctggacagcagctggtcgctgttccggcc

SEQ ID NO: 599887 - DNA, 75 bp, synthetic construct
  source 1..75: mol_type = other DNA
ttcacgccgggcagtactgttatcgttgaccagggcgaaaaactctccctgaaagagacgttaaccctgctggac

SEQ ID NO: 599888 - DNA, 75 bp, synthetic construct
  source 1..75: mol_type = other DNA
gtgatgaagagaaggctgggttacgctattccgcaaataactacgtgaaatggaaggacgaatatctggatcaag

SEQ ID NO: 599889 - DNA, 75 bp, synthetic construct
  source 1..75: mol_type = other DNA
gcgaaccggtcacggcagaggtgctggcacagcggcaggctgaagaggccatccgccgtgaaacggaacgccgcg

SEQ ID NO: 599890 - DNA, 75 bp, synthetic construct
  source 1..75: mol_type = other DNA
atcttcaccggtacgccggaaggggttggcccggtagtgaaaggtgatgtgatcacgggtaacgtcgagggctta

SEQ ID NO: 599891 - DNA, 75 bp, synthetic construct
  source 1..75: mol_type = other DNA
cggctggcgtggtcacactgaccgcgcgtcataaggggctttgcgggaatgaaattcctgtcagcctcaattact

SEQ ID NO: 599892 - DNA, 75 bp, synthetic construct
  source 1..75: mol_type = other DNA
ggggatcgtggaaaactacgaactgtttaagcagtacctggttgtggagcgtgatgccagcgatccgaaccgcct

SEQ ID NO: 599893 - DNA, 75 bp, synthetic construct
  source 1..75: mol_type = other DNA
ccagtcgtgtaatggccatcgcttttatatttatgtcggtgcttattgtcctcagcctcgccgttaacgtcattc

SEQ ID NO: 599894 - DNA, 75 bp, synthetic construct
  source 1..75: mol_type = other DNA
tcacctggcacttctgcagtatatccgtcctggcgcgcagaataagatgaaagtgattctggccgaagaagcaaa

SEQ ID NO: 599895 - DNA, 75 bp, synthetic construct
  source 1..75: mol_type = other DNA
gttatgccacaggccttgatatgacgcgccgtgaccgtcaaatggaaatgcgtcagatgggccgcccgtgggaaa

SEQ ID NO: 599896 - DNA, 75 bp, synthetic construct
  source 1..75: mol_type = other DNA
atgctgcgcgcctttgcccgccttcttctccgtatttgtttttctcgccggactctaaagcttggctgtttattg

SEQ ID NO: 599897 - DNA, 75 bp, synthetic construct
  source 1..75: mol_type = other DNA
cccgaaaaaacaagggtttaactatctaaaaacttctgtcaccgatgctattaaggaactacttgaactttttcc

SEQ ID NO: 599898 - DNA, 75 bp, synthetic construct
  source 1..75: mol_type = other DNA
ccaggcgagtgagagttggttttttcactggtaatggaagcaaaaaagatggcacatctgctgcaaaactagcct

SEQ ID NO: 599899 - DNA, 75 bp, synthetic construct
  source 1..75: mol_type = other DNA
gtgggtatgctgcctgcgccgaaggggaaacggttcacgatgaccgagcagcagaccctgctgtctcatggcgtg

SEQ ID NO: 599900 - DNA, 75 bp, synthetic construct
  source 1..75: mol_type = other DNA
gccgggtaatcgctactttacccgacgtattgatagcgcagcagagttgtaccacgccggaaaagtgaaatggct

SEQ ID NO: 599901 - DNA, 75 bp, synthetic construct
  source 1..75: mol_type = other DNA
agcatcaggtatgcagcaggctttgatcgctaaaggcgtaccggcgaaagtgatcttctgcgactatgccggatt

SEQ ID NO: 599902 - DNA, 75 bp, synthetic construct
  source 1..75: mol_type = other DNA
ccaatggcatttaatgccccctttgccgtgtcgcagaacagtgccgatgcctcttatttacagcagatggcgctg

SEQ ID NO: 599903 - DNA, 75 bp, synthetic construct
  source 1..75: mol_type = other DNA
gaccacctttcaaccaatacaatttatatcaatgcaatatgacaccgatgacctgacccgattttttgctaaata

SEQ ID NO: 599904 - DNA, 75 bp, synthetic construct
  source 1..75: mol_type = other DNA
tattgcagtccatggataacgctaacaaagtgttcccggaaatggcgacgatgccgattgcgctggttattctga

SEQ ID NO: 599905 - DNA, 75 bp, synthetic construct
  source 1..75: mol_type = other DNA
tttctggttttgacagtggcttctctacctttgctcagggctttgtcgcgctggggagtttccgtctctcttaca

SEQ ID NO: 599906 - DNA, 75 bp, synthetic construct
  source 1..75: mol_type = other DNA
taatagaatgatagtctttattttgagcacaggtggttcagttttcttcaataacagatcattacgttggatggc

SEQ ID NO: 599907 - DNA, 75 bp, synthetic construct
  source 1..75: mol_type = other DNA
gaggcgggttttccagcagtcaggccaatatatgaattgaatcgccacgggtttaacagacacctcagagtcatt

SEQ ID NO: 599908 - DNA, 75 bp, synthetic construct
  source 1..75: mol_type = other DNA
tttagaagtctttaatgcgcttaaacttgaacaaactaaattaacattagtcacaatgactatgcaggatcacgc

SEQ ID NO: 599909 - DNA, 75 bp, synthetic construct
  source 1..75: mol_type = other DNA
gtttaagtaccagtcgtgtaatggccatcacctttatatttatgtcggtgcttattgtcctcagcctcgccgtta

SEQ ID NO: 599910 - DNA, 75 bp, synthetic construct
  source 1..75: mol_type = other DNA
ccgatatcaggcattacgtccttattctgaaacgcgagaacggggtgacctggctggataatttcggggaagtca

SEQ ID NO: 599911 - DNA, 75 bp, synthetic construct
  source 1..75: mol_type = other DNA
ccgatgggatttaatgtaccctttgccgtgtcacagaacagcgcggatgcctcttatttacagcagatggcgctg

SEQ ID NO: 599912 - DNA, 75 bp, synthetic construct
  source 1..75: mol_type = other DNA
ggacggtgattggcgtggtgaccggggtaattatctttacggtcatcaactatggcctgacgtacatcggcgtaa

SEQ ID NO: 599913 - DNA, 75 bp, synthetic construct
  source 1..75: mol_type = other DNA
ccagtcgtgtaatggccatcgcctttatatttatgtcggtgcttattgtcctcagccttgccgttaacgtcattc

SEQ ID NO: 599914 - DNA, 75 bp, synthetic construct
  source 1..75: mol_type = other DNA
cgcttctggttcgggatggttcaggctaccaggtggatatattgttcagtttggcactttttcaggaaacacgac

SEQ ID NO: 599915 - DNA, 69 bp, synthetic construct
  source 1..69: mol_type = other DNA
atgatctcgctcccatcagacactcgaatctcgctggttgccggcgttactgatatgcgtaaatccttc

SEQ ID NO: 599916 - DNA, 75 bp, synthetic construct
  source 1..75: mol_type = other DNA
gtggggggacagatacagcatgtgctggatgaagattccttttctggtcacctgcttatctttcgtggccgacgg

SEQ ID NO: 599917 - DNA, 75 bp, synthetic construct
  source 1..75: mol_type = other DNA
gccggaaactgatggccggctttgagtcagcctacgtggccctgtcgcgtatgaagcagcatgtgcaggtgtaca

SEQ ID NO: 599918 - DNA, 75 bp, synthetic construct
  source 1..75: mol_type = other DNA
tcaccatggaagtccacgacgttccggcgattgttgccgccgtgcgcagtgtggtgccggatgccatcattatga

SEQ ID NO: 599919 - DNA, 75 bp, synthetic construct
  source 1..75: mol_type = other DNA
ccatttacctggtacattgtggcggcggcgatttacctggtgatcaccctgttgagtcagtacattctcaaacgc

SEQ ID NO: 599920 - DNA, 75 bp, synthetic construct
  source 1..75: mol_type = other DNA
gttaccgatatgcgtaaatccttcaacggtctgggagaacaggtacaacatgtgctggatgagaaccccttctca

SEQ ID NO: 599921 - DNA, 75 bp, synthetic construct
  source 1..75: mol_type = other DNA
gatcaggaaccacagttacacacgcatgcggtggtggctaatgtcacgcagcataacggcgagtggaagacactg

SEQ ID NO: 599922 - DNA, 75 bp, synthetic construct
  source 1..75: mol_type = other DNA
cggagagcgtgctgcgtgaaccacaacgggagcgggaagcggtccgggaggttgcccgggaaaatctgttgcagg

SEQ ID NO: 599923 - DNA, 75 bp, synthetic construct
  source 1..75: mol_type = other DNA
gtgctgctgatgcactcgatgctaaatacacgaaggagctagctgatgcgaaagctgaaaatgatgctcttcggc

SEQ ID NO: 599924 - DNA, 75 bp, synthetic construct
  source 1..75: mol_type = other DNA
cggcaggctgaagaggccatccgccgtgaaacggaacgccgcgcagatgaaattgtcagaaaaatggcagagaac

SEQ ID NO: 599925 - DNA, 75 bp, synthetic construct
  source 1..75: mol_type = other DNA
aggcgctgggttatgaaaccgaagtggtcggtaagcacggtatgtgggagatgccgggcgtaccggtggaagcct

SEQ ID NO: 599926 - DNA, 75 bp, synthetic construct
  source 1..75: mol_type = other DNA
aattgtccgtaaaatggcagagaacaaacctgacctgccggatggcaaaacagagcaggctgtcagggaaattgc

SEQ ID NO: 599927 - DNA, 75 bp, synthetic construct
  source 1..75: mol_type = other DNA
aatgcccgttgctgggagcagctacgggaaaatgcctatctgatgggccagatggtcgatgccgataccgcctat

SEQ ID NO: 599928 - DNA, 75 bp, synthetic construct
  source 1..75: mol_type = other DNA
cgggcaggagcgtgaccgggctgtcacctcagaacgggaagccgcactgccggagagcgtgctgcgtgaaccaca

SEQ ID NO: 599929 - DNA, 75 bp, synthetic construct
  source 1..75: mol_type = other DNA
gctgaacccgctgaccacggatgacggaaacgggctgcggggattcagtggtgaaggccgggtgaagggcagtga

SEQ ID NO: 599930 - DNA, 75 bp, synthetic construct
  source 1..75: mol_type = other DNA
tgcaacagtcactgaaagaccctgagcaggcctgcaaaaatttcttccggaagcgggcggcttttccccgattca

SEQ ID NO: 599931 - DNA, 75 bp, synthetic construct
  source 1..75: mol_type = other DNA
tgacagaggtgaagtcgtttgctgcagaaggaaccagttttactgaactgggaggggaaatcaatgcgcagataa

SEQ ID NO: 599932 - DNA, 75 bp, synthetic construct
  source 1..75: mol_type = other DNA
attgcccgggaaaatctgctgcaggagcgtctgcagcagatggaacgagatatggttcgtgacctgcagaaagag

SEQ ID NO: 599933 - DNA, 75 bp, synthetic construct
  source 1..75: mol_type = other DNA
cagggctggacggatgccatcaacaatgccgtacagaaagggactgcccacgatgtgctggagccgaaagctgac

SEQ ID NO: 599934 - DNA, 75 bp, synthetic construct
  source 1..75: mol_type = other DNA
ccccggcggtcgcctcgttttcgttgaatgcaaagcacccggcaaaccaccacgccccgaccagctgcgcgagca

SEQ ID NO: 599935 - DNA, 75 bp, synthetic construct
  source 1..75: mol_type = other DNA
gtgtttctggaatccccaggctccatcaccatggaaatccacgacgttccggcgattgttgccgccgtgcgcaat

SEQ ID NO: 599936 - DNA, 75 bp, synthetic construct
  source 1..75: mol_type = other DNA
acatgtgcagccaaacactaaaatcgtgtttctggaatccccaggctccatcaccatggaaatccacgacgttcc

SEQ ID NO: 599937 - DNA, 75 bp, synthetic construct
  source 1..75: mol_type = other DNA
aaatgcatattgataccgacgaagccaacgctgcaggcgctgataatcctgacgtttttgccatgctggtggcgc

SEQ ID NO: 599938 - DNA, 75 bp, synthetic construct
  source 1..75: mol_type = other DNA
cacgcaccgaccagctgcgcgagcatgaacggctgcgcgcgctgggctttaccgtggtggtgctggatagcaaaa

SEQ ID NO: 599939 - DNA, 75 bp, synthetic construct
  source 1..75: mol_type = other DNA
aattgtccgtaaagtggcagagaacaaacctgacctgccggacggcaaaacagagcaggctgtcagggatattgc

SEQ ID NO: 599940 - DNA, 75 bp, synthetic construct
  source 1..75: mol_type = other DNA
ggctgttcagtacggcgcgggaactgcgggacgtggcggcaggccgtgccgttctccgtcaggcggggctggccg

SEQ ID NO: 599941 - DNA, 75 bp, synthetic construct
  source 1..75: mol_type = other DNA
acggaccagctgcaggccatcgcgcccggtcagcctttccgtctccagcagacgcgcagtgctgccgatgtggcc

SEQ ID NO: 599942 - DNA, 75 bp, synthetic construct
  source 1..75: mol_type = other DNA
ggtgtacaccgataaccgtcagggctggacggatgccattaacaatgccgtacagaaaggaacagcccacgatgt

SEQ ID NO: 599943 - DNA, 75 bp, synthetic construct
  source 1..75: mol_type = other DNA
tatgtggcactgccggcgtttgaccgtaacggcaagtcagctggtatctggctgaacccactgaccacggatgac

SEQ ID NO: 599944 - DNA, 75 bp, synthetic construct
  source 1..75: mol_type = other DNA
cgaaacgttctcggtgtccgggacggaattatccgcgaccaaacagcactgagaacgcttcaggaatacatcagg

SEQ ID NO: 599945 - DNA, 75 bp, synthetic construct
  source 1..75: mol_type = other DNA
gtcgtttgctgcagaaggaaccagttttactgaactggggcgggaaatcgatgcgcagataaaacggggtgattt

SEQ ID NO: 599946 - DNA, 75 bp, synthetic construct
  source 1..75: mol_type = other DNA
tttactgaactgggaggggaaatcaatgcgcagataaaacgcggtgatttactgtatgtggatgtggcaaaaggc

SEQ ID NO: 599947 - DNA, 75 bp, synthetic construct
  source 1..75: mol_type = other DNA
gtgagcataaaccgaattctttccgcgtttactgttattctgctggtggtctgtggtgcgcttagtctggggctg

SEQ ID NO: 599948 - DNA, 75 bp, synthetic construct
  source 1..75: mol_type = other DNA
cacacagatggcaatggacaacgccaccctgaacggtctggcccgcagcggtcgtgatgtccggctgtattcctc

SEQ ID NO: 599949 - DNA, 75 bp, synthetic construct
  source 1..75: mol_type = other DNA
attgtgcgtcagacgccggaactgcgggaggcggtatacagcctgattaaccgggatgtggaaagggcactgtcc

SEQ ID NO: 599950 - DNA, 75 bp, synthetic construct
  source 1..75: mol_type = other DNA
cacttcacacgccggcacagcaggccattcatctggcccttccggtggtggaaagtaaaaacctggccttcagcc

SEQ ID NO: 599951 - DNA, 75 bp, synthetic construct
  source 1..75: mol_type = other DNA
gcagcgccagcgtgatgttgctgcgcttgatgccagatactcaagggaattagccgatgcgagagctgaaaatga

SEQ ID NO: 599952 - DNA, 75 bp, synthetic construct
  source 1..75: mol_type = other DNA
ggatgcgcagttcgtggccctgcagggcagccgtaacggagagagcctgctggctgataatatgcaggatggcgt

SEQ ID NO: 599953 - DNA, 75 bp, synthetic construct
  source 1..75: mol_type = other DNA
ggcttcacacgccggcacagcaggctattcatctggcccttcctgtgctggaaagtaaaaacctggccttcagca

SEQ ID NO: 599954 - DNA, 75 bp, synthetic construct
  source 1..75: mol_type = other DNA
tcacgtacacggacgtgctggccaggacggtcggcatactgccgccggaaaatggtgtgattgaacgggcacgcg

SEQ ID NO: 599955 - DNA, 75 bp, synthetic construct
  source 1..75: mol_type = other DNA
gccgtgccgttctccgtcaggcggggcttgccgggggagacagtcctgcacggtttattgcaccggggcgtaaat

SEQ ID NO: 599956 - DNA, 75 bp, synthetic construct
  source 1..75: mol_type = other DNA
tgctgaccgtcgctcacagatgaacctgaagcaggatgaacggctgtccggtgaaatgataaccgggcgtcgtca

SEQ ID NO: 599957 - DNA, 75 bp, synthetic construct
  source 1..75: mol_type = other DNA
cggcaggacaccggaagcacgggagcagacgctgattgtcacgcacctgaatgaggaccggcgcgtgctgaacag

SEQ ID NO: 599958 - DNA, 75 bp, synthetic construct
  source 1..75: mol_type = other DNA
cagacccgggtgattcgccccggtcaggagcgggcagagcaacatattgacctggcttatgccatcaccgcccac

SEQ ID NO: 599959 - DNA, 75 bp, synthetic construct
  source 1..75: mol_type = other DNA
ccaccctgaacggtctggcccgcagcggtcgtgatgtccggctgtattcctcactggatgaaacccgtactgcgg

SEQ ID NO: 599960 - DNA, 75 bp, synthetic construct
  source 1..75: mol_type = other DNA
gcgggccggtgagacatcgctggaaacggctatcagtcatcagaagtccgcacttaacacgccggcacagcaggc

SEQ ID NO: 599961 - DNA, 75 bp, synthetic construct
  source 1..75: mol_type = other DNA
ttcgccccggccaggagcgggcagagcaacatattgacctggcctatgccatcaccgcccacggtgcgcaggggg

SEQ ID NO: 599962 - DNA, 75 bp, synthetic construct
  source 1..75: mol_type = other DNA
cattcatcttgcccttccggtggtggaaagtaaaaacctggccttcagccaggtggacctgctgacagaggcaaa

SEQ ID NO: 599963 - DNA, 75 bp, synthetic construct
  source 1..75: mol_type = other DNA
atgccgggcgtaccggtggaggccttttccggacgctcacaggctatccgggaggccgtcggggaagacgcctcg

SEQ ID NO: 599964 - DNA, 75 bp, synthetic construct
  source 1..75: mol_type = other DNA
atatcgtgacgcggcggatcagcgtgcggagacccgcacgcaggcgcccggggctgtttcacaggagggccggat

SEQ ID NO: 599965 - DNA, 75 bp, synthetic construct
  source 1..75: mol_type = other DNA
ttgtggctccggcggtacatgacgcttacggcctcaacgcaaacattcacacaacaccggagccacagtttgccc

SEQ ID NO: 599966 - DNA, 75 bp, synthetic construct
  source 1..75: mol_type = other DNA
tcttccgcctgcatctggtgttgggaatgaccatcttcctgctcttcccgttcacccgactggtgcatgtgtgga

SEQ ID NO: 599967 - DNA, 75 bp, synthetic construct
  source 1..75: mol_type = other DNA
gccgatgctgtggcattgcctgagaatttccgcattcatgatctggaaaaatttaatttaaatcgcttccgtttc

SEQ ID NO: 599968 - DNA, 75 bp, synthetic construct
  source 1..75: mol_type = other DNA
tacccgttattctaaagatcttgcagatgaaggcacccgctgctttatcgatgccgataatatgcgagccgtcag

SEQ ID NO: 599969 - DNA, 75 bp, synthetic construct
  source 1..75: mol_type = other DNA
acggtttatcgctatggcggcgaagaatttatcatcattgtcaaagctgctaatgatgaagatgcctgtcgtgcc

SEQ ID NO: 599970 - DNA, 75 bp, synthetic construct
  source 1..75: mol_type = other DNA
atgatcaagaaaacaacggaaattgatgccatcttgttaaatctcaataaggctatcgatgcccactaccagtgg

SEQ ID NO: 599971 - DNA, 75 bp, synthetic construct
  source 1..75: mol_type = other DNA
ttcacccgactggtgcatgtgtggagtgcgccgtttgagtactttacccgtcggtatcagattgtgcgctcgcgg

SEQ ID NO: 599972 - DNA, 75 bp, synthetic construct
  source 1..75: mol_type = other DNA
ttaatttaaatcgcttccgtttccgtggtgcactttccactgccagcatcgatgattttacccgttattctaaag

SEQ ID NO: 599973 - DNA, 75 bp, synthetic construct
  source 1..75: mol_type = other DNA
tcaattgtattggcgatacacgagcggtatgtctaggcactactaactactatatcaagggactccgctttaccg

SEQ ID NO: 599974 - DNA, 75 bp, synthetic construct
  source 1..75: mol_type = other DNA
cctgggtactattgatgaaccaggtcacgcagataacaccgccactctcaaactgaaaaagacagcaccgttctc

SEQ ID NO: 599975 - DNA, 75 bp, synthetic construct
  source 1..75: mol_type = other DNA
agaatggattgaagactgggccgactaccttgtgggctttgatgctaatggtgacgctattcaggcaacaaaagc

SEQ ID NO: 599976 - DNA, 75 bp, synthetic construct
  source 1..75: mol_type = other DNA
cgatcgtcctgtactggttctgcgcattattcagctggaagcggtgcaggaagaaatggctaacgaatttcgtga

SEQ ID NO: 599977 - DNA, 75 bp, synthetic construct
  source 1..75: mol_type = other DNA
gaaatggctaacgaatttcgtgatctgcttgttgagaaattcaaggacagcaaagtagaaacctttattggtact

SEQ ID NO: 599978 - DNA, 75 bp, synthetic construct
  source 1..75: mol_type = other DNA
agggcatatcaacataaccgtgaccgcaggtgtgagccgtgcatttcctgaagaaccgctggatgtggtcatcgg

SEQ ID NO: 599979 - DNA, 75 bp, synthetic construct
  source 1..75: mol_type = other DNA
tgctgagcaatgaggactggaatgccttcgtgctggcggagtttcatctgtacgaactgaagcgcatcactgaaa

SEQ ID NO: 599980 - DNA, 75 bp, synthetic construct
  source 1..75: mol_type = other DNA
ctgctgctctccggtggtgagcgggtgctgagcaatgaggactggaatgccttcgtgctggcggagtttcatctg

SEQ ID NO: 599981 - DNA, 75 bp, synthetic construct
  source 1..75: mol_type = other DNA
tatccccggatgactgggcagcactggaagaggccgaatatcagctttactggctgcggctcttgccggtgggcg

SEQ ID NO: 599982 - DNA, 75 bp, synthetic construct
  source 1..75: mol_type = other DNA
atgcaaaaagttaaaagaaaaaatttagccgctaaaattgctctggctgtcgctatgacgacctgcaccttgcag

SEQ ID NO: 599983 - DNA, 75 bp, synthetic construct
  source 1..75: mol_type = other DNA
atgaatttaaagttccgagtggtttcttcacaaagagggattttagccgctaaaaaagctttaatagttcctttc

SEQ ID NO: 599984 - DNA, 75 bp, synthetic construct
  source 1..75: mol_type = other DNA
gattaaaaagatcgaggactaccagcccgctgcgctggcggtgctgggtaaaaaagcctttgagcaagcttttag

SEQ ID NO: 599985 - DNA, 75 bp, synthetic construct
  source 1..75: mol_type = other DNA
ttaatcggcgatgtagtattacgcaccctggcaacttacttagccagttggacgcgtgattacgaaacggtttat

SEQ ID NO: 599986 - DNA, 75 bp, synthetic construct
  source 1..75: mol_type = other DNA
tattatcgaaaatcgctggcaggaagctcatttcgcaaaatttcaggaaggattgctttcttttacggcgacatt

SEQ ID NO: 599987 - DNA, 75 bp, synthetic construct
  source 1..75: mol_type = other DNA
atgccatcttgttaaatctcaataaggctatcgatgcccactaccagtggctggtaagtatgtttcacagcgtgg

SEQ ID NO: 599988 - DNA, 75 bp, synthetic construct
  source 1..75: mol_type = other DNA
catactggcgttttacagccggtctgcagacgggctgtggtcggtgaatgtcaccattgaacgggagcatcgtca

SEQ ID NO: 599989 - DNA, 75 bp, synthetic construct
  source 1..75: mol_type = other DNA
catctgagttgtttccggtaacggacacactggcgttttacagccggtctgcagacgggctgtggtcggtgaatg

SEQ ID NO: 599990 - DNA, 75 bp, synthetic construct
  source 1..75: mol_type = other DNA
atatgcgtgccgtcagtgtgcttaacctgggtactattgatgaaccaggtcacgcagataacaccgccactctca

SEQ ID NO: 599991 - DNA, 75 bp, synthetic construct
  source 1..75: mol_type = other DNA
ttgctctggcagcgagccagtcgctcggcggacagcctgatctggtggcgttgtttgtggtggtcaccggcgtgt

SEQ ID NO: 599992 - DNA, 75 bp, synthetic construct
  source 1..75: mol_type = other DNA
attaatgactattgctgaacggctacggcaggaaggacatcaaattggctggcaagaaggtaaaattgaaggctg

SEQ ID NO: 599993 - DNA, 75 bp, synthetic construct
  source 1..75: mol_type = other DNA
tccagaagcaaaacacgaatacgaaaaagcggcaaaagatttctgtatagacaatctatctgctttcgataaata

SEQ ID NO: 599994 - DNA, 75 bp, synthetic construct
  source 1..75: mol_type = other DNA
aactgcttcctgactgtagattttgccgtgatgttggctgacgggcagttggtgatggtggacgttaagggaagt

SEQ ID NO: 599995 - DNA, 75 bp, synthetic construct
  source 1..75: mol_type = other DNA
cagtgatcccggctgctgttctgatgatgttcttcccgcaactggcactggccgcccagggggcaggtcaggacc

SEQ ID NO: 599996 - DNA, 75 bp, synthetic construct
  source 1..75: mol_type = other DNA
ttctggtcggtgcggtcatgtacatgatgaccaaaaacgtcaagttcctggccggttttgccatcatctctgtat

SEQ ID NO: 599997 - DNA, 75 bp, synthetic construct
  source 1..75: mol_type = other DNA
aaagctctgcagaaaagaatatggcttttcggctaatgcgctatgccactgccgccatgcagcgtcacctggaca

SEQ ID NO: 599998 - DNA, 75 bp, synthetic construct
  source 1..75: mol_type = other DNA
attaataattcaaggacagaaaatggcaccgatggtcaggcgtacatggataataacgggaattggctttgcggt

SEQ ID NO: 599999 - DNA, 75 bp, synthetic construct
  source 1..75: mol_type = other DNA
tcgccgtggaaatatgtatgtccgctgccttgcggcaagctgggatgcatcaaatccgcagtgggaaccgtggtt

SEQ ID NO: 600000 - DNA, 75 bp, synthetic construct
  source 1..75: mol_type = other DNA
aacgccaaaggcagtaaaagcagcctatgacaatgctgaaaaacgtatgcagaaagaccagaacggtgacgatat

SEQ ID NO: 600001 - DNA, 75 bp, synthetic construct
  source 1..75: mol_type = other DNA
gtcggtgaagtcgatggtgatgaccccgcagtattcagaccaatacaaaaatacatcaatggcacatggtataac

SEQ ID NO: 600002 - DNA, 75 bp, synthetic construct
  source 1..75: mol_type = other DNA
aaaaacggccggggcatcagcacagcgcacagcacgtgaaaatctgggtatttatgatgccagtgtgagcaaaaa

SEQ ID NO: 600003 - DNA, 75 bp, synthetic construct
  source 1..75: mol_type = other DNA
ctgtgggtgacggtaatggccaattgccggtgccggatgccggtcagacgaaactggtgcatgaagtctggcgtc

SEQ ID NO: 600004 - DNA, 75 bp, synthetic construct
  source 1..75: mol_type = other DNA
ccggggggaacgccaccgtcaaggccaccttcggtaaagactccagtgcggtgaaatgggtaattctggcggaag

SEQ ID NO: 600005 - DNA, 75 bp, synthetic construct
  source 1..75: mol_type = other DNA
gtttgttttttggtcattttttgttaccataaattatggtgttggtataatggccagaagtgagtataacgtgcc

SEQ ID NO: 600006 - DNA, 75 bp, synthetic construct
  source 1..75: mol_type = other DNA
aaaggtggtatccagatggtgatcagaatgataggcgatgatattgcccatgcgcgtaaagccaatgctgcaggc

SEQ ID NO: 600007 - DNA, 75 bp, synthetic construct
  source 1..75: mol_type = other DNA
aattctgcacgcgctggcgaaaccgggagacgggatgtggatggaagatcctggctttccgctgattcgcccgat

SEQ ID NO: 600008 - DNA, 75 bp, synthetic construct
  source 1..75: mol_type = other DNA
caaaaggtttcccggcagacgatccgcaagcaaaacgcgaatacgaaaaagcggcaaaagatttctgtatcgaca

SEQ ID NO: 600009 - DNA, 75 bp, synthetic construct
  source 1..75: mol_type = other DNA
taactcccagaagtcactggcagaatggatcgaagactgggccgactaccttgtgggctttgatgctaatggtga

SEQ ID NO: 600010 - DNA, 75 bp, synthetic construct
  source 1..75: mol_type = other DNA
atctggcgcaaggccggactcgatggacataccgcactgagtgccagtgaatccgtcagtaagggaaacgtcaaa

SEQ ID NO: 600011 - DNA, 75 bp, synthetic construct
  source 1..75: mol_type = other DNA
aaagccggggatattttacccatctcgctgggagaaacgttcccggtggcgattgggcaatctgaattatttagc

SEQ ID NO: 600012 - DNA, 75 bp, synthetic construct
  source 1..75: mol_type = other DNA
aataaaccggccctgattaaagaaatcatccgctccctgccgctgaccctgaacgtcaaaatcgccgagctgtcg

SEQ ID NO: 600013 - DNA, 75 bp, synthetic construct
  source 1..75: mol_type = other DNA
ccgaccctgtttacggggaattttgacgtgattgattcgcatcttggcagctactttctcaaaaagcatcgcagc

SEQ ID NO: 600014 - DNA, 75 bp, synthetic construct
  source 1..75: mol_type = other DNA
gctgctggcagtagtggtcaggacctgatggccaccggtaacggtacggtcaaagccacgttcggtaaagactcc

SEQ ID NO: 600015 - DNA, 75 bp, synthetic construct
  source 1..75: mol_type = other DNA
gtgcttctgcgcccgtcaaaaagaaatcgtcttttttctctaaactgaacctgcttcgcctggtgcgtgcggttg

SEQ ID NO: 600016 - DNA, 75 bp, synthetic construct
  source 1..75: mol_type = other DNA
tttaaaaaaccgactcgcgctggatatctgcacgctgatatttaatctgcaaacctccggtattgcgctgaaatt

SEQ ID NO: 600017 - DNA, 75 bp, synthetic construct
  source 1..75: mol_type = other DNA
gttcttaactcagaagaatcaccgttcgtcacaccacaattcatcaggcagaaactcctggaatatggcgggcga

SEQ ID NO: 600018 - DNA, 75 bp, synthetic construct
  source 1..75: mol_type = other DNA
cggcaaaagctaaacatcaaatcgcctgaccgatgggatacctactgcttcactatgctggtggactatgtgcct

SEQ ID NO: 600019 - DNA, 75 bp, synthetic construct
  source 1..75: mol_type = other DNA
agcggttacttttatgaatcccaccattcaagggcaaaggcagaaggcaatccggaaggagtctggacggcaata

SEQ ID NO: 600020 - DNA, 75 bp, synthetic construct
  source 1..75: mol_type = other DNA
aacaaggcacggctaacgcatggttttttatccccagtgctattttgctgggggcgttgcacggccttgaacccg

SEQ ID NO: 600021 - DNA, 75 bp, synthetic construct
  source 1..75: mol_type = other DNA
ctgctctgcatccaggtgaaggaatttacgctcggtgccgcgctggtactgtgtttcagcatcggcttagcaatt

SEQ ID NO: 600022 - DNA, 75 bp, synthetic construct
  source 1..75: mol_type = other DNA
atggtgtccggccagagaaataaacgccgtgtaatcaactatcgaatgctggaatacacagacgttacagaaacg

SEQ ID NO: 600023 - DNA, 75 bp, synthetic construct
  source 1..75: mol_type = other DNA
ctaatttacttattggcattgaagccgatggtgatatcgaagaaattattcaggcggcgggaagtgtagcgaccg

SEQ ID NO: 600024 - DNA, 75 bp, synthetic construct
  source 1..75: mol_type = other DNA
tcgtcattccattcgtatcgccagtaactggcgtttgtattgtggcagttctggtatacgtttccctgtgtatct

SEQ ID NO: 600025 - DNA, 75 bp, synthetic construct
  source 1..75: mol_type = other DNA
ttcatgaggaccaaggctggtagaagtctaaccaacccagaaaacgggtttgttaaaaagattaacatgggtcac

SEQ ID NO: 600026 - DNA, 75 bp, synthetic construct
  source 1..75: mol_type = other DNA
taacggctatttgcttggtcgtgatgaatgcgatcgcgctgctcgccgcaaggtgttgttggagaaaaactgggg

SEQ ID NO: 600027 - DNA, 75 bp, synthetic construct
  source 1..75: mol_type = other DNA
caggcgacgggaagtgtagcgaccgatacattacctagcgatgaaccaatcgatatttgtcaggtgaaaaaaggg

SEQ ID NO: 600028 - DNA, 75 bp, synthetic construct
  source 1..75: mol_type = other DNA
ttttttcacctcgttagaagcacttcaacaggcggttgaagacgaacaagcatttgtcgtgatgcccgttcgtac

SEQ ID NO: 600029 - DNA, 75 bp, synthetic construct
  source 1..75: mol_type = other DNA
atacccatgatgaaacccggatcattgataccggtcacggcaaagtggaactgtccatttttgaggaagaccagc

SEQ ID NO: 600030 - DNA, 75 bp, synthetic construct
  source 1..75: mol_type = other DNA
gacaataaatttgctatgccctatatgtgggcgacgaccgggattggctataacgttgataaagttaaagcggtg

SEQ ID NO: 600031 - DNA, 75 bp, synthetic construct
  source 1..75: mol_type = other DNA
cagcggcggtttgcaccggaagccgtcagccattcactggcactggcggcgtcactggatgcgcaggggtacagc

SEQ ID NO: 600032 - DNA, 75 bp, synthetic construct
  source 1..75: mol_type = other DNA
tattacagaccatgagcgcacaggaatatgaagatatccgggctgccggaactgatgaacgtcgtgagctgacac

SEQ ID NO: 600033 - DNA, 75 bp, synthetic construct
  source 1..75: mol_type = other DNA
tgcgaagttgttcactctgaaagtgcaggatccaaaaatagaccgtgtgcgcacccgcgcgtggaccaaagtgaa

SEQ ID NO: 600034 - DNA, 75 bp, synthetic construct
  source 1..75: mol_type = other DNA
agcgcggaagtgcgtgataattcagggatttatcctccggcggacgttcgtgcgaagttgttcactctgaaagtg

SEQ ID NO: 600035 - DNA, 75 bp, synthetic construct
  source 1..75: mol_type = other DNA
ctggataaaagcaaactgccagaatggaagaatctcgatccagagctgctgaagctggtggcaaaacacgatccc

SEQ ID NO: 600036 - DNA, 75 bp, synthetic construct
  source 1..75: mol_type = other DNA
atggacagattcccacgttctgattcaatcgtacaaacccgaactggcctgcaaacctatatggcacaggtctat

SEQ ID NO: 600037 - DNA, 75 bp, synthetic construct
  source 1..75: mol_type = other DNA
cgaaaaagcacatgctaacgacatcaaaaaacgctttgctaatagcagcgtaacaaccggacaaattatcctttt

SEQ ID NO: 600038 - DNA, 75 bp, synthetic construct
  source 1..75: mol_type = other DNA
aagcgttgggacgggttggatgttttagcccgaagagcaccatacttctcaagtgctttgattgcgttagtggga

SEQ ID NO: 600039 - DNA, 75 bp, synthetic construct
  source 1..75: mol_type = other DNA
gcccacgaacgtttccacctggcgttatgttcaccgggcgatgtctctcaggtctgggtgctggttctggtgaat

SEQ ID NO: 600040 - DNA, 75 bp, synthetic construct
  source 1..75: mol_type = other DNA
tgacgctcgccatactcaaccagacccaggtgcgtatcagaaccgacgaaaacgtcagccataccgttcatccct

SEQ ID NO: 600041 - DNA, 75 bp, synthetic construct
  source 1..75: mol_type = other DNA
atgccctgcagtccatgaatgcccaggaatatgaagatatccgtgctgcgggaagcgatatgcgccgtaatctca

SEQ ID NO: 600042 - DNA, 75 bp, synthetic construct
  source 1..75: mol_type = other DNA
ctttgagtacggaatagctgtagcggatgccttcgtgtctatgacctccagtgccagcgttcaggccgctgtagc

SEQ ID NO: 600043 - DNA, 75 bp, synthetic construct
  source 1..75: mol_type = other DNA
caaagtgtgacaatgccaagtgttaccactgcgatgtacaataaaacacagcaactgaacgccatggttcaacag

SEQ ID NO: 600044 - DNA, 75 bp, synthetic construct
  source 1..75: mol_type = other DNA
gaatatatcaggcaacagaaaagcatatccggggggcatggcgcatcttatgctccagttcaggataatgagtgg

SEQ ID NO: 600045 - DNA, 75 bp, synthetic construct
  source 1..75: mol_type = other DNA
acagaaaagcatatccggggggcatggcgcatcttatgctccagttcaggataatgagtggacgccaccatcacc

SEQ ID NO: 600046 - DNA, 75 bp, synthetic construct
  source 1..75: mol_type = other DNA
atgtcagaaataccaattactatgaccagtgcgggggcgcagcctacgccacccaatgatttgcttgcaaatctt

SEQ ID NO: 600047 - DNA, 75 bp, synthetic construct
  source 1..75: mol_type = other DNA
gtggcgtacccgtaagggatacacgcccggcaaaatcctgacgctgaacggcgatctggcccgccgcctgaccac

SEQ ID NO: 600048 - DNA, 75 bp, synthetic construct
  source 1..75: mol_type = other DNA
atgtcatccattgatgccgctgtcgttgttgacgttacgcgtctccagcgagtgtttgcccggcttcagtttgtg

SEQ ID NO: 600049 - DNA, 75 bp, synthetic construct
  source 1..75: mol_type = other DNA
cttcggcctatatatgggaccaggcaaattcaacaattaataaattgctgcaggcgcaggatacccttaattact

SEQ ID NO: 600050 - DNA, 75 bp, synthetic construct
  source 1..75: mol_type = other DNA
tgaaggccggaattcccgttattgatggcactaatgtggttcagaccacaatcagcgcagttaacaacgttcagg

SEQ ID NO: 600051 - DNA, 75 bp, synthetic construct
  source 1..75: mol_type = other DNA
ctgcggatgaaattagcgcactgcgtaaagctgaacagaacaactctgaggcacgtaaaaaggctaatgacgccg

SEQ ID NO: 600052 - DNA, 75 bp, synthetic construct
  source 1..75: mol_type = other DNA
tggcaggcgtgccatgagatgtttgcgcgtaaagggcttatgttgcagaaacagcatcatggtcttgtgattgtg

SEQ ID NO: 600053 - DNA, 75 bp, synthetic construct
  source 1..75: mol_type = other DNA
tgaatggcttgaatatcattcgtttctggcggatgcagaaaaggggaattgatccgtttaaagtagagaaaaccc

SEQ ID NO: 600054 - DNA, 75 bp, synthetic construct
  source 1..75: mol_type = other DNA
tgaatggcctgaatatcattcgtttctggcgtatgcagagaaggggaattgatccgtttaaagtggagaaaaccc

SEQ ID NO: 600055 - DNA, 75 bp, synthetic construct
  source 1..75: mol_type = other DNA
aaagcgggcagactgagccagtctactgtgtggccacaacgtcaggctcatgggctgtaccggaaggaaccgtaa

SEQ ID NO: 600056 - DNA, 75 bp, synthetic construct
  source 1..75: mol_type = other DNA
gttgaatggttccgggcggctggagttgcgccgcgctgatgtggccgctgtccgtgtcttcctgtggaattatca

SEQ ID NO: 600057 - DNA, 75 bp, synthetic construct
  source 1..75: mol_type = other DNA
atggttacacggacagaccagctattaagaaaagctatgcggggctatctggaacaccttggcaatatgccactg

SEQ ID NO: 600058 - DNA, 75 bp, synthetic construct
  source 1..75: mol_type = other DNA
caggaagactgcgagaagctaaacaaacgtaaagtggatttagttttcgccccttcggtaaaagagatctacccg

SEQ ID NO: 600059 - DNA, 75 bp, synthetic construct
  source 1..75: mol_type = other DNA
attaatgactattgctgaacggctacggcaggaaggacatcaaattggctggcaggaaggtaagattgaaggctg

SEQ ID NO: 600060 - DNA, 75 bp, synthetic construct
  source 1..75: mol_type = other DNA
agttttattgaaaaaagtttacgcgcttactactcggatgttttatgggcggtggagaccagcgacggcgaagga

SEQ ID NO: 600061 - DNA, 75 bp, synthetic construct
  source 1..75: mol_type = other DNA
gaaacatcgccctacccgtactcacttaactggctggatgagtttgacgatccgcaacttgcccggcagttgtac

SEQ ID NO: 600062 - DNA, 75 bp, synthetic construct
  source 1..75: mol_type = other DNA
accggatttagttgcgtttggtggtgacacagacgagtactttcatgttttaggtaaaggtaagaagcctgtaat

SEQ ID NO: 600063 - DNA, 75 bp, synthetic construct
  source 1..75: mol_type = other DNA
taacgaaattttacgtacttataatcaggtgctcgtgccaattcaaccgcaaacatcaattcctattcgttcgta

SEQ ID NO: 600064 - DNA, 75 bp, synthetic construct
  source 1..75: mol_type = other DNA
aaagcgggcagactgagccagtctactgtgtggctacaacgtcaggatcatgggctgtaccggaagggactgtga

SEQ ID NO: 600065 - DNA, 75 bp, synthetic construct
  source 1..75: mol_type = other DNA
agtctgactttatggaagccttaccccacatgaacattattcatcagataatgcattacgggagtaaacagacga

SEQ ID NO: 600066 - DNA, 75 bp, synthetic construct
  source 1..75: mol_type = other DNA
gtgttaattatcgaaaccctgccgttgctgcgtcagcaaattcgccgcctgcgaatggaaggcaaacgcgtggcg

SEQ ID NO: 600067 - DNA, 75 bp, synthetic construct
  source 1..75: mol_type = other DNA
tcagcaaactgttcaacctggtccagccggacatcgcctgcttcggggaaaaggattttcagcaactggcactga

SEQ ID NO: 600068 - DNA, 75 bp, synthetic construct
  source 1..75: mol_type = other DNA
caacatgtgccatgaaccgacaagcgtgggtttggcagcgagtatcggtgtaggtaaagggaccgtgttgctgga

SEQ ID NO: 600069 - DNA, 75 bp, synthetic construct
  source 1..75: mol_type = other DNA
cttgataaccacgatccattaagtggcattcctggctataaaagtattccggttgaattagaaccatcaaattaa

SEQ ID NO: 600070 - DNA, 75 bp, synthetic construct
  source 1..75: mol_type = other DNA
taagccagagggctttgactgtccgggttgtgcatggccagatcctaagcacagtgcgtcattcgacatttgtga

SEQ ID NO: 600071 - DNA, 75 bp, synthetic construct
  source 1..75: mol_type = other DNA
gggctactacattgtcggcctgctggcagaagcgttcctcgaaaaaaatcccggcgcgaagatcatccacgatcc

SEQ ID NO: 600072 - DNA, 75 bp, synthetic construct
  source 1..75: mol_type = other DNA
tgagcgctatggcttcaccccacctcatgcacctggacatgctgcaattgccagcatgcaagcaatatgtacggg

SEQ ID NO: 600073 - DNA, 75 bp, synthetic construct
  source 1..75: mol_type = other DNA
ccgtgaatacgggagcaataactttcccgactgttccaacatgtgccatgaaccgaccagcgtgggtttggcagc

SEQ ID NO: 600074 - DNA, 75 bp, synthetic construct
  source 1..75: mol_type = other DNA
taagtatgacttttaatggatggcgctttaacttacgttcttctaatacggaacccgtagtccggttaaacgttg

SEQ ID NO: 600075 - DNA, 75 bp, synthetic construct
  source 1..75: mol_type = other DNA
cacaccccgctgaggcgatagcgcgggtggagcagcactttgcgaaagaggcactggaggtggatcgcaccgatg

SEQ ID NO: 600076 - DNA, 75 bp, synthetic construct
  source 1..75: mol_type = other DNA
gtggtggggggcgatgtgcgcctcacaagcgagtcgctgaagctggcgctggcccgcgggttaatggatgccggt

SEQ ID NO: 600077 - DNA, 75 bp, synthetic construct
  source 1..75: mol_type = other DNA
tcctaatcctctgctgccggagtgccgggctgatacgcgcaatgcggtgattgaacacggcgcggatatgggggt

SEQ ID NO: 600078 - DNA, 75 bp, synthetic construct
  source 1..75: mol_type = other DNA
accgaaaaccattgtgttaggcggtgatgtccgcctcaccagcgaaaccttaaaactggcgctggcaaaaggttt

SEQ ID NO: 600079 - DNA, 75 bp, synthetic construct
  source 1..75: mol_type = other DNA
cctcacgccgctcaagctggtgattaactccgggaacggcgcggcgggtccggtggtggacgccattgaagcccg

SEQ ID NO: 600080 - DNA, 75 bp, synthetic construct
  source 1..75: mol_type = other DNA
ccgatggattataacggcatgaagctggttcgcgagggggctcgcccgatcagcggagataccggactgcgcgac

SEQ ID NO: 600081 - DNA, 75 bp, synthetic construct
  source 1..75: mol_type = other DNA
cagcggcgataccggactgcgcgacgtccagcgtctggcagaagcgaacgactttccccccgtcgatgaaaccaa

SEQ ID NO: 600082 - DNA, 75 bp, synthetic construct
  source 1..75: mol_type = other DNA
cagcggagataccggactgcgcgaagtccagcgtctggcagaagcgaacgactttccccccgtcgatgaaaccaa

SEQ ID NO: 600083 - DNA, 75 bp, synthetic construct
  source 1..75: mol_type = other DNA
ggcaccgaagagatttatttcgccacgttccatctcggcgtggatggcggcatggaagttacagccagccataaa

SEQ ID NO: 600084 - DNA, 75 bp, synthetic construct
  source 1..75: mol_type = other DNA
cagcggggataccggactgcgcgacgtccagcgtctggcagaagccaacgactttccccccgtcgatgaaaccaa

SEQ ID NO: 600085 - DNA, 75 bp, synthetic construct
  source 1..75: mol_type = other DNA
cagcggggataccggactgcgcgatgtccagcgtctggcagaagctaacgactttccccccgtcgatgaaaccaa

SEQ ID NO: 600086 - DNA, 75 bp, synthetic construct
  source 1..75: mol_type = other DNA
cagcggggataccggactgcgcgaagtccagcgtctggcagaagcaaacgactttccccccgtcgatgaaaccaa

SEQ ID NO: 600087 - DNA, 75 bp, synthetic construct
  source 1..75: mol_type = other DNA
ggcaccgaagagatttatttcgccacgttccatctcggcgtggatggcggcatagaagttacagccagccataag

SEQ ID NO: 600088 - DNA, 75 bp, synthetic construct
  source 1..75: mol_type = other DNA
ccttacgccgctcaagctggtgatcaactccgggaacggcgcagcgggtccggtggtggacgctatcgaagcccg

SEQ ID NO: 600089 - DNA, 75 bp, synthetic construct
  source 1..75: mol_type = other DNA
tgtcgaaaaccggacacgcctttattaaagaacgtatgcgcaaggaagacgctatctacggtggcgaaatgagcg

SEQ ID NO: 600090 - DNA, 75 bp, synthetic construct
  source 1..75: mol_type = other DNA
ggcaccgaagagatttatttcgccacgttccatctcggcgtggatggcggcatcgaagttaccgccagccataac

SEQ ID NO: 600091 - DNA, 75 bp, synthetic construct
  source 1..75: mol_type = other DNA
ggcaccgaagagatttatttcgccacgttccatctcggcgtggatggcggcatagaagttacggccagccataaa

SEQ ID NO: 600092 - DNA, 75 bp, synthetic construct
  source 1..75: mol_type = other DNA
ggcaccgaagagatttatttcgccacgttccatctcggcgtggatggcggcatagaagttactgccagccataat

SEQ ID NO: 600093 - DNA, 75 bp, synthetic construct
  source 1..75: mol_type = other DNA
ggtggtgcggttgaatgtggaatcgcgcggcgatgtaccgctgatggaagaaaagacaaaacttatccttgagtt

SEQ ID NO: 600094 - DNA, 75 bp, synthetic construct
  source 1..75: mol_type = other DNA
agatcatggccctggatgaggcaaaaggggcagaagcgcaggctgaaaaactggcggcctgcccgggaatgaccg

SEQ ID NO: 600095 - DNA, 75 bp, synthetic construct
  source 1..75: mol_type = other DNA
catggcgaaccattcaccggcagcggtacagggtggcgtgccacagacgtcagcagacggtgatgcggacgtgaa

SEQ ID NO: 600096 - DNA, 75 bp, synthetic construct
  source 1..75: mol_type = other DNA
gccggagatgacggtggaaaaagcccgcccgatcctggctgcttcaccgcaggcggatgccggaccatcactccg

SEQ ID NO: 600097 - DNA, 75 bp, synthetic construct
  source 1..75: mol_type = other DNA
tatctcctggttggtaacagcggtgggctcaatggcgttggcctgggccttcgcaaaatgcggtatgtatagccg

SEQ ID NO: 600098 - DNA, 75 bp, synthetic construct
  source 1..75: mol_type = other DNA
agcgaaagttgcaaactttgttgcttttgttggcgcgatgtacagcttttatgcgctgtactcatccggggaaga

SEQ ID NO: 600099 - DNA, 75 bp, synthetic construct
  source 1..75: mol_type = other DNA
tgggcgtcgttcagttaaccatactgacgatggtcaacatgatgggctccggtatcatcatgctgccgacaaagc

SEQ ID NO: 600100 - DNA, 75 bp, synthetic construct
  source 1..75: mol_type = other DNA
atgccggactatcactccgtgatcaaatcatggccctggatgaggcgaaaggggctgaggcgcaggctgaaaaac

SEQ ID NO: 600101 - DNA, 75 bp, synthetic construct
  source 1..75: mol_type = other DNA
gcccgcccgatcctggctgcttcaccgcaggcggatgccggaccctcactccgtgatcagatcatggcactggat

SEQ ID NO: 600102 - DNA, 75 bp, synthetic construct
  source 1..75: mol_type = other DNA
agccggtggcatcctcgcagagtgaagccgatcgcattatggcgtgtgaagaagctaaaggtcgtgaacaactgg

SEQ ID NO: 600103 - DNA, 75 bp, synthetic construct
  source 1..75: mol_type = other DNA
catttcatggcgaaccattcaccggcagcggtacagggtggcgtgccacagacgtcagcagacggtgatgcggac

SEQ ID NO: 600104 - DNA, 75 bp, synthetic construct
  source 1..75: mol_type = other DNA
ccggcacgctggtgcaccggctgggtggtatgcggccattttccggaatgacaggctatgacggcattgttgcct

SEQ ID NO: 600105 - DNA, 75 bp, synthetic construct
  source 1..75: mol_type = other DNA
gccgggctggcggatgaattagtcaatgcgtcggatgccatcagtgtgatggccacggcgctgaacagtaatgtc

SEQ ID NO: 600106 - DNA, 75 bp, synthetic construct
  source 1..75: mol_type = other DNA
atgtggtgactgccgcaggcggcaccccggtaatgtcgaaaaccggacacgcctttattaaagaacgtatgcgca

SEQ ID NO: 600107 - DNA, 75 bp, synthetic construct
  source 1..75: mol_type = other DNA
cgctcaagctggtgattaactccgggaacggcgcggcgggtccggtggtggacgccattgaagcccgctttaaag

SEQ ID NO: 600108 - DNA, 75 bp, synthetic construct
  source 1..75: mol_type = other DNA
gcccgtattgttgattcgtcttggcattgatgaacaaaccgcgtttgcgcgtaaacctgaccaccaactggcagc

SEQ ID NO: 600109 - DNA, 75 bp, synthetic construct
  source 1..75: mol_type = other DNA
ggcgaaaacgctgctggcagctgcgccatcagtatcgcaaccgtcacaggtaacactttttgagcgcttcatggc

SEQ ID NO: 600110 - DNA, 75 bp, synthetic construct
  source 1..75: mol_type = other DNA
ggtctgtctgttgatgccgtcacgggaacagaggccgccgttttgaaggtcagtccggcattgatgccgggctgg

SEQ ID NO: 600111 - DNA, 75 bp, synthetic construct
  source 1..75: mol_type = other DNA
attctggccgcggcagcaccacagcagccggtggcatccgcgcagagtgaagccgatcgcattatggcgtgtgaa

SEQ ID NO: 600112 - DNA, 75 bp, synthetic construct
  source 1..75: mol_type = other DNA
tgaacgttttatggggatgtattcgccgaaagctgtcggaggtggtgctgtcggggatgatgctgaagtgacagc

SEQ ID NO: 600113 - DNA, 75 bp, synthetic construct
  source 1..75: mol_type = other DNA
cggcaacgctggctgcgatgccggatatgaccgtggaaaaagcccgcccgattctggctgcttcaccgcaggcgg

SEQ ID NO: 600114 - DNA, 75 bp, synthetic construct
  source 1..75: mol_type = other DNA
gcagaataatttgccggagctgatttccggctggcgtggtgagctgatggcggaagcattacacaatttattgca

SEQ ID NO: 600115 - DNA, 75 bp, synthetic construct
  source 1..75: mol_type = other DNA
gatgtctggtatctgttaccgatcaccgcaaagctgatggttgaaaccgaagcctctggctggctacctgcggcg

SEQ ID NO: 600116 - DNA, 75 bp, synthetic construct
  source 1..75: mol_type = other DNA
atgaccacgagccgcaatggtaaacgcgcggcatctatccacccgcaaaatgccctctccatcaacccagcattg

SEQ ID NO: 600117 - DNA, 75 bp, synthetic construct
  source 1..75: mol_type = other DNA
atatcgagcttgaagatactcatcgagcggtatataaagcgcgcaaaattattcaagatagatatggaattcttt

SEQ ID NO: 600118 - DNA, 75 bp, synthetic construct
  source 1..75: mol_type = other DNA
gagcgcgatctggcggtgaactttgtcgtgcgtgaagaacatttgtggtcggtagcgcgttatatgccgggaagt

SEQ ID NO: 600119 - DNA, 75 bp, synthetic construct
  source 1..75: mol_type = other DNA
ctttccggcaatagccctggatactgaatttgttcgtacgcgcacttattacccgcaactgggactgattcaact

SEQ ID NO: 600120 - DNA, 75 bp, synthetic construct
  source 1..75: mol_type = other DNA
atgaattacgatgaaataacgaaaatcactgctgaacgtattagcgaccatataaccgaagcagttaatacagac

SEQ ID NO: 600121 - DNA, 75 bp, synthetic construct
  source 1..75: mol_type = other DNA
ttaccgctgaacgtattagcgactacatgactgaagcagttaatacagactctatagccgttgcggaaatgcaac

SEQ ID NO: 600122 - DNA, 75 bp, synthetic construct
  source 1..75: mol_type = other DNA
ctgcgcgccggtgatgcccggacgtggtggcgaccatcaacaggcgaacaggtgttactgctctgtttaagcggt

SEQ ID NO: 600123 - DNA, 75 bp, synthetic construct
  source 1..75: mol_type = other DNA
ccggggaactggtcaaacttgagcgccgggactatgccaatggcatcctgacagtcaggcaagggaaggggcgca

SEQ ID NO: 600124 - DNA, 75 bp, synthetic construct
  source 1..75: mol_type = other DNA
gctaactatccgtgggaacaacttaactacgccgctgttgccaaagtacgtgcggcactgctggatgatggttac

SEQ ID NO: 600125 - DNA, 75 bp, synthetic construct
  source 1..75: mol_type = other DNA
tgagcggcgatgtccagcgcaagggaagggcgctgggcaggcaggaaatccgggtactgattcaggctgcaaaac

SEQ ID NO: 600126 - DNA, 75 bp, synthetic construct
  source 1..75: mol_type = other DNA
agtatatttgatgctgggttaacaagagctgtagtacgcgaaatagcattactaaaaaacagactggacgattgt

SEQ ID NO: 600127 - DNA, 75 bp, synthetic construct
  source 1..75: mol_type = other DNA
aggtagccgcagacatgtacccattcacgtttagagcgctaaagccaataccgaaaagcaaaggtggtggctgga

SEQ ID NO: 600128 - DNA, 75 bp, synthetic construct
  source 1..75: mol_type = other DNA
attatgtctcatacagttcccgaaaaacttaaacttaataatgaatctgagttcaattctgccttgaagggggtg

SEQ ID NO: 600129 - DNA, 75 bp, synthetic construct
  source 1..75: mol_type = other DNA
ttttccgcctgcatctggtattgggaatgaccatcttcctgctctttccgttcacccgactggtgcatgtgtgga

SEQ ID NO: 600130 - DNA, 75 bp, synthetic construct
  source 1..75: mol_type = other DNA
tgttacaggaaaggcgacaaacggtccgatgctggacgctgctggggcgacattgcttgggatactggaagtaat

SEQ ID NO: 600131 - DNA, 75 bp, synthetic construct
  source 1..75: mol_type = other DNA
tggtccgtggggcgtatggcgtcacactcaatcagctacccgccctttgagtacgactatagacctgaatacgct

SEQ ID NO: 600132 - DNA, 75 bp, synthetic construct
  source 1..75: mol_type = other DNA
cgataaactttacaatatatccgataaaaaaatgtcaaatctttatgacaaactttttgtttctttattagagca

SEQ ID NO: 600133 - DNA, 75 bp, synthetic construct
  source 1..75: mol_type = other DNA
atgggctgcgcatgttgaagatgggattgctggattaaggaattatcgtaacctaagagattttgcattaggatt

SEQ ID NO: 600134 - DNA, 75 bp, synthetic construct
  source 1..75: mol_type = other DNA
atgggctgcgcatgtggaggatgggattgcggcgttaaggaatcataagagtctattaaactttattaaatcaat

SEQ ID NO: 600135 - DNA, 75 bp, synthetic construct
  source 1..75: mol_type = other DNA
gtattgtcaatgttgacctcatcgcttactacgtactgagagatcccctcataatttccccaaagcgtaaccatg

SEQ ID NO: 600136 - DNA, 75 bp, synthetic construct
  source 1..75: mol_type = other DNA
aaaacgcctgccaaagtctgccagtccatcgccaggcgatacgcggtgttttcgccggaggaaccttctgttacg

SEQ ID NO: 600137 - DNA, 75 bp, synthetic construct
  source 1..75: mol_type = other DNA
gatttcacccgtggcaaaccgcatccaatgatcgacccgactctgcgcaataaacgtctgctcaacgaactcaac

SEQ ID NO: 600138 - DNA, 75 bp, synthetic construct
  source 1..75: mol_type = other DNA
gtttcgctattcatcggaacgggataatcggaaactggatggttcgctggtgttggataagattacgtggctggg

SEQ ID NO: 600139 - DNA, 75 bp, synthetic construct
  source 1..75: mol_type = other DNA
ccaaagtcgccgcagatcagtatccgttccgaatcatcggggtaacggttaaaccaaagaaagcaggtggcggct

SEQ ID NO: 600140 - DNA, 75 bp, synthetic construct
  source 1..75: mol_type = other DNA
cggtattcctaacccgctgctgccggaatgccgcgacgacacccgcaatgcggtcatcaaacacggcgcggatat

SEQ ID NO: 600141 - DNA, 75 bp, synthetic construct
  source 1..75: mol_type = other DNA
tggcggcaacgctggcggcgatgccggagatgacggtggaaaaagcccgcccgatcctggctgcttcaccgcagg

SEQ ID NO: 600142 - DNA, 75 bp, synthetic construct
  source 1..75: mol_type = other DNA
attctggccgcggcggcaccgcagcagccggtggcatccgcgcagagtgaagccgatcgcattatggcgtgtgaa

SEQ ID NO: 600143 - DNA, 75 bp, synthetic construct
  source 1..75: mol_type = other DNA
ccgctcaagctggtgattaactccgggaacggcgcggcgggtccggtggtggacgccattgaagcccgctttaaa

SEQ ID NO: 600144 - DNA, 75 bp, synthetic construct
  source 1..75: mol_type = other DNA
cgttccatctcggcgtggatggcggcatcgaagttaccgccagccataacccgatggattacaacggcatgaagc

SEQ ID NO: 600145 - DNA, 75 bp, synthetic construct
  source 1..75: mol_type = other DNA
cgcgacgacacccgcaatgcggtcatcaaacacggtgcggatatgggcattgcctttgatggcgattttgaccgc

SEQ ID NO: 600146 - DNA, 75 bp, synthetic construct
  source 1..75: mol_type = other DNA
gaggttcgccaggacatgcagcagcgcattgatgcggcgcgccggatgtttgccgaaaaagtggcgatgtatacc

SEQ ID NO: 600147 - DNA, 75 bp, synthetic construct
  source 1..75: mol_type = other DNA
atggcgaaccattcaccggcagcggtacagggtggcgtgccacagacgtcagcagacggtgatgcggacgtgaaa

SEQ ID NO: 600148 - DNA, 75 bp, synthetic construct
  source 1..75: mol_type = other DNA
cagcggggataccggactgcgcgaggtccagcgtctggcagaagcgaacgactttccccccgtcgatgaaaccaa

SEQ ID NO: 600149 - DNA, 75 bp, synthetic construct
  source 1..75: mol_type = other DNA
gttcatataataaaataataggtgttagtgatgctgctactcaaaatttaaagaaatggattgatattagtgata

SEQ ID NO: 600150 - DNA, 75 bp, synthetic construct
  source 1..75: mol_type = other DNA
gaccacctttattccgcaattgcgccagtcaggattcagtcaggccgatgtggatgtgatgttacgtgaaaatcc

SEQ ID NO: 600151 - DNA, 75 bp, synthetic construct
  source 1..75: mol_type = other DNA
ggcaccgaagagatctatttcgccacgttccatctcggcgtggatggcggcatcgaagttaccgccagccataat

SEQ ID NO: 600152 - DNA, 75 bp, synthetic construct
  source 1..75: mol_type = other DNA
tgtttcctgtttgacgaaaaagggcagtttatcgagggctactacattgtcggcctgctggcagaagcgttcctc

SEQ ID NO: 600153 - DNA, 75 bp, synthetic construct
  source 1..75: mol_type = other DNA
gccgaccgcgccggtatcagagggcagttcagcgacgcggatgcataccatctggaccaggcttttccactgctg

SEQ ID NO: 600154 - DNA, 75 bp, synthetic construct
  source 1..75: mol_type = other DNA
tccgtacagcatggatatcaccgtcacccggaacagtccgactggtcaggctatgacaaccgatgcggaagccgc

SEQ ID NO: 600155 - DNA, 75 bp, synthetic construct
  source 1..75: mol_type = other DNA
tgtatacgctggatgaactttcctgccctgctgcacgggaaaaagcccgcgactggtaccgtcagtatcatgcta

SEQ ID NO: 600156 - DNA, 75 bp, synthetic construct
  source 1..75: mol_type = other DNA
gtgcagcatcttgcagagcatggcattcaaccagcccggaatatggctgaacatattcctccggcacctaactgg

SEQ ID NO: 600157 - DNA, 75 bp, synthetic construct
  source 1..75: mol_type = other DNA
tccttttatcaggttgctgaggcacttgccagtgcatggcatgtggatgatgcatcaaaaaggaatcgccgtgga

SEQ ID NO: 600158 - DNA, 75 bp, synthetic construct
  source 1..75: mol_type = other DNA
acgagtacaactggctgacctcagacaccgctgtggatgaggtcctgctcatcaacgaatacacctttactgaag

SEQ ID NO: 600159 - DNA, 75 bp, synthetic construct
  source 1..75: mol_type = other DNA
cgtggtggaatgcggttgccatcaacgacgtacctgcgcagagtgatttctacagtagcgccaacggtcgcctgc

SEQ ID NO: 600160 - DNA, 75 bp, synthetic construct
  source 1..75: mol_type = other DNA
aacgggtgctggtggtggatatcggcggtggtacgactgactgttcattgctgctgatggggccgcagtggcgtt

SEQ ID NO: 600161 - DNA, 75 bp, synthetic construct
  source 1..75: mol_type = other DNA
ctggtgattaactccgggaacggcgcagcgggtccggtggtggacgccattgaagcccgctttaaagccctcggc

SEQ ID NO: 600162 - DNA, 75 bp, synthetic construct
  source 1..75: mol_type = other DNA
gcgtgcctggcgtatcagtcagttgaatgccgccgctgtcaggatagctgtgagccaatggcaattatctttcgc

SEQ ID NO: 600163 - DNA, 75 bp, synthetic construct
  source 1..75: mol_type = other DNA
cgagagattagtgcacttataggtgtggctcctgtaaacagagactccggaacaatgcgtggtagacgaactatt

SEQ ID NO: 600164 - DNA, 75 bp, synthetic construct
  source 1..75: mol_type = other DNA
actttcagggtctgggcggtgatgaagcaaacactcaggcgcaagggattctggaacgcgcggcgaagcgtgccg

SEQ ID NO: 600165 - DNA, 75 bp, synthetic construct
  source 1..75: mol_type = other DNA
catcagccagctttcttgaacgccagttgactgccggtgtgttccagccgctggataaaagcaaattgccagaat

SEQ ID NO: 600166 - DNA, 75 bp, synthetic construct
  source 1..75: mol_type = other DNA
tgggggaagtgcgtgttccgcatcggggaaatgtggtggacagagtcattgaaggggcttacgaggtggtgggcg

SEQ ID NO: 600167 - DNA, 75 bp, synthetic construct
  source 1..75: mol_type = other DNA
agggctttcagcccttcttcgcctgtcagacccgcgtgcgcgacccgggccgccggggatacaccaaacacatgc

SEQ ID NO: 600168 - DNA, 75 bp, synthetic construct
  source 1..75: mol_type = other DNA
tttcagccattcttcgcctgccagacccgtgtgcgcgacccgggccgccggggatacacaaaacacatgctgcgt

SEQ ID NO: 600169 - DNA, 75 bp, synthetic construct
  source 1..75: mol_type = other DNA
aagagaaacacacgtcccgaagccagaactatacgtacatccccaccatcaccgtactggaaagtctgcagcggg

SEQ ID NO: 600170 - DNA, 75 bp, synthetic construct
  source 1..75: mol_type = other DNA
ttgaccggatagaggagaagcgtgatgccatgcagtcgctggtcctgccgccaccggcacgtcaggcgctggcac

SEQ ID NO: 600171 - DNA, 75 bp, synthetic construct
  source 1..75: mol_type = other DNA
cactatgtacccggtatttttggggaagaccggcatacctcccgcagtgaacggtatgcgtatatccccaccatc

SEQ ID NO: 600172 - DNA, 75 bp, synthetic construct
  source 1..75: mol_type = other DNA
gccgacattctgacaccacgacgcagggaggattacggtaaggacctgtggagtgcttatcagaccattcaggag

SEQ ID NO: 600173 - DNA, 75 bp, synthetic construct
  source 1..75: mol_type = other DNA
atgcgattagccagccgttttggttatgtaaatcagatccgccgggagcgcccgctgacacacgaagaactgatg

SEQ ID NO: 600174 - DNA, 75 bp, synthetic construct
  source 1..75: mol_type = other DNA
ccaccggcacgccaggcgctggcacaggcggcactgacttaccgttatggtgacgaacatcagccggtcaccacc

SEQ ID NO: 600175 - DNA, 75 bp, synthetic construct
  source 1..75: mol_type = other DNA
caagtcgtccccagcgtattcggggaagataagcacacatccagaagcgagaactatacctggatccccaccatc

SEQ ID NO: 600176 - DNA, 75 bp, synthetic construct
  source 1..75: mol_type = other DNA
acggggccatgatgaccctcgatgaagccagaaccatgaaagagaactatttcgcgctgctggcaaaactcgagt

SEQ ID NO: 600177 - DNA, 75 bp, synthetic construct
  source 1..75: mol_type = other DNA
ttcacggtgtcagtcgcaagacggtaacggcgtggaaggcccgtggctggctggttctggacggtgaggacatcg

SEQ ID NO: 600178 - DNA, 75 bp, synthetic construct
  source 1..75: mol_type = other DNA
tttgtacagtctatgcctcgggcatccaagcagcaagcgcgttacgccgtgggtcgatgtttgatgttatggagc

SEQ ID NO: 600179 - DNA, 75 bp, synthetic construct
  source 1..75: mol_type = other DNA
atgcgactagccagtcgttttggttatgcgaaccagatacgccgtgaccatccgctgacacacgaagaactgatg

SEQ ID NO: 600180 - DNA, 75 bp, synthetic construct
  source 1..75: mol_type = other DNA
ggtgtacccgtctgctttaccgtcccggagaaatcagtctgtgcagactgagtacaggcaatggcatctggccat

SEQ ID NO: 600181 - DNA, 75 bp, synthetic construct
  source 1..75: mol_type = other DNA
ctgcgtctgcggtcagtctccgggggaagtgcgtgttccacaccggggaaatgtggtggagaaagttatcgaagg

SEQ ID NO: 600182 - DNA, 75 bp, synthetic construct
  source 1..75: mol_type = other DNA
ttatgtatcgatacgtgcattgcgcgcaactggcgtttgtcgatgcaaacgcataaatatttaaatattgcctga

SEQ ID NO: 600183 - DNA, 75 bp, synthetic construct
  source 1..75: mol_type = other DNA
gggggcggcgagcagtgaagatttgctggcagtcattggtcgtcagggatacaccgcacgtcacgtggtgattac

SEQ ID NO: 600184 - DNA, 75 bp, synthetic construct
  source 1..75: mol_type = other DNA
ggaaattgaaaccgcgctttaccccggtagcattgaggtgaaaatgcacccgctgtcgatcaaacgcgcggtggc

SEQ ID NO: 600185 - DNA, 75 bp, synthetic construct
  source 1..75: mol_type = other DNA
tatgtgtgcaaactctatggatcatatttatcctgtcactgcctacggttatagcagcttctgttatcggtatta

SEQ ID NO: 600186 - DNA, 75 bp, synthetic construct
  source 1..75: mol_type = other DNA
tcacagcattgataccgacattaagctcaatcgcgcattgtgggtgatggcagaaacgatgctggagagcctgcg

SEQ ID NO: 600187 - DNA, 75 bp, synthetic construct
  source 1..75: mol_type = other DNA
attcccaccatcaccgtactggaaagcctgcagcgggaaggctttcagccattcttcgcctgccagacccgtgtg

SEQ ID NO: 600188 - DNA, 75 bp, synthetic construct
  source 1..75: mol_type = other DNA
ccgcgccttcaaccatatggcggcaggcgttaagcaactggcagatgatcgcacattgctgatggcaggggtaag

SEQ ID NO: 600189 - DNA, 75 bp, synthetic construct
  source 1..75: mol_type = other DNA
gtcaacaaaagttcgcctgtcgtctggctgaaaacctggttgtcgcccaatatctgggtacgcgtgccgctaacc

SEQ ID NO: 600190 - DNA, 75 bp, synthetic construct
  source 1..75: mol_type = other DNA
ccagaactatacgtacatccccaccatcactgtgctggaaagcctgcagcgggaaggctttcagccattcttcgc

SEQ ID NO: 600191 - DNA, 75 bp, synthetic construct
  source 1..75: mol_type = other DNA
cagcatcgacacggacattaagctcaatcgcgcattgtgggtgatggcagaaacgctgctggagagcatgcgctg

SEQ ID NO: 600192 - DNA, 75 bp, synthetic construct
  source 1..75: mol_type = other DNA
gcagagcacgaggattttgcattcgatatgagcgacagccacaaagagcggcttgcggcgtttgatggggtatga

SEQ ID NO: 600193 - DNA, 75 bp, synthetic construct
  source 1..75: mol_type = other DNA
tgcggtatctgcgctgatggcgttcggcaccttccaggctgagcatgaggattttgctttcgatatgagcgatag

SEQ ID NO: 600194 - DNA, 75 bp, synthetic construct
  source 1..75: mol_type = other DNA
tggtgacgaacatcagcccgtcaccaccgctgacattctgacccctcgacgctgggaggattacggtgaggacct

SEQ ID NO: 600195 - DNA, 75 bp, synthetic construct
  source 1..75: mol_type = other DNA
tggtgacgaacatcagcccgtcaccaccgctgacattctgaccccacgacgcagggaggattacggtgaggacct

SEQ ID NO: 600196 - DNA, 75 bp, synthetic construct
  source 1..75: mol_type = other DNA
tggtgacgaacatcagccagtcaccaccgctgacattctgaccccccgacgcagggaggattacggtgaggacct

SEQ ID NO: 600197 - DNA, 75 bp, synthetic construct
  source 1..75: mol_type = other DNA
atcaccgtactggagagcctgcagcgggaaggctttcagccgttcttcgcctgccagacccgcgtacgtgacccg

SEQ ID NO: 600198 - DNA, 75 bp, synthetic construct
  source 1..75: mol_type = other DNA
gaacgaccagaaagcggaacaaaacagcccaaatgcgttacaaaacgagccagaaacgaaacagcctgaaccagt

SEQ ID NO: 600199 - DNA, 75 bp, synthetic construct
  source 1..75: mol_type = other DNA
ccgaacaaggagtgcaccgaaggcgatcaacatgccaatgacaataatgaaacaggcgagacagcaaatccctta

SEQ ID NO: 600200 - DNA, 75 bp, synthetic construct
  source 1..75: mol_type = other DNA
ttgagggcactaaccccagcctggcgattgtcgatgagtaccatcttcacccggataacggcgtttattccgcgc

SEQ ID NO: 600201 - DNA, 75 bp, synthetic construct
  source 1..75: mol_type = other DNA
gtattcaggcacacaaggtcattttcccgaagagcaacagcctgttaaagccgctggcggcaaaagcggccacca

SEQ ID NO: 600202 - DNA, 75 bp, synthetic construct
  source 1..75: mol_type = other DNA
aagtcagggagtcaggccgccggaagtacagcagcgcgtttattgaggtgccgcgcaagaatgccaaatccactg

SEQ ID NO: 600203 - DNA, 75 bp, synthetic construct
  source 1..75: mol_type = other DNA
tggtgacgaacatcagcccgtcaccaccgctgacattctgaccccccgacgccgggaggattacggtgaggacct

SEQ ID NO: 600204 - DNA, 75 bp, synthetic construct
  source 1..75: mol_type = other DNA
acaacgtgattttacgccgttcatatgaacggcaggggatcccctgcccgtggcgttacaccaatgatcgcgatg

SEQ ID NO: 600205 - DNA, 75 bp, synthetic construct
  source 1..75: mol_type = other DNA
ccacacaaggagaatgctggcagcgctcaggaccacgccagcgatagtgaaactggcgagacggcagatccctta

SEQ ID NO: 600206 - DNA, 75 bp, synthetic construct
  source 1..75: mol_type = other DNA
actgtcctgactgtggcgcggtaatgggcgacgcaacataccaggaaacattcgatgaaaaaaatcaggctgaag

SEQ ID NO: 600207 - DNA, 75 bp, synthetic construct
  source 1..75: mol_type = other DNA
gggaaacgtagtggacaaagtcattgaaggggcttacgaggtagtgggcgtgtttgaccggatagaggagaagcg

SEQ ID NO: 600208 - DNA, 75 bp, synthetic construct
  source 1..75: mol_type = other DNA
cgttcgcggaggcggatttatacgggcaggagtgctacgcggggctggacttatcatcaaccagcgatatttttt

SEQ ID NO: 600209 - DNA, 75 bp, synthetic construct
  source 1..75: mol_type = other DNA
ggcacattccaggcagagcatgaggattttgaattcgatatgagcgatagccataagcagcgacttgccgaattt

SEQ ID NO: 600210 - DNA, 75 bp, synthetic construct
  source 1..75: mol_type = other DNA
cctccagctaccagatgctgccaggttacttcaggttcatctgccagaacggctgcgtctgtggtcagtctctgg

SEQ ID NO: 600211 - DNA, 75 bp, synthetic construct
  source 1..75: mol_type = other DNA
tggtgacgaacatcagccggtcaccaccgctgacattctgaccccccgacgcggggaggattacggtgaggacct

SEQ ID NO: 600212 - DNA, 75 bp, synthetic construct
  source 1..75: mol_type = other DNA
tggtgacgaacatcagcccgtcaccaccgctgacattctgaccccgcgacgcggggaggattacggtgaggacct

SEQ ID NO: 600213 - DNA, 75 bp, synthetic construct
  source 1..75: mol_type = other DNA
ggcctggtctgcggtcagtcgctgggagaagtgcgtgttccgcaccggggaaatgtggtggacagagtcattgaa

SEQ ID NO: 600214 - DNA, 75 bp, synthetic construct
  source 1..75: mol_type = other DNA
gggaaacgtggtggacagggtcatagaaggtgcttacgaagtggtgggcgtgtttgacctgattgaggaaaagcg

SEQ ID NO: 600215 - DNA, 75 bp, synthetic construct
  source 1..75: mol_type = other DNA
ccacacccgtgccattcacagcatcgacaccgatattaagctcaaccgcgcattgtgggtgatggcggaaaccct

SEQ ID NO: 600216 - DNA, 75 bp, synthetic construct
  source 1..75: mol_type = other DNA
acccgggccattcacagcattgataccgacattaagctcaatcgcgcattgtgggtgatggcagaaacgatgctg

SEQ ID NO: 600217 - DNA, 75 bp, synthetic construct
  source 1..75: mol_type = other DNA
ggtgcttacgaggtggtaggcgtttttgaccggattgaggaaaagcgtgatgccatgcagtcgctggttctgccg

SEQ ID NO: 600218 - DNA, 75 bp, synthetic construct
  source 1..75: mol_type = other DNA
atggtgatacgcaaaaagaagtgcagggactgtggaaaccagatgctgccgggttacttcaggttcgtctgccag

SEQ ID NO: 600219 - DNA, 75 bp, synthetic construct
  source 1..75: mol_type = other DNA
agaaaagctggagtacaagaccagcagcgcccgtaaattacagactggtgcagtcaaccagcaccatattctggc

SEQ ID NO: 600220 - DNA, 75 bp, synthetic construct
  source 1..75: mol_type = other DNA
tatgaaaaagcccgcgatggtcgtgcgctgccgctgttagtcttcgttcccagcaaattaaaactgcgcggtaca

SEQ ID NO: 600221 - DNA, 75 bp, synthetic construct
  source 1..75: mol_type = other DNA
ccacacccgtaccattcacagcatcgacaccgacattaagctcaatcgcgcattgtgggtgatggcagaaacgct

SEQ ID NO: 600222 - DNA, 75 bp, synthetic construct
  source 1..75: mol_type = other DNA
aaatcatataaaatgtaaaataaaaaagattaatgaagaaaggttttcatacgttcctcctggtggaggatggaa

SEQ ID NO: 600223 - DNA, 75 bp, synthetic construct
  source 1..75: mol_type = other DNA
cgatgatgcaatggtgggctgattttgtaaaagcagcagatagcggcagtatcgttaatagtggggttaggggaa

SEQ ID NO: 600224 - DNA, 75 bp, synthetic construct
  source 1..75: mol_type = other DNA
gtgcggtcaatctcgttcgccgtgatcgtccattaacccgagatgaactagcgcactatgtcccgagtgtgttca

SEQ ID NO: 600225 - DNA, 75 bp, synthetic construct
  source 1..75: mol_type = other DNA
gcacaggcggcactgacttaccgttatggtgacgaacatcagcccgtcaccaccgccgacattctgacgccacga

SEQ ID NO: 600226 - DNA, 75 bp, synthetic construct
  source 1..75: mol_type = other DNA
tctgccagaacgggtgcgtctgtggccagtctctgggggaagtgcgtgttccacaccggggaaatgtagtggaga

SEQ ID NO: 600227 - DNA, 75 bp, synthetic construct
  source 1..75: mol_type = other DNA
ggtacctccagctaccagatgctgccgggttacttcaggttcgtctgccagaacggctgcgtctgtggtcagtct

SEQ ID NO: 600228 - DNA, 75 bp, synthetic construct
  source 1..75: mol_type = other DNA
ccatacccgtgccattcacagcatcgacactgacattaagctcaatcgcgcgttgtgggtgatggcagaaacgct

SEQ ID NO: 600229 - DNA, 75 bp, synthetic construct
  source 1..75: mol_type = other DNA
acccagactgaaggcattcttgagcggctgagactggcgggaatgccggaggccgatattcgccgcctgattacc

SEQ ID NO: 600230 - DNA, 75 bp, synthetic construct
  source 1..75: mol_type = other DNA
gtatccatacccgtgccattcacagcattgacactgacattaagctcaaccgtgcattgtgggtgatggcagaaa

SEQ ID NO: 600231 - DNA, 75 bp, synthetic construct
  source 1..75: mol_type = other DNA
ggccatcggggatacacaaaacacatgctgcgtctgcggcgggccggagagataaacggagaacatgtccctgaa

SEQ ID NO: 600232 - DNA, 75 bp, synthetic construct
  source 1..75: mol_type = other DNA
ccacacccgtgccattcacagcatcgacaccggcattaagctcaatcgcgcattgtgggtgatggcagaaacgct

SEQ ID NO: 600233 - DNA, 75 bp, synthetic construct
  source 1..75: mol_type = other DNA
tgtttgaccggatagaggagaagcgtgatgccatgcagtcgctggtcctgtcgccaccggcacgccaggcgctgg

SEQ ID NO: 600234 - DNA, 75 bp, synthetic construct
  source 1..75: mol_type = other DNA
cagtcgctggtcctgccgccaccggcacgccaggcgctggcacaggcggcactgacttaccgttatggtgacgaa

SEQ ID NO: 600235 - DNA, 75 bp, synthetic construct
  source 1..75: mol_type = other DNA
ctgccagacccgtgtgcgcgacccgggccgccggggatacaccaaacacatgctgcgtctgcggcgggccggaga

SEQ ID NO: 600236 - DNA, 75 bp, synthetic construct
  source 1..75: mol_type = other DNA
accatcctcgaaagcctgcagcgggaaggctttgagccgttctttgcctgccagacaaaagttcgcgaccagagc

SEQ ID NO: 600237 - DNA, 75 bp, synthetic construct
  source 1..75: mol_type = other DNA
ccacacccgtgccattcacagcatcgacaccgatattaagctcaaccgcgcattatgggtgatggcagaaacgct

SEQ ID NO: 600238 - DNA, 75 bp, synthetic construct
  source 1..75: mol_type = other DNA
gaatatgctgaaaggcgggatttccggtcgcagtgcaaaaggaaaacgtatccatacccgggccattcacagcat

SEQ ID NO: 600239 - DNA, 75 bp, synthetic construct
  source 1..75: mol_type = other DNA
gaaggggcttacgaggtggtgggcgtgtttgaccggatagaggagatgcgtgatgccatgcagtcgctgattctg

SEQ ID NO: 600240 - DNA, 75 bp, synthetic construct
  source 1..75: mol_type = other DNA
gtacctccagctaccagatgctgccgggttacttcaggttcgtctgccagaacggctgcgtctgtggtcagtctc

SEQ ID NO: 600241 - DNA, 75 bp, synthetic construct
  source 1..75: mol_type = other DNA
atgggcagcgctgcacgtttcccgctggggtatacctacatcccgacaattacccttctcgataacttgcaacgc

SEQ ID NO: 600242 - DNA, 75 bp, synthetic construct
  source 1..75: mol_type = other DNA
ccagacccgtgtgcgcgacccgggccgccggggatacacaaaacacatgctacgtctgcggcgggccggagagat

SEQ ID NO: 600243 - DNA, 75 bp, synthetic construct
  source 1..75: mol_type = other DNA
aaatgtggtggagaaagttatggaaggggcttacgaggtggtgggtgtgtttgaccggatagaggataagcgtga

SEQ ID NO: 600244 - DNA, 75 bp, synthetic construct
  source 1..75: mol_type = other DNA
aaatgtggtggagaaagttatcgaaggggcttacgaggtggtgggtgtgtttgaccggattgaggacaagcgtga

SEQ ID NO: 600245 - DNA, 75 bp, synthetic construct
  source 1..75: mol_type = other DNA
atgcgactagccagtcgttttggttatgcaaaccagatacgccgtgaccgtccgctgacacacgaagaactgatg

SEQ ID NO: 600246 - DNA, 75 bp, synthetic construct
  source 1..75: mol_type = other DNA
gtcgcagtgcaaaaggaaaacgtatccatacccgggccattcacagcattgataccgacattaagctcaaccgtg

SEQ ID NO: 600247 - DNA, 75 bp, synthetic construct
  source 1..75: mol_type = other DNA
acttctcaccattacccgccctgccgaagcctctgaagcgagatgggatgagatcgattttgatgccaacgaatg

SEQ ID NO: 600248 - DNA, 75 bp, synthetic construct
  source 1..75: mol_type = other DNA
acctaaagatgccgattaccagctttatgatggtgacgggcttactctgttaatcaagtccagtggcagtaagct

SEQ ID NO: 600249 - DNA, 75 bp, synthetic construct
  source 1..75: mol_type = other DNA
agctaccagatgctgccggggtacttcaggttcgtctgccagaacggctgcgtctgtggtcagtctctgggggaa

SEQ ID NO: 600250 - DNA, 75 bp, synthetic construct
  source 1..75: mol_type = other DNA
cgaaaaagaagtggtcaagctgtggcaccgctatcaatccatccgttctggtcaggtaaaaacctcctgttcctg

SEQ ID NO: 600251 - DNA, 75 bp, synthetic construct
  source 1..75: mol_type = other DNA
aaatgtggtggagaaagttattgaaggggcttacgaggtggtgggtgtgtttgaccggatcgaggaaaagcgtga

SEQ ID NO: 600252 - DNA, 75 bp, synthetic construct
  source 1..75: mol_type = other DNA
gggttacttccggttcgtctgccagaacgggggcgtctgcggtcagtctctgggggaagtgcgtgttccacaccg

SEQ ID NO: 600253 - DNA, 75 bp, synthetic construct
  source 1..75: mol_type = other DNA
gtacccgtctgctttaccgtcccggagaactcagtctgtgcagactgagtacaggcaatggcatttggccatccg

SEQ ID NO: 600254 - DNA, 75 bp, synthetic construct
  source 1..75: mol_type = other DNA
caggtcgtccccagcgtattcggggaagacaaacacacctccagaagcgaaaactacgcgtacatccccaccatc

SEQ ID NO: 600255 - DNA, 75 bp, synthetic construct
  source 1..75: mol_type = other DNA
gtcgcatactcgtgccgttcgcggtattgacggggacgtgaaacttaaccgggcactgtgggtgatggcggaagc

SEQ ID NO: 600256 - DNA, 75 bp, synthetic construct
  source 1..75: mol_type = other DNA
gtcacatacccgtgccgttcgcggtatcgacggggacgtgaaacttaaccgggcactgtgggtgatggaggaagc

SEQ ID NO: 600257 - DNA, 75 bp, synthetic construct
  source 1..75: mol_type = other DNA
tccctgctcgacagcctgcagcgggaaggcttccagccgttctttgcctgtcaaacccgtgtgcgtgacccggcg

SEQ ID NO: 600258 - DNA, 75 bp, synthetic construct
  source 1..75: mol_type = other DNA
caccggtaaacaggtccccgaaatcatcctgcttaacagccacgacggctccagctcataccagatgctgccggg

SEQ ID NO: 600259 - DNA, 75 bp, synthetic construct
  source 1..75: mol_type = other DNA
tgcccatacccgagccgttaaaggtatcgacggcgatgttaagctcaatcgtgccctgtgggtaatggcagaaag

SEQ ID NO: 600260 - DNA, 75 bp, synthetic construct
  source 1..75: mol_type = other DNA
gcaatcggacccgtgccgttaccggtattgatggcgatgtgaagctcaatcacgccctgtgggtgatggcagaaa

SEQ ID NO: 600261 - DNA, 75 bp, synthetic construct
  source 1..75: mol_type = other DNA
tgcaatgcagtcactggtgttgccagcaccagcccgtcacgcactggcgaatgccgcgctgaaatatcgctttgg

SEQ ID NO: 600262 - DNA, 75 bp, synthetic construct
  source 1..75: mol_type = other DNA
catcaagctaccagatgttgccggggctatttcgaggcgtctgtaccaacggtctggtctgcggacagtcatttg

SEQ ID NO: 600263 - DNA, 75 bp, synthetic construct
  source 1..75: mol_type = other DNA
ttggtgatattcgcgtacatcataaaggcgacattgttgggcaggttattgaaggtgcttatgaagtattgggga

SEQ ID NO: 600264 - DNA, 75 bp, synthetic construct
  source 1..75: mol_type = other DNA
tcaaacccgtgcggtcaaaggtatcgatggagacgtaaagcttaatcgcgctctatgggtgatggctgaaaatat

SEQ ID NO: 600265 - DNA, 75 bp, synthetic construct
  source 1..75: mol_type = other DNA
gcgctgcaaaccttatccgtcgtgatcgtccgttaacccgtgaagagctgtttcgcgtggtgcccagcgtcttca

SEQ ID NO: 600266 - DNA, 75 bp, synthetic construct
  source 1..75: mol_type = other DNA
gctggcaggatgaatccggcgatctgtggacgacctaccagcgtattcaggagaacctgatcaaaggtggtttaa

SEQ ID NO: 600267 - DNA, 75 bp, synthetic construct
  source 1..75: mol_type = other DNA
gttataataaaggtgaacgtctgcggctggaggataaaggtacagagaaagttcagtggattgaaaagatgaagg

SEQ ID NO: 600268 - DNA, 75 bp, synthetic construct
  source 1..75: mol_type = other DNA
aaaggaaagagaatttactgcattgcaggcagataaagaatccgtcagagaacagactgatcaggaaataagaaa

SEQ ID NO: 600269 - DNA, 75 bp, synthetic construct
  source 1..75: mol_type = other DNA
cggtccggcagacttggacattaaacaagatgtcggtgggacaggagcagaaaagggaacagtcgctggagaaaa

SEQ ID NO: 600270 - DNA, 75 bp, synthetic construct
  source 1..75: mol_type = other DNA
tcggtaaaggggatactatgccggtggctgataatagtactaaaactggacgagcgcagaatcgccgggtggaaa

SEQ ID NO: 600271 - DNA, 75 bp, synthetic construct
  source 1..75: mol_type = other DNA
gctgaattcccctccaaccaggtgttgtcggaaaaacgggcgacggaagtggcttcgctgctgactttcggtggt

SEQ ID NO: 600272 - DNA, 75 bp, synthetic construct
  source 1..75: mol_type = other DNA
aatgtaataaaactcagtcagttatcaattcgttacttacccaatatcagctcaatctcattaatagagacaaaa

SEQ ID NO: 600273 - DNA, 75 bp, synthetic construct
  source 1..75: mol_type = other DNA
tctgacggcagaacaacgcaaaattgcgccaggcctgtacaaggttttaagttcgattgccgacaaattgcaggc

SEQ ID NO: 600274 - DNA, 75 bp, synthetic construct
  source 1..75: mol_type = other DNA
cgatgcagttcgaccgcccggaagatctggctcgttatccacggaccttgcaggaagactgcgaaaagttaaaca

SEQ ID NO: 600275 - DNA, 75 bp, synthetic construct
  source 1..75: mol_type = other DNA
gtggtggttagcattttcgttaacccaatgcagttcgaccgcccggaagatctggcgcgctacccgcgcaccttg

SEQ ID NO: 600276 - DNA, 75 bp, synthetic construct
  source 1..75: mol_type = other DNA
agagcatgcacaggcagcagatactaaaaatcaaacaaatgtgaaggagtcctcagagccacacgaatcacctga

SEQ ID NO: 600277 - DNA, 75 bp, synthetic construct
  source 1..75: mol_type = other DNA
cagtactcgcttttgagcatataaaagcgcgtcagaaaatcattaatagtagtcagcaggagaatactatggcaa

SEQ ID NO: 600278 - DNA, 75 bp, synthetic construct
  source 1..75: mol_type = other DNA
acaaaatcagatattaccttatcaacgtcaggcattgtgggacattcggcagctctatcagtcaacccggagttt

SEQ ID NO: 600279 - DNA, 75 bp, synthetic construct
  source 1..75: mol_type = other DNA
taaacggatgcttgaacaggcaaggacgctggaaggcgtcgaagttcgctctctttatcaactctatcctgactt

SEQ ID NO: 600280 - DNA, 75 bp, synthetic construct
  source 1..75: mol_type = other DNA
aaagaggtcattacgccagagaatctggctaatgtttatcgcatccgtggacgaatagagcattgttctcatggc

SEQ ID NO: 600281 - DNA, 75 bp, synthetic construct
  source 1..75: mol_type = other DNA
aggggaactatctgaccgctaacgacgtatccaaaatacgcgttggcatgacgcaacaacaagttgcgtacgcat

SEQ ID NO: 600282 - DNA, 75 bp, synthetic construct
  source 1..75: mol_type = other DNA
acatctcgacaagcccattccggtacgtcgcgcgctggcactggcgcatcacctggcgaatcgcaccatctggat

SEQ ID NO: 600283 - DNA, 75 bp, synthetic construct
  source 1..75: mol_type = other DNA
ggcgcactggaacgtatgcgccaccctgaaaaaacagaaagcagtatgccagcaatgtctgaccagcctgtaaat

SEQ ID NO: 600284 - DNA, 75 bp, synthetic construct
  source 1..75: mol_type = other DNA
ccgtggtggtcagtggcctgttcctcattgactctgaagccaatattacgggcgcactggaacgtatgcgccacc

SEQ ID NO: 600285 - DNA, 75 bp, synthetic construct
  source 1..75: mol_type = other DNA
cgacccaacccaggttcagaatctgggattaaaaacgcaaaaagtcacgcgaggaatgctgaattattctcagac

SEQ ID NO: 600286 - DNA, 75 bp, synthetic construct
  source 1..75: mol_type = other DNA
gttgatcttctcttatatttcattttcttcgggtctgttatggtactttctgattgttattcatgggctaacgag

SEQ ID NO: 600287 - DNA, 75 bp, synthetic construct
  source 1..75: mol_type = other DNA
tggcggcgctggcggcagaggggatgccctccggtgagcaggcactcgcatccgtcatcgaacaggcccagcgct

SEQ ID NO: 600288 - DNA, 75 bp, synthetic construct
  source 1..75: mol_type = other DNA
acggctgggcttacggtcacggcggcacggcgctgcatggcaaacatttgctgtgggcggtgacgaccggcggcg

SEQ ID NO: 600289 - DNA, 75 bp, synthetic construct
  source 1..75: mol_type = other DNA
gccaccagcggcaaagtgttcctgccacaagaaaaagcgttgtcagcgggtaacttcaacaacttcgatgaagta

SEQ ID NO: 600290 - DNA, 75 bp, synthetic construct
  source 1..75: mol_type = other DNA
tatcgtttggtcgtatggaccagtatctctatccatactatcgccgtgacgttgaactgaaccagacactggatc

SEQ ID NO: 600291 - DNA, 75 bp, synthetic construct
  source 1..75: mol_type = other DNA
ttgtggctgtaggacttgatgagcaaggagaaagaaactttacctttatggtacgcccaagtgccgatctttttt

SEQ ID NO: 600292 - DNA, 75 bp, synthetic construct
  source 1..75: mol_type = other DNA
aacgggcagtaattctggtagccgcctggcttggcgatgctcgcctgatcgacaacaaaatggtcgagctggcgt

SEQ ID NO: 600293 - DNA, 75 bp, synthetic construct
  source 1..75: mol_type = other DNA
ttcagtccatgaacgcacaggaatatgaagatatccgtgctgcgggaagcgatatgcgccgtaatctcactcacg

SEQ ID NO: 600294 - DNA, 75 bp, synthetic construct
  source 1..75: mol_type = other DNA
tacaggccatgaacgcacaggaatatgaagatatccgtgctgcgggaagcgatatgcgccgtaatctcactcacg

SEQ ID NO: 600295 - DNA, 75 bp, synthetic construct
  source 1..75: mol_type = other DNA
tctggctttccgtttgcccatccggcaaatcgcttctggaaggtgatttatcaggccggatttaccgaccgtcag

SEQ ID NO: 600296 - DNA, 75 bp, synthetic construct
  source 1..75: mol_type = other DNA
tgtggcaggcgtggctgaaccagcagacgtggcttgggcaggggcggcatattgtactgccggaaggatcgaata

SEQ ID NO: 600297 - DNA, 75 bp, synthetic construct
  source 1..75: mol_type = other DNA
caggcggcgggaagtgtagcgaccgatacattacctggcgatgaaccaatcgatatttgtcaggtgaaaaaaggg

SEQ ID NO: 600298 - DNA, 75 bp, synthetic construct
  source 1..75: mol_type = other DNA
tgcagaccatgaacgcacaggaatatgaagatatccgtgctgcgggaagcgatatgcgccgtaatctcactcacg

SEQ ID NO: 600299 - DNA, 75 bp, synthetic construct
  source 1..75: mol_type = other DNA
agcagcagcgaggaaaccggtgattatgattttgaacaactccagtcactggccgaccgtcgactttatctcgct

SEQ ID NO: 600300 - DNA, 75 bp, synthetic construct
  source 1..75: mol_type = other DNA
caacgatacgcatcagtgcctcgctgggggtaagtagcagcgaggaaaccggtgattatgattttgaacaactcc

SEQ ID NO: 600301 - DNA, 75 bp, synthetic construct
  source 1..75: mol_type = other DNA
ggaagaatctcgatccagaactgttgaaactggtggcaaaacacgatcccggcaataaatttgccatgccatata

SEQ ID NO: 600302 - DNA, 75 bp, synthetic construct
  source 1..75: mol_type = other DNA
agatttgggtgttgccgaatcccagcggtttaaaccgcatttcactggagaaactggtggaggcttatcgggagt

SEQ ID NO: 600303 - DNA, 75 bp, synthetic construct
  source 1..75: mol_type = other DNA
gcctgcccacgaacgttttcacctggcgttatgttcaccgggtgatgtctctcaggtctgggtgctggttctggt

SEQ ID NO: 600304 - DNA, 75 bp, synthetic construct
  source 1..75: mol_type = other DNA
tccagccagcggtcgcccgttttctgttatcagcaccctgcctgcatattcgccggagattatttctcacacact

SEQ ID NO: 600305 - DNA, 75 bp, synthetic construct
  source 1..75: mol_type = other DNA
gacagaccagctctgggcgatgtggcgaccggggccgcgctgggcgcagtggctacgctgcttacgacgtgtacc

SEQ ID NO: 600306 - DNA, 75 bp, synthetic construct
  source 1..75: mol_type = other DNA
cgcattacataagaaacccatccttgaacggataaaaaatgagtttgctgatgccccatttgatgttgtaaaaga

SEQ ID NO: 600307 - DNA, 75 bp, synthetic construct
  source 1..75: mol_type = other DNA
tggtgttggaattccggctcattcatgcattgacgcgccaccggaagagcgccctggcttcgctgtctgtcgtga

SEQ ID NO: 600308 - DNA, 75 bp, synthetic construct
  source 1..75: mol_type = other DNA
gtgcttgattttatagatgcgcttaatgcgactgacctcagcactgcgccggatatcaactggccggaaatgcct

SEQ ID NO: 600309 - DNA, 75 bp, synthetic construct
  source 1..75: mol_type = other DNA
gattaacggtgatgaagccaccgtaaacaataacggcagcaccaccgttgacggcaaggattccacgggcaccga

SEQ ID NO: 600310 - DNA, 75 bp, synthetic construct
  source 1..75: mol_type = other DNA
ggcaaaaccaccgttgacggcaaggattccaccggtacggaaatcaacggtaataacggaaaagttattcaggac

SEQ ID NO: 600311 - DNA, 75 bp, synthetic construct
  source 1..75: mol_type = other DNA
cttatcagtaacagaaatctggaaacaggatctcctaaatgtatagggcttataccaaccactaagggatttgtc

SEQ ID NO: 600312 - DNA, 75 bp, synthetic construct
  source 1..75: mol_type = other DNA
cgaccggggccacgctgggcacagtggctgcgcggtctgcgacgtgtaccgcagcgcagccgggaactcaccggc

SEQ ID NO: 600313 - DNA, 75 bp, synthetic construct
  source 1..75: mol_type = other DNA
ccgcaaaggccgggggaaacgatggctggatgcggctttcgccgcaggaaacggcgctgccggaacaccatccgc

SEQ ID NO: 600314 - DNA, 75 bp, synthetic construct
  source 1..75: mol_type = other DNA
ctggcgcaggcgcagcaggggcaaggctggttctggcagcagaacagcgaggggcggtatgtggatgcgctgcgg

SEQ ID NO: 600315 - DNA, 75 bp, synthetic construct
  source 1..75: mol_type = other DNA
gaaaatacaaccactatcgcccctttatctccatacgataaatgggatggtgagaaatgggtgacggataccgag

SEQ ID NO: 600316 - DNA, 75 bp, synthetic construct
  source 1..75: mol_type = other DNA
caacaccatacgataaatgggatggtgaaaaatgggtgacagatactgaggcacaacatagtgccgcagtagaag

SEQ ID NO: 600317 - DNA, 75 bp, synthetic construct
  source 1..75: mol_type = other DNA
aggaaatcgctggtgctatctggtggtcgtcatggatccttttgcccgcaaggttatcggctggggtctgtcagc

SEQ ID NO: 600318 - DNA, 75 bp, synthetic construct
  source 1..75: mol_type = other DNA
ctacaagtttcgcaaaatgttgcgtaaaagccagcagggctatctgttgattaccgaccgttacccacaggtcga

SEQ ID NO: 600319 - DNA, 75 bp, synthetic construct
  source 1..75: mol_type = other DNA
acgttcaatggcgcaaagatactggaactggacgggcgacaacctgctgatgaaatcctgcaagcctcattacgc

SEQ ID NO: 600320 - DNA, 75 bp, synthetic construct
  source 1..75: mol_type = other DNA
aaagccagcaaggctttctgctcatcaccgaccgctacccgcaggttgaagtgccgggttttcgctttgatggcc

SEQ ID NO: 600321 - DNA, 75 bp, synthetic construct
  source 1..75: mol_type = other DNA
gccgtcatgagcagttggttgtcgaattgggtttagaggaaactgcggcaagaagacttctcgatgtttgctatg

SEQ ID NO: 600322 - DNA, 75 bp, synthetic construct
  source 1..75: mol_type = other DNA
ttatttgcgaggcaaagcggcacatgtgcatgaaaagccttcaacgccgcccggtaatattaccgcgctggttat

SEQ ID NO: 600323 - DNA, 75 bp, synthetic construct
  source 1..75: mol_type = other DNA
gatcatcaactggcggcgttacaggaaaaaatcgccgttacgccacaactgacgttcaatggcgcaaagatactg

SEQ ID NO: 600324 - DNA, 75 bp, synthetic construct
  source 1..75: mol_type = other DNA
accgcagccagcgattgatggaactgaaagggattggtcccacaacggcctgtgcgctggtcgccagtatcggta

SEQ ID NO: 600325 - DNA, 75 bp, synthetic construct
  source 1..75: mol_type = other DNA
tatggaaagtaaaacttaacagcccgattcaaaaactggtcttaatggctctggctgaaaaggcagataaccgcc

SEQ ID NO: 600326 - DNA, 75 bp, synthetic construct
  source 1..75: mol_type = other DNA
gattcaaaaacttgtcttaatggctctggctgaaaaggcagataacaaaggacgggtacatgatgcatcacgcaa

SEQ ID NO: 600327 - DNA, 75 bp, synthetic construct
  source 1..75: mol_type = other DNA
acgttcaatggcgcaaagatccttgaactggatgggcggcaacccgccgatgaagtcctgcaagtgtcactacgc

SEQ ID NO: 600328 - DNA, 75 bp, synthetic construct
  source 1..75: mol_type = other DNA
cgctttgcaggtaggtaaagggattattccgccgccgctacgtgaatatggtgcatcggaggtgcgttcggttac

SEQ ID NO: 600329 - DNA, 75 bp, synthetic construct
  source 1..75: mol_type = other DNA
cgctgttccgctatacgttggcgattatgctattggcgataggcggggcgtggttgtttattcgtatccagaacc

SEQ ID NO: 600330 - DNA, 75 bp, synthetic construct
  source 1..75: mol_type = other DNA
atggcgaatcatttcgcggatccatgtgatgacctcacagcacgtttttttgataatgcggttcagtcagcggag

SEQ ID NO: 600331 - DNA, 75 bp, synthetic construct
  source 1..75: mol_type = other DNA
ggtaaacagttcgtcgatgatctggtcgaaaaaggcttactggatagcattactcgcgttgccgtggacgtttat

SEQ ID NO: 600332 - DNA, 75 bp, synthetic construct
  source 1..75: mol_type = other DNA
ccggttttattcgcgacgtagaagagcgcgaacgtctgctgctggcgcagggacggcatgaagtggatttcccgc

SEQ ID NO: 600333 - DNA, 75 bp, synthetic construct
  source 1..75: mol_type = other DNA
tcagaaagaagatgccacgcgtttatgtatcgatacctgcattgcgcggaactggcgtttgtcgatgcaaacgca

SEQ ID NO: 600334 - DNA, 75 bp, synthetic construct
  source 1..75: mol_type = other DNA
ctggcctggtgatgtggatgccggaaacattgacggcagcatccatcgctgggcaaaaaatgaagttatcgacaa

SEQ ID NO: 600335 - DNA, 75 bp, synthetic construct
  source 1..75: mol_type = other DNA
tgacgaacatcagccagtcaccaccgctgacattctgacaccacgacgcagggagggttacggtcaggacctgtg

SEQ ID NO: 600336 - DNA, 75 bp, synthetic construct
  source 1..75: mol_type = other DNA
acgctgttggtccagggcgctcgttcagttctgattggcgccgagaaaaagacagactcattcagtctgttgggt

SEQ ID NO: 600337 - DNA, 75 bp, synthetic construct
  source 1..75: mol_type = other DNA
caatataaagagatcatgaaacttgatccttttaaccttgagaaacgctataacaaagctaaaagcgagcgacag

SEQ ID NO: 600338 - DNA, 75 bp, synthetic construct
  source 1..75: mol_type = other DNA
cggaatttattgatgatctggcaactaaagggctgcataccctgtttgatgtggttacccgccgtcatgagcagt

SEQ ID NO: 600339 - DNA, 75 bp, synthetic construct
  source 1..75: mol_type = other DNA
aactcaggctacctcaaacccggtataccccgccctgccctcgattcctgggatgctgaatatatgcaggaaaac

SEQ ID NO: 600340 - DNA, 75 bp, synthetic construct
  source 1..75: mol_type = other DNA
tttttggccttgtccgtgaacgtccgatcgacattcataaagatcccgtggcgctgaacaaatacatcactgaat

SEQ ID NO: 600341 - DNA, 75 bp, synthetic construct
  source 1..75: mol_type = other DNA
gaaaatcaaagcttggcagaataacgaaagcgggcgattcatatctgcgaacgcttctggttcagggggcccgtt

SEQ ID NO: 600342 - DNA, 75 bp, synthetic construct
  source 1..75: mol_type = other DNA
gaacatttgaaacgccagcaacaggacgcgatcgacgatgcgacgcatgacgccaaccagcgtgctgataatgcc

SEQ ID NO: 600343 - DNA, 75 bp, synthetic construct
  source 1..75: mol_type = other DNA
ggctgcggcggcgccatgaaagtcatcgcctgcattgaagaccctatagtgatcaagcagatccttgatcacctg

SEQ ID NO: 600344 - DNA, 75 bp, synthetic construct
  source 1..75: mol_type = other DNA
taccgggacggcaccacgcacgtcattttcgaaccattggatttcattgcaaggctggccgccctggtaccgaag

SEQ ID NO: 600345 - DNA, 75 bp, synthetic construct
  source 1..75: mol_type = other DNA
ggccgatgaacgcaagaagctcgaacggctgtgccggtacatcagccgcccggcggtatccgagaagcggctgtc

SEQ ID NO: 600346 - DNA, 75 bp, synthetic construct
  source 1..75: mol_type = other DNA
tgacacccctgctggggcactcgatcacttaccgtatcgctgtcggttcacaggcggggcgaaaggtgttcactt

SEQ ID NO: 600347 - DNA, 75 bp, synthetic construct
  source 1..75: mol_type = other DNA
agagctcacccagctgacgcacaccatcgcccaccgggtgggtcgctatctggaacggcaaggcctgctggaacg

SEQ ID NO: 600348 - DNA, 75 bp, synthetic construct
  source 1..75: mol_type = other DNA
gtagccgggtccagcctgcacgccggcgtggcggccagggccgatgaacgcaagaagctcgaacggctgtgccgg

SEQ ID NO: 600349 - DNA, 75 bp, synthetic construct
  source 1..75: mol_type = other DNA
aagagccgttaatgtcgttaaaagatttggcgatggacgctttctaccaccctgaacgcggcgggcagctctctg

SEQ ID NO: 600350 - DNA, 75 bp, synthetic construct
  source 1..75: mol_type = other DNA
tggatgaggaatttttggggcgtttgagtggagaagagcaggagctgtttatgcagctggtgcgcaagatgatga

SEQ ID NO: 600351 - DNA, 75 bp, synthetic construct
  source 1..75: mol_type = other DNA
taagcctggtatcgaacaggtggcactgatagaagcagcagtcagcaccaaagcaacgctggcagaaatgttgac

SEQ ID NO: 600352 - DNA, 75 bp, synthetic construct
  source 1..75: mol_type = other DNA
tggaacggcaaggcctgctggaacgggatgtcgaaaacagctatctggcctcggatgcggtggatgacgacccga

SEQ ID NO: 600353 - DNA, 75 bp, synthetic construct
  source 1..75: mol_type = other DNA
ttgaaaaactatatcaatggcgtggccaatgcttttgaagggtttaccgtcggcaattatatccagctgtcccgc

SEQ ID NO: 600354 - DNA, 75 bp, synthetic construct
  source 1..75: mol_type = other DNA
tgttaagtctactctgattcttgcattgtacagcactgatgagaaattattggtaatcaacacaaccaataaaat

SEQ ID NO: 600355 - DNA, 75 bp, synthetic construct
  source 1..75: mol_type = other DNA
aggtagtcagtgcccttcaggatattttattcaaaatggtcagtgcatgaaggaagaatatcttcaagcacaggc

SEQ ID NO: 600356 - DNA, 75 bp, synthetic construct
  source 1..75: mol_type = other DNA
ctttgaagataaatccaacgacgtgatccaggatgacgtgttccgtcgtctgtctgcctgccataacgtgctgtt

SEQ ID NO: 600357 - DNA, 75 bp, synthetic construct
  source 1..75: mol_type = other DNA
gatgaggctgaaatcgtaagagaaaaagcggagtcaagtggacagacggtttcaacatttatacgaagctcttca

SEQ ID NO: 600358 - DNA, 75 bp, synthetic construct
  source 1..75: mol_type = other DNA
ccgattcgtttggtggtaacccaccattatattcgtgcggtcttagtgcgctgtaatatccaacgatatagtccg

SEQ ID NO: 600359 - DNA, 75 bp, synthetic construct
  source 1..75: mol_type = other DNA
tattaatcccggtaaattcattatcagcggcatgcagacagataatgtggtgataatatcttcttcccggatatc

SEQ ID NO: 600360 - DNA, 75 bp, synthetic construct
  source 1..75: mol_type = other DNA
cagagcagatcccacaagtgctggcaattgctatgcgcaaagcggtgcttaaccgtggcgtttccgttgttgtgt

SEQ ID NO: 600361 - DNA, 75 bp, synthetic construct
  source 1..75: mol_type = other DNA
catctgtttgtggaaggaaaacgcacgggagataaagagtatgcagaggttctcgttgctattacagagcttgct

SEQ ID NO: 600362 - DNA, 75 bp, synthetic construct
  source 1..75: mol_type = other DNA
cgcttgatggcagttacgttcttaattatggcgaagagaagggtatcgagggggttgctaaaggctatctgcaac

SEQ ID NO: 600363 - DNA, 75 bp, synthetic construct
  source 1..75: mol_type = other DNA
taatcaaggatcacttgttaacggccaatgtattgttagtgttgataaaggcgcagttcagttaacctgcccttc

SEQ ID NO: 600364 - DNA, 75 bp, synthetic construct
  source 1..75: mol_type = other DNA
aactttttatcttcagtggacgcggccaagactgcaaactagccggtatcgacacagcatataaaaactgctgta

SEQ ID NO: 600365 - DNA, 75 bp, synthetic construct
  source 1..75: mol_type = other DNA
tgatttttcgttgcctgaaatcgcgaaattcaatattcctgacgggttggatgctgtaagagatgcgcttcggag

SEQ ID NO: 600366 - DNA, 75 bp, synthetic construct
  source 1..75: mol_type = other DNA
tttttcgctaccgtggtttgtggctggaactgttgaacgcaatgcgcaagggcgattccatcaatattgcccgtt

SEQ ID NO: 600367 - DNA, 75 bp, synthetic construct
  source 1..75: mol_type = other DNA
gaagcttcggtgttcaaaactgccggaagcgacgctaaaggcggttggtttttcacctccggttggccggtaatt

SEQ ID NO: 600368 - DNA, 75 bp, synthetic construct
  source 1..75: mol_type = other DNA
gcggtgttgacgatgaaacaggggagcctgttgagcatgttgatgctggcagagtaattctgatgcccccctcag

SEQ ID NO: 600369 - DNA, 75 bp, synthetic construct
  source 1..75: mol_type = other DNA
gctggggcgcgaggcggatatgtcggggagtgctgcggatatcgcacagcgtgtggccgagtgggaggaggaggt

SEQ ID NO: 600370 - DNA, 75 bp, synthetic construct
  source 1..75: mol_type = other DNA
tgattcttgttcagggggcgggtaatattggaaaaattgctcgttctttagctgaaatcaaactgaagccgcaaa

SEQ ID NO: 600371 - DNA, 75 bp, synthetic construct
  source 1..75: mol_type = other DNA
agtggtgctggcagcgccagaagatttggtcgactctgcgcagcggcttagcgaggtatatcagtggctggcgga

SEQ ID NO: 600372 - DNA, 75 bp, synthetic construct
  source 1..75: mol_type = other DNA
gaggttaaagcaacaggtgatttcaaaatattcgtgacggacaccggtgccagcccggcagcaggagatagcctt

SEQ ID NO: 600373 - DNA, 75 bp, synthetic construct
  source 1..75: mol_type = other DNA
agggggctgatatggcaacgaaagagcaaaatctgaaacggcttgatgaactggccctgattctggggcgtgagc

SEQ ID NO: 600374 - DNA, 75 bp, synthetic construct
  source 1..75: mol_type = other DNA
tccgggagcggacagccgttcgctgtgtcgcacaattcgtggacgtgggaaaattgatcccattctggtgcctga

SEQ ID NO: 600375 - DNA, 75 bp, synthetic construct
  source 1..75: mol_type = other DNA
ttacccgtactcgcgacctgtatgacgatttcgccaatgtactgactcaggttgataccctgttgatgctggaag

SEQ ID NO: 600376 - DNA, 75 bp, synthetic construct
  source 1..75: mol_type = other DNA
tgccgcacgattcgtggacgtgggaaaattgatcctattctggtgccagatccggcgcaagtagccgagatgtta

SEQ ID NO: 600377 - DNA, 75 bp, synthetic construct
  source 1..75: mol_type = other DNA
acctgattgccgaagcagatgagagtgatgcatcgttcctgcatctgcaaccgatggtggcgattgtcaccaata

SEQ ID NO: 600378 - DNA, 75 bp, synthetic construct
  source 1..75: mol_type = other DNA
caaccttcgttaacggcgggctggtaaaagcggcgggggttcatgcgcgtttggggcatggtcggtacctgattg

SEQ ID NO: 600379 - DNA, 75 bp, synthetic construct
  source 1..75: mol_type = other DNA
ctcatgaagcgcgtattccggtgatccgtcgtgccgaaatgctggctgagttaatgcgttttcgtcatggcatcg

SEQ ID NO: 600380 - DNA, 75 bp, synthetic construct
  source 1..75: mol_type = other DNA
ttaccgagttctatcaggaatacagcaaagcagccctatataagctgcctaaactcagcaaagggagtgttgagt

SEQ ID NO: 600381 - DNA, 75 bp, synthetic construct
  source 1..75: mol_type = other DNA
gttcaccattgaccaagagaactctattgataaaagaacctcaattgcgcctgataaatttggttacctatcact

SEQ ID NO: 600382 - DNA, 75 bp, synthetic construct
  source 1..75: mol_type = other DNA
tataatgataatttgaatcttctttcaggacaaaagcatgctatattttaccgacagtgtcaattcgttctgcta

SEQ ID NO: 600383 - DNA, 75 bp, synthetic construct
  source 1..75: mol_type = other DNA
gagaaaacaattgaagattgcataaatcgacataaaacagaggggcgttttgttagtgatctaaatagattggat

SEQ ID NO: 600384 - DNA, 75 bp, synthetic construct
  source 1..75: mol_type = other DNA
cgttatcgataactatgctaatttactgttaaatgacccccatctctcttttacctatttcccccggtctgcggt

SEQ ID NO: 600385 - DNA, 75 bp, synthetic construct
  source 1..75: mol_type = other DNA
gccgattttcgggaccaatacgtaccatctcaatcagacactcacctccctgaaaaaaggagaaaagcgttcgtt

SEQ ID NO: 600386 - DNA, 75 bp, synthetic construct
  source 1..75: mol_type = other DNA
attcgcctggcgcgcgatctcggcattcgtactattcaactggcaggttacgacgtctattacgaagatcatgac

SEQ ID NO: 600387 - DNA, 75 bp, synthetic construct
  source 1..75: mol_type = other DNA
tgacactgaaggtaaacaacaccgtcatgtcggggtggaatgatatccgggtgacgcggggcgtagagcgtctgc

SEQ ID NO: 600388 - DNA, 75 bp, synthetic construct
  source 1..75: mol_type = other DNA
ggatgagcggtgtttacgtcaccagtcacgaagggaaagagggctttactgaactgactttacgcaccctggaga

SEQ ID NO: 600389 - DNA, 75 bp, synthetic construct
  source 1..75: mol_type = other DNA
tcacgatttttgtttgtaatcttaaaggcggtggttccaagacagtctctaccgcttcattatcacatgcttttc

SEQ ID NO: 600390 - DNA, 75 bp, synthetic construct
  source 1..75: mol_type = other DNA
gttcctcatcctcgatggggaattacatttcgttcagttccggtaccctgaatgcgatgtatgaactgttcagaa

SEQ ID NO: 600391 - DNA, 75 bp, synthetic construct
  source 1..75: mol_type = other DNA
ataaaaatcaaacaaaatttggcgggtaaaccattaggtattttcctttttgatagtgggcaaaagaaattgtat

SEQ ID NO: 600392 - DNA, 75 bp, synthetic construct
  source 1..75: mol_type = other DNA
cgtgacgatgagacggggaccacggcatcgctggtcctgatgccgccggaggcgttcagcgtgcagccgtaccgt

SEQ ID NO: 600393 - DNA, 75 bp, synthetic construct
  source 1..75: mol_type = other DNA
ggctgtttatcgtgctgatgactacgtccacgaaaaaccctggcaaggaattggtgtgggcgcggccgttgggct

SEQ ID NO: 600394 - DNA, 75 bp, synthetic construct
  source 1..75: mol_type = other DNA
gttacggtgtttccgctgagcgtgtgcgccagctggaaaagaacgcgatgaaaaaacttcgcgctgccattgaag

SEQ ID NO: 600395 - DNA, 75 bp, synthetic construct
  source 1..75: mol_type = other DNA
gttacggtgtttccgctgagcgtgtgcgtcagctggaaaagaacgcgatgaaaaaattgcgcgctgctattgaag

SEQ ID NO: 600396 - DNA, 75 bp, synthetic construct
  source 1..75: mol_type = other DNA
acgggtacgggggtcgctacaacaaaaatccggtcaccgtacagggccgggataactggctggtacgtctggacc

SEQ ID NO: 600397 - DNA, 75 bp, synthetic construct
  source 1..75: mol_type = other DNA
tgttacagcaggtgaaccaggcgctggatgtcaacacgctgggaatgcagccgttacaactggcggactttgctc

SEQ ID NO: 600398 - DNA, 75 bp, synthetic construct
  source 1..75: mol_type = other DNA
ttgaaaacggctgcctggccgtggagcaaggcttaaccacctttgaagagttaatccgcgtactggggatgccgc

SEQ ID NO: 600399 - DNA, 75 bp, synthetic construct
  source 1..75: mol_type = other DNA
tgtgtctgcgttatcagggagtcttgctggatgccagcgaagaagtggttcatgttgcggtggtcgatgccccct

SEQ ID NO: 600400 - DNA, 75 bp, synthetic construct
  source 1..75: mol_type = other DNA
agcagaaaaatccgtgggggctggcgctggactgcttctcatcgccaccgcagaagctggaggcggctaaaccat

SEQ ID NO: 600401 - DNA, 75 bp, synthetic construct
  source 1..75: mol_type = other DNA
atcaggaagaatttgaggcggttaaactggcgctgaagggcgaaatggagaggatctggggctccatgctgaaag

SEQ ID NO: 600402 - DNA, 75 bp, synthetic construct
  source 1..75: mol_type = other DNA
atcctggccgggacgcccgcagaaatggctgaaaggccgaatcaaacctcttcatcctgtggaaggcacaaacct

SEQ ID NO: 600403 - DNA, 75 bp, synthetic construct
  source 1..75: mol_type = other DNA
gctgcgcatcgcctgcgccgtgcttgcctttttccttttattcacctgtgcaggctggatgctggcacccagcaa

SEQ ID NO: 600404 - DNA, 75 bp, synthetic construct
  source 1..75: mol_type = other DNA
atgcccgggatcaccatatccggacattacgggcgggatgcggggttttactggtgctgttggttctggcattgt

SEQ ID NO: 600405 - DNA, 75 bp, synthetic construct
  source 1..75: mol_type = other DNA
aagtcgctacacgtgcaggtaagcttctgacatctttgagcgaaagtatccgccagcaaaaagaggaattgaagc

SEQ ID NO: 600406 - DNA, 75 bp, synthetic construct
  source 1..75: mol_type = other DNA
ggctaaaccagacgcaaatccatccacgtgccggtcttacctttcagggcgttttgcgcgcgttattacgccagg

SEQ ID NO: 600407 - DNA, 75 bp, synthetic construct
  source 1..75: mol_type = other DNA
agcgtaaacggcgaacaacgccagcaaggtacgactgcggacatgatccataaaatcgttccgctgatcgcttat

SEQ ID NO: 600408 - DNA, 75 bp, synthetic construct
  source 1..75: mol_type = other DNA
gagtcggtggattacgcggtcatggaatgcacggcagatgccgttgtggtgccgatggatgcgggctggagcgat

SEQ ID NO: 600409 - DNA, 75 bp, synthetic construct
  source 1..75: mol_type = other DNA
caattgcgacgaaaaacacactggtatttaatgataataaacttataacaacaattggtgttgaggatttaataa

SEQ ID NO: 600410 - DNA, 75 bp, synthetic construct
  source 1..75: mol_type = other DNA
atgtctaatcagtttggtgatacacgtatcgatgacgacctgacgctgcttagtgaaacactggaagaggtgctc

SEQ ID NO: 600411 - DNA, 75 bp, synthetic construct
  source 1..75: mol_type = other DNA
ttgattggggcgacgctacgtcaggccacggaagagcatgtgcgaaaagctattgtgggttacggcgtggcgctc

SEQ ID NO: 600412 - DNA, 75 bp, synthetic construct
  source 1..75: mol_type = other DNA
gtcggcccgttgcaaagcggtgatgagctgacagtcactttcgatgggcattctttgacaactcgcgttttgtaa

SEQ ID NO: 600413 - DNA, 75 bp, synthetic construct
  source 1..75: mol_type = other DNA
tgaatcaggacttattacaactctgggcgttgaagatttagtcatagttcaaacaaaagatgctcttcttgtagc

SEQ ID NO: 600414 - DNA, 75 bp, synthetic construct
  source 1..75: mol_type = other DNA
tcctgtcatattcaatgcttgtagtaaagcaatgaatatattaaatccagatcgtgattttattcggattaatga

SEQ ID NO: 600415 - DNA, 75 bp, synthetic construct
  source 1..75: mol_type = other DNA
cagttccttatgctaaatctggaaaacttgttacttttggcattgtacctacccatgcggaaaccggatatggat

SEQ ID NO: 600416 - DNA, 75 bp, synthetic construct
  source 1..75: mol_type = other DNA
tgaaaggtcttgaacactcgcctgtcatgttgatttgtaatgaactacatcgatttattgctgcagagcaactac

SEQ ID NO: 600417 - DNA, 75 bp, synthetic construct
  source 1..75: mol_type = other DNA
gcatttatagtgtcatcatttgttgaaaagccaaatcatgagacagccactaaatatcttgcttccggtgagtat

SEQ ID NO: 600418 - DNA, 75 bp, synthetic construct
  source 1..75: mol_type = other DNA
tgttaaggaaattgtagaaatccttaaaaaggaaggtcgatgtgaatatcattctcatagggaaattttccggcc

SEQ ID NO: 600419 - DNA, 75 bp, synthetic construct
  source 1..75: mol_type = other DNA
gtttactgatgttcctgcctctgacggcaatcagtaagcccttaattccaataatgaagacactttttacggatg

SEQ ID NO: 600420 - DNA, 75 bp, synthetic construct
  source 1..75: mol_type = other DNA
gaatataattttgtttccacacaaaaaccatttccaaatgatgagtacttcctaccgacatcttacaataaacga

SEQ ID NO: 600421 - DNA, 75 bp, synthetic construct
  source 1..75: mol_type = other DNA
cgttaaaatttgcagtggcgatgactattgccaatatgggcagggctaattggtgtctgtacgtttattgccgca

SEQ ID NO: 600422 - DNA, 75 bp, synthetic construct
  source 1..75: mol_type = other DNA
taggcctttttgcctggcagttgcattcatcgtctttgctgcattttttaactacacaacgcgcctttattatgc

SEQ ID NO: 600423 - DNA, 75 bp, synthetic construct
  source 1..75: mol_type = other DNA
ttgcgattaccagaatatcgccactctgggcagggctaattggtgtcacgtttattgccgcattgttattgacga

SEQ ID NO: 600424 - DNA, 75 bp, synthetic construct
  source 1..75: mol_type = other DNA
ctttttacggatgttaccggtactgtaccggatgctgaagagatcgcacgtaaagccgagctttttcgccaacaa

SEQ ID NO: 600425 - DNA, 75 bp, synthetic construct
  source 1..75: mol_type = other DNA
cgcgagccacggttaattatgataaccaacggccaggttgaaagcggtctggacgataaacatctcggccttctg

SEQ ID NO: 600426 - DNA, 75 bp, synthetic construct
  source 1..75: mol_type = other DNA
ttgcgattaccagaatatcgccactctgggcagggctaattggtgtctgtacgtttattgccgcattgttattga

SEQ ID NO: 600427 - DNA, 75 bp, synthetic construct
  source 1..75: mol_type = other DNA
cgtttgctaacctgaacgatatcgcgggtctggctgaagccatgctgaaatatgtcttcaaagcggttctcgaag

SEQ ID NO: 600428 - DNA, 75 bp, synthetic construct
  source 1..75: mol_type = other DNA
ataatgaagactctttttacagatgttacaggtactgtaccggatgctgaagagatcgcgcataaagccgagctt

SEQ ID NO: 600429 - DNA, 75 bp, synthetic construct
  source 1..75: mol_type = other DNA
gtttactgatactcctgcctctgacggcaaccagtaatccattgattccaataatgaagactctttttacagatg

SEQ ID NO: 600430 - DNA, 75 bp, synthetic construct
  source 1..75: mol_type = other DNA
cctcccggcagtaccacgatattaggtctttttgcctgggcagttgcattcatcttctttactgcatttttttac

SEQ ID NO: 600431 - DNA, 75 bp, synthetic construct
  source 1..75: mol_type = other DNA
cggcggtcgtcgtcaggcatctgacaccattgattacagcgtcggctttactgatatggcgcgtctgggcgacca

SEQ ID NO: 600432 - DNA, 75 bp, synthetic construct
  source 1..75: mol_type = other DNA
ggtcgaggcaggctactctgtgacacccagcgatgtaaaaaatgcaggtcgggctaagctcccccccattatctt

SEQ ID NO: 600433 - DNA, 75 bp, synthetic construct
  source 1..75: mol_type = other DNA
ttagcctggccctgatgctggctgtgcctttggcaccgcaggccgttgcgaaaacggcagccgctaccaccgctt

SEQ ID NO: 600434 - DNA, 75 bp, synthetic construct
  source 1..75: mol_type = other DNA
cgaacggctctcacgtcttgactggagcgccgcacaacgtgcttcgctggtcactgcgatgatcgaaacgggtgt

SEQ ID NO: 600435 - DNA, 75 bp, synthetic construct
  source 1..75: mol_type = other DNA
gcaacagcgcttttcgggagaaaatggcttcatcgctcaggagcgtaagcgcgttctggctcaagaaaacttgtt

SEQ ID NO: 600436 - DNA, 75 bp, synthetic construct
  source 1..75: mol_type = other DNA
tggtttgaaaaatgtcctgatggcaaagcagtcatcttttgcggtgaaggatcagaagccgccttcctgtttacc

SEQ ID NO: 600437 - DNA, 75 bp, synthetic construct
  source 1..75: mol_type = other DNA
ctgaaggtgatctagttacttctcttttgtttggcggaatcgccaaaattgtacgtcttcacccgcctggcaagg

SEQ ID NO: 600438 - DNA, 75 bp, synthetic construct
  source 1..75: mol_type = other DNA
atcgggttatggcagaagaaggacagtttccgcccgtgcaacttgatggtatcaccgcaccccatggtctacgaa

SEQ ID NO: 600439 - DNA, 75 bp, synthetic construct
  source 1..75: mol_type = other DNA
gcacaagcaaacccggagcaacagaatgcattgcgcaagaagtcctcggagttaaagaaaatcaatattcatgcc

SEQ ID NO: 600440 - DNA, 75 bp, synthetic construct
  source 1..75: mol_type = other DNA
gtaaaaaacgtgatggtcatgcgctgagtgatgaagaaattcgtttctttatcaacggcattcgcgacaacacta

SEQ ID NO: 600441 - DNA, 75 bp, synthetic construct
  source 1..75: mol_type = other DNA
cagaacactgccagcggcgcagcaggggtaaggccggacatcaaccacgcccttcaggaggtagaggatgcctgg

SEQ ID NO: 600442 - DNA, 75 bp, synthetic construct
  source 1..75: mol_type = other DNA
agtatcgcggcgactacgtgcgtagcgccggggagtttacggccttccatcgcccgcgcgtggaagcgctgctgg

SEQ ID NO: 600443 - DNA, 75 bp, synthetic construct
  source 1..75: mol_type = other DNA
ggcgtggaggttgtaccgctgttttgtggctctgacagtgacggtaagcgggataccgcatttgaggaggtgtgc

SEQ ID NO: 600444 - DNA, 75 bp, synthetic construct
  source 1..75: mol_type = other DNA
ggttgggttgaagatccagacacttacccgatggcggcaaaacgccacagcattgagtatctgcgtgaagtcgct

SEQ ID NO: 600445 - DNA, 75 bp, synthetic construct
  source 1..75: mol_type = other DNA
cattcctgacccggaatcgcctgtgcgaagtccggctgaaggacggatacagggaagttacggcaacaatggctt

SEQ ID NO: 600446 - DNA, 75 bp, synthetic construct
  source 1..75: mol_type = other DNA
cagcgcagcagttaacccataccagctatctggatgatggagtgagcagaattgtgacccacgcggcggaagtag

SEQ ID NO: 600447 - DNA, 75 bp, synthetic construct
  source 1..75: mol_type = other DNA
tctgttatatacggtagtacttatcgtatttactataacaaatcctctggttggggaacaatgcgatatgttctg

SEQ ID NO: 600448 - DNA, 75 bp, synthetic construct
  source 1..75: mol_type = other DNA
accaaagaaccgggcgcccaggcagaaccactgtatctggacgtaatgaccgcgctggcggaagcctttaataat

SEQ ID NO: 600449 - DNA, 75 bp, synthetic construct
  source 1..75: mol_type = other DNA
taccgccccttctccgctaaacatttactgcaagctctgccgggatccgtacgcagcgtggcggtactggacaga

SEQ ID NO: 600450 - DNA, 75 bp, synthetic construct
  source 1..75: mol_type = other DNA
atcaacaaaattgtccctctgaccgatgacacaattctcgaattgatgccgcagacagaaatcgatgcccatcgc

SEQ ID NO: 600451 - DNA, 75 bp, synthetic construct
  source 1..75: mol_type = other DNA
gatggtcgcaggtattatcactctcggttttatctacggtgcttacttcaccgaaacgttccgtggcgcgtttat

SEQ ID NO: 600452 - DNA, 75 bp, synthetic construct
  source 1..75: mol_type = other DNA
tctctgattttctgaaaactgtagaagcgcttcgtaatgagtatggtgaagtgcgcatggtgtttggttttgata

SEQ ID NO: 600453 - DNA, 75 bp, synthetic construct
  source 1..75: mol_type = other DNA
cttgctgcggaaaatccgcgggcaacgcaacagcagctcctgatgaatcaacccccactgaactatcaccttatc

SEQ ID NO: 600454 - DNA, 75 bp, synthetic construct
  source 1..75: mol_type = other DNA
actgttgcgaatgagcttgatgctcagaaaggcaagcttgatgctcagaaaggcgagcttgaagcgcagaagaaa

SEQ ID NO: 600455 - DNA, 75 bp, synthetic construct
  source 1..75: mol_type = other DNA
taagtgatgcgccggaagatgagcgtgagtctaatcttgctggtgcgtttatttcattactcgatacggtaatcg

SEQ ID NO: 600456 - DNA, 75 bp, synthetic construct
  source 1..75: mol_type = other DNA
atgctgctgattttctacggtttgcagattgcgctaaacacggtgacggaggcgatgggcgtcgggcagattgat

SEQ ID NO: 600457 - DNA, 75 bp, synthetic construct
  source 1..75: mol_type = other DNA
tctatggcgaccggatgttaatcgctaacgccacgggctgttcgtcaatttacggcggtaacctgccatccacac

SEQ ID NO: 600458 - DNA, 75 bp, synthetic construct
  source 1..75: mol_type = other DNA
atgattactattgacggtaatggcgcggttgcttcggtgacgtttcgcatcagtgaagttatcgccatctaccct

SEQ ID NO: 600459 - DNA, 75 bp, synthetic construct
  source 1..75: mol_type = other DNA
tcggacagtggcggtgctggatcgcaccaaggagccaggtgcgcaagcggaacccctgtacctggatgtaatgac

SEQ ID NO: 600460 - DNA, 75 bp, synthetic construct
  source 1..75: mol_type = other DNA
atcggcacctgtgaagaagtggttgatgaattgctgacccgaggcgaaaaagtgggcgtgctaaaagttcgcctg

SEQ ID NO: 600461 - DNA, 75 bp, synthetic construct
  source 1..75: mol_type = other DNA
catacctgacgcgaaattcgctctgcgaactgaggctgaaggacggagacagggaggtggctgcggtcatggctt

SEQ ID NO: 600462 - DNA, 75 bp, synthetic construct
  source 1..75: mol_type = other DNA
atgtctagtccacgtcagtatggcctcttaccgtgcaaattgcatggaggagtaatccatgacacgacggtcaaa

SEQ ID NO: 600463 - DNA, 75 bp, synthetic construct
  source 1..75: mol_type = other DNA
tctctttcgagctacccaaacagaagaaaaactcaagcgggatggcgtgaattcaaaacagcaagctaataccac

SEQ ID NO: 600464 - DNA, 75 bp, synthetic construct
  source 1..75: mol_type = other DNA
gggagacacaccacgcgtggttgaaatgcagtcggaagcgggtgctatcgctaccgtgcatggcgctttgcagac

SEQ ID NO: 600465 - DNA, 75 bp, synthetic construct
  source 1..75: mol_type = other DNA
ggaagattgcaccggctgtaacctgtgcgtcgaagtttgcccggcgaaagaccgtcagaatccagagattaaagc

SEQ ID NO: 600466 - DNA, 75 bp, synthetic construct
  source 1..75: mol_type = other DNA
ggttattttgtttacgactccaaaaaagccggtggtctgacagtttctcacctgcgcgtgagcgaacatccaatt

SEQ ID NO: 600467 - DNA, 75 bp, synthetic construct
  source 1..75: mol_type = other DNA
gcactggtggaaaaatcaatctggctgattggtggcgacggctgggcttacgatatcggctttggcggtctggat

SEQ ID NO: 600468 - DNA, 75 bp, synthetic construct
  source 1..75: mol_type = other DNA
cttctggccgctatatcgctttgatccgcgtcgtgccgatgaaggcaaactgccgctggcgctggattcacgccc

SEQ ID NO: 600469 - DNA, 75 bp, synthetic construct
  source 1..75: mol_type = other DNA
cgatatcggctttggcggtctggatcatgtattgagtttgacggaaaacgtcaacattctggtgctggatacgca

SEQ ID NO: 600470 - DNA, 75 bp, synthetic construct
  source 1..75: mol_type = other DNA
aggtgcgctttatcgacagcgacagcatccaaccgacacaagcagaactgacggcgcatccgctgccacgttcat

SEQ ID NO: 600471 - DNA, 75 bp, synthetic construct
  source 1..75: mol_type = other DNA
cgaagggatgaatcatgtgaaagtcttctcgcagctggcgcgtaaactggtgaataaaaacttccgccagtcgtt

SEQ ID NO: 600472 - DNA, 75 bp, synthetic construct
  source 1..75: mol_type = other DNA
cgcaaactggtgaataaaaacttccgccaatcgctgtttgccgccaaagatgctcaaagtattctgacactgctc

SEQ ID NO: 600473 - DNA, 75 bp, synthetic construct
  source 1..75: mol_type = other DNA
gttcttggtccggaaaaggaagatgagttctggctgcaaggcttgcctgcgcaaagccgtatgtttggcctggat

SEQ ID NO: 600474 - DNA, 75 bp, synthetic construct
  source 1..75: mol_type = other DNA
gccgcactggtcgatcctggcggcgatgcggaaaaaatcaaacaggaagttgatgacagcggcctgacactgatg

SEQ ID NO: 600475 - DNA, 75 bp, synthetic construct
  source 1..75: mol_type = other DNA
ttcatgctggtggatggcggatgcaggcgtggaagatcgcggcgtgatggcgacgtttatgcaggcactggggtt

SEQ ID NO: 600476 - DNA, 75 bp, synthetic construct
  source 1..75: mol_type = other DNA
ctttgcctaacggtcttcatgctcgcccggcgtgggaacttaaagaacagtgcagccagtggcaaagtgcagtga

SEQ ID NO: 600477 - DNA, 75 bp, synthetic construct
  source 1..75: mol_type = other DNA
gcagctggcctattcccgtgataacaagcgcattgatatcgcggcgaatattggcaccgctctggaagcgcctgg

SEQ ID NO: 600478 - DNA, 75 bp, synthetic construct
  source 1..75: mol_type = other DNA
gtcttctcgcagctggcgcgcaaactggtgaataaaaacttccgccagtcgctgtttgccgcgcaagatgcacaa

SEQ ID NO: 600479 - DNA, 75 bp, synthetic construct
  source 1..75: mol_type = other DNA
acctcggcgttaacgggcgcactgaacatccgttcgagctggaagaggatgtctggcagcgggaagagattgtca

SEQ ID NO: 600480 - DNA, 75 bp, synthetic construct
  source 1..75: mol_type = other DNA
tgcgatagcacgctatgccggacaaccggcggtgcttgatgcccagtgcggcgtgctggcgattaatcctgatga

SEQ ID NO: 600481 - DNA, 75 bp, synthetic construct
  source 1..75: mol_type = other DNA
aatatccgtcgcctgatgacagaacagcatcaggggctgggggcggcgatcatcagcaatatggagcaggtttgc

SEQ ID NO: 600482 - DNA, 75 bp, synthetic construct
  source 1..75: mol_type = other DNA
cagcgaaaatttattggtgaatcagcacgcccggtagaaacaatgaaaatgagaattgattatacgattgaagat

SEQ ID NO: 600483 - DNA, 75 bp, synthetic construct
  source 1..75: mol_type = other DNA
gggcagtgagcggtgcctatcaggccggaggacgctttactgcattctatcgccttgggggggggatgcagtgcg

SEQ ID NO: 600484 - DNA, 75 bp, synthetic construct
  source 1..75: mol_type = other DNA
cttcggatacaccaaaaacacctatactgcggttggtacaaataataatagcggcctggatattaaaacccgccg

SEQ ID NO: 600485 - DNA, 75 bp, synthetic construct
  source 1..75: mol_type = other DNA
ggagaaacggttctgcaggatgcatccggagagaaacgttttgaaggtgaaaaggacagcagaatgctgatgaat

SEQ ID NO: 600486 - DNA, 75 bp, synthetic construct
  source 1..75: mol_type = other DNA
tcgaccttcagacattaaaagccagtgacattaatgtaccagttaatactgtcaatatttttggagggaaaggat

SEQ ID NO: 600487 - DNA, 75 bp, synthetic construct
  source 1..75: mol_type = other DNA
agcatgagctggacggtgtggatttgttcacgggtgcattactgacctatacagacagcaatgcaagcagccacg

SEQ ID NO: 600488 - DNA, 75 bp, synthetic construct
  source 1..75: mol_type = other DNA
tgaacggtaccggttcggcagatggtggttacagcgataactacactcacgttcagattggtgccgacagaaagc

SEQ ID NO: 600489 - DNA, 75 bp, synthetic construct
  source 1..75: mol_type = other DNA
cgatatactatatcgtggcgatccaaatctgggagtacttcagtttttacggcatgcgtgccttactcattctct

SEQ ID NO: 600490 - DNA, 75 bp, synthetic construct
  source 1..75: mol_type = other DNA
aaagaagcactgaaaaagaaagtgatttttcttttcctgtgtttcaaaaagaaagtattaaagagcgcctagcca

SEQ ID NO: 600491 - DNA, 75 bp, synthetic construct
  source 1..75: mol_type = other DNA
atgaacaagcaaacaacaacatctctttcttttcctggtggtagaaaagaaagcattgctgagcgtctgaaaagg

SEQ ID NO: 600492 - DNA, 75 bp, synthetic construct
  source 1..75: mol_type = other DNA
cgtcttggtggcgggcagcagtttatcaaggataaaaacggtaacctcacacaaatttatacaagtggcggtttt

SEQ ID NO: 600493 - DNA, 75 bp, synthetic construct
  source 1..75: mol_type = other DNA
gggcattgatacaaattcaacctttagcctgtatctggcgctggcaatcattatttgtggctacggtttattcaa

SEQ ID NO: 600494 - DNA, 75 bp, synthetic construct
  source 1..75: mol_type = other DNA
taatgacccttggccatgtggtgctgggcattgatacaaattcaacctttagcctgtatctggcgctggcaatca

SEQ ID NO: 600495 - DNA, 75 bp, synthetic construct
  source 1..75: mol_type = other DNA
agttcctgtgcggtaacctcggcgttaacgggcgcactgaacatccgttcgagctggaagaggatgtctggcagc

SEQ ID NO: 600496 - DNA, 75 bp, synthetic construct
  source 1..75: mol_type = other DNA
gtcagataaagtcagcgtaggctggtacagccagggaaccgacaaatatggactgaactacccgcgtatcttccc

SEQ ID NO: 600497 - DNA, 75 bp, synthetic construct
  source 1..75: mol_type = other DNA
acccctgcgcgaaggccatcggtgccgcatcgaacggccggttgcggaaagtcctccctgcgtccgctgatggcc

SEQ ID NO: 600498 - DNA, 75 bp, synthetic construct
  source 1..75: mol_type = other DNA
ccgctgctatagtgcagtcggcttctgacgttcagtgcagccgtcttctgaaaacgacaatggaggtggtagccg

SEQ ID NO: 600499 - DNA, 75 bp, synthetic construct
  source 1..75: mol_type = other DNA
gagccgggtaagccaggcagtggaattgtggtaaatattctgtttaaaattaacggcaccaccgaaattcagtaa

SEQ ID NO: 600500 - DNA, 75 bp, synthetic construct
  source 1..75: mol_type = other DNA
gcagccgatttctgtcaccatggttgcgccagccgatcttgaaccgccacaagctgttcaaccgccaccagagcc

SEQ ID NO: 600501 - DNA, 75 bp, synthetic construct
  source 1..75: mol_type = other DNA
cgacggacacctacaacaacacggcagaactgacgctatcgaataccatcctgcatgacgtcacgccgcctgttg

SEQ ID NO: 600502 - DNA, 75 bp, synthetic construct
  source 1..75: mol_type = other DNA
aagcccgacggagagagaaatattgcgctttatgtcgcgtggctactcaatgacacaaattgccgagcagcttaa

SEQ ID NO: 600503 - DNA, 75 bp, synthetic construct
  source 1..75: mol_type = other DNA
gcgaccgaccgactgaacaatcagtggtacattaaccaaagccggacgctaagcccgacggagagagaaatattg

SEQ ID NO: 600504 - DNA, 75 bp, synthetic construct
  source 1..75: mol_type = other DNA
gtgtggccgggttccttctggtgtactgggggctcagctttgcaaaccactctttcctgcatgagccgccgtttt

SEQ ID NO: 600505 - DNA, 75 bp, synthetic construct
  source 1..75: mol_type = other DNA
agcagcccgtcgttgcctgatggatccaacccctccgctgctatagtgcagtcggcttctgacgttcagtgcagc

SEQ ID NO: 600506 - DNA, 75 bp, synthetic construct
  source 1..75: mol_type = other DNA
ggttcctggctagtggtaagggggagtacatgaaagatgacggcgctgcagtcatactcaatctggttggggagt

SEQ ID NO: 600507 - DNA, 75 bp, synthetic construct
  source 1..75: mol_type = other DNA
tgggcgtcagttctgatgcagggttgttggaggccgcagatattctgttatgtatgcggcattgcgaagcaagta

SEQ ID NO: 600508 - DNA, 75 bp, synthetic construct
  source 1..75: mol_type = other DNA
accgccaaaagaagcaccggtggtcattgaaaagccgaagccgaaacctaagccaaaaccgaagccggtgaaaaa

SEQ ID NO: 600509 - DNA, 75 bp, synthetic construct
  source 1..75: mol_type = other DNA
aagccgttacctgccgctactgcttgggctgggtctggatgagttaagcatgagtagcccacgcattccggcggt

SEQ ID NO: 600510 - DNA, 75 bp, synthetic construct
  source 1..75: mol_type = other DNA
ccggcggtactcgacgcccagtgcggcgtactggcgattaaccccaatgacgccgtgagcggttattatcaggtt

SEQ ID NO: 600511 - DNA, 75 bp, synthetic construct
  source 1..75: mol_type = other DNA
cgtaaactggtgaataaaaacttccgccagtcgttgtttgccgcgcaagatgcacaaagtatcctgacgctgctg

SEQ ID NO: 600512 - DNA, 75 bp, synthetic construct
  source 1..75: mol_type = other DNA
caggaagagaacccgttcctcggctatcgcgcggtacgtatttacccggaatttgctggcctgttccgcactcaa

SEQ ID NO: 600513 - DNA, 75 bp, synthetic construct
  source 1..75: mol_type = other DNA
atggtccacagcctcgatcagatcttatgggtgaagggcgagatccaaaaagcgatcgttgagcttaagcgcgat

SEQ ID NO: 600514 - DNA, 75 bp, synthetic construct
  source 1..75: mol_type = other DNA
gtgacggcgaaagcaaaactatcctcagcgcccatttggctgattcaggatgatgaatttgcaggcaatatccgt

SEQ ID NO: 600515 - DNA, 75 bp, synthetic construct
  source 1..75: mol_type = other DNA
cgcaaactggtgaataaaaacttccgtcagtcgcttttcgccgcaagtgatgcacaaagtatcctgacgctgctg

SEQ ID NO: 600516 - DNA, 75 bp, synthetic construct
  source 1..75: mol_type = other DNA
gagccgatacctgaaccgccaaaagaagcgccggtggtcattgaaaagccgaagccaaaacctaagccagtgaaa

SEQ ID NO: 600517 - DNA, 75 bp, synthetic construct
  source 1..75: mol_type = other DNA
gcaccagcggatcttgaaccgccacaagcagttcaaccgccgccagagccggtggtggagccggaaccggaacct

SEQ ID NO: 600518 - DNA, 75 bp, synthetic construct
  source 1..75: mol_type = other DNA
gcgacgcacccgctgccgcgttcattaagccgcctgaatcccgatttgctttacggcaatatactggcaagcggc

SEQ ID NO: 600519 - DNA, 75 bp, synthetic construct
  source 1..75: mol_type = other DNA
gcccattgctggcgctggagaatatctttgttgatcaggcctttagtaataaagagcaggcgattcagtttctgt

SEQ ID NO: 600520 - DNA, 75 bp, synthetic construct
  source 1..75: mol_type = other DNA
gtacggcaatgtgctggcaagcggcgtcggcgtgggtacgctgaccctgttacagagcgacagcctcgacagtta

SEQ ID NO: 600521 - DNA, 75 bp, synthetic construct
  source 1..75: mol_type = other DNA
cctgcgtgaacagggtattgccgaatttaaattaccggatcgcgtggagtgtgtagattcacttccgctgacggc

SEQ ID NO: 600522 - DNA, 75 bp, synthetic construct
  source 1..75: mol_type = other DNA
ccgtcttgatgatagcgcggagaaaattatccatacccagggctatccaatgtgtccggacgatgaagtgtgggt

SEQ ID NO: 600523 - DNA, 75 bp, synthetic construct
  source 1..75: mol_type = other DNA
gtagtgaactgaacgcctatgccagccagattgaaccggcgttactgattgccgatcgccaacatgcgctgttta

SEQ ID NO: 600524 - DNA, 75 bp, synthetic construct
  source 1..75: mol_type = other DNA
atgagcattccatttacccgctggccggaagagtttgcccgtcgctatcgggaaaaaggctactggcaggatttg

SEQ ID NO: 600525 - DNA, 75 bp, synthetic construct
  source 1..75: mol_type = other DNA
tgacgcgcgggccgtataccttccgtggctattacaaaagcccgcagcacaatgccagcgcctttgatgccaacg

SEQ ID NO: 600526 - DNA, 75 bp, synthetic construct
  source 1..75: mol_type = other DNA
gtgagcataacttgcaggatgcgattaaccatccggcagacggttttactgctacgccgtcacctgctgatgaag

SEQ ID NO: 600527 - DNA, 75 bp, synthetic construct
  source 1..75: mol_type = other DNA
ccgatgcagatggtcggtgcggcgttcacacacagtacgtctgacttcggtaatattctgctggatgttgcgaac

SEQ ID NO: 600528 - DNA, 75 bp, synthetic construct
  source 1..75: mol_type = other DNA
gccccgcgtgataccacagtgacaatccctgcaccggcggtaacagaaccatcaccggtaccggcagtgtctgat

SEQ ID NO: 600529 - DNA, 75 bp, synthetic construct
  source 1..75: mol_type = other DNA
ccagaactttgcagaagtcattgccgaaccacgtctggatgaagctgatgcgaaagcctggtatctggctgccgc

SEQ ID NO: 600530 - DNA, 75 bp, synthetic construct
  source 1..75: mol_type = other DNA
tgctgccaatatgggcgttggcgattcatggacagcgcataaatctacagacctcctgactttctgcgtattggt

SEQ ID NO: 600531 - DNA, 75 bp, synthetic construct
  source 1..75: mol_type = other DNA
gtgcctgtgcaagccaggaaaactttgatgcagaaattggtcggaaaattgcgcgtgaaaatgcggttaacaaaa

SEQ ID NO: 600532 - DNA, 75 bp, synthetic construct
  source 1..75: mol_type = other DNA
cagaaagagggtgagcgtcatctgaatattcgtcctgcgttcgtactggtaccgacggcgatggagtctgttgct

SEQ ID NO: 600533 - DNA, 75 bp, synthetic construct
  source 1..75: mol_type = other DNA
ggcactgtcgttctggctgccgaccccagcgccacgctttgcttcccattgattgaaaaacatcaggtgaacgtc

SEQ ID NO: 600534 - DNA, 75 bp, synthetic construct
  source 1..75: mol_type = other DNA
ccgcggtctggtgaaatgtacggcgcaaacgtcgcagacaacaactctgatggcccgtaagggctttttttgtac

SEQ ID NO: 600535 - DNA, 75 bp, synthetic construct
  source 1..75: mol_type = other DNA
tgaaaaaaccgaacgtgataatgtctacaacgggatgaccctgcgtgaatatgcccgtatgtcactaactgaacg

SEQ ID NO: 600536 - DNA, 75 bp, synthetic construct
  source 1..75: mol_type = other DNA
cctgctaatggcggaaaaaatccgtaaaggcgttgaactgcaaccgttcacctggcaacaaaaaacgctttatct

SEQ ID NO: 600537 - DNA, 75 bp, synthetic construct
  source 1..75: mol_type = other DNA
aaaacacatggtgcgtccattaccgtttatgtcgacggtgtggcggcgtcaatggcgtcggtcattgcgatggtg

SEQ ID NO: 600538 - DNA, 75 bp, synthetic construct
  source 1..75: mol_type = other DNA
agcgtgaacaggataacgtctacaacgggatgaccctgcgcgaatatgcccgtatgtcgctgactgaacggggta

SEQ ID NO: 600539 - DNA, 75 bp, synthetic construct
  source 1..75: mol_type = other DNA
gcggcgaaccgaaggccagcctgaagaataattcctggttcaggatgaaggcgggtcataaaagtgacgcagata

SEQ ID NO: 600540 - DNA, 75 bp, synthetic construct
  source 1..75: mol_type = other DNA
caggcgtccgacatggtacgtgtagacgtattaatcaacggtgaacgtgttgatgcgttggcgctgatcacccac

SEQ ID NO: 600541 - DNA, 75 bp, synthetic construct
  source 1..75: mol_type = other DNA
ggcgctaattatcgactcctggttcgacaactacctgggcgttgtttcacttatccgtattaaaaacggcaccct

SEQ ID NO: 600542 - DNA, 75 bp, synthetic construct
  source 1..75: mol_type = other DNA
atttcacagcagaagatggtgcctttggcgtagccataaaagcgaaacatactggcggagaggtaaactaccagc

SEQ ID NO: 600543 - DNA, 75 bp, synthetic construct
  source 1..75: mol_type = other DNA
cggtagtggttgcgcatcgtaccgaacgctgaccgatgactttaataaattgatggtcgaagccgatacgtgtct

SEQ ID NO: 600544 - DNA, 75 bp, synthetic construct
  source 1..75: mol_type = other DNA
gcagaaagaaggtaagaaacgcatgaagcagatcggtaacgtcgagctgccacaggaagcgttcctcgccattct

SEQ ID NO: 600545 - DNA, 75 bp, synthetic construct
  source 1..75: mol_type = other DNA
cgttgcggaagaaatcgaagatatcgtcggcatcgacgctaccgacgcagtgcgttgctcggcaaaaacaggtgt

SEQ ID NO: 600546 - DNA, 75 bp, synthetic construct
  source 1..75: mol_type = other DNA
gcagaactcggtaaaacggccacgccgtccaataaaaccactcagccgcatattcatgcgggcaacggtaacttc

SEQ ID NO: 600547 - DNA, 75 bp, synthetic construct
  source 1..75: mol_type = other DNA
ttgccactttacaggtaaaagagcttgctgcagataacaccacgttcctgatgcataccaacaacagttgggctg

SEQ ID NO: 600548 - DNA, 75 bp, synthetic construct
  source 1..75: mol_type = other DNA
ttaccagttcgacctgctggcgaacggagaaacggttctgcgggatgcatccggagagaaacgttttgaaggtga

SEQ ID NO: 600549 - DNA, 75 bp, synthetic construct
  source 1..75: mol_type = other DNA
tcaaagacaaaaatggtaatcgcacccaggtgtataccaatggcggatttcttgttgggggaaccgtcagcgcgc

SEQ ID NO: 600550 - DNA, 75 bp, synthetic construct
  source 1..75: mol_type = other DNA
gtcgactttttaaacaagccagccagtgaaatgaacgtgacgttaattaccgcaccgaaagggagtgacgagaaa

SEQ ID NO: 600551 - DNA, 75 bp, synthetic construct
  source 1..75: mol_type = other DNA
gggctgtgagcggtgcctatcaggccggtggacgctttactgcattctatcgccttgggggggggatgcagtacg

SEQ ID NO: 600552 - DNA, 75 bp, synthetic construct
  source 1..75: mol_type = other DNA
acaatgtgcgttttggcctagaactggagaaatcggcgttcgggaagtataacgtggacaatgcgataaatgcta

SEQ ID NO: 600553 - DNA, 75 bp, synthetic construct
  source 1..75: mol_type = other DNA
aggtttcatcatttgaacaacctgactgggaaaatcgtctgtttaggttcaaaacattgaatctgataaattcag

SEQ ID NO: 600554 - DNA, 75 bp, synthetic construct
  source 1..75: mol_type = other DNA
tttaatccatcacaggggcctttagcaaactatctaattatgggagatagtggttctccattatttgcttatgat

SEQ ID NO: 600555 - DNA, 75 bp, synthetic construct
  source 1..75: mol_type = other DNA
cctgagtaaactggtgacagaagttgctccggctgaagtgtctgatgtgggggccgtgagcggagcctatcaggc

SEQ ID NO: 600556 - DNA, 75 bp, synthetic construct
  source 1..75: mol_type = other DNA
aatcttcgcttcggtcttgagtttgagaaatcggcatttggtaaatacaacgtggataacgcgatcaacgccaac

SEQ ID NO: 600557 - DNA, 75 bp, synthetic construct
  source 1..75: mol_type = other DNA
ggtgagaaacgtatcaaaggtgaaaaagacggtcgtatgctcatgaatgttggtctcaacgctgaaattcgcgat

SEQ ID NO: 600558 - DNA, 75 bp, synthetic construct
  source 1..75: mol_type = other DNA
tgactatgatgggaatccctgaacagaatagtaaagctgtaacgccgggtctccactacgctgctgatggattca

SEQ ID NO: 600559 - DNA, 75 bp, synthetic construct
  source 1..75: mol_type = other DNA
tggtgctatagaattcacagtaaaaaatataaagttatccaaatggatgatattataatgagccatgaggtttct

SEQ ID NO: 600560 - DNA, 75 bp, synthetic construct
  source 1..75: mol_type = other DNA
aggggatggacacaatagaagtcgcttatcttgatggtatggatacgccatatcttgaggagcaggtgggcttta

SEQ ID NO: 600561 - DNA, 75 bp, synthetic construct
  source 1..75: mol_type = other DNA
gaaggtgcggaatataaatacatcaccaccagcgataaaggtgtacctattgcgctggccacgtacgggaatatt

SEQ ID NO: 600562 - DNA, 75 bp, synthetic construct
  source 1..75: mol_type = other DNA
tcgcggaagacctgaaagcccttggcgatgtttcacatatcaatctgaggatccattcaccaggtggtgatgtgt

SEQ ID NO: 600563 - DNA, 75 bp, synthetic construct
  source 1..75: mol_type = other DNA
actcatgacgttggtccgtaccagaatgtgccgtcaaaaccggtagttatcctttccgctaaagtcctgccgtaa

SEQ ID NO: 600564 - DNA, 75 bp, synthetic construct
  source 1..75: mol_type = other DNA
tggctgagcagaaagcccgcatgtcaggcattaacgatctgtttgccatgtttggcggtcgctatcaggcgcttc

SEQ ID NO: 600565 - DNA, 75 bp, synthetic construct
  source 1..75: mol_type = other DNA
ggcggcggcacagggcactgacaccattgaagtggcctggctggatggtgtggacactccatacattgatcagca

SEQ ID NO: 600566 - DNA, 75 bp, synthetic construct
  source 1..75: mol_type = other DNA
ccggtgatacggtcattatgccggaaaatgccttcatgatgatccataagccatggggattcagtggcggggatg

SEQ ID NO: 600567 - DNA, 75 bp, synthetic construct
  source 1..75: mol_type = other DNA
tctgaatatgctgaccgatgtcccgatgaagctgggccgtgcggcgaaatccactattgccgatctggtttatgc

SEQ ID NO: 600568 - DNA, 75 bp, synthetic construct
  source 1..75: mol_type = other DNA
ctgattctgaaagatgagaaagacaccacagcgcgcctgcgtctgattgtgttgctgcttctcggttttggtgag

SEQ ID NO: 600569 - DNA, 75 bp, synthetic construct
  source 1..75: mol_type = other DNA
tgacctgcaaaagatctggccggagtattccccttcctctttacaggttgacgataaccaccgcatctacgccgc

SEQ ID NO: 600570 - DNA, 75 bp, synthetic construct
  source 1..75: mol_type = other DNA
cacaagaatattgccacgggcgggatttccgtttccggtctggatgcggcacgtcagatgatgcgcctgcagaaa

SEQ ID NO: 600571 - DNA, 75 bp, synthetic construct
  source 1..75: mol_type = other DNA
cacaaaaatattgccaccggggggatctccgtttccggactggatgcggcccgtcagatgatgcgcctgcagaaa

SEQ ID NO: 600572 - DNA, 75 bp, synthetic construct
  source 1..75: mol_type = other DNA
ccgaatctgaagatgatgccgaagagcaggcaaaggatatgctggcttggatgtgcaaggcattagggtttaagc

SEQ ID NO: 600573 - DNA, 75 bp, synthetic construct
  source 1..75: mol_type = other DNA
atgtttaatactgtaaaaatatccagttgtgagttggtcaacgctgactgcctggaatttatccgcttgttaccc

SEQ ID NO: 600574 - DNA, 75 bp, synthetic construct
  source 1..75: mol_type = other DNA
ccggaaagaaaaacatgacttcgcactggtttggcaccagtcagtggcagttaccgagcgaagctgattacagaa

SEQ ID NO: 600575 - DNA, 75 bp, synthetic construct
  source 1..75: mol_type = other DNA
gtgcagtattatccgggtaagcatccctgtgaaaaaccggcggatatgttgcgtcagataattactgccagcagc

SEQ ID NO: 600576 - DNA, 75 bp, synthetic construct
  source 1..75: mol_type = other DNA
attaccgccagcagtcgtccgggtgacctggttgcagatttcttcatggggtccggttcgacagtcaaagcagcg

SEQ ID NO: 600577 - DNA, 75 bp, synthetic construct
  source 1..75: mol_type = other DNA
ggcagaagagaagcatcagcggggtgaactggaaaagccccaccaccagctgctgaagacgtatacttcactgaa

SEQ ID NO: 600578 - DNA, 75 bp, synthetic construct
  source 1..75: mol_type = other DNA
gggcgttgtgcgattggtgttgagctggagacaggacgttttgaacagacagtcagggaagttcaggatttaatc

SEQ ID NO: 600579 - DNA, 75 bp, synthetic construct
  source 1..75: mol_type = other DNA
gttatgagttaatcaacgccgactgcctggaatttatgcggtcgttacccgaaaattctgtagacctgatagtca

SEQ ID NO: 600580 - DNA, 75 bp, synthetic construct
  source 1..75: mol_type = other DNA
ggctggaccagtgtctggcgcaattctggcgggtactgaagcctgccggaagtctctacctgttctgtggtcatc

SEQ ID NO: 600581 - DNA, 75 bp, synthetic construct
  source 1..75: mol_type = other DNA
aaaagcggcactggcgctcgggcgtcgtgcgattggcgttgagctggagaccggacgttttgagcagacagtcag

SEQ ID NO: 600582 - DNA, 75 bp, synthetic construct
  source 1..75: mol_type = other DNA
taccgatgtctggacgtacaagcctgtgcagtattatccgggcaaacatccctgtgaaaaaccagcggatatgtt

SEQ ID NO: 600583 - DNA, 75 bp, synthetic construct
  source 1..75: mol_type = other DNA
gtgaacgcttcagtgtgctgaaccatattatctgggcgaagccgtccggacgctggaacgggtgcaacaaggaaa

SEQ ID NO: 600584 - DNA, 75 bp, synthetic construct
  source 1..75: mol_type = other DNA
ttgccgaacgaaagcgattatctgaaattacaggcactgtttgccagggtggcagaagagaagcatcagcggggg

SEQ ID NO: 600585 - DNA, 75 bp, synthetic construct
  source 1..75: mol_type = other DNA
atggcgctggggcgtcgtgcaattggtgtcgagctggaggctgaacgttttgagcagaccgcaagggatgtacag

SEQ ID NO: 600586 - DNA, 75 bp, synthetic construct
  source 1..75: mol_type = other DNA
atgaacgcacaactaaccgaaatcatgcgccttatcaccaatctgatccgcacaggtgtagtcaccgaagtggac

SEQ ID NO: 600587 - DNA, 75 bp, synthetic construct
  source 1..75: mol_type = other DNA
cacaggtgtagtcaccgaagtggaccgggaaaactggctttgccgggtgaaaactggcgacctcgaaaccaactg

SEQ ID NO: 600588 - DNA, 75 bp, synthetic construct
  source 1..75: mol_type = other DNA
ccatgaaaaccagtgagtttgtactggaagctgaccgcacgcgtattaacagcgaagtagtaatcaatggtggcg

SEQ ID NO: 600589 - DNA, 75 bp, synthetic construct
  source 1..75: mol_type = other DNA
ggggcatcaaatcaatggtcattgagaccgctgacaaaatcaccgtgaaaaccagtgagtttgtactggaggctg

SEQ ID NO: 600590 - DNA, 75 bp, synthetic construct
  source 1..75: mol_type = other DNA
ggggcatcaaatcaatggtcattgagaccgctgacaaaatcaccttgaaaaccagtgagtttgttctggaggctg

SEQ ID NO: 600591 - DNA, 75 bp, synthetic construct
  source 1..75: mol_type = other DNA
ggggcatcaaatcaatggtcattgagaccgctgacaaaatcaccatgaaaaccagtgagtttgtgctggaggctg

SEQ ID NO: 600592 - DNA, 75 bp, synthetic construct
  source 1..75: mol_type = other DNA
gacgtcggcggacgcctgcgtgacagaacatcctgacggcggctggtttgaatatgaacccgccaccgggcgctg

SEQ ID NO: 600593 - DNA, 75 bp, synthetic construct
  source 1..75: mol_type = other DNA
gattaactggctgacactgcgcgcgggcaaatcgcgcacctggtggaaaccgtctgtgggtgagcaggttgtgct

SEQ ID NO: 600594 - DNA, 75 bp, synthetic construct
  source 1..75: mol_type = other DNA
ttacccagggcggcggtgcgatgagttctaacggaattgtggttgatgcacatcagcatactggcgtcctgaaag

SEQ ID NO: 600595 - DNA, 75 bp, synthetic construct
  source 1..75: mol_type = other DNA
aggtgagcaggtggtggtgctgagtctgggaggcaatctggaaactgcctttgcgttgcccgctgtctattcgaa

SEQ ID NO: 600596 - DNA, 75 bp, synthetic construct
  source 1..75: mol_type = other DNA
ggctgtgccgggtgaaggtaggcgagcttgaaaccaactggattaactggctgacgctacgcgccgctggtgccc

SEQ ID NO: 600597 - DNA, 75 bp, synthetic construct
  source 1..75: mol_type = other DNA
gctgagtctgggcggcaatctggagactgcctttgcgttgcccgccatctattcgaatcagttcgctccaccgtc

SEQ ID NO: 600598 - DNA, 75 bp, synthetic construct
  source 1..75: mol_type = other DNA
tctccgtatcagtctccgtgccttataccgatgtctggatgcataaccccgttcagttctacccgggtaaacatc

SEQ ID NO: 600599 - DNA, 75 bp, synthetic construct
  source 1..75: mol_type = other DNA
ccggaaagaaaaacatggcttcgcactggtttggtatcagccagtggcagttgccgaacgaaggcgattatctga

SEQ ID NO: 600600 - DNA, 75 bp, synthetic construct
  source 1..75: mol_type = other DNA
cctgtgaaaaaccagcggatatgttacgtcagataattaccgccagcagtcgtccgggagacttggttgtcgact

SEQ ID NO: 600601 - DNA, 75 bp, synthetic construct
  source 1..75: mol_type = other DNA
ccggaagtctttacctgttctgtggtcatcgcctggcatctgatatcgaaatcatgatgcgtgaacgctttaatg

SEQ ID NO: 600602 - DNA, 75 bp, synthetic construct
  source 1..75: mol_type = other DNA
tctccgtatcagtctccgtgccttataccgacgtctggacgcataaacccgttcagttctacccgggtaaacatc

SEQ ID NO: 600603 - DNA, 75 bp, synthetic construct
  source 1..75: mol_type = other DNA
caactggaacaaccacaccatcagctggtggcatcttatgattcactgaatcgcaaatattctgaattgctggat

SEQ ID NO: 600604 - DNA, 75 bp, synthetic construct
  source 1..75: mol_type = other DNA
aagggggacgatgattacctgaaatggctggaccagtgtcttgcacagttctggcgggtactgaagcctgccgga

SEQ ID NO: 600605 - DNA, 75 bp, synthetic construct
  source 1..75: mol_type = other DNA
atgattaatactgtaaaaatatcaagttgtgagttaatcaacgctgattgcctggaatttatccagaccttaccg

SEQ ID NO: 600606 - DNA, 75 bp, synthetic construct
  source 1..75: mol_type = other DNA
gtgcagttctatcccgggaaacatccgtgcgaaaaaccggcagaaatgctgcagcagataatccgcgcaagcagt

SEQ ID NO: 600607 - DNA, 75 bp, synthetic construct
  source 1..75: mol_type = other DNA
ctaccgaacgaaagcgattatctgaaattacaggcgctgtttgcccgggtggcagaagagaagcatcagcgcggt

SEQ ID NO: 600608 - DNA, 75 bp, synthetic construct
  source 1..75: mol_type = other DNA
aaccatatcatctgggcgaagccgtctggacgttggaatgggtgtaataaagaaagtctgcgcgcatattttcct

SEQ ID NO: 600609 - DNA, 75 bp, synthetic construct
  source 1..75: mol_type = other DNA
ccgatccgccttacttcaaggtgaaacccaacggctgggacaatcagtggaaaggggacgaagattaccttaagt

SEQ ID NO: 600610 - DNA, 75 bp, synthetic construct
  source 1..75: mol_type = other DNA
atgaaaaatactgtaaaaataaacagtgttgatttaatcaacgctgattgcctgcattttattcagtccttgcct

SEQ ID NO: 600611 - DNA, 75 bp, synthetic construct
  source 1..75: mol_type = other DNA
gttcagttctacccgggtaaacatccgtgtgagaagcctgcggatatgctccggcaaataatcagtgccagtagt

SEQ ID NO: 600612 - DNA, 75 bp, synthetic construct
  source 1..75: mol_type = other DNA
tatttccccgccacagagcgcattctgttcgcggaacattatcaggggccgtatcgtccgaaagatgccgggtat

SEQ ID NO: 600613 - DNA, 75 bp, synthetic construct
  source 1..75: mol_type = other DNA
aagggcgacgatgattacctgaagtggctggaccagtgtctggcgcagttctggcgggtgctgaaacctgtcgga

SEQ ID NO: 600614 - DNA, 75 bp, synthetic construct
  source 1..75: mol_type = other DNA
ccggcaatatgccagcctgctggaggagtacaaatctttgcggcgttatttttctgtatcggctgctgttccgta

SEQ ID NO: 600615 - DNA, 75 bp, synthetic construct
  source 1..75: mol_type = other DNA
ggcagggcactgaaacagcatgtgatggctccgctgattgcttactttcgtgatgcgcgcgctgccctggggata

SEQ ID NO: 600616 - DNA, 75 bp, synthetic construct
  source 1..75: mol_type = other DNA
ggcagaagagaagcatcagcggggggaactggaaaagccccaccaccagctggtggatacgtatacttcactgaa

SEQ ID NO: 600617 - DNA, 75 bp, synthetic construct
  source 1..75: mol_type = other DNA
cgtgcgaaaaaccggcagaaatgctgcagcagataatcagcgcaagcagtcgtccgggagacctggttgcagatt

SEQ ID NO: 600618 - DNA, 75 bp, synthetic construct
  source 1..75: mol_type = other DNA
agaaagcctgcgggcgtatttcccggcaacagagcgcattctgtttgccgaacattatcaggggccatatcagcc

SEQ ID NO: 600619 - DNA, 75 bp, synthetic construct
  source 1..75: mol_type = other DNA
acgggtgcaacaaggaaagcctgcgtgcgtatttcccggccacagagcgcattctgtttgcggaacattatcagg

SEQ ID NO: 600620 - DNA, 75 bp, synthetic construct
  source 1..75: mol_type = other DNA
actttcgtgatgcgcgcgctgccctggggataacggcaaaacagattgcagatgccacaggaaagaaaaacatgg

SEQ ID NO: 600621 - DNA, 75 bp, synthetic construct
  source 1..75: mol_type = other DNA
cgtgcgaaaaaccggcagaaatgctgcagcagataatcagcgcgagcagtcgtccgggggacctggttgcagatt

SEQ ID NO: 600622 - DNA, 75 bp, synthetic construct
  source 1..75: mol_type = other DNA
tttttatggggtcgggatcaacaataaaagcagcattatcgctgggacggcatgcaataggtgtggagctggaag

SEQ ID NO: 600623 - DNA, 75 bp, synthetic construct
  source 1..75: mol_type = other DNA
agggcgattggcgtggaactggaaaaagaacgttttgaacagaccgtcggtgaaataatggagcaggcagagaaa

SEQ ID NO: 600624 - DNA, 75 bp, synthetic construct
  source 1..75: mol_type = other DNA
cgaaaactctgcgtcaccttaagtcataaaaattatcgtaatattgtttctttaactcagaatcaatcatttccg

SEQ ID NO: 600625 - DNA, 75 bp, synthetic construct
  source 1..75: mol_type = other DNA
actacctgaaaacgaataaaacctgcagctctccagatgtcgccgcggcttccgggatgacgcatacctgcatca

SEQ ID NO: 600626 - DNA, 75 bp, synthetic construct
  source 1..75: mol_type = other DNA
tatggcctgatgatgatgattgacgtcctctcaggcgtcttactcggcttaccgttcgggcgtcaggtcagttcg

SEQ ID NO: 600627 - DNA, 75 bp, synthetic construct
  source 1..75: mol_type = other DNA
attgaagagtgttggtgccttgcgctccctatgaaacattaccgcccgctgttattaaacgacacgctattttta

SEQ ID NO: 600628 - DNA, 75 bp, synthetic construct
  source 1..75: mol_type = other DNA
tattactctcgcaggaaggtgatctttatcacgaaaagcatacgcaagcggcagagtatttaggcgtttcttatc

SEQ ID NO: 600629 - DNA, 75 bp, synthetic construct
  source 1..75: mol_type = other DNA
gacgcctgtgaaaaagcgatgagcgccgtcgatccggatctcgattttattcgtgtggatgaagaagcgtttctc

SEQ ID NO: 600630 - DNA, 75 bp, synthetic construct
  source 1..75: mol_type = other DNA
gcggcaaaacgtcatagcccggagatcgacccgttaatgctggtattggcggcggatcatgtgattgccgatgaa

SEQ ID NO: 600631 - DNA, 75 bp, synthetic construct
  source 1..75: mol_type = other DNA
cgccatgttcatgacgatgaacttgtaggaaatctttcaacattcctgtttattgcagaaaaggcaggatatgac

SEQ ID NO: 600632 - DNA, 75 bp, synthetic construct
  source 1..75: mol_type = other DNA
gacgcctgcgaaaaagcgatgagcgccgtcgatccggatctcgattttattcgcgtggatgaagaagcgtttctc

SEQ ID NO: 600633 - DNA, 75 bp, synthetic construct
  source 1..75: mol_type = other DNA
gacgcgttccgtgccgccgtgcgtaacgccatgccgtatgctgaagcgggcaagctggtgaccttcggcattgtg

SEQ ID NO: 600634 - DNA, 75 bp, synthetic construct
  source 1..75: mol_type = other DNA
gcgacccgttaatgctggtgctggcggcggatcatgtgattgccgatgaagacgcgttccgcgccgccgtgcgta

SEQ ID NO: 600635 - DNA, 75 bp, synthetic construct
  source 1..75: mol_type = other DNA
tttaaggagtgtcgccagagtgccgcgatgaagcgggtgttggcggtgtatggagatatgaacttaaacttgctg

SEQ ID NO: 600636 - DNA, 75 bp, synthetic construct
  source 1..75: mol_type = other DNA
cacagacgtcagcagacggtgatgcggacgtgaaatgctcatggccatgccatgaagccagtgctgaccatcaac

SEQ ID NO: 600637 - DNA, 75 bp, synthetic construct
  source 1..75: mol_type = other DNA
cagttccggcagcggcgttgaattataaaaaacaaaaagcggcccagatggcggcggggcagacggcgcagaacg

SEQ ID NO: 600638 - DNA, 75 bp, synthetic construct
  source 1..75: mol_type = other DNA
gcattgatgcggcgcgccggatgtttgccgaaaaagtggcgatgtttaccggtctgtctgttgatgccgtcacgg

SEQ ID NO: 600639 - DNA, 75 bp, synthetic construct
  source 1..75: mol_type = other DNA
ggacagaggctgccgtttttgaaggtcagtccgctattaaggccggactggcggatgaattaatcaatgcgtcgg

SEQ ID NO: 600640 - DNA, 75 bp, synthetic construct
  source 1..75: mol_type = other DNA
atggcgactaccgtacaggcatggggaaaagtgctcgacgcccgctcgcgtaatatgtctatcccggatacctgg

SEQ ID NO: 600641 - DNA, 75 bp, synthetic construct
  source 1..75: mol_type = other DNA
aggtaaacgaccggcccgtgtttaccgggtggtgaacggtattgctgtactgccggtgaccggcacgctggtgca

SEQ ID NO: 600642 - DNA, 75 bp, synthetic construct
  source 1..75: mol_type = other DNA
tgaactacctgaaaacgcataaaacctgcagctctccagatgtcgccgcggcttcaggaatgacgcatacctgca

SEQ ID NO: 600643 - DNA, 75 bp, synthetic construct
  source 1..75: mol_type = other DNA
cagccagaccccggagatgaaaggcgtctattcgcgtgtgcgattgaacagcgaaatcagccgtaaagatatgct

SEQ ID NO: 600644 - DNA, 75 bp, synthetic construct
  source 1..75: mol_type = other DNA
cgtcctctcaggcgtcttactcggcttaccgttcgggcgacaggttagttcgatgtatgacgatttacacgccgg

SEQ ID NO: 600645 - DNA, 75 bp, synthetic construct
  source 1..75: mol_type = other DNA
agcctgactgccggagaggcacccgcgacgctggcgttatccggtgatgatggcgggccacgacaggcccgcagt

SEQ ID NO: 600646 - DNA, 75 bp, synthetic construct
  source 1..75: mol_type = other DNA
cggacgggggatggtttgagtatgaacccgccaccggacggtggcatgtcaggggcatcaaatccatggtgatcg

SEQ ID NO: 600647 - DNA, 75 bp, synthetic construct
  source 1..75: mol_type = other DNA
gcccgctgacaatatcaccctgaaaaccagtgagtttgtactggaggctgaccgcacgcgaattaacagcgaagt

SEQ ID NO: 600648 - DNA, 75 bp, synthetic construct
  source 1..75: mol_type = other DNA
gcccgctgacaatatcaccatgaaaaccagtgagtttgtactggaggctgaccgcacgcgcattaacagcgaagt

SEQ ID NO: 600649 - DNA, 75 bp, synthetic construct
  source 1..75: mol_type = other DNA
gtccgctgacaatatcaccatgaaaaccagtgagtttgtactggaggctgaccgcacgcgtattaacagcgaagt

SEQ ID NO: 600650 - DNA, 75 bp, synthetic construct
  source 1..75: mol_type = other DNA
attcgtccagacaaatggctgaacgagcacaacgtgatcgtcgacgtgaaaaaggttgcagatatggatcgtttt

SEQ ID NO: 600651 - DNA, 75 bp, synthetic construct
  source 1..75: mol_type = other DNA
ggccgctgacaatatcaccgtgaaaaccagtgagtttgtactggaggctgaccgcacgcgaattaacagcgaagt

SEQ ID NO: 600652 - DNA, 75 bp, synthetic construct
  source 1..75: mol_type = other DNA
ggccgctgacaatatcaccatgaaaaccagtgagtttgtactggaggctgaccgcacgcggattaacagcgaagt

SEQ ID NO: 600653 - DNA, 75 bp, synthetic construct
  source 1..75: mol_type = other DNA
ggggcatcaaatcaatggtcattgagaccgctgacaacatcaccctgaaaaccagtgagtttgtgctggaggctg

SEQ ID NO: 600654 - DNA, 75 bp, synthetic construct
  source 1..75: mol_type = other DNA
ggggcatcaaatcaatggtcattgagaccgctgacaatatcaccgtgaaaaccagtgagtttgttctggaggctg

SEQ ID NO: 600655 - DNA, 75 bp, synthetic construct
  source 1..75: mol_type = other DNA
ggggcatcaaatcaatggtcattgagaccgctgacaatatcaccttgaaaaccagtgagtttgtgctggaggctg

SEQ ID NO: 600656 - DNA, 75 bp, synthetic construct
  source 1..75: mol_type = other DNA
gaccgctgacaatatcaccatgaaaaccagtgagtttgtactggaggctgaccgcacgcgaattaacagcgaagt

SEQ ID NO: 600657 - DNA, 75 bp, synthetic construct
  source 1..75: mol_type = other DNA
ggggcatcaaatcaatggtcattgagaccgctgacaagatcaccgtgaaaaccagtgagtttgtgctggaggctg

SEQ ID NO: 600658 - DNA, 75 bp, synthetic construct
  source 1..75: mol_type = other DNA
ggggcatcaaatcaatggtcattgagaccgctgacaacatcaccgtgaaaaccagtgagtttgtcctggaggctg

SEQ ID NO: 600659 - DNA, 75 bp, synthetic construct
  source 1..75: mol_type = other DNA
gcgaagcatcaatgtactggaacgatgaagatactggtgagttgtgccgcattcgtccagacaaatggctgaacg

SEQ ID NO: 600660 - DNA, 75 bp, synthetic construct
  source 1..75: mol_type = other DNA
ccgaagtggaccgggagaactggctttgccgggtgaaaacgggcgaccttgaaactaactggatcagttggctga

SEQ ID NO: 600661 - DNA, 75 bp, synthetic construct
  source 1..75: mol_type = other DNA
tgcgccttatcaccaacctgattcgcacaggtgtagtcaccgaagtggacagggcaaactggctgtgtcgggtga

SEQ ID NO: 600662 - DNA, 75 bp, synthetic construct
  source 1..75: mol_type = other DNA
gtatgtcaggggcatcaaatccatggtcattgaggccgacgacaatatcaccctgaaaaccagtgaatttgtgct

SEQ ID NO: 600663 - DNA, 75 bp, synthetic construct
  source 1..75: mol_type = other DNA
agggaaaactggctttgtcgggtgaaaacaggcgacttagaaaccaactggatcagctggctgaccctgcgtgcc

SEQ ID NO: 600664 - DNA, 75 bp, synthetic construct
  source 1..75: mol_type = other DNA
tgattctgaggacggcagcgtgaccgaatatgacgatggcggctggtttgaatacgaacccgccacgggccgctg

SEQ ID NO: 600665 - DNA, 75 bp, synthetic construct
  source 1..75: mol_type = other DNA
gaaactaactggatcagttggctgacgctgcgtgccggtaatgcccgcacatggtggcgaccatcggaaggtgag

SEQ ID NO: 600666 - DNA, 75 bp, synthetic construct
  source 1..75: mol_type = other DNA
gaatacctatcacgaatgccgcatcaatgatgaatggggcggcgtggaaatcattaaacgccctgagtgggcacg

SEQ ID NO: 600667 - DNA, 75 bp, synthetic construct
  source 1..75: mol_type = other DNA
ctggacatgggtactgctctgcactgtctgcttctggaacctggagagtttgacaaacgcttcatcgtttcaccg

SEQ ID NO: 600668 - DNA, 75 bp, synthetic construct
  source 1..75: mol_type = other DNA
gaatacctatcacgaatgccgcatcaacgatgaatggggcggcgtggaaattattaaacgccctgagtgggcacg

SEQ ID NO: 600669 - DNA, 75 bp, synthetic construct
  source 1..75: mol_type = other DNA
gctgagtctgggcggcaatctggagaccgcctttgcgctgcccgctgtgtattcgaatcagttcgcaccaccgtc

SEQ ID NO: 600670 - DNA, 75 bp, synthetic construct
  source 1..75: mol_type = other DNA
caccaacctgatccgcacaggtgtagtcaccgaagtggaccgggaaaactggctttgtcgggtgaaaacgggcga

SEQ ID NO: 600671 - DNA, 75 bp, synthetic construct
  source 1..75: mol_type = other DNA
tgatgcatccagtaaaggtgccaaaaaatatgactggtgggcttatgtatcagctcgtccgcgtaatattgcatt

SEQ ID NO: 600672 - DNA, 75 bp, synthetic construct
  source 1..75: mol_type = other DNA
atatacattctaagaaaaatgaaggctcatccgacgattttgagaagaaagccgaaagtgataatgaaattgata

SEQ ID NO: 600673 - DNA, 75 bp, synthetic construct
  source 1..75: mol_type = other DNA
atggtattggtgggttactttctcacagcctggaagtggccatactctctttaaaaaatgcgcatcactcagaac

SEQ ID NO: 600674 - DNA, 75 bp, synthetic construct
  source 1..75: mol_type = other DNA
gttagctatcagcgatagcgacatcagggacgatgcatatacatttactaatttagttttaaagcccttggttga

SEQ ID NO: 600675 - DNA, 75 bp, synthetic construct
  source 1..75: mol_type = other DNA
cctgcaagtcgccgccacctgtgcaaagtcaacgaccggagccagcggcatgggcgatggaaaaagcccaggact

SEQ ID NO: 600676 - DNA, 75 bp, synthetic construct
  source 1..75: mol_type = other DNA
tttgtaccgtggctaactttggtggtgcgcgcattaccgggcaaatcagtagcattaccgtgtggggggtcatta

SEQ ID NO: 600677 - DNA, 75 bp, synthetic construct
  source 1..75: mol_type = other DNA
gttacggcaccgaactgctcggcgcgagtttgtcgccagtgcagattggtcttgcgaccatcggagtgctgtgga

SEQ ID NO: 600678 - DNA, 75 bp, synthetic construct
  source 1..75: mol_type = other DNA
atgaaccgaaaatccccatcattatatgaaattctctatggtaatttcactggcgggctggagttaaatcaggtc

SEQ ID NO: 600679 - DNA, 75 bp, synthetic construct
  source 1..75: mol_type = other DNA
ggttcgttacggaacaacttttatgccggagggcagggtgttactgcgatatctgaagcaacagcagtttgtgga

SEQ ID NO: 600680 - DNA, 75 bp, synthetic construct
  source 1..75: mol_type = other DNA
ggagcagactcagcctggtgagttgcattatgtcattgatgcagaacttaaagatgccgggctggttcgttacgg

SEQ ID NO: 600681 - DNA, 75 bp, synthetic construct
  source 1..75: mol_type = other DNA
tggttttgacccagaacaccttttatctgacgcagtcatgtattgaaaagtacggaacgcagctaaatgcacctg

SEQ ID NO: 600682 - DNA, 75 bp, synthetic construct
  source 1..75: mol_type = other DNA
gaaccggagtccgtcatcgctactgagtatgagcaatatggtcatttgctggaagagacccttgagagcgatggt

SEQ ID NO: 600683 - DNA, 75 bp, synthetic construct
  source 1..75: mol_type = other DNA
atgccgcgtccttccctttatgaaattctctatggcaatttcgctggcgggctggagttaaaccaggtcagtgag

SEQ ID NO: 600684 - DNA, 75 bp, synthetic construct
  source 1..75: mol_type = other DNA
tcagtcataaactgatcaatatcgttgtttttgttgcaatagtagaatacgcctatttatttctccatttctatt

SEQ ID NO: 600685 - DNA, 75 bp, synthetic construct
  source 1..75: mol_type = other DNA
tactaaccaacacatatcaacccggcaatacaaccgaatttttcatgggtgggtagcaaaacttggtctcgaaga

SEQ ID NO: 600686 - DNA, 75 bp, synthetic construct
  source 1..75: mol_type = other DNA
acttcagatatctcatatctgggggatccgaatcaggcttgaactggaaggtaagacgcgcgatttggctctgtt

SEQ ID NO: 600687 - DNA, 75 bp, synthetic construct
  source 1..75: mol_type = other DNA
cggtattacccttctcacatttgcctttgtccacatgatcccgggcgatccggtgatgatcatggcgggcgaacg

SEQ ID NO: 600688 - DNA, 75 bp, synthetic construct
  source 1..75: mol_type = other DNA
gtgggtttataacgggaacggcgacccatatgcaaacccgctttcagacaatgactggtcgcgtctggcaaaggt

SEQ ID NO: 600689 - DNA, 75 bp, synthetic construct
  source 1..75: mol_type = other DNA
aacgccatcacctacaaagcgcagcgtgataaaaaagccagagagctggagctggcaaacgcaaccattactgat

SEQ ID NO: 600690 - DNA, 75 bp, synthetic construct
  source 1..75: mol_type = other DNA
cctgcgggtcaatgccagttgctccgcagccgtgcgtgaagccaccggacccaccagcgtggataatgcaaccat

SEQ ID NO: 600691 - DNA, 75 bp, synthetic construct
  source 1..75: mol_type = other DNA
tcagtaacaaactgattaacatcgttgttttcgttgcagttgttgaatacgcctatttatttctccatttctatt

SEQ ID NO: 600692 - DNA, 75 bp, synthetic construct
  source 1..75: mol_type = other DNA
cgaaacgttctcggtatccggtccggaatcctcagcgaccaaacagccctgagagccctgcaggaatacatcacc

SEQ ID NO: 600693 - DNA, 75 bp, synthetic construct
  source 1..75: mol_type = other DNA
cgaaacgttctcggtatcagagacggaatcatcagcgaccaggcagcattgagaatgcttcaggaatacatcagg

SEQ ID NO: 600694 - DNA, 75 bp, synthetic construct
  source 1..75: mol_type = other DNA
gctgttaatcattaccgtgataatgcaatcgcctacaaagagcagcgcgataacaaggccagtgaactggagaag

SEQ ID NO: 600695 - DNA, 75 bp, synthetic construct
  source 1..75: mol_type = other DNA
atgccgcgtccttccctttatgaaattctctatggcaatttcactggcgggctggagttaaaccaggtcggtgag

SEQ ID NO: 600696 - DNA, 75 bp, synthetic construct
  source 1..75: mol_type = other DNA
gactgcacattgtggcctgcctgccgttcgcagcgttaattgctctcaggaagccgattttctggattggtggcc

SEQ ID NO: 600697 - DNA, 75 bp, synthetic construct
  source 1..75: mol_type = other DNA
ggacgcacgctcgttgatattcaaacttttatcgacaactgtttgcttgggttggatttctcagagggttatcca

SEQ ID NO: 600698 - DNA, 75 bp, synthetic construct
  source 1..75: mol_type = other DNA
ccttgggggagaaaaagggttcgtagttgttgagcgtaagaaagtgtttgagcaggagaacctgctttctatgga

SEQ ID NO: 600699 - DNA, 75 bp, synthetic construct
  source 1..75: mol_type = other DNA
atgaaagtgttattgtcaataaaacctgaatttgttgaaaaaattcttaatggaacaaagaagtttgaattcagg

SEQ ID NO: 600700 - DNA, 75 bp, synthetic construct
  source 1..75: mol_type = other DNA
aataaaaattggtgaagtggaaagatataaagaaccaattcctatctctgctctaggtagtaatattaagccacc

SEQ ID NO: 600701 - DNA, 75 bp, synthetic construct
  source 1..75: mol_type = other DNA
ctggttcgcttaggtctggctaccgggctgcacattgtgatctgtctgccgttcgcggcgttgattgctctcagg

SEQ ID NO: 600702 - DNA, 75 bp, synthetic construct
  source 1..75: mol_type = other DNA
ctggatgacggtggaaaagaggctgacccgcagatcgtcgtctccctgctggataaaccttacgatgaagagggc

SEQ ID NO: 600703 - DNA, 75 bp, synthetic construct
  source 1..75: mol_type = other DNA
tgaagcaaccccacacctggttccattttcagtggctgagtgaagcacaggttgaaggtgaaaatcagctagccg

SEQ ID NO: 600704 - DNA, 75 bp, synthetic construct
  source 1..75: mol_type = other DNA
tatcaacggcaaacgctggtggacgtgggaacttttattgataactgcctgctcggtctggatttttcagaggga

SEQ ID NO: 600705 - DNA, 75 bp, synthetic construct
  source 1..75: mol_type = other DNA
aaagtatgctcttaataaccattggcaagtactgatatgtgacaggcgtggggaggatggacttaaccttcatgg

SEQ ID NO: 600706 - DNA, 75 bp, synthetic construct
  source 1..75: mol_type = other DNA
ctataggtgatctggttacatcgtcattattcaacggaatcgctaaaattgtgagcattatctctgcagaacgtg

SEQ ID NO: 600707 - DNA, 75 bp, synthetic construct
  source 1..75: mol_type = other DNA
attttttaaatttcaccagaggtttttatggggaagtttatgatgctctggatgaacgaaatctgggggcgtttg

SEQ ID NO: 600708 - DNA, 75 bp, synthetic construct
  source 1..75: mol_type = other DNA
tgaactatctggttgatagtgagttcagatataatttacgtatgaattctgagtatcgaaaatatcgctggaata

SEQ ID NO: 600709 - DNA, 75 bp, synthetic construct
  source 1..75: mol_type = other DNA
tcaaagcttctgaaactaaaacttggattggatgagtgtgtgagagatgtctatacacttccattattatttctt

SEQ ID NO: 600710 - DNA, 75 bp, synthetic construct
  source 1..75: mol_type = other DNA
ataaagtaaaaatttttatgaaaaaagaagaagattgcactctcattgtgtatggtgattgtttttccaggaaat

SEQ ID NO: 600711 - DNA, 75 bp, synthetic construct
  source 1..75: mol_type = other DNA
tctggctggagcgtataccaccgggctattagatatcctcacacccgattacgggaacatccgcctcagtaaaaa

SEQ ID NO: 600712 - DNA, 75 bp, synthetic construct
  source 1..75: mol_type = other DNA
attctttgctgcgcatgtgacgggatttatccgcgccgttgtcggggaactcatgaatgctttgccttctgattc

SEQ ID NO: 600713 - DNA, 75 bp, synthetic construct
  source 1..75: mol_type = other DNA
tccgcgttgcagtaacgtagctttcatcgatacactgcttatcactcccgggggtatgggtctggctgaatgtgg

SEQ ID NO: 600714 - DNA, 75 bp, synthetic construct
  source 1..75: mol_type = other DNA
ggaagatgattgtaccctcattgtgtatggtaattgtttttccatggagttatacgaacttgaatatcgtactga

SEQ ID NO: 600715 - DNA, 75 bp, synthetic construct
  source 1..75: mol_type = other DNA
gttatcagtgaaccagaagcaacgttatgttgctatgctgcaatactttataggtgagtgggaaagctggcatat

SEQ ID NO: 600716 - DNA, 75 bp, synthetic construct
  source 1..75: mol_type = other DNA
tgttgtaaaaaactggttagcttttccaggggattatattaacaaaaggggactgctgaatgtctctgttgatat

SEQ ID NO: 600717 - DNA, 75 bp, synthetic construct
  source 1..75: mol_type = other DNA
attaatattggcattgataaggaaagtgtggcaaagaaacttggacgcacaattgatccgacattttttccctca

SEQ ID NO: 600718 - DNA, 75 bp, synthetic construct
  source 1..75: mol_type = other DNA
atagtaggtcagactgatattattgatgttatattacgtctcactttctgccatgcagacgagcacagtaactgg

SEQ ID NO: 600719 - DNA, 75 bp, synthetic construct
  source 1..75: mol_type = other DNA
ttatggggaaatttatgatgctctggatgaacgaaatctgggggcgtttgaggaagctgcagacagacttgtttc

SEQ ID NO: 600720 - DNA, 75 bp, synthetic construct
  source 1..75: mol_type = other DNA
ccgttgtcagacgataactggcagcgactggcacaggtaaaggatctgacgccgggcgagatgacggcagaaccc

SEQ ID NO: 600721 - DNA, 75 bp, synthetic construct
  source 1..75: mol_type = other DNA
gtccgtcaatggcagaagatcgcagtacggtgacggcggcaaccggtatgaccgtgacgcctgccagctcctcgg

SEQ ID NO: 600722 - DNA, 75 bp, synthetic construct
  source 1..75: mol_type = other DNA
aaaccggtgcagtactatcccgggaaacatccgtgcgaaaaaccggcagaaatgctgcagcagataatcagcgcg

SEQ ID NO: 600723 - DNA, 75 bp, synthetic construct
  source 1..75: mol_type = other DNA
atgacggcagaatcctacgatgataactacctggatgatgaagacgcagactggaccgcgaccgggcaggggcag

SEQ ID NO: 600724 - DNA, 75 bp, synthetic construct
  source 1..75: mol_type = other DNA
gcttcgttttcaggagcctgtgcgctttcccggcgatgccctgctgacacgaaccgcgctgcttaaggccggaat

SEQ ID NO: 600725 - DNA, 75 bp, synthetic construct
  source 1..75: mol_type = other DNA
agttaccaacgtgggcaaaccctccgtggcggaagaacgcagcgaaattacgccggtcactgcaattaaggtgac

SEQ ID NO: 600726 - DNA, 75 bp, synthetic construct
  source 1..75: mol_type = other DNA
gttttacgctggcctggaaaccggggagaagaaggtcagaaagggcttataggctggtttgaaagcggggatgtg

SEQ ID NO: 600727 - DNA, 75 bp, synthetic construct
  source 1..75: mol_type = other DNA
cgcggactggaccgcgaccgggcaggggcagaagtctgcaggagataccagttttacgctggcctggaaaccggg

SEQ ID NO: 600728 - DNA, 75 bp, synthetic construct
  source 1..75: mol_type = other DNA
gtggtgaggatatcacctttaatcaggtggccaaatttactgtgccactacaaagggcttataggctggtttgaa

SEQ ID NO: 600729 - DNA, 75 bp, synthetic construct
  source 1..75: mol_type = other DNA
gatccaacttctgttgggtcataagaaactggaaagcacagtccgttatctgggcattgaagtcgatgatgcgtt

SEQ ID NO: 600730 - DNA, 75 bp, synthetic construct
  source 1..75: mol_type = other DNA
acccgagggctgggataaccagtgggcgggtgatgaagattacctgaagtggctggaccagtgtcttgcgcagtt

SEQ ID NO: 600731 - DNA, 75 bp, synthetic construct
  source 1..75: mol_type = other DNA
gcagagttgctggcgaatgacctctccgcggtcggtttttatcggctggcacatgtgttgggacaatttcgtaat

SEQ ID NO: 600732 - DNA, 75 bp, synthetic construct
  source 1..75: mol_type = other DNA
gtgcagtattatccgggcaaacatccctgtgaaaaaccggcggatatgttgcggcagataattgaggccagcagt

SEQ ID NO: 600733 - DNA, 75 bp, synthetic construct
  source 1..75: mol_type = other DNA
ccggcagtatgcggaactacagagtgaatataagcatctgcggcggtattttggcgtgacggcgcaggtgccgta

SEQ ID NO: 600734 - DNA, 75 bp, synthetic construct
  source 1..75: mol_type = other DNA
cgccataaatccgcactggtcatgcagaagtacagccgccagcaggcacgggaggcagagcagaaaacccgtgcg

SEQ ID NO: 600735 - DNA, 75 bp, synthetic construct
  source 1..75: mol_type = other DNA
aattacaggcactgtttgcccgggtggcagaagagaagcatcagcggggtgaactggaaaagccccaccaccagc

SEQ ID NO: 600736 - DNA, 75 bp, synthetic construct
  source 1..75: mol_type = other DNA
aagcttggcaatttgcacagtaaagacttcttgtttcggtctcggatcggaactaaccagcatatttcaacccgg

SEQ ID NO: 600737 - DNA, 75 bp, synthetic construct
  source 1..75: mol_type = other DNA
ccggcagtatacggaactgcagagtgaatataagcatctgcggcggtattttggcgtgacggcgcaggtgccgta

SEQ ID NO: 600738 - DNA, 75 bp, synthetic construct
  source 1..75: mol_type = other DNA
aaaggggacgaggactacttacgctggcttgatagctgtctggctgagtatgctcgcgttcttaaacctgctggc

SEQ ID NO: 600739 - DNA, 75 bp, synthetic construct
  source 1..75: mol_type = other DNA
aacgttcagcgccccctacagggtgcagttttacgaagctctgcgttttctgctggaaaataaacagccattaaa

SEQ ID NO: 600740 - DNA, 75 bp, synthetic construct
  source 1..75: mol_type = other DNA
gaatttgcatcaccatggttaagtacacgccttgacagcattatttaccgcgtccgccagggggatcaccttggg

SEQ ID NO: 600741 - DNA, 75 bp, synthetic construct
  source 1..75: mol_type = other DNA
ttggtgtgacggtgcaggtgccgtacaccgatgtgtggacgcataaaccggtgcagtactatcccgggaaacatc

SEQ ID NO: 600742 - DNA, 75 bp, synthetic construct
  source 1..75: mol_type = other DNA
ggatctgcgccttatcgatttcaacggtggcacactgcgtaacgccattccgcgtgaagcctttgcgaccatcgc

SEQ ID NO: 600743 - DNA, 75 bp, synthetic construct
  source 1..75: mol_type = other DNA
gggcagaatgtcaccctgactgtggctgttcagccggaaggggcgacggataaaaccttccgcgccacgtcggcg

SEQ ID NO: 600744 - DNA, 75 bp, synthetic construct
  source 1..75: mol_type = other DNA
accaacgtgggcaaaccttctgtagcggaagaacgcagcaaaattacgccggtcactgcgattaaggtgacgccg

SEQ ID NO: 600745 - DNA, 75 bp, synthetic construct
  source 1..75: mol_type = other DNA
gactccggtgaagtctgcgcgtttcgtatcaaatatcccaacggcactgttgatgttttccgtggctggctgagc

SEQ ID NO: 600746 - DNA, 75 bp, synthetic construct
  source 1..75: mol_type = other DNA
tcgctggcggaagatcggggtgaaatcacgccggtcaccggtattaccgtgacaccccagacggggaatgtggca

SEQ ID NO: 600747 - DNA, 75 bp, synthetic construct
  source 1..75: mol_type = other DNA
tcctcgatgctggaagtgctgggtgaagattatatccgcaccgcgcgcgccaaagggttgacccgccttagggtg

SEQ ID NO: 600748 - DNA, 75 bp, synthetic construct
  source 1..75: mol_type = other DNA
gccgcatcccggtttgggaagagttcgtgccgcgctttcaggccacgctggagcttggtgtctgcgcgatgattt

SEQ ID NO: 600749 - DNA, 75 bp, synthetic construct
  source 1..75: mol_type = other DNA
gatgactccaatccgttaaccggttttatgctaatcgacaccgccatctggggtgaagacggcaactttatcgat

SEQ ID NO: 600750 - DNA, 75 bp, synthetic construct
  source 1..75: mol_type = other DNA
ggcggtcattgtgcgtatgacacgctcctcgatgctggaagtgctgggtgaagattacatccgcaccgcgcgcgc

SEQ ID NO: 600751 - DNA, 75 bp, synthetic construct
  source 1..75: mol_type = other DNA
ccattacatttggggcgttatgcacggtgatttaggcatttcgatgaaaagccgcatcccggtttgggaagagtt

SEQ ID NO: 600752 - DNA, 75 bp, synthetic construct
  source 1..75: mol_type = other DNA
ccatcaaaagccaccattagcgtgaaagatatgacgattactgtgacgggggttaatgccggaaaagtgagtatc

SEQ ID NO: 600753 - DNA, 75 bp, synthetic construct
  source 1..75: mol_type = other DNA
ccggacgctaactctccggtaatgcatctggtacgtgaaacctatcagcgtctgttcaacaagacgccgaacatc

SEQ ID NO: 600754 - DNA, 75 bp, synthetic construct
  source 1..75: mol_type = other DNA
tgaaagggaacacgatcaccgtgaaaggtgttgcggcaggtaaagcgcagatccctgttgtcaccggcaatggtg

SEQ ID NO: 600755 - DNA, 75 bp, synthetic construct
  source 1..75: mol_type = other DNA
cacctcgatatggtgccacagaaaaacaacgacaccgtgcacgacttcactaaagatcctatccagccttatatt

SEQ ID NO: 600756 - DNA, 75 bp, synthetic construct
  source 1..75: mol_type = other DNA
aaaaggcgcatatcctggctggcagccggacgctaattctccggtgatgcatctggtacgtgaaacctatcagcg

SEQ ID NO: 600757 - DNA, 75 bp, synthetic construct
  source 1..75: mol_type = other DNA
aacctgccaccgcaggtatggaaaatcgtaaaccggtcgtcttacaagctcacctcgatatggtgccgcagaaaa

SEQ ID NO: 600758 - DNA, 75 bp, synthetic construct
  source 1..75: mol_type = other DNA
cggtaaaaggttccggcaccacgttctgggtttataccggaaatggcgatgcctgggcaaacccgctgtcagatg

SEQ ID NO: 600759 - DNA, 75 bp, synthetic construct
  source 1..75: mol_type = other DNA
aagaggtgatcacccgtaccgtgaagatcaccaatatcggccgtccgtcgctggcggaagatcagggggacatca

SEQ ID NO: 600760 - DNA, 75 bp, synthetic construct
  source 1..75: mol_type = other DNA
ggtcagaatatcaccctgaccgtggctgttcagccggaaggggcgacggataaaaccttccgcgccacgtcggcg

SEQ ID NO: 600761 - DNA, 75 bp, synthetic construct
  source 1..75: mol_type = other DNA
aagatatgacgattactgtgacgggggttaaggatggaaaagtcagcatccctgtgatttccggtaatggtcagt

SEQ ID NO: 600762 - DNA, 75 bp, synthetic construct
  source 1..75: mol_type = other DNA
atgccaacaccaaatcccctggagccggtaaaaggtgccggtaccactctgtgggtttacaacggcaaggctgat

SEQ ID NO: 600763 - DNA, 75 bp, synthetic construct
  source 1..75: mol_type = other DNA
ggtattccacgccgccttttcccccgtctggtggaggccggtgaacagattggcacactacagaacagcgccgca

SEQ ID NO: 600764 - DNA, 75 bp, synthetic construct
  source 1..75: mol_type = other DNA
aaggggcacgaatgatgatcgccccagccctgttagttggtttcgccaaagggattttgctgctggttggtaacg

SEQ ID NO: 600765 - DNA, 75 bp, synthetic construct
  source 1..75: mol_type = other DNA
gtggtgtgggttatcgccactctgattggcctgatctttaccatggtgtacgcctcacgagtgaaaaagaatcct

SEQ ID NO: 600766 - DNA, 75 bp, synthetic construct
  source 1..75: mol_type = other DNA
atgcccgatacgttggtgattatcttttttgttgctattttaaccagccttgccacctgggtagttccggtgggg

SEQ ID NO: 600767 - DNA, 75 bp, synthetic construct
  source 1..75: mol_type = other DNA
tctggtcggtgttaaccgtcaggttaccgtgctggcattccagtttggtgatggcttcagccacatcatttaccc

SEQ ID NO: 600768 - DNA, 75 bp, synthetic construct
  source 1..75: mol_type = other DNA
atgcccgatacgttggtgattatcttttttgttgccattttaaccagtcttgccacctgggtagttccggtgggg

SEQ ID NO: 600769 - DNA, 75 bp, synthetic construct
  source 1..75: mol_type = other DNA
gcgaccctgcttggactgctgtttattatgtccagcgtcgtagtgatcggcgctcagttgatgggctaccactaa

SEQ ID NO: 600770 - DNA, 75 bp, synthetic construct
  source 1..75: mol_type = other DNA
cgtttgttttgttgtgggggattagcattgaaggttcccttgtttataatgtcataaggttgtttccagaactgt

SEQ ID NO: 600771 - DNA, 75 bp, synthetic construct
  source 1..75: mol_type = other DNA
gggaggcaacgtttgtcattggcagaacgaatacatcggcatttcccggagtgtatcagtctctggggggagatg

SEQ ID NO: 600772 - DNA, 75 bp, synthetic construct
  source 1..75: mol_type = other DNA
gtcggaaaccagcgcagaatcctcaaaaacggctgccgcatcgtccgccagttcggcggcgtcatcggcatcatc

SEQ ID NO: 600773 - DNA, 75 bp, synthetic construct
  source 1..75: mol_type = other DNA
atcccggtgcagaatcgctggggtatgattcagatggacatgaaattatggccgttgatatttatgtaaaccctc

SEQ ID NO: 600774 - DNA, 75 bp, synthetic construct
  source 1..75: mol_type = other DNA
gtgatctatacgacgaatgccatcgagtcgctaaacagcgtgatccgccatgcgatcaaaaagcgtaaagtgttc

SEQ ID NO: 600775 - DNA, 75 bp, synthetic construct
  source 1..75: mol_type = other DNA
acaggcttatgcgaaatccggcgcagtgcagtgtggcttttgtacgccagggttgattatggccaccacggcaat

SEQ ID NO: 600776 - DNA, 75 bp, synthetic construct
  source 1..75: mol_type = other DNA
tctcttttcactcggcggtgcggtatttggcatgggggaagaggccgtcgcctttgccatcatcattgccccact

SEQ ID NO: 600777 - DNA, 75 bp, synthetic construct
  source 1..75: mol_type = other DNA
atggaaatttactggacgcttaaagctcaggatgaccttgagcgtatctatcgtttcgcccttcagtatagccgc

SEQ ID NO: 600778 - DNA, 75 bp, synthetic construct
  source 1..75: mol_type = other DNA
ttactaagtgaatttaaggtgtttcattcacctaccgggcattattggcagttgggggattttgacaacattgcc

SEQ ID NO: 600779 - DNA, 75 bp, synthetic construct
  source 1..75: mol_type = other DNA
ggagcaacagggaaataaactgcatatcagttggggaaagatcggtaccaacgggcaaaaccaggtaaaaagttt

SEQ ID NO: 600780 - DNA, 75 bp, synthetic construct
  source 1..75: mol_type = other DNA
gcgaaatctgacaaagcaagcgaaggtgaactgctggcgcaggttgaaccagaagatctgattaagtttggtctg

SEQ ID NO: 600781 - DNA, 75 bp, synthetic construct
  source 1..75: mol_type = other DNA
atccctgagttcatcggtcgtctgccagttgtggcaacgctgaatgaactgagcgaagaagctttgattcagatc

SEQ ID NO: 600782 - DNA, 75 bp, synthetic construct
  source 1..75: mol_type = other DNA
tgtatatctgcgacgaatgtgttgatttatgtaacgacatcattcgcgaagagattaaagaagttgcaccgcatc

SEQ ID NO: 600783 - DNA, 75 bp, synthetic construct
  source 1..75: mol_type = other DNA
ttgcgcttacggttgggaagctgcgcgttgagctggaaggcaaagacagcaaaatagccaatcttaccgccgaac

SEQ ID NO: 600784 - DNA, 75 bp, synthetic construct
  source 1..75: mol_type = other DNA
ggtgttcaacactgtaccaggtcactggaaaacctaaaaggcacaatccatgagaaaaataaaaacatggattac

SEQ ID NO: 600785 - DNA, 75 bp, synthetic construct
  source 1..75: mol_type = other DNA
gggtgcgacactgcttggactgctgtttattatgtccagcgtggtggtgataggcgctcagttaatgggctacca

SEQ ID NO: 600786 - DNA, 75 bp, synthetic construct
  source 1..75: mol_type = other DNA
gaggcttccggagctcggtgggaagagatcgatcttgatgcgaagctttggacgattccagccgaacggatgaag

SEQ ID NO: 600787 - DNA, 75 bp, synthetic construct
  source 1..75: mol_type = other DNA
attttcacgaggattaccaaacggtaatggcatacaaagtttctgaggtcatcgctgcaatccgcgccgctggca

SEQ ID NO: 600788 - DNA, 75 bp, synthetic construct
  source 1..75: mol_type = other DNA
gtgagcaagattgactatcaggcactgcgtgaaaaggcagagaaagcaactaaaggaagctacatcgtagggcat

SEQ ID NO: 600789 - DNA, 75 bp, synthetic construct
  source 1..75: mol_type = other DNA
cgtcaacaagtgccgggcaggcctcagccagtgccaccgctgccggaaaatcggcagaaagtgccgcatcgtctg

SEQ ID NO: 600790 - DNA, 75 bp, synthetic construct
  source 1..75: mol_type = other DNA
ctgctgcaagcgcaggcgcacatgcacatactgtcggtattggtgctcatacgcactccgttgcgattggctcac

SEQ ID NO: 600791 - DNA, 75 bp, synthetic construct
  source 1..75: mol_type = other DNA
tgccagcgctttgttaaaacctttgattaagtctgaatccgaacttacggtggacgccagcataaccgcaaaacc

SEQ ID NO: 600792 - DNA, 75 bp, synthetic construct
  source 1..75: mol_type = other DNA
ttttgaacgttatggttttcaggtagttaagcagcagaacgttgaatgccggggagagtggttgactaattttta

SEQ ID NO: 600793 - DNA, 75 bp, synthetic construct
  source 1..75: mol_type = other DNA
gatagtacagctcagcagtgcgaccaacagcacttccgagtcactggcggcaacgccaaaagccgttaaggccgc

SEQ ID NO: 600794 - DNA, 75 bp, synthetic construct
  source 1..75: mol_type = other DNA
tggtaatcacagccatagagatggccgtcgatttaaccccagtgtttttaaagatacttatcaatatggttatac

SEQ ID NO: 600795 - DNA, 75 bp, synthetic construct
  source 1..75: mol_type = other DNA
gcgcagcttcctcggcaacggcgacagcaaattctgcgaaggcggcaaaaacgtccgagacgaacgccaggtctt

SEQ ID NO: 600796 - DNA, 75 bp, synthetic construct
  source 1..75: mol_type = other DNA
gcatcagcaaaagcctctgaggcatcaaaaagtgctaccgctgcagagtcctcaaaaagcgcggcagctaccagc

SEQ ID NO: 600797 - DNA, 75 bp, synthetic construct
  source 1..75: mol_type = other DNA
cagcgtattaacgaaatcatgatctacgccgtcaacactggcctgattgatgcaaacccggcatctggtattggt

SEQ ID NO: 600798 - DNA, 75 bp, synthetic construct
  source 1..75: mol_type = other DNA
gggagcatttaaccatccctactggatgtgcaagggttcctggtcttatggcaataataaaatcattactgatac

SEQ ID NO: 600799 - DNA, 75 bp, synthetic construct
  source 1..75: mol_type = other DNA
acggcggcagcacagagcaagagtacggcagaatccgcagcaacgcgcgccgagacagcagcaaaacgggcagag

SEQ ID NO: 600800 - DNA, 75 bp, synthetic construct
  source 1..75: mol_type = other DNA
gttcggcggcgtcatcggcctcatcggcgtctgcttcaaaagatgaggcgaccagacaagcgtcagcagcgaagg

SEQ ID NO: 600801 - DNA, 75 bp, synthetic construct
  source 1..75: mol_type = other DNA
caccgaaagcggtaaagacagcatatgaccttgctaacgggaaatataccgctcaagacgctacgacagcacaaa

SEQ ID NO: 600802 - DNA, 75 bp, synthetic construct
  source 1..75: mol_type = other DNA
gcatcaacaaaggccactgaagcatcaaaaagtgctgccgccgcagagtcttcaaaaagcgcggcagctaccagt

SEQ ID NO: 600803 - DNA, 75 bp, synthetic construct
  source 1..75: mol_type = other DNA
ccgtcacatgccgggaccatcaccgtgtatgaagattctcaaccggggacgctgaatgattttctcggtgccatg

SEQ ID NO: 600804 - DNA, 75 bp, synthetic construct
  source 1..75: mol_type = other DNA
gcatacgcacagtgtgagcggtacagccgcaagtgccggaaaccatactcatagtgtcacaggcgcatcagcagt

SEQ ID NO: 600805 - DNA, 75 bp, synthetic construct
  source 1..75: mol_type = other DNA
taccttctgcccgtaaggtgaatggtaaggcgctttcagcggatataacactgacgccgaaagatattggtacgc

SEQ ID NO: 600806 - DNA, 75 bp, synthetic construct
  source 1..75: mol_type = other DNA
tggtgctttatggcagcgcacatcggtagggtttacaaattttgcctgggtcaatacatctggtgatacttacga

SEQ ID NO: 600807 - DNA, 75 bp, synthetic construct
  source 1..75: mol_type = other DNA
aacgggaaatataccgctcaggacgctacgacagcacaaaaaggaattgtccagctcagtagtgcaaccaacagc

SEQ ID NO: 600808 - DNA, 75 bp, synthetic construct
  source 1..75: mol_type = other DNA
aaccaacagcacgtctgaaacgcttgccgcgaccccgaaagcggttaaagctgctaatgacaatgcaaacgggcg

SEQ ID NO: 600809 - DNA, 75 bp, synthetic construct
  source 1..75: mol_type = other DNA
acccactcagtatcaggtaccgctacaagtgctggggcacatgcacacactgttggtattggcgctcatacgcac

SEQ ID NO: 600810 - DNA, 75 bp, synthetic construct
  source 1..75: mol_type = other DNA
tacgcacagtctgagtggctctacggggtctgccggtgatcatactcatggtaatggtattcgttggccaggagg

SEQ ID NO: 600811 - DNA, 75 bp, synthetic construct
  source 1..75: mol_type = other DNA
atacaagcacttttaaagacacctatcagtatggttctacagctgtcggaagtaactcataccaggtacaagggg

SEQ ID NO: 600812 - DNA, 75 bp, synthetic construct
  source 1..75: mol_type = other DNA
acgagcgcagcctcgagcgccagtaatgccgcttcctcggcaacggcggcaggaaattccgcgaaggcggcaaag

SEQ ID NO: 600813 - DNA, 75 bp, synthetic construct
  source 1..75: mol_type = other DNA
ctggaaggtccggaagaacaggttaaaatgatatatcgggctatatgccaggatcctcggcactataatattgtt

SEQ ID NO: 600814 - DNA, 75 bp, synthetic construct
  source 1..75: mol_type = other DNA
tatatgaaaggcgaggcaatcccgtggcaacgttatccttttgtcaccatgatttccgtcgagcagaaaggttaa

SEQ ID NO: 600815 - DNA, 75 bp, synthetic construct
  source 1..75: mol_type = other DNA
gttatgccaaagcgaaactgaacgttgagcagctgctttatcttgatggcacgatttcacatatgtatatgaaag

SEQ ID NO: 600816 - DNA, 75 bp, synthetic construct
  source 1..75: mol_type = other DNA
gccatatacgtgacgacgaacctgtcaaaaaaatcgaagaaatggtttcgatagcaaatcgcaggaacatgcggt

SEQ ID NO: 600817 - DNA, 75 bp, synthetic construct
  source 1..75: mol_type = other DNA
ttgatgaaataaaggccaatgctctggtgcctgaacaaatcatcgttgaatttactgaaagtgaagtcatatctc

SEQ ID NO: 600818 - DNA, 75 bp, synthetic construct
  source 1..75: mol_type = other DNA
acaaatcatcgttgaatttactgaaagtgaagtcatatctcggtttgatgagtttgccgaagcgattaaatcgct

SEQ ID NO: 600819 - DNA, 75 bp, synthetic construct
  source 1..75: mol_type = other DNA
ctgctcctgctcctgctactgctactgctactgctactgctactgctactgctcttctttttcctgccgctctga

SEQ ID NO: 600820 - DNA, 75 bp, synthetic construct
  source 1..75: mol_type = other DNA
aagtgcgatctgaacctgtacaagaaccgctcgcgcaaaaacaagcgtggagcacatccaagcttagcgcacacg

SEQ ID NO: 600821 - DNA, 75 bp, synthetic construct
  source 1..75: mol_type = other DNA
tcggggtggggtatagccgtggtgccggtgtggagtccccgtggaatgcggtggtcggtgtgaactggtcgttct

SEQ ID NO: 600822 - DNA, 75 bp, synthetic construct
  source 1..75: mol_type = other DNA
acgatttcacatatgtatgtgaaaggcggtgcgattccctggcaacgttattccttcgtcaccatgatttccgtc

SEQ ID NO: 600823 - DNA, 75 bp, synthetic construct
  source 1..75: mol_type = other DNA
atttgtctgttactgatgttgttcctgctactgctactgctactgctactgctactgctactgctactgttcttc

SEQ ID NO: 600824 - DNA, 75 bp, synthetic construct
  source 1..75: mol_type = other DNA
gggcttctgtttcttcatgcctgtcatttgtctgttactgatgatgttcctgctactgctactgctactgctact

SEQ ID NO: 600825 - DNA, 75 bp, synthetic construct
  source 1..75: mol_type = other DNA
agaagagtggatgtggcttgaatccgcaggaattgagatgtttcagggagatctgtttgccaaagctaaattgaa

SEQ ID NO: 600826 - DNA, 75 bp, synthetic construct
  source 1..75: mol_type = other DNA
gatgcaaaccatgatgttttcgattatgtgatgctcagaaaggagtttacagaggataagcaaggtaaccccacc

SEQ ID NO: 600827 - DNA, 75 bp, synthetic construct
  source 1..75: mol_type = other DNA
agtattagcctctattcatggtgtacctttggtacaactttcaatgatggatttgcgattagtgtgctccagagt

SEQ ID NO: 600828 - DNA, 75 bp, synthetic construct
  source 1..75: mol_type = other DNA
ggctatgaaaagattgatgagggtttagattctttttattctagcagagataacttaactcttggacctattgta

SEQ ID NO: 600829 - DNA, 75 bp, synthetic construct
  source 1..75: mol_type = other DNA
gatgcaaaccatgatgttttcgattttgtgatgctaagaaaggagtttactgaggataagcaaggtaaccccacc

SEQ ID NO: 600830 - DNA, 75 bp, synthetic construct
  source 1..75: mol_type = other DNA
cctttggtacaactttcaatgatggatttgcgattagtgtgctgcagagtgatccggatgaagttgtcaaaatgc

SEQ ID NO: 600831 - DNA, 75 bp, synthetic construct
  source 1..75: mol_type = other DNA
attctggtacaggaaaatccgctcgccaacaccaccggccatcagggctacgtcgcaccggaaaaggctgtcatg

SEQ ID NO: 600832 - DNA, 75 bp, synthetic construct
  source 1..75: mol_type = other DNA
ttgaacgggcagagcaggaaaaaaatagcgctggcgcaggccgacggaaacgacgctgacgactggcgcacggcc

SEQ ID NO: 600833 - DNA, 75 bp, synthetic construct
  source 1..75: mol_type = other DNA
gaacgtgaacgcctgaaaggggcgtgtgacagcacggccaccgcctaccggaaggcacatcatcacctgctgagt

SEQ ID NO: 600834 - DNA, 75 bp, synthetic construct
  source 1..75: mol_type = other DNA
tgccgctattgcactatggccggttggtcgtcgcgtggtatcggtagaaacagcgcaagctgcgcgtgaagccaa

SEQ ID NO: 600835 - DNA, 75 bp, synthetic construct
  source 1..75: mol_type = other DNA
ccttatggcaatgaagctattcatgttgatgaactaaacccagcgggcaaaaatgtgttgcttaacactggcggt

SEQ ID NO: 600836 - DNA, 75 bp, synthetic construct
  source 1..75: mol_type = other DNA
cacatggattatgaggtggcaggcacaccggcacagcgcaaggtgtggcaggacaaaatagaccagcagggagca

SEQ ID NO: 600837 - DNA, 75 bp, synthetic construct
  source 1..75: mol_type = other DNA
atgatatctctccctgccggttcacgtatctggctggttgccggtatcaccgacatgcgaaatggttttaacggc

SEQ ID NO: 600838 - DNA, 75 bp, synthetic construct
  source 1..75: mol_type = other DNA
cgggttttgatttcagcgatgcgctggacgatgacggcgtttactcttatcgcctgactggtcttgctcgttctg

SEQ ID NO: 600839 - DNA, 75 bp, synthetic construct
  source 1..75: mol_type = other DNA
ggacgaccgataaacgtgatgacaaacagtttacctggcgtggtggtgttaactacctgtttgataatggcgtaa

SEQ ID NO: 600840 - DNA, 75 bp, synthetic construct
  source 1..75: mol_type = other DNA
caaaacactcgctgcgtaaaatcgcagtcgtagtcgccacagcggttagcggcatgtctgtttatgcacaggcgg

SEQ ID NO: 600841 - DNA, 75 bp, synthetic construct
  source 1..75: mol_type = other DNA
attcaaaaagtgccacagtctatttctgttgtgaccgccgaagagatggcgctgcatcagcctaagtcagtaaaa

SEQ ID NO: 600842 - DNA, 75 bp, synthetic construct
  source 1..75: mol_type = other DNA
tatgacgactctgtgccgctgttgaatctgtacaatccggtatataccgactttgacttcaacacgaaagacccg

SEQ ID NO: 600843 - DNA, 75 bp, synthetic construct
  source 1..75: mol_type = other DNA
taatgacatcaacgcctggtttggttacgacgactctgtgccactgctcaatcctgagagatcccctcataattt

SEQ ID NO: 600844 - DNA, 75 bp, synthetic construct
  source 1..75: mol_type = other DNA
gcaacaaaacagcggacaatgatgggactcggagccttccccgccctatcgcttgctgatgcccgagggttaaga

SEQ ID NO: 600845 - DNA, 75 bp, synthetic construct
  source 1..75: mol_type = other DNA
tacgcaaaagacatttggcgctcactggagaaagatgtattccctgccatcggtgagatccccgttcagcaaatc

SEQ ID NO: 600846 - DNA, 75 bp, synthetic construct
  source 1..75: mol_type = other DNA
atgctggaacgcgctgaaattatgcgtggcccggtttccgtgctttacggtaaaagcagtcctggcggcctgttg

SEQ ID NO: 600847 - DNA, 75 bp, synthetic construct
  source 1..75: mol_type = other DNA
ttatgttcaggatcaggcgcagtgggataaagtgctggtcaccctgggcggtcgttatgactgggcagatcaaga

SEQ ID NO: 600848 - DNA, 75 bp, synthetic construct
  source 1..75: mol_type = other DNA
ctttggactggagtttgagaaatccgcctttggtaagtacaacgttgataatgctgtcaacgctaacttccgtta

SEQ ID NO: 600849 - DNA, 75 bp, synthetic construct
  source 1..75: mol_type = other DNA
tttcggtcggtacgcgtggtgcgtccaacacttatgaccacctgatcatccgtggttttgctgcagaaggccaaa

SEQ ID NO: 600850 - DNA, 75 bp, synthetic construct
  source 1..75: mol_type = other DNA
caaatgactcgcgaacaagctcttgagaggcttttaaagccagaaatggatgaacattttcttgaacaagagttt

SEQ ID NO: 600851 - DNA, 75 bp, synthetic construct
  source 1..75: mol_type = other DNA
gttgatgccggctggaatacagatcaggctgttggtaatattgaaaaacttattgaaggccttggtttagaactt

SEQ ID NO: 600852 - DNA, 75 bp, synthetic construct
  source 1..75: mol_type = other DNA
ctcccgcctgattatgctcagcgaccagtatcactggtcccttctggtcaaaatagatgaagaaacgctctgctt

SEQ ID NO: 600853 - DNA, 75 bp, synthetic construct
  source 1..75: mol_type = other DNA
caaggtgcaccttactccggctcagttatccatgcttcttgaaggtatcaactggaagcacccgaaacgaacgga

SEQ ID NO: 600854 - DNA, 75 bp, synthetic construct
  source 1..75: mol_type = other DNA
aagagaatgcgcaagactacaaggttacccagactcatatatcttacacccaaaagatagcatggcatataaaca

SEQ ID NO: 600855 - DNA, 75 bp, synthetic construct
  source 1..75: mol_type = other DNA
atttagtattcccaaaaaaacctacaaggattataaaaataagcgttggttgattagtttaggtacaaatatcct

SEQ ID NO: 600856 - DNA, 75 bp, synthetic construct
  source 1..75: mol_type = other DNA
accgatgcggaatacaccaccgatactacctataaaggcaatacgcctgcacaggtgccaaaacacatggcttcg

SEQ ID NO: 600857 - DNA, 75 bp, synthetic construct
  source 1..75: mol_type = other DNA
ggaaggatggtaatattttcgcaccgtctaaaggtaagcagtatgaagtcggcgtgaaatatgtaccggaagatc

SEQ ID NO: 600858 - DNA, 75 bp, synthetic construct
  source 1..75: mol_type = other DNA
aaacacttatgatcatttgattattcgtggttttgcagcagaaggccaaagccagaataactatctcaacggtct

SEQ ID NO: 600859 - DNA, 75 bp, synthetic construct
  source 1..75: mol_type = other DNA
aagaagatttttggcaattgcaccactatcgcgacgaataataaatttgtggtgctgaaatcggtgaaactgggg

SEQ ID NO: 600860 - DNA, 75 bp, synthetic construct
  source 1..75: mol_type = other DNA
aagaagattttcggcaactgcaccactattgcgacgaataataaatttgtggtgctgaaagcggtgaagctgggg

SEQ ID NO: 600861 - DNA, 75 bp, synthetic construct
  source 1..75: mol_type = other DNA
ccgatgcgccgcagaccgttagctggaagctggaaggtactgactggactatccacaaccatgcgaatgtcttct

SEQ ID NO: 600862 - DNA, 75 bp, synthetic construct
  source 1..75: mol_type = other DNA
cagtctgaagaacaagtgcaggtctccatggccagcgctgacgactggagcgcatttgcggaagatctcaacgct

SEQ ID NO: 600863 - DNA, 75 bp, synthetic construct
  source 1..75: mol_type = other DNA
aatatccggcggccacattccgccagatgatgaccctgttacagcagggatggccacagctcatgcaggatgtac

SEQ ID NO: 600864 - DNA, 75 bp, synthetic construct
  source 1..75: mol_type = other DNA
acaactgcaggtctccatggccagcgctgacgactggagcgcatttgcggaagacctcaacgctgatgccactgt

SEQ ID NO: 600865 - DNA, 75 bp, synthetic construct
  source 1..75: mol_type = other DNA
gcggacgtaacattgtcgcctgccagggtaaccggatttgccagaaagccaataccgacaccacaggtttatccc

SEQ ID NO: 600866 - DNA, 75 bp, synthetic construct
  source 1..75: mol_type = other DNA
gactggaaaaactgatttatcccagtccttatcatctgaaaacagttattgtcggatgcccgaatgattgtgcca

SEQ ID NO: 600867 - DNA, 75 bp, synthetic construct
  source 1..75: mol_type = other DNA
agttctggcaggttcgcctgggaggaagaaccggtaaaaaaacgccacgggcagggaaaattttccttaactggg

SEQ ID NO: 600868 - DNA, 75 bp, synthetic construct
  source 1..75: mol_type = other DNA
atcatctgttctccaatgactagtctaaaaactagtattaagactatcacttatttaagtgatactggttgtctg

SEQ ID NO: 600869 - DNA, 75 bp, synthetic construct
  source 1..75: mol_type = other DNA
gggaacaaaaacaactggccctgtcttctcctgcgatgaacatcaactacccccctcgtggttctcagataacca

SEQ ID NO: 600870 - DNA, 75 bp, synthetic construct
  source 1..75: mol_type = other DNA
ccttcaagcatctgacggaagaaatgcgccgtaaattgctggatatttcccgcacatcggaaaagtcttcccgct

SEQ ID NO: 600871 - DNA, 75 bp, synthetic construct
  source 1..75: mol_type = other DNA
ctgctgaagcgctggttaccccgtccacaggaaatgtcgatggatgccggcgatccggtcacagaatttcgtcag

SEQ ID NO: 600872 - DNA, 75 bp, synthetic construct
  source 1..75: mol_type = other DNA
ctgaccgatttcaatgacctggacgccagccggggacgggacaactttcagaatgccatgaatgcacagttaaaa

SEQ ID NO: 600873 - DNA, 75 bp, synthetic construct
  source 1..75: mol_type = other DNA
tatgccgcgtaccaaccataacggtatgcagcatattaccctggcggaagagaacgatcagcaaatgtgggatga

SEQ ID NO: 600874 - DNA, 75 bp, synthetic construct
  source 1..75: mol_type = other DNA
atgatgagtgtggatattgatatcattaaagcccgggcaaacaacgaatatcgtctttcgaaagtccgcggcgaa

SEQ ID NO: 600875 - DNA, 75 bp, synthetic construct
  source 1..75: mol_type = other DNA
gaatcccgcaccagtaatgacatctggacagagtgcttcctgcatgttgatcagaacggacgccggatttattca

SEQ ID NO: 600876 - DNA, 75 bp, synthetic construct
  source 1..75: mol_type = other DNA
gaagatcagaggtcatatcgatgcagattctggtacgctgaataatgttgtgattgccgagaactgtaccatcaa

SEQ ID NO: 600877 - DNA, 75 bp, synthetic construct
  source 1..75: mol_type = other DNA
agaatgtggggctggtgatccgcaatgataaaattgaagtttatgatgaaaacggaagactggctgtccgaatcg

SEQ ID NO: 600878 - DNA, 75 bp, synthetic construct
  source 1..75: mol_type = other DNA
tttgacccgaacaacccggataacaccgcctatccgtttgcggtatcaggtggcaaggttgtgatcccgaaagcg

SEQ ID NO: 600879 - DNA, 75 bp, synthetic construct
  source 1..75: mol_type = other DNA
ttgacagatacgacaatcctgtttacacgcgcaccaacctcgggaacaccgtttcaggagtatgggatgtggcgg

SEQ ID NO: 600880 - DNA, 75 bp, synthetic construct
  source 1..75: mol_type = other DNA
gcaactgaccattcgttactctaatcagaatgtggggctggtgatccgcaatgataaaattgaagtttatgatga

SEQ ID NO: 600881 - DNA, 75 bp, synthetic construct
  source 1..75: mol_type = other DNA
agcgcgtagcgcaggaaatgcaaaaagagatcgctctcatcctgcagcgtgaaattaaagatcctcgtctgggca

SEQ ID NO: 600882 - DNA, 75 bp, synthetic construct
  source 1..75: mol_type = other DNA
aatgtctcgtgacctggcgtatgcgaaagtatatgtgacgttccttaacgacaaagatgaagacgcggttaaagc

SEQ ID NO: 600883 - DNA, 75 bp, synthetic construct
  source 1..75: mol_type = other DNA
aaacgtattggttttggaggaaagctagttgctcatggcctccgatctattgcaagtacagcaatgaatgaagct

SEQ ID NO: 600884 - DNA, 75 bp, synthetic construct
  source 1..75: mol_type = other DNA
gacccgaacaacccggataacacagcctatccgtttgcggtatcaggtggcaaggttgtgatcccgaaagcgatg

SEQ ID NO: 600885 - DNA, 75 bp, synthetic construct
  source 1..75: mol_type = other DNA
aatttgaaactgttgatgacgttcgggaacatcgcattgattctactggctgcatcttccagcttactaactccc

SEQ ID NO: 600886 - DNA, 75 bp, synthetic construct
  source 1..75: mol_type = other DNA
ggcgaagtggagctgattgaagggacagggcagatcggctacgacggtaaacacagttacaacggacttttcgtc

SEQ ID NO: 600887 - DNA, 75 bp, synthetic construct
  source 1..75: mol_type = other DNA
acacagcaaaggctataacgttgacgccgctgtcgccgaatttaacgccttcaaacatctgacggaagaaatgcg

SEQ ID NO: 600888 - DNA, 75 bp, synthetic construct
  source 1..75: mol_type = other DNA
gaaaacttgtttgccatcggttcagtgctgggcggatttgatcctatcgctcagggatgcggcggcggcgtttgt

SEQ ID NO: 600889 - DNA, 75 bp, synthetic construct
  source 1..75: mol_type = other DNA
ggcgatgaagtgaaaaaagtgacctgtaaaaatggcgtagtgaatgaaatctggacccgcaatcacgccgatatc

SEQ ID NO: 600890 - DNA, 75 bp, synthetic construct
  source 1..75: mol_type = other DNA
tcaaagagcattatgtggacacgacgccaaccggacataaagccagtattctcaaatctttttgcgcgatatttc

SEQ ID NO: 600891 - DNA, 75 bp, synthetic construct
  source 1..75: mol_type = other DNA
ctgtttctacgttaatctcccagacttctctggcgagtggggttgcattaagttctacccgcgtgatttatgacg

SEQ ID NO: 600892 - DNA, 75 bp, synthetic construct
  source 1..75: mol_type = other DNA
aaccgctgaaattgaactgccggaactggatgtgctgcgcaacaacgccaccgagtttcgcgcggtgaatatcgc

SEQ ID NO: 600893 - DNA, 75 bp, synthetic construct
  source 1..75: mol_type = other DNA
tcgccagaagtccccgtctggccgctgcccgcgaagaaaatatgtgtagtgggaattagcggcctgatggatttt

SEQ ID NO: 600894 - DNA, 75 bp, synthetic construct
  source 1..75: mol_type = other DNA
ggaggcactggtgatcggcaacctcgtttttacaccggtccacactgaggaaaaaaccatgactccgacagaata

SEQ ID NO: 600895 - DNA, 75 bp, synthetic construct
  source 1..75: mol_type = other DNA
aaatcttgaacacgaagagtttcccgacaggacagcgctctaccgtgttgacggcgaaccagccttcctggacag

SEQ ID NO: 600896 - DNA, 75 bp, synthetic construct
  source 1..75: mol_type = other DNA
ggcacaacctggacgagattattaaaaatcttgaacacgaagagtttcccgacaggacagcgctctaccgtgttg

SEQ ID NO: 600897 - DNA, 75 bp, synthetic construct
  source 1..75: mol_type = other DNA
caaaaatgaaggtactgccgaaaatattcagatagagctgagggatgaccaggatgctgcgttaaaaaatggcga

SEQ ID NO: 600898 - DNA, 75 bp, synthetic construct
  source 1..75: mol_type = other DNA
tgacgatgataccgggcttgtgagttatcacgatcaacaaggtaacgcgatgcaaattaaccgcgatgatgtctc

SEQ ID NO: 600899 - DNA, 75 bp, synthetic construct
  source 1..75: mol_type = other DNA
atgaaaaaatgggcagtaataatttctgcagtcggactggcgtttgctgtttccgggtgttccagtgattacgtc

SEQ ID NO: 600900 - DNA, 75 bp, synthetic construct
  source 1..75: mol_type = other DNA
tcagtttactgggtcaatgttaaagcgattccctcaaaaagtgatgatagtgaaggtaaaaatgtgctgcaaatt

SEQ ID NO: 600901 - DNA, 75 bp, synthetic construct
  source 1..75: mol_type = other DNA
ccattatacctgcttataacgaaggcccgtgtctggcgcagtcactggataatctgctgcgtaacccttattttt

SEQ ID NO: 600902 - DNA, 75 bp, synthetic construct
  source 1..75: mol_type = other DNA
gagtccgggcatgacacttcaccgggtcgctggttgtgccggtgatggatctgaacggcagatccgcgagatgta

SEQ ID NO: 600903 - DNA, 75 bp, synthetic construct
  source 1..75: mol_type = other DNA
aacgttaaacattaaccttccagccggtacaggcaatgcgaacgaagtgaaatacagcattattaatgatttcgg

SEQ ID NO: 600904 - DNA, 75 bp, synthetic construct
  source 1..75: mol_type = other DNA
cgaaatttggtgctgtacattcatactccatcggtcccgttgagcgattcaatcgcgtgattaccgattcgaaaa

SEQ ID NO: 600905 - DNA, 75 bp, synthetic construct
  source 1..75: mol_type = other DNA
tggcagtcggttgatatgccggaaattcttcaccactgccaacgttataaggaaaaatatcatgtacagaaaatt

SEQ ID NO: 600906 - DNA, 75 bp, synthetic construct
  source 1..75: mol_type = other DNA
gcaaaaaacaaagcgagtgcatctgttgggttgtctgccagcgaacatttgcgttactccgaaaggttaatttgc

SEQ ID NO: 600907 - DNA, 75 bp, synthetic construct
  source 1..75: mol_type = other DNA
atgaaaagtaaatttgttgcgttggctctctctctgttcctctcccagtctgttctggcgggtggcgttgggctt

SEQ ID NO: 600908 - DNA, 75 bp, synthetic construct
  source 1..75: mol_type = other DNA
gagtttctcatccagtcctgggtggatgatgctgcgggtaacaaaaaaacaccatttattattaccccgccgctg

SEQ ID NO: 600909 - DNA, 75 bp, synthetic construct
  source 1..75: mol_type = other DNA
ttcaagcttgatccagaaaagaacaatattttgcgtattgtgaatattacgcccggcctgcctcaggatcgcgaa

SEQ ID NO: 600910 - DNA, 75 bp, synthetic construct
  source 1..75: mol_type = other DNA
ggcaataaaaaaacaccgtttattattacaccgccattattcaaacttgatcctgataaaaataacgtcttacgt

SEQ ID NO: 600911 - DNA, 75 bp, synthetic construct
  source 1..75: mol_type = other DNA
ggctgaatgaaaaactaccttgttcactgatgcttctgccaacactaccaccttcagtgctggggatacgtctgc

SEQ ID NO: 600912 - DNA, 75 bp, synthetic construct
  source 1..75: mol_type = other DNA
tttgatgatgaggaagaggtgatgctggtcgaagcggactcctgcggtgaagctgaagcggcattccagcaacat

SEQ ID NO: 600913 - DNA, 75 bp, synthetic construct
  source 1..75: mol_type = other DNA
gatcccggccgatttacgtattttgcaggcgcgcgatctgttcatcgctcaggcgtcattaaccggtgagtctct

SEQ ID NO: 600914 - DNA, 75 bp, synthetic construct
  source 1..75: mol_type = other DNA
tcccgccttctttaagtgcgcattgcctgaaaatggcggtgatgcccgaagaagaattgtggaaaacgttcgaca

SEQ ID NO: 600915 - DNA, 75 bp, synthetic construct
  source 1..75: mol_type = other DNA
atttgcgccgttatttttggtgcataaggctgggaagatatagagtatttggggaaacacatcccgattttttga

SEQ ID NO: 600916 - DNA, 75 bp, synthetic construct
  source 1..75: mol_type = other DNA
cgtcaggcgtgatccctgatatgcgtggctggacgattaagggcaaccccgccagtggccgggccgtattgtctc

SEQ ID NO: 600917 - DNA, 75 bp, synthetic construct
  source 1..75: mol_type = other DNA
tgccggctctgcgctgggcattgccggataccaggtctttgaaatttatctgcgttacctgcgcagaaaatacgg

SEQ ID NO: 600918 - DNA, 75 bp, synthetic construct
  source 1..75: mol_type = other DNA
gaaaatggtgatccaatcttcagtaccgaagatatcgaaggacgtattaatctaaatgctcttgattcacaaatt

SEQ ID NO: 600919 - DNA, 75 bp, synthetic construct
  source 1..75: mol_type = other DNA
atttaatcgcgacatggcagattgacggggcttattttgaatgtgttgatgaggctgatctgacattacttactg

SEQ ID NO: 600920 - DNA, 75 bp, synthetic construct
  source 1..75: mol_type = other DNA
gcgcagtccattatgcggggagccagtacgacgaagttgatatttcaaaagtggataactttatgaagctgaaag

SEQ ID NO: 600921 - DNA, 75 bp, synthetic construct
  source 1..75: mol_type = other DNA
atggccgatactgcgctgaaatccgccaatgtggatgtcgtggcatacagctccccagctcatggcaccagcttc

SEQ ID NO: 600922 - DNA, 75 bp, synthetic construct
  source 1..75: mol_type = other DNA
ttcgccttaaaaagcggctctgccacattaacgtcattaacagcggtgaccgatcaaaacggaatcgcgacaaca

SEQ ID NO: 600923 - DNA, 75 bp, synthetic construct
  source 1..75: mol_type = other DNA
gaaatccgtgtgaagagttggtgggtgaacgccggcgatgctttcatgatatacagccttgctgaaaatttttgc

SEQ ID NO: 600924 - DNA, 75 bp, synthetic construct
  source 1..75: mol_type = other DNA
gttggtgggtgaacgccggcgatgctttcatgatatacagccttgctgaaaatttttgcagtagcaatggctaca

SEQ ID NO: 600925 - DNA, 75 bp, synthetic construct
  source 1..75: mol_type = other DNA
accaaaggcggtaaaggcagcctatgaccttgctaacgggaaatataccgcacaggacgccacgacagcacaaaa

SEQ ID NO: 600926 - DNA, 75 bp, synthetic construct
  source 1..75: mol_type = other DNA
cgtcaacaagtgccgggcaggcctcagccagtgccaccgccgccggaaaatcggcagaaagtgctgcatcgtctg

SEQ ID NO: 600927 - DNA, 75 bp, synthetic construct
  source 1..75: mol_type = other DNA
tggtcacaaaatgggtcagtacataaggtagtgtctgcggccagtgtgaatacaagtgctgcaggagcgcacact

SEQ ID NO: 600928 - DNA, 75 bp, synthetic construct
  source 1..75: mol_type = other DNA
tctccagcactgccactgtggcgcttaccgtggataacaccatggttatggccacagtggattacgtgaatgaca

SEQ ID NO: 600929 - DNA, 75 bp, synthetic construct
  source 1..75: mol_type = other DNA
agcatcagaggcggcaggcagtgcgacggctgcatctcagagcaaagttgctgctgaatccgcggcaacgcgcgc

SEQ ID NO: 600930 - DNA, 75 bp, synthetic construct
  source 1..75: mol_type = other DNA
caccacaacaaattgccgcctgggcgcagattgacgaatctcgctggaaggataaactcgcgaaatcacaagtgc

SEQ ID NO: 600931 - DNA, 75 bp, synthetic construct
  source 1..75: mol_type = other DNA
ggtacagtttattcactctatacgccatcagagcagttttatccgcctggcgcaccaatcccgtggccatcggat

SEQ ID NO: 600932 - DNA, 75 bp, synthetic construct
  source 1..75: mol_type = other DNA
accagacaagcgtccgcagcgaagggcagcgccacgacagcatccacgaaggcgacagaggcagctggcagtgcg

SEQ ID NO: 600933 - DNA, 75 bp, synthetic construct
  source 1..75: mol_type = other DNA
gtgccgcttcctcggcaacggcggcaggaaattccgcgaaggcggcaaaaacgtccgagtcgaacgccaaggctt

SEQ ID NO: 600934 - DNA, 75 bp, synthetic construct
  source 1..75: mol_type = other DNA
aaaatacctggggtgtacaaggctcagtaggtatgtctacggggtggttagcgaataccagtacagatggtaatc

SEQ ID NO: 600935 - DNA, 75 bp, synthetic construct
  source 1..75: mol_type = other DNA
cagtatcaagtaagcccggggacttcttcccgtagattgtattatcaacgtattcagacacagtcagcaggtgct

SEQ ID NO: 600936 - DNA, 75 bp, synthetic construct
  source 1..75: mol_type = other DNA
tattggtacgcttaactcaacaacaatgtcattcagcggtggtgctggttggttcaaattagcaacggtaaccat

SEQ ID NO: 600937 - DNA, 75 bp, synthetic construct
  source 1..75: mol_type = other DNA
atggccgacaccgcgctgaagtccgccaatgtggatgttgtggcatacagctcccccgctcaaggcacctgctac

SEQ ID NO: 600938 - DNA, 75 bp, synthetic construct
  source 1..75: mol_type = other DNA
cgttacgtttttgcttataccgtaaccatacgcaatctggggcgagcgccagtgcagttgttggggcgttactgg

SEQ ID NO: 600939 - DNA, 75 bp, synthetic construct
  source 1..75: mol_type = other DNA
cggataaatattatgcaaaccctacgctagccctttttggatacaaattatatagagttaatgtttcttatacag

SEQ ID NO: 600940 - DNA, 75 bp, synthetic construct
  source 1..75: mol_type = other DNA
gtggagaaacaaaaaatctgatagctatttcaaatgatgtattaaaagtggacgataatgtttattatagtttct

SEQ ID NO: 600941 - DNA, 75 bp, synthetic construct
  source 1..75: mol_type = other DNA
attacatacccacggaaaacaagtctgtacgaaaaattatcaattccttttatatatctcttgtttcagtgtaac

SEQ ID NO: 600942 - DNA, 75 bp, synthetic construct
  source 1..75: mol_type = other DNA
gttctggatgatcgctattctggcaacaaccggtattgcgttgaccatttgggttgtgcccaacagcagcacgca

SEQ ID NO: 600943 - DNA, 75 bp, synthetic construct
  source 1..75: mol_type = other DNA
tcgccagtaccatgaaagaaccgccatatgtcagcagtttgcgcattgaaatcccggcgaacattgccgcaaacg

SEQ ID NO: 600944 - DNA, 75 bp, synthetic construct
  source 1..75: mol_type = other DNA
ctcgccgttttggcaaagcaggaatggaattatttgatttacgcctgcacgagcgagatgacgttttacaggccg

SEQ ID NO: 600945 - DNA, 75 bp, synthetic construct
  source 1..75: mol_type = other DNA
aaataatcctgcggagcttagaatatcacggacgaaaaaaatagttgatgaaaataaaattgttattatttatag

SEQ ID NO: 600946 - DNA, 75 bp, synthetic construct
  source 1..75: mol_type = other DNA
gtgggatgtgggaaattatcgcgggcattcgctgacagaaatctggcggggtacggaagatgaccttgcggatgc

SEQ ID NO: 600947 - DNA, 75 bp, synthetic construct
  source 1..75: mol_type = other DNA
gacgagtggatttgcgatcgtagcggtgaaaccttctgggatttgctggagcaagcagctacacagcaggccggt

SEQ ID NO: 600948 - DNA, 75 bp, synthetic construct
  source 1..75: mol_type = other DNA
cattgtgcaaaaaaatgaagacagcccgtcagctatagcggttgggcagcgtaaagacgaggaaatctacacagc

SEQ ID NO: 600949 - DNA, 75 bp, synthetic construct
  source 1..75: mol_type = other DNA
tttcatcctattgtcgaccctttatcgcggcggataatcgcttttgaagccattgtgcaaaaaaatgaagacagc

SEQ ID NO: 600950 - DNA, 75 bp, synthetic construct
  source 1..75: mol_type = other DNA
tcattatcaattgattgtgtcagtaattttgacttacatcacactttcatggtttaatcaggtgatttatttaat

SEQ ID NO: 600951 - DNA, 75 bp, synthetic construct
  source 1..75: mol_type = other DNA
gttcgacgaaatctggtctgaaggtatggcacctgaagagtggatagatacatatcttgaacgggctaaccgtgg

SEQ ID NO: 600952 - DNA, 75 bp, synthetic construct
  source 1..75: mol_type = other DNA
ccaattgccgcagccgtcagggaacagtgcgccacccatatctacctcgctaaccccaaagcgaaacgcaatgaa

SEQ ID NO: 600953 - DNA, 75 bp, synthetic construct
  source 1..75: mol_type = other DNA
agttctggcaatggataaacaacgatgccttcaaggatttcgtttataacaagcttaaaactggccgtaagctgg

SEQ ID NO: 600954 - DNA, 75 bp, synthetic construct
  source 1..75: mol_type = other DNA
cggttcgctggatttgctgagccatctgccagatggtcaaccggtgacagacattcacagtggactggaatcttt

SEQ ID NO: 600955 - DNA, 75 bp, synthetic construct
  source 1..75: mol_type = other DNA
ctggacccgcaatcacgccgatattccgctacgtccacgtttcgcggttctcgccagcggcagtttctttagtgg

SEQ ID NO: 600956 - DNA, 75 bp, synthetic construct
  source 1..75: mol_type = other DNA
ctaccggacggtcaaccggtgacagacattcacgatggcctggaatctttgagccatcaggctcctgcccatcct

SEQ ID NO: 600957 - DNA, 75 bp, synthetic construct
  source 1..75: mol_type = other DNA
ttacgcaccacgccttcagtagctgagcaggagggacaactgatggagatggaagccacgggagcacctcaaaac

SEQ ID NO: 600958 - DNA, 75 bp, synthetic construct
  source 1..75: mol_type = other DNA
ggcggttatctctgcgcgagaaatcggcaaaaccatactctctaccctcggttgcgaacccaaaaacgatcgccc

SEQ ID NO: 600959 - DNA, 75 bp, synthetic construct
  source 1..75: mol_type = other DNA
tttccgatgttaagcgagggattgaagttgcactgaaagaactggatcgcaccttcggcgatgtgtacgccaacg

SEQ ID NO: 600960 - DNA, 75 bp, synthetic construct
  source 1..75: mol_type = other DNA
cccattgcggcagcggttcgtgagcaatgcgccactcatatctatctggcaaacccgaaagccaaacgtagtgaa

SEQ ID NO: 600961 - DNA, 75 bp, synthetic construct
  source 1..75: mol_type = other DNA
accgagcatcaaaattacttcggtaaaaaccccacgctggggcataccgaaattcttggtacgtcaaacgtgggt

SEQ ID NO: 600962 - DNA, 75 bp, synthetic construct
  source 1..75: mol_type = other DNA
ggtgtggcgcgatattttaaatatccacaagcagcaaaatgcacaaaaaatgcatgaaaagttaagtacagatac

SEQ ID NO: 600963 - DNA, 75 bp, synthetic construct
  source 1..75: mol_type = other DNA
caatgaaatcaagcagagacgcctttaacgaacaatttaaagggctggctcaacgagttctagaacttacaaagt

SEQ ID NO: 600964 - DNA, 75 bp, synthetic construct
  source 1..75: mol_type = other DNA
taatctggggcaggctgtgatggtctattgctatcaattagcaacattaatacaacaaccgacgaaaagtgacgc

SEQ ID NO: 600965 - DNA, 75 bp, synthetic construct
  source 1..75: mol_type = other DNA
atgggttttagcgaactgcggattgttgatagtcaggcacacctggagccagccacccgctgggtcgcacatgga

SEQ ID NO: 600966 - DNA, 75 bp, synthetic construct
  source 1..75: mol_type = other DNA
tcgatagtcaggcacacctggagccagccacccgatgggttgctcatggctccggtgatattattgataatatta

SEQ ID NO: 600967 - DNA, 75 bp, synthetic construct
  source 1..75: mol_type = other DNA
atgtccagactcgatctaaacgccctgaacgaactaccgaaggtagagcgcattctggcgctggcggaaactaat

SEQ ID NO: 600968 - DNA, 75 bp, synthetic construct
  source 1..75: mol_type = other DNA
tttctttcttactaaacttgtctagaaagtgcggagtaaaaacaactctccgagttttaatgactgcatttgagc

SEQ ID NO: 600969 - DNA, 75 bp, synthetic construct
  source 1..75: mol_type = other DNA
ggtatgtggtcgataaagacgtcgaaaacaacattctgattgttgcgcagggccatgaacacccgcgtctgatgt

SEQ ID NO: 600970 - DNA, 75 bp, synthetic construct
  source 1..75: mol_type = other DNA
gggcttttagagcaacgagacacggcaatgttgcaccgtttgctgcatgatattgaaaaaaatatcaccaaataa

SEQ ID NO: 600971 - DNA, 75 bp, synthetic construct
  source 1..75: mol_type = other DNA
caagggaaaattatgggctggatggaagggctgcgcggcgtcggtgtaatgtcgctggcggtgtttaccatgtag

SEQ ID NO: 600972 - DNA, 75 bp, synthetic construct
  source 1..75: mol_type = other DNA
atgagtacctttggtattgcggccattattttctatgcccctagcggcgttattgccgataaattttcacaccgc

SEQ ID NO: 600973 - DNA, 75 bp, synthetic construct
  source 1..75: mol_type = other DNA
cacccgccagagcagaaaatattggggcagcagcgcgggcaatgaaaacgatgggttttagcgaactgcggattg

SEQ ID NO: 600974 - DNA, 75 bp, synthetic construct
  source 1..75: mol_type = other DNA
tacaacaaccggcgaaaagtgatgcaacggcagaccaacatcaactgcaagctttacgcgaacgagccatgacat

SEQ ID NO: 600975 - DNA, 75 bp, synthetic construct
  source 1..75: mol_type = other DNA
gttacacgatgtcgatttcactgtcgccaccactgcgcgcagtcgggcgaaatatcattactacgctacgccagt

SEQ ID NO: 600976 - DNA, 75 bp, synthetic construct
  source 1..75: mol_type = other DNA
aaaatatgccgacgctacggcctgaagaattaccgaagctgatgcgttctttagttatgtcaaatctatctgttc

SEQ ID NO: 600977 - DNA, 75 bp, synthetic construct
  source 1..75: mol_type = other DNA
ggttcatactgaaggtggggttgttacaacagcggaaacactgatggttatcgttccggaagatgacacgctgga

SEQ ID NO: 600978 - DNA, 75 bp, synthetic construct
  source 1..75: mol_type = other DNA
caaccgggaataagcacattccattaagctcgggtatggctgtcactgcagaaataaagactggaatgcgaagcg

SEQ ID NO: 600979 - DNA, 75 bp, synthetic construct
  source 1..75: mol_type = other DNA
aagtgggcgtagcaaagaaattaaacctattgaaaactcaatagttaaagaaattatcgtaaaagaaggagagtc

SEQ ID NO: 600980 - DNA, 75 bp, synthetic construct
  source 1..75: mol_type = other DNA
tatttttgatgcttataatacttattctatattagcagcgttaaaatttaattatattttcgtaattcacgactt

SEQ ID NO: 600981 - DNA, 75 bp, synthetic construct
  source 1..75: mol_type = other DNA
gcgtatgttgatatcgccagacgtcatggcctggatcctgctcagatggcgctcgcttttgtacgccgtcaaccg

SEQ ID NO: 600982 - DNA, 75 bp, synthetic construct
  source 1..75: mol_type = other DNA
cgtgtctgggtttcggcacgctgaccgggaaatatctcaatggtgcaaaaccggctggcgcacgcaatacactct

SEQ ID NO: 600983 - DNA, 75 bp, synthetic construct
  source 1..75: mol_type = other DNA
ttcaggtcattcgcgatctgtttgaaggactggtgaatcagaacgagaaaggggagattgtcccccggcgttgcg

SEQ ID NO: 600984 - DNA, 75 bp, synthetic construct
  source 1..75: mol_type = other DNA
atgcataccacccgactgaagaaggttggcggctcagttatgctgaccgttccaccggcactgctgaatgcgctg

SEQ ID NO: 600985 - DNA, 75 bp, synthetic construct
  source 1..75: mol_type = other DNA
taacaccatcaatatgcaggcgaaaaaaggacgtgccagttatctcggcgctcgcagtgtgggccatcaggatcc

SEQ ID NO: 600986 - DNA, 75 bp, synthetic construct
  source 1..75: mol_type = other DNA
taacagcaaacacatcctgtacgccagccgcactgggtatttcggaccttcttggcagacacaaccggccttgta

SEQ ID NO: 600987 - DNA, 75 bp, synthetic construct
  source 1..75: mol_type = other DNA
ggttttttgattgtcggtctggtgctgaccatgctctaccggagcagtgaggacaacaacaacaacgttgtagcc

SEQ ID NO: 600988 - DNA, 75 bp, synthetic construct
  source 1..75: mol_type = other DNA
ctgtccggattcggtatcagcacaaccagcggtcacattgccgtcaatctgggggcagacattgccggcagcgcc

SEQ ID NO: 600989 - DNA, 75 bp, synthetic construct
  source 1..75: mol_type = other DNA
atagcaatccgaagatggcccggtatttcacgcgatcacatggcagacagttactttggggaacctatcttcctt

SEQ ID NO: 600990 - DNA, 75 bp, synthetic construct
  source 1..75: mol_type = other DNA
agagcacggcgaaaccagcactactgcacaaatccgcgcccagcgttggatgcagagcctgttggagctgcagca

SEQ ID NO: 600991 - DNA, 75 bp, synthetic construct
  source 1..75: mol_type = other DNA
tattgatgaagagattttcctagaccacagcatattacctgcaaattatgaagaatcgatgttcttagaaacccc

SEQ ID NO: 600992 - DNA, 75 bp, synthetic construct
  source 1..75: mol_type = other DNA
atcaagacgaatcatcctttgagtgcagccttgatgatatcgaggtagtaggccgcgctttaaaaataattaaga

SEQ ID NO: 600993 - DNA, 75 bp, synthetic construct
  source 1..75: mol_type = other DNA
gacggcgcaggagttcatcaccgaaatcaaggtggagatgttcaatcatcagggcgcgctggcaaacctgacggc

SEQ ID NO: 600994 - DNA, 75 bp, synthetic construct
  source 1..75: mol_type = other DNA
gaagcgggaataccgtgccgcgtcagtggtcgcgagaagcatctttattcgatttactgcaaaatggtgctcaaa

SEQ ID NO: 600995 - DNA, 75 bp, synthetic construct
  source 1..75: mol_type = other DNA
gaaatcggccttggtaacgcaatgagcgtggtggtcgcgaaaaatctacaacatggggacgcctccattccaccg

SEQ ID NO: 600996 - DNA, 75 bp, synthetic construct
  source 1..75: mol_type = other DNA
acaactaacccgagcattatcgctgccagcaaggagtccatctgggaagtgctgccgcgtctgcaaaaagcgatt

SEQ ID NO: 600997 - DNA, 75 bp, synthetic construct
  source 1..75: mol_type = other DNA
gatggtggaagaagcgaagcgcctgcgcgacgccattccgagcatcgtggtgaaaatcccggtgacttccgaagg

SEQ ID NO: 600998 - DNA, 75 bp, synthetic construct
  source 1..75: mol_type = other DNA
cgcgacgccattccgggcattgtggtgaaaatcccggtgacttccgaaggtctggccgccattaagatgctgaaa

SEQ ID NO: 600999 - DNA, 75 bp, synthetic construct
  source 1..75: mol_type = other DNA
atagtggtgggcgcgatgcgattaataggcttattaaggcttacaacttcagctcacgacagcagctctgcgaac

SEQ ID NO: 601000 - DNA, 75 bp, synthetic construct
  source 1..75: mol_type = other DNA
cccataataaccatgatggtacagagtcgaacatttctgcagaagaaataaaatcaacttttggtgaacattatc

SEQ ID NO: 601001 - DNA, 75 bp, synthetic construct
  source 1..75: mol_type = other DNA
gggcttgatggtccattgcgatcagatatatctgatacttaccaagagcaataccatgaaatacaaaaggttttt

SEQ ID NO: 601002 - DNA, 75 bp, synthetic construct
  source 1..75: mol_type = other DNA
actttgtcgtcagctcgaaagcacgcgctaaaatccgccagttgctgaaaaacctcaagcgtgatgattccgtta

SEQ ID NO: 601003 - DNA, 75 bp, synthetic construct
  source 1..75: mol_type = other DNA
acttaaatcatgccaacatttttttattcgacacaaactctttgcatgggttaatttgacaccgcaagtggcaag

SEQ ID NO: 601004 - DNA, 75 bp, synthetic construct
  source 1..75: mol_type = other DNA
gacctacatcaaaccgttatccgaggttgtagcgcctgaaattgataaggccacattagatggtggcgctttagt

SEQ ID NO: 601005 - DNA, 75 bp, synthetic construct
  source 1..75: mol_type = other DNA
acagcggagggcgtgaagctatcaataggctgattaaggcttataacttcaactctcgacagcagttgtgtgacc

SEQ ID NO: 601006 - DNA, 75 bp, synthetic construct
  source 1..75: mol_type = other DNA
ccatgatatacacccatatagacagtggatcgatgaaagtgaaggagtagttacattccctctatacaggtttga

SEQ ID NO: 601007 - DNA, 75 bp, synthetic construct
  source 1..75: mol_type = other DNA
aaataacgccgtatggtttccatgccctacaaggaagcttatggccagccgttcccgtaagcaaggtaacaactc

SEQ ID NO: 601008 - DNA, 75 bp, synthetic construct
  source 1..75: mol_type = other DNA
ttatccacagcttaatgaggggaaagataattacaaccttttgcacttatcgcaaatttttccattggtattggg

SEQ ID NO: 601009 - DNA, 75 bp, synthetic construct
  source 1..75: mol_type = other DNA
aaactttcgcaagatgattatggcaatggtgcaggatatccgcgtcatcctcatcaaacttgccgaccgtaccca

SEQ ID NO: 601010 - DNA, 75 bp, synthetic construct
  source 1..75: mol_type = other DNA
ccattaaaggtgccgatggcgtgctgatcacctttgcgaaatgctgccgcccaattcctggcgacccgattatcg

SEQ ID NO: 601011 - DNA, 75 bp, synthetic construct
  source 1..75: mol_type = other DNA
cctgccggtgcaacgcccgtcgacttcgcttatgcggtgcataccgatatcggccatgcctgcgtgggcgcgcgt

SEQ ID NO: 601012 - DNA, 75 bp, synthetic construct
  source 1..75: mol_type = other DNA
ataccaggcaacagaattgttgttcaccaggacgactcatcctttgagtgttctgttgatgatgtggaagttgtc

SEQ ID NO: 601013 - DNA, 75 bp, synthetic construct
  source 1..75: mol_type = other DNA
atgatacgtgagcggatagaagaaaaattaaggacggcgttccaacccgtattcctcgaagttgtggatgaaagc

SEQ ID NO: 601014 - DNA, 75 bp, synthetic construct
  source 1..75: mol_type = other DNA
ggcgtatatcagggagaatgaccagtgaaggcagggcgtttgtgattcttgttaacggtgccggtgttttgcgtg

SEQ ID NO: 601015 - DNA, 75 bp, synthetic construct
  source 1..75: mol_type = other DNA
tcctggcgtgcatctacgctaattatggcgtttgtcacactggcgatcatgatcctctgttttgtcggtatgcgc

SEQ ID NO: 601016 - DNA, 75 bp, synthetic construct
  source 1..75: mol_type = other DNA
atggatcaccaactattagatgacagcccccttatccgcatttttgctttgcatgcgttacacaatctcaaagag

SEQ ID NO: 601017 - DNA, 75 bp, synthetic construct
  source 1..75: mol_type = other DNA
gcacccttatccgcatttttgctttgcaggagttacaccgtcttaaagagcgaggcttaacgcgcggggcgcttc

SEQ ID NO: 601018 - DNA, 75 bp, synthetic construct
  source 1..75: mol_type = other DNA
atggggcaggttatgccgggctgggaaaaggtaaagaagcgactggatgggatggcggcgatgttgttgactgat

SEQ ID NO: 601019 - DNA, 75 bp, synthetic construct
  source 1..75: mol_type = other DNA
ttccgcgtcagtatgtcagcggagaaagccattattatctcggtaagcaatatcagttgaaagtgacagaagacg

SEQ ID NO: 601020 - DNA, 75 bp, synthetic construct
  source 1..75: mol_type = other DNA
taagcaggcgaaagaacatagctatgccaggacactgcttaatgcgttgcgcgatccgtggttctgggtcattac

SEQ ID NO: 601021 - DNA, 75 bp, synthetic construct
  source 1..75: mol_type = other DNA
ttcgcgaatgaaagcaggcacagcgcagaaactggtgctcaatatgctttccaccgggctgatgattaaatccgg

SEQ ID NO: 601022 - DNA, 75 bp, synthetic construct
  source 1..75: mol_type = other DNA
atggagcttgctgattattgccgacgcatgggattgtttgttgaacaggttaaagaatggcaggctatctcaatt

SEQ ID NO: 601023 - DNA, 75 bp, synthetic construct
  source 1..75: mol_type = other DNA
ggtgcgtggaaaatggtccgcgcggctctcatttgttggtaactggtcgcccatgctctctgcggcgataggcgt

SEQ ID NO: 601024 - DNA, 75 bp, synthetic construct
  source 1..75: mol_type = other DNA
aataatcatctaaatatggatccacaggatattgatttacgctttggtggtgaattagtacaatttataggcata

SEQ ID NO: 601025 - DNA, 75 bp, synthetic construct
  source 1..75: mol_type = other DNA
gcgaatgctgcttcattgaccgtatcatctttttttaccgagataattaaacactcaggcttgccaattagacaa

SEQ ID NO: 601026 - DNA, 75 bp, synthetic construct
  source 1..75: mol_type = other DNA
cttcggcgcaccgaaaaatctgctgctggcaggcgtggtcttagccttaattatcctgcttaaccgtcaacgtaa

SEQ ID NO: 601027 - DNA, 75 bp, synthetic construct
  source 1..75: mol_type = other DNA
gctactgtgccgcaacgagtgaaaatgttgcgtgggcgtctggaagtgactgtcagacacaaatcggcagaaaag

SEQ ID NO: 601028 - DNA, 75 bp, synthetic construct
  source 1..75: mol_type = other DNA
attgatacggcagaaatattggcacagattaccccttcgatttccatgctctccagggatgcctgtggcctgccg

SEQ ID NO: 601029 - DNA, 75 bp, synthetic construct
  source 1..75: mol_type = other DNA
cctggcaaagcccgtgcagaatatggcgaacaacgtcagtactgcccggtttgtggttcgatgccggtttccagt

SEQ ID NO: 601030 - DNA, 75 bp, synthetic construct
  source 1..75: mol_type = other DNA
atgagcagggttcaagcgagaaacgtacggcggatatgattccgccgttattgttccctcggctcaagaatttat

SEQ ID NO: 601031 - DNA, 75 bp, synthetic construct
  source 1..75: mol_type = other DNA
gctactggcagcgagcagtgcctcgacgacgatgggcgcatttgctctctcggcgttaaaagtggcgggtgcgct

SEQ ID NO: 601032 - DNA, 75 bp, synthetic construct
  source 1..75: mol_type = other DNA
taggtggtggcgcagaattaatatgcgatgcagtaaaaaaacacacacagattcgtgatgaacgtttttttaaaa

SEQ ID NO: 601033 - DNA, 75 bp, synthetic construct
  source 1..75: mol_type = other DNA
atgttggtattcattgatgatggttcaacaaacatcaagttacagtggcaggaaagcgacggaacaattaaacag

SEQ ID NO: 601034 - DNA, 75 bp, synthetic construct
  source 1..75: mol_type = other DNA
gcctcggaactgcgtgggctacatggcgatctgcatcatgaaaacatcatgttctccagtcgcgctggctggtga

SEQ ID NO: 601035 - DNA, 75 bp, synthetic construct
  source 1..75: mol_type = other DNA
tgatgagcaatgcctcggaactgcgtgggctacatggcgatctgcatcatgaggcactgttgcaaatagtcggtg

SEQ ID NO: 601036 - DNA, 75 bp, synthetic construct
  source 1..75: mol_type = other DNA
aatcagcccggcatatcgccaaaaactgctttctcttggcatgttacctggctcctcttttaatgtggtgcgcgt

SEQ ID NO: 601037 - DNA, 75 bp, synthetic construct
  source 1..75: mol_type = other DNA
cgcgtaaaatgcagcaactgcgagcagagcggcaaactgcattactggtcgctggatgacgaacaggccgcgatt

SEQ ID NO: 601038 - DNA, 75 bp, synthetic construct
  source 1..75: mol_type = other DNA
ccagcaggttatgaagctctacaagaactggatgagttagattctttattaattatagacctcgggggcaccaca

SEQ ID NO: 601039 - DNA, 75 bp, synthetic construct
  source 1..75: mol_type = other DNA
gctaaagcacggcagattgccggaaagttgatgaatgagcctgcgcttcacgcgtggcgctcgcagctgataacg

SEQ ID NO: 601040 - DNA, 75 bp, synthetic construct
  source 1..75: mol_type = other DNA
aggctaattatataatatccgatctgttttgttatactgagaaggcaaatatcaatatgaaactttcagatgttt

SEQ ID NO: 601041 - DNA, 75 bp, synthetic construct
  source 1..75: mol_type = other DNA
tgcaatcacagctcaatatgacggtcgcggagatcgtcgaaagggaagagtgggcgggatttcgcgccagagaaa

SEQ ID NO: 601042 - DNA, 75 bp, synthetic construct
  source 1..75: mol_type = other DNA
tggcgaataaaggctggataaagggcaccccgcaggatggaggctggatcggctggatgatcaaacctctgggcc

SEQ ID NO: 601043 - DNA, 75 bp, synthetic construct
  source 1..75: mol_type = other DNA
acgctctgcttgcgctcgatcccttagataatcacccgacaaaaatccccactcttccggccttttatcagccat

SEQ ID NO: 601044 - DNA, 75 bp, synthetic construct
  source 1..75: mol_type = other DNA
ggaaatatcaccaacggatgctgccgcctttggtcagctttttgccgactacgaactgctaccaccgttccgcca

SEQ ID NO: 601045 - DNA, 75 bp, synthetic construct
  source 1..75: mol_type = other DNA
cggcaaaaggaacagaagcactcggccttggtgatgtattcctgatagcaggaattgcaatgtggacacagccac

SEQ ID NO: 601046 - DNA, 75 bp, synthetic construct
  source 1..75: mol_type = other DNA
ggaattgcaatgtggacacagccacaacacacgccgctgctaatcaccgccgcagcttccggggcatttctgttt

SEQ ID NO: 601047 - DNA, 75 bp, synthetic construct
  source 1..75: mol_type = other DNA
ataaacttgcagacttctattccagaagcggacatacctaggacgcatgcctacctgagcgggataggactcata

SEQ ID NO: 601048 - DNA, 75 bp, synthetic construct
  source 1..75: mol_type = other DNA
ctattgctaatcaaattaccgaagatctcgattcggcttaccgcgctcccgaattagtgatatccgagcaaaagt

SEQ ID NO: 601049 - DNA, 75 bp, synthetic construct
  source 1..75: mol_type = other DNA
gcaggttatagaaaaactgggtggcacagaccgttacaccgagtaccgggcaaagcacaatttattgggtgcgaa

SEQ ID NO: 601050 - DNA, 75 bp, synthetic construct
  source 1..75: mol_type = other DNA
ttgaaatacccggaacatgcccttaccggcctgctgcctgcggcgctcggcaaagccggtgaagcacaggataac

SEQ ID NO: 601051 - DNA, 75 bp, synthetic construct
  source 1..75: mol_type = other DNA
gcatctgatatgaaaaaaagcattgattacagtaaagatattacatggactgaaaaaatcccttctacagaagag

SEQ ID NO: 601052 - DNA, 75 bp, synthetic construct
  source 1..75: mol_type = other DNA
cttttcttgtccgggacggatagttatggaaaacttgattctgaagtcatgaatgcgagtgaaaatgaaatcgca

SEQ ID NO: 601053 - DNA, 75 bp, synthetic construct
  source 1..75: mol_type = other DNA
gggggagtaattcaacacaggaagcgcagttctccgtaatcgatgccatcaccgccagcgagctaattaacgata

SEQ ID NO: 601054 - DNA, 75 bp, synthetic construct
  source 1..75: mol_type = other DNA
ccggcagccaaacgcggagcgatgggtcgtcgcacgctgggtattggtgtaatcaacttcgcttactacctggcg

SEQ ID NO: 601055 - DNA, 75 bp, synthetic construct
  source 1..75: mol_type = other DNA
cccgtgacggtgcagaagacgcacaagacgatctggtgccgtcaatccaggacgatggctgcgaaagcggcgcat

SEQ ID NO: 601056 - DNA, 75 bp, synthetic construct
  source 1..75: mol_type = other DNA
actacggggtacagatcaacaaactgatgtatacccgcctgctgaaaggtgaagatatcaccctgttcagcccgt

SEQ ID NO: 601057 - DNA, 75 bp, synthetic construct
  source 1..75: mol_type = other DNA
ctcgatgccgatgaagctaaaaaatgcctggatcaacacggcggttttattcgcaaggctctggaaaaggaataa

SEQ ID NO: 601058 - DNA, 75 bp, synthetic construct
  source 1..75: mol_type = other DNA
gaacgcctgtacaccaaatatgagaaagacgacagcatccgtaagcagcgtgtgaaagcggttgagctgttctcc

SEQ ID NO: 601059 - DNA, 75 bp, synthetic construct
  source 1..75: mol_type = other DNA
gtcgtcgtacgctgggtattggtgtgatcaacttcgcttactacctggcgaagcacggtaaacgttactccgacg

SEQ ID NO: 601060 - DNA, 75 bp, synthetic construct
  source 1..75: mol_type = other DNA
tcgcacgccgtatgtaattgccggactggaatacgcacgccagctcggctgccgcacagtgggaatttcctgtaa

SEQ ID NO: 601061 - DNA, 75 bp, synthetic construct
  source 1..75: mol_type = other DNA
cgtgagccgctgaaccgtcgggcgattctgattatcgcgctgtcgctggcggtcggtctgggcgtgtctcagcag

SEQ ID NO: 601062 - DNA, 75 bp, synthetic construct
  source 1..75: mol_type = other DNA
gcgaagaacataacacagcaatacggtacgccggatctttgtatagaggcgatgcgtaaaaagaacctgaaaacg

SEQ ID NO: 601063 - DNA, 75 bp, synthetic construct
  source 1..75: mol_type = other DNA
gagcgcccagttcctctatattctggttgctgcgtgcctgttctcgaactacccgcgtgaaacgcgcctgcaata

SEQ ID NO: 601064 - DNA, 75 bp, synthetic construct
  source 1..75: mol_type = other DNA
gatgaactggaagagctggcaattctggcggtacgcgcactcgacgcgctgctggattatcaggattacccgatc

SEQ ID NO: 601065 - DNA, 75 bp, synthetic construct
  source 1..75: mol_type = other DNA
ctggaatacgcacgccagctcggctgccgtacagtgggaatttcctgtaatccggggagcgctgtttccaccacc

SEQ ID NO: 601066 - DNA, 75 bp, synthetic construct
  source 1..75: mol_type = other DNA
aagttgttggtgacactatcgctaataccgggtcacatacagcacttgaatcccttttcttttctgctggagccc

SEQ ID NO: 601067 - DNA, 75 bp, synthetic construct
  source 1..75: mol_type = other DNA
gtacgccgttaaagattgggccgacgctggctataagtgttattgtttcaattatgacggcgctaatcatggcga

SEQ ID NO: 601068 - DNA, 75 bp, synthetic construct
  source 1..75: mol_type = other DNA
cactacgacgcctggccgcacaaagtcagtctcggcgtcgagtatcaacatacctttaaggcgattaatcaacgt

SEQ ID NO: 601069 - DNA, 75 bp, synthetic construct
  source 1..75: mol_type = other DNA
cgattgatctctctgccaaagtgctgatcctcgatgaacccactgccagcctcgacactcaggaagtggaactcc

SEQ ID NO: 601070 - DNA, 75 bp, synthetic construct
  source 1..75: mol_type = other DNA
cggcatgtccaccgatacagccgaagaagagccggaacaacaggataacgaccagaacaacacggggggaacaga

SEQ ID NO: 601071 - DNA, 75 bp, synthetic construct
  source 1..75: mol_type = other DNA
ctacggaagaagaaaagccagtgacgacacctgatcaggatgatatcgccacgctggaacgagaagccagagcaa

SEQ ID NO: 601072 - DNA, 75 bp, synthetic construct
  source 1..75: mol_type = other DNA
tgaggactacgccaccgcactggcggcctggcagaaaatcagtcttcacgacatgagcaatgaggatctgcttgc

SEQ ID NO: 601073 - DNA, 75 bp, synthetic construct
  source 1..75: mol_type = other DNA
agaaaatcagtcttcacgacatgagcaatgatgatctgctcgccgccgccaacaccgctcaggcagcgggaaatg

SEQ ID NO: 601074 - DNA, 75 bp, synthetic construct
  source 1..75: mol_type = other DNA
cagaagagctgggtctgagcgattatcgccattttgttatttatccccgtctcgataaggcgctgaaggcacaga

SEQ ID NO: 601075 - DNA, 75 bp, synthetic construct
  source 1..75: mol_type = other DNA
accgccagtatgttgttggcgcgacgctaccggtgctgttaaaagaaggtcagtacgacgcagcgcaaaaactgc

SEQ ID NO: 601076 - DNA, 75 bp, synthetic construct
  source 1..75: mol_type = other DNA
gatctttttcctcgccgtcgaacagcagttgccgctgaacgggcaaaatggcgcatccgataccatgctgcgcgc

SEQ ID NO: 601077 - DNA, 75 bp, synthetic construct
  source 1..75: mol_type = other DNA
gtattgcagataattgcccggcaatagttcgcttgctgggcgatatgtcgccttcctacgatgccgccgcctgga

SEQ ID NO: 601078 - DNA, 75 bp, synthetic construct
  source 1..75: mol_type = other DNA
aaaaataccgcccatgcacaacaactcggtatcggcaccgtctatcaggaagtcaacctgctacccaatatgtcg

SEQ ID NO: 601079 - DNA, 75 bp, synthetic construct
  source 1..75: mol_type = other DNA
ggtggacaaaaagactccccgggcaataccggaaaaaaatggggcggcgtgcgtgccgacggcgtggggctaagc

SEQ ID NO: 601080 - DNA, 75 bp, synthetic construct
  source 1..75: mol_type = other DNA
gcaatgacgagaaagatgactggctgaaacgcggcgtgcgcagcgatgcggcagacctctatcgccagcaggatc

SEQ ID NO: 601081 - DNA, 75 bp, synthetic construct
  source 1..75: mol_type = other DNA
ggaagcgatgctgcgccagcaaccgccctccacgcgtattgacctcacgctggctgactgggcgcagcagcgacg

SEQ ID NO: 601082 - DNA, 75 bp, synthetic construct
  source 1..75: mol_type = other DNA
agctgtataaagtcgccggtatccgtgcggtagaaattggttctttcctgttaggccgcgatccgaaaaccggta

SEQ ID NO: 601083 - DNA, 75 bp, synthetic construct
  source 1..75: mol_type = other DNA
atggaaaactttaaacatctccctgaaccgttccgcattcgtgttattgaacccgtaaaacgtactacccgcgct

SEQ ID NO: 601084 - DNA, 75 bp, synthetic construct
  source 1..75: mol_type = other DNA
caggaaggcttcccgacttacggcggcctggaaggcggtgcaatggagcgtctggccgttggcttgtatgacggt

SEQ ID NO: 601085 - DNA, 75 bp, synthetic construct
  source 1..75: mol_type = other DNA
ctatgccgaccgggtgattatcatgcgcgatcgcaaacaggtggcggagatcccgctggcagagctttccgttcc

SEQ ID NO: 601086 - DNA, 75 bp, synthetic construct
  source 1..75: mol_type = other DNA
ctatgccgatcgggtgatcatcatgcgtgatcgtaaacaagtggcagagatcccgctggcagagctttccgttcc

SEQ ID NO: 601087 - DNA, 75 bp, synthetic construct
  source 1..75: mol_type = other DNA
ctgcgatcgccgcatcatgcatcggtactgggtattggtttctgtccggaagaccggaaaaccgatggcattatt

SEQ ID NO: 601088 - DNA, 75 bp, synthetic construct
  source 1..75: mol_type = other DNA
cccagccatttcctgctctatgtacgttattccgccgccggatggcagggtgacatggatttaccgccgcagcca

SEQ ID NO: 601089 - DNA, 75 bp, synthetic construct
  source 1..75: mol_type = other DNA
taatgcattacattctttagatacatcatcaagaattaattgggatgatttacttaatgaagttgtaagggaaac

SEQ ID NO: 601090 - DNA, 75 bp, synthetic construct
  source 1..75: mol_type = other DNA
atggcatcatcgctgccgcctcggtgcgggaaaatatcatcctcgctctctcaggcccagcgcggctggctacgt

SEQ ID NO: 601091 - DNA, 75 bp, synthetic construct
  source 1..75: mol_type = other DNA
ctcgcagacaatatcggcaccagcgcagaagagctgggtctgagcgattatcgccattttgttatttatccccgt

SEQ ID NO: 601092 - DNA, 75 bp, synthetic construct
  source 1..75: mol_type = other DNA
agatggccggacacacacttaccggattaagaattattggtgaagttgatggcgatgatgaagccatcttcagac

SEQ ID NO: 601093 - DNA, 75 bp, synthetic construct
  source 1..75: mol_type = other DNA
atttgatgtctccgggaatttacagtgtgacaggcaaagcgacccacaccccaatccaggggcagtctggttttc

SEQ ID NO: 601094 - DNA, 75 bp, synthetic construct
  source 1..75: mol_type = other DNA
tggcagcgttacacaaccacagggaaatcagaaaccacacagggacgcacttttgagcgcgtctacgccgggagc

SEQ ID NO: 601095 - DNA, 75 bp, synthetic construct
  source 1..75: mol_type = other DNA
aacgcaaacagcgacatatgaacataactttaatgattcatcatgcgtgagtacgaatactatcactccgatgag

SEQ ID NO: 601096 - DNA, 75 bp, synthetic construct
  source 1..75: mol_type = other DNA
aatggttacagttctgatatcgatcgagcacatgtttacacgcaggaagaagcccaaaaagcctggaattgtggt

SEQ ID NO: 601097 - DNA, 75 bp, synthetic construct
  source 1..75: mol_type = other DNA
ctctgccgataacattggtggtgtatattacagaccggttcagaaatacattaacgggacatggtataacgtggc

SEQ ID NO: 601098 - DNA, 75 bp, synthetic construct
  source 1..75: mol_type = other DNA
ttttgagcgcgtctacgccgggagcaaatggaccgaatggcgagaagtatataactccttttcgttgcctctgaa

SEQ ID NO: 601099 - DNA, 75 bp, synthetic construct
  source 1..75: mol_type = other DNA
atgccatggtgattggcttcggcctggttgctggtatccgggtttatattgcctgggagtcattaatcaatctgg

SEQ ID NO: 601100 - DNA, 75 bp, synthetic construct
  source 1..75: mol_type = other DNA
gcgatttagctatatacgtggctacacaacataaaatcggggcgacagcagccctgtcgggaatttacgatgcga

SEQ ID NO: 601101 - DNA, 75 bp, synthetic construct
  source 1..75: mol_type = other DNA
caacggatgcctataaaaaccggacatttcaacgaactcgtgccagcggtgaagctgactggggggaatgggcgg

SEQ ID NO: 601102 - DNA, 75 bp, synthetic construct
  source 1..75: mol_type = other DNA
tgctgctacagcaacaaagctgaaaacggcaaggacaattaacggcgtaaaatttgacggctcggcaaatattga

SEQ ID NO: 601103 - DNA, 75 bp, synthetic construct
  source 1..75: mol_type = other DNA
tgcggctacagctacaaagctgaaaacggcacgaaatattaatggtgtcaaatttgatggcaccggcgatataaa

SEQ ID NO: 601104 - DNA, 75 bp, synthetic construct
  source 1..75: mol_type = other DNA
ggtggtggttcagtgatgatcaatggtgttgcgacattatccagcgcttcatcaacaacgcgtggaagtgctgca

SEQ ID NO: 601105 - DNA, 75 bp, synthetic construct
  source 1..75: mol_type = other DNA
gatgtatacccgtctgctgaaaggtgaagatatcaccctgttcagcccgtccgacgtaccggggctgtacgacgc

SEQ ID NO: 601106 - DNA, 75 bp, synthetic construct
  source 1..75: mol_type = other DNA
tatcagaacacccgtgacggtgctgaagacgcacaagacgatctggtgccgtcaatccaggacgatggctgcgaa

SEQ ID NO: 601107 - DNA, 75 bp, synthetic construct
  source 1..75: mol_type = other DNA
gttatctaaatacagcgctaaccccgttcaggcgttggcgaattatacggtacagtttgccgacaaccgccagta

SEQ ID NO: 601108 - DNA, 75 bp, synthetic construct
  source 1..75: mol_type = other DNA
cctgctcaccgcctacaaattcggggtcaaaacgctgtattatcagaacacccgtgacggtgctgaagacgcaca

SEQ ID NO: 601109 - DNA, 75 bp, synthetic construct
  source 1..75: mol_type = other DNA
tcgcagatctctaacgccactaacggtattgaaccgccgcgcggttacgtcagcatcaaagcgtcgaaagacggt

SEQ ID NO: 601110 - DNA, 75 bp, synthetic construct
  source 1..75: mol_type = other DNA
cccgtgacggcgctgaagacgcgcaggacgatctggtaccgtcaatccaggacgatggctgcgaaagcggcgcat

SEQ ID NO: 601111 - DNA, 75 bp, synthetic construct
  source 1..75: mol_type = other DNA
gttgtaaaaatttattaggtcaacaaaatcaaacatcacggaaaatgcaggtgtatttatcaagttctgacttgt

SEQ ID NO: 601112 - DNA, 75 bp, synthetic construct
  source 1..75: mol_type = other DNA
aacacaaatggcgacatatgagcataattttaatgattcgtcatgcgtgagtacaaatactatcacccctatgag

SEQ ID NO: 601113 - DNA, 75 bp, synthetic construct
  source 1..75: mol_type = other DNA
ggatattattgttggactttataacgataccattaaattaaatttacattttgaatggaccaataaaaacaacat

SEQ ID NO: 601114 - DNA, 75 bp, synthetic construct
  source 1..75: mol_type = other DNA
tgccaacagatgacttcagtaaagcgaccatctttagcgtcgccaacaaaaacgaaccaggaatagtttggttgc

SEQ ID NO: 601115 - DNA, 75 bp, synthetic construct
  source 1..75: mol_type = other DNA
tgcaggtgtctattcctttaatctgacattgtcatacaacccgataaccacaacctgcaaaccggacgatttatt

SEQ ID NO: 601116 - DNA, 75 bp, synthetic construct
  source 1..75: mol_type = other DNA
atgaaaattcgcataatgttatttatattaattatgatggtaatgcctgtgagttatgcagcatgttatggagag

SEQ ID NO: 601117 - DNA, 75 bp, synthetic construct
  source 1..75: mol_type = other DNA
atgtacagcctgacgaaagatggctggatcatggttgtgatggggttcaccgggaaagctgctgcggcaatcaag

SEQ ID NO: 601118 - DNA, 75 bp, synthetic construct
  source 1..75: mol_type = other DNA
tattgcactgtgctgaacgtcgccgcgatgtgtcagatggtggtgtggagcttttggtagatcctgccaaagtac

SEQ ID NO: 601119 - DNA, 75 bp, synthetic construct
  source 1..75: mol_type = other DNA
aaacgcttcaatttccgccgtttgcatgaggaggtcggtcgccgctggacgttcagtttcgattcttccatcggc

SEQ ID NO: 601120 - DNA, 75 bp, synthetic construct
  source 1..75: mol_type = other DNA
cggatcctggcgctgcaatcacaggggatcttcaccgatcctcagtcatatattacttacgcgaccgcgctggct

SEQ ID NO: 601121 - DNA, 75 bp, synthetic construct
  source 1..75: mol_type = other DNA
atgccctgcggctggcacaattacctgtcgccagagcgcaactgaacgatgcgacgtttgctgcatcgccggaag

SEQ ID NO: 601122 - DNA, 75 bp, synthetic construct
  source 1..75: mol_type = other DNA
aacgtcacccaggagatgcccgacttgagcgcagtctggcggctattccagttgaagtgaaaagcgttacgacag

SEQ ID NO: 601123 - DNA, 75 bp, synthetic construct
  source 1..75: mol_type = other DNA
atgaggacgtaggtcgccgctggacgttcagtttcgattcctccatcggcttgcgttccggcgcgatgagttcag

SEQ ID NO: 601124 - DNA, 75 bp, synthetic construct
  source 1..75: mol_type = other DNA
accgctgacaccggaacaaaatcagcaacgcttcaatttccgtcgtctgcatgaggacgtaggtcgccgctggac

SEQ ID NO: 601125 - DNA, 75 bp, synthetic construct
  source 1..75: mol_type = other DNA
cgggtacagcgctgcaaaaagtggtcgaagatggcaaacagaacgaactggaaaccatgtgccgcgactggccgt

SEQ ID NO: 601126 - DNA, 75 bp, synthetic construct
  source 1..75: mol_type = other DNA
aaaagctatcgtagctacgggcaactggaagccgagtaccgcatcggacgcaatatgctgctggaaggcgacctg

SEQ ID NO: 601127 - DNA, 75 bp, synthetic construct
  source 1..75: mol_type = other DNA
ttgccggacgatccggcactgaccagacaactggcctacgtgaaccagcgtctggatgatatgcccgcaacacaa

SEQ ID NO: 601128 - DNA, 75 bp, synthetic construct
  source 1..75: mol_type = other DNA
cgttatatctggcggaagcctatcgccattttggtcatgatgatcgcgcgcggctgttgcttgaagatcaactga

SEQ ID NO: 601129 - DNA, 75 bp, synthetic construct
  source 1..75: mol_type = other DNA
ggatattcaggcgtggacggcagattatcgcgtcagctggcatcagaaggtggcgaacggacagactattgagcc

SEQ ID NO: 601130 - DNA, 75 bp, synthetic construct
  source 1..75: mol_type = other DNA
aaatatgctggcaatactcaaaagccattcattcgaatcagcagagcaggcagcagcattccttggtgtagttcc

SEQ ID NO: 601131 - DNA, 75 bp, synthetic construct
  source 1..75: mol_type = other DNA
cgttgaagtgacgctggagagtggcgagacgctgacgggctgcgtgctggtagccgctgatggcacccattcagc

SEQ ID NO: 601132 - DNA, 75 bp, synthetic construct
  source 1..75: mol_type = other DNA
gcgctggcggcgggtacctgtcagcaactggcgcgcatcggcgtctggcaatctctggctgattgcgcaaccgcc

SEQ ID NO: 601133 - DNA, 75 bp, synthetic construct
  source 1..75: mol_type = other DNA
ataataccgtaaggagtggccttaattctttcactggtggggtgattattcgtgatacaaaggtattgatcacgc

SEQ ID NO: 601134 - DNA, 75 bp, synthetic construct
  source 1..75: mol_type = other DNA
atgtttcagttaggtattgatgtcagtaagaaaacgctggatttgtgcctgctgcgcgaaggcgtaaaaggcagc

SEQ ID NO: 601135 - DNA, 75 bp, synthetic construct
  source 1..75: mol_type = other DNA
aatacgtcgcgccccagtgataatggagttaatccgataactggtttctctatggcaaataattcatttaatatg

SEQ ID NO: 601136 - DNA, 75 bp, synthetic construct
  source 1..75: mol_type = other DNA
tacggcgtattgtgtcgttatcagcagcgtcgacagagcgatcgcgaagcaaccattggcgtcacggacagcctt

SEQ ID NO: 601137 - DNA, 75 bp, synthetic construct
  source 1..75: mol_type = other DNA
gctggcgttaacccgcgccgccagacctattacccatcgtaccgtgctggtgggcaatgcggcgcaaactctgca

SEQ ID NO: 601138 - DNA, 75 bp, synthetic construct
  source 1..75: mol_type = other DNA
tatcgtgataaaggcactcagggcgcgcagcttggcggtgtcggggtccgctggaatatctggaccggcgagacg

SEQ ID NO: 601139 - DNA, 75 bp, synthetic construct
  source 1..75: mol_type = other DNA
ccccatcgccgggcaaggatttaacctcggtatgcgtgatgttatgagccttgcggaaaccctgactcaggcgca

SEQ ID NO: 601140 - DNA, 75 bp, synthetic construct
  source 1..75: mol_type = other DNA
cgctggcgatgttgccgatgtctggcggacgttgttcgctggtctggtgtcacccgctggaacggggcgatgagg

SEQ ID NO: 601141 - DNA, 75 bp, synthetic construct
  source 1..75: mol_type = other DNA
tagccgctgatggcacccattccgcgttagccaccgcgtgcggtgttgactggcagcaggagccttacgaacaac

SEQ ID NO: 601142 - DNA, 75 bp, synthetic construct
  source 1..75: mol_type = other DNA
catggggattatcgccaacggcgatctgctcgatactctgcgccgcgtgaaatgtttcggcgtaccgctggtgcg

SEQ ID NO: 601143 - DNA, 75 bp, synthetic construct
  source 1..75: mol_type = other DNA
ttccgtattattggccgtctctcacgttcttctattagcgtgttgatcaatggcgaatccggcacaggtaaagag

SEQ ID NO: 601144 - DNA, 75 bp, synthetic construct
  source 1..75: mol_type = other DNA
tagcacagtgggcagatcgggcgctacgttccggtcatcaaaatctgctttccgaagcgcagccagagctggagc

SEQ ID NO: 601145 - DNA, 75 bp, synthetic construct
  source 1..75: mol_type = other DNA
gcgtagaagcgaagttactgcatccggaaaccgaagctgctctgacgcgtctggcgtggccaggcaacgtgcgcc

SEQ ID NO: 601146 - DNA, 75 bp, synthetic construct
  source 1..75: mol_type = other DNA
atgcaacgagggatagtctggggagtcgatgacgatagttccatccgttgggtgcttgaacgtgcgctcgctgga

SEQ ID NO: 601147 - DNA, 75 bp, synthetic construct
  source 1..75: mol_type = other DNA
tggatgtgcagacgcgtttgctgcgcgtgctggcagacggtcagttttatcgcgttggcggctatgcgccggtga

SEQ ID NO: 601148 - DNA, 75 bp, synthetic construct
  source 1..75: mol_type = other DNA
gggccgatcgggcgctgcgttccggtcatcaaaacttactttctgaagcgcaacctgagctggagcggacattgc

SEQ ID NO: 601149 - DNA, 75 bp, synthetic construct
  source 1..75: mol_type = other DNA
aaacgcgctcgaaattccggcagataccttccgtgagcagcctgccaaaagcagtcgagatgatgcaggcacata

SEQ ID NO: 601150 - DNA, 75 bp, synthetic construct
  source 1..75: mol_type = other DNA
gacgccgtcgggcaggacgtgaaaatggcaataagatctttaataagtctcgtggacgtctgaatacaacactgg

SEQ ID NO: 601151 - DNA, 75 bp, synthetic construct
  source 1..75: mol_type = other DNA
ttaggccgcgatccgaaaaccggtaaacaactgccgtgcccggcagaattgctgcgtttaaccattccacgcgca

SEQ ID NO: 601152 - DNA, 75 bp, synthetic construct
  source 1..75: mol_type = other DNA
caaggatgctctactccttaagccgtcgcggggatgcgccagcggcaatgggtaaaatcaaccgtagcaaaaccc

SEQ ID NO: 601153 - DNA, 75 bp, synthetic construct
  source 1..75: mol_type = other DNA
ccacctatgccgataaagccattggccgctgggcgggttataccatcggctggctgtactggtggttttgggtac

SEQ ID NO: 601154 - DNA, 75 bp, synthetic construct
  source 1..75: mol_type = other DNA
aagccaacatcgccgccatgatcctgcactcgtgggttccaggcattcccatctggttattttccctcgtcatta

SEQ ID NO: 601155 - DNA, 75 bp, synthetic construct
  source 1..75: mol_type = other DNA
acggcccaacgaccgatatcatcggcgaagcgccagccatgcaggatgtgttccgtattatcggtcggctttcgc

SEQ ID NO: 601156 - DNA, 75 bp, synthetic construct
  source 1..75: mol_type = other DNA
catcatgctgcgtaagattaagcgggttactgatacgctgaatcgtcaggggctgcgcgtggttgcggtggcgac

SEQ ID NO: 601157 - DNA, 75 bp, synthetic construct
  source 1..75: mol_type = other DNA
acctgctgtacgatgtgtcacaggtggcgatcccgtttgataatgtcgacgacgagcaaattcaaaagccgcagc

SEQ ID NO: 601158 - DNA, 75 bp, synthetic construct
  source 1..75: mol_type = other DNA
gggccagtctgccgtcttctataacggtgaagtgtgcctcggtggcggtattattgagcagcgtctgccgctgcc

SEQ ID NO: 601159 - DNA, 75 bp, synthetic construct
  source 1..75: mol_type = other DNA
cccgtggtgctgttgatcaatggttacaccaaaggcgactggtgggaagcggcgctgttcgcgctttcggtagcg

SEQ ID NO: 601160 - DNA, 75 bp, synthetic construct
  source 1..75: mol_type = other DNA
gaagaattatggaaaacgttcgacacccacccggaagggttgaatcaggcggaagtggaagttgcccgtgaaaaa

SEQ ID NO: 601161 - DNA, 75 bp, synthetic construct
  source 1..75: mol_type = other DNA
taattcgccatttaccttctcgtctggtccatcgcgacccgctgcctggcgtgcagcagacagcgaatactccga

SEQ ID NO: 601162 - DNA, 75 bp, synthetic construct
  source 1..75: mol_type = other DNA
accaaagacggcaccgaagaaccgtggtatgtggtcgataaagacgtcgaaaacaacattctgattgttgcgcag

SEQ ID NO: 601163 - DNA, 75 bp, synthetic construct
  source 1..75: mol_type = other DNA
aactgttccttgccgaatataaagccggtcgcacgccgaatccggatattctgtgcaacaaagagatcaaattta

SEQ ID NO: 601164 - DNA, 75 bp, synthetic construct
  source 1..75: mol_type = other DNA
accggtactatgcgttgcacggtaaaaacccgctatcgccagaccgacatcccgtgcaccgtcaaggcgctggac

SEQ ID NO: 601165 - DNA, 75 bp, synthetic construct
  source 1..75: mol_type = other DNA
tcctgggccgttatctcccggcgcaaccgggcaaaatcattaccgtcgatggcgatgaaattggcgagcaccagg

SEQ ID NO: 601166 - DNA, 75 bp, synthetic construct
  source 1..75: mol_type = other DNA
gttcccggtcggcgaactggaaaaaccgcaggtgcgtaagattgcagaagatctcggtctggttaccgcgaagaa

SEQ ID NO: 601167 - DNA, 75 bp, synthetic construct
  source 1..75: mol_type = other DNA
gatgatcgcattgaagtgattttcgatgagccggttgccgccgtgacgccgggccagtctgccgtcttctataac

SEQ ID NO: 601168 - DNA, 75 bp, synthetic construct
  source 1..75: mol_type = other DNA
tcctaacccgctgttacccgagtgccgcgacgacacccgcaatgcggtgatcgaacacggcgcggatatgggcat

SEQ ID NO: 601169 - DNA, 75 bp, synthetic construct
  source 1..75: mol_type = other DNA
agcggtgagatcaacagcaaactggcacaacctgttgaggcgattaaccgcgtggaacagcactttagccgcgag

SEQ ID NO: 601170 - DNA, 75 bp, synthetic construct
  source 1..75: mol_type = other DNA
accggtggtgcggttgaatgtggaatcacgcggtgatgtaaagctaatggaaaagaaaactaaagctcttcttaa

SEQ ID NO: 601171 - DNA, 75 bp, synthetic construct
  source 1..75: mol_type = other DNA
aaatggcttcctggctggttgagtggaaaaacgccactgaaacgcaatggcttaaagattcgccctcacagccat

SEQ ID NO: 601172 - DNA, 75 bp, synthetic construct
  source 1..75: mol_type = other DNA
aagatattgatcctcaggaacatcagaaagaacaggtgaggaattctcaagaggccaaaaccaacaccttcttgt

SEQ ID NO: 601173 - DNA, 75 bp, synthetic construct
  source 1..75: mol_type = other DNA
cacgccattaacaccaatatcttctccacgctggttccgaaccagcaggccgtcaacgtgatgttctgcgatatg

SEQ ID NO: 601174 - DNA, 75 bp, synthetic construct
  source 1..75: mol_type = other DNA
cgttccatctcggcgtggatggcggcattgaagttaccgccagccataatccgatggattacaacggcatgaagc

SEQ ID NO: 601175 - DNA, 75 bp, synthetic construct
  source 1..75: mol_type = other DNA
gttgaaggctgtatctgtactgggtaaagacgaatacccgctgctccactcagatcagggctggcaatatcagat

SEQ ID NO: 601176 - DNA, 75 bp, synthetic construct
  source 1..75: mol_type = other DNA
aaagtacgaagaagaaaaagcgaaactgcgtgagcaaaatctctctggcgctgcctatgaggctggctgtcgcgt

SEQ ID NO: 601177 - DNA, 75 bp, synthetic construct
  source 1..75: mol_type = other DNA
atcagcggtgataccggactgcgcgacgtccagcgtctggctgaagccaacgactttcctcccgtcgatgaaacc

SEQ ID NO: 601178 - DNA, 75 bp, synthetic construct
  source 1..75: mol_type = other DNA
ccgatggattacaacggcatgaagctggtgcgcgaaggggctcgcccgatcagcggcgataccggactgcgcgac

SEQ ID NO: 601179 - DNA, 75 bp, synthetic construct
  source 1..75: mol_type = other DNA
atctacggtggcgaaatgagcgcccaccactatttccgtgatttcgcttactgcgacagcggcatgatcccgtgg

SEQ ID NO: 601180 - DNA, 75 bp, synthetic construct
  source 1..75: mol_type = other DNA
catcatcaaagccgtgttcctggcagcccttatcaagacaaaagggaacgtggtgcaaattttcaagataacgag

SEQ ID NO: 601181 - DNA, 75 bp, synthetic construct
  source 1..75: mol_type = other DNA
aaagacctgatgaatcttaaatgggatgctttgtatgttcttatcaacgccattataaatggcgaagtaatatca

SEQ ID NO: 601182 - DNA, 75 bp, synthetic construct
  source 1..75: mol_type = other DNA
ggatttatctgaggtcattatcaacgctgtcatgcttgctgcggttattaaaacgcgcggtaacgtcgttcagat

SEQ ID NO: 601183 - DNA, 75 bp, synthetic construct
  source 1..75: mol_type = other DNA
atcccggtacgtgccgcgtacgctttctggtaccacacgccaatgaccgccgatctttcggaggttgtcatcaac

SEQ ID NO: 601184 - DNA, 75 bp, synthetic construct
  source 1..75: mol_type = other DNA
aaccgttgaaagcggggtttcatccactcaccaccgactgccgctacaacctgacattccgtcaggcaggtaaaa

SEQ ID NO: 601185 - DNA, 75 bp, synthetic construct
  source 1..75: mol_type = other DNA
ctggtaatgccgttcaaaagacaggcgatatcttgtccggtggacttacttttgaaaacgactcaatccttgcct

SEQ ID NO: 601186 - DNA, 75 bp, synthetic construct
  source 1..75: mol_type = other DNA
ttaatgtttcaggagagacgctttcagaccgttttgctattaacagcagtaatggtatgtggattcagatgcgcg

SEQ ID NO: 601187 - DNA, 75 bp, synthetic construct
  source 1..75: mol_type = other DNA
gctgtcatgcttgccgccgttctgaagacgcgcggtaacgtcgttcagattttcaaaataacgaggtctaaacat

SEQ ID NO: 601188 - DNA, 75 bp, synthetic construct
  source 1..75: mol_type = other DNA
tttcctgattgttgctgcggccagtattcctgttcgtgtcgcctatgcaatctggttccgcacgccaatggctgt

SEQ ID NO: 601189 - DNA, 75 bp, synthetic construct
  source 1..75: mol_type = other DNA
atccctgtccgcgctgtatatgcaatctggtatcacataccaatggttgtggatttatcagaactcattatcaac

SEQ ID NO: 601190 - DNA, 75 bp, synthetic construct
  source 1..75: mol_type = other DNA
attcctgttcgcgtcgcctatgcaatctggtttcgtacgccaatggtagctgatttatctgaggtcattatcaac

SEQ ID NO: 601191 - DNA, 75 bp, synthetic construct
  source 1..75: mol_type = other DNA
ttgccacgatcatgagcattcgaaatataccgaggcggatcagtatggtacgaccgttatcgcaggggaagatgc

SEQ ID NO: 601192 - DNA, 75 bp, synthetic construct
  source 1..75: mol_type = other DNA
tgcttatcaccaatgcagttatttgtactggtatagcaattcgcgttgtcactttccagcgtaacggttctcaac

SEQ ID NO: 601193 - DNA, 75 bp, synthetic construct
  source 1..75: mol_type = other DNA
gctctgggtcatcagggtaatgtcaaaagccccacttatacgctggtcgaaccctatacgctcgacaacttaatg

SEQ ID NO: 601194 - DNA, 75 bp, synthetic construct
  source 1..75: mol_type = other DNA
agcttcgtgaaattgctgaaaaaacaaaaattgctggtgaagcgcctgtaatgcctttcgatcagcgaattaatg

SEQ ID NO: 601195 - DNA, 75 bp, synthetic construct
  source 1..75: mol_type = other DNA
gctcccgaaactcaacagatgatgggggctgaaaacatcagatacaggaggaattatgagcgcattttcttttaa

SEQ ID NO: 601196 - DNA, 75 bp, synthetic construct
  source 1..75: mol_type = other DNA
tgcgaatggcggcagaaaatgcaacaccaggcgaatggtgtactgatgactaccatggggtaattgccgatgccg

SEQ ID NO: 601197 - DNA, 75 bp, synthetic construct
  source 1..75: mol_type = other DNA
atgaaacgcctcggcgcggattgtatgttcctggatattagtcataagcctgcggattttatttgtcagcatttc

SEQ ID NO: 601198 - DNA, 75 bp, synthetic construct
  source 1..75: mol_type = other DNA
agagccgtggcctgcattttacgctggattacccggagctactcacgcattccggtccgtcgatcctttcccctg

SEQ ID NO: 601199 - DNA, 75 bp, synthetic construct
  source 1..75: mol_type = other DNA
atgaaactttcccgtcagacgacttctgatacttctgttgatggccgttcacgcgcatatgcctggggccgtgtc

SEQ ID NO: 601200 - DNA, 75 bp, synthetic construct
  source 1..75: mol_type = other DNA
atggcgctattaatatcacaatccatccccatagccctcaaaaatatgttgaattgtttagagatgcaagaaggc

SEQ ID NO: 601201 - DNA, 75 bp, synthetic construct
  source 1..75: mol_type = other DNA
aagcgtttcaaacgtattggcgttattgaagaagataaaacatataaatctgagcgtggtcaggaaattaaacct

SEQ ID NO: 601202 - DNA, 75 bp, synthetic construct
  source 1..75: mol_type = other DNA
gttttgtgctctggcgtggttgctgttttttgagatgaatactgaaagttactacgcaaaatatacattagattt

SEQ ID NO: 601203 - DNA, 75 bp, synthetic construct
  source 1..75: mol_type = other DNA
gcgggaaaagcgccattgccggggaaatagaaattgcgatgaaagctattggtgtgccggttcaatggactaatg

SEQ ID NO: 601204 - DNA, 75 bp, synthetic construct
  source 1..75: mol_type = other DNA
tgcggaaaaagcgccattgccggggaaatagaaatcgcgatgaaggctattggtgtaccggttcagtggactaat

SEQ ID NO: 601205 - DNA, 75 bp, synthetic construct
  source 1..75: mol_type = other DNA
ctcggcaaatggagaagtttttaaaaactcttttttctaatgaaaagattaaagaaaaatatggagttgtaaatg

SEQ ID NO: 601206 - DNA, 75 bp, synthetic construct
  source 1..75: mol_type = other DNA
tgtcgcccgcgccattgaccatgaaatgaaacgcctcggcgcggattgtatgttcctcgacatcagccataagcc

SEQ ID NO: 601207 - DNA, 75 bp, synthetic construct
  source 1..75: mol_type = other DNA
ttcgctgcaatggcaggcgtggcacgacaccttaacccgcatgtataaccgtggagcactgttcgaaaaagcgcg

SEQ ID NO: 601208 - DNA, 75 bp, synthetic construct
  source 1..75: mol_type = other DNA
ctcgttgcaatggcaggcgtggcacgacactttaacccgtctgtataaccgtggcgcactgttcgaaaaagcgcg

SEQ ID NO: 601209 - DNA, 75 bp, synthetic construct
  source 1..75: mol_type = other DNA
tcgcgagcgacaacgagagagaaaatggtccaggccttcacgccagccttccggtccttctcgctgcgttcgcca

SEQ ID NO: 601210 - DNA, 75 bp, synthetic construct
  source 1..75: mol_type = other DNA
atgattttgaacaattacaatcgctggccgaccgtcggctgtatcttgcaaaacaagccgggcgcaatcgggtct

SEQ ID NO: 601211 - DNA, 75 bp, synthetic construct
  source 1..75: mol_type = other DNA
tgttgattgccaagagcacgacaatacgtatcagtgcctcgctgggagtcagtagcagcgaggaaaccggtgatt

SEQ ID NO: 601212 - DNA, 75 bp, synthetic construct
  source 1..75: mol_type = other DNA
gcgtgcccaggatgtcgccggacgagttggcggcgaagaattttgcgtagttctgccagggactaatctggcgca

SEQ ID NO: 601213 - DNA, 75 bp, synthetic construct
  source 1..75: mol_type = other DNA
atgatcgaatttgtttatccgcacacgcagctggttgcgggtgtggatgaagtcggacgcgggccgttagttggc

SEQ ID NO: 601214 - DNA, 75 bp, synthetic construct
  source 1..75: mol_type = other DNA
gccataagcccgccgattttattcgccagcatttcccgatgatttatgaaaaattgctcgggctggggattgatc

SEQ ID NO: 601215 - DNA, 75 bp, synthetic construct
  source 1..75: mol_type = other DNA
ctggattatccggaactgctcacgcattccggtccatcgatcctttctcccggcaatcattacataaacagataa

SEQ ID NO: 601216 - DNA, 75 bp, synthetic construct
  source 1..75: mol_type = other DNA
ggcacagcacattaccattaccgccgaaactcagggtgcgaaagtcgagtttactgttgaacaactacagcagag

SEQ ID NO: 601217 - DNA, 75 bp, synthetic construct
  source 1..75: mol_type = other DNA
caaattttagattctaaaggtcagcctgtagaattgaattcagatgcggcatccgaatatacattgactgatggc

SEQ ID NO: 601218 - DNA, 75 bp, synthetic construct
  source 1..75: mol_type = other DNA
tgcttttcatctggaaaaactggctgaatatggcgcgactgaacatcatcgtcgcagctttgggcctgtcaaacg

SEQ ID NO: 601219 - DNA, 75 bp, synthetic construct
  source 1..75: mol_type = other DNA
atgaaaatactacgatggttgttcgctctggtcatgcttattgctactacagaagctatggctgccgggcatagc

SEQ ID NO: 601220 - DNA, 75 bp, synthetic construct
  source 1..75: mol_type = other DNA
gcctggtcatgctgatttgcgcagcagaaagtctggcggcgaagaaaattgcaacattgataaccccgatggcat

SEQ ID NO: 601221 - DNA, 75 bp, synthetic construct
  source 1..75: mol_type = other DNA
tatattggccctaaattccataactccacctgtccgtcaatcccgctgacaacgtatgatgtttcctgggatgag

SEQ ID NO: 601222 - DNA, 75 bp, synthetic construct
  source 1..75: mol_type = other DNA
cgatggtggaagtggtttatggtcgctcgctgtatgccggcgcggcgcacggtccgtcaccgactgccggtgaag

SEQ ID NO: 601223 - DNA, 75 bp, synthetic construct
  source 1..75: mol_type = other DNA
agctaacgaactacgattcaacggtcaatacatcattctgtccaggattaccttctgggtggggctgtgggtttc

SEQ ID NO: 601224 - DNA, 75 bp, synthetic construct
  source 1..75: mol_type = other DNA
agttagtgggtttaaatccggtcaatgcatcatcatgtccaggactaccttctgggtgggcctgtgcgagttttg

SEQ ID NO: 601225 - DNA, 75 bp, synthetic construct
  source 1..75: mol_type = other DNA
gcccaaccgacaccccattacggacaaacaactgcacgacatggtggtgcaggtggataccagcagcaggcagcc

SEQ ID NO: 601226 - DNA, 75 bp, synthetic construct
  source 1..75: mol_type = other DNA
tatattggcccgcaggcgcgtaactcgacctgcccggtatcagtggccacctatgatatttcgtggagtgaagac

SEQ ID NO: 601227 - DNA, 75 bp, synthetic construct
  source 1..75: mol_type = other DNA
catcattaaaaattatatctttgaccaagatcggtaaatcatcatgccccgggcttgacgagtttgatagtcgtt

SEQ ID NO: 601228 - DNA, 75 bp, synthetic construct
  source 1..75: mol_type = other DNA
cctgtccgtcaatcccgctgacagcgtatgatgtttcctgggatgagaatacggtgaagcataaaaaaacattga

SEQ ID NO: 601229 - DNA, 75 bp, synthetic construct
  source 1..75: mol_type = other DNA
ggttgctgacgctgatggtgttgagcctgtcggcccaggcgcagacatttcagatgtatacgcctatggggattc

SEQ ID NO: 601230 - DNA, 75 bp, synthetic construct
  source 1..75: mol_type = other DNA
acaacggctgggattgttattctgctgatttaaaagtcactgtaaccggggatgtgcaggggtgtccgtggttag

SEQ ID NO: 601231 - DNA, 75 bp, synthetic construct
  source 1..75: mol_type = other DNA
ggcccgtcaccgactgccggtgaagtgctgattatgcttggtgggccaaacccggcggaagtgcgtgctggtctg

SEQ ID NO: 601232 - DNA, 75 bp, synthetic construct
  source 1..75: mol_type = other DNA
cgccagcactgctctcaatgagcagggatttccgcctgatgttattgaagcagcattggctcatgttgacaaaaa

SEQ ID NO: 601233 - DNA, 75 bp, synthetic construct
  source 1..75: mol_type = other DNA
ctggcaaaaccgctaccactaatgatggtggagcaacttctaagaagaatactggtaacactacaacaagtttag

SEQ ID NO: 601234 - DNA, 75 bp, synthetic construct
  source 1..75: mol_type = other DNA
gtatcaattgtggtaaaaatgtcagagttgagaacggaaaaagcaccttctcagatgccgctaatgagcaagctt

SEQ ID NO: 601235 - DNA, 75 bp, synthetic construct
  source 1..75: mol_type = other DNA
ctggaaaggccgctaccacgaatgatggtggtgcaacttctaaaaagaacacagggaatactacgacaagtttag

SEQ ID NO: 601236 - DNA, 75 bp, synthetic construct
  source 1..75: mol_type = other DNA
acagtggcaaagatggcatctatttccacttaagagataatgtagatgccttcttaaccttatcagctactgaaa

SEQ ID NO: 601237 - DNA, 75 bp, synthetic construct
  source 1..75: mol_type = other DNA
tcagatgccgctaatgagcaggcttcaaaagtgcttaagtcgggtaatgctttacggaagttttctgtgaatccg

SEQ ID NO: 601238 - DNA, 75 bp, synthetic construct
  source 1..75: mol_type = other DNA
ttctcatttttgtcgatgatcccgattttgatggtgtcgtttgccgcagggggctttgtgctggcctcccatccg

SEQ ID NO: 601239 - DNA, 75 bp, synthetic construct
  source 1..75: mol_type = other DNA
atcgtctgcgtggtctgttttttattaattcctatgtgaaaggacgctatttgacccacgatcggcaacgggggg

SEQ ID NO: 601240 - DNA, 75 bp, synthetic construct
  source 1..75: mol_type = other DNA
gggccgcgtggttatagcctatctcttgcgcgttcagtgcgggatgtcgatgaatttgtccgttttgctgccagc

SEQ ID NO: 601241 - DNA, 75 bp, synthetic construct
  source 1..75: mol_type = other DNA
agacactcttgaaaactggcgtgaccagaagcaaattatctcagttgtctgtaaagatggtattaagattgacga

SEQ ID NO: 601242 - DNA, 75 bp, synthetic construct
  source 1..75: mol_type = other DNA
cgcgcgatgtctgggaacgctcgccgcaagatcaggagaagttctgggtaaaatatctgcgtgattttatttcgc

SEQ ID NO: 601243 - DNA, 75 bp, synthetic construct
  source 1..75: mol_type = other DNA
tctgcttttcttttggatcttctggcgcctgccacgccaccgtccgcgtagaaaggcgctgattcgcgggacatt

SEQ ID NO: 601244 - DNA, 75 bp, synthetic construct
  source 1..75: mol_type = other DNA
ggtagcacaaatgataactttcaccgcgtcgggatgtgataaggcggaagtcacggtcacgccaaatcgacatcc

SEQ ID NO: 601245 - DNA, 75 bp, synthetic construct
  source 1..75: mol_type = other DNA
tttggcatctacatgattaataattcaaggacagccaatggcaccgatggtcaggcgtacatggataataacggg

SEQ ID NO: 601246 - DNA, 75 bp, synthetic construct
  source 1..75: mol_type = other DNA
gatgttacaggagatataacaactaacgcctgggtgtatgcaaacaggtttgctattaatagtggctcaacctca

SEQ ID NO: 601247 - DNA, 75 bp, synthetic construct
  source 1..75: mol_type = other DNA
cggcggtgaccggcattttgttggcggcgcgcctcggttctggtaacgcaggtgcggcaaacggtctggagtttg

SEQ ID NO: 601248 - DNA, 75 bp, synthetic construct
  source 1..75: mol_type = other DNA
gttacaagtgttgaatctaacaaaccgttcatctcaccagaggtttatataatcttggaccgtttccggaaggaa

SEQ ID NO: 601249 - DNA, 75 bp, synthetic construct
  source 1..75: mol_type = other DNA
ggcgacacgattctggtcgttttgattacaccaaatgtgcttaattccggctccagtgcagtaataaaaaatgtg

SEQ ID NO: 601250 - DNA, 75 bp, synthetic construct
  source 1..75: mol_type = other DNA
atggagtggctattgcttttaaaaatattcaggccggggatggtaaaaaattcacgctatccagctccaacaact

SEQ ID NO: 601251 - DNA, 75 bp, synthetic construct
  source 1..75: mol_type = other DNA
tttgttgttggaacatggcgatgtggtggtatggggcggtgaatcgcggctgttttatcatggcattcaaccgtt

SEQ ID NO: 601252 - DNA, 75 bp, synthetic construct
  source 1..75: mol_type = other DNA
gtggtgtggggcggtgagtcacggctgttttatcacggtattcaaccgctaaaagcgggatttcatccactgacc

SEQ ID NO: 601253 - DNA, 75 bp, synthetic construct
  source 1..75: mol_type = other DNA
tggcgatgatgaagctatcttcaggccgatacaaaaatacatcaatggcatatggtataacgtcgcacaggtgta

SEQ ID NO: 601254 - DNA, 75 bp, synthetic construct
  source 1..75: mol_type = other DNA
agactttcaacggcgggatcaccggggcgctgacagggaacgccgacaccgcgacgaaattaaaaacagccataa

SEQ ID NO: 601255 - DNA, 75 bp, synthetic construct
  source 1..75: mol_type = other DNA
cttggcattatcggtgcagttgatggcgatgatccggcagtattcagaccaatacaaaaatacatcaatggcaca

SEQ ID NO: 601256 - DNA, 75 bp, synthetic construct
  source 1..75: mol_type = other DNA
acgcctcatggggcatatcaaggtacatattctcagggggggggttctacaacggcgggagatgtgcctaatttg

SEQ ID NO: 601257 - DNA, 75 bp, synthetic construct
  source 1..75: mol_type = other DNA
gagtaatactgtggataactccaattgcccagggattacggatggatggtcatgtgttgatctgggggtcgatat

SEQ ID NO: 601258 - DNA, 75 bp, synthetic construct
  source 1..75: mol_type = other DNA
atgcctatacccacgcgacgctggtttctcctgtgcatttaaaagaagacctcgcgcagacacgcaaacgcggtt

SEQ ID NO: 601259 - DNA, 75 bp, synthetic construct
  source 1..75: mol_type = other DNA
tcaaaactgctcaccctgcagtcgacgggcggtgtagttgagaaaacgctttcgacgtatttaatgaaagatggc

SEQ ID NO: 601260 - DNA, 75 bp, synthetic construct
  source 1..75: mol_type = other DNA
acatggtggtgcatgttgataccagcagccgccagcccattgattccacctgccgcttccagtacacgctcaacg

SEQ ID NO: 601261 - DNA, 75 bp, synthetic construct
  source 1..75: mol_type = other DNA
tgggttgcgcaaatgatcacgttttcatcatcaggctgtgataatgctaatgttacggtggcgcccaaacaggca

SEQ ID NO: 601262 - DNA, 75 bp, synthetic construct
  source 1..75: mol_type = other DNA
tcgcggccgtttctgtgttagctcttgccgggtgtgcctctcaaagcgaaaaggaaaaacaaatctctgcacagc

SEQ ID NO: 601263 - DNA, 75 bp, synthetic construct
  source 1..75: mol_type = other DNA
tcatgatggaagtgattcgtgatatgggcgtagaaaaaaccgttggtttcaaaccggcgggcggcgtgcgtactg

SEQ ID NO: 601264 - DNA, 75 bp, synthetic construct
  source 1..75: mol_type = other DNA
ccagagcctgacgctgctcgaaaagctggacgcactcgatgctgacgaacaggctgccatgtgtgagaagctgca

SEQ ID NO: 601265 - DNA, 75 bp, synthetic construct
  source 1..75: mol_type = other DNA
gccggtatcgcggatcaccgatgaccgcgtgactgagtttggcgcaatggtcattaaagccgcgaaggaagtgac

SEQ ID NO: 601266 - DNA, 75 bp, synthetic construct
  source 1..75: mol_type = other DNA
gccgatttcacgtattaccgatgaccgcgtaaccgagtttggcgcgatggtgattaaagcggcgaaggaagtcac

SEQ ID NO: 601267 - DNA, 75 bp, synthetic construct
  source 1..75: mol_type = other DNA
gttgttaaaaacaaagtaatacggttgcagtcgacgggggggatgattgaaaaaacacttcccacttttctgatg

SEQ ID NO: 601268 - DNA, 75 bp, synthetic construct
  source 1..75: mol_type = other DNA
gtcacatacccgtgccgttcgcggtatagacggggacgtgaaacttaaccgggcactgtgggtgatggcggaagc

SEQ ID NO: 601269 - DNA, 75 bp, synthetic construct
  source 1..75: mol_type = other DNA
ccagacccgcgtgcgcgacccgggccgccggggatacaccaaacacatactgcgtctgcgccgtgacggggagat

SEQ ID NO: 601270 - DNA, 75 bp, synthetic construct
  source 1..75: mol_type = other DNA
aaggttttcagccattcttcgcctgccagacccgcgtgcgcgacccgggccgccggggatacaccaaacacatac

SEQ ID NO: 601271 - DNA, 75 bp, synthetic construct
  source 1..75: mol_type = other DNA
gagtgcttatcagaccatccaggagaacatgctgaaaggggggatttccggtcgcagtgcaaaaggaaaacgtat

SEQ ID NO: 601272 - DNA, 75 bp, synthetic construct
  source 1..75: mol_type = other DNA
aaggctttcagccattcttcgcctgccagacccgtgtgcgtgaccagagtcgccgggaatacacaaaacacatgc

SEQ ID NO: 601273 - DNA, 75 bp, synthetic construct
  source 1..75: mol_type = other DNA
ttgaccggatagaggagaagcgtgatgccatgcagtcgctgattctgccgccaccggcacgccaggcgctggcac

SEQ ID NO: 601274 - DNA, 75 bp, synthetic construct
  source 1..75: mol_type = other DNA
gggaaggcttccagccgttctttgcctgtcagacccgtgtgcgtgacccggcgcgtcgtgagcacacaaagcaca

SEQ ID NO: 601275 - DNA, 75 bp, synthetic construct
  source 1..75: mol_type = other DNA
tgaacgctacacgtatatacccacaatttccctgctggacagcctgcagcgggaaggcttccagccattctttgc

SEQ ID NO: 601276 - DNA, 75 bp, synthetic construct
  source 1..75: mol_type = other DNA
atcattctgctcaattctcatgacggcaccagctcgtatcagatgttaccgggattattccgtgcggtatgccag

SEQ ID NO: 601277 - DNA, 75 bp, synthetic construct
  source 1..75: mol_type = other DNA
gactacttaccaacgcattcaagagaacttgataaaaggcgggctatcgggacgaacgacgaaaggtaggcgtgc

SEQ ID NO: 601278 - DNA, 75 bp, synthetic construct
  source 1..75: mol_type = other DNA
gcgtaaatcaaatccgtcgcgatcgcccattaacgcatgacgaaatgatgcagtatgtccccagcgtattcgggg

SEQ ID NO: 601279 - DNA, 75 bp, synthetic construct
  source 1..75: mol_type = other DNA
gggaaggcttccagccgttctttgcctgtcagacccgtgtacgtgacccaggtcgtcgcgaacacacaaagcaca

SEQ ID NO: 601280 - DNA, 75 bp, synthetic construct
  source 1..75: mol_type = other DNA
ggatcgcagcgtagacgtagcaatttcgcggttaaggaaaaaattgctcgataacgccacggagccttatcgcat

SEQ ID NO: 601281 - DNA, 75 bp, synthetic construct
  source 1..75: mol_type = other DNA
gaaggggcttacgaggtggtgggggtctttgaccggatcgaggacaagcgtgatgccatgcagtcgctgctactg

SEQ ID NO: 601282 - DNA, 75 bp, synthetic construct
  source 1..75: mol_type = other DNA
gaaggggcttacgaggtggtgggcgtatttgaccggatagaggacaagcgtgatgccatgcagtcgctgctactg

SEQ ID NO: 601283 - DNA, 75 bp, synthetic construct
  source 1..75: mol_type = other DNA
aacggctgcgtctgtggccagtctctgggggaagtgcgtgttccgcaccggggaaatgtcgtggatacagtaatt

SEQ ID NO: 601284 - DNA, 75 bp, synthetic construct
  source 1..75: mol_type = other DNA
tgcgtctgcggcgggacggacagataaccggtcagcatgtgcctgaaattattctgctcaactcccatgacggtt

SEQ ID NO: 601285 - DNA, 75 bp, synthetic construct
  source 1..75: mol_type = other DNA
gtggagtgcttatcagaccatcgtaaccggctcatttaaaccgtctggtctgtttcctccggctctacaaaaata

SEQ ID NO: 601286 - DNA, 75 bp, synthetic construct
  source 1..75: mol_type = other DNA
tgcagcgggaaggctttcagcccttcttcgcctgccagacccgtgtgcgcgacccgggccgccggggatacacaa

SEQ ID NO: 601287 - DNA, 75 bp, synthetic construct
  source 1..75: mol_type = other DNA
gtggacagagtcattgaaggggcttacgaggtggtgggcgtgtttgaccggatagaggagaagcgtgatgccatg

SEQ ID NO: 601288 - DNA, 75 bp, synthetic construct
  source 1..75: mol_type = other DNA
aaaaggaaaacgtatccatacccgggccattcacagcattgataccgacattaagctcaatcgcgcattgtgggt

SEQ ID NO: 601289 - DNA, 75 bp, synthetic construct
  source 1..75: mol_type = other DNA
accgctgacattctgacaccacgacgcagggaggattacggtaagaacctgtggagcgcatatcagaccatccag

SEQ ID NO: 601290 - DNA, 75 bp, synthetic construct
  source 1..75: mol_type = other DNA
aacggctgcgtctgtggtcagtctctgggggaagtgcgtgttccgcaccggggaaatgtcgtggacacagtaatt

SEQ ID NO: 601291 - DNA, 75 bp, synthetic construct
  source 1..75: mol_type = other DNA
aacggctgcgtctgtggacagtctctgggggaagtgcgtgttccgcaccggggaaatgtcgtggaaacagttatt

SEQ ID NO: 601292 - DNA, 75 bp, synthetic construct
  source 1..75: mol_type = other DNA
gaactatacttggatccccaccatcaccgtgctggaaagcctgcagcgggaaggctttcagccattcttctcctg

SEQ ID NO: 601293 - DNA, 75 bp, synthetic construct
  source 1..75: mol_type = other DNA
ttgtccccgcgatgttttgcgggtgaagcaattcttcgagcgacttcatgtcgcacttatacctatatacctacc

SEQ ID NO: 601294 - DNA, 75 bp, synthetic construct
  source 1..75: mol_type = other DNA
cctccagctaccagatgctgcgggttacttcaggttcgtctgccagaacggatgcgtctgtggtcagtctctggg

SEQ ID NO: 601295 - DNA, 75 bp, synthetic construct
  source 1..75: mol_type = other DNA
cgtgaccgtccgctgacacacgaagaactgatgcactatgtgccggggattttcggggaagataaacacacgtcc

SEQ ID NO: 601296 - DNA, 75 bp, synthetic construct
  source 1..75: mol_type = other DNA
cgccatgcagtcgctggtcctgccgccaccggcacgccaggcgctggcacaggcggcactgacttaccgttatgg

SEQ ID NO: 601297 - DNA, 75 bp, synthetic construct
  source 1..75: mol_type = other DNA
caggtcgcagagcaaaaggaaaacgtatccaaacccgtgccattcacagcatagacacagaaattaagctcaacc

SEQ ID NO: 601298 - DNA, 75 bp, synthetic construct
  source 1..75: mol_type = other DNA
gggaaatgtggtggacagagtcattgaaggggcttacgaggtggtgggcgtgtttgaccggatagaggagatgcg

SEQ ID NO: 601299 - DNA, 75 bp, synthetic construct
  source 1..75: mol_type = other DNA
gggaaatgtggtggaaaaagtaatagaaggggcttacgaggtggtgggagtatttgaccggatagaggagaagcg

SEQ ID NO: 601300 - DNA, 75 bp, synthetic construct
  source 1..75: mol_type = other DNA
ttgaccggattgaagagaaacgtgatgccatgcagtcgctgctcttaccgccaccggcacgtcaggcgctggcac

SEQ ID NO: 601301 - DNA, 75 bp, synthetic construct
  source 1..75: mol_type = other DNA
attgaagaagctcgcctgatcgcgcctggcgcagatggagtgaaaatgcagtgtgatttattgtcgtgccagaac

SEQ ID NO: 601302 - DNA, 75 bp, synthetic construct
  source 1..75: mol_type = other DNA
tactgaaactccgtggcaaatgctgattgaagaagctcgtctgatcccaccgggcgcggacggcgtaaaaatgca

SEQ ID NO: 601303 - DNA, 75 bp, synthetic construct
  source 1..75: mol_type = other DNA
aaccggtcagcatgtgcctgaaattattctgctcaactcccatgacggtacctccagctaccagatgttgccggg

SEQ ID NO: 601304 - DNA, 75 bp, synthetic construct
  source 1..75: mol_type = other DNA
gtcgcagtgccagaggaaaacgtatccatacccgtgccattcacagcatcgacaccgacattaagctcaaccgcg

SEQ ID NO: 601305 - DNA, 75 bp, synthetic construct
  source 1..75: mol_type = other DNA
ggatgcgtctgtggtcagtctctgggggaagtgcgtgttccacaccggggaaatgtagtggagaaagttatcgaa

SEQ ID NO: 601306 - DNA, 75 bp, synthetic construct
  source 1..75: mol_type = other DNA
aaggcttccagccattcttcgcctgccagacccgcgtgcgcgacccgggccgccggggatacaccaaacacatgc

SEQ ID NO: 601307 - DNA, 75 bp, synthetic construct
  source 1..75: mol_type = other DNA
atgcgaaccagatacgccgtgaccgccccttaacccgcgaagaactgatgcaggtcgtccccagcgtattcgggg

SEQ ID NO: 601308 - DNA, 75 bp, synthetic construct
  source 1..75: mol_type = other DNA
ttggcgaggtgcgggtgccgcacaaaggagatgtcgtgagtcaggtgattgagggggcgtatgaagtattaggga

SEQ ID NO: 601309 - DNA, 75 bp, synthetic construct
  source 1..75: mol_type = other DNA
cccggcctccggtactgaccatctcggcccaacggcggtcattggctcggtgggtaaactgcctacggcagcgat

SEQ ID NO: 601310 - DNA, 75 bp, synthetic construct
  source 1..75: mol_type = other DNA
gcgggcgtaacgccaaaggaggacggtcgcatactcgtgccgtgcgtagcattgacggggacgtgaaacttaacc

SEQ ID NO: 601311 - DNA, 75 bp, synthetic construct
  source 1..75: mol_type = other DNA
cccccacctgcgcagcaggcactggcaaaagctgcgctaacgtatcgctttggtgaggatcaccagccggttact

SEQ ID NO: 601312 - DNA, 75 bp, synthetic construct
  source 1..75: mol_type = other DNA
tgatgaacatcagcccgtcatcaccgccgacatcctgacgccacgacgccgggaggattacggtaaggacctgtg

SEQ ID NO: 601313 - DNA, 75 bp, synthetic construct
  source 1..75: mol_type = other DNA
ccagaactatacgtacatccccaccatcaccgtactggaaagtctgcagcgggaaggctttcagccgttcttcgc

SEQ ID NO: 601314 - DNA, 75 bp, synthetic construct
  source 1..75: mol_type = other DNA
ctgcaagcgcgtcaggccgaacgtcaggcacggctggatgccgctgcacaactggagaaagtggcagacggccgc

SEQ ID NO: 601315 - DNA, 75 bp, synthetic construct
  source 1..75: mol_type = other DNA
ctgtggagcgcatatcagaccatccaggagaatatgctgaaaggcggaatttccggccgcagtgcaaaaggaaaa

SEQ ID NO: 601316 - DNA, 75 bp, synthetic construct
  source 1..75: mol_type = other DNA
gcggtgaatccactctcttacgcgatcctcgaatcctgcggtcgcctgcgttccactcagcctaacctcagcgtg

SEQ ID NO: 601317 - DNA, 75 bp, synthetic construct
  source 1..75: mol_type = other DNA
tcgcgggctattccgccttcttcaccgccctgtcaccggaagctcaggacgatatcatcgcccgtaccgaacata

SEQ ID NO: 601318 - DNA, 75 bp, synthetic construct
  source 1..75: mol_type = other DNA
actcgaaagcctctgccggtagtccgctgtaccagaacgttaccattggtgggcaaaatctggttgatggtcagc

SEQ ID NO: 601319 - DNA, 75 bp, synthetic construct
  source 1..75: mol_type = other DNA
acgagtcaccaaaagtctttttcaaagatggtcgcttggtaaccacctctcaagctgttgccgactacttcgaca

SEQ ID NO: 601320 - DNA, 75 bp, synthetic construct
  source 1..75: mol_type = other DNA
tctggtcgaactcaacgatgacgcacagcggatgcgcgagcgcattcaggcgctggaagatattcttgatgctga

SEQ ID NO: 601321 - DNA, 75 bp, synthetic construct
  source 1..75: mol_type = other DNA
cgttaaccatctttgtgttgttcgttttaccgatttggctctggctgcattacagcaaccgttccagtcgtggtg

SEQ ID NO: 601322 - DNA, 75 bp, synthetic construct
  source 1..75: mol_type = other DNA
tcaggcctggcctctggctcctgaccgtatcgaggttataggcgatccgcagctggcgctggccagagagattgc

SEQ ID NO: 601323 - DNA, 75 bp, synthetic construct
  source 1..75: mol_type = other DNA
atgaatatttactgcgatgatggttcaactaatgttaagctggcatggtttgaaggaaacgagctgcagacccgg

SEQ ID NO: 601324 - DNA, 75 bp, synthetic construct
  source 1..75: mol_type = other DNA
ggtggcactgggatgctacggagaagacggatgaccaggaactcccacaattcccggaagctaaacgatacaatt

SEQ ID NO: 601325 - DNA, 75 bp, synthetic construct
  source 1..75: mol_type = other DNA
tggtcactttcaattgagccagttgctgttgatcaagattcatcaggtgttgatcaaatatggatgcttatgacg

SEQ ID NO: 601326 - DNA, 75 bp, synthetic construct
  source 1..75: mol_type = other DNA
gtaaatgcgatgataattactcagaagagaatgtagaaaacaaaaaaacaaaaaaaataaaaagaggggagccgg

SEQ ID NO: 601327 - DNA, 75 bp, synthetic construct
  source 1..75: mol_type = other DNA
cgagcgcaaagtgattgatggcaagaatgaaaccatcaccactccccgtctgagcttccgttttcttaacgtcag

SEQ ID NO: 601328 - DNA, 75 bp, synthetic construct
  source 1..75: mol_type = other DNA
gcacggcttccggatgggttggcgagactgacgcgcgttcccagactgccacctcaaaactggggctgattgaac

SEQ ID NO: 601329 - DNA, 75 bp, synthetic construct
  source 1..75: mol_type = other DNA
gacagcggttacgggcggcgatcgcatttctaatagtgaaagcccaattcccggcggtggtgatgattacaccca

SEQ ID NO: 601330 - DNA, 75 bp, synthetic construct
  source 1..75: mol_type = other DNA
gagaattataattatatcacccgcactggaggttctgatacttattttttatatactccagctttgtttgttgat

SEQ ID NO: 601331 - DNA, 75 bp, synthetic construct
  source 1..75: mol_type = other DNA
gcagggcatttaccgtaacggacgtgaaggtgatgccggaatcactaccggcggcgttctcccgtctcgcggagc

SEQ ID NO: 601332 - DNA, 75 bp, synthetic construct
  source 1..75: mol_type = other DNA
ggggggtagcgctgatcgtacggcggatgccggggcgcttctcggcgctaatgttgattgtgctgtcgctgaccg

SEQ ID NO: 601333 - DNA, 75 bp, synthetic construct
  source 1..75: mol_type = other DNA
atcgttcttgcaaatgaccatgggctggttcctgaaagaaaaacagctggcgatgatgcagacgccgcaccactt

SEQ ID NO: 601334 - DNA, 75 bp, synthetic construct
  source 1..75: mol_type = other DNA
tgctctttaaggaattgctcaagggcaaaagcacatggcgcgaatctttctgattcatgctctatctttctgcgc

SEQ ID NO: 601335 - DNA, 75 bp, synthetic construct
  source 1..75: mol_type = other DNA
aaaacaattgaaatcaacattaagaaagaaacttatcagcaaataaaagaaaaaacaaagatgaaacctgaagat

SEQ ID NO: 601336 - DNA, 75 bp, synthetic construct
  source 1..75: mol_type = other DNA
tggcatggtgctaaaagcgggagcagaagcgacggtaaacaggaacgtcacgatatcactggagtacagtgggct

SEQ ID NO: 601337 - DNA, 75 bp, synthetic construct
  source 1..75: mol_type = other DNA
aaaataatggatgaaggttattatactttccttgcaagtcttttacatcttgaggtagccaattataacccaata

SEQ ID NO: 601338 - DNA, 75 bp, synthetic construct
  source 1..75: mol_type = other DNA
ccaggcatggccgcttgctcctgaacgtatcgaaacggtcagtgagccgcagctggcgcttgcccgggagattgc

SEQ ID NO: 601339 - DNA, 75 bp, synthetic construct
  source 1..75: mol_type = other DNA
aaacagatttgtataacctacagattcaacagcgcaatgatacacaggcacttcagcgcgaagtacagaaatcgc

SEQ ID NO: 601340 - DNA, 75 bp, synthetic construct
  source 1..75: mol_type = other DNA
acgctcgatgccggtgtgattgtcggccagtttgatgatatcagtgcggtgcacggtaatccgtctgtcggtgtg

SEQ ID NO: 601341 - DNA, 75 bp, synthetic construct
  source 1..75: mol_type = other DNA
ctgatttcctcgttattaggtggctgacagtatacacacaagaaaacggaaaaacactattgacgtggctgacac

SEQ ID NO: 601342 - DNA, 75 bp, synthetic construct
  source 1..75: mol_type = other DNA
atgacaaacacgaaaaaagcggccccgatatggagccgtctttctgaacagataacccgctgcgctgtttgtgtg

SEQ ID NO: 601343 - DNA, 75 bp, synthetic construct
  source 1..75: mol_type = other DNA
atgaaaaaccgtatttatgaaagtttaactaccgtgtttagcgtgctggtagtaagcagctttctttatatttgg

SEQ ID NO: 601344 - DNA, 75 bp, synthetic construct
  source 1..75: mol_type = other DNA
ggaatggcgggcagctgatcagcaaaatactggcaataactccggataaactggtgctggatttcggcagccagg

SEQ ID NO: 601345 - DNA, 75 bp, synthetic construct
  source 1..75: mol_type = other DNA
cgccgtgccggaagaactggatcgcaacattcttaacctgctgaaagatgaagtggtgatgcgtcaggaagccac

SEQ ID NO: 601346 - DNA, 75 bp, synthetic construct
  source 1..75: mol_type = other DNA
gctagctggtcgtggtactctcaccagcggtcagccaacctgccactgatacgcattggtgaagatgctcaccgc

SEQ ID NO: 601347 - DNA, 75 bp, synthetic construct
  source 1..75: mol_type = other DNA
gtacctcaccagaacgtcaccgcgctgaacctgcctggtcagtgcatcaacggcgaatgctatgacgaagtgctg

SEQ ID NO: 601348 - DNA, 75 bp, synthetic construct
  source 1..75: mol_type = other DNA
aaatgctggatgatgcctttttcaacgtggaggcctggatcaacagcgagctggcaaccgaatttgccgaacagg

SEQ ID NO: 601349 - DNA, 75 bp, synthetic construct
  source 1..75: mol_type = other DNA
caataaaccgtttgtcggtttttataccaccaagcgcaccggcggcatgctggtcgattcgcaggccatcaaact

SEQ ID NO: 601350 - DNA, 75 bp, synthetic construct
  source 1..75: mol_type = other DNA
taaaggccgtgaagatggtctgcgcgatctggagcgcaaggcattgcaggtgggcaccgatgaagacggcggcta

SEQ ID NO: 601351 - DNA, 75 bp, synthetic construct
  source 1..75: mol_type = other DNA
cgccggggatacaccaaacacatgctgcgtctgcgccgtgacggggagagaaacggacaacatgtccctgaaatc

SEQ ID NO: 601352 - DNA, 75 bp, synthetic construct
  source 1..75: mol_type = other DNA
cccactgacccatgaagaactgatgcactatgttcccagcatttttggggaagaccggcatacctcccgcagtga

SEQ ID NO: 601353 - DNA, 75 bp, synthetic construct
  source 1..75: mol_type = other DNA
tccccaccatcaccgtgctggaaagtctgcagcgggaaggctttcagccgttcttcgcctgccagacccgtgtgc

SEQ ID NO: 601354 - DNA, 75 bp, synthetic construct
  source 1..75: mol_type = other DNA
attctcaaccctgttgggattaaccggcgtcgagacgaagtattaccaggctgcggatgatattctgcaaacttg

SEQ ID NO: 601355 - DNA, 75 bp, synthetic construct
  source 1..75: mol_type = other DNA
ttgctgcgctgattgcctgctggattaaaatcaaacctgccacctcgcgcctgcgcagtgttcttttccgtggag

SEQ ID NO: 601356 - DNA, 75 bp, synthetic construct
  source 1..75: mol_type = other DNA
gaaaattcctgcagcccgaatgaagatgaaccgagaccatacggttccactatccgatgaggctctctctgtact

SEQ ID NO: 601357 - DNA, 75 bp, synthetic construct
  source 1..75: mol_type = other DNA
gagctgcttgagctgaaacgtccggcaggtggtgcgcaaaataaactggccaccgagcataaagaagcgtttgtg

SEQ ID NO: 601358 - DNA, 75 bp, synthetic construct
  source 1..75: mol_type = other DNA
caacagcagcctgtttgccattcgtctgctgaaggataacgacggaaattatctgtggcgtccgggtattgagct

SEQ ID NO: 601359 - DNA, 75 bp, synthetic construct
  source 1..75: mol_type = other DNA
caaaataaactggccaccgagcataaagaagcgtttgtgggcttcctgcgtaaaggccgtgaagacggtctgcgc

SEQ ID NO: 601360 - DNA, 75 bp, synthetic construct
  source 1..75: mol_type = other DNA
gtacggcttccggctgggttggtgaaactgatgcccgcccggaaaccgatgcgtctaaactcggtcagattgagc

SEQ ID NO: 601361 - DNA, 75 bp, synthetic construct
  source 1..75: mol_type = other DNA
tgaaacaaaatccgttagccgtcctgggcgtgttacgcgatttgcacaaagccgcaattcctttgcgtatcagct

SEQ ID NO: 601362 - DNA, 75 bp, synthetic construct
  source 1..75: mol_type = other DNA
acgatgccttcttcaacgtggaggcctggatcaacagcgagctggcaaccgaatttgccgaacaggaagaaattg

SEQ ID NO: 601363 - DNA, 75 bp, synthetic construct
  source 1..75: mol_type = other DNA
aacgacaagcgcgtggatgcgattgagcaggaaaaaggcaaacttgccgggcaggtggaaaccctgaacgggaaa

SEQ ID NO: 601364 - DNA, 75 bp, synthetic construct
  source 1..75: mol_type = other DNA
ctcagcgagctggaaaatctcaaaagcgaccttgaaaaagagctgcttgagctgaaacgtccggcaggtggagcg

SEQ ID NO: 601365 - DNA, 75 bp, synthetic construct
  source 1..75: mol_type = other DNA
cccgcaggccacccagaaaatgctggatgatgccttcttcaacgtggaggcctggatcaacagcgagctggcaac

SEQ ID NO: 601366 - DNA, 75 bp, synthetic construct
  source 1..75: mol_type = other DNA
ccgatacggaaatcaaagccgccaaacctaaagatgccgattaccagctgtatgacggcgacgggcttactctgc

SEQ ID NO: 601367 - DNA, 75 bp, synthetic construct
  source 1..75: mol_type = other DNA
aagcgtggttacaccattgttgaccgcatcggcacccgcattcttcgtgacccctacaccaaaaaaccattcgtt

SEQ ID NO: 601368 - DNA, 75 bp, synthetic construct
  source 1..75: mol_type = other DNA
aacaggaaaagggcaagctggcgggggaggttgaaaccttaaacggcaagttgtctgaactggatgaacttaaat

SEQ ID NO: 601369 - DNA, 75 bp, synthetic construct
  source 1..75: mol_type = other DNA
agcaggtcgcgcaggaactgcaggcgaagtttgatgcgttcaaagaaaagaacgataagcgcctggaagcagttg

SEQ ID NO: 601370 - DNA, 75 bp, synthetic construct
  source 1..75: mol_type = other DNA
ctggcaaaacggctaccacgaatgacggtggtgcaacttctaagaagaatacaggtaacactacaacaagtttag

SEQ ID NO: 601371 - DNA, 75 bp, synthetic construct
  source 1..75: mol_type = other DNA
acacactgtataaaggtaaacgcccggcagaggtccctcgaaatatggcgtcgctgtgggcagattacactttcc

SEQ ID NO: 601372 - DNA, 75 bp, synthetic construct
  source 1..75: mol_type = other DNA
acgaaacagctcttagtggtctgagtcttggtgcaggggcacgttattttggcgacacctcaagtttctacacta

SEQ ID NO: 601373 - DNA, 75 bp, synthetic construct
  source 1..75: mol_type = other DNA
aaaacttcagggggataactactctgaagcctctattgatccttatttccttgaacgtgtggaattactccgtgg

SEQ ID NO: 601374 - DNA, 75 bp, synthetic construct
  source 1..75: mol_type = other DNA
taccgtttggtctgcaccacatctggaacgtacctttccagatgcagattggtgaatacaccaacgcagcaggtc

SEQ ID NO: 601375 - DNA, 75 bp, synthetic construct
  source 1..75: mol_type = other DNA
cgctttgtgccgatcatttctggcctggctgccatctttactggcgttgtgctgtccttcatttggccgccgatt

SEQ ID NO: 601376 - DNA, 75 bp, synthetic construct
  source 1..75: mol_type = other DNA
gcgcagctggaaaaggccgacgcagactttttggtgaagcgtgaagacgtggtcagtgacgaaggacgatttaac

SEQ ID NO: 601377 - DNA, 75 bp, synthetic construct
  source 1..75: mol_type = other DNA
tacgaaattaccattctgaatcgtcggccaatgttcagaaccgaaaagttagcttcctgaaaaagctattctctt

SEQ ID NO: 601378 - DNA, 75 bp, synthetic construct
  source 1..75: mol_type = other DNA
tgatgcaaaatcgacaaaaatttatacccagaaccatgttgaatgggtagaagttcctcatgctgaaattgtctt

SEQ ID NO: 601379 - DNA, 75 bp, synthetic construct
  source 1..75: mol_type = other DNA
caactaaaagagaaagacgcgaagataaccgcgcttcagggctacatcaaaacgcagtgcttacgcaaagaataa

SEQ ID NO: 601380 - DNA, 75 bp, synthetic construct
  source 1..75: mol_type = other DNA
gcttgagactgtacgtcgactagtgcagcgcattaacgaaatcatgatctatgccgtaaacactggtttgattga

SEQ ID NO: 601381 - DNA, 75 bp, synthetic construct
  source 1..75: mol_type = other DNA
gcgtaatttcccgtctggctggtgaagttttcggttcggcggcaacctttggcgcagtaaaaaaagcctctgcgc

SEQ ID NO: 601382 - DNA, 75 bp, synthetic construct
  source 1..75: mol_type = other DNA
agtatttggttcagcggcaacctttggcgcagtaaaaaaagcctctgcccccgggcaaatatcggttaatgattt

SEQ ID NO: 601383 - DNA, 75 bp, synthetic construct
  source 1..75: mol_type = other DNA
agtgggctgcttaccagaacccggtagttgcgtttggcatttacggtttcatcgaacgttgcctggtaccgtttg

SEQ ID NO: 601384 - DNA, 75 bp, synthetic construct
  source 1..75: mol_type = other DNA
aatcgtgtagcgagtgattattcgtatgaccgtctggcattgtctgttgataactcgactatcgatgacaactac

SEQ ID NO: 601385 - DNA, 75 bp, synthetic construct
  source 1..75: mol_type = other DNA
agatgtatttaacattggtactgccatcactctggatcaggaagttgatctgtccatctctaataactctcatgt

SEQ ID NO: 601386 - DNA, 75 bp, synthetic construct
  source 1..75: mol_type = other DNA
gacattcatcaccggcctgttgcgcaccaccggtcagcccgtcatccctgagccggtgtcaccggaggagttccg

SEQ ID NO: 601387 - DNA, 75 bp, synthetic construct
  source 1..75: mol_type = other DNA
aaaattatcccattatgcccatttgcgaaacatgaatttgataaaacgcgggagtatgatgatattcgcagttga

SEQ ID NO: 601388 - DNA, 75 bp, synthetic construct
  source 1..75: mol_type = other DNA
attgatactctgagcatcaacagtggttcaactgttaatgttgctgattcaacgctgatttctgactctatctct

SEQ ID NO: 601389 - DNA, 75 bp, synthetic construct
  source 1..75: mol_type = other DNA
tactactggttggtttggccatactggtaatgccagcaactatagcaacacgctgactgcagacgatgttgcaat

SEQ ID NO: 601390 - DNA, 75 bp, synthetic construct
  source 1..75: mol_type = other DNA
tgaaaactattcgttatcgcagtctcattgctgaggcgcttttgggtaatttatcagagtgtgaagatacaaaaa

SEQ ID NO: 601391 - DNA, 75 bp, synthetic construct
  source 1..75: mol_type = other DNA
gctgtccttcatttggccgccgattggttccgcaatccagaccttctcccagtgggctgcttaccagaacccggt

SEQ ID NO: 601392 - DNA, 75 bp, synthetic construct
  source 1..75: mol_type = other DNA
cgccactggtactgcatttacctgctgaagaaatcgcctctaaacacctggcggatactggcgtactcgggggga

SEQ ID NO: 601393 - DNA, 75 bp, synthetic construct
  source 1..75: mol_type = other DNA
gcttcctgcgcagcagccgtctgtttcaggggctgattgcccagcgtctgctgccgacactctgtccgcactgcg

SEQ ID NO: 601394 - DNA, 75 bp, synthetic construct
  source 1..75: mol_type = other DNA
gaaacaggagttcctgcaggccgttaaactgttcggtgcccgttatgcgcacatcaacacgccgaagggggtctt

SEQ ID NO: 601395 - DNA, 75 bp, synthetic construct
  source 1..75: mol_type = other DNA
ctgcagagtgatgccggggatgtcctccgccatgacggcagtgagcacagccgttcagaagtgcagacacgcgta

SEQ ID NO: 601396 - DNA, 75 bp, synthetic construct
  source 1..75: mol_type = other DNA
tggagccacctgcgaacctactgccgacgctaaatcggcttatctatccctcagagaacaactaaaaataaaaga

SEQ ID NO: 601397 - DNA, 75 bp, synthetic construct
  source 1..75: mol_type = other DNA
tgagcatgagtgcttcagcccgctcgaacagtttcgtcgtaaattcagggaaatagaggtcggtcatgagcacta

SEQ ID NO: 601398 - DNA, 75 bp, synthetic construct
  source 1..75: mol_type = other DNA
ttgaacttctgagaaagattcaccctcattcaatcatcacaacaaattacgacaaattacttgaatcgatatatc

SEQ ID NO: 601399 - DNA, 75 bp, synthetic construct
  source 1..75: mol_type = other DNA
gctatgagcatgaatgcttcagcccgctcgaacagtttcgtcgtaaattcagggaaatagaggtcggtcatgagc

SEQ ID NO: 601400 - DNA, 75 bp, synthetic construct
  source 1..75: mol_type = other DNA
ttgattatgagaaggtctactctttaagctctcaattatttgagggcgtaattcaatccgcgatggagcataaag

SEQ ID NO: 601401 - DNA, 75 bp, synthetic construct
  source 1..75: mol_type = other DNA
catcgatgttaacgtctctgtcggtaccattttctccatctaccgccgagttacgcccgtcggcacgccggtaac

SEQ ID NO: 601402 - DNA, 75 bp, synthetic construct
  source 1..75: mol_type = other DNA
caaaaccgtcagggaggatatcgttcagtctttgatgaaagtgtacccggatcctgcgctcaatccggcagccag

SEQ ID NO: 601403 - DNA, 75 bp, synthetic construct
  source 1..75: mol_type = other DNA
gtcatgctggttatcattgcggtggtggcagcatcggcgaccttgcaagcttcgggcggtcttgatgtcatgctg

SEQ ID NO: 601404 - DNA, 75 bp, synthetic construct
  source 1..75: mol_type = other DNA
catcggacatatatttttccgagtcgaaacgatccccaaaaagcaatgaatagccaaacagcaaatgcggcatta

SEQ ID NO: 601405 - DNA, 75 bp, synthetic construct
  source 1..75: mol_type = other DNA
aaccagttctgaagcagttcgtaaaggattaattattctaaatatgactcttgatcatgccaacttacagggtat

SEQ ID NO: 601406 - DNA, 75 bp, synthetic construct
  source 1..75: mol_type = other DNA
atgtgcctgtcagaactgcaggccgggctgaacgtgggtcagccgctgtttccgacacatgctttatgtattcgc

SEQ ID NO: 601407 - DNA, 75 bp, synthetic construct
  source 1..75: mol_type = other DNA
ggtaagaaaaatggtattgaagtgttattaaatccggctccggcattgcgtgagttagatatgtcttatgcctgc

SEQ ID NO: 601408 - DNA, 75 bp, synthetic construct
  source 1..75: mol_type = other DNA
ggcctatgccattgttctgctgctggtttccaagtttgtaaactctcaggctgcggcgctggcggcgattgttcc

SEQ ID NO: 601409 - DNA, 75 bp, synthetic construct
  source 1..75: mol_type = other DNA
ttgttgtttaatgctggctattatggtcggtattgcttgctggcaagttattagccgttacatcctggatgtacc

SEQ ID NO: 601410 - DNA, 75 bp, synthetic construct
  source 1..75: mol_type = other DNA
tttattttgctcctgatagtgtcatcgctgatattatttatgactggcaacagtcagatatgtcagaaaaaatgt

SEQ ID NO: 601411 - DNA, 75 bp, synthetic construct
  source 1..75: mol_type = other DNA
cagctgtgttttttaaatatttgtgctctgatgcgtttatgccaggtaagtgtgtaaataaaaataaaggagggg

SEQ ID NO: 601412 - DNA, 75 bp, synthetic construct
  source 1..75: mol_type = other DNA
attgcgtttggctttgtgggaattttcgatcaagacgaagcggagcgaattatcgaaggccaagcaacacatgtt

SEQ ID NO: 601413 - DNA, 75 bp, synthetic construct
  source 1..75: mol_type = other DNA
ctgtgcggcatgatgccgtggttgaccaagttcgccaaagaggctccatcgaaagcctttggcatggtgatggct

SEQ ID NO: 601414 - DNA, 75 bp, synthetic construct
  source 1..75: mol_type = other DNA
cgacaggatttctgttgcgaaaaccgggcggccctgctgcgcctgttagccgaaggagaaacgcctctggcactg

SEQ ID NO: 601415 - DNA, 75 bp, synthetic construct
  source 1..75: mol_type = other DNA
taaaccggagagggattgccagggctaaccttcaggatctgttcaaccattcgacgctgagcgacttctgcgccc

SEQ ID NO: 601416 - DNA, 75 bp, synthetic construct
  source 1..75: mol_type = other DNA
tcattactatgattattctattcaatatacattattcatatattttatctctgcctttcttatggtttttgtggt

SEQ ID NO: 601417 - DNA, 75 bp, synthetic construct
  source 1..75: mol_type = other DNA
atcaatttcctcaaaatcaatcgcgaagtcactatccagacagtattccgctatgccaatcgttatccggtcacg

SEQ ID NO: 601418 - DNA, 75 bp, synthetic construct
  source 1..75: mol_type = other DNA
caggtttaccagcaaaacgctttgcggaactcaatcctgcaccgccgctggattggttattgaaagctttctcgg

SEQ ID NO: 601419 - DNA, 75 bp, synthetic construct
  source 1..75: mol_type = other DNA
tggatgaagtctatcgaccgccttttgaaggtaacggcaaaaatggcccttaccgtgtagatggtccatggcaga

SEQ ID NO: 601420 - DNA, 75 bp, synthetic construct
  source 1..75: mol_type = other DNA
acggtagtgcaccgaccaatgagcagatgatggcgctcttggtggttgcagatcagtacggcttgaaccctttca

SEQ ID NO: 601421 - DNA, 75 bp, synthetic construct
  source 1..75: mol_type = other DNA
tattgttatgtgcttttttttcctatggcgtacttggggactgaaagatataccaaaaatgcctattcataagcg

SEQ ID NO: 601422 - DNA, 75 bp, synthetic construct
  source 1..75: mol_type = other DNA
cggtctaagaattatgcaatgtattgctgaagccgatgatgccggattactgggacgattttcagtcgatatgaa

SEQ ID NO: 601423 - DNA, 75 bp, synthetic construct
  source 1..75: mol_type = other DNA
gtttcattgtttctgctatggggcgcgaagggcttgaactccttctggatgaaatgattaacgacctgaatactc

SEQ ID NO: 601424 - DNA, 75 bp, synthetic construct
  source 1..75: mol_type = other DNA
atgggtttagttccagagatcactggttggatgaaatgctcaggtctgaaaaaatactatttctatatgatagag

SEQ ID NO: 601425 - DNA, 75 bp, synthetic construct
  source 1..75: mol_type = other DNA
tggaaatatgcttcaccaggagcgtgacgatatatccaacatggttccggcatgccacccatgcaatctgcacaa

SEQ ID NO: 601426 - DNA, 75 bp, synthetic construct
  source 1..75: mol_type = other DNA
atgctcattacatacccagataaaggtttcattgtttcagacatggggcgagaagggcttgaactccttctggat

SEQ ID NO: 601427 - DNA, 75 bp, synthetic construct
  source 1..75: mol_type = other DNA
ggttgctcaatggcgctggctgtatgtggcaacgtttatcagtgaagaggaaaacaagaacggcaccattgatat

SEQ ID NO: 601428 - DNA, 75 bp, synthetic construct
  source 1..75: mol_type = other DNA
gtgaaatggtgaaagagtatccgtgggcctatgccattgttctgctgctggtttccaagtttgtaaactctcagg

SEQ ID NO: 601429 - DNA, 75 bp, synthetic construct
  source 1..75: mol_type = other DNA
tggtttacaccatcctgccgatcatctacgacgttgcgattaagaacaacatccgtccggaacgcccaatggcgg

SEQ ID NO: 601430 - DNA, 75 bp, synthetic construct
  source 1..75: mol_type = other DNA
aaacagctggttgcgaaagtcgtggaaaaaaatgcgtcgggaaaaacgaaaaattatcccattatgcccatttgc

SEQ ID NO: 601431 - DNA, 75 bp, synthetic construct
  source 1..75: mol_type = other DNA
ctaaatctaatgatgggttgatgtttttttctggggaatatgtagatattgaaccctatcttgtagggtttagcc

SEQ ID NO: 601432 - DNA, 75 bp, synthetic construct
  source 1..75: mol_type = other DNA
gagccatatctgatagggtttagccatcattattcatcagcaaagatgaacatcactgtgtctaaatcaaagaag

SEQ ID NO: 601433 - DNA, 75 bp, synthetic construct
  source 1..75: mol_type = other DNA
ggtttattaggcggtatcggcctggtcattctggtcttcgtcttccaccttcagccaggtaaaccaccggttgat

SEQ ID NO: 601434 - DNA, 75 bp, synthetic construct
  source 1..75: mol_type = other DNA
agaaagaaaaaactaaatgaatgtcctgcggctgatgcaggtacagtaaataaaattatttcaagctttgggcgg

SEQ ID NO: 601435 - DNA, 75 bp, synthetic construct
  source 1..75: mol_type = other DNA
tcacaccggtcaaccagaaactggtcgttacggccatcacgaaagacggcccacgctatgccggatacggtaatg

SEQ ID NO: 601436 - DNA, 75 bp, synthetic construct
  source 1..75: mol_type = other DNA
cattaatagcgataacttcgccagcggtaagcaatgtttaacatttgagcaacttgttcaggggggggagctata

SEQ ID NO: 601437 - DNA, 75 bp, synthetic construct
  source 1..75: mol_type = other DNA
caatgataacctcctgttcaaatggcttagactctggcagaatgaagggcgcgtttcacggccgtctcccggtaa

SEQ ID NO: 601438 - DNA, 75 bp, synthetic construct
  source 1..75: mol_type = other DNA
cgcagagaacacctcttccgccaccactgccctccggagttacgacacaccggaaacatccgtctccgacgcaac

SEQ ID NO: 601439 - DNA, 75 bp, synthetic construct
  source 1..75: mol_type = other DNA
agcgcgatgataacgcacgtaaactgcagcaacagtacaacaaacaggcccggtatgcccgctcctatattaacc

SEQ ID NO: 601440 - DNA, 75 bp, synthetic construct
  source 1..75: mol_type = other DNA
atattatcctccatgttcaatttatttcatacatatatctttataaggatagagtgtatcgattggtttatgatt

SEQ ID NO: 601441 - DNA, 75 bp, synthetic construct
  source 1..75: mol_type = other DNA
ctgcacctgcgcgatagttggcgctggtctcctaatctgctgtatgcgttggtcagcagtcggtctggaaaattg

SEQ ID NO: 601442 - DNA, 75 bp, synthetic construct
  source 1..75: mol_type = other DNA
gatcaatgatttgtatgatctttctgagtgttttgtttatgattttcaatctacaaacccactttattgtgtaag

SEQ ID NO: 601443 - DNA, 75 bp, synthetic construct
  source 1..75: mol_type = other DNA
taaagattaaaagcaatctattggttagcgcctgccccggggctgggaaaacaaaattattaattgggatgcttg

SEQ ID NO: 601444 - DNA, 75 bp, synthetic construct
  source 1..75: mol_type = other DNA
tattgatataaagctcgtgccaacagagaactttatgcaaaatggcagagacaggagaagaaaaattcgcaagga

SEQ ID NO: 601445 - DNA, 75 bp, synthetic construct
  source 1..75: mol_type = other DNA
ggactggtcgatagctggcgttactcacctaacatactccacgcgctagccagtagtgttcaaaataagacgtta

SEQ ID NO: 601446 - DNA, 75 bp, synthetic construct
  source 1..75: mol_type = other DNA
aggatgtggaaacttttttccgtaaacatgatggcaaaaaatatgactggcgcggagcattaggagagcctgttt

SEQ ID NO: 601447 - DNA, 75 bp, synthetic construct
  source 1..75: mol_type = other DNA
atggaaatacatgaagggaataataaattttatattaatgatgcacagggaaaacaaattgctgaaattgttttt

SEQ ID NO: 601448 - DNA, 75 bp, synthetic construct
  source 1..75: mol_type = other DNA
gctggcagatgttaaaccgggtaagaagataattattctgggagcaggttgtattggtttgatgacgttgcaagc

SEQ ID NO: 601449 - DNA, 75 bp, synthetic construct
  source 1..75: mol_type = other DNA
acgcactatctgtgtcatccggagagctttacttacaaactgcccgacaatatggacacgatggaaggggcgctg

SEQ ID NO: 601450 - DNA, 75 bp, synthetic construct
  source 1..75: mol_type = other DNA
cgggttctgcggtcaccattaaacaggcaccttatctggtaatgcgcggcggtaaaattatgattgttggtactg

SEQ ID NO: 601451 - DNA, 75 bp, synthetic construct
  source 1..75: mol_type = other DNA
agtctgctccctttggccgctcgggaaccccaccacggggtaatgctttttactggcctgctcccttatcgggaa

SEQ ID NO: 601452 - DNA, 75 bp, synthetic construct
  source 1..75: mol_type = other DNA
atgacaaaccttcacgaccgcagagggaacataaaggcccgaatatcggtgaaggaaagcgacccgcgctggtgt

SEQ ID NO: 601453 - DNA, 75 bp, synthetic construct
  source 1..75: mol_type = other DNA
ttgttgaattatcacaatgtggtgtccatgccaatccatagtaagagacacgaacatcatatggagagcattaga

SEQ ID NO: 601454 - DNA, 75 bp, synthetic construct
  source 1..75: mol_type = other DNA
gaagccctgcacaacggcaatcagtagccctcagagtaatggaatggcagaacggttcgtgaaaacgatgaatga

SEQ ID NO: 601455 - DNA, 75 bp, synthetic construct
  source 1..75: mol_type = other DNA
ctggcgctttcgctatcaacgcccagcaacaaaacaacggactatgatgggacttggtgcatttcctgccctttc

SEQ ID NO: 601456 - DNA, 75 bp, synthetic construct
  source 1..75: mol_type = other DNA
aaacggctggtggcgaaggtggtggaaaaaatgcgccgggagaagcggaagattatcccgctatgtccgtttgcg

SEQ ID NO: 601457 - DNA, 75 bp, synthetic construct
  source 1..75: mol_type = other DNA
ggttgaaggtggcgagatccgcgctcgtggcgtagaaatcgaagcgaaagcggcgctgtcggcgagtgttaacgt

SEQ ID NO: 601458 - DNA, 75 bp, synthetic construct
  source 1..75: mol_type = other DNA
gataaagtgctggttacgcttggcggtcgctatgactgggccgatcagtcatctttcaaccgtgattacggtaat

SEQ ID NO: 601459 - DNA, 75 bp, synthetic construct
  source 1..75: mol_type = other DNA
ctgagcgactactttgccaaagcacgggatctggctgggataactccaccagcaggaaaaactccgccaacattt

SEQ ID NO: 601460 - DNA, 75 bp, synthetic construct
  source 1..75: mol_type = other DNA
tcaggctaatgccaccggcagcttattgcctgtatatgtaaatcgtgcatattttactgaccacgcacggtatga

SEQ ID NO: 601461 - DNA, 75 bp, synthetic construct
  source 1..75: mol_type = other DNA
aaaaaatgcgtcgggaaaaacgaaaaattatcccactatgcccatttgcgaaacacgaatttgataaaacgcggg

SEQ ID NO: 601462 - DNA, 75 bp, synthetic construct
  source 1..75: mol_type = other DNA
ttcatattttctgcgatagaaaaccatatgcccggcgcattccgtgggctgtcaaatgatgagttgcagatgatg

SEQ ID NO: 601463 - DNA, 75 bp, synthetic construct
  source 1..75: mol_type = other DNA
aagcctgcgtcacctcatcttaacggaaaggttgaacgttcccaaaagacagacaaagcagagtcttacgctacc

SEQ ID NO: 601464 - DNA, 75 bp, synthetic construct
  source 1..75: mol_type = other DNA
gtgccgaccggagagaatttagcgattatcgaacataccgatgttgatgaaagcctgaaagggcaagggattggt

SEQ ID NO: 601465 - DNA, 75 bp, synthetic construct
  source 1..75: mol_type = other DNA
aaaaaatgcgccaggaaaaacggaaaattatcccgctgtgcccgtttgcaaaacacgaatttgataaaacgcgtg

SEQ ID NO: 601466 - DNA, 75 bp, synthetic construct
  source 1..75: mol_type = other DNA
aaacagctggttgcgaaagtcgtggaaaaaatgcgtcgggaaaaacgaaaaattatcccattatgcccatttgcg

SEQ ID NO: 601467 - DNA, 75 bp, synthetic construct
  source 1..75: mol_type = other DNA
aaagcggtttgcacggtgcttctgccaaccctatttgggagcatgagcatgaaaatgttctccgcgccgccatga

SEQ ID NO: 601468 - DNA, 75 bp, synthetic construct
  source 1..75: mol_type = other DNA
gcgtcgaaaattcccggcggggtgatgccgattgttgttctgaccgaaggactaagtatcgcgaacggtctgctg

SEQ ID NO: 601469 - DNA, 75 bp, synthetic construct
  source 1..75: mol_type = other DNA
atccgacctacggttctacccctgcacaggcctgataagacgcgctggcgtcacatcaggcaacggctgtcggat

SEQ ID NO: 601470 - DNA, 75 bp, synthetic construct
  source 1..75: mol_type = other DNA
aaccacccattgaaagaactggaagtaagagactttgcattaatactggacgagtggatggataaagacatggtc

SEQ ID NO: 601471 - DNA, 75 bp, synthetic construct
  source 1..75: mol_type = other DNA
tatgggttgatatttataaagaagcacagcatgcgggagaagttcctcctggatggaatcctccggaggctaccc

SEQ ID NO: 601472 - DNA, 75 bp, synthetic construct
  source 1..75: mol_type = other DNA
atggattatggaaggcagcgcatagaaaagttggcagtgatagtaccccatatcatatgactcaagatgaaaacc

SEQ ID NO: 601473 - DNA, 75 bp, synthetic construct
  source 1..75: mol_type = other DNA
cgatccaaatctggatattgtggaacaacagcgttatcgggatgctattgaaaagcggaataatgatagcttgta

SEQ ID NO: 601474 - DNA, 75 bp, synthetic construct
  source 1..75: mol_type = other DNA
tatcgactacacgcagcaacagaagattgctgccgggaaggcgatatctgccgacgccattcctggtggttcggt

SEQ ID NO: 601475 - DNA, 75 bp, synthetic construct
  source 1..75: mol_type = other DNA
gcgtggccgtccactggttgtcctgattgacggtgtgcgcctcaactcttcacgttccgacagccgacaactgga

SEQ ID NO: 601476 - DNA, 75 bp, synthetic construct
  source 1..75: mol_type = other DNA
cgccttttattcagacgttatgcccgacgctggtattaggccccggctcaatcaatcaagctcatcagcctgatg

SEQ ID NO: 601477 - DNA, 75 bp, synthetic construct
  source 1..75: mol_type = other DNA
tgatccaaatctggatgttgtggaacaacagcgttatcgtgatgcaattgaaaagcgaaataatgatagctggta

SEQ ID NO: 601478 - DNA, 75 bp, synthetic construct
  source 1..75: mol_type = other DNA
caatcagagattgatgccgatattgctgtgaaaggatcaagtgtgttatttgatccaaatctggatgttgtggaa

SEQ ID NO: 601479 - DNA, 75 bp, synthetic construct
  source 1..75: mol_type = other DNA
ttaaacgtgccaacggttacagcgaactggagatcagccagaagcgcagcatgctggaaaacgtgatgctgaccg

SEQ ID NO: 601480 - DNA, 75 bp, synthetic construct
  source 1..75: mol_type = other DNA
gttccgttcccggctattccaatattatttccatgattggtatgttagccgagcgcttcgttcaacctggtacgc

SEQ ID NO: 601481 - DNA, 75 bp, synthetic construct
  source 1..75: mol_type = other DNA
atgtcgcgtaaccttcgtcattgggtgatttcgctgtttattgtgctggcctggggaagcggctggctgatgttg

SEQ ID NO: 601482 - DNA, 75 bp, synthetic construct
  source 1..75: mol_type = other DNA
agagcttaaagacgcactggctcagctgatccctggccttgacgtcagcagccagagccgaaccaactatggtat

SEQ ID NO: 601483 - DNA, 75 bp, synthetic construct
  source 1..75: mol_type = other DNA
ttattgttcaacatgcatcacgactttaaacgtgccaatggttatagcgaactggaaatcagtcagaaacgcagt

SEQ ID NO: 601484 - DNA, 75 bp, synthetic construct
  source 1..75: mol_type = other DNA
gaacgctttgtacaaccaggtacgcaggtctacgatttgggctgttctttgggcgccgcgacgctctcggtgcgt

SEQ ID NO: 601485 - DNA, 75 bp, synthetic construct
  source 1..75: mol_type = other DNA
tggcgagccaacgtcgctgcaaccggtacgcgcacataaaggccacatctcaaatgccattcgaattatgggtca

SEQ ID NO: 601486 - DNA, 75 bp, synthetic construct
  source 1..75: mol_type = other DNA
agaatggcatatgggtttgcttatggaatggttactgcaattcgacgcggtgtcttaactcccgttctgtgcgtt

SEQ ID NO: 601487 - DNA, 75 bp, synthetic construct
  source 1..75: mol_type = other DNA
aagttcaagaattagaaagcacgatgcataaatatttcagcaattataaaattaactttactgtaaaatttgatg

SEQ ID NO: 601488 - DNA, 75 bp, synthetic construct
  source 1..75: mol_type = other DNA
gagatgttgagcgagctggaagccatcgtcgcggatgctgaaacgcgtttagccgaggatgaagctaccgcgtaa

SEQ ID NO: 601489 - DNA, 75 bp, synthetic construct
  source 1..75: mol_type = other DNA
ctataaccgtgacgtggtcatggtgccgaaagggtaccacccggtggcgacgatggccgggtatgacagttatta

SEQ ID NO: 601490 - DNA, 75 bp, synthetic construct
  source 1..75: mol_type = other DNA
ttattcttaccgcccctattacgcgcggtaagaccaaaatcaccgaagtggcgatcacttccgtgcttaaacagg

SEQ ID NO: 601491 - DNA, 75 bp, synthetic construct
  source 1..75: mol_type = other DNA
aaagggaacgatcgtccgcccgcccccgccggaaaaccgctggagttagcaagcctgccgcctggcaaaataacc

SEQ ID NO: 601492 - DNA, 75 bp, synthetic construct
  source 1..75: mol_type = other DNA
ctggagcgcatttctgacgtaagtgcgtgtcagatagccatgatgacggccagtctgttattcatactggcttcg

SEQ ID NO: 601493 - DNA, 75 bp, synthetic construct
  source 1..75: mol_type = other DNA
ctaacaacgaaatcctcaaagctaaaccccgcgaaaaagacttcactttgcatgatggtaacggcctgttcttac

SEQ ID NO: 601494 - DNA, 75 bp, synthetic construct
  source 1..75: mol_type = other DNA
atctctaacgccatccgtattcagggccagtcggggcactccagcgatccagcacgcggagttaacgctatcgaa

SEQ ID NO: 601495 - DNA, 75 bp, synthetic construct
  source 1..75: mol_type = other DNA
cgccctgcgcggaatggggctgtttatgaccaacgcactgccagtgccgattgacgaaaacgaggtgctggactg

SEQ ID NO: 601496 - DNA, 75 bp, synthetic construct
  source 1..75: mol_type = other DNA
tcggtttttgccgttggcggtaatgccacggcggcgcagttgtgcggtattaacgttcgtcgggtacgcattctt

SEQ ID NO: 601497 - DNA, 75 bp, synthetic construct
  source 1..75: mol_type = other DNA
gctgggaaatagtggatttatcaggccgccgaaacttactcacgctgatacacgtattcgtatagagcccttttt

SEQ ID NO: 601498 - DNA, 75 bp, synthetic construct
  source 1..75: mol_type = other DNA
ccgccgcattcatctctccacccgccagttgctgcgccagttgcggccccccgcgcttgatgaactgacattccg

SEQ ID NO: 601499 - DNA, 75 bp, synthetic construct
  source 1..75: mol_type = other DNA
cgacactttggaaaactggcgtgaccagaagcagattatttcggtcatctgtaaagatggaattaaaattgatga

SEQ ID NO: 601500 - DNA, 75 bp, synthetic construct
  source 1..75: mol_type = other DNA
atagtggaaaggatggagtctatttccatctgcaagataatccagataactttttgacattatctgcgacagaga

SEQ ID NO: 601501 - DNA, 75 bp, synthetic construct
  source 1..75: mol_type = other DNA
atgatttacactaatcagcttcgttacactggcaaagatggtgtttacttccacttaagagataatgtagatgcc

SEQ ID NO: 601502 - DNA, 75 bp, synthetic construct
  source 1..75: mol_type = other DNA
cggttattgcaggagttactcaataatgtctgtaaacacgccggagccagcgaagtgacgattattctgcgccag

SEQ ID NO: 601503 - DNA, 75 bp, synthetic construct
  source 1..75: mol_type = other DNA
gcgccctgggcggcgacttaacgctcgaaaaacagcacggcacgcgggtaattgttaacttgcccacatttttgc

SEQ ID NO: 601504 - DNA, 75 bp, synthetic construct
  source 1..75: mol_type = other DNA
atggaaagaaataacccaatgacggcgttactctccaactgggttgacgcgtgctgcctgttaatggctccgctg

SEQ ID NO: 601505 - DNA, 75 bp, synthetic construct
  source 1..75: mol_type = other DNA
tggtggtgctacttctaagaagaatgcgggtaacgtgactactgaacgcaataacgcacctatgcttatgtgtaa

SEQ ID NO: 601506 - DNA, 75 bp, synthetic construct
  source 1..75: mol_type = other DNA
acagactcagctaattcaggtgctgcaaaggtgcttaagtcgggtaatgctttacggaagttttctgtgaatccg

SEQ ID NO: 601507 - DNA, 75 bp, synthetic construct
  source 1..75: mol_type = other DNA
agagagcacctaagaccatctctattagcggtgttgtagtggttgattcgacgggttcagttctattaaccagac

SEQ ID NO: 601508 - DNA, 75 bp, synthetic construct
  source 1..75: mol_type = other DNA
tgcgttcacccagaactatttcaatcagtggtgtggttgtggttggtgaatccggtagtatcctcatctcaagag

SEQ ID NO: 601509 - DNA, 75 bp, synthetic construct
  source 1..75: mol_type = other DNA
tcagatgccgctaatgagcaagcttcaaaggtgcttaagtcgggtaatgctttacggaagtactctgtgaatccg

SEQ ID NO: 601510 - DNA, 75 bp, synthetic construct
  source 1..75: mol_type = other DNA
gttctattaaccagacaagggcaacttgtagaaacctttatttctacggttgaacaatggcgagaccagaaacag

SEQ ID NO: 601511 - DNA, 75 bp, synthetic construct
  source 1..75: mol_type = other DNA
ttatgtcaggcccaataatgctgccgggtttgacctcatttaccggcggcgtattactgacgccgtttgtctatc

SEQ ID NO: 601512 - DNA, 75 bp, synthetic construct
  source 1..75: mol_type = other DNA
gtcaactctccgtcacaggttatgtagagtggacgctcggaggatcacgaactcgctcagctcctcacattgtga

SEQ ID NO: 601513 - DNA, 75 bp, synthetic construct
  source 1..75: mol_type = other DNA
gtattttgacgatggtactcccctgggatcgaaaacctcacaggactgccggattgatgcgattgcgcagagctg

SEQ ID NO: 601514 - DNA, 75 bp, synthetic construct
  source 1..75: mol_type = other DNA
taacgtgtcgtttgaaacggacagggcaaggtttattggacgtggcagaaatcctgcgaatgcccaggcaataga

SEQ ID NO: 601515 - DNA, 75 bp, synthetic construct
  source 1..75: mol_type = other DNA
cacgatgagcgcattgccggtgctgtctccggcggaaatgaccatatctccggacgtctttccgtggcatatcag

SEQ ID NO: 601516 - DNA, 75 bp, synthetic construct
  source 1..75: mol_type = other DNA
agatcgatctcgatgccaaactctggacgatacccgccgaacgaatgaaggctaagcgtgaacacattgtccctt

SEQ ID NO: 601517 - DNA, 75 bp, synthetic construct
  source 1..75: mol_type = other DNA
gctttcagaggaaaaagcgcccgatacaccggaacatcatgttggttattatcttgcgggcgaaggtcgacaggc

SEQ ID NO: 601518 - DNA, 75 bp, synthetic construct
  source 1..75: mol_type = other DNA
tgaaccctcgccggaaagtcacgcgctgctcagacaggctatcgccgatacgcaggcgcttaatcgccgctaccc

SEQ ID NO: 601519 - DNA, 75 bp, synthetic construct
  source 1..75: mol_type = other DNA
tgtcgaatgcgcagagagtgcgcctggtgatttaatcatggtggttgccgatatggcgcgctcccgacctccgtt

SEQ ID NO: 601520 - DNA, 75 bp, synthetic construct
  source 1..75: mol_type = other DNA
ctgacaaaacagcgaactaaacagagcttcggttcctatcctgctgtctcgctttccgatgctcgtaagctcaga

SEQ ID NO: 601521 - DNA, 75 bp, synthetic construct
  source 1..75: mol_type = other DNA
cggcgataaccgacataacgtgtcgtttgaaacggacagggcaaggtttattggacgtggcagaaaccctgcgaa

SEQ ID NO: 601522 - DNA, 75 bp, synthetic construct
  source 1..75: mol_type = other DNA
gagcggatccatgtttgaatatctgatgccgaatctggtgatgcccacctggcccggcagcctgctcgatgaaat

SEQ ID NO: 601523 - DNA, 75 bp, synthetic construct
  source 1..75: mol_type = other DNA
atttacgatgttgatatttttatgcaggccactaccaacatctgcccggaaaatctggtactcagccacgatctg

SEQ ID NO: 601524 - DNA, 75 bp, synthetic construct
  source 1..75: mol_type = other DNA
ccgatcgtttaagaaatgaattagcggagcaaggcattgatcttgaagatgtcggcgaaaatacctcatggcgta

SEQ ID NO: 601525 - DNA, 75 bp, synthetic construct
  source 1..75: mol_type = other DNA
ttgaactgacaagagagattaacaggctttgcggaacgaatgatgatgaagccgcagcacttgccaccacgctga

SEQ ID NO: 601526 - DNA, 75 bp, synthetic construct
  source 1..75: mol_type = other DNA
catcgagctatgcaggaaaactttgccgccaaagattacgggcaaactgaaatgccttcatgggcgcaggagtga

SEQ ID NO: 601527 - DNA, 75 bp, synthetic construct
  source 1..75: mol_type = other DNA
acgtagggaccgtgcgggaagttgacgcggcggacgtgggccagagagatggccgcaactacggactgattttca

SEQ ID NO: 601528 - DNA, 75 bp, synthetic construct
  source 1..75: mol_type = other DNA
cattggtagtggcgttaacgtccgctgcctgattaaccctaacatccgcgttaatggcctgatcgagctgaatca

SEQ ID NO: 601529 - DNA, 75 bp, synthetic construct
  source 1..75: mol_type = other DNA
ggaggataagtatattcacgaagccattgtgttaaatgccgatactggcctgatcggtatgccgcagcagacgat

SEQ ID NO: 601530 - DNA, 75 bp, synthetic construct
  source 1..75: mol_type = other DNA
tttgggcgcaatagtactgctttccgctggcgtctgggcgttgcaatatgctggcagtgggccagaaaaaacgtt

SEQ ID NO: 601531 - DNA, 75 bp, synthetic construct
  source 1..75: mol_type = other DNA
cagggaaactgtttacgcaaaatattggtgcgcacgaaagcaaagcgccagaaggtgttttgccgataagccaga

SEQ ID NO: 601532 - DNA, 75 bp, synthetic construct
  source 1..75: mol_type = other DNA
gtgccttattcacacggtattgctgaagagatgctctcacaaatcggtcaggaaaaagataagttgaatggggca

SEQ ID NO: 601533 - DNA, 75 bp, synthetic construct
  source 1..75: mol_type = other DNA
catcgagctatgcaggaaaactttgccaccaaagattacggacaaactgaaatgccttcatgggcgcaggagtga

SEQ ID NO: 601534 - DNA, 75 bp, synthetic construct
  source 1..75: mol_type = other DNA
taagaaaataaagttactcaccgtgattaaacagtcggcacgttttctcttaatatatttagggttattaactgc

SEQ ID NO: 601535 - DNA, 75 bp, synthetic construct
  source 1..75: mol_type = other DNA
gaccagcctgcgcaggcggcgctgtggcacgataaacagggacatctttcacattatatggtgctgattcagcgc

SEQ ID NO: 601536 - DNA, 75 bp, synthetic construct
  source 1..75: mol_type = other DNA
ggcttatcggcatgccgcagcagactatcggtaacggcgtaaacgtccgcgctcttattaatccgaacatccggg

SEQ ID NO: 601537 - DNA, 75 bp, synthetic construct
  source 1..75: mol_type = other DNA
ggccgcaactacggactaattttcagcggtgaaattcgctactcggttacaggaaaagacagtccggttgattcc

SEQ ID NO: 601538 - DNA, 75 bp, synthetic construct
  source 1..75: mol_type = other DNA
tcaccgggaaggaattttcgaaagtgcggctgattgccggttacgacggtatcgcgccggaggtggcggcaagcg

SEQ ID NO: 601539 - DNA, 75 bp, synthetic construct
  source 1..75: mol_type = other DNA
tatcggtaacggcgtaaacgtccgcgcgctgattaatccgaacatccgggttaacgggctcattcagcttgatca

SEQ ID NO: 601540 - DNA, 75 bp, synthetic construct
  source 1..75: mol_type = other DNA
caacaagcataaaaaaataccaaccagtgatgtgtatgtgatttatcttgtaacgtctgagcgacatgcgtttct

SEQ ID NO: 601541 - DNA, 75 bp, synthetic construct
  source 1..75: mol_type = other DNA
atctgctcaactatttcttcggcggcggttcggtcagcttcgtggcgttctcctgcctggcgttctttggctcag

SEQ ID NO: 601542 - DNA, 75 bp, synthetic construct
  source 1..75: mol_type = other DNA
gtcgtatatgggatttttcagcatgggctgtattttcatcggcgtattcctgatgcctgcctcagtcagacgttt

SEQ ID NO: 601543 - DNA, 75 bp, synthetic construct
  source 1..75: mol_type = other DNA
ggacggaaatattacgctcagcggcaccacatcgcagcctgccagcatcgcaatggatggcgtttatattgtgcg

SEQ ID NO: 601544 - DNA, 75 bp, synthetic construct
  source 1..75: mol_type = other DNA
tcgtggacggtcagcgccagatggtggcgaataacgaatatgttcatgaagcgattgtgctcaacagcgctaccg

SEQ ID NO: 601545 - DNA, 75 bp, synthetic construct
  source 1..75: mol_type = other DNA
ggcttccgtgtaccgcaccgcgctgtcgaacaatgatatcgcgaaggctggtgggaagatcaccgaccagaacac

SEQ ID NO: 601546 - DNA, 75 bp, synthetic construct
  source 1..75: mol_type = other DNA
ggacggaaatatcacgctaagcggcaccacggcgcaacctgccagtatcgcaacggatggcgtttatattgtgcg

SEQ ID NO: 601547 - DNA, 75 bp, synthetic construct
  source 1..75: mol_type = other DNA
tcgagttgcagctcctggacgagaacgggcaggggattgaactcagcgattttaaagtaacctttacgatcgact

SEQ ID NO: 601548 - DNA, 75 bp, synthetic construct
  source 1..75: mol_type = other DNA
tcgggacagtgcgggaagttgacgcggcggacgtgggccagagtgatggtcgcaactacggactgattttcagcg

SEQ ID NO: 601549 - DNA, 75 bp, synthetic construct
  source 1..75: mol_type = other DNA
tgatattcgccttgctctttcgttagagctatcagggtggcgactccctgatgatgcaaagattgacgaccatca

SEQ ID NO: 601550 - DNA, 75 bp, synthetic construct
  source 1..75: mol_type = other DNA
ttaagaagcgtgacagtatcggaaaagaaatttcttgatgatgcagtgtgtgaggcaatgaaagtgaaaggtaag

SEQ ID NO: 601551 - DNA, 75 bp, synthetic construct
  source 1..75: mol_type = other DNA
accaggagctggtgaaactggttactgaacgcagcaatcagccactgcatgatgtggacctggacagttatttat

SEQ ID NO: 601552 - DNA, 75 bp, synthetic construct
  source 1..75: mol_type = other DNA
tggccctggtctacatccagctaaatccacagtggcgtaaagctgaacctcaaccccaggccaccacctccaccg

SEQ ID NO: 601553 - DNA, 75 bp, synthetic construct
  source 1..75: mol_type = other DNA
tggcttgtggtggcgtgctgttgcgctatgcgatggcatccagaaaacaggatgccatgatggcagaccacttag

SEQ ID NO: 601554 - DNA, 75 bp, synthetic construct
  source 1..75: mol_type = other DNA
ttggttttggcttgctgctgcgcgtgatgttcaaagcacaatatatcccttacctgatcgccggtttcctgtttg

SEQ ID NO: 601555 - DNA, 75 bp, synthetic construct
  source 1..75: mol_type = other DNA
gtacccacgaaaggacaaatcacacgcagcgcggttgaatactggtacagggcaacgttaggagcctggctatga

SEQ ID NO: 601556 - DNA, 75 bp, synthetic construct
  source 1..75: mol_type = other DNA
gaaaaacctgcagcgatgatggaacatattataaaaagtagttcccgccccggagatatcgttgccgatttcttt

SEQ ID NO: 601557 - DNA, 75 bp, synthetic construct
  source 1..75: mol_type = other DNA
ggtcgttgtcagtttcgtgttcgcattttgcgcctacatttttggaagttatgtttccaaaatccttgatgcctt

SEQ ID NO: 601558 - DNA, 75 bp, synthetic construct
  source 1..75: mol_type = other DNA
ggcagatccatctataatattttttcttgatttttggaaaaatatagataaaagcataaaattcatcatgatata

SEQ ID NO: 601559 - DNA, 75 bp, synthetic construct
  source 1..75: mol_type = other DNA
caagcgcgagtgtcagcgaacttaagaaaaacccaatggcgactgtcagctccggtgatggctacccggttgcta

SEQ ID NO: 601560 - DNA, 75 bp, synthetic construct
  source 1..75: mol_type = other DNA
accaggaactggtgaaactggttactgaacgcagcaatcagccactgcatgatgtggacctagacagttatttat

SEQ ID NO: 601561 - DNA, 75 bp, synthetic construct
  source 1..75: mol_type = other DNA
gatcatccgtgagatgcataaacactgtccgcgtccgatcgtgatgccgctgtctaacccgacgtcacgcgtgga

SEQ ID NO: 601562 - DNA, 75 bp, synthetic construct
  source 1..75: mol_type = other DNA
aaaggtcatggtcgcgaaatcccgtaatgttgatcgcaataaaacagtaatatgtggtacccgttatgggaatgt

SEQ ID NO: 601563 - DNA, 75 bp, synthetic construct
  source 1..75: mol_type = other DNA
tgacgtgatggcaggcattatcaagagcatggctcctgaaattattgaaaaagcaacccaggagttgttgaagtc

SEQ ID NO: 601564 - DNA, 75 bp, synthetic construct
  source 1..75: mol_type = other DNA
ttctatctgcgccagcatggcgaggaaaaaggccgtcagattgcctgtgccctgcttgaagatttaatggaagcc

SEQ ID NO: 601565 - DNA, 75 bp, synthetic construct
  source 1..75: mol_type = other DNA
ggaccgctcaaggccgcgccctcactgtcctttctcgggctggccgtgatggatgaactctgcgcccgtcacatg

SEQ ID NO: 601566 - DNA, 75 bp, synthetic construct
  source 1..75: mol_type = other DNA
ccattattagtggaacctatttatttcttactggagttaggcgtggagcttataagccatgttttttacattggc

SEQ ID NO: 601567 - DNA, 75 bp, synthetic construct
  source 1..75: mol_type = other DNA
agcatgggaccggaaatcattgaaaaggcatccagagagctactgaaatcagcacgagccaaaggactgaatgca

SEQ ID NO: 601568 - DNA, 75 bp, synthetic construct
  source 1..75: mol_type = other DNA
acaatacaagaaatattgagtttcaggaaaatggaggttttgccgtaaatatgaatgtgcgactggaagaatcct

SEQ ID NO: 601569 - DNA, 75 bp, synthetic construct
  source 1..75: mol_type = other DNA
aacaataaactcaagttttatatcggtgacgtaagggattattcgagtgtgttaaatgcatctcgaggagttgat

SEQ ID NO: 601570 - DNA, 75 bp, synthetic construct
  source 1..75: mol_type = other DNA
taatggagatatatttgtacagaaagcacctgctgccactatagatgtattggttaaagcattgttagatattat

SEQ ID NO: 601571 - DNA, 75 bp, synthetic construct
  source 1..75: mol_type = other DNA
gatatctttgtgcaaaaagcacctgcagcaactattgacacattagctattgctttaaaggaattactaaatgtt

SEQ ID NO: 601572 - DNA, 75 bp, synthetic construct
  source 1..75: mol_type = other DNA
tcgggaccgcttaaagcctgtccggttctctcactgctcggaatgacggtaatggatgaactttgctcccgtcac

SEQ ID NO: 601573 - DNA, 75 bp, synthetic construct
  source 1..75: mol_type = other DNA
agctctatgaagcgctgctgagccgtgaagagatgattgcggccatcgatatgggtgattactatcgcgtaccac

SEQ ID NO: 601574 - DNA, 75 bp, synthetic construct
  source 1..75: mol_type = other DNA
tttatttatcatgctgcagccctgaagcaagtgccttcctgcgaattccaccccatggaagctgtaaaaacgaat

SEQ ID NO: 601575 - DNA, 75 bp, synthetic construct
  source 1..75: mol_type = other DNA
gatttatgtcctgctgcttggcggcatggtgttcctgttcctgcgtttgccgacgtcgttcttgccgctggaaga

SEQ ID NO: 601576 - DNA, 75 bp, synthetic construct
  source 1..75: mol_type = other DNA
aatcaggtgtggtgcggtgatgtgacctatagtgtgcccggagttcagggcgggcatggatgcttaaatgaaccg

SEQ ID NO: 601577 - DNA, 75 bp, synthetic construct
  source 1..75: mol_type = other DNA
ttcgccgtgactgacacaaatcagctctggtgcagtgatgtgacctatagtgtgcccagagttcagggtaagcag

SEQ ID NO: 601578 - DNA, 75 bp, synthetic construct
  source 1..75: mol_type = other DNA
tgcgctgatggctgcacgtaaccagttgctggcgctggcggcggaaaatccggaattaacccgcgtgcgccataa

SEQ ID NO: 601579 - DNA, 75 bp, synthetic construct
  source 1..75: mol_type = other DNA
acgaaagaatttaataagattaaagaagcccgcgttatcgccagcagcccgccagcaatcagcggtcttggcagt

SEQ ID NO: 601580 - DNA, 75 bp, synthetic construct
  source 1..75: mol_type = other DNA
ggcctgttaacggtcattggtttatcggcgaaaaacgctatcctgatcgtcgagtttgctaacgagatgaaccaa

SEQ ID NO: 601581 - DNA, 75 bp, synthetic construct
  source 1..75: mol_type = other DNA
agaaagcgcaactgcctaccaccatgactttaatggcgctgggcatgttgccaaaagcgcatccgctgtcgctgg

SEQ ID NO: 601582 - DNA, 75 bp, synthetic construct
  source 1..75: mol_type = other DNA
gctgggcgtacctcgccgttgttctcgacctgttcgcaagaaaaccagtgggctgggccatgtcgttctcgccgg

SEQ ID NO: 601583 - DNA, 75 bp, synthetic construct
  source 1..75: mol_type = other DNA
cgcacccgcctttagcgaagaaagcattcgtgacgcagcggcaatgattaacgccgccaaacgcccggtgcttta

SEQ ID NO: 601584 - DNA, 75 bp, synthetic construct
  source 1..75: mol_type = other DNA
gacctcatcaatataacgatggtttgacgccgaatgaatcagaacgattgttctggaaaaactctaaagccgtgg

SEQ ID NO: 601585 - DNA, 75 bp, synthetic construct
  source 1..75: mol_type = other DNA
ttacgtaagcttcagcgaggcagctcacgccataacggactatatcgttggatattacaacgcactaagaccgca

SEQ ID NO: 601586 - DNA, 75 bp, synthetic construct
  source 1..75: mol_type = other DNA
caccatgaaagcgctggaaatggcatgggaaacccgtggtaagcccggcggggtgatgttccacagcgagcaggg

SEQ ID NO: 601587 - DNA, 75 bp, synthetic construct
  source 1..75: mol_type = other DNA
tcccactatcgccgtgccggtggtgttgatgggaaccttttccgtgctttacgcctttggttatagcgtcaacac

SEQ ID NO: 601588 - DNA, 75 bp, synthetic construct
  source 1..75: mol_type = other DNA
gttggctcgacccaacaaacttttgtgcacgcattgacgggctttcagaatggcactttaaatatcgatgctggt

SEQ ID NO: 601589 - DNA, 75 bp, synthetic construct
  source 1..75: mol_type = other DNA
cgcggatcattaccactcgtcggggatcatcgcctcgctggaagctggctatcagtggttaccggggcatggtgt

SEQ ID NO: 601590 - DNA, 75 bp, synthetic construct
  source 1..75: mol_type = other DNA
caagctggtttcagcacggtaagcagaagcagggggcctggctggataactggttgcagtacgcgtggtttagca

SEQ ID NO: 601591 - DNA, 75 bp, synthetic construct
  source 1..75: mol_type = other DNA
tgattataccggcggcggtacgctactgctcgacagcgaattaaacggcgatgactcagcaagcgaccaactggt

SEQ ID NO: 601592 - DNA, 75 bp, synthetic construct
  source 1..75: mol_type = other DNA
ggttttttcggatatgaccaataacgccagcggaggagccgtatttttgcaacaaggagcggaattttcactatt

SEQ ID NO: 601593 - DNA, 75 bp, synthetic construct
  source 1..75: mol_type = other DNA
cgtggtttaacaatgatgtttccgaacatgaagatggcgcggatcattaccactcatcggggattatcgcctcgc

SEQ ID NO: 601594 - DNA, 75 bp, synthetic construct
  source 1..75: mol_type = other DNA
gcagagtatgagccggcgcggaaactgctgggataacagcccaatggaacgcttcttcaggagtctgaagaacga

SEQ ID NO: 601595 - DNA, 75 bp, synthetic construct
  source 1..75: mol_type = other DNA
ttgccacggtcggttcaggccctggcggcaacgggcaaaatgtggcgcgtatgtttatccgcctgaaagactgga

SEQ ID NO: 601596 - DNA, 75 bp, synthetic construct
  source 1..75: mol_type = other DNA
cttctctgctttcgcgacctcacgctgggagacaggctcgccgcgtctggaacgctataacggttattctgcggt

SEQ ID NO: 601597 - DNA, 75 bp, synthetic construct
  source 1..75: mol_type = other DNA
ttaaccccattactggcattggcgatccgacatctacaggtataaaagtggttgatttcgctggcgatcccacac

SEQ ID NO: 601598 - DNA, 75 bp, synthetic construct
  source 1..75: mol_type = other DNA
gcgtatgattacacgctggtggaagataacaacgactggtatctgcgatcacaagaagtcaatccgacgccgccg

SEQ ID NO: 601599 - DNA, 75 bp, synthetic construct
  source 1..75: mol_type = other DNA
tggaaatggcatgggaaacccatggtaagcccggcggggtgatgttccacagcaatcaggacagtcattatacga

SEQ ID NO: 601600 - DNA, 75 bp, synthetic construct
  source 1..75: mol_type = other DNA
gggtgatgttccacagcgatcagggcagtcattatacgagcaggcagttccggcagttactgtggcgataccaga

SEQ ID NO: 601601 - DNA, 75 bp, synthetic construct
  source 1..75: mol_type = other DNA
gtatgcaggcttctggctggttgtacggtctgctgcctgctctgaaaaagatccacactaataaacgcgacctgg

SEQ ID NO: 601602 - DNA, 75 bp, synthetic construct
  source 1..75: mol_type = other DNA
tctcgcaatcccttgccaaagaacagtcactggaaagtctggttcgacagcttctggagatgctggaaatggtca

SEQ ID NO: 601603 - DNA, 75 bp, synthetic construct
  source 1..75: mol_type = other DNA
ggcagttccggcagttattgtggcgataccagatcaggcagagtatgagccggcgcggaaactgctgggataaca

SEQ ID NO: 601604 - DNA, 75 bp, synthetic construct
  source 1..75: mol_type = other DNA
gaacagtacggctcacagtgatggaaaagtcactactgaagaagccagtgcgcaatgcacagctgataatggcag

SEQ ID NO: 601605 - DNA, 75 bp, synthetic construct
  source 1..75: mol_type = other DNA
gctccggcttcaacatcaggtttcaacaatggttttaccgtcacctatgaaaaagtcccacaggatgcctgtatc

SEQ ID NO: 601606 - DNA, 75 bp, synthetic construct
  source 1..75: mol_type = other DNA
aaactgctgggataacagcccaatggaacgcttcttcaggagtctgaagaacgaatggatgccggtgtgtatggg

SEQ ID NO: 601607 - DNA, 75 bp, synthetic construct
  source 1..75: mol_type = other DNA
atggcatctaatcaaaccaccctgccgaacgtcagtgaaaacgaagaaacactgctgacaggcgtcaatgaaaac

SEQ ID NO: 601608 - DNA, 75 bp, synthetic construct
  source 1..75: mol_type = other DNA
cagggaaaaacaccaaaagcctcccctatctaccgcgctcttgatgtcagactccctgaacagttctcgataatc

SEQ ID NO: 601609 - DNA, 75 bp, synthetic construct
  source 1..75: mol_type = other DNA
cgatattgcgatgtatcaggagaaaaaacacaaacagaaaacaccttttgtcgcgcatccagcgctacattcctg

SEQ ID NO: 601610 - DNA, 75 bp, synthetic construct
  source 1..75: mol_type = other DNA
ggattggcgatgcgatgttctggctgacgttgctgccaatttgcggcgggattggtgccagtctggcgttgcaag

SEQ ID NO: 601611 - DNA, 75 bp, synthetic construct
  source 1..75: mol_type = other DNA
ccaggtacttgaactgcatggcatcagccacggctctgccggagcaagaagcatcgccacaatggcaacccagag

SEQ ID NO: 601612 - DNA, 75 bp, synthetic construct
  source 1..75: mol_type = other DNA
gctgtattacgcagtcaggtacttgagctacatggcatcagccacggttcggccggagcaagaagcatcgccaca

SEQ ID NO: 601613 - DNA, 75 bp, synthetic construct
  source 1..75: mol_type = other DNA
ggccgaagaagcgggcgcgcagttaattaccgggatccgcgtcgataacctcgtacagcgcgatggcaaagtcgt

SEQ ID NO: 601614 - DNA, 75 bp, synthetic construct
  source 1..75: mol_type = other DNA
atgcgtaagaaaatcctccgccacgcgaagaaagtaggcttcatcaatctgatcaaggatggcatgaaaggagtg

SEQ ID NO: 601615 - DNA, 75 bp, synthetic construct
  source 1..75: mol_type = other DNA
tataatggtggtttgacgccgaatgaatcagaacgattgttctggaaaaactctaaagctgtggccagtttttgt

SEQ ID NO: 601616 - DNA, 75 bp, synthetic construct
  source 1..75: mol_type = other DNA
ttttgccgggcaggggatccagcaacaatggcagatgaagcgagccatgctttcaccacgttatacaacgcgaag

SEQ ID NO: 601617 - DNA, 75 bp, synthetic construct
  source 1..75: mol_type = other DNA
aacagcatccggcagtcgcaccgctgatcgcaggcggaaagctggtggaatattccgctcacgtggtgccggaag

SEQ ID NO: 601618 - DNA, 75 bp, synthetic construct
  source 1..75: mol_type = other DNA
cgaatataacggtggattaccaccaaatgaatcggaaaaccgataccgaaaaaactctaaaaccgtggccagttt

SEQ ID NO: 601619 - DNA, 75 bp, synthetic construct
  source 1..75: mol_type = other DNA
tggtgactgttggtttgttgctaaccgtggcgcggacgttgcgctgattggcacacctgacggtgtcaaaactat

SEQ ID NO: 601620 - DNA, 75 bp, synthetic construct
  source 1..75: mol_type = other DNA
atgaaatcaacggccacatgcaaatgatcaaaggcggcggcgcagcgctgacccgtgaaaaaatcattgcttcgg

SEQ ID NO: 601621 - DNA, 75 bp, synthetic construct
  source 1..75: mol_type = other DNA
ttcagcaattatgtgggaaacgataagccactgcaggggataaacgtcaggtatcgttatgaaataacggataag

SEQ ID NO: 601622 - DNA, 75 bp, synthetic construct
  source 1..75: mol_type = other DNA
ccaaaagcgcatccgctgtcgctgggtatgctggggatgcacggcgtgcgcagcaccaactatattttgcaggag

SEQ ID NO: 601623 - DNA, 75 bp, synthetic construct
  source 1..75: mol_type = other DNA
gggaaacccgtggtaagcccgtcggggtgatgttccacagcgatcaaggcagtcattatacgagcaggcagttcc

SEQ ID NO: 601624 - DNA, 75 bp, synthetic construct
  source 1..75: mol_type = other DNA
atgattcgcgtgaatgaaggaggaacacacgtcgacgtagaaatttggcaattaccgctggccagttttgccgct

SEQ ID NO: 601625 - DNA, 75 bp, synthetic construct
  source 1..75: mol_type = other DNA
agccaatgcctgctttcccgtataccgccgattacttttctggcctgaccgccaccacggcggcgctggcagcac

SEQ ID NO: 601626 - DNA, 75 bp, synthetic construct
  source 1..75: mol_type = other DNA
gtggcaaacgatggatggccgtacctgcaaagggccgaacgttatgccgaaattcaaaaataacccaggccaaat

SEQ ID NO: 601627 - DNA, 75 bp, synthetic construct
  source 1..75: mol_type = other DNA
ctggtgaaacgtcttggaatcgaagaaggtattgagctgaacccgccgctgttcgatctgttcctgaaaaacgac

SEQ ID NO: 601628 - DNA, 75 bp, synthetic construct
  source 1..75: mol_type = other DNA
tggatatggtgccggttgagtgtgtcgtgcgtaaccgtgctgctggctctctggtgaaacgtcttggaatcgaag

SEQ ID NO: 601629 - DNA, 75 bp, synthetic construct
  source 1..75: mol_type = other DNA
ctcgaattccgcaatgatacgtcagcaggtgatggtgcgcgcattgagcagtttgatcgcaaaggtatggtgaac

SEQ ID NO: 601630 - DNA, 75 bp, synthetic construct
  source 1..75: mol_type = other DNA
ccagcccctctccggaggggctttcttgtgggcaaaaaaaaagcccgagtgggttcgggcaacagcatgagatat

SEQ ID NO: 601631 - DNA, 75 bp, synthetic construct
  source 1..75: mol_type = other DNA
agatctgaaatctttagacgcccttaatggtttcaaattccaagatttaccattatcacgtcaacgtcgtttcat

SEQ ID NO: 601632 - DNA, 75 bp, synthetic construct
  source 1..75: mol_type = other DNA
ggatatttcgtcgctgcgagaacgcattcagcagcaaatacgtggagaatatcacttagggaaggtgcgaataag

SEQ ID NO: 601633 - DNA, 75 bp, synthetic construct
  source 1..75: mol_type = other DNA
tcgggccgttggccggattgcgcgttgtcttctccggtatcgaaattgccgggccgttcgccgggcaaatgttcg

SEQ ID NO: 601634 - DNA, 75 bp, synthetic construct
  source 1..75: mol_type = other DNA
agcattattgacgctggaacgcgatcgcgtggaacagcagtcgctgctttcgcatccggcaaactggctaacgct

SEQ ID NO: 601635 - DNA, 75 bp, synthetic construct
  source 1..75: mol_type = other DNA
cggcttaattctcgccgggttaagccatgcagtcagcggtaagggcagcatgtcgcatactggtacggtagatat

SEQ ID NO: 601636 - DNA, 75 bp, synthetic construct
  source 1..75: mol_type = other DNA
gcgatgcacgatccgatggttaacgaatcttactgtgaaacctttggttgggtaagcaaagagaatctggcgcga

SEQ ID NO: 601637 - DNA, 75 bp, synthetic construct
  source 1..75: mol_type = other DNA
tattctggaacgtgactgcggtctgcagcctgccgctgtgagccgtgttcagtccattattgatgatctgcgcga

SEQ ID NO: 601638 - DNA, 75 bp, synthetic construct
  source 1..75: mol_type = other DNA
tatcagtctgaacgtgagcgtcttaagttcgaacaggaaacggcacaactcattccggccagtgatgtcaacccg

SEQ ID NO: 601639 - DNA, 75 bp, synthetic construct
  source 1..75: mol_type = other DNA
tgctgaacattaaccaactggcgacaatagcaggtatatgtcgtcagactgcggcggcaagactgcaaaacatcc

SEQ ID NO: 601640 - DNA, 75 bp, synthetic construct
  source 1..75: mol_type = other DNA
atgccgccaacactcgtgcgcgcgaaacagcggcgcggtttaccgctgcacttgaattagccatcgaccgcgcca

SEQ ID NO: 601641 - DNA, 75 bp, synthetic construct
  source 1..75: mol_type = other DNA
tcgaattagatgttcacaaagaatcgattactgtctcctatgctatcaattcagaacctgttgaactgatgggta

SEQ ID NO: 601642 - DNA, 75 bp, synthetic construct
  source 1..75: mol_type = other DNA
gtagctatataaatagcgaacaatttctgaatgcgcgtggcatgcgcactcaaaatactcaaggtgcgcttgagc

SEQ ID NO: 601643 - DNA, 75 bp, synthetic construct
  source 1..75: mol_type = other DNA
gactgcggtctgcagcctgccgctgtgagccgtgttcagtccattattgatgatctgcgcgatcagatagccctg

SEQ ID NO: 601644 - DNA, 75 bp, synthetic construct
  source 1..75: mol_type = other DNA
gttctccccggacggcagccgcctgtgggacaaagaaacgctggagaaaatggacaaagaccgtttccgacagag

SEQ ID NO: 601645 - DNA, 75 bp, synthetic construct
  source 1..75: mol_type = other DNA
gccatgcacgatccgatggtcaacgaatcttactgcgaaacctttggctgggtgagcaaagagaatctggcgcgt

SEQ ID NO: 601646 - DNA, 75 bp, synthetic construct
  source 1..75: mol_type = other DNA
attctgaccgaactgatgatccccaccgtgtcgacgaatatcgacgatatggatccatccgacaggctcgctcac

SEQ ID NO: 601647 - DNA, 75 bp, synthetic construct
  source 1..75: mol_type = other DNA
tacaaaacgttatcgatgacctgcgcgaccagatggcggagagggcgaaggacgctgaaacagaggaggaagagc

SEQ ID NO: 601648 - DNA, 75 bp, synthetic construct
  source 1..75: mol_type = other DNA
gagtttgccatctgggcaaaagcggtcgtgcagggctggagacattaccggatattcttgaacgtgactgcggtc

SEQ ID NO: 601649 - DNA, 75 bp, synthetic construct
  source 1..75: mol_type = other DNA
caacacattatgtttgcccgtaacagccagaaaatgcacatcccggagaatttttccgtctgctgggattattct

SEQ ID NO: 601650 - DNA, 75 bp, synthetic construct
  source 1..75: mol_type = other DNA
taacgcggtggccagttttagggaaggtgcgaataagcggggaaattcttctcggctgactcagtcatttcattt

SEQ ID NO: 601651 - DNA, 75 bp, synthetic construct
  source 1..75: mol_type = other DNA
aaactgctgggatattagcctaatggtacgtttcttcagaagtctgaagaacgagtgggcaccagtgactggtta

SEQ ID NO: 601652 - DNA, 75 bp, synthetic construct
  source 1..75: mol_type = other DNA
ctttcgggtggatgcctcgaatgaagagttaaccgtggagtgtgctgtgaatgccgctaaatgccgcatggtatc

SEQ ID NO: 601653 - DNA, 75 bp, synthetic construct
  source 1..75: mol_type = other DNA
tcgggcgatggctggccggtaagctgatgaaagagctggatatctccagttgccaggtaccggtgcataaataca

SEQ ID NO: 601654 - DNA, 75 bp, synthetic construct
  source 1..75: mol_type = other DNA
attacagcgcactaagaccgcacgaatataacggtggattacccccaaacgaatcggaaaatcaatactggaaaa

SEQ ID NO: 601655 - DNA, 75 bp, synthetic construct
  source 1..75: mol_type = other DNA
gggttcatcgcagcagctacagatactggaaaaaccgtcctgaaaaaccagacggcagacgggctgtattacgca

SEQ ID NO: 601656 - DNA, 75 bp, synthetic construct
  source 1..75: mol_type = other DNA
gggtgatgttccacagcgatcagggcaagtcattatacgagcaggcagtttcggcagttattgtggcgataccag

SEQ ID NO: 601657 - DNA, 75 bp, synthetic construct
  source 1..75: mol_type = other DNA
atggcttattttttcctctatggcaaatgatgccagtggcggggcggtatttttacaacaaggagctgatttcat

SEQ ID NO: 601658 - DNA, 75 bp, synthetic construct
  source 1..75: mol_type = other DNA
gcggggtgatgttccacagcgatagtaataatgccggtatcagtttttatcatcactctgtttgctgtttaacca

SEQ ID NO: 601659 - DNA, 75 bp, synthetic construct
  source 1..75: mol_type = other DNA
ctgaaatgctgacccaaaacggcgtcccgatgagccgttatcgtgccggacggctgatgaaatacctgaacctga

SEQ ID NO: 601660 - DNA, 75 bp, synthetic construct
  source 1..75: mol_type = other DNA
tgtcgttctcgccggacagcaggctcaccatgaaagcgctgggaatggcatgggaaacccgtggtaagcccggcg

SEQ ID NO: 601661 - DNA, 75 bp, synthetic construct
  source 1..75: mol_type = other DNA
gcggaccgggtgcgactaacctggtgaccgccattgccgatgcgcgactggactccatcccgctgatttgcatca

SEQ ID NO: 601662 - DNA, 75 bp, synthetic construct
  source 1..75: mol_type = other DNA
tcaccctgtaaatttggcagtaaaattatcgtcaacaatctggtgagatgtgaaccgccccggaaatcctggaga

SEQ ID NO: 601663 - DNA, 75 bp, synthetic construct
  source 1..75: mol_type = other DNA
gcattcgaggggaaaataactttggcccaagacacgaccggcgtacccgtcgacgtctatacatacaacctcatg

SEQ ID NO: 601664 - DNA, 75 bp, synthetic construct
  source 1..75: mol_type = other DNA
ttttccgctatctctccgatggacgctatggcaatggcatttaatgaggggcaacgcaatctggcgctggaactg

SEQ ID NO: 601665 - DNA, 75 bp, synthetic construct
  source 1..75: mol_type = other DNA
atcggcgggcgatttttgaaaatctgacgacgctgttttctctcgcccggcatcttaaccataagataatgatcg

SEQ ID NO: 601666 - DNA, 75 bp, synthetic construct
  source 1..75: mol_type = other DNA
gcacaatatattcaaaaagaggcgctggttgagcaattacgtgaagccaatgccgctctgattgcgcaatcttac

SEQ ID NO: 601667 - DNA, 75 bp, synthetic construct
  source 1..75: mol_type = other DNA
gaagacgctgttttctcttgcccggcatctgaagcgtaaagccatgattgcctttatcgacctggataacttcaa

SEQ ID NO: 601668 - DNA, 75 bp, synthetic construct
  source 1..75: mol_type = other DNA
gcgagcagggccgccgcgtgatctggtcactgcttgagaaaggtcaggtgttcggtgcttgcttcaacgtagatc

SEQ ID NO: 601669 - DNA, 75 bp, synthetic construct
  source 1..75: mol_type = other DNA
agtcttttcagggaacaattccgttccgtattttgcagtgtggtcgtgttcttgttgaaggttcgttcagtggta

SEQ ID NO: 601670 - DNA, 75 bp, synthetic construct
  source 1..75: mol_type = other DNA
agggcgcaggaatatatccgcactcagtgcactaagctggcttttattatccggaggatacatgaagaaattacg

SEQ ID NO: 601671 - DNA, 75 bp, synthetic construct
  source 1..75: mol_type = other DNA
gcaacgcaatctggcgctggaactgtttcagcgcgttatggcgcattgccctgaacagtatttgaagatggccaa

SEQ ID NO: 601672 - DNA, 75 bp, synthetic construct
  source 1..75: mol_type = other DNA
ggatctcatggttgtcgctcatgtataacctgagacttgaacgcacactaatagcactgacggtcggctttgttg

SEQ ID NO: 601673 - DNA, 75 bp, synthetic construct
  source 1..75: mol_type = other DNA
tggcggcaggtttcggtgagacggcgatgaacagcttaaaacgattgagcgggtttatctccgctcagcaaattc

SEQ ID NO: 601674 - DNA, 75 bp, synthetic construct
  source 1..75: mol_type = other DNA
atgacagctacagccagaacggaggcgtgttagtcgatgagaacaatagcgcagcaggctatggagatggtcctt

SEQ ID NO: 601675 - DNA, 75 bp, synthetic construct
  source 1..75: mol_type = other DNA
ctgatagccaacaacaaagtgagatggaaattaccgctgacgttgatactcgttcagaggcagcaggtcacgggc

SEQ ID NO: 601676 - DNA, 75 bp, synthetic construct
  source 1..75: mol_type = other DNA
aaggaaccaaagaaatcgaagatgatgaactggcggcctacaaaaaatggcaaatgcatttctggcctttagcaa

SEQ ID NO: 601677 - DNA, 75 bp, synthetic construct
  source 1..75: mol_type = other DNA
tccgatttcaccacctggcagagcggtacggcggaaaatgatgggctggagattagtggcagtggcggcacggta

SEQ ID NO: 601678 - DNA, 75 bp, synthetic construct
  source 1..75: mol_type = other DNA
tcacaaaattgctatggactgatggtcggcagtatcagtcatcgggatgatcaggcggaactgaacgtaggggcc

SEQ ID NO: 601679 - DNA, 75 bp, synthetic construct
  source 1..75: mol_type = other DNA
agcggtacaacgcagtcggcggtacgtgtcgaagaaggcaccctgaaaggtgatgttgcggatatctttccttat

SEQ ID NO: 601680 - DNA, 75 bp, synthetic construct
  source 1..75: mol_type = other DNA
gaagacgcgcagcaggatatccctatggaagaggggccttatgccactttgctaaaaaaaatagccaagcttcag

SEQ ID NO: 601681 - DNA, 75 bp, synthetic construct
  source 1..75: mol_type = other DNA
atgcctttagatttaagtaacactttagtgattggcatcagcgcgactgcgctttttgatatgagtgaatccgat

SEQ ID NO: 601682 - DNA, 75 bp, synthetic construct
  source 1..75: mol_type = other DNA
gatgcctttgatgtggatctgtttttaacgaccaacgttgaagatgcgcaaaaggtgattgattcccgattctgc

SEQ ID NO: 601683 - DNA, 75 bp, synthetic construct
  source 1..75: mol_type = other DNA
ctgactggatgattcagacaggtattcagaatccagagcagctatcacacatgctgactactatgtctctcggtg

SEQ ID NO: 601684 - DNA, 75 bp, synthetic construct
  source 1..75: mol_type = other DNA
ctctgcaagcccttagcaaggtaaatactggcgctgcccaacttgggattatctttaattacatgaagtctctcg

SEQ ID NO: 601685 - DNA, 75 bp, synthetic construct
  source 1..75: mol_type = other DNA
cttgagaaagggcgattggatgaaagcatccgtcaggctgacatggagaacgcgagaggatgggcaaatatccaa

SEQ ID NO: 601686 - DNA, 75 bp, synthetic construct
  source 1..75: mol_type = other DNA
aactccattacagggattggtgagccgacatcgacaggcattaaagtggttgatttcgcagctgatcccacgtag

SEQ ID NO: 601687 - DNA, 75 bp, synthetic construct
  source 1..75: mol_type = other DNA
tgccggcagtatgattctggctatggctgacaccctgaaccgttcggggtatccggcataccgcaggatgtgggt

SEQ ID NO: 601688 - DNA, 75 bp, synthetic construct
  source 1..75: mol_type = other DNA
gggatggcttatattcagttaacgctgtgtggagtgccaggtgaagtggttattggcaactctctttgcgatgaa

SEQ ID NO: 601689 - DNA, 75 bp, synthetic construct
  source 1..75: mol_type = other DNA
cagcatcgggttgggagaaaggccagattgagaagaacgtgcaggattcccgccaacgcctgtggcaaggggcac

SEQ ID NO: 601690 - DNA, 75 bp, synthetic construct
  source 1..75: mol_type = other DNA
gaccgcccgttatcacaaacgccataaggtgtttgaggactttgtcagctgcagtgtgattgccctggagaaccg

SEQ ID NO: 601691 - DNA, 75 bp, synthetic construct
  source 1..75: mol_type = other DNA
cggcgccggattctgctgacgcccgggcattacctcggaaactggtcatatcgtctgcgccatgttcaggaacag

SEQ ID NO: 601692 - DNA, 75 bp, synthetic construct
  source 1..75: mol_type = other DNA
tgtcgctgtgtggtgtggccggagaagtggtgattggcaactcattgtgtaatgagcggcgccgggtgctgctga

SEQ ID NO: 601693 - DNA, 75 bp, synthetic construct
  source 1..75: mol_type = other DNA
gattgcatctcttttctctgctaacggtgtcgcggcggtcattgattcatgtcagggatatgatatcaaagcgag

SEQ ID NO: 601694 - DNA, 75 bp, synthetic construct
  source 1..75: mol_type = other DNA
gtcagctcaccattgcgcaaaacggcagctacgtgctggcaggggcgcagtcgatggcgctaaccggcgatatag

SEQ ID NO: 601695 - DNA, 75 bp, synthetic construct
  source 1..75: mol_type = other DNA
actgatgttattttttccggtaacgtcgcaggcggctatggtggcgcaatctattcttctggtactaacgatact

SEQ ID NO: 601696 - DNA, 75 bp, synthetic construct
  source 1..75: mol_type = other DNA
ggcgatggccagtcattatctgtttgaagctgatttctgtaatccggcagccggttgggaaaaaggtcaggtgga

SEQ ID NO: 601697 - DNA, 75 bp, synthetic construct
  source 1..75: mol_type = other DNA
acgaccgtggtaattaatcccattacgggtattggtgagccgacatcgacaggcattaaagtggttgatttcgca

SEQ ID NO: 601698 - DNA, 75 bp, synthetic construct
  source 1..75: mol_type = other DNA
agatcttgcaggcggaaacgatatgcatatcggcggcgacgggaaagatggcgtctacgtggtgatcgatgcggg

SEQ ID NO: 601699 - DNA, 75 bp, synthetic construct
  source 1..75: mol_type = other DNA
tggctgagggtccatatgccactttgctaaaaaaaatagccaagcttcaggagcgactaccgacaagagttgagt

SEQ ID NO: 601700 - DNA, 75 bp, synthetic construct
  source 1..75: mol_type = other DNA
caatatgtctgcggaactggcagaaagttacgccatccttgagcagcgggtacaggaaaaaactgccggtctgga

SEQ ID NO: 601701 - DNA, 75 bp, synthetic construct
  source 1..75: mol_type = other DNA
cgagaaagacaagcccttaatcaaagagatggaacaaacggcatttagcaccgaattaactcgagcagcagaacg

SEQ ID NO: 601702 - DNA, 75 bp, synthetic construct
  source 1..75: mol_type = other DNA
gcacatatcagcggtcgcaatgaaatggcgatgttaggaacagcgctgaacaatatgtctgcggaactggcggag

SEQ ID NO: 601703 - DNA, 75 bp, synthetic construct
  source 1..75: mol_type = other DNA
gagcgcaaagtctgcgtggcgactgccgcgttcgccgtcgtgaatcaggtggcaccgaggtggtagtcaccttta

SEQ ID NO: 601704 - DNA, 75 bp, synthetic construct
  source 1..75: mol_type = other DNA
cgggattacgcccggcactggaggcaagttgtgaagagtacagcgccaaatttggcttcccggtgaagctggatt

SEQ ID NO: 601705 - DNA, 75 bp, synthetic construct
  source 1..75: mol_type = other DNA
tccgtaacgaactgaatgcgtcatgggcgcagttgcgtgagttgctcaccacattccgtttgcagctcacagaac

SEQ ID NO: 601706 - DNA, 75 bp, synthetic construct
  source 1..75: mol_type = other DNA
actgtgaataaatcagaaatggactctgacccgttcttattgcaacgaataatggataagaaactggaagggtac

SEQ ID NO: 601707 - DNA, 75 bp, synthetic construct
  source 1..75: mol_type = other DNA
aatggatcagaagttggaagggtacgatatgcctacggcggacccggtgaactacctgaatgcgggtggcagttt

SEQ ID NO: 601708 - DNA, 75 bp, synthetic construct
  source 1..75: mol_type = other DNA
tccgatccgcatcattacgctgttggtgttaaagaggttataggcctgacaccagaacagatcaacgatcgcttt

SEQ ID NO: 601709 - DNA, 75 bp, synthetic construct
  source 1..75: mol_type = other DNA
caatatgtctgcagaactggccgaaagttatgccgtacttgagcagcgggttcaggagaaaaccgccgggctgga

SEQ ID NO: 601710 - DNA, 75 bp, synthetic construct
  source 1..75: mol_type = other DNA
taccggtgggtgtcaaatgaccgtattggaaaaccacctgcttatcagtatctcggggagggggagacctcgcgc

SEQ ID NO: 601711 - DNA, 75 bp, synthetic construct
  source 1..75: mol_type = other DNA
accctgtcggggacgctttaccctgaaatcaccggcgggcgtctgtcgttgcaggcgattgagctgatggccgac

SEQ ID NO: 601712 - DNA, 75 bp, synthetic construct
  source 1..75: mol_type = other DNA
ccgcgttcgccgtcgtgaatcaggtggcaccgaggtggtagtcacctttattcccgaaaaaactttcacagaagt

SEQ ID NO: 601713 - DNA, 75 bp, synthetic construct
  source 1..75: mol_type = other DNA
cagatcctaacactgatttaactctaccaaataaaccagtaagaccagaatcattgggtaaatctggcaacgaga

SEQ ID NO: 601714 - DNA, 75 bp, synthetic construct
  source 1..75: mol_type = other DNA
gtcagccattcactggcactggcggcgtcactggatacgcaggggtacagcgttaacgacatcatccatatcctg

SEQ ID NO: 601715 - DNA, 75 bp, synthetic construct
  source 1..75: mol_type = other DNA
ttgttgttgatatactcaaagtaccctcggtactggtcggcttgattgccttaatcggtctggttgctcagaaaa

SEQ ID NO: 601716 - DNA, 75 bp, synthetic construct
  source 1..75: mol_type = other DNA
caggttaccccttggtcaaagcgcttctgggtctgaaccagtatcgtcaaccggatgatcaatcaccgttggttg

SEQ ID NO: 601717 - DNA, 75 bp, synthetic construct
  source 1..75: mol_type = other DNA
ggaaaagcacaaatcaagcaattgatatgcttgataaccttgcggataaggcatctaaacttgatttttctggtg

SEQ ID NO: 601718 - DNA, 75 bp, synthetic construct
  source 1..75: mol_type = other DNA
tatcaacaaagacaccttagataaaatgggtgatgcgtgggctaatggtggtggtattgccgatgacttagaatc

SEQ ID NO: 601719 - DNA, 75 bp, synthetic construct
  source 1..75: mol_type = other DNA
ccattactggcggtcgtatatctctgctggctgtcgaactgatggccgacgagggcagagcgtggccgctgattg

SEQ ID NO: 601720 - DNA, 75 bp, synthetic construct
  source 1..75: mol_type = other DNA
ataagcaggccagcgagctactcggctcggccggtaatctgactgataagctgcagggtgtgctcggagggctga

SEQ ID NO: 601721 - DNA, 75 bp, synthetic construct
  source 1..75: mol_type = other DNA
tggcgatatcggtaaacaggcggaatcgctcatcggtaaggctggcagtatggcgactaaattcacgggtatgac

SEQ ID NO: 601722 - DNA, 75 bp, synthetic construct
  source 1..75: mol_type = other DNA
gtgacctaccccttcccgttgacgacaaataccaacgtattggatattggtgataagacaccgatgccattaccg

SEQ ID NO: 601723 - DNA, 75 bp, synthetic construct
  source 1..75: mol_type = other DNA
ctttacatggaatattatttcaaataacagtgttgttatgccaacgggcggctgtaccgttgatagtcgtaatgt

SEQ ID NO: 601724 - DNA, 75 bp, synthetic construct
  source 1..75: mol_type = other DNA
acttgtctcagcatataagttgctggaatgattacggcggctggtacgacactgatcatataaacctggtacaag

SEQ ID NO: 601725 - DNA, 75 bp, synthetic construct
  source 1..75: mol_type = other DNA
ctcgtactgttgattatgctgccgcacgaaagtatgccggtctatttagggatggcatgtacattaggctttggc

SEQ ID NO: 601726 - DNA, 75 bp, synthetic construct
  source 1..75: mol_type = other DNA
gtgattgccgtgggcattatcattttctttgtactgaatgacaaagaagaggcaccttccgttgaggtgaaaaaa

SEQ ID NO: 601727 - DNA, 75 bp, synthetic construct
  source 1..75: mol_type = other DNA
tcgttgcccggcaacctggtgtagcagccagccagttatttctctggcgtaagcaataccaggaaggaagtctta

SEQ ID NO: 601728 - DNA, 75 bp, synthetic construct
  source 1..75: mol_type = other DNA
ggcgttgggtagctttattggttacgctccggcgatgttctgcttcagtctgtatggctacattctggatttaaa

SEQ ID NO: 601729 - DNA, 75 bp, synthetic construct
  source 1..75: mol_type = other DNA
gctgccgcacgaaagtatgccggtctatttagggatggcatgtacgctgggctttggcgcgatagtctttacaca

SEQ ID NO: 601730 - DNA, 75 bp, synthetic construct
  source 1..75: mol_type = other DNA
cacctttatcattagggaaggtgcgaataagcaggtcatttcttcccaagctgactcgctgattaaaatttcgcg

SEQ ID NO: 601731 - DNA, 75 bp, synthetic construct
  source 1..75: mol_type = other DNA
tgttccgcgtgctgatgacttacctgaaaccggtactgccgaaactgaccgagcgcgcagaagcattcctcaata

SEQ ID NO: 601732 - DNA, 75 bp, synthetic construct
  source 1..75: mol_type = other DNA
aattccgaacgcgccgggtaaatatttctacgtctggctggacgcaccgattggctacatgggttctttcaagaa

SEQ ID NO: 601733 - DNA, 75 bp, synthetic construct
  source 1..75: mol_type = other DNA
aatccgttcaaggcactgtataaccgtatcgatatgaagcaggttgaagcactggtggaagcatctaaagaagaa

SEQ ID NO: 601734 - DNA, 75 bp, synthetic construct
  source 1..75: mol_type = other DNA
agcgcctgctcggcaaaaaaacgatggaaaatgaactccttaaagaagccgttgaatacgggcgtgcaaaaagtg

SEQ ID NO: 601735 - DNA, 75 bp, synthetic construct
  source 1..75: mol_type = other DNA
aagcaataccaggagggaagtcttactgctgtggccgcaggagaacaggtcgttccggcctctgaacttgctgct

SEQ ID NO: 601736 - DNA, 75 bp, synthetic construct
  source 1..75: mol_type = other DNA
tgaagcagattaaagaactccagcgcctgctcggcaagaaaacgatggaaaatgaactcctcaaagaagccgttg

SEQ ID NO: 601737 - DNA, 75 bp, synthetic construct
  source 1..75: mol_type = other DNA
acgaaagtatgccggtctatttagggatggcatgtacgctgggctttggcgcgattgaaccgccccgggtttcct

SEQ ID NO: 601738 - DNA, 75 bp, synthetic construct
  source 1..75: mol_type = other DNA
tttcggtgatttgtgaagatgctgaaacggcaggccgtgtattggggcaactgaaagcgacggtgcgccgtattt

SEQ ID NO: 601739 - DNA, 75 bp, synthetic construct
  source 1..75: mol_type = other DNA
acaacagcgcgtggcaactattcaaacgcttggcggttctggtgcattgaaagtgggcgctgactttctgaaacg

SEQ ID NO: 601740 - DNA, 75 bp, synthetic construct
  source 1..75: mol_type = other DNA
tcggcggaaatgctgtacttgcaaaaaatcctgggtctgcaagggttgccgctgattgccgaaaacggagcggtg

SEQ ID NO: 601741 - DNA, 75 bp, synthetic construct
  source 1..75: mol_type = other DNA
acgatggaaaatgaactcctcaaagaagccgttgaatatggacgggcaaaaaagtggatagcgcacgcgccctta

SEQ ID NO: 601742 - DNA, 75 bp, synthetic construct
  source 1..75: mol_type = other DNA
gatgaagcgctaaaagcccgttggctggcagaagtggaggaaatgcgcacccgtattctggcgatgcgccagcaa

SEQ ID NO: 601743 - DNA, 75 bp, synthetic construct
  source 1..75: mol_type = other DNA
ctggcgacccgattcttacgcttatggagcgttttaaagaagatcctcgcagcgacaaagtgaatttaagtatcg

SEQ ID NO: 601744 - DNA, 75 bp, synthetic construct
  source 1..75: mol_type = other DNA
aagcagattaaagaactcctgcgcctgctcggcaagaaaacgatggaaaatgaactcctcaaagaagccgttgaa

SEQ ID NO: 601745 - DNA, 75 bp, synthetic construct
  source 1..75: mol_type = other DNA
gcagattaaagaactccagcgcctgctcggcaagaaaacgatggaaaatgaactcctcaaagaagccgttgaata

SEQ ID NO: 601746 - DNA, 75 bp, synthetic construct
  source 1..75: mol_type = other DNA
cgttcctgcctctgaacttgctgccgccatgaagcagattaaagaactccagcgtctggttagactggccccctg

SEQ ID NO: 601747 - DNA, 75 bp, synthetic construct
  source 1..75: mol_type = other DNA
agatgactggaactttgctggggcagaagcttcgtaaacgtaaaaatcctcaggcaaaaattgccattattcagc

SEQ ID NO: 601748 - DNA, 75 bp, synthetic construct
  source 1..75: mol_type = other DNA
gtgcgtaaacgtaaaacacctcaggaaaaaatcgcaattattcaacaaactatggagccgggcatgacggtgtcc

SEQ ID NO: 601749 - DNA, 75 bp, synthetic construct
  source 1..75: mol_type = other DNA
gccgacgatgcccacggcacgccaatcatgctgaaagctcagcagcttggtatcaccccggagcagatgattggc

SEQ ID NO: 601750 - DNA, 75 bp, synthetic construct
  source 1..75: mol_type = other DNA
ttggcactaggtgtgtatcctgaggttactctagccgatgctcgggcaaaacgtgaagatgcgaaaagaggtatc

SEQ ID NO: 601751 - DNA, 75 bp, synthetic construct
  source 1..75: mol_type = other DNA
gggcaactgagaaggtccgtaaggttcgccagcgctgtggagaggtctggaagtatgctgttgtgactggcaggg

SEQ ID NO: 601752 - DNA, 75 bp, synthetic construct
  source 1..75: mol_type = other DNA
ccgttcactaggtaaagagaaactgctcgctattggcgtttaccctgatgtttctttagctgaagcccgaagtaa

SEQ ID NO: 601753 - DNA, 75 bp, synthetic construct
  source 1..75: mol_type = other DNA
ccatgcgcagtatctggacggaaggcgagagatgatgcagtggtatgcggattacctcgactcactgaaagcttc

SEQ ID NO: 601754 - DNA, 75 bp, synthetic construct
  source 1..75: mol_type = other DNA
ggtaggcttgagaaggttaagccaatcagcgatatgtctcttaacgtgctaattcgtcgtgtcggttacggtggc

SEQ ID NO: 601755 - DNA, 75 bp, synthetic construct
  source 1..75: mol_type = other DNA
gctggtggtatcgatccgatggaagcgaaacgagaggaaaagattgcccgggaaacgcagttaaacaacaccttc

SEQ ID NO: 601756 - DNA, 75 bp, synthetic construct
  source 1..75: mol_type = other DNA
agcgctaatacaaagagcaacacacaaaattgcctcaggcaaggactcaaaaaaagttccctacgacgtgaaaag

SEQ ID NO: 601757 - DNA, 75 bp, synthetic construct
  source 1..75: mol_type = other DNA
aatccggggaaatggcacgactacgtacactggaaagtgtatggatacagggcaaactgcgtatgtgggggcgct

SEQ ID NO: 601758 - DNA, 75 bp, synthetic construct
  source 1..75: mol_type = other DNA
agatcatcctgagtggacgttggttacgtgcagacgccgaattgatcagtggttggggatatctgaatttatgtt

SEQ ID NO: 601759 - DNA, 75 bp, synthetic construct
  source 1..75: mol_type = other DNA
cggatacgagaaatattccaggggacaaccacagcaacttttgtattgccagaaggcagcgccgggggattttct

SEQ ID NO: 601760 - DNA, 75 bp, synthetic construct
  source 1..75: mol_type = other DNA
gcaatcgcgtataggtaactatgaggcgggcagcagaaatgttggagtgcatgacgctgtcgtattgggaaaggc

SEQ ID NO: 601761 - DNA, 75 bp, synthetic construct
  source 1..75: mol_type = other DNA
ggatacaattccactgtaagccttaagagaatcgtagaggaatgcgataaacacaacttaacatttgatgcaagt

SEQ ID NO: 601762 - DNA, 75 bp, synthetic construct
  source 1..75: mol_type = other DNA
gaaataaattagcacataataattatgctacttttgtattagaaagcacagctgaagagatttataataaatttt

SEQ ID NO: 601763 - DNA, 75 bp, synthetic construct
  source 1..75: mol_type = other DNA
acagctaaagcaacctggcgcgccagcgatcgtcacggaatctgccgacgagttgttggcgttgttaacatcagt

SEQ ID NO: 601764 - DNA, 75 bp, synthetic construct
  source 1..75: mol_type = other DNA
cgtaaacgcagtagtcgttatcgtctcaagccccattaacctgtcggaggtgccggtgtccctacaacacccggc

SEQ ID NO: 601765 - DNA, 75 bp, synthetic construct
  source 1..75: mol_type = other DNA
atcggtcggccagacgatgacacccagtggctggttactggctttaaccgccagccgaagcaacccgtaagggaa

SEQ ID NO: 601766 - DNA, 75 bp, synthetic construct
  source 1..75: mol_type = other DNA
taacggctcaatccacctcggccatatgctggagcacatccaggctgatgtctgggtccgttaccagcgaatgcg

SEQ ID NO: 601767 - DNA, 75 bp, synthetic construct
  source 1..75: mol_type = other DNA
gccatgaagcagattaaagggcactgttgcaaagttagcgatgaggcagccttttgtcttattcaaaggccttac

SEQ ID NO: 601768 - DNA, 75 bp, synthetic construct
  source 1..75: mol_type = other DNA
atgatcaatgcactgggattgctggaagtggacggcatggtcgccgcgatagatgctgcggatgccatgctcaaa

SEQ ID NO: 601769 - DNA, 75 bp, synthetic construct
  source 1..75: mol_type = other DNA
acgccgcttcggcaacgatcttccgtcgtctccagtggagtggctgacggataatggttcatgctaccgggctaa

SEQ ID NO: 601770 - DNA, 75 bp, synthetic construct
  source 1..75: mol_type = other DNA
gaaaacgatgaagagcgattacatcagtatcatacctaaaccggacgtgttaacggcagtaaaaaaccttgcgga

SEQ ID NO: 601771 - DNA, 75 bp, synthetic construct
  source 1..75: mol_type = other DNA
gctgaagagatttataataaatttttaaatgcacattcatttgtctctcaactagatacgttcagtacacagttt

SEQ ID NO: 601772 - DNA, 75 bp, synthetic construct
  source 1..75: mol_type = other DNA
aagcaataccaggagggaagtcttactgctgtggccgcaggagagcaggtcgttccagcctctgaacttgctgct

SEQ ID NO: 601773 - DNA, 75 bp, synthetic construct
  source 1..75: mol_type = other DNA
gcgcctgctcggcaaaaaaacgatggaaaatgaactccttaaagaagccgttgaatacgggcgtgcaaaaaagtg

SEQ ID NO: 601774 - DNA, 75 bp, synthetic construct
  source 1..75: mol_type = other DNA
gggattcagcccagtctgttgtttaagtggaagaaacaataccaggaaggaagcctcactgctattgctgccggt

SEQ ID NO: 601775 - DNA, 75 bp, synthetic construct
  source 1..75: mol_type = other DNA
attctggccgacggacaaatcacgcccttctctttgttgatggctaatgccgggaccggtgagccgctcctgacg

SEQ ID NO: 601776 - DNA, 75 bp, synthetic construct
  source 1..75: mol_type = other DNA
ccgctgatggcgcttttcaatgcggtatccctgatgtccctgaatccggagcccaaaaagaaagaatatgcggtt

SEQ ID NO: 601777 - DNA, 75 bp, synthetic construct
  source 1..75: mol_type = other DNA
gattcactggcggaagccgggatccccgacggaattgttgtggggataagccagggctggaagctgggcggggcc

SEQ ID NO: 601778 - DNA, 75 bp, synthetic construct
  source 1..75: mol_type = other DNA
tgttcattctgatacccaaaaaaaacagcaagtccacactggccgccgggatcatgatgacggcgctgttactga

SEQ ID NO: 601779 - DNA, 75 bp, synthetic construct
  source 1..75: mol_type = other DNA
tgggcgggggcggatttctgggaagagcagggccgttgtatcagcctggacgatatcctgctgcgtgctgatgtg

SEQ ID NO: 601780 - DNA, 75 bp, synthetic construct
  source 1..75: mol_type = other DNA
ttgacggcgggggcctggatgatctgctgggaatgtacgtgactggccgtgacagggaaacccgcgaatggctgg

SEQ ID NO: 601781 - DNA, 75 bp, synthetic construct
  source 1..75: mol_type = other DNA
gggcagcccgacgttcggggagtcctgtgcacagtgggtgtttgacctggtggcggccctgtttggctcctacga

SEQ ID NO: 601782 - DNA, 75 bp, synthetic construct
  source 1..75: mol_type = other DNA
atggcgaacctgatgctctcggtgatgggcgcgttcgccgagttcgagcgcgccctgatccgcgagcgtcagcgc

SEQ ID NO: 601783 - DNA, 75 bp, synthetic construct
  source 1..75: mol_type = other DNA
tcgaggctggcgagcaaaagaccaagcttgctcgtgaattcggaatcagtcgcgaaaccctgtatcaatacttga

SEQ ID NO: 601784 - DNA, 75 bp, synthetic construct
  source 1..75: mol_type = other DNA
atgttattaccctggttaatactaatcccctttatcggcggcttcctgtgctggcagaccgaacgctttggcgtc

SEQ ID NO: 601785 - DNA, 75 bp, synthetic construct
  source 1..75: mol_type = other DNA
atgatacctgtatggagcacggcatgtccggactgggcagagcgcctgaaaaaggggctgtcgattattccggct

SEQ ID NO: 601786 - DNA, 75 bp, synthetic construct
  source 1..75: mol_type = other DNA
aaattctgaacgtttgcgcgctcattatttattgcacgcatctcatcaggagaaggttcaacgtttacttattgc

SEQ ID NO: 601787 - DNA, 75 bp, synthetic construct
  source 1..75: mol_type = other DNA
aggttccggcacgggtgacagccgcctccggcgaacgcttcctgaaggtggagtttatgccggcagaggaggaca

SEQ ID NO: 601788 - DNA, 75 bp, synthetic construct
  source 1..75: mol_type = other DNA
atcgcttcccggatcaaccggatggcttcggacaattttggcgaccataagccctgccgggaaggtgtctgggaa

SEQ ID NO: 601789 - DNA, 75 bp, synthetic construct
  source 1..75: mol_type = other DNA
gtgatgacctggtgcctgtcatatatcgaacgctgggtggatcgcattacaccggcggtgaccaaaaacttcctc

SEQ ID NO: 601790 - DNA, 75 bp, synthetic construct
  source 1..75: mol_type = other DNA
caatggctctgagcacaatatttgtagcggtgagtgcttcagcagtagagaaaaatattactgtgacagccagtg

SEQ ID NO: 601791 - DNA, 75 bp, synthetic construct
  source 1..75: mol_type = other DNA
atggttgaacgaagcggcgtcgaagcctgtaaagcggcggtgcacaatcttctcgcgcaacgcgtcagtgggctg

SEQ ID NO: 601792 - DNA, 75 bp, synthetic construct
  source 1..75: mol_type = other DNA
acttcccgcagggtgaaagccgcgaccatccgataaaattcccggcaaaagcgcagttttatcagaatctgcaaa

SEQ ID NO: 601793 - DNA, 75 bp, synthetic construct
  source 1..75: mol_type = other DNA
atcgaaccgctggtcacgttgtgtcacttcgacgtgccgatgcatctggtcactgaatatggctcctggcgtaac

SEQ ID NO: 601794 - DNA, 75 bp, synthetic construct
  source 1..75: mol_type = other DNA
ggcggagatgaacgccaacaacagcagtgcggcgaacgtggtgaaatcgctgcgtaacccctatctgcaggttag

SEQ ID NO: 601795 - DNA, 75 bp, synthetic construct
  source 1..75: mol_type = other DNA
ggctggtgaaagatatcgatgatttagttgcatcagcgatagttctgttcgatcagatgaatcgtggtggcccgg

SEQ ID NO: 601796 - DNA, 75 bp, synthetic construct
  source 1..75: mol_type = other DNA
tgccaatgctatccatacacttgaagctatcaggctattccttttcttgactaatacagcctttattattgcagc

SEQ ID NO: 601797 - DNA, 75 bp, synthetic construct
  source 1..75: mol_type = other DNA
aatatatttattgcccttggttcaatactatatgcttttcaagtctcaatcggtatagttaggaaacatctacag

SEQ ID NO: 601798 - DNA, 75 bp, synthetic construct
  source 1..75: mol_type = other DNA
tccgctgggtagagaaagacactcctgatgcggttaaaaaaattcaggcactgttaccagcgatcgaaaaagcaa

SEQ ID NO: 601799 - DNA, 75 bp, synthetic construct
  source 1..75: mol_type = other DNA
tatcatcttctcaagagttagtaattagcgctgcacctaaaactgccggtaccgccccaactgcaggaaactatt

SEQ ID NO: 601800 - DNA, 75 bp, synthetic construct
  source 1..75: mol_type = other DNA
ggcagagagtatgcgttggcctctggagcaggctgaagggggcaaatccgcagtgcgttggttgactcctgagga

SEQ ID NO: 601801 - DNA, 75 bp, synthetic construct
  source 1..75: mol_type = other DNA
gcggtactatgttcgtggaaagagatcgaaaaatatcagggcttcttccaccttaacctgatgtggatcctgggc

SEQ ID NO: 601802 - DNA, 75 bp, synthetic construct
  source 1..75: mol_type = other DNA
atgagatgccgggggctgattgccctgctgatatgggggctgattgccctgctgatatgggggcagagtgtggcc

SEQ ID NO: 601803 - DNA, 75 bp, synthetic construct
  source 1..75: mol_type = other DNA
ttaaggagcgggtgatccgtaacagtctgcggccccctgccgtgcccggtatcggacgcacagagaaatacggaa

SEQ ID NO: 601804 - DNA, 75 bp, synthetic construct
  source 1..75: mol_type = other DNA
ttaaggagcgggtgatccgaaacagtctgcggccccctgccgtgcccggtatcggacgcaccgagaaatacggta

SEQ ID NO: 601805 - DNA, 75 bp, synthetic construct
  source 1..75: mol_type = other DNA
gcgctgggtggcacgttgaccatttcctgtttgcacggcacgcgtgtcagcgtttctctacctcaacgctatgtc

SEQ ID NO: 601806 - DNA, 75 bp, synthetic construct
  source 1..75: mol_type = other DNA
gccgattatcgcgctggcctggcactatggttggcaaggggcgctgattgcgacgttgatgaatgccatcgcgct

SEQ ID NO: 601807 - DNA, 75 bp, synthetic construct
  source 1..75: mol_type = other DNA
gacgagcaatgcctttggatgaagcaattattactaagctagtaatttttgaacgctgtgttggagtggatggca

SEQ ID NO: 601808 - DNA, 75 bp, synthetic construct
  source 1..75: mol_type = other DNA
cgctggcagggtagtacctgggctgtcagagaaggtcagactctgggcaatgtggtgatccagcggattgatccg

SEQ ID NO: 601809 - DNA, 75 bp, synthetic construct
  source 1..75: mol_type = other DNA
tcagagaaggtcagacgctgggcaatgtggtgatccagcggattgatccgactacccggaccatcatcaccagtg

SEQ ID NO: 601810 - DNA, 75 bp, synthetic construct
  source 1..75: mol_type = other DNA
gttgtcgattaatgaggtggataaaggtgattccctaattgtaaaattgttaatgagaaagcttaaacagtactg

SEQ ID NO: 601811 - DNA, 75 bp, synthetic construct
  source 1..75: mol_type = other DNA
ttaaggagcgggtgatccgaaacagtctgcggccccctgccgtgcccggtatcggacgcactgagaaatacggca

SEQ ID NO: 601812 - DNA, 75 bp, synthetic construct
  source 1..75: mol_type = other DNA
gacggcacattacagcagttccttgcgaaacacctcaatatcgaaattggtctgaacctccgcagtgaccgatgg

SEQ ID NO: 601813 - DNA, 75 bp, synthetic construct
  source 1..75: mol_type = other DNA
ataaccgcgatgaaaaaattcaggcaacactgaatatgcttcacgacagcattaacaagctgggcgaagctataa

SEQ ID NO: 601814 - DNA, 75 bp, synthetic construct
  source 1..75: mol_type = other DNA
gcgctgggcggcacattacacatttcctgtctgcacggcacgcgtgtcagcgtttctctacctcaacgctatgtc

SEQ ID NO: 601815 - DNA, 75 bp, synthetic construct
  source 1..75: mol_type = other DNA
aggtcccggcacgggtgatcgccgttcccggcgatcgcttactgaaagtggagtttataccggcagaggaggaca

SEQ ID NO: 601816 - DNA, 75 bp, synthetic construct
  source 1..75: mol_type = other DNA
aggtcccggcacgggtgagcgccgttcccggcgatcgcttcctgaaggtggaatttattccggcagagaagggca

SEQ ID NO: 601817 - DNA, 75 bp, synthetic construct
  source 1..75: mol_type = other DNA
gggcgggggctgatttctgggaagagcagggccgttgtatcagcctggacgatatcctgcgtcgtgctgatgtgg

SEQ ID NO: 601818 - DNA, 75 bp, synthetic construct
  source 1..75: mol_type = other DNA
ggcgtctggaccttcaactatgaagagttgctgaatacgccaatgtccagcggtgtggaatatctgctgatgctg

SEQ ID NO: 601819 - DNA, 75 bp, synthetic construct
  source 1..75: mol_type = other DNA
aaatgccggtggttccgctgcatggctggttaccggatgcgcactcccaggctccgaccgccggttccgttgacc

SEQ ID NO: 601820 - DNA, 75 bp, synthetic construct
  source 1..75: mol_type = other DNA
gtactgctgggcttctttccgcagccgattctggatacctcgcactccgcgattggcaatatccagcagtggttt

SEQ ID NO: 601821 - DNA, 75 bp, synthetic construct
  source 1..75: mol_type = other DNA
gagatgggccggaaaatggatgcgtttaaggagcgggtgatccgcaacagcctgcggccccctgccgtgcccggt

SEQ ID NO: 601822 - DNA, 75 bp, synthetic construct
  source 1..75: mol_type = other DNA
gtttcgtgtctgccaggaagggctgaacaacattgtgaaacatgccgatgccagcgcggttacgctgcaaggctg

SEQ ID NO: 601823 - DNA, 75 bp, synthetic construct
  source 1..75: mol_type = other DNA
gcgctgggtggcacattgaccatttcctgtctgcacggcacgcgtgtcagcgtttctctacctcaacgttatgtc

SEQ ID NO: 601824 - DNA, 75 bp, synthetic construct
  source 1..75: mol_type = other DNA
gctcacctgctgatggaaaacctcgccatggttaacccgaatctcggttattcggtggatgaggcttttctgtac

SEQ ID NO: 601825 - DNA, 75 bp, synthetic construct
  source 1..75: mol_type = other DNA
ggatgacacggcggaagtggcggagtatgtgcgtcgcattcatgaggctgagttactggagcatatcggtattga

SEQ ID NO: 601826 - DNA, 75 bp, synthetic construct
  source 1..75: mol_type = other DNA
gccggggtgttcagacagaaactgcagtacgcccgggatgtccgtgacggcaaaattcatgatccgcactttctg

SEQ ID NO: 601827 - DNA, 75 bp, synthetic construct
  source 1..75: mol_type = other DNA
tagttaatgatgaggttttatttagcggtaaagttgtagttttaccagcagacttcgatattaatattatacctg

SEQ ID NO: 601828 - DNA, 75 bp, synthetic construct
  source 1..75: mol_type = other DNA
cgcacttggcccgtatattcgtgaaggtaagtgcgaagataatcgattctttttcgattgtctggctgtatgcgt

SEQ ID NO: 601829 - DNA, 75 bp, synthetic construct
  source 1..75: mol_type = other DNA
ggggccgtgtgtgtttcttttgcagtcattctgttctggctggtttatatagtttgtttgtatataggaacgctt

SEQ ID NO: 601830 - DNA, 75 bp, synthetic construct
  source 1..75: mol_type = other DNA
aaggcaaccgcgctgaatctcaaggctcctccaaagacaaaacccgtcttgcatttgcaggcctgaaattcgggg

SEQ ID NO: 601831 - DNA, 75 bp, synthetic construct
  source 1..75: mol_type = other DNA
tgtttattaacagagtatattaagaaatacaaaatgaataatggcttatccttgctggatctggacttgttcaga

SEQ ID NO: 601832 - DNA, 75 bp, synthetic construct
  source 1..75: mol_type = other DNA
tacctgtattgcagacaaatgatttattactaaatgctctatgcgaagcagacccagaacagcgcaaaaaaaatt

SEQ ID NO: 601833 - DNA, 75 bp, synthetic construct
  source 1..75: mol_type = other DNA
ttcactatttatgaaaattttctggggaaaatcatgtcggtactgattatatgtaatgtattgtttttaaacggt

SEQ ID NO: 601834 - DNA, 75 bp, synthetic construct
  source 1..75: mol_type = other DNA
atggatagtgaaagatggttggctggcaaatagcgggccaatgaccttgcggctggataaagacaccgcagatgc

SEQ ID NO: 601835 - DNA, 75 bp, synthetic construct
  source 1..75: mol_type = other DNA
tacttaatgaaacagagaatgacagccccgtagcaagagcagaattagcaagattcctcgtaaaaacaatctaca

SEQ ID NO: 601836 - DNA, 75 bp, synthetic construct
  source 1..75: mol_type = other DNA
aggaactaccaattggcattattacggcgggcattggagggttgtttattatcatgttactcgcacgaaattcgt

SEQ ID NO: 601837 - DNA, 75 bp, synthetic construct
  source 1..75: mol_type = other DNA
aaactgatacgtgttttggataaattcacaccagatttacccggttatcacctgtactatccacaccgtcgacat

SEQ ID NO: 601838 - DNA, 75 bp, synthetic construct
  source 1..75: mol_type = other DNA
cctgtactatccacaccgtcgacatgctggctcggcattctcattatttatagataggctgaagtataaaggtgc

SEQ ID NO: 601839 - DNA, 75 bp, synthetic construct
  source 1..75: mol_type = other DNA
accacatattctgaaactcagaatatgaccgtttttggtaataaccatattgcaaacaaagcacaaaactttgaa

SEQ ID NO: 601840 - DNA, 75 bp, synthetic construct
  source 1..75: mol_type = other DNA
atgataaccacatttgtgtttatcccgattttcgcgatcgcagccggagtggcgcaatccctgcaatacttaaat

SEQ ID NO: 601841 - DNA, 75 bp, synthetic construct
  source 1..75: mol_type = other DNA
attccagggcgtgaagaagagtttcgtgatggcgtagcagcagcgattcgttatgcccgtgcgctgggtaataaa

SEQ ID NO: 601842 - DNA, 75 bp, synthetic construct
  source 1..75: mol_type = other DNA
atgtcacagacccaatccgatacttttaagctgtcttaccccttcaccaccgcagcaggcaccagagttgagcag

SEQ ID NO: 601843 - DNA, 75 bp, synthetic construct
  source 1..75: mol_type = other DNA
ggcgatgtctgctcaggcagcagagatttacaataaagacagtaacaagctggatctgtacggaaaagttaatgc

SEQ ID NO: 601844 - DNA, 75 bp, synthetic construct
  source 1..75: mol_type = other DNA
gagaacgtacagccggatatcctttgtctggcaaaagccctcggcggcggcgtgatgccgattggcgcaaccatc

SEQ ID NO: 601845 - DNA, 75 bp, synthetic construct
  source 1..75: mol_type = other DNA
atgttgatggcgattgagtttgttgataacgaaatcggctataactttgccagcgagatgttccgccagcgcgtc

SEQ ID NO: 601846 - DNA, 75 bp, synthetic construct
  source 1..75: mol_type = other DNA
ctctgaatctgaatgcctctggtaaaactgctgaagtatgggctacgggcctgaaatatgatgcaaacaacattt

SEQ ID NO: 601847 - DNA, 75 bp, synthetic construct
  source 1..75: mol_type = other DNA
aacaagaatatgtccactttcgttgactataagatcaacctgaacgatgaaagtgattttaccaaaaaatctggc

SEQ ID NO: 601848 - DNA, 75 bp, synthetic construct
  source 1..75: mol_type = other DNA
ctgctgacgacgctgaatctgaagctggaaccggcggatgattttcgtgacgagccggtgaagttaacggcgtga

SEQ ID NO: 601849 - DNA, 75 bp, synthetic construct
  source 1..75: mol_type = other DNA
tttcaggacatgcttgggctgggcggcgaatccgcagcaactgtggcaggcgatggcactgctggcgcggtggtt

SEQ ID NO: 601850 - DNA, 75 bp, synthetic construct
  source 1..75: mol_type = other DNA
aactcagaatatgaccgtttttggtaataaccatattgcaaacaaagcacaaaactttgaagcagtagcacaata

SEQ ID NO: 601851 - DNA, 75 bp, synthetic construct
  source 1..75: mol_type = other DNA
cgcactgacggtcaggtcgcctatggtaagagcaaattcaatgcctccggcaaaaatgcggaagtatgggctgca

SEQ ID NO: 601852 - DNA, 75 bp, synthetic construct
  source 1..75: mol_type = other DNA
agatttccttaagatgctgcaactatgcacagggaaatatctatttccttcaagcagaacgaagttacctattca

SEQ ID NO: 601853 - DNA, 75 bp, synthetic construct
  source 1..75: mol_type = other DNA
agcggtggatcagccgtggactaactggcaggaagcactggataaagtgcagaaagtgccgggtattgccgccgc

SEQ ID NO: 601854 - DNA, 75 bp, synthetic construct
  source 1..75: mol_type = other DNA
tattgcagtcgcaatcgccggtttcaatcagatgaaccgtggtggcccggcgggtaatgccgtggtgatgcactg

SEQ ID NO: 601855 - DNA, 75 bp, synthetic construct
  source 1..75: mol_type = other DNA
tgccgcctttgctggtggcccgtatgcgcagtcacagctctgaatattaccgtgagatcgtcgaacggagggatc

SEQ ID NO: 601856 - DNA, 75 bp, synthetic construct
  source 1..75: mol_type = other DNA
atctgcgcgcgcttcaggtaaaaggggttgatccgcaacaggaacagcgcctaagtgcgctgccctcgtttgtcc

SEQ ID NO: 601857 - DNA, 75 bp, synthetic construct
  source 1..75: mol_type = other DNA
cagcattgttgctgagtcttttggcaagttggtatccggcgcggcgcgccagtaatattgaccctgcgcgagtcc

SEQ ID NO: 601858 - DNA, 75 bp, synthetic construct
  source 1..75: mol_type = other DNA
cccaacaatatcttgatatgggttccagtgtgtcaggtattgcccttaaaatgacggatgtatttaacgccaaca

SEQ ID NO: 601859 - DNA, 75 bp, synthetic construct
  source 1..75: mol_type = other DNA
gcatggcgatgaatgcttgggcgcgtccggatggtgaaaaagttccggcggccaagataaccagggcttatttcg

SEQ ID NO: 601860 - DNA, 75 bp, synthetic construct
  source 1..75: mol_type = other DNA
tatggcggaaattccctcgccgctgggtaatgtcaccgtaatcaacggttacttcccgcagggcgaaagccgtga

SEQ ID NO: 601861 - DNA, 75 bp, synthetic construct
  source 1..75: mol_type = other DNA
acggcctgcgcgccagacctcaccagcttgaagccatcgtcgagaagcatcaaccggatgtcattggcctgcagg

SEQ ID NO: 601862 - DNA, 75 bp, synthetic construct
  source 1..75: mol_type = other DNA
tgatgcagttgaaaaaattcaggcgttgttaccagctatcgaaaaagcaatgccacctctgctggtggcccgaat

SEQ ID NO: 601863 - DNA, 75 bp, synthetic construct
  source 1..75: mol_type = other DNA
gattttgtcgcagtggcaatcgccggtttcaatcagatgaaccgtggtggcccggcaggaaatgctgtggcagta

SEQ ID NO: 601864 - DNA, 75 bp, synthetic construct
  source 1..75: mol_type = other DNA
gtcgcagtggcgatcgctggtttcaatcagatgaatcgtggtggtccggcgggaaatgccgtggtgatgcactaa

SEQ ID NO: 601865 - DNA, 75 bp, synthetic construct
  source 1..75: mol_type = other DNA
ctggtgggcggcgatgccaacgccgtcgggccgaataaacgcccgctgtcgtcgatgtcaccaaccattgtggtc

SEQ ID NO: 601866 - DNA, 75 bp, synthetic construct
  source 1..75: mol_type = other DNA
tggcggtgacctatacgctgaacaccaccttcggtacgggcattgtcgcgggcgagagcggtattctgcttaata

SEQ ID NO: 601867 - DNA, 75 bp, synthetic construct
  source 1..75: mol_type = other DNA
agcggtgcggcaactccatcgtattattgaaagtgacaataattttatgaaatggccttttaaaggctctgttga

SEQ ID NO: 601868 - DNA, 75 bp, synthetic construct
  source 1..75: mol_type = other DNA
gcatggggctgggcttccctggtgccgtaactcgcccgcaggacctcaccgcagagccggtgattctcgatgccg

SEQ ID NO: 601869 - DNA, 75 bp, synthetic construct
  source 1..75: mol_type = other DNA
gaaagaaaacgatactgatattcttgtaggtgcatataaaggtaaatacctgtggtataccgcaccagattttgt

SEQ ID NO: 601870 - DNA, 75 bp, synthetic construct
  source 1..75: mol_type = other DNA
cctgaaacgcggttacacctgcgtaattgctaccgcaggcaacgcggcgaccgcgaaaaaaggagatccggttta

SEQ ID NO: 601871 - DNA, 75 bp, synthetic construct
  source 1..75: mol_type = other DNA
gaaactctttacgttaccgcttttccgggctgcaactgacagaaatgattttgatatacgcgatatgcggcgtaa

SEQ ID NO: 601872 - DNA, 75 bp, synthetic construct
  source 1..75: mol_type = other DNA
gtcttgtttgcagataacatacgtagtgatatcagattcagtggtattaaggctattggcgctggtttttgtggc

SEQ ID NO: 601873 - DNA, 75 bp, synthetic construct
  source 1..75: mol_type = other DNA
atgcctttatcgttattaattggcctgcgttttagtcgcggacggcggcgtggcggcatggtgtcgctgatctcc

SEQ ID NO: 601874 - DNA, 75 bp, synthetic construct
  source 1..75: mol_type = other DNA
atgaaaacgcactgtatcatctgcgcgatgcactgaccaaaatcagggagtatcacgaaacagaggatgaacaac

SEQ ID NO: 601875 - DNA, 75 bp, synthetic construct
  source 1..75: mol_type = other DNA
actttaaagaagagtttatcatcctgaagggggagaaccctgttaaagcagaaaaggcactttattaccttgatc

SEQ ID NO: 601876 - DNA, 75 bp, synthetic construct
  source 1..75: mol_type = other DNA
cagaatatcagtcagctaaatgaaatctatggtattgagggagccaaaacactgatgagtgctcatccctgccgt

SEQ ID NO: 601877 - DNA, 75 bp, synthetic construct
  source 1..75: mol_type = other DNA
tcgctgccgggtatgatttgcgtactcctgccgaatgcgagaaaacgttcgcggattttgcccgtattgtcggct

SEQ ID NO: 601878 - DNA, 75 bp, synthetic construct
  source 1..75: mol_type = other DNA
gaccgtttcgacggcattccgctgatccttgaaaccatcaacccggatatctgggcagaagagatcgcctggctg

SEQ ID NO: 601879 - DNA, 75 bp, synthetic construct
  source 1..75: mol_type = other DNA
tgcgttccgctggatcatgcaggacgaccgtttcgacggcattccgctgatccttgaaaccatcaacccggatat

SEQ ID NO: 601880 - DNA, 75 bp, synthetic construct
  source 1..75: mol_type = other DNA
agtaaaaacctgccctatctggcccaaacatggatagaagatacgaaaggcaataaatcgcgtgactttattgtc

SEQ ID NO: 601881 - DNA, 75 bp, synthetic construct
  source 1..75: mol_type = other DNA
tcccgaatatcccggtggccaccccgaccaccgttctggttaacgtcaacacgcttgaagctttaccactgttac

SEQ ID NO: 601882 - DNA, 75 bp, synthetic construct
  source 1..75: mol_type = other DNA
actggtcaggactatgccttttggttaaatattctcaaagaagggatgaaggcacatttattccgggaggtttta

SEQ ID NO: 601883 - DNA, 75 bp, synthetic construct
  source 1..75: mol_type = other DNA
ccgcatgttcggcaccaaagtacgatataccggtctttcttttgcctatcaattttccgcaatacttggcggact

SEQ ID NO: 601884 - DNA, 75 bp, synthetic construct
  source 1..75: mol_type = other DNA
tgattgacacagagaaactcactttcaccgtctgtgacagtgaatacaaaatgataaaaatgaaaacaaatatgt

SEQ ID NO: 601885 - DNA, 75 bp, synthetic construct
  source 1..75: mol_type = other DNA
aatgattgatggtaaagacattaagtcgctgaaagagcaggttatggatttgggtatccctgcatctgagctgat

SEQ ID NO: 601886 - DNA, 75 bp, synthetic construct
  source 1..75: mol_type = other DNA
gaaggctaaaaggcaatgggctatatatagagaaatagaagctcttagtctgaccgagtctttagagtgtttttg

SEQ ID NO: 601887 - DNA, 75 bp, synthetic construct
  source 1..75: mol_type = other DNA
cccgacaggacacgcatcatttttaatgcttcgaataaaagcgcaacggttcgcctgaccaaccaaagtaaaatc

SEQ ID NO: 601888 - DNA, 75 bp, synthetic construct
  source 1..75: mol_type = other DNA
acatcgattgataccaccgccgatgtctcgctggataaagtggatgccggttttgcgattactaaaatcgcactg

SEQ ID NO: 601889 - DNA, 75 bp, synthetic construct
  source 1..75: mol_type = other DNA
ttattctgttgatgatggccacaggtgtgcaggcctccacccgggatgaaattgaacgactctggcatccgcagg

SEQ ID NO: 601890 - DNA, 75 bp, synthetic construct
  source 1..75: mol_type = other DNA
gaaaagccggctccccgctggttccgcctcagtaatggcaggcaggttaacctggccgactggaaggtggtgctg

SEQ ID NO: 601891 - DNA, 75 bp, synthetic construct
  source 1..75: mol_type = other DNA
gcgcatcggatgctgccggttttatggcgcggatggataccgttctgcagatgtacggaggaaaaaaaggtgcga

SEQ ID NO: 601892 - DNA, 75 bp, synthetic construct
  source 1..75: mol_type = other DNA
caccttcctggttaacgtcaatacgcttgaagcgctgccgcttttacagggcgcatcggatgctgccggttttat

SEQ ID NO: 601893 - DNA, 75 bp, synthetic construct
  source 1..75: mol_type = other DNA
cgctggtagcctttgatgagtacggtcaacgcctgggaatgggcggcggtttttatgatcggacattgcaaaact

SEQ ID NO: 601894 - DNA, 75 bp, synthetic construct
  source 1..75: mol_type = other DNA
atgacgcaactaccagaactcccacagacattatcccgacaagaaatccgtaaaatgattcggcaacgtcgtcgt

SEQ ID NO: 601895 - DNA, 75 bp, synthetic construct
  source 1..75: mol_type = other DNA
ggataccgttctgcagatgtacggaggaaaaaaaaggtgcgaaataagcaggtggtgttactcattgccggaata

SEQ ID NO: 601896 - DNA, 75 bp, synthetic construct
  source 1..75: mol_type = other DNA
atgatgcgcatgtttaactttatgaagagtgtcggcgctacccccatcgttaaagccattgatgttcccggtgaa

SEQ ID NO: 601897 - DNA, 75 bp, synthetic construct
  source 1..75: mol_type = other DNA
gcaacggatgccgccggttttatggcgcggatggataccgttctgcagatgtacggaggaaaaaaaggtgcgaaa

SEQ ID NO: 601898 - DNA, 75 bp, synthetic construct
  source 1..75: mol_type = other DNA
ggcagcagacacgtcagccaggacagacaagacagaaaagccggctccccgctggttccgcctcagcaacggcag

SEQ ID NO: 601899 - DNA, 75 bp, synthetic construct
  source 1..75: mol_type = other DNA
acagctggcacaacagtacggtttttccgtttttccctacaccctggatggtcagggggattcggcttttccgga

SEQ ID NO: 601900 - DNA, 75 bp, synthetic construct
  source 1..75: mol_type = other DNA
ttaccacttttacagggggcaacggatgccgctggttttatggcgcggatggatactgttctgcagatgtatgca

SEQ ID NO: 601901 - DNA, 75 bp, synthetic construct
  source 1..75: mol_type = other DNA
tagcgctaaactggcgggtatgtgccctgtacagaccgaccagcatgtactgaatgttgtgtcgcatcaactgca

SEQ ID NO: 601902 - DNA, 75 bp, synthetic construct
  source 1..75: mol_type = other DNA
ctcgaattccgcaatgatacttcagcaggggatggcgcgcgtattgagcagtttgatcgcaaaggtatggtgaac

SEQ ID NO: 601903 - DNA, 75 bp, synthetic construct
  source 1..75: mol_type = other DNA
gacataaaaaaattaacagccaattcaatgacactgactgaggcgcttgaatcgaaagagtttggattaatggct

SEQ ID NO: 601904 - DNA, 75 bp, synthetic construct
  source 1..75: mol_type = other DNA
tacttttttttgccataatgtttttatggaaaggtctgtatttcgctctcgaagtcggaaatggtttgcttgcgg

SEQ ID NO: 601905 - DNA, 75 bp, synthetic construct
  source 1..75: mol_type = other DNA
cgattgagttggcgactcccttaagtgagttaatcgcgggtattattaattatctcaagagcaaattttctaaat

SEQ ID NO: 601906 - DNA, 75 bp, synthetic construct
  source 1..75: mol_type = other DNA
gtgaaaaacagcctgatgaacctcgctaagacgccgctggcggcactggctctttcccttgcactggctggggtg

SEQ ID NO: 601907 - DNA, 75 bp, synthetic construct
  source 1..75: mol_type = other DNA
gaatgatttgtttactggggttctgtaacttcgcccaagcgactgtctcccccgacagaacgcgcataattttta

SEQ ID NO: 601908 - DNA, 75 bp, synthetic construct
  source 1..75: mol_type = other DNA
gttctctaatagctattgttgcattcatccttggtgtgggtttaactttgcttttgactcttcttaaatcagcat

SEQ ID NO: 601909 - DNA, 75 bp, synthetic construct
  source 1..75: mol_type = other DNA
atgcctgaattattgcgtgaacttaagtggtccccagatggttgtattgtcgaatccattcccgcaggggtgtat

SEQ ID NO: 601910 - DNA, 75 bp, synthetic construct
  source 1..75: mol_type = other DNA
atgaaatcaccattaatgacaacaggaatgatttgtttactggggatctgcaactttgcccaggcgactgtctcc

SEQ ID NO: 601911 - DNA, 75 bp, synthetic construct
  source 1..75: mol_type = other DNA
gtaccgggcaaaacaccatcagcctggcgctgggttccattacaagaagatgccgcagacgagagcaaaaatgac

SEQ ID NO: 601912 - DNA, 75 bp, synthetic construct
  source 1..75: mol_type = other DNA
agataacaatccctgtcgccacattcccgtatatccgttacccgatacagccgggcgatcgaggagtaacaattg

SEQ ID NO: 601913 - DNA, 75 bp, synthetic construct
  source 1..75: mol_type = other DNA
ggtatcgacgccacgcaaaccaaccacggtcgccaacatctcgacgaaacccaggtgcgggtgtttggtcagcat

SEQ ID NO: 601914 - DNA, 75 bp, synthetic construct
  source 1..75: mol_type = other DNA
gtgtggatcgactggcgggatgacaggcaagctgctttagacgagtggggcagcgcgtcgcttcgccagctttaa

SEQ ID NO: 601915 - DNA, 75 bp, synthetic construct
  source 1..75: mol_type = other DNA
gcacatgcgggaacgctcgatgaggtgaagtcgctctgggatccgcggggtatctccggtactgaaacggcctcc

SEQ ID NO: 601916 - DNA, 75 bp, synthetic construct
  source 1..75: mol_type = other DNA
cgacattgatgaacgccatcgcgctgatcgccagtcaaacctggcgcgatcatccggtggatttattgctctcgc

SEQ ID NO: 601917 - DNA, 75 bp, synthetic construct
  source 1..75: mol_type = other DNA
aagcatcctctgttgatttaatcttcagttcaaatcctgaattacgtgcggtggcagaagtatatgcctcggatg

SEQ ID NO: 601918 - DNA, 75 bp, synthetic construct
  source 1..75: mol_type = other DNA
tgacccaccgggatatgggaccggcagcccgatatcttggtaatgaagttcctgcagaatcatttatctggcagg

SEQ ID NO: 601919 - DNA, 75 bp, synthetic construct
  source 1..75: mol_type = other DNA
cgtgcgtaaccgtgctgctggctctctggtgaaacgtcttggaatcgaagaaggtattgagctgaacccgccgct

SEQ ID NO: 601920 - DNA, 75 bp, synthetic construct
  source 1..75: mol_type = other DNA
atcgccaacccagttcacaatgcagtatctgaagaatttatataaatatgaatgggagctgcacaagagtcctgc

SEQ ID NO: 601921 - DNA, 75 bp, synthetic construct
  source 1..75: mol_type = other DNA
cggcagataacgccagtgtgaagcagagcgggcagctcatcgaacaactatcgctgggcgtttacgacgcggtgc

SEQ ID NO: 601922 - DNA, 75 bp, synthetic construct
  source 1..75: mol_type = other DNA
atgaaagggtacgcttcgccgctgcggtcacccggtccctccttcccgtctgccgtgattttccggtcgttcacc

SEQ ID NO: 601923 - DNA, 75 bp, synthetic construct
  source 1..75: mol_type = other DNA
agcccgtcgatgccgttatgggtggtagaaaacaaaaccaacggccaccgtacttttagcaatttcaattgcgtc

SEQ ID NO: 601924 - DNA, 75 bp, synthetic construct
  source 1..75: mol_type = other DNA
gcacgcaaaggcgttattgaaattgtttccggcgcatcgcgcgggatccgtctgttgcatgaagaggaagaaggg

SEQ ID NO: 601925 - DNA, 75 bp, synthetic construct
  source 1..75: mol_type = other DNA
accgggaatggtaaatataccatcggtagtggtctggaaggtgcgtggtcaacttcgcctaccaaattcacaatg

SEQ ID NO: 601926 - DNA, 75 bp, synthetic construct
  source 1..75: mol_type = other DNA
gcctccatcttagccgagctggcgttgatgcaagcaactgtcttaatgggaggcggttatctgaaaaaagtacgg

SEQ ID NO: 601927 - DNA, 75 bp, synthetic construct
  source 1..75: mol_type = other DNA
ttttgatgaccagttgcgggcgcaatttggtggttctttggcgcagaaagtgatcgacgcgacgggtaatcaaca

SEQ ID NO: 601928 - DNA, 75 bp, synthetic construct
  source 1..75: mol_type = other DNA
gcaaatctctgatccagaattccacaaaaaagagaccacaataatgggtagccgtaacgctacgccggaagattt

SEQ ID NO: 601929 - DNA, 75 bp, synthetic construct
  source 1..75: mol_type = other DNA
gaaggaaaaattactgcgggcatgatgttaactcattgctacccgttcgccacgctggcagaaacttacgagcgc

SEQ ID NO: 601930 - DNA, 75 bp, synthetic construct
  source 1..75: mol_type = other DNA
ctgggagccgcggcgattgcaaaagcggacggagctcaggtggtcgtggcggataccagcccgacccggcgcgaa

SEQ ID NO: 601931 - DNA, 75 bp, synthetic construct
  source 1..75: mol_type = other DNA
gcaccgcgatcatcgtcggtaaaaaaggtcagcgcgtgtggaccggtggcggtgatgaagaagcgctgtcgaaag

SEQ ID NO: 601932 - DNA, 75 bp, synthetic construct
  source 1..75: mol_type = other DNA
tggcggttttagtgagtatttaagcgtgccagaagcgaacattttgcccgcagacggcatcgacccacaggcggc

SEQ ID NO: 601933 - DNA, 75 bp, synthetic construct
  source 1..75: mol_type = other DNA
tcccggcgagcaggtgctggtggtcggggcggggccaatcggtctgggcgcggcggcaatcgctaaagctgatgg

SEQ ID NO: 601934 - DNA, 75 bp, synthetic construct
  source 1..75: mol_type = other DNA
ttagcgatgattttaacggtgaatacctgcatcaaaagtgcgctaagaaaaagacagcgattaaaccctggttga

SEQ ID NO: 601935 - DNA, 75 bp, synthetic construct
  source 1..75: mol_type = other DNA
ggcgtgtcgggtgtgtggtacgccgattgtggcgactaaacatgcgcaacgggcgacgttttattgcaggcagtg

SEQ ID NO: 601936 - DNA, 75 bp, synthetic construct
  source 1..75: mol_type = other DNA
aaagtgctgcgctacaccgacccgcgccgctttggcgcctggctgtgggccaaagagctggaaggccacaatgtg

SEQ ID NO: 601937 - DNA, 75 bp, synthetic construct
  source 1..75: mol_type = other DNA
gccagaaaccgaaagaattagtctggaaacaatatgaaatgcctattcccggtggcgatgaagtattgataaaga

SEQ ID NO: 601938 - DNA, 75 bp, synthetic construct
  source 1..75: mol_type = other DNA
gccgtgtcgggtgtgtggtacgccgattatggcgacgaaacatgcacaacgggcgacgttttattgtcggcagtg

SEQ ID NO: 601939 - DNA, 75 bp, synthetic construct
  source 1..75: mol_type = other DNA
gccgtgtcgggtatgcggtacgccgattgtagcgactaaacacgcgcagcgggcaacgttttattgcaggcagtg

SEQ ID NO: 601940 - DNA, 75 bp, synthetic construct
  source 1..75: mol_type = other DNA
ctgctggaagaggcccagaaactcggtcttggcgcgcagtttggcggtaaatacttcgcgcacgacatccgcgtt

SEQ ID NO: 601941 - DNA, 75 bp, synthetic construct
  source 1..75: mol_type = other DNA
acaccattatcgcgaccgatcgccagctatatcagaacgggattacttcttcagttgaaggtgtggaaaccgata

SEQ ID NO: 601942 - DNA, 75 bp, synthetic construct
  source 1..75: mol_type = other DNA
accagcatcaggcgcaaattgagcgcgatgccctgcgagtcgttggtctggcgcaggcgcgttttaacgcgggca

SEQ ID NO: 601943 - DNA, 75 bp, synthetic construct
  source 1..75: mol_type = other DNA
ctgaacagcgcattcagctagctgaagcccaggcgaaggcagttgctactcaggatggtccgcagatcgactttt

SEQ ID NO: 601944 - DNA, 75 bp, synthetic construct
  source 1..75: mol_type = other DNA
aatgagttaggtggaaatttaacaccttgttttgaaagccaagactccaggaaactatggaatttaattgccgct

SEQ ID NO: 601945 - DNA, 75 bp, synthetic construct
  source 1..75: mol_type = other DNA
caaaagagggtattttgctgctgattgagccacttaatcactttgatatgccgggcttccatttgaccggaacac

SEQ ID NO: 601946 - DNA, 75 bp, synthetic construct
  source 1..75: mol_type = other DNA
attgaagcttaaaccggtcgcgttgccgaaagtggcaagccagcttcctgatgaactggggtactccttactggc

SEQ ID NO: 601947 - DNA, 75 bp, synthetic construct
  source 1..75: mol_type = other DNA
gtgacggatgcctgtaaaaaacacggcggcttctacctcggcagtatcggtggtccggcagctgtattggcgcag

SEQ ID NO: 601948 - DNA, 75 bp, synthetic construct
  source 1..75: mol_type = other DNA
cggaaggttatgcctccggttctcttggcccaacgaccgccggacggatggattcttatgtcgatcaactgcaag

SEQ ID NO: 601949 - DNA, 75 bp, synthetic construct
  source 1..75: mol_type = other DNA
agtacgtggcgctgcaattcttaagaaactccgaaatcgccgctaaaggcgtgctgccgacctgccaggataccg

SEQ ID NO: 601950 - DNA, 75 bp, synthetic construct
  source 1..75: mol_type = other DNA
caccgcattacccacggcgctgaaaaatggttggccagacagccaatggtggctggagtatcacgataatcaact

SEQ ID NO: 601951 - DNA, 75 bp, synthetic construct
  source 1..75: mol_type = other DNA
gcgctggacatgtacaaagaggtcaacaccggcactaacctgcctgcgcaaatcgacctgtacgcggtagatggc

SEQ ID NO: 601952 - DNA, 75 bp, synthetic construct
  source 1..75: mol_type = other DNA
agtagaagatttcccggcgtttatcctggtcgatgacaaaggtaacgacttcttccagcagatcgtcaacaaaca

SEQ ID NO: 601953 - DNA, 75 bp, synthetic construct
  source 1..75: mol_type = other DNA
gaaagattttctgcaaagcgacggaaaaccaggttatttcgcgcaggaattacaggtttacgggcgtaaaggcga

SEQ ID NO: 601954 - DNA, 75 bp, synthetic construct
  source 1..75: mol_type = other DNA
ataagattgacactaaaaattatggtgatggttccaataacgtgtttgttatctggactttatcattaaaatcct

SEQ ID NO: 601955 - DNA, 75 bp, synthetic construct
  source 1..75: mol_type = other DNA
ccgcgtatgatgagctggtggcacaggccagaataaaccgcgctttacgctggtctgactatggcgttgaacgcg

SEQ ID NO: 601956 - DNA, 75 bp, synthetic construct
  source 1..75: mol_type = other DNA
cagcagtttgcccgaaaaagggctgaacactgccacctgcgctgccggggaagggtgtaacgaaaaaagcagcct

SEQ ID NO: 601957 - DNA, 75 bp, synthetic construct
  source 1..75: mol_type = other DNA
aacactgctaccggcgctgccggggaagggggtaacgaaaaagcagtcttcattactccaggagtcagaaggctg

SEQ ID NO: 601958 - DNA, 75 bp, synthetic construct
  source 1..75: mol_type = other DNA
ggtgttgcaccccggacagactggcagcagtttgcccgaaaaagggctgaacactgccaccggcgctgccgggga

SEQ ID NO: 601959 - DNA, 75 bp, synthetic construct
  source 1..75: mol_type = other DNA
ccatcaagaacgtgttatggaaggtatgatgcctgaagaaccaaaagccatagttatagaagatactgagtgggg

SEQ ID NO: 601960 - DNA, 75 bp, synthetic construct
  source 1..75: mol_type = other DNA
atctcgacgatatgctttctcaacgtgacagcatcaattctaaactgttaacggttgtcgattatgcaactgatc

SEQ ID NO: 601961 - DNA, 75 bp, synthetic construct
  source 1..75: mol_type = other DNA
taacgccggaacaacagctgaaaatgggtcaacaagctgctacccggatgatgacttatcccccagtgatgatgg

SEQ ID NO: 601962 - DNA, 75 bp, synthetic construct
  source 1..75: mol_type = other DNA
gatgatgacttatcccccggtggtgatggcgcatacggtcgctgtattcctctcttttgatggcgagctcgacac

SEQ ID NO: 601963 - DNA, 75 bp, synthetic construct
  source 1..75: mol_type = other DNA
aagtcagtggacgctggatggaagcggcagaagcatggcgacgggctgccggtgttgcgcccaggacagactggc

SEQ ID NO: 601964 - DNA, 75 bp, synthetic construct
  source 1..75: mol_type = other DNA
agcagtttgcccgaaaaagggctgaacactgccaccggcgctgccggggaagggtgtaacgaaaaagcagccttc

SEQ ID NO: 601965 - DNA, 75 bp, synthetic construct
  source 1..75: mol_type = other DNA
acactgccaccggcgctgccggggaagggtgtaacgaaaagcagccttcattactccagggattcagaaggctga

SEQ ID NO: 601966 - DNA, 75 bp, synthetic construct
  source 1..75: mol_type = other DNA
tattattgaaaaagagacggtaaaagcgctggtagaagcaggccaggtagtgatcaccgttggcggtggtggcat

SEQ ID NO: 601967 - DNA, 75 bp, synthetic construct
  source 1..75: mol_type = other DNA
cgtgatattgctcacgccaaactgaaagagcggatggataacggtgaagggctgccgcagtacatcaaagatcat

SEQ ID NO: 601968 - DNA, 75 bp, synthetic construct
  source 1..75: mol_type = other DNA
aaagagcggatggataacggtgaagggctgccgcagtacattaaagatcatccgatttactacgcgggtccggcc

SEQ ID NO: 601969 - DNA, 75 bp, synthetic construct
  source 1..75: mol_type = other DNA
cacgctgggtacggcggcctgtcctccgtatcatattgcgttcgttattggtggaacttctgcagaaacgaatct

SEQ ID NO: 601970 - DNA, 75 bp, synthetic construct
  source 1..75: mol_type = other DNA
ccagccgtcgcggcatagaaccgcatctcgttggtgcaaccattcttcatgcagtggtgcgcaacggacgcttgc

SEQ ID NO: 601971 - DNA, 75 bp, synthetic construct
  source 1..75: mol_type = other DNA
atgcctgaattacccgaagttgaaaccagccgtcgcggcatagaaccgcatctcgttggtgcaaccattcttcat

SEQ ID NO: 601972 - DNA, 75 bp, synthetic construct
  source 1..75: mol_type = other DNA
ggggctaggtgaccgggctgcacgccgtatgatgcaggcgtctattaagtacctttcacctacgcttgagtcaaa

SEQ ID NO: 601973 - DNA, 75 bp, synthetic construct
  source 1..75: mol_type = other DNA
tgggcgggaatgcgctgggcgacgacctggccggacaaatgaaagcggtaaaaattacgtctcaggcaattgttg

SEQ ID NO: 601974 - DNA, 75 bp, synthetic construct
  source 1..75: mol_type = other DNA
tcattggccgatgcagaacgctttattgatgaggggcattttgctaaaggttcgatgctgccgaaagtggaagcc

SEQ ID NO: 601975 - DNA, 75 bp, synthetic construct
  source 1..75: mol_type = other DNA
ccgagcaagaagcagagcaactgacaaaacagggttacactctgaaagaagatgctggtcgcggctatcgtcgtg

SEQ ID NO: 601976 - DNA, 75 bp, synthetic construct
  source 1..75: mol_type = other DNA
gcgctggtagaagcaggccaggtagtgatcaccgttggcggtggtggtattcctgttattcgtgaaggtaaccat

SEQ ID NO: 601977 - DNA, 75 bp, synthetic construct
  source 1..75: mol_type = other DNA
gaagcactgattaccgtattgagcaaagcgaaagaagggattgaaggcaaaaccggaacggtgatttgtcagtaa

SEQ ID NO: 601978 - DNA, 75 bp, synthetic construct
  source 1..75: mol_type = other DNA
taacgatccggcattcctcaacccgaccaagccgatcggttcgttctttaccgagcaagaagcagagcaactgac

SEQ ID NO: 601979 - DNA, 75 bp, synthetic construct
  source 1..75: mol_type = other DNA
agccgtcggcctgggagcgacagcaatgggcgcaacatctgtcgcgacaggaaatagaagcaatgctataggtta

SEQ ID NO: 601980 - DNA, 75 bp, synthetic construct
  source 1..75: mol_type = other DNA
gcccaatacaaaccagtgtcgttaatggaaataaactggaagtttcagcagagatagcttcatttcctgtaaatg

SEQ ID NO: 601981 - DNA, 75 bp, synthetic construct
  source 1..75: mol_type = other DNA
agcgcggtttttggtacaggtgggcagataacaacagttaatgataaaggcatcacaatcacaacacctgctgcg

SEQ ID NO: 601982 - DNA, 75 bp, synthetic construct
  source 1..75: mol_type = other DNA
gagacgacctaacccctcttcaagggcagagatttggctcgaaagagatccctacacaatatgtcgccactgaag

SEQ ID NO: 601983 - DNA, 75 bp, synthetic construct
  source 1..75: mol_type = other DNA
tgacgagggatttaagacaggagagtcgatagcgataggtgccaaggctcaagcaaccagagagcaatcaattgc

SEQ ID NO: 601984 - DNA, 75 bp, synthetic construct
  source 1..75: mol_type = other DNA
cagtgatgatggtggaaaggttgagggtgatagggaggaattaattaatcccggtgatactgttacgttgaaagc

SEQ ID NO: 601985 - DNA, 75 bp, synthetic construct
  source 1..75: mol_type = other DNA
ggttggtttattcagtatggttctggagcagtatacagaacgttccaggataagatgcgtgacacagttagccct

SEQ ID NO: 601986 - DNA, 75 bp, synthetic construct
  source 1..75: mol_type = other DNA
tactgatgaagaactacaggatattgcaaaccgcatagtggatatcatggctgaccataaagttagtcctgttgc

SEQ ID NO: 601987 - DNA, 75 bp, synthetic construct
  source 1..75: mol_type = other DNA
ccgctacctgagccggaaccgactcccgatcccacgcctgatcctgcaccaaccccgacgcctgtttaccagcct

SEQ ID NO: 601988 - DNA, 75 bp, synthetic construct
  source 1..75: mol_type = other DNA
tgttgttgatactccgtcattcagcagtgttcagctgaatggaaaaggaaataacggaagtgtaatgctctcatc

SEQ ID NO: 601989 - DNA, 75 bp, synthetic construct
  source 1..75: mol_type = other DNA
ctgttactgaagttaagaaagatgaaccaaatggcatttactttgaccacacatctccagttgctaaagggcgta

SEQ ID NO: 601990 - DNA, 75 bp, synthetic construct
  source 1..75: mol_type = other DNA
gcgacccgttaagtatatctcaacttagcgaatcgatgggtttcgaaccagatgcgatacttgacgcatggggga

SEQ ID NO: 601991 - DNA, 75 bp, synthetic construct
  source 1..75: mol_type = other DNA
aaatgatgccatcaaaattaaagatggagatggtaagaggctgacgaagagtcttggtgacgatgtcgaaatcgc

SEQ ID NO: 601992 - DNA, 75 bp, synthetic construct
  source 1..75: mol_type = other DNA
tcctaatgtaaaaaaatgcattgaaatttcagatatacatttttttaaccctaaaaaagaatttgataataataa

SEQ ID NO: 601993 - DNA, 75 bp, synthetic construct
  source 1..75: mol_type = other DNA
aaaaaagcttatcagttaggtatgacagagattatttttatcgatccatatcctggtatagcgcaagaacatatt

SEQ ID NO: 601994 - DNA, 75 bp, synthetic construct
  source 1..75: mol_type = other DNA
ataaactcaaatttatatgtttcagcctatcagttagcaggtaagtcaattagacgtcgtgggcgtattgaagtc

SEQ ID NO: 601995 - DNA, 75 bp, synthetic construct
  source 1..75: mol_type = other DNA
tgggaaaatttttactcaattaaggtgagtgacctaatctcagcgtatcttttgatgttaacagttgaagaagct

SEQ ID NO: 601996 - DNA, 75 bp, synthetic construct
  source 1..75: mol_type = other DNA
gtgggacgtgatgaaagaaaaaaattcgttagtgagcttttccttgaaaatgggcagtttattttagtcggtttg

SEQ ID NO: 601997 - DNA, 75 bp, synthetic construct
  source 1..75: mol_type = other DNA
atcaagtgcatacccgtgcattgcacgcagaggagaatgcttttttgcaattggccaaatatggtggggtcggta

SEQ ID NO: 601998 - DNA, 75 bp, synthetic construct
  source 1..75: mol_type = other DNA
tgcagttactgttaatgataaaggaatgacgattgacggaacaacgctgaaaaatgaaataaaaaatgaagccat

SEQ ID NO: 601999 - DNA, 75 bp, synthetic construct
  source 1..75: mol_type = other DNA
aaaccagtctggctggaaaattaaagcggataaagataccggtggtgttatcgagggaaatgctcagggaacaga

SEQ ID NO: 602000 - DNA, 75 bp, synthetic construct
  source 1..75: mol_type = other DNA
gctacagaacctttagctcttgcgattggctcggtcagtaaagcaactggcatgggggcgaatgctatgggagct

SEQ ID NO: 602001 - DNA, 75 bp, synthetic construct
  source 1..75: mol_type = other DNA
tttacgagccggtgccgacagttctgacaaggcagaccccggttccggcactggaaatacccgtgacatggtaca

SEQ ID NO: 602002 - DNA, 75 bp, synthetic construct
  source 1..75: mol_type = other DNA
gttcgccatgcatacacagacttttccagggtgataaacgtgatccgcattctggaccagcaacggatcacagaa

SEQ ID NO: 602003 - DNA, 75 bp, synthetic construct
  source 1..75: mol_type = other DNA
ttgataatgataatggcgggcttctggtgaggatgaccagaaacctccgtgatttggccagcgcggtttttggta

SEQ ID NO: 602004 - DNA, 75 bp, synthetic construct
  source 1..75: mol_type = other DNA
cgatctgctggtacttaacggcaatacctccggtaacaccacggtagtgattaacccgattactggcattggcga

SEQ ID NO: 602005 - DNA, 75 bp, synthetic construct
  source 1..75: mol_type = other DNA
cggtcttcggaaacggagataacattacaacgataactgacaacggtatgtcggtgacaaccggtaccggagata

SEQ ID NO: 602006 - DNA, 75 bp, synthetic construct
  source 1..75: mol_type = other DNA
tctcttgggcaggcgattaaagtatccggggacagcaatatcaccaccacagcaatcactgccaatggagataag

SEQ ID NO: 602007 - DNA, 75 bp, synthetic construct
  source 1..75: mol_type = other DNA
ctgtcggacagggggccgtttcccggggacaaaacagtattgccatgggaaatggtgctgaagttacacttcagg

SEQ ID NO: 602008 - DNA, 75 bp, synthetic construct
  source 1..75: mol_type = other DNA
cccgctgacggctatctggcatgcagtaaggggatggtgcgctgaccggcagacggagccggtaaggaatgcgtc

SEQ ID NO: 602009 - DNA, 75 bp, synthetic construct
  source 1..75: mol_type = other DNA
cagaagtcagtggtgatgcggctgccggctctgttgccattggcagtggttcacgggccggacgggcacacaccg

SEQ ID NO: 602010 - DNA, 75 bp, synthetic construct
  source 1..75: mol_type = other DNA
tggtcctgacaaacgtggcggacggtgcagtaactccggagtctgtggatgcggtaaacggagggcaactggcgt

SEQ ID NO: 602011 - DNA, 75 bp, synthetic construct
  source 1..75: mol_type = other DNA
gggatattgatgttactgttgatggagatggactgagtattgatggctcgaagcttgctgaaaatatcaaaaaag

SEQ ID NO: 602012 - DNA, 75 bp, synthetic construct
  source 1..75: mol_type = other DNA
actgaaagacgaccttgatgccattaatccaacgtggaagttaaaagacaatcaggggggaagtaaagatgtcgg

SEQ ID NO: 602013 - DNA, 75 bp, synthetic construct
  source 1..75: mol_type = other DNA
gaatcagtagtgtctgttggtgatgtcggtaaagagcgtcagattgttaacgtgggggctggtgccgtatctgag

SEQ ID NO: 602014 - DNA, 75 bp, synthetic construct
  source 1..75: mol_type = other DNA
actgaaccgtgaaatcaatcaggcaacagtagcaacgacatgggcactgaagactgaatccagtgatgaggcggt

SEQ ID NO: 602015 - DNA, 75 bp, synthetic construct
  source 1..75: mol_type = other DNA
gaataaccggaacctggcagacctgaagcaaaatgatgcggaaatgaaaaatgctgccagcgtcgcagacctgaa

SEQ ID NO: 602016 - DNA, 75 bp, synthetic construct
  source 1..75: mol_type = other DNA
aagagctaattaatccgggggatacggttacgctgaaagccggtaaaaatctcagcgtgaaacaaagtaacggtg

SEQ ID NO: 602017 - DNA, 75 bp, synthetic construct
  source 1..75: mol_type = other DNA
cccgctgacggccatctggcacgcagtaaggggatggtgcgctgaccggcagacggagccggtaaggaatgcgtc

SEQ ID NO: 602018 - DNA, 75 bp, synthetic construct
  source 1..75: mol_type = other DNA
accttcaatgtctcctgaaagaatccgggcactccgtgagcgtgaacatctgtcacaacccgtctttgccagata

SEQ ID NO: 602019 - DNA, 75 bp, synthetic construct
  source 1..75: mol_type = other DNA
aaacgccctggtggtccagcactgagacttctttccgttattgaaaaaaacgggattcaggccatcaatgtttga

SEQ ID NO: 602020 - DNA, 75 bp, synthetic construct
  source 1..75: mol_type = other DNA
cagtaaaagattgtatgaagcctattgttgatagtcctttttatactccattgagaaattttgtattaggcagga

SEQ ID NO: 602021 - DNA, 75 bp, synthetic construct
  source 1..75: mol_type = other DNA
agggcgtgaagcaaaatgatttcaccgccgctaaccgtgctcgggtgtcccaatcgcagggtgatgatattcaga

SEQ ID NO: 602022 - DNA, 75 bp, synthetic construct
  source 1..75: mol_type = other DNA
agacaggggataccctggcattagccggagagctggatcaagacgtattgctgccgctttgggaaatgcgagaag

SEQ ID NO: 602023 - DNA, 75 bp, synthetic construct
  source 1..75: mol_type = other DNA
ggtaaatatcagctgaatccgcagggtatggataccagcaatatggatgtttttgttcagcagtatgctgataca

SEQ ID NO: 602024 - DNA, 75 bp, synthetic construct
  source 1..75: mol_type = other DNA
ggcggcgcaatggggcttggtaactggacgcctgcggctgaatttaatatttacgttgacccggaagcggcagaa

SEQ ID NO: 602025 - DNA, 75 bp, synthetic construct
  source 1..75: mol_type = other DNA
actctgaactctggagactgtggcagaaagcagggattaacgatgtggagagcgctgacgggctggacgtcatga

SEQ ID NO: 602026 - DNA, 75 bp, synthetic construct
  source 1..75: mol_type = other DNA
tatctgtcaaattcagaggtgtcagtgctgcggctggatattaaccacaataaccttgtacgcatgctgcagcag

SEQ ID NO: 602027 - DNA, 75 bp, synthetic construct
  source 1..75: mol_type = other DNA
accacctttatgcccgttgatttcaccctcgaagcccatgaagacggcgcacagacggtgtgggtcggcgaaacg

SEQ ID NO: 602028 - DNA, 75 bp, synthetic construct
  source 1..75: mol_type = other DNA
gccgtgatgaaatgcagatgttgcaggggctttcgctcgacgagcttcactacctttgcggcagcgaggtgtcga

SEQ ID NO: 602029 - DNA, 75 bp, synthetic construct
  source 1..75: mol_type = other DNA
atgcaccatcgcctggctgttgaaaccggagttgtttaccactgttgagcgctgggttggcgtggaaacacaagg

SEQ ID NO: 602030 - DNA, 75 bp, synthetic construct
  source 1..75: mol_type = other DNA
accaggcgcacagtgaagcagtgaagtgggccaaagaaaccggggtcattggtcaaaacgacgatgtggtgatgt

SEQ ID NO: 602031 - DNA, 75 bp, synthetic construct
  source 1..75: mol_type = other DNA
aataccaaaataacgcgcagtttagtctggcgggtaacggttacgtcaatatgggagcctatgactacacgttag

SEQ ID NO: 602032 - DNA, 75 bp, synthetic construct
  source 1..75: mol_type = other DNA
gcagcttagcggcaacctgtttagcgggcactggggtgatgatggcgagtggatgcttgggattgttggtggcta

SEQ ID NO: 602033 - DNA, 75 bp, synthetic construct
  source 1..75: mol_type = other DNA
tggtaatggcaggtctggacgtcactcacaaagcgcaaattcacgttgaggacaccgagcgtttccgcgcgattg

SEQ ID NO: 602034 - DNA, 75 bp, synthetic construct
  source 1..75: mol_type = other DNA
caaaattgcccgtatcgtgattatgggcggcgcaatggggcttggtaactggacgcctgcggctgaatttaatat

SEQ ID NO: 602035 - DNA, 75 bp, synthetic construct
  source 1..75: mol_type = other DNA
acgtctgccgctcaatcccaacatcgaggcaacatttgttggggtgagaactatgtgcgtattctctccgatccg

SEQ ID NO: 602036 - DNA, 75 bp, synthetic construct
  source 1..75: mol_type = other DNA
agagcggcggaatacaggaaccggtcgatgacagaatgcatgatttatcggatgcgttttgtattgtaggccccc

SEQ ID NO: 602037 - DNA, 75 bp, synthetic construct
  source 1..75: mol_type = other DNA
ttgcatccaaaatcactggcgctgtcgagtttatcggtaccgttaaagctaacggcaagtcaattgatgatacgc

SEQ ID NO: 602038 - DNA, 75 bp, synthetic construct
  source 1..75: mol_type = other DNA
gatgcattctgtatcgtagggccacagtcgcagacgcagaaaatcagcggaataagtacgggggccgcgcagctc

SEQ ID NO: 602039 - DNA, 75 bp, synthetic construct
  source 1..75: mol_type = other DNA
ggtagcgtggcgtggcagaaagggagtgatgattttgcccagacggcagggtttttgtcgatgacagtgaaatgg

SEQ ID NO: 602040 - DNA, 75 bp, synthetic construct
  source 1..75: mol_type = other DNA
gcggcgaccttgccgaaacattcaaatctgagagggacaccacaaagaaccagatccgcgtcgctttgcctggca

SEQ ID NO: 602041 - DNA, 75 bp, synthetic construct
  source 1..75: mol_type = other DNA
aagcaaaaagttatccaggtgaaggaaattaaattccgtcctggtacagatgaaggcgactatcaggtaaaactc

SEQ ID NO: 602042 - DNA, 75 bp, synthetic construct
  source 1..75: mol_type = other DNA
gcgatccgggtcacgacgacgctatcgcaatcgttctcgccctcgcctcaccggaactggatgtcaaagccatca

SEQ ID NO: 602043 - DNA, 75 bp, synthetic construct
  source 1..75: mol_type = other DNA
taactgggctgttattccactggattttatcgggcagaaatttaatgaagacaatgatgccccggtcacgttcag

SEQ ID NO: 602044 - DNA, 75 bp, synthetic construct
  source 1..75: mol_type = other DNA
gaccgtaagcacgaactgggaagtatggacctgtttaccggcgtgatggccacctacactgacacagatgcgtca

SEQ ID NO: 602045 - DNA, 75 bp, synthetic construct
  source 1..75: mol_type = other DNA
aaaagacagaattctttatattgaatactggaagtctcggatggaggccttctccggaagaaaaactcctgccgg

SEQ ID NO: 602046 - DNA, 75 bp, synthetic construct
  source 1..75: mol_type = other DNA
ctgtcttttgacaaagaacaggagttgctgacaggtactcccaccgaaagcggcgatatagagctttcagtaatc

SEQ ID NO: 602047 - DNA, 75 bp, synthetic construct
  source 1..75: mol_type = other DNA
gattgccgcctcgtcagcatccagtctttccgatcagcaacaaacggtcgtaagtgttgctgataacccgggcat

SEQ ID NO: 602048 - DNA, 75 bp, synthetic construct
  source 1..75: mol_type = other DNA
ctttccgatcagcaacaaacggtcgtaagtgttgctgataacccgggcattgacgctaccgatacaccattactg

SEQ ID NO: 602049 - DNA, 75 bp, synthetic construct
  source 1..75: mol_type = other DNA
tactcagtctgtggctgacaaactggctgccagtggagaccattcggttctgactcagcctacgtcattcagtca

SEQ ID NO: 602050 - DNA, 75 bp, synthetic construct
  source 1..75: mol_type = other DNA
gcagcaacgccacctgggagtttgtggggcacagtcagggggatgcacagaaactggtagctgaccgtttcaata

SEQ ID NO: 602051 - DNA, 75 bp, synthetic construct
  source 1..75: mol_type = other DNA
ttacgttgacccggaagcggcagaaattgttttccagtcagggatcccggtggtgatggccggtctggatgttac

SEQ ID NO: 602052 - DNA, 75 bp, synthetic construct
  source 1..75: mol_type = other DNA
actgaaaggcaatctgaatgtggacaatcgcctgcctgaaggcgttaccggtgctctggtgatggacggagctgc

SEQ ID NO: 602053 - DNA, 75 bp, synthetic construct
  source 1..75: mol_type = other DNA
catgcgtacagaccttaacaaggcagacaaactggtgataaacaagtcggcaacaggtcatgacaacagcatctg

SEQ ID NO: 602054 - DNA, 75 bp, synthetic construct
  source 1..75: mol_type = other DNA
taaccttaaggactcggtttctcagggggcgggttccctgacgttccgtgataattacacagtaacaacctctaa

SEQ ID NO: 602055 - DNA, 75 bp, synthetic construct
  source 1..75: mol_type = other DNA
ttgagcttaatcctgatacccggaaaattaaaattgtcgctccgggggggcttgatgtggttgcccctctggctg

SEQ ID NO: 602056 - DNA, 75 bp, synthetic construct
  source 1..75: mol_type = other DNA
ggaattgatgagttgttgctggaagcgtttagccgttttacgcagacgatgtcgcggcaatatcaggcttttttt

SEQ ID NO: 602057 - DNA, 75 bp, synthetic construct
  source 1..75: mol_type = other DNA
catgttgccgtatattcgcggtgacgaggtgtggggcgtatgccggatttacgggcaggaaatcatcgattacat

SEQ ID NO: 602058 - DNA, 75 bp, synthetic construct
  source 1..75: mol_type = other DNA
atttgattgcactctatagctatatgatcaggcgtttgctgcaagctaatttacgcaacgatgtctccgcagtcg

SEQ ID NO: 602059 - DNA, 75 bp, synthetic construct
  source 1..75: mol_type = other DNA
aaacgctttttccgcttcaacaccgcctggcagtggggggaaagtgaggagagcgccgttaaacaactcggtcag

SEQ ID NO: 602060 - DNA, 75 bp, synthetic construct
  source 1..75: mol_type = other DNA
gaggtatgggcggtgtgccgcgtttacctccatagcattgttgaagaaatcactgagggggatgtttcgacaagt

SEQ ID NO: 602061 - DNA, 75 bp, synthetic construct
  source 1..75: mol_type = other DNA
ggatattttacagatggtggcgcaattggcagggcaggagataaatttcaggcaacaaaaaacccatcaaccttg

SEQ ID NO: 602062 - DNA, 75 bp, synthetic construct
  source 1..75: mol_type = other DNA
tgatattaaatcctgcccaaataaatgggcatcacgtaagatttacaaatttgccggagttattgaggaatgtga

SEQ ID NO: 602063 - DNA, 75 bp, synthetic construct
  source 1..75: mol_type = other DNA
ttgcaggcggtttcgcgcgttgcaggcggtttcgatgaacagcactacgccctggtaaccggcaataaaaaactc

SEQ ID NO: 602064 - DNA, 75 bp, synthetic construct
  source 1..75: mol_type = other DNA
gctgccggagcagttctcagcggcatcgtgtcttgccaatctgcaattttatgaaccgcgcactattcacgactc

SEQ ID NO: 602065 - DNA, 75 bp, synthetic construct
  source 1..75: mol_type = other DNA
cctgtttatgcaggacaacaatcagcaaggcaaaggcgtctctttgtcaaaagcgatcaacatcattgagaacgg

SEQ ID NO: 602066 - DNA, 75 bp, synthetic construct
  source 1..75: mol_type = other DNA
cggactgcgggtgagtcttgatgaagagagcaaagacgaattaacccaaaacttgattgctctttatagctatat

SEQ ID NO: 602067 - DNA, 75 bp, synthetic construct
  source 1..75: mol_type = other DNA
agcacaacgatgattatcgtatttcgctggaacaaggtacgccgggctttgagccaccgctggaaggtgaaacac

SEQ ID NO: 602068 - DNA, 75 bp, synthetic construct
  source 1..75: mol_type = other DNA
tggaaagtcagttaaatgccttacactaaggccagcacaagatattctcagtgcaaaaagagatggttatgaaat

SEQ ID NO: 602069 - DNA, 75 bp, synthetic construct
  source 1..75: mol_type = other DNA
gcgtgacgataccggcgaagtgcaggctgttgagctggttgtgcgcggacgccataaagaagtggattccggcga

SEQ ID NO: 602070 - DNA, 75 bp, synthetic construct
  source 1..75: mol_type = other DNA
ggcaaagccacggtggatggtatccagttgcgctttaccggctctattcagcgtgacgataccggggaagtgcag

SEQ ID NO: 602071 - DNA, 75 bp, synthetic construct
  source 1..75: mol_type = other DNA
tgaactgctgctgtttaagcaaatgggcaaagccactgtggatggcatccagttgcgctttaccggctctatcca

SEQ ID NO: 602072 - DNA, 75 bp, synthetic construct
  source 1..75: mol_type = other DNA
gatgcgttttgtattgtaggcccccagtcgcaggcgaggaagattagcggcattaataccagtgccacacagttg

SEQ ID NO: 602073 - DNA, 75 bp, synthetic construct
  source 1..75: mol_type = other DNA
ggtgctctatgaagtggaccttatcaacatggtggaaattgtggacggagtggacctgatggaagcgcaccgcaa

SEQ ID NO: 602074 - DNA, 75 bp, synthetic construct
  source 1..75: mol_type = other DNA
aatgccgggtgcggtggatgtggatctggggcttgatgacagtgcactggacacagaattttccattggtggtac

SEQ ID NO: 602075 - DNA, 75 bp, synthetic construct
  source 1..75: mol_type = other DNA
aaattacaaactttcgttcaattcagaaaatagtcattgatagcgcacgcttacaggttattgtgggcaacaatg

SEQ ID NO: 602076 - DNA, 75 bp, synthetic construct
  source 1..75: mol_type = other DNA
aatagctcaaatgagcgatgatgattgcagagaatctttgcgttttttagaaaagactttaaaagaggttgaggc

SEQ ID NO: 602077 - DNA, 75 bp, synthetic construct
  source 1..75: mol_type = other DNA
aacgaaagatcccgttagcaaaaaaaatagctcaaatgagcgatgatgattgcagagaatctttgcgttttttag

SEQ ID NO: 602078 - DNA, 75 bp, synthetic construct
  source 1..75: mol_type = other DNA
ccagcgcgacgataccggcgaaacggtggccgttgaagtggtcatgcgtggacgtcagaaagaaatcgacaccgg

SEQ ID NO: 602079 - DNA, 75 bp, synthetic construct
  source 1..75: mol_type = other DNA
ctggggctggatgacggcgcactggatacagaattttccattggcggtactgaactgctgctgtttaagcagatg

SEQ ID NO: 602080 - DNA, 75 bp, synthetic construct
  source 1..75: mol_type = other DNA
acctgaacctgttcaacgacgggaacaactggcaggggattgtcgagtctctgaccctgccgaaattcacccgca

SEQ ID NO: 602081 - DNA, 75 bp, synthetic construct
  source 1..75: mol_type = other DNA
aaacgcttgccaggcaggcagggggaagttttaaaaccgtttctgaccgaatgaaaattgcggacaggtttgccg

SEQ ID NO: 602082 - DNA, 75 bp, synthetic construct
  source 1..75: mol_type = other DNA
cagtcaatgcgctgatttctagcgctgatgacaacgtgaagcggctcgttcaggagatgttgagctatgaagtgg

SEQ ID NO: 602083 - DNA, 75 bp, synthetic construct
  source 1..75: mol_type = other DNA
tcactgcgtggcaacaagctggtgcccccgcaaaagacaactgggcatttctggcgttaagtctctttggtgacg

SEQ ID NO: 602084 - DNA, 75 bp, synthetic construct
  source 1..75: mol_type = other DNA
ggggaacgctgccgggttgttattcgccggaattatgctgggatttatgcgcgctaaccacccgaccttcggtta

SEQ ID NO: 602085 - DNA, 75 bp, synthetic construct
  source 1..75: mol_type = other DNA
gcaacctgctgctggttaaaggtgctgtcccgggtgcaaccggtagcgacctgatcgttaaaccagctgtgaagg

SEQ ID NO: 602086 - DNA, 75 bp, synthetic construct
  source 1..75: mol_type = other DNA
taaactggccgatccgaatcatgccagcctgagtaatcaggcactgggaatttctggtgctaaccgggacggtac

SEQ ID NO: 602087 - DNA, 75 bp, synthetic construct
  source 1..75: mol_type = other DNA
cccgactaaaagggctaaaaaaagatgcgactcaggtgagcaaaaacctgctcccgcgtcttgaaactgccctac

SEQ ID NO: 602088 - DNA, 75 bp, synthetic construct
  source 1..75: mol_type = other DNA
atgaataatgatatggcgctgatacagctgcatcatatatcgcaacgggctaaatcccgccccttacgtgataac

SEQ ID NO: 602089 - DNA, 75 bp, synthetic construct
  source 1..75: mol_type = other DNA
gtgaacacggcagcggaggccatccgtgccctgtcgctgcaggtgccgggattccgctgtcagatgaacgaagga

SEQ ID NO: 602090 - DNA, 75 bp, synthetic construct
  source 1..75: mol_type = other DNA
tcgagtgtaccgtgacaataaatccgtcacttttgccgaacttgatgtgtttgatttgagtgaggcgttaagcgc

SEQ ID NO: 602091 - DNA, 75 bp, synthetic construct
  source 1..75: mol_type = other DNA
agcaaaaacctgctcccgcgtcttgaagctgccctacgtaccacccgacgctggtcgctggcagattttcattct

SEQ ID NO: 602092 - DNA, 75 bp, synthetic construct
  source 1..75: mol_type = other DNA
atatggcgctgatacagctgcatcatatatcgcaacgggctaaatcccgccccttacgtgataacgcggcggaat

SEQ ID NO: 602093 - DNA, 75 bp, synthetic construct
  source 1..75: mol_type = other DNA
ggtcgctcgcgataatgtgtttattcagttggataccttccatgcgcaaaaagtagatggcgacctgacgcattt

SEQ ID NO: 602094 - DNA, 75 bp, synthetic construct
  source 1..75: mol_type = other DNA
atcagggtaaggacagcctgacgcaactcagtgcgggcagggatatgacgctttccacagtgaccacatccgcgc

SEQ ID NO: 602095 - DNA, 75 bp, synthetic construct
  source 1..75: mol_type = other DNA
agcctgacggcccggacggatattaacagtaccggcggactgttgcaggctacggacagcctgctggcgatggcc

SEQ ID NO: 602096 - DNA, 75 bp, synthetic construct
  source 1..75: mol_type = other DNA
atgttactgacaaaggcacatcaacatattactaccgcatcaaaaagaaagggacggacaaacagggggaaagca

SEQ ID NO: 602097 - DNA, 75 bp, synthetic construct
  source 1..75: mol_type = other DNA
tggtatcagcgtaaactcagctgctcagcttgctggaaaagatcctttcagttatgtggatgcgataatggctgg

SEQ ID NO: 602098 - DNA, 75 bp, synthetic construct
  source 1..75: mol_type = other DNA
actcagtgccggcagggatatgacactctccacagtgaccacatccgcgcaggacaatattacctgggacaaaaa

SEQ ID NO: 602099 - DNA, 75 bp, synthetic construct
  source 1..75: mol_type = other DNA
gtatttccccttacgagccgcccgccgtcattcagaccatcacgctgaagccgggagagctcaccagccacggac

SEQ ID NO: 602100 - DNA, 75 bp, synthetic construct
  source 1..75: mol_type = other DNA
ggcgcacagtcaggtaagacgactgttgagaataactttctgggagcgacatcttctgacaaactggataaagcc

SEQ ID NO: 602101 - DNA, 75 bp, synthetic construct
  source 1..75: mol_type = other DNA
atggctacgatgtaacaatattaattgatttatgtcgagcaatctctaatgctaaagctgaaggtaagttgcttt

SEQ ID NO: 602102 - DNA, 75 bp, synthetic construct
  source 1..75: mol_type = other DNA
cgtaacgggattctggcgaatccagacggtgatgctgtgctacaaatgggcgatgaaatagcgttggtaggctat

SEQ ID NO: 602103 - DNA, 75 bp, synthetic construct
  source 1..75: mol_type = other DNA
gtctgccggtgaaccggtcattctgttgccggggcagcagtttgaagtcagcgcacctcagggcagtatccatgt

SEQ ID NO: 602104 - DNA, 75 bp, synthetic construct
  source 1..75: mol_type = other DNA
attaatggtttaataaataatgtttctaaacaggctattcatcgtgctgagaatctgccagcgggaatgcaacag

SEQ ID NO: 602105 - DNA, 75 bp, synthetic construct
  source 1..75: mol_type = other DNA
acaaatcaataacgtcaatgaccatttcaccacggagcgcgtggtggtttccacggaaaaggtgactgagtatca

SEQ ID NO: 602106 - DNA, 75 bp, synthetic construct
  source 1..75: mol_type = other DNA
caacaaccgtaacaattgttattcctgccggttcaaaaagtgtttcatttatagttgatccaacgcttgaggcta

SEQ ID NO: 602107 - DNA, 75 bp, synthetic construct
  source 1..75: mol_type = other DNA
cggtattaatcttgatatgaacgccgataaatcgcgccaggcgctggatgagttaggtgtatgtttcctctttgc

SEQ ID NO: 602108 - DNA, 75 bp, synthetic construct
  source 1..75: mol_type = other DNA
agcaacagtatcaatatttctaccgccagtgcgtttgtcgccgcggcctgtgggctgaaagtggcgaaacacggc

SEQ ID NO: 602109 - DNA, 75 bp, synthetic construct
  source 1..75: mol_type = other DNA
tcccgcgcccggattatctgtttgccgatatcgtcggcaccggcggtgacggcagcaacagcatcaatatttcta

SEQ ID NO: 602110 - DNA, 75 bp, synthetic construct
  source 1..75: mol_type = other DNA
gcagcagacggcgtgaatgccgaagagctgaaggacggtgtgcagaccgaagtctcggtaccgaaaggcagtgct

SEQ ID NO: 602111 - DNA, 75 bp, synthetic construct
  source 1..75: mol_type = other DNA
ccatcgtgctttttgtccgtatggcactcaatgcgctggatggcatgatggcgcgtgagtgtaatcagcaaacac

SEQ ID NO: 602112 - DNA, 75 bp, synthetic construct
  source 1..75: mol_type = other DNA
ggcgaaaatatatgcgcaccatgagacgaaaagcgggaacagacgttgtgttttcaaataaaacccgtgagttat

SEQ ID NO: 602113 - DNA, 75 bp, synthetic construct
  source 1..75: mol_type = other DNA
ttcgaaaagataacaaacaatacaaataaagctttccatgaaaaaacatctcaatatttatccgatctacaagaa

SEQ ID NO: 602114 - DNA, 75 bp, synthetic construct
  source 1..75: mol_type = other DNA
aattgcaaaaaggtttattggccgcgcatcaaatatacgagatgaaaagctagaggaaataaatgctaaacatgc

SEQ ID NO: 602115 - DNA, 75 bp, synthetic construct
  source 1..75: mol_type = other DNA
tagaaacggaatagatcatattcgagcaaagcaaggtcagaaaggcatcggtcgtctttcttgtgcggccttggg

SEQ ID NO: 602116 - DNA, 75 bp, synthetic construct
  source 1..75: mol_type = other DNA
tttttgaggaaattaaagatcttattggtggtaagaagaaaccgtataaaccagaagttgcgaatgattatattg

SEQ ID NO: 602117 - DNA, 75 bp, synthetic construct
  source 1..75: mol_type = other DNA
tttttcaacagtaaatttgaaaaagattcaattgaattttcttgctctactaatttcctagatatttcattatat

SEQ ID NO: 602118 - DNA, 75 bp, synthetic construct
  source 1..75: mol_type = other DNA
ataaagctttccatgaaaaaacatctcaatatttatccgatctacaagaaaatagaacttcactcaaaaaaacac

SEQ ID NO: 602119 - DNA, 75 bp, synthetic construct
  source 1..75: mol_type = other DNA
aagtgacccgtcaaccgtaacctcaaaaactgatgtgttaccaacagtgagtattagcgttgagacaacatcaac

SEQ ID NO: 602120 - DNA, 75 bp, synthetic construct
  source 1..75: mol_type = other DNA
atgaaaaccgcattaagctggtgcctatcgcacccagcgcgcggcattatctacgaccgtaacggtatccctctg

SEQ ID NO: 602121 - DNA, 75 bp, synthetic construct
  source 1..75: mol_type = other DNA
ccggttactgggagctggcgaaagacggtatgtacggtgttgctaaccgccctaacggtacggcgcataaatact

SEQ ID NO: 602122 - DNA, 75 bp, synthetic construct
  source 1..75: mol_type = other DNA
tatccgccagcctcgactgttaagccgtatgtagctgtttctgcgcttagcgcgggcgtcattacccgcaatacc

SEQ ID NO: 602123 - DNA, 75 bp, synthetic construct
  source 1..75: mol_type = other DNA
tcacagatggtgcatataacacgactatttcactgggggcgggagatgatgtatttgatgcaacttctggtgtaa

SEQ ID NO: 602124 - DNA, 75 bp, synthetic construct
  source 1..75: mol_type = other DNA
tgcttatcgccaacctgtataatctgcaaattgttcgctttaccgactaccagacccgctctaatgaaaaccgca

SEQ ID NO: 602125 - DNA, 75 bp, synthetic construct
  source 1..75: mol_type = other DNA
accacattatgctgggtgataacaacaccgatctgcctgcggaaaatccagcggttgccgcagcggaggaccatt

SEQ ID NO: 602126 - DNA, 75 bp, synthetic construct
  source 1..75: mol_type = other DNA
gccgagggtatggaaaaagttgttgcgaccattacgggaacatctgataacgttacggcagctactgacatcgtt

SEQ ID NO: 602127 - DNA, 75 bp, synthetic construct
  source 1..75: mol_type = other DNA
gcgatctgaaagctggcaatacagctcagttagtcaagttaacggcatcggatgtattgggtatgaatgacaatt

SEQ ID NO: 602128 - DNA, 75 bp, synthetic construct
  source 1..75: mol_type = other DNA
gaaaataggccttcatggtgatactggaaaagtaacctatgatggtgcaacaaccgtaacaattgttattcctgc

SEQ ID NO: 602129 - DNA, 75 bp, synthetic construct
  source 1..75: mol_type = other DNA
tgaaaactaacctgaccgaagtacaagtagctcgctttgccgtcaatcagtaccgttttccgggtgtcgaagtta

SEQ ID NO: 602130 - DNA, 75 bp, synthetic construct
  source 1..75: mol_type = other DNA
gcgtcatccgccagttaaaagaagtaccgccacaagccgggcacgatatttacctgacgatagatctcaaactcc

SEQ ID NO: 602131 - DNA, 75 bp, synthetic construct
  source 1..75: mol_type = other DNA
gcgttcccggctgggtttgcgaagccagttgcagccaaccttctgaaagctggcatcaaatgcgtgcatgtgcgc

SEQ ID NO: 602132 - DNA, 75 bp, synthetic construct
  source 1..75: mol_type = other DNA
acgttctgaatgaatttgtggcgtttgttcttcataatcgtaatggccgagtaaaagtgtggggaaacgggaaag

SEQ ID NO: 602133 - DNA, 75 bp, synthetic construct
  source 1..75: mol_type = other DNA
aagttctgaagctaaaaacgaaaattttggtggcactaaggaccttttagacgttctgaatgaatttgtggcgtt

SEQ ID NO: 602134 - DNA, 75 bp, synthetic construct
  source 1..75: mol_type = other DNA
tggttaacacaaactacgattccgagtccggcaccaaattcatatcaacggacctccacggaggtccgtttttca

SEQ ID NO: 602135 - DNA, 75 bp, synthetic construct
  source 1..75: mol_type = other DNA
gaaaccattgcccgtgaatggcatgccagtaataagcgctggagtgatgaccatcgatcacgcgttcttcgctat

SEQ ID NO: 602136 - DNA, 75 bp, synthetic construct
  source 1..75: mol_type = other DNA
cgtggcatgaagatgaaagaggagcatatcgttccgcttagtcgtcaggcgatgaatttattagatcagttaaag

SEQ ID NO: 602137 - DNA, 75 bp, synthetic construct
  source 1..75: mol_type = other DNA
cgacattaccctgctttaccttctagccgattccctgagtttcttgcacgtcttgctgcatatcgtggccgtgta

SEQ ID NO: 602138 - DNA, 75 bp, synthetic construct
  source 1..75: mol_type = other DNA
atgctttttgatgtttttcagcaataccctgcggcgatgcccgtcctggcaaccgtcggaggattgattataggt

SEQ ID NO: 602139 - DNA, 75 bp, synthetic construct
  source 1..75: mol_type = other DNA
ctgggtgggggcgttgtcgctgcccaatgttgctttaatcgcctcatgctgcggcctgatatatgccgttattac

SEQ ID NO: 602140 - DNA, 75 bp, synthetic construct
  source 1..75: mol_type = other DNA
tgtcaggcgaaaatcagcaagcgttatccgctggtggagttattgacagcactcgcttttttgctggcgagtctg

SEQ ID NO: 602141 - DNA, 75 bp, synthetic construct
  source 1..75: mol_type = other DNA
gacggtgacaattcgtgataaccaaccggagaaagtcaccatttctggcgcggcggtgattttgtttcatgccga

SEQ ID NO: 602142 - DNA, 75 bp, synthetic construct
  source 1..75: mol_type = other DNA
cggcactcgcttttttgctggcgagcctggtgtggccggaaagtggatgggggctggcggtgatgatattatccg

SEQ ID NO: 602143 - DNA, 75 bp, synthetic construct
  source 1..75: mol_type = other DNA
atcctgctgcgatgcctgtcctggcaaccgtcggaggattgattatcggcagttttttgaatgtggtgatctggc

SEQ ID NO: 602144 - DNA, 75 bp, synthetic construct
  source 1..75: mol_type = other DNA
aatcaaatcctgcatgcgatatggctggagcgcttttaagcgttaaagcaacccaccacccagcactacccccaa

SEQ ID NO: 602145 - DNA, 75 bp, synthetic construct
  source 1..75: mol_type = other DNA
tttcgtttgggctaacgcctaaaaaaggaggggcattaagcaacatcagtcttaaagagatgaattatagcgcaa

SEQ ID NO: 602146 - DNA, 75 bp, synthetic construct
  source 1..75: mol_type = other DNA
atactacgctgtcacggatcattcgcatggtgcgacaggcccagagcagcaagccagaaatcggtcaactggcgg

SEQ ID NO: 602147 - DNA, 75 bp, synthetic construct
  source 1..75: mol_type = other DNA
ccgcgcaacgctgcgcaatatgaagcagaacctgctcggcgcgtttatctacaacagtatcggtattccggtcgc

SEQ ID NO: 602148 - DNA, 75 bp, synthetic construct
  source 1..75: mol_type = other DNA
ttgtctgtatctctgggatcaataagccatgcaaatggaactgcagctaatgcactgggagctacggcagaagct

SEQ ID NO: 602149 - DNA, 75 bp, synthetic construct
  source 1..75: mol_type = other DNA
acccggatggataaaaacgggctgaccatcaaggatggcccgtcagtgactgtgaacggtattgatgcggctggc

SEQ ID NO: 602150 - DNA, 75 bp, synthetic construct
  source 1..75: mol_type = other DNA
cggcagaagagctggcgaccatgaatgacggtctttcttttgagggtgatgacggaaaggttattcataaaaaac

SEQ ID NO: 602151 - DNA, 75 bp, synthetic construct
  source 1..75: mol_type = other DNA
tctatcggcttatgaagcaaaaatgcagaatgataaattgaatgttgctaattatttaaaatatattgaaatgct

SEQ ID NO: 602152 - DNA, 75 bp, synthetic construct
  source 1..75: mol_type = other DNA
tctatcggcttatgaagcaaaaatgcagaatgataaattggatattgctaattatttaaaatatattgaaatgct

SEQ ID NO: 602153 - DNA, 75 bp, synthetic construct
  source 1..75: mol_type = other DNA
agttaaggacatcatacatagcgcccgtctgagcggcattaagacagaaatcatcacgaatgatctcgatgtccg

SEQ ID NO: 602154 - DNA, 75 bp, synthetic construct
  source 1..75: mol_type = other DNA
gctgcgccagctgtgtcacccgcgtacaaaatgcgttgcaaagcgtaccgggcgtcactcaggcacgggtaaacc

SEQ ID NO: 602155 - DNA, 75 bp, synthetic construct
  source 1..75: mol_type = other DNA
gaaaaagagattcgccagaaaattgataaattagagaaaaatcttgcgatgatgaaaaatgaactagctctgaaa

SEQ ID NO: 602156 - DNA, 75 bp, synthetic construct
  source 1..75: mol_type = other DNA
atctgttcttgatgtagagatgatatataatattttacaaaaaatcaggtttgatattgatgtccttgaggagga

SEQ ID NO: 602157 - DNA, 75 bp, synthetic construct
  source 1..75: mol_type = other DNA
atacatgctgttacacaccgcaaaattgctacccttgccggggtgccgttgggatcgatgacctactatttttca

SEQ ID NO: 602158 - DNA, 75 bp, synthetic construct
  source 1..75: mol_type = other DNA
gagctgggaactgccatcgaatggggcggggactggaaaacactgaaagacgggcctcactttcagttgaaacga

SEQ ID NO: 602159 - DNA, 75 bp, synthetic construct
  source 1..75: mol_type = other DNA
atgtcgggtaaattcagattcagccgccgcagtgaaaaaaatctggagggcgtcaaaccacaactggttgctgtc

SEQ ID NO: 602160 - DNA, 75 bp, synthetic construct
  source 1..75: mol_type = other DNA
gagctgggaactgccatcgaatggggcggggactggaccagcctgaaagacggaccgcattttcagttgaggcga

SEQ ID NO: 602161 - DNA, 75 bp, synthetic construct
  source 1..75: mol_type = other DNA
atgtcgggtaaattcagattcagtcgtcgcagtgaaaaaaatctggagggcgttaaactacagctggttgctgtc

SEQ ID NO: 602162 - DNA, 75 bp, synthetic construct
  source 1..75: mol_type = other DNA
ataaagccggatataaagctgcaacctaccgtcgatgtcagaacaatggatgcctttgcaaacgggatgcgttca

SEQ ID NO: 602163 - DNA, 75 bp, synthetic construct
  source 1..75: mol_type = other DNA
ggaaatcagtgtcatttggggactgggggtggcgatggccatctatctaaccgcaggggtttccggcgcacatct

SEQ ID NO: 602164 - DNA, 75 bp, synthetic construct
  source 1..75: mol_type = other DNA
gtgtctgccgggaatatcactatccgggatacacagagccagaaacaggatgtggcagacctgaaccgtgacgtt

SEQ ID NO: 602165 - DNA, 75 bp, synthetic construct
  source 1..75: mol_type = other DNA
acagggaaataacgcccgtgccagtgccgcaggctgccaccggcgaggtggtgggaatgatagccacacagatgt

SEQ ID NO: 602166 - DNA, 75 bp, synthetic construct
  source 1..75: mol_type = other DNA
cggtgcacagtcaggtaagacgactgttgagaataatgcgctgtctgagcttgtgccgcctcgcgtacagcagga

SEQ ID NO: 602167 - DNA, 75 bp, synthetic construct
  source 1..75: mol_type = other DNA
ggcagccaggtgtcatggaactggcctctgtacgagaaaatcgcgcaggcatttaagcaggcagcgaaagagctg

SEQ ID NO: 602168 - DNA, 75 bp, synthetic construct
  source 1..75: mol_type = other DNA
atgtcgggtaaattcagattcagccgtcgcagtgaaaaaaatctggagggcgttaaaccacagctggttgctgtc

SEQ ID NO: 602169 - DNA, 75 bp, synthetic construct
  source 1..75: mol_type = other DNA
cccgtataacccggactacgcgtatcaggatcagacagtggaaacactggtgcgcgaagggatgatgattgccca

SEQ ID NO: 602170 - DNA, 75 bp, synthetic construct
  source 1..75: mol_type = other DNA
acaggcatttaagcaggctgctgtagagctgaatacacctgttgaatggggtggtgattgggataccctgaaaga

SEQ ID NO: 602171 - DNA, 75 bp, synthetic construct
  source 1..75: mol_type = other DNA
aaagttttgctcaagcttgaaggagagcaaactgaagagattaaaccccttcccagagggacgcttttgaccaaa

SEQ ID NO: 602172 - DNA, 75 bp, synthetic construct
  source 1..75: mol_type = other DNA
tgttttatgacgccaatgataaagaattatcaaagcatgctattgacgctgaaacacttggtaaatcaatacttt

SEQ ID NO: 602173 - DNA, 75 bp, synthetic construct
  source 1..75: mol_type = other DNA
caaagcagcttatgcgtgcgcaaggcatgagccaggattcattggcggatctcatggggatcacgaaaggcggct

SEQ ID NO: 602174 - DNA, 75 bp, synthetic construct
  source 1..75: mol_type = other DNA
tgtcgttctcgccggacagcaggctcaccatgaaagcgctggaaatggcatgggaaacccgtggtaaacccggcg

SEQ ID NO: 602175 - DNA, 75 bp, synthetic construct
  source 1..75: mol_type = other DNA
gtggtgcggtgatgtgacctatagtgtgcccggagttcagggcgggcatggatgcttaaatgaaccgcgagtctg

SEQ ID NO: 602176 - DNA, 75 bp, synthetic construct
  source 1..75: mol_type = other DNA
gaacgggacatattaaaaaaagccgctcttgatatcagactccctgaacagttctcgataatcgggaaactcagg

SEQ ID NO: 602177 - DNA, 75 bp, synthetic construct
  source 1..75: mol_type = other DNA
gggacgctgacggaaggtaaaccgcaggttgtcgcggtgaaaacatttgctgatgttgacgaagcgcaggcgctg

SEQ ID NO: 602178 - DNA, 75 bp, synthetic construct
  source 1..75: mol_type = other DNA
ggtagtggtggtgattgcgctagtcagtgcggccatctggtacttctttggtccggcaccgcaaattgtttatac

SEQ ID NO: 602179 - DNA, 75 bp, synthetic construct
  source 1..75: mol_type = other DNA
cctgtggttggttatcggcctgataaccctggcggtaatggttttcgccggcgggcatttttaccgcagcgcatg

SEQ ID NO: 602180 - DNA, 75 bp, synthetic construct
  source 1..75: mol_type = other DNA
tacgttcgcttaatccgttgtatccaccaatcccgctaaatcctgaatcaaaaattattggcgtggtggtggacg

SEQ ID NO: 602181 - DNA, 75 bp, synthetic construct
  source 1..75: mol_type = other DNA
cggtgatgcggtggatgttgtggcctacattggcagccaggtgtcatgggactggcctctgtacgagaaaatcgc

SEQ ID NO: 602182 - DNA, 75 bp, synthetic construct
  source 1..75: mol_type = other DNA
gagctgggaatcgccatcgaatggggcggggactggaaaacactgaaagacggaccacatttccagctgaagcgc

SEQ ID NO: 602183 - DNA, 75 bp, synthetic construct
  source 1..75: mol_type = other DNA
cggcgaggctcccatgaacccgtgcggtgttaaagtgattaacgactggtacaacatcaaagaacgtggacgtcc

SEQ ID NO: 602184 - DNA, 75 bp, synthetic construct
  source 1..75: mol_type = other DNA
ctggccttccgtcacgcatccggcactgaacaatgcaccagtggagaaaaacatggttgatctgccaacgtggga

SEQ ID NO: 602185 - DNA, 75 bp, synthetic construct
  source 1..75: mol_type = other DNA
atgaagccctggcgcaatgaacatgtatcagatgaactggaaacgcctgaaaagcgcaaggaaactctcaatcgc

SEQ ID NO: 602186 - DNA, 75 bp, synthetic construct
  source 1..75: mol_type = other DNA
aatcagacaaagcacaaatgccggaaaaacaacagcaaactctcaaccgctatggctccgcgtcaaagctgtcaa

SEQ ID NO: 602187 - DNA, 75 bp, synthetic construct
  source 1..75: mol_type = other DNA
ccgtcacgcatccggcactgaacaatgcaccggcggtgaaaaacacggttgacctgccaacgtgggaagaactga

SEQ ID NO: 602188 - DNA, 75 bp, synthetic construct
  source 1..75: mol_type = other DNA
acccttcgtacgaccgcaatcagcgaagcggcgtatgccgtcacccggctgcctgcaccaacaacttccgcagtg

SEQ ID NO: 602189 - DNA, 75 bp, synthetic construct
  source 1..75: mol_type = other DNA
cgccaggctgttgcagggggatatctcggtacttctgccgccgccatcgtcaggcaaaaatttcgttgagcaggt

SEQ ID NO: 602190 - DNA, 75 bp, synthetic construct
  source 1..75: mol_type = other DNA
gtgagcgaattagcaattatcgaaattgcgccggacatggcgccaagtatttacgtagaaaacggtctggaaaag

SEQ ID NO: 602191 - DNA, 75 bp, synthetic construct
  source 1..75: mol_type = other DNA
acgatttagtagaaagccttgaccgtattaacaagaggcttgacgagacaaatatgctacttaagcaaattcaaa

SEQ ID NO: 602192 - DNA, 75 bp, synthetic construct
  source 1..75: mol_type = other DNA
aaggtatggtactgaattacaacggcaaattgctgctggttaaggatattgatattcagtcgcccactgcccgcg

SEQ ID NO: 602193 - DNA, 75 bp, synthetic construct
  source 1..75: mol_type = other DNA
ccggagccgcaaccgccagaaaactggaggagtcgtccggattccttgatgagctgattgaagacatgttcggcg

SEQ ID NO: 602194 - DNA, 75 bp, synthetic construct
  source 1..75: mol_type = other DNA
cgcactgaacaggaatcagatgaaccggaacagcctgaaaagcaaaagaaaacgctcaatcgctatggctctgca

SEQ ID NO: 602195 - DNA, 75 bp, synthetic construct
  source 1..75: mol_type = other DNA
attaatagcattgcagttacagatttactgggaatagtcccctatgaactttataattcctaccgtgactttctt

SEQ ID NO: 602196 - DNA, 75 bp, synthetic construct
  source 1..75: mol_type = other DNA
atgcgtcgtttcgtggcgttccgttcaaaactgaagacgagagtctaaccgctgggcggcgtgtcgaaacacacg

SEQ ID NO: 602197 - DNA, 75 bp, synthetic construct
  source 1..75: mol_type = other DNA
atgtcgaaagtctgcataattgcctgggtttacgggcgagttcagggcgtaggatttcgctataccacgcagtac

SEQ ID NO: 602198 - DNA, 75 bp, synthetic construct
  source 1..75: mol_type = other DNA
cggtcggggtatcgcaccggcgtggtcaatgaagagagatatgctctctccagcctacacaacgaggtgggactc

SEQ ID NO: 602199 - DNA, 75 bp, synthetic construct
  source 1..75: mol_type = other DNA
acgtgatacgcgggacattatcgcggcggctggccgggctctggataaaatctggaaagaaggacataactatgc

SEQ ID NO: 602200 - DNA, 75 bp, synthetic construct
  source 1..75: mol_type = other DNA
ttcaccgccggtcagaaacaggatattgatgtgaccacgctctgctccacagagcaggagaacatcaacggtctg

SEQ ID NO: 602201 - DNA, 75 bp, synthetic construct
  source 1..75: mol_type = other DNA
tcgcacctacgcagagttttcatcctggctccaggaacagacagatgattgctgtaacgcactggaagaggccct

SEQ ID NO: 602202 - DNA, 75 bp, synthetic construct
  source 1..75: mol_type = other DNA
cgccctgttttgcgggaaagataaggagtccagtcttgggattcgcctgatgaccggtaacgggctgggtaagta

SEQ ID NO: 602203 - DNA, 75 bp, synthetic construct
  source 1..75: mol_type = other DNA
acgctgcgaaatttacagtattgatgaggcattttgcgacctgacaggagttcggaattgtcgcgaccttaccga

SEQ ID NO: 602204 - DNA, 75 bp, synthetic construct
  source 1..75: mol_type = other DNA
gagccgtattacggtaacagctcgtcagtgaagcttcttacccccactcaggattcccgcgacatcatcaacgcc

SEQ ID NO: 602205 - DNA, 75 bp, synthetic construct
  source 1..75: mol_type = other DNA
ggctacgtctctgacaaaatggcgatggtcgatgctggcatttccgccgccgcacgtctaatgcagggtgatatc

SEQ ID NO: 602206 - DNA, 75 bp, synthetic construct
  source 1..75: mol_type = other DNA
atgaaatctttggtcgtaaggactacatctctattgattccccgatggcccgcgcgttgctgaaaaaagaggtgg

SEQ ID NO: 602207 - DNA, 75 bp, synthetic construct
  source 1..75: mol_type = other DNA
gcgatttggcggtggtgaatacccctgccggggaagcgagctggtatgttaatgctatcgagtacgtgaaaccgt

SEQ ID NO: 602208 - DNA, 75 bp, synthetic construct
  source 1..75: mol_type = other DNA
caccgtttccgtattgtcggctacgatgaaatttttggccgtaaagattacatctctatcgattcccgatggccc

SEQ ID NO: 602209 - DNA, 75 bp, synthetic construct
  source 1..75: mol_type = other DNA
gcaccggtctggtgattcaggtgccagaatacttaagcccgggcgaaaaaatccgtatccatatcgaagaacgcc

SEQ ID NO: 602210 - DNA, 75 bp, synthetic construct
  source 1..75: mol_type = other DNA
tataggggcaaatccagcaagccctggtttataaaagcgttaagagcggatgggcaaccattaatgtttggttat

SEQ ID NO: 602211 - DNA, 75 bp, synthetic construct
  source 1..75: mol_type = other DNA
acaagcttccctagttcagttacaaatttttgccgtgaaaatggacagtccggatatattgatgttattgagaga

SEQ ID NO: 602212 - DNA, 75 bp, synthetic construct
  source 1..75: mol_type = other DNA
gtaaaagccgctgccgcgccggtaactggcccgctggctgacgatccaatccaggaaactatcacctttgatgac

SEQ ID NO: 602213 - DNA, 75 bp, synthetic construct
  source 1..75: mol_type = other DNA
catcctgccgtaactatttttgatacaaatataatcgataatcgttccattcacacatctgaaagaatgaaaaaa

SEQ ID NO: 602214 - DNA, 75 bp, synthetic construct
  source 1..75: mol_type = other DNA
ataatgattacgctgcagcgcttaattttgacaacaaaatatatcgagtaggcagcctgacggctgcggcttgtc

SEQ ID NO: 602215 - DNA, 75 bp, synthetic construct
  source 1..75: mol_type = other DNA
gggctgattagcgccgagcaactggcacaggcgctggcagagcaaaacggcgtggcgtgggaatccatcgatgcc

SEQ ID NO: 602216 - DNA, 75 bp, synthetic construct
  source 1..75: mol_type = other DNA
taccgttacgacagcgcgggcaatgtgtcggctgtcaccagccgggaagattacggacgggaaacacggcgggaa

SEQ ID NO: 602217 - DNA, 75 bp, synthetic construct
  source 1..75: mol_type = other DNA
tgctgatggcgcacccttacggggcggtcatactggtcgtcctgttcctggtggtgatggtttttctgaacctgc

SEQ ID NO: 602218 - DNA, 75 bp, synthetic construct
  source 1..75: mol_type = other DNA
cgttaccgtgccaccgccgcccgggtactgggcagactgaagacgctgccgggggatgcgcatcgcctgaagtat

SEQ ID NO: 602219 - DNA, 75 bp, synthetic construct
  source 1..75: mol_type = other DNA
gccgacgatgcccacggtacaccgatcatgctgaaagctcagcagcttggtatcactccggagcagatgattggc

SEQ ID NO: 602220 - DNA, 75 bp, synthetic construct
  source 1..75: mol_type = other DNA
gcaaccgctgttgggccataaagtgaatccgttcaaagcgctgtataaccgcatcgatatgaagcaggttgaagc

SEQ ID NO: 602221 - DNA, 75 bp, synthetic construct
  source 1..75: mol_type = other DNA
aatccgttcaaagcactgtataaccgcatcgacatgaagcaggttgaagcactggtggaagcctctaaagaagaa

SEQ ID NO: 602222 - DNA, 75 bp, synthetic construct
  source 1..75: mol_type = other DNA
cacaaattcttgcgactcatgataaagaactgcaccagcgtctgaatgactggcgcaaagcccagaccgacgaag

SEQ ID NO: 602223 - DNA, 75 bp, synthetic construct
  source 1..75: mol_type = other DNA
aaggtatggtactgaattacaacggcaaactgctactggttaaggacattgatattcagtcgcccactgcccgcg

SEQ ID NO: 602224 - DNA, 75 bp, synthetic construct
  source 1..75: mol_type = other DNA
aactgacgaaaattatgatttcgtctgcaccggtaacagcagaaaccctggattctgccagctttcttgggctga

SEQ ID NO: 602225 - DNA, 75 bp, synthetic construct
  source 1..75: mol_type = other DNA
gtgctggcaatatttcagtcgatcggtattgctaccggtcttccgaatatgcctggtatgcaaggcctggttatg

SEQ ID NO: 602226 - DNA, 75 bp, synthetic construct
  source 1..75: mol_type = other DNA
gcacttgaactgccgcagaccgttgatctggaaatcgttgaaaccgcaccaggcattaaaggtgcttctgccagc

SEQ ID NO: 602227 - DNA, 75 bp, synthetic construct
  source 1..75: mol_type = other DNA
tttttctgatgtccgtaccgggctgaaagtggaagaacgcttcaaaggcgatgatatcgttgacaccgtaacgct

SEQ ID NO: 602228 - DNA, 75 bp, synthetic construct
  source 1..75: mol_type = other DNA
ccagaatacttaagcccaggcgaaaaaattcgtatccatatcgaagaacgccgttatatggggcgtgctgactaa

SEQ ID NO: 602229 - DNA, 75 bp, synthetic construct
  source 1..75: mol_type = other DNA
ttcaaagtgccaaaggtggcttaggcgagctgaaacgcagactgctgttcgttatcggcgcgctgattgtgttcc

SEQ ID NO: 602230 - DNA, 75 bp, synthetic construct
  source 1..75: mol_type = other DNA
gttatcggtgcgctgattgtgttccgtattggctcttttattccgatccctggtattgatgccgctgtgcttgcc

SEQ ID NO: 602231 - DNA, 75 bp, synthetic construct
  source 1..75: mol_type = other DNA
gaacagattactgaacgaggtatcggcaacggtatttcaatcattatcttcgccggtattgtcgcgggactcccg

SEQ ID NO: 602232 - DNA, 75 bp, synthetic construct
  source 1..75: mol_type = other DNA
taaagtaatgacccgcctgaccctggttggtgcgctgtatattacctttatctgcctgatccctgagttcatgcg

SEQ ID NO: 602233 - DNA, 75 bp, synthetic construct
  source 1..75: mol_type = other DNA
gttatcggtgcgctgattgtgttccgtattggctcttttatttcgatccctggtattgatgtcgctgtacttgcc

SEQ ID NO: 602234 - DNA, 75 bp, synthetic construct
  source 1..75: mol_type = other DNA
aaactgcttgagcaacagcgaggcactatcattgaaatgtttaacatgttctctggtggtgcccttagccgtgct

SEQ ID NO: 602235 - DNA, 75 bp, synthetic construct
  source 1..75: mol_type = other DNA
cttataatgaaaaggatgaggctaaaagactcggtgctcgctgggatgccaccagaaaaacctggtatatacctg

SEQ ID NO: 602236 - DNA, 75 bp, synthetic construct
  source 1..75: mol_type = other DNA
tgtcggtgaccgcatcgccgtcaacccgcaacgcggcggcgactggcgcgtctgctggagtccgtttatgggcca

SEQ ID NO: 602237 - DNA, 75 bp, synthetic construct
  source 1..75: mol_type = other DNA
cgtcttaagccatttaatctgccctgtattgtagtggatgacggcagcgatgccgccacgcaacagcaactggat

SEQ ID NO: 602238 - DNA, 75 bp, synthetic construct
  source 1..75: mol_type = other DNA
cgatcagttcatctaacagctacactgacagcaaaatcagtgatacgaagacagaactgaatgccaatattgata

SEQ ID NO: 602239 - DNA, 75 bp, synthetic construct
  source 1..75: mol_type = other DNA
cgttatattgctctcgggcagtccgtagctggtactgcaaacgctgatgcgaccttcaaagttcaatatctataa

SEQ ID NO: 602240 - DNA, 75 bp, synthetic construct
  source 1..75: mol_type = other DNA
ggtgatgaatcagtaacgaccactgttaatggcggtgttattcattttaaaggtgaagtggtaaatgccgcttgt

SEQ ID NO: 602241 - DNA, 75 bp, synthetic construct
  source 1..75: mol_type = other DNA
aacatcaaaaacagaaaatgaaatatatttatcacgagagcgttctgctgttatttgtcagtatctgactgcatt

SEQ ID NO: 602242 - DNA, 75 bp, synthetic construct
  source 1..75: mol_type = other DNA
actgactggtgccctgaatatgagtctgcatgagctggaaaaaatgctggagcgtctgctggctcagaaacaacg

SEQ ID NO: 602243 - DNA, 75 bp, synthetic construct
  source 1..75: mol_type = other DNA
atttgaaatcccggatcaggtcaagtggatgcagtccctggccccaatgatggcgggtattgccagtggaaaaga

SEQ ID NO: 602244 - DNA, 75 bp, synthetic construct
  source 1..75: mol_type = other DNA
ccgggcagcgaatggccagtgaactgctccccagaatgcccgtgagcattcaggggccagaaatacgggataaca

SEQ ID NO: 602245 - DNA, 75 bp, synthetic construct
  source 1..75: mol_type = other DNA
tgttttacttcggggcaactggcttcgtctgtcgctcgcactggggcaaggcggtaagctccgctggctggtgac

SEQ ID NO: 602246 - DNA, 75 bp, synthetic construct
  source 1..75: mol_type = other DNA
aagcgtatggcatggcacagactgtttatcatacggtttcccctgccgttcagcagtccatgtcttttcaggaca

SEQ ID NO: 602247 - DNA, 75 bp, synthetic construct
  source 1..75: mol_type = other DNA
aatataaaacatcagcaaatacaaatgtgcgccttaacgtctcatgggattcatctcataacactgttcttggtg

SEQ ID NO: 602248 - DNA, 75 bp, synthetic construct
  source 1..75: mol_type = other DNA
ctgacgcgtaaagtcggacgcaaagtgcgttacgtcattgttctgcggggacaaattgtcacggggttacgtcac

SEQ ID NO: 602249 - DNA, 75 bp, synthetic construct
  source 1..75: mol_type = other DNA
ctctggcgcgaccgcaaaggggcaatcagtaactttgtcagcttcctcgcgatgctggtgatgctccagcttttg

SEQ ID NO: 602250 - DNA, 75 bp, synthetic construct
  source 1..75: mol_type = other DNA
accggttactacggcctgacgcagggcctgctatccgtcctgcggctattctggggcaacctgattaactttatg

SEQ ID NO: 602251 - DNA, 75 bp, synthetic construct
  source 1..75: mol_type = other DNA
ggtgacgccgcaggcttctgcctgaatttgggttttacagttcgcggcatggatttagccattgcatcagctcag

SEQ ID NO: 602252 - DNA, 75 bp, synthetic construct
  source 1..75: mol_type = other DNA
ttgtggtcggtgcgggcgttgccggtagcgttgccgcactggtcatggcgcgagccgggctggatgtcctggtga

SEQ ID NO: 602253 - DNA, 75 bp, synthetic construct
  source 1..75: mol_type = other DNA
agaaaaagatccggcagtaaatgccattgctcacgccattctgggtggcgcagtagcggcaatgcagggtaataa

SEQ ID NO: 602254 - DNA, 75 bp, synthetic construct
  source 1..75: mol_type = other DNA
ggagttgtcccgtacaaccagtgatgcgctgtttctggcgctgcgccgggtgaaagcagatctgaatgcggatat

SEQ ID NO: 602255 - DNA, 75 bp, synthetic construct
  source 1..75: mol_type = other DNA
acagtaaaaccaccgccacagcgacgcagcagcgtaacgtggttgccagcacccttcgtacgactgcaatcagcg

SEQ ID NO: 602256 - DNA, 75 bp, synthetic construct
  source 1..75: mol_type = other DNA
agacaaaactatctggcttatcgctttcaacgtcttcttcgtttacgcggtttactgtggcctgacattcttcat

SEQ ID NO: 602257 - DNA, 75 bp, synthetic construct
  source 1..75: mol_type = other DNA
ccgcggctggagcccgctgcgcctgattgcagttaccgtggttctcggtatcgtcggtaaattctgtcatttcct

SEQ ID NO: 602258 - DNA, 75 bp, synthetic construct
  source 1..75: mol_type = other DNA
actgggtaacagtatcactctctggcgtcgtgacggaccggtaatgatttcttttgatgatctgtggagtgcgat

SEQ ID NO: 602259 - DNA, 75 bp, synthetic construct
  source 1..75: mol_type = other DNA
acctatcctctgattctcgaagtggctggcgtgaaaagctacttgaagcatcatttcgaggtgtgccgtttaagg

SEQ ID NO: 602260 - DNA, 75 bp, synthetic construct
  source 1..75: mol_type = other DNA
aggtgaatataaaacttcaatgttagccaaaaacataaagttttatacaacggataaaagtgatgggttacttct

SEQ ID NO: 602261 - DNA, 75 bp, synthetic construct
  source 1..75: mol_type = other DNA
aaatgattgatatgtcgatcaccgcaaaatatgacgataaaacacgagacacccttgccgaacagataaaaggct

SEQ ID NO: 602262 - DNA, 75 bp, synthetic construct
  source 1..75: mol_type = other DNA
ctccagatagcaaaaatcggtgcgggctccaccgacgaagcggccaataactttaaaaactttcttaccaaaatt

SEQ ID NO: 602263 - DNA, 75 bp, synthetic construct
  source 1..75: mol_type = other DNA
gccgcctgtcagcggcatcagcgaccagtgatgcgctgaaagctaaccgcatggcgctgtatggtcagggacttg

SEQ ID NO: 602264 - DNA, 75 bp, synthetic construct
  source 1..75: mol_type = other DNA
tcgctgctcgtggtatttatggaaaagatgcgattacccagattgttgccagtctggaggtcggtaaaggtagtg

SEQ ID NO: 602265 - DNA, 75 bp, synthetic construct
  source 1..75: mol_type = other DNA
ggtgtgctgtcatggttcggtattgatatgccaaaaagttttaccgatttcggtaaaaacctgattacggggctg

SEQ ID NO: 602266 - DNA, 75 bp, synthetic construct
  source 1..75: mol_type = other DNA
agatgattgatatgtcaatcactgcaaaatatgacactgatactcagaatcatctcgccgcacagataaaaggat

SEQ ID NO: 602267 - DNA, 75 bp, synthetic construct
  source 1..75: mol_type = other DNA
ttatatttggacatatgatgtttgataacattcagacgttcgctaaccagatttatattgataccggatcgccga

SEQ ID NO: 602268 - DNA, 75 bp, synthetic construct
  source 1..75: mol_type = other DNA
tgcggggaaatatacctgcgtggtgaccgattcggcagagaaagcacagagtgtgacgtctgttgaatgcaccgt

SEQ ID NO: 602269 - DNA, 75 bp, synthetic construct
  source 1..75: mol_type = other DNA
gactgatgttattgacaaactgatgcctgccttcttaccgctggtctacaccctgaccatgttctggctggtacg

SEQ ID NO: 602270 - DNA, 75 bp, synthetic construct
  source 1..75: mol_type = other DNA
atgcccatcactatcgccatatatggggcgttggtgatattcatggtgaataatcaattattacaatcccgctta

SEQ ID NO: 602271 - DNA, 75 bp, synthetic construct
  source 1..75: mol_type = other DNA
ggtaaagaaatagcagaaagcgaattactctggcctgttgatcgcgtgcagaaatcattcaagggagagttaaaa

SEQ ID NO: 602272 - DNA, 75 bp, synthetic construct
  source 1..75: mol_type = other DNA
ggatattcaggccgtggcgcaactgcaaccggcggtggagcgtctggcggtatccaggtcagctttaatcctcag

SEQ ID NO: 602273 - DNA, 75 bp, synthetic construct
  source 1..75: mol_type = other DNA
gctacgatgcgcatctgcgtcgtctacgtcgtcagcttgcggaacgcaaacaacgcgcctggcaggcgctgctgc

SEQ ID NO: 602274 - DNA, 75 bp, synthetic construct
  source 1..75: mol_type = other DNA
gattgcagttgatgagtacactttccaccagttcaccgatgcagcttgccctggtggattacctttctacacgcc

SEQ ID NO: 602275 - DNA, 75 bp, synthetic construct
  source 1..75: mol_type = other DNA
gttacgacgcccatcttcgtcgtttacgtcgtcagcttgcggaacgtaaacaacgtgcctggcaggcgctgctgc

SEQ ID NO: 602276 - DNA, 75 bp, synthetic construct
  source 1..75: mol_type = other DNA
ctggcggcactgacgcatcatatcagtattgcgccgggtaaaatgttttctaccggtgaaaactggtcacgtttt

SEQ ID NO: 602277 - DNA, 75 bp, synthetic construct
  source 1..75: mol_type = other DNA
aacaattacgcgagcaaattgcgtcaggcatctggcagcccggcgatcgtctgccttcgttacgtgaacaggtgg

SEQ ID NO: 602278 - DNA, 75 bp, synthetic construct
  source 1..75: mol_type = other DNA
ggcactggcgcatcacatcagtattgcgccgggtaaaatgttttctactggcgaacgctggtcgcgttttttccg

SEQ ID NO: 602279 - DNA, 75 bp, synthetic construct
  source 1..75: mol_type = other DNA
cttaagctgtccattcctgagattgaaagagcgctggaagctattcttgcccgtaagcgccgggttgcttacgac

SEQ ID NO: 602280 - DNA, 75 bp, synthetic construct
  source 1..75: mol_type = other DNA
ccccccgtattagagcgctatatgcgcggcgaccttaccttacccagaggccgggactctcattcaccagcaggc

SEQ ID NO: 602281 - DNA, 75 bp, synthetic construct
  source 1..75: mol_type = other DNA
gaatttggcgcggtacagaacatcatggcctacgcaggtgaccaggggtcttttgaaatccctgaccaggtgaaa

SEQ ID NO: 602282 - DNA, 75 bp, synthetic construct
  source 1..75: mol_type = other DNA
ttgccttcgttgcgtgaacaggtggcgctttctggcatgagctttatgaccgtcagccatgcctatcagttgctc

SEQ ID NO: 602283 - DNA, 75 bp, synthetic construct
  source 1..75: mol_type = other DNA
ccttacagggcatcaccatttctcctgatgaaattgtcattactgccggggcgttagaggcattaaacctcagtt

SEQ ID NO: 602284 - DNA, 75 bp, synthetic construct
  source 1..75: mol_type = other DNA
cgttacaggagtatccggtgaaagcgtgttggttaatgactaacagccagaatccgctcggttttaccttaacgc

SEQ ID NO: 602285 - DNA, 75 bp, synthetic construct
  source 1..75: mol_type = other DNA
ctggcctgaacgagctgggaaaattgctcagtatgaacaaacctttggtgtgacggtatcaagaaaaaaaatcga

SEQ ID NO: 602286 - DNA, 75 bp, synthetic construct
  source 1..75: mol_type = other DNA
gagggcgaaatgctcaaagacaatgcctatagccacccccatcgtgtagagacgcctgaggggcttctggtgctg

SEQ ID NO: 602287 - DNA, 75 bp, synthetic construct
  source 1..75: mol_type = other DNA
acctgaattgttgaacctgctttcacatcttcgcgaaggtgacacgctcgttactcactccattgatcgcctcgc

SEQ ID NO: 602288 - DNA, 75 bp, synthetic construct
  source 1..75: mol_type = other DNA
tttaggttcaactggcggcgaatttgcagcacattgtctctactatgcggaaaaaaggcttagaaaaaaaaagcg

SEQ ID NO: 602289 - DNA, 75 bp, synthetic construct
  source 1..75: mol_type = other DNA
atgagtaaacaacgcatttttatcgctggccatcgcgggatggtcggttccgccatcacgcggcagctcgaacag

SEQ ID NO: 602290 - DNA, 75 bp, synthetic construct
  source 1..75: mol_type = other DNA
gccggatgtggacttgagtttgtacgaccacatcattgtttgcctgtctggaggcaaggactcgattgctgcgta

SEQ ID NO: 602291 - DNA, 75 bp, synthetic construct
  source 1..75: mol_type = other DNA
attcaggaagtacgtctctgtttaccggacaacgcgtcagtaaagctcatctacgcgtcgaaacctacggcacgc

SEQ ID NO: 602292 - DNA, 75 bp, synthetic construct
  source 1..75: mol_type = other DNA
tctgtgttattgcgccacctccatcgaaagccatcgcatcttactggaagctattcagcaacaaatattttggtt

SEQ ID NO: 602293 - DNA, 75 bp, synthetic construct
  source 1..75: mol_type = other DNA
ccgccagccggaagcgtatcaatggtttctggagcaaattcaggtctggggcgcacggttacatcgcattagcgc

SEQ ID NO: 602294 - DNA, 75 bp, synthetic construct
  source 1..75: mol_type = other DNA
gaggggattgctcttgctaaagaggctaagaagtacaagggcaagcaaaagaacaaagagctacataacaagatt

SEQ ID NO: 602295 - DNA, 75 bp, synthetic construct
  source 1..75: mol_type = other DNA
gaatcactgttcaattccttgcaaactctatgagttttgataattccccacaatcacgccttatcctaaccatga

SEQ ID NO: 602296 - DNA, 75 bp, synthetic construct
  source 1..75: mol_type = other DNA
gtgcgattgtggcagggctacagtgtttcgcgtgaagaaagaaatgcttgtcagtactggcagtattgagaactg

SEQ ID NO: 602297 - DNA, 75 bp, synthetic construct
  source 1..75: mol_type = other DNA
aacatcgacccaggttacctgatttggtttggtgaaattggtgtccacgaattcgcgtatctggtgaaaaactac

SEQ ID NO: 602298 - DNA, 75 bp, synthetic construct
  source 1..75: mol_type = other DNA
tgatggtcaccgccgacaaccgcagcctgtggctggtaatcggtctgataacgctggcggtaatggttttcgcgg

SEQ ID NO: 602299 - DNA, 75 bp, synthetic construct
  source 1..75: mol_type = other DNA
ctggcggcggcactggaacaaggttccagccacccactggcgcgggcaatcctcgataaagcaggcgatatgcaa

SEQ ID NO: 602300 - DNA, 75 bp, synthetic construct
  source 1..75: mol_type = other DNA
gcggacatttttaccgcagtgcatggaagagcctgctcaacggcgcggcgacgatggatacgctggtggcgctgg

SEQ ID NO: 602301 - DNA, 75 bp, synthetic construct
  source 1..75: mol_type = other DNA
tgcagcatcaggacttacagaccagcgcccagcaaatcgctcgtgagcgaggtctggacaccgacgccagccgta

SEQ ID NO: 602302 - DNA, 75 bp, synthetic construct
  source 1..75: mol_type = other DNA
ggcagtgcgctggtgatcgccttagggttaggtaagctgtttggctgggatattggcctgacggccggtatgtta

SEQ ID NO: 602303 - DNA, 75 bp, synthetic construct
  source 1..75: mol_type = other DNA
ataaaatctctgccgtatttgtgccggtggtagtggtgattgcgttgatcagtgcagcaatctggtatttctttg

SEQ ID NO: 602304 - DNA, 75 bp, synthetic construct
  source 1..75: mol_type = other DNA
atgaagcagaacctgctcggcgcgtttatctacaacagtatcggtattccggtcgccgccggtattttgtggccg

SEQ ID NO: 602305 - DNA, 75 bp, synthetic construct
  source 1..75: mol_type = other DNA
cctggtgattgccaccacggtactgattatcgcctgtccgtgtgcgctggggctggcaacgccgatgtcgattat

SEQ ID NO: 602306 - DNA, 75 bp, synthetic construct
  source 1..75: mol_type = other DNA
ggcatcaggggcgatgattggctctgtggtacctggaataggtacagctgttggcgctattggtggcggtattat

SEQ ID NO: 602307 - DNA, 75 bp, synthetic construct
  source 1..75: mol_type = other DNA
ttgttgcggtgaaaactttcgccggttttgacgaaacgcaggcgctacgtctggcggcagcgctggagcaaggtt

SEQ ID NO: 602308 - DNA, 75 bp, synthetic construct
  source 1..75: mol_type = other DNA
cagttgctgctgagcggcatgagctgcgccagctgtgtcacccgagtgcaaaacgcactgcaaagcgtaccgggc

SEQ ID NO: 602309 - DNA, 75 bp, synthetic construct
  source 1..75: mol_type = other DNA
tagacggcctgtcttgcggtcactgcgttaaacgcgtgaaagaaagtctcgaacaacgcccggacgttgagcagg

SEQ ID NO: 602310 - DNA, 75 bp, synthetic construct
  source 1..75: mol_type = other DNA
gcatccatgctggcctcgcggcgcgccgaggctgaagctctcggagtgccgccggatctcattgaagacatcctg

SEQ ID NO: 602311 - DNA, 75 bp, synthetic construct
  source 1..75: mol_type = other DNA
aaagataagtctgtgactggtgagaagtcagcgaacgtgctgaaagccaagctggagaagcgcggcattcgtgtg

SEQ ID NO: 602312 - DNA, 75 bp, synthetic construct
  source 1..75: mol_type = other DNA
agcgaactttttcgataccaccattgcggataacccaagttttggcaacatcgcggatgggttgattactgacgc

SEQ ID NO: 602313 - DNA, 75 bp, synthetic construct
  source 1..75: mol_type = other DNA
attaagactatcacttatttaagtgatattggttgtctggagattcagggggccagtctaggcagagtgggtact

SEQ ID NO: 602314 - DNA, 75 bp, synthetic construct
  source 1..75: mol_type = other DNA
ggccgtgaacaataacccgatgcgcttcaccgaccgcagcggcggcgtgtcacgccggcgggtgattattcactt

SEQ ID NO: 602315 - DNA, 75 bp, synthetic construct
  source 1..75: mol_type = other DNA
aggcaaaaggggaagatccacagggttacagggcggaatttattcgcctgattgaactggcggatggtgtgactg

SEQ ID NO: 602316 - DNA, 75 bp, synthetic construct
  source 1..75: mol_type = other DNA
gttttaccgctgatgagcaggaacaatcggatgcaatccgttatgagacgctgcgtccgtcggggccgggcggtc

SEQ ID NO: 602317 - DNA, 75 bp, synthetic construct
  source 1..75: mol_type = other DNA
ttggcgttgccgtaagcccaccgattctggcggcgatgatgctggtgatgggctggcgcgggatgtttattacca

SEQ ID NO: 602318 - DNA, 75 bp, synthetic construct
  source 1..75: mol_type = other DNA
tggggctgccgggatgctggtcaacggttacgttaccgactggctggtcaaagggggaatggctccgattaaaag

SEQ ID NO: 602319 - DNA, 75 bp, synthetic construct
  source 1..75: mol_type = other DNA
ggatgctggtcaacggttacgttactgactggctggtcaaagggggaatggctccgattaaaagccgtaagatct

SEQ ID NO: 602320 - DNA, 75 bp, synthetic construct
  source 1..75: mol_type = other DNA
tcgctattatcaacactgatattttttggttattttttcctcatgtacaacgcaggaaaagaaattgaacaatat

SEQ ID NO: 602321 - DNA, 75 bp, synthetic construct
  source 1..75: mol_type = other DNA
ctgcgttcagcgctggtttctctggatggcgataacgcatgggcattaagcgaaagttggtgcggcactattcag

SEQ ID NO: 602322 - DNA, 75 bp, synthetic construct
  source 1..75: mol_type = other DNA
gcctttacgctggtcgtaccgcaagcgacaacatccatgacagcggttctgctgattggcatggcactgttctgt

SEQ ID NO: 602323 - DNA, 75 bp, synthetic construct
  source 1..75: mol_type = other DNA
aagcggctggctttggtgacagcggcagtagctcaagcggtggcggctttgccaaggccgcgaagctggccacag

SEQ ID NO: 602324 - DNA, 75 bp, synthetic construct
  source 1..75: mol_type = other DNA
atgcaaagtatgagtcgcagagggaattgcctggataattcgccgatggaaagagtctttcgcagccttaaaagt

SEQ ID NO: 602325 - DNA, 75 bp, synthetic construct
  source 1..75: mol_type = other DNA
acatttagtggatattttcgatgcggtggctggagtgactccagagatatagcttgcggctcatttgttgcctat

SEQ ID NO: 602326 - DNA, 75 bp, synthetic construct
  source 1..75: mol_type = other DNA
gttaggtttagcccagggtggcactggcgcaaatagccttaatgacgccaaaactaatttgcaaattcctgaggg

SEQ ID NO: 602327 - DNA, 75 bp, synthetic construct
  source 1..75: mol_type = other DNA
agatggggcgcttgttcgagaagatgcttacgctgtctggctatcaggtgcggattcttgaacaacatgactggg

SEQ ID NO: 602328 - DNA, 75 bp, synthetic construct
  source 1..75: mol_type = other DNA
tgagcacagaaagaagtcttgaacttttccgggcatataactatactccccgcatagagcaacagcttctatgcg

SEQ ID NO: 602329 - DNA, 75 bp, synthetic construct
  source 1..75: mol_type = other DNA
agaaagttactctggcgttatggggtaatgcaaagtatgagtcgcagagggaattgtctggataattcgccgatg

SEQ ID NO: 602330 - DNA, 75 bp, synthetic construct
  source 1..75: mol_type = other DNA
ctgaaatcgcagcggcgaatgttccatcaccagattgaacgtggcaacccgagacggacatttacagggatggct

SEQ ID NO: 602331 - DNA, 75 bp, synthetic construct
  source 1..75: mol_type = other DNA
ggcaatgccaatggcccgatgggtgcatggttagtacatcacaacgtattgccacacgatggcaacgtgttgcgt

SEQ ID NO: 602332 - DNA, 75 bp, synthetic construct
  source 1..75: mol_type = other DNA
ctccaagcggcttttcagaaagcatcagcgagtatggaaaccggcggtgacatgtccagcatggggtcagttgtc

SEQ ID NO: 602333 - DNA, 75 bp, synthetic construct
  source 1..75: mol_type = other DNA
agactatagcaaaatggattgctttgtacgtgggtttgatagcaccggtaattctctcgcgtgggcgttgggttc

SEQ ID NO: 602334 - DNA, 75 bp, synthetic construct
  source 1..75: mol_type = other DNA
agcactcaacatacagagaatgtaaataagtttgaaccgccccggaaatcctggagactaaacttcctgagaaag

SEQ ID NO: 602335 - DNA, 75 bp, synthetic construct
  source 1..75: mol_type = other DNA
gtgttacagcgacacacaaaaaaaatggataccacttgatgtttctcatggtggcactggcgcaaatagccttga

SEQ ID NO: 602336 - DNA, 75 bp, synthetic construct
  source 1..75: mol_type = other DNA
actcagatgaaatcggttggcgaagtgatggcgattggtcgcacgcagcaggagtccttgcaaaaagccctgcgc

SEQ ID NO: 602337 - DNA, 75 bp, synthetic construct
  source 1..75: mol_type = other DNA
cgagccggtaactctggaagacgtgctggaaattgtgcgtattgagaagccgaaaggcgttatcgtccagtacgg

SEQ ID NO: 602338 - DNA, 75 bp, synthetic construct
  source 1..75: mol_type = other DNA
taacccgcgtgcggcgcgtaccgttccgttcgtctccaaagccaccggtgttccgctggcgaaagtggcggcgcg

SEQ ID NO: 602339 - DNA, 75 bp, synthetic construct
  source 1..75: mol_type = other DNA
tccatcgactatgtggtcaccaaaattcctcgctttaacttcgagaaattcgtcggtgcgaacgaccgtctgacc

SEQ ID NO: 602340 - DNA, 75 bp, synthetic construct
  source 1..75: mol_type = other DNA
tcgaaaacttcgatgcgatgggcatccacaccggtgactccatcactgtcgcgccagcccaaacgctgaccgaca

SEQ ID NO: 602341 - DNA, 75 bp, synthetic construct
  source 1..75: mol_type = other DNA
ggcggcatcatggagcacatcgagcaggcaggtgtgcactccggcgactccgcgtgttctctgcctgcgtacaca

SEQ ID NO: 602342 - DNA, 75 bp, synthetic construct
  source 1..75: mol_type = other DNA
ccgctgtctaagacaagatacttcaatcgatatagaatgccatgacatactgctttcagctgaaaacgctgaaga

SEQ ID NO: 602343 - DNA, 75 bp, synthetic construct
  source 1..75: mol_type = other DNA
acgttttatgaaccgtaaagtttcatttcgcagttcttctttgttgactataattaatagtatttctgttactga

SEQ ID NO: 602344 - DNA, 75 bp, synthetic construct
  source 1..75: mol_type = other DNA
cgtcgccagaggggatggcaatgccgaagtcgttgtcacatatcaggggtctgacgctcagtggaacgaaaactc

SEQ ID NO: 602345 - DNA, 75 bp, synthetic construct
  source 1..75: mol_type = other DNA
cttcctcgcgatgctggtgatgatccagcttttgctgttgctggcgtatgaaagtttgtggcccgatgcctggca

SEQ ID NO: 602346 - DNA, 75 bp, synthetic construct
  source 1..75: mol_type = other DNA
cctggtcatccggtaccaacggcgtggtggctgcaacgttttcacttcgcctgaagggtaaactggtgtcctatg

SEQ ID NO: 602347 - DNA, 75 bp, synthetic construct
  source 1..75: mol_type = other DNA
tggcttaattaatgataagagtatcagttcgggtggtgcagtgtatctggacgtcgtaatgactccaacttactg

SEQ ID NO: 602348 - DNA, 75 bp, synthetic construct
  source 1..75: mol_type = other DNA
accgcgatggcgctgaatgccgatgcgaccgaaaaagtaatttcggtgcaggaaatgcacgcgcagatcaaataa

SEQ ID NO: 602349 - DNA, 75 bp, synthetic construct
  source 1..75: mol_type = other DNA
ccgttcgtctccaaagcgaccggcgtaccgctggcgaaagtggcagcacgcgtgatggcaggtaaaacgctggct

SEQ ID NO: 602350 - DNA, 75 bp, synthetic construct
  source 1..75: mol_type = other DNA
ggcggcatcatggaacatatcgaacaggcgggcgtgcactccggtgactccgcatgttctctgccagcgtacacc

SEQ ID NO: 602351 - DNA, 75 bp, synthetic construct
  source 1..75: mol_type = other DNA
cccgcgtgcggcgcgtaccgttccgtttgtctccaaagccaccggcgtaccgctggcaaaagtggcggcgcgtgt

SEQ ID NO: 602352 - DNA, 75 bp, synthetic construct
  source 1..75: mol_type = other DNA
cggtgcaggcgtgaaatacctgcgaaaaattaacccgtatgtgtttgaagaactgctgcttctggcgtttgaacg

SEQ ID NO: 602353 - DNA, 75 bp, synthetic construct
  source 1..75: mol_type = other DNA
tcagtgacaccgcgccctgctttcttctacccggccagccgccatcacattttaatcctgagcgtgcgacgtttt

SEQ ID NO: 602354 - DNA, 75 bp, synthetic construct
  source 1..75: mol_type = other DNA
acgaccccgatactcagcgtgatgttgacgaagtgtgcgctcgcttcccaaacgtgcataaggtagtctgcgcgc

SEQ ID NO: 602355 - DNA, 75 bp, synthetic construct
  source 1..75: mol_type = other DNA
gaaacgcaaaggctttgccgatgcgcgtctggcaaaactggtaggcgtacgcgaagcggaaatccgtaaactgcg

SEQ ID NO: 602356 - DNA, 75 bp, synthetic construct
  source 1..75: mol_type = other DNA
gagtgtctctaacgatgcgccggtgctgctggatcacttcctcgacgacgcggtagaagtggatgttgacgccat

SEQ ID NO: 602357 - DNA, 75 bp, synthetic construct
  source 1..75: mol_type = other DNA
cggcccgaaccgtatcggtcaggggatcgaattcgactactgctgtgtacacgcctcgctggcgctgcgcgaaga

SEQ ID NO: 602358 - DNA, 75 bp, synthetic construct
  source 1..75: mol_type = other DNA
cgtgaactgaaagacgctggcgcagagcgtatctggtacatcgccgatgccttccgcgcaggcctgtctgtggat

SEQ ID NO: 602359 - DNA, 75 bp, synthetic construct
  source 1..75: mol_type = other DNA
tgcgaatccaacccatctgaccgtgacaaaatcatggtcctcggcggcggcccgaaccgtatcggtcagggtatc

SEQ ID NO: 602360 - DNA, 75 bp, synthetic construct
  source 1..75: mol_type = other DNA
cccggaagcgctgaccaaaattcgccgcgaactgaaagatgcaggcgcagagcgtatctggtatatcgccgatgc

SEQ ID NO: 602361 - DNA, 75 bp, synthetic construct
  source 1..75: mol_type = other DNA
gaaagcccgtatcagggagggaataaaaccggagaccatgcttgatggcgtgaagcggtatgccgcctgggtacg

SEQ ID NO: 602362 - DNA, 75 bp, synthetic construct
  source 1..75: mol_type = other DNA
catccggcgcactagctggatcgggtacacataatgtgactttgagcggcagcgcagttcctgatggaatgttac

SEQ ID NO: 602363 - DNA, 75 bp, synthetic construct
  source 1..75: mol_type = other DNA
aagaatgtcctgtcttccggcaaggtcattgttgaaggtatcaatctggttaagaaacatcagaagccggttccg

SEQ ID NO: 602364 - DNA, 75 bp, synthetic construct
  source 1..75: mol_type = other DNA
ttcgcttctcgtctatgcgtcagaatgatggttcgagttatgaacgacaaatcaggatggcgagagagattgcgg

SEQ ID NO: 602365 - DNA, 75 bp, synthetic construct
  source 1..75: mol_type = other DNA
atctgtagtgcatctcatccgagaataacggaatacagtagccgcgaagacattcttgatgaagagtttactttt

SEQ ID NO: 602366 - DNA, 75 bp, synthetic construct
  source 1..75: mol_type = other DNA
aattcgatttaaacttgcttgtcatttttgagtgcatctaccaacatcttagtattagcaaggccgcagaatcat

SEQ ID NO: 602367 - DNA, 75 bp, synthetic construct
  source 1..75: mol_type = other DNA
tatatttcctataataaatcatcattaaacaacctgagcttctctcgttttattgaccgcttgaatgataacttt

SEQ ID NO: 602368 - DNA, 75 bp, synthetic construct
  source 1..75: mol_type = other DNA
tcaccgtggcctgactcgcttcgtactgtctggtaaaaacccgggcgaagacatcaccgaggtagtagaagaaca

SEQ ID NO: 602369 - DNA, 75 bp, synthetic construct
  source 1..75: mol_type = other DNA
tgtggatgaccctgtggctggcaattccggtaatggtgttctcgttcaaccactctccgatcatctcttctttcg

SEQ ID NO: 602370 - DNA, 75 bp, synthetic construct
  source 1..75: mol_type = other DNA
aggcctgatgatcgggatgattaccttccagttcagcactttcagttttggcatgggtaacgctgccggattgtt

SEQ ID NO: 602371 - DNA, 75 bp, synthetic construct
  source 1..75: mol_type = other DNA
gatgatgctacgttctatcaccttaagaaaaatattggtgctagagcatggaactttggagacaaggaagaagtt

SEQ ID NO: 602372 - DNA, 75 bp, synthetic construct
  source 1..75: mol_type = other DNA
tattgaagctcaagagctattcctttcaatcatccgcaggggaataacaattgttactggtatggatgggaaggt

SEQ ID NO: 602373 - DNA, 75 bp, synthetic construct
  source 1..75: mol_type = other DNA
acatcaccgaggtagtggaagaacactttggtattggcgcaggtaaactgattaccctgctctatttcttcgcta

SEQ ID NO: 602374 - DNA, 75 bp, synthetic construct
  source 1..75: mol_type = other DNA
gatcgctcgcttgaggctaagcgaatggccgccgggcaaaacatcaatggcgccatcctcattgttacccagttc

SEQ ID NO: 602375 - DNA, 75 bp, synthetic construct
  source 1..75: mol_type = other DNA
gcagccagacgcgaggacccgtacttcaaagccagttacgacaacgtggactacagccagatcccggcaggattc

SEQ ID NO: 602376 - DNA, 75 bp, synthetic construct
  source 1..75: mol_type = other DNA
atttcgaagaatcctgggaagttcctgcggtatctgcagccagacgtgaggacccgtacttcaaatccagttacg

SEQ ID NO: 602377 - DNA, 75 bp, synthetic construct
  source 1..75: mol_type = other DNA
gaaagcccgtttgaacgagggggtaaaccccgaaaccatgctggaaggtgtgaaacgctacgcgggctgggtatc

SEQ ID NO: 602378 - DNA, 75 bp, synthetic construct
  source 1..75: mol_type = other DNA
atgacgctcccgtcttttttaatgcctcatccggcgccccccctgcaatggaaatttgacagcagcaccggcact

SEQ ID NO: 602379 - DNA, 75 bp, synthetic construct
  source 1..75: mol_type = other DNA
agtggtaaggactggagtctgacagcccgtgccggcctgaaggatgcagcgggagaacatcagattaatggcaga

SEQ ID NO: 602380 - DNA, 75 bp, synthetic construct
  source 1..75: mol_type = other DNA
ctgccctcttttggagaggccggcgacagtggttctccattatttggctggaatacggccaaagggcagtgggaa

SEQ ID NO: 602381 - DNA, 75 bp, synthetic construct
  source 1..75: mol_type = other DNA
tactggtaccgcccgacagaggtcagggatgagcacaccggagcgttgctgggatatcgcaagcgttttcaggga

SEQ ID NO: 602382 - DNA, 75 bp, synthetic construct
  source 1..75: mol_type = other DNA
tattgctgaccagtgcgagattagcaaacgttctgtgatgaatcatattgcggccctttgtgattccgggctggt

SEQ ID NO: 602383 - DNA, 75 bp, synthetic construct
  source 1..75: mol_type = other DNA
cttcaacctgtgggtaacgcgtcgcgtgcaaacggtggacgatgacgggatcggcagcgacagcgaagttaaaac

SEQ ID NO: 602384 - DNA, 75 bp, synthetic construct
  source 1..75: mol_type = other DNA
ttggtccggatcgtcatttcgaagaatcctgggaagttcctgcggtatctgcagccagacgcgaggacccgtact

SEQ ID NO: 602385 - DNA, 75 bp, synthetic construct
  source 1..75: mol_type = other DNA
tatcccaaacgtgctggtggcaattccaagtcagcagccttcaaagcctggaaagcccgtatcagggagggaata

SEQ ID NO: 602386 - DNA, 75 bp, synthetic construct
  source 1..75: mol_type = other DNA
tgaagtgccgatttgtggtcacgcgacagtagctgcgcactatgtacgtgcaaaggtgttaggtttaggaaattg

SEQ ID NO: 602387 - DNA, 75 bp, synthetic construct
  source 1..75: mol_type = other DNA
gcgtttgctggtctgaaattcggcgactacggctccatcgattatggtcgtaactacggtgtagcatacgatatc

SEQ ID NO: 602388 - DNA, 75 bp, synthetic construct
  source 1..75: mol_type = other DNA
gctgcccaccaccagcaccaataattatcgcatcgcattacgtaagtaccagtgctaccagatgcaaacccgtgg

SEQ ID NO: 602389 - DNA, 75 bp, synthetic construct
  source 1..75: mol_type = other DNA
cattaagccgctatcttaaagactttaaacatagccagactcattgcgcatattgccgtaaattactcgatcgta

SEQ ID NO: 602390 - DNA, 75 bp, synthetic construct
  source 1..75: mol_type = other DNA
tgaaagaggaattatttgggatgataaaaatataaatatccattggcctatagttgatattcctatattgtcaaa

SEQ ID NO: 602391 - DNA, 75 bp, synthetic construct
  source 1..75: mol_type = other DNA
gattaaaggtatccgcgtgactcgctgtggtacacgacatccggcagatcaagtgatcccgcagcaggatccgcg

SEQ ID NO: 602392 - DNA, 75 bp, synthetic construct
  source 1..75: mol_type = other DNA
tcgaagtctagtaaaggtgtactccgagggcttcactttcaacgtccgccttttgagcaagcaaagttggtaaga

SEQ ID NO: 602393 - DNA, 75 bp, synthetic construct
  source 1..75: mol_type = other DNA
agtgaataaaatcgcgatatctcgccttgatacactgcttgatgaaaatggctggtttgaggaacaaaaatcatg

SEQ ID NO: 602394 - DNA, 75 bp, synthetic construct
  source 1..75: mol_type = other DNA
cagatctgatcgttcttgaaccaaaagtgtttagtgatgaacgtggtttttttatggagagttataatcagattg

SEQ ID NO: 602395 - DNA, 75 bp, synthetic construct
  source 1..75: mol_type = other DNA
ccgtatattaaattgctgactcagctctatggcgaccggatgttgatcgctaatgccactggctgttcttcaata

SEQ ID NO: 602396 - DNA, 75 bp, synthetic construct
  source 1..75: mol_type = other DNA
accaatctgtcactgccgttgccggaaaacaccctaccaaactcggcgaaactggaagccttgttttatggcctt

SEQ ID NO: 602397 - DNA, 75 bp, synthetic construct
  source 1..75: mol_type = other DNA
tcgaagtccaggaaaggtgttttacgcggattgcattatcagttagaaccttatgcgcaaggaaaattggtacgc

SEQ ID NO: 602398 - DNA, 75 bp, synthetic construct
  source 1..75: mol_type = other DNA
aatgatttaaatattaaatggccgctacagttaattgacaatgttattgtgtcggataaagataataaaggcaat

SEQ ID NO: 602399 - DNA, 75 bp, synthetic construct
  source 1..75: mol_type = other DNA
tcaaaatctagtaaaggcgtactgcgggggttacattatcaattagcaccgtatgcacaggctaaattagttcga

SEQ ID NO: 602400 - DNA, 75 bp, synthetic construct
  source 1..75: mol_type = other DNA
tggtaatacactgtactggattggtcctccgggggggaaatgtgacgccgggccggataccgacttcgcagcggt

SEQ ID NO: 602401 - DNA, 75 bp, synthetic construct
  source 1..75: mol_type = other DNA
ggcgtagaggatgcctgccacgctgccatgcttcagggtagccaacctgtaagccaaacttacaagttgccagtt

SEQ ID NO: 602402 - DNA, 75 bp, synthetic construct
  source 1..75: mol_type = other DNA
tggagacagtgcgccagttgcgtcgttctggaatcattacggggcacatgtaactcactggatgcctctaccaga

SEQ ID NO: 602403 - DNA, 75 bp, synthetic construct
  source 1..75: mol_type = other DNA
gaatgaaatgggcgacttacatcccggggcatcctgacgctaatgatgggtggataattcctggtgcgtcgtgga

SEQ ID NO: 602404 - DNA, 75 bp, synthetic construct
  source 1..75: mol_type = other DNA
cctaactggcctgcgccaacgccgccagtacaaaatgaacaatcaagacctctgcctgatgtggctcagcgtctg

SEQ ID NO: 602405 - DNA, 75 bp, synthetic construct
  source 1..75: mol_type = other DNA
ccagcaattacgagaaagaattagccgtgttttgggcgacgttattacaccagatcatcataaacaagccgagaa

SEQ ID NO: 602406 - DNA, 75 bp, synthetic construct
  source 1..75: mol_type = other DNA
atggcattgtaatgtccgggatttcttattctcgtcgtgacgggttctatatagccgcattggagtacgacgacg

SEQ ID NO: 602407 - DNA, 75 bp, synthetic construct
  source 1..75: mol_type = other DNA
gacgggcataaacattacgacactgccgcggcggtaacctgttccattttgcgagctctgtgtaaagagccgttg

SEQ ID NO: 602408 - DNA, 75 bp, synthetic construct
  source 1..75: mol_type = other DNA
gattaaaggtatccgcgtcactcgctgcggtacacgacatccggcagatcaagttatcccgcaacaggatccgcg

SEQ ID NO: 602409 - DNA, 75 bp, synthetic construct
  source 1..75: mol_type = other DNA
gttatctattccggtacggtggcagccgcgatggaaggccgtcatttaggttttccagcgctggccgtctcgctt

SEQ ID NO: 602410 - DNA, 75 bp, synthetic construct
  source 1..75: mol_type = other DNA
gtttccacgtacaaattaaccgatagcgagcgcgatattgctgccgaaatatggaacgcctgccgcgccgctatg

SEQ ID NO: 602411 - DNA, 75 bp, synthetic construct
  source 1..75: mol_type = other DNA
ccctgcgccccggcatgacccttgagggggatgtcagcctggatacccgccatttgtgggagtggctgaccgagc

SEQ ID NO: 602412 - DNA, 75 bp, synthetic construct
  source 1..75: mol_type = other DNA
cagtcgtacaacgctgacaccttcggatttactctccgtgtccccagtaacctggaaggagaatgaagggcgcta

SEQ ID NO: 602413 - DNA, 75 bp, synthetic construct
  source 1..75: mol_type = other DNA
gcccgggcactcaacccggaacatccggtgatccgcggtacgtctgccaatcctgacacttatttccagtctcgc

SEQ ID NO: 602414 - DNA, 75 bp, synthetic construct
  source 1..75: mol_type = other DNA
tggtgaacttttaacacattggctaaatcgccccgaaggacaaatgcaactaaatcaatgggcagttaaaacaac

SEQ ID NO: 602415 - DNA, 75 bp, synthetic construct
  source 1..75: mol_type = other DNA
gcagtttttcatatctgacgagctacctatgctagttaatcaacgggttgcaatgctctcacctcaaaatattcg

SEQ ID NO: 602416 - DNA, 75 bp, synthetic construct
  source 1..75: mol_type = other DNA
gtatgcacaaaaccaattcagcaaggaaagtcccctaagtatgcggagaagggcttaaagtgcattaaacctaaa

SEQ ID NO: 602417 - DNA, 75 bp, synthetic construct
  source 1..75: mol_type = other DNA
tgaggacctactgacttctagcgatgattatttatcagcttgccgaacgcctgaaaagaaaatcactagaccaca

SEQ ID NO: 602418 - DNA, 75 bp, synthetic construct
  source 1..75: mol_type = other DNA
tctaatgaacatattaagtctattccgctgtttagacctgatgataaagcccaaaaatacatcggggataaagtt

SEQ ID NO: 602419 - DNA, 75 bp, synthetic construct
  source 1..75: mol_type = other DNA
accatctttttgttgttcgccctgacaaggctgatagtcattatatttgctcatttttaaatagcttccatggcc

SEQ ID NO: 602420 - DNA, 75 bp, synthetic construct
  source 1..75: mol_type = other DNA
ttgaatttgccattcgtaccgtgtgcgagcctatctttgaaaaaccgctggcggaaatttcgtttggacatgtgc

SEQ ID NO: 602421 - DNA, 75 bp, synthetic construct
  source 1..75: mol_type = other DNA
ccagctttatccgcagctcgatttatggaaaacggcgaagcctttcctcgagtcgtggattaaagatcaggttgg

SEQ ID NO: 602422 - DNA, 75 bp, synthetic construct
  source 1..75: mol_type = other DNA
actattgcagtgaagggatgatggtgatggagcgtatctatggcattccagtttcggatgtcgcgacgctggaga

SEQ ID NO: 602423 - DNA, 75 bp, synthetic construct
  source 1..75: mol_type = other DNA
cggtgtctgatgttgcggcgctggagaaaaacggcaccaacatgaaattgctggcggaacgcggcgtgcaggtgt

SEQ ID NO: 602424 - DNA, 75 bp, synthetic construct
  source 1..75: mol_type = other DNA
ttttgccggtcattaaagcagacctgaaacttatctaccgtctggctcgctgggtgccgcgtttgctgccggatg

SEQ ID NO: 602425 - DNA, 75 bp, synthetic construct
  source 1..75: mol_type = other DNA
actgcacgttgattctggctgggtgccgccagataccaacgttgaagagttcgaatttgccattcgtactgtctg

SEQ ID NO: 602426 - DNA, 75 bp, synthetic construct
  source 1..75: mol_type = other DNA
tcgcgcttagagccaaacctagttgggattcttattatatttgtacttttttaaattccagccatgggcgaaagc

SEQ ID NO: 602427 - DNA, 75 bp, synthetic construct
  source 1..75: mol_type = other DNA
tcgaagtcttgtaaaggtgttttacgcgggctgcattatcagttagaaccttatgcacaagggaaattggtgcgc

SEQ ID NO: 602428 - DNA, 75 bp, synthetic construct
  source 1..75: mol_type = other DNA
atgctttcgaaagtctggatacatccaatactacatcccttgcattacagttaattcaggcggcaaaggtatatg

SEQ ID NO: 602429 - DNA, 75 bp, synthetic construct
  source 1..75: mol_type = other DNA
atgaaaggtacctgtgtttttcctccaggagaaccggttaagggaacacataatattcctctttgggtcgatgtt

SEQ ID NO: 602430 - DNA, 75 bp, synthetic construct
  source 1..75: mol_type = other DNA
aatccgtagaagaagttccgctgcaaccggttaatccgcacagcgccaatcgaccgccagtggtttccgatgccg

SEQ ID NO: 602431 - DNA, 75 bp, synthetic construct
  source 1..75: mol_type = other DNA
ctaacaactattattctttaaatcatgaaaggggagtcatttggaacgatgaggaaattaacattgcctggccct

SEQ ID NO: 602432 - DNA, 75 bp, synthetic construct
  source 1..75: mol_type = other DNA
atcaacactatcagcgtcaaacgtgtaccggacttgtgcagaaatcctccagccaacctgcttctgatatatatt

SEQ ID NO: 602433 - DNA, 75 bp, synthetic construct
  source 1..75: mol_type = other DNA
tctgcagtagtgctctgtcattatcacaaaaagatcaagaagcaaaattattttcagaattattggacagtgaac

SEQ ID NO: 602434 - DNA, 75 bp, synthetic construct
  source 1..75: mol_type = other DNA
atgaacgtaattaaaacagaaattccagacgtattaattttcgaacctaaagtttttggtgacgagcgtggtttc

SEQ ID NO: 602435 - DNA, 75 bp, synthetic construct
  source 1..75: mol_type = other DNA
aacgagccccccgcactattaaaccgagtcagcgcgcaaacaatggaggatcgactcgatccacgtccttatcgg

SEQ ID NO: 602436 - DNA, 75 bp, synthetic construct
  source 1..75: mol_type = other DNA
gcgggaagaaaaatactgatgaaaggtacctgtgtttttcctccaggagaaccggttaagggaacgcataatatt

SEQ ID NO: 602437 - DNA, 75 bp, synthetic construct
  source 1..75: mol_type = other DNA
atgaattgtactattttaatgaaaataatctttgtaaaggcgattacaaaagattcgcctttttggtcacacttc

SEQ ID NO: 602438 - DNA, 75 bp, synthetic construct
  source 1..75: mol_type = other DNA
cgctaaaataaaaggggcctcaaatatcgctttgcgcacagaaacagttaaatcgagaatgcatttagttgctaa

SEQ ID NO: 602439 - DNA, 75 bp, synthetic construct
  source 1..75: mol_type = other DNA
gaaatcagcgttgctggaaaatatccgaaatttctttctgacgtttgtctggcttcccctgaatttttccccttt

SEQ ID NO: 602440 - DNA, 75 bp, synthetic construct
  source 1..75: mol_type = other DNA
cattgccgggctgctgatgctggcagtcagccaccggctgtaccgggcggaagacagaacggaacgtctggcgct

SEQ ID NO: 602441 - DNA, 75 bp, synthetic construct
  source 1..75: mol_type = other DNA
ccgggacgttacactgttcaggcaccttataaagcgggtgtcgggattggcgtcctggaattgcatacggcgaca

SEQ ID NO: 602442 - DNA, 75 bp, synthetic construct
  source 1..75: mol_type = other DNA
atatccggcaaccggccattaaccggttgtggggatggggagtgattgcccagttcgcgtattatctggccggtt

SEQ ID NO: 602443 - DNA, 75 bp, synthetic construct
  source 1..75: mol_type = other DNA
cacgtaacgattcactggctgcacggaccgatacctggtttcagtcatttctggtctggtcacccggacagcggg

SEQ ID NO: 602444 - DNA, 75 bp, synthetic construct
  source 1..75: mol_type = other DNA
cagttctcgtattatctggccggctttccgtggtatgaggggaatatcctgtttgcctttgcagtggcggcacag

SEQ ID NO: 602445 - DNA, 75 bp, synthetic construct
  source 1..75: mol_type = other DNA
agagcggaacgtctggcgctgttggcctgcctgctggcggttattccggcccttaaccttgccaccagtgatgca

SEQ ID NO: 602446 - DNA, 75 bp, synthetic construct
  source 1..75: mol_type = other DNA
agagcggaacgtctggcgctgttggcctgcctgctggccgttattccggcgcttaaccttgccaccagtgatgca

SEQ ID NO: 602447 - DNA, 75 bp, synthetic construct
  source 1..75: mol_type = other DNA
ttaattacttcatcagaaagggtgccgtgcagcaagaaacagaagacggaatttggttcgtaatgaacgtaaata

SEQ ID NO: 602448 - DNA, 75 bp, synthetic construct
  source 1..75: mol_type = other DNA
ctaccgggtgtaccgggcggaatacagagcggagagtctggttctggttacatgcctgctggctgttattcctgc

SEQ ID NO: 602449 - DNA, 75 bp, synthetic construct
  source 1..75: mol_type = other DNA
cgtattcgtctggcggataaggctaattttcatattcaccgtctcctgaatatcagcggagggcatcgtcatgct

SEQ ID NO: 602450 - DNA, 75 bp, synthetic construct
  source 1..75: mol_type = other DNA
tcttctgatggccctgtgggggcctttgtccggcaccagttacggcattgccgggctgctgatgctggcagtcag

SEQ ID NO: 602451 - DNA, 75 bp, synthetic construct
  source 1..75: mol_type = other DNA
gctggaccatgcaaaccgcattctgcatctggatcagacgtggatgtttctggccgggcggggcgcgtttccgct

SEQ ID NO: 602452 - DNA, 75 bp, synthetic construct
  source 1..75: mol_type = other DNA
cctggtatgaggggaatatcctgtttgcctttgcagtggcggcacaggtgctgacgtggtgtgagacgcgcagcc

SEQ ID NO: 602453 - DNA, 75 bp, synthetic construct
  source 1..75: mol_type = other DNA
gaaacgcgcagtgggtggcgtacagcagcggccattcttctgatggccctgtgggggcctttgtccggcaccagt

SEQ ID NO: 602454 - DNA, 75 bp, synthetic construct
  source 1..75: mol_type = other DNA
gcttaaccttgccaccagtgatgcggcggcggtggcaggccttgtgatgacggtgctgaccgttgcgctggtgtc

SEQ ID NO: 602455 - DNA, 75 bp, synthetic construct
  source 1..75: mol_type = other DNA
accccatcctgcgccagtgttctggaatgtctcactgaactggcgtatgaactgggaatgaatgacgcaccgcgc

SEQ ID NO: 602456 - DNA, 75 bp, synthetic construct
  source 1..75: mol_type = other DNA
tactgcgcacgcttgtagaaaatgaagaaaccacctttaaacaaattgctcttgagagcggactttctaccggaa

SEQ ID NO: 602457 - DNA, 75 bp, synthetic construct
  source 1..75: mol_type = other DNA
gcggctctacaagttcagttggggcccaccaacatagtcagactgggcccagaacgaatagcgggagtcaaccta

SEQ ID NO: 602458 - DNA, 75 bp, synthetic construct
  source 1..75: mol_type = other DNA
atccacaaagaacagttgcaaaacatgcttactcgtaaaggtcagttgtccttttacgatattttcaccctcgca

SEQ ID NO: 602459 - DNA, 75 bp, synthetic construct
  source 1..75: mol_type = other DNA
cgctttagtatcagttttatccgtaaacatccggggctgtttatcggtatgtacgttgctttttttgccaccctg

SEQ ID NO: 602460 - DNA, 75 bp, synthetic construct
  source 1..75: mol_type = other DNA
cctggttgcagtcgttgctggtctggtcacccggacagcgggatatcatcaaaacggtggcactggtgctgatgg

SEQ ID NO: 602461 - DNA, 75 bp, synthetic construct
  source 1..75: mol_type = other DNA
agagcggaacgtctggcgctggtcgcctgcctgctggccgtgattccggggcttaaccttgccaccagtgatgcc

SEQ ID NO: 602462 - DNA, 75 bp, synthetic construct
  source 1..75: mol_type = other DNA
gcaggaaaatcattaccccgtttctggcccggggattttttcccgacgttctatgcctgtcatctggctgtgctg

SEQ ID NO: 602463 - DNA, 75 bp, synthetic construct
  source 1..75: mol_type = other DNA
atgaccgaaatacaacgcctgctgaccgaaacaattgaatctctgaatacgcgcgaaaaacgcgacaacaagccc

SEQ ID NO: 602464 - DNA, 75 bp, synthetic construct
  source 1..75: mol_type = other DNA
ctctagccgtctacgtgatataacaacgacagcccgtgatcttactgaccttattaatcgtatggggcaatcggg

SEQ ID NO: 602465 - DNA, 75 bp, synthetic construct
  source 1..75: mol_type = other DNA
tacaagttgccagttaatacaccttgccaagatgcgccagcccatatctggctgcaaacggctggagtatggcca

SEQ ID NO: 602466 - DNA, 75 bp, synthetic construct
  source 1..75: mol_type = other DNA
aggctgagcaagagcttatcgttaccattaacaaatatgccagtcagttggcagcagaaccgatagcgactaatg

SEQ ID NO: 602467 - DNA, 75 bp, synthetic construct
  source 1..75: mol_type = other DNA
ctcgatgtttactgatgatgaatatcagttcgttattcatgacgccacgcattggatgagaaaagcatatccagc

SEQ ID NO: 602468 - DNA, 75 bp, synthetic construct
  source 1..75: mol_type = other DNA
gcctcggcggatgatgcagccggtgcgcagattatcattgcgaaagccggtggggatgttgatgccattcaggcg

SEQ ID NO: 602469 - DNA, 75 bp, synthetic construct
  source 1..75: mol_type = other DNA
cacagataatcatcgcgaaagcgggtggggatgttgatgccattcaggcggcaacgccggtcacgctgaatatgg

SEQ ID NO: 602470 - DNA, 75 bp, synthetic construct
  source 1..75: mol_type = other DNA
gctgttttgcgtagactggctggcaactctccggtaactccggatggttggataagctgtagtgagcgaatgccc

SEQ ID NO: 602471 - DNA, 75 bp, synthetic construct
  source 1..75: mol_type = other DNA
ttactgacgatggggaagaaccggcatcgaaagtaacccactggatgccgctaccagaaccgccgcaggaggtga

SEQ ID NO: 602472 - DNA, 75 bp, synthetic construct
  source 1..75: mol_type = other DNA
cggctggatgaagccctgtgggcgcgtccggcagaaagctttgttccgcataatttagcgggagaaggaccgcgt

SEQ ID NO: 602473 - DNA, 75 bp, synthetic construct
  source 1..75: mol_type = other DNA
aaggttgccagggttcgtgccgatttcgatgattttgacggtgacaggcgaggtatcggtgattgtctggatgag

SEQ ID NO: 602474 - DNA, 75 bp, synthetic construct
  source 1..75: mol_type = other DNA
gcagcagacagccgttccgccagttccggaaatacaggatgatgtcgcgcaagcaattgaaaatctcaagcagaa

SEQ ID NO: 602475 - DNA, 75 bp, synthetic construct
  source 1..75: mol_type = other DNA
ggtggataatacctggtgcgtcgtggataccatcacactggatgcctctaccagaaccgccgcaggaggtgcgcc

SEQ ID NO: 602476 - DNA, 75 bp, synthetic construct
  source 1..75: mol_type = other DNA
aagctgtagtgagcgaatgccggataccaaaacagccgttcttgttgccagggagtttgacaggaaaggtgactg

SEQ ID NO: 602477 - DNA, 75 bp, synthetic construct
  source 1..75: mol_type = other DNA
attgtcgccggggcgttgcttatccgtaaatactgggagcctgtcagcgcattctttggcggtgtggttgaaggg

SEQ ID NO: 602478 - DNA, 75 bp, synthetic construct
  source 1..75: mol_type = other DNA
ctcagaaacaggatattaagtgcgctccctggaatgggagggcgaaactctttgcaggagaaaatatcggagtgt

SEQ ID NO: 602479 - DNA, 75 bp, synthetic construct
  source 1..75: mol_type = other DNA
cactgactcgagaaccaataacggcatcaataattgtaaaacatgaagaatgcatttatgactctgccagaggaa

SEQ ID NO: 602480 - DNA, 75 bp, synthetic construct
  source 1..75: mol_type = other DNA
aactctttgcaggccaaaatatcggaatgtacctttactgttgatattgaaaaacttcactgtcctggtgaggtg

SEQ ID NO: 602481 - DNA, 75 bp, synthetic construct
  source 1..75: mol_type = other DNA
ccgggctgctgatgctggctgtcagccaccggctgtaccgggcggaagacagaacggaacgtttggcgctggttg

SEQ ID NO: 602482 - DNA, 75 bp, synthetic construct
  source 1..75: mol_type = other DNA
agataaactgaccaataccacagcatttgttgccgtgaccagtcttgctgaaggtacgaaaacgttgccaacaac

SEQ ID NO: 602483 - DNA, 75 bp, synthetic construct
  source 1..75: mol_type = other DNA
gaaattcaaaaactcctcggcaagatggtgactctattgcaggattaccaacaaaaacaattggcgcaaagctat

SEQ ID NO: 602484 - DNA, 75 bp, synthetic construct
  source 1..75: mol_type = other DNA
tggataatctgaccaggttgattaaagaatctgacggtaaaacagaagaactggttaaggttatgcaggataacc

SEQ ID NO: 602485 - DNA, 75 bp, synthetic construct
  source 1..75: mol_type = other DNA
gtgattcacttacctatgtcgggccagtggcaaaagatgcaggtgtcagcctggaagaaacagcagcaatgttag

SEQ ID NO: 602486 - DNA, 75 bp, synthetic construct
  source 1..75: mol_type = other DNA
acagcgagcaagtcgctgtcgggggatatccgggaaacacaaaaatcactgcgcgagctgaacggtcacgcatcc

SEQ ID NO: 602487 - DNA, 75 bp, synthetic construct
  source 1..75: mol_type = other DNA
aataacgtcatcaatgattgtaagtcaagaacaatgtatttatgatcaaaccaaaggaaactttgttataaaata

SEQ ID NO: 602488 - DNA, 75 bp, synthetic construct
  source 1..75: mol_type = other DNA
attattgaggtctacgccgctccccccgttccagtagtaccggaagaaaaaccaatgcctaatcctcttagcatg

SEQ ID NO: 602489 - DNA, 75 bp, synthetic construct
  source 1..75: mol_type = other DNA
tcaagatgattggattttaatttattcaaagcacggtgagtatatggcaggacaggtgcaaggggaatacgtgga

SEQ ID NO: 602490 - DNA, 75 bp, synthetic construct
  source 1..75: mol_type = other DNA
gcccgcagatgactaccgccgaaaaggtgcggattttccttttcggcgtgtttgaactgctggtctggcagaaga

SEQ ID NO: 602491 - DNA, 75 bp, synthetic construct
  source 1..75: mol_type = other DNA
tagtgagcatgccttcgcaactcttcactatggcgcgttcttttaaagccgtagctaatggcaaaatttatatcg

SEQ ID NO: 602492 - DNA, 75 bp, synthetic construct
  source 1..75: mol_type = other DNA
cttcaagagcattttattgctatgcaaatgaagaccaaagagattatgacgatattcagattttatttaatagat

SEQ ID NO: 602493 - DNA, 75 bp, synthetic construct
  source 1..75: mol_type = other DNA
ccactgttaaacaagtcaaaattaataatgcatctgatgcttacactaaagcattaaccaataatgttgcagtct

SEQ ID NO: 602494 - DNA, 75 bp, synthetic construct
  source 1..75: mol_type = other DNA
caccgatgttaaaaaccttgtgtttaccaacggcaaagcggtttacaactttaaagcgtcgtatgttaaacaggc

SEQ ID NO: 602495 - DNA, 75 bp, synthetic construct
  source 1..75: mol_type = other DNA
aagttaatggcgcaggtgtcgtaaagactgccgacgttggtgcaaaaccggaagccttttctattgcgatagatt

SEQ ID NO: 602496 - DNA, 75 bp, synthetic construct
  source 1..75: mol_type = other DNA
gggtaattcagtatgaagctgtgaataatcaaacgttcagactgcttgagataagcccgtttgaattgtgggtga

SEQ ID NO: 602497 - DNA, 75 bp, synthetic construct
  source 1..75: mol_type = other DNA
cgggattatttcaccctcagagagcggttgatgacgatgcagaagcagctggaaggggcacaggaatatatcagc

SEQ ID NO: 602498 - DNA, 75 bp, synthetic construct
  source 1..75: mol_type = other DNA
gcgcctgcaagtcgccgccacctgtgcaaagtcaacgaccggagccagcggcatgggcgatggagaaagccctag

SEQ ID NO: 602499 - DNA, 75 bp, synthetic construct
  source 1..75: mol_type = other DNA
ccagacacatgtttaataaatggtcacgtcgtatgtaaaacatctgttatatattggaattaccttgtagacaag

SEQ ID NO: 602500 - DNA, 75 bp, synthetic construct
  source 1..75: mol_type = other DNA
gctcctttaataaataggatctttgtcgtagctgtcttcatacattgctttggtgacaagaaaaaaataaaacaa

SEQ ID NO: 602501 - DNA, 75 bp, synthetic construct
  source 1..75: mol_type = other DNA
gaccgatgtaagccgagtttttcaacaaatgtcattgaaacaataaaacacatttttgacatcaataatgtcttt

SEQ ID NO: 602502 - DNA, 75 bp, synthetic construct
  source 1..75: mol_type = other DNA
cggcgtggaagccaacagcgacgccgaacgccagcgctatgccgagctgctggcccgtaaagagcatcagcgggt

SEQ ID NO: 602503 - DNA, 75 bp, synthetic construct
  source 1..75: mol_type = other DNA
cggttgtttttgatagttccgtagatatggctggtttgcgtgcgcttgctgagcacgggactcgtgtgtttcact

SEQ ID NO: 602504 - DNA, 75 bp, synthetic construct
  source 1..75: mol_type = other DNA
gaaaaactctatcaatgaaactaccgcacaacttaaccgccagcatgaagcactggcgcgggtcagcgcgcaaca

SEQ ID NO: 602505 - DNA, 75 bp, synthetic construct
  source 1..75: mol_type = other DNA
aagcgtgccgcctctgagctgcagacgaaatacaacagcctgagaacgtcggtacagcgacagcgctccgaactg

SEQ ID NO: 602506 - DNA, 75 bp, synthetic construct
  source 1..75: mol_type = other DNA
gacctctatgaccagcaagatagttcattgcgcaaacttacccaaaccgccacacagtatgtgttaaaactcgac

SEQ ID NO: 602507 - DNA, 75 bp, synthetic construct
  source 1..75: mol_type = other DNA
gatggcctgatcctgctgcaaaccgcaaccgttggtgaaatcgatgcaggcgtactcgaaactaccgttggtgcc

SEQ ID NO: 602508 - DNA, 75 bp, synthetic construct
  source 1..75: mol_type = other DNA
tgtctggtcttatgctggcaatggttgcaggttcagcttctgctgatatggacggtggtcagttaaatatcagtg

SEQ ID NO: 602509 - DNA, 75 bp, synthetic construct
  source 1..75: mol_type = other DNA
gtcttatgttcgtgcagatgcaagtctggcagccacagcaggttatgtaaaaactaacactgcatataccgttac

SEQ ID NO: 602510 - DNA, 75 bp, synthetic construct
  source 1..75: mol_type = other DNA
tgtgttgtctatcattgaaccagaaaagtctcgattgatagagcatcaattgagaggacttgaaggggcaatgaa

SEQ ID NO: 602511 - DNA, 75 bp, synthetic construct
  source 1..75: mol_type = other DNA
tcattcagcagtgaacgggctaatgatgagcttcatgaggcggtgtcttcgattaaagaattgtctcgaatgctg

SEQ ID NO: 602512 - DNA, 75 bp, synthetic construct
  source 1..75: mol_type = other DNA
accgggcagctctgccaaaatgaccttcggttccgtgttctttggtaacagcaaaggtacgctgaacaacgatat

SEQ ID NO: 602513 - DNA, 75 bp, synthetic construct
  source 1..75: mol_type = other DNA
atgagtcggttaaccgcgattatctccgctctgctcatctgcatcatcgtctgcctgttatggactgttaatcat

SEQ ID NO: 602514 - DNA, 75 bp, synthetic construct
  source 1..75: mol_type = other DNA
gctttttgcagcggacgccgcgcgggcgtatggcgacagtgcgtgcgtggaaccacttcgggattacgccgccag

SEQ ID NO: 602515 - DNA, 75 bp, synthetic construct
  source 1..75: mol_type = other DNA
cgcctacaaagagcagcgcgataaagccacatccatcatcgctgatatgcagaagcgtcaacgtgatgtagcaga

SEQ ID NO: 602516 - DNA, 75 bp, synthetic construct
  source 1..75: mol_type = other DNA
tgagctgaagcaggtgaccgccaccatcgctgacatgcagcagcgtcagcgtgatgttgctgcgctcgatgcaaa

SEQ ID NO: 602517 - DNA, 75 bp, synthetic construct
  source 1..75: mol_type = other DNA
ggcgttaacgctggtcaccgtaggcgttggcgcagcaatcagcgttcagcaggtcgcaaaacgctggagcggatt

SEQ ID NO: 602518 - DNA, 75 bp, synthetic construct
  source 1..75: mol_type = other DNA
acgaagatcaccacgaccatggacatcatcaccatcacgaacatggcgagtatcaggatgcccatgcacgagccc

SEQ ID NO: 602519 - DNA, 75 bp, synthetic construct
  source 1..75: mol_type = other DNA
aaaagcgggcgatctggcggcaatgctcactaatcttgaaccgcacgatgtgctgtttatcgatgaaattcaccg

SEQ ID NO: 602520 - DNA, 75 bp, synthetic construct
  source 1..75: mol_type = other DNA
tatcgggactggtggggtgaaagagagatgaaccgtgttctgtgtgtggtgattattgtcctggcggttggctat

SEQ ID NO: 602521 - DNA, 75 bp, synthetic construct
  source 1..75: mol_type = other DNA
aagcgcagcgcgataaaaaagccagagagctggagctggcaaacgcaactattactgatatgcaggtgcgccagc

SEQ ID NO: 602522 - DNA, 75 bp, synthetic construct
  source 1..75: mol_type = other DNA
gatgttgctgcgctcgatgcaaagtactcgagagaattagccaatgcgaaagctgaaaatgaaactctgcgcgct

SEQ ID NO: 602523 - DNA, 75 bp, synthetic construct
  source 1..75: mol_type = other DNA
ccgctggtcgtaagcgcctgcggatcaacgccacctgccccggtacagtgcgtgaagccaccggcacctccggcg

SEQ ID NO: 602524 - DNA, 75 bp, synthetic construct
  source 1..75: mol_type = other DNA
ttcatcctcagagaacggttgatgacaatgcagaagcaactggaaggggcacaggactatatccgcactcagtgc

SEQ ID NO: 602525 - DNA, 75 bp, synthetic construct
  source 1..75: mol_type = other DNA
caagcgctttactgctcaatcagcagaaccgtggctccagctgatttccgcagtgatcattattagcaccgcgtt

SEQ ID NO: 602526 - DNA, 75 bp, synthetic construct
  source 1..75: mol_type = other DNA
cggcggtaaagaaggtctggtccacatctctcaaatcgccgacaagcgtgttgagaaagtgaccgactacctgca

SEQ ID NO: 602527 - DNA, 75 bp, synthetic construct
  source 1..75: mol_type = other DNA
aagcgcaacgcgataatgtgaaggaaaaactcaaccaggcgaccgcaatcattactgacatgcagatacgccagc

SEQ ID NO: 602528 - DNA, 75 bp, synthetic construct
  source 1..75: mol_type = other DNA
acagttgctggcggggttctgaccgtaaccagtaagggcattgcggtttcagcagaatatttagactcgctgtta

SEQ ID NO: 602529 - DNA, 75 bp, synthetic construct
  source 1..75: mol_type = other DNA
gcgtctgattgaccgcccgattcgcccgctgttcccggaaggcttcgtcaacgaagttcaggttatcgccaccgt

SEQ ID NO: 602530 - DNA, 75 bp, synthetic construct
  source 1..75: mol_type = other DNA
accgctttctggatgttctggcgtacctggcgcggcgaacgcaactggctggagaatatgcatgagcatgatcat

SEQ ID NO: 602531 - DNA, 75 bp, synthetic construct
  source 1..75: mol_type = other DNA
ccctgacactgggcgcaacactggtcgtcagtttcagcatcggtctggcactaacgctggttacagtaggcgttg

SEQ ID NO: 602532 - DNA, 75 bp, synthetic construct
  source 1..75: mol_type = other DNA
attggtcacggtcgtctggcgaagcgtggcgtgctggctgtaatgccggatatggacaaattcccgtacaccgta

SEQ ID NO: 602533 - DNA, 75 bp, synthetic construct
  source 1..75: mol_type = other DNA
tcaacgcgccgcgtggcgatatctctgagttcgcaccgcgtatccataccatcaagatcaacccggacaagatca

SEQ ID NO: 602534 - DNA, 75 bp, synthetic construct
  source 1..75: mol_type = other DNA
aagagatcatgcaggttgcactgaaccaggctaaaggtgcgcgtctgcatatcctgggggtaatggaacaggcga

SEQ ID NO: 602535 - DNA, 75 bp, synthetic construct
  source 1..75: mol_type = other DNA
atgtatggaaacaaagagattcggcgtttacgcctcaaagagtggttcaaagacaggactttgccgcctaaagag

SEQ ID NO: 602536 - DNA, 75 bp, synthetic construct
  source 1..75: mol_type = other DNA
atgattcagctactaacaagctatcgctatttattgagttcgagcgcaggatcgtggttgttccttattctcggc

SEQ ID NO: 602537 - DNA, 75 bp, synthetic construct
  source 1..75: mol_type = other DNA
ggtatcagtgacgaacgcgttaatgcgttggccgatgagctttatgctttggtacgccagcgccagtgcgaagaa

SEQ ID NO: 602538 - DNA, 75 bp, synthetic construct
  source 1..75: mol_type = other DNA
gcgtgattattgcgatatcggcattgcagtgagcagcaaccgcggcctggtagtgcctgtgggtaatgactccaa

SEQ ID NO: 602539 - DNA, 75 bp, synthetic construct
  source 1..75: mol_type = other DNA
taaaactctgccacccaaagagaagagctacctatctcaactaatgagtgggagagcctcgtttggagaaaaggc

SEQ ID NO: 602540 - DNA, 75 bp, synthetic construct
  source 1..75: mol_type = other DNA
gtttattaataagtatgccctcctctaaaaaatcacgcaggaaacggaagtcccgcccattaaaaaattcattat

SEQ ID NO: 602541 - DNA, 75 bp, synthetic construct
  source 1..75: mol_type = other DNA
ttcggttccgtattctttggtaacagcaaaggtacgctgaacaacgatatgtctatcaataacccatctgacggt

SEQ ID NO: 602542 - DNA, 75 bp, synthetic construct
  source 1..75: mol_type = other DNA
atgtctaaaaaattaggttttgcgctgtctggtattatgttggcaatggctgctggtactgcatttgctgctaac

SEQ ID NO: 602543 - DNA, 75 bp, synthetic construct
  source 1..75: mol_type = other DNA
atcctatgtccgtgctgaagcaagccaggcaccaactgctggttatgttaaaaccaacactgcatataccattac

SEQ ID NO: 602544 - DNA, 75 bp, synthetic construct
  source 1..75: mol_type = other DNA
ggcggtacatcgagacgccgccaatgactggcgcactcgctgacctgaaacagtgggtaatgaatgccgtagagc

SEQ ID NO: 602545 - DNA, 75 bp, synthetic construct
  source 1..75: mol_type = other DNA
catatgaccatcgtcgatcttcgcggcagccgcacccgggagtttctgcgttatctgctggcgaacgatgtggcg

SEQ ID NO: 602546 - DNA, 75 bp, synthetic construct
  source 1..75: mol_type = other DNA
ttgactgcagcaaagcaaatccgaatccaggtagtacagctaaaatgaccttcggttctgtttctttggtaatag

SEQ ID NO: 602547 - DNA, 75 bp, synthetic construct
  source 1..75: mol_type = other DNA
gcagtgagcagcaaccgcggcctggtagtgcctgtgggtaatgactccaacttattgatagtgttttatgttcag

SEQ ID NO: 602548 - DNA, 75 bp, synthetic construct
  source 1..75: mol_type = other DNA
atgcgcctgctccctctcgttgccgcagcgacagctgcatttctggtcgttgcctgcagttctcctacgccgccg

SEQ ID NO: 602549 - DNA, 75 bp, synthetic construct
  source 1..75: mol_type = other DNA
gcacaggtgactgttattgatgttagtgacttcccgtcaatcgttgcagaaatcggtgaaaatggtttggtagtg

SEQ ID NO: 602550 - DNA, 75 bp, synthetic construct
  source 1..75: mol_type = other DNA
agacggccacaaagtatgtgttaaaactcgacggctggatccagaaaaacaaatcactggcgtcaaccatcggcc

SEQ ID NO: 602551 - DNA, 75 bp, synthetic construct
  source 1..75: mol_type = other DNA
tgttgagttgatggggttcgataaagattcagaccgcgaagcgctggacgctattcttcaggaagtttgggaaga

SEQ ID NO: 602552 - DNA, 75 bp, synthetic construct
  source 1..75: mol_type = other DNA
cagcgacagctgcatttctggtcgttgcctgcagttctcctacgccgccgcgtggcgtgaccgtagtgaataatt

SEQ ID NO: 602553 - DNA, 75 bp, synthetic construct
  source 1..75: mol_type = other DNA
aagtcaccgcaacatacagcctgcgtgatgacggcggcctgaatgtcattaataaaggctataaccctgacagag

SEQ ID NO: 602554 - DNA, 75 bp, synthetic construct
  source 1..75: mol_type = other DNA
aggccagttttgagaaaaaccggctcggtactgcccagcaggctgaatacatgaaaaccattttcggggaggagg

SEQ ID NO: 602555 - DNA, 75 bp, synthetic construct
  source 1..75: mol_type = other DNA
gtgtgctgcatgacaataacatcagggggtcaatggcgggtacgggtagcagtgccgttgtcacccgattacagg

SEQ ID NO: 602556 - DNA, 75 bp, synthetic construct
  source 1..75: mol_type = other DNA
agattgctggtggtattcgcccgttagggcgcgcaataggggcctggccgtcccaaatacacaaatgggtaaatg

SEQ ID NO: 602557 - DNA, 75 bp, synthetic construct
  source 1..75: mol_type = other DNA
agcaggcgcgccagctcggcgacaataccgcagcctcggcagatgatgcagccggtgcacagataatcattgcga

SEQ ID NO: 602558 - DNA, 75 bp, synthetic construct
  source 1..75: mol_type = other DNA
ggtcgcaagaacggcaggggtaagtcttgagcaggcagcagccatgaccggtgtgctgcatgacaataacatcag

SEQ ID NO: 602559 - DNA, 75 bp, synthetic construct
  source 1..75: mol_type = other DNA
ctcgtagcctggccggttatcaccggcatcaatgccatcatcgcggcagcaggcgcaatgggggcaatcttcacg

SEQ ID NO: 602560 - DNA, 75 bp, synthetic construct
  source 1..75: mol_type = other DNA
caaccgttggtgaaatcgatgcaggcgtactcgaaactaccgttggtgccaaggctaaacctttcagcatcaccg

SEQ ID NO: 602561 - DNA, 75 bp, synthetic construct
  source 1..75: mol_type = other DNA
tattgctgaaagcggtcgaccaggcgacacgaccgcttaaatccatccagaccgcgagtaaaagcctgtcgggcg

SEQ ID NO: 602562 - DNA, 75 bp, synthetic construct
  source 1..75: mol_type = other DNA
ctcgatagctgcaaaaatgtcggcgtcatatttggtcaggcactggcctctgccttgatggctccgctcaatgtt

SEQ ID NO: 602563 - DNA, 75 bp, synthetic construct
  source 1..75: mol_type = other DNA
cggaggctgccatcatggctactgtcccagccctcactcgtctgaatgatgaagacttacataaactcagttatg

SEQ ID NO: 602564 - DNA, 75 bp, synthetic construct
  source 1..75: mol_type = other DNA
tgactccgggttatgattttgcgcagaaaaattccgagctgcaggctgtgctcggggtcgataagcagtcaccag

SEQ ID NO: 602565 - DNA, 75 bp, synthetic construct
  source 1..75: mol_type = other DNA
aaaatcgacggatttcgtaaggcaagcgcgcaactggccgcaaccggtcaggcgcttgataaggcgaaacgagaa

SEQ ID NO: 602566 - DNA, 75 bp, synthetic construct
  source 1..75: mol_type = other DNA
ggcatcagcttgacagacagttacgcgatacgctcgaacagattgagcgcgaaaagcgtgcgcgtcagcgtgcca

SEQ ID NO: 602567 - DNA, 75 bp, synthetic construct
  source 1..75: mol_type = other DNA
aaatcactggcgtcaaccatcggcatcattgtcggtggtgcactggcactgattggtgtcatcggtgccattggc

SEQ ID NO: 602568 - DNA, 75 bp, synthetic construct
  source 1..75: mol_type = other DNA
gctgacgcgctgatgctgccgcttaatgcgttcaacaaactgcgcagcggaattgactgggtactggaaaaactc

SEQ ID NO: 602569 - DNA, 75 bp, synthetic construct
  source 1..75: mol_type = other DNA
gacagggtatgtattgaggctcgatagctggatccaaaagaacaaatctcttgccaccacgctgggtgtcattac

SEQ ID NO: 602570 - DNA, 75 bp, synthetic construct
  source 1..75: mol_type = other DNA
gcctctgcagatgacgcagcgagcgcgcaaatcatcattgcgaaaagcggcggtgacgctgctgccattcaggcg

SEQ ID NO: 602571 - DNA, 75 bp, synthetic construct
  source 1..75: mol_type = other DNA
gtctgcttatgaggcagtcggtaccgacctttttgaccagcaagagggctcgctgcgtaaactcacccaaaccgc

SEQ ID NO: 602572 - DNA, 75 bp, synthetic construct
  source 1..75: mol_type = other DNA
gcgcgcaactggccgtgaccagtcaggcgcttgataaggcgaaacgcgaagctggtgagttgaccgtacagttta

SEQ ID NO: 602573 - DNA, 75 bp, synthetic construct
  source 1..75: mol_type = other DNA
cactggcgaaagtcagcgcacagcaggcgaagttaagccgggtgaaagaacggtatcaggccggtaaatcactgg

SEQ ID NO: 602574 - DNA, 75 bp, synthetic construct
  source 1..75: mol_type = other DNA
tatcaaaaaagaatccagcgacctcgaccagaccgcagcgaaagcgaataaggcgtccccgaatggcgggtatat

SEQ ID NO: 602575 - DNA, 75 bp, synthetic construct
  source 1..75: mol_type = other DNA
ccctgtctgctgatgagcgtcggctcaaaacctccatcagcgaaacgacggcgcagcttaaccgccagcgtgagg

SEQ ID NO: 602576 - DNA, 75 bp, synthetic construct
  source 1..75: mol_type = other DNA
cgagctgttttaagtcgactgcaagctccaactggcaaagcctatgatgccattaaagagcttggcgttaagacg

SEQ ID NO: 602577 - DNA, 75 bp, synthetic construct
  source 1..75: mol_type = other DNA
tgtccggcctggtgctggcaatggttgcaggttctgcttcagcagctttagatggtggtcagttaaacatcagcg

SEQ ID NO: 602578 - DNA, 75 bp, synthetic construct
  source 1..75: mol_type = other DNA
tggataagctgaccgccacgctgaaagcctcggacggtaaaacggaagagctggttaaaatcatgcaggataacc

SEQ ID NO: 602579 - DNA, 75 bp, synthetic construct
  source 1..75: mol_type = other DNA
atgatgatgtcagccatgtgggcgacgtgttgtctgcaacgatgaataagtcggcgctgattttcagggactcag

SEQ ID NO: 602580 - DNA, 75 bp, synthetic construct
  source 1..75: mol_type = other DNA
tattttccatcctgaaagaaatgcagcgcagttttgagaaaaataatctcggaaccggccagaaagccgaataca

SEQ ID NO: 602581 - DNA, 75 bp, synthetic construct
  source 1..75: mol_type = other DNA
gggcgctacacgattccaaaatcaccggctcgatggcgggtacagggagtcgtgccgttctgagtcgcctgcagg

SEQ ID NO: 602582 - DNA, 75 bp, synthetic construct
  source 1..75: mol_type = other DNA
tttaacagcctgagcggcaaggtcggctggctgctggaaaaactcggcgttatcaaaaaagaatccagcgacctc

SEQ ID NO: 602583 - DNA, 75 bp, synthetic construct
  source 1..75: mol_type = other DNA
cggtggcgcactggctctgattggcattatcggcggaattggtctcgttgcgtggccggttgtcatggggattaa

SEQ ID NO: 602584 - DNA, 75 bp, synthetic construct
  source 1..75: mol_type = other DNA
gcggctgttattacgagattacaagcgccaacaggcaaggcatacgatgccctcaaggagctgggcgtcaaaacc

SEQ ID NO: 602585 - DNA, 75 bp, synthetic construct
  source 1..75: mol_type = other DNA
cgatatcaggccggtaaatcgcttgccggtagcatggcggcggctggcgcggccggtgtcggtattgcgacaaca

SEQ ID NO: 602586 - DNA, 75 bp, synthetic construct
  source 1..75: mol_type = other DNA
accctgtaattttcggttttgttatcgtaccattattggtatggccgacggttattgccttagccgtacttatat

SEQ ID NO: 602587 - DNA, 75 bp, synthetic construct
  source 1..75: mol_type = other DNA
ccattgttggttggtatttgcaccagtttatttctggttgctcctgtggaatatcattttctatgtcgcgccagc

SEQ ID NO: 602588 - DNA, 75 bp, synthetic construct
  source 1..75: mol_type = other DNA
taataccgggagaatattgatcccggctttaattggtggggttgaacaaaatatcattttccagtgggtctctgg

SEQ ID NO: 602589 - DNA, 75 bp, synthetic construct
  source 1..75: mol_type = other DNA
tagttccgacccggttaaatttatatccagagccagtactcctggcctcggcgcttcatttttagcgttaggctg

SEQ ID NO: 602590 - DNA, 75 bp, synthetic construct
  source 1..75: mol_type = other DNA
gcccacggtcttgctccgctggccagtcatcctctgggactggtgatgctggcactcatctgctcctttccgctg

SEQ ID NO: 602591 - DNA, 75 bp, synthetic construct
  source 1..75: mol_type = other DNA
aaaatcgtctatatcaccgccggtacacgtcctgcaattgtcgacaaactggcacagcttactggctggcaggct

SEQ ID NO: 602592 - DNA, 75 bp, synthetic construct
  source 1..75: mol_type = other DNA
gcctatttctggttaattctctcgaatttcattctttatattactccagagaaatcagcgttgctggaaaatatc

SEQ ID NO: 602593 - DNA, 75 bp, synthetic construct
  source 1..75: mol_type = other DNA
ttcattatgtgtgcgccacccggtgccattcacgcgaccgaaagtggctttctacaccaattatccggagtcatg

SEQ ID NO: 602594 - DNA, 75 bp, synthetic construct
  source 1..75: mol_type = other DNA
tttactgtggaatgacgacttatatcgcgaagcacaaccgttgtgggaagctgcccgtgcgcatggtttacgtcg

SEQ ID NO: 602595 - DNA, 75 bp, synthetic construct
  source 1..75: mol_type = other DNA
ccatttacgcgaccgaaagtggctttctacactaattatcccgaggcgtgggttcgttattatcaggagaaaaac

SEQ ID NO: 602596 - DNA, 75 bp, synthetic construct
  source 1..75: mol_type = other DNA
tacctgaagcccgcggtgatttcattcgtatctgggatgacgggcgaggtgccgatggtggtcgcgaattattaa

SEQ ID NO: 602597 - DNA, 75 bp, synthetic construct
  source 1..75: mol_type = other DNA
ccctgccgatatctttcagcaataccaattattgtgttgttgcatcgtacgataatgcacggtcaggtgtgtcaa

SEQ ID NO: 602598 - DNA, 75 bp, synthetic construct
  source 1..75: mol_type = other DNA
tttgtgccgtagcacctactacaccgcaccgacgctggcggagcgcaaactggcgattgacgataaccgccgggc

SEQ ID NO: 602599 - DNA, 75 bp, synthetic construct
  source 1..75: mol_type = other DNA
gatgatagttagtcatgtggggcatacaccttcaggcgcaggaatcctgtcggcttctgcaattacatcaaatca

SEQ ID NO: 602600 - DNA, 75 bp, synthetic construct
  source 1..75: mol_type = other DNA
caattattgtgttgttgcatcgtacgataatgcacggtcaggtgtgtcaacaatggttagttttgcagcgttacc

SEQ ID NO: 602601 - DNA, 75 bp, synthetic construct
  source 1..75: mol_type = other DNA
gagaaaccacattgccgcacaggatcctcatacccagtatgcgcagaaacataatccgacatttaccggagaacc

SEQ ID NO: 602602 - DNA, 75 bp, synthetic construct
  source 1..75: mol_type = other DNA
ctaccaaattaacatgggttcagataactaactcatgcgagtgggtaagcaatacaggatttaccgctcaggtca

SEQ ID NO: 602603 - DNA, 75 bp, synthetic construct
  source 1..75: mol_type = other DNA
aaggcgggtcagtggcagcaagtccagctggaaagctggaggcaccacaatcaggacatgatcatcaagctgaaa

SEQ ID NO: 602604 - DNA, 75 bp, synthetic construct
  source 1..75: mol_type = other DNA
cgggaggatacattttgcagtggggatctgcgagtgcaggtaactcagcatcaacgggaatatctaatacgttcc

SEQ ID NO: 602605 - DNA, 75 bp, synthetic construct
  source 1..75: mol_type = other DNA
acattcagcatccctttccccaaaaaagcggactgcgccatgcttactcattctggtgatggcggtgcgccttta

SEQ ID NO: 602606 - DNA, 75 bp, synthetic construct
  source 1..75: mol_type = other DNA
agcatatgaccttgctaacgggaaatataccgcacaggacgcgaccacagcgcgaaaaggtcttgtccagctcag

SEQ ID NO: 602607 - DNA, 75 bp, synthetic construct
  source 1..75: mol_type = other DNA
gaccttgctaacgggaaatatactgcacaggacgcgaccacagcgcgaaaaggtcttgtccagctcagtagcgcc

SEQ ID NO: 602608 - DNA, 75 bp, synthetic construct
  source 1..75: mol_type = other DNA
tggctgcggtaaatccacgttactgcgtaccttaagccgcctgatgacgcctgctcacgggcatgtctggctgga

SEQ ID NO: 602609 - DNA, 75 bp, synthetic construct
  source 1..75: mol_type = other DNA
gtggataaaacccgccagaatgaacatccgcatcttcctgttgaaagtcgtcgtcaggcaaagggaacgcgcttc

SEQ ID NO: 602610 - DNA, 75 bp, synthetic construct
  source 1..75: mol_type = other DNA
atacgctgactcatttgagtggaaaggatgttgccggtcttctcgcataccttggtttgggagaagcggcaaaac

SEQ ID NO: 602611 - DNA, 75 bp, synthetic construct
  source 1..75: mol_type = other DNA
taaggctttgcgccagttaccgttgaccgatgaacaaaagaaacgcataccggaagacgccagcaccttgcaccg

SEQ ID NO: 602612 - DNA, 75 bp, synthetic construct
  source 1..75: mol_type = other DNA
atacggtcaattttcatcagaaaaacatgcagaaaaaaatcaatgcaccgaataagacccaggttgcctgttacg

SEQ ID NO: 602613 - DNA, 75 bp, synthetic construct
  source 1..75: mol_type = other DNA
gcctttttgaacaaacccaaaaagtgcgaaatgaaggcttacatactctcaacgatttttatttattagcagagc

SEQ ID NO: 602614 - DNA, 75 bp, synthetic construct
  source 1..75: mol_type = other DNA
atatcatcaaggtttttcgttctattgatgatacaaaagttatgcttattgataccgattacggtaaattgattc

SEQ ID NO: 602615 - DNA, 75 bp, synthetic construct
  source 1..75: mol_type = other DNA
ctggataacgccttcaacaagcttgccatgaatggaaaaggtgtgccgctttcaggcagatccatcagtctttat

SEQ ID NO: 602616 - DNA, 75 bp, synthetic construct
  source 1..75: mol_type = other DNA
ctgatcatgctgacgccagagcccggcgcattaaaagaagcgccgaacgatgcaacttttgcccgcgttactgcg

SEQ ID NO: 602617 - DNA, 75 bp, synthetic construct
  source 1..75: mol_type = other DNA
ctcggtggatctgctctgggtgaacggcgaaaacttccgcaccttaaaagaggccaatttactgcaaaccgactg

SEQ ID NO: 602618 - DNA, 75 bp, synthetic construct
  source 1..75: mol_type = other DNA
ccgtctggtttaacgcctggggcggcgataccgcaattaaccgctatctcgactgggttagcggcgagatgaaaa

SEQ ID NO: 602619 - DNA, 75 bp, synthetic construct
  source 1..75: mol_type = other DNA
tcgcggctatgacaagagcggggtgcttgttcttgttgacggcgtccgccagctcagtgacatggcgaaaagcag

SEQ ID NO: 602620 - DNA, 75 bp, synthetic construct
  source 1..75: mol_type = other DNA
tgtggggctacaggccgcgaccagtcattcttcttcgatggctaaagatacaataaccgttgttgcgacaggaaa

SEQ ID NO: 602621 - DNA, 75 bp, synthetic construct
  source 1..75: mol_type = other DNA
ttctcatcctgttttttaattgtgatttatttaatagagtatatgtcattaaccataatatgcgcaggggatgta

SEQ ID NO: 602622 - DNA, 75 bp, synthetic construct
  source 1..75: mol_type = other DNA
cattcttctatggctaaagatacaatcaccattgtcgcgacaggaaatcagaacacggtatttgaaacgccgtcg

SEQ ID NO: 602623 - DNA, 75 bp, synthetic construct
  source 1..75: mol_type = other DNA
acgtatcgaagttgtccgcgggccaaactccagtctgtacggcagtggcgggctgggaggtgtagtggacttcag

SEQ ID NO: 602624 - DNA, 75 bp, synthetic construct
  source 1..75: mol_type = other DNA
ggctccatatcctctgcattccgagcgcccacaatggcagaaatgtacagggatgatgtacatttttaccgcaag

SEQ ID NO: 602625 - DNA, 75 bp, synthetic construct
  source 1..75: mol_type = other DNA
ccagtgctgcggcgaaggtggttgccaatttcctgctctcacctgatgcacagctacgtaaggcagatcctgctg

SEQ ID NO: 602626 - DNA, 75 bp, synthetic construct
  source 1..75: mol_type = other DNA
tttctgctgaagaatacccggaactggcaaaggcttacccgacaaataaattgcctgatttacgcggtgaattta

SEQ ID NO: 602627 - DNA, 75 bp, synthetic construct
  source 1..75: mol_type = other DNA
tcagtttgccgggaatataggcggaggtgcgggacacgcaattaactttcatgatggcatcgccggaaatcagcc

SEQ ID NO: 602628 - DNA, 75 bp, synthetic construct
  source 1..75: mol_type = other DNA
agtgggttctgcacctgcggcactggatacactgaacgaactggcggcggcactggggaatgacccgaactttgc

SEQ ID NO: 602629 - DNA, 75 bp, synthetic construct
  source 1..75: mol_type = other DNA
ccagagatgaatttcagcaagcgcgaaaaagaaattctgaggtggacggcggaagggaagacatcagcagagata

SEQ ID NO: 602630 - DNA, 75 bp, synthetic construct
  source 1..75: mol_type = other DNA
aaccttccgtcagctgtcaggatgttgtcgatgcttaccacgaaatccttcctgaagcgccaagaatccgcgcac

SEQ ID NO: 602631 - DNA, 75 bp, synthetic construct
  source 1..75: mol_type = other DNA
atggcgctgtttacccaaaagtgattggccttgatgcttcaagaattgttccaactgcaaacgaaaaccgtcctc

SEQ ID NO: 602632 - DNA, 75 bp, synthetic construct
  source 1..75: mol_type = other DNA
aagagaaaagtcccttgggaatgaacattaagtatcgttatgagattacggatgagatcggtgttataacctctt

SEQ ID NO: 602633 - DNA, 75 bp, synthetic construct
  source 1..75: mol_type = other DNA
gcgcatgcgcagcaaaaatcgccagcggcgatttgcctgcaagcagttacagttttggctttcgcgaggggatga

SEQ ID NO: 602634 - DNA, 75 bp, synthetic construct
  source 1..75: mol_type = other DNA
gcagttacagctttggctttagcgagggaatgattggcaacgtgcatttcgtcaccattcctgccaacgccagtg

SEQ ID NO: 602635 - DNA, 75 bp, synthetic construct
  source 1..75: mol_type = other DNA
gcactgaaagcgccgctgtcgagtccggcactcactggaacgccaacagcccccactgcggcgcagtcggtcaat

SEQ ID NO: 602636 - DNA, 75 bp, synthetic construct
  source 1..75: mol_type = other DNA
tactatggacgtcacttatgaaagctcaggctctggcgactggaaaactgatggtttatttgcaggcattggcct

SEQ ID NO: 602637 - DNA, 75 bp, synthetic construct
  source 1..75: mol_type = other DNA
gtcgcgtatgaaagctccggatctggtgactggcgcacgagcggggttgttgtaggtattggcctgaaattctga

SEQ ID NO: 602638 - DNA, 75 bp, synthetic construct
  source 1..75: mol_type = other DNA
ttatagcacatcagaaatcaaacaaagtcaccctacaattcagttaaatttaaaccatattacttttgaacttgt

SEQ ID NO: 602639 - DNA, 75 bp, synthetic construct
  source 1..75: mol_type = other DNA
atgaaatggataatatgccaatcactctgttttggaagttatacattttcgacacctacttagaaccacaaagcc

SEQ ID NO: 602640 - DNA, 75 bp, synthetic construct
  source 1..75: mol_type = other DNA
atgggccacccaataaatagcggtgagcgggtggtaatgatgccgcaccactttggtggatggctggaccgcttc

SEQ ID NO: 602641 - DNA, 75 bp, synthetic construct
  source 1..75: mol_type = other DNA
tcaacatcccctaccagaaggtagttggcatacctggtatgtcattgatatcggtaatggcttcactgaactata

SEQ ID NO: 602642 - DNA, 75 bp, synthetic construct
  source 1..75: mol_type = other DNA
aaagcaaaactgcataataaaagaagaattttccacgaaatttgaaaaaacacgacgaaatgaagtccagagatt

SEQ ID NO: 602643 - DNA, 75 bp, synthetic construct
  source 1..75: mol_type = other DNA
acttattaggacgttggatgcaaacagatcctttagactttaacatgcaattaactaactgcaataaaaacaaca

SEQ ID NO: 602644 - DNA, 75 bp, synthetic construct
  source 1..75: mol_type = other DNA
caatatactgtttacacctctgccgccagcaactgtcgatttccattcatcgcttaaatacgttgcccgccttcc

SEQ ID NO: 602645 - DNA, 75 bp, synthetic construct
  source 1..75: mol_type = other DNA
atgaaaacaatactcgacaggaactacaacgccacagcggcggtgtatcagaaagttgtgacactggaagataaa

SEQ ID NO: 602646 - DNA, 75 bp, synthetic construct
  source 1..75: mol_type = other DNA
tggggcgctgactctggcgcatatatgtttggcaaattgtttggtaaacataagctggcaccgaaggtttctccg

SEQ ID NO: 602647 - DNA, 75 bp, synthetic construct
  source 1..75: mol_type = other DNA
ggtgctggtaactggccctactggcagcggcaaaacggtcacgctgtatagcgccctgcaaacgctaaatatcgc

SEQ ID NO: 602648 - DNA, 75 bp, synthetic construct
  source 1..75: mol_type = other DNA
gaaatcgcccagcttggtttacgcgcgctggcggcggcgacactttctaacctgatgagtgctactattgcagga

SEQ ID NO: 602649 - DNA, 75 bp, synthetic construct
  source 1..75: mol_type = other DNA
cgtattcttagcccggcaaccgagccttcgcaggtcacatttgaaaatctgtcgttcagcgaaacgccgccaaaa

SEQ ID NO: 602650 - DNA, 75 bp, synthetic construct
  source 1..75: mol_type = other DNA
aggaagcggaagccctgcgcgatgcactgcgcgcgcagaatctgaatgtgcatctgattggtcgggcaacgaaaa

SEQ ID NO: 602651 - DNA, 75 bp, synthetic construct
  source 1..75: mol_type = other DNA
attacctcaccacgctgagtaatcaggcggtggtttccctgttgtaccataaaaagctggatgatgagtggcgtc

SEQ ID NO: 602652 - DNA, 75 bp, synthetic construct
  source 1..75: mol_type = other DNA
aacagtatgaagcgcagttagccgaaaaagtggtacgtttgcaaagtatgatggcaccgttttctgacctggttc

SEQ ID NO: 602653 - DNA, 75 bp, synthetic construct
  source 1..75: mol_type = other DNA
agggacgaactggacgagccacaggaaaaaatcattaacccggttcaggaacataaaaacacatccgcttgccgc

SEQ ID NO: 602654 - DNA, 75 bp, synthetic construct
  source 1..75: mol_type = other DNA
tcaatcagttgatgggcgcgatgattgcgggtgtgcgcaataatcctgttctacgccataagctgttccagattg

SEQ ID NO: 602655 - DNA, 75 bp, synthetic construct
  source 1..75: mol_type = other DNA
ccggaaacgttatgcaagaatctggaaacattaagccagacgcacaaggtcgaacgtctggctctgtttgatcag

SEQ ID NO: 602656 - DNA, 75 bp, synthetic construct
  source 1..75: mol_type = other DNA
gtgcgaaaccatttttgtcgacccgccgcgcagcggtctggacagtgaaaccgagaaaatggtgcaggcgtatcc

SEQ ID NO: 602657 - DNA, 75 bp, synthetic construct
  source 1..75: mol_type = other DNA
tatttgcagcatcaataacaggctcattcttgaaaagttacaaaggattatcgattcgtacctcaatagaaatgc

SEQ ID NO: 602658 - DNA, 75 bp, synthetic construct
  source 1..75: mol_type = other DNA
atgtataaaaacgccgaggatataactttgtcaattaaaaatataaagcgcattattacggcctggaaaccatct

SEQ ID NO: 602659 - DNA, 75 bp, synthetic construct
  source 1..75: mol_type = other DNA
aaacaaaattgtattataaaggaatctttttcacctaaatttgaaaaaactcgccgaaatgaaatccagcgattt

SEQ ID NO: 602660 - DNA, 75 bp, synthetic construct
  source 1..75: mol_type = other DNA
gctttgcaaggtactgacttgaaagagaaattctatgattatcttgtgaagcaccataatgaagatagtcagatc

SEQ ID NO: 602661 - DNA, 75 bp, synthetic construct
  source 1..75: mol_type = other DNA
gaaaaattttgttccatggccaaaccaaagaatccgttttatctttttcatccggtattaatgtgatttgtgggg

SEQ ID NO: 602662 - DNA, 75 bp, synthetic construct
  source 1..75: mol_type = other DNA
ttatgaatctaaaaataacatccagaagcggttagatgaaatctctgaactattagccaggttcactctactata

SEQ ID NO: 602663 - DNA, 75 bp, synthetic construct
  source 1..75: mol_type = other DNA
catcagccgtctgttcgagctcggcacactgaacgttatggagattgcagccatttccggtcaccgctccctgaa

SEQ ID NO: 602664 - DNA, 75 bp, synthetic construct
  source 1..75: mol_type = other DNA
agggcaacgcgcatccacttacccaatgtggttgagcaaatagacttcgatcactttcatgtggcgaaacaactg

SEQ ID NO: 602665 - DNA, 75 bp, synthetic construct
  source 1..75: mol_type = other DNA
cagtggcgctgacgcggcggatctcggtgatttccggcggccctggcaccggtaaaacgaccaccgtagcgaagt

SEQ ID NO: 602666 - DNA, 75 bp, synthetic construct
  source 1..75: mol_type = other DNA
gtctgtttgccgctttcacggctggagaacaacgaagcctcgcccccgctcctggcgacctgcgtcagtgaaatc

SEQ ID NO: 602667 - DNA, 75 bp, synthetic construct
  source 1..75: mol_type = other DNA
gctgtgctggatattaatgcctgaaacgttaaaagggctgtggaaacagcgcctgcgctgggctcagggcggtgc

SEQ ID NO: 602668 - DNA, 75 bp, synthetic construct
  source 1..75: mol_type = other DNA
ctcgtattcgaacacgttctaccctggtgggtaaaattcaggttggcgagtattcctcaattattggtttgatca

SEQ ID NO: 602669 - DNA, 75 bp, synthetic construct
  source 1..75: mol_type = other DNA
atgctgaagattccggacttactgtatctgcttacatccgaaatgcagcactgaataagcgaattaactcccgta

SEQ ID NO: 602670 - DNA, 75 bp, synthetic construct
  source 1..75: mol_type = other DNA
cgatgctatcgaatttccattacccgataaacatcagttgttagaattgatgaagctcaagcttcgtggtattcg

SEQ ID NO: 602671 - DNA, 75 bp, synthetic construct
  source 1..75: mol_type = other DNA
tggcgttaaaattacgcggcacccgccgtcagtttgagctggacgatagcgagctattatccctgctgctcggga

SEQ ID NO: 602672 - DNA, 75 bp, synthetic construct
  source 1..75: mol_type = other DNA
aaagtcgtcgatatgatggaaaccggatctaatgacgttctcgtcattaaggcaaacctgaaagatgcgtttggt

SEQ ID NO: 602673 - DNA, 75 bp, synthetic construct
  source 1..75: mol_type = other DNA
atcgacggcaagcgtgtcggggacagagagtatgcggaggtgctgatcgctattacggagtatcaccgggccctg

SEQ ID NO: 602674 - DNA, 75 bp, synthetic construct
  source 1..75: mol_type = other DNA
ctgacgaccgtatgattgatgagattatgcgtcttggccgccttcagaagcatctgtttgtggagggaaaacgca

SEQ ID NO: 602675 - DNA, 75 bp, synthetic construct
  source 1..75: mol_type = other DNA
aagctgaagattccggacttactgtatctgcttacatccgaaatgcagcactgaataagcgaattaactcccgga

SEQ ID NO: 602676 - DNA, 75 bp, synthetic construct
  source 1..75: mol_type = other DNA
gcctgcgctgggctcagggcggtgcagaagtattcctcaaaaatatgacaaggttgtggcgcaaagaaaactttc

SEQ ID NO: 602677 - DNA, 75 bp, synthetic construct
  source 1..75: mol_type = other DNA
cggattggcacggtgatattgcatttcgaagcaagaatctctaccttccccccttttttgtctggaggggatatg

SEQ ID NO: 602678 - DNA, 75 bp, synthetic construct
  source 1..75: mol_type = other DNA
tttcaaaagcgcctggcgtaccgcacttctggacctgaaaatagaaaatctgcattttcacgatctccgtcatga

SEQ ID NO: 602679 - DNA, 75 bp, synthetic construct
  source 1..75: mol_type = other DNA
gtttcttgccgttatatctggtggcgatatacctctacgctgaactgggacgatccggtcagcctggtgtgcggg

SEQ ID NO: 602680 - DNA, 75 bp, synthetic construct
  source 1..75: mol_type = other DNA
cataaaaaaggtcatctgcaggagttttatcgcgtcaatgtgattaaacgtcaccctatggccgagcgctatatg

SEQ ID NO: 602681 - DNA, 75 bp, synthetic construct
  source 1..75: mol_type = other DNA
tttcgaccttgaaacccgtgcagaaccccgggaactggcaatatctcatgccagcgtattgttgctgcgcacact

SEQ ID NO: 602682 - DNA, 75 bp, synthetic construct
  source 1..75: mol_type = other DNA
aactggtcagaaaacccaaaatcagtagcgggcgcgatcgtcgcctgacttcaggagaagaacgccgactttcgc

SEQ ID NO: 602683 - DNA, 75 bp, synthetic construct
  source 1..75: mol_type = other DNA
tcatcaactgaaaagatggaaaaaaaacagtgtcatgaggtttacgcaggcaaaaccagcgttattcacatggct

SEQ ID NO: 602684 - DNA, 75 bp, synthetic construct
  source 1..75: mol_type = other DNA
cccggaagtgatgctcggcatggtgcctggctggatgggcattgaacgtgtgcttaatcaggttggtccggtggt

SEQ ID NO: 602685 - DNA, 75 bp, synthetic construct
  source 1..75: mol_type = other DNA
ctggcaacgacattggtatcatttacacgagtcatgttgatgcctaaaaagcaacgcgcccgttgggtaagtccc

SEQ ID NO: 602686 - DNA, 75 bp, synthetic construct
  source 1..75: mol_type = other DNA
tcaatggatgaacgagctgcctgagcgcgttagccataaaacacagcatcttgatgagaaaaaagagctcggtca

SEQ ID NO: 602687 - DNA, 75 bp, synthetic construct
  source 1..75: mol_type = other DNA
aaaaacagtgtcatgaggtttacgcaggcaaaaccagcgttattcacatggctgaatagctatgcatacggttaa

SEQ ID NO: 602688 - DNA, 75 bp, synthetic construct
  source 1..75: mol_type = other DNA
aggaagcaacattacttaccgaacaataaatgattatggcgcacttactccaaaaatgacgggcgtaatggaata

SEQ ID NO: 602689 - DNA, 75 bp, synthetic construct
  source 1..75: mol_type = other DNA
attcatcgccatgcccggtgggctggattattcccgcgccattgtggtggcttcagtgaaagaagcaccaatcgg

SEQ ID NO: 602690 - DNA, 75 bp, synthetic construct
  source 1..75: mol_type = other DNA
acatccgttctctgcgtaaaatcgccaatgaaattggtgatgaagagttcttagtgttcgctgaaaaggttgagg

SEQ ID NO: 602691 - DNA, 75 bp, synthetic construct
  source 1..75: mol_type = other DNA
aacaaaacagcctaaatgcgttacaaaacgagccagaagcacaaccggaaaccgaaaaagcctgcgattcctgcg

SEQ ID NO: 602692 - DNA, 75 bp, synthetic construct
  source 1..75: mol_type = other DNA
acgcagccgctggatgctcagtcacagatagatacgaagtacgagaagttacgggccgaactccacgaggcacgg

SEQ ID NO: 602693 - DNA, 75 bp, synthetic construct
  source 1..75: mol_type = other DNA
gatgatgtggagaaaaacgaatccccggacagcgacgatgactgttctgagtgtgaaattcccgtcgccactctg

SEQ ID NO: 602694 - DNA, 75 bp, synthetic construct
  source 1..75: mol_type = other DNA
agggattagcacagaaaaaggatttgatatttgtgcgtaacggcgatgaacatacctgcgatgaagcggtttccc

SEQ ID NO: 602695 - DNA, 75 bp, synthetic construct
  source 1..75: mol_type = other DNA
cgtcatcgattaccgggaagccgtatattgtgaagatccccggtaagagcgatgagaacgcacagccttttttac

SEQ ID NO: 602696 - DNA, 75 bp, synthetic construct
  source 1..75: mol_type = other DNA
cagtttattgataaggttgcttcgtcgtcatcgattaccgggaagccgtatattgtgaagatccccggtaagagc

SEQ ID NO: 602697 - DNA, 75 bp, synthetic construct
  source 1..75: mol_type = other DNA
tatcgtgaagatgcccggtaagagcgatgagaacgcacagccttttttacatgcgttaattgcgcagacggataa

SEQ ID NO: 602698 - DNA, 75 bp, synthetic construct
  source 1..75: mol_type = other DNA
cccggatccggaaatcgtggaaattgcctgcggtcgctcatcagccccgatgccgcagcgcggaacagcagaaga

SEQ ID NO: 602699 - DNA, 75 bp, synthetic construct
  source 1..75: mol_type = other DNA
catatcaaatgccaaggatattacagcgtctggaatgatatcatctggaacattaaaatccacagggttaacaga

SEQ ID NO: 602700 - DNA, 75 bp, synthetic construct
  source 1..75: mol_type = other DNA
tttcaaatagatacaagttagataataggaaaatatatatagtggggggctccatgggagggtacgctgcattaa

SEQ ID NO: 602701 - DNA, 75 bp, synthetic construct
  source 1..75: mol_type = other DNA
gccttttgatagagagtatatcctaaaaaaatatgaacacacgtataaatacattgattatttattatatccatc

SEQ ID NO: 602702 - DNA, 75 bp, synthetic construct
  source 1..75: mol_type = other DNA
tcgcagaagagatcggtgaaatcgaaaatattggacgctgggtcatcgcggaagcttgccgtcagttagcagaat

SEQ ID NO: 602703 - DNA, 75 bp, synthetic construct
  source 1..75: mol_type = other DNA
gtgcctgctgaggtgacctgggtgccgttacgggcagaaacagttgttcagcagcgccttactgcagccctgaca

SEQ ID NO: 602704 - DNA, 75 bp, synthetic construct
  source 1..75: mol_type = other DNA
gcatttgcggagagaccaggttttatgctggccgcagaggcgctgcgccttttgacccgtcaggacaatgcgcgg

SEQ ID NO: 602705 - DNA, 75 bp, synthetic construct
  source 1..75: mol_type = other DNA
acgccggctggggatgggcaatccgaaactgattgtggatgcccggggctggtcagtgaaacgtaacaggagagc

SEQ ID NO: 602706 - DNA, 75 bp, synthetic construct
  source 1..75: mol_type = other DNA
tcgccggaaaaaatgatttcaggaaatccggatatcagaatggcggagataattctgaaatcagaggtggaactg

SEQ ID NO: 602707 - DNA, 75 bp, synthetic construct
  source 1..75: mol_type = other DNA
cagatgattaatgcgcacaaagcagttatccgtgcaggttatgaacgcattactgaatgtggaggtgactgtgat

SEQ ID NO: 602708 - DNA, 75 bp, synthetic construct
  source 1..75: mol_type = other DNA
cgtgggaagtatattcaccatctttagataagatacgtaaccggcttccattaaaggattcagtggtaaaattgg

SEQ ID NO: 602709 - DNA, 75 bp, synthetic construct
  source 1..75: mol_type = other DNA
cgctgcgccggagccagcaggcgcgcatccgcgcacagaagaacgcagacggttcgccgtatccggcacgaaaac

SEQ ID NO: 602710 - DNA, 75 bp, synthetic construct
  source 1..75: mol_type = other DNA
tcatggacagatgtggcgcggcaactgcgtcatgcaatcggggaccgaccagtaattatctttaatgcccggttc

SEQ ID NO: 602711 - DNA, 75 bp, synthetic construct
  source 1..75: mol_type = other DNA
ccgtaaccgcattgacactgccgagcagtttattgataaggttgcttcgtcgtcatcgattaccgggaagccgta

SEQ ID NO: 602712 - DNA, 75 bp, synthetic construct
  source 1..75: mol_type = other DNA
attggtattcagggctctatttacaacctcagcactttcagtcaattgacttgcatcatggcttcatgcttgcca

SEQ ID NO: 602713 - DNA, 75 bp, synthetic construct
  source 1..75: mol_type = other DNA
tgcattatcagagattaaaattgctccagaggaacatatggggcttataattcagcatgctcttccaggcattgg

SEQ ID NO: 602714 - DNA, 75 bp, synthetic construct
  source 1..75: mol_type = other DNA
ctataagaataaacttgaagaataccgatatacagaacgaacagtagtagatgggcatctttatgattttatgat

SEQ ID NO: 602715 - DNA, 75 bp, synthetic construct
  source 1..75: mol_type = other DNA
ttaattccggacataaaaatgtatctggcatcaatgataaacgcggctctgccagatgggtaagttccgatgatg

SEQ ID NO: 602716 - DNA, 75 bp, synthetic construct
  source 1..75: mol_type = other DNA
cagatacattagtctgtgattttgatgattacagttcaataaataattcagatcactatattaaattaacttcag

SEQ ID NO: 602717 - DNA, 75 bp, synthetic construct
  source 1..75: mol_type = other DNA
atcaatgatgatcttcttaaggaagatactgtcagagttgaaaaaataaaggctgttttatcttcagggtattat

SEQ ID NO: 602718 - DNA, 75 bp, synthetic construct
  source 1..75: mol_type = other DNA
caaaaatagaagccagaggaagaagtggggcgagtgggtaatgtgcttaagttttgttacgttgggtatgatggc

SEQ ID NO: 602719 - DNA, 75 bp, synthetic construct
  source 1..75: mol_type = other DNA
tgtgctgtgcaattgtcaccaccgcattcatttccgccgggacacatgccgcttcctggaaagatgcgctttcca

SEQ ID NO: 602720 - DNA, 75 bp, synthetic construct
  source 1..75: mol_type = other DNA
aagcgcagataacatgaacaacgccgcaggcattctgcaatactgcgcgaagcaaaagctggcgtcggtaaccga

SEQ ID NO: 602721 - DNA, 75 bp, synthetic construct
  source 1..75: mol_type = other DNA
gcaaggatcattcacagcaacaacacattatgtattgatgatgagtattcatttcctgccctgagattatctgct

SEQ ID NO: 602722 - DNA, 75 bp, synthetic construct
  source 1..75: mol_type = other DNA
agcgcatccagtacggatttggggacgaaaaccacatcgtcgtttgattacggcactaaatccacgaataacact

SEQ ID NO: 602723 - DNA, 75 bp, synthetic construct
  source 1..75: mol_type = other DNA
atggatgttgagcatggccagtacagcgtcaccctgctggttgaaggttttccgccttcacatgccgggaccatt

SEQ ID NO: 602724 - DNA, 75 bp, synthetic construct
  source 1..75: mol_type = other DNA
ataaatgatgatcttctgaaagaatatactgtcagaatcgaaaaaataaaagcagtgttatcttcaggacattat

SEQ ID NO: 602725 - DNA, 75 bp, synthetic construct
  source 1..75: mol_type = other DNA
tcgattgttttaaataccatgagtatgtttggcgcgccatttggtatttttattgccatgctggtgatggataaa

SEQ ID NO: 602726 - DNA, 75 bp, synthetic construct
  source 1..75: mol_type = other DNA
gcgatcgcccatcacggtcgcaaacataaagaagatatggaagcgcgccacgaacagttaaccaaaggtggcatc

SEQ ID NO: 602727 - DNA, 75 bp, synthetic construct
  source 1..75: mol_type = other DNA
atgggtgccagcgacgggctatgtaagcttcagcgatgcagctcacgcaataacggactatatcgttggatatta

SEQ ID NO: 602728 - DNA, 75 bp, synthetic construct
  source 1..75: mol_type = other DNA
atgaagaaaatcatttgtctggtcattacactactaatgacactccccgcttacgcgaagttaactgcccatgaa

SEQ ID NO: 602729 - DNA, 75 bp, synthetic construct
  source 1..75: mol_type = other DNA
cacccagcagcaacgtctgcgcacagcgatcgcccatcacggtcgcaagcataaagaagatatggaagcgcgcca

SEQ ID NO: 602730 - DNA, 75 bp, synthetic construct
  source 1..75: mol_type = other DNA
tatgtacgtttgctatgcctcggcagtgtatgtccctgagatctggccgacagaggccaaattacgtggctccgg

SEQ ID NO: 602731 - DNA, 75 bp, synthetic construct
  source 1..75: mol_type = other DNA
tcgaaattaccgttcgtgatgacctttccatgattgccgtacaagggccgaatgcgcaggcaaaagctgccacac

SEQ ID NO: 602732 - DNA, 75 bp, synthetic construct
  source 1..75: mol_type = other DNA
ggcgctggaggagatggaaaagcaaatgatccgcgaggcgctttcacgtcataacagcaagaagcaagttgctga

SEQ ID NO: 602733 - DNA, 75 bp, synthetic construct
  source 1..75: mol_type = other DNA
atcgagtatccgggtaactgtgtggtgcaggataagtgcctgacaaatctccggggtacagatcccggcaccgta

SEQ ID NO: 602734 - DNA, 75 bp, synthetic construct
  source 1..75: mol_type = other DNA
gtcggtccaataagcgcacagcttggttttgcgttgggatattattgccagtggcgtagcaaaaatagaagccag

SEQ ID NO: 602735 - DNA, 75 bp, synthetic construct
  source 1..75: mol_type = other DNA
actggtagccggtgatcctcaaaatccaaagaaaaaaatgataatcatagcgacacattcaccttcaatactacc

SEQ ID NO: 602736 - DNA, 75 bp, synthetic construct
  source 1..75: mol_type = other DNA
ccgcgaaaaagacctctcctggataacccaacacgctgaacccttcggcgttgaaattaccgttcgtgatgacct

SEQ ID NO: 602737 - DNA, 75 bp, synthetic construct
  source 1..75: mol_type = other DNA
ctacgaatatattatgacgccggttgccaccaccattatcagtatggtgctgttcgccttctccacatgggtttc

SEQ ID NO: 602738 - DNA, 75 bp, synthetic construct
  source 1..75: mol_type = other DNA
tattttggtctaccggaagcgttgatgaatcgctttgtcggtctggtgtcctttaccgcgatgttcggttccctg

SEQ ID NO: 602739 - DNA, 75 bp, synthetic construct
  source 1..75: mol_type = other DNA
agcttggactggcctcggcaccgatgtttttcctcgcaacgattttttattttattcccttctgtctgatcatcg

SEQ ID NO: 602740 - DNA, 75 bp, synthetic construct
  source 1..75: mol_type = other DNA
gattcccgtagtctgtatatctcttcacagatgggggtaaatctcatgaagtggcgtttgcgtacatcctccagt

SEQ ID NO: 602741 - DNA, 75 bp, synthetic construct
  source 1..75: mol_type = other DNA
gtgccccagacgacgtcgccgacagggatcatctgcggttcaccgaaatgctcctgcgcgccccgacagcagaac

SEQ ID NO: 602742 - DNA, 75 bp, synthetic construct
  source 1..75: mol_type = other DNA
cagaatttgtttcgttaaataaaaactcagaagccggtgtctacgcgtgggtaaaaagttcgctgggcgggcgtt

SEQ ID NO: 602743 - DNA, 75 bp, synthetic construct
  source 1..75: mol_type = other DNA
cggcaaagcggttctctatgatacagggcttgcctggccggagggggacagtgggcaacaactgattattccctg

SEQ ID NO: 602744 - DNA, 75 bp, synthetic construct
  source 1..75: mol_type = other DNA
acttttctgggggttaaagagtttgccggaagggtggatcaacattgctgaacgttggcaatggctatcattttc

SEQ ID NO: 602745 - DNA, 75 bp, synthetic construct
  source 1..75: mol_type = other DNA
tcgctgacattactgttttttctttggggcgtattagcggcgaagcaaattttatgggcaggagaaaccttaacc

SEQ ID NO: 602746 - DNA, 75 bp, synthetic construct
  source 1..75: mol_type = other DNA
gtaatcaataccgaaaataatagtgcattcctcattcagtcctgggtcagtaacgcatcaggtcagaaaagtaaa

SEQ ID NO: 602747 - DNA, 75 bp, synthetic construct
  source 1..75: mol_type = other DNA
attgcaaatctattagcaattcccttggtgacatttatcacggttccgttgatcctcgccgcgatggttgtgcat

SEQ ID NO: 602748 - DNA, 75 bp, synthetic construct
  source 1..75: mol_type = other DNA
ctacaaggtcgacgtcttttccctgcgccaggcatcgtgctgtatggcgagtatctgccacaagcggtttgtgcc

SEQ ID NO: 602749 - DNA, 75 bp, synthetic construct
  source 1..75: mol_type = other DNA
caagtagtgatgacatgctggggatgcgtttgcgtaattacacacccacagtgcgaggtatggcgagcagtcaag

SEQ ID NO: 602750 - DNA, 75 bp, synthetic construct
  source 1..75: mol_type = other DNA
cgtctgtcgctgtatgccgatgagcgcatattaagtgcggcaattgccacgcgcaccgagcggcgcagtggtctg

SEQ ID NO: 602751 - DNA, 75 bp, synthetic construct
  source 1..75: mol_type = other DNA
actctggataatgccttcaacaagcttgccctgaatggcaaaggggtgccgctttcaggcagaactgtcagtttt

SEQ ID NO: 602752 - DNA, 75 bp, synthetic construct
  source 1..75: mol_type = other DNA
gcggtaacggtgccgttgataacatccttaataaatatggctggagtcctgaacaggttaaaggtttccagactg

SEQ ID NO: 602753 - DNA, 75 bp, synthetic construct
  source 1..75: mol_type = other DNA
atgaaaagtggatttatgtttatagtacctgctttattatgtgcaatagcttccattatgctggctgttggaatg

SEQ ID NO: 602754 - DNA, 75 bp, synthetic construct
  source 1..75: mol_type = other DNA
gccgggcagctaagccgcctgacgggaactcacgttccggcaggaactggcacagacgcggcatctttgcgcgac

SEQ ID NO: 602755 - DNA, 75 bp, synthetic construct
  source 1..75: mol_type = other DNA
caacgcgggctttacccccgagcgtgccgggcagttgagccgcctgacgggaagccacgttccagcaggaactgg

SEQ ID NO: 602756 - DNA, 75 bp, synthetic construct
  source 1..75: mol_type = other DNA
acgctgataaggtggcaaaggcagaagctaaagcgaaagctaaagccgctatagctgccgataaacagatccgcg

SEQ ID NO: 602757 - DNA, 75 bp, synthetic construct
  source 1..75: mol_type = other DNA
cctggctggcgttccggagaaagggcggctgacggtgagcagtggaggaaaacagtgtcatgtcgattttagcct

SEQ ID NO: 602758 - DNA, 75 bp, synthetic construct
  source 1..75: mol_type = other DNA
ggattacaccgtgtatcggggggggcaagttgtgttcaccctgaaacgccctgacggcagcgttctgccgtttgg

SEQ ID NO: 602759 - DNA, 75 bp, synthetic construct
  source 1..75: mol_type = other DNA
tttaaagaacttggaagctcaacggctgaaatgatgagcgcctttgctggtgctgtatcgtggcttactgctgca

SEQ ID NO: 602760 - DNA, 75 bp, synthetic construct
  source 1..75: mol_type = other DNA
ttaaagacgttcaggaacgtttaggtgaatccgtagggaataccaaatgggacgctaagaaaggtcgctgggctg

SEQ ID NO: 602761 - DNA, 75 bp, synthetic construct
  source 1..75: mol_type = other DNA
ggcggcatggttgattggggtcgtagtgctttaggcttatcgcctatccctggcacggaagacaagccaacgact

SEQ ID NO: 602762 - DNA, 75 bp, synthetic construct
  source 1..75: mol_type = other DNA
gcataatttgcggaatttttccgctgctgattttgccgcaattgcctgggacattgacccttgcgtgtctgactg

SEQ ID NO: 602763 - DNA, 75 bp, synthetic construct
  source 1..75: mol_type = other DNA
acgttgctatcccagccagtggttgagagttagcaatcgccgtgtggtgttgtacttatattctggaattgccag

SEQ ID NO: 602764 - DNA, 75 bp, synthetic construct
  source 1..75: mol_type = other DNA
tatctcggtggaggtattgaaagatgcgaggatctcattaataaatatgttgaagatatcattactgctgtaaaa

SEQ ID NO: 602765 - DNA, 75 bp, synthetic construct
  source 1..75: mol_type = other DNA
tcattgaaagtattgatgaaaatgttgaaaaagctgtgctccttaagttttatctcggtggaggtattgaaagat

SEQ ID NO: 602766 - DNA, 75 bp, synthetic construct
  source 1..75: mol_type = other DNA
atgatgatgtgacgacctggtctatcgagtgcgaaagcgctggccaggtaactgtaaccgatccggttgctgcgt

SEQ ID NO: 602767 - DNA, 75 bp, synthetic construct
  source 1..75: mol_type = other DNA
gcgtcacgttattaaccctggtgaaacaaccggatctcagccttatgtgtggcttaaacttgtttctccggttga

SEQ ID NO: 602768 - DNA, 75 bp, synthetic construct
  source 1..75: mol_type = other DNA
tgtacttatattctggaattgccagagatggaatcaaagataagcccagcgcggcgcaaaaccgctggaaaaacc

SEQ ID NO: 602769 - DNA, 75 bp, synthetic construct
  source 1..75: mol_type = other DNA
tcccctggccgacgttactttcggtctgcattcatggtgctgttgtggcgggtttgctctatacctcggtacatc

SEQ ID NO: 602770 - DNA, 75 bp, synthetic construct
  source 1..75: mol_type = other DNA
attatttacgtggtccagcttgcaggtgtaccgttaaatattgaattgacacatatcgccgagacacatactgca

SEQ ID NO: 602771 - DNA, 75 bp, synthetic construct
  source 1..75: mol_type = other DNA
attattgtgtacgttatgtttactgcaatttattgtcagcctgatgatcgagaatcgctatgagcataatctgac

SEQ ID NO: 602772 - DNA, 75 bp, synthetic construct
  source 1..75: mol_type = other DNA
ccattcaaagaattggaatcattatttgagcctttgaatgtttaccctttttactattttatgccatttttattt

SEQ ID NO: 602773 - DNA, 75 bp, synthetic construct
  source 1..75: mol_type = other DNA
aaaaaagaatatcttgggtattatttgcaaataatagatgtggaaattaataatattgcctcaaaaatatttata

SEQ ID NO: 602774 - DNA, 75 bp, synthetic construct
  source 1..75: mol_type = other DNA
aaaataaatcatcctctaaagtcatggttagaagttattgaaagaatgtcattaaaaacaaaagacaaattggat

SEQ ID NO: 602775 - DNA, 75 bp, synthetic construct
  source 1..75: mol_type = other DNA
acggcatgtaatgtcgccgggcactgctaccggaaatcaaccatatgtgtggctgaaaattgtcagtgccaccga

SEQ ID NO: 602776 - DNA, 75 bp, synthetic construct
  source 1..75: mol_type = other DNA
gcgttcctgcgccggttgcattcgattcctgtttgtaattgtccttttaacagcgatcgcgcatttcgtctcgct

SEQ ID NO: 602777 - DNA, 75 bp, synthetic construct
  source 1..75: mol_type = other DNA
tcgaagagcgcccaaaccatcaacgcggaaccgtctggcacaaaaagggatttgatttcctgcttaacgataata

SEQ ID NO: 602778 - DNA, 75 bp, synthetic construct
  source 1..75: mol_type = other DNA
aggttcgtcattatgtcgggctgttggaaggcaccgacacccaactgctggatacgcgaaaaaccttgccaggtc

SEQ ID NO: 602779 - DNA, 75 bp, synthetic construct
  source 1..75: mol_type = other DNA
aggcttgctgatgtgctggccgctgtggcaaaaacctcgacctgacgagtggcaggtgtacatgcttgatgtcgg

SEQ ID NO: 602780 - DNA, 75 bp, synthetic construct
  source 1..75: mol_type = other DNA
caacctggatgctgatttatatgggtatagatgggctcgcgataatgtcgggcaatcaggtgcgacaatctatcg

SEQ ID NO: 602781 - DNA, 75 bp, synthetic construct
  source 1..75: mol_type = other DNA
cttgctcgaggcagcgattaaattccaacctggatgctgatttatatgggtataaatgggctcgcgataatgtcg

SEQ ID NO: 602782 - DNA, 75 bp, synthetic construct
  source 1..75: mol_type = other DNA
attaggctcttgtgtgctgattgccatgaacgttgtgcagtacacactaattaactggttgcgggtgatgctgcc

SEQ ID NO: 602783 - DNA, 75 bp, synthetic construct
  source 1..75: mol_type = other DNA
gactcagggaattaatttaaaagattccattgtcttaaataccatgagtatgtttggcgcaccatttggtatttt

SEQ ID NO: 602784 - DNA, 75 bp, synthetic construct
  source 1..75: mol_type = other DNA
gatgggactcacgccgctgattagcgcagagtggaactggcgagtacaactgcttattcccgcaatattgtcgct

SEQ ID NO: 602785 - DNA, 75 bp, synthetic construct
  source 1..75: mol_type = other DNA
gttgattccggagtagcatttgtaggaggcctcagcgacagcgaatttgccaaattcagttttactcaggatggt

SEQ ID NO: 602786 - DNA, 75 bp, synthetic construct
  source 1..75: mol_type = other DNA
agtggcagctctggcacagtaccggaaaggagaaacacctgtattgcatggtggagggatcaccggaagtcggtt

SEQ ID NO: 602787 - DNA, 75 bp, synthetic construct
  source 1..75: mol_type = other DNA
ctggtttcaccgaatatatgcccggtagaaatcgcggaacgtggtccagtcgggtttcctttattggcaactggt

SEQ ID NO: 602788 - DNA, 75 bp, synthetic construct
  source 1..75: mol_type = other DNA
attgctctggacagtattttttcaacggttgccgctaactggttccaactcaaaagcaaaagcgttacccctgat

SEQ ID NO: 602789 - DNA, 75 bp, synthetic construct
  source 1..75: mol_type = other DNA
tatctcctcaggcattagagattctggaagtgatgaagccaatcagtgctcatcgtgaacatgtttttccgagca

SEQ ID NO: 602790 - DNA, 75 bp, synthetic construct
  source 1..75: mol_type = other DNA
tagtgaaaaccagcggcaagaaactctggcgctttcgctatcaacgtccggcaacaaagcaacggacaatgatgg

SEQ ID NO: 602791 - DNA, 75 bp, synthetic construct
  source 1..75: mol_type = other DNA
aaagcccgaacattaattgaagctcttgagtccgtcaaagctcgaggggcgctagagaccgttcgtcgactggtg

SEQ ID NO: 602792 - DNA, 75 bp, synthetic construct
  source 1..75: mol_type = other DNA
agaagtgatgaagccaatcagtgcccatcgagaacatgtttttcctagcagaaatgaccctaagctgccaatgaa

SEQ ID NO: 602793 - DNA, 75 bp, synthetic construct
  source 1..75: mol_type = other DNA
gcttgagactgttcgtcgactggtgcagcgcataaacgagatcatgatttatgcggttaacaccggtttgattga

SEQ ID NO: 602794 - DNA, 75 bp, synthetic construct
  source 1..75: mol_type = other DNA
tcgtatcacatggtttacgttctatcgctagtacggcgctcaatgaggaaggatttccgcctgatgttattgagg

SEQ ID NO: 602795 - DNA, 75 bp, synthetic construct
  source 1..75: mol_type = other DNA
attagagacagtccgacgcctttgtcagcgtattaacgaggtcatgatttatgcgcagaacacaggcttgattga

SEQ ID NO: 602796 - DNA, 75 bp, synthetic construct
  source 1..75: mol_type = other DNA
tatgccgaggatatctggcgctcgcttgagagagatgttttcccagcaatcggtgatatcagtgtcactgagatt

SEQ ID NO: 602797 - DNA, 75 bp, synthetic construct
  source 1..75: mol_type = other DNA
agaattgccgaagctgatgcgttctttagtcatgtcaaatctgtctgttccgactcgctgtctaatcgaatggca

SEQ ID NO: 602798 - DNA, 75 bp, synthetic construct
  source 1..75: mol_type = other DNA
gctaagcgggaacacattgttcctttatcacctcaggcattagatattttggaagtaatgaagcctattagtgct

SEQ ID NO: 602799 - DNA, 75 bp, synthetic construct
  source 1..75: mol_type = other DNA
cgactcgctgtcttattgaatggcagctcctaacccttgtgcgcccttctgaagcttccggtactcggtggtcag

SEQ ID NO: 602800 - DNA, 75 bp, synthetic construct
  source 1..75: mol_type = other DNA
cgaagtacgtcgcgcttataatcgctcggtttatttagaaaaacgtaagcaactaatgaatgattgggggcaaat

SEQ ID NO: 602801 - DNA, 75 bp, synthetic construct
  source 1..75: mol_type = other DNA
gggcagtacggcgctgcatgaagccggatttatgccggatgcggtggaagcagttttgtcacatattgatgaaaa

SEQ ID NO: 602802 - DNA, 75 bp, synthetic construct
  source 1..75: mol_type = other DNA
cattcgctgtatgtctttcccggcagggttaaacgcagccagccaatgcacagtgagacggtcaacaaggcatta

SEQ ID NO: 602803 - DNA, 75 bp, synthetic construct
  source 1..75: mol_type = other DNA
cgaaaaaatggcacatacacaggcttaccgcaaaatgcaaataccgcacaaaattctgaacaaccagaaccggta

SEQ ID NO: 602804 - DNA, 75 bp, synthetic construct
  source 1..75: mol_type = other DNA
tgtcaccacaagcattagaaattcttgagataatgaaaccgattagctttcaccgtgcgcatgtttttccgagca

SEQ ID NO: 602805 - DNA, 75 bp, synthetic construct
  source 1..75: mol_type = other DNA
gcagtttacctggttcagcgtgtggaactgatgaattggtgggggcagaagatcagtgaggcatctgtgactgta

SEQ ID NO: 602806 - DNA, 75 bp, synthetic construct
  source 1..75: mol_type = other DNA
gcaggaggaagccgaacgggagcggctggcggtggagagcctgtttattaatgtggcgacgagatggttcgcggt

SEQ ID NO: 602807 - DNA, 75 bp, synthetic construct
  source 1..75: mol_type = other DNA
ggcttggtgctttccccgccctttcacttgctgacgcccgagggttaagagcggattaccttgccttgttagcca

SEQ ID NO: 602808 - DNA, 75 bp, synthetic construct
  source 1..75: mol_type = other DNA
atggtatagacccacaagttcaagctgaatttatcgaagaacaacaacagatagctctagacagtattttttcga

SEQ ID NO: 602809 - DNA, 75 bp, synthetic construct
  source 1..75: mol_type = other DNA
gaaatgaccccaaacagccaatgaatagccaaactgctaatgctgctttaaaacgtattggttatggcgggaagc

SEQ ID NO: 602810 - DNA, 75 bp, synthetic construct
  source 1..75: mol_type = other DNA
tgtcccctgaagtacagaacgctgtcatggttaagttcgacacatgtgaaaacatcaccgttgatatggttatta

SEQ ID NO: 602811 - DNA, 75 bp, synthetic construct
  source 1..75: mol_type = other DNA
actgatactctctcgtcgccagtaccagaaactgatgcagtggaaacggcaattccgggcaacgaaaaaaccgaa

SEQ ID NO: 602812 - DNA, 75 bp, synthetic construct
  source 1..75: mol_type = other DNA
gcgacaaaacaacggacaatgatggggctaggtgctttccccgccctttcgcttgctgatgcccgagggttaaga

SEQ ID NO: 602813 - DNA, 75 bp, synthetic construct
  source 1..75: mol_type = other DNA
ggcttcccgcctgatgtcattgaggcagcacttgcccatgtggataagaatgaggttcgtcgtgcttataaccgc

SEQ ID NO: 602814 - DNA, 75 bp, synthetic construct
  source 1..75: mol_type = other DNA
tttataaattaggtgctcgtgctgatatgagtacccggtggtatcttgatggtgataaaagttttggctttgccc

SEQ ID NO: 602815 - DNA, 75 bp, synthetic construct
  source 1..75: mol_type = other DNA
acgggaagagatatttacgcatgggtacagggaggattgctcgatttcaatagtggttattattccaataattat

SEQ ID NO: 602816 - DNA, 75 bp, synthetic construct
  source 1..75: mol_type = other DNA
tcgtgatattgcccacgccaaactgaaagagcgcatggacaacggcgaagggttaccgcaatacatcaaagatca

SEQ ID NO: 602817 - DNA, 75 bp, synthetic construct
  source 1..75: mol_type = other DNA
gcaacataccaggaaatattcgatggagagaatcagcctgaagttcaggaaaatgatccggaggaaatggaaggc

SEQ ID NO: 602818 - DNA, 75 bp, synthetic construct
  source 1..75: mol_type = other DNA
cagtggaaacggcaattccggacaacgaaaaaaccgaatgcaaagtggaagtcgaaccatctgtagagcgtgagg

SEQ ID NO: 602819 - DNA, 75 bp, synthetic construct
  source 1..75: mol_type = other DNA
gaaacctgcgattctgtgaaccagaaccagtcagaaacggaacagaacgaccaaaaagcggaacaaaacagccca

SEQ ID NO: 602820 - DNA, 75 bp, synthetic construct
  source 1..75: mol_type = other DNA
acaacaggtggccgacattctgcgtgacccggaagccagcgaaaatgataaatatgtggcgctgcaattcctgcg

SEQ ID NO: 602821 - DNA, 75 bp, synthetic construct
  source 1..75: mol_type = other DNA
gtccgtggacgctggcagcgtggattttcctgacgctcggcattgtgctcggttccgcatgggcctattacgaac

SEQ ID NO: 602822 - DNA, 75 bp, synthetic construct
  source 1..75: mol_type = other DNA
cggagagatggggccagaattcagcaaaactatcgatctggaaactgctggcggagtcattgatcgggacaccat

SEQ ID NO: 602823 - DNA, 75 bp, synthetic construct
  source 1..75: mol_type = other DNA
gacccggaagccagcgaaaacgacaagtatgtggcactgcaattcctgcgaaactccgatatcgccgcaaaaggc

SEQ ID NO: 602824 - DNA, 75 bp, synthetic construct
  source 1..75: mol_type = other DNA
agtggaagattttccggcgtttattcttgtggatgacaaaggaaatgatttcttccaacaaatacaactcacgca

SEQ ID NO: 602825 - DNA, 75 bp, synthetic construct
  source 1..75: mol_type = other DNA
aatatgtggcgttgcaattcctgcgcaactccgatattgccgcgaaaggtattctgccaacctgccaggataccg

SEQ ID NO: 602826 - DNA, 75 bp, synthetic construct
  source 1..75: mol_type = other DNA
cacaaactgatgcagtggaaacggaaataccggacaaccaaaaaaacgaaaccaaaccggaagccgaaccatctg

SEQ ID NO: 602827 - DNA, 75 bp, synthetic construct
  source 1..75: mol_type = other DNA
ggctttccaccagatgttattgaagctgcattggcacatgtggataagaatgaggtccgtcgtgcgtataaccgc

SEQ ID NO: 602828 - DNA, 75 bp, synthetic construct
  source 1..75: mol_type = other DNA
atggcaagacaaaccaaacctctatccgttaaagaaatagaatcagccaaacccaaggaggcggactacgttctc

SEQ ID NO: 602829 - DNA, 75 bp, synthetic construct
  source 1..75: mol_type = other DNA
caacgtattaacgaaattatgatctacgctgtcaataccggattaattgaggctaatcctgcgtcaggtattggc

SEQ ID NO: 602830 - DNA, 75 bp, synthetic construct
  source 1..75: mol_type = other DNA
atgctcaaaacacaggtctgattgatgctgtccccagtgtcaatattagcaaggcatttgagaagcctcagaaaa

SEQ ID NO: 602831 - DNA, 75 bp, synthetic construct
  source 1..75: mol_type = other DNA
aaagccttcgagaagcctcagaaaaagaacatgcccagcattcgacctgaaccgccccgggaatcctggagacta

SEQ ID NO: 602832 - DNA, 75 bp, synthetic construct
  source 1..75: mol_type = other DNA
atgcccaaaacacagggctgattgatgctgttcccagcgttaatatcggtaaagccttcgagaagcctcagaaaa

SEQ ID NO: 602833 - DNA, 75 bp, synthetic construct
  source 1..75: mol_type = other DNA
acttcgatgccagaacggctattccattcgaaggtgagcgccataatgcacttgatgacgcccgttaccaggcaa

SEQ ID NO: 602834 - DNA, 75 bp, synthetic construct
  source 1..75: mol_type = other DNA
cattaaatggtggcttaagcaatcacgcgaagcgcaatctgccattatgaccgatgaaatcccgttagatgatgc

SEQ ID NO: 602835 - DNA, 75 bp, synthetic construct
  source 1..75: mol_type = other DNA
aatccgcttcctttgttccggtcgaaccagagccgaatacagaaattgttaactttaaccagttatccgacgaca

SEQ ID NO: 602836 - DNA, 75 bp, synthetic construct
  source 1..75: mol_type = other DNA
gtaacaaaacagcggaccatgattagtttaggaaccttccctgcactatccttggctgaaatcagaaatgtgcga

SEQ ID NO: 602837 - DNA, 75 bp, synthetic construct
  source 1..75: mol_type = other DNA
gccgcgcccgagccaaatttacctggcaattcctggagcaatatccggctgctcaggactgcgcttataaatttc

SEQ ID NO: 602838 - DNA, 75 bp, synthetic construct
  source 1..75: mol_type = other DNA
cagcatccatcgctgggcaaaaaatgaagttatcgagaacgatcgcgaagactggaagcgtatttctgcatcaat

SEQ ID NO: 602839 - DNA, 75 bp, synthetic construct
  source 1..75: mol_type = other DNA
cgaggctgtgatctggtcaaactcaaagtatctgatgttgcatatggtagctctgtttcaagcagagctacggtg

SEQ ID NO: 602840 - DNA, 75 bp, synthetic construct
  source 1..75: mol_type = other DNA
catgttgggaaacgcaaaattaaactgcgtccggaagagctacagaaagtcactggcgaacgtggacgccgcggt

SEQ ID NO: 602841 - DNA, 75 bp, synthetic construct
  source 1..75: mol_type = other DNA
tggtgattgaagatgcttctgatatgctgctggcaatcactcaggcaggccgtatgttgatgttcccggtaagcg

SEQ ID NO: 602842 - DNA, 75 bp, synthetic construct
  source 1..75: mol_type = other DNA
aggtggtggttccaagacagtttctaccgcttcattatcacatgcttttcgagctcatcctcagcttctgttcga

SEQ ID NO: 602843 - DNA, 75 bp, synthetic construct
  source 1..75: mol_type = other DNA
tctgacatccttgagcgaaagtatccgccagcaaaaagaggaattgaagcttaccgagttctatcaggaatacag

SEQ ID NO: 602844 - DNA, 75 bp, synthetic construct
  source 1..75: mol_type = other DNA
accgtatcataggccaaaaaagaccacttcagatatctcatatctggggtatccgaatccgacttgaactggaat

SEQ ID NO: 602845 - DNA, 75 bp, synthetic construct
  source 1..75: mol_type = other DNA
atgaaaatcaatcgggaaacactccaccagctaattgagaataaactctgccaggctgggttaaaacgtgagcac

SEQ ID NO: 602846 - DNA, 75 bp, synthetic construct
  source 1..75: mol_type = other DNA
gctccccgccgccgggccgaaagggtatggcctgatgatgatgattgacgtcctctcaggcgtcttactcggctt

SEQ ID NO: 602847 - DNA, 75 bp, synthetic construct
  source 1..75: mol_type = other DNA
attgatgaacaaaccgcgtttgcgcgtaaacctgaccaccaactggcagcgttacaggaaaaaatcgccgttacg

SEQ ID NO: 602848 - DNA, 75 bp, synthetic construct
  source 1..75: mol_type = other DNA
ctcatacacgcattcctaattttgaaacaacagtacatcaaaagcacaaattcggttacgcttatgaaacaacaa

SEQ ID NO: 602849 - DNA, 75 bp, synthetic construct
  source 1..75: mol_type = other DNA
atggctactgtcctaacttccccattcgtaaaaatcgaagtcgtcaacggcaaggccgttattttctccctgcat

SEQ ID NO: 602850 - DNA, 75 bp, synthetic construct
  source 1..75: mol_type = other DNA
tggcatttcgatgtgccagtccgatccaatggtggtgccgtttggcggcgcggaaatttactacggtactaaccc

SEQ ID NO: 602851 - DNA, 75 bp, synthetic construct
  source 1..75: mol_type = other DNA
aatttaaaaaatcggcccgtaccgtcggtgacgtactgggtaaataccatccgcacggcgatagtgcctgttatg

SEQ ID NO: 602852 - DNA, 75 bp, synthetic construct
  source 1..75: mol_type = other DNA
ctggcgcgcgaacgctataaagcctaccgcgtggctggtttcaacctgaatacggcaacctggaataatggaaaa

SEQ ID NO: 602853 - DNA, 75 bp, synthetic construct
  source 1..75: mol_type = other DNA
ggtctgtcatctgttcagacatggaaaggccccggctggtctgacaggtcaggttatgtcgttacgggttcagtt

SEQ ID NO: 602854 - DNA, 75 bp, synthetic construct
  source 1..75: mol_type = other DNA
gtgcgtatttctcttcaggaattacaacttgagttattggttgaatatgcactttttttcagtgtaatgtgtggc

SEQ ID NO: 602855 - DNA, 75 bp, synthetic construct
  source 1..75: mol_type = other DNA
ggtgcggattttccttttcggcgtgtttgaactgctggtctggcagaagaaatttaaagttaaaaataaccttat

SEQ ID NO: 602856 - DNA, 75 bp, synthetic construct
  source 1..75: mol_type = other DNA
gcccgcagatgacgaccgccgaaaaggtgcgtattttccttttcggcgtgtttgaactgttaatctggcagaaga

SEQ ID NO: 602857 - DNA, 75 bp, synthetic construct
  source 1..75: mol_type = other DNA
cgtgccattattggtatggccgacggttattgtcttagccgtacttatattcacgttaacttttctggcagaaat

SEQ ID NO: 602858 - DNA, 75 bp, synthetic construct
  source 1..75: mol_type = other DNA
cacgtcctgcaattgtcgacaaactggcacagcttactggctggcaggctatcgacggatttaaagaaggtgaac

SEQ ID NO: 602859 - DNA, 75 bp, synthetic construct
  source 1..75: mol_type = other DNA
ggttatcggcgtattgattggcgtgcagattggtctcggcaatattccgccgcatctggctttaccggcactgtt

SEQ ID NO: 602860 - DNA, 75 bp, synthetic construct
  source 1..75: mol_type = other DNA
acgatgccagcaagaaaatcaccgaacaaagcgatggtttactggcgaaggtgggaatgggcatggggtctgccg

SEQ ID NO: 602861 - DNA, 75 bp, synthetic construct
  source 1..75: mol_type = other DNA
agttttctcggtagagaaatatgacgattatcagtcaaattttgtaccagcagattaccagcaaattaccacctc

SEQ ID NO: 602862 - DNA, 75 bp, synthetic construct
  source 1..75: mol_type = other DNA
atgattaaattccggctttatattccccctgtaattctcggttttgttatcgtgccattattggtatggccgacg

SEQ ID NO: 602863 - DNA, 75 bp, synthetic construct
  source 1..75: mol_type = other DNA
atccactcgacgggcaagtccggtccgctggcgcagtacattgtggaagatatttatgtctctggcgtaaaagaa

SEQ ID NO: 602864 - DNA, 75 bp, synthetic construct
  source 1..75: mol_type = other DNA
ccaaagtcgccgcagatcagtatccgttccgaatcatcggggtaacggttaaaccaaagaaagcaggtggtggct

SEQ ID NO: 602865 - DNA, 75 bp, synthetic construct
  source 1..75: mol_type = other DNA
aagcataaatgtaagcctggtgccaaatggccagaaattcaggcagagatgcgcatctggaaaaaacgtcgcgaa

SEQ ID NO: 602866 - DNA, 75 bp, synthetic construct
  source 1..75: mol_type = other DNA
cattgacggcagcatccatcgctgggcaaaaaatgaagttatcgacaaggatcgcgaagactggaagcgtatctc

SEQ ID NO: 602867 - DNA, 75 bp, synthetic construct
  source 1..75: mol_type = other DNA
tggtgcatctgacacgaccgcacaaccagagccggtaaaagttaccgctgacgaagtaaacaaaattatgcaggc

SEQ ID NO: 602868 - DNA, 75 bp, synthetic construct
  source 1..75: mol_type = other DNA
aacaaactgatccagtggagacggcggaatccaattctcaaaaaaatgaaatcctggtggaagctgaaccatctg

SEQ ID NO: 602869 - DNA, 75 bp, synthetic construct
  source 1..75: mol_type = other DNA
tgtcccttgaagtacagaacgcggtcctagttaagttcggtacatgtgaaaacatcaccgttgatatggtgatta

SEQ ID NO: 602870 - DNA, 75 bp, synthetic construct
  source 1..75: mol_type = other DNA
atacaagcagacatggaaaacactggatgaagaactggcctacgctttctggcctggtgatattgatgccggaaa

SEQ ID NO: 602871 - DNA, 75 bp, synthetic construct
  source 1..75: mol_type = other DNA
catcgagaatatatttttcctagcaggaataaccccaatcaaccaatgaacagtcagacggcaaatgcagcctta

SEQ ID NO: 602872 - DNA, 75 bp, synthetic construct
  source 1..75: mol_type = other DNA
caacgtataaacgagataatgatttatgcagttaataccggtctcattgacgccaatcctgcgtcaggcgtaggt

SEQ ID NO: 602873 - DNA, 75 bp, synthetic construct
  source 1..75: mol_type = other DNA
catcgtgagcatattttcccgagcaggaatgatccaaagcacgccatgaatagtcagacagcaaatgcagcgctg

SEQ ID NO: 602874 - DNA, 75 bp, synthetic construct
  source 1..75: mol_type = other DNA
agtgattaccttgagcaacgacgtccaatgatgcaatggtgggctgattttgttatcaaggccgacagcgggagc

SEQ ID NO: 602875 - DNA, 75 bp, synthetic construct
  source 1..75: mol_type = other DNA
cgatgatgcagtggtgggcaaaccttataaaagcggcagatagtattcctaccgtttgtaacgaagtagcaggtc

SEQ ID NO: 602876 - DNA, 75 bp, synthetic construct
  source 1..75: mol_type = other DNA
tatgatggggacgggcttactctattaatcaagtccagtggtagtaagctctggcagttccgttactatcgaccg

SEQ ID NO: 602877 - DNA, 75 bp, synthetic construct
  source 1..75: mol_type = other DNA
ccagaccaggtaaaagttaccgctgacgaagtaaacaaaattatgcaggcagccagtatcagccagcctgacgct

SEQ ID NO: 602878 - DNA, 75 bp, synthetic construct
  source 1..75: mol_type = other DNA
caaaaggtttcccggctgacgatccagaagcaaaacgcgaatacgaaaaagctgcgaaagatttctgtatcgata

SEQ ID NO: 602879 - DNA, 75 bp, synthetic construct
  source 1..75: mol_type = other DNA
agttattttggcgaccagattctttgagtaatagcgacgctttaactgcatgggaaaaacttaaatttcataaag

SEQ ID NO: 602880 - DNA, 75 bp, synthetic construct
  source 1..75: mol_type = other DNA
ctgctgagccttctgcttgacggggagcacccttcaccctaccggattatgctcccggagccgcgccagaaaccc

SEQ ID NO: 602881 - DNA, 75 bp, synthetic construct
  source 1..75: mol_type = other DNA
gaaggctcaagacaggccagatgaacaagacggaagaggcttatgcggcacacctaaagcgcataaccggcactg

SEQ ID NO: 602882 - DNA, 75 bp, synthetic construct
  source 1..75: mol_type = other DNA
ggactgataaatgtgaatgggagcgcatgggcctgttcgacacatacgtcgcagcgcgtgatgaaggtcgtgagt

SEQ ID NO: 602883 - DNA, 75 bp, synthetic construct
  source 1..75: mol_type = other DNA
taaaaggtttcccggcagacgacatgaaagcgaaacatgaatacgaaaaagcggcgaaagatttctgcatcgaca

SEQ ID NO: 602884 - DNA, 75 bp, synthetic construct
  source 1..75: mol_type = other DNA
cctgattgtggcgcggtgatgggtgacgcaacataccaggaaacattcgatgaagagaatcaggttgaagttcag

SEQ ID NO: 602885 - DNA, 75 bp, synthetic construct
  source 1..75: mol_type = other DNA
aatttaacgctatgtatccggatcttaatctgtttgctatcggttgggttaatcataaatgtaatcctggtgcca

SEQ ID NO: 602886 - DNA, 75 bp, synthetic construct
  source 1..75: mol_type = other DNA
cttggttaagttcgttacatgtgaaaacatcaccgttgatatggttattttcgctcaggaatttttgcatgaaga

SEQ ID NO: 602887 - DNA, 75 bp, synthetic construct
  source 1..75: mol_type = other DNA
cgcacggaacgggatatgaagatactggcgaggttgctgcatcttgaccgtctgttacccgcgatggatgccaaa

SEQ ID NO: 602888 - DNA, 75 bp, synthetic construct
  source 1..75: mol_type = other DNA
cgctggcagaagaatttggagtgacgacgcgaacgctgcgacgggatttcaacgtccgtctgacgtaccttgata

SEQ ID NO: 602889 - DNA, 75 bp, synthetic construct
  source 1..75: mol_type = other DNA
ggcctggtgacattgatgccggaaacattgacggcagcatccatcgctgggcaaaaaatgaagttatcgagaacg

SEQ ID NO: 602890 - DNA, 75 bp, synthetic construct
  source 1..75: mol_type = other DNA
ggataaggcactggctgctggcgccactgaaatcactaaagaagaatattttgcccgaaaaaatggcacatacac

SEQ ID NO: 602891 - DNA, 75 bp, synthetic construct
  source 1..75: mol_type = other DNA
accttgaaaccatgggaaaaaatcccgatgccccgattatctcaataggtgcaatatttttcgatccgcaaaccg

SEQ ID NO: 602892 - DNA, 75 bp, synthetic construct
  source 1..75: mol_type = other DNA
ttaacttacaccccaggaggaaatcagaatatgagcattatctctgagtcaggtttctacaaactaataaaaaca

SEQ ID NO: 602893 - DNA, 75 bp, synthetic construct
  source 1..75: mol_type = other DNA
aacgccataacgctctgaacgatgcacgttaccaggcgaaatacgtttcagccatctggcaaaaactgctcccga

SEQ ID NO: 602894 - DNA, 75 bp, synthetic construct
  source 1..75: mol_type = other DNA
tggggaaagccatagacttcgatgccagaacggctattccattcgaaggtgagcgccataatgcacttgatgacg

SEQ ID NO: 602895 - DNA, 63 bp, synthetic construct
  source 1..63: mol_type = other DNA
atgagcttaagatactacataaaaaatattttatttggcctgtactgcacacttatatatata

SEQ ID NO: 602896 - DNA, 75 bp, synthetic construct
  source 1..75: mol_type = other DNA
ccagactcgcgattctgtgaaccagaaccagcatgaatcggaacggaacgaccaaaaagcggaacaaaatagccc

SEQ ID NO: 602897 - DNA, 75 bp, synthetic construct
  source 1..75: mol_type = other DNA
caggcagccaatatcagccagcctgacgccgataagttgcttgctgcctctcgcggagaatttgttgaagggatt

SEQ ID NO: 602898 - DNA, 75 bp, synthetic construct
  source 1..75: mol_type = other DNA
aaatatatctgcgaatacctgacgacaaagggcgtgtttgagaatgaagaaacagacctgggcactgttgatgtt

SEQ ID NO: 602899 - DNA, 75 bp, synthetic construct
  source 1..75: mol_type = other DNA
gaatttagcaagaccatcgatctggatactgctggcggagtcattgatcgtgacgtcattaaatggtggctaaag

SEQ ID NO: 602900 - DNA, 75 bp, synthetic construct
  source 1..75: mol_type = other DNA
ccaatatcagccagcctgacgccgatgaactgcttgcagtatcacgtggtgaatttgttgaagggattagcgacc

SEQ ID NO: 602901 - DNA, 75 bp, synthetic construct
  source 1..75: mol_type = other DNA
aaccagcatgaatcggaacggaacgaccaaaaagcggaacaaaatagcccaaatgcgttacaaaacgagccagaa

SEQ ID NO: 602902 - DNA, 75 bp, synthetic construct
  source 1..75: mol_type = other DNA
atccatcgctgggcaaaaaaagaagttatcgacaacgaccgcgaagactggaagcgtatctcggcatcaatgcgc

SEQ ID NO: 602903 - DNA, 75 bp, synthetic construct
  source 1..75: mol_type = other DNA
tctgatgatcgacattgaaaccatgggaaaaaatcccaatgccgcgattatctcaataggcgcaatatttttcga

SEQ ID NO: 602904 - DNA, 75 bp, synthetic construct
  source 1..75: mol_type = other DNA
tttttggccttgtccgtgagcgtccgatcgacattcacaaagatcccgtagcactgaacaaatacatcactgaat

SEQ ID NO: 602905 - DNA, 75 bp, synthetic construct
  source 1..75: mol_type = other DNA
catcctgagccagttgccgcatttgcagctaccaacgctggagaagctggggctaatcaacgcattgggttatgc

SEQ ID NO: 602906 - DNA, 75 bp, synthetic construct
  source 1..75: mol_type = other DNA
gccaggatgaagcccgggaaaaagatccggaggaaatggaaagtgccggactcccgaacaaggagtgcaccgaag

SEQ ID NO: 602907 - DNA, 75 bp, synthetic construct
  source 1..75: mol_type = other DNA
accagaaccagcccgaatcggaacaaaacgaccagaaagcggaacaaaacagcccaaatgcgttacaaaacgagc

SEQ ID NO: 602908 - DNA, 75 bp, synthetic construct
  source 1..75: mol_type = other DNA
tttatcgccgaaaactccggtgaattttttgttcaggtctggggaaatggagccaacttcgacaacgtgatttta

SEQ ID NO: 602909 - DNA, 75 bp, synthetic construct
  source 1..75: mol_type = other DNA
ggaaaaagtctgcaccgcctgcggtcagagcggtggcggcaactgccccgattgtggcgctgtcatgggcaacgc

SEQ ID NO: 602910 - DNA, 75 bp, synthetic construct
  source 1..75: mol_type = other DNA
aggtacgcgccccgtgccgccgttgcgaatgccttttagtgacgtcattgaccgtgttgaacgggcgttaatgac

SEQ ID NO: 602911 - DNA, 75 bp, synthetic construct
  source 1..75: mol_type = other DNA
acggaacaaaacagcccaaatgcgcaacaaaacgagccagaaacgaaacaggagccggaaaaagcctgcaccgcc

SEQ ID NO: 602912 - DNA, 75 bp, synthetic construct
  source 1..75: mol_type = other DNA
gcggtgatgggtgacgcaacataccaggaaatattcgatgaagagaatcagcctgaagttcaggaaaatgatccg

SEQ ID NO: 602913 - DNA, 75 bp, synthetic construct
  source 1..75: mol_type = other DNA
ctattccagacgaacgggcaataaaggaagaaggtgcagtcgctgtggccactgccattgaagccggtgacgagc

SEQ ID NO: 602914 - DNA, 75 bp, synthetic construct
  source 1..75: mol_type = other DNA
ctgcccgtggcgttactacaacgatcgcgatgtacgcacaatcgttgagctggggaaagccatagacttcgatgc

SEQ ID NO: 602915 - DNA, 75 bp, synthetic construct
  source 1..75: mol_type = other DNA
cgacgcaagaacgactattccattcgaaggtgaacaccataacgccctgcacgatacgcgttaccaggcaaaata

SEQ ID NO: 602916 - DNA, 75 bp, synthetic construct
  source 1..75: mol_type = other DNA
ctgccagatccccggacgtgcaggagcactgcttacgacgcttcttcgccatatatcgatactcaacgggtttga

SEQ ID NO: 602917 - DNA, 75 bp, synthetic construct
  source 1..75: mol_type = other DNA
gtactgtcccggtcagaaacggtgttgcagaaaagtctggagataacggaagaggcagatttggcactgagaaac

SEQ ID NO: 602918 - DNA, 75 bp, synthetic construct
  source 1..75: mol_type = other DNA
ttcaacattgttcccgattttgcttacgacgatggccgctttacgttcgtaggcttctccccgtctaagtccatt

SEQ ID NO: 602919 - DNA, 75 bp, synthetic construct
  source 1..75: mol_type = other DNA
aatatcattacaacgccgcatattgcggccgccaccgttgagtcataccagcaaaccgggatacacgttgcccag

SEQ ID NO: 602920 - DNA, 75 bp, synthetic construct
  source 1..75: mol_type = other DNA
tcataaatatttgtcgatgatgcgcaatggtgctcttatcatcaacgccgcaaggggaaagttgctggatgagag

SEQ ID NO: 602921 - DNA, 75 bp, synthetic construct
  source 1..75: mol_type = other DNA
ctgggatcatctggggaataatcaggtgctgtcggtaaacagattggtttacttttcattgctgaaaaaactgct

SEQ ID NO: 602922 - DNA, 75 bp, synthetic construct
  source 1..75: mol_type = other DNA
tatgtggttttaggtattagagagaaaaaaggggaattttccgttgcgggtatctcagatataaataccgttaaa

SEQ ID NO: 602923 - DNA, 75 bp, synthetic construct
  source 1..75: mol_type = other DNA
atgtgtatctaccttaacttaatgatttttaccaaaatcattaggggattcatcagtgctaagcactacttctct

SEQ ID NO: 602924 - DNA, 75 bp, synthetic construct
  source 1..75: mol_type = other DNA
ctgctgtagctgcatcagtactgatggcgatgtctgctcaggcagctgagatttacaataaagacagtaacaagc

SEQ ID NO: 602925 - DNA, 75 bp, synthetic construct
  source 1..75: mol_type = other DNA
gtgatactggttgtctggagattcagggggccagtctatgaggtatctgatatcccaaaaaatgaaaccgcgccg

SEQ ID NO: 602926 - DNA, 75 bp, synthetic construct
  source 1..75: mol_type = other DNA
cggtagtgcctatatcgttgctatgttaccggtatttgccatgctggcgaacgtctccggcgcaccgttaatgtt

SEQ ID NO: 602927 - DNA, 75 bp, synthetic construct
  source 1..75: mol_type = other DNA
catacaaaatttggcgacaaagtagaccatctcagtgagcttgagcgcagtattgttataactgcagccgtagaa

SEQ ID NO: 602928 - DNA, 75 bp, synthetic construct
  source 1..75: mol_type = other DNA
gttatcaggcggacacgctatcactactgcctggtgtgaaaataatatcgagatttgggacagggattgataatg

SEQ ID NO: 602929 - DNA, 75 bp, synthetic construct
  source 1..75: mol_type = other DNA
ctggaagcatctgggagagagtcaggttctgtcggtaaaccgatcggtttacttttcattgctgaaaaaactgct

SEQ ID NO: 602930 - DNA, 75 bp, synthetic construct
  source 1..75: mol_type = other DNA
ctgggatcatctggggaataatcaggttctgtcggtaaacagatcggtttacttttcattgctgaaaaaactggt

SEQ ID NO: 602931 - DNA, 75 bp, synthetic construct
  source 1..75: mol_type = other DNA
cggtgaaaggtaagagcaaccaaccggtagtgtttgttgattccaccggtcgtagctatgccattgacccgatta

SEQ ID NO: 602932 - DNA, 75 bp, synthetic construct
  source 1..75: mol_type = other DNA
ggtaaaagttacagctgaagaagtaaataaaattatggaggcagcagacatcagtcgaccagatgccgacaaatt

SEQ ID NO: 602933 - DNA, 75 bp, synthetic construct
  source 1..75: mol_type = other DNA
ccaaatgcgttacaaaacgagccagaaacgaaacagcctgaaccagtggcgcaacaggaagtggaaaaagtctgc

SEQ ID NO: 602934 - DNA, 75 bp, synthetic construct
  source 1..75: mol_type = other DNA
tgggcgctgactacactgatcgcggtctgcttacaaaagagtggatgaaggggaatcgtgtttcacgtatcaccc

SEQ ID NO: 602935 - DNA, 75 bp, synthetic construct
  source 1..75: mol_type = other DNA
cttcgaagctgttgcacaatatcagttcgatttcggtctgcgtccgtccgttgcttacctgcaatctaaaggtaa

SEQ ID NO: 602936 - DNA, 75 bp, synthetic construct
  source 1..75: mol_type = other DNA
gctgggatgaggaatccgcttcctttgttccggtcgaaccagagccgaatacagaaattgttaactttaaccagt

SEQ ID NO: 602937 - DNA, 75 bp, synthetic construct
  source 1..75: mol_type = other DNA
caatcaactctattggcggtaaattctttgacccggcaaccggagagatggggccggaattcagcaaagctatcg

SEQ ID NO: 602938 - DNA, 75 bp, synthetic construct
  source 1..75: mol_type = other DNA
aaccgacgtattcatgactcagcgtgcaactggtgttgcaacttaccgtaataacgacttcttcggtctggttga

SEQ ID NO: 602939 - DNA, 75 bp, synthetic construct
  source 1..75: mol_type = other DNA
ctgaaactcagaacatgaccgtttttgcagatcgctttgttgctaataaagcacaaaacttcgaagcggttgcac

SEQ ID NO: 602940 - DNA, 75 bp, synthetic construct
  source 1..75: mol_type = other DNA
ttcggtcagtgggaatatgaattcaaaggcaaccgcgctgaatctcaaggttcctccaaagataaaacccgtctt

SEQ ID NO: 602941 - DNA, 75 bp, synthetic construct
  source 1..75: mol_type = other DNA
gatggcgaaaaatacggtcgcgcaaacaaactttctggtctggaaaaagcactggccttgggagctacggaaatc

SEQ ID NO: 602942 - DNA, 75 bp, synthetic construct
  source 1..75: mol_type = other DNA
tgcttttttcgaagcatacctagacgcagactacaccgatcgcggtctgctaacaaaagagtggatgaaaggaaa

SEQ ID NO: 602943 - DNA, 75 bp, synthetic construct
  source 1..75: mol_type = other DNA
atcacggcctctcccgatctgtcagaagccgccttacgcctggaggcgctctgggatcatctggggaataatcag

SEQ ID NO: 602944 - DNA, 75 bp, synthetic construct
  source 1..75: mol_type = other DNA
gaacatccacacaaggagaatgctggtagcgctcaggatcacgccagcgatagtgaaactggcgagacggcagat

SEQ ID NO: 602945 - DNA, 75 bp, synthetic construct
  source 1..75: mol_type = other DNA
ggtcatcacgttatcacatccaccagcaggacgtgtgaccatctaatgatcgaccttgaaaccatgggaaaaaat

SEQ ID NO: 602946 - DNA, 75 bp, synthetic construct
  source 1..75: mol_type = other DNA
acagaacgaccagaaagcggaacaaaacagcccaaatgcgttacaaaacgagccagaaacgaaacagcctgaacc

SEQ ID NO: 602947 - DNA, 75 bp, synthetic construct
  source 1..75: mol_type = other DNA
gcctggcgtcagcagggctatgaagacacgatgctggcgatggagcatatccggaaaccgctggcagcacgtcag

SEQ ID NO: 602948 - DNA, 75 bp, synthetic construct
  source 1..75: mol_type = other DNA
ggagtcattgatcgggacaccattaagtggtggctgaaacagtcacgcgaagcgcaatccgccattcttaccgat

SEQ ID NO: 602949 - DNA, 75 bp, synthetic construct
  source 1..75: mol_type = other DNA
gcggagtcattgatcgggacaccattaaatggtggcttaagcaatcacgcgaagcgcaatctgccattatgaccg

SEQ ID NO: 602950 - DNA, 75 bp, synthetic construct
  source 1..75: mol_type = other DNA
cgctgtatgtgtcgctgtaccccacagaagggggcatgcaggatattattgactgcattcgtgctgaactgggtg

SEQ ID NO: 602951 - DNA, 75 bp, synthetic construct
  source 1..75: mol_type = other DNA
ttatcgacgaaaactccggtgaattttctgttcaggtctggggtaacggtgcaactttcgacaacgtgattttac

SEQ ID NO: 602952 - DNA, 75 bp, synthetic construct
  source 1..75: mol_type = other DNA
atctaatgatcgaccttgaaaccatgggaaaaaatcctgatgccccgattatctcaataggtgcaatatttttcg

SEQ ID NO: 602953 - DNA, 75 bp, synthetic construct
  source 1..75: mol_type = other DNA
ccggtgagttttttgttcaggtctggggtaatggggccaacttcgacaacacgattttgcgccgttcatacgaac

SEQ ID NO: 602954 - DNA, 75 bp, synthetic construct
  source 1..75: mol_type = other DNA
agatcccgtagcactgaacaaatatatctgcgaatacctgacgacaaagggcgtgtttgagaatgaagaaacaga

SEQ ID NO: 602955 - DNA, 75 bp, synthetic construct
  source 1..75: mol_type = other DNA
gcaggggatcccctgcccgtggcgttactacaacgatcgcgatgtacgcacaatcgttgagctggggaaagccat

SEQ ID NO: 602956 - DNA, 75 bp, synthetic construct
  source 1..75: mol_type = other DNA
tatctcggtagtgggatacgacgataccgaagacagctcgtgttatatcccgccgttaaccaccatcaaacagga

SEQ ID NO: 602957 - DNA, 75 bp, synthetic construct
  source 1..75: mol_type = other DNA
tatgaacggcaggggatcccctgcccgtggcgttacaccaatgatcgcgatgtaagaacgatggttgctctggga

SEQ ID NO: 602958 - DNA, 75 bp, synthetic construct
  source 1..75: mol_type = other DNA
actgcgcatcagcacaaggagaacactggcggcaatcagcatcatgccagcgatagtgaaactggcgaggcgtca

SEQ ID NO: 602959 - DNA, 75 bp, synthetic construct
  source 1..75: mol_type = other DNA
tgatccgaaatgggtgaaggggattgaaacccgcgattctgtgaaccagaaccagcaagaaacggaacagaacga

SEQ ID NO: 602960 - DNA, 75 bp, synthetic construct
  source 1..75: mol_type = other DNA
tcgacaacgtgattttacgccgctcatacgaacgacaggggatcccctgcccgtggcgctactgcaacgatcgcg

SEQ ID NO: 602961 - DNA, 75 bp, synthetic construct
  source 1..75: mol_type = other DNA
ttaaatggtggcttaagcaatcacgcgaagcgcaatctgccattatgaccgatgaaatcccgttagatgatgcac

SEQ ID NO: 602962 - DNA, 75 bp, synthetic construct
  source 1..75: mol_type = other DNA
atgatgcactgttacaattgcgggaatttatcgacgaaaaactccggtgaattttttgttcaggtctggggaaat

SEQ ID NO: 602963 - DNA, 75 bp, synthetic construct
  source 1..75: mol_type = other DNA
attcagggtggtaaatgtgaaaccagtaacgctatacgatgtcgcagagtatgccggtgtctcttatcagaccgt

SEQ ID NO: 602964 - DNA, 75 bp, synthetic construct
  source 1..75: mol_type = other DNA
tatacgatgtcgccgagtatgccggagtctcttatcagaccgtttcccgcgtggtaaatcaggccagccacgttt

SEQ ID NO: 602965 - DNA, 75 bp, synthetic construct
  source 1..75: mol_type = other DNA
gtggcgcaacaggaagtggaaaaagcctgcaccgcctgcggtcagaccggcggcggcaactgccctgattgtggc

SEQ ID NO: 602966 - DNA, 75 bp, synthetic construct
  source 1..75: mol_type = other DNA
tgttcaggtctggggtaatggggccaacttcgacaacacgattttgcgccgttcatacgaacgacagggtatccc

SEQ ID NO: 602967 - DNA, 75 bp, synthetic construct
  source 1..75: mol_type = other DNA
attgcggtgaacggtcatcacgttatcacatccaccagcagagtgtggtatcacctgatgatcgaccttgaaaca

SEQ ID NO: 602968 - DNA, 75 bp, synthetic construct
  source 1..75: mol_type = other DNA
ctggtctggataaggcactggctgccggggctactgaaatcacgaaagaagaatatttcgcccgcaaaaacggta

SEQ ID NO: 602969 - DNA, 75 bp, synthetic construct
  source 1..75: mol_type = other DNA
accagaaccagcaagaatcggaacagaacgaccaaaaagcggaacaaaacagcccaaatgcgttacaaaacgagc

SEQ ID NO: 602970 - DNA, 75 bp, synthetic construct
  source 1..75: mol_type = other DNA
cagaaacgaaacaatccgaaccggtagcgcaacaggaagcggaaaaagtctgcaccgcctgcggtcagatcggtg

SEQ ID NO: 602971 - DNA, 75 bp, synthetic construct
  source 1..75: mol_type = other DNA
ggtaaaactgaaggatgccctttcgcggtttcgggagttcatcaacgaatactcagatgaaaaattcgttcaggt

SEQ ID NO: 602972 - DNA, 75 bp, synthetic construct
  source 1..75: mol_type = other DNA
tgttcctgacggtggaaccatcgaatggtggctgaagcagtccagtgaagccagagctgccattttaacagacca

SEQ ID NO: 602973 - DNA, 75 bp, synthetic construct
  source 1..75: mol_type = other DNA
tccccccgaaggaaaaagggacagcgaccgggctgtttctggcgggatccaagtttggtccgttgatcgtcccgc

SEQ ID NO: 602974 - DNA, 75 bp, synthetic construct
  source 1..75: mol_type = other DNA
gcggcaactgccctgattgtggcgcggtgatgggcgacgcaacataccaggaaacattcgatgaagagaatcagg

SEQ ID NO: 602975 - DNA, 75 bp, synthetic construct
  source 1..75: mol_type = other DNA
gtcgcgcaaacaaactttctggtctggataaggcgctggctgccggggctactgaaatcacgaaagaagaatatt

SEQ ID NO: 602976 - DNA, 75 bp, synthetic construct
  source 1..75: mol_type = other DNA
acagttattccatttgaaggcgtgcgccaccatgcgctggatgatgcccgtcaccaggcgaaatacgttacagcc

SEQ ID NO: 602977 - DNA, 75 bp, synthetic construct
  source 1..75: mol_type = other DNA
aaagctgttcgccatcgggtgggttaaacataaatgtaagccgggtgcaaaatggcctgagatccagacagaatt

SEQ ID NO: 602978 - DNA, 75 bp, synthetic construct
  source 1..75: mol_type = other DNA
gaaaactcagcagaaaaaatcccccctgtcactgcagttattcgtcgcgaatacaagcagacatggaaaacattg

SEQ ID NO: 602979 - DNA, 75 bp, synthetic construct
  source 1..75: mol_type = other DNA
cagaaacgaaacagcctgaatcagtggcgcaacaggaagtggaaaaagtctgcaccgcctgcggtcagaccggcg

SEQ ID NO: 602980 - DNA, 75 bp, synthetic construct
  source 1..75: mol_type = other DNA
agatgaaggaagaaatcagagcgcaactgatactctctcgtcgccagtaccagaaactgatgcagtggaaacggc

SEQ ID NO: 602981 - DNA, 75 bp, synthetic construct
  source 1..75: mol_type = other DNA
gataagttgcttgctgcatcacgtggtgagtttgttgaagggattagcgacccgaatgatccgaaatgggtgaag

SEQ ID NO: 602982 - DNA, 75 bp, synthetic construct
  source 1..75: mol_type = other DNA
atggcaacattcgacggacatatcgttgaagcgttgatgaaaatgccagaagttaacaccatgtatccggagctt

SEQ ID NO: 602983 - DNA, 75 bp, synthetic construct
  source 1..75: mol_type = other DNA
caattgcgggaatttatcgacgaaaactccggtgaattttttgttcaggtctggggtaatggggccaacttcgac

SEQ ID NO: 602984 - DNA, 75 bp, synthetic construct
  source 1..75: mol_type = other DNA
tcgccagtaccagaaactgatgcagtggaaacggcaattccggacaacgaaaaaaccgaatgcaaagtggaagtc

SEQ ID NO: 602985 - DNA, 75 bp, synthetic construct
  source 1..75: mol_type = other DNA
tgcaggaagacatggcaacattcgacggacatatcgttgaagcgttgatgaaaatgccagaagttaacgccatgt

SEQ ID NO: 602986 - DNA, 75 bp, synthetic construct
  source 1..75: mol_type = other DNA
gccccgccctgctatcgactcctgggataccgaatatatgcaggaaaaccgctgggatgaggaatccgcttcctt

SEQ ID NO: 602987 - DNA, 75 bp, synthetic construct
  source 1..75: mol_type = other DNA
ttccattcgaaggtgagcgccataatgcacttgatgacgcccgttaccaggcaaaatacgtttcagttatctggc

SEQ ID NO: 602988 - DNA, 75 bp, synthetic construct
  source 1..75: mol_type = other DNA
ggtgagcgccacaatgcgctggatgacgctcgttaccaggcaaaatacgtttcagctatctggcaaaaactgatc

SEQ ID NO: 602989 - DNA, 75 bp, synthetic construct
  source 1..75: mol_type = other DNA
ctgacgccgataaattgcttgctgcatcacgtggtgagtttgttgaagggattagcgacccgaatgatccgaaat

SEQ ID NO: 602990 - DNA, 75 bp, synthetic construct
  source 1..75: mol_type = other DNA
gccaaacgtctgggtaagcgcttcttaatgcgcgttgctgttcatcaagctgaatgcagggcgtattggcgggct

SEQ ID NO: 602991 - DNA, 75 bp, synthetic construct
  source 1..75: mol_type = other DNA
atgcataactcccccgcagtctccagcgcgaaatcgtttgacctgacctcgacggcgtttttaatcgttgccttt

SEQ ID NO: 602992 - DNA, 75 bp, synthetic construct
  source 1..75: mol_type = other DNA
gggagaaagcacaccccggtgagaattattttgaacacggatatgactcacgttattcagctttcgttgaagata

SEQ ID NO: 602993 - DNA, 75 bp, synthetic construct
  source 1..75: mol_type = other DNA
gggcacgacttgcaccggtggaacgcgtaaaaggcgtaatgcgcattccagaagggctggtgcgaatcaaccgtc

SEQ ID NO: 602994 - DNA, 75 bp, synthetic construct
  source 1..75: mol_type = other DNA
cgccaccttgtgcattctcgatccacgcctgctgctggacgaaaaaagcgccagcaatgaaaacttccgtgacca

SEQ ID NO: 602995 - DNA, 75 bp, synthetic construct
  source 1..75: mol_type = other DNA
cgtattgagctgatttccagtagcgaaactgactggaacgccttacaaagcgcgctgttgaagcttcgtttagcg

SEQ ID NO: 602996 - DNA, 75 bp, synthetic construct
  source 1..75: mol_type = other DNA
ggcagtggatttcactaggcggttgatgtcggtactggctgatggtgtgttggtgggcggggaggtggctcttgc

SEQ ID NO: 602997 - DNA, 75 bp, synthetic construct
  source 1..75: mol_type = other DNA
acgcacagctggcggcgttacttgggattacggtcttgggtgaaattgagccgttagtgccgtggggcgaactga

SEQ ID NO: 602998 - DNA, 75 bp, synthetic construct
  source 1..75: mol_type = other DNA
ggacgtaagccgttatggtgtggcgataccggacctgaggtggtccagcgcgttgcctggtgcacgggcggcggg

SEQ ID NO: 602999 - DNA, 75 bp, synthetic construct
  source 1..75: mol_type = other DNA
gcaacaggaactggaaaaagtttgcaccgcatgcggtcagaccggtggcggcaactgtcctgactgtggtgcggt

SEQ ID NO: 603000 - DNA, 75 bp, synthetic construct
  source 1..75: mol_type = other DNA
gatgatcgaccttgaaaccatgggaaaaaatcccgatgccccgattatctcaataggtgcaatatttttcgatcc

SEQ ID NO: 603001 - DNA, 75 bp, synthetic construct
  source 1..75: mol_type = other DNA
atgatcagaaccgggaatgacaaccgtcggtatgtgtatccggagcttaagttgcacgccattgggtgggttaag

SEQ ID NO: 603002 - DNA, 75 bp, synthetic construct
  source 1..75: mol_type = other DNA
agcggcgttaagcctgccagaacatcaacgctggcgtcgcagtctgaacagcggacaaggacatcaggcctgcgg

SEQ ID NO: 603003 - DNA, 75 bp, synthetic construct
  source 1..75: mol_type = other DNA
tgttggtactgactgatggcgctctggtctgcggcattgtggtattgctgtggccgatgatgaaaaaacagaatg

SEQ ID NO: 603004 - DNA, 75 bp, synthetic construct
  source 1..75: mol_type = other DNA
gatggggtgctggtctgcggcattgtggtattgctgtggccggtgataaaaagaaacagcctgcataatgcttga

SEQ ID NO: 603005 - DNA, 75 bp, synthetic construct
  source 1..75: mol_type = other DNA
acgaacaatgaagatttcattatgggggatcaccaacgacgggctggcggtggtgttaaccccggatgataaaat

SEQ ID NO: 603006 - DNA, 75 bp, synthetic construct
  source 1..75: mol_type = other DNA
cgagtggcactcagggacaaattaatactcctgctcatgcacggtggcgggctccgcgaaagcgaggctttaacc

SEQ ID NO: 603007 - DNA, 75 bp, synthetic construct
  source 1..75: mol_type = other DNA
ggagccaagcaaggcagaaggtaaagaccctcacgggcatcgtcataattacggtagacgattagaacgttcagg

SEQ ID NO: 603008 - DNA, 75 bp, synthetic construct
  source 1..75: mol_type = other DNA
agcgatcaggcgggattatgggagtttgccggtggtaaagtcgagctggatgaaagccagcggcaggcgctggtg

SEQ ID NO: 603009 - DNA, 75 bp, synthetic construct
  source 1..75: mol_type = other DNA
tggcctgactggtgaaccagagaatctgcgcaaatatggcgaactggtctgcatgacggctgaaatgatgctgga

SEQ ID NO: 603010 - DNA, 75 bp, synthetic construct
  source 1..75: mol_type = other DNA
acgctggcggcgtggtttcgtcacaatgtgcaaccgctggctacgtcaaaggcgctgtttattcatcgtaatacc

SEQ ID NO: 603011 - DNA, 75 bp, synthetic construct
  source 1..75: mol_type = other DNA
tgaacaactgattacccgcatgaaagagtacggccagctgcgttttcgcgtttcgctgggcaactattttaccgg

SEQ ID NO: 603012 - DNA, 75 bp, synthetic construct
  source 1..75: mol_type = other DNA
ccatcagcacgtcccgctggaagaacgccaccgccgggtgtttcgcatttatacccttgatgaactgaaacgcct

SEQ ID NO: 603013 - DNA, 75 bp, synthetic construct
  source 1..75: mol_type = other DNA
aacccgagcccggtatcagtcgatcatggcaagccacctgctggcccgtacccgcaagcagtggatttacgtttt

SEQ ID NO: 603014 - DNA, 75 bp, synthetic construct
  source 1..75: mol_type = other DNA
ccatcaacacattcaattggaagcgcgtcaccgaaacgtttttcgcatttatacacttgccgaactggagcgtat

SEQ ID NO: 603015 - DNA, 75 bp, synthetic construct
  source 1..75: mol_type = other DNA
agcgatcaggcggggttatgggagtttgcaggtggcaaagtcgagccggatgaaagccagccgcaggcgctggtg

SEQ ID NO: 603016 - DNA, 75 bp, synthetic construct
  source 1..75: mol_type = other DNA
atgaaaatgattgaagttgttgccgccatcattgaacgtgatggcaaaattttactcgcgcaacgccccgcccag

SEQ ID NO: 603017 - DNA, 75 bp, synthetic construct
  source 1..75: mol_type = other DNA
cgctctggtgcatcaaccagagcggcatatttaaaagaacaatatgcccggataccacgacagcgaatgaaagga

SEQ ID NO: 603018 - DNA, 75 bp, synthetic construct
  source 1..75: mol_type = other DNA
actgctggcggagtcattgatcgtgacaccattaaatggtggcttaagcaatcacgcgaggcgcaatctgccatt

SEQ ID NO: 603019 - DNA, 75 bp, synthetic construct
  source 1..75: mol_type = other DNA
cttcctggtgggcatattatcaactagcccgcaacgcttattttttattaggcattccatgcttagctttatacg

SEQ ID NO: 603020 - DNA, 75 bp, synthetic construct
  source 1..75: mol_type = other DNA
acgtttcaagaatcagcagcatacttgcgcaatggcaactggtacaacccaagatcgcgttcacactccagcaga

SEQ ID NO: 603021 - DNA, 75 bp, synthetic construct
  source 1..75: mol_type = other DNA
accttcaatggaggatcttttcaggagctttttcaggacatccgcaaggagtttctgcgacttaatcgtcgtctg

SEQ ID NO: 603022 - DNA, 75 bp, synthetic construct
  source 1..75: mol_type = other DNA
aaacggtcgatctccgtcagccgctgcaaaacgtgtccatgccgtttttgcgattgtatggctatctcgatggtc

SEQ ID NO: 603023 - DNA, 75 bp, synthetic construct
  source 1..75: mol_type = other DNA
ggagcaaattgctgcgcaaatgcgtaacaaaaagctgccaatggttgacgatctacgcgatgaatccgaccacga

SEQ ID NO: 603024 - DNA, 75 bp, synthetic construct
  source 1..75: mol_type = other DNA
ctccggcatctcatcaaggacactggccaacaccatgcacaccatggctgcacgtggatatgagtacaaggaacg

SEQ ID NO: 603025 - DNA, 75 bp, synthetic construct
  source 1..75: mol_type = other DNA
aatcaggccgcccaggcccggtgtggatagacattcctaaggatgtgcaaacggcggtttttgagattgaagcac

SEQ ID NO: 603026 - DNA, 75 bp, synthetic construct
  source 1..75: mol_type = other DNA
gtgggccgggggcgactaatctggtgactgccattgccgatgcgcggctggactctatcccgctgatttgcatca

SEQ ID NO: 603027 - DNA, 75 bp, synthetic construct
  source 1..75: mol_type = other DNA
cacgcaagcgttttactggcgcagaatttatcgttcattttctggaacagctgggcattaagattgtgacgggga

SEQ ID NO: 603028 - DNA, 75 bp, synthetic construct
  source 1..75: mol_type = other DNA
tgccgggcagcgttgcgagtgcctttggcctcgatgaactagcagcgcaactgaatggcaaaggtcccaccatgg

SEQ ID NO: 603029 - DNA, 75 bp, synthetic construct
  source 1..75: mol_type = other DNA
cccgaacgcgtggcccagttgcgcgcgcggtttggcaagccggtgtggaaggcgctgcccgtcgccagcgccagc

SEQ ID NO: 603030 - DNA, 75 bp, synthetic construct
  source 1..75: mol_type = other DNA
gtccaattccaaaagcgtgcgatccgttaacacattacggcctgattaatgccgttgccgcctgcgtggatgaca

SEQ ID NO: 603031 - DNA, 75 bp, synthetic construct
  source 1..75: mol_type = other DNA
gcaaaacgtgtccatgccgtttttgcgattgtatggctatctcgatggtctggtgccgcgcaaagtggtgccgat

SEQ ID NO: 603032 - DNA, 75 bp, synthetic construct
  source 1..75: mol_type = other DNA
tttttaccgatgaaatcccgttagatgacgctctactgcaattacgggaatttatcaacgaaaactccggcgaaa

SEQ ID NO: 603033 - DNA, 75 bp, synthetic construct
  source 1..75: mol_type = other DNA
gcatctgacacgaccgcacaaccagagccggtaaaagttaccgctgacgaagtaaacaaaattatgcaggcagcc

SEQ ID NO: 603034 - DNA, 75 bp, synthetic construct
  source 1..75: mol_type = other DNA
atgctacgtatcgctaaaaaagaagctctgacgtttgacgacgttctcctcgttcctgctcattctaccgttctg

SEQ ID NO: 603035 - DNA, 75 bp, synthetic construct
  source 1..75: mol_type = other DNA
aactgctggcggagtcattgatcgggacaccattaagtggtggctgaaacagtcacgcgaagcgcaatccgccat

SEQ ID NO: 603036 - DNA, 75 bp, synthetic construct
  source 1..75: mol_type = other DNA
cgctggctgccggggctgctgaaatcacgaaagaagaatatcttgcccgcaaaaacggaacatacacggacttac

SEQ ID NO: 603037 - DNA, 75 bp, synthetic construct
  source 1..75: mol_type = other DNA
catacacaggcttaccgcaaaataccaatgccgcacaaaactctgaacaaccagagccggtaaaagttaacacgg

SEQ ID NO: 603038 - DNA, 75 bp, synthetic construct
  source 1..75: mol_type = other DNA
tatattctcgcaccaggcgtggcaatgcctcatgcgcgaccggaatgtggggcgcttaaaaccgggatgtctttg

SEQ ID NO: 603039 - DNA, 75 bp, synthetic construct
  source 1..75: mol_type = other DNA
gcgcgatcccctgttccgccaacaggtactgcgagcctacaactacgaatgcgccatttgcggcttcaatatgcg

SEQ ID NO: 603040 - DNA, 75 bp, synthetic construct
  source 1..75: mol_type = other DNA
accttgatgcgcggtttacagcgtatcgaccgtgtcgagattgactcccctcaccgcgccagcagcggcgatagc

SEQ ID NO: 603041 - DNA, 75 bp, synthetic construct
  source 1..75: mol_type = other DNA
cctggctctatctgtacaactcgtatcgtgactggcgtcggtgttccgcagattaccgctgttgctgacgcagta

SEQ ID NO: 603042 - DNA, 75 bp, synthetic construct
  source 1..75: mol_type = other DNA
gacgaactgcgtactaaagcggagtttgtatgtatcagcggtgcgggcattcaggaaagccacgttcacgacgtg

SEQ ID NO: 603043 - DNA, 75 bp, synthetic construct
  source 1..75: mol_type = other DNA
cattcaggcaattaaaggttccaccattaacaatggcccttattatattctcgcaccaggcgtggcaatgcctca

SEQ ID NO: 603044 - DNA, 75 bp, synthetic construct
  source 1..75: mol_type = other DNA
agataatcgccgaactcactcacggcggcgcggatgttgcgcttgattgttccggtaatgccgcaggtcgcttac

SEQ ID NO: 603045 - DNA, 75 bp, synthetic construct
  source 1..75: mol_type = other DNA
caaatgcgggaaagttgtgattaacttccggattaaggagttagcggatgaccatctataccttatcccacgggt

SEQ ID NO: 603046 - DNA, 75 bp, synthetic construct
  source 1..75: mol_type = other DNA
ggatcatcggcgttgatatgctgccggaacgtctggcgatggcaaaacagttaggggtgatggatcacggctatt

SEQ ID NO: 603047 - DNA, 75 bp, synthetic construct
  source 1..75: mol_type = other DNA
taatgcacagccataaaactagcgtaaatgcagcgctcttggacgatacgaaattagttgtagagagggatctcc

SEQ ID NO: 603048 - DNA, 75 bp, synthetic construct
  source 1..75: mol_type = other DNA
tgttctggtctgggcaatccgttggtggtgatatgaaccgtgttctgtgcgtggttatcattgtcctgctggtgg

SEQ ID NO: 603049 - DNA, 75 bp, synthetic construct
  source 1..75: mol_type = other DNA
gcttagtctggggctgaatcattaccgcgataacgccataacctacaaagagcagcgcgataaaaaagtcagtga

SEQ ID NO: 603050 - DNA, 75 bp, synthetic construct
  source 1..75: mol_type = other DNA
ttattaccgtctccgatgtggaatcgacaagataaccgcgcaggttaactacttgcaggattacatcaggacgca

SEQ ID NO: 603051 - DNA, 75 bp, synthetic construct
  source 1..75: mol_type = other DNA
ttattaccgtctccgatgtggaatcgacaagataaccgcgcaggttaactacatgcaggagtacatcaggacgca

SEQ ID NO: 603052 - DNA, 75 bp, synthetic construct
  source 1..75: mol_type = other DNA
ttattaccgtctccgaagtggaatcgacaagataaccgcgcaggttaactacgtgcaggattacatcaggacgca

SEQ ID NO: 603053 - DNA, 75 bp, synthetic construct
  source 1..75: mol_type = other DNA
ttattaccgtctccgaggtggaatcgacaagataaccgcgcaggttaactacttgcaggaatacatcaggacgca

SEQ ID NO: 603054 - DNA, 75 bp, synthetic construct
  source 1..75: mol_type = other DNA
ttattaccgtctccgaggtggaatcgacaagataaccgcgcaggttaactacatgcaggattacatcaggacgca

SEQ ID NO: 603055 - DNA, 75 bp, synthetic construct
  source 1..75: mol_type = other DNA
ttattaccgtctccgatgtggaatcgacaagataaccgcgcaggttaactacgtgcaggaatacatcaggacgca

SEQ ID NO: 603056 - DNA, 75 bp, synthetic construct
  source 1..75: mol_type = other DNA
caacatgatgtagctgaactcgacgccagatacacaaaggagcttgctgatgctaacgcgactatcgaaagtctt

SEQ ID NO: 603057 - DNA, 75 bp, synthetic construct
  source 1..75: mol_type = other DNA
ataatgcagcctccccccgactggcagacaccgctgaacgggattatttcaccctccgggaacgactggtaatga

SEQ ID NO: 603058 - DNA, 75 bp, synthetic construct
  source 1..75: mol_type = other DNA
ttgggcttattgcatcatctgtttctctcgctatcagccccttatctttctataacgtggcgaaaaaatttgaat

SEQ ID NO: 603059 - DNA, 75 bp, synthetic construct
  source 1..75: mol_type = other DNA
taccgtgataacgccatcacctacaaagcgcagcgcgataaaaaagccagagagctggagctggcaaacgcaacc

SEQ ID NO: 603060 - DNA, 75 bp, synthetic construct
  source 1..75: mol_type = other DNA
gtgatgttgctgcacttgatgccagatactcgagggaattagccgatgcgagagctgaaaatgaaactcttcgcg

SEQ ID NO: 603061 - DNA, 75 bp, synthetic construct
  source 1..75: mol_type = other DNA
cctccggcgtggataatgcaaccggcccccgactggcagacaccgctgaatgggattatttcatcctcagagaac

SEQ ID NO: 603062 - DNA, 75 bp, synthetic construct
  source 1..75: mol_type = other DNA
cagctctggttatctgcatcatcgtcagcctgtcatgggcagtcaattattaccgtgataacgccatctcctaca

SEQ ID NO: 603063 - DNA, 75 bp, synthetic construct
  source 1..75: mol_type = other DNA
tgaacgggattatttcaccctcagagaccgattgatgacgatgcagatgcaactggaaggggcgcaggaatatat

SEQ ID NO: 603064 - DNA, 75 bp, synthetic construct
  source 1..75: mol_type = other DNA
aaaatacacgaaggagttagctgatgcgaaagctgaaaatgaaactcttcgcgctgacgttgccgctggtcgtaa

SEQ ID NO: 603065 - DNA, 75 bp, synthetic construct
  source 1..75: mol_type = other DNA
ctgcgtgctgatgttgccgctggtcgtaagcgcctgcggatcaacgccacctgctccggtaccgtgcgtgaagcc

SEQ ID NO: 603066 - DNA, 75 bp, synthetic construct
  source 1..75: mol_type = other DNA
gcgatgttgctgcactggatgaaaaatactcaagggagttagctgatgcaaaagctgaaaatgatgctctgcgtg

SEQ ID NO: 603067 - DNA, 75 bp, synthetic construct
  source 1..75: mol_type = other DNA
taccgtaataacgccatcgcctacaaagagcagcgcgataaggccgcatccatcatcgctgacatgcagaagcgt

SEQ ID NO: 603068 - DNA, 75 bp, synthetic construct
  source 1..75: mol_type = other DNA
ggcagccttaaccagcagactgttataaatgttcatggagttaacaaccctcaggaggcggctaatctgatcgct

SEQ ID NO: 603069 - DNA, 75 bp, synthetic construct
  source 1..75: mol_type = other DNA
ggaaagaaggcggtaacagccttatcgactgggaaaaatggcaaccggcaatagataaagcgaaggatgcgatca

SEQ ID NO: 603070 - DNA, 75 bp, synthetic construct
  source 1..75: mol_type = other DNA
tgctcaacgctatcaaagatggccgctgggctgatgccgtcagcatcggcaaacagatacttaatcagggcagcg

SEQ ID NO: 603071 - DNA, 75 bp, synthetic construct
  source 1..75: mol_type = other DNA
aaaacatcgctgcgggaatctcgtaagaaaaagaaaaccctgacccgcgagcaaatcctcgcatcccgcaaagtg

SEQ ID NO: 603072 - DNA, 75 bp, synthetic construct
  source 1..75: mol_type = other DNA
gcgcgatggcaggcatggcccgtgacaaaatcggctctaatcttgcgggtggacttgcggggtcgctggacaccc

SEQ ID NO: 603073 - DNA, 75 bp, synthetic construct
  source 1..75: mol_type = other DNA
tttttttagcacagatcatatttgtagtaaattacgttcggattgcattcgaatatctattcctaatttttggct

SEQ ID NO: 603074 - DNA, 75 bp, synthetic construct
  source 1..75: mol_type = other DNA
tttcgccataatgtgcagccgctggcaacgtcaaaggcgttgtttatccatcgtaatacgctggagtatcgtctc

SEQ ID NO: 603075 - DNA, 75 bp, synthetic construct
  source 1..75: mol_type = other DNA
cgtttcgctgggtaactattttaccggtcatggcagtattgcccgttcttatcgcacggcgaaaacgacgatggt

SEQ ID NO: 603076 - DNA, 75 bp, synthetic construct
  source 1..75: mol_type = other DNA
caggggattcagtctattggctatgcggtttcgcagattggcggcagcgtggacgctgcgcgatcttctctggaa

SEQ ID NO: 603077 - DNA, 75 bp, synthetic construct
  source 1..75: mol_type = other DNA
atgctatttacagtaattatatgtcggtgacagtaaatcacccaacaaacgattattttttatggttaacaaata

SEQ ID NO: 603078 - DNA, 75 bp, synthetic construct
  source 1..75: mol_type = other DNA
agtaaattgcgtccggattgcattcggatatcaattcctaatttttggctctctgcttacttccctcagcacgca

SEQ ID NO: 603079 - DNA, 75 bp, synthetic construct
  source 1..75: mol_type = other DNA
cagttgtcctcctggtggcctgcggtgcgctgtggctggcaacagaccactaccgggataacgccattacctaca

SEQ ID NO: 603080 - DNA, 75 bp, synthetic construct
  source 1..75: mol_type = other DNA
agtatccgaagtcgacaagccccagataatcgaagaggacataggcaagttctttgctgttaaccctgtcttcta

SEQ ID NO: 603081 - DNA, 75 bp, synthetic construct
  source 1..75: mol_type = other DNA
aaaatcaccgccgcctccggcgtggatgatggcgccagccccagacttactgacaccgctcaacgggattatttc

SEQ ID NO: 603082 - DNA, 75 bp, synthetic construct
  source 1..75: mol_type = other DNA
atgaagttgagctataagctggttatcgctgctttcttcgttactgtcattggttcttttatctgttcagcgaat

SEQ ID NO: 603083 - DNA, 75 bp, synthetic construct
  source 1..75: mol_type = other DNA
gttaagtgaattattgtgtgaagaagaaatactcaaccaattattaacagcagcatcagaaaaacaattagcgga

SEQ ID NO: 603084 - DNA, 75 bp, synthetic construct
  source 1..75: mol_type = other DNA
ctgcctgtcgtgggcggtcaatcattaccgtgataatgccatcgcctacaaagaacagcgtgataaaaaagtcag

SEQ ID NO: 603085 - DNA, 75 bp, synthetic construct
  source 1..75: mol_type = other DNA
acctgctgaagaaagaactgcaggcagacgcgcaagcctacggtgacgatcgtcgttcgccgttgcaggaacgcg

SEQ ID NO: 603086 - DNA, 75 bp, synthetic construct
  source 1..75: mol_type = other DNA
ccctgaacgtagccagtgaaacgctgaaaatggcggtcagttcggtagggtcaatcagtaagttcgctgactcat

SEQ ID NO: 603087 - DNA, 75 bp, synthetic construct
  source 1..75: mol_type = other DNA
aatgcaaccgccccccgactggcagacacagttgaacgggattatttcactctcagagagcggttgatgctgatg

SEQ ID NO: 603088 - DNA, 75 bp, synthetic construct
  source 1..75: mol_type = other DNA
ggtcgtccggcggtgaaaaacctgctggaaatcctctccgaatggctggtgttccgccgcgataccgtgcgccgc

SEQ ID NO: 603089 - DNA, 75 bp, synthetic construct
  source 1..75: mol_type = other DNA
acagagattgtttaaacatatcattggtatttctattggtaggtatattaataaatgcagcagaagaactacgtt

SEQ ID NO: 603090 - DNA, 75 bp, synthetic construct
  source 1..75: mol_type = other DNA
agatcagagcattggcgcggagctgacgaaaaaagatatcaaccgcgtcgcctggcgttccatgctgttacaagc

SEQ ID NO: 603091 - DNA, 75 bp, synthetic construct
  source 1..75: mol_type = other DNA
gctccattcttggcgcagtcgtctttattgtgctgttcaacgtggtacacctgggctgcgttttggtctggcgca

SEQ ID NO: 603092 - DNA, 75 bp, synthetic construct
  source 1..75: mol_type = other DNA
gtgctcagcacggcaacccattttaatgatgagcaacaaaccctggtatttccgggcggagaatgtctgcacaaa

SEQ ID NO: 603093 - DNA, 75 bp, synthetic construct
  source 1..75: mol_type = other DNA
ccgcaagccgatgccttttttctcgatttcgccatcaacgatgacggcgaacgcccggaactgacgaaaataatg

SEQ ID NO: 603094 - DNA, 75 bp, synthetic construct
  source 1..75: mol_type = other DNA
atgctttttccctttcgaaaacctgaagtacgtctgctgaaaaataccgctgcgggcgtcattttttcggtgaag

SEQ ID NO: 603095 - DNA, 75 bp, synthetic construct
  source 1..75: mol_type = other DNA
gcggatttgttgattgtgctcggtgcgcgttttgatgaccgggcgattggcaaaaccgagcagttctgtccgaat

SEQ ID NO: 603096 - DNA, 75 bp, synthetic construct
  source 1..75: mol_type = other DNA
gcggatttgcagcgcgaattcccgtgtccaatcccgaaagcgtgcgatccgttaagccattacggcctgatcaac

SEQ ID NO: 603097 - DNA, 75 bp, synthetic construct
  source 1..75: mol_type = other DNA
tattctggcggccaaaagcgattgagttaaaagagggggagatggttcctctgcaaaaagtgacgattacccgca

SEQ ID NO: 603098 - DNA, 75 bp, synthetic construct
  source 1..75: mol_type = other DNA
tattgtgctgttcaacgtggtacacctggggctgcgttttggtctggcgcattatgcttaccgcatgggcgtggc

SEQ ID NO: 603099 - DNA, 75 bp, synthetic construct
  source 1..75: mol_type = other DNA
tcagcatcagatgtggaccgcgcaagcctatccgctcaatcgcccacgccagtggctgacctccggcgggctggg

SEQ ID NO: 603100 - DNA, 75 bp, synthetic construct
  source 1..75: mol_type = other DNA
agcccgctatggcagaaaaagccgccgcacccgcctttagcgaagaaagtattcgtgacgcggcggcgatgatta

SEQ ID NO: 603101 - DNA, 75 bp, synthetic construct
  source 1..75: mol_type = other DNA
gtgtgacttacgatccgcacccttacgggcttatccgttcgctctgctggcaagatgtcccattgatacgtttct

SEQ ID NO: 603102 - DNA, 75 bp, synthetic construct
  source 1..75: mol_type = other DNA
tgattctggaagaagcgcacgaatcatccggctcaaacttctacgatatagcccggttgtgtaccaatgccgact

SEQ ID NO: 603103 - DNA, 75 bp, synthetic construct
  source 1..75: mol_type = other DNA
aaggaaaaagctcccgcgctgggtaagccgaatccggtggttaacccattcccgtataacccggactacgcgtat

SEQ ID NO: 603104 - DNA, 75 bp, synthetic construct
  source 1..75: mol_type = other DNA
cagtcaatgcgctgatttctggcgctgatgacaacgtgaaacggcttgttcaggagatgttgagctatgaagtgg

SEQ ID NO: 603105 - DNA, 75 bp, synthetic construct
  source 1..75: mol_type = other DNA
tgctggtggtgggaaagcagaagttgaaatgagacagcgtgtcggtcgtggcttacgagccaaaaaaaatcaggc

SEQ ID NO: 603106 - DNA, 75 bp, synthetic construct
  source 1..75: mol_type = other DNA
tgatggagatgatgaaggagtcaggtcttaaagttgatttcatctatggggaatctaaccagacgacaaggcaag

SEQ ID NO: 603107 - DNA, 75 bp, synthetic construct
  source 1..75: mol_type = other DNA
ttattctggaagaggcgcatgagtcttcaggctctaatttctatgacattgccagattatgtgtgaacgcagact

SEQ ID NO: 603108 - DNA, 75 bp, synthetic construct
  source 1..75: mol_type = other DNA
ggcttgccaattcaggtggcaaccacaggacactcaaaagtgatgatcccgttgaaaccagaagtggatatcgac

SEQ ID NO: 603109 - DNA, 75 bp, synthetic construct
  source 1..75: mol_type = other DNA
gcggatgatgaacagggtgccgcacagtttttatccgccctcgaaaactggaatcgcccgtggtctggcatggcg

SEQ ID NO: 603110 - DNA, 75 bp, synthetic construct
  source 1..75: mol_type = other DNA
acagagctgcaataccgcatcccaaaactcaccgcgtggaaaaaattgccgcccagcgcatgggatagtttcggc

SEQ ID NO: 603111 - DNA, 75 bp, synthetic construct
  source 1..75: mol_type = other DNA
cacggtctggcaaacatcgctggcaggaaaacatcgtgtgactatagaaaagcaaaatgatgattatcgtatttc

SEQ ID NO: 603112 - DNA, 75 bp, synthetic construct
  source 1..75: mol_type = other DNA
tctcactgaagacgatattttgcaaggcttgccaatccaggtggctaccaccggacactcaaaagtgatgattcc

SEQ ID NO: 603113 - DNA, 75 bp, synthetic construct
  source 1..75: mol_type = other DNA
caccgtctggcaaacgtcgctggcaggaaaacatcgtgtgactatcgaaaagcaaaatgatgattatcgtatttc

SEQ ID NO: 603114 - DNA, 75 bp, synthetic construct
  source 1..75: mol_type = other DNA
tgtctgttggcccgctactcaacagatgcagccagcatattaattcgttatctacaggaattacagttggggatg

SEQ ID NO: 603115 - DNA, 75 bp, synthetic construct
  source 1..75: mol_type = other DNA
tgcaacatgaaggtggcgatacctttatggggcatcaggaaattttaggcacgcgcccgttaccgccgctgcgga

SEQ ID NO: 603116 - DNA, 75 bp, synthetic construct
  source 1..75: mol_type = other DNA
atggcgcgatttgtggtgttagtgattgatagcttcggcgtgggagcaatgaaggatgtcacgttggtgcgtccg

SEQ ID NO: 603117 - DNA, 75 bp, synthetic construct
  source 1..75: mol_type = other DNA
accgggcgaggctgatatctggtggatgagccaatttttagactgtttttcacccgaacaaataattagcatact

SEQ ID NO: 603118 - DNA, 75 bp, synthetic construct
  source 1..75: mol_type = other DNA
aaaattctgcgatattcgtgatctcgtcgttctgcgctttgatggtgtgaacgttcgcgtggtgtatctgaacgg

SEQ ID NO: 603119 - DNA, 75 bp, synthetic construct
  source 1..75: mol_type = other DNA
aggtaatgaccctagctttaaccgagggtcattccggtaagcgtggtggtgccagaagctggaatgttgtctctg

SEQ ID NO: 603120 - DNA, 75 bp, synthetic construct
  source 1..75: mol_type = other DNA
ggcgatgagttgcagttcctgtgggtaaaccaggcggtggcgattggcgataaccttgaggcagatttgggtcag

SEQ ID NO: 603121 - DNA, 75 bp, synthetic construct
  source 1..75: mol_type = other DNA
tcggttttatcgcttcgtcagtttctctcgctatcagccctctggctttttataacgtagcgaagaaattcgagt

SEQ ID NO: 603122 - DNA, 75 bp, synthetic construct
  source 1..75: mol_type = other DNA
ttcatgaacatccactgtctgttggcctttctggtattgtctatcacaaggttattgatgaaattgaaaaatcat

SEQ ID NO: 603123 - DNA, 75 bp, synthetic construct
  source 1..75: mol_type = other DNA
ggaaaaatacagaaagcatcgaataccgtgacgttaaagtagaaaaagattactacgatgtcactgacaaactgc

SEQ ID NO: 603124 - DNA, 75 bp, synthetic construct
  source 1..75: mol_type = other DNA
cctcgccgattcactcaatgaaggaaaaccttccgggttaaaagtatttggcgactggtcgacgatatatccggc

SEQ ID NO: 603125 - DNA, 75 bp, synthetic construct
  source 1..75: mol_type = other DNA
gcggtgagcagaacgaactggaaaaagagcgtgaccagttgcagagcattctggcttccgagcgcaagatgaata

SEQ ID NO: 603126 - DNA, 75 bp, synthetic construct
  source 1..75: mol_type = other DNA
ggagaacataccgattacttctacggcggtgaaggtcaagatgtcatttatggtaatggtgggaacgacttgctg

SEQ ID NO: 603127 - DNA, 75 bp, synthetic construct
  source 1..75: mol_type = other DNA
atgctctgcgtgaaaaatgtttcgctacgtttaccagaaagctgcttgctgacaaacgttaactttacggtggat

SEQ ID NO: 603128 - DNA, 75 bp, synthetic construct
  source 1..75: mol_type = other DNA
gctaaacgcgccccctatttttccagtctgttgattggcttagtcggtgtgtatatgggcgtacatggcttcatg

SEQ ID NO: 603129 - DNA, 75 bp, synthetic construct
  source 1..75: mol_type = other DNA
cttgtcaccgtaggcgttggcgcagcaatcagcgttcagcaggtcgcaaaacgctggagcggatttaacactctc

SEQ ID NO: 603130 - DNA, 75 bp, synthetic construct
  source 1..75: mol_type = other DNA
atgttctggcgtacctggcgcggcgaacgcaactggctggagaatatgcacgagtatgatcatgaacatcatcac

SEQ ID NO: 603131 - DNA, 75 bp, synthetic construct
  source 1..75: mol_type = other DNA
caatattatgaagccaaactcgcaaattccgatgaaagtgactttgggggggaagacgctgaatacaactgatac

SEQ ID NO: 603132 - DNA, 75 bp, synthetic construct
  source 1..75: mol_type = other DNA
caatggcactgaccacaatgtttgtagctatgagtgcttctgcagtagagaaaaatatcactgtaacagctagtg

SEQ ID NO: 603133 - DNA, 75 bp, synthetic construct
  source 1..75: mol_type = other DNA
cagtttctgcaactcaggaactcgttattaatgcaggaagcacccagcaaactaatattgtagctggtaactatc

SEQ ID NO: 603134 - DNA, 75 bp, synthetic construct
  source 1..75: mol_type = other DNA
aatcgccttaattgagcagcccaataccacgctcgaccagttactggatatcgtgcaggggccagactacccgac

SEQ ID NO: 603135 - DNA, 75 bp, synthetic construct
  source 1..75: mol_type = other DNA
atgaataaaaatattgccgtgacgggcaagggtgacgcacgtcatgtgaaaaaattctgtgatattcgtgatctg

SEQ ID NO: 603136 - DNA, 75 bp, synthetic construct
  source 1..75: mol_type = other DNA
aaaattctgtgattttcgtgatctggtcgttctgcgctttgatggtgtgaacgttcgcgtggtgtatctgaacgg

SEQ ID NO: 603137 - DNA, 75 bp, synthetic construct
  source 1..75: mol_type = other DNA
tggcactgatgatgtgcggcgcggcatgggctgcggccataccgcaggcaagccgctatgactcccgcgtgcagc

SEQ ID NO: 603138 - DNA, 75 bp, synthetic construct
  source 1..75: mol_type = other DNA
aggttatctataaccctcagaacgtcaccgtcgttaacaccaaacccggctttatgacaacgctggtatttgata

SEQ ID NO: 603139 - DNA, 75 bp, synthetic construct
  source 1..75: mol_type = other DNA
acacggaaatcgctctgcgaaatccgatacagggacacggacagggaggtggcagcttttatggcttacgaatcc

SEQ ID NO: 603140 - DNA, 75 bp, synthetic construct
  source 1..75: mol_type = other DNA
ctgcaatggtttcttcccgttccagatccgcccaggcaaaaacgaaaccgatggtcgcatgttctcgcctgcgat

SEQ ID NO: 603141 - DNA, 75 bp, synthetic construct
  source 1..75: mol_type = other DNA
cgaaggtgttaggtttaggaaattgcacggtctggcaaacatcgctggcaggaaaacatcgcgtgactatcgaaa

SEQ ID NO: 603142 - DNA, 75 bp, synthetic construct
  source 1..75: mol_type = other DNA
tcgccgcctatccgcacctgaaaggggacgatctggcggagcaagcccaggcgttgtcaaaccgcgcttatgaag

SEQ ID NO: 603143 - DNA, 75 bp, synthetic construct
  source 1..75: mol_type = other DNA
gatcggcatgatcactgtgaaggacttccagaaagcggaacgtaaaccgaacgcgtgtaaagacgaacaaggccg

SEQ ID NO: 603144 - DNA, 75 bp, synthetic construct
  source 1..75: mol_type = other DNA
tggcattgtggaagatccggttaccggcaatgccaacggcccgatgggcgcatggctggtgcatcacaacgtgtt

SEQ ID NO: 603145 - DNA, 75 bp, synthetic construct
  source 1..75: mol_type = other DNA
acagtagctgcgcactatgtacgtgcgaaggtgttaggtttaggaaattgcacgatctggcaaacatcgcgtgac

SEQ ID NO: 603146 - DNA, 75 bp, synthetic construct
  source 1..75: mol_type = other DNA
gaagatggtgcgtttatcagttgcggcgttggcacggcgtatgaagggattttgcgcggcgaagtctccggcagc

SEQ ID NO: 603147 - DNA, 75 bp, synthetic construct
  source 1..75: mol_type = other DNA
catgcggcagatggagtttaccgtacccggcggtgcgcccatcaccggctttttgcatatgccgaaaggcgatgg

SEQ ID NO: 603148 - DNA, 75 bp, synthetic construct
  source 1..75: mol_type = other DNA
gttcagcccggaagaggactcacgcttaatcacctcatcatctgctgacggtaaattgttagagatcccatttaa

SEQ ID NO: 603149 - DNA, 75 bp, synthetic construct
  source 1..75: mol_type = other DNA
cgttgcctgtcttgggccggtggttcacaccttgttgagtgattttaagtgccagcaacaggtgccggaaatgta

SEQ ID NO: 603150 - DNA, 75 bp, synthetic construct
  source 1..75: mol_type = other DNA
agattatcgccgaactcacccacggcggcgcagatgttgcgctcgattgttccggtaatgccgcagggcgcttgc

SEQ ID NO: 603151 - DNA, 75 bp, synthetic construct
  source 1..75: mol_type = other DNA
ctggggacgcgtggtttacattggtgaaaccggaaaagtcgagttcgaggttagcgccgacctgatgcaccatca

SEQ ID NO: 603152 - DNA, 75 bp, synthetic construct
  source 1..75: mol_type = other DNA
tgaagaatctccgggtgaaattgaactctaccagggccgttcttacaaatcgtaccgtggtatgggttccctggg

SEQ ID NO: 603153 - DNA, 75 bp, synthetic construct
  source 1..75: mol_type = other DNA
gccctatcccgaaagcatgcgatccgttaacgcattacggcctgatcaacgccgttgccgcctgtgtggatgaca

SEQ ID NO: 603154 - DNA, 75 bp, synthetic construct
  source 1..75: mol_type = other DNA
catttaactggcgagccgatggcggaaacgcgcaatgtgttgattgaagcagcacgtataacgcgtggtgagatc

SEQ ID NO: 603155 - DNA, 75 bp, synthetic construct
  source 1..75: mol_type = other DNA
gggggggtttggcgcggcgaagaatttaagcaattttgccactcttggtagcgaatgcaccgttgaccgtgaatt

SEQ ID NO: 603156 - DNA, 75 bp, synthetic construct
  source 1..75: mol_type = other DNA
ccaaaagcgcatccactgtcgctgggtatgctggggatgcacggcgtgcgcagcaccaactatatcttgcaggag

SEQ ID NO: 603157 - DNA, 75 bp, synthetic construct
  source 1..75: mol_type = other DNA
attcaggagatggcgaccgccagtgaaaatcagctggatgtcaaaatcattctgatgaacaacgaagcgctgggg

SEQ ID NO: 603158 - DNA, 75 bp, synthetic construct
  source 1..75: mol_type = other DNA
tcagcatcagatgtggaccgcgcaagcttatccgctcaatcgcccacgccagtggctgacctccggtgggctggg

SEQ ID NO: 603159 - DNA, 75 bp, synthetic construct
  source 1..75: mol_type = other DNA
attaaccgtctgatgtggatctggcgcggcattgacccacgcgaaatcctcgacgtccaggcacgtattgtgatg

SEQ ID NO: 603160 - DNA, 75 bp, synthetic construct
  source 1..75: mol_type = other DNA
taaactactccatgtacgtgatcatggaccgtgcgttgccgtttattggtgatggtctgaaacctgttcagcgcc

SEQ ID NO: 603161 - DNA, 75 bp, synthetic construct
  source 1..75: mol_type = other DNA
atttatggccccttcctcgggaggggctttcccgtttcagcgtcccgctgaaatcgtcggcttatctcctttcgc

SEQ ID NO: 603162 - DNA, 75 bp, synthetic construct
  source 1..75: mol_type = other DNA
tgggggtaattgatgagttggcaagaagaaaaaattgcaaggttgttctaatattaaatgaagataacttacatg

SEQ ID NO: 603163 - DNA, 75 bp, synthetic construct
  source 1..75: mol_type = other DNA
ttatcattgtgccacaccaattaatgaaaagaaatataaagaactaattttatctgaaacggatcgaactatgat

SEQ ID NO: 603164 - DNA, 75 bp, synthetic construct
  source 1..75: mol_type = other DNA
tgggccacccaggcgatggtgtggcaacaaaaagcctgtgcggaagaagatccgcaactcagtggtcgtcactgg

SEQ ID NO: 603165 - DNA, 75 bp, synthetic construct
  source 1..75: mol_type = other DNA
cagctgggccaggttctgggtccgcacggcctgatgccaaacccgaaagtgggtactgtaacaccgaacgttgct

SEQ ID NO: 603166 - DNA, 75 bp, synthetic construct
  source 1..75: mol_type = other DNA
tacgtttaccagaaagccgcttgctgacaaacgttaacttttcagtagataaaggtgacattgtcacgttaatgg

SEQ ID NO: 603167 - DNA, 75 bp, synthetic construct
  source 1..75: mol_type = other DNA
aaccattcagccgtcttgacgtggctttgcgcgacagttttcgccagtgggtgttcagcgaagttcgcgccctgg

SEQ ID NO: 603168 - DNA, 75 bp, synthetic construct
  source 1..75: mol_type = other DNA
ctgtccgggcagttttcttgtacaggtgagctatggctcaatgagcagcggatcgacatgctgccgactgcacag

SEQ ID NO: 603169 - DNA, 75 bp, synthetic construct
  source 1..75: mol_type = other DNA
ctggaaaaagccattactcagcatcgccagcagcttcatcagtggacgcagaaagtggatattgctctgaacggt

SEQ ID NO: 603170 - DNA, 75 bp, synthetic construct
  source 1..75: mol_type = other DNA
cgtcgggaacgctccgtcaaggcctgaacgctcaagtgcatcattcacggcattacgtcgggcattccccttaag

SEQ ID NO: 603171 - DNA, 75 bp, synthetic construct
  source 1..75: mol_type = other DNA
cctgcgcgataattttcgccattgggtgttcagcgaaattcgcgccatggcgatccctgttgtgcaggtgacgca

SEQ ID NO: 603172 - DNA, 75 bp, synthetic construct
  source 1..75: mol_type = other DNA
aatggtaaccccttatagccatgcagatacgcagtttaaaaatgttccgtcagcttttcaggttggttatatcaa

SEQ ID NO: 603173 - DNA, 75 bp, synthetic construct
  source 1..75: mol_type = other DNA
atcccaatgagcaaattcagattagaatgataactcaggaaaaaattgctcaacttcctaaggacagagaaactc

SEQ ID NO: 603174 - DNA, 75 bp, synthetic construct
  source 1..75: mol_type = other DNA
tacagcggagtcctattcattaagctataatgctagaggcgactcagtttataagggggggctgcccgaaaacat

SEQ ID NO: 603175 - DNA, 75 bp, synthetic construct
  source 1..75: mol_type = other DNA
cagccaaaagcgttactcctggatgagccattcagccgtcttgatgtggctctgcgcgataattttcgccagtgg

SEQ ID NO: 603176 - DNA, 75 bp, synthetic construct
  source 1..75: mol_type = other DNA
gggatatttcgattacacatcacagcatcacgtgattatgtggcgctggctgatagcaacagcattcatcaatga

SEQ ID NO: 603177 - DNA, 75 bp, synthetic construct
  source 1..75: mol_type = other DNA
tcgctattgccgatggcggtaaccagggatatttcgattacacatcacagcataacgtcattatgtggagatggc

SEQ ID NO: 603178 - DNA, 75 bp, synthetic construct
  source 1..75: mol_type = other DNA
ttttcgtgcccctcacaggtaagagccggatacattcgttgtgtatgctgcagaattggtaaccggggccctgca

SEQ ID NO: 603179 - DNA, 75 bp, synthetic construct
  source 1..75: mol_type = other DNA
tggtgaccgtgcgtgaaggtgaagcccgcgaagttgtgctggcaaaaatgcacgaaaaacgcgttgagaaggcgc

SEQ ID NO: 603180 - DNA, 75 bp, synthetic construct
  source 1..75: mol_type = other DNA
tgacgttctgctgatcgactcctctcacggtcactctgaaggcgttctgcagcgtatccgtgaaactcgcgctaa

SEQ ID NO: 603181 - DNA, 75 bp, synthetic construct
  source 1..75: mol_type = other DNA
aaaataacattcgaggtacttataaccatgcaaattatatgtcgaatcgcaagtgcatgatgcaatggtacagtg

SEQ ID NO: 603182 - DNA, 75 bp, synthetic construct
  source 1..75: mol_type = other DNA
tcggcatcgacgctcgtaaatcgtgaccagaacgtacgtggtgcaactgtactgccgcacggtactggccgttcc

SEQ ID NO: 603183 - DNA, 75 bp, synthetic construct
  source 1..75: mol_type = other DNA
gaagccctggaaggcaccggtattccggttatcgctgatggtggtattcgtttctctggcgatattgcgaaagct

SEQ ID NO: 603184 - DNA, 75 bp, synthetic construct
  source 1..75: mol_type = other DNA
tgacgttctgctgatcgactcctctcacggccattctgaaggcgttctgcagcgtatccgtgaaacccgtgctaa

SEQ ID NO: 603185 - DNA, 75 bp, synthetic construct
  source 1..75: mol_type = other DNA
aattaaacccctagaactgcttgaagtacttaaacgcatagaaaaacgtggagcgttggagaaaaccagaaaagt

SEQ ID NO: 603186 - DNA, 75 bp, synthetic construct
  source 1..75: mol_type = other DNA
tggatagagctacaactagcacatgttgataaaaacagcataagaggcacttacaaccatgcacagtacctctta

SEQ ID NO: 603187 - DNA, 75 bp, synthetic construct
  source 1..75: mol_type = other DNA
tcatgctcagtatatagaaaaaagaagatatatgttgcagtggtatgctgacagaatacttccccctttatccaa

SEQ ID NO: 603188 - DNA, 75 bp, synthetic construct
  source 1..75: mol_type = other DNA
caaaaaaagaagaaaaaatcgcgctgcaaatgagtttgaaaaacacatttgaggccattgctcgagaatggcatc

SEQ ID NO: 603189 - DNA, 75 bp, synthetic construct
  source 1..75: mol_type = other DNA
tcatgcccagtacctcgatggtcgccgtgagatgatgcaatggtacgctgactacattgattcactcgcttcgca

SEQ ID NO: 603190 - DNA, 75 bp, synthetic construct
  source 1..75: mol_type = other DNA
gcactacgtaaaatggaaaaacgtggagctctggagaaaatgcgcaaggtccgccagcgctgtggtgaggtgttc

SEQ ID NO: 603191 - DNA, 75 bp, synthetic construct
  source 1..75: mol_type = other DNA
atatttttatactttaatgctggtaggttcaagacgagaaattgctttatcttttattatggctgtattgctatc

SEQ ID NO: 603192 - DNA, 75 bp, synthetic construct
  source 1..75: mol_type = other DNA
gtgaatatcgttgaatgctatatgccagtatttaaactcatatcatctgttaaagtctttcctgaagaatatggt

SEQ ID NO: 603193 - DNA, 75 bp, synthetic construct
  source 1..75: mol_type = other DNA
tcgcaatagtgaaaaaatatcgttaaatgacagcgaacttgatgcggcattttattcaatagtcgttatgcttga

SEQ ID NO: 603194 - DNA, 75 bp, synthetic construct
  source 1..75: mol_type = other DNA
aagaaaacgtcaatggatacactgacagcgattatgtccaccgctgaagccgtgaacgtggcccacgcagtgggc

SEQ ID NO: 603195 - DNA, 75 bp, synthetic construct
  source 1..75: mol_type = other DNA
cgccgatgaactggcaaaattaaaacaaaatgatcacgcaccttgcccgcccggttggcagttaagtttgcctgc

SEQ ID NO: 603196 - DNA, 75 bp, synthetic construct
  source 1..75: mol_type = other DNA
atggttacgctttggggaaattatgaggggatctctcagggcggcgcatctaccactgaagatcaaatcaagtac

SEQ ID NO: 603197 - DNA, 75 bp, synthetic construct
  source 1..75: mol_type = other DNA
ctttccgcgcgattgctggtaaccgcccactgttcattctgtgtattgccaacctctgcaccttaggggcgttta

SEQ ID NO: 603198 - DNA, 75 bp, synthetic construct
  source 1..75: mol_type = other DNA
atgttggattcccgacgcaagatcggtccaaaaggtaagttccgtccttttattctgtatgcgtcattcccggtc

SEQ ID NO: 603199 - DNA, 75 bp, synthetic construct
  source 1..75: mol_type = other DNA
tgatcgttaaagaacagggtggcctgggtcataaagcctgtatttcaggtcagggtgatatgccgttcaaagcgt

SEQ ID NO: 603200 - DNA, 75 bp, synthetic construct
  source 1..75: mol_type = other DNA
atcaagactaaaacaacaatgcggggtaaatatctattctaaaggaaaaaacaatattgcatttaaacaaaaaaa

SEQ ID NO: 603201 - DNA, 75 bp, synthetic construct
  source 1..75: mol_type = other DNA
aacctctgcaccttaggggcgtttaacgtcaagctcgccattcaggtctattacacccagtacgtgcttaacgat

SEQ ID NO: 603202 - DNA, 75 bp, synthetic construct
  source 1..75: mol_type = other DNA
ttgcgggtaaccgcccgctgttcattctgtgcattgccaacctctgcactttaggggcgtttaacgtcaagctcg

SEQ ID NO: 603203 - DNA, 75 bp, synthetic construct
  source 1..75: mol_type = other DNA
cacaaaagctgaatgaaaaaaaaggctcaacatcggcatcatcacttgagattgtgaattcacgacaatcaaaag

SEQ ID NO: 603204 - DNA, 75 bp, synthetic construct
  source 1..75: mol_type = other DNA
tgatgcgcctgaaatatttaaatctctgcgtcagacgtacccggatatttccggcctgattgataatgcagatcc

SEQ ID NO: 603205 - DNA, 75 bp, synthetic construct
  source 1..75: mol_type = other DNA
cagctcttgcgcgtggtcgggctgactggttggttggaatgaacctttcaagaggattcacgttgtcggcagcgc

SEQ ID NO: 603206 - DNA, 75 bp, synthetic construct
  source 1..75: mol_type = other DNA
aatgcacggaatgtcagggctttttttactgatgccccgcctcccaattctttctgccagttgttaagtgaagag

SEQ ID NO: 603207 - DNA, 75 bp, synthetic construct
  source 1..75: mol_type = other DNA
atgcgttgtttacgtctggcggcgaccggcgatcgtaccattaacatccacagttattacaacgatcagccggtt

SEQ ID NO: 603208 - DNA, 75 bp, synthetic construct
  source 1..75: mol_type = other DNA
ttctttgccgtctcgcaacctgacttgttgtcgctgtatggcgatttacaacagcagcataaagaaaaatgcctg

SEQ ID NO: 603209 - DNA, 75 bp, synthetic construct
  source 1..75: mol_type = other DNA
cacagttattacaacgatcagccggttgattatctcttctggcaagggatggcgctgcgactgctgggcgaacaa

SEQ ID NO: 603210 - DNA, 75 bp, synthetic construct
  source 1..75: mol_type = other DNA
atgtggaaatctacaggtgacaagttaatcaccgcgttgattgacggcaagccacaatacttacgcattgaaatg

SEQ ID NO: 603211 - DNA, 75 bp, synthetic construct
  source 1..75: mol_type = other DNA
agaagctgctattgcagcaatcgcagcagagaaaaataatattgatcataataatgattataataatgatgaata

SEQ ID NO: 603212 - DNA, 75 bp, synthetic construct
  source 1..75: mol_type = other DNA
taccgaattccgaatctcattgctgacgaatcggcaaaggacgaccttcatttaattatcaatattgataataaa

SEQ ID NO: 603213 - DNA, 75 bp, synthetic construct
  source 1..75: mol_type = other DNA
gggcaaagctcgcatgggcaatcagtatcattttgttgttgatagcgctaatttacaccctgcatttttatccct

SEQ ID NO: 603214 - DNA, 75 bp, synthetic construct
  source 1..75: mol_type = other DNA
tttttggtccgcttatccgcgggggattcaacaaacttgtaaaaggaaacaatcatacaatgcatcgtaaagatc

SEQ ID NO: 603215 - DNA, 75 bp, synthetic construct
  source 1..75: mol_type = other DNA
gtgctgcgcaaagacttctcacacagtagtgccgccgccgggacaatttttgcttttattagttttacgacgtta

SEQ ID NO: 603216 - DNA, 75 bp, synthetic construct
  source 1..75: mol_type = other DNA
tttcatttaaatatgcggctggaaagagtattgccgactgatttacttgatatagcgagtgaaaataatctgcga

SEQ ID NO: 603217 - DNA, 75 bp, synthetic construct
  source 1..75: mol_type = other DNA
gcagaacgtgctgatttaccgctgctttctcataatctgcccgctgattttgccgcgctgcgcaagctgatgatg

SEQ ID NO: 603218 - DNA, 75 bp, synthetic construct
  source 1..75: mol_type = other DNA
gcagaacgtgctgatttacccttgctttcgcataacctgcccgccgattttgctgcgttgcgtaaattgatgatg

SEQ ID NO: 603219 - DNA, 75 bp, synthetic construct
  source 1..75: mol_type = other DNA
gactcaggcgacgttatccaatgcgatggatgttagccagccaaacaactggccgcgtgtggaagagttgttccg

SEQ ID NO: 603220 - DNA, 75 bp, synthetic construct
  source 1..75: mol_type = other DNA
gtgcgctgcgtgaccagttgcatccaggcgaatatggtctgttccttggcaccgcacatccggcgaagtttaaag

SEQ ID NO: 603221 - DNA, 75 bp, synthetic construct
  source 1..75: mol_type = other DNA
tccaggcgaatatggcttgttcctcggcaccgcgcatccggcgaaatttaaagagagcgtggaagcgattctcgg

SEQ ID NO: 603222 - DNA, 75 bp, synthetic construct
  source 1..75: mol_type = other DNA
ccgtttgctggcgcagatttgctactactttgaagctgttgcgcagctgccgcaggaagcgcgcaaccagctggt

SEQ ID NO: 603223 - DNA, 75 bp, synthetic construct
  source 1..75: mol_type = other DNA
atcaaaatcggagattttgaaactgcatataaaactcttccagatgaaaaacatcgtttttcatcttactactaa

SEQ ID NO: 603224 - DNA, 75 bp, synthetic construct
  source 1..75: mol_type = other DNA
aagtcggtgggcgtctggtagcagtgctgccgggcgacgcgccaattctaaactggatgacgctggataattacg

SEQ ID NO: 603225 - DNA, 75 bp, synthetic construct
  source 1..75: mol_type = other DNA
atgaccaacgttctgctgatcatgccagcatcccgccgcgacgagtggcgtgaacagtttatcgagggcaagcag

SEQ ID NO: 603226 - DNA, 75 bp, synthetic construct
  source 1..75: mol_type = other DNA
aacgatacagtgccgcgtttcctgcacgacgggcagtggtcgccaaaagccacccaggcgacattatccaatgcg

SEQ ID NO: 603227 - DNA, 75 bp, synthetic construct
  source 1..75: mol_type = other DNA
cgtcagtggaatgactggtacacctccacgtccggcaaggactggaaccagatgatgacgcgtgccgtaaaccgc

SEQ ID NO: 603228 - DNA, 75 bp, synthetic construct
  source 1..75: mol_type = other DNA
gtgatgaattgtatggcgaagatccgtattacgtcctctacgtcacgccgcgtccccgggctgaaggattttgtt

SEQ ID NO: 603229 - DNA, 75 bp, synthetic construct
  source 1..75: mol_type = other DNA
accgcacatccggcgaaatttaaagagagcgtggaagcgattctcggtgaaacgctcgaactgccaaaagaactg

SEQ ID NO: 603230 - DNA, 75 bp, synthetic construct
  source 1..75: mol_type = other DNA
atgacgttcaccgtaaaaaccattcctgacatgctccttgaggcatatggaaatcagaccgaggtagcccgaata

SEQ ID NO: 603231 - DNA, 75 bp, synthetic construct
  source 1..75: mol_type = other DNA
gccacgccgtttacgctgcgcttctactcagcggcgcaaaacgcatgttgggcggtaaaactggcacacgatggc

SEQ ID NO: 603232 - DNA, 75 bp, synthetic construct
  source 1..75: mol_type = other DNA
cgtcgtcaggggcagtggttgcccgtttctgcgacccggttatcggcacaggttacggtgccaaaacaggtgcag

SEQ ID NO: 603233 - DNA, 75 bp, synthetic construct
  source 1..75: mol_type = other DNA
gccgtcgccattgcgttgaaaactggggcatcgtccgtgcgcttttatccgcgttatgaaggcaatttgcgcgac

SEQ ID NO: 603234 - DNA, 75 bp, synthetic construct
  source 1..75: mol_type = other DNA
atgcaaatgagcatcccatcgacgctttaaaaacgatggcgccgcatattacccaggtccatatcaaagatgcct

SEQ ID NO: 603235 - DNA, 75 bp, synthetic construct
  source 1..75: mol_type = other DNA
tcaagtacaaccgagacagcaaaggcgagcgtcatgtaatagttaacggcgtcctgatggtcacgccaggaaaaa

SEQ ID NO: 603236 - DNA, 75 bp, synthetic construct
  source 1..75: mol_type = other DNA
cagattgaagcggcagatattttttctattggcctggtggacaatctctccctgttcattgacgaaatggcgcat

SEQ ID NO: 603237 - DNA, 75 bp, synthetic construct
  source 1..75: mol_type = other DNA
atgaaactctacaatctgaaagatcacaacgaacaggtcagctttgcgcaagccgtaactcaggggttgggcaaa

SEQ ID NO: 603238 - DNA, 75 bp, synthetic construct
  source 1..75: mol_type = other DNA
gcagaacgtgctgatttgccattactttcgcataaccttcccgccgatttcgctgcgctgcgtaaactgatgatg

SEQ ID NO: 603239 - DNA, 75 bp, synthetic construct
  source 1..75: mol_type = other DNA
ggcaaacactcggtgtgctaatcgacccgcctggttatcagtttatgcagcgtcgtcaggggcagtggttgcccg

SEQ ID NO: 603240 - DNA, 75 bp, synthetic construct
  source 1..75: mol_type = other DNA
aacggatattacaggaagttgacgcccagtcatttaacctgaatgaggataaatactcaggcgtatttttacccg

SEQ ID NO: 603241 - DNA, 75 bp, synthetic construct
  source 1..75: mol_type = other DNA
cagaatagctcatccaagggctatgcgcggacatcagaagtacagagatgaggtgattgagcgcattaagcaact

SEQ ID NO: 603242 - DNA, 75 bp, synthetic construct
  source 1..75: mol_type = other DNA
ttgcagcgcgaactggagcagctaccgcaattgcttgaagatctggaggcgaagctggaagctttacagacgcaa

SEQ ID NO: 603243 - DNA, 75 bp, synthetic construct
  source 1..75: mol_type = other DNA
ccagcatctctgttgatgaacagaaaaacagattgatcgaatgcttccgggaatattggggcgtacagcagatta

SEQ ID NO: 603244 - DNA, 75 bp, synthetic construct
  source 1..75: mol_type = other DNA
tcactggtatgcgcgccgacgcggtcacgatccgcgggcaatgttgtacaatgcggttcagcatcagtggctcac

SEQ ID NO: 603245 - DNA, 75 bp, synthetic construct
  source 1..75: mol_type = other DNA
gcgatgcagtgtgccgcagcgctaggcgcgaagtcagtaaccgcgattgatataaatccagagcgacttgaacta

SEQ ID NO: 603246 - DNA, 75 bp, synthetic construct
  source 1..75: mol_type = other DNA
tcctgaatgtgaaagacaattatggtcccagtgcaaaaactatcagtttattggttccagatgttatggtggtaa

SEQ ID NO: 603247 - DNA, 75 bp, synthetic construct
  source 1..75: mol_type = other DNA
tattccggtatgtccaccacgctggagctggtactggcaggtacaggcgtgatgttcccgtttttctcaccgttt

SEQ ID NO: 603248 - DNA, 75 bp, synthetic construct
  source 1..75: mol_type = other DNA
atggcttctgttgtcgagatctgcaaccgcgcgctgtcgaatatcggcaacagtcgcagcatcaatagcctgact

SEQ ID NO: 603249 - DNA, 75 bp, synthetic construct
  source 1..75: mol_type = other DNA
caatccaacagcagcaatgcgcgttcagtacgaagttggtgcagacaccaacggaacaggaaagttgatctacac

SEQ ID NO: 603250 - DNA, 75 bp, synthetic construct
  source 1..75: mol_type = other DNA
gaatccatcgatgcctggcagatcccttcctcgctgattgccgaaatgccggcctccgtggcgctgcattatgcg

SEQ ID NO: 603251 - DNA, 75 bp, synthetic construct
  source 1..75: mol_type = other DNA
gatgagttaattgtcggcagtgaagatggtattgacccggtttcgctggcagccctgacgcgtaaagtcggacgc

SEQ ID NO: 603252 - DNA, 75 bp, synthetic construct
  source 1..75: mol_type = other DNA
gatgcaatcactattactcaaagcaggtttaaacacagaacaggttgcgcaactggagtccgaaaatgaaggaga

SEQ ID NO: 603253 - DNA, 75 bp, synthetic construct
  source 1..75: mol_type = other DNA
tggcacaggcgctggcagagcaaaacggcgtggcgtgggaatccatcgatgcctggcagatcccgtcctcgctga

SEQ ID NO: 603254 - DNA, 75 bp, synthetic construct
  source 1..75: mol_type = other DNA
agaaaaactggcactggcaaaatctttcggtgcgatgcaaacatttaacagtagcgaaatgagcgcgccgcaaat

SEQ ID NO: 603255 - DNA, 75 bp, synthetic construct
  source 1..75: mol_type = other DNA
ctgctgattctcctgctgacgggagcaccaatactcgctcaggaaccttctgacgttgcgaaaaacgtgcgtatg

SEQ ID NO: 603256 - DNA, 75 bp, synthetic construct
  source 1..75: mol_type = other DNA
aactactcgtcgtcggcggcaccagtggcatgggactggctgtcgcacgcatggtgctcgaagcaggcggtagtg

SEQ ID NO: 603257 - DNA, 75 bp, synthetic construct
  source 1..75: mol_type = other DNA
gttctttattacgcaggatgtcgtgaagaacatgctcgccgcgaagctcgaagggtctatcgtcaacgtcggttc

SEQ ID NO: 603258 - DNA, 75 bp, synthetic construct
  source 1..75: mol_type = other DNA
cgcgtcgtgatggcggtttctcgctgatgtatgcggcaggtaacgtaggatctattattgcgcccatcgcctgtg

SEQ ID NO: 603259 - DNA, 75 bp, synthetic construct
  source 1..75: mol_type = other DNA
gctgtatgagccaaccgatccgcgtcgtgatggcggtttctcgctgatgtatgcggcgggtaacgtggggtctat

SEQ ID NO: 603260 - DNA, 75 bp, synthetic construct
  source 1..75: mol_type = other DNA
cctgttaataaactggagtgtgccggagtcatcgttaatgtgccggtagctcagtatgaggagtatatccgacag

SEQ ID NO: 603261 - DNA, 75 bp, synthetic construct
  source 1..75: mol_type = other DNA
atgtcattaccacactgcccgaaatgcaactccgaatacacctacgaagataacggcatgtacatctgcccggaa

SEQ ID NO: 603262 - DNA, 75 bp, synthetic construct
  source 1..75: mol_type = other DNA
gatcgttaaagatgcgaacggcaacctgctggctgacggcgacagcgtgaccatcattaaagatctaaaagtgaa

SEQ ID NO: 603263 - DNA, 75 bp, synthetic construct
  source 1..75: mol_type = other DNA
tggttgaaggcgaccataatatcgattgcaaaatcgacggttttggtccgatgaaactgaagtctgagtttgtga

SEQ ID NO: 603264 - DNA, 75 bp, synthetic construct
  source 1..75: mol_type = other DNA
atttctactgatctggtaataaaaagccgcgcaaatgttaatcgcggagtagttatcccattaaaaataacaaca

SEQ ID NO: 603265 - DNA, 75 bp, synthetic construct
  source 1..75: mol_type = other DNA
atagtgcgttggatgtatttaatgcatgcattgatcgagttcgcgatgaagatttaaagaggaggcttatagcat

SEQ ID NO: 603266 - DNA, 75 bp, synthetic construct
  source 1..75: mol_type = other DNA
acaactttcaatgatggatttgcgattagtgtgctgcagagtgatccggatgaagttgtcaaaatgctggggatg

SEQ ID NO: 603267 - DNA, 75 bp, synthetic construct
  source 1..75: mol_type = other DNA
tggaaaatcaggtcatcactgaagaacaactcgatacagcactgcgtaatcgcgtcgaaggtctacgcctgggcg

SEQ ID NO: 603268 - DNA, 75 bp, synthetic construct
  source 1..75: mol_type = other DNA
ttgattatgccgatatttcccaacgagaacagttggctgcggcattaaaacgttggccgttattggctgagtttg

SEQ ID NO: 603269 - DNA, 75 bp, synthetic construct
  source 1..75: mol_type = other DNA
gttgccgcaggaatcgtcttttccaaatatcccttatttgatcgcctgctggttactggtgtgctgcctgctgtt

SEQ ID NO: 603270 - DNA, 75 bp, synthetic construct
  source 1..75: mol_type = other DNA
taattggttgttctggtagtgggaagacgacctctcttcatcgtattctagccacgtatcctcaggtgatttacc

SEQ ID NO: 603271 - DNA, 75 bp, synthetic construct
  source 1..75: mol_type = other DNA
aactgggccgcctgggcggtgttgaagatgacatgagcgttgacgccgaaagtgcattcctgaccgatccacaag

SEQ ID NO: 603272 - DNA, 75 bp, synthetic construct
  source 1..75: mol_type = other DNA
tatgtttgtctttggcggtatagctgcgccgttatcgggagtaggtggggaaactctgttaaaaatgagtctggc

SEQ ID NO: 603273 - DNA, 75 bp, synthetic construct
  source 1..75: mol_type = other DNA
atgaccgatctcttttccagccctgaccacacactcgacgcacttggcctgcgctgcccggaaccggtgatgatg

SEQ ID NO: 603274 - DNA, 75 bp, synthetic construct
  source 1..75: mol_type = other DNA
gaacgactcctgaccgcctgtgatcaatcagcaaacaaagatttaggcatcattgtaaggatctgcctggcgacc

SEQ ID NO: 603275 - DNA, 75 bp, synthetic construct
  source 1..75: mol_type = other DNA
acctgcacagcatcaaaattcgccagtgcagactgacgcaaaactgaactctcaacgtgattcacttaaaggaaa

SEQ ID NO: 603276 - DNA, 75 bp, synthetic construct
  source 1..75: mol_type = other DNA
actggtgtaatgcgaacgatacggtaagtgttaccagggcgctgaaaggtctggagagcaacgataaatatgtga

SEQ ID NO: 603277 - DNA, 75 bp, synthetic construct
  source 1..75: mol_type = other DNA
accgttgaatccgaagaagaccaagccttaaaacagttgagtaatgatgatcaacgacgtgtatatctgatgcta

SEQ ID NO: 603278 - DNA, 75 bp, synthetic construct
  source 1..75: mol_type = other DNA
aataatgaaataaaacagcgcgtaccttccaggtatttagatgaattaatccgacttggtcggatgcagaagaaa

SEQ ID NO: 603279 - DNA, 75 bp, synthetic construct
  source 1..75: mol_type = other DNA
aaatgaaaatagtaacgaagcgaatttctgatatatataatgaaatggatttaataaaggatgaaataaaaataa

SEQ ID NO: 603280 - DNA, 75 bp, synthetic construct
  source 1..75: mol_type = other DNA
gtgatcaggttgttgagaaaatcaatgcaatcattgagcagcgtcgtgctggcggtgctaaggacaaggatgtga

SEQ ID NO: 603281 - DNA, 75 bp, synthetic construct
  source 1..75: mol_type = other DNA
ctgcggggacaaattgtcaccggattacgccactggtatgcacgccgacgcggtcacgatccgcgggcaatgttg

SEQ ID NO: 603282 - DNA, 75 bp, synthetic construct
  source 1..75: mol_type = other DNA
gcgcagatctcggtaacaacgcactgacgatgtacaaccgtgtgatcctgagcgctggctcacatagccagaatg

SEQ ID NO: 603283 - DNA, 75 bp, synthetic construct
  source 1..75: mol_type = other DNA
gcgcagatctcggtaacaacgcactgacgatgtacaaccgcgtgatcctgagtgctggctcacatagccagaatg

SEQ ID NO: 603284 - DNA, 75 bp, synthetic construct
  source 1..75: mol_type = other DNA
tgcgccatgaacgcagttctctgccgctcggcaagtttttggtcaccgaaggcgttatcagccaggaaacgttgg

SEQ ID NO: 603285 - DNA, 75 bp, synthetic construct
  source 1..75: mol_type = other DNA
gctactacggtctgacgcaggggctgctatctgtcctgcgtcttttctggggcaacctgattaacttcatggcca

SEQ ID NO: 603286 - DNA, 75 bp, synthetic construct
  source 1..75: mol_type = other DNA
tcaacgcgaattacaagtttcgatgcaatcactattactcaaagcaggtttaaacacagaaaaggttgcgcaact

SEQ ID NO: 603287 - DNA, 75 bp, synthetic construct
  source 1..75: mol_type = other DNA
ttcaatggtcgcgcactgaaccctcgcaagatttgctggagctggtacaaaacccggattaccaaccaatggtgg

SEQ ID NO: 603288 - DNA, 75 bp, synthetic construct
  source 1..75: mol_type = other DNA
tttccgtcgatctttcccggctttctgcctatcgcctgcgtgaagcccaggctgaaggccaatattgtactgccg

SEQ ID NO: 603289 - DNA, 75 bp, synthetic construct
  source 1..75: mol_type = other DNA
tatatttctctctgccggaagaattcctaaagacatcatccgtaatgagggttatatcatcaaaacttaaagtgt

SEQ ID NO: 603290 - DNA, 75 bp, synthetic construct
  source 1..75: mol_type = other DNA
attttatttttaggtaagataggtatatacattggtagctttacaggtttaatgttatggattgccaacttgcta

SEQ ID NO: 603291 - DNA, 75 bp, synthetic construct
  source 1..75: mol_type = other DNA
tgttcgacaccgagccaatgaagcccagtaacaccgggcgtctgattgccgatatcttgccaaataccgtcgcgt

SEQ ID NO: 603292 - DNA, 75 bp, synthetic construct
  source 1..75: mol_type = other DNA
ccggactatcagccaatggtggtctttcccgcctcgtatgctgatgagcaacgggaagtgatcttcacaccacct

SEQ ID NO: 603293 - DNA, 75 bp, synthetic construct
  source 1..75: mol_type = other DNA
catggataaacccggaagagagtaaatcaaaccgcgcaattggcgttgcgctgaatgatactgcatgtcgcgtat

SEQ ID NO: 603294 - DNA, 75 bp, synthetic construct
  source 1..75: mol_type = other DNA
cgaaacgctgaaaacctggaccatgatggaaaccatcctcggcactgtcggcgccattgtcgggatgattgcatt

SEQ ID NO: 603295 - DNA, 75 bp, synthetic construct
  source 1..75: mol_type = other DNA
tacctgcttcgtgctggctgcggcggtacgtatcattcaggggtcggcaaccgttgcttgcttaacggcggtggg

SEQ ID NO: 603296 - DNA, 75 bp, synthetic construct
  source 1..75: mol_type = other DNA
gctcaaatccttcggtcacagccgcgtgcattatgctatcggccttgcggggctggtttgtgcgctaccgctgtt

SEQ ID NO: 603297 - DNA, 75 bp, synthetic construct
  source 1..75: mol_type = other DNA
gctggtgataacgctctgggtggtgatgaaagagttgaagaagccaaaactcaaagtcgcgaccttaccgccgcg

SEQ ID NO: 603298 - DNA, 75 bp, synthetic construct
  source 1..75: mol_type = other DNA
tgctttctcaatggcgcgccacaccggtacgaacctggtgaagctggtaatcccattatttgcaggcgtggcggc

SEQ ID NO: 603299 - DNA, 75 bp, synthetic construct
  source 1..75: mol_type = other DNA
cgaaacgctgaaaacctggaccatgatggaaaccatccttggcactgtcggtgctatcgtcgggatgattgcgtt

SEQ ID NO: 603300 - DNA, 75 bp, synthetic construct
  source 1..75: mol_type = other DNA
atgcagggtgcaccggcaccgctggctgcaggtaacctggcatctgataccaataaagaattacttaatacacct

SEQ ID NO: 603301 - DNA, 75 bp, synthetic construct
  source 1..75: mol_type = other DNA
cagcgaaatgctgatggatatcgaaatcgaccacgccgaccagaccgaagaaagcgacatgtccttccttacgcg

SEQ ID NO: 603302 - DNA, 75 bp, synthetic construct
  source 1..75: mol_type = other DNA
aatgccggattttgatattctcgcggagggtaaaacgctgtccggcgtggcagagcgcctgatgaacctgtcact

SEQ ID NO: 603303 - DNA, 75 bp, synthetic construct
  source 1..75: mol_type = other DNA
ctggcgctgggctggaaaggtgaggcgctgacagacaagggaaccttcatcgttgacgaggtgacacatgaggga

SEQ ID NO: 603304 - DNA, 75 bp, synthetic construct
  source 1..75: mol_type = other DNA
cttcgcgctatattgactcaacagcttcactcgttcgcgcaggaataaaatggtacgaaaatcgtgtcggcaagc

SEQ ID NO: 603305 - DNA, 75 bp, synthetic construct
  source 1..75: mol_type = other DNA
tggtttagatttaaatattggtggggtaaaacggataaagacaaaattataaaaattattcattatactctgatg

SEQ ID NO: 603306 - DNA, 75 bp, synthetic construct
  source 1..75: mol_type = other DNA
acgagcaggcagcaagacgcgcagcggcggcaaagtggcagcaactacaacgcggagccgcagcgttctccatca

SEQ ID NO: 603307 - DNA, 75 bp, synthetic construct
  source 1..75: mol_type = other DNA
cacgcaggagacgttcggtaacgagtactgggcgccaaaaggcattgaaattgtctcttatcagggacaggacaa

SEQ ID NO: 603308 - DNA, 75 bp, synthetic construct
  source 1..75: mol_type = other DNA
ctctggttctggccttctccagcgcaactgcggcatttgctgcgattccgcaaaacatccgcatcggtaccgacc

SEQ ID NO: 603309 - DNA, 75 bp, synthetic construct
  source 1..75: mol_type = other DNA
gcggaccagttaaccctcacgattgacgactgcgacggcggagtgcaactcccgaagcgcggacagacgctgggt

SEQ ID NO: 603310 - DNA, 75 bp, synthetic construct
  source 1..75: mol_type = other DNA
caattacagaaaggcgcggctgaatttgccatcacactggctcacggacgcgcagatctctaccctgaaatgcac

SEQ ID NO: 603311 - DNA, 75 bp, synthetic construct
  source 1..75: mol_type = other DNA
tcgttcctcacgcgtatggctgacatgctgggtgcaataaccaccgtaaaaaacgggtgcctgctgttcattctg

SEQ ID NO: 603312 - DNA, 75 bp, synthetic construct
  source 1..75: mol_type = other DNA
ttcctgacgacatcagcgaaccgcatctcggcgaaggcaaaatgccgtccttcggattcagcctgtcgctgatcc

SEQ ID NO: 603313 - DNA, 75 bp, synthetic construct
  source 1..75: mol_type = other DNA
ttgtttccactattccacgttttaccatctacccgaaaacgcactacgtcacgccgcgcgagcgcatcgtacagg

SEQ ID NO: 603314 - DNA, 75 bp, synthetic construct
  source 1..75: mol_type = other DNA
ggcacgtaacgttaacggtaaagcgattctctacggcgataagatcaccccatcaatggcgaaagcgattggcga

SEQ ID NO: 603315 - DNA, 75 bp, synthetic construct
  source 1..75: mol_type = other DNA
gaagggttcctgcgttcagaacgttcgctgatccagaccattggccgtgcggcgcgtaacatcaacggcaaagcg

SEQ ID NO: 603316 - DNA, 75 bp, synthetic construct
  source 1..75: mol_type = other DNA
ttatctcgaccattgcgcgttataccatctacccgaaaacgcactatgttacgccgcgcgagcgcattgtgcagg

SEQ ID NO: 603317 - DNA, 75 bp, synthetic construct
  source 1..75: mol_type = other DNA
accgggtgagccaccgccgacgctgtttgattacctgcctgccgatgggctgctggtggtcgatgaatctcacgt

SEQ ID NO: 603318 - DNA, 75 bp, synthetic construct
  source 1..75: mol_type = other DNA
gatgatgaaacatgcgcaaaacctggagttcgaagaggcggcgcaaattcgcgatcagttgcatcagttacgcga

SEQ ID NO: 603319 - DNA, 75 bp, synthetic construct
  source 1..75: mol_type = other DNA
tgtggttcagcgctctcccttaagtcgaggcatggcaacatactggtttctgaaaggagagaggcaggcggggca

SEQ ID NO: 603320 - DNA, 75 bp, synthetic construct
  source 1..75: mol_type = other DNA
tgtggttcagcgctctcccttaagacgaggcatggcaacatactggcttctgaaaggagagaggcaggcgggaca

SEQ ID NO: 603321 - DNA, 75 bp, synthetic construct
  source 1..75: mol_type = other DNA
tgagcagacataatggagggaaaaccgcagaaattgcggaggcgctggcggtaacggattaccaggcacgctatt

SEQ ID NO: 603322 - DNA, 75 bp, synthetic construct
  source 1..75: mol_type = other DNA
tgtggttcagcgctctccattaaggcgaggcatggcaacatactggcttctgcaagccggaaatactcttcacgc

SEQ ID NO: 603323 - DNA, 75 bp, synthetic construct
  source 1..75: mol_type = other DNA
tgtggttcagcgctctcccttaaggcgaggcatggcaacatactggtttctgaaaggagagaggcaggcgggtca

SEQ ID NO: 603324 - DNA, 75 bp, synthetic construct
  source 1..75: mol_type = other DNA
tgtggttcagcgctctcccttaagccgaggcatggcaacatactgggttctgaaaggagagaggcaggcgggcca

SEQ ID NO: 603325 - DNA, 75 bp, synthetic construct
  source 1..75: mol_type = other DNA
tgacctggagatgatgaacgaactgggatattgctcgggcattgaaaactactcacgcttcctctccggccgtgg

SEQ ID NO: 603326 - DNA, 75 bp, synthetic construct
  source 1..75: mol_type = other DNA
taactccgggcacggaatattcagtgaaaaaggcgacgatgacagcaacacagtgaataatgcaaataatcaaca

SEQ ID NO: 603327 - DNA, 75 bp, synthetic construct
  source 1..75: mol_type = other DNA
atgcataaaatcccttttgaagtattaatccactctgaaaacgcattaatccgcgcaaaggaaatgaatgcgttg

SEQ ID NO: 603328 - DNA, 75 bp, synthetic construct
  source 1..75: mol_type = other DNA
ttattcattctgagaatgcattaatccgcgcaaaggaaatggaggcattattacttaagttaatggaagtgccgg

SEQ ID NO: 603329 - DNA, 75 bp, synthetic construct
  source 1..75: mol_type = other DNA
gctggtgatcccactgtttgcgggcgttgcagccgcggcggcattcttactgccgggacccgcgccaatgctgtt

SEQ ID NO: 603330 - DNA, 75 bp, synthetic construct
  source 1..75: mol_type = other DNA
accggcgcgaccgaagccgaaacgctgaaaacctggaccatgatggaaaccatcctcggcactgtcggtgccatc

SEQ ID NO: 603331 - DNA, 75 bp, synthetic construct
  source 1..75: mol_type = other DNA
gttcaaacaggtgctggttgactctggcgtaggtccggcactgggcgaagcgttaaccggcatgggcctgccgat

SEQ ID NO: 603332 - DNA, 75 bp, synthetic construct
  source 1..75: mol_type = other DNA
gagcggggctgagtaaggacagggcgatgatctcagcgtacaacaaccacgggccatggtggaactcagggtcaa

SEQ ID NO: 603333 - DNA, 75 bp, synthetic construct
  source 1..75: mol_type = other DNA
aaaatagccctgacgagcgtgaagaggctgaaggagaaagtccgcagtctgaccacgggaaaccggagcaaatca

SEQ ID NO: 603334 - DNA, 75 bp, synthetic construct
  source 1..75: mol_type = other DNA
ttgattgtggtcgtgattttagatttcttaaagatgcttcttctttctatggaaagaaaacaaaaggtattactc

SEQ ID NO: 603335 - DNA, 75 bp, synthetic construct
  source 1..75: mol_type = other DNA
gctaatattgtgcatacacaagaggttgataaagaagagttcatcaaactctatacatcacaaataaaagcctac

SEQ ID NO: 603336 - DNA, 75 bp, synthetic construct
  source 1..75: mol_type = other DNA
aggtaagatcgtcgatcttctgactgaacgggctaaatatgttgtacgctaccagggcggtcacaacgcaggcca

SEQ ID NO: 603337 - DNA, 75 bp, synthetic construct
  source 1..75: mol_type = other DNA
accagacaagcgtcagcagcgaaaggtagtgccacgacagcaacaacgaaagcatcagaggcggcaggcagtgcg

SEQ ID NO: 603338 - DNA, 75 bp, synthetic construct
  source 1..75: mol_type = other DNA
gtagagttgatgccatcgctcagggaattaaatcccgggtgcgcatttgtattaatcaacttgaactgccccgga

SEQ ID NO: 603339 - DNA, 75 bp, synthetic construct
  source 1..75: mol_type = other DNA
atgcaaaaggcgtaagcccaatatttgataccagacccctccgcgccgccatgattgtctttctcctgatgcagg

SEQ ID NO: 603340 - DNA, 75 bp, synthetic construct
  source 1..75: mol_type = other DNA
gacaaaggcgtagtgtcctactttcccaaaactaaggaggctgcactccagatcgtaaatcaaattgaatcacga

SEQ ID NO: 603341 - DNA, 75 bp, synthetic construct
  source 1..75: mol_type = other DNA
atggataaagaacgcatcattcaggaatttgtgcccggtaaacaggtcacgctggcgcatttaattgcgcatccc

SEQ ID NO: 603342 - DNA, 75 bp, synthetic construct
  source 1..75: mol_type = other DNA
attaatcagctgctttatacgcccaaacacaccgcacgcttattacaggtgctgaaaataaagccgcgcgcgata

SEQ ID NO: 603343 - DNA, 75 bp, synthetic construct
  source 1..75: mol_type = other DNA
catagaagcgcgtgtgcgaatttgtattaatcagctgctttatacgcccaaacacaccgcacgcttattacaggt

SEQ ID NO: 603344 - DNA, 75 bp, synthetic construct
  source 1..75: mol_type = other DNA
tatttcggctatctcaaccaggcgcgacaagaaaccattgctcagttgaaacaaacgcgtgaagaagtcgctatg

SEQ ID NO: 603345 - DNA, 75 bp, synthetic construct
  source 1..75: mol_type = other DNA
gaataaacagattgatgagatgaacgcctcgattgccaaactggaacagcaaaaagcggctcaggaacgcagtct

SEQ ID NO: 603346 - DNA, 75 bp, synthetic construct
  source 1..75: mol_type = other DNA
agtcggcatcatgctgaaagtcacgccgcagattaacgaaggtaacgcggtacagatggtgattgagcaggaagt

SEQ ID NO: 603347 - DNA, 75 bp, synthetic construct
  source 1..75: mol_type = other DNA
agatttctaatcgtataaccaccatttatccacaatacgccatgcgtggcactgttttagggaaggtgcgaacaa

SEQ ID NO: 603348 - DNA, 75 bp, synthetic construct
  source 1..75: mol_type = other DNA
ccggtaacttttctaccggaaaaaaaactgaatcggggtttggtaataccagctataaccaacgtattggctata

SEQ ID NO: 603349 - DNA, 75 bp, synthetic construct
  source 1..75: mol_type = other DNA
tggcggtcagggtcggccttcactctatttcgaaattcgccgccaaggtcaggcggtcaatccacagccgtggtt

SEQ ID NO: 603350 - DNA, 75 bp, synthetic construct
  source 1..75: mol_type = other DNA
atgatcagttttcggttataaatttcttgcctcaccaggaatgcgcgggatatagtttaaaggttgccgcaaaat

SEQ ID NO: 603351 - DNA, 75 bp, synthetic construct
  source 1..75: mol_type = other DNA
tttatacaaaacaaaagaagaaaatctattgttgtacatcttaataagatcacttataaacaaacccattcaata

SEQ ID NO: 603352 - DNA, 75 bp, synthetic construct
  source 1..75: mol_type = other DNA
tccgtcggttccttcgggatgatgacggcaggctggccggcgtactgctgaatattgccggaatacttcagttca

SEQ ID NO: 603353 - DNA, 75 bp, synthetic construct
  source 1..75: mol_type = other DNA
atgaatacagccctttccatcatcgacgatgccaactcaaacactgctatcgattatcgtcaggaaatgaacgtc

SEQ ID NO: 603354 - DNA, 75 bp, synthetic construct
  source 1..75: mol_type = other DNA
gtaagtatcttgaacaaagaatacataacaataataaccctaaaacaattggctttccatttattaaaacatcta

SEQ ID NO: 603355 - DNA, 75 bp, synthetic construct
  source 1..75: mol_type = other DNA
tttttacgccacatcatcagaattatggtagtccaggcggggcagctttcgggctggccggtatccttcagagcc

SEQ ID NO: 603356 - DNA, 75 bp, synthetic construct
  source 1..75: mol_type = other DNA
tgcggatgcctggcagattaacggcgaaaatgaactggagttattacagcagattgcgcagaaaccaggtgcgct

SEQ ID NO: 603357 - DNA, 75 bp, synthetic construct
  source 1..75: mol_type = other DNA
gcgcagatgctggaacgctggctggagaactatcaccgtgccgcagagctgccagaaccaccacgttttgtggaa

SEQ ID NO: 603358 - DNA, 75 bp, synthetic construct
  source 1..75: mol_type = other DNA
aacattgagcttttcagcgaaagcgggcacgaatcattgctgggcaggattaaaggcgctgattcaatcactctc

SEQ ID NO: 603359 - DNA, 75 bp, synthetic construct
  source 1..75: mol_type = other DNA
cagaaccatacgaactgcccgttgacggacctcgggggaaaaacgtgtatttttagtcatcctgtttacctcttt

SEQ ID NO: 603360 - DNA, 75 bp, synthetic construct
  source 1..75: mol_type = other DNA
aatacggcattatcagccggactatgatgaatattcgttcattgcgtgtgtttgcccgtgaagttgattttgagc

SEQ ID NO: 603361 - DNA, 75 bp, synthetic construct
  source 1..75: mol_type = other DNA
gtgtacagggaaatcattaccccgtttctggtacggggattttttcccggtattctacgcctgtcatcttactgt

SEQ ID NO: 603362 - DNA, 75 bp, synthetic construct
  source 1..75: mol_type = other DNA
gcagtttgccaacggtacgcaaatccctattggtacgctgggggcagcgatttctgcagccaagccgcagaaagg

SEQ ID NO: 603363 - DNA, 75 bp, synthetic construct
  source 1..75: mol_type = other DNA
aatcgccgcagcactgaatactccaaccacagccattaatgcggagttacgccgactctggcgcagcggttcagt

SEQ ID NO: 603364 - DNA, 75 bp, synthetic construct
  source 1..75: mol_type = other DNA
cgcccgtattggtcttgttctgatggggaatcaccgcgtttattcaaacatgaccggtggtaacagaacggttga

SEQ ID NO: 603365 - DNA, 75 bp, synthetic construct
  source 1..75: mol_type = other DNA
gtggatgaggcggatcatcttggtattgacggtctggagcaactccgggcaattcaggacgccacggggatcggg

SEQ ID NO: 603366 - DNA, 75 bp, synthetic construct
  source 1..75: mol_type = other DNA
aaacttcaatacaaccgctgagaaaatgtttgacccctgcgaaaacctcaaggtttcagagaaaattttggtgga

SEQ ID NO: 603367 - DNA, 75 bp, synthetic construct
  source 1..75: mol_type = other DNA
tgatgactttattaacgaggttatcgaaccgaacaaactggtctttgacggcagcggttatctggcctgggaagg

SEQ ID NO: 603368 - DNA, 75 bp, synthetic construct
  source 1..75: mol_type = other DNA
gccgactttggcgcggcggcttagtcatcagaacaaaccgcagcacaggtggtcgcgctcgcaaaacaggaggcc

SEQ ID NO: 603369 - DNA, 75 bp, synthetic construct
  source 1..75: mol_type = other DNA
tagcaacagctgcaaacgcggcacaaaaaaataaatcaacgtatagttttgataacagtgaggataatgcggaaa

SEQ ID NO: 603370 - DNA, 75 bp, synthetic construct
  source 1..75: mol_type = other DNA
acgagcagatttaaatggattagggacggggccgatgggaagcagtggcacggatgcatacattgataatcatta

SEQ ID NO: 603371 - DNA, 75 bp, synthetic construct
  source 1..75: mol_type = other DNA
gtggaatggggccggccgccactgtcgacttatttaataaatttgtcacctttacagcagcacaacgagatcaag

SEQ ID NO: 603372 - DNA, 75 bp, synthetic construct
  source 1..75: mol_type = other DNA
tcatgcaggctatcgctgaaaagccgggagcgttacgcgttctgacacatacgcttaaccaggcgtggctcaccg

SEQ ID NO: 603373 - DNA, 75 bp, synthetic construct
  source 1..75: mol_type = other DNA
aaaaccaaagatggtcagcaactcaatctggataatatcggaacgactccgctggcagaaaaggtgaaaaccaaa

SEQ ID NO: 603374 - DNA, 75 bp, synthetic construct
  source 1..75: mol_type = other DNA
tggtcgctcgcttcattaactaacctgcttagtagcggcaaccaggcattaagcgcagataacatgaacaatgcc

SEQ ID NO: 603375 - DNA, 75 bp, synthetic construct
  source 1..75: mol_type = other DNA
ccctggcagcctctctggctgaaaaagtcagtgaaacatggcaaaaaataaacacccgccgcaatcaacaagagg

SEQ ID NO: 603376 - DNA, 75 bp, synthetic construct
  source 1..75: mol_type = other DNA
gatcccgctggataacgcctcagcttcggaaattgcccgcgtgctggaaagcctgactaaaaacagcggcgagaa

SEQ ID NO: 603377 - DNA, 75 bp, synthetic construct
  source 1..75: mol_type = other DNA
gcgcgccgagcaaatctaccgcgatgagcaaggcttaagcctgatgccgcacaccgcgcagccgatattgccagc

SEQ ID NO: 603378 - DNA, 75 bp, synthetic construct
  source 1..75: mol_type = other DNA
tgactccgctcaatgaacgccagtattaccagctattccttaacctgctggaagcacaggggtatgccgtcgtac

SEQ ID NO: 603379 - DNA, 75 bp, synthetic construct
  source 1..75: mol_type = other DNA
aagaaaaacgtaacctgatggtgtttatccgcccgaccattctgcgtgacggtatggcggcagacggcgtgtcgc

SEQ ID NO: 603380 - DNA, 75 bp, synthetic construct
  source 1..75: mol_type = other DNA
cgctgggggcagccatttctcaggcgaaaccgcagaaaggctccacggtgatcagtgaaaacggcgctaccacca

SEQ ID NO: 603381 - DNA, 75 bp, synthetic construct
  source 1..75: mol_type = other DNA
tgtcgcagcgcaaatataactatatgcgcgccgaacagatctatcgtgatgagcaaggcttaagcctgatgccgc

SEQ ID NO: 603382 - DNA, 75 bp, synthetic construct
  source 1..75: mol_type = other DNA
gcgggagaaagcgtggcgaaagtgccgctgctgggcgatatcccattgattggtaacctgtttaaatcgacggcg

SEQ ID NO: 603383 - DNA, 75 bp, synthetic construct
  source 1..75: mol_type = other DNA
agctggccgcagcgcgagaaaaccatggcgtttaatcaggcactgaataactggctggaggtcattcgggctaac

SEQ ID NO: 603384 - DNA, 75 bp, synthetic construct
  source 1..75: mol_type = other DNA
acggaactgcggagagccatttttgaactggtcaggcgaatgccctatcagcttgggtcatggaataaccaaagc

SEQ ID NO: 603385 - DNA, 75 bp, synthetic construct
  source 1..75: mol_type = other DNA
gcttctttccggctttagcggtacggcggttggtgtggtgaaaggcgactggatggcgctggtgcaggcggttaa

SEQ ID NO: 603386 - DNA, 75 bp, synthetic construct
  source 1..75: mol_type = other DNA
gcggcgagaaccagccagcaacgctgaagtcacaaattgttgctgatgaacgcaccaacagcgtgattgtcagcg

SEQ ID NO: 603387 - DNA, 75 bp, synthetic construct
  source 1..75: mol_type = other DNA
cgggagaaagtgtggcgaaagtgccgttactgggcgatatcccattgattggtaacctgtttaaatcgacggcgg

SEQ ID NO: 603388 - DNA, 75 bp, synthetic construct
  source 1..75: mol_type = other DNA
aaaccatgcaattgctcatcaactcggcggacagtttcatctgccgcacggactggcgaatgcgctcctgctcac

SEQ ID NO: 603389 - DNA, 75 bp, synthetic construct
  source 1..75: mol_type = other DNA
agtctgaccatgaaatagcgattttgatggatcgcgaatttgaccgccaaagagaagaggcaagactcaaagcgg

SEQ ID NO: 603390 - DNA, 75 bp, synthetic construct
  source 1..75: mol_type = other DNA
gggtggcgtacagcagcggccattctcctgatggccctgtgggggcctttgtccggcaccagttacggcattgcc

SEQ ID NO: 603391 - DNA, 75 bp, synthetic construct
  source 1..75: mol_type = other DNA
atgggcattattgcccagttctggtattactttgccggatttccctggtatgaggggaatatcctgtttgccttt

SEQ ID NO: 603392 - DNA, 75 bp, synthetic construct
  source 1..75: mol_type = other DNA
gtgttggtaaatcaacaatctttgctgaaatgatgaaatgttgcttgatgcgtggaaaaatgcaacgtgttgcct

SEQ ID NO: 603393 - DNA, 75 bp, synthetic construct
  source 1..75: mol_type = other DNA
tggaaaagcatccacctgtggctacgagatttgcttgttgcatgtgcacaacaacaaggtatcgaagaaaccatt

SEQ ID NO: 603394 - DNA, 75 bp, synthetic construct
  source 1..75: mol_type = other DNA
agagccagccaaaaagattttcatcgttcacggtcacgaccatgcagcaaaagagcagcttgagctcattcttca

SEQ ID NO: 603395 - DNA, 75 bp, synthetic construct
  source 1..75: mol_type = other DNA
ggcgctgaagcatctgacgccggtatctgaagagactaaacccgccagcataccggttgtgcagtcaccaaagcg

SEQ ID NO: 603396 - DNA, 75 bp, synthetic construct
  source 1..75: mol_type = other DNA
caagcggcgtcacccttgccgacggacaagaaatcttattgtggccgaacagtgaaattgatctgccagaagaca

SEQ ID NO: 603397 - DNA, 75 bp, synthetic construct
  source 1..75: mol_type = other DNA
gaacctctatgagactccaggagtggctggacaggctgctgctctggtctcccggtcagcgggatgtcattaaaa

SEQ ID NO: 603398 - DNA, 75 bp, synthetic construct
  source 1..75: mol_type = other DNA
accatcgaagagccgaaatcactcataatactttatgggataaagtcccggcctccgcatggagaaatgtaaaat

SEQ ID NO: 603399 - DNA, 75 bp, synthetic construct
  source 1..75: mol_type = other DNA
ataacagtaatggtgttgttggtgatgtggcgtggttataccgttatgtgaatggcggattcatcctgacaccgg

SEQ ID NO: 603400 - DNA, 75 bp, synthetic construct
  source 1..75: mol_type = other DNA
tgatggccggggtgtcctggtcccatcacacgccgtatggttttctgcgaacgagtctggcggcggatgttctgg

SEQ ID NO: 603401 - DNA, 75 bp, synthetic construct
  source 1..75: mol_type = other DNA
gccggtgatcctcgcggtgaacaaagtggataacgtgcaggaaaaagccgatctgctgccgcacttacagtttct

SEQ ID NO: 603402 - DNA, 75 bp, synthetic construct
  source 1..75: mol_type = other DNA
cagttcgcgtattatctggccggctttccctggtatgaggggaatatcctgtttgcctttgcagtggcggcacag

SEQ ID NO: 603403 - DNA, 75 bp, synthetic construct
  source 1..75: mol_type = other DNA
aacgaattatcgtcaccacacagtattttgtgttttatatactggcgctatacaaagaaaatttatcgcctaagc

SEQ ID NO: 603404 - DNA, 75 bp, synthetic construct
  source 1..75: mol_type = other DNA
gaacagcaatcagattgtttgcaaaattcccctatctgagaaagcaaaaactttggggaaatcacttctggcaaa

SEQ ID NO: 603405 - DNA, 75 bp, synthetic construct
  source 1..75: mol_type = other DNA
caaataatttcgatgcggaattagttgaagcgattggtaataggctggaaaacaaccaattttcggatgcaatac

SEQ ID NO: 603406 - DNA, 75 bp, synthetic construct
  source 1..75: mol_type = other DNA
atgattgatttacagcagcgttacgaggttattaaatctgtttgtgaaagtttgaagctgcaaccaaacaagcca

SEQ ID NO: 603407 - DNA, 75 bp, synthetic construct
  source 1..75: mol_type = other DNA
tcaaggcagtttgtgaaaaacttaaaaaccaaccacgcaagccaaagacagtaaaaagcaagcgtcaatctgtca

SEQ ID NO: 603408 - DNA, 75 bp, synthetic construct
  source 1..75: mol_type = other DNA
ttatggcctttatggtcagctttaattactggctggattctaggtattggcgggctaatcgcatttatcatttac

SEQ ID NO: 603409 - DNA, 75 bp, synthetic construct
  source 1..75: mol_type = other DNA
gtggacaacgtgcaggaaaaagccgatctgctgccgcatctgcagttcctggcaagccagatgaatttcctcgat

SEQ ID NO: 603410 - DNA, 75 bp, synthetic construct
  source 1..75: mol_type = other DNA
catactgaaggcgcgtatcaggcgatctacgtcgatacccctggcctgcatatggaagaaaaacgcgccattaac

SEQ ID NO: 603411 - DNA, 75 bp, synthetic construct
  source 1..75: mol_type = other DNA
gggggaacgaagaaattatcagacgatatgtgaggtaccaggaaaagatggaacaaacacatgaacagcagatgg

SEQ ID NO: 603412 - DNA, 75 bp, synthetic construct
  source 1..75: mol_type = other DNA
taacctctgaatatgaacaatttagtggcgttcatggaattggcgtggcgaaatttgcccagttaaagggggatt

SEQ ID NO: 603413 - DNA, 75 bp, synthetic construct
  source 1..75: mol_type = other DNA
caacgatgcactgaccaaagggcgtaaaagcggtctgtgtgtttatgctggctatcaaacctattctcagctggt

SEQ ID NO: 603414 - DNA, 75 bp, synthetic construct
  source 1..75: mol_type = other DNA
atgttagagtccttgatacagatggtgaagttgttactgaactttaccaaggggtgaatgtatcagaattagctg

SEQ ID NO: 603415 - DNA, 75 bp, synthetic construct
  source 1..75: mol_type = other DNA
gcccatattgttgaacttgttcgccagtgcgcgcagctacatgccgccgggcatcggattgtaattgtgacgtca

SEQ ID NO: 603416 - DNA, 75 bp, synthetic construct
  source 1..75: mol_type = other DNA
ttcttctttttcgatgtctacccacgctaccgctatgaagatatcgacgtgctggatttccgcgtttgctataac

SEQ ID NO: 603417 - DNA, 75 bp, synthetic construct
  source 1..75: mol_type = other DNA
tctggcggcgctggatctggtgaagaaaaccaacgatacgctggcagtaaccggtgaagcattctcccgtcagga

SEQ ID NO: 603418 - DNA, 75 bp, synthetic construct
  source 1..75: mol_type = other DNA
cagggcgatgacggtaaattgaccggttttgaggtggaatttgcgcaacaactggcaaaacatctgggcgtggaa

SEQ ID NO: 603419 - DNA, 75 bp, synthetic construct
  source 1..75: mol_type = other DNA
attatcgcctttcttttagaactgggtttgcgcgcgttacagcgccgactgacgccctggcatggagaagtacaa

SEQ ID NO: 603420 - DNA, 75 bp, synthetic construct
  source 1..75: mol_type = other DNA
ggctggttatcaggttgataccgtcgacagcgtctgactgtcgaaacaggttgactatcccggttgtgctgagac

SEQ ID NO: 603421 - DNA, 75 bp, synthetic construct
  source 1..75: mol_type = other DNA
ggggctgggaatgccgcagaaatatagattactttctttaatagtgatttgtttcacgctttattttcacctgga

SEQ ID NO: 603422 - DNA, 75 bp, synthetic construct
  source 1..75: mol_type = other DNA
atgcctgaacaccataaggttagcctcttactcgttggaaatcaacacagggggctgggaatgccgcagaaatat

SEQ ID NO: 603423 - DNA, 75 bp, synthetic construct
  source 1..75: mol_type = other DNA
taacaagaggtatgaaggtaaaggctatgctacagaatctgtcactgcgttatttcaatatttgttttttgaaaa

SEQ ID NO: 603424 - DNA, 75 bp, synthetic construct
  source 1..75: mol_type = other DNA
ggaatgagaagggctgcagggacatatgaatacggttatgtaaatgatcggggaacaattgattacgggagggtg

SEQ ID NO: 603425 - DNA, 75 bp, synthetic construct
  source 1..75: mol_type = other DNA
tgaaggtgtttctgcgttcacacacggcaggggcggagcaggaaaaacctgtgatgtcctgtgaacgccggcagg

SEQ ID NO: 603426 - DNA, 75 bp, synthetic construct
  source 1..75: mol_type = other DNA
taagcgcatcgatgtggtgattaatcaggtcaccatctctgatgaacgtaagaaaaaatacgatttctctacccc

SEQ ID NO: 603427 - DNA, 75 bp, synthetic construct
  source 1..75: mol_type = other DNA
ggcggtgattgcccagttcgcgtattacgtggccggtttaccgtggtaccagggcaatatcctgtttgcctttgc

SEQ ID NO: 603428 - DNA, 75 bp, synthetic construct
  source 1..75: mol_type = other DNA
gcgccgccatcctgtggggcatgggggtaacccagttctaccagggcgtggaaaccgtgcgttctctgaccagcc

SEQ ID NO: 603429 - DNA, 75 bp, synthetic construct
  source 1..75: mol_type = other DNA
tgaccagccagaaaacgacctttctgtggtgaaaccggatgctgcaattcagagtgaaccgccccgggtttcctg

SEQ ID NO: 603430 - DNA, 75 bp, synthetic construct
  source 1..75: mol_type = other DNA
aattacgaaggcaaagaatatgacatatgggtaggcaacagatggtattcatacgggcatatttattcaattggc

SEQ ID NO: 603431 - DNA, 75 bp, synthetic construct
  source 1..75: mol_type = other DNA
tacccggaattgccagcgactatcgcttcaaaacagctgctggcggcggtaggcagagtcgactgattcaactgt

SEQ ID NO: 603432 - DNA, 75 bp, synthetic construct
  source 1..75: mol_type = other DNA
caggtcaccatttctgatgagcgcaagaaaaatacgatttctctaccccttacaccatttccggtattcaggcgc

SEQ ID NO: 603433 - DNA, 75 bp, synthetic construct
  source 1..75: mol_type = other DNA
tatcatttaaaaaagcttccaccacataattctcctgtcttcgatcagattgttttattggatggtgaaaaatta

SEQ ID NO: 603434 - DNA, 75 bp, synthetic construct
  source 1..75: mol_type = other DNA
tcaaatttgggtaggtaacagatggtattcatacggacatatttactcaataggtggtaaatgcattaaacgaag

SEQ ID NO: 603435 - DNA, 75 bp, synthetic construct
  source 1..75: mol_type = other DNA
gaatgggatgatatgctaaacgacatcctcgacaaaggattaataatggatgttgacgagcttacaatcaaattt

SEQ ID NO: 603436 - DNA, 75 bp, synthetic construct
  source 1..75: mol_type = other DNA
accaggttagttatatgttcttcgccagtcgatttgctcttaatatcggctataaaaaagggaaagagtcaattc

SEQ ID NO: 603437 - DNA, 75 bp, synthetic construct
  source 1..75: mol_type = other DNA
ggcaaagcgttcaacgaaatgacgctggtctatgcaggtgacgcacgtaacaacatgggcaattcgatgctcgaa

SEQ ID NO: 603438 - DNA, 75 bp, synthetic construct
  source 1..75: mol_type = other DNA
tcctgaaattactcgatttcacgccagctgaactcaacagcctgctgcagttagccgcgaagctgaaagccgata

SEQ ID NO: 603439 - DNA, 75 bp, synthetic construct
  source 1..75: mol_type = other DNA
ctttgaatttcgaacgcttgcaagcgctggcattttgtaacgcaatgacaggggtattagcgaaattatatcccg

SEQ ID NO: 603440 - DNA, 75 bp, synthetic construct
  source 1..75: mol_type = other DNA
actcagcatcctcaccaattacgcaaagagatgttcagattgtttggctaaaatggcacgcattctctgaaacat

SEQ ID NO: 603441 - DNA, 75 bp, synthetic construct
  source 1..75: mol_type = other DNA
gcccagaatcctcacctattacaaaaagagatgttcagattgtctggctaaaatggcatgcgttctctgaaacat

SEQ ID NO: 603442 - DNA, 75 bp, synthetic construct
  source 1..75: mol_type = other DNA
cgaatggcaaacaccccacgcggatcaacagcgtttgagaaagccatgcagcaggcacaaaaggccattaacgcc

SEQ ID NO: 603443 - DNA, 75 bp, synthetic construct
  source 1..75: mol_type = other DNA
caaaagcggcagtaacaacaccaacagggcagcaaaccatcccgttcattatcgggtatgggacggcaatgaacc

SEQ ID NO: 603444 - DNA, 75 bp, synthetic construct
  source 1..75: mol_type = other DNA
tatttgctgaagcattgccttacctcactcctgctggcattgagagagcggcaacacaggcaccaacacttgctg

SEQ ID NO: 603445 - DNA, 75 bp, synthetic construct
  source 1..75: mol_type = other DNA
tccttgagcgccagtagcgcagcttcctcggcaacggcggcaggaaattccgcgaaggcggcaaaaacgtccgag

SEQ ID NO: 603446 - DNA, 75 bp, synthetic construct
  source 1..75: mol_type = other DNA
aagccgctaatgcagatcgtcaacgagcacaacgaaaacgttgagtggtataaaaataacactgacgcgattgat

SEQ ID NO: 603447 - DNA, 75 bp, synthetic construct
  source 1..75: mol_type = other DNA
atatcaggctgacgctggcgcgcgctatctggcaaagatgtaccagcagtttggtaactggcgtgacgctcttca

SEQ ID NO: 603448 - DNA, 75 bp, synthetic construct
  source 1..75: mol_type = other DNA
accaggttgtttacatgtttttcgccagtcgatttgcactcaatatcggctataaaaaagggaaagaatcaatcc

SEQ ID NO: 603449 - DNA, 75 bp, synthetic construct
  source 1..75: mol_type = other DNA
atgtacggaacatgcgaaacgctatgccgggagctggcagcaaagtattcgggagacacgcccctgatgctggtt

SEQ ID NO: 603450 - DNA, 75 bp, synthetic construct
  source 1..75: mol_type = other DNA
atgtacggaacatgcgaaacgctatgccggcagctggcagcaaagtattcgggagacacgccgctgatgctggtt

SEQ ID NO: 603451 - DNA, 75 bp, synthetic construct
  source 1..75: mol_type = other DNA
atgtacggaacatgcgaaacgctatgccggtagctggcagcaaagtatgcgggagacacgccactgatgctggtt

SEQ ID NO: 603452 - DNA, 75 bp, synthetic construct
  source 1..75: mol_type = other DNA
cgtcccggaatgcgtcacccgccgactggcggtggttaatcaggcccgcgccctgctgaaaaacaacacacgcga

SEQ ID NO: 603453 - DNA, 75 bp, synthetic construct
  source 1..75: mol_type = other DNA
cgtcccggaatgcgtcacccgccgtcaggaggtggttaatcaggcccgcaccctgctagaaaaacacacacacga

SEQ ID NO: 603454 - DNA, 75 bp, synthetic construct
  source 1..75: mol_type = other DNA
tatttcttccgctgcggtgatggagattatccgcaacgagagcgaaaaccgcctggtgaccgtccctgctgaact

SEQ ID NO: 603455 - DNA, 75 bp, synthetic construct
  source 1..75: mol_type = other DNA
ttccctggtatgaggggaatatcctgtttgcctttgcagtggtggcacaggtgctgacgtggtgtgaaacgcgca

SEQ ID NO: 603456 - DNA, 75 bp, synthetic construct
  source 1..75: mol_type = other DNA
tatttcttccgccgctgcgatggagattatcagcaacgtgagcgaaaaccgccaggtgaccgtcccggctgaact

SEQ ID NO: 603457 - DNA, 75 bp, synthetic construct
  source 1..75: mol_type = other DNA
ctgtgcagggaaatcattaccccgtttctggcccggagattttttcccgacgttctatgcctgtcatctggctgt

SEQ ID NO: 603458 - DNA, 75 bp, synthetic construct
  source 1..75: mol_type = other DNA
atgtacggaacatgcgaaacgctatgccggaagctggcagcaaagtatgcgggagacacgcctctgatgctggtt

SEQ ID NO: 603459 - DNA, 75 bp, synthetic construct
  source 1..75: mol_type = other DNA
gctggcgtccctgattcagaccgctgagcaggcattgtggaaacgtgaatgggccgcccgggatcatggcctcgc

SEQ ID NO: 603460 - DNA, 75 bp, synthetic construct
  source 1..75: mol_type = other DNA
atgtacggaacatgcgaaacgctctgccgtgagctggcagcaaagtatccgggagacacgccgctgatgctggtt

SEQ ID NO: 603461 - DNA, 75 bp, synthetic construct
  source 1..75: mol_type = other DNA
caacaggctatcaggtttgcagagcgtgaaggcgtgcctctgcacaccacagacctgttacaaccgacttcccgc

SEQ ID NO: 603462 - DNA, 75 bp, synthetic construct
  source 1..75: mol_type = other DNA
aagctccgaaaaattattgacgaatatgattgttattttttatgttcacaagctgataaaaataaatttgagttc

SEQ ID NO: 603463 - DNA, 75 bp, synthetic construct
  source 1..75: mol_type = other DNA
cggaatgcggctggcgcaggagagcaggccggagggaacagacagcctgtacatctacagggacccggggagtta

SEQ ID NO: 603464 - DNA, 75 bp, synthetic construct
  source 1..75: mol_type = other DNA
atggtggaagtgacgacagcgcgggggacgtaccggtatgtgtacgatgcgctggggaggcggacggaaaaacag

SEQ ID NO: 603465 - DNA, 75 bp, synthetic construct
  source 1..75: mol_type = other DNA
tctgcttaccctagaggtttgctagagaagggtaatattgacattcacaatcggcctgttgttaaaaactctgat

SEQ ID NO: 603466 - DNA, 75 bp, synthetic construct
  source 1..75: mol_type = other DNA
aaaaagaatctgtgttaatgcttcaagataagccatccgaagaaacgatgaaaaaaatggagaaagcaccagcca

SEQ ID NO: 603467 - DNA, 75 bp, synthetic construct
  source 1..75: mol_type = other DNA
atgaaaattatcgggaacaggcaattcgtgcctccgggaaatttgttatcgagaactatgcttcagcatataaaa

SEQ ID NO: 603468 - DNA, 75 bp, synthetic construct
  source 1..75: mol_type = other DNA
tttttgccgccgccgcaacaggtactggcaaaactgcttactattgccggacctcaaggatttatggacgccacc

SEQ ID NO: 603469 - DNA, 75 bp, synthetic construct
  source 1..75: mol_type = other DNA
tgcattcgcgttggctgaaatggtgctggccgctttcgcgtcaggcgactttaagtatcagtacgttagtcgtct

SEQ ID NO: 603470 - DNA, 75 bp, synthetic construct
  source 1..75: mol_type = other DNA
ggagctgattgccgcaacgcgcggtttaggttttatggttcagtcagcggggggttcctcgcaactgacgtggtg

SEQ ID NO: 603471 - DNA, 75 bp, synthetic construct
  source 1..75: mol_type = other DNA
attgcgattatcgcctttcttttagaactaggtttgcgcgcgttacagcgccgtctgacgccctggcatggagaa

SEQ ID NO: 603472 - DNA, 75 bp, synthetic construct
  source 1..75: mol_type = other DNA
ctggcttatttgccgctgatggtgatctggtttggtattggtgaaacctcgaagatcttactgatctatttagcg

SEQ ID NO: 603473 - DNA, 75 bp, synthetic construct
  source 1..75: mol_type = other DNA
ggtaatcgagctttatcgtccggtgccgccgctggcttatttgccgctgatggtgatctggtttggtattggtga

SEQ ID NO: 603474 - DNA, 75 bp, synthetic construct
  source 1..75: mol_type = other DNA
ggtgcttattcctaccgttagtgatgatggtcgcattatgtctgatgatgaagctattgataacttcatgaggac

SEQ ID NO: 603475 - DNA, 75 bp, synthetic construct
  source 1..75: mol_type = other DNA
aatgccgccactggtacgctgggagtatgattatcaaccggaagaaggcagcccggaagcggcgttgagtgagtt

SEQ ID NO: 603476 - DNA, 75 bp, synthetic construct
  source 1..75: mol_type = other DNA
ccctgctgcttttattgagacaaatatcgtgggcacctatgtgctgcttgaagccgcacgtaaatactggtctca

SEQ ID NO: 603477 - DNA, 75 bp, synthetic construct
  source 1..75: mol_type = other DNA
cggttgaatggtatttgactaaccaggactggtggcagcgtgtgatggatggatcatatgctggtgaacgcctgg

SEQ ID NO: 603478 - DNA, 75 bp, synthetic construct
  source 1..75: mol_type = other DNA
gaaacaatcggcgttatagctggcaccgtggcagctgtagcagccgtgacactcggcgttatcgccgtatctaaa

SEQ ID NO: 603479 - DNA, 75 bp, synthetic construct
  source 1..75: mol_type = other DNA
aggtaaaccacttccggtgtatggcaatggcgagcaaattcgcgactggttgttcgtggaagatcatgctcgcgc

SEQ ID NO: 603480 - DNA, 75 bp, synthetic construct
  source 1..75: mol_type = other DNA
catttggtacgtgcctggaagcggacttatggtttaccaaccattgtgactaattgctcgaacaattatggtcct

SEQ ID NO: 603481 - DNA, 75 bp, synthetic construct
  source 1..75: mol_type = other DNA
taaattccctggaataatcgatcacaaggtaaaagctactcctactgttgaagtcggggcgcgcggtttctatgc

SEQ ID NO: 603482 - DNA, 75 bp, synthetic construct
  source 1..75: mol_type = other DNA
cgctttacatgctttaaatttaatccttcaagcgatcttccaatgatttaccgtgttgctggcgatggtgaagaa

SEQ ID NO: 603483 - DNA, 75 bp, synthetic construct
  source 1..75: mol_type = other DNA
cttatctgactccagttggtgcggagcgagcagtcgcacaagctcctaccatcgccgggagagtagcgcagggtg

SEQ ID NO: 603484 - DNA, 75 bp, synthetic construct
  source 1..75: mol_type = other DNA
ttggccactatgtcatcatggtcatcagccagcatagctatgacgtttgcatccctgtacctcacagagttcatg

SEQ ID NO: 603485 - DNA, 75 bp, synthetic construct
  source 1..75: mol_type = other DNA
cattgcgttttgttgagcctgagtctgtagcatttatgcttgatattcttgcgcaacgtcaggaagacggtatga

SEQ ID NO: 603486 - DNA, 75 bp, synthetic construct
  source 1..75: mol_type = other DNA
tttgtggtgaccgcgatgacacgcgagcaggctgatgatgtattcaaagcgaaatttccgggaataatcgactac

SEQ ID NO: 603487 - DNA, 75 bp, synthetic construct
  source 1..75: mol_type = other DNA
ggcattctggatgtttatgcgaatgggcagcatgtatttcgtttccagaatggtgtggcgatagcgttaaaaaat

SEQ ID NO: 603488 - DNA, 75 bp, synthetic construct
  source 1..75: mol_type = other DNA
caaaatctttcggtgcgatgcaaacatttaacagtagcgaaatgagcgcgccgcaaatgcagagcgttttacgcg

SEQ ID NO: 603489 - DNA, 75 bp, synthetic construct
  source 1..75: mol_type = other DNA
atggtatcgtgcgcgttgcagaaagcgtcattcctgaaattaaacatcaggatgaggtgcgggtaaaaattgcca

SEQ ID NO: 603490 - DNA, 75 bp, synthetic construct
  source 1..75: mol_type = other DNA
cggcctgctggatgtttatgccaatggacagcatgtattccgttttcagaatggcgcgttacaaagcaatcgggc

SEQ ID NO: 603491 - DNA, 75 bp, synthetic construct
  source 1..75: mol_type = other DNA
tttttcgtcgttcggaagagtgcctgcatctcattcctaccagggaaaatcagggcgaaaacggcgatattggtc

SEQ ID NO: 603492 - DNA, 75 bp, synthetic construct
  source 1..75: mol_type = other DNA
ggattaaaacctacggtggacaaggcaaaaaatgccgttcagcgtgatggtgacaccatgaccggggaactgaaa

SEQ ID NO: 603493 - DNA, 75 bp, synthetic construct
  source 1..75: mol_type = other DNA
tgttaatggaggctcggactggacgctacgaaccccgattatcgttttccccgttcagaacaataccaacgctgc

SEQ ID NO: 603494 - DNA, 75 bp, synthetic construct
  source 1..75: mol_type = other DNA
ctttcgttttacaaaaaacggtgtgctggcattagaaaatctctcgaccggcaatttaagaaagttcacgctgtc

SEQ ID NO: 603495 - DNA, 75 bp, synthetic construct
  source 1..75: mol_type = other DNA
agataatatcggtggcgtgtattacaaacaggctcagatttatatcaatggtgcatggcgatccgtatcaggtta

SEQ ID NO: 603496 - DNA, 75 bp, synthetic construct
  source 1..75: mol_type = other DNA
tgcaggatgtgcgttatggttccgaaatgtattacaacccgggaggtaaccagatatcctggacatttcgctcac

SEQ ID NO: 603497 - DNA, 75 bp, synthetic construct
  source 1..75: mol_type = other DNA
aaaaatattcaggccggaaatggcagaaggtttacgctatccagttctgacagttccacgaagaacgtagggttt

SEQ ID NO: 603498 - DNA, 75 bp, synthetic construct
  source 1..75: mol_type = other DNA
attgagaaggccgggatagaactgaataaagaagaacacgatcagctatataaagccatattattactggtgggc

SEQ ID NO: 603499 - DNA, 75 bp, synthetic construct
  source 1..75: mol_type = other DNA
ttgatgcccgctatcagaccaaaacaggcggtgtacaggatgtgcgtctgggcggtgccattggtattgggcgtg

SEQ ID NO: 603500 - DNA, 75 bp, synthetic construct
  source 1..75: mol_type = other DNA
cgttgaccagatcagaaaatctgatggcaccctacaggaacatgacggtatctgcgagatccatgttgttaaata

SEQ ID NO: 603501 - DNA, 75 bp, synthetic construct
  source 1..75: mol_type = other DNA
tacattcagaagaaggcgacgcgcgaacactgactctggggcaactgacgccgcgcattatgagtggtgcagaag

SEQ ID NO: 603502 - DNA, 75 bp, synthetic construct
  source 1..75: mol_type = other DNA
tgtggcaggaagggatgctgatgcgtccacaccattttcagcaacagcaacgttacaacgactatctgggtaacc

SEQ ID NO: 603503 - DNA, 75 bp, synthetic construct
  source 1..75: mol_type = other DNA
gtattgattattcgctggtggaagcggcactggatctcggtgcacgaccgctgaaaacgttctttactgtgatcg

SEQ ID NO: 603504 - DNA, 75 bp, synthetic construct
  source 1..75: mol_type = other DNA
caccgtatgcaaatcgagtcgctcaagagcggctttttttgtgtctgaaatcacccatatccgtgcagtatatag

SEQ ID NO: 603505 - DNA, 75 bp, synthetic construct
  source 1..75: mol_type = other DNA
gaggatgccggtgatgaaaaagggtatgaatcctttccttggtttatcaaacgtgcgcacagtccatccagaggg

SEQ ID NO: 603506 - DNA, 75 bp, synthetic construct
  source 1..75: mol_type = other DNA
attccgggttcagctatttcgaactcgacaagagcggccaggcctggacagaaatggctgccgccggggccgttg

SEQ ID NO: 603507 - DNA, 75 bp, synthetic construct
  source 1..75: mol_type = other DNA
gtttctgccaatgctggatgggggagcctaccgtcagcaggtagaaccgatgatctctgctgacaactggcaacc

SEQ ID NO: 603508 - DNA, 75 bp, synthetic construct
  source 1..75: mol_type = other DNA
ctcgcagcatgtcgctggctgcaaccattgcacaggcagctactcctgctgccacatcaccggaaacattgtcat

SEQ ID NO: 603509 - DNA, 75 bp, synthetic construct
  source 1..75: mol_type = other DNA
gtgagaaatgaaatcagcgacggacggcgaatcgggcgttaccggctgaattatgccgatgtccgggatttgcat

SEQ ID NO: 603510 - DNA, 75 bp, synthetic construct
  source 1..75: mol_type = other DNA
ccgtaaccagacccggtttacccatcgcgcccgccgatcccagctccacccggaagatttctaccttgatcttgc

SEQ ID NO: 603511 - DNA, 75 bp, synthetic construct
  source 1..75: mol_type = other DNA
agagtgccaggcctggacagaaatggctgccgccggggccgttgcactgcatgtttccggcagtttcccggatct

SEQ ID NO: 603512 - DNA, 75 bp, synthetic construct
  source 1..75: mol_type = other DNA
gagcggtcattatattgcgggtgttactggtggcactgcaaacgcactgacgctggaacttccctcgacgttttt

SEQ ID NO: 603513 - DNA, 75 bp, synthetic construct
  source 1..75: mol_type = other DNA
atcagctctggcattaaacagcaaatgattaatcggggtgtagcagaatcgacgataaatgttatttttaatccc

SEQ ID NO: 603514 - DNA, 75 bp, synthetic construct
  source 1..75: mol_type = other DNA
cgatcgataagttttatcaattgaagtattacgatagattacataatataattatttctgctatttcccggagga

SEQ ID NO: 603515 - DNA, 75 bp, synthetic construct
  source 1..75: mol_type = other DNA
ctatcggtaagttttatcaatcgatatattacgacagattgcaaaaaataattgtttctgctatttcccggagga

SEQ ID NO: 603516 - DNA, 75 bp, synthetic construct
  source 1..75: mol_type = other DNA
cagaacaatcgctgatcactcagtacaaaggatctcgccttgtcgttaaggcctatgcaggcacgggcaaaacca

SEQ ID NO: 603517 - DNA, 75 bp, synthetic construct
  source 1..75: mol_type = other DNA
ccctgaacgactcaccactctacgacgcaatacagtcaaagaagagtttggggctgacattacggtctcaacagc

SEQ ID NO: 603518 - DNA, 75 bp, synthetic construct
  source 1..75: mol_type = other DNA
cgggtaaagaataagaaactgcttgatgagtatgaagactacttcgagtatcaagaagtagcgaaggcgaccaaa

SEQ ID NO: 603519 - DNA, 75 bp, synthetic construct
  source 1..75: mol_type = other DNA
ccagcagtcaaaagtggccgctaccgacaaaatccgcagcgtggtcagcgtgcaggtgccgggtattccgctgca

SEQ ID NO: 603520 - DNA, 75 bp, synthetic construct
  source 1..75: mol_type = other DNA
gtataatcaccgggatcttaccgcgaccttcaccagaaccgtgatcccggaactgcggcgcgcactcaataccgt

SEQ ID NO: 603521 - DNA, 75 bp, synthetic construct
  source 1..75: mol_type = other DNA
gtttatgcagcggaccgggaagtctcaaagtacttagccgtttcacgaataaacacatctggattatttgcgacg

SEQ ID NO: 603522 - DNA, 75 bp, synthetic construct
  source 1..75: mol_type = other DNA
ggtgaaacggcaacattcatttatgttgggcgcatgaaatttgaaggccagaaacgagtaaaagacctgcttgat

SEQ ID NO: 603523 - DNA, 75 bp, synthetic construct
  source 1..75: mol_type = other DNA
tttccaatattcgtttaggtttcttgcgtcgggcgaaacatattcatgctctaagtaaatggcttcaggagtacc

SEQ ID NO: 603524 - DNA, 75 bp, synthetic construct
  source 1..75: mol_type = other DNA
cagtttctggattcggcggcatggaaacagtgatccgtgatgtcattactactttcagacaacaacatatccaaa

SEQ ID NO: 603525 - DNA, 75 bp, synthetic construct
  source 1..75: mol_type = other DNA
ttttgccatcgttctcaacccgctcgtcacctggtttattcgtcgggggtacaacgccccgttgccattacgatt

SEQ ID NO: 603526 - DNA, 75 bp, synthetic construct
  source 1..75: mol_type = other DNA
gatgcaattcagaatattgttggttcttttgggcgtacccagctttttagagacgtacttagttcagggccattt

SEQ ID NO: 603527 - DNA, 75 bp, synthetic construct
  source 1..75: mol_type = other DNA
aacggctctcgaaaaccttggtttgggagaaggtgctccagctattggcgttccgttcttctggccgtccgcagc

SEQ ID NO: 603528 - DNA, 75 bp, synthetic construct
  source 1..75: mol_type = other DNA
tcaaatcggatggcacggtgaaaacggctctcgaaaaccttggtttgggagaaggtgctccagctattggcgttc

SEQ ID NO: 603529 - DNA, 75 bp, synthetic construct
  source 1..75: mol_type = other DNA
ttcagcaagcaattcatcaggctgcgatcaagctggccgccctggagttcatcgaccaggaaaccgcccggcagg

SEQ ID NO: 603530 - DNA, 75 bp, synthetic construct
  source 1..75: mol_type = other DNA
atggccctgactgaagagctgaatgaactggacgaatcactggataaactgacctgcaagtatgtcagtaatctt

SEQ ID NO: 603531 - DNA, 75 bp, synthetic construct
  source 1..75: mol_type = other DNA
cattgccgtccttgaacaattctcggtattgccacgatggcgatatgcccaattatggtttcctttagcgtggca

SEQ ID NO: 603532 - DNA, 75 bp, synthetic construct
  source 1..75: mol_type = other DNA
gtggtggtatacgacggaatgacaccttatcgggaaaatcacctgatgctggatgtgtcgcaaagcgatagcgaa

SEQ ID NO: 603533 - DNA, 75 bp, synthetic construct
  source 1..75: mol_type = other DNA
acgcgtttactttggggactggctggaatacacgcattggtgccatttccgtcgatgccacgaagtcgcatagta

SEQ ID NO: 603534 - DNA, 75 bp, synthetic construct
  source 1..75: mol_type = other DNA
acatggtgtgaaacgcccagccggtggcgtttcgcagggactatgttgcttctggcagtgtggttgcctttctct

SEQ ID NO: 603535 - DNA, 75 bp, synthetic construct
  source 1..75: mol_type = other DNA
cataacattcctcagggggaagcgttaagtgaggagcaacaacgttatattgtgacggtaatctaccactggctg

SEQ ID NO: 603536 - DNA, 75 bp, synthetic construct
  source 1..75: mol_type = other DNA
ggcaaccggaaaattgccgcccttatcgcggcgcggttgtactggttaattttgataccgatcagcgcaagccct

SEQ ID NO: 603537 - DNA, 75 bp, synthetic construct
  source 1..75: mol_type = other DNA
ttagcgggcggaggtgcggatcttgatgtgagtgttaaggaagccgatggttcagttactacatatctggtgcct

SEQ ID NO: 603538 - DNA, 75 bp, synthetic construct
  source 1..75: mol_type = other DNA
gtttaattgctattggaggcttatgggttattggcaatatcattatcggaaatttagtatttcttactaaaccaa

SEQ ID NO: 603539 - DNA, 75 bp, synthetic construct
  source 1..75: mol_type = other DNA
tgcggttgcggcacagatgctgacgtggtgtgaaacgcgcagttggtggcgtttggtgggggtcatattgctgct

SEQ ID NO: 603540 - DNA, 75 bp, synthetic construct
  source 1..75: mol_type = other DNA
tggaacagcaactgccacccgggatcagtgaatccggtgaagtggtggatatggccgcttatgaggcgtggcaac

SEQ ID NO: 603541 - DNA, 75 bp, synthetic construct
  source 1..75: mol_type = other DNA
gggaaatcactaccccgtttctggtacggggattttttcccgacgttctatgcctgtcatcttactgtgctgggc

SEQ ID NO: 603542 - DNA, 75 bp, synthetic construct
  source 1..75: mol_type = other DNA
cttccagggaaccgaactgattggtattgcggcgggtgaatctgaagagccggggaaaaatattccgcgtgcggt

SEQ ID NO: 603543 - DNA, 75 bp, synthetic construct
  source 1..75: mol_type = other DNA
cgatggcgaagctctgcgcgaggttaaaacagaaaaatgtggcactttccattcttttaaagggaaagcgccaaa

SEQ ID NO: 603544 - DNA, 75 bp, synthetic construct
  source 1..75: mol_type = other DNA
gctgacgccgcatgataaaccgaagcatccccctcatccccgaaaaatcgccagaggctcgtcaaccgtctttat

SEQ ID NO: 603545 - DNA, 75 bp, synthetic construct
  source 1..75: mol_type = other DNA
ccagaggctcttcaaccgtctttattgacggcctgcccgccgccagaaccggtgatgctattgactgcggcggcg

SEQ ID NO: 603546 - DNA, 75 bp, synthetic construct
  source 1..75: mol_type = other DNA
acaaaggcacccagcacgacggttattacgagaccgtcatcaccgccgggtcatccaccgtttttattgatggcc

SEQ ID NO: 603547 - DNA, 75 bp, synthetic construct
  source 1..75: mol_type = other DNA
ccacaacagccacaacagccacaacagccacaacagccacaacagccacaacagccacaacagccacaacagcca

SEQ ID NO: 603548 - DNA, 75 bp, synthetic construct
  source 1..75: mol_type = other DNA
cagcagcatatgcagcgtcgtgaagaggtgaacattaatgtgcaccgggagcgcggggaggatgttgagccggga

SEQ ID NO: 603549 - DNA, 75 bp, synthetic construct
  source 1..75: mol_type = other DNA
caacagccacaacagccagtgtcttctgtcatcaatgataagaagtcagatgcaggtgtgagtgttccggcaggg

SEQ ID NO: 603550 - DNA, 75 bp, synthetic construct
  source 1..75: mol_type = other DNA
ggcgaatggtataacacgcgctttgtccctgccgcgctggttgaaaccatactgaactcgccgcgtgtcgcagat

SEQ ID NO: 603551 - DNA, 75 bp, synthetic construct
  source 1..75: mol_type = other DNA
agatgatggcgctgaccgacaacccgaacgtgaagttcctgcactgtctgccggcgttccatgacgaccagacta

SEQ ID NO: 603552 - DNA, 75 bp, synthetic construct
  source 1..75: mol_type = other DNA
caccgcgcgggttctcgggcggatgtatgacggcattcagtatcgcggtcacggccaggaagtggtcgaaacgct

SEQ ID NO: 603553 - DNA, 75 bp, synthetic construct
  source 1..75: mol_type = other DNA
ttctgaaactgctcgactttacccctgcacagttcacttctctgctgacccttgccgcacagctcaaagccgata

SEQ ID NO: 603554 - DNA, 75 bp, synthetic construct
  source 1..75: mol_type = other DNA
gattgcgattatcgcctttcttttagaactgggtctgcgcgcgttacagcgccgcctgacgccctggcatggaga

SEQ ID NO: 603555 - DNA, 75 bp, synthetic construct
  source 1..75: mol_type = other DNA
tcctgacgcttctccggacctgcttcctctcaatcaggaagcagaaaagcagcgttcagagacagtggaaaaaaa

SEQ ID NO: 603556 - DNA, 75 bp, synthetic construct
  source 1..75: mol_type = other DNA
atctacagcaatattcaaacgctcaaaagacaatatgtggctcatgtattatcgttttttcctaaaggaaatact

SEQ ID NO: 603557 - DNA, 75 bp, synthetic construct
  source 1..75: mol_type = other DNA
cccggaggcgattaccgaactcgccatgtaccgccagtttgccgatgcggtgcaggtgccgatcctcgccaacat

SEQ ID NO: 603558 - DNA, 75 bp, synthetic construct
  source 1..75: mol_type = other DNA
ttatctctccggcggtggtgtggcggcaggttcgctggggttgccggatctcggtatttctactcttgatgatgt

SEQ ID NO: 603559 - DNA, 75 bp, synthetic construct
  source 1..75: mol_type = other DNA
ttggccaacgatattctccggtaagattgatgtgttcccaggggataggagaagtcgcttgatatctagtatgac

SEQ ID NO: 603560 - DNA, 75 bp, synthetic construct
  source 1..75: mol_type = other DNA
catgaaccgcgccgctgaacatgtctacaacgtcctgcgccaggaaggcacgcagaaaagcgtcatcgacaccat

SEQ ID NO: 603561 - DNA, 75 bp, synthetic construct
  source 1..75: mol_type = other DNA
gctgaccgatattcgccgtatcaccgacgtttgttcgctgccgctgctggtggatgcggatatcggttttggttc

SEQ ID NO: 603562 - DNA, 75 bp, synthetic construct
  source 1..75: mol_type = other DNA
atcggatccgcgcggcggtggatgcgaaaaccgatcctgattttgtgatcatggcgcgcaccgatgctctggcgg

SEQ ID NO: 603563 - DNA, 75 bp, synthetic construct
  source 1..75: mol_type = other DNA
cggttattggcgcgggtagcgtcgtcacaaaaaacattccaccaaacgtcgtagctgcgggcgttccctgtcggg

SEQ ID NO: 603564 - DNA, 75 bp, synthetic construct
  source 1..75: mol_type = other DNA
tgacgcggtactggagttactggtccgcaccttccgcgatctgcgtgccaacggcgaaaagaaaacgtcaatgga

SEQ ID NO: 603565 - DNA, 75 bp, synthetic construct
  source 1..75: mol_type = other DNA
cgcgtacaccgctggaagtgcaggactgtctgttaggcatgctttctgatcgggtgatgacggtgccggaactgg

SEQ ID NO: 603566 - DNA, 75 bp, synthetic construct
  source 1..75: mol_type = other DNA
ctctatgcgcgggaaggctttaatattattgccactgccaatacccgcgatcgcggcgtcaatgaaatgagtgcc

SEQ ID NO: 603567 - DNA, 75 bp, synthetic construct
  source 1..75: mol_type = other DNA
tggtgtctctctggcttctgaactgtgtgattacaaggctgattactcagatagtagcaagccagctgagggctg

SEQ ID NO: 603568 - DNA, 75 bp, synthetic construct
  source 1..75: mol_type = other DNA
gtcaaaacagcttaccgcaatgtgtttactgaagatgaccagggaacatattcccggctggttatccgtaatgct

SEQ ID NO: 603569 - DNA, 75 bp, synthetic construct
  source 1..75: mol_type = other DNA
tgtcgccacacataaagaagctcactgtagattcaattggtcaacgcaacagttatgtgaaaacatggggttgcg

SEQ ID NO: 603570 - DNA, 75 bp, synthetic construct
  source 1..75: mol_type = other DNA
tctcggcgcgcgtccgctgaagactttctttacggtgatagtgccgcttaccaaaggtgggattatcgccggatc

SEQ ID NO: 603571 - DNA, 75 bp, synthetic construct
  source 1..75: mol_type = other DNA
cgcaaactggtgattgcgctgccgtatatctggttgattttgttgtttctgctgccatttcttatcgtctttaaa

SEQ ID NO: 603572 - DNA, 75 bp, synthetic construct
  source 1..75: mol_type = other DNA
ttttattactactggtgatcctgccgtcgtggacctcgtttctgatccgcgtttatgcctggatgggaatattaa

SEQ ID NO: 603573 - DNA, 75 bp, synthetic construct
  source 1..75: mol_type = other DNA
aattaaaacaaaatgataacgcaccttgcccgcccggttggcagttaagtttgcctgcggcccgtgcttttatcc

SEQ ID NO: 603574 - DNA, 75 bp, synthetic construct
  source 1..75: mol_type = other DNA
ccgcgatctgcgtgccaacggcgaaaagaaaacgtcaatggataccctgacggcaattatgtccaccgctgaagc

SEQ ID NO: 603575 - DNA, 75 bp, synthetic construct
  source 1..75: mol_type = other DNA
gtctttaaaataagcctggcggagatggcgcgcgccattccaccttataccgaactgatggagtgggctgacggg

SEQ ID NO: 603576 - DNA, 72 bp, synthetic construct
  source 1..72: mol_type = other DNA
cgcagctcccgctggctgaaaagtgaagtggaagcctggctgcaggcgcgtattgcacagtcccgtccgtaa

SEQ ID NO: 603577 - DNA, 75 bp, synthetic construct
  source 1..75: mol_type = other DNA
agaatgagctggctcgtaaggcagttcaggcattctgcgatgttgttggcgacaacaccgaggttatcgctgagg

SEQ ID NO: 603578 - DNA, 75 bp, synthetic construct
  source 1..75: mol_type = other DNA
tgcagcagatgtttaacggtgtcacgctgggcagtacctacgcgctgatagccatcggctacaccatggtttacg

SEQ ID NO: 603579 - DNA, 75 bp, synthetic construct
  source 1..75: mol_type = other DNA
ttgtgattggcgcggcgatggcggcggtggcgggtgtgctgctcggccagttttacggcgtgattaacccctata

SEQ ID NO: 603580 - DNA, 75 bp, synthetic construct
  source 1..75: mol_type = other DNA
tgacggcctgcccgccgccagaaccggtgatgccatcgactgtggtggtgtggtcattggtggcggtacggtaaa

SEQ ID NO: 603581 - DNA, 75 bp, synthetic construct
  source 1..75: mol_type = other DNA
ggaactgaaagcagaatgtggtgccgttgatatgcgcagtgtggcaaagctgctcagcgatttggcaacgcaact

SEQ ID NO: 603582 - DNA, 75 bp, synthetic construct
  source 1..75: mol_type = other DNA
gtgtgcaggaaaatcattaccccgtttctggcccggggattttttcccgacgttctatgcctgtcatctggctgt

SEQ ID NO: 603583 - DNA, 75 bp, synthetic construct
  source 1..75: mol_type = other DNA
catgctggcgctgacgattttcattcgctattcccgtatggggcgcgcctgtcgtgcctgcgcggaagatctgaa

SEQ ID NO: 603584 - DNA, 75 bp, synthetic construct
  source 1..75: mol_type = other DNA
ctcgtaaggcagttcaggcattctgcgatgttgttggcgacaacaccgaggttatcgctgaggaggttgggcgag

SEQ ID NO: 603585 - DNA, 75 bp, synthetic construct
  source 1..75: mol_type = other DNA
aggactcaaatattgatgctatgtgccgtattgcagagcttgaaactaatatcgcggcgctggtggcagagaacg

SEQ ID NO: 603586 - DNA, 75 bp, synthetic construct
  source 1..75: mol_type = other DNA
cattcgccctgctgattctggtgctgctggtgatgccgaccggtattctgggtcgcccggaggtagagaaagtat

SEQ ID NO: 603587 - DNA, 75 bp, synthetic construct
  source 1..75: mol_type = other DNA
agctacgtctcctttatgatcatcgccgcactgatgatgctgggcattgataccggctggctgctggtggcggcg

SEQ ID NO: 603588 - DNA, 75 bp, synthetic construct
  source 1..75: mol_type = other DNA
attggcagtattcctggggcgatgattggcgggttgattctggggattgcggaggcgctctcttcggcttatctg

SEQ ID NO: 603589 - DNA, 75 bp, synthetic construct
  source 1..75: mol_type = other DNA
gcaacggccagccggtactgtttgccgagggctatgccactgccgcctccctgcacgaagccaccggccttccgg

SEQ ID NO: 603590 - DNA, 75 bp, synthetic construct
  source 1..75: mol_type = other DNA
cctgagtcagatggccccgaagaatacgaaaactacagcgcatatcaggagctgatgaacaatgaaaatcctgag

SEQ ID NO: 603591 - DNA, 75 bp, synthetic construct
  source 1..75: mol_type = other DNA
tttgactgcagcacctactgttaatgcggccgtttcccttgaccgtacccgagccgtttttaacggtggggaaaa

SEQ ID NO: 603592 - DNA, 75 bp, synthetic construct
  source 1..75: mol_type = other DNA
ctgttgagccattacgaaattatgaagaagcattacagtggtatttatctgccgccacacaaggacatgagcttg

SEQ ID NO: 603593 - DNA, 75 bp, synthetic construct
  source 1..75: mol_type = other DNA
tcatcctgattggtaccctggggcaagacccggagatcaggtatataccaaatggcggcgcggtcggaagactca

SEQ ID NO: 603594 - DNA, 75 bp, synthetic construct
  source 1..75: mol_type = other DNA
cgccggtgtagaacgttacacgacggaaattatcgtcagccagggcggcaccatgcaaatgatcggcactcgccg

SEQ ID NO: 603595 - DNA, 75 bp, synthetic construct
  source 1..75: mol_type = other DNA
cctgtccggagtggtcagaatatctgcatcagactggaaatatgatctgtctaaagaattaaaagtgctcaataa

SEQ ID NO: 603596 - DNA, 75 bp, synthetic construct
  source 1..75: mol_type = other DNA
acactctttcccttgttaagctaaatggcgacaggactgatgggataaaaggaagtgttcaaaagaataagattt

SEQ ID NO: 603597 - DNA, 75 bp, synthetic construct
  source 1..75: mol_type = other DNA
agcctgttcaacaggcaacccctgaaccaacggaagaaaataaacctcaggaagagggcgttatgtctgccactg

SEQ ID NO: 603598 - DNA, 75 bp, synthetic construct
  source 1..75: mol_type = other DNA
gcagctggcagcagagacatccctgcagccggatgtacctggtgcaggtgatgacggataccctggctatgacgt

SEQ ID NO: 603599 - DNA, 75 bp, synthetic construct
  source 1..75: mol_type = other DNA
actgacaacgcacagccatctgacgttgttcctgacgcctccggcacgactgctgccccgcaggaagggcatgag

SEQ ID NO: 603600 - DNA, 75 bp, synthetic construct
  source 1..75: mol_type = other DNA
tgggaccagcagcaacaggcaaaaaaaacacagcaggcggagatggcagcacagcacaaccccgcgccgggacgg

SEQ ID NO: 603601 - DNA, 75 bp, synthetic construct
  source 1..75: mol_type = other DNA
ggaagcattacagtggtatttatctgccgccacacaaggacatgaccttgcccagtatgagttgggacaaatgta

SEQ ID NO: 603602 - DNA, 75 bp, synthetic construct
  source 1..75: mol_type = other DNA
tggatttttatcatcttcttttttccggtgattggctgcgtggcatattttgtcctggtgatgttgccagaaacc

SEQ ID NO: 603603 - DNA, 75 bp, synthetic construct
  source 1..75: mol_type = other DNA
atcgtgaggccgcccgtcatcgccttcctcgatttctgtttgattatattgatggcggcgcagtagcagaaaata

SEQ ID NO: 603604 - DNA, 75 bp, synthetic construct
  source 1..75: mol_type = other DNA
attatctcaacacacgtaggccggataagatgcgccagcatcgcatccggcaaaaaaacgggcatggtgtcacca

SEQ ID NO: 603605 - DNA, 75 bp, synthetic construct
  source 1..75: mol_type = other DNA
cgggattaccgcagcaacgataacagtcccaccaaatgggtattttccggcggtaaacaaaccgatccacaggca

SEQ ID NO: 603606 - DNA, 75 bp, synthetic construct
  source 1..75: mol_type = other DNA
ttttgcctgacgttattctggatgaatatgaatccgatttatcacaggataacctggcagagatgatccgtcgct

SEQ ID NO: 603607 - DNA, 75 bp, synthetic construct
  source 1..75: mol_type = other DNA
tgctgatgcgcctgcaggacaaactcaaccctgagcgccacctgcgcaaattaaccgaagaactggcgattgccg

SEQ ID NO: 603608 - DNA, 75 bp, synthetic construct
  source 1..75: mol_type = other DNA
ctggcaaaactgtattgcgcacgtaccgcaatggaagtcattgatgatgcgattcaaatcatgggcggtctgggc

SEQ ID NO: 603609 - DNA, 75 bp, synthetic construct
  source 1..75: mol_type = other DNA
tccttgatagattaaaagtagccaggatcgaaaataaaaaaattgaagagtcagctggaaaagcagaggaaaatg

SEQ ID NO: 603610 - DNA, 75 bp, synthetic construct
  source 1..75: mol_type = other DNA
tccatgagtttatgaataaagggaagttaaagcccgaaaacggtggttcagacagtaaactcagtgctgaacaaa

SEQ ID NO: 603611 - DNA, 75 bp, synthetic construct
  source 1..75: mol_type = other DNA
gatgccgaccgttacgatctcgggcaaggtgccgggttttacctgaacgcaacgcaagcgccgtggaatgaacat

SEQ ID NO: 603612 - DNA, 75 bp, synthetic construct
  source 1..75: mol_type = other DNA
agcttccgtaacatcggcgaaattctggaactggcaggctgcgaccgtctgaccatcgcaccggcgctgctgaaa

SEQ ID NO: 603613 - DNA, 75 bp, synthetic construct
  source 1..75: mol_type = other DNA
tatgctggctaagcataatttcatttggatgctcttttttcataccaataaagctgaaacagatttataacgaaa

SEQ ID NO: 603614 - DNA, 75 bp, synthetic construct
  source 1..75: mol_type = other DNA
cagtaacagccggggagaaatacgttcataccagcgtattcctgtcaccggcgggaaggatgcccgcattctgaa

SEQ ID NO: 603615 - DNA, 75 bp, synthetic construct
  source 1..75: mol_type = other DNA
aggcgaaagtgttagccgcgagtttcaaaaccccgcgtcaggcgctggattgcttactggcaggatgtgaatcaa

SEQ ID NO: 603616 - DNA, 75 bp, synthetic construct
  source 1..75: mol_type = other DNA
aggcgaaagtgctggcagcgagtttcaaaaccccgcgtcaggcgctggactgcttactggcaggatgtgaatcaa

SEQ ID NO: 603617 - DNA, 75 bp, synthetic construct
  source 1..75: mol_type = other DNA
caaaaccccgcgtcaggcgctggactgcttactggcaggatgtgaatcaattactctgccgctggatgtggcaca

SEQ ID NO: 603618 - DNA, 75 bp, synthetic construct
  source 1..75: mol_type = other DNA
gtgcaattgtcgactacatctctggaatgatggatacatttgccatccgcgagtgggaaacgcatcacaaaaaat

SEQ ID NO: 603619 - DNA, 75 bp, synthetic construct
  source 1..75: mol_type = other DNA
atggaactgtatctggatacttcagacgttgttgcggtgaaggcgctgtcacgtatttttccgctggcgggtgta

SEQ ID NO: 603620 - DNA, 75 bp, synthetic construct
  source 1..75: mol_type = other DNA
gcttccgcaacttcacgaagcgatgggcggtcaggggcgtctgtttgcccaggtaatggctaccactgctgaagg

SEQ ID NO: 603621 - DNA, 75 bp, synthetic construct
  source 1..75: mol_type = other DNA
cgggcaatccgaaaaccgcagaacaatatcagatgacaaaaaaatatgatgttacctggcttttttcggaagacg

SEQ ID NO: 603622 - DNA, 75 bp, synthetic construct
  source 1..75: mol_type = other DNA
tttgttttcgactacaaacttaaagcggaagatgagcgtgatgccctgttaaaacaggtcagtatcatgaccagc

SEQ ID NO: 603623 - DNA, 75 bp, synthetic construct
  source 1..75: mol_type = other DNA
atatcagatgacaaagcggcatagtattgtctggcttttttcggaggacggcaaaaactggtatgaagaacagaa

SEQ ID NO: 603624 - DNA, 75 bp, synthetic construct
  source 1..75: mol_type = other DNA
attcgtttaacttttatcgtgcagggagtaaaacaaagccggttaaaaatcccaaaagaagatatcctacagacg

SEQ ID NO: 603625 - DNA, 75 bp, synthetic construct
  source 1..75: mol_type = other DNA
ctaaagaacaaaaatccattattgcagaagcattagaggttatgcccgaagatctggaagaaataaaaattaaag

SEQ ID NO: 603626 - DNA, 75 bp, synthetic construct
  source 1..75: mol_type = other DNA
cagagagttaggactgaataaatcgaatgtttcacgtgcattcaaagaattatttgagaggaaaatactgatccg

SEQ ID NO: 603627 - DNA, 75 bp, synthetic construct
  source 1..75: mol_type = other DNA
ttgctgaatatccagaagcgattacctatctgctggaacagtacgatcgcgttgaagcggaagaagcacgtctgt

SEQ ID NO: 603628 - DNA, 75 bp, synthetic construct
  source 1..75: mol_type = other DNA
gctggatgagctggagcacgccagaaccacggctcctgccattcgcctgacgctccatcatgaaatcgctgattt

SEQ ID NO: 603629 - DNA, 75 bp, synthetic construct
  source 1..75: mol_type = other DNA
gagtgaaaaggccaatgtactgcagatagccttacagaccaaaataaagcttttttatcgcccggcagcaattaa

SEQ ID NO: 603630 - DNA, 75 bp, synthetic construct
  source 1..75: mol_type = other DNA
gaaacaccggaagcaatgcagcgcgaactgcttcaacgcatcgacaaggtttttgatttttttcttggtgcaaca

SEQ ID NO: 603631 - DNA, 75 bp, synthetic construct
  source 1..75: mol_type = other DNA
tgaatttgaaccggtgatgctggctcctaagtcttcaaaaacagttaaatcaggtagctacactacaccgtatct

SEQ ID NO: 603632 - DNA, 75 bp, synthetic construct
  source 1..75: mol_type = other DNA
atcatgaaatcgctgatttctgcgcgacgctggaggcaccaggcgaaccggaaacgccggaagcaatacagcaag

SEQ ID NO: 603633 - DNA, 75 bp, synthetic construct
  source 1..75: mol_type = other DNA
gctcctgccattcgcctgacgctccatcatgaaatcgctgatttctgcgcaacgctgggggcacctggcgaaccg

SEQ ID NO: 603634 - DNA, 75 bp, synthetic construct
  source 1..75: mol_type = other DNA
ctgaagacgttgtgacctatgatgacggcgcgattgacgtctacactgcatgggaagaaatgggtaaagtgcgcg

SEQ ID NO: 603635 - DNA, 75 bp, synthetic construct
  source 1..75: mol_type = other DNA
tgggaagaaatgggtaaagtgcgcgacgctctggaagcggcaggtctgaaagcagacagcgcggaagtttccatg

SEQ ID NO: 603636 - DNA, 75 bp, synthetic construct
  source 1..75: mol_type = other DNA
accgctggagtcaccaggcgaaccagaaacgccggaagcaatgcaacaagagttgctgcaacgcatcgacaaggt

SEQ ID NO: 603637 - DNA, 75 bp, synthetic construct
  source 1..75: mol_type = other DNA
ccctatcttgctcaggcatggacagaaaatgaaaatcaggaaaaaattattacagggccggttattgccacccct

SEQ ID NO: 603638 - DNA, 75 bp, synthetic construct
  source 1..75: mol_type = other DNA
actaaaatcattcgtgagctggtaaccgcggctaagttgggcggtggcgatccggatgctaacccgcgtctgcga

SEQ ID NO: 603639 - DNA, 75 bp, synthetic construct
  source 1..75: mol_type = other DNA
gttatggtcacaatccacagggttcgcaacgcattcaatgccgtaactgcaaaaaagtctggacgcctaaaaaat

SEQ ID NO: 603640 - DNA, 75 bp, synthetic construct
  source 1..75: mol_type = other DNA
ccaatgggacttttaccgagggcatttaaagtttggtatattcagaagtgcatattacttttcgttttatgtttt

SEQ ID NO: 603641 - DNA, 75 bp, synthetic construct
  source 1..75: mol_type = other DNA
ttattcctccaggcgttacttcatattctgaattattgaaatccaatgtcattggttgtttaacagcggtatatg

SEQ ID NO: 603642 - DNA, 75 bp, synthetic construct
  source 1..75: mol_type = other DNA
gcgaattttgtaagtgagttaaattaccctatgtttatctccgccatatatggcctgtcactggcatggtttcct

SEQ ID NO: 603643 - DNA, 75 bp, synthetic construct
  source 1..75: mol_type = other DNA
ttggttaggctggaaagatgattaccgtacaaaggtgtttttagaagatgcccaaattcctgatcaagatgaatg

SEQ ID NO: 603644 - DNA, 75 bp, synthetic construct
  source 1..75: mol_type = other DNA
ttaaatctgtaaagaactcatttaaccgtttaggtcaatatcaatatcagcgtcgtgtaaaagatgacctgactt

SEQ ID NO: 603645 - DNA, 75 bp, synthetic construct
  source 1..75: mol_type = other DNA
atggatatcttcgtttttgataccagcgatttgaccgacgccctgtttgaagcgcgcctgaataatatgctgtcg

SEQ ID NO: 603646 - DNA, 75 bp, synthetic construct
  source 1..75: mol_type = other DNA
tggttccggcccgggtgctactggctgggcgaacttcagccgcaatatcgatccgctggtagaggcgggctatcg

SEQ ID NO: 603647 - DNA, 75 bp, synthetic construct
  source 1..75: mol_type = other DNA
gatcgaagcgaaggcgctgcgcaaactgcgtcacccgagccgttctgaagtgttgcgtagcttcctggacgatta

SEQ ID NO: 603648 - DNA, 75 bp, synthetic construct
  source 1..75: mol_type = other DNA
atgggagttttaccgttattatcttggttttggatatgtaaaggcaatgtattattttctgcattatatccagcg

SEQ ID NO: 603649 - DNA, 75 bp, synthetic construct
  source 1..75: mol_type = other DNA
tcgttgaggacgaaacgccgctggcagagatgcatgcggaatatattcgtcacattcccggattcagtcagatat

SEQ ID NO: 603650 - DNA, 75 bp, synthetic construct
  source 1..75: mol_type = other DNA
ccgctaccagtcgttttctggaagtgcaggaagcaggcgaaaccctacgcgtgcatttcaatgactgtgggcagg

SEQ ID NO: 603651 - DNA, 75 bp, synthetic construct
  source 1..75: mol_type = other DNA
agtgggtgaaggcgtggaaagcgccagagtcggtgaacgcgttgctgtcgatccggtggtcagctgtgggcattg

SEQ ID NO: 603652 - DNA, 75 bp, synthetic construct
  source 1..75: mol_type = other DNA
agtcggggctgaacttgcccatgagtcaggcttttattgctattttgaaaagtatcatatctttatcatcacaaa

SEQ ID NO: 603653 - DNA, 75 bp, synthetic construct
  source 1..75: mol_type = other DNA
ccgaacttgaaaaggaaattgatatcagctggagtcagcaatatgtctttcttgcttatgttggtgacctgcctg

SEQ ID NO: 603654 - DNA, 75 bp, synthetic construct
  source 1..75: mol_type = other DNA
gctttacagcctgtgggagcgtaacttcctgagctactacgccagcagggtctacaccacgcgcgtgctgtggga

SEQ ID NO: 603655 - DNA, 75 bp, synthetic construct
  source 1..75: mol_type = other DNA
gaagccggactgaaagcacacaggcggtcatttgaggcccagtacatgcagcgcccgcgtaaattcgacgaagag

SEQ ID NO: 603656 - DNA, 75 bp, synthetic construct
  source 1..75: mol_type = other DNA
aacgagttcgctatccccattcctcacaatctgccagatggctggctatggcctaaaaagcacaatgacagccat

SEQ ID NO: 603657 - DNA, 75 bp, synthetic construct
  source 1..75: mol_type = other DNA
tgccagtgaagatcgacaatagcgttgactatcgggatttgtaccctgaaaacgagttcgctatccccattcctc

SEQ ID NO: 603658 - DNA, 75 bp, synthetic construct
  source 1..75: mol_type = other DNA
ttgtgaacaggatgctttctatgagattgaaagcaaaatagctaaatttatcaaagataaataccgcgtagatgt

SEQ ID NO: 603659 - DNA, 75 bp, synthetic construct
  source 1..75: mol_type = other DNA
gttttccttaaccccaacacgggcaaggttgaaaccacttaccctgttttccgtggggtagtcgattccatcggt

SEQ ID NO: 603660 - DNA, 75 bp, synthetic construct
  source 1..75: mol_type = other DNA
gataaaaacgctcgtagtcatgcctccgatggtatccaccgatcctatgccggaaacgagaacgatctattcttc

SEQ ID NO: 603661 - DNA, 75 bp, synthetic construct
  source 1..75: mol_type = other DNA
cgatggaagagatcaaagaagaactggctgaccgacgtaaagtgctgttggcgaataacaagctgctggaagaac

SEQ ID NO: 603662 - DNA, 75 bp, synthetic construct
  source 1..75: mol_type = other DNA
gcgcccaactgttgtaccggagtgaacatattcccgaggcttggcaggggcgggtacgaacgaagtatgtcaacg

SEQ ID NO: 603663 - DNA, 75 bp, synthetic construct
  source 1..75: mol_type = other DNA
accgttgtatgagctggatagtagcgtatacctgcgtgaggatgactcggtaacggtggctggcctgtatctgcc

SEQ ID NO: 603664 - DNA, 75 bp, synthetic construct
  source 1..75: mol_type = other DNA
ttccttgacctgattcaggaaggcaacatcggtctaatgaaagcggttgataaattcgaataccgccgtggttac

SEQ ID NO: 603665 - DNA, 75 bp, synthetic construct
  source 1..75: mol_type = other DNA
gatgaggcatttaatccaaaggatgcgcagcgttatctctgccgtatctggagcctgatgcgcacggcattcaag

SEQ ID NO: 603666 - DNA, 75 bp, synthetic construct
  source 1..75: mol_type = other DNA
ataaagagctgaaaaaatttgcgtctcgtatcgcctcgcagcttttcatcatgtacgaggagttaagcgacgcat

SEQ ID NO: 603667 - DNA, 75 bp, synthetic construct
  source 1..75: mol_type = other DNA
gtgctgcggggtatatcgcgaaatacatctcaaaaaacatcgacggctatgcactggatggtcagctcgataacg

SEQ ID NO: 603668 - DNA, 75 bp, synthetic construct
  source 1..75: mol_type = other DNA
ggaatgacccggaggtcgtgagggcgctcaggggtgcattaaaacacggactgagaagaccaaaccgccagcaaa

SEQ ID NO: 603669 - DNA, 75 bp, synthetic construct
  source 1..75: mol_type = other DNA
tcagatagcgccctcaggacgaatgacaaaagctgaacgggaacagacgccacgtataagattcgagttggctca

SEQ ID NO: 603670 - DNA, 75 bp, synthetic construct
  source 1..75: mol_type = other DNA
ctaccataacatatggcaggaagacgtttatatatcctacaatcgatgtgtgtttgggatattctgcttttacaa

SEQ ID NO: 603671 - DNA, 75 bp, synthetic construct
  source 1..75: mol_type = other DNA
atgcgcgacgcggcgaagttcaggcagccaaagcggcggatgcgcatggcattccgtttactctctcgacggttt

SEQ ID NO: 603672 - DNA, 75 bp, synthetic construct
  source 1..75: mol_type = other DNA
atgcgcgacgcggcgaagttcaggccgcaaaagcagcggatgcacatggcattccgtttactctctcgaccgttt

SEQ ID NO: 603673 - DNA, 75 bp, synthetic construct
  source 1..75: mol_type = other DNA
catgattgccgttgccgaaaatgcccggcaaaaatggaagcaaagcccctttatcttctgtgccgacaacgatca

SEQ ID NO: 603674 - DNA, 75 bp, synthetic construct
  source 1..75: mol_type = other DNA
tatttctaatcctgaaattcgccggatggagctgatgaacaccattgccggtattgagcgttacgccgctgcaga

SEQ ID NO: 603675 - DNA, 75 bp, synthetic construct
  source 1..75: mol_type = other DNA
gatctgtttgagatggaggctgtgcctcttgaccaggccatgaatccggctcgccatttggctgagctgtttgag

SEQ ID NO: 603676 - DNA, 75 bp, synthetic construct
  source 1..75: mol_type = other DNA
cggtgcatcataagcttttgaaagaatcgcatttagatccagactgccttgtggtcgatgaattttccatatccc

SEQ ID NO: 603677 - DNA, 75 bp, synthetic construct
  source 1..75: mol_type = other DNA
gaggaactctgcgatgcatgggttgatgcgcatggtgaaaaagaatcgctgtttacggatgaggcgcaggctcac

SEQ ID NO: 603678 - DNA, 75 bp, synthetic construct
  source 1..75: mol_type = other DNA
tgtttgtgtttggcgtgccgcataaaggcagtttcctgacgctcaccctggcggcgctgctgtatatcatcattg

SEQ ID NO: 603679 - DNA, 75 bp, synthetic construct
  source 1..75: mol_type = other DNA
gtgcgaattaatgaactactgaccagtaccgggttagcaccttttcgcgatcgtccggcgggtaaactctccggc

SEQ ID NO: 603680 - DNA, 75 bp, synthetic construct
  source 1..75: mol_type = other DNA
aaacgcggagccgccagtctggaagaggcatttatcgcctatttgcaggaagcggcagggcagagcaacgaagcc

SEQ ID NO: 603681 - DNA, 75 bp, synthetic construct
  source 1..75: mol_type = other DNA
ctctctttagcaaccagcagacattttatcgactggctacataaacaagcagtatttactcacagcaccccgctt

SEQ ID NO: 603682 - DNA, 75 bp, synthetic construct
  source 1..75: mol_type = other DNA
ccggtgcccgcgtcattgagcagggcaatgtgatggtgctgggcggcgatatgcgcgacccgaagcatcgccgcg

SEQ ID NO: 603683 - DNA, 75 bp, synthetic construct
  source 1..75: mol_type = other DNA
gtagccaggcgtggacgctcaatctctccggttcccgttactttatcgaacagccgccgctcaccagttatgacg

SEQ ID NO: 603684 - DNA, 75 bp, synthetic construct
  source 1..75: mol_type = other DNA
gcactggaactgcgccgcgatccggtccgttcgacgctggcgctgatgggaacggtgatcctgatgctgataatg

SEQ ID NO: 603685 - DNA, 75 bp, synthetic construct
  source 1..75: mol_type = other DNA
atgacgcatctggaactggttcccgtcccgcctgtcgcgcaactggcgggcgtgagccagcattatggaaaaacc

SEQ ID NO: 603686 - DNA, 75 bp, synthetic construct
  source 1..75: mol_type = other DNA
aggcgtcagcaaagtgttcttcacctgcgattcccatgaacaactgctgccactggagcaagcgattaacgctcg

SEQ ID NO: 603687 - DNA, 75 bp, synthetic construct
  source 1..75: mol_type = other DNA
gtgattcatcgcccggagatgttaatcctcgatgagcctacttctggtgtcgatccggtggcgagggatatgttc

SEQ ID NO: 603688 - DNA, 75 bp, synthetic construct
  source 1..75: mol_type = other DNA
agagcttgggtcgattatcaacctttacgtgacccccaccacgcgtagtgaatttttgcttggtaaacagttgcc

SEQ ID NO: 603689 - DNA, 75 bp, synthetic construct
  source 1..75: mol_type = other DNA
ctggcgcccgcgtcattgagcagggtaatgtgatggtgctggggggcgatatgcgtgacccaaagcatcgccgcg

SEQ ID NO: 603690 - DNA, 75 bp, synthetic construct
  source 1..75: mol_type = other DNA
gtcatcatgctggcgaatgatgacaaggcacgggaacaggcggcaaaacgtcgcgcggaatgtatccacaaggca

SEQ ID NO: 603691 - DNA, 75 bp, synthetic construct
  source 1..75: mol_type = other DNA
gtattcgaggttacgctgattatcttcctgcgtataatcttgatgaccttcgccgttttgccttacaggacgacc

SEQ ID NO: 603692 - DNA, 75 bp, synthetic construct
  source 1..75: mol_type = other DNA
ttaatacgttcgctgctgtgatttcatctcatatcgttgagcaaccatcttcgtgttattaccttcatgataatg

SEQ ID NO: 603693 - DNA, 75 bp, synthetic construct
  source 1..75: mol_type = other DNA
actgtgtggtgtttgaaaatcactcaattatgtaccacccaccacaacaggggaagacccatatatatccatcga

SEQ ID NO: 603694 - DNA, 75 bp, synthetic construct
  source 1..75: mol_type = other DNA
aggtgaaaacaaaactgtgcagctcaatcatggctggaatgaaaccgcatttaccccaaaagacggccagcgcta

SEQ ID NO: 603695 - DNA, 75 bp, synthetic construct
  source 1..75: mol_type = other DNA
gcacgcccaccagcaaggcaggataatttcggggagatgcgcgaaaccatcagccgggcacatgccgggatggga

SEQ ID NO: 603696 - DNA, 75 bp, synthetic construct
  source 1..75: mol_type = other DNA
ctccgtttgcagcacaggttgcagcagagcgttgcgctgacgccgtgaaagaatacggcatcaagaatctggaag

SEQ ID NO: 603697 - DNA, 75 bp, synthetic construct
  source 1..75: mol_type = other DNA
ttatggttaaaggtccgggtccaggccgcgaatctactattcgtgctctgaacgccgcaggtttccgcatcacta

SEQ ID NO: 603698 - DNA, 75 bp, synthetic construct
  source 1..75: mol_type = other DNA
atattactgatgtgactccgatccctcataacggttgtcgtccgccgaaaaaaacgtcgcgtataacgcctcgtt

SEQ ID NO: 603699 - DNA, 75 bp, synthetic construct
  source 1..75: mol_type = other DNA
cggcgttggatttttgttacttatccagaaaaaagaatgatgccttggggggattataaatatcatcctgcatca

SEQ ID NO: 603700 - DNA, 75 bp, synthetic construct
  source 1..75: mol_type = other DNA
tacagcccggacagaaaaggcatccatccgcagacccatcttgcggggttcagtggtgtactgcaggcggatgct

SEQ ID NO: 603701 - DNA, 75 bp, synthetic construct
  source 1..75: mol_type = other DNA
cgacgtgtcagtaaacgttatgatgtagatgtgatcgttaaatctgccagcaatgatggactcaccattttaaga

SEQ ID NO: 603702 - DNA, 75 bp, synthetic construct
  source 1..75: mol_type = other DNA
ccgcatgggcgtcaacgtggcgcatcccgcaatttaaaacggttggcctgccgacaatgggggcttaccgtgaac

SEQ ID NO: 603703 - DNA, 75 bp, synthetic construct
  source 1..75: mol_type = other DNA
aaaaagggccggaatttctcgacgatttgcagggcatgttcgcttttgccctgtacgacagcgaaaaagatgcgt

SEQ ID NO: 603704 - DNA, 75 bp, synthetic construct
  source 1..75: mol_type = other DNA
tggtcatgttgctggcgctgcacgtgctttcaatatttcccctctctactggaaaaaataccgtaaaggacagat

SEQ ID NO: 603705 - DNA, 75 bp, synthetic construct
  source 1..75: mol_type = other DNA
gagcttgaggcgctgacgcgaggtgcaacggtgatatatggcgagaaaaaattcagttatgcggtcgctgatgag

SEQ ID NO: 603706 - DNA, 75 bp, synthetic construct
  source 1..75: mol_type = other DNA
tgcgcgccgaatatggtgatcgttaccagttccagaccgggtctgactgcgaagtgatcctcgcgctatatcagg

SEQ ID NO: 603707 - DNA, 75 bp, synthetic construct
  source 1..75: mol_type = other DNA
gaagtgatcctcgcgctgtatcaggaaaaagggccggaatttctcgacgacttgcagggcatgtttgcttttgcc

SEQ ID NO: 603708 - DNA, 75 bp, synthetic construct
  source 1..75: mol_type = other DNA
gatgcgcattaacccgcaggataaaatgtgcggtaacggcaaaatggaaaaacacatcctgcgtgaatgttttga

SEQ ID NO: 603709 - DNA, 75 bp, synthetic construct
  source 1..75: mol_type = other DNA
ctgaaattcgccggatggagctgatgaacaccattgccggtattgagcgttacgccgccgcagagggtgatgtgg

SEQ ID NO: 603710 - DNA, 75 bp, synthetic construct
  source 1..75: mol_type = other DNA
tcgttgctgtttctggcagagcgtgaccactatgcgcgcctgccgggaatgaatgacaaggagctgaaaaagttt

SEQ ID NO: 603711 - DNA, 75 bp, synthetic construct
  source 1..75: mol_type = other DNA
tgtggaaagctcaccggtggtgatacttcgttaccggctcccacaccttctgagcacgccgcagcagtgcttaat

SEQ ID NO: 603712 - DNA, 75 bp, synthetic construct
  source 1..75: mol_type = other DNA
tgaaatggcaccatcggccagactgacccggtcggaacgaatgcaaattacccgtatccgtgttgaccttgctca

SEQ ID NO: 603713 - DNA, 75 bp, synthetic construct
  source 1..75: mol_type = other DNA
gaacgccgcactggcatatgatgcttttttgtaatccacgccagcgtaaccagattatcgaaatcatgcgtcgct

SEQ ID NO: 603714 - DNA, 75 bp, synthetic construct
  source 1..75: mol_type = other DNA
tcgcctggcttgcctggcgaacgctggcgggattaccaggaaatctgccttccgtcactggcgcaagccaggaga

SEQ ID NO: 603715 - DNA, 75 bp, synthetic construct
  source 1..75: mol_type = other DNA
gctttgcggtgagcgaagagaacaaacgcgttctgcatgaagtgtgcccgtggtggcgcggtcagacggtacagg

SEQ ID NO: 603716 - DNA, 75 bp, synthetic construct
  source 1..75: mol_type = other DNA
catagcgtcgcatccgacaacaatctcgaccctacaaatgataacaatgacgaggacaacatgagcgacacaacg

SEQ ID NO: 603717 - DNA, 75 bp, synthetic construct
  source 1..75: mol_type = other DNA
ctccatcggcggtcacttcctgcatctgctgcacggcgaaaagccatcgcaaagctgggaaaaggcgatgcatat

SEQ ID NO: 603718 - DNA, 75 bp, synthetic construct
  source 1..75: mol_type = other DNA
ctggcagtcgtggcggcttaacaatgccagtcacaccattgagacgcagggcacggcgctgaaaagcaaaacgca

SEQ ID NO: 603719 - DNA, 75 bp, synthetic construct
  source 1..75: mol_type = other DNA
tcgtaatattcgtcatactgtctggtataccgctagtaatgcagggcgtttttacggtatctgggatagccccag

SEQ ID NO: 603720 - DNA, 75 bp, synthetic construct
  source 1..75: mol_type = other DNA
tatactgccagtaatgcaggacgcttttacggaatctgggatagcaccagaggaagacagcgtaacgctgtttta

SEQ ID NO: 603721 - DNA, 75 bp, synthetic construct
  source 1..75: mol_type = other DNA
atgccgggttgtcactggagattcatccgcacatgttacgccattcgtgtggttttgctttggcgaatatgggaa

SEQ ID NO: 603722 - DNA, 75 bp, synthetic construct
  source 1..75: mol_type = other DNA
tataccgccagcaatgccgggcgtttttacggcatctgggatagacccagaggtcgacagcgtcacgctgtttta

SEQ ID NO: 603723 - DNA, 75 bp, synthetic construct
  source 1..75: mol_type = other DNA
atcgcgctgtctgttctgaccgaaaccaacaaccgggagcaggcgcggctttatgcggcggcggaagaatccacc

SEQ ID NO: 603724 - DNA, 75 bp, synthetic construct
  source 1..75: mol_type = other DNA
cgaactgacgaagaaaaatagccagctgatcagtctgtccattctggctgaaaccaataaccgggagcaggcgcg

SEQ ID NO: 603725 - DNA, 75 bp, synthetic construct
  source 1..75: mol_type = other DNA
tccggctgcgggaacgtccgacgctcaccggaggtgcagcttatcgtcagtggttgtccgcgagtgacaccgtgt

SEQ ID NO: 603726 - DNA, 75 bp, synthetic construct
  source 1..75: mol_type = other DNA
gaacgaggatttacgccgctgggctgatactcctttgcctgcttacattatccggctgcgggaacgccccacact

SEQ ID NO: 603727 - DNA, 75 bp, synthetic construct
  source 1..75: mol_type = other DNA
ttctatccagagaagaaagccttttacttcacactattcagtctgaaagattaaacactgacttctctttattca

SEQ ID NO: 603728 - DNA, 75 bp, synthetic construct
  source 1..75: mol_type = other DNA
agggattagcacagaaaaaggatttgatatttgtgcgcaacggtgatgaacatacctgcgatgaagcggtttctc

SEQ ID NO: 603729 - DNA, 75 bp, synthetic construct
  source 1..75: mol_type = other DNA
tttttcatcgcatggcgaataaatgcactcttaaatccatctccatacctgaacttgatttaataattgatggcg

SEQ ID NO: 603730 - DNA, 75 bp, synthetic construct
  source 1..75: mol_type = other DNA
gaacgaggatttacgccgctgggctgatacccctttgcctgctgacattatccggctgcgaaaacgtccggcatt

SEQ ID NO: 603731 - DNA, 75 bp, synthetic construct
  source 1..75: mol_type = other DNA
caatttattgataaggttgcttcgtcatcatcgattaccgggaagccgtatatcgtgaagatgcccggtaagagc

SEQ ID NO: 603732 - DNA, 75 bp, synthetic construct
  source 1..75: mol_type = other DNA
ggaggtgcagcttaccgtgagtggctgtcccagagtgacgcagtgccgcctggaaaggtcagcgccgcgcagtaa

SEQ ID NO: 603733 - DNA, 75 bp, synthetic construct
  source 1..75: mol_type = other DNA
atcaacttaaaagccttgtggcaaatacgcccgtaaccgtgacatacacacagacagaccgctacgggcgtattc

SEQ ID NO: 603734 - DNA, 75 bp, synthetic construct
  source 1..75: mol_type = other DNA
aacggggtctgtgggcagacaaaaaacctgttccaccatggctgtggcgaaaagaaaataaaaataaccacaata

SEQ ID NO: 603735 - DNA, 75 bp, synthetic construct
  source 1..75: mol_type = other DNA
agcggggtctgtgggcagataaaaaacttgttcctccatggctgtggcgaaaagaaaataaaatgaccgcacaga

SEQ ID NO: 603736 - DNA, 75 bp, synthetic construct
  source 1..75: mol_type = other DNA
tgttaaagctatccctgctatggaaaaagaccagaagaatgagaatacattacagctggcaattattagccgcat

SEQ ID NO: 603737 - DNA, 75 bp, synthetic construct
  source 1..75: mol_type = other DNA
atcctgtttaaccctgacacagttgaagcatacgcaaaacgcgcggagataacacctaaaccactatatgccgcg

SEQ ID NO: 603738 - DNA, 75 bp, synthetic construct
  source 1..75: mol_type = other DNA
acgaaactacgaaactacgaaactacgaaactacgaaaattatttttgtgaaagtattgacaacgctaactattt

SEQ ID NO: 603739 - DNA, 75 bp, synthetic construct
  source 1..75: mol_type = other DNA
gtctggcacgaaccgactgggccggcgccacacactatacagattggcgataacaatcagattgtcgcgcgaaca

SEQ ID NO: 603740 - DNA, 75 bp, synthetic construct
  source 1..75: mol_type = other DNA
ccaggaaatctgccttccgtcactggcgcaagccaggagacggtactgggggctattttccctgctaacccgtga

SEQ ID NO: 603741 - DNA, 75 bp, synthetic construct
  source 1..75: mol_type = other DNA
catatccgctctgttcattgattgcgatgggactcacgccgctgattagtgcagagtggaactggcgagtacaac

SEQ ID NO: 603742 - DNA, 75 bp, synthetic construct
  source 1..75: mol_type = other DNA
gaaacggaagcccgttaaaaccacatgaaattgcaccatcggccagactgacccggtctgaacgattgcaaatca

SEQ ID NO: 603743 - DNA, 75 bp, synthetic construct
  source 1..75: mol_type = other DNA
ctggttgatgacggtgttatcgaatggaatgacccggaggttgtgagggcgctcagaagcgcattaaaacacggc

SEQ ID NO: 603744 - DNA, 75 bp, synthetic construct
  source 1..75: mol_type = other DNA
ctactggaaaaaataccgtaaaggacagatgaccacgaggcaggcatattctgccattgcccgtctgtttaacga

SEQ ID NO: 603745 - DNA, 75 bp, synthetic construct
  source 1..75: mol_type = other DNA
gatgccctttttgatgaggaataccgcgatatctggctcaatattcgtctaccacgggttttgctggcggtgctg

SEQ ID NO: 603746 - DNA, 75 bp, synthetic construct
  source 1..75: mol_type = other DNA
ctctggtgctgtttggtgccagtcagggagcgttaaagatcagttttgatgccctttttgatgaggaataccgcg

SEQ ID NO: 603747 - DNA, 75 bp, synthetic construct
  source 1..75: mol_type = other DNA
cgacggtaaagtttgacggacgaaagtttatatatccaataagtggtgagtggaagcagttttttagtggctttg

SEQ ID NO: 603748 - DNA, 75 bp, synthetic construct
  source 1..75: mol_type = other DNA
ctggcaatggcacctgaagcatcaggtgttaatactaccacgctttgcacggcttaccattgcccttggcttagc

SEQ ID NO: 603749 - DNA, 75 bp, synthetic construct
  source 1..75: mol_type = other DNA
tacgcgaaatcgctgcaggcgatggatttcaacattatcactgataaaacctcatataacgccattgaatggccc

SEQ ID NO: 603750 - DNA, 75 bp, synthetic construct
  source 1..75: mol_type = other DNA
cgggtaatccgaaaaccgcagaacaataccagatgacaaaaaaatatgatgttacctggcttttttcggaagacg

SEQ ID NO: 603751 - DNA, 75 bp, synthetic construct
  source 1..75: mol_type = other DNA
tgacatacggctattaccggcaaatatcggaagaaactcttgtcaggggggcccgggccagctcctattttatgg

SEQ ID NO: 603752 - DNA, 75 bp, synthetic construct
  source 1..75: mol_type = other DNA
ttactggttttaccgcgacgataaatttgtcttcgactacaaacttaaagcggaagatgaacgcgatgccctgtt

SEQ ID NO: 603753 - DNA, 75 bp, synthetic construct
  source 1..75: mol_type = other DNA
ggcggacatattcaccacgatcttagccacgtcttcgacttacaccgtaatttaattgcaaccggatcgatgctg

SEQ ID NO: 603754 - DNA, 75 bp, synthetic construct
  source 1..75: mol_type = other DNA
aggttgtctgggtcggaaaagatatcacctcaatctgtccggaaaataaaagtgtaattgagctgccggatatta

SEQ ID NO: 603755 - DNA, 75 bp, synthetic construct
  source 1..75: mol_type = other DNA
atgacacagggctggcgggaggataaatgcccgtctgtccgcgcagggaaaacaccgcgcgtcggtggcgctgaa

SEQ ID NO: 603756 - DNA, 75 bp, synthetic construct
  source 1..75: mol_type = other DNA
caactatgcatggcttgacgctgccagcttccagacccaaatcagcgaacaggaaaagtactttgacgagttgct

SEQ ID NO: 603757 - DNA, 75 bp, synthetic construct
  source 1..75: mol_type = other DNA
gttctgatgcgccgtggaatagctatgaagaatttatgacttacgccaaagcgaatcccggaaaagtacgcattg

SEQ ID NO: 603758 - DNA, 75 bp, synthetic construct
  source 1..75: mol_type = other DNA
atgacacagggctggcgggaggataaatgcccgtctggccgcgccgggaaaataccgcgcgtcggtggcgctgaa

SEQ ID NO: 603759 - DNA, 75 bp, synthetic construct
  source 1..75: mol_type = other DNA
atgacacagggctggcgggaggataaatgcccgtctggccgcgctgggaaaacaccgcgcgtcggtggcgctgaa

SEQ ID NO: 603760 - DNA, 75 bp, synthetic construct
  source 1..75: mol_type = other DNA
atgacacagggctggcgggaggataaatgcccgtctgtccgcgccgggaaaaaaccgcgcgtcggtggcgctgaa

SEQ ID NO: 603761 - DNA, 75 bp, synthetic construct
  source 1..75: mol_type = other DNA
acgccgcagcagtgcttaatctggttgatgacggtgttattgaatggaatgaaccggaggtcgtgagggcgctca

SEQ ID NO: 603762 - DNA, 75 bp, synthetic construct
  source 1..75: mol_type = other DNA
gctgatggtgttgttattcagatttacaactcatcatcaaatatgctcagcgggaagaaaataaaggttgatggc

SEQ ID NO: 603763 - DNA, 75 bp, synthetic construct
  source 1..75: mol_type = other DNA
catatcaaaacaggggctgttaatccagtagttaagaatgttgatgtttttgatagtaatggttctcaactaact

SEQ ID NO: 603764 - DNA, 75 bp, synthetic construct
  source 1..75: mol_type = other DNA
gaccacacaaaaagatgtgccggagtccggtgaaatccgtacccgggcacgtcgtccgacctttggcggtcagga

SEQ ID NO: 603765 - DNA, 75 bp, synthetic construct
  source 1..75: mol_type = other DNA
atgcaacaagttaaggccacgggaagtccggttctggatgtggcgcataactttgttagcgcgtgtcaaatcggc

SEQ ID NO: 603766 - DNA, 75 bp, synthetic construct
  source 1..75: mol_type = other DNA
ctctcgcgtactgaacttggcagtcgggtaatttgtcgcgataaacaactcatctttgaagaagcgccacaagcc

SEQ ID NO: 603767 - DNA, 75 bp, synthetic construct
  source 1..75: mol_type = other DNA
atttaatattggtaatgtttacttaagtgatatttcagtatcaagttcaaatcccacaaggtcttcattcttctt

SEQ ID NO: 603768 - DNA, 75 bp, synthetic construct
  source 1..75: mol_type = other DNA
ctgtacgacagcgaaaaagatgcctacctgattggtcgcgaccatctggggatcatcccactgtatatgggctat

SEQ ID NO: 603769 - DNA, 75 bp, synthetic construct
  source 1..75: mol_type = other DNA
cacaggaagtggcaaaccatctgggtactgtacatcatgaaattcacttcaccgtacaggaaggtctcgatgcca

SEQ ID NO: 603770 - DNA, 75 bp, synthetic construct
  source 1..75: mol_type = other DNA
aaaagaagcgtatctgtaccgggagatctttgaagaactgttcccgcttccgagcgccgctgagtgcgtgccggg

SEQ ID NO: 603771 - DNA, 75 bp, synthetic construct
  source 1..75: mol_type = other DNA
gaaacggaggcccgttaaaacctaatgaaattgcgccatcggcaaggctgactaaatcgcagcgcgaccagatat

SEQ ID NO: 603772 - DNA, 75 bp, synthetic construct
  source 1..75: mol_type = other DNA
tgagcacgccgcagcagtacttaatctggttgatgaaggtgttatcgaatggaatgacccggatgtagtgagggc

SEQ ID NO: 603773 - DNA, 75 bp, synthetic construct
  source 1..75: mol_type = other DNA
gaaaccgttttcaggcaaaacatcttaaccggggcggtgctgcggggtatatcgcgaaatacatctcaaaaaata

SEQ ID NO: 603774 - DNA, 75 bp, synthetic construct
  source 1..75: mol_type = other DNA
tacagctcgcaattattagccgcataaaaatgttctatcgcccaacgaatttggcaatggcacctgaccaagctc

SEQ ID NO: 603775 - DNA, 75 bp, synthetic construct
  source 1..75: mol_type = other DNA
ttggtctccgaaaaatgttaaacatgctattggttttgcgctcccttggttgatttatgatattgaatatatatt

SEQ ID NO: 603776 - DNA, 75 bp, synthetic construct
  source 1..75: mol_type = other DNA
cgtctctctgaacgcctgtttaataacaagccggatgagcatctggattacagcaacattccgaccgtggtcttc

SEQ ID NO: 603777 - DNA, 75 bp, synthetic construct
  source 1..75: mol_type = other DNA
gcaaccaaaaaagacttcgacaacacggttgccattcacccgacagcggcagaagagttcgtgacaatgcgttaa

SEQ ID NO: 603778 - DNA, 75 bp, synthetic construct
  source 1..75: mol_type = other DNA
atggagctgatgaacaccattgccggtattgagcgttacgccgccgcagagggtgatgtggggatgtttatcacg

SEQ ID NO: 603779 - DNA, 75 bp, synthetic construct
  source 1..75: mol_type = other DNA
cacgtgctttcaatatttccccgctttactggaaaaaataccgtaaaggacagatgaccacgaggcaggcatatt

SEQ ID NO: 603780 - DNA, 75 bp, synthetic construct
  source 1..75: mol_type = other DNA
agctgaaaaagtttgccgcccgtatctcatcgcagcttttcatgatgtatgaggaactcagcgatgcctgggtgg

SEQ ID NO: 603781 - DNA, 75 bp, synthetic construct
  source 1..75: mol_type = other DNA
ttaacattaataaattacttagatgttgcattgtattttattaataatataaacatgcttaaatcaagtataaaa

SEQ ID NO: 603782 - DNA, 75 bp, synthetic construct
  source 1..75: mol_type = other DNA
agagaatacgctgcggattatcaacgccactaatcatcagttaccgggcgaccgggaaagcctgttttgggtaaa

SEQ ID NO: 603783 - DNA, 75 bp, synthetic construct
  source 1..75: mol_type = other DNA
ctgtttcttttatggcgacagtattactttcattggtctttctttgccatagtaccattgccaatgcagcggtag

SEQ ID NO: 603784 - DNA, 75 bp, synthetic construct
  source 1..75: mol_type = other DNA
cacaccaacgccatcccgaaagcggtagtgaaaaatgccgatggcagcctgacgctggagctggaagatggtcgc

SEQ ID NO: 603785 - DNA, 75 bp, synthetic construct
  source 1..75: mol_type = other DNA
gcccaactggacgttcgcaaccgcgccgccattgaagagatgctgacttcgcttcctgccgagtggcgtaatatc

SEQ ID NO: 603786 - DNA, 75 bp, synthetic construct
  source 1..75: mol_type = other DNA
ttaatctacgcacagatctgcacggtacggcagtacgtgtcacagacatcgaaccgggactggtgggtggcaccg

SEQ ID NO: 603787 - DNA, 75 bp, synthetic construct
  source 1..75: mol_type = other DNA
atagccatcgaccctgcgacaacgtcatctgatgagtcagacgaaacagggattgtagcctgttccgcttatggt

SEQ ID NO: 603788 - DNA, 75 bp, synthetic construct
  source 1..75: mol_type = other DNA
ttgcatccctgacaccaggtgctgcagcgtggaatccttccccgattaccctgcctgcgcaacctgactttgttg

SEQ ID NO: 603789 - DNA, 75 bp, synthetic construct
  source 1..75: mol_type = other DNA
ctgttaattggtcgctttattgcatttgtcagaacactgctgccgacgattgccgggttatcagggctgaataac

SEQ ID NO: 603790 - DNA, 75 bp, synthetic construct
  source 1..75: mol_type = other DNA
aagccctgtgggcgcaggattttgaaaccctggccaatccgtcgatgattggcatgttgtattttgtcttgtttg

SEQ ID NO: 603791 - DNA, 75 bp, synthetic construct
  source 1..75: mol_type = other DNA
ctggcattgctcccgatgtcgtcgaaatattgcgtaagcatcgttggcccggaaacctgcgcgagttaagcaatt

SEQ ID NO: 603792 - DNA, 75 bp, synthetic construct
  source 1..75: mol_type = other DNA
agtacccgcttgatgcggtacatgcggaaaagtttgcagatttattgggtaaaccaaaaaccgcagttacagaaa

SEQ ID NO: 603793 - DNA, 75 bp, synthetic construct
  source 1..75: mol_type = other DNA
aactatttctcctttagccgccaatatgggctggactatcgcctgggaaccggcagatcgtgactttatcggtcg

SEQ ID NO: 603794 - DNA, 75 bp, synthetic construct
  source 1..75: mol_type = other DNA
ggaaatgccagtgaaagtcagtggttttaaacagccgatagatgatgcgggatggaccattacgactctgacaca

SEQ ID NO: 603795 - DNA, 75 bp, synthetic construct
  source 1..75: mol_type = other DNA
acccaacacgctgaacctttcggcatcgaaattaccgttcgtgatgacctttccatgatcgccgtacaagggccg

SEQ ID NO: 603796 - DNA, 75 bp, synthetic construct
  source 1..75: mol_type = other DNA
gggcaaaagcgccagcggtaaacctctgccggtgatctcaatcacacgtaaggacggcgacagtcaccgctttac

SEQ ID NO: 603797 - DNA, 75 bp, synthetic construct
  source 1..75: mol_type = other DNA
gtgtttggcctggcaggttctctggtcgtgttatggaaaaagaaatatggaaatcggggtaagggatgcaaatac

SEQ ID NO: 603798 - DNA, 75 bp, synthetic construct
  source 1..75: mol_type = other DNA
tccattatgttagcgaccggccgcgaggatatttaccccgaaacgccggtcagggtctcaggctttaagagcgtt

SEQ ID NO: 603799 - DNA, 75 bp, synthetic construct
  source 1..75: mol_type = other DNA
tgatgagtctgacgctgacggacaatcggggctttgaagcagaccagcttgatctggaactggacgacgccgacg

SEQ ID NO: 603800 - DNA, 75 bp, synthetic construct
  source 1..75: mol_type = other DNA
aggctttaagcgcgttatagacgaacaggcgtggataatcagccgtgtggtgcacagctttaatgggagcggctt

SEQ ID NO: 603801 - DNA, 75 bp, synthetic construct
  source 1..75: mol_type = other DNA
atggtgggtgatgttaggtctgcctgttctgttggcgttagctttttggttagcgctataccttattgcgcaagt

SEQ ID NO: 603802 - DNA, 75 bp, synthetic construct
  source 1..75: mol_type = other DNA
ttatatggcattatgtcagttcacaggggaaatatcaacatttcaaaattttgttttttcagataccagaattat

SEQ ID NO: 603803 - DNA, 75 bp, synthetic construct
  source 1..75: mol_type = other DNA
accgttggggaagtggtgaaggaaatagccgcgcggcacaagctgaagatggcactgggtaaagacctgtcggat

SEQ ID NO: 603804 - DNA, 75 bp, synthetic construct
  source 1..75: mol_type = other DNA
tactgtcagcccggataacggttttacgaccagtctggagcttgaagtgaagattgatgatttcgaaattgaatg

SEQ ID NO: 603805 - DNA, 75 bp, synthetic construct
  source 1..75: mol_type = other DNA
atctgttattcatccggcaggggcagggcaaaagcgccagcggtaaaccactaccggttatcactatcacacgca

SEQ ID NO: 603806 - DNA, 75 bp, synthetic construct
  source 1..75: mol_type = other DNA
agatatacagaacgaacagtgtctgatggacatctttataattttttgattctgtgtgctattaacagaacatta

SEQ ID NO: 603807 - DNA, 75 bp, synthetic construct
  source 1..75: mol_type = other DNA
agcggcttcacgacgtccttagagcttgaggtcaggctttctgatgtggagtacgaaacagaagatgatgagtaa

SEQ ID NO: 603808 - DNA, 75 bp, synthetic construct
  source 1..75: mol_type = other DNA
ataacagcaagaagcaagttgctgatgaactgggcatcggcattgctacgctctatcgcaagattaagaaatatg

SEQ ID NO: 603809 - DNA, 75 bp, synthetic construct
  source 1..75: mol_type = other DNA
tcgcgcagcgtaacaaactgacggccagcgtggctgataccctgaaatctgttgctgtgccgcatatcgaccagt

SEQ ID NO: 603810 - DNA, 75 bp, synthetic construct
  source 1..75: mol_type = other DNA
ccatctgaacatatagatctgataattcagcacgctcttcctggcattaattttacagtgatggatgtcgttaca

SEQ ID NO: 603811 - DNA, 75 bp, synthetic construct
  source 1..75: mol_type = other DNA
caatcactaaggtgacacattttctgaataatagcggcttcacgacgtccttagagcttgaggtcaggctttctg

SEQ ID NO: 603812 - DNA, 75 bp, synthetic construct
  source 1..75: mol_type = other DNA
agatggaaaagcaaatgatccgcgaggcgctttcacgtcataacagcaagaagcaagttgctgatgaactgggca

SEQ ID NO: 603813 - DNA, 75 bp, synthetic construct
  source 1..75: mol_type = other DNA
tcgcgctgttagtgattggcgtggtcatcgcggtcagagcaaaaccagaaaaacctttaactgaatctgtctcag

SEQ ID NO: 603814 - DNA, 75 bp, synthetic construct
  source 1..75: mol_type = other DNA
gagtctcgtttgatggttctaaaaacattgagttaacggcggaagatttaaatcttgagcaaaccgtagaattag

SEQ ID NO: 603815 - DNA, 75 bp, synthetic construct
  source 1..75: mol_type = other DNA
atgggtggatattggtggcgatagtcaggtctggacaactgcgcaatttatttcgtggctggagagtcagggggc

SEQ ID NO: 603816 - DNA, 75 bp, synthetic construct
  source 1..75: mol_type = other DNA
tatcttttatcgttcagcgcgtgatggttatggctttgaagctaactggtcagagttttacaccacaacccgcaa

SEQ ID NO: 603817 - DNA, 75 bp, synthetic construct
  source 1..75: mol_type = other DNA
gactacagcacaaaaaaccagcaacctgcatttgctttagggcagacaggaagcacagttggaaatgacaaagct

SEQ ID NO: 603818 - DNA, 75 bp, synthetic construct
  source 1..75: mol_type = other DNA
gacaacaatgacaaatgcgctggcaggcaaacagcctctggatgcaactttaaccgctctcgctgcccttgcgac

SEQ ID NO: 603819 - DNA, 75 bp, synthetic construct
  source 1..75: mol_type = other DNA
tctggacaaccgcgcaatttatttcgtggctggagagtcagggagcatttaaccatccttactggatgtgcaaag

SEQ ID NO: 603820 - DNA, 75 bp, synthetic construct
  source 1..75: mol_type = other DNA
gctgccagagcaaacgcagcgacagtatcggtgttctctgttctgcggtcttctggtcacaaaacaatggcctgc

SEQ ID NO: 603821 - DNA, 75 bp, synthetic construct
  source 1..75: mol_type = other DNA
gaattactctgtacggtacaggtgaaaaaccgattgatgtgaagattgggctttcccttgatgggggcatgagcc

SEQ ID NO: 603822 - DNA, 75 bp, synthetic construct
  source 1..75: mol_type = other DNA
tccgtgatagcgccatcaacgaaggttttaacacggctaaaccgtggggcgatgcggtgatctctaatcgtccgt

SEQ ID NO: 603823 - DNA, 75 bp, synthetic construct
  source 1..75: mol_type = other DNA
atgccaaagggaatcaggacacctctggtaatgcggcgacagcgaccaaattgcagacggcgtgtactatcaacg

SEQ ID NO: 603824 - DNA, 75 bp, synthetic construct
  source 1..75: mol_type = other DNA
cactaacgctcaattcacttatattaatcatggtgatgcttatgctcctggctggcgacgagactacaacacgaa

SEQ ID NO: 603825 - DNA, 75 bp, synthetic construct
  source 1..75: mol_type = other DNA
tgtaatccgggaatgaatgtgacctttcttcctgtttcgcgtttcaagcgacgcttcgttaaagtggagttctgg

SEQ ID NO: 603826 - DNA, 75 bp, synthetic construct
  source 1..75: mol_type = other DNA
gcgatagccaggtctggacaactgcgcaatttatttcgtggctggagagtcagggggcatttaaccatccttact

SEQ ID NO: 603827 - DNA, 75 bp, synthetic construct
  source 1..75: mol_type = other DNA
gatatcgagctcgatgataccgatggactggtcgagctgccgccgcgcggggcatcgctgaccctgtggctgggc

SEQ ID NO: 603828 - DNA, 75 bp, synthetic construct
  source 1..75: mol_type = other DNA
tgcaccgtgtctgaccacatccgcactcacgagcagaccactgccgctgagcgtcagaccaccttcaacgacatg

SEQ ID NO: 603829 - DNA, 75 bp, synthetic construct
  source 1..75: mol_type = other DNA
ttgttcctgaataatctgacgctggcaaatggaacaattcgttttcattcgtccgttaccacgttcggtatgctg

SEQ ID NO: 603830 - DNA, 75 bp, synthetic construct
  source 1..75: mol_type = other DNA
tagcgacacgtaacaaactggcgtcgaacgttataccggagctagccggaataaaaattccgcatatcgaccagt

SEQ ID NO: 603831 - DNA, 75 bp, synthetic construct
  source 1..75: mol_type = other DNA
acctgaacagcaaaagcccggctttcagtatcgtcattgaaggtaaggacgtgacgaccgtgctggatacccgcc

SEQ ID NO: 603832 - DNA, 75 bp, synthetic construct
  source 1..75: mol_type = other DNA
gcatccgtgtcggtgaaagccgggaagttattattcctgaaagccggtagtgcgatgacggccagtggtaagccg

SEQ ID NO: 603833 - DNA, 75 bp, synthetic construct
  source 1..75: mol_type = other DNA
attaccacaccgagtacatccagcggtgaaggcatccctaatgctcaatttacttatataaaccacggtggagat

SEQ ID NO: 603834 - DNA, 75 bp, synthetic construct
  source 1..75: mol_type = other DNA
ggatgtgcaaaggctcatgggcttatgcaaataataaggtcattacagatacaggttgcggaaatatttgtcttg

SEQ ID NO: 603835 - DNA, 75 bp, synthetic construct
  source 1..75: mol_type = other DNA
cagggggcatttaaccatccttactggatgtgcaaaggctcatgggcttatgcaaataataaggtcattacagat

SEQ ID NO: 603836 - DNA, 75 bp, synthetic construct
  source 1..75: mol_type = other DNA
ggcgttagcgaatgatgaaaaaccgcaggatagcggtccgttaatgtggatatctcgcggtattatgccgtatgt

SEQ ID NO: 603837 - DNA, 75 bp, synthetic construct
  source 1..75: mol_type = other DNA
gctttaactgctcaatgctccgtgcatggtgggttatgttaggtctgcctgttctgttggcattagctttttggc

SEQ ID NO: 603838 - DNA, 75 bp, synthetic construct
  source 1..75: mol_type = other DNA
actggaatagcggggtctataacgcaaatattggtggcgcaacgacattaatcctccatttcaatatgagcgagg

SEQ ID NO: 603839 - DNA, 75 bp, synthetic construct
  source 1..75: mol_type = other DNA
gttccagtggtgctccgggaagtggatcacctgattattctaaatacagtgttaacacttcttctgcaggcgctc

SEQ ID NO: 603840 - DNA, 75 bp, synthetic construct
  source 1..75: mol_type = other DNA
gatattgaactgaacgatgccgacgggcaggtcgggctgccggttcgtggcgctgtcctgacggtttatatcggc

SEQ ID NO: 603841 - DNA, 75 bp, synthetic construct
  source 1..75: mol_type = other DNA
ccggggctttgaagcagaccagcttgatctggaactggacgacgccgatggaaaaatcgtgctgccgcgtcgtgg

SEQ ID NO: 603842 - DNA, 75 bp, synthetic construct
  source 1..75: mol_type = other DNA
gtctcaacagaaatgttccgtaaagaatatgcggaagtttttgaaggcacggcggagtggaaagagattaacgtt

SEQ ID NO: 603843 - DNA, 75 bp, synthetic construct
  source 1..75: mol_type = other DNA
actttctgaataattccggcttcacgacgtccttagaacttgaggtaaggctttctgatgtggagtacgaaacag

SEQ ID NO: 603844 - DNA, 75 bp, synthetic construct
  source 1..75: mol_type = other DNA
ggcggcaaagtggcagcaactacaacgcggagccgcatcattttccatcacgctggcgcgtggacgtgcagaact

SEQ ID NO: 603845 - DNA, 75 bp, synthetic construct
  source 1..75: mol_type = other DNA
ccggtgaggctgacaacgtttttgccctgaccacggtatatgccacgaaagcacaggccatgcgtgccgctcagg

SEQ ID NO: 603846 - DNA, 75 bp, synthetic construct
  source 1..75: mol_type = other DNA
aagtaccggaagcgcgcgaaggtgaatacatggccggtgaggctgacaacgtttttgccctgactacggtatatg

SEQ ID NO: 603847 - DNA, 75 bp, synthetic construct
  source 1..75: mol_type = other DNA
ccgggaaggctcctggcatgacaccacgctcggtgcgattgttgaggcgatagccacccgtaacaggctggaagc

SEQ ID NO: 603848 - DNA, 75 bp, synthetic construct
  source 1..75: mol_type = other DNA
ctcgcgaacacctcctggcaaccggagagcaactctgcctgcagcgtgggtttaccggaatggggttaagcgaat

SEQ ID NO: 603849 - DNA, 75 bp, synthetic construct
  source 1..75: mol_type = other DNA
tcacctgcgactggcggagttgctgcaatccggcgaaggtaactaccgcgaccgcattctggcttattaccagca

SEQ ID NO: 603850 - DNA, 75 bp, synthetic construct
  source 1..75: mol_type = other DNA
atgaacaaacacaccgaacatgatactcgcgaacatctcctggcgacgggcgagcaactttgcctgcaacgtgga

SEQ ID NO: 603851 - DNA, 75 bp, synthetic construct
  source 1..75: mol_type = other DNA
cgcaaacatggcgtggtggggaaattcgtcgaattttatggtgatggtctggattcactaccgctggcggatcgc

SEQ ID NO: 603852 - DNA, 75 bp, synthetic construct
  source 1..75: mol_type = other DNA
tctaagggattattatcgcaaacagaatatgatgtaataagtaatatattagtagaaattgcgatatttatgatg

SEQ ID NO: 603853 - DNA, 75 bp, synthetic construct
  source 1..75: mol_type = other DNA
cgacaccgcgacggaattaacctattaccagaacgacggtattttgcattacgttattcgtaatatgttgaagta

SEQ ID NO: 603854 - DNA, 75 bp, synthetic construct
  source 1..75: mol_type = other DNA
aaccggtcgattatgttatgaacggacatcagtatcagttgcctgatggcgcagtggttattgctgccatcacgt

SEQ ID NO: 603855 - DNA, 75 bp, synthetic construct
  source 1..75: mol_type = other DNA
ctggcggtaacggattatcaggcacgctattacctgttattactggaaaaagaaggtatggttcagcgctctcca

SEQ ID NO: 603856 - DNA, 75 bp, synthetic construct
  source 1..75: mol_type = other DNA
tatccgaaatgatggatcaaacacatattttatgttgacagattcgggtaacagtcttggtacgcacaatagctt

SEQ ID NO: 603857 - DNA, 75 bp, synthetic construct
  source 1..75: mol_type = other DNA
tgtgctctcgtcatatgtagacgctggtaaattatatgttgatattctcaagggtaatacagatataccccttaa

SEQ ID NO: 603858 - DNA, 75 bp, synthetic construct
  source 1..75: mol_type = other DNA
gcagtcgtcatcgctgcgataacgtcttgcaccaatacttccaaccccggagtactgatggcggctggtttgttg

SEQ ID NO: 603859 - DNA, 75 bp, synthetic construct
  source 1..75: mol_type = other DNA
atattggcgatctgcaaaatctacaacccggcgcgacggttccggtgacgcttacgcgcgcggatggtagccagg

SEQ ID NO: 603860 - DNA, 75 bp, synthetic construct
  source 1..75: mol_type = other DNA
gatcgtaaaggcgatccggtttatctgaaagatatctggccatcggcacaagaaattgcccgtgcggtagaacaa

SEQ ID NO: 603861 - DNA, 75 bp, synthetic construct
  source 1..75: mol_type = other DNA
tcgtcgaattttacggcgatgggctggattcgctgccgctggcggatcgcgccaccattgccaatatgtcgccag

SEQ ID NO: 603862 - DNA, 75 bp, synthetic construct
  source 1..75: mol_type = other DNA
atcgttttggcgatgatgaggcattcgaggaaaacgtgcgtctggaaatggagcgaaaccacgaacgttatgtgt

SEQ ID NO: 603863 - DNA, 75 bp, synthetic construct
  source 1..75: mol_type = other DNA
ctgtattggtaactctggaccgttgcccgatcctatcgaaacggcaatcaaaaaaggcgatttaaccgtcggtgc

SEQ ID NO: 603864 - DNA, 75 bp, synthetic construct
  source 1..75: mol_type = other DNA
cgtcatagacgagcaggactggacaatcactaaggtgacacattttctgaataatagcggcttcacgacgtcctt

SEQ ID NO: 603865 - DNA, 75 bp, synthetic construct
  source 1..75: mol_type = other DNA
ccaatgtgaaagtctttatggctgactttgaggattcactggctccggactggaacaaagtgatcgacgggcaaa

SEQ ID NO: 603866 - DNA, 75 bp, synthetic construct
  source 1..75: mol_type = other DNA
ctgcggacttagaagatcgccgcgtagagattaccggacccgtagagcgcaagatggtgatcaacgcgctcaacg

SEQ ID NO: 603867 - DNA, 75 bp, synthetic construct
  source 1..75: mol_type = other DNA
gttgagcaatggcaaaccggtgactaaagctctattccgccagatgcttgcggaagagatgaaagtgattgccag

SEQ ID NO: 603868 - DNA, 75 bp, synthetic construct
  source 1..75: mol_type = other DNA
atgcttactcacgcctgctgattaaaacctgccataaacgcggtgcttttgcgatgggcggcatggcagcgttta

SEQ ID NO: 603869 - DNA, 75 bp, synthetic construct
  source 1..75: mol_type = other DNA
ataacggaacgttgcctgattttatttcggaaacagcttccattcgctatgctgattggaaaattcgcgggattc

SEQ ID NO: 603870 - DNA, 75 bp, synthetic construct
  source 1..75: mol_type = other DNA
actctactttttccacaactaccaggctctattggcaaaaggtagcggcccttatttctatctgccgaaaatcca

SEQ ID NO: 603871 - DNA, 75 bp, synthetic construct
  source 1..75: mol_type = other DNA
ataacggaacgttgcctgattttatttcggaaacagattccattcgtgatgctgactggaaaattcgtgggattc

SEQ ID NO: 603872 - DNA, 75 bp, synthetic construct
  source 1..75: mol_type = other DNA
tgatttgtcatacaatcattatgatcagatttcatgtttcagtaatctccagtattatattaaaacaatgctaga

SEQ ID NO: 603873 - DNA, 75 bp, synthetic construct
  source 1..75: mol_type = other DNA
tcatcaggggtactatgaatgtcgtataaatgatgatcttctgaaagaagatactgtcagaattgaaaaaataaa

SEQ ID NO: 603874 - DNA, 75 bp, synthetic construct
  source 1..75: mol_type = other DNA
gctgaaatttcccgtacctcaatctggcagtggatccatcatcaaaaaacgttgagcaatggcaaaccggtgacc

SEQ ID NO: 603875 - DNA, 75 bp, synthetic construct
  source 1..75: mol_type = other DNA
gtgatggtgaacgcaccgaagaaggtatgcgcgccaacattcgcgtggcagtgcagtacatcgaagcatggatct

SEQ ID NO: 603876 - DNA, 75 bp, synthetic construct
  source 1..75: mol_type = other DNA
gtgacgatggataaaccattcctgaatgcttactcacgcctgttgattaaaacctgccataaacgcggtgctttt

SEQ ID NO: 603877 - DNA, 75 bp, synthetic construct
  source 1..75: mol_type = other DNA
ggtgcgccggtgccggaaggctgcgaagcggtggtgatgcaggagcagactgaacaaacggacaatggcgtgcgt

SEQ ID NO: 603878 - DNA, 75 bp, synthetic construct
  source 1..75: mol_type = other DNA
attttcgtgaaacgctgaatacccgccgtgaaaagtcgtggcacaagactacggtcggggaagtagtgaaggaaa

SEQ ID NO: 603879 - DNA, 75 bp, synthetic construct
  source 1..75: mol_type = other DNA
taatttggttaaagatagataaatattcagaattatggcggttagctatggctaaaaaaaaggttgcattttatt

SEQ ID NO: 603880 - DNA, 75 bp, synthetic construct
  source 1..75: mol_type = other DNA
gaatttatgcagagataaaattgttagttttggtttcaaacagttaaaaacagatacattagtctgcgattttga

SEQ ID NO: 603881 - DNA, 75 bp, synthetic construct
  source 1..75: mol_type = other DNA
actggctgatgtgcagattagcatcaggggaaatgtttatatccccccatgcaccattaataacgggcagaatat

SEQ ID NO: 603882 - DNA, 75 bp, synthetic construct
  source 1..75: mol_type = other DNA
agttttaaattcaagcaattaacaactgatacctttgtctgtgatgttgatgaatatagtccaaaaaataatgtt

SEQ ID NO: 603883 - DNA, 75 bp, synthetic construct
  source 1..75: mol_type = other DNA
attaaaatcccgcacatcgaccagtcgcaggagtctgatgcgaaattcctgacccgacttgctgaacgcaacggc

SEQ ID NO: 603884 - DNA, 75 bp, synthetic construct
  source 1..75: mol_type = other DNA
attacaccaaaacgattcttgaagagctgggggagatcgccttctggaagctggcgattaaaccaggtaaaccgt

SEQ ID NO: 603885 - DNA, 75 bp, synthetic construct
  source 1..75: mol_type = other DNA
tggggattgccgaagttccggtgattcgtaaagtgcgtgtagcgcttttttctaccggtgatgaactccagttgc

SEQ ID NO: 603886 - DNA, 75 bp, synthetic construct
  source 1..75: mol_type = other DNA
ggcgtgctgcaacgcaacgccgacggtgaacttgaagtgacgaccaccggacatcagggttcacatatatttagc

SEQ ID NO: 603887 - DNA, 75 bp, synthetic construct
  source 1..75: mol_type = other DNA
aagcagaaggtaaaactgaaacgcaaaaagaaagagaaacacctgcgcgcactggagcacccgaaagcgaaaccg

SEQ ID NO: 603888 - DNA, 75 bp, synthetic construct
  source 1..75: mol_type = other DNA
acggcggtgaggtgtcggtaaaaatgggaaaactgttgtttctcaaagcggggcagggggtgacggccagcggta

SEQ ID NO: 603889 - DNA, 75 bp, synthetic construct
  source 1..75: mol_type = other DNA
ggccaaatctacgataccaaccgtctcgccgtacacctgatgttagaacagctgggatgcgaggtaatcaactta

SEQ ID NO: 603890 - DNA, 75 bp, synthetic construct
  source 1..75: mol_type = other DNA
tgccaggacattcccgcgccactgaaacgccttcttcctgactataaacggatggaagaaaaaatagacgccgta

SEQ ID NO: 603891 - DNA, 75 bp, synthetic construct
  source 1..75: mol_type = other DNA
gcaacagaagcatattgccaggacatccccgctccactgaaacgccttcttcctgactataaacggatggaagaa

SEQ ID NO: 603892 - DNA, 75 bp, synthetic construct
  source 1..75: mol_type = other DNA
atggctctttctggcctgtactggaaggtatcgatgttcaaagtgattccactggcaccaggacatgcctacggg

SEQ ID NO: 603893 - DNA, 75 bp, synthetic construct
  source 1..75: mol_type = other DNA
tcacacggtctggtaagcattattgagccagtcgtccgcccaccgcgtcgtggcgataaattcgatcgcgaacaa

SEQ ID NO: 603894 - DNA, 75 bp, synthetic construct
  source 1..75: mol_type = other DNA
gatatcgcggtttccctttcaaatatctgtcgctttgcaggacatctttcacacttctacagcgtcgcccagcat

SEQ ID NO: 603895 - DNA, 75 bp, synthetic construct
  source 1..75: mol_type = other DNA
ctttttccgggaagcatttttattatgacaggataaataaagacgacatcgtgattaacgatatcgcggtttccc

SEQ ID NO: 603896 - DNA, 75 bp, synthetic construct
  source 1..75: mol_type = other DNA
aaagtgattccagtggcaccaagctatgcctacgggatgtttatggaacgttttaaagagctgcataagatacat

SEQ ID NO: 603897 - DNA, 75 bp, synthetic construct
  source 1..75: mol_type = other DNA
gaacgccgtgatctcgggcttgatgatggctctttatggcctgtactggaaggtatcccggcaacagagatgttc

SEQ ID NO: 603898 - DNA, 75 bp, synthetic construct
  source 1..75: mol_type = other DNA
acacttctacagcgtcgcccaacatgcggtgctttccagccaactggtaccacaggaatttgcttttgaagcgtt

SEQ ID NO: 603899 - DNA, 75 bp, synthetic construct
  source 1..75: mol_type = other DNA
ccgaatgatgatcgagcgttttaagccggggcttatcttgctggataactatctccctgacggtagaggtattaa

SEQ ID NO: 603900 - DNA, 75 bp, synthetic construct
  source 1..75: mol_type = other DNA
ctggcaccgggccatgcctacgggatgtttatggaacgctttaacgagttatcggagttacgcacatacgcatga

SEQ ID NO: 603901 - DNA, 75 bp, synthetic construct
  source 1..75: mol_type = other DNA
atcacgatgctcttcacgacgcaaaatatcaagctgaactattcaggttagtttacgaattaagcaaaaaaaaat

SEQ ID NO: 603902 - DNA, 75 bp, synthetic construct
  source 1..75: mol_type = other DNA
tgggcgacagtggcgctgacctctacaaagttgaaatgccgctttacggtaaaggtccgcaacaagagcttctca

SEQ ID NO: 603903 - DNA, 75 bp, synthetic construct
  source 1..75: mol_type = other DNA
tgacgctgactggcgcgaaatcgattagcgaaattacgcaagattcgctggtgcaagggctgggtaaagagttgc

SEQ ID NO: 603904 - DNA, 75 bp, synthetic construct
  source 1..75: mol_type = other DNA
tctgtcgctttgctggccatctttcgcacttctacagggtcgcccaacatgcggtgctttgcagccagctggtgc

SEQ ID NO: 603905 - DNA, 75 bp, synthetic construct
  source 1..75: mol_type = other DNA
tctgtcgctttgctggccatctttcgcacttctacagggtcgcccaacatgcggtcctttgcagccagctcgtgc

SEQ ID NO: 603906 - DNA, 75 bp, synthetic construct
  source 1..75: mol_type = other DNA
ggtggccgccagctggacggtgtactctcttccgctcgtgcgctgcctgctatcgcggatgcggtgaaaggtgat

SEQ ID NO: 603907 - DNA, 75 bp, synthetic construct
  source 1..75: mol_type = other DNA
acgggcaaaagccgcgggttgttcgacgctggttttcaccgttgacatgccaacgccgggcgcacgctaccgtga

SEQ ID NO: 603908 - DNA, 75 bp, synthetic construct
  source 1..75: mol_type = other DNA
cttatctcggcaaaccaaccggactggaagattacatcggctggctggggaataacttcgatccttcaatttcat

SEQ ID NO: 603909 - DNA, 75 bp, synthetic construct
  source 1..75: mol_type = other DNA
tacagcgtcgcccaacatgcggtgctttgcagccagctggtaccgcaggaatttgcttttgaagcgttaatgcat

SEQ ID NO: 603910 - DNA, 75 bp, synthetic construct
  source 1..75: mol_type = other DNA
acactatcaataagttggagtcattacccggtttccctttcaaatatctgtcgctttgccggtcatctttcgcac

SEQ ID NO: 603911 - DNA, 75 bp, synthetic construct
  source 1..75: mol_type = other DNA
gtcgtccgcccaccgcgtcgtggcgataaattcgatcgcgaacaagcgatcatcgatgccgccaaagagctgggc

SEQ ID NO: 603912 - DNA, 75 bp, synthetic construct
  source 1..75: mol_type = other DNA
tctgtcgctttgctggccatctttcgcacttctacagggtcgcccaacatgcggttctttgcagccagcttgtgc

SEQ ID NO: 603913 - DNA, 75 bp, synthetic construct
  source 1..75: mol_type = other DNA
tctgtcgctttgctggccatctttcgcacttctacagggtcgcccaacatgcggtactttgcagccagctagtgc

SEQ ID NO: 603914 - DNA, 75 bp, synthetic construct
  source 1..75: mol_type = other DNA
tatcctgcagttcctggtggggggtgacagcaagtacctcaactggggcgtcttcctggtgctgggaatctttat

SEQ ID NO: 603915 - DNA, 75 bp, synthetic construct
  source 1..75: mol_type = other DNA
ctggtagaactgattgaaatcgacggtgagaccaaacttcgttatcgccctttcaaagtggattacgcgattttg

SEQ ID NO: 603916 - DNA, 75 bp, synthetic construct
  source 1..75: mol_type = other DNA
aatctgatttttgctcataacctggatcgcgacattgccagcgatctgtttggcgtggtcaacgacaacccggac

SEQ ID NO: 603917 - DNA, 75 bp, synthetic construct
  source 1..75: mol_type = other DNA
ctggggcgatcgcgtcaacgtcagtttctctaccttaacttgtcttgaagtgatggcgggtggcgtttcgaaagg

SEQ ID NO: 603918 - DNA, 75 bp, synthetic construct
  source 1..75: mol_type = other DNA
tgcctacagccacttttgctgcgtggcgtttgagcgtggctggcagcgtgtgaatgagacgatggccgagcgcta

SEQ ID NO: 603919 - DNA, 75 bp, synthetic construct
  source 1..75: mol_type = other DNA
tgcgactcccatgaaaaattgttaccgctggagcaagcaatcaatgctcgctggggcgatcgcgtcaacgtcagt

SEQ ID NO: 603920 - DNA, 75 bp, synthetic construct
  source 1..75: mol_type = other DNA
tagatggtacgttactttctcccgaccatacgttatccccttacgccaaagaaaccctgaaactgctcaccgcgc

SEQ ID NO: 603921 - DNA, 75 bp, synthetic construct
  source 1..75: mol_type = other DNA
gcggcatcaactttgtgtttgcgaccggtcgccaccacgttgatgtggggcaaattcgcgataatctggagatta

SEQ ID NO: 603922 - DNA, 75 bp, synthetic construct
  source 1..75: mol_type = other DNA
gtatggggtatcactgaattaagccagccacaggcaatgggcctcatgttacctaagcgcctgcgcggattttaa

SEQ ID NO: 603923 - DNA, 75 bp, synthetic construct
  source 1..75: mol_type = other DNA
gcctaaaaagcacaatgacagccatgaagccggactgaaagcgcaccgtaggtcattcgaggcacagtacatgca

SEQ ID NO: 603924 - DNA, 75 bp, synthetic construct
  source 1..75: mol_type = other DNA
aagtaaaggtaagttcgcccgcgccgagccaatatcggcactgtatgcacaaggaagggtggcacacactggtga

SEQ ID NO: 603925 - DNA, 75 bp, synthetic construct
  source 1..75: mol_type = other DNA
ttcgttgaatacggtattcgtcacaactcgctgggtgctgaatttaaagcctggcttgaagaagagatgggcatt

SEQ ID NO: 603926 - DNA, 75 bp, synthetic construct
  source 1..75: mol_type = other DNA
gcttgcgtcacgtctggcagtgcaaacgacgcctgttatcgtcattatgcagcgcatccattacgatgatttgtc

SEQ ID NO: 603927 - DNA, 75 bp, synthetic construct
  source 1..75: mol_type = other DNA
aaaaatccccggaccgactcgacgctatggtgtggggcatcactgaattgagtcagcctcaagctataggcctta

SEQ ID NO: 603928 - DNA, 75 bp, synthetic construct
  source 1..75: mol_type = other DNA
tccgcaccattgacggcaaccaggcgaaagtcgacgtctgcggcattcagcgcgatgtcgatttaacgttagtcg

SEQ ID NO: 603929 - DNA, 75 bp, synthetic construct
  source 1..75: mol_type = other DNA
cagatgaaagggcatgacctggcaaaatgggtataccaggaaaaacccacagaggttcagagcaatgtaataact

SEQ ID NO: 603930 - DNA, 75 bp, synthetic construct
  source 1..75: mol_type = other DNA
ctgccatccccctgtttgttatatccggggcagacgctgctgtttcgctggacagaactcgcgcggtgtttgacg

SEQ ID NO: 603931 - DNA, 75 bp, synthetic construct
  source 1..75: mol_type = other DNA
gataattcccgtcttcatggtttcgggatgctcattatctccggcaatcccggtgatcggcgcttattatcccgg

SEQ ID NO: 603932 - DNA, 75 bp, synthetic construct
  source 1..75: mol_type = other DNA
gtcaacatcgccgtctaagttctaacgacgctattgaactggttagccatccggtgcgtcgcctgattgctcgcc

SEQ ID NO: 603933 - DNA, 75 bp, synthetic construct
  source 1..75: mol_type = other DNA
attcccggcggtattcctggggttgcgctgcgcgaaggcgtgccttatcaaagtttgtggctgagtgtagaacag

SEQ ID NO: 603934 - DNA, 75 bp, synthetic construct
  source 1..75: mol_type = other DNA
atgtcatttattaaaactttttccgggaagcatttttattatgacaagataaataaagacgacatcgatattaac

SEQ ID NO: 603935 - DNA, 75 bp, synthetic construct
  source 1..75: mol_type = other DNA
cgaaccgatagtcaagaacctggtgccaggaggaagcgttgtcctgaatgtcagcaatgacatcttcgaggccaa

SEQ ID NO: 603936 - DNA, 75 bp, synthetic construct
  source 1..75: mol_type = other DNA
gaataagagcgggttggccgcagaaaggaataaccggcgctggatcgcctgtgacatcattcttgagtacattcg

SEQ ID NO: 603937 - DNA, 75 bp, synthetic construct
  source 1..75: mol_type = other DNA
atgtgcataggcgttcccggccagattcgcaccattgacggcaaccaggcgaaggtcgacatctgcggcattcaa

SEQ ID NO: 603938 - DNA, 75 bp, synthetic construct
  source 1..75: mol_type = other DNA
gagttattcagcgggcaaatatcaatctggcatttgtcggaattatttataccgccctttttgctctctacgcca

SEQ ID NO: 603939 - DNA, 75 bp, synthetic construct
  source 1..75: mol_type = other DNA
agcgccaacgttgagttactggtcagcaaaacgctatgccccggaaaatttctgctgatgctcggtggcgatgtg

SEQ ID NO: 603940 - DNA, 75 bp, synthetic construct
  source 1..75: mol_type = other DNA
gggaaaaaggtttgttggtctatcgttcggtgattgcccgtccgcatgaagccatgtggcatcagatggtggagg

SEQ ID NO: 603941 - DNA, 75 bp, synthetic construct
  source 1..75: mol_type = other DNA
acattattgacacctgttattgatgaactcaataaggctatggcaattcacgagaataataaagcgccccacacc

SEQ ID NO: 603942 - DNA, 75 bp, synthetic construct
  source 1..75: mol_type = other DNA
attgtttctttagtcgattaagttataagatttctctcattaaagacatcattgaaagagcgcgcgaaaatatca

SEQ ID NO: 603943 - DNA, 75 bp, synthetic construct
  source 1..75: mol_type = other DNA
cactgacagcatctaaccgctctcttattaagagtaagatggaagaaatcccgctacaacagattcacgatatta

SEQ ID NO: 603944 - DNA, 75 bp, synthetic construct
  source 1..75: mol_type = other DNA
ctcatgcttaaaaccttccgcgtcttttcccgtgctgttaacaagcgcggccataccatcggcatcacacagaac

SEQ ID NO: 603945 - DNA, 75 bp, synthetic construct
  source 1..75: mol_type = other DNA
cctgagcgaggaacaaaagcaaacagtgacagagcgcctaaatgctggcatcagtatcagtgctattgcccggga

SEQ ID NO: 603946 - DNA, 75 bp, synthetic construct
  source 1..75: mol_type = other DNA
tggatagccgcgctactgctgataatcatgatacccatcgtacaggcggcaaagccgcaaaaagtcacgctgatg

SEQ ID NO: 603947 - DNA, 75 bp, synthetic construct
  source 1..75: mol_type = other DNA
caagctggcttcgacctgggaaggaattcgcgcggcagaagagctggaaaaagaaggtattaactgcaacctgac

SEQ ID NO: 603948 - DNA, 75 bp, synthetic construct
  source 1..75: mol_type = other DNA
acgactatttcaagcagcaccgctatgaaaccattgtgatgggcgcaagtttccgccgtaccgagcaaatcctcg

SEQ ID NO: 603949 - DNA, 75 bp, synthetic construct
  source 1..75: mol_type = other DNA
cgttcgccacctcagcgctggaagtagttattctgaaaacgctgcatatgtttgaagtaccgttcctgctggtgg

SEQ ID NO: 603950 - DNA, 75 bp, synthetic construct
  source 1..75: mol_type = other DNA
cctccatttcatcatctggatatagctggaataataaaaatgtattaaatgttttttgtaatataatagataaaa

SEQ ID NO: 603951 - DNA, 75 bp, synthetic construct
  source 1..75: mol_type = other DNA
tgatcggcattacagccttgagctgccgttttttattctgttagttgtgaaactgaagcgatttagtcactatcg

SEQ ID NO: 603952 - DNA, 75 bp, synthetic construct
  source 1..75: mol_type = other DNA
atgaacgagttagacggcatcaaacagttcaccacggtcgtggcagacagtggcgatattgagtccattcgtcac

SEQ ID NO: 603953 - DNA, 75 bp, synthetic construct
  source 1..75: mol_type = other DNA
tggctttatctggctgacttagaacatgaactacgtattgctggcattcatatcaaaggagaggagtatggaaat

SEQ ID NO: 603954 - DNA, 75 bp, synthetic construct
  source 1..75: mol_type = other DNA
accaacagctacattgaaggggatgtggatatcgtttctggtcgcggcgcagtggtgttcgataataccgaattc

SEQ ID NO: 603955 - DNA, 75 bp, synthetic construct
  source 1..75: mol_type = other DNA
gacgctgaccgcctgtagctcaacaccgcccgatcaacgtccttctgatcaaaccgcgcctggtacctcttctcg

SEQ ID NO: 603956 - DNA, 75 bp, synthetic construct
  source 1..75: mol_type = other DNA
gtgaacacattttcagtttcccgtctggcgctggcattggcttttggcgtgacgctgaccgcctgtagctcaaca

SEQ ID NO: 603957 - DNA, 75 bp, synthetic construct
  source 1..75: mol_type = other DNA
ggcggactcgaccgggaagcgcgccggatgatgcttacccttgagcgctgcgaaccctgcgaaggggccggggtg

SEQ ID NO: 603958 - DNA, 75 bp, synthetic construct
  source 1..75: mol_type = other DNA
actcaattccttgggctgttgtcggtgtgaataaggcaaagacatcaatgaataagcataaaaatagccaagatg

SEQ ID NO: 603959 - DNA, 75 bp, synthetic construct
  source 1..75: mol_type = other DNA
cttcaagaacttttacaccagaaatttgtgaattaatagtttctaatgagccggggaaaagaaaattacatggat

SEQ ID NO: 603960 - DNA, 75 bp, synthetic construct
  source 1..75: mol_type = other DNA
gaaccttgacgaacagcgtgaagggtacgccccgtttgaatcacgcggctgggatgtactgacaaagaacctgtc

SEQ ID NO: 603961 - DNA, 75 bp, synthetic construct
  source 1..75: mol_type = other DNA
ggcgcatgggcgacgttggacgcagtcttttgcgtggtaacagcgcgctggtagatgagtgtgtcgcgttttatg

SEQ ID NO: 603962 - DNA, 75 bp, synthetic construct
  source 1..75: mol_type = other DNA
tgcaggctcatgacctcactaatgacagtgataggtacacaactgctggctggctacgctaatgctgacagaatt

SEQ ID NO: 603963 - DNA, 75 bp, synthetic construct
  source 1..75: mol_type = other DNA
caccgcaggttgtgctggcgctgctggatgaactagaagctaaaaacaaacgcattacagaactggaagcgaggg

SEQ ID NO: 603964 - DNA, 75 bp, synthetic construct
  source 1..75: mol_type = other DNA
tgcgtgaggcggcagaagcaataaaaatagtagccacaccacaaaaattgctggcatttcgtatgaaagtcacac

SEQ ID NO: 603965 - DNA, 75 bp, synthetic construct
  source 1..75: mol_type = other DNA
aaaatagttgcttcattaatcagtccgaccagcggaacgttactgtttgaaggcgaggatgtcagcacactaaag

SEQ ID NO: 603966 - DNA, 75 bp, synthetic construct
  source 1..75: mol_type = other DNA
agaaacgcgaccaggttatcgagcacgtagcggacatgtacggtcgcgatgcggtatcgcagattatcaccttcg

SEQ ID NO: 603967 - DNA, 75 bp, synthetic construct
  source 1..75: mol_type = other DNA
tgaacagagcccatctggaggaagtttccaggttggtccaacaatatcagccggccgctttttcggagcatctgg

SEQ ID NO: 603968 - DNA, 75 bp, synthetic construct
  source 1..75: mol_type = other DNA
gctgatgatattgtagtacattgttcacgaatgagtgatgcaacaaggctgaagaacaggttatcggagcgcttc

SEQ ID NO: 603969 - DNA, 75 bp, synthetic construct
  source 1..75: mol_type = other DNA
gaaaacggactggatcataactggctgccgctgccggtacatccgtggcagtggcagcaaaaaatcgctaccgac

SEQ ID NO: 603970 - DNA, 75 bp, synthetic construct
  source 1..75: mol_type = other DNA
taccaaaaatgctcgttccgctctttgagagcggtacaattgtgttttgtagagactttccagaatggcaacgcc

SEQ ID NO: 603971 - DNA, 75 bp, synthetic construct
  source 1..75: mol_type = other DNA
atgtgaacatatcgatcaggtccagaatacgctgcgtcgccagatattgctcgagaatccggccacctatgttga

SEQ ID NO: 603972 - DNA, 75 bp, synthetic construct
  source 1..75: mol_type = other DNA
gtgatccctctgccagcactgcttctggtatgtggaatgcgtgcctccccgcccggggaggcatcagcctgaaac

SEQ ID NO: 603973 - DNA, 75 bp, synthetic construct
  source 1..75: mol_type = other DNA
ggggccacgaaaatggctcggttgaaagtgcccacggacatctgaaaaggcgtatctgtcaggcgctgatactgc

SEQ ID NO: 603974 - DNA, 75 bp, synthetic construct
  source 1..75: mol_type = other DNA
ttcgtaacgggctggacgttgtgcgtatgatcgcgctcggtgccgacaccgtactgctgggccgcgctttcctgt

SEQ ID NO: 603975 - DNA, 75 bp, synthetic construct
  source 1..75: mol_type = other DNA
atgcgctggcaacagcgggtcaggcgggcgtggcgaacttgctgaatctgatcgagaaagagatgaaagtggcga

SEQ ID NO: 603976 - DNA, 75 bp, synthetic construct
  source 1..75: mol_type = other DNA
atcatcgtttgccgacgctggtatttagcctggaaatgactgacagaagtctcattgaacgcatggttgcgcagg

SEQ ID NO: 603977 - DNA, 75 bp, synthetic construct
  source 1..75: mol_type = other DNA
gaccatcgggaacagcctatgccctgatgaaaaatggctcagttattgatatcagcgatgaggaggtttatcgcc

SEQ ID NO: 603978 - DNA, 75 bp, synthetic construct
  source 1..75: mol_type = other DNA
catttatagaatttgcaacatcgttagcctataagcacaggttaaagctaccaaatggtattgaggcatattttg

SEQ ID NO: 603979 - DNA, 75 bp, synthetic construct
  source 1..75: mol_type = other DNA
acaggaaaatcacggagtgatgtgcaacaacgcattcagcagtttcacagccaggaatttttaaactcactccgg

SEQ ID NO: 603980 - DNA, 75 bp, synthetic construct
  source 1..75: mol_type = other DNA
caccgattttgcgccagatgatcgacagcgcaggctcaggcaacgttgttaattacgatccctccaacgtaatta

SEQ ID NO: 603981 - DNA, 75 bp, synthetic construct
  source 1..75: mol_type = other DNA
cgtgacggtatggcggcagacggcgtgtcgcagcgcaaatataactacatgcgcgccgagcaaatctaccgcgat

SEQ ID NO: 603982 - DNA, 75 bp, synthetic construct
  source 1..75: mol_type = other DNA
ggcagaaggcgttgaattaattgaaatcgcaccgggtgtggagattgagcgcgacattctgccgtatatggcttt

SEQ ID NO: 603983 - DNA, 75 bp, synthetic construct
  source 1..75: mol_type = other DNA
cctattggtacgctgggggcagcgatttctgcagccaagccgcagaaaggttccacggtgatcagcgaaaacggt

SEQ ID NO: 603984 - DNA, 75 bp, synthetic construct
  source 1..75: mol_type = other DNA
caccgtgctggctaacgatggtgagctgatcgtgcttggcggtctgatggacgaccaggcgggagaaagcgtggc

SEQ ID NO: 603985 - DNA, 75 bp, synthetic construct
  source 1..75: mol_type = other DNA
agcgtgattgaacaactggatattcgccgtgctcaggtgcatgtcgaggcgttgatcgtggaagttgccgaaggc

SEQ ID NO: 603986 - DNA, 75 bp, synthetic construct
  source 1..75: mol_type = other DNA
atggctttccgtccaattatcaagcacccacgcctgatggaaagtagcctgtttacgccgatggaggatgcatga

SEQ ID NO: 603987 - DNA, 75 bp, synthetic construct
  source 1..75: mol_type = other DNA
tttcctgcaaaccggacacccgcgcgacctgacgctaatccattcactgggtattggcgatcgcgacagcaaagg

SEQ ID NO: 603988 - DNA, 75 bp, synthetic construct
  source 1..75: mol_type = other DNA
tatcgctcttacaggatgcacaccaaagaccagcctggaacgacatacccggcattatgtttatgcttcagatga

SEQ ID NO: 603989 - DNA, 75 bp, synthetic construct
  source 1..75: mol_type = other DNA
cgcttcaaccaactttggctttggtatccccggcggtattcctggggttgcgctgcgtgaaggcgttccttacca

SEQ ID NO: 603990 - DNA, 75 bp, synthetic construct
  source 1..75: mol_type = other DNA
ggcggttacgacctgaccatcagcggccaacatcgccgtctgagttctaacgacgctattgaactggttagtcat

SEQ ID NO: 603991 - DNA, 75 bp, synthetic construct
  source 1..75: mol_type = other DNA
atggcaatctgattggccccggcggatttctcgaaattgcgcaaaacgcccgtaaagtggtgttctgcggcacgt

SEQ ID NO: 603992 - DNA, 75 bp, synthetic construct
  source 1..75: mol_type = other DNA
atcatcaataacgtgagagaaaaccgccaggtgaccgtcactgctgaactgctggcgtccctgattcagaccgcc

SEQ ID NO: 603993 - DNA, 75 bp, synthetic construct
  source 1..75: mol_type = other DNA
gttgggttctggctgaatacagtgcattgctactcgaaaatgctcgccgccgcaccagcagcgccgcagcaggag

SEQ ID NO: 603994 - DNA, 75 bp, synthetic construct
  source 1..75: mol_type = other DNA
tgttcggtgttccgtgtcccggcctacaagattggcgttggccacccgccttccagtgacaacgtggaggcgctg

SEQ ID NO: 603995 - DNA, 75 bp, synthetic construct
  source 1..75: mol_type = other DNA
atccccggcagtattacggaagaaaatgcgaaaaaactgaagagcaactgggacagcgggtataccggcgaaaat

SEQ ID NO: 603996 - DNA, 75 bp, synthetic construct
  source 1..75: mol_type = other DNA
gaggctcttgataatcgttcgtcaatggattggtgtgttgctgtccatgatatgaatgccggatttgaagaaaag

SEQ ID NO: 603997 - DNA, 75 bp, synthetic construct
  source 1..75: mol_type = other DNA
ccctttgttctggttgcggcgcttaacgttgtttttatgcctttctcagttcgttttctgctgaaacctttcttt

SEQ ID NO: 603998 - DNA, 75 bp, synthetic construct
  source 1..75: mol_type = other DNA
gctggaagcaaaaccaataggtgcattccacattgcagaacagcaagttgacggcacaagtgactacctcaagga

SEQ ID NO: 603999 - DNA, 75 bp, synthetic construct
  source 1..75: mol_type = other DNA
tttaatgacagtgagtggcggcgtttcacggagcagtatctggataacccgagcgatggcattctggataagacc

SEQ ID NO: 604000 - DNA, 75 bp, synthetic construct
  source 1..75: mol_type = other DNA
tgaaatttccgatgaaacttttgataccagcgcaatggacagcagtgctaaagagtttctggacgctgcaattcg

SEQ ID NO: 604001 - DNA, 75 bp, synthetic construct
  source 1..75: mol_type = other DNA
ggttggataagctgtagtgagcgaatgccgccagttggtgttgatgtactactgtttgtgtccagcacgggtgaa

SEQ ID NO: 604002 - DNA, 75 bp, synthetic construct
  source 1..75: mol_type = other DNA
gctgctgagaatggacagcgaacggcgcatgaaaacgctgggtgaatcggtgaaaaatacgcttctcacgcccaa

SEQ ID NO: 604003 - DNA, 75 bp, synthetic construct
  source 1..75: mol_type = other DNA
agcgaagaactggtcaaaacccgaaagcggcgggtttatctggcataccacagggtcaggaaaaaccctgaccag

SEQ ID NO: 604004 - DNA, 75 bp, synthetic construct
  source 1..75: mol_type = other DNA
ggcaggttctcacgctaaccgttatgacgtaactatcctggttaatggcttgccgctggtgcaaatcgaactgaa

SEQ ID NO: 604005 - DNA, 75 bp, synthetic construct
  source 1..75: mol_type = other DNA
caagttgacggcacaagtgactatctcaaggatggagaatggcctattgataatgggattattgaagtctacgcc

SEQ ID NO: 604006 - DNA, 75 bp, synthetic construct
  source 1..75: mol_type = other DNA
acggattcgacagcactgctgccctgcattgaacaggccagggaagatatccgtaccctgcgccaactgcagctt

SEQ ID NO: 604007 - DNA, 75 bp, synthetic construct
  source 1..75: mol_type = other DNA
ctgccctgcattgaacaggccagggaagatatccgtaccctgcttcacctgcaactcattcacctgagcgcgtga

SEQ ID NO: 604008 - DNA, 75 bp, synthetic construct
  source 1..75: mol_type = other DNA
acagattcggcagcactgttgccctgtatcgaacaggccagggagggtatccgtaccctgtgccaactgcagctt

SEQ ID NO: 604009 - DNA, 75 bp, synthetic construct
  source 1..75: mol_type = other DNA
atgcctgccgggtttacccactttctactggtaaccaggaacaacatgaaatcattaaccacggaaactgctctg

SEQ ID NO: 604010 - DNA, 75 bp, synthetic construct
  source 1..75: mol_type = other DNA
atgcctgccgggtttacccactttcaactggtaaccaggaacaacatgaaatcattaaccacggaaacagctctg

SEQ ID NO: 604011 - DNA, 75 bp, synthetic construct
  source 1..75: mol_type = other DNA
cagatgtattgatttttgaaccgaaagtttttggtgatgagcgtggtttcttttttgagagctttaaccagaagg

SEQ ID NO: 604012 - DNA, 75 bp, synthetic construct
  source 1..75: mol_type = other DNA
ttagcgatcctgttgcagtagaaaaattcaaagcagaacattatgtggatgatgaaaagttcgctgaattgcaaa

SEQ ID NO: 604013 - DNA, 75 bp, synthetic construct
  source 1..75: mol_type = other DNA
aaagcgcgataaaaacagttttgacttcaccatgaactgggcgaaatcagacaacacgctgattaaagacctcaa

SEQ ID NO: 604014 - DNA, 75 bp, synthetic construct
  source 1..75: mol_type = other DNA
gatattctgattgcgtggctgcaggacaatatcgactgcggatcgggaattatctttgacaacgatgaggataaa

SEQ ID NO: 604015 - DNA, 75 bp, synthetic construct
  source 1..75: mol_type = other DNA
ctgccctgcattgaacaggccagggaagatctccataccctgcgccagttgcagcttctgcaacagaaccggtga

SEQ ID NO: 604016 - DNA, 75 bp, synthetic construct
  source 1..75: mol_type = other DNA
aaaggatggtatcacttgagccacaaataagaagtgcagaacaaagacttcagcttgctgaacgtcaggcagaac

SEQ ID NO: 604017 - DNA, 75 bp, synthetic construct
  source 1..75: mol_type = other DNA
gtacaaaatgaacaatcaagacctctgcctgatgtggctcagcgtctgatgcagcatcttgctgaacatggcatt

SEQ ID NO: 604018 - DNA, 75 bp, synthetic construct
  source 1..75: mol_type = other DNA
gaagaagctgcaaggcgctacatccgcacatcactcaaacgggagtatgctaccgaaaatggcactgagctaaat

SEQ ID NO: 604019 - DNA, 75 bp, synthetic construct
  source 1..75: mol_type = other DNA
gccaggattcgtgccgatttcgatgattttgacggtgacaggcgaggtatcggtgattgtctggatgaggctgag

SEQ ID NO: 604020 - DNA, 75 bp, synthetic construct
  source 1..75: mol_type = other DNA
cgagctggtgagcgtggcgggtaacatgcaggtaagccagtggacaggccagaacggcgaaacgcggcagggctg

SEQ ID NO: 604021 - DNA, 75 bp, synthetic construct
  source 1..75: mol_type = other DNA
tactgacgcactgaacagggcaaagcagcagacgggcctgcaggatgccccatatgagggcgaaataccatttta

SEQ ID NO: 604022 - DNA, 75 bp, synthetic construct
  source 1..75: mol_type = other DNA
tgctgaagtctcaggaaatcaatctcgattacattcttgaactgatttttgaatacaacaaacagcacccgaaca

SEQ ID NO: 604023 - DNA, 75 bp, synthetic construct
  source 1..75: mol_type = other DNA
acggcactgagagcgattcagacagtggatatcagtgaccctgccgccgttgacgcttttaaggctgaacatttc

SEQ ID NO: 604024 - DNA, 75 bp, synthetic construct
  source 1..75: mol_type = other DNA
tttgtacctgacctcacatcacagcaggcgatgctgaccaatgtccgcgttcagctacaaaacctgaataatgtc

SEQ ID NO: 604025 - DNA, 75 bp, synthetic construct
  source 1..75: mol_type = other DNA
ggcggctggcaaatgacccgcagttaaagaccaccagcaagggtacacaaatggcaatggcgagtatggcggtcc

SEQ ID NO: 604026 - DNA, 75 bp, synthetic construct
  source 1..75: mol_type = other DNA
gtcctggcgtttggcagacaggccgacgcactggcaaaacaccacaaaggcgagctggtgagcgtggcgggtaac

SEQ ID NO: 604027 - DNA, 75 bp, synthetic construct
  source 1..75: mol_type = other DNA
cactgacgcactgaacagggcaaaacaacagacaggccagcacgatgatccgtacggggacgggataccgtttta

SEQ ID NO: 604028 - DNA, 75 bp, synthetic construct
  source 1..75: mol_type = other DNA
tactgacgcactgaacagggcaaaacaacagacaggccagcacgatgacctgtacggggataacataccgtttta

SEQ ID NO: 604029 - DNA, 75 bp, synthetic construct
  source 1..75: mol_type = other DNA
cggtctggcgacgttgtggttatctgtcctggcgtttggcagacaagccgacgcgctggcaaagcatcacaaagg

SEQ ID NO: 604030 - DNA, 75 bp, synthetic construct
  source 1..75: mol_type = other DNA
atgcagatcagccagtggaccggacagaacggagaaacgcggcagggctggcaggttatcgcagacagtgtaatc

SEQ ID NO: 604031 - DNA, 75 bp, synthetic construct
  source 1..75: mol_type = other DNA
gctttcaaccagatacatcgttacagtaaagagagttttaacagcgaaaattccctgtttaagtatctgcagctg

SEQ ID NO: 604032 - DNA, 75 bp, synthetic construct
  source 1..75: mol_type = other DNA
gcaaggaaagctttaacagcgataactccctgtttaaatacctgcaactcttcgtgatttccaacgggactgata

SEQ ID NO: 604033 - DNA, 75 bp, synthetic construct
  source 1..75: mol_type = other DNA
gcctttaaccagatacaccgttacagtaaggaaagctttaacagcgacaactccctgtttaaatacctgcaactg

SEQ ID NO: 604034 - DNA, 75 bp, synthetic construct
  source 1..75: mol_type = other DNA
tttatctccgttaagtcaccgactgcgatgctggcgaatgtgcgggaccagcttcagcgtcttaatggtgtggtg

SEQ ID NO: 604035 - DNA, 75 bp, synthetic construct
  source 1..75: mol_type = other DNA
atgactcatcagacacacaccattactgaatccaataactttatcgttcttgataagtacatcaaagctgagcca

SEQ ID NO: 604036 - DNA, 75 bp, synthetic construct
  source 1..75: mol_type = other DNA
ttattcagcaaactaaccttgatgacatgcccgacaaagccagtatcattgatgcattctttacctatgctcagc

SEQ ID NO: 604037 - DNA, 75 bp, synthetic construct
  source 1..75: mol_type = other DNA
gacgtcacgatcctggttaatggcttaccactggtacaaatcgaactgaaaaagcgcggcgtggcgattcgtgag

SEQ ID NO: 604038 - DNA, 75 bp, synthetic construct
  source 1..75: mol_type = other DNA
aaagcaaaacctgattgcaaattaccagatagggcgatggattatcttttgcgaaacggactggtaagtgcggag

SEQ ID NO: 604039 - DNA, 75 bp, synthetic construct
  source 1..75: mol_type = other DNA
gctcaaaaggttttaatgccatgctggcagtgagcagcgtggatgctgcaaaagcctattacacggcgtttaaac

SEQ ID NO: 604040 - DNA, 75 bp, synthetic construct
  source 1..75: mol_type = other DNA
aactttagcaccgacagtaacggttttcagaactactatcgtgatttagcccaacgggttaaaaatcaggatatc

SEQ ID NO: 604041 - DNA, 75 bp, synthetic construct
  source 1..75: mol_type = other DNA
cggaggaatcgctgaaaaaacaccgggaaggggtgaaagaggcgatgatgcagcacaggaaggacgtgttaaagc

SEQ ID NO: 604042 - DNA, 75 bp, synthetic construct
  source 1..75: mol_type = other DNA
actgaacacgctgttcgtcgataaaaacctgcgttttcacggtctgatgcaggcgttttcccgtaccaaccgcat

SEQ ID NO: 604043 - DNA, 75 bp, synthetic construct
  source 1..75: mol_type = other DNA
agatttcgatgattttgacggtgacaggcgaggtattggtgattgtctggatgaggctgagcaagagcttatcgt

SEQ ID NO: 604044 - DNA, 75 bp, synthetic construct
  source 1..75: mol_type = other DNA
gatctgggggtggctgattttagttcaatggttttaaaagttggcagctatgccatgtcaggcagtgcgattggc

SEQ ID NO: 604045 - DNA, 75 bp, synthetic construct
  source 1..75: mol_type = other DNA
caacgtttcgtgaggatattatcgaaagcaataaaggtaaagtccgtgaaacgctggagcaatacttacaggtat

SEQ ID NO: 604046 - DNA, 75 bp, synthetic construct
  source 1..75: mol_type = other DNA
tcgtctgtccgtgcgtggtgtgagtatcaactggaaggtatgacgatacttcgtgatgcgtacagctcgctggct

SEQ ID NO: 604047 - DNA, 75 bp, synthetic construct
  source 1..75: mol_type = other DNA
gttactcctgtcatcaagaaaagtgattctattattctacaaaggattttaagtaatggcagccagaccacgtaa

SEQ ID NO: 604048 - DNA, 75 bp, synthetic construct
  source 1..75: mol_type = other DNA
taatcctccaagcgtttccacgttgcgtcgttatgctaagcagaatttattttgtccaccggccatgaaacaagg

SEQ ID NO: 604049 - DNA, 75 bp, synthetic construct
  source 1..75: mol_type = other DNA
agaaaattatcggcgaacagctgggcgttaagcaggaagaagtgaccaacaatgcttctttcgttgaagacctgg

SEQ ID NO: 604050 - DNA, 75 bp, synthetic construct
  source 1..75: mol_type = other DNA
ggaattatctttgacaacgatgaggatagaacggattcggcagcactgttgccctgtatcgaacaggccagggag

SEQ ID NO: 604051 - DNA, 75 bp, synthetic construct
  source 1..75: mol_type = other DNA
atgaaattattaaccacggaaaccgcactggatattctgattgcgtggctgcaggacaatatcgactgcgaatcg

SEQ ID NO: 604052 - DNA, 75 bp, synthetic construct
  source 1..75: mol_type = other DNA
cgatgaggacaaaacggattcggcagcactgttgccctgtattgaacaggccagggaggatatccgtaccctgcg

SEQ ID NO: 604053 - DNA, 75 bp, synthetic construct
  source 1..75: mol_type = other DNA
agccgaaggggtgattagtcgcattgacgccattatccgttcactacggcagtttacccggcgcgccgaactgga

SEQ ID NO: 604054 - DNA, 75 bp, synthetic construct
  source 1..75: mol_type = other DNA
cgcaccgggcgtattcttaatattaacgttccggatttacccttggatcaaatcaaaggtattcgcgtgacgcgc

SEQ ID NO: 604055 - DNA, 75 bp, synthetic construct
  source 1..75: mol_type = other DNA
aacggattcagcagcactgctgccctgcattaaacaggccagggaagatatccgtaccctgcgccaacagcagct

SEQ ID NO: 604056 - DNA, 75 bp, synthetic construct
  source 1..75: mol_type = other DNA
ggggtacgaatcccgcaggatgtcgccgtaatgggctttgataatctggttggcgtcgggcatctgtttttaccg

SEQ ID NO: 604057 - DNA, 75 bp, synthetic construct
  source 1..75: mol_type = other DNA
aaaagcactgcgcagcctggctgagttctttgctgcgaattttactgcggagctggataacgctggcctcgcaca

SEQ ID NO: 604058 - DNA, 75 bp, synthetic construct
  source 1..75: mol_type = other DNA
gtacgctgcgtgacaagactgaccgcatccaggcgctggctggctggatcgccgaacagattggcgctgacgtta

SEQ ID NO: 604059 - DNA, 75 bp, synthetic construct
  source 1..75: mol_type = other DNA
cccttggcgtgctgcgtattatcgtcgagaagaacctcaatcttgacctgcaaacgctgaccgaagaagcggtgc

SEQ ID NO: 604060 - DNA, 75 bp, synthetic construct
  source 1..75: mol_type = other DNA
ggcgcgtctgacgtgcacttcgtgcgtccggtgcacaccgtaactttgctgctgggcgataaagtcattccggca

SEQ ID NO: 604061 - DNA, 75 bp, synthetic construct
  source 1..75: mol_type = other DNA
aacgtgtatctaacattctggcgaaatctgacgaagtgctgagcgaccgcgtgaatgcctctaccctgaaagagc

SEQ ID NO: 604062 - DNA, 75 bp, synthetic construct
  source 1..75: mol_type = other DNA
caaaagatccgcagcaaattatctccggtaatgaaaaagtcgttcgcccgcgtctggcggatgcggagttcttct

SEQ ID NO: 604063 - DNA, 75 bp, synthetic construct
  source 1..75: mol_type = other DNA
ttgatgacaaagaattgcgtatcaaccgtttgaccatgctggagaaactgcgcgaattattcctgcgcgttgcgg

SEQ ID NO: 604064 - DNA, 75 bp, synthetic construct
  source 1..75: mol_type = other DNA
gctgaacagattggcgctgacgttaaccacgcaacccgtgcgggcctgctgtccaagtgcgatctgatgaccaac

SEQ ID NO: 604065 - DNA, 75 bp, synthetic construct
  source 1..75: mol_type = other DNA
agtttaagagatttgtctcagttcagaagtgttcctcaacgattgatggagttaggtttggatacctattcggtt

SEQ ID NO: 604066 - DNA, 75 bp, synthetic construct
  source 1..75: mol_type = other DNA
gaacgacggcaaactgctgccgaattttatcttcgttgccaacatcgaatcgaaagatccgcagcaaattatctc

SEQ ID NO: 604067 - DNA, 75 bp, synthetic construct
  source 1..75: mol_type = other DNA
gctgaacagattggcgctgacgttaaccacgcaacccgtgcgggcttgctgtctaagtgtgacctgatgaccaac

SEQ ID NO: 604068 - DNA, 75 bp, synthetic construct
  source 1..75: mol_type = other DNA
gtacgctgcgtgacaagactgaccgcatccaggcgctggctggctggattgctgaacagattggcgctgacgtta

SEQ ID NO: 604069 - DNA, 75 bp, synthetic construct
  source 1..75: mol_type = other DNA
aataaagacccgcatgccgttgtaaaaacaacgtttcgcggcactaatgcttatggtggagtggtaaaacagacc

SEQ ID NO: 604070 - DNA, 75 bp, synthetic construct
  source 1..75: mol_type = other DNA
acggattcggcagcactgctgccctgtattgaacaggcccgggagtatgtccgtaccctgttccaactgcggctt

SEQ ID NO: 604071 - DNA, 75 bp, synthetic construct
  source 1..75: mol_type = other DNA
gtgctccttgggctggtttatttcttcaaggtgaaaggcttttataattatacataccagctcattccgttatct

SEQ ID NO: 604072 - DNA, 75 bp, synthetic construct
  source 1..75: mol_type = other DNA
gcgataaaagcatttacctgtatgacctacgccgcatggatgaaatcatggaggctcttgataatcgttcgtcga

SEQ ID NO: 604073 - DNA, 75 bp, synthetic construct
  source 1..75: mol_type = other DNA
gcagaacaacgccaggaagaaggcacccagtggtttaaccgcgtaatggggattagttggtcgtggccgcaaagc

SEQ ID NO: 604074 - DNA, 75 bp, synthetic construct
  source 1..75: mol_type = other DNA
aatcgggaattatcttcgacaacgatgaggataaaacagattcggcagcactgttgccctgtatcgaacaggcca

SEQ ID NO: 604075 - DNA, 75 bp, synthetic construct
  source 1..75: mol_type = other DNA
gatattctgattgcgtggctgcaggacaatatcgactgcgaatcgggaattatctttgacaacggtgaggataaa

SEQ ID NO: 604076 - DNA, 75 bp, synthetic construct
  source 1..75: mol_type = other DNA
atgcctgccgggtttacccactttcgactggtaaccagcaacaacatgaaatcattaaccacggaaaccgctctg

SEQ ID NO: 604077 - DNA, 75 bp, synthetic construct
  source 1..75: mol_type = other DNA
atgcctgccgggtttacccactttcgactggtaaccagaaacaacatgaaatcattaaccacggaaacagctctg

SEQ ID NO: 604078 - DNA, 75 bp, synthetic construct
  source 1..75: mol_type = other DNA
atgcctgccgggtttacccactttccactggtaaccaggaacaacatgaaatcattaaccacggaaaccgctctg

SEQ ID NO: 604079 - DNA, 75 bp, synthetic construct
  source 1..75: mol_type = other DNA
cggacatcgtggtttctggtattaatgcaggaccaaatttaggtgatgatgttatttattccggtacggtagccg

SEQ ID NO: 604080 - DNA, 75 bp, synthetic construct
  source 1..75: mol_type = other DNA
tctccatcacgccgctgcatgtggatttaactgcgcatagcgcgcaagatgtggtttcagactggttaaacagcg

SEQ ID NO: 604081 - DNA, 75 bp, synthetic construct
  source 1..75: mol_type = other DNA
atgcctgccgggtttacccactttcgactggtaaccaggaacaacatgaaatcattaaccacggaaacggctctg

SEQ ID NO: 604082 - DNA, 75 bp, synthetic construct
  source 1..75: mol_type = other DNA
tagataatcaggttgagcaacaccttaaaagcgaactgaaaggttttcaggaaaatgtacgtgattatgctcaat

SEQ ID NO: 604083 - DNA, 75 bp, synthetic construct
  source 1..75: mol_type = other DNA
ttatggaggagtagttaaacagactattgctgcgcgtgtcgacatccgaacgggcgaagtcgtttcagtattaga

SEQ ID NO: 604084 - DNA, 75 bp, synthetic construct
  source 1..75: mol_type = other DNA
acgatgattcatcttataaacatgtgtcaacggtatatcatttggttttgaataaagacccgcacgccattgtga

SEQ ID NO: 604085 - DNA, 75 bp, synthetic construct
  source 1..75: mol_type = other DNA
ggttttttcgcccctgaaagctctgattgacggtctggcgtgggtgctggaaaaactcggtgttctgcccggtga

SEQ ID NO: 604086 - DNA, 75 bp, synthetic construct
  source 1..75: mol_type = other DNA
ccaacgtttgagtacgcagataaaaccctcaaagaatatcgcgacgagctaaaagaaacccggcacgaaatcgtt

SEQ ID NO: 604087 - DNA, 75 bp, synthetic construct
  source 1..75: mol_type = other DNA
ccagtgcggtttacctcggtggctgtctggcgctgggcgtaattggctcaatcttatggccgactgaaaaacctc

SEQ ID NO: 604088 - DNA, 75 bp, synthetic construct
  source 1..75: mol_type = other DNA
aataaagacccgcacgccattgtgaaaacgacgtttcgcggcactaatgcttatggtggcatggtcaaacagact

SEQ ID NO: 604089 - DNA, 75 bp, synthetic construct
  source 1..75: mol_type = other DNA
cgcgatgatttcggaagcagcagctgcggcgcaaagcacgcttggcgcactgggtaccgtagggactgaagaact

SEQ ID NO: 604090 - DNA, 75 bp, synthetic construct
  source 1..75: mol_type = other DNA
cctgttgttgaagagcaacggcagggtgcgctcattgcggcacagagtggcggcagcgcagaagacggccagcgc

SEQ ID NO: 604091 - DNA, 75 bp, synthetic construct
  source 1..75: mol_type = other DNA
gcgtcacgcaggcgcagcaacgctatgaccgtgttcaggatattgccggtaagctcagtcagcgcggtgctgttg

SEQ ID NO: 604092 - DNA, 75 bp, synthetic construct
  source 1..75: mol_type = other DNA
ggattatcggggagattacggacgatctgcgtgggcttgtccggatggccacggcgtggggtgagcgtctgcagg

SEQ ID NO: 604093 - DNA, 75 bp, synthetic construct
  source 1..75: mol_type = other DNA
ctgcgcaacacaggggctgtggcgatggcggcgggtacaggcggcctgtatgcggcgcagcgtatgatggctccg

SEQ ID NO: 604094 - DNA, 75 bp, synthetic construct
  source 1..75: mol_type = other DNA
ttgtccctgacctccggggtgctgaccggtatttttgcaaaacttcagcttggctctgcgcttcttggtggcggg

SEQ ID NO: 604095 - DNA, 75 bp, synthetic construct
  source 1..75: mol_type = other DNA
aaggcggttctggaggcggtgaatgccctgccggctccgcaggacgggcgtgatgccacggcactggaagtgctc

SEQ ID NO: 604096 - DNA, 75 bp, synthetic construct
  source 1..75: mol_type = other DNA
agcattcctgtaccggcagacggcaaaagtattacccccgatgatgtgcgtccgatgcttgagcagatggtggcg

SEQ ID NO: 604097 - DNA, 75 bp, synthetic construct
  source 1..75: mol_type = other DNA
cggatattgacgtcagcatgacgggtgaacggtcgttctctgtggtggtccggcagagcagtggccagcgtacgg

SEQ ID NO: 604098 - DNA, 75 bp, synthetic construct
  source 1..75: mol_type = other DNA
atgcggtcgcgaatattccgcagaccggcggacggcaaaagtctcaccccggatgatgtgcgtccgatgcttgag

SEQ ID NO: 604099 - DNA, 75 bp, synthetic construct
  source 1..75: mol_type = other DNA
atattcatgttccgcgtgatggtcgtgactacgatccggatgttctgcagaaggcggttctggatgcggtgagtg

SEQ ID NO: 604100 - DNA, 75 bp, synthetic construct
  source 1..75: mol_type = other DNA
cactgcaacagcatgaccggtgataagcccggtgaagcccattcatcaggctggaccctggctgccaaacgtgga

SEQ ID NO: 604101 - DNA, 75 bp, synthetic construct
  source 1..75: mol_type = other DNA
ttcctgttccgcgtgatggtcgtgactacgatccggaagtactgcagaaggcggtgaatgatgcggtcgcaaata

SEQ ID NO: 604102 - DNA, 75 bp, synthetic construct
  source 1..75: mol_type = other DNA
tgaccggtgataaacccggagaagctcattcatcaggctggaccctggctgccaaacggggacgggatgctggag

SEQ ID NO: 604103 - DNA, 75 bp, synthetic construct
  source 1..75: mol_type = other DNA
tggtgatccggcagagcagtggccagtgtacggaaaaaacattttccctgccggtgatgctctaccgcggtgtgt

SEQ ID NO: 604104 - DNA, 75 bp, synthetic construct
  source 1..75: mol_type = other DNA
ccccgccattgacgatcaaaaatcctttccccggggctcgtatgccacacaccagggtggactctggcgggcgta

SEQ ID NO: 604105 - DNA, 75 bp, synthetic construct
  source 1..75: mol_type = other DNA
ggcttccctgtcggcggtattacagaagcatgtgacggtggatgaggtgcgtccggttctgcaggcgatggtgga

SEQ ID NO: 604106 - DNA, 75 bp, synthetic construct
  source 1..75: mol_type = other DNA
gtgagtgccctgccggctccgcaggacgggcgtgatgccacggcactggaaatactccccgccattgacgatcaa

SEQ ID NO: 604107 - DNA, 75 bp, synthetic construct
  source 1..75: mol_type = other DNA
atgaatgaacgtgaactgtccattatccgtgcgctgggtgaagaattttccgcggtgctggcggatttacagcgc

SEQ ID NO: 604108 - DNA, 75 bp, synthetic construct
  source 1..75: mol_type = other DNA
gaagagtgaacaagtcaaaaagattacggtttccattcctcttaaggtgttaaaaatcctcaccgatgaacgcac

SEQ ID NO: 604109 - DNA, 75 bp, synthetic construct
  source 1..75: mol_type = other DNA
cgctgatatattttcttccgggtgaagattcattctattccgctccctatgagtacagtcgcggtagctcaaaaa

SEQ ID NO: 604110 - DNA, 75 bp, synthetic construct
  source 1..75: mol_type = other DNA
ttgactacaacaagccacgacagcgtatttctgcgtgccgataattccctgattgacatgaactatatcaccagt

SEQ ID NO: 604111 - DNA, 75 bp, synthetic construct
  source 1..75: mol_type = other DNA
tgattaaccatgccaacgaatacatgaacagtaggcaatggtctggtaaagcagctattggtcgcctgaaggggg

SEQ ID NO: 604112 - DNA, 75 bp, synthetic construct
  source 1..75: mol_type = other DNA
taaaaatcctcactgatgaacgcacgcgtcgtcaggtgaacaacctgcgtcacgctaccaacagcgagctgctgt

SEQ ID NO: 604113 - DNA, 75 bp, synthetic construct
  source 1..75: mol_type = other DNA
tgcctaatgtggctcagcgtctgatacagcatcttgcagagcatggcattcagccagcccggaatgtggctgaac

SEQ ID NO: 604114 - DNA, 75 bp, synthetic construct
  source 1..75: mol_type = other DNA
tggcatattcttcggcttctttctgctaatttatgcatttggcgtttataactaccttcatcttctttattcaat

SEQ ID NO: 604115 - DNA, 75 bp, synthetic construct
  source 1..75: mol_type = other DNA
ctctaccgcggtgtgttcagagccggtgaaacctaccaccccggcgatacggtgacgtggggggctcgctgtggc

SEQ ID NO: 604116 - DNA, 75 bp, synthetic construct
  source 1..75: mol_type = other DNA
atgacggaacgggaactgtccattattcgtgcactgggcgaagaattcgccatggtgctggcggatttacagcgt

SEQ ID NO: 604117 - DNA, 75 bp, synthetic construct
  source 1..75: mol_type = other DNA
cgctgttccctggggctggtccccccgtgaatcttcctgcgtcccctcaggtcagccgacactttgtcatcctga

SEQ ID NO: 604118 - DNA, 75 bp, synthetic construct
  source 1..75: mol_type = other DNA
ttaaaacggctatgtggacgattccgggagagcgtgaaccgctggaaggtgttaagcattctcaacgtggttcga

SEQ ID NO: 604119 - DNA, 75 bp, synthetic construct
  source 1..75: mol_type = other DNA
ataagaggattgctaaaacacaaactctggtggctcggttttttgccaggtaaagcagtttttagtagccgttat

SEQ ID NO: 604120 - DNA, 75 bp, synthetic construct
  source 1..75: mol_type = other DNA
aatttccaccggggtgcatgctgcgtcctggaaagatgcgctctccagcgccgccagcgaacttggcaaccaaaa

SEQ ID NO: 604121 - DNA, 75 bp, synthetic construct
  source 1..75: mol_type = other DNA
gtgaatgctgctataaaaaagatgaatatcacccgggtgattatttcacatagagagacaactttaagaacagtt

SEQ ID NO: 604122 - DNA, 75 bp, synthetic construct
  source 1..75: mol_type = other DNA
tgcacggcagcaaccgcagaaaaacacattaccagagagacggaatatacaggggaaataatcccccattcgctg

SEQ ID NO: 604123 - DNA, 75 bp, synthetic construct
  source 1..75: mol_type = other DNA
gcggttatgcaacttagtgcggatatggcgctgaatgaggccaaagctatcctgattgctgattgtgaaaatggg

SEQ ID NO: 604124 - DNA, 75 bp, synthetic construct
  source 1..75: mol_type = other DNA
cggcggccgtctggcactgtcggctgaccgtctggataaccggcaggggcaggtgattgctgacggtgacagtca

SEQ ID NO: 604125 - DNA, 75 bp, synthetic construct
  source 1..75: mol_type = other DNA
gatatcgtgcggactgaggcgacaatccgagccacggaaaaggcgaaggcagactttgatatccgcaactataaa

SEQ ID NO: 604126 - DNA, 75 bp, synthetic construct
  source 1..75: mol_type = other DNA
atatcacccgggtgattatttcacatagagagacaactttaagaacagttgatcggatttttagaattacaaatt

SEQ ID NO: 604127 - DNA, 75 bp, synthetic construct
  source 1..75: mol_type = other DNA
gctctattatccttatcacacttttgaacatgtgctggaactgctacgccaggcctcgttcgacccaagcgtact

SEQ ID NO: 604128 - DNA, 75 bp, synthetic construct
  source 1..75: mol_type = other DNA
actcgatgatccacgccgcacacaacggtaagaaagtcaccgtggtggttgagttacaggcgcgtttcgacgaag

SEQ ID NO: 604129 - DNA, 75 bp, synthetic construct
  source 1..75: mol_type = other DNA
attaatttccccaatgtcggcaaagccaatctggtgaacaaaccactgccgcgtttacgccatatttggtttgat

SEQ ID NO: 604130 - DNA, 75 bp, synthetic construct
  source 1..75: mol_type = other DNA
gcatctgcagcagtaataaatcatttgtatagtattaaagacagcttcactcatgaagacaatgtcttatcctta

SEQ ID NO: 604131 - DNA, 75 bp, synthetic construct
  source 1..75: mol_type = other DNA
attatccagtcgccgcatttcaacgacgcggtagatatcctgatccccgattatcagcgttatctcgcggatcgc

SEQ ID NO: 604132 - DNA, 75 bp, synthetic construct
  source 1..75: mol_type = other DNA
atggaactgacgactcgcactttacctgcgcggaaacatattgcgctggtggcacacgatcactgtaaacaaatg

SEQ ID NO: 604133 - DNA, 75 bp, synthetic construct
  source 1..75: mol_type = other DNA
cgggtttcaatgtgaatgccagtgtgaacagaggtaaaggatttgagaaaggcaacagtcagtatgccactgaca

SEQ ID NO: 604134 - DNA, 75 bp, synthetic construct
  source 1..75: mol_type = other DNA
tttccccggggcacgtatgccacacacctgggtggactctggcgggcgtatgaaaaaacgcacgggatgcgggga

SEQ ID NO: 604135 - DNA, 75 bp, synthetic construct
  source 1..75: mol_type = other DNA
tgaaaaaacgcacgggatgcggggatgggaatgcctggttgacggtgtggcggatattgacgtcagcatgacagg

SEQ ID NO: 604136 - DNA, 75 bp, synthetic construct
  source 1..75: mol_type = other DNA
ggcttccctgtctgtggtattacagaagtgcgtgacgggcgatgatgtgcgtccgatgcttgagcagatggtgaa

SEQ ID NO: 604137 - DNA, 75 bp, synthetic construct
  source 1..75: mol_type = other DNA
agcaggaccgatagcgcctaatgacgttcgagagcaaacagccgttccgccagttcctgtaatacaggctgatgt

SEQ ID NO: 604138 - DNA, 75 bp, synthetic construct
  source 1..75: mol_type = other DNA
tgtgcgtccgatgcttgaacagatggtgaaagaggcggtaagccatattcctgttccgcgtgatggtcgtgacta

SEQ ID NO: 604139 - DNA, 75 bp, synthetic construct
  source 1..75: mol_type = other DNA
ctggaaatactccctgccattgacgatcaaaaatcctttccccggggcacgtatgccacacaccagggcggactc

SEQ ID NO: 604140 - DNA, 75 bp, synthetic construct
  source 1..75: mol_type = other DNA
aaagtatcacccccgatgatgtgcgtccgatgcttgagcagatggtgaaagaggctgtaagccatattcccgttc

SEQ ID NO: 604141 - DNA, 75 bp, synthetic construct
  source 1..75: mol_type = other DNA
cctgccggtgatgctctatcgcggtgtattcagaaccggcgaaacctaccaccccggcgatacggtgacgtgggg

SEQ ID NO: 604142 - DNA, 75 bp, synthetic construct
  source 1..75: mol_type = other DNA
cgtcaggtcttgctggtggtctggcaggcggagatacacagagtgtggcgaacgcagctcaggcagggaaaacaa

SEQ ID NO: 604143 - DNA, 75 bp, synthetic construct
  source 1..75: mol_type = other DNA
ctctaccgcggtgtgttcagagccggtgaaacctaccaccccggcgatacggtgacgtggggcggctcgctgtgg

SEQ ID NO: 604144 - DNA, 75 bp, synthetic construct
  source 1..75: mol_type = other DNA
tgatgcggtcgcaaatattccgctaccggcggacggaaaaagtatcaccccggatgatgtgcgtccgatgcttga

SEQ ID NO: 604145 - DNA, 75 bp, synthetic construct
  source 1..75: mol_type = other DNA
tccgtgcactgggcgaagaattcgccgcggtgataacggatttacagcgtacatttgaagaaaagatggctgcgc

SEQ ID NO: 604146 - DNA, 75 bp, synthetic construct
  source 1..75: mol_type = other DNA
aaggctgccgaggagatcgggcaactcgtcgccgtcgcgcgtgaagaactccagcgccgcaaggccaaagaatca

SEQ ID NO: 604147 - DNA, 75 bp, synthetic construct
  source 1..75: mol_type = other DNA
aaggcagcggaggaaatcgggcaactcgtagccgtagctcgtgaagaactccagcggcgtaaagccaaagaatct

SEQ ID NO: 604148 - DNA, 75 bp, synthetic construct
  source 1..75: mol_type = other DNA
aatcacagcaactgaatgccagatttccacatgaagtagtgagtggcattgaggcatccctacagccaggggaaa

SEQ ID NO: 604149 - DNA, 75 bp, synthetic construct
  source 1..75: mol_type = other DNA
tgcggcggtcagagcagcagttgcgccattattgccagcacgaagtattatgttgccattctgaaccgcaaatca

SEQ ID NO: 604150 - DNA, 75 bp, synthetic construct
  source 1..75: mol_type = other DNA
cgattggttactggtcaatgcagaaggaattttccggcaaccgacgcccctcatggtcaaaagttaaagagaaaa

SEQ ID NO: 604151 - DNA, 75 bp, synthetic construct
  source 1..75: mol_type = other DNA
aaagcagccgaggagatcgggcaactcgtcaccgtcgcgcgtgaagaactccagcgccgcaaggccaaagagcag

SEQ ID NO: 604152 - DNA, 75 bp, synthetic construct
  source 1..75: mol_type = other DNA
atgaaacggttagcaaaaatggcacttactgtgattgccgcactcgcatttaacgcgaacgctaacgaggccata

SEQ ID NO: 604153 - DNA, 75 bp, synthetic construct
  source 1..75: mol_type = other DNA
cggtggctgaactggaatctgaaattctgcaactgcgtaaggcgttaaatgaagctcgccttgagcgagacattg

SEQ ID NO: 604154 - DNA, 75 bp, synthetic construct
  source 1..75: mol_type = other DNA
gaagctcgccttgagcgagatatattaaaaaaagcaactgtagtgaatcgccacaggtttaatagacacctcaga

SEQ ID NO: 604155 - DNA, 75 bp, synthetic construct
  source 1..75: mol_type = other DNA
gccgttaacggagagattcaggcatacgaatttcggcctgatcttccatccatttttccacatccaaataaccac

SEQ ID NO: 604156 - DNA, 75 bp, synthetic construct
  source 1..75: mol_type = other DNA
gtcgctgaagtcgcagcagaagttgaaacggtagctgcggtcgaacctgaggtcaccgttgagcataaccacgct

SEQ ID NO: 604157 - DNA, 75 bp, synthetic construct
  source 1..75: mol_type = other DNA
cgacacccgtagtgaacgtactgaaggcagcgataatcgcgaagaaaaccgtcgtaatcgtcgccaggcacagca

SEQ ID NO: 604158 - DNA, 75 bp, synthetic construct
  source 1..75: mol_type = other DNA
tgggtttctacgttgacggtcaggcacgctgggtcgggaaaccaccggcagaagaagcgaaactgctgcgcggca

SEQ ID NO: 604159 - DNA, 75 bp, synthetic construct
  source 1..75: mol_type = other DNA
caacgtcccgattacgcgtggcacgaaggcacggcattccagctctttaatctgcaagacgggcatgaagccgtc

SEQ ID NO: 604160 - DNA, 75 bp, synthetic construct
  source 1..75: mol_type = other DNA
tggcgatttatgactttaccaatccggatgcctgcaaatggtacgccgacaaactgaaaggtctggtcgcgatgg

SEQ ID NO: 604161 - DNA, 75 bp, synthetic construct
  source 1..75: mol_type = other DNA
tacgcgtggcacgaaggtacggcattccacctctttaatctgcaagacgggcatgaagccgtctgtgaagtgccc

SEQ ID NO: 604162 - DNA, 75 bp, synthetic construct
  source 1..75: mol_type = other DNA
tactgacgcactgaacagagcaaaacaacaggcagatcagcaaggaagccatccaccagtgggagataatgaaca

SEQ ID NO: 604163 - DNA, 75 bp, synthetic construct
  source 1..75: mol_type = other DNA
gtaacagcctttggtaaacaggccgaccatctggcgaagcaccagaaaggcgaccttatcagcgtggcgggtaac

SEQ ID NO: 604164 - DNA, 75 bp, synthetic construct
  source 1..75: mol_type = other DNA
ccagccatagccgtttacatggcagcaaatcttatcgtgtgccgtgggcctacgatgatgagtcctgtgatgtgg

SEQ ID NO: 604165 - DNA, 75 bp, synthetic construct
  source 1..75: mol_type = other DNA
gcttatgaaggagggaagggaaaaaactggagcgatagagaatccagtggtgtagctgcggctgttgcgtatggt

SEQ ID NO: 604166 - DNA, 75 bp, synthetic construct
  source 1..75: mol_type = other DNA
attttcaaacatccggccggaaaattattctgggctttaacggatgaaagcaataaagagcaatcggacgttatt

SEQ ID NO: 604167 - DNA, 75 bp, synthetic construct
  source 1..75: mol_type = other DNA
ctccagcgccgatagtgccggaagaaatgtattggcaggatgcgccagttgaaggcagcagcaaagcggctgcat

SEQ ID NO: 604168 - DNA, 75 bp, synthetic construct
  source 1..75: mol_type = other DNA
tttgagcggcttgatcttggcgttggcgaaacagtttacggtctgggagagcgctttactgccctggtgcgcaat

SEQ ID NO: 604169 - DNA, 75 bp, synthetic construct
  source 1..75: mol_type = other DNA
gcaggttattgcagacagcgtaatcagtgcgcgaacggcgcgaccgggcggcaaaaaaggtcaacagggccagga

SEQ ID NO: 604170 - DNA, 75 bp, synthetic construct
  source 1..75: mol_type = other DNA
cctgtttatgccgccccgccagtaccggtagtacctgctgcattacctgagaacgacgatgaggacgggcatgac

SEQ ID NO: 604171 - DNA, 75 bp, synthetic construct
  source 1..75: mol_type = other DNA
ctggctgattcagcatattccgcaaacaactgagaaatttttaattcgctctgaaactgatggcgtagaagcgaa

SEQ ID NO: 604172 - DNA, 75 bp, synthetic construct
  source 1..75: mol_type = other DNA
gcaacttggtggtacgccttccgtcgataagcaggcgctcaacgccaccattaacgcccagtcactgctgcaaac

SEQ ID NO: 604173 - DNA, 75 bp, synthetic construct
  source 1..75: mol_type = other DNA
aagttttaaagcaggcaccgatccggacgaagccgtgcagcaagtacaaaaccagctacaatcagccatgcgaaa

SEQ ID NO: 604174 - DNA, 75 bp, synthetic construct
  source 1..75: mol_type = other DNA
gcgcaatggtcagacggtagagacctggaaccgggacggcggcacaagtactgaacaggcgtataaaaatatccc

SEQ ID NO: 604175 - DNA, 75 bp, synthetic construct
  source 1..75: mol_type = other DNA
ctgttgcgcggcgaaatgagccagcgtgagttaaaaatgaactcggcgcgggcatcgcgacgattacgcgtggat

SEQ ID NO: 604176 - DNA, 75 bp, synthetic construct
  source 1..75: mol_type = other DNA
ccagaacctgacgccggtgaccgggcagctactgtgcgaagtggcgtcttcgggcaaaacgagacatcgatctgg

SEQ ID NO: 604177 - DNA, 75 bp, synthetic construct
  source 1..75: mol_type = other DNA
tgcaaaacttccgcgccacgctgatacccactatcgccgtgccggtggtgttgatgggaaccttctcggtgcttt

SEQ ID NO: 604178 - DNA, 75 bp, synthetic construct
  source 1..75: mol_type = other DNA
gctggattatctggaagcactggatctggtggatacatccagtgcgccagatattgaatggcctacgcctccggc

SEQ ID NO: 604179 - DNA, 75 bp, synthetic construct
  source 1..75: mol_type = other DNA
gctggattatctggaagcactggaactggtggatacttccagtgcgccagatattgaatggcctacgcctccggc

SEQ ID NO: 604180 - DNA, 75 bp, synthetic construct
  source 1..75: mol_type = other DNA
atgaattacatatattccgcgactacaaactctttctatcccttggagatgaaagaggattacacgcaagctggc

SEQ ID NO: 604181 - DNA, 75 bp, synthetic construct
  source 1..75: mol_type = other DNA
caaatcttatcgtgtgccgtgggcttatgatgatgaatcctgcgatgtcgtgcgccatttcactcagcttaaatg

SEQ ID NO: 604182 - DNA, 75 bp, synthetic construct
  source 1..75: mol_type = other DNA
gctggattatctggaagcactggagctggtggatacctccagtgcgccagatattgaatggcctactcctccggc

SEQ ID NO: 604183 - DNA, 75 bp, synthetic construct
  source 1..75: mol_type = other DNA
gctggattatctggaagcactggacctggtggatacgtccagtgcgccagatattgaatggcctactcctccggc

SEQ ID NO: 604184 - DNA, 75 bp, synthetic construct
  source 1..75: mol_type = other DNA
gggcatcgcgacgattacgcgtggatctaacagcctgaaagccgcgcctgtcgagctgcgccagtggctggaaga

SEQ ID NO: 604185 - DNA, 75 bp, synthetic construct
  source 1..75: mol_type = other DNA
tcgaaccagtggcgcagcctggcgttgcgccgcgccacagaatgccctgtatgtggaggatgcaatgcagatcct

SEQ ID NO: 604186 - DNA, 75 bp, synthetic construct
  source 1..75: mol_type = other DNA
caacacgccgcttatcaccgccagcgcggtcggttttggtggtcagttgatggtactgacgccgccctgggaaca

SEQ ID NO: 604187 - DNA, 75 bp, synthetic construct
  source 1..75: mol_type = other DNA
cggttgttatcgctgtctgtggccggataaccaggagccagaacgcaattgccgcacggcaggcgtagttggtcc

SEQ ID NO: 604188 - DNA, 75 bp, synthetic construct
  source 1..75: mol_type = other DNA
cctgttacacctcactattagcagcagcaaaaaatgccggtgatacagcttcaattccaaccatcgaagcgattt

SEQ ID NO: 604189 - DNA, 75 bp, synthetic construct
  source 1..75: mol_type = other DNA
ggaaaagcaagccgaatctatgcttgaatccatggccagccgtatagataattatcctgaactacgcgctcgtat

SEQ ID NO: 604190 - DNA, 75 bp, synthetic construct
  source 1..75: mol_type = other DNA
tggtgctcgactgtaccgacaatatggcgactcgccaggagattaatgccacctgcgtggcactcaacacgccgc

SEQ ID NO: 604191 - DNA, 75 bp, synthetic construct
  source 1..75: mol_type = other DNA
tatctcttcctgaaggcactttaggacaatgggttaccgccgccagaaaaagggctcggtactcctggttcccgc

SEQ ID NO: 604192 - DNA, 75 bp, synthetic construct
  source 1..75: mol_type = other DNA
caaggacgtgctgattgttgaagatatcatcgactcgggtaatacactgtcgaaagtgcgtgagatcttaagcct

SEQ ID NO: 604193 - DNA, 75 bp, synthetic construct
  source 1..75: mol_type = other DNA
gaatttgtggtgggttacggtattgattacgctcagcgttaccgtcatctgccgtacatcggcaaagtggtgttg

SEQ ID NO: 604194 - DNA, 75 bp, synthetic construct
  source 1..75: mol_type = other DNA
caacacgccgcttatcaccgccagcgcggtcggatttggcggtcagttgatggtactgacgccgccctgggagca

SEQ ID NO: 604195 - DNA, 75 bp, synthetic construct
  source 1..75: mol_type = other DNA
ggttgttgatcgcggttattctgtttccagcgttgcaacacgtctcgatatcaccacccacagcctttatgcctg

SEQ ID NO: 604196 - DNA, 75 bp, synthetic construct
  source 1..75: mol_type = other DNA
gggctcggtactcctggttcccgcacggtggctgaactggaatctgatgacctgcccccacgattagatacaaca

SEQ ID NO: 604197 - DNA, 75 bp, synthetic construct
  source 1..75: mol_type = other DNA
ctactgacaaaggtgaatggttgctgtatcgcgctcacgtgaaaggcgaaagcaccgaggcgcttgtaccgaaca

SEQ ID NO: 604198 - DNA, 75 bp, synthetic construct
  source 1..75: mol_type = other DNA
gtcgtgtatatactgagtacaggagtacagctttagctggttctttatggtcaccaaccgtaattctgggagtgg

SEQ ID NO: 604199 - DNA, 75 bp, synthetic construct
  source 1..75: mol_type = other DNA
aaccatcccgccgttcttcctctaaaacagcgcctaaaaagacagattcaggcaggaaagatggcatcgatatga

SEQ ID NO: 604200 - DNA, 75 bp, synthetic construct
  source 1..75: mol_type = other DNA
aaccatcccgccgttcttcctctaaaacagcaactaaaaagccagattcaggcaggaattatggcatcgatatga

SEQ ID NO: 604201 - DNA, 75 bp, synthetic construct
  source 1..75: mol_type = other DNA
ttgttgaataagcatatctccagatttgatcatgatccagctaatgatgtaatgatttcaaggctaaaaaaaata

SEQ ID NO: 604202 - DNA, 75 bp, synthetic construct
  source 1..75: mol_type = other DNA
gaaaagcgtgacggagcgactgacattgctggagcaacgacctgtactgacggaggaagagcatgcacgcactgg

SEQ ID NO: 604203 - DNA, 75 bp, synthetic construct
  source 1..75: mol_type = other DNA
cgttatacgggagagcaggacaggcgaatgactgcgctggcggtgcagatgaaggcgtattctgatgcgctcgcc

SEQ ID NO: 604204 - DNA, 75 bp, synthetic construct
  source 1..75: mol_type = other DNA
atgcacaaatttactaaagccctggcagccgttatgtcacaatccgctatggcggagaacctgaagctcggtttc

SEQ ID NO: 604205 - DNA, 75 bp, synthetic construct
  source 1..75: mol_type = other DNA
atgcacaaatttactaaagctcttgcagccattggtctggctgccgttatgtcacaatccgctatggcggaaaac

SEQ ID NO: 604206 - DNA, 75 bp, synthetic construct
  source 1..75: mol_type = other DNA
actgcaatgtgttcgtgtactaccagaatgatacagctatcctccagcagggagtgatggctaacggcgatttct

SEQ ID NO: 604207 - DNA, 75 bp, synthetic construct
  source 1..75: mol_type = other DNA
gcaagagattcgccgcgaccagacgcaagggttacagcgaataggcagcgtaagcacgatggttcggggttctcc

SEQ ID NO: 604208 - DNA, 75 bp, synthetic construct
  source 1..75: mol_type = other DNA
cgtggctgggatgtcaaagaaagcgcggtgatggcgattaccgccaacgaactggataccgcccgccgccgtact

SEQ ID NO: 604209 - DNA, 75 bp, synthetic construct
  source 1..75: mol_type = other DNA
ttatcaggtacctaccaaatctaacgacatcccgggggcatttgacgctgccaactcaatgctggttcaacatcc

SEQ ID NO: 604210 - DNA, 75 bp, synthetic construct
  source 1..75: mol_type = other DNA
caaataaagaattgcttcctgaaaaatacgatctgaactactatactcatgaatgtcgcgagtatcagcgttatt

SEQ ID NO: 604211 - DNA, 75 bp, synthetic construct
  source 1..75: mol_type = other DNA
ctggtcttttatctgctgaccgttattgccttctggatcacccataatcagatggcgcaacaggtagccgcatga

SEQ ID NO: 604212 - DNA, 75 bp, synthetic construct
  source 1..75: mol_type = other DNA
tgatacgattgctgattgtcgtcagtctcgcctggacggggtgggccattaccctagtcttttatctgctgaccg

SEQ ID NO: 604213 - DNA, 75 bp, synthetic construct
  source 1..75: mol_type = other DNA
gcccgctctggcaggagttaaggggatctttgctgaagaccattacccgaaaagaaaacgtatttatcagttggg

SEQ ID NO: 604214 - DNA, 75 bp, synthetic construct
  source 1..75: mol_type = other DNA
aaccgttagcctttattcagccgggggaaattttaccctgttgttgccgggcaaaaggcgatattgaaatcgaga

SEQ ID NO: 604215 - DNA, 75 bp, synthetic construct
  source 1..75: mol_type = other DNA
tagtttgttttctttcacattaggctcggcccttatagcctttggtctttcggccacagttgttggttttgttgg

SEQ ID NO: 604216 - DNA, 75 bp, synthetic construct
  source 1..75: mol_type = other DNA
aaacgacagtaaccatactgcccgattgaataatgagcaacggtcagcggtacgcgaacggttgtctgagcgtgg

SEQ ID NO: 604217 - DNA, 75 bp, synthetic construct
  source 1..75: mol_type = other DNA
tcgccgccatcatgctgcttcccgatgaaatactgaccgaagatgcagaacgtctatttgctgaatttaaacact

SEQ ID NO: 604218 - DNA, 75 bp, synthetic construct
  source 1..75: mol_type = other DNA
aacagttcaatcctgatggttactcatatattagtggcttaagagagtcaggaaggaaagtgatttatttgaata

SEQ ID NO: 604219 - DNA, 75 bp, synthetic construct
  source 1..75: mol_type = other DNA
tcagataattgcattagggacagatagtaatggatatacatacgtcagagaacttccgagtaatgagtttggtta

SEQ ID NO: 604220 - DNA, 75 bp, synthetic construct
  source 1..75: mol_type = other DNA
accctggtcctttatctgctgaccgttattgtcttctggatcacccgtaaccagatggcgcaacaggtagcagca

SEQ ID NO: 604221 - DNA, 75 bp, synthetic construct
  source 1..75: mol_type = other DNA
atgaaaaagaaattaatcagcgggctgtttctgatgttatggatggggctgttaatcgccgcaatggtgtatccg

SEQ ID NO: 604222 - DNA, 75 bp, synthetic construct
  source 1..75: mol_type = other DNA
accctggtcttttatctgctgaccgttattgccttctggatgacccgtaatcagattgtgcaacaggtatcagca

SEQ ID NO: 604223 - DNA, 75 bp, synthetic construct
  source 1..75: mol_type = other DNA
gcccgtccacaatcattccggtaagtgagcgcattcgccgttattctgccgcggaagatattggaaaagattttg

SEQ ID NO: 604224 - DNA, 75 bp, synthetic construct
  source 1..75: mol_type = other DNA
cggtggcagacggtgcattcacagcagacgtggaagatgttctgaacgacgagtccgtcacagaggatgaaacgg

SEQ ID NO: 604225 - DNA, 75 bp, synthetic construct
  source 1..75: mol_type = other DNA
agtgacggacgagatcatgagccgcgtcacccgcgcggaaaacggcgcaaggatgctggagtccgtcattgacgg

SEQ ID NO: 604226 - DNA, 75 bp, synthetic construct
  source 1..75: mol_type = other DNA
atgaaatgcaaatcggtatcaaaaaaatcgccgcgctatacatcgccaccgaaacaaatctcggcgctgaccacc

SEQ ID NO: 604227 - DNA, 75 bp, synthetic construct
  source 1..75: mol_type = other DNA
cgccgtaaaaacaacccggtggtggtgggcgaagcgggcgtgggcaaaagcgcactgattgaagggctggcgctg

SEQ ID NO: 604228 - DNA, 75 bp, synthetic construct
  source 1..75: mol_type = other DNA
cacgcgccgacctgcgccgtccgggacgcccgctgggcgcgttcctgctggctggccccagcggcgtgggtaaaa

SEQ ID NO: 604229 - DNA, 75 bp, synthetic construct
  source 1..75: mol_type = other DNA
tgacggacgaaatcatgagccgcgtcacccgcgcggaaaacggcgcgaggatgctcgaatcggtcattgacggcg

SEQ ID NO: 604230 - DNA, 75 bp, synthetic construct
  source 1..75: mol_type = other DNA
atcaaccagtggcaaaagtgccgtggctggtgggcgaaaatcgagttgttccgaccggatataaccgatgatctg

SEQ ID NO: 604231 - DNA, 75 bp, synthetic construct
  source 1..75: mol_type = other DNA
tcccggtaatcgtactggcggtgctgatcgacgcactgttcgatctggttatcgcactgctgaaggtgaaaagta

SEQ ID NO: 604232 - DNA, 75 bp, synthetic construct
  source 1..75: mol_type = other DNA
ctgcatgttcagttaccgctggcgttaccggtatttctgcgcagcctgcgggtggtgatggtgcaaaccgtcggc

SEQ ID NO: 604233 - DNA, 75 bp, synthetic construct
  source 1..75: mol_type = other DNA
gctgacggtggataccggcgcagacaatgccgccggaaagctgacctttaacattgacgggctggcaagggcgat

SEQ ID NO: 604234 - DNA, 75 bp, synthetic construct
  source 1..75: mol_type = other DNA
agaaaaaagcgcgcttctatgtgattaacgcggcgaaaatcgcccgcgaatgtggcctggcggcccgtattaata

SEQ ID NO: 604235 - DNA, 75 bp, synthetic construct
  source 1..75: mol_type = other DNA
caagagactcaccttagccagaattttacaggctgccataggtgagggactggatacaaattgcgtagtccttcc

SEQ ID NO: 604236 - DNA, 75 bp, synthetic construct
  source 1..75: mol_type = other DNA
tcccctccgggctatgtcggctatggcgaaggcggcgtactgaccgaagcgattcgccagaaaccctactcggtg

SEQ ID NO: 604237 - DNA, 75 bp, synthetic construct
  source 1..75: mol_type = other DNA
gacgttcagtaatgacagttttagtgattccgacactctggctgtcattcaggcgccaggagcaaaaggcgctcg

SEQ ID NO: 604238 - DNA, 75 bp, synthetic construct
  source 1..75: mol_type = other DNA
gtgtctggaaatataggggcaaatccatacagtatcagtgctcaacgttcgttgaatgaagatggtcaaaccgac

SEQ ID NO: 604239 - DNA, 75 bp, synthetic construct
  source 1..75: mol_type = other DNA
cccgtaagttgtcttgcgcattatcaacaaagttcagaagcagaaaaaatagcgcaatctattattctgaatgga

SEQ ID NO: 604240 - DNA, 75 bp, synthetic construct
  source 1..75: mol_type = other DNA
cttttgatcttaaaaaagaagcccgcgattacgtcgccatcttactggagatgtatctcctgtgccccacgcttc

SEQ ID NO: 604241 - DNA, 75 bp, synthetic construct
  source 1..75: mol_type = other DNA
ccacgaaagttccccagactgaagccggtattacccgactgttatcaaatgttgaaaaatcactggatcaggccg

SEQ ID NO: 604242 - DNA, 75 bp, synthetic construct
  source 1..75: mol_type = other DNA
caggcggcggcgctggatgccaaaaactgcaacgtatttgtgtactaccagaacgatacggccattctgcagcag

SEQ ID NO: 604243 - DNA, 75 bp, synthetic construct
  source 1..75: mol_type = other DNA
cctgcttattcgaccttacctaacctctaagcctttaagagtaattgagtggagcggtgctggtgaacaaaacgc

SEQ ID NO: 604244 - DNA, 75 bp, synthetic construct
  source 1..75: mol_type = other DNA
ctgcaactggcggaactcctctacggcggtcgccagtacctgactaccatcaatatgtccgagtttcaggagaag

SEQ ID NO: 604245 - DNA, 75 bp, synthetic construct
  source 1..75: mol_type = other DNA
gtcggcgacagacggtgcatttacggcagatgtggaagatgttcgggacgatgagtccgtcacagaggatgacgc

SEQ ID NO: 604246 - DNA, 75 bp, synthetic construct
  source 1..75: mol_type = other DNA
gttaaccaataaatacgccgaaggttattaccagcatcgctattacggcggctgtaagtttattgatgaggttga

SEQ ID NO: 604247 - DNA, 75 bp, synthetic construct
  source 1..75: mol_type = other DNA
cattgattaaccaggagcaacagcgccagcagcagtcgctggaactgattgcctcggagaatttcgtaagccccg

SEQ ID NO: 604248 - DNA, 75 bp, synthetic construct
  source 1..75: mol_type = other DNA
gtcaggccggaggattccaggggccgaacggcagtgtaactaacgtagaaaacgcaaaatccctgcgtgatgata

SEQ ID NO: 604249 - DNA, 75 bp, synthetic construct
  source 1..75: mol_type = other DNA
ccccactcttccggccttttatcagccatcgctctggaaccgcccggtattaaaagcaaacgcccaatcactgcc

SEQ ID NO: 604250 - DNA, 75 bp, synthetic construct
  source 1..75: mol_type = other DNA
aacagcagataaatgggatatctatgatgaatgggacatctatgaatccattgcggattattttgatgtggtggg

SEQ ID NO: 604251 - DNA, 75 bp, synthetic construct
  source 1..75: mol_type = other DNA
aagcgactgttggtcattattggcccctgctcgatccacgatctcaccgctgcgatggagtacgccacccgtctg

SEQ ID NO: 604252 - DNA, 75 bp, synthetic construct
  source 1..75: mol_type = other DNA
agcaccgcagacgatgatcttttcaccctgccggaaggcgatatctctgttggcattcctcacgttctggaaata

SEQ ID NO: 604253 - DNA, 75 bp, synthetic construct
  source 1..75: mol_type = other DNA
ctggatcggctggatgatcaaacctctgggccgctggtcgttaatcatggaaatcgatgaaggttttgcggtagg

SEQ ID NO: 604254 - DNA, 75 bp, synthetic construct
  source 1..75: mol_type = other DNA
ggggagattattctgcgctaatcagcgaatttaaaaccttctggcactcctatcaacgggaatggcagctttaca

SEQ ID NO: 604255 - DNA, 75 bp, synthetic construct
  source 1..75: mol_type = other DNA
atgatgccgcattgaaaccgcgcgagcacgccatcccggaagcgaccacagggcaaaacgcctttctcaaagcct

SEQ ID NO: 604256 - DNA, 75 bp, synthetic construct
  source 1..75: mol_type = other DNA
cgcccggcttttatggaggcacggcaccgcccggtgtcgcggaatatgtgaacaacggaggaaaacatcatgcag

SEQ ID NO: 604257 - DNA, 75 bp, synthetic construct
  source 1..75: mol_type = other DNA
gaaactgttaccatcgcgtctaaagctggcgacgaaggtaaactgttcggttccgtcggtactcgcgacatcgct

SEQ ID NO: 604258 - DNA, 75 bp, synthetic construct
  source 1..75: mol_type = other DNA
atgccaacaaacctacgccgcctgcttgcgcaggctgccgacgctgacccgctcaatactgcggacgcagatgta

SEQ ID NO: 604259 - DNA, 75 bp, synthetic construct
  source 1..75: mol_type = other DNA
atgccaacgaatctacgccgcctgcttgagcaggctgctgacgccgagctgctcaatactgcaaacgcagatgtg

SEQ ID NO: 604260 - DNA, 75 bp, synthetic construct
  source 1..75: mol_type = other DNA
tggccttgtgggggttcagttatgtggacgtcgagtcgtgtgcgggctgtgccgtgcctccatcttagccgggct

SEQ ID NO: 604261 - DNA, 75 bp, synthetic construct
  source 1..75: mol_type = other DNA
atgaaaacctatatttatcaggacgaaaaatcacataaattctgggcagtagagcagcaggaaaatgaactgcat

SEQ ID NO: 604262 - DNA, 75 bp, synthetic construct
  source 1..75: mol_type = other DNA
tgaaaaaaatcaaatcagcatagatccttctgatttggatttaaacgttgaattatcagcgacagaacaggaaat

SEQ ID NO: 604263 - DNA, 75 bp, synthetic construct
  source 1..75: mol_type = other DNA
aatgacttaagtgatacctttactatcgtccatgctaaaggtgcgcagggtgctgctattaataatgcctccgga

SEQ ID NO: 604264 - DNA, 75 bp, synthetic construct
  source 1..75: mol_type = other DNA
cgaagtgaaaaaactgcgtctgatcaccaacgatcccgaacatgcgctgctggcaaatcagtttattgatggcga

SEQ ID NO: 604265 - DNA, 75 bp, synthetic construct
  source 1..75: mol_type = other DNA
cctgattatctgtcacggttcgccgcaattgaaatgcgcctgcgtaagcatctgtcaccagcaaatgacgaggta

SEQ ID NO: 604266 - DNA, 75 bp, synthetic construct
  source 1..75: mol_type = other DNA
aagattattcagcgctgattgatgcttttaagtcctataactccccttatcagggcgaatggaatctttcttcac

SEQ ID NO: 604267 - DNA, 75 bp, synthetic construct
  source 1..75: mol_type = other DNA
aaaaatcacataaattctgggcggtggagcagcagagaaacgagctgcatatcaactggggcaaagtcggcacta

SEQ ID NO: 604268 - DNA, 75 bp, synthetic construct
  source 1..75: mol_type = other DNA
tggttacatcgtaatctggtcaatttcgaacattgaccgtggcgtggcatatctcattgtaatgttctttccttt

SEQ ID NO: 604269 - DNA, 75 bp, synthetic construct
  source 1..75: mol_type = other DNA
tctcggtctggatgataacggttcgttgctgctggatttcggcccacgccagttcaccgtcagctttgatgaaac

SEQ ID NO: 604270 - DNA, 75 bp, synthetic construct
  source 1..75: mol_type = other DNA
gcggaactgaagttgattgcggagaaaacaaaaaagggctacgcagaagaagtatccgtgataacaccgacatct

SEQ ID NO: 604271 - DNA, 75 bp, synthetic construct
  source 1..75: mol_type = other DNA
tgaaacgcagattaaaaattgcagaaattgttgccgcccagggtgaaatcaaagttgatgacttatctgcgcaac

SEQ ID NO: 604272 - DNA, 75 bp, synthetic construct
  source 1..75: mol_type = other DNA
tgtcgggcgtttcgccaggacagagacgccctgcttgaagcgcggaacaaatacttaaacagtacgagagaagag

SEQ ID NO: 604273 - DNA, 75 bp, synthetic construct
  source 1..75: mol_type = other DNA
gtcagggtgttgttgggttaaacgaagggaagcaggagataagaaaaaacctgaatttattaacctattcaaaaa

SEQ ID NO: 604274 - DNA, 75 bp, synthetic construct
  source 1..75: mol_type = other DNA
ataccgccgtcaccatggctgacgaggtcattctttgtcatatggggattacggcggtaattacgtccggtcagc

SEQ ID NO: 604275 - DNA, 75 bp, synthetic construct
  source 1..75: mol_type = other DNA
gtggtgctggcgaccaacaacaacccgatgatattcaccgaacgggccggaggcgtggcacgtcgtcgggttatt

SEQ ID NO: 604276 - DNA, 75 bp, synthetic construct
  source 1..75: mol_type = other DNA
tttcggttcgataatattgtaagggagaccgaaaaggataaagagttaccgcaaaagatagcggcggaaatacct

SEQ ID NO: 604277 - DNA, 75 bp, synthetic construct
  source 1..75: mol_type = other DNA
gacatcgcttgatgatgctggcgggcgtgcgcaggttgtcggaagtcgtcttattgtcctggcagaccagccgaa

SEQ ID NO: 604278 - DNA, 75 bp, synthetic construct
  source 1..75: mol_type = other DNA
tgccgctggcgctggattcacgcccgccgtcagaagcactggaagaaacgttacttcacgagcagcgtttccgtc

SEQ ID NO: 604279 - DNA, 75 bp, synthetic construct
  source 1..75: mol_type = other DNA
gaagctggcggcggcagatattcaggacgcaaatttttaccccgaaggaatgcacgtccagaagtgtgaaaactg

SEQ ID NO: 604280 - DNA, 75 bp, synthetic construct
  source 1..75: mol_type = other DNA
cgcgcaggttgtcgggagtcgtcttatcgtccttgccgatcagctgaaatatacgggggaaggcacgggcatcaa

SEQ ID NO: 604281 - DNA, 75 bp, synthetic construct
  source 1..75: mol_type = other DNA
cgtctaccaaccctgactgccgatcagaaaaaacagtttggtccttttgtctctgattacgcgattctgtatggt

SEQ ID NO: 604282 - DNA, 75 bp, synthetic construct
  source 1..75: mol_type = other DNA
gcaggtcaggtagactggattgctgaaccgttagcctttattcagccaggggaaattttgccctgttgttgcagg

SEQ ID NO: 604283 - DNA, 75 bp, synthetic construct
  source 1..75: mol_type = other DNA
atggcccgcgttaccctgcgcatcactggcacacaactgctgtgccaggatgaacacccttctcttctggcagcg

SEQ ID NO: 604284 - DNA, 75 bp, synthetic construct
  source 1..75: mol_type = other DNA
cacgaccagaaacagcctttaccgcgtctatctggcgtttatggcatacgcaggcagaagcaagccgctaaacgt

SEQ ID NO: 604285 - DNA, 75 bp, synthetic construct
  source 1..75: mol_type = other DNA
aaatctgtcgtcaaatttgcgctggtaactgttctgagaaagtcgaacatcataaatctggaatggcaacaaatc

SEQ ID NO: 604286 - DNA, 75 bp, synthetic construct
  source 1..75: mol_type = other DNA
ctgcggtcaggaagatgcgcatcgacagcaagacagcatggctatcagcttgtcgtcgtgcaggaattgaagatt

SEQ ID NO: 604287 - DNA, 75 bp, synthetic construct
  source 1..75: mol_type = other DNA
aacaggctgatgcatgggccggaaacggcttgaaaaacgtttggggagacacaccacgcgtggttgaaatgcagt

SEQ ID NO: 604288 - DNA, 75 bp, synthetic construct
  source 1..75: mol_type = other DNA
aaggcggcagaaatgcgtgaaggagaagcacctcttcctccggagggggtgttcggttatcttgaaggcttcgca

SEQ ID NO: 604289 - DNA, 75 bp, synthetic construct
  source 1..75: mol_type = other DNA
atgaccacttttaccaacgacgacaaggaactaattaaagaaatccgagagcgaatcagcagcctggacgtccga

SEQ ID NO: 604290 - DNA, 75 bp, synthetic construct
  source 1..75: mol_type = other DNA
tggagcagaatgcactatcgggcaactctccggtaactccggatggttggataagctgtagtgagcgaatgccgg

SEQ ID NO: 604291 - DNA, 75 bp, synthetic construct
  source 1..75: mol_type = other DNA
atgccgccgtcgccatggctgacgaggtcattctttgtcatatggggattacggcggtaattacgtccggtcagc

SEQ ID NO: 604292 - DNA, 75 bp, synthetic construct
  source 1..75: mol_type = other DNA
gtttttttctcgatacaaaagataattgtccgctaaaggtccgtatcaaaatatctaatgggctagcaagattaa

SEQ ID NO: 604293 - DNA, 75 bp, synthetic construct
  source 1..75: mol_type = other DNA
acgatatggttaaggatctttcacaccttgataaagatgcgattctgttaaggctgcaaacccttgtatgggaaa

SEQ ID NO: 604294 - DNA, 75 bp, synthetic construct
  source 1..75: mol_type = other DNA
cgacgaattactatgcaccaatatatgaaaaaagtattctttggtctgataataaaattaatattgcttggcctc

SEQ ID NO: 604295 - DNA, 75 bp, synthetic construct
  source 1..75: mol_type = other DNA
cgtgcgcaggttgtcgggagtcgtcttatcgtcctggcagaccagccgaaatatacaggcgaaggcacgggcatc

SEQ ID NO: 604296 - DNA, 75 bp, synthetic construct
  source 1..75: mol_type = other DNA
gtgagtgttgaactgactgataaaggaggtcgatgtgcagcactgggcatgtcaaatggtacgtggtttaccctc

SEQ ID NO: 604297 - DNA, 75 bp, synthetic construct
  source 1..75: mol_type = other DNA
gagtctgcggaaattactggaaaccaaccgccttgtggcggagctggctgagttgttgtcggtcccttctgaatg

SEQ ID NO: 604298 - DNA, 75 bp, synthetic construct
  source 1..75: mol_type = other DNA
ttgagccggaaaacgttacgcgcgataccgccacctttaacctgccgtttatttcgctggggcaagtcggtgagg

SEQ ID NO: 604299 - DNA, 75 bp, synthetic construct
  source 1..75: mol_type = other DNA
ctggcgtacattacggaagcgccttctcttgttgagccggaaaacgttacgcgcgataccgccacctttaacctg

SEQ ID NO: 604300 - DNA, 75 bp, synthetic construct
  source 1..75: mol_type = other DNA
tggtggccatgtcgctctggcatcaccatgagctgaacggcgcgtcatcctcactgcgtgaagagacggacaggc

SEQ ID NO: 604301 - DNA, 75 bp, synthetic construct
  source 1..75: mol_type = other DNA
gtatgtctgcacctgtggatgaaccgcccgggaaacaggagaaaaaccaggctgaaccggtaacggtaaaaaagc

SEQ ID NO: 604302 - DNA, 75 bp, synthetic construct
  source 1..75: mol_type = other DNA
gaagtacagagttattatgccttagggacctcgttgcgaagggagttagcctaaatggtctgctaccaattttag

SEQ ID NO: 604303 - DNA, 75 bp, synthetic construct
  source 1..75: mol_type = other DNA
gaagaaagattgacagcttcggtgactggtcaccacaaactgagcatccggctatcactattcagcgcaaagaac

SEQ ID NO: 604304 - DNA, 75 bp, synthetic construct
  source 1..75: mol_type = other DNA
actatgaaacgcagaaaaaggttgctatgcaggctgatattgagcagcttacgaagatttctcagaaatactcaa

SEQ ID NO: 604305 - DNA, 75 bp, synthetic construct
  source 1..75: mol_type = other DNA
cagaagaagattgctatgcaagccgatattgagcagttaatgaagatttctcagaaatatgcaaaggctatttga

SEQ ID NO: 604306 - DNA, 75 bp, synthetic construct
  source 1..75: mol_type = other DNA
aacagcttctgagcgccttagagagcttacagacaagctacgagcaacagcagcaggcgtggcaggacagctaca

SEQ ID NO: 604307 - DNA, 75 bp, synthetic construct
  source 1..75: mol_type = other DNA
gcgcggaactgcaatcaagctcgcagagcatcagcaacgctatccgcgagcagaacggcagactgacgggcatgc

SEQ ID NO: 604308 - DNA, 75 bp, synthetic construct
  source 1..75: mol_type = other DNA
cgcgccgaccgcccccgcgtcaacgcttggcagaccctgaccaacgaccggctggggctgcgcgacccgaacgac

SEQ ID NO: 604309 - DNA, 75 bp, synthetic construct
  source 1..75: mol_type = other DNA
tgcaagtcaccggcttggcgcagcaagtcgagagcttaaacagaacagtgcgccgcttgagcaattagccaagcg

SEQ ID NO: 604310 - DNA, 75 bp, synthetic construct
  source 1..75: mol_type = other DNA
gcaacaaacagactgagttattcacgccgttgtactgcggcgacggcttgcgtggtatggggtgtaaagggagaa

SEQ ID NO: 604311 - DNA, 75 bp, synthetic construct
  source 1..75: mol_type = other DNA
gcgcgggctcaggcagtggtccggtagattacctgctgggaaaagaccggcagcgcgaacaggccagcgtgctgc

SEQ ID NO: 604312 - DNA, 75 bp, synthetic construct
  source 1..75: mol_type = other DNA
atttcctttgtgtctcctgagcctcaagaaatgccagatatctgcaagggtgaagcactatttaatcttgagcgt

SEQ ID NO: 604313 - DNA, 75 bp, synthetic construct
  source 1..75: mol_type = other DNA
cattcgccagaactcatcgtcgatctcataaccgtctgggttttgccattcagcttgcacttgtccgtgatctcg

SEQ ID NO: 604314 - DNA, 75 bp, synthetic construct
  source 1..75: mol_type = other DNA
gaatgtggcctggcggcccgtattaatactgtcatgcagatggcatttttccatttgacacaaattctgcctggc

SEQ ID NO: 604315 - DNA, 75 bp, synthetic construct
  source 1..75: mol_type = other DNA
tccagaggtaacagcgaagatctggaacgcctgtatcgacaatggcgcggtaaggcacctaagattatgccgatg

SEQ ID NO: 604316 - DNA, 75 bp, synthetic construct
  source 1..75: mol_type = other DNA
tctaccatcctgacgttcgtgtgtgggaaatttttgatcataatggcgtgggactggcgttattttacggtgatt

SEQ ID NO: 604317 - DNA, 75 bp, synthetic construct
  source 1..75: mol_type = other DNA
gcaggaacgcctgaaaacattaatctggctggcggcgcaggatgtgaagagtgagctggctgggcgtgagactta

SEQ ID NO: 604318 - DNA, 75 bp, synthetic construct
  source 1..75: mol_type = other DNA
tggaatgaatttaaaacccggtacggcaccagaaaaattgcaggaaaaacgcaggagcgcgtgaagaagttgatc

SEQ ID NO: 604319 - DNA, 75 bp, synthetic construct
  source 1..75: mol_type = other DNA
ctgatcgaccagaacaacaaggagcaccggattggctacaaggaaaaaaacggtgtttgggagcagtaccaggaa

SEQ ID NO: 604320 - DNA, 75 bp, synthetic construct
  source 1..75: mol_type = other DNA
cagaagaagattgctatgcaggctgatattgagcagcttactaagatttctcagaagtatagcaaggcactttaa

SEQ ID NO: 604321 - DNA, 75 bp, synthetic construct
  source 1..75: mol_type = other DNA
aaagcaaaagcttaaaaaagaacttgatagcatgaaagcgattattagtgaatatgaatcacagaagaagattgc

SEQ ID NO: 604322 - DNA, 75 bp, synthetic construct
  source 1..75: mol_type = other DNA
cagctcttcggtattaagtttgtcgaacgttttgatattcctgtctaccatcctgacgttcgggtgtgggaaatt

SEQ ID NO: 604323 - DNA, 75 bp, synthetic construct
  source 1..75: mol_type = other DNA
gcgctccctcaaccgatcactggctggctgccgggtcgggcgttagcggcgtgccgtttgagcttatcttttccc

SEQ ID NO: 604324 - DNA, 75 bp, synthetic construct
  source 1..75: mol_type = other DNA
atgcagtttggtatctgggtacagtgcttcaaggtgacgccataccgtttcggcgatgatgtctttgtcgatatt

SEQ ID NO: 604325 - DNA, 75 bp, synthetic construct
  source 1..75: mol_type = other DNA
ggtatgaacgacagcaccgtgctgggcggcgtacgcgcgacggaaggtcagggctttaaagcgagcgatatcatc

SEQ ID NO: 604326 - DNA, 75 bp, synthetic construct
  source 1..75: mol_type = other DNA
cgacgccgggcagttaacccgcctgaccctgccgggcgaccaggtatggctgtgggactacgacgataagggcag

SEQ ID NO: 604327 - DNA, 75 bp, synthetic construct
  source 1..75: mol_type = other DNA
ctctttaactaacaggagagatgccgaaagagcactagaagttctcttcaaaggtgaaattccctttgatgcaat

SEQ ID NO: 604328 - DNA, 75 bp, synthetic construct
  source 1..75: mol_type = other DNA
tgttcaaaaaattatcgacagtggtatatcatttattgatcacaagaatgttatgcaagcggttcgtcgtagcgg

SEQ ID NO: 604329 - DNA, 75 bp, synthetic construct
  source 1..75: mol_type = other DNA
ccgctgggttccaggctggatgtgtgcaccacgcccacagacggatgccactgaacgcaccgataacctggctga

SEQ ID NO: 604330 - DNA, 75 bp, synthetic construct
  source 1..75: mol_type = other DNA
tctttaaactccgctataagtcaactcagcaaaacgtacatgcggggcaggcgaatgcactgttgtactttgata

SEQ ID NO: 604331 - DNA, 75 bp, synthetic construct
  source 1..75: mol_type = other DNA
gacccttacggtaagatctcacataaaacgctggatattattaccacaacattaacaccgctgatgcttcaacgg

SEQ ID NO: 604332 - DNA, 75 bp, synthetic construct
  source 1..75: mol_type = other DNA
gtatgatctatgattacggttcgctggcgctgggaggctttgggctggcaagaggcggctttctggggctaaaag

SEQ ID NO: 604333 - DNA, 75 bp, synthetic construct
  source 1..75: mol_type = other DNA
actggaattcagtaaatcggttttcgcgggtggtaagcctgttctccggcacttcgacaagttctggatgaatgc

SEQ ID NO: 604334 - DNA, 75 bp, synthetic construct
  source 1..75: mol_type = other DNA
gcatgatgtatgactacggctcgctggcgctgggaggatatggtctggccagaggcgggttcgtgggtcttagag

SEQ ID NO: 604335 - DNA, 75 bp, synthetic construct
  source 1..75: mol_type = other DNA
ggaactgatgcgccagaacagcgagaaactgcctgagattttcaccgatggcgaaggcaaaaccacccgctacga

SEQ ID NO: 604336 - DNA, 75 bp, synthetic construct
  source 1..75: mol_type = other DNA
agcacggacaatggaaagtcatcagcaccaaaccggatgtctgtaaaacaccacgcggagattccacaccgcctg

SEQ ID NO: 604337 - DNA, 75 bp, synthetic construct
  source 1..75: mol_type = other DNA
cgatctgctcatggcactggtgcgtcctgacggcgagcggctgacgtgtcgctacgataaacttacccgcctgac

SEQ ID NO: 604338 - DNA, 75 bp, synthetic construct
  source 1..75: mol_type = other DNA
aaaaaacagtttgattatcaggagccagtacagaatacgccagggcaacaatctactactggcagtaacttttct

SEQ ID NO: 604339 - DNA, 75 bp, synthetic construct
  source 1..75: mol_type = other DNA
caacccgctatcgcaatcccggaggacgctagtgcatctttattaccttcacatacctacaagatcagagcggca

SEQ ID NO: 604340 - DNA, 75 bp, synthetic construct
  source 1..75: mol_type = other DNA
gcggactgcattatcagttagaaccttatgcgcaagggaaattggtgcgctgcgttgttggtgaggtttatgatg

SEQ ID NO: 604341 - DNA, 75 bp, synthetic construct
  source 1..75: mol_type = other DNA
caaaatttcacgaatgctttattaaccggatgcgtgaatgtcattcttcagatgataaagacgtcattgcaattg

SEQ ID NO: 604342 - DNA, 75 bp, synthetic construct
  source 1..75: mol_type = other DNA
caaaaacgatgatggcggcgtttatcatcgccatcaaaggcaccattaaacaagcggtgatgctcggactgacag

SEQ ID NO: 604343 - DNA, 75 bp, synthetic construct
  source 1..75: mol_type = other DNA
aaagctgtttgccgaagacgtcagcccgcagtcgctgctgcgccacatgcagaaggtctacgtagtgacctcgca

SEQ ID NO: 604344 - DNA, 75 bp, synthetic construct
  source 1..75: mol_type = other DNA
ttggggcctgacgcacgatgagcattctattgcccggcgttcacgctcgcttagccttgatgatttagtctggca

SEQ ID NO: 604345 - DNA, 75 bp, synthetic construct
  source 1..75: mol_type = other DNA
atgtggtacgcctacgtcgtttggggaattatttaagcgaacacgatatttcctccgacctgctgcaggatggtt

SEQ ID NO: 604346 - DNA, 75 bp, synthetic construct
  source 1..75: mol_type = other DNA
gtggctgcccaccaccagcaccaacaattaccgcatcgcgttacggaagtatcaacactatcagcgtcaaacgtg

SEQ ID NO: 604347 - DNA, 75 bp, synthetic construct
  source 1..75: mol_type = other DNA
ccgatcgtaaccgcagcggcgcttcaaattctctgacactggaatcctccctgcgcacgtttacctttgaaaatg

SEQ ID NO: 604348 - DNA, 75 bp, synthetic construct
  source 1..75: mol_type = other DNA
ccagccggcccgagatcatggggtgggtgctgggcatcgtttaccgcgtcattgccacgcacctggtcaagaaag

SEQ ID NO: 604349 - DNA, 75 bp, synthetic construct
  source 1..75: mol_type = other DNA
catcaacaccctcacaaccagcatgttcactctgaacgatatcgttagttctccttcacttaagagcattacagg

SEQ ID NO: 604350 - DNA, 75 bp, synthetic construct
  source 1..75: mol_type = other DNA
gctggtttgaggaacaaaaatcatgggcggcattatgccgtttctgcggcgatttacattgcaaaacccagagtg

SEQ ID NO: 604351 - DNA, 75 bp, synthetic construct
  source 1..75: mol_type = other DNA
gcaatgcttccttcgatgctaggcgaggaaataccacgggatttcaaaaacataccatctcatgttctaaaaaaa

SEQ ID NO: 604352 - DNA, 75 bp, synthetic construct
  source 1..75: mol_type = other DNA
cagaacgcgccacggccagcgccgtcagtccggcttataccgcagacgctgaccattccggtaacgcctcccccc

SEQ ID NO: 604353 - DNA, 75 bp, synthetic construct
  source 1..75: mol_type = other DNA
gccacggccagcgccgtcagtccggcttataccgcagacgctgaccataccggtaacgcctccccccttccctga

SEQ ID NO: 604354 - DNA, 75 bp, synthetic construct
  source 1..75: mol_type = other DNA
aactgtcaattttacactcagtagttttacgattaacaatacagtcacatcgtgcagactgttgacgccggcatc

SEQ ID NO: 604355 - DNA, 75 bp, synthetic construct
  source 1..75: mol_type = other DNA
agtggcagttatcgacaggaacggaaacgtcaccctcagtccggttgtatgtaaagtatgtgaatactggtgagg

SEQ ID NO: 604356 - DNA, 75 bp, synthetic construct
  source 1..75: mol_type = other DNA
atgaaaaaattcgcagcagtaatcgcagtaatggccctgtgcagtgcaccggttatggcagcagagcagggcggt

SEQ ID NO: 604357 - DNA, 75 bp, synthetic construct
  source 1..75: mol_type = other DNA
caggtcctgtgggggcgacggtgggtcaaatcggcaaacttaaaggttgcagggtggtgggggtggccggtggcg

SEQ ID NO: 604358 - DNA, 75 bp, synthetic construct
  source 1..75: mol_type = other DNA
agcggctataatgcgacggaattgccatctggtccggatcgtttaccgttgctgatggccacggtgctgaaaaaa

SEQ ID NO: 604359 - DNA, 75 bp, synthetic construct
  source 1..75: mol_type = other DNA
cgtattcgcttgcaagggtttattatcgctcaggattatggtcaccgcatccatgagtttcagaaggagatgggg

SEQ ID NO: 604360 - DNA, 75 bp, synthetic construct
  source 1..75: mol_type = other DNA
gggtgatgataaaagtttcaacggcggcgtaagccgccataaaaatccaggcaaaaagcttattttcagctttaa

SEQ ID NO: 604361 - DNA, 75 bp, synthetic construct
  source 1..75: mol_type = other DNA
cgatcatccgcaaaatccatcgtggtcgctgggtgtgctggggatgccaggctttaccgcttatatgggcctgct

SEQ ID NO: 604362 - DNA, 75 bp, synthetic construct
  source 1..75: mol_type = other DNA
tatgagcgatgagccatcttattcaccgccggttgatattggcggcgtgatggtcggcggtacggtgagccgtgt

SEQ ID NO: 604363 - DNA, 75 bp, synthetic construct
  source 1..75: mol_type = other DNA
gcagagtatttatgggctgacggaggaggtgggactccttatatggatgggggacacgaattattccaggggtac

SEQ ID NO: 604364 - DNA, 75 bp, synthetic construct
  source 1..75: mol_type = other DNA
gctgtcggggtttgaagcgttattacatggcaagcacgtacattgttacggcctgcccttctatgccggttgggg

SEQ ID NO: 604365 - DNA, 75 bp, synthetic construct
  source 1..75: mol_type = other DNA
aagaaaacaggttatttcgctgatctgcgcgccacgcaacgagtacgtttgattgccgagaatgtcagcccgcag

SEQ ID NO: 604366 - DNA, 75 bp, synthetic construct
  source 1..75: mol_type = other DNA
attacccgaaaaaaagcggggcgagtaatacgttattaccgcaaattaattatgttctgcaaggtcagatttggc

SEQ ID NO: 604367 - DNA, 75 bp, synthetic construct
  source 1..75: mol_type = other DNA
gaattcaagggaaggaacgtttaatctttggatttcctacaatcggtgatgatttcgtcgatgagatggaatgtg

SEQ ID NO: 604368 - DNA, 75 bp, synthetic construct
  source 1..75: mol_type = other DNA
caagggctacagcgaattggaacggtaagcacaatggtccgtggctcaccggatgacgcattagcagaaatcaga

SEQ ID NO: 604369 - DNA, 75 bp, synthetic construct
  source 1..75: mol_type = other DNA
ttatttaccggtttacccgtttattattggtattgatgttaagtgcctgtagcgcactgcaaggtacgccacagc

SEQ ID NO: 604370 - DNA, 75 bp, synthetic construct
  source 1..75: mol_type = other DNA
attagaaaaaacaatatttacagagttattaacatttaccgtaagttaatcatgttctgcagagtcagactgggt

SEQ ID NO: 604371 - DNA, 75 bp, synthetic construct
  source 1..75: mol_type = other DNA
caccgtccaacagaagcgatatactcacactgacggggtcatcgactgcaaccggagtcgggctgagaatataca

SEQ ID NO: 604372 - DNA, 75 bp, synthetic construct
  source 1..75: mol_type = other DNA
ttctgccggacaactaccatcatccggtgatgaagttgtcgccgggacaacatcactgaaattacagtgtgatgc

SEQ ID NO: 604373 - DNA, 75 bp, synthetic construct
  source 1..75: mol_type = other DNA
ataacctggcgcctgcgtttgtggcggatgagccggaacgtgcagacatcgttctggttgtcgatcagacattta

SEQ ID NO: 604374 - DNA, 75 bp, synthetic construct
  source 1..75: mol_type = other DNA
tgctgaactcgctgattatcaggcactggacgcagatattattcaatgcattcagcgcgcagatgaagtgcacac

SEQ ID NO: 604375 - DNA, 75 bp, synthetic construct
  source 1..75: mol_type = other DNA
ctctggtggtggatgattgcggcatttactacgatgccagcaagccttcggcgctggagaaactggtacaggata

SEQ ID NO: 604376 - DNA, 75 bp, synthetic construct
  source 1..75: mol_type = other DNA
atggggcaacaaaagcagcgtaatcgacgttgggttctggcctcgcgtccacatggcgcaccggttccggagaat

SEQ ID NO: 604377 - DNA, 75 bp, synthetic construct
  source 1..75: mol_type = other DNA
caatgtttgagctgagtaaggaggacaaggacgctggcgtgcaaatcgatccaacgttgttcactcagtacaaca

SEQ ID NO: 604378 - DNA, 75 bp, synthetic construct
  source 1..75: mol_type = other DNA
taaacagcaggcttcgcaggacggaaaaccccggcagggtgccctgtattttgtgtcgttttccattcccgaaga

SEQ ID NO: 604379 - DNA, 75 bp, synthetic construct
  source 1..75: mol_type = other DNA
ctgattttgttggctgccaccagttgcagtttatcgataaatatcagatggctgagcgtttaaaacctggcggca

SEQ ID NO: 604380 - DNA, 75 bp, synthetic construct
  source 1..75: mol_type = other DNA
ctggtccgtaagcagcaggctgctcagaaagacaaaccacaacagggggccgtgtattttgtatcgttttccata

SEQ ID NO: 604381 - DNA, 75 bp, synthetic construct
  source 1..75: mol_type = other DNA
cggcgcaactgatggtgttcagatcgacccgacgctgttttcacagtacggcattcgcagtgtaccggcactggt

SEQ ID NO: 604382 - DNA, 75 bp, synthetic construct
  source 1..75: mol_type = other DNA
tggcgcgaccgatggtgttcagattgacccgacgttgttttcacagtacggcatccgcagcgtgccggccctggt

SEQ ID NO: 604383 - DNA, 75 bp, synthetic construct
  source 1..75: mol_type = other DNA
acagcgggagtatttgttgggaatatcagatcgcgataacgcagtgggtgtggaatgaatttaaaacccggtacg

SEQ ID NO: 604384 - DNA, 75 bp, synthetic construct
  source 1..75: mol_type = other DNA
gatgaggtaactggaaaaatgatcacgcgggataatcccccgatccagggtaaacaatcactggcgaaaggctca

SEQ ID NO: 604385 - DNA, 75 bp, synthetic construct
  source 1..75: mol_type = other DNA
atgtttatgtggcgcagatttctcttggcgcacagctcaaccagacagtgaaagcgattcaggaagcggaagcgt

SEQ ID NO: 604386 - DNA, 75 bp, synthetic construct
  source 1..75: mol_type = other DNA
ggaagattgcaccggttgtaacctgtgcgtcgaagtttgcccggcgaaagaccgtcagaatccagagattaaagc

SEQ ID NO: 604387 - DNA, 75 bp, synthetic construct
  source 1..75: mol_type = other DNA
ggcaggcactggagaaagtgaccgtcacgggggactgccggcaggtggctcagggactgctggacggcaccgggg

SEQ ID NO: 604388 - DNA, 75 bp, synthetic construct
  source 1..75: mol_type = other DNA
aagccgtgttgtctctggtgaaagacggcgcgactgatggtgttcagatcgacccgacgctgttttcacagtatg

SEQ ID NO: 604389 - DNA, 75 bp, synthetic construct
  source 1..75: mol_type = other DNA
ggcaggcgctggagaaagtggccagggcggggggctgccggcaggtggctcagggactactggatggcaccgggg

SEQ ID NO: 604390 - DNA, 75 bp, synthetic construct
  source 1..75: mol_type = other DNA
tcgctttccttctgattgccggatggggaacatccatgcgtctgtcatggtcgctgggccgggagaacgccagaa

SEQ ID NO: 604391 - DNA, 75 bp, synthetic construct
  source 1..75: mol_type = other DNA
gatgaatgatttcgctgccgcgacaggtcgtcagtatcagccgtttgagtattacgggcatccgcaagcggaacg

SEQ ID NO: 604392 - DNA, 75 bp, synthetic construct
  source 1..75: mol_type = other DNA
cagctgaaagcctgggcggagaagcaggtgctggaaaacccccttcagcgttcagataaccatttcctggatgag

SEQ ID NO: 604393 - DNA, 75 bp, synthetic construct
  source 1..75: mol_type = other DNA
gcaaaaacgtttcgtgatgacgcatgggttgttctggagggtaacatcatcaggcaggttggccatgaactttac

SEQ ID NO: 604394 - DNA, 75 bp, synthetic construct
  source 1..75: mol_type = other DNA
atcagcgccggggtacaggatatgcagcaggtgctggcgcaactccgcgtggaaaatcaacagagaaatcaggac

SEQ ID NO: 604395 - DNA, 75 bp, synthetic construct
  source 1..75: mol_type = other DNA
ggagaggccagacgtgaacagctacgcaacgatattgcaaaagatgaatgcgccctcgctttgcctgacgctcgt

SEQ ID NO: 604396 - DNA, 75 bp, synthetic construct
  source 1..75: mol_type = other DNA
tttccctgacagcaggactgtttatttctgcccacgcttcggaaaacgtgaatacgccagaaaaccgccggttcc

SEQ ID NO: 604397 - DNA, 75 bp, synthetic construct
  source 1..75: mol_type = other DNA
aacaacgacctgaaggccacggctgacgccgtgttgtccctggtgaaagacggcgcaactgatggtgttcagatc

SEQ ID NO: 604398 - DNA, 75 bp, synthetic construct
  source 1..75: mol_type = other DNA
cccgaagaggggctgaaacggatgctgagcgaaacccggcactacggtattccggccacactgcggggcatggtg

SEQ ID NO: 604399 - DNA, 75 bp, synthetic construct
  source 1..75: mol_type = other DNA
cccgaagaggggctgaaacgaatgctgggcgaaacccggcactacggtattccggccacactgcggggcatggtg

SEQ ID NO: 604400 - DNA, 75 bp, synthetic construct
  source 1..75: mol_type = other DNA
gacccgacgctgttttcacagtacggcattcgcagtgtaccggcactggtggtgttctgcagtcagggatacgac

SEQ ID NO: 604401 - DNA, 75 bp, synthetic construct
  source 1..75: mol_type = other DNA
cgtaaacagcaggcttcgcaggacgggaaaccccggcagggtgccctgtattttgtgtcgttttccattcccgaa

SEQ ID NO: 604402 - DNA, 75 bp, synthetic construct
  source 1..75: mol_type = other DNA
accaaaagccgttaaggccgcgtatgacctggctaacgggaaatacaccgcacaggatgcaacgacagcacagaa

SEQ ID NO: 604403 - DNA, 75 bp, synthetic construct
  source 1..75: mol_type = other DNA
ctcaaaaagcgcggcagctaccagtgccagtgccgcgaaaacgtcagaaacgaatgcggcagcgtcacaaaaatc

SEQ ID NO: 604404 - DNA, 75 bp, synthetic construct
  source 1..75: mol_type = other DNA
ggcagccgcgaagaagtcagccagcgatgccggcacatcagcccgtgaggcggcaacccatgcgactgatgctgc

SEQ ID NO: 604405 - DNA, 75 bp, synthetic construct
  source 1..75: mol_type = other DNA
atgaatactattgataataataatccaataacgacgaatacgagcggcgttcccggtgtagttgccgcatctgag

SEQ ID NO: 604406 - DNA, 75 bp, synthetic construct
  source 1..75: mol_type = other DNA
agccagtgccaccgctgccggaaagtcggcagaaagtgctgcatcgtctgcttcaacagccacaacgaatgctgg

SEQ ID NO: 604407 - DNA, 75 bp, synthetic construct
  source 1..75: mol_type = other DNA
ggacagagcgcctcagctgcggcaggctcaaaaacagcggctgcgtcgtctgccagtgccgcgtcaacaagtgcc

SEQ ID NO: 604408 - DNA, 75 bp, synthetic construct
  source 1..75: mol_type = other DNA
gcggcggtggccggccttgtgatgacggtgctgaccgttggtctggtgtcctgtgcagggaaatcattaccccgt

SEQ ID NO: 604409 - DNA, 75 bp, synthetic construct
  source 1..75: mol_type = other DNA
ttgcggttgatattcggaaatcatcaccaacatttggcaagtgggttggtgtaaatttgtcggcggagaataagc

SEQ ID NO: 604410 - DNA, 75 bp, synthetic construct
  source 1..75: mol_type = other DNA
atgcttcgatacgagttaacgccgaacaatgcaggttttatactgtggggagattcagaagccctgaatgaatta

SEQ ID NO: 604411 - DNA, 75 bp, synthetic construct
  source 1..75: mol_type = other DNA
accgcaggcgatccgatgaataactgcgagtttaacggatttgttatgcctggtggctggactgacagggggcgt

SEQ ID NO: 604412 - DNA, 75 bp, synthetic construct
  source 1..75: mol_type = other DNA
aaaaatatcggaatttgttggccattaagagaaaaaccaataatatcagaaaaagatagcaatctattacccttt

SEQ ID NO: 604413 - DNA, 75 bp, synthetic construct
  source 1..75: mol_type = other DNA
ctttccgctttttgccctggtatgggggctgaatctgtcccgccatgcgcatatccggcagtcggccattaaccg

SEQ ID NO: 604414 - DNA, 75 bp, synthetic construct
  source 1..75: mol_type = other DNA
gatgatattaatattaattggccatcatcatacggtatcactctatcaaagaaggatgaaaatgcaccgtacttc

SEQ ID NO: 604415 - DNA, 75 bp, synthetic construct
  source 1..75: mol_type = other DNA
ggcgcataaggtacttccgctggtgataccggtgctgttctaccacggtgagcgcagtccgtatccgtacagcat

SEQ ID NO: 604416 - DNA, 75 bp, synthetic construct
  source 1..75: mol_type = other DNA
gtaacctttagtgcagagcaactggcggcggcgctggatactttccgtggcgatatcgaacagatcccttcgatg

SEQ ID NO: 604417 - DNA, 75 bp, synthetic construct
  source 1..75: mol_type = other DNA
ttgcctcgggaagcgacgaagttttcccagtatctgctggactccgacaaacgctatcgggtcattgcgcgtctt

SEQ ID NO: 604418 - DNA, 75 bp, synthetic construct
  source 1..75: mol_type = other DNA
gattttgggattgtacatgatattgattggccttatcgtagagatggttcgaataatggttcatggacgcttaat

SEQ ID NO: 604419 - DNA, 75 bp, synthetic construct
  source 1..75: mol_type = other DNA
aaagatgttaaatcattttaaagcagattttgggattgtacatgatattgattggccttatcgtagagatggttc

SEQ ID NO: 604420 - DNA, 75 bp, synthetic construct
  source 1..75: mol_type = other DNA
tgggtagattggtacagcgaatgccaatgttacgacgacccacgtaaatatctcgaaagcctgaaagaagaaaca

SEQ ID NO: 604421 - DNA, 75 bp, synthetic construct
  source 1..75: mol_type = other DNA
aattcagatggttcagatgtatgtactttatttgatgccgctgcattttctcgtttgactggtgaaggcttaccc

SEQ ID NO: 604422 - DNA, 75 bp, synthetic construct
  source 1..75: mol_type = other DNA
ctgatgtgctgatttttgaaccaaaagtttttggcgatgagcgcggcttcttttttgagagctttaaccagaaag

SEQ ID NO: 604423 - DNA, 75 bp, synthetic construct
  source 1..75: mol_type = other DNA
tatactatagatatagcctggcctattgaaaatgaaccgctgctttctgcaaaagatctgaaagcacgtaggttt

SEQ ID NO: 604424 - DNA, 75 bp, synthetic construct
  source 1..75: mol_type = other DNA
ccgctggaaggactggttcgcgttacagaaggtgagaacggcaagtttatcggtatgggcgaaattgacgatgaa

SEQ ID NO: 604425 - DNA, 75 bp, synthetic construct
  source 1..75: mol_type = other DNA
ttgtggcgcgcatgttatttacctgcgtcgtctggcggtaagtaaatatccggttgaacggatggtgaccctgga

SEQ ID NO: 604426 - DNA, 75 bp, synthetic construct
  source 1..75: mol_type = other DNA
ttggggaagcgacgaagttttcccagtatctgctggactccgacaaacgttatcgggtgattgcgcgtcttgggc

SEQ ID NO: 604427 - DNA, 75 bp, synthetic construct
  source 1..75: mol_type = other DNA
tcgatttacaaaatgatttctgtgctggtggcgcgctcgccgtaccggaaggtgacagtacggtggaggttgcta

SEQ ID NO: 604428 - DNA, 75 bp, synthetic construct
  source 1..75: mol_type = other DNA
atgaaccggatttcgaaacccggctaaatgagctgggctacgattgccacgacgaaaccaataatccggcgttca

SEQ ID NO: 604429 - DNA, 75 bp, synthetic construct
  source 1..75: mol_type = other DNA
accttccgtttatgccaggagtatcttgacgacatcatcaccgtcgatagcgatgcgatttgtgcggcgatgaaa

SEQ ID NO: 604430 - DNA, 75 bp, synthetic construct
  source 1..75: mol_type = other DNA
cgtgcgtgaagtcaacctgctcggtcagaacgtgaacgcctggcgtggtgaaaactacgacggcaccaccggatc

SEQ ID NO: 604431 - DNA, 75 bp, synthetic construct
  source 1..75: mol_type = other DNA
aacggctggcgcatattctttccggtgctaacgtgaactttcacggcctgcgctacgtctcggaacgctgcgaac

SEQ ID NO: 604432 - DNA, 75 bp, synthetic construct
  source 1..75: mol_type = other DNA
gacttattcgaagatgtgcgcgcagtggcggaaccgtctggcgcgctggcgctggcggggatgaaaaagtacatc

SEQ ID NO: 604433 - DNA, 75 bp, synthetic construct
  source 1..75: mol_type = other DNA
ttcacctgggtgccgccgttcgaccatccgatggtgatcgccgggcaaggcacgctggcgctggaactgctccag

SEQ ID NO: 604434 - DNA, 75 bp, synthetic construct
  source 1..75: mol_type = other DNA
agagcggaacgtctggcgctgttggcctgcctgctggctgttattccggcgcttaaccttgcccccagtgatgca

SEQ ID NO: 604435 - DNA, 75 bp, synthetic construct
  source 1..75: mol_type = other DNA
aataacgcaacaggtgaagtgacgatcaatacaccacttaattcgcctaaggggattaagggaaattctgataca

SEQ ID NO: 604436 - DNA, 75 bp, synthetic construct
  source 1..75: mol_type = other DNA
cgttaaggatgattgcaggcgattacggtgtcatatggcgaaatgatggagcaaacacttacttgctcatgactg

SEQ ID NO: 604437 - DNA, 75 bp, synthetic construct
  source 1..75: mol_type = other DNA
atggataaaacacaatcactgatcccctctgccggtacaccggaaaaatcccccgctaaatgctcccgtcgccgt

SEQ ID NO: 604438 - DNA, 75 bp, synthetic construct
  source 1..75: mol_type = other DNA
cagcaccatctgaatcctctgtccctgctgagtcagtcagaaaagaggtgaatactaatgttaaagggagccggc

SEQ ID NO: 604439 - DNA, 75 bp, synthetic construct
  source 1..75: mol_type = other DNA
ttctactgatatcactttaaccgctgcgcatgttgctgcttttgccagaagagcaacggatacgtatgccgatgc

SEQ ID NO: 604440 - DNA, 75 bp, synthetic construct
  source 1..75: mol_type = other DNA
tgtcgcggtaaaacgcatcggcgacgaaaccttccgtttatgccaggagtatctcgacgacatcatcaccgtcga

SEQ ID NO: 604441 - DNA, 75 bp, synthetic construct
  source 1..75: mol_type = other DNA
attaagtcgctttactgctgctgctggaaggatttccggttctacgtcatttattgttgttaccagccttgctga

SEQ ID NO: 604442 - DNA, 75 bp, synthetic construct
  source 1..75: mol_type = other DNA
catacccatagtgttagcggtacggctgcttcagccggtgcacatacccattcgatgacatttgtttcaggtggt

SEQ ID NO: 604443 - DNA, 75 bp, synthetic construct
  source 1..75: mol_type = other DNA
atgacaacggataacacgaacacgacacgtaacgattcactggctgcccggaccgatacccggttgcagtcgttg

SEQ ID NO: 604444 - DNA, 75 bp, synthetic construct
  source 1..75: mol_type = other DNA
ctgattggtggtgctatctcatctgtcctggggattttaggctcttttgctgccattaatagcgcaacgaaagga

SEQ ID NO: 604445 - DNA, 75 bp, synthetic construct
  source 1..75: mol_type = other DNA
tatggtggatggaatacattaagaccgtttgctattgataacgcaaccggcgaactggttattggaaccaaactg

SEQ ID NO: 604446 - DNA, 75 bp, synthetic construct
  source 1..75: mol_type = other DNA
tcatagtgtcacaggcgcatcagcagtcagccagtggtcacaaaatgggtcagtacataaggtagtgtctgcggc

SEQ ID NO: 604447 - DNA, 75 bp, synthetic construct
  source 1..75: mol_type = other DNA
accgtctgccggagatgatcaactccgtgcgcggcgaccgcagcccggttgtagatatcagcttcccggaaatcg

SEQ ID NO: 604448 - DNA, 75 bp, synthetic construct
  source 1..75: mol_type = other DNA
gccgccatcgacgggatcgatcgtattcgctttaccaccagccatccgatcgaatttaccgacgatattatcgaa

SEQ ID NO: 604449 - DNA, 75 bp, synthetic construct
  source 1..75: mol_type = other DNA
ggtgaagtgctgctccacggcgcgaactttgacgaagcgaaagcgaaagcgatcgaactgtcacagcagcagggc

SEQ ID NO: 604450 - DNA, 75 bp, synthetic construct
  source 1..75: mol_type = other DNA
cggataaacgcaacaagcgaaatctggtaaaactggataatgcgttagatcgtctggaggcacttactggttatc

SEQ ID NO: 604451 - DNA, 75 bp, synthetic construct
  source 1..75: mol_type = other DNA
accgtcagtgctgaatcagcaccggggacactgaatacgtttttgctgaatgaagagactgcggcggcgtatccg

SEQ ID NO: 604452 - DNA, 75 bp, synthetic construct
  source 1..75: mol_type = other DNA
agcggtgtacatgatcactttggcgtcagctggtttaatcctgaagatcttgccactaagcgtaaagcgatggcc

SEQ ID NO: 604453 - DNA, 75 bp, synthetic construct
  source 1..75: mol_type = other DNA
tcagtattaatcgccgcattaataggtggtttattagcgaatcgggtcatcaaccgctttgggcaaaagcgagca

SEQ ID NO: 604454 - DNA, 75 bp, synthetic construct
  source 1..75: mol_type = other DNA
atggactttcttacatgggggcctaagtgaggctattaccaatgtttctcatcatgcatatccttctgattgcgg

SEQ ID NO: 604455 - DNA, 75 bp, synthetic construct
  source 1..75: mol_type = other DNA
gcatctgacgctggcatttttaggcgaagtgagcgcggagaaagaaaaggcgctttctcttttagccggacggat

SEQ ID NO: 604456 - DNA, 75 bp, synthetic construct
  source 1..75: mol_type = other DNA
cgttatcaggccggaaaagaactggcaggaaatatggcctcagtgggcgctgccggtgtggggattgctgctgcg

SEQ ID NO: 604457 - DNA, 75 bp, synthetic construct
  source 1..75: mol_type = other DNA
caatcactaccgatgtgacagagcaacaaatcacccagcttaagcagaaaacatacgcagcaatgaccagggatc

SEQ ID NO: 604458 - DNA, 75 bp, synthetic construct
  source 1..75: mol_type = other DNA
ggtgcacagattatcattgcgaaagcgggtggagatgctgcggctattcaggcggcaacgccggtcacgctgaat

SEQ ID NO: 604459 - DNA, 75 bp, synthetic construct
  source 1..75: mol_type = other DNA
accttctgtatcgccgccaaaagaagaatcagctaacagagtttcaagtggtagcaagcagtgcttgcgatgcag

SEQ ID NO: 604460 - DNA, 75 bp, synthetic construct
  source 1..75: mol_type = other DNA
tctcgatggcccaaagaatacacgccatatgaagtggtgcccaatttgtaatgtccgcagaaaacgaaccagctt

SEQ ID NO: 604461 - DNA, 75 bp, synthetic construct
  source 1..75: mol_type = other DNA
tcggtaagcgtattccaggttgcaaatgtgtcaaaaaataatgtggacttccatctggtgtttgagctgggaaga

SEQ ID NO: 604462 - DNA, 75 bp, synthetic construct
  source 1..75: mol_type = other DNA
tgtggatttcaatggaatagatgatttttcaccagattcggtagcaaagaaggttcctgctttaaaaaaactact

SEQ ID NO: 604463 - DNA, 75 bp, synthetic construct
  source 1..75: mol_type = other DNA
aaaaactgaaggaaaaacttcaggaattactggcgaatactaatagcaatccagaaaatgatggcagtaaggaat

SEQ ID NO: 604464 - DNA, 75 bp, synthetic construct
  source 1..75: mol_type = other DNA
gtttctgacggccgattttctcgccttgtttgaatatcagcccgaccatgaatcgatccgtcagtcagagctcaa

SEQ ID NO: 604465 - DNA, 75 bp, synthetic construct
  source 1..75: mol_type = other DNA
acactggcccaaaggtgagaggttgatcgccgacgcgctgggtgtagcgccagagcaaatctggccttctcgcta

SEQ ID NO: 604466 - DNA, 75 bp, synthetic construct
  source 1..75: mol_type = other DNA
atggtcgcgctatggcgaagtttctttcttcctggggactgacgacctcggacgcgatgttttaagccgtttact

SEQ ID NO: 604467 - DNA, 75 bp, synthetic construct
  source 1..75: mol_type = other DNA
cgacgatctgtggcctggtactgggcaccttcgccggggcgacacacggcctccgctcagcggtgcttaaccata

SEQ ID NO: 604468 - DNA, 75 bp, synthetic construct
  source 1..75: mol_type = other DNA
acggctgcgcggggctggctgtactgtgtatttttggcggctggtttgcgccttacggcatcgaccagcaatttc

SEQ ID NO: 604469 - DNA, 75 bp, synthetic construct
  source 1..75: mol_type = other DNA
gcgccagccgccgcgcggcttaatacaactggcgaatatgctccgttcgcaagcagcacgcagtggttgttttca

SEQ ID NO: 604470 - DNA, 75 bp, synthetic construct
  source 1..75: mol_type = other DNA
tgctcgcctggatggtgcaacgacgctgaatattctctggtttgccgtgctgccaaacatcaccgctgggctggt

SEQ ID NO: 604471 - DNA, 75 bp, synthetic construct
  source 1..75: mol_type = other DNA
ccttatggaatcgatcagcaatttctcggttatcagctactgccgccatcatggtcgcgttatggcgaagtttct

SEQ ID NO: 604472 - DNA, 75 bp, synthetic construct
  source 1..75: mol_type = other DNA
ttgtttccgtactttgccggattgttcgttgcgcactacatgacgctctgggcggctgacagcagggcgatgctg

SEQ ID NO: 604473 - DNA, 75 bp, synthetic construct
  source 1..75: mol_type = other DNA
atggcgttcagtcctcaaagtccgtggataaggtaagcgtcagttatgacaccagtgcgacgctgaatcctgatg

SEQ ID NO: 604474 - DNA, 75 bp, synthetic construct
  source 1..75: mol_type = other DNA
ttgttttccaggatacgttgcagacaggaaaatatgactctggattgaaatcaatagtttggtcagattataaaa

SEQ ID NO: 604475 - DNA, 75 bp, synthetic construct
  source 1..75: mol_type = other DNA
ggcgttactgccgcgtatggtgcgttcggtctacagcatggtgcatgatgagctggaaaaagagtacgttattgc

SEQ ID NO: 604476 - DNA, 75 bp, synthetic construct
  source 1..75: mol_type = other DNA
cggtaagtgattttcggcgcgactttccacagtttgctgaccctgccaaatatcccgaagcacaaatccagtttc

SEQ ID NO: 604477 - DNA, 75 bp, synthetic construct
  source 1..75: mol_type = other DNA
tatcccgaagcgcaaatccagtttcgtctgaatctggccgatgaactgctgagcgaaaacgtcaccggcaaaaag

SEQ ID NO: 604478 - DNA, 75 bp, synthetic construct
  source 1..75: mol_type = other DNA
cctgggccggcgcggtgctggtgctggtggccgctgggctggtggcgcgcctgctgcgcaagcgcccagcgctcg

SEQ ID NO: 604479 - DNA, 75 bp, synthetic construct
  source 1..75: mol_type = other DNA
tttcatcattcttttgcatactcagaccattggggatgtttattattctgccaatattttcaacaggcgttttgc

SEQ ID NO: 604480 - DNA, 75 bp, synthetic construct
  source 1..75: mol_type = other DNA
ttttccctgattttattacggcaaatattcattctgacataattgacagatcgttaccgagcatgattaatgagt

SEQ ID NO: 604481 - DNA, 75 bp, synthetic construct
  source 1..75: mol_type = other DNA
tctttgttattcatggtgggatacaaagcgttctggataagttgtatttatcctacgagatattaccattacaag

SEQ ID NO: 604482 - DNA, 75 bp, synthetic construct
  source 1..75: mol_type = other DNA
atgcctaacattattctgtctgacaccagtgcaagtgtcagtgaactgaaaaaaaatcctatggctacagtcagt

SEQ ID NO: 604483 - DNA, 75 bp, synthetic construct
  source 1..75: mol_type = other DNA
ttgtgcaaccaagccagtctcaaacgagcaggctactcccgttccagaaaaacaggtaatcaatagcgcaatact

SEQ ID NO: 604484 - DNA, 75 bp, synthetic construct
  source 1..75: mol_type = other DNA
ggagtatgtggtggtggcatgagcgaacaagcgggcaaggtgacaacagatcgtactttgatgtatcgcataggg

SEQ ID NO: 604485 - DNA, 75 bp, synthetic construct
  source 1..75: mol_type = other DNA
gactaacgtcgaaacgctggcaggaacaacctctcggatacttgattctgttcaggccaccagctatccgacggt

SEQ ID NO: 604486 - DNA, 75 bp, synthetic construct
  source 1..75: mol_type = other DNA
aatccaaattcttttaatattcatagtgatcgatgtaactgggcgcagaaaaatgaactttcgcaagttattctt

SEQ ID NO: 604487 - DNA, 75 bp, synthetic construct
  source 1..75: mol_type = other DNA
atgctccaggttcataatgaaattagccgacaaaatgaaaagcgagaagctcttcttaaatcctttagagaacaa

SEQ ID NO: 604488 - DNA, 75 bp, synthetic construct
  source 1..75: mol_type = other DNA
aaaaaatcctatgggaactgtagccgaaggagaaggggatgccgtcgcaatcctgaaccgaaatgaaccagcgtt

SEQ ID NO: 604489 - DNA, 75 bp, synthetic construct
  source 1..75: mol_type = other DNA
ccttacggcatcgatcagcaatttctcggctatcagcttttaccaccgtcatggtcacgctatggcgaagtctct

SEQ ID NO: 604490 - DNA, 75 bp, synthetic construct
  source 1..75: mol_type = other DNA
gggatttcgttaaagctgtatcaaaagccttcccgaaaaaagtcggtacgtggggtaacacggaaacaccaaacg

SEQ ID NO: 604491 - DNA, 75 bp, synthetic construct
  source 1..75: mol_type = other DNA
tgaagaattcagatggttcagatgtatgtactttatttgatgccgctgcattttctcgtttgactggtgaaggct

SEQ ID NO: 604492 - DNA, 75 bp, synthetic construct
  source 1..75: mol_type = other DNA
atgaaagaaattgatatcaaattgaaaattgtagagtttcttttaaactctgagcccgctgatacatacctcgct

SEQ ID NO: 604493 - DNA, 75 bp, synthetic construct
  source 1..75: mol_type = other DNA
tggtagcgtcactctggagtttaagattttccagaaaggcaatcagggggcaggcaatatcaccgactgtacggt

SEQ ID NO: 604494 - DNA, 75 bp, synthetic construct
  source 1..75: mol_type = other DNA
taagattttccagaaaggcaatcagggggcaggcaatatcaccgactgtacggtgattgtgaccaaaaaagcggc

SEQ ID NO: 604495 - DNA, 75 bp, synthetic construct
  source 1..75: mol_type = other DNA
gtgcaactcacgagcgtatggcgcagcttcgtgcacaaattgataccgaagtggctttagcctatgggctcggct

SEQ ID NO: 604496 - DNA, 75 bp, synthetic construct
  source 1..75: mol_type = other DNA
agagtttgaacgttaccagaaggctaaactggatgcggaatttgacgccatcatggctattcatggcagcgaaat

SEQ ID NO: 604497 - DNA, 75 bp, synthetic construct
  source 1..75: mol_type = other DNA
ttcaaaattttccataatgaaattggtgagattttatcaccagatgacattctaacaataacaagaatgcctcct

SEQ ID NO: 604498 - DNA, 75 bp, synthetic construct
  source 1..75: mol_type = other DNA
gacactttctggctatgtgtcgatagaattcgcttttttaaacatattgtcgagatatgcttaaggtatcaacat

SEQ ID NO: 604499 - DNA, 75 bp, synthetic construct
  source 1..75: mol_type = other DNA
agagctggttaaaatcatgcaggataacctcggcggtgactttaaggagtttcagtccgcttatgaggcggtggg

SEQ ID NO: 604500 - DNA, 75 bp, synthetic construct
  source 1..75: mol_type = other DNA
tcctcttagcatgtacgcggtcgatgctgttgccgctattgcagaggtgagaggctggaacgcctgccgcgccgc

SEQ ID NO: 604501 - DNA, 75 bp, synthetic construct
  source 1..75: mol_type = other DNA
aaaaacatccccggcaacagtcctttattgctcgggaacaggttacgtcattggttttatcgtgaatccctctgc

SEQ ID NO: 604502 - DNA, 75 bp, synthetic construct
  source 1..75: mol_type = other DNA
caggcgcgctaagtattttttttaatacgaccattcctgccagtttatcggtcattgaacacacgccatctgata

SEQ ID NO: 604503 - DNA, 75 bp, synthetic construct
  source 1..75: mol_type = other DNA
cgttacccggtatctgcgccataacgactggttttattatataaatacaggaaatgctgttctggcactgatact

SEQ ID NO: 604504 - DNA, 75 bp, synthetic construct
  source 1..75: mol_type = other DNA
ccgcaaaggcgaaagaggtacgattaacatagtgaacggaacaccaattcacgaacgttcccgaaatatcgataa

SEQ ID NO: 604505 - DNA, 75 bp, synthetic construct
  source 1..75: mol_type = other DNA
ttgtccggcaccagttacggcattaccgggctgctgatgctggcggtcagtcaccggctgtaccgggcggaagac

SEQ ID NO: 604506 - DNA, 75 bp, synthetic construct
  source 1..75: mol_type = other DNA
acagacgctctctggggcattgggagggcgatttagtctcaggtacaaaaaactctcatatagccacacttgtag

SEQ ID NO: 604507 - DNA, 75 bp, synthetic construct
  source 1..75: mol_type = other DNA
gtatggcggtgtcgagaacagaccaggtacgcgctttgttggcccagctaaatatcctgatcgcaagtgccggtt

SEQ ID NO: 604508 - DNA, 75 bp, synthetic construct
  source 1..75: mol_type = other DNA
aaacgctgctggataaaaagcaggtgatacccactgtcacgatggtggtcaacgccagccgaggcatctgggcaa

SEQ ID NO: 604509 - DNA, 75 bp, synthetic construct
  source 1..75: mol_type = other DNA
ttcaaccgtaacgtacccgcgttactgcgcactgcggccacaactaactggcagatggcccgccagactttcagc

SEQ ID NO: 604510 - DNA, 75 bp, synthetic construct
  source 1..75: mol_type = other DNA
accagccacagaattcagtatgtggatacgcccattgcaggtggaactgagcgataacacgctggccctgtacgc

SEQ ID NO: 604511 - DNA, 75 bp, synthetic construct
  source 1..75: mol_type = other DNA
cacaaacactgaaagctgcagccagcaatacagttgcacctgctcaggcagctcaggtgcagccgcaacgtgttg

SEQ ID NO: 604512 - DNA, 75 bp, synthetic construct
  source 1..75: mol_type = other DNA
cgctcggtggcgcgtccgcgccagatggcgatggcgctggcgaaagagctgactaaccacagtctgccagagatt

SEQ ID NO: 604513 - DNA, 75 bp, synthetic construct
  source 1..75: mol_type = other DNA
gtagaccgaaaatcacgttatacgatcatccttagactcaggggcaaagattctgtctcagtaaatcaggctctt

SEQ ID NO: 604514 - DNA, 75 bp, synthetic construct
  source 1..75: mol_type = other DNA
catacccgcaaaggcgaaagaggtacgattaacatagtgaacggaacaccaattcacggactgcagccacataaa

SEQ ID NO: 604515 - DNA, 75 bp, synthetic construct
  source 1..75: mol_type = other DNA
gccaagcgtctacgatctaacgtacgtgagctggaaggcgcgctgaaccgcgtcattgccaacgccaactttacc

SEQ ID NO: 604516 - DNA, 75 bp, synthetic construct
  source 1..75: mol_type = other DNA
atgaggacgcattctttgtcgactgtggtctgagctacgacgggcgcaacacatcatcccgcactatgactatca

SEQ ID NO: 604517 - DNA, 75 bp, synthetic construct
  source 1..75: mol_type = other DNA
gaatgaagcgcagctgatgcgcgatttcgtcgccgatggcggctcgctgattgggttggtgaaaaagcattgtga

SEQ ID NO: 604518 - DNA, 75 bp, synthetic construct
  source 1..75: mol_type = other DNA
actggcgatcgtcggtcactaacggaagacaccttgcgtttactggaaaaaatcgtcccttctgcacataaaatg

SEQ ID NO: 604519 - DNA, 75 bp, synthetic construct
  source 1..75: mol_type = other DNA
acggaagatatcttgcgattgctggaaaaaatcgccccttccgcacataaaattggcgcatcgagcgcaattgaa

SEQ ID NO: 604520 - DNA, 75 bp, synthetic construct
  source 1..75: mol_type = other DNA
ggagctgctgaaagctgactggcgccggcggctggccgatgaaaaatttgatatcgatggctacatcaggcaggc

SEQ ID NO: 604521 - DNA, 75 bp, synthetic construct
  source 1..75: mol_type = other DNA
aaaatctgtatgccaccaagatagcgctgggaaacctgtatcgttctgctttacgtgaagacgttgagtcgatgg

SEQ ID NO: 604522 - DNA, 75 bp, synthetic construct
  source 1..75: mol_type = other DNA
agggggccatcaaagcgaaggagcagttcacggtgactgctctggaaaacggtgcgatacgattgcgcagtggcg

SEQ ID NO: 604523 - DNA, 75 bp, synthetic construct
  source 1..75: mol_type = other DNA
ggcatcaccgtgctgcccatcccgggggacgaattgggacgaggccgcggcggcgcacgctgcatgagctgtccg

SEQ ID NO: 604524 - DNA, 75 bp, synthetic construct
  source 1..75: mol_type = other DNA
catcgcgcgcagttgtgatgattttttttaccggtacccgcgcagctgcgtgtggcggtacaacaaccattattg

SEQ ID NO: 604525 - DNA, 75 bp, synthetic construct
  source 1..75: mol_type = other DNA
aatcccatttcagttctcgaccgtacagacctatgctctggagttcgggcacaactatatgcgcgttatcaaaga

SEQ ID NO: 604526 - DNA, 75 bp, synthetic construct
  source 1..75: mol_type = other DNA
ctatcgagggtgactcaacggctaccgcctttaaactgacctcacgtcttatcaccaacacattaacccagttgg

SEQ ID NO: 604527 - DNA, 75 bp, synthetic construct
  source 1..75: mol_type = other DNA
aaaaaagacaccaccagtaagctggttgtgacgccactcggtagcctggcgttccagtatgccgaaggcattaaa

SEQ ID NO: 604528 - DNA, 75 bp, synthetic construct
  source 1..75: mol_type = other DNA
gtttgcctttgcagtggcggcacaggtgctgacatggtgtgaaacgcgcagtgggtggcgtactgcagcggccat

SEQ ID NO: 604529 - DNA, 75 bp, synthetic construct
  source 1..75: mol_type = other DNA
cgctcggtggcacgtccgcgccagatggcgatggcgctggcgaaagagctgactaaccacagtctgccggagatt

SEQ ID NO: 604530 - DNA, 75 bp, synthetic construct
  source 1..75: mol_type = other DNA
cgctgatttatctcggttcggcggcgctgattgttcccattgcggtacgtctcggtctgggatcggttcttggct

SEQ ID NO: 604531 - DNA, 75 bp, synthetic construct
  source 1..75: mol_type = other DNA
gattgcccgcggtggcgatgagtgggaggcagacgttctcgcaaaagcgcatctgctcagtaagctggaggcctg

SEQ ID NO: 604532 - DNA, 75 bp, synthetic construct
  source 1..75: mol_type = other DNA
aaattttaaccgaagctgtgctggcgcgggatgccgcgcgcgccagtgagttaatgcgccagcatttgctgacgc

SEQ ID NO: 604533 - DNA, 75 bp, synthetic construct
  source 1..75: mol_type = other DNA
atcgtatattaagaacctataccactgtttgggagcaatatcaagaaagcataaactttcgtttctgcaatacag

SEQ ID NO: 604534 - DNA, 75 bp, synthetic construct
  source 1..75: mol_type = other DNA
cccgtcacttcgccggccttaactttaccgagaaaaaattgcaggaagcggtgagttttgtccatcaacatcgcc

SEQ ID NO: 604535 - DNA, 75 bp, synthetic construct
  source 1..75: mol_type = other DNA
cgaaaacggcgcagatgctgtttatatcgggctaaaagatgataccaatgcccgtcacttcgccggccttaactt

SEQ ID NO: 604536 - DNA, 75 bp, synthetic construct
  source 1..75: mol_type = other DNA
gctctcacgctgggcggttttacgttgggagggatcggtacagcaacctttggcgcgattttactcaatgcgttg

SEQ ID NO: 604537 - DNA, 75 bp, synthetic construct
  source 1..75: mol_type = other DNA
ccgattctgatggggctggatcccaatctttccattttaatgtcggggatcggcacgttactgtttttctttatt

SEQ ID NO: 604538 - DNA, 75 bp, synthetic construct
  source 1..75: mol_type = other DNA
atgtacggaacatgcgaaacactctgccgggagctggcagcaaagtatccgggagacacgccgttgatgctggtt

SEQ ID NO: 604539 - DNA, 75 bp, synthetic construct
  source 1..75: mol_type = other DNA
tcctgggttcaaaacccggaacgatcttcactatgttaagggatactggcggcataaaaccccatgagcgtaagc

SEQ ID NO: 604540 - DNA, 75 bp, synthetic construct
  source 1..75: mol_type = other DNA
cagttcgcgtattacgttgccggctttccctggtatgaggggaatatcctgtttgcctttgcagttgctgcacag

SEQ ID NO: 604541 - DNA, 75 bp, synthetic construct
  source 1..75: mol_type = other DNA
ccgatcatgaaatcaggactgtcctggcgcgcctggaggacatcccggaagaccagcggactgaatccggtattt

SEQ ID NO: 604542 - DNA, 75 bp, synthetic construct
  source 1..75: mol_type = other DNA
gaagatttcaatatgttgattgatcacataaaatcatctgctgacttggctggcaaactggttcttgtgatgagt

SEQ ID NO: 604543 - DNA, 75 bp, synthetic construct
  source 1..75: mol_type = other DNA
caataaaatgaaaaaagctttacgctatattgatgcgcatttatcagacgatttgcgtctggaagatgtcgcctc

SEQ ID NO: 604544 - DNA, 75 bp, synthetic construct
  source 1..75: mol_type = other DNA
gggcctggaagcctctaaatccgatcagccttgtatttatcgctgtcatgccggattaaccgatttctctattcc

SEQ ID NO: 604545 - DNA, 75 bp, synthetic construct
  source 1..75: mol_type = other DNA
cagaactcattaataaaatcgcgcaggattttgcgcaggcgaccagccttgcggttgtcgtggttaatattcacg

SEQ ID NO: 604546 - DNA, 75 bp, synthetic construct
  source 1..75: mol_type = other DNA
tcatcctgaaactcagaggaaaagacgctttctcagtgaatcaggctcttacagaaaaattcctgagcttgccac

SEQ ID NO: 604547 - DNA, 75 bp, synthetic construct
  source 1..75: mol_type = other DNA
atcggggcagacgctattacaaagctgttgatgctaataaccgagccaacagaatggcgaaaaggccaaaaccgt

SEQ ID NO: 604548 - DNA, 75 bp, synthetic construct
  source 1..75: mol_type = other DNA
catctagaatttactgtcagccccggcgttaaagtttacttctgcgatcctcagagtccttggcagcggggaaca

SEQ ID NO: 604549 - DNA, 75 bp, synthetic construct
  source 1..75: mol_type = other DNA
cgatacatcaggtatcaaaattgccagctggcaacaagaacagcttctcgaagcgttgggtattgttgtttttcc

SEQ ID NO: 604550 - DNA, 75 bp, synthetic construct
  source 1..75: mol_type = other DNA
tttaagtggccaattgacaattattggtattgtatacccccttgttataggtttagtaagtgtcttattccaaaa

SEQ ID NO: 604551 - DNA, 75 bp, synthetic construct
  source 1..75: mol_type = other DNA
tcactaaattaattattagagaatatgataataataagttagtaaatgtcacttcagagaatatcaaaagtgact

SEQ ID NO: 604552 - DNA, 75 bp, synthetic construct
  source 1..75: mol_type = other DNA
gagcaggaggcgctgaagggtgataaagcagcgatttccgcgctcagggggatggcatatcgtgaaaaacggggt

SEQ ID NO: 604553 - DNA, 75 bp, synthetic construct
  source 1..75: mol_type = other DNA
ggtcacacagctggtacgccttacaccttttgatgggcagtcgtgggctgaaactgaacagaatgagcaacggtg

SEQ ID NO: 604554 - DNA, 75 bp, synthetic construct
  source 1..75: mol_type = other DNA
gacgcgacggcgggtcatcctttgatgacctggtatcgtatattgtggtccgtgaccatgacgagatggacaaaa

SEQ ID NO: 604555 - DNA, 75 bp, synthetic construct
  source 1..75: mol_type = other DNA
gcgctgctgtatgccgatgtgttgcatgagctggcgcagctgcgtggtgaagatttctcgcaactgcatattgtc

SEQ ID NO: 604556 - DNA, 75 bp, synthetic construct
  source 1..75: mol_type = other DNA
ccagccatgataccgccagcgcggttatcgcctcgccgttaaacggttcacgcgccgcttatctctcttctggca

SEQ ID NO: 604557 - DNA, 75 bp, synthetic construct
  source 1..75: mol_type = other DNA
tggtcaatatcaataacgacgactgggatgagtctctgctggcgtggagcggtgccaacaaagcctggtttggtc

SEQ ID NO: 604558 - DNA, 75 bp, synthetic construct
  source 1..75: mol_type = other DNA
agagcggaacgtctggcgctgttggcctgcctgctggcggttattccggctcttaaccttgcccccagtgatgca

SEQ ID NO: 604559 - DNA, 75 bp, synthetic construct
  source 1..75: mol_type = other DNA
gaaagtgatgctgaactggcgcgctgtattttcgacagtctggcgctgctgtatgccgatgtgttgcatgaactg

SEQ ID NO: 604560 - DNA, 75 bp, synthetic construct
  source 1..75: mol_type = other DNA
cggtcagcgcgtgggtctgcccgttgcttaccgcgatagccgcaccaatggcctaatggcgcaggcacaacagca

SEQ ID NO: 604561 - DNA, 75 bp, synthetic construct
  source 1..75: mol_type = other DNA
ccacgaactggcagatggcgcgccggacatttggaggcctgtctcatcttgaagggcagaccgtaaacattctct

SEQ ID NO: 604562 - DNA, 75 bp, synthetic construct
  source 1..75: mol_type = other DNA
atccgccacctgattgatgttggttcgctggtggcgctgacttccggaggtgagtacgtcatcaccggcgaccag

SEQ ID NO: 604563 - DNA, 75 bp, synthetic construct
  source 1..75: mol_type = other DNA
gctttgccggtggtgagattggaccgtcgttgtacgggcgtatcgacatggcgaagtaccaggtggcattgcgca

SEQ ID NO: 604564 - DNA, 75 bp, synthetic construct
  source 1..75: mol_type = other DNA
ttactggtggcgtgggcctcggcctcgcaatctgccgcgccctggtccagcaggaactgcaaaccaaaacacttc

SEQ ID NO: 604565 - DNA, 75 bp, synthetic construct
  source 1..75: mol_type = other DNA
ttatgggtggcttccttatcggcttcggcatctgtcgtgatttgattaagcaggaacttaaaaccaaaacactgt

SEQ ID NO: 604566 - DNA, 75 bp, synthetic construct
  source 1..75: mol_type = other DNA
tgcgcatgacaactggcaactggttgatgtggtaacgaagaacgggccatttgaagatatcaatattgacgagtc

SEQ ID NO: 604567 - DNA, 75 bp, synthetic construct
  source 1..75: mol_type = other DNA
cgaaatgatggagcaaacacttacttgctcatgactgataaaggcgaccagtacggtggctggaacggtcttcga

SEQ ID NO: 604568 - DNA, 75 bp, synthetic construct
  source 1..75: mol_type = other DNA
gcttacaatgtaactagaacaggcgacagttatattcttgccaacttttataccggagtcggaagttgccggacc

SEQ ID NO: 604569 - DNA, 75 bp, synthetic construct
  source 1..75: mol_type = other DNA
cggtggagttgttttcgacggttctgcaaatattaaccttccaggtgtaaacactacgggtaatcagaacaccac

SEQ ID NO: 604570 - DNA, 75 bp, synthetic construct
  source 1..75: mol_type = other DNA
cagtgttaacacttcttctgcaggcgctcatacgcactctgtatcgggtactgctgcaagcgcaggtgcacacgc

SEQ ID NO: 604571 - DNA, 75 bp, synthetic construct
  source 1..75: mol_type = other DNA
gatgcgagcacgacgaaaaaggggatagtacagctcagcagtgcgaccaacagcacgtctgaaacgctggcggca

SEQ ID NO: 604572 - DNA, 75 bp, synthetic construct
  source 1..75: mol_type = other DNA
agtcggcgcaccaatcccgtggccatcagataccgttccgtctggttatgccctgatgcaggggcagacttttga

SEQ ID NO: 604573 - DNA, 75 bp, synthetic construct
  source 1..75: mol_type = other DNA
ggcgacagctatattctggttaacttctataccggagtcggaagttgccggaccctgcagatgaaggcgcattac

SEQ ID NO: 604574 - DNA, 75 bp, synthetic construct
  source 1..75: mol_type = other DNA
aggcgcacatgcacatactgtcggtattggtgctcatacgcactccgttgcgattggctcacatggacacaccat

SEQ ID NO: 604575 - DNA, 75 bp, synthetic construct
  source 1..75: mol_type = other DNA
cgaataacaccggggcgcatacccatagtattagcgggactgcaaatagtgccggtgcgcaccaacacaagagtt

SEQ ID NO: 604576 - DNA, 75 bp, synthetic construct
  source 1..75: mol_type = other DNA
atcgtttgattacggcactaaatccacgaataacactggtgcacatacccatagtgttagcggtacggctgcttc

SEQ ID NO: 604577 - DNA, 75 bp, synthetic construct
  source 1..75: mol_type = other DNA
acaggtggattaactggttcattgaatggtaatgcaagtacagccacgaaattgcagacggcaagatctatcggt

SEQ ID NO: 604578 - DNA, 75 bp, synthetic construct
  source 1..75: mol_type = other DNA
agaaaatccaggcgcaaatagcggtaactcaggcccaggcggaagcagacagtaaactggcggcagccaaagcag

SEQ ID NO: 604579 - DNA, 75 bp, synthetic construct
  source 1..75: mol_type = other DNA
gagctgtgggaagaaaccggcattagcgcgcagccgcaacactttattcgtatgcatcagtggattgcgccggat

SEQ ID NO: 604580 - DNA, 75 bp, synthetic construct
  source 1..75: mol_type = other DNA
aacaggtacgtgaacagatactgcgtactgaacgtgagtgggtggtgaatatgccggaaaaagaaatagagatgg

SEQ ID NO: 604581 - DNA, 75 bp, synthetic construct
  source 1..75: mol_type = other DNA
aggcaaacgtgacccgctgttatctgccgatgatgaacgtcgcctgcgtgacaattcagaacgggaaatccggga

SEQ ID NO: 604582 - DNA, 75 bp, synthetic construct
  source 1..75: mol_type = other DNA
gtggccagtttatgtcagaaagtccgcatctggcaggccatgtaatgctgcgctcgcagatgaatgcagacaccg

SEQ ID NO: 604583 - DNA, 75 bp, synthetic construct
  source 1..75: mol_type = other DNA
gctggccgaagcagtgaagtcgggtcagcggctggcggatgtccgggctgaaataacccggcaggtggacagcgg

SEQ ID NO: 604584 - DNA, 75 bp, synthetic construct
  source 1..75: mol_type = other DNA
atggtgggcaaccgtgatatggcggagctctaccagctggttgccgccggtggcgggcgaatggtctccagcggg

SEQ ID NO: 604585 - DNA, 75 bp, synthetic construct
  source 1..75: mol_type = other DNA
gagcgtgatatgcctgccggggatgcggtctctgtcctgacgcaggataaaagccctgtggccattctcagcggg

SEQ ID NO: 604586 - DNA, 75 bp, synthetic construct
  source 1..75: mol_type = other DNA
aagtccgttatggaaatccgtaagccggagaaagagccggagcagggccggactgcagcacaggaggctttgaag

SEQ ID NO: 604587 - DNA, 75 bp, synthetic construct
  source 1..75: mol_type = other DNA
aaatcgcccggcaggtgagcagcggggaactgattcagctggattcggttgccggagcgggaaacaggattcttg

SEQ ID NO: 604588 - DNA, 75 bp, synthetic construct
  source 1..75: mol_type = other DNA
tattgccggtgcagggaacggtcatcgttgaccgcgcggagcgactgtcgctgaaagagacggtgctgctgcagg

SEQ ID NO: 604589 - DNA, 75 bp, synthetic construct
  source 1..75: mol_type = other DNA
ttccacgtgtggcgtatgagatggaaaagaccatcatccgccatattgctgagggtaaggatgccgtgcaacccc

SEQ ID NO: 604590 - DNA, 75 bp, synthetic construct
  source 1..75: mol_type = other DNA
gcaacatggtggccgcactctataaccatgatacgtcccgtgacctcgatccgcagttgcatacccacgctctgg

SEQ ID NO: 604591 - DNA, 75 bp, synthetic construct
  source 1..75: mol_type = other DNA
cccgtagtgtgcaaaatgtggcggacgctgaagcagcagcaaaaacggaagacctcatcacgctgcccccggatg

SEQ ID NO: 604592 - DNA, 75 bp, synthetic construct
  source 1..75: mol_type = other DNA
gggccggactgcagcacaggaggctttgaagccggagcagttgtcaccggcgcgtaccgacatcattgcagccat

SEQ ID NO: 604593 - DNA, 75 bp, synthetic construct
  source 1..75: mol_type = other DNA
ccgacgaagtgtacggcgacctgcactctacggatgatttcttcaccgaaactacgccgtatgcgccgagcagcc

SEQ ID NO: 604594 - DNA, 75 bp, synthetic construct
  source 1..75: mol_type = other DNA
aaaacggtgcagtggtatctggctaatgaaatctggtggaagcaggtgcaggacggcagctatcagggcgagcgt

SEQ ID NO: 604595 - DNA, 75 bp, synthetic construct
  source 1..75: mol_type = other DNA
atgagaaagattctgataacaggtggtgccgggtttattggctcggcgctggtgcgttatatcatcaacgaaacg

SEQ ID NO: 604596 - DNA, 75 bp, synthetic construct
  source 1..75: mol_type = other DNA
cctgcgtggtgcacgcagaaggcaaatttttagtcgttgaagagacgattaatggtaaagcgttatggaaccaac

SEQ ID NO: 604597 - DNA, 75 bp, synthetic construct
  source 1..75: mol_type = other DNA
ccacctttacccctaatcctgacagtgaaattgcccactatgtggcgcagcttcactctacacgacagacaaagg

SEQ ID NO: 604598 - DNA, 75 bp, synthetic construct
  source 1..75: mol_type = other DNA
gggtcagcgtgtgggcctgcccgttgcttatcgcgatagccgctccaatggcctaatggcgcaggcacagcaaca

SEQ ID NO: 604599 - DNA, 75 bp, synthetic construct
  source 1..75: mol_type = other DNA
ttattatttgagaaataaaaaaatagataagaatgatttcttctgtaaggatttggagccactctcggaatgggg

SEQ ID NO: 604600 - DNA, 75 bp, synthetic construct
  source 1..75: mol_type = other DNA
gatgttgagatacagactattgcaaatgtgaatacaggatatcactggagagcaataaatatacctgttaattgt

SEQ ID NO: 604601 - DNA, 75 bp, synthetic construct
  source 1..75: mol_type = other DNA
gccatcccacgcgcgcagcagggacaggtacacctcagtgaaattgccctgttgtcagaggcggtaaaatccggc

SEQ ID NO: 604602 - DNA, 75 bp, synthetic construct
  source 1..75: mol_type = other DNA
aaatagctggcttcaggatgaattcgatcgtttgaatctgcgtaaaggcgaccgttttaccataaccgatgaagc

SEQ ID NO: 604603 - DNA, 75 bp, synthetic construct
  source 1..75: mol_type = other DNA
taaagacaatctttattggcggtggtacgccgagcctgctttccggcccggcgatgcaaacgctgctggacggcg

SEQ ID NO: 604604 - DNA, 75 bp, synthetic construct
  source 1..75: mol_type = other DNA
gcgggcgttggacgggaacagggtatggagttattaactccggggccattcacagcctctgcaaatatggaagtc

SEQ ID NO: 604605 - DNA, 75 bp, synthetic construct
  source 1..75: mol_type = other DNA
tggtgttgaactcgtttggtgtccgaattggtaaagaagatattttgtttaaaaaaggaagtgctgtcctcatcg

SEQ ID NO: 604606 - DNA, 75 bp, synthetic construct
  source 1..75: mol_type = other DNA
atttcgcttattattgatcaactcgttgcagatcatgaaggcgaaagtatgacgaataaccctaccgatgacagc

SEQ ID NO: 604607 - DNA, 75 bp, synthetic construct
  source 1..75: mol_type = other DNA
cagcatttaagcgtatggagaagcgtaaagagctttcgcctcttcagggctggattcgggctactgaggtaacac

SEQ ID NO: 604608 - DNA, 75 bp, synthetic construct
  source 1..75: mol_type = other DNA
agaactctggcgcgattgcttgcgggtgaactatgagccgaatatcgatattcgggcagtaaaaactaagacagg

SEQ ID NO: 604609 - DNA, 75 bp, synthetic construct
  source 1..75: mol_type = other DNA
tggcacgacctggcagcaccgatcctggcgggaattattaccgcagcgattgtcagctggtggcgtaaccggaag

SEQ ID NO: 604610 - DNA, 75 bp, synthetic construct
  source 1..75: mol_type = other DNA
cggtggtcacgttgtgctgccattactgcaagccgaagtggtgccctccggctgggtcaacaatgaatcctttct

SEQ ID NO: 604611 - DNA, 75 bp, synthetic construct
  source 1..75: mol_type = other DNA
tggccgaactgatgccaagtcaaaccatggcaatggtggattccttctatcgtgtcggatcactggtgttcggcg

SEQ ID NO: 604612 - DNA, 75 bp, synthetic construct
  source 1..75: mol_type = other DNA
gatcaggcgtgggaagtattcgaaaaactggaagactgttatttcagccagaaacagccaccagcaacacaaaac

SEQ ID NO: 604613 - DNA, 75 bp, synthetic construct
  source 1..75: mol_type = other DNA
atgacaactcaaatctctgttgaaactctctccccgatcacccataaccagattcctgttattaccactgaactt

SEQ ID NO: 604614 - DNA, 75 bp, synthetic construct
  source 1..75: mol_type = other DNA
aactgatcaggcgtgggatgtgttcgaaaaactggaagactgctatttcagccagtgcgagaaaaatactggcaa

SEQ ID NO: 604615 - DNA, 75 bp, synthetic construct
  source 1..75: mol_type = other DNA
aaacgtagaaatgctctctggctatgtttccacgtacaaattaaccgatagcgagcgcgatattgctaccgaaat

SEQ ID NO: 604616 - DNA, 75 bp, synthetic construct
  source 1..75: mol_type = other DNA
tagaggatgcctgccacgctgccatgcttcagggtagccaacctgtaagccaaacttacaagttgccagttaata

SEQ ID NO: 604617 - DNA, 75 bp, synthetic construct
  source 1..75: mol_type = other DNA
acgagatgttgatatcaatgagccagacggaccaacgaaccttctggcatgggaaaggcttaagaacaaagagtt

SEQ ID NO: 604618 - DNA, 75 bp, synthetic construct
  source 1..75: mol_type = other DNA
cgtcttcaaatacctggttgacccgcagatgctcggtgtttccaacagtatgatttaccagctgacggactatat

SEQ ID NO: 604619 - DNA, 75 bp, synthetic construct
  source 1..75: mol_type = other DNA
tttctcctttattaactccgaccagattatggcgtttgtgaaacagacgatggccaacgcggcggggtacttttt

SEQ ID NO: 604620 - DNA, 75 bp, synthetic construct
  source 1..75: mol_type = other DNA
aagaaccggctcttcgacggcaataaggagctgaaggaattcatcatgacgctcaccggtacgctgattttcggg

SEQ ID NO: 604621 - DNA, 75 bp, synthetic construct
  source 1..75: mol_type = other DNA
tctgcggtgccgcgcttggcctgtcatttagcgccgccgccgatgtgaatggcgacatgaataacttcttcaata

SEQ ID NO: 604622 - DNA, 75 bp, synthetic construct
  source 1..75: mol_type = other DNA
ttctttgtgccgttttactgacggtgacgcctgctgtgtctgcagacgtcaacagcgacatgaaccagttcttta

SEQ ID NO: 604623 - DNA, 75 bp, synthetic construct
  source 1..75: mol_type = other DNA
cactggcgtcagaccgcagtctgctgagtgcgatgatgagtggtggcagcgccaaagtgtacgtctgtgataacc

SEQ ID NO: 604624 - DNA, 75 bp, synthetic construct
  source 1..75: mol_type = other DNA
tcctgcagaagatggctgctgaccttaaccgtttcaatatgtccagctgccaggcggcaaaagcgatggtcgaca

SEQ ID NO: 604625 - DNA, 75 bp, synthetic construct
  source 1..75: mol_type = other DNA
gcacaacagcaaatccgttttatccgccagcaggtctcctcaaaaatgagcgatcgcgtactcggtaactatcag

SEQ ID NO: 604626 - DNA, 75 bp, synthetic construct
  source 1..75: mol_type = other DNA
actttctgcagaagctggccagcgatgtgaactccatgaacatgagttcctgtcaggcagcgcaggggatcatcg

SEQ ID NO: 604627 - DNA, 75 bp, synthetic construct
  source 1..75: mol_type = other DNA
gacagtgtcagggataaagccagcgacaaggataaggagcgggtgaccaaaaacatcaacatcatgtggaatgcg

SEQ ID NO: 604628 - DNA, 75 bp, synthetic construct
  source 1..75: mol_type = other DNA
gtgaaattaaatttattggcccgcaggctaatcatcagggactcattcgtgcactgatgtacggaggacagacca

SEQ ID NO: 604629 - DNA, 75 bp, synthetic construct
  source 1..75: mol_type = other DNA
ccaggtgatgaaagaccgtaatctgatgtgggatatcctgcagaagaacgacatgatgaagggcaataccgagct

SEQ ID NO: 604630 - DNA, 75 bp, synthetic construct
  source 1..75: mol_type = other DNA
actgggtctcctcccgtcagggctgcacatccggcgggaaatacgaaagcgtcacgaacaaggctaccggcgcag

SEQ ID NO: 604631 - DNA, 75 bp, synthetic construct
  source 1..75: mol_type = other DNA
atgtctttaagaccttctgtgaaaatcgcccgtaacgttcgctccctcatcctctggacagaacgcggcgcagcc

SEQ ID NO: 604632 - DNA, 75 bp, synthetic construct
  source 1..75: mol_type = other DNA
tcagcaggggaggcatcggagtcagcccggcaggcggcagaaagtgcagccgctgcaaagcagtcagaggaagcg

SEQ ID NO: 604633 - DNA, 75 bp, synthetic construct
  source 1..75: mol_type = other DNA
gggcctcccgggccaaagggggaaccgggtcccgcgggtcctcaggggccgaagggagataaaggagagcgtgga

SEQ ID NO: 604634 - DNA, 75 bp, synthetic construct
  source 1..75: mol_type = other DNA
gggaccgaaaggagaaacaggtgcggctggcccggtaggggcaaccggacctcagggaccgaagggcgacccggg

SEQ ID NO: 604635 - DNA, 75 bp, synthetic construct
  source 1..75: mol_type = other DNA
ctcaaaaagccagtgagtcattacaaagtgcaacagatgctgagttgtcaaaaaagacggcagaaagtgcagccg

SEQ ID NO: 604636 - DNA, 75 bp, synthetic construct
  source 1..75: mol_type = other DNA
tcagcagaggaggcatcggagtcagcccggcaggcggcagaaagtgcagccgctgcaaagcagtcagaggaggcg

SEQ ID NO: 604637 - DNA, 75 bp, synthetic construct
  source 1..75: mol_type = other DNA
cgggtcccgcgggtctcaggggccgaagggagataaaggagagcgtggagacaccggtccggcaggggcaaccgg

SEQ ID NO: 604638 - DNA, 75 bp, synthetic construct
  source 1..75: mol_type = other DNA
ccgtttaccgggcacgtggcgtgcatgtggtccgatgctatggacatcatctccgggtatcagacaggcaggatt

SEQ ID NO: 604639 - DNA, 75 bp, synthetic construct
  source 1..75: mol_type = other DNA
ggtacgctgaatgattttctcggtgccatgacggaggatgatgcccgtcctgaggcactgcgccgttttgaactg

SEQ ID NO: 604640 - DNA, 75 bp, synthetic construct
  source 1..75: mol_type = other DNA
atccggatgaagccggacgttacagcatggatgttgagcatggtcagtacagcgtcaccctgctggttgaaggtt

SEQ ID NO: 604641 - DNA, 75 bp, synthetic construct
  source 1..75: mol_type = other DNA
aatacggttccgtctggggccgggaaacattattgagacaaacagcaatggctggttcccgggtacagatggtgc

SEQ ID NO: 604642 - DNA, 75 bp, synthetic construct
  source 1..75: mol_type = other DNA
acctcaggggccgaagggcgacccgggggagacacaaatccgttttcgtctggggccggcgagcattattgagac

SEQ ID NO: 604643 - DNA, 75 bp, synthetic construct
  source 1..75: mol_type = other DNA
tccggatgaagccggacgttacagcatggatgttgagtacggtcagtacagcgtcattctgttggtggagggatt

SEQ ID NO: 604644 - DNA, 75 bp, synthetic construct
  source 1..75: mol_type = other DNA
acaattgccgaataacgggcaaaacaaaggccacccgctacggtggcccctcgacacaagctacacgttatcccc

SEQ ID NO: 604645 - DNA, 75 bp, synthetic construct
  source 1..75: mol_type = other DNA
gtatgaagattttcaggattatgtgagcgactttgatttaatagatggagcatttaaaataggagttatcgatcg

SEQ ID NO: 604646 - DNA, 75 bp, synthetic construct
  source 1..75: mol_type = other DNA
aaaacaaatctcggcactgaccaccctgagccaccagcaggaggcagaaattcgccagcttgagcgcgagcttcg

SEQ ID NO: 604647 - DNA, 75 bp, synthetic construct
  source 1..75: mol_type = other DNA
atgccgatgacccggaaaccatgcaggaagtactgtatccggtgctggccgacttcttcaaacctgccctgctgg

SEQ ID NO: 604648 - DNA, 75 bp, synthetic construct
  source 1..75: mol_type = other DNA
taatgagccagacggaccaacgaatctttccgcatgggtaaggcttaagaacaaagaattacctccttcactgca

SEQ ID NO: 604649 - DNA, 75 bp, synthetic construct
  source 1..75: mol_type = other DNA
gacggcactttatcgtggttagggaacgccttgttctggatgctgctaccagaacctccccaggaggcaggtcaa

SEQ ID NO: 604650 - DNA, 75 bp, synthetic construct
  source 1..75: mol_type = other DNA
gaggaagttatgtcactgacccgggcatatttcggggagctgcaggcatccattgagcaggatattaaccagccc

SEQ ID NO: 604651 - DNA, 75 bp, synthetic construct
  source 1..75: mol_type = other DNA
gtaggcggggattcgttcgccctggtgaaactgaaaaacaacaaaattggggtttttcaggcataacaaaaagcg

SEQ ID NO: 604652 - DNA, 75 bp, synthetic construct
  source 1..75: mol_type = other DNA
cgggattggcgtcttggaaatgtcaaaggcgatatatgacgcgccagcgtcttttttatcgtccgcattcgctca

SEQ ID NO: 604653 - DNA, 75 bp, synthetic construct
  source 1..75: mol_type = other DNA
attggtgttcaacaccttgttggcgcaaggtgcagaaacgacgaaacccggcagtgcgctaacactaaccgggct

SEQ ID NO: 604654 - DNA, 75 bp, synthetic construct
  source 1..75: mol_type = other DNA
gcagtcagaggaggcgtcctcgtcctcggcctctgcggccgctcaaaaagccagtgagtcatcacaaagtgcagc

SEQ ID NO: 604655 - DNA, 75 bp, synthetic construct
  source 1..75: mol_type = other DNA
gaagggagataagggagagcgcggtgacaccggccctgtcggggcaaccggcgaacggggaccggcaggtgatgc

SEQ ID NO: 604656 - DNA, 75 bp, synthetic construct
  source 1..75: mol_type = other DNA
aaaacggaaaaacactattgacgtggctgacacccgttactaatatagtggctgacacctttatcaaggtaatcg

SEQ ID NO: 604657 - DNA, 75 bp, synthetic construct
  source 1..75: mol_type = other DNA
atactcgagggaattagccgatgcgagagctgaaaatgaaactctgcgtgctgatgttgccgttggtcgtaagcg

SEQ ID NO: 604658 - DNA, 75 bp, synthetic construct
  source 1..75: mol_type = other DNA
agagctggaacaggcgaatgccaccattactgacatgcaggtgcgccagcgtgatgttgctgcgctcgatgcaaa

SEQ ID NO: 604659 - DNA, 75 bp, synthetic construct
  source 1..75: mol_type = other DNA
gaaaaagcctttttcgacattcttgctcatatgcgcgataaatatcagttcacctatgacgatgaaaaaatgctg

SEQ ID NO: 604660 - DNA, 75 bp, synthetic construct
  source 1..75: mol_type = other DNA
ttatatattcgtgatcattcggggtgttatgatgcgaccatcgtagatggcaaaaaaggaaaacgttatcatatt

SEQ ID NO: 604661 - DNA, 75 bp, synthetic construct
  source 1..75: mol_type = other DNA
cagttaaccttactcccgccgaagtcgaaggatggagaatatataccgtgggtgagctggttaaagaaatacaaa

SEQ ID NO: 604662 - DNA, 75 bp, synthetic construct
  source 1..75: mol_type = other DNA
aacttattcaattagggaagaaaatgttaccagaaggagtcgatttttttctggatgaatcccctattgactttg

SEQ ID NO: 604663 - DNA, 75 bp, synthetic construct
  source 1..75: mol_type = other DNA
atattaaccgtagtgtctctcagaccatgcaagttgtatgggagacggtagcacaactggatgcttacaaggtta

SEQ ID NO: 604664 - DNA, 75 bp, synthetic construct
  source 1..75: mol_type = other DNA
tggccagtgtgttgaaaattggcgatgaatctgtacctgaatgtgcctgggcgctgacaaatggcagaccagttt

SEQ ID NO: 604665 - DNA, 75 bp, synthetic construct
  source 1..75: mol_type = other DNA
gaccacgggggcgcgaacgatgaccgcctggacgcaggatctcatctatgcaggcgatccggttcattatcatgg

SEQ ID NO: 604666 - DNA, 75 bp, synthetic construct
  source 1..75: mol_type = other DNA
gcgcgcgccaattggtcagtgggaaccttattcggaagagtcactacttggcatcatcgtcaccagcgtctgtcg

SEQ ID NO: 604667 - DNA, 75 bp, synthetic construct
  source 1..75: mol_type = other DNA
ttggcatcatcgtcaccagcgtctgtcgtattaaagtcgcgatgctaaaacctgaacctcccagagatccccata

SEQ ID NO: 604668 - DNA, 75 bp, synthetic construct
  source 1..75: mol_type = other DNA
tcgattcacttcgattctgcctgggtgccgtacacccattttcatccaatctaccagggtaaaagtggtatgagc

SEQ ID NO: 604669 - DNA, 75 bp, synthetic construct
  source 1..75: mol_type = other DNA
ctgagaagctacatgctgtagtcgttgatgaggatgatcataaatattcgctaccaagtgacctgatgaatcctt

SEQ ID NO: 604670 - DNA, 75 bp, synthetic construct
  source 1..75: mol_type = other DNA
gctggacacacctgtggcacaacgatgaactcgatggtagtcgctggcataaacagcagcacggcttcctgagtc

SEQ ID NO: 604671 - DNA, 75 bp, synthetic construct
  source 1..75: mol_type = other DNA
tgtgattaccttgaccgtcagtatatgttgggcgacagcgtgatggtcgcgccggtgttcactgaagcgggcgat

SEQ ID NO: 604672 - DNA, 75 bp, synthetic construct
  source 1..75: mol_type = other DNA
ccttcgtctctacctttatttttggataaacgtattaaatacttttattcctcaaaaactatgtcaattgtcgat

SEQ ID NO: 604673 - DNA, 75 bp, synthetic construct
  source 1..75: mol_type = other DNA
tgatcgggtttatatttttgaaaacggcggcgataaaaaagtttacctttcttccgccgactggatgacacgcaa

SEQ ID NO: 604674 - DNA, 75 bp, synthetic construct
  source 1..75: mol_type = other DNA
tattgattatcgtattgaagtagcgacgccactactcgatccacgcctgaagcagcgagtactggacatcatcga

SEQ ID NO: 604675 - DNA, 75 bp, synthetic construct
  source 1..75: mol_type = other DNA
ttctgcttcccgtgatactgctgccccacacagcgatggcaaacaccctattcgatatgatcaaaaccgttggcg

SEQ ID NO: 604676 - DNA, 75 bp, synthetic construct
  source 1..75: mol_type = other DNA
taaaaaacaatctttgtggataaggttgatttcaaaagtaaaaaattttaagaagcttagcctcatagaattgat

SEQ ID NO: 604677 - DNA, 75 bp, synthetic construct
  source 1..75: mol_type = other DNA
gaacagaaaattggttcgatagcgcaagcaatccaatcagtagtgaggaatggctccagcttgttgatgatgata

SEQ ID NO: 604678 - DNA, 75 bp, synthetic construct
  source 1..75: mol_type = other DNA
ctaccaagcgacctgatgaatccgtcatgggcgaacacatcatctactgctaaaaatacatctttatggcgctgg

SEQ ID NO: 604679 - DNA, 75 bp, synthetic construct
  source 1..75: mol_type = other DNA
ctgctgtcaattctggtcggcctctgccttgccgtcgtaccggaactgatgggtagcggacagaaaacgctcggt

SEQ ID NO: 604680 - DNA, 75 bp, synthetic construct
  source 1..75: mol_type = other DNA
ttaccaagtgatcttatgaatccatcatgggcgaaatcatcaccgacggataaaaaacaatctttatgggaaaaa

SEQ ID NO: 604681 - DNA, 75 bp, synthetic construct
  source 1..75: mol_type = other DNA
ctaccaagtgatctgatgaatccttcatgggcgaattcatcacctaccgatagaaaacaaactttatggaaaagg

SEQ ID NO: 604682 - DNA, 75 bp, synthetic construct
  source 1..75: mol_type = other DNA
gtagtgcctgatgaaatggatttgcttacctgccatctcgacggtgtaactaaaacatatgctgatggctggaac

SEQ ID NO: 604683 - DNA, 75 bp, synthetic construct
  source 1..75: mol_type = other DNA
tcggttgtcggcagtggacggcgcatttacggcagatgtggaagacgctctggacgacgagtccgtcacagagga

SEQ ID NO: 604684 - DNA, 75 bp, synthetic construct
  source 1..75: mol_type = other DNA
gcgcgtatggaagtggtgccgtatctgccgctgtcgaaagagacgctcgccaccattatcgccggaaaactggcc

SEQ ID NO: 604685 - DNA, 75 bp, synthetic construct
  source 1..75: mol_type = other DNA
ttgcggcggtgattgccgaatggaccggcgtgccgcttaaccgcctgtcgcagaatgaaatgtcggtcatcaccg

SEQ ID NO: 604686 - DNA, 75 bp, synthetic construct
  source 1..75: mol_type = other DNA
gaacaggataataccggtgctaaactggctgatgaagctggcagcgaacagccggaagagaccgcagaaacagtt

SEQ ID NO: 604687 - DNA, 75 bp, synthetic construct
  source 1..75: mol_type = other DNA
gagtcagagtcagagtcagagtcagagtcagagtcagagtcagagtcagagtcagagtcagagtcagagtcagag

SEQ ID NO: 604688 - DNA, 75 bp, synthetic construct
  source 1..75: mol_type = other DNA
acgctgccgaagccaccattattctgcgcggtttgtcggcggtctatgaacaatctcacggcgtgctgattgatg

SEQ ID NO: 604689 - DNA, 75 bp, synthetic construct
  source 1..75: mol_type = other DNA
attgccggcgaaaccaacatgttttccgactgggcggcctcccgtcagggctgcacagttggaggccaaagtgac

SEQ ID NO: 604690 - DNA, 75 bp, synthetic construct
  source 1..75: mol_type = other DNA
ggcattcagtatgatcagcggtgaggaaatccagcgattcgtgaagcaaatcatgagcaacgccgccggctatgc

SEQ ID NO: 604691 - DNA, 75 bp, synthetic construct
  source 1..75: mol_type = other DNA
gtcgttgaccgtcagatgagttacatgcgccagcagttgtccgcccgcatgctcagccgttaccagaacaattat

SEQ ID NO: 604692 - DNA, 75 bp, synthetic construct
  source 1..75: mol_type = other DNA
tattttttgtggtggcgttgttttacctgttctatctgttgcggctggacagccagacgcaggacatcctgcacc

SEQ ID NO: 604693 - DNA, 75 bp, synthetic construct
  source 1..75: mol_type = other DNA
atgaacagccagacgatgccggagcatctttttgctcaggtggtgacggatgttcaggccgtggagcaactgctt

SEQ ID NO: 604694 - DNA, 75 bp, synthetic construct
  source 1..75: mol_type = other DNA
gcacaggggataatcggcgggcttttcccccggacgcaggtgtcccagcagaaagtctgtcaggacattgccggt

SEQ ID NO: 604695 - DNA, 75 bp, synthetic construct
  source 1..75: mol_type = other DNA
accaccatcaatatgtccgagttccaggaaaaacacaccgtctcgcggctgattggctcccctccgggctatgtc

SEQ ID NO: 604696 - DNA, 75 bp, synthetic construct
  source 1..75: mol_type = other DNA
tatttttctgctatttcttttctgcagagagatattatcagtatagaaacagaaaccaacaacatgaggatatta

SEQ ID NO: 604697 - DNA, 75 bp, synthetic construct
  source 1..75: mol_type = other DNA
agtgtcagggataaagccagcgacaaggataaggagcgggtgaccaaaaacatcaacatcatgtggaatgcgctt

SEQ ID NO: 604698 - DNA, 75 bp, synthetic construct
  source 1..75: mol_type = other DNA
cagctgcagcgttttgttaagcagattatgagtaatgctgccggttacttttttgaccttgccctgcagacaacg

SEQ ID NO: 604699 - DNA, 75 bp, synthetic construct
  source 1..75: mol_type = other DNA
gggatggggaattattgcccagttcgcatattatctggcaggctttccctggtatgaggggaatatcctgtttgc

SEQ ID NO: 604700 - DNA, 75 bp, synthetic construct
  source 1..75: mol_type = other DNA
gcaacaaagagctgaaagagtttgtgatgacgctgaccggctcactggtgtttggtcctaacggcgaaatcacac

SEQ ID NO: 604701 - DNA, 75 bp, synthetic construct
  source 1..75: mol_type = other DNA
ctggttgttgaccgtcagatgagctacatgcgccagcagttgtctgcccgtatgctcagccgttaccagaataat

SEQ ID NO: 604702 - DNA, 75 bp, synthetic construct
  source 1..75: mol_type = other DNA
ctgactgggcggcttcccggcagggatgtaccgttggcgggaaatctgacagcgtcagggataaagccagcgaca

SEQ ID NO: 604703 - DNA, 75 bp, synthetic construct
  source 1..75: mol_type = other DNA
gcctgtcggcggcagacggggcgttcacggcagacgtggaagatgctcagaacgacgagtccgtcacagaggatg

SEQ ID NO: 604704 - DNA, 75 bp, synthetic construct
  source 1..75: mol_type = other DNA
tccgatattcgccacccgccagatggcaaaaacgctgcctgctccgctcaaccgctgggttggcaggctggctga

SEQ ID NO: 604705 - DNA, 75 bp, synthetic construct
  source 1..75: mol_type = other DNA
tcagaacaaggcgctcagtgattctccactggctgagaacgaaaaaaccttcattcagagcaccaccattcctgt

SEQ ID NO: 604706 - DNA, 75 bp, synthetic construct
  source 1..75: mol_type = other DNA
gggtaaaaccgtgtcagatgattttattcatgctgttctcagtaactgcgccacaagaattgtcagccagaacca

SEQ ID NO: 604707 - DNA, 75 bp, synthetic construct
  source 1..75: mol_type = other DNA
aaatgtgaccatcgcccgggataaagccctgaagtcacagattacaaaactgctgaccagtattcagaataaagc

SEQ ID NO: 604708 - DNA, 75 bp, synthetic construct
  source 1..75: mol_type = other DNA
tgccgtttggcaaacagcaagagcgcatcgggattgtggtatcagttagcgatgccagcgaactgccgcttaacg

SEQ ID NO: 604709 - DNA, 75 bp, synthetic construct
  source 1..75: mol_type = other DNA
gcgcctgccttgctgtgccacgactgcggctggattgccgaatgtccacgttgcgatcactactacacgctgcat

SEQ ID NO: 604710 - DNA, 75 bp, synthetic construct
  source 1..75: mol_type = other DNA
cgccagtgcccttcttgcggttccacgcacctggtacccgtggggctgggcaccgaacagcttgaacagacgctc

SEQ ID NO: 604711 - DNA, 75 bp, synthetic construct
  source 1..75: mol_type = other DNA
tggcgcgaccaggttgccacgcttgaatttaatgatgccgcgttgcaggcgctgcgcaaaaaaggtctgtgtgat

SEQ ID NO: 604712 - DNA, 75 bp, synthetic construct
  source 1..75: mol_type = other DNA
gaagtggtgctgcaaacgcaccatccggaacatcctctgttgcaaacattgctctataaaggctacgacgccttt

SEQ ID NO: 604713 - DNA, 75 bp, synthetic construct
  source 1..75: mol_type = other DNA
acacccgctattgcaaacgttgctctataaaggctacgacgcttttgccgaacaggcactggctgagcggcgaat

SEQ ID NO: 604714 - DNA, 75 bp, synthetic construct
  source 1..75: mol_type = other DNA
ttttgaactgccaaccttcgtttgtgtgttgtttgttggcgtgattctgagcaacggtctgtcaatgatgggctt

SEQ ID NO: 604715 - DNA, 75 bp, synthetic construct
  source 1..75: mol_type = other DNA
gtgatgcaaaatgccattggcattggtatggctagcctgttagggcttgatccgctgatggggctgttggccggt

SEQ ID NO: 604716 - DNA, 75 bp, synthetic construct
  source 1..75: mol_type = other DNA
gtactgtttgttggcgtgattctgagcaacggtctgtcaatgatgggcttttaccgcgtctttgagcgtgcggta

SEQ ID NO: 604717 - DNA, 75 bp, synthetic construct
  source 1..75: mol_type = other DNA
gcggggctggctccggcgttaatcacccgtatgcgccagcatttacaggccaacaatcaggttatcctctttctt

SEQ ID NO: 604718 - DNA, 75 bp, synthetic construct
  source 1..75: mol_type = other DNA
cttgtttactggtatatgccaacagtcctgcttcgcggtatttttcataatgttcctgattcgtgtttccggcag

SEQ ID NO: 604719 - DNA, 75 bp, synthetic construct
  source 1..75: mol_type = other DNA
attggtgcagcggttctggtttatttcggaattaaaaaactgaaaaaagggcggggcagctcctggttacgggat

SEQ ID NO: 604720 - DNA, 75 bp, synthetic construct
  source 1..75: mol_type = other DNA
tgatgccggtggggctgggcactgagcagcttgaacagacgcttgcgccgatgttccctggtgtagccatttcac

SEQ ID NO: 604721 - DNA, 75 bp, synthetic construct
  source 1..75: mol_type = other DNA
atttaccattctgaaagaaatgcaggccagttttgagaaaaaccggctcggtactgcccagcaggctgaatacat

SEQ ID NO: 604722 - DNA, 75 bp, synthetic construct
  source 1..75: mol_type = other DNA
ctcagggaccgaagggcgacccgggggagacacaaatacggttccgtctggggccgggaaacattattgagacaa

SEQ ID NO: 604723 - DNA, 75 bp, synthetic construct
  source 1..75: mol_type = other DNA
agaaagcgcacagtcagcggaacaaagcaggatagcggcggaagaggccgtaaaccgaatccccaccgtggtggg

SEQ ID NO: 604724 - DNA, 75 bp, synthetic construct
  source 1..75: mol_type = other DNA
cccggtcaaagccacccaggacaccctgaaccgttgccgtgatactggcgtcatgttcgggcaggcactggctga

SEQ ID NO: 604725 - DNA, 75 bp, synthetic construct
  source 1..75: mol_type = other DNA
ttatgatgactggagtactccttcagagcttggatatgcggggttgaacggcgatattctggtgtggaaccccgt

SEQ ID NO: 604726 - DNA, 75 bp, synthetic construct
  source 1..75: mol_type = other DNA
ttacaggatgcgctcgaaaaatacgagcgggataaacgtgcgcgcgcccgtgccagcatgatgcatgacggttaa

SEQ ID NO: 604727 - DNA, 75 bp, synthetic construct
  source 1..75: mol_type = other DNA
aggtgatgctggtccggcaggcccgcaggggccgaaaggcgacaggggagagcggggagagaccggtctgacggg

SEQ ID NO: 604728 - DNA, 75 bp, synthetic construct
  source 1..75: mol_type = other DNA
gctgcaacatccttcccgcgtgcgcttacagcacatcattaacggtacgctggcgcttattaatacaataccgga

SEQ ID NO: 604729 - DNA, 75 bp, synthetic construct
  source 1..75: mol_type = other DNA
tactacacattgcatcaggcgcagcagcatctgcgctgtcatcactgcgacagccagcgcccagtgccgcgccag

SEQ ID NO: 604730 - DNA, 75 bp, synthetic construct
  source 1..75: mol_type = other DNA
cggcaggcggcagaaagtgcagccgctgcaaagcagtcagaggaagcgtcctcgtcctcggcctctgcggccgct

SEQ ID NO: 604731 - DNA, 75 bp, synthetic construct
  source 1..75: mol_type = other DNA
gcagaggaggcgaagaagaatgccggagaagcagagacgtccgcgaggaatgccggcatatcagccagtaaggcg

SEQ ID NO: 604732 - DNA, 75 bp, synthetic construct
  source 1..75: mol_type = other DNA
agcatggatgtcgagtatggccagtacagcgttatcctgctggttgaaggttttccgccttcacatgccgggacc

SEQ ID NO: 604733 - DNA, 75 bp, synthetic construct
  source 1..75: mol_type = other DNA
ataaattcctcccgtgttgcagcaaggatgcttgttgagcctcatattggcgagtttcttactcgttaccccaaa

SEQ ID NO: 604734 - DNA, 75 bp, synthetic construct
  source 1..75: mol_type = other DNA
ccttcagtcccctgatgaaggcgtctatgaactggcgtttgataatgccagtaaaaaggtgtttgcagcagtcac

SEQ ID NO: 604735 - DNA, 75 bp, synthetic construct
  source 1..75: mol_type = other DNA
aaaacaccatcatacactaaatcagtaagttggcagcatcacctggctacgctattaggtagcgcactatttgcc

SEQ ID NO: 604736 - DNA, 75 bp, synthetic construct
  source 1..75: mol_type = other DNA
cgctggaatttggtaaaaaactgggtaatgctgccgccgattattttattgccaataaaattgaccagccgaaaa

SEQ ID NO: 604737 - DNA, 75 bp, synthetic construct
  source 1..75: mol_type = other DNA
tggcgggcggggtggtgatcctgcgttccggcaaaaacgcccgtgaagtgatcgccgccgtgaaggacaaactgg

SEQ ID NO: 604738 - DNA, 75 bp, synthetic construct
  source 1..75: mol_type = other DNA
caaatcacaagtgtgcagaatctggcggtggactccgcttctgaccgtgcctttgtggtggtattcgaccatgac

SEQ ID NO: 604739 - DNA, 75 bp, synthetic construct
  source 1..75: mol_type = other DNA
cagattcgctgaaagtcgaaaataaatacacgatgccataccgggcattttcgctggcgataaatcaggataaac

SEQ ID NO: 604740 - DNA, 75 bp, synthetic construct
  source 1..75: mol_type = other DNA
gcgagcggcagcagatgttgccagtagggtgagcggagtgaagcgggtcacgacggccttctcctatatccggtg

SEQ ID NO: 604741 - DNA, 75 bp, synthetic construct
  source 1..75: mol_type = other DNA
gctaacagccgtgtttattttaataatgatccacgtgcaatcattggcttaaataaaaaggaagtcaaaaatgtc

SEQ ID NO: 604742 - DNA, 75 bp, synthetic construct
  source 1..75: mol_type = other DNA
gcgtcatattttataagtgttttcagaagatattttggtgttcccccccatgaatattcatcaagatttttttag

SEQ ID NO: 604743 - DNA, 75 bp, synthetic construct
  source 1..75: mol_type = other DNA
taaaaatagtatgctttaacgggagactgactatgggtgctgttagttcccctgtggtaagcaatgctatatgct

SEQ ID NO: 604744 - DNA, 75 bp, synthetic construct
  source 1..75: mol_type = other DNA
agcaaacattggctattgattacactggcagtatggtaataacagcatgcccggggagtggtaagactacggtta

SEQ ID NO: 604745 - DNA, 75 bp, synthetic construct
  source 1..75: mol_type = other DNA
tacttaagaaattagattctccatataaatattacttaaaggaggatttttttggaacaccatcaattgttaatg

SEQ ID NO: 604746 - DNA, 75 bp, synthetic construct
  source 1..75: mol_type = other DNA
gatcgcagtcagctcattgaccgcgccattgacaacctcagcggcaagttgctggaagagtttattgtggtggcg

SEQ ID NO: 604747 - DNA, 75 bp, synthetic construct
  source 1..75: mol_type = other DNA
ccggcctctctggttccggtaaatcaaccgtcgcgggggcgctggaggaggcgttacataaacttggcgtcagta

SEQ ID NO: 604748 - DNA, 75 bp, synthetic construct
  source 1..75: mol_type = other DNA
ctcaatggtgaacaattagtaacaaatttggttcagcaattattagatctactgagacagaacgatattatcaga

SEQ ID NO: 604749 - DNA, 75 bp, synthetic construct
  source 1..75: mol_type = other DNA
atcatcggtgcaattggtcttgtagcctggccggttatcaccggcatcaatgccatcatcgcggcagcaggcgca

SEQ ID NO: 604750 - DNA, 75 bp, synthetic construct
  source 1..75: mol_type = other DNA
cacgggtgagaatgccctctaaagttcgtgcttttatcgattttatggtggagaaaagaatagaaatcgaaaatt

SEQ ID NO: 604751 - DNA, 75 bp, synthetic construct
  source 1..75: mol_type = other DNA
atgcgggtaaattacagccgattcttcaggactggtccgtttcatttcctgggttttatatttatgtctcttcgc

SEQ ID NO: 604752 - DNA, 75 bp, synthetic construct
  source 1..75: mol_type = other DNA
ggttttagcgatgccgaccgtaaagagaatatccgtcgcgtcggtgaagtggcgaatttgatggttgaagccgga

SEQ ID NO: 604753 - DNA, 75 bp, synthetic construct
  source 1..75: mol_type = other DNA
gccagtctcgcgcgaccagatcaaacctgagcacttcaaaaactgggttgaatgggcgaaagccaatcagctcgg

SEQ ID NO: 604754 - DNA, 75 bp, synthetic construct
  source 1..75: mol_type = other DNA
actggtaattatccgggcaaagcgcgtaatgccagtgagctacgagccgatctggaacaggctatgcggctgatt

SEQ ID NO: 604755 - DNA, 75 bp, synthetic construct
  source 1..75: mol_type = other DNA
aaggcggggcggaaggtcgctatcgggtgctgaaaaatattatgggcttatggctgcttcagcgggtgcttcagg

SEQ ID NO: 604756 - DNA, 75 bp, synthetic construct
  source 1..75: mol_type = other DNA
agatttctcgcaactgcatattgtcggcggcggcagccagaacgcactactcaaccagttgtgcgccgatgcctg

SEQ ID NO: 604757 - DNA, 75 bp, synthetic construct
  source 1..75: mol_type = other DNA
tgggatgtggatagccttgagagcgccattcgccttgggctaaacaaggtttgtgaggaagggattcgtatcgat

SEQ ID NO: 604758 - DNA, 75 bp, synthetic construct
  source 1..75: mol_type = other DNA
cctgaccggcgagatgaactgggagtataccaacgccaccaccacgcaactggtcaatatcaacagcgacgactg

SEQ ID NO: 604759 - DNA, 75 bp, synthetic construct
  source 1..75: mol_type = other DNA
tcatattccgtccgctcaaagaacgcatcccggcagacttatatattgtttatgaaacgcagcaggtgacgcccg

SEQ ID NO: 604760 - DNA, 75 bp, synthetic construct
  source 1..75: mol_type = other DNA
cgtaaaccgaatccccaccgtggtggggccacccggaccaaagggagaaccgggggcccgcgggtcctcaggggc

SEQ ID NO: 604761 - DNA, 75 bp, synthetic construct
  source 1..75: mol_type = other DNA
catgacggaggatgatgcccgtccggaggctctgcgtcgttttgaacagatggtggaagaagcagcgcgtcacgc

SEQ ID NO: 604762 - DNA, 75 bp, synthetic construct
  source 1..75: mol_type = other DNA
catgacggaggaggatgcccggccggaggcactgcgccgttttgaacagatggtggaagaggcagcgcgtcacgc

SEQ ID NO: 604763 - DNA, 75 bp, synthetic construct
  source 1..75: mol_type = other DNA
ctcaaaaaagcgcggcagctaccagtgccgctgcggcgaaaacgtcagaaacgaatgcggcagcgtcacaacaat

SEQ ID NO: 604764 - DNA, 75 bp, synthetic construct
  source 1..75: mol_type = other DNA
atggacgttgagtacggtcagtacagcgttattctgttggtggagggattcccgccgtcacagccgggattatca

SEQ ID NO: 604765 - DNA, 75 bp, synthetic construct
  source 1..75: mol_type = other DNA
cggcatatcagccagtcaggcagaagagagcgctgcaaatgctgacacttcagcaggggaggcatcggagtcagc

SEQ ID NO: 604766 - DNA, 75 bp, synthetic construct
  source 1..75: mol_type = other DNA
aacagaaaaagcccgggagtcagcagaaagcgcacagtcagcggaacaaagcaggatagcggcggaagaagccgt

SEQ ID NO: 604767 - DNA, 75 bp, synthetic construct
  source 1..75: mol_type = other DNA
accggacctcagggaccaaagggcgacccgggggagacgcaaatacggttccgtctggggccgggaaacattatt

SEQ ID NO: 604768 - DNA, 75 bp, synthetic construct
  source 1..75: mol_type = other DNA
gaatgattttctcggtgccatgtcggaggatgacgtccggccggaggcaatgcgtcgttttgaactgatggtgga

SEQ ID NO: 604769 - DNA, 75 bp, synthetic construct
  source 1..75: mol_type = other DNA
agaggcgacaggggagagcggggagagaccggtctgacgggaaatgcaggtccacagggtccaaagggagatacc

SEQ ID NO: 604770 - DNA, 75 bp, synthetic construct
  source 1..75: mol_type = other DNA
ccaaagatgccacacgggttcagggtttttttcagcatttgcaggtcaggtttggtgacgggccgtggcaggatg

SEQ ID NO: 604771 - DNA, 75 bp, synthetic construct
  source 1..75: mol_type = other DNA
aacagcgcacaggcggcagcggcctcacagactgcatcggcaaactccgcgactgcagccaaaaaatcagaaacc

SEQ ID NO: 604772 - DNA, 75 bp, synthetic construct
  source 1..75: mol_type = other DNA
aaaggcgacaggggagagcggggagagaccggtctgacgggagatgcaggtccacagggtccaaagggagatacc

SEQ ID NO: 604773 - DNA, 75 bp, synthetic construct
  source 1..75: mol_type = other DNA
cttcagtgccggatacagctacggtaatgacagcagccaatacaattacggcgttaccggcggcgtggttatcca

SEQ ID NO: 604774 - DNA, 75 bp, synthetic construct
  source 1..75: mol_type = other DNA
aaccataacagtagcctgaacgccagttaccgttcaccttatggaaccttcagtgccggatacagttacggtaat

SEQ ID NO: 604775 - DNA, 75 bp, synthetic construct
  source 1..75: mol_type = other DNA
gaaaggcgacaggggagagaccggtctgacgggagctgcaggcccggcagggccacagggaccgaaaggggatac

SEQ ID NO: 604776 - DNA, 75 bp, synthetic construct
  source 1..75: mol_type = other DNA
gtgaacgggggccggcaggtgatgctggtccggcaggcccgcaggggccgaaaggcgacaggggagagaccggtc

SEQ ID NO: 604777 - DNA, 75 bp, synthetic construct
  source 1..75: mol_type = other DNA
gaaatgcaggtccacagggtccaaagggagataccggtgcggcaggcccggctggcccacagggaccgaaaggag

SEQ ID NO: 604778 - DNA, 75 bp, synthetic construct
  source 1..75: mol_type = other DNA
tacagctgctgaatttgatttcaatcatcagcgacttaatttgagcattccccaaattgcactgtaccgtgatgc

SEQ ID NO: 604779 - DNA, 75 bp, synthetic construct
  source 1..75: mol_type = other DNA
gtttacctctttctcagggagtttagtctccaggatttccggggcggttcagaagccacggcaatatatggtttg

SEQ ID NO: 604780 - DNA, 75 bp, synthetic construct
  source 1..75: mol_type = other DNA
tccgcagacagtgaagaggcttcccgccgtaatgcagagtcagccgctgaaaatgccggagtcgccaccacaaaa

SEQ ID NO: 604781 - DNA, 75 bp, synthetic construct
  source 1..75: mol_type = other DNA
tttgccggactggcagtcgataaaaccgatctcacaagcaaaattgaatatatcgcgcccggagaacataaacag

SEQ ID NO: 604782 - DNA, 75 bp, synthetic construct
  source 1..75: mol_type = other DNA
cagttggggtttccggccagcaatggggaattggttacagcctgaattatcaatacagtcgctacacggatcaaa

SEQ ID NO: 604783 - DNA, 75 bp, synthetic construct
  source 1..75: mol_type = other DNA
cagctacggtaatgacagcagccaatacaattacggcgttaccggcggcgtggttatcctgatcttacccagcaa

SEQ ID NO: 604784 - DNA, 75 bp, synthetic construct
  source 1..75: mol_type = other DNA
tcagcccggcaggcggcagaaagtgcagcctcagcaaagcagtcagaggatgcgtcctcgtcctcggcttctgcg

SEQ ID NO: 604785 - DNA, 75 bp, synthetic construct
  source 1..75: mol_type = other DNA
ccacagggaccgaaaggagaaacaggtgcggctggcccggtgggggcaaccggacctcaggggccgaagggcgac

SEQ ID NO: 604786 - DNA, 75 bp, synthetic construct
  source 1..75: mol_type = other DNA
agggaccgaaaggagaaacaggtgtggctggcccgggaggggcaaccggacctcaggggccgaagggcgacccgg

SEQ ID NO: 604787 - DNA, 75 bp, synthetic construct
  source 1..75: mol_type = other DNA
ttcagggtttttttcagcatttgcaggtcaggtttggtgacgggccgtggcaggatgttaaggggcttgatgaag

SEQ ID NO: 604788 - DNA, 75 bp, synthetic construct
  source 1..75: mol_type = other DNA
cgtaaaccgaatccccaccgtggtggggcctcccggaccaaagggggaaccgggtcccgcgggtcctcaggggcc

SEQ ID NO: 604789 - DNA, 75 bp, synthetic construct
  source 1..75: mol_type = other DNA
ggcaatcccacttgggatgacggtgatggcgaagacctgcatctcaaagaagtaacccactggatgccgctacca

SEQ ID NO: 604790 - DNA, 75 bp, synthetic construct
  source 1..75: mol_type = other DNA
atggacgttgagtacggacagtacagcgtcagtctgttggtggagggatttccgccgtcacacgccgggattatc

SEQ ID NO: 604791 - DNA, 75 bp, synthetic construct
  source 1..75: mol_type = other DNA
tcagcaggatatgcatcggagtcagcccggcaggcggcagaaagtgcagcctcagcaaagcagtcagaggaggcg

SEQ ID NO: 604792 - DNA, 75 bp, synthetic construct
  source 1..75: mol_type = other DNA
actggccggaaatatggcctcagtgggcgctgccggtgtggggattgcggcggcgggaacgatggccggagttaa

SEQ ID NO: 604793 - DNA, 75 bp, synthetic construct
  source 1..75: mol_type = other DNA
cccgccgtcacatgccgggaccatcaccgtgtatgaagattctcaaccgggtacgctgaatgattttctcggtgc

SEQ ID NO: 604794 - DNA, 75 bp, synthetic construct
  source 1..75: mol_type = other DNA
agaggaggcgaagaagaatgccggagaggcagagacgtccgcgaggaatgccggcatatcagccagtcaggcaga

SEQ ID NO: 604795 - DNA, 75 bp, synthetic construct
  source 1..75: mol_type = other DNA
tccggatgaggcagggcgttacagcatggacgtcgagtatggtcagtacagcgtcactctgttggtggagggatt

SEQ ID NO: 604796 - DNA, 75 bp, synthetic construct
  source 1..75: mol_type = other DNA
tgaccccaaagatgccacacgggttcagggtttttttcagcatttgcaggtcaggtttggtgacgggccgtggca

SEQ ID NO: 604797 - DNA, 75 bp, synthetic construct
  source 1..75: mol_type = other DNA
ataatatgatgagcgctgtcacaacagcatcagaggatacgtcctcgtcctcggcttctgcggccgctcaaaaag

SEQ ID NO: 604798 - DNA, 75 bp, synthetic construct
  source 1..75: mol_type = other DNA
gacaccggccctgtcggggcaaccggcgaacggggaccgagaggagatacaggtccggcaggcccgcaggggccg

SEQ ID NO: 604799 - DNA, 75 bp, synthetic construct
  source 1..75: mol_type = other DNA
ttcaaaaagcgcggcagccaccagtgccggtgcagcgaaaacgtcagaaacgaatgccgcagcatcacaaaaatc

SEQ ID NO: 604800 - DNA, 75 bp, synthetic construct
  source 1..75: mol_type = other DNA
aggggcccgcgggtcctcaggggccgaagggagataaaggagagcgtggcgacaccggcccggcaggggcaaccg

SEQ ID NO: 604801 - DNA, 75 bp, synthetic construct
  source 1..75: mol_type = other DNA
gcgaacggggaccggcaggtgatgctggtccggcaggcccgcaggggccgaaaggtgacaggggagagaccggtc

SEQ ID NO: 604802 - DNA, 75 bp, synthetic construct
  source 1..75: mol_type = other DNA
gccagacggaccagcagcacggtggtggtgaacacggtggcctctgaaaatccggatgaggcagggcgttacagc

SEQ ID NO: 604803 - DNA, 75 bp, synthetic construct
  source 1..75: mol_type = other DNA
aacagccatggctggttcccgggtacagatggtgcgctcatcaccggactgacctttcttgaccccaaagatgcc

SEQ ID NO: 604804 - DNA, 75 bp, synthetic construct
  source 1..75: mol_type = other DNA
atggtggaagaggtggcgcgtcacgctgaggaggcgaagaagaatgccggagaggcggagacgtcagcgaggaat

SEQ ID NO: 604805 - DNA, 75 bp, synthetic construct
  source 1..75: mol_type = other DNA
ttcccgggtacagatggtgcgctcatcaccggactgacctttcttgaccccaaagatgccacacaggttcagggg

SEQ ID NO: 604806 - DNA, 75 bp, synthetic construct
  source 1..75: mol_type = other DNA
tgaccccaaagatgccacacggattcaggggttttttcagcatttgcaggtcagatttggcgacgggccgtggca

SEQ ID NO: 604807 - DNA, 75 bp, synthetic construct
  source 1..75: mol_type = other DNA
catcgacacttatatccgcagcggcctttatccaccgccatcgctacccagcggattaggcaccgaagcggctgg

SEQ ID NO: 604808 - DNA, 75 bp, synthetic construct
  source 1..75: mol_type = other DNA
ctggatggagattcgtcgccgacgatctctgctgatagccaatccacttatccgatagtattaagcctgaaagat

SEQ ID NO: 604809 - DNA, 75 bp, synthetic construct
  source 1..75: mol_type = other DNA
tccggctacgttgctggcgaacatgtacatgaagcccagtgtttgggcgttgttaaacacggcataatccacagc

SEQ ID NO: 604810 - DNA, 75 bp, synthetic construct
  source 1..75: mol_type = other DNA
caaaaagcgcaaagtgcgttaaaagcaggggcgtggcaggtgattaactatcgagaagaaaatctggtcgagcgg

SEQ ID NO: 604811 - DNA, 75 bp, synthetic construct
  source 1..75: mol_type = other DNA
tgtgaacttaggcattctcaatcagaaaggctcgttgtatgtgacacgcccttccctgcaaggctatatcaccac

SEQ ID NO: 604812 - DNA, 75 bp, synthetic construct
  source 1..75: mol_type = other DNA
cggtgtgattaaggtcgatgtcgccgagcagcagaaatatccgctgaaggatgcgcagcgtgcgcatgagattct

SEQ ID NO: 604813 - DNA, 75 bp, synthetic construct
  source 1..75: mol_type = other DNA
agacaaagccatcgcagcgttacaggtgctcccggacaccccgtggagagaagcactcgtcggcctcgcgcacat

SEQ ID NO: 604814 - DNA, 75 bp, synthetic construct
  source 1..75: mol_type = other DNA
aacgtcggggacgatctgaacgaaggtaaaccaacgttaccgctgctgcatgcaatgcatcatggcacaccggaa

SEQ ID NO: 604815 - DNA, 75 bp, synthetic construct
  source 1..75: mol_type = other DNA
gccgcgtttggcaatgctgccagcgtgttggttggtgattttatttatacccgcgctttccagatgatgaccagc

SEQ ID NO: 604816 - DNA, 75 bp, synthetic construct
  source 1..75: mol_type = other DNA
agttaggctattacatcgtcagcggcgggggtaaacgcattcgcccgatgattgctgtactggctgcacgagctg

SEQ ID NO: 604817 - DNA, 75 bp, synthetic construct
  source 1..75: mol_type = other DNA
aaatcaatgagttaaccgcgcaagatatggcgggtgttaatgcggcaatccttgagcagcttaattccgacgtcc

SEQ ID NO: 604818 - DNA, 75 bp, synthetic construct
  source 1..75: mol_type = other DNA
ttgagcaaggtaatggtcgccatctactggaaccggttctggaagcaatgaacgcttgtggttctctggaatgga

SEQ ID NO: 604819 - DNA, 75 bp, synthetic construct
  source 1..75: mol_type = other DNA
gtgagtgagaaaggattttctttaattgaaagtgtggtagtaataatgctttcaactgtcattgttatgggaata

SEQ ID NO: 604820 - DNA, 75 bp, synthetic construct
  source 1..75: mol_type = other DNA
gagaccgatgacgcatacgtggcagggaatcagattcaaattatgtctcaggtgtctggcagcgtgacgaaagtc

SEQ ID NO: 604821 - DNA, 75 bp, synthetic construct
  source 1..75: mol_type = other DNA
ccaggttgaacaactgatgacgctggcggagaaatttgacgttgagtacgacggttggggcacttactttgaaga

SEQ ID NO: 604822 - DNA, 75 bp, synthetic construct
  source 1..75: mol_type = other DNA
cgatgagcgtcaacacctatcgccaatttcagattcagaacgagaagaagctcgagaatatatcatcgcgatact

SEQ ID NO: 604823 - DNA, 75 bp, synthetic construct
  source 1..75: mol_type = other DNA
atgaaggtaaaaacactgcgtatgccagagaagctagaaaaaattcttgaagaaaaagcaaaggaagagtgtcgc

SEQ ID NO: 604824 - DNA, 75 bp, synthetic construct
  source 1..75: mol_type = other DNA
caggctgccaccgaagtacgtaacgcctggctggcgctggagcgtacccgtattgtcagtccgatgaccggttat

SEQ ID NO: 604825 - DNA, 75 bp, synthetic construct
  source 1..75: mol_type = other DNA
caggcaaatattgaggtgcagaaaatcgccctcgccaaagcacaaagcgactacaaccgccgcgtgccgctgggt

SEQ ID NO: 604826 - DNA, 75 bp, synthetic construct
  source 1..75: mol_type = other DNA
gcgcgatgttaagtgagatcattaccgaggaccgcgaacatctgtcattaattcaacgacatggctggcagggaa

SEQ ID NO: 604827 - DNA, 75 bp, synthetic construct
  source 1..75: mol_type = other DNA
ttggacagattaccggacgtttactgctctccagcggggtgaaaatggtggtgctcgatcacgatccggaccata

SEQ ID NO: 604828 - DNA, 75 bp, synthetic construct
  source 1..75: mol_type = other DNA
attattgcccgcgcccgcgatgtcgaccactacattcgtttgcgtcaggcaggcgttgaaaagccggagcgtgaa

SEQ ID NO: 604829 - DNA, 75 bp, synthetic construct
  source 1..75: mol_type = other DNA
cgccgcttgaagtgctggaatacatcatttcaaacggtgtcactgaggcgttagcaggcggaggtcaatatggcc

SEQ ID NO: 604830 - DNA, 75 bp, synthetic construct
  source 1..75: mol_type = other DNA
ctatgcgccttcatcgctatatcagaataatgtgggcgtgactattgctgcggatcaccctggtcgcgaagttat

SEQ ID NO: 604831 - DNA, 75 bp, synthetic construct
  source 1..75: mol_type = other DNA
ggagtgcagaaaaattgtttctacccttaatcggcttggcgctcattgtggacttgacgatgtattccccccccc

SEQ ID NO: 604832 - DNA, 75 bp, synthetic construct
  source 1..75: mol_type = other DNA
cgccaatccgtatctggggcacgattggatttattgtcgcaatgtgggcggttagcctggctggttttgaattaa

SEQ ID NO: 604833 - DNA, 75 bp, synthetic construct
  source 1..75: mol_type = other DNA
tcaacacaatgtgtaaaaaaaagccgtggtcgcccaaaagtgttcgacagggatgccgcgcttgataaggccatg

SEQ ID NO: 604834 - DNA, 75 bp, synthetic construct
  source 1..75: mol_type = other DNA
ctacactttcggcgcgtatcgaaagggccataaaaacctggcagggcgaacagcccaaaagtgaacaaggttatg

SEQ ID NO: 604835 - DNA, 75 bp, synthetic construct
  source 1..75: mol_type = other DNA
accatttcgaggagatcctcgatatggtcaaaattggctcaaatgccaaaagagcattaaaagacatcgtactct

SEQ ID NO: 604836 - DNA, 75 bp, synthetic construct
  source 1..75: mol_type = other DNA
tatggcgatccttcattcggcggtaccattctgttaattctttcgatgattgtttatggttgtgcttttgacttc

SEQ ID NO: 604837 - DNA, 75 bp, synthetic construct
  source 1..75: mol_type = other DNA
tttctcagatttccgaagtttgtttcattcttgccattcccttttttctgaagaaatatggcattaaaaatgtca

SEQ ID NO: 604838 - DNA, 75 bp, synthetic construct
  source 1..75: mol_type = other DNA
acaacgctacttctttgttcgaaattgagagtattaccgttggatatcctgggtcagatcaatttaaacaggcgt

SEQ ID NO: 604839 - DNA, 75 bp, synthetic construct
  source 1..75: mol_type = other DNA
ggataccaattcctgtacgaaggcgatgagcttaaatgctatgaacatggtcttcttatcgaaagcgtagaataa

SEQ ID NO: 604840 - DNA, 75 bp, synthetic construct
  source 1..75: mol_type = other DNA
atcgagcatgtatttccgacctatgctgatgagcaatgtgtccttaccgaagaggattttttcagcactgaagaa

SEQ ID NO: 604841 - DNA, 75 bp, synthetic construct
  source 1..75: mol_type = other DNA
aggttttcgctaccgtaactatatcgacatctttgacggtgggccgacgcttgagtgtgacatcgaccgcgtgcg

SEQ ID NO: 604842 - DNA, 75 bp, synthetic construct
  source 1..75: mol_type = other DNA
tggttgccgaaatgcgcggggtgattgacgaacacggctattcaccgttctggcaaagcctcggtaaacgcttct

SEQ ID NO: 604843 - DNA, 75 bp, synthetic construct
  source 1..75: mol_type = other DNA
ctgacgtcgcttcccgccaatgaagccacgctttcggcgcgtatcgaaagggcaatcaaaacctggcaaggcgaa

SEQ ID NO: 604844 - DNA, 75 bp, synthetic construct
  source 1..75: mol_type = other DNA
acataacaaacaattggttgaggcagcacagcaagctggggtagcgacagctatcgatttcgccatatttcagaa

SEQ ID NO: 604845 - DNA, 75 bp, synthetic construct
  source 1..75: mol_type = other DNA
ttggtattttcttcatttactttattagctggatgcaattaaaatgcgttatgagcctgattttgagtaatttac

SEQ ID NO: 604846 - DNA, 75 bp, synthetic construct
  source 1..75: mol_type = other DNA
tatagctgcagtcgggactttgctgcttcaaccggtctggtaccccggcagtacagcacaggtggtaaaaatacc

SEQ ID NO: 604847 - DNA, 75 bp, synthetic construct
  source 1..75: mol_type = other DNA
cgatcaccgttgacgcgatgatcccgaactttaactgggcgttcctcggcgttactacctggatctttatggccg

SEQ ID NO: 604848 - DNA, 75 bp, synthetic construct
  source 1..75: mol_type = other DNA
ctccctgggtctgaaacagtgcaaagctaacccgtggcagcagttcgcggaaacccacaataagggcgaccgtgt

SEQ ID NO: 604849 - DNA, 75 bp, synthetic construct
  source 1..75: mol_type = other DNA
aacccgcccgggttctatcgttcgtggcgttgttgttgctatcgacaaagatgtagtactggttgacgctggtct

SEQ ID NO: 604850 - DNA, 75 bp, synthetic construct
  source 1..75: mol_type = other DNA
acaaaaaaggcgacgaaatcgctgcagttgttctgcaggttgacgcagaacgtgaacgtatctccctgggcgtta

SEQ ID NO: 604851 - DNA, 75 bp, synthetic construct
  source 1..75: mol_type = other DNA
attccaccggtacggaaattgctggcaataacgggaaggtgattcaggacggcgatctggatgtcagcggcggcg

SEQ ID NO: 604852 - DNA, 75 bp, synthetic construct
  source 1..75: mol_type = other DNA
agaaaaataccaatgtgacttgtccggcagacccaggaaaactcagtccggaagagcttaaacgcttaccctctg

SEQ ID NO: 604853 - DNA, 75 bp, synthetic construct
  source 1..75: mol_type = other DNA
acggcgaccaggcggttgttaacaacgaaggcgagagcgccatcaccaacggtggcaccggcacgcagattaacg

SEQ ID NO: 604854 - DNA, 75 bp, synthetic construct
  source 1..75: mol_type = other DNA
tcaacagcagaaaatcagggtaaaattacactggattctatgtgggtagatgcaaatgacactaccgcaatgcga

SEQ ID NO: 604855 - DNA, 75 bp, synthetic construct
  source 1..75: mol_type = other DNA
actatggtacaatctgcactttcggcgtgtgccaatcggggaatgagtacaataatacagatgatttcacctcac

SEQ ID NO: 604856 - DNA, 75 bp, synthetic construct
  source 1..75: mol_type = other DNA
cgccaccgcgaataacagtggaaaaaccactgttgatggaaaagattccacgggtaccaaaatcgcgggcaatat

SEQ ID NO: 604857 - DNA, 75 bp, synthetic construct
  source 1..75: mol_type = other DNA
tgcatcatcagggggaacattacaacctgtcattaggcgtgcggaactcgtggtacacctcgttaacctcaatcc

SEQ ID NO: 604858 - DNA, 75 bp, synthetic construct
  source 1..75: mol_type = other DNA
tgcatgtcagatgaataatattaaaggtaattcaggtggttcattttcgtcatctaactcaggtgtcggtatcca

SEQ ID NO: 604859 - DNA, 75 bp, synthetic construct
  source 1..75: mol_type = other DNA
tgcctggaagtgctctgttatagcctggtgattaatcatttcagctttgggatttttgatcatgctccggtgatt

SEQ ID NO: 604860 - DNA, 75 bp, synthetic construct
  source 1..75: mol_type = other DNA
gaacgttggggagttttccagtgattcgcaatttaccgcgggtgcttactggaccaatcaacaggatgattacaa

SEQ ID NO: 604861 - DNA, 75 bp, synthetic construct
  source 1..75: mol_type = other DNA
tgagtttatatgtgaacgcattcaactccttgatgcaagccgcacaaaagatacaggtttcatagcagagttgcg

SEQ ID NO: 604862 - DNA, 75 bp, synthetic construct
  source 1..75: mol_type = other DNA
taatttttgacgcgatgaaaaataataaaacggtcaacatccttggtagttataagattaggtctggtgtgatag

SEQ ID NO: 604863 - DNA, 75 bp, synthetic construct
  source 1..75: mol_type = other DNA
cgaatacttttttagtgctccggagctttttgcgcctcgcttcccctcgctgtggcaacgtttctgccaatttta

SEQ ID NO: 604864 - DNA, 75 bp, synthetic construct
  source 1..75: mol_type = other DNA
gtggaagcgggcgaagtggtatcgattgttggcctgcttggtgcggggcgcacggaattatgtctgagtctgttt

SEQ ID NO: 604865 - DNA, 75 bp, synthetic construct
  source 1..75: mol_type = other DNA
gtatttcagtgttgaaagatggtgagctggtcgggacctttccggccgcagagatgaccacaaaacaactcagtt

SEQ ID NO: 604866 - DNA, 75 bp, synthetic construct
  source 1..75: mol_type = other DNA
gtcgttagctcgtgttattaaagattttagcgaactcggttacaatgttagctataaactttataattcagctaa

SEQ ID NO: 604867 - DNA, 75 bp, synthetic construct
  source 1..75: mol_type = other DNA
ggctgattggtgtcgatgcaattcgtggggctgcaatgcgagtaatcggtaacaaatttggtagctcgaaggagt

SEQ ID NO: 604868 - DNA, 75 bp, synthetic construct
  source 1..75: mol_type = other DNA
aagaaaccgcccatgatgatgcaattccgtggaaggaagctttggcgatacctcttttgacatgtttgactgagc

SEQ ID NO: 604869 - DNA, 75 bp, synthetic construct
  source 1..75: mol_type = other DNA
ctgcgaatggcgaaaacacgctggagaatcaaatagccagcacttcgcagcgagttggcactctgctttcacaag

SEQ ID NO: 604870 - DNA, 75 bp, synthetic construct
  source 1..75: mol_type = other DNA
aacgctactctatcgactactccaacacggcctggggctcagatgtcgatttctccgttttccaggcacaaaacg

SEQ ID NO: 604871 - DNA, 75 bp, synthetic construct
  source 1..75: mol_type = other DNA
ggagatgcaacgattaagccgggtaatggtattgagcaagcaactcactggatgccgctaccggaaccgccgcag

SEQ ID NO: 604872 - DNA, 75 bp, synthetic construct
  source 1..75: mol_type = other DNA
tcacgtcgctacattatccgcaacgaataatgacgtttacgccgataaaaagacgtttaataccatcactattaa

SEQ ID NO: 604873 - DNA, 75 bp, synthetic construct
  source 1..75: mol_type = other DNA
atcaagctcgatttcgcggttccggtcgctgacaaagacgagcatggtttacagttttacatcggtctggggcca

SEQ ID NO: 604874 - DNA, 75 bp, synthetic construct
  source 1..75: mol_type = other DNA
tggtgccgtttaaagaaggcgatgagtacgaatccaaagatctggcggaactgaaccgccgtctctctgccactg

SEQ ID NO: 604875 - DNA, 75 bp, synthetic construct
  source 1..75: mol_type = other DNA
ttgcttgatactcgtccggccattggtacggtactgaatcagggggattatgaaaatttcaaaaagtccttaacc

SEQ ID NO: 604876 - DNA, 75 bp, synthetic construct
  source 1..75: mol_type = other DNA
ttgtctcatcccgcgaccattcatcaataacaatagataacgtatcgtattatgccggagacgacatcaaggtta

SEQ ID NO: 604877 - DNA, 75 bp, synthetic construct
  source 1..75: mol_type = other DNA
gtgcagatgctaaccggtatgaccggaagcgacgctgattccagcccccaactgaccgcctgccgtaaatcactt

SEQ ID NO: 604878 - DNA, 75 bp, synthetic construct
  source 1..75: mol_type = other DNA
ccattacattggttgccggcacggccgatgaaagtaagtcaattttgaaatccgatgttgacactctgaaggctg

SEQ ID NO: 604879 - DNA, 75 bp, synthetic construct
  source 1..75: mol_type = other DNA
gaatcaaatagccagtacttcacagcgagttggcactctgctttcacaaggtatgaatagtgagcaggcgagcag

SEQ ID NO: 604880 - DNA, 75 bp, synthetic construct
  source 1..75: mol_type = other DNA
attcccatgctgaacggggttcatcaggcaaacttaagcgtatcgctgaatctcatccgctcgataaaagaaatg

SEQ ID NO: 604881 - DNA, 75 bp, synthetic construct
  source 1..75: mol_type = other DNA
ggatgaaagttcggcgaaggtaataagtataaccggagccgaaaaaacgataacggttggcgaaaacatcacgct

SEQ ID NO: 604882 - DNA, 75 bp, synthetic construct
  source 1..75: mol_type = other DNA
tgcgctttatcgtggtgtaacgccggtctattttgacagcgcgaatgatggcgtggttgcagccaacgaagcggt

SEQ ID NO: 604883 - DNA, 75 bp, synthetic construct
  source 1..75: mol_type = other DNA
gaaaatcaaccgcgaagaaaacgtgctggacagcgataccaatcaggtggcgatgggtgtgcccggttcgctcag

SEQ ID NO: 604884 - DNA, 75 bp, synthetic construct
  source 1..75: mol_type = other DNA
caaaccacgcaactgaccgcgttgctgaacaatgccgccgggatcgacgcccagcgtggtgacaatctcacctta

SEQ ID NO: 604885 - DNA, 75 bp, synthetic construct
  source 1..75: mol_type = other DNA
ttaccgcgtcagcgtgatgccggatctcgacctcagcaccatcgacgaaacccaggaacactacggcgacgcgcc

SEQ ID NO: 604886 - DNA, 75 bp, synthetic construct
  source 1..75: mol_type = other DNA
cgctcgatccggcgctacgtcaggagatgctgacgctggtgagcacgagctgccagcagcaaaaaatgacgctat

SEQ ID NO: 604887 - DNA, 75 bp, synthetic construct
  source 1..75: mol_type = other DNA
gcgggcgaggcggtctctgccgctacccgtaaacgcgatcagatcctcaaagacattcaggacaaaacccgcgcc

SEQ ID NO: 604888 - DNA, 75 bp, synthetic construct
  source 1..75: mol_type = other DNA
ctttgtgccgcaggcggtgcctgtcgaaccggttattccactgtggaaagatgacagcgtactggcgtgggtgcg

SEQ ID NO: 604889 - DNA, 75 bp, synthetic construct
  source 1..75: mol_type = other DNA
atggcaaacccggaacaactggaagaacagcgtgaagaaacacgtttgattattgaagaattactggaagatggc

SEQ ID NO: 604890 - DNA, 75 bp, synthetic construct
  source 1..75: mol_type = other DNA
atgagcgaacaaatcacgtttgccaccagcgattttgccagtaacccggaaccacgttgcccctgcattttgctg

SEQ ID NO: 604891 - DNA, 75 bp, synthetic construct
  source 1..75: mol_type = other DNA
ggccggttgtttatcgcacggggataatcattattcagttatttgtccccgcaggttctggttcaaaactcatta

SEQ ID NO: 604892 - DNA, 75 bp, synthetic construct
  source 1..75: mol_type = other DNA
cgcgcatgacccttgccgccaaaggcgtgcaggcgatattgcccagcggctacgagctgatggacaaagacgaag

SEQ ID NO: 604893 - DNA, 75 bp, synthetic construct
  source 1..75: mol_type = other DNA
acacagcgaaagcaagcgcgattactcttacgaccgcagcgtccagcatattcagcatcccggctttgcggtgaa

SEQ ID NO: 604894 - DNA, 75 bp, synthetic construct
  source 1..75: mol_type = other DNA
tctggaaaccctggaaaaagcagcagttgaagcgtttaaactcggttacgaagtgaccgatccagaagagctgga

SEQ ID NO: 604895 - DNA, 75 bp, synthetic construct
  source 1..75: mol_type = other DNA
aaatgcacgcgattgcccgtcagatggggattgataatttaatggcgcggttaccgggcgagctttccggcggtc

SEQ ID NO: 604896 - DNA, 75 bp, synthetic construct
  source 1..75: mol_type = other DNA
cgcatttaaagatgtcgctaacgcactggcgcggcggaccacgcttgaagagcaactggatgcacagcgccagta

SEQ ID NO: 604897 - DNA, 75 bp, synthetic construct
  source 1..75: mol_type = other DNA
tatatggccaaactaatgcgtggttattcccgacggtaaatgcggctttaagctcgacccgcagtcgttcgctgg

SEQ ID NO: 604898 - DNA, 75 bp, synthetic construct
  source 1..75: mol_type = other DNA
ccagtgcagaaaactcattgaaaattatccagcgccagcaacaggttggcacggcggcagcgacagatgtcagtg

SEQ ID NO: 604899 - DNA, 75 bp, synthetic construct
  source 1..75: mol_type = other DNA
tggcgcgtgtttgtctgggggccgaaaagatcccgagcatcaacgtttcaaaacaccgtctggacgttcagttcg

SEQ ID NO: 604900 - DNA, 75 bp, synthetic construct
  source 1..75: mol_type = other DNA
tggcgcgcgtttgcctgggtgcggaaaaaatcccgagcatcaacgtttctaaacaccgtctggacgttcagttcg

SEQ ID NO: 604901 - DNA, 75 bp, synthetic construct
  source 1..75: mol_type = other DNA
aaatcgttaccacgttaggcccggctaccgatcgcgataacaaccttgagaaggttatcgccgcgggtgcaaacg

SEQ ID NO: 604902 - DNA, 75 bp, synthetic construct
  source 1..75: mol_type = other DNA
ctggcagcagggtatttacttaatccgcgatatgccggggatgctcaataaactttccgattttgccgccacgtt

SEQ ID NO: 604903 - DNA, 75 bp, synthetic construct
  source 1..75: mol_type = other DNA
actgaattctggagctgcttcgcggtatatctgattattcaggcgctggatggcaacctgttagtaccggtgttg

SEQ ID NO: 604904 - DNA, 75 bp, synthetic construct
  source 1..75: mol_type = other DNA
gcgtaaccgtgggctggcaggtcaggtctggaaggagatgaaccagcaaatcaccaactacatccgtggcaaggt

SEQ ID NO: 604905 - DNA, 75 bp, synthetic construct
  source 1..75: mol_type = other DNA
acaacgcttgaggaaaatctgctaccgggaacactggaaagcctgccggaacaaatgataagtctggttcctgcg

SEQ ID NO: 604906 - DNA, 75 bp, synthetic construct
  source 1..75: mol_type = other DNA
tgttaaagctgaacaacaaacggtcgatattggcctgcgccgctatcaggccggtgtcggtgattacctgaccgt

SEQ ID NO: 604907 - DNA, 75 bp, synthetic construct
  source 1..75: mol_type = other DNA
agttcaacccgcagtcgttcgctggcgaatggtacggaaaccactgccgaggctgacggcacggtgtccagtttt

SEQ ID NO: 604908 - DNA, 75 bp, synthetic construct
  source 1..75: mol_type = other DNA
tgaaggcgttattcaaggtataacagatgatactctatctttgttaacagaagagaatcaacaaaaaatagctcc

SEQ ID NO: 604909 - DNA, 75 bp, synthetic construct
  source 1..75: mol_type = other DNA
gaaagggaatggggtatatcgatgatgcccagagggatgattttggcaatctggcgctcaaagcacaggtagcct

SEQ ID NO: 604910 - DNA, 75 bp, synthetic construct
  source 1..75: mol_type = other DNA
ccaacagcccaaaagatcatggaaaagtcgccagaaggggctaaaaaagctgctggatttgcatacagggttagg

SEQ ID NO: 604911 - DNA, 75 bp, synthetic construct
  source 1..75: mol_type = other DNA
tccctggagtcgcaagggattattcagcggtgtgcatcctgtcgcgaagttcaggatgtgtattacgaatatcgt

SEQ ID NO: 604912 - DNA, 75 bp, synthetic construct
  source 1..75: mol_type = other DNA
atcgctggcgatcatggacgttaaccaaaacgcggtggtcagtgcgatggaaaaaaatcaggcacaatggctgat

SEQ ID NO: 604913 - DNA, 75 bp, synthetic construct
  source 1..75: mol_type = other DNA
ggaaccaattcatatccctgcaatgtctgacgccgtcgaagactcaacaaaatgtaaaaatacgaccacaatagg

SEQ ID NO: 604914 - DNA, 75 bp, synthetic construct
  source 1..75: mol_type = other DNA
tggaattaatacaaacgccaaaaaattaatgagtgttagagaaaacgatgatggcactgtcacaaaatactacac

SEQ ID NO: 604915 - DNA, 75 bp, synthetic construct
  source 1..75: mol_type = other DNA
ggatcaggtaatatttttgtatgtggagatcttgtaaatagcaaagagaataaagttcagttcaatggaaacaat

SEQ ID NO: 604916 - DNA, 75 bp, synthetic construct
  source 1..75: mol_type = other DNA
catttgcggcagcggcgggaattaatcccaatgctaagaaattacttaaggttgaaaccaatcctgatggctcgg

SEQ ID NO: 604917 - DNA, 75 bp, synthetic construct
  source 1..75: mol_type = other DNA
ggcaggatattagccgagcaaatgcgttaacgtcagcatatgcaccaacagcagcaatgcagaattacaatcagt

SEQ ID NO: 604918 - DNA, 75 bp, synthetic construct
  source 1..75: mol_type = other DNA
cgtagtggagttagcgggttttatcgtgacccaagtactagatgaaccggtagccgctgccagcgcgctgaatat

SEQ ID NO: 604919 - DNA, 75 bp, synthetic construct
  source 1..75: mol_type = other DNA
aaggtgggggggatctcggtaccgccaatatcgcaatcgtggtgctggatgaagataaccagtcggtggcagggg

SEQ ID NO: 604920 - DNA, 75 bp, synthetic construct
  source 1..75: mol_type = other DNA
atgaaaactttcgatactcaacttgcgatgagcattgtatcgcactcaacgggaggttttagttatgacacactc

SEQ ID NO: 604921 - DNA, 75 bp, synthetic construct
  source 1..75: mol_type = other DNA
ttatgcgtgcgattttcggttctggctgctttgaaagcggtgataaatccactcaggacaataatgataacgcca

SEQ ID NO: 604922 - DNA, 75 bp, synthetic construct
  source 1..75: mol_type = other DNA
actcattcgtgatgccgttattgaagctcagcaaatcacgcaggctcccctggggcttgtggcagcatctgcctt

SEQ ID NO: 604923 - DNA, 75 bp, synthetic construct
  source 1..75: mol_type = other DNA
cagatgaagccggtattatatttgatggatataccctgtctgagttgccttttattaacaaaatgtgggatggct

SEQ ID NO: 604924 - DNA, 75 bp, synthetic construct
  source 1..75: mol_type = other DNA
aaggaaaaaccacctatgtcctgctttccgaaataaacaatatcacgttagctgagctgaatgtgtactacagcc

SEQ ID NO: 604925 - DNA, 75 bp, synthetic construct
  source 1..75: mol_type = other DNA
gacccttaagcccgtttcggggacatgtttcaaaaaaaaacagaaaacattgcaagaattgcagcgttatttcag

SEQ ID NO: 604926 - DNA, 75 bp, synthetic construct
  source 1..75: mol_type = other DNA
ggattcatttgatgcgctggcaatcacaatggctggcctggccgacattgacgaagacacggaactgaccgacga

SEQ ID NO: 604927 - DNA, 75 bp, synthetic construct
  source 1..75: mol_type = other DNA
tgtgtccggcgcagaatttaaccaacaaaaaatacgcttctggtgctgtctcatgaatctcgcgcactccaggaa

SEQ ID NO: 604928 - DNA, 75 bp, synthetic construct
  source 1..75: mol_type = other DNA
tgtgtccggcgcagaatttaaccagcaaaaaaatacgcttctggtgctatctcatgaatctcgcgcactccagga

SEQ ID NO: 604929 - DNA, 75 bp, synthetic construct
  source 1..75: mol_type = other DNA
acgccatttatgtgatttcactgaccccaaactcggaagtaaaaatcctcaaaaaaataaaaatcccgctgcaag

SEQ ID NO: 604930 - DNA, 75 bp, synthetic construct
  source 1..75: mol_type = other DNA
tcagctatgaaacgatgaccggcgatacggaagacttcattaacgcatgtcttgaacgggcaaaccgtgcggact

SEQ ID NO: 604931 - DNA, 75 bp, synthetic construct
  source 1..75: mol_type = other DNA
tgagttatgaaaccatgcttggcgacacggaagattttattaacgcgtgtcttgaacgggcaaaccgtgcggact

SEQ ID NO: 604932 - DNA, 75 bp, synthetic construct
  source 1..75: mol_type = other DNA
gtgccccggaagacgtcgccgacagggaccatctgcgcctcaccggaatgctcctgcgcgctcccacagcagaac

SEQ ID NO: 604933 - DNA, 75 bp, synthetic construct
  source 1..75: mol_type = other DNA
gagtgacattttttgctgagactcttcaggcagaaaaataccagagtctggggggagggagtacgttgtcgctgg

SEQ ID NO: 604934 - DNA, 75 bp, synthetic construct
  source 1..75: mol_type = other DNA
gacacctcttgttagtgtcgatggacaatccaaagtttatctgaacggtgattctactatcagcggctctttgcc

SEQ ID NO: 604935 - DNA, 75 bp, synthetic construct
  source 1..75: mol_type = other DNA
ggataaagaccaaaccgcagataacgcggtagattatttctacgacccatccgttggtgtgaatatcagcggcaa

SEQ ID NO: 604936 - DNA, 75 bp, synthetic construct
  source 1..75: mol_type = other DNA
aggcgataatggtgtgacaggcggttacagccagttcttcggtctgaaacaccagatggcgtttgacaacggtat

SEQ ID NO: 604937 - DNA, 75 bp, synthetic construct
  source 1..75: mol_type = other DNA
ccgcgttgtttactcaacgcctttcgtgtggccgcagagggggagttctgcaatgcgcaagatgagccaattgac

SEQ ID NO: 604938 - DNA, 75 bp, synthetic construct
  source 1..75: mol_type = other DNA
atagcgtgtcgagtatgatgggaatggaggcctacggtaaaggcactgttcttaacagcgaaagcggcgttattg

SEQ ID NO: 604939 - DNA, 75 bp, synthetic construct
  source 1..75: mol_type = other DNA
cgttctcagaacctgaccacatggcctttttaagctccagtggcggtagtgctgtgaacaacggaacgatcactg

SEQ ID NO: 604940 - DNA, 75 bp, synthetic construct
  source 1..75: mol_type = other DNA
tcgttgatcaaaactctgtcgggacgaagattgttggtgatcgcgtttcgttgcaacagaaaggtgatattaccg

SEQ ID NO: 604941 - DNA, 75 bp, synthetic construct
  source 1..75: mol_type = other DNA
caacgtcaccccgcccaaagagcctaaaatcttcaataacaatgtcacgttcgacgaagataaaggcacgctgaa

SEQ ID NO: 604942 - DNA, 75 bp, synthetic construct
  source 1..75: mol_type = other DNA
atatttatgctccaggaacgacgggggcgcaaaacgatcacaacggtactgcggatattaccgtaccagaggcat

SEQ ID NO: 604943 - DNA, 75 bp, synthetic construct
  source 1..75: mol_type = other DNA
ggtttcaagcctgctgtaattgatgagcaagataaagcagtaatagaccagttggacgacgacgaagttcttggc

SEQ ID NO: 604944 - DNA, 75 bp, synthetic construct
  source 1..75: mol_type = other DNA
gtttcctctacggtcgtctggactgccaaaggcagtaccgacgccagcggcaacgttgacgtgaccatgagcaaa

SEQ ID NO: 604945 - DNA, 75 bp, synthetic construct
  source 1..75: mol_type = other DNA
atcacaacggtactgcggatatcaccgtaccagaggcatcaaccacgccgtcgcaaggtaatgttccaacgccgc

SEQ ID NO: 604946 - DNA, 75 bp, synthetic construct
  source 1..75: mol_type = other DNA
agaaatgcgcagtgaatttgcacagctttttgccgattacgaaattatgccgccttttcgccagttggcgcggtg

SEQ ID NO: 604947 - DNA, 75 bp, synthetic construct
  source 1..75: mol_type = other DNA
tggattttgttaaggatctcgagacgatcgaatacattggcgataatcagtttgtcattagcgatgagcgcgatt

SEQ ID NO: 604948 - DNA, 75 bp, synthetic construct
  source 1..75: mol_type = other DNA
cataacgaataatatctcttcgctgacctggtcggcacaaagcaatactctttttagcactatcaacaaacctgc

SEQ ID NO: 604949 - DNA, 75 bp, synthetic construct
  source 1..75: mol_type = other DNA
acgaatatcagcaaaccggaacgctcacaatgatgggctgcccggaactgacggcgggcaataaaatcgagctaa

SEQ ID NO: 604950 - DNA, 75 bp, synthetic construct
  source 1..75: mol_type = other DNA
ttcccagaagagtttgaggaagtccgtaaagggatgagttatgtcgatgatgctcaaagggatgattatggcaat

SEQ ID NO: 604951 - DNA, 75 bp, synthetic construct
  source 1..75: mol_type = other DNA
gacgcggccctgaacctgaccgcgatgccggccgtggtgttcaccgacccgcaagtggcgaccgtaggctacagc

SEQ ID NO: 604952 - DNA, 75 bp, synthetic construct
  source 1..75: mol_type = other DNA
aaacttgtagcataccattccgtataaaccagcataaagctgaggccgttatcagggaggttcagggagtatgcc

SEQ ID NO: 604953 - DNA, 75 bp, synthetic construct
  source 1..75: mol_type = other DNA
ccactttattaactttcattaagtcatttttatttggaattaatgatagtatagaggataaattatcttttgata

SEQ ID NO: 604954 - DNA, 75 bp, synthetic construct
  source 1..75: mol_type = other DNA
tatcctgagcgttggtggtggctccgtccttgacagcgctaaggctatcgcagccggtgcacattataatggtga

SEQ ID NO: 604955 - DNA, 75 bp, synthetic construct
  source 1..75: mol_type = other DNA
ctttttgccgattacgaaattatgccgccttttcgccagttggcgcggtgcacggtgctgctcacacctgatgag

SEQ ID NO: 604956 - DNA, 75 bp, synthetic construct
  source 1..75: mol_type = other DNA
catttatgtgatttcacttaacgctgagtcggaagtaagcatcctcaaaaaaattaaaatcccattgcaggaaac

SEQ ID NO: 604957 - DNA, 75 bp, synthetic construct
  source 1..75: mol_type = other DNA
ggggatgctgatgcttatcagccatttttacgaaaaccgctcgtcggttacagacgttgagaaaatggagttgcc

SEQ ID NO: 604958 - DNA, 75 bp, synthetic construct
  source 1..75: mol_type = other DNA
aaccaaaggcagtcggggtttgtcacataacatcaaacaggctgaagggattgcgatggatgcctctggcaatat

SEQ ID NO: 604959 - DNA, 75 bp, synthetic construct
  source 1..75: mol_type = other DNA
gcagaaaacgctgggcaaattacactggatgccctgtgggttgatgcagatgataccaccactttgcgcagcaat

SEQ ID NO: 604960 - DNA, 75 bp, synthetic construct
  source 1..75: mol_type = other DNA
cggcacggaaatcgcgggtaacaacgcggtggtgaatcaggacggtacgctggacgtcagcggcggtgctcacgg

SEQ ID NO: 604961 - DNA, 75 bp, synthetic construct
  source 1..75: mol_type = other DNA
tattcagggatgattcggttgaagaatagcgccatgattgagatcggaacggatgccacgattaacatgcaggta

SEQ ID NO: 604962 - DNA, 75 bp, synthetic construct
  source 1..75: mol_type = other DNA
ttggtagataaagatcaaaccgcgactaacgcggtagattatttttacgaaccgtctattggtgtgaacgttagc

SEQ ID NO: 604963 - DNA, 75 bp, synthetic construct
  source 1..75: mol_type = other DNA
ggtatggccgcctataagagtggtactgccattaatgaacagtctggcgtaattaatatcaatgctgacaatggg

SEQ ID NO: 604964 - DNA, 75 bp, synthetic construct
  source 1..75: mol_type = other DNA
gtacggtaaccattgcagatggggtgacgggggccgggctgattaagcaaggtaatagcgttaacattgaaggtg

SEQ ID NO: 604965 - DNA, 75 bp, synthetic construct
  source 1..75: mol_type = other DNA
catcatcatcaaagaaccttggcgaatacttcactgaaaacaaacccaaatatataatcagagaaatacaccaag

SEQ ID NO: 604966 - DNA, 75 bp, synthetic construct
  source 1..75: mol_type = other DNA
agattgtcgaacaaaaaaataaagaatttaatgttgacataaaaaaagaaactattgagtccgagttgcatagca

SEQ ID NO: 604967 - DNA, 75 bp, synthetic construct
  source 1..75: mol_type = other DNA
agagcattaaaagacatcgtactctcccgctatgcctgttacctggtagtacaaaacggcgaccccgcgaaaccg

SEQ ID NO: 604968 - DNA, 75 bp, synthetic construct
  source 1..75: mol_type = other DNA
gcagcgtccatgcttccgccgttattcatcatgctggcttacctgaatttacgcgccaaattagatcacctgcca

SEQ ID NO: 604969 - DNA, 75 bp, synthetic construct
  source 1..75: mol_type = other DNA
atgaaacacaagctttctgcaatccttatggccttcatgttgacgacgccagctgcgtttgctgcccctgaagca

SEQ ID NO: 604970 - DNA, 75 bp, synthetic construct
  source 1..75: mol_type = other DNA
tggaaaaaaatgtcgcttgcctcctataatcgagcaaaggattttacaattgataaactatcagaaaagtggggt

SEQ ID NO: 604971 - DNA, 75 bp, synthetic construct
  source 1..75: mol_type = other DNA
tcactggtgatagcgccactgtaatcaataaaggcaatataactgtcacggataaagattcggttggtgtgctga

SEQ ID NO: 604972 - DNA, 75 bp, synthetic construct
  source 1..75: mol_type = other DNA
aacgattaatcagctgattcagtgccatttcagcctgtttttgctgctgttcactgccattctgattacgggctt

SEQ ID NO: 604973 - DNA, 75 bp, synthetic construct
  source 1..75: mol_type = other DNA
tccgatctcgtcgttaccgccattgccgaaggtcgtaaagcggcagatgggatcatgaactggctggaagtttaa

SEQ ID NO: 604974 - DNA, 75 bp, synthetic construct
  source 1..75: mol_type = other DNA
ctatcgtcgtgatgaagagaacatgccaggttcccgccgcgaagtgaaaaacgcgcgagaagaaggcgtagagtt

SEQ ID NO: 604975 - DNA, 75 bp, synthetic construct
  source 1..75: mol_type = other DNA
attgtttgccgggcaaaacctgatcggcgcactgacgctcgacgggatgcagcccgatcgttcgatgttttcagc

SEQ ID NO: 604976 - DNA, 75 bp, synthetic construct
  source 1..75: mol_type = other DNA
aaatattcgttctttatggaagagagaaatacggtcctggatggactgactcctgcaggacgtacgtttaccatt

SEQ ID NO: 604977 - DNA, 75 bp, synthetic construct
  source 1..75: mol_type = other DNA
ccgcctatgcaatctgcgtttggttacgcagcgggaaaacgaccagaaccgacgcaaggcaagggggtatagctg

SEQ ID NO: 604978 - DNA, 75 bp, synthetic construct
  source 1..75: mol_type = other DNA
attcagatcgacggcgacaaggcagttgtcaataacgaaggtgacaacgccatcagtaacggcggcaccggcacg

SEQ ID NO: 604979 - DNA, 75 bp, synthetic construct
  source 1..75: mol_type = other DNA
ctcgtccagtgacggaagccagaataaactgaatggttatgttgtaggaaccagttctgacggcagtgccggcaa

SEQ ID NO: 604980 - DNA, 75 bp, synthetic construct
  source 1..75: mol_type = other DNA
cggtatgacggttaccgatccggattccatcggtattctgatcgacggtgataaagccatcgtcaacaatgacgg

SEQ ID NO: 604981 - DNA, 75 bp, synthetic construct
  source 1..75: mol_type = other DNA
agatgcggtgatcatggcgtttggtttccgtccacacagcatggaatggctggcaaaacacagcgtcgagctgga

SEQ ID NO: 604982 - DNA, 75 bp, synthetic construct
  source 1..75: mol_type = other DNA
caaattcaacgtccagccactgggtattgaagtgaacggcaacggcaaagtcagcggcgtgaaaatggtgcgcac

SEQ ID NO: 604983 - DNA, 75 bp, synthetic construct
  source 1..75: mol_type = other DNA
gcccggtacacaactacatcccgaactggctgaagctcgccaacgaggggcgtatttttgaagcggcagaactgt

SEQ ID NO: 604984 - DNA, 75 bp, synthetic construct
  source 1..75: mol_type = other DNA
agctgaaagccaagctggcggagctggagcccaaaactgacgagtccaatgaagaccagcaagagctggatttgg

SEQ ID NO: 604985 - DNA, 75 bp, synthetic construct
  source 1..75: mol_type = other DNA
gggcattgcagcagccagagacatgggggcatccggtatcaacaccgttgcagaagcaaagatgtattttcaagg

SEQ ID NO: 604986 - DNA, 75 bp, synthetic construct
  source 1..75: mol_type = other DNA
gttgatcatcttggtatgtcggcacttggccctgatgaatattttaaagctcaggacaggattgttggtcgcgcc

SEQ ID NO: 604987 - DNA, 75 bp, synthetic construct
  source 1..75: mol_type = other DNA
ttcgtgttcgaggccgtcctgatgctggcggggagaatgttgtgcaactggcagatggcagaactgtaacggtag

SEQ ID NO: 604988 - DNA, 75 bp, synthetic construct
  source 1..75: mol_type = other DNA
tgtaacggtaggcgggaagcttcacggcgctggggctaatgcgttctacgaaggcatcgacaacgaggggaatat

SEQ ID NO: 604989 - DNA, 75 bp, synthetic construct
  source 1..75: mol_type = other DNA
gaagaaagatcttgatgcaatttctggtgcatcaattgacgatcttggcttcatgactggcattacaggctcttc

SEQ ID NO: 604990 - DNA, 75 bp, synthetic construct
  source 1..75: mol_type = other DNA
caagatggcgggtcgtgagattgaccgaggcagactggcagagacaatccgcagcaatcaggctggagaagcact

SEQ ID NO: 604991 - DNA, 75 bp, synthetic construct
  source 1..75: mol_type = other DNA
gcgctgttaaccgacattagcgatcaggttaattggtacggtaaaaagctgtcgccggaagactggaaagcggta

SEQ ID NO: 604992 - DNA, 75 bp, synthetic construct
  source 1..75: mol_type = other DNA
ttcactgccggacttaagaaatatggcgtagtccctaacctggataaatcaggcttcgttgtattgggaacgtct

SEQ ID NO: 604993 - DNA, 75 bp, synthetic construct
  source 1..75: mol_type = other DNA
cgagtatccggatcgctacctgcaggcgcagaactattttgacccctacccgcaggatcttgccctgcgcctgac

SEQ ID NO: 604994 - DNA, 75 bp, synthetic construct
  source 1..75: mol_type = other DNA
gcaaaacaacgccaaggaactgactcgcgtcggtgttgaccctaacagcgttgctcagatgtatcagcagaatcc

SEQ ID NO: 604995 - DNA, 75 bp, synthetic construct
  source 1..75: mol_type = other DNA
ctcgttcggtgctgaacataatgtccaatggtctggtgatacgaaattaaatgaggaattcataaaacgctgggg

SEQ ID NO: 604996 - DNA, 75 bp, synthetic construct
  source 1..75: mol_type = other DNA
tcaccatccaggagaaaacccgctcactgagtcaaaacgcgttgctttgggcgttgctgacagacgttagcgatc

SEQ ID NO: 604997 - DNA, 75 bp, synthetic construct
  source 1..75: mol_type = other DNA
aagatcttgatgcaatttctggtgcatcaattgacgatcttggcttcatgactggcattacaggctcttcaggtt

SEQ ID NO: 604998 - DNA, 75 bp, synthetic construct
  source 1..75: mol_type = other DNA
tggaacgtccaacctgaagagaagctggagtttattgagaagatgaaacatgcctggcagtcatcaaaatcttat

SEQ ID NO: 604999 - DNA, 75 bp, synthetic construct
  source 1..75: mol_type = other DNA
atgttgcattacgatatgatccgctatgaaataatgtacctaaaaacgctggacaggcatttcaatacagatcac

SEQ ID NO: 605000 - DNA, 75 bp, synthetic construct
  source 1..75: mol_type = other DNA
tatggctgctgatgttgctggcgtggtatcttgttggtctgccgataggtccggggatttacccacgtttgtctt

SEQ ID NO: 605001 - DNA, 75 bp, synthetic construct
  source 1..75: mol_type = other DNA
tttgaatggcccggtacacagcttccgctttgaattcggtcctggcgtgcgttacgacaaatataccgacaatgc

SEQ ID NO: 605002 - DNA, 75 bp, synthetic construct
  source 1..75: mol_type = other DNA
gtcacgtggaactctgaaccgcctgaatcggccccagaacatactgaccgccgaacaacgttatcgctgggatat

SEQ ID NO: 605003 - DNA, 75 bp, synthetic construct
  source 1..75: mol_type = other DNA
gttacatggaactctgaacctccagagtctgcaccggaacataccgatcgtcggacaaccttatcgttgggttac

SEQ ID NO: 605004 - DNA, 75 bp, synthetic construct
  source 1..75: mol_type = other DNA
aggaattcgctcagcgtttccgacagttcctggctctgatgcggctaactttgaagcaagactcgacacctttaa

SEQ ID NO: 605005 - DNA, 75 bp, synthetic construct
  source 1..75: mol_type = other DNA
atcggccttcaggcgttgcaggggcttggtagtgtcgctcaaacatatcaagccgcaaagcaacaggaagcggat

SEQ ID NO: 605006 - DNA, 75 bp, synthetic construct
  source 1..75: mol_type = other DNA
tatgccacaggttgatttctcaagccctgaagcactgcaacaatcaatgcgcgacattcagcaatataccgacaa

SEQ ID NO: 605007 - DNA, 75 bp, synthetic construct
  source 1..75: mol_type = other DNA
attttctggctggtggctgttgtagtgtggtttaagtgcaagacataccggaaaaagtatttcttaggtgatgga

SEQ ID NO: 605008 - DNA, 75 bp, synthetic construct
  source 1..75: mol_type = other DNA
aagtacgttcagcaaaacggtatcaagcgagtggaagcgcctcaggcttctatagattacctgaagcagcacccc

SEQ ID NO: 605009 - DNA, 75 bp, synthetic construct
  source 1..75: mol_type = other DNA
cattgtctccagaagcaatgcaatcatggctgcaaaacaacgccaaggaactggcgcgcgtcggtgttgacccta

SEQ ID NO: 605010 - DNA, 75 bp, synthetic construct
  source 1..75: mol_type = other DNA
tggtttcgccgcgaacagaaaacaccatcgaaaccggggtcggttactctacggacgtgggaccgcgcgtgaaag

SEQ ID NO: 605011 - DNA, 75 bp, synthetic construct
  source 1..75: mol_type = other DNA
caaaagcgactaaccaggttatctaccgcatcctgattttctacattggttcgttagccgttctgctctcactga

SEQ ID NO: 605012 - DNA, 75 bp, synthetic construct
  source 1..75: mol_type = other DNA
ccgacgctaacagagccaatacgcgccttgacgcccaggactatttcgattgcctgcgctgcttacgtatgtatg

SEQ ID NO: 605013 - DNA, 75 bp, synthetic construct
  source 1..75: mol_type = other DNA
ccgaagctaacagagccaatacacgccttgatgcgcaggactatttcgattgcctgcgctgcttgcgtatgtacg

SEQ ID NO: 605014 - DNA, 75 bp, synthetic construct
  source 1..75: mol_type = other DNA
cctggagcaactgaaagctaggctggacaaaacccctccccaggtcacgtcgtcaaagtgccttgggcaagcaat

SEQ ID NO: 605015 - DNA, 75 bp, synthetic construct
  source 1..75: mol_type = other DNA
tcattgcagccgtctgctgaaacgttatcgtcagtccgggccgcttggtatgaataaccagagtcgcggtcgcac

SEQ ID NO: 605016 - DNA, 75 bp, synthetic construct
  source 1..75: mol_type = other DNA
gcaagcatgatttaaaagtgaatatgataaataatatcaagtctatatgtgttgataacaaggtttcttacacgg

SEQ ID NO: 605017 - DNA, 75 bp, synthetic construct
  source 1..75: mol_type = other DNA
gcaattcacaaagcactggacgaatgtagtgcggagcatccggtcttttatgaagatgaagtgtatatctatctt

SEQ ID NO: 605018 - DNA, 75 bp, synthetic construct
  source 1..75: mol_type = other DNA
gtggaacgggcaaagtcagctatgtgggtggcaacagcaaaagctcagccttatttatcagtctgttgaaacatc

SEQ ID NO: 605019 - DNA, 75 bp, synthetic construct
  source 1..75: mol_type = other DNA
gcagacctttatccgcatcatcatcccgctgaccatgccaggaattattgctggctgtttgctggtaatgctgcc

SEQ ID NO: 605020 - DNA, 75 bp, synthetic construct
  source 1..75: mol_type = other DNA
ccgaagctaacagagccaatacgcgtcttgatgcacaggactattttgattgcctacgctgcttgcgtatgtacg

SEQ ID NO: 605021 - DNA, 75 bp, synthetic construct
  source 1..75: mol_type = other DNA
ccgaagccaacagagccaatacgcgtcttgacgcccaggacttttttgattgtctgcgttgtttgcgtctatatt

SEQ ID NO: 605022 - DNA, 75 bp, synthetic construct
  source 1..75: mol_type = other DNA
cctggctacccgtaagacgtcctttgaaggcaaggaaaaagcaattcggaagcatatgctcgcctgcctgcaagc

SEQ ID NO: 605023 - DNA, 75 bp, synthetic construct
  source 1..75: mol_type = other DNA
gagcgtgcgtggtcctggcatgaagagcaggaacgggaagcacgggtatggcgtggcccgtcaatggggatgtga

SEQ ID NO: 605024 - DNA, 75 bp, synthetic construct
  source 1..75: mol_type = other DNA
acgaagtgatcgcggcctttgtgcaggataagcccgccatcgaacgaggtctgttcgatgaagaactgctccctg

SEQ ID NO: 605025 - DNA, 75 bp, synthetic construct
  source 1..75: mol_type = other DNA
cggcaagtctgctgatggagcaggtactggctccgcgcttcgagttcaaacccaaaaacccagaaagcagcccta

SEQ ID NO: 605026 - DNA, 75 bp, synthetic construct
  source 1..75: mol_type = other DNA
ccacgacggcagaatggtccttaacgatggcgataacggagaagatattccctatagctatcagcgggaaggttt

SEQ ID NO: 605027 - DNA, 75 bp, synthetic construct
  source 1..75: mol_type = other DNA
gtccgcaaaaaggggcaacgccggaaatggtcgaagagctggaacaggggctgcaaaattacgcccgtgttttac

SEQ ID NO: 605028 - DNA, 75 bp, synthetic construct
  source 1..75: mol_type = other DNA
atatccgttgatctccgggcaactggtgccggaaatcgccattctcgatcctaacctagtgttaaccgcgccgcg

SEQ ID NO: 605029 - DNA, 75 bp, synthetic construct
  source 1..75: mol_type = other DNA
ctttcgcttcgcggtcgatgcctacggtatagaagcgtttgacgatcgcctgatcgcggtcgatgaattccacca

SEQ ID NO: 605030 - DNA, 75 bp, synthetic construct
  source 1..75: mol_type = other DNA
ggtgaagcgcgtccgctgaaaatcggtatttttcaggatttggtcgatcgtgttgccggggaaatgaacctgagc

SEQ ID NO: 605031 - DNA, 75 bp, synthetic construct
  source 1..75: mol_type = other DNA
aaaagccggtagagaaagcgccaaaaacagtaaaagcacctcgcgaagaacagcacaccccggtttctgacattt

SEQ ID NO: 605032 - DNA, 75 bp, synthetic construct
  source 1..75: mol_type = other DNA
aacagtaaaagcacctcgcgaagaacagcacaccccagtttctgacatttcagctctgactgtcggacaagccct

SEQ ID NO: 605033 - DNA, 75 bp, synthetic construct
  source 1..75: mol_type = other DNA
cattgaagtcgatctggcaaaatttgccggtaaacccatgtaccgcacttctaccggactggcgctgaagaaaac

SEQ ID NO: 605034 - DNA, 75 bp, synthetic construct
  source 1..75: mol_type = other DNA
cgcgtagttgcggtgactgcttgcccgactggcgtagcacacacctttatggcggctgaagccattgaaaccgaa

SEQ ID NO: 605035 - DNA, 75 bp, synthetic construct
  source 1..75: mol_type = other DNA
aaccggttgctggcattctcgaagggttgactcactggctgcagaccatggggactgcgaatgcggttctgctgg

SEQ ID NO: 605036 - DNA, 75 bp, synthetic construct
  source 1..75: mol_type = other DNA
ctcactgaatatggcgctgatcgcgactatagcctgcctggtgctgggctacccgtttgcctggtttctggctaa

SEQ ID NO: 605037 - DNA, 75 bp, synthetic construct
  source 1..75: mol_type = other DNA
ttaccgagcttcctctaaaatctgctttgtctcttcaaggaagatactcatggcctttatatcaactgataaaat

SEQ ID NO: 605038 - DNA, 75 bp, synthetic construct
  source 1..75: mol_type = other DNA
aaagtattaaatgcgttaatgctgagaggcagggtagaagagtcagcaaagtccgttttgagatcgaaatgaggt

SEQ ID NO: 605039 - DNA, 75 bp, synthetic construct
  source 1..75: mol_type = other DNA
aggtgtagatgaacttaagaaagaaataggttatattcaaaatcaaaagttttctttctttaaaagagatggaat

SEQ ID NO: 605040 - DNA, 75 bp, synthetic construct
  source 1..75: mol_type = other DNA
cacggaaatggcggaagccatgaccgacccgtgggaccgccttgtggcctccttctacaacatccgggccgccat

SEQ ID NO: 605041 - DNA, 75 bp, synthetic construct
  source 1..75: mol_type = other DNA
cccccgctgccgcacaaaaaatggggatgagttttgtcgatgccaccgggaagattttacccatgggtgacatcc

SEQ ID NO: 605042 - DNA, 75 bp, synthetic construct
  source 1..75: mol_type = other DNA
gaaaggacagatgttaaaaacattaaatgtgttaatgctgaaaggcagggtagaagagtcagcaaagtccgtttt

SEQ ID NO: 605043 - DNA, 75 bp, synthetic construct
  source 1..75: mol_type = other DNA
gaccgtctggatgatacaccgttctccgtgtgagttcagacttaacatcatgtggtcagaatttgcggcgttctt

SEQ ID NO: 605044 - DNA, 75 bp, synthetic construct
  source 1..75: mol_type = other DNA
gcattttatgcataactattttgatgattgtctggatgatacacaagtcaccgtgtgagttcaggcttaacatca

SEQ ID NO: 605045 - DNA, 75 bp, synthetic construct
  source 1..75: mol_type = other DNA
gcattttatgcttaaccatgttgttgaccgtctggatgatacatcgttcaccatgtgaattcagacttaacatca

SEQ ID NO: 605046 - DNA, 75 bp, synthetic construct
  source 1..75: mol_type = other DNA
tcagaaaacgcttcctgtccggcgaaatttaccttaatgacagcctccggcaccgccatctttcagatgaactgg

SEQ ID NO: 605047 - DNA, 75 bp, synthetic construct
  source 1..75: mol_type = other DNA
attccataccatgtgctggaaagtacgtacgaacagtaccttcgtcaggcatcactgctcgcggctaatgactgc

SEQ ID NO: 605048 - DNA, 75 bp, synthetic construct
  source 1..75: mol_type = other DNA
ccgtttggtcaggctatgaaacaattattacccacaggctggcgtactgagattgcccgtgacgtccggctcccc

SEQ ID NO: 605049 - DNA, 75 bp, synthetic construct
  source 1..75: mol_type = other DNA
agtgattatcaccacgccggaatgcctgcccgcggcgctgcgtggcgaaacgggcacccatattattaaaacgta

SEQ ID NO: 605050 - DNA, 75 bp, synthetic construct
  source 1..75: mol_type = other DNA
caacgttgaccagaaaatatgaaggctcaacttgtcttccaaatgtagctctttacgcggcaggctaccggaaat

SEQ ID NO: 605051 - DNA, 75 bp, synthetic construct
  source 1..75: mol_type = other DNA
gtgttatcaagcgctacggaaaactacgcatcggctatgtgccgcaaaaactgtatctcgacaccacgttgccac

SEQ ID NO: 605052 - DNA, 75 bp, synthetic construct
  source 1..75: mol_type = other DNA
ccgaagctaacagagccaatacgcgtcttgatgcacaggactatttcgactgcctgcgctgcttgcgtatgtacg

SEQ ID NO: 605053 - DNA, 75 bp, synthetic construct
  source 1..75: mol_type = other DNA
cgaattacaaaaggcaaaccctgactggcgttttgttgaagatgccggacgcggctatcgccgcgtggtcgcctc

SEQ ID NO: 605054 - DNA, 75 bp, synthetic construct
  source 1..75: mol_type = other DNA
ccaccatgacccgctatatgcaggaagggcattttccgcctggcagcatgttgccaaaaatcatcgctagcctga

SEQ ID NO: 605055 - DNA, 75 bp, synthetic construct
  source 1..75: mol_type = other DNA
tgatggcaatgttgttgctaccgtggatacaacaaagccttcgcatccgcaatgacagtagccgctatcgctatt

SEQ ID NO: 605056 - DNA, 75 bp, synthetic construct
  source 1..75: mol_type = other DNA
gggttatcaagcgcaacggaaaactgcgcatcggctatgtaccgcagaagctgtatctcgacaccacgttgccac

SEQ ID NO: 605057 - DNA, 75 bp, synthetic construct
  source 1..75: mol_type = other DNA
atgacaagtctggtttccctggaaaatgtctcggtttcatttggccaacgccgcgtcctctctgatgtgtcgctg

SEQ ID NO: 605058 - DNA, 75 bp, synthetic construct
  source 1..75: mol_type = other DNA
gatacaacaaagccttcgcatccgcaatgacagtagccgctatcgctacttttaccagtcagtatcgtacttata

SEQ ID NO: 605059 - DNA, 75 bp, synthetic construct
  source 1..75: mol_type = other DNA
gcgttgttcaatatcgaaaccttttttggctgggtcagcgacgtcgaaacgttctgcgacgcgctttctcccacg

SEQ ID NO: 605060 - DNA, 75 bp, synthetic construct
  source 1..75: mol_type = other DNA
attgccaacattcaaaccgccgtgaccgcagcgcgagcggcagggatgttgatcatctggtttcaaaatggctgg

SEQ ID NO: 605061 - DNA, 75 bp, synthetic construct
  source 1..75: mol_type = other DNA
tggtgacactggtctgtttcgcactggctggcgtatgggtgatgtacggtatcgatggttatgtcgtgaaatcga

SEQ ID NO: 605062 - DNA, 75 bp, synthetic construct
  source 1..75: mol_type = other DNA
gccagagcggcgcaacgttatacgccagttctcgtagcgcgcaaggcaccgcaggcccggatttccgtctggaaa

SEQ ID NO: 605063 - DNA, 75 bp, synthetic construct
  source 1..75: mol_type = other DNA
attcagcaaggctttgaagcggcgaaaaatcttggtactcagcctgtcgcggctcaggtagccgctgcgcctgcc

SEQ ID NO: 605064 - DNA, 75 bp, synthetic construct
  source 1..75: mol_type = other DNA
aactggcgcagaaagattttgctggcgcgcaaaacttgctggcgaaaatcacacctgccgatttagaacaaaacc

SEQ ID NO: 605065 - DNA, 75 bp, synthetic construct
  source 1..75: mol_type = other DNA
aacactctccacgggtgaagataatcctctttggcgtacggtggtgctgcgcgacggcctgttggtgcgccgtac

SEQ ID NO: 605066 - DNA, 75 bp, synthetic construct
  source 1..75: mol_type = other DNA
aaggttggcaggcgcgtgcgccttttgacgccattatcgtaacggcagcgccgcccgaaatcccaacagcgttaa

SEQ ID NO: 605067 - DNA, 75 bp, synthetic construct
  source 1..75: mol_type = other DNA
cctggcgcatcttgtccagcatgtttgctcggtcgaacggattaaaggcttgcagtggcaggcgcgtcgccgcct

SEQ ID NO: 605068 - DNA, 75 bp, synthetic construct
  source 1..75: mol_type = other DNA
tggtgacactggtctgcttcgcactggctggcgtatgggtgatgtacggtatcgatggttatgttgtgaaatcga

SEQ ID NO: 605069 - DNA, 75 bp, synthetic construct
  source 1..75: mol_type = other DNA
ctgctcggcgaggcgacggttgaatcgctgcgccatgccctcttttttgagaaaacgctcactaccggtgaagat

SEQ ID NO: 605070 - DNA, 75 bp, synthetic construct
  source 1..75: mol_type = other DNA
gtttatccgcctggatgaacccgctccgcttaacgccatgacgctggcgcaatggtcatcaccgaatgcactaag

SEQ ID NO: 605071 - DNA, 75 bp, synthetic construct
  source 1..75: mol_type = other DNA
agttgtttaaccaactgccgcaagaactgaacgatacccagcgtcgcgagaaaacgctgctggcggtagagatta

SEQ ID NO: 605072 - DNA, 75 bp, synthetic construct
  source 1..75: mol_type = other DNA
tcaatggcgcatctctgacgctgaccagcatcggacgttatttacccggtaatgctcaggtcaaaaataaaataa

SEQ ID NO: 605073 - DNA, 75 bp, synthetic construct
  source 1..75: mol_type = other DNA
acgagcaagctgtcactgtgtgtcatcgccgttgactggagtggatacccctctcaggagtatcacgtactccgc

SEQ ID NO: 605074 - DNA, 75 bp, synthetic construct
  source 1..75: mol_type = other DNA
atgttctgggaaagcatgaaagcattaactgccggagttaatgttgatttagacgcaccacttaccgaagattaa

SEQ ID NO: 605075 - DNA, 75 bp, synthetic construct
  source 1..75: mol_type = other DNA
tcctgttaaagccgtccgttatatcgcgctgacgttgctgttttttctttggggcatatcagcggcaaagcaaat

SEQ ID NO: 605076 - DNA, 75 bp, synthetic construct
  source 1..75: mol_type = other DNA
acgacactccccgctaattttaaggcgaaccgtgctgagcacggttcttaatcatctcgccaaaacctaccagaa

SEQ ID NO: 605077 - DNA, 75 bp, synthetic construct
  source 1..75: mol_type = other DNA
tgggattttatcggtcgtgtcaggggaaatatccagatgcagctggacagcaaaggtgagtgctggttcatgcgt

SEQ ID NO: 605078 - DNA, 75 bp, synthetic construct
  source 1..75: mol_type = other DNA
ttagtatttgtcacgaaggaaacgctttcattatttctccagatgctcaaggaggaggcattaattttccatgct

SEQ ID NO: 605079 - DNA, 75 bp, synthetic construct
  source 1..75: mol_type = other DNA
acataactatattatttatttttattgtcatgctgtcatttagttactggcttgctaatagttttggtatgaagt

SEQ ID NO: 605080 - DNA, 75 bp, synthetic construct
  source 1..75: mol_type = other DNA
cttcagcagatgcagcaaagcgctgatgataccaggatcaactggcaattactcgccattcgtgcactggtgaaa

SEQ ID NO: 605081 - DNA, 75 bp, synthetic construct
  source 1..75: mol_type = other DNA
gatagtggttatacgttttacaccattttcataggtgatgacggtaagtggaagaagggtcaaaaagtggttaaa

SEQ ID NO: 605082 - DNA, 75 bp, synthetic construct
  source 1..75: mol_type = other DNA
ttggcggccctatggccaaacattttggtcgtcactggcatttgaaagttcgcaacaccaagcaggctctggatt

SEQ ID NO: 605083 - DNA, 75 bp, synthetic construct
  source 1..75: mol_type = other DNA
aatagcacaaggaaagttcaatggcgactcaatgacaagacttgttacagaagaaaattttagagttcggctgta

SEQ ID NO: 605084 - DNA, 75 bp, synthetic construct
  source 1..75: mol_type = other DNA
acttgagccgtcgtcgtggtatgctcaaaggccaggaatctgaagttactggcgttaagatccacgctgaagtac

SEQ ID NO: 605085 - DNA, 75 bp, synthetic construct
  source 1..75: mol_type = other DNA
ggtagtgcaggcattagaagcaacgggagagatcaacggcaaacttatctggagcaataccggttatttgatcaa

SEQ ID NO: 605086 - DNA, 75 bp, synthetic construct
  source 1..75: mol_type = other DNA
acacagcaatatctgaaaatggaagctgtttctggcggcgcgctgaatgacagctcaatgatttataagattgct

SEQ ID NO: 605087 - DNA, 75 bp, synthetic construct
  source 1..75: mol_type = other DNA
ctgcaattatattatcggaagctttatgcatactaatagtggtatgccgtatgtttatgtaaagcttccaaaaaa

SEQ ID NO: 605088 - DNA, 75 bp, synthetic construct
  source 1..75: mol_type = other DNA
gctgggcgtagcggtgcgaatatcgcgtttattgcctgtacgggcgatgacagcattggtgagagcgttcgccag

SEQ ID NO: 605089 - DNA, 75 bp, synthetic construct
  source 1..75: mol_type = other DNA
gcagggcgtagcggtgcgaatatcgcgtttattgcctgcacgggcgatgacagcatcggcgagagcgtacgtcag

SEQ ID NO: 605090 - DNA, 75 bp, synthetic construct
  source 1..75: mol_type = other DNA
tattacttttttacaaaaaatggctaaccgaagggaaatccgttttattaactcaccagaaagtattattcatct

SEQ ID NO: 605091 - DNA, 75 bp, synthetic construct
  source 1..75: mol_type = other DNA
ttgaatgcggtcaatcttgcgcaggcagtgcagggtgcagcactggtgatcaccggggaagggcgcatcgactcg

SEQ ID NO: 605092 - DNA, 75 bp, synthetic construct
  source 1..75: mol_type = other DNA
cggcggcggtatttctcaatgcggatattaaaccgggtattgagattgtgttgaatgcggtcaatcttgcgcagg

SEQ ID NO: 605093 - DNA, 75 bp, synthetic construct
  source 1..75: mol_type = other DNA
ccagatggcgggcggcggcgctgcgggcggtatgggcattgcggcggcggtattcctcaatgcggatattaaacc

SEQ ID NO: 605094 - DNA, 75 bp, synthetic construct
  source 1..75: mol_type = other DNA
tttttgatagaactgctgttccagataattggttacggttacagaaattgaatataggaaccgccgaaacacttt

SEQ ID NO: 605095 - DNA, 75 bp, synthetic construct
  source 1..75: mol_type = other DNA
aggagctgtttcaggtgattggtttaaggtaagccagctgaatatgaatacgtcagggaatatttcatcatttaa

SEQ ID NO: 605096 - DNA, 75 bp, synthetic construct
  source 1..75: mol_type = other DNA
ataagagttttggtgttgcagactcaggagctgtttcaggtgattggtttaaggtaagccagctgaatatgaata

SEQ ID NO: 605097 - DNA, 75 bp, synthetic construct
  source 1..75: mol_type = other DNA
aatgatgaagatgcggcgaaggctgcgcaggtactgcatgagaaaggtatccgtaccgtactgattaccttagga

SEQ ID NO: 605098 - DNA, 75 bp, synthetic construct
  source 1..75: mol_type = other DNA
aacgcgattgtggccacaggcagcccgtttcctccagtggaatataacggggagcagaaggtgatttctcagtgc

SEQ ID NO: 605099 - DNA, 75 bp, synthetic construct
  source 1..75: mol_type = other DNA
cgcagacatcaaaccttccgttctgattggcgtgtccggtgtgccggggctgtttacagaacaggctatcagaca

SEQ ID NO: 605100 - DNA, 75 bp, synthetic construct
  source 1..75: mol_type = other DNA
gactgggggacctggggattggcggaatggggatcccggttggaaaactctccctgtattctgcctgcgggggga

SEQ ID NO: 605101 - DNA, 75 bp, synthetic construct
  source 1..75: mol_type = other DNA
cgctaacaaacgtgaagagattaaagaagttcgcgcgggcgacatcgcagctgcaatcggtctgaaagacgtaac

SEQ ID NO: 605102 - DNA, 75 bp, synthetic construct
  source 1..75: mol_type = other DNA
ttctgcgttcaagaacaaaggtgttcaggcgatgctggatgcggtaatcgattacctgccatccccggttgacgt

SEQ ID NO: 605103 - DNA, 75 bp, synthetic construct
  source 1..75: mol_type = other DNA
accttcgaatacgaagatatcccggcagacatggttgaactagctaacgaatggcaccagaacctgatcgaatcc

SEQ ID NO: 605104 - DNA, 75 bp, synthetic construct
  source 1..75: mol_type = other DNA
atgacctatcgttccgcaccgcttcctgaagatgtcatctggcgaacgcatctccagccgcaggatgctgggctt

SEQ ID NO: 605105 - DNA, 75 bp, synthetic construct
  source 1..75: mol_type = other DNA
ggggcgtattggcggcaaagcaaattttgtgggcaggagaaaccttaactggcgcgacgcaggatgcaattgtcg

SEQ ID NO: 605106 - DNA, 75 bp, synthetic construct
  source 1..75: mol_type = other DNA
tgagtggaaaggatgtagcaggtcttctcacataccttggtttgggagaagcggcaaaacgggatgtgggcacag

SEQ ID NO: 605107 - DNA, 75 bp, synthetic construct
  source 1..75: mol_type = other DNA
gccgctaatctatacccccaccgtcggttatgcctgccagcattattctgagatatggcgaaaaccccggggtat

SEQ ID NO: 605108 - DNA, 75 bp, synthetic construct
  source 1..75: mol_type = other DNA
ggaaattccctaccgtaccttgtcgcatccggctgtcaccctctgggaacaacggcaggcgctggcgaaactgcg

SEQ ID NO: 605109 - DNA, 75 bp, synthetic construct
  source 1..75: mol_type = other DNA
gtttatccgtctggatgaacccgccccgcttcgcgccatgacgctggcgcaatggtcatcaccgaatgcgctaag

SEQ ID NO: 605110 - DNA, 75 bp, synthetic construct
  source 1..75: mol_type = other DNA
tgtcctcaattaccttggtttgggggaaggctctgcattgcctgttggtgtaccggttccatggcccaccgccac

SEQ ID NO: 605111 - DNA, 75 bp, synthetic construct
  source 1..75: mol_type = other DNA
aagttcgggttgagccgtattaaggtccgtgaagccgctatgcgcggtgaaatcccgggtctgaaaaaggctagc

SEQ ID NO: 605112 - DNA, 75 bp, synthetic construct
  source 1..75: mol_type = other DNA
tgacggctatattcagtttacctattactatcttattggtttcactttcatcccttcggattgttggcgaaggga

SEQ ID NO: 605113 - DNA, 75 bp, synthetic construct
  source 1..75: mol_type = other DNA
accaaaagcggtcaaggctgcatacgaccttgcagccggcaaggcgccagacagccacactcacccgtggagtca

SEQ ID NO: 605114 - DNA, 75 bp, synthetic construct
  source 1..75: mol_type = other DNA
accaaaagcggtcaaggctgcatacgacctagcagccggcaaggcgccagtcagccacactcacccgtggagtca

SEQ ID NO: 605115 - DNA, 75 bp, synthetic construct
  source 1..75: mol_type = other DNA
cggcgctgcccgttggtgtacctgttccgtggcccactgccacaccgccagcaggctggttaaagtgcgacgggc

SEQ ID NO: 605116 - DNA, 75 bp, synthetic construct
  source 1..75: mol_type = other DNA
ttgtggggattctggggcgtattcttcgccattccattggcgacgctgatcaaagccgtgatccacgcctggccc

SEQ ID NO: 605117 - DNA, 75 bp, synthetic construct
  source 1..75: mol_type = other DNA
actaaagaggctgccttgaaagcggtactgttgactggtgtgaaaaaagagagtctggatttgcatccgctcaac

SEQ ID NO: 605118 - DNA, 75 bp, synthetic construct
  source 1..75: mol_type = other DNA
acagggaggccagcacgaagcacgctatgccacgattgccagtgcgaagaagcatgctccagagagtaatctggc

SEQ ID NO: 605119 - DNA, 75 bp, synthetic construct
  source 1..75: mol_type = other DNA
gatattcctgatatcgatgcgctttacttcaccatgcttaacagtaacaaacgttctattgaattaaataccaaa

SEQ ID NO: 605120 - DNA, 75 bp, synthetic construct
  source 1..75: mol_type = other DNA
atgacaaaattactcgatctcgactccatcctacctcctaaaaaaagtgtcaaatttggcggccaggaatatccc

SEQ ID NO: 605121 - DNA, 75 bp, synthetic construct
  source 1..75: mol_type = other DNA
ctgactgttccgcagcttcagcaaatcttcaccttcgctatggaagtgattgatgaagagaacgaaaaagcggct

SEQ ID NO: 605122 - DNA, 75 bp, synthetic construct
  source 1..75: mol_type = other DNA
accaaaagcggtcaaggctgcatacgaccttgcagccggcaaggcgcccgccagccacactcacccgtggagtca

SEQ ID NO: 605123 - DNA, 75 bp, synthetic construct
  source 1..75: mol_type = other DNA
ataaatactggaacaacgtcaatccggcggaaatctatcaacgcaaaggcgatatctctatcaccctggtggata

SEQ ID NO: 605124 - DNA, 75 bp, synthetic construct
  source 1..75: mol_type = other DNA
agtaacactgcatgtagacagcctgatcaccgccattggtgaacagcaggatactgaagccctgaatgcgatggg

SEQ ID NO: 605125 - DNA, 75 bp, synthetic construct
  source 1..75: mol_type = other DNA
atgcacttaataagctactccaggatgaggcatttttagcccgccacggattgcaggaaaaacgcgaaagcttgc

SEQ ID NO: 605126 - DNA, 75 bp, synthetic construct
  source 1..75: mol_type = other DNA
cacagaagcactggaagccagaagagcgtatcgaagtggcggaaaacctgccactgaccgactgctacgttgccc

SEQ ID NO: 605127 - DNA, 75 bp, synthetic construct
  source 1..75: mol_type = other DNA
aattcttgatggttgtggattcgattacatcggcttaaaagaagagtcctttgatcatgatctcaaactgacaca

SEQ ID NO: 605128 - DNA, 75 bp, synthetic construct
  source 1..75: mol_type = other DNA
cttgccagagcgggccatccggttacgctgtttgaacgcgaagccaatgcgggcggcgtggtgaaaaatatcatt

SEQ ID NO: 605129 - DNA, 75 bp, synthetic construct
  source 1..75: mol_type = other DNA
accaaaagcggtcaaggctgcatacgacctggcagccggcaaggcgccggtcagccacactcacccgtggagtca

SEQ ID NO: 605130 - DNA, 75 bp, synthetic construct
  source 1..75: mol_type = other DNA
accaaaagcggtcaaggctgcatacgacctcgcagccggcaaggcgcccgtcagccacactcacccgtggagtca

SEQ ID NO: 605131 - DNA, 75 bp, synthetic construct
  source 1..75: mol_type = other DNA
accaaaagcggtcaaggctgcatacgaccttgcagccggcaaggcgccgggcagccacactcacccgtggagtca

SEQ ID NO: 605132 - DNA, 75 bp, synthetic construct
  source 1..75: mol_type = other DNA
tcgtgagatcctcgatgtctgcggtttcggttacataggcttaaaagaagagtcatttgatcacgacctcaagct

SEQ ID NO: 605133 - DNA, 75 bp, synthetic construct
  source 1..75: mol_type = other DNA
atacgctgaataaattactccaggatgacgcatttttagcccgccacggattgcaggaaaaacgcgaaagcttgc

SEQ ID NO: 605134 - DNA, 75 bp, synthetic construct
  source 1..75: mol_type = other DNA
ttactcttttcaggcggcagccagcgatcgtgggcgggtggtcgacgatatcaaaacgaaggtaatgactccaac

SEQ ID NO: 605135 - DNA, 75 bp, synthetic construct
  source 1..75: mol_type = other DNA
cagagattattaattcaattatcttgttccattatccagatttgaaatttgaaaatgtatacggtacatatccaa

SEQ ID NO: 605136 - DNA, 75 bp, synthetic construct
  source 1..75: mol_type = other DNA
tcgaattgttcattaaaaatccgcttgaaaacgggcttactcgtggagaacaaatggaactggcacgtattgctc

SEQ ID NO: 605137 - DNA, 75 bp, synthetic construct
  source 1..75: mol_type = other DNA
tcgaattgttcattaaaaatccgcttgaaaacggtcttactcgtggtgaacaaatggaactggcacgtattgctc

SEQ ID NO: 605138 - DNA, 75 bp, synthetic construct
  source 1..75: mol_type = other DNA
tcgaattgttcattaaaaatccgcttgaaaacggacttactcgtggggaacaaatggaactggcacgtattgctc

SEQ ID NO: 605139 - DNA, 75 bp, synthetic construct
  source 1..75: mol_type = other DNA
tcgaattgttcattaaaaagccgcttgaaaacggtcttactcgtggggaacaaatggaactggcacgtattgctc

SEQ ID NO: 605140 - DNA, 75 bp, synthetic construct
  source 1..75: mol_type = other DNA
tcgaattgttcattaaaaacccgcttgaaaacggccttactcgtggtgaacaaatggaactggcacgtattgctc

SEQ ID NO: 605141 - DNA, 75 bp, synthetic construct
  source 1..75: mol_type = other DNA
tcgaattgttcattaaaaacccgcttgaaaacggtcttactcgtggcgaacaaatggaactggcacgtattgctc

SEQ ID NO: 605142 - DNA, 75 bp, synthetic construct
  source 1..75: mol_type = other DNA
ttgctctttatctatttgattatcgtactcatggtgacgacggcaattttgtcggcctttggcgtcagtgcgaaa

SEQ ID NO: 605143 - DNA, 75 bp, synthetic construct
  source 1..75: mol_type = other DNA
cctgctcagtgtggaaggattacactggtttttacccaatgtgattaaaaactttagcggttttgctccacttgg

SEQ ID NO: 605144 - DNA, 75 bp, synthetic construct
  source 1..75: mol_type = other DNA
tccacaatttgataaagcgcgcgaaacgaaagtattaccattgacgggcgtggtttcgccgcgcacagaaaacac

SEQ ID NO: 605145 - DNA, 75 bp, synthetic construct
  source 1..75: mol_type = other DNA
tcgaattgttcattaaaaaaccgcttgaaaacggtcttactcgtggagaacaaatggaactggcacgtattgctc

SEQ ID NO: 605146 - DNA, 75 bp, synthetic construct
  source 1..75: mol_type = other DNA
tcgaattgttcattaaaaaaccgcttgaaaacggacttactcgtggtgaacaaatggaactggcacgtattgctc

SEQ ID NO: 605147 - DNA, 75 bp, synthetic construct
  source 1..75: mol_type = other DNA
ccctatccacttatctttttggtggtatggctgctgatgttgctggcgtggtatcttgttggtctgccgataggt

SEQ ID NO: 605148 - DNA, 75 bp, synthetic construct
  source 1..75: mol_type = other DNA
tcgaattgttcattaaaaagccgcttgaaaacgggcttactcgtggtgaacaaatggaactggcacgtattgctc

SEQ ID NO: 605149 - DNA, 75 bp, synthetic construct
  source 1..75: mol_type = other DNA
caccgcttgaagtgctggaatacatcatttcaaacggtgtaacagagtcgttagttggcggaggtcaatatggcc

SEQ ID NO: 605150 - DNA, 75 bp, synthetic construct
  source 1..75: mol_type = other DNA
cggattctggataaatttactgctcttacagctgagcttacagctgagcttaccatgcgtaaaaaacagtacaac

SEQ ID NO: 605151 - DNA, 75 bp, synthetic construct
  source 1..75: mol_type = other DNA
atgcgtaaaaaacagtacaactactatcgcgaccaattgctgacttttaaagaaggtgaggttgagtggaaagct

SEQ ID NO: 605152 - DNA, 75 bp, synthetic construct
  source 1..75: mol_type = other DNA
tacaaggtagcaacgataaaggaaataaccattcctgtgtggttaagattgatgacggaacgtatagcattcttt

SEQ ID NO: 605153 - DNA, 75 bp, synthetic construct
  source 1..75: mol_type = other DNA
cactcattacgctcaaattacccacttacaaggccgacgtcttttccctgcgccaggcatcgtgctgtatggcga

SEQ ID NO: 605154 - DNA, 75 bp, synthetic construct
  source 1..75: mol_type = other DNA
tagcgattgttaaccgtattaaactcttttatcgcccaaataatctgccaatagcgccagaagctgcaccggaga

SEQ ID NO: 605155 - DNA, 75 bp, synthetic construct
  source 1..75: mol_type = other DNA
atagtacattttttaactgtgatttttcaggtgccgacctgagcggcactgaatttatcggctgtcagttctatg

SEQ ID NO: 605156 - DNA, 75 bp, synthetic construct
  source 1..75: mol_type = other DNA
atgacgccattactgtataaaaaaacaggtacaaatatggctctggcactcgttggcgaaaaaattgacagaaac

SEQ ID NO: 605157 - DNA, 75 bp, synthetic construct
  source 1..75: mol_type = other DNA
agtgcgagctgtgggaaaaccgctggatgggtactcaggtgctgggcgcaacgttcagtggatcagacctctctg

SEQ ID NO: 605158 - DNA, 75 bp, synthetic construct
  source 1..75: mol_type = other DNA
agttgcgccagaaacaatacgagtactatcgtgatttactgttcagtttcccaaaacctgaaactgtcagtaatt

SEQ ID NO: 605159 - DNA, 75 bp, synthetic construct
  source 1..75: mol_type = other DNA
atgtgggaaaaactgtttaacggtgaaatcgaccgcctggtttccgaccactcaccatgccctccggaaatgaaa

SEQ ID NO: 605160 - DNA, 75 bp, synthetic construct
  source 1..75: mol_type = other DNA
gttgatttacaaggcgttaagctggacaactaccaggcgtcgttgctcatggagcggcttggcatcgcggtgatt

SEQ ID NO: 605161 - DNA, 75 bp, synthetic construct
  source 1..75: mol_type = other DNA
acgttcggcgtccggcgctattcgcggctatgtttccctgcgggagttgaatgccaccgatgtgcgaattggttt

SEQ ID NO: 605162 - DNA, 75 bp, synthetic construct
  source 1..75: mol_type = other DNA
gcgcactctcgccggtcggcaatgacggcgaacccgatccgctgtgcgcggctcgtgttcgcacaatccgcatta

SEQ ID NO: 605163 - DNA, 75 bp, synthetic construct
  source 1..75: mol_type = other DNA
ggggattatgcgcactctcgccgggtggcaatgatggcgaacccgatccgctgcgcgcggctcgtgttcgcacaa

SEQ ID NO: 605164 - DNA, 75 bp, synthetic construct
  source 1..75: mol_type = other DNA
atattggtggcgcatcgacattaattctccacttcaatatgaatacggggagcagccctgctgtacagttccgcg

SEQ ID NO: 605165 - DNA, 75 bp, synthetic construct
  source 1..75: mol_type = other DNA
gaatattggtggcgatagtcaggtctggacaaccgcgcaatttatttcgtggctggagagtcagggagcatttaa

SEQ ID NO: 605166 - DNA, 75 bp, synthetic construct
  source 1..75: mol_type = other DNA
gaactattcatcttgcaggttgcgttattgaggttatgggtaataaaggtgccatgaccatccgtgtaaccaccc

SEQ ID NO: 605167 - DNA, 75 bp, synthetic construct
  source 1..75: mol_type = other DNA
tgcaaacgtattgcccgaactgaaatatgcacagcgttacgcacagcgcgtatggatgaggcagaagcggcgaca

SEQ ID NO: 605168 - DNA, 75 bp, synthetic construct
  source 1..75: mol_type = other DNA
atattgcgatggctgaagcgggtatcccgcgcggttgcggtatgggttacggtggttgcgatggtggcggtcata

SEQ ID NO: 605169 - DNA, 75 bp, synthetic construct
  source 1..75: mol_type = other DNA
gttgtatctggaatttcttattccttgagggatagtgtgtctcatgttgatttttatcttaataaaggaatggaa

SEQ ID NO: 605170 - DNA, 75 bp, synthetic construct
  source 1..75: mol_type = other DNA
atgagaaaacaacttgcagtagtcttgttttctgtaatgacaggattgattacaacacctgctatttcttctggc

SEQ ID NO: 605171 - DNA, 75 bp, synthetic construct
  source 1..75: mol_type = other DNA
atgttttcttacgtgatgctgggtactaacgatctgccacgcgccatccgattctacgatccgttgatggaattg

SEQ ID NO: 605172 - DNA, 75 bp, synthetic construct
  source 1..75: mol_type = other DNA
atgccatctaacaccgaagacccgaccatgacaggtaagttgcggtctggagctattaagcgttttaaatcctgc

SEQ ID NO: 605173 - DNA, 75 bp, synthetic construct
  source 1..75: mol_type = other DNA
aggttaaaccagtgcaagccgcacatgtcaccgcagccttacgtgactggatcgatactaacaataacacgatga

SEQ ID NO: 605174 - DNA, 75 bp, synthetic construct
  source 1..75: mol_type = other DNA
tacgccgaaattatcgcttctattgccagtaaatctgccggacctggcacgcgtgccaatatcgatgaatttacg

SEQ ID NO: 605175 - DNA, 75 bp, synthetic construct
  source 1..75: mol_type = other DNA
gtcgaaggcgcagcgcattatctgcctgcctatgcgggcaacctcgacattatgacttccagtgcgctggcgaca

SEQ ID NO: 605176 - DNA, 75 bp, synthetic construct
  source 1..75: mol_type = other DNA
atgcagtgctctggtagctgtaaagccaggggcggtagcgtatttgcttatttttatcgtgtaatcaaagtgatt

SEQ ID NO: 605177 - DNA, 75 bp, synthetic construct
  source 1..75: mol_type = other DNA
caccgttcgccgtgtgagttcagacttaacatcatgtggtcagaatttgcggcgttcttgcagtgtaaaccgtaa

SEQ ID NO: 605178 - DNA, 75 bp, synthetic construct
  source 1..75: mol_type = other DNA
atgccgcaaaaaacgatcatcgtgagcattttatgcttaaccatgttgttgacagtctggatgatacaccgttcg

SEQ ID NO: 605179 - DNA, 75 bp, synthetic construct
  source 1..75: mol_type = other DNA
gacctgacgcccgcggcaatcggtccttactgcgtgccggtggtgaatctggcagccaacgttgatcagcagaac

SEQ ID NO: 605180 - DNA, 75 bp, synthetic construct
  source 1..75: mol_type = other DNA
ggacaactatggtcaatgaaactcaaagttcgtgcagttcatggccaacttaatgatggcggctttgatagccag

SEQ ID NO: 605181 - DNA, 75 bp, synthetic construct
  source 1..75: mol_type = other DNA
ttaattatggagcggtggatctggccggtataccttatgccgccagaatttttcagcagctgttaatcaacttgc

SEQ ID NO: 605182 - DNA, 75 bp, synthetic construct
  source 1..75: mol_type = other DNA
ttctggcgttgccgcaacttacagagatcgaaacctcagtggttataccaaacctggcggtgagtagtgactatt

SEQ ID NO: 605183 - DNA, 75 bp, synthetic construct
  source 1..75: mol_type = other DNA
ctttgccggattgctggaaagcaataaagccgaattaaccgcgattattgccagagaaacgggtaagccgcaacc

SEQ ID NO: 605184 - DNA, 75 bp, synthetic construct
  source 1..75: mol_type = other DNA
gtgacagccgcagcttccctatttttccttcgacttccggcgtcgttggaacttctgaatttatgctgaatatag

SEQ ID NO: 605185 - DNA, 75 bp, synthetic construct
  source 1..75: mol_type = other DNA
aaattgctgctcttgttgcgtataatgataaacaaataaaagaaatgaacaggctaattactctgcttaatgaaa

SEQ ID NO: 605186 - DNA, 75 bp, synthetic construct
  source 1..75: mol_type = other DNA
tagcgcagttggtcgagcaggagcagcaggatgatggagggtccgcacttgccgtgctagttaacgacatgatta

SEQ ID NO: 605187 - DNA, 75 bp, synthetic construct
  source 1..75: mol_type = other DNA
ttgaccacgagggagcttcacgcgagttattgaaaaccctgaacccgttgtgtcaggttccgacactggcattgg

SEQ ID NO: 605188 - DNA, 75 bp, synthetic construct
  source 1..75: mol_type = other DNA
tcgtttgtccggaggaaaacgggtaacacctgcacaaatttatgaattgtgtgcacagttatggatggccaggat

SEQ ID NO: 605189 - DNA, 75 bp, synthetic construct
  source 1..75: mol_type = other DNA
acgctaacattgctgtttttcctttggggcatattggcggcaaagcaaattttgtgggcaggagaaaacttaact

SEQ ID NO: 605190 - DNA, 75 bp, synthetic construct
  source 1..75: mol_type = other DNA
atgattaaggtgtatggcgtacccggatggggcactacaatcagtgagatgatgctaacactggctgatattcct

SEQ ID NO: 605191 - DNA, 75 bp, synthetic construct
  source 1..75: mol_type = other DNA
ggaaaatgacgagattatgacggagacagcggcgattgcattgatggttctcgatcgtcgcccggaccttgcgcc

SEQ ID NO: 605192 - DNA, 75 bp, synthetic construct
  source 1..75: mol_type = other DNA
gccagcatggcgcgaagagtatgaagaagcacgacacgatggcgtagagttccgtttcctcaataacccagaacg

SEQ ID NO: 605193 - DNA, 75 bp, synthetic construct
  source 1..75: mol_type = other DNA
caaccgacctgctgaaacctggcggctatctgcgcttaagtgcctgcatgcgcgagctggaaggctccgacgcct

SEQ ID NO: 605194 - DNA, 75 bp, synthetic construct
  source 1..75: mol_type = other DNA
tcgaccataatggcgaaactcgtctgactgatgtctttatgatcggcgacgttcagcgcggtccctcttctatcg

SEQ ID NO: 605195 - DNA, 75 bp, synthetic construct
  source 1..75: mol_type = other DNA
ctatcacttatttaagtgatactggttgtctggagattcagggggccagtctaatgatgatgatgagtccggtaa

SEQ ID NO: 605196 - DNA, 75 bp, synthetic construct
  source 1..75: mol_type = other DNA
caactgcgctcagttctgcccgtggaacggtaaaccgtacaaagacaaaatcaccgtctttagtctgtcgcaaga

SEQ ID NO: 605197 - DNA, 75 bp, synthetic construct
  source 1..75: mol_type = other DNA
ccgatgagaaaggccgtcgccgtccggttgaaaccaacgaaacagtaacgctacacgtagacagcctgatcaccg

SEQ ID NO: 605198 - DNA, 75 bp, synthetic construct
  source 1..75: mol_type = other DNA
gatactggtattgaggtggtatctgcgccagttgcctctggcattcgcatcaaaggagaaaatgacaccagtatt

SEQ ID NO: 605199 - DNA, 75 bp, synthetic construct
  source 1..75: mol_type = other DNA
cggaatacccgactaagtcgcgtgcgacgaaaggggttatctccatcaaggttaccgaacgtaacggtttagtgg

SEQ ID NO: 605200 - DNA, 75 bp, synthetic construct
  source 1..75: mol_type = other DNA
cgaagtaatgctgttctccgccgaaggtaaagtggtgcgctttaaagagtcttctgtccgtgcgatgggctgcaa

SEQ ID NO: 605201 - DNA, 75 bp, synthetic construct
  source 1..75: mol_type = other DNA
cggaatacccaaccaagtcgcgtgcgacgaaaggggttatctccatcaaagtcactgaacgtaacgggttagtgg

SEQ ID NO: 605202 - DNA, 75 bp, synthetic construct
  source 1..75: mol_type = other DNA
ccgtgtcgttggtgacgtaatcggtaaataccatccccatggtgacttggcggtctatgacacgatcgtccgcat

SEQ ID NO: 605203 - DNA, 75 bp, synthetic construct
  source 1..75: mol_type = other DNA
ttcgtgaacagttcggcgacaaacgtcgtactgaaatcactgccaacagcgccgacatcaacctggaagatctaa

SEQ ID NO: 605204 - DNA, 75 bp, synthetic construct
  source 1..75: mol_type = other DNA
cgaccagatcatgatgatcaccgatgccggtacgctggtacgtactcgcgtttcagaaatcagcatcgtgggccg

SEQ ID NO: 605205 - DNA, 75 bp, synthetic construct
  source 1..75: mol_type = other DNA
gtttaagcgtgaaatccgtcatcgtgaagtggatattatcgctgatttgctggatgaactggaggaagcaaaaca

SEQ ID NO: 605206 - DNA, 75 bp, synthetic construct
  source 1..75: mol_type = other DNA
ttgagtagtggcgagtctattatggctgtatttttcgcgcggatctggttaggtaaaacagaagattatagttac

SEQ ID NO: 605207 - DNA, 75 bp, synthetic construct
  source 1..75: mol_type = other DNA
cgccgctggtgggattattccttgtcgcttcgctatttcagctactctttgcttcagatattgcagccttatgcg

SEQ ID NO: 605208 - DNA, 75 bp, synthetic construct
  source 1..75: mol_type = other DNA
ttcgtgaacagtttggtgacaaacgtcgtactgaaatcacggctaacagcgctgatatcaacctggaagatctga

SEQ ID NO: 605209 - DNA, 75 bp, synthetic construct
  source 1..75: mol_type = other DNA
ccgtactgcggaagatgaaaacgtagtgggtctgcaacgtgttgctgaaccggttgacgaggaagatctggatac

SEQ ID NO: 605210 - DNA, 75 bp, synthetic construct
  source 1..75: mol_type = other DNA
tcggttccatcgacggcgactctgcggcggcaatgcgttatacggaaatccgtctggcgaaaattgcccatgaac

SEQ ID NO: 605211 - DNA, 75 bp, synthetic construct
  source 1..75: mol_type = other DNA
ttgttatacaaaatgctgctgtttcagcaccatcaaaagagttagtcgatattgtatccaaatatgcatcaacgt

SEQ ID NO: 605212 - DNA, 75 bp, synthetic construct
  source 1..75: mol_type = other DNA
attctattaatgtatatgatataaaagatgtcgatgcactaacaaaaaatcttaagggattatataagaaaaaac

SEQ ID NO: 605213 - DNA, 75 bp, synthetic construct
  source 1..75: mol_type = other DNA
atccttgatctgccattctccctggttttcgatactttactgctgccgatcgacattcatcatggcccgtatgag

SEQ ID NO: 605214 - DNA, 75 bp, synthetic construct
  source 1..75: mol_type = other DNA
taaaattgtggaaagaagacgtgcagaaggagctaaaagtacagatgtaagtttctcaagcatatccactatgct

SEQ ID NO: 605215 - DNA, 75 bp, synthetic construct
  source 1..75: mol_type = other DNA
atgagaatgtttctgagaaaataaatgctatcgctgcacaaaggcgagccgagggcgcaaaagaaaaagatgtta

SEQ ID NO: 605216 - DNA, 75 bp, synthetic construct
  source 1..75: mol_type = other DNA
gaatatgccaatatggttgaagatatcagagagaaggtgtcggttgagattgaaaggttctttccaaaaaataac

SEQ ID NO: 605217 - DNA, 75 bp, synthetic construct
  source 1..75: mol_type = other DNA
cgcgattattgaaaaacgtcgacaggagggggcgagagaaaaagatgtcagtttttcagcaacggcttcaatgct

SEQ ID NO: 605218 - DNA, 75 bp, synthetic construct
  source 1..75: mol_type = other DNA
gaggctcagatggagcgtaaaaagtctgcatttaatcagactgagtttaataaattgcttcttgaatgcgttgta

SEQ ID NO: 605219 - DNA, 75 bp, synthetic construct
  source 1..75: mol_type = other DNA
gataataatatattaagctgtatctgcaaagtcatggaaccattgttactgaatccccataaaattggccctatg

SEQ ID NO: 605220 - DNA, 75 bp, synthetic construct
  source 1..75: mol_type = other DNA
atccttgatctcccattctctttagtctttgataccttactgctaccgatcgacattcatcacggagcatatgag

SEQ ID NO: 605221 - DNA, 75 bp, synthetic construct
  source 1..75: mol_type = other DNA
tggtgaccttgctgagtggctgtggcagcatcattagtcgcactataccggggcaggggcatggcaaccaatatt

SEQ ID NO: 605222 - DNA, 75 bp, synthetic construct
  source 1..75: mol_type = other DNA
gagggagcaaaagagaaagatgtaagttattcaagtattgcctctatgttgcttgagttaggattgcgagtttat

SEQ ID NO: 605223 - DNA, 75 bp, synthetic construct
  source 1..75: mol_type = other DNA
ttcgattattgagaagcgtcgacaggaaggggcaagggaaaaagatgtcagtttttcagcaacagcttcaatgct

SEQ ID NO: 605224 - DNA, 75 bp, synthetic construct
  source 1..75: mol_type = other DNA
gtctttttaccgggaactgggcttacggggcgatagccggttgtacgttcttcattgcgcgtgaacacacccagg

SEQ ID NO: 605225 - DNA, 75 bp, synthetic construct
  source 1..75: mol_type = other DNA
gtggtggggaggttttgatccgcgcgtatgggatgttggaagcctgtttgactttgttgttcctgttactgtttg

SEQ ID NO: 605226 - DNA, 75 bp, synthetic construct
  source 1..75: mol_type = other DNA
tgatccacgtgcatgggatgtggcaagcctgatggattttgcgattccacttttagcgtgcacattattatatat

SEQ ID NO: 605227 - DNA, 75 bp, synthetic construct
  source 1..75: mol_type = other DNA
ggtgcattttgcccatcagcgcgtttccaccctctccggcggacagcagcagcgtgtggcgattgcccgcgcgct

SEQ ID NO: 605228 - DNA, 75 bp, synthetic construct
  source 1..75: mol_type = other DNA
accggcgagcagaaacagcgcgcgttacaggcgctgacccgcgttggcatggtgcattttgcccatcagcgcgtt

SEQ ID NO: 605229 - DNA, 75 bp, synthetic construct
  source 1..75: mol_type = other DNA
tccacgcgcatgggatgtggcaagcctgatggattttgctgtgccgatggtagcgtgtcttctgatctggctgtt

SEQ ID NO: 605230 - DNA, 75 bp, synthetic construct
  source 1..75: mol_type = other DNA
gtacgttcttcattgcgcgtgaacacacccaggcagaatatcgctggatagaaaagtttgggaaagggaaacgta

SEQ ID NO: 605231 - DNA, 75 bp, synthetic construct
  source 1..75: mol_type = other DNA
gaatatgccaatatggttgaagatatcagggagaaggtgtctgttgagatggagagatttttccctgtagaaaat

SEQ ID NO: 605232 - DNA, 75 bp, synthetic construct
  source 1..75: mol_type = other DNA
tatatgaggctcagatggagcgtaaagagtctgcatttaatcagactgagtttaataaattgcttcttgaatgcg

SEQ ID NO: 605233 - DNA, 75 bp, synthetic construct
  source 1..75: mol_type = other DNA
tgatccgcgcgcgtgggatgtagcaagtctgatggattttgcgattccacttttagcgtgcacattattatatat

SEQ ID NO: 605234 - DNA, 75 bp, synthetic construct
  source 1..75: mol_type = other DNA
ggcggttttgatccacgcgcgtgggatgtggcaagcctgatggattttgctgtgccggtggtggcgtgtctgctg

SEQ ID NO: 605235 - DNA, 75 bp, synthetic construct
  source 1..75: mol_type = other DNA
gaaatgttcgggcatggcaagcgaatgaatatgccgtggtggggcggttttgacccacgcgcgtgggatatggca

SEQ ID NO: 605236 - DNA, 75 bp, synthetic construct
  source 1..75: mol_type = other DNA
gctgaaactggaaggctggagcgaaagcggcgcgcaggcgaaaatcgcgattgccgaaggccaggtgaaagtcga

SEQ ID NO: 605237 - DNA, 75 bp, synthetic construct
  source 1..75: mol_type = other DNA
gatgtgccgaaagttgccgttgataccggcgcgctcggtggaatgtacgccaggcgtattcatctgacctccact

SEQ ID NO: 605238 - DNA, 75 bp, synthetic construct
  source 1..75: mol_type = other DNA
gtggacttcagaactgccgatgcagcagattttcttccccccggagagacaaacggtgtaagtctgtggggaaat

SEQ ID NO: 605239 - DNA, 75 bp, synthetic construct
  source 1..75: mol_type = other DNA
tcacatttgaagtttttaccagttttaaatagagtaagtccattttttccagataaaagagacacaattatttca

SEQ ID NO: 605240 - DNA, 75 bp, synthetic construct
  source 1..75: mol_type = other DNA
ataaaaaaattcatgttatttggatcgctggcgcaccacctgagactataacaaaatatgcaaaagcatataaag

SEQ ID NO: 605241 - DNA, 75 bp, synthetic construct
  source 1..75: mol_type = other DNA
agtgaaataagaagaactctgcatccttcacctttacctgcgactacatctgccaggaactggaagtcggttatt

SEQ ID NO: 605242 - DNA, 75 bp, synthetic construct
  source 1..75: mol_type = other DNA
acaaaacgtatatacgttcgctttgttgttaatggaagctgggcagcgtggagtcaggttgttgtttccggatgg

SEQ ID NO: 605243 - DNA, 75 bp, synthetic construct
  source 1..75: mol_type = other DNA
gaggtggtgcaaatattaccaacaagcctgacggcgtaaccggtaactttttgctccgtgtagagtcgactcgca

SEQ ID NO: 605244 - DNA, 75 bp, synthetic construct
  source 1..75: mol_type = other DNA
tcagtgaatattggtgaattctaccaggtaactattcagcagcgtaaggatatttctcttgcacttagcgcaggt

SEQ ID NO: 605245 - DNA, 75 bp, synthetic construct
  source 1..75: mol_type = other DNA
tgcaaaaaactatgctgagttaattcggctggcaaaagaaacagaagactacgaagcattagagcgttatcgtga

SEQ ID NO: 605246 - DNA, 75 bp, synthetic construct
  source 1..75: mol_type = other DNA
gggcggaacctgagtgaagtacatgcgctcaatacgctggtgaacagctccccgcgtatcctgctgaatgaagac

SEQ ID NO: 605247 - DNA, 75 bp, synthetic construct
  source 1..75: mol_type = other DNA
atccggtcgatatgcggatgtatctgcgttgtcagggcgacgctatcagtgaaacatggctgtatcagtatttcc

SEQ ID NO: 605248 - DNA, 75 bp, synthetic construct
  source 1..75: mol_type = other DNA
tgattttaaggatatcgaaagagttgctaagtattcgctcattagcaaagagtctggagttattatacaaaatgc

SEQ ID NO: 605249 - DNA, 75 bp, synthetic construct
  source 1..75: mol_type = other DNA
atttctattcgggcaaaatatcgagcgctggaatggggaaacttttatgggcacaatgctagattatggtatgaa

SEQ ID NO: 605250 - DNA, 75 bp, synthetic construct
  source 1..75: mol_type = other DNA
aagaaaaagaacagcttggtattattgataaaaatagacaagaaagattgttgattatatcaacaaatctttctg

SEQ ID NO: 605251 - DNA, 75 bp, synthetic construct
  source 1..75: mol_type = other DNA
attatccccaaaaaatacagtgctctttttatttctggtccggatgccattatgatggcgatgaaagattactat

SEQ ID NO: 605252 - DNA, 75 bp, synthetic construct
  source 1..75: mol_type = other DNA
attactgacattttattggatgctgatagtcttatccaatatgttcaacttgaacaccctgtaagcgatataaaa

SEQ ID NO: 605253 - DNA, 75 bp, synthetic construct
  source 1..75: mol_type = other DNA
atgcaaatggtggtgttgttgagttttcagataaagaaaaatttaaagaatatatgacagaacttttttctcctt

SEQ ID NO: 605254 - DNA, 75 bp, synthetic construct
  source 1..75: mol_type = other DNA
ttatgggagtaaaaaaattcggcaccaacgtctctcagattcgtttagaaacaatggcttctattacgttatctc

SEQ ID NO: 605255 - DNA, 75 bp, synthetic construct
  source 1..75: mol_type = other DNA
attgatacgcaccatataacagcaaaagaacatgaaaaaataaaattacttataaatgaagttaataaagtatca

SEQ ID NO: 605256 - DNA, 75 bp, synthetic construct
  source 1..75: mol_type = other DNA
ataatgataacagaaatccagagactattaatgtatcaagtttcacagagacatctgaggaagtaaaaatatttg

SEQ ID NO: 605257 - DNA, 75 bp, synthetic construct
  source 1..75: mol_type = other DNA
atattaagtgatatcgataccaaaaatattaatagatattttgtatcggtcatgaatcagaatgtgtctgggctg

SEQ ID NO: 605258 - DNA, 75 bp, synthetic construct
  source 1..75: mol_type = other DNA
tttatgatgcaaatggtggtgttgttgagttttcagatacagaaaagtttaaagaatatatgacagaattttttt

SEQ ID NO: 605259 - DNA, 75 bp, synthetic construct
  source 1..75: mol_type = other DNA
acgctttttgaaactaacttattaaagtctgttctacagatccaagactctgtgatgaattatgcatatactaga

SEQ ID NO: 605260 - DNA, 75 bp, synthetic construct
  source 1..75: mol_type = other DNA
tactggattactaagtaagcttcaagttcaagaagaattggttttggaaatcttaagtgctattcaccagagaat

SEQ ID NO: 605261 - DNA, 75 bp, synthetic construct
  source 1..75: mol_type = other DNA
gcttacagggcgcagcacgcgagtcggcgctgaaagtgctggaactgacagcgggtaaactggcggccttttatg

SEQ ID NO: 605262 - DNA, 75 bp, synthetic construct
  source 1..75: mol_type = other DNA
cctacacccgtcagtatgatcttgatctgctggcagaactccgccgcgacaaccaggcaatgcgcgtgatcgcca

SEQ ID NO: 605263 - DNA, 75 bp, synthetic construct
  source 1..75: mol_type = other DNA
tcggcgatttcagcgaaggcgtgtttggttacgcgccgtggaaacggatcgtttatctcggcagcggtggcttac

SEQ ID NO: 605264 - DNA, 75 bp, synthetic construct
  source 1..75: mol_type = other DNA
ggcgatctttattctttcagcctgatgtctgccggagcggcatcggcctggcatgatgttgcgcttgagttgact

SEQ ID NO: 605265 - DNA, 75 bp, synthetic construct
  source 1..75: mol_type = other DNA
tcagatattatatcagttctgctgatttaaccgctgagaaattcgccacagcgatccgaaatcactggcacgtgg

SEQ ID NO: 605266 - DNA, 75 bp, synthetic construct
  source 1..75: mol_type = other DNA
tgcagtcgctgcacatgggcaatacgccggataccccatcagccagtggcaccgttaaccgcgtggtgcaaggcg

SEQ ID NO: 605267 - DNA, 75 bp, synthetic construct
  source 1..75: mol_type = other DNA
aactatattgccacgcgcgtggatatgaaacggatgcgttcttattcttataatgtatcccgggcccgtatctgg

SEQ ID NO: 605268 - DNA, 75 bp, synthetic construct
  source 1..75: mol_type = other DNA
tccatcatttttaatggacactatcgtatgaaacaccggacctggatcactgaagctttacgtcttcactttgaa

SEQ ID NO: 605269 - DNA, 75 bp, synthetic construct
  source 1..75: mol_type = other DNA
agctggtcctgccggccggaaccctcaggctgaaaggtgaactgacaccggcgttattacagacacttgtccgcg

SEQ ID NO: 605270 - DNA, 75 bp, synthetic construct
  source 1..75: mol_type = other DNA
gtctggacgtggtaatgaatgaagacgactgcaaaataagaagaggaaatgcagcagaattattttcagggatac

SEQ ID NO: 605271 - DNA, 75 bp, synthetic construct
  source 1..75: mol_type = other DNA
tgacggtcagatattatatcagttctgctgatttaaccgcagaaaagttcgccacagcaatccgaaaccactggc

SEQ ID NO: 605272 - DNA, 75 bp, synthetic construct
  source 1..75: mol_type = other DNA
gtattcaaggcagggttaagacgtaagatgcgaaaagcagccatggatagaaactatctggcgtcagtccttgcg

SEQ ID NO: 605273 - DNA, 75 bp, synthetic construct
  source 1..75: mol_type = other DNA
gcagaattattttcagggatacggcacattgctattaatattttgacgaatgataaggtattcaaggcagggtta

SEQ ID NO: 605274 - DNA, 75 bp, synthetic construct
  source 1..75: mol_type = other DNA
agtcagccatctcaacagattgcttttcaacactattgtcagagtctggagcagattgaagatcgcatactttaa

SEQ ID NO: 605275 - DNA, 75 bp, synthetic construct
  source 1..75: mol_type = other DNA
cttcaacctccggacgtgatgtttatcgccgtatgggctggagtggtgagccgacgaccagcgagctgaaaaatc

SEQ ID NO: 605276 - DNA, 75 bp, synthetic construct
  source 1..75: mol_type = other DNA
cggcccgctggcaggcattgaagatccgaaggtactgcaatatgcgctggtggtgtcatacgctaacggggcagg

SEQ ID NO: 605277 - DNA, 75 bp, synthetic construct
  source 1..75: mol_type = other DNA
tggtctctgtgcaatctggtctgccagttgcaggctcttaaaggtgttggtcagctaattgcaataactctggtt

SEQ ID NO: 605278 - DNA, 75 bp, synthetic construct
  source 1..75: mol_type = other DNA
gcccaggctgtacgtcgattatttcagaaattgcagggactttacggaaacattctttcctgctatgaggctggc

SEQ ID NO: 605279 - DNA, 75 bp, synthetic construct
  source 1..75: mol_type = other DNA
atgaatataaaatgccaggttattgccccttcccggataccaaaatcaccgacagacagaatcaaaaatgatcat

SEQ ID NO: 605280 - DNA, 75 bp, synthetic construct
  source 1..75: mol_type = other DNA
agtctcatgatttaactaaagaacttggttatgttagagaaaaattttctaagctagactccactgacttccatc

SEQ ID NO: 605281 - DNA, 75 bp, synthetic construct
  source 1..75: mol_type = other DNA
gagtttacgaaagacgatctgcaaataacattgcaaaatatcatttcaaaaattcccggaatatcaacttcacca

SEQ ID NO: 605282 - DNA, 75 bp, synthetic construct
  source 1..75: mol_type = other DNA
cagtgacatcagcatacctgttggtcatagaggcgtttatgccggatggcgtgctgaactttcagcatcagccac

SEQ ID NO: 605283 - DNA, 75 bp, synthetic construct
  source 1..75: mol_type = other DNA
aatcaacgatctggacgctgacgagttcctcgagcatgtagcgaaaaatcatcccgcaccgcaggcaccgcgcta

SEQ ID NO: 605284 - DNA, 75 bp, synthetic construct
  source 1..75: mol_type = other DNA
gtgcccgttgtaaccttaacggggattccaggctataccggtttaagaattgaaattgacatggtttgccttttt

SEQ ID NO: 605285 - DNA, 75 bp, synthetic construct
  source 1..75: mol_type = other DNA
gcgattgtcgccaatgacgtacgtaaagcaatcggggaagcaaaagatgatgacactgcggatattctgaccgcc

SEQ ID NO: 605286 - DNA, 75 bp, synthetic construct
  source 1..75: mol_type = other DNA
tgcctccacagtacctgtcgtacttactgaaagcaccgttatgcccaaactcccggtggtaaaaaaacgtccccg

SEQ ID NO: 605287 - DNA, 75 bp, synthetic construct
  source 1..75: mol_type = other DNA
caacgatattgccgttctgctggacgtggtggtcaatcacaaaatgggcgcagatgaaaaagaagccattcgcgt

SEQ ID NO: 605288 - DNA, 75 bp, synthetic construct
  source 1..75: mol_type = other DNA
ttggtatcaatatggtctggttgccgcccgcctataaaggcgcatcgggcgggtattcggtcggctacgactcct

SEQ ID NO: 605289 - DNA, 75 bp, synthetic construct
  source 1..75: mol_type = other DNA
tgatccgcgcgcgtgggatgtgacaagcctgatggattttgctgtgccggtggtggcgtgtctgctgatctggat

SEQ ID NO: 605290 - DNA, 75 bp, synthetic construct
  source 1..75: mol_type = other DNA
tgacgcagtctgctatgcgcaccattgtggagatgaagcttgcacaggtctgcgaacgcctgcactgccattatg

SEQ ID NO: 605291 - DNA, 75 bp, synthetic construct
  source 1..75: mol_type = other DNA
taacttattgttcttttcatatggttattactgcatgaaggaccagagtggtaatactgaaagtcttagcttgaa

SEQ ID NO: 605292 - DNA, 75 bp, synthetic construct
  source 1..75: mol_type = other DNA
gtcagattttcagcggtacgctggtcgaagccgatcccttccatgccgtcacgctggtcgccaaccacgacactc

SEQ ID NO: 605293 - DNA, 75 bp, synthetic construct
  source 1..75: mol_type = other DNA
cgctgcatcaggtggattacgccctgcgctactgcgaacgcatcgtcgccctgcgtcaggggcacgtcttctacg

SEQ ID NO: 605294 - DNA, 75 bp, synthetic construct
  source 1..75: mol_type = other DNA
gtgaatcgcctgagcgtactggagaacgtgctgattggcgcgctcggcagcacgccgttctggcgcacctgtttt

SEQ ID NO: 605295 - DNA, 75 bp, synthetic construct
  source 1..75: mol_type = other DNA
agcgtgtggcgattgcccgcgcgctgatgcagcaggcgaaagtgattctcgctgacgaaccgatcgcctcgctgg

SEQ ID NO: 605296 - DNA, 75 bp, synthetic construct
  source 1..75: mol_type = other DNA
atggatataacaccttttcttcatgcgctttgtgctgtggctgcgcaggtactggttggtttttttaccggaaac

SEQ ID NO: 605297 - DNA, 75 bp, synthetic construct
  source 1..75: mol_type = other DNA
atggatataacacctttccttcatgcactttgtgctgtggctgcgcagatactggttggtctttttaccggaaac

SEQ ID NO: 605298 - DNA, 72 bp, synthetic construct
  source 1..72: mol_type = other DNA
gcaagcctgatggattttgctgtgccggtggtagcgtgtcttctggtctggttgttggttaatcgagggtga

SEQ ID NO: 605299 - DNA, 75 bp, synthetic construct
  source 1..75: mol_type = other DNA
aatcaggccggcggcgcggatgcggccaacctgctgaagcctgcgctggcgcggggtgaactgcgcaccattgcc

SEQ ID NO: 605300 - DNA, 75 bp, synthetic construct
  source 1..75: mol_type = other DNA
aggccggtgccggtgtgaaaggtgaatttgaacagcgcctgaaaaacgtgattgatgccgtgcagcagtcaccgg

SEQ ID NO: 605301 - DNA, 75 bp, synthetic construct
  source 1..75: mol_type = other DNA
gatgtgctgaatctgttttatcaggtctttgaccggggttttatgcgcgacggcgaggggcgtgaaattgacttc

SEQ ID NO: 605302 - DNA, 75 bp, synthetic construct
  source 1..75: mol_type = other DNA
gctttatgcgcgacggcgaagggcgggaaattgacttccgcaacaccgtgattctgatgacggctaatctgggca

SEQ ID NO: 605303 - DNA, 75 bp, synthetic construct
  source 1..75: mol_type = other DNA
gtggcgcagatcgcccgggaaaacggaatcaacgataacctgctcttcaactggcgccatcaataccggaaaggt

SEQ ID NO: 605304 - DNA, 75 bp, synthetic construct
  source 1..75: mol_type = other DNA
ttgctcgcaggcatgtcggagcaggaacttgatgcctgcctttacggacaattttccacggtaccagtcgtacgt

SEQ ID NO: 605305 - DNA, 75 bp, synthetic construct
  source 1..75: mol_type = other DNA
ctgcttcccgtgacgttaacgccggagccggataataaaatcccggctccggcacaggaaccagagcagataaat

SEQ ID NO: 605306 - DNA, 75 bp, synthetic construct
  source 1..75: mol_type = other DNA
tatattctgttatttgttattgccactcttatgctgctgcccggtagtgtcctggtcattgtcgggggcattatt

SEQ ID NO: 605307 - DNA, 75 bp, synthetic construct
  source 1..75: mol_type = other DNA
aactcaacgaactggaaatccggtacggtcaggagctgaaacttaccgaacaactgctggaaagccgccaggaca

SEQ ID NO: 605308 - DNA, 75 bp, synthetic construct
  source 1..75: mol_type = other DNA
aggcgtttaatgaacagtgcctggaagcactgattgaacagagccggttcagacccgcaccgacgccttccctgc

SEQ ID NO: 605309 - DNA, 75 bp, synthetic construct
  source 1..75: mol_type = other DNA
cagtatcagcaggaaaagcggcttgcgcagcagattatggcgttgcgtcaggaaggggcagacagcactgatttg

SEQ ID NO: 605310 - DNA, 75 bp, synthetic construct
  source 1..75: mol_type = other DNA
aatacaccgtccgacagtctgtgctgtgagctggttctgccggccggaaccctcaggcttaaaggtaaactgacg

SEQ ID NO: 605311 - DNA, 75 bp, synthetic construct
  source 1..75: mol_type = other DNA
ttcttacccgcttaattccgctatttccttacaatattcaaaattacgcctacggattaaccgccattgcctttt

SEQ ID NO: 605312 - DNA, 75 bp, synthetic construct
  source 1..75: mol_type = other DNA
gggttattaaatgcagccatatatatattagcaaaatacccaagcgaatgtcgtggtgaaagaaaagagataagt

SEQ ID NO: 605313 - DNA, 75 bp, synthetic construct
  source 1..75: mol_type = other DNA
ggaattttcaacaatatggtatgaccttaaagatgattcctttgaacattttgaaaatgggcttcaaattatagg

SEQ ID NO: 605314 - DNA, 75 bp, synthetic construct
  source 1..75: mol_type = other DNA
gcgtacttctctcagtgctcttgatattgcaacgataaaaaccacgcaggcatcactgcaaaaagataatggtga

SEQ ID NO: 605315 - DNA, 75 bp, synthetic construct
  source 1..75: mol_type = other DNA
tatttaattatgacggttttattcgtggctatgcaacagagccagattttacacttctgcatgatatacaagacg

SEQ ID NO: 605316 - DNA, 75 bp, synthetic construct
  source 1..75: mol_type = other DNA
acagcagcaataaatattactgcattaggtgccagaggtcatctgccgacaccatcggaggttaatctttttctt

SEQ ID NO: 605317 - DNA, 75 bp, synthetic construct
  source 1..75: mol_type = other DNA
gtgattttctggggaaccggcaagagagcgtagtgacagacgaaaacggcgaagcgaccttcttttgcaacggcg

SEQ ID NO: 605318 - DNA, 75 bp, synthetic construct
  source 1..75: mol_type = other DNA
acgcaatgttggattgccgttatatttgcccaacggtgctgcgccgaatctttcgctcattctcggcggcgctgg

SEQ ID NO: 605319 - DNA, 75 bp, synthetic construct
  source 1..75: mol_type = other DNA
tggatgccggtcttcaacgacgtctggaagaactggcgcaaaactggaaaggacgattgccaccgcgcagctcac

SEQ ID NO: 605320 - DNA, 75 bp, synthetic construct
  source 1..75: mol_type = other DNA
cgcaacgtgaccctgcatttgacggataaaggtgattatcaattgctggtgatggatgacgtagggcaaatcgcg

SEQ ID NO: 605321 - DNA, 75 bp, synthetic construct
  source 1..75: mol_type = other DNA
ggcgcaaaactggaaaggacgattaccaccgcgcagctcactggcgatgatcgtggttgatcataccgatatgcg

SEQ ID NO: 605322 - DNA, 75 bp, synthetic construct
  source 1..75: mol_type = other DNA
cggattatggctgatgaagcgcaacccttgcccggatggtgccttgccgcgcgtcgccccactggcatggaaaac

SEQ ID NO: 605323 - DNA, 75 bp, synthetic construct
  source 1..75: mol_type = other DNA
aatggcatacgtttccctatctggctggatgaaaatggcaaacgagtcgctgccgattgtccacaggcgcgacaa

SEQ ID NO: 605324 - DNA, 75 bp, synthetic construct
  source 1..75: mol_type = other DNA
gtcagtgtcgtcactcgtgaaacgccatggagtcagaatgccgtcacctctgccggtatgatgagaggtgttgct

SEQ ID NO: 605325 - DNA, 75 bp, synthetic construct
  source 1..75: mol_type = other DNA
acgaccggataacagtgcgattattgcggcccgggaagcgagaaaagcgcaagccagagcgaaacaggcggaatt

SEQ ID NO: 605326 - DNA, 75 bp, synthetic construct
  source 1..75: mol_type = other DNA
cgcaagctggaacagcaacaggctaatgcggaaccagaagaacaggtcgatccgcgcaaagccgcgtcgaagccg

SEQ ID NO: 605327 - DNA, 75 bp, synthetic construct
  source 1..75: mol_type = other DNA
caacgtctggcacggttacggctattgcaccccactcgacggctcatccttcagccttagctgaattaagcgtga

SEQ ID NO: 605328 - DNA, 75 bp, synthetic construct
  source 1..75: mol_type = other DNA
tgcctgctgaacctaaaacctataaacgcaaatcaacgcaatttaagccactaacagcaatgcaggaggcttatt

SEQ ID NO: 605329 - DNA, 75 bp, synthetic construct
  source 1..75: mol_type = other DNA
ccagaacaacaggtcgatccgcgcaaagccgccgtcgaagccgctattgcccgtgccaaagcacgcaagctggaa

SEQ ID NO: 605330 - DNA, 75 bp, synthetic construct
  source 1..75: mol_type = other DNA
accagaagaacaggttgacccgcgcaaagccgctgtcgaagctgctatcgcccgcgccaaagcacgcaagctgga

SEQ ID NO: 605331 - DNA, 75 bp, synthetic construct
  source 1..75: mol_type = other DNA
gggctttacattgccgtggctggatgtgccggtcgtcaaaatcactaactgcctgctggcgccgtcggccagtga

SEQ ID NO: 605332 - DNA, 75 bp, synthetic construct
  source 1..75: mol_type = other DNA
tgccccccactctacggctcatccttcagcattagctgaattaagcgtgattattgatgctgatggtgaagactg

SEQ ID NO: 605333 - DNA, 75 bp, synthetic construct
  source 1..75: mol_type = other DNA
aagaacagattgatccgcgcaaagccgccgtcgaagctgctattgcccgtgccaaagcacgcaagctggaacagc

SEQ ID NO: 605334 - DNA, 75 bp, synthetic construct
  source 1..75: mol_type = other DNA
ggaacagcaacaggctaatgcggagccagaagaacagattgatccgcgcaaagctgccgtcgaagcggctattgc

SEQ ID NO: 605335 - DNA, 75 bp, synthetic construct
  source 1..75: mol_type = other DNA
aagcggcagttgccgcggctattgcccgcgctcaggccaaaaaagccgcccagcagaaggttgtaaacgaggact

SEQ ID NO: 605336 - DNA, 75 bp, synthetic construct
  source 1..75: mol_type = other DNA
gttgctgatccacgtaaaactgcagttgaagcggctattgcccgcgccaaagcacgcaagctggaacagcaacag

SEQ ID NO: 605337 - DNA, 75 bp, synthetic construct
  source 1..75: mol_type = other DNA
ctggatgccggtcttcaacgacgtctggaagaactggcgcaaaactggaaagggcggttgccaccgcgcagctca

SEQ ID NO: 605338 - DNA, 75 bp, synthetic construct
  source 1..75: mol_type = other DNA
gtggcagcttcacgtttggttcaatgtccggcagcggctatgccagcatcagtcaggacaaaattaaaagcaatt

SEQ ID NO: 605339 - DNA, 75 bp, synthetic construct
  source 1..75: mol_type = other DNA
cgcaacaggagaattggcagccagagcaattgccggaatgctgtatcctggcgtgaagcaatctgacctcagtga

SEQ ID NO: 605340 - DNA, 75 bp, synthetic construct
  source 1..75: mol_type = other DNA
cgatatcgtctccggctcaactctcagcgccggtaacaatgtctccgtcactgccacggggaaaaataaggacca

SEQ ID NO: 605341 - DNA, 75 bp, synthetic construct
  source 1..75: mol_type = other DNA
gagcgcaacggataaggataaagctgagcttggtggtgcaggtgctggaaccccgggtggttgggagccgcagga

SEQ ID NO: 605342 - DNA, 75 bp, synthetic construct
  source 1..75: mol_type = other DNA
gaaagagcatcctggcatgagcgatgcacagttgcgggagaccccggaatacagagaggtcatgaaaggctacgg

SEQ ID NO: 605343 - DNA, 75 bp, synthetic construct
  source 1..75: mol_type = other DNA
acgctggcaactgtgtcagcagggctggccggcggtcttaccggaaacagcaccgcatcagcagcagtgggagca

SEQ ID NO: 605344 - DNA, 75 bp, synthetic construct
  source 1..75: mol_type = other DNA
gcagcagtgggagcacagagcgggaagaatgctgttgagaataattaccttagtgaagagcagtctctgactttt

SEQ ID NO: 605345 - DNA, 75 bp, synthetic construct
  source 1..75: mol_type = other DNA
gcgtcaaaaaagttgacgaaaacagccatcaatgaagccctgtttagaatgaaaaaagcgggaatagagaaacct

SEQ ID NO: 605346 - DNA, 75 bp, synthetic construct
  source 1..75: mol_type = other DNA
atgatttacccaacaaatatcggaaaaaacggggaacatttccgtctcgccactctggaaagtgtctggattcag

SEQ ID NO: 605347 - DNA, 75 bp, synthetic construct
  source 1..75: mol_type = other DNA
agtaaacgccattgctcacgccattctgggcggtgcagcagcggcaatgcagggtaataatgttgctgccggtgc

SEQ ID NO: 605348 - DNA, 75 bp, synthetic construct
  source 1..75: mol_type = other DNA
tgcggcttcggtaacgcctcttatagggcaagctgcatcaaataaattaagctaccttggtattgggaaaaagat

SEQ ID NO: 605349 - DNA, 75 bp, synthetic construct
  source 1..75: mol_type = other DNA
attatccgtataatgaactgtatgtaaacaaacccaacggaaacggctattatcgtgtagattcatataaccccg

SEQ ID NO: 605350 - DNA, 75 bp, synthetic construct
  source 1..75: mol_type = other DNA
gctcggcagtacaacgctcagcaacagtggctccctgctcagtggcggtcccctgaccgtgaatacccgcgactt

SEQ ID NO: 605351 - DNA, 75 bp, synthetic construct
  source 1..75: mol_type = other DNA
tggacgtgaccattcaggcgcaaatcatcgaactactgctggagctacagcagaaagagaacatggcgctggtgt

SEQ ID NO: 605352 - DNA, 75 bp, synthetic construct
  source 1..75: mol_type = other DNA
tacgaaggacggggaatgagtaagagaaaaatggcagaatgtttaaatcgtactcacccggaatggtgtttcagc

SEQ ID NO: 605353 - DNA, 75 bp, synthetic construct
  source 1..75: mol_type = other DNA
cggaaatatgtttaaccggttactggtttcgaagaagctgacgaaaacagcagttaatgaggttttacgcagaat

SEQ ID NO: 605354 - DNA, 75 bp, synthetic construct
  source 1..75: mol_type = other DNA
tgattaacggcaagcaaaagagctggctggcacattgtgccgattcagaggcattaataatcgacagagttattg

SEQ ID NO: 605355 - DNA, 75 bp, synthetic construct
  source 1..75: mol_type = other DNA
gcctgcttaacccgcgctgcccctacgccactgacaaatgccgtgctgaagaaccggcgctgaatatgctcgctg

SEQ ID NO: 605356 - DNA, 75 bp, synthetic construct
  source 1..75: mol_type = other DNA
attgccgatgaaccgaccactgcgctggacgtgaccatccaggcgcaaatcattgagctgttgttggagctacag

SEQ ID NO: 605357 - DNA, 75 bp, synthetic construct
  source 1..75: mol_type = other DNA
gaccaggatgtgtcactggcggcgggtaaccatgttgatgttcttgctgccaccagtacagatacgtcctggcgc

SEQ ID NO: 605358 - DNA, 75 bp, synthetic construct
  source 1..75: mol_type = other DNA
aaaagtacgaagagttgagtacggcacagcaaaagcaactgatcagtgactgtgcagccagcccggcaacctgcc

SEQ ID NO: 605359 - DNA, 75 bp, synthetic construct
  source 1..75: mol_type = other DNA
gatcttgtaggtaatttaggagcggactctaagccagttatcggacgtttggaagtcagcgctggtaatgggaaa

SEQ ID NO: 605360 - DNA, 75 bp, synthetic construct
  source 1..75: mol_type = other DNA
ggcgggcgataacctcctccttgttgctggtcgtgatgttgcatctgtctgttgtcgcaaccggcaaaaacaggg

SEQ ID NO: 605361 - DNA, 75 bp, synthetic construct
  source 1..75: mol_type = other DNA
tccgccctgaatacacagtcacagaccctgaccaacagtggtctgttgcagggggaggcctcactcaccgttaac

SEQ ID NO: 605362 - DNA, 75 bp, synthetic construct
  source 1..75: mol_type = other DNA
gatatccagcgtggcattcaggcggcaacggccgcgcttcagggcctggcgggggacaatattgctggtgcactg

SEQ ID NO: 605363 - DNA, 75 bp, synthetic construct
  source 1..75: mol_type = other DNA
tgatcgagaaagcaggcgcgtggtacagctacaaaggtgagaagatcggtcagggtaaagcgaatgcgactgcct

SEQ ID NO: 605364 - DNA, 75 bp, synthetic construct
  source 1..75: mol_type = other DNA
atgacaccgtatatccaggcgctgatcgctatgaccggcgacaaactccagcaacgaatgctgaaggatccggga

SEQ ID NO: 605365 - DNA, 75 bp, synthetic construct
  source 1..75: mol_type = other DNA
taccggctgaaccgcgtaaaaaacgggatatcagtaagttggttgcggagattcgggcgcagtgtttggagaaaa

SEQ ID NO: 605366 - DNA, 75 bp, synthetic construct
  source 1..75: mol_type = other DNA
tgttcgctgcgcttcttttacgtctattactttaaaaagcacaaacgaacatttgactacgatttctatcggtct

SEQ ID NO: 605367 - DNA, 75 bp, synthetic construct
  source 1..75: mol_type = other DNA
cagcgacaaatcgaactaaccgaagatgacttcattatgtttaccatttatatggagcaatatcgggccccatta

SEQ ID NO: 605368 - DNA, 75 bp, synthetic construct
  source 1..75: mol_type = other DNA
cgtcaggtggtggataaaattggtcatctgtgtgactacatcctctttgactccgcatgggtcggctatgaacag

SEQ ID NO: 605369 - DNA, 75 bp, synthetic construct
  source 1..75: mol_type = other DNA
caggctggctatgccatacattccttttcactgtcttataagcctgtaagtgttaaaggctttgaggcgtcagta

SEQ ID NO: 605370 - DNA, 75 bp, synthetic construct
  source 1..75: mol_type = other DNA
ataacttcaccagaagcaataaaaaataatctggcagtcgcttttctgacgaaaattatttatcagtggatttgt

SEQ ID NO: 605371 - DNA, 75 bp, synthetic construct
  source 1..75: mol_type = other DNA
ggtgacggtgcctgcccgggaggtgatccacgaccgttttaactgtttttttcatccgcttgtggggctgccgcc

SEQ ID NO: 605372 - DNA, 75 bp, synthetic construct
  source 1..75: mol_type = other DNA
agctatttaagtctggagttggatttgcccctatatttccagacacctgttatcacttaccccatcactggccca

SEQ ID NO: 605373 - DNA, 75 bp, synthetic construct
  source 1..75: mol_type = other DNA
agacggtggaacaactgaagatgaccgctgaaattgtctgttcggtgttccgtgtcccggcctacaagattggcg

SEQ ID NO: 605374 - DNA, 75 bp, synthetic construct
  source 1..75: mol_type = other DNA
tgaagagaaactggcttccctgtcggcggtattacagaagcatgtgacggtggatgaggtacatccggttctgca

SEQ ID NO: 605375 - DNA, 75 bp, synthetic construct
  source 1..75: mol_type = other DNA
ttaagtatctcaactatagatatatgaatctggcataccaggatatgtcacctgttgaagctcaccagattaacc

SEQ ID NO: 605376 - DNA, 75 bp, synthetic construct
  source 1..75: mol_type = other DNA
tgatgtcatacatgagtcataacgatccattaaaaacccaagaaggattgcgagcaatgaaagaaacagaaaact

SEQ ID NO: 605377 - DNA, 75 bp, synthetic construct
  source 1..75: mol_type = other DNA
accttcccgctgacggcaggtgtaagctggaacagcgatatgatgtgcggcaatttcgatatcgacaccacagtc

SEQ ID NO: 605378 - DNA, 75 bp, synthetic construct
  source 1..75: mol_type = other DNA
tcgggctgacgccgctgattcaggaagagcaggataagatccagccgctgattatcgatatggtgaaccgcagcc

SEQ ID NO: 605379 - DNA, 75 bp, synthetic construct
  source 1..75: mol_type = other DNA
atccaataccttggtttaagagaactcggcaccacgataatgaagagctgcaaaacaacattcttcttgatgttg

SEQ ID NO: 605380 - DNA, 75 bp, synthetic construct
  source 1..75: mol_type = other DNA
gaagtgctggccgccacaccgaaagctgtcaaggctgcatatgatttggctaacgggaagtatacagcccaggat

SEQ ID NO: 605381 - DNA, 75 bp, synthetic construct
  source 1..75: mol_type = other DNA
ttcacgacgaaaaggtagggcgcgtctcgagtattcgctcgcaaatagaaatggcaacgcgctggatacaactgc

SEQ ID NO: 605382 - DNA, 75 bp, synthetic construct
  source 1..75: mol_type = other DNA
tgcctgggacgccgaaaccagcattccagccctgctaaacggcgaacactctgtcctttaccgtacccgctacga

SEQ ID NO: 605383 - DNA, 75 bp, synthetic construct
  source 1..75: mol_type = other DNA
ttaaaaatgaacttgtaaaatcaattaagcaagttagctatgtaataccgttattacttttggatttcgctatga

SEQ ID NO: 605384 - DNA, 75 bp, synthetic construct
  source 1..75: mol_type = other DNA
gaagtatccaggaacgaacccgcacaccgatacaaaagtatcaccagtcagcaaagtgtcgaactcacgaacatg

SEQ ID NO: 605385 - DNA, 75 bp, synthetic construct
  source 1..75: mol_type = other DNA
cgaacggctggcgggagaactggcgctggcccgcgtcaccgaacaggcgctgctggcccggcgcacgctgctcgc

SEQ ID NO: 605386 - DNA, 75 bp, synthetic construct
  source 1..75: mol_type = other DNA
tgcatccgctgatcgacgaagaaaaggcgaagatcctgcccctcctgacagatctggttaatggcagtcagaaac

SEQ ID NO: 605387 - DNA, 75 bp, synthetic construct
  source 1..75: mol_type = other DNA
cacctggacatcccctgaagaggccgccgggtggatgacccgcgtcgttggcgagcagaccatcagcgtggcgca

SEQ ID NO: 605388 - DNA, 75 bp, synthetic construct
  source 1..75: mol_type = other DNA
gaggcccgtaaacgtgagaacctgccgccccttgccggcggtgatgcactgtatcttcagcagcagaactacagt

SEQ ID NO: 605389 - DNA, 75 bp, synthetic construct
  source 1..75: mol_type = other DNA
ttattctatcggggggtatgggggcaagatttggcggtacacttccgaaacaatttacaaaattagcaggtaagg

SEQ ID NO: 605390 - DNA, 75 bp, synthetic construct
  source 1..75: mol_type = other DNA
tgcgacggggtcaaacaccacaagcattcaagctaggaacgataaagcttgcctatcaacgcgcaatttctgaaa

SEQ ID NO: 605391 - DNA, 75 bp, synthetic construct
  source 1..75: mol_type = other DNA
tgcgcaggcgattatcagtgctaatccggggcttaaccgcgccattcgtctgcgtcggcaaaaagtagagtgggg

SEQ ID NO: 605392 - DNA, 75 bp, synthetic construct
  source 1..75: mol_type = other DNA
tgatgaaccgtggaccgcctggaaagaagaagagggcgcactggtcatcagtaatttgccggagcgttttacgct

SEQ ID NO: 605393 - DNA, 75 bp, synthetic construct
  source 1..75: mol_type = other DNA
gtgctggcccgcaccgacaccgccaccgacaaagattacctcgatattgaacgcgttatcggccatgaatatttc

SEQ ID NO: 605394 - DNA, 75 bp, synthetic construct
  source 1..75: mol_type = other DNA
tctggcgtggtgtatgcgctgatgggctacgtctggctacgcggcgaacgcgatccgcaaagtggcatttacctg

SEQ ID NO: 605395 - DNA, 75 bp, synthetic construct
  source 1..75: mol_type = other DNA
tttactggctgaggcaagcggaacaattccagccaatgccagtattctggatatcggtgttggtgcgaattgtat

SEQ ID NO: 605396 - DNA, 75 bp, synthetic construct
  source 1..75: mol_type = other DNA
ccggggcttaaccgcgccattcgtctgcgtcggcaaaaagagagtggggcgatttttaacggcatcatccataaa

SEQ ID NO: 605397 - DNA, 75 bp, synthetic construct
  source 1..75: mol_type = other DNA
cagttaaagccagtgtcatgatgcgcgatgaacgcattcaaaaacggattgccgagttgatggaggagcgcaaca

SEQ ID NO: 605398 - DNA, 75 bp, synthetic construct
  source 1..75: mol_type = other DNA
cggccagcagcaggagctgtggtgtgaaggtggtgaagtggcttttatcaaaaagatgattgaggaaagtaaagg

SEQ ID NO: 605399 - DNA, 75 bp, synthetic construct
  source 1..75: mol_type = other DNA
ccgggtcttaaccgcgctatccgtctgcgtcggcaaaaggataccggcgccatttttaacggcatcatccacaaa

SEQ ID NO: 605400 - DNA, 75 bp, synthetic construct
  source 1..75: mol_type = other DNA
aaaagcagagtcgctttattgcctggacctttatgaacgacgagcagcgccgccgttttgttaatcgccaacgtt

SEQ ID NO: 605401 - DNA, 75 bp, synthetic construct
  source 1..75: mol_type = other DNA
cgaaggcaaagtgatcccgttgcagaaaggcggtcatccggtcaattcggtgctgaacgtcacccaggcggaaca

SEQ ID NO: 605402 - DNA, 75 bp, synthetic construct
  source 1..75: mol_type = other DNA
tgtctatgacgcttccttacctgttcctcgcgctggctttcccatttttaaagcacgtcaggatctcgacagacc

SEQ ID NO: 605403 - DNA, 75 bp, synthetic construct
  source 1..75: mol_type = other DNA
gatggggatgccgtctatcgccatgtggatgcagtgcgggttggttactgtcttcatcctgctggtttcgtttgg

SEQ ID NO: 605404 - DNA, 75 bp, synthetic construct
  source 1..75: mol_type = other DNA
aacaagctgacgctgatggcgaacgtgtctatgacgcttccttacctgttcctcgcgctggctttcccattcttt

SEQ ID NO: 605405 - DNA, 75 bp, synthetic construct
  source 1..75: mol_type = other DNA
gcgaccatcaggcgtgattgaggtccccggcagtattacggaagaaaacgcgaaaaaactgaaggggaactggga

SEQ ID NO: 605406 - DNA, 75 bp, synthetic construct
  source 1..75: mol_type = other DNA
acggggaaccaaggctgcacatcaaagaacgacctcgtaaaaaagtagatcgctgtgatgtttgtactgaagggg

SEQ ID NO: 605407 - DNA, 75 bp, synthetic construct
  source 1..75: mol_type = other DNA
ttagtaagcattactattttgttattaaatggtgggcatttcgcgcaggatattaatttcctggcatcaccgaat

SEQ ID NO: 605408 - DNA, 75 bp, synthetic construct
  source 1..75: mol_type = other DNA
ttagagcacgtaaaaacattggttccgtcataaccacgaattacgatcgtttatgtgaaaaagtttttgagttca

SEQ ID NO: 605409 - DNA, 75 bp, synthetic construct
  source 1..75: mol_type = other DNA
taacgatattttttataaaaacatgaaagaaggcaagaaactgagccgttttaaaatttatataacagaaatact

SEQ ID NO: 605410 - DNA, 75 bp, synthetic construct
  source 1..75: mol_type = other DNA
aaatatcccttcctgctttccaacggtaaccgcgttgcgcaaggtgaactggaaaatggacgtcattgggtacgg

SEQ ID NO: 605411 - DNA, 75 bp, synthetic construct
  source 1..75: mol_type = other DNA
gtttgtttgccgctttcacgactggaaaataacgaggcatcgcatccgctgttggcgacctgtgtcagtgaaatc

SEQ ID NO: 605412 - DNA, 75 bp, synthetic construct
  source 1..75: mol_type = other DNA
atccaggcgaagatgacaccggtaccggattgcggcgagaaaacctatgttggtagcggtcgcctgaaagatcgt

SEQ ID NO: 605413 - DNA, 75 bp, synthetic construct
  source 1..75: mol_type = other DNA
tcgcttacgcgcgtgaaggggctgacgtggcgatcagttatcttcccgtggaagaagaagacgctcaggatgtga

SEQ ID NO: 605414 - DNA, 75 bp, synthetic construct
  source 1..75: mol_type = other DNA
agttgcaggctcttaaaggtgttggtcagctaattgcaataactctggttgctgaactgggtgatttttcgcgat

SEQ ID NO: 605415 - DNA, 75 bp, synthetic construct
  source 1..75: mol_type = other DNA
ttgtgggtgatgaggggcgtgtttacctggcaggggtgccggagaaaggtcggctgacggtgagcagtggaggaa

SEQ ID NO: 605416 - DNA, 75 bp, synthetic construct
  source 1..75: mol_type = other DNA
aggagctgcaggaaaaagtttcgccagtggtacgtaaattaatcccaccttctcagacgttcccacgcccagctc

SEQ ID NO: 605417 - DNA, 75 bp, synthetic construct
  source 1..75: mol_type = other DNA
tatctacgactactataagcaacaccactatgaaaccattgtgatgggcgcgagcttccgtcgcaccgaacaaat

SEQ ID NO: 605418 - DNA, 75 bp, synthetic construct
  source 1..75: mol_type = other DNA
gcgacggtgcgcagaaagcgggtgataatggcgtcaccggtggctacagccagttctttggcctgaaacatcaga

SEQ ID NO: 605419 - DNA, 75 bp, synthetic construct
  source 1..75: mol_type = other DNA
gtggatgagaaatccattggcattgagttgcagggtaatgacaccacatttatcaatatgggtgatatttccgcc

SEQ ID NO: 605420 - DNA, 75 bp, synthetic construct
  source 1..75: mol_type = other DNA
attcagccagttaggcagcgctggacatatcgttaacaacggtatcgtgtatatcgacgacagcgtgacgggttc

SEQ ID NO: 605421 - DNA, 75 bp, synthetic construct
  source 1..75: mol_type = other DNA
agcgaggatctcggtgcaggtacgcatgttgaggtgattgcgatagaagggataacgctgattatccgtgcggtc

SEQ ID NO: 605422 - DNA, 75 bp, synthetic construct
  source 1..75: mol_type = other DNA
aacccgaatggaggctctgacggctggctgacggaagaggcgctgtggctggtcagcaagaacgctgccgatgct

SEQ ID NO: 605423 - DNA, 75 bp, synthetic construct
  source 1..75: mol_type = other DNA
gctgatccagtttattcgccagagcaccgcccttcccgcctcactgtttgaacgcttctggctgataccaatcca

SEQ ID NO: 605424 - DNA, 75 bp, synthetic construct
  source 1..75: mol_type = other DNA
gtggaacccatgaaaataaccgtgaaggacagtcgtattttttacttcacggtttataacgacacagacaacgaa

SEQ ID NO: 605425 - DNA, 75 bp, synthetic construct
  source 1..75: mol_type = other DNA
taaccattggtacatttcttttagctgggttgtcgttctctgcatacgcgaagaactgcaagaaaggtataccat

SEQ ID NO: 605426 - DNA, 75 bp, synthetic construct
  source 1..75: mol_type = other DNA
cacatattttctggctcagtctcggcgggttgctgctggcagccgagatgctgggcggaaatggttatttgttgt

SEQ ID NO: 605427 - DNA, 75 bp, synthetic construct
  source 1..75: mol_type = other DNA
cccgtcccgccggatgatggcggcgacacaccagtcccgccggatgatggcggcgacacaccagtcccgccggat

SEQ ID NO: 605428 - DNA, 75 bp, synthetic construct
  source 1..75: mol_type = other DNA
ggtcgcgggtataattttgctaacgccggaacaattaatgttcagggtgatggttcagttgctattagcggaggc

SEQ ID NO: 605429 - DNA, 75 bp, synthetic construct
  source 1..75: mol_type = other DNA
caccatgaccgtcaccgatccggagtccatcggtatccagattgacggcgaccaggccatcgtcaataacgaagg

SEQ ID NO: 605430 - DNA, 75 bp, synthetic construct
  source 1..75: mol_type = other DNA
gataacaagggcaccatgaccgtcaccgatccggagtccatgggtatccagattgacggcgacaaggccatcgtc

SEQ ID NO: 605431 - DNA, 75 bp, synthetic construct
  source 1..75: mol_type = other DNA
tttcgctcagtctgtggtgattactaacaccacgtcaggcagcgccatcaactccggtacgatttctggcccagt

SEQ ID NO: 605432 - DNA, 75 bp, synthetic construct
  source 1..75: mol_type = other DNA
aagctgaaaaaacggtgcagatccgtaacgctacctttacctacaccgagaatgcggatggcagctataccctga

SEQ ID NO: 605433 - DNA, 75 bp, synthetic construct
  source 1..75: mol_type = other DNA
gataacaagggcacgatgactgtcaccgatccggagtccatggggatccagattgacggtgacaaggcggttgtc

SEQ ID NO: 605434 - DNA, 75 bp, synthetic construct
  source 1..75: mol_type = other DNA
atggcggcgacacacctgtcccgccggatgatggcggcgatacaccagtcccgccagatgatggtggcgacacac

SEQ ID NO: 605435 - DNA, 75 bp, synthetic construct
  source 1..75: mol_type = other DNA
atcagggtacgatcaacctggagaaaaatgataattatgataatagccttggtgataatattctcgtcggtatgg

SEQ ID NO: 605436 - DNA, 75 bp, synthetic construct
  source 1..75: mol_type = other DNA
ctgattaatggcgacaacgcggtagtaagtaacaaaggtatcatgaccgtcgacggagaaaattcgacggggtcc

SEQ ID NO: 605437 - DNA, 75 bp, synthetic construct
  source 1..75: mol_type = other DNA
gacgtgaagcagcagtacctggagttccgtagcgaaggagcgaagactttcgaaccgagcgaaggactgaaggtt

SEQ ID NO: 605438 - DNA, 75 bp, synthetic construct
  source 1..75: mol_type = other DNA
acaccaacaacgaactgtttaccagcctgaacgtcggcacgactgctgaactgaacagcgctctgaaacaggtca

SEQ ID NO: 605439 - DNA, 75 bp, synthetic construct
  source 1..75: mol_type = other DNA
acaatcgtgaaggattggttagtcgacgaggcggctaacacggcttcgttcaatggcgtcaatcctggcggaacc

SEQ ID NO: 605440 - DNA, 75 bp, synthetic construct
  source 1..75: mol_type = other DNA
gtgcaggaatacaacacccttaaagggtatagctggaaatggctgggcggggtgtcagtggcttttctggttatg

SEQ ID NO: 605441 - DNA, 75 bp, synthetic construct
  source 1..75: mol_type = other DNA
gcctgtcccggatgccggacagaccgggcttatccacgaagtctggcgacatgcgctgaacaaaatcagtcagga

SEQ ID NO: 605442 - DNA, 75 bp, synthetic construct
  source 1..75: mol_type = other DNA
gacagccaatggcaccgatggtcaggcgtacatggataataacggaaactggctttgcggtgcgcaagttattcc

SEQ ID NO: 605443 - DNA, 75 bp, synthetic construct
  source 1..75: mol_type = other DNA
aaatatcgacagtcaatgcactgaggatatttaattcatcttttggtgctatttttcgccgttctgaagaatgtc

SEQ ID NO: 605444 - DNA, 75 bp, synthetic construct
  source 1..75: mol_type = other DNA
atcttaagcatgcaggggtggttaacaggaagtcattatcataatattcggtcatgggatgcgtgggataacacg

SEQ ID NO: 605445 - DNA, 75 bp, synthetic construct
  source 1..75: mol_type = other DNA
acggtaaacaaggctggtaatgccgttcaaaagacaggcgatatcttgtccggtggacttacttttgaaaacgac

SEQ ID NO: 605446 - DNA, 75 bp, synthetic construct
  source 1..75: mol_type = other DNA
acagcacgtctgaaacactggccgcaacgccgaaagcggttaaggccgcatatgaccttgctaacgggaaatata

SEQ ID NO: 605447 - DNA, 75 bp, synthetic construct
  source 1..75: mol_type = other DNA
cagataactcggtaatattttctgttaacggtcagatacagcccagcaactgggggaattttgattcacgctatg

SEQ ID NO: 605448 - DNA, 75 bp, synthetic construct
  source 1..75: mol_type = other DNA
ctcggtttacaggaaatggtaaacagggctggtaacgccgtgcaaaaaaatggcgatactttgtccggtgggctt

SEQ ID NO: 605449 - DNA, 75 bp, synthetic construct
  source 1..75: mol_type = other DNA
gcaggcaatatttctgaccgtcgtctgcttgcatttactttggatggaaatatcaggcagttaattccccggaat

SEQ ID NO: 605450 - DNA, 75 bp, synthetic construct
  source 1..75: mol_type = other DNA
cacgctcactgctctggcaggacttgccactgcagcagatcggttgccttattttaccggagcagaccgcgcagc

SEQ ID NO: 605451 - DNA, 75 bp, synthetic construct
  source 1..75: mol_type = other DNA
atgcaactgagaaaaaacttattattaccatcactgcttgtttttatcagcaaccgtgcggtgggcggagattat

SEQ ID NO: 605452 - DNA, 75 bp, synthetic construct
  source 1..75: mol_type = other DNA
tcatgtggtttgaaacaggcgacaacggcaatgaatatttcaaatggagaagccgccagggcaccacaacaaaag

SEQ ID NO: 605453 - DNA, 75 bp, synthetic construct
  source 1..75: mol_type = other DNA
ttttggtgccatttttcgtcgttctgaagaatgcctgcatatcatccctacacgagagaatgagggggaaaatgg

SEQ ID NO: 605454 - DNA, 75 bp, synthetic construct
  source 1..75: mol_type = other DNA
aaagatattccgataaacaaagccttcattataccaactgatgttaaagaagcatttttcagcatcatagatatg

SEQ ID NO: 605455 - DNA, 75 bp, synthetic construct
  source 1..75: mol_type = other DNA
cgccgaattgcaggacaaatacctgattacccattaccccgtaagagagtcagaagttctgacaaatctccgcct

SEQ ID NO: 605456 - DNA, 75 bp, synthetic construct
  source 1..75: mol_type = other DNA
gtgctgagtcaatgtgaatttttgtgtcgggcgcgccaactggcaaaaaatgatgatgatttcgaagcgtttaaa

SEQ ID NO: 605457 - DNA, 75 bp, synthetic construct
  source 1..75: mol_type = other DNA
tcagggatttttgggcggagaatcctgatgcagaacaaccgctaagggcatgggtggatgaggcagcaaaagctg

SEQ ID NO: 605458 - DNA, 75 bp, synthetic construct
  source 1..75: mol_type = other DNA
gcagcatcactaggaagcctttgctgcaagaagaaagaagaagtcgttcgaaaaaatagaagtatttattacaag

SEQ ID NO: 605459 - DNA, 75 bp, synthetic construct
  source 1..75: mol_type = other DNA
accagatgatctgcgaggtcgcatgaccagattaattgagcgactggagaaagaaggcaacaaactgaagatgcc

SEQ ID NO: 605460 - DNA, 75 bp, synthetic construct
  source 1..75: mol_type = other DNA
tgagagtcttgctagtactcagcctaatgttgctgtactttcagcttggcgcgaattggagttaaccgctataac

SEQ ID NO: 605461 - DNA, 75 bp, synthetic construct
  source 1..75: mol_type = other DNA
tgggcggcttctggatgcgtgagcttggcctgtacgatgatgcgggaacgttgattgccgtggcgaacatggccg

SEQ ID NO: 605462 - DNA, 75 bp, synthetic construct
  source 1..75: mol_type = other DNA
cgatggtcaggcgtacatggataataacggtaactggctttgtggctcgcaagttattcctagcaactatggcaa

SEQ ID NO: 605463 - DNA, 75 bp, synthetic construct
  source 1..75: mol_type = other DNA
aatgatgccgatggtgacactgattcatacatgtggtttgaaacgggggataacggcaatgaatatttcaaatgg

SEQ ID NO: 605464 - DNA, 75 bp, synthetic construct
  source 1..75: mol_type = other DNA
acgaagaatattacctttaatttatggggtgcttccacccgtccagtggttgcagagttaggcgatgaggccgga

SEQ ID NO: 605465 - DNA, 75 bp, synthetic construct
  source 1..75: mol_type = other DNA
atcccaaggaaagctcttatgtactcaggaagatgctttggcattctgtaagaatgcaaaaagacttagcaatta

SEQ ID NO: 605466 - DNA, 75 bp, synthetic construct
  source 1..75: mol_type = other DNA
ggttaacggcgacgaagccaccgtgaacaataacggcaacaccaccgttgacggcaaagattccaccggcaccga

SEQ ID NO: 605467 - DNA, 75 bp, synthetic construct
  source 1..75: mol_type = other DNA
ctgggttgggaatggcaaggggtgatgtttgctgttctgacgttactcgccgcctggctgtggtggaaatggctg

SEQ ID NO: 605468 - DNA, 75 bp, synthetic construct
  source 1..75: mol_type = other DNA
atggagttaatggtcgttcatccacatattttctggctcagtctcggcggtttgctgctggcagccgagatgctg

SEQ ID NO: 605469 - DNA, 75 bp, synthetic construct
  source 1..75: mol_type = other DNA
atgcgacggccaacaacagtggcaataccaccgttgacggacagggctcgaccggtaccgaaatcgcgggtaata

SEQ ID NO: 605470 - DNA, 75 bp, synthetic construct
  source 1..75: mol_type = other DNA
gacattgatatcgctggcaatatcttggttgataaagatcaaactgcagataatgcggcagactatttcttcgag

SEQ ID NO: 605471 - DNA, 75 bp, synthetic construct
  source 1..75: mol_type = other DNA
ttgagcattttcgaatttacgtcactctcggggatggttttaacagccacaccatcgagtactacgttgaaacga

SEQ ID NO: 605472 - DNA, 75 bp, synthetic construct
  source 1..75: mol_type = other DNA
gtggcggcggcacagttggtgtgcggcctcagtccggaacaatttgaaaacaagaacctcgcttaggcctgtgtc

SEQ ID NO: 605473 - DNA, 75 bp, synthetic construct
  source 1..75: mol_type = other DNA
tcacgtgccgttattggctggtcaatgtcgccacgcatgacggcgcaactggcctgcgatgccctgcagatggcg

SEQ ID NO: 605474 - DNA, 75 bp, synthetic construct
  source 1..75: mol_type = other DNA
ggtcagctaccgcgcacacggcctgcctgtgtcagaaaatctgttggagcaggatttttacgccagtggcccgaa

SEQ ID NO: 605475 - DNA, 75 bp, synthetic construct
  source 1..75: mol_type = other DNA
ggtgtggcggcctcagtccggaacaatttgaaaaccagaacctcgcttaggcctgtgtccatattacgtgggtag

SEQ ID NO: 605476 - DNA, 75 bp, synthetic construct
  source 1..75: mol_type = other DNA
aattatatcgaatgtgattacaatcgctggcgacggcacagttggtgtggcggtctcagtccggaacaatttgaa

SEQ ID NO: 605477 - DNA, 75 bp, synthetic construct
  source 1..75: mol_type = other DNA
cagcgttgtcctcgtggcctttacccggtcaaaacagcgttacggtgcaccacgcctgacggatgaactgcgtgc

SEQ ID NO: 605478 - DNA, 75 bp, synthetic construct
  source 1..75: mol_type = other DNA
gggttcgaccggaactgaaatcgcgggtaacaacgcggtggtgaaccaggacggcttgctggatgtgagcggcgg

SEQ ID NO: 605479 - DNA, 75 bp, synthetic construct
  source 1..75: mol_type = other DNA
cgggcgtgctgctgaacggcgatcgcgcgtcattcattaatatgggtgatattaacgttagcggaggtgcagcgg

SEQ ID NO: 605480 - DNA, 75 bp, synthetic construct
  source 1..75: mol_type = other DNA
taacgaagtcagcaacaagggcaacatttcggtggtggatgcgcattccacgggcgtgctgctgaacggcgatcg

SEQ ID NO: 605481 - DNA, 75 bp, synthetic construct
  source 1..75: mol_type = other DNA
aaactcagcgcctaatgaccattggtgcgcttggtttaatggcgttaatgatttcggagccctcatttgcgggca

SEQ ID NO: 605482 - DNA, 75 bp, synthetic construct
  source 1..75: mol_type = other DNA
gacaattaataacacgcaaacgggtgtgattaatgtctatgccgataactcctgggcgtttggtgggcaaacgaa

SEQ ID NO: 605483 - DNA, 75 bp, synthetic construct
  source 1..75: mol_type = other DNA
acggctggatattcaaccaacctgatgccagcctgacaatcaacggcgaactgagcgtaaaccaggggttggaaa

SEQ ID NO: 605484 - DNA, 75 bp, synthetic construct
  source 1..75: mol_type = other DNA
ctgccgacggttttatcgccgtaaatgacctggcaaactatggcgacgaaacgcttaatggcgacgttacagcaa

SEQ ID NO: 605485 - DNA, 75 bp, synthetic construct
  source 1..75: mol_type = other DNA
gctgcgtaaatccatgacactgactgaatatcagaatctgagtctggaatacggtattgcgcgtctggatggtaa

SEQ ID NO: 605486 - DNA, 75 bp, synthetic construct
  source 1..75: mol_type = other DNA
acggcgacgtcaacaaaaccgctgatgctaatgtgaaacaacagtacctggagttccgtagtgaaggggcaaaaa

SEQ ID NO: 605487 - DNA, 75 bp, synthetic construct
  source 1..75: mol_type = other DNA
ttggtgtactgattaatggtgatcgagcgacctttgccaatacgggtcatattgacgtcaataattcagctactg

SEQ ID NO: 605488 - DNA, 75 bp, synthetic construct
  source 1..75: mol_type = other DNA
gcatgggcgtatctgcaaaaacattgcactgacgaagaacgtcactgtcctgatatttcagaatttaaagcttca

SEQ ID NO: 605489 - DNA, 75 bp, synthetic construct
  source 1..75: mol_type = other DNA
atggccgcttacggcggtagtaatatggttattaaccaaggtacgattaacctggagaaaaatgaaaactatagc

SEQ ID NO: 605490 - DNA, 75 bp, synthetic construct
  source 1..75: mol_type = other DNA
cagcgaattaacctcaagatctcatggcaagcgtgatgggagtcaagaaaatatctccgggctgattgtgtctgg

SEQ ID NO: 605491 - DNA, 75 bp, synthetic construct
  source 1..75: mol_type = other DNA
aaccgtgtcagatgattttattcatgctgttctcagtaactgcgccacaagaattgaaccgccccgggtttcctg

SEQ ID NO: 605492 - DNA, 75 bp, synthetic construct
  source 1..75: mol_type = other DNA
acgtggcaaaagcgctggatgcgggttacaccaacaacgagctgtataccagtctgaacgtcggcaccactgcag

SEQ ID NO: 605493 - DNA, 75 bp, synthetic construct
  source 1..75: mol_type = other DNA
tgatgaataacgaagcgggtggaacggtcaataaagtgaatttttctgccgcagccacattcaataacgcaggaa

SEQ ID NO: 605494 - DNA, 75 bp, synthetic construct
  source 1..75: mol_type = other DNA
tgactttggtcatctggtcaatgaaaccacgggcagtataaacgaggttgatattgcaacgggtggggaatacac

SEQ ID NO: 605495 - DNA, 75 bp, synthetic construct
  source 1..75: mol_type = other DNA
cggtggtgatgggcatacgttctataatggccagtctggcgtcatcaacgggcagatcctgacatcaaacacggc

SEQ ID NO: 605496 - DNA, 75 bp, synthetic construct
  source 1..75: mol_type = other DNA
gtcaccgtggctgactttggtcatctggtcaatgaaaccacgggcagtattaatgaggttgatatcgcaacgggt

SEQ ID NO: 605497 - DNA, 75 bp, synthetic construct
  source 1..75: mol_type = other DNA
gaaatggtgacattattacggctgacggggaaacgcttaacctgtcttcatatggcggtactactgatatcacgg

SEQ ID NO: 605498 - DNA, 75 bp, synthetic construct
  source 1..75: mol_type = other DNA
gtaaagtggattcaaccgccaaatctgtcgttgtcagcgccagtaacgcggcggcgaccgacgcgttcttctgga

SEQ ID NO: 605499 - DNA, 75 bp, synthetic construct
  source 1..75: mol_type = other DNA
tcacctggagctacgacgacgagggcaaaatccacatcaccaaagaagctggtgtggtagttgatggaaccacgg

SEQ ID NO: 605500 - DNA, 75 bp, synthetic construct
  source 1..75: mol_type = other DNA
taccgacgtgaagcagcagtacctggaattccgcagcgaaggggcgaaaacctttgaaccgcacgaagggctgaa

SEQ ID NO: 605501 - DNA, 75 bp, synthetic construct
  source 1..75: mol_type = other DNA
ttacccccccagataaaggcggtgatgttactccacccgacaatagcgatgatgatgttgaccccccgagaacag

SEQ ID NO: 605502 - DNA, 75 bp, synthetic construct
  source 1..75: mol_type = other DNA
tcgagaagaatgagaactttgatgacagcctgggggcgaataaactcgtcggtatggcagtttataatggcggta

SEQ ID NO: 605503 - DNA, 75 bp, synthetic construct
  source 1..75: mol_type = other DNA
accgccggacgatggcggtgatacaccagtaccaccggatgatggcggtgatacaccagtaccgccggacgatgg

SEQ ID NO: 605504 - DNA, 75 bp, synthetic construct
  source 1..75: mol_type = other DNA
ggttcagtccctgcagccagtcgtacgggctatggtgatattccgctcattcagattgatggtcattcgtcggtt

SEQ ID NO: 605505 - DNA, 75 bp, synthetic construct
  source 1..75: mol_type = other DNA
gtcacgcgctttcatggtggtgcggcgaaaataatgtccggtaatagcgaaaccgagacacaggaagtaggattt

SEQ ID NO: 605506 - DNA, 75 bp, synthetic construct
  source 1..75: mol_type = other DNA
tgattgccgttctcgattcatcgaaatttaaggaaggtgcgaataagcaggtcatttcttcccaagctgactcgc

SEQ ID NO: 605507 - DNA, 75 bp, synthetic construct
  source 1..75: mol_type = other DNA
gacacgtaaacatgaaaactggaaatatacgccgctggacgggctgaccaatagccagtttgtcagcattgcggg

SEQ ID NO: 605508 - DNA, 75 bp, synthetic construct
  source 1..75: mol_type = other DNA
gctgttctcagtaactgcaccacaaggatagtgcttcctgcactgaagaaattcggttctgaatcattgccgcac

SEQ ID NO: 605509 - DNA, 75 bp, synthetic construct
  source 1..75: mol_type = other DNA
tacccgtaaaaagttgaattttcgtaataccggggacaaagggttgctgcccgattttccgccggatttctttaa

SEQ ID NO: 605510 - DNA, 75 bp, synthetic construct
  source 1..75: mol_type = other DNA
ttattattactgatgatgccgtgtcagaggtagataaactggcattgcagaatacacgggtgaaattaattacgg

SEQ ID NO: 605511 - DNA, 75 bp, synthetic construct
  source 1..75: mol_type = other DNA
aacgcttgttgcggatggtgaaactaccacacgtgatgtctcgaattttgatggtagccaggaaaatatttctgg

SEQ ID NO: 605512 - DNA, 75 bp, synthetic construct
  source 1..75: mol_type = other DNA
ggggaacaataccgagtacgacatgctggcactgcgtaaaaccattgacctgagtgaaagtcagaccatgagtct

SEQ ID NO: 605513 - DNA, 75 bp, synthetic construct
  source 1..75: mol_type = other DNA
ctggatgtcagcggtggcggtcacgggattgatattaccggtgacagcgcgacggtggataacaagggcaccatg

SEQ ID NO: 605514 - DNA, 75 bp, synthetic construct
  source 1..75: mol_type = other DNA
actggatgtgagcggcggcggccacggtattgatatcaccggcgacagcgcgacggtggacaacaaaggcggcat

SEQ ID NO: 605515 - DNA, 75 bp, synthetic construct
  source 1..75: mol_type = other DNA
tcagtaacggcggcaccggcacgcaggttaacggcgacgaagccaccgtaaacaataacggcagcaccaccgttg

SEQ ID NO: 605516 - DNA, 75 bp, synthetic construct
  source 1..75: mol_type = other DNA
tgatatcaccggcgacagcgcaacggtggataacaaaggcggtatgaccgtcaccgatccggattcgattggcat

SEQ ID NO: 605517 - DNA, 75 bp, synthetic construct
  source 1..75: mol_type = other DNA
tgcgaatgacagcacaactggcctgtgatgcactgcaaatggcgttgtggcggagaagacgcccggaaagcgtca

SEQ ID NO: 605518 - DNA, 75 bp, synthetic construct
  source 1..75: mol_type = other DNA
tgaaagggatccgcaattttgagaataaagttgcggtaactgtagcattacaagacaaaaaacgctttgacggtg

SEQ ID NO: 605519 - DNA, 75 bp, synthetic construct
  source 1..75: mol_type = other DNA
atgagaaaggcgctattagtcaggctaagatgaatcacctgatccgtgatcgtatcacgttagaacgccgtgcgg

SEQ ID NO: 605520 - DNA, 75 bp, synthetic construct
  source 1..75: mol_type = other DNA
cacacggaccgtggaggccagtactgttcagcagattatcaggcgcaactgaagcggcataatctgcgtggaagt

SEQ ID NO: 605521 - DNA, 75 bp, synthetic construct
  source 1..75: mol_type = other DNA
gtgacatcacgtacttgcgtaccgatgagggctggttgtatctcgcagtagtcatcgacctgaggtcacgcgccg

SEQ ID NO: 605522 - DNA, 75 bp, synthetic construct
  source 1..75: mol_type = other DNA
cggattagaacacggggtagactcatctgtggaacaaagacaagataaccttaaagacgttcaggaacgtttagg

SEQ ID NO: 605523 - DNA, 75 bp, synthetic construct
  source 1..75: mol_type = other DNA
gtggttaaacggatttatacggctgacgaacagcaacaacaggccgaatcacaaaagggccgcattgctttccga

SEQ ID NO: 605524 - DNA, 75 bp, synthetic construct
  source 1..75: mol_type = other DNA
aacagatgaggagcgtagccgactggatgcatgggagcgttacagcgttctggtcagtcgtgtggatcctgcaaa

SEQ ID NO: 605525 - DNA, 75 bp, synthetic construct
  source 1..75: mol_type = other DNA
atgaacaggagcaacaggcagaatcacaaaaggcagctttactttccgaagctgaatccgtgattttgccgctgg

SEQ ID NO: 605526 - DNA, 75 bp, synthetic construct
  source 1..75: mol_type = other DNA
gaagtggatgtttaagaacggaactgtggttaagcggatttatacagcagacgaacagcaacaacaggccgaatc

SEQ ID NO: 605527 - DNA, 75 bp, synthetic construct
  source 1..75: mol_type = other DNA
atgcagcatttaaaaaacatcaggtcaggaaacccaaagataaaagagcaataccaattaacaaagaattttgac

SEQ ID NO: 605528 - DNA, 75 bp, synthetic construct
  source 1..75: mol_type = other DNA
caggtaatgctaaaacagtggagcagtatgagttaacaaagaagcacggagtcatctggctttactctgaggacg

SEQ ID NO: 605529 - DNA, 75 bp, synthetic construct
  source 1..75: mol_type = other DNA
attatatcgaatgtgattacaatcggtggcggcggcacagttggtgtggtggcctcagtccggaacaatttgaaa

SEQ ID NO: 605530 - DNA, 75 bp, synthetic construct
  source 1..75: mol_type = other DNA
ggacaaggataagcacgcgtcagcagttccgccaacactgcgacagcgttgtcctcgcggcttttacccggtcaa

SEQ ID NO: 605531 - DNA, 75 bp, synthetic construct
  source 1..75: mol_type = other DNA
gccgctttccataaggcattctttgaggcaaagcagcgatacggtgctccccgccttgctgacgaaatgccggag

SEQ ID NO: 605532 - DNA, 75 bp, synthetic construct
  source 1..75: mol_type = other DNA
gtaagaggccccggaacgttatcgttcaccacggaccgtggaggccagtactgttcagcagattatcaggcgcaa

SEQ ID NO: 605533 - DNA, 75 bp, synthetic construct
  source 1..75: mol_type = other DNA
attatatcgaatgtgattacattcggtggcggcggcacagttggtgtggcggtctcagtctggaacaatttgaaa

SEQ ID NO: 605534 - DNA, 75 bp, synthetic construct
  source 1..75: mol_type = other DNA
attatatcgaatgtgattacattcggtggcggcggcacagttggtgtggcggtctcattcaggaacaatttgaaa

SEQ ID NO: 605535 - DNA, 75 bp, synthetic construct
  source 1..75: mol_type = other DNA
attatatcgaatgtgattacattcgttggcggcggcacagttggtgtggcggtctcagtcaggaacaatttgaaa

SEQ ID NO: 605536 - DNA, 75 bp, synthetic construct
  source 1..75: mol_type = other DNA
agatgaaggctggctgtatctggcagtggtcattgacctgtggtcacgtgccgttattggctggtcaatgtcgcc

SEQ ID NO: 605537 - DNA, 75 bp, synthetic construct
  source 1..75: mol_type = other DNA
tggtcacgcgccgtcattggctggtcgatgtcaccgcgaatgacagcacaactggcctgtgatgcactgcaaatg

SEQ ID NO: 605538 - DNA, 75 bp, synthetic construct
  source 1..75: mol_type = other DNA
ctcacgcaaaattatcggctggtccatgcaatcccggatgacaaaagacattgtcctgaacgcactgctgatggc

SEQ ID NO: 605539 - DNA, 75 bp, synthetic construct
  source 1..75: mol_type = other DNA
gcgtggaaagcttctttcattcgctgaaagtggaatgtatccatggagaacactttatcagccgggaaataatgc

SEQ ID NO: 605540 - DNA, 75 bp, synthetic construct
  source 1..75: mol_type = other DNA
tcacacggaccgtggaggccagtactgttcagcagattatcaggcgcaactgaagcggcataatctgcgtggaag

SEQ ID NO: 605541 - DNA, 75 bp, synthetic construct
  source 1..75: mol_type = other DNA
acgcatgacggcgcaactggcctgcgatgccctgcagatggcgctgtggcggcgtaagaggccccggaacgttat

SEQ ID NO: 605542 - DNA, 75 bp, synthetic construct
  source 1..75: mol_type = other DNA
ctggaagcatgggaacgctacagtgttctggtcagccgtgtggatacggcaaagccagaatggccacaaaaacca

SEQ ID NO: 605543 - DNA, 75 bp, synthetic construct
  source 1..75: mol_type = other DNA
ccggtcgcgtaccgggcgactctgaagtgaaacagacccgcgaaggtcagccagttgtgctgtacaaacgcgtaa

SEQ ID NO: 605544 - DNA, 75 bp, synthetic construct
  source 1..75: mol_type = other DNA
gtttggtgaggatccggctgttcagatcactggtgcgcgcggagtcgccgccagtgagcaaacgctgatccaagt

SEQ ID NO: 605545 - DNA, 75 bp, synthetic construct
  source 1..75: mol_type = other DNA
accaaaatcaccgacagacagaatcaaaatgatcatcgggacgcaatttctctcgccaggttactgcgggctgga

SEQ ID NO: 605546 - DNA, 75 bp, synthetic construct
  source 1..75: mol_type = other DNA
ctccacttccagccaggatgaatataaccagccgcaggttaacatctcgctcgacagcgccggtggcaacatcat

SEQ ID NO: 605547 - DNA, 75 bp, synthetic construct
  source 1..75: mol_type = other DNA
gcgactctgaagtgaaacagacccgcgaaggtcagccagttgtgctgtacaaacgcgtaattctgaccggtgacc

SEQ ID NO: 605548 - DNA, 75 bp, synthetic construct
  source 1..75: mol_type = other DNA
cctgcgcagcgacctgcgtgaaaaaggcatcccatataccaccgttcgtaaagaaagcaactacggcctgagcat

SEQ ID NO: 605549 - DNA, 75 bp, synthetic construct
  source 1..75: mol_type = other DNA
cataccaaaatcaccgacagacagaatcaaaaatgatcatcgggacgcaatttctctcgccaggttactgcgggc

SEQ ID NO: 605550 - DNA, 75 bp, synthetic construct
  source 1..75: mol_type = other DNA
ttttgggctatatcatcaactcacagtgatgaatataaaatgcctggttattgcccccttcccgtatacccaaat

SEQ ID NO: 605551 - DNA, 75 bp, synthetic construct
  source 1..75: mol_type = other DNA
atattaccgaccggactctgtaacacaatattccaaagatattgcatggaaagctcaacaacgattgtgttctcg

SEQ ID NO: 605552 - DNA, 75 bp, synthetic construct
  source 1..75: mol_type = other DNA
gttggaaacagcgaactgagacgtctgctttacgaagccgcctggtcttatcgtacacctgcaaaagttggtgca

SEQ ID NO: 605553 - DNA, 75 bp, synthetic construct
  source 1..75: mol_type = other DNA
tacctgagtggtctctgtgcaatctggtctgccagttgcaggctcttaaaggtgttggtcagctaattgcaataa

SEQ ID NO: 605554 - DNA, 75 bp, synthetic construct
  source 1..75: mol_type = other DNA
gctttacgaagccgcctggtcttatcgtacacctgcaaaagttggggcatggcttatatattaccgaccggactc

SEQ ID NO: 605555 - DNA, 75 bp, synthetic construct
  source 1..75: mol_type = other DNA
aacaacccgagcgaagcgcgtcagctttcattactgttgcgtgctggtgcgttgattgcgccgattcagattgtt

SEQ ID NO: 605556 - DNA, 75 bp, synthetic construct
  source 1..75: mol_type = other DNA
ctctacgcccgacacaaacatgtggatctgtctgcttcgcgccgcagcccacttactcacccaaaaaatgaagga

SEQ ID NO: 605557 - DNA, 75 bp, synthetic construct
  source 1..75: mol_type = other DNA
atggcttacgatgataacaatattatcgttgccatcacccgggatgcctcaacgcttaatccggcgggattaagt

SEQ ID NO: 605558 - DNA, 75 bp, synthetic construct
  source 1..75: mol_type = other DNA
aaactttcagccagacaccataaagattgtttacgataaaaatcagattatagtcgctatcaccagagatgcttc

SEQ ID NO: 605559 - DNA, 75 bp, synthetic construct
  source 1..75: mol_type = other DNA
aacagatgaggagcgtagccgactggaagcatgggaacgctacagtgttctggtcagccgtgtgaatcctgcaaa

SEQ ID NO: 605560 - DNA, 75 bp, synthetic construct
  source 1..75: mol_type = other DNA
taaatggatgtttaaggatggtgccgtgattaagcggatttatacggcagacgaacagcaacaacaggcagaatc

SEQ ID NO: 605561 - DNA, 75 bp, synthetic construct
  source 1..75: mol_type = other DNA
tttggcccgctcttagggacactactatcattaattgccgccacgctggcctcctcgtgctcattcctgctggcg

SEQ ID NO: 605562 - DNA, 75 bp, synthetic construct
  source 1..75: mol_type = other DNA
atggcacatggtataacgtcgcacaggtgtaaattatgcagcatattaaaaaatattaagtccggaaatccaaaa

SEQ ID NO: 605563 - DNA, 75 bp, synthetic construct
  source 1..75: mol_type = other DNA
gaaatggttgttcaaagatggcgtagtgataaagcgaacttataccgaggaagagcagaggcaacaagcggaaaa

SEQ ID NO: 605564 - DNA, 75 bp, synthetic construct
  source 1..75: mol_type = other DNA
gcggtcagtttacgcttacgaaactggttaaccctgaaacaaaatattttactgatcggggccaccggcagcggt

SEQ ID NO: 605565 - DNA, 75 bp, synthetic construct
  source 1..75: mol_type = other DNA
actcacagctacggctgggcatcatttccgacgagaataaacaaaaattaacagagtggatgctctttgcgcaga

SEQ ID NO: 605566 - DNA, 75 bp, synthetic construct
  source 1..75: mol_type = other DNA
aggagctgcaacagcaggcagagttacaaaaagccgctttgctttccgaagctgagtctgtgattcaaccgctgg

SEQ ID NO: 605567 - DNA, 75 bp, synthetic construct
  source 1..75: mol_type = other DNA
acaaaaggccgtattgctttccgaagctgaatcagtcatccagccgctggaacgcgctgtcaggctgaatatggc

SEQ ID NO: 605568 - DNA, 75 bp, synthetic construct
  source 1..75: mol_type = other DNA
caatttattttccaaaaaaatgactttgtgcataagtttgtttttgttttggggggccgatagttgctcacatac

SEQ ID NO: 605569 - DNA, 75 bp, synthetic construct
  source 1..75: mol_type = other DNA
cattgggttcaaacagcatagctaacgcggacaataccgttgcgcttggatatggagctaatgcaaccaaagctg

SEQ ID NO: 605570 - DNA, 75 bp, synthetic construct
  source 1..75: mol_type = other DNA
gccaacaccaccaatatcgccacgaataccaccaacatcaccaacctgactgacgcagttgacagcctcggtgac

SEQ ID NO: 605571 - DNA, 75 bp, synthetic construct
  source 1..75: mol_type = other DNA
gtaatggaatgaagcactttttccgtcttccagaaaatatggaaactatgggtgattgcggagccttcacctatg

SEQ ID NO: 605572 - DNA, 75 bp, synthetic construct
  source 1..75: mol_type = other DNA
atactctccacttttactcgaagaagccaggactgttgggttgggggctttttcagaggaggtgctttcagaaaa

SEQ ID NO: 605573 - DNA, 75 bp, synthetic construct
  source 1..75: mol_type = other DNA
agagttcccgaccagaatcacaaaaatactctccacttttactcgaagaagccaggactgttgggttgggggctt

SEQ ID NO: 605574 - DNA, 75 bp, synthetic construct
  source 1..75: mol_type = other DNA
agagattaaacgccagcaagcttttagacagcttgaaggcatcaagaaggggcgtatgggtgacggtatggactc

SEQ ID NO: 605575 - DNA, 75 bp, synthetic construct
  source 1..75: mol_type = other DNA
acgtctgtggatgctcttgaacaggatgctatgctctggaacggcactgcattccacgccgctcatggtacggaa

SEQ ID NO: 605576 - DNA, 75 bp, synthetic construct
  source 1..75: mol_type = other DNA
accttaaagatgatgccctgctctggaatggcactgcattcaacgccgctcatggtacggaaaccaccagcacca

SEQ ID NO: 605577 - DNA, 75 bp, synthetic construct
  source 1..75: mol_type = other DNA
gtagtgccgcatctgcggctaacgcgattgcagtaggccgcaacagtgctgcagctggcgtagacagcctcgcat

SEQ ID NO: 605578 - DNA, 75 bp, synthetic construct
  source 1..75: mol_type = other DNA
gatgccgacctgacggctgacagcactgatgctgttaacggctctcagctgaaaaccaccaacgatgctgtggcg

SEQ ID NO: 605579 - DNA, 75 bp, synthetic construct
  source 1..75: mol_type = other DNA
caagcccgtccgataacgtgcaatccctgaaagagaacgttagccgtgatctgaacactaccccatctatgacgt

SEQ ID NO: 605580 - DNA, 75 bp, synthetic construct
  source 1..75: mol_type = other DNA
aatatgaatacggggagctgccctgctgtacagttccgcgtgaattacaggaacggcggtattttttatcgttca

SEQ ID NO: 605581 - DNA, 75 bp, synthetic construct
  source 1..75: mol_type = other DNA
cctgacgcactgaatacgctgaacgagctggcggcggcgctgggaaacgacccgaattttgcgaccaccatgact

SEQ ID NO: 605582 - DNA, 75 bp, synthetic construct
  source 1..75: mol_type = other DNA
gcggaggtggtgcatacgatgcaggttatagcggaaccagtatgacgggcgggaaaggtgctgatggggtttgta

SEQ ID NO: 605583 - DNA, 75 bp, synthetic construct
  source 1..75: mol_type = other DNA
gccaacaacgccaactgcgccaaaagggactaataatactcagatcgcaagcacggcttatgtgatggccgcgat

SEQ ID NO: 605584 - DNA, 75 bp, synthetic construct
  source 1..75: mol_type = other DNA
cggtgggcttacttttgaaaacgactcaatccttgcctggattcgaaatactgactgggcgaagattggatttaa

SEQ ID NO: 605585 - DNA, 75 bp, synthetic construct
  source 1..75: mol_type = other DNA
gctataagccgcaactggctgaaggcagcgggcgtacccagaccgtgcgcatggcgctgattaccagcagcacgg

SEQ ID NO: 605586 - DNA, 75 bp, synthetic construct
  source 1..75: mol_type = other DNA
ggggcattactgtttttggtgaaaccctgcaggcagaaaagtatcagtcggcaggcatcggcagcaccctttcgc

SEQ ID NO: 605587 - DNA, 75 bp, synthetic construct
  source 1..75: mol_type = other DNA
atgcactgaggatatttaattcatcttttggtgccatttttcgccgttctgaagaatgcctgcatatcatcccta

SEQ ID NO: 605588 - DNA, 75 bp, synthetic construct
  source 1..75: mol_type = other DNA
tgaatcttaaatgggatgctttgtctgttcttgttaaagcccttttcagcagtgaagtaaaaatatcgacagtca

SEQ ID NO: 605589 - DNA, 75 bp, synthetic construct
  source 1..75: mol_type = other DNA
cactgcgcgaaaagggatagttcagctcagtagcgccaccaacagcacatctgaaacgctggctgcgacgccaaa

SEQ ID NO: 605590 - DNA, 75 bp, synthetic construct
  source 1..75: mol_type = other DNA
accgtttcagcggctctgatacggttaaagacaatacaacactatggcgtcggggtgtttgtgaagatgaatttt

SEQ ID NO: 605591 - DNA, 75 bp, synthetic construct
  source 1..75: mol_type = other DNA
attcctgacccgactttgtttattcagaatctgggacttaaaccgacggttgataaggctgaaagtgctctgcaa

SEQ ID NO: 605592 - DNA, 75 bp, synthetic construct
  source 1..75: mol_type = other DNA
gactaacgcgcttgcgggtaagcaatcgaaggatgccaccctgacggcgctggcggagcttgctacatcagcaga

SEQ ID NO: 605593 - DNA, 75 bp, synthetic construct
  source 1..75: mol_type = other DNA
gccggaaagcaaggtggatgtgaatatcgcccctgatggtagtcagcttggatcatacctcgattacaaagtggg

SEQ ID NO: 605594 - DNA, 75 bp, synthetic construct
  source 1..75: mol_type = other DNA
gctactctcggcggtgctgcgatattcaataccgtaaccgatcaggcaagcaagatcacagacactaaccgcaag

SEQ ID NO: 605595 - DNA, 75 bp, synthetic construct
  source 1..75: mol_type = other DNA
gggacgacgccgcaggcgcattcaccgctgcacacggcactaacgccaccaacaaaatcaccaatgtcaccgctg

SEQ ID NO: 605596 - DNA, 75 bp, synthetic construct
  source 1..75: mol_type = other DNA
aagtggctggcaacaccaccagtatcactaacctgactgatacggtgactaacctcggtgaagacgccctgaaat

SEQ ID NO: 605597 - DNA, 75 bp, synthetic construct
  source 1..75: mol_type = other DNA
acctttgacctggacgcgcaaaagacggtcgttaccgcggtcagccaggctgtccgtcatggtgcatcagatgct

SEQ ID NO: 605598 - DNA, 75 bp, synthetic construct
  source 1..75: mol_type = other DNA
atccggcgctggcggcagaaatcctgacgctgccttctgtcaatgaaatggctgaactgttcgatatcatcgacc

SEQ ID NO: 605599 - DNA, 75 bp, synthetic construct
  source 1..75: mol_type = other DNA
actgccgatatcgccactaacactacagatattgccaccaacactgccaatatcgccgataacactgctgatatc

SEQ ID NO: 605600 - DNA, 75 bp, synthetic construct
  source 1..75: mol_type = other DNA
ttattttgatgagcgtaaagtgatgatgcaggaatgggcggataagcttgatgaatgggtagggagcacacacag

SEQ ID NO: 605601 - DNA, 75 bp, synthetic construct
  source 1..75: mol_type = other DNA
aacgcggcgactggatatgctcgaacgagtggttttccctgcaatcggtaagctcccagtcagagagatcactcc

SEQ ID NO: 605602 - DNA, 75 bp, synthetic construct
  source 1..75: mol_type = other DNA
cagttgcgcagcctgaatggcgaatggcgctttgcctggtttcccccccccccagccgggggcgggcgggggggg

SEQ ID NO: 605603 - DNA, 75 bp, synthetic construct
  source 1..75: mol_type = other DNA
cgttgccagcgaaacggcgaagagccgtggcaaaaagagcggacgcagtaagctgttaatttctgcgctggttgc

SEQ ID NO: 605604 - DNA, 75 bp, synthetic construct
  source 1..75: mol_type = other DNA
gcttgagttttgggcgctggttaacacagccgccgcggcaagcggtgatgcaactgtaaacatccagttgcagac

SEQ ID NO: 605605 - DNA, 75 bp, synthetic construct
  source 1..75: mol_type = other DNA
gactgagcgcgtagctataactgaaggccatcttttccgggtggcttttgcgatattttttcagctcagtcaggc

SEQ ID NO: 605606 - DNA, 75 bp, synthetic construct
  source 1..75: mol_type = other DNA
caatagccattgccgaagtacgcgaagcacttacccggactctggcgactgaactggcggatgaactgctggcta

SEQ ID NO: 605607 - DNA, 75 bp, synthetic construct
  source 1..75: mol_type = other DNA
attgggagagggtagtgccgctggtggcagcaacagccttgctttcggtagccagtccagggcaaacggcaatga

SEQ ID NO: 605608 - DNA, 75 bp, synthetic construct
  source 1..75: mol_type = other DNA
caccaacctgactgatacggtgaataatctcggtgaagacgccctgaaatgggacgacgccgcaggcgcattcac

SEQ ID NO: 605609 - DNA, 75 bp, synthetic construct
  source 1..75: mol_type = other DNA
tggaacggcaccgcgttcagcgccgcacacggcaccgacgtcaccagcaaaatcaccaatgtcaccgctggcgaa

SEQ ID NO: 605610 - DNA, 75 bp, synthetic construct
  source 1..75: mol_type = other DNA
caccagcaaaatcaccaacgttaaagatgccgacctgacggctgacagcactgatgctgttaacggctctcagct

SEQ ID NO: 605611 - DNA, 75 bp, synthetic construct
  source 1..75: mol_type = other DNA
taggtgctgacagtagcagttcgaacgataacgccatcgcgattgggaacaaaacgcaagccctgggagtgaatt

SEQ ID NO: 605612 - DNA, 75 bp, synthetic construct
  source 1..75: mol_type = other DNA
gggtgatgctctgtcaggaatcgacaataataccctacaatggaataaaaccgcgggggcgttcagcgccaatca

SEQ ID NO: 605613 - DNA, 75 bp, synthetic construct
  source 1..75: mol_type = other DNA
acatgggcgcaatggagaataaaggtcttaacatctttaactccaaatatgtgctggcgcgtaccgacaccgcaa

SEQ ID NO: 605614 - DNA, 75 bp, synthetic construct
  source 1..75: mol_type = other DNA
ctgtgacgactttgtgcaggcgatggaagatgcgtcgaatgtcgatctctcccatttccgccgttggtacagcca

SEQ ID NO: 605615 - DNA, 75 bp, synthetic construct
  source 1..75: mol_type = other DNA
gcaaaacgcactctgcgtaatgcctgcctgcgcttcctcgcttttggtgaaacgcatctggctgacgtgctggtg

SEQ ID NO: 605616 - DNA, 75 bp, synthetic construct
  source 1..75: mol_type = other DNA
agttgaaagaaaccaaagacgatgtggccaccaacacagccaatatcgccgataacactgctgatattgcaacca

SEQ ID NO: 605617 - DNA, 75 bp, synthetic construct
  source 1..75: mol_type = other DNA
gcgatgacctcgctgaaaaactcaatgaaatgggatgaagaacgcttcggcctggagtatgacctcgacatctat

SEQ ID NO: 605618 - DNA, 75 bp, synthetic construct
  source 1..75: mol_type = other DNA
atgatcgtcgcggtggatttcttcaacatgggcgcgatggagaataaaggtctgaatatctttaactccaagtat

SEQ ID NO: 605619 - DNA, 75 bp, synthetic construct
  source 1..75: mol_type = other DNA
gagttataaaaagtctttaatgaatagactgtatgtctgtaatgacatacagttattttacaaaggtagattgtt

SEQ ID NO: 605620 - DNA, 75 bp, synthetic construct
  source 1..75: mol_type = other DNA
ggcagcggcgagcacacagatacccagctttatcagctactgtcggactggtcgtcgcttgaagcgagcgcgggt

SEQ ID NO: 605621 - DNA, 75 bp, synthetic construct
  source 1..75: mol_type = other DNA
atgaagggaatcgatctttcgcttttgcaacgcgtgctagatgcactggaagaacaagaaaatgcgctcctggta

SEQ ID NO: 605622 - DNA, 75 bp, synthetic construct
  source 1..75: mol_type = other DNA
aaacctttatttttaccgataccctcgacggcaataatcgtctttatcacgatctcagtgatgcagagggctgga

SEQ ID NO: 605623 - DNA, 75 bp, synthetic construct
  source 1..75: mol_type = other DNA
ccagatgccatgggtgcgcatcatgttgctggtaattctcgcctgtttgcttttttatatgtggcgaattccggt

SEQ ID NO: 605624 - DNA, 75 bp, synthetic construct
  source 1..75: mol_type = other DNA
acgaaaactcacgttaagcaacgttttctgcctctgacgcctcttttaatggtctcagatgtcctttggtcacca

SEQ ID NO: 605625 - DNA, 75 bp, synthetic construct
  source 1..75: mol_type = other DNA
aagtaccgactggctggtgccacaatcctacgagccgatggcaggggaagggcggcaatttgttgatttccagat

SEQ ID NO: 605626 - DNA, 75 bp, synthetic construct
  source 1..75: mol_type = other DNA
ttggattacagtgcaggcaccaaaatttgctatggccgcgtggttatacaattcgtcaggcggagctcggtttct

SEQ ID NO: 605627 - DNA, 75 bp, synthetic construct
  source 1..75: mol_type = other DNA
tactactcgctttcacgggcagtaaaagacatccccgttggtctggcttacgccacatggtccggtactggcatt

SEQ ID NO: 605628 - DNA, 75 bp, synthetic construct
  source 1..75: mol_type = other DNA
ggttattgccatcgatccgaaaaagctcggcaatcctgtttttgcaaaaaccatggcgcaaatggtcacggaact

SEQ ID NO: 605629 - DNA, 75 bp, synthetic construct
  source 1..75: mol_type = other DNA
gggctatccgcaaccctggcggatgcacagaatttctttgctaatctagtgggagccccagaggaagaggtggct

SEQ ID NO: 605630 - DNA, 75 bp, synthetic construct
  source 1..75: mol_type = other DNA
ccttcatcaggtcattaccacagtacagctagagcctgtcgactatcttgggctcttactctatccgcgattggg

SEQ ID NO: 605631 - DNA, 75 bp, synthetic construct
  source 1..75: mol_type = other DNA
gctttattcagcgaatttgttgaaaagattcctctcgatcagccggactggttatcatcgttacacgttgcgttg

SEQ ID NO: 605632 - DNA, 75 bp, synthetic construct
  source 1..75: mol_type = other DNA
ctctcgctttctctgggtaagcactttccgattctcgacggtaacgtcaaacgcgtgctggcgcgctgctatgct

SEQ ID NO: 605633 - DNA, 75 bp, synthetic construct
  source 1..75: mol_type = other DNA
aagcggagcttgatcctcaaaatccgaacccacgtggggtgcatggcggtgaaaaagaaactgacccgctggatg

SEQ ID NO: 605634 - DNA, 75 bp, synthetic construct
  source 1..75: mol_type = other DNA
ttaacagcaattttgacggttcaatggtggtgggactgactgggcggcgtaataacggtgtgcctgtttcccttt

SEQ ID NO: 605635 - DNA, 75 bp, synthetic construct
  source 1..75: mol_type = other DNA
gattaaatctccattcataaattatgaagtgtttgaggataaggctaagatagtattatctgaattaaacaagaa

SEQ ID NO: 605636 - DNA, 75 bp, synthetic construct
  source 1..75: mol_type = other DNA
cggcgacgatcctttacacctttattggcggtttcctcgcggtgagctggactgacactgtacaggccagtctga

SEQ ID NO: 605637 - DNA, 75 bp, synthetic construct
  source 1..75: mol_type = other DNA
tcgcccttgaggtcggacatacggtttcaattgacgatgatggggcagcagccatactcactgaactgccaacaa

SEQ ID NO: 605638 - DNA, 75 bp, synthetic construct
  source 1..75: mol_type = other DNA
caaggaaatcatgctgcaacgccgtaaagatgaacttgagctctacaagttgttcgcaggagattcagcatttaa

SEQ ID NO: 605639 - DNA, 75 bp, synthetic construct
  source 1..75: mol_type = other DNA
gcctggactcggctgccgccagcagcattacctgcgcgggcgtcaccacctataaagcggtgaaactgtcaaaaa

SEQ ID NO: 605640 - DNA, 75 bp, synthetic construct
  source 1..75: mol_type = other DNA
atgaaggctgcggttgttacgaaggatcatcatgttgacgttacggataaaacgctgcgctcactgaaacacggt

SEQ ID NO: 605641 - DNA, 75 bp, synthetic construct
  source 1..75: mol_type = other DNA
gatctccgagcaggacaaataactaatgacgaacgagcaagaactgatatttctgatagttgtaaggtgtatgac

SEQ ID NO: 605642 - DNA, 75 bp, synthetic construct
  source 1..75: mol_type = other DNA
ggttttacgaaggatgcggtcattgcgaatactgtaacagtggtaacgaaacgctctgccgttcagttaaaaatg

SEQ ID NO: 605643 - DNA, 75 bp, synthetic construct
  source 1..75: mol_type = other DNA
gtggtggcagaagttggcccaggtgtcacctcattaaaaccaggcgatcgtgccagcgtggcgtggttctacgaa

SEQ ID NO: 605644 - DNA, 75 bp, synthetic construct
  source 1..75: mol_type = other DNA
gtctgccgccggaatccatgagcctggatattccgcgtctggtactggatggcattgaagtggtcggttcactgg

SEQ ID NO: 605645 - DNA, 75 bp, synthetic construct
  source 1..75: mol_type = other DNA
aaatatgataagttatcaacgttatcaaatgcagcaggaacaggaactgatccgggaccaagaacatgttctggt

SEQ ID NO: 605646 - DNA, 75 bp, synthetic construct
  source 1..75: mol_type = other DNA
atcgcaaactgttcgccaaattacgcaaactgcgtaaatcgattgccaatgaaagcaatgttccgccgtatgtgg

SEQ ID NO: 605647 - DNA, 75 bp, synthetic construct
  source 1..75: mol_type = other DNA
tgacgcaaaatatcgcccagcattctgcgctacaactgacagaggccgcgcgtccggtgctgcgtggcgaatcct

SEQ ID NO: 605648 - DNA, 75 bp, synthetic construct
  source 1..75: mol_type = other DNA
caatattgaatcctactatcaggaaacaggtcgcgccgggcgtgacggcctgcccgcagaagcgatgctgtttta

SEQ ID NO: 605649 - DNA, 75 bp, synthetic construct
  source 1..75: mol_type = other DNA
caaacccgcgagcagcagcttgaagtaatgacaggctgccgcaccgggcaaatccgcctgctttatatcgcgccg

SEQ ID NO: 605650 - DNA, 75 bp, synthetic construct
  source 1..75: mol_type = other DNA
cctgctggggctgaacgatccgctgattcaaatcagcagttttgaccgtccgaatattcgctacatgctgatgga

SEQ ID NO: 605651 - DNA, 75 bp, synthetic construct
  source 1..75: mol_type = other DNA
tgtttaacgacgctaccttgattgagatggcggaacagatgccgatcaccgccagcgaaatgttgagcgtcaacg

SEQ ID NO: 605652 - DNA, 75 bp, synthetic construct
  source 1..75: mol_type = other DNA
ttttgttgaccatttgcagaagatcgatcagcagtacgatgtgtttagcgatattcgcggtatggggctgttgat

SEQ ID NO: 605653 - DNA, 75 bp, synthetic construct
  source 1..75: mol_type = other DNA
tggtcgctcgctgtttaccgtttcggtgggtgggcagccaaaatattccgacggctttgggccgaaaccggcaga

SEQ ID NO: 605654 - DNA, 75 bp, synthetic construct
  source 1..75: mol_type = other DNA
tctttcccgtatgccggtgagtggctggcagaggacgaaatcagggcagttcttgatgcggtgcgcgatgcagta

SEQ ID NO: 605655 - DNA, 75 bp, synthetic construct
  source 1..75: mol_type = other DNA
aacgatccgctgattcaaatcagcagttttgaccgcccgaatattcgctacatgctgatggagaaattcaaaccg

SEQ ID NO: 605656 - DNA, 75 bp, synthetic construct
  source 1..75: mol_type = other DNA
catgacccaagttggccccgcagcattgctgccccgtctggaaacgctacgaagagggcgagcccgcaacccgcc

SEQ ID NO: 605657 - DNA, 75 bp, synthetic construct
  source 1..75: mol_type = other DNA
attgcagttacggcgttgggccattgccatcctgcgctggtgaatgcgttaaaaacccagggcgaaactctgtgg

SEQ ID NO: 605658 - DNA, 75 bp, synthetic construct
  source 1..75: mol_type = other DNA
gttgcatccgggtaaagagctggtggtgaccgcattaccgctgtatcacattttcgctttaaccattaactgtct

SEQ ID NO: 605659 - DNA, 75 bp, synthetic construct
  source 1..75: mol_type = other DNA
tgagaatttattgccttttggtaagcataaaggttccggtattgcgcttgcgatagatgctttgactggcgtgtt

SEQ ID NO: 605660 - DNA, 75 bp, synthetic construct
  source 1..75: mol_type = other DNA
atctgccagagtcggaatccatgacgcgccgaagcgtcaacatggaaccgaaactgcgcccggcattcccgccga

SEQ ID NO: 605661 - DNA, 75 bp, synthetic construct
  source 1..75: mol_type = other DNA
cgattgaatatatgtgtaaaaccgggccggaagcgattctggaactggaacatatgggcctgccgttctcgcgtc

SEQ ID NO: 605662 - DNA, 75 bp, synthetic construct
  source 1..75: mol_type = other DNA
gggactacccagcagtctatagagcaactcgaaaacggtaaaactaagcgaccacgctttttaccagaacttgcg

SEQ ID NO: 605663 - DNA, 75 bp, synthetic construct
  source 1..75: mol_type = other DNA
tttgttgcaagtctcaattgctgattttagccagtcaattgctgccaaggttgcagaacaggcagaaagccttaa

SEQ ID NO: 605664 - DNA, 75 bp, synthetic construct
  source 1..75: mol_type = other DNA
cacccgcgggcgtcagcagatggccagccagaccccgggagcaacgaccgtcgaagccgtcgatttagtcgacct

SEQ ID NO: 605665 - DNA, 75 bp, synthetic construct
  source 1..75: mol_type = other DNA
gtgacggcgctgccgctgtatcacatttttgccctgaccattaactgcctgctgtttatcgaactgggtgggcag

SEQ ID NO: 605666 - DNA, 75 bp, synthetic construct
  source 1..75: mol_type = other DNA
atattccggggctggtgaaagagctggcgaaatatccgtttaccgcgatcaccggcgttaacacgttgttcaacg

SEQ ID NO: 605667 - DNA, 75 bp, synthetic construct
  source 1..75: mol_type = other DNA
gtaacggcactgccgctgtatcacatttttgccctgaccattaactgcctgctgtttatcgaactgggtgggcag

SEQ ID NO: 605668 - DNA, 75 bp, synthetic construct
  source 1..75: mol_type = other DNA
tatcgacggcggaacaggacaccgccttgcagacggatgcgctgcgcaatgcaggctgcgaacgggttttcgagg

SEQ ID NO: 605669 - DNA, 75 bp, synthetic construct
  source 1..75: mol_type = other DNA
tggtaaacgtgagcaaagccagctgctgggcgtacgtttgcgttcagaaggtaaagattattacgctatccgcgc

SEQ ID NO: 605670 - DNA, 75 bp, synthetic construct
  source 1..75: mol_type = other DNA
atctcgcataagttggcggaaattcgccgtatttgcgaccgctatacggtgatgaaagacggcagcagcgtttgc

SEQ ID NO: 605671 - DNA, 75 bp, synthetic construct
  source 1..75: mol_type = other DNA
tggcaatcatgagatgtacaaagtctttacgccttttaaaaacgcatggttgaaacggctgcgggaagggatgcc

SEQ ID NO: 605672 - DNA, 75 bp, synthetic construct
  source 1..75: mol_type = other DNA
tgtgacgctggattatccgcaaccgatagtcgatcacaaagaagcgagagtacgaacgttggcagcgtatgaggc

SEQ ID NO: 605673 - DNA, 75 bp, synthetic construct
  source 1..75: mol_type = other DNA
aggtaacggcggtgagtggctatgtcagaagccgtggcaaacctgcgtggattggggcgttatcgcggattgaag

SEQ ID NO: 605674 - DNA, 75 bp, synthetic construct
  source 1..75: mol_type = other DNA
ttttccggcattgtgaccttccgtaatgcggaacaactgcgcgatgccgcgcgttatgtcccgctggatcgactc

SEQ ID NO: 605675 - DNA, 75 bp, synthetic construct
  source 1..75: mol_type = other DNA
atccggacgggacgggaaacctgaatgatacggagcacctgaaacagtcagtcagggacatcctgatcaccccgc

SEQ ID NO: 605676 - DNA, 75 bp, synthetic construct
  source 1..75: mol_type = other DNA
gcgtcgaaatagttaaacaggtgtgcgcggaaaacagcgttactcatcttttttataactatcagtatgaggtga

SEQ ID NO: 605677 - DNA, 75 bp, synthetic construct
  source 1..75: mol_type = other DNA
gagcaattatgggaatagctggcgctgcgatagcaacacagcttgcttcaggtacgggcacgcaccataaaaatc

SEQ ID NO: 605678 - DNA, 75 bp, synthetic construct
  source 1..75: mol_type = other DNA
aatgacgatttacttgcagtcgcgcagcatcagcagatagtcgatcaactaatggccgtttacagcgtgaattct

SEQ ID NO: 605679 - DNA, 75 bp, synthetic construct
  source 1..75: mol_type = other DNA
accgtaaagaaaaatatccctcattttgaagtgtatgcaggatatgacaataattttgcccacaacatactatct

SEQ ID NO: 605680 - DNA, 75 bp, synthetic construct
  source 1..75: mol_type = other DNA
ttatcggctggcgattgttcacggcaacgggccgcaggtggggttgttggcgttacagaatctggcgtggaaaga

SEQ ID NO: 605681 - DNA, 75 bp, synthetic construct
  source 1..75: mol_type = other DNA
ttatcggctggcgattgttcacggcaacgggccgcaggtggggctgctggcgttacagaatctggcgtggaaaga

SEQ ID NO: 605682 - DNA, 75 bp, synthetic construct
  source 1..75: mol_type = other DNA
tgttgcgggcagtcttcttctgaccggggctatctggcttgcgcagcagcagatggatgagtcagttttacaagt

SEQ ID NO: 605683 - DNA, 75 bp, synthetic construct
  source 1..75: mol_type = other DNA
ctgaagggtagcgccagccgactgccggaagctggtgaagacttagagctgaaaatgggcgagaactggcgtcgt

SEQ ID NO: 605684 - DNA, 75 bp, synthetic construct
  source 1..75: mol_type = other DNA
gaaaagctcaacatccctgattaccaggagaaagaggaagcatttgcacagttagttcctccgcagattgtttcc

SEQ ID NO: 605685 - DNA, 75 bp, synthetic construct
  source 1..75: mol_type = other DNA
ctgctgaccagtcggttaccggtgatgtcagcgcagcaaataaagatgccattcgtaaacagatggatgcggctg

SEQ ID NO: 605686 - DNA, 75 bp, synthetic construct
  source 1..75: mol_type = other DNA
tgctcgattcagttcagggacgtagcccaaatgcaacgctgctgccgcttatctctattcctgaactggaaacgt

SEQ ID NO: 605687 - DNA, 75 bp, synthetic construct
  source 1..75: mol_type = other DNA
tgttgctgcaaatatctctgcgattgaaaagcagatggaggcggcagcaaacaaaggggatgtagagacgtaccg

SEQ ID NO: 605688 - DNA, 75 bp, synthetic construct
  source 1..75: mol_type = other DNA
tgttgctgcaaatatctctgcgattgaaaagcagatggaagcggcagcaaacaaaggggatgtagagacataccg

SEQ ID NO: 605689 - DNA, 75 bp, synthetic construct
  source 1..75: mol_type = other DNA
attttcattgccatgctgtacccggcaggcgttgttcgccttttcagtaagtacatcaaggaaatcaaacaatga

SEQ ID NO: 605690 - DNA, 75 bp, synthetic construct
  source 1..75: mol_type = other DNA
cagatgacagaagatcagcacctgctcgccgcccattgcgacgccaaaggtaaaatgtggagcaatttacgtctg

SEQ ID NO: 605691 - DNA, 75 bp, synthetic construct
  source 1..75: mol_type = other DNA
ggattgaacgtcgcagcgtgcgcgacaaccagcttaccgaactgaaaaaatatgcggtcttctctaaagtgacta

SEQ ID NO: 605692 - DNA, 75 bp, synthetic construct
  source 1..75: mol_type = other DNA
ggtagttaaagaaggcgcgaccactttgctatggtttgaacacccggcagaacgtttcctgatcgtaaccgatga

SEQ ID NO: 605693 - DNA, 75 bp, synthetic construct
  source 1..75: mol_type = other DNA
tctcttcaaagacggttcgatgattggtttaaacgcggatattctcaaaacctatgtaaaataccgcaccaatct

SEQ ID NO: 605694 - DNA, 75 bp, synthetic construct
  source 1..75: mol_type = other DNA
gtgaccctctctcgcagattattgatattcgcatcccgtcatccctgcatcctaccgtggcggatgcgctgcgtt

SEQ ID NO: 605695 - DNA, 75 bp, synthetic construct
  source 1..75: mol_type = other DNA
gcgctacgatcgttatctgctggtcagtaccgatccgcaggcggcccagcgtgaccctctctcgcagattattga

SEQ ID NO: 605696 - DNA, 75 bp, synthetic construct
  source 1..75: mol_type = other DNA
atgatggatgagcaaccgctggaaggcgcggtacgtgaaaaagcgttgcacaccatgcgtgagcagacccagcgg

SEQ ID NO: 605697 - DNA, 75 bp, synthetic construct
  source 1..75: mol_type = other DNA
ttgatttggcgcgagttttaccgtcacctgataacgtattacccctcgctgtgtaaacatcgtccgtttattgcc

SEQ ID NO: 605698 - DNA, 75 bp, synthetic construct
  source 1..75: mol_type = other DNA
cgtagtagcggatcgatagaccccgcaccatccatttcgctgacttaccctcgtcagcctttcgacacagcatat

SEQ ID NO: 605699 - DNA, 75 bp, synthetic construct
  source 1..75: mol_type = other DNA
tcatgggattgggttattggtatgctacgccgaaagcgaatcgtccggttgcggacaaatttaatcaaactgaaa

SEQ ID NO: 605700 - DNA, 75 bp, synthetic construct
  source 1..75: mol_type = other DNA
atgggcggttatatgttttcaaactattctgaggattatgagttatggaatagattaagtttagcaaaaataaaa

SEQ ID NO: 605701 - DNA, 75 bp, synthetic construct
  source 1..75: mol_type = other DNA
ctggccaaccggctagatgtggacgagcgcaccatccgtaagtggaaatccggcgagaccagaatggtgttcacc

SEQ ID NO: 605702 - DNA, 75 bp, synthetic construct
  source 1..75: mol_type = other DNA
tgcagcgccgtattttcgtattttcaacccgacaacccagggcgagaaatttgatcatgagggcgagtttatccg

SEQ ID NO: 605703 - DNA, 75 bp, synthetic construct
  source 1..75: mol_type = other DNA
gtggaagcgactaactggaatcttggaaataaggatggttatcagcaacgcgcaaaaacagccgcattccctgcg

SEQ ID NO: 605704 - DNA, 75 bp, synthetic construct
  source 1..75: mol_type = other DNA
gttgtaatgacgcagaaatattcgacaaagcgggcattgctgtactttcggtggaagcgactaactggaatcttg

SEQ ID NO: 605705 - DNA, 75 bp, synthetic construct
  source 1..75: mol_type = other DNA
ctcgctggaagtaatcaaacaaaagagcattgaaaacgtggatatgctcaaagggttgaattttgtcgccattat

SEQ ID NO: 605706 - DNA, 75 bp, synthetic construct
  source 1..75: mol_type = other DNA
ccatgttcctcacctttggggtgaaagcgggcaccatcagccacgggcaaatgtgggcaatcctgccgcaaacct

SEQ ID NO: 605707 - DNA, 75 bp, synthetic construct
  source 1..75: mol_type = other DNA
gtgcggctaacgctgcgcgcattgcacgcctgtcggcaaataacccgctcggcttttgggtcagctccgccatgg

SEQ ID NO: 605708 - DNA, 75 bp, synthetic construct
  source 1..75: mol_type = other DNA
tggataatcaacaacatattgataaggcacttcctggaagaatagaacgtcgctgccgtgacgttatgcggataa

SEQ ID NO: 605709 - DNA, 75 bp, synthetic construct
  source 1..75: mol_type = other DNA
gaaatccggcgagaccagtatggtattcaccacctggtgctgcctggccgggctgggaatgctgctggaagaacc

SEQ ID NO: 605710 - DNA, 75 bp, synthetic construct
  source 1..75: mol_type = other DNA
gagtgtcacacatatcatgcaggaaatcgccgccgcctcggatgaacaaagtagaggcataacgcaggttagcca

SEQ ID NO: 605711 - DNA, 75 bp, synthetic construct
  source 1..75: mol_type = other DNA
cgatttctgaaatggataaagtaacacaacagaatgcctctctggtggaggaggcgtctgcagcggcggtgtcgc

SEQ ID NO: 605712 - DNA, 75 bp, synthetic construct
  source 1..75: mol_type = other DNA
gcagcattcgctggtgatgaccgtcgggacggtacgccagggggcggaggagatttatcgcggcaccagcgaaat

SEQ ID NO: 605713 - DNA, 75 bp, synthetic construct
  source 1..75: mol_type = other DNA
gcgtcttacgttcgtgccgtcgcagaccaaacagcaactgctggttatgtaaaaactaacactgcatacaccatt

SEQ ID NO: 605714 - DNA, 75 bp, synthetic construct
  source 1..75: mol_type = other DNA
cttacatgctcaaccagagctttatcaaatcggtcgaaacagaagatcgccaggggcaaaatgaccgcgcagcag

SEQ ID NO: 605715 - DNA, 75 bp, synthetic construct
  source 1..75: mol_type = other DNA
ccgctggctgtggcagcgtgtcagcgccgccagtgactgcgagcgtatggccatgacactgtcgggctataacgg

SEQ ID NO: 605716 - DNA, 75 bp, synthetic construct
  source 1..75: mol_type = other DNA
cttcaactggcgccatcaatgccggaaaggtggcctgctgccttccggaaaaaatatgcctacactgcttcctgt

SEQ ID NO: 605717 - DNA, 75 bp, synthetic construct
  source 1..75: mol_type = other DNA
tctggacagtaaaaagagtaaaaagggcaaaagatataacgtcaatttgtctgacagggcacaagaatggctggg

SEQ ID NO: 605718 - DNA, 75 bp, synthetic construct
  source 1..75: mol_type = other DNA
agcgtgattcagcggaagcgctgcaggtgaagaacgataacgacccgatgtatggcttttgctcttacctgctag

SEQ ID NO: 605719 - DNA, 75 bp, synthetic construct
  source 1..75: mol_type = other DNA
gtgattcgacctctgcaacatgccgcgcaccgtattgaacaaatcgccagtggcgatctgacaatgaacgacgaa

SEQ ID NO: 605720 - DNA, 75 bp, synthetic construct
  source 1..75: mol_type = other DNA
taggttttttatatcacatcaggctggttccgctatttgcctgtattctgggcggcatattacttctttttgccc

SEQ ID NO: 605721 - DNA, 75 bp, synthetic construct
  source 1..75: mol_type = other DNA
acggtctccggcgtggtgaaaacgatgggggatatctccagcagttcaaagaaaatttccgaaattaccgccgtg

SEQ ID NO: 605722 - DNA, 75 bp, synthetic construct
  source 1..75: mol_type = other DNA
gaagctgaaagagcgcctggctatgctggtggcgttgttccgcaacacttgcgtggaagattatgcgcaagatat

SEQ ID NO: 605723 - DNA, 75 bp, synthetic construct
  source 1..75: mol_type = other DNA
tctccgggttatctgcgaagtcatcgtggacgagggtgaggtcaatttcctgacgcgcaccggcaatccgattac

SEQ ID NO: 605724 - DNA, 75 bp, synthetic construct
  source 1..75: mol_type = other DNA
cgttgcctcgatgtgcgctgacgggcaggacgtgtttcgtcgcttcctgctgaaagatccgaaagccggtgtcgg

SEQ ID NO: 605725 - DNA, 75 bp, synthetic construct
  source 1..75: mol_type = other DNA
gaacgcaccggaattaatttaccggtggtggatttaggctggccgccgctttccgctattacatggggttcgcca

SEQ ID NO: 605726 - DNA, 75 bp, synthetic construct
  source 1..75: mol_type = other DNA
attggttttgtcggtatttatgccattttcgatattcttaccagcaatgtcgggccagcggcccaggcgatggtt

SEQ ID NO: 605727 - DNA, 75 bp, synthetic construct
  source 1..75: mol_type = other DNA
aagtacaaagtggtcgagccactcgatacttccgtacccatcgaccagaaggtagtcgagctgctggagaagctg

SEQ ID NO: 605728 - DNA, 75 bp, synthetic construct
  source 1..75: mol_type = other DNA
ggtgttattagccgttgatgaagcgcactgtatctcccaatgggggcacgatttccgcccggaatacgccgcgct

SEQ ID NO: 605729 - DNA, 75 bp, synthetic construct
  source 1..75: mol_type = other DNA
cgccagctgattcacctcggcctggtgacgcaaaatattgcccagcattctgccctacaactgacagaggccgcg

SEQ ID NO: 605730 - DNA, 75 bp, synthetic construct
  source 1..75: mol_type = other DNA
atcgcaaactgttcgccaaattacgcaaactgcgtaaatcgattgccgatgaaagcaatgtcccgccgtacgtgg

SEQ ID NO: 605731 - DNA, 75 bp, synthetic construct
  source 1..75: mol_type = other DNA
ggcggggcacgccgttcttgcctgtggagagatggtgcagtcaggccgcccgttgaagcaggaacccaccgaaat

SEQ ID NO: 605732 - DNA, 75 bp, synthetic construct
  source 1..75: mol_type = other DNA
tgtattgatataaaaggagccggaaccttcgggaatggctacaaaaagcccgcagtctgtagtggcggtcctgaa

SEQ ID NO: 605733 - DNA, 75 bp, synthetic construct
  source 1..75: mol_type = other DNA
acggatattttgagtgattatagccatctggatatgggtaatggtctgctattgaagatatttcataacgatgga

SEQ ID NO: 605734 - DNA, 75 bp, synthetic construct
  source 1..75: mol_type = other DNA
gacgtagatatgtggaactactggcattttgcccttgccggtacgctggtttattacagcaccggcagcctgttc

SEQ ID NO: 605735 - DNA, 75 bp, synthetic construct
  source 1..75: mol_type = other DNA
ggcacttcctggaagaatagaacgtcgctgccgtgatgttatgcggataatgctaccgttggtgaaggagctggc

SEQ ID NO: 605736 - DNA, 75 bp, synthetic construct
  source 1..75: mol_type = other DNA
caacaactggcagcgaaactggcccaacaggggatttgcgttatctctggtggtgcgcgaggtattgatgaatgt

SEQ ID NO: 605737 - DNA, 75 bp, synthetic construct
  source 1..75: mol_type = other DNA
ggcgtgcgcattcagcaatataccgggcaaaaatttatcaccaccatgccggaaaccggcaatcagaatccgcac

SEQ ID NO: 605738 - DNA, 75 bp, synthetic construct
  source 1..75: mol_type = other DNA
atgaacgaaaacacaacgctgaacgcactgatttgtcgtcacgcccgcaacctgctgctggcgcagggctggccg

SEQ ID NO: 605739 - DNA, 75 bp, synthetic construct
  source 1..75: mol_type = other DNA
atggacaagaagctgaaaatcgccgatatcgccgcacgtaccgggctatcgccgagtacggtttcgcgggtgctg

SEQ ID NO: 605740 - DNA, 75 bp, synthetic construct
  source 1..75: mol_type = other DNA
gagcagggtaatctggtggcggtaggccgactgtatattaatgccgataatgaagcgtccatccgttttatggcc

SEQ ID NO: 605741 - DNA, 75 bp, synthetic construct
  source 1..75: mol_type = other DNA
agcgacatcgacaaaatcatgagcgtcacgggcgcggaacgcatcaggacagtacgtgaaattattcgtgagcgg

SEQ ID NO: 605742 - DNA, 75 bp, synthetic construct
  source 1..75: mol_type = other DNA
cgccgattcgccattttctgatgattaaacccgtcgccactctggatgatattttgcatcgcggcgactggtgcg

SEQ ID NO: 605743 - DNA, 75 bp, synthetic construct
  source 1..75: mol_type = other DNA
cacacgctgtttgccgggagtttattctcgctggcaacgctcactggttgggggcttatctggctgatgctgcgc

SEQ ID NO: 605744 - DNA, 75 bp, synthetic construct
  source 1..75: mol_type = other DNA
cggaacgcgacgcgtgggatgcgatggcgcatcaccagatggtcgtcgacgagcagggtaatctggtggcggtag

SEQ ID NO: 605745 - DNA, 75 bp, synthetic construct
  source 1..75: mol_type = other DNA
tatctcggtggaggtattgaaagatgcgaggatcttattaataaatatgttgaagatatcattactgctgtaaaa

SEQ ID NO: 605746 - DNA, 75 bp, synthetic construct
  source 1..75: mol_type = other DNA
acaggccacaccacgcagacagcccaccagctacgcaaaggcatgggcaaatattcagaaaatgaaaaacatgat

SEQ ID NO: 605747 - DNA, 75 bp, synthetic construct
  source 1..75: mol_type = other DNA
gcgtggcggcggcgtgtcttaactcgacgcaaacccgcgagcagcagcttgaagtaatgacaggctgccgtaccg

SEQ ID NO: 605748 - DNA, 75 bp, synthetic construct
  source 1..75: mol_type = other DNA
ctgttgatagctacagtaccgttaatttaaccgaatctaccggttggaataattattctaatctgtataccaata

SEQ ID NO: 605749 - DNA, 75 bp, synthetic construct
  source 1..75: mol_type = other DNA
acggggctatctctacatattacctgaatcatgattttactgatggaacaacaaaccagttgaacatcagcaact

SEQ ID NO: 605750 - DNA, 75 bp, synthetic construct
  source 1..75: mol_type = other DNA
aggctattttccatcaatgggacttagtacctgaacggaccaatactcttaatcaaatccagtctctttatgatg

SEQ ID NO: 605751 - DNA, 75 bp, synthetic construct
  source 1..75: mol_type = other DNA
gctggtatcagttatctggctgatggtactgtagatccggcaaacgcagccattgcaggctgggggaatgtgttc

SEQ ID NO: 605752 - DNA, 75 bp, synthetic construct
  source 1..75: mol_type = other DNA
ataagattacgaatgctgtaggaaaatgggtgacaaatggctgggatcctaagtacgatccaatatggataaaat

SEQ ID NO: 605753 - DNA, 75 bp, synthetic construct
  source 1..75: mol_type = other DNA
ccggtgctgcctgccagaaagctatgaatgagcgggatgctgtagggctggctctggcaacaggtgcagtggcac

SEQ ID NO: 605754 - DNA, 75 bp, synthetic construct
  source 1..75: mol_type = other DNA
aaggatgtattcttgtgtgatacaaccagcataaatgataaatgtgcaaagttttcttataatagaaatctatat

SEQ ID NO: 605755 - DNA, 75 bp, synthetic construct
  source 1..75: mol_type = other DNA
tgtttatttttggaaataaacaagaggaaaataatgatatagtaaatgctaggggagtatttagagagtttgaga

SEQ ID NO: 605756 - DNA, 75 bp, synthetic construct
  source 1..75: mol_type = other DNA
ttagattttattcacacattagcatatgagattataaagaataattataggatagtgaatggatttggatggggc

SEQ ID NO: 605757 - DNA, 75 bp, synthetic construct
  source 1..75: mol_type = other DNA
tttgaatataaccaattggataacaaacaactacagcatgtctgggtctctggtttagatgagggaacgatagaa

SEQ ID NO: 605758 - DNA, 75 bp, synthetic construct
  source 1..75: mol_type = other DNA
cgcgccaggatttaactgaagccttccagtttgccgccgaaggtaaagtggtgccgaaagtcgccctgcgtccgt

SEQ ID NO: 605759 - DNA, 75 bp, synthetic construct
  source 1..75: mol_type = other DNA
ggcgtaattctgggccatgaaggcatcggtgtggtggcagaagttggcccaggtgtcacctcattaaaaccaggc

SEQ ID NO: 605760 - DNA, 75 bp, synthetic construct
  source 1..75: mol_type = other DNA
gaaaaatggaaagcctcttatgaagttgcaaaaatccagggcgttccggcgtatgtcgtcaatggtaaatacctg

SEQ ID NO: 605761 - DNA, 75 bp, synthetic construct
  source 1..75: mol_type = other DNA
ggtattggcaagaaaatgccggttatctccatcgccatgttagtcgggctgatggcaatggctgcgctgccgccg

SEQ ID NO: 605762 - DNA, 75 bp, synthetic construct
  source 1..75: mol_type = other DNA
atgagcgcaatttccctgatcaatagcggcgtggcgtggtttgtcgccgccgctgttctggcatttctcttttct

SEQ ID NO: 605763 - DNA, 75 bp, synthetic construct
  source 1..75: mol_type = other DNA
cagaatgtggctaacgtttaaacgcaataagaagcactggattgattctcctgtttatttctttgaaatcagacc

SEQ ID NO: 605764 - DNA, 75 bp, synthetic construct
  source 1..75: mol_type = other DNA
ccgcaggggcaattgcaggatatcgaacgccataaactcaatgcgatgggcgcgtttgctgaggcgcaaacctgt

SEQ ID NO: 605765 - DNA, 75 bp, synthetic construct
  source 1..75: mol_type = other DNA
ccgatgatcacgctgctgctgattgcctgcccgctgctgccattcatcattatggcgatttgcaaaggcgaccgt

SEQ ID NO: 605766 - DNA, 75 bp, synthetic construct
  source 1..75: mol_type = other DNA
tatggcgatttgcaaaggcgaccgcctgctgtcacgttcccgcggtgcggcctgggtgtgcggctacgaccatga

SEQ ID NO: 605767 - DNA, 75 bp, synthetic construct
  source 1..75: mol_type = other DNA
aatttatctctctggcgctggctgaatgggcagagaaacatgcagtaaaactggaatttatccagccgggtaagc

SEQ ID NO: 605768 - DNA, 75 bp, synthetic construct
  source 1..75: mol_type = other DNA
tggttgccgggcatgaggtgattggtcgcgtggtggcgctcggagcgccgcgcaggataaaggtttgcaggtcgg

SEQ ID NO: 605769 - DNA, 75 bp, synthetic construct
  source 1..75: mol_type = other DNA
ttgccaaaatccagggagttccggcgtatgtcgtcaatggtaaatacctaatctacaccaagagcattaaatcca

SEQ ID NO: 605770 - DNA, 75 bp, synthetic construct
  source 1..75: mol_type = other DNA
aagcctttggcatcctcctcagctactacgctcatggttcatctaagcgagcaattgcatcctactatcacgcga

SEQ ID NO: 605771 - DNA, 75 bp, synthetic construct
  source 1..75: mol_type = other DNA
attgacaaaaaagcctttggcatcctcctcagctactacgctcatggttcatctaagcgagcaattgcatcctac

SEQ ID NO: 605772 - DNA, 75 bp, synthetic construct
  source 1..75: mol_type = other DNA
aactcattgctaacaagtcagatggttatggtcagagtattacagccagcgaattacgatggatttatcgcaaca

SEQ ID NO: 605773 - DNA, 75 bp, synthetic construct
  source 1..75: mol_type = other DNA
cactgatttatcgccacgcccgtaacctgctgctggcgcagggctggccggaggagacggatgttgatcagcgag

SEQ ID NO: 605774 - DNA, 75 bp, synthetic construct
  source 1..75: mol_type = other DNA
cactgatttgtcgtcacgcccgtaacctgctgctggcgcagggctggccggaagagacggatgttgaccagcgaa

SEQ ID NO: 605775 - DNA, 75 bp, synthetic construct
  source 1..75: mol_type = other DNA
catttacgtgcggctggatgcgccccggctggcgacgttacttatcaaccgtcacggcggcgtactgccgccgct

SEQ ID NO: 605776 - DNA, 75 bp, synthetic construct
  source 1..75: mol_type = other DNA
gctaaagccgtgggcctgccagagattcaggtcattcgcgatctgtttgaaggactggtgaatcagaacgagaaa

SEQ ID NO: 605777 - DNA, 75 bp, synthetic construct
  source 1..75: mol_type = other DNA
gctatcctgaaccgtggcgcacgtttttcgtcggtggaaatgtacctggtcagtgagtgtgtggaacatatcctg

SEQ ID NO: 605778 - DNA, 75 bp, synthetic construct
  source 1..75: mol_type = other DNA
ttccggcagacggaacgcaggtgtctttcccgtatgccggagaatggctgaccgaagacgaaatcagggcagttc

SEQ ID NO: 605779 - DNA, 75 bp, synthetic construct
  source 1..75: mol_type = other DNA
cgaagcatctgttaccaggtggcagaagatacgcggcgtatccgggcggcgctgaccaccaccggtcagacgttg

SEQ ID NO: 605780 - DNA, 75 bp, synthetic construct
  source 1..75: mol_type = other DNA
gcctggcaacgacattggtatcatttacacgagtcatgttgatgcctaaaaaacaacgcgctcgttgggtaagtc

SEQ ID NO: 605781 - DNA, 75 bp, synthetic construct
  source 1..75: mol_type = other DNA
aggaaagcgatcacccctgctggctcgatgaagacgacgaaaacctgcccgtggtgctcgatgccatcctgaacc

SEQ ID NO: 605782 - DNA, 75 bp, synthetic construct
  source 1..75: mol_type = other DNA
cgatcacccctgctggctcgatgaagacgacgaaaacctgcccgtggtgctcgatgccatcctgaaccggggcgc

SEQ ID NO: 605783 - DNA, 75 bp, synthetic construct
  source 1..75: mol_type = other DNA
cgtatacctgatgaaccgtcccgtcgctggtttgaccgggatattctgcgggaggtggtcctggaagcccggact

SEQ ID NO: 605784 - DNA, 75 bp, synthetic construct
  source 1..75: mol_type = other DNA
cgctggtttgaccgtgatgttctgcgggaggtggtccgggaagcccgggccgaaatccgcagcatggcggatgcc

SEQ ID NO: 605785 - DNA, 75 bp, synthetic construct
  source 1..75: mol_type = other DNA
ttgctttcttcccggtgcaaaaagccaacgttgaaagtggtaaagagtggacgaaaccagggaatctgatcggca

SEQ ID NO: 605786 - DNA, 75 bp, synthetic construct
  source 1..75: mol_type = other DNA
gacgttgctgacccgccagacgcgccgctttcgtctggttgtgaaggaaagcgatcacccctgctggctcgatga

SEQ ID NO: 605787 - DNA, 75 bp, synthetic construct
  source 1..75: mol_type = other DNA
gtggcagaagatgcgcggcgtatccgggcggcgctgatcacaaccggtcagacgttgctgacccgccagacgcgc

SEQ ID NO: 605788 - DNA, 75 bp, synthetic construct
  source 1..75: mol_type = other DNA
tcagacgttactgacccgccagacgcgccgctttcgcctggtcgtgaaggaaagcgatcacccctgctggctcga

SEQ ID NO: 605789 - DNA, 75 bp, synthetic construct
  source 1..75: mol_type = other DNA
cccctgctggctcaatgaagacgacgaaaacctgcccgtggtgctcgatgccatcctgaaccggggcgcacgttt

SEQ ID NO: 605790 - DNA, 75 bp, synthetic construct
  source 1..75: mol_type = other DNA
ttagctggaagctgcagttgaatcagtggacgattttttacgagccacgggcacttgtgctggatattaatgcct

SEQ ID NO: 605791 - DNA, 75 bp, synthetic construct
  source 1..75: mol_type = other DNA
ttcggcggtggaaatgtatctggtcagcgattgtattgaacatatcctggccagtgggctggcctgcgatgtgct

SEQ ID NO: 605792 - DNA, 75 bp, synthetic construct
  source 1..75: mol_type = other DNA
atggcgcttatgtccttaaagagcgcgtggtcaatgaaaagctggtcgtcgtaccgaatacccattattgggata

SEQ ID NO: 605793 - DNA, 75 bp, synthetic construct
  source 1..75: mol_type = other DNA
ctgttgagggatattccagggcaggtttacacgccgccacagttggggacgtattattatgcatttaacacgcaa

SEQ ID NO: 605794 - DNA, 75 bp, synthetic construct
  source 1..75: mol_type = other DNA
gaaaacctatatcgatagccgtaataccggcaattttgatgttatccgcgcctcgtgggttggggattataatga

SEQ ID NO: 605795 - DNA, 75 bp, synthetic construct
  source 1..75: mol_type = other DNA
cgcgataacgcaaaatgggcggatggcacaccggtaacggcgcaagattttgtctacagctggcaacgtctggtg

SEQ ID NO: 605796 - DNA, 75 bp, synthetic construct
  source 1..75: mol_type = other DNA
tgtataacacttcggaaaatcaccagaaaattgctattgccgtcgcgtcgatgtggaaaaagaatcttggtgtag

SEQ ID NO: 605797 - DNA, 75 bp, synthetic construct
  source 1..75: mol_type = other DNA
gttgcttatccagctccgggtatataaaagacgggtaaggcgaaatgtccagggccaggcaaattcacgatactg

SEQ ID NO: 605798 - DNA, 75 bp, synthetic construct
  source 1..75: mol_type = other DNA
gtggagcatatcctggccagtggtctggtctgtgatgtgctgcgtataccggatgaaccgtcccgtcgccggtat

SEQ ID NO: 605799 - DNA, 75 bp, synthetic construct
  source 1..75: mol_type = other DNA
tggcctgcgatgtgctgcgtatacctgatgaaccgtcccgtcgctggtttgaccgggatattctgcgggaggtgg

SEQ ID NO: 605800 - DNA, 75 bp, synthetic construct
  source 1..75: mol_type = other DNA
tgcagtatgcagtgtcagttgccgggtggcagaagatgcgcggcgtatccgtgcggcgctgaccaccaccggtca

SEQ ID NO: 605801 - DNA, 75 bp, synthetic construct
  source 1..75: mol_type = other DNA
ctctgccattcagaaactgaccggaaccggggcggaacttgttctgtccggcagtcagtggcagtcgctgccggt

SEQ ID NO: 605802 - DNA, 75 bp, synthetic construct
  source 1..75: mol_type = other DNA
cctgctggctcgatgaggacgacgaaaacctgcccgtggtgcttgacgccatcctgaaccggggcgcacgttttt

SEQ ID NO: 605803 - DNA, 75 bp, synthetic construct
  source 1..75: mol_type = other DNA
cgctggtttgaccgtggtgttctgcgggaggtggtccggaaagcccgggccgaaatccgcagcatggcggatgcc

SEQ ID NO: 605804 - DNA, 75 bp, synthetic construct
  source 1..75: mol_type = other DNA
ctgacccgccagacgcgccgctttcgcctggtggtgaaggaaagcgatcacccctgctggctcgatgaagacgac

SEQ ID NO: 605805 - DNA, 75 bp, synthetic construct
  source 1..75: mol_type = other DNA
ggaataaggatggttatcagcaacgcgcaaaaacagccacattccctgcgggaaatagctggcatgacgtaagac

SEQ ID NO: 605806 - DNA, 75 bp, synthetic construct
  source 1..75: mol_type = other DNA
tcctgtccagtgggctggcctgcgatgtgctgcgtataccggatgaaccgccccgccggtggtttgaccgtggtg

SEQ ID NO: 605807 - DNA, 75 bp, synthetic construct
  source 1..75: mol_type = other DNA
cgtttttcgtcggtggaaatgtatctggtcagtgagtgtgtggagcatatcctgtccagtgggctggcctgcgat

SEQ ID NO: 605808 - DNA, 75 bp, synthetic construct
  source 1..75: mol_type = other DNA
agcaacggctgcaaccagcaagccggttaccagtgtggcttcaggaccacgcgcattaagccgtaatcagccgca

SEQ ID NO: 605809 - DNA, 75 bp, synthetic construct
  source 1..75: mol_type = other DNA
cgctggtttgaccgtggtgttctgcgggaggtggcccgggaagcccgggtagaaatccgcagcatggcggatgcc

SEQ ID NO: 605810 - DNA, 75 bp, synthetic construct
  source 1..75: mol_type = other DNA
gcaaatattgttcatctgctgcctttgctttgtaccggtgacgtacccgcagagctgcaaagtgccatgacaaaa

SEQ ID NO: 605811 - DNA, 75 bp, synthetic construct
  source 1..75: mol_type = other DNA
gaacgaaatggtaaaagagcgtttggttttaggcgcagcgctgaaagaagcgattagcaataaccaactgaaact

SEQ ID NO: 605812 - DNA, 75 bp, synthetic construct
  source 1..75: mol_type = other DNA
tggcagaggacgaaatcagggcagttcttgatgcggtacgcgatgcagtacgctgtgtcagttaccaggtggcag

SEQ ID NO: 605813 - DNA, 75 bp, synthetic construct
  source 1..75: mol_type = other DNA
gcgccctgatggtgctgatcatcgtcacggtcagcctgctggatttcctctctcaacggttgcgtaagcacttta

SEQ ID NO: 605814 - DNA, 75 bp, synthetic construct
  source 1..75: mol_type = other DNA
ctggtcgtctcgtggcagggcgcggaaatggccccgctcacgctgattaaagatggcggcaacatggcgacgttc

SEQ ID NO: 605815 - DNA, 75 bp, synthetic construct
  source 1..75: mol_type = other DNA
atcctgtccagtgggctggcctgcgatgtgctgcgtataccggatgaaccgccccgccggtggtttgaccgtggt

SEQ ID NO: 605816 - DNA, 75 bp, synthetic construct
  source 1..75: mol_type = other DNA
aaagcgatcactcctgctggctcgatgaagacgacaaaaacctgcctgtggtgctcgatgccatcctgaaccggg

SEQ ID NO: 605817 - DNA, 75 bp, synthetic construct
  source 1..75: mol_type = other DNA
aaaacctgcccgtggtgctcgatgccatcctgaaccggggcgcacgtttttcggcggtggaaatgtatctggtca

SEQ ID NO: 605818 - DNA, 75 bp, synthetic construct
  source 1..75: mol_type = other DNA
gtcccgtcgctggtttgaccgggatattctgcgggaggttgttctggaggcacgggatgaaatccgcagcatggc

SEQ ID NO: 605819 - DNA, 75 bp, synthetic construct
  source 1..75: mol_type = other DNA
ctcgatgccattctgaaccgtggcgcccgtttttcctctgtggaaatgtacctggtctgtgagtgtgtggagcat

SEQ ID NO: 605820 - DNA, 75 bp, synthetic construct
  source 1..75: mol_type = other DNA
ctggtttgaccgggatattctgcgggaggttgttctggaggcacgggatgaaatccgcagcatggcggatgcact

SEQ ID NO: 605821 - DNA, 75 bp, synthetic construct
  source 1..75: mol_type = other DNA
gccccgccgctggtttgaccgtggtgttctgcgggaggtggtccgggaagcccggagtgaaatccgcagcatggc

SEQ ID NO: 605822 - DNA, 75 bp, synthetic construct
  source 1..75: mol_type = other DNA
cacaaaggaagtcgccggcggctccgctttacccagccatgcggggcatggccttgtggattttcagttatgtgg

SEQ ID NO: 605823 - DNA, 75 bp, synthetic construct
  source 1..75: mol_type = other DNA
gaaaaacttaagagtacatttacgaaaaataataaaaaaggtaaaaatgttgcttgtgcttctcctttttttaaa

SEQ ID NO: 605824 - DNA, 75 bp, synthetic construct
  source 1..75: mol_type = other DNA
ctggcgatggacgggcaatccgcgctgattgaactcactcgactgtcagaacgtttaactctcaagcctcgagcc

SEQ ID NO: 605825 - DNA, 75 bp, synthetic construct
  source 1..75: mol_type = other DNA
agccttactcatcgcttccttcacctcttcttattcagcaaagatgaagatggaaaataccggcatcacgccaca

SEQ ID NO: 605826 - DNA, 75 bp, synthetic construct
  source 1..75: mol_type = other DNA
tgatagatttcgatgccagaacgactattccattcgaaggtgaacgccataacgccctgcacgatgcgcgttacc

SEQ ID NO: 605827 - DNA, 75 bp, synthetic construct
  source 1..75: mol_type = other DNA
tagtaggatttattatactttttgcgattttttacattgctattagtgacagggattctacgctttctaggttga

SEQ ID NO: 605828 - DNA, 75 bp, synthetic construct
  source 1..75: mol_type = other DNA
agaacgcgaagcaatggacgttgtgttacaggcgctggacggggagcacatgtcatgaatatcagcacagagacc

SEQ ID NO: 605829 - DNA, 75 bp, synthetic construct
  source 1..75: mol_type = other DNA
atgaatatcagcacagaaacccgcgaaattctgcgcaattacaaagctgtgattaatgcgcggcgtcgtgaaatg

SEQ ID NO: 605830 - DNA, 75 bp, synthetic construct
  source 1..75: mol_type = other DNA
tctactttttcggcaaggaagaaggcggaaaatacaggcaccacgcaacaccggaacaacgcaatacagtgatcc

SEQ ID NO: 605831 - DNA, 75 bp, synthetic construct
  source 1..75: mol_type = other DNA
cctgatgatttttgcgctgatcctcactccggtgatcgtgattatcagcgtcggtggttttggtgactcgctgga

SEQ ID NO: 605832 - DNA, 75 bp, synthetic construct
  source 1..75: mol_type = other DNA
cctgatgatttttgctctgatcctgacgccggttatcgtgattattagcgtcggcgggtttggcgattcactgga

SEQ ID NO: 605833 - DNA, 75 bp, synthetic construct
  source 1..75: mol_type = other DNA
ttctggcggcagtgatgtcaaccttaagctgccagttgctggtgtgctccagcgcgattactgaagatctgtata

SEQ ID NO: 605834 - DNA, 75 bp, synthetic construct
  source 1..75: mol_type = other DNA
aatataataggcgctcctggagcaaaaaacatactatcatttagtcaattatcaaaaaattttgatgtttttgtc

SEQ ID NO: 605835 - DNA, 75 bp, synthetic construct
  source 1..75: mol_type = other DNA
agtaattagaatggcctgggatgattttcaagaggttgcaagggaaaattatcctttggctgaaataatgaataa

SEQ ID NO: 605836 - DNA, 75 bp, synthetic construct
  source 1..75: mol_type = other DNA
tcgaacaacgtcaggacaacaaaattatccgtccttccgccaattacgttggaccggaagaccgccagtttgtcg

SEQ ID NO: 605837 - DNA, 75 bp, synthetic construct
  source 1..75: mol_type = other DNA
ccaaacgaaaaaacctggaaatctcacctggtaacctgtgccgctatgtacgctgcaatcccattaagctggctg

SEQ ID NO: 605838 - DNA, 75 bp, synthetic construct
  source 1..75: mol_type = other DNA
agattgttgatgaaatctgcgattttgtggcgaatcagcaggctgttttcctaggcggtcactacatccttcagg

SEQ ID NO: 605839 - DNA, 75 bp, synthetic construct
  source 1..75: mol_type = other DNA
tcgtgatggcgatttcgctgctggtgctgtttatgctgctgggtattcagcttggcttctggtcgctgctgttct

SEQ ID NO: 605840 - DNA, 75 bp, synthetic construct
  source 1..75: mol_type = other DNA
ctggacgagatccgcgctctacctgcagtacagaaagctaacgcggttgtttctatgtacaactacgaccgcccg

SEQ ID NO: 605841 - DNA, 75 bp, synthetic construct
  source 1..75: mol_type = other DNA
gtcacgttgattttgcgccgaatagtgaagaagaggccattatcctcgaaatactgcgtgcggaaattggtcatg

SEQ ID NO: 605842 - DNA, 75 bp, synthetic construct
  source 1..75: mol_type = other DNA
aaattctgcgtaattacagggccgtgattaatgcgcggcgtcgtgaaatggggcagaaactgtcaacgacggatg

SEQ ID NO: 605843 - DNA, 75 bp, synthetic construct
  source 1..75: mol_type = other DNA
gattaatgcacgacgtcgtgagatggggcagaaaccgcttaccaccgcgcagattgttgatgaaatctgcgattt

SEQ ID NO: 605844 - DNA, 75 bp, synthetic construct
  source 1..75: mol_type = other DNA
accgactgccagatataccgtggtcagcgcggtcgtatggaaattcgtattgatgttcagggtgttagctgccac

SEQ ID NO: 605845 - DNA, 75 bp, synthetic construct
  source 1..75: mol_type = other DNA
cgttgcgctgtcgcagacagttgcgcagtttctattgaccgtcgtctgacctggggcgaaacatgggaaggtgca

SEQ ID NO: 605846 - DNA, 75 bp, synthetic construct
  source 1..75: mol_type = other DNA
acatcgtattaaagaagagatggaaaaagtcggcttcgataaagttgaaatcgacccgatgggcaacgttctcgg

SEQ ID NO: 605847 - DNA, 75 bp, synthetic construct
  source 1..75: mol_type = other DNA
atggaaactgatgagctgatcggtggtcgcggtacttccgaccaggaaggcggcatggcatctatggtttatgcc

SEQ ID NO: 605848 - DNA, 75 bp, synthetic construct
  source 1..75: mol_type = other DNA
ggacgctcatatcgataccgtcggcattggcaacatcaaaaactgggacttcgatccgtacgaaggcatggaaac

SEQ ID NO: 605849 - DNA, 75 bp, synthetic construct
  source 1..75: mol_type = other DNA
cggcatggcgtctatggtatatgccggaaaaatcattaaagatctcggtctggaagatgaatataccctgctggt

SEQ ID NO: 605850 - DNA, 75 bp, synthetic construct
  source 1..75: mol_type = other DNA
cgcattatctccgcgctggtaattttgctgttcttcaccatttattgtgcttcgggcattgtggctggcgcgcgt

SEQ ID NO: 605851 - DNA, 75 bp, synthetic construct
  source 1..75: mol_type = other DNA
gcccatcgtgtgggtatgggtggcttcagtgctctgcgtcaggtgcgtgaaggggcggaatataaatacgtcacc

SEQ ID NO: 605852 - DNA, 75 bp, synthetic construct
  source 1..75: mol_type = other DNA
gagatggggcgcgagtccacgccatccaataaaaataccccggctcatatttatgccggtaacggtaattttgtg

SEQ ID NO: 605853 - DNA, 75 bp, synthetic construct
  source 1..75: mol_type = other DNA
acgacgtgaagcgcggtttgcgaaacggcgttgccccttacatcccggcgtctttttgccgggatgccgggagcg

SEQ ID NO: 605854 - DNA, 75 bp, synthetic construct
  source 1..75: mol_type = other DNA
ttggtgacctggtttacaaggtgctgacggataacccgaaactgtccgacggtaaggcgctgttccatgccgatc

SEQ ID NO: 605855 - DNA, 75 bp, synthetic construct
  source 1..75: mol_type = other DNA
ccgttatgcgcagggaaaactgaaaaaggcacgtttctttacctctgtttcatctgcaggattttcgattagtgg

SEQ ID NO: 605856 - DNA, 75 bp, synthetic construct
  source 1..75: mol_type = other DNA
cagtatcacccgtcaggccattatcaatgatgatctgaatatgctgaccgatgtcccgatgaaactgggccgtgc

SEQ ID NO: 605857 - DNA, 75 bp, synthetic construct
  source 1..75: mol_type = other DNA
catggaagacgctgattttcgttccattacccgccaactgatgattaatgaacaagcccgaacacttaatccaga

SEQ ID NO: 605858 - DNA, 75 bp, synthetic construct
  source 1..75: mol_type = other DNA
gatctacaaaacccggatgcgcctcagtcggctattggcttgatcgtctgtgctttgcaacaacgtaaagcggca

SEQ ID NO: 605859 - DNA, 75 bp, synthetic construct
  source 1..75: mol_type = other DNA
agatcaacctgtttggtgatgctcaactgatcgaaaacttaaatgcgcaaaatgggctgttttcggttgtggaaa

SEQ ID NO: 605860 - DNA, 75 bp, synthetic construct
  source 1..75: mol_type = other DNA
caattaatcagccagcaaaactggtttggcaaatatcagcccgtcgccgcgccggtaaaacaacccgaacctgcg

SEQ ID NO: 605861 - DNA, 75 bp, synthetic construct
  source 1..75: mol_type = other DNA
atgctgcttattatttctgcaaaaatggcgcattcactctggcgctatttctccttttctgcggaatatacggct

SEQ ID NO: 605862 - DNA, 75 bp, synthetic construct
  source 1..75: mol_type = other DNA
tatctcgtttccaggcacgatggtcgaccgcattgttccggcaatgactgcatcgcaattcgccttactggaaac

SEQ ID NO: 605863 - DNA, 75 bp, synthetic construct
  source 1..75: mol_type = other DNA
tttatatttatgacgagattggtttctggggagttaccgcgaagcagtttgtcagcgaactgaatgcactgggtg

SEQ ID NO: 605864 - DNA, 75 bp, synthetic construct
  source 1..75: mol_type = other DNA
gtgcggcgtttggtccggtggtgctgttctcggtgatgtggtcacgcatgacgcgcaacggtgcgctggcgggga

SEQ ID NO: 605865 - DNA, 75 bp, synthetic construct
  source 1..75: mol_type = other DNA
cgtgtatgtggatggtgttgccgcctcgatggcatccgtgattgcgatggccggtgatacggttattatgccgga

SEQ ID NO: 605866 - DNA, 75 bp, synthetic construct
  source 1..75: mol_type = other DNA
accatcaaatcggccagtgtgaaaggggcggatgcaaacgccggtgtcattaaccccatccagaactttgctgag

SEQ ID NO: 605867 - DNA, 75 bp, synthetic construct
  source 1..75: mol_type = other DNA
gcgttggctggtgcggtaaatcagaacgccgagcgtgtgtttatcgaactggcgcaaattctgtttaacccgtgg

SEQ ID NO: 605868 - DNA, 75 bp, synthetic construct
  source 1..75: mol_type = other DNA
ttctggcggcggtgatgtcaaccttaagttgccagttgctggtatgttccagtgcaattaccgaagatttataca

SEQ ID NO: 605869 - DNA, 75 bp, synthetic construct
  source 1..75: mol_type = other DNA
tggcggcggattctcaccacagcatcgtccatgcgcgtcgtatcagtatgacctggatgatcctctgcctggcag

SEQ ID NO: 605870 - DNA, 75 bp, synthetic construct
  source 1..75: mol_type = other DNA
ttgtgtcttttctgatttataacatttttcaggaactgcaactctccagcaaactggcagttcatgatgtgctga

SEQ ID NO: 605871 - DNA, 75 bp, synthetic construct
  source 1..75: mol_type = other DNA
ccatcaaacctctggcattcactcaagctgaaccaggaaaaatgatggagcatagtgatacttgggtgatgagaa

SEQ ID NO: 605872 - DNA, 75 bp, synthetic construct
  source 1..75: mol_type = other DNA
gctaaaacgaagtatcgatagaatagatggattgaagaacgtcttcaaacaagcaaccattgatgggtatttcgc

SEQ ID NO: 605873 - DNA, 75 bp, synthetic construct
  source 1..75: mol_type = other DNA
accggcccatatttatgccggaaacggcaattttgtgggagacgggatccgccaggcgatgctggcccgtgccgg

SEQ ID NO: 605874 - DNA, 75 bp, synthetic construct
  source 1..75: mol_type = other DNA
ggcggcggcacaggggaccgacaccattgaagttgcctggctggatggtgtggacacgccctacattgaccagca

SEQ ID NO: 605875 - DNA, 75 bp, synthetic construct
  source 1..75: mol_type = other DNA
gctgtgttttttccacgggtgatacgcgtaatatctcgcttgtcatgacagaagcagataaagcgttacgtgagg

SEQ ID NO: 605876 - DNA, 75 bp, synthetic construct
  source 1..75: mol_type = other DNA
gttgccgcaaaagagctgggtagaagctatataggctttgaacttaacccagcatatgtagaaataagcaaaaaa

SEQ ID NO: 605877 - DNA, 75 bp, synthetic construct
  source 1..75: mol_type = other DNA
ctcgtcgatgttgcaggatatccgcgcgctgcgccacaccgaaatcgactatatcaatggttttctcttacgccg

SEQ ID NO: 605878 - DNA, 75 bp, synthetic construct
  source 1..75: mol_type = other DNA
ggcaccattgaagagttacagaacatcgggcaaccgttactgatgggcacgaccacccatgcagcgcgccgcgac

SEQ ID NO: 605879 - DNA, 75 bp, synthetic construct
  source 1..75: mol_type = other DNA
ggtacgccatggattcagtccgttctgggtaagcaaaggccggatacctacaacctcgctatccgtaagcggatc

SEQ ID NO: 605880 - DNA, 75 bp, synthetic construct
  source 1..75: mol_type = other DNA
cgatgatacgtggctggttaactccccagaggctgtcgcgcaggccataaaaacgcgatttctgctttggtacgg

SEQ ID NO: 605881 - DNA, 75 bp, synthetic construct
  source 1..75: mol_type = other DNA
agttataagaagatggggatttttcagcgcggttctgcgcccgaatcaataccctatcgtgaataccattttccc

SEQ ID NO: 605882 - DNA, 75 bp, synthetic construct
  source 1..75: mol_type = other DNA
tgcagatagccacaatgccaacctgcttgcacttgaaaatacggtgtcagcggcttcgggactgggaatacagct

SEQ ID NO: 605883 - DNA, 75 bp, synthetic construct
  source 1..75: mol_type = other DNA
ttgatcttaaggcaaagtgtatatatatccatcgattaaaaaaaggcttttcaacaacgcatccgctattgaaca

SEQ ID NO: 605884 - DNA, 75 bp, synthetic construct
  source 1..75: mol_type = other DNA
gccacggcattaataacgcttcttgagcctgtaataatggaactgcaagaaatagatctattgcacgacagataa

SEQ ID NO: 605885 - DNA, 75 bp, synthetic construct
  source 1..75: mol_type = other DNA
cattgtgaagatccctggtaagagcgatgaaaacgcgcaaccttttttacatacgttaattgcccagacggataa

SEQ ID NO: 605886 - DNA, 75 bp, synthetic construct
  source 1..75: mol_type = other DNA
atggtgactgagcaaataaactcattacgccaggaacgggaagcggctgtgataggcggcctcctgttgggcggg

SEQ ID NO: 605887 - DNA, 75 bp, synthetic construct
  source 1..75: mol_type = other DNA
ggcccgcgcggcgtcagcttgcatccagtcaatgcaacaacgtcctgcggcaagccgattctcaccacgaaataa

SEQ ID NO: 605888 - DNA, 75 bp, synthetic construct
  source 1..75: mol_type = other DNA
cttgaagtcgtcaaagagacgatgaaagattttgattcccggtattcaaaattaaaggcaactaaagacaagatc

SEQ ID NO: 605889 - DNA, 75 bp, synthetic construct
  source 1..75: mol_type = other DNA
gcataggatttactattgatgaaatagcttattttagaaatacaacgccgggaacagttcagggggcagttattt

SEQ ID NO: 605890 - DNA, 75 bp, synthetic construct
  source 1..75: mol_type = other DNA
tgcaggagaaaactggtggcgctcacgctgcggtggtaacagcggtagctaaagctgcgtttaactcggcagttg

SEQ ID NO: 605891 - DNA, 75 bp, synthetic construct
  source 1..75: mol_type = other DNA
tgcaggagaaaaccggtggcgctcacgctgcggtggtaacagcagttgctaaagctgcgtttaactcggcagttg

SEQ ID NO: 605892 - DNA, 75 bp, synthetic construct
  source 1..75: mol_type = other DNA
atgcgtgatatttaccacgaaacaacaaaacgcgtatttcttgcactttctcacagtgaaaacatgctggaaata

SEQ ID NO: 605893 - DNA, 75 bp, synthetic construct
  source 1..75: mol_type = other DNA
tagaccgcgcatttcttgcactttctcacagtgaaagcatgatggaaatattacgcatatggcttgaaacacttg

SEQ ID NO: 605894 - DNA, 75 bp, synthetic construct
  source 1..75: mol_type = other DNA
aaaagcgatgagaacgcacagccttttttacatgcgctaattgcgcagacggataaaacggtgcctgcgcaataa

SEQ ID NO: 605895 - DNA, 75 bp, synthetic construct
  source 1..75: mol_type = other DNA
ggtgcaaccaaaaaagacttcgacaataccgtcgccattcacccaacggcggcagaagagttcgtgaccatgcgt

SEQ ID NO: 605896 - DNA, 75 bp, synthetic construct
  source 1..75: mol_type = other DNA
gcagccggcggcagtcaggcggcattaacggtggtggcggattatggcgggcaaccggcagcacctttttatgac

SEQ ID NO: 605897 - DNA, 75 bp, synthetic construct
  source 1..75: mol_type = other DNA
taccaaaagtgatagcgacgccagccgagtttgctaagtgggaagggtattcccgtggttctgtttatcagatga

SEQ ID NO: 605898 - DNA, 75 bp, synthetic construct
  source 1..75: mol_type = other DNA
atgagcaacgacatttcaattcgtgtaccaaaagtgatggcgacaccagctgagttcgcggaatgggaaggccgc

SEQ ID NO: 605899 - DNA, 75 bp, synthetic construct
  source 1..75: mol_type = other DNA
tgatattccggtatatctcattgttcatgacaatcctggtcttcttggttcgggagcgcatttacgccagacact

SEQ ID NO: 605900 - DNA, 75 bp, synthetic construct
  source 1..75: mol_type = other DNA
cccggatccggaaatcgtggaaatcgcctgcggtcgctcatcagccccaatgccgcagcgcggaacagcagaaga

SEQ ID NO: 605901 - DNA, 75 bp, synthetic construct
  source 1..75: mol_type = other DNA
tcccgcggctctgtttaccaaaaaattcaccatggtcaacttgctaagtacatggtcaagaaagaaaaaacaaag

SEQ ID NO: 605902 - DNA, 75 bp, synthetic construct
  source 1..75: mol_type = other DNA
ttcagctaccgggcatcggtgcacttttccttgtgggggatgatgcgtattcccgcgagtggctgcagaaaaatg

SEQ ID NO: 605903 - DNA, 75 bp, synthetic construct
  source 1..75: mol_type = other DNA
tgtgcgcttttttgtggctggttgtcagtcacgctttggctgcggatagcacgattactatccgcggctatgtca

SEQ ID NO: 605904 - DNA, 75 bp, synthetic construct
  source 1..75: mol_type = other DNA
acgattactatccgcggctatgtcagagataacggctgtagtgtggccgctgaatcaaccaattttactgttgat

SEQ ID NO: 605905 - DNA, 75 bp, synthetic construct
  source 1..75: mol_type = other DNA
tgctgcaacgcctccggcatgacccggccattcagcgcgcactgcgaacactctatttccagcatcgcatcaaac

SEQ ID NO: 605906 - DNA, 75 bp, synthetic construct
  source 1..75: mol_type = other DNA
agatatgactggtgggcttatgtatcagctcgcccccgcaatatcgcatttaactatattgtgagggcggcgtga

SEQ ID NO: 605907 - DNA, 75 bp, synthetic construct
  source 1..75: mol_type = other DNA
gcctcttcccgttatccgaaacactggctgacggtaggggatcccgcccgtgaatttaccatgacgcagtccgcg

SEQ ID NO: 605908 - DNA, 75 bp, synthetic construct
  source 1..75: mol_type = other DNA
atgtaccgcacgcttccggcggcctttgatgacttctgcagtaccggtgtgacgttgtatcagggggaagtatga

SEQ ID NO: 605909 - DNA, 75 bp, synthetic construct
  source 1..75: mol_type = other DNA
tcccggtagaaatgaccaccgcgctttaccggcgggctattgcttcagcatggcggcagaaaatgctgaacgaaa

SEQ ID NO: 605910 - DNA, 75 bp, synthetic construct
  source 1..75: mol_type = other DNA
ccctgagtctgctgctgttctgtgcggcagcagaagcagaactgagcgtgattgctgacctgggcggcagggatg

SEQ ID NO: 605911 - DNA, 75 bp, synthetic construct
  source 1..75: mol_type = other DNA
ggtgactccaattgagtactttggtttgcatctttatccccgcgaatccgccgtggattatcaggatggcaatct

SEQ ID NO: 605912 - DNA, 75 bp, synthetic construct
  source 1..75: mol_type = other DNA
caagcccggacgcttgtcgccgactaccgtttcgtccgtcgcccgcgcaactatccgaagcgtgaacttccggcg

SEQ ID NO: 605913 - DNA, 75 bp, synthetic construct
  source 1..75: mol_type = other DNA
gccgagtcgttactggcagaactgcagaaggcagccatgcttttcagcgtcccgaccagcaaagggggaactcgc

SEQ ID NO: 605914 - DNA, 75 bp, synthetic construct
  source 1..75: mol_type = other DNA
gcgccgttatccggtgccaatgaagccatcagtaagtcactggattattttttacgggataaaatcccccgtaaa

SEQ ID NO: 605915 - DNA, 75 bp, synthetic construct
  source 1..75: mol_type = other DNA
ccgacggtgaggattttgactaccgtgaagccggactccgtgccggtaaagatatccacgacatcatcggagaac

SEQ ID NO: 605916 - DNA, 75 bp, synthetic construct
  source 1..75: mol_type = other DNA
acgggccagcaatgtggccaatattctgccggtggtggcggataaccaggtctgcctgcaggggctgcccatacc

SEQ ID NO: 605917 - DNA, 75 bp, synthetic construct
  source 1..75: mol_type = other DNA
aggacgaagtggcgctggaaacggagatggcggtgctgaacaccttccgccgtaacgggttgtcgatgtacatgc

SEQ ID NO: 605918 - DNA, 75 bp, synthetic construct
  source 1..75: mol_type = other DNA
ttgccgtatcgtcagtacgacccggacagcgagctgtttatcaatgcaaaaactgccggttttgtcctcgaatgc

SEQ ID NO: 605919 - DNA, 75 bp, synthetic construct
  source 1..75: mol_type = other DNA
aggcgcagcaaatcctggatgaaatggattatccctctttcgccagcctgctgccgtaccgtcagtatgatccgg

SEQ ID NO: 605920 - DNA, 75 bp, synthetic construct
  source 1..75: mol_type = other DNA
tacaaggtcggataagatgcggcatgaactgaaccccaaaacctggacagtttcagttaaccggctttttgatac

SEQ ID NO: 605921 - DNA, 75 bp, synthetic construct
  source 1..75: mol_type = other DNA
tgggcgcattaaccgcggtgatattcctcgctcgctttcactgccaccagttacggcgctatggcttgataaccg

SEQ ID NO: 605922 - DNA, 75 bp, synthetic construct
  source 1..75: mol_type = other DNA
cctcgctcgctttcattgccgccagctacggcgctttggcggtaatgactccaacttattgatagtgttttatgt

SEQ ID NO: 605923 - DNA, 75 bp, synthetic construct
  source 1..75: mol_type = other DNA
gtacaagggacactgcattatcgtctacggattgttccgggcggagagagctgattgagagtaagaaaatacgaa

SEQ ID NO: 605924 - DNA, 75 bp, synthetic construct
  source 1..75: mol_type = other DNA
ctgggcgtacgtttgcgttcagaaggtaaagattattacgcaatccgcgctgaagatggcaaattctacgatcgt

SEQ ID NO: 605925 - DNA, 75 bp, synthetic construct
  source 1..75: mol_type = other DNA
tgccgctaacggttttaaaatgaccagcgaaatgcagcaaggagagtgggttaacaatctgctgaaaggtaccgt

SEQ ID NO: 605926 - DNA, 75 bp, synthetic construct
  source 1..75: mol_type = other DNA
cgatggtcgggtgctggccaccggctcgccggcggaactgctcgagcgcaccggcagcgccaacctcgaagaagc

SEQ ID NO: 605927 - DNA, 75 bp, synthetic construct
  source 1..75: mol_type = other DNA
gataaaacccagaataggattttacggtaataaagagcgggtcagtcttgcgtcctatacatgggaggtactggc

SEQ ID NO: 605928 - DNA, 75 bp, synthetic construct
  source 1..75: mol_type = other DNA
ttcatttatttgctatgtcccgcgaagaacgggagctggcaaacctctggcttgaacaaaaataccctgattcag

SEQ ID NO: 605929 - DNA, 75 bp, synthetic construct
  source 1..75: mol_type = other DNA
cctgggtaaagaagttctcgaatcccgtctgccgggcatcctggaactctcccgtaccttcgctcacgtcgatcc

SEQ ID NO: 605930 - DNA, 75 bp, synthetic construct
  source 1..75: mol_type = other DNA
ggcaatcataactaaaattagcgtagaagagggaatacccataacattcagtgtccaaaccatgttttcagatac

SEQ ID NO: 605931 - DNA, 75 bp, synthetic construct
  source 1..75: mol_type = other DNA
actcaaaagttgtggttcaacttgtaagtcttattaataacattgaaacgataagttcgacaccacttacgcaac

SEQ ID NO: 605932 - DNA, 75 bp, synthetic construct
  source 1..75: mol_type = other DNA
ttgggatgaaaaaggaaactggcatggcctgtatgccatggcatttaaggactcgtggaacaaatgggaaccgat

SEQ ID NO: 605933 - DNA, 75 bp, synthetic construct
  source 1..75: mol_type = other DNA
ccgccggcgggccagaggcctccgccccgacgccagaggcgcaacagccatcgtcctccgcccacgagacgagcg

SEQ ID NO: 605934 - DNA, 75 bp, synthetic construct
  source 1..75: mol_type = other DNA
aggaaatggtccagcgcttcggtttgcaacaggtgctggacaaactgccggatgccatgccgctgggcatgcgcc

SEQ ID NO: 605935 - DNA, 75 bp, synthetic construct
  source 1..75: mol_type = other DNA
ggttttctcggctccaacggctgcggcaagtcgaccaccatgaagatgctcaccggactgttgccggccagcgag

SEQ ID NO: 605936 - DNA, 75 bp, synthetic construct
  source 1..75: mol_type = other DNA
cctgggtaaagaagttctcgaatcccgtctgccgggtatcctggaactctcccgtaccttcgctcacgttgatcc

SEQ ID NO: 605937 - DNA, 75 bp, synthetic construct
  source 1..75: mol_type = other DNA
cgattgaatatatgtgtaaaaccgggccggaagcgattctggaactggaacacatgggcctgccgttctcgcgcc

SEQ ID NO: 605938 - DNA, 75 bp, synthetic construct
  source 1..75: mol_type = other DNA
catggagatgttctggggaatgttatcaaaggtaacgtaaccataggaacaggtggaataatgaacaaaaatacc

SEQ ID NO: 605939 - DNA, 75 bp, synthetic construct
  source 1..75: mol_type = other DNA
tcctggtctgctgcgtggcgctggcgataagcgcgatgtatgaattaatcgagtggtgggcggcgctggcaatgg

SEQ ID NO: 605940 - DNA, 75 bp, synthetic construct
  source 1..75: mol_type = other DNA
taaaaaagacgtgcaattaatcagccagcaaaactggtttggcaaatatcagcctgtcgccgagccggtaaaaca

SEQ ID NO: 605941 - DNA, 75 bp, synthetic construct
  source 1..75: mol_type = other DNA
caacgcagtgattgaggaaatcaatcgcgaccatgtgatgctgcgctatcagggaaaaatagagcgcctgagcct

SEQ ID NO: 605942 - DNA, 75 bp, synthetic construct
  source 1..75: mol_type = other DNA
tgcactcgcagaaccagtattaaagattaggcatgagcagattgcacatatgaagcccggcacactcagtagctt

SEQ ID NO: 605943 - DNA, 75 bp, synthetic construct
  source 1..75: mol_type = other DNA
tccgaaattctcaaaaaaatagtcattgggcagccagatttcccgtggccgaatatcgcgctgcttgatacccca

SEQ ID NO: 605944 - DNA, 75 bp, synthetic construct
  source 1..75: mol_type = other DNA
tctcggtgatccgcgtcgtacacgacgccttgtgtcactggcctcttctctcgctcagcatgcaggtctttctat

SEQ ID NO: 605945 - DNA, 75 bp, synthetic construct
  source 1..75: mol_type = other DNA
tcggtgatccgcgtcgtacacgacgccttgtgtcactggcctcttctctcgctcagcatgcaggtctttctattg

SEQ ID NO: 605946 - DNA, 75 bp, synthetic construct
  source 1..75: mol_type = other DNA
taggatctcctcagaatgcggaaagcattcatgtcatcacgacaaattacgataccctgctagagctcttttgcg

SEQ ID NO: 605947 - DNA, 75 bp, synthetic construct
  source 1..75: mol_type = other DNA
atttttttgcaaatatacaaggggttttccgcaaaacacctgttttacttattgggtcgggattctcatgtggtt

SEQ ID NO: 605948 - DNA, 75 bp, synthetic construct
  source 1..75: mol_type = other DNA
tgccaaatatgatctcatctaacagcacaatacttgtattgttgggagtccttctcgcgctcatttacccggctg

SEQ ID NO: 605949 - DNA, 75 bp, synthetic construct
  source 1..75: mol_type = other DNA
gcgctgaaaattgctgagcagcataatatttcgcgcagtgcgacagatgtgcctgccgaggaattacctgattca

SEQ ID NO: 605950 - DNA, 75 bp, synthetic construct
  source 1..75: mol_type = other DNA
attggaaattaattgtcactgctattattggatttttaagtttttgtatttttttatcaattacactgttaatgc

SEQ ID NO: 605951 - DNA, 75 bp, synthetic construct
  source 1..75: mol_type = other DNA
attaaacacctaaaaattgatccagacaatattgtattgtatagcaaagatggtctatcaaacatccaaagaatc

SEQ ID NO: 605952 - DNA, 75 bp, synthetic construct
  source 1..75: mol_type = other DNA
tggtagtattaaacaaagcagatgggaaaaccacagacgatctacacagcatcatcaatacatttaaagaccaac

SEQ ID NO: 605953 - DNA, 75 bp, synthetic construct
  source 1..75: mol_type = other DNA
atgttgggtggagcggacaatccaaatggtgaattaccgtcttatatcactggcgctgacaccggaaaaccgttg

SEQ ID NO: 605954 - DNA, 75 bp, synthetic construct
  source 1..75: mol_type = other DNA
gtaccgcatcacccaagacgacctggatgacctcactgacacaatcgaatatctcatggcaactaaccagttgga

SEQ ID NO: 605955 - DNA, 75 bp, synthetic construct
  source 1..75: mol_type = other DNA
acgacgttagacattgctctaacgctttatctgtagatcccaccgaaaccgacgctgctcgcgccattgctgaac

SEQ ID NO: 605956 - DNA, 75 bp, synthetic construct
  source 1..75: mol_type = other DNA
cctcactcgtcttcactgccgccagttacggcgctatggcttaatcaccagagcgccagaagtgttcaatcttta

SEQ ID NO: 605957 - DNA, 75 bp, synthetic construct
  source 1..75: mol_type = other DNA
cgacgccgccgctggattctccggaagctactgccagatggatgaacgaaattattgagcaatgtattctgatgg

SEQ ID NO: 605958 - DNA, 75 bp, synthetic construct
  source 1..75: mol_type = other DNA
attattgagcaatgtattctgatggctcctgagcagtatatgtggctgcatcgccgatttaagacccgtccggaa

SEQ ID NO: 605959 - DNA, 75 bp, synthetic construct
  source 1..75: mol_type = other DNA
ctgatatggcgcgagttctaccgccatttgatgacgtattatccttcgctgtgtaaacaccgcccgtttattgcc

SEQ ID NO: 605960 - DNA, 75 bp, synthetic construct
  source 1..75: mol_type = other DNA
gtcttcaagtatgtgcgcaaaaatcatgtcaaaactaccgtacactggaaacgccactggcaacgggcgcggatg

SEQ ID NO: 605961 - DNA, 75 bp, synthetic construct
  source 1..75: mol_type = other DNA
atcggcatggagctataagattcgccaacgctggcaactactgaaaaacgatctcggcgatctggagttgtttgg

SEQ ID NO: 605962 - DNA, 75 bp, synthetic construct
  source 1..75: mol_type = other DNA
agaaatttgatcatgagggcgagtttatccgccagtggctaccggaactgcgcgatgtgccagggaaagtggtgc

SEQ ID NO: 605963 - DNA, 75 bp, synthetic construct
  source 1..75: mol_type = other DNA
tgcagcgccgtattttcgtattttcaacccgacaacccagggcgagaaatttgaccgtgagggcgagtttattcg

SEQ ID NO: 605964 - DNA, 75 bp, synthetic construct
  source 1..75: mol_type = other DNA
ttaacagcactggctggatgcataaccggctacggatgattacagccagttttctggtgaaagatttgttgatcg

SEQ ID NO: 605965 - DNA, 75 bp, synthetic construct
  source 1..75: mol_type = other DNA
gctgctggttatctggaaccattcgagtttggcggagagcacaagctcaatagccaggctctattaaatcccaag

SEQ ID NO: 605966 - DNA, 75 bp, synthetic construct
  source 1..75: mol_type = other DNA
accagttaaagcaactgcaaaagcaaatcccgtttgccacagctcaggcgatgacaaaagttgtacgccagattg

SEQ ID NO: 605967 - DNA, 75 bp, synthetic construct
  source 1..75: mol_type = other DNA
ccatacgtgggcagctctccgataacatggtgtatacggagaagcacatccgtatcatcagtgtgacgactgcgg

SEQ ID NO: 605968 - DNA, 75 bp, synthetic construct
  source 1..75: mol_type = other DNA
tctttaagcctgataatgctggggccattggctcatgcagaagagattggttcggtcgacaccgtatttaaaatg

SEQ ID NO: 605969 - DNA, 75 bp, synthetic construct
  source 1..75: mol_type = other DNA
acgcattaaaaaaggcaaagcccagggcgaagtggtattcaagaaacgtacatcgctggtctttaagtcgttaca

SEQ ID NO: 605970 - DNA, 75 bp, synthetic construct
  source 1..75: mol_type = other DNA
ctttaagcctgataatgctggggccgttggcacatgcggaagaaattggttcggttgataccgtatttaaaatga

SEQ ID NO: 605971 - DNA, 75 bp, synthetic construct
  source 1..75: mol_type = other DNA
gtgtgcgccagtgccgaacactgttgttttcccactctcctttttcgatccgacgaccagaatggactgagatac

SEQ ID NO: 605972 - DNA, 75 bp, synthetic construct
  source 1..75: mol_type = other DNA
tgggtgtgctgatggataagttcaatcctttccgcgtactggcgctgagctatgccataggcgctatatgcatcg

SEQ ID NO: 605973 - DNA, 75 bp, synthetic construct
  source 1..75: mol_type = other DNA
ctgcaatgcttcgcaatatggcgcaaaatgaccaacagcggttgattgatcaggtagaggggcgctgtacgaggt

SEQ ID NO: 605974 - DNA, 75 bp, synthetic construct
  source 1..75: mol_type = other DNA
aacgctatttcacttgaagttaatatttccgcattggcgattgcagaggctaaagggaaaattaaaaataacgaa

SEQ ID NO: 605975 - DNA, 75 bp, synthetic construct
  source 1..75: mol_type = other DNA
cctgtagccgttatcgagatgaaagactatggcaccatgaacggacaggcagttcttgaatttgcgatgaaacta

SEQ ID NO: 605976 - DNA, 75 bp, synthetic construct
  source 1..75: mol_type = other DNA
gactggcatggcatggttctggccggaccgtcgggttgcccgttggacagaagtgatcggcatggaacatatccg

SEQ ID NO: 605977 - DNA, 75 bp, synthetic construct
  source 1..75: mol_type = other DNA
ggcgttgccccttacatcccggcggccttttgccgggatgccaggagcgcaggccacggcgcgacagaggcggcg

SEQ ID NO: 605978 - DNA, 75 bp, synthetic construct
  source 1..75: mol_type = other DNA
gtatcagcccccggcgacagggactcatacgggtgtatggcacccggcaggcaatgagcagggacccgccgcaac

SEQ ID NO: 605979 - DNA, 75 bp, synthetic construct
  source 1..75: mol_type = other DNA
gcgcgggctgacaccagtgaacccggacgatataatcagcttctccaaaagcaagtgagcggatacattcgggac

SEQ ID NO: 605980 - DNA, 75 bp, synthetic construct
  source 1..75: mol_type = other DNA
caagctttcttgcgttatctggaaattgacccactctctgccgacaaaacgcaactgcgggaagtggcagcgaaa

SEQ ID NO: 605981 - DNA, 75 bp, synthetic construct
  source 1..75: mol_type = other DNA
ttgacccgctctctgccgataaaacacagttgcgggaagccgcggcgaaactggatttgagcaatgttgccgata

SEQ ID NO: 605982 - DNA, 75 bp, synthetic construct
  source 1..75: mol_type = other DNA
ttgttccctccggtattaaccatcacctgtttgagaaccttcgccgcaaggggcatcactgccacggcctgacgc

SEQ ID NO: 605983 - DNA, 75 bp, synthetic construct
  source 1..75: mol_type = other DNA
ttatcaggcgctggcgcacaacatggcatcgcgtctcatgaagacggagctgagtgtggtgcttgaacaggcttt

SEQ ID NO: 605984 - DNA, 75 bp, synthetic construct
  source 1..75: mol_type = other DNA
ttttcgtgccgctgtttgctgttgagcaggcggcgaccaccagtggcacctggatgctggcgaaaatgtctggtg

SEQ ID NO: 605985 - DNA, 75 bp, synthetic construct
  source 1..75: mol_type = other DNA
atttggtatgcaggaaccgggtatcggcgtctatcgcccaaacgataatccgttgctcgactggctgcaaacctg

SEQ ID NO: 605986 - DNA, 75 bp, synthetic construct
  source 1..75: mol_type = other DNA
cggctgtacgctgccggaaaaagaggggcacaccgtctcaggcgcgcgggatattgctgacaaattattggcgtc

SEQ ID NO: 605987 - DNA, 75 bp, synthetic construct
  source 1..75: mol_type = other DNA
acttagctcgattcttctctattggtatcactatagccacaacggcgaacgcatccagccggaaaccgatgatga

SEQ ID NO: 605988 - DNA, 75 bp, synthetic construct
  source 1..75: mol_type = other DNA
ggcagctaaagcagctgcagaagcaaatccctttcgccacggcgcaagccatgacatcggtagtaagggatatcg

SEQ ID NO: 605989 - DNA, 75 bp, synthetic construct
  source 1..75: mol_type = other DNA
tttctttgacaagaatacacgcacaactcgcggcacaatccgcgttacagatatcaatggtaatattgcacaggc

SEQ ID NO: 605990 - DNA, 75 bp, synthetic construct
  source 1..75: mol_type = other DNA
gataaagatctcgccgctgcgttgctcgccgagcagattaatgccgatggactggtgatcctcaccgatgctgat

SEQ ID NO: 605991 - DNA, 75 bp, synthetic construct
  source 1..75: mol_type = other DNA
tggttatgtcagaagccgtggtaaacccgcgtggattggggcgttatcgcgaattgaagagacgctggcgggcga

SEQ ID NO: 605992 - DNA, 75 bp, synthetic construct
  source 1..75: mol_type = other DNA
caacgctgtatcaagattgtctaccaccgtggcgacggtggtgataaagagatccgccgtgagttaaagtactat

SEQ ID NO: 605993 - DNA, 75 bp, synthetic construct
  source 1..75: mol_type = other DNA
aaaacatagatgatatgacactcactatggatattagggatgaaccgcctacagacgacgacaaccgccttgttg

SEQ ID NO: 605994 - DNA, 75 bp, synthetic construct
  source 1..75: mol_type = other DNA
tcgctcaccgtggaagctttgaaagcttcgcccaggcggtgcgtgacatcgctcgtaatgctatgccgggcaaag

SEQ ID NO: 605995 - DNA, 75 bp, synthetic construct
  source 1..75: mol_type = other DNA
cacgtcaggaacgggactggcctgactatcggtgtcggaatggggccaaccaaaacgctagcaaagtcagcacag

SEQ ID NO: 605996 - DNA, 75 bp, synthetic construct
  source 1..75: mol_type = other DNA
tgatgaacagaacttattctgtactattacttttcaacacgttatcgatgaaaacaaaacatatatatgccagta

SEQ ID NO: 605997 - DNA, 75 bp, synthetic construct
  source 1..75: mol_type = other DNA
atggcaaaagcaccacgtaaaaccgctgaatttgttgatacggctggcaatgaaattgacaccgtaaacccgaac

SEQ ID NO: 605998 - DNA, 75 bp, synthetic construct
  source 1..75: mol_type = other DNA
ttactgtggataatcaatatattgtgtctcagacagctgctttttctaccatatgttgtgtccctgatatcccct

SEQ ID NO: 605999 - DNA, 75 bp, synthetic construct
  source 1..75: mol_type = other DNA
aacccgcgttatcggttgccctgaagaaagacgcacaactcagtgagaacaagaaactctccctcacctcgcgcg

SEQ ID NO: 606000 - DNA, 75 bp, synthetic construct
  source 1..75: mol_type = other DNA
gtcgccggttaaaagactggagtggaataccgcgctatcacggtaccgttgagacggattgcggaaccggttatg

SEQ ID NO: 606001 - DNA, 75 bp, synthetic construct
  source 1..75: mol_type = other DNA
tccgggttatgctgaagaaacttttgatacacactttatgatcggcggcatgagaggagaaaaagtttccgaata

SEQ ID NO: 606002 - DNA, 75 bp, synthetic construct
  source 1..75: mol_type = other DNA
tcccgcctgtcgcgcaactggcgggcgtgagccagcattatggaaaaaccgttgcgctgaacaatatcacactcg

SEQ ID NO: 606003 - DNA, 75 bp, synthetic construct
  source 1..75: mol_type = other DNA
gctgattatttacctgctctcaagctggatgccaacgctgctcaaccatcgcggcatcgacctgcaacatgcctc

SEQ ID NO: 606004 - DNA, 75 bp, synthetic construct
  source 1..75: mol_type = other DNA
tgaaggaatcattgaacgcaatttttttgtattttatcctcaaatcaatatagtaggttggcactacaatcatgt

SEQ ID NO: 606005 - DNA, 75 bp, synthetic construct
  source 1..75: mol_type = other DNA
gtattgagtttcatcagctatcgtttaaggccacagatcagctggcaaatctcggagatgcttttcaatctgtaa

SEQ ID NO: 606006 - DNA, 75 bp, synthetic construct
  source 1..75: mol_type = other DNA
atcctgcaacagtatatataggtccttttataaaaaaaatatctataaaggatgagccacaattcgcaacgtatt

SEQ ID NO: 606007 - DNA, 75 bp, synthetic construct
  source 1..75: mol_type = other DNA
tatcccctgtgtttctggatgataatattggcctcgcggctgctcaaaatttagctatttcaaaaataatcgata

SEQ ID NO: 606008 - DNA, 75 bp, synthetic construct
  source 1..75: mol_type = other DNA
taccgcaggcggtgattgcgaaaaccgtcagcgccatcacccgcgagcgttatgtcgatacccatttttatctca

SEQ ID NO: 606009 - DNA, 75 bp, synthetic construct
  source 1..75: mol_type = other DNA
gcgtggacgctcaatctctccggttcccgttactttatcgaacagccgccgctcaccagttatgacgagcttgat

SEQ ID NO: 606010 - DNA, 75 bp, synthetic construct
  source 1..75: mol_type = other DNA
atgatgatcccgtcaatgctaagcgcccttagcgtggtgcgggaaaaagagctagggtcgattatcaacctttac

SEQ ID NO: 606011 - DNA, 75 bp, synthetic construct
  source 1..75: mol_type = other DNA
cggatgcgtgcgggcgatatcacggtggcaattgagatccctcccaatttcgggcgcgatatcgcgcgtggtacg

SEQ ID NO: 606012 - DNA, 75 bp, synthetic construct
  source 1..75: mol_type = other DNA
ctgactggctggaagaactgacggtatattgtgtgatggagctggctgcaggatattatggagcctccaaccgct

SEQ ID NO: 606013 - DNA, 75 bp, synthetic construct
  source 1..75: mol_type = other DNA
gtccgcacgctgcgccagtgggggcacaaacgttaccggaaaggccgcgccatcatcgggcgcgaccctgaccgt

SEQ ID NO: 606014 - DNA, 75 bp, synthetic construct
  source 1..75: mol_type = other DNA
tgtagagaataaccgtttctctttgctggaaaaattaactcaggatgtgctcgatatcgcacgtgaacatcactg

SEQ ID NO: 606015 - DNA, 75 bp, synthetic construct
  source 1..75: mol_type = other DNA
ttatcacatcgatcgcggctacgaacgcattgaagacaaattgcgtgcattaggtgcgaatatcgagcgtgtgaa

SEQ ID NO: 606016 - DNA, 75 bp, synthetic construct
  source 1..75: mol_type = other DNA
agttcacgctgctgaacctggtggcggaaggtaccggattcatcaccgaaacggtctttgaaaaccgtttcatgc

SEQ ID NO: 606017 - DNA, 75 bp, synthetic construct
  source 1..75: mol_type = other DNA
ttatgcgaggcgattggcacactcgaattgctgaagcagtcactgattgaaagcgcgaaagagtcctcagcctga

SEQ ID NO: 606018 - DNA, 75 bp, synthetic construct
  source 1..75: mol_type = other DNA
cttctcacccaggtgaagtttgcccggctaaatggaaagaaggtgaagcaactctggctccgtccctggacctgg

SEQ ID NO: 606019 - DNA, 75 bp, synthetic construct
  source 1..75: mol_type = other DNA
ttaatttttttagtttgttccgccggggacagcactactcaaagacgtggccgatggaaaaacgccttgccccgg

SEQ ID NO: 606020 - DNA, 75 bp, synthetic construct
  source 1..75: mol_type = other DNA
ttatcacatcgatcgcggctacgaacgcattgaagacaaactgcgtgccttaggtgcgaacatcgagcgtgtgaa

SEQ ID NO: 606021 - DNA, 75 bp, synthetic construct
  source 1..75: mol_type = other DNA
ggtagcggatactacccgcacgatgacggtgatttctgaacaagtgattaaagatcagggtgcaaccaaccttac

SEQ ID NO: 606022 - DNA, 75 bp, synthetic construct
  source 1..75: mol_type = other DNA
ccgaagggcaagctaacgcggatgacacgctggttgtcgaagcatcaacgccttcgctttatgcgccacaacaat

SEQ ID NO: 606023 - DNA, 75 bp, synthetic construct
  source 1..75: mol_type = other DNA
gaacctgctggtatgagctgacagggctgtggcacctgttatcagcacagggatacaacgtttactgtgtaccgc

SEQ ID NO: 606024 - DNA, 75 bp, synthetic construct
  source 1..75: mol_type = other DNA
atcctgattgtctggaagcgaacgttatacgccgatgtgacatggctgaatgattcgctgatgttgatacaccgt

SEQ ID NO: 606025 - DNA, 75 bp, synthetic construct
  source 1..75: mol_type = other DNA
atgacggcgaagcacacaaaaaaccataattccgtggtgaagttcgtatctgcccgtggcaggccaacgctttta

SEQ ID NO: 606026 - DNA, 75 bp, synthetic construct
  source 1..75: mol_type = other DNA
ctcggcggaatctatcatcgattatttcaaaaatcacaagcctatcaccccagacttaactaaacgagtcatgga

SEQ ID NO: 606027 - DNA, 75 bp, synthetic construct
  source 1..75: mol_type = other DNA
gccagtgagtcagaagtgcagttattagcctcctcacttcatgacatttataattctcgtcagaaaaaagagaag

SEQ ID NO: 606028 - DNA, 75 bp, synthetic construct
  source 1..75: mol_type = other DNA
acgccatacatttgccagccactttatgatgaacggcggcaacattctggttctccaaaaaatcctcggccatgc

SEQ ID NO: 606029 - DNA, 75 bp, synthetic construct
  source 1..75: mol_type = other DNA
gcgaatggatcgccgacttctacaccgtcaaccgcagcaatggtaaaaacgggaagcgtatacgtaaaaaatttg

SEQ ID NO: 606030 - DNA, 75 bp, synthetic construct
  source 1..75: mol_type = other DNA
ttcgccccaagccaccttgaagatgccgtgcgacttaaccccttaaaatgtcgcaaaaatgtcgcgacagcttag

SEQ ID NO: 606031 - DNA, 75 bp, synthetic construct
  source 1..75: mol_type = other DNA
tggccccgttgcggcaatcactattgcaaaggatgcagaacatgcgctggaactggctaatgatagcgagttcgg

SEQ ID NO: 606032 - DNA, 75 bp, synthetic construct
  source 1..75: mol_type = other DNA
tcgcgactggcgcgagacaaatatagattatcgtgctgaaaaactgcgtgatatcggtaaggctctgcgcgcccg

SEQ ID NO: 606033 - DNA, 75 bp, synthetic construct
  source 1..75: mol_type = other DNA
atcggcgaatttgtgtgactggtatgcagaacatggcccgtcaatgctgaaagcagagccaacgctggttgagaa

SEQ ID NO: 606034 - DNA, 75 bp, synthetic construct
  source 1..75: mol_type = other DNA
gtttcaacggttattggtctggctggtcgccaatgtctatccaacgtttaccttcgccgattaccctgaacgctg

SEQ ID NO: 606035 - DNA, 75 bp, synthetic construct
  source 1..75: mol_type = other DNA
atcaaagaacctgcgttgaatgtccgttctgcaaagaacaaggaaggcatggtggtggggagaaagagtgtgctt

SEQ ID NO: 606036 - DNA, 75 bp, synthetic construct
  source 1..75: mol_type = other DNA
aaacgcgtcagaataatcaacttcgttctgggcactatcagcgtagcaagtttctgtataaccctgtacgaaata

SEQ ID NO: 606037 - DNA, 75 bp, synthetic construct
  source 1..75: mol_type = other DNA
tcggccacgctgacatcactatgacaatgcgttatgcccacttcgccccaagccaccttgaagatgctgtgcgac

SEQ ID NO: 606038 - DNA, 75 bp, synthetic construct
  source 1..75: mol_type = other DNA
gcgaatggatcgccgacttctacaccgtcaaccgcagtaatggcaagaacgggaagcgtatacgtaaaaaatttg

SEQ ID NO: 606039 - DNA, 75 bp, synthetic construct
  source 1..75: mol_type = other DNA
caatcacatcaaagttatcaacgttcgtggggacagtatgtgtccaaccattgagccaggagatctcatcttcgt

SEQ ID NO: 606040 - DNA, 75 bp, synthetic construct
  source 1..75: mol_type = other DNA
agagaccgtcccctgaatctgaaacagagtgaacgggggctgtactggcattatgcccggctggcagagaatgtg

SEQ ID NO: 606041 - DNA, 75 bp, synthetic construct
  source 1..75: mol_type = other DNA
ggaagactatctgcgttcgtccccttatgtcatggatcaattaaaagaggcgaagattgatgaacaggagctgca

SEQ ID NO: 606042 - DNA, 75 bp, synthetic construct
  source 1..75: mol_type = other DNA
atgtcatcactgaatattaaacagggaagtgacgctcattttcctgagtatcctctggcgtcgcccagtaataat

SEQ ID NO: 606043 - DNA, 75 bp, synthetic construct
  source 1..75: mol_type = other DNA
ttttacgccgtttaaatatcagttgcgtccgactttgccggtgaaaaaagacggtccgggcaaagcgattattgt

SEQ ID NO: 606044 - DNA, 75 bp, synthetic construct
  source 1..75: mol_type = other DNA
attcactaagcttcgtgtgctggatctggatatcaaaattgatcgtacagaagcatttaacctgtttatcaagaa

SEQ ID NO: 606045 - DNA, 75 bp, synthetic construct
  source 1..75: mol_type = other DNA
ccgcgctgatcggcgggatggtggcttgtggtagcgtgttattgcgctatgcgatggcatccagaaaacaggatg

SEQ ID NO: 606046 - DNA, 75 bp, synthetic construct
  source 1..75: mol_type = other DNA
gatcctttctgcgttgatcggcggtatggtggcttgtggtagcgtgctgttgcgccatgccatggcatccagaaa

SEQ ID NO: 606047 - DNA, 75 bp, synthetic construct
  source 1..75: mol_type = other DNA
atactctgctgccgttgccccaaatcgtgcggacaatgcctatgcggattacgttttggatataggcaagcaaat

SEQ ID NO: 606048 - DNA, 75 bp, synthetic construct
  source 1..75: mol_type = other DNA
actgggaaaacgtgatattgacgagaaccgcacagaatatatggtcgcttccgaaagcgttgcgctcgatacgct

SEQ ID NO: 606049 - DNA, 75 bp, synthetic construct
  source 1..75: mol_type = other DNA
tcgcgctggaaattgctcgtattctgggcaaaccgtaccgccagggcttcgttaaaaaccgctatgttggccgca

SEQ ID NO: 606050 - DNA, 75 bp, synthetic construct
  source 1..75: mol_type = other DNA
ttgaaaaagcggttactgacgttgcggaactgaatggtgaattacgtaatcgtcagtatcttgtcgagcaattaa

SEQ ID NO: 606051 - DNA, 75 bp, synthetic construct
  source 1..75: mol_type = other DNA
atgatttgcagggtattagatataaacatgaaaattccctcattacagtccaacttcaacttttttgcccctgct

SEQ ID NO: 606052 - DNA, 75 bp, synthetic construct
  source 1..75: mol_type = other DNA
atgaaaattccctcattacagtccaacttcaacttttccgcccctgctggatactctgctgccgttgctcctaat

SEQ ID NO: 606053 - DNA, 75 bp, synthetic construct
  source 1..75: mol_type = other DNA
taagaaaaaagatgaaccgtcactgtatacctcctggacgctaagttttaccgcgccaaccagtgaagaggcgca

SEQ ID NO: 606054 - DNA, 75 bp, synthetic construct
  source 1..75: mol_type = other DNA
tttctgtgcagggtaatgcgccgaagtttttgactcgcgtcagccgtcgcggtgtgccgattaactcgctgatgc

SEQ ID NO: 606055 - DNA, 75 bp, synthetic construct
  source 1..75: mol_type = other DNA
atcaggtggtgtatcgcatcctgctgttttatatcggttcactggtggttttactggcactctatccgtgggtgg

SEQ ID NO: 606056 - DNA, 75 bp, synthetic construct
  source 1..75: mol_type = other DNA
tgcgcttgtcagcgattctgctgccggtgtggattgtattcctgtttgtagcgtttaaaacgctgcgtcggaaat

SEQ ID NO: 606057 - DNA, 75 bp, synthetic construct
  source 1..75: mol_type = other DNA
gcatgtcgctgtcgtgcctggaaagaacggtccgcatggcactgaacagaaagacagcccgtaccggtaaattct

SEQ ID NO: 606058 - DNA, 75 bp, synthetic construct
  source 1..75: mol_type = other DNA
cggtaagttccgtctgacgtccggacaacgactggcactgaagcgcctttctgagaacggaagagaccgtcccct

SEQ ID NO: 606059 - DNA, 75 bp, synthetic construct
  source 1..75: mol_type = other DNA
gtgctcctgacaggaacctgctggtatgagatgacagggctgtggcacctgttatccgcacagggccacaacgtt

SEQ ID NO: 606060 - DNA, 75 bp, synthetic construct
  source 1..75: mol_type = other DNA
atctgagtttggggttattggtgcattaatgtgtattttctattttttttatttttcccgattttatctgcgttt

SEQ ID NO: 606061 - DNA, 75 bp, synthetic construct
  source 1..75: mol_type = other DNA
caaaaaaaataagagatatccaccgcagtatattttagcatatagtttctatatgtgtttcttcatccccctttt

SEQ ID NO: 606062 - DNA, 75 bp, synthetic construct
  source 1..75: mol_type = other DNA
tggatatcgaatagagtgcaggaattaggtgacagatattatcctgtaaataagcacgttaaaatccgctacact

SEQ ID NO: 606063 - DNA, 75 bp, synthetic construct
  source 1..75: mol_type = other DNA
agagctgaccgctgcgggcatctatatgcagtactggttcccggatgttccaacgtggatttgggctgccgcctt

SEQ ID NO: 606064 - DNA, 75 bp, synthetic construct
  source 1..75: mol_type = other DNA
aactatctttgcattgccttcctcggcatgattttgctgctgatgtgcacgatggatgatatgcgcttgtcagcg

SEQ ID NO: 606065 - DNA, 75 bp, synthetic construct
  source 1..75: mol_type = other DNA
aagcgcgcgctccagaaaaaagcattccgaaggcagtaaatcaggtggtttatcgcattctgctgttttatatcg

SEQ ID NO: 606066 - DNA, 75 bp, synthetic construct
  source 1..75: mol_type = other DNA
gagaaagcgaatctgatcgacgatcttgccaaacagcaagaattgcaaaaaagtaaaatagagattcttgaaaaa

SEQ ID NO: 606067 - DNA, 75 bp, synthetic construct
  source 1..75: mol_type = other DNA
accttttaagcgttcccgtatcaaatattggctttcatgcgacatggggcaatgaaagacccaccgatgccaaag

SEQ ID NO: 606068 - DNA, 75 bp, synthetic construct
  source 1..75: mol_type = other DNA
catgggtttctacgcgacatggggggggagaaaaacccaccgacatcaacgcattagcaaaatggcagcaattgc

SEQ ID NO: 606069 - DNA, 75 bp, synthetic construct
  source 1..75: mol_type = other DNA
aagacattaatctgacattaaaaggcgtttcgcctaaggaaggtgcgaataagcggggaaattcttctcggctga

SEQ ID NO: 606070 - DNA, 75 bp, synthetic construct
  source 1..75: mol_type = other DNA
aagacaaacaggacgaatttgtcttcaccgaatttaacccagcacaaacaaaatacttcattttaaacaatggct

SEQ ID NO: 606071 - DNA, 75 bp, synthetic construct
  source 1..75: mol_type = other DNA
atggcgattgccctctaataaagttaagcatcgctatcaacagcaaggatatcaatggcttgatactccacatca

SEQ ID NO: 606072 - DNA, 75 bp, synthetic construct
  source 1..75: mol_type = other DNA
tttggacgagaagaggccaatctatttttcaatgttattgccaagcgttatgagtatggtagcgtcatactcacg

SEQ ID NO: 606073 - DNA, 75 bp, synthetic construct
  source 1..75: mol_type = other DNA
ggtctggactcatggacagagttaccagggatcaaagaaccaggagcaatctttgaaggcccggcctattcccgc

SEQ ID NO: 606074 - DNA, 75 bp, synthetic construct
  source 1..75: mol_type = other DNA
tgttaacaatattttcactaggtacattaacaggctgtgattatattgaaaaagcgagtctgatcgatgatcttg

SEQ ID NO: 606075 - DNA, 75 bp, synthetic construct
  source 1..75: mol_type = other DNA
cattgccatgtataacagcgcaggcgcaatggtgtatcacggtgagatgatgccccttgatgcgaaacttatcac

SEQ ID NO: 606076 - DNA, 75 bp, synthetic construct
  source 1..75: mol_type = other DNA
ggtcaatggtattccggtaatgtcacatgggatattaagaagatttatacaaacaaaatcctggttataaatacc

SEQ ID NO: 606077 - DNA, 75 bp, synthetic construct
  source 1..75: mol_type = other DNA
tattttgatgcaattggcctgacagaaacaaccatgtcgctcacagacaaaaataccccggttgtcgtatctgtt

SEQ ID NO: 606078 - DNA, 75 bp, synthetic construct
  source 1..75: mol_type = other DNA
agaaaaatgaagatcgccggacagccgaacgctttcagaaatgggtggaaatgggcgttctgaccgttaccgatg

SEQ ID NO: 606079 - DNA, 75 bp, synthetic construct
  source 1..75: mol_type = other DNA
cctcacttgcagataaggtgacggaagggagagatcttaatgcagaaaaagcaattagcatgttctgcaagaaaa

SEQ ID NO: 606080 - DNA, 75 bp, synthetic construct
  source 1..75: mol_type = other DNA
gctgtcacatgaccttgctgatgaagacctgaatcccatcaccatcattcagaactacaccaacatgtccgaccc

SEQ ID NO: 606081 - DNA, 75 bp, synthetic construct
  source 1..75: mol_type = other DNA
gacggcgcgtcgccgagttgcgctctcattgatgaatatcacgagcatcagaccgatgcactttaccagacgatg

SEQ ID NO: 606082 - DNA, 75 bp, synthetic construct
  source 1..75: mol_type = other DNA
gcaaaagacgccttcttcaatcttgtgaactggcagaaatgtgaagacaggagtctgacgctggagcgttttgag

SEQ ID NO: 606083 - DNA, 75 bp, synthetic construct
  source 1..75: mol_type = other DNA
gcgattaaacgcctggcgaacgttgccagcaatgtgtgtggctgtaggcttgctgatgtgctggccgctgtggca

SEQ ID NO: 606084 - DNA, 75 bp, synthetic construct
  source 1..75: mol_type = other DNA
atggcattagtctgacctcgtttattgcaaatctttttgcaattcccctggtgacatttatcacggttccgttga

SEQ ID NO: 606085 - DNA, 75 bp, synthetic construct
  source 1..75: mol_type = other DNA
gcgcgaatttgccgaaacgggcgtggactttatctccgttggtgcactaactaaacacgtacaggcactcgacct

SEQ ID NO: 606086 - DNA, 75 bp, synthetic construct
  source 1..75: mol_type = other DNA
gctgattttgccccaattgcctgggacattaacccttgcgtttctgactctcttcgcctgcgtactggcatttat

SEQ ID NO: 606087 - DNA, 75 bp, synthetic construct
  source 1..75: mol_type = other DNA
ggtctttggctttacttttctgggggttaaagagtttgccggaagggtggatcaacattgctgaacgttggcaat

SEQ ID NO: 606088 - DNA, 75 bp, synthetic construct
  source 1..75: mol_type = other DNA
atgaacctaaagaaaacactgttaagcgtgttaatgatattgcagctttgcttattggtagggtgtgactatatt

SEQ ID NO: 606089 - DNA, 75 bp, synthetic construct
  source 1..75: mol_type = other DNA
gtggcgggggagagtgcctacttatatcgggatgaagcaaatatttccccagaaacaacagtgaaggggaaatga

SEQ ID NO: 606090 - DNA, 75 bp, synthetic construct
  source 1..75: mol_type = other DNA
atgtcatttactgatatctatcagatttccggctcggcgatgacggcgcaaaccattcgcctgaataccgtcgcc

SEQ ID NO: 606091 - DNA, 75 bp, synthetic construct
  source 1..75: mol_type = other DNA
atgaatattgaattttatgactatggggttactgcaaaaatcattgtcacctgctggttctgggagttccgtcgc

SEQ ID NO: 606092 - DNA, 75 bp, synthetic construct
  source 1..75: mol_type = other DNA
atttcaaaaaagccaccacttgaaaactgacggtgttgttggcttttcaacgttagtacatctctggcaggtggc

SEQ ID NO: 606093 - DNA, 75 bp, synthetic construct
  source 1..75: mol_type = other DNA
aaacattggtagatcagaatttgccctggatcgcatcgcttaaagtcggggacaaaaaattgcctgttgtggtcg

SEQ ID NO: 606094 - DNA, 75 bp, synthetic construct
  source 1..75: mol_type = other DNA
cgttacccgttcctgcgtggctgatacccgtaacgccagtagttaaacaagatatgactaaggatattgctcatg

SEQ ID NO: 606095 - DNA, 75 bp, synthetic construct
  source 1..75: mol_type = other DNA
ctacgcagcactcctgatgtccgagcaaaaggagattgatgtgctggtgacgggcctgcctgtaagtcagtatat

SEQ ID NO: 606096 - DNA, 75 bp, synthetic construct
  source 1..75: mol_type = other DNA
atattggttactcgaacctgaaaatggcgatgggtcataaaggtggggaagctcgaactgtcatcatgccagtgg

SEQ ID NO: 606097 - DNA, 75 bp, synthetic construct
  source 1..75: mol_type = other DNA
aacaggcgcgtgccgaagtggtgaaatcagcgaatttgtgcgactggtatgcagagcatggcccggcaatgctga

SEQ ID NO: 606098 - DNA, 75 bp, synthetic construct
  source 1..75: mol_type = other DNA
ctgctggttctgggagttccgtcactattgccgggttgtggatgcggcgctgtttgtggcccctgaagtgcacca

SEQ ID NO: 606099 - DNA, 75 bp, synthetic construct
  source 1..75: mol_type = other DNA
attctgtttgcgcaatgaaactatatgcagaatatcgtggcgagccggggaaatatcacggttataaatggcata

SEQ ID NO: 606100 - DNA, 75 bp, synthetic construct
  source 1..75: mol_type = other DNA
ggctcttcgccggttcacggatagcgggagagcgtgcggcccggataatgagtctgctggaaacggctaagctca

SEQ ID NO: 606101 - DNA, 75 bp, synthetic construct
  source 1..75: mol_type = other DNA
cgttagtacatctctggcaggtggcaggggagagtgcctacttatatcgggatgaagcaaatatttccccggaaa

SEQ ID NO: 606102 - DNA, 75 bp, synthetic construct
  source 1..75: mol_type = other DNA
aagcatacttaatacggttaaaaacaatcagttaccagaggatatcaaaagctccttggtttcctgtgtcgatat

SEQ ID NO: 606103 - DNA, 75 bp, synthetic construct
  source 1..75: mol_type = other DNA
atggccaacttaatgatggcggctttgatagccagcgttatgccattgcccagcatcagccgctcaccggccgct

SEQ ID NO: 606104 - DNA, 75 bp, synthetic construct
  source 1..75: mol_type = other DNA
ctggacggccgattttgattacctgctgagggaagactcgttaacgggagtgcgggaaggaaagtttgcagacag

SEQ ID NO: 606105 - DNA, 75 bp, synthetic construct
  source 1..75: mol_type = other DNA
caacctcaaatatctgaaattagccatcaacatggcaaatattcagttcgaccgtcttcaacctgctgaatctcc

SEQ ID NO: 606106 - DNA, 75 bp, synthetic construct
  source 1..75: mol_type = other DNA
ctgaaactcgccatcaatatggcaaaccttcagttcgacgaccttcactctgcggaatcccgacagagaaaaagc

SEQ ID NO: 606107 - DNA, 75 bp, synthetic construct
  source 1..75: mol_type = other DNA
gcgtcatgacggcttcgacaatgctggtattgtcaggttgtgattacgtcgaaaaaacgaaagtagttgatgagc

SEQ ID NO: 606108 - DNA, 75 bp, synthetic construct
  source 1..75: mol_type = other DNA
cgaatcgactacgaatccttcctgaacgcctacaacaccgaagtcggtgacagactgccgcacgctgttgcggtc

SEQ ID NO: 606109 - DNA, 75 bp, synthetic construct
  source 1..75: mol_type = other DNA
ctcgctaccccaacatcccgatcaatggtaactgcctcattatcggcgttgttaaaggcgttcagtacgaactct

SEQ ID NO: 606110 - DNA, 75 bp, synthetic construct
  source 1..75: mol_type = other DNA
gcatttaatggcgatatcgggattgcacatcgcttttgcggcgttgctggctgccggactcattcgcggtgggca

SEQ ID NO: 606111 - DNA, 75 bp, synthetic construct
  source 1..75: mol_type = other DNA
tcatcacggcagccgacctgatgctgcaactgagcacggcgcagcgacaagggcggctgaaggaatacttcaacc

SEQ ID NO: 606112 - DNA, 75 bp, synthetic construct
  source 1..75: mol_type = other DNA
cataaaccgccaacctttttatgaatttttttccgtcttttatcattacggtttatatgctgtcgaattgttttt

SEQ ID NO: 606113 - DNA, 75 bp, synthetic construct
  source 1..75: mol_type = other DNA
ctggacggctgattttgattacctgctgagagaagactcgttaacgggagttcgggaagggaagtttgcagacag

SEQ ID NO: 606114 - DNA, 75 bp, synthetic construct
  source 1..75: mol_type = other DNA
gcttgatcgaagaagcgcgcgatccagaagtggcggtgatcgtgatggattttgtgctcggatttggatcgcatg

SEQ ID NO: 606115 - DNA, 75 bp, synthetic construct
  source 1..75: mol_type = other DNA
gctggaacgtgcgcgcgcctgccgcaagccggtggtggtctgcttcctcggtcgtggcgaaacgccagtggatga

SEQ ID NO: 606116 - DNA, 75 bp, synthetic construct
  source 1..75: mol_type = other DNA
gacctgagcgagaaaatcggcggcctgatgatgctcgatgccatcgggatgctggaaaacgatccgcaaactgaa

SEQ ID NO: 606117 - DNA, 75 bp, synthetic construct
  source 1..75: mol_type = other DNA
attttttgattcggctttgtttaattcaggggaaacaggtcaggcaaatggattatttataaaatctgttgcaac

SEQ ID NO: 606118 - DNA, 75 bp, synthetic construct
  source 1..75: mol_type = other DNA
ctggagcctttcagaaaaaggtaaaaaattctggttcactggttgcgccattctttcacttgttttgtgttttat

SEQ ID NO: 606119 - DNA, 75 bp, synthetic construct
  source 1..75: mol_type = other DNA
ttatatcaagtatcctttctctggctggatgcaaggaggaagctaaaacaacaaagtggtatcgtgaccacccag

SEQ ID NO: 606120 - DNA, 75 bp, synthetic construct
  source 1..75: mol_type = other DNA
gtcgcgttgaaacgccggtggatgagcaggggctacagtttgcccgcggcagcaaagaggcggcgctaaaagcgg

SEQ ID NO: 606121 - DNA, 75 bp, synthetic construct
  source 1..75: mol_type = other DNA
gtcgtggcgaaacgccagtggatgagcaggggctacagtttgctcgcggcagcaaagaggcggcactgaaagcgg

SEQ ID NO: 606122 - DNA, 75 bp, synthetic construct
  source 1..75: mol_type = other DNA
caaaaagcatatcccggaaagtaacctggcagtgatttcggtcaacggtctgtttgccgctcgcgaagcgcgtca

SEQ ID NO: 606123 - DNA, 75 bp, synthetic construct
  source 1..75: mol_type = other DNA
agccgttgattgctgacgtgcgcgctcgcctgcaaccgcagcagaaatacattcgtggcctgttctgcggcggca

SEQ ID NO: 606124 - DNA, 75 bp, synthetic construct
  source 1..75: mol_type = other DNA
catttgtggcgatggcgaccgaaatgaacaaaggcgtgctgaagaatttaggactgctgacgccggagctggagc

SEQ ID NO: 606125 - DNA, 75 bp, synthetic construct
  source 1..75: mol_type = other DNA
tgaatttggcggcggcgtttcgcaactgattggcaccggcgggcgcgacctgagcgagaaaatcggcggcctgat

SEQ ID NO: 606126 - DNA, 75 bp, synthetic construct
  source 1..75: mol_type = other DNA
cctataaaagtggtcacagtagccaactgactaaagccattagagagctgcaggacaaatttaaagacaaaaaat

SEQ ID NO: 606127 - DNA, 75 bp, synthetic construct
  source 1..75: mol_type = other DNA
gtacagtcggcgctggaatggggaaaaatgcacacctggcagacgcaacccgtagttcagtgctcacagttcgct

SEQ ID NO: 606128 - DNA, 75 bp, synthetic construct
  source 1..75: mol_type = other DNA
cgctggcactggtcctgatgttgctggtattgggcagcttgctgctacaaggaatgagccaacaggagcgcagtt

SEQ ID NO: 606129 - DNA, 75 bp, synthetic construct
  source 1..75: mol_type = other DNA
gtgaaccgcgaaaagggtgtttcgtcactggctctggtcctgatgctgctggttttgggtagcttgctattgcaa

SEQ ID NO: 606130 - DNA, 75 bp, synthetic construct
  source 1..75: mol_type = other DNA
cgcagttcagtgcttactgtatgctgtgccaccggtgcccgggtttgtctgcgtttactggcagataatgaagcc

SEQ ID NO: 606131 - DNA, 75 bp, synthetic construct
  source 1..75: mol_type = other DNA
acgatggaaatattgctttttcgccacacggctggagtgatttttgtccgcagaaagaggtggcgttatgtcagc

SEQ ID NO: 606132 - DNA, 75 bp, synthetic construct
  source 1..75: mol_type = other DNA
gctgattgccagttatgaaggcgtttcattatggcgaacaggcgaagtgaacgatggaaatattgctttttcgcc

SEQ ID NO: 606133 - DNA, 75 bp, synthetic construct
  source 1..75: mol_type = other DNA
ggttgaaggcttccgccaggcgcgggatgaaggctgcgaagaggcttatcgtctctgggtggatgataccggtga

SEQ ID NO: 606134 - DNA, 75 bp, synthetic construct
  source 1..75: mol_type = other DNA
attttcagtctgtttctaatttttattattgtcaccggtaacttccccggctggctctttctctcggtgataccg

SEQ ID NO: 606135 - DNA, 75 bp, synthetic construct
  source 1..75: mol_type = other DNA
ttcattttattctgaacgtggaaaaaaattctggaatactggttgttccgtgctttcattaattctcgcatttat

SEQ ID NO: 606136 - DNA, 75 bp, synthetic construct
  source 1..75: mol_type = other DNA
catcgtccggcgctggagttaaagcgattgcagcctgaaattgaaaatacgattaccacgttggtgatgctgcca

SEQ ID NO: 606137 - DNA, 75 bp, synthetic construct
  source 1..75: mol_type = other DNA
ccggaactgatgtttcaggattatgagggattcccggggaatatggcctctgaatgtcatatcaactgggcctgg

SEQ ID NO: 606138 - DNA, 75 bp, synthetic construct
  source 1..75: mol_type = other DNA
acgttggaacctggcacaaatacaactgtggaagcatcgctggccgctggtttgacctggccacgtttgatgatg

SEQ ID NO: 606139 - DNA, 75 bp, synthetic construct
  source 1..75: mol_type = other DNA
ttgaagaactgttcaacaccaaagcgcaaagcggctcgcatgaggcgcgttacgccactattgccagcgccaaaa

SEQ ID NO: 606140 - DNA, 75 bp, synthetic construct
  source 1..75: mol_type = other DNA
acgccagggaagaagaaagcaagaagggaatggacgcaagccagctaacaggtgcgacatcaagttacgcgcgaa

SEQ ID NO: 606141 - DNA, 75 bp, synthetic construct
  source 1..75: mol_type = other DNA
atgatgaagtggtgttaattggtgatcgttattacattaaagcaacagcgatattgagcgatggtgaagatgaaa

SEQ ID NO: 606142 - DNA, 75 bp, synthetic construct
  source 1..75: mol_type = other DNA
cccatgaacagcagcaaaaagccgttgagcgtattcaggaactgatggcacaggggatgagcagcggtcaggcaa

SEQ ID NO: 606143 - DNA, 75 bp, synthetic construct
  source 1..75: mol_type = other DNA
cagtccacagggcagcgtggtagacgtcacgctgaatgctgataatttcatcgtgagggataacggccccggtgt

SEQ ID NO: 606144 - DNA, 75 bp, synthetic construct
  source 1..75: mol_type = other DNA
taccgtgaagacatggcgctggcgattgttgccgggcaattgatcccgtggctggtcgcactgccgattatgtta

SEQ ID NO: 606145 - DNA, 75 bp, synthetic construct
  source 1..75: mol_type = other DNA
tgggctgtcgattgtccaacgaatcgccaaattacatggcatgaatgttgcgtttgggaacgcagaacaaggtgg

SEQ ID NO: 606146 - DNA, 75 bp, synthetic construct
  source 1..75: mol_type = other DNA
caaaggtgttgtttgcgaatgcttttgttgaaaacagtacgaataaaaaggattcaactgcgattaaaataaaat

SEQ ID NO: 606147 - DNA, 75 bp, synthetic construct
  source 1..75: mol_type = other DNA
aggatttaactaaaaacaatccacttaataacacacattatatttatagagtaaagaactctcattataagcttt

SEQ ID NO: 606148 - DNA, 75 bp, synthetic construct
  source 1..75: mol_type = other DNA
actgtttcgaattataaaaagtctttaatgaataggctgtatgtctgtaatgacatagatttattttataaaggt

SEQ ID NO: 606149 - DNA, 75 bp, synthetic construct
  source 1..75: mol_type = other DNA
aacagccatacggcaaccgctcttgcacgagaggaagaaagcaagaaaggaatggattctgcacaagttacggga

SEQ ID NO: 606150 - DNA, 75 bp, synthetic construct
  source 1..75: mol_type = other DNA
catgtgggattggggcatcttcgtaggtagcttcgttccaccgctggtgattggcgtagcattcggtaacctgtt

SEQ ID NO: 606151 - DNA, 75 bp, synthetic construct
  source 1..75: mol_type = other DNA
cgtgcaaccgctcaggtggcggcactggtgactctggtgtgcttcgcactggctggcgtatgggtgatgtatggt

SEQ ID NO: 606152 - DNA, 75 bp, synthetic construct
  source 1..75: mol_type = other DNA
cggcatcaaacgcaccggacaaccgctattgctaagtttgttggtgcgaaatttgctggataacgccgtgcgcta

SEQ ID NO: 606153 - DNA, 75 bp, synthetic construct
  source 1..75: mol_type = other DNA
ggtcaaataacggtcaatttttcagcgcaaggctggcggattagcagcctcagagagcaaattttacctcgttgg

SEQ ID NO: 606154 - DNA, 75 bp, synthetic construct
  source 1..75: mol_type = other DNA
agggtggatcaacattgctgaacgttggcaatggctatcattttccccatggttcttactggtggtatggcgatt

SEQ ID NO: 606155 - DNA, 75 bp, synthetic construct
  source 1..75: mol_type = other DNA
aattggcggtgctgagcggtgttctgcttctggtcagtggctgggtgtactggaggcgaaggtaacaaactatac

SEQ ID NO: 606156 - DNA, 75 bp, synthetic construct
  source 1..75: mol_type = other DNA
cgccggaagccctgcggactaagagtgtggtacccggtgattatgaagcaacagccacgtttgagttaacgtatc

SEQ ID NO: 606157 - DNA, 75 bp, synthetic construct
  source 1..75: mol_type = other DNA
ttcaggggtaatctgcttgacagaccctgccatgtgtccggtgacagtctgaataaacatgtcgtcttcaaaccc

SEQ ID NO: 606158 - DNA, 75 bp, synthetic construct
  source 1..75: mol_type = other DNA
tggcttcagcatcgcgctataacgcatggcggctgcctgccagtaaagttaaacgtcgctatcaacaacaaggtt

SEQ ID NO: 606159 - DNA, 75 bp, synthetic construct
  source 1..75: mol_type = other DNA
atttgctggataacgccgtgcgttacagtccacagggcagcgtggtggacgtcacgctgaatgccgataatttca

SEQ ID NO: 606160 - DNA, 75 bp, synthetic construct
  source 1..75: mol_type = other DNA
tttgccaaacggttaagtacgctcgatcttaacgaaatccatgcagcagatcgtatggcaagaacaccggataaa

SEQ ID NO: 606161 - DNA, 75 bp, synthetic construct
  source 1..75: mol_type = other DNA
gcttgttgcgctacccatcatgttaatcttcatgatggtgttactgggtcgtgagctctcgccactgaacaaact

SEQ ID NO: 606162 - DNA, 75 bp, synthetic construct
  source 1..75: mol_type = other DNA
ctctgatgagacacagtatttctgccccgcaggtctggaagcgtcacaagaggccaatttgcaggcattagtgct

SEQ ID NO: 606163 - DNA, 75 bp, synthetic construct
  source 1..75: mol_type = other DNA
gaagtattgattgaaaaatggctaagtgggccggagttcacggttgcgatactcggtgaagaaattttaccgtca

SEQ ID NO: 606164 - DNA, 75 bp, synthetic construct
  source 1..75: mol_type = other DNA
tacagcgatcaagtgtgctggcacccagcaattacgagaaagaattagccgtgttttgggcgacgttattacgcc

SEQ ID NO: 606165 - DNA, 75 bp, synthetic construct
  source 1..75: mol_type = other DNA
tctgctcccggaaacggtgggccgtctggcgaaagtaaaaatattatcggaatcaaagaggcaacagggaactta

SEQ ID NO: 606166 - DNA, 75 bp, synthetic construct
  source 1..75: mol_type = other DNA
tctgctcccggaaacggtgggccgtctggcgaaagtaaaaaatattatcggaatcaaagaggcaacagggaactt

SEQ ID NO: 606167 - DNA, 75 bp, synthetic construct
  source 1..75: mol_type = other DNA
ttaaatcatgacgaacatgctgatgtggtgatgatgacgctggagctggcggatggacgtattccggtgattgcc

SEQ ID NO: 606168 - DNA, 75 bp, synthetic construct
  source 1..75: mol_type = other DNA
gaacgccacgcccaggagcgcttgcgaattctggctaacaccgacagcattacagggctgccgaatcgtaacgct

SEQ ID NO: 606169 - DNA, 75 bp, synthetic construct
  source 1..75: mol_type = other DNA
gacgtcattgggcaaagcgtgtttaaactgtttatgagccgtcgtgaagctgcggcatccaggcgcaataaccgt

SEQ ID NO: 606170 - DNA, 75 bp, synthetic construct
  source 1..75: mol_type = other DNA
ggaaaacaatcagttagtcattcactatcaacccaaaatcacctggcgcggtgaagtgcgaagtctggaagcatt

SEQ ID NO: 606171 - DNA, 75 bp, synthetic construct
  source 1..75: mol_type = other DNA
gtctgaaggaagtcagtcaggttttcgtatggtcaatacaagtaatccttcttcatattacacttttaaaaccgt

SEQ ID NO: 606172 - DNA, 75 bp, synthetic construct
  source 1..75: mol_type = other DNA
ccaccggcaagtactattcctagtagtaccactgcatttgcggaaggtgagatcgaaataactaacaattgtagg

SEQ ID NO: 606173 - DNA, 75 bp, synthetic construct
  source 1..75: mol_type = other DNA
gatcgaaataactaacaattgtaaggttagtatcaccacccctagtaaaattgtacgtcctgctacacaggccac

SEQ ID NO: 606174 - DNA, 75 bp, synthetic construct
  source 1..75: mol_type = other DNA
ggcgttatttccgttactgctaacgtcgcagcgcgtgatatggctcagatgtgcaaactggcggcagaagggcat

SEQ ID NO: 606175 - DNA, 75 bp, synthetic construct
  source 1..75: mol_type = other DNA
aattacccttagccagcgcagatagtacgaacgtcgctcgaaacatcggtattgataaagcctggtctggggctt

SEQ ID NO: 606176 - DNA, 75 bp, synthetic construct
  source 1..75: mol_type = other DNA
ggcgtcagtggggcatgggcttccttttgcaaagcaatgataaacagccttccttcttgtgggagcgttacaagg

SEQ ID NO: 606177 - DNA, 75 bp, synthetic construct
  source 1..75: mol_type = other DNA
aagggcataccaataaatggcgttcctttccctaaaccactgaaacaattcaaaacgcatcgatttaattacgaa

SEQ ID NO: 606178 - DNA, 75 bp, synthetic construct
  source 1..75: mol_type = other DNA
ggccacggtatggttgctttccgcgatccaaacggtattcgtccgctggttctgggaaaacgtgatattgacgag

SEQ ID NO: 606179 - DNA, 75 bp, synthetic construct
  source 1..75: mol_type = other DNA
attaatactcaacagcaagaatcacataaataatgtttctaagcttataggaatgtccagcacatcatacttcat

SEQ ID NO: 606180 - DNA, 75 bp, synthetic construct
  source 1..75: mol_type = other DNA
atggatattccacgtatttttaccatcagtgaaagcgaacaccgcatccacaacccgttcaccgaagagaagtac

SEQ ID NO: 606181 - DNA, 75 bp, synthetic construct
  source 1..75: mol_type = other DNA
tttacatcactgaagaagggcagttgtttacccgtcaatgtgctgacaatccggtcagcaatccgtgcctgtttg

SEQ ID NO: 606182 - DNA, 75 bp, synthetic construct
  source 1..75: mol_type = other DNA
ccttcatcatgccgggtcagcagctgcgtcgtaagtccgtgcgccgtaaactgaacgccaaccgcgccgagttcc

SEQ ID NO: 606183 - DNA, 75 bp, synthetic construct
  source 1..75: mol_type = other DNA
cttccgccactacccgctggaagccgacaacattttcgccgccatcgctgctacaaaccgcttaatccgcggcgc

SEQ ID NO: 606184 - DNA, 75 bp, synthetic construct
  source 1..75: mol_type = other DNA
gatatattgaccttaagcagtgaatccactgcaaaaggatttggcatcaggctatataaagacagtgatgtaact

SEQ ID NO: 606185 - DNA, 75 bp, synthetic construct
  source 1..75: mol_type = other DNA
tctgattttgatatctatgatattggtgtatccggactgggtattattattggcatggcgggctattggcccgca

SEQ ID NO: 606186 - DNA, 75 bp, synthetic construct
  source 1..75: mol_type = other DNA
ctgatgtttatgctacattgacagatgcatcacagccagtgaacagaacagatatattgaccttaagcagtgaat

SEQ ID NO: 606187 - DNA, 75 bp, synthetic construct
  source 1..75: mol_type = other DNA
tcagcgaacgcgtacattttattcataacgatgcggccggttacgtcgcaaatgaaaaatgtgacgtggcggcct

SEQ ID NO: 606188 - DNA, 75 bp, synthetic construct
  source 1..75: mol_type = other DNA
atggatatcccacgtatttttaccatcagcgaaagtgaacaccgcatccataacccgttcaccgaagagaagtac

SEQ ID NO: 606189 - DNA, 75 bp, synthetic construct
  source 1..75: mol_type = other DNA
tggtcctgctgatgctcatacttatccccgggtgataggagagctggcggggacaagtaaccggtatgtatttaa

SEQ ID NO: 606190 - DNA, 75 bp, synthetic construct
  source 1..75: mol_type = other DNA
tatgtccagttctttctctatattgtggaatgacgatggctgaaacattaccaccgtcaagtactatttctagag

SEQ ID NO: 606191 - DNA, 75 bp, synthetic construct
  source 1..75: mol_type = other DNA
catcccgatttaaaggtgctggaaaatccttactcgcccccctattctatgacggatgaaaatggctcggttcgg

SEQ ID NO: 606192 - DNA, 75 bp, synthetic construct
  source 1..75: mol_type = other DNA
gctggcgataacagaactttccatcagtgtattcatcgcattcacggtgcggctaacatcctgaatttgcaaaag

SEQ ID NO: 606193 - DNA, 75 bp, synthetic construct
  source 1..75: mol_type = other DNA
tcctaatgaactttatcattttcttattcctggcgttccgaatgcatcgctttcgttcgcttttcctcgcggaga

SEQ ID NO: 606194 - DNA, 75 bp, synthetic construct
  source 1..75: mol_type = other DNA
aaagcactgaatgcaattcccccaagcgaagttctgcgcctgaccgaaaaatggattaaaatgcccaatgtgacc

SEQ ID NO: 606195 - DNA, 75 bp, synthetic construct
  source 1..75: mol_type = other DNA
acccttcacgattcaatgcgaccgcttacctcatcaaaaccagtaaatattgctcgggtagcaaattaccctcca

SEQ ID NO: 606196 - DNA, 75 bp, synthetic construct
  source 1..75: mol_type = other DNA
gcatacattatgtaatctgccagccagcgaacatgctgtttatatttgtggttggcaagatattaccgagacgcg

SEQ ID NO: 606197 - DNA, 75 bp, synthetic construct
  source 1..75: mol_type = other DNA
aacatttttttttcgccacgcggctggagtgatttttgtccgcagaaagagggggcgttatgtcagcttccctga

SEQ ID NO: 606198 - DNA, 75 bp, synthetic construct
  source 1..75: mol_type = other DNA
cactggctctggtcctgatgctgctgattttgggtagcttgctattacaaggaatgagccaacaggatcgcagtt

SEQ ID NO: 606199 - DNA, 75 bp, synthetic construct
  source 1..75: mol_type = other DNA
tcgcagttttgcctctcgcgtgagcatggaaagtcagtcattgcgccgccaggccatcgttcagtcggcgctggc

SEQ ID NO: 606200 - DNA, 75 bp, synthetic construct
  source 1..75: mol_type = other DNA
taagcctgaaattcttcagctgctgaactctgttaaagaacacattgcagagctggaccaggagattgctgtttt

SEQ ID NO: 606201 - DNA, 75 bp, synthetic construct
  source 1..75: mol_type = other DNA
cgggaatacgcagatcatcaaaaagcaatggacgcgctggaagaaggtgaagtcgatatagtgttatcacattta

SEQ ID NO: 606202 - DNA, 75 bp, synthetic construct
  source 1..75: mol_type = other DNA
aagatggagttgtcgcaagtcagagaatccccaatatagaggctataaagagctacgtagctggtggaatccata

SEQ ID NO: 606203 - DNA, 75 bp, synthetic construct
  source 1..75: mol_type = other DNA
ttatcgcaggaagaacaacaacaactgtttaaacgctatagccaaacaacagcaggtcgtcagcaaacaggttct

SEQ ID NO: 606204 - DNA, 75 bp, synthetic construct
  source 1..75: mol_type = other DNA
acttcaacgctgtcgctggctttcggctgatgtcattatggtgctggttggcctgatttgcggcatcacgctgtt

SEQ ID NO: 606205 - DNA, 75 bp, synthetic construct
  source 1..75: mol_type = other DNA
taggcgcaacgttattcaccatactgctacccattgcgctgatgttggttaaaacgattgccgaattgaatatgg

SEQ ID NO: 606206 - DNA, 75 bp, synthetic construct
  source 1..75: mol_type = other DNA
cgctagtaacgaatttagctggaaatgtgaagttagtattatgtaccatcttactatggcgatttacagtaatat

SEQ ID NO: 606207 - DNA, 75 bp, synthetic construct
  source 1..75: mol_type = other DNA
cctaaatgtaagtatccaaattccccaagcaaataattatcttcctggtcaatatacaattggtcttaacgcagg

SEQ ID NO: 606208 - DNA, 75 bp, synthetic construct
  source 1..75: mol_type = other DNA
atcccgacatcagcccggaaattattgcgattgctatcggttcaggtgcgattggctgcacgatcgttacggact

SEQ ID NO: 606209 - DNA, 75 bp, synthetic construct
  source 1..75: mol_type = other DNA
ggcgcagatatcggttcggtgatcgtctacggtttgctggttgggctgatggcatcactgatcggtggcccactt

SEQ ID NO: 606210 - DNA, 75 bp, synthetic construct
  source 1..75: mol_type = other DNA
gacgattatggattctggaagtggattatcgcaggaagaacaacaacaactgtttaaacgctatagccaaacaag

SEQ ID NO: 606211 - DNA, 75 bp, synthetic construct
  source 1..75: mol_type = other DNA
gctctggtcgcgacacagctaaattcgcgttacatgatcgaccattactatcctaatgaactttatcattttctt

SEQ ID NO: 606212 - DNA, 75 bp, synthetic construct
  source 1..75: mol_type = other DNA
aattacctttccggcgctggtcaccaccctccacgattcaatgcgaccgctaacctcgccgaaaccagtgaatat

SEQ ID NO: 606213 - DNA, 75 bp, synthetic construct
  source 1..75: mol_type = other DNA
gcatgtatgaacaatgagagatatatgctagaaaatatctgtgaagaatatcttagcttctttaatattaaagca

SEQ ID NO: 606214 - DNA, 75 bp, synthetic construct
  source 1..75: mol_type = other DNA
acgtttcaccctctggctggatgatttcggctcaggaaatgcaggcttaatggtaagcgtcaacggagcaccgta

SEQ ID NO: 606215 - DNA, 75 bp, synthetic construct
  source 1..75: mol_type = other DNA
tttgtcattagaaagtcatccaggcataggaacgacatttacgatcacaatcccggtagaaattacccaacaagt

SEQ ID NO: 606216 - DNA, 75 bp, synthetic construct
  source 1..75: mol_type = other DNA
atgctatgggagctgatttgtctaatagccaaaacatctcaccgggcgctgagccattgattttaaacttaagta

SEQ ID NO: 606217 - DNA, 75 bp, synthetic construct
  source 1..75: mol_type = other DNA
cggaaaagtgctcacccagcgccagctccttaaccaggtgtgggggccaaacgcggtcgaacacagtcattattt

SEQ ID NO: 606218 - DNA, 75 bp, synthetic construct
  source 1..75: mol_type = other DNA
gcgccagtggagctcggtgccagtaattgtgctttccgcccgcagcgaagagagcgacaaaatcgccgcgctgga

SEQ ID NO: 606219 - DNA, 75 bp, synthetic construct
  source 1..75: mol_type = other DNA
ccgccaccgcgcccgatccgctggtgaaattttccgatgtgaccgtcgatttagccgcccgcgtgattcaccggg

SEQ ID NO: 606220 - DNA, 75 bp, synthetic construct
  source 1..75: mol_type = other DNA
atgaatcattgttgcgatgcgaatggttataccgtcgactatctgaattttgcccgaatctggctgcgttgccgc

SEQ ID NO: 606221 - DNA, 75 bp, synthetic construct
  source 1..75: mol_type = other DNA
gtaacacccagaaggtgctgatgattgcaccaatgctggcctccggttcgtctgcaccgcttgtcattcagtctg

SEQ ID NO: 606222 - DNA, 75 bp, synthetic construct
  source 1..75: mol_type = other DNA
gtccgggctggatgtggtcgccatgtcacagcgtgaaagccgtaacgagcaggaaaacgccctgcataacggcct

SEQ ID NO: 606223 - DNA, 75 bp, synthetic construct
  source 1..75: mol_type = other DNA
caaaaactggagcaggatcccgctcgtccccgccatttcattactgaaaccggtattggctatcgtttcatgctg

SEQ ID NO: 606224 - DNA, 75 bp, synthetic construct
  source 1..75: mol_type = other DNA
ctaaagtaagtcgctacgctgcttacattgacgctttaatcgcgatttctccgaaaagccaggcgaccatcgcga

SEQ ID NO: 606225 - DNA, 75 bp, synthetic construct
  source 1..75: mol_type = other DNA
attcctttgcctatcgataaggttcgtccgctggcgctggcgctgggtattgagccaagtcgtcttatgatgatg

SEQ ID NO: 606226 - DNA, 75 bp, synthetic construct
  source 1..75: mol_type = other DNA
atgcgcgtttttgaagccgaaacgctgcaacgggggctgctggaagcggcgactcgtaagccagatttgattatt

SEQ ID NO: 606227 - DNA, 75 bp, synthetic construct
  source 1..75: mol_type = other DNA
tgaccgtcgatttagccgcccgcgtgattcaccggggtgaggaagaggtgcatctcacgccgattgaattccgcc

SEQ ID NO: 606228 - DNA, 75 bp, synthetic construct
  source 1..75: mol_type = other DNA
ccggcacggatcgtgtttacccgcacggcagaaggaaagaacgtctgcgcccggcactttccagcggcaatctgc

SEQ ID NO: 606229 - DNA, 75 bp, synthetic construct
  source 1..75: mol_type = other DNA
caaaaactggaacaggatcccgctcgcccccgccatttcattactgaaaccggtattgggtatcggtttatgctt

SEQ ID NO: 606230 - DNA, 75 bp, synthetic construct
  source 1..75: mol_type = other DNA
ggcacaacaagcaacttcgaaggggttgttaccccctccacacctgtaaatacgagccaagacattaacaagaca

SEQ ID NO: 606231 - DNA, 75 bp, synthetic construct
  source 1..75: mol_type = other DNA
aataaatgtatgcaaggtatcaacgaagggaaagtccatggtgtttcattatttggaacattctattatggcgat

SEQ ID NO: 606232 - DNA, 75 bp, synthetic construct
  source 1..75: mol_type = other DNA
aacgggaagaacttgagttgctgagagttgagaacgcttatctaaaaaagctgaaagccttagctcaggaaaaat

SEQ ID NO: 606233 - DNA, 75 bp, synthetic construct
  source 1..75: mol_type = other DNA
gatagccccgcaggagcgcgacccgcagcttaaggacaaaatcacccgcgagctggcggtcatcgtgcgtcacct

SEQ ID NO: 606234 - DNA, 75 bp, synthetic construct
  source 1..75: mol_type = other DNA
tacaaggatgcgtactccacccatattcctgcggtgattctggccgtgaacaataacccgatgcgctttaccgac

SEQ ID NO: 606235 - DNA, 75 bp, synthetic construct
  source 1..75: mol_type = other DNA
cgcgtgaacgtgctgcgctgattggcttctcgctaatccgtctgcctgaccaggagaaatggagcggtgacgggg

SEQ ID NO: 606236 - DNA, 75 bp, synthetic construct
  source 1..75: mol_type = other DNA
ttaccgtcgatttagccgcccgcgtgatccatcgcggtgaggaagaggtgcatctcaccccgattgagtttcgcc

SEQ ID NO: 606237 - DNA, 75 bp, synthetic construct
  source 1..75: mol_type = other DNA
ccggatgaagtcgacgtcgccactgtggttaaagtgattgatacgtgcccgagcggcgcgctgaaataccgtcat

SEQ ID NO: 606238 - DNA, 75 bp, synthetic construct
  source 1..75: mol_type = other DNA
atggatcaggcgctactggacgggggttatcgctgttataccggcgaaaagatcgatgtctatttcaatactgcg

SEQ ID NO: 606239 - DNA, 75 bp, synthetic construct
  source 1..75: mol_type = other DNA
ggttagaagttattgaaagaatgtcattaaaaacaaaagacaaattggattcatttaaagcagttagagataagt

SEQ ID NO: 606240 - DNA, 75 bp, synthetic construct
  source 1..75: mol_type = other DNA
ttgcagggtaaagcactccaagattttgttatcgacaaaattgatgacctcaaaggtcaggacatcatcgcctta

SEQ ID NO: 606241 - DNA, 75 bp, synthetic construct
  source 1..75: mol_type = other DNA
gactggatcgtcgtcgatctgggcgatgtgattgtccatgttatgcaggaagagagccgtcgcctgtatgagctg

SEQ ID NO: 606242 - DNA, 75 bp, synthetic construct
  source 1..75: mol_type = other DNA
aaacaggttcttgctgcgtataacgagcgattcggtaaagagaaaggcgcatcacaaaaggttgttgaggccata

SEQ ID NO: 606243 - DNA, 75 bp, synthetic construct
  source 1..75: mol_type = other DNA
gcaatatgagaaacggcgaaccaatcagggaatgcagacgaacctcactttaaaagaggaaagcaatgcagactg

SEQ ID NO: 606244 - DNA, 75 bp, synthetic construct
  source 1..75: mol_type = other DNA
cagggcatacagaccaatctggtgctaagagaagaaagtaacgccgactggttaccgaaatgcgatgagccagct

SEQ ID NO: 606245 - DNA, 75 bp, synthetic construct
  source 1..75: mol_type = other DNA
accgcgcgcacactgctccagtcacagcagaattccgacgaggctctcagtattaaacgagatgctgacccgaca

SEQ ID NO: 606246 - DNA, 75 bp, synthetic construct
  source 1..75: mol_type = other DNA
cagcgttgcccataacaagtatccgggatatcagttaattattgcagcggaccgcgatctgaatggttcaggcca

SEQ ID NO: 606247 - DNA, 75 bp, synthetic construct
  source 1..75: mol_type = other DNA
agccttgcccggtctgtggcggtaaagatcgttttcgcttcgacgatcaggaaggacgcggaacatggttctgca

SEQ ID NO: 606248 - DNA, 75 bp, synthetic construct
  source 1..75: mol_type = other DNA
cgtcaggctcatggagaaaacccgcccggccaccggcaacgcctacctcacccgcaagggtttccccgaccggga

SEQ ID NO: 606249 - DNA, 75 bp, synthetic construct
  source 1..75: mol_type = other DNA
gccaccatcgagacgctggaatccccccgcgaacgcgcggcgctgattggcttctcgctgatacgtctgcctgac

SEQ ID NO: 606250 - DNA, 75 bp, synthetic construct
  source 1..75: mol_type = other DNA
tgccgccggtgttcggtgactggaatgatgcttttatacagtacggtgaggaagccacgcgcaaaactatttatg

SEQ ID NO: 606251 - DNA, 75 bp, synthetic construct
  source 1..75: mol_type = other DNA
gcagacgccaccgctgataaatcagcagactacacaaaagaatcaatggttacttacaaatctgtttctttctcc

SEQ ID NO: 606252 - DNA, 75 bp, synthetic construct
  source 1..75: mol_type = other DNA
gccactatcgaaacgctggaatcaccacgtgagcgcgcggcgttgattggcttctcactgatacgcctgcctgac

SEQ ID NO: 606253 - DNA, 75 bp, synthetic construct
  source 1..75: mol_type = other DNA
gggccgggtggcagcgggaaaagtattctggccgaaattgcgaccatgcttgccggggaagataacgccacgtcg

SEQ ID NO: 606254 - DNA, 75 bp, synthetic construct
  source 1..75: mol_type = other DNA
cggatttctggcgctggctcgaccgcgccgccggtagcaaaccggaaaagcgcgatgtgattctggccgcgctgt

SEQ ID NO: 606255 - DNA, 75 bp, synthetic construct
  source 1..75: mol_type = other DNA
gggcgtgacgactggccttcagaactggatgcaaacggctacagcgttgcctgtagcagctatgagcgtgaaaaa

SEQ ID NO: 606256 - DNA, 75 bp, synthetic construct
  source 1..75: mol_type = other DNA
aacgccttagaacgtcattatcccagagctgagcgcattattgccggggctctggataccacaccagaagcatta

SEQ ID NO: 606257 - DNA, 75 bp, synthetic construct
  source 1..75: mol_type = other DNA
gaatcaaacacagcagcgtgatgcttcccgatcccgcgcccagcaacgacttgtacgtcgtcaccagcgtcagcg

SEQ ID NO: 606258 - DNA, 75 bp, synthetic construct
  source 1..75: mol_type = other DNA
ttgacggtacgctgagttcatggtggacgaaaatcgccatcggcattttgttgtttatttttattgccttacagc

SEQ ID NO: 606259 - DNA, 75 bp, synthetic construct
  source 1..75: mol_type = other DNA
aatgcctttgagcgtcactatccaaaggcagaaagcctgatagcacaggctctgggtgttacacctgaagagatc

SEQ ID NO: 606260 - DNA, 75 bp, synthetic construct
  source 1..75: mol_type = other DNA
atatcaatttaacacaacttgatatttcaagggttagagtttctgattacgccacagctaaaatgcaaataattg

SEQ ID NO: 606261 - DNA, 75 bp, synthetic construct
  source 1..75: mol_type = other DNA
taaacatacggcttgaatttgaaaaagctgttaaacgtctttctcttgattcttttaccgaggataaggggaaag

SEQ ID NO: 606262 - DNA, 75 bp, synthetic construct
  source 1..75: mol_type = other DNA
cagcgtggattaacggtgctgtgggagaatcgtcagagttcgcctgtgacaagagtcaacattgcgcagcgataa

SEQ ID NO: 606263 - DNA, 75 bp, synthetic construct
  source 1..75: mol_type = other DNA
tttttgcgtggcgtcagctatctcgtttcggaagagtcgatcccgataaaccatcctgtttatgacacgctctca

SEQ ID NO: 606264 - DNA, 75 bp, synthetic construct
  source 1..75: mol_type = other DNA
gttttgggaatcaggtttatgccattggcggcaacgcgacgtcggcgaatctgatgggaatttccacccgcagca

SEQ ID NO: 606265 - DNA, 75 bp, synthetic construct
  source 1..75: mol_type = other DNA
ccatccgatttacgacacactctcaagccttgcgtggaaaattcccggcggtgggcgtttaagcgcgatgggatt

SEQ ID NO: 606266 - DNA, 75 bp, synthetic construct
  source 1..75: mol_type = other DNA
tttcggaagagtcgatcccgattaaccatccgatttacgacacactctcaagccttgcgtggaaaattcccggcg

SEQ ID NO: 606267 - DNA, 75 bp, synthetic construct
  source 1..75: mol_type = other DNA
tgatcaccatcggcgtttttgtgctgggctatctctactgcttgacgcagtttcccggttttgcttccacgcgag

SEQ ID NO: 606268 - DNA, 75 bp, synthetic construct
  source 1..75: mol_type = other DNA
gtaccgataaactggaactgaccagcggcaacatcgctgaccataacggtaacgtagtatccggtgtgttcaata

SEQ ID NO: 606269 - DNA, 75 bp, synthetic construct
  source 1..75: mol_type = other DNA
tagatcaactgcaagccaacggcgtggcggcggcgtgccttaactcgacgcaaacccgcgagcagcagcttgaag

SEQ ID NO: 606270 - DNA, 75 bp, synthetic construct
  source 1..75: mol_type = other DNA
gcgcttgatgaaatcacaaagaaaaaacgcccggcggcaaccgagcgttctgaacaaatccagatggaattctga

SEQ ID NO: 606271 - DNA, 75 bp, synthetic construct
  source 1..75: mol_type = other DNA
ttatgccgtgtgccgagcaaaaactgaccatctgcacaccatacttcaacctaccggccatcctcgtgcgcaata

SEQ ID NO: 606272 - DNA, 75 bp, synthetic construct
  source 1..75: mol_type = other DNA
ctaccgcgatctgcaaagtattgccgattatccggtaaaagttcgcaaactcatccgccgtttgcgccgcatccg

SEQ ID NO: 606273 - DNA, 75 bp, synthetic construct
  source 1..75: mol_type = other DNA
cggcaacgagctgatctacgtcaacgacaaaaacagcaacgcgaccttctctgctgctaacaaagctgacctggg

SEQ ID NO: 606274 - DNA, 75 bp, synthetic construct
  source 1..75: mol_type = other DNA
gcgcttgatggaatcacaaagaaaaaacgcccggcggcaaccgagcgttctgaacaaatccagatggagttctga

SEQ ID NO: 606275 - DNA, 75 bp, synthetic construct
  source 1..75: mol_type = other DNA
tgtcgcagcgcgatatcgatcgcgctgaaacggatttacttatcaacctgtcagttctgacgcaaaggggactgg

SEQ ID NO: 606276 - DNA, 75 bp, synthetic construct
  source 1..75: mol_type = other DNA
ccgacggtgatttacgttttttcctgtttggtattttgttaatattaatatttatatcattcatcgtgttctcat

SEQ ID NO: 606277 - DNA, 75 bp, synthetic construct
  source 1..75: mol_type = other DNA
ttttgtgatgaatatgacattctcacataccatcagccccagcgccaaatccagcgatgcgttgatcgccactat

SEQ ID NO: 606278 - DNA, 75 bp, synthetic construct
  source 1..75: mol_type = other DNA
cggtatgtgaggcaagggctgttatcaaaaaaacagcccgaaaacacaaggaactgtcggatttatattgcgcgt

SEQ ID NO: 606279 - DNA, 75 bp, synthetic construct
  source 1..75: mol_type = other DNA
caaattgatatgcaattctgagggaattactggatcaatccacaggagtcattatgacaaatacagcaaaaatac

SEQ ID NO: 606280 - DNA, 75 bp, synthetic construct
  source 1..75: mol_type = other DNA
gtttgcagtattacgtcaatactgaccagttagtggtccggttatggaaagatgacgacaatacctatcatctga

SEQ ID NO: 606281 - DNA, 75 bp, synthetic construct
  source 1..75: mol_type = other DNA
atgcactcctggaaaaagaaacttgtcgtatcacaattagcattggcttgcactttggcaatcgcctctcaggca

SEQ ID NO: 606282 - DNA, 75 bp, synthetic construct
  source 1..75: mol_type = other DNA
tgcggcaatgtctgcgcacttaacggttgataccaatgatgatggtgtgccagatgcttacggtcctgtttacaa

SEQ ID NO: 606283 - DNA, 75 bp, synthetic construct
  source 1..75: mol_type = other DNA
cgaaagcaaccgcttcgtgctgaatgctgacctggtcaacgatcgtacaaacgataccactaaagctaactacgg

SEQ ID NO: 606284 - DNA, 75 bp, synthetic construct
  source 1..75: mol_type = other DNA
tggcgggataaaggcattaacctgcgagtggcggtaaacatttctgcacgtcagctcgccgatcaaaccattttc

SEQ ID NO: 606285 - DNA, 75 bp, synthetic construct
  source 1..75: mol_type = other DNA
gtcactgcttacggtaacattgattacaacgccggtaccgaaaagactgcaacgcttatcgatatcaccgcgaac

SEQ ID NO: 606286 - DNA, 75 bp, synthetic construct
  source 1..75: mol_type = other DNA
tataccgatgctaactacctcggtggtggtgacgtagatcaagactggtccgcgaatgtgggtgttaaatatacc

SEQ ID NO: 606287 - DNA, 75 bp, synthetic construct
  source 1..75: mol_type = other DNA
gtgatggccagccccaacggtaacctggatgaagtgcatgaaggtctgctgctgcaggcagtcaaagcctcctgg

SEQ ID NO: 606288 - DNA, 75 bp, synthetic construct
  source 1..75: mol_type = other DNA
ttagcatcagatttcccatttactagagaaactcttggtagttatgaaaagaaagctttttttgattctaataac

SEQ ID NO: 606289 - DNA, 75 bp, synthetic construct
  source 1..75: mol_type = other DNA
attgacgttgtttcatgcgggaaaatgggaggtattccgcagatgactcttaaagaatggctgaagaatacatga

SEQ ID NO: 606290 - DNA, 75 bp, synthetic construct
  source 1..75: mol_type = other DNA
caggttcatggtctgatgaaggaacagaaggttggtttggtaacactggcaatgccagcgattacaacggcattg

SEQ ID NO: 606291 - DNA, 75 bp, synthetic construct
  source 1..75: mol_type = other DNA
ggtaacgaagtttaccagagcggcctgttcaatgtgaccctgaacaccggttcacagtgggacaccactaaaacg

SEQ ID NO: 606292 - DNA, 75 bp, synthetic construct
  source 1..75: mol_type = other DNA
aaaagcgtttcctgaacgtccagctgctgcagaacagcatggacgcgccgaaaatcatcgggtctttcccgtgta

SEQ ID NO: 606293 - DNA, 75 bp, synthetic construct
  source 1..75: mol_type = other DNA
tacatttccatattaaccatgattttaattaccagcggtgcatatacaggtacactaacaggcgttgttgataca

SEQ ID NO: 606294 - DNA, 75 bp, synthetic construct
  source 1..75: mol_type = other DNA
gcgcctgcgctcaatgtcagcgaagaagaggtgacgaccggactggatcgctttgcagctgcttgcgaacacttt

SEQ ID NO: 606295 - DNA, 75 bp, synthetic construct
  source 1..75: mol_type = other DNA
gagcgaaaaaccgctgtaccgccatcgaagcgggcacatactggcaaagtggccgtgaaagaaagcaatcaacga

SEQ ID NO: 606296 - DNA, 75 bp, synthetic construct
  source 1..75: mol_type = other DNA
ctgtttagttctgaaaaagaaagactaggagaattgccagcttttttagactctcgtacctattgggagtatcag

SEQ ID NO: 606297 - DNA, 75 bp, synthetic construct
  source 1..75: mol_type = other DNA
taatacgtcttattgatggcgttcaacatataaggagattaggaatttacatcaaagcattcagaagaggttatt

SEQ ID NO: 606298 - DNA, 75 bp, synthetic construct
  source 1..75: mol_type = other DNA
tacctgatggcctaaaattagttggcattggtttcgggtgtagatttgtatctgacgcaaaaggagcgatttatt

SEQ ID NO: 606299 - DNA, 75 bp, synthetic construct
  source 1..75: mol_type = other DNA
agagtgcgccagcgtgatgaccgttggcactcacggcaccacctatggcggcaatccgctggcctcggcggtggc

SEQ ID NO: 606300 - DNA, 75 bp, synthetic construct
  source 1..75: mol_type = other DNA
gaacttgaaggtgagcactacgaaattttcgtagttcaaaaatcaaacaagacaacttctgaaaaagttgttatg

SEQ ID NO: 606301 - DNA, 75 bp, synthetic construct
  source 1..75: mol_type = other DNA
ccgaccgcagcggcggcgtgtcacgccggcgggtgattattcacttcccggaacagatagccccgcaggagcgcg

SEQ ID NO: 606302 - DNA, 75 bp, synthetic construct
  source 1..75: mol_type = other DNA
tgccgccggtgttcggtgactggaatgatgcgtttatacagtacggcgaggaggccacgcgcaagactatttatg

SEQ ID NO: 606303 - DNA, 75 bp, synthetic construct
  source 1..75: mol_type = other DNA
accagaaaaaaatgatgaattacctgcctttttagactctcgcccctattgggaatatcaacaatgggaagaaca

SEQ ID NO: 606304 - DNA, 75 bp, synthetic construct
  source 1..75: mol_type = other DNA
ggccattccatccgcaaagattatgggatacctgtcaccgttttatgggcatgggcgtttatcgcagtaaaggtt

SEQ ID NO: 606305 - DNA, 75 bp, synthetic construct
  source 1..75: mol_type = other DNA
ggcgatcccggactacaattttgaccgtgttgagttactcatcagtgaactggaagcacttgcaggaaacatgga

SEQ ID NO: 606306 - DNA, 75 bp, synthetic construct
  source 1..75: mol_type = other DNA
cgcgaactggtcgctgaaggcggtgtggatgcgcagattaatcgtagtcgccgcgctcctaaccttaagaaccgt

SEQ ID NO: 606307 - DNA, 75 bp, synthetic construct
  source 1..75: mol_type = other DNA
cggcgggacaattcgcgacatggcgctggatcacggcccggtattttgggtgaaagatcccaccgatctggtcgt

SEQ ID NO: 606308 - DNA, 75 bp, synthetic construct
  source 1..75: mol_type = other DNA
gaaataacaaaaggagagttttttcatagcatttataaatcgcatatcaaatatgaatatgatgttctcgataga

SEQ ID NO: 606309 - DNA, 75 bp, synthetic construct
  source 1..75: mol_type = other DNA
atgatgctggtgaatgggtgattctttgcccgcgcgtggcgaaaactcatccaaaggtcattagctggagttacg

SEQ ID NO: 606310 - DNA, 75 bp, synthetic construct
  source 1..75: mol_type = other DNA
cgaggcggaaaacgccgatgacgtaaaagaaagctgctgctgtttcggcgtcggtaacaaactactgaatctctt

SEQ ID NO: 606311 - DNA, 75 bp, synthetic construct
  source 1..75: mol_type = other DNA
cgttcgatgcggtacgtgtcgcgctcaatctggtagcaaatatgcagctcctggaaatgactgcgcgatttttta

SEQ ID NO: 606312 - DNA, 75 bp, synthetic construct
  source 1..75: mol_type = other DNA
agtatgatgggcatggtcgtgacgctattgattcgactggcggctattcgttggcatcttaagctaccgacgttt

SEQ ID NO: 606313 - DNA, 75 bp, synthetic construct
  source 1..75: mol_type = other DNA
gctgctatcgcccgatctcttggcccatgtttcgccgctcggatgggaacacatcaatctcaccggagaatatcg

SEQ ID NO: 606314 - DNA, 75 bp, synthetic construct
  source 1..75: mol_type = other DNA
tgaagttggtcgtattgaacggacccttttcattattgagtggatcctggatacggacatgcagcggcgtgctca

SEQ ID NO: 606315 - DNA, 75 bp, synthetic construct
  source 1..75: mol_type = other DNA
acagaaaggcgcgactcacgatcgctcttaagcggctggcccgggctgcccgtaacggcactattccgcacggta

SEQ ID NO: 606316 - DNA, 75 bp, synthetic construct
  source 1..75: mol_type = other DNA
atgatgctggtgaatgggtaattctgtgcccgcgcgtggcgaaaacccatccgaaaatcgttaaatggagctatg

SEQ ID NO: 606317 - DNA, 75 bp, synthetic construct
  source 1..75: mol_type = other DNA
ctcggcgaggtcgttgcaaaccagaaacgcgatggaaagctgctatcgcccgatctcttggcccatgtttcgccg

SEQ ID NO: 606318 - DNA, 75 bp, synthetic construct
  source 1..75: mol_type = other DNA
gaaacccacgaccggatcgtcggccgtctctaccgtgcttcggagcgtatttgccatgcaaaggtcgcagacgaa

SEQ ID NO: 606319 - DNA, 75 bp, synthetic construct
  source 1..75: mol_type = other DNA
ttctgttcctgctttttatctcagtgtcagtcagggcggaaaaaccatggtattttgatgcaattggtctgacag

SEQ ID NO: 606320 - DNA, 75 bp, synthetic construct
  source 1..75: mol_type = other DNA
gggaagttgatgtcgttttgggggattgtcttgttacttacataaataatattaacggggtaacggatacccaac

SEQ ID NO: 606321 - DNA, 75 bp, synthetic construct
  source 1..75: mol_type = other DNA
cagtgcaggagatgttaattgacgctgcaaccaaactttccacatcaattcagagcggagaacgttctatcaaat

SEQ ID NO: 606322 - DNA, 75 bp, synthetic construct
  source 1..75: mol_type = other DNA
tctcatatggagtttaacaaaaatgatagtatagacatgatggtcatttctcattttgatgatgaccatgttaat

SEQ ID NO: 606323 - DNA, 75 bp, synthetic construct
  source 1..75: mol_type = other DNA
cgaactggatgactttgccgaattacaaaaagaggtctttggtccggtgctgcatgtggtgcgttacaaccgtaa

SEQ ID NO: 606324 - DNA, 75 bp, synthetic construct
  source 1..75: mol_type = other DNA
cagcaggccgtctataagtggcttcacaacaaagcaaaggtatcccctgaacatgtcggcagcattgttacggct

SEQ ID NO: 606325 - DNA, 75 bp, synthetic construct
  source 1..75: mol_type = other DNA
tacccggtacgcaatgaacaatttgcccatgcgctcggtcatgcgctgcatcgcccggctattttgcgcgtcccc

SEQ ID NO: 606326 - DNA, 75 bp, synthetic construct
  source 1..75: mol_type = other DNA
aatggttcgggtagaagtgtagaaggtagtaacactgatatacaagagatcagtactatttgtaaaaatccgtca

SEQ ID NO: 606327 - DNA, 75 bp, synthetic construct
  source 1..75: mol_type = other DNA
aatggttcgggtaaaagtgtagaaggtagtaacactgatatacaacaaatcagtactatttgtaaaaaatcgtca

SEQ ID NO: 606328 - DNA, 75 bp, synthetic construct
  source 1..75: mol_type = other DNA
ccaatttatcaatataccaatggacgattaatcaagccgtggctgaaaggttatcccattaataaccctgaagat

SEQ ID NO: 606329 - DNA, 75 bp, synthetic construct
  source 1..75: mol_type = other DNA
gcgaccgccattcggttgttaatgggcgaatcttcagtactggtgttaggtggacaacgcgcactgcctaaaagg

SEQ ID NO: 606330 - DNA, 75 bp, synthetic construct
  source 1..75: mol_type = other DNA
tgggcgaatcttcagtactggtattaggtggacaacgcgcgctgcctaaacagctggaagaagcgggttttgcgt

SEQ ID NO: 606331 - DNA, 75 bp, synthetic construct
  source 1..75: mol_type = other DNA
aggggatattaatctgacaactcctgttctagatgattttgagtcccatctgggaactgctcgatggatgaattg

SEQ ID NO: 606332 - DNA, 75 bp, synthetic construct
  source 1..75: mol_type = other DNA
caatcggttagcgcactacatcaaggtgttgcagcgtgaacaactggggtcatggaaagaaaggagcgacttaga

SEQ ID NO: 606333 - DNA, 75 bp, synthetic construct
  source 1..75: mol_type = other DNA
aacccggctggtaccaggttgcgctaagcgtgaggcctcattttaaatttatgggggcaaattttgagctttccc

SEQ ID NO: 606334 - DNA, 75 bp, synthetic construct
  source 1..75: mol_type = other DNA
gagatcaacagcaaactggcgcaacccgttgaggcgattaaccgtgtggaacagcattttagccgtgaggcgctg

SEQ ID NO: 606335 - DNA, 75 bp, synthetic construct
  source 1..75: mol_type = other DNA
agcgataatattgggtatatatacttcattttatgtaggaaaaactcattttatttatgtgttattattttggtt

SEQ ID NO: 606336 - DNA, 75 bp, synthetic construct
  source 1..75: mol_type = other DNA
atctaattcttgctaactcaagtaggtttattatacctatactgtttcttccattatctgctagattattaagca

SEQ ID NO: 606337 - DNA, 75 bp, synthetic construct
  source 1..75: mol_type = other DNA
gtgaacgtgctgaaaagtctggcgcgtaaaaatggatcttctactgatgaaaaagaagacgacctggatttggat

SEQ ID NO: 606338 - DNA, 75 bp, synthetic construct
  source 1..75: mol_type = other DNA
tgccgctcgcacaacaacaggctgacgcactactgaacgtgaaagatttgcgtgtcacctttagtaccccggatg

SEQ ID NO: 606339 - DNA, 75 bp, synthetic construct
  source 1..75: mol_type = other DNA
tttgctcaatgcggtgccgcgtctcgatgcggaaggtgaaaccatgttgaccattcccggtaatccgccaaacct

SEQ ID NO: 606340 - DNA, 75 bp, synthetic construct
  source 1..75: mol_type = other DNA
gtttgaagagtcggtgcggatgctcgatgcggtaaaaatgccggaagcgcgtaaacgcatgaaaatgtacccgca

SEQ ID NO: 606341 - DNA, 75 bp, synthetic construct
  source 1..75: mol_type = other DNA
tttgagaacgtttatacttttagaacagatacggatgaaaataatgacgtagatagcaatagccagccatctacg

SEQ ID NO: 606342 - DNA, 75 bp, synthetic construct
  source 1..75: mol_type = other DNA
agaaaagaaaacatcaaatccatcaagaaagatgttgattatgttcatatgttcacgaaaaacttccagcagctc

SEQ ID NO: 606343 - DNA, 75 bp, synthetic construct
  source 1..75: mol_type = other DNA
acgacaacgtatttttttagatctcttggacgaactgccagaaagcgaagcggataacctattaaaaactcttga

SEQ ID NO: 606344 - DNA, 75 bp, synthetic construct
  source 1..75: mol_type = other DNA
aaggagttataaatagattctcattaacaacaaaaaaaagaaaggctgtagcattgtcatttcaaaaacccactg

SEQ ID NO: 606345 - DNA, 75 bp, synthetic construct
  source 1..75: mol_type = other DNA
agtgttattcatatttcactggtcggtaatgactccaacttattgatagtgttttatgttcagataatgcccgat

SEQ ID NO: 606346 - DNA, 75 bp, synthetic construct
  source 1..75: mol_type = other DNA
aaacgaaaatttgcgctggcgctcatgtccgggaaaaacaaaacagcgtcagccattgccgccggttattcggcg

SEQ ID NO: 606347 - DNA, 75 bp, synthetic construct
  source 1..75: mol_type = other DNA
ccgatccggtgaaagcgatggggcgtcttctggtggagaacattaataccgaccccaggctggcgctggatgcgg

SEQ ID NO: 606348 - DNA, 75 bp, synthetic construct
  source 1..75: mol_type = other DNA
aaatttgtgattatgccaatatatatgacacaaccgttcaggtacatgtttgtggcgggcctgtttcaacagtag

SEQ ID NO: 606349 - DNA, 75 bp, synthetic construct
  source 1..75: mol_type = other DNA
gcgcgcaccgtgcagttggcagaaaaaaacatcactctacatgttacgcccaccgaggttaatgttgctgctgaa

SEQ ID NO: 606350 - DNA, 75 bp, synthetic construct
  source 1..75: mol_type = other DNA
tgccaaagagtttgcccggtggcaacaattacttttcaacacatcaatgacatccacattgaaattattaccagg

SEQ ID NO: 606351 - DNA, 75 bp, synthetic construct
  source 1..75: mol_type = other DNA
gtgatgccgcgaaaaaagcggctaaccgttttgcggtgccaccacctccccggctggtggtgaataaccagaatg

SEQ ID NO: 606352 - DNA, 75 bp, synthetic construct
  source 1..75: mol_type = other DNA
atgtctcctggtattgaatatatggaggatggtcttcccgatccggtgaaagccatggggcggatcctggtggaa

SEQ ID NO: 606353 - DNA, 75 bp, synthetic construct
  source 1..75: mol_type = other DNA
cccgtgctctcttttcaggaggttgggaataatatcgaacttaaagtattaggaacggtaaatgatttcagagca

SEQ ID NO: 606354 - DNA, 75 bp, synthetic construct
  source 1..75: mol_type = other DNA
aggatggtcttcccgatccggtgaaagctatggggcagatcctggtggaaaacctgataattgacccgaaactgg

SEQ ID NO: 606355 - DNA, 75 bp, synthetic construct
  source 1..75: mol_type = other DNA
tatgaaagagctggaagcagcgattgaatcgggacgctttcatcatgacggcaatcccatcatgacctggtgtat

SEQ ID NO: 606356 - DNA, 75 bp, synthetic construct
  source 1..75: mol_type = other DNA
gcccgtaagcagggcgagacggtggaggtggatgaggttcctgtttaccggcagaaaaagacgcagacggaggag

SEQ ID NO: 606357 - DNA, 75 bp, synthetic construct
  source 1..75: mol_type = other DNA
gtgacgcggcgaaaaaagcggctaaccgttttgcggtgccaccaccaccccgactggtggtgaataatgataatg

SEQ ID NO: 606358 - DNA, 75 bp, synthetic construct
  source 1..75: mol_type = other DNA
tagtttcttcatccggtgatgcatttagttacaagggatggtttatcactcattttaaatatgaagagcaggctt

SEQ ID NO: 606359 - DNA, 75 bp, synthetic construct
  source 1..75: mol_type = other DNA
tttagttctgatatttatactttacataccacagggaaacccgaaaaaggagttataaatagattctcattaaca

SEQ ID NO: 606360 - DNA, 75 bp, synthetic construct
  source 1..75: mol_type = other DNA
aagatacgctccgcaagcagcttactccggcgcttcgtgatctgctgcaggcaaaacaccgtacacaaaaggcgg

SEQ ID NO: 606361 - DNA, 75 bp, synthetic construct
  source 1..75: mol_type = other DNA
atgaaaagttttttaatgtgtttgaagtatataaatttattttttttgatattaatgttgttgcataattcgtca

SEQ ID NO: 606362 - DNA, 75 bp, synthetic construct
  source 1..75: mol_type = other DNA
ggctacggggaattatgtggtcgccgcgatgccgattatgcggggcgggaagttagaagccggtagcgtcaaatt

SEQ ID NO: 606363 - DNA, 75 bp, synthetic construct
  source 1..75: mol_type = other DNA
ggttcgtgtttctattcgtacatcgccccatctacttccgccgtgcgagcaaccactgctttcgataagcaataa

SEQ ID NO: 606364 - DNA, 75 bp, synthetic construct
  source 1..75: mol_type = other DNA
ctataaaatgacctatatgcagcggggaaattatgtggcggttatcaaccctctcttctggagtgaagtgatgtc

SEQ ID NO: 606365 - DNA, 75 bp, synthetic construct
  source 1..75: mol_type = other DNA
ctgtttacctctttctcagggagtttagtctccaggatttccggggcggttcacagcgccatcttgatgacctga

SEQ ID NO: 606366 - DNA, 75 bp, synthetic construct
  source 1..75: mol_type = other DNA
aacgtccttgtcgcggcagatgccgacgcggtcgaagtacagatggcatgggatttgagcacatcgacggctgaa

SEQ ID NO: 606367 - DNA, 75 bp, synthetic construct
  source 1..75: mol_type = other DNA
atgtggtatttactctggttcgtcggcattttgttgatgtgttcactctccaccgtagtgttagtatggctggag

SEQ ID NO: 606368 - DNA, 75 bp, synthetic construct
  source 1..75: mol_type = other DNA
tgctggcgttgccgggcattgtctttgtagtacttcttcccatcattctgtcgctatggattgcttttctttggg

SEQ ID NO: 606369 - DNA, 75 bp, synthetic construct
  source 1..75: mol_type = other DNA
atttaaccgtacaaagaaatggctatttatatgcgacagtttattcgacaaaacgcccaattgcagccattgttg

SEQ ID NO: 606370 - DNA, 75 bp, synthetic construct
  source 1..75: mol_type = other DNA
tccccgtccgacgcggccgcaaaggtggctgccgtgaccggcagcctgccaccggctgacccggcagtgacggcc

SEQ ID NO: 606371 - DNA, 75 bp, synthetic construct
  source 1..75: mol_type = other DNA
tccgtttgataccatgagcgaagccgaatttaccgccatgagcgccagcgacaaggccttgcgggtgcatgagca

SEQ ID NO: 606372 - DNA, 75 bp, synthetic construct
  source 1..75: mol_type = other DNA
tcaaacgaaccctgaaaggggggcaggtcaaagggacatgtcatgtcatcgaagggaaaaaacaggccggaaaac

SEQ ID NO: 606373 - DNA, 75 bp, synthetic construct
  source 1..75: mol_type = other DNA
cacgtgagcgcgcggcgctgattggcttctcactaatacgcctgcctgaccaggagaaatggagcggtgacggtg

SEQ ID NO: 606374 - DNA, 75 bp, synthetic construct
  source 1..75: mol_type = other DNA
ccatgatgctgaaagagtacggcctgaattatgagaagcggcacaccaagcaggggatacaaaccaatctgtcgc

SEQ ID NO: 606375 - DNA, 75 bp, synthetic construct
  source 1..75: mol_type = other DNA
tatgcagaaattcagcgacccaatgactgcacgcgcactgctccagtcgcagcagaactccgacgaggcacttag

SEQ ID NO: 606376 - DNA, 75 bp, synthetic construct
  source 1..75: mol_type = other DNA
ttatggtgctggcgaaccgttatgactggcagctctttctggaagtgactggccctggtggaagtggcaaaagta

SEQ ID NO: 606377 - DNA, 75 bp, synthetic construct
  source 1..75: mol_type = other DNA
cttacgatgtttggcaaagggttgccagtcatgctgaaggagtacgggctacattatgagaaacggcgaactaat

SEQ ID NO: 606378 - DNA, 75 bp, synthetic construct
  source 1..75: mol_type = other DNA
agactctggcaacccatgcgccgaacttctggaaatggctccgccgctcagtggcggataatgaccgaaaagcag

SEQ ID NO: 606379 - DNA, 75 bp, synthetic construct
  source 1..75: mol_type = other DNA
acaggagaagccgtcatggtggcattttcgtcggtcaactttctttctctgaccagcgttgcccataacaagtat

SEQ ID NO: 606380 - DNA, 75 bp, synthetic construct
  source 1..75: mol_type = other DNA
ggatacatggactgacacatggtctgtctgtagttaattccgaagtcagggcgttaaccgccgataccgatagcg

SEQ ID NO: 606381 - DNA, 75 bp, synthetic construct
  source 1..75: mol_type = other DNA
gaaggacgtggaacatggttctgcaaccagtgcggggctggggacggtttagcgcttgtcagcaaggtactgaat

SEQ ID NO: 606382 - DNA, 75 bp, synthetic construct
  source 1..75: mol_type = other DNA
caataacccgatgcgctttaccgaccgcagcggcggagtttcccgacgccgggtgatcctgcatttcccggaaca

SEQ ID NO: 606383 - DNA, 75 bp, synthetic construct
  source 1..75: mol_type = other DNA
gaattatgagaagcggcacaccaagcaggggatacaaaccaatctgtcgctgaaagaggaaagctacggcgactg

SEQ ID NO: 606384 - DNA, 75 bp, synthetic construct
  source 1..75: mol_type = other DNA
ttctggccgaaatcgcgaccctgctcgccggagaggataacgccacgtcggccgacatcgacacgctggaagacc

SEQ ID NO: 606385 - DNA, 75 bp, synthetic construct
  source 1..75: mol_type = other DNA
acgctatccggccaccggcgcaaagtccgtttgataccatgagcgaggcagaatttaccgccatgagcgccagcg

SEQ ID NO: 606386 - DNA, 75 bp, synthetic construct
  source 1..75: mol_type = other DNA
accggaaagcggcggcagagcttaccgtaaaactgatggagaaaacccacacgaccactggcaacgcttatctga

SEQ ID NO: 606387 - DNA, 75 bp, synthetic construct
  source 1..75: mol_type = other DNA
ggcctcttcagcccgcaccgccgggaaaactggctgcgcaccgtcagcgacgtggactatacccgcccggtggag

SEQ ID NO: 606388 - DNA, 75 bp, synthetic construct
  source 1..75: mol_type = other DNA
tatgggtaacgccagcatcgtcccgcgcaattaccgtaaatatctttatcacgcgtatctggcctatatggaggc

SEQ ID NO: 606389 - DNA, 75 bp, synthetic construct
  source 1..75: mol_type = other DNA
agtgtggcgcgggtgacgggcttaagctggtagaaaaagtgtttggcgtgactccctcagaggccgccgggaagg

SEQ ID NO: 606390 - DNA, 75 bp, synthetic construct
  source 1..75: mol_type = other DNA
agctggccgtcatcgtgcgccagctcatgcagacgttcagcgacccgatgaccgcgcgcacactgctccagtcgc

SEQ ID NO: 606391 - DNA, 75 bp, synthetic construct
  source 1..75: mol_type = other DNA
gacggaaaaaaagaggcgggaaagcggctgtggatagcggagggctacgcgaccgcgctcaccgtgcatcacctg

SEQ ID NO: 606392 - DNA, 75 bp, synthetic construct
  source 1..75: mol_type = other DNA
tgacgataccggcgcactggtaaaccttcagcttatcagttctgacggtctcaaacgcaccctgaagggcggtca

SEQ ID NO: 606393 - DNA, 75 bp, synthetic construct
  source 1..75: mol_type = other DNA
ccgtttccgctttgacgataaagaggggcgaggcacatggttctgcaaccagtgcggtgcgggtgacgggcttaa

SEQ ID NO: 606394 - DNA, 75 bp, synthetic construct
  source 1..75: mol_type = other DNA
ctgattattccgcagcaggatacaccggcgcgccgtctgattggctttcgcaacggggtactcgatacccaaagc

SEQ ID NO: 606395 - DNA, 75 bp, synthetic construct
  source 1..75: mol_type = other DNA
gcataaggtcaaacgtcacgcttcacgacgactcagaagactggatgcctatgtggaatgatacatctcataaca

SEQ ID NO: 606396 - DNA, 75 bp, synthetic construct
  source 1..75: mol_type = other DNA
cgttcttaggccgcgacgttgccgtattttacgctatcgcttgccctaatgcgaaacctgaagaaggcgcttata

SEQ ID NO: 606397 - DNA, 75 bp, synthetic construct
  source 1..75: mol_type = other DNA
gtttctggcgctgcaactggccgggcaaattctctcgttcaatatggggatgagcatggcggtgatgaacgaccc

SEQ ID NO: 606398 - DNA, 75 bp, synthetic construct
  source 1..75: mol_type = other DNA
tggaatcgcgcggacggtatcaggaagccgataatgtcatgcggaaaattgaagaagggatcattcgccagacgg

SEQ ID NO: 606399 - DNA, 75 bp, synthetic construct
  source 1..75: mol_type = other DNA
gccaacaatattcatgacccaggggattaatttaaaagactcgattgttttaaataccatgagtatgtttggcgc

SEQ ID NO: 606400 - DNA, 75 bp, synthetic construct
  source 1..75: mol_type = other DNA
tcaacatcaaccccaacgaggccagcaaaaccacgaagaaaattaaattcatggtgacaagcccggactttgtcg

SEQ ID NO: 606401 - DNA, 75 bp, synthetic construct
  source 1..75: mol_type = other DNA
tttagctgggtgctggcgtccgcatcgctgctggcgctgccgaccacttttatcatgctgattgtgcagggctgc

SEQ ID NO: 606402 - DNA, 75 bp, synthetic construct
  source 1..75: mol_type = other DNA
gtggagcaaattttatggggcatgttattcgggctgatgtttcagtttctgtttctggcgctgcaactggccggg

SEQ ID NO: 606403 - DNA, 75 bp, synthetic construct
  source 1..75: mol_type = other DNA
gcagacgctaccgctgataaatccgccgactataccaaagagtcgctggttacttataaatcagtgagcttctct

SEQ ID NO: 606404 - DNA, 75 bp, synthetic construct
  source 1..75: mol_type = other DNA
ggcggtggatattgtcgatggtcacatttgcgccgaacaccggatgtatggcgggttagcgttcgctcaggaaaa

SEQ ID NO: 606405 - DNA, 75 bp, synthetic construct
  source 1..75: mol_type = other DNA
cggacagcaaaccagcgatggtggcggaagattacgctaaccgtctgcgtaaaaacctgaaaaagttcgagaagt

SEQ ID NO: 606406 - DNA, 75 bp, synthetic construct
  source 1..75: mol_type = other DNA
cccgtgggctggaagagctgttaaaaactgaactggaaaatctgggggccgttgaatgccaggtggttcagggtg

SEQ ID NO: 606407 - DNA, 75 bp, synthetic construct
  source 1..75: mol_type = other DNA
cgtcagaccactggcaatgcctatctgacgagtaaagggcttactgcactgccttgccgggaattaaccgccatg

SEQ ID NO: 606408 - DNA, 75 bp, synthetic construct
  source 1..75: mol_type = other DNA
agcgcaaacccgcgcccgtaaaggcctggctgagtatagctcccatttttacggttccgacagcgacgcgcgggt

SEQ ID NO: 606409 - DNA, 75 bp, synthetic construct
  source 1..75: mol_type = other DNA
ttaccgcctgtatgacgccgatctaccggaatataacgttgccgttgaccgttatgccgactgggtggtggtgca

SEQ ID NO: 606410 - DNA, 75 bp, synthetic construct
  source 1..75: mol_type = other DNA
aagggcagcggttactggcagaaagtggtctgacggtggaagccgtcgattctctggatgatgccgcgaaacgca

SEQ ID NO: 606411 - DNA, 75 bp, synthetic construct
  source 1..75: mol_type = other DNA
caccgtatcgcccgtcgtatgctcggtcagatgagtaaaggcaaagatttcctcaacctgttctcctataccggt

SEQ ID NO: 606412 - DNA, 75 bp, synthetic construct
  source 1..75: mol_type = other DNA
ccagaatacaacgtcgctgttgaccgctacgccgactgggtggtcgtgcaggagtacgcaccgccgaagaccatc

SEQ ID NO: 606413 - DNA, 75 bp, synthetic construct
  source 1..75: mol_type = other DNA
agcgcaaactcgcgcccgtaaaggtctggctgagtacaattctcatttttatggttccgatagcgatgcttgggt

SEQ ID NO: 606414 - DNA, 75 bp, synthetic construct
  source 1..75: mol_type = other DNA
gccgtcgaaagagagttgggcgttcactgcgttaggcgttctcggtaacgatgacaccgcccgcaaactgacgcc

SEQ ID NO: 606415 - DNA, 75 bp, synthetic construct
  source 1..75: mol_type = other DNA
atgattgccattctaaacaacgctaaagggagggttggtgtgagcagaaaagatactaaagaattgctaactatc

SEQ ID NO: 606416 - DNA, 75 bp, synthetic construct
  source 1..75: mol_type = other DNA
actaacaggtatccaggtgaagcaaggagagcaagaaaggcaaatccatattatcttttatttcctaatggagac

SEQ ID NO: 606417 - DNA, 75 bp, synthetic construct
  source 1..75: mol_type = other DNA
atttttggtgagatattgatcttctcattcggaattttcttgagtgttgttctctgctcattatgcaagctactg

SEQ ID NO: 606418 - DNA, 75 bp, synthetic construct
  source 1..75: mol_type = other DNA
ggaatcaatcttgatattcaatgatatcattgtcatgagcggtaatgaaaaagtgtgcacgtattttttaaggtg

SEQ ID NO: 606419 - DNA, 75 bp, synthetic construct
  source 1..75: mol_type = other DNA
tgtgccgatgcgattcgggctttacgcggcggcgggcaacccgcccaggcgctggaaattctcaccccacgagaa

SEQ ID NO: 606420 - DNA, 75 bp, synthetic construct
  source 1..75: mol_type = other DNA
accatgtggtggtgcgctctggtttcgcacagttactctctctggaagacgatctggaggtcattggtcagtaca

SEQ ID NO: 606421 - DNA, 75 bp, synthetic construct
  source 1..75: mol_type = other DNA
aacagttacgtactgcgtatgcaggcggcctttgccactatggactggctctccagccgtaacgagtatcttaat

SEQ ID NO: 606422 - DNA, 75 bp, synthetic construct
  source 1..75: mol_type = other DNA
gcgacagcaggagcagcgactgggtattgaactaccacagcgtgtctatgcctttacctgtagtcagtccagcgc

SEQ ID NO: 606423 - DNA, 75 bp, synthetic construct
  source 1..75: mol_type = other DNA
gtcggaaaccaccgtgggcggtggcggtatcattgagaagatccaacagatttaccgtgaagatccgcgcagttt

SEQ ID NO: 606424 - DNA, 75 bp, synthetic construct
  source 1..75: mol_type = other DNA
ttttgttactataatagtactgagcatagtatttaatctcttatgcattctgtcgaaaaggatattaatatcacg

SEQ ID NO: 606425 - DNA, 75 bp, synthetic construct
  source 1..75: mol_type = other DNA
gggttatctatgctcttattgttatctcattcttaaaatcaataataaccgacctaataaaagaaaaaaataaaa

SEQ ID NO: 606426 - DNA, 75 bp, synthetic construct
  source 1..75: mol_type = other DNA
catataccatcaaacaatacaatagaaataggctataatataatgaatgaaaatctggtcattggaaaaggaata

SEQ ID NO: 606427 - DNA, 75 bp, synthetic construct
  source 1..75: mol_type = other DNA
ctgtactggttggatgcatgacgctgagcgctaacctgtgtgccgaagcgcagccggtgcaggcaacgctggccg

SEQ ID NO: 606428 - DNA, 75 bp, synthetic construct
  source 1..75: mol_type = other DNA
ttgcactggctccaagtttcagtgcggtctatgtcgccgtcctggtaagtgttttgtttggcccttgctgggcga

SEQ ID NO: 606429 - DNA, 75 bp, synthetic construct
  source 1..75: mol_type = other DNA
tgcctggctgaagctggttgttgaccaggaagatgccgatggccgctttgccctgatgaatcccctaatgatttt

SEQ ID NO: 606430 - DNA, 75 bp, synthetic construct
  source 1..75: mol_type = other DNA
gccagcacggaagaaggtaaagcacgtgtcgccaaatccgccgccggtaattacgtgttcaacgagcgtaaaatg

SEQ ID NO: 606431 - DNA, 75 bp, synthetic construct
  source 1..75: mol_type = other DNA
ccaaccaaacaaaactggctggatgtgattcgcgcctccagtgcgatacctggcttttatcgtagcggagtgtcg

SEQ ID NO: 606432 - DNA, 75 bp, synthetic construct
  source 1..75: mol_type = other DNA
ttctcgctctggctgcacagtgtgccccaaacgttcatccagatacatctcttgatgtggttcgtgttgagtcgg

SEQ ID NO: 606433 - DNA, 75 bp, synthetic construct
  source 1..75: mol_type = other DNA
acttcatggtctatagctttgcctgcttctttattggcaagtttatagccaacatccttatgacgcgttttaatc

SEQ ID NO: 606434 - DNA, 75 bp, synthetic construct
  source 1..75: mol_type = other DNA
gcagggccactcaggtatcaaacacatgcccgacggtacctattgggtgctgactgacaatggcttcggcagcaa

SEQ ID NO: 606435 - DNA, 75 bp, synthetic construct
  source 1..75: mol_type = other DNA
tcaaagacggcacggtagtaccgctgaagacgcttttcctgcatgatccggataagaaggtaccgttccacatca

SEQ ID NO: 606436 - DNA, 75 bp, synthetic construct
  source 1..75: mol_type = other DNA
ccgagcgatctgcaacagagcggcaaatacaccagcggcaaacgcgtcaccgagctgggaagcgtggcgggcaaa

SEQ ID NO: 606437 - DNA, 75 bp, synthetic construct
  source 1..75: mol_type = other DNA
ccatcacagcgtggaagattttaacgctaccctgccaaaatctcgtctgccgcaaagtatcaccttaactgaagt

SEQ ID NO: 606438 - DNA, 75 bp, synthetic construct
  source 1..75: mol_type = other DNA
gaaggttttgacgccgccatcctcgatgaagaatttggtctgaaagagaaaggctacaccagtctggtggttgtt

SEQ ID NO: 606439 - DNA, 75 bp, synthetic construct
  source 1..75: mol_type = other DNA
ccatcatagcgtagaggattttaacgcgactctgccgaaatctcgtctgccgcaaagtatcaccttaaccgaagt

SEQ ID NO: 606440 - DNA, 75 bp, synthetic construct
  source 1..75: mol_type = other DNA
cgcggcattgagcggtaaaccgctgaataaatctctcgcacactcgctcacccgccactttatcactcagcattt

SEQ ID NO: 606441 - DNA, 75 bp, synthetic construct
  source 1..75: mol_type = other DNA
agttttctcctgatttccttcagggtattcgacatgaaggcctctatattatctgtagtctgtgtgtcttttatt

SEQ ID NO: 606442 - DNA, 75 bp, synthetic construct
  source 1..75: mol_type = other DNA
aagaagccattgaaaagcagatgagccaccaggaaagaaacagcgtccgtgctgcctatattcacaaggctgaat

SEQ ID NO: 606443 - DNA, 75 bp, synthetic construct
  source 1..75: mol_type = other DNA
ataaattcatcgatcagattgtcacagaggatttgctgtttactctgcgtaaggtggagagtaaaggctttctgg

SEQ ID NO: 606444 - DNA, 75 bp, synthetic construct
  source 1..75: mol_type = other DNA
cgattatcgatctggcgctgcatattgttggtggcagtgaagccgtgctggaacaggcgcggcgctttcttgaaa

SEQ ID NO: 606445 - DNA, 75 bp, synthetic construct
  source 1..75: mol_type = other DNA
cgattatcgatctggcgctgcatattgttggcggtagtgaagcagtcctggaacaggcgcggcgctttcttgaaa

SEQ ID NO: 606446 - DNA, 75 bp, synthetic construct
  source 1..75: mol_type = other DNA
aatttccggcgaaatgctgaaaactgcctggcgaggaaacttccgtcgcttgctggcgcttaaccgcgatatcat

SEQ ID NO: 606447 - DNA, 75 bp, synthetic construct
  source 1..75: mol_type = other DNA
atggcaacaagatagaaccgtgcgcggcgttggcaaaatctctcgaatatggaaatccaacattcaagagtaaag

SEQ ID NO: 606448 - DNA, 75 bp, synthetic construct
  source 1..75: mol_type = other DNA
gtaatcatccggctttacttgaggggttgtcttttatgcacaaaaaagtagatgctcatccatattatgatggat

SEQ ID NO: 606449 - DNA, 75 bp, synthetic construct
  source 1..75: mol_type = other DNA
tttttcattcagccaaaaggttgctttttcaaaactggaacaagattttgaaaatataatgataatctatcggga

SEQ ID NO: 606450 - DNA, 75 bp, synthetic construct
  source 1..75: mol_type = other DNA
attcaacccaccatgaaaatcgcctgctcctgattctatttaatgatacgaatacggaaacaattggcttcgacg

SEQ ID NO: 606451 - DNA, 75 bp, synthetic construct
  source 1..75: mol_type = other DNA
agaggaaattaggtgaactgcatttcttctcagcagaatttaataaaaattctgcactgacccgccatcacctga

SEQ ID NO: 606452 - DNA, 75 bp, synthetic construct
  source 1..75: mol_type = other DNA
tttgttttataggggaaagcccggtagtggttcatgggatcaaaacggtaaaggggacacgtgggtacaaaatca

SEQ ID NO: 606453 - DNA, 75 bp, synthetic construct
  source 1..75: mol_type = other DNA
ggcgttacgcgggctttctctggcggctatctggcggcgtcactggcgtaacgatacctggtttgtcgcaacgtg

SEQ ID NO: 606454 - DNA, 75 bp, synthetic construct
  source 1..75: mol_type = other DNA
gatcatgacagaaatcatcaacagccatagcgacatggaaatggtggcgaccgcccctgatccgctggtcgcgcg

SEQ ID NO: 606455 - DNA, 75 bp, synthetic construct
  source 1..75: mol_type = other DNA
gaaagaaggtcgtggtggtctcgtccccgccggcctggaaggcaaagaaagcgaaacttgagaaggctaaacaag

SEQ ID NO: 606456 - DNA, 75 bp, synthetic construct
  source 1..75: mol_type = other DNA
acgatgccggcagctgtaccgcctgcggtagcgcgttcatttaaagttttattgccaatattttttgtcatggtg

SEQ ID NO: 606457 - DNA, 75 bp, synthetic construct
  source 1..75: mol_type = other DNA
atgcccaaattggggatgcagtcgatccggcgcagacaactgatcgacgccacgctggaagcaatcaatgaggtg

SEQ ID NO: 606458 - DNA, 75 bp, synthetic construct
  source 1..75: mol_type = other DNA
tcaggttgtcgagtttgaattgtccagtgtgttcgatttgatgggggtgcaactgccgtatcgtcagatcattaa

SEQ ID NO: 606459 - DNA, 75 bp, synthetic construct
  source 1..75: mol_type = other DNA
ttgcgattggtgcttcaacggggggaactgaggcaattcgtcacgtactgcaaccgttgccgctttccagcccgg

SEQ ID NO: 606460 - DNA, 75 bp, synthetic construct
  source 1..75: mol_type = other DNA
aggtgaataccggtaaaggctgccatctcgacgctcagatgattgccgacgccgcaccgcgcctgccactggacg

SEQ ID NO: 606461 - DNA, 75 bp, synthetic construct
  source 1..75: mol_type = other DNA
tgctggacaaaaacaaccgtctggctgaacgcaaccgagcgcgctttgctgcccgcaatcagttggtactcaacc

SEQ ID NO: 606462 - DNA, 75 bp, synthetic construct
  source 1..75: mol_type = other DNA
ccttgttatgttatatggtcattgtttatatcacccttattacgtcgacgtcttgatgataagtttctcaggaat

SEQ ID NO: 606463 - DNA, 75 bp, synthetic construct
  source 1..75: mol_type = other DNA
cgcgatgcatttgctaccagcttactgcaacctggcgatgtcgcccttagaatcaacaatctttcactgaccctc

SEQ ID NO: 606464 - DNA, 75 bp, synthetic construct
  source 1..75: mol_type = other DNA
tggtttccagccctggttccggtaaaaccaccctgctgacggaaaccttaatgcgcctgaaagatagcgttccgt

SEQ ID NO: 606465 - DNA, 75 bp, synthetic construct
  source 1..75: mol_type = other DNA
cgcgctaccggcacaccagcgattcaggtgaacaccggtaaaggctgccatcttgacgcacagatgattgccgac

SEQ ID NO: 606466 - DNA, 75 bp, synthetic construct
  source 1..75: mol_type = other DNA
ggataccgaccatgcagacagactaaaagtacgcattgaacacgacgatttcttcaatggcgcttacaaaggcaa

SEQ ID NO: 606467 - DNA, 75 bp, synthetic construct
  source 1..75: mol_type = other DNA
tgttggtggtagaaataaaacgccatttcaaaaatttaattccatacaaaaaaacctaaaaaggattaatttgct

SEQ ID NO: 606468 - DNA, 75 bp, synthetic construct
  source 1..75: mol_type = other DNA
agtttgccggggatatgcatgcgcagtttggcgatatcaaactgacattgctgcaaacctggagtgaagacgact

SEQ ID NO: 606469 - DNA, 75 bp, synthetic construct
  source 1..75: mol_type = other DNA
ttgaggttaacgaattcggtgaaatcgatctgcttgcaatggttgaagatgacatcatcctcgccttgccggtag

SEQ ID NO: 606470 - DNA, 75 bp, synthetic construct
  source 1..75: mol_type = other DNA
gaatatctaatgaagatccggctctaccgggtaactcaggatggcggtaaagaactggaagaggaaatgcgcgta

SEQ ID NO: 606471 - DNA, 75 bp, synthetic construct
  source 1..75: mol_type = other DNA
ggcacccgcgtgcgtattggcgagtacgatattgatattctcgacgtacaggacaatatgattaagcaggtaaaa

SEQ ID NO: 606472 - DNA, 75 bp, synthetic construct
  source 1..75: mol_type = other DNA
ctggatcctggcattagcggcgattctggcttcggcaatgattttcttcctgattaaagaaacgttgccgccaga

SEQ ID NO: 606473 - DNA, 75 bp, synthetic construct
  source 1..75: mol_type = other DNA
tgatcaaaactgccagttagtagatgaatctgttgatggtgttaaatcatttattggtagcatcaatactggttt

SEQ ID NO: 606474 - DNA, 75 bp, synthetic construct
  source 1..75: mol_type = other DNA
gtaacaaggctgaagctctgcgtctggcacgattgctgtatcagcaagaaccggcaaatcttacccgcctggatc

SEQ ID NO: 606475 - DNA, 75 bp, synthetic construct
  source 1..75: mol_type = other DNA
ctgggaacgcgtaaacggacgcatttagcctcaaatcttgcggaattccttaaccaacttaagcctcttctgtaa

SEQ ID NO: 606476 - DNA, 75 bp, synthetic construct
  source 1..75: mol_type = other DNA
ttgccacgctggaagaagaactggaggtgatctccgtgtgcaatctcacgggcgatgtgtgcaaagagacgttgg

SEQ ID NO: 606477 - DNA, 75 bp, synthetic construct
  source 1..75: mol_type = other DNA
ggcagcgtggatggtcatcagtgcgctgctggggctgggagaaacgggtacatatagccccgcaaacgtgaccac

SEQ ID NO: 606478 - DNA, 75 bp, synthetic construct
  source 1..75: mol_type = other DNA
ggtgagcgggaagttggtaagctgacgtcaatcatcatgaacaaaatgctgttcgcgcaaggatggcagttctct

SEQ ID NO: 606479 - DNA, 75 bp, synthetic construct
  source 1..75: mol_type = other DNA
atgaagcagatttctttatttattccgctgctggggacgttattactttctggctgtgccggaacgaactccgat

SEQ ID NO: 606480 - DNA, 75 bp, synthetic construct
  source 1..75: mol_type = other DNA
tggaaactgaattgtttaccttcattctgcaacgtgtggcacaggaaatttcggggatacttgtgcgtgtgccat

SEQ ID NO: 606481 - DNA, 75 bp, synthetic construct
  source 1..75: mol_type = other DNA
tacaactgctgccattcagtggtatgcgcagagggaagctgatatcgaaaatgaaaagctccggaaagagctgga

SEQ ID NO: 606482 - DNA, 75 bp, synthetic construct
  source 1..75: mol_type = other DNA
gtggtggttcaggtgaaatataccaagaagcagatatgctttttacagctaagaattctaatataagcagtacta

SEQ ID NO: 606483 - DNA, 75 bp, synthetic construct
  source 1..75: mol_type = other DNA
tcatttaaggtgaaagtaggagaaaaaccaagcaccaatattcacgcgatcataggtcgtaatggtgtggggaaa

SEQ ID NO: 606484 - DNA, 75 bp, synthetic construct
  source 1..75: mol_type = other DNA
aaaaagaatgagctccggtcatgcggtagtgttattaacacttacacgtttagttgcaacggtggaagaaaaaac

SEQ ID NO: 606485 - DNA, 75 bp, synthetic construct
  source 1..75: mol_type = other DNA
ccagcagtacgcacagaactgaaaaaagtctgtgagttctgggccgatcgcggggtagacgggctgcgtctggat

SEQ ID NO: 606486 - DNA, 75 bp, synthetic construct
  source 1..75: mol_type = other DNA
gcctcaatatgtttgccgagctgcgcaacgatgggcgtgatgccgacgagttattggcaatcctcgccagtaaat

SEQ ID NO: 606487 - DNA, 75 bp, synthetic construct
  source 1..75: mol_type = other DNA
agatcaggttactgaatttaagtcattcccaatgaccttcgcattgcacagcacgtttaaccaatcctcaagttc

SEQ ID NO: 606488 - DNA, 75 bp, synthetic construct
  source 1..75: mol_type = other DNA
gtgaaaactgaaatcgcgaaagcctccaatgttgcagctaaagcaggtgaaaacgtggacgggtggatcgatgat

SEQ ID NO: 606489 - DNA, 75 bp, synthetic construct
  source 1..75: mol_type = other DNA
ttttgacccgtatgtcgccgttagcgccgcgcattggacaatactggctgcaattgcccgccacgtttgctccac

SEQ ID NO: 606490 - DNA, 75 bp, synthetic construct
  source 1..75: mol_type = other DNA
atgtcaatatcatcaattcagtgggttcttgaaatgggggtttctacatgtctcattcaatttatggcagcagaa

SEQ ID NO: 606491 - DNA, 75 bp, synthetic construct
  source 1..75: mol_type = other DNA
ttccggcgcgcgtactcagttcgctggcgataccgtttcgctgctggttgaaaatggtcgtggcaatactctgtg

SEQ ID NO: 606492 - DNA, 75 bp, synthetic construct
  source 1..75: mol_type = other DNA
gtggtcttgcagcgggttctgcattttttattcctttttgccccaacggcattcgcggcggaacaaaccgttgaa

SEQ ID NO: 606493 - DNA, 75 bp, synthetic construct
  source 1..75: mol_type = other DNA
tttattggtttgatgaatggttatgccaaaaaactgggtctgaccaacactaccttccagacggtgcacggtctg

SEQ ID NO: 606494 - DNA, 75 bp, synthetic construct
  source 1..75: mol_type = other DNA
gttgggcaggcgcttaaggccgataagatcaaactcaccgatatggtgacggtcggtaaagatgcctgggcgacg

SEQ ID NO: 606495 - DNA, 75 bp, synthetic construct
  source 1..75: mol_type = other DNA
gagggcggattctttggtcggatgtgggacttcgtaatgatgaaattccatcagtggttcggcggctggttctct

SEQ ID NO: 606496 - DNA, 75 bp, synthetic construct
  source 1..75: mol_type = other DNA
acctgatgccacctttgtgactcagcgggtttggtttggtgataagagcgaagtgaatctcggtgccggtgaagg

SEQ ID NO: 606497 - DNA, 75 bp, synthetic construct
  source 1..75: mol_type = other DNA
gagtatgccattcataaagagaaagagtttacctttaacaaaattcgccaacctaaccgtaatcgcctgttgtgg

SEQ ID NO: 606498 - DNA, 75 bp, synthetic construct
  source 1..75: mol_type = other DNA
gcacgtccgccggggcgcaaaatctttcggcctatatctgcaaccagcctggttacgcgcgtaaagtcatcatgc

SEQ ID NO: 606499 - DNA, 75 bp, synthetic construct
  source 1..75: mol_type = other DNA
taaagaggcggcaaggcagggagcaaaaacgttggtcgtcatccgcactgtgccgtcgcaaatgtactacacgcc

SEQ ID NO: 606500 - DNA, 75 bp, synthetic construct
  source 1..75: mol_type = other DNA
tgccgtcacaaatgtactacacgccgcagtggttcaaacgcatggaacgctggctgggtgacagtagcctgcagc

SEQ ID NO: 606501 - DNA, 75 bp, synthetic construct
  source 1..75: mol_type = other DNA
atgaaacaaacattaattgttattttaatatgtttttgtcacacggctttagcatatccataccgtatctatact

SEQ ID NO: 606502 - DNA, 75 bp, synthetic construct
  source 1..75: mol_type = other DNA
ggttgctgaaccgtcgatatgaaaaagcgagcatcgtgctgacgtccaataaagggttcgccgactgggggagag

SEQ ID NO: 606503 - DNA, 75 bp, synthetic construct
  source 1..75: mol_type = other DNA
gctggacgagtttatgcgtgcgcagtttaaccctttcgatctttatttcggcacgtccgccggggcgcaaaatct

SEQ ID NO: 606504 - DNA, 75 bp, synthetic construct
  source 1..75: mol_type = other DNA
cagtatcggcaagctttactggtttatgccaccaagcgccaacctcgcgctgcgggagctggggatcgtactgtt

SEQ ID NO: 606505 - DNA, 75 bp, synthetic construct
  source 1..75: mol_type = other DNA
tttatctattctaaaattacaccgcacaacgaatggcagttaatcaaaaacaataataccgcggcgtcactggcg

SEQ ID NO: 606506 - DNA, 75 bp, synthetic construct
  source 1..75: mol_type = other DNA
gccgcgaatatggacactgtcggcactttttccatggcctctgcgctggcttcttttgatattttgactgcggtg

SEQ ID NO: 606507 - DNA, 75 bp, synthetic construct
  source 1..75: mol_type = other DNA
cgttccgatgttgaactggaacgtcaattcaccttcaaacattcaggtcagagctggtccggcgtgccgattatc

SEQ ID NO: 606508 - DNA, 75 bp, synthetic construct
  source 1..75: mol_type = other DNA
atgcatatactggattcacttcttgcctttagcgcttatttttttattggcgtggcgatggtgattattttcctg

SEQ ID NO: 606509 - DNA, 75 bp, synthetic construct
  source 1..75: mol_type = other DNA
cgatggattccttagaaaagagattgagagaattgcagagagagagatttatcataataaaatagttttattagg

SEQ ID NO: 606510 - DNA, 75 bp, synthetic construct
  source 1..75: mol_type = other DNA
ttctgctaagactggttttttaggtagggttgctgcaaagctggcagggatacctttgatcgttcatactgtcca

SEQ ID NO: 606511 - DNA, 75 bp, synthetic construct
  source 1..75: mol_type = other DNA
gattggcatcgtaagaattgttgattccgtaaaagatatcgaatcattatttactggcgaaaaacgccgtaaata

SEQ ID NO: 606512 - DNA, 75 bp, synthetic construct
  source 1..75: mol_type = other DNA
gctattgatgccgttgccaatgtattaggtaatgcgcagcaaaaactgcaacaggttcagatgttaccggtgttt

SEQ ID NO: 606513 - DNA, 75 bp, synthetic construct
  source 1..75: mol_type = other DNA
tgcgcgaactgggtatcgtactgttcctttcagttgttggtctgaaatccggcggcgattttatccatacattgg

SEQ ID NO: 606514 - DNA, 75 bp, synthetic construct
  source 1..75: mol_type = other DNA
acgttcatgaagacaagattgacgagtttatcgaagtttttcgccagaaccacctgggctctgtacaggaagaag

SEQ ID NO: 606515 - DNA, 75 bp, synthetic construct
  source 1..75: mol_type = other DNA
agtcacactcgaacatatttgtccatttaacccagagaaggggtggtgcaattcgtttggggagggggttaatga

SEQ ID NO: 606516 - DNA, 75 bp, synthetic construct
  source 1..75: mol_type = other DNA
atcctgaatggaatttagaggctgtcaatgattttcaaaaatggatgtcggaacaagcagtaaatgtatggaaag

SEQ ID NO: 606517 - DNA, 75 bp, synthetic construct
  source 1..75: mol_type = other DNA
taaagcggaatggaacgacgaccgcaagcgcttcgagaataactatctgcgcatggaaggttacggcgtcgagca

SEQ ID NO: 606518 - DNA, 75 bp, synthetic construct
  source 1..75: mol_type = other DNA
accatgctgggcggcaagcaaatcatgaccgatccggtggtgctcgatcaggcgggtgattataaatcgctggat

SEQ ID NO: 606519 - DNA, 75 bp, synthetic construct
  source 1..75: mol_type = other DNA
ccgcccgactgagaaaatcgcggcgcagatgctgggcagcactattgctggccgtcctgctgttatcccgccgtt

SEQ ID NO: 606520 - DNA, 75 bp, synthetic construct
  source 1..75: mol_type = other DNA
tatgatggcggttcgcacgttttaactactgccgtttctgttggtgcaggtggcgactataagacactggacgca

SEQ ID NO: 606521 - DNA, 75 bp, synthetic construct
  source 1..75: mol_type = other DNA
ttaccgcaatgacccgaacctctgcgttttgatttccggtgacctgattgggaaggacgccacaaccatgatgaa

SEQ ID NO: 606522 - DNA, 75 bp, synthetic construct
  source 1..75: mol_type = other DNA
tggattgatgaccgcaaacgcttcgaaaacaactggctgcgtatgcagggttgcgccgtggaatatgacgcactc

SEQ ID NO: 606523 - DNA, 75 bp, synthetic construct
  source 1..75: mol_type = other DNA
gcaggtcgtcaccgtgggcgaatccacgctgcgcaccggtcgcgtgaaaagcggtcgtttcgctaaaggttcggg

SEQ ID NO: 606524 - DNA, 75 bp, synthetic construct
  source 1..75: mol_type = other DNA
tatgtcggccttgacgccatggcgtcagatttgatccgcacttacatcccggcgcagtatcacaacgacccgcga

SEQ ID NO: 606525 - DNA, 75 bp, synthetic construct
  source 1..75: mol_type = other DNA
gcatggatgttccgcacccgcaggggcaggtcgtcaccgtgggcgaatccacgctgcgcactggtcgcgtgaaaa

SEQ ID NO: 606526 - DNA, 75 bp, synthetic construct
  source 1..75: mol_type = other DNA
gcaatgaagggtatgcggttgaggtgccggaactgtatgcggcgattgatgaatctgccgtaaccatcggcaagg

SEQ ID NO: 606527 - DNA, 75 bp, synthetic construct
  source 1..75: mol_type = other DNA
atgttgaccagttgagtggtcaggtgatctctgtcggttcttccgtgctgcataccggccgcagcgaaaatggcc

SEQ ID NO: 606528 - DNA, 75 bp, synthetic construct
  source 1..75: mol_type = other DNA
gatgtgggcgatcgcaaacagttcgaaaactcatactggcgttatgagggttacgccctgggcgatccagattta

SEQ ID NO: 606529 - DNA, 75 bp, synthetic construct
  source 1..75: mol_type = other DNA
tactggcatcctgtgcgttcggcgcttctgccgcggaaaaaatcaactttggcgtatcagcgacctatcctccgt

SEQ ID NO: 606530 - DNA, 75 bp, synthetic construct
  source 1..75: mol_type = other DNA
cgccgtgctgttcatgattttttccgcgaatccgacaacgaaattacggctatcaaggtcgatgatcgcgatatt

SEQ ID NO: 606531 - DNA, 75 bp, synthetic construct
  source 1..75: mol_type = other DNA
ggatgaatatttcacctacgcgttactgttcctcggtattttgctgcacggcgtaagttacgatttttactacgt

SEQ ID NO: 606532 - DNA, 75 bp, synthetic construct
  source 1..75: mol_type = other DNA
aaaactcatactggcgttacgaggggtacgccctgggcgatccggatttatatgctgccgtggatgagtctgcgg

SEQ ID NO: 606533 - DNA, 75 bp, synthetic construct
  source 1..75: mol_type = other DNA
ggtaaagagttcgcctctgaaccggtttggtttggtgattctgatcgcgcttcgttaggggttgataaagacgtg

SEQ ID NO: 606534 - DNA, 75 bp, synthetic construct
  source 1..75: mol_type = other DNA
ggacattaaagtcatgctcggcctggatgcgctgatcctgctgcgcgataaaaacttcctcgtctttttcttctg

SEQ ID NO: 606535 - DNA, 75 bp, synthetic construct
  source 1..75: mol_type = other DNA
gcactatcggctggattgcctctggtctggcatgtggattcttgccgcaaatgctggggtatgccgatatctcac

SEQ ID NO: 606536 - DNA, 75 bp, synthetic construct
  source 1..75: mol_type = other DNA
tgatttccgggatggacatcacaccagagcgcagcaaacaggtggcctttaccacgccatactacgaaaactctg

SEQ ID NO: 606537 - DNA, 75 bp, synthetic construct
  source 1..75: mol_type = other DNA
ggcaaacgtattgggatggaaaacggcaccacgcaccgagaaatatattcaggatcagcacccggaagtaaaaac

SEQ ID NO: 606538 - DNA, 75 bp, synthetic construct
  source 1..75: mol_type = other DNA
tacgtccggataacaaagctctgctggagaaactgaataacgcactggcagccgttaaagcagacggtacatatc

SEQ ID NO: 606539 - DNA, 75 bp, synthetic construct
  source 1..75: mol_type = other DNA
caaggtcatcgggcattatctgaacataaaacactatcagtaagttggagtcactacctgagtattacacctgtg

SEQ ID NO: 606540 - DNA, 75 bp, synthetic construct
  source 1..75: mol_type = other DNA
gaaattacagcaggcgcaagaaaagggcgacatggaacaaatcattaatgcgaacaggctatttcgcttagcgat

SEQ ID NO: 606541 - DNA, 75 bp, synthetic construct
  source 1..75: mol_type = other DNA
ggcgacatggaacaaatcattaatgtaaacaggctatttcgcttagcgatttatcatcgctcaaaatgcccatcc

SEQ ID NO: 606542 - DNA, 75 bp, synthetic construct
  source 1..75: mol_type = other DNA
gttgaaactgattcctgctgcgtgatcacctgggaacaactcgccatctgggcgaatgccggcagcccgcaggaa

SEQ ID NO: 606543 - DNA, 75 bp, synthetic construct
  source 1..75: mol_type = other DNA
tgccggtattcaaagtatttctcgtgggcagtcgagcgccgcgctggcgctggggatgactcactggcagtcgat

SEQ ID NO: 606544 - DNA, 75 bp, synthetic construct
  source 1..75: mol_type = other DNA
ggtgatgcgcttgtccagctttgcgcccgtagcgtggtttgccaaagcctacgttaacgtgttccgctcgattcc

SEQ ID NO: 606545 - DNA, 75 bp, synthetic construct
  source 1..75: mol_type = other DNA
atcaccgtcacggcagtcgtgattggtattttgtggggcaccatgctggcggtgatgcgcttgtccagctttgcg

SEQ ID NO: 606546 - DNA, 75 bp, synthetic construct
  source 1..75: mol_type = other DNA
gggttggagggggaattgtagttaacagaaaattattaacaggtgtttctggattagccggacatgttgggcata

SEQ ID NO: 606547 - DNA, 75 bp, synthetic construct
  source 1..75: mol_type = other DNA
atgcaacgtggacgggatgcaaccagtgtggttgcactgacgatgacctcaacgcaacacattccggcgcaggcg

SEQ ID NO: 606548 - DNA, 75 bp, synthetic construct
  source 1..75: mol_type = other DNA
gcggtttcatctggtcgggccatcatgggggcagcaaaaaatgaacttgcaggatatagcaccaaatatattttt

SEQ ID NO: 606549 - DNA, 75 bp, synthetic construct
  source 1..75: mol_type = other DNA
ttcgtgccggaaagcgtgacgatatatcagcgcattttatcggttcggttgtttatattgagcaggggttgtatc

SEQ ID NO: 606550 - DNA, 75 bp, synthetic construct
  source 1..75: mol_type = other DNA
attgccgccaattcagtatatcaatctctctataaaggggatgaatactttagtttattaggacaggtgaatcag

SEQ ID NO: 606551 - DNA, 75 bp, synthetic construct
  source 1..75: mol_type = other DNA
ttactgtcaagcaacagcagatccaaaccagaaagtaaccgaactaacgattaacgttaacagtatctaccagaa

SEQ ID NO: 606552 - DNA, 75 bp, synthetic construct
  source 1..75: mol_type = other DNA
attccgacgaattctttgaacaagacatttgccactttttataaagtcattaataaagaaaaatatctggaaagt

SEQ ID NO: 606553 - DNA, 75 bp, synthetic construct
  source 1..75: mol_type = other DNA
gcataattcgtttaattgaatctggtagtgactccaacttactgatagtgttttatgttcagataatgcccgatg

SEQ ID NO: 606554 - DNA, 75 bp, synthetic construct
  source 1..75: mol_type = other DNA
ttgcatacgttggggaatctcactttaacgcgctataactcccgctacagtgacagacctttcgcggaaaaacgc

SEQ ID NO: 606555 - DNA, 75 bp, synthetic construct
  source 1..75: mol_type = other DNA
attccagaaacaagtcatcatcaagcagtcatgaatatgattcagttttatcatttcaatttatttgtgataatg

SEQ ID NO: 606556 - DNA, 75 bp, synthetic construct
  source 1..75: mol_type = other DNA
cccagtgacccggtggttcataccatcttcaacgaaagaatattatcttgcctctcttgtcgcctttgctttatg

SEQ ID NO: 606557 - DNA, 75 bp, synthetic construct
  source 1..75: mol_type = other DNA
ttgcgcctgacaacccacaaaactgtatcagaaatgttaatgcgtttttaaaagaaaagtattgtaatacttcaa

SEQ ID NO: 606558 - DNA, 75 bp, synthetic construct
  source 1..75: mol_type = other DNA
cataattcatcagtaataaaaaacggaattgaagtcagaaaaatacgaacagttaccaatgaaacgttaaacact

SEQ ID NO: 606559 - DNA, 75 bp, synthetic construct
  source 1..75: mol_type = other DNA
agatacgcaaacacaatccacgttgccggataaaaacgaccgcgccactggcgatggcccatctcaggtgaatta

SEQ ID NO: 606560 - DNA, 75 bp, synthetic construct
  source 1..75: mol_type = other DNA
attggccgaatcagggtgactggatgttcgatctgcgtgactggcccgatcccgatgcgatgatcgccgaattaa

SEQ ID NO: 606561 - DNA, 75 bp, synthetic construct
  source 1..75: mol_type = other DNA
cactgcttcgtaagtacgctgccgggctgggtgcggcaaacggggttgacgacgtcacacgctattttgcgctgt

SEQ ID NO: 606562 - DNA, 75 bp, synthetic construct
  source 1..75: mol_type = other DNA
ttccttaggggcggcgatgagtgaatcgttcatgatcttctccctttcccgcattgtgtgtggttttgcggttgg

SEQ ID NO: 606563 - DNA, 75 bp, synthetic construct
  source 1..75: mol_type = other DNA
aatgtccatattgtggtggaattgggcgccctcgaaatttagatcattatttgcctaaagcttactatcctcagt

SEQ ID NO: 606564 - DNA, 75 bp, synthetic construct
  source 1..75: mol_type = other DNA
actttatgtcatccatatctgtggctatcatgtcattcgttttatatgtcataatcagaagaagaataggaaaag

SEQ ID NO: 606565 - DNA, 75 bp, synthetic construct
  source 1..75: mol_type = other DNA
ccatacaaatttcccggagataaaccataatccatcaggaataaaaaacggaattgaagtcagaaaaagacgaac

SEQ ID NO: 606566 - DNA, 75 bp, synthetic construct
  source 1..75: mol_type = other DNA
actcggcactgcttatggtcacatcgcgcttagcgttgataacgccgctgaagcgtgcgaaaaaatccgtcaaaa

SEQ ID NO: 606567 - DNA, 75 bp, synthetic construct
  source 1..75: mol_type = other DNA
aaattcgcggcaaagcgctgggcatttacaatatttccgtggtatctggccaggttatcgtgtttatagtcaact

SEQ ID NO: 606568 - DNA, 75 bp, synthetic construct
  source 1..75: mol_type = other DNA
aaataaaacatctgatgatgttattatttttctatctggtcccacatcgcaaaagacgcctttgtcgatattacg

SEQ ID NO: 606569 - DNA, 75 bp, synthetic construct
  source 1..75: mol_type = other DNA
atttttctttccggccccacatcgcaaaaaacaccattgtcagtgctgcagacaagggatgttattgctgtcaat

SEQ ID NO: 606570 - DNA, 75 bp, synthetic construct
  source 1..75: mol_type = other DNA
ggcaaaggatattattgctgtcaatggttcagcacaatatctgttaagtcataatattattccctttatttatgt

SEQ ID NO: 606571 - DNA, 75 bp, synthetic construct
  source 1..75: mol_type = other DNA
ggtttgataaagaagataaaatttaatatattaagtcagattcataaagaactgctgatctctgtaccgttgtct

SEQ ID NO: 606572 - DNA, 75 bp, synthetic construct
  source 1..75: mol_type = other DNA
ctcatgtcatactattgcctttgctgcaattcaaatagcatattcactgaagtatgcacggattatttgttctgg

SEQ ID NO: 606573 - DNA, 75 bp, synthetic construct
  source 1..75: mol_type = other DNA
ctatgccttcggagttgagtagagatttattcaaaatcttaccgtttttccgctttatgcgtgacaatgttgaag

SEQ ID NO: 606574 - DNA, 75 bp, synthetic construct
  source 1..75: mol_type = other DNA
tctatatcgttgttgctgatgccagatctgccgtaaccaacctgaatagtcttattaaacaacgctcatgtgttc

SEQ ID NO: 606575 - DNA, 75 bp, synthetic construct
  source 1..75: mol_type = other DNA
tgatggattcgactttctgggtacgaacatccgtaaatataacgggaaactgttgattaaaccttcaccccaaaa

SEQ ID NO: 606576 - DNA, 75 bp, synthetic construct
  source 1..75: mol_type = other DNA
cgttttatgcgtgataatgtagatgatattaatatttataatttgtcggatgatacagcaattcaatatgatatc

SEQ ID NO: 606577 - DNA, 75 bp, synthetic construct
  source 1..75: mol_type = other DNA
tgttgattaaaccttcaccccaaaaggtaaaggaattcctgaaaagggtccgccagacgataaaagacaatccga

SEQ ID NO: 606578 - DNA, 75 bp, synthetic construct
  source 1..75: mol_type = other DNA
taacccttttgatcccagctacgaatcgtactttgaagcacggctaaaagctacgatgctggaatccatacaggg

SEQ ID NO: 606579 - DNA, 75 bp, synthetic construct
  source 1..75: mol_type = other DNA
atgaagaatattcgatacattgacaaaaaagatgttgaaaacctgattgaaaataaaacatctgatgatgttatt

SEQ ID NO: 606580 - DNA, 75 bp, synthetic construct
  source 1..75: mol_type = other DNA
tagcgatatcagcctgcagttcggcgatatcctcaacctggtggggcgtccgtccgcaattgatgccgttgccaa

SEQ ID NO: 606581 - DNA, 75 bp, synthetic construct
  source 1..75: mol_type = other DNA
gaaatggtcgatcagatggggatgagttacgcgatggcgtatccattcggcatttgcgggattttgttcaccatg

SEQ ID NO: 606582 - DNA, 75 bp, synthetic construct
  source 1..75: mol_type = other DNA
ggatgaaattactaacggtgaattgaaatacaacccagaactttacaagaagcaggatagcacctcgaacgaagg

SEQ ID NO: 606583 - DNA, 75 bp, synthetic construct
  source 1..75: mol_type = other DNA
tcttcagaaatttagccttattaaaagcaggagagatattcaggtgcacatataatacaaagaatcacggtgttt

SEQ ID NO: 606584 - DNA, 75 bp, synthetic construct
  source 1..75: mol_type = other DNA
aactgaagacgaaagagatgaatacttgttgaatctgttagagaaagagctcagagaaatttcaaatgagcagga

SEQ ID NO: 606585 - DNA, 75 bp, synthetic construct
  source 1..75: mol_type = other DNA
gcgatggtcgatcaaatggggatgagctatgcgatggcgtatccatttgggatttgcggcattttgttcactatg

SEQ ID NO: 606586 - DNA, 75 bp, synthetic construct
  source 1..75: mol_type = other DNA
agcgaaactgcggcgaaaaacagtcaggatgcagcagcccaaagcgagagtgccgcagctggttctgcaacagcg

SEQ ID NO: 606587 - DNA, 75 bp, synthetic construct
  source 1..75: mol_type = other DNA
cttttctgattgcgaaagaaatagagaaggcgataggtaatactggttattatatcgatttattttccggagctg

SEQ ID NO: 606588 - DNA, 75 bp, synthetic construct
  source 1..75: mol_type = other DNA
gcaagatcgtgttctatcccagagagaagctgcaagactacaatcgttcccggatgattttattttcttcggagg

SEQ ID NO: 606589 - DNA, 75 bp, synthetic construct
  source 1..75: mol_type = other DNA
ctaatgataagcttttgacccaagggacgatctttaactgcgcctacaattcttcgtatcccgatgatgagacgt

SEQ ID NO: 606590 - DNA, 75 bp, synthetic construct
  source 1..75: mol_type = other DNA
gcgaagtcgccgtctggtttatttatctcatcccggcgctggtggcatttgttctgccaccacgcgcaggggcga

SEQ ID NO: 606591 - DNA, 75 bp, synthetic construct
  source 1..75: mol_type = other DNA
ctactgccgtggtgctcggcttcctgctctactggggcggtattcgcctcaatcttggtgcattttttaaatgga

SEQ ID NO: 606592 - DNA, 75 bp, synthetic construct
  source 1..75: mol_type = other DNA
gcgtgttttgttatctggacctgttcctgcaatcactccgatggcgcatgccgtggcaataaaagttgtgcttga

SEQ ID NO: 606593 - DNA, 75 bp, synthetic construct
  source 1..75: mol_type = other DNA
cgatcacgttaccctggatgccggtaccggtgccgttcacaccgcgcctggccacggcccggacgactatgtgat

SEQ ID NO: 606594 - DNA, 75 bp, synthetic construct
  source 1..75: mol_type = other DNA
gtggatcccggactggggccaggcgcgtatcgagtcgatggttgctaaccgtcctgactggtgtatctcccgtca

SEQ ID NO: 606595 - DNA, 75 bp, synthetic construct
  source 1..75: mol_type = other DNA
gtcttcaaagcgaacgacatcgtcgttgcgctgctgcaggaaaaaggcgcgctgctgcacgttgagaaaatgcag

SEQ ID NO: 606596 - DNA, 75 bp, synthetic construct
  source 1..75: mol_type = other DNA
cggtcaggccgtgattctggcgaaagatctggttgaaagcgtaatgcagcgtatcggcgttagcgattacaccat

SEQ ID NO: 606597 - DNA, 75 bp, synthetic construct
  source 1..75: mol_type = other DNA
cgaagtgaacaaagtcattgagcaagcgcgtgccgacaagaaagtgggtggctcgctggaagcggcagtaacctt

SEQ ID NO: 606598 - DNA, 75 bp, synthetic construct
  source 1..75: mol_type = other DNA
cgcgcttcctgctggcaaacctgaacggttttgatccagcaaaagatatggtgaaaccggaagagatggtggtac

SEQ ID NO: 606599 - DNA, 75 bp, synthetic construct
  source 1..75: mol_type = other DNA
aatcacgataacgtcaatgcctgcttatcccgaatccggcgtggagattgcccaccgttcgttgtttgcactgca

SEQ ID NO: 606600 - DNA, 75 bp, synthetic construct
  source 1..75: mol_type = other DNA
ccggagacgctgtcacacgagcactggagcgcctgcgtaaaaaatatctggcagagctggagccattttctcccc

SEQ ID NO: 606601 - DNA, 75 bp, synthetic construct
  source 1..75: mol_type = other DNA
aacgatcgagcaacgcccgctggttgtgttgcaagaaatcccggaaggtaacttcttcggcaaaatcattgatta

SEQ ID NO: 606602 - DNA, 75 bp, synthetic construct
  source 1..75: mol_type = other DNA
agaattataaatttctgcctcctgaacttaaattcaccttaccccaaccagattcctgtatatttaaaatcagca

SEQ ID NO: 606603 - DNA, 75 bp, synthetic construct
  source 1..75: mol_type = other DNA
taaaagataaaaccaaagcggctatatcattcatgagtcgcaatacagcgactgcgacggtcaaagcaacagaag

SEQ ID NO: 606604 - DNA, 75 bp, synthetic construct
  source 1..75: mol_type = other DNA
gccgttccctgtatgagcagcaccccgaaaaaatgccgcgtgcggataatcgccgctggtgggcggatttagcgg

SEQ ID NO: 606605 - DNA, 75 bp, synthetic construct
  source 1..75: mol_type = other DNA
ctccttcaccgctgatgaagtgtggggctacctgccgggcgaacgtgaaaaatacgtctttaccggtgagtggta

SEQ ID NO: 606606 - DNA, 75 bp, synthetic construct
  source 1..75: mol_type = other DNA
caagtctgcgcctgttcccggaccgctggcgtttaggcgcgccgtcgaaccatactcatctggcactaagccgtc

SEQ ID NO: 606607 - DNA, 75 bp, synthetic construct
  source 1..75: mol_type = other DNA
aacaagggcagggaacgcagttacttcatgaaattgcgctgatgttgccggagcttctggagcgttggattgaac

SEQ ID NO: 606608 - DNA, 75 bp, synthetic construct
  source 1..75: mol_type = other DNA
cgggccggagttgctggtggtgctacctgaagcgaaagcggtgggatcggtggcgatgtcgatgctgggaagcga

SEQ ID NO: 606609 - DNA, 75 bp, synthetic construct
  source 1..75: mol_type = other DNA
tcgaagaaggaacttctaaagacaaattagaatatagagagtactattttaatgaaaagctgtctgttgagaaag

SEQ ID NO: 606610 - DNA, 75 bp, synthetic construct
  source 1..75: mol_type = other DNA
ggcgtatagcgaaatgattgctgaaaaggtgcgtacggcagcaaaagcgagccttgcagcacataagccattgtc

SEQ ID NO: 606611 - DNA, 75 bp, synthetic construct
  source 1..75: mol_type = other DNA
gcctgttttatcgcttactttatctgcagcgcactctcactgctgccagcagtctcgacgatatgctaatgcgct

SEQ ID NO: 606612 - DNA, 75 bp, synthetic construct
  source 1..75: mol_type = other DNA
cgtttatggacttcgatgttccggcaattctcggtgaccacgttacgctggatgccggtaccggtgccgttcata

SEQ ID NO: 606613 - DNA, 75 bp, synthetic construct
  source 1..75: mol_type = other DNA
ggtttgactccggatctacccactcttccgttgttgacgtgcgtccggaatttgccggtcacgctgcggacatgt

SEQ ID NO: 606614 - DNA, 75 bp, synthetic construct
  source 1..75: mol_type = other DNA
cgccgcagtggttcgtcagcatggatcagaaaggtctgcgtgcgcagtcactgaaagagatcaaaggcgtgcagt

SEQ ID NO: 606615 - DNA, 75 bp, synthetic construct
  source 1..75: mol_type = other DNA
gaagtgaaagtcgaagctattgcgatgagcaaacttcataatatgagttgtccgccttatatggggcatagtgcg

SEQ ID NO: 606616 - DNA, 75 bp, synthetic construct
  source 1..75: mol_type = other DNA
cgccatatcgtcaggtactgactcacggctttaccgtggatggtcagggtcgcaagatgtctaaatccatcggca

SEQ ID NO: 606617 - DNA, 75 bp, synthetic construct
  source 1..75: mol_type = other DNA
gagtattacgacaaaacctccccgtccatcgacgtcgcgttccacgccgccgatcaggatgcgctgaaagcgaaa

SEQ ID NO: 606618 - DNA, 75 bp, synthetic construct
  source 1..75: mol_type = other DNA
gcggtctttgaaccttatcgtcttattcacacggaaggaaattggtatttagttgcctgtcaggccgaaataatc

SEQ ID NO: 606619 - DNA, 75 bp, synthetic construct
  source 1..75: mol_type = other DNA
caggcgataacccggatgcggcgctggcgttagaaaaagcccgcgcgttcccaggtctgaacggcatggatctgg

SEQ ID NO: 606620 - DNA, 75 bp, synthetic construct
  source 1..75: mol_type = other DNA
gcgattaccgccatccagaaattcctcgaaactgacatcccggtatttggcatctgcctcggtcatcagttgctg

SEQ ID NO: 606621 - DNA, 75 bp, synthetic construct
  source 1..75: mol_type = other DNA
atggagggtgttttgattaagtcagcgctattggttctggaagacggaacccagtttcacggtcgggccataggg

SEQ ID NO: 606622 - DNA, 75 bp, synthetic construct
  source 1..75: mol_type = other DNA
ttgtgatcccgtggtttgtgatttacacctggctgccgaccatcgcccagactattggtctggaagatgcgctga

SEQ ID NO: 606623 - DNA, 75 bp, synthetic construct
  source 1..75: mol_type = other DNA
gcgttactggcggcgcacggcgtttaacagcgtcttctttgtctgcctcgtaatcccatggtttgtgatttatac

SEQ ID NO: 606624 - DNA, 75 bp, synthetic construct
  source 1..75: mol_type = other DNA
tggaccgtaggctatgtgctggcaagtattgccggacatcactttatttccgaaaacccggaggcctggcgctgg

SEQ ID NO: 606625 - DNA, 75 bp, synthetic construct
  source 1..75: mol_type = other DNA
ccgacgcgaaaccaatcatcagccagcgtaccggcaagaacgataaaacacattggattatttttgtgaaagagg

SEQ ID NO: 606626 - DNA, 75 bp, synthetic construct
  source 1..75: mol_type = other DNA
tggttgaaggtaagttgggttacatcgcggcagtggctgtcggggggggcggttgtgacggcagtctgcgtgaac

SEQ ID NO: 606627 - DNA, 75 bp, synthetic construct
  source 1..75: mol_type = other DNA
ctatttcagatgaaatgaaacagcaaatgttagccatcgcgacccgggaagggtttgaagtgaataaactgattt

SEQ ID NO: 606628 - DNA, 75 bp, synthetic construct
  source 1..75: mol_type = other DNA
ccacgtcgtggcttatgattttggtgccaagcgcaacatcctgcggatgctggtggacagaggctgtcgcctgac

SEQ ID NO: 606629 - DNA, 75 bp, synthetic construct
  source 1..75: mol_type = other DNA
gaatacgaacacgatattctgttgtcgtcactgattagcggaacagtggaaaataatcgcctgaacggagaatcg

SEQ ID NO: 606630 - DNA, 75 bp, synthetic construct
  source 1..75: mol_type = other DNA
tacctggcgcgacgacctgcgcgccgggttcaaagagtcgtttcgcgtattgcggccacacggcgttctcatctt

SEQ ID NO: 606631 - DNA, 75 bp, synthetic construct
  source 1..75: mol_type = other DNA
tctcaagcgagaagccgttcttattaccggacaatgaaggggtaaagatgaacacttcaccggtgcgaatggatg

SEQ ID NO: 606632 - DNA, 75 bp, synthetic construct
  source 1..75: mol_type = other DNA
aacgtctgttggcgacaatatctggattattcccggattatgcgtttctcatgatgataaccacaatgtgatgcg

SEQ ID NO: 606633 - DNA, 75 bp, synthetic construct
  source 1..75: mol_type = other DNA
tgccgttatctggtggtcaattgaatggtgcactgggtatcggaacatccagtgctcttggcggtaattcgattg

SEQ ID NO: 606634 - DNA, 75 bp, synthetic construct
  source 1..75: mol_type = other DNA
ttcatttttatatgggagaaggaagttgtcctgcagctcagtttcggattaattataaaaatggcggtatttttt

SEQ ID NO: 606635 - DNA, 75 bp, synthetic construct
  source 1..75: mol_type = other DNA
ctgattttttttaaaaaagggacctgggagcagatggttacgccttacacagacaaccgctggaacgaaacctat

SEQ ID NO: 606636 - DNA, 75 bp, synthetic construct
  source 1..75: mol_type = other DNA
tgaattgtttaagccaataacattagttggtgatgcaacgttaattcacaacggatttagaataaaatctagcag

SEQ ID NO: 606637 - DNA, 75 bp, synthetic construct
  source 1..75: mol_type = other DNA
cttttgcatccgctgtcgttaacctttcctgccgggaaagtgactggtctgattggtcacaacggttctggtaaa

SEQ ID NO: 606638 - DNA, 75 bp, synthetic construct
  source 1..75: mol_type = other DNA
atgccccgaaaactgaagccgttaagccgcggagaacgtgtcgtcatatggcggcttgcgcactgccttgtgctg

SEQ ID NO: 606639 - DNA, 75 bp, synthetic construct
  source 1..75: mol_type = other DNA
ctgctggcatcagcggcgttaccagccttgctgattacgctgctacgttggggcacgccggaatcgccacgctgg

SEQ ID NO: 606640 - DNA, 75 bp, synthetic construct
  source 1..75: mol_type = other DNA
cggaaagttttcctactgacattcgctcgttgggcgttggttttgccaccgccatgagtcgactcggcgcggcgg

SEQ ID NO: 606641 - DNA, 75 bp, synthetic construct
  source 1..75: mol_type = other DNA
cggcgacagcaacaaagctgaaaacagcctgtaaaattaataacgtttcgtttgatggtacatcagatattaacc

SEQ ID NO: 606642 - DNA, 75 bp, synthetic construct
  source 1..75: mol_type = other DNA
gcactatcagtagatccaagtgatgcactggataattatagacggattatatatggattatttataagttcaaac

SEQ ID NO: 606643 - DNA, 75 bp, synthetic construct
  source 1..75: mol_type = other DNA
atgacccgaaaactgaagccgttaagtcgcggagaacgggccgtcgtgcggcagctggcgtactgccttgtcatg

SEQ ID NO: 606644 - DNA, 75 bp, synthetic construct
  source 1..75: mol_type = other DNA
tgtgctgtggctcccgcatgttctggttcgataaacaggatgagcgcgctgtattcagtgatatccgtgctgagc

SEQ ID NO: 606645 - DNA, 75 bp, synthetic construct
  source 1..75: mol_type = other DNA
gccgcgaattcaaggcgggtaaaaaccagaaccagctcagtgaagaaaacatcgaaaaaatcgttaagacctacc

SEQ ID NO: 606646 - DNA, 75 bp, synthetic construct
  source 1..75: mol_type = other DNA
tggttcgttgttaatgaagtgcgggcgtaagattgtatccgggcatgacagccgtaactatgctttgttcggtca

SEQ ID NO: 606647 - DNA, 75 bp, synthetic construct
  source 1..75: mol_type = other DNA
ttgccgaaaagcgccagtttttacgcactttatgagcgccgtcatgagccgggtaacggtgagcgtatcgatcag

SEQ ID NO: 606648 - DNA, 75 bp, synthetic construct
  source 1..75: mol_type = other DNA
cgtaaaattgtttccgggcacgatagtcgcaactatgcgctgttcggccaggaagcgattggctccacctggtcg

SEQ ID NO: 606649 - DNA, 75 bp, synthetic construct
  source 1..75: mol_type = other DNA
aagcaggggagttttatactccgccggaagtttcagacctgattgctgaactgcttgacccgcaacccggagaca

SEQ ID NO: 606650 - DNA, 75 bp, synthetic construct
  source 1..75: mol_type = other DNA
tgttgtgcccacgcggcgttctgatttttaaatggaatgaaacgcaaatacctgcccgccagatattggcactaa

SEQ ID NO: 606651 - DNA, 75 bp, synthetic construct
  source 1..75: mol_type = other DNA
cgccgaatggtcacaaaattacgttgtttctcgaagaggcgggactggattatcgcttaatcaaagttgacctcg

SEQ ID NO: 606652 - DNA, 75 bp, synthetic construct
  source 1..75: mol_type = other DNA
atctcttttaccatgagcataattttcctggtgacgtgcctgtttgcgggtgcagatgcggtgaaagagcttagc

SEQ ID NO: 606653 - DNA, 75 bp, synthetic construct
  source 1..75: mol_type = other DNA
atgttctttgcgatggttatcaacattatgattgcccgtttcacaccgtggaaatttatcttcctgaccggtcat

SEQ ID NO: 606654 - DNA, 75 bp, synthetic construct
  source 1..75: mol_type = other DNA
cgatcaacaaagccctgtgggccgcgtgtgatacgttccgtggcaccatcagtgctgatacctataaagacttta

SEQ ID NO: 606655 - DNA, 75 bp, synthetic construct
  source 1..75: mol_type = other DNA
ggcaccgacgccagcccgtcttggttgttctatgtcgattctatctggcgtcagggggattatataaaccagtat

SEQ ID NO: 606656 - DNA, 75 bp, synthetic construct
  source 1..75: mol_type = other DNA
tcaccgttcagcaccatgtcccgaccactgttgatggtgacggttttacctttgtcgagggtcgtttcggtccat

SEQ ID NO: 606657 - DNA, 75 bp, synthetic construct
  source 1..75: mol_type = other DNA
gaaaagcgtgttccaggatatttcgtttaacaccgatcgcttgggtgaagaaaaacagaagaacaccatcctgcg

SEQ ID NO: 606658 - DNA, 75 bp, synthetic construct
  source 1..75: mol_type = other DNA
atgaaaaccgtcgtttttgcctaccacgatatgggatgcctcggtattgaagccctgctggctgccggttacgaa

SEQ ID NO: 606659 - DNA, 75 bp, synthetic construct
  source 1..75: mol_type = other DNA
tcctgagaacgaagcgagcattgaggaactgggcgagatgctgctggcgagcttcgaaaaacatccgctgcgcca

SEQ ID NO: 606660 - DNA, 75 bp, synthetic construct
  source 1..75: mol_type = other DNA
atattccacgctatgtcgatacctttgaggaagaagacgaaattgatttgctggcggtacgtgctgagcgtgagc

SEQ ID NO: 606661 - DNA, 75 bp, synthetic construct
  source 1..75: mol_type = other DNA
aagtttatgggatgtgtagcgataaatacttcgatgaagaccattctaatttaatcgtcggcccggtgaataaac

SEQ ID NO: 606662 - DNA, 75 bp, synthetic construct
  source 1..75: mol_type = other DNA
cggataacgttaatcatccactatgggtggagcgcattgcccaactgtcaccagaggtgattttctcgttttatt

SEQ ID NO: 606663 - DNA, 75 bp, synthetic construct
  source 1..75: mol_type = other DNA
cgaatcatcttccgtcaacttcagaagtttatgggatgtgtagcgataaatacttcgatgaggaccattctaatt

SEQ ID NO: 606664 - DNA, 75 bp, synthetic construct
  source 1..75: mol_type = other DNA
gcaatggcgataacgtcgagaaatacgcctacctcgccagcctgaaggagattcaggataacgactataacctta

SEQ ID NO: 606665 - DNA, 75 bp, synthetic construct
  source 1..75: mol_type = other DNA
gattttcaaaaagcagaaagtggatgacaaggtgctgtttatcgacgccagccgtgattataaggctggtaaaaa

SEQ ID NO: 606666 - DNA, 75 bp, synthetic construct
  source 1..75: mol_type = other DNA
tacgcctttattctacatatgatcgaaaccctgaagccaggaaccggtcgcatgggcgtagtggttccgcacggt

SEQ ID NO: 606667 - DNA, 75 bp, synthetic construct
  source 1..75: mol_type = other DNA
gtgaaggcgataacgttgagaaatacgcctatctcgccagcctgaaggagattcaggataacgactataacctta

SEQ ID NO: 606668 - DNA, 75 bp, synthetic construct
  source 1..75: mol_type = other DNA
attaagaaaatcgtcaagacctaccgtgatggcgataacgtcgagaaatacgcctatctcgccagcctgaaggag

SEQ ID NO: 606669 - DNA, 75 bp, synthetic construct
  source 1..75: mol_type = other DNA
attaagaaaatcgtcaagacctaccgtaatggcgataacgtcgagaaatacgcctatctcgcgagcctgaaagag

SEQ ID NO: 606670 - DNA, 75 bp, synthetic construct
  source 1..75: mol_type = other DNA
gttcgatacctcactggccatggccgaggcggcacaactgggtgccggggtagcgatcgcaccggtatgtatgtt

SEQ ID NO: 606671 - DNA, 75 bp, synthetic construct
  source 1..75: mol_type = other DNA
gtgctgtttacccgcgtctcgcgcgggctggtgctgacccatgaaggtgagggattactgccggtgctcaatgag

SEQ ID NO: 606672 - DNA, 75 bp, synthetic construct
  source 1..75: mol_type = other DNA
agctgcacgtgctgcccggataatgcgagagcaacttgctgcaggtgatgacccactggagattaaaaaggctga

SEQ ID NO: 606673 - DNA, 75 bp, synthetic construct
  source 1..75: mol_type = other DNA
gcatgatacctacctgaagctgttccagttgtcatccccggacctgtcccgcagatgggacaccattctgtttga

SEQ ID NO: 606674 - DNA, 75 bp, synthetic construct
  source 1..75: mol_type = other DNA
gatgaacaaagccagaaagcaacagagacatcaccgtcagaaaacggggaaaacgatgccgtatacgggcaggag

SEQ ID NO: 606675 - DNA, 75 bp, synthetic construct
  source 1..75: mol_type = other DNA
aaaatgcgattattgaatggaagggcaatcagcttgtggtcaacgcgtttgcaggtacctgtaaaaccacactga

SEQ ID NO: 606676 - DNA, 75 bp, synthetic construct
  source 1..75: mol_type = other DNA
aaggctaatcaggagcctgtgatttacccgatcattgaagaagctctgcatcgctacagccagctcgtgtttcat

SEQ ID NO: 606677 - DNA, 75 bp, synthetic construct
  source 1..75: mol_type = other DNA
tttgacatcatttttgcgtaaaaccaaagccatcagcgacacccagggacggtttgctgtcgcgcatggatttcg

SEQ ID NO: 606678 - DNA, 75 bp, synthetic construct
  source 1..75: mol_type = other DNA
caggaacaaatctgaagcagcctaccatcgtaccgacctgttgaatgaacgacgaccgatgatgcaggcatgggc

SEQ ID NO: 606679 - DNA, 75 bp, synthetic construct
  source 1..75: mol_type = other DNA
gcatatcatcgtactgatctactggagcagcgtgtaccgatgatgcaggcatgggcggattatgtgatgtctcaa

SEQ ID NO: 606680 - DNA, 75 bp, synthetic construct
  source 1..75: mol_type = other DNA
tggtaatctatatacaccagaagaggtggcaactgcgcttaaagacaaagcggagcaggcaggaggttctcattt

SEQ ID NO: 606681 - DNA, 75 bp, synthetic construct
  source 1..75: mol_type = other DNA
gactgaaagcccagtttgccttcggcatggtctttttgttcgttcaacccgatgccagcgctgctgacataagtg

SEQ ID NO: 606682 - DNA, 75 bp, synthetic construct
  source 1..75: mol_type = other DNA
tctgggcgtctctgataatacagcgcgaactgatttacggacgattgttaaagaaggatttgcgcaagagaagaa

SEQ ID NO: 606683 - DNA, 75 bp, synthetic construct
  source 1..75: mol_type = other DNA
tcgacctcggcggtgaacagcgtctcgaaaatcaaggcattacctgttatagccttgtcccgttcccgggccact

SEQ ID NO: 606684 - DNA, 75 bp, synthetic construct
  source 1..75: mol_type = other DNA
acatcgacctgatagaagcagtcggaaatcaccctgacattattgccgggagcaacaacggtgatggatacgact

SEQ ID NO: 606685 - DNA, 75 bp, synthetic construct
  source 1..75: mol_type = other DNA
agcaacaacggtgatggatatgactacaagcctgaatgccgttactttgaggtgaacgtgcacggtcagtttggc

SEQ ID NO: 606686 - DNA, 75 bp, synthetic construct
  source 1..75: mol_type = other DNA
aatctcggcgatcgcctgaaaatgctggtcttcggtcaggataaagccattgaagcacttaccgaagccatcaag

SEQ ID NO: 606687 - DNA, 75 bp, synthetic construct
  source 1..75: mol_type = other DNA
aacataaaccggtcggttcgttcctgtttgccggccctactggggtcgggaaaacagaggtgacggtacagcttt

SEQ ID NO: 606688 - DNA, 75 bp, synthetic construct
  source 1..75: mol_type = other DNA
tcgatcttggcggcgaacagcgtctcgaaaaacagggcattaccagctacagccttgtcccgttcccgggccatt

SEQ ID NO: 606689 - DNA, 75 bp, synthetic construct
  source 1..75: mol_type = other DNA
acatcgacctgatcgaagcagtaggaaatcaccctgacattattgccgggagcaacaacggtgatggatacgact

SEQ ID NO: 606690 - DNA, 75 bp, synthetic construct
  source 1..75: mol_type = other DNA
ggcattgtttactatcaggagattcagccgcttacattcgattgccacgccatgtacctgccagagattcgcggc

SEQ ID NO: 606691 - DNA, 75 bp, synthetic construct
  source 1..75: mol_type = other DNA
cgagctgatttacggacaattgttaaagaagggtttgcgcaagagaagaaaattaatgaccagcaagccgtgtac

SEQ ID NO: 606692 - DNA, 75 bp, synthetic construct
  source 1..75: mol_type = other DNA
catgtacctgccagaggttcgtggcttcagcaaggaaatcgggctggcgttctggcgatacattctgactaacac

SEQ ID NO: 606693 - DNA, 75 bp, synthetic construct
  source 1..75: mol_type = other DNA
tacttcaaaggcgtggatgacgtgacattttacagtgctacacgcgaagaactaatcgaattcctgaatcacggg

SEQ ID NO: 606694 - DNA, 75 bp, synthetic construct
  source 1..75: mol_type = other DNA
atgattacattcaaaccaacgcgaaacatcgacctgatcgaagcagtcggaaatcaccctgacattatcgctggt

SEQ ID NO: 606695 - DNA, 75 bp, synthetic construct
  source 1..75: mol_type = other DNA
aggggaatgcgctgggctgaaattgattttcataagcgggtatggactatacctgcagaaagaatgaaagccagg

SEQ ID NO: 606696 - DNA, 75 bp, synthetic construct
  source 1..75: mol_type = other DNA
cggggcagacagtgccggcagggatgttcccggatgcggttctgccgctgctggcaccttttgcgtcgacggtac

SEQ ID NO: 606697 - DNA, 75 bp, synthetic construct
  source 1..75: mol_type = other DNA
ttcccgcgccaggtcggtcagctctctgtgatgtaccgctgcctgccagactggcatcatgatgaagcggttctt

SEQ ID NO: 606698 - DNA, 75 bp, synthetic construct
  source 1..75: mol_type = other DNA
tgcgctggcaatggctatcgccatcatcatcccgattgtactcacctcgtttatctaccagcggaaataccgcct

SEQ ID NO: 606699 - DNA, 75 bp, synthetic construct
  source 1..75: mol_type = other DNA
gagcgtaacgtaggttcagaaagcccgctgaaaattaaacgtgggcaaaataatctctggaataacggcggtatt

SEQ ID NO: 606700 - DNA, 75 bp, synthetic construct
  source 1..75: mol_type = other DNA
tatatcaggactagtcatgtagcctatgaggatgagaacctccgggggcagggaggttcgactcgagcgaagcga

SEQ ID NO: 606701 - DNA, 75 bp, synthetic construct
  source 1..75: mol_type = other DNA
gtcagtgatgccagtaattatctgctaaacgcagacgatcctgcccatatcgcgttgcgcccttcggctaccagc

SEQ ID NO: 606702 - DNA, 75 bp, synthetic construct
  source 1..75: mol_type = other DNA
aaatcgatggctgacggcgtgaaactgattaacgccgtgcaggacgtttatctcgataacaaagtcactattgcc

SEQ ID NO: 606703 - DNA, 75 bp, synthetic construct
  source 1..75: mol_type = other DNA
catttgctgctaacccgctctatttcgacccgaaaaacattgttgaactggcgatagaagcgggctgtaactgtg

SEQ ID NO: 606704 - DNA, 75 bp, synthetic construct
  source 1..75: mol_type = other DNA
gaaaagaatgaactatcactattacctgatatattcattaactcatcacaaaacagcaataacgatagatcattc

SEQ ID NO: 606705 - DNA, 75 bp, synthetic construct
  source 1..75: mol_type = other DNA
tggtcagcggtgaaaaagatgggtggcacaccgattctcggtatcgtacttggcgtgacgctggtttccccacaa

SEQ ID NO: 606706 - DNA, 75 bp, synthetic construct
  source 1..75: mol_type = other DNA
acaggcgggcggcagtgtgctggtggtttcccagtttacccttgccgcagataccgaacgggggatgcgcccgag

SEQ ID NO: 606707 - DNA, 75 bp, synthetic construct
  source 1..75: mol_type = other DNA
ttaacccgaactacccgtagcgtgacccccacggaagcaggggagagaataattgcctgtcttgagccacgtata

SEQ ID NO: 606708 - DNA, 75 bp, synthetic construct
  source 1..75: mol_type = other DNA
cctctcgcgatgccggtatgggaatggcatttactggcgtcacttattatgacggcattggtttcctgacgcacg

SEQ ID NO: 606709 - DNA, 75 bp, synthetic construct
  source 1..75: mol_type = other DNA
acccagagagagaggctggaacggctgagcgagctcgagaagaacaaacgctccgagaaaacccttttaaatatc

SEQ ID NO: 606710 - DNA, 75 bp, synthetic construct
  source 1..75: mol_type = other DNA
atcagttacgttgtaagttgcttaatgattacggtatcagcttgcatttagatgaatggctttataatgaactga

SEQ ID NO: 606711 - DNA, 75 bp, synthetic construct
  source 1..75: mol_type = other DNA
cttaaacatgcgactcttactcgataatgaacgccctagagaatttaaagaattattaccaatttcagatggcat

SEQ ID NO: 606712 - DNA, 75 bp, synthetic construct
  source 1..75: mol_type = other DNA
tgtactcgcctaacggcaaaaaggacgggattcagatcatcccgttgtcagaagtcgcggcgaaggatgagtttc

SEQ ID NO: 606713 - DNA, 75 bp, synthetic construct
  source 1..75: mol_type = other DNA
cgtgattttggtgcaaaaggagacggcataacagatgatactgtagcaattcaaaatgctattaatgcagtacca

SEQ ID NO: 606714 - DNA, 75 bp, synthetic construct
  source 1..75: mol_type = other DNA
catcaattgagaaaagtgaggcccggcaaaaactcattctggctgaacaaaaacaccagtcagctgtggatagtg

SEQ ID NO: 606715 - DNA, 75 bp, synthetic construct
  source 1..75: mol_type = other DNA
ccggtgtggtaggtgagcaatttttatatgctcttctcgatagcctaagtaaacaaggattattgcagtatacca

SEQ ID NO: 606716 - DNA, 75 bp, synthetic construct
  source 1..75: mol_type = other DNA
tgatggattacctgggttctcttatgccgatgctgacggtaagttttcaggtattgatgttgatatttgtcgtgg

SEQ ID NO: 606717 - DNA, 75 bp, synthetic construct
  source 1..75: mol_type = other DNA
aatgctgaagagatgggcgttaattcgcaaaacgttgatgaaaaagcggctaatcctgcaacgcctgatatggcg

SEQ ID NO: 606718 - DNA, 75 bp, synthetic construct
  source 1..75: mol_type = other DNA
ggtgtcaaatattataaacatggggctggatgcagggtagatctaaactccgggagcgtagattttgattttggg

SEQ ID NO: 606719 - DNA, 75 bp, synthetic construct
  source 1..75: mol_type = other DNA
ccagtgcagaagagtgttggctggatgcactcaaacacccagaagcatgcctcagagattttgagaagggctggg

SEQ ID NO: 606720 - DNA, 75 bp, synthetic construct
  source 1..75: mol_type = other DNA
ttttattggtgttattttcggtggggggtattatcttgtatcaggagaggatattacaaaaaaaatcaaaactat

SEQ ID NO: 606721 - DNA, 75 bp, synthetic construct
  source 1..75: mol_type = other DNA
actgaggtggtgattaagtcagaccctgtaaccgcagatgtcacaatcatgatggcctcggaagagggcacccat

SEQ ID NO: 606722 - DNA, 75 bp, synthetic construct
  source 1..75: mol_type = other DNA
tgcattgtcgatgcctctattagtaatatgaaacagacaaagcctgttaagcttgtgaaagcagatggtatctgg

SEQ ID NO: 606723 - DNA, 75 bp, synthetic construct
  source 1..75: mol_type = other DNA
aatataaagaaattgatgatgagttttctgatggagagctcatttttggtattgccattatcataaaagaaatac

SEQ ID NO: 606724 - DNA, 75 bp, synthetic construct
  source 1..75: mol_type = other DNA
aaagtcgcgattattggcgcaggcccagccggattacaagccagcgtgacgctgaccaatctgggttacgacgtc

SEQ ID NO: 606725 - DNA, 75 bp, synthetic construct
  source 1..75: mol_type = other DNA
gccagagagctgggcgtttcgatcatcgatggatttacaccagtagccgtggcaataaagtcacctttaagcatg

SEQ ID NO: 606726 - DNA, 75 bp, synthetic construct
  source 1..75: mol_type = other DNA
cgatccggggaaatttattcgctcaatctattttcgtaattttaaaggcgctgccgagacaattcgcgaaaataa

SEQ ID NO: 606727 - DNA, 75 bp, synthetic construct
  source 1..75: mol_type = other DNA
aaaccgatgattgttaccggtatgctgatgcgtgccgccggattcgccacaatgggtatcgcccacgaaccgtgg

SEQ ID NO: 606728 - DNA, 75 bp, synthetic construct
  source 1..75: mol_type = other DNA
cggttgatggctgggctgttgataatgtcattaagcatgatgccggtgggcatggtcagcggcctgcaacaactt

SEQ ID NO: 606729 - DNA, 75 bp, synthetic construct
  source 1..75: mol_type = other DNA
atggcgtgcgtaatgcgcgataaacgttttgttacctatgtcctgacgctggcgggctactatatgctggccgtc

SEQ ID NO: 606730 - DNA, 75 bp, synthetic construct
  source 1..75: mol_type = other DNA
ctgggccgccgtcatggtcggtattgccctcggtctacgccaatttattcagcaaggtctgggtattttcggcgg

SEQ ID NO: 606731 - DNA, 75 bp, synthetic construct
  source 1..75: mol_type = other DNA
attggcataatcaccttccttgcgctgggttggcaatttagccagaaacgcgcggcgcgtcggttgctggaacgc

SEQ ID NO: 606732 - DNA, 75 bp, synthetic construct
  source 1..75: mol_type = other DNA
ctacgccaatttattcagcaaggtctgggtattttcggcggcgcaattgccgaccgctttggtgccaaaccgatg

SEQ ID NO: 606733 - DNA, 75 bp, synthetic construct
  source 1..75: mol_type = other DNA
catgttcgtttgccgggcgaactgacaatggcagcggacaaaattattctcgccgtcggtcaacatgccgaactt

SEQ ID NO: 606734 - DNA, 75 bp, synthetic construct
  source 1..75: mol_type = other DNA
gcctatcaaagcgtgcaattaccgcaaccgaacctgggggtgcgcactaacgccttgatcgacacgccgttcctg

SEQ ID NO: 606735 - DNA, 75 bp, synthetic construct
  source 1..75: mol_type = other DNA
ggcagacggtggtttgtcacccatgctgggccaggacgcacaagggccaacggcagtactgaagtcagtcagtaa

SEQ ID NO: 606736 - DNA, 75 bp, synthetic construct
  source 1..75: mol_type = other DNA
atgagcaaagcacccgtagtaatagatcttttttgcggatgtggtggttttggacttggagccaagttagcaggc

SEQ ID NO: 606737 - DNA, 75 bp, synthetic construct
  source 1..75: mol_type = other DNA
ctactgcaaagaagtggaaaaataccagaacccgcgcggcggctacttcacgccgggatcgtataccgtttctgc

SEQ ID NO: 606738 - DNA, 75 bp, synthetic construct
  source 1..75: mol_type = other DNA
aagatgcgcgcgactattccgtagtggctgtgtggaattatctattcccggcagaacctacggcttgcatgacat

SEQ ID NO: 606739 - DNA, 75 bp, synthetic construct
  source 1..75: mol_type = other DNA
gtactgggaaaaacgttcgatgaaagatttcatcaacgggcagatgacggatgaagtaaaagccgcgaccagcac

SEQ ID NO: 606740 - DNA, 75 bp, synthetic construct
  source 1..75: mol_type = other DNA
catgaccaatccgcatttcacacgcattaccgattaccgcgacgtggaaagcctcaacatgtttgccgaactgcg

SEQ ID NO: 606741 - DNA, 75 bp, synthetic construct
  source 1..75: mol_type = other DNA
gcgcggtattcgcattatccttgatatggtgtttaaccatacttctacccaacacgcctggtttcgcgaggcgca

SEQ ID NO: 606742 - DNA, 75 bp, synthetic construct
  source 1..75: mol_type = other DNA
gtgattgccaaccttagccgtgacgtacagccctggcaaccaacgcaaatcagcggcgactggcaactgttaatg

SEQ ID NO: 606743 - DNA, 75 bp, synthetic construct
  source 1..75: mol_type = other DNA
gttgactgtgctcggcctcgatcgctggatgagctggaaaactgcgccttatatctacgacgagttacaggatct

SEQ ID NO: 606744 - DNA, 75 bp, synthetic construct
  source 1..75: mol_type = other DNA
tgccgtaccgtcaccgaaagatatgctgtcagtacgtattcgcgaatttgccgcccgtttcggtgcgctggctga

SEQ ID NO: 606745 - DNA, 75 bp, synthetic construct
  source 1..75: mol_type = other DNA
atgactcatcttccccactggtggcaaaacggtgttatctaccagatctatccaaagagctttcaggacaccacg

SEQ ID NO: 606746 - DNA, 75 bp, synthetic construct
  source 1..75: mol_type = other DNA
atctcgcgcaccttgacggttttaacatcgagtggctggcgcatgatgagcaggcggtggacgcgcgtctggcgc

SEQ ID NO: 606747 - DNA, 75 bp, synthetic construct
  source 1..75: mol_type = other DNA
caggaccatcagctttatttctgctctgccagctgtgagagtaaatttacagcccatcccgaccgttatcttacc

SEQ ID NO: 606748 - DNA, 75 bp, synthetic construct
  source 1..75: mol_type = other DNA
ttgatattgagcacgccatagcagtacatgatcacatcattgaacgctctggcggtttacaaggcattcgcgatc

SEQ ID NO: 606749 - DNA, 75 bp, synthetic construct
  source 1..75: mol_type = other DNA
ggattacgcgatgatctatttcctcgcggtatggaaagcggcggtgctgggggtgatcctcggttcgttgattca

SEQ ID NO: 606750 - DNA, 75 bp, synthetic construct
  source 1..75: mol_type = other DNA
gtgaaaaatgacaatgcagtggaacataacaaccagactgcttctgagcagacatcatccccggacgagagtcac

SEQ ID NO: 606751 - DNA, 75 bp, synthetic construct
  source 1..75: mol_type = other DNA
gtttgttcctctggtgatacttatcgcggttgttgctttcttgatctggtctgtctgggggcccgagcccaggat

SEQ ID NO: 606752 - DNA, 75 bp, synthetic construct
  source 1..75: mol_type = other DNA
tcgttcagaaacatggatggcctggtggccgtttattttgaagccgcagcagtaattacggtgcttgttctgctg

SEQ ID NO: 606753 - DNA, 75 bp, synthetic construct
  source 1..75: mol_type = other DNA
atagacaaccatcttgctccttctttggttttaaataaatcaatgatagaaaataatattattgaaatgaataag

SEQ ID NO: 606754 - DNA, 75 bp, synthetic construct
  source 1..75: mol_type = other DNA
gatcctgaaaaaatcgtatgaagtgatgcatggtgagttggggaatgcagattcgatccagagctggtcgaatgc

SEQ ID NO: 606755 - DNA, 75 bp, synthetic construct
  source 1..75: mol_type = other DNA
taatatcccccgccagatgctttttgacgtgcaaatgccgggcaccgttcttgggcatatcacaccacaagctgc

SEQ ID NO: 606756 - DNA, 75 bp, synthetic construct
  source 1..75: mol_type = other DNA
aaaatgggtgcgtgaaacaccgcaaacgcaggcaccggtcgaaattgacataccggaagcgcagggcggattttt

SEQ ID NO: 606757 - DNA, 75 bp, synthetic construct
  source 1..75: mol_type = other DNA
cggggatgcgccgccaacaagtgtcgatgggaggggcgctggcattctggatggggaatccgttgttaaacccag

SEQ ID NO: 606758 - DNA, 75 bp, synthetic construct
  source 1..75: mol_type = other DNA
gatgtgcaggcgattggcacacatctggtgtatctggtggagattaaaaacatcatcctcagtgcagaaggtcac

SEQ ID NO: 606759 - DNA, 75 bp, synthetic construct
  source 1..75: mol_type = other DNA
tatcctgtgtatggaatactgctgtcgccagttattgcggcggcggccatggctctttcctccgtcagcgtcatt

SEQ ID NO: 606760 - DNA, 75 bp, synthetic construct
  source 1..75: mol_type = other DNA
ccgcgttctcgccagaaaactacaccagtactgtggatgagaatgcttttagtaaagcagcagaattcctaaatc

SEQ ID NO: 606761 - DNA, 75 bp, synthetic construct
  source 1..75: mol_type = other DNA
caggtaagctgacgatcagtgaattgattgatgccctggcgaaagataaaaattactcagcttccaagtgggatc

SEQ ID NO: 606762 - DNA, 75 bp, synthetic construct
  source 1..75: mol_type = other DNA
gggaacgggtacagatgtggcaatagaaagtgccggcgttacccttctcaaaggcgatttgatgatactgaacag

SEQ ID NO: 606763 - DNA, 75 bp, synthetic construct
  source 1..75: mol_type = other DNA
gtcgttaagaatttaagccgccgctttgaagcggaacagtatgacccacagcgggtacgtgcagcggcttactgg

SEQ ID NO: 606764 - DNA, 75 bp, synthetic construct
  source 1..75: mol_type = other DNA
gcgtgagcctgccgtatttaacaaaacagataacagcgaatggtttctagttgattcacagctcgagcaagtgga

SEQ ID NO: 606765 - DNA, 75 bp, synthetic construct
  source 1..75: mol_type = other DNA
tgctgacccaagaagggagcataccctgcactagtatccgcacagctaatactctattgataccaacaacgcttc

SEQ ID NO: 606766 - DNA, 75 bp, synthetic construct
  source 1..75: mol_type = other DNA
caggtccttgaattgcgggcaagggaacaaacctcaggtgccattactgcgcttcttaaccttgcccccaaaacc

SEQ ID NO: 606767 - DNA, 75 bp, synthetic construct
  source 1..75: mol_type = other DNA
ctgaatatgtttacccttgttgctatggggaccggcgtagcctgggtttacagcgtcattgcaactgtcttcccc

SEQ ID NO: 606768 - DNA, 75 bp, synthetic construct
  source 1..75: mol_type = other DNA
tcacggaaggttcgcctacggtgacaggaattatcagtctcagtccgggtggggaagcctctcttttgcgtgtaa

SEQ ID NO: 606769 - DNA, 75 bp, synthetic construct
  source 1..75: mol_type = other DNA
gctatctcggatcccgtgaaagcaactacgccggatgcgctaaaagcgttacgtcaggcggggatccgcattgtt

SEQ ID NO: 606770 - DNA, 75 bp, synthetic construct
  source 1..75: mol_type = other DNA
gtgcgccgacggtgacagggattatcagtctcagtccgggtggtgaaacatctcttttacgtgtaacggccgcag

SEQ ID NO: 606771 - DNA, 75 bp, synthetic construct
  source 1..75: mol_type = other DNA
tggccgtttattttgaagccgccgctgttatcacggtgcttgttctgctgggacaggtccttgaattacgcgcaa

SEQ ID NO: 606772 - DNA, 75 bp, synthetic construct
  source 1..75: mol_type = other DNA
tatttctgcggcatttaccgctcgccataaaggcaagaatcagattcagttctttgatccgcagcagatggaagc

SEQ ID NO: 606773 - DNA, 75 bp, synthetic construct
  source 1..75: mol_type = other DNA
ccgccgaacagctttacagtcgcgctatttctgcggcatttaccgctcgccataaaggcaagaatcagattcagt

SEQ ID NO: 606774 - DNA, 75 bp, synthetic construct
  source 1..75: mol_type = other DNA
tcgtttttgttttttgcactgttttgctgttccatctggtacagcagaatcgctataacacggctacgcaactgg

SEQ ID NO: 606775 - DNA, 75 bp, synthetic construct
  source 1..75: mol_type = other DNA
tggcgattagctggtgcattaatcgactgatattacatcctttacgcaatatcgctcgcgagctaaacgccattc

SEQ ID NO: 606776 - DNA, 75 bp, synthetic construct
  source 1..75: mol_type = other DNA
ctggtgttacaggcggattccttccgcatgtacaagttcgtgatgagcactgtctctacgttagtgaccatttac

SEQ ID NO: 606777 - DNA, 75 bp, synthetic construct
  source 1..75: mol_type = other DNA
gtaaaagttttattccagagcgcccggtgccagtgatgttcacccgattgtttgagttaccggtacaaatctcgc

SEQ ID NO: 606778 - DNA, 75 bp, synthetic construct
  source 1..75: mol_type = other DNA
ggatcgtgaaggtatagaacgctacggctggcgtttttttgcagggaaaggctatgagggtgatatcaaatggat

SEQ ID NO: 606779 - DNA, 75 bp, synthetic construct
  source 1..75: mol_type = other DNA
acaggcagagaggctaaaaaaaatagggaaaagaaactaccgagtgatattgccctcaacgcgcttgcggaaatt

SEQ ID NO: 606780 - DNA, 75 bp, synthetic construct
  source 1..75: mol_type = other DNA
gccaagctaggcattattacgcgaacacctatgcagggagaggtacaagaccctgcgttcattgatttcgccaaa

SEQ ID NO: 606781 - DNA, 75 bp, synthetic construct
  source 1..75: mol_type = other DNA
ctggctggcaaaggcgggcgtcggcattgctcagggtttcctgtttgcgcgtccactccctatcgaaatcttcga

SEQ ID NO: 606782 - DNA, 75 bp, synthetic construct
  source 1..75: mol_type = other DNA
ttggaagagatgtaaattattttagagcggaggtgcaaaagcacctcagaaccactgatgaaataaacaaatcag

SEQ ID NO: 606783 - DNA, 75 bp, synthetic construct
  source 1..75: mol_type = other DNA
ctggataagcgagtcaggcgcaaaattctgtatctcggttccaaagatgacacccgcgatgaacagcgttatcag

SEQ ID NO: 606784 - DNA, 75 bp, synthetic construct
  source 1..75: mol_type = other DNA
ctggtgctccagtcggactcttttcgcatgtacaagttcgtgatgagtaccctttctacgttagtgaccatttac

SEQ ID NO: 606785 - DNA, 75 bp, synthetic construct
  source 1..75: mol_type = other DNA
gcaaggatttcacgctgtaccagatggacagcctgcgcagtgatgcggaaaaggccacagggcagagtaattcgc

SEQ ID NO: 606786 - DNA, 75 bp, synthetic construct
  source 1..75: mol_type = other DNA
ttgttttctcgcgcaggggcaccggtacaactgtccggcttcttaggcggcaaaccgggcgatagtggcatggct

SEQ ID NO: 606787 - DNA, 75 bp, synthetic construct
  source 1..75: mol_type = other DNA
ttggcagacaataaaatcacgctatcctcggtcaggaaggcgctggcgggggtttttaaagacaacggagaacgg

SEQ ID NO: 606788 - DNA, 75 bp, synthetic construct
  source 1..75: mol_type = other DNA
atgcgcattttgcccgtcgttgctgcagttacggctgcattcctggttgtcgcgtgtagctccccgacaccgccg

SEQ ID NO: 606789 - DNA, 75 bp, synthetic construct
  source 1..75: mol_type = other DNA
tttaccgacaacaagaactggggaaagattcgcctctattaccccatgcccactgtaaatggctttttcaaaccc

SEQ ID NO: 606790 - DNA, 75 bp, synthetic construct
  source 1..75: mol_type = other DNA
atcaaatcagtaagataataggaaaagataccgaagaagtcgtgaaatcccaggatattaaagttggagaagatt

SEQ ID NO: 606791 - DNA, 75 bp, synthetic construct
  source 1..75: mol_type = other DNA
actggggatggaacgggcatcacttccgttctgactgggaggcttttgagccttataccaatctgcatgtggccg

SEQ ID NO: 606792 - DNA, 75 bp, synthetic construct
  source 1..75: mol_type = other DNA
tggcttaatcgatcgcattgagtgctgtgggctgatggttaccgtcggtcactgggtgctggaagagtcctgtcg

SEQ ID NO: 606793 - DNA, 75 bp, synthetic construct
  source 1..75: mol_type = other DNA
agcgatatccttaatgcactggaaaatcatcagtttgctatttggttgcagccacaggtggagatgaccagtggc

SEQ ID NO: 606794 - DNA, 75 bp, synthetic construct
  source 1..75: mol_type = other DNA
accgttatcacgggatgacggaggagagttcgtgctgggtgagggtgtcacaggcgtgggcggggccggggttcg

SEQ ID NO: 606795 - DNA, 75 bp, synthetic construct
  source 1..75: mol_type = other DNA
agagcattctgtcaggagaccagccgcaggcgcttcatggcagccaggggagaggaaccacgctgggcaatcagt

SEQ ID NO: 606796 - DNA, 75 bp, synthetic construct
  source 1..75: mol_type = other DNA
cgggaacgaagacgcagatgaccatccggtcaaaaacctataaaggaagcggatttaacgagctgcggtttgaag

SEQ ID NO: 606797 - DNA, 75 bp, synthetic construct
  source 1..75: mol_type = other DNA
ggtgtgcatacgctaaatagcttgtggcaacacactatggaacgtttgccagaaggcttcccgtggtttgataaa

SEQ ID NO: 606798 - DNA, 75 bp, synthetic construct
  source 1..75: mol_type = other DNA
ggtacgttgctgaacgtgaaattcactccggcgaccctggaaggtgaagcgggattacgcaaactggctgacttc

SEQ ID NO: 606799 - DNA, 75 bp, synthetic construct
  source 1..75: mol_type = other DNA
tgttacgctccaccagcagcgcgcgctatttcgcaggtttcccgaccggctataccgcactgctcggcggtttaa

SEQ ID NO: 606800 - DNA, 75 bp, synthetic construct
  source 1..75: mol_type = other DNA
ctcgcagaaacacattttgcgttacgccgaactggcggaaacgatggcggcaaactgcacagatgcccagcgtcg

SEQ ID NO: 606801 - DNA, 75 bp, synthetic construct
  source 1..75: mol_type = other DNA
gattataagagctggacatggagcgaagatgctgcggtaatggataagtttaatatcccccgtcatatgctgttt

SEQ ID NO: 606802 - DNA, 75 bp, synthetic construct
  source 1..75: mol_type = other DNA
ttactctgaatcggacgcaaagcaggcgcacggagtcaccgttcagggaaataataatattgccagtaatattct

SEQ ID NO: 606803 - DNA, 75 bp, synthetic construct
  source 1..75: mol_type = other DNA
ctaacgccttgatcgacacgccgttcctgatgaaaaccgcagaaaccattcgcctcggcaccggtattccgcaaa

SEQ ID NO: 606804 - DNA, 75 bp, synthetic construct
  source 1..75: mol_type = other DNA
tataccgcactgctcggcgggttaaccgagaacggacgtagcgcggtgaacgtgctttcgttcctctgtctcgac

SEQ ID NO: 606805 - DNA, 75 bp, synthetic construct
  source 1..75: mol_type = other DNA
ggcgcgcgttataacttctccggcgtacaggggatcggtatcgccaacctgagcgattctctccatgcgttgaaa

SEQ ID NO: 606806 - DNA, 75 bp, synthetic construct
  source 1..75: mol_type = other DNA
ggctggtggtacgcgttgccggatacagcgccttctttgtcgaactctcgaaggaaattcaggatgacattatcc

SEQ ID NO: 606807 - DNA, 75 bp, synthetic construct
  source 1..75: mol_type = other DNA
tgttacgctccaccagcagcgcgcgctattttgcgggattcccgaccggctataccgcgctgctcggcggtttaa

SEQ ID NO: 606808 - DNA, 75 bp, synthetic construct
  source 1..75: mol_type = other DNA
ctgggccaggacgcacaaggaccaacggcggtactgaaatcagtcagcaagctcgataacacgctgctttctaac

SEQ ID NO: 606809 - DNA, 75 bp, synthetic construct
  source 1..75: mol_type = other DNA
ttacgggcatttacccagcttaagttgcagcatattcagtttaacgtggtgaatgccgacacgttgcgggaagcg

SEQ ID NO: 606810 - DNA, 75 bp, synthetic construct
  source 1..75: mol_type = other DNA
gcgatctgtttatgcaaatttttgccgacgtgttcaaccttccggcacgccgtaacgccattaacggttgtgcaa

SEQ ID NO: 606811 - DNA, 75 bp, synthetic construct
  source 1..75: mol_type = other DNA
caaaggctacgctgacagcagcagaaaaccttgaagcattcatatcccagtgccgagatcaattgactgtattcg

SEQ ID NO: 606812 - DNA, 75 bp, synthetic construct
  source 1..75: mol_type = other DNA
atctggctaaaaatgtctttcagctctgcgggttaaaccaagctggtaagccggtttattcaaaacgtaccggcc

SEQ ID NO: 606813 - DNA, 75 bp, synthetic construct
  source 1..75: mol_type = other DNA
gccggacatggcgctgttcagctacagtgtgtgagttcattaccggacaactgaacattcgcatttcggctcatg

SEQ ID NO: 606814 - DNA, 75 bp, synthetic construct
  source 1..75: mol_type = other DNA
gctatgagggtgatatcaaatggatacccaccgtgatggttggaatcgctaaaacagccgtaactagagtcagac

SEQ ID NO: 606815 - DNA, 75 bp, synthetic construct
  source 1..75: mol_type = other DNA
aaaccttgaagcattcatttccaagtgccgggatcaattgactgtattcggctccgatatagattgggaagaacc

SEQ ID NO: 606816 - DNA, 75 bp, synthetic construct
  source 1..75: mol_type = other DNA
gttatcgtactgaaaatggagagcgggtcaaattgacctcgcatcaggctcgacacctgctcaacaccattgccc

SEQ ID NO: 606817 - DNA, 75 bp, synthetic construct
  source 1..75: mol_type = other DNA
cgggattatgatcggctttgattccagcatggattacgcatggatatatcgttcgatactggaaagcgtggcgct

SEQ ID NO: 606818 - DNA, 75 bp, synthetic construct
  source 1..75: mol_type = other DNA
atgtcgaagaaatacatcatagggattgatggcggaagtcagagtacaaaagtggtgatgtacgatctgcaaggc

SEQ ID NO: 606819 - DNA, 75 bp, synthetic construct
  source 1..75: mol_type = other DNA
ttgccggtcacgatttgatgagccagtttgccggaaataaagaagatattgttggcattggtctgggatcaatcc

SEQ ID NO: 606820 - DNA, 75 bp, synthetic construct
  source 1..75: mol_type = other DNA
gctggactggctgaccaatccgtgggaaccctacaaacgcgggattatgatcggctttgattccagcatggatta

SEQ ID NO: 606821 - DNA, 75 bp, synthetic construct
  source 1..75: mol_type = other DNA
caactattttggccagtggccggtggattataaaacctgggcctggagtgaagatgccgcggtaatcgagaagtt

SEQ ID NO: 606822 - DNA, 75 bp, synthetic construct
  source 1..75: mol_type = other DNA
attagctggcaggatgcacgagttacgcgcccttacgaacacacgaatcctgacgtagcgtatgtcacttctttt

SEQ ID NO: 606823 - DNA, 75 bp, synthetic construct
  source 1..75: mol_type = other DNA
cagcggattgcggcgcacctacttctccacgccatccaccgaaacgcacgaggcatacgcctactggaacggcga

SEQ ID NO: 606824 - DNA, 75 bp, synthetic construct
  source 1..75: mol_type = other DNA
atgattcaggacgcttttgtgcgccagcgtgcgcggcaactttactggcagggttatccgcccgcagaaatctca

SEQ ID NO: 606825 - DNA, 75 bp, synthetic construct
  source 1..75: mol_type = other DNA
tccgtccctacgaattcaacggctgctgcgtctgataacacaaccagaatggctggctgaagcggcgcggatcac

SEQ ID NO: 606826 - DNA, 75 bp, synthetic construct
  source 1..75: mol_type = other DNA
aaccttaccagcgtaaccagatttttttgtctgcgtcgcgtcgtcaggcgttccagtttaaaagcattattcaga

SEQ ID NO: 606827 - DNA, 75 bp, synthetic construct
  source 1..75: mol_type = other DNA
aacaccgaagacgagttcctcaatctctatatgtgtgagtttgtccgcgaaggggaatcggcatttaacctgaat

SEQ ID NO: 606828 - DNA, 75 bp, synthetic construct
  source 1..75: mol_type = other DNA
ctgcgtcggcacagtcctatacgggcaatttttattttgatgaatttttctgggtcagtcgctttgctgaactgc

SEQ ID NO: 606829 - DNA, 75 bp, synthetic construct
  source 1..75: mol_type = other DNA
gaggcaaaaaaagacaatgtcaatttaagtgtctctattgccaatcaggatttaaacaaacaactttctgatgtt

SEQ ID NO: 606830 - DNA, 75 bp, synthetic construct
  source 1..75: mol_type = other DNA
ttgccccagtcggggaaatgttcacaccactggctcccatctttgacggcctcggcgagaagctgcgtggcgtct

SEQ ID NO: 606831 - DNA, 75 bp, synthetic construct
  source 1..75: mol_type = other DNA
ggcctcggtaaaaccggtggtcgtggtcacaaaggtcagaaatctcgttctggcggtggcgtacgtcgcggtttc

SEQ ID NO: 606832 - DNA, 75 bp, synthetic construct
  source 1..75: mol_type = other DNA
caacggggccgaagtacggcggtcagagaaaactggcagtggaaacccgcggtggcgtactgccgctatgccgat

SEQ ID NO: 606833 - DNA, 75 bp, synthetic construct
  source 1..75: mol_type = other DNA
acgctcccacaggacaataaccacccgacagggcatcctgtaaactggtttcatcagaaaaaaaacaaccgttcg

SEQ ID NO: 606834 - DNA, 75 bp, synthetic construct
  source 1..75: mol_type = other DNA
cataaaaaaccaaccgtccggactgggacggaatgtactgaacagtggccgcgccggattctggcgcggcctttt

SEQ ID NO: 606835 - DNA, 75 bp, synthetic construct
  source 1..75: mol_type = other DNA
gatatgttgctggtagacgaaatgcagcaatcgctagggcgcaacccggatggtaagcatctgatcattctgcat

SEQ ID NO: 606836 - DNA, 75 bp, synthetic construct
  source 1..75: mol_type = other DNA
aaaactttgatgcagaaattggtcggaagattgcccggcagaatgctgtaaacaaaatctggatgctcgaaggtt

SEQ ID NO: 606837 - DNA, 75 bp, synthetic construct
  source 1..75: mol_type = other DNA
aataacagtatccaacggggccgaagtacggcggtcagagaaaactggcagtggaaacccgcggtggcgtactgc

SEQ ID NO: 606838 - DNA, 75 bp, synthetic construct
  source 1..75: mol_type = other DNA
catgttctatcagttcgttgattttaaggccaaagtcttcagttatatcgtaagcgtaaagccaatgccgtctgt

SEQ ID NO: 606839 - DNA, 75 bp, synthetic construct
  source 1..75: mol_type = other DNA
gaaccgcctgatctatgagcgtgccatgctggacgaaagcggcggcgtggttacccggacgcaggattttgagcc

SEQ ID NO: 606840 - DNA, 75 bp, synthetic construct
  source 1..75: mol_type = other DNA
ggaaaacgcggcgctgctgaccgggatgaaatcagcgtttcaactttcaaacgacaagattgctcacattggcga

SEQ ID NO: 606841 - DNA, 75 bp, synthetic construct
  source 1..75: mol_type = other DNA
aagtataaagaacgtccggacgttcgctggcgtcgcatcaaaaaaatcgaagctgatttgcgcaaggctgaaaag

SEQ ID NO: 606842 - DNA, 75 bp, synthetic construct
  source 1..75: mol_type = other DNA
tcaggcgtttgtgttgattacccttgccgccgcactgctcgcctccattggcgtgctggcggaatactctcattt

SEQ ID NO: 606843 - DNA, 75 bp, synthetic construct
  source 1..75: mol_type = other DNA
gtgaatttactgacagtgagtactgatctcatcagtatttttttattcacgacactgtttctgttgttttttgcc

SEQ ID NO: 606844 - DNA, 75 bp, synthetic construct
  source 1..75: mol_type = other DNA
atctcatcagtatttttttattcacgacactgtttctgttttttgcccgtaaggtggcaaaaaaagtcggtttag

SEQ ID NO: 606845 - DNA, 75 bp, synthetic construct
  source 1..75: mol_type = other DNA
tatggctgaacaactcaaccgaaaactgaaaggctgggccatgttctatcagttcgttgattttaaggccaaagt

SEQ ID NO: 606846 - DNA, 75 bp, synthetic construct
  source 1..75: mol_type = other DNA
atcgccattccgctaatggatatggtggcaattatgtaccgtcgcctgcgtaaaggcatgagtccgttctctcct

SEQ ID NO: 606847 - DNA, 75 bp, synthetic construct
  source 1..75: mol_type = other DNA
gaccgtttgggtatttcctgacgttgtttgcagtctgggcggcaattaatgctttcaatatggttgatggcattg

SEQ ID NO: 606848 - DNA, 75 bp, synthetic construct
  source 1..75: mol_type = other DNA
ccagaaacttcgccgcatcgctgacagcactgttatcaggcaactacagtgaaagcaaagtcgatatggctgaac

SEQ ID NO: 606849 - DNA, 75 bp, synthetic construct
  source 1..75: mol_type = other DNA
agagaaggccagcaaggacggtaaacctgcgcctgagtatggcggtctcggattcgttgataacgctatacccaa

SEQ ID NO: 606850 - DNA, 75 bp, synthetic construct
  source 1..75: mol_type = other DNA
gcagaagtgcgcaaacctgcgcaaaaaagtgcgcagaaaaaatctgcgcagactgcgcacaagcggaacggaaaa

SEQ ID NO: 606851 - DNA, 75 bp, synthetic construct
  source 1..75: mol_type = other DNA
ctggagttacgcagcttgcgaacgcggagccgatattcaaagttacgcaggaaaatggcgtgaatggctggaaag

SEQ ID NO: 606852 - DNA, 75 bp, synthetic construct
  source 1..75: mol_type = other DNA
aagcagttaggattcagttctgacctctacgctatgcagagcgaaatgtggttctacagcaatacgatggcggac

SEQ ID NO: 606853 - DNA, 75 bp, synthetic construct
  source 1..75: mol_type = other DNA
gaattcggcatttctgaccagcaggcaaaattcgccatgctggttgcgcagggtaaaaacctcatcgaggcatac

SEQ ID NO: 606854 - DNA, 75 bp, synthetic construct
  source 1..75: mol_type = other DNA
gaatatggaggccttggctttgttgataacgccatacccaatccggactgcccgaagtgctgcggtgagggaacg

SEQ ID NO: 606855 - DNA, 75 bp, synthetic construct
  source 1..75: mol_type = other DNA
gctgattcgccgcagccgctctactgcactgggcttatgcggtgccacatcaatggatttcaccctgcccgttct

SEQ ID NO: 606856 - DNA, 75 bp, synthetic construct
  source 1..75: mol_type = other DNA
atgttttctgggctgttaatcattctggtgccactcattgtgggttacctcattccgcttcgccaaaaagctgcg

SEQ ID NO: 606857 - DNA, 75 bp, synthetic construct
  source 1..75: mol_type = other DNA
gggagaacaggctgtttccggtaagaagccccgcaggcgcaaactgaaaaatcacttcaccgaagagcagattgt

SEQ ID NO: 606858 - DNA, 75 bp, synthetic construct
  source 1..75: mol_type = other DNA
cggaaaccgtgccgatgctcaaacccctgcagctgttcaacgctgagcagtgtgaggggttgccggcagaggttg

SEQ ID NO: 606859 - DNA, 75 bp, synthetic construct
  source 1..75: mol_type = other DNA
cgctcatggaaacggtaccggtactgaaagcgaatcctctgtttaatgtgggacagtgcgacggtttacctgagc

SEQ ID NO: 606860 - DNA, 75 bp, synthetic construct
  source 1..75: mol_type = other DNA
gcgtgggcaaccatgcttgctgtcattaacgaaccgattggcggcgaaggagaaaacgagcgtttcacggttatg

SEQ ID NO: 606861 - DNA, 75 bp, synthetic construct
  source 1..75: mol_type = other DNA
ctgggcgcgggtcgatgaatcttccgataataattcattgcttaatccggcgaagaaattcacttatcaggcacc

SEQ ID NO: 606862 - DNA, 75 bp, synthetic construct
  source 1..75: mol_type = other DNA
gtaaaggctgacaatggcgagatctggtatcttcatgacgttggtgacgggtatgtcggatgcagatcgagagag

SEQ ID NO: 606863 - DNA, 75 bp, synthetic construct
  source 1..75: mol_type = other DNA
gagataccaagaatgcctacctcgcggtaatgactgacaacttcaacacagaagttaaatcattttcggtcaatg

SEQ ID NO: 606864 - DNA, 75 bp, synthetic construct
  source 1..75: mol_type = other DNA
agccagtgccggagtataaaccaaagctggcaagcaaaggaacgaagacgcggcatctggcaatacttcgcgcta

SEQ ID NO: 606865 - DNA, 75 bp, synthetic construct
  source 1..75: mol_type = other DNA
tcgaagatcctgactttaacgaagcgcgtaatgtcagcgcgttgttcctggtgcgcgagtggttgaaggggcagg

SEQ ID NO: 606866 - DNA, 75 bp, synthetic construct
  source 1..75: mol_type = other DNA
ggagcagatggagaatgtatggcatcagaggaagacggccagagagataaaggcaaaacagaaagcagcggagag

SEQ ID NO: 606867 - DNA, 75 bp, synthetic construct
  source 1..75: mol_type = other DNA
ccaggaatttgctgatggcatgtatcctggtgctgaccttgcatatttacgatccctcgttgagcagcgttataa

SEQ ID NO: 606868 - DNA, 75 bp, synthetic construct
  source 1..75: mol_type = other DNA
gggtaaaaagccgacagaggcgtaccgactggccggttatgaggggcaaggtgcgacagctaacagcaacgccag

SEQ ID NO: 606869 - DNA, 75 bp, synthetic construct
  source 1..75: mol_type = other DNA
aaagtgcgcgaaaaaaaactgcgcagactgcgcaaaggcagaacggaaaatctcagaaaaaaaaggctgtatccg

SEQ ID NO: 606870 - DNA, 75 bp, synthetic construct
  source 1..75: mol_type = other DNA
agccagtgaatacctgcgcaaaggagctcaggtgtacatcgatggtcagctgcgtacccgaaaatggaccgacca

SEQ ID NO: 606871 - DNA, 75 bp, synthetic construct
  source 1..75: mol_type = other DNA
acagtgagacgaacttcgccgtgcgctttcgtgttgtgtgcctgcttttaaccacgtcaggcgaggtggtatcct

SEQ ID NO: 606872 - DNA, 75 bp, synthetic construct
  source 1..75: mol_type = other DNA
ttgcccagttgtcaccagagttcacggcccgacttgttgaccgttggcaggaactggagagcagcggtggaatga

SEQ ID NO: 606873 - DNA, 75 bp, synthetic construct
  source 1..75: mol_type = other DNA
cccgaaccggaatatggaggcctcggctttgttgataacgccatacccaatccgggtaatgactccaacttattg

SEQ ID NO: 606874 - DNA, 75 bp, synthetic construct
  source 1..75: mol_type = other DNA
gggcacgtttcccggtaaaaatgctccaggggccagataaaaaaaacaaagggcagaaacgtgatcaactttggc

SEQ ID NO: 606875 - DNA, 75 bp, synthetic construct
  source 1..75: mol_type = other DNA
ttacccgccacaaagagataacgcatgttgagtacagcgatcgttatcttaatagcccattcacggcgcgtttgt

SEQ ID NO: 606876 - DNA, 75 bp, synthetic construct
  source 1..75: mol_type = other DNA
ttgggctgatgtctttaattacgccagaaaattgctcgattgcagttgcgataaattctgtcaccactgcttgct

SEQ ID NO: 606877 - DNA, 75 bp, synthetic construct
  source 1..75: mol_type = other DNA
atgcgacataattacttgatcatgccagtcatgcccctgccggatccggatgtggtccggcgctttgttccgcgg

SEQ ID NO: 606878 - DNA, 75 bp, synthetic construct
  source 1..75: mol_type = other DNA
acattcccctgtatttccaaatcccctgcctccgtgtgactcgattgtccgaagaacctgcacgcatacgtccgt

SEQ ID NO: 606879 - DNA, 75 bp, synthetic construct
  source 1..75: mol_type = other DNA
aagtaatgcgctgattcaacatgcccgcgaggaaggattatggtctactcgcagcgaccgactggccctgaaaga

SEQ ID NO: 606880 - DNA, 75 bp, synthetic construct
  source 1..75: mol_type = other DNA
gtatcagtgcctgtttcccgctggatacgtatccgcgcccggcagaaaaaagccagtatgaaggaagtcgatcgt

SEQ ID NO: 606881 - DNA, 75 bp, synthetic construct
  source 1..75: mol_type = other DNA
cgctaccgccgcacaatggataataatttccgcctggtgagtgtgtatattaccgacatgaaaatcacggaaatc

SEQ ID NO: 606882 - DNA, 75 bp, synthetic construct
  source 1..75: mol_type = other DNA
ggatacagcgggaagcgggccagtgaatccgcacaggcacttgatgaagtggaaagactggccgcgatgatcccg

SEQ ID NO: 606883 - DNA, 75 bp, synthetic construct
  source 1..75: mol_type = other DNA
ttggtagcgcaaccagccgctgccgaagtggatgagtttgctcttgatgtagatgtttattctgaagatgaagac

SEQ ID NO: 606884 - DNA, 75 bp, synthetic construct
  source 1..75: mol_type = other DNA
tggcggataaacttaaacgccttactcagggaaccgtactgatgtcattgacggcaacccagctcttgacccgca

SEQ ID NO: 606885 - DNA, 75 bp, synthetic construct
  source 1..75: mol_type = other DNA
aacggcgggctgctcatggcgctgttactggctctgctgatgctggtctgtattattcagcgtctggcaactggc

SEQ ID NO: 606886 - DNA, 75 bp, synthetic construct
  source 1..75: mol_type = other DNA
ccctttggctgctcggtgcgtacatcggtgaaggtacgccatttccgcccggacctggtggtgtcagcctacagc

SEQ ID NO: 606887 - DNA, 75 bp, synthetic construct
  source 1..75: mol_type = other DNA
gtcacgcatgtctatcgtaatggtggggagcaaatcgtacattttcattccctcatccattacccgcgcagttaa

SEQ ID NO: 606888 - DNA, 75 bp, synthetic construct
  source 1..75: mol_type = other DNA
aagcaatgttaggacagattgagcgtaatgagtccagcccgacggtcgcgacattatggaaaattgccactgggt

SEQ ID NO: 606889 - DNA, 75 bp, synthetic construct
  source 1..75: mol_type = other DNA
gtgcaataagtgaatcgacgccccatgagaagggagtaatcgaacatgttgtcgtcattgatgggcaacttgatc

SEQ ID NO: 606890 - DNA, 75 bp, synthetic construct
  source 1..75: mol_type = other DNA
gctgattgacttttgtcaggctaaaggggattacacggaaaatcggcagattgcagagcaggagcgcaagcgttg

SEQ ID NO: 606891 - DNA, 75 bp, synthetic construct
  source 1..75: mol_type = other DNA
aaaaagcctgtcgggatgccttcaccgcgctgaaaaaagaaaacgtgggagaatttgctctccggggcgtctgcg

SEQ ID NO: 606892 - DNA, 75 bp, synthetic construct
  source 1..75: mol_type = other DNA
taatgagtccagcccgacggtcgcgacattatggaaaattgccaccgggttgaacgtgccattttcgacatttat

SEQ ID NO: 606893 - DNA, 75 bp, synthetic construct
  source 1..75: mol_type = other DNA
atttctcaaagatgccatttggaaggttcaagtctgacagcccgaacagtgctgagcgttttcgtaaggactttc

SEQ ID NO: 606894 - DNA, 75 bp, synthetic construct
  source 1..75: mol_type = other DNA
gatgcggtgtctacctatctgtttaacagccaactgttgagccgcgatgatggttccatgatgttggtgctgcct

SEQ ID NO: 606895 - DNA, 75 bp, synthetic construct
  source 1..75: mol_type = other DNA
aatccgcgctcggccagccagcacagcaagatccgctttaaaaatgccgatgccatcggcttcccggcaggggat

SEQ ID NO: 606896 - DNA, 75 bp, synthetic construct
  source 1..75: mol_type = other DNA
ccacgcccagtatctcgatggtcgtcgtaaaatgatgcaatggtacgctgactacattgattcactttcagggca

SEQ ID NO: 606897 - DNA, 75 bp, synthetic construct
  source 1..75: mol_type = other DNA
taatcccaaaagagagaatgaaaatgcgacgacctcatgtcgtcccactttctcatcaggttcagatgttattga

SEQ ID NO: 606898 - DNA, 75 bp, synthetic construct
  source 1..75: mol_type = other DNA
gttgctgattacgctaaatttgccgaagaacaacgtatcaaagcagcagaaaaggccgctcaggatgccgctctt

SEQ ID NO: 606899 - DNA, 75 bp, synthetic construct
  source 1..75: mol_type = other DNA
ctctggcggagcaggcggaagtggtgttagtggtggggtcgaaaaactcttccaactccaaccgcctggcagaac

SEQ ID NO: 606900 - DNA, 75 bp, synthetic construct
  source 1..75: mol_type = other DNA
actttcttacatttttgatggtgtttctggtatcgttagttcttattagtgcaaaaataaagtcgaatggcctgt

SEQ ID NO: 606901 - DNA, 75 bp, synthetic construct
  source 1..75: mol_type = other DNA
actttcttacatttttgatgctctttctggtatcgttagttcttattagtgcaaaaataaagtcgaatggcctgt

SEQ ID NO: 606902 - DNA, 75 bp, synthetic construct
  source 1..75: mol_type = other DNA
actttcttacatttttgatgatatttctggtatcgttagttcttattagtgcaaaaataaagtcgaatggcctgt

SEQ ID NO: 606903 - DNA, 75 bp, synthetic construct
  source 1..75: mol_type = other DNA
tcgattacattgaagtgttctacaaccggacccggcgccacagtcatctgggtggcgtcagcccggaggccttcg

SEQ ID NO: 606904 - DNA, 75 bp, synthetic construct
  source 1..75: mol_type = other DNA
actttcgtacatttttgatggtttttctggtatcgttagttcttattagtgcaaaaataaagtcgaatggcctgt

SEQ ID NO: 606905 - DNA, 75 bp, synthetic construct
  source 1..75: mol_type = other DNA
actttcctacatttttgatgctttttctggtatcgttagttcttattagtgcaaaaataaagtcgaatggcctgt

SEQ ID NO: 606906 - DNA, 75 bp, synthetic construct
  source 1..75: mol_type = other DNA
gcagatgtaccgcgcgacctactcaccggatgacaacaaactgcgcctgtatgccgcgtcacgccttgacccgga

SEQ ID NO: 606907 - DNA, 75 bp, synthetic construct
  source 1..75: mol_type = other DNA
gttgtcgccagacaggccgcgaagcgcccgcctgttgtcaattatccgggagaaggtttccgggaaatgacaaag

SEQ ID NO: 606908 - DNA, 75 bp, synthetic construct
  source 1..75: mol_type = other DNA
acaaaagcaacggggcggtgagttcagtcacaacgccaaattacagtttcctcgggtacagcggcacgatgaaag

SEQ ID NO: 606909 - DNA, 75 bp, synthetic construct
  source 1..75: mol_type = other DNA
actttcatacatttttgatgatttttctggtatcgttagttcttattagtgcaaaaataaagtcgaatggcctgt

SEQ ID NO: 606910 - DNA, 75 bp, synthetic construct
  source 1..75: mol_type = other DNA
atttactgcccgccttacccaccggggcggtgcgcatcaatctctgtgaacaactggacgggccgctggaaggtt

SEQ ID NO: 606911 - DNA, 75 bp, synthetic construct
  source 1..75: mol_type = other DNA
gcctggctggatgtgtgcactacgtccacaggcagagacggaaaccacggaataccgtgacaaccaggccgatgc

SEQ ID NO: 606912 - DNA, 75 bp, synthetic construct
  source 1..75: mol_type = other DNA
cattgaagtgttctacaaccgggcccggcgccacagtcatctcggcggggtcagtccggaggcctttgaacaggc

SEQ ID NO: 606913 - DNA, 75 bp, synthetic construct
  source 1..75: mol_type = other DNA
gagtgcatagcacttaccacgctggcaaactcaacacgctggaaaatggagcaggcaggtaaattcccgcgacgt

SEQ ID NO: 606914 - DNA, 75 bp, synthetic construct
  source 1..75: mol_type = other DNA
acgcaaacaatgagaattacattcagcatcccttttcctaaagaagtggactgcgccatgcttacccattctggt

SEQ ID NO: 606915 - DNA, 75 bp, synthetic construct
  source 1..75: mol_type = other DNA
gacgtataaaaaagtgcatgatgccggttttcgctgggcacccaaacaggcgctgtttgtcgcgccagcctggac

SEQ ID NO: 606916 - DNA, 75 bp, synthetic construct
  source 1..75: mol_type = other DNA
cgctatcagcattgttgaaaacgcgctggccatttacggcgcaccgatatatgtccgtcacgaagtggtgcataa

SEQ ID NO: 606917 - DNA, 75 bp, synthetic construct
  source 1..75: mol_type = other DNA
gaagtagaaggtacgatgggccagtacagcaacccggaagggggaatgtatctggtcgaatcgccggaagatgtg

SEQ ID NO: 606918 - DNA, 75 bp, synthetic construct
  source 1..75: mol_type = other DNA
aaagtgcatatggaagtcgcccgcgccagccgtcgtggcgaagagtcgattctcatcggccacgccgggcatccg

SEQ ID NO: 606919 - DNA, 75 bp, synthetic construct
  source 1..75: mol_type = other DNA
gctgcataacccggtctcggcacgtgataaagataatcagcgtctgctgacgcttatccgtgactcctattcact

SEQ ID NO: 606920 - DNA, 75 bp, synthetic construct
  source 1..75: mol_type = other DNA
catggcctgttgtaatggggattaacgccattatcgccgccgctggcgtgatgggtacggttttcactgttgtcg

SEQ ID NO: 606921 - DNA, 75 bp, synthetic construct
  source 1..75: mol_type = other DNA
gaagaccacggggcataccgctaccgccgcacaatggacaataatttccgcctggtgaatgtgtatatcaccgac

SEQ ID NO: 606922 - DNA, 75 bp, synthetic construct
  source 1..75: mol_type = other DNA
gcgcgcagcgtgaggctgaaaagcttgccgcgcagaacggcgctgaacaaacaggtattgagctggtggctatga

SEQ ID NO: 606923 - DNA, 75 bp, synthetic construct
  source 1..75: mol_type = other DNA
cagtaagctccaccctaaagtggatgctggattccgcttttggagtgagatggttgccgcgcttcgccgtattct

SEQ ID NO: 606924 - DNA, 75 bp, synthetic construct
  source 1..75: mol_type = other DNA
gcggcgcatcagcagccctgtgagttcagactctacccaggcacgctgcacgcctttttgcattattcacgaatg

SEQ ID NO: 606925 - DNA, 75 bp, synthetic construct
  source 1..75: mol_type = other DNA
ttcaccggagtatcgtgaacagatgcgccgatgagattcgcaaggttggcgtcaaagtcagcatcaaggggaatt

SEQ ID NO: 606926 - DNA, 75 bp, synthetic construct
  source 1..75: mol_type = other DNA
ctatgtgccgatcgacgacgatcacaaatgggttgtgctgggccgtactcgttggggttacggtgatggcttagg

SEQ ID NO: 606927 - DNA, 75 bp, synthetic construct
  source 1..75: mol_type = other DNA
cgttgagctggaatccgcagagaagcgcatagcagaactggaagcgcgggaaatactgctcccggaacgtagcag

SEQ ID NO: 606928 - DNA, 75 bp, synthetic construct
  source 1..75: mol_type = other DNA
ttgcgctaacggtagggaagctgcgcgttgagcttgaagcagaaaaacagcgggcaaaagttctatttatggaaa

SEQ ID NO: 606929 - DNA, 75 bp, synthetic construct
  source 1..75: mol_type = other DNA
tggaatgctgacgctccagaaatggcaaccagagcttacgcagtccccacgccttatggccaggtggaaacacgg

SEQ ID NO: 606930 - DNA, 75 bp, synthetic construct
  source 1..75: mol_type = other DNA
atgactgccgcctcaaccggcaaacttgaccagctaacctccaccctgaaagcctcagacggaaaaaccgcagag

SEQ ID NO: 606931 - DNA, 75 bp, synthetic construct
  source 1..75: mol_type = other DNA
caacagcggaaaaaaacgacttacaggcacaggagagcgaacgaaaacaggcggtccaaaaacgaatcgagggaa

SEQ ID NO: 606932 - DNA, 75 bp, synthetic construct
  source 1..75: mol_type = other DNA
acgcattctgcactttgcttatgcattctcccgcgagtattttgaaaaacatcagaaccgtgaaataccactcgt

SEQ ID NO: 606933 - DNA, 75 bp, synthetic construct
  source 1..75: mol_type = other DNA
atggtacagacgtgacgttaggcttcccggttaacgaatacaactcgctgcgtgcaggtctgggttatgtacata

SEQ ID NO: 606934 - DNA, 75 bp, synthetic construct
  source 1..75: mol_type = other DNA
cgcgtaaccgtgttgaccttaaactggtgttccaggaaggtgtgtcagcagaaatccagcaaatcaatattgttg

SEQ ID NO: 606935 - DNA, 75 bp, synthetic construct
  source 1..75: mol_type = other DNA
atgcgcatcagcaacatcgactggttgaagaaacgaatcggctttatcaggaagctcggagaacagaccgcacga

SEQ ID NO: 606936 - DNA, 75 bp, synthetic construct
  source 1..75: mol_type = other DNA
gaggattaccaaacggtaatggcatacaaagtttctgaagtcatcgctgcaatccgcgtcgctggcattcgcatc

SEQ ID NO: 606937 - DNA, 75 bp, synthetic construct
  source 1..75: mol_type = other DNA
cgagcagcgcgagtattacgagggagttatctctgatgggtgcaagcgtattgctgaactggaagcgcgggaagt

SEQ ID NO: 606938 - DNA, 75 bp, synthetic construct
  source 1..75: mol_type = other DNA
cagcgtgagtattacgaaggtgttatctcggatgggagtaagcgtattgctgaactggagaaaatcgccactgac

SEQ ID NO: 606939 - DNA, 75 bp, synthetic construct
  source 1..75: mol_type = other DNA
caattgagatgtacaaaccaactgtgcgcattgtggaagttaatgtgccacgcgtcgctggcgttcgcatcaaag

SEQ ID NO: 606940 - DNA, 75 bp, synthetic construct
  source 1..75: mol_type = other DNA
atgagaacggtactgaaattgatcatgagatgtctattaccgattacgcactgcaagctgccggaactgtagacg

SEQ ID NO: 606941 - DNA, 75 bp, synthetic construct
  source 1..75: mol_type = other DNA
acaggttaagcgtgaaaatccgccagtcgaaaccggagcatggaaagacgctgttgactgggtactcaaagaggc

SEQ ID NO: 606942 - DNA, 75 bp, synthetic construct
  source 1..75: mol_type = other DNA
atcaaaagccgcgatcaggagaacgaggatattgcgctaacggtagggaagctgagagttgagcttgaagcagca

SEQ ID NO: 606943 - DNA, 75 bp, synthetic construct
  source 1..75: mol_type = other DNA
aagctgagagttgagcttgaggaagcaaaatcaaaactcaacgagcagcgtgagtattacgaaggtgttatctcg

SEQ ID NO: 606944 - DNA, 75 bp, synthetic construct
  source 1..75: mol_type = other DNA
gcatcaaacgggattctgtgttgtggtgacgcgcagtggaacattgatgcgtctaaattggcactggccgcagcc

SEQ ID NO: 606945 - DNA, 75 bp, synthetic construct
  source 1..75: mol_type = other DNA
ggcagcatcaggttcttgaggcactgcacaacgctggaataaacgtcaccgaagcaggtaaaggagaggcatcat

SEQ ID NO: 606946 - DNA, 75 bp, synthetic construct
  source 1..75: mol_type = other DNA
atgaagatttccaaatggaacagcaggccaatgctgaattcatcgccgcagccaatccagctaccgtgctggcac

SEQ ID NO: 606947 - DNA, 75 bp, synthetic construct
  source 1..75: mol_type = other DNA
tgagatgtacaaaccaactgtgcgcatcgtggaagttaatgtgccacgcgtcgctggcattcgcatcaaaggaga

SEQ ID NO: 606948 - DNA, 75 bp, synthetic construct
  source 1..75: mol_type = other DNA
gccagtcgaaaccggagcatggaaagacgctgttgactgggtgctcaaagaggcttgccaagctgtaaacattgg

SEQ ID NO: 606949 - DNA, 75 bp, synthetic construct
  source 1..75: mol_type = other DNA
gctatgaacttttcactggccagtgtgggaatccaggctcaaggacgtacttctgtcctgccagtcaattatcgt

SEQ ID NO: 606950 - DNA, 75 bp, synthetic construct
  source 1..75: mol_type = other DNA
ctgtttgataacgtatcccgttcactgctcctgatgtacgatgatgcccagtccatttaccggcgggagcgggcc

SEQ ID NO: 606951 - DNA, 75 bp, synthetic construct
  source 1..75: mol_type = other DNA
cagcaggagattctggccagaaatattggtgatgggcatcgtgttattcatggggtagccggctctggaaaaaca

SEQ ID NO: 606952 - DNA, 75 bp, synthetic construct
  source 1..75: mol_type = other DNA
acgatgaaagcctagttcgtgccggtgctgcgtatgtttacaatcacaccaaagagtcacaggtaatgctcggat

SEQ ID NO: 606953 - DNA, 75 bp, synthetic construct
  source 1..75: mol_type = other DNA
gccagacaggttgcagactggctggagaagtgccatgccctgtgcggtcactggagtgatatggctgtgctgtgt

SEQ ID NO: 606954 - DNA, 75 bp, synthetic construct
  source 1..75: mol_type = other DNA
caggcgggcggtgaagagggcacagaaccggaaatcctgcgttgtacttctgaacgtgatgaagccagacaggta

SEQ ID NO: 606955 - DNA, 75 bp, synthetic construct
  source 1..75: mol_type = other DNA
ccatctgtttcctgaagtgaccgtgaaacagaactcacaaatcaaaatcatggatattcagcaggagattctggc

SEQ ID NO: 606956 - DNA, 75 bp, synthetic construct
  source 1..75: mol_type = other DNA
atgtcgcacaaattctgctttcggtgctgtttttagccatcatgattgtggcatgtctgtggattgtacaaccct

SEQ ID NO: 606957 - DNA, 75 bp, synthetic construct
  source 1..75: mol_type = other DNA
ctggcggcagttgccgcccttgatgtgctacaacggatgagtaaggatttattccataccgagtttatttttaaa

SEQ ID NO: 606958 - DNA, 75 bp, synthetic construct
  source 1..75: mol_type = other DNA
aacgaagccgtcagtcgcgaacgccaggcaggaatgcagatggtgcaatctgtgcttgagcgcatcggggaggtg

SEQ ID NO: 606959 - DNA, 75 bp, synthetic construct
  source 1..75: mol_type = other DNA
cgcgtgggtggaagaagtcccaccgccgactgaccaaccggaagaagttctcgaagaacttggcgaaatcgagaa

SEQ ID NO: 606960 - DNA, 75 bp, synthetic construct
  source 1..75: mol_type = other DNA
ttcctggcgtctgtttgccgcgtgggtggaagaagtcccgccgccgacggaccaaccggaagaaattctcgaaga

SEQ ID NO: 606961 - DNA, 75 bp, synthetic construct
  source 1..75: mol_type = other DNA
attgctttcgggatgatcggtctgtttattggtccggttctgttagccgtttcctggcgtctgtttgccgcgtgg

SEQ ID NO: 606962 - DNA, 75 bp, synthetic construct
  source 1..75: mol_type = other DNA
tagttgagtttcatccagcaacaactatgcctataaccgtaagaaaccaaggcaaagattatccacctccaacag

SEQ ID NO: 606963 - DNA, 75 bp, synthetic construct
  source 1..75: mol_type = other DNA
acggctgacagaaaggattacccggagaaatgcttcagcacactggaagaggctgtgaacagcgggaaaatcacc

SEQ ID NO: 606964 - DNA, 75 bp, synthetic construct
  source 1..75: mol_type = other DNA
ggtctaacagactgggtccaaaagcatatggataacgtgtgtgatctggcaggccagcctgaaataaccatgtac

SEQ ID NO: 606965 - DNA, 75 bp, synthetic construct
  source 1..75: mol_type = other DNA
ctccgccccaagaaggagataaaggtattctgtatgattttaatgacggagcaagagtcttacttccgaaaggcg

SEQ ID NO: 606966 - DNA, 75 bp, synthetic construct
  source 1..75: mol_type = other DNA
aagagggcacagaaccggaaatcctgcgttgtgcttctgaacgtgatgaagccagacaggttgcagactggctgg

SEQ ID NO: 606967 - DNA, 75 bp, synthetic construct
  source 1..75: mol_type = other DNA
agtgtggggattcaggcacagggacgcacttctgtcctgccggtcaattatcgtaatccgaaacgcattctgcac

SEQ ID NO: 606968 - DNA, 75 bp, synthetic construct
  source 1..75: mol_type = other DNA
gcgttgtgcttctgaacgtgatgaagccagacaagttgcagactggctggagaagcgccatgtcctgtgtggtca

SEQ ID NO: 606969 - DNA, 75 bp, synthetic construct
  source 1..75: mol_type = other DNA
tagcaaagctaaaaatatatttaccatctttaaatgagcaagtgaaaattgcttctgttcttgatttatctgatg

SEQ ID NO: 606970 - DNA, 75 bp, synthetic construct
  source 1..75: mol_type = other DNA
attaaggataggcatactctgaaaaaatgtaatgacgatgatattctaataggtagatatggagcatctattgga

SEQ ID NO: 606971 - DNA, 75 bp, synthetic construct
  source 1..75: mol_type = other DNA
aggatttttgtagcaccggtagcggtggaacacccagtagggcaaagcctgagtattatgaggggggagatatcc

SEQ ID NO: 606972 - DNA, 75 bp, synthetic construct
  source 1..75: mol_type = other DNA
atgaagtgacgccagcggagtttgatgccctgctgctaccgggcggccattcaccggattatctgcgtggcgaca

SEQ ID NO: 606973 - DNA, 75 bp, synthetic construct
  source 1..75: mol_type = other DNA
tcaccggattatctgcgtggtgataatcgttttgtcaccttcacgcgagattttgtgaatagcggtaaaccggtc

SEQ ID NO: 606974 - DNA, 75 bp, synthetic construct
  source 1..75: mol_type = other DNA
tgccctgctgcttccaggtggccattcaccagattatctgcgtggtgataatcgttttgtcacctttacgcgaga

SEQ ID NO: 606975 - DNA, 75 bp, synthetic construct
  source 1..75: mol_type = other DNA
cgtttttcactgctggagcagatagaaaaaagcgcgtccaatccagcgatacgccgcaccgagcttatgacgcga

SEQ ID NO: 606976 - DNA, 75 bp, synthetic construct
  source 1..75: mol_type = other DNA
ccgacatattgcccgtcaggcagtaagagacatcatccgcagagagctgccgcccatcaatatggtgaatgctca

SEQ ID NO: 606977 - DNA, 75 bp, synthetic construct
  source 1..75: mol_type = other DNA
taacagcgaagacggcgacacgattctggtcgttttgattacaccaaatgtgcttaattccggctccagtgcagt

SEQ ID NO: 606978 - DNA, 75 bp, synthetic construct
  source 1..75: mol_type = other DNA
ccgtggtaaccgtggggcaaccggcgtcttctttatgacactggtgaccatcgcgactatcgtttactggatgaa

SEQ ID NO: 606979 - DNA, 75 bp, synthetic construct
  source 1..75: mol_type = other DNA
atggaagcagcctcaagcggcaaacttgacaggctcactgccgcgtttaaagcctcggacggtaaaaccgaggaa

SEQ ID NO: 606980 - DNA, 75 bp, synthetic construct
  source 1..75: mol_type = other DNA
ttcggggcgcgtccgcgccctctaggactcgtgtcaataactgtactgaggtcaaaaaacatacaaattcagggg

SEQ ID NO: 606981 - DNA, 75 bp, synthetic construct
  source 1..75: mol_type = other DNA
agccatacacagagtggccacccgggatgacaaaaaaggggccaaaagtggcgcatacagggcctatcttgatgg

SEQ ID NO: 606982 - DNA, 75 bp, synthetic construct
  source 1..75: mol_type = other DNA
gaaatcgcgggtgaattgctacacgagcaggcagatgagcgtcaggcactaagccttgctatgcctaaagtcagc

SEQ ID NO: 606983 - DNA, 75 bp, synthetic construct
  source 1..75: mol_type = other DNA
tggcgattatttaccaggaactgcatctcgtgccggaaatgaccgtcgcggaaaatatttatctcggccagcttc

SEQ ID NO: 606984 - DNA, 75 bp, synthetic construct
  source 1..75: mol_type = other DNA
caaaagttgtgagcggcacaatgtcttccagcggcagtaccggctctaccagttctggcggtatgactggcgacg

SEQ ID NO: 606985 - DNA, 75 bp, synthetic construct
  source 1..75: mol_type = other DNA
acgcacaaaaagcgactgaatacgcgaaaaaaattcgtaataacccggttatccaggattcaacaaaacaatgga

SEQ ID NO: 606986 - DNA, 75 bp, synthetic construct
  source 1..75: mol_type = other DNA
agggattatcgcagcgcggataattcgccgatcacctggaccttctccggcggagaacagacagatccccgcgca

SEQ ID NO: 606987 - DNA, 75 bp, synthetic construct
  source 1..75: mol_type = other DNA
caaaaatgattatccggacgactataacgaaaaagcggaacaggagctgacggcgaagcaaatcttcatgcagta

SEQ ID NO: 606988 - DNA, 75 bp, synthetic construct
  source 1..75: mol_type = other DNA
cagatttttctatcagcgtcgcgtcgccaggcgcaccagttccgtggcttcatccagaagattgccgaagaggta

SEQ ID NO: 606989 - DNA, 75 bp, synthetic construct
  source 1..75: mol_type = other DNA
agctggaagacactcaacagcggcctgttgtgcccggacaaaacctggcggcagattgtcaccctgaaggacgtg

SEQ ID NO: 606990 - DNA, 75 bp, synthetic construct
  source 1..75: mol_type = other DNA
cgcgcctcatccagcttactgaaaaacagaataaaacaggcggtgacttcaaggaaatagacctgctgacccggc

SEQ ID NO: 606991 - DNA, 75 bp, synthetic construct
  source 1..75: mol_type = other DNA
gcctgggcaacaatgcttgccgtgattaatgagccaatcggtgcagagcgggaggataaccgtggctttgcaatg

SEQ ID NO: 606992 - DNA, 75 bp, synthetic construct
  source 1..75: mol_type = other DNA
gtgaaaaagtttttcccgatggccgtgccgtacaacttcaatatcgcctccaagcgggcactggtcatgaaaatg

SEQ ID NO: 606993 - DNA, 75 bp, synthetic construct
  source 1..75: mol_type = other DNA
tgcagagcttcacttccttggcacatcggcagcaaccgctcagtcgtataccggacaccttaaatttgatgaatt

SEQ ID NO: 606994 - DNA, 75 bp, synthetic construct
  source 1..75: mol_type = other DNA
cgcgcttcgtgaaaaaatcctcccgacgctggcgtggcatcaacgtgaatggtacgaaaaccgtcaccaccgcaa

SEQ ID NO: 606995 - DNA, 75 bp, synthetic construct
  source 1..75: mol_type = other DNA
taagggcaagacaactttactggcaagggtacacacctgcggaaatctcgcaactgatggggatcagccagaaca

SEQ ID NO: 606996 - DNA, 75 bp, synthetic construct
  source 1..75: mol_type = other DNA
gctgcgctacggcatcctcgactggtcgccaacctacctgaaagaggtgaaacacttcgcgctggataaatcttc

SEQ ID NO: 606997 - DNA, 75 bp, synthetic construct
  source 1..75: mol_type = other DNA
gccagagtcattgaagagttcacgtatcgctacaacgtggaacacatcggcattgatgtgacgggcgggaacggg

SEQ ID NO: 606998 - DNA, 75 bp, synthetic construct
  source 1..75: mol_type = other DNA
gaagttgatgtcgaactgaaagggggggacaagattgttttgtctaacggtgcagagcttcacttccttggcaca

SEQ ID NO: 606999 - DNA, 75 bp, synthetic construct
  source 1..75: mol_type = other DNA
cggtttattcgtggaaaaaacgcgatgagtgggatgcaactcccccgatccagcgggtcacccagtccattgatg

SEQ ID NO: 607000 - DNA, 75 bp, synthetic construct
  source 1..75: mol_type = other DNA
gcaaataatgctgatcaccatattcgttcgctcaatatcaaaacgccaggagcagagcaattaatcatgaatctc

SEQ ID NO: 607001 - DNA, 75 bp, synthetic construct
  source 1..75: mol_type = other DNA
atgggcgtgatggatgagaaattcggtagcgcggcggctgcttacagctatctgatattcgtcctgctgtatgta

SEQ ID NO: 607002 - DNA, 75 bp, synthetic construct
  source 1..75: mol_type = other DNA
tcgctcgtgaatccagccgaggctggatgggcttctccattctgtgggggctgaatatcgcttactcactcgcca

SEQ ID NO: 607003 - DNA, 75 bp, synthetic construct
  source 1..75: mol_type = other DNA
tcgtgatggcggtgctgactggcctgatgctcaagtacaccatcatgcgcggtgaagcgacgccgtttgtcatgg

SEQ ID NO: 607004 - DNA, 75 bp, synthetic construct
  source 1..75: mol_type = other DNA
tgcgcgagatagcaaaacaggcaacacaaggcgaatgggtcgcatttatttcgccgggcaaatacggcacgtacg

SEQ ID NO: 607005 - DNA, 75 bp, synthetic construct
  source 1..75: mol_type = other DNA
caagcgtattgctgaactggaggagcgggaaatactgctcccggaacgtagcagcatgcttcatcgaacagattt

SEQ ID NO: 607006 - DNA, 75 bp, synthetic construct
  source 1..75: mol_type = other DNA
ctgagtgctttcaacagcttctctctgagcgggaaaatcgtcgataacatcaacgactcggcgctggcgtccgtc

SEQ ID NO: 607007 - DNA, 75 bp, synthetic construct
  source 1..75: mol_type = other DNA
tcatgtgagcgttacgatcatgatttcggcggttgggtagaaagcgaatgtcttgggttatatctgattgatgat

SEQ ID NO: 607008 - DNA, 75 bp, synthetic construct
  source 1..75: mol_type = other DNA
cccacaaaatgttccaacgggaacaatgcagggcagaggccgcagagaagcgcattgctgaactggaagcgcggg

SEQ ID NO: 607009 - DNA, 75 bp, synthetic construct
  source 1..75: mol_type = other DNA
attgcggaatgtcatgttaactgcctggttgaaacagatgttcaggcttatgcaaacgctgaatttattgctgcc

SEQ ID NO: 607010 - DNA, 75 bp, synthetic construct
  source 1..75: mol_type = other DNA
gatatcgaactactggcaagccgcaaaacggtaagcagttgctgcgcagccagcaccactggcgattgccactaa

SEQ ID NO: 607011 - DNA, 75 bp, synthetic construct
  source 1..75: mol_type = other DNA
gcacattgccgatgcacgttaccagtgtattgctgccatctgcgatgtggtaagcaatactctgacggcagaacc

SEQ ID NO: 607012 - DNA, 75 bp, synthetic construct
  source 1..75: mol_type = other DNA
ccattgccggggaaatagaaatcgcgatgaaggctattggtgtaccggttaagtggactaatggcgatgcagaaa

SEQ ID NO: 607013 - DNA, 75 bp, synthetic construct
  source 1..75: mol_type = other DNA
caaccctgaagtagtgcaggcgttgctggatgaacgggaaagaaaccagcaatacatgaaacgccgtgaccagga

SEQ ID NO: 607014 - DNA, 75 bp, synthetic construct
  source 1..75: mol_type = other DNA
cgcagcagcaaggtcttgatgcggcgctgattgatgcgccgttagcggtcgatgcgcaaacgcctcttagcgagt

SEQ ID NO: 607015 - DNA, 75 bp, synthetic construct
  source 1..75: mol_type = other DNA
attatgtccgtaccttcttccgtggcgtcgatattagccaggtgttcagcgcaaaagatattgcccgccgcagcc

SEQ ID NO: 607016 - DNA, 75 bp, synthetic construct
  source 1..75: mol_type = other DNA
ggaaaaagctattgatgcactgcgtcaggtcgggctggaaaattatgcccacagttatccggacgaactttctgg

SEQ ID NO: 607017 - DNA, 75 bp, synthetic construct
  source 1..75: mol_type = other DNA
atgtacaaaccaacagtgcgcatcgtggaagttaatgtgccgcgcgccgctggcattcgcatcaaaggaggtgag

SEQ ID NO: 607018 - DNA, 75 bp, synthetic construct
  source 1..75: mol_type = other DNA
tgtggatattgatgcgctcaacgccttcaaatttctgaccggaccagaaaccgtgctggaactgctggatgaacg

SEQ ID NO: 607019 - DNA, 75 bp, synthetic construct
  source 1..75: mol_type = other DNA
tagctaccttacgtaagatagcgcaacaggcaacacagggcgaatggcgtgcattcatctcgccggacactggta

SEQ ID NO: 607020 - DNA, 75 bp, synthetic construct
  source 1..75: mol_type = other DNA
acagggtgaatgggtcgcatttatttcgtctggtactggtacatatgcggtgcatacacctggtgataaacgatg

SEQ ID NO: 607021 - DNA, 75 bp, synthetic construct
  source 1..75: mol_type = other DNA
ttcaaatttctgaccggaccagaaaccgtgctggcgctgctggatgaacgggaaagaaaccagcaacacatcaaa

SEQ ID NO: 607022 - DNA, 75 bp, synthetic construct
  source 1..75: mol_type = other DNA
gtgaggcggcagagcgtgcaattccggcaatggaacgcctgttaatgttgccagttgatgatgatctgataagcg

SEQ ID NO: 607023 - DNA, 75 bp, synthetic construct
  source 1..75: mol_type = other DNA
atagcctgttacatgcgcccgatatgtatatgaaaaagctggttgttaatcgactggcggcgggcgcgattgatc

SEQ ID NO: 607024 - DNA, 75 bp, synthetic construct
  source 1..75: mol_type = other DNA
cacacccgcgtaaaacgcttttctttcatctttcttggctcatccttctctgtagtacgcaagtttatgcgaagc

SEQ ID NO: 607025 - DNA, 75 bp, synthetic construct
  source 1..75: mol_type = other DNA
ttaacaacatcaaaaaattctggtcgctgacagcgaaaggctgcatgttcggcaagaacatcaccagtcccgcaa

SEQ ID NO: 607026 - DNA, 75 bp, synthetic construct
  source 1..75: mol_type = other DNA
atggcagcgctaccagcaactgcatcagggcgagcgtggcatctggtcgccgggactcgatccccttaccaccct

SEQ ID NO: 607027 - DNA, 75 bp, synthetic construct
  source 1..75: mol_type = other DNA
cttactggataacatcgcaggtatgttccgtggtatcgcgttatgggacggacaacgtcttaccgtgatgattga

SEQ ID NO: 607028 - DNA, 75 bp, synthetic construct
  source 1..75: mol_type = other DNA
aagtgaggttgataaaaacagcgacgagatagatcaggcgaaagcaagtctgcaaaacgcatctctggcgcttat

SEQ ID NO: 607029 - DNA, 75 bp, synthetic construct
  source 1..75: mol_type = other DNA
ttgaatatcgatcgacagcgccgcggcttatgggggcactcctacggcggcctgtttgtgctggattcctggctg

SEQ ID NO: 607030 - DNA, 75 bp, synthetic construct
  source 1..75: mol_type = other DNA
aaacgcgtccggtagatttaatcctgccgctgcaaaatcagcttccacaactacaacaaattgtcggcgtggaca

SEQ ID NO: 607031 - DNA, 75 bp, synthetic construct
  source 1..75: mol_type = other DNA
atacgatattaaaaaaggctactgtagattcaatctgtcaaaccgttctgacagcttcggctttgaactctttag

SEQ ID NO: 607032 - DNA, 75 bp, synthetic construct
  source 1..75: mol_type = other DNA
gcaacgtatccgcgaactggaaaagcaggttcgccgcctggaggaacacaatacgatattaaaaaaggacaaccg

SEQ ID NO: 607033 - DNA, 75 bp, synthetic construct
  source 1..75: mol_type = other DNA
cttggaagatccgcaaccctggcgtgaaaaactggatcatggtgtcgatcagtttggtttacggcaactctggtc

SEQ ID NO: 607034 - DNA, 75 bp, synthetic construct
  source 1..75: mol_type = other DNA
actgtccgggtgatgcgaaaagcaatgatgccagcaacccatggcgttatgttcgtgccgctacggcaacggaaa

SEQ ID NO: 607035 - DNA, 75 bp, synthetic construct
  source 1..75: mol_type = other DNA
cggctaatggcggttcggctacaccagcacagggcactgttccgtctaattcttctgtagttgcctggaataaac

SEQ ID NO: 607036 - DNA, 75 bp, synthetic construct
  source 1..75: mol_type = other DNA
tgttaacgctcaggtgaaacacgataccccaataatcaggactgtatcagatcctaacgttgcgcgcgttcgcct

SEQ ID NO: 607037 - DNA, 75 bp, synthetic construct
  source 1..75: mol_type = other DNA
gtaactattaacggaaacacaacggcgatagaaacgacatcaaaagcactgactgacttcaaaggtaacgttgat

SEQ ID NO: 607038 - DNA, 75 bp, synthetic construct
  source 1..75: mol_type = other DNA
gcgcgtttactcgttcaagtattgcccgtgcagaatcttacaacgcagttatcgtgtcatggactgacccggaaa

SEQ ID NO: 607039 - DNA, 75 bp, synthetic construct
  source 1..75: mol_type = other DNA
ccgatcagcaaaacaaccctgaccactgatacagcatacgagttttattactcaggtgaaaaccagatcacagac

SEQ ID NO: 607040 - DNA, 75 bp, synthetic construct
  source 1..75: mol_type = other DNA
gctataagcaacgttaacgccagtatcagcagcctggaaaacaaaactaatgcgagcgtttctcgtctcgataaa

SEQ ID NO: 607041 - DNA, 75 bp, synthetic construct
  source 1..75: mol_type = other DNA
gtacttgatattatttcggaaggtccgatttatggacctgtaaatacaaaagcgccattaaatagcgtgatgctt

SEQ ID NO: 607042 - DNA, 75 bp, synthetic construct
  source 1..75: mol_type = other DNA
tagactcattagaggtatcaaacgaaaacgttaacaatgaactggcacagacaaaagcaagtctacaaaacgctt

SEQ ID NO: 607043 - DNA, 75 bp, synthetic construct
  source 1..75: mol_type = other DNA
attgattcaggaacctactcattaggcattcgcggtcgtaatgatacgggcatgaagggcgctgagagtgtagtt

SEQ ID NO: 607044 - DNA, 75 bp, synthetic construct
  source 1..75: mol_type = other DNA
ccccagttggcgttaattgggttcccggtgtattccaggctacagtttacccgatcagcagaacaacgctcacca

SEQ ID NO: 607045 - DNA, 75 bp, synthetic construct
  source 1..75: mol_type = other DNA
aatgcaccagatgaaaagccgtttgatattcgcgttcgccgtgtcaccgctgatagcacgagcgatctattgcgg

SEQ ID NO: 607046 - DNA, 75 bp, synthetic construct
  source 1..75: mol_type = other DNA
gcaagcgtcaaccgccttgatagggcaattgcagacgaaaccagcgcacgcagcgaggctatcagcggagtaaat

SEQ ID NO: 607047 - DNA, 75 bp, synthetic construct
  source 1..75: mol_type = other DNA
attcgaaacggcactgtttttgctgtatcgactgaatctgcaaaacctgttctgtgtcgaattatcagcgtggca

SEQ ID NO: 607048 - DNA, 75 bp, synthetic construct
  source 1..75: mol_type = other DNA
tatgtgaaagaagcgtttattaaagacgcctcgatcactaacgcgaaaataggttcatacatccagtcaaataac

SEQ ID NO: 607049 - DNA, 75 bp, synthetic construct
  source 1..75: mol_type = other DNA
attactccagaccagcaacgtatccgcgagctggaaaagcaagttcgccgtctggaggaacaaaatacgatatta

SEQ ID NO: 607050 - DNA, 75 bp, synthetic construct
  source 1..75: mol_type = other DNA
gtaaaaccccactgcatgccttcgtcgctgttctgggttatagccggatgctgtatatcgaatttaccgacaata

SEQ ID NO: 607051 - DNA, 75 bp, synthetic construct
  source 1..75: mol_type = other DNA
gcattgccgccggagaagaaaatgcacgacgtgcaaatcaccgacaccctgacgaccttcgataaccatccgttg

SEQ ID NO: 607052 - DNA, 75 bp, synthetic construct
  source 1..75: mol_type = other DNA
acgtgcatcctggtgaaaatctggtgagcttcgacaaccccgttactttattcgtaccccttataatggggtgtt

SEQ ID NO: 607053 - DNA, 75 bp, synthetic construct
  source 1..75: mol_type = other DNA
tttacccgacgctgacgcccatccgcagcgttgtccagccacgtctggcgctgttcgtcagcgaaaaatgcccgg

SEQ ID NO: 607054 - DNA, 75 bp, synthetic construct
  source 1..75: mol_type = other DNA
atggtacgattaacaacgaagcccaaactgtacatcgaattcactgacaatatgcgttatgacacgctggagacc

SEQ ID NO: 607055 - DNA, 75 bp, synthetic construct
  source 1..75: mol_type = other DNA
ctgccacacccattactccagaccagcaacgcatccgcgagctggaaaagcaggttcgccgtctggaggaacaaa

SEQ ID NO: 607056 - DNA, 75 bp, synthetic construct
  source 1..75: mol_type = other DNA
acccggcctgcggcacatcgcgtaatacgctggagatgatccgaaacagcggtactgagccgaccgtaattctct

SEQ ID NO: 607057 - DNA, 75 bp, synthetic construct
  source 1..75: mol_type = other DNA
taaccgtccaatcgtggtaacgcggctgggaacccgtctttgccgtccttcggaagtggtgctggagatcctgcc

SEQ ID NO: 607058 - DNA, 75 bp, synthetic construct
  source 1..75: mol_type = other DNA
aggcatgggtacgtcagctcagacgggaacgtcaggagatcacgccttctgctgcagcaccactcacatcagagc

SEQ ID NO: 607059 - DNA, 75 bp, synthetic construct
  source 1..75: mol_type = other DNA
atgaaaaaaaggaatttcagcgcagagtttaaacgcgaatccgctcaactggttgttgaccagaactacacggtg

SEQ ID NO: 607060 - DNA, 75 bp, synthetic construct
  source 1..75: mol_type = other DNA
ttaaccacgataacgggcgctggcaacgcctcggtggcggaaagctgccgctattgctcgaacaacagggggagc

SEQ ID NO: 607061 - DNA, 75 bp, synthetic construct
  source 1..75: mol_type = other DNA
tgagttggtcaaacttatcgcagatatggggattacagtacgggcgctgctgcgtaaaaatgtcgagccttatga

SEQ ID NO: 607062 - DNA, 75 bp, synthetic construct
  source 1..75: mol_type = other DNA
cgagctggtcaaactcattgccgatatgggaatttcggtacgcgcgctgctgcgtaaaaacgttgaaccatatga

SEQ ID NO: 607063 - DNA, 75 bp, synthetic construct
  source 1..75: mol_type = other DNA
agatgcgcaaaaaggcgcgttcaccaaggaagatggcgagaaagtggttgatgaggcgggtaatcgcctgaaata

SEQ ID NO: 607064 - DNA, 75 bp, synthetic construct
  source 1..75: mol_type = other DNA
agatgcgcaaaaaggcgcgttctccaaggaagatggcgagaaagtggttgatgaggcgggtaagcgcctgaaata

SEQ ID NO: 607065 - DNA, 75 bp, synthetic construct
  source 1..75: mol_type = other DNA
cgtaccgttgcaggattgctggcaaacctcggcggctggcgcaccgtcttctgggtcgcatcggtgttaatggca

SEQ ID NO: 607066 - DNA, 75 bp, synthetic construct
  source 1..75: mol_type = other DNA
gctggcgcgacgattgccctggttaacttactggtctggtggcgaggttttcatcgtcaggaagccgcaaattaa

SEQ ID NO: 607067 - DNA, 75 bp, synthetic construct
  source 1..75: mol_type = other DNA
gatcgccaccggtctggcggtcgccagcaactattacgctcagccattgctcgacactatcgcgcgtaacttttc

SEQ ID NO: 607068 - DNA, 75 bp, synthetic construct
  source 1..75: mol_type = other DNA
ctttaattacagcgacggcatgattggtctgtttggcctggcaggtgccgcgggagcattaggcgcacgtccagc

SEQ ID NO: 607069 - DNA, 75 bp, synthetic construct
  source 1..75: mol_type = other DNA
gttgctgggctgcctgacctttgccaacttcagcattctctggacctcaatggcctttttgcttgccgctccacc

SEQ ID NO: 607070 - DNA, 75 bp, synthetic construct
  source 1..75: mol_type = other DNA
ggcgatctggtttggtcacacttccgtgctggcgctgattattggcatcctggtgctggatctcaccgtacaggg

SEQ ID NO: 607071 - DNA, 75 bp, synthetic construct
  source 1..75: mol_type = other DNA
tttccggcagcaatggctgctttccgtgagcagagcgagttcaacgaactgcgccgccagtgggtgatggcattt

SEQ ID NO: 607072 - DNA, 75 bp, synthetic construct
  source 1..75: mol_type = other DNA
cgacgccaatccagcagcttcaggcgaagtacaaccgcaacaagtcgaacgggatggcgcgaagtggtaaagaag

SEQ ID NO: 607073 - DNA, 75 bp, synthetic construct
  source 1..75: mol_type = other DNA
ttccgcgcgatggtgccgctgttgctcactcagggcatcgtactgtttcaggatacctcactggtgtatgtgtta

SEQ ID NO: 607074 - DNA, 75 bp, synthetic construct
  source 1..75: mol_type = other DNA
tggagatgtgtctctcttattaaagaaccttttgaattatcgatttaataaaacgattacagcacaggctatcat

SEQ ID NO: 607075 - DNA, 75 bp, synthetic construct
  source 1..75: mol_type = other DNA
agcgcagggcgcttgagatctgggaagttcgggttaataactatcaacggcagcaggaaaacaacgttgttaact

SEQ ID NO: 607076 - DNA, 75 bp, synthetic construct
  source 1..75: mol_type = other DNA
gagtagtcataacaagcatgaccagccaatgcaggaaatggtggctgtttctgcgacgcaacttcatatcgaagg

SEQ ID NO: 607077 - DNA, 75 bp, synthetic construct
  source 1..75: mol_type = other DNA
tactgctgttattactttcatggctggcgatctggttcggccatacctccgtgctggcgctgattattggcatcc

SEQ ID NO: 607078 - DNA, 75 bp, synthetic construct
  source 1..75: mol_type = other DNA
ggcatttactatccgcgatggtcgcctgtttaccctgcgtgagcgtgagctgcctgcattccgtctgtatcgtat

SEQ ID NO: 607079 - DNA, 75 bp, synthetic construct
  source 1..75: mol_type = other DNA
aagatcacgccggtaactccaccgtggcatttaccatccgtgatggccgcctgtttaccctgcgtgagcgtgagt

SEQ ID NO: 607080 - DNA, 75 bp, synthetic construct
  source 1..75: mol_type = other DNA
atggacgataataatcaaacttctggacaaccaaagccagagccagaagaatgtgtgaaagagcaaaaaataact

SEQ ID NO: 607081 - DNA, 75 bp, synthetic construct
  source 1..75: mol_type = other DNA
caatgcttatgttttcaggattcattgattacgttcaggcagtagcagacccaaatcagaaaactaacgaaatga

SEQ ID NO: 607082 - DNA, 75 bp, synthetic construct
  source 1..75: mol_type = other DNA
agggcttatcgacagccaacgggatgcccaacgcattctatattccattaaaaatgaggcggtaaatgccattat

SEQ ID NO: 607083 - DNA, 75 bp, synthetic construct
  source 1..75: mol_type = other DNA
ggcggcgatgggctttatcaacatcgagcagaaccgcatcatcaaaatcttctcggtggtatccgtcgtgttcct

SEQ ID NO: 607084 - DNA, 75 bp, synthetic construct
  source 1..75: mol_type = other DNA
ccgatatagtctgtgaaaactgcaattaccttccaacgaaacgttccagaaataaactcaagccaatcccaaaag

SEQ ID NO: 607085 - DNA, 75 bp, synthetic construct
  source 1..75: mol_type = other DNA
cgctttcgacagcctgatcccgtcactgaaattcagaaaatatgacgccgtaatctccggtatggatatcacgcc

SEQ ID NO: 607086 - DNA, 75 bp, synthetic construct
  source 1..75: mol_type = other DNA
gtctcctatgacagttatcagaatgcctttatcgatctgaaaaatggccgtattgatggcgtgtttggtgacaca

SEQ ID NO: 607087 - DNA, 75 bp, synthetic construct
  source 1..75: mol_type = other DNA
ctgccgccgacgctcgttgcttccagctatggcatgaactttgagtttatgccagaactgaagtggagcttcggc

SEQ ID NO: 607088 - DNA, 75 bp, synthetic construct
  source 1..75: mol_type = other DNA
tctcggtggtatccgtcgtgttcctgccgccgacgctggttgcttccagctacgggatgaactttgagtttatgc

SEQ ID NO: 607089 - DNA, 75 bp, synthetic construct
  source 1..75: mol_type = other DNA
tctcggtggtatccgtcgtgttcctgccgccaacactggttgcttccagctacgggatgaactttgagtttatgc

SEQ ID NO: 607090 - DNA, 75 bp, synthetic construct
  source 1..75: mol_type = other DNA
gatcagtacgttgccggagtattccagtcagcggttctgaaagacgttaataacactatcatcacccccggtatt

SEQ ID NO: 607091 - DNA, 75 bp, synthetic construct
  source 1..75: mol_type = other DNA
acgccgataatcaggactgtttcagatccaaacgttaaccgcgtaaggctgaatcttggcgttgattctctggtt

SEQ ID NO: 607092 - DNA, 75 bp, synthetic construct
  source 1..75: mol_type = other DNA
gttgacgatggcgctttatacacgctttcacaatattgcgatcagttggttgatgatggctacggtgggaaagag

SEQ ID NO: 607093 - DNA, 75 bp, synthetic construct
  source 1..75: mol_type = other DNA
ttatcctcacaccgctgtagctggagtggtgattgatcatgatcagtacactgacacgcccacccgcacctatca

SEQ ID NO: 607094 - DNA, 75 bp, synthetic construct
  source 1..75: mol_type = other DNA
aatgacacgcctatcactggtagcgacggcagtacatcagtccccggcgttagtgtggcgtggcgtaatggtacg

SEQ ID NO: 607095 - DNA, 75 bp, synthetic construct
  source 1..75: mol_type = other DNA
caagccatcagcggcgtgaatgcgtcaatttcaacccttgatggcaaagttacaagcaacgtgacccgtattgac

SEQ ID NO: 607096 - DNA, 75 bp, synthetic construct
  source 1..75: mol_type = other DNA
tgacgttaagccttcatcatcaacatcttggtcactggttaaggatattcacattggcccaggtaagcaaagcgg

SEQ ID NO: 607097 - DNA, 75 bp, synthetic construct
  source 1..75: mol_type = other DNA
catgaaaggcgctgaaagcattgttgatcttgttattggtgctccagccgcgccagttggcgtaaattgggttcc

SEQ ID NO: 607098 - DNA, 75 bp, synthetic construct
  source 1..75: mol_type = other DNA
gatgcgccagatgaaaagccgtttgatattcgcgttcgccgcgtaaccgctgataacacaagtgatctattgcag

SEQ ID NO: 607099 - DNA, 75 bp, synthetic construct
  source 1..75: mol_type = other DNA
cgacgaaatagatcaggcgaaagcaagtctgcaaaacgcctcgattgcacttatcaacaactcaatagcgcaaag

SEQ ID NO: 607100 - DNA, 75 bp, synthetic construct
  source 1..75: mol_type = other DNA
aacgcgccggatgaaaagccgtttgatattcgcgttcgccgagtaacggcagacagcaacagcgatctacttagc

SEQ ID NO: 607101 - DNA, 75 bp, synthetic construct
  source 1..75: mol_type = other DNA
ttcgtcttcgagttcgctttctaaaaccgtttttgtgatgattccttatcacctgacttactatcagtattctca

SEQ ID NO: 607102 - DNA, 75 bp, synthetic construct
  source 1..75: mol_type = other DNA
agcggaaatagcaaggatcgacacagcaatagcagacgaaacccaggcccgcgcggaggctatagcatcacttga

SEQ ID NO: 607103 - DNA, 75 bp, synthetic construct
  source 1..75: mol_type = other DNA
taactcatcgcttaccagcacgataaactcgaaggtgtctgaggtatcaacggcgctttctacgcatgaggcatc

SEQ ID NO: 607104 - DNA, 75 bp, synthetic construct
  source 1..75: mol_type = other DNA
aaagtagcggtgtaataagcggccaagacattgatatgacaacggcttcagaacttattgtttttgctaaaaaaa

SEQ ID NO: 607105 - DNA, 75 bp, synthetic construct
  source 1..75: mol_type = other DNA
ggtattacattgcggctagaaccgatgaaaggagaagaatcgggttctctcaaacaagagaaaagcggcaattgg

SEQ ID NO: 607106 - DNA, 75 bp, synthetic construct
  source 1..75: mol_type = other DNA
aagtctttggtgatgttggtagtattgaggctgatttgagggaaatcagcatattgattcatcggcggaaggcat

SEQ ID NO: 607107 - DNA, 75 bp, synthetic construct
  source 1..75: mol_type = other DNA
accgctcgttcgaattcatctccagcgagcaatttccatggtcgcagccggtcatgtaccacatttgcgtagaat

SEQ ID NO: 607108 - DNA, 75 bp, synthetic construct
  source 1..75: mol_type = other DNA
tggaagacctcacaccggtgtctggcggcccgctcggcaagctggctaaaaaggccggtagctatctgacgccga

SEQ ID NO: 607109 - DNA, 75 bp, synthetic construct
  source 1..75: mol_type = other DNA
tgcgagggattagcctgtgcccagcgacaccgctagaacacattctgccggtcattgaagacgttgaaatcgtac

SEQ ID NO: 607110 - DNA, 75 bp, synthetic construct
  source 1..75: mol_type = other DNA
gccgcgccacatgggaaacacagacaaccacgcatcgtatgacatttgagatccgcatatataatgcagatggtg

SEQ ID NO: 607111 - DNA, 75 bp, synthetic construct
  source 1..75: mol_type = other DNA
aatggtgcaatgtatgtgcgcgaagcgtttattaaagacgcatcgattactaccgcaaaaattgcgcagcaaatc

SEQ ID NO: 607112 - DNA, 75 bp, synthetic construct
  source 1..75: mol_type = other DNA
actgaaaacttcgacgaaatcagcgactacgtgatgaaggatgtcatggagtcagaacagttcaaggacatgatt

SEQ ID NO: 607113 - DNA, 75 bp, synthetic construct
  source 1..75: mol_type = other DNA
aaattcaagcggctagtgaatacacgaatctcgttactcgaacatttatcaccccactatgacttatcttccatg

SEQ ID NO: 607114 - DNA, 75 bp, synthetic construct
  source 1..75: mol_type = other DNA
cgatggcatgacagcaaacgcacaggccgccccggttgggtagttatgtgggatggctggttcagacttcaggat

SEQ ID NO: 607115 - DNA, 75 bp, synthetic construct
  source 1..75: mol_type = other DNA
atcgggacgggaaactgaacaaagcaatcagtcgcggtaatggcctgaaaggcgaggactggacgcagaaagtta

SEQ ID NO: 607116 - DNA, 75 bp, synthetic construct
  source 1..75: mol_type = other DNA
gtatgccatgacatttgaagaattcattccggctttttcatcctggatggccagaagtaaacgtgggctggcagt

SEQ ID NO: 607117 - DNA, 75 bp, synthetic construct
  source 1..75: mol_type = other DNA
ctggatatacaacgccagaacccgggcggcttataatccattgtacgaccttatgtaccgtgccggcgtaccgtt

SEQ ID NO: 607118 - DNA, 75 bp, synthetic construct
  source 1..75: mol_type = other DNA
aatgtggtgcagccatactgaccggtgttcgtgctgatgagtcccttaaccgttttatggcacttacatcacaga

SEQ ID NO: 607119 - DNA, 75 bp, synthetic construct
  source 1..75: mol_type = other DNA
aacgtcatttctctgtattgttcattgactgggaggctcagtaccagtgcaccattgaacacattcagaagatgc

SEQ ID NO: 607120 - DNA, 75 bp, synthetic construct
  source 1..75: mol_type = other DNA
agcagtgtagcgtggcaatactgatcggtgtccgtgcagatgaatctctcaaccgctttatgggactggtgtccc

SEQ ID NO: 607121 - DNA, 75 bp, synthetic construct
  source 1..75: mol_type = other DNA
ggatgtgatgccggaaagaacagcagaacattaccgtaataaaattgctgtctacctgcgctggtatcagacgcg

SEQ ID NO: 607122 - DNA, 75 bp, synthetic construct
  source 1..75: mol_type = other DNA
gttttcggtctgctgatggcatggatcctaacccgttatcgctttccggggcgcactctgcttgatgcgctgatg

SEQ ID NO: 607123 - DNA, 75 bp, synthetic construct
  source 1..75: mol_type = other DNA
ccttttggcccggaacagcgtaagggactgtggctttaccatgttctggagccggaaacctgggccaggatgtgt

SEQ ID NO: 607124 - DNA, 75 bp, synthetic construct
  source 1..75: mol_type = other DNA
gtatgcggccattcaccgtattgagtggttgtttgagacattctcttctgtctgtttgtctttttccggaggaaa

SEQ ID NO: 607125 - DNA, 75 bp, synthetic construct
  source 1..75: mol_type = other DNA
tccctcaaccgctttatgggactggtgtcccggcgaaaactgcgatatgccgacgataaaccctggaccacggcg

SEQ ID NO: 607126 - DNA, 75 bp, synthetic construct
  source 1..75: mol_type = other DNA
tgccggaaagaacggcagaacattaccgtaataaaattgctgtctacctgcgctggtatcagacgcggggcttcc

SEQ ID NO: 607127 - DNA, 75 bp, synthetic construct
  source 1..75: mol_type = other DNA
tcttaacccgctatcgctttccggggcgcacgctgcttgatgcgctgatggatttacccttcgcgctaccgacag

SEQ ID NO: 607128 - DNA, 75 bp, synthetic construct
  source 1..75: mol_type = other DNA
aatcctcggcgatcacgttaccctggatgccggtaccggtgccgttcacaccgcgcctggccacggcccggacga

SEQ ID NO: 607129 - DNA, 75 bp, synthetic construct
  source 1..75: mol_type = other DNA
cgacaaacaggtaatactgttaatggtgatacatccgttggatggaattgggatagtggtgcatataacgccctg

SEQ ID NO: 607130 - DNA, 75 bp, synthetic construct
  source 1..75: mol_type = other DNA
actcagttaagcagcgcaaccaacagcacgtctgaaacactggccgcaacgccgagagcggtaaaggtcgcgtat

SEQ ID NO: 607131 - DNA, 75 bp, synthetic construct
  source 1..75: mol_type = other DNA
ctactggcagatgtatcaactgcaacttgcgggcgaagagctggcagccagcgtgcgtgaagaggagtcattgag

SEQ ID NO: 607132 - DNA, 75 bp, synthetic construct
  source 1..75: mol_type = other DNA
atgcatttgcactccgacaaacaggtaatactgttaatggtgatacatccgttggatggaattgggatagtggtg

SEQ ID NO: 607133 - DNA, 75 bp, synthetic construct
  source 1..75: mol_type = other DNA
acgccctgattggtggtgcatctgcattaattcttcactttaatataaatgctggtagctgtcctgccgtacaat

SEQ ID NO: 607134 - DNA, 75 bp, synthetic construct
  source 1..75: mol_type = other DNA
taacggaaaccgtgatgaattaattgatacaacacaggcaaggccaattcagtattgcattaatgggacgtggta

SEQ ID NO: 607135 - DNA, 75 bp, synthetic construct
  source 1..75: mol_type = other DNA
tttactcagttaagcaatgcgaccaacagcacgtctgaaacactggccgcaacgccgaaagcggttaaggccgca

SEQ ID NO: 607136 - DNA, 75 bp, synthetic construct
  source 1..75: mol_type = other DNA
attattcaggggttgggtgcaggtgcggaaatttccggtgccggtacgatgctggcggaatatgcgccaaaaggt

SEQ ID NO: 607137 - DNA, 75 bp, synthetic construct
  source 1..75: mol_type = other DNA
ggccggtattccgttgcaccggccccgttctgttaaacaggtgaatgacgtcgccgccagtattattcgccatat

SEQ ID NO: 607138 - DNA, 75 bp, synthetic construct
  source 1..75: mol_type = other DNA
caggttgtagaacaggggactcaccagcaactgctggcggcccaggggcgctactggcagatgtatcaactgcaa

SEQ ID NO: 607139 - DNA, 75 bp, synthetic construct
  source 1..75: mol_type = other DNA
ggcggttggcgtggtacaacagttgcgaacggatgtgatggatgccgctctgcgccagccgttaagtgagtttga

SEQ ID NO: 607140 - DNA, 75 bp, synthetic construct
  source 1..75: mol_type = other DNA
tatctggcggatatcaacgacggctttaacgaaatcatcaatggcatgagcgttatccagcagttccgtcagcag

SEQ ID NO: 607141 - DNA, 75 bp, synthetic construct
  source 1..75: mol_type = other DNA
gacgtcgtttctctgtactgttcattgactgggaggctcagtaccagtgcaccattgaacatattcagaagatgc

SEQ ID NO: 607142 - DNA, 75 bp, synthetic construct
  source 1..75: mol_type = other DNA
gtaatgggcgggattggccttgtcgcatggccggtggtgatggggattaatgccatcattgcggcggctggcgtg

SEQ ID NO: 607143 - DNA, 75 bp, synthetic construct
  source 1..75: mol_type = other DNA
ctgaacagatttatggggctggcttctcagcgtaagttgcgctatgcggatgataagccatggaccacagcatca

SEQ ID NO: 607144 - DNA, 75 bp, synthetic construct
  source 1..75: mol_type = other DNA
cacctgcaggccggtcttatatcgaccagagcaaaagcgaatacaacatcaatctgcagggcggggtcgcgccgg

SEQ ID NO: 607145 - DNA, 75 bp, synthetic construct
  source 1..75: mol_type = other DNA
gtggcagaggtagcccgcaggagaaaacgtcatttttctgtattgttcattgactgggaggctcagtaccagtgc

SEQ ID NO: 607146 - DNA, 75 bp, synthetic construct
  source 1..75: mol_type = other DNA
aaccggtttatgggactggtttctcagcgtaagttgcgctatgcagatgataaaccctggacgacggcctccccg

SEQ ID NO: 607147 - DNA, 75 bp, synthetic construct
  source 1..75: mol_type = other DNA
gaggttgcccggaggaaaaaacggcgcttctcggtgttgttcatcgactgggaggcccagtaccagtgcaccatt

SEQ ID NO: 607148 - DNA, 75 bp, synthetic construct
  source 1..75: mol_type = other DNA
ggagatattgccaggcgcaaaaagaagtatttttcggtactgtttattgactgggaagcacagtatgcatctact

SEQ ID NO: 607149 - DNA, 75 bp, synthetic construct
  source 1..75: mol_type = other DNA
gctgacctgctggcaggataatccttacgacgtgatgtacaccatcggcggcgcgccggaaggcgtgatttctgc

SEQ ID NO: 607150 - DNA, 75 bp, synthetic construct
  source 1..75: mol_type = other DNA
ctcggcgtgaaggtttttgccctgccggatggcgatgtcgccgccagcgtgctgacctgctggcaggataatcct

SEQ ID NO: 607151 - DNA, 75 bp, synthetic construct
  source 1..75: mol_type = other DNA
actcgacggctggatccagaaaaacaaatcactggcgtcaaccatcggcatcattgtcggtggtgcactggcact

SEQ ID NO: 607152 - DNA, 75 bp, synthetic construct
  source 1..75: mol_type = other DNA
ttactgggtggcacttcccctgaccacggtaaacggtgtctcgcagtttcagccggagtggatatgctgggagcc

SEQ ID NO: 607153 - DNA, 75 bp, synthetic construct
  source 1..75: mol_type = other DNA
ggcaaaacttaacgcagtaaaacagcgttatcaggccggaaaggaactggccggaaatatggcctcagtgggcgc

SEQ ID NO: 607154 - DNA, 75 bp, synthetic construct
  source 1..75: mol_type = other DNA
atgggaaccatacagaagataagaacagatgttaatgtattacatgcggccattcaccgtattgagtggttgttt

SEQ ID NO: 607155 - DNA, 75 bp, synthetic construct
  source 1..75: mol_type = other DNA
acattcagaatatgcgcgagatgtaccaggatgtgacagacaccttttactgggtggcacttcccctgactacag

SEQ ID NO: 607156 - DNA, 75 bp, synthetic construct
  source 1..75: mol_type = other DNA
cagccaccggagggggccattacagatatggcgtattttcccttttaccggtatgccatgacgtttgaagaattt

SEQ ID NO: 607157 - DNA, 75 bp, synthetic construct
  source 1..75: mol_type = other DNA
gcgtatctgtaagacacttataaagaatgatttctggtgccggaccctctccttcagtccgaacaaaccccggca

SEQ ID NO: 607158 - DNA, 75 bp, synthetic construct
  source 1..75: mol_type = other DNA
tgcgtataagctgatttatcgcagcggtaaaacgctcgatgaagtgaaaccggaaattgctgaactggcggaaac

SEQ ID NO: 607159 - DNA, 75 bp, synthetic construct
  source 1..75: mol_type = other DNA
gtgattgataaatccgcctttgtgcatccaaccgccattgtggaagagggcgcatcgattgccgccaatgctcac

SEQ ID NO: 607160 - DNA, 75 bp, synthetic construct
  source 1..75: mol_type = other DNA
aatggtcatactaaaattggccgcgataatgagatttatcagttcgcctccatcggcgaagttaaccaggatctg

SEQ ID NO: 607161 - DNA, 75 bp, synthetic construct
  source 1..75: mol_type = other DNA
cgatgataaaccctggaccacagcgtcacctgaagggttttattacactatgtatccgttatatgactggaaagc

SEQ ID NO: 607162 - DNA, 75 bp, synthetic construct
  source 1..75: mol_type = other DNA
ttgctgtctacctgcgctggtatcagacgcggggcttcccggatgacatcccgaacgaacaggagaatgatctgg

SEQ ID NO: 607163 - DNA, 75 bp, synthetic construct
  source 1..75: mol_type = other DNA
catgacttttgaagaatttgttccggcattttcttcctggtttgccggtaaccggtgtggagtggcagtactgac

SEQ ID NO: 607164 - DNA, 75 bp, synthetic construct
  source 1..75: mol_type = other DNA
gctgacctgctggcaggataatccttacgatgtgatgtacaccatcggcggtgcgccggaaggcgtgatttctgc

SEQ ID NO: 607165 - DNA, 75 bp, synthetic construct
  source 1..75: mol_type = other DNA
gtagcggcggctgttgtcgctggcgcgctgcttatccgtaaatactgggagcctgtcagcgcattctttgccggt

SEQ ID NO: 607166 - DNA, 75 bp, synthetic construct
  source 1..75: mol_type = other DNA
ttggtcctgaacaacgtaagggactgtggctttaccatgttctggagccggaaacctgggccaggatgtgtgaac

SEQ ID NO: 607167 - DNA, 75 bp, synthetic construct
  source 1..75: mol_type = other DNA
tgagctggtcaaactcattgcagatatgggcatttccgtccgggctttgctgcgtaagaacgtcgaaccgtatga

SEQ ID NO: 607168 - DNA, 75 bp, synthetic construct
  source 1..75: mol_type = other DNA
aaaccgccagagtggtgtttaatgaattaagcgtcaccgaaccggcgaccgtcggggaaattgcgcagaatactg

SEQ ID NO: 607169 - DNA, 75 bp, synthetic construct
  source 1..75: mol_type = other DNA
aaaccgccagagtggtgtttaatgaattgagcgtcaccgaaccggcgactgtcggggaaattgcgcagaatactt

SEQ ID NO: 607170 - DNA, 75 bp, synthetic construct
  source 1..75: mol_type = other DNA
acccggcctgtggcacctcacgcaacacactggagatgatccgcaacagcggcaacgaaccgacaataatttatt

SEQ ID NO: 607171 - DNA, 75 bp, synthetic construct
  source 1..75: mol_type = other DNA
acccggcctgcgggacatcccgcaataccctggcgcttatccgtaacagcggcgccgaacccacggttattctgt

SEQ ID NO: 607172 - DNA, 75 bp, synthetic construct
  source 1..75: mol_type = other DNA
atgctgaaacagcaggatatgaccgaaaccgccagagtggtgtttaatgaattaagcgttaccgaaccggcgaca

SEQ ID NO: 607173 - DNA, 75 bp, synthetic construct
  source 1..75: mol_type = other DNA
tgacgtcgaaaaaacatgctgccattttgctggcgcttgccacaatggtggggctgggaacacatacagcatgga

SEQ ID NO: 607174 - DNA, 75 bp, synthetic construct
  source 1..75: mol_type = other DNA
gcgcagcttaaccgccagcgtgaggcactggcgcgcgtcagtgcgcagcaggcgaaattaggccgggtgaaagag

SEQ ID NO: 607175 - DNA, 75 bp, synthetic construct
  source 1..75: mol_type = other DNA
gtggcgtttgtcctggtgggggaatcattcttgcgctcaccggcgtttagcgtaccggagtcggcccagcgttgg

SEQ ID NO: 607176 - DNA, 75 bp, synthetic construct
  source 1..75: mol_type = other DNA
agaaaccgctccgtcagcaaaaccgccagattattagctatgtcccacgcacggaacccgcgccgccagaacatg

SEQ ID NO: 607177 - DNA, 75 bp, synthetic construct
  source 1..75: mol_type = other DNA
gtgatgacaagcctgctgcccctgtgtaaaaggcaccttaatggtgcctttgtcgtttttatcaaaagatccccg

SEQ ID NO: 607178 - DNA, 75 bp, synthetic construct
  source 1..75: mol_type = other DNA
atgtaattctcgaaaagctcggccttgttaaaaaggaatcgagcagtattgatacggaaacagcaaaaacgccgc

SEQ ID NO: 607179 - DNA, 75 bp, synthetic construct
  source 1..75: mol_type = other DNA
acaaaagccgcctttcaactttctaatgacgcggctgcgcatatcggtgatgttctttcaaccacgatgaacaaa

SEQ ID NO: 607180 - DNA, 75 bp, synthetic construct
  source 1..75: mol_type = other DNA
ccgaagtggtactggatattcttccggatgcgcaaaaaggcgcatttgctaaggaagacggcgagaaagtcgttg

SEQ ID NO: 607181 - DNA, 75 bp, synthetic construct
  source 1..75: mol_type = other DNA
cgcagattattatcgcaaaaggcggtggtgatgctgaagctattgcggccatgacgcctgtgactctcaacctgt

SEQ ID NO: 607182 - DNA, 75 bp, synthetic construct
  source 1..75: mol_type = other DNA
cagcggcgtaacgcgctatgtcactgaaatcgttgtcggacagaacggcaccatgcagatgctgggcggtcgtcg

SEQ ID NO: 607183 - DNA, 75 bp, synthetic construct
  source 1..75: mol_type = other DNA
tgctgttcggcaagctcgcggaagtggctggtgaatatctgcgcaagggcgcgcaggtctacatcgagggacaac

SEQ ID NO: 607184 - DNA, 75 bp, synthetic construct
  source 1..75: mol_type = other DNA
aatttaattggtggtgaaaataagtttactactcaattgcttacttcagcgatgagattaagtggtcaatactca

SEQ ID NO: 607185 - DNA, 75 bp, synthetic construct
  source 1..75: mol_type = other DNA
acaaaaaatggctggatcgcgcgattcgcgtggcttccgtgattatccacgacgtcgcaagaaataatcattatc

SEQ ID NO: 607186 - DNA, 75 bp, synthetic construct
  source 1..75: mol_type = other DNA
atgaataatctgatggttattgatggtattgaagttcgtcgtgatgcttatggacgttacagcctgaacgatctg

SEQ ID NO: 607187 - DNA, 75 bp, synthetic construct
  source 1..75: mol_type = other DNA
aagaaaggccgtcaggatgcggctccgtcgcagcaaccgcctcagccactcccggatgatttcccgccaatggat

SEQ ID NO: 607188 - DNA, 75 bp, synthetic construct
  source 1..75: mol_type = other DNA
gatctggttgaaagcgtaatgcagcgtatcggcgtgaccgattacaccattctcggcacggtaaaaggtgcggag

SEQ ID NO: 607189 - DNA, 75 bp, synthetic construct
  source 1..75: mol_type = other DNA
gacattatcgtgaagtccaaagggctttccggttatgactcgccgtatgtgcctggctgggactgtcatggtctg

SEQ ID NO: 607190 - DNA, 75 bp, synthetic construct
  source 1..75: mol_type = other DNA
cttttgatggttcctccgatatcacattaaaagcaagtcatgttggtgcgtttgccttagggaaaacaggaagca

SEQ ID NO: 607191 - DNA, 75 bp, synthetic construct
  source 1..75: mol_type = other DNA
aaagggcttgagatggcactgtatagagcgcggcaaaaccggaaaagtgtattgcacaatacacatgatagtaag

SEQ ID NO: 607192 - DNA, 75 bp, synthetic construct
  source 1..75: mol_type = other DNA
gcagagagtcccggcattattgataaagaattcttcaagaaaatcggtgagaatttcgaccctaagaagttcaac

SEQ ID NO: 607193 - DNA, 75 bp, synthetic construct
  source 1..75: mol_type = other DNA
atctggaagctaaagttacgctgaaatatgctgacgatgatctggggactattgcgaagctaaaacgtctgggcg

SEQ ID NO: 607194 - DNA, 75 bp, synthetic construct
  source 1..75: mol_type = other DNA
actggcgatcgccagtacgaaacctggtatcagacatggtgggactactgcatcaaatacctgatggactactaa

SEQ ID NO: 607195 - DNA, 75 bp, synthetic construct
  source 1..75: mol_type = other DNA
gacctgggtgaaaaaaatattcgggtaaatggcattgcgccggggggcaatattaaccgatgccctgaaatccgt

SEQ ID NO: 607196 - DNA, 75 bp, synthetic construct
  source 1..75: mol_type = other DNA
gtgccattctggtaagtgctgtatgggcggttattttgctctcatggtttgaatcaagccttaccttaagcgatt

SEQ ID NO: 607197 - DNA, 75 bp, synthetic construct
  source 1..75: mol_type = other DNA
gcagggagttaaacctgtctaactcttcagtgcttggtgcctgtcagaaactccaggaggctgttggcttaccga

SEQ ID NO: 607198 - DNA, 75 bp, synthetic construct
  source 1..75: mol_type = other DNA
cggcgatgctgcggctattcaggccgctacccccgtaacactcgatatggcgctcgcaaaccgtcgaacgatgga

SEQ ID NO: 607199 - DNA, 75 bp, synthetic construct
  source 1..75: mol_type = other DNA
tgttgcaacacacgccaatcagacgtctgggccaaccgcaagatattgctaatgcggcgttgttcttgtgttcac

SEQ ID NO: 607200 - DNA, 75 bp, synthetic construct
  source 1..75: mol_type = other DNA
tctgggccaaccgcaagatattgctaacgcagcgctgttcctttgctcgcctgcagccagctgggtaagcggaca

SEQ ID NO: 607201 - DNA, 75 bp, synthetic construct
  source 1..75: mol_type = other DNA
gtgattctgctggactttatgcgcagggagttaaacctgtctaactcttcagtgcttggtgcctgtcagaaactc

SEQ ID NO: 607202 - DNA, 75 bp, synthetic construct
  source 1..75: mol_type = other DNA
cgtcactggcgatcgccagtatgaaacctggtatcaaacatggtgggagtactgcattaagtacctgatggacta

SEQ ID NO: 607203 - DNA, 75 bp, synthetic construct
  source 1..75: mol_type = other DNA
tgctgcactgcctggtgatcccacgtatcccgttagcgccaggtctggctccagcagttgcggcgggtctgctgg

SEQ ID NO: 607204 - DNA, 75 bp, synthetic construct
  source 1..75: mol_type = other DNA
tgcctgccagaaactccaggaggctgttggcttaccgaatctggcaccgcgctatgccattgatgctcctgctga

SEQ ID NO: 607205 - DNA, 75 bp, synthetic construct
  source 1..75: mol_type = other DNA
ccagcgcaccggaaaaattattcgggcaggctgctgacaagatgcaggctggtgtgattctgctggactttatgc

SEQ ID NO: 607206 - DNA, 75 bp, synthetic construct
  source 1..75: mol_type = other DNA
ttaaacctgtctaactcttcagtgcttggtgcctgtcagaaactccaggaggctgttggcttaccgaatctggca

SEQ ID NO: 607207 - DNA, 75 bp, synthetic construct
  source 1..75: mol_type = other DNA
ttcagcgtgtactgcaacgtgcggtcttccatgtccagtcctccggtcgcaatgaggttaccggtgcaaacgttc

SEQ ID NO: 607208 - DNA, 75 bp, synthetic construct
  source 1..75: mol_type = other DNA
tgattcagccatctactctgatatccaggccctttctgcaagcaatagttcagtcggtaccacaacaaatgtaaa

SEQ ID NO: 607209 - DNA, 75 bp, synthetic construct
  source 1..75: mol_type = other DNA
tttttgggcatagtgaactgggtgtccgcctgctttcgttacgtagcgtggcggattaccgtgcgtcgcgaagaa

SEQ ID NO: 607210 - DNA, 75 bp, synthetic construct
  source 1..75: mol_type = other DNA
caatccgctggcgatgcttacttatccggcaaacgactttgtccgccagttttttgggcgtagtgaactgggcgt

SEQ ID NO: 607211 - DNA, 75 bp, synthetic construct
  source 1..75: mol_type = other DNA
agataaagaccttaatgttactttgggtggtcatgatattaccgccacatcaacggtagaccaagatttcgttga

SEQ ID NO: 607212 - DNA, 75 bp, synthetic construct
  source 1..75: mol_type = other DNA
acggtggtctgtatcaatatgacctgacacagggagctgatggtaacttttatttcgtaaaaaacacgcataaag

SEQ ID NO: 607213 - DNA, 75 bp, synthetic construct
  source 1..75: mol_type = other DNA
tcagcaaccgtaagtctgtctgattccacctggaaaggtaacgtgggtgacggtctggatggtggtgcgcgagtc

SEQ ID NO: 607214 - DNA, 75 bp, synthetic construct
  source 1..75: mol_type = other DNA
tatgcaagccttgactacaccaaaggtgacgacattgagaatccgctacagggtgtagttggtatcaatgtgacc

SEQ ID NO: 607215 - DNA, 75 bp, synthetic construct
  source 1..75: mol_type = other DNA
ttgctggctcaaatattattaatggtcggattgaaacaatacttattgctcaggagaataagggaactcatacag

SEQ ID NO: 607216 - DNA, 75 bp, synthetic construct
  source 1..75: mol_type = other DNA
gccgccccgaggggagcggctggagctggaaggattttgcttgggatgtcgctggtgcaaccaccggctataccg

SEQ ID NO: 607217 - DNA, 75 bp, synthetic construct
  source 1..75: mol_type = other DNA
gcggattacgtgcgtcgcgaagaacgggcagaaggtgaggcgctggcagaagagatgacgctacgcgatgcgctc

SEQ ID NO: 607218 - DNA, 75 bp, synthetic construct
  source 1..75: mol_type = other DNA
gccgatccgcaagtcttgctgatggatgagccattcggcgcactggacccggtaacgcgtggcgcgttgcaacaa

SEQ ID NO: 607219 - DNA, 75 bp, synthetic construct
  source 1..75: mol_type = other DNA
agcgcctaacgccaaaatgcgtaaagtcgcagacgatgcaccgctgatggagcgcgttgagtatatgctgcagtc

SEQ ID NO: 607220 - DNA, 75 bp, synthetic construct
  source 1..75: mol_type = other DNA
tgtgtggaatggtgctgtttccattaacgcgccagtggaccgcgcatcagtaccaatgggctcggttcaaccaaa

SEQ ID NO: 607221 - DNA, 75 bp, synthetic construct
  source 1..75: mol_type = other DNA
gcgtggggttatcggtaaatacaccatggaccgcattctgacggaaggtcgtaccgtgattcgtagcgatactca

SEQ ID NO: 607222 - DNA, 75 bp, synthetic construct
  source 1..75: mol_type = other DNA
actgggaatcactgggtggcagttggggcggacgtttcaaatccaggccggatggcaatcatttcagcctggaac

SEQ ID NO: 607223 - DNA, 75 bp, synthetic construct
  source 1..75: mol_type = other DNA
aatttaccgtcatgatcggaaaactcatcgagtttgcccatcagcgcggttatggcctgacgttcggtgaggcgt

SEQ ID NO: 607224 - DNA, 75 bp, synthetic construct
  source 1..75: mol_type = other DNA
tgaagatgtcaacacggtagcgggttttggcctttcgcgttataccctcgaaccgtggctgaataacggtgagct

SEQ ID NO: 607225 - DNA, 75 bp, synthetic construct
  source 1..75: mol_type = other DNA
atgaacactacccggagattattcgtaaagcactgcatgaagccaacgcggtcggtcaggttgctggtggtgttc

SEQ ID NO: 607226 - DNA, 75 bp, synthetic construct
  source 1..75: mol_type = other DNA
caaatcgaatcattgaacgttcgcgcgagactcgctctgcttatctcgcccggatagaacaagcgaaaacttcga

SEQ ID NO: 607227 - DNA, 75 bp, synthetic construct
  source 1..75: mol_type = other DNA
tattaagcctggacagctggttctgcttgaagcctttggcggtgggttcacctggggctccgcgctggttcgttt

SEQ ID NO: 607228 - DNA, 75 bp, synthetic construct
  source 1..75: mol_type = other DNA
cgcacgccttcccgagcgcagcatgtcagattcaaagcatgttgggcattaaaggttgcccggcgtttgacgttg

SEQ ID NO: 607229 - DNA, 75 bp, synthetic construct
  source 1..75: mol_type = other DNA
ccacattgccgcgccaaacgaaaccgtttcaaccatgggctttgaagcggcgacacgcgcaattgagatggcggg

SEQ ID NO: 607230 - DNA, 75 bp, synthetic construct
  source 1..75: mol_type = other DNA
aacatgaattccgacgacggtgatgttgtgaacaaaacacaaaacttcgaagctgttctgcaatatcagttcgac

SEQ ID NO: 607231 - DNA, 75 bp, synthetic construct
  source 1..75: mol_type = other DNA
tggatgaagctgtacgtgacgggcgcattaagccggggcagttggttctgcttgaagcctttggcggtggattca

SEQ ID NO: 607232 - DNA, 75 bp, synthetic construct
  source 1..75: mol_type = other DNA
tgcctctgaagagccaggaatcatctccactcatcttcatgccgacggcagctatggtgaattgttgacgttacc

SEQ ID NO: 607233 - DNA, 75 bp, synthetic construct
  source 1..75: mol_type = other DNA
ggcagattgacaaaagggccgcagagaaaatcagcgccagtcagtcagccggaagcaaacccgaagagccgctca

SEQ ID NO: 607234 - DNA, 75 bp, synthetic construct
  source 1..75: mol_type = other DNA
atgccactttccttcaacctaacaacagtgcggacaagatacgctggagcacagaagaaatgcagcccgataaag

SEQ ID NO: 607235 - DNA, 75 bp, synthetic construct
  source 1..75: mol_type = other DNA
atgctaaaaaacttaacatttgatcatatattaaatctttcaaagaaagaagataaaattaaaattgtacaatta

SEQ ID NO: 607236 - DNA, 75 bp, synthetic construct
  source 1..75: mol_type = other DNA
gatggggacgtctacgccagcttcagcgctcgggagcttttaccctttctgaaatattatgcggcccagctgctc

SEQ ID NO: 607237 - DNA, 75 bp, synthetic construct
  source 1..75: mol_type = other DNA
gggagtgacacctacacattaactttcccaggaactattggtctggacaaaattgcaaataaaacgactcaagca

SEQ ID NO: 607238 - DNA, 75 bp, synthetic construct
  source 1..75: mol_type = other DNA
tgcacaaagcattatatggagtggaacagaaattagcagcgctgagggtcttaaactgaccgttgcactgcgcga

SEQ ID NO: 607239 - DNA, 75 bp, synthetic construct
  source 1..75: mol_type = other DNA
tcagaaattagcaccgatggacttgagatgactgtcgcactgcgtgaaacaagtgtagggaaaggtgttccaggc

SEQ ID NO: 607240 - DNA, 75 bp, synthetic construct
  source 1..75: mol_type = other DNA
aacccggtaatccggtgcagcaggcgctgaaaaatttccatgagaaatattactccgccaatctgatgaaggctg

SEQ ID NO: 607241 - DNA, 75 bp, synthetic construct
  source 1..75: mol_type = other DNA
gatcggtacgatgctaaagcagtaaaagaacgtctggcgatgatgacgccgcagaatgcgcgtatctggtatatc

SEQ ID NO: 607242 - DNA, 75 bp, synthetic construct
  source 1..75: mol_type = other DNA
attaaccatggcgcgtacgcgtgacgggatgcgcatggcacaggtcagcgcagaaaccattaacccggcacaccc

SEQ ID NO: 607243 - DNA, 75 bp, synthetic construct
  source 1..75: mol_type = other DNA
ggcaacagcggcgtattagcgatctctgcgtctttaaccgataaaggtctggcgaatcgcgatcaggttgtggcg

SEQ ID NO: 607244 - DNA, 75 bp, synthetic construct
  source 1..75: mol_type = other DNA
gacgtcagtggggcatgggcttccttttgcaaagcaatgataaacagccttcatacctttgggagcgttataagg

SEQ ID NO: 607245 - DNA, 75 bp, synthetic construct
  source 1..75: mol_type = other DNA
ccgaagcccaggcaacaacgctggcgcgcgatgtgcaaaaacagttaggggctgatggctcagagtggtgtcgta

SEQ ID NO: 607246 - DNA, 75 bp, synthetic construct
  source 1..75: mol_type = other DNA
ccgcctgcacgcgcgcgatcgtaaagtcggtttcgtgttccagcattacgcgctgttccgccatatgacggtatt

SEQ ID NO: 607247 - DNA, 75 bp, synthetic construct
  source 1..75: mol_type = other DNA
aactcatcatcaagctcacctaagcttcttataccgcagtctggtgattcatcatcgacgacaagttatatcggt

SEQ ID NO: 607248 - DNA, 75 bp, synthetic construct
  source 1..75: mol_type = other DNA
tagcgatactgatgggaatattattatcaccctcagtatttgcaacggatattaatgtagagtttacagccactg

SEQ ID NO: 607249 - DNA, 75 bp, synthetic construct
  source 1..75: mol_type = other DNA
gtgggtgcagcagtggcatcagttggattgataccactctgaccggaaatgcatcatcaagctcacctaagctta

SEQ ID NO: 607250 - DNA, 75 bp, synthetic construct
  source 1..75: mol_type = other DNA
gaaagcctggtttgccgacaatctttcgtccaccagcaaaacgaagattttctcaatcaactacaccatgctcaa

SEQ ID NO: 607251 - DNA, 75 bp, synthetic construct
  source 1..75: mol_type = other DNA
aactggataatactcaacgtttctttcagccaataactttgcatacaaatctgcacaattacccgtttgtccggt

SEQ ID NO: 607252 - DNA, 75 bp, synthetic construct
  source 1..75: mol_type = other DNA
gtaaatatcattccaaaacccctagctataagtataagtatatagaaaaagttaaaaaggaatatgaaagaataa

SEQ ID NO: 607253 - DNA, 75 bp, synthetic construct
  source 1..75: mol_type = other DNA
aatgcgcaatcaaatcagatatacagacacagacgaaatactcttccgtctgagtaacaaccatcatttatatga

SEQ ID NO: 607254 - DNA, 75 bp, synthetic construct
  source 1..75: mol_type = other DNA
aagagctgaaattcaccagcgtgttcgtgacgcatgaccaggaagaggcgatggaagtcgccaaccgcgtggtgg

SEQ ID NO: 607255 - DNA, 75 bp, synthetic construct
  source 1..75: mol_type = other DNA
cagttccacgttggcgcacatcgctggccgctgggatacacccccgcgtatcaggggccggtggatctcttcctg

SEQ ID NO: 607256 - DNA, 75 bp, synthetic construct
  source 1..75: mol_type = other DNA
gccgctgggcgagaaagtgaatgccagttgggggatctccggcgatggcaaaaccgcgtttattgaaatggcggc

SEQ ID NO: 607257 - DNA, 75 bp, synthetic construct
  source 1..75: mol_type = other DNA
aaaaatctggccatagctcatattcgacgctgcgatactttgttgcataaatcaaaggctgtccccggaaacaac

SEQ ID NO: 607258 - DNA, 75 bp, synthetic construct
  source 1..75: mol_type = other DNA
gatgcgtaatcaaatgagtaaaataatcagacatacagacacagacgaaatactcttccgtctgagtaaacgtaa

SEQ ID NO: 607259 - DNA, 75 bp, synthetic construct
  source 1..75: mol_type = other DNA
tgatggtcggcagcactgttcattctgagtatcaggcagaactgaatgttggcaatacacaacaaacgtttgtgc

SEQ ID NO: 607260 - DNA, 75 bp, synthetic construct
  source 1..75: mol_type = other DNA
gttgccgataaatatggcgtgcggatcaccgatatcattactccgtctgagcggatgcgccgcctgagccgttag

SEQ ID NO: 607261 - DNA, 75 bp, synthetic construct
  source 1..75: mol_type = other DNA
agatattgttgtttccgatactggatcgattggcgtgctcatcaacggtgagggggcaacagtatccaatacggg

SEQ ID NO: 607262 - DNA, 75 bp, synthetic construct
  source 1..75: mol_type = other DNA
tgctgcggcgttgaaactacaagaagatgaaagctttaccaacaagaatattgtggttattctaccgtcatcggg

SEQ ID NO: 607263 - DNA, 75 bp, synthetic construct
  source 1..75: mol_type = other DNA
gcgcctcgggatatgaccattcggcgacggcagcggcggggggctttatgtatatcggtcatagtgtggctgaat

SEQ ID NO: 607264 - DNA, 75 bp, synthetic construct
  source 1..75: mol_type = other DNA
ttttcgggtatggccaataatgccagcggtggcgccgtatttttgcagcaaagtgctgaatttacgatatcacca

SEQ ID NO: 607265 - DNA, 75 bp, synthetic construct
  source 1..75: mol_type = other DNA
gaacccgcattacgggtgatgatgcgacggccaacaacagcggcaataccaccgtagacggtcagggttcgaccg

SEQ ID NO: 607266 - DNA, 75 bp, synthetic construct
  source 1..75: mol_type = other DNA
tgcgattgctgccgaccagttgttcaccacgctgatgggcgacgccgttgaaccgcgccgtgcgtttattgaaga

SEQ ID NO: 607267 - DNA, 75 bp, synthetic construct
  source 1..75: mol_type = other DNA
tggccgaacgcatcaattaccgtcagtttttacaggtattccgcgaatcaattcctagcctgatgcttattttta

SEQ ID NO: 607268 - DNA, 75 bp, synthetic construct
  source 1..75: mol_type = other DNA
gttagtggtgagtcgtcggtatatctgaatggagatacgacaatcagcggagaattccctctggggtttgccggg

SEQ ID NO: 607269 - DNA, 75 bp, synthetic construct
  source 1..75: mol_type = other DNA
agtggcaatataatcacaacggtgaggggcgacaataccacagtaaacaacactggaaaaaccatcgtcgacggc

SEQ ID NO: 607270 - DNA, 75 bp, synthetic construct
  source 1..75: mol_type = other DNA
gggatgagcgcagatggtgcaacgaagtggcaatataatcacaacggtgaggggcgacaataccacagtaaacaa

SEQ ID NO: 607271 - DNA, 75 bp, synthetic construct
  source 1..75: mol_type = other DNA
attatgcttttaagtatgcaaaaaagatagcgagtccatatcttcctactacgtatgaaagtagaccagaattga

SEQ ID NO: 607272 - DNA, 75 bp, synthetic construct
  source 1..75: mol_type = other DNA
cagtaacttaatagtcttaatatttttatgggggaaaataaaatggctgagaaataacctgatgcctgttcttgt

SEQ ID NO: 607273 - DNA, 75 bp, synthetic construct
  source 1..75: mol_type = other DNA
aatgtttcaaagaaaactataaactcacatattgagaatatccgtgtaaagttccaacttgataattatgaagaa

SEQ ID NO: 607274 - DNA, 75 bp, synthetic construct
  source 1..75: mol_type = other DNA
tctatatcaaaaaaaactataaactctcacattgaaaacatacgtgttaagtttcagttagacaattatgaagaa

SEQ ID NO: 607275 - DNA, 75 bp, synthetic construct
  source 1..75: mol_type = other DNA
caggcgcgggagtttgtgcaggaagtcctggagacgtttcgctggcatcagtcagcaacagtagatgaagaaacc

SEQ ID NO: 607276 - DNA, 75 bp, synthetic construct
  source 1..75: mol_type = other DNA
gtcacggtaatgccagtcgcgaagcatttgagcaggcgttgggttgtccggttttggatgagttccagctttacc

SEQ ID NO: 607277 - DNA, 75 bp, synthetic construct
  source 1..75: mol_type = other DNA
cagcgcgatatcttcaccccacgttgtcgacaactgttagaggaatatgagcagcggggcggttttaacgaaaca

SEQ ID NO: 607278 - DNA, 75 bp, synthetic construct
  source 1..75: mol_type = other DNA
gatgagattgatcgttacggtgtgacgcaggagggcgacccactaaaactaggtattcagcgtactaccaacttt

SEQ ID NO: 607279 - DNA, 75 bp, synthetic construct
  source 1..75: mol_type = other DNA
aggtattcagcgtactaccaactttcataatcgtaagaaagtttttgtttctactcctgttttggaggaaacgag

SEQ ID NO: 607280 - DNA, 75 bp, synthetic construct
  source 1..75: mol_type = other DNA
agctgaacatactggagttaaaggtattgttggttttcatattaacagtctttactccccgtgggttgcattgtc

SEQ ID NO: 607281 - DNA, 75 bp, synthetic construct
  source 1..75: mol_type = other DNA
ctctttctcaggaagtttagtctccaggattcccggggcggttcaccctgcattgttctggctgggctaacggag

SEQ ID NO: 607282 - DNA, 75 bp, synthetic construct
  source 1..75: mol_type = other DNA
attttgctctggactcaattggttttactcagcgcgaactggataacttattgagtgcggcggtctacgatgaca

SEQ ID NO: 607283 - DNA, 75 bp, synthetic construct
  source 1..75: mol_type = other DNA
gttgccagcatacaggagtacggatggactaatccgatcctgatagacgagaacaacgttgtaattgctggtcat

SEQ ID NO: 607284 - DNA, 75 bp, synthetic construct
  source 1..75: mol_type = other DNA
ccacaggcacacagggtaatcagccaccagcgggaggcgatgacccttacggtgatgatatttcgttctgagggg

SEQ ID NO: 607285 - DNA, 75 bp, synthetic construct
  source 1..75: mol_type = other DNA
aaaccgtgaatgtcagtaaaacggaaatcacgtcgcatgtctgtgagcggacaccggcagcggagctgacctgca

SEQ ID NO: 607286 - DNA, 75 bp, synthetic construct
  source 1..75: mol_type = other DNA
ggtatcggttttggcagcggtaagcatcctgactgccggggcatcacggtggaagagctgcagtcgctgcggttt

SEQ ID NO: 607287 - DNA, 75 bp, synthetic construct
  source 1..75: mol_type = other DNA
ctataccgtttacagcgactgctgggcctggaaagacacgtatctgaaacaggaggcagataacggcagctgtga

SEQ ID NO: 607288 - DNA, 75 bp, synthetic construct
  source 1..75: mol_type = other DNA
agaaaaaaaacgctgtcggcagaacgtcaaaaaagccaggatggttagaactctcaataaacgtggtggttggct

SEQ ID NO: 607289 - DNA, 75 bp, synthetic construct
  source 1..75: mol_type = other DNA
agataaaaaacgccgtcgtcagaacgtaaagaaagcgagaatggttagaaccgttaacaagcgagggggctggtt

SEQ ID NO: 607290 - DNA, 75 bp, synthetic construct
  source 1..75: mol_type = other DNA
aggtaaaaaacgttgccgccagttcgtcaaaaaagcgaggatgctaaagactgtaaataaacgtgggggctggct

SEQ ID NO: 607291 - DNA, 75 bp, synthetic construct
  source 1..75: mol_type = other DNA
atgaaacgcgttatcgtgatgatgctggcagcactggccaccttcggaacgggattgcaggccagtgataaatac

SEQ ID NO: 607292 - DNA, 75 bp, synthetic construct
  source 1..75: mol_type = other DNA
atggacgactctccggtgcttcaggtaaagtgccgtcagctatccacgtaacaccagaagcctacgatggcgggc

SEQ ID NO: 607293 - DNA, 75 bp, synthetic construct
  source 1..75: mol_type = other DNA
ccttcgagcagcctttctctcatcatggcgggacaaaagtgttaagcggtaacctgggccgtgcggttatgaaga

SEQ ID NO: 607294 - DNA, 75 bp, synthetic construct
  source 1..75: mol_type = other DNA
ggtaccaccattccgtcagacagtgaactggctgaacgtgtaaaagaacaggttgcttcggcgctgcagcagtct

SEQ ID NO: 607295 - DNA, 75 bp, synthetic construct
  source 1..75: mol_type = other DNA
gtctgcagaagaagaaaacttactgtcagtttgattcgaagctggcgcagattgttcaggctcaggggcgtaaag

SEQ ID NO: 607296 - DNA, 75 bp, synthetic construct
  source 1..75: mol_type = other DNA
actgtgttgggcagccgcctgaactggaactcgaaaacatccgtggatgcctcattcacgccagtacagaagacc

SEQ ID NO: 607297 - DNA, 75 bp, synthetic construct
  source 1..75: mol_type = other DNA
ttattcccgtatgcagcgggtgaataatgcccttcctcctgaatcgggaatggtgagaagccaggttattgttaa

SEQ ID NO: 607298 - DNA, 75 bp, synthetic construct
  source 1..75: mol_type = other DNA
gagggcggcggcacgatggggtgaagtcatgcaactggtggagacagacaaggaacggcatcaggttacgatgcg

SEQ ID NO: 607299 - DNA, 75 bp, synthetic construct
  source 1..75: mol_type = other DNA
gctgacagaatggctctatcggagtctggctgtgaaccaccttcaattctatggggggtattcctcctgcctgtc

SEQ ID NO: 607300 - DNA, 75 bp, synthetic construct
  source 1..75: mol_type = other DNA
gccgcgacgtggtttctttcctcggtgccagttatttccgtgccgttgatgacacttatcaatacggtttgtcgg

SEQ ID NO: 607301 - DNA, 75 bp, synthetic construct
  source 1..75: mol_type = other DNA
atttcggagacctgagaaatgcagttaatcgcacttgtgccgaaatgggtatagatggtgctggtgatgaaatac

SEQ ID NO: 607302 - DNA, 75 bp, synthetic construct
  source 1..75: mol_type = other DNA
caacaacataccgacttacaaaatgttaccgccattcacagaaacacaaggtaattgttcttctggcgcagccac

SEQ ID NO: 607303 - DNA, 75 bp, synthetic construct
  source 1..75: mol_type = other DNA
cgatgtaaaagaaacggttataaaactacaagggcaaaaattcacatgcattgaagattttcataaaaagtataa

SEQ ID NO: 607304 - DNA, 75 bp, synthetic construct
  source 1..75: mol_type = other DNA
acagcaggctaccggggcaaaaaacgtcggcattgtgatattttcggcccagccgaatcagcagacatttaatgt

SEQ ID NO: 607305 - DNA, 75 bp, synthetic construct
  source 1..75: mol_type = other DNA
tacgttttttggggctggcaacagcccttattacgccttttggctatgctggtcaggatgtggatctcaccgcgc

SEQ ID NO: 607306 - DNA, 75 bp, synthetic construct
  source 1..75: mol_type = other DNA
aacggattatgcgggtggcaaaacgtttaatgttaatgtggtctcttgcgataacattcaaacgacacagtcgca

SEQ ID NO: 607307 - DNA, 75 bp, synthetic construct
  source 1..75: mol_type = other DNA
gacattatgggctggtataacaaacgcccaagtctgtgggtggaaccgcgtaacaagtggggtaagggcaccatc

SEQ ID NO: 607308 - DNA, 75 bp, synthetic construct
  source 1..75: mol_type = other DNA
ggcttataacagtattcaatacgacgccgaaaaatcgctctggcataacgttgagaaccgtcaactggacgctca

SEQ ID NO: 607309 - DNA, 75 bp, synthetic construct
  source 1..75: mol_type = other DNA
agccccatgcacaaaaatttaacgttcgggggacggacggagcatcaaaagccatttatgccttaccctctaatc

SEQ ID NO: 607310 - DNA, 75 bp, synthetic construct
  source 1..75: mol_type = other DNA
gatttgcgcatggcgacgctgaaagtgcaggaggcacgggcgcaatatcgtctgaccgatgccgaccgctaccca

SEQ ID NO: 607311 - DNA, 75 bp, synthetic construct
  source 1..75: mol_type = other DNA
agccgcatggaatgtaattcagtgcgggtggcttatatccataaggcggagcatttagatgagcgtaagttgatg

SEQ ID NO: 607312 - DNA, 75 bp, synthetic construct
  source 1..75: mol_type = other DNA
cattgtgatgggcgtaagagcgcaacaaaaagaaaaaaaccccgccgttcgctggtggaagccgcatttagccaa

SEQ ID NO: 607313 - DNA, 75 bp, synthetic construct
  source 1..75: mol_type = other DNA
aggataccgagtcttcaccaccaacattagcgccagtcacccatcgtcacgacgcttactggtattttgcaggtg

SEQ ID NO: 607314 - DNA, 75 bp, synthetic construct
  source 1..75: mol_type = other DNA
gaagaggtactgacaaaagtttgggataacaacggattaacttcttctaacagcaatctgaatcagtatctcagt

SEQ ID NO: 607315 - DNA, 75 bp, synthetic construct
  source 1..75: mol_type = other DNA
tttgtgtggcccttgcgttaaccggttgttctttggcaccggaatatcagcgtccggcaatgcctgtgccgcagc

SEQ ID NO: 607316 - DNA, 75 bp, synthetic construct
  source 1..75: mol_type = other DNA
ttggatctctggtgatccttttagtcctgctggaggaaatatatttggtcactacctatggaatgaaattgatct

SEQ ID NO: 607317 - DNA, 75 bp, synthetic construct
  source 1..75: mol_type = other DNA
agcgttacggtttacatcaaaacaatgcaaccacaacagaagcacttatagtccttaaagcagcagctagtaact

SEQ ID NO: 607318 - DNA, 75 bp, synthetic construct
  source 1..75: mol_type = other DNA
caaaacccggctgacggcgttagaaaatctgcacttttatcatcgcgatggcgataccgcacaatgtctggaagc

SEQ ID NO: 607319 - DNA, 75 bp, synthetic construct
  source 1..75: mol_type = other DNA
tggacttgttggctgttcatgggaaattacgaaaacttattatcctggcattattgctacaatcctactatttac

SEQ ID NO: 607320 - DNA, 75 bp, synthetic construct
  source 1..75: mol_type = other DNA
atctcaattgcaagtttaataaaagatatcaacattacaaattacaagttgggacgatattttatccttgcgtgt

SEQ ID NO: 607321 - DNA, 75 bp, synthetic construct
  source 1..75: mol_type = other DNA
gaacaatatttgcgttttcctctgttcccgcaaaatgcagatcttttaatggctttaggtttacagttaggagat

SEQ ID NO: 607322 - DNA, 75 bp, synthetic construct
  source 1..75: mol_type = other DNA
ccttgggcgagtgttcctcgcgcactgcgctatgcatgaaaataacccgtttagttattgcgataactactttta

SEQ ID NO: 607323 - DNA, 75 bp, synthetic construct
  source 1..75: mol_type = other DNA
gtgttattgcgactggttataacgaagaactggatgaatggcgtgcgctggccgacggcgcgaccgattatctgg

SEQ ID NO: 607324 - DNA, 75 bp, synthetic construct
  source 1..75: mol_type = other DNA
atgagtacacctgaaaatttcgacgcccatacgccaatgatgcagcagtatctcaagctgaaagcccagcatccc

SEQ ID NO: 607325 - DNA, 75 bp, synthetic construct
  source 1..75: mol_type = other DNA
cgaaagaggtgatcaaacgtgcgcgacagaaactgcgtgagctggaaagcatttcgccgaatgctgccgctacac

SEQ ID NO: 607326 - DNA, 75 bp, synthetic construct
  source 1..75: mol_type = other DNA
gcaaaaggtcgagattgggccgatcgatcgcatctttacccgcgtaggtgccgcggatgatctggcttccggacg

SEQ ID NO: 607327 - DNA, 75 bp, synthetic construct
  source 1..75: mol_type = other DNA
ggcgaacgtgcatcttgatgcactggagcacggcgacacgattgcctttatgcacagtgtgcaggacggcgcggc

SEQ ID NO: 607328 - DNA, 75 bp, synthetic construct
  source 1..75: mol_type = other DNA
tatcagaccacactcctatgatgcagcagtatctcaggctgaaagcccagcatcccgagatcctgctgttttacc

SEQ ID NO: 607329 - DNA, 75 bp, synthetic construct
  source 1..75: mol_type = other DNA
gccatccggtggttgaacaggtgctaaatgagccgtttatcgctaacccgctaaatctgtcgcctcagcgtcgca

SEQ ID NO: 607330 - DNA, 75 bp, synthetic construct
  source 1..75: mol_type = other DNA
acaacgccagacgcaccgcgctccgcacatgctcgcgggatgtgctggtacatggccggagcctgcttgctcacc

SEQ ID NO: 607331 - DNA, 75 bp, synthetic construct
  source 1..75: mol_type = other DNA
gaaaccaacgggctggggcgcgtgttccttgcccactgcgccatgcatgaagataacccgttcagctattgcgat

SEQ ID NO: 607332 - DNA, 75 bp, synthetic construct
  source 1..75: mol_type = other DNA
gtcatcgctccaggctataacgaagagctggatgagtggcgtgcgctggctgacggtgcgaccgattatctggag

SEQ ID NO: 607333 - DNA, 75 bp, synthetic construct
  source 1..75: mol_type = other DNA
gagcaaaagctacggcctggcggttgctgcactggcgggcgttccgaaagaggttattaagcgcgcgcggcaaaa

SEQ ID NO: 607334 - DNA, 75 bp, synthetic construct
  source 1..75: mol_type = other DNA
ggttattaagcgcgcacggcaaaaactgcgtgagctggaaagcatttcgccgaacgccgccgctacgcaagtgga

SEQ ID NO: 607335 - DNA, 75 bp, synthetic construct
  source 1..75: mol_type = other DNA
ctgcagaggatatcaccagtgctgttaacgaggctgttactgctgacctgcagttaattgaggagataaagcacc

SEQ ID NO: 607336 - DNA, 75 bp, synthetic construct
  source 1..75: mol_type = other DNA
gccgctccaccgggaagtggtaaaggggtggggattgtgatccctaatctactattgtatccgcattctgttgta

SEQ ID NO: 607337 - DNA, 75 bp, synthetic construct
  source 1..75: mol_type = other DNA
tgattgcgaaactccttgaggacgctcgccgaattcaagaagtggagccaaacgcagggacacaatcacgtattg

SEQ ID NO: 607338 - DNA, 75 bp, synthetic construct
  source 1..75: mol_type = other DNA
cactcacggactcgcatcgggccaagctggacgagctgttgaagctcaaggccggcagcagcatcacctggttga

SEQ ID NO: 607339 - DNA, 75 bp, synthetic construct
  source 1..75: mol_type = other DNA
atgtggatattcgcagcctgctgtgtctttagctatttctttatttgccgctacctgccggaaaccaaaggtgtc

SEQ ID NO: 607340 - DNA, 75 bp, synthetic construct
  source 1..75: mol_type = other DNA
aggacatgcgtggcagggcattgagtatgcaacagtttgccatcgtttttggtcagatcctcatattttacgtca

SEQ ID NO: 607341 - DNA, 75 bp, synthetic construct
  source 1..75: mol_type = other DNA
cccagaccactaatgctaccgcaggaagtagatgagttgccatatggagaagagttgattttcatgcagccatct

SEQ ID NO: 607342 - DNA, 75 bp, synthetic construct
  source 1..75: mol_type = other DNA
ccagaacggcttggccgtcgcgctgcgcgagttgggccgcatcgagcgcacgctgttcatcctcgactggctaca

SEQ ID NO: 607343 - DNA, 75 bp, synthetic construct
  source 1..75: mol_type = other DNA
ggccagggcggtgttcttcaaccgccttggggaaatcagggatcggagcttcgagcagcagcgctaccgggccag

SEQ ID NO: 607344 - DNA, 75 bp, synthetic construct
  source 1..75: mol_type = other DNA
tggacgggcttcagccgccacttcacccacttgaaggacggggccgaggccaaagacaggacgttgctgctgtcc

SEQ ID NO: 607345 - DNA, 75 bp, synthetic construct
  source 1..75: mol_type = other DNA
cagaactggtgaatgctcagggaaaaagacctctggcagcattctggggagacggaacaacttcatcatcagatg

SEQ ID NO: 607346 - DNA, 75 bp, synthetic construct
  source 1..75: mol_type = other DNA
catatttcagcgaacatgacctggctcttattaatgctcatcgcaaaccagccagtcgttttggatttgcagttc

SEQ ID NO: 607347 - DNA, 75 bp, synthetic construct
  source 1..75: mol_type = other DNA
tccgcaccggcagcaaggccgagagcaccggccacatcaacccgaaatacgggagcagcccagggcggacgttct

SEQ ID NO: 607348 - DNA, 75 bp, synthetic construct
  source 1..75: mol_type = other DNA
cccccgactggcagacaccgctgaacgggattatttcactctcagagagcggttgatgctgatgcagaagcagct

SEQ ID NO: 607349 - DNA, 75 bp, synthetic construct
  source 1..75: mol_type = other DNA
agggagagacgtttaccatccaccagggcgaagtttcgggtgcatgcctaacgccgccaccctggggggaataac

SEQ ID NO: 607350 - DNA, 75 bp, synthetic construct
  source 1..75: mol_type = other DNA
gtgatacccgccgtgcaatgtatcagcgccagcttagcgagattgaggttgagaaacacgcgcgcaggctgctcg

SEQ ID NO: 607351 - DNA, 75 bp, synthetic construct
  source 1..75: mol_type = other DNA
tgcgcattaatgaggctaacaacctgattaatgaaaaacaatggccatcaaaattacagcttggcaggctgaacg

SEQ ID NO: 607352 - DNA, 75 bp, synthetic construct
  source 1..75: mol_type = other DNA
ataagtttaaaactacacttcgaactccctgacttcaaggatatatttaaatcagggactgtaaaagtatatgaa

SEQ ID NO: 607353 - DNA, 75 bp, synthetic construct
  source 1..75: mol_type = other DNA
aaacttttgtcctctgatgattatactaatccagataaccctatagaagttataggtacagttaagggtattact

SEQ ID NO: 607354 - DNA, 75 bp, synthetic construct
  source 1..75: mol_type = other DNA
gcgtttgccgaaggtgggatccgaacccgtgaacaggtttctgctggtatgcgccacgcccgcgccagtgaatct

SEQ ID NO: 607355 - DNA, 75 bp, synthetic construct
  source 1..75: mol_type = other DNA
cgaaccggaaaactgaagaaaaatgtggttgttctgactcagcgctcaaagcgtcggggggaaattatttctggt

SEQ ID NO: 607356 - DNA, 75 bp, synthetic construct
  source 1..75: mol_type = other DNA
cagtaaagcgggcgtttaccagccttactataaaataaacctgtcaaaagccagaatatcaagcattgattttgt

SEQ ID NO: 607357 - DNA, 75 bp, synthetic construct
  source 1..75: mol_type = other DNA
gagcgaaccggaaaactgaagaaaaacgtggttattctgactcagcgttcacggcgtcgtggtgaaattatctct

SEQ ID NO: 607358 - DNA, 75 bp, synthetic construct
  source 1..75: mol_type = other DNA
gaaatgcattttataacagtgaactgaaatctgattattacgatgctctcgatgcgtggccggatgactgtattg

SEQ ID NO: 607359 - DNA, 75 bp, synthetic construct
  source 1..75: mol_type = other DNA
gctaaagaaatttcagcctctactggcgttcctaagccatttaaggtgatagcagcctttcattcaaataatccc

SEQ ID NO: 607360 - DNA, 75 bp, synthetic construct
  source 1..75: mol_type = other DNA
aacttctcaccggcgacagtccttttgcagcgaatgcgttgggtaaactggcggcgcagaaaatgttggcagctt

SEQ ID NO: 607361 - DNA, 75 bp, synthetic construct
  source 1..75: mol_type = other DNA
aacttggtttctcttatttatatacaacagaaagaagaatgaactttcccgaaaatggctcattgaaaactggac

SEQ ID NO: 607362 - DNA, 75 bp, synthetic construct
  source 1..75: mol_type = other DNA
atggtgattattttaagtatgcatcatatatttgaattatctcctttattgtgcataggggtgatttcaaattat

SEQ ID NO: 607363 - DNA, 75 bp, synthetic construct
  source 1..75: mol_type = other DNA
tgttagcaattgtcttcgccagcctgttaagtgcttgtgttcctcaccatcatcaccgccacagcgatggccctc

SEQ ID NO: 607364 - DNA, 75 bp, synthetic construct
  source 1..75: mol_type = other DNA
ttttgcgcaaaaatgcacatattgtggattccaattggaatccaacagatgcacagctagatgaaatcagagcag

SEQ ID NO: 607365 - DNA, 75 bp, synthetic construct
  source 1..75: mol_type = other DNA
agagagcggctgatgacgatgcagaagcaactggaaggggcgcaggaatatatccgtactcagtgcattaagtag

SEQ ID NO: 607366 - DNA, 75 bp, synthetic construct
  source 1..75: mol_type = other DNA
cgtcgatcatattaatgagcatggcgctttcattcctgctcttgcacctgtccgccagtcaaacctgtgcatgga

SEQ ID NO: 607367 - DNA, 75 bp, synthetic construct
  source 1..75: mol_type = other DNA
ttatgatggtttggggaaaggagttaagaaatattttaactttacaccattacataattataatcatttttgtga

SEQ ID NO: 607368 - DNA, 75 bp, synthetic construct
  source 1..75: mol_type = other DNA
gatcatggttggactgatgtaatcgcgtatccattcgtcgaagaaatacaatcaatggataatagtggttatcga

SEQ ID NO: 607369 - DNA, 75 bp, synthetic construct
  source 1..75: mol_type = other DNA
cctgcgtgtcaacgccacctgtgtgtccgccacagacaaagccaccggcaccgcccgcgtgggtactgctgcccc

SEQ ID NO: 607370 - DNA, 75 bp, synthetic construct
  source 1..75: mol_type = other DNA
cagagtatagatgatgttaaaaagttagttaacaaaatcactctggcacgacaaaatgttatcaatgttaaatct

SEQ ID NO: 607371 - DNA, 75 bp, synthetic construct
  source 1..75: mol_type = other DNA
ctgaatctaaagaaattcgttttcgcttaaatcaaacaatttcaaatgcacctgttttactcgatcgtgagattg

SEQ ID NO: 607372 - DNA, 75 bp, synthetic construct
  source 1..75: mol_type = other DNA
tacataattataatcatttttgtgactttattgagtttaaacaccctaatatgatcatgaacacaagtcagtata

SEQ ID NO: 607373 - DNA, 75 bp, synthetic construct
  source 1..75: mol_type = other DNA
gattatttcaccctcagagagcggctgatgacgatgcagatgcaactggaaggggcgcaggaatatatccgcact

SEQ ID NO: 607374 - DNA, 75 bp, synthetic construct
  source 1..75: mol_type = other DNA
cgcacggctttctatctggaagttgagaacgacgccttgcccggtgcggtagaccgcctggcggacgctattgca

SEQ ID NO: 607375 - DNA, 75 bp, synthetic construct
  source 1..75: mol_type = other DNA
ttgagcaggcgattatgcccgcgcagatgctctcgcaagtgccgtacttctcgcgagatgaacggcgtaaaattt

SEQ ID NO: 607376 - DNA, 75 bp, synthetic construct
  source 1..75: mol_type = other DNA
aaactttcgcggactggcagaaaaaagccgccaatattgcgctctccttaccggagcttaacccctatattcctg

SEQ ID NO: 607377 - DNA, 75 bp, synthetic construct
  source 1..75: mol_type = other DNA
ggatggcagccgattcaggaaaccatccgtaaaagtgataaagacaaccgtcagtatcaggccgtgcgtctggat

SEQ ID NO: 607378 - DNA, 75 bp, synthetic construct
  source 1..75: mol_type = other DNA
tcagcccgaaagagccgcacaataaaacggcttactttgttgatgcgccgtatcaggtcgataaaatcagtgaac

SEQ ID NO: 607379 - DNA, 75 bp, synthetic construct
  source 1..75: mol_type = other DNA
gaccggtaccgacaacatccgtgacgttatcgccttcccgaaaaccacggcggcagcgtgtctgatgaccgaagc

SEQ ID NO: 607380 - DNA, 75 bp, synthetic construct
  source 1..75: mol_type = other DNA
ggcattctgggtatcaccgaagaagaacagcgcgagaaattcggcttcctgctcgatgccctgaaatatggtacg

SEQ ID NO: 607381 - DNA, 75 bp, synthetic construct
  source 1..75: mol_type = other DNA
ctgcattcaggtcacgggcaccgtacgtgcgcgtgacgaaaaaaatatcaaccgcgatatggcgaccggcgaaat

SEQ ID NO: 607382 - DNA, 75 bp, synthetic construct
  source 1..75: mol_type = other DNA
aaatgcggtggcgaacgcttatgatatggtcatcaatggttacgaagtgggcggtggctctgtacgtatccataa

SEQ ID NO: 607383 - DNA, 75 bp, synthetic construct
  source 1..75: mol_type = other DNA
ccgacgaaagcaaatgggcaccgctgtgggttatcgacttcccgatgtttgaagacgacggtgaaggcggcctga

SEQ ID NO: 607384 - DNA, 75 bp, synthetic construct
  source 1..75: mol_type = other DNA
gcgcgaaaggtctggcttacatcaaagttaacgaacgcgcgaaaggtctggaaggtatcaacagcccggtagcga

SEQ ID NO: 607385 - DNA, 75 bp, synthetic construct
  source 1..75: mol_type = other DNA
agctatttttgaatggcgcacacatggagcaacccaacgtacacaacgtttctgagggaaacatgaagttctatg

SEQ ID NO: 607386 - DNA, 75 bp, synthetic construct
  source 1..75: mol_type = other DNA
gcgtgattttgatgggtataatctgcagtatgcggaaaatgctgagaagatggctgagcagcataaagataaaaa

SEQ ID NO: 607387 - DNA, 75 bp, synthetic construct
  source 1..75: mol_type = other DNA
tggagtttatggggatgcagttgccaggctcttcttttgttcatccggattctccgctgcgcgatgctttgaccg

SEQ ID NO: 607388 - DNA, 75 bp, synthetic construct
  source 1..75: mol_type = other DNA
atgaacactatccggaaatcattcgtaaagccctgcatgaagcgaatgcggttggtcaggttgcgggcggtgttc

SEQ ID NO: 607389 - DNA, 75 bp, synthetic construct
  source 1..75: mol_type = other DNA
cagggcaaactgaccgttgcaaaactgaacatcgatcaaaatcctggcactgcgccgaaatatggcatccgtggt

SEQ ID NO: 607390 - DNA, 75 bp, synthetic construct
  source 1..75: mol_type = other DNA
acggtgaagtggcggcaaccaaagtgggcgcactgtctaaaggtcagttgaaagagttcctcgacgctaacctgg

SEQ ID NO: 607391 - DNA, 75 bp, synthetic construct
  source 1..75: mol_type = other DNA
aaaaaaatggtgagtatgaacgtgccaagagatgtaaactggcatctgcaaatattactattaaagttgcaacag

SEQ ID NO: 607392 - DNA, 75 bp, synthetic construct
  source 1..75: mol_type = other DNA
cattatggacgccgcaacgcgccgtaatctggaaattacccaaaatctggcaggcggtgtggagaatacgctggc

SEQ ID NO: 607393 - DNA, 75 bp, synthetic construct
  source 1..75: mol_type = other DNA
ggttttggtgtggagaacgcaccacgcggactttgtgctgccggttgtctgttgcagtatgcgaaagatacccaa

SEQ ID NO: 607394 - DNA, 75 bp, synthetic construct
  source 1..75: mol_type = other DNA
taagattaaagcattgacgttgtttgctacccactatttcgagctgacccagttaccggagaaaatggaaggcgt

SEQ ID NO: 607395 - DNA, 75 bp, synthetic construct
  source 1..75: mol_type = other DNA
ctgaatctggaggaacatattcacgattgtacgctggtgatcaccggtgaagggcgtattgatagccagagtatt

SEQ ID NO: 607396 - DNA, 75 bp, synthetic construct
  source 1..75: mol_type = other DNA
ctctgctgttttccggaatatctccggcccaggcgctggatgtcggcgatatatcatcgtttatgaacagtgaca

SEQ ID NO: 607397 - DNA, 75 bp, synthetic construct
  source 1..75: mol_type = other DNA
ttgcgagcaagccattaaagagtcgatcgcctctaagcaagcgtattgtgcatcgttggtgaatctggataaagt

SEQ ID NO: 607398 - DNA, 75 bp, synthetic construct
  source 1..75: mol_type = other DNA
tgaatgcggaagggatcatttctcagcttgatgcgcgtgcactcgagttactggtggaagcctacaccgaatacc

SEQ ID NO: 607399 - DNA, 75 bp, synthetic construct
  source 1..75: mol_type = other DNA
tgaacagtacagccgtgagcaaattgaagaagcggcgcgtatggcctacgccatggacttcatcaataagatgga

SEQ ID NO: 607400 - DNA, 75 bp, synthetic construct
  source 1..75: mol_type = other DNA
cgagaaagcagacgaaatcgtggtcgttgaagacggggttattgtggagcgcggcacgcacaacgatttgctgga

SEQ ID NO: 607401 - DNA, 75 bp, synthetic construct
  source 1..75: mol_type = other DNA
attctgatccttgatgaagccacctcggcgctggatacagaatccgaacgtgcgattcaggcggcgcttgacgag

SEQ ID NO: 607402 - DNA, 75 bp, synthetic construct
  source 1..75: mol_type = other DNA
atggatagcctgacagcaggtacgattaccgttgtcttctcttcgatgattgcactgatgcgtccgctgaaatcg

SEQ ID NO: 607403 - DNA, 75 bp, synthetic construct
  source 1..75: mol_type = other DNA
ggacgttctggttcgggtaaatcgaccatcgcgagtttaatcactcgcttctacgatatcgatgaaggcgagatc

SEQ ID NO: 607404 - DNA, 75 bp, synthetic construct
  source 1..75: mol_type = other DNA
tgcgtaacatcaacctgaaaattccggcagggaagacggttgctctggttggacgctctggttcaggtaaatcaa

SEQ ID NO: 607405 - DNA, 75 bp, synthetic construct
  source 1..75: mol_type = other DNA
agtgatattagttccccaacaaaatactattattttattgctatcggtgaccctgacgatagagcattatggtta

SEQ ID NO: 607406 - DNA, 75 bp, synthetic construct
  source 1..75: mol_type = other DNA
ggatggcggaggttcctctgacgtttcagtgagctcatctaactccggggattcagttatcgacaattatgtcgc

SEQ ID NO: 607407 - DNA, 75 bp, synthetic construct
  source 1..75: mol_type = other DNA
atgtctggacccccgaaaaccccgccacgcctgcatttgatacgaggtaacccctcaaagcggccagttaaagac

SEQ ID NO: 607408 - DNA, 75 bp, synthetic construct
  source 1..75: mol_type = other DNA
tcaactcttgctttcaggtggggagcatagaagaaattgccgatgctctcgagaaacgcagcggaagcgaggaaa

SEQ ID NO: 607409 - DNA, 75 bp, synthetic construct
  source 1..75: mol_type = other DNA
aaattgacgaagcaatagcggcgctggtagcgacgcgaggagcagtgataagcactgcgcaaggccaccatgcat

SEQ ID NO: 607410 - DNA, 75 bp, synthetic construct
  source 1..75: mol_type = other DNA
actttaggtgtcatagacgaacctaaccaatacctatactttattgcaattggagatcccgattacagagcctta

SEQ ID NO: 607411 - DNA, 75 bp, synthetic construct
  source 1..75: mol_type = other DNA
tatttctataaacctgttacatacatcgacctggtcaaaattatcctttctaaaccgaaggtgaaggttgtggtt

SEQ ID NO: 607412 - DNA, 75 bp, synthetic construct
  source 1..75: mol_type = other DNA
gaaaggccgtggacgtaaggctgcgcagccggagcctcagccgcaaccaccggagggggaggattacgggttttc

SEQ ID NO: 607413 - DNA, 75 bp, synthetic construct
  source 1..75: mol_type = other DNA
cgcggagatgccctcgatcatctgttgatttttggtcctcctggtttaggtaaaactacgcttgccaacattgtc

SEQ ID NO: 607414 - DNA, 75 bp, synthetic construct
  source 1..75: mol_type = other DNA
cttcagtggctgtatgccatcgatgtgctgattgaaacacagggcgaggtctgcctccttccccttcctggtgat

SEQ ID NO: 607415 - DNA, 75 bp, synthetic construct
  source 1..75: mol_type = other DNA
tgacaaacagactggggagatgcgggagcagactgaatggcaacgcgtggtgctgttcggcaagctcgcggaagt

SEQ ID NO: 607416 - DNA, 75 bp, synthetic construct
  source 1..75: mol_type = other DNA
tgacaaacagacaggggagatgcgggagcagacagaatggcaacgcgtggtgctgttcggcaagctcgcggaagt

SEQ ID NO: 607417 - DNA, 75 bp, synthetic construct
  source 1..75: mol_type = other DNA
gtaaggctgcgcagccggagcctcagccgcaaccgccggagggtgaggattactggttttcagacgatatcccgt

SEQ ID NO: 607418 - DNA, 75 bp, synthetic construct
  source 1..75: mol_type = other DNA
tcagcgacgacgagggtggctatgtggactgcgtggcgctcgatgccgccctgctggaaaaactccaggctgtcg

SEQ ID NO: 607419 - DNA, 75 bp, synthetic construct
  source 1..75: mol_type = other DNA
ctgccagtcaggatggggcggtaaaccggatgtgcgggttatccgcaatctgattacggaaagtgaagtggcggt

SEQ ID NO: 607420 - DNA, 75 bp, synthetic construct
  source 1..75: mol_type = other DNA
tcgccgactggctgcactcaacatgctggcagagcgtggcatccttacggctgactggcctgtacgcgtgaaggt

SEQ ID NO: 607421 - DNA, 75 bp, synthetic construct
  source 1..75: mol_type = other DNA
cttcagtggttgtatgccatcgatgtgctgattgaaacacagggcgaggtctgcctccttccgcttcctggagat

SEQ ID NO: 607422 - DNA, 75 bp, synthetic construct
  source 1..75: mol_type = other DNA
cttcagtggatgtatgccatcgatgtgctgattgaaacacagggcgaggtctgcctccttcctcttcctggcgat

SEQ ID NO: 607423 - DNA, 75 bp, synthetic construct
  source 1..75: mol_type = other DNA
agacccggaagtccgttacatccccaacgggggcgcagtggcaaacctgcaacttgccacgtcagaaagctggcg

SEQ ID NO: 607424 - DNA, 75 bp, synthetic construct
  source 1..75: mol_type = other DNA
tgacaaacagaccggggagatgcgggagcagacagaatggcaccgcgtggtgctgttcggcaagctcgcggaagt

SEQ ID NO: 607425 - DNA, 75 bp, synthetic construct
  source 1..75: mol_type = other DNA
gtggcaaacctgcaggtcgccacgtcagaaacctggcgcgacaaacagacgggggaaatgaaggaacagacggaa

SEQ ID NO: 607426 - DNA, 75 bp, synthetic construct
  source 1..75: mol_type = other DNA
tgaaattcttgttaagaccacgggcaccatgcagatgctggggagtgcaccacagcagaacgctcaggcgcaacc

SEQ ID NO: 607427 - DNA, 75 bp, synthetic construct
  source 1..75: mol_type = other DNA
atgtcagttacagagtctaaggcaaaaacggagcgtaaatccagccgtaacccgtcaaaagagcaggagactgtc

SEQ ID NO: 607428 - DNA, 75 bp, synthetic construct
  source 1..75: mol_type = other DNA
tacccgttctgaacgactgactgtgacaaccgctccgtcctgtgcggggcatcaccggagagatgaggatgagcg

SEQ ID NO: 607429 - DNA, 75 bp, synthetic construct
  source 1..75: mol_type = other DNA
aggtggccacgtcggaaacctggcgtgacaaacagacgggggagatgcgggagcagacagaatggcatcgcgtgg

SEQ ID NO: 607430 - DNA, 75 bp, synthetic construct
  source 1..75: mol_type = other DNA
gggcttgagatgagtgatgacggcgcgctggaagttgctcgtcgagctcgcggtacgccgcgcattgccaaccgt

SEQ ID NO: 607431 - DNA, 75 bp, synthetic construct
  source 1..75: mol_type = other DNA
tgacaaacagacgggggagatgcgggagcagacggaatggcaacgcgtggtgctgttcggcaagctcgcggaagt

SEQ ID NO: 607432 - DNA, 75 bp, synthetic construct
  source 1..75: mol_type = other DNA
tgacaaacagacgggggagatgcgggagcagacagaatggcagcgcgtggtgctgttcggcaagctcgcggaagt

SEQ ID NO: 607433 - DNA, 75 bp, synthetic construct
  source 1..75: mol_type = other DNA
tgacaaacagaccggggagatgcgggagcagaccgaatggcaacgcgtggtgctgttcggcaagctcgcggaagt

SEQ ID NO: 607434 - DNA, 75 bp, synthetic construct
  source 1..75: mol_type = other DNA
aggtgctgttatccctgctcagtttctgcaccgcgtgcagcatccacggcgttcagacccgcgagtgtggtcaca

SEQ ID NO: 607435 - DNA, 75 bp, synthetic construct
  source 1..75: mol_type = other DNA
agggatggtcacgggacatgacgacgttcctgtcactcagtcaggaggtgctgttatccctgctcagtttctgca

SEQ ID NO: 607436 - DNA, 75 bp, synthetic construct
  source 1..75: mol_type = other DNA
gtgacaaacagacgggggagatacgggagcagacagaatggcatcgcgtggtgctgttcggcaagctcgcggaag

SEQ ID NO: 607437 - DNA, 75 bp, synthetic construct
  source 1..75: mol_type = other DNA
gagatgcgtgccggaagcggtgtggtggtgtcctggcgttacggcaatgtgtgtgtccagcgtggtgtgcagttg

SEQ ID NO: 607438 - DNA, 75 bp, synthetic construct
  source 1..75: mol_type = other DNA
aattttcatcaaagcggcgaaactgcgcggcgatgcccttgatcatctattgatttttggtcctccgggtctggg

SEQ ID NO: 607439 - DNA, 75 bp, synthetic construct
  source 1..75: mol_type = other DNA
cgaaaaaaggtggcgcgaaaacgaaaggccgtggacgtaaggccgcgcagccagagcctcagccgcaaccgccgg

SEQ ID NO: 607440 - DNA, 75 bp, synthetic construct
  source 1..75: mol_type = other DNA
agcgatgcgccgtcagggaaggaaggtgccgcattcatggcgctgatggcagaaaaagcccgtcttgcggccctg

SEQ ID NO: 607441 - DNA, 75 bp, synthetic construct
  source 1..75: mol_type = other DNA
ggcataccgcaacctgccggagccggaagcggtgctgacggaggcggaagacgaacgtctgaacgaactgatggc

SEQ ID NO: 607442 - DNA, 75 bp, synthetic construct
  source 1..75: mol_type = other DNA
cgcacggtgccgtattccgcagagtccgtcagcgaactggcggagtccattaagggcgttggcctgttacagaat

SEQ ID NO: 607443 - DNA, 75 bp, synthetic construct
  source 1..75: mol_type = other DNA
gacgctgaacgcacggaacaggtgcgtaagactgatgcggtggaggaaatcagtctgccgctactgacgaaaatg

SEQ ID NO: 607444 - DNA, 75 bp, synthetic construct
  source 1..75: mol_type = other DNA
atgaccgaatttacaactcttcttcagcaaggaaacgcctggttcttcatccccagcgccatcttacttggtgcg

SEQ ID NO: 607445 - DNA, 75 bp, synthetic construct
  source 1..75: mol_type = other DNA
actgattaaatcaccgctgaatgtgcgcacggtgccgtattccgcagagtccgtcagcgaactggcggagtccat

SEQ ID NO: 607446 - DNA, 75 bp, synthetic construct
  source 1..75: mol_type = other DNA
tgaagaaaggcgatgcggctgaacatgcagagttccacatgaaagacaaccgctgggtgcctggctggatgtgta

SEQ ID NO: 607447 - DNA, 75 bp, synthetic construct
  source 1..75: mol_type = other DNA
cgcagtccgctgggcactgttgcaaagttagcgatgaggcagccttttgtcttattcaaaggccttacatttcaa

SEQ ID NO: 607448 - DNA, 75 bp, synthetic construct
  source 1..75: mol_type = other DNA
tgacggggacggttatgtggaccgtgtggcgctcgatgctgccctgctggaaaaactccaggctgtcgcagagta

SEQ ID NO: 607449 - DNA, 75 bp, synthetic construct
  source 1..75: mol_type = other DNA
aaacggagcgtaaatccagccgtaaacctgcaaaaacgcaggaaacagtcctgtctgccctgctggagcagacgg

SEQ ID NO: 607450 - DNA, 75 bp, synthetic construct
  source 1..75: mol_type = other DNA
gttttattacaagataaagcactgttgtggtttacctgctctggttttctggcttcctttgttagcggcgcattt

SEQ ID NO: 607451 - DNA, 75 bp, synthetic construct
  source 1..75: mol_type = other DNA
aaggtttcgattatatggatcgcaagttattgctggcggtaatcgataaattcttcggtggtccggttggcctgg

SEQ ID NO: 607452 - DNA, 75 bp, synthetic construct
  source 1..75: mol_type = other DNA
caagaaacgctatatgttactggcaattaccgccttcgccagcggttttattgccattcctttagtgaataacgt

SEQ ID NO: 607453 - DNA, 75 bp, synthetic construct
  source 1..75: mol_type = other DNA
ctgatgacggtaggcacactctgttttgtcgtcggtctggtcggttttattttttccggaaacagcctgttaatg

SEQ ID NO: 607454 - DNA, 75 bp, synthetic construct
  source 1..75: mol_type = other DNA
atgtcagttacagagtttaaggtaaaagcggggcgtaaatccagccgtaaaccgtcaaaaatgcaggagactgca

SEQ ID NO: 607455 - DNA, 75 bp, synthetic construct
  source 1..75: mol_type = other DNA
aggccgtggacgtaaggctgcgcagccggagcctcagccgcaaccaccggagggggaggattacgggttttcaga

SEQ ID NO: 607456 - DNA, 75 bp, synthetic construct
  source 1..75: mol_type = other DNA
cgaatatcgcaggttatcgcgctattgtcgaagctgctcatgaatttggtcgcttttttaccggacaaatcactg

SEQ ID NO: 607457 - DNA, 75 bp, synthetic construct
  source 1..75: mol_type = other DNA
atgttaccggcgattaccgccttcgccagcggctttatcgccattcccctggtggacaacgtgacgcttgtggtg

SEQ ID NO: 607458 - DNA, 75 bp, synthetic construct
  source 1..75: mol_type = other DNA
catcttagcgttggtgatcattgctgcgtgggtgctgatgttaaaaggaattcgtgcaagaccgtgggggcagcc

SEQ ID NO: 607459 - DNA, 75 bp, synthetic construct
  source 1..75: mol_type = other DNA
cgattaacccattagtgagtggcatagtgcttaccagtctgccgcctttctcgctgtttatcatcttagcgttgg

SEQ ID NO: 607460 - DNA, 75 bp, synthetic construct
  source 1..75: mol_type = other DNA
catcctggcgatggtaatcattgccgcgtgggtgttaatgctgaaaggcattcgtgcaaaatcctgggggccgcc

SEQ ID NO: 607461 - DNA, 75 bp, synthetic construct
  source 1..75: mol_type = other DNA
cttttcatccaaatttgggttaaacgcagtgagaaaataatcgccgccgggacgaatagtgtctggtcgccaaag

SEQ ID NO: 607462 - DNA, 75 bp, synthetic construct
  source 1..75: mol_type = other DNA
gaaggcctggtttgccgataatctttcctctgccagtaaaacgaagatcttctcgatcaactacaccatgctcaa

SEQ ID NO: 607463 - DNA, 75 bp, synthetic construct
  source 1..75: mol_type = other DNA
ctgcctccttccccttcccggtgatgcagcagaacgcttgttcccgtcgatgcggttccgtgtcagggagcgcag

SEQ ID NO: 607464 - DNA, 75 bp, synthetic construct
  source 1..75: mol_type = other DNA
ggccggaatggaacgctggcagtggcaggatatgccattctggcaggtcattgcagaggctggtatggcggcaag

SEQ ID NO: 607465 - DNA, 75 bp, synthetic construct
  source 1..75: mol_type = other DNA
cggaaacagccggaagttggcatgcacgctggagtgaccgggtggcagagcatgacctggaaaccctgttctggc

SEQ ID NO: 607466 - DNA, 75 bp, synthetic construct
  source 1..75: mol_type = other DNA
ttgggacttgaatcgttggtgaagcagacaaccatgagttacccgcctgcaagctggaaacgtatgcgtcgcgaa

SEQ ID NO: 607467 - DNA, 75 bp, synthetic construct
  source 1..75: mol_type = other DNA
atttcccaggattatcatcatcggcagtctgctttttggcgtaaaagtttcacccatttggtgccgttgcagggt

SEQ ID NO: 607468 - DNA, 75 bp, synthetic construct
  source 1..75: mol_type = other DNA
tttttgaagctggtgaggccggtcgtggtgcaccggtacaggtacgtgcacttgagcagtggatgatcccgaaca

SEQ ID NO: 607469 - DNA, 75 bp, synthetic construct
  source 1..75: mol_type = other DNA
gtgcctggctggatgtgtgcaccacgcccacagacggatgccactgaacgcaccgataacctggctgatgccgcc

SEQ ID NO: 607470 - DNA, 75 bp, synthetic construct
  source 1..75: mol_type = other DNA
tccggcggcacgctccattaaaattgatttgccgccgtttaccctgattggtgcaaccacgcgcgcaggttcgct

SEQ ID NO: 607471 - DNA, 75 bp, synthetic construct
  source 1..75: mol_type = other DNA
ctcagtcaggaggtgctgttatccctgctcagtttctgcactgcgtgcagaatccacggtgttcagacccgtgag

SEQ ID NO: 607472 - DNA, 75 bp, synthetic construct
  source 1..75: mol_type = other DNA
ctcagccaggaggtgctgttatccctgctcagcttctgtaccgcgtgcagtcttaacggtgtccagacccgcgag

SEQ ID NO: 607473 - DNA, 75 bp, synthetic construct
  source 1..75: mol_type = other DNA
gtcacacgtcacgcagcccgctggacacgctggagagcgccatcggttttcacatgcgcgactggtggcagccga

SEQ ID NO: 607474 - DNA, 75 bp, synthetic construct
  source 1..75: mol_type = other DNA
gtgcataccctgcctggtgaccgttacgctgtcgccgcaggcggtcgccgactggcagcactcaacatgctggca

SEQ ID NO: 607475 - DNA, 75 bp, synthetic construct
  source 1..75: mol_type = other DNA
taaccgaaagtgaagtggcggtggctgggaacagtaaattccgcttcgtgggggctgatgccttctcgccagacg

SEQ ID NO: 607476 - DNA, 75 bp, synthetic construct
  source 1..75: mol_type = other DNA
tgggaacagtaaattccgcttcgtgggggctgatgccttctcgccagacgaactgcgcaccgatttgttcagcga

SEQ ID NO: 607477 - DNA, 75 bp, synthetic construct
  source 1..75: mol_type = other DNA
tgctcagtttctgcactgcgtgcagcatccacggcgttcagacccgcgagtgtggtcacacgtcacgcagtccgc

SEQ ID NO: 607478 - DNA, 75 bp, synthetic construct
  source 1..75: mol_type = other DNA
gcgcagtgaggatgatgtggctgacgacgctgaccgcacggaacaggggctggagagcgcgtcagtggaggaaat

SEQ ID NO: 607479 - DNA, 75 bp, synthetic construct
  source 1..75: mol_type = other DNA
caacagttcagcggtcagtctcagccggaaccacaggcggaggccggtacgaaaaaaggaggcgcaaaaacgaaa

SEQ ID NO: 607480 - DNA, 75 bp, synthetic construct
  source 1..75: mol_type = other DNA
gtggctgtatgccgtcgatgtgctgattgaaacacagggcgaggtctgcctccttccccttcccggcgatgcagc

SEQ ID NO: 607481 - DNA, 75 bp, synthetic construct
  source 1..75: mol_type = other DNA
attcctggcgctgatggcagaaaaagcccgtcttgcggccctgttaccggagggatggtcacgggacatgacgac

SEQ ID NO: 607482 - DNA, 75 bp, synthetic construct
  source 1..75: mol_type = other DNA
ttaccgaaagtgaagtggcggtggccgggaacagtaaattccgcttcgtgggggctgatgccttctcgccagaag

SEQ ID NO: 607483 - DNA, 75 bp, synthetic construct
  source 1..75: mol_type = other DNA
ttaccgaaagtgaagtggcggtggcagggaacagtaaattccgcttcgtgggggctgatgccttctcgccagacg

SEQ ID NO: 607484 - DNA, 75 bp, synthetic construct
  source 1..75: mol_type = other DNA
taaccgaaagtgaagtggcggtggccgggaacagtaaattccgcttcgtgggggctgatgccttctcgccagatg

SEQ ID NO: 607485 - DNA, 75 bp, synthetic construct
  source 1..75: mol_type = other DNA
ccttcgggaagccgaaggctgggaatggtgcgccggacgcatggagcctgtcggtttctgccgtgaggatgccgg

SEQ ID NO: 607486 - DNA, 75 bp, synthetic construct
  source 1..75: mol_type = other DNA
tcaccgaaagtgaagtggcggtggctgggaacagtaaattccgcttcgtgggggctgatgccttctcgccagaag

SEQ ID NO: 607487 - DNA, 75 bp, synthetic construct
  source 1..75: mol_type = other DNA
tcaccgaaagtgaagtggcggtggcagggaacagtaaattccgcttcgtgggggctgatgccttctcgccagatg

SEQ ID NO: 607488 - DNA, 75 bp, synthetic construct
  source 1..75: mol_type = other DNA
tcgcattcatggcgctgatggcagaaaaagcccgtcttgcagccctgctgccggagggatggtcacgggacatga

SEQ ID NO: 607489 - DNA, 75 bp, synthetic construct
  source 1..75: mol_type = other DNA
ttcgcacccgtagctgggacgacaacggcatcacccgctacatcactgaaattcttgttaagaccacgggcacca

SEQ ID NO: 607490 - DNA, 75 bp, synthetic construct
  source 1..75: mol_type = other DNA
gtagctgggaggataacggtatcacccgttacgtcaccgaaattcttgttaagaccacgggcaccatgcagatgc

SEQ ID NO: 607491 - DNA, 75 bp, synthetic construct
  source 1..75: mol_type = other DNA
gtggtgtcctggcgttatggaaacgtatgtgtccagcgtggtgtgcagttgcgcagtgaggatgacgtggctgac

SEQ ID NO: 607492 - DNA, 75 bp, synthetic construct
  source 1..75: mol_type = other DNA
ccgccacgttcagcgaatgctgaaactggccgaccttgccccagtgatcctggatgcgctggcagaagacctcat

SEQ ID NO: 607493 - DNA, 75 bp, synthetic construct
  source 1..75: mol_type = other DNA
ccgccacgttcagcgaatgctgaaactggccgaccttgccccagtgatccttgatgcgctggcagaagaccgcat

SEQ ID NO: 607494 - DNA, 75 bp, synthetic construct
  source 1..75: mol_type = other DNA
gtgtgtccagcgtggtgtgcagttgcgcagtgaggatgacgcggctgacgacgctgaccgcacggaacaggcgca

SEQ ID NO: 607495 - DNA, 75 bp, synthetic construct
  source 1..75: mol_type = other DNA
gccggacgcatggaggccgtcggtgagtgccgtgaagatgcccgggcataccgcaacctgccgcagccggaggca

SEQ ID NO: 607496 - DNA, 75 bp, synthetic construct
  source 1..75: mol_type = other DNA
gaagatgaagaaaggtgatgcggctgaacatgcagagcaccatatgaaagacaaccgctgggtgcctggctggat

SEQ ID NO: 607497 - DNA, 75 bp, synthetic construct
  source 1..75: mol_type = other DNA
gtttctgcaccgcgtgcagcatccacggcgttcagacccgcgagtgtggtcacacgtcacgcagtccgctggatt

SEQ ID NO: 607498 - DNA, 75 bp, synthetic construct
  source 1..75: mol_type = other DNA
attcgctgaccagcgatgcgccgtcagggaaggaaggtgccgcattcatggcgataatgacagaaaaagcccgtc

SEQ ID NO: 607499 - DNA, 75 bp, synthetic construct
  source 1..75: mol_type = other DNA
aggtcgccacgtcagaaacctggcgcgacaaacagacgggggaaatgaaggaacagacggaatggcaccgcgtgg

SEQ ID NO: 607500 - DNA, 75 bp, synthetic construct
  source 1..75: mol_type = other DNA
ggcgaggtctgcctccttccccttcccggcgatgcagcagagcagttgttcccgtcagtgcggttccgtgtcagg

SEQ ID NO: 607501 - DNA, 75 bp, synthetic construct
  source 1..75: mol_type = other DNA
aacataccgctgtctgccggagccggaagcggtgctgacggaggcggaagaagaacgtctgaacgaactgatgac

SEQ ID NO: 607502 - DNA, 75 bp, synthetic construct
  source 1..75: mol_type = other DNA
ggcgtgacaaacagacgggggagatgcgggagcagacagaatggcatcgcgtggtgctgttcggcaagctcgcgg

SEQ ID NO: 607503 - DNA, 75 bp, synthetic construct
  source 1..75: mol_type = other DNA
tcattcttgtcggtcgtctgggaaaagatccggaaatccgttacatccccaacgggggcgcagtggcaaacctgc

SEQ ID NO: 607504 - DNA, 75 bp, synthetic construct
  source 1..75: mol_type = other DNA
ctggtcgtgcatgccctgccaggtgaccgccacggtgtcgccgcaggtggtcgccgactggcagcactcaatatg

SEQ ID NO: 607505 - DNA, 75 bp, synthetic construct
  source 1..75: mol_type = other DNA
cgctctgcctgaatgtgtttggcagcggagcgtacagtaaaccagcacaaatcagcctggaatgtaaacattctt

SEQ ID NO: 607506 - DNA, 75 bp, synthetic construct
  source 1..75: mol_type = other DNA
gattgccggattccgtgcaatggcgcaggaaggcaaaacacctgcacaaatcggtgatttgctgggctattcacc

SEQ ID NO: 607507 - DNA, 75 bp, synthetic construct
  source 1..75: mol_type = other DNA
tcatcctcgtaggacgcctgggaaaagatccggaagtccgttacatccccaacgggggcgcagtggcaaacctgc

SEQ ID NO: 607508 - DNA, 75 bp, synthetic construct
  source 1..75: mol_type = other DNA
gcacggaacaggtgcaggagaaagcatcagtggaggaaatcagtctgccgttgctgacgaaaatgtcctcagagc

SEQ ID NO: 607509 - DNA, 75 bp, synthetic construct
  source 1..75: mol_type = other DNA
tgaagaaaggtgatgcggctgaacatgcagagttccatatgaaagacaaccgctgggtgcctggctggatgtgtg

SEQ ID NO: 607510 - DNA, 75 bp, synthetic construct
  source 1..75: mol_type = other DNA
gtgtgtccagcgtggtgtgcagttgcgcagtgaagatgacgcggctgatgacgctgaccgcacggaacaggtgca

SEQ ID NO: 607511 - DNA, 75 bp, synthetic construct
  source 1..75: mol_type = other DNA
accgttacggtgtcgccgcaggtggtcgccgactggcagcactcaacatgctggcagagcgtggcatccttccgg

SEQ ID NO: 607512 - DNA, 75 bp, synthetic construct
  source 1..75: mol_type = other DNA
gagaagatgaagaaaggcgatgcggctgaacatgcagagttccatatgaaagacaaccgctgggtgcctggctgg

SEQ ID NO: 607513 - DNA, 75 bp, synthetic construct
  source 1..75: mol_type = other DNA
acgctggcagtccaggcggcactgatgcagcagccggacaaatccctggcactgctggcatggacgctctgcctg

SEQ ID NO: 607514 - DNA, 75 bp, synthetic construct
  source 1..75: mol_type = other DNA
agtactttggcggtaaacagaaacataccaccgcgggaaatgcatcctatgacctggatgtaaacggtgtaatgc

SEQ ID NO: 607515 - DNA, 75 bp, synthetic construct
  source 1..75: mol_type = other DNA
ctgaaatcgaagaattgcagcgcaatctctccctgcaaaaatacaaatccgaaagtaatgccccatctgctactc

SEQ ID NO: 607516 - DNA, 75 bp, synthetic construct
  source 1..75: mol_type = other DNA
agatgaacgaagacgactggccgttcagggttgtcggacttgcgccagttgccaggaggaaatcgaacttaagaa

SEQ ID NO: 607517 - DNA, 75 bp, synthetic construct
  source 1..75: mol_type = other DNA
taacggtgatgcaaccgacaacatcacccttgctgactcaaatattattaatggcgggattgaaacaatagttat

SEQ ID NO: 607518 - DNA, 75 bp, synthetic construct
  source 1..75: mol_type = other DNA
tgatgctctggcagtaaaagacagtacggttaatatcacgaaggctacagtcaatactggcacgtttgcttctca

SEQ ID NO: 607519 - DNA, 75 bp, synthetic construct
  source 1..75: mol_type = other DNA
ccaaaaacatgggagcatatgcaagccttgactacaccaaaggtgacgacattgagaacccgctacagggtgtag

SEQ ID NO: 607520 - DNA, 75 bp, synthetic construct
  source 1..75: mol_type = other DNA
gtgtattccacagaagaaaaaccgacaccagccgagattgaagccgtttctatccatgaccggatcgatttcggg

SEQ ID NO: 607521 - DNA, 75 bp, synthetic construct
  source 1..75: mol_type = other DNA
gcttcgcacgcgcgttccacgtcgttggcgcgataaagatcttattgggctttatttttcttcgatgaatatcgg

SEQ ID NO: 607522 - DNA, 75 bp, synthetic construct
  source 1..75: mol_type = other DNA
ctttacgtaagatattatcttttgaacggaatttattgaacatggcaagtgttaaggccgagcatattaaagagc

SEQ ID NO: 607523 - DNA, 75 bp, synthetic construct
  source 1..75: mol_type = other DNA
aaagtttacacatcggctgaaaaaccaaccgccgcagatgttggagcagtgtcgctaactgcacgcgtggacttt

SEQ ID NO: 607524 - DNA, 75 bp, synthetic construct
  source 1..75: mol_type = other DNA
ccgtttcgtaacttacaagggaactgctagcggtaatccatattcagccgacacatcattaattcaccttcaagc

SEQ ID NO: 607525 - DNA, 75 bp, synthetic construct
  source 1..75: mol_type = other DNA
gtgtttacagtgcgggttcattggatcttatcaatgaacaaacggcatttatttctaccggcaaagacagcactc

SEQ ID NO: 607526 - DNA, 75 bp, synthetic construct
  source 1..75: mol_type = other DNA
ttctgtatatggtcattattgccctgctgttggtttgtggtgcgctgtgtctggcaacaaaccattaccgcgata

SEQ ID NO: 607527 - DNA, 75 bp, synthetic construct
  source 1..75: mol_type = other DNA
tttgacgatgcgattgctgcgcgtgaaaacgaacagcaatacattcgtgaagcagaagcgtataccaacgaagtt

SEQ ID NO: 607528 - DNA, 75 bp, synthetic construct
  source 1..75: mol_type = other DNA
ctgtatatcgagacgatggaaaaagtgttgggcaacacccgcaaagtgctggttaacgacaaaggtggcaacctg

SEQ ID NO: 607529 - DNA, 75 bp, synthetic construct
  source 1..75: mol_type = other DNA
tatcagaaagaacgtggcttcccgccaaccaatcaggaggtggcaaccatgctgggataccgttcagtgaatgca

SEQ ID NO: 607530 - DNA, 75 bp, synthetic construct
  source 1..75: mol_type = other DNA
ccgctggtcgtaagcgcctgcggatcaacgccacctgtccaggctccgtgcgtgaagcccccaccacctccggcg

SEQ ID NO: 607531 - DNA, 75 bp, synthetic construct
  source 1..75: mol_type = other DNA
ctctccagttgctggacgaaacgttctcggtatcagagacggaatcatcagcgaccaggcagcattgagaacgct

SEQ ID NO: 607532 - DNA, 75 bp, synthetic construct
  source 1..75: mol_type = other DNA
attgaagatgatgctgtaaccgtcttgggtagaaaacttcagcaatcagcaattccaaaagttgaaagtgccgtt

SEQ ID NO: 607533 - DNA, 75 bp, synthetic construct
  source 1..75: mol_type = other DNA
gatggtgatgtcaacaacgccaaaactgctgtttttctgacggatggttctgtgtggaatggtgctgtttccatt

SEQ ID NO: 607534 - DNA, 75 bp, synthetic construct
  source 1..75: mol_type = other DNA
tcaactggcgatgttgttgttaatggcggtaatttcgttgcaaaaaatgaaaaaggtagtgcgacagggatatct

SEQ ID NO: 607535 - DNA, 75 bp, synthetic construct
  source 1..75: mol_type = other DNA
aacgtatcctcgaagaggcgcgtgcgtacaaggctcagactatcctggaagcccagggtgaagtcgcgcgctttg

SEQ ID NO: 607536 - DNA, 75 bp, synthetic construct
  source 1..75: mol_type = other DNA
cgcgatatgcatgctgcgggcattaaccaccgtgactgttatatctgtcatttcctgctgcacttgcctttttcc

SEQ ID NO: 607537 - DNA, 75 bp, synthetic construct
  source 1..75: mol_type = other DNA
actgtcttctcctgagtttaaatcaatgctatttcgcctgcaaaacgcaccagtagacagagcagaagtgagacg

SEQ ID NO: 607538 - DNA, 75 bp, synthetic construct
  source 1..75: mol_type = other DNA
gctgacgcagagagatatctggcgatttatgaaggtttattttgggatgcctttacgtaagatattatcttttga

SEQ ID NO: 607539 - DNA, 75 bp, synthetic construct
  source 1..75: mol_type = other DNA
tcccaactggcaaaccctggagctgcgtaacgtgacgtttagttatcaggataatgctttttccgttggcccgat

SEQ ID NO: 607540 - DNA, 75 bp, synthetic construct
  source 1..75: mol_type = other DNA
taacctcaccatcaaacgtggcgagctgctgtttctgattggtggcaacggtagtggaaaatcgacgctggcgat

SEQ ID NO: 607541 - DNA, 75 bp, synthetic construct
  source 1..75: mol_type = other DNA
gatgctgggcgctatcggcctggtgttctggatggcgaacagtctcggttgggctgataccaacgttgccgcgac

SEQ ID NO: 607542 - DNA, 75 bp, synthetic construct
  source 1..75: mol_type = other DNA
tagtgcaacggtgcacgcacaatcgcctggcacggcaacgacagcgccctacctgctggctggcgcccccacttt

SEQ ID NO: 607543 - DNA, 75 bp, synthetic construct
  source 1..75: mol_type = other DNA
atcaaaagcattcaaatgacctggctacccatccaggggccagagcaaaaagccgcgaaagcgaaagctcaggaa

SEQ ID NO: 607544 - DNA, 75 bp, synthetic construct
  source 1..75: mol_type = other DNA
gccgtgtttaccgatgtctggttgtttgatcaactgctggggccggagggtaaaaccgcaaatccacaactggtt

SEQ ID NO: 607545 - DNA, 75 bp, synthetic construct
  source 1..75: mol_type = other DNA
aaatcatttccacttgtcgggaaatgaatgcgtcaggtcttaatcaaggaacatcaggtaatgtgagtgccaggt

SEQ ID NO: 607546 - DNA, 75 bp, synthetic construct
  source 1..75: mol_type = other DNA
tggtcatggtgtttgtcggggtgtttgtccttatcctggtcagcataatgtcgtacagcctgtggcgggacaggc

SEQ ID NO: 607547 - DNA, 75 bp, synthetic construct
  source 1..75: mol_type = other DNA
cggtgcctgttatcactgaaagcatcattcagacactgggtgataaattgctacaaaaagctgagaagaaaaaaa

SEQ ID NO: 607548 - DNA, 75 bp, synthetic construct
  source 1..75: mol_type = other DNA
gcaggtggcgtttaacaagctgaacaaattcgcgctcgcgcctttcaaagcagagtttccgcgcccgcaggcgtt

SEQ ID NO: 607549 - DNA, 75 bp, synthetic construct
  source 1..75: mol_type = other DNA
gatgtgaaacaggaactgcttaaccgtctgctatccgggaaaatactgacttattgggatgaaaaagatatccga

SEQ ID NO: 607550 - DNA, 75 bp, synthetic construct
  source 1..75: mol_type = other DNA
gtatctggtgaacttcctggccctcctgacgctgcagcttctatgttgcttcaaaccgtcactcttgaccctgct

SEQ ID NO: 607551 - DNA, 75 bp, synthetic construct
  source 1..75: mol_type = other DNA
aacctgactcgcgccgccagtaaaattaacgagaacttgtatgcttctacagcgctggagcgcggcactttaaaa

SEQ ID NO: 607552 - DNA, 75 bp, synthetic construct
  source 1..75: mol_type = other DNA
ggtcgggaagatgagctgaaaatttcgataatcgacctgcatcgggcacagatacgtgcaaaagtaccgcgtcgc

SEQ ID NO: 607553 - DNA, 75 bp, synthetic construct
  source 1..75: mol_type = other DNA
ccacactttggcgtggtaaagatgcttttgcagaggtcaaaaaactgaacggcgaggtctttcgtgaactggaga

SEQ ID NO: 607554 - DNA, 75 bp, synthetic construct
  source 1..75: mol_type = other DNA
accgtcatttacagatttgcccggatgcccagcttggtctggctgaacaactgcttctcggtgtggttgatacgg

SEQ ID NO: 607555 - DNA, 75 bp, synthetic construct
  source 1..75: mol_type = other DNA
atgcccgttttaggtgcagacagagagtggcacgctattcatcgactgcatgatgtcggtgttgatacgatgcac

SEQ ID NO: 607556 - DNA, 75 bp, synthetic construct
  source 1..75: mol_type = other DNA
atggttgaattaaaagagccgcttgccacactttggcgtggtaaagatgcttttgaagaagtcaaaaaactgaat

SEQ ID NO: 607557 - DNA, 75 bp, synthetic construct
  source 1..75: mol_type = other DNA
ctttacgtgaagttttattacaggaagttaatttaaccagaaaagcaggaattaaggcacaaaaaataaaagaaa

SEQ ID NO: 607558 - DNA, 75 bp, synthetic construct
  source 1..75: mol_type = other DNA
agattataaaaaatctgctctcattgcggatgcccgttttaggtgcagacagagagtggcacgctattcatcgac

SEQ ID NO: 607559 - DNA, 75 bp, synthetic construct
  source 1..75: mol_type = other DNA
gtaaagtggccgatcgttcagggagaaagcctgtcgccatacccggcgcggcgctatttattatcgcctcggtgt

SEQ ID NO: 607560 - DNA, 75 bp, synthetic construct
  source 1..75: mol_type = other DNA
cattatggcgctgaccgctggcgtcagcatgaccgtttcattctccacgccatttgcgctgggaatttttaagcc

SEQ ID NO: 607561 - DNA, 75 bp, synthetic construct
  source 1..75: mol_type = other DNA
gccgcgtttaccggcctccattttggtgcatgaaaacagctatcaaccgctggataaagacgcactggcgcagta

SEQ ID NO: 607562 - DNA, 75 bp, synthetic construct
  source 1..75: mol_type = other DNA
gccgcgtttaccggcctccattttggtacatgaaaacagctaccagtcgctggataaagatgctctggcgcagta

SEQ ID NO: 607563 - DNA, 75 bp, synthetic construct
  source 1..75: mol_type = other DNA
gggttaaatccattaactcgcacatcatttattattaccgaagatctcactcccacaattagccttgaagattat

SEQ ID NO: 607564 - DNA, 75 bp, synthetic construct
  source 1..75: mol_type = other DNA
ctgggttccaggctggatgtgtgcaccacatccacagacagatgccactgaacgcaccgataacctggctgatgc

SEQ ID NO: 607565 - DNA, 75 bp, synthetic construct
  source 1..75: mol_type = other DNA
atccgtgccctgaccgaagaaactggcaccaccatcgaaatcgaagatgacggtactgtgaaaatcgcagcgacc

SEQ ID NO: 607566 - DNA, 75 bp, synthetic construct
  source 1..75: mol_type = other DNA
tgttatcggtaaaggcggttctgtaatccgtgctctgaccgaagaaactggcaccaccatcgaaatcgaagatga

SEQ ID NO: 607567 - DNA, 75 bp, synthetic construct
  source 1..75: mol_type = other DNA
tgcggaagccagtcttgcagcaagagaggccggtcacgctgtccgtgagatggagcggtggatggtgccgaacaa

SEQ ID NO: 607568 - DNA, 75 bp, synthetic construct
  source 1..75: mol_type = other DNA
atgactgcccgtcagtatgcgctggttcctctcagcgcagagcaacaggccgcatggcgggcggtggcggagacg

SEQ ID NO: 607569 - DNA, 75 bp, synthetic construct
  source 1..75: mol_type = other DNA
ggctgaacatgcagagcaccatatgaaagacaaccgctgggtgcctggctggatgtgtgcaccacgtccacagac

SEQ ID NO: 607570 - DNA, 75 bp, synthetic construct
  source 1..75: mol_type = other DNA
ggcggcactcatgcagcagccggacaaatctctggcactgctggcatggacgctctgcctgaatgtgtttggcag

SEQ ID NO: 607571 - DNA, 75 bp, synthetic construct
  source 1..75: mol_type = other DNA
ctgggaaaagatccggaagtccgttacatccccaacgggggcgcagtggcaaacctgcaggtggccacgtcagaa

SEQ ID NO: 607572 - DNA, 75 bp, synthetic construct
  source 1..75: mol_type = other DNA
agccaggaggtgctgttatccctgctcagtttctgtaccgcgtgcagtcttaacggtgtccagacccgcgagtgt

SEQ ID NO: 607573 - DNA, 75 bp, synthetic construct
  source 1..75: mol_type = other DNA
tcaaaattgaaggcatcaccaaagagatcatgcaggttgcgctgaaccaggctaaaggtgcgcgtctgcatatcc

SEQ ID NO: 607574 - DNA, 75 bp, synthetic construct
  source 1..75: mol_type = other DNA
atggacgcaggtgtgccaatcaaagctgccgttgcgggtatcgcaatggggctggtgaaagaaggcgacaactac

SEQ ID NO: 607575 - DNA, 75 bp, synthetic construct
  source 1..75: mol_type = other DNA
ggaaacagtcggaagctggcatgcacgctggagtgaccgggtggcagagcatgacctggaaaccctgttctggca

SEQ ID NO: 607576 - DNA, 75 bp, synthetic construct
  source 1..75: mol_type = other DNA
tgttaaccgcttaccctgctgccaaccttaaccgtgatgacaccggtgcgccgaaaactttagtgctgggtggag

SEQ ID NO: 607577 - DNA, 75 bp, synthetic construct
  source 1..75: mol_type = other DNA
cgcagcgaggatgatgcggctgacgacgctgaccgcacggaacaggtgccggaaaaagcggctgtggaggaaatc

SEQ ID NO: 607578 - DNA, 75 bp, synthetic construct
  source 1..75: mol_type = other DNA
cgcagcgaggatgatgcggctgacgacgctgaccgcacggaacaggtgcaggacaaagcggctgtggaggaaatc

SEQ ID NO: 607579 - DNA, 75 bp, synthetic construct
  source 1..75: mol_type = other DNA
atcatgattgagaaaggaatcgaagagaaaaaagccatcgaatgggcggcagatattgccgattatcttggtaaa

SEQ ID NO: 607580 - DNA, 75 bp, synthetic construct
  source 1..75: mol_type = other DNA
ttgggaaagccaaaaaagacaaaaaacaaaaaacgacaaaaaccaaaagatccgctcactagcgccgaaactgaa

SEQ ID NO: 607581 - DNA, 75 bp, synthetic construct
  source 1..75: mol_type = other DNA
gtccatatcagcccggcagaatttgacgccgtaaaagcgctggcccatcaactggcagaagaaaagcgcgcgcca

SEQ ID NO: 607582 - DNA, 75 bp, synthetic construct
  source 1..75: mol_type = other DNA
gtggcgtggtggtgtcctggcgttatggcaatgtgtgtgtccagcgtggtgtgcagttgcgcagtgaagatgatg

SEQ ID NO: 607583 - DNA, 75 bp, synthetic construct
  source 1..75: mol_type = other DNA
gggaggcagagcagaaagcccgtgcgtaccaggcgctggtcgctcaggctgaagtcgaactggcattccattcgc

SEQ ID NO: 607584 - DNA, 75 bp, synthetic construct
  source 1..75: mol_type = other DNA
gaacatggcgacaacgaagagtatcaggatgcccatgcacgagcccatgccaatgacattaaacgacgctttgat

SEQ ID NO: 607585 - DNA, 75 bp, synthetic construct
  source 1..75: mol_type = other DNA
caactatttcgcataccgcagtggtctggttaattgcctttggcgggatggtgatcagcaagcgctttactgctc

SEQ ID NO: 607586 - DNA, 75 bp, synthetic construct
  source 1..75: mol_type = other DNA
atgaaagacaaccgctgggtgcctggctggatgggttcaccacgtccacagacggatgccactgaacgcgccgat

SEQ ID NO: 607587 - DNA, 75 bp, synthetic construct
  source 1..75: mol_type = other DNA
gaggaaatcagtctgccgctgctgacgaaaatgtcctcagagcgcacgctggcagtccaggcggcactgatgcag

SEQ ID NO: 607588 - DNA, 75 bp, synthetic construct
  source 1..75: mol_type = other DNA
tgctgttcggcaagctcgcggaagtggctggcgaatatctgcgcaagggcgcgcaggtctacatcgaaggtcagc

SEQ ID NO: 607589 - DNA, 75 bp, synthetic construct
  source 1..75: mol_type = other DNA
ggaacaagggtttgcttcagcgcttttctatacctatatctgtatcagtcgtgatttactggtcaagaatctgga

SEQ ID NO: 607590 - DNA, 75 bp, synthetic construct
  source 1..75: mol_type = other DNA
aactgcgctgacgattatatcgaattgaatgttctggaaaacaaagggaaaaaagaagatttactggcatttgtc

SEQ ID NO: 607591 - DNA, 75 bp, synthetic construct
  source 1..75: mol_type = other DNA
gcttcataccgcggtgaaggacgacgacagcgaggcggtcgggattatccgctcactgcttgtcggtgaggaaaa

SEQ ID NO: 607592 - DNA, 75 bp, synthetic construct
  source 1..75: mol_type = other DNA
gtaatattttccattgctacttatctggatgtcatcctgaatccactaatggggtttattacggataatttttat

SEQ ID NO: 607593 - DNA, 75 bp, synthetic construct
  source 1..75: mol_type = other DNA
acaaaacagctttgccagccgtgcctacgcctcctgggcgctggcagaaaaaggcaccgaacaaccgcgttctct

SEQ ID NO: 607594 - DNA, 75 bp, synthetic construct
  source 1..75: mol_type = other DNA
atgacgacatttattcagctccatttgttaaccgcttaccctgcagccaaccttaaccgtgatgacaccggtgcg

SEQ ID NO: 607595 - DNA, 75 bp, synthetic construct
  source 1..75: mol_type = other DNA
ttgccctggttttactctatcccgcaggtattgatatgtatctggtcggcttaccgcgcatcgccgccgatctca

SEQ ID NO: 607596 - DNA, 75 bp, synthetic construct
  source 1..75: mol_type = other DNA
gtattacctgcatcattccggtgttagctccggtactcgggcacctgattatgctcaaatttccgtggcagagcc

SEQ ID NO: 607597 - DNA, 75 bp, synthetic construct
  source 1..75: mol_type = other DNA
tggatatgctgatttcttatcagaaagaacgtggcttcccgccaaccaatcaggaggtggcaaccatgctgggat

SEQ ID NO: 607598 - DNA, 75 bp, synthetic construct
  source 1..75: mol_type = other DNA
taaattcccgtggcagagtctgttctgggcgatggcaatgatgggcatcgcggtactgatgttgtctttgtttat

SEQ ID NO: 607599 - DNA, 75 bp, synthetic construct
  source 1..75: mol_type = other DNA
agcgccggtactcgggcatctgattatgcttaaattcccgtggcaaagcctgttctgggtaatggcgatgatggg

SEQ ID NO: 607600 - DNA, 75 bp, synthetic construct
  source 1..75: mol_type = other DNA
gcgctatttattatcgcctcgatattctgctcactggctgaaaccagcacgttatttcttgcagggcgatttctg

SEQ ID NO: 607601 - DNA, 75 bp, synthetic construct
  source 1..75: mol_type = other DNA
cttatccgcaagatttacggtattctacaaatctatcgttctgtaggtgtcacgcgggatgatattgaaaataaa

SEQ ID NO: 607602 - DNA, 75 bp, synthetic construct
  source 1..75: mol_type = other DNA
tgcagagttccacatgaaagacaaccgctgggtgcctggctggatgtgtgcaccacgcccacacccgtcttccac

SEQ ID NO: 607603 - DNA, 75 bp, synthetic construct
  source 1..75: mol_type = other DNA
ctgcctgtcatggggtgttaatcattaccgtgataacgccatcgcctacaaagaacagcgcgataaggccgcatt

SEQ ID NO: 607604 - DNA, 75 bp, synthetic construct
  source 1..75: mol_type = other DNA
ccgctctggttatctgcatcatcgtttgcctgtcatgggctgttaatcactaccgtgataacgccatcgcctaca

SEQ ID NO: 607605 - DNA, 75 bp, synthetic construct
  source 1..75: mol_type = other DNA
acggtgtcgccgcaggtggtcgccgactggcagcactcaacatgctggcagagcgtggcatcattccggctgact

SEQ ID NO: 607606 - DNA, 75 bp, synthetic construct
  source 1..75: mol_type = other DNA
ggcgaaggtcagagcgtggacgccggagatgcgtgccggaggtggagtggtggtgtcctggcgttatggcaacgt

SEQ ID NO: 607607 - DNA, 75 bp, synthetic construct
  source 1..75: mol_type = other DNA
ctgatgttgccgctggtcgtaagcgcctgcgggtcaacgccacctgccccggtaccgtgcgtgaagccaccggca

SEQ ID NO: 607608 - DNA, 75 bp, synthetic construct
  source 1..75: mol_type = other DNA
tacggcattttaagggggtattatgccatccctgtcacgcgacaggatctggaagaaaaaacaccggcaggagaa

SEQ ID NO: 607609 - DNA, 75 bp, synthetic construct
  source 1..75: mol_type = other DNA
ctgcgctcgatgcaaaatactcgagggaattagccgatgcgagagctgaaaatgaaactctgcgtgctgatgtta

SEQ ID NO: 607610 - DNA, 75 bp, synthetic construct
  source 1..75: mol_type = other DNA
gcgctggagaacgacaccgcgcgtcaggtgcaggtgtttgaagctgcctgtcagtcgggatggggaggaaaaccg

SEQ ID NO: 607611 - DNA, 75 bp, synthetic construct
  source 1..75: mol_type = other DNA
ctggcgctgatggcagaaaaagcccgtcttgcggccctgttaccggagggatggtcacgggacatgacgacgttc

SEQ ID NO: 607612 - DNA, 75 bp, synthetic construct
  source 1..75: mol_type = other DNA
aagcgcagcgcgataaaaaagccagagagctggagctggcaaacgcaaccattactgacatgcagcagcgccagc

SEQ ID NO: 607613 - DNA, 75 bp, synthetic construct
  source 1..75: mol_type = other DNA
ccgggcgcgccgttcactatcgatgctggccatgccccgacaggccatacgctgcgctccggcaaaccctctgac

SEQ ID NO: 607614 - DNA, 75 bp, synthetic construct
  source 1..75: mol_type = other DNA
gataaatcaggttttacagaatgaacctctgggtataattttatctattttcccattaatttgggttggaatagt

SEQ ID NO: 607615 - DNA, 75 bp, synthetic construct
  source 1..75: mol_type = other DNA
gaatgcagtggaagtatttgcctgccaaacgtagccatttacgcggcaggctaccggaaatcaaaacaactgaca

SEQ ID NO: 607616 - DNA, 75 bp, synthetic construct
  source 1..75: mol_type = other DNA
cgacggtccgacgccgaaagcggtacttgatcgttatacccgctttactggtcgtccggcgctgccgcccgcgtg

SEQ ID NO: 607617 - DNA, 75 bp, synthetic construct
  source 1..75: mol_type = other DNA
ctaaatataaaaatacggggattagcataggaatagaaccattaaatccaatgataagacaagatctgactcttg

SEQ ID NO: 607618 - DNA, 75 bp, synthetic construct
  source 1..75: mol_type = other DNA
ggtatgcctgggcaaagcagcggatggaaaacggttttattttggcggggagcattccgatggccaccaaacata

SEQ ID NO: 607619 - DNA, 75 bp, synthetic construct
  source 1..75: mol_type = other DNA
taggtggcgcggcgggtggtttgtttatcgggctgatagcctggtggggcctgccgatgggcttaaacagtgcct

SEQ ID NO: 607620 - DNA, 75 bp, synthetic construct
  source 1..75: mol_type = other DNA
gcatccttccggcaatggcggtttatgctggcgggattctggtggcatgggtttgcgggtttattttcaccacgc

SEQ ID NO: 607621 - DNA, 75 bp, synthetic construct
  source 1..75: mol_type = other DNA
gcgcgaagacgttcaggcttacgtgaaagaagctatcaaacgtgcagaagcagctccggcggcgactggcggcgg

SEQ ID NO: 607622 - DNA, 75 bp, synthetic construct
  source 1..75: mol_type = other DNA
acgcgtcagaaggaagttgaaggtggcgctgtgtgcctgccagccgtagctctttacgcggcaggctaccggaaa

SEQ ID NO: 607623 - DNA, 75 bp, synthetic construct
  source 1..75: mol_type = other DNA
tttactaccgcaagccacgcagtgaaatgggcgtgacttgtgttggtcgccagaagcaacgcggaaaatcaattc

SEQ ID NO: 607624 - DNA, 75 bp, synthetic construct
  source 1..75: mol_type = other DNA
atgaagccgtttgttaccgcctgtttaggcggcgcggcgggcggtttgtttatcggcctgatagcctggtggggt

SEQ ID NO: 607625 - DNA, 75 bp, synthetic construct
  source 1..75: mol_type = other DNA
ccgggcggggtgtgatggtgaagatttcggaggggtgcctgaccatcatcgctgacagtgacgagatgcaggagc

SEQ ID NO: 607626 - DNA, 75 bp, synthetic construct
  source 1..75: mol_type = other DNA
gaactggatacctttgccagctcgatgaatgacttctacggtcgtgatggcgaaagtggtaagcaccggatgttt

SEQ ID NO: 607627 - DNA, 75 bp, synthetic construct
  source 1..75: mol_type = other DNA
aaaccatctcctttggtatcgacacctttgaactgggctcagtgcgcggcaataagtcgaccattgcattgactg

SEQ ID NO: 607628 - DNA, 75 bp, synthetic construct
  source 1..75: mol_type = other DNA
cttacgatgtattttaaaattagaggattaataaatacattaaagcagcaaggtgataaaaatcatgcagagtat

SEQ ID NO: 607629 - DNA, 75 bp, synthetic construct
  source 1..75: mol_type = other DNA
tgtcagcaagttccatgtattccatgactccaccaacttctatggcagcacgggtaatgcgcgcggtcaggcggt

SEQ ID NO: 607630 - DNA, 75 bp, synthetic construct
  source 1..75: mol_type = other DNA
ggcggtctgatttatatcaagagcgacagtaaagaggagcaatcagctgaattcacctttaccggtgtagtaaaa

SEQ ID NO: 607631 - DNA, 75 bp, synthetic construct
  source 1..75: mol_type = other DNA
gttatccggttgtggagggtgagctgccgtacaccattgattccaaaacaggaaaagttacctggaaatatcaga

SEQ ID NO: 607632 - DNA, 75 bp, synthetic construct
  source 1..75: mol_type = other DNA
gctgacagtgacgaggtgcaggaactgcgggaggaactttatcaggttaaacaggtggttaaggggatgcggaac

SEQ ID NO: 607633 - DNA, 75 bp, synthetic construct
  source 1..75: mol_type = other DNA
tggtttcgtgagcgccttattacccaccgccttgcctctgtaaatctgtcacgcttaccttacgagcctaaactt

SEQ ID NO: 607634 - DNA, 75 bp, synthetic construct
  source 1..75: mol_type = other DNA
cgggaggaactttatcaggttaaacaggtggttaaggggatgcggaacgggatgtttagtgtgctggacgagagt

SEQ ID NO: 607635 - DNA, 75 bp, synthetic construct
  source 1..75: mol_type = other DNA
agcgggatttgagatcggcacgggcgttaccgtgaagatctcggaaggttgcctgatcctgctcgcggataacaa

SEQ ID NO: 607636 - DNA, 75 bp, synthetic construct
  source 1..75: mol_type = other DNA
ttaccgtgaagatctcggaaggttgcctgatcctgctcgcggataacaacgaagtacaggaactgcgcagggaac

SEQ ID NO: 607637 - DNA, 75 bp, synthetic construct
  source 1..75: mol_type = other DNA
ccccagcctgcaccttaaaggcgactggctcgctgaggcgggatttgataccggacaaggtgtgacggtgaagat

SEQ ID NO: 607638 - DNA, 75 bp, synthetic construct
  source 1..75: mol_type = other DNA
acctcaccggcaagtgacgaatttgaccttgtgcgcggctggcaacagttgaatgcgcaacatggtgtggcgctg

SEQ ID NO: 607639 - DNA, 75 bp, synthetic construct
  source 1..75: mol_type = other DNA
gaaagcggtcagttgccgattgcaacttatggttgggtagttgatcaggtgtatgcggcgttaaagcagaagtaa

SEQ ID NO: 607640 - DNA, 75 bp, synthetic construct
  source 1..75: mol_type = other DNA
gcctcaaacacaaaaatgtacgccactaacttcgccctacaaaagctaatgagcgaaggcaaactacatcctgac

SEQ ID NO: 607641 - DNA, 75 bp, synthetic construct
  source 1..75: mol_type = other DNA
taccaccgggacgctgtatgacctggcctcaaacaccaaaatgtacgccactaactttgctctgcaaaagctaat

SEQ ID NO: 607642 - DNA, 75 bp, synthetic construct
  source 1..75: mol_type = other DNA
tggcggctcatctgaagagtttcgatttcattttgaatacagtagctgcgccacataatctcgacgattttacca

SEQ ID NO: 607643 - DNA, 75 bp, synthetic construct
  source 1..75: mol_type = other DNA
tcggcatcggcggtctgggacatatggggattaagctggcccacgcgatgggggcacatgtggtggcatttacca

SEQ ID NO: 607644 - DNA, 75 bp, synthetic construct
  source 1..75: mol_type = other DNA
accggactgacctttcttgaccccaaagatgccacacaggttcaggggctgtttcggcatttgcaggtcaggttt

SEQ ID NO: 607645 - DNA, 75 bp, synthetic construct
  source 1..75: mol_type = other DNA
tcaggatattaaacgtatttgtcagtcgccaacggaagaagacaaatactggttcccggatatcgccggttccga

SEQ ID NO: 607646 - DNA, 75 bp, synthetic construct
  source 1..75: mol_type = other DNA
tatgggcaaagccgtgcgaattcaggaagaacctgacggctgcctctccggcagttgcaaaagctgcccggaagg

SEQ ID NO: 607647 - DNA, 75 bp, synthetic construct
  source 1..75: mol_type = other DNA
ggctgtctttccggcagttgtaaaagctgcccggaaggaaaagcctgtctgcacgaatggtgggcgttgcgttaa

SEQ ID NO: 607648 - DNA, 75 bp, synthetic construct
  source 1..75: mol_type = other DNA
tggagtttttgcacagccacaccaatgtggtcttccagcccccctataacagcccgtggtacagcggcatcaacc

SEQ ID NO: 607649 - DNA, 75 bp, synthetic construct
  source 1..75: mol_type = other DNA
ggatcgggggcgtaaagaagtgctgaagcatgtacatcgcctgtggggatttgatgtgatgctggaacagcaaaa

SEQ ID NO: 607650 - DNA, 75 bp, synthetic construct
  source 1..75: mol_type = other DNA
atggcgacgatcgattctatgaataaggactccacacgtttgagcgatggacctgactggacgttcgacctgctg

SEQ ID NO: 607651 - DNA, 75 bp, synthetic construct
  source 1..75: mol_type = other DNA
aagcatgtgcatcgcctgtggggatttgatgtgatgctggaacagcaaaacgaagacggcagcgtcgagttgctg

SEQ ID NO: 607652 - DNA, 75 bp, synthetic construct
  source 1..75: mol_type = other DNA
gctggcgagacttcagcgacagttaagccgcaaggtcaaattcagcaacaactggcagaagcagaaacgcaaaat

SEQ ID NO: 607653 - DNA, 75 bp, synthetic construct
  source 1..75: mol_type = other DNA
atttaggtcttgcggagacaaagcgcatacttggctcaggcgaaaagctaccttcggctttcgagttgaaccgga

SEQ ID NO: 607654 - DNA, 75 bp, synthetic construct
  source 1..75: mol_type = other DNA
cagcgtacacaagccagcgttgcgcgtgctgtggtcatactgcgaaagaaaatcgcctgtcacaaagtaaatttg

SEQ ID NO: 607655 - DNA, 75 bp, synthetic construct
  source 1..75: mol_type = other DNA
tatactgacttaatacagcaactatcgtacatcgcggtcaagtcacgcacaaacaaaaagccccgcaaaagcagg

SEQ ID NO: 607656 - DNA, 75 bp, synthetic construct
  source 1..75: mol_type = other DNA
gtattcgccgttgggaagtcagatttaagcctgtttgtgattcgaaagttagccctcacatgcgtaaaagttttt

SEQ ID NO: 607657 - DNA, 75 bp, synthetic construct
  source 1..75: mol_type = other DNA
taaagagtgggtggaagagaaaatccctctagccggggcaaagactctttcagaacgtacatactttatttatta

SEQ ID NO: 607658 - DNA, 75 bp, synthetic construct
  source 1..75: mol_type = other DNA
ggtaagtaccacgtacctgcagtgcgcgtcaccctggtctgtccgtactgcagccagcatttttcggcggacgtg

SEQ ID NO: 607659 - DNA, 75 bp, synthetic construct
  source 1..75: mol_type = other DNA
ttatcagccagttcctgtcaccgaaagtgatgcgtgatttccgcttcttcaccgtgctggatgacgatcggcata

SEQ ID NO: 607660 - DNA, 75 bp, synthetic construct
  source 1..75: mol_type = other DNA
atggcgacgatcgattctatgaataagggcaccacacgtttgagcgatggccccgactggacgttcgacctgctg

SEQ ID NO: 607661 - DNA, 75 bp, synthetic construct
  source 1..75: mol_type = other DNA
cccgtatttacgcttgctgaactggtcaacgacatcacgccggaaaacctccacgagaatatcgactggggggag

SEQ ID NO: 607662 - DNA, 75 bp, synthetic construct
  source 1..75: mol_type = other DNA
ggtaagtaccacgtacctgcagtgcgcgtcaccctggtctgtccgtactgcagccaacatttttcagcggacgtg

SEQ ID NO: 607663 - DNA, 75 bp, synthetic construct
  source 1..75: mol_type = other DNA
aaccgtttaatgaagagaaattgcgtagtggaatgctacgggcgttggaaaaacgtccggtcagttccgatgatg

SEQ ID NO: 607664 - DNA, 75 bp, synthetic construct
  source 1..75: mol_type = other DNA
cttggcgttacggcgctactggcggcgacacctgcactggtagggcgtgaaaacttaatgcaggccggggcgatc

SEQ ID NO: 607665 - DNA, 75 bp, synthetic construct
  source 1..75: mol_type = other DNA
tgattttgctggcgcgcggcacctgtggcattggcttcattggtctgtgcctgaacgcgttgctgccggagccgt

SEQ ID NO: 607666 - DNA, 75 bp, synthetic construct
  source 1..75: mol_type = other DNA
gacaactggcagatgtcggcggcgcagattggttttctctatgcggcaattccgcttggtgcggctattggcgcg

SEQ ID NO: 607667 - DNA, 75 bp, synthetic construct
  source 1..75: mol_type = other DNA
acacgggtttttgtggagcgtggaacagaaacgttgaattacgcggcaatcgtgtttatgtggaaaaatgggtgg

SEQ ID NO: 607668 - DNA, 75 bp, synthetic construct
  source 1..75: mol_type = other DNA
agcgatgttaggacggattaacggtttgtggacggcacaaaacgtgacgggcgatgctataggcgcagcgctgtt

SEQ ID NO: 607669 - DNA, 75 bp, synthetic construct
  source 1..75: mol_type = other DNA
cgggaacgtttattaccctgctgccgttgttaagccttccggcgctgccaccgccgccgcagccgcgtgagcatc

SEQ ID NO: 607670 - DNA, 75 bp, synthetic construct
  source 1..75: mol_type = other DNA
gctcgcggcgcttaatctgccgaaaccgcagcaagggccggaaaatattaatcaggttaccgagcataagatgtc

SEQ ID NO: 607671 - DNA, 75 bp, synthetic construct
  source 1..75: mol_type = other DNA
aggtcagattcagggcgttatcaacaagctgtggggtgtggataaagattacaaatcagtgacgaaattccacgt

SEQ ID NO: 607672 - DNA, 75 bp, synthetic construct
  source 1..75: mol_type = other DNA
aagaacttcatggagaacgtgctgcgctatctgtcaaatgatcgctggttgccggatgcaaaatccaatatgacc

SEQ ID NO: 607673 - DNA, 75 bp, synthetic construct
  source 1..75: mol_type = other DNA
ccgccaccgcagccgcgtgaacatccggtgaaatcattgttggcaggatttcgttttctgctcgccagcccgctg

SEQ ID NO: 607674 - DNA, 75 bp, synthetic construct
  source 1..75: mol_type = other DNA
gtatccgaaccgcgttcgtcagcgtcgagcgactggcatctgggtttatgaacgttatccggttgtggaaggtga

SEQ ID NO: 607675 - DNA, 75 bp, synthetic construct
  source 1..75: mol_type = other DNA
atgaccgtaggcaccaacctggatactgtctatttcaaacgtcatggtcaggttacaggaaacagcgctgcgttc

SEQ ID NO: 607676 - DNA, 75 bp, synthetic construct
  source 1..75: mol_type = other DNA
tggacttcactgataaagaagtgacgatcgccactaatacagaaagtgctcaagtttgcgcatatgaaaaacagg

SEQ ID NO: 607677 - DNA, 75 bp, synthetic construct
  source 1..75: mol_type = other DNA
cggctgggaaccgattctggtcaataaaacctcgcgcacgcacaaaaacagcgtctcgcgccatgcgcaatttta

SEQ ID NO: 607678 - DNA, 75 bp, synthetic construct
  source 1..75: mol_type = other DNA
gtgcctttcgatggcgatgtggaatacctgatcaacaatgaaaaagtgaatatcaatcagggacatatcacgctg

SEQ ID NO: 607679 - DNA, 75 bp, synthetic construct
  source 1..75: mol_type = other DNA
gccgaaaactatgatcaggcgctgaccatcaacgatgtggctgagcacgtcaaacttaacgccaactatgcaatg

SEQ ID NO: 607680 - DNA, 75 bp, synthetic construct
  source 1..75: mol_type = other DNA
tctatgaaaatattacaaaaaaattagatcattccgttataaattgtcctccaaacataaaactacacttacttg

SEQ ID NO: 607681 - DNA, 75 bp, synthetic construct
  source 1..75: mol_type = other DNA
atcgcggcgactttgaaaaacgttttaaagcgttgctcaagcagctggagcaggacactaacagcatcctgttta

SEQ ID NO: 607682 - DNA, 75 bp, synthetic construct
  source 1..75: mol_type = other DNA
gatcatctgtcaaccgacgtgatccatcaggtggtggtaaattcatcgtcgagttgcaggttcagctggatcaga

SEQ ID NO: 607683 - DNA, 75 bp, synthetic construct
  source 1..75: mol_type = other DNA
gctatcgttttgccggatattgtctgaatatctcacgccacacgttggatcaggacggcaggcctatcaaactca

SEQ ID NO: 607684 - DNA, 75 bp, synthetic construct
  source 1..75: mol_type = other DNA
cagaaacgttgaattacgcggcaatcgtgtttatgtggaaaaatgggtagacgtggaaaccgccagccattcaga

SEQ ID NO: 607685 - DNA, 75 bp, synthetic construct
  source 1..75: mol_type = other DNA
ctggaagcgctggaaaaaggcgaaagcaaagatccgatctggtcatctgttgccgtatatcgtcagcgtatgcca

SEQ ID NO: 607686 - DNA, 75 bp, synthetic construct
  source 1..75: mol_type = other DNA
gttgttctggtgcagtttcctgacctgtcactgcctgcggtgtgcggcatcggctccatgctgggcatcgccggt

SEQ ID NO: 607687 - DNA, 75 bp, synthetic construct
  source 1..75: mol_type = other DNA
tgttacaggaaacagaacgtgcgctggcggatacatcctctccgaagataattttcctgcacatgatgggttctc

SEQ ID NO: 607688 - DNA, 75 bp, synthetic construct
  source 1..75: mol_type = other DNA
tatacatctggtagttcaagaagctgttccggagcgtttgttgatgatcccgaactgcataaaaatattcttatt

SEQ ID NO: 607689 - DNA, 75 bp, synthetic construct
  source 1..75: mol_type = other DNA
tatactctggaggctaacggtgaagtgaccttcaaggtgccttatggtggtctgatttatatcaagggcgacagt

SEQ ID NO: 607690 - DNA, 75 bp, synthetic construct
  source 1..75: mol_type = other DNA
tccagagccaacgccagaaccggagccagaacctgttcctacgaaaacgggttatctgaccctgggcggaagcca

SEQ ID NO: 607691 - DNA, 75 bp, synthetic construct
  source 1..75: mol_type = other DNA
ggggcgaaaccgtctccttcggcatcgatacctttgaactgggctcagtacgcggtaataagtcgaccattgcct

SEQ ID NO: 607692 - DNA, 75 bp, synthetic construct
  source 1..75: mol_type = other DNA
gaatccgggcgcgaatgcttaccagttgccgggagcgacggagatgagcttcgagggcggtgtgagccagtcggc

SEQ ID NO: 607693 - DNA, 75 bp, synthetic construct
  source 1..75: mol_type = other DNA
cggatcgcgttcgtcagcagcgtgaaaaaggcatctgggtatatgaacgttatccgtttgtcgacggtaaaccgc

SEQ ID NO: 607694 - DNA, 75 bp, synthetic construct
  source 1..75: mol_type = other DNA
cacgctgatgctgtgtgcctcctgggtcgcccagacggatctttccgcattctttaagaaatggaatccgggtgc

SEQ ID NO: 607695 - DNA, 75 bp, synthetic construct
  source 1..75: mol_type = other DNA
accgagttcctgaactgctacgccaatgatgcttataccaaaggcacgctgtgctccgcggatctgaagaaatcg

SEQ ID NO: 607696 - DNA, 75 bp, synthetic construct
  source 1..75: mol_type = other DNA
gactgtaccgggtgcaactgaagtcgctaacaacgtgctggcgctgtacatgcaggatcgttatctcggcaaggc

SEQ ID NO: 607697 - DNA, 75 bp, synthetic construct
  source 1..75: mol_type = other DNA
tggatcggtgctgatcatggaaaacgtgatgagcaaccttaaggaagagagtgcgtctggctttgtgcgtttgtt

SEQ ID NO: 607698 - DNA, 75 bp, synthetic construct
  source 1..75: mol_type = other DNA
agggactttgccggaagtgaaacccgatccaacaccaaccccggagccgacacctgagccgacgccggacccaga

SEQ ID NO: 607699 - DNA, 75 bp, synthetic construct
  source 1..75: mol_type = other DNA
ttaaggcatttcctggattagaggagtgtaaggacccgacataccactacgaggtcaactgtctggaataccgtc

SEQ ID NO: 607700 - DNA, 75 bp, synthetic construct
  source 1..75: mol_type = other DNA
attcagggcgttatcaacaagctgtggggcgtggatacgaactatcagtctgtcagcaagttccacgtcttccat

SEQ ID NO: 607701 - DNA, 75 bp, synthetic construct
  source 1..75: mol_type = other DNA
catccggattttgcgggtatctctgttgagcatttaagtagctatggcgatctcgatccgcaggaaatgccgctg

SEQ ID NO: 607702 - DNA, 75 bp, synthetic construct
  source 1..75: mol_type = other DNA
ttgagcgcaaccctgttagccggttgtgatggcggtggttccggatcttcctccgatacgccgcctgtagattct

SEQ ID NO: 607703 - DNA, 75 bp, synthetic construct
  source 1..75: mol_type = other DNA
cggagtccaacgacaagaaagccaatgccgtctcactggtaacgtccagtaacagttgtccagcggatacagaac

SEQ ID NO: 607704 - DNA, 75 bp, synthetic construct
  source 1..75: mol_type = other DNA
cgacaaagtcacctgtgtggcagggaacaacacgacaattgctaccttcgacacccagtcagaagctgcgcgtag

SEQ ID NO: 607705 - DNA, 75 bp, synthetic construct
  source 1..75: mol_type = other DNA
cgcgacgctggatgaaggcgatcaaaacgttgtgctgcctaacgaatttatcgagcagtttaagacgggtcaggc

SEQ ID NO: 607706 - DNA, 75 bp, synthetic construct
  source 1..75: mol_type = other DNA
ccagaaccggagccagaacctgttcctacgaaaacgggttatctgaccctgggcggaagccagcgggtaactggt

SEQ ID NO: 607707 - DNA, 75 bp, synthetic construct
  source 1..75: mol_type = other DNA
gtttcgccaacgatgtgcagatctccatcggtgatgcgcactcgggttacccggtaatgaacagcagcttctcga

SEQ ID NO: 607708 - DNA, 75 bp, synthetic construct
  source 1..75: mol_type = other DNA
cgtcacgacagagggaacaacgccggatctgaacgccaaatttgtgtcagctaatgcggaacagttttatcagta

SEQ ID NO: 607709 - DNA, 75 bp, synthetic construct
  source 1..75: mol_type = other DNA
aaaactactggctggcgtttggcgaaaaacgcgcctgggataaaaacgagctggcgtacattacggaagcgcctt

SEQ ID NO: 607710 - DNA, 75 bp, synthetic construct
  source 1..75: mol_type = other DNA
gggttccggttactggtggcatgtatgttccacagtatacgcaactaagccttaacgccgacacggcaaaagcga

SEQ ID NO: 607711 - DNA, 75 bp, synthetic construct
  source 1..75: mol_type = other DNA
ccaaccaaatggtttgcaggtaacatgcagtcaactggcctgtgggcacctgcccagcaggaagtcagcattgag

SEQ ID NO: 607712 - DNA, 75 bp, synthetic construct
  source 1..75: mol_type = other DNA
cattcaacacccagtcagagactgcgcgtagcctgcgtgcggttgacaaagtgtcgtttagccttgaggacgcgc

SEQ ID NO: 607713 - DNA, 75 bp, synthetic construct
  source 1..75: mol_type = other DNA
gatacctttgccagctcgatgaatgacttctacggtcgtgatgaaacgagcggtaagcaccggatgtttacctat

SEQ ID NO: 607714 - DNA, 75 bp, synthetic construct
  source 1..75: mol_type = other DNA
atcgtttcaccaacgatgtgcagatctccatcggtgatgcgcactcgggttatccggtaatgaacagcagcttct

SEQ ID NO: 607715 - DNA, 75 bp, synthetic construct
  source 1..75: mol_type = other DNA
atgacagctcgctacatcgcaattgactggggatcgaccaatctgcgcgcctggctttatcagggcgaccactgc

SEQ ID NO: 607716 - DNA, 75 bp, synthetic construct
  source 1..75: mol_type = other DNA
tcgtagctgtcttcatacattgctttggtgacaaggaaaaactaaaacacgaaattaccgctgaatctatatctt

SEQ ID NO: 607717 - DNA, 75 bp, synthetic construct
  source 1..75: mol_type = other DNA
tattttagcctccacctcgccatggcgtcgcgctcttctggaaaaactgcaaatctcttttgaatgtgcagcacc

SEQ ID NO: 607718 - DNA, 75 bp, synthetic construct
  source 1..75: mol_type = other DNA
cggcgaagaaacacaattgatcggcgcgcgagctctggctccttcctctctttatgtcatgcccggaacccattg

SEQ ID NO: 607719 - DNA, 75 bp, synthetic construct
  source 1..75: mol_type = other DNA
gcgacaatatctggattattcccggattatgcgtctctcatgacgataaccacaatgtgatgcgcggcgaagaaa

SEQ ID NO: 607720 - DNA, 75 bp, synthetic construct
  source 1..75: mol_type = other DNA
gctccgtatttatctgttcctgcccgtttttcgtctattggcgaacaattaacgtctgttggcgacaatatctgg

SEQ ID NO: 607721 - DNA, 75 bp, synthetic construct
  source 1..75: mol_type = other DNA
caaacgaaagaagccgcgcattctggatgtggtaactggcaagatgattacgctggataatccgccgatttccgg

SEQ ID NO: 607722 - DNA, 75 bp, synthetic construct
  source 1..75: mol_type = other DNA
tcaattcctctggtcagtccggttgagttttcgacatcatcttggcggcgggctgttctgtctcttgaagaacat

SEQ ID NO: 607723 - DNA, 75 bp, synthetic construct
  source 1..75: mol_type = other DNA
ttgctgcatcgcgaaaaaacggggcgtgggcaacgagtcaccatgtcaatgcaggatgccgtgttgaacctttgc

SEQ ID NO: 607724 - DNA, 75 bp, synthetic construct
  source 1..75: mol_type = other DNA
ctggatagtgaggctttattgtttgtaatgagaacacgttcaaaaaaaagacggcattttcaaagcaaagtgttg

SEQ ID NO: 607725 - DNA, 75 bp, synthetic construct
  source 1..75: mol_type = other DNA
attacgatgcaaagcaaaacagaatttctaaccttgcagatccatcacttgagcaggatgctgtaaataatcgct

SEQ ID NO: 607726 - DNA, 75 bp, synthetic construct
  source 1..75: mol_type = other DNA
tggaacgagtttaaggctctgttgggtaccagaaaaattgcaggtaagacactggatcgcctgaagaagttaatc

SEQ ID NO: 607727 - DNA, 75 bp, synthetic construct
  source 1..75: mol_type = other DNA
ggcgtgaagagaaaacgccagtggtaatggcaggaatggttggcagcaacgtcggctggaaagttgcaccgtatt

SEQ ID NO: 607728 - DNA, 75 bp, synthetic construct
  source 1..75: mol_type = other DNA
ctcacctgaattgcccggatatctactataccccgggtggtcagagcgcaccggaaccgtcaccgcttgaccgcc

SEQ ID NO: 607729 - DNA, 75 bp, synthetic construct
  source 1..75: mol_type = other DNA
ggcggttctgtctcttgaagaacaccataaagcctggttgctgtggtgttacagcggcagcatttgctgggaaca

SEQ ID NO: 607730 - DNA, 75 bp, synthetic construct
  source 1..75: mol_type = other DNA
attactggcgggagtgacaactaaaaactggtccaaaacatttactcgtcactgggttgcaatgaaacacatttt

SEQ ID NO: 607731 - DNA, 75 bp, synthetic construct
  source 1..75: mol_type = other DNA
tgtggtgaccaaactggcggcagaagtgctgcactgcccgccgcaggacgtgcatgttatctccggtgacaccga

SEQ ID NO: 607732 - DNA, 75 bp, synthetic construct
  source 1..75: mol_type = other DNA
ccattcacttaccgtaccgtgtaacgggccagctctgtcattgccgttatatccgtgcgataacgtcgatttcca

SEQ ID NO: 607733 - DNA, 75 bp, synthetic construct
  source 1..75: mol_type = other DNA
atccgtgcgataacgtcgatttccaggtcaccacctactacagcaacatttgcccaaatggtgcttatcagggtt

SEQ ID NO: 607734 - DNA, 75 bp, synthetic construct
  source 1..75: mol_type = other DNA
gagttggtggcttttcttgcggcaaaaggcaaatttattccctgcgaagaagggttctcaaccgataaaagtaag

SEQ ID NO: 607735 - DNA, 75 bp, synthetic construct
  source 1..75: mol_type = other DNA
gagctggtggcgtttctggcggcaaaaggtaaatttattcccagtggagatggattctcaactgatccaggtaag

SEQ ID NO: 607736 - DNA, 75 bp, synthetic construct
  source 1..75: mol_type = other DNA
gccatcacccttgtcgccggaacatcgctgaccgcgcgctaccagcaagcctttcaggcgatgggttgcgacgtg

SEQ ID NO: 607737 - DNA, 75 bp, synthetic construct
  source 1..75: mol_type = other DNA
cttggtgtggctaaatccacttggacggggacttatcttccctactggttgatgatgtgggatgtatatgtccgt

SEQ ID NO: 607738 - DNA, 75 bp, synthetic construct
  source 1..75: mol_type = other DNA
cgaataccagaagctggcggaactggttggcgtggcgaaatccacctggacagagacatacctgcctcactggtt

SEQ ID NO: 607739 - DNA, 75 bp, synthetic construct
  source 1..75: mol_type = other DNA
atgaacactcaattcctcgaatacgtgcgccagcagctgatggtggctaccgccgatttaagtggtgcgacgaaa

SEQ ID NO: 607740 - DNA, 75 bp, synthetic construct
  source 1..75: mol_type = other DNA
tccggcatacagtacagcccatgcccgacagccacatattttcgatatttttgctgaaatcgaaaaatacactgt

SEQ ID NO: 607741 - DNA, 75 bp, synthetic construct
  source 1..75: mol_type = other DNA
cattgcaggagtcgaataggcctgacaggcgtagcacgtcagacggtgtaacctttgtcatcgacccgcctcttt

SEQ ID NO: 607742 - DNA, 75 bp, synthetic construct
  source 1..75: mol_type = other DNA
caacctcatctgcgataaaagatgtactttgcggaacttggcgctcagtcggtcttatgtcagacgaggcaggaa

SEQ ID NO: 607743 - DNA, 75 bp, synthetic construct
  source 1..75: mol_type = other DNA
acactgtcgctgatggtccagcctaatgtttttaagggttatatcgacaggaaaggagatatggcaaaggggatt

SEQ ID NO: 607744 - DNA, 75 bp, synthetic construct
  source 1..75: mol_type = other DNA
ccgcccgtcactgccggatgaagtcgcgcttggcgtgacctatgaaaatatcgatgactacctggaagggaaaag

SEQ ID NO: 607745 - DNA, 75 bp, synthetic construct
  source 1..75: mol_type = other DNA
agattgccaggatgccattgcctttattcaaccggatcgcgtattaaccgttaatatcaagggcgcggtactcgc

SEQ ID NO: 607746 - DNA, 75 bp, synthetic construct
  source 1..75: mol_type = other DNA
taccggattcttcactaaatacggtgacggtggtactgatattaatccgctataccgtctgaacaagcgtcaggg

SEQ ID NO: 607747 - DNA, 75 bp, synthetic construct
  source 1..75: mol_type = other DNA
gcatcgagaaacttgaaaactgggaggaaattatatccagaccaaactttgtcaccactatagacaaaggagttc

SEQ ID NO: 607748 - DNA, 75 bp, synthetic construct
  source 1..75: mol_type = other DNA
cacgcattccagagaagagtgtttctcagagtgaccgcgataccctgaaaaacctcggcgatcgcctgaaaatgc

SEQ ID NO: 607749 - DNA, 75 bp, synthetic construct
  source 1..75: mol_type = other DNA
tgcgggtgcagcgtctggtggccaggtcgatgcggctaacctgatcaaaccgttgctctccagcggtaaaatccg

SEQ ID NO: 607750 - DNA, 75 bp, synthetic construct
  source 1..75: mol_type = other DNA
ctgcagaagcagaaagacattggatcgaattctacaaccaggtcgagtcagaaatgagaatgattggccttcttt

SEQ ID NO: 607751 - DNA, 75 bp, synthetic construct
  source 1..75: mol_type = other DNA
atgtgtttaaaggttatctgcaacgtaaaggcgatacagccaaagggatcggttttttcgctcgatgtctcatat

SEQ ID NO: 607752 - DNA, 75 bp, synthetic construct
  source 1..75: mol_type = other DNA
tcaattaaagagtcattaaaagggtatgaggtcgcatttaattttgttggattgtttgaaggctttaattcactt

SEQ ID NO: 607753 - DNA, 75 bp, synthetic construct
  source 1..75: mol_type = other DNA
acggcgctgatggtttttattcgctttatggagtcggagaagcaaaagcggatcgctatcggtttttaggcgaga

SEQ ID NO: 607754 - DNA, 75 bp, synthetic construct
  source 1..75: mol_type = other DNA
cgcttcccttccggcaggcgtcagcctgcctggggttttcgcgcgggctgacaggcggcctccaccgccagccct

SEQ ID NO: 607755 - DNA, 75 bp, synthetic construct
  source 1..75: mol_type = other DNA
gggtcataccatcagaaaaaaacattccggacacatcacaaacgggaagggtaacgggcgacgcgccagcgtggc

SEQ ID NO: 607756 - DNA, 75 bp, synthetic construct
  source 1..75: mol_type = other DNA
catatcgctgtgtactgcaactggatgatgctgttcggtagcgccggaacggtcatcagctatctgtatcatact

SEQ ID NO: 607757 - DNA, 75 bp, synthetic construct
  source 1..75: mol_type = other DNA
tgggcaacgagttaccatgtcaatgcaggatgccgtattgaacctttgccgcgtgaaattacgcgaccagcagcg

SEQ ID NO: 607758 - DNA, 75 bp, synthetic construct
  source 1..75: mol_type = other DNA
ctgggcggctactcacaacagatcgtcgttcatgagcgatatgttctgcgtattcgtcacccgcaagagcagctg

SEQ ID NO: 607759 - DNA, 75 bp, synthetic construct
  source 1..75: mol_type = other DNA
caaaacgcgaagcggcaaaagccctgggggccgatgaagttgttaactcacgcaatgccgatgagatggtggctc

SEQ ID NO: 607760 - DNA, 75 bp, synthetic construct
  source 1..75: mol_type = other DNA
cggtactcacgccagccgcaccggtgatatcggtctgttccgtattatctctgaatcgggtactgctgcgggcgt

SEQ ID NO: 607761 - DNA, 75 bp, synthetic construct
  source 1..75: mol_type = other DNA
ttgtcgagatgtcatgcctgatgcacgatatcggtaatccaccgtttggtcattttggtgaagcggctataaatg

SEQ ID NO: 607762 - DNA, 75 bp, synthetic construct
  source 1..75: mol_type = other DNA
cttgcagaacgtcagcaggcatccctggcaagaaaacgagccacacataaagaactcagagtgttcattcctgct

SEQ ID NO: 607763 - DNA, 75 bp, synthetic construct
  source 1..75: mol_type = other DNA
catatcgctgtgtactgtaactggatgatggtgttcggcagcgccggaacggtggtcagctatctgtatcgcacg

SEQ ID NO: 607764 - DNA, 75 bp, synthetic construct
  source 1..75: mol_type = other DNA
caaatctttccagtaaggcaattgatgttaatggtgttaagctgttggttagcgagcttagcggtgttgagccga

SEQ ID NO: 607765 - DNA, 75 bp, synthetic construct
  source 1..75: mol_type = other DNA
gcacctgatgcacgctgcattgcgccaggttctgggtactcatgtctcccagaaaggttctttggttaacgacaa

SEQ ID NO: 607766 - DNA, 75 bp, synthetic construct
  source 1..75: mol_type = other DNA
cgaagtgctgaaagcgtatatccagaaaagctcgccgctggatgtgagtgtttatgaaccgaaaggtgaggtgag

SEQ ID NO: 607767 - DNA, 75 bp, synthetic construct
  source 1..75: mol_type = other DNA
ccgggcggatatcggcaagcctgactattgagaacgtgactgatgagttgaagtcggcactggaaacaaaatttg

SEQ ID NO: 607768 - DNA, 75 bp, synthetic construct
  source 1..75: mol_type = other DNA
tagtaaaagccaggtctacgttgagttttataagccatccgagcagttgggggttcgattcggtgatgggctaat

SEQ ID NO: 607769 - DNA, 75 bp, synthetic construct
  source 1..75: mol_type = other DNA
tgtatgccagacgctcggcgcaaccctgacgacgcttagcctgatacgccttataaaaaaactcgccaccctggc

SEQ ID NO: 607770 - DNA, 75 bp, synthetic construct
  source 1..75: mol_type = other DNA
atacaacgccagatgcagaatcatttgggttgacctggcccgttgttttcagcgtcgcaggcctcactctgctga

SEQ ID NO: 607771 - DNA, 75 bp, synthetic construct
  source 1..75: mol_type = other DNA
gttggggttgtgaacggacgtctggaaggggacagaagtaaagttcgttttgttcagaccagtatgggccatctg

SEQ ID NO: 607772 - DNA, 75 bp, synthetic construct
  source 1..75: mol_type = other DNA
gatgatgcagaccgcaacgacatggctcagtacagcgatgacaatctatacggtctatgttgtcacaatggtaat

SEQ ID NO: 607773 - DNA, 75 bp, synthetic construct
  source 1..75: mol_type = other DNA
caattctttttaaatcaatgatacctgagtcggtttccgtgaaggttggtgcggaagcagtcgataacattctga

SEQ ID NO: 607774 - DNA, 75 bp, synthetic construct
  source 1..75: mol_type = other DNA
agaaggtgccgaatgagttgaacaagaaattctcgtataaagaggtcagaaaactaccctttaagatcaccatca

SEQ ID NO: 607775 - DNA, 75 bp, synthetic construct
  source 1..75: mol_type = other DNA
gcagtttgttgatcaactcattgaccagctcaaagagcaagtcaaagaagtgatgatggatgtcatgaaatcagc

SEQ ID NO: 607776 - DNA, 75 bp, synthetic construct
  source 1..75: mol_type = other DNA
gctgtcagaaatatgaagaaaaccctcagtgcggcttcatcagttccaaatgtgttgatggtgctcagggaagtt

SEQ ID NO: 607777 - DNA, 75 bp, synthetic construct
  source 1..75: mol_type = other DNA
tccaaaactatgcaaaaaggttcgagttaaagctgactatgacttttataaggggcaaatggactgctggacaga

SEQ ID NO: 607778 - DNA, 75 bp, synthetic construct
  source 1..75: mol_type = other DNA
tatgtgctggcggagcaggtgacgcgtctggttcacggtgaagaaggtttgcaagccgcgaaacgtattaccgaa

SEQ ID NO: 607779 - DNA, 75 bp, synthetic construct
  source 1..75: mol_type = other DNA
aaacgtgctggcagaattgctggttgcgaccagcctgctgaccgccaccctgaaatttgatggtgatatcaccgt

SEQ ID NO: 607780 - DNA, 75 bp, synthetic construct
  source 1..75: mol_type = other DNA
tcgcggcgaactggtaaccgtttcggaaaccctgcaacagatccttgagaatcacgattatccgcagcccgttaa

SEQ ID NO: 607781 - DNA, 75 bp, synthetic construct
  source 1..75: mol_type = other DNA
acaaccagcagatgcgcggtgtggcgcgcgtgcagggcgaaattccagaaaatgccgacctgaaaacgctggtcg

SEQ ID NO: 607782 - DNA, 75 bp, synthetic construct
  source 1..75: mol_type = other DNA
atggcttcacttattcaggtgcgtgatttgctggcattacggggccgtatggaagcggcccagataagccagaca

SEQ ID NO: 607783 - DNA, 75 bp, synthetic construct
  source 1..75: mol_type = other DNA
ggatgaaaacggcgagcctaaatgggcgggctatcgtaccgatttgcgcagaacgggcggtactgataaaaagcc

SEQ ID NO: 607784 - DNA, 75 bp, synthetic construct
  source 1..75: mol_type = other DNA
gccatgctaaccccaaccagccagagcaatttttgcccgagccacaaaccgacgtatttatggcagtggctgaaa

SEQ ID NO: 607785 - DNA, 75 bp, synthetic construct
  source 1..75: mol_type = other DNA
acatactggcatcgagtatgctggcggtgaccacattttcactgagtatcatggtcaccgcttacggttcagcca

SEQ ID NO: 607786 - DNA, 75 bp, synthetic construct
  source 1..75: mol_type = other DNA
gttcagggcaacgttattcgcaattgtcgcgataataacggcccttttatcaattctttttaaatcaatgatacc

SEQ ID NO: 607787 - DNA, 75 bp, synthetic construct
  source 1..75: mol_type = other DNA
acagaccctaatatgtatttgcgatcaaggataaataaaaacatgtatccatggttatacacccctgttgacggg

SEQ ID NO: 607788 - DNA, 75 bp, synthetic construct
  source 1..75: mol_type = other DNA
cgaaaccatcaaaaccgaagaactgctgaccttaccggcaaacgaagtgttgtggcgtttgtatcacgaagaaga

SEQ ID NO: 607789 - DNA, 75 bp, synthetic construct
  source 1..75: mol_type = other DNA
tcaccaggggaaattatcgtcattcgtatccttaaccaaaaccaggacgccaccagacatttacactggagctaa

SEQ ID NO: 607790 - DNA, 75 bp, synthetic construct
  source 1..75: mol_type = other DNA
agagcatgcaaatcgcgctgaccatatagactccgatagagaattcataaaatcaatttattttgatttgttttt

SEQ ID NO: 607791 - DNA, 75 bp, synthetic construct
  source 1..75: mol_type = other DNA
acggagatcacacgtaatcgtgcacaatattaccttgcctatgatgatcaggtcgtatggggcggggactatacg

SEQ ID NO: 607792 - DNA, 75 bp, synthetic construct
  source 1..75: mol_type = other DNA
gcgggagtgacaaccaaaaactggtccaaaacatttactggccactgggttgcaatgaaacacatttttcaccgg

SEQ ID NO: 607793 - DNA, 75 bp, synthetic construct
  source 1..75: mol_type = other DNA
actcgatagcggtgcgcttatctcagtaacgcgatcacgttcacaacaaaaggcgacaagttcgcacgtaagtct

SEQ ID NO: 607794 - DNA, 75 bp, synthetic construct
  source 1..75: mol_type = other DNA
tgcgtgagcaactcatgattgccatcaccgatttgagtggtgcaacaaaagggcagcttgaagtctggcaggaga

SEQ ID NO: 607795 - DNA, 75 bp, synthetic construct
  source 1..75: mol_type = other DNA
gggcagttaatggcctggctggagaatgcgcagttcgatactggcacctttaagaggaagaagcctcgcgtaatg

SEQ ID NO: 607796 - DNA, 75 bp, synthetic construct
  source 1..75: mol_type = other DNA
cgcggttctgtctcttgatgaacatcagaaagcgtggttgctgtggagttacagcgaaagtgttcgctgggagca

SEQ ID NO: 607797 - DNA, 75 bp, synthetic construct
  source 1..75: mol_type = other DNA
cataaagcctggttgttgtggtgttacagcgagagcatttgttgggaatatcagatcgcgataacacagtgggcg

SEQ ID NO: 607798 - DNA, 75 bp, synthetic construct
  source 1..75: mol_type = other DNA
gcatcatgcagtacgggtatcggatagtggaagatatggcaagcgggttgtcgcattatctcgccgatcagggat

SEQ ID NO: 607799 - DNA, 75 bp, synthetic construct
  source 1..75: mol_type = other DNA
gatcatttatgacgccgaaggtcacccgttaacccgcgatttacgcagttacggcgcaccgaaaattggcgacat

SEQ ID NO: 607800 - DNA, 75 bp, synthetic construct
  source 1..75: mol_type = other DNA
gcgcctgggcaacctgcgtgaccgggcgtccggtactgttccgctacacccgtgaagaagagtttattgctaaca

SEQ ID NO: 607801 - DNA, 75 bp, synthetic construct
  source 1..75: mol_type = other DNA
tcagatcgcgataacgcagtgggtgtggagtgaatttaaaactcagtccggatccagaaaaattgcagtgaaaac

SEQ ID NO: 607802 - DNA, 75 bp, synthetic construct
  source 1..75: mol_type = other DNA
tgcagcggagtttttattactcggcgcggcgacgttgcaggtgaccactggcatcatgcagtacggttatcgcat

SEQ ID NO: 607803 - DNA, 75 bp, synthetic construct
  source 1..75: mol_type = other DNA
atcaggcgatggaatggagtgagaaaacccgcacaccgcattgtaataccgagaagtgcgttggttgtctgcttt

SEQ ID NO: 607804 - DNA, 75 bp, synthetic construct
  source 1..75: mol_type = other DNA
ggcgctgcgcagcagttttgtgaagcttgatagcgacgctctcatggcggtaacgcgatcacgttcacaacaaaa

SEQ ID NO: 607805 - DNA, 75 bp, synthetic construct
  source 1..75: mol_type = other DNA
tgcaggtagcgcgcctggctctgtttcatggcgatccggaaaaggcaaaagaactgaccaatgaagcttccgctt

SEQ ID NO: 607806 - DNA, 75 bp, synthetic construct
  source 1..75: mol_type = other DNA
cgaaatacacgcacaggaacttcacgccggaaactttcgcacagtatgtggctgatacgcacacattaacgtacg

SEQ ID NO: 607807 - DNA, 75 bp, synthetic construct
  source 1..75: mol_type = other DNA
gtggggtgtatcaaggggatctcccacgcaaggcgcaatgtcgtcagtgcagagaagtattgtcaggaaatctgg

SEQ ID NO: 607808 - DNA, 75 bp, synthetic construct
  source 1..75: mol_type = other DNA
ttggctggttgcttgtggacccattcaatggcggcatgtatacactgagtccgggaagtctgaatcccgggctgg

SEQ ID NO: 607809 - DNA, 75 bp, synthetic construct
  source 1..75: mol_type = other DNA
aaaacttcatcaaaaggagagcagcacgttgttgattctgttttgaacagaatcggtatctatgcagcattaggt

SEQ ID NO: 607810 - DNA, 75 bp, synthetic construct
  source 1..75: mol_type = other DNA
tatatatatgcttcagaaatacaattcacatatcggctgctgctggcttatttcttcttgcaaaactagagacat

SEQ ID NO: 607811 - DNA, 75 bp, synthetic construct
  source 1..75: mol_type = other DNA
gccacaggtgacgggaattgttactgaagtcaccgacaaaaataatcagcttattcagaagggcgaggtgctttt

SEQ ID NO: 607812 - DNA, 75 bp, synthetic construct
  source 1..75: mol_type = other DNA
cttgatagcgactctcttctctgcgctgtgagaacacgatcgcaacaaaaggcgactttttcgcagcagggtatt

SEQ ID NO: 607813 - DNA, 75 bp, synthetic construct
  source 1..75: mol_type = other DNA
atgaacagtcagcaactggaatacgtacgtcagcagctcattgtggcgaccgcagatctgagcggggcgacgaaa

SEQ ID NO: 607814 - DNA, 75 bp, synthetic construct
  source 1..75: mol_type = other DNA
tttctaaaaccagaaccgacatttaccagactgttactgacaacatcattgcagcgctggaagccggagtaaaac

SEQ ID NO: 607815 - DNA, 75 bp, synthetic construct
  source 1..75: mol_type = other DNA
aacgacaagcgttatattttcaaagcgaccagcgcagcctctaaagcacatcgttatctgatggataaactctga

SEQ ID NO: 607816 - DNA, 75 bp, synthetic construct
  source 1..75: mol_type = other DNA
tgaaatgaaagggaagtttggcagtgctgattatgcagaagaagaactggtggcggagctgggaagtgcctttct

SEQ ID NO: 607817 - DNA, 75 bp, synthetic construct
  source 1..75: mol_type = other DNA
accacgtcacgtctgatgcacgcggcaaccgaagccgtggcacacgtcaccggagagctgcgcaactggcaggcg

SEQ ID NO: 607818 - DNA, 75 bp, synthetic construct
  source 1..75: mol_type = other DNA
tcctcatttacattatgagctggtcatcaataacaatcctgttaattcactggcgttccgggcatcggcacccgc

SEQ ID NO: 607819 - DNA, 75 bp, synthetic construct
  source 1..75: mol_type = other DNA
cctcatctgcattacgagctggtcatcaataacaaccctgttaactctctggcgttccgggcagcggcacccgct

SEQ ID NO: 607820 - DNA, 75 bp, synthetic construct
  source 1..75: mol_type = other DNA
taacgggaaaagccggtgttggtaatgactccaacttattgatagtgttttatgttcagataatgcccgatgact

SEQ ID NO: 607821 - DNA, 75 bp, synthetic construct
  source 1..75: mol_type = other DNA
tcgattttttcggtcgcttaaagaacatgagcgaagccgagcgacaaaattatttagctactgaggaagcccggc

SEQ ID NO: 607822 - DNA, 75 bp, synthetic construct
  source 1..75: mol_type = other DNA
ccgggctggcgcttccctcctggatgcgtaaaggcgagccggaaaagttacttaaagccgcgcagcgcttctggg

SEQ ID NO: 607823 - DNA, 75 bp, synthetic construct
  source 1..75: mol_type = other DNA
gggggaatatgtggtttacccggcgacgttagcagggacggaagcccgcagcgcaacattcagcgcgagtttgta

SEQ ID NO: 607824 - DNA, 75 bp, synthetic construct
  source 1..75: mol_type = other DNA
aagagattgtgattgccaaaaagcaactcactcagctttcaacactaaaagataaagtcagcctgctaacccgtc

SEQ ID NO: 607825 - DNA, 75 bp, synthetic construct
  source 1..75: mol_type = other DNA
tgacttcgccgtgaaagtgggggatttactctcgcctttgcagaatgcgctttactgtattaatcgtgaaaagct

SEQ ID NO: 607826 - DNA, 75 bp, synthetic construct
  source 1..75: mol_type = other DNA
atggaatggctggttaaaaagtcatgctgtgataaacaagataacagacatgtacttaagctttgtgatgctggt

SEQ ID NO: 607827 - DNA, 75 bp, synthetic construct
  source 1..75: mol_type = other DNA
ctcgggcctggaatcgaacgagatcgctacccttcagcgctctttgccttcccggtttaatcttcggcatttgaa

SEQ ID NO: 607828 - DNA, 75 bp, synthetic construct
  source 1..75: mol_type = other DNA
cgtgccggtcagacttctatgatcgctcgtctggaaaaagcattccaggaactgaacgcgatcgacgttctgtaa

SEQ ID NO: 607829 - DNA, 75 bp, synthetic construct
  source 1..75: mol_type = other DNA
ccaatgggcaacctgggaaggcgttctgaactactacaaagcgaacgaagcttacctgcaaggccaactgggtaa

SEQ ID NO: 607830 - DNA, 75 bp, synthetic construct
  source 1..75: mol_type = other DNA
gcaatgttctggcgctggaacaggctcgcggggtgattgaaagtacccgcagcgatatcgctaaacgtcaggggg

SEQ ID NO: 607831 - DNA, 75 bp, synthetic construct
  source 1..75: mol_type = other DNA
atgatcgacgaatgcagcaattacgcgctggcgctggctgtgccgtcactcaacagtgatatcgtcaatcacttc

SEQ ID NO: 607832 - DNA, 75 bp, synthetic construct
  source 1..75: mol_type = other DNA
ctccgatagtgacactgcgcctgcggccgggaatggcacgatccagtcttcagggcaacgtcagaacgtacaggc

SEQ ID NO: 607833 - DNA, 75 bp, synthetic construct
  source 1..75: mol_type = other DNA
tgaacaggtgtatcgcgtatggcgtaagacaccggagaaaacaactgaccagacattgattcgaaagttaccaga

SEQ ID NO: 607834 - DNA, 75 bp, synthetic construct
  source 1..75: mol_type = other DNA
atttagtttttgttgggcgaatgatacctccaaaaagaccagatttattactttatgtcgtatctcagttttcaa

SEQ ID NO: 607835 - DNA, 75 bp, synthetic construct
  source 1..75: mol_type = other DNA
tcagaaatggattaaagaacaaaagcaactgctatcaaagtgttttgacatttatcttattacttccgaaccggg

SEQ ID NO: 607836 - DNA, 75 bp, synthetic construct
  source 1..75: mol_type = other DNA
agataacggaaaagagttcctgggaaacttcgacaaaacgctgcaggaagccgctatcaaacacctctggaccta

SEQ ID NO: 607837 - DNA, 75 bp, synthetic construct
  source 1..75: mol_type = other DNA
tgcaggcaggcgaagagatcgaactggagtcgctgtcgaaagagctggcaggcgtcagcgaagtgagtttcacgg

SEQ ID NO: 607838 - DNA, 75 bp, synthetic construct
  source 1..75: mol_type = other DNA
atgtctccttgtaaacttctgccattttgtgtggcccttgcgctaaccggttgttcactggcaccggattatcag

SEQ ID NO: 607839 - DNA, 75 bp, synthetic construct
  source 1..75: mol_type = other DNA
gatttgcgcatggcgacgctgaaagtgcaggaagcgcgggcgcaatatcgtctgaccgatgccgaccgctaccca

SEQ ID NO: 607840 - DNA, 75 bp, synthetic construct
  source 1..75: mol_type = other DNA
ttactatcgctgtggaacatcatcccgccgagcttaccacaggtttcttatgccatttccagcgctttcatggtg

SEQ ID NO: 607841 - DNA, 75 bp, synthetic construct
  source 1..75: mol_type = other DNA
cgtggcgcagccggtagccgggtaatcagtcagatgttgcgccagagtggcgttgatgcaggccggtggctggca

SEQ ID NO: 607842 - DNA, 75 bp, synthetic construct
  source 1..75: mol_type = other DNA
cgtagcacgttgcgtcagttgacgaagtttgccggtagcggtggtggcttgaccattaactttgatgcgatgctg

SEQ ID NO: 607843 - DNA, 75 bp, synthetic construct
  source 1..75: mol_type = other DNA
cagctagaatatgtgagtttttggatgcgcccgatctggatgagttaaagctcaacctgggtaacagccagcgca

SEQ ID NO: 607844 - DNA, 75 bp, synthetic construct
  source 1..75: mol_type = other DNA
agaaaagttaagcctgacacactggaaaaaataccgtgtgctactgaatcgcgttcagccggaaaatgctccgga

SEQ ID NO: 607845 - DNA, 75 bp, synthetic construct
  source 1..75: mol_type = other DNA
ggttatttgcaaccacctgaagatggtagctcactggatattcaacttaatcgggatccgaaattgattatccag

SEQ ID NO: 607846 - DNA, 75 bp, synthetic construct
  source 1..75: mol_type = other DNA
accgcgccctgaaagtttcacggcgcaaaatgttcgctacgcgctttctttaccgtggcaaatcgacagcgacaa

SEQ ID NO: 607847 - DNA, 75 bp, synthetic construct
  source 1..75: mol_type = other DNA
tgagtaacggcgattcagaagctgctgatgatccgcaggttattatcgctaaggtctataccccccaagccgtca

SEQ ID NO: 607848 - DNA, 75 bp, synthetic construct
  source 1..75: mol_type = other DNA
gctactcgcaggggcatatttgattatatcaatgataacttttttctttaactggaaatctttatctaaaataat

SEQ ID NO: 607849 - DNA, 75 bp, synthetic construct
  source 1..75: mol_type = other DNA
aaaaaataccgtgtgctactgaatcgcgttcagccggaaaatgctccggatatagaatggccagaaatgccgcaa

SEQ ID NO: 607850 - DNA, 75 bp, synthetic construct
  source 1..75: mol_type = other DNA
aaacaaatttctttgaatgaatatgagaaagtattaaaggaatctgattttaaaattttactggagcgcctgaca

SEQ ID NO: 607851 - DNA, 75 bp, synthetic construct
  source 1..75: mol_type = other DNA
agacgccagctgaattcgcaacggactggcgaaacaggaaatatgaagaaaaaccaaccgacattactaactgaa

SEQ ID NO: 607852 - DNA, 75 bp, synthetic construct
  source 1..75: mol_type = other DNA
aggagtgtctgacgatcaccgccgctttcgggatttcgggtattcaggtcgcgcgtattctggacagcattgcgc

SEQ ID NO: 607853 - DNA, 75 bp, synthetic construct
  source 1..75: mol_type = other DNA
aacgtcgtgcctgcaggcttacaggtttgtccctgtcgacctgcctctacgaggctcagcgtccggcggctgatg

SEQ ID NO: 607854 - DNA, 75 bp, synthetic construct
  source 1..75: mol_type = other DNA
cggcatttatccgggagacaattgcaggcaccacgccagctagtggtgactggagtttattaaagcgcacaagct

SEQ ID NO: 607855 - DNA, 75 bp, synthetic construct
  source 1..75: mol_type = other DNA
ccgttcagcttcacgctttcgaatggagagggggcatacactttcagtttcccgaaggttcaggtgtcaggtgaa

SEQ ID NO: 607856 - DNA, 75 bp, synthetic construct
  source 1..75: mol_type = other DNA
atgtttttatacctcacgatatttatattcatttctattctatcttttctgccgaatcagaaatatgtgttaaaa

SEQ ID NO: 607857 - DNA, 75 bp, synthetic construct
  source 1..75: mol_type = other DNA
gctggctatgttgggcggcgataagcgtcttatcgatgctcataatcgcgcggtaacagtggctcttaaccaggt

SEQ ID NO: 607858 - DNA, 75 bp, synthetic construct
  source 1..75: mol_type = other DNA
cgggccagccgttcaggctgacgcagcagcgcagcgccgccgacgttgccatcatgaaagagattgtgcgccagg

SEQ ID NO: 607859 - DNA, 75 bp, synthetic construct
  source 1..75: mol_type = other DNA
gccaccctcaatgccctggcgcagagcggcagccaggttcgactgtactctgcgcagaatgagcaaaaaacggtt

SEQ ID NO: 607860 - DNA, 75 bp, synthetic construct
  source 1..75: mol_type = other DNA
agacacccgatttcagcaacaccctgttcctgctcgacgagagctcgatggtggggctggccgatatggcaaaag

SEQ ID NO: 607861 - DNA, 75 bp, synthetic construct
  source 1..75: mol_type = other DNA
gataaaggagcacgctacagccggctggcacaggagtttgccgtcagcgtgcgtgaaggacaggaaagcgtggcc

SEQ ID NO: 607862 - DNA, 75 bp, synthetic construct
  source 1..75: mol_type = other DNA
tggataaaggccatcaagcattcacctgagaaagcgacggcgcacgatattcttgaaccccgtaacgaccgggcg

SEQ ID NO: 607863 - DNA, 75 bp, synthetic construct
  source 1..75: mol_type = other DNA
cctgcggatcaacgccacctgctccggtaccgtgcgtgaagccaccggcacctccggcatggataatgcaaccgg

SEQ ID NO: 607864 - DNA, 75 bp, synthetic construct
  source 1..75: mol_type = other DNA
acttattctatccaatagaattatcatttaaattaataagttttattgctgttaatattcttgatggatattatt

SEQ ID NO: 607865 - DNA, 75 bp, synthetic construct
  source 1..75: mol_type = other DNA
tatatcggtataaatttcttaacattattcaaatatattccttcttcttatgtacaatataaatttaatgactat

SEQ ID NO: 607866 - DNA, 75 bp, synthetic construct
  source 1..75: mol_type = other DNA
agcacggggcgcaattatggtttgaaacagacccgcaattatgacgcgcgtcgcgatgttgttgcttcaacaact

SEQ ID NO: 607867 - DNA, 75 bp, synthetic construct
  source 1..75: mol_type = other DNA
ctggcgcacctaagtcgtcattcagctttgggcgtatctgggatcagtacggcatgctggtggtgtttgcggtcc

SEQ ID NO: 607868 - DNA, 75 bp, synthetic construct
  source 1..75: mol_type = other DNA
ggcggtggttatcaatctgaccgaaagcctgtggataggcgtggcggcaggtttgctgctgggcgtcctctgcgg

SEQ ID NO: 607869 - DNA, 75 bp, synthetic construct
  source 1..75: mol_type = other DNA
ccttgagttgctggcataccgtcgccgttctcaacaacggagggagagcgcgaaaagtacttaccagtggaagaa

SEQ ID NO: 607870 - DNA, 75 bp, synthetic construct
  source 1..75: mol_type = other DNA
cttaacggagtggatatgcgcgacatacgcaccagggtactcgagttattggcctaccgtcgccgcgtgcagatg

SEQ ID NO: 607871 - DNA, 75 bp, synthetic construct
  source 1..75: mol_type = other DNA
cagccggacagcgtgaccgctgaaaattatgtgcgtgttgtagcggaagtgatgcgccgtgatggtatagaactt

SEQ ID NO: 607872 - DNA, 75 bp, synthetic construct
  source 1..75: mol_type = other DNA
taatccgccgcgttgccggaatcagccagcaggccgacgaacagaccacgcagccggacagcgtgaccgccgaaa

SEQ ID NO: 607873 - DNA, 75 bp, synthetic construct
  source 1..75: mol_type = other DNA
ctatcgtcgccgcgtggagatgtatcgggagaaggaaaaaataacgtaccactggaagaagccggagcgcttgcg

SEQ ID NO: 607874 - DNA, 75 bp, synthetic construct
  source 1..75: mol_type = other DNA
ggctgaggtgatgcgccgtgacggtattgagcttaacggcgtggatatgcgcaacatacgaaccagagtccttga

SEQ ID NO: 607875 - DNA, 75 bp, synthetic construct
  source 1..75: mol_type = other DNA
ctacaatcgccgcgtggcactgtatcgggaaacggagaaaattacgtaccactggaagaagccggagcggttgcg

SEQ ID NO: 607876 - DNA, 75 bp, synthetic construct
  source 1..75: mol_type = other DNA
atccctgcgcgcaggaaaagccaatatcagcgacagctacgtccttctgcgtgacggagaagcgttcctgtttgg

SEQ ID NO: 607877 - DNA, 75 bp, synthetic construct
  source 1..75: mol_type = other DNA
gttgctggcataccgtcgccgttctcaacaacggagggagagcgcgaaaaatacttaccagtggaggaagccgga

SEQ ID NO: 607878 - DNA, 75 bp, synthetic construct
  source 1..75: mol_type = other DNA
ccagcaggctgacgaacagaccacgcagccggacagcgtgacagccgaaaattatgcgcgtgttgttgctgaggt

SEQ ID NO: 607879 - DNA, 75 bp, synthetic construct
  source 1..75: mol_type = other DNA
atgaccgaagccgaaatgctcaaaataattcgccgcgttaccggagccagccagacaacaggcaaacaggaggcc

SEQ ID NO: 607880 - DNA, 75 bp, synthetic construct
  source 1..75: mol_type = other DNA
gtgagcgaaaccgaactactaaaaataatccgccgcattaccggaatcagccaggaagcaggcaaacaggaggcc

SEQ ID NO: 607881 - DNA, 75 bp, synthetic construct
  source 1..75: mol_type = other DNA
aacggcgtggatatgcgcaacatacgcgccagagttctggagatgttgtcgtaccgtcgccgcgtgcagatgtac

SEQ ID NO: 607882 - DNA, 75 bp, synthetic construct
  source 1..75: mol_type = other DNA
atggcaaatcccgtctatctgacactgaacggagaacttcaggggctgatttcatccggatgctcgtcaatgccg

SEQ ID NO: 607883 - DNA, 75 bp, synthetic construct
  source 1..75: mol_type = other DNA
gatcaaaacgtcaaccatcatcatttgacaataaaaaaacctatagataaagcatcacccttattaggcaaagca

SEQ ID NO: 607884 - DNA, 75 bp, synthetic construct
  source 1..75: mol_type = other DNA
taaatggtgataatcaagggctcatttcaagtggttgttcatcacaaccatccattggaaataaagctcaaacag

SEQ ID NO: 607885 - DNA, 75 bp, synthetic construct
  source 1..75: mol_type = other DNA
gttccgcgatcacgggctaccgcctaccgatgtgtatgccatggcgcaggtagaaggcgcgggcaagccgctaag

SEQ ID NO: 607886 - DNA, 75 bp, synthetic construct
  source 1..75: mol_type = other DNA
aacccggtaaaacgatggcacagctgttccgcgaccacgggctgcccgctaccgatgtctatgcaatggcgcagg

SEQ ID NO: 607887 - DNA, 75 bp, synthetic construct
  source 1..75: mol_type = other DNA
tccatcggtaacaaagcccagattgcacatcaggatcagatcatggtgacgtcactgtcccatggtctgagccgg

SEQ ID NO: 607888 - DNA, 75 bp, synthetic construct
  source 1..75: mol_type = other DNA
gaaccagagttcttgagttgctggcctaccgtcgccgtgtggagatgtatcgggagaaggagaaaataacgtacc

SEQ ID NO: 607889 - DNA, 75 bp, synthetic construct
  source 1..75: mol_type = other DNA
taatccgccgtgctggtggaatcagccagcagactgacgaacaggccacgcagccggacagcgtgacagccgaaa

SEQ ID NO: 607890 - DNA, 75 bp, synthetic construct
  source 1..75: mol_type = other DNA
ggtggctgaggtgatgcgccgtgatggtatagaacttaatggcgtggatatgcgcaacatacgaaccagagttct

SEQ ID NO: 607891 - DNA, 75 bp, synthetic construct
  source 1..75: mol_type = other DNA
tcagttatgagtcaattatatgggagcattgttccgctggcactagtgcatacagtttatgggaagatcgtcttt

SEQ ID NO: 607892 - DNA, 75 bp, synthetic construct
  source 1..75: mol_type = other DNA
tgaaccgtgttctgtgtgtggtgattattgtcctgctggtagcctgtggtgtgcttagtctggggctgaatcatt

SEQ ID NO: 607893 - DNA, 75 bp, synthetic construct
  source 1..75: mol_type = other DNA
ccagcagactgacgaacaggccacgcagccggacagcgtgacagccgaaaattatgcgcgtgttgttgctgaggt

SEQ ID NO: 607894 - DNA, 75 bp, synthetic construct
  source 1..75: mol_type = other DNA
ggcatgtcgtcgccgttctcagcaacggagggagagcgcgaaaaatacttaccagtggaagaagccggagcggtt

SEQ ID NO: 607895 - DNA, 75 bp, synthetic construct
  source 1..75: mol_type = other DNA
cagcggaaagctgaattaattcgtctttcgcaacgctggttagcccgccgcatggaggtgagcagccatgcgtaa

SEQ ID NO: 607896 - DNA, 75 bp, synthetic construct
  source 1..75: mol_type = other DNA
cagcgataccttcgataaagcaaaagctgaagcgcagatcgcaaaaatggaagaacagcgcaaagctaacatgct

SEQ ID NO: 607897 - DNA, 75 bp, synthetic construct
  source 1..75: mol_type = other DNA
ggcgcacatggaaacccagaacaagatttacaacatcctgacgccggaacagaaaatgaaccgccccgggaatcc

SEQ ID NO: 607898 - DNA, 75 bp, synthetic construct
  source 1..75: mol_type = other DNA
atcctggcagccattctcccgccaggaaaaacaagcttctgcgcgccgttttacccgcagccagtcgctgaatgt

SEQ ID NO: 607899 - DNA, 75 bp, synthetic construct
  source 1..75: mol_type = other DNA
cgcctctctgggcacaattaacggtaatgaatttgccgcaattgtcccggttattcctggtcatatcggtgggcg

SEQ ID NO: 607900 - DNA, 75 bp, synthetic construct
  source 1..75: mol_type = other DNA
ccaatgggcaacctgggaaggcgttctgaactactacaaagcgaacgaagcttatctgcagggtcagctgggtaa

SEQ ID NO: 607901 - DNA, 75 bp, synthetic construct
  source 1..75: mol_type = other DNA
tcacccgcgaagcgcagttagatatgcaatcaccccccccaggtgaagcacagctacaggcacatttagtgacgc

SEQ ID NO: 607902 - DNA, 75 bp, synthetic construct
  source 1..75: mol_type = other DNA
cgtttaccgttattctgctggtggtctgtggtgcgcttagtctggggctgaatcattaccgtgataacgccatcg

SEQ ID NO: 607903 - DNA, 75 bp, synthetic construct
  source 1..75: mol_type = other DNA
aaaatgaaactcttcgcgctgacgttgccgctggtcgtaagcgcctgcggatcaacgccacctgtccaggctccg

SEQ ID NO: 607904 - DNA, 75 bp, synthetic construct
  source 1..75: mol_type = other DNA
atctcgccaacgtgtagagcacgactacctgagcactatcaacatggcgaaagaactggcgatggtcgagcgcac

SEQ ID NO: 607905 - DNA, 75 bp, synthetic construct
  source 1..75: mol_type = other DNA
cgcaaaacgatccggatcaggtcgccccggtcgcgccggaacctattcaggaaggtcaacctgaagagccacctg

SEQ ID NO: 607906 - DNA, 75 bp, synthetic construct
  source 1..75: mol_type = other DNA
ggtggctccggtcgctccagaaccaatacaggaaggccaaccagaagagcagccgcaaaccacccatacgcaacc

SEQ ID NO: 607907 - DNA, 75 bp, synthetic construct
  source 1..75: mol_type = other DNA
ctgtttggaggcatcgtgggttggtgtgacagcgaaggtaacggcgagtgggtggtgaccatccgctgcgcaaaa

SEQ ID NO: 607908 - DNA, 75 bp, synthetic construct
  source 1..75: mol_type = other DNA
ttacgccgcaaaacgatccggatcaagttgccccggtcgctccagaaccaatacaggaaggtcaaccggaagagc

SEQ ID NO: 607909 - DNA, 75 bp, synthetic construct
  source 1..75: mol_type = other DNA
tcacgccacaaaatgatcctgatcaggtggctccggtcgctccagaaccaatacaggaaggccaaccagaagagc

SEQ ID NO: 607910 - DNA, 75 bp, synthetic construct
  source 1..75: mol_type = other DNA
atgattcagcagatgaaatcgataagcgacaaggtgagcaaaacctacagtatgaacattgataatctgttctga

SEQ ID NO: 607911 - DNA, 75 bp, synthetic construct
  source 1..75: mol_type = other DNA
gcaactggaaggggcacaggactatatccgcactcagtgtactaagcaggctttttattatccggaggatgtatg

SEQ ID NO: 607912 - DNA, 75 bp, synthetic construct
  source 1..75: mol_type = other DNA
atgagcagagtagccgcgattatctccgctctgattatctgcatcatcgtctgtctgtcatgggctgttaatcat

SEQ ID NO: 607913 - DNA, 75 bp, synthetic construct
  source 1..75: mol_type = other DNA
aatgcgccgtgacggtattgagcttaacggcgtggatatgcgcaacatacgaaccagagttcttgagttgctggc

SEQ ID NO: 607914 - DNA, 75 bp, synthetic construct
  source 1..75: mol_type = other DNA
ggtggaacgtcaggcaattccggaacaaaccacgtttgaacagatggttgcccgcgccgccgcacttaccgccac

SEQ ID NO: 607915 - DNA, 75 bp, synthetic construct
  source 1..75: mol_type = other DNA
ggggcgattcccttcgatccacgtcagccttcgtcgctgtatattcccgaatcctggcagtcgttctcccgccag

SEQ ID NO: 607916 - DNA, 75 bp, synthetic construct
  source 1..75: mol_type = other DNA
gcccaatcgctttttctttatgtcgccgtaccgcagttttacgacgtcaggatgtttcgcccgcttcgatgaacc

SEQ ID NO: 607917 - DNA, 75 bp, synthetic construct
  source 1..75: mol_type = other DNA
tgacgaccgccgcgagtgcggagcagggggcgcaggccctacaggacgcgggtatgctaccgatcctcactatgc

SEQ ID NO: 607918 - DNA, 75 bp, synthetic construct
  source 1..75: mol_type = other DNA
gaacaaccattgccagaggagtccacgccagcagcaccgatgaaattcccgctcgaaaccgtggtgcgttatcaa

SEQ ID NO: 607919 - DNA, 75 bp, synthetic construct
  source 1..75: mol_type = other DNA
aaatggtgaaccaagctataacctgtttggcgtcaaagcctctgccaactggaaaggggcggtgactgaaattac

SEQ ID NO: 607920 - DNA, 75 bp, synthetic construct
  source 1..75: mol_type = other DNA
tggtgaagagtttatcgcggatgataaatgtgctcttgtattaggcgataacattttcttcgggcaaagtttcgg

SEQ ID NO: 607921 - DNA, 75 bp, synthetic construct
  source 1..75: mol_type = other DNA
cggttttgcctggctggacacgggcacccacgacagcctgatggacgcatcacagtttattcacaccattgagaa

SEQ ID NO: 607922 - DNA, 75 bp, synthetic construct
  source 1..75: mol_type = other DNA
gggtgaagagttcattaataatgaaccttgtgctctggtgctgggcgacaatatctattttggtcagagttttgg

SEQ ID NO: 607923 - DNA, 75 bp, synthetic construct
  source 1..75: mol_type = other DNA
acacagccatcaccggcggagcagcaactcagggcgctgctgacaccaccggatgtgctttcagcagaccagatg

SEQ ID NO: 607924 - DNA, 75 bp, synthetic construct
  source 1..75: mol_type = other DNA
taccccatttctgtgctgatgctggctggcatccgtgagattttggtgattaccactcccgaggatatgcccgcg

SEQ ID NO: 607925 - DNA, 75 bp, synthetic construct
  source 1..75: mol_type = other DNA
ttgagctcagagcaggtagcggagcagataaaaaaactatcgaagaccgattatggtcgctatctgcaaatgctg

SEQ ID NO: 607926 - DNA, 75 bp, synthetic construct
  source 1..75: mol_type = other DNA
gaacagcattaattcacgagacgtatcgcggagatattaaatcgtcagaaaatagcggtaatcaggtcattttta

SEQ ID NO: 607927 - DNA, 75 bp, synthetic construct
  source 1..75: mol_type = other DNA
gggtgggattgcgctgcatgtctggaccatcaaaggctatttcgaaaccatcgacagttcgctggaagaagcggc

SEQ ID NO: 607928 - DNA, 75 bp, synthetic construct
  source 1..75: mol_type = other DNA
gtttaatgactattgcgccatcctgcaagccgtcatcgccgcccctgaaagcctgaagactctcgccagcggcat

SEQ ID NO: 607929 - DNA, 75 bp, synthetic construct
  source 1..75: mol_type = other DNA
cgatgctcaccaccagctcagccactgccgaagatgcagggaagaacatcgcctcaggcttggcggcggcatccg

SEQ ID NO: 607930 - DNA, 75 bp, synthetic construct
  source 1..75: mol_type = other DNA
gagctatgagccatcttccggggctggtgaagatatctatactggcaaatttgcaactaatttcacgaggatagc

SEQ ID NO: 607931 - DNA, 75 bp, synthetic construct
  source 1..75: mol_type = other DNA
atattaacagataaaggggagctgtactcagttgcacgttcaccggatattttgaaaccgacggacagtaacggt

SEQ ID NO: 607932 - DNA, 75 bp, synthetic construct
  source 1..75: mol_type = other DNA
catgaacttggcgcatcttcgattaattttatcgttcgtgtctggagcaaaagcggcgatctacaaaatgtttac

SEQ ID NO: 607933 - DNA, 75 bp, synthetic construct
  source 1..75: mol_type = other DNA
caaaaaggagaagaacgggaaaagctatattgatctggctaataacgctgtgaataaaatctattctgttccggc

SEQ ID NO: 607934 - DNA, 75 bp, synthetic construct
  source 1..75: mol_type = other DNA
caggtttgctaatgcattgcggagggaatgtcgagccaaccacattacagactattgtttctgtggaatcaggcg

SEQ ID NO: 607935 - DNA, 75 bp, synthetic construct
  source 1..75: mol_type = other DNA
gcaaccgaacacctggatgataaccctgtctcccgcgcattccagcgtcacggagtgtctgctggagctggcaga

SEQ ID NO: 607936 - DNA, 75 bp, synthetic construct
  source 1..75: mol_type = other DNA
gggctatgaaaaaccagatgctcaatgcttcccgcacgttcgttatttgcctggaggggactttacgtgttgtgg

SEQ ID NO: 607937 - DNA, 75 bp, synthetic construct
  source 1..75: mol_type = other DNA
atgatgacgccagagttttttatgagcattttggttttgttcagtcagttgtggcacctgataccttgttttata

SEQ ID NO: 607938 - DNA, 75 bp, synthetic construct
  source 1..75: mol_type = other DNA
tcagccatttgactgtgggaatgaggtgttaagtaactggttgcgtggtcgggctatgaaaaaccagatactcaa

SEQ ID NO: 607939 - DNA, 75 bp, synthetic construct
  source 1..75: mol_type = other DNA
cccagaaggtgatatagcgattggtatccctcacgttctggaaatatcaccgacggatgtcgccgcttttggtca

SEQ ID NO: 607940 - DNA, 75 bp, synthetic construct
  source 1..75: mol_type = other DNA
ttaaactgctgaaaaaagatgcccgtaccgtcgccgctcaacaggtagcaaggctggaatcagccatgtgcctgc

SEQ ID NO: 607941 - DNA, 75 bp, synthetic construct
  source 1..75: mol_type = other DNA
gcagagctgaaactgattgcggagaaaacaaaaaagggatacgtggaacaagcggagacaaatgctaaattaaca

SEQ ID NO: 607942 - DNA, 75 bp, synthetic construct
  source 1..75: mol_type = other DNA
cagaccaaaaatcacaacctgattgaactgaccaacgaaatcgccgcccggtttgaaaccgaaacaatggcgcac

SEQ ID NO: 607943 - DNA, 75 bp, synthetic construct
  source 1..75: mol_type = other DNA
cctccatcatggtggaaactttcggtaccgagaaagtgccttctgagcagctgaccctgctggtacgtgagttct

SEQ ID NO: 607944 - DNA, 75 bp, synthetic construct
  source 1..75: mol_type = other DNA
catccgagttgctggatgaaattgtaagcaccttcggtattgaatacgcaactgaaactgtcatcttctggtggc

SEQ ID NO: 607945 - DNA, 75 bp, synthetic construct
  source 1..75: mol_type = other DNA
cggtggttgagacgcccccggaaacgccacacttcaccaccttcaaatcgacgatcggcaagacagaatggcagg

SEQ ID NO: 607946 - DNA, 75 bp, synthetic construct
  source 1..75: mol_type = other DNA
atgaatctctggatttttatcttaaaggtttgattaatagctctgaaggtcttgcgaaaaacatatattctcgcg

SEQ ID NO: 607947 - DNA, 75 bp, synthetic construct
  source 1..75: mol_type = other DNA
gtggtaccggcagtcgtctctggccgatgtcacgcgagctttatccgaaacagttcctccgcctgttcgggcaga

SEQ ID NO: 607948 - DNA, 75 bp, synthetic construct
  source 1..75: mol_type = other DNA
ccgtctcgttgcaatgcgtcgggccggggcattacgtcgcacaaccacaatcagaatacgcattcatgcgtagat

SEQ ID NO: 607949 - DNA, 75 bp, synthetic construct
  source 1..75: mol_type = other DNA
cccgaacgcccggcacgcttcattaaagcactacaaaattattatcacacgccggaacttacggcggaacagttc

SEQ ID NO: 607950 - DNA, 75 bp, synthetic construct
  source 1..75: mol_type = other DNA
gaacccgacctgctggcgtcggcccgtcgcttacaattttttttcacatcagtactcgattgccgtgctgatggc

SEQ ID NO: 607951 - DNA, 75 bp, synthetic construct
  source 1..75: mol_type = other DNA
tggacccgacctgttcactgtttacgacagggcaatgtctgggagaacccgacctgctggcgtcggcccgtcgct

SEQ ID NO: 607952 - DNA, 75 bp, synthetic construct
  source 1..75: mol_type = other DNA
gccacttacaatttttctcacatcagttctccatcgccgtactgatggctaatgcccggggcaacagcgcactgt

SEQ ID NO: 607953 - DNA, 75 bp, synthetic construct
  source 1..75: mol_type = other DNA
agcagataacgcgactggcagaattacctccagcatacaacctgcggtgcagtgcgcagctgctgcagcaactga

SEQ ID NO: 607954 - DNA, 75 bp, synthetic construct
  source 1..75: mol_type = other DNA
cagccaatcagtcgcggcgacatgcaacacgtcgatggattgaatattcaggggctggcaaaagtgatttacgtc

SEQ ID NO: 607955 - DNA, 75 bp, synthetic construct
  source 1..75: mol_type = other DNA
ataccatcccattccaggcgcgttatatggctactggtcaggcaacagctggtacggctaacgcagatgcgacct

SEQ ID NO: 607956 - DNA, 75 bp, synthetic construct
  source 1..75: mol_type = other DNA
cggtcgggcgcaacaccgcgccggccatcgccctggcggcccttcaggccacccgctacggtgacgacccgctga

SEQ ID NO: 607957 - DNA, 75 bp, synthetic construct
  source 1..75: mol_type = other DNA
atgcctgatgagcacgaacttacccaactggcgctgccgttgcctgagcaggcgcagcttgatgagctggaggcg

SEQ ID NO: 607958 - DNA, 75 bp, synthetic construct
  source 1..75: mol_type = other DNA
gcacattccccgccgacgctggccgctgaacgcgcaggcggactacgacctgcgggatattgagcaggcgacgct

SEQ ID NO: 607959 - DNA, 75 bp, synthetic construct
  source 1..75: mol_type = other DNA
gtcattgcgtttgaaagttgacaaagcactcaaagccaaatcacgtctcatggatgaagagcatataatgctcaa

SEQ ID NO: 607960 - DNA, 75 bp, synthetic construct
  source 1..75: mol_type = other DNA
gcggattgcggttcagctaaggctgagcgatccggcgtcactgcatccaaaccaggatctgttgcaactcggcat

SEQ ID NO: 607961 - DNA, 75 bp, synthetic construct
  source 1..75: mol_type = other DNA
tcggggtgatgatgccctacttcacctctgcgttcggcgtattcctaatgcgtaaggcgttcctcgccattccga

SEQ ID NO: 607962 - DNA, 75 bp, synthetic construct
  source 1..75: mol_type = other DNA
cacggcatgacaagaaaagaagcctgtgacaaacacaaggtcgctcagggctatttctcaataagcatgagaaaa

SEQ ID NO: 607963 - DNA, 75 bp, synthetic construct
  source 1..75: mol_type = other DNA
gtcgaaagttcaggaactgatgtttggcttgtcgccaagaatggaaccagaagttttattgagctttcaggccta

SEQ ID NO: 607964 - DNA, 75 bp, synthetic construct
  source 1..75: mol_type = other DNA
ctattcttgctgtacttgggatgacttctactgcaatggctgcaaacagtggtactgttaattttacaggggctg

SEQ ID NO: 607965 - DNA, 75 bp, synthetic construct
  source 1..75: mol_type = other DNA
agtgatattcagatgattttccaggatccgttggcatcgctaaacccgcgtatgaccatcggcgagatcatcgct

SEQ ID NO: 607966 - DNA, 75 bp, synthetic construct
  source 1..75: mol_type = other DNA
ccctcatcgtttgacgggcgttattttggagcggttacaacgtcacaaattatatcagcagtatcaccggtaata

SEQ ID NO: 607967 - DNA, 75 bp, synthetic construct
  source 1..75: mol_type = other DNA
acctgctgccggccgagaagttcgccgcactcaagcgcgagcaggccctgcccctggcgatcaacccgaacagcg

SEQ ID NO: 607968 - DNA, 75 bp, synthetic construct
  source 1..75: mol_type = other DNA
gtattctcattgcggctgccattatgggctgctcaggtatggcacttgccgcgccagaaccggcaccgtctgccg

SEQ ID NO: 607969 - DNA, 75 bp, synthetic construct
  source 1..75: mol_type = other DNA
ggccagacgggtgctggtggtggggcagggcggagaggcagataaccaggaaatcgctatgctggcagaaaagct

SEQ ID NO: 607970 - DNA, 75 bp, synthetic construct
  source 1..75: mol_type = other DNA
gtaatcgctattcacgcgagcttttcattgtgccggtatggcgtaaaagctggtggctgggcgtgtggtatgaaa

SEQ ID NO: 607971 - DNA, 75 bp, synthetic construct
  source 1..75: mol_type = other DNA
ctgatgacacggtgatctccaccatggtcaatggttatcgcagccacaaatttggcaaaatgagtaacaaggagc

SEQ ID NO: 607972 - DNA, 75 bp, synthetic construct
  source 1..75: mol_type = other DNA
atgtctttccctggcgcgtcaggcgggagcagagataaacaccatgttgccctctggtatgctgcaactgaacat

SEQ ID NO: 607973 - DNA, 75 bp, synthetic construct
  source 1..75: mol_type = other DNA
aaatgcgctaacggcgacgctgcaaacagaaaaacgcccgctatgcctttccctggcgcgtcaggcgggagcagc

SEQ ID NO: 607974 - DNA, 75 bp, synthetic construct
  source 1..75: mol_type = other DNA
ctggtggtggggcagggcggagaggcagataaccaggaaatcgctatgctggcagaaaagctgggagccgaagtg

SEQ ID NO: 607975 - DNA, 75 bp, synthetic construct
  source 1..75: mol_type = other DNA
ctcattatctctggtcatcacggcaaaaggaaaccatacccgtaatttttcaaatctcagggagcttgaatctct

SEQ ID NO: 607976 - DNA, 75 bp, synthetic construct
  source 1..75: mol_type = other DNA
attttcgcagcgggagaaaatatactcgtccgctttctgtatgtcagataacgccaactgtaaatttgcgaaatg

SEQ ID NO: 607977 - DNA, 75 bp, synthetic construct
  source 1..75: mol_type = other DNA
gggagcatgctgattttttaagttggctgggaaagtggtccacggcagataaacaacccgtttgctggtcagtga

SEQ ID NO: 607978 - DNA, 75 bp, synthetic construct
  source 1..75: mol_type = other DNA
gttatgtggtggaatttttctactggacgggtggcaactcaatggacattcacagctggcatcggctggggatgt

SEQ ID NO: 607979 - DNA, 75 bp, synthetic construct
  source 1..75: mol_type = other DNA
tgctaatatattaattcagaataaaacagtggcaattttgtccaataataactcagctgtcagtaatgtttatga

SEQ ID NO: 607980 - DNA, 75 bp, synthetic construct
  source 1..75: mol_type = other DNA
acatattgcggcgctgattcgttacatcaaatactacgctgatgacggagagattttcgagagcccggtcatatc

SEQ ID NO: 607981 - DNA, 75 bp, synthetic construct
  source 1..75: mol_type = other DNA
cgcgacccattagctgaggccagacgggtgctggtggtggggcagggcggagaggcagataaccaggaaatcgct

SEQ ID NO: 607982 - DNA, 75 bp, synthetic construct
  source 1..75: mol_type = other DNA
gactttctggcatttagtcgggcagcaactggtcgcctgcgtgacgaactggcgaaatatccttttgctgacggc

SEQ ID NO: 607983 - DNA, 75 bp, synthetic construct
  source 1..75: mol_type = other DNA
gaatgctttccgcgtttatcgttattctgctggtggcctgtggagcgctgtggatggcaacagaccattaccgtg

SEQ ID NO: 607984 - DNA, 75 bp, synthetic construct
  source 1..75: mol_type = other DNA
tcccggatcgctacttcgacgtggcaattgccgagcaacacgcagtgacctttgctgcgggtctggcgattggtg

SEQ ID NO: 607985 - DNA, 75 bp, synthetic construct
  source 1..75: mol_type = other DNA
cagcaaccgataccctgaccattaaaggcacgccgccgaatttgcgcgatcaattgcagcgccggacgtctggcg

SEQ ID NO: 607986 - DNA, 75 bp, synthetic construct
  source 1..75: mol_type = other DNA
aataaagcttacggcttgtttagcgaagagagtgaactggcgcagacgctgcgcttacagcgtcagggcgaagag

SEQ ID NO: 607987 - DNA, 75 bp, synthetic construct
  source 1..75: mol_type = other DNA
gatttgcgtactgaacaatttaagcagtatgcgcgttaacgaaaacctcgacatcaacccgacccattatctcga

SEQ ID NO: 607988 - DNA, 75 bp, synthetic construct
  source 1..75: mol_type = other DNA
ctgagtgtgccaaaacgcgacctgtgctggaggggagtttcagacatgccgtttcttgcctgaaagtcgatccgc

SEQ ID NO: 607989 - DNA, 75 bp, synthetic construct
  source 1..75: mol_type = other DNA
tgtcactcttcgcctgtatgaaggggaaacattaggtgtggtaggggaatcgggatgcggtaagtccacctttgc

SEQ ID NO: 607990 - DNA, 75 bp, synthetic construct
  source 1..75: mol_type = other DNA
atgaatatcgcaattgtaacgataaatcaggaccatgctgcaatggcgaactggctggcggcgcaggatttcagc

SEQ ID NO: 607991 - DNA, 75 bp, synthetic construct
  source 1..75: mol_type = other DNA
gatcaggtgctgcatgacgtggcgattcaaaagctcccggtcctgttcgccatcgaccgcgcgggcattgttggt

SEQ ID NO: 607992 - DNA, 75 bp, synthetic construct
  source 1..75: mol_type = other DNA
tccggtaaactttactcatcactgcgcgaaggcggtaaaaaagtcttctctggcgtgccgccaattaaagaactg

SEQ ID NO: 607993 - DNA, 75 bp, synthetic construct
  source 1..75: mol_type = other DNA
gagagtttaccgaaactctgcgacgaactgcgccgctatttactcgacagcgtgagccgttccagcgggcacttc

SEQ ID NO: 607994 - DNA, 75 bp, synthetic construct
  source 1..75: mol_type = other DNA
cttacggtaatgccgaacgccgtactcagttctggcgtcagcaggtacaggcaccgggtgaagcaaaatcggatc

SEQ ID NO: 607995 - DNA, 75 bp, synthetic construct
  source 1..75: mol_type = other DNA
ttgaaaagccgctttgaggatcctgacggacgtgaacctggccgtaccatagaactgcatttaaccggccacatg

SEQ ID NO: 607996 - DNA, 75 bp, synthetic construct
  source 1..75: mol_type = other DNA
atgcagttaaaaacgtcacgacgaacatttctgaagggattaaccctctctggcgtagccggaagtcttggcgta

SEQ ID NO: 607997 - DNA, 75 bp, synthetic construct
  source 1..75: mol_type = other DNA
aacgggcaggccccgctgaaaaactggaccggactgttccgtcccggtgaaaagatacgcttacggtttatcaac

SEQ ID NO: 607998 - DNA, 75 bp, synthetic construct
  source 1..75: mol_type = other DNA
atccaactgacctcgcggatgtcagcggttacacctacacctatctcatgaacggacaggccccgctgaaaaact

SEQ ID NO: 607999 - DNA, 75 bp, synthetic construct
  source 1..75: mol_type = other DNA
tgacgtcatcgttgagcctcagaatgaggcctataccatcttcgcacaatcggtggatcgtaccggttacgcacg

SEQ ID NO: 608000 - DNA, 75 bp, synthetic construct
  source 1..75: mol_type = other DNA
cagccactcagggctccaggagcaggagggggtttacggtgccatcattattgatgcccgggaaccggagccctt

SEQ ID NO: 608001 - DNA, 75 bp, synthetic construct
  source 1..75: mol_type = other DNA
aagtagacagaattcagtgtaacgacacaggaaaacgcatctacgaaacgcttgcttacctctataaaggaaagc

SEQ ID NO: 608002 - DNA, 75 bp, synthetic construct
  source 1..75: mol_type = other DNA
agtttgcggcataacatgcctaatcctgttcctgttgttctgttagggcgtctggctgttgatgtttgtacccag

SEQ ID NO: 608003 - DNA, 75 bp, synthetic construct
  source 1..75: mol_type = other DNA
agtttgcggcataacatgcccaatcctgtccctgttgttctgttagggcgtctggctgttgatgtttgtacccag

SEQ ID NO: 608004 - DNA, 75 bp, synthetic construct
  source 1..75: mol_type = other DNA
aggcttcagcgttaccgaggtcagagtgattcttcgcgatggttccggtatgatgtcacggctgccagggaactt

SEQ ID NO: 608005 - DNA, 75 bp, synthetic construct
  source 1..75: mol_type = other DNA
tccgctatggtttaccatgcatttgtatgggcaggtgttgatgactggacggctacacttccaacggttttatat

SEQ ID NO: 608006 - DNA, 75 bp, synthetic construct
  source 1..75: mol_type = other DNA
cagattcctcagaaataaggatatatcatggtctgatgataccccctctgcctggatgcgtatgtttgatcaaca

SEQ ID NO: 608007 - DNA, 75 bp, synthetic construct
  source 1..75: mol_type = other DNA
gccagatgggaggcatggataacagcggacagatgatgtctatggatggcgctgacctgccggaaagcgggacat

SEQ ID NO: 608008 - DNA, 75 bp, synthetic construct
  source 1..75: mol_type = other DNA
atcccgcgagttgggcttctatctgcaaaaagggttgttcgaagagtacgcatggtttggtcgcggtcacggtca

SEQ ID NO: 608009 - DNA, 75 bp, synthetic construct
  source 1..75: mol_type = other DNA
ggagatgcacccgatcctctggtcacgcatcactaaccgtcgtctctctaaccagaacgtcaccgtggcggtgct

SEQ ID NO: 608010 - DNA, 75 bp, synthetic construct
  source 1..75: mol_type = other DNA
agagcgtatgccaggctggcgcgatccgcgcaactttatcatcgtttccgatccgtatccgacagtcagtgcgct

SEQ ID NO: 608011 - DNA, 75 bp, synthetic construct
  source 1..75: mol_type = other DNA
cacaaagcacgcggcctgcgctggccggtagttaacggtaaagaaacgcagtggcgttacagtgaaggcaacgac

SEQ ID NO: 608012 - DNA, 75 bp, synthetic construct
  source 1..75: mol_type = other DNA
aggttctgacgcctccgaaccgatgagctttgaagattacaaagccttcgttgctgagtatacgctggaaaaaac

SEQ ID NO: 608013 - DNA, 75 bp, synthetic construct
  source 1..75: mol_type = other DNA
ccgcgcaactttatcatcgtttccgatccgtatccgacggtcagtgcgctggcagcggacttgatcctgccgacc

SEQ ID NO: 608014 - DNA, 75 bp, synthetic construct
  source 1..75: mol_type = other DNA
gttcgcatcgattgagactggcagtctgccagcgacagatccggaacggctgcgcgaccaggctgagttgatggg

SEQ ID NO: 608015 - DNA, 75 bp, synthetic construct
  source 1..75: mol_type = other DNA
ttctgtatgcgcccttctctgctgtgaaaggctgctctgagaatggttgccaggccatcatgagagcgcgtgaga

SEQ ID NO: 608016 - DNA, 75 bp, synthetic construct
  source 1..75: mol_type = other DNA
gtaaaaactgcaaccaacaaaacgcttgatgatttcaccctggaaaatgtgctcagcaataaagtaaccgcacaa

SEQ ID NO: 608017 - DNA, 75 bp, synthetic construct
  source 1..75: mol_type = other DNA
catagaagccaatccgttatggtcgcaagaatggataggctgggggcatccattagggggaaccgcagaattcgg

SEQ ID NO: 608018 - DNA, 75 bp, synthetic construct
  source 1..75: mol_type = other DNA
actatgtactcaatctcgtttataacgaaccgatgcaaatagagttgtttcgctatctgtttccgctctgcctgg

SEQ ID NO: 608019 - DNA, 75 bp, synthetic construct
  source 1..75: mol_type = other DNA
cgcccttatcgttcaactaaacaagaactcattaccattgctgacgatcttgaacgtcgctatcaggcaaaaatt

SEQ ID NO: 608020 - DNA, 75 bp, synthetic construct
  source 1..75: mol_type = other DNA
cgccatgcgctggtttgcggcccggaccgcgactacctgtggatactctcccgcacgccaaccatttctgacgaa

SEQ ID NO: 608021 - DNA, 75 bp, synthetic construct
  source 1..75: mol_type = other DNA
gctgcgctacaaccttgctgccatgattgcgcgctttaacgaaactggccgcagccaggttctggcaaaacgcat

SEQ ID NO: 608022 - DNA, 75 bp, synthetic construct
  source 1..75: mol_type = other DNA
gaacgcactcagcctggtgcatgggggcgtattcagctgactgatgccatcgctgaactggcgaaaaaacagtcc

SEQ ID NO: 608023 - DNA, 75 bp, synthetic construct
  source 1..75: mol_type = other DNA
tcgtggaagacgataatcgcgacaatgggaaagagttcattatcacagagatgtcggcatgggatgccgacgaac

SEQ ID NO: 608024 - DNA, 75 bp, synthetic construct
  source 1..75: mol_type = other DNA
taaacgacgatactaaccagactgctgaagcttctgaaaatgcaggcatgaacgaacaggacaagattgctctcg

SEQ ID NO: 608025 - DNA, 75 bp, synthetic construct
  source 1..75: mol_type = other DNA
tcactttgtttttaccactgatttgttcaggcgtggccttctattctctctacatcaatgtcggagatgtattct

SEQ ID NO: 608026 - DNA, 75 bp, synthetic construct
  source 1..75: mol_type = other DNA
acgcatgccgggcgatctctccgaatactccgttatccagaccaaagagccaatggtggccgaagggcaggtggc

SEQ ID NO: 608027 - DNA, 75 bp, synthetic construct
  source 1..75: mol_type = other DNA
gcgcgtatcgttgagtttattgaaaaaccggacgaaccgcagaccctggactccgacctgatggcggtggggcgc

SEQ ID NO: 608028 - DNA, 75 bp, synthetic construct
  source 1..75: mol_type = other DNA
ccaaaaatgccgtggaaaaccacttcgacacctcctatgaactggaagctctgctggagcaacgcgttaagcgtc

SEQ ID NO: 608029 - DNA, 75 bp, synthetic construct
  source 1..75: mol_type = other DNA
aactgctggcggaagtgcagtccatctgtccaccgggcgtgaccattatgaacgtgcgtcagggcgaacctttag

SEQ ID NO: 608030 - DNA, 75 bp, synthetic construct
  source 1..75: mol_type = other DNA
ggttttttctgtattcatcgcctgtttattgttgattcgatttcgtttcacaacattgataagcaagttgcgcaa

SEQ ID NO: 608031 - DNA, 75 bp, synthetic construct
  source 1..75: mol_type = other DNA
gggctacatgcaggcgtttgtgaactatgggctgcggaacctgaaggaaggggcgaagttcagaagccggattga

SEQ ID NO: 608032 - DNA, 75 bp, synthetic construct
  source 1..75: mol_type = other DNA
tggcacaggatttattccgctccatgggggaatcgggattctctggtattcctgctgatgtgattgccatggggt

SEQ ID NO: 608033 - DNA, 75 bp, synthetic construct
  source 1..75: mol_type = other DNA
tccaggaaggcggcgagctgcttctgaatagcgacgacgaaattcactaccaaaagtggaacagcacacaattgg

SEQ ID NO: 608034 - DNA, 75 bp, synthetic construct
  source 1..75: mol_type = other DNA
cgcggcggcacacaatttcgtcactggcaaaacggttacccctgtttatatccaggaaggcggtgagctgcttct

SEQ ID NO: 608035 - DNA, 75 bp, synthetic construct
  source 1..75: mol_type = other DNA
aaattcagtgggcgaaggacggcagcctgacgccagaagaggttgatcaggtcatagcgttggcgcagaaactga

SEQ ID NO: 608036 - DNA, 75 bp, synthetic construct
  source 1..75: mol_type = other DNA
acagcgggatttgtacggtgccggaggatcaaatgctatctgtgctgatgtacagcacaagttcttgcgcattgg

SEQ ID NO: 608037 - DNA, 75 bp, synthetic construct
  source 1..75: mol_type = other DNA
ccgcccgctttttctatcaggccagacagcgggatttgtacggtgccggaggatcaaatgctatctgtgctgatg

SEQ ID NO: 608038 - DNA, 75 bp, synthetic construct
  source 1..75: mol_type = other DNA
ggtattgccttccgagttggcttttgatgaagcgccgcaggatgtggtgaataaggtatttaacatcactttacg

SEQ ID NO: 608039 - DNA, 75 bp, synthetic construct
  source 1..75: mol_type = other DNA
ttgcctttgcgcttggtgtactggcgttattgggaagccgtgtgccgttagcgctgaagatctttttgatggcgc

SEQ ID NO: 608040 - DNA, 75 bp, synthetic construct
  source 1..75: mol_type = other DNA
gaccccagaacaggatgccgcagctcgcgccagtctggaacgttttcaggcggcgatgcttgccgccgatgacga

SEQ ID NO: 608041 - DNA, 75 bp, synthetic construct
  source 1..75: mol_type = other DNA
tcgtcacatcaccacggaaatcgctaacgccacaccgttttattatgccgaagatgaccaccagcaatatctgca

SEQ ID NO: 608042 - DNA, 75 bp, synthetic construct
  source 1..75: mol_type = other DNA
tgatgcactattggttcataagatggccagggctttattgccgctggtggctgaaaagcatgaggtggaccatgc

SEQ ID NO: 608043 - DNA, 75 bp, synthetic construct
  source 1..75: mol_type = other DNA
gcatacgcttggcattattgatgcactgttggttcataagatggccagggctttattgtcgttggtagggggcaa

SEQ ID NO: 608044 - DNA, 75 bp, synthetic construct
  source 1..75: mol_type = other DNA
accaatgacttgtcgatggcttctcttggcgttgctgcagtggcgattgctgtactcgctgtgttgaacatgtgt

SEQ ID NO: 608045 - DNA, 75 bp, synthetic construct
  source 1..75: mol_type = other DNA
gggctatatgcaggcattcgttaagtatgggctgcgcaaccttaaagaaggggcgaagttccgtaagagcatcaa

SEQ ID NO: 608046 - DNA, 75 bp, synthetic construct
  source 1..75: mol_type = other DNA
cttgcattgccgaagttgtggggtgctgatggttccagttatgaaatatgctcgtgtggaagccagcgtctggga

SEQ ID NO: 608047 - DNA, 75 bp, synthetic construct
  source 1..75: mol_type = other DNA
aggaaagatttcagttttgttaatgatattgagtcgaatactgagatttcttctgaccctgaatactttattctg

SEQ ID NO: 608048 - DNA, 75 bp, synthetic construct
  source 1..75: mol_type = other DNA
tccacgcttgctgacaccacaacaggcactggagaaatttaaaggcgataaaacagcagcggcgaattatttagg

SEQ ID NO: 608049 - DNA, 75 bp, synthetic construct
  source 1..75: mol_type = other DNA
ctgtatttcactgttgcggggagtgatgagtgagcgtggcgttcagcaaaaatcactggcggccacacttgaaga

SEQ ID NO: 608050 - DNA, 75 bp, synthetic construct
  source 1..75: mol_type = other DNA
ggttcagtcggtaaggccattggcctcacagccaccgcagttaatacgggttccagttctgcagactgctcgtac

SEQ ID NO: 608051 - DNA, 75 bp, synthetic construct
  source 1..75: mol_type = other DNA
tgatgcctatcagcagaaattctcatcgagagagcaattttataaacataccgtgattagtccttttatcaatac

SEQ ID NO: 608052 - DNA, 75 bp, synthetic construct
  source 1..75: mol_type = other DNA
ctgataacttccaagataatatgaaaaattatcttgaaattactggacaaacagaagatggggtacgaatcacca

SEQ ID NO: 608053 - DNA, 75 bp, synthetic construct
  source 1..75: mol_type = other DNA
aaccgtttcttgcgttgaaggtggcaaattgtttacctgctttgctaaacaaatccctgcatcttcagtagaaga

SEQ ID NO: 608054 - DNA, 75 bp, synthetic construct
  source 1..75: mol_type = other DNA
ttatcagacgtgcaggatggtatcgttccaacaacatggtggacgtatcaagaagttggtcataatcaagagggg

SEQ ID NO: 608055 - DNA, 75 bp, synthetic construct
  source 1..75: mol_type = other DNA
atgtcatttatggcgcccgcgggaaaaagcccatccatgccattctgacggaaagcgcctattccgccgcctatg

SEQ ID NO: 608056 - DNA, 75 bp, synthetic construct
  source 1..75: mol_type = other DNA
catgacaggctatgacggcattcgccaggccttcctgactgcgatggaagaccccgatattacagggatctgcct

SEQ ID NO: 608057 - DNA, 75 bp, synthetic construct
  source 1..75: mol_type = other DNA
ggggcgcaaaagaaggtgttgactatctccaagatttatttaataaatcaaaattaaaacatggtgacaattggg

SEQ ID NO: 608058 - DNA, 75 bp, synthetic construct
  source 1..75: mol_type = other DNA
aaggcaattaatgcactggaacataatgttcactggttacgtaagcagtgctctaaatctgttgcaaagttattt

SEQ ID NO: 608059 - DNA, 75 bp, synthetic construct
  source 1..75: mol_type = other DNA
actcctcgaagaatgcggtggaaaaccactttgatacctcctacgagctggaagccctgcttgagcagcgtgtga

SEQ ID NO: 608060 - DNA, 75 bp, synthetic construct
  source 1..75: mol_type = other DNA
atgttacgccattcgtgtggttttgctttggcgaatatgggaatagatacgcgacttatccaggattatcttggg

SEQ ID NO: 608061 - DNA, 75 bp, synthetic construct
  source 1..75: mol_type = other DNA
gtttgtggattttgatccagtgattgataacgctctggatgcaggaaatccaatcccggaggctctgcaatctcg

SEQ ID NO: 608062 - DNA, 75 bp, synthetic construct
  source 1..75: mol_type = other DNA
gttattcagaccaaagagcttttagacaacgaaggtaaagttagccgtattgttgaattcatcgagaaacccgat

SEQ ID NO: 608063 - DNA, 75 bp, synthetic construct
  source 1..75: mol_type = other DNA
agagctacgactgcggtaaaaagctgggctatatgcaggcatttgtgaactatggactgcgtaacctgaaggaag

SEQ ID NO: 608064 - DNA, 75 bp, synthetic construct
  source 1..75: mol_type = other DNA
acagctacgactgtggtaagaaaatgggttacatgcaggcgttcgtccagtacgggctgcgcaacctgaaagaag

SEQ ID NO: 608065 - DNA, 75 bp, synthetic construct
  source 1..75: mol_type = other DNA
ctggatatatttgaaggtgtggtgacgaaaaccgacgaggcaatggagagaatcactaaggagttgttggctttt

SEQ ID NO: 608066 - DNA, 75 bp, synthetic construct
  source 1..75: mol_type = other DNA
aaaggtaataaggcgttcgtttttccgaataaaccaaatgatcgctggattcgttctgtatggtacatggatgat

SEQ ID NO: 608067 - DNA, 75 bp, synthetic construct
  source 1..75: mol_type = other DNA
aagctaatttcctgaaacattgggatgaattaaaccagagaccgaggaaatacatagaaggttatacaaaaataa

SEQ ID NO: 608068 - DNA, 75 bp, synthetic construct
  source 1..75: mol_type = other DNA
cctgctgtaatgagcttattttcaggaaaagtcagtagttactttgataaaatgtatttctgtaatttggaaaac

SEQ ID NO: 608069 - DNA, 75 bp, synthetic construct
  source 1..75: mol_type = other DNA
cagtcggtaagctgctcagatacgccaaaaattcacggactcattcagatgagcaagttgaacagttggtgaaca

SEQ ID NO: 608070 - DNA, 75 bp, synthetic construct
  source 1..75: mol_type = other DNA
aatataacttccagggtaacaactctgaaggcgctgatgcccagaaaggtaacaaaactcgtttggcattcgcag

SEQ ID NO: 608071 - DNA, 75 bp, synthetic construct
  source 1..75: mol_type = other DNA
gctgcgttacaaccttgctgccatgattgcgcgcttcaacgaaacgggccgtagccaggtgctggcaaaacgtat

SEQ ID NO: 608072 - DNA, 75 bp, synthetic construct
  source 1..75: mol_type = other DNA
gtgaagtatggactgcgcaacctgaaagaaggggcgaagttccgtaaagggattgagaagctgttaagcgaataa

SEQ ID NO: 608073 - DNA, 75 bp, synthetic construct
  source 1..75: mol_type = other DNA
gggctatatgcaggcgtttgtgaagtatggattgcgcaacctgaaagaaggggcgaagttccgcaaatgtattga

SEQ ID NO: 608074 - DNA, 75 bp, synthetic construct
  source 1..75: mol_type = other DNA
cggagaatgtggcattgcgatctaaggctgcggaactggcacatgaagcgtcaaaaatttactcggcatataacg

SEQ ID NO: 608075 - DNA, 75 bp, synthetic construct
  source 1..75: mol_type = other DNA
gaaagaagagttggctaatgaaccacacccgattgatggcctgtccggtgaatatgcggagaaatccctagaaga

SEQ ID NO: 608076 - DNA, 75 bp, synthetic construct
  source 1..75: mol_type = other DNA
aatgaaccgcatccgattgatggcctgtccggtgaatatgcggagaaatcccttgaagaatgggcggaacagatt

SEQ ID NO: 608077 - DNA, 75 bp, synthetic construct
  source 1..75: mol_type = other DNA
cgacacctcttatgaattagaatctcttcttgagcagcgcgtgaagcgtcaactgcttgcggaagtgcagtccat

SEQ ID NO: 608078 - DNA, 75 bp, synthetic construct
  source 1..75: mol_type = other DNA
tgatcgacgacgccagcgccgacccgctgcgctacaaccttgctgccatgattgcgcgtttcaatgaaacgggcc

SEQ ID NO: 608079 - DNA, 75 bp, synthetic construct
  source 1..75: mol_type = other DNA
aactgctggcggaagtacagtccatctgtccgccgggcgtgaccattatgaacgtgcgtcagggcgaacctttag

SEQ ID NO: 608080 - DNA, 75 bp, synthetic construct
  source 1..75: mol_type = other DNA
cagccgcagacgctggactcagacatcatggccgtaggtcgttatgtgctttctgccgatatttggccggaactt

SEQ ID NO: 608081 - DNA, 75 bp, synthetic construct
  source 1..75: mol_type = other DNA
attgcgcgcttcaacgaaacgggccgcagccaggtactggcaaaacgtatgccgggcgatctctctgaatactcc

SEQ ID NO: 608082 - DNA, 75 bp, synthetic construct
  source 1..75: mol_type = other DNA
gaacgcactcagccaggtgcatggggacgtattcagctgactgatgccattgccgaactggcgaaaaaacagtct

SEQ ID NO: 608083 - DNA, 75 bp, synthetic construct
  source 1..75: mol_type = other DNA
aacaccgaggttatcgctgaggtggttgggcgagatggcgttctggttattttggaggccatgaaggcaacagga

SEQ ID NO: 608084 - DNA, 75 bp, synthetic construct
  source 1..75: mol_type = other DNA
tttccagcagtcgacgtccgttaccgacgatggataacatgcccatcgaatcgcgtctctattccgacgggttgt

SEQ ID NO: 608085 - DNA, 75 bp, synthetic construct
  source 1..75: mol_type = other DNA
gtatttctcatatggctctgaatttagtttcgagtgtcacaaaactgctgaggaggctatcgctgctgctgaggc

SEQ ID NO: 608086 - DNA, 75 bp, synthetic construct
  source 1..75: mol_type = other DNA
agtacgggcgcagggggtggatgctgctatagaagctgcaaaaaatctggtggcccaagaatatgagtataagga

SEQ ID NO: 608087 - DNA, 75 bp, synthetic construct
  source 1..75: mol_type = other DNA
ggatatcagcagcagtatgcagacgctggcgaaggcgaacttgccaccgctgctttctgtaccagtgggggaaaa

SEQ ID NO: 608088 - DNA, 75 bp, synthetic construct
  source 1..75: mol_type = other DNA
tttccagtagtcgacgtccgctaccgacgatggacaacatgcctatcgaatcacgtctctattccgacggattat

SEQ ID NO: 608089 - DNA, 75 bp, synthetic construct
  source 1..75: mol_type = other DNA
ggatggacaccgaatcgaaattaccgatgcgggttgatctccttgatcgcgatggtgaaacgctggaacaatttc

SEQ ID NO: 608090 - DNA, 75 bp, synthetic construct
  source 1..75: mol_type = other DNA
gcgaacagaatgctggctgcctgggaagctggttttattgatgatactgcgaagaacgccgcggacattgcccgg

SEQ ID NO: 608091 - DNA, 75 bp, synthetic construct
  source 1..75: mol_type = other DNA
ttaccgccgggcatgagatggcttcggaactgaaagcagaatgtggcgccgttgatatgcgtagtgtggcaaagc

SEQ ID NO: 608092 - DNA, 75 bp, synthetic construct
  source 1..75: mol_type = other DNA
gacctggtagggaaggttgaaatgactgagtggttagttgactttgctgcccagcttcgcaaaggaggcaccagt

SEQ ID NO: 608093 - DNA, 75 bp, synthetic construct
  source 1..75: mol_type = other DNA
tttcctccgggcatgagatggcttcggaactgaaagcagaatgtggtgccgttgatatgcgcagtgtggcaaagc

SEQ ID NO: 608094 - DNA, 75 bp, synthetic construct
  source 1..75: mol_type = other DNA
gcgctggtggcggagaatgcggcaatgcatgaaactattgaagccgttcgcagtgttgcggataactccagtgga

SEQ ID NO: 608095 - DNA, 75 bp, synthetic construct
  source 1..75: mol_type = other DNA
cgcgctgcgctgaaagtgtcattctttggtcctttctatggcggttataacgttattgcactcgatcgggaatac

SEQ ID NO: 608096 - DNA, 75 bp, synthetic construct
  source 1..75: mol_type = other DNA
agatccgctcgatcgtgaaggcaaagttagccgcattgttgaatttatcgaaaaacccgaccagccacagactct

SEQ ID NO: 608097 - DNA, 75 bp, synthetic construct
  source 1..75: mol_type = other DNA
ggattcttgccagaaaaaataatattgagcctatgcttggtcacccattgctttatatgaaaggagacgaggctt

SEQ ID NO: 608098 - DNA, 75 bp, synthetic construct
  source 1..75: mol_type = other DNA
taacacgaggattaccaccagcagcaatccaggataggttagagatcagcaaagcaaccttctaccgacttaagt

SEQ ID NO: 608099 - DNA, 75 bp, synthetic construct
  source 1..75: mol_type = other DNA
gaactcctcatcgcaaaaggccagccgctggcagcgctggcagctcaagctgagctatctcgcgcagacacttcg

SEQ ID NO: 608100 - DNA, 75 bp, synthetic construct
  source 1..75: mol_type = other DNA
agcttctggcggaagtacaatctatctgcccgccaggtgtgaccattatgaacgtgcgtcagggggaacctttag

SEQ ID NO: 608101 - DNA, 75 bp, synthetic construct
  source 1..75: mol_type = other DNA
tcatggctgtagggcgttatgtgctttctgccgatatttggcctgaactggagcgtactcaacctggagcatggg

SEQ ID NO: 608102 - DNA, 75 bp, synthetic construct
  source 1..75: mol_type = other DNA
gcgacctgccattggtgacaacccatttgtcgtggtactgccagacgtagtgatcgacgacgccagcgccgaccc

SEQ ID NO: 608103 - DNA, 75 bp, synthetic construct
  source 1..75: mol_type = other DNA
tcactcctcatcgcaaaaagccagccgctggcagcgctggcagttaaaactgagctatctcgcgcagacgcttcg

SEQ ID NO: 608104 - DNA, 75 bp, synthetic construct
  source 1..75: mol_type = other DNA
accgatcactgccatccccatgccctgctgaatgaggtggaagcggtctataccgtctcctcgcagatggggttt

SEQ ID NO: 608105 - DNA, 75 bp, synthetic construct
  source 1..75: mol_type = other DNA
atccgcgctgcaaagcggtgtacgacgcctgcacgcagctgccagcgtttattgccgcagcgccagaaaatcaac

SEQ ID NO: 608106 - DNA, 75 bp, synthetic construct
  source 1..75: mol_type = other DNA
aaccgggccggggcgatctcggccgaatgtctgacgagctgcgtggacagccaggtgctggatctcggcctgacc

SEQ ID NO: 608107 - DNA, 75 bp, synthetic construct
  source 1..75: mol_type = other DNA
ttgtacgcactccaccggcacagctggccgccgacgagcaggtgctggtctggggcagccgccatcctgagctga

SEQ ID NO: 608108 - DNA, 75 bp, synthetic construct
  source 1..75: mol_type = other DNA
ttgtgcgcaccccgcccaaacggctggccgctgacgagcaggtgctggtgtggggcagtcgttatcccgaactgg

SEQ ID NO: 608109 - DNA, 75 bp, synthetic construct
  source 1..75: mol_type = other DNA
acgacctgctattggtgacaacccatttgtcgtggtactgccagacgttgttatcgatgacgccagcgccgaccc

SEQ ID NO: 608110 - DNA, 75 bp, synthetic construct
  source 1..75: mol_type = other DNA
taaagtggttaaccctgagctgcacaagggaaaaccttttgctccgttgctggaaaaaaacagcaaatccggtgg

SEQ ID NO: 608111 - DNA, 75 bp, synthetic construct
  source 1..75: mol_type = other DNA
gaagtatatgcgggtattaacgccggaatttgtggcacgcttcccgaataagatcatcaatattcaccattcatt

SEQ ID NO: 608112 - DNA, 75 bp, synthetic construct
  source 1..75: mol_type = other DNA
actcgtcatatcggtggtggccacaagcaggcttaccgtattgttgacttcaaacgcaataaagacggtatcccg

SEQ ID NO: 608113 - DNA, 75 bp, synthetic construct
  source 1..75: mol_type = other DNA
tacccatgcgtccaagaacgccgttgaaaaccatttcgacacctcctatgaattagaatcacttcttgaacaacg

SEQ ID NO: 608114 - DNA, 75 bp, synthetic construct
  source 1..75: mol_type = other DNA
agcggtatttctccagaggagaagtcaatcaatcccgcagcgtcgctcatgtttgatgctaaatcagcactgtct

SEQ ID NO: 608115 - DNA, 75 bp, synthetic construct
  source 1..75: mol_type = other DNA
aagtggtttccggtgaatatacggtgagcagcactatgacgctgaccgacgctgagatcgccgaaggttacgtac

SEQ ID NO: 608116 - DNA, 75 bp, synthetic construct
  source 1..75: mol_type = other DNA
atgtcatcattgaatattaaacaggggagtgacgctcatttttctgagtatcctctggcgtcgcccagtaataat

SEQ ID NO: 608117 - DNA, 75 bp, synthetic construct
  source 1..75: mol_type = other DNA
cgttgatctgcagatccgcatcatgaatgacgaaaacttccagcatggtggcactaatatccactatctggagaa

SEQ ID NO: 608118 - DNA, 75 bp, synthetic construct
  source 1..75: mol_type = other DNA
atcaagactgtcgctgtgcactccagtgcggatcgcgatctaaaacacgtattactggcagatgaaacggtctgt

SEQ ID NO: 608119 - DNA, 75 bp, synthetic construct
  source 1..75: mol_type = other DNA
agcgccagcaccgggcattaccccggaactgcgtcgctacattggcgaacgttgtgccaaagcgtgtgttgatat

SEQ ID NO: 608120 - DNA, 75 bp, synthetic construct
  source 1..75: mol_type = other DNA
gtaaagagcagggtaagggtgcgagccgccgcctgcgtgccgctaacaaattcccggcaatcatctacggtggca

SEQ ID NO: 608121 - DNA, 75 bp, synthetic construct
  source 1..75: mol_type = other DNA
tcctctggcgtcgcccagtaataatgaaattgatttacttaatctaatcgcagttttatggcgggccaaaaaaac

SEQ ID NO: 608122 - DNA, 75 bp, synthetic construct
  source 1..75: mol_type = other DNA
ttataaaacgaattcagttgattggaagaggtgcatttggctttgttgaacacgttaaggtttacaacctcaaca

SEQ ID NO: 608123 - DNA, 75 bp, synthetic construct
  source 1..75: mol_type = other DNA
ctgctgaagcagtgaaggatgtcctgcgctctgaagaagtcagaagcgcactgaaacagcaactccggcagaatc

SEQ ID NO: 608124 - DNA, 75 bp, synthetic construct
  source 1..75: mol_type = other DNA
tctttccgttcgtccggcacatttagcacgtttacaattactgcatgatgaaggccgtttactgacggcaggacc

SEQ ID NO: 608125 - DNA, 75 bp, synthetic construct
  source 1..75: mol_type = other DNA
tactgatttgcttttattacgaataaccgttgggtctccgcttgtaactgatacttcaaatgctatcgttttacg

SEQ ID NO: 608126 - DNA, 75 bp, synthetic construct
  source 1..75: mol_type = other DNA
gtttatgattcctactcaccggcaaagggggcacatgaaagaccgtataaatatatagcaactaaggaaacgcct

SEQ ID NO: 608127 - DNA, 75 bp, synthetic construct
  source 1..75: mol_type = other DNA
gaaactattgctcaagctccttatatagaagcaaccccaatttatgaacctggtgcgccatacagtgaattgcct

SEQ ID NO: 608128 - DNA, 75 bp, synthetic construct
  source 1..75: mol_type = other DNA
cgtacctgacctgtgaagagaactggtcggatatttttgttaaaaaagcgccgcgtaacgtgctggagaagcgct

SEQ ID NO: 608129 - DNA, 75 bp, synthetic construct
  source 1..75: mol_type = other DNA
gtaatttactaagaaaattagatatcgatgatgcaaggtcgcaatatgggcgcgatgggttgcttaaccatccaa

SEQ ID NO: 608130 - DNA, 75 bp, synthetic construct
  source 1..75: mol_type = other DNA
ggcgaggggcaggaacaactcagtctgacgtaaaaagttataatgtatgggggattactggtagcggtcacccat

SEQ ID NO: 608131 - DNA, 75 bp, synthetic construct
  source 1..75: mol_type = other DNA
ctcgtaaacttacagattatgaagaacgcctgatgtttatgccgaaattcttcggccaatattggctttttgtgg

SEQ ID NO: 608132 - DNA, 75 bp, synthetic construct
  source 1..75: mol_type = other DNA
tttcatctgttagccgttgtggcgggcgttatcgtcgttttcaccctggcgggattgctcaatcgcgtgcgccaa

SEQ ID NO: 608133 - DNA, 75 bp, synthetic construct
  source 1..75: mol_type = other DNA
ttttaatgccgatgtcagtctggcccctgctgccgtcagtctctatctcgctggcggtatggcgttacagtggct

SEQ ID NO: 608134 - DNA, 75 bp, synthetic construct
  source 1..75: mol_type = other DNA
ctagtcgccataaacaactggatcttgatcctgctgagtttggctctggtttcagaattttacccactatagagg

SEQ ID NO: 608135 - DNA, 75 bp, synthetic construct
  source 1..75: mol_type = other DNA
ttggatgatgacgtactaagcgtaatcgcactcaatgatcaaagtatcattgcgcagatcgcgattaatccgtaa

SEQ ID NO: 608136 - DNA, 75 bp, synthetic construct
  source 1..75: mol_type = other DNA
ttcatgggtcgttaccggcgacggaacgtgttcttgatttatttgcccaaagcggtgctcagtggctggtgattc

SEQ ID NO: 608137 - DNA, 75 bp, synthetic construct
  source 1..75: mol_type = other DNA
atttcagcaggtgcattctggccggatattgtgctgcgcgagctgcgtctggcggtacgactgccgggccgcgtg

SEQ ID NO: 608138 - DNA, 75 bp, synthetic construct
  source 1..75: mol_type = other DNA
aaaaaaggttcagttctggaagccaccaacccaacacctttttatatcaatattaaagagcttattgttggtgga

SEQ ID NO: 608139 - DNA, 75 bp, synthetic construct
  source 1..75: mol_type = other DNA
tcagttaaaggtcagccggaggatgttgcagataaagtgacatggacaagaaaaggttcggttttggaggccgtt

SEQ ID NO: 608140 - DNA, 75 bp, synthetic construct
  source 1..75: mol_type = other DNA
gacatgccggacgaagtgcgcgccaaattatgcaaggcgtgtgcctttgcccgtcgtggcctgaccgatgcggac

SEQ ID NO: 608141 - DNA, 75 bp, synthetic construct
  source 1..75: mol_type = other DNA
gcctcgctgcatggcgctatacaaagcctgtgctggtcgctgagattaacacccttgctaaccagctgcagatta

SEQ ID NO: 608142 - DNA, 75 bp, synthetic construct
  source 1..75: mol_type = other DNA
gacatggcgagcttctgtggacaaggcctcgcggcatggcgctacacgaaacctggtttgatcgctgaaattaac

SEQ ID NO: 608143 - DNA, 75 bp, synthetic construct
  source 1..75: mol_type = other DNA
ggaaacaatgtaatgactgcacggcactaatgccatttgctttagaacattctacttgccttgcttgtggtagta

SEQ ID NO: 608144 - DNA, 75 bp, synthetic construct
  source 1..75: mol_type = other DNA
acggggccggcctgtgttgaagcctgcccgacaaaggcgttgcagtgcatggatgtcgagaaagtgcatcggcta

SEQ ID NO: 608145 - DNA, 75 bp, synthetic construct
  source 1..75: mol_type = other DNA
ctctacatcccggaagtttaccctgattattgcagtgaagggatgatggtgatggagcgtatttacggcataccc

SEQ ID NO: 608146 - DNA, 75 bp, synthetic construct
  source 1..75: mol_type = other DNA
aaccaatccgtgtcggggaagacggcatgatctgcctcaccgatatgtggaaagccagtggcaaaagtgatgctg

SEQ ID NO: 608147 - DNA, 75 bp, synthetic construct
  source 1..75: mol_type = other DNA
aagctagcctgaacgcggcatctacaagggctggggaatcaaaaattaaacataaaattaaccatgatgtttttg

SEQ ID NO: 608148 - DNA, 75 bp, synthetic construct
  source 1..75: mol_type = other DNA
ctggtcgcgcgaccaaaaagaaaaaagtttacgtacaagacaaactgcgcgaacagggcgcggagctgtggcgct

SEQ ID NO: 608149 - DNA, 75 bp, synthetic construct
  source 1..75: mol_type = other DNA
gagtggcagcgctacgtcaaagagggtgtgctgacgcggatcgatctcgcctggtcgcgcgatcaaaaagaaaaa

SEQ ID NO: 608150 - DNA, 75 bp, synthetic construct
  source 1..75: mol_type = other DNA
aaaagcggttcctgaccaagcagaagcgcagcctagcggcctttcaccgcgaagtcactcaggtgtgcaaggctc

SEQ ID NO: 608151 - DNA, 75 bp, synthetic construct
  source 1..75: mol_type = other DNA
gccgctggtgggcgataaagcgaagttgcagcattacgcggcaaccacgccaattgtcgatatgttgcgtttctc

SEQ ID NO: 608152 - DNA, 75 bp, synthetic construct
  source 1..75: mol_type = other DNA
cggcactggtgaaagaacttgtcgaactgctgtggctgaaaggcgatgaacctgtcaccgtcgagggcaaaacgt

SEQ ID NO: 608153 - DNA, 75 bp, synthetic construct
  source 1..75: mol_type = other DNA
agtattttgcgtccgctgacgccgcgcctttattccatcgcctcatcgcaggcggaagtcgagagtgaagtgcac

SEQ ID NO: 608154 - DNA, 75 bp, synthetic construct
  source 1..75: mol_type = other DNA
ttggcgataaagtaccggaacagtccatccagtggctgacagataacggttcagcgtatagagcgcatgaaacac

SEQ ID NO: 608155 - DNA, 75 bp, synthetic construct
  source 1..75: mol_type = other DNA
caattgcagttcatcgtttcacacgcaaaacaggtacgccgctggcggctttaattaagtcagttgcaaatggtt

SEQ ID NO: 608156 - DNA, 75 bp, synthetic construct
  source 1..75: mol_type = other DNA
ttaacgggtaaacgcctattcaatgctcagctttatccgcaggggaaaacggcaatgttcctcgcctttatgggg

SEQ ID NO: 608157 - DNA, 75 bp, synthetic construct
  source 1..75: mol_type = other DNA
aatgaaatccggcttgccgttcagttcgggcgattgtttgaggcatggctgaagtcagagcgcgagtctccggaa

SEQ ID NO: 608158 - DNA, 75 bp, synthetic construct
  source 1..75: mol_type = other DNA
caatgaaaaacatccgcatagtgcgttaggttatctctcaccaagggaatatcgacgtcagcgggtaacgtcaac

SEQ ID NO: 608159 - DNA, 75 bp, synthetic construct
  source 1..75: mol_type = other DNA
gcggaacggccaatccagtggctgactgataacggttcggcttatacagctcatgaaacacggcagttcgccaga

SEQ ID NO: 608160 - DNA, 75 bp, synthetic construct
  source 1..75: mol_type = other DNA
aaaactattaccccaggcgatagccgatccgctgaatccacaaagctggaaaggcgggcgagggcacgctgtttc

SEQ ID NO: 608161 - DNA, 75 bp, synthetic construct
  source 1..75: mol_type = other DNA
tcgacctgatgtgtccgttcgctaagggcggtaaagttggtctgtttggtggtgcgggtgtaggtaaaaccgtaa

SEQ ID NO: 608162 - DNA, 75 bp, synthetic construct
  source 1..75: mol_type = other DNA
caaacacaaaagattccgaagaaggcttaacacatatactctcagagcatttcgagaatgttaaaaccaaggttc

SEQ ID NO: 608163 - DNA, 75 bp, synthetic construct
  source 1..75: mol_type = other DNA
gaccgagttagggcaactgacgctggtgaacttcgccaacccggcggggctttccgccgagggcgacaacctcta

SEQ ID NO: 608164 - DNA, 75 bp, synthetic construct
  source 1..75: mol_type = other DNA
tcgcagttcgcctggacacaggttccggtgttcggcgcggtgatttttgcgcgatcctgccgtcaggctctattc

SEQ ID NO: 608165 - DNA, 75 bp, synthetic construct
  source 1..75: mol_type = other DNA
cgctgcgacaatgttcacaacgtctatgacacagtttcttatcgcgcgtgcaattcagggcaccagtatctgttt

SEQ ID NO: 608166 - DNA, 75 bp, synthetic construct
  source 1..75: mol_type = other DNA
atggtaatgagcgtctggtgctggaagttcagcagcagctcgggggcggtatcgtgcgtaccatcgcaatgggtt

SEQ ID NO: 608167 - DNA, 75 bp, synthetic construct
  source 1..75: mol_type = other DNA
cgccgatgcgatcctgcttgcgctctataccggcatgcgtattggtgaagtctgtacgttgaattgggattattg

SEQ ID NO: 608168 - DNA, 75 bp, synthetic construct
  source 1..75: mol_type = other DNA
acgatattactgctggcgaaatagagttgtatgccgcatcccttcgagaacaattgcgaccggcaaccatcaacc

SEQ ID NO: 608169 - DNA, 75 bp, synthetic construct
  source 1..75: mol_type = other DNA
attttttctgtaccatcccccgatcgcctcgaattgcgcgaaggctggcgaaaactattaccccaggcgatagcc

SEQ ID NO: 608170 - DNA, 75 bp, synthetic construct
  source 1..75: mol_type = other DNA
ggcgtgttgactaactcgcagggtttgccgttacaaccggaaatcgacgttccggcgggggcgactaacgttgcg

SEQ ID NO: 608171 - DNA, 75 bp, synthetic construct
  source 1..75: mol_type = other DNA
ggcgtactgaccaactcgcagggcttgccgttgcagccggaaatcgacgttccggcggggcgactaatgttgctt

SEQ ID NO: 608172 - DNA, 75 bp, synthetic construct
  source 1..75: mol_type = other DNA
tcgcaacagcaaaaactggtgggagtgtggctatcgagatcgatcgtagctctccgcgaccccgctcagtcatga

SEQ ID NO: 608173 - DNA, 75 bp, synthetic construct
  source 1..75: mol_type = other DNA
ctatcgcccaggttcataccgcgcgattgaaatcgaatggtaaagaggtggtgattaaagtcatccgcccggata

SEQ ID NO: 608174 - DNA, 75 bp, synthetic construct
  source 1..75: mol_type = other DNA
agacacaaaaggcatgagcaattttccctgctggcttggcatcgaattattccggctgagacgcaagagtttctt

SEQ ID NO: 608175 - DNA, 75 bp, synthetic construct
  source 1..75: mol_type = other DNA
cgcctgaacaaaaggcgaaaggtaaggactcccagccacagcagaaggagaagaaggtcgatgttacttctccgg

SEQ ID NO: 608176 - DNA, 75 bp, synthetic construct
  source 1..75: mol_type = other DNA
atcatattttcatgcagcattggcttaatatttatggtcgttggtaaaaccttccccgaaatgcaaaaggttctg

SEQ ID NO: 608177 - DNA, 75 bp, synthetic construct
  source 1..75: mol_type = other DNA
atttcgagataacaaattttttacaacttgtggctacctggagcctgctgatcattctttcatgtggcgtcggtt

SEQ ID NO: 608178 - DNA, 75 bp, synthetic construct
  source 1..75: mol_type = other DNA
tttcgatgggaaaatacttaacgagcatgacgatgtaattgttaaattcccaactgtaagcaaagaaattcccct

SEQ ID NO: 608179 - DNA, 75 bp, synthetic construct
  source 1..75: mol_type = other DNA
ctattggtattcctcacgttctggaaatatcaccgacggatgctgccgcctttggtcagctttttgccgactacg

SEQ ID NO: 608180 - DNA, 75 bp, synthetic construct
  source 1..75: mol_type = other DNA
atgggttttcaacgacgggtcgatggtacatatattaaagctcccggagccgcagttgaggcatggctaaatgaa

SEQ ID NO: 608181 - DNA, 75 bp, synthetic construct
  source 1..75: mol_type = other DNA
tactgaaatcatgccagcaacaactgacacagccctcaaaccatgcctgcgccgatctactgcctgccatagtag

SEQ ID NO: 608182 - DNA, 75 bp, synthetic construct
  source 1..75: mol_type = other DNA
gacccgattatgccaggtcgcaaagttcgtgatttcagcggagtgaaggcaattgtactggcggagcagctttca

SEQ ID NO: 608183 - DNA, 75 bp, synthetic construct
  source 1..75: mol_type = other DNA
tgctggcttcacaatgcggatagcaccggagattgagcgtggaaatttccacctgctactcacaaccactgaccc

SEQ ID NO: 608184 - DNA, 75 bp, synthetic construct
  source 1..75: mol_type = other DNA
ataatgaagagtaccccgtgcgttgtatcacaaacaacatctgccggaagcagggaacctgtcacggaactgatc

SEQ ID NO: 608185 - DNA, 75 bp, synthetic construct
  source 1..75: mol_type = other DNA
gctctgaacgaatactgccgcgatggctgggtggagatcgacaataacctgtgtgaaaacgccctccgggtagtt

SEQ ID NO: 608186 - DNA, 75 bp, synthetic construct
  source 1..75: mol_type = other DNA
gatggcggtatttttcctgttagtcggtctggaagttaaacgtgaactgatgcaaggatcgctagccagcttacg

SEQ ID NO: 608187 - DNA, 75 bp, synthetic construct
  source 1..75: mol_type = other DNA
tggcatatctgattttgccgttgtttgcgtttgccaatgcgggggtatctctgcaaggcgtgacgctggatggcc

SEQ ID NO: 608188 - DNA, 75 bp, synthetic construct
  source 1..75: mol_type = other DNA
acatttcagcagggttattatttctataaacctgttacatacatcgacctggtcaaaattatcctttctaaaccg

SEQ ID NO: 608189 - DNA, 75 bp, synthetic construct
  source 1..75: mol_type = other DNA
gaactgagacagatagttttccgaactattgagtccctcccggaagatttgcgcatggcaataaccttgcgggag

SEQ ID NO: 608190 - DNA, 75 bp, synthetic construct
  source 1..75: mol_type = other DNA
attgaagctgaaaacttcgaaagtggcggcgcgttgaaagaaatttcgaaccctgaaaacttaatgttgtcagaa

SEQ ID NO: 608191 - DNA, 75 bp, synthetic construct
  source 1..75: mol_type = other DNA
cacaacaacttgatgcctatgtaagcccaatccttgaaggccgtagtgaagaagatttgctcacagagttgatgc

SEQ ID NO: 608192 - DNA, 75 bp, synthetic construct
  source 1..75: mol_type = other DNA
gaagtattagcccgatggaaacatcctgttgcaggctatatctcgccagtcgcatttatcccactggcagaaaaa

SEQ ID NO: 608193 - DNA, 75 bp, synthetic construct
  source 1..75: mol_type = other DNA
aaagccgcgagaagatagaaaagaagatcgcacgggcagaaacgcgtataaccgagctccagaacaggcttggtg

SEQ ID NO: 608194 - DNA, 75 bp, synthetic construct
  source 1..75: mol_type = other DNA
gttaaacaggagatgctggcggtcgcaacccgggaaggatttgatgtcagtaagtttatctgggtacagcaaccc

SEQ ID NO: 608195 - DNA, 75 bp, synthetic construct
  source 1..75: mol_type = other DNA
aaccaattgcacggcggcccggaagggttcgacaaacgtcgctggcagattgtgaaccagaacgatcgtcaggtg
